United States Patent Application Publication US 2016/0319361 A1 - sequence listing, part 14

SEQ ID NO: 363562 - DNA, 30 bp, Artificial Sequence
  Synthetic oligonucleotide
agacatcttgccgagcagggtgcgagtaat

SEQ ID NO: 363563 - DNA, 30 bp, Artificial Sequence
  Synthetic oligonucleotide
cggccccgttacagacgtacttggagtaat

SEQ ID NO: 363564 - DNA, 30 bp, Artificial Sequence
  Synthetic oligonucleotide
cccggtttcaggcgcgggtgcactagtaat

SEQ ID NO: 363565 - DNA, 30 bp, Artificial Sequence
  Synthetic oligonucleotide
caacgaccacggagagattactgtagtaat

SEQ ID NO: 363566 - DNA, 30 bp, Artificial Sequence
  Synthetic oligonucleotide
tccaccgtgagtcctgaactccaacgtaat

SEQ ID NO: 363567 - DNA, 30 bp, Artificial Sequence
  Synthetic oligonucleotide
ccgcgggaagagatgttgcagagacgtaat

SEQ ID NO: 363568 - DNA, 30 bp, Artificial Sequence
  Synthetic oligonucleotide
ttgctggcaaaagttctttaactacgtaat

SEQ ID NO: 363569 - DNA, 30 bp, Artificial Sequence
  Synthetic oligonucleotide
ttatgctcgggatcccttgaggatcgtaat

SEQ ID NO: 363570 - DNA, 30 bp, Artificial Sequence
  Synthetic oligonucleotide
gcaaagaactcgcgtactcgcgcgggtaat

SEQ ID NO: 363571 - DNA, 30 bp, Artificial Sequence
  Synthetic oligonucleotide
agagtttctatcacaatatgtgcgggtaat

SEQ ID NO: 363572 - DNA, 30 bp, Artificial Sequence
  Synthetic oligonucleotide
acttatggcctttccgggaactcgggtaat

SEQ ID NO: 363573 - DNA, 30 bp, Artificial Sequence
  Synthetic oligonucleotide
agtcttctctaatgtacactaaggggtaat

SEQ ID NO: 363574 - DNA, 30 bp, Artificial Sequence
  Synthetic oligonucleotide
tgcacattccctcgattttaatctggtaat

SEQ ID NO: 363575 - DNA, 30 bp, Artificial Sequence
  Synthetic oligonucleotide
gatgtgcgccggcgggcctctggtggtaat

SEQ ID NO: 363576 - DNA, 30 bp, Artificial Sequence
  Synthetic oligonucleotide
ccagtacggatcgtatggtcatttggtaat

SEQ ID NO: 363577 - DNA, 30 bp, Artificial Sequence
  Synthetic oligonucleotide
catctcagtttctggtcgactaaatgtaat

SEQ ID NO: 363578 - DNA, 30 bp, Artificial Sequence
  Synthetic oligonucleotide
gagtacgatcggaagtaataacgatgtaat

SEQ ID NO: 363579 - DNA, 30 bp, Artificial Sequence
  Synthetic oligonucleotide
ggcgcatttgccaccctgagcctatgtaat

SEQ ID NO: 363580 - DNA, 30 bp, Artificial Sequence
  Synthetic oligonucleotide
cttgcgccctaccctgaccacaactgtaat

SEQ ID NO: 363581 - DNA, 30 bp, Artificial Sequence
  Synthetic oligonucleotide
tacagatgaatccaggtttggttctgtaat

SEQ ID NO: 363582 - DNA, 30 bp, Artificial Sequence
  Synthetic oligonucleotide
gaagctccaaaaatacagccttcgtgtaat

SEQ ID NO: 363583 - DNA, 30 bp, Artificial Sequence
  Synthetic oligonucleotide
ctagggactgctttttagtcctggtgtaat

SEQ ID NO: 363584 - DNA, 30 bp, Artificial Sequence
  Synthetic oligonucleotide
tctggattgggatgttgaacgatgtgtaat

SEQ ID NO: 363585 - DNA, 30 bp, Artificial Sequence
  Synthetic oligonucleotide
ggcaggacctgtagagtcactatgtgtaat

SEQ ID NO: 363586 - DNA, 30 bp, Artificial Sequence
  Synthetic oligonucleotide
gggtaggaaatctgacgacagtattgtaat

SEQ ID NO: 363587 - DNA, 30 bp, Artificial Sequence
  Synthetic oligonucleotide
tcgggttaaatttgagttgcgtattgtaat

SEQ ID NO: 363588 - DNA, 30 bp, Artificial Sequence
  Synthetic oligonucleotide
tggaaaagcgcgaagcgctcacacattaat

SEQ ID NO: 363589 - DNA, 30 bp, Artificial Sequence
  Synthetic oligonucleotide
ctatgcaactgctgtaggctgaccattaat

SEQ ID NO: 363590 - DNA, 30 bp, Artificial Sequence
  Synthetic oligonucleotide
acatggcaggtttgatctcccagtattaat

SEQ ID NO: 363591 - DNA, 30 bp, Artificial Sequence
  Synthetic oligonucleotide
gggatgataacaatctattgcgttattaat

SEQ ID NO: 363592 - DNA, 30 bp, Artificial Sequence
  Synthetic oligonucleotide
cagttaggcggacagaatatcgttattaat

SEQ ID NO: 363593 - DNA, 30 bp, Artificial Sequence
  Synthetic oligonucleotide
tcaaatgtgaacgtaaactcattccttaat

SEQ ID NO: 363594 - DNA, 30 bp, Artificial Sequence
  Synthetic oligonucleotide
gaggtgttagcttgaaatttttagcttaat

SEQ ID NO: 363595 - DNA, 30 bp, Artificial Sequence
  Synthetic oligonucleotide
tagaagcgaggctctcgttacctgcttaat

SEQ ID NO: 363596 - DNA, 30 bp, Artificial Sequence
  Synthetic oligonucleotide
ccggatccttggctcctagggcacgttaat

SEQ ID NO: 363597 - DNA, 30 bp, Artificial Sequence
  Synthetic oligonucleotide
agcagagagctatgccacatagccgttaat

SEQ ID NO: 363598 - DNA, 30 bp, Artificial Sequence
  Synthetic oligonucleotide
gagaggtatgagaagacacagcgcgttaat

SEQ ID NO: 363599 - DNA, 30 bp, Artificial Sequence
  Synthetic oligonucleotide
taccttcccaaccagattgatggcgttaat

SEQ ID NO: 363600 - DNA, 30 bp, Artificial Sequence
  Synthetic oligonucleotide
ctcgcggcgacagttctagtctgcgttaat

SEQ ID NO: 363601 - DNA, 30 bp, Artificial Sequence
  Synthetic oligonucleotide
aataacaccggaacacggtttgaggttaat

SEQ ID NO: 363602 - DNA, 30 bp, Artificial Sequence
  Synthetic oligonucleotide
cgtaggtgccctgcatagctttcggttaat

SEQ ID NO: 363603 - DNA, 30 bp, Artificial Sequence
  Synthetic oligonucleotide
tagtgcggatctgtacccgcactggttaat

SEQ ID NO: 363604 - DNA, 30 bp, Artificial Sequence
  Synthetic oligonucleotide
cccaatcaacgtgaagattgactggttaat

SEQ ID NO: 363605 - DNA, 30 bp, Artificial Sequence
  Synthetic oligonucleotide
tcccgatcaaccaatgacgatcatgttaat

SEQ ID NO: 363606 - DNA, 29 bp, Artificial Sequence
  Synthetic oligonucleotide
ggcgccggtgtgtatgtgtcggtgttaat

SEQ ID NO: 363607 - DNA, 30 bp, Artificial Sequence
  Synthetic oligonucleotide
tagctcacagaccaggcatggattgttaat

SEQ ID NO: 363608 - DNA, 30 bp, Artificial Sequence
  Synthetic oligonucleotide
aaggcggggctacctggttgttaatttaat

SEQ ID NO: 363609 - DNA, 30 bp, Artificial Sequence
  Synthetic oligonucleotide
tctcaaagtaatcccccgtattgatttaat

SEQ ID NO: 363610 - DNA, 30 bp, Artificial Sequence
  Synthetic oligonucleotide
acttggatttagcgtgttcttttatttaat

SEQ ID NO: 363611 - DNA, 30 bp, Artificial Sequence
  Synthetic oligonucleotide
gtaggtacccacacttggcggccgtttaat

SEQ ID NO: 363612 - DNA, 30 bp, Artificial Sequence
  Synthetic oligonucleotide
cttcaagtccactggtgcttatggtttaat

SEQ ID NO: 363613 - DNA, 30 bp, Artificial Sequence
  Synthetic oligonucleotide
tcctgttaaaccgacgctatagattttaat

SEQ ID NO: 363614 - DNA, 30 bp, Artificial Sequence
  Synthetic oligonucleotide
gtatgcatttctttataataggattttaat

SEQ ID NO: 363615 - DNA, 30 bp, Artificial Sequence
  Synthetic oligonucleotide
tattccgctttgcatccagctacttttaat

SEQ ID NO: 363616 - DNA, 30 bp, Artificial Sequence
  Synthetic oligonucleotide
gcggctaatatctaacgtcaataaaaacat

SEQ ID NO: 363617 - DNA, 30 bp, Artificial Sequence
  Synthetic oligonucleotide
ctcccggtgaatgctatagattagaaacat

SEQ ID NO: 363618 - DNA, 30 bp, Artificial Sequence
  Synthetic oligonucleotide
ctgctgttggatgacaggtctcctaaacat

SEQ ID NO: 363619 - DNA, 30 bp, Artificial Sequence
  Synthetic oligonucleotide
tagtagggtgagattgtgatatgtaaacat

SEQ ID NO: 363620 - DNA, 30 bp, Artificial Sequence
  Synthetic oligonucleotide
gcaacccgttgcgtacatgctcttaaacat

SEQ ID NO: 363621 - DNA, 30 bp, Artificial Sequence
  Synthetic oligonucleotide
tcggggatcaggttcctttccgaacaacat

SEQ ID NO: 363622 - DNA, 30 bp, Artificial Sequence
  Synthetic oligonucleotide
aacttgtgcaccatgatggtcctacaacat

SEQ ID NO: 363623 - DNA, 30 bp, Artificial Sequence
  Synthetic oligonucleotide
caaaaagattgcgaaattcatgcgcaacat

SEQ ID NO: 363624 - DNA, 30 bp, Artificial Sequence
  Synthetic oligonucleotide
ctcaggaagtacggatcaatcaggcaacat

SEQ ID NO: 363625 - DNA, 30 bp, Artificial Sequence
  Synthetic oligonucleotide
gcgcagcactatagatttggcatgcaacat

SEQ ID NO: 363626 - DNA, 30 bp, Artificial Sequence
  Synthetic oligonucleotide
gccaagttacctctatttctgcatcaacat

SEQ ID NO: 363627 - DNA, 30 bp, Artificial Sequence
  Synthetic oligonucleotide
ctttaggaccgtaagcttacctctcaacat

SEQ ID NO: 363628 - DNA, 30 bp, Artificial Sequence
  Synthetic oligonucleotide
ggaagctatgacgactacaacagtcaacat

SEQ ID NO: 363629 - DNA, 30 bp, Artificial Sequence
  Synthetic oligonucleotide
ccatatacgtcccgaattgtacccgaacat

SEQ ID NO: 363630 - DNA, 30 bp, Artificial Sequence
  Synthetic oligonucleotide
gtacgggttccgcatgagctttaggaacat

SEQ ID NO: 363631 - DNA, 30 bp, Artificial Sequence
  Synthetic oligonucleotide
ttaacaaaatttctcgagcatacggaacat

SEQ ID NO: 363632 - DNA, 30 bp, Artificial Sequence
  Synthetic oligonucleotide
gcaatcattatctaacaacatccggaacat

SEQ ID NO: 363633 - DNA, 30 bp, Artificial Sequence
  Synthetic oligonucleotide
tattccagggtctctccagtgctggaacat

SEQ ID NO: 363634 - DNA, 30 bp, Artificial Sequence
  Synthetic oligonucleotide
ccgcacggcatgaactcggacggtgaacat

SEQ ID NO: 363635 - DNA, 30 bp, Artificial Sequence
  Synthetic oligonucleotide
agttgtatgtatgcctcacaggttgaacat

SEQ ID NO: 363636 - DNA, 30 bp, Artificial Sequence
  Synthetic oligonucleotide
gccacggcgttagggtttgtcggttaacat

SEQ ID NO: 363637 - DNA, 30 bp, Artificial Sequence
  Synthetic oligonucleotide
acacccgcgtccaaacgtcggggttaacat

SEQ ID NO: 363638 - DNA, 30 bp, Artificial Sequence
  Synthetic oligonucleotide
gcgtttaaaccgactagaggcaaaacacat

SEQ ID NO: 363639 - DNA, 30 bp, Artificial Sequence
  Synthetic oligonucleotide
gttgtaacacagtttatcggacagacacat

SEQ ID NO: 363640 - DNA, 30 bp, Artificial Sequence
  Synthetic oligonucleotide
ttatcggtatataaattccgtgatacacat

SEQ ID NO: 363641 - DNA, 30 bp, Artificial Sequence
  Synthetic oligonucleotide
aagagtgtaacttactgtaaccgtacacat

SEQ ID NO: 363642 - DNA, 30 bp, Artificial Sequence
  Synthetic oligonucleotide
aatgggctcacacctcctgcatgtacacat

SEQ ID NO: 363643 - DNA, 30 bp, Artificial Sequence
  Synthetic oligonucleotide
atacggcgggttgcattctgtgttacacat

SEQ ID NO: 363644 - DNA, 30 bp, Artificial Sequence
  Synthetic oligonucleotide
atctaatattggatctccggattaccacat

SEQ ID NO: 363645 - DNA, 30 bp, Artificial Sequence
  Synthetic oligonucleotide
tggcagtacacaacaccgttgcgcccacat

SEQ ID NO: 363646 - DNA, 30 bp, Artificial Sequence
  Synthetic oligonucleotide
cacgtgcagcccatcgcagcaaagccacat

SEQ ID NO: 363647 - DNA, 30 bp, Artificial Sequence
  Synthetic oligonucleotide
tgatgtgcttgtaagtcaggagcgccacat

SEQ ID NO: 363648 - DNA, 30 bp, Artificial Sequence
  Synthetic oligonucleotide
aataggtttttttccgtaatccggccacat

SEQ ID NO: 363649 - DNA, 30 bp, Artificial Sequence
  Synthetic oligonucleotide
gatcggttaagtgctacattattgccacat

SEQ ID NO: 363650 - DNA, 30 bp, Artificial Sequence
  Synthetic oligonucleotide
tagacgaccggtaatccgtgagatccacat

SEQ ID NO: 363651 - DNA, 30 bp, Artificial Sequence
  Synthetic oligonucleotide
acaccctggatactatcgatgattccacat

SEQ ID NO: 363652 - DNA, 30 bp, Artificial Sequence
  Synthetic oligonucleotide
tcatagtaacaaatcggctaagaagcacat

SEQ ID NO: 363653 - DNA, 30 bp, Artificial Sequence
  Synthetic oligonucleotide
atgcatcagtgataccatggggtagcacat

SEQ ID NO: 363654 - DNA, 30 bp, Artificial Sequence
  Synthetic oligonucleotide
cggccacagaatcgttaaagcttcgcacat

SEQ ID NO: 363655 - DNA, 30 bp, Artificial Sequence
  Synthetic oligonucleotide
agcgatgtcaggaccccgcgtttcgcacat

SEQ ID NO: 363656 - DNA, 30 bp, Artificial Sequence
  Synthetic oligonucleotide
cccttctacgaagtgcttctttaggcacat

SEQ ID NO: 363657 - DNA, 30 bp, Artificial Sequence
  Synthetic oligonucleotide
gactatgcatgctgttcgttagcggcacat

SEQ ID NO: 363658 - DNA, 30 bp, Artificial Sequence
  Synthetic oligonucleotide
accggcgagcatggggcaactgctgcacat

SEQ ID NO: 363659 - DNA, 30 bp, Artificial Sequence
  Synthetic oligonucleotide
ggaggtacgttagtttgagtctttgcacat

SEQ ID NO: 363660 - DNA, 30 bp, Artificial Sequence
  Synthetic oligonucleotide
tatgcccaataacgcgttccacactcacat

SEQ ID NO: 363661 - DNA, 30 bp, Artificial Sequence
  Synthetic oligonucleotide
atatcgtaactggtatgttctcactcacat

SEQ ID NO: 363662 - DNA, 30 bp, Artificial Sequence
  Synthetic oligonucleotide
cataagggtcgacataacttttgctcacat

SEQ ID NO: 363663 - DNA, 30 bp, Artificial Sequence
  Synthetic oligonucleotide
gcttgtctgatgactggggatctgtcacat

SEQ ID NO: 363664 - DNA, 30 bp, Artificial Sequence
  Synthetic oligonucleotide
cccttcagggcgctttacacttattcacat

SEQ ID NO: 363665 - DNA, 30 bp, Artificial Sequence
  Synthetic oligonucleotide
gggtggacgactgggagggtaacttcacat

SEQ ID NO: 363666 - DNA, 30 bp, Artificial Sequence
  Synthetic oligonucleotide
tacgtaggttcaataggaagcctttcacat

SEQ ID NO: 363667 - DNA, 30 bp, Artificial Sequence
  Synthetic oligonucleotide
caagctcgcgtaaaggactcctgaagacat

SEQ ID NO: 363668 - DNA, 30 bp, Artificial Sequence
  Synthetic oligonucleotide
tcctcgtacccagatgtaaatgccagacat

SEQ ID NO: 363669 - DNA, 30 bp, Artificial Sequence
  Synthetic oligonucleotide
ggcccccacggtgaaattctcatcagacat

SEQ ID NO: 363670 - DNA, 30 bp, Artificial Sequence
  Synthetic oligonucleotide
taggccattgtaggagtaggtcagagacat

SEQ ID NO: 363671 - DNA, 30 bp, Artificial Sequence
  Synthetic oligonucleotide
agtaactgctgctctaatgtcgcacgacat

SEQ ID NO: 363672 - DNA, 30 bp, Artificial Sequence
  Synthetic oligonucleotide
tcaatatcaggtttctatgctaagcgacat

SEQ ID NO: 363673 - DNA, 30 bp, Artificial Sequence
  Synthetic oligonucleotide
gttggggtaataggtgctacttatggacat

SEQ ID NO: 363674 - DNA, 30 bp, Artificial Sequence
  Synthetic oligonucleotide
ttcataaaagggtttcctattaactgacat

SEQ ID NO: 363675 - DNA, 30 bp, Artificial Sequence
  Synthetic oligonucleotide
gaattgataaggacttttacgatctgacat

SEQ ID NO: 363676 - DNA, 30 bp, Artificial Sequence
  Synthetic oligonucleotide
aatagcgggaatgagccgcgcgagtgacat

SEQ ID NO: 363677 - DNA, 30 bp, Artificial Sequence
  Synthetic oligonucleotide
ttaattggggcttaatccataaccatacat

SEQ ID NO: 363678 - DNA, 30 bp, Artificial Sequence
  Synthetic oligonucleotide
aggaataggaaaagctatgtattcatacat

SEQ ID NO: 363679 - DNA, 30 bp, Artificial Sequence
  Synthetic oligonucleotide
aaagtattcagtccaaaaatacagatacat

SEQ ID NO: 363680 - DNA, 30 bp, Artificial Sequence
  Synthetic oligonucleotide
caggcatgtgcgcattttgacgagatacat

SEQ ID NO: 363681 - DNA, 30 bp, Artificial Sequence
  Synthetic oligonucleotide
aaccagccatagcgcaccgtgtagatacat

SEQ ID NO: 363682 - DNA, 30 bp, Artificial Sequence
  Synthetic oligonucleotide
accatggcaagaccatcatcgtcgatacat

SEQ ID NO: 363683 - DNA, 30 bp, Artificial Sequence
  Synthetic oligonucleotide
gagtacttagcgcaattcttgactatacat

SEQ ID NO: 363684 - DNA, 30 bp, Artificial Sequence
  Synthetic oligonucleotide
ggtgcagtgggttgggaataggctatacat

SEQ ID NO: 363685 - DNA, 30 bp, Artificial Sequence
  Synthetic oligonucleotide
cagttggttagcgaaggggggtcactacat

SEQ ID NO: 363686 - DNA, 30 bp, Artificial Sequence
  Synthetic oligonucleotide
aaagtgacagcgcggtggaagagactacat

SEQ ID NO: 363687 - DNA, 30 bp, Artificial Sequence
  Synthetic oligonucleotide
ctagggttgaccattcgacctgtactacat

SEQ ID NO: 363688 - DNA, 30 bp, Artificial Sequence
  Synthetic oligonucleotide
ttcaagtccaagcaataggaattactacat

SEQ ID NO: 363689 - DNA, 30 bp, Artificial Sequence
  Synthetic oligonucleotide
taacgataagcactctcagcaaccctacat

SEQ ID NO: 363690 - DNA, 30 bp, Artificial Sequence
  Synthetic oligonucleotide
tcccgggtaaccagaacggggaatctacat

SEQ ID NO: 363691 - DNA, 30 bp, Artificial Sequence
  Synthetic oligonucleotide
tacgtgctctagacggtcgactcagtacat

SEQ ID NO: 363692 - DNA, 30 bp, Artificial Sequence
  Synthetic oligonucleotide
gatgggtatataatccacggggacgtacat

SEQ ID NO: 363693 - DNA, 30 bp, Artificial Sequence
  Synthetic oligonucleotide
tccgggccaatctacggcctaggcgtacat

SEQ ID NO: 363694 - DNA, 30 bp, Artificial Sequence
  Synthetic oligonucleotide
tgaatgatcgggctgccctaaggggtacat

SEQ ID NO: 363695 - DNA, 30 bp, Artificial Sequence
  Synthetic oligonucleotide
gtgggcgtcaagctggagccttgggtacat

SEQ ID NO: 363696 - DNA, 30 bp, Artificial Sequence
  Synthetic oligonucleotide
accacctaatctctgctgtgcatggtacat

SEQ ID NO: 363697 - DNA, 30 bp, Artificial Sequence
  Synthetic oligonucleotide
agaagcgagctaatttcgtcgtctgtacat

SEQ ID NO: 363698 - DNA, 30 bp, Artificial Sequence
  Synthetic oligonucleotide
ctgagtactagggttcactacctattacat

SEQ ID NO: 363699 - DNA, 30 bp, Artificial Sequence
  Synthetic oligonucleotide
ttacgacaacgttgggattagctattacat

SEQ ID NO: 363700 - DNA, 30 bp, Artificial Sequence
  Synthetic oligonucleotide
cagcggcattgcaatctaggcaatttacat

SEQ ID NO: 363701 - DNA, 30 bp, Artificial Sequence
  Synthetic oligonucleotide
gttgtgatgtcgtaataaatacatttacat

SEQ ID NO: 363702 - DNA, 30 bp, Artificial Sequence
  Synthetic oligonucleotide
aggttaatggaactcctggatcatttacat

SEQ ID NO: 363703 - DNA, 30 bp, Artificial Sequence
  Synthetic oligonucleotide
agcggctccagagtagaacggcttttacat

SEQ ID NO: 363704 - DNA, 30 bp, Artificial Sequence
  Synthetic oligonucleotide
cagaatattgtgtattctcggaaaaaccat

SEQ ID NO: 363705 - DNA, 30 bp, Artificial Sequence
  Synthetic oligonucleotide
tgggttcggagcagtttagaaacaaaccat

SEQ ID NO: 363706 - DNA, 30 bp, Artificial Sequence
  Synthetic oligonucleotide
taatgattgtggtaagtttcaccaaaccat

SEQ ID NO: 363707 - DNA, 30 bp, Artificial Sequence
  Synthetic oligonucleotide
gtattaagtacgagtatctaaagaaaccat

SEQ ID NO: 363708 - DNA, 30 bp, Artificial Sequence
  Synthetic oligonucleotide
ctaatccccttcctgacgtgactcaaccat

SEQ ID NO: 363709 - DNA, 30 bp, Artificial Sequence
  Synthetic oligonucleotide
gttagtgtagtttgtcttagttgtaaccat

SEQ ID NO: 363710 - DNA, 30 bp, Artificial Sequence
  Synthetic oligonucleotide
atccggtaatcgagctctattattaaccat

SEQ ID NO: 363711 - DNA, 30 bp, Artificial Sequence
  Synthetic oligonucleotide
cgcgtttttgtgtcaagaaaagaacaccat

SEQ ID NO: 363712 - DNA, 30 bp, Artificial Sequence
  Synthetic oligonucleotide
catcctggtacattatcgccgtgacaccat

SEQ ID NO: 363713 - DNA, 30 bp, Artificial Sequence
  Synthetic oligonucleotide
catctgacccttcgtgtaccgtaccaccat

SEQ ID NO: 363714 - DNA, 30 bp, Artificial Sequence
  Synthetic oligonucleotide
tcctagaatgggtgacttggactgcaccat

SEQ ID NO: 363715 - DNA, 30 bp, Artificial Sequence
  Synthetic oligonucleotide
ggaaatgatttctaactgtccgtgcaccat

SEQ ID NO: 363716 - DNA, 30 bp, Artificial Sequence
  Synthetic oligonucleotide
gagcgacgaaatatgtgggttcctcaccat

SEQ ID NO: 363717 - DNA, 30 bp, Artificial Sequence
  Synthetic oligonucleotide
tgttcgggagcaggcacttgataagaccat

SEQ ID NO: 363718 - DNA, 30 bp, Artificial Sequence
  Synthetic oligonucleotide
gcgaacaattcgttgggggttccagaccat

SEQ ID NO: 363719 - DNA, 30 bp, Artificial Sequence
  Synthetic oligonucleotide
tctggataaattcggtgggaactagaccat

SEQ ID NO: 363720 - DNA, 31 bp, Artificial Sequence
  Synthetic oligonucleotide
tgaaccataaacgccagaaatcggcgaccat

SEQ ID NO: 363721 - DNA, 30 bp, Artificial Sequence
  Synthetic oligonucleotide
atatgacgacgcggaaaagatgtggaccat

SEQ ID NO: 363722 - DNA, 30 bp, Artificial Sequence
  Synthetic oligonucleotide
ttcaaggcaaaatcgcaatattttgaccat

SEQ ID NO: 363723 - DNA, 30 bp, Artificial Sequence
  Synthetic oligonucleotide
gtatgagaataactatattgttaataccat

SEQ ID NO: 363724 - DNA, 30 bp, Artificial Sequence
  Synthetic oligonucleotide
attcatgtaatagcgaatggccagtaccat

SEQ ID NO: 363725 - DNA, 30 bp, Artificial Sequence
  Synthetic oligonucleotide
cgcctttgggctggcgagaagcagtaccat

SEQ ID NO: 363726 - DNA, 30 bp, Artificial Sequence
  Synthetic oligonucleotide
atgacaaagctccggagggcgcagtaccat

SEQ ID NO: 363727 - DNA, 30 bp, Artificial Sequence
  Synthetic oligonucleotide
tgagagttctatctgcggctggcttaccat

SEQ ID NO: 363728 - DNA, 30 bp, Artificial Sequence
  Synthetic oligonucleotide
tcgcggtgaatatttctactaaaaacccat

SEQ ID NO: 363729 - DNA, 30 bp, Artificial Sequence
  Synthetic oligonucleotide
tctgcagacgatttaatgagggcaacccat

SEQ ID NO: 363730 - DNA, 30 bp, Artificial Sequence
  Synthetic oligonucleotide
aactttggttcggaaatggtctcaacccat

SEQ ID NO: 363731 - DNA, 30 bp, Artificial Sequence
  Synthetic oligonucleotide
ataacttacatcggctgtgaaagaacccat

SEQ ID NO: 363732 - DNA, 30 bp, Artificial Sequence
  Synthetic oligonucleotide
ctaataggttcttgcctggggagaacccat

SEQ ID NO: 363733 - DNA, 30 bp, Artificial Sequence
  Synthetic oligonucleotide
ttgtgtcccactgatcccgtcctaacccat

SEQ ID NO: 363734 - DNA, 30 bp, Artificial Sequence
  Synthetic oligonucleotide
tgaccgctaacattgttgattgacacccat

SEQ ID NO: 363735 - DNA, 30 bp, Artificial Sequence
  Synthetic oligonucleotide
atgtggtgtggagccggagaagccacccat

SEQ ID NO: 363736 - DNA, 30 bp, Artificial Sequence
  Synthetic oligonucleotide
agctgattaatacagtagcggtgcacccat

SEQ ID NO: 363737 - DNA, 30 bp, Artificial Sequence
  Synthetic oligonucleotide
acgccagacccacatcagcggtggacccat

SEQ ID NO: 363738 - DNA, 30 bp, Artificial Sequence
  Synthetic oligonucleotide
cattaaggatgtcgaatatctaatacccat

SEQ ID NO: 363739 - DNA, 30 bp, Artificial Sequence
  Synthetic oligonucleotide
cgggcctcaattcgccaacactgaccccat

SEQ ID NO: 363740 - DNA, 30 bp, Artificial Sequence
  Synthetic oligonucleotide
aaacccataaattcgtggatggacccccat

SEQ ID NO: 363741 - DNA, 30 bp, Artificial Sequence
  Synthetic oligonucleotide
ggcaagtacctagggctaattatgccccat

SEQ ID NO: 363742 - DNA, 30 bp, Artificial Sequence
  Synthetic oligonucleotide
acaacccgcatacaacgctagcatccccat

SEQ ID NO: 363743 - DNA, 30 bp, Artificial Sequence
  Synthetic oligonucleotide
gtactgcaattgagggcataactagcccat

SEQ ID NO: 363744 - DNA, 30 bp, Artificial Sequence
  Synthetic oligonucleotide
tgagaggccggaacgggagcgcccgcccat

SEQ ID NO: 363745 - DNA, 30 bp, Artificial Sequence
  Synthetic oligonucleotide
ttaatgggcgaaacctggctctccgcccat

SEQ ID NO: 363746 - DNA, 30 bp, Artificial Sequence
  Synthetic oligonucleotide
gtgcatagcttaaactattccagcgcccat

SEQ ID NO: 363747 - DNA, 30 bp, Artificial Sequence
  Synthetic oligonucleotide
gaaatggccagatatctggcgctcgcccat

SEQ ID NO: 363748 - DNA, 30 bp, Artificial Sequence
  Synthetic oligonucleotide
aaaatgacgctggacagaggttatgcccat

SEQ ID NO: 363749 - DNA, 30 bp, Artificial Sequence
  Synthetic oligonucleotide
cacagtattttgggaaccctatttgcccat

SEQ ID NO: 363750 - DNA, 30 bp, Artificial Sequence
  Synthetic oligonucleotide
atttagtcctccttgaactaagactcccat

SEQ ID NO: 363751 - DNA, 30 bp, Artificial Sequence
  Synthetic oligonucleotide
tgtttgatttggtactaggtggactcccat

SEQ ID NO: 363752 - DNA, 30 bp, Artificial Sequence
  Synthetic oligonucleotide
gctattgccttaggaagtaaagaaagccat

SEQ ID NO: 363753 - DNA, 30 bp, Artificial Sequence
  Synthetic oligonucleotide
atcaaaaggttagggaatcacgacagccat

SEQ ID NO: 363754 - DNA, 30 bp, Artificial Sequence
  Synthetic oligonucleotide
caggccggagaggcggcagcgtacagccat

SEQ ID NO: 363755 - DNA, 30 bp, Artificial Sequence
  Synthetic oligonucleotide
acctatgtcatcctcagcagccccagccat

SEQ ID NO: 363756 - DNA, 30 bp, Artificial Sequence
  Synthetic oligonucleotide
gagagcagtgtgctggcgcggctcagccat

SEQ ID NO: 363757 - DNA, 30 bp, Artificial Sequence
  Synthetic oligonucleotide
catgttttcgtgcgctaccgcaatagccat

SEQ ID NO: 363758 - DNA, 30 bp, Artificial Sequence
  Synthetic oligonucleotide
tcccatcaagccaggtaatcgatccgccat

SEQ ID NO: 363759 - DNA, 30 bp, Artificial Sequence
  Synthetic oligonucleotide
accaaatcaggacgtgcgcaaacgcgccat

SEQ ID NO: 363760 - DNA, 30 bp, Artificial Sequence
  Synthetic oligonucleotide
acgtctcacccgctttgtttcacgcgccat

SEQ ID NO: 363761 - DNA, 30 bp, Artificial Sequence
  Synthetic oligonucleotide
aagagccatagaggtcttaggcatcgccat

SEQ ID NO: 363762 - DNA, 30 bp, Artificial Sequence
  Synthetic oligonucleotide
ttacgaaatcagtatccggctagaggccat

SEQ ID NO: 363763 - DNA, 30 bp, Artificial Sequence
  Synthetic oligonucleotide
ggtatgcgggtgtcaactaacgacggccat

SEQ ID NO: 363764 - DNA, 30 bp, Artificial Sequence
  Synthetic oligonucleotide
ttttgtgtacgtggcaccagtaagggccat

SEQ ID NO: 363765 - DNA, 30 bp, Artificial Sequence
  Synthetic oligonucleotide
tataaagtcgacggaccaatgagatgccat

SEQ ID NO: 363766 - DNA, 30 bp, Artificial Sequence
  Synthetic oligonucleotide
tgtttgactggcagccgtcaaacgtgccat

SEQ ID NO: 363767 - DNA, 30 bp, Artificial Sequence
  Synthetic oligonucleotide
aaggcatcggcgaaatctttcccgtgccat

SEQ ID NO: 363768 - DNA, 30 bp, Artificial Sequence
  Synthetic oligonucleotide
gcaccgaggcactgtcgtgccaattgccat

SEQ ID NO: 363769 - DNA, 30 bp, Artificial Sequence
  Synthetic oligonucleotide
ccgcgacagtcggatctccgctgcatccat

SEQ ID NO: 363770 - DNA, 30 bp, Artificial Sequence
  Synthetic oligonucleotide
aaattatcgaaacacgcgctcatcatccat

SEQ ID NO: 363771 - DNA, 30 bp, Artificial Sequence
  Synthetic oligonucleotide
agttcaggcgagtacgcttagatcatccat

SEQ ID NO: 363772 - DNA, 30 bp, Artificial Sequence
  Synthetic oligonucleotide
tattgataggttccaccagagttgatccat

SEQ ID NO: 363773 - DNA, 30 bp, Artificial Sequence
  Synthetic oligonucleotide
attatcgccggactgctacagtctatccat

SEQ ID NO: 363774 - DNA, 30 bp, Artificial Sequence
  Synthetic oligonucleotide
caaatgatgggtagcacagataaactccat

SEQ ID NO: 363775 - DNA, 30 bp, Artificial Sequence
  Synthetic oligonucleotide
ggttccgataagctacatcgacgcctccat

SEQ ID NO: 363776 - DNA, 30 bp, Artificial Sequence
  Synthetic oligonucleotide
agttaaatggtagcaaaagatccagtccat

SEQ ID NO: 363777 - DNA, 30 bp, Artificial Sequence
  Synthetic oligonucleotide
aggaataccggggaccaggctctagtccat

SEQ ID NO: 363778 - DNA, 30 bp, Artificial Sequence
  Synthetic oligonucleotide
atcttcctaagaagtacaaggcaggtccat

SEQ ID NO: 363779 - DNA, 30 bp, Artificial Sequence
  Synthetic oligonucleotide
gccgcagttgcaatgcgtaagtatgtccat

SEQ ID NO: 363780 - DNA, 30 bp, Artificial Sequence
  Synthetic oligonucleotide
gatagcgccgctatcgtgaaaactgtccat

SEQ ID NO: 363781 - DNA, 30 bp, Artificial Sequence
  Synthetic oligonucleotide
accgggggcccgggcactgaccctgtccat

SEQ ID NO: 363782 - DNA, 30 bp, Artificial Sequence
  Synthetic oligonucleotide
agttcgaagtcaccggtaagaattgtccat

SEQ ID NO: 363783 - DNA, 30 bp, Artificial Sequence
  Synthetic oligonucleotide
tagctaaaagggcttagagattgattccat

SEQ ID NO: 363784 - DNA, 30 bp, Artificial Sequence
  Synthetic oligonucleotide
atctctgaatgtggtgtgctagacttccat

SEQ ID NO: 363785 - DNA, 30 bp, Artificial Sequence
  Synthetic oligonucleotide
gtccctgtaaacgtgaggacgtctttccat

SEQ ID NO: 363786 - DNA, 30 bp, Artificial Sequence
  Synthetic oligonucleotide
tgaaagggtatataccccatctaaaagcat

SEQ ID NO: 363787 - DNA, 30 bp, Artificial Sequence
  Synthetic oligonucleotide
gagtacgcgggtctaaaaatccataagcat

SEQ ID NO: 363788 - DNA, 30 bp, Artificial Sequence
  Synthetic oligonucleotide
aacgccgatcacttcgtggacactaagcat

SEQ ID NO: 363789 - DNA, 30 bp, Artificial Sequence
  Synthetic oligonucleotide
gccaatagcgctaactttaacgctaagcat

SEQ ID NO: 363790 - DNA, 30 bp, Artificial Sequence
  Synthetic oligonucleotide
ctattatcccagccccactcagttaagcat

SEQ ID NO: 363791 - DNA, 30 bp, Artificial Sequence
  Synthetic oligonucleotide
cgagcgtgacttgctgtttattgacagcat

SEQ ID NO: 363792 - DNA, 30 bp, Artificial Sequence
  Synthetic oligonucleotide
atccggctaacagtcccgcccttacagcat

SEQ ID NO: 363793 - DNA, 30 bp, Artificial Sequence
  Synthetic oligonucleotide
ggactatccgtgattcaacactgccagcat

SEQ ID NO: 363794 - DNA, 30 bp, Artificial Sequence
  Synthetic oligonucleotide
gcagtcggcccccgcgaaggaatgcagcat

SEQ ID NO: 363795 - DNA, 30 bp, Artificial Sequence
  Synthetic oligonucleotide
gtatataaaaagagtccattcgctcagcat

SEQ ID NO: 363796 - DNA, 30 bp, Artificial Sequence
  Synthetic oligonucleotide
atcagacctacataaaaagtttaagagcat

SEQ ID NO: 363797 - DNA, 30 bp, Artificial Sequence
  Synthetic oligonucleotide
tcaagcttaggttggttttgaacagagcat

SEQ ID NO: 363798 - DNA, 30 bp, Artificial Sequence
  Synthetic oligonucleotide
taacatcgcggcgtcgctcatacagagcat

SEQ ID NO: 363799 - DNA, 30 bp, Artificial Sequence
  Synthetic oligonucleotide
ggagcaatttagcggataatcatcgagcat

SEQ ID NO: 363800 - DNA, 30 bp, Artificial Sequence
  Synthetic oligonucleotide
cgtgcgtctagagcacgtcacacggagcat

SEQ ID NO: 363801 - DNA, 30 bp, Artificial Sequence
  Synthetic oligonucleotide
acaagcgtgccgtaccagcggccggagcat

SEQ ID NO: 363802 - DNA, 30 bp, Artificial Sequence
  Synthetic oligonucleotide
acaatgacggttatgaactgaatctagcat

SEQ ID NO: 363803 - DNA, 30 bp, Artificial Sequence
  Synthetic oligonucleotide
atgcttggctacgtgcgcttcttctagcat

SEQ ID NO: 363804 - DNA, 30 bp, Artificial Sequence
  Synthetic oligonucleotide
cattatgctccctcggggtctctgtagcat

SEQ ID NO: 363805 - DNA, 30 bp, Artificial Sequence
  Synthetic oligonucleotide
attgtaaagatacaagtaggccattagcat

SEQ ID NO: 363806 - DNA, 30 bp, Artificial Sequence
  Synthetic oligonucleotide
aacacatatatgagttggatttcaacgcat

SEQ ID NO: 363807 - DNA, 30 bp, Artificial Sequence
  Synthetic oligonucleotide
tcgggggacgtcctaagcggtcccacgcat

SEQ ID NO: 363808 - DNA, 30 bp, Artificial Sequence
  Synthetic oligonucleotide
gcagtgtttggagtgtggcgccgcacgcat

SEQ ID NO: 363809 - DNA, 30 bp, Artificial Sequence
  Synthetic oligonucleotide
ctcaaaggctttgtaatcgcatgcacgcat

SEQ ID NO: 363810 - DNA, 30 bp, Artificial Sequence
  Synthetic oligonucleotide
gtgcgaatagatgtaacggtctagacgcat

SEQ ID NO: 363811 - DNA, 30 bp, Artificial Sequence
  Synthetic oligonucleotide
acgagggtcggatcgatccgctcgacgcat

SEQ ID NO: 363812 - DNA, 30 bp, Artificial Sequence
  Synthetic oligonucleotide
agctaactacttagcacccagtggacgcat

SEQ ID NO: 363813 - DNA, 30 bp, Artificial Sequence
  Synthetic oligonucleotide
gcgcgtaggactccaacaataggtacgcat

SEQ ID NO: 363814 - DNA, 30 bp, Artificial Sequence
  Synthetic oligonucleotide
ctctgttgacaatttcctgtaggtacgcat

SEQ ID NO: 363815 - DNA, 30 bp, Artificial Sequence
  Synthetic oligonucleotide
tgagggaccagtaggcggggtctgccgcat

SEQ ID NO: 363816 - DNA, 30 bp, Artificial Sequence
  Synthetic oligonucleotide
gtacaggaccatagtaagttccgtccgcat

SEQ ID NO: 363817 - DNA, 30 bp, Artificial Sequence
  Synthetic oligonucleotide
gtcctttgctaagagaacgcctacgcgcat

SEQ ID NO: 363818 - DNA, 30 bp, Artificial Sequence
  Synthetic oligonucleotide
caggtcatgttacgtataggagccgcgcat

SEQ ID NO: 363819 - DNA, 30 bp, Artificial Sequence
  Synthetic oligonucleotide
gactactaagtctaggcatggcatgcgcat

SEQ ID NO: 363820 - DNA, 30 bp, Artificial Sequence
  Synthetic oligonucleotide
aatccacgtaaccgtagggcatgtgcgcat

SEQ ID NO: 363821 - DNA, 30 bp, Artificial Sequence
  Synthetic oligonucleotide
actcagagacccgacgtccaaccatcgcat

SEQ ID NO: 363822 - DNA, 30 bp, Artificial Sequence
  Synthetic oligonucleotide
ggttaacccaaagattgtcgcatatcgcat

SEQ ID NO: 363823 - DNA, 30 bp, Artificial Sequence
  Synthetic oligonucleotide
cccgacccatatataggctgcgattcgcat

SEQ ID NO: 363824 - DNA, 30 bp, Artificial Sequence
  Synthetic oligonucleotide
agatatgtaggattccgtgattaaaggcat

SEQ ID NO: 363825 - DNA, 30 bp, Artificial Sequence
  Synthetic oligonucleotide
taattcggagatggacgacaggcaaggcat

SEQ ID NO: 363826 - DNA, 30 bp, Artificial Sequence
  Synthetic oligonucleotide
ttcagagacatctttgaacaatgaaggcat

SEQ ID NO: 363827 - DNA, 30 bp, Artificial Sequence
  Synthetic oligonucleotide
cccacttgaagggcgagtcccagcaggcat

SEQ ID NO: 363828 - DNA, 30 bp, Artificial Sequence
  Synthetic oligonucleotide
tcgcgttttgtgaacaccgctatcaggcat

SEQ ID NO: 363829 - DNA, 30 bp, Artificial Sequence
  Synthetic oligonucleotide
tgtaattggaagcggatggccgataggcat

SEQ ID NO: 363830 - DNA, 31 bp, Artificial Sequence
  Synthetic oligonucleotide
aaataaaataatggttctgggatataggcat

SEQ ID NO: 363831 - DNA, 30 bp, Artificial Sequence
  Synthetic oligonucleotide
ccaataatttgccgtatggtgtgtaggcat

SEQ ID NO: 363832 - DNA, 30 bp, Artificial Sequence
  Synthetic oligonucleotide
ttactctttcaaaaaggacttgttaggcat

SEQ ID NO: 363833 - DNA, 30 bp, Artificial Sequence
  Synthetic oligonucleotide
ccggacctagcgatgggatttgttaggcat

SEQ ID NO: 363834 - DNA, 30 bp, Artificial Sequence
  Synthetic oligonucleotide
ttactataaaaggatctaactaaccggcat

SEQ ID NO: 363835 - DNA, 30 bp, Artificial Sequence
  Synthetic oligonucleotide
atacggtaatttaaagcccactaccggcat

SEQ ID NO: 363836 - DNA, 30 bp, Artificial Sequence
  Synthetic oligonucleotide
accggtgattacatcaaatcgtcccggcat

SEQ ID NO: 363837 - DNA, 30 bp, Artificial Sequence
  Synthetic oligonucleotide
caagttcgatcggctcccatagtgcggcat

SEQ ID NO: 363838 - DNA, 30 bp, Artificial Sequence
  Synthetic oligonucleotide
atggagtcccgctcttctcaacgcgggcat

SEQ ID NO: 363839 - DNA, 30 bp, Artificial Sequence
  Synthetic oligonucleotide
gtattagttgaaagagaagctaaggggcat

SEQ ID NO: 363840 - DNA, 30 bp, Artificial Sequence
  Synthetic oligonucleotide
gaagaaggcgcccgtcaatttcatgggcat

SEQ ID NO: 363841 - DNA, 30 bp, Artificial Sequence
  Synthetic oligonucleotide
cactgcgaagcgttagatttcgaatggcat

SEQ ID NO: 363842 - DNA, 30 bp, Artificial Sequence
  Synthetic oligonucleotide
tttatggcaccagacaacaggtaatggcat

SEQ ID NO: 363843 - DNA, 30 bp, Artificial Sequence
  Synthetic oligonucleotide
aatgtatcagacgtgtggaccggatggcat

SEQ ID NO: 363844 - DNA, 30 bp, Artificial Sequence
  Synthetic oligonucleotide
caaaagatccgactggcgtgattatggcat

SEQ ID NO: 363845 - DNA, 30 bp, Artificial Sequence
  Synthetic oligonucleotide
aagattaaataatccgaagaagcttggcat

SEQ ID NO: 363846 - DNA, 30 bp, Artificial Sequence
  Synthetic oligonucleotide
tttgacccttggagggagatagcttggcat

SEQ ID NO: 363847 - DNA, 30 bp, Artificial Sequence
  Synthetic oligonucleotide
ggaaactataggaatcctcgaagttggcat

SEQ ID NO: 363848 - DNA, 30 bp, Artificial Sequence
  Synthetic oligonucleotide
aaaatggtggatctcaccaagaaaatgcat

SEQ ID NO: 363849 - DNA, 30 bp, Artificial Sequence
  Synthetic oligonucleotide
tgtagtcgcggattttagcggctaatgcat

SEQ ID NO: 363850 - DNA, 30 bp, Artificial Sequence
  Synthetic oligonucleotide
ggggtaatgaccggtggtactaccatgcat

SEQ ID NO: 363851 - DNA, 30 bp, Artificial Sequence
  Synthetic oligonucleotide
acaggtaaaggctctctttttaccatgcat

SEQ ID NO: 363852 - DNA, 30 bp, Artificial Sequence
  Synthetic oligonucleotide
tttataaaagcaaacgctcgatccatgcat

SEQ ID NO: 363853 - DNA, 30 bp, Artificial Sequence
  Synthetic oligonucleotide
cttgtaggggacggcatcgaattgatgcat

SEQ ID NO: 363854 - DNA, 30 bp, Artificial Sequence
  Synthetic oligonucleotide
ttccaatgaaagggtcagaagccactgcat

SEQ ID NO: 363855 - DNA, 30 bp, Artificial Sequence
  Synthetic oligonucleotide
ttaaagaggtctcccatgctgtcactgcat

SEQ ID NO: 363856 - DNA, 30 bp, Artificial Sequence
  Synthetic oligonucleotide
ccgggaaactcgacagctggtctactgcat

SEQ ID NO: 363857 - DNA, 30 bp, Artificial Sequence
  Synthetic oligonucleotide
aagaatgtagagtggccttgtctcctgcat

SEQ ID NO: 363858 - DNA, 30 bp, Artificial Sequence
  Synthetic oligonucleotide
atggtcgtggcttgccacttgaggctgcat

SEQ ID NO: 363859 - DNA, 30 bp, Artificial Sequence
  Synthetic oligonucleotide
tgtttctgagcagagagcgtacatctgcat

SEQ ID NO: 363860 - DNA, 30 bp, Artificial Sequence
  Synthetic oligonucleotide
tggcttgacctttcttaacgtcatctgcat

SEQ ID NO: 363861 - DNA, 30 bp, Artificial Sequence
  Synthetic oligonucleotide
ttcaaggcgatactagctttcgatctgcat

SEQ ID NO: 363862 - DNA, 30 bp, Artificial Sequence
  Synthetic oligonucleotide
ctcaactgcgtcccttgcatagacgtgcat

SEQ ID NO: 363863 - DNA, 30 bp, Artificial Sequence
  Synthetic oligonucleotide
accctcgtcggcatgggagtctgggtgcat

SEQ ID NO: 363864 - DNA, 30 bp, Artificial Sequence
  Synthetic oligonucleotide
aaggtgtaacaaatgggtggtatggtgcat

SEQ ID NO: 363865 - DNA, 30 bp, Artificial Sequence
  Synthetic oligonucleotide
ttgaactagtctaaatattgatttgtgcat

SEQ ID NO: 363866 - DNA, 30 bp, Artificial Sequence
  Synthetic oligonucleotide
ctgaaaatttgcaaggacgaggcattgcat

SEQ ID NO: 363867 - DNA, 30 bp, Artificial Sequence
  Synthetic oligonucleotide
agattttaactcctgcttgggtgattgcat

SEQ ID NO: 363868 - DNA, 30 bp, Artificial Sequence
  Synthetic oligonucleotide
tccatcagaaactccgcgaccggcttgcat

SEQ ID NO: 363869 - DNA, 30 bp, Artificial Sequence
  Synthetic oligonucleotide
atggagccgggcggagaatcctggttgcat

SEQ ID NO: 363870 - DNA, 30 bp, Artificial Sequence
  Synthetic oligonucleotide
aaagatcattgatccttcaagtggttgcat

SEQ ID NO: 363871 - DNA, 30 bp, Artificial Sequence
  Synthetic oligonucleotide
gttcaaggctcagttaaaaaacatttgcat

SEQ ID NO: 363872 - DNA, 30 bp, Artificial Sequence
  Synthetic oligonucleotide
agcggacgtccataaccgttgactttgcat

SEQ ID NO: 363873 - DNA, 30 bp, Artificial Sequence
  Synthetic oligonucleotide
ttagcgcaccattagataaaagttttgcat

SEQ ID NO: 363874 - DNA, 30 bp, Artificial Sequence
  Synthetic oligonucleotide
tcgcatactatgggcatctatccaaatcat

SEQ ID NO: 363875 - DNA, 30 bp, Artificial Sequence
  Synthetic oligonucleotide
ccgaccgatataccccactggggcaatcat

SEQ ID NO: 363876 - DNA, 30 bp, Artificial Sequence
  Synthetic oligonucleotide
gccctggtgcatttggtaagtctcaatcat

SEQ ID NO: 363877 - DNA, 30 bp, Artificial Sequence
  Synthetic oligonucleotide
tggaccagaaatggcatatgtccgaatcat

SEQ ID NO: 363878 - DNA, 30 bp, Artificial Sequence
  Synthetic oligonucleotide
gtgggccaggccctacaaagacctaatcat

SEQ ID NO: 363879 - DNA, 30 bp, Artificial Sequence
  Synthetic oligonucleotide
gttcaagcctggagcgcggtgcttaatcat

SEQ ID NO: 363880 - DNA, 30 bp, Artificial Sequence
  Synthetic oligonucleotide
caatggttaagcaaattttgtcttaatcat

SEQ ID NO: 363881 - DNA, 30 bp, Artificial Sequence
  Synthetic oligonucleotide
aaccaggtatctgccagagtaatacatcat

SEQ ID NO: 363882 - DNA, 30 bp, Artificial Sequence
  Synthetic oligonucleotide
gagaccattttacattaaaccaagcatcat

SEQ ID NO: 363883 - DNA, 30 bp, Artificial Sequence
  Synthetic oligonucleotide
catctagtatagctgaatgatcagcatcat

SEQ ID NO: 363884 - DNA, 30 bp, Artificial Sequence
  Synthetic oligonucleotide
gtggttgagcgccgaagtataacgcatcat

SEQ ID NO: 363885 - DNA, 30 bp, Artificial Sequence
  Synthetic oligonucleotide
tcgggctcactactatagaaagcgcatcat

SEQ ID NO: 363886 - DNA, 30 bp, Artificial Sequence
  Synthetic oligonucleotide
gtctgtgattcgccaccgataaggcatcat

SEQ ID NO: 363887 - DNA, 30 bp, Artificial Sequence
  Synthetic oligonucleotide
ttgccgcttcggaaagagagcgtgcatcat

SEQ ID NO: 363888 - DNA, 30 bp, Artificial Sequence
  Synthetic oligonucleotide
ttaggcaacaaattggtcgattatcatcat

SEQ ID NO: 363889 - DNA, 30 bp, Artificial Sequence
  Synthetic oligonucleotide
gggcagcaagtcgagttatcctcagatcat

SEQ ID NO: 363890 - DNA, 30 bp, Artificial Sequence
  Synthetic oligonucleotide
attatcgctaggggattaccaaatgatcat

SEQ ID NO: 363891 - DNA, 30 bp, Artificial Sequence
  Synthetic oligonucleotide
gtcttaagattgaatgggaagcatgatcat

SEQ ID NO: 363892 - DNA, 30 bp, Artificial Sequence
  Synthetic oligonucleotide
gtaatgtgcttgagtcggaatgttgatcat

SEQ ID NO: 363893 - DNA, 30 bp, Artificial Sequence
  Synthetic oligonucleotide
agttttacaccaaaataatctaaatatcat

SEQ ID NO: 363894 - DNA, 30 bp, Artificial Sequence
  Synthetic oligonucleotide
ttgttacacgggtagcgcgggtcatatcat

SEQ ID NO: 363895 - DNA, 30 bp, Artificial Sequence
  Synthetic oligonucleotide
ccactgagggtttgtaaacgcctatatcat

SEQ ID NO: 363896 - DNA, 30 bp, Artificial Sequence
  Synthetic oligonucleotide
gcccaacttttaacaaaataatactatcat

SEQ ID NO: 363897 - DNA, 30 bp, Artificial Sequence
  Synthetic oligonucleotide
cgaatcttatgcaacggtggttactatcat

SEQ ID NO: 363898 - DNA, 30 bp, Artificial Sequence
  Synthetic oligonucleotide
agctaaacccaagtgtttcaggggtatcat

SEQ ID NO: 363899 - DNA, 30 bp, Artificial Sequence
  Synthetic oligonucleotide
agccatgataggaaaatccctgggtatcat

SEQ ID NO: 363900 - DNA, 30 bp, Artificial Sequence
  Synthetic oligonucleotide
cagctgagctgggattagacggcttatcat

SEQ ID NO: 363901 - DNA, 30 bp, Artificial Sequence
  Synthetic oligonucleotide
cggtcgtcgcatctggtgctatcttatcat

SEQ ID NO: 363902 - DNA, 30 bp, Artificial Sequence
  Synthetic oligonucleotide
ctctacgacgcgaaacaagtacgttatcat

SEQ ID NO: 363903 - DNA, 30 bp, Artificial Sequence
  Synthetic oligonucleotide
cgcaggaccggtttgctattactttatcat

SEQ ID NO: 363904 - DNA, 30 bp, Artificial Sequence
  Synthetic oligonucleotide
ctggcgttaaaaattcagaggttttatcat

SEQ ID NO: 363905 - DNA, 31 bp, Artificial Sequence
  Synthetic oligonucleotide
ttgcgaaagacggcaacagtcccaaactcat

SEQ ID NO: 363906 - DNA, 30 bp, Artificial Sequence
  Synthetic oligonucleotide
cgcaaggtggctgggagcgcatcaactcat

SEQ ID NO: 363907 - DNA, 30 bp, Artificial Sequence
  Synthetic oligonucleotide
gaggttaacaccggtcacttgcacactcat

SEQ ID NO: 363908 - DNA, 30 bp, Artificial Sequence
  Synthetic oligonucleotide
gttaggggagagcccggttatgtcactcat

SEQ ID NO: 363909 - DNA, 30 bp, Artificial Sequence
  Synthetic oligonucleotide
gataccgatagcggaatagcatggactcat

SEQ ID NO: 363910 - DNA, 30 bp, Artificial Sequence
  Synthetic oligonucleotide
cgctgatctgccgctaaagatgatactcat

SEQ ID NO: 363911 - DNA, 30 bp, Artificial Sequence
  Synthetic oligonucleotide
cgcgcgatcggaactctagtttatactcat

SEQ ID NO: 363912 - DNA, 30 bp, Artificial Sequence
  Synthetic oligonucleotide
gcgttgatctacatagtggagcaacctcat

SEQ ID NO: 363913 - DNA, 30 bp, Artificial Sequence
  Synthetic oligonucleotide
taatccagcctacagatttagttacctcat

SEQ ID NO: 363914 - DNA, 30 bp, Artificial Sequence
  Synthetic oligonucleotide
ccgtccatggcacagaaagggaaccctcat

SEQ ID NO: 363915 - DNA, 30 bp, Artificial Sequence
  Synthetic oligonucleotide
aactccctcgtgttaatatgcgcccctcat

SEQ ID NO: 363916 - DNA, 30 bp, Artificial Sequence
  Synthetic oligonucleotide
acgcttacttgcctcgtagtgctgcctcat

SEQ ID NO: 363917 - DNA, 30 bp, Artificial Sequence
  Synthetic oligonucleotide
gctagggtggttacatactgttatcctcat

SEQ ID NO: 363918 - DNA, 30 bp, Artificial Sequence
  Synthetic oligonucleotide
agggctatgtatgtacgcaagggtcctcat

SEQ ID NO: 363919 - DNA, 30 bp, Artificial Sequence
  Synthetic oligonucleotide
aatcacgtccgagttgccaaacaagctcat

SEQ ID NO: 363920 - DNA, 30 bp, Artificial Sequence
  Synthetic oligonucleotide
ctacgcggactgggacgcaccgaagctcat

SEQ ID NO: 363921 - DNA, 30 bp, Artificial Sequence
  Synthetic oligonucleotide
tacagacatttaaccagatgaccagctcat

SEQ ID NO: 363922 - DNA, 30 bp, Artificial Sequence
  Synthetic oligonucleotide
cgtctatagttacggtataagctagctcat

SEQ ID NO: 363923 - DNA, 30 bp, Artificial Sequence
  Synthetic oligonucleotide
acccaaactcatgcctcggacatcgctcat

SEQ ID NO: 363924 - DNA, 30 bp, Artificial Sequence
  Synthetic oligonucleotide
cattcaccgggacagattttaactgctcat

SEQ ID NO: 363925 - DNA, 30 bp, Artificial Sequence
  Synthetic oligonucleotide
ttaagcgggatttagatgaataaatctcat

SEQ ID NO: 363926 - DNA, 30 bp, Artificial Sequence
  Synthetic oligonucleotide
atgtatggccaacaatgggcctcatctcat

SEQ ID NO: 363927 - DNA, 30 bp, Artificial Sequence
  Synthetic oligonucleotide
aatggggcaatccgggttcatctatctcat

SEQ ID NO: 363928 - DNA, 30 bp, Artificial Sequence
  Synthetic oligonucleotide
tataaggtaaggatgtgccacgtatctcat

SEQ ID NO: 363929 - DNA, 30 bp, Artificial Sequence
  Synthetic oligonucleotide
ctagatgatcaccagggacttaactctcat

SEQ ID NO: 363930 - DNA, 30 bp, Artificial Sequence
  Synthetic oligonucleotide
agactggcatatggtcaatggaagtctcat

SEQ ID NO: 363931 - DNA, 30 bp, Artificial Sequence
  Synthetic oligonucleotide
ggtaaagtttacttggtatgatagtctcat

SEQ ID NO: 363932 - DNA, 30 bp, Artificial Sequence
  Synthetic oligonucleotide
aactctgcaacggtagtgtctgcttctcat

SEQ ID NO: 363933 - DNA, 30 bp, Artificial Sequence
  Synthetic oligonucleotide
gcggctcggcttcctcgagcttaaagtcat

SEQ ID NO: 363934 - DNA, 30 bp, Artificial Sequence
  Synthetic oligonucleotide
cttggtccgtggaatcgtgttggcagtcat

SEQ ID NO: 363935 - DNA, 30 bp, Artificial Sequence
  Synthetic oligonucleotide
cattttgattagacgtggtcccggagtcat

SEQ ID NO: 363936 - DNA, 30 bp, Artificial Sequence
  Synthetic oligonucleotide
agcttggtccccctgccggtatggagtcat

SEQ ID NO: 363937 - DNA, 30 bp, Artificial Sequence
  Synthetic oligonucleotide
aaagttggtggagcgcgcatgctgagtcat

SEQ ID NO: 363938 - DNA, 30 bp, Artificial Sequence
  Synthetic oligonucleotide
gttgcacggggttccgatgtcgctagtcat

SEQ ID NO: 363939 - DNA, 30 bp, Artificial Sequence
  Synthetic oligonucleotide
gtggcacacttgctttagacataccgtcat

SEQ ID NO: 363940 - DNA, 30 bp, Artificial Sequence
  Synthetic oligonucleotide
tcgggtgtttgggccgtcctatgccgtcat

SEQ ID NO: 363941 - DNA, 30 bp, Artificial Sequence
  Synthetic oligonucleotide
gtagaagtcgcaaaatcgcgaaagcgtcat

SEQ ID NO: 363942 - DNA, 30 bp, Artificial Sequence
  Synthetic oligonucleotide
tcaaggcgtcttattctttcaatgcgtcat

SEQ ID NO: 363943 - DNA, 30 bp, Artificial Sequence
  Synthetic oligonucleotide
tagatgaaccggcggggtactatgcgtcat

SEQ ID NO: 363944 - DNA, 30 bp, Artificial Sequence
  Synthetic oligonucleotide
atgttaaaggtagaatcggggcatcgtcat

SEQ ID NO: 363945 - DNA, 30 bp, Artificial Sequence
  Synthetic oligonucleotide
cttttggaatacgggagcggttcaggtcat

SEQ ID NO: 363946 - DNA, 30 bp, Artificial Sequence
  Synthetic oligonucleotide
tcaatgaaagggctggggaacctgggtcat

SEQ ID NO: 363947 - DNA, 30 bp, Artificial Sequence
  Synthetic oligonucleotide
attggagattgctctaacaatcttggtcat

SEQ ID NO: 363948 - DNA, 30 bp, Artificial Sequence
  Synthetic oligonucleotide
cttagcccgaacgtcttgacagtatgtcat

SEQ ID NO: 363949 - DNA, 30 bp, Artificial Sequence
  Synthetic oligonucleotide
cggtactgattgctgcgacgagtatgtcat

SEQ ID NO: 363950 - DNA, 30 bp, Artificial Sequence
  Synthetic oligonucleotide
aattaaaactatctcaatgcgacctgtcat

SEQ ID NO: 363951 - DNA, 30 bp, Artificial Sequence
  Synthetic oligonucleotide
tgtttgtaaacgatacatacaatctgtcat

SEQ ID NO: 363952 - DNA, 30 bp, Artificial Sequence
  Synthetic oligonucleotide
agtgaagggcggctttatcagctctgtcat

SEQ ID NO: 363953 - DNA, 30 bp, Artificial Sequence
  Synthetic oligonucleotide
attcaagtaaaagaatggaggctctgtcat

SEQ ID NO: 363954 - DNA, 30 bp, Artificial Sequence
  Synthetic oligonucleotide
gaggggcaatcttgaactccaagttgtcat

SEQ ID NO: 363955 - DNA, 30 bp, Artificial Sequence
  Synthetic oligonucleotide
accgttaacttcgaaccgggaagttgtcat

SEQ ID NO: 363956 - DNA, 30 bp, Artificial Sequence
  Synthetic oligonucleotide
ttaagtgataggcacaaagtgagttgtcat

SEQ ID NO: 363957 - DNA, 30 bp, Artificial Sequence
  Synthetic oligonucleotide
tcgtaggggccgtgctagcttcaaattcat

SEQ ID NO: 363958 - DNA, 30 bp, Artificial Sequence
  Synthetic oligonucleotide
cccgatttgtgggaaggcccttgaattcat

SEQ ID NO: 363959 - DNA, 30 bp, Artificial Sequence
  Synthetic oligonucleotide
aatgtgacgttgttcaccgagtcacttcat

SEQ ID NO: 363960 - DNA, 30 bp, Artificial Sequence
  Synthetic oligonucleotide
agcaagattgtacccagagggagacttcat

SEQ ID NO: 363961 - DNA, 30 bp, Artificial Sequence
  Synthetic oligonucleotide
ccctacccgaggatgctaggaggccttcat

SEQ ID NO: 363962 - DNA, 30 bp, Artificial Sequence
  Synthetic oligonucleotide
ccggtcggtcttgtggaactgtgccttcat

SEQ ID NO: 363963 - DNA, 30 bp, Artificial Sequence
  Synthetic oligonucleotide
ttctcgacaagacggcgtccggtccttcat

SEQ ID NO: 363964 - DNA, 30 bp, Artificial Sequence
  Synthetic oligonucleotide
aatgagcgtgtcgagtattcgacgcttcat

SEQ ID NO: 363965 - DNA, 30 bp, Artificial Sequence
  Synthetic oligonucleotide
ggaagttagtgggttcttacctatcttcat

SEQ ID NO: 363966 - DNA, 30 bp, Artificial Sequence
  Synthetic oligonucleotide
acatgttacaggatttaataacgtcttcat

SEQ ID NO: 363967 - DNA, 30 bp, Artificial Sequence
  Synthetic oligonucleotide
gcccggctaggaacgtgtacctcagttcat

SEQ ID NO: 363968 - DNA, 30 bp, Artificial Sequence
  Synthetic oligonucleotide
aagccgtccggccatgggtatcgagttcat

SEQ ID NO: 363969 - DNA, 30 bp, Artificial Sequence
  Synthetic oligonucleotide
aacacgcatcttatctagattcacgttcat

SEQ ID NO: 363970 - DNA, 30 bp, Artificial Sequence
  Synthetic oligonucleotide
tcgattagggcgaaattatccggcgttcat

SEQ ID NO: 363971 - DNA, 30 bp, Artificial Sequence
  Synthetic oligonucleotide
agttgggtccacgggagtaaatgcgttcat

SEQ ID NO: 363972 - DNA, 30 bp, Artificial Sequence
  Synthetic oligonucleotide
agtctgtacgcaactcgggtattcgttcat

SEQ ID NO: 363973 - DNA, 30 bp, Artificial Sequence
  Synthetic oligonucleotide
aaagagtaaacatggattgtggcggttcat

SEQ ID NO: 363974 - DNA, 30 bp, Artificial Sequence
  Synthetic oligonucleotide
gcgcctagtttataggccaactgggttcat

SEQ ID NO: 363975 - DNA, 30 bp, Artificial Sequence
  Synthetic oligonucleotide
cgatcaatggggataatcgagcatgttcat

SEQ ID NO: 363976 - DNA, 30 bp, Artificial Sequence
  Synthetic oligonucleotide
gccaacccgcgaggttaaacggttgttcat

SEQ ID NO: 363977 - DNA, 30 bp, Artificial Sequence
  Synthetic oligonucleotide
acctggatcactcgtgaaaagaaatttcat

SEQ ID NO: 363978 - DNA, 30 bp, Artificial Sequence
  Synthetic oligonucleotide
gtccggagcagaaagggacgtagatttcat

SEQ ID NO: 363979 - DNA, 30 bp, Artificial Sequence
  Synthetic oligonucleotide
agtacgggtcgaggtttcgtgctctttcat

SEQ ID NO: 363980 - DNA, 30 bp, Artificial Sequence
  Synthetic oligonucleotide
taaagaataaatggaacagcagattttcat

SEQ ID NO: 363981 - DNA, 30 bp, Artificial Sequence
  Synthetic oligonucleotide
tggtctatggtcccactgacgcaaaaagat

SEQ ID NO: 363982 - DNA, 30 bp, Artificial Sequence
  Synthetic oligonucleotide
aagacgcctaatatctatgttgaaaaagat

SEQ ID NO: 363983 - DNA, 30 bp, Artificial Sequence
  Synthetic oligonucleotide
attcacctgaaattaggaaatggaaaagat

SEQ ID NO: 363984 - DNA, 30 bp, Artificial Sequence
  Synthetic oligonucleotide
atggctatagactcattcagacacaaagat

SEQ ID NO: 363985 - DNA, 30 bp, Artificial Sequence
  Synthetic oligonucleotide
gcataaagtggggcgcggcagcagaaagat

SEQ ID NO: 363986 - DNA, 30 bp, Artificial Sequence
  Synthetic oligonucleotide
ggtattaagtcagcgctagagccgaaagat

SEQ ID NO: 363987 - DNA, 30 bp, Artificial Sequence
  Synthetic oligonucleotide
aaaggctcgcgcgatatcctcgcgaaagat

SEQ ID NO: 363988 - DNA, 30 bp, Artificial Sequence
  Synthetic oligonucleotide
taacgaccaacactagctcgcaggaaagat

SEQ ID NO: 363989 - DNA, 30 bp, Artificial Sequence
  Synthetic oligonucleotide
ccaagttttttcataactcggttgaaagat

SEQ ID NO: 363990 - DNA, 30 bp, Artificial Sequence
  Synthetic oligonucleotide
gaaatcaatagaaccgttaatatacaagat

SEQ ID NO: 363991 - DNA, 30 bp, Artificial Sequence
  Synthetic oligonucleotide
tgctacactcagcgccgctcgtcccaagat

SEQ ID NO: 363992 - DNA, 30 bp, Artificial Sequence
  Synthetic oligonucleotide
ggggacctttcgacagcttggggccaagat

SEQ ID NO: 363993 - DNA, 30 bp, Artificial Sequence
  Synthetic oligonucleotide
aggggcacctcacgcatcttgacgcaagat

SEQ ID NO: 363994 - DNA, 30 bp, Artificial Sequence
  Synthetic oligonucleotide
gtgagcgactaatgtggttaccatcaagat

SEQ ID NO: 363995 - DNA, 30 bp, Artificial Sequence
  Synthetic oligonucleotide
atatgctttcagtctgtttttgttcaagat

SEQ ID NO: 363996 - DNA, 30 bp, Artificial Sequence
  Synthetic oligonucleotide
tcaacattaaattcaaagacatttcaagat

SEQ ID NO: 363997 - DNA, 30 bp, Artificial Sequence
  Synthetic oligonucleotide
tgaaagatagaacactcggtttttcaagat

SEQ ID NO: 363998 - DNA, 30 bp, Artificial Sequence
  Synthetic oligonucleotide
ccaccgacgttcaaaaagagacgcgaagat

SEQ ID NO: 363999 - DNA, 30 bp, Artificial Sequence
  Synthetic oligonucleotide
tctatgagagattatgatactctcgaagat

SEQ ID NO: 364000 - DNA, 30 bp, Artificial Sequence
  Synthetic oligonucleotide
gaaagtgcatgtgcggcgccatgggaagat

SEQ ID NO: 364001 - DNA, 30 bp, Artificial Sequence
  Synthetic oligonucleotide
tgcgtcggacgcctgattcacttggaagat

SEQ ID NO: 364002 - DNA, 30 bp, Artificial Sequence
  Synthetic oligonucleotide
tcagagcgctattctgtgaacaaataagat

SEQ ID NO: 364003 - DNA, 30 bp, Artificial Sequence
  Synthetic oligonucleotide
aaatgacctataacgtcaaagccataagat

SEQ ID NO: 364004 - DNA, 30 bp, Artificial Sequence
  Synthetic oligonucleotide
ttgtggcctatagctacttccctctaagat

SEQ ID NO: 364005 - DNA, 30 bp, Artificial Sequence
  Synthetic oligonucleotide
gtggggattcataaggtatttcggtaagat

SEQ ID NO: 364006 - DNA, 30 bp, Artificial Sequence
  Synthetic oligonucleotide
cctgttggtggttgaggtggattgtaagat

SEQ ID NO: 364007 - DNA, 30 bp, Artificial Sequence
  Synthetic oligonucleotide
aagaattaggtaatggggtttagttaagat

SEQ ID NO: 364008 - DNA, 30 bp, Artificial Sequence
  Synthetic oligonucleotide
atatgaactgggaaattggatggttaagat

SEQ ID NO: 364009 - DNA, 30 bp, Artificial Sequence
  Synthetic oligonucleotide
caaaggatactcgttagacgaacaacagat

SEQ ID NO: 364010 - DNA, 30 bp, Artificial Sequence
  Synthetic oligonucleotide
gaagtgcactaacagcccaaatcaacagat

SEQ ID NO: 364011 - DNA, 30 bp, Artificial Sequence
  Synthetic oligonucleotide
cgatatgtcatctccagacccataacagat

SEQ ID NO: 364012 - DNA, 30 bp, Artificial Sequence
  Synthetic oligonucleotide
attaacgggggagcgattaatgtaacagat

SEQ ID NO: 364013 - DNA, 30 bp, Artificial Sequence
  Synthetic oligonucleotide
tgcgtgcgccgcggtatatttcatacagat

SEQ ID NO: 364014 - DNA, 30 bp, Artificial Sequence
  Synthetic oligonucleotide
gtgtaccggccggcaagttatcgtacagat

SEQ ID NO: 364015 - DNA, 30 bp, Artificial Sequence
  Synthetic oligonucleotide
acaactggatgtcgttagaatgtcccagat

SEQ ID NO: 364016 - DNA, 30 bp, Artificial Sequence
  Synthetic oligonucleotide
ccctgcccgtgtagtaacttcgatccagat

SEQ ID NO: 364017 - DNA, 30 bp, Artificial Sequence
  Synthetic oligonucleotide
tttcatgttgaccaaatataacctccagat

SEQ ID NO: 364018 - DNA, 30 bp, Artificial Sequence
  Synthetic oligonucleotide
ccctccacttgaccgtgggatagagcagat

SEQ ID NO: 364019 - DNA, 30 bp, Artificial Sequence
  Synthetic oligonucleotide
ctgtaagctaaatgataattttgagcagat

SEQ ID NO: 364020 - DNA, 30 bp, Artificial Sequence
  Synthetic oligonucleotide
tgtcacgaaagtttcagtctctacgcagat

SEQ ID NO: 364021 - DNA, 30 bp, Artificial Sequence
  Synthetic oligonucleotide
ggaggtgcatggcggtagcggcgggcagat

SEQ ID NO: 364022 - DNA, 30 bp, Artificial Sequence
  Synthetic oligonucleotide
gggaatactgtccgtattttcgttgcagat

SEQ ID NO: 364023 - DNA, 30 bp, Artificial Sequence
  Synthetic oligonucleotide
aaatcaaggctacggatattagaatcagat

SEQ ID NO: 364024 - DNA, 30 bp, Artificial Sequence
  Synthetic oligonucleotide
tttaagggtaactgcgttcgataatcagat

SEQ ID NO: 364025 - DNA, 30 bp, Artificial Sequence
  Synthetic oligonucleotide
acaaatcttttgcccataacagcatcagat

SEQ ID NO: 364026 - DNA, 30 bp, Artificial Sequence
  Synthetic oligonucleotide
cagcaaggaacgccgatctactgatcagat

SEQ ID NO: 364027 - DNA, 30 bp, Artificial Sequence
  Synthetic oligonucleotide
gtatgcatccaccctggagttatatcagat

SEQ ID NO: 364028 - DNA, 30 bp, Artificial Sequence
  Synthetic oligonucleotide
accactgaatctgtgggggggaactcagat

SEQ ID NO: 364029 - DNA, 30 bp, Artificial Sequence
  Synthetic oligonucleotide
aataattgctcggaaacaagcgtttcagat

SEQ ID NO: 364030 - DNA, 30 bp, Artificial Sequence
  Synthetic oligonucleotide
gtaatgctacagacaatgggacgaagagat

SEQ ID NO: 364031 - DNA, 30 bp, Artificial Sequence
  Synthetic oligonucleotide
attaaatcgaagggtggctggggaagagat

SEQ ID NO: 364032 - DNA, 30 bp, Artificial Sequence
  Synthetic oligonucleotide
tgagtacacgcagtcggtgccgggagagat

SEQ ID NO: 364033 - DNA, 30 bp, Artificial Sequence
  Synthetic oligonucleotide
attcataggaattgcatgacccatagagat

SEQ ID NO: 364034 - DNA, 30 bp, Artificial Sequence
  Synthetic oligonucleotide
gacaagcagtggttccagctaactagagat

SEQ ID NO: 364035 - DNA, 30 bp, Artificial Sequence
  Synthetic oligonucleotide
tcacgccagcaagatatagtgcctagagat

SEQ ID NO: 364036 - DNA, 30 bp, Artificial Sequence
  Synthetic oligonucleotide
gggtatgaacgcttggtgtgtattagagat

SEQ ID NO: 364037 - DNA, 29 bp, Artificial Sequence
  Synthetic oligonucleotide
ccgcttctctggtcgagttggcgcgagat

SEQ ID NO: 364038 - DNA, 30 bp, Artificial Sequence
  Synthetic oligonucleotide
tagccagtcctgccgaggggctgtcgagat

SEQ ID NO: 364039 - DNA, 31 bp, Artificial Sequence
  Synthetic oligonucleotide
cacataaacgtgtccggcgcacgcaggagat

SEQ ID NO: 364040 - DNA, 30 bp, Artificial Sequence
  Synthetic oligonucleotide
tgtcctactagtctataacccgtaggagat

SEQ ID NO: 364041 - DNA, 30 bp, Artificial Sequence
  Synthetic oligonucleotide
ttgaacttcatcgagtccgtcaacggagat

SEQ ID NO: 364042 - DNA, 30 bp, Artificial Sequence
  Synthetic oligonucleotide
actcaggaatcggtccatacgactggagat

SEQ ID NO: 364043 - DNA, 30 bp, Artificial Sequence
  Synthetic oligonucleotide
aagcttatgggctgcgtttaacctggagat

SEQ ID NO: 364044 - DNA, 30 bp, Artificial Sequence
  Synthetic oligonucleotide
ttgttaataatacaggtgaacagtggagat

SEQ ID NO: 364045 - DNA, 30 bp, Artificial Sequence
  Synthetic oligonucleotide
cccgaagtggggagtgaaggtgttggagat

SEQ ID NO: 364046 - DNA, 30 bp, Artificial Sequence
  Synthetic oligonucleotide
tacgttttatatcggtaccggccatgagat

SEQ ID NO: 364047 - DNA, 30 bp, Artificial Sequence
  Synthetic oligonucleotide
gagttgccaaaaattgtcttaggatgagat

SEQ ID NO: 364048 - DNA, 30 bp, Artificial Sequence
  Synthetic oligonucleotide
attcggagggggagttatgtaacgtgagat

SEQ ID NO: 364049 - DNA, 30 bp, Artificial Sequence
  Synthetic oligonucleotide
ttctgtgtcggaccttgtggtacgtgagat

SEQ ID NO: 364050 - DNA, 30 bp, Artificial Sequence
  Synthetic oligonucleotide
gccagctggttagtaacgggctaaatagat

SEQ ID NO: 364051 - DNA, 30 bp, Artificial Sequence
  Synthetic oligonucleotide
cccaagcatgtgcactttctttcaatagat

SEQ ID NO: 364052 - DNA, 30 bp, Artificial Sequence
  Synthetic oligonucleotide
aatcgtattgcaaggcgaccggtaatagat

SEQ ID NO: 364053 - DNA, 30 bp, Artificial Sequence
  Synthetic oligonucleotide
aaaaaacggtcggtcttacccgagatagat

SEQ ID NO: 364054 - DNA, 30 bp, Artificial Sequence
  Synthetic oligonucleotide
tgtgagctccttcatttcaaggcgatagat

SEQ ID NO: 364055 - DNA, 30 bp, Artificial Sequence
  Synthetic oligonucleotide
tcggatctgtctgtcctctaacggatagat

SEQ ID NO: 364056 - DNA, 30 bp, Artificial Sequence
  Synthetic oligonucleotide
tcggatatgacaactactgctcggatagat

SEQ ID NO: 364057 - DNA, 30 bp, Artificial Sequence
  Synthetic oligonucleotide
atcgctacccaaaaggatgtagcactagat

SEQ ID NO: 364058 - DNA, 30 bp, Artificial Sequence
  Synthetic oligonucleotide
gctagaatactatagtagagtagactagat

SEQ ID NO: 364059 - DNA, 30 bp, Artificial Sequence
  Synthetic oligonucleotide
tacaagtttcaccacgcatgagtgctagat

SEQ ID NO: 364060 - DNA, 30 bp, Artificial Sequence
  Synthetic oligonucleotide
ggggttcggcaagcggcagtgaatctagat

SEQ ID NO: 364061 - DNA, 30 bp, Artificial Sequence
  Synthetic oligonucleotide
acaacgggaccgagactataccctctagat

SEQ ID NO: 364062 - DNA, 30 bp, Artificial Sequence
  Synthetic oligonucleotide
tcttgatacgctggaacataccgtctagat

SEQ ID NO: 364063 - DNA, 30 bp, Artificial Sequence
  Synthetic oligonucleotide
gtgaagcaatcgcgtatttaaattctagat

SEQ ID NO: 364064 - DNA, 30 bp, Artificial Sequence
  Synthetic oligonucleotide
ggatttagtcgggtatcaagaccagtagat

SEQ ID NO: 364065 - DNA, 30 bp, Artificial Sequence
  Synthetic oligonucleotide
aacggcactagactttcagcctgagtagat

SEQ ID NO: 364066 - DNA, 30 bp, Artificial Sequence
  Synthetic oligonucleotide
gatcctaaaggtggtgttacactagtagat

SEQ ID NO: 364067 - DNA, 30 bp, Artificial Sequence
  Synthetic oligonucleotide
acctaacgaattccatccgacccggtagat

SEQ ID NO: 364068 - DNA, 30 bp, Artificial Sequence
  Synthetic oligonucleotide
cctgggcggatctacaccacatcggtagat

SEQ ID NO: 364069 - DNA, 30 bp, Artificial Sequence
  Synthetic oligonucleotide
actgcgtagtaccgtagcatttctgtagat

SEQ ID NO: 364070 - DNA, 30 bp, Artificial Sequence
  Synthetic oligonucleotide
tgtcctacgagcatgtaagcataattagat

SEQ ID NO: 364071 - DNA, 30 bp, Artificial Sequence
  Synthetic oligonucleotide
ccatttaaaattgggggattatgcttagat

SEQ ID NO: 364072 - DNA, 30 bp, Artificial Sequence
  Synthetic oligonucleotide
tttaagcctacctattgaggtaggttagat

SEQ ID NO: 364073 - DNA, 30 bp, Artificial Sequence
  Synthetic oligonucleotide
taggcctgcatttaaaatcggaaaaacgat

SEQ ID NO: 364074 - DNA, 30 bp, Artificial Sequence
  Synthetic oligonucleotide
atatttgcgtgatcgttttcaacaaacgat

SEQ ID NO: 364075 - DNA, 30 bp, Artificial Sequence
  Synthetic oligonucleotide
ctgtcgtcggcatgttcaagtcgaaacgat

SEQ ID NO: 364076 - DNA, 30 bp, Artificial Sequence
  Synthetic oligonucleotide
aactggagttcccaactccggaacaacgat

SEQ ID NO: 364077 - DNA, 30 bp, Artificial Sequence
  Synthetic oligonucleotide
aaacaaacaactagtaatctccacaacgat

SEQ ID NO: 364078 - DNA, 30 bp, Artificial Sequence
  Synthetic oligonucleotide
gagtgccagatatggaccaaattcaacgat

SEQ ID NO: 364079 - DNA, 30 bp, Artificial Sequence
  Synthetic oligonucleotide
aaactcgtatatctaggaatacataacgat

SEQ ID NO: 364080 - DNA, 30 bp, Artificial Sequence
  Synthetic oligonucleotide
atgatcccctggtctatggcctgtaacgat

SEQ ID NO: 364081 - DNA, 30 bp, Artificial Sequence
  Synthetic oligonucleotide
atggccgcatttcaagttgaaacccacgat

SEQ ID NO: 364082 - DNA, 30 bp, Artificial Sequence
  Synthetic oligonucleotide
attactagtacgttgagtttcaagcacgat

SEQ ID NO: 364083 - DNA, 30 bp, Artificial Sequence
  Synthetic oligonucleotide
caagttacttgatgaaagtaagcgcacgat

SEQ ID NO: 364084 - DNA, 30 bp, Artificial Sequence
  Synthetic oligonucleotide
gccattagggtcggccaggcgccagacgat

SEQ ID NO: 364085 - DNA, 30 bp, Artificial Sequence
  Synthetic oligonucleotide
aacaatagctcgcggtatcgcaacgacgat

SEQ ID NO: 364086 - DNA, 30 bp, Artificial Sequence
  Synthetic oligonucleotide
aaaagaaatccctaaagcaactccgacgat

SEQ ID NO: 364087 - DNA, 30 bp, Artificial Sequence
  Synthetic oligonucleotide
tcatataaaagaggcctttgcaaggacgat

SEQ ID NO: 364088 - DNA, 30 bp, Artificial Sequence
  Synthetic oligonucleotide
cccatatttcacggtagttctgaatacgat

SEQ ID NO: 364089 - DNA, 30 bp, Artificial Sequence
  Synthetic oligonucleotide
taagaggaccttgcaacttttcgctacgat

SEQ ID NO: 364090 - DNA, 30 bp, Artificial Sequence
  Synthetic oligonucleotide
cactcgtgcactttaatcaggtgctacgat

SEQ ID NO: 364091 - DNA, 30 bp, Artificial Sequence
  Synthetic oligonucleotide
gaggaacacctgagagtctgctagtacgat

SEQ ID NO: 364092 - DNA, 30 bp, Artificial Sequence
  Synthetic oligonucleotide
ggtattatctagcgggtgtccaattacgat

SEQ ID NO: 364093 - DNA, 30 bp, Artificial Sequence
  Synthetic oligonucleotide
gacagaccaaaagggtcagcttacaccgat

SEQ ID NO: 364094 - DNA, 30 bp, Artificial Sequence
  Synthetic oligonucleotide
ggagactacaggtcgcacttcgggaccgat

SEQ ID NO: 364095 - DNA, 30 bp, Artificial Sequence
  Synthetic oligonucleotide
ctcagtcatgggcttatcacaaataccgat

SEQ ID NO: 364096 - DNA, 30 bp, Artificial Sequence
  Synthetic oligonucleotide
taccgtttctctgcttgtatctgtaccgat

SEQ ID NO: 364097 - DNA, 30 bp, Artificial Sequence
  Synthetic oligonucleotide
taacaatagtcttggaagggagaacccgat

SEQ ID NO: 364098 - DNA, 30 bp, Artificial Sequence
  Synthetic oligonucleotide
gggtcacacttagatatcaatgaccccgat

SEQ ID NO: 364099 - DNA, 30 bp, Artificial Sequence
  Synthetic oligonucleotide
ctttcactgctgctggagtgagtccccgat

SEQ ID NO: 364100 - DNA, 30 bp, Artificial Sequence
  Synthetic oligonucleotide
ttgatggctttcaaagtaatgacgcccgat

SEQ ID NO: 364101 - DNA, 30 bp, Artificial Sequence
  Synthetic oligonucleotide
ccggcgactgacgccatggttaatcccgat

SEQ ID NO: 364102 - DNA, 30 bp, Artificial Sequence
  Synthetic oligonucleotide
cctctggcttttgagggtactggtcccgat

SEQ ID NO: 364103 - DNA, 30 bp, Artificial Sequence
  Synthetic oligonucleotide
agccaaaacgcaggttccgacccagccgat

SEQ ID NO: 364104 - DNA, 30 bp, Artificial Sequence
  Synthetic oligonucleotide
cccgagtgcaacgagcgtatgagagccgat

SEQ ID NO: 364105 - DNA, 30 bp, Artificial Sequence
  Synthetic oligonucleotide
ggagccctcgcctgcggaatactagccgat

SEQ ID NO: 364106 - DNA, 30 bp, Artificial Sequence
  Synthetic oligonucleotide
gttccccctaaatagcaactcagcgccgat

SEQ ID NO: 364107 - DNA, 30 bp, Artificial Sequence
  Synthetic oligonucleotide
tacttgtaaaggatacaagagcaggccgat

SEQ ID NO: 364108 - DNA, 30 bp, Artificial Sequence
  Synthetic oligonucleotide
ctctcgggcatacgtatagaataggccgat

SEQ ID NO: 364109 - DNA, 30 bp, Artificial Sequence
  Synthetic oligonucleotide
cttttgtttatggacatcatcctggccgat

SEQ ID NO: 364110 - DNA, 30 bp, Artificial Sequence
  Synthetic oligonucleotide
gcccacgattgccggctaattattgccgat

SEQ ID NO: 364111 - DNA, 30 bp, Artificial Sequence
  Synthetic oligonucleotide
ttcgggtatctagcaggggttattgccgat

SEQ ID NO: 364112 - DNA, 30 bp, Artificial Sequence
  Synthetic oligonucleotide
ggggcgcggagcagggaggctgaatccgat

SEQ ID NO: 364113 - DNA, 30 bp, Artificial Sequence
  Synthetic oligonucleotide
atgagtcgctggagaaacaatcactccgat

SEQ ID NO: 364114 - DNA, 30 bp, Artificial Sequence
  Synthetic oligonucleotide
ctgcaagggttagcgcttaaatcctccgat

SEQ ID NO: 364115 - DNA, 30 bp, Artificial Sequence
  Synthetic oligonucleotide
acagatgagggtcaaaggggtccacgcgat

SEQ ID NO: 364116 - DNA, 30 bp, Artificial Sequence
  Synthetic oligonucleotide
gctattcggagaactaggttttcacgcgat

SEQ ID NO: 364117 - DNA, 30 bp, Artificial Sequence
  Synthetic oligonucleotide
aggttcatcctggtgcaatgcatccgcgat

SEQ ID NO: 364118 - DNA, 30 bp, Artificial Sequence
  Synthetic oligonucleotide
ttatgccttttcccggcaaccgtccgcgat

SEQ ID NO: 364119 - DNA, 30 bp, Artificial Sequence
  Synthetic oligonucleotide
atctattatgcttgggcttccgtgcgcgat

SEQ ID NO: 364120 - DNA, 30 bp, Artificial Sequence
  Synthetic oligonucleotide
atatcatgcgagctagttgggtatcgcgat

SEQ ID NO: 364121 - DNA, 30 bp, Artificial Sequence
  Synthetic oligonucleotide
gcacacacacaagttcgaagaattcgcgat

SEQ ID NO: 364122 - DNA, 30 bp, Artificial Sequence
  Synthetic oligonucleotide
ttaatgattcgttactgcccaaacggcgat

SEQ ID NO: 364123 - DNA, 30 bp, Artificial Sequence
  Synthetic oligonucleotide
gtcagggatcaaatgcgtcgcaacggcgat

SEQ ID NO: 364124 - DNA, 30 bp, Artificial Sequence
  Synthetic oligonucleotide
gatcatgatggtcaggcgcgctccggcgat

SEQ ID NO: 364125 - DNA, 30 bp, Artificial Sequence
  Synthetic oligonucleotide
ccggatagtgatcctccgtactgcggcgat

SEQ ID NO: 364126 - DNA, 30 bp, Artificial Sequence
  Synthetic oligonucleotide
aaagccgaagctccggctgctcagggcgat

SEQ ID NO: 364127 - DNA, 30 bp, Artificial Sequence
  Synthetic oligonucleotide
ctcgtactttgtgcccgagatcggggcgat

SEQ ID NO: 364128 - DNA, 30 bp, Artificial Sequence
  Synthetic oligonucleotide
tcgattaatgcatttaccctggtgggcgat

SEQ ID NO: 364129 - DNA, 30 bp, Artificial Sequence
  Synthetic oligonucleotide
aagtttcggtgttgcggcgattatggcgat

SEQ ID NO: 364130 - DNA, 30 bp, Artificial Sequence
  Synthetic oligonucleotide
gcatctgagatcgcatcttgcgctggcgat

SEQ ID NO: 364131 - DNA, 30 bp, Artificial Sequence
  Synthetic oligonucleotide
aaacagacgtaatggaagcgcattggcgat

SEQ ID NO: 364132 - DNA, 30 bp, Artificial Sequence
  Synthetic oligonucleotide
cgacaggactgtgcagctctgcttggcgat

SEQ ID NO: 364133 - DNA, 30 bp, Artificial Sequence
  Synthetic oligonucleotide
ctcctgccgaaatcttgtctttcatgcgat

SEQ ID NO: 364134 - DNA, 30 bp, Artificial Sequence
  Synthetic oligonucleotide
gttctcaaacggggcagttacgtgtgcgat

SEQ ID NO: 364135 - DNA, 30 bp, Artificial Sequence
  Synthetic oligonucleotide
atccaacacgggtgcagtaacgattgcgat

SEQ ID NO: 364136 - DNA, 30 bp, Artificial Sequence
  Synthetic oligonucleotide
ctgatggtagggtatattgcggaaatcgat

SEQ ID NO: 364137 - DNA, 30 bp, Artificial Sequence
  Synthetic oligonucleotide
ttcgtgcagcaaccggcaccgtacatcgat

SEQ ID NO: 364138 - DNA, 30 bp, Artificial Sequence
  Synthetic oligonucleotide
agatgaaagcaccgcacattttccatcgat

SEQ ID NO: 364139 - DNA, 30 bp, Artificial Sequence
  Synthetic oligonucleotide
cctcgcgtttatagcgcgatattcatcgat

SEQ ID NO: 364140 - DNA, 30 bp, Artificial Sequence
  Synthetic oligonucleotide
gaaatcatcccccttgcaaacttcctcgat

SEQ ID NO: 364141 - DNA, 30 bp, Artificial Sequence
  Synthetic oligonucleotide
caagccctgccaattttgagacctctcgat

SEQ ID NO: 364142 - DNA, 30 bp, Artificial Sequence
  Synthetic oligonucleotide
ccggtctagcaacggtggcaatgagtcgat

SEQ ID NO: 364143 - DNA, 30 bp, Artificial Sequence
  Synthetic oligonucleotide
gtccgcgagccatgtttgtagcgggtcgat

SEQ ID NO: 364144 - DNA, 30 bp, Artificial Sequence
  Synthetic oligonucleotide
gctgagaggttgggttattaaacattcgat

SEQ ID NO: 364145 - DNA, 30 bp, Artificial Sequence
  Synthetic oligonucleotide
gatctttgaagagggacccgcagcttcgat

SEQ ID NO: 364146 - DNA, 30 bp, Artificial Sequence
  Synthetic oligonucleotide
gctcttggccaccaatgatcccgcttcgat

SEQ ID NO: 364147 - DNA, 30 bp, Artificial Sequence
  Synthetic oligonucleotide
gggtgagtcttttcatacggacctttcgat

SEQ ID NO: 364148 - DNA, 30 bp, Artificial Sequence
  Synthetic oligonucleotide
gataaagcgatactagattaggctttcgat

SEQ ID NO: 364149 - DNA, 30 bp, Artificial Sequence
  Synthetic oligonucleotide
tacaaatgaactattaccccgctaaaggat

SEQ ID NO: 364150 - DNA, 30 bp, Artificial Sequence
  Synthetic oligonucleotide
cgattgatcagccaccgcgggcacaaggat

SEQ ID NO: 364151 - DNA, 30 bp, Artificial Sequence
  Synthetic oligonucleotide
cagaggttaggttctttaagatacaaggat

SEQ ID NO: 364152 - DNA, 30 bp, Artificial Sequence
  Synthetic oligonucleotide
aatgtacgggaccaattagaccccaaggat

SEQ ID NO: 364153 - DNA, 30 bp, Artificial Sequence
  Synthetic oligonucleotide
cgtaccatgtctctgccacccagcaaggat

SEQ ID NO: 364154 - DNA, 30 bp, Artificial Sequence
  Synthetic oligonucleotide
cgggcttcagagcaccccgcaggcaaggat

SEQ ID NO: 364155 - DNA, 30 bp, Artificial Sequence
  Synthetic oligonucleotide
tgaaaagatatctagaccatttgcaaggat

SEQ ID NO: 364156 - DNA, 30 bp, Artificial Sequence
  Synthetic oligonucleotide
gagaatgggtaagataatttaattaaggat

SEQ ID NO: 364157 - DNA, 30 bp, Artificial Sequence
  Synthetic oligonucleotide
acaaggttagttcgtcggtttcttaaggat

SEQ ID NO: 364158 - DNA, 30 bp, Artificial Sequence
  Synthetic oligonucleotide
tgatggtgaatgacgtagaggtaacaggat

SEQ ID NO: 364159 - DNA, 30 bp, Artificial Sequence
  Synthetic oligonucleotide
gtaagcccttagttagagaatcgacaggat

SEQ ID NO: 364160 - DNA, 30 bp, Artificial Sequence
  Synthetic oligonucleotide
ctacgacatcccttccacaatatacaggat

SEQ ID NO: 364161 - DNA, 30 bp, Artificial Sequence
  Synthetic oligonucleotide
aggtaagtctttacctcaaccgtacaggat

SEQ ID NO: 364162 - DNA, 30 bp, Artificial Sequence
  Synthetic oligonucleotide
atgcgttctgcatcagcagcataccaggat

SEQ ID NO: 364163 - DNA, 30 bp, Artificial Sequence
  Synthetic oligonucleotide
aacgctgagtgggacgcgttgacccaggat

SEQ ID NO: 364164 - DNA, 30 bp, Artificial Sequence
  Synthetic oligonucleotide
agtgacggtagccattgacttacccaggat

SEQ ID NO: 364165 - DNA, 30 bp, Artificial Sequence
  Synthetic oligonucleotide
tcgtagaacaaatcggccctgttccaggat

SEQ ID NO: 364166 - DNA, 30 bp, Artificial Sequence
  Synthetic oligonucleotide
agtgcgcaacacgtagtcttaacgcaggat

SEQ ID NO: 364167 - DNA, 30 bp, Artificial Sequence
  Synthetic oligonucleotide
atatcgaccgatatatggccctcgcaggat

SEQ ID NO: 364168 - DNA, 30 bp, Artificial Sequence
  Synthetic oligonucleotide
tacagagcccgtaatatgttttggcaggat

SEQ ID NO: 364169 - DNA, 30 bp, Artificial Sequence
  Synthetic oligonucleotide
gcgcaaaaacgtgcggtacgttctcaggat

SEQ ID NO: 364170 - DNA, 30 bp, Artificial Sequence
  Synthetic oligonucleotide
gacgtgacgataaggccttaacgtcaggat

SEQ ID NO: 364171 - DNA, 30 bp, Artificial Sequence
  Synthetic oligonucleotide
tgaattatcgtttacgagtgtaaagaggat

SEQ ID NO: 364172 - DNA, 30 bp, Artificial Sequence
  Synthetic oligonucleotide
atcaccccttgagtttaatcacgagaggat

SEQ ID NO: 364173 - DNA, 30 bp, Artificial Sequence
  Synthetic oligonucleotide
attattcgagggcccgggtgattggaggat

SEQ ID NO: 364174 - DNA, 30 bp, Artificial Sequence
  Synthetic oligonucleotide
aggggagccacaatccggttcaatgaggat

SEQ ID NO: 364175 - DNA, 30 bp, Artificial Sequence
  Synthetic oligonucleotide
aattgcttacacagggacggacatgaggat

SEQ ID NO: 364176 - DNA, 30 bp, Artificial Sequence
  Synthetic oligonucleotide
ttaatcccgtcgcgatggcaaagctaggat

SEQ ID NO: 364177 - DNA, 30 bp, Artificial Sequence
  Synthetic oligonucleotide
gttttgcacttttttgcgagtagctaggat

SEQ ID NO: 364178 - DNA, 30 bp, Artificial Sequence
  Synthetic oligonucleotide
ccaatcctaatagagcggtccggctaggat

SEQ ID NO: 364179 - DNA, 30 bp, Artificial Sequence
  Synthetic oligonucleotide
tggaacgtaaagtataaggggttctaggat

SEQ ID NO: 364180 - DNA, 30 bp, Artificial Sequence
  Synthetic oligonucleotide
ccgtgggtcagcaatgcagacctgtaggat

SEQ ID NO: 364181 - DNA, 30 bp, Artificial Sequence
  Synthetic oligonucleotide
cctacagcgcagcgcatgttatgttaggat

SEQ ID NO: 364182 - DNA, 30 bp, Artificial Sequence
  Synthetic oligonucleotide
gttagtccttagtagctgcacttttaggat

SEQ ID NO: 364183 - DNA, 30 bp, Artificial Sequence
  Synthetic oligonucleotide
gtgaatgaggcatcgagcaatttttaggat

SEQ ID NO: 364184 - DNA, 30 bp, Artificial Sequence
  Synthetic oligonucleotide
actacacgcgcggtagataggttaacggat

SEQ ID NO: 364185 - DNA, 30 bp, Artificial Sequence
  Synthetic oligonucleotide
ggggttgtcttagtgggatgagacacggat

SEQ ID NO: 364186 - DNA, 30 bp, Artificial Sequence
  Synthetic oligonucleotide
gctaccgaccaagcaggacggcagacggat

SEQ ID NO: 364187 - DNA, 30 bp, Artificial Sequence
  Synthetic oligonucleotide
aagctccagtgcgaatctatatagacggat

SEQ ID NO: 364188 - DNA, 30 bp, Artificial Sequence
  Synthetic oligonucleotide
gtaatccaccgacgttatgagggtacggat

SEQ ID NO: 364189 - DNA, 29 bp, Artificial Sequence
  Synthetic oligonucleotide
aggtcctattcccggattagaaaccggat

SEQ ID NO: 364190 - DNA, 30 bp, Artificial Sequence
  Synthetic oligonucleotide
tcgtccgcatagcaatcagccgcaccggat

SEQ ID NO: 364191 - DNA, 30 bp, Artificial Sequence
  Synthetic oligonucleotide
ctgaagttaatctcgctcatcataccggat

SEQ ID NO: 364192 - DNA, 30 bp, Artificial Sequence
  Synthetic oligonucleotide
taattacgaccctgggtaagcatcccggat

SEQ ID NO: 364193 - DNA, 30 bp, Artificial Sequence
  Synthetic oligonucleotide
cccgactacgcaaggaagtcgtggccggat

SEQ ID NO: 364194 - DNA, 30 bp, Artificial Sequence
  Synthetic oligonucleotide
cattgtcttagcccatggctgggtccggat

SEQ ID NO: 364195 - DNA, 30 bp, Artificial Sequence
  Synthetic oligonucleotide
gacaaaagtcttccatggcctacagcggat

SEQ ID NO: 364196 - DNA, 30 bp, Artificial Sequence
  Synthetic oligonucleotide
acggcattaacacgtgggtaacacgcggat

SEQ ID NO: 364197 - DNA, 30 bp, Artificial Sequence
  Synthetic oligonucleotide
ttccggaagatcagtataattcccgcggat

SEQ ID NO: 364198 - DNA, 30 bp, Artificial Sequence
  Synthetic oligonucleotide
agcaataaagagcgatgggtcatcgcggat

SEQ ID NO: 364199 - DNA, 30 bp, Artificial Sequence
  Synthetic oligonucleotide
gttagttatgcccgttctccttatgcggat

SEQ ID NO: 364200 - DNA, 30 bp, Artificial Sequence
  Synthetic oligonucleotide
ggttcgcagttggttacgactcaatcggat

SEQ ID NO: 364201 - DNA, 30 bp, Artificial Sequence
  Synthetic oligonucleotide
cagtgatataatcgaaatttttgatcggat

SEQ ID NO: 364202 - DNA, 30 bp, Artificial Sequence
  Synthetic oligonucleotide
aggaatgcagctgcaatcgtcagctcggat

SEQ ID NO: 364203 - DNA, 28 bp, Artificial Sequence
  Synthetic oligonucleotide
taaatgctcgtcgggtggttgctcggat

SEQ ID NO: 364204 - DNA, 30 bp, Artificial Sequence
  Synthetic oligonucleotide
cccctgggtaatcatagtacgaagtcggat

SEQ ID NO: 364205 - DNA, 30 bp, Artificial Sequence
  Synthetic oligonucleotide
taatgcgtaacttcgctagctaagtcggat

SEQ ID NO: 364206 - DNA, 30 bp, Artificial Sequence
  Synthetic oligonucleotide
gtgatattcttcgggatgctatagtcggat

SEQ ID NO: 364207 - DNA, 30 bp, Artificial Sequence
  Synthetic oligonucleotide
gaccctgtcctacgacatgactcgtcggat

SEQ ID NO: 364208 - DNA, 30 bp, Artificial Sequence
  Synthetic oligonucleotide
ggcgggtgtacccttagcactcggtcggat

SEQ ID NO: 364209 - DNA, 30 bp, Artificial Sequence
  Synthetic oligonucleotide
ttccggatgggctacagggatcattcggat

SEQ ID NO: 364210 - DNA, 30 bp, Artificial Sequence
  Synthetic oligonucleotide
atagttgacggaatttaggtgttaagggat

SEQ ID NO: 364211 - DNA, 30 bp, Artificial Sequence
  Synthetic oligonucleotide
gcgctgtcaatgattaagtctgggagggat

SEQ ID NO: 364212 - DNA, 30 bp, Artificial Sequence
  Synthetic oligonucleotide
gcggagcagccaccctgcaattggagggat

SEQ ID NO: 364213 - DNA, 30 bp, Artificial Sequence
  Synthetic oligonucleotide
gggacgagagcttttaatcgtattagggat

SEQ ID NO: 364214 - DNA, 30 bp, Artificial Sequence
  Synthetic oligonucleotide
agaactggtattgaggcgacgaagcgggat

SEQ ID NO: 364215 - DNA, 30 bp, Artificial Sequence
  Synthetic oligonucleotide
tgactcacgggtgtcccgggaagtcgggat

SEQ ID NO: 364216 - DNA, 30 bp, Artificial Sequence
  Synthetic oligonucleotide
attaccgggaatcgatttatcgcaggggat

SEQ ID NO: 364217 - DNA, 30 bp, Artificial Sequence
  Synthetic oligonucleotide
aaacacaaggcacggcaataatgaggggat

SEQ ID NO: 364218 - DNA, 29 bp, Artificial Sequence
  Synthetic oligonucleotide
ttgcccatcgtatacgacacgacggggat

SEQ ID NO: 364219 - DNA, 30 bp, Artificial Sequence
  Synthetic oligonucleotide
tagtatcgacccgtctcttcccggggggat

SEQ ID NO: 364220 - DNA, 30 bp, Artificial Sequence
  Synthetic oligonucleotide
ggaacattgcgtcaatcccttgggggggat

SEQ ID NO: 364221 - DNA, 30 bp, Artificial Sequence
  Synthetic oligonucleotide
agaggtacccatataggacaagttggggat

SEQ ID NO: 364222 - DNA, 30 bp, Artificial Sequence
  Synthetic oligonucleotide
agaatcttattgggataccgtacatgggat

SEQ ID NO: 364223 - DNA, 30 bp, Artificial Sequence
  Synthetic oligonucleotide
cagcgcggcccgcctccgggaatgtgggat

SEQ ID NO: 364224 - DNA, 30 bp, Artificial Sequence
  Synthetic oligonucleotide
ttcgagtttcgcttactagattattgggat

SEQ ID NO: 364225 - DNA, 30 bp, Artificial Sequence
  Synthetic oligonucleotide
ccataccgcgttcccaaggaaagttgggat

SEQ ID NO: 364226 - DNA, 30 bp, Artificial Sequence
  Synthetic oligonucleotide
catagaactagctacccagtacgttgggat

SEQ ID NO: 364227 - DNA, 30 bp, Artificial Sequence
  Synthetic oligonucleotide
gatcaggtcttcaatccttataaaatggat

SEQ ID NO: 364228 - DNA, 30 bp, Artificial Sequence
  Synthetic oligonucleotide
gaccgtcttccaatggttgcttgaatggat

SEQ ID NO: 364229 - DNA, 30 bp, Artificial Sequence
  Synthetic oligonucleotide
cacccaacactgtacaaatgactaatggat

SEQ ID NO: 364230 - DNA, 30 bp, Artificial Sequence
  Synthetic oligonucleotide
cgcttacaaaagtcgaagccaacgatggat

SEQ ID NO: 364231 - DNA, 30 bp, Artificial Sequence
  Synthetic oligonucleotide
aagtgaacctccaaaatactaccgatggat

SEQ ID NO: 364232 - DNA, 30 bp, Artificial Sequence
  Synthetic oligonucleotide
aacaattacaggtaatcataatcgatggat

SEQ ID NO: 364233 - DNA, 30 bp, Artificial Sequence
  Synthetic oligonucleotide
gcaccggtccatgtatgtacaaggatggat

SEQ ID NO: 364234 - DNA, 30 bp, Artificial Sequence
  Synthetic oligonucleotide
ccacttatttgctcaaagagttggatggat

SEQ ID NO: 364235 - DNA, 30 bp, Artificial Sequence
  Synthetic oligonucleotide
aggccatgcataatctgttgccatatggat

SEQ ID NO: 364236 - DNA, 30 bp, Artificial Sequence
  Synthetic oligonucleotide
ctcgagctcgagttcaaggtaattatggat

SEQ ID NO: 364237 - DNA, 30 bp, Artificial Sequence
  Synthetic oligonucleotide
gcatgatctctaactgcatcgaaactggat

SEQ ID NO: 364238 - DNA, 30 bp, Artificial Sequence
  Synthetic oligonucleotide
tcctggaggttgttgttatgagaactggat

SEQ ID NO: 364239 - DNA, 30 bp, Artificial Sequence
  Synthetic oligonucleotide
aacatttgtaagggcgccagtatcctggat

SEQ ID NO: 364240 - DNA, 30 bp, Artificial Sequence
  Synthetic oligonucleotide
cagaataatatagtgtgcgtaaagctggat

SEQ ID NO: 364241 - DNA, 30 bp, Artificial Sequence
  Synthetic oligonucleotide
gagtagttaccgttcggcctcccgctggat

SEQ ID NO: 364242 - DNA, 30 bp, Artificial Sequence
  Synthetic oligonucleotide
aagcccggtccctcggtccaaaggctggat

SEQ ID NO: 364243 - DNA, 30 bp, Artificial Sequence
  Synthetic oligonucleotide
ggtgcacccgtaggggacctggggctggat

SEQ ID NO: 364244 - DNA, 30 bp, Artificial Sequence
  Synthetic oligonucleotide
ttcgggggtcaaaggtggcggattctggat

SEQ ID NO: 364245 - DNA, 30 bp, Artificial Sequence
  Synthetic oligonucleotide
aataaggcgaggtcttgtcaccttctggat

SEQ ID NO: 364246 - DNA, 30 bp, Artificial Sequence
  Synthetic oligonucleotide
tccacctaggggtccacagtgagagtggat

SEQ ID NO: 364247 - DNA, 30 bp, Artificial Sequence
  Synthetic oligonucleotide
aaggcatgtgtttaaattaaaactgtggat

SEQ ID NO: 364248 - DNA, 30 bp, Artificial Sequence
  Synthetic oligonucleotide
ctgctctatgagaagtagggtactgtggat

SEQ ID NO: 364249 - DNA, 30 bp, Artificial Sequence
  Synthetic oligonucleotide
cacgtggctggggttctatgtgctgtggat

SEQ ID NO: 364250 - DNA, 30 bp, Artificial Sequence
  Synthetic oligonucleotide
agcgtcgtaataggctgcaatcgtgtggat

SEQ ID NO: 364251 - DNA, 30 bp, Artificial Sequence
  Synthetic oligonucleotide
gaggcttatagatacgaccactgtgtggat

SEQ ID NO: 364252 - DNA, 30 bp, Artificial Sequence
  Synthetic oligonucleotide
tccgatcccatgtgtaaggcactattggat

SEQ ID NO: 364253 - DNA, 30 bp, Artificial Sequence
  Synthetic oligonucleotide
gtcatgatagaaataggttgcctattggat

SEQ ID NO: 364254 - DNA, 30 bp, Artificial Sequence
  Synthetic oligonucleotide
gacacggggtgattctgttgcaacttggat

SEQ ID NO: 364255 - DNA, 30 bp, Artificial Sequence
  Synthetic oligonucleotide
gggcgcagtttttgttgcagggtcttggat

SEQ ID NO: 364256 - DNA, 30 bp, Artificial Sequence
  Synthetic oligonucleotide
aactctacaagggcaaggtgaacgttggat

SEQ ID NO: 364257 - DNA, 30 bp, Artificial Sequence
  Synthetic oligonucleotide
actggatgccgggaggattaatcgttggat

SEQ ID NO: 364258 - DNA, 30 bp, Artificial Sequence
  Synthetic oligonucleotide
taatgataacgaggtacccgtccaaatgat

SEQ ID NO: 364259 - DNA, 30 bp, Artificial Sequence
  Synthetic oligonucleotide
ttgacgcccgcggctggtatattcaatgat

SEQ ID NO: 364260 - DNA, 30 bp, Artificial Sequence
  Synthetic oligonucleotide
aataagaagtggactcttactcagaatgat

SEQ ID NO: 364261 - DNA, 30 bp, Artificial Sequence
  Synthetic oligonucleotide
gctaatcttgtcaccacgaccgagaatgat

SEQ ID NO: 364262 - DNA, 30 bp, Artificial Sequence
  Synthetic oligonucleotide
aactggggaagcctccagggctggaatgat

SEQ ID NO: 364263 - DNA, 30 bp, Artificial Sequence
  Synthetic oligonucleotide
ggtagttgtatgcagtcgcaagttaatgat

SEQ ID NO: 364264 - DNA, 30 bp, Artificial Sequence
  Synthetic oligonucleotide
aagcggagggtctctacggttctacatgat

SEQ ID NO: 364265 - DNA, 30 bp, Artificial Sequence
  Synthetic oligonucleotide
tgcaattcttgatcctcgtttaagcatgat

SEQ ID NO: 364266 - DNA, 30 bp, Artificial Sequence
  Synthetic oligonucleotide
tatcatagtgattatgaaatcccgcatgat

SEQ ID NO: 364267 - DNA, 30 bp, Artificial Sequence
  Synthetic oligonucleotide
tatcactggttaggcgtgggtccgcatgat

SEQ ID NO: 364268 - DNA, 30 bp, Artificial Sequence
  Synthetic oligonucleotide
ccattattcggatagatactatcagatgat

SEQ ID NO: 364269 - DNA, 30 bp, Artificial Sequence
  Synthetic oligonucleotide
tcgggccaattacttcacacgcgagatgat

SEQ ID NO: 364270 - DNA, 30 bp, Artificial Sequence
  Synthetic oligonucleotide
caaccagccttcaatgatctgaaggatgat

SEQ ID NO: 364271 - DNA, 30 bp, Artificial Sequence
  Synthetic oligonucleotide
tcgcgtgctgtccggcttgtatcggatgat

SEQ ID NO: 364272 - DNA, 30 bp, Artificial Sequence
  Synthetic oligonucleotide
cgttagtgtagccttcaatttggggatgat

SEQ ID NO: 364273 - DNA, 30 bp, Artificial Sequence
  Synthetic oligonucleotide
tctataactaggtgtgcaaaaaaatatgat

SEQ ID NO: 364274 - DNA, 30 bp, Artificial Sequence
  Synthetic oligonucleotide
ggacttacatgctctaagtacgaatatgat

SEQ ID NO: 364275 - DNA, 30 bp, Artificial Sequence
  Synthetic oligonucleotide
tgtattgctagggagagctgatcatatgat

SEQ ID NO: 364276 - DNA, 30 bp, Artificial Sequence
  Synthetic oligonucleotide
gcaactttggcgaaagtactccgatatgat

SEQ ID NO: 364277 - DNA, 30 bp, Artificial Sequence
  Synthetic oligonucleotide
ctaactgggcgcccggggtcagtatatgat

SEQ ID NO: 364278 - DNA, 30 bp, Artificial Sequence
  Synthetic oligonucleotide
gcggtagttgcaatggaagcaacttatgat

SEQ ID NO: 364279 - DNA, 30 bp, Artificial Sequence
  Synthetic oligonucleotide
agaaagccctgaagctcgccgggttatgat

SEQ ID NO: 364280 - DNA, 30 bp, Artificial Sequence
  Synthetic oligonucleotide
gaagaatcggcgtgacgtctcttttatgat

SEQ ID NO: 364281 - DNA, 30 bp, Artificial Sequence
  Synthetic oligonucleotide
cttaacgtccaatagatctgggaaactgat

SEQ ID NO: 364282 - DNA, 30 bp, Artificial Sequence
  Synthetic oligonucleotide
tgccgctcgaaggtttacacccgaactgat

SEQ ID NO: 364283 - DNA, 30 bp, Artificial Sequence
  Synthetic oligonucleotide
aaaaccagacatgtaatgtacggaactgat

SEQ ID NO: 364284 - DNA, 30 bp, Artificial Sequence
  Synthetic oligonucleotide
gctcccccatgggcacacttgcacactgat

SEQ ID NO: 364285 - DNA, 30 bp, Artificial Sequence
  Synthetic oligonucleotide
catggtggtacagccctttacagcactgat

SEQ ID NO: 364286 - DNA, 30 bp, Artificial Sequence
  Synthetic oligonucleotide
tggtgtaaaatgaatttagtccagactgat

SEQ ID NO: 364287 - DNA, 31 bp, Artificial Sequence
  Synthetic oligonucleotide
cagtgactgttgcttatcaagatagactgat

SEQ ID NO: 364288 - DNA, 30 bp, Artificial Sequence
  Synthetic oligonucleotide
gacggaagcctttactgatgatagactgat

SEQ ID NO: 364289 - DNA, 30 bp, Artificial Sequence
  Synthetic oligonucleotide
agtggggcatcaatcataaagttgactgat

SEQ ID NO: 364290 - DNA, 30 bp, Artificial Sequence
  Synthetic oligonucleotide
ccagccggtctagaatatgccgctactgat

SEQ ID NO: 364291 - DNA, 30 bp, Artificial Sequence
  Synthetic oligonucleotide
cttgtgcctggggaataaagatctactgat

SEQ ID NO: 364292 - DNA, 30 bp, Artificial Sequence
  Synthetic oligonucleotide
tctcgaattacatgttgaaggcgtactgat

SEQ ID NO: 364293 - DNA, 30 bp, Artificial Sequence
  Synthetic oligonucleotide
tggtggcccagacagaatcagtgtactgat

SEQ ID NO: 364294 - DNA, 30 bp, Artificial Sequence
  Synthetic oligonucleotide
cccagaaggccaacacttcgccttactgat

SEQ ID NO: 364295 - DNA, 30 bp, Artificial Sequence
  Synthetic oligonucleotide
tcaaaaccgtttcgtatatcgtttactgat

SEQ ID NO: 364296 - DNA, 30 bp, Artificial Sequence
  Synthetic oligonucleotide
gcggtcatgcgagtaggtagttaacctgat

SEQ ID NO: 364297 - DNA, 30 bp, Artificial Sequence
  Synthetic oligonucleotide
gtccgtggggctagtatgtccgtacctgat

SEQ ID NO: 364298 - DNA, 30 bp, Artificial Sequence
  Synthetic oligonucleotide
ttaggcatcattcaccgttctgtacctgat

SEQ ID NO: 364299 - DNA, 30 bp, Artificial Sequence
  Synthetic oligonucleotide
acttatgcctcgggaactcactggcctgat

SEQ ID NO: 364300 - DNA, 30 bp, Artificial Sequence
  Synthetic oligonucleotide
ttagtgttcaggtcggacttttgagctgat

SEQ ID NO: 364301 - DNA, 30 bp, Artificial Sequence
  Synthetic oligonucleotide
tattgatgcctgagatacagcgtcgctgat

SEQ ID NO: 364302 - DNA, 30 bp, Artificial Sequence
  Synthetic oligonucleotide
tgaattatatcatataagagggtcgctgat

SEQ ID NO: 364303 - DNA, 30 bp, Artificial Sequence
  Synthetic oligonucleotide
gctagccatgctgtagtcagccaggctgat

SEQ ID NO: 364304 - DNA, 30 bp, Artificial Sequence
  Synthetic oligonucleotide
cttgcccaatagccggttcacaatgctgat

SEQ ID NO: 364305 - DNA, 30 bp, Artificial Sequence
  Synthetic oligonucleotide
taaatcgcgttcaagtcccttggtgctgat

SEQ ID NO: 364306 - DNA, 30 bp, Artificial Sequence
  Synthetic oligonucleotide
tctgatattccgtaggataccgaatctgat

SEQ ID NO: 364307 - DNA, 29 bp, Artificial Sequence
  Synthetic oligonucleotide
cacgtctgtcaaccgtgcgcaactctgat

SEQ ID NO: 364308 - DNA, 30 bp, Artificial Sequence
  Synthetic oligonucleotide
ttgtccacggtctatggatacacgtctgat

SEQ ID NO: 364309 - DNA, 30 bp, Artificial Sequence
  Synthetic oligonucleotide
catgaagcgtcactcgctaaccattctgat

SEQ ID NO: 364310 - DNA, 30 bp, Artificial Sequence
  Synthetic oligonucleotide
gcatactgtagcgttgtcgataaaagtgat

SEQ ID NO: 364311 - DNA, 30 bp, Artificial Sequence
  Synthetic oligonucleotide
aaaatgctcatccgtgaacgctgaagtgat

SEQ ID NO: 364312 - DNA, 30 bp, Artificial Sequence
  Synthetic oligonucleotide
tgattataaaattggtacggatacagtgat

SEQ ID NO: 364313 - DNA, 30 bp, Artificial Sequence
  Synthetic oligonucleotide
tggttaatggaggaggtactacgcagtgat

SEQ ID NO: 364314 - DNA, 30 bp, Artificial Sequence
  Synthetic oligonucleotide
ggcatctcgacggtcggtggctgcagtgat

SEQ ID NO: 364315 - DNA, 30 bp, Artificial Sequence
  Synthetic oligonucleotide
gtgcgggcctcgagccttcacggacgtgat

SEQ ID NO: 364316 - DNA, 30 bp, Artificial Sequence
  Synthetic oligonucleotide
ttcgcaacaggcgcacccctctgacgtgat

SEQ ID NO: 364317 - DNA, 30 bp, Artificial Sequence
  Synthetic oligonucleotide
acaaggtcgctcacggtcttataccgtgat

SEQ ID NO: 364318 - DNA, 30 bp, Artificial Sequence
  Synthetic oligonucleotide
gcctcaccatacagaatttggccccgtgat

SEQ ID NO: 364319 - DNA, 30 bp, Artificial Sequence
  Synthetic oligonucleotide
aagaggccaccatgatggcgtctccgtgat

SEQ ID NO: 364320 - DNA, 30 bp, Artificial Sequence
  Synthetic oligonucleotide
cggcccactcgataggcaacccggcgtgat

SEQ ID NO: 364321 - DNA, 30 bp, Artificial Sequence
  Synthetic oligonucleotide
ggaattagactgccgttaaacactcgtgat

SEQ ID NO: 364322 - DNA, 30 bp, Artificial Sequence
  Synthetic oligonucleotide
ggctaacgagtacagcttcctagtcgtgat

SEQ ID NO: 364323 - DNA, 30 bp, Artificial Sequence
  Synthetic oligonucleotide
taaattagaggattgtctctcggtcgtgat

SEQ ID NO: 364324 - DNA, 30 bp, Artificial Sequence
  Synthetic oligonucleotide
gaaattgttaaaggttcgcggtcaggtgat

SEQ ID NO: 364325 - DNA, 31 bp, Artificial Sequence
  Synthetic oligonucleotide
tagttagtttagagcttcgtcaggcggtgat

SEQ ID NO: 364326 - DNA, 30 bp, Artificial Sequence
  Synthetic oligonucleotide
cactacaggatagacgcgggtgtcggtgat

SEQ ID NO: 364327 - DNA, 30 bp, Artificial Sequence
  Synthetic oligonucleotide
tagcgagatcgatcatacttcttcggtgat

SEQ ID NO: 364328 - DNA, 30 bp, Artificial Sequence
  Synthetic oligonucleotide
agctcggggtaggatcgtggtttcggtgat

SEQ ID NO: 364329 - DNA, 30 bp, Artificial Sequence
  Synthetic oligonucleotide
cacttttaagtatggtaaattttcggtgat

SEQ ID NO: 364330 - DNA, 30 bp, Artificial Sequence
  Synthetic oligonucleotide
cgggtctcagagtcaatgaagacgggtgat

SEQ ID NO: 364331 - DNA, 30 bp, Artificial Sequence
  Synthetic oligonucleotide
agaagagtcttgttgtctatagcgggtgat

SEQ ID NO: 364332 - DNA, 30 bp, Artificial Sequence
  Synthetic oligonucleotide
ccgcgctttctatagagtctcatgggtgat

SEQ ID NO: 364333 - DNA, 30 bp, Artificial Sequence
  Synthetic oligonucleotide
ggtaaggaatgcggttagcccctgggtgat

SEQ ID NO: 364334 - DNA, 30 bp, Artificial Sequence
  Synthetic oligonucleotide
tacactttccaagagggtatcctgggtgat

SEQ ID NO: 364335 - DNA, 30 bp, Artificial Sequence
  Synthetic oligonucleotide
aacgcctgaaattatgacaacttttgtgat

SEQ ID NO: 364336 - DNA, 30 bp, Artificial Sequence
  Synthetic oligonucleotide
agcggaaaacacgcatgaatgatcattgat

SEQ ID NO: 364337 - DNA, 30 bp, Artificial Sequence
  Synthetic oligonucleotide
cgatcttaattctgtcgtcctcatattgat

SEQ ID NO: 364338 - DNA, 30 bp, Artificial Sequence
  Synthetic oligonucleotide
ggttcggccgattaggggttccggcttgat

SEQ ID NO: 364339 - DNA, 30 bp, Artificial Sequence
  Synthetic oligonucleotide
aaatacgacgagtttgaaaagttgcttgat

SEQ ID NO: 364340 - DNA, 30 bp, Artificial Sequence
  Synthetic oligonucleotide
cagcattcagcccgcatcttacatcttgat

SEQ ID NO: 364341 - DNA, 30 bp, Artificial Sequence
  Synthetic oligonucleotide
cttgacggtgagcatcgatttcgtcttgat

SEQ ID NO: 364342 - DNA, 30 bp, Artificial Sequence
  Synthetic oligonucleotide
tagctgcatcaccgtaataacccagttgat

SEQ ID NO: 364343 - DNA, 30 bp, Artificial Sequence
  Synthetic oligonucleotide
tactctaagagatgcatgcttaacgttgat

SEQ ID NO: 364344 - DNA, 30 bp, Artificial Sequence
  Synthetic oligonucleotide
ttgtggagtggattccagttgtaggttgat

SEQ ID NO: 364345 - DNA, 30 bp, Artificial Sequence
  Synthetic oligonucleotide
atgagacttcgtaatgcgcgaaaatttgat

SEQ ID NO: 364346 - DNA, 30 bp, Artificial Sequence
  Synthetic oligonucleotide
ttaggcttttaaagctctgatgaatttgat

SEQ ID NO: 364347 - DNA, 30 bp, Artificial Sequence
  Synthetic oligonucleotide
gcaatgggtttatgggcccacctatttgat

SEQ ID NO: 364348 - DNA, 30 bp, Artificial Sequence
  Synthetic oligonucleotide
aaacagtactacacggggctttactttgat

SEQ ID NO: 364349 - DNA, 30 bp, Artificial Sequence
  Synthetic oligonucleotide
taggacctcacgctaggcgcgagctttgat

SEQ ID NO: 364350 - DNA, 30 bp, Artificial Sequence
  Synthetic oligonucleotide
atcgtacccacttttatgtctcagtttgat

SEQ ID NO: 364351 - DNA, 30 bp, Artificial Sequence
  Synthetic oligonucleotide
cttcaaaaaagtccttgttacctgtttgat

SEQ ID NO: 364352 - DNA, 30 bp, Artificial Sequence
  Synthetic oligonucleotide
caatacagttaacacgaccatagaaaatat

SEQ ID NO: 364353 - DNA, 30 bp, Artificial Sequence
  Synthetic oligonucleotide
ggtatgggtaggattgctccgcgaaaatat

SEQ ID NO: 364354 - DNA, 30 bp, Artificial Sequence
  Synthetic oligonucleotide
gcatctcttggatacgcgaggataaaatat

SEQ ID NO: 364355 - DNA, 30 bp, Artificial Sequence
  Synthetic oligonucleotide
tgggggatgcagagccttaatgtaaaatat

SEQ ID NO: 364356 - DNA, 30 bp, Artificial Sequence
  Synthetic oligonucleotide
gtcagccttctaagcagactatgcaaatat

SEQ ID NO: 364357 - DNA, 30 bp, Artificial Sequence
  Synthetic oligonucleotide
taactgacaagtacggcccgatcgaaatat

SEQ ID NO: 364358 - DNA, 30 bp, Artificial Sequence
  Synthetic oligonucleotide
acgcgcaagtatcggcaggtcagtaaatat

SEQ ID NO: 364359 - DNA, 30 bp, Artificial Sequence
  Synthetic oligonucleotide
gaggggtggggattcaataattgtaaatat

SEQ ID NO: 364360 - DNA, 30 bp, Artificial Sequence
  Synthetic oligonucleotide
aagtttgaacttaagtccattcaacaatat

SEQ ID NO: 364361 - DNA, 30 bp, Artificial Sequence
  Synthetic oligonucleotide
atagttgatagatcttagtgttgccaatat

SEQ ID NO: 364362 - DNA, 30 bp, Artificial Sequence
  Synthetic oligonucleotide
gaagttcccggtaagtgcgcgtcgcaatat

SEQ ID NO: 364363 - DNA, 30 bp, Artificial Sequence
  Synthetic oligonucleotide
aacacttacgtacactgcgaatctcaatat

SEQ ID NO: 364364 - DNA, 30 bp, Artificial Sequence
  Synthetic oligonucleotide
atcacttatgcggcctggctagccgaatat

SEQ ID NO: 364365 - DNA, 30 bp, Artificial Sequence
  Synthetic oligonucleotide
ttctcacgtgggtccagatctttcgaatat

SEQ ID NO: 364366 - DNA, 30 bp, Artificial Sequence
  Synthetic oligonucleotide
tatggtaacagtcctattgcttaggaatat

SEQ ID NO: 364367 - DNA, 30 bp, Artificial Sequence
  Synthetic oligonucleotide
ggaccaacccgtaacaacggatgggaatat

SEQ ID NO: 364368 - DNA, 30 bp, Artificial Sequence
  Synthetic oligonucleotide
atgaaacccgtcacgcgctccatggaatat

SEQ ID NO: 364369 - DNA, 30 bp, Artificial Sequence
  Synthetic oligonucleotide
cgttagcaaactttgtcagcgaatgaatat

SEQ ID NO: 364370 - DNA, 30 bp, Artificial Sequence
  Synthetic oligonucleotide
gggctatagctcacgaggcaagtataatat

SEQ ID NO: 364371 - DNA, 30 bp, Artificial Sequence
  Synthetic oligonucleotide
atacattaatcatatggaggtaagtaatat

SEQ ID NO: 364372 - DNA, 30 bp, Artificial Sequence
  Synthetic oligonucleotide
aaacacgcacagcaaagtttgttgtaatat

SEQ ID NO: 364373 - DNA, 30 bp, Artificial Sequence
  Synthetic oligonucleotide
ctgtaaatggtaccctcgagaccttaatat

SEQ ID NO: 364374 - DNA, 30 bp, Artificial Sequence
  Synthetic oligonucleotide
cttttaagcatgtgccaacatttttaatat

SEQ ID NO: 364375 - DNA, 30 bp, Artificial Sequence
  Synthetic oligonucleotide
tcctgatgtcctctacgcacgaaaacatat

SEQ ID NO: 364376 - DNA, 30 bp, Artificial Sequence
  Synthetic oligonucleotide
aatatgaaagtgcagtttcagtaaacatat

SEQ ID NO: 364377 - DNA, 30 bp, Artificial Sequence
  Synthetic oligonucleotide
gtcgttcgtcgctcaaaacgtccaacatat

SEQ ID NO: 364378 - DNA, 30 bp, Artificial Sequence
  Synthetic oligonucleotide
cttcccagtactcctagaccgctcacatat

SEQ ID NO: 364379 - DNA, 30 bp, Artificial Sequence
  Synthetic oligonucleotide
ggatctaggatacgacaagcaaagacatat

SEQ ID NO: 364380 - DNA, 30 bp, Artificial Sequence
  Synthetic oligonucleotide
catggcttccgctaaatggcaaggacatat

SEQ ID NO: 364381 - DNA, 30 bp, Artificial Sequence
  Synthetic oligonucleotide
agttatcccagccgtgtacatcggacatat

SEQ ID NO: 364382 - DNA, 30 bp, Artificial Sequence
  Synthetic oligonucleotide
gttaagagaatctctcggtaaatgacatat

SEQ ID NO: 364383 - DNA, 30 bp, Artificial Sequence
  Synthetic oligonucleotide
tgcctagggagagcatcgttgccaccatat

SEQ ID NO: 364384 - DNA, 29 bp, Artificial Sequence
  Synthetic oligonucleotide
aacttcataaactgccagaatgtccatat

SEQ ID NO: 364385 - DNA, 30 bp, Artificial Sequence
  Synthetic oligonucleotide
gaatagagcgtctatgggaatattccatat

SEQ ID NO: 364386 - DNA, 30 bp, Artificial Sequence
  Synthetic oligonucleotide
tactcagactcctccttgctgtaagcatat

SEQ ID NO: 364387 - DNA, 30 bp, Artificial Sequence
  Synthetic oligonucleotide
gataagccatctggaagccaatgagcatat

SEQ ID NO: 364388 - DNA, 30 bp, Artificial Sequence
  Synthetic oligonucleotide
actttgactttgcgtaccgatttagcatat

SEQ ID NO: 364389 - DNA, 30 bp, Artificial Sequence
  Synthetic oligonucleotide
atcgccacgatacgcgtatactacgcatat

SEQ ID NO: 364390 - DNA, 30 bp, Artificial Sequence
  Synthetic oligonucleotide
aggagggggggggactaatggaatgcatat

SEQ ID NO: 364391 - DNA, 30 bp, Artificial Sequence
  Synthetic oligonucleotide
caacgcgggtaaagcagcaaccctgcatat

SEQ ID NO: 364392 - DNA, 30 bp, Artificial Sequence
  Synthetic oligonucleotide
aaagagttctatattgacatcggtgcatat

SEQ ID NO: 364393 - DNA, 30 bp, Artificial Sequence
  Synthetic oligonucleotide
tgtacatcagtcgagtccaaaaaatcatat

SEQ ID NO: 364394 - DNA, 30 bp, Artificial Sequence
  Synthetic oligonucleotide
ggccatgaacgcgctcacaccttatcatat

SEQ ID NO: 364395 - DNA, 30 bp, Artificial Sequence
  Synthetic oligonucleotide
ttactgccatggcctggttcgccctcatat

SEQ ID NO: 364396 - DNA, 30 bp, Artificial Sequence
  Synthetic oligonucleotide
acataggaaccggtcgtaccccagtcatat

SEQ ID NO: 364397 - DNA, 30 bp, Artificial Sequence
  Synthetic oligonucleotide
caggtaatttcctccctataggtgtcatat

SEQ ID NO: 364398 - DNA, 30 bp, Artificial Sequence
  Synthetic oligonucleotide
tgttgtccaaggtaccagcgcggttcatat

SEQ ID NO: 364399 - DNA, 30 bp, Artificial Sequence
  Synthetic oligonucleotide
ggccatacgggggtatgggggtacagatat

SEQ ID NO: 364400 - DNA, 30 bp, Artificial Sequence
  Synthetic oligonucleotide
gtgagaattgggaggtccatattcagatat

SEQ ID NO: 364401 - DNA, 30 bp, Artificial Sequence
  Synthetic oligonucleotide
ccgtccagcactacgggttagttcagatat

SEQ ID NO: 364402 - DNA, 30 bp, Artificial Sequence
  Synthetic oligonucleotide
agaaggagctcatatcgaagaaagagatat

SEQ ID NO: 364403 - DNA, 30 bp, Artificial Sequence
  Synthetic oligonucleotide
ggacctcggtcagaaactgtggggagatat

SEQ ID NO: 364404 - DNA, 30 bp, Artificial Sequence
  Synthetic oligonucleotide
ttccctagaagggtcgcattgctgagatat

SEQ ID NO: 364405 - DNA, 30 bp, Artificial Sequence
  Synthetic oligonucleotide
aagaccaagttactttgcatgtatagatat

SEQ ID NO: 364406 - DNA, 30 bp, Artificial Sequence
  Synthetic oligonucleotide
ttacagaacaaggtaagttacgctagatat

SEQ ID NO: 364407 - DNA, 30 bp, Artificial Sequence
  Synthetic oligonucleotide
attggataccacatgacctgcgttagatat

SEQ ID NO: 364408 - DNA, 30 bp, Artificial Sequence
  Synthetic oligonucleotide
taaaataggttgaattatataccacgatat

SEQ ID NO: 364409 - DNA, 30 bp, Artificial Sequence
  Synthetic oligonucleotide
ccgtactagtgtgttatttcatgacgatat

SEQ ID NO: 364410 - DNA, 30 bp, Artificial Sequence
  Synthetic oligonucleotide
aatgaaggttgatcgcaactgctacgatat

SEQ ID NO: 364411 - DNA, 30 bp, Artificial Sequence
  Synthetic oligonucleotide
cagggatgggggtcttcttgtttacgatat

SEQ ID NO: 364412 - DNA, 30 bp, Artificial Sequence
  Synthetic oligonucleotide
caaccgtagatagaatactctaaccgatat

SEQ ID NO: 364413 - DNA, 30 bp, Artificial Sequence
  Synthetic oligonucleotide
agtaactgctgtctaaagccaagccgatat

SEQ ID NO: 364414 - DNA, 30 bp, Artificial Sequence
  Synthetic oligonucleotide
tgtgtcgagctctactcatagtgccgatat

SEQ ID NO: 364415 - DNA, 30 bp, Artificial Sequence
  Synthetic oligonucleotide
cacacggggcatctcttgagagtccgatat

SEQ ID NO: 364416 - DNA, 29 bp, Artificial Sequence
  Synthetic oligonucleotide
ggggcactgcttcacacggagggcgatat

SEQ ID NO: 364417 - DNA, 30 bp, Artificial Sequence
  Synthetic oligonucleotide
aacagagatcacccgtcgaaacctcgatat

SEQ ID NO: 364418 - DNA, 30 bp, Artificial Sequence
  Synthetic oligonucleotide
aagaaacttctcatgagcggtcctcgatat

SEQ ID NO: 364419 - DNA, 30 bp, Artificial Sequence
  Synthetic oligonucleotide
cataactattgacttgagggctgtcgatat

SEQ ID NO: 364420 - DNA, 30 bp, Artificial Sequence
  Synthetic oligonucleotide
aagaattgtgcgataagaacttgtcgatat

SEQ ID NO: 364421 - DNA, 30 bp, Artificial Sequence
  Synthetic oligonucleotide
acctggactagcagctagaatattcgatat

SEQ ID NO: 364422 - DNA, 30 bp, Artificial Sequence
  Synthetic oligonucleotide
atatcttcaataacactaatagttcgatat

SEQ ID NO: 364423 - DNA, 30 bp, Artificial Sequence
  Synthetic oligonucleotide
gggctagagtacaatcagtacgcaggatat

SEQ ID NO: 364424 - DNA, 30 bp, Artificial Sequence
  Synthetic oligonucleotide
ttgaatttaggttgttgacgttcaggatat

SEQ ID NO: 364425 - DNA, 30 bp, Artificial Sequence
  Synthetic oligonucleotide
ggaaattatgtattacaacgggggggatat

SEQ ID NO: 364426 - DNA, 30 bp, Artificial Sequence
  Synthetic oligonucleotide
ctgatgccgtgtaggaatatccttggatat

SEQ ID NO: 364427 - DNA, 30 bp, Artificial Sequence
  Synthetic oligonucleotide
gcattccagcaatctaaattgagatgatat

SEQ ID NO: 364428 - DNA, 30 bp, Artificial Sequence
  Synthetic oligonucleotide
gatgcaacctgtatcctaagtagatgatat

SEQ ID NO: 364429 - DNA, 30 bp, Artificial Sequence
  Synthetic oligonucleotide
agccgcgctacgctaggttagttatgatat

SEQ ID NO: 364430 - DNA, 30 bp, Artificial Sequence
  Synthetic oligonucleotide
ctgtgaattagaggggtagcttagtgatat

SEQ ID NO: 364431 - DNA, 30 bp, Artificial Sequence
  Synthetic oligonucleotide
ggaattaagtctttcccgagtggttgatat

SEQ ID NO: 364432 - DNA, 30 bp, Artificial Sequence
  Synthetic oligonucleotide
cgtcgtcatgattacagcaggtaaatatat

SEQ ID NO: 364433 - DNA, 30 bp, Artificial Sequence
  Synthetic oligonucleotide
gtggttggacttgcatatctcggcatatat

SEQ ID NO: 364434 - DNA, 30 bp, Artificial Sequence
  Synthetic oligonucleotide
gaagtagcgttctccttcgcgttcatatat

SEQ ID NO: 364435 - DNA, 30 bp, Artificial Sequence
  Synthetic oligonucleotide
gcattacaaggaaaagctctaaagatatat

SEQ ID NO: 364436 - DNA, 30 bp, Artificial Sequence
  Synthetic oligonucleotide
tggcgtaggccatacgagggaggtatatat

SEQ ID NO: 364437 - DNA, 31 bp, Artificial Sequence
  Synthetic oligonucleotide
aagattatagagaagagaactagaactatat

SEQ ID NO: 364438 - DNA, 30 bp, Artificial Sequence
  Synthetic oligonucleotide
tataattagaatgaacaggcgcacctatat

SEQ ID NO: 364439 - DNA, 30 bp, Artificial Sequence
  Synthetic oligonucleotide
agtagctggctaaccaggtttgagctatat

SEQ ID NO: 364440 - DNA, 30 bp, Artificial Sequence
  Synthetic oligonucleotide
tgtgtctcttcttaaaaaggtgggctatat

SEQ ID NO: 364441 - DNA, 30 bp, Artificial Sequence
  Synthetic oligonucleotide
caacgtcagctgtccgaggggcttctatat

SEQ ID NO: 364442 - DNA, 30 bp, Artificial Sequence
  Synthetic oligonucleotide
ctaggtatttgccccgcattgtaagtatat

SEQ ID NO: 364443 - DNA, 30 bp, Artificial Sequence
  Synthetic oligonucleotide
gctgtgttgaagttttaagcctgagtatat

SEQ ID NO: 364444 - DNA, 30 bp, Artificial Sequence
  Synthetic oligonucleotide
gggacctagacgatgtgttaccacgtatat

SEQ ID NO: 364445 - DNA, 30 bp, Artificial Sequence
  Synthetic oligonucleotide
ctcaaaggaagtaaatatagctacgtatat

SEQ ID NO: 364446 - DNA, 30 bp, Artificial Sequence
  Synthetic oligonucleotide
cattagacgaaggtacatgcagaggtatat

SEQ ID NO: 364447 - DNA, 30 bp, Artificial Sequence
  Synthetic oligonucleotide
ttcacagatacgtgacatataacggtatat

SEQ ID NO: 364448 - DNA, 30 bp, Artificial Sequence
  Synthetic oligonucleotide
tgatcggttttgtagtcaaatgtggtatat

SEQ ID NO: 364449 - DNA, 30 bp, Artificial Sequence
  Synthetic oligonucleotide
tcctagcaacgcaaaccgggttatgtatat

SEQ ID NO: 364450 - DNA, 30 bp, Artificial Sequence
  Synthetic oligonucleotide
aatgcggacttcatgcagttgtctgtatat

SEQ ID NO: 364451 - DNA, 30 bp, Artificial Sequence
  Synthetic oligonucleotide
tacaacactgagtgctcttcctgtgtatat

SEQ ID NO: 364452 - DNA, 30 bp, Artificial Sequence
  Synthetic oligonucleotide
ggaatagtgtgattgtttaactccttatat

SEQ ID NO: 364453 - DNA, 30 bp, Artificial Sequence
  Synthetic oligonucleotide
acgcctagatatccaattaatgtcttatat

SEQ ID NO: 364454 - DNA, 30 bp, Artificial Sequence
  Synthetic oligonucleotide
ctgcggctggattagggctataagttatat

SEQ ID NO: 364455 - DNA, 30 bp, Artificial Sequence
  Synthetic oligonucleotide
tcagatattttaccggatatcaggttatat

SEQ ID NO: 364456 - DNA, 30 bp, Artificial Sequence
  Synthetic oligonucleotide
gtaaggccatgtctactagttaatttatat

SEQ ID NO: 364457 - DNA, 30 bp, Artificial Sequence
  Synthetic oligonucleotide
gaatgttcgaacgagttacaccatttatat

SEQ ID NO: 364458 - DNA, 30 bp, Artificial Sequence
  Synthetic oligonucleotide
tacaaaagggaaacttaacaatatttatat

SEQ ID NO: 364459 - DNA, 30 bp, Artificial Sequence
  Synthetic oligonucleotide
cgtattgcgtccagacatatttctttatat

SEQ ID NO: 364460 - DNA, 30 bp, Artificial Sequence
  Synthetic oligonucleotide
gctcgaatggattatttactgaaaaactat

SEQ ID NO: 364461 - DNA, 30 bp, Artificial Sequence
  Synthetic oligonucleotide
ttcagggtaggcttgatgtggccaaactat

SEQ ID NO: 364462 - DNA, 30 bp, Artificial Sequence
  Synthetic oligonucleotide
gcggctataggtggccgggggaacaactat

SEQ ID NO: 364463 - DNA, 30 bp, Artificial Sequence
  Synthetic oligonucleotide
cctaaacgtcatcttgagcggtagaactat

SEQ ID NO: 364464 - DNA, 30 bp, Artificial Sequence
  Synthetic oligonucleotide
cgactcaatttacactcctacggtaactat

SEQ ID NO: 364465 - DNA, 30 bp, Artificial Sequence
  Synthetic oligonucleotide
agtaaatatatgacaggttacggtaactat

SEQ ID NO: 364466 - DNA, 30 bp, Artificial Sequence
  Synthetic oligonucleotide
cttgccaagctatcatgacgcggtaactat

SEQ ID NO: 364467 - DNA, 30 bp, Artificial Sequence
  Synthetic oligonucleotide
tcagctcctaccgactatcactaacactat

SEQ ID NO: 364468 - DNA, 30 bp, Artificial Sequence
  Synthetic oligonucleotide
tacgttaattcgtattacccaaaccactat

SEQ ID NO: 364469 - DNA, 30 bp, Artificial Sequence
  Synthetic oligonucleotide
aatgactgactgatagtaggaaaccactat

SEQ ID NO: 364470 - DNA, 30 bp, Artificial Sequence
  Synthetic oligonucleotide
ggcctaacagtgttgccctcaccccactat

SEQ ID NO: 364471 - DNA, 30 bp, Artificial Sequence
  Synthetic oligonucleotide
tctgtgtttgaaggattcgtgatgcactat

SEQ ID NO: 364472 - DNA, 30 bp, Artificial Sequence
  Synthetic oligonucleotide
cagaatcggtcaggacgcttggttcactat

SEQ ID NO: 364473 - DNA, 30 bp, Artificial Sequence
  Synthetic oligonucleotide
actgtgcttcggcgccaacacgaagactat

SEQ ID NO: 364474 - DNA, 30 bp, Artificial Sequence
  Synthetic oligonucleotide
cccgattgcgagtagcgaggacgcgactat

SEQ ID NO: 364475 - DNA, 30 bp, Artificial Sequence
  Synthetic oligonucleotide
aaatcctcagtaagttcctagggggactat

SEQ ID NO: 364476 - DNA, 30 bp, Artificial Sequence
  Synthetic oligonucleotide
tataactaaattggccttaggtgggactat

SEQ ID NO: 364477 - DNA, 30 bp, Artificial Sequence
  Synthetic oligonucleotide
gccgtacgcaacgcacttgggaaatactat

SEQ ID NO: 364478 - DNA, 30 bp, Artificial Sequence
  Synthetic oligonucleotide
gccctagataagttgcgcataacctactat

SEQ ID NO: 364479 - DNA, 30 bp, Artificial Sequence
  Synthetic oligonucleotide
tgacctcaggatgttcaatatacctactat

SEQ ID NO: 364480 - DNA, 30 bp, Artificial Sequence
  Synthetic oligonucleotide
acgtaccgtcagtcgcgggggtgaacctat

SEQ ID NO: 364481 - DNA, 30 bp, Artificial Sequence
  Synthetic oligonucleotide
gccatacggttttaataccccctaacctat

SEQ ID NO: 364482 - DNA, 30 bp, Artificial Sequence
  Synthetic oligonucleotide
cgtatttcatgtatgtttaccccgacctat

SEQ ID NO: 364483 - DNA, 30 bp, Artificial Sequence
  Synthetic oligonucleotide
tcggatagttgtgcggtatgagatacctat

SEQ ID NO: 364484 - DNA, 30 bp, Artificial Sequence
  Synthetic oligonucleotide
aatatgccccgaaggtagtacggtacctat

SEQ ID NO: 364485 - DNA, 30 bp, Artificial Sequence
  Synthetic oligonucleotide
cgagcctgtccttttatgttcataccctat

SEQ ID NO: 364486 - DNA, 30 bp, Artificial Sequence
  Synthetic oligonucleotide
aagtcactcagatataccccgtagccctat

SEQ ID NO: 364487 - DNA, 30 bp, Artificial Sequence
  Synthetic oligonucleotide
caaagatccctcaattcccctgctccctat

SEQ ID NO: 364488 - DNA, 30 bp, Artificial Sequence
  Synthetic oligonucleotide
tggtaaattatacgtgggtgatcagcctat

SEQ ID NO: 364489 - DNA, 30 bp, Artificial Sequence
  Synthetic oligonucleotide
actttagtctagtaatcccgtcaggcctat

SEQ ID NO: 364490 - DNA, 30 bp, Artificial Sequence
  Synthetic oligonucleotide
atggtatctggaggtggtcactaggcctat

SEQ ID NO: 364491 - DNA, 30 bp, Artificial Sequence
  Synthetic oligonucleotide
tttaacaaatatgacttcaatattgcctat

SEQ ID NO: 364492 - DNA, 30 bp, Artificial Sequence
  Synthetic oligonucleotide
tcacttggcagacccttaaagcttgcctat

SEQ ID NO: 364493 - DNA, 30 bp, Artificial Sequence
  Synthetic oligonucleotide
tcaatgttggatgtaactaagacatcctat

SEQ ID NO: 364494 - DNA, 30 bp, Artificial Sequence
  Synthetic oligonucleotide
tgaatggtacgagcctcgctacactcctat

SEQ ID NO: 364495 - DNA, 30 bp, Artificial Sequence
  Synthetic oligonucleotide
ggaagtataataaatcgtgtgtgctcctat

SEQ ID NO: 364496 - DNA, 30 bp, Artificial Sequence
  Synthetic oligonucleotide
caatggcaatggcatctcaaccagtcctat

SEQ ID NO: 364497 - DNA, 30 bp, Artificial Sequence
  Synthetic oligonucleotide
agcactgcctcggctcgaaacaattcctat

SEQ ID NO: 364498 - DNA, 30 bp, Artificial Sequence
  Synthetic oligonucleotide
aagtgggcttaccaaagaatgaattcctat

SEQ ID NO: 364499 - DNA, 30 bp, Artificial Sequence
  Synthetic oligonucleotide
accgcgtataagcaaggccggtattcctat

SEQ ID NO: 364500 - DNA, 30 bp, Artificial Sequence
  Synthetic oligonucleotide
ttgttgtgttctctttttgtgatttcctat

SEQ ID NO: 364501 - DNA, 30 bp, Artificial Sequence
  Synthetic oligonucleotide
ttgttgtgttctctttttgtggtttcctat

SEQ ID NO: 364502 - DNA, 31 bp, Artificial Sequence
  Synthetic oligonucleotide
aatcttgtgttctccttttgtgttttcctat

SEQ ID NO: 364503 - DNA, 30 bp, Artificial Sequence
  Synthetic oligonucleotide
ttgttgtgtactctttttgtgttttcctat

SEQ ID NO: 364504 - DNA, 30 bp, Artificial Sequence
  Synthetic oligonucleotide
ttgttgtggtctctttttgtgttttcctat

SEQ ID NO: 364505 - DNA, 30 bp, Artificial Sequence
  Synthetic oligonucleotide
ttgttgggttctctttttgtgttttcctat

SEQ ID NO: 364506 - DNA, 30 bp, Artificial Sequence
  Synthetic oligonucleotide
caggtccgtgacaccatgtattcaagctat

SEQ ID NO: 364507 - DNA, 30 bp, Artificial Sequence
  Synthetic oligonucleotide
ctctgtacttagtttagaaggaacagctat

SEQ ID NO: 364508 - DNA, 30 bp, Artificial Sequence
  Synthetic oligonucleotide
aacttccaggtcattgtatcggacagctat

SEQ ID NO: 364509 - DNA, 30 bp, Artificial Sequence
  Synthetic oligonucleotide
tgtacgccatactgaagctagatcagctat

SEQ ID NO: 364510 - DNA, 30 bp, Artificial Sequence
  Synthetic oligonucleotide
agcatacccagcgggttaccaattagctat

SEQ ID NO: 364511 - DNA, 30 bp, Artificial Sequence
  Synthetic oligonucleotide
gtcagttattgtcttgatagttttagctat

SEQ ID NO: 364512 - DNA, 30 bp, Artificial Sequence
  Synthetic oligonucleotide
cgtagaatgcacagtttcagttgacgctat

SEQ ID NO: 364513 - DNA, 30 bp, Artificial Sequence
  Synthetic oligonucleotide
gcatgggaccgtttgatgtcttaccgctat

SEQ ID NO: 364514 - DNA, 30 bp, Artificial Sequence
  Synthetic oligonucleotide
aactaactcagtgtgcgtgtagtccgctat

SEQ ID NO: 364515 - DNA, 30 bp, Artificial Sequence
  Synthetic oligonucleotide
taccatagtatggcagaccactagcgctat

SEQ ID NO: 364516 - DNA, 30 bp, Artificial Sequence
  Synthetic oligonucleotide
gcatccgagattcagacttcggtgcgctat

SEQ ID NO: 364517 - DNA, 30 bp, Artificial Sequence
  Synthetic oligonucleotide
atgtgtacttagccacgcgcctatcgctat

SEQ ID NO: 364518 - DNA, 30 bp, Artificial Sequence
  Synthetic oligonucleotide
attaaaaagtgttttaatgaacttcgctat

SEQ ID NO: 364519 - DNA, 30 bp, Artificial Sequence
  Synthetic oligonucleotide
aggctcaggtctttggatacccttcgctat

SEQ ID NO: 364520 - DNA, 30 bp, Artificial Sequence
  Synthetic oligonucleotide
gatttgtgatggaacaagaagataggctat

SEQ ID NO: 364521 - DNA, 30 bp, Artificial Sequence
  Synthetic oligonucleotide
ttaaaaaggagaaatccttggataggctat

SEQ ID NO: 364522 - DNA, 30 bp, Artificial Sequence
  Synthetic oligonucleotide
taaggaaccttgcgccttctcgtcggctat

SEQ ID NO: 364523 - DNA, 30 bp, Artificial Sequence
  Synthetic oligonucleotide
tgtcttaaagctacgacatttttgggctat

SEQ ID NO: 364524 - DNA, 30 bp, Artificial Sequence
  Synthetic oligonucleotide
ttcacgtaaaggagtgggcagcgtggctat

SEQ ID NO: 364525 - DNA, 30 bp, Artificial Sequence
  Synthetic oligonucleotide
tttgcgccccgaagtctctgtcttggctat

SEQ ID NO: 364526 - DNA, 30 bp, Artificial Sequence
  Synthetic oligonucleotide
gtgaagcaggggatagacggcctatgctat

SEQ ID NO: 364527 - DNA, 30 bp, Artificial Sequence
  Synthetic oligonucleotide
taaagttttgccaaaggaacccgctgctat

SEQ ID NO: 364528 - DNA, 30 bp, Artificial Sequence
  Synthetic oligonucleotide
gtcctggcatgctgagttaacagttgctat

SEQ ID NO: 364529 - DNA, 30 bp, Artificial Sequence
  Synthetic oligonucleotide
gttagagtgcaaagacccgcaacaatctat

SEQ ID NO: 364530 - DNA, 30 bp, Artificial Sequence
  Synthetic oligonucleotide
tatatattgcaatgacactctccaatctat

SEQ ID NO: 364531 - DNA, 30 bp, Artificial Sequence
  Synthetic oligonucleotide
gcgccctatgtagatagggatgcaatctat

SEQ ID NO: 364532 - DNA, 30 bp, Artificial Sequence
  Synthetic oligonucleotide
ctcacctacgtctttttgggctgaatctat

SEQ ID NO: 364533 - DNA, 30 bp, Artificial Sequence
  Synthetic oligonucleotide
gatgcttgtaatgtactatatttcatctat

SEQ ID NO: 364534 - DNA, 30 bp, Artificial Sequence
  Synthetic oligonucleotide
aacaacttagtttgggcggcacagatctat

SEQ ID NO: 364535 - DNA, 30 bp, Artificial Sequence
  Synthetic oligonucleotide
tcttgaaaagtacttttggtcccgatctat

SEQ ID NO: 364536 - DNA, 30 bp, Artificial Sequence
  Synthetic oligonucleotide
tccaaaacttttggccggatatggatctat

SEQ ID NO: 364537 - DNA, 30 bp, Artificial Sequence
  Synthetic oligonucleotide
gcgcgcagctggaggcttgctgttatctat

SEQ ID NO: 364538 - DNA, 30 bp, Artificial Sequence
  Synthetic oligonucleotide
agacgctcttgggccatcggggaactctat

SEQ ID NO: 364539 - DNA, 30 bp, Artificial Sequence
  Synthetic oligonucleotide
ccctcgcgacccattgagcttaacctctat

SEQ ID NO: 364540 - DNA, 30 bp, Artificial Sequence
  Synthetic oligonucleotide
cttttggcattgggtggcgctccgctctat

SEQ ID NO: 364541 - DNA, 30 bp, Artificial Sequence
  Synthetic oligonucleotide
agcaactagaccaacaacttgatgctctat

SEQ ID NO: 364542 - DNA, 30 bp, Artificial Sequence
  Synthetic oligonucleotide
gggattatatacatcaaaattagtctctat

SEQ ID NO: 364543 - DNA, 30 bp, Artificial Sequence
  Synthetic oligonucleotide
aagaatccgtccacgtcctgcattctctat

SEQ ID NO: 364544 - DNA, 30 bp, Artificial Sequence
  Synthetic oligonucleotide
tttcatgggtcgaggcgtttcgaagtctat

SEQ ID NO: 364545 - DNA, 30 bp, Artificial Sequence
  Synthetic oligonucleotide
aaggcttcgttactaagggtctaagtctat

SEQ ID NO: 364546 - DNA, 30 bp, Artificial Sequence
  Synthetic oligonucleotide
ttggatatcaggtagtgcaattacgtctat

SEQ ID NO: 364547 - DNA, 30 bp, Artificial Sequence
  Synthetic oligonucleotide
tgttcacttaaagaagtctggtgcgtctat

SEQ ID NO: 364548 - DNA, 30 bp, Artificial Sequence
  Synthetic oligonucleotide
attcatagagatctatatgcgttcgtctat

SEQ ID NO: 364549 - DNA, 30 bp, Artificial Sequence
  Synthetic oligonucleotide
ttcgacgctacgtacgggagagaggtctat

SEQ ID NO: 364550 - DNA, 30 bp, Artificial Sequence
  Synthetic oligonucleotide
tgagatgctttgagacaatgtgttgtctat

SEQ ID NO: 364551 - DNA, 30 bp, Artificial Sequence
  Synthetic oligonucleotide
gaaatcgatcacccagaaacaagattctat

SEQ ID NO: 364552 - DNA, 30 bp, Artificial Sequence
  Synthetic oligonucleotide
ggccgccggaagcatctttacggattctat

SEQ ID NO: 364553 - DNA, 30 bp, Artificial Sequence
  Synthetic oligonucleotide
gacggtattgggatttgtgagatattctat

SEQ ID NO: 364554 - DNA, 30 bp, Artificial Sequence
  Synthetic oligonucleotide
tggcgacgcactccgcattgctccttctat

SEQ ID NO: 364555 - DNA, 30 bp, Artificial Sequence
  Synthetic oligonucleotide
acatagtataactcttacgcttaaaagtat

SEQ ID NO: 364556 - DNA, 30 bp, Artificial Sequence
  Synthetic oligonucleotide
ttcccaaacctcggaaaacgctgaaagtat

SEQ ID NO: 364557 - DNA, 30 bp, Artificial Sequence
  Synthetic oligonucleotide
cgaatcttgccccatgatgtgctaaagtat

SEQ ID NO: 364558 - DNA, 30 bp, Artificial Sequence
  Synthetic oligonucleotide
cctggtaccgtggcagggtatcacaagtat

SEQ ID NO: 364559 - DNA, 30 bp, Artificial Sequence
  Synthetic oligonucleotide
gaaactctgcgcctaaaagtacgcaagtat

SEQ ID NO: 364560 - DNA, 30 bp, Artificial Sequence
  Synthetic oligonucleotide
agcattgcagtacgatacttcgagaagtat

SEQ ID NO: 364561 - DNA, 30 bp, Artificial Sequence
  Synthetic oligonucleotide
cttggttcggagtatcagggggataagtat

SEQ ID NO: 364562 - DNA, 30 bp, Artificial Sequence
  Synthetic oligonucleotide
aggtttgcaaggagtaagggtgttaagtat

SEQ ID NO: 364563 - DNA, 30 bp, Artificial Sequence
  Synthetic oligonucleotide
cataaggtaatgtagaacgataaacagtat

SEQ ID NO: 364564 - DNA, 30 bp, Artificial Sequence
  Synthetic oligonucleotide
aagatatactgcgaccttttgtaacagtat

SEQ ID NO: 364565 - DNA, 30 bp, Artificial Sequence
  Synthetic oligonucleotide
taatagtaatagacagttacttaacagtat

SEQ ID NO: 364566 - DNA, 30 bp, Artificial Sequence
  Synthetic oligonucleotide
atacaaattaggtagtgtcttagccagtat

SEQ ID NO: 364567 - DNA, 30 bp, Artificial Sequence
  Synthetic oligonucleotide
gaatctcaggcttaaacagggaagcagtat

SEQ ID NO: 364568 - DNA, 30 bp, Artificial Sequence
  Synthetic oligonucleotide
ttcaactaactagtgtcaagatcgcagtat

SEQ ID NO: 364569 - DNA, 30 bp, Artificial Sequence
  Synthetic oligonucleotide
ccatagccacgcatgacatttgtgcagtat

SEQ ID NO: 364570 - DNA, 30 bp, Artificial Sequence
  Synthetic oligonucleotide
accccggacctaggctactcgttgcagtat

SEQ ID NO: 364571 - DNA, 30 bp, Artificial Sequence
  Synthetic oligonucleotide
ttatgattattcacacctgtctatcagtat

SEQ ID NO: 364572 - DNA, 30 bp, Artificial Sequence
  Synthetic oligonucleotide
aggacatcgtaggtctccggaactcagtat

SEQ ID NO: 364573 - DNA, 30 bp, Artificial Sequence
  Synthetic oligonucleotide
cagcatagagtgttccggatccgtcagtat

SEQ ID NO: 364574 - DNA, 30 bp, Artificial Sequence
  Synthetic oligonucleotide
tcccaaagcatatggcaaagatgtcagtat

SEQ ID NO: 364575 - DNA, 30 bp, Artificial Sequence
  Synthetic oligonucleotide
cgtggggctgctgtgtgagcagttcagtat

SEQ ID NO: 364576 - DNA, 30 bp, Artificial Sequence
  Synthetic oligonucleotide
ctataagacattatacacttcaaagagtat

SEQ ID NO: 364577 - DNA, 30 bp, Artificial Sequence
  Synthetic oligonucleotide
taagcacctatgtaccatgtcagagagtat

SEQ ID NO: 364578 - DNA, 30 bp, Artificial Sequence
  Synthetic oligonucleotide
attaaagtagcaggtcttgctaccgagtat

SEQ ID NO: 364579 - DNA, 30 bp, Artificial Sequence
  Synthetic oligonucleotide
ggccacattataatatatataggcgagtat

SEQ ID NO: 364580 - DNA, 30 bp, Artificial Sequence
  Synthetic oligonucleotide
ctgtcaaagccctctggacacgatgagtat

SEQ ID NO: 364581 - DNA, 30 bp, Artificial Sequence
  Synthetic oligonucleotide
attagggagcaagtcaatgtctatgagtat

SEQ ID NO: 364582 - DNA, 30 bp, Artificial Sequence
  Synthetic oligonucleotide
tcttatctgttgtgttttcctcttgagtat

SEQ ID NO: 364583 - DNA, 30 bp, Artificial Sequence
  Synthetic oligonucleotide
cgcaaggcgcatgtagacacagaatagtat

SEQ ID NO: 364584 - DNA, 30 bp, Artificial Sequence
  Synthetic oligonucleotide
atgacaccttttgtgcgacgtagatagtat

SEQ ID NO: 364585 - DNA, 30 bp, Artificial Sequence
  Synthetic oligonucleotide
atccgcggaaaggcatctggcctatagtat

SEQ ID NO: 364586 - DNA, 30 bp, Artificial Sequence
  Synthetic oligonucleotide
tcctcatggacgccttaccaaaactagtat

SEQ ID NO: 364587 - DNA, 30 bp, Artificial Sequence
  Synthetic oligonucleotide
cttcgaggagcggttccccagttctagtat

SEQ ID NO: 364588 - DNA, 30 bp, Artificial Sequence
  Synthetic oligonucleotide
attggtgaacgcagggaccgatcgtagtat

SEQ ID NO: 364589 - DNA, 30 bp, Artificial Sequence
  Synthetic oligonucleotide
aaaaacatagaagctatgcggtattagtat

SEQ ID NO: 364590 - DNA, 30 bp, Artificial Sequence
  Synthetic oligonucleotide
aaactgtcggggggaaactgagaaacgtat

SEQ ID NO: 364591 - DNA, 30 bp, Artificial Sequence
  Synthetic oligonucleotide
atcggcgacctaggcttagtacgaacgtat

SEQ ID NO: 364592 - DNA, 30 bp, Artificial Sequence
  Synthetic oligonucleotide
tagattgttaagtctaaacgaggaacgtat

SEQ ID NO: 364593 - DNA, 30 bp, Artificial Sequence
  Synthetic oligonucleotide
ttcaccgattgaagtccccggctaacgtat

SEQ ID NO: 364594 - DNA, 30 bp, Artificial Sequence
  Synthetic oligonucleotide
tactgagattcgcaggaggtattaacgtat

SEQ ID NO: 364595 - DNA, 30 bp, Artificial Sequence
  Synthetic oligonucleotide
gatgtaaaataagggcccgccagcacgtat

SEQ ID NO: 364596 - DNA, 30 bp, Artificial Sequence
  Synthetic oligonucleotide
tactaatttcctaaagttattcgcacgtat

SEQ ID NO: 364597 - DNA, 30 bp, Artificial Sequence
  Synthetic oligonucleotide
gcgggagagcgtaacggttagaagacgtat

SEQ ID NO: 364598 - DNA, 30 bp, Artificial Sequence
  Synthetic oligonucleotide
atgactgggttccgtagcatttagacgtat

SEQ ID NO: 364599 - DNA, 30 bp, Artificial Sequence
  Synthetic oligonucleotide
taaagcgtgattctagtagaatatacgtat

SEQ ID NO: 364600 - DNA, 40 bp, Artificial Sequence
  Synthetic oligonucleotide
cactctgttaacgttaatacttgccagcacatatacgtat

SEQ ID NO: 364601 - DNA, 30 bp, Artificial Sequence
  Synthetic oligonucleotide
atatgcggacgtaggtagcactacccgtat

SEQ ID NO: 364602 - DNA, 30 bp, Artificial Sequence
  Synthetic oligonucleotide
cactcgccaccgtacctgtctcatccgtat

SEQ ID NO: 364603 - DNA, 30 bp, Artificial Sequence
  Synthetic oligonucleotide
gcacgaccgtgaagttagggccgtccgtat

SEQ ID NO: 364604 - DNA, 30 bp, Artificial Sequence
  Synthetic oligonucleotide
tgtgagtacacgtaatagtatggcgcgtat

SEQ ID NO: 364605 - DNA, 30 bp, Artificial Sequence
  Synthetic oligonucleotide
aggcctccaaatctgggatgcccggcgtat

SEQ ID NO: 364606 - DNA, 30 bp, Artificial Sequence
  Synthetic oligonucleotide
gctctgctataaagtcacccgccggcgtat

SEQ ID NO: 364607 - DNA, 30 bp, Artificial Sequence
  Synthetic oligonucleotide
gtcgactcgttgaacttaattgcggcgtat

SEQ ID NO: 364608 - DNA, 30 bp, Artificial Sequence
  Synthetic oligonucleotide
gagtgtgaggaatttgatcttgatgcgtat

SEQ ID NO: 364609 - DNA, 30 bp, Artificial Sequence
  Synthetic oligonucleotide
tgtcgtcttggataaaaacgtcgatcgtat

SEQ ID NO: 364610 - DNA, 30 bp, Artificial Sequence
  Synthetic oligonucleotide
tatacagtgtccagccggttgctatcgtat

SEQ ID NO: 364611 - DNA, 30 bp, Artificial Sequence
  Synthetic oligonucleotide
aaaacagcccagttctggtcttattcgtat

SEQ ID NO: 364612 - DNA, 30 bp, Artificial Sequence
  Synthetic oligonucleotide
gtttaacagcctggagcgcacacttcgtat

SEQ ID NO: 364613 - DNA, 30 bp, Artificial Sequence
  Synthetic oligonucleotide
ttggtctaggcacttggtttagaaaggtat

SEQ ID NO: 364614 - DNA, 30 bp, Artificial Sequence
  Synthetic oligonucleotide
atctatgggtcaaacggtagcagaaggtat

SEQ ID NO: 364615 - DNA, 30 bp, Artificial Sequence
  Synthetic oligonucleotide
gcacctacttcgatactcatagtaaggtat

SEQ ID NO: 364616 - DNA, 30 bp, Artificial Sequence
  Synthetic oligonucleotide
tctaatgagcgccggaattagttcaggtat

SEQ ID NO: 364617 - DNA, 30 bp, Artificial Sequence
  Synthetic oligonucleotide
cattcgtcaggctcgtcctcgtggaggtat

SEQ ID NO: 364618 - DNA, 30 bp, Artificial Sequence
  Synthetic oligonucleotide
ggggttcacagagatacgaaggtgaggtat

SEQ ID NO: 364619 - DNA, 30 bp, Artificial Sequence
  Synthetic oligonucleotide
tctgggacaccaagctcgacgtttaggtat

SEQ ID NO: 364620 - DNA, 30 bp, Artificial Sequence
  Synthetic oligonucleotide
atcactcgcaacgtcggaggatcacggtat

SEQ ID NO: 364621 - DNA, 30 bp, Artificial Sequence
  Synthetic oligonucleotide
taaggctaccggcttaggtacctacggtat

SEQ ID NO: 364622 - DNA, 30 bp, Artificial Sequence
  Synthetic oligonucleotide
gccgtttagatgtcactattacaccggtat

SEQ ID NO: 364623 - DNA, 30 bp, Artificial Sequence
  Synthetic oligonucleotide
gggatagctggccggtctgctagccggtat

SEQ ID NO: 364624 - DNA, 30 bp, Artificial Sequence
  Synthetic oligonucleotide
gagcgttgataaagacccctagtccggtat

SEQ ID NO: 364625 - DNA, 30 bp, Artificial Sequence
  Synthetic oligonucleotide
ttcaaaaggctcgcccaacagttgcggtat

SEQ ID NO: 364626 - DNA, 30 bp, Artificial Sequence
  Synthetic oligonucleotide
ggaaaaaatgtaaaaatcacatctcggtat

SEQ ID NO: 364627 - DNA, 30 bp, Artificial Sequence
  Synthetic oligonucleotide
taccaatgggagcttgtgggtgaagggtat

SEQ ID NO: 364628 - DNA, 30 bp, Artificial Sequence
  Synthetic oligonucleotide
catagacggctgctctctaaagcagggtat

SEQ ID NO: 364629 - DNA, 30 bp, Artificial Sequence
  Synthetic oligonucleotide
gtaaatcagggggtaatctgcgcagggtat

SEQ ID NO: 364630 - DNA, 30 bp, Artificial Sequence
  Synthetic oligonucleotide
ttagggcgcccatagtacgcattagggtat

SEQ ID NO: 364631 - DNA, 30 bp, Artificial Sequence
  Synthetic oligonucleotide
cattgccgatttgcctccgttcgggggtat

SEQ ID NO: 364632 - DNA, 30 bp, Artificial Sequence
  Synthetic oligonucleotide
ggctccgatgtgagccacggcggggggtat

SEQ ID NO: 364633 - DNA, 30 bp, Artificial Sequence
  Synthetic oligonucleotide
aaatgatatgggacccaaatactggggtat

SEQ ID NO: 364634 - DNA, 30 bp, Artificial Sequence
  Synthetic oligonucleotide
cgaagggcatggtgacgaaggtctgggtat

SEQ ID NO: 364635 - DNA, 30 bp, Artificial Sequence
  Synthetic oligonucleotide
gcatgcacatggggttcgcccggtgggtat

SEQ ID NO: 364636 - DNA, 30 bp, Artificial Sequence
  Synthetic oligonucleotide
ctgtgttgctggcattctgatttatggtat

SEQ ID NO: 364637 - DNA, 30 bp, Artificial Sequence
  Synthetic oligonucleotide
aacaattgaccagtccgcatgaactggtat

SEQ ID NO: 364638 - DNA, 30 bp, Artificial Sequence
  Synthetic oligonucleotide
gacgggtgcgtgctgccaggttggtggtat

SEQ ID NO: 364639 - DNA, 30 bp, Artificial Sequence
  Synthetic oligonucleotide
gagcgttaaaccattttccccgaaatgtat

SEQ ID NO: 364640 - DNA, 30 bp, Artificial Sequence
  Synthetic oligonucleotide
aacatcctaacccatctggcaagaatgtat

SEQ ID NO: 364641 - DNA, 30 bp, Artificial Sequence
  Synthetic oligonucleotide
catctgagttaaatgtcgtcactaatgtat

SEQ ID NO: 364642 - DNA, 30 bp, Artificial Sequence
  Synthetic oligonucleotide
atacactgtcattcaatgaccgtaatgtat

SEQ ID NO: 364643 - DNA, 30 bp, Artificial Sequence
  Synthetic oligonucleotide
atattagtcatgatggaccatgtaatgtat

SEQ ID NO: 364644 - DNA, 30 bp, Artificial Sequence
  Synthetic oligonucleotide
ctatgggaggccgctgtacactacatgtat

SEQ ID NO: 364645 - DNA, 30 bp, Artificial Sequence
  Synthetic oligonucleotide
acaaccagtaatgttcacgtgatcatgtat

SEQ ID NO: 364646 - DNA, 30 bp, Artificial Sequence
  Synthetic oligonucleotide
gaggagcggctcagccttctccagatgtat

SEQ ID NO: 364647 - DNA, 30 bp, Artificial Sequence
  Synthetic oligonucleotide
ctttatctgtgcattaaagtgcagatgtat

SEQ ID NO: 364648 - DNA, 30 bp, Artificial Sequence
  Synthetic oligonucleotide
gggcatggcatccgtattttgacgatgtat

SEQ ID NO: 364649 - DNA, 30 bp, Artificial Sequence
  Synthetic oligonucleotide
aacttccaagttttggggggccggatgtat

SEQ ID NO: 364650 - DNA, 30 bp, Artificial Sequence
  Synthetic oligonucleotide
ttagagtggattcccgggaattggatgtat

SEQ ID NO: 364651 - DNA, 30 bp, Artificial Sequence
  Synthetic oligonucleotide
cttagtgtgcccgccgtgtaatttatgtat

SEQ ID NO: 364652 - DNA, 30 bp, Artificial Sequence
  Synthetic oligonucleotide
gagggatcttcgatcaatatataactgtat

SEQ ID NO: 364653 - DNA, 30 bp, Artificial Sequence
  Synthetic oligonucleotide
gttggttgcactttgtaagcgaagctgtat

SEQ ID NO: 364654 - DNA, 30 bp, Artificial Sequence
  Synthetic oligonucleotide
gatcccgaaacaggggagtcagcgctgtat

SEQ ID NO: 364655 - DNA, 30 bp, Artificial Sequence
  Synthetic oligonucleotide
accgactgtatccgtcgctctaatctgtat

SEQ ID NO: 364656 - DNA, 30 bp, Artificial Sequence
  Synthetic oligonucleotide
cttggtccgctcttcggggaacttctgtat

SEQ ID NO: 364657 - DNA, 30 bp, Artificial Sequence
  Synthetic oligonucleotide
tatggtattagttagtttgaacttctgtat

SEQ ID NO: 364658 - DNA, 30 bp, Artificial Sequence
  Synthetic oligonucleotide
cgggaccagcagcgcgcatttaaagtgtat

SEQ ID NO: 364659 - DNA, 30 bp, Artificial Sequence
  Synthetic oligonucleotide
gagttacgttactgtaatctggcagtgtat

SEQ ID NO: 364660 - DNA, 30 bp, Artificial Sequence
  Synthetic oligonucleotide
ttgacctcatgcaagagcggttccgtgtat

SEQ ID NO: 364661 - DNA, 30 bp, Artificial Sequence
  Synthetic oligonucleotide
gataaggtgtagtctcattatagcgtgtat

SEQ ID NO: 364662 - DNA, 30 bp, Artificial Sequence
  Synthetic oligonucleotide
gaccttgatttccgtcacgatggcgtgtat

SEQ ID NO: 364663 - DNA, 30 bp, Artificial Sequence
  Synthetic oligonucleotide
ccatacaaggtgctacattacgtcgtgtat

SEQ ID NO: 364664 - DNA, 30 bp, Artificial Sequence
  Synthetic oligonucleotide
gaagtcccgagcttcggcgagcgggtgtat

SEQ ID NO: 364665 - DNA, 30 bp, Artificial Sequence
  Synthetic oligonucleotide
gacctgattcgaaatcctgggaatgtgtat

SEQ ID NO: 364666 - DNA, 30 bp, Artificial Sequence
  Synthetic oligonucleotide
tgtgtacataaatgttcctggcctgtgtat

SEQ ID NO: 364667 - DNA, 30 bp, Artificial Sequence
  Synthetic oligonucleotide
tcttatctgttgtgttttccacttgtgtat

SEQ ID NO: 364668 - DNA, 30 bp, Artificial Sequence
  Synthetic oligonucleotide
tcttatctgttgtgtttttctcttgtgtat

SEQ ID NO: 364669 - DNA, 30 bp, Artificial Sequence
  Synthetic oligonucleotide
ataataagtcacatgatggacatattgtat

SEQ ID NO: 364670 - DNA, 30 bp, Artificial Sequence
  Synthetic oligonucleotide
ccagagacacccatggaggatgtattgtat

SEQ ID NO: 364671 - DNA, 30 bp, Artificial Sequence
  Synthetic oligonucleotide
atgatatccctattatattgccacttgtat

SEQ ID NO: 364672 - DNA, 30 bp, Artificial Sequence
  Synthetic oligonucleotide
tcgaatcacgccacaaattcacgcttgtat

SEQ ID NO: 364673 - DNA, 30 bp, Artificial Sequence
  Synthetic oligonucleotide
tgtaaggtataaggtggtatagtcttgtat

SEQ ID NO: 364674 - DNA, 30 bp, Artificial Sequence
  Synthetic oligonucleotide
gcgcagagtgcacccttgcacgtcttgtat

SEQ ID NO: 364675 - DNA, 30 bp, Artificial Sequence
  Synthetic oligonucleotide
ccggaatcagagattttctgaaatttgtat

SEQ ID NO: 364676 - DNA, 30 bp, Artificial Sequence
  Synthetic oligonucleotide
ttacgtggccgcccacgtaagcctttgtat

SEQ ID NO: 364677 - DNA, 30 bp, Artificial Sequence
  Synthetic oligonucleotide
aaccgatactcaattggtagaggtttgtat

SEQ ID NO: 364678 - DNA, 30 bp, Artificial Sequence
  Synthetic oligonucleotide
aggtttttagggttcttcttgtgtttgtat

SEQ ID NO: 364679 - DNA, 30 bp, Artificial Sequence
  Synthetic oligonucleotide
aggttatatagcttatgagactcaaattat

SEQ ID NO: 364680 - DNA, 30 bp, Artificial Sequence
  Synthetic oligonucleotide
gaccgaattctagaagaattcagaaattat

SEQ ID NO: 364681 - DNA, 30 bp, Artificial Sequence
  Synthetic oligonucleotide
cggccacctggtagagtccagcccaattat

SEQ ID NO: 364682 - DNA, 30 bp, Artificial Sequence
  Synthetic oligonucleotide
atatggtaggccgacctccaagtgaattat

SEQ ID NO: 364683 - DNA, 30 bp, Artificial Sequence
  Synthetic oligonucleotide
tacttctctgccaacgccatattgaattat

SEQ ID NO: 364684 - DNA, 30 bp, Artificial Sequence
  Synthetic oligonucleotide
ttcgactgtgttatgtgaaagtgtaattat

SEQ ID NO: 364685 - DNA, 30 bp, Artificial Sequence
  Synthetic oligonucleotide
agcgatgggtcgtagaacagaattaattat

SEQ ID NO: 364686 - DNA, 30 bp, Artificial Sequence
  Synthetic oligonucleotide
agagagcgcccggggtactcacttaattat

SEQ ID NO: 364687 - DNA, 30 bp, Artificial Sequence
  Synthetic oligonucleotide
tgctaccggacggtcctcgaaagacattat

SEQ ID NO: 364688 - DNA, 30 bp, Artificial Sequence
  Synthetic oligonucleotide
ttgatgggcgatcgggctcttagacattat

SEQ ID NO: 364689 - DNA, 30 bp, Artificial Sequence
  Synthetic oligonucleotide
ctcaaaggagggcttactcggcgacattat

SEQ ID NO: 364690 - DNA, 30 bp, Artificial Sequence
  Synthetic oligonucleotide
attgtgacttcctcgggcgagatacattat

SEQ ID NO: 364691 - DNA, 30 bp, Artificial Sequence
  Synthetic oligonucleotide
gaggccgccgtacagcatatgccgcattat

SEQ ID NO: 364692 - DNA, 29 bp, Artificial Sequence
  Synthetic oligonucleotide
ggatacggcagaatcatctaaggcattat

SEQ ID NO: 364693 - DNA, 30 bp, Artificial Sequence
  Synthetic oligonucleotide
tgcaaaaaagggatcatgccctatcattat

SEQ ID NO: 364694 - DNA, 30 bp, Artificial Sequence
  Synthetic oligonucleotide
cccatgatgagatagttcacgcttcattat

SEQ ID NO: 364695 - DNA, 30 bp, Artificial Sequence
  Synthetic oligonucleotide
tggcacacacaagaactacgctttcattat

SEQ ID NO: 364696 - DNA, 30 bp, Artificial Sequence
  Synthetic oligonucleotide
tcgtcagcactgtcgggttcgtaagattat

SEQ ID NO: 364697 - DNA, 30 bp, Artificial Sequence
  Synthetic oligonucleotide
gtctccctatcaaccattaaaagagattat

SEQ ID NO: 364698 - DNA, 30 bp, Artificial Sequence
  Synthetic oligonucleotide
caataacttcagtaccaactgagagattat

SEQ ID NO: 364699 - DNA, 30 bp, Artificial Sequence
  Synthetic oligonucleotide
cacgagacaccgcattctaatgacgattat

SEQ ID NO: 364700 - DNA, 30 bp, Artificial Sequence
  Synthetic oligonucleotide
tttgtgccacagcgggcgttctatgattat

SEQ ID NO: 364701 - DNA, 30 bp, Artificial Sequence
  Synthetic oligonucleotide
gggttgtagtttagcgggtaaggtgattat

SEQ ID NO: 364702 - DNA, 30 bp, Artificial Sequence
  Synthetic oligonucleotide
gagcaaatcatgctgggtgtctactattat

SEQ ID NO: 364703 - DNA, 30 bp, Artificial Sequence
  Synthetic oligonucleotide
cccgcgcgagttgcagatcgtccgtattat

SEQ ID NO: 364704 - DNA, 30 bp, Artificial Sequence
  Synthetic oligonucleotide
tgagttatcttagggtatcaatggtattat

SEQ ID NO: 364705 - DNA, 30 bp, Artificial Sequence
  Synthetic oligonucleotide
ctgcaccgtgatcgcgatgaaagttattat

SEQ ID NO: 364706 - DNA, 30 bp, Artificial Sequence
  Synthetic oligonucleotide
tgtgacacgataccatgtcggatttattat

SEQ ID NO: 364707 - DNA, 30 bp, Artificial Sequence
  Synthetic oligonucleotide
tataaggagtaagataaacggacaacttat

SEQ ID NO: 364708 - DNA, 30 bp, Artificial Sequence
  Synthetic oligonucleotide
tgtcccagacggaagtgcatgacaacttat

SEQ ID NO: 364709 - DNA, 30 bp, Artificial Sequence
  Synthetic oligonucleotide
gaacaaggagagtttaagtctagaacttat

SEQ ID NO: 364710 - DNA, 30 bp, Artificial Sequence
  Synthetic oligonucleotide
cttcggtctccatatgcgatacgaacttat

SEQ ID NO: 364711 - DNA, 30 bp, Artificial Sequence
  Synthetic oligonucleotide
ttaagcggtcttcggctgcccggaacttat

SEQ ID NO: 364712 - DNA, 30 bp, Artificial Sequence
  Synthetic oligonucleotide
gtggatgcacgtcgggagctacgcacttat

SEQ ID NO: 364713 - DNA, 30 bp, Artificial Sequence
  Synthetic oligonucleotide
gtaatgagtacgattctcgtcgggacttat

SEQ ID NO: 364714 - DNA, 30 bp, Artificial Sequence
  Synthetic oligonucleotide
aggtaggtatggtgtcacgcagtgacttat

SEQ ID NO: 364715 - DNA, 30 bp, Artificial Sequence
  Synthetic oligonucleotide
tgtttacctagataggtggggactacttat

SEQ ID NO: 364716 - DNA, 30 bp, Artificial Sequence
  Synthetic oligonucleotide
ccggcttaaaaaccatcaggatttacttat

SEQ ID NO: 364717 - DNA, 30 bp, Artificial Sequence
  Synthetic oligonucleotide
agtcggccaatgccctttgccggcccttat

SEQ ID NO: 364718 - DNA, 30 bp, Artificial Sequence
  Synthetic oligonucleotide
atcgattggtaaaaggcttgagtcccttat

SEQ ID NO: 364719 - DNA, 30 bp, Artificial Sequence
  Synthetic oligonucleotide
agaattcggtcacacgcactaaagccttat

SEQ ID NO: 364720 - DNA, 30 bp, Artificial Sequence
  Synthetic oligonucleotide
cattcgagacctctacgaaggtagccttat

SEQ ID NO: 364721 - DNA, 31 bp, Artificial Sequence
  Synthetic oligonucleotide
taagagataagatatttaaggaaatccttat

SEQ ID NO: 364722 - DNA, 30 bp, Artificial Sequence
  Synthetic oligonucleotide
ggacgattgaatgtagcgggccatccttat

SEQ ID NO: 364723 - DNA, 30 bp, Artificial Sequence
  Synthetic oligonucleotide
ctactggttgaaggaaaaccaattccttat

SEQ ID NO: 364724 - DNA, 30 bp, Artificial Sequence
  Synthetic oligonucleotide
agggtcttacgcatccaccatcttccttat

SEQ ID NO: 364725 - DNA, 30 bp, Artificial Sequence
  Synthetic oligonucleotide
taccctcaagtagtcagtagcaaagcttat

SEQ ID NO: 364726 - DNA, 30 bp, Artificial Sequence
  Synthetic oligonucleotide
gtacaagcaactggcaatacattagcttat

SEQ ID NO: 364727 - DNA, 30 bp, Artificial Sequence
  Synthetic oligonucleotide
aaggacaacgtacctatcaccgtggcttat

SEQ ID NO: 364728 - DNA, 30 bp, Artificial Sequence
  Synthetic oligonucleotide
atgcggagcaatcagtcatacgctgcttat

SEQ ID NO: 364729 - DNA, 30 bp, Artificial Sequence
  Synthetic oligonucleotide
aaggatatgcgctgcaagtacagtgcttat

SEQ ID NO: 364730 - DNA, 30 bp, Artificial Sequence
  Synthetic oligonucleotide
gacctcatgtttgcatgatcatcctcttat

SEQ ID NO: 364731 - DNA, 30 bp, Artificial Sequence
  Synthetic oligonucleotide
tcgcgacatatctcacggggtcgctcttat

SEQ ID NO: 364732 - DNA, 30 bp, Artificial Sequence
  Synthetic oligonucleotide
actttgatatgttagcactttccgtcttat

SEQ ID NO: 364733 - DNA, 30 bp, Artificial Sequence
  Synthetic oligonucleotide
ggatacttgatgcaagaatggaattcttat

SEQ ID NO: 364734 - DNA, 30 bp, Artificial Sequence
  Synthetic oligonucleotide
ttggaaacttcgtgtattgcgacttcttat

SEQ ID NO: 364735 - DNA, 30 bp, Artificial Sequence
  Synthetic oligonucleotide
tagcagacagacggattcgtcatttcttat

SEQ ID NO: 364736 - DNA, 30 bp, Artificial Sequence
  Synthetic oligonucleotide
ctggagtccttctgaagaggtaaaagttat

SEQ ID NO: 364737 - DNA, 30 bp, Artificial Sequence
  Synthetic oligonucleotide
ctgtaacccgttttacggggagaaagttat

SEQ ID NO: 364738 - DNA, 30 bp, Artificial Sequence
  Synthetic oligonucleotide
tcatatactcgcatacatggtgaaagttat

SEQ ID NO: 364739 - DNA, 30 bp, Artificial Sequence
  Synthetic oligonucleotide
cacatatacggacagcgcggtcctagttat

SEQ ID NO: 364740 - DNA, 30 bp, Artificial Sequence
  Synthetic oligonucleotide
cattgcgttagtttttggtcacaacgttat

SEQ ID NO: 364741 - DNA, 30 bp, Artificial Sequence
  Synthetic oligonucleotide
gctttatcccgtttggtagaccgacgttat

SEQ ID NO: 364742 - DNA, 30 bp, Artificial Sequence
  Synthetic oligonucleotide
agttgtaaagtatctcatggaatacgttat

SEQ ID NO: 364743 - DNA, 30 bp, Artificial Sequence
  Synthetic oligonucleotide
tgcactccgagtccgcaattcatacgttat

SEQ ID NO: 364744 - DNA, 30 bp, Artificial Sequence
  Synthetic oligonucleotide
ttgatattcattcattcacaactacgttat

SEQ ID NO: 364745 - DNA, 30 bp, Artificial Sequence
  Synthetic oligonucleotide
cctcctagggtgccaatttgggaccgttat

SEQ ID NO: 364746 - DNA, 30 bp, Artificial Sequence
  Synthetic oligonucleotide
ggtctttaagacgtttgctgataccgttat

SEQ ID NO: 364747 - DNA, 30 bp, Artificial Sequence
  Synthetic oligonucleotide
tattgttcgagtgagacagctgtccgttat

SEQ ID NO: 364748 - DNA, 30 bp, Artificial Sequence
  Synthetic oligonucleotide
tcttatgtacgcgtaaagccacgtcgttat

SEQ ID NO: 364749 - DNA, 30 bp, Artificial Sequence
  Synthetic oligonucleotide
ccgcacggtatagcaacctaaggtcgttat

SEQ ID NO: 364750 - DNA, 30 bp, Artificial Sequence
  Synthetic oligonucleotide
tcacttataaatcaatatcgcgttcgttat

SEQ ID NO: 364751 - DNA, 30 bp, Artificial Sequence
  Synthetic oligonucleotide
gtggtaggagtacttgatgtcaaaggttat

SEQ ID NO: 364752 - DNA, 30 bp, Artificial Sequence
  Synthetic oligonucleotide
acggtttcaaacaggtcactccaaggttat

SEQ ID NO: 364753 - DNA, 30 bp, Artificial Sequence
  Synthetic oligonucleotide
ggagcctacacgtaacatcacgcaggttat

SEQ ID NO: 364754 - DNA, 30 bp, Artificial Sequence
  Synthetic oligonucleotide
atacctgcaccagcttcgtagagtggttat

SEQ ID NO: 364755 - DNA, 30 bp, Artificial Sequence
  Synthetic oligonucleotide
tatacgaataccagcaggtacgaatgttat

SEQ ID NO: 364756 - DNA, 30 bp, Artificial Sequence
  Synthetic oligonucleotide
gggcgtagaggccgagtcctcgaatgttat

SEQ ID NO: 364757 - DNA, 30 bp, Artificial Sequence
  Synthetic oligonucleotide
gatagagtacgtacttaacatggatgttat

SEQ ID NO: 364758 - DNA, 30 bp, Artificial Sequence
  Synthetic oligonucleotide
caaaactcgaaaattctatatttatgttat

SEQ ID NO: 364759 - DNA, 31 bp, Artificial Sequence
  Synthetic oligonucleotide
tcagggagatctcttacaaatgccctgttat

SEQ ID NO: 364760 - DNA, 30 bp, Artificial Sequence
  Synthetic oligonucleotide
taaggaggatgctagccaccggcctgttat

SEQ ID NO: 364761 - DNA, 30 bp, Artificial Sequence
  Synthetic oligonucleotide
atatcatcaaatagaacttaggggtgttat

SEQ ID NO: 364762 - DNA, 30 bp, Artificial Sequence
  Synthetic oligonucleotide
aacaatggctcaactaagaagctgtgttat

SEQ ID NO: 364763 - DNA, 30 bp, Artificial Sequence
  Synthetic oligonucleotide
cgtaatcaaggggttggatatgtttgttat

SEQ ID NO: 364764 - DNA, 30 bp, Artificial Sequence
  Synthetic oligonucleotide
atctgcaacagcacaaggctgatcatttat

SEQ ID NO: 364765 - DNA, 30 bp, Artificial Sequence
  Synthetic oligonucleotide
gcaagactatcggcagaagtcacgatttat

SEQ ID NO: 364766 - DNA, 29 bp, Artificial Sequence
  Synthetic oligonucleotide
ttgatgggtggttgttcggttcgatttat

SEQ ID NO: 364767 - DNA, 30 bp, Artificial Sequence
  Synthetic oligonucleotide
aatggtaacgacgcgtaacgaaggatttat

SEQ ID NO: 364768 - DNA, 30 bp, Artificial Sequence
  Synthetic oligonucleotide
ccaccgcgagagtatgttcttcatatttat

SEQ ID NO: 364769 - DNA, 30 bp, Artificial Sequence
  Synthetic oligonucleotide
gccacgctcatgagcgacagaactatttat

SEQ ID NO: 364770 - DNA, 30 bp, Artificial Sequence
  Synthetic oligonucleotide
tgtgttatgctaggtgtcgttattatttat

SEQ ID NO: 364771 - DNA, 30 bp, Artificial Sequence
  Synthetic oligonucleotide
ttatcgtttagatatcacgtatttatttat

SEQ ID NO: 364772 - DNA, 30 bp, Artificial Sequence
  Synthetic oligonucleotide
taacatggaggatggtccgcaaacctttat

SEQ ID NO: 364773 - DNA, 30 bp, Artificial Sequence
  Synthetic oligonucleotide
ctgcacattcgcaaaagctgagacctttat

SEQ ID NO: 364774 - DNA, 30 bp, Artificial Sequence
  Synthetic oligonucleotide
ccgggttattagccgtctaatatgctttat

SEQ ID NO: 364775 - DNA, 30 bp, Artificial Sequence
  Synthetic oligonucleotide
gcgtcaggttcgtatctaggattgctttat

SEQ ID NO: 364776 - DNA, 30 bp, Artificial Sequence
  Synthetic oligonucleotide
taatagggctgtttgataatagatctttat

SEQ ID NO: 364777 - DNA, 30 bp, Artificial Sequence
  Synthetic oligonucleotide
agcatatgttcgaggccggtatatctttat

SEQ ID NO: 364778 - DNA, 30 bp, Artificial Sequence
  Synthetic oligonucleotide
gggtttaggctgtagcccacaagtctttat

SEQ ID NO: 364779 - DNA, 30 bp, Artificial Sequence
  Synthetic oligonucleotide
agttgagatattgggatgagcatagtttat

SEQ ID NO: 364780 - DNA, 31 bp, Artificial Sequence
  Synthetic oligonucleotide
acgtccatacagattcgttaataatgtttat

SEQ ID NO: 364781 - DNA, 30 bp, Artificial Sequence
  Synthetic oligonucleotide
tcgtgcaaggaaactagtccggctgtttat

SEQ ID NO: 364782 - DNA, 30 bp, Artificial Sequence
  Synthetic oligonucleotide
aatattccatcatgggtggcatgtgtttat

SEQ ID NO: 364783 - DNA, 30 bp, Artificial Sequence
  Synthetic oligonucleotide
gaccggcgcccacagaggtcctgattttat

SEQ ID NO: 364784 - DNA, 30 bp, Artificial Sequence
  Synthetic oligonucleotide
tggtcttggccttctagtcattgattttat

SEQ ID NO: 364785 - DNA, 30 bp, Artificial Sequence
  Synthetic oligonucleotide
atgatcgccgcggcatactcctagttttat

SEQ ID NO: 364786 - DNA, 30 bp, Artificial Sequence
  Synthetic oligonucleotide
ggggaatggatatgccgttagtggttttat

SEQ ID NO: 364787 - DNA, 30 bp, Artificial Sequence
  Synthetic oligonucleotide
gcgcgggattggactacgccaatgttttat

SEQ ID NO: 364788 - DNA, 30 bp, Artificial Sequence
  Synthetic oligonucleotide
cctaattttataggtccgccccgaaaaact

SEQ ID NO: 364789 - DNA, 30 bp, Artificial Sequence
  Synthetic oligonucleotide
tcatgatcggaaagacagctggtaaaaact

SEQ ID NO: 364790 - DNA, 30 bp, Artificial Sequence
  Synthetic oligonucleotide
gcaactggtgcgactaaagtctacaaaact

SEQ ID NO: 364791 - DNA, 30 bp, Artificial Sequence
  Synthetic oligonucleotide
cccctttaatgagagcagggaaagaaaact

SEQ ID NO: 364792 - DNA, 30 bp, Artificial Sequence
  Synthetic oligonucleotide
ttgcgcgctctgatgccttgaaagaaaact

SEQ ID NO: 364793 - DNA, 30 bp, Artificial Sequence
  Synthetic oligonucleotide
tgccgtatgtgagcatcgaggccgaaaact

SEQ ID NO: 364794 - DNA, 30 bp, Artificial Sequence
  Synthetic oligonucleotide
ctcatcccaatacaaggggccgtgaaaact

SEQ ID NO: 364795 - DNA, 30 bp, Artificial Sequence
  Synthetic oligonucleotide
ttccattccgttcgccatttgggtaaaact

SEQ ID NO: 364796 - DNA, 30 bp, Artificial Sequence
  Synthetic oligonucleotide
ggtctccaataaccaaactattcacaaact

SEQ ID NO: 364797 - DNA, 30 bp, Artificial Sequence
  Synthetic oligonucleotide
atcggcctgtggcgctttcagttacaaact

SEQ ID NO: 364798 - DNA, 30 bp, Artificial Sequence
  Synthetic oligonucleotide
cttcaagcgacttgtgagtagctccaaact

SEQ ID NO: 364799 - DNA, 30 bp, Artificial Sequence
  Synthetic oligonucleotide
gtcaaatgctggccatgcgccaggcaaact

SEQ ID NO: 364800 - DNA, 30 bp, Artificial Sequence
  Synthetic oligonucleotide
tgcatgccgaaatgtcatggtaggcaaact

SEQ ID NO: 364801 - DNA, 30 bp, Artificial Sequence
  Synthetic oligonucleotide
aggtctgctggatggagcgctctgcaaact

SEQ ID NO: 364802 - DNA, 30 bp, Artificial Sequence
  Synthetic oligonucleotide
cggagactagaaagttgtcagggtcaaact

SEQ ID NO: 364803 - DNA, 30 bp, Artificial Sequence
  Synthetic oligonucleotide
ccggattcgtggttacgcgaaagcgaaact

SEQ ID NO: 364804 - DNA, 30 bp, Artificial Sequence
  Synthetic oligonucleotide
gacgagagacactcgtcggacctcgaaact

SEQ ID NO: 364805 - DNA, 30 bp, Artificial Sequence
  Synthetic oligonucleotide
tttgtcacgcaaaaatccccagaggaaact

SEQ ID NO: 364806 - DNA, 30 bp, Artificial Sequence
  Synthetic oligonucleotide
gatatgttgcgcgccccatagcatgaaact

SEQ ID NO: 364807 - DNA, 30 bp, Artificial Sequence
  Synthetic oligonucleotide
ggtcgctaagtttgacaaggattataaact

SEQ ID NO: 364808 - DNA, 30 bp, Artificial Sequence
  Synthetic oligonucleotide
tgcgcttccgtataggggctaatgtaaact

SEQ ID NO: 364809 - DNA, 30 bp, Artificial Sequence
  Synthetic oligonucleotide
atcctcccgtctattcggcagaaaacaact

SEQ ID NO: 364810 - DNA, 30 bp, Artificial Sequence
  Synthetic oligonucleotide
aggggggtcctgtcgaacgttcgaacaact

SEQ ID NO: 364811 - DNA, 30 bp, Artificial Sequence
  Synthetic oligonucleotide
tatactgaactacattgtcagataacaact

SEQ ID NO: 364812 - DNA, 30 bp, Artificial Sequence
  Synthetic oligonucleotide
ttgactaaaatgcttgagcggataacaact

SEQ ID NO: 364813 - DNA, 30 bp, Artificial Sequence
  Synthetic oligonucleotide
agtgtgcatgtgcttgttgttgggacaact

SEQ ID NO: 364814 - DNA, 30 bp, Artificial Sequence
  Synthetic oligonucleotide
cagaggaatcctacgattaggcatacaact

SEQ ID NO: 364815 - DNA, 30 bp, Artificial Sequence
  Synthetic oligonucleotide
gagtacataggcgcaccggatagaccaact

SEQ ID NO: 364816 - DNA, 30 bp, Artificial Sequence
  Synthetic oligonucleotide
aactccacgcgctcggtgcttatcccaact

SEQ ID NO: 364817 - DNA, 30 bp, Artificial Sequence
  Synthetic oligonucleotide
tgagcttacagaagtgcttacctgccaact

SEQ ID NO: 364818 - DNA, 30 bp, Artificial Sequence
  Synthetic oligonucleotide
tttgcgggtggagcgggtaaagctccaact

SEQ ID NO: 364819 - DNA, 30 bp, Artificial Sequence
  Synthetic oligonucleotide
attgtccaggcctatgtgtctcgtccaact

SEQ ID NO: 364820 - DNA, 30 bp, Artificial Sequence
  Synthetic oligonucleotide
gaaggtcaataactttagttctgtccaact

SEQ ID NO: 364821 - DNA, 30 bp, Artificial Sequence
  Synthetic oligonucleotide
ttttagatcccaccatctacggaggcaact

SEQ ID NO: 364822 - DNA, 30 bp, Artificial Sequence
  Synthetic oligonucleotide
gacttcgtaaagttagtttcgacggcaact

SEQ ID NO: 364823 - DNA, 30 bp, Artificial Sequence
  Synthetic oligonucleotide
cagtccagttgacaacaaagtacggcaact

SEQ ID NO: 364824 - DNA, 30 bp, Artificial Sequence
  Synthetic oligonucleotide
tgcggatcttggggtccttgtgtggcaact

SEQ ID NO: 364825 - DNA, 30 bp, Artificial Sequence
  Synthetic oligonucleotide
acaacgcccaatatgcgggatcctgcaact

SEQ ID NO: 364826 - DNA, 30 bp, Artificial Sequence
  Synthetic oligonucleotide
gccaaccccaggggcatgacagttgcaact

SEQ ID NO: 364827 - DNA, 30 bp, Artificial Sequence
  Synthetic oligonucleotide
caagaggtctgtttctaacaggcctcaact

SEQ ID NO: 364828 - DNA, 30 bp, Artificial Sequence
  Synthetic oligonucleotide
aaacattattggtatcgtataaagtcaact

SEQ ID NO: 364829 - DNA, 30 bp, Artificial Sequence
  Synthetic oligonucleotide
gtatttgagcgcgggttatgctcttcaact

SEQ ID NO: 364830 - DNA, 30 bp, Artificial Sequence
  Synthetic oligonucleotide
aaggaaattacaccaatgggcttttcaact

SEQ ID NO: 364831 - DNA, 31 bp, Artificial Sequence
  Synthetic oligonucleotide
agatttaatacgcctttgataaaaaagaact

SEQ ID NO: 364832 - DNA, 30 bp, Artificial Sequence
  Synthetic oligonucleotide
tagttcggtgagagaaatcgaggaagaact

SEQ ID NO: 364833 - DNA, 30 bp, Artificial Sequence
  Synthetic oligonucleotide
acacggatccatccacctacgggaagaact

SEQ ID NO: 364834 - DNA, 29 bp, Artificial Sequence
  Synthetic oligonucleotide
ggatgctatgcaaaacgcgtatgagaact

SEQ ID NO: 364835 - DNA, 29 bp, Artificial Sequence
  Synthetic oligonucleotide
ttgatccgagaccgctatagaagcgaact

SEQ ID NO: 364836 - DNA, 30 bp, Artificial Sequence
  Synthetic oligonucleotide
tacggatcagcttgagtacccgcgcgaact

SEQ ID NO: 364837 - DNA, 30 bp, Artificial Sequence
  Synthetic oligonucleotide
ctattcggatggtcgagcataaatcgaact

SEQ ID NO: 364838 - DNA, 30 bp, Artificial Sequence
  Synthetic oligonucleotide
cctgcctgctcggtaacgagttgtcgaact

SEQ ID NO: 364839 - DNA, 30 bp, Artificial Sequence
  Synthetic oligonucleotide
gtcgttcgtgaagagcacttaacgggaact

SEQ ID NO: 364840 - DNA, 30 bp, Artificial Sequence
  Synthetic oligonucleotide
agccgagcgtgttagagttccgtgggaact

SEQ ID NO: 364841 - DNA, 30 bp, Artificial Sequence
  Synthetic oligonucleotide
tcaaaggtgtgtcggaccggcgtgggaact

SEQ ID NO: 364842 - DNA, 30 bp, Artificial Sequence
  Synthetic oligonucleotide
cgtaagccgaagcgacctagccgtggaact

SEQ ID NO: 364843 - DNA, 30 bp, Artificial Sequence
  Synthetic oligonucleotide
gccatgtacttcggcatacgacgatgaact

SEQ ID NO: 364844 - DNA, 30 bp, Artificial Sequence
  Synthetic oligonucleotide
gcatttagtgaatgctctctttcctgaact

SEQ ID NO: 364845 - DNA, 30 bp, Artificial Sequence
  Synthetic oligonucleotide
ggctaaagcaggagccgacgtagctgaact

SEQ ID NO: 364846 - DNA, 30 bp, Artificial Sequence
  Synthetic oligonucleotide
aagggtacgattttgcacgggatctgaact

SEQ ID NO: 364847 - DNA, 30 bp, Artificial Sequence
  Synthetic oligonucleotide
gaaaagcgaactcgcctgttttagtgaact

SEQ ID NO: 364848 - DNA, 30 bp, Artificial Sequence
  Synthetic oligonucleotide
tagtcagccagattagcttctaattgaact

SEQ ID NO: 364849 - DNA, 30 bp, Artificial Sequence
  Synthetic oligonucleotide
catgatgactgcatttcgcatacttgaact

SEQ ID NO: 364850 - DNA, 30 bp, Artificial Sequence
  Synthetic oligonucleotide
tatagtgagtcttttgttagattttgaact

SEQ ID NO: 364851 - DNA, 30 bp, Artificial Sequence
  Synthetic oligonucleotide
gtcgtgttaggctagtctgcgaaaataact

SEQ ID NO: 364852 - DNA, 30 bp, Artificial Sequence
  Synthetic oligonucleotide
aacggagtatccgttgtccacagaataact

SEQ ID NO: 364853 - DNA, 30 bp, Artificial Sequence
  Synthetic oligonucleotide
cgaccctggtcagctagttggacgataact

SEQ ID NO: 364854 - DNA, 30 bp, Artificial Sequence
  Synthetic oligonucleotide
ggccgccttcggttaactaaccatataact

SEQ ID NO: 364855 - DNA, 30 bp, Artificial Sequence
  Synthetic oligonucleotide
catttctgcgcaccctcgtcagctataact

SEQ ID NO: 364856 - DNA, 30 bp, Artificial Sequence
  Synthetic oligonucleotide
aacggagtcgggcaggccttttctataact

SEQ ID NO: 364857 - DNA, 30 bp, Artificial Sequence
  Synthetic oligonucleotide
acaagcaaaaggttgtgcaagtgactaact

SEQ ID NO: 364858 - DNA, 30 bp, Artificial Sequence
  Synthetic oligonucleotide
gcaagacgtcttaagcagcggagcctaact

SEQ ID NO: 364859 - DNA, 30 bp, Artificial Sequence
  Synthetic oligonucleotide
gtgttggacttgtgggaggcttcgctaact

SEQ ID NO: 364860 - DNA, 30 bp, Artificial Sequence
  Synthetic oligonucleotide
ctggatattgaggcacaaaagtggctaact

SEQ ID NO: 364861 - DNA, 30 bp, Artificial Sequence
  Synthetic oligonucleotide
ggttagcgcgtccgccacttctctctaact

SEQ ID NO: 364862 - DNA, 30 bp, Artificial Sequence
  Synthetic oligonucleotide
ttgagcccggccggccacgacatagtaact

SEQ ID NO: 364863 - DNA, 30 bp, Artificial Sequence
  Synthetic oligonucleotide
cctattgccgagcccgaacctcaggtaact

SEQ ID NO: 364864 - DNA, 30 bp, Artificial Sequence
  Synthetic oligonucleotide
agatacactacgatttcatgggaggtaact

SEQ ID NO: 364865 - DNA, 30 bp, Artificial Sequence
  Synthetic oligonucleotide
acatttatattaagtgtgcactcggtaact

SEQ ID NO: 364866 - DNA, 30 bp, Artificial Sequence
  Synthetic oligonucleotide
agtggtggtatctaacttgccggggtaact

SEQ ID NO: 364867 - DNA, 30 bp, Artificial Sequence
  Synthetic oligonucleotide
gcaatgtattcatgtgaatctgtggtaact

SEQ ID NO: 364868 - DNA, 30 bp, Artificial Sequence
  Synthetic oligonucleotide
taaagtgggaaggcgtagctcaatgtaact

SEQ ID NO: 364869 - DNA, 30 bp, Artificial Sequence
  Synthetic oligonucleotide
gccatacaagtggggtgatatgatgtaact

SEQ ID NO: 364870 - DNA, 30 bp, Artificial Sequence
  Synthetic oligonucleotide
tgaatactctgtattaccttgactgtaact

SEQ ID NO: 364871 - DNA, 30 bp, Artificial Sequence
  Synthetic oligonucleotide
gtagccaacgtgtactagggtagtgtaact

SEQ ID NO: 364872 - DNA, 30 bp, Artificial Sequence
  Synthetic oligonucleotide
gattccctacccgtgacgttcgttgtaact

SEQ ID NO: 364873 - DNA, 30 bp, Artificial Sequence
  Synthetic oligonucleotide
tagtaatggagtaaacgcggataattaact

SEQ ID NO: 364874 - DNA, 30 bp, Artificial Sequence
  Synthetic oligonucleotide
agtgtaacattgaaaatcctttacttaact

SEQ ID NO: 364875 - DNA, 30 bp, Artificial Sequence
  Synthetic oligonucleotide
cttccactatactatagggcaacgttaact

SEQ ID NO: 364876 - DNA, 30 bp, Artificial Sequence
  Synthetic oligonucleotide
tagactcgatttactgcaggcgcgttaact

SEQ ID NO: 364877 - DNA, 30 bp, Artificial Sequence
  Synthetic oligonucleotide
ggaggcagagccacagtaaacgtgttaact

SEQ ID NO: 364878 - DNA, 30 bp, Artificial Sequence
  Synthetic oligonucleotide
tggaatcgaactagtcgtgaagatttaact

SEQ ID NO: 364879 - DNA, 30 bp, Artificial Sequence
  Synthetic oligonucleotide
tgggggtaatgccaaggggaggctttaact

SEQ ID NO: 364880 - DNA, 30 bp, Artificial Sequence
  Synthetic oligonucleotide
ccgaaagccctgtatccttatcgtttaact

SEQ ID NO: 364881 - DNA, 30 bp, Artificial Sequence
  Synthetic oligonucleotide
tagcaatcaggagtccgatcgacaaacact

SEQ ID NO: 364882 - DNA, 30 bp, Artificial Sequence
  Synthetic oligonucleotide
caaagttccaaatctggacgagcaaacact

SEQ ID NO: 364883 - DNA, 30 bp, Artificial Sequence
  Synthetic oligonucleotide
gtccatatagacatggaaaagtcaaacact

SEQ ID NO: 364884 - DNA, 30 bp, Artificial Sequence
  Synthetic oligonucleotide
tcaaccggctgattaagcatgcggaacact

SEQ ID NO: 364885 - DNA, 30 bp, Artificial Sequence
  Synthetic oligonucleotide
atagatgaggctatgggatgtactaacact

SEQ ID NO: 364886 - DNA, 30 bp, Artificial Sequence
  Synthetic oligonucleotide
gcactgtattaaaaggtagagagtaacact

SEQ ID NO: 364887 - DNA, 29 bp, Artificial Sequence
  Synthetic oligonucleotide
tgtgactaagcttcccatttaaacacact

SEQ ID NO: 364888 - DNA, 30 bp, Artificial Sequence
  Synthetic oligonucleotide
ccagctacgacggtgatttacaaccacact

SEQ ID NO: 364889 - DNA, 30 bp, Artificial Sequence
  Synthetic oligonucleotide
tccaagtactacatgctgcatgcccacact

SEQ ID NO: 364890 - DNA, 30 bp, Artificial Sequence
  Synthetic oligonucleotide
aatgtttggatctgggaatggtagcacact

SEQ ID NO: 364891 - DNA, 30 bp, Artificial Sequence
  Synthetic oligonucleotide
actgcaattatcccaaggacgtcgcacact

SEQ ID NO: 364892 - DNA, 30 bp, Artificial Sequence
  Synthetic oligonucleotide
aagtaaagctcctttgagacaaatcacact

SEQ ID NO: 364893 - DNA, 30 bp, Artificial Sequence
  Synthetic oligonucleotide
agcgttactcgcggcgtagttcgagacact

SEQ ID NO: 364894 - DNA, 30 bp, Artificial Sequence
  Synthetic oligonucleotide
cggtccgtctcaggggtattcacggacact

SEQ ID NO: 364895 - DNA, 30 bp, Artificial Sequence
  Synthetic oligonucleotide
tagtcatttaatccgaaagctgcggacact

SEQ ID NO: 364896 - DNA, 30 bp, Artificial Sequence
  Synthetic oligonucleotide
cgggacacgtattttttactgacatacact

SEQ ID NO: 364897 - DNA, 30 bp, Artificial Sequence
  Synthetic oligonucleotide
aggatttttaaagataaaactccgtacact

SEQ ID NO: 364898 - DNA, 30 bp, Artificial Sequence
  Synthetic oligonucleotide
tagtaagcatttaacacgatcgtgtacact

SEQ ID NO: 364899 - DNA, 30 bp, Artificial Sequence
  Synthetic oligonucleotide
cccaagcttaagggaaattgcttttacact

SEQ ID NO: 364900 - DNA, 30 bp, Artificial Sequence
  Synthetic oligonucleotide
tgttgtaggtttcgacaactcagaaccact

SEQ ID NO: 364901 - DNA, 30 bp, Artificial Sequence
  Synthetic oligonucleotide
tgaaacatcctatcccacgtggccaccact

SEQ ID NO: 364902 - DNA, 30 bp, Artificial Sequence
  Synthetic oligonucleotide
gagcgcaacaaccgtatattggccaccact

SEQ ID NO: 364903 - DNA, 30 bp, Artificial Sequence
  Synthetic oligonucleotide
cagttaccgctaaacactcatttcaccact

SEQ ID NO: 364904 - DNA, 30 bp, Artificial Sequence
  Synthetic oligonucleotide
gtggcttcatgcgtgagcgataggaccact

SEQ ID NO: 364905 - DNA, 30 bp, Artificial Sequence
  Synthetic oligonucleotide
cctgcgcagaccggatactgatggaccact

SEQ ID NO: 364906 - DNA, 30 bp, Artificial Sequence
  Synthetic oligonucleotide
tcggaatcttttcgcggaagtcataccact

SEQ ID NO: 364907 - DNA, 30 bp, Artificial Sequence
  Synthetic oligonucleotide
gaatatgaatagaagaatggagataccact

SEQ ID NO: 364908 - DNA, 30 bp, Artificial Sequence
  Synthetic oligonucleotide
gtcaaatcatgtggtctcaaatataccact

SEQ ID NO: 364909 - DNA, 30 bp, Artificial Sequence
  Synthetic oligonucleotide
cgccaatgtcgcaaagtgttcagtaccact

SEQ ID NO: 364910 - DNA, 30 bp, Artificial Sequence
  Synthetic oligonucleotide
cggaaaaaaaacggcccctactgtaccact

SEQ ID NO: 364911 - DNA, 30 bp, Artificial Sequence
  Synthetic oligonucleotide
attcgcattgaagtcgtaagatcacccact

SEQ ID NO: 364912 - DNA, 30 bp, Artificial Sequence
  Synthetic oligonucleotide
cgaatatgctgataggtagacgtacccact

SEQ ID NO: 364913 - DNA, 30 bp, Artificial Sequence
  Synthetic oligonucleotide
actaagtgtgggtttagtcaagtgcccact

SEQ ID NO: 364914 - DNA, 30 bp, Artificial Sequence
  Synthetic oligonucleotide
agacacggcccatccgcacgctatcccact

SEQ ID NO: 364915 - DNA, 30 bp, Artificial Sequence
  Synthetic oligonucleotide
ccgactcaaggttatatgcgatgtcccact

SEQ ID NO: 364916 - DNA, 30 bp, Artificial Sequence
  Synthetic oligonucleotide
cgcgagcatattcctcagtgtggcgccact

SEQ ID NO: 364917 - DNA, 30 bp, Artificial Sequence
  Synthetic oligonucleotide
cgcggtgttggtatctaatttactgccact

SEQ ID NO: 364918 - DNA, 30 bp, Artificial Sequence
  Synthetic oligonucleotide
cacagcttaataaaagtcacgcctgccact

SEQ ID NO: 364919 - DNA, 30 bp, Artificial Sequence
  Synthetic oligonucleotide
aataaccacagtacctgaaagagatccact

SEQ ID NO: 364920 - DNA, 30 bp, Artificial Sequence
  Synthetic oligonucleotide
tacgtattactctttgctatcggatccact

SEQ ID NO: 364921 - DNA, 30 bp, Artificial Sequence
  Synthetic oligonucleotide
tccatcccttaaaatcaagtgaactccact

SEQ ID NO: 364922 - DNA, 30 bp, Artificial Sequence
  Synthetic oligonucleotide
gtagagggaacgatttattagatctccact

SEQ ID NO: 364923 - DNA, 30 bp, Artificial Sequence
  Synthetic oligonucleotide
gaaccgtactacaattcaacgttgtccact

SEQ ID NO: 364924 - DNA, 30 bp, Artificial Sequence
  Synthetic oligonucleotide
gggatctcggcctcgtgccgtaattccact

SEQ ID NO: 364925 - DNA, 30 bp, Artificial Sequence
  Synthetic oligonucleotide
cggtctcgagtttaatatatataaagcact

SEQ ID NO: 364926 - DNA, 30 bp, Artificial Sequence
  Synthetic oligonucleotide
ttcgaacaatgttcgcttatggtaagcact

SEQ ID NO: 364927 - DNA, 30 bp, Artificial Sequence
  Synthetic oligonucleotide
aaatgtatgatctttagacaccctagcact

SEQ ID NO: 364928 - DNA, 30 bp, Artificial Sequence
  Synthetic oligonucleotide
gagggatcaaggtattgatttgttagcact

SEQ ID NO: 364929 - DNA, 30 bp, Artificial Sequence
  Synthetic oligonucleotide
aaccgtgcaaaatgcatcttacagcgcact

SEQ ID NO: 364930 - DNA, 30 bp, Artificial Sequence
  Synthetic oligonucleotide
ggaaactggtgtgcagttgacatgcgcact

SEQ ID NO: 364931 - DNA, 30 bp, Artificial Sequence
  Synthetic oligonucleotide
cgcttgacaaggcaacaacacctgcgcact

SEQ ID NO: 364932 - DNA, 30 bp, Artificial Sequence
  Synthetic oligonucleotide
acctccgctctaattgtgaggagtcgcact

SEQ ID NO: 364933 - DNA, 30 bp, Artificial Sequence
  Synthetic oligonucleotide
ggttgatccaaatagtcatggacaggcact

SEQ ID NO: 364934 - DNA, 30 bp, Artificial Sequence
  Synthetic oligonucleotide
ttgggatcacgggaaagcgatcgaggcact

SEQ ID NO: 364935 - DNA, 30 bp, Artificial Sequence
  Synthetic oligonucleotide
gagcggcatagccgcaaccaactaggcact

SEQ ID NO: 364936 - DNA, 30 bp, Artificial Sequence
  Synthetic oligonucleotide
ggcagagtgggctctccgtcggccggcact

SEQ ID NO: 364937 - DNA, 31 bp, Artificial Sequence
  Synthetic oligonucleotide
cccagtgctggggcgatatagtagcggcact

SEQ ID NO: 364938 - DNA, 30 bp, Artificial Sequence
  Synthetic oligonucleotide
tagcacatacactccaatcaacgcggcact

SEQ ID NO: 364939 - DNA, 30 bp, Artificial Sequence
  Synthetic oligonucleotide
ctcgtttagtggccagacggctgcggcact

SEQ ID NO: 364940 - DNA, 30 bp, Artificial Sequence
  Synthetic oligonucleotide
gtgcgctcaaggccagaaccgatcggcact

SEQ ID NO: 364941 - DNA, 30 bp, Artificial Sequence
  Synthetic oligonucleotide
aaaggttctatctatcaaaaggctggcact

SEQ ID NO: 364942 - DNA, 30 bp, Artificial Sequence
  Synthetic oligonucleotide
cagtgtagacagtgccgcatgacatgcact

SEQ ID NO: 364943 - DNA, 30 bp, Artificial Sequence
  Synthetic oligonucleotide
gtacacggtcaacagtggagattgtgcact

SEQ ID NO: 364944 - DNA, 30 bp, Artificial Sequence
  Synthetic oligonucleotide
tgaatagtatcgcaagtcatcttgtgcact

SEQ ID NO: 364945 - DNA, 30 bp, Artificial Sequence
  Synthetic oligonucleotide
ttagccggaacgaactccatggtttgcact

SEQ ID NO: 364946 - DNA, 30 bp, Artificial Sequence
  Synthetic oligonucleotide
cgggcacctatgctctgtcgcacaatcact

SEQ ID NO: 364947 - DNA, 30 bp, Artificial Sequence
  Synthetic oligonucleotide
aagtttgggcggtttgtccgcgacatcact

SEQ ID NO: 364948 - DNA, 30 bp, Artificial Sequence
  Synthetic oligonucleotide
ttgtactagaggcgcgagaaagccatcact

SEQ ID NO: 364949 - DNA, 30 bp, Artificial Sequence
  Synthetic oligonucleotide
caccgggggtaaccgaggaatctcatcact

SEQ ID NO: 364950 - DNA, 30 bp, Artificial Sequence
  Synthetic oligonucleotide
tgccggtcccgagggtagtggaagatcact

SEQ ID NO: 364951 - DNA, 30 bp, Artificial Sequence
  Synthetic oligonucleotide
ctgtcaagtcactctcgcgcgtcgatcact

SEQ ID NO: 364952 - DNA, 30 bp, Artificial Sequence
  Synthetic oligonucleotide
atttagggcatcattagatgggatatcact

SEQ ID NO: 364953 - DNA, 30 bp, Artificial Sequence
  Synthetic oligonucleotide
ttattagaaacatacgggataacactcact

SEQ ID NO: 364954 - DNA, 30 bp, Artificial Sequence
  Synthetic oligonucleotide
tgaacaacacataatctttagcacctcact

SEQ ID NO: 364955 - DNA, 30 bp, Artificial Sequence
  Synthetic oligonucleotide
gtaagagcacaactattacgattgctcact

SEQ ID NO: 364956 - DNA, 30 bp, Artificial Sequence
  Synthetic oligonucleotide
ccatagagcaagtatgtcaataatctcact

SEQ ID NO: 364957 - DNA, 30 bp, Artificial Sequence
  Synthetic oligonucleotide
tttagaacggcaagaatataagatctcact

SEQ ID NO: 364958 - DNA, 30 bp, Artificial Sequence
  Synthetic oligonucleotide
gtctgggtttctcactttgtagttctcact

SEQ ID NO: 364959 - DNA, 30 bp, Artificial Sequence
  Synthetic oligonucleotide
ccagataacctatgatcaaattgagtcact

SEQ ID NO: 364960 - DNA, 30 bp, Artificial Sequence
  Synthetic oligonucleotide
cgcgtttccgtcaacatttgcgtagtcact

SEQ ID NO: 364961 - DNA, 30 bp, Artificial Sequence
  Synthetic oligonucleotide
ttggtggcaatcgtctccgactgggtcact

SEQ ID NO: 364962 - DNA, 30 bp, Artificial Sequence
  Synthetic oligonucleotide
ggattccgaagatggccagttcatgtcact

SEQ ID NO: 364963 - DNA, 30 bp, Artificial Sequence
  Synthetic oligonucleotide
cagttatgtaaggcacttctgcgtgtcact

SEQ ID NO: 364964 - DNA, 30 bp, Artificial Sequence
  Synthetic oligonucleotide
tggctcctctgatgtgcactgattgtcact

SEQ ID NO: 364965 - DNA, 30 bp, Artificial Sequence
  Synthetic oligonucleotide
caatcacgacgaggcgcgcaggttgtcact

SEQ ID NO: 364966 - DNA, 30 bp, Artificial Sequence
  Synthetic oligonucleotide
tactgaaacagagacttggcgtgattcact

SEQ ID NO: 364967 - DNA, 30 bp, Artificial Sequence
  Synthetic oligonucleotide
ggacgttgttaaatgtacaacatattcact

SEQ ID NO: 364968 - DNA, 30 bp, Artificial Sequence
  Synthetic oligonucleotide
gatcggagttaaatgcgtcgtgtattcact

SEQ ID NO: 364969 - DNA, 30 bp, Artificial Sequence
  Synthetic oligonucleotide
gtactccaacgcccatggcccaccttcact

SEQ ID NO: 364970 - DNA, 30 bp, Artificial Sequence
  Synthetic oligonucleotide
ttgcatgagaaaccctgctcacgcttcact

SEQ ID NO: 364971 - DNA, 30 bp, Artificial Sequence
  Synthetic oligonucleotide
tctggtgtccgtactgaagaccggttcact

SEQ ID NO: 364972 - DNA, 30 bp, Artificial Sequence
  Synthetic oligonucleotide
taaaggctaaacacgtggcctttgttcact

SEQ ID NO: 364973 - DNA, 31 bp, Artificial Sequence
  Synthetic oligonucleotide
gagctcttcgatttcataaggaaaaaagact

SEQ ID NO: 364974 - DNA, 30 bp, Artificial Sequence
  Synthetic oligonucleotide
ggttagccttgaggtcacgcggacaagact

SEQ ID NO: 364975 - DNA, 30 bp, Artificial Sequence
  Synthetic oligonucleotide
agcgctagaaagataaccaaccggaagact

SEQ ID NO: 364976 - DNA, 30 bp, Artificial Sequence
  Synthetic oligonucleotide
atggcaccaatactatgttgttggaagact

SEQ ID NO: 364977 - DNA, 30 bp, Artificial Sequence
  Synthetic oligonucleotide
ggtagacctatagtgtgcacgctgaagact

SEQ ID NO: 364978 - DNA, 30 bp, Artificial Sequence
  Synthetic oligonucleotide
aggtgtcagagggtctgttaatttaagact

SEQ ID NO: 364979 - DNA, 30 bp, Artificial Sequence
  Synthetic oligonucleotide
caaagttcttgatctgcttgacaacagact

SEQ ID NO: 364980 - DNA, 30 bp, Artificial Sequence
  Synthetic oligonucleotide
cgcatctttttcggaccgcccgcccagact

SEQ ID NO: 364981 - DNA, 30 bp, Artificial Sequence
  Synthetic oligonucleotide
aaataattagtgtatataagcaagcagact

SEQ ID NO: 364982 - DNA, 30 bp, Artificial Sequence
  Synthetic oligonucleotide
aagaacagatgtcgcctggtcaggcagact

SEQ ID NO: 364983 - DNA, 30 bp, Artificial Sequence
  Synthetic oligonucleotide
tctaccctaatagcgagcaacaatcagact

SEQ ID NO: 364984 - DNA, 30 bp, Artificial Sequence
  Synthetic oligonucleotide
cacctacgtgatacgtcataagatcagact

SEQ ID NO: 364985 - DNA, 30 bp, Artificial Sequence
  Synthetic oligonucleotide
ctgcgaggctccgagcaagcctcagagact

SEQ ID NO: 364986 - DNA, 30 bp, Artificial Sequence
  Synthetic oligonucleotide
gacagttttttaatacgaaggagagagact

SEQ ID NO: 364987 - DNA, 30 bp, Artificial Sequence
  Synthetic oligonucleotide
ttggctgggaattgggggttatacgagact

SEQ ID NO: 364988 - DNA, 30 bp, Artificial Sequence
  Synthetic oligonucleotide
caaaggtcggcgaaatatcgcaccgagact

SEQ ID NO: 364989 - DNA, 30 bp, Artificial Sequence
  Synthetic oligonucleotide
gagccttcctcaaactatttaacggagact

SEQ ID NO: 364990 - DNA, 30 bp, Artificial Sequence
  Synthetic oligonucleotide
taaaggcttctaacacgggtcacggagact

SEQ ID NO: 364991 - DNA, 30 bp, Artificial Sequence
  Synthetic oligonucleotide
ttattacgcaggtacagaacatcggagact

SEQ ID NO: 364992 - DNA, 30 bp, Artificial Sequence
  Synthetic oligonucleotide
aagggaagttgaatatctgggtcggagact

SEQ ID NO: 364993 - DNA, 30 bp, Artificial Sequence
  Synthetic oligonucleotide
tcgccggcgttcgagcacgccactgagact

SEQ ID NO: 364994 - DNA, 30 bp, Artificial Sequence
  Synthetic oligonucleotide
ttcaatgggacgcgcatgaaacgtgagact

SEQ ID NO: 364995 - DNA, 30 bp, Artificial Sequence
  Synthetic oligonucleotide
gaggcggacttactacgcgcacttgagact

SEQ ID NO: 364996 - DNA, 30 bp, Artificial Sequence
  Synthetic oligonucleotide
cgtgtagccttggtatcttaatttgagact

SEQ ID NO: 364997 - DNA, 30 bp, Artificial Sequence
  Synthetic oligonucleotide
gtggttagcaggcgaggtcttagatagact

SEQ ID NO: 364998 - DNA, 30 bp, Artificial Sequence
  Synthetic oligonucleotide
cagtaggtagtcggataccctctatagact

SEQ ID NO: 364999 - DNA, 30 bp, Artificial Sequence
  Synthetic oligonucleotide
taacgaggagccgctggacgggtatagact

SEQ ID NO: 365000 - DNA, 30 bp, Artificial Sequence
  Synthetic oligonucleotide
caggatttggttctgcgtcttgtatagact

SEQ ID NO: 365001 - DNA, 30 bp, Artificial Sequence
  Synthetic oligonucleotide
actagcagcagactttcgtgtggctagact

SEQ ID NO: 365002 - DNA, 30 bp, Artificial Sequence
  Synthetic oligonucleotide
actaggtaaccattctaaactctgtagact

SEQ ID NO: 365003 - DNA, 30 bp, Artificial Sequence
  Synthetic oligonucleotide
ctgctactcctagtcacgcggccttagact

SEQ ID NO: 365004 - DNA, 30 bp, Artificial Sequence
  Synthetic oligonucleotide
ctgcgaacttcgagggagcttagaacgact

SEQ ID NO: 365005 - DNA, 30 bp, Artificial Sequence
  Synthetic oligonucleotide
gcatagctgtatcagttacgtaacacgact

SEQ ID NO: 365006 - DNA, 30 bp, Artificial Sequence
  Synthetic oligonucleotide
caagcaaggaatagcttttccgacacgact

SEQ ID NO: 365007 - DNA, 30 bp, Artificial Sequence
  Synthetic oligonucleotide
gatcgtcagctgactatattacggacgact

SEQ ID NO: 365008 - DNA, 30 bp, Artificial Sequence
  Synthetic oligonucleotide
gtatatgggctgcctatttatttgacgact

SEQ ID NO: 365009 - DNA, 30 bp, Artificial Sequence
  Synthetic oligonucleotide
atccttgatgtaccccaggaacatacgact

SEQ ID NO: 365010 - DNA, 30 bp, Artificial Sequence
  Synthetic oligonucleotide
aaatgggactctttacagatgtatacgact

SEQ ID NO: 365011 - DNA, 30 bp, Artificial Sequence
  Synthetic oligonucleotide
tgggcaggtgtccacgtgtggaaaccgact

SEQ ID NO: 365012 - DNA, 30 bp, Artificial Sequence
  Synthetic oligonucleotide
ccctatgggcttgtataagacagaccgact

SEQ ID NO: 365013 - DNA, 30 bp, Artificial Sequence
  Synthetic oligonucleotide
cagccaggactcgtttgccttcgaccgact

SEQ ID NO: 365014 - DNA, 30 bp, Artificial Sequence
  Synthetic oligonucleotide
aagtctggtcacttatagagtataccgact

SEQ ID NO: 365015 - DNA, 30 bp, Artificial Sequence
  Synthetic oligonucleotide
gcgtaaggtccccggcctgcagtcccgact

SEQ ID NO: 365016 - DNA, 30 bp, Artificial Sequence
  Synthetic oligonucleotide
gtagtgcacaagcatatttctacagcgact

SEQ ID NO: 365017 - DNA, 30 bp, Artificial Sequence
  Synthetic oligonucleotide
ttgagaaggattaccccctgtaacgcgact

SEQ ID NO: 365018 - DNA, 29 bp, Artificial Sequence
  Synthetic oligonucleotide
actgactcttaagccccatccaggcgact

SEQ ID NO: 365019 - DNA, 30 bp, Artificial Sequence
  Synthetic oligonucleotide
gtttctggtacggcactgaatacatcgact

SEQ ID NO: 365020 - DNA, 30 bp, Artificial Sequence
  Synthetic oligonucleotide
accttattcgcgaaggagtgcgtatcgact

SEQ ID NO: 365021 - DNA, 30 bp, Artificial Sequence
  Synthetic oligonucleotide
taatcacgggtaacggttcgtaactcgact

SEQ ID NO: 365022 - DNA, 30 bp, Artificial Sequence
  Synthetic oligonucleotide
gatcaaccgtttggatcgtctacgtcgact

SEQ ID NO: 365023 - DNA, 30 bp, Artificial Sequence
  Synthetic oligonucleotide
taagcctacgatgcggtcttttcgtcgact

SEQ ID NO: 365024 - DNA, 30 bp, Artificial Sequence
  Synthetic oligonucleotide
tatatagcaggcgagtaaggtgggtcgact

SEQ ID NO: 365025 - DNA, 30 bp, Artificial Sequence
  Synthetic oligonucleotide
gctagctcgtgtttctcccggttgtcgact

SEQ ID NO: 365026 - DNA, 30 bp, Artificial Sequence
  Synthetic oligonucleotide
atattggaatatgtaggtcaggcttcgact

SEQ ID NO: 365027 - DNA, 30 bp, Artificial Sequence
  Synthetic oligonucleotide
gattacgggataacgcgaagccaaaggact

SEQ ID NO: 365028 - DNA, 30 bp, Artificial Sequence
  Synthetic oligonucleotide
taggggttacctacataactgtacaggact

SEQ ID NO: 365029 - DNA, 30 bp, Artificial Sequence
  Synthetic oligonucleotide
accggtcgggttagggatgcaggcaggact

SEQ ID NO: 365030 - DNA, 30 bp, Artificial Sequence
  Synthetic oligonucleotide
ggcgagttgatctaggaaatgcctaggact

SEQ ID NO: 365031 - DNA, 30 bp, Artificial Sequence
  Synthetic oligonucleotide
gacgtgatccttgaggtttagattaggact

SEQ ID NO: 365032 - DNA, 30 bp, Artificial Sequence
  Synthetic oligonucleotide
gagagcgtcgaattagttaaatttaggact

SEQ ID NO: 365033 - DNA, 30 bp, Artificial Sequence
  Synthetic oligonucleotide
ttgcgaacctaggcaggtatttaccggact

SEQ ID NO: 365034 - DNA, 30 bp, Artificial Sequence
  Synthetic oligonucleotide
tgcacacattcgaccgcccggtagcggact

SEQ ID NO: 365035 - DNA, 30 bp, Artificial Sequence
  Synthetic oligonucleotide
agtacaactccaccaaggtttatgcggact

SEQ ID NO: 365036 - DNA, 30 bp, Artificial Sequence
  Synthetic oligonucleotide
aaattcgttgcctagcaaccacatcggact

SEQ ID NO: 365037 - DNA, 30 bp, Artificial Sequence
  Synthetic oligonucleotide
gtggtgaggtcatggactgagcctcggact

SEQ ID NO: 365038 - DNA, 30 bp, Artificial Sequence
  Synthetic oligonucleotide
tgacatatggcccctatggataaagggact

SEQ ID NO: 365039 - DNA, 30 bp, Artificial Sequence
  Synthetic oligonucleotide
tgggttggacctggaacatgagaagggact

SEQ ID NO: 365040 - DNA, 30 bp, Artificial Sequence
  Synthetic oligonucleotide
agcccggcgttacgcgcatcaggagggact

SEQ ID NO: 365041 - DNA, 30 bp, Artificial Sequence
  Synthetic oligonucleotide
ctatgtccgatactgggatacgccgggact

SEQ ID NO: 365042 - DNA, 30 bp, Artificial Sequence
  Synthetic oligonucleotide
ccagtaaagcattttgcacgccgggggact

SEQ ID NO: 365043 - DNA, 30 bp, Artificial Sequence
  Synthetic oligonucleotide
acagttttcccattcctgagggtggggact

SEQ ID NO: 365044 - DNA, 30 bp, Artificial Sequence
  Synthetic oligonucleotide
atcacagcatatcgtcgtggagatgggact

SEQ ID NO: 365045 - DNA, 30 bp, Artificial Sequence
  Synthetic oligonucleotide
ctgaaagctagagtggcgtcctatgggact

SEQ ID NO: 365046 - DNA, 30 bp, Artificial Sequence
  Synthetic oligonucleotide
taaggtcattatgctttaaattatgggact

SEQ ID NO: 365047 - DNA, 30 bp, Artificial Sequence
  Synthetic oligonucleotide
agccacatgaaattaacgcagggtgggact

SEQ ID NO: 365048 - DNA, 30 bp, Artificial Sequence
  Synthetic oligonucleotide
gacgcgccctagatgcgtggaattgggact

SEQ ID NO: 365049 - DNA, 30 bp, Artificial Sequence
  Synthetic oligonucleotide
cttagccatggcttaggctttcttgggact

SEQ ID NO: 365050 - DNA, 30 bp, Artificial Sequence
  Synthetic oligonucleotide
tacagatcagcggagcgagtcgttgggact

SEQ ID NO: 365051 - DNA, 30 bp, Artificial Sequence
  Synthetic oligonucleotide
aagcaggtcggagaggtccaaaaatggact

SEQ ID NO: 365052 - DNA, 30 bp, Artificial Sequence
  Synthetic oligonucleotide
cataatcgacatttctggttgttctggact

SEQ ID NO: 365053 - DNA, 30 bp, Artificial Sequence
  Synthetic oligonucleotide
cgaagggaaacactcgaggggaggtggact

SEQ ID NO: 365054 - DNA, 30 bp, Artificial Sequence
  Synthetic oligonucleotide
acggatgtaccagtggagggctggtggact

SEQ ID NO: 365055 - DNA, 30 bp, Artificial Sequence
  Synthetic oligonucleotide
ggttgggatataaaaaaaggaaattggact

SEQ ID NO: 365056 - DNA, 30 bp, Artificial Sequence
  Synthetic oligonucleotide
cagtatggcagtcagtcgacggattggact

SEQ ID NO: 365057 - DNA, 30 bp, Artificial Sequence
  Synthetic oligonucleotide
tagttcagcggtccatacgaacgttggact

SEQ ID NO: 365058 - DNA, 30 bp, Artificial Sequence
  Synthetic oligonucleotide
ctaagaataccggtaggcaaaggttggact

SEQ ID NO: 365059 - DNA, 30 bp, Artificial Sequence
  Synthetic oligonucleotide
aaggagtcagagcctaaggggctttggact

SEQ ID NO: 365060 - DNA, 30 bp, Artificial Sequence
  Synthetic oligonucleotide
gggccgcttacattttggttttcaatgact

SEQ ID NO: 365061 - DNA, 30 bp, Artificial Sequence
  Synthetic oligonucleotide
ttgtgaatgagatagcgtcaggtcatgact

SEQ ID NO: 365062 - DNA, 30 bp, Artificial Sequence
  Synthetic oligonucleotide
cgcctcaactcagtaaagatatggatgact

SEQ ID NO: 365063 - DNA, 30 bp, Artificial Sequence
  Synthetic oligonucleotide
ccctacgggttcgaggacatggttatgact

SEQ ID NO: 365064 - DNA, 30 bp, Artificial Sequence
  Synthetic oligonucleotide
gacgttgcataacagaggtacccactgact

SEQ ID NO: 365065 - DNA, 30 bp, Artificial Sequence
  Synthetic oligonucleotide
caaccgttgggaaagcagtcatcactgact

SEQ ID NO: 365066 - DNA, 30 bp, Artificial Sequence
  Synthetic oligonucleotide
atttaacgcagtttatccgttcacctgact

SEQ ID NO: 365067 - DNA, 30 bp, Artificial Sequence
  Synthetic oligonucleotide
gataagccgacctgttggggacggctgact

SEQ ID NO: 365068 - DNA, 30 bp, Artificial Sequence
  Synthetic oligonucleotide
cttatcccgtaaggcccgtgggcagtgact

SEQ ID NO: 365069 - DNA, 30 bp, Artificial Sequence
  Synthetic oligonucleotide
ataatttttggatgatcgtagagagtgact

SEQ ID NO: 365070 - DNA, 30 bp, Artificial Sequence
  Synthetic oligonucleotide
tttgagcaaaagagtatatacgtagtgact

SEQ ID NO: 365071 - DNA, 30 bp, Artificial Sequence
  Synthetic oligonucleotide
cggctctgtcagtgtactggtgtagtgact

SEQ ID NO: 365072 - DNA, 31 bp, Artificial Sequence
  Synthetic oligonucleotide
tttaccgcgatactattattggcaattgact

SEQ ID NO: 365073 - DNA, 30 bp, Artificial Sequence
  Synthetic oligonucleotide
gattctggattccggtataaatagttgact

SEQ ID NO: 365074 - DNA, 30 bp, Artificial Sequence
  Synthetic oligonucleotide
tcatttcgagtcatgcttacgtatttgact

SEQ ID NO: 365075 - DNA, 30 bp, Artificial Sequence
  Synthetic oligonucleotide
cttagagggacgagtcagtaaaaaaatact

SEQ ID NO: 365076 - DNA, 30 bp, Artificial Sequence
  Synthetic oligonucleotide
gaggaacaagattctataggaatgaatact

SEQ ID NO: 365077 - DNA, 30 bp, Artificial Sequence
  Synthetic oligonucleotide
attcatacagtgaggcgtagctataatact

SEQ ID NO: 365078 - DNA, 30 bp, Artificial Sequence
  Synthetic oligonucleotide
aacgattgtctaggtatcaccactaatact

SEQ ID NO: 365079 - DNA, 30 bp, Artificial Sequence
  Synthetic oligonucleotide
aagtatcacgactagagaatttgtaatact

SEQ ID NO: 365080 - DNA, 30 bp, Artificial Sequence
  Synthetic oligonucleotide
cttcaaccttgctgtcaggcaccacatact

SEQ ID NO: 365081 - DNA, 30 bp, Artificial Sequence
  Synthetic oligonucleotide
gagataagcggttacctagtcgtacatact

SEQ ID NO: 365082 - DNA, 30 bp, Artificial Sequence
  Synthetic oligonucleotide
tgccagatagaataccgcagcacccatact

SEQ ID NO: 365083 - DNA, 30 bp, Artificial Sequence
  Synthetic oligonucleotide
ttttgtgcgtaaatatgtcatgaagatact

SEQ ID NO: 365084 - DNA, 30 bp, Artificial Sequence
  Synthetic oligonucleotide
aatactaagctaattccaacaggagatact

SEQ ID NO: 365085 - DNA, 30 bp, Artificial Sequence
  Synthetic oligonucleotide
agtatgcgtcaagagaagcttctagatact

SEQ ID NO: 365086 - DNA, 30 bp, Artificial Sequence
  Synthetic oligonucleotide
gctaggtagcataatagtcgcatcgatact

SEQ ID NO: 365087 - DNA, 30 bp, Artificial Sequence
  Synthetic oligonucleotide
tctataccggactcgactctcctggatact

SEQ ID NO: 365088 - DNA, 30 bp, Artificial Sequence
  Synthetic oligonucleotide
gacatgctgatctctcgtcagccatatact

SEQ ID NO: 365089 - DNA, 30 bp, Artificial Sequence
  Synthetic oligonucleotide
cttcggaccatgggggcgaatagatatact

SEQ ID NO: 365090 - DNA, 30 bp, Artificial Sequence
  Synthetic oligonucleotide
tcctgccgggaaatctaaagcccgtatact

SEQ ID NO: 365091 - DNA, 30 bp, Artificial Sequence
  Synthetic oligonucleotide
caagtccccgtgagtacttagtcgtatact

SEQ ID NO: 365092 - DNA, 30 bp, Artificial Sequence
  Synthetic oligonucleotide
gccgttaagcacggtggtgggctttatact

SEQ ID NO: 365093 - DNA, 30 bp, Artificial Sequence
  Synthetic oligonucleotide
caaatatcagatgtttgtcactacactact

SEQ ID NO: 365094 - DNA, 30 bp, Artificial Sequence
  Synthetic oligonucleotide
tgaggaagctatagaagggagactactact

SEQ ID NO: 365095 - DNA, 30 bp, Artificial Sequence
  Synthetic oligonucleotide
tgaaaagcttctgatacatctgaacctact

SEQ ID NO: 365096 - DNA, 30 bp, Artificial Sequence
  Synthetic oligonucleotide
agtattgccgtggtcagcgttacgcctact

SEQ ID NO: 365097 - DNA, 30 bp, Artificial Sequence
  Synthetic oligonucleotide
gaaggaggcatcccgggaatacctcctact

SEQ ID NO: 365098 - DNA, 30 bp, Artificial Sequence
  Synthetic oligonucleotide
gagacccctataatagactttgaggctact

SEQ ID NO: 365099 - DNA, 30 bp, Artificial Sequence
  Synthetic oligonucleotide
ccggaccaccatggaaaaactattgctact

SEQ ID NO: 365100 - DNA, 30 bp, Artificial Sequence
  Synthetic oligonucleotide
agcacagcatgagcgcatatgcttgctact

SEQ ID NO: 365101 - DNA, 30 bp, Artificial Sequence
  Synthetic oligonucleotide
cttcccaccataacagtagaggcatctact

SEQ ID NO: 365102 - DNA, 30 bp, Artificial Sequence
  Synthetic oligonucleotide
cttgggtacagacagggggcaagatctact

SEQ ID NO: 365103 - DNA, 30 bp, Artificial Sequence
  Synthetic oligonucleotide
ttcgtctctagtgcggtttatcgctctact

SEQ ID NO: 365104 - DNA, 30 bp, Artificial Sequence
  Synthetic oligonucleotide
ataggtaccgtagcgtgtctcggttctact

SEQ ID NO: 365105 - DNA, 30 bp, Artificial Sequence
  Synthetic oligonucleotide
tattcgagtttgagtcagatcctaagtact

SEQ ID NO: 365106 - DNA, 30 bp, Artificial Sequence
  Synthetic oligonucleotide
gggttgtactgctatgcacacctcagtact

SEQ ID NO: 365107 - DNA, 30 bp, Artificial Sequence
  Synthetic oligonucleotide
ggggatgaacccggacggtccgggagtact

SEQ ID NO: 365108 - DNA, 30 bp, Artificial Sequence
  Synthetic oligonucleotide
tttatgttctatgaataaagcgttagtact

SEQ ID NO: 365109 - DNA, 30 bp, Artificial Sequence
  Synthetic oligonucleotide
ttgataagggtatactcgaatcaacgtact

SEQ ID NO: 365110 - DNA, 30 bp, Artificial Sequence
  Synthetic oligonucleotide
caccttgccccgtagaacacgtcacgtact

SEQ ID NO: 365111 - DNA, 30 bp, Artificial Sequence
  Synthetic oligonucleotide
tgacgttaagaactgtaacgggaccgtact

SEQ ID NO: 365112 - DNA, 30 bp, Artificial Sequence
  Synthetic oligonucleotide
tcggaaggcggacatgacgtataccgtact

SEQ ID NO: 365113 - DNA, 30 bp, Artificial Sequence
  Synthetic oligonucleotide
aatactagcttgggccggataacccgtact

SEQ ID NO: 365114 - DNA, 30 bp, Artificial Sequence
  Synthetic oligonucleotide
cgcaggtatcgtgaagctagaatgcgtact

SEQ ID NO: 365115 - DNA, 30 bp, Artificial Sequence
  Synthetic oligonucleotide
cttttcgagtccccacctagatatcgtact

SEQ ID NO: 365116 - DNA, 30 bp, Artificial Sequence
  Synthetic oligonucleotide
tgccgccctgaggtgcttggctatcgtact

SEQ ID NO: 365117 - DNA, 30 bp, Artificial Sequence
  Synthetic oligonucleotide
gcgttttggacacctttggccgttcgtact

SEQ ID NO: 365118 - DNA, 30 bp, Artificial Sequence
  Synthetic oligonucleotide
cgtaattactttttactaggagaaggtact

SEQ ID NO: 365119 - DNA, 30 bp, Artificial Sequence
  Synthetic oligonucleotide
agaaatgtcgggatttgtttaactggtact

SEQ ID NO: 365120 - DNA, 30 bp, Artificial Sequence
  Synthetic oligonucleotide
attccactgtacgagcaatatcgtggtact

SEQ ID NO: 365121 - DNA, 30 bp, Artificial Sequence
  Synthetic oligonucleotide
acggtgttatgggtaaacgtgggtggtact

SEQ ID NO: 365122 - DNA, 30 bp, Artificial Sequence
  Synthetic oligonucleotide
cagccatagcactagctccttattggtact

SEQ ID NO: 365123 - DNA, 30 bp, Artificial Sequence
  Synthetic oligonucleotide
gttgggtccgcggcacaagcggttggtact

SEQ ID NO: 365124 - DNA, 30 bp, Artificial Sequence
  Synthetic oligonucleotide
gcacgcttagatcctggcggctttggtact

SEQ ID NO: 365125 - DNA, 30 bp, Artificial Sequence
  Synthetic oligonucleotide
cactttagcgccatacgtcttgaatgtact

SEQ ID NO: 365126 - DNA, 30 bp, Artificial Sequence
  Synthetic oligonucleotide
tgcgcggattcacgctgcggcgcatgtact

SEQ ID NO: 365127 - DNA, 30 bp, Artificial Sequence
  Synthetic oligonucleotide
gcttctatcagcctgaggcacccctgtact

SEQ ID NO: 365128 - DNA, 30 bp, Artificial Sequence
  Synthetic oligonucleotide
gccgacctcaatctgattattggctgtact

SEQ ID NO: 365129 - DNA, 30 bp, Artificial Sequence
  Synthetic oligonucleotide
aaaccttcaggatcggcggttatctgtact

SEQ ID NO: 365130 - DNA, 30 bp, Artificial Sequence
  Synthetic oligonucleotide
cccctgcttgactcatgttggctttgtact

SEQ ID NO: 365131 - DNA, 30 bp, Artificial Sequence
  Synthetic oligonucleotide
aggaatctttttatttcatacaccattact

SEQ ID NO: 365132 - DNA, 30 bp, Artificial Sequence
  Synthetic oligonucleotide
gcggtaatgatcggtttgtagctcattact

SEQ ID NO: 365133 - DNA, 30 bp, Artificial Sequence
  Synthetic oligonucleotide
atataggggccaatgaagtataggattact

SEQ ID NO: 365134 - DNA, 30 bp, Artificial Sequence
  Synthetic oligonucleotide
gtgcctaaccctcaggccttgcggattact

SEQ ID NO: 365135 - DNA, 30 bp, Artificial Sequence
  Synthetic oligonucleotide
gaatatgggcatacggcacgtgggattact

SEQ ID NO: 365136 - DNA, 30 bp, Artificial Sequence
  Synthetic oligonucleotide
tggccgtgaagcctccgtttagtgattact

SEQ ID NO: 365137 - DNA, 30 bp, Artificial Sequence
  Synthetic oligonucleotide
gggccttcagtggcaagctctcgacttact

SEQ ID NO: 365138 - DNA, 30 bp, Artificial Sequence
  Synthetic oligonucleotide
cttcggagcttctaaatgatgaagcttact

SEQ ID NO: 365139 - DNA, 30 bp, Artificial Sequence
  Synthetic oligonucleotide
gtcgcttgctgaccacatttatcgcttact

SEQ ID NO: 365140 - DNA, 30 bp, Artificial Sequence
  Synthetic oligonucleotide
agttgggaggactggccggaaatgcttact

SEQ ID NO: 365141 - DNA, 30 bp, Artificial Sequence
  Synthetic oligonucleotide
gcatctatataagtgacgaaattgcttact

SEQ ID NO: 365142 - DNA, 30 bp, Artificial Sequence
  Synthetic oligonucleotide
tcttaaatatcgatgggagaaggagttact

SEQ ID NO: 365143 - DNA, 30 bp, Artificial Sequence
  Synthetic oligonucleotide
aatgatcgcatcctgagcgcagtagttact

SEQ ID NO: 365144 - DNA, 30 bp, Artificial Sequence
  Synthetic oligonucleotide
catttaatctgcccaggctcgttagttact

SEQ ID NO: 365145 - DNA, 30 bp, Artificial Sequence
  Synthetic oligonucleotide
cgaattgttgtttaaaggtggaatgttact

SEQ ID NO: 365146 - DNA, 30 bp, Artificial Sequence
  Synthetic oligonucleotide
agtacaggccggtgtacagatgctgttact

SEQ ID NO: 365147 - DNA, 30 bp, Artificial Sequence
  Synthetic oligonucleotide
ccaggcataagagtttcatttcgtgttact

SEQ ID NO: 365148 - DNA, 30 bp, Artificial Sequence
  Synthetic oligonucleotide
ggccaggaaagtcggaatagggttgttact

SEQ ID NO: 365149 - DNA, 30 bp, Artificial Sequence
  Synthetic oligonucleotide
atgggaaacctataccaataccgatttact

SEQ ID NO: 365150 - DNA, 30 bp, Artificial Sequence
  Synthetic oligonucleotide
gctcgttgcaggaggcggtgcatatttact

SEQ ID NO: 365151 - DNA, 30 bp, Artificial Sequence
  Synthetic oligonucleotide
atcagaacggtgctggggaattgctttact

SEQ ID NO: 365152 - DNA, 30 bp, Artificial Sequence
  Synthetic oligonucleotide
cattttgaacggagggtattgtattttact

SEQ ID NO: 365153 - DNA, 30 bp, Artificial Sequence
  Synthetic oligonucleotide
ctaggtagtccgcgaggctagctttttact

SEQ ID NO: 365154 - DNA, 30 bp, Artificial Sequence
  Synthetic oligonucleotide
agtaaggtgaatatgcgggacaaaaaacct

SEQ ID NO: 365155 - DNA, 30 bp, Artificial Sequence
  Synthetic oligonucleotide
acaaatgtatttccgcattagtaaaaacct

SEQ ID NO: 365156 - DNA, 30 bp, Artificial Sequence
  Synthetic oligonucleotide
atgctctgtccgacatcggcgtaaaaacct

SEQ ID NO: 365157 - DNA, 30 bp, Artificial Sequence
  Synthetic oligonucleotide
tcacggtcaaatggcgtcaacaccaaacct

SEQ ID NO: 365158 - DNA, 30 bp, Artificial Sequence
  Synthetic oligonucleotide
gtcgggttctcgggccggtgggtcaaacct

SEQ ID NO: 365159 - DNA, 30 bp, Artificial Sequence
  Synthetic oligonucleotide
tctaccgcaaaaatgtaaacagagaaacct

SEQ ID NO: 365160 - DNA, 30 bp, Artificial Sequence
  Synthetic oligonucleotide
aaccagcgcgaacttcttgccgcgaaacct

SEQ ID NO: 365161 - DNA, 30 bp, Artificial Sequence
  Synthetic oligonucleotide
tgcaaatcgaatggtagataagtgaaacct

SEQ ID NO: 365162 - DNA, 30 bp, Artificial Sequence
  Synthetic oligonucleotide
gactacaccaagcgtagtttgcaccaacct

SEQ ID NO: 365163 - DNA, 30 bp, Artificial Sequence
  Synthetic oligonucleotide
aggctccagagacttttgccataccaacct

SEQ ID NO: 365164 - DNA, 30 bp, Artificial Sequence
  Synthetic oligonucleotide
ggaacatcgggtataccagtgggccaacct

SEQ ID NO: 365165 - DNA, 30 bp, Artificial Sequence
  Synthetic oligonucleotide
tttcattgatatgactccgagtcgcaacct

SEQ ID NO: 365166 - DNA, 30 bp, Artificial Sequence
  Synthetic oligonucleotide
aagtcgtagcgtgtcagaacatggcaacct

SEQ ID NO: 365167 - DNA, 30 bp, Artificial Sequence
  Synthetic oligonucleotide
gagtatagaagtgcctagaattcagaacct

SEQ ID NO: 365168 - DNA, 30 bp, Artificial Sequence
  Synthetic oligonucleotide
accctgacttataataggcgcgacgaacct

SEQ ID NO: 365169 - DNA, 30 bp, Artificial Sequence
  Synthetic oligonucleotide
ggagtgttcttagaatcctgatacgaacct

SEQ ID NO: 365170 - DNA, 30 bp, Artificial Sequence
  Synthetic oligonucleotide
ggtgggcatcattatcaaggattcgaacct

SEQ ID NO: 365171 - DNA, 30 bp, Artificial Sequence
  Synthetic oligonucleotide
gatagtcggctgcgggcctgaaatgaacct

SEQ ID NO: 365172 - DNA, 30 bp, Artificial Sequence
  Synthetic oligonucleotide
ggctttgacccccaatggggagttgaacct

SEQ ID NO: 365173 - DNA, 30 bp, Artificial Sequence
  Synthetic oligonucleotide
gcgtcgtcgttaatactctgcagctaacct

SEQ ID NO: 365174 - DNA, 30 bp, Artificial Sequence
  Synthetic oligonucleotide
caacgtggtcaattcctttccatctaacct

SEQ ID NO: 365175 - DNA, 30 bp, Artificial Sequence
  Synthetic oligonucleotide
gaggatttagtagatgccctaaaaacacct

SEQ ID NO: 365176 - DNA, 30 bp, Artificial Sequence
  Synthetic oligonucleotide
tgcctctggaagccatggattcacacacct

SEQ ID NO: 365177 - DNA, 30 bp, Artificial Sequence
  Synthetic oligonucleotide
cctgccatatagtctgtaggctccacacct

SEQ ID NO: 365178 - DNA, 30 bp, Artificial Sequence
  Synthetic oligonucleotide
ggattagacataggggccgttgggacacct

SEQ ID NO: 365179 - DNA, 30 bp, Artificial Sequence
  Synthetic oligonucleotide
acaaaggtctctcttcagaggagtacacct

SEQ ID NO: 365180 - DNA, 30 bp, Artificial Sequence
  Synthetic oligonucleotide
cggattttccaataagttgttagtacacct

SEQ ID NO: 365181 - DNA, 30 bp, Artificial Sequence
  Synthetic oligonucleotide
aggctgaaggtcgcagttagctcaccacct

SEQ ID NO: 365182 - DNA, 30 bp, Artificial Sequence
  Synthetic oligonucleotide
cgccgctggatgactgcgaatataccacct

SEQ ID NO: 365183 - DNA, 30 bp, Artificial Sequence
  Synthetic oligonucleotide
cggttattagtgatgggtatagggccacct

SEQ ID NO: 365184 - DNA, 30 bp, Artificial Sequence
  Synthetic oligonucleotide
gggcagtcgctccagataacgcttccacct

SEQ ID NO: 365185 - DNA, 31 bp, Artificial Sequence
  Synthetic oligonucleotide
gtcgataagttgtcgcgcttgagtcgcacct

SEQ ID NO: 365186 - DNA, 30 bp, Artificial Sequence
  Synthetic oligonucleotide
catcatacctagtggtagacatatgcacct

SEQ ID NO: 365187 - DNA, 30 bp, Artificial Sequence
  Synthetic oligonucleotide
tagagtggaccaccacttcattgatcacct

SEQ ID NO: 365188 - DNA, 30 bp, Artificial Sequence
  Synthetic oligonucleotide
atgacatggcccggttacgcggaaagacct

SEQ ID NO: 365189 - DNA, 30 bp, Artificial Sequence
  Synthetic oligonucleotide
acagtagagattacaggttcctaacgacct

SEQ ID NO: 365190 - DNA, 30 bp, Artificial Sequence
  Synthetic oligonucleotide
gcgctgggcgacctgtccagcacacgacct

SEQ ID NO: 365191 - DNA, 30 bp, Artificial Sequence
  Synthetic oligonucleotide
actggcggggactaagacggtccacgacct

SEQ ID NO: 365192 - DNA, 30 bp, Artificial Sequence
  Synthetic oligonucleotide
caaatcctcggtcagtagtgagtacgacct

SEQ ID NO: 365193 - DNA, 30 bp, Artificial Sequence
  Synthetic oligonucleotide
gagatgcgatagagaagcggctttcgacct

SEQ ID NO: 365194 - DNA, 30 bp, Artificial Sequence
  Synthetic oligonucleotide
agtagccagtaacgattagggaccggacct

SEQ ID NO: 365195 - DNA, 30 bp, Artificial Sequence
  Synthetic oligonucleotide
tggcatttcttacaatgttatgccggacct

SEQ ID NO: 365196 - DNA, 30 bp, Artificial Sequence
  Synthetic oligonucleotide
gcatgcgagagagcttatgtagcgggacct

SEQ ID NO: 365197 - DNA, 30 bp, Artificial Sequence
  Synthetic oligonucleotide
taaaaatccaagaatcacagaggtggacct

SEQ ID NO: 365198 - DNA, 30 bp, Artificial Sequence
  Synthetic oligonucleotide
atggatatatccggacccacatgtggacct

SEQ ID NO: 365199 - DNA, 30 bp, Artificial Sequence
  Synthetic oligonucleotide
tctataacccgggcaaatgtataatgacct

SEQ ID NO: 365200 - DNA, 30 bp, Artificial Sequence
  Synthetic oligonucleotide
ccgcaggatcctatttataccacatgacct

SEQ ID NO: 365201 - DNA, 30 bp, Artificial Sequence
  Synthetic oligonucleotide
atcaaaaatatctaaccggttggatgacct

SEQ ID NO: 365202 - DNA, 30 bp, Artificial Sequence
  Synthetic oligonucleotide
agcatacaatgatggtagcatttctgacct

SEQ ID NO: 365203 - DNA, 30 bp, Artificial Sequence
  Synthetic oligonucleotide
ttgtgtggctccggatggcctgcgtgacct

SEQ ID NO: 365204 - DNA, 30 bp, Artificial Sequence
  Synthetic oligonucleotide
ctgggcaaaagggccgtgtaccggtgacct

SEQ ID NO: 365205 - DNA, 30 bp, Artificial Sequence
  Synthetic oligonucleotide
gcctgtcagcagatttataactgttgacct

SEQ ID NO: 365206 - DNA, 30 bp, Artificial Sequence
  Synthetic oligonucleotide
aggttgctgctacagacatacaaaatacct

SEQ ID NO: 365207 - DNA, 30 bp, Artificial Sequence
  Synthetic oligonucleotide
gcacaggtatgtaatttggtgccaatacct

SEQ ID NO: 365208 - DNA, 30 bp, Artificial Sequence
  Synthetic oligonucleotide
tgaaccttcgtcaaagggccccgcatacct

SEQ ID NO: 365209 - DNA, 30 bp, Artificial Sequence
  Synthetic oligonucleotide
gaacagggataaatctataaaccgatacct

SEQ ID NO: 365210 - DNA, 30 bp, Artificial Sequence
  Synthetic oligonucleotide
ggattcgttacaatgcaacgcgcgatacct

SEQ ID NO: 365211 - DNA, 30 bp, Artificial Sequence
  Synthetic oligonucleotide
tggaatcttgttatcttctcggcactacct

SEQ ID NO: 365212 - DNA, 30 bp, Artificial Sequence
  Synthetic oligonucleotide
tatagcttgctcggaggctacgtgctacct

SEQ ID NO: 365213 - DNA, 30 bp, Artificial Sequence
  Synthetic oligonucleotide
gagccgttcaagagtacgcgccgtctacct

SEQ ID NO: 365214 - DNA, 30 bp, Artificial Sequence
  Synthetic oligonucleotide
cctgaacgtcctttgctttgattcgtacct

SEQ ID NO: 365215 - DNA, 30 bp, Artificial Sequence
  Synthetic oligonucleotide
tctgtgccctacacatcgggggctgtacct

SEQ ID NO: 365216 - DNA, 30 bp, Artificial Sequence
  Synthetic oligonucleotide
ttaaactttgtcaactgcgtttgtgtacct

SEQ ID NO: 365217 - DNA, 30 bp, Artificial Sequence
  Synthetic oligonucleotide
gggggcgtgacgcgctatttcatattacct

SEQ ID NO: 365218 - DNA, 30 bp, Artificial Sequence
  Synthetic oligonucleotide
tgtgctcgtagagcttccccgagcttacct

SEQ ID NO: 365219 - DNA, 30 bp, Artificial Sequence
  Synthetic oligonucleotide
tagggtcacatggacgaagcatctttacct

SEQ ID NO: 365220 - DNA, 30 bp, Artificial Sequence
  Synthetic oligonucleotide
cacgactctaaagcgcccatgaaaaaccct

SEQ ID NO: 365221 - DNA, 30 bp, Artificial Sequence
  Synthetic oligonucleotide
ggagtagtcgacttatgtgcctacaaccct

SEQ ID NO: 365222 - DNA, 30 bp, Artificial Sequence
  Synthetic oligonucleotide
tgtatttatctaccgcgcagtgtcaaccct

SEQ ID NO: 365223 - DNA, 30 bp, Artificial Sequence
  Synthetic oligonucleotide
ggagatcagcgaggaacggttgataaccct

SEQ ID NO: 365224 - DNA, 30 bp, Artificial Sequence
  Synthetic oligonucleotide
ttggcagtaacagtatgcatatataaccct

SEQ ID NO: 365225 - DNA, 30 bp, Artificial Sequence
  Synthetic oligonucleotide
tcgaacatacatataaagtttactaaccct

SEQ ID NO: 365226 - DNA, 30 bp, Artificial Sequence
  Synthetic oligonucleotide
aacccccgccattgtagatcgtgtaaccct

SEQ ID NO: 365227 - DNA, 30 bp, Artificial Sequence
  Synthetic oligonucleotide
tatcaccactgcccagttgcctcacaccct

SEQ ID NO: 365228 - DNA, 30 bp, Artificial Sequence
  Synthetic oligonucleotide
aggtctagaacttcaccctccggacaccct

SEQ ID NO: 365229 - DNA, 30 bp, Artificial Sequence
  Synthetic oligonucleotide
tgccgatcgtaatattcattatgtcaccct

SEQ ID NO: 365230 - DNA, 30 bp, Artificial Sequence
  Synthetic oligonucleotide
ttatttcatggatgcctgattctagaccct

SEQ ID NO: 365231 - DNA, 30 bp, Artificial Sequence
  Synthetic oligonucleotide
gacagaatgttatgttcttttctagaccct

SEQ ID NO: 365232 - DNA, 30 bp, Artificial Sequence
  Synthetic oligonucleotide
cttcgggtccatgggatgctggtcgaccct

SEQ ID NO: 365233 - DNA, 30 bp, Artificial Sequence
  Synthetic oligonucleotide
tgggggattggggaccctgctttcgaccct

SEQ ID NO: 365234 - DNA, 30 bp, Artificial Sequence
  Synthetic oligonucleotide
aaaccggtgatacccagcgaagaggaccct

SEQ ID NO: 365235 - DNA, 30 bp, Artificial Sequence
  Synthetic oligonucleotide
tgggctcatccatacctgcccggggaccct

SEQ ID NO: 365236 - DNA, 30 bp, Artificial Sequence
  Synthetic oligonucleotide
cctgcgggcttgaagcacgggactgaccct

SEQ ID NO: 365237 - DNA, 30 bp, Artificial Sequence
  Synthetic oligonucleotide
ttcgtacataatagtaacgggccataccct

SEQ ID NO: 365238 - DNA, 30 bp, Artificial Sequence
  Synthetic oligonucleotide
aggggcggcgttaacaaacccatgtaccct

SEQ ID NO: 365239 - DNA, 30 bp, Artificial Sequence
  Synthetic oligonucleotide
tcccgattgccaagatctcgtcattaccct

SEQ ID NO: 365240 - DNA, 30 bp, Artificial Sequence
  Synthetic oligonucleotide
tagtaactgcgtgaatggactctttaccct

SEQ ID NO: 365241 - DNA, 30 bp, Artificial Sequence
  Synthetic oligonucleotide
ccatgaacgcaaccctagagggacacccct

SEQ ID NO: 365242 - DNA, 30 bp, Artificial Sequence
  Synthetic oligonucleotide
aaataacgtactacagcggttctcacccct

SEQ ID NO: 365243 - DNA, 30 bp, Artificial Sequence
  Synthetic oligonucleotide
gtcactaggacctcgaatcttatgacccct

SEQ ID NO: 365244 - DNA, 30 bp, Artificial Sequence
  Synthetic oligonucleotide
gtaaaatctatgctgccttaggtgacccct

SEQ ID NO: 365245 - DNA, 30 bp, Artificial Sequence
  Synthetic oligonucleotide
gggtcccaaagcccacgggtctatacccct

SEQ ID NO: 365246 - DNA, 30 bp, Artificial Sequence
  Synthetic oligonucleotide
aagagaatatccatctaatcgtttacccct

SEQ ID NO: 365247 - DNA, 30 bp, Artificial Sequence
  Synthetic oligonucleotide
tccagtattaagtggcagagttaaccccct

SEQ ID NO: 365248 - DNA, 30 bp, Artificial Sequence
  Synthetic oligonucleotide
tcagacagggaaggtaggactataccccct

SEQ ID NO: 365249 - DNA, 30 bp, Artificial Sequence
  Synthetic oligonucleotide
taagactcgtccctggactcaagcccccct

SEQ ID NO: 365250 - DNA, 30 bp, Artificial Sequence
  Synthetic oligonucleotide
cacaggaggtcttcggtgaagtgcccccct

SEQ ID NO: 365251 - DNA, 30 bp, Artificial Sequence
  Synthetic oligonucleotide
gaacctcacgatgtctatagtgagccccct

SEQ ID NO: 365252 - DNA, 30 bp, Artificial Sequence
  Synthetic oligonucleotide
gctggacacgagactgctgcaagagcccct

SEQ ID NO: 365253 - DNA, 30 bp, Artificial Sequence
  Synthetic oligonucleotide
cgagcgcacttcaggtccgttagcgcccct

SEQ ID NO: 365254 - DNA, 30 bp, Artificial Sequence
  Synthetic oligonucleotide
ggtcaattacagtcgtggttcctggcccct

SEQ ID NO: 365255 - DNA, 30 bp, Artificial Sequence
  Synthetic oligonucleotide
agaggaaccttccgctaaaaaccatcccct

SEQ ID NO: 365256 - DNA, 30 bp, Artificial Sequence
  Synthetic oligonucleotide
ggggcctacctccttagttggacctcccct

SEQ ID NO: 365257 - DNA, 30 bp, Artificial Sequence
  Synthetic oligonucleotide
ctcctccatagcgactgaatgtcctcccct

SEQ ID NO: 365258 - DNA, 30 bp, Artificial Sequence
  Synthetic oligonucleotide
gatcttgacaaatcacactaacgttcccct

SEQ ID NO: 365259 - DNA, 30 bp, Artificial Sequence
  Synthetic oligonucleotide
ttaaggaagaggttttactctaaaagccct

SEQ ID NO: 365260 - DNA, 30 bp, Artificial Sequence
  Synthetic oligonucleotide
tcggtcggggtcgctcgttatacaagccct

SEQ ID NO: 365261 - DNA, 30 bp, Artificial Sequence
  Synthetic oligonucleotide
cactttaagcgtcgggcgatccgaagccct

SEQ ID NO: 365262 - DNA, 30 bp, Artificial Sequence
  Synthetic oligonucleotide
gcttcagaatacctgcaagctgtaagccct

SEQ ID NO: 365263 - DNA, 30 bp, Artificial Sequence
  Synthetic oligonucleotide
ctgagtagctgagtaaataaatacagccct

SEQ ID NO: 365264 - DNA, 30 bp, Artificial Sequence
  Synthetic oligonucleotide
agggtcgatacatgatcaacacgcagccct

SEQ ID NO: 365265 - DNA, 30 bp, Artificial Sequence
  Synthetic oligonucleotide
gagcatcctctatacatacgggatagccct

SEQ ID NO: 365266 - DNA, 30 bp, Artificial Sequence
  Synthetic oligonucleotide
gtccctagcaccgtgaagaaagaacgccct

SEQ ID NO: 365267 - DNA, 30 bp, Artificial Sequence
  Synthetic oligonucleotide
tgggcatatttggtttgtacacggcgccct

SEQ ID NO: 365268 - DNA, 30 bp, Artificial Sequence
  Synthetic oligonucleotide
ttaggtcttaggagaggaacctggcgccct

SEQ ID NO: 365269 - DNA, 30 bp, Artificial Sequence
  Synthetic oligonucleotide
acccgtagctgccacgacgaacgtcgccct

SEQ ID NO: 365270 - DNA, 30 bp, Artificial Sequence
  Synthetic oligonucleotide
gatggagagaatttgtttttccgtcgccct

SEQ ID NO: 365271 - DNA, 30 bp, Artificial Sequence
  Synthetic oligonucleotide
tacaccccgccagccacaatagcaggccct

SEQ ID NO: 365272 - DNA, 30 bp, Artificial Sequence
  Synthetic oligonucleotide
atgatccatcacctataaaggtcaggccct

SEQ ID NO: 365273 - DNA, 30 bp, Artificial Sequence
  Synthetic oligonucleotide
gcaagccccttagcagactgactaggccct

SEQ ID NO: 365274 - DNA, 30 bp, Artificial Sequence
  Synthetic oligonucleotide
ttagaggactttaaactaacgttaggccct

SEQ ID NO: 365275 - DNA, 30 bp, Artificial Sequence
  Synthetic oligonucleotide
gcggaagttaacctgattccccgcggccct

SEQ ID NO: 365276 - DNA, 30 bp, Artificial Sequence
  Synthetic oligonucleotide
gatgccgggcgcccgcatcgcgtcggccct

SEQ ID NO: 365277 - DNA, 30 bp, Artificial Sequence
  Synthetic oligonucleotide
agtggcgtctgtccaggtggcaagggccct

SEQ ID NO: 365278 - DNA, 30 bp, Artificial Sequence
  Synthetic oligonucleotide
aacatggaagagtttctgaacaatggccct

SEQ ID NO: 365279 - DNA, 30 bp, Artificial Sequence
  Synthetic oligonucleotide
ttatgacttaggaagtaccggccatgccct

SEQ ID NO: 365280 - DNA, 30 bp, Artificial Sequence
  Synthetic oligonucleotide
caaggcagaccgttaccacgtgtatgccct

SEQ ID NO: 365281 - DNA, 30 bp, Artificial Sequence
  Synthetic oligonucleotide
cttggttcgtccaatgttctagagtgccct

SEQ ID NO: 365282 - DNA, 30 bp, Artificial Sequence
  Synthetic oligonucleotide
aagcccgaatcccttcatgagcggtgccct

SEQ ID NO: 365283 - DNA, 29 bp, Artificial Sequence
  Synthetic oligonucleotide
cccctctgctttctattcctttgtgccct

SEQ ID NO: 365284 - DNA, 30 bp, Artificial Sequence
  Synthetic oligonucleotide
gactggtcaatctgaatatgtagttgccct

SEQ ID NO: 365285 - DNA, 30 bp, Artificial Sequence
  Synthetic oligonucleotide
tagtcacactagcatatcgggtagatccct

SEQ ID NO: 365286 - DNA, 30 bp, Artificial Sequence
  Synthetic oligonucleotide
gactctacggcaatagcgggcgcgatccct

SEQ ID NO: 365287 - DNA, 30 bp, Artificial Sequence
  Synthetic oligonucleotide
ccatagggcatgccgtttaatcggatccct

SEQ ID NO: 365288 - DNA, 30 bp, Artificial Sequence
  Synthetic oligonucleotide
tctgatagcgcgattgaagaaagtatccct

SEQ ID NO: 365289 - DNA, 30 bp, Artificial Sequence
  Synthetic oligonucleotide
gtgctaattgtttcttgtatatcgctccct

SEQ ID NO: 365290 - DNA, 30 bp, Artificial Sequence
  Synthetic oligonucleotide
tggtttcggcagtacctcgcgcctctccct

SEQ ID NO: 365291 - DNA, 30 bp, Artificial Sequence
  Synthetic oligonucleotide
gaattaccagcttgatgcttatgtctccct

SEQ ID NO: 365292 - DNA, 30 bp, Artificial Sequence
  Synthetic oligonucleotide
ttcataatgttacaatgtggttgtctccct

SEQ ID NO: 365293 - DNA, 30 bp, Artificial Sequence
  Synthetic oligonucleotide
gcgctttacgggccccgacagtgagtccct

SEQ ID NO: 365294 - DNA, 30 bp, Artificial Sequence
  Synthetic oligonucleotide
ccgagggatggtcaagcgacgtgagtccct

SEQ ID NO: 365295 - DNA, 30 bp, Artificial Sequence
  Synthetic oligonucleotide
acatatcgccggcaacagaaccaggtccct

SEQ ID NO: 365296 - DNA, 30 bp, Artificial Sequence
  Synthetic oligonucleotide
cttgtcgatacgatacgtttgagggtccct

SEQ ID NO: 365297 - DNA, 30 bp, Artificial Sequence
  Synthetic oligonucleotide
aggcactaggtgacgattatagtggtccct

SEQ ID NO: 365298 - DNA, 30 bp, Artificial Sequence
  Synthetic oligonucleotide
gcttgtctcgatgctgtcttatctgtccct

SEQ ID NO: 365299 - DNA, 30 bp, Artificial Sequence
  Synthetic oligonucleotide
cggttagtcgaaagatctattcaattccct

SEQ ID NO: 365300 - DNA, 30 bp, Artificial Sequence
  Synthetic oligonucleotide
cgggcaataggagatccccatagattccct

SEQ ID NO: 365301 - DNA, 30 bp, Artificial Sequence
  Synthetic oligonucleotide
aggttcatctatgtatctgccctcttccct

SEQ ID NO: 365302 - DNA, 30 bp, Artificial Sequence
  Synthetic oligonucleotide
gggctttgccaggctcatggggcgttccct

SEQ ID NO: 365303 - DNA, 30 bp, Artificial Sequence
  Synthetic oligonucleotide
ataaaggagttccctcactggagaaagcct

SEQ ID NO: 365304 - DNA, 30 bp, Artificial Sequence
  Synthetic oligonucleotide
ggaaagccatatgggtacatattaaagcct

SEQ ID NO: 365305 - DNA, 30 bp, Artificial Sequence
  Synthetic oligonucleotide
attggatgtccgaacatacgttgcaagcct

SEQ ID NO: 365306 - DNA, 30 bp, Artificial Sequence
  Synthetic oligonucleotide
gcgcgctacgcgtatgaagctaagaagcct

SEQ ID NO: 365307 - DNA, 30 bp, Artificial Sequence
  Synthetic oligonucleotide
taacatgctggcaattcatcggggaagcct

SEQ ID NO: 365308 - DNA, 30 bp, Artificial Sequence
  Synthetic oligonucleotide
tgcatggccgtggggcttcccaataagcct

SEQ ID NO: 365309 - DNA, 30 bp, Artificial Sequence
  Synthetic oligonucleotide
gcttagggtagtttgatgtgggctaagcct

SEQ ID NO: 365310 - DNA, 30 bp, Artificial Sequence
  Synthetic oligonucleotide
tcggggtgtattcgcatgtacacacagcct

SEQ ID NO: 365311 - DNA, 30 bp, Artificial Sequence
  Synthetic oligonucleotide
aagaccgcggaaagcgatatgacccagcct

SEQ ID NO: 365312 - DNA, 30 bp, Artificial Sequence
  Synthetic oligonucleotide
tagagactgggcctagacacaaggcagcct

SEQ ID NO: 365313 - DNA, 30 bp, Artificial Sequence
  Synthetic oligonucleotide
gtagtcggtatcttgctagttgccgagcct

SEQ ID NO: 365314 - DNA, 30 bp, Artificial Sequence
  Synthetic oligonucleotide
tacagaatgactagagtatattccgagcct

SEQ ID NO: 365315 - DNA, 30 bp, Artificial Sequence
  Synthetic oligonucleotide
acttctggaaagaaaaaatacctggagcct

SEQ ID NO: 365316 - DNA, 30 bp, Artificial Sequence
  Synthetic oligonucleotide
gaaccgctatcaactgtgtcttatgagcct

SEQ ID NO: 365317 - DNA, 30 bp, Artificial Sequence
  Synthetic oligonucleotide
gcaaactcgtacagaagatacatctagcct

SEQ ID NO: 365318 - DNA, 30 bp, Artificial Sequence
  Synthetic oligonucleotide
taaagggtgtctaactggcatgtctagcct

SEQ ID NO: 365319 - DNA, 30 bp, Artificial Sequence
  Synthetic oligonucleotide
gcatatatctgagctgattccaagtagcct

SEQ ID NO: 365320 - DNA, 30 bp, Artificial Sequence
  Synthetic oligonucleotide
gggtaggtggagccttggcgcctgtagcct

SEQ ID NO: 365321 - DNA, 30 bp, Artificial Sequence
  Synthetic oligonucleotide
ccatttacggcaataagctaagacacgcct

SEQ ID NO: 365322 - DNA, 30 bp, Artificial Sequence
  Synthetic oligonucleotide
ctgacatagaaagaacgtcgtgacacgcct

SEQ ID NO: 365323 - DNA, 30 bp, Artificial Sequence
  Synthetic oligonucleotide
attcgtcgcgggggcgttgagaggacgcct

SEQ ID NO: 365324 - DNA, 30 bp, Artificial Sequence
  Synthetic oligonucleotide
gggcaacgtcttgccggccttaggacgcct

SEQ ID NO: 365325 - DNA, 30 bp, Artificial Sequence
  Synthetic oligonucleotide
atatgtgaagacatggaatcggggacgcct

SEQ ID NO: 365326 - DNA, 30 bp, Artificial Sequence
  Synthetic oligonucleotide
tacgaatcgtagaaaaccgacacaccgcct

SEQ ID NO: 365327 - DNA, 30 bp, Artificial Sequence
  Synthetic oligonucleotide
cctttatactgaagggaacgcttaccgcct

SEQ ID NO: 365328 - DNA, 30 bp, Artificial Sequence
  Synthetic oligonucleotide
taactattttccacccgacgtttaccgcct

SEQ ID NO: 365329 - DNA, 30 bp, Artificial Sequence
  Synthetic oligonucleotide
attaccaccgttgaaatggaggccccgcct

SEQ ID NO: 365330 - DNA, 30 bp, Artificial Sequence
  Synthetic oligonucleotide
gcaatcacgccttgcgcggcgcgcccgcct

SEQ ID NO: 365331 - DNA, 30 bp, Artificial Sequence
  Synthetic oligonucleotide
gataaggagacgtagagcacagggccgcct

SEQ ID NO: 365332 - DNA, 30 bp, Artificial Sequence
  Synthetic oligonucleotide
gtaatactggcgttgcgccgggctccgcct

SEQ ID NO: 365333 - DNA, 30 bp, Artificial Sequence
  Synthetic oligonucleotide
gtttagtgacaggtgaatcgtagtccgcct

SEQ ID NO: 365334 - DNA, 30 bp, Artificial Sequence
  Synthetic oligonucleotide
ccgtgtaatcgctttatgggcatcgcgcct

SEQ ID NO: 365335 - DNA, 30 bp, Artificial Sequence
  Synthetic oligonucleotide
ttgccccaattgagacctgactcggcgcct

SEQ ID NO: 365336 - DNA, 30 bp, Artificial Sequence
  Synthetic oligonucleotide
gagcggcctactggtcttgtagatgcgcct

SEQ ID NO: 365337 - DNA, 30 bp, Artificial Sequence
  Synthetic oligonucleotide
tgcctggacggatactagaagtatgcgcct

SEQ ID NO: 365338 - DNA, 30 bp, Artificial Sequence
  Synthetic oligonucleotide
ccttttcacgagacgacagcgtaatcgcct

SEQ ID NO: 365339 - DNA, 30 bp, Artificial Sequence
  Synthetic oligonucleotide
gtctggagaatagaaaaaggctcatcgcct

SEQ ID NO: 365340 - DNA, 30 bp, Artificial Sequence
  Synthetic oligonucleotide
gttgttaaaggcaactccgtttagtcgcct

SEQ ID NO: 365341 - DNA, 30 bp, Artificial Sequence
  Synthetic oligonucleotide
cgcccgcctatggtaagaaagctgtcgcct

SEQ ID NO: 365342 - DNA, 31 bp, Artificial Sequence
  Synthetic oligonucleotide
caggtacagtacgcctctgataccttcgcct

SEQ ID NO: 365343 - DNA, 30 bp, Artificial Sequence
  Synthetic oligonucleotide
cccacaactcttataagccgcagttcgcct

SEQ ID NO: 365344 - DNA, 30 bp, Artificial Sequence
  Synthetic oligonucleotide
cttaagtcgcttatgttgaaccgttcgcct

SEQ ID NO: 365345 - DNA, 30 bp, Artificial Sequence
  Synthetic oligonucleotide
ttgtgattacgagacgtctaacacaggcct

SEQ ID NO: 365346 - DNA, 30 bp, Artificial Sequence
  Synthetic oligonucleotide
ctatcgctccaatatgcctaactcaggcct

SEQ ID NO: 365347 - DNA, 30 bp, Artificial Sequence
  Synthetic oligonucleotide
ccttcgacgttgcgagggcaagggaggcct

SEQ ID NO: 365348 - DNA, 30 bp, Artificial Sequence
  Synthetic oligonucleotide
tagcgcgcaaaaggcgatttcgtgaggcct

SEQ ID NO: 365349 - DNA, 30 bp, Artificial Sequence
  Synthetic oligonucleotide
attgcacatacgtttgcactacctaggcct

SEQ ID NO: 365350 - DNA, 30 bp, Artificial Sequence
  Synthetic oligonucleotide
agctataatggagcggctgaccttaggcct

SEQ ID NO: 365351 - DNA, 30 bp, Artificial Sequence
  Synthetic oligonucleotide
ttttcgtgaaacgttatcggtgttaggcct

SEQ ID NO: 365352 - DNA, 30 bp, Artificial Sequence
  Synthetic oligonucleotide
ataggtgatggagtattcaatccacggcct

SEQ ID NO: 365353 - DNA, 31 bp, Artificial Sequence
  Synthetic oligonucleotide
caatagctcagggagtagagaattacggcct

SEQ ID NO: 365354 - DNA, 30 bp, Artificial Sequence
  Synthetic oligonucleotide
ggaaactccaccgcgagccccgaccggcct

SEQ ID NO: 365355 - DNA, 30 bp, Artificial Sequence
  Synthetic oligonucleotide
gcacttcattcaatcgagcgtaagcggcct

SEQ ID NO: 365356 - DNA, 30 bp, Artificial Sequence
  Synthetic oligonucleotide
atgtgataagtactgacatgaccgcggcct

SEQ ID NO: 365357 - DNA, 30 bp, Artificial Sequence
  Synthetic oligonucleotide
gcggtcgtcggattggatatttggcggcct

SEQ ID NO: 365358 - DNA, 30 bp, Artificial Sequence
  Synthetic oligonucleotide
gtaactgaaggcagaacagcataagggcct

SEQ ID NO: 365359 - DNA, 30 bp, Artificial Sequence
  Synthetic oligonucleotide
acttcctcagctaacagcagatcggggcct

SEQ ID NO: 365360 - DNA, 30 bp, Artificial Sequence
  Synthetic oligonucleotide
agagggttaataactcatagagaatggcct

SEQ ID NO: 365361 - DNA, 30 bp, Artificial Sequence
  Synthetic oligonucleotide
agaatcagataagatcgcgtaacatggcct

SEQ ID NO: 365362 - DNA, 30 bp, Artificial Sequence
  Synthetic oligonucleotide
actgtacagtgatttcgagtcacatggcct

SEQ ID NO: 365363 - DNA, 30 bp, Artificial Sequence
  Synthetic oligonucleotide
tggtgaagccaggtgtcccgcaactggcct

SEQ ID NO: 365364 - DNA, 30 bp, Artificial Sequence
  Synthetic oligonucleotide
cactcctacaccgggtgtgtcccaatgcct

SEQ ID NO: 365365 - DNA, 30 bp, Artificial Sequence
  Synthetic oligonucleotide
cgtaatgttatatgcaatcgcgtaatgcct

SEQ ID NO: 365366 - DNA, 30 bp, Artificial Sequence
  Synthetic oligonucleotide
ataagcaccgtccggtggatcatgatgcct

SEQ ID NO: 365367 - DNA, 30 bp, Artificial Sequence
  Synthetic oligonucleotide
tggtcgccagagcatctttacgtgatgcct

SEQ ID NO: 365368 - DNA, 30 bp, Artificial Sequence
  Synthetic oligonucleotide
actcggaggggtttgaaccatgtgatgcct

SEQ ID NO: 365369 - DNA, 30 bp, Artificial Sequence
  Synthetic oligonucleotide
gctttaggactaacgaagcgggtactgcct

SEQ ID NO: 365370 - DNA, 30 bp, Artificial Sequence
  Synthetic oligonucleotide
tcgagggagcagcaggaaaattacctgcct

SEQ ID NO: 365371 - DNA, 30 bp, Artificial Sequence
  Synthetic oligonucleotide
acaggttctcgctgctaatgcaagctgcct

SEQ ID NO: 365372 - DNA, 30 bp, Artificial Sequence
  Synthetic oligonucleotide
ttatcataacgaacgatcttctagctgcct

SEQ ID NO: 365373 - DNA, 30 bp, Artificial Sequence
  Synthetic oligonucleotide
agcgatactgacatccggaccgggctgcct

SEQ ID NO: 365374 - DNA, 30 bp, Artificial Sequence
  Synthetic oligonucleotide
atgatatcggacacacgcgcattgctgcct

SEQ ID NO: 365375 - DNA, 30 bp, Artificial Sequence
  Synthetic oligonucleotide
atagatgaaaacatctgatagtaagtgcct

SEQ ID NO: 365376 - DNA, 30 bp, Artificial Sequence
  Synthetic oligonucleotide
gaatgcggtgcgcactgtgcaggagtgcct

SEQ ID NO: 365377 - DNA, 30 bp, Artificial Sequence
  Synthetic oligonucleotide
ttaataggcgaactagcggcataattgcct

SEQ ID NO: 365378 - DNA, 30 bp, Artificial Sequence
  Synthetic oligonucleotide
caggagccggtccagaccgagcacttgcct

SEQ ID NO: 365379 - DNA, 30 bp, Artificial Sequence
  Synthetic oligonucleotide
agtatatcgttgggcactctgaagttgcct

SEQ ID NO: 365380 - DNA, 30 bp, Artificial Sequence
  Synthetic oligonucleotide
ggtaagaaacaaggctaacctaagttgcct

SEQ ID NO: 365381 - DNA, 30 bp, Artificial Sequence
  Synthetic oligonucleotide
cccgttccttataacttttttatgttgcct

SEQ ID NO: 365382 - DNA, 30 bp, Artificial Sequence
  Synthetic oligonucleotide
agccagtcgaccacttactccacaaatcct

SEQ ID NO: 365383 - DNA, 30 bp, Artificial Sequence
  Synthetic oligonucleotide
ggataaataagcggctacgttataaatcct

SEQ ID NO: 365384 - DNA, 31 bp, Artificial Sequence
  Synthetic oligonucleotide
ttgcctggaactaaatacatcgggcaatcct

SEQ ID NO: 365385 - DNA, 30 bp, Artificial Sequence
  Synthetic oligonucleotide
cgcagcgaccatgcaaaaagggagaatcct

SEQ ID NO: 365386 - DNA, 30 bp, Artificial Sequence
  Synthetic oligonucleotide
aagattgttatcattggtacgtggaatcct

SEQ ID NO: 365387 - DNA, 30 bp, Artificial Sequence
  Synthetic oligonucleotide
agtgcaactccaaacatactatgccatcct

SEQ ID NO: 365388 - DNA, 30 bp, Artificial Sequence
  Synthetic oligonucleotide
taattggtgctgactctgctaactcatcct

SEQ ID NO: 365389 - DNA, 30 bp, Artificial Sequence
  Synthetic oligonucleotide
ctcagaaaggtgagggtagcaattcatcct

SEQ ID NO: 365390 - DNA, 30 bp, Artificial Sequence
  Synthetic oligonucleotide
ccaatatagactctactggggattcatcct

SEQ ID NO: 365391 - DNA, 30 bp, Artificial Sequence
  Synthetic oligonucleotide
attagtaaagtacatgatctgtaagatcct

SEQ ID NO: 365392 - DNA, 30 bp, Artificial Sequence
  Synthetic oligonucleotide
cctccgtttatctttgctataatagatcct

SEQ ID NO: 365393 - DNA, 30 bp, Artificial Sequence
  Synthetic oligonucleotide
ggggttccagaggtcggggtgttagatcct

SEQ ID NO: 365394 - DNA, 30 bp, Artificial Sequence
  Synthetic oligonucleotide
cttgaccttcctcaggtaatggacgatcct

SEQ ID NO: 365395 - DNA, 30 bp, Artificial Sequence
  Synthetic oligonucleotide
cggttacgacagcagtcatgggtcgatcct

SEQ ID NO: 365396 - DNA, 30 bp, Artificial Sequence
  Synthetic oligonucleotide
ctgtagggcagttggtaatcctaggatcct

SEQ ID NO: 365397 - DNA, 30 bp, Artificial Sequence
  Synthetic oligonucleotide
ggagttcctctaaatgagatcagtgatcct

SEQ ID NO: 365398 - DNA, 30 bp, Artificial Sequence
  Synthetic oligonucleotide
tattccacggctgtagcgtaaggtgatcct

SEQ ID NO: 365399 - DNA, 30 bp, Artificial Sequence
  Synthetic oligonucleotide
ggggagctaacctgacctcagcaatatcct

SEQ ID NO: 365400 - DNA, 30 bp, Artificial Sequence
  Synthetic oligonucleotide
taacatcggctactcattccctaatatcct

SEQ ID NO: 365401 - DNA, 30 bp, Artificial Sequence
  Synthetic oligonucleotide
agaaagtcagcgcggagttttagatatcct

SEQ ID NO: 365402 - DNA, 31 bp, Artificial Sequence
  Synthetic oligonucleotide
taaggtggaccaatgggttcgctactatcct

SEQ ID NO: 365403 - DNA, 30 bp, Artificial Sequence
  Synthetic oligonucleotide
aatcgcaatccgcgctaatcacgctatcct

SEQ ID NO: 365404 - DNA, 30 bp, Artificial Sequence
  Synthetic oligonucleotide
gatgtttgtttccaaattagcggctatcct

SEQ ID NO: 365405 - DNA, 30 bp, Artificial Sequence
  Synthetic oligonucleotide
cggtcttgttgtccagtgattccgtatcct

SEQ ID NO: 365406 - DNA, 30 bp, Artificial Sequence
  Synthetic oligonucleotide
tagagtgggtgtcaagcttttagaactcct

SEQ ID NO: 365407 - DNA, 30 bp, Artificial Sequence
  Synthetic oligonucleotide
gagatataccaccgtcggaaccagactcct

SEQ ID NO: 365408 - DNA, 30 bp, Artificial Sequence
  Synthetic oligonucleotide
ctgtacagcttctatcttcggatgactcct

SEQ ID NO: 365409 - DNA, 30 bp, Artificial Sequence
  Synthetic oligonucleotide
ccgcaagaagatatttgtcttcttactcct

SEQ ID NO: 365410 - DNA, 30 bp, Artificial Sequence
  Synthetic oligonucleotide
aatgattcccacggatctgcaacacctcct

SEQ ID NO: 365411 - DNA, 30 bp, Artificial Sequence
  Synthetic oligonucleotide
aattaaacaccacggatgcgagaccctcct

SEQ ID NO: 365412 - DNA, 30 bp, Artificial Sequence
  Synthetic oligonucleotide
actctaacaaggtccattgagaagcctcct

SEQ ID NO: 365413 - DNA, 30 bp, Artificial Sequence
  Synthetic oligonucleotide
gaagtgccaatgcaccctctgactcctcct

SEQ ID NO: 365414 - DNA, 30 bp, Artificial Sequence
  Synthetic oligonucleotide
tggtctttgtactatgatagatctcctcct

SEQ ID NO: 365415 - DNA, 30 bp, Artificial Sequence
  Synthetic oligonucleotide
ggtccccaattatcggtctttcaagctcct

SEQ ID NO: 365416 - DNA, 30 bp, Artificial Sequence
  Synthetic oligonucleotide
caaggacgttctcacatgcttagcgctcct

SEQ ID NO: 365417 - DNA, 30 bp, Artificial Sequence
  Synthetic oligonucleotide
aatatgagtgacatcacatgatgcgctcct

SEQ ID NO: 365418 - DNA, 30 bp, Artificial Sequence
  Synthetic oligonucleotide
gggtccgcagggaacaggctctgtgctcct

SEQ ID NO: 365419 - DNA, 30 bp, Artificial Sequence
  Synthetic oligonucleotide
ttcaccagacattcgtgaatgtgtgctcct

SEQ ID NO: 365420 - DNA, 30 bp, Artificial Sequence
  Synthetic oligonucleotide
tcgggtgaggaatacaagttgcttgctcct

SEQ ID NO: 365421 - DNA, 30 bp, Artificial Sequence
  Synthetic oligonucleotide
ttgacatcttggctaattaaagttgctcct

SEQ ID NO: 365422 - DNA, 30 bp, Artificial Sequence
  Synthetic oligonucleotide
ggtgacgggcgagtgcactccaactctcct

SEQ ID NO: 365423 - DNA, 30 bp, Artificial Sequence
  Synthetic oligonucleotide
gcggaggaaaatctttcgccaacctctcct

SEQ ID NO: 365424 - DNA, 30 bp, Artificial Sequence
  Synthetic oligonucleotide
cccaacttaactagaacagcggtgtctcct

SEQ ID NO: 365425 - DNA, 30 bp, Artificial Sequence
  Synthetic oligonucleotide
tactggcggcttccgcctcagaaaagtcct

SEQ ID NO: 365426 - DNA, 30 bp, Artificial Sequence
  Synthetic oligonucleotide
gggagccttttcaagataaatactagtcct

SEQ ID NO: 365427 - DNA, 30 bp, Artificial Sequence
  Synthetic oligonucleotide
cgtgagcagcttttctttctttctagtcct

SEQ ID NO: 365428 - DNA, 30 bp, Artificial Sequence
  Synthetic oligonucleotide
tggtggtctggccattctgatcgtagtcct

SEQ ID NO: 365429 - DNA, 30 bp, Artificial Sequence
  Synthetic oligonucleotide
atgggtggagagctttgccacttacgtcct

SEQ ID NO: 365430 - DNA, 30 bp, Artificial Sequence
  Synthetic oligonucleotide
accgctaccataacggttgataagcgtcct

SEQ ID NO: 365431 - DNA, 30 bp, Artificial Sequence
  Synthetic oligonucleotide
ggtacccgctatctgcccaagcggcgtcct

SEQ ID NO: 365432 - DNA, 30 bp, Artificial Sequence
  Synthetic oligonucleotide
tcctactcccgcgaaatagcgcacggtcct

SEQ ID NO: 365433 - DNA, 30 bp, Artificial Sequence
  Synthetic oligonucleotide
tctagagctggtaactttatgtacggtcct

SEQ ID NO: 365434 - DNA, 30 bp, Artificial Sequence
  Synthetic oligonucleotide
agacgttgtgatcgcggggtttgcggtcct

SEQ ID NO: 365435 - DNA, 30 bp, Artificial Sequence
  Synthetic oligonucleotide
tagcaactacaacacgcgtgcaggggtcct

SEQ ID NO: 365436 - DNA, 30 bp, Artificial Sequence
  Synthetic oligonucleotide
tgtaagaccagaaaagacactcggggtcct

SEQ ID NO: 365437 - DNA, 30 bp, Artificial Sequence
  Synthetic oligonucleotide
cggcgtttgtgatgatacgggaatggtcct

SEQ ID NO: 365438 - DNA, 30 bp, Artificial Sequence
  Synthetic oligonucleotide
tcttgagtgtcgcacgggggatcctgtcct

SEQ ID NO: 365439 - DNA, 30 bp, Artificial Sequence
  Synthetic oligonucleotide
atgacctattacatccctgtaatctgtcct

SEQ ID NO: 365440 - DNA, 30 bp, Artificial Sequence
  Synthetic oligonucleotide
cgaaatagccaccagcaccacccgtgtcct

SEQ ID NO: 365441 - DNA, 30 bp, Artificial Sequence
  Synthetic oligonucleotide
ttcattcaatcttagtgccctgcgtgtcct

SEQ ID NO: 365442 - DNA, 30 bp, Artificial Sequence
  Synthetic oligonucleotide
caaaaaaatgaatgttcggaaagttgtcct

SEQ ID NO: 365443 - DNA, 30 bp, Artificial Sequence
  Synthetic oligonucleotide
tgctccggcgtctgctgtttcaaaattcct

SEQ ID NO: 365444 - DNA, 30 bp, Artificial Sequence
  Synthetic oligonucleotide
taaaccacctggttctttgcgggaattcct

SEQ ID NO: 365445 - DNA, 30 bp, Artificial Sequence
  Synthetic oligonucleotide
ggacttctcgattcatcaatatacattcct

SEQ ID NO: 365446 - DNA, 30 bp, Artificial Sequence
  Synthetic oligonucleotide
gtggtgtccttccttacagcgcgcattcct

SEQ ID NO: 365447 - DNA, 30 bp, Artificial Sequence
  Synthetic oligonucleotide
aaatacagtgtcaggatagatcgcattcct

SEQ ID NO: 365448 - DNA, 30 bp, Artificial Sequence
  Synthetic oligonucleotide
tatcctacacgattcagtggccctattcct

SEQ ID NO: 365449 - DNA, 30 bp, Artificial Sequence
  Synthetic oligonucleotide
tactaattgtcgtttcctttgtgtattcct

SEQ ID NO: 365450 - DNA, 30 bp, Artificial Sequence
  Synthetic oligonucleotide
taagtgaaaaaaggccggcccacacttcct

SEQ ID NO: 365451 - DNA, 30 bp, Artificial Sequence
  Synthetic oligonucleotide
atgatcggcttgtacatgcggccacttcct

SEQ ID NO: 365452 - DNA, 30 bp, Artificial Sequence
  Synthetic oligonucleotide
agagacggacaagtcgtcacgttccttcct

SEQ ID NO: 365453 - DNA, 30 bp, Artificial Sequence
  Synthetic oligonucleotide
gagatgggtcgaataagtctttagcttcct

SEQ ID NO: 365454 - DNA, 30 bp, Artificial Sequence
  Synthetic oligonucleotide
aggggttccttgcgtgtgaagccgcttcct

SEQ ID NO: 365455 - DNA, 30 bp, Artificial Sequence
  Synthetic oligonucleotide
ttttgcgatgacactatacagccgcttcct

SEQ ID NO: 365456 - DNA, 30 bp, Artificial Sequence
  Synthetic oligonucleotide
ggcggggtttttacctggagaaggcttcct

SEQ ID NO: 365457 - DNA, 30 bp, Artificial Sequence
  Synthetic oligonucleotide
ttacgtggggtctaccgccccccagttcct

SEQ ID NO: 365458 - DNA, 30 bp, Artificial Sequence
  Synthetic oligonucleotide
gcacgccttcgagcgaagctaatagttcct

SEQ ID NO: 365459 - DNA, 30 bp, Artificial Sequence
  Synthetic oligonucleotide
cggccggcacgtcaggagcacaccgttcct

SEQ ID NO: 365460 - DNA, 30 bp, Artificial Sequence
  Synthetic oligonucleotide
atcagtcgcaatccacacttgttggttcct

SEQ ID NO: 365461 - DNA, 30 bp, Artificial Sequence
  Synthetic oligonucleotide
gactatagcgcctaggcagccaatgttcct

SEQ ID NO: 365462 - DNA, 30 bp, Artificial Sequence
  Synthetic oligonucleotide
cagctgcgacctgtgtgcgaactatttcct

SEQ ID NO: 365463 - DNA, 30 bp, Artificial Sequence
  Synthetic oligonucleotide
agcggcccctgcttaagcgtaaactttcct

SEQ ID NO: 365464 - DNA, 30 bp, Artificial Sequence
  Synthetic oligonucleotide
ttagcctagtagagaaataaggtctttcct

SEQ ID NO: 365465 - DNA, 30 bp, Artificial Sequence
  Synthetic oligonucleotide
acaaggactaaacgtacccgtaggtttcct

SEQ ID NO: 365466 - DNA, 30 bp, Artificial Sequence
  Synthetic oligonucleotide
actagtatactttaatcacaccaaaaagct

SEQ ID NO: 365467 - DNA, 30 bp, Artificial Sequence
  Synthetic oligonucleotide
aggtccgcatgctggtttttaataaaagct

SEQ ID NO: 365468 - DNA, 30 bp, Artificial Sequence
  Synthetic oligonucleotide
tagaacttgctcaagaccaatataaaagct

SEQ ID NO: 365469 - DNA, 30 bp, Artificial Sequence
  Synthetic oligonucleotide
gagatctcagattcgcgcgttataaaagct

SEQ ID NO: 365470 - DNA, 30 bp, Artificial Sequence
  Synthetic oligonucleotide
cataatgacttgtcatggcttctaaaagct

SEQ ID NO: 365471 - DNA, 30 bp, Artificial Sequence
  Synthetic oligonucleotide
acaagattattgattagaaaagtaaaagct

SEQ ID NO: 365472 - DNA, 30 bp, Artificial Sequence
  Synthetic oligonucleotide
atgctcacgtacttccttacaaagaaagct

SEQ ID NO: 365473 - DNA, 30 bp, Artificial Sequence
  Synthetic oligonucleotide
ttagtgcggccacagtatgttgggaaagct

SEQ ID NO: 365474 - DNA, 30 bp, Artificial Sequence
  Synthetic oligonucleotide
gagatgtcagggattttaaaagataaagct

SEQ ID NO: 365475 - DNA, 30 bp, Artificial Sequence
  Synthetic oligonucleotide
atcctgactaaccgcaacgaagctaaagct

SEQ ID NO: 365476 - DNA, 30 bp, Artificial Sequence
  Synthetic oligonucleotide
cttcgcagcggtgtggaaatatctaaagct

SEQ ID NO: 365477 - DNA, 30 bp, Artificial Sequence
  Synthetic oligonucleotide
tgttgatgttgggccccatatggtaaagct

SEQ ID NO: 365478 - DNA, 30 bp, Artificial Sequence
  Synthetic oligonucleotide
tgagtacagcagatattgtaatcacaagct

SEQ ID NO: 365479 - DNA, 30 bp, Artificial Sequence
  Synthetic oligonucleotide
tatcgtcccgacccagaagatttccaagct

SEQ ID NO: 365480 - DNA, 30 bp, Artificial Sequence
  Synthetic oligonucleotide
gagtcaactggcctgacaatgcaagaagct

SEQ ID NO: 365481 - DNA, 30 bp, Artificial Sequence
  Synthetic oligonucleotide
tttaagtgtcaaaacggttcatgcgaagct

SEQ ID NO: 365482 - DNA, 30 bp, Artificial Sequence
  Synthetic oligonucleotide
cgcatacaagccaactgcggatgcgaagct

SEQ ID NO: 365483 - DNA, 30 bp, Artificial Sequence
  Synthetic oligonucleotide
gaccaggcggaatggttaggggaggaagct

SEQ ID NO: 365484 - DNA, 30 bp, Artificial Sequence
  Synthetic oligonucleotide
ccggactcagcgatatctgttgaataagct

SEQ ID NO: 365485 - DNA, 30 bp, Artificial Sequence
  Synthetic oligonucleotide
gactgaaccgttatgttactatgataagct

SEQ ID NO: 365486 - DNA, 30 bp, Artificial Sequence
  Synthetic oligonucleotide
aggagtacagatgcgactcagtactaagct

SEQ ID NO: 365487 - DNA, 30 bp, Artificial Sequence
  Synthetic oligonucleotide
ggagtgttttggctatgccaacggtaagct

SEQ ID NO: 365488 - DNA, 30 bp, Artificial Sequence
  Synthetic oligonucleotide
gcttaaataaaatcatctacttattaagct

SEQ ID NO: 365489 - DNA, 30 bp, Artificial Sequence
  Synthetic oligonucleotide
aggagatgctgtgtatctggaacaacagct

SEQ ID NO: 365490 - DNA, 30 bp, Artificial Sequence
  Synthetic oligonucleotide
gcactctgtacatttgtacaagcaacagct

SEQ ID NO: 365491 - DNA, 30 bp, Artificial Sequence
  Synthetic oligonucleotide
taggcaagcatcgtatcagaatgaacagct

SEQ ID NO: 365492 - DNA, 30 bp, Artificial Sequence
  Synthetic oligonucleotide
ttacttcatcaaggccaggtatgaacagct

SEQ ID NO: 365493 - DNA, 30 bp, Artificial Sequence
  Synthetic oligonucleotide
tttcggatcgggtgtcttgccatcacagct

SEQ ID NO: 365494 - DNA, 30 bp, Artificial Sequence
  Synthetic oligonucleotide
aagcagatattcgatgtgaaggtcacagct

SEQ ID NO: 365495 - DNA, 30 bp, Artificial Sequence
  Synthetic oligonucleotide
gacggattctgaatactccttcggacagct

SEQ ID NO: 365496 - DNA, 30 bp, Artificial Sequence
  Synthetic oligonucleotide
ctctgtccctgacttaccaatcaaccagct

SEQ ID NO: 365497 - DNA, 30 bp, Artificial Sequence
  Synthetic oligonucleotide
ggtaagttatcggtacagcaattaccagct

SEQ ID NO: 365498 - DNA, 30 bp, Artificial Sequence
  Synthetic oligonucleotide
aaatgtaaatagtgggatcctttaccagct

SEQ ID NO: 365499 - DNA, 30 bp, Artificial Sequence
  Synthetic oligonucleotide
tctaatattaagccctcgagttccccagct

SEQ ID NO: 365500 - DNA, 30 bp, Artificial Sequence
  Synthetic oligonucleotide
cggtcggtttccgtctgaatctgcccagct

SEQ ID NO: 365501 - DNA, 30 bp, Artificial Sequence
  Synthetic oligonucleotide
gggccaccaaagaaaatatcagcgccagct

SEQ ID NO: 365502 - DNA, 30 bp, Artificial Sequence
  Synthetic oligonucleotide
ttagactggctgttataacacaggccagct

SEQ ID NO: 365503 - DNA, 30 bp, Artificial Sequence
  Synthetic oligonucleotide
cagcgaacctgacaacaatgtcccgcagct

SEQ ID NO: 365504 - DNA, 30 bp, Artificial Sequence
  Synthetic oligonucleotide
gaagctctgacgaaagtgttgtccgcagct

SEQ ID NO: 365505 - DNA, 30 bp, Artificial Sequence
  Synthetic oligonucleotide
ccgcccggccctaagccggaaacggcagct

SEQ ID NO: 365506 - DNA, 30 bp, Artificial Sequence
  Synthetic oligonucleotide
gaacatctattaggtcgatacagggcagct

SEQ ID NO: 365507 - DNA, 30 bp, Artificial Sequence
  Synthetic oligonucleotide
gaattgtggtgtctttatggcagggcagct

SEQ ID NO: 365508 - DNA, 30 bp, Artificial Sequence
  Synthetic oligonucleotide
cccagctctcgtagcatggagtgggcagct

SEQ ID NO: 365509 - DNA, 30 bp, Artificial Sequence
  Synthetic oligonucleotide
gagataactccgcacgcccgtagtgcagct

SEQ ID NO: 365510 - DNA, 30 bp, Artificial Sequence
  Synthetic oligonucleotide
tgagcatcgtggtgttcgtgaccatcagct

SEQ ID NO: 365511 - DNA, 30 bp, Artificial Sequence
  Synthetic oligonucleotide
aactgttaacggtcgctcggactatcagct

SEQ ID NO: 365512 - DNA, 30 bp, Artificial Sequence
  Synthetic oligonucleotide
tttgtcaaatgtcttgagactgtctcagct

SEQ ID NO: 365513 - DNA, 30 bp, Artificial Sequence
  Synthetic oligonucleotide
ccatatcttttcaatgatcaatgttcagct

SEQ ID NO: 365514 - DNA, 30 bp, Artificial Sequence
  Synthetic oligonucleotide
tgttactgcgggtcggtgtaagacagagct

SEQ ID NO: 365515 - DNA, 30 bp, Artificial Sequence
  Synthetic oligonucleotide
gcaaacacgggggacctatcttcgagagct

SEQ ID NO: 365516 - DNA, 30 bp, Artificial Sequence
  Synthetic oligonucleotide
cgctgccttacacgctttctaaatagagct

SEQ ID NO: 365517 - DNA, 30 bp, Artificial Sequence
  Synthetic oligonucleotide
gacagcgcctgcagttggtcatgtagagct

SEQ ID NO: 365518 - DNA, 30 bp, Artificial Sequence
  Synthetic oligonucleotide
gagtaagctggcggtccatcctgtagagct

SEQ ID NO: 365519 - DNA, 30 bp, Artificial Sequence
  Synthetic oligonucleotide
tccccggaattccgtagttgggcacgagct

SEQ ID NO: 365520 - DNA, 30 bp, Artificial Sequence
  Synthetic oligonucleotide
agcctacatcttccaggtgcattacgagct

SEQ ID NO: 365521 - DNA, 30 bp, Artificial Sequence
  Synthetic oligonucleotide
gggtcataaaaattccggatacggcgagct

SEQ ID NO: 365522 - DNA, 29 bp, Artificial Sequence
  Synthetic oligonucleotide
gtaggtcattgtaattaggatgtcgagct

SEQ ID NO: 365523 - DNA, 30 bp, Artificial Sequence
  Synthetic oligonucleotide
agatagggtgtcgtttttgactaaggagct

SEQ ID NO: 365524 - DNA, 30 bp, Artificial Sequence
  Synthetic oligonucleotide
agacatttcttggagaccccgtgcggagct

SEQ ID NO: 365525 - DNA, 30 bp, Artificial Sequence
  Synthetic oligonucleotide
gcttccgaacggccattggcagatggagct

SEQ ID NO: 365526 - DNA, 30 bp, Artificial Sequence
  Synthetic oligonucleotide
acataatagtttcggacgggctatggagct

SEQ ID NO: 365527 - DNA, 30 bp, Artificial Sequence
  Synthetic oligonucleotide
cactgttgctaaaaatttagcggtggagct

SEQ ID NO: 365528 - DNA, 30 bp, Artificial Sequence
  Synthetic oligonucleotide
ttctaattacgcgtagacgttattggagct

SEQ ID NO: 365529 - DNA, 30 bp, Artificial Sequence
  Synthetic oligonucleotide
cagacatcttaattcagtttcccctgagct

SEQ ID NO: 365530 - DNA, 30 bp, Artificial Sequence
  Synthetic oligonucleotide
gactcaatgcgtggtcggcggcgctgagct

SEQ ID NO: 365531 - DNA, 30 bp, Artificial Sequence
  Synthetic oligonucleotide
aacctaggcagacggtttaggacgtgagct

SEQ ID NO: 365532 - DNA, 30 bp, Artificial Sequence
  Synthetic oligonucleotide
gcaatcgcaataaggcattccagttgagct

SEQ ID NO: 365533 - DNA, 30 bp, Artificial Sequence
  Synthetic oligonucleotide
aaagatttgcaaaagaggcgaatttgagct

SEQ ID NO: 365534 - DNA, 30 bp, Artificial Sequence
  Synthetic oligonucleotide
aggatctcttccctggccgcttggatagct

SEQ ID NO: 365535 - DNA, 30 bp, Artificial Sequence
  Synthetic oligonucleotide
ataatgataagcatgactgagggactagct

SEQ ID NO: 365536 - DNA, 30 bp, Artificial Sequence
  Synthetic oligonucleotide
gcggcattatttaagctggaagggctagct

SEQ ID NO: 365537 - DNA, 30 bp, Artificial Sequence
  Synthetic oligonucleotide
ttactaagaaatacgaggtggtggctagct

SEQ ID NO: 365538 - DNA, 30 bp, Artificial Sequence
  Synthetic oligonucleotide
ttcagctaattattgaataatttgctagct

SEQ ID NO: 365539 - DNA, 30 bp, Artificial Sequence
  Synthetic oligonucleotide
tttagaatctttgagtcattttctctagct

SEQ ID NO: 365540 - DNA, 30 bp, Artificial Sequence
  Synthetic oligonucleotide
tttgccagtagtaaccaaatttaagtagct

SEQ ID NO: 365541 - DNA, 30 bp, Artificial Sequence
  Synthetic oligonucleotide
gcggaagtagtaatacgacctctagtagct

SEQ ID NO: 365542 - DNA, 30 bp, Artificial Sequence
  Synthetic oligonucleotide
gtgcaggtgcgctcaccagcggacgtagct

SEQ ID NO: 365543 - DNA, 30 bp, Artificial Sequence
  Synthetic oligonucleotide
gagctattgagctaaagcattagcgtagct

SEQ ID NO: 365544 - DNA, 30 bp, Artificial Sequence
  Synthetic oligonucleotide
gaggcgctacaggatcggagagcggtagct

SEQ ID NO: 365545 - DNA, 30 bp, Artificial Sequence
  Synthetic oligonucleotide
agtattgcattgactttgactcgggtagct

SEQ ID NO: 365546 - DNA, 30 bp, Artificial Sequence
  Synthetic oligonucleotide
gatgcagacacgcctcaatttgcattagct

SEQ ID NO: 365547 - DNA, 30 bp, Artificial Sequence
  Synthetic oligonucleotide
aaagtgtcattcacggatttgtgattagct

SEQ ID NO: 365548 - DNA, 30 bp, Artificial Sequence
  Synthetic oligonucleotide
aatgaaggacgctgttttcgggtattagct

SEQ ID NO: 365549 - DNA, 30 bp, Artificial Sequence
  Synthetic oligonucleotide
ggcagcagccgtgaccgttccaacttagct

SEQ ID NO: 365550 - DNA, 30 bp, Artificial Sequence
  Synthetic oligonucleotide
accgctttgtccatcgggcgaggcttagct

SEQ ID NO: 365551 - DNA, 30 bp, Artificial Sequence
  Synthetic oligonucleotide
ggtatcgcgctagaatgttactcgttagct

SEQ ID NO: 365552 - DNA, 31 bp, Artificial Sequence
  Synthetic oligonucleotide
ggagatccttataccgaaaacgcggttagct

SEQ ID NO: 365553 - DNA, 30 bp, Artificial Sequence
  Synthetic oligonucleotide
acattgtgtaaaggaaataaatctttagct

SEQ ID NO: 365554 - DNA, 30 bp, Artificial Sequence
  Synthetic oligonucleotide
tcgctctgttctagaagacggagtttagct

SEQ ID NO: 365555 - DNA, 30 bp, Artificial Sequence
  Synthetic oligonucleotide
taacggggaacgcagatgcacaagaacgct

SEQ ID NO: 365556 - DNA, 30 bp, Artificial Sequence
  Synthetic oligonucleotide
tcgtataccttattaacatggaagaacgct

SEQ ID NO: 365557 - DNA, 30 bp, Artificial Sequence
  Synthetic oligonucleotide
gtcgtgacagtgccatcccgttagaacgct

SEQ ID NO: 365558 - DNA, 30 bp, Artificial Sequence
  Synthetic oligonucleotide
gcgggttatctcacaagagtggcgaacgct

SEQ ID NO: 365559 - DNA, 30 bp, Artificial Sequence
  Synthetic oligonucleotide
agctcaagatgcctagattaatcgaacgct

SEQ ID NO: 365560 - DNA, 30 bp, Artificial Sequence
  Synthetic oligonucleotide
tcgtcgggagtttatgcccatgggaacgct

SEQ ID NO: 365561 - DNA, 30 bp, Artificial Sequence
  Synthetic oligonucleotide
gactcaggtaatagtacgattttgaacgct

SEQ ID NO: 365562 - DNA, 30 bp, Artificial Sequence
  Synthetic oligonucleotide
actttcgtatctcttgaaaacaaccacgct

SEQ ID NO: 365563 - DNA, 30 bp, Artificial Sequence
  Synthetic oligonucleotide
tgttacatctatgactaagcgcaccacgct

SEQ ID NO: 365564 - DNA, 30 bp, Artificial Sequence
  Synthetic oligonucleotide
gacaaagggaacgtacttaatcagcacgct

SEQ ID NO: 365565 - DNA, 30 bp, Artificial Sequence
  Synthetic oligonucleotide
acactaagcttgggaaatgaggttcacgct

SEQ ID NO: 365566 - DNA, 30 bp, Artificial Sequence
  Synthetic oligonucleotide
cattcccaatgaattacgaaaaaagacgct

SEQ ID NO: 365567 - DNA, 30 bp, Artificial Sequence
  Synthetic oligonucleotide
cgatgcgtaataattgcgaatacagacgct

SEQ ID NO: 365568 - DNA, 30 bp, Artificial Sequence
  Synthetic oligonucleotide
tgtcgcaagatgagctcactaccagacgct

SEQ ID NO: 365569 - DNA, 30 bp, Artificial Sequence
  Synthetic oligonucleotide
gcctgacgttcaaatatcctcagagacgct

SEQ ID NO: 365570 - DNA, 30 bp, Artificial Sequence
  Synthetic oligonucleotide
caattcaagaagtagccattctgcgacgct

SEQ ID NO: 365571 - DNA, 30 bp, Artificial Sequence
  Synthetic oligonucleotide
gcgtgaggagaccgtactcgaatcgacgct

SEQ ID NO: 365572 - DNA, 30 bp, Artificial Sequence
  Synthetic oligonucleotide
caatgctgaactcgcacagttctcgacgct

SEQ ID NO: 365573 - DNA, 30 bp, Artificial Sequence
  Synthetic oligonucleotide
acgaccggcgggtccatgaacttcgacgct

SEQ ID NO: 365574 - DNA, 30 bp, Artificial Sequence
  Synthetic oligonucleotide
cgtcccatcccgaataaaccactggacgct

SEQ ID NO: 365575 - DNA, 30 bp, Artificial Sequence
  Synthetic oligonucleotide
cgttcctcaggcagatataacgtggacgct

SEQ ID NO: 365576 - DNA, 30 bp, Artificial Sequence
  Synthetic oligonucleotide
tggattatcgttcgagagtgggatgacgct

SEQ ID NO: 365577 - DNA, 30 bp, Artificial Sequence
  Synthetic oligonucleotide
gcatgcaatgccttcgctggatctgacgct

SEQ ID NO: 365578 - DNA, 30 bp, Artificial Sequence
  Synthetic oligonucleotide
gaggtgcccactcaacttagaaaatacgct

SEQ ID NO: 365579 - DNA, 30 bp, Artificial Sequence
  Synthetic oligonucleotide
gcagaactgtcttgtacgacttaatacgct

SEQ ID NO: 365580 - DNA, 30 bp, Artificial Sequence
  Synthetic oligonucleotide
tgcgcggaggcttcttgaaagagatacgct

SEQ ID NO: 365581 - DNA, 30 bp, Artificial Sequence
  Synthetic oligonucleotide
attcctcgaagctacacagacaactacgct

SEQ ID NO: 365582 - DNA, 30 bp, Artificial Sequence
  Synthetic oligonucleotide
ttgcagagttaaaaaacgtcggactacgct

SEQ ID NO: 365583 - DNA, 30 bp, Artificial Sequence
  Synthetic oligonucleotide
cagaggtcacgttctagagacatgtacgct

SEQ ID NO: 365584 - DNA, 30 bp, Artificial Sequence
  Synthetic oligonucleotide
tggcatgggttctagatgaaagtgtacgct

SEQ ID NO: 365585 - DNA, 30 bp, Artificial Sequence
  Synthetic oligonucleotide
gactacgggaaagaagctgactgaaccgct

SEQ ID NO: 365586 - DNA, 30 bp, Artificial Sequence
  Synthetic oligonucleotide
aatttggctgcctaatcagcggccaccgct

SEQ ID NO: 365587 - DNA, 30 bp, Artificial Sequence
  Synthetic oligonucleotide
gtatgagtgaaagtattgtttttcaccgct

SEQ ID NO: 365588 - DNA, 30 bp, Artificial Sequence
  Synthetic oligonucleotide
tattggattcgttggacgcgtaagaccgct

SEQ ID NO: 365589 - DNA, 30 bp, Artificial Sequence
  Synthetic oligonucleotide
ttccacgtattagcgtaccccctgaccgct

SEQ ID NO: 365590 - DNA, 30 bp, Artificial Sequence
  Synthetic oligonucleotide
actggttcctattaacgatgccttaccgct

SEQ ID NO: 365591 - DNA, 30 bp, Artificial Sequence
  Synthetic oligonucleotide
gcagatcgggaccctccgtgtcttaccgct

SEQ ID NO: 365592 - DNA, 30 bp, Artificial Sequence
  Synthetic oligonucleotide
agtattccccaagcggtcgcaacacccgct

SEQ ID NO: 365593 - DNA, 30 bp, Artificial Sequence
  Synthetic oligonucleotide
gtacttctcagtaatggagcccgacccgct

SEQ ID NO: 365594 - DNA, 30 bp, Artificial Sequence
  Synthetic oligonucleotide
tgtgtactatcactggaggaaaagcccgct

SEQ ID NO: 365595 - DNA, 30 bp, Artificial Sequence
  Synthetic oligonucleotide
gaggcaagtggtcgaatgcctacagccgct

SEQ ID NO: 365596 - DNA, 30 bp, Artificial Sequence
  Synthetic oligonucleotide
cgtccgcgctttactaaagaaaccgccgct

SEQ ID NO: 365597 - DNA, 30 bp, Artificial Sequence
  Synthetic oligonucleotide
ctacgattagtagggtaacttagggccgct

SEQ ID NO: 365598 - DNA, 30 bp, Artificial Sequence
  Synthetic oligonucleotide
actaccgaacgcccagatgcatgggccgct

SEQ ID NO: 365599 - DNA, 30 bp, Artificial Sequence
  Synthetic oligonucleotide
gtccattatagcacgaagaatggtgccgct

SEQ ID NO: 365600 - DNA, 30 bp, Artificial Sequence
  Synthetic oligonucleotide
gaatgggtgatagtgctcttgcaatccgct

SEQ ID NO: 365601 - DNA, 30 bp, Artificial Sequence
  Synthetic oligonucleotide
taagtcctagctggagggagaagctccgct

SEQ ID NO: 365602 - DNA, 31 bp, Artificial Sequence
  Synthetic oligonucleotide
aggatagctccttgaggacgccggctccgct

SEQ ID NO: 365603 - DNA, 30 bp, Artificial Sequence
  Synthetic oligonucleotide
cttggcaaataaattgcaacttgttccgct

SEQ ID NO: 365604 - DNA, 30 bp, Artificial Sequence
  Synthetic oligonucleotide
gccagctactatgccggagagagaagcgct

SEQ ID NO: 365605 - DNA, 30 bp, Artificial Sequence
  Synthetic oligonucleotide
ggactactttagcgcgtaacgcacagcgct

SEQ ID NO: 365606 - DNA, 30 bp, Artificial Sequence
  Synthetic oligonucleotide
tcaaaccacatccattgcccgtacagcgct

SEQ ID NO: 365607 - DNA, 30 bp, Artificial Sequence
  Synthetic oligonucleotide
gttagaataattcgtgcacggtccagcgct

SEQ ID NO: 365608 - DNA, 30 bp, Artificial Sequence
  Synthetic oligonucleotide
taggtcgaccagtccttataagtcagcgct

SEQ ID NO: 365609 - DNA, 30 bp, Artificial Sequence
  Synthetic oligonucleotide
tccgagcctatcagagtttaacagagcgct

SEQ ID NO: 365610 - DNA, 30 bp, Artificial Sequence
  Synthetic oligonucleotide
cgcatctagccccagcttcttactagcgct

SEQ ID NO: 365611 - DNA, 30 bp, Artificial Sequence
  Synthetic oligonucleotide
cagcacgctaggtgtatgttctcacgcgct

SEQ ID NO: 365612 - DNA, 30 bp, Artificial Sequence
  Synthetic oligonucleotide
gtgggggaagcaacggttacggcccgcgct

SEQ ID NO: 365613 - DNA, 30 bp, Artificial Sequence
  Synthetic oligonucleotide
aaccgtgatgaacaatcgatcaaaggcgct

SEQ ID NO: 365614 - DNA, 30 bp, Artificial Sequence
  Synthetic oligonucleotide
acccacaagtggtgtgcatttgagggcgct

SEQ ID NO: 365615 - DNA, 30 bp, Artificial Sequence
  Synthetic oligonucleotide
ggcctcgaccgcctcctcggacggggcgct

SEQ ID NO: 365616 - DNA, 30 bp, Artificial Sequence
  Synthetic oligonucleotide
ggaactaccaagtccttaggggctggcgct

SEQ ID NO: 365617 - DNA, 30 bp, Artificial Sequence
  Synthetic oligonucleotide
attagcattagattcgttgtcacatgcgct

SEQ ID NO: 365618 - DNA, 30 bp, Artificial Sequence
  Synthetic oligonucleotide
ggacgcgtgagtatgctgctatcgtgcgct

SEQ ID NO: 365619 - DNA, 30 bp, Artificial Sequence
  Synthetic oligonucleotide
ctaatacggtaataggagtatatgtgcgct

SEQ ID NO: 365620 - DNA, 30 bp, Artificial Sequence
  Synthetic oligonucleotide
tacacttggtggagaaccgagggttgcgct

SEQ ID NO: 365621 - DNA, 30 bp, Artificial Sequence
  Synthetic oligonucleotide
gcatatactatgaaatgaggtggaatcgct

SEQ ID NO: 365622 - DNA, 29 bp, Artificial Sequence
  Synthetic oligonucleotide
tctggagtgatttgtggactttaatcgct

SEQ ID NO: 365623 - DNA, 30 bp, Artificial Sequence
  Synthetic oligonucleotide
gttatgtatttaactcaagtgcgcatcgct

SEQ ID NO: 365624 - DNA, 30 bp, Artificial Sequence
  Synthetic oligonucleotide
ctatagcacgaaggcgcgcttcgcatcgct

SEQ ID NO: 365625 - DNA, 30 bp, Artificial Sequence
  Synthetic oligonucleotide
agctgccgacaagaacttatcttcatcgct

SEQ ID NO: 365626 - DNA, 30 bp, Artificial Sequence
  Synthetic oligonucleotide
tgttcaatcacgggatatatgccgatcgct

SEQ ID NO: 365627 - DNA, 30 bp, Artificial Sequence
  Synthetic oligonucleotide
tgaattattcgggtagccaatcggatcgct

SEQ ID NO: 365628 - DNA, 30 bp, Artificial Sequence
  Synthetic oligonucleotide
aagtcgctcgatcccataatgaatatcgct

SEQ ID NO: 365629 - DNA, 30 bp, Artificial Sequence
  Synthetic oligonucleotide
tgataggatttgtgatttaggggtatcgct

SEQ ID NO: 365630 - DNA, 30 bp, Artificial Sequence
  Synthetic oligonucleotide
gacggagtggggtacttggttggtatcgct

SEQ ID NO: 365631 - DNA, 30 bp, Artificial Sequence
  Synthetic oligonucleotide
tgttatcgaccccgacgtgaaattatcgct

SEQ ID NO: 365632 - DNA, 30 bp, Artificial Sequence
  Synthetic oligonucleotide
acgaaggatagcgttccacgtattatcgct

SEQ ID NO: 365633 - DNA, 30 bp, Artificial Sequence
  Synthetic oligonucleotide
aacacactttttcccgggaagttactcgct

SEQ ID NO: 365634 - DNA, 30 bp, Artificial Sequence
  Synthetic oligonucleotide
agcccacccattcgaccgcgaacgctcgct

SEQ ID NO: 365635 - DNA, 30 bp, Artificial Sequence
  Synthetic oligonucleotide
tagttgaacaagagacatgttgatctcgct

SEQ ID NO: 365636 - DNA, 30 bp, Artificial Sequence
  Synthetic oligonucleotide
tgctggtattgaggacgcaatagtctcgct

SEQ ID NO: 365637 - DNA, 30 bp, Artificial Sequence
  Synthetic oligonucleotide
actaacagactagcaagggctagtctcgct

SEQ ID NO: 365638 - DNA, 30 bp, Artificial Sequence
  Synthetic oligonucleotide
tgtatgcatacatgtatgtcacaagtcgct

SEQ ID NO: 365639 - DNA, 30 bp, Artificial Sequence
  Synthetic oligonucleotide
tgcgaagaattggacatgggcctagtcgct

SEQ ID NO: 365640 - DNA, 30 bp, Artificial Sequence
  Synthetic oligonucleotide
gccaagagcccaattaaggggttagtcgct

SEQ ID NO: 365641 - DNA, 30 bp, Artificial Sequence
  Synthetic oligonucleotide
gcgatgagggtaccggatggtatcttcgct

SEQ ID NO: 365642 - DNA, 30 bp, Artificial Sequence
  Synthetic oligonucleotide
ggggtgacgtctgaggaccttcagttcgct

SEQ ID NO: 365643 - DNA, 30 bp, Artificial Sequence
  Synthetic oligonucleotide
ccaatcccttagtcgtgcacttagttcgct

SEQ ID NO: 365644 - DNA, 30 bp, Artificial Sequence
  Synthetic oligonucleotide
gtagtactatagggccaagactatttcgct

SEQ ID NO: 365645 - DNA, 30 bp, Artificial Sequence
  Synthetic oligonucleotide
agggctggcccttaggataatcttttcgct

SEQ ID NO: 365646 - DNA, 30 bp, Artificial Sequence
  Synthetic oligonucleotide
gctcaagaatttgtcgatatggttttcgct

SEQ ID NO: 365647 - DNA, 30 bp, Artificial Sequence
  Synthetic oligonucleotide
gtagaagttacaggtctcgtgcaaaaggct

SEQ ID NO: 365648 - DNA, 30 bp, Artificial Sequence
  Synthetic oligonucleotide
gagtgaagatagagtgaattagacaaggct

SEQ ID NO: 365649 - DNA, 30 bp, Artificial Sequence
  Synthetic oligonucleotide
acttccttcccacgggtaagaggcaaggct

SEQ ID NO: 365650 - DNA, 30 bp, Artificial Sequence
  Synthetic oligonucleotide
ctccacagttatgggacctctatcaaggct

SEQ ID NO: 365651 - DNA, 30 bp, Artificial Sequence
  Synthetic oligonucleotide
ccacaacattttgaagtgctcaagaaggct

SEQ ID NO: 365652 - DNA, 30 bp, Artificial Sequence
  Synthetic oligonucleotide
tatcggcggttcaactgccgagctaaggct

SEQ ID NO: 365653 - DNA, 30 bp, Artificial Sequence
  Synthetic oligonucleotide
tcatgacttttgacgacgcgttttaaggct

SEQ ID NO: 365654 - DNA, 30 bp, Artificial Sequence
  Synthetic oligonucleotide
aaaaacccagcgtgagagaggatacaggct

SEQ ID NO: 365655 - DNA, 30 bp, Artificial Sequence
  Synthetic oligonucleotide
cataaccggtgggtatcaactacccaggct

SEQ ID NO: 365656 - DNA, 30 bp, Artificial Sequence
  Synthetic oligonucleotide
actcatgtctaacccggttctatccaggct

SEQ ID NO: 365657 - DNA, 30 bp, Artificial Sequence
  Synthetic oligonucleotide
gacaagcccctgctcgattcttaagaggct

SEQ ID NO: 365658 - DNA, 30 bp, Artificial Sequence
  Synthetic oligonucleotide
tctatatggtaaaggaggttcgtagaggct

SEQ ID NO: 365659 - DNA, 30 bp, Artificial Sequence
  Synthetic oligonucleotide
ttaactgtgtcatcgttagtagccgaggct

SEQ ID NO: 365660 - DNA, 30 bp, Artificial Sequence
  Synthetic oligonucleotide
ataaagtttgcggtgcgagcgacggaggct

SEQ ID NO: 365661 - DNA, 29 bp, Artificial Sequence
  Synthetic oligonucleotide
atcggcacggttgattcagtacggaggct

SEQ ID NO: 365662 - DNA, 30 bp, Artificial Sequence
  Synthetic oligonucleotide
tgttatggtgacaattgaatcccggaggct

SEQ ID NO: 365663 - DNA, 30 bp, Artificial Sequence
  Synthetic oligonucleotide
agtatgtccgatgggaatctctgtgaggct

SEQ ID NO: 365664 - DNA, 30 bp, Artificial Sequence
  Synthetic oligonucleotide
tatcccctgggagtagcgctgggataggct

SEQ ID NO: 365665 - DNA, 30 bp, Artificial Sequence
  Synthetic oligonucleotide
caactgatactcggcgacgtcatataggct

SEQ ID NO: 365666 - DNA, 30 bp, Artificial Sequence
  Synthetic oligonucleotide
gccttaagccccgtaatgcccatgtaggct

SEQ ID NO: 365667 - DNA, 30 bp, Artificial Sequence
  Synthetic oligonucleotide
tcctagttcaacactaccgggtaaacggct

SEQ ID NO: 365668 - DNA, 30 bp, Artificial Sequence
  Synthetic oligonucleotide
ggacttgtttttctaggacttacaacggct

SEQ ID NO: 365669 - DNA, 30 bp, Artificial Sequence
  Synthetic oligonucleotide
tgaggttatatgcggtaaagttgaacggct

SEQ ID NO: 365670 - DNA, 30 bp, Artificial Sequence
  Synthetic oligonucleotide
tacggaaatcctatcgctgagaacacggct

SEQ ID NO: 365671 - DNA, 30 bp, Artificial Sequence
  Synthetic oligonucleotide
gatcttaagcatcttacaaggaacacggct

SEQ ID NO: 365672 - DNA, 30 bp, Artificial Sequence
  Synthetic oligonucleotide
tattaaaaacgcgaatatatatgcacggct

SEQ ID NO: 365673 - DNA, 30 bp, Artificial Sequence
  Synthetic oligonucleotide
ggctggtccaggtagaaaaatatcacggct

SEQ ID NO: 365674 - DNA, 31 bp, Artificial Sequence
  Synthetic oligonucleotide
gccgaatagcccgagctggattgggacggct

SEQ ID NO: 365675 - DNA, 30 bp, Artificial Sequence
  Synthetic oligonucleotide
tcttgtgtaagcacggctgcttggacggct

SEQ ID NO: 365676 - DNA, 30 bp, Artificial Sequence
  Synthetic oligonucleotide
gatctcaaacggcaattcggtatgacggct

SEQ ID NO: 365677 - DNA, 30 bp, Artificial Sequence
  Synthetic oligonucleotide
tctgcttagtacgtaggcgcactaccggct

SEQ ID NO: 365678 - DNA, 30 bp, Artificial Sequence
  Synthetic oligonucleotide
cgacgcggccccagaagtggtatcccggct

SEQ ID NO: 365679 - DNA, 30 bp, Artificial Sequence
  Synthetic oligonucleotide
gtgtagcaatttaggctggtattcccggct

SEQ ID NO: 365680 - DNA, 30 bp, Artificial Sequence
  Synthetic oligonucleotide
tagactatcatcatgcggcttgatccggct

SEQ ID NO: 365681 - DNA, 30 bp, Artificial Sequence
  Synthetic oligonucleotide
gggggcctccgtcggtgtagacaagcggct

SEQ ID NO: 365682 - DNA, 30 bp, Artificial Sequence
  Synthetic oligonucleotide
ttctctggccagagcatcaaatgggcggct

SEQ ID NO: 365683 - DNA, 30 bp, Artificial Sequence
  Synthetic oligonucleotide
gcgagcactagtcaccggtcaggtgcggct

SEQ ID NO: 365684 - DNA, 30 bp, Artificial Sequence
  Synthetic oligonucleotide
tacggtaaagaggtatcacctctgtcggct

SEQ ID NO: 365685 - DNA, 30 bp, Artificial Sequence
  Synthetic oligonucleotide
catcatgccacagaaaatttaaattcggct

SEQ ID NO: 365686 - DNA, 30 bp, Artificial Sequence
  Synthetic oligonucleotide
actccatttcaggcccgacgaaaaagggct

SEQ ID NO: 365687 - DNA, 30 bp, Artificial Sequence
  Synthetic oligonucleotide
ggtctatgtacgccaaggaaacgaagggct

SEQ ID NO: 365688 - DNA, 30 bp, Artificial Sequence
  Synthetic oligonucleotide
ccgtactcaaagcctagttggttaagggct

SEQ ID NO: 365689 - DNA, 30 bp, Artificial Sequence
  Synthetic oligonucleotide
tttcgtcggggcgttgtctatttaagggct

SEQ ID NO: 365690 - DNA, 30 bp, Artificial Sequence
  Synthetic oligonucleotide
ctacaacccctaccgcgcctcaacagggct

SEQ ID NO: 365691 - DNA, 30 bp, Artificial Sequence
  Synthetic oligonucleotide
ggaatcttgtcattccggatcaccagggct

SEQ ID NO: 365692 - DNA, 30 bp, Artificial Sequence
  Synthetic oligonucleotide
caggccttgggataccttgcacccagggct

SEQ ID NO: 365693 - DNA, 30 bp, Artificial Sequence
  Synthetic oligonucleotide
tgccacatgtagacaggatagtcgagggct

SEQ ID NO: 365694 - DNA, 30 bp, Artificial Sequence
  Synthetic oligonucleotide
gacatccaaggacgttgttaccggagggct

SEQ ID NO: 365695 - DNA, 30 bp, Artificial Sequence
  Synthetic oligonucleotide
ttcggtctaacagttacttctcttagggct

SEQ ID NO: 365696 - DNA, 30 bp, Artificial Sequence
  Synthetic oligonucleotide
ttgtcgcctgcgcaccttaaaaaacgggct

SEQ ID NO: 365697 - DNA, 30 bp, Artificial Sequence
  Synthetic oligonucleotide
gtacgttccggcgctcacgattcacgggct

SEQ ID NO: 365698 - DNA, 30 bp, Artificial Sequence
  Synthetic oligonucleotide
aacgtgctggacccagcaaatcaccgggct

SEQ ID NO: 365699 - DNA, 30 bp, Artificial Sequence
  Synthetic oligonucleotide
tttgtgcacttttctcatcgggtgcgggct

SEQ ID NO: 365700 - DNA, 30 bp, Artificial Sequence
  Synthetic oligonucleotide
ctgcctggcctccagtcggcagaaggggct

SEQ ID NO: 365701 - DNA, 30 bp, Artificial Sequence
  Synthetic oligonucleotide
gaaaggttttatagataatgtaagggggct

SEQ ID NO: 365702 - DNA, 30 bp, Artificial Sequence
  Synthetic oligonucleotide
agtcgtctcattggggaatggcctggggct

SEQ ID NO: 365703 - DNA, 30 bp, Artificial Sequence
  Synthetic oligonucleotide
acagtaactgccacgtcaggcacatgggct

SEQ ID NO: 365704 - DNA, 30 bp, Artificial Sequence
  Synthetic oligonucleotide
tctccagaacaaactctgtatccatgggct

SEQ ID NO: 365705 - DNA, 30 bp, Artificial Sequence
  Synthetic oligonucleotide
gggatactacctttcggggagtcgtgggct

SEQ ID NO: 365706 - DNA, 30 bp, Artificial Sequence
  Synthetic oligonucleotide
tcatatgaagtgtagaaggctgtgtgggct

SEQ ID NO: 365707 - DNA, 30 bp, Artificial Sequence
  Synthetic oligonucleotide
acttatgagggagcataccggaattgggct

SEQ ID NO: 365708 - DNA, 30 bp, Artificial Sequence
  Synthetic oligonucleotide
aactggaactatgagaagaacagcatggct

SEQ ID NO: 365709 - DNA, 30 bp, Artificial Sequence
  Synthetic oligonucleotide
aaaataatgggggctcatattggcatggct

SEQ ID NO: 365710 - DNA, 30 bp, Artificial Sequence
  Synthetic oligonucleotide
ctcttgaaattatttagtcaccagatggct

SEQ ID NO: 365711 - DNA, 30 bp, Artificial Sequence
  Synthetic oligonucleotide
cttaccaaagtctacaaagtctaactggct

SEQ ID NO: 365712 - DNA, 30 bp, Artificial Sequence
  Synthetic oligonucleotide
cgagctgtacaatgtctttctgcactggct

SEQ ID NO: 365713 - DNA, 30 bp, Artificial Sequence
  Synthetic oligonucleotide
gtaacttaagtggtcgggcatttactggct

SEQ ID NO: 365714 - DNA, 30 bp, Artificial Sequence
  Synthetic oligonucleotide
caccgcgacttatgaaacccatccctggct

SEQ ID NO: 365715 - DNA, 30 bp, Artificial Sequence
  Synthetic oligonucleotide
atgggagtcattttctaattggtcctggct

SEQ ID NO: 365716 - DNA, 30 bp, Artificial Sequence
  Synthetic oligonucleotide
cttcagctcaattatacaaatatcgtggct

SEQ ID NO: 365717 - DNA, 30 bp, Artificial Sequence
  Synthetic oligonucleotide
atgtatctagaaatcatatcgttcgtggct

SEQ ID NO: 365718 - DNA, 30 bp, Artificial Sequence
  Synthetic oligonucleotide
gtcgagacttatttaccttgtgttgtggct

SEQ ID NO: 365719 - DNA, 30 bp, Artificial Sequence
  Synthetic oligonucleotide
tattaagtgtaggtaggtcggaggttggct

SEQ ID NO: 365720 - DNA, 30 bp, Artificial Sequence
  Synthetic oligonucleotide
accatgaagtcatccatgtggactttggct

SEQ ID NO: 365721 - DNA, 30 bp, Artificial Sequence
  Synthetic oligonucleotide
gtcttaatgaaccatataagcagtttggct

SEQ ID NO: 365722 - DNA, 30 bp, Artificial Sequence
  Synthetic oligonucleotide
atgggccgtcagccaagataacaaaatgct

SEQ ID NO: 365723 - DNA, 30 bp, Artificial Sequence
  Synthetic oligonucleotide
ctaaagattgtagacaaagtgcgaaatgct

SEQ ID NO: 365724 - DNA, 30 bp, Artificial Sequence
  Synthetic oligonucleotide
gctacgatctattataatcaggataatgct

SEQ ID NO: 365725 - DNA, 30 bp, Artificial Sequence
  Synthetic oligonucleotide
tctcgtaacggtcggcctagtgttaatgct

SEQ ID NO: 365726 - DNA, 30 bp, Artificial Sequence
  Synthetic oligonucleotide
taggtaatatacgttattttagcacatgct

SEQ ID NO: 365727 - DNA, 30 bp, Artificial Sequence
  Synthetic oligonucleotide
aaccgtagcatgaaatgcgctccgcatgct

SEQ ID NO: 365728 - DNA, 30 bp, Artificial Sequence
  Synthetic oligonucleotide
ctggggacgcaacacgatgagggagatgct

SEQ ID NO: 365729 - DNA, 30 bp, Artificial Sequence
  Synthetic oligonucleotide
acggtacttgaagtgctcttattagatgct

SEQ ID NO: 365730 - DNA, 30 bp, Artificial Sequence
  Synthetic oligonucleotide
cgtctctaatcttaggagcagcacgatgct

SEQ ID NO: 365731 - DNA, 30 bp, Artificial Sequence
  Synthetic oligonucleotide
atctcgacacgtagctgggtctacgatgct

SEQ ID NO: 365732 - DNA, 30 bp, Artificial Sequence
  Synthetic oligonucleotide
ccttcatggacgtattatcctatcgatgct

SEQ ID NO: 365733 - DNA, 30 bp, Artificial Sequence
  Synthetic oligonucleotide
tcggaactcttcgcataggtatcggatgct

SEQ ID NO: 365734 - DNA, 30 bp, Artificial Sequence
  Synthetic oligonucleotide
cgcgtacacggggctgcccggagtgatgct

SEQ ID NO: 365735 - DNA, 30 bp, Artificial Sequence
  Synthetic oligonucleotide
caggaataccggtagtcaaagcgatatgct

SEQ ID NO: 365736 - DNA, 27 bp, Artificial Sequence
  Synthetic oligonucleotide
cactgtcagtaaccgtcctcaactgct

SEQ ID NO: 365737 - DNA, 30 bp, Artificial Sequence
  Synthetic oligonucleotide
atggcgagcacagactttctcataactgct

SEQ ID NO: 365738 - DNA, 30 bp, Artificial Sequence
  Synthetic oligonucleotide
gctatatattactaaataataaccactgct

SEQ ID NO: 365739 - DNA, 30 bp, Artificial Sequence
  Synthetic oligonucleotide
cttacaccacgcagaattggtctcactgct

SEQ ID NO: 365740 - DNA, 30 bp, Artificial Sequence
  Synthetic oligonucleotide
aaccattgggtgagtcgaccccagactgct

SEQ ID NO: 365741 - DNA, 30 bp, Artificial Sequence
  Synthetic oligonucleotide
attatagggcaatggacccactcgactgct

SEQ ID NO: 365742 - DNA, 30 bp, Artificial Sequence
  Synthetic oligonucleotide
gtgatgttcatcgcggggggttgacctgct

SEQ ID NO: 365743 - DNA, 30 bp, Artificial Sequence
  Synthetic oligonucleotide
attttgctgaagtcgacgtagatacctgct

SEQ ID NO: 365744 - DNA, 30 bp, Artificial Sequence
  Synthetic oligonucleotide
tgggtggaattaggatgatactggcctgct

SEQ ID NO: 365745 - DNA, 30 bp, Artificial Sequence
  Synthetic oligonucleotide
ttagaccgcagtgtttcaagtgtgcctgct

SEQ ID NO: 365746 - DNA, 30 bp, Artificial Sequence
  Synthetic oligonucleotide
cccctggtgtattcatattagggagctgct

SEQ ID NO: 365747 - DNA, 30 bp, Artificial Sequence
  Synthetic oligonucleotide
atgcgtacgaatcccgcaagtatcgctgct

SEQ ID NO: 365748 - DNA, 30 bp, Artificial Sequence
  Synthetic oligonucleotide
tccaagtttagttcccaggtgctcgctgct

SEQ ID NO: 365749 - DNA, 30 bp, Artificial Sequence
  Synthetic oligonucleotide
cacgaagtgtacagtttgtgtctcgctgct

SEQ ID NO: 365750 - DNA, 30 bp, Artificial Sequence
  Synthetic oligonucleotide
ggcctggttcagtacagtatacgggctgct

SEQ ID NO: 365751 - DNA, 30 bp, Artificial Sequence
  Synthetic oligonucleotide
cgctacaaaccgcgaacgaaatgtgctgct

SEQ ID NO: 365752 - DNA, 30 bp, Artificial Sequence
  Synthetic oligonucleotide
tgagggatcaatctcggatggaaatctgct

SEQ ID NO: 365753 - DNA, 30 bp, Artificial Sequence
  Synthetic oligonucleotide
ttgggatttcacccatacctaggatctgct

SEQ ID NO: 365754 - DNA, 30 bp, Artificial Sequence
  Synthetic oligonucleotide
cccttgcttagattatatctgaactctgct

SEQ ID NO: 365755 - DNA, 30 bp, Artificial Sequence
  Synthetic oligonucleotide
tgtaaactgtaatcgctttcccagtctgct

SEQ ID NO: 365756 - DNA, 30 bp, Artificial Sequence
  Synthetic oligonucleotide
tagtacgctctcaagaaagtgacgtctgct

SEQ ID NO: 365757 - DNA, 30 bp, Artificial Sequence
  Synthetic oligonucleotide
atgaaagtgcatgggtcggcgctttctgct

SEQ ID NO: 365758 - DNA, 30 bp, Artificial Sequence
  Synthetic oligonucleotide
gtgtttatcttcgtggatccgttttctgct

SEQ ID NO: 365759 - DNA, 30 bp, Artificial Sequence
  Synthetic oligonucleotide
aagcgctcacaacaatccacaccaagtgct

SEQ ID NO: 365760 - DNA, 30 bp, Artificial Sequence
  Synthetic oligonucleotide
tttatgattggtatgggtcaaagaagtgct

SEQ ID NO: 365761 - DNA, 30 bp, Artificial Sequence
  Synthetic oligonucleotide
taaatgcgtattcagagccacggaagtgct

SEQ ID NO: 365762 - DNA, 30 bp, Artificial Sequence
  Synthetic oligonucleotide
taaccatctattagcttttcccccagtgct

SEQ ID NO: 365763 - DNA, 30 bp, Artificial Sequence
  Synthetic oligonucleotide
acttgtgtccaggaaatggcactcagtgct

SEQ ID NO: 365764 - DNA, 30 bp, Artificial Sequence
  Synthetic oligonucleotide
gatgttgaagccaaagtaacgttcagtgct

SEQ ID NO: 365765 - DNA, 30 bp, Artificial Sequence
  Synthetic oligonucleotide
ttatgctaacatttcactttcgggagtgct

SEQ ID NO: 365766 - DNA, 30 bp, Artificial Sequence
  Synthetic oligonucleotide
gcaacaaaatatcacttctggatgagtgct

SEQ ID NO: 365767 - DNA, 30 bp, Artificial Sequence
  Synthetic oligonucleotide
agaaaagacacgtgtgcgttgactagtgct

SEQ ID NO: 365768 - DNA, 30 bp, Artificial Sequence
  Synthetic oligonucleotide
gaaccgcgttctatggacgttgttagtgct

SEQ ID NO: 365769 - DNA, 30 bp, Artificial Sequence
  Synthetic oligonucleotide
atatgatgtctaatactaaagggacgtgct

SEQ ID NO: 365770 - DNA, 30 bp, Artificial Sequence
  Synthetic oligonucleotide
gggcgtgagatcgttgtctattgacgtgct

SEQ ID NO: 365771 - DNA, 30 bp, Artificial Sequence
  Synthetic oligonucleotide
agcctctattacgccgaattaccccgtgct

SEQ ID NO: 365772 - DNA, 30 bp, Artificial Sequence
  Synthetic oligonucleotide
tcggttaggtgacccatagcccggcgtgct

SEQ ID NO: 365773 - DNA, 30 bp, Artificial Sequence
  Synthetic oligonucleotide
tgcgcggctcgcagtgagcgatatcgtgct

SEQ ID NO: 365774 - DNA, 30 bp, Artificial Sequence
  Synthetic oligonucleotide
tagaactcgggcctgcatatttgtcgtgct

SEQ ID NO: 365775 - DNA, 30 bp, Artificial Sequence
  Synthetic oligonucleotide
aggagtatttcccaatcccagccaggtgct

SEQ ID NO: 365776 - DNA, 30 bp, Artificial Sequence
  Synthetic oligonucleotide
aaacttcagagttaaagatttgtaggtgct

SEQ ID NO: 365777 - DNA, 30 bp, Artificial Sequence
  Synthetic oligonucleotide
attcgtgacgacatactgctgaacggtgct

SEQ ID NO: 365778 - DNA, 30 bp, Artificial Sequence
  Synthetic oligonucleotide
cttcagatcagtgcagagcggatcggtgct

SEQ ID NO: 365779 - DNA, 30 bp, Artificial Sequence
  Synthetic oligonucleotide
tgctcatgcaagggaaacgcggagggtgct

SEQ ID NO: 365780 - DNA, 30 bp, Artificial Sequence
  Synthetic oligonucleotide
actgcgcagggcagataccgtacgggtgct

SEQ ID NO: 365781 - DNA, 30 bp, Artificial Sequence
  Synthetic oligonucleotide
aggggcttcgtggtaactactgggggtgct

SEQ ID NO: 365782 - DNA, 30 bp, Artificial Sequence
  Synthetic oligonucleotide
aaaggatggaaggttcaatccatgggtgct

SEQ ID NO: 365783 - DNA, 30 bp, Artificial Sequence
  Synthetic oligonucleotide
cgggtagttgtagcattgtaatctggtgct

SEQ ID NO: 365784 - DNA, 30 bp, Artificial Sequence
  Synthetic oligonucleotide
agacatgcaatctttagatctgtatgtgct

SEQ ID NO: 365785 - DNA, 30 bp, Artificial Sequence
  Synthetic oligonucleotide
cggtagatctccgtcatctcatgctgtgct

SEQ ID NO: 365786 - DNA, 30 bp, Artificial Sequence
  Synthetic oligonucleotide
gacgcccccatgacgctcaggttctgtgct

SEQ ID NO: 365787 - DNA, 30 bp, Artificial Sequence
  Synthetic oligonucleotide
agtttattcgtattttcaacctcttgtgct

SEQ ID NO: 365788 - DNA, 30 bp, Artificial Sequence
  Synthetic oligonucleotide
catagttatgcttttctagttttaattgct

SEQ ID NO: 365789 - DNA, 30 bp, Artificial Sequence
  Synthetic oligonucleotide
gatatgtgggtaccggtgtaaaacattgct

SEQ ID NO: 365790 - DNA, 30 bp, Artificial Sequence
  Synthetic oligonucleotide
aattcgcggttcgtcttacgtcggattgct

SEQ ID NO: 365791 - DNA, 30 bp, Artificial Sequence
  Synthetic oligonucleotide
gccaacatctcgttatgaacgatgattgct

SEQ ID NO: 365792 - DNA, 30 bp, Artificial Sequence
  Synthetic oligonucleotide
ttctagaagaagaggtgctgtactattgct

SEQ ID NO: 365793 - DNA, 30 bp, Artificial Sequence
  Synthetic oligonucleotide
cgtggaatattgctcccagtggctattgct

SEQ ID NO: 365794 - DNA, 30 bp, Artificial Sequence
  Synthetic oligonucleotide
gagactaggcgcctgtgttatagtattgct

SEQ ID NO: 365795 - DNA, 30 bp, Artificial Sequence
  Synthetic oligonucleotide
ctagaccacggaccctgacagggtattgct

SEQ ID NO: 365796 - DNA, 30 bp, Artificial Sequence
  Synthetic oligonucleotide
ggatgcttccagatgtacttagttattgct

SEQ ID NO: 365797 - DNA, 30 bp, Artificial Sequence
  Synthetic oligonucleotide
tatttagaaagcgtaaggactgttattgct

SEQ ID NO: 365798 - DNA, 30 bp, Artificial Sequence
  Synthetic oligonucleotide
gacagcttgacctcccacaggcgacttgct

SEQ ID NO: 365799 - DNA, 30 bp, Artificial Sequence
  Synthetic oligonucleotide
tctataccctgacagcgctgaccccttgct

SEQ ID NO: 365800 - DNA, 30 bp, Artificial Sequence
  Synthetic oligonucleotide
atatataaacatagggagtacagccttgct

SEQ ID NO: 365801 - DNA, 30 bp, Artificial Sequence
  Synthetic oligonucleotide
acaatgtaaccggtcgaatggcctcttgct

SEQ ID NO: 365802 - DNA, 30 bp, Artificial Sequence
  Synthetic oligonucleotide
agtgtgcggaagtcaacaattacagttgct

SEQ ID NO: 365803 - DNA, 30 bp, Artificial Sequence
  Synthetic oligonucleotide
gggtcagcaccacagacctttccagttgct

SEQ ID NO: 365804 - DNA, 30 bp, Artificial Sequence
  Synthetic oligonucleotide
gaccacaggcttgtcctacgtcgtgttgct

SEQ ID NO: 365805 - DNA, 30 bp, Artificial Sequence
  Synthetic oligonucleotide
caaagtcctaaggcatgtttcaaatttgct

SEQ ID NO: 365806 - DNA, 30 bp, Artificial Sequence
  Synthetic oligonucleotide
tcgttaggttcggtaatctttaactttgct

SEQ ID NO: 365807 - DNA, 30 bp, Artificial Sequence
  Synthetic oligonucleotide
ggctccaggaatgggtgtggctgctttgct

SEQ ID NO: 365808 - DNA, 30 bp, Artificial Sequence
  Synthetic oligonucleotide
caccagtcttacatatgcgccgagtttgct

SEQ ID NO: 365809 - DNA, 30 bp, Artificial Sequence
  Synthetic oligonucleotide
ggtagccgcggatagtcgacgccttttgct

SEQ ID NO: 365810 - DNA, 30 bp, Artificial Sequence
  Synthetic oligonucleotide
atgcttagtttccgatttccggcaaaatct

SEQ ID NO: 365811 - DNA, 30 bp, Artificial Sequence
  Synthetic oligonucleotide
aggcccgggaacgtggcagttcccaaatct

SEQ ID NO: 365812 - DNA, 30 bp, Artificial Sequence
  Synthetic oligonucleotide
agtcacctgggcgtagtacaggtgaaatct

SEQ ID NO: 365813 - DNA, 30 bp, Artificial Sequence
  Synthetic oligonucleotide
atgaagagtctgtcattctaccctaaatct

SEQ ID NO: 365814 - DNA, 30 bp, Artificial Sequence
  Synthetic oligonucleotide
taactaaaaacagagtactgacgtaaatct

SEQ ID NO: 365815 - DNA, 30 bp, Artificial Sequence
  Synthetic oligonucleotide
ccgtgccaaactgcgggcttataccaatct

SEQ ID NO: 365816 - DNA, 30 bp, Artificial Sequence
  Synthetic oligonucleotide
aagtggtgttcgcaaacctccgtccaatct

SEQ ID NO: 365817 - DNA, 30 bp, Artificial Sequence
  Synthetic oligonucleotide
gtttagatggctaatattatggtccaatct

SEQ ID NO: 365818 - DNA, 30 bp, Artificial Sequence
  Synthetic oligonucleotide
cataagatagcggttcagtgatagcaatct

SEQ ID NO: 365819 - DNA, 30 bp, Artificial Sequence
  Synthetic oligonucleotide
taagatttaaacttgggtctgtagcaatct

SEQ ID NO: 365820 - DNA, 30 bp, Artificial Sequence
  Synthetic oligonucleotide
gagacgtaataattggtccatcttcaatct

SEQ ID NO: 365821 - DNA, 30 bp, Artificial Sequence
  Synthetic oligonucleotide
attttgacggcttggacctcgatagaatct

SEQ ID NO: 365822 - DNA, 30 bp, Artificial Sequence
  Synthetic oligonucleotide
aattgctttactgggctagaaaacgaatct

SEQ ID NO: 365823 - DNA, 30 bp, Artificial Sequence
  Synthetic oligonucleotide
ggctggccgcacgcatgatatcacgaatct

SEQ ID NO: 365824 - DNA, 30 bp, Artificial Sequence
  Synthetic oligonucleotide
gagtcgagtcgggccgggcacttcgaatct

SEQ ID NO: 365825 - DNA, 30 bp, Artificial Sequence
  Synthetic oligonucleotide
gacgacctgcgcttggcccataaggaatct

SEQ ID NO: 365826 - DNA, 30 bp, Artificial Sequence
  Synthetic oligonucleotide
gcaacagaccaagttggcgcacaggaatct

SEQ ID NO: 365827 - DNA, 30 bp, Artificial Sequence
  Synthetic oligonucleotide
gatatcgagcaacaagagacccatgaatct

SEQ ID NO: 365828 - DNA, 30 bp, Artificial Sequence
  Synthetic oligonucleotide
aaggcaccggtaataaacgagattgaatct

SEQ ID NO: 365829 - DNA, 30 bp, Artificial Sequence
  Synthetic oligonucleotide
ctaaggctcggctaggccaaatgataatct

SEQ ID NO: 365830 - DNA, 30 bp, Artificial Sequence
  Synthetic oligonucleotide
cagtggggaaagtccacctactgataatct

SEQ ID NO: 365831 - DNA, 30 bp, Artificial Sequence
  Synthetic oligonucleotide
catcatgatagtacggtcacatactaatct

SEQ ID NO: 365832 - DNA, 30 bp, Artificial Sequence
  Synthetic oligonucleotide
gtatgtacctttatcgagtcaatctaatct

SEQ ID NO: 365833 - DNA, 30 bp, Artificial Sequence
  Synthetic oligonucleotide
attagtggaagcatcgggcttcagtaatct

SEQ ID NO: 365834 - DNA, 30 bp, Artificial Sequence
  Synthetic oligonucleotide
gaatagatacccccagattaagcgtaatct

SEQ ID NO: 365835 - DNA, 30 bp, Artificial Sequence
  Synthetic oligonucleotide
tgaggagtacctggtgggcgtttgtaatct

SEQ ID NO: 365836 - DNA, 30 bp, Artificial Sequence
  Synthetic oligonucleotide
gaatccatctagtatgcgcactattaatct

SEQ ID NO: 365837 - DNA, 30 bp, Artificial Sequence
  Synthetic oligonucleotide
ggtccacttcgagatccactcatttaatct

SEQ ID NO: 365838 - DNA, 30 bp, Artificial Sequence
  Synthetic oligonucleotide
acgcagcagccctagaaataacaaacatct

SEQ ID NO: 365839 - DNA, 30 bp, Artificial Sequence
  Synthetic oligonucleotide
tgctccattactaatgtcgcatgaacatct

SEQ ID NO: 365840 - DNA, 30 bp, Artificial Sequence
  Synthetic oligonucleotide
caattggtccaatgatgggcgtagacatct

SEQ ID NO: 365841 - DNA, 30 bp, Artificial Sequence
  Synthetic oligonucleotide
tcgactgcttgagcttatgggcccccatct

SEQ ID NO: 365842 - DNA, 31 bp, Artificial Sequence
  Synthetic oligonucleotide
actagatcttctatgtggacatgccccatct

SEQ ID NO: 365843 - DNA, 30 bp, Artificial Sequence
  Synthetic oligonucleotide
cggccatacactcaagggaattttccatct

SEQ ID NO: 365844 - DNA, 30 bp, Artificial Sequence
  Synthetic oligonucleotide
tctagtggatagttggatggatcagcatct

SEQ ID NO: 365845 - DNA, 30 bp, Artificial Sequence
  Synthetic oligonucleotide
agaggtggcaaccttcagggtttcgcatct

SEQ ID NO: 365846 - DNA, 30 bp, Artificial Sequence
  Synthetic oligonucleotide
aggcctgatgctcgagcaaaccaggcatct

SEQ ID NO: 365847 - DNA, 30 bp, Artificial Sequence
  Synthetic oligonucleotide
ggtgtttgcgtctttgtaactagggcatct

SEQ ID NO: 365848 - DNA, 30 bp, Artificial Sequence
  Synthetic oligonucleotide
agtgggatttgtatggtggcccgtgcatct

SEQ ID NO: 365849 - DNA, 30 bp, Artificial Sequence
  Synthetic oligonucleotide
gttatcggtaatctcttgctcgtatcatct

SEQ ID NO: 365850 - DNA, 30 bp, Artificial Sequence
  Synthetic oligonucleotide
gtataagttccctcgaaaaccagctcatct

SEQ ID NO: 365851 - DNA, 30 bp, Artificial Sequence
  Synthetic oligonucleotide
ttccatgggttcgagcctcccctctcatct

SEQ ID NO: 365852 - DNA, 30 bp, Artificial Sequence
  Synthetic oligonucleotide
aacagtataactaatgagtccctctcatct

SEQ ID NO: 365853 - DNA, 30 bp, Artificial Sequence
  Synthetic oligonucleotide
agctggtatacacagaaggacccgtcatct

SEQ ID NO: 365854 - DNA, 30 bp, Artificial Sequence
  Synthetic oligonucleotide
tcttgcagtgtaatttgatgagcgtcatct

SEQ ID NO: 365855 - DNA, 30 bp, Artificial Sequence
  Synthetic oligonucleotide
ataccatacagctacgttttcgcgtcatct

SEQ ID NO: 365856 - DNA, 30 bp, Artificial Sequence
  Synthetic oligonucleotide
gtcagttgatttctttgagtatcgtcatct

SEQ ID NO: 365857 - DNA, 30 bp, Artificial Sequence
  Synthetic oligonucleotide
ctctacacataagactttaaactgtcatct

SEQ ID NO: 365858 - DNA, 30 bp, Artificial Sequence
  Synthetic oligonucleotide
ggtggtggactgccatacagactcagatct

SEQ ID NO: 365859 - DNA, 30 bp, Artificial Sequence
  Synthetic oligonucleotide
tagctacttgggtggcgcaaggagagatct

SEQ ID NO: 365860 - DNA, 30 bp, Artificial Sequence
  Synthetic oligonucleotide
gccacgggtcagtggtctatcgatagatct

SEQ ID NO: 365861 - DNA, 30 bp, Artificial Sequence
  Synthetic oligonucleotide
acgattgaccagacgatgtatgatagatct

SEQ ID NO: 365862 - DNA, 30 bp, Artificial Sequence
  Synthetic oligonucleotide
actggtgatttagcaaattgacctagatct

SEQ ID NO: 365863 - DNA, 30 bp, Artificial Sequence
  Synthetic oligonucleotide
ggggcagtcctccgctcggggagtagatct

SEQ ID NO: 365864 - DNA, 30 bp, Artificial Sequence
  Synthetic oligonucleotide
catagttacgtctagtcccgtacacgatct

SEQ ID NO: 365865 - DNA, 30 bp, Artificial Sequence
  Synthetic oligonucleotide
aattcagtatcatcgagaaaggtacgatct

SEQ ID NO: 365866 - DNA, 30 bp, Artificial Sequence
  Synthetic oligonucleotide
cgacggggaacacgtttcacgtcccgatct

SEQ ID NO: 365867 - DNA, 30 bp, Artificial Sequence
  Synthetic oligonucleotide
tgtgggcaagcaattatagaacttcgatct

SEQ ID NO: 365868 - DNA, 30 bp, Artificial Sequence
  Synthetic oligonucleotide
ttattagcatatgtaagattgtaaggatct

SEQ ID NO: 365869 - DNA, 30 bp, Artificial Sequence
  Synthetic oligonucleotide
cagcctcgataacccatgcattaaggatct

SEQ ID NO: 365870 - DNA, 30 bp, Artificial Sequence
  Synthetic oligonucleotide
tgcatgccacggctcattggcagaggatct

SEQ ID NO: 365871 - DNA, 30 bp, Artificial Sequence
  Synthetic oligonucleotide
tataggttccgcgcccaatttttaggatct

SEQ ID NO: 365872 - DNA, 30 bp, Artificial Sequence
  Synthetic oligonucleotide
cgaatcgcctgtgtttacaaggggggatct

SEQ ID NO: 365873 - DNA, 30 bp, Artificial Sequence
  Synthetic oligonucleotide
tattccgggtctggaaattggttgggatct

SEQ ID NO: 365874 - DNA, 30 bp, Artificial Sequence
  Synthetic oligonucleotide
caaatcctgaccggctcaatgtgatgatct

SEQ ID NO: 365875 - DNA, 30 bp, Artificial Sequence
  Synthetic oligonucleotide
ggccccccgacaccgcgtatagtatgatct

SEQ ID NO: 365876 - DNA, 30 bp, Artificial Sequence
  Synthetic oligonucleotide
cacagtaacagttccgccccgggttgatct

SEQ ID NO: 365877 - DNA, 30 bp, Artificial Sequence
  Synthetic oligonucleotide
tccttagggagactgggagataaaatatct

SEQ ID NO: 365878 - DNA, 30 bp, Artificial Sequence
  Synthetic oligonucleotide
tctataagagcatcagatcgagcaatatct

SEQ ID NO: 365879 - DNA, 30 bp, Artificial Sequence
  Synthetic oligonucleotide
atcagtaggtactgctcgcgggccatatct

SEQ ID NO: 365880 - DNA, 30 bp, Artificial Sequence
  Synthetic oligonucleotide
cgccttacgtggctattgtcatctatatct

SEQ ID NO: 365881 - DNA, 30 bp, Artificial Sequence
  Synthetic oligonucleotide
ggactcaatcaaatggtcgggtaactatct

SEQ ID NO: 365882 - DNA, 30 bp, Artificial Sequence
  Synthetic oligonucleotide
tatcggggttgatatcggaaagtactatct

SEQ ID NO: 365883 - DNA, 30 bp, Artificial Sequence
  Synthetic oligonucleotide
gacgattttgccatatagcccaccctatct

SEQ ID NO: 365884 - DNA, 30 bp, Artificial Sequence
  Synthetic oligonucleotide
gtaaatgcttgtaagaccaccaagctatct

SEQ ID NO: 365885 - DNA, 30 bp, Artificial Sequence
  Synthetic oligonucleotide
tctcttgttcccacattggtcttgctatct

SEQ ID NO: 365886 - DNA, 30 bp, Artificial Sequence
  Synthetic oligonucleotide
tttacctgggagggggagatttaagtatct

SEQ ID NO: 365887 - DNA, 30 bp, Artificial Sequence
  Synthetic oligonucleotide
cctaagcacttcgcgcgttgggcagtatct

SEQ ID NO: 365888 - DNA, 30 bp, Artificial Sequence
  Synthetic oligonucleotide
aacctcaatgactgatgtcgagacgtatct

SEQ ID NO: 365889 - DNA, 30 bp, Artificial Sequence
  Synthetic oligonucleotide
ctccatagggcaaaaagaatagccgtatct

SEQ ID NO: 365890 - DNA, 30 bp, Artificial Sequence
  Synthetic oligonucleotide
tgtacttcaagatatgcggcgagcgtatct

SEQ ID NO: 365891 - DNA, 30 bp, Artificial Sequence
  Synthetic oligonucleotide
attagcgacccgaaaatacccagggtatct

SEQ ID NO: 365892 - DNA, 30 bp, Artificial Sequence
  Synthetic oligonucleotide
acatagttgccaccgcgacggagggtatct

SEQ ID NO: 365893 - DNA, 30 bp, Artificial Sequence
  Synthetic oligonucleotide
gttgggcaaccggaccccataatggtatct

SEQ ID NO: 365894 - DNA, 30 bp, Artificial Sequence
  Synthetic oligonucleotide
aaattagcatctagatgctatgatgtatct

SEQ ID NO: 365895 - DNA, 29 bp, Artificial Sequence
  Synthetic oligonucleotide
agatctcagcggaaacccttgatgtatct

SEQ ID NO: 365896 - DNA, 30 bp, Artificial Sequence
  Synthetic oligonucleotide
ttgacgcatgaatccgcataccaattatct

SEQ ID NO: 365897 - DNA, 30 bp, Artificial Sequence
  Synthetic oligonucleotide
caatcggtcgggtcctcattcttattatct

SEQ ID NO: 365898 - DNA, 30 bp, Artificial Sequence
  Synthetic oligonucleotide
tagcaaggtctaaggctaagaggcttatct

SEQ ID NO: 365899 - DNA, 30 bp, Artificial Sequence
  Synthetic oligonucleotide
accacgatcgatcctgcaaacggcttatct

SEQ ID NO: 365900 - DNA, 30 bp, Artificial Sequence
  Synthetic oligonucleotide
aaactggagtacccgtcgaccatcttatct

SEQ ID NO: 365901 - DNA, 30 bp, Artificial Sequence
  Synthetic oligonucleotide
gagtcatccatacgatccatcttcttatct

SEQ ID NO: 365902 - DNA, 30 bp, Artificial Sequence
  Synthetic oligonucleotide
gaaatggtccgacggcccctgaagttatct

SEQ ID NO: 365903 - DNA, 30 bp, Artificial Sequence
  Synthetic oligonucleotide
ataactgtgtgtttcgaatggtcgttatct

SEQ ID NO: 365904 - DNA, 30 bp, Artificial Sequence
  Synthetic oligonucleotide
gcctacgtattgccatagtagtctttatct

SEQ ID NO: 365905 - DNA, 30 bp, Artificial Sequence
  Synthetic oligonucleotide
aaaaacctcagacctggcgttagaaactct

SEQ ID NO: 365906 - DNA, 30 bp, Artificial Sequence
  Synthetic oligonucleotide
atgtagactcttaaagggagtctaaactct

SEQ ID NO: 365907 - DNA, 30 bp, Artificial Sequence
  Synthetic oligonucleotide
cctcatgggatcctgggcttctacaactct

SEQ ID NO: 365908 - DNA, 30 bp, Artificial Sequence
  Synthetic oligonucleotide
cgtgacgttatggggagccctctgaactct

SEQ ID NO: 365909 - DNA, 30 bp, Artificial Sequence
  Synthetic oligonucleotide
ggcttccgctgtttagggctgcctaactct

SEQ ID NO: 365910 - DNA, 30 bp, Artificial Sequence
  Synthetic oligonucleotide
tagcgtgcattgatctacacatgtaactct

SEQ ID NO: 365911 - DNA, 30 bp, Artificial Sequence
  Synthetic oligonucleotide
gcaagctcacaatctgagctacaacactct

SEQ ID NO: 365912 - DNA, 30 bp, Artificial Sequence
  Synthetic oligonucleotide
ttagtgacgccagatcagggaacccactct

SEQ ID NO: 365913 - DNA, 30 bp, Artificial Sequence
  Synthetic oligonucleotide
ctataactgggccgcctgcgattccactct

SEQ ID NO: 365914 - DNA, 30 bp, Artificial Sequence
  Synthetic oligonucleotide
gtgtcgggaccgcctaaacaaccagactct

SEQ ID NO: 365915 - DNA, 30 bp, Artificial Sequence
  Synthetic oligonucleotide
gttcggcgtttgtcatgggataaggactct

SEQ ID NO: 365916 - DNA, 30 bp, Artificial Sequence
  Synthetic oligonucleotide
cgattagggcggtgcaagcgataggactct

SEQ ID NO: 365917 - DNA, 30 bp, Artificial Sequence
  Synthetic oligonucleotide
aaaagagcaccggatagtgcagcggactct

SEQ ID NO: 365918 - DNA, 30 bp, Artificial Sequence
  Synthetic oligonucleotide
actgcaagagagtgttgtccacatgactct

SEQ ID NO: 365919 - DNA, 30 bp, Artificial Sequence
  Synthetic oligonucleotide
gcctatccccaggaatgttagcgtgactct

SEQ ID NO: 365920 - DNA, 30 bp, Artificial Sequence
  Synthetic oligonucleotide
ttgttagtctatatcccttcatcatactct

SEQ ID NO: 365921 - DNA, 30 bp, Artificial Sequence
  Synthetic oligonucleotide
aatggcgattcgagataatatagatactct

SEQ ID NO: 365922 - DNA, 30 bp, Artificial Sequence
  Synthetic oligonucleotide
tgtacgaagggaaggctgagcctatactct

SEQ ID NO: 365923 - DNA, 30 bp, Artificial Sequence
  Synthetic oligonucleotide
gatcacttggtacggaagcagttctactct

SEQ ID NO: 365924 - DNA, 30 bp, Artificial Sequence
  Synthetic oligonucleotide
gatctaaccgccgggatgggcgtgtactct

SEQ ID NO: 365925 - DNA, 30 bp, Artificial Sequence
  Synthetic oligonucleotide
gcccaaatttagacgcacatggtaacctct

SEQ ID NO: 365926 - DNA, 30 bp, Artificial Sequence
  Synthetic oligonucleotide
gaggggttttagtttttattaagcacctct

SEQ ID NO: 365927 - DNA, 30 bp, Artificial Sequence
  Synthetic oligonucleotide
gcgcacattggataagatgcgcggacctct

SEQ ID NO: 365928 - DNA, 30 bp, Artificial Sequence
  Synthetic oligonucleotide
gtaagaggacccaggccgttgttgacctct

SEQ ID NO: 365929 - DNA, 30 bp, Artificial Sequence
  Synthetic oligonucleotide
ctcgcaggcgagaaaaatcgtaatccctct

SEQ ID NO: 365930 - DNA, 30 bp, Artificial Sequence
  Synthetic oligonucleotide
tagcgttcaccggtttgccgctctccctct

SEQ ID NO: 365931 - DNA, 30 bp, Artificial Sequence
  Synthetic oligonucleotide
ttggcccaatgccgcgctgcgtgtccctct

SEQ ID NO: 365932 - DNA, 30 bp, Artificial Sequence
  Synthetic oligonucleotide
gcctgagccatcatgttggtcattccctct

SEQ ID NO: 365933 - DNA, 30 bp, Artificial Sequence
  Synthetic oligonucleotide
gttagcccatgggtgtagacaaaagcctct

SEQ ID NO: 365934 - DNA, 30 bp, Artificial Sequence
  Synthetic oligonucleotide
ggtaacgaagctaacgttcattacgcctct

SEQ ID NO: 365935 - DNA, 30 bp, Artificial Sequence
  Synthetic oligonucleotide
gacccaaaacgtttcgcaagaagcgcctct

SEQ ID NO: 365936 - DNA, 30 bp, Artificial Sequence
  Synthetic oligonucleotide
aaggtgatgtgtgcgaatacgggcgcctct

SEQ ID NO: 365937 - DNA, 30 bp, Artificial Sequence
  Synthetic oligonucleotide
gcaactactgggatgccgtgaaaggcctct

SEQ ID NO: 365938 - DNA, 30 bp, Artificial Sequence
  Synthetic oligonucleotide
cacgtagctatagccgaactataggcctct

SEQ ID NO: 365939 - DNA, 30 bp, Artificial Sequence
  Synthetic oligonucleotide
aagcacacgagggctgtccagacctcctct

SEQ ID NO: 365940 - DNA, 30 bp, Artificial Sequence
  Synthetic oligonucleotide
caagtcttctccaggcaggtcgcctcctct

SEQ ID NO: 365941 - DNA, 30 bp, Artificial Sequence
  Synthetic oligonucleotide
gatgcgtgagaatacgatgactcctcctct

SEQ ID NO: 365942 - DNA, 30 bp, Artificial Sequence
  Synthetic oligonucleotide
ccagttccagtataatgctcaccgtcctct

SEQ ID NO: 365943 - DNA, 30 bp, Artificial Sequence
  Synthetic oligonucleotide
gatagcttgatgtgtagggtaaggtcctct

SEQ ID NO: 365944 - DNA, 30 bp, Artificial Sequence
  Synthetic oligonucleotide
tcaactctctaaagccctaatagttcctct

SEQ ID NO: 365945 - DNA, 30 bp, Artificial Sequence
  Synthetic oligonucleotide
tgcaattaccccgaagctcgcttaagctct

SEQ ID NO: 365946 - DNA, 30 bp, Artificial Sequence
  Synthetic oligonucleotide
gcgaggtagacgattgtgcgtatgagctct

SEQ ID NO: 365947 - DNA, 30 bp, Artificial Sequence
  Synthetic oligonucleotide
ttaacctccgggaatatataagttagctct

SEQ ID NO: 365948 - DNA, 30 bp, Artificial Sequence
  Synthetic oligonucleotide
gggaattagaaacgggttccaatacgctct

SEQ ID NO: 365949 - DNA, 30 bp, Artificial Sequence
  Synthetic oligonucleotide
catagaggccgtattgaatagttacgctct

SEQ ID NO: 365950 - DNA, 30 bp, Artificial Sequence
  Synthetic oligonucleotide
tgtccaatattctgcaatggataccgctct

SEQ ID NO: 365951 - DNA, 31 bp, Artificial Sequence
  Synthetic oligonucleotide
tcaagtaattccgtacatgtagcagcgctct

SEQ ID NO: 365952 - DNA, 30 bp, Artificial Sequence
  Synthetic oligonucleotide
gaaaaacctcataacaaacggaaaggctct

SEQ ID NO: 365953 - DNA, 30 bp, Artificial Sequence
  Synthetic oligonucleotide
agtgagagagttgatgtcatcccgggctct

SEQ ID NO: 365954 - DNA, 30 bp, Artificial Sequence
  Synthetic oligonucleotide
attcgaagcgccaggcgctacgtgggctct

SEQ ID NO: 365955 - DNA, 30 bp, Artificial Sequence
  Synthetic oligonucleotide
ttaccgattaaaaatagcgaacatggctct

SEQ ID NO: 365956 - DNA, 30 bp, Artificial Sequence
  Synthetic oligonucleotide
ccttgaaaaggagcacctccgcgtggctct

SEQ ID NO: 365957 - DNA, 30 bp, Artificial Sequence
  Synthetic oligonucleotide
aggcgctcgcagggaggttgatgatgctct

SEQ ID NO: 365958 - DNA, 30 bp, Artificial Sequence
  Synthetic oligonucleotide
aaatacaggactcatcgaccttcgtgctct

SEQ ID NO: 365959 - DNA, 30 bp, Artificial Sequence
  Synthetic oligonucleotide
aacaaatctcactcggacagagtgtgctct

SEQ ID NO: 365960 - DNA, 30 bp, Artificial Sequence
  Synthetic oligonucleotide
ctcaattaatttagtattaaaccttgctct

SEQ ID NO: 365961 - DNA, 30 bp, Artificial Sequence
  Synthetic oligonucleotide
ttggttgcaaaaatgtatacaagttgctct

SEQ ID NO: 365962 - DNA, 30 bp, Artificial Sequence
  Synthetic oligonucleotide
aagatcaccgtccgcgccttactttgctct

SEQ ID NO: 365963 - DNA, 30 bp, Artificial Sequence
  Synthetic oligonucleotide
atctaatgatacaaaagtcattaaatctct

SEQ ID NO: 365964 - DNA, 30 bp, Artificial Sequence
  Synthetic oligonucleotide
tactgggttgacgtggtaagggacatctct

SEQ ID NO: 365965 - DNA, 30 bp, Artificial Sequence
  Synthetic oligonucleotide
ttgctctggtgtgcgaaatagtacatctct

SEQ ID NO: 365966 - DNA, 30 bp, Artificial Sequence
  Synthetic oligonucleotide
atcatatcaacaaaaagatcttccatctct

SEQ ID NO: 365967 - DNA, 29 bp, Artificial Sequence
  Synthetic oligonucleotide
cgggccgggactcccgccagcgcatctct

SEQ ID NO: 365968 - DNA, 30 bp, Artificial Sequence
  Synthetic oligonucleotide
aacacaatatggccaattgattgcatctct

SEQ ID NO: 365969 - DNA, 30 bp, Artificial Sequence
  Synthetic oligonucleotide
catacctgagcagaagacttcgtcatctct

SEQ ID NO: 365970 - DNA, 30 bp, Artificial Sequence
  Synthetic oligonucleotide
agagacgacgtcctctcaaatgagatctct

SEQ ID NO: 365971 - DNA, 30 bp, Artificial Sequence
  Synthetic oligonucleotide
gatgcacgtctgggcagcgcatagatctct

SEQ ID NO: 365972 - DNA, 30 bp, Artificial Sequence
  Synthetic oligonucleotide
cctatcctaggataggcactagatatctct

SEQ ID NO: 365973 - DNA, 30 bp, Artificial Sequence
  Synthetic oligonucleotide
atcgtctttatctttatataggatatctct

SEQ ID NO: 365974 - DNA, 30 bp, Artificial Sequence
  Synthetic oligonucleotide
tagaccttctgcgggcccggtcgcctctct

SEQ ID NO: 365975 - DNA, 30 bp, Artificial Sequence
  Synthetic oligonucleotide
gtgaattagtgagtgttaggttcgctctct

SEQ ID NO: 365976 - DNA, 30 bp, Artificial Sequence
  Synthetic oligonucleotide
cccagtgtctgtttcctatgctctctctct

SEQ ID NO: 365977 - DNA, 30 bp, Artificial Sequence
  Synthetic oligonucleotide
ccaggaaaaatctagggttgcgttctctct

SEQ ID NO: 365978 - DNA, 30 bp, Artificial Sequence
  Synthetic oligonucleotide
cggtgagcacggttactaggatttctctct

SEQ ID NO: 365979 - DNA, 30 bp, Artificial Sequence
  Synthetic oligonucleotide
ctgataagttctattccttgagcagtctct

SEQ ID NO: 365980 - DNA, 30 bp, Artificial Sequence
  Synthetic oligonucleotide
tcccgacatcttggacaactggcagtctct

SEQ ID NO: 365981 - DNA, 30 bp, Artificial Sequence
  Synthetic oligonucleotide
tatcaagtatccacctttcattgagtctct

SEQ ID NO: 365982 - DNA, 30 bp, Artificial Sequence
  Synthetic oligonucleotide
gcaagcttgggatgagacactaacgtctct

SEQ ID NO: 365983 - DNA, 30 bp, Artificial Sequence
  Synthetic oligonucleotide
aacctcaaagggtagcaatcgcatgtctct

SEQ ID NO: 365984 - DNA, 30 bp, Artificial Sequence
  Synthetic oligonucleotide
ccagttgtgctagtgacagacaaattctct

SEQ ID NO: 365985 - DNA, 30 bp, Artificial Sequence
  Synthetic oligonucleotide
ggtggcctgcaaagagcggtggtattctct

SEQ ID NO: 365986 - DNA, 30 bp, Artificial Sequence
  Synthetic oligonucleotide
gctaaagaacatctaaaaattgtattctct

SEQ ID NO: 365987 - DNA, 30 bp, Artificial Sequence
  Synthetic oligonucleotide
ggaggacatggaactccgcatgcgttctct

SEQ ID NO: 365988 - DNA, 30 bp, Artificial Sequence
  Synthetic oligonucleotide
ttaatgtatccgcaacgtcacaggttctct

SEQ ID NO: 365989 - DNA, 30 bp, Artificial Sequence
  Synthetic oligonucleotide
aagtcacactacgaatatttaaaaaagtct

SEQ ID NO: 365990 - DNA, 30 bp, Artificial Sequence
  Synthetic oligonucleotide
ataatagacagtgcgtatagtcaaaagtct

SEQ ID NO: 365991 - DNA, 30 bp, Artificial Sequence
  Synthetic oligonucleotide
tgaggcatgaattttagcataacaaagtct

SEQ ID NO: 365992 - DNA, 30 bp, Artificial Sequence
  Synthetic oligonucleotide
cttaacgatgttctggcgtcagcaaagtct

SEQ ID NO: 365993 - DNA, 30 bp, Artificial Sequence
  Synthetic oligonucleotide
gctgattcctggtctgtccaaaccaagtct

SEQ ID NO: 365994 - DNA, 30 bp, Artificial Sequence
  Synthetic oligonucleotide
ttgtccgtgctgcttagtgttacgaagtct

SEQ ID NO: 365995 - DNA, 30 bp, Artificial Sequence
  Synthetic oligonucleotide
cgttcataacatgacggaaggcggaagtct

SEQ ID NO: 365996 - DNA, 30 bp, Artificial Sequence
  Synthetic oligonucleotide
acacaacttcaaacacgggcttggaagtct

SEQ ID NO: 365997 - DNA, 30 bp, Artificial Sequence
  Synthetic oligonucleotide
gcagtctacgggcgttctgacacacagtct

SEQ ID NO: 365998 - DNA, 30 bp, Artificial Sequence
  Synthetic oligonucleotide
aattgatgcatagctcacacgttacagtct

SEQ ID NO: 365999 - DNA, 30 bp, Artificial Sequence
  Synthetic oligonucleotide
cagaacaagccccaaagacgtggccagtct

SEQ ID NO: 366000 - DNA, 30 bp, Artificial Sequence
  Synthetic oligonucleotide
gtgcacctggtacgcgtctagttccagtct

SEQ ID NO: 366001 - DNA, 30 bp, Artificial Sequence
  Synthetic oligonucleotide
cgtctccttatagtatgtagtaatcagtct

SEQ ID NO: 366002 - DNA, 30 bp, Artificial Sequence
  Synthetic oligonucleotide
atagatgtatatggagaacctgcagagtct

SEQ ID NO: 366003 - DNA, 30 bp, Artificial Sequence
  Synthetic oligonucleotide
tgcgcgcattaggaagttttgggagagtct

SEQ ID NO: 366004 - DNA, 30 bp, Artificial Sequence
  Synthetic oligonucleotide
taagttgtgaagaactcgagttaggagtct

SEQ ID NO: 366005 - DNA, 30 bp, Artificial Sequence
  Synthetic oligonucleotide
gtcttacgtccatagagcgttacggagtct

SEQ ID NO: 366006 - DNA, 30 bp, Artificial Sequence
  Synthetic oligonucleotide
gtaccgtggccgcgctaattatgggagtct

SEQ ID NO: 366007 - DNA, 30 bp, Artificial Sequence
  Synthetic oligonucleotide
ggccaacattagaagatcgcgtaatagtct

SEQ ID NO: 366008 - DNA, 30 bp, Artificial Sequence
  Synthetic oligonucleotide
ttccctgacgcatgtcgtacttaatagtct

SEQ ID NO: 366009 - DNA, 30 bp, Artificial Sequence
  Synthetic oligonucleotide
tccgtcaccccattgtaatgacactagtct

SEQ ID NO: 366010 - DNA, 30 bp, Artificial Sequence
  Synthetic oligonucleotide
ataggccggccagcagggaacgtctagtct

SEQ ID NO: 366011 - DNA, 30 bp, Artificial Sequence
  Synthetic oligonucleotide
gttcattctggtcatgtcagcgagtagtct

SEQ ID NO: 366012 - DNA, 30 bp, Artificial Sequence
  Synthetic oligonucleotide
ttgaatgtggatccgcgaaaccggtagtct

SEQ ID NO: 366013 - DNA, 30 bp, Artificial Sequence
  Synthetic oligonucleotide
gctatatgacaaatgatccggctgtagtct

SEQ ID NO: 366014 - DNA, 30 bp, Artificial Sequence
  Synthetic oligonucleotide
tccttgggattcttgaggtatatcacgtct

SEQ ID NO: 366015 - DNA, 30 bp, Artificial Sequence
  Synthetic oligonucleotide
ttgaaagcgtgtccgaactacgggacgtct

SEQ ID NO: 366016 - DNA, 30 bp, Artificial Sequence
  Synthetic oligonucleotide
aatggatcataccgcttaaagtggacgtct

SEQ ID NO: 366017 - DNA, 30 bp, Artificial Sequence
  Synthetic oligonucleotide
tactattgtggttctagaataaatacgtct

SEQ ID NO: 366018 - DNA, 30 bp, Artificial Sequence
  Synthetic oligonucleotide
gtatggagatgaacctgaccgtatacgtct

SEQ ID NO: 366019 - DNA, 30 bp, Artificial Sequence
  Synthetic oligonucleotide
aaatgtatttcgtgaattagagttacgtct

SEQ ID NO: 366020 - DNA, 30 bp, Artificial Sequence
  Synthetic oligonucleotide
ttttgcagtttaagtctgtttcagccgtct

SEQ ID NO: 366021 - DNA, 30 bp, Artificial Sequence
  Synthetic oligonucleotide
agtccgggtcgcgggttggctaatccgtct

SEQ ID NO: 366022 - DNA, 30 bp, Artificial Sequence
  Synthetic oligonucleotide
catttctcacgttagtacgctagagcgtct

SEQ ID NO: 366023 - DNA, 30 bp, Artificial Sequence
  Synthetic oligonucleotide
tctgcccaacctgggtgtgtgggtgcgtct

SEQ ID NO: 366024 - DNA, 30 bp, Artificial Sequence
  Synthetic oligonucleotide
gcagataccgtatcaaaaagcatgtcgtct

SEQ ID NO: 366025 - DNA, 30 bp, Artificial Sequence
  Synthetic oligonucleotide
aatttgtatataaggaaggatgaaaggtct

SEQ ID NO: 366026 - DNA, 30 bp, Artificial Sequence
  Synthetic oligonucleotide
aagggaccaattgttacaccgggaaggtct

SEQ ID NO: 366027 - DNA, 30 bp, Artificial Sequence
  Synthetic oligonucleotide
ttcgcgggtgtagcagtcaccgtcaggtct

SEQ ID NO: 366028 - DNA, 30 bp, Artificial Sequence
  Synthetic oligonucleotide
gtcgtgggatttggtgagtcattcaggtct

SEQ ID NO: 366029 - DNA, 30 bp, Artificial Sequence
  Synthetic oligonucleotide
aagtatagttcaattatgaccgttaggtct

SEQ ID NO: 366030 - DNA, 30 bp, Artificial Sequence
  Synthetic oligonucleotide
gagatacagggttcttggaaatttaggtct

SEQ ID NO: 366031 - DNA, 30 bp, Artificial Sequence
  Synthetic oligonucleotide
cggaatgacgaagttaactactcacggtct

SEQ ID NO: 366032 - DNA, 30 bp, Artificial Sequence
  Synthetic oligonucleotide
cggaaacttcaaaggttgcacaaccggtct

SEQ ID NO: 366033 - DNA, 30 bp, Artificial Sequence
  Synthetic oligonucleotide
cctatgcctcccttacaaaagccccggtct

SEQ ID NO: 366034 - DNA, 30 bp, Artificial Sequence
  Synthetic oligonucleotide
ggctgttaaaaaatggaggcctcccggtct

SEQ ID NO: 366035 - DNA, 30 bp, Artificial Sequence
  Synthetic oligonucleotide
cgggcaatattccgccttggctgccggtct

SEQ ID NO: 366036 - DNA, 30 bp, Artificial Sequence
  Synthetic oligonucleotide
gtatacgtcaaccgtatagtcttccggtct

SEQ ID NO: 366037 - DNA, 30 bp, Artificial Sequence
  Synthetic oligonucleotide
ctatctgataaacccactgacctagggtct

SEQ ID NO: 366038 - DNA, 30 bp, Artificial Sequence
  Synthetic oligonucleotide
tattcttagtattcgcttcgtttagggtct

SEQ ID NO: 366039 - DNA, 30 bp, Artificial Sequence
  Synthetic oligonucleotide
ggaagaagggaggccttgtcacaggggtct

SEQ ID NO: 366040 - DNA, 30 bp, Artificial Sequence
  Synthetic oligonucleotide
gtgtacttaggggccacgaagtcggggtct

SEQ ID NO: 366041 - DNA, 30 bp, Artificial Sequence
  Synthetic oligonucleotide
ttcttcccggcatagaaggggggggggtct

SEQ ID NO: 366042 - DNA, 30 bp, Artificial Sequence
  Synthetic oligonucleotide
cccgtagtcagatacacggggcgtgggtct

SEQ ID NO: 366043 - DNA, 30 bp, Artificial Sequence
  Synthetic oligonucleotide
tattctagctaatgtgcagattaatggtct

SEQ ID NO: 366044 - DNA, 30 bp, Artificial Sequence
  Synthetic oligonucleotide
ttattattgcaacgatcctttcactggtct

SEQ ID NO: 366045 - DNA, 30 bp, Artificial Sequence
  Synthetic oligonucleotide
ccacgcacgcaggcgaagtacgactggtct

SEQ ID NO: 366046 - DNA, 30 bp, Artificial Sequence
  Synthetic oligonucleotide
tggaattactcaatgtggaaccgctggtct

SEQ ID NO: 366047 - DNA, 30 bp, Artificial Sequence
  Synthetic oligonucleotide
tgcgccccccgtaataccgaaatctggtct

SEQ ID NO: 366048 - DNA, 30 bp, Artificial Sequence
  Synthetic oligonucleotide
gcagcagaaagagtagcctctttgtggtct

SEQ ID NO: 366049 - DNA, 31 bp, Artificial Sequence
  Synthetic oligonucleotide
gtcaatatcattagctttctattgaatgtct

SEQ ID NO: 366050 - DNA, 30 bp, Artificial Sequence
  Synthetic oligonucleotide
cagagcggggccatgatcagaaccatgtct

SEQ ID NO: 366051 - DNA, 30 bp, Artificial Sequence
  Synthetic oligonucleotide
gctcgcgcgaaaaagtattacactatgtct

SEQ ID NO: 366052 - DNA, 30 bp, Artificial Sequence
  Synthetic oligonucleotide
cgggggccgcaggcaaaactatagctgtct

SEQ ID NO: 366053 - DNA, 30 bp, Artificial Sequence
  Synthetic oligonucleotide
tacgccaggagaccgcttgttcctctgtct

SEQ ID NO: 366054 - DNA, 30 bp, Artificial Sequence
  Synthetic oligonucleotide
gctgttttggaccctgcacaaaaagtgtct

SEQ ID NO: 366055 - DNA, 30 bp, Artificial Sequence
  Synthetic oligonucleotide
cactagctggcgctattttaacgagtgtct

SEQ ID NO: 366056 - DNA, 30 bp, Artificial Sequence
  Synthetic oligonucleotide
cgggtattacaccaagttgtgcgagtgtct

SEQ ID NO: 366057 - DNA, 30 bp, Artificial Sequence
  Synthetic oligonucleotide
atccggaaaggagcactagtgtcggtgtct

SEQ ID NO: 366058 - DNA, 30 bp, Artificial Sequence
  Synthetic oligonucleotide
agtgtgaggaggaaagttagattggtgtct

SEQ ID NO: 366059 - DNA, 30 bp, Artificial Sequence
  Synthetic oligonucleotide
ggccgggctgtacttcagtgattggtgtct

SEQ ID NO: 366060 - DNA, 30 bp, Artificial Sequence
  Synthetic oligonucleotide
agtacatacttaaggagtggacgcttgtct

SEQ ID NO: 366061 - DNA, 30 bp, Artificial Sequence
  Synthetic oligonucleotide
tccacatgtgcgtcgcccgcataaaattct

SEQ ID NO: 366062 - DNA, 30 bp, Artificial Sequence
  Synthetic oligonucleotide
agcgcttccctggcaacatatgtaaattct

SEQ ID NO: 366063 - DNA, 30 bp, Artificial Sequence
  Synthetic oligonucleotide
gagggtatcgaataatctcgagacaattct

SEQ ID NO: 366064 - DNA, 30 bp, Artificial Sequence
  Synthetic oligonucleotide
tcagcatgtctcttaatttggtagaattct

SEQ ID NO: 366065 - DNA, 30 bp, Artificial Sequence
  Synthetic oligonucleotide
cgcctagaccccagtcagagatataattct

SEQ ID NO: 366066 - DNA, 30 bp, Artificial Sequence
  Synthetic oligonucleotide
tatcccccacctaacggggtgaaacattct

SEQ ID NO: 366067 - DNA, 30 bp, Artificial Sequence
  Synthetic oligonucleotide
gagcatcgagcgaaagtgctaacacattct

SEQ ID NO: 366068 - DNA, 30 bp, Artificial Sequence
  Synthetic oligonucleotide
tatcggatctcaggtcttgagagacattct

SEQ ID NO: 366069 - DNA, 30 bp, Artificial Sequence
  Synthetic oligonucleotide
gttagatcagcgaccgtctaattacattct

SEQ ID NO: 366070 - DNA, 30 bp, Artificial Sequence
  Synthetic oligonucleotide
gtccgttggtggcagaactcagaccattct

SEQ ID NO: 366071 - DNA, 30 bp, Artificial Sequence
  Synthetic oligonucleotide
cccgcgccgaccgattatgccctccattct

SEQ ID NO: 366072 - DNA, 30 bp, Artificial Sequence
  Synthetic oligonucleotide
tagtccggaggcccggtaactgcgcattct

SEQ ID NO: 366073 - DNA, 30 bp, Artificial Sequence
  Synthetic oligonucleotide
cacttaattacgggctgcataatgcattct

SEQ ID NO: 366074 - DNA, 30 bp, Artificial Sequence
  Synthetic oligonucleotide
taccacgggcattccagtaacaaggattct

SEQ ID NO: 366075 - DNA, 30 bp, Artificial Sequence
  Synthetic oligonucleotide
caccgggcatgcagttacttcagggattct

SEQ ID NO: 366076 - DNA, 30 bp, Artificial Sequence
  Synthetic oligonucleotide
agacgcctggggctggtactacttgattct

SEQ ID NO: 366077 - DNA, 30 bp, Artificial Sequence
  Synthetic oligonucleotide
cgacgccaacgttcataatctcgatattct

SEQ ID NO: 366078 - DNA, 30 bp, Artificial Sequence
  Synthetic oligonucleotide
ctccgttgagtcaggggagattgctattct

SEQ ID NO: 366079 - DNA, 30 bp, Artificial Sequence
  Synthetic oligonucleotide
agaagaagtccataattccccgagtattct

SEQ ID NO: 366080 - DNA, 30 bp, Artificial Sequence
  Synthetic oligonucleotide
acttaagtctttgagctttgtacgtattct

SEQ ID NO: 366081 - DNA, 30 bp, Artificial Sequence
  Synthetic oligonucleotide
gttggctcatgcggattttatgggtattct

SEQ ID NO: 366082 - DNA, 30 bp, Artificial Sequence
  Synthetic oligonucleotide
gaaccctcgcattcacttcagatgtattct

SEQ ID NO: 366083 - DNA, 30 bp, Artificial Sequence
  Synthetic oligonucleotide
tacggtttccccagaatggagggttattct

SEQ ID NO: 366084 - DNA, 30 bp, Artificial Sequence
  Synthetic oligonucleotide
ctcacgagggcgaaagcgtcatcaacttct

SEQ ID NO: 366085 - DNA, 30 bp, Artificial Sequence
  Synthetic oligonucleotide
caagtaggagtatatccgctgagaacttct

SEQ ID NO: 366086 - DNA, 30 bp, Artificial Sequence
  Synthetic oligonucleotide
gagtatcataatactactgctgtaacttct

SEQ ID NO: 366087 - DNA, 30 bp, Artificial Sequence
  Synthetic oligonucleotide
ggctgtagttcaagggatttgaacacttct

SEQ ID NO: 366088 - DNA, 30 bp, Artificial Sequence
  Synthetic oligonucleotide
atattgacaggggtaaacagcgatacttct

SEQ ID NO: 366089 - DNA, 30 bp, Artificial Sequence
  Synthetic oligonucleotide
ttaggtgtctctcataggttgcttacttct

SEQ ID NO: 366090 - DNA, 30 bp, Artificial Sequence
  Synthetic oligonucleotide
atcgactctgagccctaggtagaaccttct

SEQ ID NO: 366091 - DNA, 30 bp, Artificial Sequence
  Synthetic oligonucleotide
ctaacgtcttaggcggagcggttagcttct

SEQ ID NO: 366092 - DNA, 30 bp, Artificial Sequence
  Synthetic oligonucleotide
gcagtatgccgtgcgtgttattgcgcttct

SEQ ID NO: 366093 - DNA, 30 bp, Artificial Sequence
  Synthetic oligonucleotide
gtcaaaagcgtgaagcgacgaatcgcttct

SEQ ID NO: 366094 - DNA, 30 bp, Artificial Sequence
  Synthetic oligonucleotide
ttcagtagcggtgcaacgttaatcgcttct

SEQ ID NO: 366095 - DNA, 30 bp, Artificial Sequence
  Synthetic oligonucleotide
cgttggaattaacgctctgacttggcttct

SEQ ID NO: 366096 - DNA, 30 bp, Artificial Sequence
  Synthetic oligonucleotide
gtaagaaagccgttcaagatacgtgcttct

SEQ ID NO: 366097 - DNA, 30 bp, Artificial Sequence
  Synthetic oligonucleotide
tgagttgtcactacacccctatttgcttct

SEQ ID NO: 366098 - DNA, 30 bp, Artificial Sequence
  Synthetic oligonucleotide
cgacatgatgaggttcacatttcatcttct

SEQ ID NO: 366099 - DNA, 30 bp, Artificial Sequence
  Synthetic oligonucleotide
acttgtgagggtacaagaatacagtcttct

SEQ ID NO: 366100 - DNA, 30 bp, Artificial Sequence
  Synthetic oligonucleotide
agtcagggtaagggaccgtactcttcttct

SEQ ID NO: 366101 - DNA, 30 bp, Artificial Sequence
  Synthetic oligonucleotide
cctgctagaacaaggaccccgtaaagttct

SEQ ID NO: 366102 - DNA, 30 bp, Artificial Sequence
  Synthetic oligonucleotide
tccttgaatcaccaatcacagacaagttct

SEQ ID NO: 366103 - DNA, 30 bp, Artificial Sequence
  Synthetic oligonucleotide
accaatcacacaatcgagactagaagttct

SEQ ID NO: 366104 - DNA, 30 bp, Artificial Sequence
  Synthetic oligonucleotide
atcgttctgattggtagtattcacagttct

SEQ ID NO: 366105 - DNA, 30 bp, Artificial Sequence
  Synthetic oligonucleotide
acaaggggctacctctgtgactacagttct

SEQ ID NO: 366106 - DNA, 30 bp, Artificial Sequence
  Synthetic oligonucleotide
attcaaaggtatttaaactggctcagttct

SEQ ID NO: 366107 - DNA, 30 bp, Artificial Sequence
  Synthetic oligonucleotide
catcaggacagttactgtcctaggagttct

SEQ ID NO: 366108 - DNA, 30 bp, Artificial Sequence
  Synthetic oligonucleotide
gtaattggtggagatgaatagcggagttct

SEQ ID NO: 366109 - DNA, 30 bp, Artificial Sequence
  Synthetic oligonucleotide
ggatgacggaaagctttattttatagttct

SEQ ID NO: 366110 - DNA, 30 bp, Artificial Sequence
  Synthetic oligonucleotide
cggtagcccgatctactagggcaacgttct

SEQ ID NO: 366111 - DNA, 30 bp, Artificial Sequence
  Synthetic oligonucleotide
tgagtgatggctgccttgcacgagcgttct

SEQ ID NO: 366112 - DNA, 30 bp, Artificial Sequence
  Synthetic oligonucleotide
gagcggcgtccaccgagatttatgcgttct

SEQ ID NO: 366113 - DNA, 30 bp, Artificial Sequence
  Synthetic oligonucleotide
taggaactgacatctgttttttcaggttct

SEQ ID NO: 366114 - DNA, 30 bp, Artificial Sequence
  Synthetic oligonucleotide
ccactgctgcatcagatcgaaggaggttct

SEQ ID NO: 366115 - DNA, 30 bp, Artificial Sequence
  Synthetic oligonucleotide
atgctccaggtgtaggcgactgacggttct

SEQ ID NO: 366116 - DNA, 30 bp, Artificial Sequence
  Synthetic oligonucleotide
ggcgtcagagcgcttgggaaaacgggttct

SEQ ID NO: 366117 - DNA, 30 bp, Artificial Sequence
  Synthetic oligonucleotide
tctcgagccttgcaaatcggcatgggttct

SEQ ID NO: 366118 - DNA, 30 bp, Artificial Sequence
  Synthetic oligonucleotide
aaccagtatgtttagtgtagagatggttct

SEQ ID NO: 366119 - DNA, 30 bp, Artificial Sequence
  Synthetic oligonucleotide
aaagtcatctatcttggagaaactggttct

SEQ ID NO: 366120 - DNA, 30 bp, Artificial Sequence
  Synthetic oligonucleotide
tcatctacatcgcgtatcgaacgatgttct

SEQ ID NO: 366121 - DNA, 30 bp, Artificial Sequence
  Synthetic oligonucleotide
ctctaccacgacgcgtagtaacagtgttct

SEQ ID NO: 366122 - DNA, 30 bp, Artificial Sequence
  Synthetic oligonucleotide
ctccgagacagcctggcttctcgttgttct

SEQ ID NO: 366123 - DNA, 30 bp, Artificial Sequence
  Synthetic oligonucleotide
cgttaacatattactcaaagctgaatttct

SEQ ID NO: 366124 - DNA, 30 bp, Artificial Sequence
  Synthetic oligonucleotide
ggcactcgcacttgaacatgcgagatttct

SEQ ID NO: 366125 - DNA, 30 bp, Artificial Sequence
  Synthetic oligonucleotide
agacacgaataaagccatcgcacgatttct

SEQ ID NO: 366126 - DNA, 30 bp, Artificial Sequence
  Synthetic oligonucleotide
ccgatcttacgaagaggaaaggatatttct

SEQ ID NO: 366127 - DNA, 30 bp, Artificial Sequence
  Synthetic oligonucleotide
acctctcttgcggagggacgtcttatttct

SEQ ID NO: 366128 - DNA, 30 bp, Artificial Sequence
  Synthetic oligonucleotide
tctttcagcgtttctcgtgccactctttct

SEQ ID NO: 366129 - DNA, 30 bp, Artificial Sequence
  Synthetic oligonucleotide
ctcaacatccgctagctagaaagtctttct

SEQ ID NO: 366130 - DNA, 30 bp, Artificial Sequence
  Synthetic oligonucleotide
gtagtcgtaccatagcctttacgtctttct

SEQ ID NO: 366131 - DNA, 30 bp, Artificial Sequence
  Synthetic oligonucleotide
acatcacatgcggcttgtcaaattctttct

SEQ ID NO: 366132 - DNA, 30 bp, Artificial Sequence
  Synthetic oligonucleotide
ggcaagcccatgccttgttcttttctttct

SEQ ID NO: 366133 - DNA, 30 bp, Artificial Sequence
  Synthetic oligonucleotide
aatggaatggggcggggctttgcagtttct

SEQ ID NO: 366134 - DNA, 31 bp, Artificial Sequence
  Synthetic oligonucleotide
ccagaactcagaagccccgatagtagtttct

SEQ ID NO: 366135 - DNA, 30 bp, Artificial Sequence
  Synthetic oligonucleotide
ggagtggagaagaaggctatggccgtttct

SEQ ID NO: 366136 - DNA, 30 bp, Artificial Sequence
  Synthetic oligonucleotide
ccgatagattcgtaaggcggccaggtttct

SEQ ID NO: 366137 - DNA, 30 bp, Artificial Sequence
  Synthetic oligonucleotide
aacggataccaatggactgatggcttttct

SEQ ID NO: 366138 - DNA, 30 bp, Artificial Sequence
  Synthetic oligonucleotide
atcagcagactttccgaaatccagttttct

SEQ ID NO: 366139 - DNA, 30 bp, Artificial Sequence
  Synthetic oligonucleotide
cgatgttcggatgtctaaaggaggttttct

SEQ ID NO: 366140 - DNA, 30 bp, Artificial Sequence
  Synthetic oligonucleotide
tgcaggtcccatctgtcacacgctttttct

SEQ ID NO: 366141 - DNA, 30 bp, Artificial Sequence
  Synthetic oligonucleotide
agaagcaccggtgaatgtaaccttttttct

SEQ ID NO: 366142 - DNA, 30 bp, Artificial Sequence
  Synthetic oligonucleotide
tccgctgcgggtactatatggcacaaaagt

SEQ ID NO: 366143 - DNA, 30 bp, Artificial Sequence
  Synthetic oligonucleotide
ctagctccgctagggagagccgacaaaagt

SEQ ID NO: 366144 - DNA, 30 bp, Artificial Sequence
  Synthetic oligonucleotide
tacgtactgtatggataatcttagaaaagt

SEQ ID NO: 366145 - DNA, 30 bp, Artificial Sequence
  Synthetic oligonucleotide
gctgtgggtacaaactgtaggtataaaagt

SEQ ID NO: 366146 - DNA, 30 bp, Artificial Sequence
  Synthetic oligonucleotide
taagccaggtctaacgtggtttgtaaaagt

SEQ ID NO: 366147 - DNA, 30 bp, Artificial Sequence
  Synthetic oligonucleotide
tggctgtaatgttcaggttctattaaaagt

SEQ ID NO: 366148 - DNA, 30 bp, Artificial Sequence
  Synthetic oligonucleotide
cggaggtgtcaacttgtttacaaacaaagt

SEQ ID NO: 366149 - DNA, 30 bp, Artificial Sequence
  Synthetic oligonucleotide
gaatcagggggcgagccgcagccccaaagt

SEQ ID NO: 366150 - DNA, 30 bp, Artificial Sequence
  Synthetic oligonucleotide
gcctcaatcgagcgaattactgggcaaagt

SEQ ID NO: 366151 - DNA, 30 bp, Artificial Sequence
  Synthetic oligonucleotide
ctcgctggatttacgatagttgtgcaaagt

SEQ ID NO: 366152 - DNA, 30 bp, Artificial Sequence
  Synthetic oligonucleotide
cccgcagtacatttcccttggcttcaaagt

SEQ ID NO: 366153 - DNA, 30 bp, Artificial Sequence
  Synthetic oligonucleotide
accggtagggtctcacatgatgttcaaagt

SEQ ID NO: 366154 - DNA, 30 bp, Artificial Sequence
  Synthetic oligonucleotide
ctgtggatattcgagttctgtaaagaaagt

SEQ ID NO: 366155 - DNA, 30 bp, Artificial Sequence
  Synthetic oligonucleotide
gcgggtttctgacgtaaggtaatagaaagt

SEQ ID NO: 366156 - DNA, 30 bp, Artificial Sequence
  Synthetic oligonucleotide
tgacccagggccagatctgtgcatgaaagt

SEQ ID NO: 366157 - DNA, 30 bp, Artificial Sequence
  Synthetic oligonucleotide
aaaacgtaatacggcaaaccatttgaaagt

SEQ ID NO: 366158 - DNA, 30 bp, Artificial Sequence
  Synthetic oligonucleotide
gtgtgaagcaccttgcgcctcaaataaagt

SEQ ID NO: 366159 - DNA, 30 bp, Artificial Sequence
  Synthetic oligonucleotide
gagtacgtgcagttggatcagaaataaagt

SEQ ID NO: 366160 - DNA, 30 bp, Artificial Sequence
  Synthetic oligonucleotide
acattgcgagtcagaacaagcgcataaagt

SEQ ID NO: 366161 - DNA, 30 bp, Artificial Sequence
  Synthetic oligonucleotide
attattcgtcgatccgtgagagtataaagt

SEQ ID NO: 366162 - DNA, 30 bp, Artificial Sequence
  Synthetic oligonucleotide
ttcggagagccgacggtatcatagtaaagt

SEQ ID NO: 366163 - DNA, 30 bp, Artificial Sequence
  Synthetic oligonucleotide
tgtgccaccacatttatgaggccgtaaagt

SEQ ID NO: 366164 - DNA, 30 bp, Artificial Sequence
  Synthetic oligonucleotide
gctggatctccatgtagtacagcttaaagt

SEQ ID NO: 366165 - DNA, 30 bp, Artificial Sequence
  Synthetic oligonucleotide
agatcaaaattcaaactctagggttaaagt

SEQ ID NO: 366166 - DNA, 30 bp, Artificial Sequence
  Synthetic oligonucleotide
agcgcaccaagccgcatggcactttaaagt

SEQ ID NO: 366167 - DNA, 30 bp, Artificial Sequence
  Synthetic oligonucleotide
gcaacaggcatcctccgaatgttttaaagt

SEQ ID NO: 366168 - DNA, 30 bp, Artificial Sequence
  Synthetic oligonucleotide
cccggttatggagcatgctccaaaacaagt

SEQ ID NO: 366169 - DNA, 30 bp, Artificial Sequence
  Synthetic oligonucleotide
gtacaatgacaatttgaatttataacaagt

SEQ ID NO: 366170 - DNA, 30 bp, Artificial Sequence
  Synthetic oligonucleotide
agtaagacactaaagtggcaactaacaagt

SEQ ID NO: 366171 - DNA, 30 bp, Artificial Sequence
  Synthetic oligonucleotide
acaatgatctgttaggggattcagacaagt

SEQ ID NO: 366172 - DNA, 30 bp, Artificial Sequence
  Synthetic oligonucleotide
gctttttatccgatgaccggcggtacaagt

SEQ ID NO: 366173 - DNA, 30 bp, Artificial Sequence
  Synthetic oligonucleotide
aaatcggtacgaataaataagtttacaagt

SEQ ID NO: 366174 - DNA, 30 bp, Artificial Sequence
  Synthetic oligonucleotide
ctcataccaccgtgcccagcgtttacaagt

SEQ ID NO: 366175 - DNA, 30 bp, Artificial Sequence
  Synthetic oligonucleotide
actactccggaaacgaccatttttacaagt

SEQ ID NO: 366176 - DNA, 30 bp, Artificial Sequence
  Synthetic oligonucleotide
ttgccccttcctgggtccaggacaccaagt

SEQ ID NO: 366177 - DNA, 30 bp, Artificial Sequence
  Synthetic oligonucleotide
atctatatcaaatctgaggctggaccaagt

SEQ ID NO: 366178 - DNA, 30 bp, Artificial Sequence
  Synthetic oligonucleotide
aggctgtataacagccatcgttgcccaagt

SEQ ID NO: 366179 - DNA, 30 bp, Artificial Sequence
  Synthetic oligonucleotide
ctacctcaatactctcctgagctgccaagt

SEQ ID NO: 366180 - DNA, 30 bp, Artificial Sequence
  Synthetic oligonucleotide
cgaattccgaccgtgtcagcggatccaagt

SEQ ID NO: 366181 - DNA, 30 bp, Artificial Sequence
  Synthetic oligonucleotide
ctataaccatgccttggtaaatatccaagt

SEQ ID NO: 366182 - DNA, 30 bp, Artificial Sequence
  Synthetic oligonucleotide
cagggaccgctaaatgtgatctttccaagt

SEQ ID NO: 366183 - DNA, 30 bp, Artificial Sequence
  Synthetic oligonucleotide
gacatggcctggtagcgcttatcagcaagt

SEQ ID NO: 366184 - DNA, 30 bp, Artificial Sequence
  Synthetic oligonucleotide
ccgcggtaattcaaaattttcagagcaagt

SEQ ID NO: 366185 - DNA, 30 bp, Artificial Sequence
  Synthetic oligonucleotide
gcgagccgcaggtgtgacaacttagcaagt

SEQ ID NO: 366186 - DNA, 30 bp, Artificial Sequence
  Synthetic oligonucleotide
ttgtgtccgactatatgggccctcgcaagt

SEQ ID NO: 366187 - DNA, 30 bp, Artificial Sequence
  Synthetic oligonucleotide
tttagcgcttctttagcaaagagggcaagt

SEQ ID NO: 366188 - DNA, 30 bp, Artificial Sequence
  Synthetic oligonucleotide
ataagaggtcggtagattgtctatgcaagt

SEQ ID NO: 366189 - DNA, 30 bp, Artificial Sequence
  Synthetic oligonucleotide
cacggatgttgactagctccttatgcaagt

SEQ ID NO: 366190 - DNA, 30 bp, Artificial Sequence
  Synthetic oligonucleotide
ggcattctagttttacgtataggtgcaagt

SEQ ID NO: 366191 - DNA, 30 bp, Artificial Sequence
  Synthetic oligonucleotide
aactaattgttagtgtctcggacatcaagt

SEQ ID NO: 366192 - DNA, 30 bp, Artificial Sequence
  Synthetic oligonucleotide
gtaacttgcgagtgattacttctatcaagt

SEQ ID NO: 366193 - DNA, 30 bp, Artificial Sequence
  Synthetic oligonucleotide
aggggtgacatgatctcatcgttttcaagt

SEQ ID NO: 366194 - DNA, 30 bp, Artificial Sequence
  Synthetic oligonucleotide
aaagagatgatatcatgtttagcaagaagt

SEQ ID NO: 366195 - DNA, 30 bp, Artificial Sequence
  Synthetic oligonucleotide
agtcgcgtagctggttaaatttacagaagt

SEQ ID NO: 366196 - DNA, 30 bp, Artificial Sequence
  Synthetic oligonucleotide
atgactaaattacgggaattattgagaagt

SEQ ID NO: 366197 - DNA, 30 bp, Artificial Sequence
  Synthetic oligonucleotide
taccattactacggcctctcgacacgaagt

SEQ ID NO: 366198 - DNA, 30 bp, Artificial Sequence
  Synthetic oligonucleotide
tcaacggggtcataaagtgctcgacgaagt

SEQ ID NO: 366199 - DNA, 30 bp, Artificial Sequence
  Synthetic oligonucleotide
agtaatggtgttattcctactgaccgaagt

SEQ ID NO: 366200 - DNA, 30 bp, Artificial Sequence
  Synthetic oligonucleotide
ttcacctggccgaggaggttcagccgaagt

SEQ ID NO: 366201 - DNA, 30 bp, Artificial Sequence
  Synthetic oligonucleotide
aacagtaacatttggcgtgaaactcgaagt

SEQ ID NO: 366202 - DNA, 30 bp, Artificial Sequence
  Synthetic oligonucleotide
tatctaaagactgtccaagggcttcgaagt

SEQ ID NO: 366203 - DNA, 30 bp, Artificial Sequence
  Synthetic oligonucleotide
tctgaccacaaatcacaatttcttcgaagt

SEQ ID NO: 366204 - DNA, 30 bp, Artificial Sequence
  Synthetic oligonucleotide
gtcattctcaacgctagaatgcgcggaagt

SEQ ID NO: 366205 - DNA, 30 bp, Artificial Sequence
  Synthetic oligonucleotide
gcggcacattgcggagttctgcgcggaagt

SEQ ID NO: 366206 - DNA, 30 bp, Artificial Sequence
  Synthetic oligonucleotide
tcaataagcgcatgcatcacaattggaagt

SEQ ID NO: 366207 - DNA, 30 bp, Artificial Sequence
  Synthetic oligonucleotide
ctatcttattcaattatatagcactgaagt

SEQ ID NO: 366208 - DNA, 30 bp, Artificial Sequence
  Synthetic oligonucleotide
ccgtgcagtcacgtcgggactcgctgaagt

SEQ ID NO: 366209 - DNA, 30 bp, Artificial Sequence
  Synthetic oligonucleotide
tacattcatttatgcaagggcgtctgaagt

SEQ ID NO: 366210 - DNA, 30 bp, Artificial Sequence
  Synthetic oligonucleotide
ccaggtacctagaagtattagttgtgaagt

SEQ ID NO: 366211 - DNA, 30 bp, Artificial Sequence
  Synthetic oligonucleotide
gcctcctgctcagtgaagttttattgaagt

SEQ ID NO: 366212 - DNA, 30 bp, Artificial Sequence
  Synthetic oligonucleotide
taggatcccactccacaggtaggttgaagt

SEQ ID NO: 366213 - DNA, 30 bp, Artificial Sequence
  Synthetic oligonucleotide
aggcccgttttcttaggcaggtgttgaagt

SEQ ID NO: 366214 - DNA, 30 bp, Artificial Sequence
  Synthetic oligonucleotide
ataaaaagtatctgtttggagatttgaagt

SEQ ID NO: 366215 - DNA, 30 bp, Artificial Sequence
  Synthetic oligonucleotide
gttgtggtaaccgcgagcttccaaataagt

SEQ ID NO: 366216 - DNA, 30 bp, Artificial Sequence
  Synthetic oligonucleotide
gaaaaagtgggttgtgtggacgcaataagt

SEQ ID NO: 366217 - DNA, 30 bp, Artificial Sequence
  Synthetic oligonucleotide
gtgtcgagtataacaagttctataataagt

SEQ ID NO: 366218 - DNA, 30 bp, Artificial Sequence
  Synthetic oligonucleotide
ggtcaagtgataaatgatagttacataagt

SEQ ID NO: 366219 - DNA, 30 bp, Artificial Sequence
  Synthetic oligonucleotide
tattgaatagggatggtcacgggcataagt

SEQ ID NO: 366220 - DNA, 30 bp, Artificial Sequence
  Synthetic oligonucleotide
ctccacctattttacctgcttgtgataagt

SEQ ID NO: 366221 - DNA, 30 bp, Artificial Sequence
  Synthetic oligonucleotide
aaatgccaacggtacaatgtatatataagt

SEQ ID NO: 366222 - DNA, 30 bp, Artificial Sequence
  Synthetic oligonucleotide
aagagacccccacctgaacaccctataagt

SEQ ID NO: 366223 - DNA, 30 bp, Artificial Sequence
  Synthetic oligonucleotide
tgccgatctttgcaactagcatgtataagt

SEQ ID NO: 366224 - DNA, 30 bp, Artificial Sequence
  Synthetic oligonucleotide
tgaactttagtctaaactcgcggactaagt

SEQ ID NO: 366225 - DNA, 30 bp, Artificial Sequence
  Synthetic oligonucleotide
caagggcctataacaagggtattactaagt

SEQ ID NO: 366226 - DNA, 30 bp, Artificial Sequence
  Synthetic oligonucleotide
ccgtacagggatgttttaagaaccctaagt

SEQ ID NO: 366227 - DNA, 30 bp, Artificial Sequence
  Synthetic oligonucleotide
ttagtagtgacacggtataatcccctaagt

SEQ ID NO: 366228 - DNA, 30 bp, Artificial Sequence
  Synthetic oligonucleotide
caggaccgattaggtatagtaatcctaagt

SEQ ID NO: 366229 - DNA, 30 bp, Artificial Sequence
  Synthetic oligonucleotide
tatcacgcggtatacaacaaactcctaagt

SEQ ID NO: 366230 - DNA, 30 bp, Artificial Sequence
  Synthetic oligonucleotide
agagttttcagttggtgtggcttgctaagt

SEQ ID NO: 366231 - DNA, 30 bp, Artificial Sequence
  Synthetic oligonucleotide
cttcgcacggcgtttagggaacatctaagt

SEQ ID NO: 366232 - DNA, 30 bp, Artificial Sequence
  Synthetic oligonucleotide
gctatgcgctaaacgctggtcaaggtaagt

SEQ ID NO: 366233 - DNA, 30 bp, Artificial Sequence
  Synthetic oligonucleotide
accacgtatctggccgccgttgcggtaagt

SEQ ID NO: 366234 - DNA, 30 bp, Artificial Sequence
  Synthetic oligonucleotide
cccagggccacatttggccaaagggtaagt

SEQ ID NO: 366235 - DNA, 30 bp, Artificial Sequence
  Synthetic oligonucleotide
cgggcaggaacaattacaatacatgtaagt

SEQ ID NO: 366236 - DNA, 30 bp, Artificial Sequence
  Synthetic oligonucleotide
gctcgatatcgcggacattgacttgtaagt

SEQ ID NO: 366237 - DNA, 30 bp, Artificial Sequence
  Synthetic oligonucleotide
aatcccaacagaactgtaacaccattaagt

SEQ ID NO: 366238 - DNA, 30 bp, Artificial Sequence
  Synthetic oligonucleotide
aggttctcgcgcttgggttcgatcttaagt

SEQ ID NO: 366239 - DNA, 30 bp, Artificial Sequence
  Synthetic oligonucleotide
ccccaggattacgattgttttcagttaagt

SEQ ID NO: 366240 - DNA, 30 bp, Artificial Sequence
  Synthetic oligonucleotide
tctgaccgtaggattatgtttatgttaagt

SEQ ID NO: 366241 - DNA, 30 bp, Artificial Sequence
  Synthetic oligonucleotide
ataaagaactcacaaaataacagtttaagt

SEQ ID NO: 366242 - DNA, 30 bp, Artificial Sequence
  Synthetic oligonucleotide
cgcacaaattagatggatgctcgtttaagt

SEQ ID NO: 366243 - DNA, 30 bp, Artificial Sequence
  Synthetic oligonucleotide
ggctaactgtaacccgcgtaaaaaaacagt

SEQ ID NO: 366244 - DNA, 30 bp, Artificial Sequence
  Synthetic oligonucleotide
atgacaagatacgtcaacgtaggaaacagt

SEQ ID NO: 366245 - DNA, 30 bp, Artificial Sequence
  Synthetic oligonucleotide
ttgggagctgcttcctgaatgttaaacagt

SEQ ID NO: 366246 - DNA, 30 bp, Artificial Sequence
  Synthetic oligonucleotide
aaatctcctcgcctcgagttactcaacagt

SEQ ID NO: 366247 - DNA, 30 bp, Artificial Sequence
  Synthetic oligonucleotide
agagcttgctatttcgacagacggaacagt

SEQ ID NO: 366248 - DNA, 30 bp, Artificial Sequence
  Synthetic oligonucleotide
agttcgtttattcctacctgtgataacagt

SEQ ID NO: 366249 - DNA, 27 bp, Artificial Sequence
  Synthetic oligonucleotide
aagatacctgctcagaggtataacagt

SEQ ID NO: 366250 - DNA, 30 bp, Artificial Sequence
  Synthetic oligonucleotide
tcgtagcgaggtagacagattcgtaacagt

SEQ ID NO: 366251 - DNA, 30 bp, Artificial Sequence
  Synthetic oligonucleotide
ggttggtcagcgagacgtcctattaacagt

SEQ ID NO: 366252 - DNA, 30 bp, Artificial Sequence
  Synthetic oligonucleotide
ttcttcgtaatctgtggtaacgcccacagt

SEQ ID NO: 366253 - DNA, 30 bp, Artificial Sequence
  Synthetic oligonucleotide
ccagtttggcaaaggggcatgcagcacagt

SEQ ID NO: 366254 - DNA, 30 bp, Artificial Sequence
  Synthetic oligonucleotide
tgggctcatatcatgttggcaaggcacagt

SEQ ID NO: 366255 - DNA, 30 bp, Artificial Sequence
  Synthetic oligonucleotide
caagcctgccgggcagttgagactcacagt

SEQ ID NO: 366256 - DNA, 30 bp, Artificial Sequence
  Synthetic oligonucleotide
ttgtcttacccgttcattttgagtcacagt

SEQ ID NO: 366257 - DNA, 30 bp, Artificial Sequence
  Synthetic oligonucleotide
cgctacatgattactatagaattagacagt

SEQ ID NO: 366258 - DNA, 30 bp, Artificial Sequence
  Synthetic oligonucleotide
aattgggcgcttttcacatatcacgacagt

SEQ ID NO: 366259 - DNA, 30 bp, Artificial Sequence
  Synthetic oligonucleotide
gatgtgacgtgactcctagcgacggacagt

SEQ ID NO: 366260 - DNA, 30 bp, Artificial Sequence
  Synthetic oligonucleotide
tcagggcagttcaagacccggtcggacagt

SEQ ID NO: 366261 - DNA, 30 bp, Artificial Sequence
  Synthetic oligonucleotide
ctgcattcggctttacttaggttggacagt

SEQ ID NO: 366262 - DNA, 30 bp, Artificial Sequence
  Synthetic oligonucleotide
tgctgtaccctaagattaaagtatgacagt

SEQ ID NO: 366263 - DNA, 30 bp, Artificial Sequence
  Synthetic oligonucleotide
atgttataacagtaacttgtttctgacagt

SEQ ID NO: 366264 - DNA, 30 bp, Artificial Sequence
  Synthetic oligonucleotide
ctaggcattagcggactcgcaattgacagt

SEQ ID NO: 366265 - DNA, 30 bp, Artificial Sequence
  Synthetic oligonucleotide
gtgcatattattcacatagagattgacagt

SEQ ID NO: 366266 - DNA, 30 bp, Artificial Sequence
  Synthetic oligonucleotide
tgtggtgcataatccccttgtgtatacagt

SEQ ID NO: 366267 - DNA, 30 bp, Artificial Sequence
  Synthetic oligonucleotide
gcaaacgcacccacagcacccccttacagt

SEQ ID NO: 366268 - DNA, 30 bp, Artificial Sequence
  Synthetic oligonucleotide
tcataggggacaacgccgaggctttacagt

SEQ ID NO: 366269 - DNA, 30 bp, Artificial Sequence
  Synthetic oligonucleotide
atcacgagacttctgacgaacttaaccagt

SEQ ID NO: 366270 - DNA, 30 bp, Artificial Sequence
  Synthetic oligonucleotide
tacctggtgtacgctgcggccaagaccagt

SEQ ID NO: 366271 - DNA, 30 bp, Artificial Sequence
  Synthetic oligonucleotide
ctgagcccattgctcttaaccactaccagt

SEQ ID NO: 366272 - DNA, 30 bp, Artificial Sequence
  Synthetic oligonucleotide
agccccaacatgacttttgtatttaccagt

SEQ ID NO: 366273 - DNA, 30 bp, Artificial Sequence
  Synthetic oligonucleotide
atttggactgattggcagtagccacccagt

SEQ ID NO: 366274 - DNA, 30 bp, Artificial Sequence
  Synthetic oligonucleotide
cgcagagcacgcaatggtggagaccccagt

SEQ ID NO: 366275 - DNA, 30 bp, Artificial Sequence
  Synthetic oligonucleotide
tttcagatgggccccttccgctaccccagt

SEQ ID NO: 366276 - DNA, 30 bp, Artificial Sequence
  Synthetic oligonucleotide
tcctgcctgacgctccatgagtttcccagt

SEQ ID NO: 366277 - DNA, 30 bp, Artificial Sequence
  Synthetic oligonucleotide
gtaaatggggttctggacatcgcagccagt

SEQ ID NO: 366278 - DNA, 30 bp, Artificial Sequence
  Synthetic oligonucleotide
aatcgacgcccacgtctacgttcagccagt

SEQ ID NO: 366279 - DNA, 30 bp, Artificial Sequence
  Synthetic oligonucleotide
aaatctgttccaaagtatggtgccgccagt

SEQ ID NO: 366280 - DNA, 30 bp, Artificial Sequence
  Synthetic oligonucleotide
tcgggtacgcctagtcttcttgccgccagt

SEQ ID NO: 366281 - DNA, 30 bp, Artificial Sequence
  Synthetic oligonucleotide
ctcaatatccgtttttgtgcactcgccagt

SEQ ID NO: 366282 - DNA, 30 bp, Artificial Sequence
  Synthetic oligonucleotide
gtatacagggctaagccttcctaggccagt

SEQ ID NO: 366283 - DNA, 30 bp, Artificial Sequence
  Synthetic oligonucleotide
gttagggcgaaaataccatttagggccagt

SEQ ID NO: 366284 - DNA, 30 bp, Artificial Sequence
  Synthetic oligonucleotide
ccacgacaggctgagtgttcatgggccagt

SEQ ID NO: 366285 - DNA, 30 bp, Artificial Sequence
  Synthetic oligonucleotide
gatgttcgggttaatgcttgattggccagt

SEQ ID NO: 366286 - DNA, 30 bp, Artificial Sequence
  Synthetic oligonucleotide
atcaaacaaaaactttgtcattatgccagt

SEQ ID NO: 366287 - DNA, 30 bp, Artificial Sequence
  Synthetic oligonucleotide
aagtttgatttcggacgagttcaatccagt

SEQ ID NO: 366288 - DNA, 30 bp, Artificial Sequence
  Synthetic oligonucleotide
cccctagttcccatttatctatgatccagt

SEQ ID NO: 366289 - DNA, 30 bp, Artificial Sequence
  Synthetic oligonucleotide
aagagttttgttcttaatggcaagtccagt

SEQ ID NO: 366290 - DNA, 30 bp, Artificial Sequence
  Synthetic oligonucleotide
gacataagcaagttaggcaattggtccagt

SEQ ID NO: 366291 - DNA, 30 bp, Artificial Sequence
  Synthetic oligonucleotide
gagattcttagcttcgaggtcctgtccagt

SEQ ID NO: 366292 - DNA, 30 bp, Artificial Sequence
  Synthetic oligonucleotide
tggacttagaagcctcataaggattccagt

SEQ ID NO: 366293 - DNA, 30 bp, Artificial Sequence
  Synthetic oligonucleotide
aacggcccaatccagcccgccgcaagcagt

SEQ ID NO: 366294 - DNA, 30 bp, Artificial Sequence
  Synthetic oligonucleotide
ccccatttgtatcgcaacattaacagcagt

SEQ ID NO: 366295 - DNA, 30 bp, Artificial Sequence
  Synthetic oligonucleotide
ttttagcagatatccgttattcgcagcagt

SEQ ID NO: 366296 - DNA, 30 bp, Artificial Sequence
  Synthetic oligonucleotide
ggttagggctatcaacaggacgctagcagt

SEQ ID NO: 366297 - DNA, 30 bp, Artificial Sequence
  Synthetic oligonucleotide
cagtgtgggagagtggtcgaacaacgcagt

SEQ ID NO: 366298 - DNA, 30 bp, Artificial Sequence
  Synthetic oligonucleotide
ggatcgctgacaggtccaacagtacgcagt

SEQ ID NO: 366299 - DNA, 30 bp, Artificial Sequence
  Synthetic oligonucleotide
tttcgacggatgcgtggcgaaagccgcagt

SEQ ID NO: 366300 - DNA, 30 bp, Artificial Sequence
  Synthetic oligonucleotide
aaataacactgtagcctaaatgtccgcagt

SEQ ID NO: 366301 - DNA, 30 bp, Artificial Sequence
  Synthetic oligonucleotide
cgttgatgatacaagtactaaaggcgcagt

SEQ ID NO: 366302 - DNA, 30 bp, Artificial Sequence
  Synthetic oligonucleotide
gtaaggccagccgctacatagttaggcagt

SEQ ID NO: 366303 - DNA, 30 bp, Artificial Sequence
  Synthetic oligonucleotide
cgcgtatcgcgttaattttggacgggcagt

SEQ ID NO: 366304 - DNA, 30 bp, Artificial Sequence
  Synthetic oligonucleotide
aagggtcttatggtacaatagttgggcagt

SEQ ID NO: 366305 - DNA, 30 bp, Artificial Sequence
  Synthetic oligonucleotide
tgccccataaagtcattcctggatggcagt

SEQ ID NO: 366306 - DNA, 30 bp, Artificial Sequence
  Synthetic oligonucleotide
caaccagtaaaccagtatctcattggcagt

SEQ ID NO: 366307 - DNA, 30 bp, Artificial Sequence
  Synthetic oligonucleotide
ggctaacagggtttctcgaaccgatgcagt

SEQ ID NO: 366308 - DNA, 30 bp, Artificial Sequence
  Synthetic oligonucleotide
agcttccgtggccattgttactactgcagt

SEQ ID NO: 366309 - DNA, 30 bp, Artificial Sequence
  Synthetic oligonucleotide
tctttgccaaagctaccattttactgcagt

SEQ ID NO: 366310 - DNA, 30 bp, Artificial Sequence
  Synthetic oligonucleotide
tattatatgtgagggccgtaattctgcagt

SEQ ID NO: 366311 - DNA, 30 bp, Artificial Sequence
  Synthetic oligonucleotide
gacacttacggacctaaatgaaagtgcagt

SEQ ID NO: 366312 - DNA, 30 bp, Artificial Sequence
  Synthetic oligonucleotide
aagcctccagcgctggtcaacgcgtgcagt

SEQ ID NO: 366313 - DNA, 30 bp, Artificial Sequence
  Synthetic oligonucleotide
atatagtccagatgtttccttgggtgcagt

SEQ ID NO: 366314 - DNA, 30 bp, Artificial Sequence
  Synthetic oligonucleotide
gaaagttgatctctgaaaggcacttgcagt

SEQ ID NO: 366315 - DNA, 30 bp, Artificial Sequence
  Synthetic oligonucleotide
gtaataccgcaaagggattccgcttgcagt

SEQ ID NO: 366316 - DNA, 30 bp, Artificial Sequence
  Synthetic oligonucleotide
acgacttagccgtcacaccactgttgcagt

SEQ ID NO: 366317 - DNA, 30 bp, Artificial Sequence
  Synthetic oligonucleotide
aggctccactccgtccgccttccaatcagt

SEQ ID NO: 366318 - DNA, 30 bp, Artificial Sequence
  Synthetic oligonucleotide
aggccctaggtagtatcctaaggaatcagt

SEQ ID NO: 366319 - DNA, 30 bp, Artificial Sequence
  Synthetic oligonucleotide
ccgggtccaaccgacacctgagtcatcagt

SEQ ID NO: 366320 - DNA, 30 bp, Artificial Sequence
  Synthetic oligonucleotide
agcaagatgctatttgtgttgtggatcagt

SEQ ID NO: 366321 - DNA, 30 bp, Artificial Sequence
  Synthetic oligonucleotide
aatcgagccggcaatcgcggccatatcagt

SEQ ID NO: 366322 - DNA, 30 bp, Artificial Sequence
  Synthetic oligonucleotide
gggatgtgctggggctacctcccactcagt

SEQ ID NO: 366323 - DNA, 30 bp, Artificial Sequence
  Synthetic oligonucleotide
ccaccctagtatccaaacttcggactcagt

SEQ ID NO: 366324 - DNA, 30 bp, Artificial Sequence
  Synthetic oligonucleotide
aagtcggagtacaccagtcatagcctcagt

SEQ ID NO: 366325 - DNA, 30 bp, Artificial Sequence
  Synthetic oligonucleotide
tatgcgggcagggcgctgcgtaagctcagt

SEQ ID NO: 366326 - DNA, 30 bp, Artificial Sequence
  Synthetic oligonucleotide
tttaaaataggagctacaccaacgctcagt

SEQ ID NO: 366327 - DNA, 30 bp, Artificial Sequence
  Synthetic oligonucleotide
gcagaccaaaatgaggggcaattgctcagt

SEQ ID NO: 366328 - DNA, 30 bp, Artificial Sequence
  Synthetic oligonucleotide
ttccgtgattatataattgcctctctcagt

SEQ ID NO: 366329 - DNA, 30 bp, Artificial Sequence
  Synthetic oligonucleotide
atgtaatgtatagtcaaaaattctctcagt

SEQ ID NO: 366330 - DNA, 30 bp, Artificial Sequence
  Synthetic oligonucleotide
gatgctccggtgttgcgcgggggtctcagt

SEQ ID NO: 366331 - DNA, 30 bp, Artificial Sequence
  Synthetic oligonucleotide
ctggtatatttttatccactcacagtcagt

SEQ ID NO: 366332 - DNA, 30 bp, Artificial Sequence
  Synthetic oligonucleotide
ttgctgtgttgcgttttctctgcagtcagt

SEQ ID NO: 366333 - DNA, 30 bp, Artificial Sequence
  Synthetic oligonucleotide
atgccgtcttcgtagaaggattcagtcagt

SEQ ID NO: 366334 - DNA, 30 bp, Artificial Sequence
  Synthetic oligonucleotide
aacgcccagcacatgtagacaagagtcagt

SEQ ID NO: 366335 - DNA, 30 bp, Artificial Sequence
  Synthetic oligonucleotide
tatctcgtagaatagactttacgagtcagt

SEQ ID NO: 366336 - DNA, 30 bp, Artificial Sequence
  Synthetic oligonucleotide
ctgtacccactaagtctctaagaggtcagt

SEQ ID NO: 366337 - DNA, 30 bp, Artificial Sequence
  Synthetic oligonucleotide
gcaatcataacaggatttgcaggggtcagt

SEQ ID NO: 366338 - DNA, 30 bp, Artificial Sequence
  Synthetic oligonucleotide
ccattcgaataaacagacctcggggtcagt

SEQ ID NO: 366339 - DNA, 30 bp, Artificial Sequence
  Synthetic oligonucleotide
gtcaggtctcgcttaaaccggcttgtcagt

SEQ ID NO: 366340 - DNA, 30 bp, Artificial Sequence
  Synthetic oligonucleotide
agcttctaagacctgcagcgcgcattcagt

SEQ ID NO: 366341 - DNA, 30 bp, Artificial Sequence
  Synthetic oligonucleotide
gcgccctgtagagctcattgatgattcagt

SEQ ID NO: 366342 - DNA, 30 bp, Artificial Sequence
  Synthetic oligonucleotide
acgggctgaacgctaattttgttattcagt

SEQ ID NO: 366343 - DNA, 30 bp, Artificial Sequence
  Synthetic oligonucleotide
agattggtctgcgtaggatcgtggttcagt

SEQ ID NO: 366344 - DNA, 30 bp, Artificial Sequence
  Synthetic oligonucleotide
aggggttagcagttatcgacactgttcagt

SEQ ID NO: 366345 - DNA, 30 bp, Artificial Sequence
  Synthetic oligonucleotide
acttagggtcaatggagtaatttgttcagt

SEQ ID NO: 366346 - DNA, 30 bp, Artificial Sequence
  Synthetic oligonucleotide
ggcacagtacgtagcgaacttgatttcagt

SEQ ID NO: 366347 - DNA, 30 bp, Artificial Sequence
  Synthetic oligonucleotide
agttacggaactaccggggcaataaagagt

SEQ ID NO: 366348 - DNA, 30 bp, Artificial Sequence
  Synthetic oligonucleotide
ccctcttattttgcagtttctttaaagagt

SEQ ID NO: 366349 - DNA, 30 bp, Artificial Sequence
  Synthetic oligonucleotide
tgaagtcttttagtaggcttaaacaagagt

SEQ ID NO: 366350 - DNA, 30 bp, Artificial Sequence
  Synthetic oligonucleotide
tgggaaacctaagcaaaagccctgaagagt

SEQ ID NO: 366351 - DNA, 30 bp, Artificial Sequence
  Synthetic oligonucleotide
aaccttgtcgttcttaggtaaagacagagt

SEQ ID NO: 366352 - DNA, 30 bp, Artificial Sequence
  Synthetic oligonucleotide
actgtgcgcagtttcctcgagatacagagt

SEQ ID NO: 366353 - DNA, 30 bp, Artificial Sequence
  Synthetic oligonucleotide
aagtcgcggctacgatggtctcaccagagt

SEQ ID NO: 366354 - DNA, 30 bp, Artificial Sequence
  Synthetic oligonucleotide
gtgatgttgtatctgtctgctccccagagt

SEQ ID NO: 366355 - DNA, 30 bp, Artificial Sequence
  Synthetic oligonucleotide
tctgcccaacgcggcgaactcgagcagagt

SEQ ID NO: 366356 - DNA, 30 bp, Artificial Sequence
  Synthetic oligonucleotide
tggttacgagtacattggattctgcagagt

SEQ ID NO: 366357 - DNA, 30 bp, Artificial Sequence
  Synthetic oligonucleotide
aaactgatcaatttcgacggctatcagagt

SEQ ID NO: 366358 - DNA, 30 bp, Artificial Sequence
  Synthetic oligonucleotide
tgtatggcgaaggagcgttggcgtcagagt

SEQ ID NO: 366359 - DNA, 30 bp, Artificial Sequence
  Synthetic oligonucleotide
tactgggttcggtttccggaaggtcagagt

SEQ ID NO: 366360 - DNA, 30 bp, Artificial Sequence
  Synthetic oligonucleotide
gggccaatggtatcttgtagatacgagagt

SEQ ID NO: 366361 - DNA, 30 bp, Artificial Sequence
  Synthetic oligonucleotide
ttgcaatcaacaaagtggacgtgcgagagt

SEQ ID NO: 366362 - DNA, 30 bp, Artificial Sequence
  Synthetic oligonucleotide
ctgacgggacttgcgctccgtcatgagagt

SEQ ID NO: 366363 - DNA, 30 bp, Artificial Sequence
  Synthetic oligonucleotide
agctgtctatgattttactattaatagagt

SEQ ID NO: 366364 - DNA, 30 bp, Artificial Sequence
  Synthetic oligonucleotide
gagcacccatctaatagtattagatagagt

SEQ ID NO: 366365 - DNA, 30 bp, Artificial Sequence
  Synthetic oligonucleotide
atttcgaggctaatgcggcggcgctagagt

SEQ ID NO: 366366 - DNA, 30 bp, Artificial Sequence
  Synthetic oligonucleotide
agattatgcacaacaggtttcatctagagt

SEQ ID NO: 366367 - DNA, 30 bp, Artificial Sequence
  Synthetic oligonucleotide
aacttgtaatgcatctagtttcggtagagt

SEQ ID NO: 366368 - DNA, 30 bp, Artificial Sequence
  Synthetic oligonucleotide
ttgtatcctggatacgttcgcttgtagagt

SEQ ID NO: 366369 - DNA, 30 bp, Artificial Sequence
  Synthetic oligonucleotide
tctcctactcgcgtggaacaactttagagt

SEQ ID NO: 366370 - DNA, 30 bp, Artificial Sequence
  Synthetic oligonucleotide
cactagatatggtgcaatgttctaacgagt

SEQ ID NO: 366371 - DNA, 30 bp, Artificial Sequence
  Synthetic oligonucleotide
aactccagggcgtaatgatctcacacgagt

SEQ ID NO: 366372 - DNA, 30 bp, Artificial Sequence
  Synthetic oligonucleotide
attggtggcccacactcgctgatcacgagt

SEQ ID NO: 366373 - DNA, 30 bp, Artificial Sequence
  Synthetic oligonucleotide
gatactagggtgccctttgaagtaccgagt

SEQ ID NO: 366374 - DNA, 30 bp, Artificial Sequence
  Synthetic oligonucleotide
atggtacttctagggtctccgtccccgagt

SEQ ID NO: 366375 - DNA, 30 bp, Artificial Sequence
  Synthetic oligonucleotide
taaatccaagattgaacgttgcaagcgagt

SEQ ID NO: 366376 - DNA, 30 bp, Artificial Sequence
  Synthetic oligonucleotide
tcaacccgtaagagtatgtccttagcgagt

SEQ ID NO: 366377 - DNA, 30 bp, Artificial Sequence
  Synthetic oligonucleotide
ggaaccgcattaggtctggcctgcgcgagt

SEQ ID NO: 366378 - DNA, 30 bp, Artificial Sequence
  Synthetic oligonucleotide
agcattataccttagctccgttctgcgagt

SEQ ID NO: 366379 - DNA, 30 bp, Artificial Sequence
  Synthetic oligonucleotide
tactctcccgcgaagtaggtaaagtcgagt

SEQ ID NO: 366380 - DNA, 30 bp, Artificial Sequence
  Synthetic oligonucleotide
cacatattacccgaaggcagtgcgtcgagt

SEQ ID NO: 366381 - DNA, 30 bp, Artificial Sequence
  Synthetic oligonucleotide
ccggggagccgttcaaggggagattcgagt

SEQ ID NO: 366382 - DNA, 30 bp, Artificial Sequence
  Synthetic oligonucleotide
ggtaattttcaagtgggtagctataggagt

SEQ ID NO: 366383 - DNA, 30 bp, Artificial Sequence
  Synthetic oligonucleotide
gcaaatttttacgacggtgtcagtaggagt

SEQ ID NO: 366384 - DNA, 30 bp, Artificial Sequence
  Synthetic oligonucleotide
aacttggttttctaacagctctcacggagt

SEQ ID NO: 366385 - DNA, 31 bp, Artificial Sequence
  Synthetic oligonucleotide
gagcctaagaaagtagactcagtcgcggagt

SEQ ID NO: 366386 - DNA, 30 bp, Artificial Sequence
  Synthetic oligonucleotide
gtacaaggtgatgctatcaggtggcggagt

SEQ ID NO: 366387 - DNA, 30 bp, Artificial Sequence
  Synthetic oligonucleotide
tcgtcaatattaggacgtaagactcggagt

SEQ ID NO: 366388 - DNA, 30 bp, Artificial Sequence
  Synthetic oligonucleotide
taaagtaccgtcatcgagtatcgtcggagt

SEQ ID NO: 366389 - DNA, 30 bp, Artificial Sequence
  Synthetic oligonucleotide
gactagttacaaatttcgaaagaggggagt

SEQ ID NO: 366390 - DNA, 30 bp, Artificial Sequence
  Synthetic oligonucleotide
gcgggaaaccttcagcggtttggggggagt

SEQ ID NO: 366391 - DNA, 30 bp, Artificial Sequence
  Synthetic oligonucleotide
tagctgggaagaggccccttttctgggagt

SEQ ID NO: 366392 - DNA, 30 bp, Artificial Sequence
  Synthetic oligonucleotide
atcacatccaaggtttattgtagtgggagt

SEQ ID NO: 366393 - DNA, 30 bp, Artificial Sequence
  Synthetic oligonucleotide
aaacaaatttctatccaggacggatggagt

SEQ ID NO: 366394 - DNA, 30 bp, Artificial Sequence
  Synthetic oligonucleotide
attcactcgggagtcccatgcagctggagt

SEQ ID NO: 366395 - DNA, 30 bp, Artificial Sequence
  Synthetic oligonucleotide
acttacacttaatccaccatcagctggagt

SEQ ID NO: 366396 - DNA, 30 bp, Artificial Sequence
  Synthetic oligonucleotide
gcagcttcgcaatccgaaaggtcgtggagt

SEQ ID NO: 366397 - DNA, 30 bp, Artificial Sequence
  Synthetic oligonucleotide
tacagtcagaggtacaaatcttcgtggagt

SEQ ID NO: 366398 - DNA, 30 bp, Artificial Sequence
  Synthetic oligonucleotide
aattcttgagtgatgaccagactgtggagt

SEQ ID NO: 366399 - DNA, 30 bp, Artificial Sequence
  Synthetic oligonucleotide
gcgggaaatccgcgattgtcgccttggagt

SEQ ID NO: 366400 - DNA, 30 bp, Artificial Sequence
  Synthetic oligonucleotide
gtaagtactcaccgttcacgatgttggagt

SEQ ID NO: 366401 - DNA, 30 bp, Artificial Sequence
  Synthetic oligonucleotide
cagcaaaatcgtgcaagtttttccatgagt

SEQ ID NO: 366402 - DNA, 30 bp, Artificial Sequence
  Synthetic oligonucleotide
ttttgcgccaacttaataaaaagcatgagt

SEQ ID NO: 366403 - DNA, 30 bp, Artificial Sequence
  Synthetic oligonucleotide
gaagcgctttctgagcatttatgcatgagt

SEQ ID NO: 366404 - DNA, 30 bp, Artificial Sequence
  Synthetic oligonucleotide
tggcatttgccgttcatgttaatgatgagt

SEQ ID NO: 366405 - DNA, 30 bp, Artificial Sequence
  Synthetic oligonucleotide
cagtgttttgcaagacgcggttcactgagt

SEQ ID NO: 366406 - DNA, 30 bp, Artificial Sequence
  Synthetic oligonucleotide
ccctcaagtttgaaaacagcacccgtgagt

SEQ ID NO: 366407 - DNA, 30 bp, Artificial Sequence
  Synthetic oligonucleotide
tatgcacaagcacatttgacgatggtgagt

SEQ ID NO: 366408 - DNA, 30 bp, Artificial Sequence
  Synthetic oligonucleotide
ctacatttatacgtcatgggacatgtgagt

SEQ ID NO: 366409 - DNA, 30 bp, Artificial Sequence
  Synthetic oligonucleotide
actcattccgtatttaagttctctgtgagt

SEQ ID NO: 366410 - DNA, 30 bp, Artificial Sequence
  Synthetic oligonucleotide
caggttacgcggtggacgtttaaattgagt

SEQ ID NO: 366411 - DNA, 30 bp, Artificial Sequence
  Synthetic oligonucleotide
gtaaacgtacaaacgcttcaagccttgagt

SEQ ID NO: 366412 - DNA, 30 bp, Artificial Sequence
  Synthetic oligonucleotide
gttttatgaggtccaaaacacccgttgagt

SEQ ID NO: 366413 - DNA, 30 bp, Artificial Sequence
  Synthetic oligonucleotide
ctgataaatctcttcatttaaaggttgagt

SEQ ID NO: 366414 - DNA, 25 bp, Artificial Sequence
  Synthetic oligonucleotide
gatttcaggattactttgtttgagt

SEQ ID NO: 366415 - DNA, 30 bp, Artificial Sequence
  Synthetic oligonucleotide
gtcaaaaccctcatgtagcgataaaatagt

SEQ ID NO: 366416 - DNA, 30 bp, Artificial Sequence
  Synthetic oligonucleotide
tgattcgggcttggcctcgtcacaaatagt

SEQ ID NO: 366417 - DNA, 30 bp, Artificial Sequence
  Synthetic oligonucleotide
ttagaacagtgggggcccttgctaaatagt

SEQ ID NO: 366418 - DNA, 30 bp, Artificial Sequence
  Synthetic oligonucleotide
atgtccagtagaagctgcagcttaaatagt

SEQ ID NO: 366419 - DNA, 30 bp, Artificial Sequence
  Synthetic oligonucleotide
tgaacccctgtgatagtgatctccaatagt

SEQ ID NO: 366420 - DNA, 30 bp, Artificial Sequence
  Synthetic oligonucleotide
aaaagccggaatggcttgacaggcaatagt

SEQ ID NO: 366421 - DNA, 30 bp, Artificial Sequence
  Synthetic oligonucleotide
acgcatgagcaatgatttttcgataatagt

SEQ ID NO: 366422 - DNA, 30 bp, Artificial Sequence
  Synthetic oligonucleotide
gtcttacctgagtgcactatatctaatagt

SEQ ID NO: 366423 - DNA, 30 bp, Artificial Sequence
  Synthetic oligonucleotide
tcccagaccccacaatttttcctacatagt

SEQ ID NO: 366424 - DNA, 30 bp, Artificial Sequence
  Synthetic oligonucleotide
gagatgtaaggggccatcttttaccatagt

SEQ ID NO: 366425 - DNA, 30 bp, Artificial Sequence
  Synthetic oligonucleotide
ttcttgcgggaacgtgaacgaccccatagt

SEQ ID NO: 366426 - DNA, 30 bp, Artificial Sequence
  Synthetic oligonucleotide
gggcgcatgtcatgcgagcattagcatagt

SEQ ID NO: 366427 - DNA, 30 bp, Artificial Sequence
  Synthetic oligonucleotide
cacgggtttgatcacgtttttgatcatagt

SEQ ID NO: 366428 - DNA, 30 bp, Artificial Sequence
  Synthetic oligonucleotide
taaagacatgagtcgtaaatgactcatagt

SEQ ID NO: 366429 - DNA, 30 bp, Artificial Sequence
  Synthetic oligonucleotide
ctgtgtgtgaggcagtaaaagaaagatagt

SEQ ID NO: 366430 - DNA, 30 bp, Artificial Sequence
  Synthetic oligonucleotide
gggacgggcatttcgtgtggataagatagt

SEQ ID NO: 366431 - DNA, 30 bp, Artificial Sequence
  Synthetic oligonucleotide
ctgattgtgacgaaccgaaattcggatagt

SEQ ID NO: 366432 - DNA, 30 bp, Artificial Sequence
  Synthetic oligonucleotide
gttctaaaaaacactaccactcgggatagt

SEQ ID NO: 366433 - DNA, 30 bp, Artificial Sequence
  Synthetic oligonucleotide
tgattcaagcccggcttcgcaatggatagt

SEQ ID NO: 366434 - DNA, 30 bp, Artificial Sequence
  Synthetic oligonucleotide
atgctatcgtaagatctgaggcatgatagt

SEQ ID NO: 366435 - DNA, 30 bp, Artificial Sequence
  Synthetic oligonucleotide
tcatgctcggcactagaacgcactgatagt

SEQ ID NO: 366436 - DNA, 30 bp, Artificial Sequence
  Synthetic oligonucleotide
caaaacgtccggaacacttacagtgatagt

SEQ ID NO: 366437 - DNA, 30 bp, Artificial Sequence
  Synthetic oligonucleotide
ctgggcgttagtatgggtgcagaatatagt

SEQ ID NO: 366438 - DNA, 30 bp, Artificial Sequence
  Synthetic oligonucleotide
gcgttttatggtaataaacaagactatagt

SEQ ID NO: 366439 - DNA, 29 bp, Artificial Sequence
  Synthetic oligonucleotide
ataggcacgacgcaattattgactatagt

SEQ ID NO: 366440 - DNA, 30 bp, Artificial Sequence
  Synthetic oligonucleotide
acgccgtaatgcataaacgtggcctatagt

SEQ ID NO: 366441 - DNA, 30 bp, Artificial Sequence
  Synthetic oligonucleotide
cctgcgcgttagtaccttgtgcgctatagt

SEQ ID NO: 366442 - DNA, 30 bp, Artificial Sequence
  Synthetic oligonucleotide
gaggcgactctggcggtaactttctatagt

SEQ ID NO: 366443 - DNA, 30 bp, Artificial Sequence
  Synthetic oligonucleotide
caaaagtgcgggcgtggtctcaagtatagt

SEQ ID NO: 366444 - DNA, 30 bp, Artificial Sequence
  Synthetic oligonucleotide
gctagcactccctgttatctgcagtatagt

SEQ ID NO: 366445 - DNA, 30 bp, Artificial Sequence
  Synthetic oligonucleotide
taaatatgccgggtacacgccctgtatagt

SEQ ID NO: 366446 - DNA, 30 bp, Artificial Sequence
  Synthetic oligonucleotide
tacggtcagtcttcaatccgagattatagt

SEQ ID NO: 366447 - DNA, 30 bp, Artificial Sequence
  Synthetic oligonucleotide
caaaggtcacccggaggcttgacttatagt

SEQ ID NO: 366448 - DNA, 29 bp, Artificial Sequence
  Synthetic oligonucleotide
cctagccattgtatccaggcggttatagt

SEQ ID NO: 366449 - DNA, 30 bp, Artificial Sequence
  Synthetic oligonucleotide
ctattagatgatttttgaattctcactagt

SEQ ID NO: 366450 - DNA, 30 bp, Artificial Sequence
  Synthetic oligonucleotide
gctgttcctaaaggtaaatgttgtactagt

SEQ ID NO: 366451 - DNA, 30 bp, Artificial Sequence
  Synthetic oligonucleotide
cgaataagtaaatagtaccgcggacctagt

SEQ ID NO: 366452 - DNA, 30 bp, Artificial Sequence
  Synthetic oligonucleotide
cacctgggaccgcggttagaagtacctagt

SEQ ID NO: 366453 - DNA, 30 bp, Artificial Sequence
  Synthetic oligonucleotide
tcactgaacgctgatgaagcgtgccctagt

SEQ ID NO: 366454 - DNA, 30 bp, Artificial Sequence
  Synthetic oligonucleotide
aggaactcgacatgttaagacgtccctagt

SEQ ID NO: 366455 - DNA, 30 bp, Artificial Sequence
  Synthetic oligonucleotide
gagggtaatgtaacgagctaccctcctagt

SEQ ID NO: 366456 - DNA, 30 bp, Artificial Sequence
  Synthetic oligonucleotide
aaaccactcgccagcacgaatgctcctagt

SEQ ID NO: 366457 - DNA, 30 bp, Artificial Sequence
  Synthetic oligonucleotide
tcactataggatacgagtaacgttcctagt

SEQ ID NO: 366458 - DNA, 30 bp, Artificial Sequence
  Synthetic oligonucleotide
gggtatgcacgatagcctagcaaagctagt

SEQ ID NO: 366459 - DNA, 30 bp, Artificial Sequence
  Synthetic oligonucleotide
tagaaagagatagtgacataactggctagt

SEQ ID NO: 366460 - DNA, 30 bp, Artificial Sequence
  Synthetic oligonucleotide
gggtctcttgcctgttaggggaatgctagt

SEQ ID NO: 366461 - DNA, 30 bp, Artificial Sequence
  Synthetic oligonucleotide
ttattggaaggtgcactccccagtgctagt

SEQ ID NO: 366462 - DNA, 30 bp, Artificial Sequence
  Synthetic oligonucleotide
tctaagtggttacgaacggtacttgctagt

SEQ ID NO: 366463 - DNA, 30 bp, Artificial Sequence
  Synthetic oligonucleotide
gcctgggactatttgcaaaaattatctagt

SEQ ID NO: 366464 - DNA, 30 bp, Artificial Sequence
  Synthetic oligonucleotide
atcgtgaggcacttcggaatcccctctagt

SEQ ID NO: 366465 - DNA, 30 bp, Artificial Sequence
  Synthetic oligonucleotide
ggaaacgcatgctcatagctcaggtctagt

SEQ ID NO: 366466 - DNA, 30 bp, Artificial Sequence
  Synthetic oligonucleotide
ttgtgctcagcggatcgggactggtctagt

SEQ ID NO: 366467 - DNA, 30 bp, Artificial Sequence
  Synthetic oligonucleotide
cgtaggcgaaacccccctttggattctagt

SEQ ID NO: 366468 - DNA, 30 bp, Artificial Sequence
  Synthetic oligonucleotide
gggatacgctttagcagttttccttctagt

SEQ ID NO: 366469 - DNA, 30 bp, Artificial Sequence
  Synthetic oligonucleotide
caagtggtaattccaggtgagggttctagt

SEQ ID NO: 366470 - DNA, 30 bp, Artificial Sequence
  Synthetic oligonucleotide
attatcaacttatcccacgacacaagtagt

SEQ ID NO: 366471 - DNA, 30 bp, Artificial Sequence
  Synthetic oligonucleotide
atgggggacacgttcggtccccgcagtagt

SEQ ID NO: 366472 - DNA, 30 bp, Artificial Sequence
  Synthetic oligonucleotide
acatgaccaccgtagcgcagctgcagtagt

SEQ ID NO: 366473 - DNA, 30 bp, Artificial Sequence
  Synthetic oligonucleotide
taatagcgactaaaggagcggtcgagtagt

SEQ ID NO: 366474 - DNA, 30 bp, Artificial Sequence
  Synthetic oligonucleotide
tagaggtttatacgattggtacatagtagt

SEQ ID NO: 366475 - DNA, 30 bp, Artificial Sequence
  Synthetic oligonucleotide
aataaaacgtagtacatctattatagtagt

SEQ ID NO: 366476 - DNA, 30 bp, Artificial Sequence
  Synthetic oligonucleotide
tctactagccggaccattagcaaacgtagt

SEQ ID NO: 366477 - DNA, 30 bp, Artificial Sequence
  Synthetic oligonucleotide
atatattgtccccaatacgtggtacgtagt

SEQ ID NO: 366478 - DNA, 30 bp, Artificial Sequence
  Synthetic oligonucleotide
cgtaaccgaaacatttcggtcgtccgtagt

SEQ ID NO: 366479 - DNA, 30 bp, Artificial Sequence
  Synthetic oligonucleotide
atttttgggtcggggcctatggagcgtagt

SEQ ID NO: 366480 - DNA, 30 bp, Artificial Sequence
  Synthetic oligonucleotide
attctaatctacaagcgggtggctcgtagt

SEQ ID NO: 366481 - DNA, 30 bp, Artificial Sequence
  Synthetic oligonucleotide
cctcaaggtactaagcgtcattcaggtagt

SEQ ID NO: 366482 - DNA, 30 bp, Artificial Sequence
  Synthetic oligonucleotide
gttggtccttacggtcagcagaagggtagt

SEQ ID NO: 366483 - DNA, 30 bp, Artificial Sequence
  Synthetic oligonucleotide
catcgcatattagtttcagcgacgggtagt

SEQ ID NO: 366484 - DNA, 30 bp, Artificial Sequence
  Synthetic oligonucleotide
aggtgtgatgataacccaaataggggtagt

SEQ ID NO: 366485 - DNA, 30 bp, Artificial Sequence
  Synthetic oligonucleotide
gcggaatttacaatccgagaaactggtagt

SEQ ID NO: 366486 - DNA, 30 bp, Artificial Sequence
  Synthetic oligonucleotide
gaatcgcgcttgtccagactagtatgtagt

SEQ ID NO: 366487 - DNA, 30 bp, Artificial Sequence
  Synthetic oligonucleotide
tttatgcctcggcgatcgatggcctgtagt

SEQ ID NO: 366488 - DNA, 30 bp, Artificial Sequence
  Synthetic oligonucleotide
atcacacccatacccttcgcctggtgtagt

SEQ ID NO: 366489 - DNA, 30 bp, Artificial Sequence
  Synthetic oligonucleotide
agagcttattaaggtacgaaagcaattagt

SEQ ID NO: 366490 - DNA, 30 bp, Artificial Sequence
  Synthetic oligonucleotide
tatccgggctccactgacagaaacattagt

SEQ ID NO: 366491 - DNA, 30 bp, Artificial Sequence
  Synthetic oligonucleotide
ctcgtatgtatctcggggactcccattagt

SEQ ID NO: 366492 - DNA, 30 bp, Artificial Sequence
  Synthetic oligonucleotide
tatagtactgggttcaatctatgcattagt

SEQ ID NO: 366493 - DNA, 30 bp, Artificial Sequence
  Synthetic oligonucleotide
gccctgtagggcgaacggcaatcgattagt

SEQ ID NO: 366494 - DNA, 30 bp, Artificial Sequence
  Synthetic oligonucleotide
gagggttaagttgtggagctgctgattagt

SEQ ID NO: 366495 - DNA, 30 bp, Artificial Sequence
  Synthetic oligonucleotide
ttgcttgcctacgcgctgctgagtcttagt

SEQ ID NO: 366496 - DNA, 29 bp, Artificial Sequence
  Synthetic oligonucleotide
cagaagaccacttgctggttattcttagt

SEQ ID NO: 366497 - DNA, 30 bp, Artificial Sequence
  Synthetic oligonucleotide
tgccggcatttcgtaaaatcgtgagttagt

SEQ ID NO: 366498 - DNA, 30 bp, Artificial Sequence
  Synthetic oligonucleotide
ataaacggtcaccgtcgatctctagttagt

SEQ ID NO: 366499 - DNA, 30 bp, Artificial Sequence
  Synthetic oligonucleotide
gaaagagccacgtcccacattctcgttagt

SEQ ID NO: 366500 - DNA, 30 bp, Artificial Sequence
  Synthetic oligonucleotide
cgtcgggataacgatagaagacaggttagt

SEQ ID NO: 366501 - DNA, 30 bp, Artificial Sequence
  Synthetic oligonucleotide
gtctggaaaagcggtatgtgcccggttagt

SEQ ID NO: 366502 - DNA, 30 bp, Artificial Sequence
  Synthetic oligonucleotide
taacctaccactcatttgggtttatttagt

SEQ ID NO: 366503 - DNA, 30 bp, Artificial Sequence
  Synthetic oligonucleotide
gtgaacactcgcgatttcagtcactttagt

SEQ ID NO: 366504 - DNA, 30 bp, Artificial Sequence
  Synthetic oligonucleotide
atgaggacaattgtaaatctgacttttagt

SEQ ID NO: 366505 - DNA, 30 bp, Artificial Sequence
  Synthetic oligonucleotide
aatcagagcttatctgggattcgttttagt

SEQ ID NO: 366506 - DNA, 30 bp, Artificial Sequence
  Synthetic oligonucleotide
tctgttttacggagacggtatatttttagt

SEQ ID NO: 366507 - DNA, 30 bp, Artificial Sequence
  Synthetic oligonucleotide
ctaccatcatacgctgactttaaaaaacgt

SEQ ID NO: 366508 - DNA, 30 bp, Artificial Sequence
  Synthetic oligonucleotide
ccattcatttggtggacgttcccaaaacgt

SEQ ID NO: 366509 - DNA, 30 bp, Artificial Sequence
  Synthetic oligonucleotide
taaagtccgtggacaactggtttcaaacgt

SEQ ID NO: 366510 - DNA, 30 bp, Artificial Sequence
  Synthetic oligonucleotide
agatgcgaagagttggacacggctaaacgt

SEQ ID NO: 366511 - DNA, 30 bp, Artificial Sequence
  Synthetic oligonucleotide
tctcatgtcacgtgtaaggccaaacaacgt

SEQ ID NO: 366512 - DNA, 31 bp, Artificial Sequence
  Synthetic oligonucleotide
atagctaacgaccgaacgcgacgaccaacgt

SEQ ID NO: 366513 - DNA, 30 bp, Artificial Sequence
  Synthetic oligonucleotide
tctcgcaacggcagtatcgccatccaacgt

SEQ ID NO: 366514 - DNA, 30 bp, Artificial Sequence
  Synthetic oligonucleotide
aacgttacgacttaccgctacgctcaacgt

SEQ ID NO: 366515 - DNA, 30 bp, Artificial Sequence
  Synthetic oligonucleotide
ttccgtaagtatacaaacccaacagaacgt

SEQ ID NO: 366516 - DNA, 30 bp, Artificial Sequence
  Synthetic oligonucleotide
aacccatgaccttcgtgtacactcgaacgt

SEQ ID NO: 366517 - DNA, 30 bp, Artificial Sequence
  Synthetic oligonucleotide
ccccacgacacgggctaatgataataacgt

SEQ ID NO: 366518 - DNA, 30 bp, Artificial Sequence
  Synthetic oligonucleotide
ctcgattgatgtccgttattaggctaacgt

SEQ ID NO: 366519 - DNA, 30 bp, Artificial Sequence
  Synthetic oligonucleotide
ttcggatataatctaacgttagtgtaacgt

SEQ ID NO: 366520 - DNA, 30 bp, Artificial Sequence
  Synthetic oligonucleotide
gttacaggtatacagtgaaaggtgtaacgt

SEQ ID NO: 366521 - DNA, 30 bp, Artificial Sequence
  Synthetic oligonucleotide
gacatcggttgcacaagtgcgttgtaacgt

SEQ ID NO: 366522 - DNA, 30 bp, Artificial Sequence
  Synthetic oligonucleotide
tctcacgatgtttcacgaatgccttaacgt

SEQ ID NO: 366523 - DNA, 30 bp, Artificial Sequence
  Synthetic oligonucleotide
gcggcatagggttagtgccgccgttaacgt

SEQ ID NO: 366524 - DNA, 30 bp, Artificial Sequence
  Synthetic oligonucleotide
gggtagggacttaagcatggatgttaacgt

SEQ ID NO: 366525 - DNA, 30 bp, Artificial Sequence
  Synthetic oligonucleotide
taattgcaatcggcgttatcacacacacgt

SEQ ID NO: 366526 - DNA, 30 bp, Artificial Sequence
  Synthetic oligonucleotide
gctttattgataagctggcgaacgacacgt

SEQ ID NO: 366527 - DNA, 30 bp, Artificial Sequence
  Synthetic oligonucleotide
agatcttcatctcccgcgtttcggacacgt

SEQ ID NO: 366528 - DNA, 30 bp, Artificial Sequence
  Synthetic oligonucleotide
cctgattatgatagttgaaatatgacacgt

SEQ ID NO: 366529 - DNA, 30 bp, Artificial Sequence
  Synthetic oligonucleotide
actcgtactccctatcgtgtagtaccacgt

SEQ ID NO: 366530 - DNA, 30 bp, Artificial Sequence
  Synthetic oligonucleotide
ccgccgtacaatgtcaggagcgaagcacgt

SEQ ID NO: 366531 - DNA, 30 bp, Artificial Sequence
  Synthetic oligonucleotide
gtccccgattaattgtgggcaacagcacgt

SEQ ID NO: 366532 - DNA, 30 bp, Artificial Sequence
  Synthetic oligonucleotide
ttgaaacccgctcgcctatgaaacgcacgt

SEQ ID NO: 366533 - DNA, 30 bp, Artificial Sequence
  Synthetic oligonucleotide
ggcatatgagtgaggagtttacacgcacgt

SEQ ID NO: 366534 - DNA, 30 bp, Artificial Sequence
  Synthetic oligonucleotide
cacattgggccgttgatttagtacgcacgt

SEQ ID NO: 366535 - DNA, 30 bp, Artificial Sequence
  Synthetic oligonucleotide
atggaccatgccgggtcgattccggcacgt

SEQ ID NO: 366536 - DNA, 30 bp, Artificial Sequence
  Synthetic oligonucleotide
tcagagagggatgtttacatggttgcacgt

SEQ ID NO: 366537 - DNA, 30 bp, Artificial Sequence
  Synthetic oligonucleotide
tatcataaaagatttagagagggatcacgt

SEQ ID NO: 366538 - DNA, 30 bp, Artificial Sequence
  Synthetic oligonucleotide
gacgtattttgcggaacgaagtgctcacgt

SEQ ID NO: 366539 - DNA, 30 bp, Artificial Sequence
  Synthetic oligonucleotide
tcacgtcagggaaacgccctcgtgtcacgt

SEQ ID NO: 366540 - DNA, 30 bp, Artificial Sequence
  Synthetic oligonucleotide
tttggtgctctgcaagatcctggaagacgt

SEQ ID NO: 366541 - DNA, 30 bp, Artificial Sequence
  Synthetic oligonucleotide
ctttccgagttcgttgaccgacccagacgt

SEQ ID NO: 366542 - DNA, 30 bp, Artificial Sequence
  Synthetic oligonucleotide
tgcccgtccatagatagtgaagccagacgt

SEQ ID NO: 366543 - DNA, 30 bp, Artificial Sequence
  Synthetic oligonucleotide
tgagcattgggggtgcgtgaagtcagacgt

SEQ ID NO: 366544 - DNA, 30 bp, Artificial Sequence
  Synthetic oligonucleotide
gcgcaaccaggttagaatgcgttcagacgt

SEQ ID NO: 366545 - DNA, 30 bp, Artificial Sequence
  Synthetic oligonucleotide
tttcaaccatatggaggtgaactgagacgt

SEQ ID NO: 366546 - DNA, 30 bp, Artificial Sequence
  Synthetic oligonucleotide
ttacgtcgcttcagctgttaggtgagacgt

SEQ ID NO: 366547 - DNA, 30 bp, Artificial Sequence
  Synthetic oligonucleotide
aactatcatgatgaacttgcgcatagacgt

SEQ ID NO: 366548 - DNA, 30 bp, Artificial Sequence
  Synthetic oligonucleotide
tgcgggtcttaaaagaaatatcaacgacgt

SEQ ID NO: 366549 - DNA, 30 bp, Artificial Sequence
  Synthetic oligonucleotide
gcaccttacgcccatcataagttacgacgt

SEQ ID NO: 366550 - DNA, 30 bp, Artificial Sequence
  Synthetic oligonucleotide
aagcgatttctgaaaaatggagctcgacgt

SEQ ID NO: 366551 - DNA, 30 bp, Artificial Sequence
  Synthetic oligonucleotide
cgtcagatggacccacatgggcatggacgt

SEQ ID NO: 366552 - DNA, 30 bp, Artificial Sequence
  Synthetic oligonucleotide
cagggatctcaatgtggctgggctggacgt

SEQ ID NO: 366553 - DNA, 30 bp, Artificial Sequence
  Synthetic oligonucleotide
gcgtctaatgtttacacgacccttggacgt

SEQ ID NO: 366554 - DNA, 30 bp, Artificial Sequence
  Synthetic oligonucleotide
gccatgcgactattatatgtagaatgacgt

SEQ ID NO: 366555 - DNA, 30 bp, Artificial Sequence
  Synthetic oligonucleotide
tgaagatcgcgcgagaagttgtaatgacgt

SEQ ID NO: 366556 - DNA, 30 bp, Artificial Sequence
  Synthetic oligonucleotide
cttcgaaagtctcgatagaccaactgacgt

SEQ ID NO: 366557 - DNA, 30 bp, Artificial Sequence
  Synthetic oligonucleotide
cacggatggcgcagtattcatcagtgacgt

SEQ ID NO: 366558 - DNA, 30 bp, Artificial Sequence
  Synthetic oligonucleotide
aagagctatcccgcatacacttgttgacgt

SEQ ID NO: 366559 - DNA, 30 bp, Artificial Sequence
  Synthetic oligonucleotide
gagccatacacaattaggccaatttgacgt

SEQ ID NO: 366560 - DNA, 30 bp, Artificial Sequence
  Synthetic oligonucleotide
gactaattgcatattcggcgtcaaatacgt

SEQ ID NO: 366561 - DNA, 30 bp, Artificial Sequence
  Synthetic oligonucleotide
tgttcggttgcagggtacattagaatacgt

SEQ ID NO: 366562 - DNA, 30 bp, Artificial Sequence
  Synthetic oligonucleotide
tgtataaacctgaaggagcgtttaatacgt

SEQ ID NO: 366563 - DNA, 30 bp, Artificial Sequence
  Synthetic oligonucleotide
gttagctgggttccccaggttttcatacgt

SEQ ID NO: 366564 - DNA, 31 bp, Artificial Sequence
  Synthetic oligonucleotide
tatcttaaatgtgcatcgaatccagatacgt

SEQ ID NO: 366565 - DNA, 30 bp, Artificial Sequence
  Synthetic oligonucleotide
ggtccgatgttatcggggcgtgggatacgt

SEQ ID NO: 366566 - DNA, 30 bp, Artificial Sequence
  Synthetic oligonucleotide
agccaagaagagttctataacattatacgt

SEQ ID NO: 366567 - DNA, 30 bp, Artificial Sequence
  Synthetic oligonucleotide
ggttgtcttaggtgactaatgcgactacgt

SEQ ID NO: 366568 - DNA, 30 bp, Artificial Sequence
  Synthetic oligonucleotide
cctttgcggtattcgcagataggactacgt

SEQ ID NO: 366569 - DNA, 30 bp, Artificial Sequence
  Synthetic oligonucleotide
gttcctaggttagtgggtaattagctacgt

SEQ ID NO: 366570 - DNA, 30 bp, Artificial Sequence
  Synthetic oligonucleotide
cataatacgttggtgaattgcattctacgt

SEQ ID NO: 366571 - DNA, 30 bp, Artificial Sequence
  Synthetic oligonucleotide
tcctccgaaaagttatgagcttaagtacgt

SEQ ID NO: 366572 - DNA, 30 bp, Artificial Sequence
  Synthetic oligonucleotide
gatgaaaagcgtttcacctttacagtacgt

SEQ ID NO: 366573 - DNA, 30 bp, Artificial Sequence
  Synthetic oligonucleotide
ttgtgacataacggtatctgggcagtacgt

SEQ ID NO: 366574 - DNA, 30 bp, Artificial Sequence
  Synthetic oligonucleotide
acataggtacccggattgtcatccgtacgt

SEQ ID NO: 366575 - DNA, 30 bp, Artificial Sequence
  Synthetic oligonucleotide
tgcaggagtatatagaccgcttgcgtacgt

SEQ ID NO: 366576 - DNA, 30 bp, Artificial Sequence
  Synthetic oligonucleotide
aaataccctcttgaaacccaggaggtacgt

SEQ ID NO: 366577 - DNA, 30 bp, Artificial Sequence
  Synthetic oligonucleotide
attgggcgcaaagataggcacggtgtacgt

SEQ ID NO: 366578 - DNA, 30 bp, Artificial Sequence
  Synthetic oligonucleotide
gttccagttatagccttcgagtgtgtacgt

SEQ ID NO: 366579 - DNA, 30 bp, Artificial Sequence
  Synthetic oligonucleotide
agatcatctatcctcccaacccccttacgt

SEQ ID NO: 366580 - DNA, 30 bp, Artificial Sequence
  Synthetic oligonucleotide
cctccgcagtatgttggtgatttgttacgt

SEQ ID NO: 366581 - DNA, 30 bp, Artificial Sequence
  Synthetic oligonucleotide
cccatagcattgcatagggcacatttacgt

SEQ ID NO: 366582 - DNA, 30 bp, Artificial Sequence
  Synthetic oligonucleotide
ggccatcgtcggaccgactagattttacgt

SEQ ID NO: 366583 - DNA, 30 bp, Artificial Sequence
  Synthetic oligonucleotide
ggcttactaggccggatcgcacaaaaccgt

SEQ ID NO: 366584 - DNA, 30 bp, Artificial Sequence
  Synthetic oligonucleotide
gttagaccaactggtcccgcgcaaaaccgt

SEQ ID NO: 366585 - DNA, 30 bp, Artificial Sequence
  Synthetic oligonucleotide
gggatgagcgtgggacgctaatcaaaccgt

SEQ ID NO: 366586 - DNA, 30 bp, Artificial Sequence
  Synthetic oligonucleotide
atttgaggtcgtgtggtcgattgaaaccgt

SEQ ID NO: 366587 - DNA, 30 bp, Artificial Sequence
  Synthetic oligonucleotide
tcgagtaataggcggttgaggctaaaccgt

SEQ ID NO: 366588 - DNA, 30 bp, Artificial Sequence
  Synthetic oligonucleotide
ccaggggcttaatcttaaacaagcaaccgt

SEQ ID NO: 366589 - DNA, 30 bp, Artificial Sequence
  Synthetic oligonucleotide
tgatagctcggattcctggtaggcaaccgt

SEQ ID NO: 366590 - DNA, 30 bp, Artificial Sequence
  Synthetic oligonucleotide
catcccgatttctctctcatccataaccgt

SEQ ID NO: 366591 - DNA, 30 bp, Artificial Sequence
  Synthetic oligonucleotide
gggaaacgggatggggcatgcgctaaccgt

SEQ ID NO: 366592 - DNA, 30 bp, Artificial Sequence
  Synthetic oligonucleotide
tgcgcggaggcctttgatcagggtaaccgt

SEQ ID NO: 366593 - DNA, 30 bp, Artificial Sequence
  Synthetic oligonucleotide
ccggtaatatccgtagtacgggttaaccgt

SEQ ID NO: 366594 - DNA, 30 bp, Artificial Sequence
  Synthetic oligonucleotide
caacagggccctgtcactgaaggacaccgt

SEQ ID NO: 366595 - DNA, 30 bp, Artificial Sequence
  Synthetic oligonucleotide
gtgacctcgagtttgcctctcgaccaccgt

SEQ ID NO: 366596 - DNA, 30 bp, Artificial Sequence
  Synthetic oligonucleotide
taggctccatttggttcaaatcagcaccgt

SEQ ID NO: 366597 - DNA, 30 bp, Artificial Sequence
  Synthetic oligonucleotide
gcctatatttaagtactcggagcgcaccgt

SEQ ID NO: 366598 - DNA, 30 bp, Artificial Sequence
  Synthetic oligonucleotide
tcacaagcctatgaggggatatttcaccgt

SEQ ID NO: 366599 - DNA, 30 bp, Artificial Sequence
  Synthetic oligonucleotide
tcggcgtatctaatgccaatagcagaccgt

SEQ ID NO: 366600 - DNA, 30 bp, Artificial Sequence
  Synthetic oligonucleotide
gttagggggagtaggcagcgataggaccgt

SEQ ID NO: 366601 - DNA, 30 bp, Artificial Sequence
  Synthetic oligonucleotide
ttaggtccgggcagggaaggggtggaccgt

SEQ ID NO: 366602 - DNA, 30 bp, Artificial Sequence
  Synthetic oligonucleotide
ggaacggaacgccgaacttcgggtgaccgt

SEQ ID NO: 366603 - DNA, 30 bp, Artificial Sequence
  Synthetic oligonucleotide
tcaactttacgttaaaagtggttctaccgt

SEQ ID NO: 366604 - DNA, 30 bp, Artificial Sequence
  Synthetic oligonucleotide
gaaatttcatagcgcgacatcatgtaccgt

SEQ ID NO: 366605 - DNA, 30 bp, Artificial Sequence
  Synthetic oligonucleotide
gtacacccttcaaacataaagacttaccgt

SEQ ID NO: 366606 - DNA, 30 bp, Artificial Sequence
  Synthetic oligonucleotide
gatcgagcctatcgcgacccaaaaacccgt

SEQ ID NO: 366607 - DNA, 30 bp, Artificial Sequence
  Synthetic oligonucleotide
taaggatacctgaacgggggtgtaacccgt

SEQ ID NO: 366608 - DNA, 30 bp, Artificial Sequence
  Synthetic oligonucleotide
cctttactttagagggttgacatcacccgt

SEQ ID NO: 366609 - DNA, 30 bp, Artificial Sequence
  Synthetic oligonucleotide
aattggacagcgagaattggtgggacccgt

SEQ ID NO: 366610 - DNA, 30 bp, Artificial Sequence
  Synthetic oligonucleotide
gtcggtatttgtcagccgcctcatacccgt

SEQ ID NO: 366611 - DNA, 30 bp, Artificial Sequence
  Synthetic oligonucleotide
gtttacatgcatcccgtgcgggctacccgt

SEQ ID NO: 366612 - DNA, 30 bp, Artificial Sequence
  Synthetic oligonucleotide
aaaggattaatcgagtcgtcccgcccccgt

SEQ ID NO: 366613 - DNA, 30 bp, Artificial Sequence
  Synthetic oligonucleotide
tgctacgggcctcatcatgcgtttccccgt

SEQ ID NO: 366614 - DNA, 30 bp, Artificial Sequence
  Synthetic oligonucleotide
tagggcaacccacgactcgtactagcccgt

SEQ ID NO: 366615 - DNA, 30 bp, Artificial Sequence
  Synthetic oligonucleotide
aagagaattcatggagctacttccgcccgt

SEQ ID NO: 366616 - DNA, 30 bp, Artificial Sequence
  Synthetic oligonucleotide
ttatccacggggtagttgagacgggcccgt

SEQ ID NO: 366617 - DNA, 30 bp, Artificial Sequence
  Synthetic oligonucleotide
aagcgcctatgcgttggcaggaatgcccgt

SEQ ID NO: 366618 - DNA, 30 bp, Artificial Sequence
  Synthetic oligonucleotide
tctgcggacttttgcgcatttcctgcccgt

SEQ ID NO: 366619 - DNA, 30 bp, Artificial Sequence
  Synthetic oligonucleotide
gacgttagcggtatgtgacgaacatcccgt

SEQ ID NO: 366620 - DNA, 30 bp, Artificial Sequence
  Synthetic oligonucleotide
taatctagactatctgaggtcctatcccgt

SEQ ID NO: 366621 - DNA, 30 bp, Artificial Sequence
  Synthetic oligonucleotide
atagaagtacagctcaagaattggtcccgt

SEQ ID NO: 366622 - DNA, 30 bp, Artificial Sequence
  Synthetic oligonucleotide
agtgctacggctcataggccttcaagccgt

SEQ ID NO: 366623 - DNA, 30 bp, Artificial Sequence
  Synthetic oligonucleotide
cataacttgctggaggtgcacggcagccgt

SEQ ID NO: 366624 - DNA, 30 bp, Artificial Sequence
  Synthetic oligonucleotide
ttgaacgggcagtctgtgcttgcgagccgt

SEQ ID NO: 366625 - DNA, 30 bp, Artificial Sequence
  Synthetic oligonucleotide
cagaaacaaagaaatttgcatggtagccgt

SEQ ID NO: 366626 - DNA, 30 bp, Artificial Sequence
  Synthetic oligonucleotide
gttcggctgcatcctgtcactcaacgccgt

SEQ ID NO: 366627 - DNA, 30 bp, Artificial Sequence
  Synthetic oligonucleotide
gtttcgccatcattcttgtactcgcgccgt

SEQ ID NO: 366628 - DNA, 30 bp, Artificial Sequence
  Synthetic oligonucleotide
agtaagttctcgcatggagagaatcgccgt

SEQ ID NO: 366629 - DNA, 30 bp, Artificial Sequence
  Synthetic oligonucleotide
tatagacaagagaggctcttggctcgccgt

SEQ ID NO: 366630 - DNA, 28 bp, Artificial Sequence
  Synthetic oligonucleotide
caaattgggggttttatatggaggccgt

SEQ ID NO: 366631 - DNA, 30 bp, Artificial Sequence
  Synthetic oligonucleotide
aaagatccgcgaaagatatttgagggccgt

SEQ ID NO: 366632 - DNA, 30 bp, Artificial Sequence
  Synthetic oligonucleotide
ggggggaccagacggaggagctagggccgt

SEQ ID NO: 366633 - DNA, 30 bp, Artificial Sequence
  Synthetic oligonucleotide
ccggtctaagaggggctatatgtgggccgt

SEQ ID NO: 366634 - DNA, 30 bp, Artificial Sequence
  Synthetic oligonucleotide
tacaatgaagcaaacgaggtcaatggccgt

SEQ ID NO: 366635 - DNA, 30 bp, Artificial Sequence
  Synthetic oligonucleotide
ggagtaccagtgacctacagtcctggccgt

SEQ ID NO: 366636 - DNA, 30 bp, Artificial Sequence
  Synthetic oligonucleotide
gccctgtcgcgcgtgttgctaagctgccgt

SEQ ID NO: 366637 - DNA, 30 bp, Artificial Sequence
  Synthetic oligonucleotide
ccgtggatgatgctttagaacatctgccgt

SEQ ID NO: 366638 - DNA, 30 bp, Artificial Sequence
  Synthetic oligonucleotide
acgccgccaagggcattcagtcagtgccgt

SEQ ID NO: 366639 - DNA, 30 bp, Artificial Sequence
  Synthetic oligonucleotide
tgcggtccggggctatgtgaaggttgccgt

SEQ ID NO: 366640 - DNA, 30 bp, Artificial Sequence
  Synthetic oligonucleotide
aacatcttactgcaccggtcagaaatccgt

SEQ ID NO: 366641 - DNA, 30 bp, Artificial Sequence
  Synthetic oligonucleotide
ggttctgtgtaaatgtagtagctaatccgt

SEQ ID NO: 366642 - DNA, 30 bp, Artificial Sequence
  Synthetic oligonucleotide
tataggaggcacgaagtggttctaatccgt

SEQ ID NO: 366643 - DNA, 30 bp, Artificial Sequence
  Synthetic oligonucleotide
tctgagttgagaagcgctcatcccatccgt

SEQ ID NO: 366644 - DNA, 30 bp, Artificial Sequence
  Synthetic oligonucleotide
tagcgatgctaatacgacatactcatccgt

SEQ ID NO: 366645 - DNA, 30 bp, Artificial Sequence
  Synthetic oligonucleotide
ccagtaaacgagttgccagaagggatccgt

SEQ ID NO: 366646 - DNA, 30 bp, Artificial Sequence
  Synthetic oligonucleotide
agaaaaaagtaaacgtcgggtgggatccgt

SEQ ID NO: 366647 - DNA, 30 bp, Artificial Sequence
  Synthetic oligonucleotide
tgtgaaaattggttcctcattagtatccgt

SEQ ID NO: 366648 - DNA, 30 bp, Artificial Sequence
  Synthetic oligonucleotide
ttccaccagcctaaagggtgcggactccgt

SEQ ID NO: 366649 - DNA, 31 bp, Artificial Sequence
  Synthetic oligonucleotide
ggttgcgagggttgcacgcgtgttactccgt

SEQ ID NO: 366650 - DNA, 30 bp, Artificial Sequence
  Synthetic oligonucleotide
ttcatccaaactcctctgatcctcctccgt

SEQ ID NO: 366651 - DNA, 30 bp, Artificial Sequence
  Synthetic oligonucleotide
ggggtcaacagttgtcatggcaggctccgt

SEQ ID NO: 366652 - DNA, 30 bp, Artificial Sequence
  Synthetic oligonucleotide
tcccttggacaaatgaagtaaattctccgt

SEQ ID NO: 366653 - DNA, 30 bp, Artificial Sequence
  Synthetic oligonucleotide
aatccaacgaatcccgaggggcttctccgt

SEQ ID NO: 366654 - DNA, 30 bp, Artificial Sequence
  Synthetic oligonucleotide
gcgccctttaagtgtttctcatgagtccgt

SEQ ID NO: 366655 - DNA, 30 bp, Artificial Sequence
  Synthetic oligonucleotide
cctgaaaccgattgggtaactcccgtccgt

SEQ ID NO: 366656 - DNA, 30 bp, Artificial Sequence
  Synthetic oligonucleotide
accatcaccggaagatttttcaaggtccgt

SEQ ID NO: 366657 - DNA, 30 bp, Artificial Sequence
  Synthetic oligonucleotide
catagcccactcacttgaagtagggtccgt

SEQ ID NO: 366658 - DNA, 30 bp, Artificial Sequence
  Synthetic oligonucleotide
aacctggggacaattgacaggatggtccgt

SEQ ID NO: 366659 - DNA, 30 bp, Artificial Sequence
  Synthetic oligonucleotide
agaaaatgcttcgcgtgttcggatgtccgt

SEQ ID NO: 366660 - DNA, 30 bp, Artificial Sequence
  Synthetic oligonucleotide
tgggcaaaacagatgctgatggatgtccgt

SEQ ID NO: 366661 - DNA, 30 bp, Artificial Sequence
  Synthetic oligonucleotide
tcttgtaccatttgcagggcctctgtccgt

SEQ ID NO: 366662 - DNA, 30 bp, Artificial Sequence
  Synthetic oligonucleotide
gccactatgggaagaaatatatgtgtccgt

SEQ ID NO: 366663 - DNA, 30 bp, Artificial Sequence
  Synthetic oligonucleotide
accactgagcggagttcgacgtggttccgt

SEQ ID NO: 366664 - DNA, 30 bp, Artificial Sequence
  Synthetic oligonucleotide
gcttgtgttactgttcgaaggcgtttccgt

SEQ ID NO: 366665 - DNA, 30 bp, Artificial Sequence
  Synthetic oligonucleotide
aacctccgtaagccttatgcatgaaagcgt

SEQ ID NO: 366666 - DNA, 30 bp, Artificial Sequence
  Synthetic oligonucleotide
tgtatacagagaccgtctatatgcaagcgt

SEQ ID NO: 366667 - DNA, 30 bp, Artificial Sequence
  Synthetic oligonucleotide
taccgaaagtcccgggtttgattcaagcgt

SEQ ID NO: 366668 - DNA, 30 bp, Artificial Sequence
  Synthetic oligonucleotide
catacattacgttgacctaccgggaagcgt

SEQ ID NO: 366669 - DNA, 30 bp, Artificial Sequence
  Synthetic oligonucleotide
ggtttcacaaccggccttcgaaaacagcgt

SEQ ID NO: 366670 - DNA, 30 bp, Artificial Sequence
  Synthetic oligonucleotide
taagagattctgccctaatttgaacagcgt

SEQ ID NO: 366671 - DNA, 30 bp, Artificial Sequence
  Synthetic oligonucleotide
tgccccttagtaagtgtatcgagacagcgt

SEQ ID NO: 366672 - DNA, 30 bp, Artificial Sequence
  Synthetic oligonucleotide
ggatccagcaaaattcatgccctacagcgt

SEQ ID NO: 366673 - DNA, 30 bp, Artificial Sequence
  Synthetic oligonucleotide
acaacttacgccgtccgtaaggcccagcgt

SEQ ID NO: 366674 - DNA, 29 bp, Artificial Sequence
  Synthetic oligonucleotide
ccactagtcattaacacacgcagcagcgt

SEQ ID NO: 366675 - DNA, 30 bp, Artificial Sequence
  Synthetic oligonucleotide
gatgattcgttatcttgttcctagcagcgt

SEQ ID NO: 366676 - DNA, 30 bp, Artificial Sequence
  Synthetic oligonucleotide
caacgagatattttctcggtgttgcagcgt

SEQ ID NO: 366677 - DNA, 30 bp, Artificial Sequence
  Synthetic oligonucleotide
gatccagaatcctgttaggtccatcagcgt

SEQ ID NO: 366678 - DNA, 30 bp, Artificial Sequence
  Synthetic oligonucleotide
ggatatcatcactgtatcccggctcagcgt

SEQ ID NO: 366679 - DNA, 30 bp, Artificial Sequence
  Synthetic oligonucleotide
atgtgaagcgacctaggattaattcagcgt

SEQ ID NO: 366680 - DNA, 30 bp, Artificial Sequence
  Synthetic oligonucleotide
ttagtattttgtggaagccggattcagcgt

SEQ ID NO: 366681 - DNA, 30 bp, Artificial Sequence
  Synthetic oligonucleotide
agcctcccgaatcgattggcattcgagcgt

SEQ ID NO: 366682 - DNA, 31 bp, Artificial Sequence
  Synthetic oligonucleotide
ccttcgcccagtgctttgccacatggagcgt

SEQ ID NO: 366683 - DNA, 30 bp, Artificial Sequence
  Synthetic oligonucleotide
taattgacgccgatacgggctgtggagcgt

SEQ ID NO: 366684 - DNA, 30 bp, Artificial Sequence
  Synthetic oligonucleotide
tggcaagacgggaatccatgatatgagcgt

SEQ ID NO: 366685 - DNA, 30 bp, Artificial Sequence
  Synthetic oligonucleotide
gccacaacacaaaagtcatagactgagcgt

SEQ ID NO: 366686 - DNA, 30 bp, Artificial Sequence
  Synthetic oligonucleotide
aggttgacggccattggggtggttgagcgt

SEQ ID NO: 366687 - DNA, 30 bp, Artificial Sequence
  Synthetic oligonucleotide
aattaggtgattggtcaatcgccatagcgt

SEQ ID NO: 366688 - DNA, 30 bp, Artificial Sequence
  Synthetic oligonucleotide
aaaatcttgcgaccacgggggggatagcgt

SEQ ID NO: 366689 - DNA, 30 bp, Artificial Sequence
  Synthetic oligonucleotide
acacgtcacacacgttgaccaatatagcgt

SEQ ID NO: 366690 - DNA, 30 bp, Artificial Sequence
  Synthetic oligonucleotide
caaattaggagcgataccgggagctagcgt

SEQ ID NO: 366691 - DNA, 30 bp, Artificial Sequence
  Synthetic oligonucleotide
cgggttctttcggcaattatgggctagcgt

SEQ ID NO: 366692 - DNA, 30 bp, Artificial Sequence
  Synthetic oligonucleotide
tcgggttgggtgccgccacggtagtagcgt

SEQ ID NO: 366693 - DNA, 30 bp, Artificial Sequence
  Synthetic oligonucleotide
cttaattccaggccacatcctgattagcgt

SEQ ID NO: 366694 - DNA, 30 bp, Artificial Sequence
  Synthetic oligonucleotide
cggcctggtcttcttgtacgtcaaacgcgt

SEQ ID NO: 366695 - DNA, 30 bp, Artificial Sequence
  Synthetic oligonucleotide
ggtattcagcagtcccacaatgaaacgcgt

SEQ ID NO: 366696 - DNA, 30 bp, Artificial Sequence
  Synthetic oligonucleotide
catagggggttggactctatgtgaacgcgt

SEQ ID NO: 366697 - DNA, 30 bp, Artificial Sequence
  Synthetic oligonucleotide
caacttgaagttcccgcccaaataacgcgt

SEQ ID NO: 366698 - DNA, 30 bp, Artificial Sequence
  Synthetic oligonucleotide
acaatgcaccagcatggattgggcacgcgt

SEQ ID NO: 366699 - DNA, 30 bp, Artificial Sequence
  Synthetic oligonucleotide
tactggtaatgggataaacgtaatacgcgt

SEQ ID NO: 366700 - DNA, 30 bp, Artificial Sequence
  Synthetic oligonucleotide
actccccacgtgaacgattacgcaccgcgt

SEQ ID NO: 366701 - DNA, 30 bp, Artificial Sequence
  Synthetic oligonucleotide
ccacggttcattcattagtagcacccgcgt

SEQ ID NO: 366702 - DNA, 29 bp, Artificial Sequence
  Synthetic oligonucleotide
tctcacggagaagtgcgctcttgccgcgt

SEQ ID NO: 366703 - DNA, 30 bp, Artificial Sequence
  Synthetic oligonucleotide
gaagcgcaacaggcaacagtgactccgcgt

SEQ ID NO: 366704 - DNA, 30 bp, Artificial Sequence
  Synthetic oligonucleotide
acactgacaccactagatagggttccgcgt

SEQ ID NO: 366705 - DNA, 30 bp, Artificial Sequence
  Synthetic oligonucleotide
gtattcagtaattctaaacggatggcgcgt

SEQ ID NO: 366706 - DNA, 30 bp, Artificial Sequence
  Synthetic oligonucleotide
ttttgagcccgacaggtaatctatgcgcgt

SEQ ID NO: 366707 - DNA, 30 bp, Artificial Sequence
  Synthetic oligonucleotide
tggttttggcaactacggcgggctgcgcgt

SEQ ID NO: 366708 - DNA, 30 bp, Artificial Sequence
  Synthetic oligonucleotide
caccagcgcgtcagtcactaggcatcgcgt

SEQ ID NO: 366709 - DNA, 30 bp, Artificial Sequence
  Synthetic oligonucleotide
ctcttggggcattggcgccaagactcgcgt

SEQ ID NO: 366710 - DNA, 30 bp, Artificial Sequence
  Synthetic oligonucleotide
tgattttgggaaatcccttgtgcctcgcgt

SEQ ID NO: 366711 - DNA, 30 bp, Artificial Sequence
  Synthetic oligonucleotide
acaagctattgcacgtaccactcgtcgcgt

SEQ ID NO: 366712 - DNA, 30 bp, Artificial Sequence
  Synthetic oligonucleotide
cgagggccgacttcacattgcaggtcgcgt

SEQ ID NO: 366713 - DNA, 30 bp, Artificial Sequence
  Synthetic oligonucleotide
cgagtcgtttaacattttctgcggtcgcgt

SEQ ID NO: 366714 - DNA, 30 bp, Artificial Sequence
  Synthetic oligonucleotide
ttagtctttttacactccaaggggtcgcgt

SEQ ID NO: 366715 - DNA, 30 bp, Artificial Sequence
  Synthetic oligonucleotide
aataagttcgacttacagggttggtcgcgt

SEQ ID NO: 366716 - DNA, 30 bp, Artificial Sequence
  Synthetic oligonucleotide
caggggaacgctacagtgtgtttgtcgcgt

SEQ ID NO: 366717 - DNA, 30 bp, Artificial Sequence
  Synthetic oligonucleotide
taagatcattacgacttctagtcaaggcgt

SEQ ID NO: 366718 - DNA, 30 bp, Artificial Sequence
  Synthetic oligonucleotide
taagactttgtaagttcagtttgccggcgt

SEQ ID NO: 366719 - DNA, 30 bp, Artificial Sequence
  Synthetic oligonucleotide
tcaagttgattaactgtctcatcgcggcgt

SEQ ID NO: 366720 - DNA, 30 bp, Artificial Sequence
  Synthetic oligonucleotide
agttttatcccaagtttgcggcctcggcgt

SEQ ID NO: 366721 - DNA, 30 bp, Artificial Sequence
  Synthetic oligonucleotide
tgaaatacgagaaggacacactctgggcgt

SEQ ID NO: 366722 - DNA, 30 bp, Artificial Sequence
  Synthetic oligonucleotide
ttgcatgggggtggtcatggcggtgggcgt

SEQ ID NO: 366723 - DNA, 30 bp, Artificial Sequence
  Synthetic oligonucleotide
gtatgcttcaacgatgatcggaaatggcgt

SEQ ID NO: 366724 - DNA, 30 bp, Artificial Sequence
  Synthetic oligonucleotide
cacttaactggcgagtgaatagaatggcgt

SEQ ID NO: 366725 - DNA, 30 bp, Artificial Sequence
  Synthetic oligonucleotide
gacgccagacatgctaaggttgaatggcgt

SEQ ID NO: 366726 - DNA, 30 bp, Artificial Sequence
  Synthetic oligonucleotide
gagtatgtcgtatagatcatacgatggcgt

SEQ ID NO: 366727 - DNA, 30 bp, Artificial Sequence
  Synthetic oligonucleotide
taagaggatgacgatgtacgggtatggcgt

SEQ ID NO: 366728 - DNA, 30 bp, Artificial Sequence
  Synthetic oligonucleotide
ctctgtagctactattgatggcactggcgt

SEQ ID NO: 366729 - DNA, 30 bp, Artificial Sequence
  Synthetic oligonucleotide
tagttttgtaaaagcgatggactctggcgt

SEQ ID NO: 366730 - DNA, 30 bp, Artificial Sequence
  Synthetic oligonucleotide
ggttcgattgtgtcagggagtttctggcgt

SEQ ID NO: 366731 - DNA, 30 bp, Artificial Sequence
  Synthetic oligonucleotide
tgcgtttttctagttcgacaagcgtggcgt

SEQ ID NO: 366732 - DNA, 30 bp, Artificial Sequence
  Synthetic oligonucleotide
atacgttttcgaatcgcccacatttggcgt

SEQ ID NO: 366733 - DNA, 30 bp, Artificial Sequence
  Synthetic oligonucleotide
gaacagcttagtggaatagccaaaatgcgt

SEQ ID NO: 366734 - DNA, 31 bp, Artificial Sequence
  Synthetic oligonucleotide
gggactatagtcggatcgcccacgaatgcgt

SEQ ID NO: 366735 - DNA, 30 bp, Artificial Sequence
  Synthetic oligonucleotide
atatcggttgaaatattgaactgcatgcgt

SEQ ID NO: 366736 - DNA, 30 bp, Artificial Sequence
  Synthetic oligonucleotide
taatgttatgatagcaggagccgtatgcgt

SEQ ID NO: 366737 - DNA, 30 bp, Artificial Sequence
  Synthetic oligonucleotide
cctcaccgtattcccgcattccttatgcgt

SEQ ID NO: 366738 - DNA, 30 bp, Artificial Sequence
  Synthetic oligonucleotide
ctgagcacgggaacggggacgggactgcgt

SEQ ID NO: 366739 - DNA, 30 bp, Artificial Sequence
  Synthetic oligonucleotide
ccggagaatgctgtcaaatcatgactgcgt

SEQ ID NO: 366740 - DNA, 30 bp, Artificial Sequence
  Synthetic oligonucleotide
aaggtcctaattagctcgtgctgactgcgt

SEQ ID NO: 366741 - DNA, 30 bp, Artificial Sequence
  Synthetic oligonucleotide
taagcttctagaacttggtcacccctgcgt

SEQ ID NO: 366742 - DNA, 30 bp, Artificial Sequence
  Synthetic oligonucleotide
catacatatgacatagtcgattgtctgcgt

SEQ ID NO: 366743 - DNA, 30 bp, Artificial Sequence
  Synthetic oligonucleotide
aaagttcctgttctgccagtcccagtgcgt

SEQ ID NO: 366744 - DNA, 30 bp, Artificial Sequence
  Synthetic oligonucleotide
ccagccttaaatgagtgacccgcagtgcgt

SEQ ID NO: 366745 - DNA, 30 bp, Artificial Sequence
  Synthetic oligonucleotide
gaaccaatatagcacgagtctagcgtgcgt

SEQ ID NO: 366746 - DNA, 30 bp, Artificial Sequence
  Synthetic oligonucleotide
gtcaaacgatttcttttacttaaggtgcgt

SEQ ID NO: 366747 - DNA, 30 bp, Artificial Sequence
  Synthetic oligonucleotide
ctacgttaacgggaccacccaacggtgcgt

SEQ ID NO: 366748 - DNA, 30 bp, Artificial Sequence
  Synthetic oligonucleotide
ttgcggttctatgcttatgacccggtgcgt

SEQ ID NO: 366749 - DNA, 30 bp, Artificial Sequence
  Synthetic oligonucleotide
accatggtacagacgctttagtgggtgcgt

SEQ ID NO: 366750 - DNA, 30 bp, Artificial Sequence
  Synthetic oligonucleotide
gcgtcgcatacaacccgctggtatgtgcgt

SEQ ID NO: 366751 - DNA, 30 bp, Artificial Sequence
  Synthetic oligonucleotide
caatggattgacgtgcctttcccattgcgt

SEQ ID NO: 366752 - DNA, 30 bp, Artificial Sequence
  Synthetic oligonucleotide
aggctgctatacagggcagacatattgcgt

SEQ ID NO: 366753 - DNA, 30 bp, Artificial Sequence
  Synthetic oligonucleotide
cagccccatgagattacggatttattgcgt

SEQ ID NO: 366754 - DNA, 30 bp, Artificial Sequence
  Synthetic oligonucleotide
aaagccatctaagcacgccgcttcttgcgt

SEQ ID NO: 366755 - DNA, 30 bp, Artificial Sequence
  Synthetic oligonucleotide
ataaatcaacgtgggcaacgaaagttgcgt

SEQ ID NO: 366756 - DNA, 30 bp, Artificial Sequence
  Synthetic oligonucleotide
cgcacgtcatttagtgggatcacgttgcgt

SEQ ID NO: 366757 - DNA, 30 bp, Artificial Sequence
  Synthetic oligonucleotide
tgcattgtggaaagctatccgaggttgcgt

SEQ ID NO: 366758 - DNA, 30 bp, Artificial Sequence
  Synthetic oligonucleotide
cattagtacgcacttatcggatggttgcgt

SEQ ID NO: 366759 - DNA, 30 bp, Artificial Sequence
  Synthetic oligonucleotide
tctcgcatagtacggggtcgacatttgcgt

SEQ ID NO: 366760 - DNA, 30 bp, Artificial Sequence
  Synthetic oligonucleotide
ataaaacaggtaaccgcggattgtttgcgt

SEQ ID NO: 366761 - DNA, 30 bp, Artificial Sequence
  Synthetic oligonucleotide
atccgcagcgcctgcgagatagggaatcgt

SEQ ID NO: 366762 - DNA, 30 bp, Artificial Sequence
  Synthetic oligonucleotide
aatttgtctaatagaatcgagatgaatcgt

SEQ ID NO: 366763 - DNA, 31 bp, Artificial Sequence
  Synthetic oligonucleotide
caagcgtcattggcttggattcttgaatcgt

SEQ ID NO: 366764 - DNA, 30 bp, Artificial Sequence
  Synthetic oligonucleotide
cgctcccgcgtgcgctccaggttgaatcgt

SEQ ID NO: 366765 - DNA, 30 bp, Artificial Sequence
  Synthetic oligonucleotide
ttaatttgccaaaagccaactaataatcgt

SEQ ID NO: 366766 - DNA, 30 bp, Artificial Sequence
  Synthetic oligonucleotide
cagtaaataccagctctctattaacatcgt

SEQ ID NO: 366767 - DNA, 30 bp, Artificial Sequence
  Synthetic oligonucleotide
gggtgactcggggttactcgggcacatcgt

SEQ ID NO: 366768 - DNA, 30 bp, Artificial Sequence
  Synthetic oligonucleotide
gaatagctctccgtgatggccagacatcgt

SEQ ID NO: 366769 - DNA, 30 bp, Artificial Sequence
  Synthetic oligonucleotide
tcgggatttcggcctcgccaaaggcatcgt

SEQ ID NO: 366770 - DNA, 30 bp, Artificial Sequence
  Synthetic oligonucleotide
gaaaccggcactagcgacgcgttgcatcgt

SEQ ID NO: 366771 - DNA, 30 bp, Artificial Sequence
  Synthetic oligonucleotide
gttagtacgacgacgtcagccagtcatcgt

SEQ ID NO: 366772 - DNA, 30 bp, Artificial Sequence
  Synthetic oligonucleotide
gctagcgtttcatcgcgatttcttcatcgt

SEQ ID NO: 366773 - DNA, 30 bp, Artificial Sequence
  Synthetic oligonucleotide
ccaaaggggtgatattgagtcgttcatcgt

SEQ ID NO: 366774 - DNA, 30 bp, Artificial Sequence
  Synthetic oligonucleotide
ccatagttgctccagccatctacagatcgt

SEQ ID NO: 366775 - DNA, 30 bp, Artificial Sequence
  Synthetic oligonucleotide
atcacaaaggctattccagatgaggatcgt

SEQ ID NO: 366776 - DNA, 30 bp, Artificial Sequence
  Synthetic oligonucleotide
gcttggtttttggtcgccgttatggatcgt

SEQ ID NO: 366777 - DNA, 30 bp, Artificial Sequence
  Synthetic oligonucleotide
gacacggctacaggccgctcaaatgatcgt

SEQ ID NO: 366778 - DNA, 30 bp, Artificial Sequence
  Synthetic oligonucleotide
tgcgccagcgtcggatgaaagtatgatcgt

SEQ ID NO: 366779 - DNA, 30 bp, Artificial Sequence
  Synthetic oligonucleotide
ataacccccggaccgaccggggctgatcgt

SEQ ID NO: 366780 - DNA, 30 bp, Artificial Sequence
  Synthetic oligonucleotide
gagcgaaacgatctacaggatgcatatcgt

SEQ ID NO: 366781 - DNA, 30 bp, Artificial Sequence
  Synthetic oligonucleotide
taagtataatcatacagagtgtgatatcgt

SEQ ID NO: 366782 - DNA, 30 bp, Artificial Sequence
  Synthetic oligonucleotide
actatgcgaaggtccggattatactatcgt

SEQ ID NO: 366783 - DNA, 30 bp, Artificial Sequence
  Synthetic oligonucleotide
attcacgaaacttcgggataagtctatcgt

SEQ ID NO: 366784 - DNA, 30 bp, Artificial Sequence
  Synthetic oligonucleotide
gccacatattagctcgtgagcccgtatcgt

SEQ ID NO: 366785 - DNA, 30 bp, Artificial Sequence
  Synthetic oligonucleotide
aaaaggtacagaactccttgtctgtatcgt

SEQ ID NO: 366786 - DNA, 30 bp, Artificial Sequence
  Synthetic oligonucleotide
ctggaccgactggttcgtaagcattatcgt

SEQ ID NO: 366787 - DNA, 39 bp, Artificial Sequence
  Synthetic oligonucleotide
ccgcgcacctggaggtcgagttaccgttgaagttatcgt

SEQ ID NO: 366788 - DNA, 30 bp, Artificial Sequence
  Synthetic oligonucleotide
gatccggcattcatacgtttgacacctcgt

SEQ ID NO: 366789 - DNA, 30 bp, Artificial Sequence
  Synthetic oligonucleotide
gttatgacctatagtatgagacaccctcgt

SEQ ID NO: 366790 - DNA, 30 bp, Artificial Sequence
  Synthetic oligonucleotide
atacgaggcgctatcatacgcagtcctcgt

SEQ ID NO: 366791 - DNA, 30 bp, Artificial Sequence
  Synthetic oligonucleotide
atttcacctctggtgccacgggttcctcgt

SEQ ID NO: 366792 - DNA, 30 bp, Artificial Sequence
  Synthetic oligonucleotide
gctcaccgtagaaggcagacctgagctcgt

SEQ ID NO: 366793 - DNA, 30 bp, Artificial Sequence
  Synthetic oligonucleotide
agctacatgccagccgctcgaaccgctcgt

SEQ ID NO: 366794 - DNA, 30 bp, Artificial Sequence
  Synthetic oligonucleotide
ctttctactcttctgcgtttattggctcgt

SEQ ID NO: 366795 - DNA, 30 bp, Artificial Sequence
  Synthetic oligonucleotide
ggtaacgccgaagtagagataactgctcgt

SEQ ID NO: 366796 - DNA, 30 bp, Artificial Sequence
  Synthetic oligonucleotide
aagcgttttaacactttatgaattgctcgt

SEQ ID NO: 366797 - DNA, 30 bp, Artificial Sequence
  Synthetic oligonucleotide
accactgcctcaacctacggctgatctcgt

SEQ ID NO: 366798 - DNA, 30 bp, Artificial Sequence
  Synthetic oligonucleotide
aatattaaattcatgaagcacagttctcgt

SEQ ID NO: 366799 - DNA, 30 bp, Artificial Sequence
  Synthetic oligonucleotide
tcgcggttgaatactggatggttgagtcgt

SEQ ID NO: 366800 - DNA, 30 bp, Artificial Sequence
  Synthetic oligonucleotide
tccccgtgggaaccacaattcgatagtcgt

SEQ ID NO: 366801 - DNA, 30 bp, Artificial Sequence
  Synthetic oligonucleotide
ggtcggatttatgccccgtgcaagcgtcgt

SEQ ID NO: 366802 - DNA, 30 bp, Artificial Sequence
  Synthetic oligonucleotide
gagacggccaaccaaagacgctctcgtcgt

SEQ ID NO: 366803 - DNA, 30 bp, Artificial Sequence
  Synthetic oligonucleotide
tatcaaaatcggctgtgtcgttcaggtcgt

SEQ ID NO: 366804 - DNA, 30 bp, Artificial Sequence
  Synthetic oligonucleotide
ttcgcgataactcgctaattttcaggtcgt

SEQ ID NO: 366805 - DNA, 30 bp, Artificial Sequence
  Synthetic oligonucleotide
tctgaggtcgatgattggccgtccggtcgt

SEQ ID NO: 366806 - DNA, 30 bp, Artificial Sequence
  Synthetic oligonucleotide
cgatcgctccagcatgagtgttccggtcgt

SEQ ID NO: 366807 - DNA, 30 bp, Artificial Sequence
  Synthetic oligonucleotide
ctgggctaaaaagaggtgacgtgcggtcgt

SEQ ID NO: 366808 - DNA, 30 bp, Artificial Sequence
  Synthetic oligonucleotide
gtatgtacccatatgtaaaaagtcggtcgt

SEQ ID NO: 366809 - DNA, 30 bp, Artificial Sequence
  Synthetic oligonucleotide
tgatgtgacactgtacaagctctctgtcgt

SEQ ID NO: 366810 - DNA, 30 bp, Artificial Sequence
  Synthetic oligonucleotide
ggcagtggccccgtttagacaaagtgtcgt

SEQ ID NO: 366811 - DNA, 30 bp, Artificial Sequence
  Synthetic oligonucleotide
atatttagtggcccgtgcttctagtgtcgt

SEQ ID NO: 366812 - DNA, 30 bp, Artificial Sequence
  Synthetic oligonucleotide
tgttcactggatatagagttctattgtcgt

SEQ ID NO: 366813 - DNA, 30 bp, Artificial Sequence
  Synthetic oligonucleotide
aacaatattctaagtcacagataaattcgt

SEQ ID NO: 366814 - DNA, 30 bp, Artificial Sequence
  Synthetic oligonucleotide
agtgtccgtgacgcacgagtttctattcgt

SEQ ID NO: 366815 - DNA, 30 bp, Artificial Sequence
  Synthetic oligonucleotide
atcgaggcggtctatggttaaagtattcgt

SEQ ID NO: 366816 - DNA, 30 bp, Artificial Sequence
  Synthetic oligonucleotide
gatgaccgttataaaaggccccaacttcgt

SEQ ID NO: 366817 - DNA, 31 bp, Artificial Sequence
  Synthetic oligonucleotide
ctgggcctgtgaacgtactgggagccttcgt

SEQ ID NO: 366818 - DNA, 30 bp, Artificial Sequence
  Synthetic oligonucleotide
tggtctaagtagattccggctacgcttcgt

SEQ ID NO: 366819 - DNA, 30 bp, Artificial Sequence
  Synthetic oligonucleotide
tccgaaccctcatactaaccaactcttcgt

SEQ ID NO: 366820 - DNA, 30 bp, Artificial Sequence
  Synthetic oligonucleotide
gctggcgacaacgtcgttaattttcttcgt

SEQ ID NO: 366821 - DNA, 30 bp, Artificial Sequence
  Synthetic oligonucleotide
tataaaaaggatcgtcaggatcaagttcgt

SEQ ID NO: 366822 - DNA, 30 bp, Artificial Sequence
  Synthetic oligonucleotide
accggggacggttgaaccgtgagagttcgt

SEQ ID NO: 366823 - DNA, 31 bp, Artificial Sequence
  Synthetic oligonucleotide
cgtgagagatacaagcggtgaacgcgttcgt

SEQ ID NO: 366824 - DNA, 30 bp, Artificial Sequence
  Synthetic oligonucleotide
gcacatccagatatcgacccgcgggttcgt

SEQ ID NO: 366825 - DNA, 30 bp, Artificial Sequence
  Synthetic oligonucleotide
tagatgcatatctgcagtcccgtggttcgt

SEQ ID NO: 366826 - DNA, 30 bp, Artificial Sequence
  Synthetic oligonucleotide
ttgaatcacagccttccactccctgttcgt

SEQ ID NO: 366827 - DNA, 30 bp, Artificial Sequence
  Synthetic oligonucleotide
ggccgccaggtgcaaaattcctaatttcgt

SEQ ID NO: 366828 - DNA, 30 bp, Artificial Sequence
  Synthetic oligonucleotide
tgcgggcgacgcgttatccgaatatttcgt

SEQ ID NO: 366829 - DNA, 30 bp, Artificial Sequence
  Synthetic oligonucleotide
acacgattacagggggtttagcgctttcgt

SEQ ID NO: 366830 - DNA, 30 bp, Artificial Sequence
  Synthetic oligonucleotide
ctcgggatataagaggagaagctctttcgt

SEQ ID NO: 366831 - DNA, 30 bp, Artificial Sequence
  Synthetic oligonucleotide
tttgtaatagtaaggcttaacgagtttcgt

SEQ ID NO: 366832 - DNA, 30 bp, Artificial Sequence
  Synthetic oligonucleotide
caggatccagaccgctgcactgcttttcgt

SEQ ID NO: 366833 - DNA, 30 bp, Artificial Sequence
  Synthetic oligonucleotide
gttgctcggacggtctggcagaaaaaaggt

SEQ ID NO: 366834 - DNA, 30 bp, Artificial Sequence
  Synthetic oligonucleotide
gtcaaagcggtgtcttttatcataaaaggt

SEQ ID NO: 366835 - DNA, 30 bp, Artificial Sequence
  Synthetic oligonucleotide
ctagcccttcaacgaactcgtgtaaaaggt

SEQ ID NO: 366836 - DNA, 30 bp, Artificial Sequence
  Synthetic oligonucleotide
cttcatcctacgaacgtgtacaacaaaggt

SEQ ID NO: 366837 - DNA, 30 bp, Artificial Sequence
  Synthetic oligonucleotide
gaagtaatggtagcgttttctcacaaaggt

SEQ ID NO: 366838 - DNA, 30 bp, Artificial Sequence
  Synthetic oligonucleotide
gcagactaggtgcggcaccactagaaaggt

SEQ ID NO: 366839 - DNA, 30 bp, Artificial Sequence
  Synthetic oligonucleotide
gggccaaggccgcaacgtcaaacgaaaggt

SEQ ID NO: 366840 - DNA, 30 bp, Artificial Sequence
  Synthetic oligonucleotide
ttcgcaaccaaaggagacatcgataaaggt

SEQ ID NO: 366841 - DNA, 30 bp, Artificial Sequence
  Synthetic oligonucleotide
caatgtggacaaacggctataactaaaggt

SEQ ID NO: 366842 - DNA, 30 bp, Artificial Sequence
  Synthetic oligonucleotide
ttccttgaccatctgcgtggcgctaaaggt

SEQ ID NO: 366843 - DNA, 30 bp, Artificial Sequence
  Synthetic oligonucleotide
cgattatgccaagcatcaatccttaaaggt

SEQ ID NO: 366844 - DNA, 30 bp, Artificial Sequence
  Synthetic oligonucleotide
cacacaaaaaccccggcttaaaaacaaggt

SEQ ID NO: 366845 - DNA, 30 bp, Artificial Sequence
  Synthetic oligonucleotide
tgctatttcccgtccatccatacacaaggt

SEQ ID NO: 366846 - DNA, 30 bp, Artificial Sequence
  Synthetic oligonucleotide
gatgcgacatcaaatagttcgagacaaggt

SEQ ID NO: 366847 - DNA, 30 bp, Artificial Sequence
  Synthetic oligonucleotide
gtcttatggccgactgagttccgacaaggt

SEQ ID NO: 366848 - DNA, 30 bp, Artificial Sequence
  Synthetic oligonucleotide
ctaatatggggttcctcctatggacaaggt

SEQ ID NO: 366849 - DNA, 30 bp, Artificial Sequence
  Synthetic oligonucleotide
gataggcactcgggctggctgtgacaaggt

SEQ ID NO: 366850 - DNA, 30 bp, Artificial Sequence
  Synthetic oligonucleotide
atgacactactctcggcctttgaccaaggt

SEQ ID NO: 366851 - DNA, 30 bp, Artificial Sequence
  Synthetic oligonucleotide
aacgggggtacgctaccccacgtgcaaggt

SEQ ID NO: 366852 - DNA, 30 bp, Artificial Sequence
  Synthetic oligonucleotide
gaatgaaccaggacctcattaagtcaaggt

SEQ ID NO: 366853 - DNA, 30 bp, Artificial Sequence
  Synthetic oligonucleotide
tctcgaggtaacgggtccgctgttcaaggt

SEQ ID NO: 366854 - DNA, 30 bp, Artificial Sequence
  Synthetic oligonucleotide
agtaacgtagggggtcggagctaagaaggt

SEQ ID NO: 366855 - DNA, 30 bp, Artificial Sequence
  Synthetic oligonucleotide
tagtaagctggcccaagcccggcagaaggt

SEQ ID NO: 366856 - DNA, 30 bp, Artificial Sequence
  Synthetic oligonucleotide
ccctttgttcgcctagaccgtgcagaaggt

SEQ ID NO: 366857 - DNA, 30 bp, Artificial Sequence
  Synthetic oligonucleotide
gcaccacgactgctactgtgaggagaaggt

SEQ ID NO: 366858 - DNA, 30 bp, Artificial Sequence
  Synthetic oligonucleotide
gggcttgggccggggagtgataatgaaggt

SEQ ID NO: 366859 - DNA, 30 bp, Artificial Sequence
  Synthetic oligonucleotide
acttcatcctgaagatcaccaggtgaaggt

SEQ ID NO: 366860 - DNA, 30 bp, Artificial Sequence
  Synthetic oligonucleotide
cagtgtgaactccgatttaatccataaggt

SEQ ID NO: 366861 - DNA, 30 bp, Artificial Sequence
  Synthetic oligonucleotide
gacacggggggggaatccttgtactaaggt

SEQ ID NO: 366862 - DNA, 30 bp, Artificial Sequence
  Synthetic oligonucleotide
actagggaagcatttcgtgctacctaaggt

SEQ ID NO: 366863 - DNA, 30 bp, Artificial Sequence
  Synthetic oligonucleotide
ttggagccatcgagagcagcaaagtaaggt

SEQ ID NO: 366864 - DNA, 28 bp, Artificial Sequence
  Synthetic oligonucleotide
ggatggtcctttgtctacggattaaggt

SEQ ID NO: 366865 - DNA, 30 bp, Artificial Sequence
  Synthetic oligonucleotide
attgattgtgatttgcctggcgaaacaggt

SEQ ID NO: 366866 - DNA, 30 bp, Artificial Sequence
  Synthetic oligonucleotide
tcagtacccgagcactttcttttaacaggt

SEQ ID NO: 366867 - DNA, 30 bp, Artificial Sequence
  Synthetic oligonucleotide
gtacgaaccgttgcctcagttaccacaggt

SEQ ID NO: 366868 - DNA, 30 bp, Artificial Sequence
  Synthetic oligonucleotide
cccacgtctagacccgttagtcatacaggt

SEQ ID NO: 366869 - DNA, 31 bp, Artificial Sequence
  Synthetic oligonucleotide
tggccgcgggtcaagcgggccacgaccaggt

SEQ ID NO: 366870 - DNA, 30 bp, Artificial Sequence
  Synthetic oligonucleotide
acctaagtgcagcgccgtacgacgccaggt

SEQ ID NO: 366871 - DNA, 30 bp, Artificial Sequence
  Synthetic oligonucleotide
ttttaagtaataaaagcctaaactccaggt

SEQ ID NO: 366872 - DNA, 30 bp, Artificial Sequence
  Synthetic oligonucleotide
tggtctcgttgctgtgctagtcctccaggt

SEQ ID NO: 366873 - DNA, 30 bp, Artificial Sequence
  Synthetic oligonucleotide
gacaagagcacatgaacccaggctccaggt

SEQ ID NO: 366874 - DNA, 30 bp, Artificial Sequence
  Synthetic oligonucleotide
acgctcaacagcttcggaagtagtccaggt

SEQ ID NO: 366875 - DNA, 30 bp, Artificial Sequence
  Synthetic oligonucleotide
gctgcaccacaggacggaatctgagcaggt

SEQ ID NO: 366876 - DNA, 30 bp, Artificial Sequence
  Synthetic oligonucleotide
cgtagccctgaagctttgcgttgagcaggt

SEQ ID NO: 366877 - DNA, 30 bp, Artificial Sequence
  Synthetic oligonucleotide
gtgaatgacgaatcggatatcgccgcaggt

SEQ ID NO: 366878 - DNA, 30 bp, Artificial Sequence
  Synthetic oligonucleotide
agtctgctctagttcgttctactcgcaggt

SEQ ID NO: 366879 - DNA, 30 bp, Artificial Sequence
  Synthetic oligonucleotide
tatgaggtgcaccctacgcctctcgcaggt

SEQ ID NO: 366880 - DNA, 30 bp, Artificial Sequence
  Synthetic oligonucleotide
atcaacatgagggactgacggttcgcaggt

SEQ ID NO: 366881 - DNA, 30 bp, Artificial Sequence
  Synthetic oligonucleotide
cgggggtttgtgctacactgtgcggcaggt

SEQ ID NO: 366882 - DNA, 30 bp, Artificial Sequence
  Synthetic oligonucleotide
agtaacgtttctatgatgctcgtggcaggt

SEQ ID NO: 366883 - DNA, 30 bp, Artificial Sequence
  Synthetic oligonucleotide
cagggaaaactttcttaagcggctgcaggt

SEQ ID NO: 366884 - DNA, 30 bp, Artificial Sequence
  Synthetic oligonucleotide
aaaatagttatagatatcgtgacatcaggt

SEQ ID NO: 366885 - DNA, 30 bp, Artificial Sequence
  Synthetic oligonucleotide
tcagatctaggacgctattaaccgtcaggt

SEQ ID NO: 366886 - DNA, 30 bp, Artificial Sequence
  Synthetic oligonucleotide
tgtgctatttgagggatcagtaggtcaggt

SEQ ID NO: 366887 - DNA, 30 bp, Artificial Sequence
  Synthetic oligonucleotide
acaactaatgaagtacatctccattcaggt

SEQ ID NO: 366888 - DNA, 30 bp, Artificial Sequence
  Synthetic oligonucleotide
gtagcatcggacacacaaattagttcaggt

SEQ ID NO: 366889 - DNA, 30 bp, Artificial Sequence
  Synthetic oligonucleotide
atataagtacatagcccggccttttcaggt

SEQ ID NO: 366890 - DNA, 30 bp, Artificial Sequence
  Synthetic oligonucleotide
tcagatctttgttagtattgcttttcaggt

SEQ ID NO: 366891 - DNA, 30 bp, Artificial Sequence
  Synthetic oligonucleotide
tggccctctcattcatcagtgtcaagaggt

SEQ ID NO: 366892 - DNA, 30 bp, Artificial Sequence
  Synthetic oligonucleotide
ggcaggtttagagtctgctccagcagaggt

SEQ ID NO: 366893 - DNA, 30 bp, Artificial Sequence
  Synthetic oligonucleotide
ggcatggacgccctcgatgaaaatagaggt

SEQ ID NO: 366894 - DNA, 30 bp, Artificial Sequence
  Synthetic oligonucleotide
ccccggagctatagaaggctttatagaggt

SEQ ID NO: 366895 - DNA, 30 bp, Artificial Sequence
  Synthetic oligonucleotide
tctgtatggagccatcacctacctagaggt

SEQ ID NO: 366896 - DNA, 30 bp, Artificial Sequence
  Synthetic oligonucleotide
agtagtatctgctcatacacctctagaggt

SEQ ID NO: 366897 - DNA, 30 bp, Artificial Sequence
  Synthetic oligonucleotide
gcagcggcatgggttgtaaatactcgaggt

SEQ ID NO: 366898 - DNA, 30 bp, Artificial Sequence
  Synthetic oligonucleotide
cttgacttggtcaagggatctgctcgaggt

SEQ ID NO: 366899 - DNA, 30 bp, Artificial Sequence
  Synthetic oligonucleotide
agtgtcccgctcatctgaccgcttcgaggt

SEQ ID NO: 366900 - DNA, 30 bp, Artificial Sequence
  Synthetic oligonucleotide
acccgtccataaggatattcaacaggaggt

SEQ ID NO: 366901 - DNA, 30 bp, Artificial Sequence
  Synthetic oligonucleotide
tgccgcgccttgcgacctttttgaggaggt

SEQ ID NO: 366902 - DNA, 30 bp, Artificial Sequence
  Synthetic oligonucleotide
acgcacttactattaatgcatctcggaggt

SEQ ID NO: 366903 - DNA, 30 bp, Artificial Sequence
  Synthetic oligonucleotide
ggaaaacaggcgcttggaatctcgggaggt

SEQ ID NO: 366904 - DNA, 30 bp, Artificial Sequence
  Synthetic oligonucleotide
ggcatagaggccgccagtatttttggaggt

SEQ ID NO: 366905 - DNA, 30 bp, Artificial Sequence
  Synthetic oligonucleotide
ccaggtagtctgctaatctcgaaatgaggt

SEQ ID NO: 366906 - DNA, 30 bp, Artificial Sequence
  Synthetic oligonucleotide
gatacaggctctaactgaggcgcatgaggt

SEQ ID NO: 366907 - DNA, 30 bp, Artificial Sequence
  Synthetic oligonucleotide
gagcagcgaaataataatagtcgctgaggt

SEQ ID NO: 366908 - DNA, 30 bp, Artificial Sequence
  Synthetic oligonucleotide
cccgggcgtggttcgtggctcttctgaggt

SEQ ID NO: 366909 - DNA, 30 bp, Artificial Sequence
  Synthetic oligonucleotide
aagcgtgtgatctcgcacgctttgtgaggt

SEQ ID NO: 366910 - DNA, 30 bp, Artificial Sequence
  Synthetic oligonucleotide
cgtaccgtgcgtaactttctgtgttgaggt

SEQ ID NO: 366911 - DNA, 29 bp, Artificial Sequence
  Synthetic oligonucleotide
ttgatggcatataaatattttaaataggt

SEQ ID NO: 366912 - DNA, 30 bp, Artificial Sequence
  Synthetic oligonucleotide
gggctcttgatgggtaagcacggaataggt

SEQ ID NO: 366913 - DNA, 30 bp, Artificial Sequence
  Synthetic oligonucleotide
caaaatacgtcacgcttccctaacataggt

SEQ ID NO: 366914 - DNA, 30 bp, Artificial Sequence
  Synthetic oligonucleotide
ggacttacgcggaactctcaaatcataggt

SEQ ID NO: 366915 - DNA, 30 bp, Artificial Sequence
  Synthetic oligonucleotide
ctcgtcacaaactcgtttatgttcataggt

SEQ ID NO: 366916 - DNA, 30 bp, Artificial Sequence
  Synthetic oligonucleotide
taaataaaggtttaacgtggcaagataggt

SEQ ID NO: 366917 - DNA, 30 bp, Artificial Sequence
  Synthetic oligonucleotide
cacggcagcacaacactgttgtcgataggt

SEQ ID NO: 366918 - DNA, 30 bp, Artificial Sequence
  Synthetic oligonucleotide
catatgaagttgcgctgagcgtggataggt

SEQ ID NO: 366919 - DNA, 30 bp, Artificial Sequence
  Synthetic oligonucleotide
aagggttaatgggcggtagtccatataggt

SEQ ID NO: 366920 - DNA, 30 bp, Artificial Sequence
  Synthetic oligonucleotide
tcttagtcgtagttggacacagaactaggt

SEQ ID NO: 366921 - DNA, 30 bp, Artificial Sequence
  Synthetic oligonucleotide
atcactgtattggactctgatgaactaggt

SEQ ID NO: 366922 - DNA, 30 bp, Artificial Sequence
  Synthetic oligonucleotide
tgcggcggcccaatggggttctagctaggt

SEQ ID NO: 366923 - DNA, 30 bp, Artificial Sequence
  Synthetic oligonucleotide
tgggcacgggctgggcagtgtccgctaggt

SEQ ID NO: 366924 - DNA, 30 bp, Artificial Sequence
  Synthetic oligonucleotide
ccacaggtttacctggaagattatctaggt

SEQ ID NO: 366925 - DNA, 30 bp, Artificial Sequence
  Synthetic oligonucleotide
gtttatactcgaaaaggtgcgtcagtaggt

SEQ ID NO: 366926 - DNA, 30 bp, Artificial Sequence
  Synthetic oligonucleotide
caaagcttcctgatactcggcacggtaggt

SEQ ID NO: 366927 - DNA, 30 bp, Artificial Sequence
  Synthetic oligonucleotide
taatatcggacgtcaagtgagcgtgtaggt

SEQ ID NO: 366928 - DNA, 30 bp, Artificial Sequence
  Synthetic oligonucleotide
acccattcgagacacgaaatcggtgtaggt

SEQ ID NO: 366929 - DNA, 30 bp, Artificial Sequence
  Synthetic oligonucleotide
tagtattgcagaggttaccaccttgtaggt

SEQ ID NO: 366930 - DNA, 30 bp, Artificial Sequence
  Synthetic oligonucleotide
accatttttcacagactaaaccaattaggt

SEQ ID NO: 366931 - DNA, 30 bp, Artificial Sequence
  Synthetic oligonucleotide
gcgccaatgtatcttttagatccattaggt

SEQ ID NO: 366932 - DNA, 30 bp, Artificial Sequence
  Synthetic oligonucleotide
agagaggtagcaccaatgggcaacttaggt

SEQ ID NO: 366933 - DNA, 30 bp, Artificial Sequence
  Synthetic oligonucleotide
acccacgtgtaattctttaggtacttaggt

SEQ ID NO: 366934 - DNA, 30 bp, Artificial Sequence
  Synthetic oligonucleotide
cacgggtacacatgaccactgcccttaggt

SEQ ID NO: 366935 - DNA, 30 bp, Artificial Sequence
  Synthetic oligonucleotide
acacaagattcttcaacgttaagcttaggt

SEQ ID NO: 366936 - DNA, 30 bp, Artificial Sequence
  Synthetic oligonucleotide
gtcttgactggtctacctctcatcttaggt

SEQ ID NO: 366937 - DNA, 30 bp, Artificial Sequence
  Synthetic oligonucleotide
ggacttcctatttctaagttcctcttaggt

SEQ ID NO: 366938 - DNA, 30 bp, Artificial Sequence
  Synthetic oligonucleotide
ctgcacgcgtgcgccttcactaggttaggt

SEQ ID NO: 366939 - DNA, 30 bp, Artificial Sequence
  Synthetic oligonucleotide
cgcgagatggtaatccgtcgtcggttaggt

SEQ ID NO: 366940 - DNA, 31 bp, Artificial Sequence
  Synthetic oligonucleotide
ataaaggtctgtaccggatacaaatttaggt

SEQ ID NO: 366941 - DNA, 30 bp, Artificial Sequence
  Synthetic oligonucleotide
cagacggtgtgcattacgctcggtttaggt

SEQ ID NO: 366942 - DNA, 30 bp, Artificial Sequence
  Synthetic oligonucleotide
tcacataattaggacccttcccaaaacggt

SEQ ID NO: 366943 - DNA, 30 bp, Artificial Sequence
  Synthetic oligonucleotide
atcttgtaaatatacattccaggcaacggt

SEQ ID NO: 366944 - DNA, 30 bp, Artificial Sequence
  Synthetic oligonucleotide
cgtgagttaggcagttccaccggcaacggt

SEQ ID NO: 366945 - DNA, 30 bp, Artificial Sequence
  Synthetic oligonucleotide
gtttcgcaggcaatcgcagcggcgaacggt

SEQ ID NO: 366946 - DNA, 30 bp, Artificial Sequence
  Synthetic oligonucleotide
ctcctaaattcgtaaagggatgataacggt

SEQ ID NO: 366947 - DNA, 30 bp, Artificial Sequence
  Synthetic oligonucleotide
gtagggatacccccccgtctaagtaacggt

SEQ ID NO: 366948 - DNA, 30 bp, Artificial Sequence
  Synthetic oligonucleotide
gagctgattaagcctggaggttgtaacggt

SEQ ID NO: 366949 - DNA, 30 bp, Artificial Sequence
  Synthetic oligonucleotide
tctcgggaagcttgcaagacctttaacggt

SEQ ID NO: 366950 - DNA, 30 bp, Artificial Sequence
  Synthetic oligonucleotide
agaagtcaatgctctacggcgaaacacggt

SEQ ID NO: 366951 - DNA, 30 bp, Artificial Sequence
  Synthetic oligonucleotide
ttgatccaagggtataccaaggaacacggt

SEQ ID NO: 366952 - DNA, 30 bp, Artificial Sequence
  Synthetic oligonucleotide
cgaaatgcaacgtatagagtctgacacggt

SEQ ID NO: 366953 - DNA, 30 bp, Artificial Sequence
  Synthetic oligonucleotide
acgctacgcccctgttgcctttaccacggt

SEQ ID NO: 366954 - DNA, 30 bp, Artificial Sequence
  Synthetic oligonucleotide
taagaggtgcttctttcgcgttatcacggt

SEQ ID NO: 366955 - DNA, 30 bp, Artificial Sequence
  Synthetic oligonucleotide
aaaaacgagccatgtagcccatgtcacggt

SEQ ID NO: 366956 - DNA, 30 bp, Artificial Sequence
  Synthetic oligonucleotide
gccacagatgtagggaaaattattcacggt

SEQ ID NO: 366957 - DNA, 30 bp, Artificial Sequence
  Synthetic oligonucleotide
gagacgtgggtataagtcaaggttcacggt

SEQ ID NO: 366958 - DNA, 30 bp, Artificial Sequence
  Synthetic oligonucleotide
caatgatcatgtgcacgacaaacagacggt

SEQ ID NO: 366959 - DNA, 30 bp, Artificial Sequence
  Synthetic oligonucleotide
caggagttgggtgggcaatcctcagacggt

SEQ ID NO: 366960 - DNA, 30 bp, Artificial Sequence
  Synthetic oligonucleotide
aagaacattcgaaatatgaagatagacggt

SEQ ID NO: 366961 - DNA, 30 bp, Artificial Sequence
  Synthetic oligonucleotide
gcaagcgaagtgggccataggccggacggt

SEQ ID NO: 366962 - DNA, 30 bp, Artificial Sequence
  Synthetic oligonucleotide
ccgcagcgggtaaggaggtacggggacggt

SEQ ID NO: 366963 - DNA, 30 bp, Artificial Sequence
  Synthetic oligonucleotide
tcggggatccgctggtactacatggacggt

SEQ ID NO: 366964 - DNA, 30 bp, Artificial Sequence
  Synthetic oligonucleotide
tcaaaatttgctggctggatactggacggt

SEQ ID NO: 366965 - DNA, 30 bp, Artificial Sequence
  Synthetic oligonucleotide
gagctcgccattggcctctccgtggacggt

SEQ ID NO: 366966 - DNA, 30 bp, Artificial Sequence
  Synthetic oligonucleotide
tcgggccagggtagcaatagaggtgacggt

SEQ ID NO: 366967 - DNA, 30 bp, Artificial Sequence
  Synthetic oligonucleotide
aaggatgcgtcgggttgttgacaatacggt

SEQ ID NO: 366968 - DNA, 30 bp, Artificial Sequence
  Synthetic oligonucleotide
cctcattcgtcccgaatgggactctacggt

SEQ ID NO: 366969 - DNA, 30 bp, Artificial Sequence
  Synthetic oligonucleotide
tgaaggacacatctaaagctgccttacggt

SEQ ID NO: 366970 - DNA, 30 bp, Artificial Sequence
  Synthetic oligonucleotide
tatatgatagacatcttggaatgttacggt

SEQ ID NO: 366971 - DNA, 30 bp, Artificial Sequence
  Synthetic oligonucleotide
tacctatcgggacgagtgttcaacaccggt

SEQ ID NO: 366972 - DNA, 30 bp, Artificial Sequence
  Synthetic oligonucleotide
gacagaactttgttagtgtgacccaccggt

SEQ ID NO: 366973 - DNA, 30 bp, Artificial Sequence
  Synthetic oligonucleotide
tgagaatggatcgcacggccgcccaccggt

SEQ ID NO: 366974 - DNA, 30 bp, Artificial Sequence
  Synthetic oligonucleotide
ctcgtctagaaaggctgcccgggcaccggt

SEQ ID NO: 366975 - DNA, 30 bp, Artificial Sequence
  Synthetic oligonucleotide
tcattaggtaatagtggacacactaccggt

SEQ ID NO: 366976 - DNA, 30 bp, Artificial Sequence
  Synthetic oligonucleotide
acgcttagagggtgaaataaccctaccggt

SEQ ID NO: 366977 - DNA, 30 bp, Artificial Sequence
  Synthetic oligonucleotide
gatacaatgcaatgagcttgttgtaccggt

SEQ ID NO: 366978 - DNA, 30 bp, Artificial Sequence
  Synthetic oligonucleotide
cggttgagaaccacgtaacaacaacccggt

SEQ ID NO: 366979 - DNA, 30 bp, Artificial Sequence
  Synthetic oligonucleotide
tgaatgccaattgagcacttcgcacccggt

SEQ ID NO: 366980 - DNA, 30 bp, Artificial Sequence
  Synthetic oligonucleotide
taattgacgagatgacgacggttacccggt

SEQ ID NO: 366981 - DNA, 30 bp, Artificial Sequence
  Synthetic oligonucleotide
aactagcactgcaagtccataaatcccggt

SEQ ID NO: 366982 - DNA, 30 bp, Artificial Sequence
  Synthetic oligonucleotide
caagcgccatatcacccgtacaatcccggt

SEQ ID NO: 366983 - DNA, 30 bp, Artificial Sequence
  Synthetic oligonucleotide
gtctgtgcctaagggacttctactcccggt

SEQ ID NO: 366984 - DNA, 30 bp, Artificial Sequence
  Synthetic oligonucleotide
gcccggaatgtccacaacgatccagccggt

SEQ ID NO: 366985 - DNA, 30 bp, Artificial Sequence
  Synthetic oligonucleotide
aaagtcgccttgaacgttcatttcgccggt

SEQ ID NO: 366986 - DNA, 30 bp, Artificial Sequence
  Synthetic oligonucleotide
tcctttatgatgtcttcttaaaaggccggt

SEQ ID NO: 366987 - DNA, 30 bp, Artificial Sequence
  Synthetic oligonucleotide
ggatcgctaagtggggtgccttaggccggt

SEQ ID NO: 366988 - DNA, 30 bp, Artificial Sequence
  Synthetic oligonucleotide
ggccctattgaaattttttaaagggccggt

SEQ ID NO: 366989 - DNA, 30 bp, Artificial Sequence
  Synthetic oligonucleotide
tgtacgagacatacctctgtcattgccggt

SEQ ID NO: 366990 - DNA, 30 bp, Artificial Sequence
  Synthetic oligonucleotide
gacggctcatccaatttggcatactccggt

SEQ ID NO: 366991 - DNA, 30 bp, Artificial Sequence
  Synthetic oligonucleotide
aaatacgtagtattttcatttgagtccggt

SEQ ID NO: 366992 - DNA, 30 bp, Artificial Sequence
  Synthetic oligonucleotide
taaaccggtggtctcattagcccttccggt

SEQ ID NO: 366993 - DNA, 30 bp, Artificial Sequence
  Synthetic oligonucleotide
atacagggtcattgaagtgtgatttccggt

SEQ ID NO: 366994 - DNA, 30 bp, Artificial Sequence
  Synthetic oligonucleotide
ccgtaatcctattcgttcatgctttccggt

SEQ ID NO: 366995 - DNA, 30 bp, Artificial Sequence
  Synthetic oligonucleotide
catcaatttagccgatatgtcaaaagcggt

SEQ ID NO: 366996 - DNA, 30 bp, Artificial Sequence
  Synthetic oligonucleotide
ttatagcctcgaacgaaggttaaaagcggt

SEQ ID NO: 366997 - DNA, 30 bp, Artificial Sequence
  Synthetic oligonucleotide
acgaggtagtttacaggcccgtcaagcggt

SEQ ID NO: 366998 - DNA, 30 bp, Artificial Sequence
  Synthetic oligonucleotide
ggtgctttattccccattaaacacagcggt

SEQ ID NO: 366999 - DNA, 30 bp, Artificial Sequence
  Synthetic oligonucleotide
cactatgtctgggtaccaggattcagcggt

SEQ ID NO: 367000 - DNA, 30 bp, Artificial Sequence
  Synthetic oligonucleotide
atgatggaaagagtcccggctaggagcggt

SEQ ID NO: 367001 - DNA, 30 bp, Artificial Sequence
  Synthetic oligonucleotide
cgctttaagtctaggatgcccggtagcggt

SEQ ID NO: 367002 - DNA, 30 bp, Artificial Sequence
  Synthetic oligonucleotide
catgttagcgggctatgtcgctaacgcggt

SEQ ID NO: 367003 - DNA, 30 bp, Artificial Sequence
  Synthetic oligonucleotide
ctgggttgggaacagagtcgcgtacgcggt

SEQ ID NO: 367004 - DNA, 30 bp, Artificial Sequence
  Synthetic oligonucleotide
gatgattcgtcgcagtgacaggcccgcggt

SEQ ID NO: 367005 - DNA, 30 bp, Artificial Sequence
  Synthetic oligonucleotide
gggccgcaccctaatgatgcatcccgcggt

SEQ ID NO: 367006 - DNA, 30 bp, Artificial Sequence
  Synthetic oligonucleotide
attgtagccaagcctgatcgtatccgcggt

SEQ ID NO: 367007 - DNA, 30 bp, Artificial Sequence
  Synthetic oligonucleotide
ttcgatttgagggagggttgaactcgcggt

SEQ ID NO: 367008 - DNA, 30 bp, Artificial Sequence
  Synthetic oligonucleotide
tcacgtgacttggttaatccgcgtcgcggt

SEQ ID NO: 367009 - DNA, 30 bp, Artificial Sequence
  Synthetic oligonucleotide
ttaaaatttgaaggtcaagccccaggcggt

SEQ ID NO: 367010 - DNA, 30 bp, Artificial Sequence
  Synthetic oligonucleotide
tgtaatagaaggcttgtcaattcaggcggt

SEQ ID NO: 367011 - DNA, 30 bp, Artificial Sequence
  Synthetic oligonucleotide
gattacgaacattgccccttttacggcggt

SEQ ID NO: 367012 - DNA, 30 bp, Artificial Sequence
  Synthetic oligonucleotide
tagaaacggtgaacggccatgcgcggcggt

SEQ ID NO: 367013 - DNA, 30 bp, Artificial Sequence
  Synthetic oligonucleotide
gacttgaatccgttgatcgagtagggcggt

SEQ ID NO: 367014 - DNA, 30 bp, Artificial Sequence
  Synthetic oligonucleotide
atccatcctcggttttcacaacggggcggt

SEQ ID NO: 367015 - DNA, 30 bp, Artificial Sequence
  Synthetic oligonucleotide
atgtaagtcagaaccgagatgtggggcggt

SEQ ID NO: 367016 - DNA, 30 bp, Artificial Sequence
  Synthetic oligonucleotide
taaggcgagaagttcaccgttttgggcggt

SEQ ID NO: 367017 - DNA, 30 bp, Artificial Sequence
  Synthetic oligonucleotide
atgtatactccgtgcactagttatggcggt

SEQ ID NO: 367018 - DNA, 30 bp, Artificial Sequence
  Synthetic oligonucleotide
tgctaaccgcaatagagcgacagtggcggt

SEQ ID NO: 367019 - DNA, 30 bp, Artificial Sequence
  Synthetic oligonucleotide
accccagactggattagcaagagtggcggt

SEQ ID NO: 367020 - DNA, 30 bp, Artificial Sequence
  Synthetic oligonucleotide
atgcagggtactgagttctcgcaatgcggt

SEQ ID NO: 367021 - DNA, 30 bp, Artificial Sequence
  Synthetic oligonucleotide
ttgttgcatccagattcagtataatgcggt

SEQ ID NO: 367022 - DNA, 30 bp, Artificial Sequence
  Synthetic oligonucleotide
tgacaacttgatcaacccattacatgcggt

SEQ ID NO: 367023 - DNA, 30 bp, Artificial Sequence
  Synthetic oligonucleotide
tcctggcgggttgacccgaacccatgcggt

SEQ ID NO: 367024 - DNA, 30 bp, Artificial Sequence
  Synthetic oligonucleotide
tattctgctataacgaagacactctgcggt

SEQ ID NO: 367025 - DNA, 30 bp, Artificial Sequence
  Synthetic oligonucleotide
aaaagttcctttccagaaataaagtgcggt

SEQ ID NO: 367026 - DNA, 30 bp, Artificial Sequence
  Synthetic oligonucleotide
ctctggaccagctggttctcagggtgcggt

SEQ ID NO: 367027 - DNA, 30 bp, Artificial Sequence
  Synthetic oligonucleotide
ctcgggtcgtcatcaatggcttggtgcggt

SEQ ID NO: 367028 - DNA, 30 bp, Artificial Sequence
  Synthetic oligonucleotide
aataccgatgtaattgctggaacttgcggt

SEQ ID NO: 367029 - DNA, 30 bp, Artificial Sequence
  Synthetic oligonucleotide
cggtcaagttggtatgccactctttgcggt

SEQ ID NO: 367030 - DNA, 30 bp, Artificial Sequence
  Synthetic oligonucleotide
agtgcgatgcatatgtccgtcgcaatcggt

SEQ ID NO: 367031 - DNA, 30 bp, Artificial Sequence
  Synthetic oligonucleotide
ataactcccaactgctccgtccgaatcggt

SEQ ID NO: 367032 - DNA, 30 bp, Artificial Sequence
  Synthetic oligonucleotide
ggacctccagcatgtaaaataaacatcggt

SEQ ID NO: 367033 - DNA, 30 bp, Artificial Sequence
  Synthetic oligonucleotide
gctatcaatacgatactattacgcatcggt

SEQ ID NO: 367034 - DNA, 30 bp, Artificial Sequence
  Synthetic oligonucleotide
accgacagatccgccgtgttattcatcggt

SEQ ID NO: 367035 - DNA, 30 bp, Artificial Sequence
  Synthetic oligonucleotide
agaggccggattgtatgggggtagatcggt

SEQ ID NO: 367036 - DNA, 30 bp, Artificial Sequence
  Synthetic oligonucleotide
ttgcaaagactgttttagggtacgatcggt

SEQ ID NO: 367037 - DNA, 30 bp, Artificial Sequence
  Synthetic oligonucleotide
aagtgcgcttgcgtaccctctgcgatcggt

SEQ ID NO: 367038 - DNA, 30 bp, Artificial Sequence
  Synthetic oligonucleotide
ctctgtcgataagggtaccgtctgatcggt

SEQ ID NO: 367039 - DNA, 30 bp, Artificial Sequence
  Synthetic oligonucleotide
tatcgattatgggggctgtaaactatcggt

SEQ ID NO: 367040 - DNA, 30 bp, Artificial Sequence
  Synthetic oligonucleotide
aggaaaacgccgccaactttatctatcggt

SEQ ID NO: 367041 - DNA, 30 bp, Artificial Sequence
  Synthetic oligonucleotide
gggaggcttcacttctcaatcattatcggt

SEQ ID NO: 367042 - DNA, 30 bp, Artificial Sequence
  Synthetic oligonucleotide
tccaaagttctatacataaactcactcggt

SEQ ID NO: 367043 - DNA, 30 bp, Artificial Sequence
  Synthetic oligonucleotide
aactcactcccaaggaataaagacctcggt

SEQ ID NO: 367044 - DNA, 30 bp, Artificial Sequence
  Synthetic oligonucleotide
accagccgaaccgatgatgcggacctcggt

SEQ ID NO: 367045 - DNA, 30 bp, Artificial Sequence
  Synthetic oligonucleotide
ccatcacagggctcatcaacaagcctcggt

SEQ ID NO: 367046 - DNA, 30 bp, Artificial Sequence
  Synthetic oligonucleotide
gggccacactgtgccaggatctgcctcggt

SEQ ID NO: 367047 - DNA, 30 bp, Artificial Sequence
  Synthetic oligonucleotide
gtgagcggtttgataaggctactcctcggt

SEQ ID NO: 367048 - DNA, 30 bp, Artificial Sequence
  Synthetic oligonucleotide
tccttttattaattgtttgcgttcctcggt

SEQ ID NO: 367049 - DNA, 30 bp, Artificial Sequence
  Synthetic oligonucleotide
tgagccatatggacaggcgcatggctcggt

SEQ ID NO: 367050 - DNA, 30 bp, Artificial Sequence
  Synthetic oligonucleotide
agaaaattatcagttctttggaaagtcggt

SEQ ID NO: 367051 - DNA, 30 bp, Artificial Sequence
  Synthetic oligonucleotide
ggacagcactttatacgtagtgcagtcggt

SEQ ID NO: 367052 - DNA, 30 bp, Artificial Sequence
  Synthetic oligonucleotide
tgatggctcccactttaccgtccggtcggt

SEQ ID NO: 367053 - DNA, 30 bp, Artificial Sequence
  Synthetic oligonucleotide
acggtacgtgttcaatacggacttgtcggt

SEQ ID NO: 367054 - DNA, 30 bp, Artificial Sequence
  Synthetic oligonucleotide
gaggatcgcggtcatcagaaagcattcggt

SEQ ID NO: 367055 - DNA, 30 bp, Artificial Sequence
  Synthetic oligonucleotide
gaaatcactccccgaaggggttgattcggt

SEQ ID NO: 367056 - DNA, 30 bp, Artificial Sequence
  Synthetic oligonucleotide
tcttgttgtgaaaatcggttctacttcggt

SEQ ID NO: 367057 - DNA, 30 bp, Artificial Sequence
  Synthetic oligonucleotide
cggcgtccccaacaaagactcagcttcggt

SEQ ID NO: 367058 - DNA, 30 bp, Artificial Sequence
  Synthetic oligonucleotide
cacgcgagcggatctaatggatcgttcggt

SEQ ID NO: 367059 - DNA, 30 bp, Artificial Sequence
  Synthetic oligonucleotide
gaaaagtaagaattggtctatctgttcggt

SEQ ID NO: 367060 - DNA, 30 bp, Artificial Sequence
  Synthetic oligonucleotide
ctgtgtgctgagcccgcagccgtgttcggt

SEQ ID NO: 367061 - DNA, 30 bp, Artificial Sequence
  Synthetic oligonucleotide
gaagggtccccactaaatgtctatttcggt

SEQ ID NO: 367062 - DNA, 30 bp, Artificial Sequence
  Synthetic oligonucleotide
tagtaatgagaaacgtagtgcagtttcggt

SEQ ID NO: 367063 - DNA, 30 bp, Artificial Sequence
  Synthetic oligonucleotide
tttcttacggatctatggcacggtttcggt

SEQ ID NO: 367064 - DNA, 30 bp, Artificial Sequence
  Synthetic oligonucleotide
aaacgcatagagcctgagggtgaaaagggt

SEQ ID NO: 367065 - DNA, 30 bp, Artificial Sequence
  Synthetic oligonucleotide
tacaagaaaattgcatatgatggaaagggt

SEQ ID NO: 367066 - DNA, 30 bp, Artificial Sequence
  Synthetic oligonucleotide
gcaatcagataacacccacgccgcaagggt

SEQ ID NO: 367067 - DNA, 30 bp, Artificial Sequence
  Synthetic oligonucleotide
atttttcaaacttactaacgtaagaagggt

SEQ ID NO: 367068 - DNA, 30 bp, Artificial Sequence
  Synthetic oligonucleotide
ccggtgtttggggtttaaggatcgaagggt

SEQ ID NO: 367069 - DNA, 30 bp, Artificial Sequence
  Synthetic oligonucleotide
acgcaaatttaggttagtattcctaagggt

SEQ ID NO: 367070 - DNA, 30 bp, Artificial Sequence
  Synthetic oligonucleotide
gtcttcttgatagtttgttatagacagggt

SEQ ID NO: 367071 - DNA, 30 bp, Artificial Sequence
  Synthetic oligonucleotide
agccgcctatcgggttggcaatcccagggt

SEQ ID NO: 367072 - DNA, 30 bp, Artificial Sequence
  Synthetic oligonucleotide
ttacctttgtttcactcacgctagcagggt

SEQ ID NO: 367073 - DNA, 30 bp, Artificial Sequence
  Synthetic oligonucleotide
gagtactgctttgtgccagaacttcagggt

SEQ ID NO: 367074 - DNA, 30 bp, Artificial Sequence
  Synthetic oligonucleotide
aggctcgggggatcagccaccagagagggt

SEQ ID NO: 367075 - DNA, 30 bp, Artificial Sequence
  Synthetic oligonucleotide
tcccggcaagactcggtctcaatcgagggt

SEQ ID NO: 367076 - DNA, 30 bp, Artificial Sequence
  Synthetic oligonucleotide
gtgtacgctataggtttcgctgtcgagggt

SEQ ID NO: 367077 - DNA, 30 bp, Artificial Sequence
  Synthetic oligonucleotide
acagtgtacgttttacaaaatcctgagggt

SEQ ID NO: 367078 - DNA, 30 bp, Artificial Sequence
  Synthetic oligonucleotide
tccgtcagcataacacggcgttttgagggt

SEQ ID NO: 367079 - DNA, 30 bp, Artificial Sequence
  Synthetic oligonucleotide
aatgtgcaatttagtggctccagatagggt

SEQ ID NO: 367080 - DNA, 30 bp, Artificial Sequence
  Synthetic oligonucleotide
ttcaattagtacttgcgtcctcactagggt

SEQ ID NO: 367081 - DNA, 30 bp, Artificial Sequence
  Synthetic oligonucleotide
cgtgccaactgtgggtcgggggggtagggt

SEQ ID NO: 367082 - DNA, 30 bp, Artificial Sequence
  Synthetic oligonucleotide
gccgcctaaaagatggatgaggtgtagggt

SEQ ID NO: 367083 - DNA, 30 bp, Artificial Sequence
  Synthetic oligonucleotide
gaatgcttggtacacaggatggattagggt

SEQ ID NO: 367084 - DNA, 30 bp, Artificial Sequence
  Synthetic oligonucleotide
gggcctcttaatccaatagagtcttagggt

SEQ ID NO: 367085 - DNA, 30 bp, Artificial Sequence
  Synthetic oligonucleotide
aacgaggttaatgtcggggcaccaacgggt

SEQ ID NO: 367086 - DNA, 30 bp, Artificial Sequence
  Synthetic oligonucleotide
gaaattgtgaggccgcgggccccaacgggt

SEQ ID NO: 367087 - DNA, 30 bp, Artificial Sequence
  Synthetic oligonucleotide
aacgagatccacaggcattctaacacgggt

SEQ ID NO: 367088 - DNA, 30 bp, Artificial Sequence
  Synthetic oligonucleotide
aagagtaggtggcgcttatatccgacgggt

SEQ ID NO: 367089 - DNA, 30 bp, Artificial Sequence
  Synthetic oligonucleotide
gcagaccgttcgaggatactcctgacgggt

SEQ ID NO: 367090 - DNA, 30 bp, Artificial Sequence
  Synthetic oligonucleotide
agtataagacctactatgacttgtacgggt

SEQ ID NO: 367091 - DNA, 30 bp, Artificial Sequence
  Synthetic oligonucleotide
gttttcaggagggggagcaggcttacgggt

SEQ ID NO: 367092 - DNA, 30 bp, Artificial Sequence
  Synthetic oligonucleotide
caaaacgctaacatgccggggcaaccgggt

SEQ ID NO: 367093 - DNA, 30 bp, Artificial Sequence
  Synthetic oligonucleotide
atgctgacgctgaaggggtgtaagccgggt

SEQ ID NO: 367094 - DNA, 30 bp, Artificial Sequence
  Synthetic oligonucleotide
gggacagctagtaatagcatctcgccgggt

SEQ ID NO: 367095 - DNA, 30 bp, Artificial Sequence
  Synthetic oligonucleotide
agtgtcaaagtagttatcaagtcgccgggt

SEQ ID NO: 367096 - DNA, 30 bp, Artificial Sequence
  Synthetic oligonucleotide
cagaagatattagcatatctttcggcgggt

SEQ ID NO: 367097 - DNA, 30 bp, Artificial Sequence
  Synthetic oligonucleotide
ggcggcgtggcgcgtatcccaggggcgggt

SEQ ID NO: 367098 - DNA, 30 bp, Artificial Sequence
  Synthetic oligonucleotide
gggccctcgcacagaggccgaatggcgggt

SEQ ID NO: 367099 - DNA, 30 bp, Artificial Sequence
  Synthetic oligonucleotide
cgaagacctagacttctgagtctggcgggt

SEQ ID NO: 367100 - DNA, 30 bp, Artificial Sequence
  Synthetic oligonucleotide
cgcgtattattcattacgtcgcgtgcgggt

SEQ ID NO: 367101 - DNA, 30 bp, Artificial Sequence
  Synthetic oligonucleotide
ggcaacaccttgaccgagtaaattgcgggt

SEQ ID NO: 367102 - DNA, 30 bp, Artificial Sequence
  Synthetic oligonucleotide
gacaactctgttgtggcagcccaatcgggt

SEQ ID NO: 367103 - DNA, 30 bp, Artificial Sequence
  Synthetic oligonucleotide
ttctagcaagtttgcgtcaggagatcgggt

SEQ ID NO: 367104 - DNA, 30 bp, Artificial Sequence
  Synthetic oligonucleotide
atcctgatcatgggtgggggcgtatcgggt

SEQ ID NO: 367105 - DNA, 30 bp, Artificial Sequence
  Synthetic oligonucleotide
ttagatcttcaggatacaccctactcgggt

SEQ ID NO: 367106 - DNA, 30 bp, Artificial Sequence
  Synthetic oligonucleotide
taacgattaatgatggcaatagcctcgggt

SEQ ID NO: 367107 - DNA, 30 bp, Artificial Sequence
  Synthetic oligonucleotide
aactggcaacgtagtggccctgcgtcgggt

SEQ ID NO: 367108 - DNA, 30 bp, Artificial Sequence
  Synthetic oligonucleotide
gccccatgaaagggcgataccgacaggggt

SEQ ID NO: 367109 - DNA, 30 bp, Artificial Sequence
  Synthetic oligonucleotide
ctcatggagatctcctatctgcggaggggt

SEQ ID NO: 367110 - DNA, 30 bp, Artificial Sequence
  Synthetic oligonucleotide
acgtcaaccggcagttatacgtggaggggt

SEQ ID NO: 367111 - DNA, 30 bp, Artificial Sequence
  Synthetic oligonucleotide
cggtgttgcaagcatcagatattgaggggt

SEQ ID NO: 367112 - DNA, 30 bp, Artificial Sequence
  Synthetic oligonucleotide
tcaaggttaacgcgttgatccattaggggt

SEQ ID NO: 367113 - DNA, 30 bp, Artificial Sequence
  Synthetic oligonucleotide
aaaaggctaaaggtagttctgaaacggggt

SEQ ID NO: 367114 - DNA, 30 bp, Artificial Sequence
  Synthetic oligonucleotide
ccttttccgtagttacacattcgacggggt

SEQ ID NO: 367115 - DNA, 30 bp, Artificial Sequence
  Synthetic oligonucleotide
gctactcatagaaatgggttaaagcggggt

SEQ ID NO: 367116 - DNA, 30 bp, Artificial Sequence
  Synthetic oligonucleotide
gactaagtatgactcgggaggtagcggggt

SEQ ID NO: 367117 - DNA, 30 bp, Artificial Sequence
  Synthetic oligonucleotide
agtcacatagaattatcgcatctgcggggt

SEQ ID NO: 367118 - DNA, 25 bp, Artificial Sequence
  Synthetic oligonucleotide
tcaattataggagtttcatcggggt

SEQ ID NO: 367119 - DNA, 30 bp, Artificial Sequence
  Synthetic oligonucleotide
attagacgcgatagcttgcgatgtcggggt

SEQ ID NO: 367120 - DNA, 30 bp, Artificial Sequence
  Synthetic oligonucleotide
ggataacttctggaaccttagtgagggggt

SEQ ID NO: 367121 - DNA, 30 bp, Artificial Sequence
  Synthetic oligonucleotide
tgcgcagcacatcgcactataaacgggggt

SEQ ID NO: 367122 - DNA, 30 bp, Artificial Sequence
  Synthetic oligonucleotide
agcattggagaggggcagaccggcgggggt

SEQ ID NO: 367123 - DNA, 30 bp, Artificial Sequence
  Synthetic oligonucleotide
acgagctaatcgggtatgtggaaggggggt

SEQ ID NO: 367124 - DNA, 30 bp, Artificial Sequence
  Synthetic oligonucleotide
gaaatggactgcggaagagtccaggggggt

SEQ ID NO: 367125 - DNA, 30 bp, Artificial Sequence
  Synthetic oligonucleotide
agcggattattccctcgcccgcaggggggt

SEQ ID NO: 367126 - DNA, 30 bp, Artificial Sequence
  Synthetic oligonucleotide
aacgctcacacataacactttcaggggggt

SEQ ID NO: 367127 - DNA, 30 bp, Artificial Sequence
  Synthetic oligonucleotide
tctgtgtgaagggtgggcacccgggggggt

SEQ ID NO: 367128 - DNA, 30 bp, Artificial Sequence
  Synthetic oligonucleotide
gccctgatgcaccgagacggaaatgggggt

SEQ ID NO: 367129 - DNA, 30 bp, Artificial Sequence
  Synthetic oligonucleotide
cccgtgcaaacgagggggcaccatgggggt

SEQ ID NO: 367130 - DNA, 31 bp, Artificial Sequence
  Synthetic oligonucleotide
cggtctcattagtctagtgtgagaatggggt

SEQ ID NO: 367131 - DNA, 30 bp, Artificial Sequence
  Synthetic oligonucleotide
gtattaacagagatatcttatctatggggt

SEQ ID NO: 367132 - DNA, 30 bp, Artificial Sequence
  Synthetic oligonucleotide
tgagtgacaatgaggtaaaactcctggggt

SEQ ID NO: 367133 - DNA, 30 bp, Artificial Sequence
  Synthetic oligonucleotide
caactaggttaaaattctgtattctggggt

SEQ ID NO: 367134 - DNA, 30 bp, Artificial Sequence
  Synthetic oligonucleotide
acgcacgccgaactccgtataagttggggt

SEQ ID NO: 367135 - DNA, 30 bp, Artificial Sequence
  Synthetic oligonucleotide
gcgccgtgtaactgcttacaacaaatgggt

SEQ ID NO: 367136 - DNA, 30 bp, Artificial Sequence
  Synthetic oligonucleotide
ataagattaggaagtaattagttaatgggt

SEQ ID NO: 367137 - DNA, 30 bp, Artificial Sequence
  Synthetic oligonucleotide
gcatggttgtagattaatttgaacatgggt

SEQ ID NO: 367138 - DNA, 30 bp, Artificial Sequence
  Synthetic oligonucleotide
acagtgtctgggcggaaaatccgcatgggt

SEQ ID NO: 367139 - DNA, 30 bp, Artificial Sequence
  Synthetic oligonucleotide
gttttctacggactgggagtccgcatgggt

SEQ ID NO: 367140 - DNA, 30 bp, Artificial Sequence
  Synthetic oligonucleotide
tcttgcccgacgcttgactcaatcatgggt

SEQ ID NO: 367141 - DNA, 30 bp, Artificial Sequence
  Synthetic oligonucleotide
gaccattcgcaaagaacgaaatcgatgggt

SEQ ID NO: 367142 - DNA, 30 bp, Artificial Sequence
  Synthetic oligonucleotide
gattagaccataatcccggagaaactgggt

SEQ ID NO: 367143 - DNA, 30 bp, Artificial Sequence
  Synthetic oligonucleotide
gttgcgtataggccggttcctcgactgggt

SEQ ID NO: 367144 - DNA, 30 bp, Artificial Sequence
  Synthetic oligonucleotide
cgcatgcggcacggcgaaaatggactgggt

SEQ ID NO: 367145 - DNA, 30 bp, Artificial Sequence
  Synthetic oligonucleotide
gattgacgtacgacgctggccggcctgggt

SEQ ID NO: 367146 - DNA, 30 bp, Artificial Sequence
  Synthetic oligonucleotide
ggaagctaagccccacacggttgcctgggt

SEQ ID NO: 367147 - DNA, 30 bp, Artificial Sequence
  Synthetic oligonucleotide
aagtcttctcactgttccagcaagctgggt

SEQ ID NO: 367148 - DNA, 30 bp, Artificial Sequence
  Synthetic oligonucleotide
agatggccgataagttatattcttctgggt

SEQ ID NO: 367149 - DNA, 30 bp, Artificial Sequence
  Synthetic oligonucleotide
tacgtgtccaaggaccggctagttctgggt

SEQ ID NO: 367150 - DNA, 30 bp, Artificial Sequence
  Synthetic oligonucleotide
tccgtctgtgcatcgtttaagaaggtgggt

SEQ ID NO: 367151 - DNA, 30 bp, Artificial Sequence
  Synthetic oligonucleotide
gtatctttaggctacgatcgcgcggtgggt

SEQ ID NO: 367152 - DNA, 30 bp, Artificial Sequence
  Synthetic oligonucleotide
actgcggtcgctaaccaattctaattgggt

SEQ ID NO: 367153 - DNA, 30 bp, Artificial Sequence
  Synthetic oligonucleotide
cgcaacggttctgcggtcgagcccttgggt

SEQ ID NO: 367154 - DNA, 30 bp, Artificial Sequence
  Synthetic oligonucleotide
acggctccattatgcaaagtcatcttgggt

SEQ ID NO: 367155 - DNA, 30 bp, Artificial Sequence
  Synthetic oligonucleotide
gggccccataatattaaggcagatttgggt

SEQ ID NO: 367156 - DNA, 30 bp, Artificial Sequence
  Synthetic oligonucleotide
acccgggtactagcgatcattccaaatggt

SEQ ID NO: 367157 - DNA, 30 bp, Artificial Sequence
  Synthetic oligonucleotide
caatactgcgctctaattatgcgaaatggt

SEQ ID NO: 367158 - DNA, 30 bp, Artificial Sequence
  Synthetic oligonucleotide
ctaatactcgtcgggtaccacgtaaatggt

SEQ ID NO: 367159 - DNA, 30 bp, Artificial Sequence
  Synthetic oligonucleotide
ttccactatcgtacacggagcgacaatggt

SEQ ID NO: 367160 - DNA, 30 bp, Artificial Sequence
  Synthetic oligonucleotide
aatggtgtatattcgttgtggtccaatggt

SEQ ID NO: 367161 - DNA, 30 bp, Artificial Sequence
  Synthetic oligonucleotide
cagacacctgcaatggtaacgtagaatggt

SEQ ID NO: 367162 - DNA, 30 bp, Artificial Sequence
  Synthetic oligonucleotide
tattcgttggttaggatgggtaataatggt

SEQ ID NO: 367163 - DNA, 30 bp, Artificial Sequence
  Synthetic oligonucleotide
ctcctgctttacacttctggatataatggt

SEQ ID NO: 367164 - DNA, 30 bp, Artificial Sequence
  Synthetic oligonucleotide
gatactcgccgggatgataccagtaatggt

SEQ ID NO: 367165 - DNA, 30 bp, Artificial Sequence
  Synthetic oligonucleotide
ggatccaagtcttgcggaatgcatcatggt

SEQ ID NO: 367166 - DNA, 30 bp, Artificial Sequence
  Synthetic oligonucleotide
ctcacgattagactacgagtccctcatggt

SEQ ID NO: 367167 - DNA, 30 bp, Artificial Sequence
  Synthetic oligonucleotide
tctggccaaggtcaaaaatcgggtcatggt

SEQ ID NO: 367168 - DNA, 31 bp, Artificial Sequence
  Synthetic oligonucleotide
tcccctggtactacgctctcgaattcatggt

SEQ ID NO: 367169 - DNA, 30 bp, Artificial Sequence
  Synthetic oligonucleotide
ataggttcacattacataaggctcgatggt

SEQ ID NO: 367170 - DNA, 30 bp, Artificial Sequence
  Synthetic oligonucleotide
ggggtcggaagagacagttcagtcgatggt

SEQ ID NO: 367171 - DNA, 30 bp, Artificial Sequence
  Synthetic oligonucleotide
gcgacatgcgcagttttcgacacggatggt

SEQ ID NO: 367172 - DNA, 30 bp, Artificial Sequence
  Synthetic oligonucleotide
ggacgggtctattcgagtaactaatatggt

SEQ ID NO: 367173 - DNA, 30 bp, Artificial Sequence
  Synthetic oligonucleotide
aaatcagggtttgcttaatctatatatggt

SEQ ID NO: 367174 - DNA, 30 bp, Artificial Sequence
  Synthetic oligonucleotide
aaaacggagcgtaatggaactcggtatggt

SEQ ID NO: 367175 - DNA, 30 bp, Artificial Sequence
  Synthetic oligonucleotide
caaaaaggggatgatcacaaatggtatggt

SEQ ID NO: 367176 - DNA, 30 bp, Artificial Sequence
  Synthetic oligonucleotide
agatgggtcattacgcgctttcattatggt

SEQ ID NO: 367177 - DNA, 30 bp, Artificial Sequence
  Synthetic oligonucleotide
aagttaatacttaatccaggataaactggt

SEQ ID NO: 367178 - DNA, 30 bp, Artificial Sequence
  Synthetic oligonucleotide
ttaagggctaatacgccgagcacaactggt

SEQ ID NO: 367179 - DNA, 30 bp, Artificial Sequence
  Synthetic oligonucleotide
aaccaaagttgctaagaatccctaactggt

SEQ ID NO: 367180 - DNA, 30 bp, Artificial Sequence
  Synthetic oligonucleotide
ctgcatctaacgctgtgaataatcactggt

SEQ ID NO: 367181 - DNA, 30 bp, Artificial Sequence
  Synthetic oligonucleotide
atacgccttcaataggttctatctactggt

SEQ ID NO: 367182 - DNA, 30 bp, Artificial Sequence
  Synthetic oligonucleotide
acagtcccaattatacaaattcttactggt

SEQ ID NO: 367183 - DNA, 30 bp, Artificial Sequence
  Synthetic oligonucleotide
ctcgccgcgatattaagaatcgttactggt

SEQ ID NO: 367184 - DNA, 30 bp, Artificial Sequence
  Synthetic oligonucleotide
tgagtagggttcctgcagattccacctggt

SEQ ID NO: 367185 - DNA, 30 bp, Artificial Sequence
  Synthetic oligonucleotide
tcattgtcggggggcatttgagcacctggt

SEQ ID NO: 367186 - DNA, 30 bp, Artificial Sequence
  Synthetic oligonucleotide
agcagtgcacaccagactttaagccctggt

SEQ ID NO: 367187 - DNA, 30 bp, Artificial Sequence
  Synthetic oligonucleotide
cgagatccccacgacgtagttgcgcctggt

SEQ ID NO: 367188 - DNA, 30 bp, Artificial Sequence
  Synthetic oligonucleotide
acatcgtacacgctggggtctcggcctggt

SEQ ID NO: 367189 - DNA, 30 bp, Artificial Sequence
  Synthetic oligonucleotide
gatccatcctgcgtcaagatgttagctggt

SEQ ID NO: 367190 - DNA, 30 bp, Artificial Sequence
  Synthetic oligonucleotide
gaatcaagtgcgagaaccccaagcgctggt

SEQ ID NO: 367191 - DNA, 30 bp, Artificial Sequence
  Synthetic oligonucleotide
tggccgcataaagtttacttgtcggctggt

SEQ ID NO: 367192 - DNA, 30 bp, Artificial Sequence
  Synthetic oligonucleotide
cgcaaccacggaataggcacaattgctggt

SEQ ID NO: 367193 - DNA, 30 bp, Artificial Sequence
  Synthetic oligonucleotide
ctagcaacgcaaaaagagtaacgatctggt

SEQ ID NO: 367194 - DNA, 30 bp, Artificial Sequence
  Synthetic oligonucleotide
tgccactcttgtcaaagcacaacgtctggt

SEQ ID NO: 367195 - DNA, 30 bp, Artificial Sequence
  Synthetic oligonucleotide
gttggtgaatatgtagcgatagattctggt

SEQ ID NO: 367196 - DNA, 30 bp, Artificial Sequence
  Synthetic oligonucleotide
tcggcgctcatccaccggtaaacttctggt

SEQ ID NO: 367197 - DNA, 30 bp, Artificial Sequence
  Synthetic oligonucleotide
gtgctactttgcgtcaaaagttacagtggt

SEQ ID NO: 367198 - DNA, 30 bp, Artificial Sequence
  Synthetic oligonucleotide
ataccgttccccccacagaattgcagtggt

SEQ ID NO: 367199 - DNA, 30 bp, Artificial Sequence
  Synthetic oligonucleotide
gactagcaatgtggagtaaaaatcagtggt

SEQ ID NO: 367200 - DNA, 30 bp, Artificial Sequence
  Synthetic oligonucleotide
gtagcaatgtagctagcccctttcagtggt

SEQ ID NO: 367201 - DNA, 30 bp, Artificial Sequence
  Synthetic oligonucleotide
cacccatctataagatgattggggagtggt

SEQ ID NO: 367202 - DNA, 30 bp, Artificial Sequence
  Synthetic oligonucleotide
tcatatggagaattctatcgcggtagtggt

SEQ ID NO: 367203 - DNA, 30 bp, Artificial Sequence
  Synthetic oligonucleotide
ccttaaggacggtttctgtcaacacgtggt

SEQ ID NO: 367204 - DNA, 30 bp, Artificial Sequence
  Synthetic oligonucleotide
gaatacatcgcctacagtagggcacgtggt

SEQ ID NO: 367205 - DNA, 30 bp, Artificial Sequence
  Synthetic oligonucleotide
atacaatccggtgccaacattttacgtggt

SEQ ID NO: 367206 - DNA, 30 bp, Artificial Sequence
  Synthetic oligonucleotide
ttatatgtgcaacagaggattggtcgtggt

SEQ ID NO: 367207 - DNA, 31 bp, Artificial Sequence
  Synthetic oligonucleotide
gtcggcattgttgtgacacggcccaggtggt

SEQ ID NO: 367208 - DNA, 30 bp, Artificial Sequence
  Synthetic oligonucleotide
ctaccgttgattacttgtcctataggtggt

SEQ ID NO: 367209 - DNA, 30 bp, Artificial Sequence
  Synthetic oligonucleotide
taaatggtagacgaattgaggctaggtggt

SEQ ID NO: 367210 - DNA, 30 bp, Artificial Sequence
  Synthetic oligonucleotide
atgcgtacggcagtgccagtaaatggtggt

SEQ ID NO: 367211 - DNA, 30 bp, Artificial Sequence
  Synthetic oligonucleotide
ggtatactaaaacaaaggggggctggtggt

SEQ ID NO: 367212 - DNA, 30 bp, Artificial Sequence
  Synthetic oligonucleotide
gggcgaggctttgtttaaggctgtggtggt

SEQ ID NO: 367213 - DNA, 30 bp, Artificial Sequence
  Synthetic oligonucleotide
tttgagctagggatgttctgatcatgtggt

SEQ ID NO: 367214 - DNA, 30 bp, Artificial Sequence
  Synthetic oligonucleotide
taaggcgctctcgaaatgttaggatgtggt

SEQ ID NO: 367215 - DNA, 30 bp, Artificial Sequence
  Synthetic oligonucleotide
tgcctaaaagtcgagaaatcgatatgtggt

SEQ ID NO: 367216 - DNA, 30 bp, Artificial Sequence
  Synthetic oligonucleotide
gtttttgtcaactcaagattattatgtggt

SEQ ID NO: 367217 - DNA, 30 bp, Artificial Sequence
  Synthetic oligonucleotide
tctctactaagggggcttgtgagctgtggt

SEQ ID NO: 367218 - DNA, 30 bp, Artificial Sequence
  Synthetic oligonucleotide
aaagagcaggcatagtctcgtgtctgtggt

SEQ ID NO: 367219 - DNA, 30 bp, Artificial Sequence
  Synthetic oligonucleotide
tgcggccactcgaggcggtacaagtgtggt

SEQ ID NO: 367220 - DNA, 30 bp, Artificial Sequence
  Synthetic oligonucleotide
gtggtcataacactccggacgatgtgtggt

SEQ ID NO: 367221 - DNA, 30 bp, Artificial Sequence
  Synthetic oligonucleotide
cgatgttagctctgggtctacttgtgtggt

SEQ ID NO: 367222 - DNA, 30 bp, Artificial Sequence
  Synthetic oligonucleotide
ttacatagtgccttcggttggtgttgtggt

SEQ ID NO: 367223 - DNA, 30 bp, Artificial Sequence
  Synthetic oligonucleotide
atattgatgggaaagttaccacaaattggt

SEQ ID NO: 367224 - DNA, 30 bp, Artificial Sequence
  Synthetic oligonucleotide
ccttttaatgggacgcgagatctaattggt

SEQ ID NO: 367225 - DNA, 30 bp, Artificial Sequence
  Synthetic oligonucleotide
agtataatgcataaacaggtatacattggt

SEQ ID NO: 367226 - DNA, 31 bp, Artificial Sequence
  Synthetic oligonucleotide
tacgcctactcgccacgtggctcgcattggt

SEQ ID NO: 367227 - DNA, 30 bp, Artificial Sequence
  Synthetic oligonucleotide
tgtaaagcccggagcctttcaggcattggt

SEQ ID NO: 367228 - DNA, 30 bp, Artificial Sequence
  Synthetic oligonucleotide
ggttgcccgaattccgaagaagggattggt

SEQ ID NO: 367229 - DNA, 30 bp, Artificial Sequence
  Synthetic oligonucleotide
attgcccagtggaattcgaaatatattggt

SEQ ID NO: 367230 - DNA, 30 bp, Artificial Sequence
  Synthetic oligonucleotide
ctggcgtgatacttggtaaacctacttggt

SEQ ID NO: 367231 - DNA, 30 bp, Artificial Sequence
  Synthetic oligonucleotide
atgtgcgttttgttcttattattacttggt

SEQ ID NO: 367232 - DNA, 30 bp, Artificial Sequence
  Synthetic oligonucleotide
aggcgtgcacttatctcatgtgcccttggt

SEQ ID NO: 367233 - DNA, 30 bp, Artificial Sequence
  Synthetic oligonucleotide
agggccgcctcggtatgaacttgccttggt

SEQ ID NO: 367234 - DNA, 30 bp, Artificial Sequence
  Synthetic oligonucleotide
tggtggttggaggtcatcgtttgccttggt

SEQ ID NO: 367235 - DNA, 30 bp, Artificial Sequence
  Synthetic oligonucleotide
aacgtaaggaacgtaagctctgtccttggt

SEQ ID NO: 367236 - DNA, 30 bp, Artificial Sequence
  Synthetic oligonucleotide
ggcagcaccgagaagatatctaggcttggt

SEQ ID NO: 367237 - DNA, 30 bp, Artificial Sequence
  Synthetic oligonucleotide
aagtcgataaaacgggactgcgttcttggt

SEQ ID NO: 367238 - DNA, 30 bp, Artificial Sequence
  Synthetic oligonucleotide
gtgggttaaaacttggacttgggcgttggt

SEQ ID NO: 367239 - DNA, 30 bp, Artificial Sequence
  Synthetic oligonucleotide
ggctgccaatgactttcgtttgcggttggt

SEQ ID NO: 367240 - DNA, 30 bp, Artificial Sequence
  Synthetic oligonucleotide
atcatccattatgttaggcaaagggttggt

SEQ ID NO: 367241 - DNA, 30 bp, Artificial Sequence
  Synthetic oligonucleotide
actaacgtctctggtggggtctatgttggt

SEQ ID NO: 367242 - DNA, 30 bp, Artificial Sequence
  Synthetic oligonucleotide
caagaggtgccggatcaccgtagtgttggt

SEQ ID NO: 367243 - DNA, 30 bp, Artificial Sequence
  Synthetic oligonucleotide
tgatccgatcagcaacttctaatctttggt

SEQ ID NO: 367244 - DNA, 30 bp, Artificial Sequence
  Synthetic oligonucleotide
aggaacctacgtaccatgggtctgtttggt

SEQ ID NO: 367245 - DNA, 30 bp, Artificial Sequence
  Synthetic oligonucleotide
gccgttggctatttaacgtactcttttggt

SEQ ID NO: 367246 - DNA, 30 bp, Artificial Sequence
  Synthetic oligonucleotide
tacggtagaaccgggcacttgacaaaatgt

SEQ ID NO: 367247 - DNA, 30 bp, Artificial Sequence
  Synthetic oligonucleotide
gatatgatgggcagcgcccaaagaaaatgt

SEQ ID NO: 367248 - DNA, 30 bp, Artificial Sequence
  Synthetic oligonucleotide
gagcttacataatgcgccctcgtaaaatgt

SEQ ID NO: 367249 - DNA, 30 bp, Artificial Sequence
  Synthetic oligonucleotide
ggtagattttatcagcgcctagacaaatgt

SEQ ID NO: 367250 - DNA, 30 bp, Artificial Sequence
  Synthetic oligonucleotide
gtagtagcctcaaaggattgctccaaatgt

SEQ ID NO: 367251 - DNA, 30 bp, Artificial Sequence
  Synthetic oligonucleotide
tagctggacggtatagcttatgggaaatgt

SEQ ID NO: 367252 - DNA, 30 bp, Artificial Sequence
  Synthetic oligonucleotide
cgtcgctttcctggcattcaaggtaaatgt

SEQ ID NO: 367253 - DNA, 30 bp, Artificial Sequence
  Synthetic oligonucleotide
ttgtcccgatgaggggactttgttaaatgt

SEQ ID NO: 367254 - DNA, 30 bp, Artificial Sequence
  Synthetic oligonucleotide
tgcgcgtaaacggaccagactcaacaatgt

SEQ ID NO: 367255 - DNA, 30 bp, Artificial Sequence
  Synthetic oligonucleotide
ccaaaatcagtggcccggagcccacaatgt

SEQ ID NO: 367256 - DNA, 30 bp, Artificial Sequence
  Synthetic oligonucleotide
ttgcaagaatttatctaggcgagacaatgt

SEQ ID NO: 367257 - DNA, 30 bp, Artificial Sequence
  Synthetic oligonucleotide
cggtactgcgcaattgaatgcggacaatgt

SEQ ID NO: 367258 - DNA, 30 bp, Artificial Sequence
  Synthetic oligonucleotide
gataatatggttagagcagaaccccaatgt

SEQ ID NO: 367259 - DNA, 30 bp, Artificial Sequence
  Synthetic oligonucleotide
ctcactcagctaggaatactcgtccaatgt

SEQ ID NO: 367260 - DNA, 30 bp, Artificial Sequence
  Synthetic oligonucleotide
actgtgacgtctttctgagagcagcaatgt

SEQ ID NO: 367261 - DNA, 30 bp, Artificial Sequence
  Synthetic oligonucleotide
taatcctaaaggactgtaaggaggcaatgt

SEQ ID NO: 367262 - DNA, 30 bp, Artificial Sequence
  Synthetic oligonucleotide
gactccctggctctagtagataggcaatgt

SEQ ID NO: 367263 - DNA, 30 bp, Artificial Sequence
  Synthetic oligonucleotide
ggtttctagtgaaagggggtcgggcaatgt

SEQ ID NO: 367264 - DNA, 30 bp, Artificial Sequence
  Synthetic oligonucleotide
cagacgcatttcgtattttcgtggcaatgt

SEQ ID NO: 367265 - DNA, 30 bp, Artificial Sequence
  Synthetic oligonucleotide
tctgacctcgcatcattcgttgctcaatgt

SEQ ID NO: 367266 - DNA, 30 bp, Artificial Sequence
  Synthetic oligonucleotide
ttttgaaaatccgctttggtccgtcaatgt

SEQ ID NO: 367267 - DNA, 30 bp, Artificial Sequence
  Synthetic oligonucleotide
gcaaaaaagtgctattccttaggtcaatgt

SEQ ID NO: 367268 - DNA, 30 bp, Artificial Sequence
  Synthetic oligonucleotide
atcgtaaactagctcttgttaatagaatgt

SEQ ID NO: 367269 - DNA, 30 bp, Artificial Sequence
  Synthetic oligonucleotide
ttcatactcgctaatgttgtgaacgaatgt

SEQ ID NO: 367270 - DNA, 30 bp, Artificial Sequence
  Synthetic oligonucleotide
ttacttaatagacaatcaattacggaatgt

SEQ ID NO: 367271 - DNA, 31 bp, Artificial Sequence
  Synthetic oligonucleotide
acggctctcgatgtctctatgcggggaatgt

SEQ ID NO: 367272 - DNA, 30 bp, Artificial Sequence
  Synthetic oligonucleotide
gaagcccggcatcgcaacgatctggaatgt

SEQ ID NO: 367273 - DNA, 30 bp, Artificial Sequence
  Synthetic oligonucleotide
ccgcagctgttctagcgggtacgtgaatgt

SEQ ID NO: 367274 - DNA, 30 bp, Artificial Sequence
  Synthetic oligonucleotide
aacccgcgaagacttgaattagaataatgt

SEQ ID NO: 367275 - DNA, 30 bp, Artificial Sequence
  Synthetic oligonucleotide
gaaggcaactctgggggcgcttcataatgt

SEQ ID NO: 367276 - DNA, 30 bp, Artificial Sequence
  Synthetic oligonucleotide
tacgatctcttgggggacgaaggataatgt

SEQ ID NO: 367277 - DNA, 30 bp, Artificial Sequence
  Synthetic oligonucleotide
caagtctcaaaagcgacaccaacctaatgt

SEQ ID NO: 367278 - DNA, 30 bp, Artificial Sequence
  Synthetic oligonucleotide
accgcacttgtaatgaaggtccgctaatgt

SEQ ID NO: 367279 - DNA, 30 bp, Artificial Sequence
  Synthetic oligonucleotide
gtcgtgtggcaaacaattagaacgtaatgt

SEQ ID NO: 367280 - DNA, 30 bp, Artificial Sequence
  Synthetic oligonucleotide
gtcataagccccgagtttggcgcgtaatgt

SEQ ID NO: 367281 - DNA, 30 bp, Artificial Sequence
  Synthetic oligonucleotide
aagctggtatcgcattgaccaaggtaatgt

SEQ ID NO: 367282 - DNA, 30 bp, Artificial Sequence
  Synthetic oligonucleotide
taggcagggcagatgtgccggaggtaatgt

SEQ ID NO: 367283 - DNA, 30 bp, Artificial Sequence
  Synthetic oligonucleotide
ccacctgcgtcattagccgatatgtaatgt

SEQ ID NO: 367284 - DNA, 30 bp, Artificial Sequence
  Synthetic oligonucleotide
gctcatctgcgaccacctcgtaattaatgt

SEQ ID NO: 367285 - DNA, 30 bp, Artificial Sequence
  Synthetic oligonucleotide
ggagcgcataggtggatatcggccacatgt

SEQ ID NO: 367286 - DNA, 30 bp, Artificial Sequence
  Synthetic oligonucleotide
actgtaaagcagcataatgctgggacatgt

SEQ ID NO: 367287 - DNA, 30 bp, Artificial Sequence
  Synthetic oligonucleotide
tgcgggctttcgggtttaccgtggacatgt

SEQ ID NO: 367288 - DNA, 30 bp, Artificial Sequence
  Synthetic oligonucleotide
ggatcttgcccgcgaactcggtggacatgt

SEQ ID NO: 367289 - DNA, 30 bp, Artificial Sequence
  Synthetic oligonucleotide
cagcggtatgtgacagcttagacaccatgt

SEQ ID NO: 367290 - DNA, 30 bp, Artificial Sequence
  Synthetic oligonucleotide
atcatccgcgtattaatctccaacccatgt

SEQ ID NO: 367291 - DNA, 30 bp, Artificial Sequence
  Synthetic oligonucleotide
tcatgtgttcgaggacccaggcccccatgt

SEQ ID NO: 367292 - DNA, 30 bp, Artificial Sequence
  Synthetic oligonucleotide
ttgtattgtttatccaagctaatcccatgt

SEQ ID NO: 367293 - DNA, 30 bp, Artificial Sequence
  Synthetic oligonucleotide
caactcggcgaggccggatacgcgccatgt

SEQ ID NO: 367294 - DNA, 30 bp, Artificial Sequence
  Synthetic oligonucleotide
agacccgtaacccaccattttgctccatgt

SEQ ID NO: 367295 - DNA, 30 bp, Artificial Sequence
  Synthetic oligonucleotide
catagaggcattgtagtacggcgtccatgt

SEQ ID NO: 367296 - DNA, 30 bp, Artificial Sequence
  Synthetic oligonucleotide
ccagccgaacgacaggatctcggtccatgt

SEQ ID NO: 367297 - DNA, 30 bp, Artificial Sequence
  Synthetic oligonucleotide
actggttcctacttcggggcctgagcatgt

SEQ ID NO: 367298 - DNA, 30 bp, Artificial Sequence
  Synthetic oligonucleotide
acgttgcctgcgctagatactcaggcatgt

SEQ ID NO: 367299 - DNA, 30 bp, Artificial Sequence
  Synthetic oligonucleotide
aagtgaatgtgtcgacctcaggcggcatgt

SEQ ID NO: 367300 - DNA, 30 bp, Artificial Sequence
  Synthetic oligonucleotide
gctgggctattcagcatagtaggggcatgt

SEQ ID NO: 367301 - DNA, 30 bp, Artificial Sequence
  Synthetic oligonucleotide
ttcttatcatggcttatcttttaatcatgt

SEQ ID NO: 367302 - DNA, 30 bp, Artificial Sequence
  Synthetic oligonucleotide
cctttgtcaacgatatgtaatccctcatgt

SEQ ID NO: 367303 - DNA, 30 bp, Artificial Sequence
  Synthetic oligonucleotide
cgatgggatccgttgcaaacagtctcatgt

SEQ ID NO: 367304 - DNA, 30 bp, Artificial Sequence
  Synthetic oligonucleotide
ttggaatgaagcctttgtaccgagtcatgt

SEQ ID NO: 367305 - DNA, 30 bp, Artificial Sequence
  Synthetic oligonucleotide
ctcggccactctcagtacagtgggtcatgt

SEQ ID NO: 367306 - DNA, 30 bp, Artificial Sequence
  Synthetic oligonucleotide
acacttatagcgtgaacaccagtgtcatgt

SEQ ID NO: 367307 - DNA, 30 bp, Artificial Sequence
  Synthetic oligonucleotide
ttatgtatagggtagacactccattcatgt

SEQ ID NO: 367308 - DNA, 30 bp, Artificial Sequence
  Synthetic oligonucleotide
tggcttcggaaagtaggaggctattcatgt

SEQ ID NO: 367309 - DNA, 30 bp, Artificial Sequence
  Synthetic oligonucleotide
aagtaccggacttcgttactaagttcatgt

SEQ ID NO: 367310 - DNA, 30 bp, Artificial Sequence
  Synthetic oligonucleotide
gagatgtcgatatggtaaacgcgttcatgt

SEQ ID NO: 367311 - DNA, 30 bp, Artificial Sequence
  Synthetic oligonucleotide
agacgacccttcagtgcgccgagaagatgt

SEQ ID NO: 367312 - DNA, 30 bp, Artificial Sequence
  Synthetic oligonucleotide
caaacagcacaaatacggcctaggagatgt

SEQ ID NO: 367313 - DNA, 30 bp, Artificial Sequence
  Synthetic oligonucleotide
cacctttggttggccggatgcatgagatgt

SEQ ID NO: 367314 - DNA, 30 bp, Artificial Sequence
  Synthetic oligonucleotide
ctttcattatatggtcctgtacatagatgt

SEQ ID NO: 367315 - DNA, 30 bp, Artificial Sequence
  Synthetic oligonucleotide
caggcaatcacgcatgggggactacgatgt

SEQ ID NO: 367316 - DNA, 30 bp, Artificial Sequence
  Synthetic oligonucleotide
atggtgaatatcattggcccgttacgatgt

SEQ ID NO: 367317 - DNA, 30 bp, Artificial Sequence
  Synthetic oligonucleotide
cgttcgttgagcatggccaatttccgatgt

SEQ ID NO: 367318 - DNA, 30 bp, Artificial Sequence
  Synthetic oligonucleotide
tttggccagctgtacagggcgtatcgatgt

SEQ ID NO: 367319 - DNA, 30 bp, Artificial Sequence
  Synthetic oligonucleotide
gacgccatccaataaacgtagagaggatgt

SEQ ID NO: 367320 - DNA, 30 bp, Artificial Sequence
  Synthetic oligonucleotide
tttaagataagtagtagcattagcggatgt

SEQ ID NO: 367321 - DNA, 30 bp, Artificial Sequence
  Synthetic oligonucleotide
gggcgggttgaagggttccgtcgcggatgt

SEQ ID NO: 367322 - DNA, 30 bp, Artificial Sequence
  Synthetic oligonucleotide
atgttggagcatgagtgttgattcggatgt

SEQ ID NO: 367323 - DNA, 30 bp, Artificial Sequence
  Synthetic oligonucleotide
gaataaaggttaccagggatacggggatgt

SEQ ID NO: 367324 - DNA, 30 bp, Artificial Sequence
  Synthetic oligonucleotide
tatacgctatgacgttagagtatgggatgt

SEQ ID NO: 367325 - DNA, 30 bp, Artificial Sequence
  Synthetic oligonucleotide
attaagaggcaaacctgggatcttggatgt

SEQ ID NO: 367326 - DNA, 30 bp, Artificial Sequence
  Synthetic oligonucleotide
atgcagacattggtgactcccttatgatgt

SEQ ID NO: 367327 - DNA, 30 bp, Artificial Sequence
  Synthetic oligonucleotide
tgtggagagatcagggccctttactgatgt

SEQ ID NO: 367328 - DNA, 30 bp, Artificial Sequence
  Synthetic oligonucleotide
ctagacgtccgggtttttacgcggtgatgt

SEQ ID NO: 367329 - DNA, 30 bp, Artificial Sequence
  Synthetic oligonucleotide
atggttctgaaagtctggcttaattgatgt

SEQ ID NO: 367330 - DNA, 30 bp, Artificial Sequence
  Synthetic oligonucleotide
gtcgtctcgtctattgatgccaacatatgt

SEQ ID NO: 367331 - DNA, 30 bp, Artificial Sequence
  Synthetic oligonucleotide
gcaatacttccaacatacgaccagatatgt

SEQ ID NO: 367332 - DNA, 30 bp, Artificial Sequence
  Synthetic oligonucleotide
gtgacatcttttagtttagttaggatatgt

SEQ ID NO: 367333 - DNA, 30 bp, Artificial Sequence
  Synthetic oligonucleotide
actatagagtaaacatgtttgactatatgt

SEQ ID NO: 367334 - DNA, 31 bp, Artificial Sequence
  Synthetic oligonucleotide
aggtggcgctagtggcgcaaagtgactatgt

SEQ ID NO: 367335 - DNA, 30 bp, Artificial Sequence
  Synthetic oligonucleotide
catagtagtgcaaattttcgagtactatgt

SEQ ID NO: 367336 - DNA, 30 bp, Artificial Sequence
  Synthetic oligonucleotide
gagggggatagcgcgctgcaaacgctatgt

SEQ ID NO: 367337 - DNA, 30 bp, Artificial Sequence
  Synthetic oligonucleotide
atggatgctgccgccaagcttcctctatgt

SEQ ID NO: 367338 - DNA, 30 bp, Artificial Sequence
  Synthetic oligonucleotide
tttgtaccaaatgacttcctagcagtatgt

SEQ ID NO: 367339 - DNA, 30 bp, Artificial Sequence
  Synthetic oligonucleotide
actccaccgaggttggctctgggagtatgt

SEQ ID NO: 367340 - DNA, 30 bp, Artificial Sequence
  Synthetic oligonucleotide
gccgactcgtcatagcaatagcccgtatgt

SEQ ID NO: 367341 - DNA, 30 bp, Artificial Sequence
  Synthetic oligonucleotide
ttccgctaggataggaagggggttgtatgt

SEQ ID NO: 367342 - DNA, 30 bp, Artificial Sequence
  Synthetic oligonucleotide
attggctcgcggtgaccccagtaattatgt

SEQ ID NO: 367343 - DNA, 30 bp, Artificial Sequence
  Synthetic oligonucleotide
cccttgtgctaaagatctgatctattatgt

SEQ ID NO: 367344 - DNA, 30 bp, Artificial Sequence
  Synthetic oligonucleotide
cccccaactatcctggaatgtgacttatgt

SEQ ID NO: 367345 - DNA, 30 bp, Artificial Sequence
  Synthetic oligonucleotide
aactcagcgtacaaaacctgtgtcttatgt

SEQ ID NO: 367346 - DNA, 30 bp, Artificial Sequence
  Synthetic oligonucleotide
ggacctaaacgtaaccacagtcagttatgt

SEQ ID NO: 367347 - DNA, 30 bp, Artificial Sequence
  Synthetic oligonucleotide
gaacggagggtagaggcggggttgttatgt

SEQ ID NO: 367348 - DNA, 30 bp, Artificial Sequence
  Synthetic oligonucleotide
accgcatccctacatgtagtgaatttatgt

SEQ ID NO: 367349 - DNA, 30 bp, Artificial Sequence
  Synthetic oligonucleotide
aatacagggcttacagattagggtttatgt

SEQ ID NO: 367350 - DNA, 30 bp, Artificial Sequence
  Synthetic oligonucleotide
atatgtgagcaaagctgtgcagtaaactgt

SEQ ID NO: 367351 - DNA, 30 bp, Artificial Sequence
  Synthetic oligonucleotide
tactaagagggactatgtaccgacaactgt

SEQ ID NO: 367352 - DNA, 30 bp, Artificial Sequence
  Synthetic oligonucleotide
ccctcttatgtgcgccacgtaacacactgt

SEQ ID NO: 367353 - DNA, 30 bp, Artificial Sequence
  Synthetic oligonucleotide
agttacgtataatactgtttgggacactgt

SEQ ID NO: 367354 - DNA, 30 bp, Artificial Sequence
  Synthetic oligonucleotide
actggtcgtagcgaagccacgtgacactgt

SEQ ID NO: 367355 - DNA, 30 bp, Artificial Sequence
  Synthetic oligonucleotide
tcatagtaaccatgcaattcagaccactgt

SEQ ID NO: 367356 - DNA, 30 bp, Artificial Sequence
  Synthetic oligonucleotide
tattttaaccgcgttgtcgatatagactgt

SEQ ID NO: 367357 - DNA, 30 bp, Artificial Sequence
  Synthetic oligonucleotide
ggcttcttaataccaatttcacgcgactgt

SEQ ID NO: 367358 - DNA, 30 bp, Artificial Sequence
  Synthetic oligonucleotide
attgctaaacataaacgcagacgcgactgt

SEQ ID NO: 367359 - DNA, 30 bp, Artificial Sequence
  Synthetic oligonucleotide
ctcacgccggggcccacccctggtgactgt

SEQ ID NO: 367360 - DNA, 30 bp, Artificial Sequence
  Synthetic oligonucleotide
ggatctctgcgattctaaaagaagtactgt

SEQ ID NO: 367361 - DNA, 30 bp, Artificial Sequence
  Synthetic oligonucleotide
gacatgtttcccgcgggggaggaaacctgt

SEQ ID NO: 367362 - DNA, 30 bp, Artificial Sequence
  Synthetic oligonucleotide
cccgacgtctccccgtgcatagcaacctgt

SEQ ID NO: 367363 - DNA, 30 bp, Artificial Sequence
  Synthetic oligonucleotide
tcctaaattagaagacgcgaggccacctgt

SEQ ID NO: 367364 - DNA, 30 bp, Artificial Sequence
  Synthetic oligonucleotide
actaacgatgaaggggagtccgtcacctgt

SEQ ID NO: 367365 - DNA, 30 bp, Artificial Sequence
  Synthetic oligonucleotide
gagtgtcatcctaccctccatctgacctgt

SEQ ID NO: 367366 - DNA, 30 bp, Artificial Sequence
  Synthetic oligonucleotide
aagagtaaaatgaaacaatgggtgacctgt

SEQ ID NO: 367367 - DNA, 30 bp, Artificial Sequence
  Synthetic oligonucleotide
agatggagttgaagattgcgcacgccctgt

SEQ ID NO: 367368 - DNA, 30 bp, Artificial Sequence
  Synthetic oligonucleotide
actccgtttggcgtccttgagtcgccctgt

SEQ ID NO: 367369 - DNA, 30 bp, Artificial Sequence
  Synthetic oligonucleotide
taccaccacaggcatgagtcaatgccctgt

SEQ ID NO: 367370 - DNA, 30 bp, Artificial Sequence
  Synthetic oligonucleotide
aagattgcatgtctgatgacccttccctgt

SEQ ID NO: 367371 - DNA, 30 bp, Artificial Sequence
  Synthetic oligonucleotide
gttgtctgtacgaccaaaagtcaggcctgt

SEQ ID NO: 367372 - DNA, 30 bp, Artificial Sequence
  Synthetic oligonucleotide
ggcgcgttccggtagcaaaactgggcctgt

SEQ ID NO: 367373 - DNA, 30 bp, Artificial Sequence
  Synthetic oligonucleotide
cacttactctcgtctgcagcaatggcctgt

SEQ ID NO: 367374 - DNA, 30 bp, Artificial Sequence
  Synthetic oligonucleotide
ttactggaaaagggggcctcctttgcctgt

SEQ ID NO: 367375 - DNA, 30 bp, Artificial Sequence
  Synthetic oligonucleotide
ttgattgcagttccttgcgcataatcctgt

SEQ ID NO: 367376 - DNA, 30 bp, Artificial Sequence
  Synthetic oligonucleotide
cgcataagtcggatggattattgatcctgt

SEQ ID NO: 367377 - DNA, 30 bp, Artificial Sequence
  Synthetic oligonucleotide
gctgtgagtagaaatttgcatatatcctgt

SEQ ID NO: 367378 - DNA, 30 bp, Artificial Sequence
  Synthetic oligonucleotide
ggtggagtatcgttctgccgttagtcctgt

SEQ ID NO: 367379 - DNA, 30 bp, Artificial Sequence
  Synthetic oligonucleotide
atacgttattgttcattacgataaagctgt

SEQ ID NO: 367380 - DNA, 30 bp, Artificial Sequence
  Synthetic oligonucleotide
agttcagttataattatttgtgccagctgt

SEQ ID NO: 367381 - DNA, 30 bp, Artificial Sequence
  Synthetic oligonucleotide
cggagatagctattttcagccggcagctgt

SEQ ID NO: 367382 - DNA, 30 bp, Artificial Sequence
  Synthetic oligonucleotide
gcagtatcagtgtgcggtctagcgagctgt

SEQ ID NO: 367383 - DNA, 30 bp, Artificial Sequence
  Synthetic oligonucleotide
gtaatagacacaggggattgtgatagctgt

SEQ ID NO: 367384 - DNA, 30 bp, Artificial Sequence
  Synthetic oligonucleotide
cagagacagggtctgattggacgtagctgt

SEQ ID NO: 367385 - DNA, 30 bp, Artificial Sequence
  Synthetic oligonucleotide
ttgaggaaagtttcgattcgctaccgctgt

SEQ ID NO: 367386 - DNA, 30 bp, Artificial Sequence
  Synthetic oligonucleotide
tccggcatctgaccggcaaatagccgctgt

SEQ ID NO: 367387 - DNA, 30 bp, Artificial Sequence
  Synthetic oligonucleotide
agttgattacgttcatatgcggtccgctgt

SEQ ID NO: 367388 - DNA, 30 bp, Artificial Sequence
  Synthetic oligonucleotide
agtatgcctggtggtccattcaggcgctgt

SEQ ID NO: 367389 - DNA, 30 bp, Artificial Sequence
  Synthetic oligonucleotide
gttatgcgtgacaagcgtacgcggcgctgt

SEQ ID NO: 367390 - DNA, 30 bp, Artificial Sequence
  Synthetic oligonucleotide
gcgctgaaatctcaacttcgcataggctgt

SEQ ID NO: 367391 - DNA, 30 bp, Artificial Sequence
  Synthetic oligonucleotide
tcagataacgcgataggatatcatggctgt

SEQ ID NO: 367392 - DNA, 30 bp, Artificial Sequence
  Synthetic oligonucleotide
ctgtcagaggagatggctccgtatggctgt

SEQ ID NO: 367393 - DNA, 30 bp, Artificial Sequence
  Synthetic oligonucleotide
ggagtgcagtaatgtgtgatcagatgctgt

SEQ ID NO: 367394 - DNA, 30 bp, Artificial Sequence
  Synthetic oligonucleotide
tggagccaaccaggtagtatattatgctgt

SEQ ID NO: 367395 - DNA, 30 bp, Artificial Sequence
  Synthetic oligonucleotide
agccatgcaggcgtacacggctactgctgt

SEQ ID NO: 367396 - DNA, 30 bp, Artificial Sequence
  Synthetic oligonucleotide
ttcgaataaggcaacagttaccgctgctgt

SEQ ID NO: 367397 - DNA, 30 bp, Artificial Sequence
  Synthetic oligonucleotide
cacttatttacctaggctcatcattgctgt

SEQ ID NO: 367398 - DNA, 30 bp, Artificial Sequence
  Synthetic oligonucleotide
cagttttatcgagatcagatttcgatctgt

SEQ ID NO: 367399 - DNA, 30 bp, Artificial Sequence
  Synthetic oligonucleotide
gggccatttccacctcggagtcggatctgt

SEQ ID NO: 367400 - DNA, 30 bp, Artificial Sequence
  Synthetic oligonucleotide
ttcagcaagaccgcaagtgacgttatctgt

SEQ ID NO: 367401 - DNA, 30 bp, Artificial Sequence
  Synthetic oligonucleotide
cgcttcttcaaatatgttttcggcctctgt

SEQ ID NO: 367402 - DNA, 30 bp, Artificial Sequence
  Synthetic oligonucleotide
agaacctacccacatgtctctgtgctctgt

SEQ ID NO: 367403 - DNA, 30 bp, Artificial Sequence
  Synthetic oligonucleotide
ctaacttcatggctaacataacgtctctgt

SEQ ID NO: 367404 - DNA, 30 bp, Artificial Sequence
  Synthetic oligonucleotide
cagtagaatcaacagagtgcacgtctctgt

SEQ ID NO: 367405 - DNA, 30 bp, Artificial Sequence
  Synthetic oligonucleotide
gaacatactggattggagatcctcgtctgt

SEQ ID NO: 367406 - DNA, 30 bp, Artificial Sequence
  Synthetic oligonucleotide
atcatcgacagtgtgatctccagggtctgt

SEQ ID NO: 367407 - DNA, 30 bp, Artificial Sequence
  Synthetic oligonucleotide
caatatccaaggtgtcttagctaattctgt

SEQ ID NO: 367408 - DNA, 30 bp, Artificial Sequence
  Synthetic oligonucleotide
gatcgcttattttagggggcttgcttctgt

SEQ ID NO: 367409 - DNA, 30 bp, Artificial Sequence
  Synthetic oligonucleotide
tgccagcatgccagtacgaatatcttctgt

SEQ ID NO: 367410 - DNA, 30 bp, Artificial Sequence
  Synthetic oligonucleotide
ttccgattgccatgaactgtcttcttctgt

SEQ ID NO: 367411 - DNA, 30 bp, Artificial Sequence
  Synthetic oligonucleotide
agctgcagagcttatctcaaaaagttctgt

SEQ ID NO: 367412 - DNA, 30 bp, Artificial Sequence
  Synthetic oligonucleotide
gtatctgtgaggataggccgtatgttctgt

SEQ ID NO: 367413 - DNA, 30 bp, Artificial Sequence
  Synthetic oligonucleotide
aagattcccaggggcatagtccctttctgt

SEQ ID NO: 367414 - DNA, 30 bp, Artificial Sequence
  Synthetic oligonucleotide
ctctgatctggatgaatccttcgtttctgt

SEQ ID NO: 367415 - DNA, 30 bp, Artificial Sequence
  Synthetic oligonucleotide
gaaacatctccccggcctacgtaaaagtgt

SEQ ID NO: 367416 - DNA, 30 bp, Artificial Sequence
  Synthetic oligonucleotide
tagataccgcctcctcagcgaagaaagtgt

SEQ ID NO: 367417 - DNA, 30 bp, Artificial Sequence
  Synthetic oligonucleotide
gttaaagggagcgtaacattttacaagtgt

SEQ ID NO: 367418 - DNA, 30 bp, Artificial Sequence
  Synthetic oligonucleotide
cttctgcattgcactggtcggcccaagtgt

SEQ ID NO: 367419 - DNA, 30 bp, Artificial Sequence
  Synthetic oligonucleotide
ttcgatcttgagtagacacttcataagtgt

SEQ ID NO: 367420 - DNA, 30 bp, Artificial Sequence
  Synthetic oligonucleotide
gcgataaccgccgcaagtcagcctaagtgt

SEQ ID NO: 367421 - DNA, 30 bp, Artificial Sequence
  Synthetic oligonucleotide
aacccgggaatgttcacggaatctaagtgt

SEQ ID NO: 367422 - DNA, 30 bp, Artificial Sequence
  Synthetic oligonucleotide
tagaagcactgtacgctcgtgagacagtgt

SEQ ID NO: 367423 - DNA, 30 bp, Artificial Sequence
  Synthetic oligonucleotide
acttatcgtatcttgtctaccggacagtgt

SEQ ID NO: 367424 - DNA, 30 bp, Artificial Sequence
  Synthetic oligonucleotide
gatagcaggacgcactgacttgtccagtgt

SEQ ID NO: 367425 - DNA, 30 bp, Artificial Sequence
  Synthetic oligonucleotide
gagtaacctgcgctacagatattccagtgt

SEQ ID NO: 367426 - DNA, 30 bp, Artificial Sequence
  Synthetic oligonucleotide
aaagtatcaagcgtaagacaatggcagtgt

SEQ ID NO: 367427 - DNA, 30 bp, Artificial Sequence
  Synthetic oligonucleotide
gtaatacagatggagctgtatcatcagtgt

SEQ ID NO: 367428 - DNA, 30 bp, Artificial Sequence
  Synthetic oligonucleotide
ttgcaacaatgactcgtattcagtcagtgt

SEQ ID NO: 367429 - DNA, 30 bp, Artificial Sequence
  Synthetic oligonucleotide
acaatttcctgcacgtataggtgtcagtgt

SEQ ID NO: 367430 - DNA, 30 bp, Artificial Sequence
  Synthetic oligonucleotide
aataatgcccccattggacgtatagagtgt

SEQ ID NO: 367431 - DNA, 30 bp, Artificial Sequence
  Synthetic oligonucleotide
tagaccgccggagtctgacctgtagagtgt

SEQ ID NO: 367432 - DNA, 30 bp, Artificial Sequence
  Synthetic oligonucleotide
ttctaggactgagacggcttagaatagtgt

SEQ ID NO: 367433 - DNA, 30 bp, Artificial Sequence
  Synthetic oligonucleotide
caacggttcattcgtttggatgaatagtgt

SEQ ID NO: 367434 - DNA, 30 bp, Artificial Sequence
  Synthetic oligonucleotide
gcatattcctcgacaagcctcagatagtgt

SEQ ID NO: 367435 - DNA, 30 bp, Artificial Sequence
  Synthetic oligonucleotide
gttcagacgaatggtgccgaactatagtgt

SEQ ID NO: 367436 - DNA, 31 bp, Artificial Sequence
  Synthetic oligonucleotide
agttcgagaaaggaccgatttggcgtagtgt

SEQ ID NO: 367437 - DNA, 30 bp, Artificial Sequence
  Synthetic oligonucleotide
tgttagcccaggagcagtcgtaattagtgt

SEQ ID NO: 367438 - DNA, 30 bp, Artificial Sequence
  Synthetic oligonucleotide
caaagactgccattctccgtgtattagtgt

SEQ ID NO: 367439 - DNA, 30 bp, Artificial Sequence
  Synthetic oligonucleotide
gagggccatatacgcgcatattcttagtgt

SEQ ID NO: 367440 - DNA, 30 bp, Artificial Sequence
  Synthetic oligonucleotide
actgtgtttgcctcccaatcactttagtgt

SEQ ID NO: 367441 - DNA, 30 bp, Artificial Sequence
  Synthetic oligonucleotide
actcccagaactagtacgatagtcacgtgt

SEQ ID NO: 367442 - DNA, 30 bp, Artificial Sequence
  Synthetic oligonucleotide
ttcaaaaggacccgggaccgatttacgtgt

SEQ ID NO: 367443 - DNA, 30 bp, Artificial Sequence
  Synthetic oligonucleotide
aatcttaagtgatcctggctcccaccgtgt

SEQ ID NO: 367444 - DNA, 30 bp, Artificial Sequence
  Synthetic oligonucleotide
ttaggtagcgcaagggggtggcacccgtgt

SEQ ID NO: 367445 - DNA, 30 bp, Artificial Sequence
  Synthetic oligonucleotide
tagcttcaacaattagacgtcatcccgtgt

SEQ ID NO: 367446 - DNA, 30 bp, Artificial Sequence
  Synthetic oligonucleotide
gagaccccgtcggacccacgggtcccgtgt

SEQ ID NO: 367447 - DNA, 30 bp, Artificial Sequence
  Synthetic oligonucleotide
ttataggggaccacaaggagtgagccgtgt

SEQ ID NO: 367448 - DNA, 30 bp, Artificial Sequence
  Synthetic oligonucleotide
aagtgcccgtgtaaggcgcgcgatccgtgt

SEQ ID NO: 367449 - DNA, 30 bp, Artificial Sequence
  Synthetic oligonucleotide
acctataattcgccgatcccacacgcgtgt

SEQ ID NO: 367450 - DNA, 30 bp, Artificial Sequence
  Synthetic oligonucleotide
cgtccgacagttatttataactgcgcgtgt

SEQ ID NO: 367451 - DNA, 30 bp, Artificial Sequence
  Synthetic oligonucleotide
tctatccgcgaccggacgacgcaggcgtgt

SEQ ID NO: 367452 - DNA, 30 bp, Artificial Sequence
  Synthetic oligonucleotide
tttgtatctagaaatcattgtgtggcgtgt

SEQ ID NO: 367453 - DNA, 30 bp, Artificial Sequence
  Synthetic oligonucleotide
gtgtgaagctgatccacgacagaatcgtgt

SEQ ID NO: 367454 - DNA, 30 bp, Artificial Sequence
  Synthetic oligonucleotide
aacagcggcggttcaaggacgctatcgtgt

SEQ ID NO: 367455 - DNA, 30 bp, Artificial Sequence
  Synthetic oligonucleotide
tattatgccatattctctcgtaactcgtgt

SEQ ID NO: 367456 - DNA, 30 bp, Artificial Sequence
  Synthetic oligonucleotide
agcagcacgttgccctatcaaacctcgtgt

SEQ ID NO: 367457 - DNA, 30 bp, Artificial Sequence
  Synthetic oligonucleotide
ttcgcggtgcgagattaaactctctcgtgt

SEQ ID NO: 367458 - DNA, 30 bp, Artificial Sequence
  Synthetic oligonucleotide
tatccggcaccgtactaggctcagtcgtgt

SEQ ID NO: 367459 - DNA, 30 bp, Artificial Sequence
  Synthetic oligonucleotide
gcgttgaatgtcacgcgtaagaattcgtgt

SEQ ID NO: 367460 - DNA, 30 bp, Artificial Sequence
  Synthetic oligonucleotide
attcggcgcgaactaccaaaatcttcgtgt

SEQ ID NO: 367461 - DNA, 30 bp, Artificial Sequence
  Synthetic oligonucleotide
gctgtctgtgagggcccgccatcttcgtgt

SEQ ID NO: 367462 - DNA, 30 bp, Artificial Sequence
  Synthetic oligonucleotide
taggacctctcgcgttattagtgaaggtgt

SEQ ID NO: 367463 - DNA, 30 bp, Artificial Sequence
  Synthetic oligonucleotide
gattgtctgtaacgtaaatgacccaggtgt

SEQ ID NO: 367464 - DNA, 30 bp, Artificial Sequence
  Synthetic oligonucleotide
gaccggtcaacagcaaccagctagaggtgt

SEQ ID NO: 367465 - DNA, 30 bp, Artificial Sequence
  Synthetic oligonucleotide
gacccgcacaaagatgatattccgaggtgt

SEQ ID NO: 367466 - DNA, 30 bp, Artificial Sequence
  Synthetic oligonucleotide
taattggccgcaaagctcatagcgaggtgt

SEQ ID NO: 367467 - DNA, 30 bp, Artificial Sequence
  Synthetic oligonucleotide
ggcaggtatgacattcgcgcgaataggtgt

SEQ ID NO: 367468 - DNA, 30 bp, Artificial Sequence
  Synthetic oligonucleotide
tacaagactctcgccaccctttataggtgt

SEQ ID NO: 367469 - DNA, 30 bp, Artificial Sequence
  Synthetic oligonucleotide
gcctcctgagggttctaggatcaccggtgt

SEQ ID NO: 367470 - DNA, 30 bp, Artificial Sequence
  Synthetic oligonucleotide
taggtgtttcggcgctgaccaggccggtgt

SEQ ID NO: 367471 - DNA, 30 bp, Artificial Sequence
  Synthetic oligonucleotide
ctatgtatcttgatcggagttggccggtgt

SEQ ID NO: 367472 - DNA, 30 bp, Artificial Sequence
  Synthetic oligonucleotide
gtctctgtaaagcccaacaacctccggtgt

SEQ ID NO: 367473 - DNA, 30 bp, Artificial Sequence
  Synthetic oligonucleotide
gacgcgcctctgcagaccactgatcggtgt

SEQ ID NO: 367474 - DNA, 30 bp, Artificial Sequence
  Synthetic oligonucleotide
agtagtgttaatagagagtagggtcggtgt

SEQ ID NO: 367475 - DNA, 30 bp, Artificial Sequence
  Synthetic oligonucleotide
agcatagtgttccttctgacttccgggtgt

SEQ ID NO: 367476 - DNA, 30 bp, Artificial Sequence
  Synthetic oligonucleotide
gcgaaagcgcccatctaatgttgcgggtgt

SEQ ID NO: 367477 - DNA, 30 bp, Artificial Sequence
  Synthetic oligonucleotide
gtatctttccagggaaattagatcgggtgt

SEQ ID NO: 367478 - DNA, 30 bp, Artificial Sequence
  Synthetic oligonucleotide
tacggttcaggcatctatgtgccggggtgt

SEQ ID NO: 367479 - DNA, 30 bp, Artificial Sequence
  Synthetic oligonucleotide
gtcaggtaactagttgtccaagctgggtgt

SEQ ID NO: 367480 - DNA, 30 bp, Artificial Sequence
  Synthetic oligonucleotide
ttaccagttgtacatgtgaatgctgggtgt

SEQ ID NO: 367481 - DNA, 30 bp, Artificial Sequence
  Synthetic oligonucleotide
atgtgccctcggagcgaagagcgtgggtgt

SEQ ID NO: 367482 - DNA, 30 bp, Artificial Sequence
  Synthetic oligonucleotide
acattttcgcacggtatatatttctggtgt

SEQ ID NO: 367483 - DNA, 30 bp, Artificial Sequence
  Synthetic oligonucleotide
ccaagagaatatgttttagcgtagtggtgt

SEQ ID NO: 367484 - DNA, 30 bp, Artificial Sequence
  Synthetic oligonucleotide
ctattggtcaaagtacataggaggtggtgt

SEQ ID NO: 367485 - DNA, 30 bp, Artificial Sequence
  Synthetic oligonucleotide
aaagtgctaggcgtttgggagtcttggtgt

SEQ ID NO: 367486 - DNA, 30 bp, Artificial Sequence
  Synthetic oligonucleotide
ggaacggtctttccttgaacaggttggtgt

SEQ ID NO: 367487 - DNA, 30 bp, Artificial Sequence
  Synthetic oligonucleotide
gcccgagtcatatttcctgtggtttggtgt

SEQ ID NO: 367488 - DNA, 30 bp, Artificial Sequence
  Synthetic oligonucleotide
gaactggcatgctcactgtcaataatgtgt

SEQ ID NO: 367489 - DNA, 30 bp, Artificial Sequence
  Synthetic oligonucleotide
tgattataccagtgatggtaatcgatgtgt

SEQ ID NO: 367490 - DNA, 30 bp, Artificial Sequence
  Synthetic oligonucleotide
ccggccccgggcttgtcctcatcgatgtgt

SEQ ID NO: 367491 - DNA, 30 bp, Artificial Sequence
  Synthetic oligonucleotide
ttgggcgagcacaaaatattctgactgtgt

SEQ ID NO: 367492 - DNA, 29 bp, Artificial Sequence
  Synthetic oligonucleotide
ccggctgtccttagaggagcgtcctgtgt

SEQ ID NO: 367493 - DNA, 30 bp, Artificial Sequence
  Synthetic oligonucleotide
atatctccggagcaccgcgagcgtctgtgt

SEQ ID NO: 367494 - DNA, 30 bp, Artificial Sequence
  Synthetic oligonucleotide
aacgaaacgccacttagtctttcagtgtgt

SEQ ID NO: 367495 - DNA, 30 bp, Artificial Sequence
  Synthetic oligonucleotide
tggcactgcaatacctttcgcagagtgtgt

SEQ ID NO: 367496 - DNA, 30 bp, Artificial Sequence
  Synthetic oligonucleotide
ggtcaactgctcgttcgttcaaccgtgtgt

SEQ ID NO: 367497 - DNA, 30 bp, Artificial Sequence
  Synthetic oligonucleotide
gcattgactatgtgaccggcgtaattgtgt

SEQ ID NO: 367498 - DNA, 30 bp, Artificial Sequence
  Synthetic oligonucleotide
attcagaagaggggggccatcatattgtgt

SEQ ID NO: 367499 - DNA, 30 bp, Artificial Sequence
  Synthetic oligonucleotide
ttcgcgataacaattgcaatccacttgtgt

SEQ ID NO: 367500 - DNA, 30 bp, Artificial Sequence
  Synthetic oligonucleotide
gggattaagtagtaagagtcagtcttgtgt

SEQ ID NO: 367501 - DNA, 30 bp, Artificial Sequence
  Synthetic oligonucleotide
gtataacatctgttcagtatctagttgtgt

SEQ ID NO: 367502 - DNA, 30 bp, Artificial Sequence
  Synthetic oligonucleotide
caaatctatgtatagcggatcacgttgtgt

SEQ ID NO: 367503 - DNA, 30 bp, Artificial Sequence
  Synthetic oligonucleotide
ctagccaaggaagatttgtcctggttgtgt

SEQ ID NO: 367504 - DNA, 30 bp, Artificial Sequence
  Synthetic oligonucleotide
gtgaaagcgcgaggcaccttcaaaaattgt

SEQ ID NO: 367505 - DNA, 30 bp, Artificial Sequence
  Synthetic oligonucleotide
ctgatgtcaacctacagatgtagaaattgt

SEQ ID NO: 367506 - DNA, 30 bp, Artificial Sequence
  Synthetic oligonucleotide
aacgtgtttaatccgtcgtattgaaattgt

SEQ ID NO: 367507 - DNA, 30 bp, Artificial Sequence
  Synthetic oligonucleotide
gttataacactatacctcaaactaaattgt

SEQ ID NO: 367508 - DNA, 30 bp, Artificial Sequence
  Synthetic oligonucleotide
gtagtgagtacggagagaagactaaattgt

SEQ ID NO: 367509 - DNA, 30 bp, Artificial Sequence
  Synthetic oligonucleotide
ttgttcaacacctccatgaaactcaattgt

SEQ ID NO: 367510 - DNA, 30 bp, Artificial Sequence
  Synthetic oligonucleotide
agcaccacatgcttcatgtaaaagaattgt

SEQ ID NO: 367511 - DNA, 30 bp, Artificial Sequence
  Synthetic oligonucleotide
aattgactagctgagcgatagacgaattgt

SEQ ID NO: 367512 - DNA, 30 bp, Artificial Sequence
  Synthetic oligonucleotide
atcggcttatagccataactattgaattgt

SEQ ID NO: 367513 - DNA, 30 bp, Artificial Sequence
  Synthetic oligonucleotide
gagcagtttcttgactgcgacttgaattgt

SEQ ID NO: 367514 - DNA, 30 bp, Artificial Sequence
  Synthetic oligonucleotide
ccgtacatcctcacggggatcgttaattgt

SEQ ID NO: 367515 - DNA, 30 bp, Artificial Sequence
  Synthetic oligonucleotide
gccgatttaaagaccgctaggggacattgt

SEQ ID NO: 367516 - DNA, 30 bp, Artificial Sequence
  Synthetic oligonucleotide
aactcagtcaagggattttcagcgcattgt

SEQ ID NO: 367517 - DNA, 30 bp, Artificial Sequence
  Synthetic oligonucleotide
tgctagaataagttacatacttctcattgt

SEQ ID NO: 367518 - DNA, 30 bp, Artificial Sequence
  Synthetic oligonucleotide
caccaattacattcagtaactagtcattgt

SEQ ID NO: 367519 - DNA, 30 bp, Artificial Sequence
  Synthetic oligonucleotide
gtccagcgaacgtcgctcggggttcattgt

SEQ ID NO: 367520 - DNA, 30 bp, Artificial Sequence
  Synthetic oligonucleotide
ggggtcctttgtaacaccaagctagattgt

SEQ ID NO: 367521 - DNA, 30 bp, Artificial Sequence
  Synthetic oligonucleotide
aagcctcctaccgcgacaccatacgattgt

SEQ ID NO: 367522 - DNA, 30 bp, Artificial Sequence
  Synthetic oligonucleotide
cccaattaacttcaacatttatacgattgt

SEQ ID NO: 367523 - DNA, 30 bp, Artificial Sequence
  Synthetic oligonucleotide
tattgtctggcgaatgagcatctcgattgt

SEQ ID NO: 367524 - DNA, 30 bp, Artificial Sequence
  Synthetic oligonucleotide
aaaggagtgggacactgtggggaggattgt

SEQ ID NO: 367525 - DNA, 30 bp, Artificial Sequence
  Synthetic oligonucleotide
tctgggtgggccgaaaaggtaaatgattgt

SEQ ID NO: 367526 - DNA, 30 bp, Artificial Sequence
  Synthetic oligonucleotide
cgcgagtaaacaggcttcaactctgattgt

SEQ ID NO: 367527 - DNA, 30 bp, Artificial Sequence
  Synthetic oligonucleotide
gcaaccattcagcgggttcaacaatattgt

SEQ ID NO: 367528 - DNA, 30 bp, Artificial Sequence
  Synthetic oligonucleotide
tgattaggaagtggtaacaaacactattgt

SEQ ID NO: 367529 - DNA, 30 bp, Artificial Sequence
  Synthetic oligonucleotide
atgatactaagctttttaccaagctattgt

SEQ ID NO: 367530 - DNA, 30 bp, Artificial Sequence
  Synthetic oligonucleotide
ctggtacgcccccggttcgatcgctattgt

SEQ ID NO: 367531 - DNA, 30 bp, Artificial Sequence
  Synthetic oligonucleotide
gtggatttgttcattgggcactgctattgt

SEQ ID NO: 367532 - DNA, 30 bp, Artificial Sequence
  Synthetic oligonucleotide
gtacaactgccttaacaaggctgctattgt

SEQ ID NO: 367533 - DNA, 30 bp, Artificial Sequence
  Synthetic oligonucleotide
tacatggggaccgtaggccctttctattgt

SEQ ID NO: 367534 - DNA, 30 bp, Artificial Sequence
  Synthetic oligonucleotide
ttgaaagaacctgcagaagactagtattgt

SEQ ID NO: 367535 - DNA, 30 bp, Artificial Sequence
  Synthetic oligonucleotide
cacgattaatattcccgtaatcgttattgt

SEQ ID NO: 367536 - DNA, 30 bp, Artificial Sequence
  Synthetic oligonucleotide
acaggggcagcagccaatgttgacacttgt

SEQ ID NO: 367537 - DNA, 30 bp, Artificial Sequence
  Synthetic oligonucleotide
agtcagtggaaaataggctcactgacttgt

SEQ ID NO: 367538 - DNA, 30 bp, Artificial Sequence
  Synthetic oligonucleotide
aattgagtcggtctcgtgaggattacttgt

SEQ ID NO: 367539 - DNA, 30 bp, Artificial Sequence
  Synthetic oligonucleotide
cgatgtaccatcggctccagttgaccttgt

SEQ ID NO: 367540 - DNA, 30 bp, Artificial Sequence
  Synthetic oligonucleotide
ttagcgagcttatttaacagttacccttgt

SEQ ID NO: 367541 - DNA, 30 bp, Artificial Sequence
  Synthetic oligonucleotide
gcattaaaagaatagtgaccgaagccttgt

SEQ ID NO: 367542 - DNA, 30 bp, Artificial Sequence
  Synthetic oligonucleotide
ttaagtaaattctctgtagtgaatccttgt

SEQ ID NO: 367543 - DNA, 30 bp, Artificial Sequence
  Synthetic oligonucleotide
gaacactctaatcaactatctggtccttgt

SEQ ID NO: 367544 - DNA, 30 bp, Artificial Sequence
  Synthetic oligonucleotide
ccggaattaggtattccgttagcagcttgt

SEQ ID NO: 367545 - DNA, 30 bp, Artificial Sequence
  Synthetic oligonucleotide
caaccatctgttattgctctccgagcttgt

SEQ ID NO: 367546 - DNA, 30 bp, Artificial Sequence
  Synthetic oligonucleotide
tcttgcgcctcggcaaggagactagcttgt

SEQ ID NO: 367547 - DNA, 30 bp, Artificial Sequence
  Synthetic oligonucleotide
atgactcgagcaactcgaaacttcgcttgt

SEQ ID NO: 367548 - DNA, 30 bp, Artificial Sequence
  Synthetic oligonucleotide
ggagtccgttcgccaatcactggtgcttgt

SEQ ID NO: 367549 - DNA, 30 bp, Artificial Sequence
  Synthetic oligonucleotide
aggattcgcgatccatcgtcaattgcttgt

SEQ ID NO: 367550 - DNA, 30 bp, Artificial Sequence
  Synthetic oligonucleotide
tctgctgcgtgctttacaaggagatcttgt

SEQ ID NO: 367551 - DNA, 30 bp, Artificial Sequence
  Synthetic oligonucleotide
tccattttgccaatgaattagggatcttgt

SEQ ID NO: 367552 - DNA, 30 bp, Artificial Sequence
  Synthetic oligonucleotide
acgccgacaacttaattgatctactcttgt

SEQ ID NO: 367553 - DNA, 30 bp, Artificial Sequence
  Synthetic oligonucleotide
agggcagcatgtacgaaatgttagtcttgt

SEQ ID NO: 367554 - DNA, 30 bp, Artificial Sequence
  Synthetic oligonucleotide
gatctggtggagcgggcctattgttcttgt

SEQ ID NO: 367555 - DNA, 30 bp, Artificial Sequence
  Synthetic oligonucleotide
gtttaactcgtgctgtgcttccgaagttgt

SEQ ID NO: 367556 - DNA, 30 bp, Artificial Sequence
  Synthetic oligonucleotide
acatgaatactagatcaaaggcacagttgt

SEQ ID NO: 367557 - DNA, 30 bp, Artificial Sequence
  Synthetic oligonucleotide
ctcagtgccaaagcagggcatggcagttgt

SEQ ID NO: 367558 - DNA, 30 bp, Artificial Sequence
  Synthetic oligonucleotide
atgcgacacctatgaccacgtacgagttgt

SEQ ID NO: 367559 - DNA, 30 bp, Artificial Sequence
  Synthetic oligonucleotide
ggattattgggacacagaaggcggagttgt

SEQ ID NO: 367560 - DNA, 30 bp, Artificial Sequence
  Synthetic oligonucleotide
tagcacttttaggtccgattcagtagttgt

SEQ ID NO: 367561 - DNA, 30 bp, Artificial Sequence
  Synthetic oligonucleotide
gcgcgtcttatctctcttgacggtagttgt

SEQ ID NO: 367562 - DNA, 30 bp, Artificial Sequence
  Synthetic oligonucleotide
actgcattatggacggaacccagacgttgt

SEQ ID NO: 367563 - DNA, 30 bp, Artificial Sequence
  Synthetic oligonucleotide
cctatatcctcctacgggtggagacgttgt

SEQ ID NO: 367564 - DNA, 30 bp, Artificial Sequence
  Synthetic oligonucleotide
tgagtacaactcagccgccgagcccgttgt

SEQ ID NO: 367565 - DNA, 30 bp, Artificial Sequence
  Synthetic oligonucleotide
ctctattcacaggccaagggccgccgttgt

SEQ ID NO: 367566 - DNA, 30 bp, Artificial Sequence
  Synthetic oligonucleotide
actgttaggctctttgtaacatgccgttgt

SEQ ID NO: 367567 - DNA, 30 bp, Artificial Sequence
  Synthetic oligonucleotide
tgcgcgaagggggcagaagtggcgcgttgt

SEQ ID NO: 367568 - DNA, 30 bp, Artificial Sequence
  Synthetic oligonucleotide
actcttctactattctgaggaaatcgttgt

SEQ ID NO: 367569 - DNA, 30 bp, Artificial Sequence
  Synthetic oligonucleotide
ctcattcccaaagtgtaaagggaaggttgt

SEQ ID NO: 367570 - DNA, 30 bp, Artificial Sequence
  Synthetic oligonucleotide
atgtcaaaaaataagttgcatgcaggttgt

SEQ ID NO: 367571 - DNA, 30 bp, Artificial Sequence
  Synthetic oligonucleotide
ttctcacagctctacggccagataggttgt

SEQ ID NO: 367572 - DNA, 30 bp, Artificial Sequence
  Synthetic oligonucleotide
ctgtggctagacgttctgtataacggttgt

SEQ ID NO: 367573 - DNA, 30 bp, Artificial Sequence
  Synthetic oligonucleotide
aaattgagtgttgtgaaggactacggttgt

SEQ ID NO: 367574 - DNA, 30 bp, Artificial Sequence
  Synthetic oligonucleotide
acgctccggagcccggtcataacgggttgt

SEQ ID NO: 367575 - DNA, 30 bp, Artificial Sequence
  Synthetic oligonucleotide
gtgtagttagaggcgcgttcgtgtggttgt

SEQ ID NO: 367576 - DNA, 30 bp, Artificial Sequence
  Synthetic oligonucleotide
ccggtaccacctaaaaactgataatgttgt

SEQ ID NO: 367577 - DNA, 30 bp, Artificial Sequence
  Synthetic oligonucleotide
ctcacgccgaacctcgctggagcatgttgt

SEQ ID NO: 367578 - DNA, 30 bp, Artificial Sequence
  Synthetic oligonucleotide
catttgaaaattgttcaatttgcatgttgt

SEQ ID NO: 367579 - DNA, 30 bp, Artificial Sequence
  Synthetic oligonucleotide
aagcttcagcgcctgattccggcctgttgt

SEQ ID NO: 367580 - DNA, 30 bp, Artificial Sequence
  Synthetic oligonucleotide
taaacatcacaaaaatgtggtcagtgttgt

SEQ ID NO: 367581 - DNA, 30 bp, Artificial Sequence
  Synthetic oligonucleotide
gtcgaaattgaaggttacaggagaatttgt

SEQ ID NO: 367582 - DNA, 30 bp, Artificial Sequence
  Synthetic oligonucleotide
tgaccgagacctgatctccgtcgaatttgt

SEQ ID NO: 367583 - DNA, 30 bp, Artificial Sequence
  Synthetic oligonucleotide
tactgagtccactagcacttccccatttgt

SEQ ID NO: 367584 - DNA, 30 bp, Artificial Sequence
  Synthetic oligonucleotide
cttggttgtctgaatgataacttcatttgt

SEQ ID NO: 367585 - DNA, 30 bp, Artificial Sequence
  Synthetic oligonucleotide
cttaccgctgaaggacgagggaagatttgt

SEQ ID NO: 367586 - DNA, 30 bp, Artificial Sequence
  Synthetic oligonucleotide
agactgtaaataagcctacatgcgatttgt

SEQ ID NO: 367587 - DNA, 30 bp, Artificial Sequence
  Synthetic oligonucleotide
tcaaaggggggatcaccaccgcggatttgt

SEQ ID NO: 367588 - DNA, 30 bp, Artificial Sequence
  Synthetic oligonucleotide
gagcatggtgaatcgccgttagggatttgt

SEQ ID NO: 367589 - DNA, 30 bp, Artificial Sequence
  Synthetic oligonucleotide
tgcacttaggctcatgatttatctatttgt

SEQ ID NO: 367590 - DNA, 30 bp, Artificial Sequence
  Synthetic oligonucleotide
gtccggaacaatttcgtacaatttatttgt

SEQ ID NO: 367591 - DNA, 30 bp, Artificial Sequence
  Synthetic oligonucleotide
aaaagaccgcgcgagaaccagtaactttgt

SEQ ID NO: 367592 - DNA, 30 bp, Artificial Sequence
  Synthetic oligonucleotide
ccaggcaggaagtaattagcttgactttgt

SEQ ID NO: 367593 - DNA, 29 bp, Artificial Sequence
  Synthetic oligonucleotide
gccctattccctcgctttctcccctttgt

SEQ ID NO: 367594 - DNA, 30 bp, Artificial Sequence
  Synthetic oligonucleotide
ccttggcaacactcgtaccaatgcctttgt

SEQ ID NO: 367595 - DNA, 30 bp, Artificial Sequence
  Synthetic oligonucleotide
tactagcattacacagtcgggatgctttgt

SEQ ID NO: 367596 - DNA, 30 bp, Artificial Sequence
  Synthetic oligonucleotide
cctgctaacacacttagcaagacagtttgt

SEQ ID NO: 367597 - DNA, 30 bp, Artificial Sequence
  Synthetic oligonucleotide
gttacgctccccgggtcctgcgccgtttgt

SEQ ID NO: 367598 - DNA, 30 bp, Artificial Sequence
  Synthetic oligonucleotide
gggcctgggcctcgggtactaaaggtttgt

SEQ ID NO: 367599 - DNA, 30 bp, Artificial Sequence
  Synthetic oligonucleotide
agatcatatcctttcccttggtatgtttgt

SEQ ID NO: 367600 - DNA, 30 bp, Artificial Sequence
  Synthetic oligonucleotide
cattgccttttagtggaaagcattgtttgt

SEQ ID NO: 367601 - DNA, 30 bp, Artificial Sequence
  Synthetic oligonucleotide
acgaatggttgtggccctcggtaattttgt

SEQ ID NO: 367602 - DNA, 30 bp, Artificial Sequence
  Synthetic oligonucleotide
atcagcccgtcacgttcaaaatacttttgt

SEQ ID NO: 367603 - DNA, 30 bp, Artificial Sequence
  Synthetic oligonucleotide
cacgtagcgatcataaaaactctcttttgt

SEQ ID NO: 367604 - DNA, 30 bp, Artificial Sequence
  Synthetic oligonucleotide
cagaaatagccatgcgtggatgtcttttgt

SEQ ID NO: 367605 - DNA, 30 bp, Artificial Sequence
  Synthetic oligonucleotide
atgctaaggacatcgttatttcagttttgt

SEQ ID NO: 367606 - DNA, 30 bp, Artificial Sequence
  Synthetic oligonucleotide
tccaccggcttaacggtaatctggttttgt

SEQ ID NO: 367607 - DNA, 30 bp, Artificial Sequence
  Synthetic oligonucleotide
ccttggggcgtttacagttcgtggttttgt

SEQ ID NO: 367608 - DNA, 30 bp, Artificial Sequence
  Synthetic oligonucleotide
ccgttcaatgcagtgaccaagactttttgt

SEQ ID NO: 367609 - DNA, 30 bp, Artificial Sequence
  Synthetic oligonucleotide
gttcgttcgcaccacgaatccggtttttgt

SEQ ID NO: 367610 - DNA, 30 bp, Artificial Sequence
  Synthetic oligonucleotide
attggactggggttgtatgaccaaaaaatt

SEQ ID NO: 367611 - DNA, 30 bp, Artificial Sequence
  Synthetic oligonucleotide
aatatagtgcgagacacgggcgaaaaaatt

SEQ ID NO: 367612 - DNA, 30 bp, Artificial Sequence
  Synthetic oligonucleotide
tttgcaatgaatgtgttaggttaaaaaatt

SEQ ID NO: 367613 - DNA, 30 bp, Artificial Sequence
  Synthetic oligonucleotide
attatcttcgcatcggtatccacaaaaatt

SEQ ID NO: 367614 - DNA, 30 bp, Artificial Sequence
  Synthetic oligonucleotide
cggtgtaagaaggtaatcctatcaaaaatt

SEQ ID NO: 367615 - DNA, 30 bp, Artificial Sequence
  Synthetic oligonucleotide
atcactgcacactccaagaccagaaaaatt

SEQ ID NO: 367616 - DNA, 30 bp, Artificial Sequence
  Synthetic oligonucleotide
cgcgaaatacccatctcaacaataaaaatt

SEQ ID NO: 367617 - DNA, 30 bp, Artificial Sequence
  Synthetic oligonucleotide
ttggcaaataccgccaacagtctcaaaatt

SEQ ID NO: 367618 - DNA, 30 bp, Artificial Sequence
  Synthetic oligonucleotide
cagcgcatgagctctactcgtaagaaaatt

SEQ ID NO: 367619 - DNA, 30 bp, Artificial Sequence
  Synthetic oligonucleotide
ttgtcaacaattatttagttttagaaaatt

SEQ ID NO: 367620 - DNA, 30 bp, Artificial Sequence
  Synthetic oligonucleotide
aatcacccagttccgtcatcaacgaaaatt

SEQ ID NO: 367621 - DNA, 30 bp, Artificial Sequence
  Synthetic oligonucleotide
ggcgctcgtcgagacaatcaaatgaaaatt

SEQ ID NO: 367622 - DNA, 30 bp, Artificial Sequence
  Synthetic oligonucleotide
cgaatctaacgacctaccgttagtaaaatt

SEQ ID NO: 367623 - DNA, 30 bp, Artificial Sequence
  Synthetic oligonucleotide
agcaccccgcattgaataggtcttaaaatt

SEQ ID NO: 367624 - DNA, 30 bp, Artificial Sequence
  Synthetic oligonucleotide
tatgggtcgcgctacagccggaaacaaatt

SEQ ID NO: 367625 - DNA, 30 bp, Artificial Sequence
  Synthetic oligonucleotide
gccatttaggcacacgtcgtcgaacaaatt

SEQ ID NO: 367626 - DNA, 30 bp, Artificial Sequence
  Synthetic oligonucleotide
atatagcgtgattatcggtatgtacaaatt

SEQ ID NO: 367627 - DNA, 30 bp, Artificial Sequence
  Synthetic oligonucleotide
gtagcccaatcctgcatctgctagcaaatt

SEQ ID NO: 367628 - DNA, 30 bp, Artificial Sequence
  Synthetic oligonucleotide
gcactgtcggaccagtatataatgcaaatt

SEQ ID NO: 367629 - DNA, 30 bp, Artificial Sequence
  Synthetic oligonucleotide
tcaggaagatggcgttgagcccctcaaatt

SEQ ID NO: 367630 - DNA, 30 bp, Artificial Sequence
  Synthetic oligonucleotide
acaggcaatataatgagaataggtcaaatt

SEQ ID NO: 367631 - DNA, 30 bp, Artificial Sequence
  Synthetic oligonucleotide
aaacttccgtaggagctcgggccagaaatt

SEQ ID NO: 367632 - DNA, 30 bp, Artificial Sequence
  Synthetic oligonucleotide
gtccgggctatctgatcctgcgacgaaatt

SEQ ID NO: 367633 - DNA, 30 bp, Artificial Sequence
  Synthetic oligonucleotide
aattagctacaatgatctaaccccgaaatt

SEQ ID NO: 367634 - DNA, 30 bp, Artificial Sequence
  Synthetic oligonucleotide
ggttcccgaatgatggcatcgtcggaaatt

SEQ ID NO: 367635 - DNA, 30 bp, Artificial Sequence
  Synthetic oligonucleotide
tagttttaactagaccgggggagggaaatt

SEQ ID NO: 367636 - DNA, 30 bp, Artificial Sequence
  Synthetic oligonucleotide
cttggtgagtgtcgatcatcaatggaaatt

SEQ ID NO: 367637 - DNA, 30 bp, Artificial Sequence
  Synthetic oligonucleotide
aacacaataaattgccggtgtccataaatt

SEQ ID NO: 367638 - DNA, 30 bp, Artificial Sequence
  Synthetic oligonucleotide
ttgtcaaggatgcattgttgggtataaatt

SEQ ID NO: 367639 - DNA, 30 bp, Artificial Sequence
  Synthetic oligonucleotide
gtacccgtgacatctaccaagcactaaatt

SEQ ID NO: 367640 - DNA, 30 bp, Artificial Sequence
  Synthetic oligonucleotide
agtagtaatcaggtcattgcgcagtaaatt

SEQ ID NO: 367641 - DNA, 30 bp, Artificial Sequence
  Synthetic oligonucleotide
gtagatgtagataatgttatcacgtaaatt

SEQ ID NO: 367642 - DNA, 30 bp, Artificial Sequence
  Synthetic oligonucleotide
gacaacgttcatgctttactagggtaaatt

SEQ ID NO: 367643 - DNA, 30 bp, Artificial Sequence
  Synthetic oligonucleotide
ccgaagctcgctaaaggattctgttaaatt

SEQ ID NO: 367644 - DNA, 30 bp, Artificial Sequence
  Synthetic oligonucleotide
atgataacgtaggacggctgttgaacaatt

SEQ ID NO: 367645 - DNA, 30 bp, Artificial Sequence
  Synthetic oligonucleotide
ggctttgttccagattctgagaacacaatt

SEQ ID NO: 367646 - DNA, 30 bp, Artificial Sequence
  Synthetic oligonucleotide
cggcgaccgcgctagggctaccacacaatt

SEQ ID NO: 367647 - DNA, 30 bp, Artificial Sequence
  Synthetic oligonucleotide
ctcgttgaaacggaagaacatcgcacaatt

SEQ ID NO: 367648 - DNA, 30 bp, Artificial Sequence
  Synthetic oligonucleotide
gagttaatatccaattactggttcacaatt

SEQ ID NO: 367649 - DNA, 30 bp, Artificial Sequence
  Synthetic oligonucleotide
tacccggaatgagcagcgcccccgacaatt

SEQ ID NO: 367650 - DNA, 30 bp, Artificial Sequence
  Synthetic oligonucleotide
tgccctagaattagatatcaagtaccaatt

SEQ ID NO: 367651 - DNA, 30 bp, Artificial Sequence
  Synthetic oligonucleotide
aaacccaaacatttcgaagccaagccaatt

SEQ ID NO: 367652 - DNA, 30 bp, Artificial Sequence
  Synthetic oligonucleotide
gttaacaggaaactacttgtcctgccaatt

SEQ ID NO: 367653 - DNA, 30 bp, Artificial Sequence
  Synthetic oligonucleotide
cgtcattgtctgaggtggcctactccaatt

SEQ ID NO: 367654 - DNA, 30 bp, Artificial Sequence
  Synthetic oligonucleotide
aggaaccccatgctatcgaccgacgcaatt

SEQ ID NO: 367655 - DNA, 30 bp, Artificial Sequence
  Synthetic oligonucleotide
cttggtgagcctttggtcgtctacgcaatt

SEQ ID NO: 367656 - DNA, 30 bp, Artificial Sequence
  Synthetic oligonucleotide
taacggctgttttacccgtaccgcgcaatt

SEQ ID NO: 367657 - DNA, 30 bp, Artificial Sequence
  Synthetic oligonucleotide
agcgttatacctgtcgcgtattgcgcaatt

SEQ ID NO: 367658 - DNA, 30 bp, Artificial Sequence
  Synthetic oligonucleotide
tgctcatcggattactcctaactcgcaatt

SEQ ID NO: 367659 - DNA, 30 bp, Artificial Sequence
  Synthetic oligonucleotide
cggcaccgattgcatgtctacccggcaatt

SEQ ID NO: 367660 - DNA, 30 bp, Artificial Sequence
  Synthetic oligonucleotide
aacgaagcgagggacaaaggatgggcaatt

SEQ ID NO: 367661 - DNA, 30 bp, Artificial Sequence
  Synthetic oligonucleotide
gcgattccacattcttggatgtgggcaatt

SEQ ID NO: 367662 - DNA, 30 bp, Artificial Sequence
  Synthetic oligonucleotide
gtcgtgcgtccttgttcggtaggtgcaatt

SEQ ID NO: 367663 - DNA, 30 bp, Artificial Sequence
  Synthetic oligonucleotide
ggccccagtattggtcgacgacaatcaatt

SEQ ID NO: 367664 - DNA, 30 bp, Artificial Sequence
  Synthetic oligonucleotide
tacgggaagaagctatattcggaatcaatt

SEQ ID NO: 367665 - DNA, 30 bp, Artificial Sequence
  Synthetic oligonucleotide
agaagatgcatccaaataagaagatcaatt

SEQ ID NO: 367666 - DNA, 30 bp, Artificial Sequence
  Synthetic oligonucleotide
actgcatcagcggaattatgcatatcaatt

SEQ ID NO: 367667 - DNA, 30 bp, Artificial Sequence
  Synthetic oligonucleotide
cagtggttgaatggttcggacaactcaatt

SEQ ID NO: 367668 - DNA, 30 bp, Artificial Sequence
  Synthetic oligonucleotide
actgtgttggagatacttacagattcaatt

SEQ ID NO: 367669 - DNA, 30 bp, Artificial Sequence
  Synthetic oligonucleotide
ctgagactgataagagtggtatgttcaatt

SEQ ID NO: 367670 - DNA, 30 bp, Artificial Sequence
  Synthetic oligonucleotide
gacagctggttcagctcgggtctttcaatt

SEQ ID NO: 367671 - DNA, 30 bp, Artificial Sequence
  Synthetic oligonucleotide
atattgacacgggccaaagcagtaagaatt

SEQ ID NO: 367672 - DNA, 30 bp, Artificial Sequence
  Synthetic oligonucleotide
tagacagctgctgcgctaatggtaagaatt

SEQ ID NO: 367673 - DNA, 30 bp, Artificial Sequence
  Synthetic oligonucleotide
ttgaccagttaagaactgtgcttaagaatt

SEQ ID NO: 367674 - DNA, 30 bp, Artificial Sequence
  Synthetic oligonucleotide
gcagatatttatgagcacagtggcagaatt

SEQ ID NO: 367675 - DNA, 30 bp, Artificial Sequence
  Synthetic oligonucleotide
gtcgaaaagtttttattgttcgggagaatt

SEQ ID NO: 367676 - DNA, 30 bp, Artificial Sequence
  Synthetic oligonucleotide
gtgggattagggttagttgacaatagaatt

SEQ ID NO: 367677 - DNA, 30 bp, Artificial Sequence
  Synthetic oligonucleotide
cgttccgggaaattctagtttttacgaatt

SEQ ID NO: 367678 - DNA, 30 bp, Artificial Sequence
  Synthetic oligonucleotide
cgattgatgttcccctataggggccgaatt

SEQ ID NO: 367679 - DNA, 30 bp, Artificial Sequence
  Synthetic oligonucleotide
cagaagggtttcttggtttcactccgaatt

SEQ ID NO: 367680 - DNA, 30 bp, Artificial Sequence
  Synthetic oligonucleotide
gatgttggcgtaaacttaggtaggcgaatt

SEQ ID NO: 367681 - DNA, 30 bp, Artificial Sequence
  Synthetic oligonucleotide
ctcacaaacgcgcggacaaatgtgcgaatt

SEQ ID NO: 367682 - DNA, 30 bp, Artificial Sequence
  Synthetic oligonucleotide
caggcctaattacgtacccagtgtcgaatt

SEQ ID NO: 367683 - DNA, 30 bp, Artificial Sequence
  Synthetic oligonucleotide
ctttgaggaaatctcaagggtcaaggaatt

SEQ ID NO: 367684 - DNA, 30 bp, Artificial Sequence
  Synthetic oligonucleotide
ttacgcccacatgaatccaacgaaggaatt

SEQ ID NO: 367685 - DNA, 30 bp, Artificial Sequence
  Synthetic oligonucleotide
ggaaattggtgagtctctgtcacaggaatt

SEQ ID NO: 367686 - DNA, 30 bp, Artificial Sequence
  Synthetic oligonucleotide
ccgtcgcaatactgcgataggccaggaatt

SEQ ID NO: 367687 - DNA, 30 bp, Artificial Sequence
  Synthetic oligonucleotide
tttcaagagggtaatgagttcagaggaatt

SEQ ID NO: 367688 - DNA, 30 bp, Artificial Sequence
  Synthetic oligonucleotide
gcgacccagttcatacgagtttgaggaatt

SEQ ID NO: 367689 - DNA, 30 bp, Artificial Sequence
  Synthetic oligonucleotide
tagaccagtcacctgggttcccgcggaatt

SEQ ID NO: 367690 - DNA, 30 bp, Artificial Sequence
  Synthetic oligonucleotide
aaatttacgagcgggtggcgccgcggaatt

SEQ ID NO: 367691 - DNA, 30 bp, Artificial Sequence
  Synthetic oligonucleotide
ttagccagcttattggcaaacatcggaatt

SEQ ID NO: 367692 - DNA, 30 bp, Artificial Sequence
  Synthetic oligonucleotide
ggcttaacttaattcaataacaagggaatt

SEQ ID NO: 367693 - DNA, 30 bp, Artificial Sequence
  Synthetic oligonucleotide
atccgcttggagtcacagtaaagtggaatt

SEQ ID NO: 367694 - DNA, 30 bp, Artificial Sequence
  Synthetic oligonucleotide
atgtaatgaatacacccacctagtggaatt

SEQ ID NO: 367695 - DNA, 30 bp, Artificial Sequence
  Synthetic oligonucleotide
gcaagtctccacgctagtagtggtggaatt

SEQ ID NO: 367696 - DNA, 30 bp, Artificial Sequence
  Synthetic oligonucleotide
taaatgacactgtccatcggtattggaatt

SEQ ID NO: 367697 - DNA, 30 bp, Artificial Sequence
  Synthetic oligonucleotide
tcaaaacaacgtgtaggctaagttggaatt

SEQ ID NO: 367698 - DNA, 30 bp, Artificial Sequence
  Synthetic oligonucleotide
tgatctgatcgtcccgacgacaactgaatt

SEQ ID NO: 367699 - DNA, 30 bp, Artificial Sequence
  Synthetic oligonucleotide
tcggccccagacattcgattcacctgaatt

SEQ ID NO: 367700 - DNA, 30 bp, Artificial Sequence
  Synthetic oligonucleotide
tcgatacagtttcttggggcgatctgaatt

SEQ ID NO: 367701 - DNA, 30 bp, Artificial Sequence
  Synthetic oligonucleotide
tagttcctggtctccaacgtagagtgaatt

SEQ ID NO: 367702 - DNA, 30 bp, Artificial Sequence
  Synthetic oligonucleotide
tcattacattgatggtactagacgtgaatt

SEQ ID NO: 367703 - DNA, 30 bp, Artificial Sequence
  Synthetic oligonucleotide
ataaattctcaataagttcggttgtgaatt

SEQ ID NO: 367704 - DNA, 30 bp, Artificial Sequence
  Synthetic oligonucleotide
gtgttaatacgtggcaaaatgttgtgaatt

SEQ ID NO: 367705 - DNA, 30 bp, Artificial Sequence
  Synthetic oligonucleotide
tggggaattatacatcattcgcattgaatt

SEQ ID NO: 367706 - DNA, 30 bp, Artificial Sequence
  Synthetic oligonucleotide
tagcaacggcagagcgtagcatattgaatt

SEQ ID NO: 367707 - DNA, 30 bp, Artificial Sequence
  Synthetic oligonucleotide
taccacaactgtttccttacgccaataatt

SEQ ID NO: 367708 - DNA, 30 bp, Artificial Sequence
  Synthetic oligonucleotide
ctttggtacgggcgagttcggcacataatt

SEQ ID NO: 367709 - DNA, 30 bp, Artificial Sequence
  Synthetic oligonucleotide
actaaaatctaccattggttttacataatt

SEQ ID NO: 367710 - DNA, 30 bp, Artificial Sequence
  Synthetic oligonucleotide
tgtaacgtctatttaggatgtgccataatt

SEQ ID NO: 367711 - DNA, 30 bp, Artificial Sequence
  Synthetic oligonucleotide
cccgaatcgattatgaattaccgcataatt

SEQ ID NO: 367712 - DNA, 30 bp, Artificial Sequence
  Synthetic oligonucleotide
atccacgacgtgtgaggaggtttgataatt

SEQ ID NO: 367713 - DNA, 30 bp, Artificial Sequence
  Synthetic oligonucleotide
ggcgacgatgattgagtcttaaatataatt

SEQ ID NO: 367714 - DNA, 30 bp, Artificial Sequence
  Synthetic oligonucleotide
cacaaggttcccagaacgcaagaactaatt

SEQ ID NO: 367715 - DNA, 30 bp, Artificial Sequence
  Synthetic oligonucleotide
cacagcccgcgtcctgctcggccactaatt

SEQ ID NO: 367716 - DNA, 30 bp, Artificial Sequence
  Synthetic oligonucleotide
cccgcaaaagcgttgctagccagactaatt

SEQ ID NO: 367717 - DNA, 31 bp, Artificial Sequence
  Synthetic oligonucleotide
cgtctatcaacatctatgcatctgactaatt

SEQ ID NO: 367718 - DNA, 30 bp, Artificial Sequence
  Synthetic oligonucleotide
caaggttggacagtagcttgattactaatt

SEQ ID NO: 367719 - DNA, 30 bp, Artificial Sequence
  Synthetic oligonucleotide
gctagccatgaattctatacgttactaatt

SEQ ID NO: 367720 - DNA, 30 bp, Artificial Sequence
  Synthetic oligonucleotide
tacgtaagcaatagaccgggaatcctaatt

SEQ ID NO: 367721 - DNA, 30 bp, Artificial Sequence
  Synthetic oligonucleotide
cagctaatacgtcagacagttttgctaatt

SEQ ID NO: 367722 - DNA, 30 bp, Artificial Sequence
  Synthetic oligonucleotide
cttaagtggaaggtataccgtaatctaatt

SEQ ID NO: 367723 - DNA, 30 bp, Artificial Sequence
  Synthetic oligonucleotide
acgccctatcctaggaaactgcttctaatt

SEQ ID NO: 367724 - DNA, 30 bp, Artificial Sequence
  Synthetic oligonucleotide
ttattatgtgcggtagttcgtgttctaatt

SEQ ID NO: 367725 - DNA, 30 bp, Artificial Sequence
  Synthetic oligonucleotide
aagtagatagcgccaactgctcaagtaatt

SEQ ID NO: 367726 - DNA, 30 bp, Artificial Sequence
  Synthetic oligonucleotide
cgttctacttgaagtacatttcgagtaatt

SEQ ID NO: 367727 - DNA, 30 bp, Artificial Sequence
  Synthetic oligonucleotide
aacacattactccggtagtaaagcgtaatt

SEQ ID NO: 367728 - DNA, 30 bp, Artificial Sequence
  Synthetic oligonucleotide
ggaagcggtgggccgctaagcgaggtaatt

SEQ ID NO: 367729 - DNA, 30 bp, Artificial Sequence
  Synthetic oligonucleotide
taagtgttcattccgtcacaaaatgtaatt

SEQ ID NO: 367730 - DNA, 30 bp, Artificial Sequence
  Synthetic oligonucleotide
tcttttatagtgtcataggaggatgtaatt

SEQ ID NO: 367731 - DNA, 30 bp, Artificial Sequence
  Synthetic oligonucleotide
agtatgtctgctaagtgtatgtctgtaatt

SEQ ID NO: 367732 - DNA, 30 bp, Artificial Sequence
  Synthetic oligonucleotide
cctgatataccatgcgatcggattgtaatt

SEQ ID NO: 367733 - DNA, 30 bp, Artificial Sequence
  Synthetic oligonucleotide
gcgtggaaagttatcttcgagtttgtaatt

SEQ ID NO: 367734 - DNA, 30 bp, Artificial Sequence
  Synthetic oligonucleotide
atctgaacgccatacccgtccggattaatt

SEQ ID NO: 367735 - DNA, 30 bp, Artificial Sequence
  Synthetic oligonucleotide
aagcgaggatctgctacacgatccttaatt

SEQ ID NO: 367736 - DNA, 30 bp, Artificial Sequence
  Synthetic oligonucleotide
aattaacttcatgcatactactgcttaatt

SEQ ID NO: 367737 - DNA, 30 bp, Artificial Sequence
  Synthetic oligonucleotide
cactccactggctacccttgccagttaatt

SEQ ID NO: 367738 - DNA, 30 bp, Artificial Sequence
  Synthetic oligonucleotide
ccgcgggttcgtcagtcaaactagttaatt

SEQ ID NO: 367739 - DNA, 30 bp, Artificial Sequence
  Synthetic oligonucleotide
agaccgtgggcttgtttggcccggttaatt

SEQ ID NO: 367740 - DNA, 30 bp, Artificial Sequence
  Synthetic oligonucleotide
aattgatggagacggtttattgtgttaatt

SEQ ID NO: 367741 - DNA, 30 bp, Artificial Sequence
  Synthetic oligonucleotide
tgtatactccctaaaggcactaatttaatt

SEQ ID NO: 367742 - DNA, 30 bp, Artificial Sequence
  Synthetic oligonucleotide
ctcaagatcacgtcattcaaacgtttaatt

SEQ ID NO: 367743 - DNA, 30 bp, Artificial Sequence
  Synthetic oligonucleotide
gcaacgtgtaccccgccccgtagaaacatt

SEQ ID NO: 367744 - DNA, 30 bp, Artificial Sequence
  Synthetic oligonucleotide
attgtcagctctgtctagtttggaaacatt

SEQ ID NO: 367745 - DNA, 30 bp, Artificial Sequence
  Synthetic oligonucleotide
gctccgcgccttgggcactttataaacatt

SEQ ID NO: 367746 - DNA, 30 bp, Artificial Sequence
  Synthetic oligonucleotide
aacataatctactactacacactaaacatt

SEQ ID NO: 367747 - DNA, 30 bp, Artificial Sequence
  Synthetic oligonucleotide
taccatggtgtacctccttggaccaacatt

SEQ ID NO: 367748 - DNA, 30 bp, Artificial Sequence
  Synthetic oligonucleotide
caatgtcttgatgaaatttgttgcaacatt

SEQ ID NO: 367749 - DNA, 30 bp, Artificial Sequence
  Synthetic oligonucleotide
aagttctgttaggaagagtacaagaacatt

SEQ ID NO: 367750 - DNA, 30 bp, Artificial Sequence
  Synthetic oligonucleotide
ctccattatatgcaatctaagtcgaacatt

SEQ ID NO: 367751 - DNA, 30 bp, Artificial Sequence
  Synthetic oligonucleotide
agttcctcactttggtaatcgagtaacatt

SEQ ID NO: 367752 - DNA, 30 bp, Artificial Sequence
  Synthetic oligonucleotide
acactgtgcactccggcctggcggcacatt

SEQ ID NO: 367753 - DNA, 30 bp, Artificial Sequence
  Synthetic oligonucleotide
ttctttgcgctcccgtcccaacatcacatt

SEQ ID NO: 367754 - DNA, 30 bp, Artificial Sequence
  Synthetic oligonucleotide
tagaatcccacaaacaagccgggtcacatt

SEQ ID NO: 367755 - DNA, 30 bp, Artificial Sequence
  Synthetic oligonucleotide
ctcaagcatacccttgatgcgacagacatt

SEQ ID NO: 367756 - DNA, 30 bp, Artificial Sequence
  Synthetic oligonucleotide
gccttggtgagtttagctgacgatgacatt

SEQ ID NO: 367757 - DNA, 30 bp, Artificial Sequence
  Synthetic oligonucleotide
attgaaaatagtaaatttagaggtgacatt

SEQ ID NO: 367758 - DNA, 30 bp, Artificial Sequence
  Synthetic oligonucleotide
atgtgatccgtgtgattagttattgacatt

SEQ ID NO: 367759 - DNA, 30 bp, Artificial Sequence
  Synthetic oligonucleotide
tttgggaacgtcataactaactttgacatt

SEQ ID NO: 367760 - DNA, 30 bp, Artificial Sequence
  Synthetic oligonucleotide
ctcaacattgacggctgactgaaatacatt

SEQ ID NO: 367761 - DNA, 30 bp, Artificial Sequence
  Synthetic oligonucleotide
taccaaaccggcccattcatacaatacatt

SEQ ID NO: 367762 - DNA, 30 bp, Artificial Sequence
  Synthetic oligonucleotide
tgatggggacctggtcggtcgtgatacatt

SEQ ID NO: 367763 - DNA, 31 bp, Artificial Sequence
  Synthetic oligonucleotide
aaagaccggtgccccgatggcagggtacatt

SEQ ID NO: 367764 - DNA, 30 bp, Artificial Sequence
  Synthetic oligonucleotide
cactacggtaagacaattttgcacaccatt

SEQ ID NO: 367765 - DNA, 30 bp, Artificial Sequence
  Synthetic oligonucleotide
tcgctcccacacagcctgtcctttaccatt

SEQ ID NO: 367766 - DNA, 30 bp, Artificial Sequence
  Synthetic oligonucleotide
ctagctgatttattgatcatcggacccatt

SEQ ID NO: 367767 - DNA, 30 bp, Artificial Sequence
  Synthetic oligonucleotide
tcagaggtaccaatcaatgccctacccatt

SEQ ID NO: 367768 - DNA, 30 bp, Artificial Sequence
  Synthetic oligonucleotide
tagcacgagatggtaaattggaagcccatt

SEQ ID NO: 367769 - DNA, 29 bp, Artificial Sequence
  Synthetic oligonucleotide
ttcttgcaataagcggcctctatcccatt

SEQ ID NO: 367770 - DNA, 30 bp, Artificial Sequence
  Synthetic oligonucleotide
gtttcaaatggaatagcccacacagccatt

SEQ ID NO: 367771 - DNA, 30 bp, Artificial Sequence
  Synthetic oligonucleotide
tagttagccgcgaataactaggacgccatt

SEQ ID NO: 367772 - DNA, 30 bp, Artificial Sequence
  Synthetic oligonucleotide
gtcagtggcggggccccaatgtacgccatt

SEQ ID NO: 367773 - DNA, 30 bp, Artificial Sequence
  Synthetic oligonucleotide
atataggaccgaggaatcctcggcgccatt

SEQ ID NO: 367774 - DNA, 30 bp, Artificial Sequence
  Synthetic oligonucleotide
attgattaagcggagcagacgtaggccatt

SEQ ID NO: 367775 - DNA, 30 bp, Artificial Sequence
  Synthetic oligonucleotide
atgtttctagccccgtcctcgaatgccatt

SEQ ID NO: 367776 - DNA, 30 bp, Artificial Sequence
  Synthetic oligonucleotide
agacaattgcccgaagaattcggtgccatt

SEQ ID NO: 367777 - DNA, 30 bp, Artificial Sequence
  Synthetic oligonucleotide
tctgtcacgatgatatccattaattccatt

SEQ ID NO: 367778 - DNA, 30 bp, Artificial Sequence
  Synthetic oligonucleotide
ccttcgtttcaaagtaaccacgcttccatt

SEQ ID NO: 367779 - DNA, 30 bp, Artificial Sequence
  Synthetic oligonucleotide
gtattgctgcggtgcaaaaatttttccatt

SEQ ID NO: 367780 - DNA, 30 bp, Artificial Sequence
  Synthetic oligonucleotide
gtagttaaatattatggagccagcagcatt

SEQ ID NO: 367781 - DNA, 30 bp, Artificial Sequence
  Synthetic oligonucleotide
tgtcgtaaggcttgtgcggataatagcatt

SEQ ID NO: 367782 - DNA, 30 bp, Artificial Sequence
  Synthetic oligonucleotide
tgtacggttgatcagtccaccgagcgcatt

SEQ ID NO: 367783 - DNA, 30 bp, Artificial Sequence
  Synthetic oligonucleotide
aattaagtccaccctggcttggccggcatt

SEQ ID NO: 367784 - DNA, 30 bp, Artificial Sequence
  Synthetic oligonucleotide
actcaaggatcatgactaacaagcggcatt

SEQ ID NO: 367785 - DNA, 30 bp, Artificial Sequence
  Synthetic oligonucleotide
taatccccgaaccaagtaataactggcatt

SEQ ID NO: 367786 - DNA, 30 bp, Artificial Sequence
  Synthetic oligonucleotide
gaaggaggaggagttgaagcccctggcatt

SEQ ID NO: 367787 - DNA, 30 bp, Artificial Sequence
  Synthetic oligonucleotide
ccgtatcgggcagtttgacattctggcatt

SEQ ID NO: 367788 - DNA, 30 bp, Artificial Sequence
  Synthetic oligonucleotide
tgtaacggagacgggtggggacgtggcatt

SEQ ID NO: 367789 - DNA, 30 bp, Artificial Sequence
  Synthetic oligonucleotide
aatatgtatacttcacggcgttaatgcatt

SEQ ID NO: 367790 - DNA, 30 bp, Artificial Sequence
  Synthetic oligonucleotide
tcaacggacccaataggatatgcatgcatt

SEQ ID NO: 367791 - DNA, 30 bp, Artificial Sequence
  Synthetic oligonucleotide
tagggtcgggctgggcagggagggtgcatt

SEQ ID NO: 367792 - DNA, 30 bp, Artificial Sequence
  Synthetic oligonucleotide
cttctcctgtggcttcacgtgcattgcatt

SEQ ID NO: 367793 - DNA, 30 bp, Artificial Sequence
  Synthetic oligonucleotide
gccaaagcagtaaagtgtgaactttgcatt

SEQ ID NO: 367794 - DNA, 30 bp, Artificial Sequence
  Synthetic oligonucleotide
caaccgaaggtattaaaatcgtaaatcatt

SEQ ID NO: 367795 - DNA, 30 bp, Artificial Sequence
  Synthetic oligonucleotide
ctaccgactagagctgtctggggaatcatt

SEQ ID NO: 367796 - DNA, 30 bp, Artificial Sequence
  Synthetic oligonucleotide
gtccctgaccaccctatcaatctcatcatt

SEQ ID NO: 367797 - DNA, 30 bp, Artificial Sequence
  Synthetic oligonucleotide
aggggcaaatcccttacttttgggatcatt

SEQ ID NO: 367798 - DNA, 30 bp, Artificial Sequence
  Synthetic oligonucleotide
caatctcacgagtttgccctggcactcatt

SEQ ID NO: 367799 - DNA, 30 bp, Artificial Sequence
  Synthetic oligonucleotide
gcgtcaaagattcgagacgctcgactcatt

SEQ ID NO: 367800 - DNA, 30 bp, Artificial Sequence
  Synthetic oligonucleotide
agcagtggtcgggtagaactgcggctcatt

SEQ ID NO: 367801 - DNA, 30 bp, Artificial Sequence
  Synthetic oligonucleotide
tagatactgcccacgtctttagtgctcatt

SEQ ID NO: 367802 - DNA, 30 bp, Artificial Sequence
  Synthetic oligonucleotide
actcctggaaaaatggtcaaacgagtcatt

SEQ ID NO: 367803 - DNA, 29 bp, Artificial Sequence
  Synthetic oligonucleotide
gggacgcggcgtataccggaatagtcatt

SEQ ID NO: 367804 - DNA, 30 bp, Artificial Sequence
  Synthetic oligonucleotide
catattttacattctttgagtgccgtcatt

SEQ ID NO: 367805 - DNA, 30 bp, Artificial Sequence
  Synthetic oligonucleotide
ttcgcatcgcaggaatcgaaagcggtcatt

SEQ ID NO: 367806 - DNA, 30 bp, Artificial Sequence
  Synthetic oligonucleotide
gcgaatgccattcacgaggtacgggtcatt

SEQ ID NO: 367807 - DNA, 30 bp, Artificial Sequence
  Synthetic oligonucleotide
gttgttgttgcgtgcattaagaatgtcatt

SEQ ID NO: 367808 - DNA, 30 bp, Artificial Sequence
  Synthetic oligonucleotide
gatgaaaaggccacaagttccactttcatt

SEQ ID NO: 367809 - DNA, 30 bp, Artificial Sequence
  Synthetic oligonucleotide
atataagcccacttgtaattaataaagatt

SEQ ID NO: 367810 - DNA, 30 bp, Artificial Sequence
  Synthetic oligonucleotide
tttatcgagtatggtccttggagcaagatt

SEQ ID NO: 367811 - DNA, 30 bp, Artificial Sequence
  Synthetic oligonucleotide
aacaattatgtcgtgatgatgacgaagatt

SEQ ID NO: 367812 - DNA, 30 bp, Artificial Sequence
  Synthetic oligonucleotide
tagattccgagcccggatcgtttgaagatt

SEQ ID NO: 367813 - DNA, 30 bp, Artificial Sequence
  Synthetic oligonucleotide
ggggttctggaatcccaagcaactaagatt

SEQ ID NO: 367814 - DNA, 30 bp, Artificial Sequence
  Synthetic oligonucleotide
gggcgtggtattaatagtcagtgtaagatt

SEQ ID NO: 367815 - DNA, 30 bp, Artificial Sequence
  Synthetic oligonucleotide
acattcaaaggttctggtagtaaccagatt

SEQ ID NO: 367816 - DNA, 30 bp, Artificial Sequence
  Synthetic oligonucleotide
ctgtgctcatattaggctcatctccagatt

SEQ ID NO: 367817 - DNA, 30 bp, Artificial Sequence
  Synthetic oligonucleotide
ctgatcataaattgggccagattccagatt

SEQ ID NO: 367818 - DNA, 30 bp, Artificial Sequence
  Synthetic oligonucleotide
tacatccgtagtaggttattacggcagatt

SEQ ID NO: 367819 - DNA, 30 bp, Artificial Sequence
  Synthetic oligonucleotide
gttaagttaatccatactgtggggcagatt

SEQ ID NO: 367820 - DNA, 29 bp, Artificial Sequence
  Synthetic oligonucleotide
gtcctcgcacagaggctattgatcagatt

SEQ ID NO: 367821 - DNA, 31 bp, Artificial Sequence
  Synthetic oligonucleotide
aaatgtattccctatcggcgtgcctcagatt

SEQ ID NO: 367822 - DNA, 30 bp, Artificial Sequence
  Synthetic oligonucleotide
actggagtttgttgaacgtgatttcagatt

SEQ ID NO: 367823 - DNA, 30 bp, Artificial Sequence
  Synthetic oligonucleotide
cttttggatgtggactcaacaggagagatt

SEQ ID NO: 367824 - DNA, 30 bp, Artificial Sequence
  Synthetic oligonucleotide
ttgtatccacgtatattggggctagagatt

SEQ ID NO: 367825 - DNA, 30 bp, Artificial Sequence
  Synthetic oligonucleotide
gtccagtatcgttcggcataattagagatt

SEQ ID NO: 367826 - DNA, 30 bp, Artificial Sequence
  Synthetic oligonucleotide
tgccgtttttgatcaaccttcaaggagatt

SEQ ID NO: 367827 - DNA, 30 bp, Artificial Sequence
  Synthetic oligonucleotide
gtaatgaactgaggtgaatcctaggagatt

SEQ ID NO: 367828 - DNA, 30 bp, Artificial Sequence
  Synthetic oligonucleotide
accaccgcttattgagtatgattggagatt

SEQ ID NO: 367829 - DNA, 30 bp, Artificial Sequence
  Synthetic oligonucleotide
ctgctaaatcagcaacgacctcttgagatt

SEQ ID NO: 367830 - DNA, 29 bp, Artificial Sequence
  Synthetic oligonucleotide
gcgttacgccagaaaaatactttgagatt

SEQ ID NO: 367831 - DNA, 30 bp, Artificial Sequence
  Synthetic oligonucleotide
agtgttgcggtgcagtggctcaaatagatt

SEQ ID NO: 367832 - DNA, 30 bp, Artificial Sequence
  Synthetic oligonucleotide
ggaccctggaagggaatagaggcctagatt

SEQ ID NO: 367833 - DNA, 30 bp, Artificial Sequence
  Synthetic oligonucleotide
aagaagtaaggcaatatttttcgctagatt

SEQ ID NO: 367834 - DNA, 30 bp, Artificial Sequence
  Synthetic oligonucleotide
tgattcccacggacttgtaaccagtagatt

SEQ ID NO: 367835 - DNA, 30 bp, Artificial Sequence
  Synthetic oligonucleotide
ccctagtgaggtgccttggaatattagatt

SEQ ID NO: 367836 - DNA, 30 bp, Artificial Sequence
  Synthetic oligonucleotide
tctacttggaggttggcaatggtttagatt

SEQ ID NO: 367837 - DNA, 30 bp, Artificial Sequence
  Synthetic oligonucleotide
gagccagggcgttagtgcttcagaacgatt

SEQ ID NO: 367838 - DNA, 30 bp, Artificial Sequence
  Synthetic oligonucleotide
attacattacatccgagcaatagaacgatt

SEQ ID NO: 367839 - DNA, 30 bp, Artificial Sequence
  Synthetic oligonucleotide
ataggttttgggggtcgaaaaggaacgatt

SEQ ID NO: 367840 - DNA, 30 bp, Artificial Sequence
  Synthetic oligonucleotide
ctagtgaggcgctgtggggaagacacgatt

SEQ ID NO: 367841 - DNA, 30 bp, Artificial Sequence
  Synthetic oligonucleotide
caactgacttctcacccggggtacacgatt

SEQ ID NO: 367842 - DNA, 30 bp, Artificial Sequence
  Synthetic oligonucleotide
tagggcgttctatagtgtggctagacgatt

SEQ ID NO: 367843 - DNA, 30 bp, Artificial Sequence
  Synthetic oligonucleotide
cagattggaaaaagacaatctctgacgatt

SEQ ID NO: 367844 - DNA, 30 bp, Artificial Sequence
  Synthetic oligonucleotide
tagaactgaatgttttgttataatacgatt

SEQ ID NO: 367845 - DNA, 30 bp, Artificial Sequence
  Synthetic oligonucleotide
gtcaactagccgatgccgcatcgtacgatt

SEQ ID NO: 367846 - DNA, 30 bp, Artificial Sequence
  Synthetic oligonucleotide
gtacccggcgcttgtgaggggattacgatt

SEQ ID NO: 367847 - DNA, 30 bp, Artificial Sequence
  Synthetic oligonucleotide
ttagcggggacctggcggcagaaaccgatt

SEQ ID NO: 367848 - DNA, 30 bp, Artificial Sequence
  Synthetic oligonucleotide
ttaaaagaagtagtttgaccagaaccgatt

SEQ ID NO: 367849 - DNA, 30 bp, Artificial Sequence
  Synthetic oligonucleotide
tttagggagggggtagatattgtaccgatt

SEQ ID NO: 367850 - DNA, 30 bp, Artificial Sequence
  Synthetic oligonucleotide
cttggccttaatggtgggtcaaccccgatt

SEQ ID NO: 367851 - DNA, 30 bp, Artificial Sequence
  Synthetic oligonucleotide
tgcacatataattgcaacgtacgcccgatt

SEQ ID NO: 367852 - DNA, 30 bp, Artificial Sequence
  Synthetic oligonucleotide
attgagtctctggcaacaacttcgccgatt

SEQ ID NO: 367853 - DNA, 30 bp, Artificial Sequence
  Synthetic oligonucleotide
atcatatatggcaaatcaaacatgccgatt

SEQ ID NO: 367854 - DNA, 30 bp, Artificial Sequence
  Synthetic oligonucleotide
gttaaggggaggtacgtttccgtgccgatt

SEQ ID NO: 367855 - DNA, 30 bp, Artificial Sequence
  Synthetic oligonucleotide
ttagcaattgtctttcttagcgctccgatt

SEQ ID NO: 367856 - DNA, 30 bp, Artificial Sequence
  Synthetic oligonucleotide
acgctctattcatttaatagcgttccgatt

SEQ ID NO: 367857 - DNA, 30 bp, Artificial Sequence
  Synthetic oligonucleotide
tactcacagctattgccattaagcgcgatt

SEQ ID NO: 367858 - DNA, 30 bp, Artificial Sequence
  Synthetic oligonucleotide
aaagcaattaaggccgcttaaggcgcgatt

SEQ ID NO: 367859 - DNA, 30 bp, Artificial Sequence
  Synthetic oligonucleotide
taactacggtggaacgctcccctcgcgatt

SEQ ID NO: 367860 - DNA, 30 bp, Artificial Sequence
  Synthetic oligonucleotide
agctcttactacggggtacagtcggcgatt

SEQ ID NO: 367861 - DNA, 30 bp, Artificial Sequence
  Synthetic oligonucleotide
agagggctgttaagtgctacatgggcgatt

SEQ ID NO: 367862 - DNA, 30 bp, Artificial Sequence
  Synthetic oligonucleotide
cccgcagaaggctgcaggagaaatgcgatt

SEQ ID NO: 367863 - DNA, 30 bp, Artificial Sequence
  Synthetic oligonucleotide
cgtggcgagcggactcggtcgttatcgatt

SEQ ID NO: 367864 - DNA, 30 bp, Artificial Sequence
  Synthetic oligonucleotide
agaatgatggcaggccctaacacttcgatt

SEQ ID NO: 367865 - DNA, 30 bp, Artificial Sequence
  Synthetic oligonucleotide
agtcaagccggatgtggcccacgttcgatt

SEQ ID NO: 367866 - DNA, 30 bp, Artificial Sequence
  Synthetic oligonucleotide
ttagtccaaccgtttatacggcaaaggatt

SEQ ID NO: 367867 - DNA, 30 bp, Artificial Sequence
  Synthetic oligonucleotide
ttagagctatgaccgggctaacacaggatt

SEQ ID NO: 367868 - DNA, 30 bp, Artificial Sequence
  Synthetic oligonucleotide
gccctcataaagatgaaagtgtccaggatt

SEQ ID NO: 367869 - DNA, 30 bp, Artificial Sequence
  Synthetic oligonucleotide
agatgggggccgcaaggggtaggcaggatt

SEQ ID NO: 367870 - DNA, 30 bp, Artificial Sequence
  Synthetic oligonucleotide
tcgttacatcccgttagagtcaagaggatt

SEQ ID NO: 367871 - DNA, 30 bp, Artificial Sequence
  Synthetic oligonucleotide
gtcatgcatatggctctaacactgaggatt

SEQ ID NO: 367872 - DNA, 30 bp, Artificial Sequence
  Synthetic oligonucleotide
tgctctagacgtagtcatatgtaacggatt

SEQ ID NO: 367873 - DNA, 30 bp, Artificial Sequence
  Synthetic oligonucleotide
gaagtcattgaacagactcacatacggatt

SEQ ID NO: 367874 - DNA, 30 bp, Artificial Sequence
  Synthetic oligonucleotide
ggccctccggccctcgattgatcccggatt

SEQ ID NO: 367875 - DNA, 30 bp, Artificial Sequence
  Synthetic oligonucleotide
tcgtgatggtatgttcacgctcttcggatt

SEQ ID NO: 367876 - DNA, 30 bp, Artificial Sequence
  Synthetic oligonucleotide
acagatccctagtgtggggtaccagggatt

SEQ ID NO: 367877 - DNA, 30 bp, Artificial Sequence
  Synthetic oligonucleotide
tatacagaacctagtcgtttagcagggatt

SEQ ID NO: 367878 - DNA, 30 bp, Artificial Sequence
  Synthetic oligonucleotide
taagtacctgctgtttacggggatgggatt

SEQ ID NO: 367879 - DNA, 30 bp, Artificial Sequence
  Synthetic oligonucleotide
cgttctggaggtaaccaaaaaggtgggatt

SEQ ID NO: 367880 - DNA, 30 bp, Artificial Sequence
  Synthetic oligonucleotide
taggacaaccctcgagcgagccttgggatt

SEQ ID NO: 367881 - DNA, 30 bp, Artificial Sequence
  Synthetic oligonucleotide
aatacaagtatagaaacgttaggatggatt

SEQ ID NO: 367882 - DNA, 30 bp, Artificial Sequence
  Synthetic oligonucleotide
gggggccgtgtactctgctgggtatggatt

SEQ ID NO: 367883 - DNA, 30 bp, Artificial Sequence
  Synthetic oligonucleotide
ttacgtttggataataaggggttatggatt

SEQ ID NO: 367884 - DNA, 30 bp, Artificial Sequence
  Synthetic oligonucleotide
agcttttcacaggctgagaacccctggatt

SEQ ID NO: 367885 - DNA, 30 bp, Artificial Sequence
  Synthetic oligonucleotide
gacgttcccaatagtctgcttgagtggatt

SEQ ID NO: 367886 - DNA, 30 bp, Artificial Sequence
  Synthetic oligonucleotide
acccggctggtattccgattaacgtggatt

SEQ ID NO: 367887 - DNA, 30 bp, Artificial Sequence
  Synthetic oligonucleotide
aagccatatatcttgtttcgcgcgtggatt

SEQ ID NO: 367888 - DNA, 30 bp, Artificial Sequence
  Synthetic oligonucleotide
ggaacttagtcgggagctcctgcgtggatt

SEQ ID NO: 367889 - DNA, 30 bp, Artificial Sequence
  Synthetic oligonucleotide
taaacttgaatttcaggaacactgtggatt

SEQ ID NO: 367890 - DNA, 30 bp, Artificial Sequence
  Synthetic oligonucleotide
atcctcacaacaatgttttggtcttggatt

SEQ ID NO: 367891 - DNA, 30 bp, Artificial Sequence
  Synthetic oligonucleotide
ataatgttgccttatgcgtcggtttggatt

SEQ ID NO: 367892 - DNA, 30 bp, Artificial Sequence
  Synthetic oligonucleotide
tcccgtccactcgccatctctctaatgatt

SEQ ID NO: 367893 - DNA, 28 bp, Artificial Sequence
  Synthetic oligonucleotide
aattgggtgcaccgggaactccatgatt

SEQ ID NO: 367894 - DNA, 30 bp, Artificial Sequence
  Synthetic oligonucleotide
tatcgtgaatcttgagcaatgctcatgatt

SEQ ID NO: 367895 - DNA, 30 bp, Artificial Sequence
  Synthetic oligonucleotide
catttctcccatgcctaacactagatgatt

SEQ ID NO: 367896 - DNA, 30 bp, Artificial Sequence
  Synthetic oligonucleotide
ggggaccccaacttatcctattagatgatt

SEQ ID NO: 367897 - DNA, 30 bp, Artificial Sequence
  Synthetic oligonucleotide
gatgtaaagggggacgtttagtcgatgatt

SEQ ID NO: 367898 - DNA, 30 bp, Artificial Sequence
  Synthetic oligonucleotide
gcgatagttgctatggtagcagatatgatt

SEQ ID NO: 367899 - DNA, 30 bp, Artificial Sequence
  Synthetic oligonucleotide
acatctttgatagtcatacaatagctgatt

SEQ ID NO: 367900 - DNA, 30 bp, Artificial Sequence
  Synthetic oligonucleotide
atggctttgatggaaggaatgcggctgatt

SEQ ID NO: 367901 - DNA, 30 bp, Artificial Sequence
  Synthetic oligonucleotide
cataagtgcacccttcgtaagttgctgatt

SEQ ID NO: 367902 - DNA, 30 bp, Artificial Sequence
  Synthetic oligonucleotide
atatacggctgcgaacacctgttgctgatt

SEQ ID NO: 367903 - DNA, 30 bp, Artificial Sequence
  Synthetic oligonucleotide
cgctattagcggccggctggcgttctgatt

SEQ ID NO: 367904 - DNA, 30 bp, Artificial Sequence
  Synthetic oligonucleotide
acctcgggaggaacccttggatttctgatt

SEQ ID NO: 367905 - DNA, 30 bp, Artificial Sequence
  Synthetic oligonucleotide
tgagtccaaaacgagaggccctttctgatt

SEQ ID NO: 367906 - DNA, 30 bp, Artificial Sequence
  Synthetic oligonucleotide
gtccgcgtggaaatctgctagccagtgatt

SEQ ID NO: 367907 - DNA, 30 bp, Artificial Sequence
  Synthetic oligonucleotide
gcatgccgatcaattttggctgcagtgatt

SEQ ID NO: 367908 - DNA, 30 bp, Artificial Sequence
  Synthetic oligonucleotide
ggagttcgatccacactacggggagtgatt

SEQ ID NO: 367909 - DNA, 30 bp, Artificial Sequence
  Synthetic oligonucleotide
gacttgttacagatgcggaccctagtgatt

SEQ ID NO: 367910 - DNA, 30 bp, Artificial Sequence
  Synthetic oligonucleotide
ccgacaacttcatattggtttctagtgatt

SEQ ID NO: 367911 - DNA, 30 bp, Artificial Sequence
  Synthetic oligonucleotide
tgggtacgatattttcaggtccgcgtgatt

SEQ ID NO: 367912 - DNA, 30 bp, Artificial Sequence
  Synthetic oligonucleotide
gtgactgcgggatgtaggttgattgtgatt

SEQ ID NO: 367913 - DNA, 30 bp, Artificial Sequence
  Synthetic oligonucleotide
attttgggtaggaatgagaacgaattgatt

SEQ ID NO: 367914 - DNA, 30 bp, Artificial Sequence
  Synthetic oligonucleotide
gtaacgcgatcctaatccgcatccttgatt

SEQ ID NO: 367915 - DNA, 30 bp, Artificial Sequence
  Synthetic oligonucleotide
tttagggcctattggctagcagtcttgatt

SEQ ID NO: 367916 - DNA, 30 bp, Artificial Sequence
  Synthetic oligonucleotide
catcctggtcctacattagatgcgttgatt

SEQ ID NO: 367917 - DNA, 30 bp, Artificial Sequence
  Synthetic oligonucleotide
gtaatgtcaattgagtcgttttatttgatt

SEQ ID NO: 367918 - DNA, 30 bp, Artificial Sequence
  Synthetic oligonucleotide
ttgcgacacagacttggcgcatctttgatt

SEQ ID NO: 367919 - DNA, 30 bp, Artificial Sequence
  Synthetic oligonucleotide
accacgaaaaccccgctaagggttttgatt

SEQ ID NO: 367920 - DNA, 30 bp, Artificial Sequence
  Synthetic oligonucleotide
aagcaagcatcgaagttaactgaaaatatt

SEQ ID NO: 367921 - DNA, 30 bp, Artificial Sequence
  Synthetic oligonucleotide
acacgccctgtcgttagggtttcaaatatt

SEQ ID NO: 367922 - DNA, 30 bp, Artificial Sequence
  Synthetic oligonucleotide
acagtgtatttagcaaagtggctaaatatt

SEQ ID NO: 367923 - DNA, 30 bp, Artificial Sequence
  Synthetic oligonucleotide
tgtactccccactcagagattgccaatatt

SEQ ID NO: 367924 - DNA, 30 bp, Artificial Sequence
  Synthetic oligonucleotide
gatctcgctacgaaccctgaccgcaatatt

SEQ ID NO: 367925 - DNA, 30 bp, Artificial Sequence
  Synthetic oligonucleotide
tatgaattcgtaaaatttcgtaataatatt

SEQ ID NO: 367926 - DNA, 30 bp, Artificial Sequence
  Synthetic oligonucleotide
atcactagacctccagggtcggctaatatt

SEQ ID NO: 367927 - DNA, 30 bp, Artificial Sequence
  Synthetic oligonucleotide
cgaatttctggattcgatcatattaatatt

SEQ ID NO: 367928 - DNA, 30 bp, Artificial Sequence
  Synthetic oligonucleotide
tacttcaacttctcagtgagcaaccatatt

SEQ ID NO: 367929 - DNA, 30 bp, Artificial Sequence
  Synthetic oligonucleotide
tgataacgaaagtactaactttgccatatt

SEQ ID NO: 367930 - DNA, 30 bp, Artificial Sequence
  Synthetic oligonucleotide
agtcaaactaagggggttaaggtccatatt

SEQ ID NO: 367931 - DNA, 30 bp, Artificial Sequence
  Synthetic oligonucleotide
tctgtactaacgtcggcgtcattgcatatt

SEQ ID NO: 367932 - DNA, 30 bp, Artificial Sequence
  Synthetic oligonucleotide
caccataagttagtgcttgtgagtcatatt

SEQ ID NO: 367933 - DNA, 30 bp, Artificial Sequence
  Synthetic oligonucleotide
aacggtgctagtattctcctagtagatatt

SEQ ID NO: 367934 - DNA, 30 bp, Artificial Sequence
  Synthetic oligonucleotide
ctcaggggtctggacccgtgttacgatatt

SEQ ID NO: 367935 - DNA, 30 bp, Artificial Sequence
  Synthetic oligonucleotide
gtctgggggattaatctaggttcggatatt

SEQ ID NO: 367936 - DNA, 30 bp, Artificial Sequence
  Synthetic oligonucleotide
cctggtttagcgcgttttggcagggatatt

SEQ ID NO: 367937 - DNA, 30 bp, Artificial Sequence
  Synthetic oligonucleotide
acaccctggctgctcagtctactggatatt

SEQ ID NO: 367938 - DNA, 30 bp, Artificial Sequence
  Synthetic oligonucleotide
ggggaggatcctttcgtaggaagatatatt

SEQ ID NO: 367939 - DNA, 30 bp, Artificial Sequence
  Synthetic oligonucleotide
ttgagtacaaatggttagcagttatatatt

SEQ ID NO: 367940 - DNA, 30 bp, Artificial Sequence
  Synthetic oligonucleotide
gctatcccacggattcgggcgagctatatt

SEQ ID NO: 367941 - DNA, 30 bp, Artificial Sequence
  Synthetic oligonucleotide
tctgagggcaggagaatactccgctatatt

SEQ ID NO: 367942 - DNA, 30 bp, Artificial Sequence
  Synthetic oligonucleotide
cgatcaaagcatccacttgtttcgtatatt

SEQ ID NO: 367943 - DNA, 30 bp, Artificial Sequence
  Synthetic oligonucleotide
tgtctgcgattccaagagaagtggtatatt

SEQ ID NO: 367944 - DNA, 30 bp, Artificial Sequence
  Synthetic oligonucleotide
aaagagtcgaaccttgacaatgtaactatt

SEQ ID NO: 367945 - DNA, 30 bp, Artificial Sequence
  Synthetic oligonucleotide
gcaatgtagctgatcatctttctcactatt

SEQ ID NO: 367946 - DNA, 30 bp, Artificial Sequence
  Synthetic oligonucleotide
gacaatacttgtcatatattagggactatt

SEQ ID NO: 367947 - DNA, 30 bp, Artificial Sequence
  Synthetic oligonucleotide
gcaggtgcgccttggatgtacgggactatt

SEQ ID NO: 367948 - DNA, 30 bp, Artificial Sequence
  Synthetic oligonucleotide
tagagagcgccacaaattggtccccctatt

SEQ ID NO: 367949 - DNA, 30 bp, Artificial Sequence
  Synthetic oligonucleotide
ggggcaaagggttcggtgagctcgcctatt

SEQ ID NO: 367950 - DNA, 30 bp, Artificial Sequence
  Synthetic oligonucleotide
gcactcgtggaacatttagggaggcctatt

SEQ ID NO: 367951 - DNA, 30 bp, Artificial Sequence
  Synthetic oligonucleotide
acgggcctaccgacttgagttagtcctatt

SEQ ID NO: 367952 - DNA, 30 bp, Artificial Sequence
  Synthetic oligonucleotide
catcattagagatgtatatatggtcctatt

SEQ ID NO: 367953 - DNA, 30 bp, Artificial Sequence
  Synthetic oligonucleotide
tgggccgccataccctgaccaagagctatt

SEQ ID NO: 367954 - DNA, 30 bp, Artificial Sequence
  Synthetic oligonucleotide
tattcttggtgctcataaacgtcggctatt

SEQ ID NO: 367955 - DNA, 30 bp, Artificial Sequence
  Synthetic oligonucleotide
gcgatctgggtttgccgttggtcggctatt

SEQ ID NO: 367956 - DNA, 30 bp, Artificial Sequence
  Synthetic oligonucleotide
gcacatacatcggtccaggtccgggctatt

SEQ ID NO: 367957 - DNA, 30 bp, Artificial Sequence
  Synthetic oligonucleotide
ttcataagccctctaatgaacaatgctatt

SEQ ID NO: 367958 - DNA, 30 bp, Artificial Sequence
  Synthetic oligonucleotide
gtgacaatcgttaggccatcgtctgctatt

SEQ ID NO: 367959 - DNA, 30 bp, Artificial Sequence
  Synthetic oligonucleotide
gcatgtaacgagctcaggaaaagtgctatt

SEQ ID NO: 367960 - DNA, 30 bp, Artificial Sequence
  Synthetic oligonucleotide
aaggcatttcgttaaggccacaaatctatt

SEQ ID NO: 367961 - DNA, 30 bp, Artificial Sequence
  Synthetic oligonucleotide
atcgtattaggagtgtccgtttaatctatt

SEQ ID NO: 367962 - DNA, 30 bp, Artificial Sequence
  Synthetic oligonucleotide
agtagattgaggggcagtgtggtgtctatt

SEQ ID NO: 367963 - DNA, 30 bp, Artificial Sequence
  Synthetic oligonucleotide
aacctacctggtaatccattagattctatt

SEQ ID NO: 367964 - DNA, 30 bp, Artificial Sequence
  Synthetic oligonucleotide
tgaaggtcggtatattccttctaaagtatt

SEQ ID NO: 367965 - DNA, 30 bp, Artificial Sequence
  Synthetic oligonucleotide
ggcatagcggttcctatcgtaccaagtatt

SEQ ID NO: 367966 - DNA, 30 bp, Artificial Sequence
  Synthetic oligonucleotide
tcatgactgcattattttactgacagtatt

SEQ ID NO: 367967 - DNA, 30 bp, Artificial Sequence
  Synthetic oligonucleotide
atcgttgggggcaatgaacacaggagtatt

SEQ ID NO: 367968 - DNA, 30 bp, Artificial Sequence
  Synthetic oligonucleotide
gagtatgctccggtcactttgtctagtatt

SEQ ID NO: 367969 - DNA, 30 bp, Artificial Sequence
  Synthetic oligonucleotide
gtatcaggttgatgtcctttcggtagtatt

SEQ ID NO: 367970 - DNA, 30 bp, Artificial Sequence
  Synthetic oligonucleotide
tcagaaggtttctccatcgacattagtatt

SEQ ID NO: 367971 - DNA, 30 bp, Artificial Sequence
  Synthetic oligonucleotide
ataccggatccggtgggtcgatgacgtatt

SEQ ID NO: 367972 - DNA, 30 bp, Artificial Sequence
  Synthetic oligonucleotide
ggctcgggcagagattgttagacccgtatt

SEQ ID NO: 367973 - DNA, 30 bp, Artificial Sequence
  Synthetic oligonucleotide
cacctgggtcaagtagaagtagtccgtatt

SEQ ID NO: 367974 - DNA, 30 bp, Artificial Sequence
  Synthetic oligonucleotide
gtactgtgcccgggcgctgtcaatcgtatt

SEQ ID NO: 367975 - DNA, 30 bp, Artificial Sequence
  Synthetic oligonucleotide
tagccgggcaagttgtggggttgaggtatt

SEQ ID NO: 367976 - DNA, 30 bp, Artificial Sequence
  Synthetic oligonucleotide
gaacgacggttctgacttcgggtaggtatt

SEQ ID NO: 367977 - DNA, 30 bp, Artificial Sequence
  Synthetic oligonucleotide
tgtgccattgtactctgcggtgtaggtatt

SEQ ID NO: 367978 - DNA, 30 bp, Artificial Sequence
  Synthetic oligonucleotide
tagcggatgaagaatacaacctgcggtatt

SEQ ID NO: 367979 - DNA, 30 bp, Artificial Sequence
  Synthetic oligonucleotide
tggagtacaatttcggctatgatcggtatt

SEQ ID NO: 367980 - DNA, 30 bp, Artificial Sequence
  Synthetic oligonucleotide
gcgtagtgagtatattgcgcaaagggtatt

SEQ ID NO: 367981 - DNA, 30 bp, Artificial Sequence
  Synthetic oligonucleotide
ttataaacgtgtgttggaacttagggtatt

SEQ ID NO: 367982 - DNA, 29 bp, Artificial Sequence
  Synthetic oligonucleotide
aggtggcgtagataccacggtcgggtatt

SEQ ID NO: 367983 - DNA, 30 bp, Artificial Sequence
  Synthetic oligonucleotide
gggattgagaattggataagtattggtatt

SEQ ID NO: 367984 - DNA, 30 bp, Artificial Sequence
  Synthetic oligonucleotide
ttcatgtgtggctcagatattcttggtatt

SEQ ID NO: 367985 - DNA, 30 bp, Artificial Sequence
  Synthetic oligonucleotide
tctacctgttatttggtggtcgaatgtatt

SEQ ID NO: 367986 - DNA, 30 bp, Artificial Sequence
  Synthetic oligonucleotide
tagtagagaattacttattcttaatgtatt

SEQ ID NO: 367987 - DNA, 30 bp, Artificial Sequence
  Synthetic oligonucleotide
catttggtctaggcaatagtttaatgtatt

SEQ ID NO: 367988 - DNA, 30 bp, Artificial Sequence
  Synthetic oligonucleotide
tgcggaagccgttccgatcgaatatgtatt

SEQ ID NO: 367989 - DNA, 30 bp, Artificial Sequence
  Synthetic oligonucleotide
cacatatcctccggcttactatgctgtatt

SEQ ID NO: 367990 - DNA, 30 bp, Artificial Sequence
  Synthetic oligonucleotide
aaagtcaaatgcataaacacactctgtatt

SEQ ID NO: 367991 - DNA, 30 bp, Artificial Sequence
  Synthetic oligonucleotide
agtgtattggttaactagtagcagtgtatt

SEQ ID NO: 367992 - DNA, 30 bp, Artificial Sequence
  Synthetic oligonucleotide
agtgcgctacattttcacaatcattgtatt

SEQ ID NO: 367993 - DNA, 30 bp, Artificial Sequence
  Synthetic oligonucleotide
atggcggcttggctctgcaagttttgtatt

SEQ ID NO: 367994 - DNA, 30 bp, Artificial Sequence
  Synthetic oligonucleotide
cactgttaaaggtcaccatatgcaattatt

SEQ ID NO: 367995 - DNA, 30 bp, Artificial Sequence
  Synthetic oligonucleotide
gcctaaggcatttggtataatccgattatt

SEQ ID NO: 367996 - DNA, 30 bp, Artificial Sequence
  Synthetic oligonucleotide
gagttgattgccacgaatgcttcgattatt

SEQ ID NO: 367997 - DNA, 30 bp, Artificial Sequence
  Synthetic oligonucleotide
tcgcggtcggacgatcatgtcctgattatt

SEQ ID NO: 367998 - DNA, 30 bp, Artificial Sequence
  Synthetic oligonucleotide
ctgcaagcatataggtcagccagtattatt

SEQ ID NO: 367999 - DNA, 30 bp, Artificial Sequence
  Synthetic oligonucleotide
cccaccataaacataataggctcacttatt

SEQ ID NO: 368000 - DNA, 30 bp, Artificial Sequence
  Synthetic oligonucleotide
agatgcgtccaggcagcccgtatacttatt

SEQ ID NO: 368001 - DNA, 30 bp, Artificial Sequence
  Synthetic oligonucleotide
cttctcacctgtacacttgtaactcttatt

SEQ ID NO: 368002 - DNA, 30 bp, Artificial Sequence
  Synthetic oligonucleotide
tcattttcaaagtacataggacgagttatt

SEQ ID NO: 368003 - DNA, 30 bp, Artificial Sequence
  Synthetic oligonucleotide
acaattcactgagtttgagcccgagttatt

SEQ ID NO: 368004 - DNA, 30 bp, Artificial Sequence
  Synthetic oligonucleotide
actatactgatgagcactgagttagttatt

SEQ ID NO: 368005 - DNA, 30 bp, Artificial Sequence
  Synthetic oligonucleotide
acctcggagtttctttgaagtgcggttatt

SEQ ID NO: 368006 - DNA, 30 bp, Artificial Sequence
  Synthetic oligonucleotide
ttagccctgcattgttaattcatggttatt

SEQ ID NO: 368007 - DNA, 30 bp, Artificial Sequence
  Synthetic oligonucleotide
caaagttacttgagtagagtttctgttatt

SEQ ID NO: 368008 - DNA, 30 bp, Artificial Sequence
  Synthetic oligonucleotide
ggtgggggttggtatgccggtggtgttatt

SEQ ID NO: 368009 - DNA, 30 bp, Artificial Sequence
  Synthetic oligonucleotide
tgcgcacgaaaacgcatcgacccatttatt

SEQ ID NO: 368010 - DNA, 30 bp, Artificial Sequence
  Synthetic oligonucleotide
agggtcagttacgctgggagcatatttatt

SEQ ID NO: 368011 - DNA, 30 bp, Artificial Sequence
  Synthetic oligonucleotide
gaggtcaatgtagcgcggctggtatttatt

SEQ ID NO: 368012 - DNA, 30 bp, Artificial Sequence
  Synthetic oligonucleotide
taaagcagcggacaaagaaatacctttatt

SEQ ID NO: 368013 - DNA, 30 bp, Artificial Sequence
  Synthetic oligonucleotide
gcaatgacacttaaggtcaggtcgtttatt

SEQ ID NO: 368014 - DNA, 30 bp, Artificial Sequence
  Synthetic oligonucleotide
gacttatcagtcgtgacctcatattttatt

SEQ ID NO: 368015 - DNA, 30 bp, Artificial Sequence
  Synthetic oligonucleotide
gggtctcttgaatccaatcgactttttatt

SEQ ID NO: 368016 - DNA, 30 bp, Artificial Sequence
  Synthetic oligonucleotide
cacccacatcatgaaccatgacaaaaactt

SEQ ID NO: 368017 - DNA, 30 bp, Artificial Sequence
  Synthetic oligonucleotide
catccacccttaaagttgggataaaaactt

SEQ ID NO: 368018 - DNA, 30 bp, Artificial Sequence
  Synthetic oligonucleotide
cgaaaactgtgtacacgttattaaaaactt

SEQ ID NO: 368019 - DNA, 30 bp, Artificial Sequence
  Synthetic oligonucleotide
taaattaagcggcccgaccagctaaaactt

SEQ ID NO: 368020 - DNA, 30 bp, Artificial Sequence
  Synthetic oligonucleotide
gtcccggggacgcctacgggggtaaaactt

SEQ ID NO: 368021 - DNA, 30 bp, Artificial Sequence
  Synthetic oligonucleotide
cctaaacgcatagtttcggtgggcaaactt

SEQ ID NO: 368022 - DNA, 30 bp, Artificial Sequence
  Synthetic oligonucleotide
aattgaacgaaatctataggggcgaaactt

SEQ ID NO: 368023 - DNA, 30 bp, Artificial Sequence
  Synthetic oligonucleotide
aactattagctggaacatcatcctaaactt

SEQ ID NO: 368024 - DNA, 30 bp, Artificial Sequence
  Synthetic oligonucleotide
tgtaagggacggtgttatatttaacaactt

SEQ ID NO: 368025 - DNA, 30 bp, Artificial Sequence
  Synthetic oligonucleotide
cccacttagtcagtgttcacgacacaactt

SEQ ID NO: 368026 - DNA, 30 bp, Artificial Sequence
  Synthetic oligonucleotide
gtttaagccaatttccgacacttacaactt

SEQ ID NO: 368027 - DNA, 30 bp, Artificial Sequence
  Synthetic oligonucleotide
ctgtaagttcacactaaacccttacaactt

SEQ ID NO: 368028 - DNA, 30 bp, Artificial Sequence
  Synthetic oligonucleotide
aagttaaatccgtcgaaggaagtccaactt

SEQ ID NO: 368029 - DNA, 30 bp, Artificial Sequence
  Synthetic oligonucleotide
tgctcaaagctaaacttattcgggcaactt

SEQ ID NO: 368030 - DNA, 30 bp, Artificial Sequence
  Synthetic oligonucleotide
cgggcttaccttggccgcccacaagaactt

SEQ ID NO: 368031 - DNA, 30 bp, Artificial Sequence
  Synthetic oligonucleotide
tgatatgaacagacttggggacaagaactt

SEQ ID NO: 368032 - DNA, 30 bp, Artificial Sequence
  Synthetic oligonucleotide
ctactcatccaatgagtctaagaagaactt

SEQ ID NO: 368033 - DNA, 30 bp, Artificial Sequence
  Synthetic oligonucleotide
aaccttaagtttatctattaaagagaactt

SEQ ID NO: 368034 - DNA, 30 bp, Artificial Sequence
  Synthetic oligonucleotide
caggagtggggggtgatacttaccgaactt

SEQ ID NO: 368035 - DNA, 30 bp, Artificial Sequence
  Synthetic oligonucleotide
catttcagtaccaacagccatatggaactt

SEQ ID NO: 368036 - DNA, 30 bp, Artificial Sequence
  Synthetic oligonucleotide
ggcagcagccagtcggggtatatggaactt

SEQ ID NO: 368037 - DNA, 30 bp, Artificial Sequence
  Synthetic oligonucleotide
ggccggttggggtgaatgcttcatgaactt

SEQ ID NO: 368038 - DNA, 30 bp, Artificial Sequence
  Synthetic oligonucleotide
cggcgcaggtggccaagcccctatgaactt

SEQ ID NO: 368039 - DNA, 32 bp, Artificial Sequence
  Synthetic oligonucleotide
tggtaacgggatatatgggtagcattgaactt

SEQ ID NO: 368040 - DNA, 30 bp, Artificial Sequence
  Synthetic oligonucleotide
aaccggcccatgtcagaattgagataactt

SEQ ID NO: 368041 - DNA, 30 bp, Artificial Sequence
  Synthetic oligonucleotide
gtttgtattaaaggtgtataacgataactt

SEQ ID NO: 368042 - DNA, 30 bp, Artificial Sequence
  Synthetic oligonucleotide
gaggggggctggcgactaattagctaactt

SEQ ID NO: 368043 - DNA, 30 bp, Artificial Sequence
  Synthetic oligonucleotide
atcgcatcatctaggtttaaagtctaactt

SEQ ID NO: 368044 - DNA, 30 bp, Artificial Sequence
  Synthetic oligonucleotide
gtcttgggtaactatcaagttacgtaactt

SEQ ID NO: 368045 - DNA, 30 bp, Artificial Sequence
  Synthetic oligonucleotide
aaacaatgagaggtatatccgttttaactt

SEQ ID NO: 368046 - DNA, 30 bp, Artificial Sequence
  Synthetic oligonucleotide
gggttatggaagcggaccatgaacacactt

SEQ ID NO: 368047 - DNA, 30 bp, Artificial Sequence
  Synthetic oligonucleotide
ctggttagaatataactgatggtcacactt

SEQ ID NO: 368048 - DNA, 30 bp, Artificial Sequence
  Synthetic oligonucleotide
gggctagcttgctaacaagcaaagacactt

SEQ ID NO: 368049 - DNA, 30 bp, Artificial Sequence
  Synthetic oligonucleotide
ggctcgaggcatcactgcacgaagacactt

SEQ ID NO: 368050 - DNA, 30 bp, Artificial Sequence
  Synthetic oligonucleotide
ggtcaccacacactatagcataagacactt

SEQ ID NO: 368051 - DNA, 30 bp, Artificial Sequence
  Synthetic oligonucleotide
gggacctgggggttgagtggctggacactt

SEQ ID NO: 368052 - DNA, 30 bp, Artificial Sequence
  Synthetic oligonucleotide
gaaggacttttgattcttatactgacactt

SEQ ID NO: 368053 - DNA, 30 bp, Artificial Sequence
  Synthetic oligonucleotide
tctgcttcataagcccacggcgtgacactt

SEQ ID NO: 368054 - DNA, 30 bp, Artificial Sequence
  Synthetic oligonucleotide
aacgccttttataccagaggaagtacactt

SEQ ID NO: 368055 - DNA, 30 bp, Artificial Sequence
  Synthetic oligonucleotide
agttagcagttcatcacactgggtacactt

SEQ ID NO: 368056 - DNA, 30 bp, Artificial Sequence
  Synthetic oligonucleotide
gcgcttcatttgtgaacggacgaaccactt

SEQ ID NO: 368057 - DNA, 31 bp, Artificial Sequence
  Synthetic oligonucleotide
ggatgttacgtacctgtgtgcctgaccactt

SEQ ID NO: 368058 - DNA, 30 bp, Artificial Sequence
  Synthetic oligonucleotide
gcgagctacgtaaggtcttacgcgccactt

SEQ ID NO: 368059 - DNA, 30 bp, Artificial Sequence
  Synthetic oligonucleotide
ggttgtgttgtttctactgctaggccactt

SEQ ID NO: 368060 - DNA, 30 bp, Artificial Sequence
  Synthetic oligonucleotide
aaggaggctacataacaagccgctccactt

SEQ ID NO: 368061 - DNA, 30 bp, Artificial Sequence
  Synthetic oligonucleotide
tgtctctattccactatacctggtccactt

SEQ ID NO: 368062 - DNA, 30 bp, Artificial Sequence
  Synthetic oligonucleotide
tggtggaccaactccatcctccttccactt

SEQ ID NO: 368063 - DNA, 30 bp, Artificial Sequence
  Synthetic oligonucleotide
tactaaatatacgagttgtgtaaagcactt

SEQ ID NO: 368064 - DNA, 30 bp, Artificial Sequence
  Synthetic oligonucleotide
cgggttacagtagtcgccaccgcagcactt

SEQ ID NO: 368065 - DNA, 30 bp, Artificial Sequence
  Synthetic oligonucleotide
ggaaaatgtgttcagatacatggagcactt

SEQ ID NO: 368066 - DNA, 30 bp, Artificial Sequence
  Synthetic oligonucleotide
ctataagtggtccatgactctagcgcactt

SEQ ID NO: 368067 - DNA, 30 bp, Artificial Sequence
  Synthetic oligonucleotide
agccgcggtctaaaacctagacgcgcactt

SEQ ID NO: 368068 - DNA, 30 bp, Artificial Sequence
  Synthetic oligonucleotide
tcctcccaccacaggagagaatgcgcactt

SEQ ID NO: 368069 - DNA, 30 bp, Artificial Sequence
  Synthetic oligonucleotide
cacctgtgccgttgcgaggagttcgcactt

SEQ ID NO: 368070 - DNA, 30 bp, Artificial Sequence
  Synthetic oligonucleotide
tataaactgtgaaaatcgccacttgcactt

SEQ ID NO: 368071 - DNA, 30 bp, Artificial Sequence
  Synthetic oligonucleotide
actcacggagactgggtaaattttgcactt

SEQ ID NO: 368072 - DNA, 30 bp, Artificial Sequence
  Synthetic oligonucleotide
ccgcaccagctcagcccgcacgcctcactt

SEQ ID NO: 368073 - DNA, 30 bp, Artificial Sequence
  Synthetic oligonucleotide
cagcaaggtgcaacataggtcaagtcactt

SEQ ID NO: 368074 - DNA, 30 bp, Artificial Sequence
  Synthetic oligonucleotide
caatgttccgagcacattcaacattcactt

SEQ ID NO: 368075 - DNA, 30 bp, Artificial Sequence
  Synthetic oligonucleotide
acagttgggtaactcacgatcgcttcactt

SEQ ID NO: 368076 - DNA, 30 bp, Artificial Sequence
  Synthetic oligonucleotide
tttaaccaggccgtaagggcacgttcactt

SEQ ID NO: 368077 - DNA, 30 bp, Artificial Sequence
  Synthetic oligonucleotide
tagtgctatagtatcctaggggaaagactt

SEQ ID NO: 368078 - DNA, 30 bp, Artificial Sequence
  Synthetic oligonucleotide
gagatgaggtttggaaggttttaaagactt

SEQ ID NO: 368079 - DNA, 30 bp, Artificial Sequence
  Synthetic oligonucleotide
gctacgatagcggccccaaatggaagactt

SEQ ID NO: 368080 - DNA, 30 bp, Artificial Sequence
  Synthetic oligonucleotide
taatttaaggttccggcagcgctaagactt

SEQ ID NO: 368081 - DNA, 30 bp, Artificial Sequence
  Synthetic oligonucleotide
gggagggtctcgcgtccccttcccagactt

SEQ ID NO: 368082 - DNA, 30 bp, Artificial Sequence
  Synthetic oligonucleotide
gaaaaacactgtttaacactgaggagactt

SEQ ID NO: 368083 - DNA, 30 bp, Artificial Sequence
  Synthetic oligonucleotide
accggccttgtggacaggggtattagactt

SEQ ID NO: 368084 - DNA, 30 bp, Artificial Sequence
  Synthetic oligonucleotide
ctgaacacagccgcatatcaatttagactt

SEQ ID NO: 368085 - DNA, 30 bp, Artificial Sequence
  Synthetic oligonucleotide
gccactcatgagcactccattcaccgactt

SEQ ID NO: 368086 - DNA, 30 bp, Artificial Sequence
  Synthetic oligonucleotide
ggagaataatgaatttatcctggccgactt

SEQ ID NO: 368087 - DNA, 30 bp, Artificial Sequence
  Synthetic oligonucleotide
tcccggagttttgggttcgtgtgccgactt

SEQ ID NO: 368088 - DNA, 30 bp, Artificial Sequence
  Synthetic oligonucleotide
aagaccaacgggtccgggcgccagcgactt

SEQ ID NO: 368089 - DNA, 30 bp, Artificial Sequence
  Synthetic oligonucleotide
gccacgaggaagttgatgtattctcgactt

SEQ ID NO: 368090 - DNA, 30 bp, Artificial Sequence
  Synthetic oligonucleotide
aacgcattttagaaactggtgattcgactt

SEQ ID NO: 368091 - DNA, 30 bp, Artificial Sequence
  Synthetic oligonucleotide
ggtgctaccgtcggctgactagccggactt

SEQ ID NO: 368092 - DNA, 30 bp, Artificial Sequence
  Synthetic oligonucleotide
tggtacagcttttaaagtggaaagggactt

SEQ ID NO: 368093 - DNA, 30 bp, Artificial Sequence
  Synthetic oligonucleotide
tgtgggaaaggcgggcttggaacgggactt

SEQ ID NO: 368094 - DNA, 30 bp, Artificial Sequence
  Synthetic oligonucleotide
gcgctagaaaacgggtgggggcttggactt

SEQ ID NO: 368095 - DNA, 30 bp, Artificial Sequence
  Synthetic oligonucleotide
tttactcgacccttgaggtctaactgactt

SEQ ID NO: 368096 - DNA, 30 bp, Artificial Sequence
  Synthetic oligonucleotide
cttcatcagtactaagattcaaaaatactt

SEQ ID NO: 368097 - DNA, 30 bp, Artificial Sequence
  Synthetic oligonucleotide
tatcggggtgtcaagtacactggaatactt

SEQ ID NO: 368098 - DNA, 30 bp, Artificial Sequence
  Synthetic oligonucleotide
atggagatcaatgggttgtctacgatactt

SEQ ID NO: 368099 - DNA, 30 bp, Artificial Sequence
  Synthetic oligonucleotide
gtgccggcataccgagtgctctcgatactt

SEQ ID NO: 368100 - DNA, 30 bp, Artificial Sequence
  Synthetic oligonucleotide
aaacgttccattgcggcatcggggatactt

SEQ ID NO: 368101 - DNA, 30 bp, Artificial Sequence
  Synthetic oligonucleotide
ttttcgggctctagcatctcttggatactt

SEQ ID NO: 368102 - DNA, 30 bp, Artificial Sequence
  Synthetic oligonucleotide
tcggacctcttttcgttaactatgatactt

SEQ ID NO: 368103 - DNA, 30 bp, Artificial Sequence
  Synthetic oligonucleotide
cagaccgtgttcgcgttcttatgtatactt

SEQ ID NO: 368104 - DNA, 30 bp, Artificial Sequence
  Synthetic oligonucleotide
gaagagacgattacagggaagtgtatactt

SEQ ID NO: 368105 - DNA, 30 bp, Artificial Sequence
  Synthetic oligonucleotide
gcagagccattgaaccagacataactactt

SEQ ID NO: 368106 - DNA, 30 bp, Artificial Sequence
  Synthetic oligonucleotide
tttgtacattgcaggtatttgagactactt

SEQ ID NO: 368107 - DNA, 30 bp, Artificial Sequence
  Synthetic oligonucleotide
catgctacttatgaatggttggtactactt

SEQ ID NO: 368108 - DNA, 30 bp, Artificial Sequence
  Synthetic oligonucleotide
tgtagtaggcccccaaaattcaccctactt

SEQ ID NO: 368109 - DNA, 30 bp, Artificial Sequence
  Synthetic oligonucleotide
ctcagatcactgttattgcactcgctactt

SEQ ID NO: 368110 - DNA, 30 bp, Artificial Sequence
  Synthetic oligonucleotide
tgcttcacagtgtctgtcagcgtgctactt

SEQ ID NO: 368111 - DNA, 30 bp, Artificial Sequence
  Synthetic oligonucleotide
cgaaccacggttgagcttttataagtactt

SEQ ID NO: 368112 - DNA, 30 bp, Artificial Sequence
  Synthetic oligonucleotide
ggtcggggcattgacttcacaagagtactt

SEQ ID NO: 368113 - DNA, 30 bp, Artificial Sequence
  Synthetic oligonucleotide
agtgcagctagaagttcactacgagtactt

SEQ ID NO: 368114 - DNA, 30 bp, Artificial Sequence
  Synthetic oligonucleotide
gagaagcaaaaagccttgggccgagtactt

SEQ ID NO: 368115 - DNA, 30 bp, Artificial Sequence
  Synthetic oligonucleotide
gagtaggcaacgcatatctcctgagtactt

SEQ ID NO: 368116 - DNA, 30 bp, Artificial Sequence
  Synthetic oligonucleotide
catcccataaaaatcaaaaaggcggtactt

SEQ ID NO: 368117 - DNA, 30 bp, Artificial Sequence
  Synthetic oligonucleotide
gataacgccttcttggtaggggtggtactt

SEQ ID NO: 368118 - DNA, 30 bp, Artificial Sequence
  Synthetic oligonucleotide
aacgtgagtcaggtaaaagcatcattactt

SEQ ID NO: 368119 - DNA, 30 bp, Artificial Sequence
  Synthetic oligonucleotide
ccagacgatacccgtctagactcattactt

SEQ ID NO: 368120 - DNA, 30 bp, Artificial Sequence
  Synthetic oligonucleotide
gacttctttcgattaaaaccaatattactt

SEQ ID NO: 368121 - DNA, 30 bp, Artificial Sequence
  Synthetic oligonucleotide
gtcgacatatgatgcttagcgggcttactt

SEQ ID NO: 368122 - DNA, 30 bp, Artificial Sequence
  Synthetic oligonucleotide
ttctcggtggcataagacatcaagttactt

SEQ ID NO: 368123 - DNA, 30 bp, Artificial Sequence
  Synthetic oligonucleotide
ataacgtatgtatacttcaagccgttactt

SEQ ID NO: 368124 - DNA, 30 bp, Artificial Sequence
  Synthetic oligonucleotide
attagagagtcatcctaggccgggttactt

SEQ ID NO: 368125 - DNA, 30 bp, Artificial Sequence
  Synthetic oligonucleotide
tggcgctcggtcaataacacgcatttactt

SEQ ID NO: 368126 - DNA, 30 bp, Artificial Sequence
  Synthetic oligonucleotide
taggagcagcaatcgtgtcctcgtttactt

SEQ ID NO: 368127 - DNA, 30 bp, Artificial Sequence
  Synthetic oligonucleotide
agacggtacacgtatatgactccaaacctt

SEQ ID NO: 368128 - DNA, 30 bp, Artificial Sequence
  Synthetic oligonucleotide
actacctagggaactgtcgtgctaaacctt

SEQ ID NO: 368129 - DNA, 30 bp, Artificial Sequence
  Synthetic oligonucleotide
ttgctgatgaccgggacgttagccaacctt

SEQ ID NO: 368130 - DNA, 30 bp, Artificial Sequence
  Synthetic oligonucleotide
acgtcggctgactttcggaaacggaacctt

SEQ ID NO: 368131 - DNA, 30 bp, Artificial Sequence
  Synthetic oligonucleotide
gacgatgggttgcgtctaaggaggcacctt

SEQ ID NO: 368132 - DNA, 30 bp, Artificial Sequence
  Synthetic oligonucleotide
aaaaaacgttctatacagcgaatgcacctt

SEQ ID NO: 368133 - DNA, 30 bp, Artificial Sequence
  Synthetic oligonucleotide
cgagattttgacaaacgtattgccgacctt

SEQ ID NO: 368134 - DNA, 30 bp, Artificial Sequence
  Synthetic oligonucleotide
tgctgggcaagacttcgtttttgcgacctt

SEQ ID NO: 368135 - DNA, 30 bp, Artificial Sequence
  Synthetic oligonucleotide
gtctcttgccgtggagatgacttcgacctt

SEQ ID NO: 368136 - DNA, 30 bp, Artificial Sequence
  Synthetic oligonucleotide
cctacccaagcttcgagctttaaggacctt

SEQ ID NO: 368137 - DNA, 30 bp, Artificial Sequence
  Synthetic oligonucleotide
ataagaatagcttttgaacgtgatgacctt

SEQ ID NO: 368138 - DNA, 30 bp, Artificial Sequence
  Synthetic oligonucleotide
atacggatccaatttatccgaagtgacctt

SEQ ID NO: 368139 - DNA, 30 bp, Artificial Sequence
  Synthetic oligonucleotide
atacacaagcgctgtgagaacatatacctt

SEQ ID NO: 368140 - DNA, 30 bp, Artificial Sequence
  Synthetic oligonucleotide
aggtgaatgtgggggggtaacttatacctt

SEQ ID NO: 368141 - DNA, 30 bp, Artificial Sequence
  Synthetic oligonucleotide
ggcatacagttcgggaatacatgctacctt

SEQ ID NO: 368142 - DNA, 30 bp, Artificial Sequence
  Synthetic oligonucleotide
tggggcctcctcccaggagggttctacctt

SEQ ID NO: 368143 - DNA, 30 bp, Artificial Sequence
  Synthetic oligonucleotide
gtaggagcgaggcggtggcccccgtacctt

SEQ ID NO: 368144 - DNA, 30 bp, Artificial Sequence
  Synthetic oligonucleotide
atagggcgaccttgtaaagcaaggtacctt

SEQ ID NO: 368145 - DNA, 30 bp, Artificial Sequence
  Synthetic oligonucleotide
aacggcggcattttcggaacgatgtacctt

SEQ ID NO: 368146 - DNA, 30 bp, Artificial Sequence
  Synthetic oligonucleotide
tatgtattggatcgatacgattaaaccctt

SEQ ID NO: 368147 - DNA, 30 bp, Artificial Sequence
  Synthetic oligonucleotide
ttatggcgggacatcaaagccgtaaccctt

SEQ ID NO: 368148 - DNA, 30 bp, Artificial Sequence
  Synthetic oligonucleotide
gaaatctccaacttaggtcactacaccctt

SEQ ID NO: 368149 - DNA, 30 bp, Artificial Sequence
  Synthetic oligonucleotide
ctagctttaattgtctctgatagcaccctt

SEQ ID NO: 368150 - DNA, 30 bp, Artificial Sequence
  Synthetic oligonucleotide
cagtggaggcaggcagtacaacggaccctt

SEQ ID NO: 368151 - DNA, 30 bp, Artificial Sequence
  Synthetic oligonucleotide
gtcagtgctccagtagattttatccccctt

SEQ ID NO: 368152 - DNA, 30 bp, Artificial Sequence
  Synthetic oligonucleotide
tgcccgatatgtttaggcaagttccccctt

SEQ ID NO: 368153 - DNA, 30 bp, Artificial Sequence
  Synthetic oligonucleotide
taggacacgtcttggaagaagcgtcccctt

SEQ ID NO: 368154 - DNA, 30 bp, Artificial Sequence
  Synthetic oligonucleotide
cagcacgcatcaccagcgtggaaggccctt

SEQ ID NO: 368155 - DNA, 30 bp, Artificial Sequence
  Synthetic oligonucleotide
taccgacatagcaagacattccgggccctt

SEQ ID NO: 368156 - DNA, 30 bp, Artificial Sequence
  Synthetic oligonucleotide
caacagttcggatgtccatacggggccctt

SEQ ID NO: 368157 - DNA, 30 bp, Artificial Sequence
  Synthetic oligonucleotide
tggagaatcgcgaatggcacgttggccctt

SEQ ID NO: 368158 - DNA, 30 bp, Artificial Sequence
  Synthetic oligonucleotide
aatgggcgtatacaatttgcatctgccctt

SEQ ID NO: 368159 - DNA, 30 bp, Artificial Sequence
  Synthetic oligonucleotide
gcctctaggccgttaaagacatgtgccctt

SEQ ID NO: 368160 - DNA, 30 bp, Artificial Sequence
  Synthetic oligonucleotide
tgccctgataacttcagtgagttctccctt

SEQ ID NO: 368161 - DNA, 30 bp, Artificial Sequence
  Synthetic oligonucleotide
ctcgtctcctaagcttacctaaagtccctt

SEQ ID NO: 368162 - DNA, 30 bp, Artificial Sequence
  Synthetic oligonucleotide
cccggaccgggacacaacggggagtccctt

SEQ ID NO: 368163 - DNA, 30 bp, Artificial Sequence
  Synthetic oligonucleotide
tcggcatgcctctctggtaacaggtccctt

SEQ ID NO: 368164 - DNA, 30 bp, Artificial Sequence
  Synthetic oligonucleotide
gtaaacgttgtgtccaagcggtggtccctt

SEQ ID NO: 368165 - DNA, 30 bp, Artificial Sequence
  Synthetic oligonucleotide
gttcattataagccgatgcgctaaagcctt

SEQ ID NO: 368166 - DNA, 30 bp, Artificial Sequence
  Synthetic oligonucleotide
gaacttgcaggagtatgttacccaagcctt

SEQ ID NO: 368167 - DNA, 30 bp, Artificial Sequence
  Synthetic oligonucleotide
taaggccgtactaggatagggtcaagcctt

SEQ ID NO: 368168 - DNA, 30 bp, Artificial Sequence
  Synthetic oligonucleotide
aactcttgcaacgcacagaaacagagcctt

SEQ ID NO: 368169 - DNA, 30 bp, Artificial Sequence
  Synthetic oligonucleotide
agtgagcgtcagtacagaggtgggagcctt

SEQ ID NO: 368170 - DNA, 30 bp, Artificial Sequence
  Synthetic oligonucleotide
gttaaccgcaccttgaccgccctgagcctt

SEQ ID NO: 368171 - DNA, 30 bp, Artificial Sequence
  Synthetic oligonucleotide
taacaaaatgctttagtacgcactagcctt

SEQ ID NO: 368172 - DNA, 30 bp, Artificial Sequence
  Synthetic oligonucleotide
ttgactgtatcaacacgatttcgtagcctt

SEQ ID NO: 368173 - DNA, 30 bp, Artificial Sequence
  Synthetic oligonucleotide
gtacttcgacacgatggaacttcaggcctt

SEQ ID NO: 368174 - DNA, 30 bp, Artificial Sequence
  Synthetic oligonucleotide
ggaagctatccccagtccaaacacggcctt

SEQ ID NO: 368175 - DNA, 30 bp, Artificial Sequence
  Synthetic oligonucleotide
gttgatgagcaccctcatattcagggcctt

SEQ ID NO: 368176 - DNA, 30 bp, Artificial Sequence
  Synthetic oligonucleotide
ggtaaaccccgcttgattgaactgggcctt

SEQ ID NO: 368177 - DNA, 30 bp, Artificial Sequence
  Synthetic oligonucleotide
gcaccaacgaatatagccgtcgatggcctt

SEQ ID NO: 368178 - DNA, 30 bp, Artificial Sequence
  Synthetic oligonucleotide
tcttccatcagttagcagtgtgctggcctt

SEQ ID NO: 368179 - DNA, 30 bp, Artificial Sequence
  Synthetic oligonucleotide
agtggggttggacgccggtgacgatgcctt

SEQ ID NO: 368180 - DNA, 30 bp, Artificial Sequence
  Synthetic oligonucleotide
ggctcatatctgtgtcgtatggtatgcctt

SEQ ID NO: 368181 - DNA, 30 bp, Artificial Sequence
  Synthetic oligonucleotide
tactacaatatttttcttgggtcctgcctt

SEQ ID NO: 368182 - DNA, 30 bp, Artificial Sequence
  Synthetic oligonucleotide
aacgggggccggaatcccaggagctgcctt

SEQ ID NO: 368183 - DNA, 30 bp, Artificial Sequence
  Synthetic oligonucleotide
atataatttgggactcccgcagagtgcctt

SEQ ID NO: 368184 - DNA, 30 bp, Artificial Sequence
  Synthetic oligonucleotide
taaactcatagtttgaaagcgaattgcctt

SEQ ID NO: 368185 - DNA, 30 bp, Artificial Sequence
  Synthetic oligonucleotide
ttgaaggtatctggtccctgcagttgcctt

SEQ ID NO: 368186 - DNA, 30 bp, Artificial Sequence
  Synthetic oligonucleotide
gtctcgtttatacgctcggtggcaatcctt

SEQ ID NO: 368187 - DNA, 31 bp, Artificial Sequence
  Synthetic oligonucleotide
tcagcgccacaaactaacccgccgcatcctt

SEQ ID NO: 368188 - DNA, 30 bp, Artificial Sequence
  Synthetic oligonucleotide
atgttcccgactcgtctcagggggatcctt

SEQ ID NO: 368189 - DNA, 30 bp, Artificial Sequence
  Synthetic oligonucleotide
cgactgtactaacacacccaaggtatcctt

SEQ ID NO: 368190 - DNA, 30 bp, Artificial Sequence
  Synthetic oligonucleotide
gagaggcatcacaaacttcatgtcctcctt

SEQ ID NO: 368191 - DNA, 30 bp, Artificial Sequence
  Synthetic oligonucleotide
gagacattgtgaaggattgcatggctcctt

SEQ ID NO: 368192 - DNA, 30 bp, Artificial Sequence
  Synthetic oligonucleotide
atttggcggacaggaaggacgctgctcctt

SEQ ID NO: 368193 - DNA, 30 bp, Artificial Sequence
  Synthetic oligonucleotide
aatgaaattgaatgggtaccacttctcctt

SEQ ID NO: 368194 - DNA, 30 bp, Artificial Sequence
  Synthetic oligonucleotide
atgtcgtcacctgcagatttagttctcctt

SEQ ID NO: 368195 - DNA, 30 bp, Artificial Sequence
  Synthetic oligonucleotide
catgtcgggctacttccgaagatcgtcctt

SEQ ID NO: 368196 - DNA, 30 bp, Artificial Sequence
  Synthetic oligonucleotide
gtgtctaccagtaggaatcttaaggtcctt

SEQ ID NO: 368197 - DNA, 30 bp, Artificial Sequence
  Synthetic oligonucleotide
atgaaattcacgactgaaattgtggtcctt

SEQ ID NO: 368198 - DNA, 30 bp, Artificial Sequence
  Synthetic oligonucleotide
attctgcgagagtatttcgtcagtttcctt

SEQ ID NO: 368199 - DNA, 30 bp, Artificial Sequence
  Synthetic oligonucleotide
agccgtgtaccaagttatacataaaagctt

SEQ ID NO: 368200 - DNA, 30 bp, Artificial Sequence
  Synthetic oligonucleotide
aatgtaagaaataaagccgggcccaagctt

SEQ ID NO: 368201 - DNA, 30 bp, Artificial Sequence
  Synthetic oligonucleotide
acggacaatcggggtgagcataagaagctt

SEQ ID NO: 368202 - DNA, 30 bp, Artificial Sequence
  Synthetic oligonucleotide
aaatcttagcgaacgcacgaactgaagctt

SEQ ID NO: 368203 - DNA, 30 bp, Artificial Sequence
  Synthetic oligonucleotide
ggtggatagaaattgacgggacttaagctt

SEQ ID NO: 368204 - DNA, 30 bp, Artificial Sequence
  Synthetic oligonucleotide
attaggaacgctcagttcatagaacagctt

SEQ ID NO: 368205 - DNA, 30 bp, Artificial Sequence
  Synthetic oligonucleotide
gggtagcatttcacgccgaaagcccagctt

SEQ ID NO: 368206 - DNA, 30 bp, Artificial Sequence
  Synthetic oligonucleotide
aatggtagggtaaagtcatgtagccagctt

SEQ ID NO: 368207 - DNA, 30 bp, Artificial Sequence
  Synthetic oligonucleotide
gctccgaggccaaggggacaactccagctt

SEQ ID NO: 368208 - DNA, 31 bp, Artificial Sequence
  Synthetic oligonucleotide
gggcgggtcatagaatgacaggctccagctt

SEQ ID NO: 368209 - DNA, 30 bp, Artificial Sequence
  Synthetic oligonucleotide
aatgacctaaaattggagcacaggcagctt

SEQ ID NO: 368210 - DNA, 30 bp, Artificial Sequence
  Synthetic oligonucleotide
tgtcaaagaccggcctccgtcaggcagctt

SEQ ID NO: 368211 - DNA, 30 bp, Artificial Sequence
  Synthetic oligonucleotide
caaagcatccagaaaatgcgatggcagctt

SEQ ID NO: 368212 - DNA, 30 bp, Artificial Sequence
  Synthetic oligonucleotide
agacccctgctttaaacggtcgtgcagctt

SEQ ID NO: 368213 - DNA, 30 bp, Artificial Sequence
  Synthetic oligonucleotide
taaccaggtcctagggggcggtatcagctt

SEQ ID NO: 368214 - DNA, 30 bp, Artificial Sequence
  Synthetic oligonucleotide
ccatttgagaggcctgatttacctcagctt

SEQ ID NO: 368215 - DNA, 30 bp, Artificial Sequence
  Synthetic oligonucleotide
ccgggaacaaggttcatagccgctcagctt

SEQ ID NO: 368216 - DNA, 30 bp, Artificial Sequence
  Synthetic oligonucleotide
ttgcgtcatcttatactgcttcgtcagctt

SEQ ID NO: 368217 - DNA, 30 bp, Artificial Sequence
  Synthetic oligonucleotide
ctctaaggtcatggcttaggggaagagctt

SEQ ID NO: 368218 - DNA, 30 bp, Artificial Sequence
  Synthetic oligonucleotide
aggcctgcagttaaaccactaccagagctt

SEQ ID NO: 368219 - DNA, 30 bp, Artificial Sequence
  Synthetic oligonucleotide
ctcagacgacccctttggtgaggagagctt

SEQ ID NO: 368220 - DNA, 30 bp, Artificial Sequence
  Synthetic oligonucleotide
taaagggcctacattatcgggcccgagctt

SEQ ID NO: 368221 - DNA, 30 bp, Artificial Sequence
  Synthetic oligonucleotide
catacacagagcccagggtatagcgagctt

SEQ ID NO: 368222 - DNA, 30 bp, Artificial Sequence
  Synthetic oligonucleotide
gcctacatgggatcatgagtggtcgagctt

SEQ ID NO: 368223 - DNA, 30 bp, Artificial Sequence
  Synthetic oligonucleotide
ccggtctgaaatatctgcactagggagctt

SEQ ID NO: 368224 - DNA, 30 bp, Artificial Sequence
  Synthetic oligonucleotide
ggaatttcctatatcggagtcgtggagctt

SEQ ID NO: 368225 - DNA, 30 bp, Artificial Sequence
  Synthetic oligonucleotide
tatggtttaaagtgatcacgttgtgagctt

SEQ ID NO: 368226 - DNA, 30 bp, Artificial Sequence
  Synthetic oligonucleotide
tagcgttttcttgcgaagaagcttgagctt

SEQ ID NO: 368227 - DNA, 30 bp, Artificial Sequence
  Synthetic oligonucleotide
ggaatactaggacgttgagacaaatagctt

SEQ ID NO: 368228 - DNA, 30 bp, Artificial Sequence
  Synthetic oligonucleotide
gccacggtaggaaagtatgccgcatagctt

SEQ ID NO: 368229 - DNA, 30 bp, Artificial Sequence
  Synthetic oligonucleotide
gcacttcgtcccagctgattacattagctt

SEQ ID NO: 368230 - DNA, 30 bp, Artificial Sequence
  Synthetic oligonucleotide
gcgggacttagccactagctagattagctt

SEQ ID NO: 368231 - DNA, 30 bp, Artificial Sequence
  Synthetic oligonucleotide
ttacagaaaagacactcgattatttagctt

SEQ ID NO: 368232 - DNA, 30 bp, Artificial Sequence
  Synthetic oligonucleotide
ctagtgcttgggacatctacaagaacgctt

SEQ ID NO: 368233 - DNA, 30 bp, Artificial Sequence
  Synthetic oligonucleotide
cttcaggtcgcagagggagccaccacgctt

SEQ ID NO: 368234 - DNA, 30 bp, Artificial Sequence
  Synthetic oligonucleotide
agcttacagattctaagatcactcacgctt

SEQ ID NO: 368235 - DNA, 30 bp, Artificial Sequence
  Synthetic oligonucleotide
agatgcaggtaggcgtcgacaaatacgctt

SEQ ID NO: 368236 - DNA, 30 bp, Artificial Sequence
  Synthetic oligonucleotide
gctgtaagcgccaaattgtacactacgctt

SEQ ID NO: 368237 - DNA, 30 bp, Artificial Sequence
  Synthetic oligonucleotide
actgatgagcgcacgtcttaatgaccgctt

SEQ ID NO: 368238 - DNA, 30 bp, Artificial Sequence
  Synthetic oligonucleotide
ctacatcgaatgtggggacctgacccgctt

SEQ ID NO: 368239 - DNA, 30 bp, Artificial Sequence
  Synthetic oligonucleotide
cacaaagttcctctaaaactgagcccgctt

SEQ ID NO: 368240 - DNA, 30 bp, Artificial Sequence
  Synthetic oligonucleotide
ctatcatggggcgccctaggaatcccgctt

SEQ ID NO: 368241 - DNA, 30 bp, Artificial Sequence
  Synthetic oligonucleotide
cctcccagtgaattattgcgatgtccgctt

SEQ ID NO: 368242 - DNA, 30 bp, Artificial Sequence
  Synthetic oligonucleotide
acacagccgcacatctttctgtgtccgctt

SEQ ID NO: 368243 - DNA, 30 bp, Artificial Sequence
  Synthetic oligonucleotide
ctcgtagctacttaaaagctatgagcgctt

SEQ ID NO: 368244 - DNA, 30 bp, Artificial Sequence
  Synthetic oligonucleotide
aacctagggatcaaacctttcaacgcgctt

SEQ ID NO: 368245 - DNA, 30 bp, Artificial Sequence
  Synthetic oligonucleotide
tgggttaaactacccactaggggcgcgctt

SEQ ID NO: 368246 - DNA, 30 bp, Artificial Sequence
  Synthetic oligonucleotide
gttcggtgatctatgtggcacccggcgctt

SEQ ID NO: 368247 - DNA, 30 bp, Artificial Sequence
  Synthetic oligonucleotide
gggagacttgcattgccaccgtgatcgctt

SEQ ID NO: 368248 - DNA, 30 bp, Artificial Sequence
  Synthetic oligonucleotide
gctcttgcccgtgggagtatttagtcgctt

SEQ ID NO: 368249 - DNA, 30 bp, Artificial Sequence
  Synthetic oligonucleotide
atcgaatatgtgtaaaaagagcggtcgctt

SEQ ID NO: 368250 - DNA, 30 bp, Artificial Sequence
  Synthetic oligonucleotide
gcactggtgatagacgacaagaattcgctt

SEQ ID NO: 368251 - DNA, 30 bp, Artificial Sequence
  Synthetic oligonucleotide
cagccaagtatatccgcaagcctttcgctt

SEQ ID NO: 368252 - DNA, 30 bp, Artificial Sequence
  Synthetic oligonucleotide
gaattggttctcgtggtgagccaaaggctt

SEQ ID NO: 368253 - DNA, 30 bp, Artificial Sequence
  Synthetic oligonucleotide
atagccataataattgaacagaacaggctt

SEQ ID NO: 368254 - DNA, 31 bp, Artificial Sequence
  Synthetic oligonucleotide
aggcttttccgggtatctcgatgacaggctt

SEQ ID NO: 368255 - DNA, 30 bp, Artificial Sequence
  Synthetic oligonucleotide
aagcgggaaagggaatcagttatcaggctt

SEQ ID NO: 368256 - DNA, 30 bp, Artificial Sequence
  Synthetic oligonucleotide
aaaggatttaatatatggccctttaggctt

SEQ ID NO: 368257 - DNA, 30 bp, Artificial Sequence
  Synthetic oligonucleotide
caatccaaggctaagcgctaacaacggctt

SEQ ID NO: 368258 - DNA, 30 bp, Artificial Sequence
  Synthetic oligonucleotide
tggctcccgatccaggctgtgcgacggctt

SEQ ID NO: 368259 - DNA, 30 bp, Artificial Sequence
  Synthetic oligonucleotide
ggatactatcaggcgaacttagcccggctt

SEQ ID NO: 368260 - DNA, 30 bp, Artificial Sequence
  Synthetic oligonucleotide
tcgtggtgcgcgacagcgttgaggcggctt

SEQ ID NO: 368261 - DNA, 30 bp, Artificial Sequence
  Synthetic oligonucleotide
gcccaggaggtaatgtgagtccgtcggctt

SEQ ID NO: 368262 - DNA, 30 bp, Artificial Sequence
  Synthetic oligonucleotide
ggtttattggcggactattacggtgggctt

SEQ ID NO: 368263 - DNA, 30 bp, Artificial Sequence
  Synthetic oligonucleotide
cagtcgattcatatttttcaggtgtggctt

SEQ ID NO: 368264 - DNA, 30 bp, Artificial Sequence
  Synthetic oligonucleotide
cggtgggacacccctcatgtatattggctt

SEQ ID NO: 368265 - DNA, 30 bp, Artificial Sequence
  Synthetic oligonucleotide
agggcctcaaatgatctttacccttggctt

SEQ ID NO: 368266 - DNA, 30 bp, Artificial Sequence
  Synthetic oligonucleotide
gaccaatgctccatatcgtccagtatgctt

SEQ ID NO: 368267 - DNA, 30 bp, Artificial Sequence
  Synthetic oligonucleotide
aaatgcgcttccaggattttgtccctgctt

SEQ ID NO: 368268 - DNA, 30 bp, Artificial Sequence
  Synthetic oligonucleotide
aagtccccgactgtacggccttccctgctt

SEQ ID NO: 368269 - DNA, 30 bp, Artificial Sequence
  Synthetic oligonucleotide
agagtgcctcggagcaactagcgcctgctt

SEQ ID NO: 368270 - DNA, 30 bp, Artificial Sequence
  Synthetic oligonucleotide
ttataagccaccaccgtctgcctgctgctt

SEQ ID NO: 368271 - DNA, 30 bp, Artificial Sequence
  Synthetic oligonucleotide
taataatggattttaggccatctgctgctt

SEQ ID NO: 368272 - DNA, 30 bp, Artificial Sequence
  Synthetic oligonucleotide
aattaacgaagggtcgaccatcgtctgctt

SEQ ID NO: 368273 - DNA, 30 bp, Artificial Sequence
  Synthetic oligonucleotide
ggatatatttaggcgacaatgtgggtgctt

SEQ ID NO: 368274 - DNA, 30 bp, Artificial Sequence
  Synthetic oligonucleotide
ttattaaacggacaacactttttggtgctt

SEQ ID NO: 368275 - DNA, 30 bp, Artificial Sequence
  Synthetic oligonucleotide
aaaagtccatcggtaacgtgaactgtgctt

SEQ ID NO: 368276 - DNA, 30 bp, Artificial Sequence
  Synthetic oligonucleotide
aaggctttgaaggtgacggttcccttgctt

SEQ ID NO: 368277 - DNA, 30 bp, Artificial Sequence
  Synthetic oligonucleotide
agtcttgacaggtccagggtaagcttgctt

SEQ ID NO: 368278 - DNA, 30 bp, Artificial Sequence
  Synthetic oligonucleotide
tttcgctggctacatgggtcgtggttgctt

SEQ ID NO: 368279 - DNA, 30 bp, Artificial Sequence
  Synthetic oligonucleotide
tgaaggcctttacatgtttctatgttgctt

SEQ ID NO: 368280 - DNA, 30 bp, Artificial Sequence
  Synthetic oligonucleotide
aaataatgcacgttcgagtaactgttgctt

SEQ ID NO: 368281 - DNA, 30 bp, Artificial Sequence
  Synthetic oligonucleotide
catgtgattcccagttatcgacttttgctt

SEQ ID NO: 368282 - DNA, 30 bp, Artificial Sequence
  Synthetic oligonucleotide
taaaatatcgactatagttctcttttgctt

SEQ ID NO: 368283 - DNA, 30 bp, Artificial Sequence
  Synthetic oligonucleotide
aaactgaggtcatattttacatttttgctt

SEQ ID NO: 368284 - DNA, 30 bp, Artificial Sequence
  Synthetic oligonucleotide
cacaatctgtctcatcataggaaaaatctt

SEQ ID NO: 368285 - DNA, 30 bp, Artificial Sequence
  Synthetic oligonucleotide
tccagggatggagaaacgcggaaaaatctt

SEQ ID NO: 368286 - DNA, 30 bp, Artificial Sequence
  Synthetic oligonucleotide
gggccgctctacctaatgccaagcaatctt

SEQ ID NO: 368287 - DNA, 30 bp, Artificial Sequence
  Synthetic oligonucleotide
tgcggtagcctacgtgatgggttgaatctt

SEQ ID NO: 368288 - DNA, 30 bp, Artificial Sequence
  Synthetic oligonucleotide
atgaaaagtgctcacctccgagttaatctt

SEQ ID NO: 368289 - DNA, 30 bp, Artificial Sequence
  Synthetic oligonucleotide
cctggatagtcctcaaactcaggacatctt

SEQ ID NO: 368290 - DNA, 30 bp, Artificial Sequence
  Synthetic oligonucleotide
gccggggatattgccgcaactggacatctt

SEQ ID NO: 368291 - DNA, 30 bp, Artificial Sequence
  Synthetic oligonucleotide
gtggtaaagctatggcatagaaaccatctt

SEQ ID NO: 368292 - DNA, 30 bp, Artificial Sequence
  Synthetic oligonucleotide
agttactgagcgtctatggagaaccatctt

SEQ ID NO: 368293 - DNA, 30 bp, Artificial Sequence
  Synthetic oligonucleotide
aatagggcaatggggcccacagcccatctt

SEQ ID NO: 368294 - DNA, 30 bp, Artificial Sequence
  Synthetic oligonucleotide
atctcattgttaggagtgttgtagcatctt

SEQ ID NO: 368295 - DNA, 30 bp, Artificial Sequence
  Synthetic oligonucleotide
aacctaaggacggcgaaaagttgtcatctt

SEQ ID NO: 368296 - DNA, 30 bp, Artificial Sequence
  Synthetic oligonucleotide
aagtgattcagagaacatatgtgcgatctt

SEQ ID NO: 368297 - DNA, 30 bp, Artificial Sequence
  Synthetic oligonucleotide
agattgggctgccaagcgttcctcgatctt

SEQ ID NO: 368298 - DNA, 30 bp, Artificial Sequence
  Synthetic oligonucleotide
ggaattacacaaaaacgtggcgaggatctt

SEQ ID NO: 368299 - DNA, 30 bp, Artificial Sequence
  Synthetic oligonucleotide
gaaacccgggacacgaagtcgcatgatctt

SEQ ID NO: 368300 - DNA, 30 bp, Artificial Sequence
  Synthetic oligonucleotide
taggactggttccccgcacagcgtgatctt

SEQ ID NO: 368301 - DNA, 30 bp, Artificial Sequence
  Synthetic oligonucleotide
aatgttgagtagagacctctaggtgatctt

SEQ ID NO: 368302 - DNA, 30 bp, Artificial Sequence
  Synthetic oligonucleotide
cgtccacagtggcagtactgcagatatctt

SEQ ID NO: 368303 - DNA, 30 bp, Artificial Sequence
  Synthetic oligonucleotide
atattcgcactgctcatacctttatatctt

SEQ ID NO: 368304 - DNA, 30 bp, Artificial Sequence
  Synthetic oligonucleotide
atgtcaaccctactgcggtgtgcaactctt

SEQ ID NO: 368305 - DNA, 30 bp, Artificial Sequence
  Synthetic oligonucleotide
cacaattggcgcagtagaattcggactctt

SEQ ID NO: 368306 - DNA, 30 bp, Artificial Sequence
  Synthetic oligonucleotide
tttagtttggacatgtagcgtttgactctt

SEQ ID NO: 368307 - DNA, 30 bp, Artificial Sequence
  Synthetic oligonucleotide
atgccagaacactgtgagcttaaacctctt

SEQ ID NO: 368308 - DNA, 30 bp, Artificial Sequence
  Synthetic oligonucleotide
ctcaatgcgcgatatccctctatccctctt

SEQ ID NO: 368309 - DNA, 30 bp, Artificial Sequence
  Synthetic oligonucleotide
cgtggcgaagtttgtaggttcgacgctctt

SEQ ID NO: 368310 - DNA, 30 bp, Artificial Sequence
  Synthetic oligonucleotide
ttctggtcgtgaacagaaatgcgtgctctt

SEQ ID NO: 368311 - DNA, 30 bp, Artificial Sequence
  Synthetic oligonucleotide
agactcgcagatggtcgctggcgctctctt

SEQ ID NO: 368312 - DNA, 30 bp, Artificial Sequence
  Synthetic oligonucleotide
agacctttatccccaaaagtttagtctctt

SEQ ID NO: 368313 - DNA, 30 bp, Artificial Sequence
  Synthetic oligonucleotide
tgccgtttcattagaaaatatatgtctctt

SEQ ID NO: 368314 - DNA, 30 bp, Artificial Sequence
  Synthetic oligonucleotide
tgccaaagatggtgtgcatgagtgtctctt

SEQ ID NO: 368315 - DNA, 30 bp, Artificial Sequence
  Synthetic oligonucleotide
ataggagatgctacttgagttgaaagtctt

SEQ ID NO: 368316 - DNA, 30 bp, Artificial Sequence
  Synthetic oligonucleotide
aagttccggtaagaagcgtcacgaagtctt

SEQ ID NO: 368317 - DNA, 30 bp, Artificial Sequence
  Synthetic oligonucleotide
tttagcatgtacccatttaggataagtctt

SEQ ID NO: 368318 - DNA, 30 bp, Artificial Sequence
  Synthetic oligonucleotide
caagggtaggctatgctgccacacagtctt

SEQ ID NO: 368319 - DNA, 30 bp, Artificial Sequence
  Synthetic oligonucleotide
taatataaggcgtagcccttcaccagtctt

SEQ ID NO: 368320 - DNA, 30 bp, Artificial Sequence
  Synthetic oligonucleotide
tagggtaaaatataatttacctagagtctt

SEQ ID NO: 368321 - DNA, 30 bp, Artificial Sequence
  Synthetic oligonucleotide
cacactggttgggcagccgtcgcgagtctt

SEQ ID NO: 368322 - DNA, 30 bp, Artificial Sequence
  Synthetic oligonucleotide
ccgtccaccaccctgtagccaaatagtctt

SEQ ID NO: 368323 - DNA, 30 bp, Artificial Sequence
  Synthetic oligonucleotide
acgtattacattttcagtaatcgtagtctt

SEQ ID NO: 368324 - DNA, 30 bp, Artificial Sequence
  Synthetic oligonucleotide
agcaatgagtatacaggccagtcacgtctt

SEQ ID NO: 368325 - DNA, 30 bp, Artificial Sequence
  Synthetic oligonucleotide
gcataatacaatggcctattttgacgtctt

SEQ ID NO: 368326 - DNA, 30 bp, Artificial Sequence
  Synthetic oligonucleotide
tatatcaaaaggatcaaatgactacgtctt

SEQ ID NO: 368327 - DNA, 30 bp, Artificial Sequence
  Synthetic oligonucleotide
ttcgtccatagataccggtacctacgtctt

SEQ ID NO: 368328 - DNA, 30 bp, Artificial Sequence
  Synthetic oligonucleotide
ttagatagcttaggatatcacgctcgtctt

SEQ ID NO: 368329 - DNA, 30 bp, Artificial Sequence
  Synthetic oligonucleotide
aatgtaatggttggtttactggaatgtctt

SEQ ID NO: 368330 - DNA, 30 bp, Artificial Sequence
  Synthetic oligonucleotide
ggcctagatgatatagggcagacatgtctt

SEQ ID NO: 368331 - DNA, 30 bp, Artificial Sequence
  Synthetic oligonucleotide
gacctgggtaaagaaacttcaccctgtctt

SEQ ID NO: 368332 - DNA, 30 bp, Artificial Sequence
  Synthetic oligonucleotide
tcttccgaaatatcgaacgcggcctgtctt

SEQ ID NO: 368333 - DNA, 30 bp, Artificial Sequence
  Synthetic oligonucleotide
tgcggcgagcacccttatctttagtgtctt

SEQ ID NO: 368334 - DNA, 30 bp, Artificial Sequence
  Synthetic oligonucleotide
gccgctcgtgttatatcgaattggtgtctt

SEQ ID NO: 368335 - DNA, 30 bp, Artificial Sequence
  Synthetic oligonucleotide
acccctccaatgttatctctgccttgtctt

SEQ ID NO: 368336 - DNA, 30 bp, Artificial Sequence
  Synthetic oligonucleotide
ttgttgtattcattccttagttcttgtctt

SEQ ID NO: 368337 - DNA, 30 bp, Artificial Sequence
  Synthetic oligonucleotide
gggaacttcgaaacatatatttgttgtctt

SEQ ID NO: 368338 - DNA, 30 bp, Artificial Sequence
  Synthetic oligonucleotide
taatccacccggatgtcgatccagattctt

SEQ ID NO: 368339 - DNA, 30 bp, Artificial Sequence
  Synthetic oligonucleotide
gcggacgtgatactagggctaccgattctt

SEQ ID NO: 368340 - DNA, 30 bp, Artificial Sequence
  Synthetic oligonucleotide
caagaatcaccggttctagctctgattctt

SEQ ID NO: 368341 - DNA, 30 bp, Artificial Sequence
  Synthetic oligonucleotide
gtactattcgtactgctcagtactattctt

SEQ ID NO: 368342 - DNA, 30 bp, Artificial Sequence
  Synthetic oligonucleotide
tagtcggcgcacagcataaattcgcttctt

SEQ ID NO: 368343 - DNA, 30 bp, Artificial Sequence
  Synthetic oligonucleotide
taagaccagaacgcaagctgaattcttctt

SEQ ID NO: 368344 - DNA, 30 bp, Artificial Sequence
  Synthetic oligonucleotide
acgcgataaccggagtgtgatcaagttctt

SEQ ID NO: 368345 - DNA, 30 bp, Artificial Sequence
  Synthetic oligonucleotide
taacgcagacgtgagaggtaataagttctt

SEQ ID NO: 368346 - DNA, 30 bp, Artificial Sequence
  Synthetic oligonucleotide
acattgatataaggagtcgtgtgagttctt

SEQ ID NO: 368347 - DNA, 30 bp, Artificial Sequence
  Synthetic oligonucleotide
tacagccgtgactaggtatattgagttctt

SEQ ID NO: 368348 - DNA, 30 bp, Artificial Sequence
  Synthetic oligonucleotide
tgtgtatacacaagggaacaactcgttctt

SEQ ID NO: 368349 - DNA, 30 bp, Artificial Sequence
  Synthetic oligonucleotide
atcgcaggtcctagctcagacttggttctt

SEQ ID NO: 368350 - DNA, 30 bp, Artificial Sequence
  Synthetic oligonucleotide
tcacagttccacctataagcacgctttctt

SEQ ID NO: 368351 - DNA, 30 bp, Artificial Sequence
  Synthetic oligonucleotide
gtatcaagagtgtattggaaatgctttctt

SEQ ID NO: 368352 - DNA, 30 bp, Artificial Sequence
  Synthetic oligonucleotide
tgcgtgatctattaacaagaccagtttctt

SEQ ID NO: 368353 - DNA, 30 bp, Artificial Sequence
  Synthetic oligonucleotide
catttccaccaacgagcctggctgtttctt

SEQ ID NO: 368354 - DNA, 30 bp, Artificial Sequence
  Synthetic oligonucleotide
gacatatgtggacgccgtccagcttttctt

SEQ ID NO: 368355 - DNA, 30 bp, Artificial Sequence
  Synthetic oligonucleotide
acagtaacagcatgtcgaaaattttttctt

SEQ ID NO: 368356 - DNA, 30 bp, Artificial Sequence
  Synthetic oligonucleotide
ggataaacggaggaaacaataacaaaagtt

SEQ ID NO: 368357 - DNA, 30 bp, Artificial Sequence
  Synthetic oligonucleotide
taatctagaggtcaggcaagatgaaaagtt

SEQ ID NO: 368358 - DNA, 30 bp, Artificial Sequence
  Synthetic oligonucleotide
aaaagtcgaagctctggaagtggcaaagtt

SEQ ID NO: 368359 - DNA, 30 bp, Artificial Sequence
  Synthetic oligonucleotide
ggtccgccgggtcccgtccactgcaaagtt

SEQ ID NO: 368360 - DNA, 30 bp, Artificial Sequence
  Synthetic oligonucleotide
gcatctaaccactgtggaacagtcaaagtt

SEQ ID NO: 368361 - DNA, 30 bp, Artificial Sequence
  Synthetic oligonucleotide
tttgccaccagtggtaagggggggaaagtt

SEQ ID NO: 368362 - DNA, 30 bp, Artificial Sequence
  Synthetic oligonucleotide
cgtatctcagaaggacctagatataaagtt

SEQ ID NO: 368363 - DNA, 30 bp, Artificial Sequence
  Synthetic oligonucleotide
tcactgtacagttagcagtgacaacaagtt

SEQ ID NO: 368364 - DNA, 30 bp, Artificial Sequence
  Synthetic oligonucleotide
ggttacacaaactcatgtgacacacaagtt

SEQ ID NO: 368365 - DNA, 30 bp, Artificial Sequence
  Synthetic oligonucleotide
aagcccccacaagtatgtattgcacaagtt

SEQ ID NO: 368366 - DNA, 30 bp, Artificial Sequence
  Synthetic oligonucleotide
ggaagtacgtattattataactaccaagtt

SEQ ID NO: 368367 - DNA, 30 bp, Artificial Sequence
  Synthetic oligonucleotide
acaccactaggcaaccaggttgggcaagtt

SEQ ID NO: 368368 - DNA, 30 bp, Artificial Sequence
  Synthetic oligonucleotide
cctgttggtagtcacgacatttggcaagtt

SEQ ID NO: 368369 - DNA, 30 bp, Artificial Sequence
  Synthetic oligonucleotide
gcaactagtgatcgcgggccatatcaagtt

SEQ ID NO: 368370 - DNA, 30 bp, Artificial Sequence
  Synthetic oligonucleotide
gctgttatataccacgtgcatcctcaagtt

SEQ ID NO: 368371 - DNA, 30 bp, Artificial Sequence
  Synthetic oligonucleotide
aagtgagaaagcgcaaattatgttcaagtt

SEQ ID NO: 368372 - DNA, 30 bp, Artificial Sequence
  Synthetic oligonucleotide
gttgacaggagatcttatttgggagaagtt

SEQ ID NO: 368373 - DNA, 30 bp, Artificial Sequence
  Synthetic oligonucleotide
atggatcttatcagggccacagtagaagtt

SEQ ID NO: 368374 - DNA, 30 bp, Artificial Sequence
  Synthetic oligonucleotide
ctacagtacttttcttgagctaacgaagtt

SEQ ID NO: 368375 - DNA, 30 bp, Artificial Sequence
  Synthetic oligonucleotide
agaaattgaagtagcgattgagacgaagtt

SEQ ID NO: 368376 - DNA, 30 bp, Artificial Sequence
  Synthetic oligonucleotide
ccggttttttaaaagaacctaaccgaagtt

SEQ ID NO: 368377 - DNA, 30 bp, Artificial Sequence
  Synthetic oligonucleotide
aattgagccactactagttggtcggaagtt

SEQ ID NO: 368378 - DNA, 30 bp, Artificial Sequence
  Synthetic oligonucleotide
ggtggggcagcttacgtagtacgtgaagtt

SEQ ID NO: 368379 - DNA, 30 bp, Artificial Sequence
  Synthetic oligonucleotide
tatagccgcgtcggaagttaatgataagtt

SEQ ID NO: 368380 - DNA, 30 bp, Artificial Sequence
  Synthetic oligonucleotide
gtacccagcgtatctggacactgataagtt

SEQ ID NO: 368381 - DNA, 30 bp, Artificial Sequence
  Synthetic oligonucleotide
aggtattaccaattagccttcatataagtt

SEQ ID NO: 368382 - DNA, 30 bp, Artificial Sequence
  Synthetic oligonucleotide
ttcgatattcatgcaaagtataactaagtt

SEQ ID NO: 368383 - DNA, 30 bp, Artificial Sequence
  Synthetic oligonucleotide
gcttatgagtacctattttactcctaagtt

SEQ ID NO: 368384 - DNA, 30 bp, Artificial Sequence
  Synthetic oligonucleotide
cgatcagaagccctcctcaggcgctaagtt

SEQ ID NO: 368385 - DNA, 30 bp, Artificial Sequence
  Synthetic oligonucleotide
acaggtctaacgccaacataattctaagtt

SEQ ID NO: 368386 - DNA, 30 bp, Artificial Sequence
  Synthetic oligonucleotide
tctccttactcctgcttgttgcgttaagtt

SEQ ID NO: 368387 - DNA, 30 bp, Artificial Sequence
  Synthetic oligonucleotide
atgggtgatcgtcatagcagcttaacagtt

SEQ ID NO: 368388 - DNA, 30 bp, Artificial Sequence
  Synthetic oligonucleotide
cgcgttctacagcgcagtgtccggacagtt

SEQ ID NO: 368389 - DNA, 30 bp, Artificial Sequence
  Synthetic oligonucleotide
cggagctattgtaaaacgcgcatgacagtt

SEQ ID NO: 368390 - DNA, 30 bp, Artificial Sequence
  Synthetic oligonucleotide
tgagtaccagcatcatccgatgctacagtt

SEQ ID NO: 368391 - DNA, 30 bp, Artificial Sequence
  Synthetic oligonucleotide
actgcgctgtaacacatgcgttttacagtt

SEQ ID NO: 368392 - DNA, 30 bp, Artificial Sequence
  Synthetic oligonucleotide
ggtttaacggcctttgatttacaaccagtt

SEQ ID NO: 368393 - DNA, 30 bp, Artificial Sequence
  Synthetic oligonucleotide
cattgcaacatactaatcaatctaccagtt

SEQ ID NO: 368394 - DNA, 30 bp, Artificial Sequence
  Synthetic oligonucleotide
ggagcatgcaaggatacgattttcccagtt

SEQ ID NO: 368395 - DNA, 30 bp, Artificial Sequence
  Synthetic oligonucleotide
caaaatgtcaaaagaacgagatagccagtt

SEQ ID NO: 368396 - DNA, 30 bp, Artificial Sequence
  Synthetic oligonucleotide
accttgtgtacatatcgcgcaagtccagtt

SEQ ID NO: 368397 - DNA, 30 bp, Artificial Sequence
  Synthetic oligonucleotide
ttgcgtcttggtagcttcaaacgtccagtt

SEQ ID NO: 368398 - DNA, 30 bp, Artificial Sequence
  Synthetic oligonucleotide
aagaacccgctgcgaaataatcacgcagtt

SEQ ID NO: 368399 - DNA, 30 bp, Artificial Sequence
  Synthetic oligonucleotide
ggatgcgtaaaaacggggtgctacgcagtt

SEQ ID NO: 368400 - DNA, 30 bp, Artificial Sequence
  Synthetic oligonucleotide
ccttaatttgtcgcggtgtcatcggcagtt

SEQ ID NO: 368401 - DNA, 30 bp, Artificial Sequence
  Synthetic oligonucleotide
gaatatgcgcgcccgtcatagcttgcagtt

SEQ ID NO: 368402 - DNA, 30 bp, Artificial Sequence
  Synthetic oligonucleotide
agtcttgcgcaacgacaaggaaactcagtt

SEQ ID NO: 368403 - DNA, 30 bp, Artificial Sequence
  Synthetic oligonucleotide
gcaagcccttccccttggcgaacgtcagtt

SEQ ID NO: 368404 - DNA, 30 bp, Artificial Sequence
  Synthetic oligonucleotide
cccctactaatctatagagattcgtcagtt

SEQ ID NO: 368405 - DNA, 30 bp, Artificial Sequence
  Synthetic oligonucleotide
cgttacgaagtcgcgtcaaacgattcagtt

SEQ ID NO: 368406 - DNA, 30 bp, Artificial Sequence
  Synthetic oligonucleotide
gacgctcaatccgtgctggggccaagagtt

SEQ ID NO: 368407 - DNA, 30 bp, Artificial Sequence
  Synthetic oligonucleotide
gggggccctagcacagtaccattaagagtt

SEQ ID NO: 368408 - DNA, 30 bp, Artificial Sequence
  Synthetic oligonucleotide
ggtttcgagtagttgacgactaacagagtt

SEQ ID NO: 368409 - DNA, 30 bp, Artificial Sequence
  Synthetic oligonucleotide
gcacgatggatgttcgctgccgacagagtt

SEQ ID NO: 368410 - DNA, 30 bp, Artificial Sequence
  Synthetic oligonucleotide
cttaggcaattctgtagcttggacagagtt

SEQ ID NO: 368411 - DNA, 30 bp, Artificial Sequence
  Synthetic oligonucleotide
gattcccggcgggcgcatgaatgcagagtt

SEQ ID NO: 368412 - DNA, 30 bp, Artificial Sequence
  Synthetic oligonucleotide
gaaacggtaagctgtgagacaatgagagtt

SEQ ID NO: 368413 - DNA, 30 bp, Artificial Sequence
  Synthetic oligonucleotide
ggccaggctgtgacgagaaccactagagtt

SEQ ID NO: 368414 - DNA, 30 bp, Artificial Sequence
  Synthetic oligonucleotide
tcggtatggactcaggaagcttaacgagtt

SEQ ID NO: 368415 - DNA, 30 bp, Artificial Sequence
  Synthetic oligonucleotide
ttgagacgcacatcagcgtaacgacgagtt

SEQ ID NO: 368416 - DNA, 30 bp, Artificial Sequence
  Synthetic oligonucleotide
tagagtctttccgcgcttatatgacgagtt

SEQ ID NO: 368417 - DNA, 30 bp, Artificial Sequence
  Synthetic oligonucleotide
gtgcaagtcactagccgtctctcccgagtt

SEQ ID NO: 368418 - DNA, 30 bp, Artificial Sequence
  Synthetic oligonucleotide
gatttgaaggtcggcattcagccgcgagtt

SEQ ID NO: 368419 - DNA, 30 bp, Artificial Sequence
  Synthetic oligonucleotide
gactattgttgtcgaactcctgatcgagtt

SEQ ID NO: 368420 - DNA, 30 bp, Artificial Sequence
  Synthetic oligonucleotide
ctcaccgacttgaaactcgattatcgagtt

SEQ ID NO: 368421 - DNA, 30 bp, Artificial Sequence
  Synthetic oligonucleotide
cccgctgtgggggccgcggacagtcgagtt

SEQ ID NO: 368422 - DNA, 30 bp, Artificial Sequence
  Synthetic oligonucleotide
tatattctatgtctccgtggttgtcgagtt

SEQ ID NO: 368423 - DNA, 30 bp, Artificial Sequence
  Synthetic oligonucleotide
tactgcgatcgcagatggatagcaggagtt

SEQ ID NO: 368424 - DNA, 30 bp, Artificial Sequence
  Synthetic oligonucleotide
aagcattatcactaaagttttggaggagtt

SEQ ID NO: 368425 - DNA, 30 bp, Artificial Sequence
  Synthetic oligonucleotide
catgtgccgtggacggcgttccacggagtt

SEQ ID NO: 368426 - DNA, 30 bp, Artificial Sequence
  Synthetic oligonucleotide
gccatccgacattataatcagagcggagtt

SEQ ID NO: 368427 - DNA, 30 bp, Artificial Sequence
  Synthetic oligonucleotide
tttgtaacaatcccggcatttcgcggagtt

SEQ ID NO: 368428 - DNA, 29 bp, Artificial Sequence
  Synthetic oligonucleotide
ctgtgcagagccggctcccctgcggagtt

SEQ ID NO: 368429 - DNA, 30 bp, Artificial Sequence
  Synthetic oligonucleotide
gctagaccgccacactttggctgcggagtt

SEQ ID NO: 368430 - DNA, 30 bp, Artificial Sequence
  Synthetic oligonucleotide
acgaaactaaccgttatacggtttggagtt

SEQ ID NO: 368431 - DNA, 30 bp, Artificial Sequence
  Synthetic oligonucleotide
ctatgaagggccccatgcgcatcatgagtt

SEQ ID NO: 368432 - DNA, 30 bp, Artificial Sequence
  Synthetic oligonucleotide
aactgggggacatggctgaaattctgagtt

SEQ ID NO: 368433 - DNA, 30 bp, Artificial Sequence
  Synthetic oligonucleotide
cacttgtaccgtgcaatgtggcagtgagtt

SEQ ID NO: 368434 - DNA, 30 bp, Artificial Sequence
  Synthetic oligonucleotide
gtctaccagtcacactacggtcgttgagtt

SEQ ID NO: 368435 - DNA, 30 bp, Artificial Sequence
  Synthetic oligonucleotide
tttatctttactctcgtgaatctttgagtt

SEQ ID NO: 368436 - DNA, 30 bp, Artificial Sequence
  Synthetic oligonucleotide
aaattctgggctgaacacggccgaatagtt

SEQ ID NO: 368437 - DNA, 30 bp, Artificial Sequence
  Synthetic oligonucleotide
gggatacccaaccaatggggaataatagtt

SEQ ID NO: 368438 - DNA, 30 bp, Artificial Sequence
  Synthetic oligonucleotide
ctcttgcattacctttcactaataatagtt

SEQ ID NO: 368439 - DNA, 30 bp, Artificial Sequence
  Synthetic oligonucleotide
tgcgtgcggatgagctcggtaagcatagtt

SEQ ID NO: 368440 - DNA, 30 bp, Artificial Sequence
  Synthetic oligonucleotide
ttaatcgttacaagaaatgtaagcatagtt

SEQ ID NO: 368441 - DNA, 30 bp, Artificial Sequence
  Synthetic oligonucleotide
tttgatagattatacgatgtatggatagtt

SEQ ID NO: 368442 - DNA, 30 bp, Artificial Sequence
  Synthetic oligonucleotide
gcaggccaggatattacgctcatgatagtt

SEQ ID NO: 368443 - DNA, 30 bp, Artificial Sequence
  Synthetic oligonucleotide
aagcatccagcggtacataagagactagtt

SEQ ID NO: 368444 - DNA, 30 bp, Artificial Sequence
  Synthetic oligonucleotide
cagtctgtccccgggtagacgtccctagtt

SEQ ID NO: 368445 - DNA, 30 bp, Artificial Sequence
  Synthetic oligonucleotide
ttgtttagtcgagcgcaggggcgcctagtt

SEQ ID NO: 368446 - DNA, 30 bp, Artificial Sequence
  Synthetic oligonucleotide
atgcatcgttcttgcgggataacgctagtt

SEQ ID NO: 368447 - DNA, 30 bp, Artificial Sequence
  Synthetic oligonucleotide
ttttcacggccgcccctcaacgatctagtt

SEQ ID NO: 368448 - DNA, 30 bp, Artificial Sequence
  Synthetic oligonucleotide
aactcctatgtaccgatgatagcagtagtt

SEQ ID NO: 368449 - DNA, 30 bp, Artificial Sequence
  Synthetic oligonucleotide
ataagctggtgggaaagtttcgcagtagtt

SEQ ID NO: 368450 - DNA, 30 bp, Artificial Sequence
  Synthetic oligonucleotide
gtagaggccacgtttatctcgcgagtagtt

SEQ ID NO: 368451 - DNA, 30 bp, Artificial Sequence
  Synthetic oligonucleotide
acttaaacgatcaaatcgtggactgtagtt

SEQ ID NO: 368452 - DNA, 30 bp, Artificial Sequence
  Synthetic oligonucleotide
ggagtggccgctaaatgagacgttgtagtt

SEQ ID NO: 368453 - DNA, 30 bp, Artificial Sequence
  Synthetic oligonucleotide
agtttcttaaaattaataacctaattagtt

SEQ ID NO: 368454 - DNA, 30 bp, Artificial Sequence
  Synthetic oligonucleotide
ttctgaagtttactacagccagacttagtt

SEQ ID NO: 368455 - DNA, 30 bp, Artificial Sequence
  Synthetic oligonucleotide
gtctggcagtaactgcacggtctcttagtt

SEQ ID NO: 368456 - DNA, 30 bp, Artificial Sequence
  Synthetic oligonucleotide
atataaatcatggaaaagggggtcttagtt

SEQ ID NO: 368457 - DNA, 30 bp, Artificial Sequence
  Synthetic oligonucleotide
atgttgtacgctcagtgcctatagttagtt

SEQ ID NO: 368458 - DNA, 30 bp, Artificial Sequence
  Synthetic oligonucleotide
actagcgttgatcagaccatcttgttagtt

SEQ ID NO: 368459 - DNA, 30 bp, Artificial Sequence
  Synthetic oligonucleotide
actatcggccaattggtaagaggtttagtt

SEQ ID NO: 368460 - DNA, 30 bp, Artificial Sequence
  Synthetic oligonucleotide
ctaataagacgctataaaaaagaaaacgtt

SEQ ID NO: 368461 - DNA, 30 bp, Artificial Sequence
  Synthetic oligonucleotide
gccactcttttaggacaccggacaaacgtt

SEQ ID NO: 368462 - DNA, 30 bp, Artificial Sequence
  Synthetic oligonucleotide
ggggcaacatagccttttaaccgaaacgtt

SEQ ID NO: 368463 - DNA, 30 bp, Artificial Sequence
  Synthetic oligonucleotide
ggcgtggcgctcgtacgtgtggtaaacgtt

SEQ ID NO: 368464 - DNA, 30 bp, Artificial Sequence
  Synthetic oligonucleotide
tagcacgctaagctagactgccgcaacgtt

SEQ ID NO: 368465 - DNA, 30 bp, Artificial Sequence
  Synthetic oligonucleotide
tattgggaaataagctcgctactcaacgtt

SEQ ID NO: 368466 - DNA, 30 bp, Artificial Sequence
  Synthetic oligonucleotide
aaggggcaaacttgcgttattaagaacgtt

SEQ ID NO: 368467 - DNA, 30 bp, Artificial Sequence
  Synthetic oligonucleotide
tgttgacacacacggggaatcagacacgtt

SEQ ID NO: 368468 - DNA, 30 bp, Artificial Sequence
  Synthetic oligonucleotide
gctcaacgatatcgtacattcgggcacgtt

SEQ ID NO: 368469 - DNA, 30 bp, Artificial Sequence
  Synthetic oligonucleotide
tatggttgtggcccgaggaaagctcacgtt

SEQ ID NO: 368470 - DNA, 30 bp, Artificial Sequence
  Synthetic oligonucleotide
atgacataggattctagggtcaaagacgtt

SEQ ID NO: 368471 - DNA, 30 bp, Artificial Sequence
  Synthetic oligonucleotide
taaaatatacctgagctccacatagacgtt

SEQ ID NO: 368472 - DNA, 30 bp, Artificial Sequence
  Synthetic oligonucleotide
gttcactgatttgtcctgctgaaggacgtt

SEQ ID NO: 368473 - DNA, 31 bp, Artificial Sequence
  Synthetic oligonucleotide
gtgtactaggcccgctcgaccgttggacgtt

SEQ ID NO: 368474 - DNA, 30 bp, Artificial Sequence
  Synthetic oligonucleotide
ttgtgcgcgtgtggaaaagatgctgacgtt

SEQ ID NO: 368475 - DNA, 30 bp, Artificial Sequence
  Synthetic oligonucleotide
aacggctaaatagttgtcgcgtctgacgtt

SEQ ID NO: 368476 - DNA, 30 bp, Artificial Sequence
  Synthetic oligonucleotide
cgacccagtggctactcccacagtgacgtt

SEQ ID NO: 368477 - DNA, 30 bp, Artificial Sequence
  Synthetic oligonucleotide
agttaagtatcacgttatccgagtgacgtt

SEQ ID NO: 368478 - DNA, 30 bp, Artificial Sequence
  Synthetic oligonucleotide
aaaggttaatctttggactcctgtgacgtt

SEQ ID NO: 368479 - DNA, 30 bp, Artificial Sequence
  Synthetic oligonucleotide
agatagaagggtcgggtgggttactacgtt

SEQ ID NO: 368480 - DNA, 30 bp, Artificial Sequence
  Synthetic oligonucleotide
tgcagtggtgatgtactaacgggctacgtt

SEQ ID NO: 368481 - DNA, 30 bp, Artificial Sequence
  Synthetic oligonucleotide
tgttgatcaaattgtttaatagagtacgtt

SEQ ID NO: 368482 - DNA, 30 bp, Artificial Sequence
  Synthetic oligonucleotide
cagtggtggatcaacactatgacgtacgtt

SEQ ID NO: 368483 - DNA, 30 bp, Artificial Sequence
  Synthetic oligonucleotide
gcacggatactggtggccctccattacgtt

SEQ ID NO: 368484 - DNA, 30 bp, Artificial Sequence
  Synthetic oligonucleotide
aacgtgttggtgtcaatcagcgcttacgtt

SEQ ID NO: 368485 - DNA, 30 bp, Artificial Sequence
  Synthetic oligonucleotide
cgaagctcattgcttggtcggttttacgtt

SEQ ID NO: 368486 - DNA, 30 bp, Artificial Sequence
  Synthetic oligonucleotide
acatgcgggattaacactctgtaaaccgtt

SEQ ID NO: 368487 - DNA, 30 bp, Artificial Sequence
  Synthetic oligonucleotide
tttcgtgggataatgagcatacacaccgtt

SEQ ID NO: 368488 - DNA, 30 bp, Artificial Sequence
  Synthetic oligonucleotide
cttgaaccagaatcagttccacccaccgtt

SEQ ID NO: 368489 - DNA, 30 bp, Artificial Sequence
  Synthetic oligonucleotide
ttacgattacgggcaggcagtgcgaccgtt

SEQ ID NO: 368490 - DNA, 30 bp, Artificial Sequence
  Synthetic oligonucleotide
atcctgttgccattcagtccaatgaccgtt

SEQ ID NO: 368491 - DNA, 30 bp, Artificial Sequence
  Synthetic oligonucleotide
gagaatgtagaaactagccacatgaccgtt

SEQ ID NO: 368492 - DNA, 30 bp, Artificial Sequence
  Synthetic oligonucleotide
gcactagtgggtctcaactcgtcgcccgtt

SEQ ID NO: 368493 - DNA, 30 bp, Artificial Sequence
  Synthetic oligonucleotide
atacttagggtgactattgaagacgccgtt

SEQ ID NO: 368494 - DNA, 30 bp, Artificial Sequence
  Synthetic oligonucleotide
ggccgacacagggggcgaaaggacgccgtt

SEQ ID NO: 368495 - DNA, 30 bp, Artificial Sequence
  Synthetic oligonucleotide
gtcctcggcttaaataattggttggccgtt

SEQ ID NO: 368496 - DNA, 30 bp, Artificial Sequence
  Synthetic oligonucleotide
tggctgactacggggcatgtgcctgccgtt

SEQ ID NO: 368497 - DNA, 30 bp, Artificial Sequence
  Synthetic oligonucleotide
gttacggcaaatccgaagagtgaatccgtt

SEQ ID NO: 368498 - DNA, 30 bp, Artificial Sequence
  Synthetic oligonucleotide
tgggtcgcgattaaagagtctgtatccgtt

SEQ ID NO: 368499 - DNA, 30 bp, Artificial Sequence
  Synthetic oligonucleotide
ctttcacagccagaaagcgttaggtccgtt

SEQ ID NO: 368500 - DNA, 30 bp, Artificial Sequence
  Synthetic oligonucleotide
aagtaaatgaggcgaggcactctttccgtt

SEQ ID NO: 368501 - DNA, 30 bp, Artificial Sequence
  Synthetic oligonucleotide
gcagttggtgattaatgaacggcaagcgtt

SEQ ID NO: 368502 - DNA, 30 bp, Artificial Sequence
  Synthetic oligonucleotide
ggagtagttaggataagtatcgtaagcgtt

SEQ ID NO: 368503 - DNA, 30 bp, Artificial Sequence
  Synthetic oligonucleotide
agtgttaaagagagtcacgacaatagcgtt

SEQ ID NO: 368504 - DNA, 30 bp, Artificial Sequence
  Synthetic oligonucleotide
tttgcgtccccaagcctggtgatacgcgtt

SEQ ID NO: 368505 - DNA, 30 bp, Artificial Sequence
  Synthetic oligonucleotide
aagagaggagtaaaggactcaccgcgcgtt

SEQ ID NO: 368506 - DNA, 30 bp, Artificial Sequence
  Synthetic oligonucleotide
atcaatcacacagacgtgcagtaaggcgtt

SEQ ID NO: 368507 - DNA, 30 bp, Artificial Sequence
  Synthetic oligonucleotide
gcacctacagggtcatcggtcacaggcgtt

SEQ ID NO: 368508 - DNA, 30 bp, Artificial Sequence
  Synthetic oligonucleotide
gcgttcagtcgaagcctggagtcaggcgtt

SEQ ID NO: 368509 - DNA, 30 bp, Artificial Sequence
  Synthetic oligonucleotide
tggctagcaagatgctgatttatcggcgtt

SEQ ID NO: 368510 - DNA, 29 bp, Artificial Sequence
  Synthetic oligonucleotide
cgacaatctgatttgcgccacagggcgtt

SEQ ID NO: 368511 - DNA, 30 bp, Artificial Sequence
  Synthetic oligonucleotide
gcgtctagggtactccacactacatgcgtt

SEQ ID NO: 368512 - DNA, 30 bp, Artificial Sequence
  Synthetic oligonucleotide
cgccgcacatagttgatcatcccatgcgtt

SEQ ID NO: 368513 - DNA, 30 bp, Artificial Sequence
  Synthetic oligonucleotide
gggggccctagtaagggtaacgcatgcgtt

SEQ ID NO: 368514 - DNA, 30 bp, Artificial Sequence
  Synthetic oligonucleotide
actccttgtgatggttgtggaatatgcgtt

SEQ ID NO: 368515 - DNA, 30 bp, Artificial Sequence
  Synthetic oligonucleotide
ggaaaattacaaagtgcaagcgagtgcgtt

SEQ ID NO: 368516 - DNA, 30 bp, Artificial Sequence
  Synthetic oligonucleotide
gggaggcaaagcaacgggaagaggtgcgtt

SEQ ID NO: 368517 - DNA, 30 bp, Artificial Sequence
  Synthetic oligonucleotide
catgctagtcacatgcaacgtctgtgcgtt

SEQ ID NO: 368518 - DNA, 30 bp, Artificial Sequence
  Synthetic oligonucleotide
tctccgtaccactgatagttggattgcgtt

SEQ ID NO: 368519 - DNA, 30 bp, Artificial Sequence
  Synthetic oligonucleotide
gcatcgcataaattacagtaaggttgcgtt

SEQ ID NO: 368520 - DNA, 30 bp, Artificial Sequence
  Synthetic oligonucleotide
tctctaaaccgtaggcacggtatttgcgtt

SEQ ID NO: 368521 - DNA, 30 bp, Artificial Sequence
  Synthetic oligonucleotide
tgttgtggggactgctcctacttttgcgtt

SEQ ID NO: 368522 - DNA, 30 bp, Artificial Sequence
  Synthetic oligonucleotide
attgcaagtatgtagactagatgcatcgtt

SEQ ID NO: 368523 - DNA, 30 bp, Artificial Sequence
  Synthetic oligonucleotide
ccacgtcggtctatcgcatatagactcgtt

SEQ ID NO: 368524 - DNA, 30 bp, Artificial Sequence
  Synthetic oligonucleotide
ccgggggtagcatcgatcgatttcctcgtt

SEQ ID NO: 368525 - DNA, 30 bp, Artificial Sequence
  Synthetic oligonucleotide
tagacgtctaaggccaccggggtgctcgtt

SEQ ID NO: 368526 - DNA, 30 bp, Artificial Sequence
  Synthetic oligonucleotide
aagcgatcacaaaagtcgacctctctcgtt

SEQ ID NO: 368527 - DNA, 30 bp, Artificial Sequence
  Synthetic oligonucleotide
aagtttgtatgggtatttcgccgtctcgtt

SEQ ID NO: 368528 - DNA, 30 bp, Artificial Sequence
  Synthetic oligonucleotide
gagttgcccgtagggcagaaggaagtcgtt

SEQ ID NO: 368529 - DNA, 30 bp, Artificial Sequence
  Synthetic oligonucleotide
gactgttgctgaagaatccaccgagtcgtt

SEQ ID NO: 368530 - DNA, 30 bp, Artificial Sequence
  Synthetic oligonucleotide
aaagaatgatgcgtctagcaaagggtcgtt

SEQ ID NO: 368531 - DNA, 30 bp, Artificial Sequence
  Synthetic oligonucleotide
ctacagtagaaccatccagcgggggtcgtt

SEQ ID NO: 368532 - DNA, 30 bp, Artificial Sequence
  Synthetic oligonucleotide
tcagatttataagatagatactatgtcgtt

SEQ ID NO: 368533 - DNA, 30 bp, Artificial Sequence
  Synthetic oligonucleotide
gcaaagggcggagatgttaaccctgtcgtt

SEQ ID NO: 368534 - DNA, 30 bp, Artificial Sequence
  Synthetic oligonucleotide
acgctgcagcatgcccaatagtgtgtcgtt

SEQ ID NO: 368535 - DNA, 30 bp, Artificial Sequence
  Synthetic oligonucleotide
gtcagccgctactggtcgcgatacttcgtt

SEQ ID NO: 368536 - DNA, 30 bp, Artificial Sequence
  Synthetic oligonucleotide
gctggggatccctgggtcgaactcttcgtt

SEQ ID NO: 368537 - DNA, 30 bp, Artificial Sequence
  Synthetic oligonucleotide
atgtaagagcaaacgcttaatagtttcgtt

SEQ ID NO: 368538 - DNA, 30 bp, Artificial Sequence
  Synthetic oligonucleotide
aagtcacacttaaagtccctacaaaaggtt

SEQ ID NO: 368539 - DNA, 30 bp, Artificial Sequence
  Synthetic oligonucleotide
gcactgccggctgatagcgaggcaaaggtt

SEQ ID NO: 368540 - DNA, 30 bp, Artificial Sequence
  Synthetic oligonucleotide
cttttactaacagggcctaatgcaaaggtt

SEQ ID NO: 368541 - DNA, 30 bp, Artificial Sequence
  Synthetic oligonucleotide
tcaactttggtgcgactggaccgaaaggtt

SEQ ID NO: 368542 - DNA, 30 bp, Artificial Sequence
  Synthetic oligonucleotide
ccgggttcctgaatctcgtggctaaaggtt

SEQ ID NO: 368543 - DNA, 30 bp, Artificial Sequence
  Synthetic oligonucleotide
ttgtttaaaagaggtcacggattcaaggtt

SEQ ID NO: 368544 - DNA, 30 bp, Artificial Sequence
  Synthetic oligonucleotide
ccagcccggatgagtatagctgggaaggtt

SEQ ID NO: 368545 - DNA, 30 bp, Artificial Sequence
  Synthetic oligonucleotide
cgtcttttagccgtgcgtcccgaacaggtt

SEQ ID NO: 368546 - DNA, 30 bp, Artificial Sequence
  Synthetic oligonucleotide
gcttattatcgggtaccctgcatacaggtt

SEQ ID NO: 368547 - DNA, 30 bp, Artificial Sequence
  Synthetic oligonucleotide
tgacccgaataccactaaggttgccaggtt

SEQ ID NO: 368548 - DNA, 30 bp, Artificial Sequence
  Synthetic oligonucleotide
cccctagttgttatatggcccaatcaggtt

SEQ ID NO: 368549 - DNA, 30 bp, Artificial Sequence
  Synthetic oligonucleotide
aggaatgaacatgtcattcctactcaggtt

SEQ ID NO: 368550 - DNA, 30 bp, Artificial Sequence
  Synthetic oligonucleotide
catgacagcccggaagtacgctttcaggtt

SEQ ID NO: 368551 - DNA, 30 bp, Artificial Sequence
  Synthetic oligonucleotide
agccattaatgttccggaataacagaggtt

SEQ ID NO: 368552 - DNA, 30 bp, Artificial Sequence
  Synthetic oligonucleotide
ctccgatgtaaaccatacgcaagggaggtt

SEQ ID NO: 368553 - DNA, 30 bp, Artificial Sequence
  Synthetic oligonucleotide
atgctatgtactatttgaggtatggaggtt

SEQ ID NO: 368554 - DNA, 30 bp, Artificial Sequence
  Synthetic oligonucleotide
catccccgactctcacgtaacgatgaggtt

SEQ ID NO: 368555 - DNA, 30 bp, Artificial Sequence
  Synthetic oligonucleotide
gcctccgtttggaaacgatagggtgaggtt

SEQ ID NO: 368556 - DNA, 30 bp, Artificial Sequence
  Synthetic oligonucleotide
aaaggcatgcaaaaacgacctcttgaggtt

SEQ ID NO: 368557 - DNA, 30 bp, Artificial Sequence
  Synthetic oligonucleotide
atctactagccaacgttcgtacgctaggtt

SEQ ID NO: 368558 - DNA, 30 bp, Artificial Sequence
  Synthetic oligonucleotide
gaactccggtgggctgccatttgctaggtt

SEQ ID NO: 368559 - DNA, 30 bp, Artificial Sequence
  Synthetic oligonucleotide
aaccgtgcaagtcaaagccgcccgtaggtt

SEQ ID NO: 368560 - DNA, 30 bp, Artificial Sequence
  Synthetic oligonucleotide
tcggataaaggaacgtatgttccgtaggtt

SEQ ID NO: 368561 - DNA, 30 bp, Artificial Sequence
  Synthetic oligonucleotide
ggttatagagagctatgccggatgtaggtt

SEQ ID NO: 368562 - DNA, 30 bp, Artificial Sequence
  Synthetic oligonucleotide
gcccatttgaattgtgctcgcttgtaggtt

SEQ ID NO: 368563 - DNA, 30 bp, Artificial Sequence
  Synthetic oligonucleotide
taagaaccgatgctattggcacgttaggtt

SEQ ID NO: 368564 - DNA, 30 bp, Artificial Sequence
  Synthetic oligonucleotide
ctagaccaagcgatctgtattcaaacggtt

SEQ ID NO: 368565 - DNA, 30 bp, Artificial Sequence
  Synthetic oligonucleotide
ttcgtaagactccgtatatggtcaacggtt

SEQ ID NO: 368566 - DNA, 30 bp, Artificial Sequence
  Synthetic oligonucleotide
atatgtcatcatgcacactcgataacggtt

SEQ ID NO: 368567 - DNA, 30 bp, Artificial Sequence
  Synthetic oligonucleotide
catagagcaagccaatgcttacagacggtt

SEQ ID NO: 368568 - DNA, 30 bp, Artificial Sequence
  Synthetic oligonucleotide
ctcaggggcaggaggcagccggagacggtt

SEQ ID NO: 368569 - DNA, 30 bp, Artificial Sequence
  Synthetic oligonucleotide
ttcataggtgatttttacgcatagacggtt

SEQ ID NO: 368570 - DNA, 30 bp, Artificial Sequence
  Synthetic oligonucleotide
ggcgggggatgtagggaatctatgacggtt

SEQ ID NO: 368571 - DNA, 30 bp, Artificial Sequence
  Synthetic oligonucleotide
tgcactatttaaagctccgaagaaccggtt

SEQ ID NO: 368572 - DNA, 30 bp, Artificial Sequence
  Synthetic oligonucleotide
tagatctagtggattgacggatcaccggtt

SEQ ID NO: 368573 - DNA, 30 bp, Artificial Sequence
  Synthetic oligonucleotide
tgcagcgcaatgtatgtgcggaagccggtt

SEQ ID NO: 368574 - DNA, 30 bp, Artificial Sequence
  Synthetic oligonucleotide
tgatatcctgtttaggaacatgcgccggtt

SEQ ID NO: 368575 - DNA, 30 bp, Artificial Sequence
  Synthetic oligonucleotide
agtacaggtacatgggaacgattgccggtt

SEQ ID NO: 368576 - DNA, 30 bp, Artificial Sequence
  Synthetic oligonucleotide
tgcgaggaaagggtcggaaatttgccggtt

SEQ ID NO: 368577 - DNA, 30 bp, Artificial Sequence
  Synthetic oligonucleotide
tattgggctacgatggggggctctccggtt

SEQ ID NO: 368578 - DNA, 30 bp, Artificial Sequence
  Synthetic oligonucleotide
gtacgcctgaagtccctattcggagcggtt

SEQ ID NO: 368579 - DNA, 30 bp, Artificial Sequence
  Synthetic oligonucleotide
gtggtggctattcatcccctattagcggtt

SEQ ID NO: 368580 - DNA, 30 bp, Artificial Sequence
  Synthetic oligonucleotide
ccataacgtgagacggtgactaacgcggtt

SEQ ID NO: 368581 - DNA, 30 bp, Artificial Sequence
  Synthetic oligonucleotide
gacttaaaaagctggaactcgggcgcggtt

SEQ ID NO: 368582 - DNA, 30 bp, Artificial Sequence
  Synthetic oligonucleotide
gtctgcctacttggtttataatgcgcggtt

SEQ ID NO: 368583 - DNA, 30 bp, Artificial Sequence
  Synthetic oligonucleotide
gaagccaagtagtacgaggatggggcggtt

SEQ ID NO: 368584 - DNA, 30 bp, Artificial Sequence
  Synthetic oligonucleotide
cctgattaaagcttacactggtgggcggtt

SEQ ID NO: 368585 - DNA, 30 bp, Artificial Sequence
  Synthetic oligonucleotide
actacggcataagcaggtcctattgcggtt

SEQ ID NO: 368586 - DNA, 30 bp, Artificial Sequence
  Synthetic oligonucleotide
acgaatatgctgcactcactatcatcggtt

SEQ ID NO: 368587 - DNA, 30 bp, Artificial Sequence
  Synthetic oligonucleotide
acggctattcggttcgtactgaactcggtt

SEQ ID NO: 368588 - DNA, 30 bp, Artificial Sequence
  Synthetic oligonucleotide
acaaggcaacttgacaaaagttcttcggtt

SEQ ID NO: 368589 - DNA, 30 bp, Artificial Sequence
  Synthetic oligonucleotide
aggtgcctggcggcctttgtgctttcggtt

SEQ ID NO: 368590 - DNA, 30 bp, Artificial Sequence
  Synthetic oligonucleotide
acgaagcttgctccccgttacgtttcggtt

SEQ ID NO: 368591 - DNA, 30 bp, Artificial Sequence
  Synthetic oligonucleotide
ccgttaaaagtctggtctcccaaaagggtt

SEQ ID NO: 368592 - DNA, 30 bp, Artificial Sequence
  Synthetic oligonucleotide
actagtttgtcccaagagtcgtcaagggtt

SEQ ID NO: 368593 - DNA, 30 bp, Artificial Sequence
  Synthetic oligonucleotide
accccccttatgtcatcgtgaggaagggtt

SEQ ID NO: 368594 - DNA, 30 bp, Artificial Sequence
  Synthetic oligonucleotide
cacagacaaagactgccctcaacgagggtt

SEQ ID NO: 368595 - DNA, 29 bp, Artificial Sequence
  Synthetic oligonucleotide
gtaccggactgggggaatggttgagggtt

SEQ ID NO: 368596 - DNA, 30 bp, Artificial Sequence
  Synthetic oligonucleotide
agtagtggcattacgtattcttcacgggtt

SEQ ID NO: 368597 - DNA, 30 bp, Artificial Sequence
  Synthetic oligonucleotide
gcttacttattcgcctacctgcgacgggtt

SEQ ID NO: 368598 - DNA, 30 bp, Artificial Sequence
  Synthetic oligonucleotide
gcgtattcacgactcggtcttaaccgggtt

SEQ ID NO: 368599 - DNA, 30 bp, Artificial Sequence
  Synthetic oligonucleotide
caaaagccgagcgaccggttcaagcgggtt

SEQ ID NO: 368600 - DNA, 30 bp, Artificial Sequence
  Synthetic oligonucleotide
gttgtggtgacgagaggcaaggagcgggtt

SEQ ID NO: 368601 - DNA, 30 bp, Artificial Sequence
  Synthetic oligonucleotide
ggtggacgcgactcagtccgtgagcgggtt

SEQ ID NO: 368602 - DNA, 30 bp, Artificial Sequence
  Synthetic oligonucleotide
tgcctaagttccgatcgcagtaggcgggtt

SEQ ID NO: 368603 - DNA, 30 bp, Artificial Sequence
  Synthetic oligonucleotide
cgctaagggacagtaagaggcgggcgggtt

SEQ ID NO: 368604 - DNA, 30 bp, Artificial Sequence
  Synthetic oligonucleotide
tcctcgaaccaggaagtggcggctcgggtt

SEQ ID NO: 368605 - DNA, 30 bp, Artificial Sequence
  Synthetic oligonucleotide
ggagtcggggccccgtcagggtaaggggtt

SEQ ID NO: 368606 - DNA, 30 bp, Artificial Sequence
  Synthetic oligonucleotide
cgaaccaaaggcccgtccgattgaggggtt

SEQ ID NO: 368607 - DNA, 30 bp, Artificial Sequence
  Synthetic oligonucleotide
gattgtataactcggcgcttagcgggggtt

SEQ ID NO: 368608 - DNA, 30 bp, Artificial Sequence
  Synthetic oligonucleotide
actgagaacgagagaatacgttcgggggtt

SEQ ID NO: 368609 - DNA, 30 bp, Artificial Sequence
  Synthetic oligonucleotide
tcatgcgcgacttaaaggagcgtgggggtt

SEQ ID NO: 368610 - DNA, 30 bp, Artificial Sequence
  Synthetic oligonucleotide
aataagtgctgttctagcgatccatgggtt

SEQ ID NO: 368611 - DNA, 30 bp, Artificial Sequence
  Synthetic oligonucleotide
aaagccgtgattttagcgttaagctgggtt

SEQ ID NO: 368612 - DNA, 30 bp, Artificial Sequence
  Synthetic oligonucleotide
cagaggtcgcaaataggtcttggctgggtt

SEQ ID NO: 368613 - DNA, 30 bp, Artificial Sequence
  Synthetic oligonucleotide
gatcacctcgtacctcggtcagagtgggtt

SEQ ID NO: 368614 - DNA, 30 bp, Artificial Sequence
  Synthetic oligonucleotide
ctcaattctgaccgatatgtaaattgggtt

SEQ ID NO: 368615 - DNA, 30 bp, Artificial Sequence
  Synthetic oligonucleotide
gagctgggacaggaacggccccattgggtt

SEQ ID NO: 368616 - DNA, 30 bp, Artificial Sequence
  Synthetic oligonucleotide
accataagcggtattaggtcatccatggtt

SEQ ID NO: 368617 - DNA, 30 bp, Artificial Sequence
  Synthetic oligonucleotide
aatgtatcatgggatccccgcatcatggtt

SEQ ID NO: 368618 - DNA, 30 bp, Artificial Sequence
  Synthetic oligonucleotide
tgtcggatgctcacatcttagttcatggtt

SEQ ID NO: 368619 - DNA, 30 bp, Artificial Sequence
  Synthetic oligonucleotide
atataaggaagcagctttaggatgatggtt

SEQ ID NO: 368620 - DNA, 30 bp, Artificial Sequence
  Synthetic oligonucleotide
aataggcgccgagataataactccctggtt

SEQ ID NO: 368621 - DNA, 30 bp, Artificial Sequence
  Synthetic oligonucleotide
gcatggccgacaggaccccgccgcctggtt

SEQ ID NO: 368622 - DNA, 30 bp, Artificial Sequence
  Synthetic oligonucleotide
ttgtatacgctttttggcccaggcctggtt

SEQ ID NO: 368623 - DNA, 30 bp, Artificial Sequence
  Synthetic oligonucleotide
gataatggaaggacgcgacacatcctggtt

SEQ ID NO: 368624 - DNA, 30 bp, Artificial Sequence
  Synthetic oligonucleotide
acccggtgcaagttaacgtgagcgctggtt

SEQ ID NO: 368625 - DNA, 30 bp, Artificial Sequence
  Synthetic oligonucleotide
aataagggaacgtggtttatgactctggtt

SEQ ID NO: 368626 - DNA, 30 bp, Artificial Sequence
  Synthetic oligonucleotide
ccggttaggaagcctccggggagtctggtt

SEQ ID NO: 368627 - DNA, 30 bp, Artificial Sequence
  Synthetic oligonucleotide
gaccggacacatcggtctacgccagtggtt

SEQ ID NO: 368628 - DNA, 30 bp, Artificial Sequence
  Synthetic oligonucleotide
tacccgtgcgtgctacgttgctgagtggtt

SEQ ID NO: 368629 - DNA, 30 bp, Artificial Sequence
  Synthetic oligonucleotide
gttagtctgggtataaacgaccacgtggtt

SEQ ID NO: 368630 - DNA, 30 bp, Artificial Sequence
  Synthetic oligonucleotide
gagtaggcgcccaatttagtcaccgtggtt

SEQ ID NO: 368631 - DNA, 30 bp, Artificial Sequence
  Synthetic oligonucleotide
gtgaggaatgtgacgcgaaaaagcgtggtt

SEQ ID NO: 368632 - DNA, 30 bp, Artificial Sequence
  Synthetic oligonucleotide
cagatcgtgccgaacacaactaaggtggtt

SEQ ID NO: 368633 - DNA, 30 bp, Artificial Sequence
  Synthetic oligonucleotide
gatgcggttcatagtaatttctaggtggtt

SEQ ID NO: 368634 - DNA, 30 bp, Artificial Sequence
  Synthetic oligonucleotide
caaagtatctcgaagacgacgacggtggtt

SEQ ID NO: 368635 - DNA, 30 bp, Artificial Sequence
  Synthetic oligonucleotide
ctcataacttgtaccgtgtcagttgtggtt

SEQ ID NO: 368636 - DNA, 30 bp, Artificial Sequence
  Synthetic oligonucleotide
aggattaaatggaaccgccgcatattggtt

SEQ ID NO: 368637 - DNA, 30 bp, Artificial Sequence
  Synthetic oligonucleotide
tgcctgtgtggtcaaaagtcaaccttggtt

SEQ ID NO: 368638 - DNA, 30 bp, Artificial Sequence
  Synthetic oligonucleotide
tggtaatggtttgcacacttatgcttggtt

SEQ ID NO: 368639 - DNA, 30 bp, Artificial Sequence
  Synthetic oligonucleotide
gcctttaaaagtatcaattcagagttggtt

SEQ ID NO: 368640 - DNA, 30 bp, Artificial Sequence
  Synthetic oligonucleotide
ccttgcggaggccccagccgcgggttggtt

SEQ ID NO: 368641 - DNA, 30 bp, Artificial Sequence
  Synthetic oligonucleotide
aaccaagccaatgcgactgtttggttggtt

SEQ ID NO: 368642 - DNA, 30 bp, Artificial Sequence
  Synthetic oligonucleotide
tcccacgtcatattttcgatcattttggtt

SEQ ID NO: 368643 - DNA, 30 bp, Artificial Sequence
  Synthetic oligonucleotide
ggatcaaaccggatcagatataaaaatgtt

SEQ ID NO: 368644 - DNA, 30 bp, Artificial Sequence
  Synthetic oligonucleotide
tttgacgtcggtctttgttaataaaatgtt

SEQ ID NO: 368645 - DNA, 30 bp, Artificial Sequence
  Synthetic oligonucleotide
cttgaggtcctccggcttccgggaaatgtt

SEQ ID NO: 368646 - DNA, 30 bp, Artificial Sequence
  Synthetic oligonucleotide
gttacggttcgctccccggttaacaatgtt

SEQ ID NO: 368647 - DNA, 30 bp, Artificial Sequence
  Synthetic oligonucleotide
gggtcggttgaggtggagggttacaatgtt

SEQ ID NO: 368648 - DNA, 30 bp, Artificial Sequence
  Synthetic oligonucleotide
tccgtagagcgtacttgtctaatgaatgtt

SEQ ID NO: 368649 - DNA, 30 bp, Artificial Sequence
  Synthetic oligonucleotide
tcaaggtctagtcttatctaaaataatgtt

SEQ ID NO: 368650 - DNA, 30 bp, Artificial Sequence
  Synthetic oligonucleotide
gtctcacggttgtcagaagttgataatgtt

SEQ ID NO: 368651 - DNA, 30 bp, Artificial Sequence
  Synthetic oligonucleotide
aaggcacaatgcacggcggtagctaatgtt

SEQ ID NO: 368652 - DNA, 30 bp, Artificial Sequence
  Synthetic oligonucleotide
tcgactacgtttagtagaaagtctaatgtt

SEQ ID NO: 368653 - DNA, 30 bp, Artificial Sequence
  Synthetic oligonucleotide
tgatagagctgtggtaccaagtgtaatgtt

SEQ ID NO: 368654 - DNA, 30 bp, Artificial Sequence
  Synthetic oligonucleotide
taatattagtcgaaaggctccaaacatgtt

SEQ ID NO: 368655 - DNA, 30 bp, Artificial Sequence
  Synthetic oligonucleotide
gtgtgctaggcctacattaataaacatgtt

SEQ ID NO: 368656 - DNA, 30 bp, Artificial Sequence
  Synthetic oligonucleotide
tctaaacattctaatatgtgaacgcatgtt

SEQ ID NO: 368657 - DNA, 30 bp, Artificial Sequence
  Synthetic oligonucleotide
ctacatgcagcgtcgtattcggtgcatgtt

SEQ ID NO: 368658 - DNA, 30 bp, Artificial Sequence
  Synthetic oligonucleotide
acgttattttatgtcaaccgtcctcatgtt

SEQ ID NO: 368659 - DNA, 30 bp, Artificial Sequence
  Synthetic oligonucleotide
gggtccaaggtgcctgtttaccccgatgtt

SEQ ID NO: 368660 - DNA, 30 bp, Artificial Sequence
  Synthetic oligonucleotide
tgcgcctaaaagacattaggatccgatgtt

SEQ ID NO: 368661 - DNA, 30 bp, Artificial Sequence
  Synthetic oligonucleotide
gaacaggtttataggtccttgagcgatgtt

SEQ ID NO: 368662 - DNA, 30 bp, Artificial Sequence
  Synthetic oligonucleotide
gcacttctattgacgtgtatgggggatgtt

SEQ ID NO: 368663 - DNA, 30 bp, Artificial Sequence
  Synthetic oligonucleotide
aaactcgtattagaatctttgggtgatgtt

SEQ ID NO: 368664 - DNA, 30 bp, Artificial Sequence
  Synthetic oligonucleotide
gggaagtcttccgcggaacaacgatatgtt

SEQ ID NO: 368665 - DNA, 30 bp, Artificial Sequence
  Synthetic oligonucleotide
cactccgactgtgtgttgggcccctatgtt

SEQ ID NO: 368666 - DNA, 30 bp, Artificial Sequence
  Synthetic oligonucleotide
ctgactaagcagtgcccctacgcctatgtt

SEQ ID NO: 368667 - DNA, 30 bp, Artificial Sequence
  Synthetic oligonucleotide
aagtctttcgctaacgcgccatcctatgtt

SEQ ID NO: 368668 - DNA, 30 bp, Artificial Sequence
  Synthetic oligonucleotide
gtggacggaatgctaataccaaagtatgtt

SEQ ID NO: 368669 - DNA, 30 bp, Artificial Sequence
  Synthetic oligonucleotide
ggctggacatatcgcaatcccacgtatgtt

SEQ ID NO: 368670 - DNA, 30 bp, Artificial Sequence
  Synthetic oligonucleotide
tatggtagattgatcactatggcgtatgtt

SEQ ID NO: 368671 - DNA, 30 bp, Artificial Sequence
  Synthetic oligonucleotide
attgctgctgccgaatcaaatgattatgtt

SEQ ID NO: 368672 - DNA, 30 bp, Artificial Sequence
  Synthetic oligonucleotide
tggtaatactacggctgtaaaacttatgtt

SEQ ID NO: 368673 - DNA, 30 bp, Artificial Sequence
  Synthetic oligonucleotide
aatgggcatacggcaggccctatttatgtt

SEQ ID NO: 368674 - DNA, 30 bp, Artificial Sequence
  Synthetic oligonucleotide
acccgtcgaatattacatatgccaactgtt

SEQ ID NO: 368675 - DNA, 30 bp, Artificial Sequence
  Synthetic oligonucleotide
aatgcgaaaggtgctggacgctcaactgtt

SEQ ID NO: 368676 - DNA, 30 bp, Artificial Sequence
  Synthetic oligonucleotide
ccatcgagtgtctcgaagtttttaactgtt

SEQ ID NO: 368677 - DNA, 30 bp, Artificial Sequence
  Synthetic oligonucleotide
tgcgttagctataaagatcttcctactgtt

SEQ ID NO: 368678 - DNA, 30 bp, Artificial Sequence
  Synthetic oligonucleotide
tagtctccggtacctaacatgggtactgtt

SEQ ID NO: 368679 - DNA, 30 bp, Artificial Sequence
  Synthetic oligonucleotide
tgctaagccccggatctcatttgtactgtt

SEQ ID NO: 368680 - DNA, 30 bp, Artificial Sequence
  Synthetic oligonucleotide
tcatatcttgaactcgatgcaaatcctgtt

SEQ ID NO: 368681 - DNA, 30 bp, Artificial Sequence
  Synthetic oligonucleotide
gaactgacgggtgtaccgaatggtcctgtt

SEQ ID NO: 368682 - DNA, 30 bp, Artificial Sequence
  Synthetic oligonucleotide
ggacaacagattaaaagtccgattcctgtt

SEQ ID NO: 368683 - DNA, 30 bp, Artificial Sequence
  Synthetic oligonucleotide
caatggacaggaatcataggcgttcctgtt

SEQ ID NO: 368684 - DNA, 30 bp, Artificial Sequence
  Synthetic oligonucleotide
tgtatataatcagaatagcgcgtagctgtt

SEQ ID NO: 368685 - DNA, 30 bp, Artificial Sequence
  Synthetic oligonucleotide
tcgcgagtatacatgtaaaagtccgctgtt

SEQ ID NO: 368686 - DNA, 30 bp, Artificial Sequence
  Synthetic oligonucleotide
aagcataacacacagaagcctagggctgtt

SEQ ID NO: 368687 - DNA, 30 bp, Artificial Sequence
  Synthetic oligonucleotide
tatcgtctaagtcccagtgccgatgctgtt

SEQ ID NO: 368688 - DNA, 30 bp, Artificial Sequence
  Synthetic oligonucleotide
actgcggcaggtaattatggctgctctgtt

SEQ ID NO: 368689 - DNA, 30 bp, Artificial Sequence
  Synthetic oligonucleotide
agcagtacccgatgacagtcggtctctgtt

SEQ ID NO: 368690 - DNA, 30 bp, Artificial Sequence
  Synthetic oligonucleotide
gcatacgatactgtagaatcaatgtctgtt

SEQ ID NO: 368691 - DNA, 30 bp, Artificial Sequence
  Synthetic oligonucleotide
cacaatggttggcttgtctgcatgtctgtt

SEQ ID NO: 368692 - DNA, 30 bp, Artificial Sequence
  Synthetic oligonucleotide
tcgatctatcgtgggtgttcgtgttctgtt

SEQ ID NO: 368693 - DNA, 30 bp, Artificial Sequence
  Synthetic oligonucleotide
gaaatccaaatacgtccaactcaaagtgtt

SEQ ID NO: 368694 - DNA, 30 bp, Artificial Sequence
  Synthetic oligonucleotide
agagtgttctgagccgtaggtgcaagtgtt

SEQ ID NO: 368695 - DNA, 30 bp, Artificial Sequence
  Synthetic oligonucleotide
ttgccagattcttgaccactggtaagtgtt

SEQ ID NO: 368696 - DNA, 30 bp, Artificial Sequence
  Synthetic oligonucleotide
taggtgtagaataaaacagcttgtagtgtt

SEQ ID NO: 368697 - DNA, 30 bp, Artificial Sequence
  Synthetic oligonucleotide
taggatccttacgaccgtacgattagtgtt

SEQ ID NO: 368698 - DNA, 30 bp, Artificial Sequence
  Synthetic oligonucleotide
ggtattcctgtggaatgaattattagtgtt

SEQ ID NO: 368699 - DNA, 30 bp, Artificial Sequence
  Synthetic oligonucleotide
gtttctccatcactccggaaccaacgtgtt

SEQ ID NO: 368700 - DNA, 30 bp, Artificial Sequence
  Synthetic oligonucleotide
ggcgggtcatgattttgcacgcaacgtgtt

SEQ ID NO: 368701 - DNA, 30 bp, Artificial Sequence
  Synthetic oligonucleotide
gttaaaagatatctacctacggaacgtgtt

SEQ ID NO: 368702 - DNA, 30 bp, Artificial Sequence
  Synthetic oligonucleotide
caagttcattttgtgatcactcgacgtgtt

SEQ ID NO: 368703 - DNA, 30 bp, Artificial Sequence
  Synthetic oligonucleotide
cgcccgtctcacgaagctctcgtacgtgtt

SEQ ID NO: 368704 - DNA, 30 bp, Artificial Sequence
  Synthetic oligonucleotide
tgcttcggatgtagtggctggagccgtgtt

SEQ ID NO: 368705 - DNA, 30 bp, Artificial Sequence
  Synthetic oligonucleotide
caattcgaagcgatgcggggcatccgtgtt

SEQ ID NO: 368706 - DNA, 30 bp, Artificial Sequence
  Synthetic oligonucleotide
aaacggacgtgcggtgtttgacagcgtgtt

SEQ ID NO: 368707 - DNA, 30 bp, Artificial Sequence
  Synthetic oligonucleotide
ttcgcctaaagcagagttagctagcgtgtt

SEQ ID NO: 368708 - DNA, 30 bp, Artificial Sequence
  Synthetic oligonucleotide
agtcactgcttttgtagcccggcgcgtgtt

SEQ ID NO: 368709 - DNA, 30 bp, Artificial Sequence
  Synthetic oligonucleotide
ttcagttacaagagtatagacgggcgtgtt

SEQ ID NO: 368710 - DNA, 30 bp, Artificial Sequence
  Synthetic oligonucleotide
ttatgtcagacattgtagaaaatgcgtgtt

SEQ ID NO: 368711 - DNA, 30 bp, Artificial Sequence
  Synthetic oligonucleotide
atgaagttacagtaactcagatatcgtgtt

SEQ ID NO: 368712 - DNA, 30 bp, Artificial Sequence
  Synthetic oligonucleotide
agccctaacgagtttgtagtatatcgtgtt

SEQ ID NO: 368713 - DNA, 30 bp, Artificial Sequence
  Synthetic oligonucleotide
tccgccacaataacaaattatcccggtgtt

SEQ ID NO: 368714 - DNA, 30 bp, Artificial Sequence
  Synthetic oligonucleotide
aaccgtgcattcgtaagccagcgcggtgtt

SEQ ID NO: 368715 - DNA, 30 bp, Artificial Sequence
  Synthetic oligonucleotide
tttagcagccaataataagcaaagggtgtt

SEQ ID NO: 368716 - DNA, 30 bp, Artificial Sequence
  Synthetic oligonucleotide
ctttaagcgagagacagagagacgggtgtt

SEQ ID NO: 368717 - DNA, 30 bp, Artificial Sequence
  Synthetic oligonucleotide
tcctcaacatgacgaagatagtcgggtgtt

SEQ ID NO: 368718 - DNA, 30 bp, Artificial Sequence
  Synthetic oligonucleotide
aatggtgaccccacctgtgggtcgggtgtt

SEQ ID NO: 368719 - DNA, 30 bp, Artificial Sequence
  Synthetic oligonucleotide
ctaacagcgaaggcaaatcgtgggggtgtt

SEQ ID NO: 368720 - DNA, 30 bp, Artificial Sequence
  Synthetic oligonucleotide
tatattcgagcaagataggatgtgggtgtt

SEQ ID NO: 368721 - DNA, 30 bp, Artificial Sequence
  Synthetic oligonucleotide
agttgtgtcatagaggtcttgattggtgtt

SEQ ID NO: 368722 - DNA, 30 bp, Artificial Sequence
  Synthetic oligonucleotide
taatcaaacatggacaggaaagttggtgtt

SEQ ID NO: 368723 - DNA, 30 bp, Artificial Sequence
  Synthetic oligonucleotide
cattctacgattcggttgttaacatgtgtt

SEQ ID NO: 368724 - DNA, 30 bp, Artificial Sequence
  Synthetic oligonucleotide
cacaaacttgtgcagccataatcatgtgtt

SEQ ID NO: 368725 - DNA, 30 bp, Artificial Sequence
  Synthetic oligonucleotide
gaatccggatgggataggggatgatgtgtt

SEQ ID NO: 368726 - DNA, 30 bp, Artificial Sequence
  Synthetic oligonucleotide
tgacccaagttggcagacagcttatgtgtt

SEQ ID NO: 368727 - DNA, 30 bp, Artificial Sequence
  Synthetic oligonucleotide
tgtaatgccctgaggtagcaagcgtgtgtt

SEQ ID NO: 368728 - DNA, 30 bp, Artificial Sequence
  Synthetic oligonucleotide
ttaagcttagcccctgggtcgatgtgtgtt

SEQ ID NO: 368729 - DNA, 28 bp, Artificial Sequence
  Synthetic oligonucleotide
cactttatctgctctcgtgctgtgtgtt

SEQ ID NO: 368730 - DNA, 30 bp, Artificial Sequence
  Synthetic oligonucleotide
ttgtggactgtgctacatacacattgtgtt

SEQ ID NO: 368731 - DNA, 30 bp, Artificial Sequence
  Synthetic oligonucleotide
cccccaggaaataacatacgcagttgtgtt

SEQ ID NO: 368732 - DNA, 30 bp, Artificial Sequence
  Synthetic oligonucleotide
gtcgctgagtaaggttgtctataaattgtt

SEQ ID NO: 368733 - DNA, 30 bp, Artificial Sequence
  Synthetic oligonucleotide
gcgcaaatgagagagaatgcagcaattgtt

SEQ ID NO: 368734 - DNA, 30 bp, Artificial Sequence
  Synthetic oligonucleotide
ttccctaacgattctcagcgtggaattgtt

SEQ ID NO: 368735 - DNA, 30 bp, Artificial Sequence
  Synthetic oligonucleotide
gccagaatcgttcagactactaacattgtt

SEQ ID NO: 368736 - DNA, 30 bp, Artificial Sequence
  Synthetic oligonucleotide
caacattgagcgccgctcatgcccattgtt

SEQ ID NO: 368737 - DNA, 30 bp, Artificial Sequence
  Synthetic oligonucleotide
gcaagatgatttgcgttctattggattgtt

SEQ ID NO: 368738 - DNA, 30 bp, Artificial Sequence
  Synthetic oligonucleotide
gccgctgtaactggctcggaaatgattgtt

SEQ ID NO: 368739 - DNA, 30 bp, Artificial Sequence
  Synthetic oligonucleotide
gcatgcgcatataagcgcgataatattgtt

SEQ ID NO: 368740 - DNA, 30 bp, Artificial Sequence
  Synthetic oligonucleotide
caggaaacggcacaaccttatgatattgtt

SEQ ID NO: 368741 - DNA, 30 bp, Artificial Sequence
  Synthetic oligonucleotide
gaaagaaagatcgcatgcctcaatcttgtt

SEQ ID NO: 368742 - DNA, 30 bp, Artificial Sequence
  Synthetic oligonucleotide
acaatggtgcgaatgtcgggcgatcttgtt

SEQ ID NO: 368743 - DNA, 30 bp, Artificial Sequence
  Synthetic oligonucleotide
tatgagtttggtcacacctttgcagttgtt

SEQ ID NO: 368744 - DNA, 30 bp, Artificial Sequence
  Synthetic oligonucleotide
aagtgaaagaccagtattggttgagttgtt

SEQ ID NO: 368745 - DNA, 30 bp, Artificial Sequence
  Synthetic oligonucleotide
ttacgagtgtgatattgtgcgtacgttgtt

SEQ ID NO: 368746 - DNA, 30 bp, Artificial Sequence
  Synthetic oligonucleotide
aaaagacgggcttcccgatggatcgttgtt

SEQ ID NO: 368747 - DNA, 30 bp, Artificial Sequence
  Synthetic oligonucleotide
acgttacccctactcttgtctctggttgtt

SEQ ID NO: 368748 - DNA, 30 bp, Artificial Sequence
  Synthetic oligonucleotide
agctctggatgttaggggaatttggttgtt

SEQ ID NO: 368749 - DNA, 30 bp, Artificial Sequence
  Synthetic oligonucleotide
tagtccagatcaccgggcacccctgttgtt

SEQ ID NO: 368750 - DNA, 30 bp, Artificial Sequence
  Synthetic oligonucleotide
agcaatcaaacagattgggtaaaatttgtt

SEQ ID NO: 368751 - DNA, 30 bp, Artificial Sequence
  Synthetic oligonucleotide
tccgaggctaatggatctgaagcatttgtt

SEQ ID NO: 368752 - DNA, 30 bp, Artificial Sequence
  Synthetic oligonucleotide
cacagaaatccacgccagtgtgcatttgtt

SEQ ID NO: 368753 - DNA, 30 bp, Artificial Sequence
  Synthetic oligonucleotide
actgttggagtaacttccaaatcatttgtt

SEQ ID NO: 368754 - DNA, 30 bp, Artificial Sequence
  Synthetic oligonucleotide
ggcatcgtggataccttcaagaggtttgtt

SEQ ID NO: 368755 - DNA, 30 bp, Artificial Sequence
  Synthetic oligonucleotide
taaaggtacgtgcgacgttaagattttgtt

SEQ ID NO: 368756 - DNA, 30 bp, Artificial Sequence
  Synthetic oligonucleotide
caccactacgacaagtacgtacgttttgtt

SEQ ID NO: 368757 - DNA, 30 bp, Artificial Sequence
  Synthetic oligonucleotide
tacttattcttgtaccttgctgtttttgtt

SEQ ID NO: 368758 - DNA, 30 bp, Artificial Sequence
  Synthetic oligonucleotide
agattagaattaaggttcggcgaaaaattt

SEQ ID NO: 368759 - DNA, 30 bp, Artificial Sequence
  Synthetic oligonucleotide
ctgtcggatagcccccgataatcaaaattt

SEQ ID NO: 368760 - DNA, 30 bp, Artificial Sequence
  Synthetic oligonucleotide
atgagaggaactcaatataaccgaaaattt

SEQ ID NO: 368761 - DNA, 30 bp, Artificial Sequence
  Synthetic oligonucleotide
cttagagctcgttctcgtaaatacaaattt

SEQ ID NO: 368762 - DNA, 30 bp, Artificial Sequence
  Synthetic oligonucleotide
ggcgcggaagtcattctcgcagagaaattt

SEQ ID NO: 368763 - DNA, 30 bp, Artificial Sequence
  Synthetic oligonucleotide
ttggtataggaacgggggttttagaaattt

SEQ ID NO: 368764 - DNA, 30 bp, Artificial Sequence
  Synthetic oligonucleotide
gatttaccttcgtagtcgtatacgaaattt

SEQ ID NO: 368765 - DNA, 30 bp, Artificial Sequence
  Synthetic oligonucleotide
tcacgagaaatcattgtatttatgaaattt

SEQ ID NO: 368766 - DNA, 30 bp, Artificial Sequence
  Synthetic oligonucleotide
cccaagtgagcccagaggcctaaacaattt

SEQ ID NO: 368767 - DNA, 30 bp, Artificial Sequence
  Synthetic oligonucleotide
aacctgaagaagagaactcccatacaattt

SEQ ID NO: 368768 - DNA, 30 bp, Artificial Sequence
  Synthetic oligonucleotide
gagtcggggcgtaggaccaatagccaattt

SEQ ID NO: 368769 - DNA, 30 bp, Artificial Sequence
  Synthetic oligonucleotide
caactcaatctactgcaatctccgcaattt

SEQ ID NO: 368770 - DNA, 30 bp, Artificial Sequence
  Synthetic oligonucleotide
taaataaaactacgtatcggtccgcaattt

SEQ ID NO: 368771 - DNA, 30 bp, Artificial Sequence
  Synthetic oligonucleotide
ggtgtccagccattcgacgtcactcaattt

SEQ ID NO: 368772 - DNA, 30 bp, Artificial Sequence
  Synthetic oligonucleotide
ccacaaggtgtgaccagcgcaggtcaattt

SEQ ID NO: 368773 - DNA, 30 bp, Artificial Sequence
  Synthetic oligonucleotide
tagggggcccctgcccgatttattcaattt

SEQ ID NO: 368774 - DNA, 30 bp, Artificial Sequence
  Synthetic oligonucleotide
tcaacctgagcatatggtttctttcaattt

SEQ ID NO: 368775 - DNA, 31 bp, Artificial Sequence
  Synthetic oligonucleotide
gtagggtggtcctctaggcctttaagaattt

SEQ ID NO: 368776 - DNA, 30 bp, Artificial Sequence
  Synthetic oligonucleotide
aaaccttgccggcaagctccatcagaattt

SEQ ID NO: 368777 - DNA, 30 bp, Artificial Sequence
  Synthetic oligonucleotide
ggttctagggagtagagagatagagaattt

SEQ ID NO: 368778 - DNA, 30 bp, Artificial Sequence
  Synthetic oligonucleotide
gcatcacttatcggacgtgtagacgaattt

SEQ ID NO: 368779 - DNA, 30 bp, Artificial Sequence
  Synthetic oligonucleotide
gacggcgtatcatgagtgtttgccgaattt

SEQ ID NO: 368780 - DNA, 30 bp, Artificial Sequence
  Synthetic oligonucleotide
atctcgtaaacacagagccggtccgaattt

SEQ ID NO: 368781 - DNA, 30 bp, Artificial Sequence
  Synthetic oligonucleotide
atcacgaatggtcaagttctacgcgaattt

SEQ ID NO: 368782 - DNA, 30 bp, Artificial Sequence
  Synthetic oligonucleotide
aaagcctgttagcaggtcactgaggaattt

SEQ ID NO: 368783 - DNA, 30 bp, Artificial Sequence
  Synthetic oligonucleotide
gaaggctttactctcgtattggttgaattt

SEQ ID NO: 368784 - DNA, 30 bp, Artificial Sequence
  Synthetic oligonucleotide
acgatgggcaacacgctgagtagataattt

SEQ ID NO: 368785 - DNA, 30 bp, Artificial Sequence
  Synthetic oligonucleotide
gctttgagaggattgcggatcctataattt

SEQ ID NO: 368786 - DNA, 30 bp, Artificial Sequence
  Synthetic oligonucleotide
aaacgctaagcgtatagcttctagtaattt

SEQ ID NO: 368787 - DNA, 30 bp, Artificial Sequence
  Synthetic oligonucleotide
catctacggaaagtgatcctggcgtaattt

SEQ ID NO: 368788 - DNA, 30 bp, Artificial Sequence
  Synthetic oligonucleotide
gccataagtccctaacctatgaggtaattt

SEQ ID NO: 368789 - DNA, 30 bp, Artificial Sequence
  Synthetic oligonucleotide
gcactaatgagggaggtgagacggtaattt

SEQ ID NO: 368790 - DNA, 30 bp, Artificial Sequence
  Synthetic oligonucleotide
gctatattagaggggcagcgcgattaattt

SEQ ID NO: 368791 - DNA, 30 bp, Artificial Sequence
  Synthetic oligonucleotide
tcggtagcatacattccagtaacttaattt

SEQ ID NO: 368792 - DNA, 30 bp, Artificial Sequence
  Synthetic oligonucleotide
taaaaaaaaggacgtaacacaccttaattt

SEQ ID NO: 368793 - DNA, 30 bp, Artificial Sequence
  Synthetic oligonucleotide
agctgccttcacggcactgcgagttaattt

SEQ ID NO: 368794 - DNA, 30 bp, Artificial Sequence
  Synthetic oligonucleotide
agaaggggcgtttccagaccaaaaacattt

SEQ ID NO: 368795 - DNA, 30 bp, Artificial Sequence
  Synthetic oligonucleotide
tatcagcgctcgcaattactacaaacattt

SEQ ID NO: 368796 - DNA, 30 bp, Artificial Sequence
  Synthetic oligonucleotide
gcgggcatgggctctattttggagacattt

SEQ ID NO: 368797 - DNA, 30 bp, Artificial Sequence
  Synthetic oligonucleotide
actagggcccaatatagggcaaatacattt

SEQ ID NO: 368798 - DNA, 30 bp, Artificial Sequence
  Synthetic oligonucleotide
attgactgttcgttcaccccatctacattt

SEQ ID NO: 368799 - DNA, 30 bp, Artificial Sequence
  Synthetic oligonucleotide
aatagaaaagtatgagatacaaccccattt

SEQ ID NO: 368800 - DNA, 30 bp, Artificial Sequence
  Synthetic oligonucleotide
ggttacctggtagttctcaacaccccattt

SEQ ID NO: 368801 - DNA, 30 bp, Artificial Sequence
  Synthetic oligonucleotide
agtgagtcgctcatcgaataggagccattt

SEQ ID NO: 368802 - DNA, 30 bp, Artificial Sequence
  Synthetic oligonucleotide
aagagtcttgtactgggggcagggccattt

SEQ ID NO: 368803 - DNA, 30 bp, Artificial Sequence
  Synthetic oligonucleotide
agcctttaagggctctttaacttgccattt

SEQ ID NO: 368804 - DNA, 30 bp, Artificial Sequence
  Synthetic oligonucleotide
tagaggtgtgggtgtgaacggccagcattt

SEQ ID NO: 368805 - DNA, 30 bp, Artificial Sequence
  Synthetic oligonucleotide
ggactgacgcgaatgatctgcagagcattt

SEQ ID NO: 368806 - DNA, 30 bp, Artificial Sequence
  Synthetic oligonucleotide
ctatggtccgctgccgagatgggagcattt

SEQ ID NO: 368807 - DNA, 30 bp, Artificial Sequence
  Synthetic oligonucleotide
gaaaccagtttaatctcagagcgcgcattt

SEQ ID NO: 368808 - DNA, 30 bp, Artificial Sequence
  Synthetic oligonucleotide
gtcgatgcacacctcgtaggcatcgcattt

SEQ ID NO: 368809 - DNA, 30 bp, Artificial Sequence
  Synthetic oligonucleotide
gggggataagcagatgcaataacggcattt

SEQ ID NO: 368810 - DNA, 30 bp, Artificial Sequence
  Synthetic oligonucleotide
gagagaataaatggtcacatcgtggcattt

SEQ ID NO: 368811 - DNA, 30 bp, Artificial Sequence
  Synthetic oligonucleotide
tccaatctaatgcgtcggcttttggcattt

SEQ ID NO: 368812 - DNA, 30 bp, Artificial Sequence
  Synthetic oligonucleotide
aagtaagccccttgaggataaccatcattt

SEQ ID NO: 368813 - DNA, 30 bp, Artificial Sequence
  Synthetic oligonucleotide
gattggtgatggtttagcttggtatcattt

SEQ ID NO: 368814 - DNA, 30 bp, Artificial Sequence
  Synthetic oligonucleotide
aatcgcgatagtagcctagaatgaagattt

SEQ ID NO: 368815 - DNA, 30 bp, Artificial Sequence
  Synthetic oligonucleotide
atctcgagcccttaacaccaggcgagattt

SEQ ID NO: 368816 - DNA, 30 bp, Artificial Sequence
  Synthetic oligonucleotide
ttaccgggacgtttaccacggcggagattt

SEQ ID NO: 368817 - DNA, 30 bp, Artificial Sequence
  Synthetic oligonucleotide
agttgtgtacccgcgaagacttggagattt

SEQ ID NO: 368818 - DNA, 30 bp, Artificial Sequence
  Synthetic oligonucleotide
ggtgaggaccacccgcggtcacatagattt

SEQ ID NO: 368819 - DNA, 30 bp, Artificial Sequence
  Synthetic oligonucleotide
ccctaggcggacgtgggtgcgaaacgattt

SEQ ID NO: 368820 - DNA, 30 bp, Artificial Sequence
  Synthetic oligonucleotide
catatgtagtagcatactgtaaaccgattt

SEQ ID NO: 368821 - DNA, 30 bp, Artificial Sequence
  Synthetic oligonucleotide
agcctgcaacgactgccttagcatcgattt

SEQ ID NO: 368822 - DNA, 30 bp, Artificial Sequence
  Synthetic oligonucleotide
tagacatcgacaggccatacaggtcgattt

SEQ ID NO: 368823 - DNA, 30 bp, Artificial Sequence
  Synthetic oligonucleotide
acggattccaggcgatggtggtaaggattt

SEQ ID NO: 368824 - DNA, 30 bp, Artificial Sequence
  Synthetic oligonucleotide
cgcttccgctgctatcccggcagaggattt

SEQ ID NO: 368825 - DNA, 30 bp, Artificial Sequence
  Synthetic oligonucleotide
atgagcctattggtaccgcatataggattt

SEQ ID NO: 368826 - DNA, 30 bp, Artificial Sequence
  Synthetic oligonucleotide
tggcccttacgtcatgcgagcgacggattt

SEQ ID NO: 368827 - DNA, 30 bp, Artificial Sequence
  Synthetic oligonucleotide
cgtaggtggcgtcatttcgattacggattt

SEQ ID NO: 368828 - DNA, 30 bp, Artificial Sequence
  Synthetic oligonucleotide
atcggcaggaactgcaataggggcggattt

SEQ ID NO: 368829 - DNA, 30 bp, Artificial Sequence
  Synthetic oligonucleotide
atgaggattaaatggatgacatgcggattt

SEQ ID NO: 368830 - DNA, 30 bp, Artificial Sequence
  Synthetic oligonucleotide
ccggtcgacggcaagatagaaatcggattt

SEQ ID NO: 368831 - DNA, 30 bp, Artificial Sequence
  Synthetic oligonucleotide
agtgattgttcaacaagtttgttcggattt

SEQ ID NO: 368832 - DNA, 30 bp, Artificial Sequence
  Synthetic oligonucleotide
aagtcatatgggcctataatggagggattt

SEQ ID NO: 368833 - DNA, 30 bp, Artificial Sequence
  Synthetic oligonucleotide
ccaactgggtcaggctcagtaacgggattt

SEQ ID NO: 368834 - DNA, 29 bp, Artificial Sequence
  Synthetic oligonucleotide
tacgcttacgccaaatgtgtacgggattt

SEQ ID NO: 368835 - DNA, 30 bp, Artificial Sequence
  Synthetic oligonucleotide
gggctttatgcagaaaatcagaggggattt

SEQ ID NO: 368836 - DNA, 31 bp, Artificial Sequence
  Synthetic oligonucleotide
cagagataattaatcaacttgttggggattt

SEQ ID NO: 368837 - DNA, 30 bp, Artificial Sequence
  Synthetic oligonucleotide
gtaataaaatgcgtgagaattgtgggattt

SEQ ID NO: 368838 - DNA, 30 bp, Artificial Sequence
  Synthetic oligonucleotide
ccgtgctcggctgaataaggtggtggattt

SEQ ID NO: 368839 - DNA, 30 bp, Artificial Sequence
  Synthetic oligonucleotide
gtcgaacatacgaccaaaaaatgtggattt

SEQ ID NO: 368840 - DNA, 30 bp, Artificial Sequence
  Synthetic oligonucleotide
cacgacggaggaggtttaacacaatgattt

SEQ ID NO: 368841 - DNA, 30 bp, Artificial Sequence
  Synthetic oligonucleotide
ttcatcaggaatgagtctattgaatgattt

SEQ ID NO: 368842 - DNA, 30 bp, Artificial Sequence
  Synthetic oligonucleotide
tttaactagatcctaaccgggcgatgattt

SEQ ID NO: 368843 - DNA, 30 bp, Artificial Sequence
  Synthetic oligonucleotide
gttgggacattcggggctttgatatgattt

SEQ ID NO: 368844 - DNA, 30 bp, Artificial Sequence
  Synthetic oligonucleotide
tacatggctaaacggctttctgtctgattt

SEQ ID NO: 368845 - DNA, 30 bp, Artificial Sequence
  Synthetic oligonucleotide
cgtttgtattttgcagagcgttggtgattt

SEQ ID NO: 368846 - DNA, 30 bp, Artificial Sequence
  Synthetic oligonucleotide
aacaaagtactcatctgcatttggtgattt

SEQ ID NO: 368847 - DNA, 30 bp, Artificial Sequence
  Synthetic oligonucleotide
attgagatcagataagcagtccattgattt

SEQ ID NO: 368848 - DNA, 30 bp, Artificial Sequence
  Synthetic oligonucleotide
ggtcctctggttgcggacctatcttgattt

SEQ ID NO: 368849 - DNA, 30 bp, Artificial Sequence
  Synthetic oligonucleotide
cgccgaatcagcaggcgcataaacatattt

SEQ ID NO: 368850 - DNA, 30 bp, Artificial Sequence
  Synthetic oligonucleotide
aaagaaggcttttgtgggtacgacatattt

SEQ ID NO: 368851 - DNA, 30 bp, Artificial Sequence
  Synthetic oligonucleotide
gggtcccataaattcacacttaccatattt

SEQ ID NO: 368852 - DNA, 30 bp, Artificial Sequence
  Synthetic oligonucleotide
cgatggctcgggggtgttctaggcatattt

SEQ ID NO: 368853 - DNA, 30 bp, Artificial Sequence
  Synthetic oligonucleotide
agcgtggtgtccggatttttcaagatattt

SEQ ID NO: 368854 - DNA, 30 bp, Artificial Sequence
  Synthetic oligonucleotide
ggtcggtggaaccggacgtacgcgatattt

SEQ ID NO: 368855 - DNA, 30 bp, Artificial Sequence
  Synthetic oligonucleotide
gcattaaccccgtcatgtaaggatatattt

SEQ ID NO: 368856 - DNA, 30 bp, Artificial Sequence
  Synthetic oligonucleotide
tggagcggcctttaggagttgtctatattt

SEQ ID NO: 368857 - DNA, 30 bp, Artificial Sequence
  Synthetic oligonucleotide
tcattgccggcgtcctcctggattatattt

SEQ ID NO: 368858 - DNA, 30 bp, Artificial Sequence
  Synthetic oligonucleotide
cagagtgggaatcccattgtcaacctattt

SEQ ID NO: 368859 - DNA, 30 bp, Artificial Sequence
  Synthetic oligonucleotide
taattccggtttcggaccataagcctattt

SEQ ID NO: 368860 - DNA, 30 bp, Artificial Sequence
  Synthetic oligonucleotide
gacacatttggcctaagattgaaagtattt

SEQ ID NO: 368861 - DNA, 30 bp, Artificial Sequence
  Synthetic oligonucleotide
tatttgatgccacgtttccgacgggtattt

SEQ ID NO: 368862 - DNA, 30 bp, Artificial Sequence
  Synthetic oligonucleotide
cgggtaaggtctttgtcctgaggggtattt

SEQ ID NO: 368863 - DNA, 30 bp, Artificial Sequence
  Synthetic oligonucleotide
tcggtgtgggattctttcaaaatggtattt

SEQ ID NO: 368864 - DNA, 30 bp, Artificial Sequence
  Synthetic oligonucleotide
ctttccctcatctggcatgcctctgtattt

SEQ ID NO: 368865 - DNA, 30 bp, Artificial Sequence
  Synthetic oligonucleotide
attatgtgctttgcggataaccgtgtattt

SEQ ID NO: 368866 - DNA, 30 bp, Artificial Sequence
  Synthetic oligonucleotide
ttaagtggactgcggtgcttcccattattt

SEQ ID NO: 368867 - DNA, 30 bp, Artificial Sequence
  Synthetic oligonucleotide
ttaggtggggagtccactcgattattattt

SEQ ID NO: 368868 - DNA, 30 bp, Artificial Sequence
  Synthetic oligonucleotide
acatgtgtgtcgttaacagcggtcttattt

SEQ ID NO: 368869 - DNA, 30 bp, Artificial Sequence
  Synthetic oligonucleotide
acgttattagcggaatggttagagttattt

SEQ ID NO: 368870 - DNA, 30 bp, Artificial Sequence
  Synthetic oligonucleotide
cggtacaatcgacaagattgacggttattt

SEQ ID NO: 368871 - DNA, 30 bp, Artificial Sequence
  Synthetic oligonucleotide
gactggggacagatagggctagctttattt

SEQ ID NO: 368872 - DNA, 30 bp, Artificial Sequence
  Synthetic oligonucleotide
ccaggtgcaaccacaaaagtatctttattt

SEQ ID NO: 368873 - DNA, 30 bp, Artificial Sequence
  Synthetic oligonucleotide
ggtcgttcaaagcctgtagcgcaaaacttt

SEQ ID NO: 368874 - DNA, 30 bp, Artificial Sequence
  Synthetic oligonucleotide
cagtcctaactgcctggatacaacaacttt

SEQ ID NO: 368875 - DNA, 30 bp, Artificial Sequence
  Synthetic oligonucleotide
gcccttagtgagtgattttagtggaacttt

SEQ ID NO: 368876 - DNA, 30 bp, Artificial Sequence
  Synthetic oligonucleotide
gatcgcgctataacttaccgtatgaacttt

SEQ ID NO: 368877 - DNA, 30 bp, Artificial Sequence
  Synthetic oligonucleotide
tacgtttagtggccgctcggtgaacacttt

SEQ ID NO: 368878 - DNA, 30 bp, Artificial Sequence
  Synthetic oligonucleotide
aagacttccttacacagctggagacacttt

SEQ ID NO: 368879 - DNA, 30 bp, Artificial Sequence
  Synthetic oligonucleotide
tgggtatgacatctttgatgggaccacttt

SEQ ID NO: 368880 - DNA, 30 bp, Artificial Sequence
  Synthetic oligonucleotide
accgggcataaagtcgattaataccacttt

SEQ ID NO: 368881 - DNA, 30 bp, Artificial Sequence
  Synthetic oligonucleotide
ttctaatacagcgctggtacaccccacttt

SEQ ID NO: 368882 - DNA, 30 bp, Artificial Sequence
  Synthetic oligonucleotide
tatatacataccacaagtgaaggccacttt

SEQ ID NO: 368883 - DNA, 30 bp, Artificial Sequence
  Synthetic oligonucleotide
tgtcatgtgggatgtagtatcacgcacttt

SEQ ID NO: 368884 - DNA, 30 bp, Artificial Sequence
  Synthetic oligonucleotide
attacgccacatataaggcgtatgcacttt

SEQ ID NO: 368885 - DNA, 30 bp, Artificial Sequence
  Synthetic oligonucleotide
aaactgccatccatgaacacttaagacttt

SEQ ID NO: 368886 - DNA, 30 bp, Artificial Sequence
  Synthetic oligonucleotide
tggttatataattctgttattagagacttt

SEQ ID NO: 368887 - DNA, 30 bp, Artificial Sequence
  Synthetic oligonucleotide
atggctcaaaccccttattgttgcgacttt

SEQ ID NO: 368888 - DNA, 30 bp, Artificial Sequence
  Synthetic oligonucleotide
gggtcggctccttcctgcaaccaggacttt

SEQ ID NO: 368889 - DNA, 30 bp, Artificial Sequence
  Synthetic oligonucleotide
aatagtgcgatagtgctataggctgacttt

SEQ ID NO: 368890 - DNA, 30 bp, Artificial Sequence
  Synthetic oligonucleotide
atctttaggatggccagggactctgacttt

SEQ ID NO: 368891 - DNA, 30 bp, Artificial Sequence
  Synthetic oligonucleotide
gttcccaatcccggttcggtctttgacttt

SEQ ID NO: 368892 - DNA, 30 bp, Artificial Sequence
  Synthetic oligonucleotide
ccggtacagtaatagaacttatgatacttt

SEQ ID NO: 368893 - DNA, 30 bp, Artificial Sequence
  Synthetic oligonucleotide
ttatttcgtcctagggaagtcgcctacttt

SEQ ID NO: 368894 - DNA, 29 bp, Artificial Sequence
  Synthetic oligonucleotide
ggcagatgaaagcggagaggtgctacttt

SEQ ID NO: 368895 - DNA, 30 bp, Artificial Sequence
  Synthetic oligonucleotide
cagacctgcgcaaggtcaagtttctacttt

SEQ ID NO: 368896 - DNA, 30 bp, Artificial Sequence
  Synthetic oligonucleotide
ggattaaatgctccaataggaccgtacttt

SEQ ID NO: 368897 - DNA, 30 bp, Artificial Sequence
  Synthetic oligonucleotide
tctagtggcaggtcttggtgtgggtacttt

SEQ ID NO: 368898 - DNA, 30 bp, Artificial Sequence
  Synthetic oligonucleotide
atgatgtcctaggcatacatatattacttt

SEQ ID NO: 368899 - DNA, 30 bp, Artificial Sequence
  Synthetic oligonucleotide
ccattcaaatattatcccaacggaaccttt

SEQ ID NO: 368900 - DNA, 31 bp, Artificial Sequence
  Synthetic oligonucleotide
gcgaccgctaggtctaccagggttaaccttt

SEQ ID NO: 368901 - DNA, 30 bp, Artificial Sequence
  Synthetic oligonucleotide
cacaattacgaaaggaaagtccacaccttt

SEQ ID NO: 368902 - DNA, 30 bp, Artificial Sequence
  Synthetic oligonucleotide
acctaaagtaaaatttcttgatggaccttt

SEQ ID NO: 368903 - DNA, 30 bp, Artificial Sequence
  Synthetic oligonucleotide
ttgctaccggtctcgtaaatgtataccttt

SEQ ID NO: 368904 - DNA, 30 bp, Artificial Sequence
  Synthetic oligonucleotide
aaatgcatccctactacggcaactaccttt

SEQ ID NO: 368905 - DNA, 30 bp, Artificial Sequence
  Synthetic oligonucleotide
cgctggttcctcaagtagggaactaccttt

SEQ ID NO: 368906 - DNA, 30 bp, Artificial Sequence
  Synthetic oligonucleotide
agtctggactgtataaaatcctgtaccttt

SEQ ID NO: 368907 - DNA, 30 bp, Artificial Sequence
  Synthetic oligonucleotide
gatcgctagctagtataacgggaccccttt

SEQ ID NO: 368908 - DNA, 30 bp, Artificial Sequence
  Synthetic oligonucleotide
gcaaactaggtaaagcggtccggtcccttt

SEQ ID NO: 368909 - DNA, 30 bp, Artificial Sequence
  Synthetic oligonucleotide
acctagacatcgcagacgtgtgaagccttt

SEQ ID NO: 368910 - DNA, 30 bp, Artificial Sequence
  Synthetic oligonucleotide
tcggtgtgctcgttggcaagatacgccttt

SEQ ID NO: 368911 - DNA, 30 bp, Artificial Sequence
  Synthetic oligonucleotide
aaaacggatgactaggccggaatcgccttt

SEQ ID NO: 368912 - DNA, 30 bp, Artificial Sequence
  Synthetic oligonucleotide
ctatagacgaatggaacaacgttcgccttt

SEQ ID NO: 368913 - DNA, 30 bp, Artificial Sequence
  Synthetic oligonucleotide
atatactgcgcggcggccaggaaggccttt

SEQ ID NO: 368914 - DNA, 30 bp, Artificial Sequence
  Synthetic oligonucleotide
tagattgcacgtctctgaccatatgccttt

SEQ ID NO: 368915 - DNA, 30 bp, Artificial Sequence
  Synthetic oligonucleotide
ccacccgtggtcacagaggccgctgccttt

SEQ ID NO: 368916 - DNA, 30 bp, Artificial Sequence
  Synthetic oligonucleotide
tttaacgcgcggacgaatagcacatccttt

SEQ ID NO: 368917 - DNA, 30 bp, Artificial Sequence
  Synthetic oligonucleotide
gggttggcgaaaacaggcgcggcatccttt

SEQ ID NO: 368918 - DNA, 30 bp, Artificial Sequence
  Synthetic oligonucleotide
ccatgataaatccttccaggtagatccttt

SEQ ID NO: 368919 - DNA, 30 bp, Artificial Sequence
  Synthetic oligonucleotide
gtcctttgtttaacacatggtcgatccttt

SEQ ID NO: 368920 - DNA, 30 bp, Artificial Sequence
  Synthetic oligonucleotide
cacggtttgtctacgaactacatatccttt

SEQ ID NO: 368921 - DNA, 30 bp, Artificial Sequence
  Synthetic oligonucleotide
tctggaagcgttcatgggccaaactccttt

SEQ ID NO: 368922 - DNA, 30 bp, Artificial Sequence
  Synthetic oligonucleotide
ctcaggccttgagcctccctggactccttt

SEQ ID NO: 368923 - DNA, 30 bp, Artificial Sequence
  Synthetic oligonucleotide
ttccactttccctgcgttgtattctccttt

SEQ ID NO: 368924 - DNA, 30 bp, Artificial Sequence
  Synthetic oligonucleotide
acacaagatcctatcggggacaattccttt

SEQ ID NO: 368925 - DNA, 30 bp, Artificial Sequence
  Synthetic oligonucleotide
ttctgagaaatggggtttcaccgaagcttt

SEQ ID NO: 368926 - DNA, 30 bp, Artificial Sequence
  Synthetic oligonucleotide
tgggcctagttggccgttacggacagcttt

SEQ ID NO: 368927 - DNA, 30 bp, Artificial Sequence
  Synthetic oligonucleotide
atctcggggtgagattgggactaccgcttt

SEQ ID NO: 368928 - DNA, 30 bp, Artificial Sequence
  Synthetic oligonucleotide
atttgtccggaatccacataactgcgcttt

SEQ ID NO: 368929 - DNA, 30 bp, Artificial Sequence
  Synthetic oligonucleotide
ctgaccagtggcccgagctttgaaggcttt

SEQ ID NO: 368930 - DNA, 30 bp, Artificial Sequence
  Synthetic oligonucleotide
aggggtcggtcagaactgggtgtaggcttt

SEQ ID NO: 368931 - DNA, 30 bp, Artificial Sequence
  Synthetic oligonucleotide
cggcgcgatatgcagacacgtaccggcttt

SEQ ID NO: 368932 - DNA, 30 bp, Artificial Sequence
  Synthetic oligonucleotide
tttgcaccgaagtcagctgattccggcttt

SEQ ID NO: 368933 - DNA, 31 bp, Artificial Sequence
  Synthetic oligonucleotide
agtgatatgaacaaactaatttgagggcttt

SEQ ID NO: 368934 - DNA, 29 bp, Artificial Sequence
  Synthetic oligonucleotide
gcacaaatcgacagtaagttaggggcttt

SEQ ID NO: 368935 - DNA, 30 bp, Artificial Sequence
  Synthetic oligonucleotide
aatcggaccgatgagggtgatatgggcttt

SEQ ID NO: 368936 - DNA, 30 bp, Artificial Sequence
  Synthetic oligonucleotide
caggagcaacaatgtgtaattgctggcttt

SEQ ID NO: 368937 - DNA, 30 bp, Artificial Sequence
  Synthetic oligonucleotide
tctagttcccggttcacaacatgtggcttt

SEQ ID NO: 368938 - DNA, 30 bp, Artificial Sequence
  Synthetic oligonucleotide
ttgggctccgtcttactccccaagtgcttt

SEQ ID NO: 368939 - DNA, 30 bp, Artificial Sequence
  Synthetic oligonucleotide
gtcgttagcgagtacgactgtggttgcttt

SEQ ID NO: 368940 - DNA, 30 bp, Artificial Sequence
  Synthetic oligonucleotide
gaaaggaaaaacgaacttcaaaacatcttt

SEQ ID NO: 368941 - DNA, 30 bp, Artificial Sequence
  Synthetic oligonucleotide
ctacggcaagaccggtacttcagcatcttt

SEQ ID NO: 368942 - DNA, 30 bp, Artificial Sequence
  Synthetic oligonucleotide
tctgcctatgagcaatccggtaagatcttt

SEQ ID NO: 368943 - DNA, 30 bp, Artificial Sequence
  Synthetic oligonucleotide
actcccactcatactacccggaatatcttt

SEQ ID NO: 368944 - DNA, 30 bp, Artificial Sequence
  Synthetic oligonucleotide
gaccgcgcaaccatgctcatctctatcttt

SEQ ID NO: 368945 - DNA, 30 bp, Artificial Sequence
  Synthetic oligonucleotide
ttcgtgagaacgtatcggtattaactcttt

SEQ ID NO: 368946 - DNA, 30 bp, Artificial Sequence
  Synthetic oligonucleotide
ggttcatcacagactgcatgggcactcttt

SEQ ID NO: 368947 - DNA, 30 bp, Artificial Sequence
  Synthetic oligonucleotide
ccgctaacccccaaagttacgggcctcttt

SEQ ID NO: 368948 - DNA, 30 bp, Artificial Sequence
  Synthetic oligonucleotide
acaattgggtcttggatctagcagctcttt

SEQ ID NO: 368949 - DNA, 30 bp, Artificial Sequence
  Synthetic oligonucleotide
cttggcaagatccccaagacacgtctcttt

SEQ ID NO: 368950 - DNA, 30 bp, Artificial Sequence
  Synthetic oligonucleotide
atgattagatactcctagtcagttctcttt

SEQ ID NO: 368951 - DNA, 30 bp, Artificial Sequence
  Synthetic oligonucleotide
agtagcaatgaggtcgcacgcaaagtcttt

SEQ ID NO: 368952 - DNA, 30 bp, Artificial Sequence
  Synthetic oligonucleotide
ttgatgaaagtgtacttaaggtaagtcttt

SEQ ID NO: 368953 - DNA, 30 bp, Artificial Sequence
  Synthetic oligonucleotide
tgccactaccaaaccgcatccagagtcttt

SEQ ID NO: 368954 - DNA, 30 bp, Artificial Sequence
  Synthetic oligonucleotide
ctcggcatgggggggcggagacgcgtcttt

SEQ ID NO: 368955 - DNA, 30 bp, Artificial Sequence
  Synthetic oligonucleotide
caacctttgactcgcccacatccggtcttt

SEQ ID NO: 368956 - DNA, 30 bp, Artificial Sequence
  Synthetic oligonucleotide
ttcatgtccgagcggcatgataatgtcttt

SEQ ID NO: 368957 - DNA, 30 bp, Artificial Sequence
  Synthetic oligonucleotide
ggagacccttatcaatgtgtagctgtcttt

SEQ ID NO: 368958 - DNA, 30 bp, Artificial Sequence
  Synthetic oligonucleotide
caagaacaatacatcgatccgagtgtcttt

SEQ ID NO: 368959 - DNA, 30 bp, Artificial Sequence
  Synthetic oligonucleotide
gtaggacgtgcagctaacgatattgtcttt

SEQ ID NO: 368960 - DNA, 30 bp, Artificial Sequence
  Synthetic oligonucleotide
tgagatgcggtaatttctttaaagttcttt

SEQ ID NO: 368961 - DNA, 30 bp, Artificial Sequence
  Synthetic oligonucleotide
ctcaatacagttctgttaacaaatttcttt

SEQ ID NO: 368962 - DNA, 30 bp, Artificial Sequence
  Synthetic oligonucleotide
ccacccaatcacacagatgccaatttcttt

SEQ ID NO: 368963 - DNA, 30 bp, Artificial Sequence
  Synthetic oligonucleotide
gagcccgcgggtcaggacactattttcttt

SEQ ID NO: 368964 - DNA, 30 bp, Artificial Sequence
  Synthetic oligonucleotide
gtgaggttattatgccactacaacaagttt

SEQ ID NO: 368965 - DNA, 30 bp, Artificial Sequence
  Synthetic oligonucleotide
acagccggtgtcttaatatgcttcaagttt

SEQ ID NO: 368966 - DNA, 30 bp, Artificial Sequence
  Synthetic oligonucleotide
gggtcttgcgtaaaagtccagtcgaagttt

SEQ ID NO: 368967 - DNA, 30 bp, Artificial Sequence
  Synthetic oligonucleotide
aagaaaggtcatacctttaggaggaagttt

SEQ ID NO: 368968 - DNA, 30 bp, Artificial Sequence
  Synthetic oligonucleotide
agcgcctctatccgcttctgggctaagttt

SEQ ID NO: 368969 - DNA, 30 bp, Artificial Sequence
  Synthetic oligonucleotide
gctccgttgcgctatcaatattctaagttt

SEQ ID NO: 368970 - DNA, 30 bp, Artificial Sequence
  Synthetic oligonucleotide
tccgattgcaggtggatcagttgtaagttt

SEQ ID NO: 368971 - DNA, 30 bp, Artificial Sequence
  Synthetic oligonucleotide
aatcagctaacgagctgaacaccacagttt

SEQ ID NO: 368972 - DNA, 30 bp, Artificial Sequence
  Synthetic oligonucleotide
tggaattattgacgcataattttacagttt

SEQ ID NO: 368973 - DNA, 30 bp, Artificial Sequence
  Synthetic oligonucleotide
caattcatgggaatcgtaagtctgcagttt

SEQ ID NO: 368974 - DNA, 30 bp, Artificial Sequence
  Synthetic oligonucleotide
aacgggttgggcaaccggtagcgagagttt

SEQ ID NO: 368975 - DNA, 30 bp, Artificial Sequence
  Synthetic oligonucleotide
tcccaaacactatcgagtttgctagagttt

SEQ ID NO: 368976 - DNA, 30 bp, Artificial Sequence
  Synthetic oligonucleotide
tccgccagcgtctactgctttcacgagttt

SEQ ID NO: 368977 - DNA, 30 bp, Artificial Sequence
  Synthetic oligonucleotide
ctatagcgatgaattttgttcatcgagttt

SEQ ID NO: 368978 - DNA, 30 bp, Artificial Sequence
  Synthetic oligonucleotide
cgctgtcttaaccagtaaggcaaggagttt

SEQ ID NO: 368979 - DNA, 30 bp, Artificial Sequence
  Synthetic oligonucleotide
aggtgtatgatacatgctctagtggagttt

SEQ ID NO: 368980 - DNA, 30 bp, Artificial Sequence
  Synthetic oligonucleotide
aaaccttaagagattaagcccgatgagttt

SEQ ID NO: 368981 - DNA, 30 bp, Artificial Sequence
  Synthetic oligonucleotide
ggaccacttcatgcttcttatgatgagttt

SEQ ID NO: 368982 - DNA, 30 bp, Artificial Sequence
  Synthetic oligonucleotide
cgcagacccgtcgagtcagtagtatagttt

SEQ ID NO: 368983 - DNA, 30 bp, Artificial Sequence
  Synthetic oligonucleotide
cggtcgcggacgtgtctatataagtagttt

SEQ ID NO: 368984 - DNA, 30 bp, Artificial Sequence
  Synthetic oligonucleotide
tattcagtagccggtcgggtgccgtagttt

SEQ ID NO: 368985 - DNA, 30 bp, Artificial Sequence
  Synthetic oligonucleotide
gatgggagaaaattcggtcagttgtagttt

SEQ ID NO: 368986 - DNA, 30 bp, Artificial Sequence
  Synthetic oligonucleotide
ggaactatgctggttagggctcgttagttt

SEQ ID NO: 368987 - DNA, 30 bp, Artificial Sequence
  Synthetic oligonucleotide
ccgcataggtaaagcccatggcgaacgttt

SEQ ID NO: 368988 - DNA, 30 bp, Artificial Sequence
  Synthetic oligonucleotide
gtggtaacaggtgatggcgaaagcacgttt

SEQ ID NO: 368989 - DNA, 30 bp, Artificial Sequence
  Synthetic oligonucleotide
tccatccaaagcagttcttaaaggacgttt

SEQ ID NO: 368990 - DNA, 31 bp, Artificial Sequence
  Synthetic oligonucleotide
tataatgtcctatcggcgttggactacgttt

SEQ ID NO: 368991 - DNA, 30 bp, Artificial Sequence
  Synthetic oligonucleotide
gtaagaatagcacccactcgatgtacgttt

SEQ ID NO: 368992 - DNA, 30 bp, Artificial Sequence
  Synthetic oligonucleotide
tcactccggatgcgcttggactttacgttt

SEQ ID NO: 368993 - DNA, 30 bp, Artificial Sequence
  Synthetic oligonucleotide
attgctctggtacttgttggcaaaccgttt

SEQ ID NO: 368994 - DNA, 30 bp, Artificial Sequence
  Synthetic oligonucleotide
aggcgcaattccgctcagcattcaccgttt

SEQ ID NO: 368995 - DNA, 30 bp, Artificial Sequence
  Synthetic oligonucleotide
gagcatttgtataagactgttaagccgttt

SEQ ID NO: 368996 - DNA, 30 bp, Artificial Sequence
  Synthetic oligonucleotide
cttgtcaacccatctcggaagtcgccgttt

SEQ ID NO: 368997 - DNA, 30 bp, Artificial Sequence
  Synthetic oligonucleotide
gtcatcgtaaaatcaccaccttcgccgttt

SEQ ID NO: 368998 - DNA, 30 bp, Artificial Sequence
  Synthetic oligonucleotide
agccgtagaaacatgccgacaaggccgttt

SEQ ID NO: 368999 - DNA, 30 bp, Artificial Sequence
  Synthetic oligonucleotide
gcgatacggaacggtgctatggggccgttt

SEQ ID NO: 369000 - DNA, 30 bp, Artificial Sequence
  Synthetic oligonucleotide
gatagatttgaacgctagagaaaagcgttt

SEQ ID NO: 369001 - DNA, 30 bp, Artificial Sequence
  Synthetic oligonucleotide
cggatttagtctggttccgcaagagcgttt

SEQ ID NO: 369002 - DNA, 30 bp, Artificial Sequence
  Synthetic oligonucleotide
ggccgcatcagggttaagtctaccgcgttt

SEQ ID NO: 369003 - DNA, 30 bp, Artificial Sequence
  Synthetic oligonucleotide
aggcaaacccccttaactctaggcgcgttt

SEQ ID NO: 369004 - DNA, 30 bp, Artificial Sequence
  Synthetic oligonucleotide
ttttagagtttatcttcaaactgggcgttt

SEQ ID NO: 369005 - DNA, 30 bp, Artificial Sequence
  Synthetic oligonucleotide
gccaagtctatagttctgccatcatcgttt

SEQ ID NO: 369006 - DNA, 30 bp, Artificial Sequence
  Synthetic oligonucleotide
acgcagagcgctgggatacggggctcgttt

SEQ ID NO: 369007 - DNA, 30 bp, Artificial Sequence
  Synthetic oligonucleotide
tgcttcttggcaggttgcctcgtctcgttt

SEQ ID NO: 369008 - DNA, 30 bp, Artificial Sequence
  Synthetic oligonucleotide
ggtgggttgctgtctatggatcagtcgttt

SEQ ID NO: 369009 - DNA, 30 bp, Artificial Sequence
  Synthetic oligonucleotide
atactaaattgtcacaatgccacgtcgttt

SEQ ID NO: 369010 - DNA, 30 bp, Artificial Sequence
  Synthetic oligonucleotide
tagtagagaagggatttaaatgtgtcgttt

SEQ ID NO: 369011 - DNA, 30 bp, Artificial Sequence
  Synthetic oligonucleotide
agtataaggcctgatgtcctcagttcgttt

SEQ ID NO: 369012 - DNA, 30 bp, Artificial Sequence
  Synthetic oligonucleotide
gcttagaagtcaatcttatcagtttcgttt

SEQ ID NO: 369013 - DNA, 30 bp, Artificial Sequence
  Synthetic oligonucleotide
tatcgggatggacttctccaaccaaggttt

SEQ ID NO: 369014 - DNA, 30 bp, Artificial Sequence
  Synthetic oligonucleotide
cagcgtttatacggaagaatccgaaggttt

SEQ ID NO: 369015 - DNA, 30 bp, Artificial Sequence
  Synthetic oligonucleotide
taaaagattatcgcgacctggatcaggttt

SEQ ID NO: 369016 - DNA, 30 bp, Artificial Sequence
  Synthetic oligonucleotide
tgagtgattcagttagcgtacgcgaggttt

SEQ ID NO: 369017 - DNA, 30 bp, Artificial Sequence
  Synthetic oligonucleotide
ccggtgcggttgactataccgtggaggttt

SEQ ID NO: 369018 - DNA, 30 bp, Artificial Sequence
  Synthetic oligonucleotide
caatagtaaacaggggtacatcgtaggttt

SEQ ID NO: 369019 - DNA, 30 bp, Artificial Sequence
  Synthetic oligonucleotide
catgaaaaccgtcccatatgttaacggttt

SEQ ID NO: 369020 - DNA, 30 bp, Artificial Sequence
  Synthetic oligonucleotide
atctagcggagatctaagtaatcacggttt

SEQ ID NO: 369021 - DNA, 30 bp, Artificial Sequence
  Synthetic oligonucleotide
tggagatcagggttttcggacagacggttt

SEQ ID NO: 369022 - DNA, 30 bp, Artificial Sequence
  Synthetic oligonucleotide
atagtgagccaatgtactgctctacggttt

SEQ ID NO: 369023 - DNA, 30 bp, Artificial Sequence
  Synthetic oligonucleotide
caaaaggaatgtggggctcccagccggttt

SEQ ID NO: 369024 - DNA, 30 bp, Artificial Sequence
  Synthetic oligonucleotide
cgataatttccagtggtcttgtagcggttt

SEQ ID NO: 369025 - DNA, 30 bp, Artificial Sequence
  Synthetic oligonucleotide
caacaatagttacctctaaatcggcggttt

SEQ ID NO: 369026 - DNA, 30 bp, Artificial Sequence
  Synthetic oligonucleotide
cgactacccgtcacgcactggatgcggttt

SEQ ID NO: 369027 - DNA, 30 bp, Artificial Sequence
  Synthetic oligonucleotide
taaggcttagtatgataacaagatcggttt

SEQ ID NO: 369028 - DNA, 30 bp, Artificial Sequence
  Synthetic oligonucleotide
gccactatatgacagatagaaccagggttt

SEQ ID NO: 369029 - DNA, 30 bp, Artificial Sequence
  Synthetic oligonucleotide
gcactaggcggttgttcctggtcagggttt

SEQ ID NO: 369030 - DNA, 30 bp, Artificial Sequence
  Synthetic oligonucleotide
acacatttcgtcttaaataggttagggttt

SEQ ID NO: 369031 - DNA, 30 bp, Artificial Sequence
  Synthetic oligonucleotide
gaggggtctcgtcgttatctacaggggttt

SEQ ID NO: 369032 - DNA, 30 bp, Artificial Sequence
  Synthetic oligonucleotide
tgtatatatctgtaccttcgcgaggggttt

SEQ ID NO: 369033 - DNA, 30 bp, Artificial Sequence
  Synthetic oligonucleotide
gagagccctaactaatacccgacggggttt

SEQ ID NO: 369034 - DNA, 30 bp, Artificial Sequence
  Synthetic oligonucleotide
cagaactcaagtgatgccggacctgggttt

SEQ ID NO: 369035 - DNA, 30 bp, Artificial Sequence
  Synthetic oligonucleotide
ctgcaaaacctaactatatctagtgggttt

SEQ ID NO: 369036 - DNA, 30 bp, Artificial Sequence
  Synthetic oligonucleotide
ataaaaaatttatgtaagtaacgtgggttt

SEQ ID NO: 369037 - DNA, 30 bp, Artificial Sequence
  Synthetic oligonucleotide
attcacggaaacataatgatgcgtgggttt

SEQ ID NO: 369038 - DNA, 30 bp, Artificial Sequence
  Synthetic oligonucleotide
ttcgtagcatcagcaacggttaaatggttt

SEQ ID NO: 369039 - DNA, 30 bp, Artificial Sequence
  Synthetic oligonucleotide
ataagtacgggcttaccgtgttcctggttt

SEQ ID NO: 369040 - DNA, 30 bp, Artificial Sequence
  Synthetic oligonucleotide
gtgggacgctgaccgttatattgctggttt

SEQ ID NO: 369041 - DNA, 30 bp, Artificial Sequence
  Synthetic oligonucleotide
gggtaccgcattccatttattttctggttt

SEQ ID NO: 369042 - DNA, 30 bp, Artificial Sequence
  Synthetic oligonucleotide
accagtggggtgctccttattgagtggttt

SEQ ID NO: 369043 - DNA, 30 bp, Artificial Sequence
  Synthetic oligonucleotide
ctagtctgagggcgtcctcttgcgtggttt

SEQ ID NO: 369044 - DNA, 30 bp, Artificial Sequence
  Synthetic oligonucleotide
gccattgtagtcccttagagccattggttt

SEQ ID NO: 369045 - DNA, 30 bp, Artificial Sequence
  Synthetic oligonucleotide
acatctcttattgttctaatagtttggttt

SEQ ID NO: 369046 - DNA, 30 bp, Artificial Sequence
  Synthetic oligonucleotide
gtattcaaggctgaatataaattttggttt

SEQ ID NO: 369047 - DNA, 30 bp, Artificial Sequence
  Synthetic oligonucleotide
aggccgggacatggagacttgacaatgttt

SEQ ID NO: 369048 - DNA, 30 bp, Artificial Sequence
  Synthetic oligonucleotide
tctctcgagaaaggtaaattgttaatgttt

SEQ ID NO: 369049 - DNA, 30 bp, Artificial Sequence
  Synthetic oligonucleotide
ggatatttgctctatctttgcaccatgttt

SEQ ID NO: 369050 - DNA, 30 bp, Artificial Sequence
  Synthetic oligonucleotide
gttccttgaaaaagatcacctgagatgttt

SEQ ID NO: 369051 - DNA, 30 bp, Artificial Sequence
  Synthetic oligonucleotide
acaattaattttcgggctccaaggatgttt

SEQ ID NO: 369052 - DNA, 30 bp, Artificial Sequence
  Synthetic oligonucleotide
ataggaaattatctagacatgaggatgttt

SEQ ID NO: 369053 - DNA, 30 bp, Artificial Sequence
  Synthetic oligonucleotide
gtgataaattagtgggagaaatggatgttt

SEQ ID NO: 369054 - DNA, 30 bp, Artificial Sequence
  Synthetic oligonucleotide
tgaatcactggcccaacgaccttgatgttt

SEQ ID NO: 369055 - DNA, 30 bp, Artificial Sequence
  Synthetic oligonucleotide
atgagttcacctgcaaaccgcactatgttt

SEQ ID NO: 369056 - DNA, 30 bp, Artificial Sequence
  Synthetic oligonucleotide
tgattattaatggcactcgaaattatgttt

SEQ ID NO: 369057 - DNA, 30 bp, Artificial Sequence
  Synthetic oligonucleotide
aattcccgaattaattggatactactgttt

SEQ ID NO: 369058 - DNA, 30 bp, Artificial Sequence
  Synthetic oligonucleotide
gcttaggtttgatcctgattaggcctgttt

SEQ ID NO: 369059 - DNA, 30 bp, Artificial Sequence
  Synthetic oligonucleotide
aggaccgcgcttttcactcagtgcctgttt

SEQ ID NO: 369060 - DNA, 30 bp, Artificial Sequence
  Synthetic oligonucleotide
cagtttaaagtaagtcacgaaaggctgttt

SEQ ID NO: 369061 - DNA, 30 bp, Artificial Sequence
  Synthetic oligonucleotide
ttggtctaataaatcaaatccctgctgttt

SEQ ID NO: 369062 - DNA, 30 bp, Artificial Sequence
  Synthetic oligonucleotide
gaatcactcgaaacgatttgcgatctgttt

SEQ ID NO: 369063 - DNA, 30 bp, Artificial Sequence
  Synthetic oligonucleotide
tctactcgtccaacggtacgccttctgttt

SEQ ID NO: 369064 - DNA, 30 bp, Artificial Sequence
  Synthetic oligonucleotide
gattatgctattcagggaccagaagtgttt

SEQ ID NO: 369065 - DNA, 30 bp, Artificial Sequence
  Synthetic oligonucleotide
aggatggagggacacaaagcggaagtgttt

SEQ ID NO: 369066 - DNA, 31 bp, Artificial Sequence
  Synthetic oligonucleotide
tagtccgcggaggtattgggttgaagtgttt

SEQ ID NO: 369067 - DNA, 30 bp, Artificial Sequence
  Synthetic oligonucleotide
tcaggagcaacattccagaatccagtgttt

SEQ ID NO: 369068 - DNA, 30 bp, Artificial Sequence
  Synthetic oligonucleotide
ctcacttcgcgggagcactgacgcgtgttt

SEQ ID NO: 369069 - DNA, 30 bp, Artificial Sequence
  Synthetic oligonucleotide
tggaatctgagggtgcgcgcgtcggtgttt

SEQ ID NO: 369070 - DNA, 30 bp, Artificial Sequence
  Synthetic oligonucleotide
ttgcggatttagcacgttcttatggtgttt

SEQ ID NO: 369071 - DNA, 30 bp, Artificial Sequence
  Synthetic oligonucleotide
tatttagtagtaggaacaatgcatgtgttt

SEQ ID NO: 369072 - DNA, 30 bp, Artificial Sequence
  Synthetic oligonucleotide
gtggctgaccatgttaatcggtctgtgttt

SEQ ID NO: 369073 - DNA, 30 bp, Artificial Sequence
  Synthetic oligonucleotide
cctgggagtgactcccaggacccattgttt

SEQ ID NO: 369074 - DNA, 30 bp, Artificial Sequence
  Synthetic oligonucleotide
tggccgaactatcaggcaatgccattgttt

SEQ ID NO: 369075 - DNA, 30 bp, Artificial Sequence
  Synthetic oligonucleotide
tcaggccactatgtatttatcgcattgttt

SEQ ID NO: 369076 - DNA, 30 bp, Artificial Sequence
  Synthetic oligonucleotide
tcattaggtacgagcaagatcaacttgttt

SEQ ID NO: 369077 - DNA, 30 bp, Artificial Sequence
  Synthetic oligonucleotide
gtgagctatttgaaggctaccaccttgttt

SEQ ID NO: 369078 - DNA, 30 bp, Artificial Sequence
  Synthetic oligonucleotide
gtgcgttttacctttcttgtcggcttgttt

SEQ ID NO: 369079 - DNA, 30 bp, Artificial Sequence
  Synthetic oligonucleotide
gacgataccatatgtcaggttgagttgttt

SEQ ID NO: 369080 - DNA, 30 bp, Artificial Sequence
  Synthetic oligonucleotide
ctgctcgagaggtaattggattagttgttt

SEQ ID NO: 369081 - DNA, 30 bp, Artificial Sequence
  Synthetic oligonucleotide
agtaagataatggcaccgcacgatttgttt

SEQ ID NO: 369082 - DNA, 30 bp, Artificial Sequence
  Synthetic oligonucleotide
caaagatgaccagtggcaaaatgtttgttt

SEQ ID NO: 369083 - DNA, 30 bp, Artificial Sequence
  Synthetic oligonucleotide
gagactctttctggagatcgggaaaatttt

SEQ ID NO: 369084 - DNA, 30 bp, Artificial Sequence
  Synthetic oligonucleotide
ggaatgaatcacctcagcgttacaaatttt

SEQ ID NO: 369085 - DNA, 30 bp, Artificial Sequence
  Synthetic oligonucleotide
tgtctgtgtgggtcgactcacggaaatttt

SEQ ID NO: 369086 - DNA, 30 bp, Artificial Sequence
  Synthetic oligonucleotide
atcgggaagaactatctaaggtgaaatttt

SEQ ID NO: 369087 - DNA, 30 bp, Artificial Sequence
  Synthetic oligonucleotide
tgccagtctctcgcacctacgtgcaatttt

SEQ ID NO: 369088 - DNA, 30 bp, Artificial Sequence
  Synthetic oligonucleotide
tatagaggcattagtgctctgctcaatttt

SEQ ID NO: 369089 - DNA, 30 bp, Artificial Sequence
  Synthetic oligonucleotide
tcctcgggcgaggggtacacagcgaatttt

SEQ ID NO: 369090 - DNA, 30 bp, Artificial Sequence
  Synthetic oligonucleotide
caatctcggatatcgcaattttataatttt

SEQ ID NO: 369091 - DNA, 30 bp, Artificial Sequence
  Synthetic oligonucleotide
agtcatgtttgtccttgacaacgtaatttt

SEQ ID NO: 369092 - DNA, 30 bp, Artificial Sequence
  Synthetic oligonucleotide
ttgacatcaatgtgctaaaaatgtaatttt

SEQ ID NO: 369093 - DNA, 30 bp, Artificial Sequence
  Synthetic oligonucleotide
tgcatcaaacgatttgcaggttgtaatttt

SEQ ID NO: 369094 - DNA, 30 bp, Artificial Sequence
  Synthetic oligonucleotide
cgttccataaattgagtgccggaacatttt

SEQ ID NO: 369095 - DNA, 30 bp, Artificial Sequence
  Synthetic oligonucleotide
gggcacaggctatagataggttaacatttt

SEQ ID NO: 369096 - DNA, 30 bp, Artificial Sequence
  Synthetic oligonucleotide
actctgcgctcctccctacagcgacatttt

SEQ ID NO: 369097 - DNA, 30 bp, Artificial Sequence
  Synthetic oligonucleotide
cgttgggcatatgtgtaacctatacatttt

SEQ ID NO: 369098 - DNA, 30 bp, Artificial Sequence
  Synthetic oligonucleotide
gaagattctcggcttctgcaccaccatttt

SEQ ID NO: 369099 - DNA, 30 bp, Artificial Sequence
  Synthetic oligonucleotide
atcgaaaaataggcaatgggataccatttt

SEQ ID NO: 369100 - DNA, 30 bp, Artificial Sequence
  Synthetic oligonucleotide
tctttacgcatgacacgggttacccatttt

SEQ ID NO: 369101 - DNA, 30 bp, Artificial Sequence
  Synthetic oligonucleotide
gaccgtaagaaagaaagggagtcccatttt

SEQ ID NO: 369102 - DNA, 30 bp, Artificial Sequence
  Synthetic oligonucleotide
gtttgggtggagtggctatgtcgagatttt

SEQ ID NO: 369103 - DNA, 30 bp, Artificial Sequence
  Synthetic oligonucleotide
gctaggcgcgcattcaaaaaattagatttt

SEQ ID NO: 369104 - DNA, 30 bp, Artificial Sequence
  Synthetic oligonucleotide
gatacacggaaattgacccgacacgatttt

SEQ ID NO: 369105 - DNA, 30 bp, Artificial Sequence
  Synthetic oligonucleotide
taacactatgtgtgtagaagtggcgatttt

SEQ ID NO: 369106 - DNA, 30 bp, Artificial Sequence
  Synthetic oligonucleotide
taaccctcctatccgaaggttacggatttt

SEQ ID NO: 369107 - DNA, 30 bp, Artificial Sequence
  Synthetic oligonucleotide
gtcgtgttagtgtggaacaacggggatttt

SEQ ID NO: 369108 - DNA, 30 bp, Artificial Sequence
  Synthetic oligonucleotide
cagtatacacaacacgatgcaaatgatttt

SEQ ID NO: 369109 - DNA, 30 bp, Artificial Sequence
  Synthetic oligonucleotide
aagaacgtttatcctgtcataggatatttt

SEQ ID NO: 369110 - DNA, 30 bp, Artificial Sequence
  Synthetic oligonucleotide
ctatggcggtggttgttccacctatatttt

SEQ ID NO: 369111 - DNA, 30 bp, Artificial Sequence
  Synthetic oligonucleotide
gtgtcgtaggcggatctacgcatctatttt

SEQ ID NO: 369112 - DNA, 30 bp, Artificial Sequence
  Synthetic oligonucleotide
aaattgcgccggaaaagtacttagtatttt

SEQ ID NO: 369113 - DNA, 30 bp, Artificial Sequence
  Synthetic oligonucleotide
ggactacttagtcttcgtaaaacgtatttt

SEQ ID NO: 369114 - DNA, 30 bp, Artificial Sequence
  Synthetic oligonucleotide
gaattgtcaccacgcaaagacgtgactttt

SEQ ID NO: 369115 - DNA, 30 bp, Artificial Sequence
  Synthetic oligonucleotide
ggaatagaactgattgctaagaaacctttt

SEQ ID NO: 369116 - DNA, 30 bp, Artificial Sequence
  Synthetic oligonucleotide
cctctacaccctttatcggaacgacctttt

SEQ ID NO: 369117 - DNA, 30 bp, Artificial Sequence
  Synthetic oligonucleotide
ctcgaatatcgtgaagtcattgtacctttt

SEQ ID NO: 369118 - DNA, 30 bp, Artificial Sequence
  Synthetic oligonucleotide
ttcttgactcggttcctgcagatgcctttt

SEQ ID NO: 369119 - DNA, 30 bp, Artificial Sequence
  Synthetic oligonucleotide
cattgttaacatagatcggatcatcctttt

SEQ ID NO: 369120 - DNA, 30 bp, Artificial Sequence
  Synthetic oligonucleotide
taaacgaggactaacttcaggcgtcctttt

SEQ ID NO: 369121 - DNA, 30 bp, Artificial Sequence
  Synthetic oligonucleotide
aacctgcagtttgcgattgtttgagctttt

SEQ ID NO: 369122 - DNA, 30 bp, Artificial Sequence
  Synthetic oligonucleotide
ccttgcagaatatggttcatacgggctttt

SEQ ID NO: 369123 - DNA, 30 bp, Artificial Sequence
  Synthetic oligonucleotide
tcacgtagtgtgaagagccgaggggctttt

SEQ ID NO: 369124 - DNA, 30 bp, Artificial Sequence
  Synthetic oligonucleotide
gtttcgaattttagatctgattgggctttt

SEQ ID NO: 369125 - DNA, 30 bp, Artificial Sequence
  Synthetic oligonucleotide
aaaagtaagaaaaaactgatgtgtgctttt

SEQ ID NO: 369126 - DNA, 30 bp, Artificial Sequence
  Synthetic oligonucleotide
actaacgcgagcttgtaggcgattgctttt

SEQ ID NO: 369127 - DNA, 30 bp, Artificial Sequence
  Synthetic oligonucleotide
atctttcgagtacacaccgcaccctctttt

SEQ ID NO: 369128 - DNA, 30 bp, Artificial Sequence
  Synthetic oligonucleotide
atgattggcctgaacttaactgcctctttt

SEQ ID NO: 369129 - DNA, 30 bp, Artificial Sequence
  Synthetic oligonucleotide
tccggatgctgcgaggaatggctctctttt

SEQ ID NO: 369130 - DNA, 30 bp, Artificial Sequence
  Synthetic oligonucleotide
ccgaagaattcatagtttccgcggtctttt

SEQ ID NO: 369131 - DNA, 30 bp, Artificial Sequence
  Synthetic oligonucleotide
tgatgtttttcaacaaaagagttgtctttt

SEQ ID NO: 369132 - DNA, 30 bp, Artificial Sequence
  Synthetic oligonucleotide
gcctttgcacgctattttgcgcgaagtttt

SEQ ID NO: 369133 - DNA, 30 bp, Artificial Sequence
  Synthetic oligonucleotide
agtaatgcgttgtcagggttcgtaagtttt

SEQ ID NO: 369134 - DNA, 30 bp, Artificial Sequence
  Synthetic oligonucleotide
cgtagtcccacgagatacgcgcacagtttt

SEQ ID NO: 369135 - DNA, 30 bp, Artificial Sequence
  Synthetic oligonucleotide
agcgagaagtttaagtaggctgccagtttt

SEQ ID NO: 369136 - DNA, 30 bp, Artificial Sequence
  Synthetic oligonucleotide
aacaggtgacttcagttagtggcgagtttt

SEQ ID NO: 369137 - DNA, 30 bp, Artificial Sequence
  Synthetic oligonucleotide
taactcgcatagtctgtgtggcggagtttt

SEQ ID NO: 369138 - DNA, 30 bp, Artificial Sequence
  Synthetic oligonucleotide
tgggagttctatgcacaaggagggagtttt

SEQ ID NO: 369139 - DNA, 30 bp, Artificial Sequence
  Synthetic oligonucleotide
acgtggggtcgtagggtacactggagtttt

SEQ ID NO: 369140 - DNA, 30 bp, Artificial Sequence
  Synthetic oligonucleotide
ctgcgcctcctcggtacgccgtcccgtttt

SEQ ID NO: 369141 - DNA, 30 bp, Artificial Sequence
  Synthetic oligonucleotide
tggaggtttgtgcgtgggatatcgcgtttt

SEQ ID NO: 369142 - DNA, 30 bp, Artificial Sequence
  Synthetic oligonucleotide
gtttcttacgacttcctgcttatgcgtttt

SEQ ID NO: 369143 - DNA, 30 bp, Artificial Sequence
  Synthetic oligonucleotide
tcctcgtggtatagtcaattgcatcgtttt

SEQ ID NO: 369144 - DNA, 30 bp, Artificial Sequence
  Synthetic oligonucleotide
gttatgcccagcacggccatcgatcgtttt

SEQ ID NO: 369145 - DNA, 30 bp, Artificial Sequence
  Synthetic oligonucleotide
tccaagagaggaggtcatttgccaggtttt

SEQ ID NO: 369146 - DNA, 30 bp, Artificial Sequence
  Synthetic oligonucleotide
agttggactgttcatagaggaagcggtttt

SEQ ID NO: 369147 - DNA, 30 bp, Artificial Sequence
  Synthetic oligonucleotide
agactgcagtattaagctgtacgcggtttt

SEQ ID NO: 369148 - DNA, 30 bp, Artificial Sequence
  Synthetic oligonucleotide
ccatgtaatcaggtgcttaaaatcggtttt

SEQ ID NO: 369149 - DNA, 30 bp, Artificial Sequence
  Synthetic oligonucleotide
ggcatgaagagcagttcgtgggagggtttt

SEQ ID NO: 369150 - DNA, 30 bp, Artificial Sequence
  Synthetic oligonucleotide
ataagagactgagagagtaattcgggtttt

SEQ ID NO: 369151 - DNA, 30 bp, Artificial Sequence
  Synthetic oligonucleotide
gtaatcaactccgaagatgggaggggtttt

SEQ ID NO: 369152 - DNA, 30 bp, Artificial Sequence
  Synthetic oligonucleotide
agtacacctacattcgcctcctctggtttt

SEQ ID NO: 369153 - DNA, 30 bp, Artificial Sequence
  Synthetic oligonucleotide
agtccacccctcgcctactgtggtggtttt

SEQ ID NO: 369154 - DNA, 30 bp, Artificial Sequence
  Synthetic oligonucleotide
gccgggccatggtaaaaaaccgcatgtttt

SEQ ID NO: 369155 - DNA, 30 bp, Artificial Sequence
  Synthetic oligonucleotide
caacatgctactaatcgagattgatgtttt

SEQ ID NO: 369156 - DNA, 30 bp, Artificial Sequence
  Synthetic oligonucleotide
tagagccatctgggagaagctacctgtttt

SEQ ID NO: 369157 - DNA, 30 bp, Artificial Sequence
  Synthetic oligonucleotide
taaccttatacattgatggaatcctgtttt

SEQ ID NO: 369158 - DNA, 30 bp, Artificial Sequence
  Synthetic oligonucleotide
cagggcgagtagtgcccaattatctgtttt

SEQ ID NO: 369159 - DNA, 30 bp, Artificial Sequence
  Synthetic oligonucleotide
gttaagacaaaataatcctttgcgtgtttt

SEQ ID NO: 369160 - DNA, 30 bp, Artificial Sequence
  Synthetic oligonucleotide
ccgcaggccttgtgcagacaccattgtttt

SEQ ID NO: 369161 - DNA, 30 bp, Artificial Sequence
  Synthetic oligonucleotide
ttgtcatacagagcactactgtattgtttt

SEQ ID NO: 369162 - DNA, 30 bp, Artificial Sequence
  Synthetic oligonucleotide
tcaatgacagatgctcggggagcttgtttt

SEQ ID NO: 369163 - DNA, 30 bp, Artificial Sequence
  Synthetic oligonucleotide
ttgaggccctagactttaaacagttgtttt

SEQ ID NO: 369164 - DNA, 30 bp, Artificial Sequence
  Synthetic oligonucleotide
tctgctagagccaaaatctgcccaattttt

SEQ ID NO: 369165 - DNA, 30 bp, Artificial Sequence
  Synthetic oligonucleotide
gataacagggagtcttcaaagggaattttt

SEQ ID NO: 369166 - DNA, 30 bp, Artificial Sequence
  Synthetic oligonucleotide
ttttggtaaagccggaggcagggaattttt

SEQ ID NO: 369167 - DNA, 30 bp, Artificial Sequence
  Synthetic oligonucleotide
gaagaaatctctcaggcccaatgaattttt

SEQ ID NO: 369168 - DNA, 30 bp, Artificial Sequence
  Synthetic oligonucleotide
ggtaaagtgagacacttgtacttaattttt

SEQ ID NO: 369169 - DNA, 30 bp, Artificial Sequence
  Synthetic oligonucleotide
catttaccgaattataactggcgcattttt

SEQ ID NO: 369170 - DNA, 30 bp, Artificial Sequence
  Synthetic oligonucleotide
aggtactaataatttggaagagagattttt

SEQ ID NO: 369171 - DNA, 30 bp, Artificial Sequence
  Synthetic oligonucleotide
ggaaaagattggaaatggttcaatattttt

SEQ ID NO: 369172 - DNA, 30 bp, Artificial Sequence
  Synthetic oligonucleotide
aaaactacgagggacaggtcctctattttt

SEQ ID NO: 369173 - DNA, 30 bp, Artificial Sequence
  Synthetic oligonucleotide
ctcagtaaagaatggcatcctccacttttt

SEQ ID NO: 369174 - DNA, 30 bp, Artificial Sequence
  Synthetic oligonucleotide
attgtattaaactaggtgccatcacttttt

SEQ ID NO: 369175 - DNA, 30 bp, Artificial Sequence
  Synthetic oligonucleotide
agagtggaccacgtcatggtggtacttttt

SEQ ID NO: 369176 - DNA, 30 bp, Artificial Sequence
  Synthetic oligonucleotide
tatagaacgttgggcataagttaccttttt

SEQ ID NO: 369177 - DNA, 30 bp, Artificial Sequence
  Synthetic oligonucleotide
agtatttggaagcaaagggatgcgcttttt

SEQ ID NO: 369178 - DNA, 30 bp, Artificial Sequence
  Synthetic oligonucleotide
ctgttgtttcgaacagacgagctgcttttt

SEQ ID NO: 369179 - DNA, 30 bp, Artificial Sequence
  Synthetic oligonucleotide
cgcacaggagaagtagtgcctttgcttttt

SEQ ID NO: 369180 - DNA, 30 bp, Artificial Sequence
  Synthetic oligonucleotide
tgccggctactttgagacgtgggtcttttt

SEQ ID NO: 369181 - DNA, 30 bp, Artificial Sequence
  Synthetic oligonucleotide
atgaggggtacgaatgcttgctgagttttt

SEQ ID NO: 369182 - DNA, 30 bp, Artificial Sequence
  Synthetic oligonucleotide
gggctcgcccgttcccgtgtccccgttttt

SEQ ID NO: 369183 - DNA, 30 bp, Artificial Sequence
  Synthetic oligonucleotide
catcggggggtttgttgcgtatccgttttt

SEQ ID NO: 369184 - DNA, 30 bp, Artificial Sequence
  Synthetic oligonucleotide
gtacagcaataggttagagacggggttttt

SEQ ID NO: 369185 - DNA, 30 bp, Artificial Sequence
  Synthetic oligonucleotide
acatgtaaaagttaggtatattgggttttt

SEQ ID NO: 369186 - DNA, 30 bp, Artificial Sequence
  Synthetic oligonucleotide
aggtcgggatccttccgggcatatgttttt

SEQ ID NO: 369187 - DNA, 30 bp, Artificial Sequence
  Synthetic oligonucleotide
aaatcggtgcccaggtagtggtctgttttt

SEQ ID NO: 369188 - DNA, 30 bp, Artificial Sequence
  Synthetic oligonucleotide
gtctaactctctgggatactctgtgttttt

SEQ ID NO: 369189 - DNA, 30 bp, Artificial Sequence
  Synthetic oligonucleotide
gcatcaggagacatagccaagctatttttt

SEQ ID NO: 369190 - DNA, 30 bp, Artificial Sequence
  Synthetic oligonucleotide
agactgttgtcacaggattgcccctttttt

SEQ ID NO: 369191 - DNA, 30 bp, Artificial Sequence
  Synthetic oligonucleotide
atgggtggttacgaaactgcattctttttt

SEQ ID NO: 369192 - DNA, 30 bp, Artificial Sequence
  Synthetic oligonucleotide
atttacagcgccgatcaggccgggtttttt

SEQ ID NO: 369193 - DNA, 30 bp, Artificial Sequence
  Synthetic oligonucleotide
acagtaacaaaagtccgatacgattttttt

SEQ ID NO: 369194 - DNA, 30 bp, Artificial Sequence
  Synthetic oligonucleotide
agcgcgcaaagatactacttgacttttttt

SEQ ID NO: 369195 - DNA, 30 bp, Artificial Sequence
  Synthetic oligonucleotide
ctggtagctcattgtcgtttcctttttttt

SEQ ID NO: 369196 - DNA, 30 bp, Artificial Sequence
  Synthetic oligonucleotide
tcaaataatggatgggtccatacaaaaaaa

SEQ ID NO: 369197 - DNA, 30 bp, Artificial Sequence
  Synthetic oligonucleotide
taatcaacgagtccaggaaaaccaaaaaaa

SEQ ID NO: 369198 - DNA, 30 bp, Artificial Sequence
  Synthetic oligonucleotide
aacgcggcacaggacagcaagaacaaaaaa

SEQ ID NO: 369199 - DNA, 30 bp, Artificial Sequence
  Synthetic oligonucleotide
gaaccagcttaacaaggttacagcaaaaaa

SEQ ID NO: 369200 - DNA, 30 bp, Artificial Sequence
  Synthetic oligonucleotide
catctgcgggctcatggcctacagaaaaaa

SEQ ID NO: 369201 - DNA, 30 bp, Artificial Sequence
  Synthetic oligonucleotide
gcctgtaccgcctccaacaaacggaaaaaa

SEQ ID NO: 369202 - DNA, 30 bp, Artificial Sequence
  Synthetic oligonucleotide
tggcaattgttttgtagtggtatgaaaaaa

SEQ ID NO: 369203 - DNA, 30 bp, Artificial Sequence
  Synthetic oligonucleotide
gctatgcctgacaagttggggtataaaaaa

SEQ ID NO: 369204 - DNA, 30 bp, Artificial Sequence
  Synthetic oligonucleotide
ccgcagtactcccaaacaaccattaaaaaa

SEQ ID NO: 369205 - DNA, 30 bp, Artificial Sequence
  Synthetic oligonucleotide
gattctacgggacaccgccggattaaaaaa

SEQ ID NO: 369206 - DNA, 30 bp, Artificial Sequence
  Synthetic oligonucleotide
catgtcaaaccagaccgaccaaaacaaaaa

SEQ ID NO: 369207 - DNA, 30 bp, Artificial Sequence
  Synthetic oligonucleotide
tcggagtgcgccagttacttcatacaaaaa

SEQ ID NO: 369208 - DNA, 30 bp, Artificial Sequence
  Synthetic oligonucleotide
gtgcccgggctgattacctgaaaccaaaaa

SEQ ID NO: 369209 - DNA, 30 bp, Artificial Sequence
  Synthetic oligonucleotide
cttatataaaggtatttttggaaccaaaaa

SEQ ID NO: 369210 - DNA, 30 bp, Artificial Sequence
  Synthetic oligonucleotide
ggtgattcgggtcaatcattgccccaaaaa

SEQ ID NO: 369211 - DNA, 30 bp, Artificial Sequence
  Synthetic oligonucleotide
tcccatcactcatatggtctcagccaaaaa

SEQ ID NO: 369212 - DNA, 30 bp, Artificial Sequence
  Synthetic oligonucleotide
aggccggtcattctttaggattgccaaaaa

SEQ ID NO: 369213 - DNA, 30 bp, Artificial Sequence
  Synthetic oligonucleotide
tcgcgattggaaagcattgtttagcaaaaa

SEQ ID NO: 369214 - DNA, 30 bp, Artificial Sequence
  Synthetic oligonucleotide
aaggttatcatctatctcaagaggcaaaaa

SEQ ID NO: 369215 - DNA, 30 bp, Artificial Sequence
  Synthetic oligonucleotide
actctctggaccaagcggtttctgcaaaaa

SEQ ID NO: 369216 - DNA, 30 bp, Artificial Sequence
  Synthetic oligonucleotide
ttactgattctcagttgaagcggtcaaaaa

SEQ ID NO: 369217 - DNA, 30 bp, Artificial Sequence
  Synthetic oligonucleotide
tcgataccagcttttggtctccttcaaaaa

SEQ ID NO: 369218 - DNA, 30 bp, Artificial Sequence
  Synthetic oligonucleotide
aagaattcaggtagtacggagacagaaaaa

SEQ ID NO: 369219 - DNA, 30 bp, Artificial Sequence
  Synthetic oligonucleotide
ctcctcagctggtgaggacgaggagaaaaa

SEQ ID NO: 369220 - DNA, 30 bp, Artificial Sequence
  Synthetic oligonucleotide
tgtttataagctcacggggactccgaaaaa

SEQ ID NO: 369221 - DNA, 30 bp, Artificial Sequence
  Synthetic oligonucleotide
gggtttaacgctcccagagagcgcgaaaaa

SEQ ID NO: 369222 - DNA, 30 bp, Artificial Sequence
  Synthetic oligonucleotide
cgccagttcggaggtcacaacatcgaaaaa

SEQ ID NO: 369223 - DNA, 30 bp, Artificial Sequence
  Synthetic oligonucleotide
gggctcggaaaatcggatgacctcgaaaaa

SEQ ID NO: 369224 - DNA, 30 bp, Artificial Sequence
  Synthetic oligonucleotide
accgggcaaaatcaccagtgagtcgaaaaa

SEQ ID NO: 369225 - DNA, 30 bp, Artificial Sequence
  Synthetic oligonucleotide
gccgggtttctgggtatgaggatggaaaaa

SEQ ID NO: 369226 - DNA, 30 bp, Artificial Sequence
  Synthetic oligonucleotide
gataatagttggaatgtgcaccatgaaaaa

SEQ ID NO: 369227 - DNA, 30 bp, Artificial Sequence
  Synthetic oligonucleotide
gccacgtgagtcagaaacttgactgaaaaa

SEQ ID NO: 369228 - DNA, 30 bp, Artificial Sequence
  Synthetic oligonucleotide
agaagctactggggttttcgatgtgaaaaa

SEQ ID NO: 369229 - DNA, 30 bp, Artificial Sequence
  Synthetic oligonucleotide
aagtggctccggattagagccagataaaaa

SEQ ID NO: 369230 - DNA, 30 bp, Artificial Sequence
  Synthetic oligonucleotide
gagctattactaaatattggagtataaaaa

SEQ ID NO: 369231 - DNA, 30 bp, Artificial Sequence
  Synthetic oligonucleotide
attccagctccattaacctgcagctaaaaa

SEQ ID NO: 369232 - DNA, 30 bp, Artificial Sequence
  Synthetic oligonucleotide
aatggcgagctagtacaaactccgtaaaaa

SEQ ID NO: 369233 - DNA, 30 bp, Artificial Sequence
  Synthetic oligonucleotide
tcacgggactgacacggtattgtgtaaaaa

SEQ ID NO: 369234 - DNA, 30 bp, Artificial Sequence
  Synthetic oligonucleotide
actattggcaatatggtcaaccattaaaaa

SEQ ID NO: 369235 - DNA, 30 bp, Artificial Sequence
  Synthetic oligonucleotide
caatgattgaggtcagtcttggattaaaaa

SEQ ID NO: 369236 - DNA, 30 bp, Artificial Sequence
  Synthetic oligonucleotide
ccggccccaggccagtattcctcttaaaaa

SEQ ID NO: 369237 - DNA, 30 bp, Artificial Sequence
  Synthetic oligonucleotide
ggagctaacgcatcgttcgcttgttaaaaa

SEQ ID NO: 369238 - DNA, 30 bp, Artificial Sequence
  Synthetic oligonucleotide
ttagctctgctagtcaggacagtttaaaaa

SEQ ID NO: 369239 - DNA, 30 bp, Artificial Sequence
  Synthetic oligonucleotide
aaggccgtaacagcaactagattttaaaaa

SEQ ID NO: 369240 - DNA, 30 bp, Artificial Sequence
  Synthetic oligonucleotide
gtgaagtggctgtgccgataagaaacaaaa

SEQ ID NO: 369241 - DNA, 30 bp, Artificial Sequence
  Synthetic oligonucleotide
aaccttgtctccatagttgaatcaacaaaa

SEQ ID NO: 369242 - DNA, 30 bp, Artificial Sequence
  Synthetic oligonucleotide
atcaaaagctcgtaatcacagtcaacaaaa

SEQ ID NO: 369243 - DNA, 30 bp, Artificial Sequence
  Synthetic oligonucleotide
agtcttaaaccgttaagactgagcacaaaa

SEQ ID NO: 369244 - DNA, 30 bp, Artificial Sequence
  Synthetic oligonucleotide
accggccacatggtcgtattgtgcacaaaa

SEQ ID NO: 369245 - DNA, 30 bp, Artificial Sequence
  Synthetic oligonucleotide
gaggttttggcgttaggttatcagacaaaa

SEQ ID NO: 369246 - DNA, 30 bp, Artificial Sequence
  Synthetic oligonucleotide
aaggtttggtacgacgtgtgttagacaaaa

SEQ ID NO: 369247 - DNA, 30 bp, Artificial Sequence
  Synthetic oligonucleotide
tctagcattgaatcgcttcgtccgacaaaa

SEQ ID NO: 369248 - DNA, 30 bp, Artificial Sequence
  Synthetic oligonucleotide
aatacgaggctatttgagtggggtacaaaa

SEQ ID NO: 369249 - DNA, 30 bp, Artificial Sequence
  Synthetic oligonucleotide
cctgtcggagctccatttaatattacaaaa

SEQ ID NO: 369250 - DNA, 30 bp, Artificial Sequence
  Synthetic oligonucleotide
agcgtatttcgcgaatggttggttacaaaa

SEQ ID NO: 369251 - DNA, 30 bp, Artificial Sequence
  Synthetic oligonucleotide
cagccaataacaaaggccaacgcaccaaaa

SEQ ID NO: 369252 - DNA, 30 bp, Artificial Sequence
  Synthetic oligonucleotide
atgcgcgcaccaggtcagctgagaccaaaa

SEQ ID NO: 369253 - DNA, 30 bp, Artificial Sequence
  Synthetic oligonucleotide
gaaccctaggtcaggtgcatcgtaccaaaa

SEQ ID NO: 369254 - DNA, 30 bp, Artificial Sequence
  Synthetic oligonucleotide
aatacaagtgcctgcgagtaagagccaaaa

SEQ ID NO: 369255 - DNA, 30 bp, Artificial Sequence
  Synthetic oligonucleotide
atatcacagtgctacccggggacgccaaaa

SEQ ID NO: 369256 - DNA, 30 bp, Artificial Sequence
  Synthetic oligonucleotide
tttcgattcgttacataacatcggccaaaa

SEQ ID NO: 369257 - DNA, 30 bp, Artificial Sequence
  Synthetic oligonucleotide
ccaaaatagtggttaacttgttggccaaaa

SEQ ID NO: 369258 - DNA, 30 bp, Artificial Sequence
  Synthetic oligonucleotide
actcgggctcctgaaacccctatgccaaaa

SEQ ID NO: 369259 - DNA, 30 bp, Artificial Sequence
  Synthetic oligonucleotide
ttagctcaataggtcaagtcgctgccaaaa

SEQ ID NO: 369260 - DNA, 30 bp, Artificial Sequence
  Synthetic oligonucleotide
ccgttgctgaagcaccaacaggctccaaaa

SEQ ID NO: 369261 - DNA, 30 bp, Artificial Sequence
  Synthetic oligonucleotide
ggtgaggtcttgtaatatacattagcaaaa

SEQ ID NO: 369262 - DNA, 30 bp, Artificial Sequence
  Synthetic oligonucleotide
agaactatttcattacagtcgcgcgcaaaa

SEQ ID NO: 369263 - DNA, 30 bp, Artificial Sequence
  Synthetic oligonucleotide
gaatgagtaatgtaaaatccctgcgcaaaa

SEQ ID NO: 369264 - DNA, 30 bp, Artificial Sequence
  Synthetic oligonucleotide
atttcggtgtttaagattccacaggcaaaa

SEQ ID NO: 369265 - DNA, 30 bp, Artificial Sequence
  Synthetic oligonucleotide
aaattacttatctcgggagaagctgcaaaa

SEQ ID NO: 369266 - DNA, 30 bp, Artificial Sequence
  Synthetic oligonucleotide
tcggcagttttatcggctacgtcatcaaaa

SEQ ID NO: 369267 - DNA, 30 bp, Artificial Sequence
  Synthetic oligonucleotide
agacccgggttaactctcgacttatcaaaa

SEQ ID NO: 369268 - DNA, 30 bp, Artificial Sequence
  Synthetic oligonucleotide
aaattttgcgagaatgatagccactcaaaa

SEQ ID NO: 369269 - DNA, 30 bp, Artificial Sequence
  Synthetic oligonucleotide
gcctactatcagtcgggaactcactcaaaa

SEQ ID NO: 369270 - DNA, 30 bp, Artificial Sequence
  Synthetic oligonucleotide
ttttctgagtaggagtgggcatgctcaaaa

SEQ ID NO: 369271 - DNA, 30 bp, Artificial Sequence
  Synthetic oligonucleotide
agggtgggcctcattggaggggtctcaaaa

SEQ ID NO: 369272 - DNA, 30 bp, Artificial Sequence
  Synthetic oligonucleotide
tacgatctctctttgagcatcaagtcaaaa

SEQ ID NO: 369273 - DNA, 30 bp, Artificial Sequence
  Synthetic oligonucleotide
tatacccctcgctagttggcgaagtcaaaa

SEQ ID NO: 369274 - DNA, 30 bp, Artificial Sequence
  Synthetic oligonucleotide
gagtccttaattgcaggtggcacgtcaaaa

SEQ ID NO: 369275 - DNA, 30 bp, Artificial Sequence
  Synthetic oligonucleotide
tttatcgagtcttagtgctcggcgtcaaaa

SEQ ID NO: 369276 - DNA, 30 bp, Artificial Sequence
  Synthetic oligonucleotide
gtgatcaagactgagagaccggggtcaaaa

SEQ ID NO: 369277 - DNA, 30 bp, Artificial Sequence
  Synthetic oligonucleotide
aaatgtgtttaggaggggccgctgtcaaaa

SEQ ID NO: 369278 - DNA, 30 bp, Artificial Sequence
  Synthetic oligonucleotide
ttcataagacacgtcgtttcattgtcaaaa

SEQ ID NO: 369279 - DNA, 30 bp, Artificial Sequence
  Synthetic oligonucleotide
cgtacgcctggtgcgtaggcgttgtcaaaa

SEQ ID NO: 369280 - DNA, 30 bp, Artificial Sequence
  Synthetic oligonucleotide
ctggacgacgccgactaatcggattcaaaa

SEQ ID NO: 369281 - DNA, 30 bp, Artificial Sequence
  Synthetic oligonucleotide
ttcctgctttcagggaagtgattttcaaaa

SEQ ID NO: 369282 - DNA, 30 bp, Artificial Sequence
  Synthetic oligonucleotide
cgatccagaagcctgagacgagcaagaaaa

SEQ ID NO: 369283 - DNA, 30 bp, Artificial Sequence
  Synthetic oligonucleotide
ttgaactctgtcacactatgaaacagaaaa

SEQ ID NO: 369284 - DNA, 30 bp, Artificial Sequence
  Synthetic oligonucleotide
atacttatatcccgaatcttgaacagaaaa

SEQ ID NO: 369285 - DNA, 30 bp, Artificial Sequence
  Synthetic oligonucleotide
ccagtttatgtctaagatcagtacagaaaa

SEQ ID NO: 369286 - DNA, 30 bp, Artificial Sequence
  Synthetic oligonucleotide
tatgtataggatagcgtggcgtacagaaaa

SEQ ID NO: 369287 - DNA, 30 bp, Artificial Sequence
  Synthetic oligonucleotide
acttggttcctcgtctacgccatcagaaaa

SEQ ID NO: 369288 - DNA, 30 bp, Artificial Sequence
  Synthetic oligonucleotide
catattgtgatggctgccgaggtcagaaaa

SEQ ID NO: 369289 - DNA, 30 bp, Artificial Sequence
  Synthetic oligonucleotide
ccgttacaatgtacgccggggtagagaaaa

SEQ ID NO: 369290 - DNA, 31 bp, Artificial Sequence
  Synthetic oligonucleotide
gtcgcttgttaaattacctcaagatagaaaa

SEQ ID NO: 369291 - DNA, 30 bp, Artificial Sequence
  Synthetic oligonucleotide
atgagtgaggccgcctcgctcgatagaaaa

SEQ ID NO: 369292 - DNA, 30 bp, Artificial Sequence
  Synthetic oligonucleotide
gcggcacaaataataactagtgatagaaaa

SEQ ID NO: 369293 - DNA, 30 bp, Artificial Sequence
  Synthetic oligonucleotide
cagtaacatatgctgtggaatcctagaaaa

SEQ ID NO: 369294 - DNA, 30 bp, Artificial Sequence
  Synthetic oligonucleotide
ttaggccgggcgactggcacgagtagaaaa

SEQ ID NO: 369295 - DNA, 30 bp, Artificial Sequence
  Synthetic oligonucleotide
cgctgttctacacgattatgcattagaaaa

SEQ ID NO: 369296 - DNA, 30 bp, Artificial Sequence
  Synthetic oligonucleotide
cgtgccatccggtgcaggcctgttagaaaa

SEQ ID NO: 369297 - DNA, 30 bp, Artificial Sequence
  Synthetic oligonucleotide
tatgtatgtggtctatgtatttttagaaaa

SEQ ID NO: 369298 - DNA, 30 bp, Artificial Sequence
  Synthetic oligonucleotide
ctatcttgtacttgtaggacggaacgaaaa

SEQ ID NO: 369299 - DNA, 30 bp, Artificial Sequence
  Synthetic oligonucleotide
gggttttcgggtacgaaagctccacgaaaa

SEQ ID NO: 369300 - DNA, 30 bp, Artificial Sequence
  Synthetic oligonucleotide
gcctatcgagctatttcggcattacgaaaa

SEQ ID NO: 369301 - DNA, 30 bp, Artificial Sequence
  Synthetic oligonucleotide
ctggcgtgggacagtaacacagtccgaaaa

SEQ ID NO: 369302 - DNA, 30 bp, Artificial Sequence
  Synthetic oligonucleotide
tctactatcatagtgcttaggttccgaaaa

SEQ ID NO: 369303 - DNA, 30 bp, Artificial Sequence
  Synthetic oligonucleotide
ttatacattagccagcggtacgtgcgaaaa

SEQ ID NO: 369304 - DNA, 30 bp, Artificial Sequence
  Synthetic oligonucleotide
cccgctcaagatttgtaaggtcgtcgaaaa

SEQ ID NO: 369305 - DNA, 30 bp, Artificial Sequence
  Synthetic oligonucleotide
gatcaggttacggttagattcggtcgaaaa

SEQ ID NO: 369306 - DNA, 30 bp, Artificial Sequence
  Synthetic oligonucleotide
gtagcaaacgggaacctcgtggttcgaaaa

SEQ ID NO: 369307 - DNA, 30 bp, Artificial Sequence
  Synthetic oligonucleotide
attgtcgaaatgggctgcatgtttcgaaaa

SEQ ID NO: 369308 - DNA, 30 bp, Artificial Sequence
  Synthetic oligonucleotide
ggaatgagttttccaataagtgaaggaaaa

SEQ ID NO: 369309 - DNA, 30 bp, Artificial Sequence
  Synthetic oligonucleotide
tatagggtagtaattagatgaacaggaaaa

SEQ ID NO: 369310 - DNA, 30 bp, Artificial Sequence
  Synthetic oligonucleotide
gctgagcttatgtggggccaaagcggaaaa

SEQ ID NO: 369311 - DNA, 30 bp, Artificial Sequence
  Synthetic oligonucleotide
ttaccaattgccttcatctgatgcggaaaa

SEQ ID NO: 369312 - DNA, 30 bp, Artificial Sequence
  Synthetic oligonucleotide
tgtaagcgacgtctaatcgtctgcggaaaa

SEQ ID NO: 369313 - DNA, 30 bp, Artificial Sequence
  Synthetic oligonucleotide
taaacatagcacgtcccgcggattggaaaa

SEQ ID NO: 369314 - DNA, 30 bp, Artificial Sequence
  Synthetic oligonucleotide
gttacgtccgagcaacgactaaaatgaaaa

SEQ ID NO: 369315 - DNA, 30 bp, Artificial Sequence
  Synthetic oligonucleotide
tcgcacaaagacgcagggccaggatgaaaa

SEQ ID NO: 369316 - DNA, 30 bp, Artificial Sequence
  Synthetic oligonucleotide
gacacgtgccgctggaggctcacctgaaaa

SEQ ID NO: 369317 - DNA, 30 bp, Artificial Sequence
  Synthetic oligonucleotide
tgagaaatgactccgattgccatctgaaaa

SEQ ID NO: 369318 - DNA, 30 bp, Artificial Sequence
  Synthetic oligonucleotide
gagaatgcaacttcctatacgatctgaaaa

SEQ ID NO: 369319 - DNA, 30 bp, Artificial Sequence
  Synthetic oligonucleotide
gaagctagacccaattgttaagtctgaaaa

SEQ ID NO: 369320 - DNA, 30 bp, Artificial Sequence
  Synthetic oligonucleotide
accctgaaaatatgacacagtcagtgaaaa

SEQ ID NO: 369321 - DNA, 30 bp, Artificial Sequence
  Synthetic oligonucleotide
ggaccaacctccttgacgattcgaataaaa

SEQ ID NO: 369322 - DNA, 30 bp, Artificial Sequence
  Synthetic oligonucleotide
atagcataagtcccgcttcggaacataaaa

SEQ ID NO: 369323 - DNA, 30 bp, Artificial Sequence
  Synthetic oligonucleotide
gcgcgcagtctcccgtttgatcacataaaa

SEQ ID NO: 369324 - DNA, 30 bp, Artificial Sequence
  Synthetic oligonucleotide
ccatgacctggctttatccaattcataaaa

SEQ ID NO: 369325 - DNA, 30 bp, Artificial Sequence
  Synthetic oligonucleotide
ttttacaccgccaacgtggatttcataaaa

SEQ ID NO: 369326 - DNA, 30 bp, Artificial Sequence
  Synthetic oligonucleotide
gccccggtcgtggggtcggggacgataaaa

SEQ ID NO: 369327 - DNA, 30 bp, Artificial Sequence
  Synthetic oligonucleotide
aacctatcatgcgtatgttccaggataaaa

SEQ ID NO: 369328 - DNA, 30 bp, Artificial Sequence
  Synthetic oligonucleotide
ttgttcagacctggccccccatggataaaa

SEQ ID NO: 369329 - DNA, 30 bp, Artificial Sequence
  Synthetic oligonucleotide
ttatcgacagtaatcaagaaaaatataaaa

SEQ ID NO: 369330 - DNA, 30 bp, Artificial Sequence
  Synthetic oligonucleotide
gcacagaattaggtatgaacatgtataaaa

SEQ ID NO: 369331 - DNA, 30 bp, Artificial Sequence
  Synthetic oligonucleotide
aaggtaagggtgtttcagaagtgtataaaa

SEQ ID NO: 369332 - DNA, 30 bp, Artificial Sequence
  Synthetic oligonucleotide
atagtcacagatacttaaatgtttataaaa

SEQ ID NO: 369333 - DNA, 30 bp, Artificial Sequence
  Synthetic oligonucleotide
ggaaagttggttgtctgtcattcactaaaa

SEQ ID NO: 369334 - DNA, 30 bp, Artificial Sequence
  Synthetic oligonucleotide
ttgttgaactaaattggaaaaggactaaaa

SEQ ID NO: 369335 - DNA, 30 bp, Artificial Sequence
  Synthetic oligonucleotide
tatcattaacaccgaccaattgccctaaaa

SEQ ID NO: 369336 - DNA, 30 bp, Artificial Sequence
  Synthetic oligonucleotide
gtatcatgttaatagatcttatccctaaaa

SEQ ID NO: 369337 - DNA, 30 bp, Artificial Sequence
  Synthetic oligonucleotide
tcgttggttataggactaagccgcctaaaa

SEQ ID NO: 369338 - DNA, 30 bp, Artificial Sequence
  Synthetic oligonucleotide
cctaagtatccctttgacgtccatctaaaa

SEQ ID NO: 369339 - DNA, 30 bp, Artificial Sequence
  Synthetic oligonucleotide
tgcgagcctgtactacctgagcctctaaaa

SEQ ID NO: 369340 - DNA, 30 bp, Artificial Sequence
  Synthetic oligonucleotide
gcaggaggccggcagccatactctctaaaa

SEQ ID NO: 369341 - DNA, 30 bp, Artificial Sequence
  Synthetic oligonucleotide
tagccttgtggacgtggcgcgtaagtaaaa

SEQ ID NO: 369342 - DNA, 30 bp, Artificial Sequence
  Synthetic oligonucleotide
attgccattgggcagaatagcgcagtaaaa

SEQ ID NO: 369343 - DNA, 30 bp, Artificial Sequence
  Synthetic oligonucleotide
gagtggccatgtgtgagacagagagtaaaa

SEQ ID NO: 369344 - DNA, 30 bp, Artificial Sequence
  Synthetic oligonucleotide
tagccaagctgtctcgggagatgagtaaaa

SEQ ID NO: 369345 - DNA, 30 bp, Artificial Sequence
  Synthetic oligonucleotide
agtaatcttaagctttacgatgtagtaaaa

SEQ ID NO: 369346 - DNA, 31 bp, Artificial Sequence
  Synthetic oligonucleotide
gttttaggcgagtacgactttccgcgtaaaa

SEQ ID NO: 369347 - DNA, 30 bp, Artificial Sequence
  Synthetic oligonucleotide
cgtcttgattgggagaggggttgcgtaaaa

SEQ ID NO: 369348 - DNA, 30 bp, Artificial Sequence
  Synthetic oligonucleotide
caacatctaaccgaactgggtaaggtaaaa

SEQ ID NO: 369349 - DNA, 30 bp, Artificial Sequence
  Synthetic oligonucleotide
gccctcagattcgagaatgcaccggtaaaa

SEQ ID NO: 369350 - DNA, 30 bp, Artificial Sequence
  Synthetic oligonucleotide
gcaggcattggatagctctaagcggtaaaa

SEQ ID NO: 369351 - DNA, 30 bp, Artificial Sequence
  Synthetic oligonucleotide
cgacgtgtcgggaaaaagaggcgggtaaaa

SEQ ID NO: 369352 - DNA, 30 bp, Artificial Sequence
  Synthetic oligonucleotide
taattcattgagtattaagagttggtaaaa

SEQ ID NO: 369353 - DNA, 30 bp, Artificial Sequence
  Synthetic oligonucleotide
gggctactagaagggtacgctggtgtaaaa

SEQ ID NO: 369354 - DNA, 30 bp, Artificial Sequence
  Synthetic oligonucleotide
gctttccaatgaatagagaatgttgtaaaa

SEQ ID NO: 369355 - DNA, 30 bp, Artificial Sequence
  Synthetic oligonucleotide
cctaaccctcaaaaccgccgccaattaaaa

SEQ ID NO: 369356 - DNA, 30 bp, Artificial Sequence
  Synthetic oligonucleotide
cggagatagtgctgttgttatgcattaaaa

SEQ ID NO: 369357 - DNA, 30 bp, Artificial Sequence
  Synthetic oligonucleotide
cgctaactcgtaactcgctcatcattaaaa

SEQ ID NO: 369358 - DNA, 30 bp, Artificial Sequence
  Synthetic oligonucleotide
ttgcaactaggagccagggtctcattaaaa

SEQ ID NO: 369359 - DNA, 30 bp, Artificial Sequence
  Synthetic oligonucleotide
tagttgggactaccttggtcaagattaaaa

SEQ ID NO: 369360 - DNA, 30 bp, Artificial Sequence
  Synthetic oligonucleotide
taaccattaaatgatgaaaagggattaaaa

SEQ ID NO: 369361 - DNA, 30 bp, Artificial Sequence
  Synthetic oligonucleotide
atcggcttatatcatttggctctattaaaa

SEQ ID NO: 369362 - DNA, 30 bp, Artificial Sequence
  Synthetic oligonucleotide
ggcgtatatgcatgagcccatgtcttaaaa

SEQ ID NO: 369363 - DNA, 30 bp, Artificial Sequence
  Synthetic oligonucleotide
tttggtccagaccaagccccaacgttaaaa

SEQ ID NO: 369364 - DNA, 30 bp, Artificial Sequence
  Synthetic oligonucleotide
tttcttaaacgcgagtaggtttcgttaaaa

SEQ ID NO: 369365 - DNA, 30 bp, Artificial Sequence
  Synthetic oligonucleotide
ctcttgagtcggtaaggcaaaattttaaaa

SEQ ID NO: 369366 - DNA, 30 bp, Artificial Sequence
  Synthetic oligonucleotide
tcaaatatggtgtgttacggcgttttaaaa

SEQ ID NO: 369367 - DNA, 30 bp, Artificial Sequence
  Synthetic oligonucleotide
ggagtcttttggccctgggattaaaacaaa

SEQ ID NO: 369368 - DNA, 30 bp, Artificial Sequence
  Synthetic oligonucleotide
tcggtgggactctcacgttacacaaacaaa

SEQ ID NO: 369369 - DNA, 30 bp, Artificial Sequence
  Synthetic oligonucleotide
tagggccttagttgataatcaagaaacaaa

SEQ ID NO: 369370 - DNA, 30 bp, Artificial Sequence
  Synthetic oligonucleotide
ggttgctatgttcacacggtgggaaacaaa

SEQ ID NO: 369371 - DNA, 30 bp, Artificial Sequence
  Synthetic oligonucleotide
gggtagcataggtcactctattgaaacaaa

SEQ ID NO: 369372 - DNA, 30 bp, Artificial Sequence
  Synthetic oligonucleotide
ggacttcaatcttcaaatataataaacaaa

SEQ ID NO: 369373 - DNA, 30 bp, Artificial Sequence
  Synthetic oligonucleotide
tccaatctgcatacgttaaaggccaacaaa

SEQ ID NO: 369374 - DNA, 30 bp, Artificial Sequence
  Synthetic oligonucleotide
acttaccggttttaggcgcctgccaacaaa

SEQ ID NO: 369375 - DNA, 30 bp, Artificial Sequence
  Synthetic oligonucleotide
gttgttagggtcagcacctggctcaacaaa

SEQ ID NO: 369376 - DNA, 30 bp, Artificial Sequence
  Synthetic oligonucleotide
aagtcatagatgcggcactgggctaacaaa

SEQ ID NO: 369377 - DNA, 30 bp, Artificial Sequence
  Synthetic oligonucleotide
aaaaggatccctccagtcaattctaacaaa

SEQ ID NO: 369378 - DNA, 26 bp, Artificial Sequence
  Synthetic oligonucleotide
gttcgaactaaggttgaattaacaaa

SEQ ID NO: 369379 - DNA, 30 bp, Artificial Sequence
  Synthetic oligonucleotide
acaaactgtaactatttacctcttaacaaa

SEQ ID NO: 369380 - DNA, 30 bp, Artificial Sequence
  Synthetic oligonucleotide
ggtccatagaggtgggtatttgttaacaaa

SEQ ID NO: 369381 - DNA, 30 bp, Artificial Sequence
  Synthetic oligonucleotide
gcagggcttgactgcttgtaagaacacaaa

SEQ ID NO: 369382 - DNA, 30 bp, Artificial Sequence
  Synthetic oligonucleotide
tggttgcctgccagtgggtctgaacacaaa

SEQ ID NO: 369383 - DNA, 30 bp, Artificial Sequence
  Synthetic oligonucleotide
gtccgtgaggaaccaaaggatggacacaaa

SEQ ID NO: 369384 - DNA, 30 bp, Artificial Sequence
  Synthetic oligonucleotide
gtattatgagccttcaggcgaatccacaaa

SEQ ID NO: 369385 - DNA, 30 bp, Artificial Sequence
  Synthetic oligonucleotide
ccgagtagccgtttagatacctttcacaaa

SEQ ID NO: 369386 - DNA, 30 bp, Artificial Sequence
  Synthetic oligonucleotide
cacaccatacacttgttagggtcagacaaa

SEQ ID NO: 369387 - DNA, 30 bp, Artificial Sequence
  Synthetic oligonucleotide
acaagtccattaggatgctcgcgggacaaa

SEQ ID NO: 369388 - DNA, 30 bp, Artificial Sequence
  Synthetic oligonucleotide
gctccgtaaattcgttggttcatggacaaa

SEQ ID NO: 369389 - DNA, 30 bp, Artificial Sequence
  Synthetic oligonucleotide
gatctaatgtttgaggtttcacctgacaaa

SEQ ID NO: 369390 - DNA, 30 bp, Artificial Sequence
  Synthetic oligonucleotide
tgtgaaacaattttgtgcgttcctgacaaa

SEQ ID NO: 369391 - DNA, 30 bp, Artificial Sequence
  Synthetic oligonucleotide
actgtttaacgtataataatgaagtacaaa

SEQ ID NO: 369392 - DNA, 30 bp, Artificial Sequence
  Synthetic oligonucleotide
agcgatgcgggcagtcgccgggggtacaaa

SEQ ID NO: 369393 - DNA, 30 bp, Artificial Sequence
  Synthetic oligonucleotide
aactacgagcgtcgggcatgttcttacaaa

SEQ ID NO: 369394 - DNA, 30 bp, Artificial Sequence
  Synthetic oligonucleotide
gcattataattccgatacgtaagttacaaa

SEQ ID NO: 369395 - DNA, 30 bp, Artificial Sequence
  Synthetic oligonucleotide
acaagtatagatctcatccgactttacaaa

SEQ ID NO: 369396 - DNA, 30 bp, Artificial Sequence
  Synthetic oligonucleotide
gaggtgttgtgctggctagtttaaaccaaa

SEQ ID NO: 369397 - DNA, 30 bp, Artificial Sequence
  Synthetic oligonucleotide
gaatagtccgttgtccctcttctaaccaaa

SEQ ID NO: 369398 - DNA, 30 bp, Artificial Sequence
  Synthetic oligonucleotide
atcccccggatgtataagatagggaccaaa

SEQ ID NO: 369399 - DNA, 30 bp, Artificial Sequence
  Synthetic oligonucleotide
caccgtgggctaacttgtaagcttaccaaa

SEQ ID NO: 369400 - DNA, 30 bp, Artificial Sequence
  Synthetic oligonucleotide
ttgcggaggagtcatgatgaggcccccaaa

SEQ ID NO: 369401 - DNA, 30 bp, Artificial Sequence
  Synthetic oligonucleotide
aaactgaatagcgtatgtagagtccccaaa

SEQ ID NO: 369402 - DNA, 30 bp, Artificial Sequence
  Synthetic oligonucleotide
aaccctactgtgagaggtagggtccccaaa

SEQ ID NO: 369403 - DNA, 30 bp, Artificial Sequence
  Synthetic oligonucleotide
tttgcattcaatcctgcgtgggctcccaaa

SEQ ID NO: 369404 - DNA, 30 bp, Artificial Sequence
  Synthetic oligonucleotide
gggcttgataccaggcggagggtagccaaa

SEQ ID NO: 369405 - DNA, 30 bp, Artificial Sequence
  Synthetic oligonucleotide
tagcgtccatgcctactaggattcgccaaa

SEQ ID NO: 369406 - DNA, 30 bp, Artificial Sequence
  Synthetic oligonucleotide
ttagacaattgcaggtctgatcaatccaaa

SEQ ID NO: 369407 - DNA, 30 bp, Artificial Sequence
  Synthetic oligonucleotide
ggaggaaccctccctgggcccgcatccaaa

SEQ ID NO: 369408 - DNA, 30 bp, Artificial Sequence
  Synthetic oligonucleotide
gcgaaacgtatttattattttgtatccaaa

SEQ ID NO: 369409 - DNA, 30 bp, Artificial Sequence
  Synthetic oligonucleotide
taccacatcaacgcacaatcggtgtccaaa

SEQ ID NO: 369410 - DNA, 30 bp, Artificial Sequence
  Synthetic oligonucleotide
ccagaggctatgtaattattacattccaaa

SEQ ID NO: 369411 - DNA, 30 bp, Artificial Sequence
  Synthetic oligonucleotide
agttgaatctgccggttagtagattccaaa

SEQ ID NO: 369412 - DNA, 30 bp, Artificial Sequence
  Synthetic oligonucleotide
gttcggccccaggtagtgccttcaagcaaa

SEQ ID NO: 369413 - DNA, 30 bp, Artificial Sequence
  Synthetic oligonucleotide
tgtcgcctacgcttcacggagaccagcaaa

SEQ ID NO: 369414 - DNA, 30 bp, Artificial Sequence
  Synthetic oligonucleotide
catataaatgaaacaacggtaatgagcaaa

SEQ ID NO: 369415 - DNA, 30 bp, Artificial Sequence
  Synthetic oligonucleotide
gtctattctcaacaagtgagaaatagcaaa

SEQ ID NO: 369416 - DNA, 30 bp, Artificial Sequence
  Synthetic oligonucleotide
gaattcccttggatcgtgtaaattagcaaa

SEQ ID NO: 369417 - DNA, 30 bp, Artificial Sequence
  Synthetic oligonucleotide
cgagaatctttgggtagtcatcaacgcaaa

SEQ ID NO: 369418 - DNA, 30 bp, Artificial Sequence
  Synthetic oligonucleotide
agtgccgcatacataataacgtcccgcaaa

SEQ ID NO: 369419 - DNA, 30 bp, Artificial Sequence
  Synthetic oligonucleotide
tcgtgaatagattgttacttgagccgcaaa

SEQ ID NO: 369420 - DNA, 30 bp, Artificial Sequence
  Synthetic oligonucleotide
aggccatttcaagtatctcatatccgcaaa

SEQ ID NO: 369421 - DNA, 30 bp, Artificial Sequence
  Synthetic oligonucleotide
gtgaaagtgagactattttaattccgcaaa

SEQ ID NO: 369422 - DNA, 30 bp, Artificial Sequence
  Synthetic oligonucleotide
gcattttggcgaacaagctattggcgcaaa

SEQ ID NO: 369423 - DNA, 30 bp, Artificial Sequence
  Synthetic oligonucleotide
gtgactcaaaggcttttttgactgcgcaaa

SEQ ID NO: 369424 - DNA, 30 bp, Artificial Sequence
  Synthetic oligonucleotide
tcgcgctgtgtccctggttcagatcgcaaa

SEQ ID NO: 369425 - DNA, 30 bp, Artificial Sequence
  Synthetic oligonucleotide
ctaaggctgacactgctgggcattcgcaaa

SEQ ID NO: 369426 - DNA, 30 bp, Artificial Sequence
  Synthetic oligonucleotide
tggggtgtcgacgtacggtcttgaggcaaa

SEQ ID NO: 369427 - DNA, 30 bp, Artificial Sequence
  Synthetic oligonucleotide
cacggtggggtgccttcccatgtcggcaaa

SEQ ID NO: 369428 - DNA, 30 bp, Artificial Sequence
  Synthetic oligonucleotide
tggcaagatatagtgcaatgtaggggcaaa

SEQ ID NO: 369429 - DNA, 30 bp, Artificial Sequence
  Synthetic oligonucleotide
attggcctggctcatggagtcgggggcaaa

SEQ ID NO: 369430 - DNA, 30 bp, Artificial Sequence
  Synthetic oligonucleotide
gtggggaaagctttctggaaaagtggcaaa

SEQ ID NO: 369431 - DNA, 30 bp, Artificial Sequence
  Synthetic oligonucleotide
ctaagtccgagtagctacgatcgtggcaaa

SEQ ID NO: 369432 - DNA, 30 bp, Artificial Sequence
  Synthetic oligonucleotide
cgaaaggtaacagtgccagtttttggcaaa

SEQ ID NO: 369433 - DNA, 30 bp, Artificial Sequence
  Synthetic oligonucleotide
cgatcgaccccaggccggtttggatgcaaa

SEQ ID NO: 369434 - DNA, 29 bp, Artificial Sequence
  Synthetic oligonucleotide
gatccaaatagtctgatacactgtgcaaa

SEQ ID NO: 369435 - DNA, 30 bp, Artificial Sequence
  Synthetic oligonucleotide
gggacatttttgcattcatcacgttgcaaa

SEQ ID NO: 369436 - DNA, 30 bp, Artificial Sequence
  Synthetic oligonucleotide
tgaaggttccggggcaagaggggttgcaaa

SEQ ID NO: 369437 - DNA, 30 bp, Artificial Sequence
  Synthetic oligonucleotide
aaattgctactatgcaatacctgttgcaaa

SEQ ID NO: 369438 - DNA, 30 bp, Artificial Sequence
  Synthetic oligonucleotide
catccatgtaacgtgtcggaaatttgcaaa

SEQ ID NO: 369439 - DNA, 30 bp, Artificial Sequence
  Synthetic oligonucleotide
acgctgaattgctggtacggacgaatcaaa

SEQ ID NO: 369440 - DNA, 30 bp, Artificial Sequence
  Synthetic oligonucleotide
acatcttatcgatgattatgtggaatcaaa

SEQ ID NO: 369441 - DNA, 30 bp, Artificial Sequence
  Synthetic oligonucleotide
tggttgtctgtgcagcgtggcataatcaaa

SEQ ID NO: 369442 - DNA, 30 bp, Artificial Sequence
  Synthetic oligonucleotide
cgcgaagtccttatgagtgagataatcaaa

SEQ ID NO: 369443 - DNA, 30 bp, Artificial Sequence
  Synthetic oligonucleotide
gcaagtattactttacgtggtaccatcaaa

SEQ ID NO: 369444 - DNA, 30 bp, Artificial Sequence
  Synthetic oligonucleotide
agtaatatgtttgcctcgtgtagcatcaaa

SEQ ID NO: 369445 - DNA, 30 bp, Artificial Sequence
  Synthetic oligonucleotide
aggtttctagtgcaaggacttactatcaaa

SEQ ID NO: 369446 - DNA, 30 bp, Artificial Sequence
  Synthetic oligonucleotide
gcagaatggttgcttatggaatgtatcaaa

SEQ ID NO: 369447 - DNA, 30 bp, Artificial Sequence
  Synthetic oligonucleotide
ttacacgcacccgtatgttcaattatcaaa

SEQ ID NO: 369448 - DNA, 30 bp, Artificial Sequence
  Synthetic oligonucleotide
tgtattaatagcaagcacggaaccctcaaa

SEQ ID NO: 369449 - DNA, 29 bp, Artificial Sequence
  Synthetic oligonucleotide
ctacaaaaaaagaattccgtgccctcaaa

SEQ ID NO: 369450 - DNA, 30 bp, Artificial Sequence
  Synthetic oligonucleotide
tttatacggcacctgaatacgaatctcaaa

SEQ ID NO: 369451 - DNA, 30 bp, Artificial Sequence
  Synthetic oligonucleotide
gcaagccttacaatcaccttgacagtcaaa

SEQ ID NO: 369452 - DNA, 30 bp, Artificial Sequence
  Synthetic oligonucleotide
tcggtgctccagtaaaattgatcagtcaaa

SEQ ID NO: 369453 - DNA, 30 bp, Artificial Sequence
  Synthetic oligonucleotide
ggcaacaatctaggaaggctctgggtcaaa

SEQ ID NO: 369454 - DNA, 30 bp, Artificial Sequence
  Synthetic oligonucleotide
tttcaatttaaaaatccggcctctgtcaaa

SEQ ID NO: 369455 - DNA, 31 bp, Artificial Sequence
  Synthetic oligonucleotide
cgcctagcacgcaatacttcctcgtgtcaaa

SEQ ID NO: 369456 - DNA, 30 bp, Artificial Sequence
  Synthetic oligonucleotide
gaagaacatacggatcgtccttaattcaaa

SEQ ID NO: 369457 - DNA, 30 bp, Artificial Sequence
  Synthetic oligonucleotide
ctgtagggcggcatttacaacgcattcaaa

SEQ ID NO: 369458 - DNA, 30 bp, Artificial Sequence
  Synthetic oligonucleotide
ttatcgttcgtatggtccagacgattcaaa

SEQ ID NO: 369459 - DNA, 30 bp, Artificial Sequence
  Synthetic oligonucleotide
aaggtaaggaccgcatgtagggtcttcaaa

SEQ ID NO: 369460 - DNA, 30 bp, Artificial Sequence
  Synthetic oligonucleotide
ggatctgccggcgctgtgaagttcttcaaa

SEQ ID NO: 369461 - DNA, 30 bp, Artificial Sequence
  Synthetic oligonucleotide
tggtcttccagtatcgtaacccggttcaaa

SEQ ID NO: 369462 - DNA, 30 bp, Artificial Sequence
  Synthetic oligonucleotide
atatatagggtcgtccaacgtgggttcaaa

SEQ ID NO: 369463 - DNA, 30 bp, Artificial Sequence
  Synthetic oligonucleotide
tcaaaatagggcagacacggttctttcaaa

SEQ ID NO: 369464 - DNA, 30 bp, Artificial Sequence
  Synthetic oligonucleotide
attcagtggagggtcttacatagtttcaaa

SEQ ID NO: 369465 - DNA, 30 bp, Artificial Sequence
  Synthetic oligonucleotide
aattcccggactcgtgatgcaaaaaagaaa

SEQ ID NO: 369466 - DNA, 30 bp, Artificial Sequence
  Synthetic oligonucleotide
atcatcgtcagaagacagccgtaaaagaaa

SEQ ID NO: 369467 - DNA, 30 bp, Artificial Sequence
  Synthetic oligonucleotide
gtgtggggctaatgcagtacgttaaagaaa

SEQ ID NO: 369468 - DNA, 30 bp, Artificial Sequence
  Synthetic oligonucleotide
gagttaggcttacatataaccgccaagaaa

SEQ ID NO: 369469 - DNA, 30 bp, Artificial Sequence
  Synthetic oligonucleotide
atgcgtagcctgccaatgagttccaagaaa

SEQ ID NO: 369470 - DNA, 30 bp, Artificial Sequence
  Synthetic oligonucleotide
aagatgcgtgtatgcctgagaagcaagaaa

SEQ ID NO: 369471 - DNA, 30 bp, Artificial Sequence
  Synthetic oligonucleotide
ctcgctccacgaagcaagcgcagcaagaaa

SEQ ID NO: 369472 - DNA, 30 bp, Artificial Sequence
  Synthetic oligonucleotide
cgaccagctagtaaaacttgattcaagaaa

SEQ ID NO: 369473 - DNA, 30 bp, Artificial Sequence
  Synthetic oligonucleotide
gtacgcacgaataccgatcaaggtaagaaa

SEQ ID NO: 369474 - DNA, 30 bp, Artificial Sequence
  Synthetic oligonucleotide
ttgccgataaatgtaccctctggtaagaaa

SEQ ID NO: 369475 - DNA, 30 bp, Artificial Sequence
  Synthetic oligonucleotide
gagtctcataatacggggatattacagaaa

SEQ ID NO: 369476 - DNA, 30 bp, Artificial Sequence
  Synthetic oligonucleotide
tgcatgtcaatatagaggagccgccagaaa

SEQ ID NO: 369477 - DNA, 30 bp, Artificial Sequence
  Synthetic oligonucleotide
acgcacgatagtggccggcggcgccagaaa

SEQ ID NO: 369478 - DNA, 30 bp, Artificial Sequence
  Synthetic oligonucleotide
cggttgttacgtcttatacgggatcagaaa

SEQ ID NO: 369479 - DNA, 30 bp, Artificial Sequence
  Synthetic oligonucleotide
ggagccttccgagtgggtccttaagagaaa

SEQ ID NO: 369480 - DNA, 30 bp, Artificial Sequence
  Synthetic oligonucleotide
agatgatcctttccacgttccgtagagaaa

SEQ ID NO: 369481 - DNA, 30 bp, Artificial Sequence
  Synthetic oligonucleotide
gggtatgtagtctaaagtctcgaggagaaa

SEQ ID NO: 369482 - DNA, 30 bp, Artificial Sequence
  Synthetic oligonucleotide
attgtaagacatatggtgatgagggagaaa

SEQ ID NO: 369483 - DNA, 30 bp, Artificial Sequence
  Synthetic oligonucleotide
tacccataactgttcggagcgacatagaaa

SEQ ID NO: 369484 - DNA, 30 bp, Artificial Sequence
  Synthetic oligonucleotide
gcttttcaagataaacctattagttagaaa

SEQ ID NO: 369485 - DNA, 29 bp, Artificial Sequence
  Synthetic oligonucleotide
agataaacccatctctgggctgttagaaa

SEQ ID NO: 369486 - DNA, 30 bp, Artificial Sequence
  Synthetic oligonucleotide
cacagcattcttcagggaaaaacaacgaaa

SEQ ID NO: 369487 - DNA, 30 bp, Artificial Sequence
  Synthetic oligonucleotide
acatctagttgtctccctgtgagaacgaaa

SEQ ID NO: 369488 - DNA, 30 bp, Artificial Sequence
  Synthetic oligonucleotide
taattgacgccttccgacggacgaacgaaa

SEQ ID NO: 369489 - DNA, 30 bp, Artificial Sequence
  Synthetic oligonucleotide
ggtctttagaaaaggagggttcacacgaaa

SEQ ID NO: 369490 - DNA, 30 bp, Artificial Sequence
  Synthetic oligonucleotide
gaaaagcttggactaccgcccctcacgaaa

SEQ ID NO: 369491 - DNA, 30 bp, Artificial Sequence
  Synthetic oligonucleotide
tagtatatgcaattagagtgggtcacgaaa

SEQ ID NO: 369492 - DNA, 30 bp, Artificial Sequence
  Synthetic oligonucleotide
ggaccttgcccggaaactggcaggacgaaa

SEQ ID NO: 369493 - DNA, 30 bp, Artificial Sequence
  Synthetic oligonucleotide
cctattggggtgttcttgtggactacgaaa

SEQ ID NO: 369494 - DNA, 30 bp, Artificial Sequence
  Synthetic oligonucleotide
ccagtattcttagttagttatagtacgaaa

SEQ ID NO: 369495 - DNA, 30 bp, Artificial Sequence
  Synthetic oligonucleotide
aacgccgaggaatctttttagtttacgaaa

SEQ ID NO: 369496 - DNA, 30 bp, Artificial Sequence
  Synthetic oligonucleotide
actgtcgtcttaatttataatgaaccgaaa

SEQ ID NO: 369497 - DNA, 30 bp, Artificial Sequence
  Synthetic oligonucleotide
gcgtcaaagccgactcggaaattaccgaaa

SEQ ID NO: 369498 - DNA, 30 bp, Artificial Sequence
  Synthetic oligonucleotide
catacatttgctgtcttctttgcgccgaaa

SEQ ID NO: 369499 - DNA, 30 bp, Artificial Sequence
  Synthetic oligonucleotide
tccagctgtacaatatcactgggtccgaaa

SEQ ID NO: 369500 - DNA, 31 bp, Artificial Sequence
  Synthetic oligonucleotide
ggtctttgggactaccagctattgtccgaaa

SEQ ID NO: 369501 - DNA, 30 bp, Artificial Sequence
  Synthetic oligonucleotide
ggaaattgcgcctagcttccagttccgaaa

SEQ ID NO: 369502 - DNA, 30 bp, Artificial Sequence
  Synthetic oligonucleotide
agactccagtcggatacggctacagcgaaa

SEQ ID NO: 369503 - DNA, 30 bp, Artificial Sequence
  Synthetic oligonucleotide
taccgcttcccccctcgggtatgcgcgaaa

SEQ ID NO: 369504 - DNA, 30 bp, Artificial Sequence
  Synthetic oligonucleotide
tctgtgcgttatcagcggccaatcgcgaaa

SEQ ID NO: 369505 - DNA, 30 bp, Artificial Sequence
  Synthetic oligonucleotide
gaattgctgtaagtagtggagtaggcgaaa

SEQ ID NO: 369506 - DNA, 30 bp, Artificial Sequence
  Synthetic oligonucleotide
tcacagagtccccagactcctggggcgaaa

SEQ ID NO: 369507 - DNA, 30 bp, Artificial Sequence
  Synthetic oligonucleotide
ggctattctcccggataaacgggtgcgaaa

SEQ ID NO: 369508 - DNA, 30 bp, Artificial Sequence
  Synthetic oligonucleotide
tcgaacgcatgcatcacatgggggtcgaaa

SEQ ID NO: 369509 - DNA, 30 bp, Artificial Sequence
  Synthetic oligonucleotide
agatgacaggcagccgtggccaaaaggaaa

SEQ ID NO: 369510 - DNA, 30 bp, Artificial Sequence
  Synthetic oligonucleotide
aagacgcagcgactcaaaacgtacaggaaa

SEQ ID NO: 369511 - DNA, 30 bp, Artificial Sequence
  Synthetic oligonucleotide
acaaattttcgtcaaatcccgtccaggaaa

SEQ ID NO: 369512 - DNA, 30 bp, Artificial Sequence
  Synthetic oligonucleotide
gagatgtacctaagaggtatctcgaggaaa

SEQ ID NO: 369513 - DNA, 30 bp, Artificial Sequence
  Synthetic oligonucleotide
tcgtgtacgttccaggcactctcgaggaaa

SEQ ID NO: 369514 - DNA, 30 bp, Artificial Sequence
  Synthetic oligonucleotide
aaatatggtcataggctcaaatggaggaaa

SEQ ID NO: 369515 - DNA, 30 bp, Artificial Sequence
  Synthetic oligonucleotide
tggggaagaaacaagtcgaggatgaggaaa

SEQ ID NO: 369516 - DNA, 30 bp, Artificial Sequence
  Synthetic oligonucleotide
taccggcttgcactgggttaatataggaaa

SEQ ID NO: 369517 - DNA, 30 bp, Artificial Sequence
  Synthetic oligonucleotide
agattgttacgttctttaacctataggaaa

SEQ ID NO: 369518 - DNA, 30 bp, Artificial Sequence
  Synthetic oligonucleotide
ttagctgtcgactttattcagagacggaaa

SEQ ID NO: 369519 - DNA, 30 bp, Artificial Sequence
  Synthetic oligonucleotide
aaatgagaccagtgagcttcgcgacggaaa

SEQ ID NO: 369520 - DNA, 30 bp, Artificial Sequence
  Synthetic oligonucleotide
aggagttacgtaaacttatagttacggaaa

SEQ ID NO: 369521 - DNA, 29 bp, Artificial Sequence
  Synthetic oligonucleotide
cttgttcttaatgttccgcataccggaaa

SEQ ID NO: 369522 - DNA, 30 bp, Artificial Sequence
  Synthetic oligonucleotide
ggacctaattcgacgttctcctaccggaaa

SEQ ID NO: 369523 - DNA, 30 bp, Artificial Sequence
  Synthetic oligonucleotide
aatgctatggaccggcttaatagtcggaaa

SEQ ID NO: 369524 - DNA, 30 bp, Artificial Sequence
  Synthetic oligonucleotide
tgggtaacacagtatcgtttctgtcggaaa

SEQ ID NO: 369525 - DNA, 30 bp, Artificial Sequence
  Synthetic oligonucleotide
gggtctgtcataactaggtataaagggaaa

SEQ ID NO: 369526 - DNA, 30 bp, Artificial Sequence
  Synthetic oligonucleotide
gcctgtgaacccaaaaagcgacaagggaaa

SEQ ID NO: 369527 - DNA, 30 bp, Artificial Sequence
  Synthetic oligonucleotide
ctatgagccgtggttctttattcagggaaa

SEQ ID NO: 369528 - DNA, 30 bp, Artificial Sequence
  Synthetic oligonucleotide
gagtcttaattttgtatgcaacccgggaaa

SEQ ID NO: 369529 - DNA, 30 bp, Artificial Sequence
  Synthetic oligonucleotide
agaagatttcggccggggacgcgcgggaaa

SEQ ID NO: 369530 - DNA, 30 bp, Artificial Sequence
  Synthetic oligonucleotide
ccggtcattgtggacaaagcattcgggaaa

SEQ ID NO: 369531 - DNA, 30 bp, Artificial Sequence
  Synthetic oligonucleotide
gatatatttatgtcaaaatgcaaggggaaa

SEQ ID NO: 369532 - DNA, 30 bp, Artificial Sequence
  Synthetic oligonucleotide
ggagcggtttccgctaaaccccaggggaaa

SEQ ID NO: 369533 - DNA, 30 bp, Artificial Sequence
  Synthetic oligonucleotide
gcatacatttcacggcctcctccggggaaa

SEQ ID NO: 369534 - DNA, 30 bp, Artificial Sequence
  Synthetic oligonucleotide
ttaagagtttccccaaacggtccggggaaa

SEQ ID NO: 369535 - DNA, 30 bp, Artificial Sequence
  Synthetic oligonucleotide
ctggtatccatcgtgtagtctgcggggaaa

SEQ ID NO: 369536 - DNA, 30 bp, Artificial Sequence
  Synthetic oligonucleotide
gtcttggccgtgcatctacgcggggggaaa

SEQ ID NO: 369537 - DNA, 30 bp, Artificial Sequence
  Synthetic oligonucleotide
atctggatagagtctggtgtactggggaaa

SEQ ID NO: 369538 - DNA, 30 bp, Artificial Sequence
  Synthetic oligonucleotide
ttagtaacagtggaaatcggtcctgggaaa

SEQ ID NO: 369539 - DNA, 30 bp, Artificial Sequence
  Synthetic oligonucleotide
attgctaaccttcccgcccaggctgggaaa

SEQ ID NO: 369540 - DNA, 30 bp, Artificial Sequence
  Synthetic oligonucleotide
ctcccggtgtgttgcagacgctctgggaaa

SEQ ID NO: 369541 - DNA, 30 bp, Artificial Sequence
  Synthetic oligonucleotide
tcatcagacggtcgttggagtattgggaaa

SEQ ID NO: 369542 - DNA, 30 bp, Artificial Sequence
  Synthetic oligonucleotide
acagtgggagcataacggaacagatggaaa

SEQ ID NO: 369543 - DNA, 30 bp, Artificial Sequence
  Synthetic oligonucleotide
aaatggcaaggcgggttaaatcgctggaaa

SEQ ID NO: 369544 - DNA, 30 bp, Artificial Sequence
  Synthetic oligonucleotide
tcactggcggggaggcttgaaaattggaaa

SEQ ID NO: 369545 - DNA, 30 bp, Artificial Sequence
  Synthetic oligonucleotide
tcagactcctggttgtggccatgttggaaa

SEQ ID NO: 369546 - DNA, 30 bp, Artificial Sequence
  Synthetic oligonucleotide
atacctactcctttgcgcggttgttggaaa

SEQ ID NO: 369547 - DNA, 30 bp, Artificial Sequence
  Synthetic oligonucleotide
tattagcaagtccaacaaacattttggaaa

SEQ ID NO: 369548 - DNA, 30 bp, Artificial Sequence
  Synthetic oligonucleotide
aggtggctcccacaagtttgcggcatgaaa

SEQ ID NO: 369549 - DNA, 30 bp, Artificial Sequence
  Synthetic oligonucleotide
atatcgtagtttatgagttaaatcatgaaa

SEQ ID NO: 369550 - DNA, 30 bp, Artificial Sequence
  Synthetic oligonucleotide
tcacaaattcagcgagacgtcatcatgaaa

SEQ ID NO: 369551 - DNA, 30 bp, Artificial Sequence
  Synthetic oligonucleotide
tatggttcttgcagaccggctacgatgaaa

SEQ ID NO: 369552 - DNA, 29 bp, Artificial Sequence
  Synthetic oligonucleotide
agctagctgacttgaacgggatgatgaaa

SEQ ID NO: 369553 - DNA, 30 bp, Artificial Sequence
  Synthetic oligonucleotide
ggataatcgggggaggttccggctatgaaa

SEQ ID NO: 369554 - DNA, 30 bp, Artificial Sequence
  Synthetic oligonucleotide
ggatcgcaatagtcgtcagtgggtatgaaa

SEQ ID NO: 369555 - DNA, 30 bp, Artificial Sequence
  Synthetic oligonucleotide
tttatatggcggtcctaaatgtgtatgaaa

SEQ ID NO: 369556 - DNA, 30 bp, Artificial Sequence
  Synthetic oligonucleotide
accctgcaaccatagtcacccccgctgaaa

SEQ ID NO: 369557 - DNA, 30 bp, Artificial Sequence
  Synthetic oligonucleotide
ctcataatccagacagacctggtgctgaaa

SEQ ID NO: 369558 - DNA, 30 bp, Artificial Sequence
  Synthetic oligonucleotide
tgatgatcttcccaacatgccattctgaaa

SEQ ID NO: 369559 - DNA, 30 bp, Artificial Sequence
  Synthetic oligonucleotide
cgcacctcgtttccttcctaccgagtgaaa

SEQ ID NO: 369560 - DNA, 30 bp, Artificial Sequence
  Synthetic oligonucleotide
tagtaagtgtaagcaatggtggccgtgaaa

SEQ ID NO: 369561 - DNA, 30 bp, Artificial Sequence
  Synthetic oligonucleotide
tttcgtcggcacaacgtcccgtccgtgaaa

SEQ ID NO: 369562 - DNA, 30 bp, Artificial Sequence
  Synthetic oligonucleotide
agctcgtcaacagccggggctctcgtgaaa

SEQ ID NO: 369563 - DNA, 30 bp, Artificial Sequence
  Synthetic oligonucleotide
tattagatgcgtgccgtcgatacggtgaaa

SEQ ID NO: 369564 - DNA, 30 bp, Artificial Sequence
  Synthetic oligonucleotide
tagttaggccggttacatgcattggtgaaa

SEQ ID NO: 369565 - DNA, 30 bp, Artificial Sequence
  Synthetic oligonucleotide
attagacggtaggaggtgttatatgtgaaa

SEQ ID NO: 369566 - DNA, 30 bp, Artificial Sequence
  Synthetic oligonucleotide
cttgaggcaagcgtattgtgtagattgaaa

SEQ ID NO: 369567 - DNA, 30 bp, Artificial Sequence
  Synthetic oligonucleotide
gtgccctttagaaccatgttgatattgaaa

SEQ ID NO: 369568 - DNA, 30 bp, Artificial Sequence
  Synthetic oligonucleotide
acctaccccccccaaagactagccttgaaa

SEQ ID NO: 369569 - DNA, 30 bp, Artificial Sequence
  Synthetic oligonucleotide
tctacgaatgaaaggggtaccctcttgaaa

SEQ ID NO: 369570 - DNA, 30 bp, Artificial Sequence
  Synthetic oligonucleotide
catcagatttggaaggatggtcctttgaaa

SEQ ID NO: 369571 - DNA, 30 bp, Artificial Sequence
  Synthetic oligonucleotide
ggattgttgcctcgctgactctaaaataaa

SEQ ID NO: 369572 - DNA, 30 bp, Artificial Sequence
  Synthetic oligonucleotide
cacgcggcacacttggcgcaaccaaataaa

SEQ ID NO: 369573 - DNA, 31 bp, Artificial Sequence
  Synthetic oligonucleotide
agtggatagggtaattggattcgtaaataaa

SEQ ID NO: 369574 - DNA, 30 bp, Artificial Sequence
  Synthetic oligonucleotide
ctcggtttcatcctcaaagttaagaataaa

SEQ ID NO: 369575 - DNA, 31 bp, Artificial Sequence
  Synthetic oligonucleotide
tgcctttcacagcagccgattcctgaataaa

SEQ ID NO: 369576 - DNA, 30 bp, Artificial Sequence
  Synthetic oligonucleotide
gtaaccttaggcactttaatgcataataaa

SEQ ID NO: 369577 - DNA, 30 bp, Artificial Sequence
  Synthetic oligonucleotide
gaagccattaccaattcattctctaataaa

SEQ ID NO: 369578 - DNA, 30 bp, Artificial Sequence
  Synthetic oligonucleotide
ggcttgtgaagttcaagccccgcacataaa

SEQ ID NO: 369579 - DNA, 30 bp, Artificial Sequence
  Synthetic oligonucleotide
ggatcatattggtttttaaatgcacataaa

SEQ ID NO: 369580 - DNA, 30 bp, Artificial Sequence
  Synthetic oligonucleotide
gcagtttcccccaaccgatccccccataaa

SEQ ID NO: 369581 - DNA, 30 bp, Artificial Sequence
  Synthetic oligonucleotide
gaagacccggccgttggcacaggccataaa

SEQ ID NO: 369582 - DNA, 30 bp, Artificial Sequence
  Synthetic oligonucleotide
attaaatgccccaagggccgaccgcataaa

SEQ ID NO: 369583 - DNA, 30 bp, Artificial Sequence
  Synthetic oligonucleotide
gtgcggttacggaaataaatatggcataaa

SEQ ID NO: 369584 - DNA, 30 bp, Artificial Sequence
  Synthetic oligonucleotide
tgtctagttgaggccgctcgctggcataaa

SEQ ID NO: 369585 - DNA, 30 bp, Artificial Sequence
  Synthetic oligonucleotide
accacgtcgtccagagaattccatcataaa

SEQ ID NO: 369586 - DNA, 30 bp, Artificial Sequence
  Synthetic oligonucleotide
tattggagcgggtcttaggaacaagataaa

SEQ ID NO: 369587 - DNA, 30 bp, Artificial Sequence
  Synthetic oligonucleotide
acggcggtcgactctgataattcagataaa

SEQ ID NO: 369588 - DNA, 30 bp, Artificial Sequence
  Synthetic oligonucleotide
gtagaggggtaccgccgcgctggagataaa

SEQ ID NO: 369589 - DNA, 30 bp, Artificial Sequence
  Synthetic oligonucleotide
aaaagtaccttgatatactctgacgataaa

SEQ ID NO: 369590 - DNA, 30 bp, Artificial Sequence
  Synthetic oligonucleotide
gcttgtgcggattctgggaaaccggataaa

SEQ ID NO: 369591 - DNA, 30 bp, Artificial Sequence
  Synthetic oligonucleotide
tcaatagtccctagttttgggagggataaa

SEQ ID NO: 369592 - DNA, 30 bp, Artificial Sequence
  Synthetic oligonucleotide
tctcattgtaaacgtatgggactggataaa

SEQ ID NO: 369593 - DNA, 30 bp, Artificial Sequence
  Synthetic oligonucleotide
ataccttgtcgatacacgtaatgtgataaa

SEQ ID NO: 369594 - DNA, 30 bp, Artificial Sequence
  Synthetic oligonucleotide
tatagaagtcggcgactaaagtgtgataaa

SEQ ID NO: 369595 - DNA, 30 bp, Artificial Sequence
  Synthetic oligonucleotide
cgtatcagctgcgcctgacgcattgataaa

SEQ ID NO: 369596 - DNA, 30 bp, Artificial Sequence
  Synthetic oligonucleotide
tggttcagtacttaatgttcctttgataaa

SEQ ID NO: 369597 - DNA, 30 bp, Artificial Sequence
  Synthetic oligonucleotide
aacacggcatgtaataactaagaatataaa

SEQ ID NO: 369598 - DNA, 30 bp, Artificial Sequence
  Synthetic oligonucleotide
gtcagcacttagccgtcgacctcatataaa

SEQ ID NO: 369599 - DNA, 30 bp, Artificial Sequence
  Synthetic oligonucleotide
gtacttttacactaattgcaacgatataaa

SEQ ID NO: 369600 - DNA, 30 bp, Artificial Sequence
  Synthetic oligonucleotide
ttcgcctctcattcgggccctaactataaa

SEQ ID NO: 369601 - DNA, 30 bp, Artificial Sequence
  Synthetic oligonucleotide
gaagtcaactgaggcgcaaatcactataaa

SEQ ID NO: 369602 - DNA, 30 bp, Artificial Sequence
  Synthetic oligonucleotide
tgattcttctaagaggctatcgtctataaa

SEQ ID NO: 369603 - DNA, 29 bp, Artificial Sequence
  Synthetic oligonucleotide
tttgttgtgtagttttactcccgtataaa

SEQ ID NO: 369604 - DNA, 30 bp, Artificial Sequence
  Synthetic oligonucleotide
cgcagctaagctctaaataacaggtataaa

SEQ ID NO: 369605 - DNA, 30 bp, Artificial Sequence
  Synthetic oligonucleotide
aagccgatgcagttcagtgggatgtataaa

SEQ ID NO: 369606 - DNA, 30 bp, Artificial Sequence
  Synthetic oligonucleotide
ttagacttgccatgaatatggagttataaa

SEQ ID NO: 369607 - DNA, 30 bp, Artificial Sequence
  Synthetic oligonucleotide
gagagagcatcttataggagtatttataaa

SEQ ID NO: 369608 - DNA, 30 bp, Artificial Sequence
  Synthetic oligonucleotide
tagagaagtctgaaatagcagacaactaaa

SEQ ID NO: 369609 - DNA, 30 bp, Artificial Sequence
  Synthetic oligonucleotide
agggtcaaatcccactattgtggaactaaa

SEQ ID NO: 369610 - DNA, 30 bp, Artificial Sequence
  Synthetic oligonucleotide
taagtgtcaaatggtacgtgctgaactaaa

SEQ ID NO: 369611 - DNA, 30 bp, Artificial Sequence
  Synthetic oligonucleotide
aaacaatgctccgcggtaataataactaaa

SEQ ID NO: 369612 - DNA, 30 bp, Artificial Sequence
  Synthetic oligonucleotide
ggctcgtccaccaataatcttcacactaaa

SEQ ID NO: 369613 - DNA, 30 bp, Artificial Sequence
  Synthetic oligonucleotide
gaggcctgccaatttgtacggggcactaaa

SEQ ID NO: 369614 - DNA, 30 bp, Artificial Sequence
  Synthetic oligonucleotide
ggtgaaggccttttatggattcggactaaa

SEQ ID NO: 369615 - DNA, 30 bp, Artificial Sequence
  Synthetic oligonucleotide
caatcccatgatcaatttcgcattactaaa

SEQ ID NO: 369616 - DNA, 30 bp, Artificial Sequence
  Synthetic oligonucleotide
aatacgtgatactgtgctgcgctccctaaa

SEQ ID NO: 369617 - DNA, 30 bp, Artificial Sequence
  Synthetic oligonucleotide
tggccttccgaatggattgcatagcctaaa

SEQ ID NO: 369618 - DNA, 30 bp, Artificial Sequence
  Synthetic oligonucleotide
ccattcaaaggacatcctcaaaggcctaaa

SEQ ID NO: 369619 - DNA, 30 bp, Artificial Sequence
  Synthetic oligonucleotide
cgtaagtcctggcatagcgcacatcctaaa

SEQ ID NO: 369620 - DNA, 30 bp, Artificial Sequence
  Synthetic oligonucleotide
tctcgtttaacttgaacctactatcctaaa

SEQ ID NO: 369621 - DNA, 30 bp, Artificial Sequence
  Synthetic oligonucleotide
attattgggagatatatattaacagctaaa

SEQ ID NO: 369622 - DNA, 30 bp, Artificial Sequence
  Synthetic oligonucleotide
gcgttgagtgtttcacccgccacagctaaa

SEQ ID NO: 369623 - DNA, 30 bp, Artificial Sequence
  Synthetic oligonucleotide
ccggcatatttgttagcagtgacagctaaa

SEQ ID NO: 369624 - DNA, 30 bp, Artificial Sequence
  Synthetic oligonucleotide
gacgatccgcccagtgtgagctcagctaaa

SEQ ID NO: 369625 - DNA, 30 bp, Artificial Sequence
  Synthetic oligonucleotide
agacgtttgtatgtgcccggctcagctaaa

SEQ ID NO: 369626 - DNA, 30 bp, Artificial Sequence
  Synthetic oligonucleotide
ccgtctcaggagcaaacagcggccgctaaa

SEQ ID NO: 369627 - DNA, 30 bp, Artificial Sequence
  Synthetic oligonucleotide
acatgcggctggttaagttatccggctaaa

SEQ ID NO: 369628 - DNA, 30 bp, Artificial Sequence
  Synthetic oligonucleotide
ttacgcatccgcgctacaatacgggctaaa

SEQ ID NO: 369629 - DNA, 30 bp, Artificial Sequence
  Synthetic oligonucleotide
tgaagtttacacattcggaggatggctaaa

SEQ ID NO: 369630 - DNA, 30 bp, Artificial Sequence
  Synthetic oligonucleotide
caatatttgctggaacccttgaatgctaaa

SEQ ID NO: 369631 - DNA, 30 bp, Artificial Sequence
  Synthetic oligonucleotide
atattgctgaaatcggaagctactgctaaa

SEQ ID NO: 369632 - DNA, 30 bp, Artificial Sequence
  Synthetic oligonucleotide
ctctgttccggcaatccagccgctgctaaa

SEQ ID NO: 369633 - DNA, 30 bp, Artificial Sequence
  Synthetic oligonucleotide
ggaagctctaatcgctggtccacatctaaa

SEQ ID NO: 369634 - DNA, 30 bp, Artificial Sequence
  Synthetic oligonucleotide
atgagccatactagcgtcgcaggctctaaa

SEQ ID NO: 369635 - DNA, 30 bp, Artificial Sequence
  Synthetic oligonucleotide
caactgtcaaacaaacccccaagttctaaa

SEQ ID NO: 369636 - DNA, 30 bp, Artificial Sequence
  Synthetic oligonucleotide
gcggttgcgcccggcgcagagcgcagtaaa

SEQ ID NO: 369637 - DNA, 29 bp, Artificial Sequence
  Synthetic oligonucleotide
actggtccagtctaggtgcgtgcagtaaa

SEQ ID NO: 369638 - DNA, 30 bp, Artificial Sequence
  Synthetic oligonucleotide
cggtgacgcatgggcatccccgcgagtaaa

SEQ ID NO: 369639 - DNA, 30 bp, Artificial Sequence
  Synthetic oligonucleotide
catgggaggctgaagcacggtcatagtaaa

SEQ ID NO: 369640 - DNA, 30 bp, Artificial Sequence
  Synthetic oligonucleotide
agattgatttgactgcgaggtgatagtaaa

SEQ ID NO: 369641 - DNA, 30 bp, Artificial Sequence
  Synthetic oligonucleotide
cggaccgtggcgcacgaaatttatagtaaa

SEQ ID NO: 369642 - DNA, 30 bp, Artificial Sequence
  Synthetic oligonucleotide
ggatataagtttcttgaatgatctagtaaa

SEQ ID NO: 369643 - DNA, 30 bp, Artificial Sequence
  Synthetic oligonucleotide
ttaaccgcatagtttggactaatacgtaaa

SEQ ID NO: 369644 - DNA, 30 bp, Artificial Sequence
  Synthetic oligonucleotide
tgcagggtgtaaaccacggaataccgtaaa

SEQ ID NO: 369645 - DNA, 30 bp, Artificial Sequence
  Synthetic oligonucleotide
aaatgtgagacttcgctgagcccccgtaaa

SEQ ID NO: 369646 - DNA, 30 bp, Artificial Sequence
  Synthetic oligonucleotide
atcgctcaagcgtcggagctatagcgtaaa

SEQ ID NO: 369647 - DNA, 30 bp, Artificial Sequence
  Synthetic oligonucleotide
tggtcatgatggcatcattagccaggtaaa

SEQ ID NO: 369648 - DNA, 30 bp, Artificial Sequence
  Synthetic oligonucleotide
gaggtttaggaacctctgtgtgcaggtaaa

SEQ ID NO: 369649 - DNA, 30 bp, Artificial Sequence
  Synthetic oligonucleotide
actgactctagtttcgggagcggaggtaaa

SEQ ID NO: 369650 - DNA, 30 bp, Artificial Sequence
  Synthetic oligonucleotide
ctcgagtaattctacgcccgcgacggtaaa

SEQ ID NO: 369651 - DNA, 30 bp, Artificial Sequence
  Synthetic oligonucleotide
gggaggccagtgtcctctgcgtggggtaaa

SEQ ID NO: 369652 - DNA, 30 bp, Artificial Sequence
  Synthetic oligonucleotide
agtgccgggttaactccgatcttgggtaaa

SEQ ID NO: 369653 - DNA, 30 bp, Artificial Sequence
  Synthetic oligonucleotide
gcaccgcggggttaaatgagggctggtaaa

SEQ ID NO: 369654 - DNA, 30 bp, Artificial Sequence
  Synthetic oligonucleotide
gtttgaatcgtaaactgatacagtggtaaa

SEQ ID NO: 369655 - DNA, 30 bp, Artificial Sequence
  Synthetic oligonucleotide
actgttcatgttataacgtaaaaatgtaaa

SEQ ID NO: 369656 - DNA, 30 bp, Artificial Sequence
  Synthetic oligonucleotide
tgacggtataccgcccaatcttcatgtaaa

SEQ ID NO: 369657 - DNA, 30 bp, Artificial Sequence
  Synthetic oligonucleotide
tttatggcgacatatgcgaaatgatgtaaa

SEQ ID NO: 369658 - DNA, 30 bp, Artificial Sequence
  Synthetic oligonucleotide
tacgagtaacccagttcgggctgatgtaaa

SEQ ID NO: 369659 - DNA, 30 bp, Artificial Sequence
  Synthetic oligonucleotide
ggtgtttaaattttaattctgttatgtaaa

SEQ ID NO: 369660 - DNA, 30 bp, Artificial Sequence
  Synthetic oligonucleotide
aggcgcgacgatagggggtggtactgtaaa

SEQ ID NO: 369661 - DNA, 30 bp, Artificial Sequence
  Synthetic oligonucleotide
cgagagcttgagtttgtccttagctgtaaa

SEQ ID NO: 369662 - DNA, 30 bp, Artificial Sequence
  Synthetic oligonucleotide
tgctatgggaggtccttagtagagtgtaaa

SEQ ID NO: 369663 - DNA, 30 bp, Artificial Sequence
  Synthetic oligonucleotide
ttatctacagatagaagtcgtgggtgtaaa

SEQ ID NO: 369664 - DNA, 30 bp, Artificial Sequence
  Synthetic oligonucleotide
tacactctttttcctttttaactgtgtaaa

SEQ ID NO: 369665 - DNA, 30 bp, Artificial Sequence
  Synthetic oligonucleotide
gcttttggcgtttgaggacgaggttgtaaa

SEQ ID NO: 369666 - DNA, 30 bp, Artificial Sequence
  Synthetic oligonucleotide
aagatactgtggatggttaattgttgtaaa

SEQ ID NO: 369667 - DNA, 30 bp, Artificial Sequence
  Synthetic oligonucleotide
agagcggattcgcaggttcatatttgtaaa

SEQ ID NO: 369668 - DNA, 30 bp, Artificial Sequence
  Synthetic oligonucleotide
ctgtttcaagagcatggcatcttaattaaa

SEQ ID NO: 369669 - DNA, 30 bp, Artificial Sequence
  Synthetic oligonucleotide
atctagagtaaattacaagcatacattaaa

SEQ ID NO: 369670 - DNA, 30 bp, Artificial Sequence
  Synthetic oligonucleotide
ccgcgcgatgcgtggctcgcttggattaaa

SEQ ID NO: 369671 - DNA, 30 bp, Artificial Sequence
  Synthetic oligonucleotide
gtacgggttaccttgggacgattgattaaa

SEQ ID NO: 369672 - DNA, 30 bp, Artificial Sequence
  Synthetic oligonucleotide
tgatggcggagtacgtcaaataatattaaa

SEQ ID NO: 369673 - DNA, 30 bp, Artificial Sequence
  Synthetic oligonucleotide
acatgctaggaggtgtcatgaactattaaa

SEQ ID NO: 369674 - DNA, 30 bp, Artificial Sequence
  Synthetic oligonucleotide
ttgcgcggccactgaggtacgactattaaa

SEQ ID NO: 369675 - DNA, 30 bp, Artificial Sequence
  Synthetic oligonucleotide
cttgtttgcatacacacaggtaaacttaaa

SEQ ID NO: 369676 - DNA, 30 bp, Artificial Sequence
  Synthetic oligonucleotide
tgatgacacttgtaagcttgagaccttaaa

SEQ ID NO: 369677 - DNA, 30 bp, Artificial Sequence
  Synthetic oligonucleotide
cagtgacgatctataatcatgactcttaaa

SEQ ID NO: 369678 - DNA, 30 bp, Artificial Sequence
  Synthetic oligonucleotide
tattcagggaccgcgacccggaacgttaaa

SEQ ID NO: 369679 - DNA, 30 bp, Artificial Sequence
  Synthetic oligonucleotide
gccaggtgttcctatacaagttccgttaaa

SEQ ID NO: 369680 - DNA, 30 bp, Artificial Sequence
  Synthetic oligonucleotide
aggatcgtgacccatagccggcgcgttaaa

SEQ ID NO: 369681 - DNA, 30 bp, Artificial Sequence
  Synthetic oligonucleotide
ggttgtcatttttgaagtttgggcgttaaa

SEQ ID NO: 369682 - DNA, 30 bp, Artificial Sequence
  Synthetic oligonucleotide
tgatcctcaccatctaataagtgcgttaaa

SEQ ID NO: 369683 - DNA, 30 bp, Artificial Sequence
  Synthetic oligonucleotide
ttgtcggttggttactaagcgccggttaaa

SEQ ID NO: 369684 - DNA, 30 bp, Artificial Sequence
  Synthetic oligonucleotide
tggattagattctcagacaaggcggttaaa

SEQ ID NO: 369685 - DNA, 30 bp, Artificial Sequence
  Synthetic oligonucleotide
cgcaggaaaaatgcctgctaggtggttaaa

SEQ ID NO: 369686 - DNA, 30 bp, Artificial Sequence
  Synthetic oligonucleotide
gcatagacttgactatatctcaatgttaaa

SEQ ID NO: 369687 - DNA, 30 bp, Artificial Sequence
  Synthetic oligonucleotide
ccacagtaccaagtattttatcgtgttaaa

SEQ ID NO: 369688 - DNA, 30 bp, Artificial Sequence
  Synthetic oligonucleotide
cataaggaccgcttgacggattgtgttaaa

SEQ ID NO: 369689 - DNA, 30 bp, Artificial Sequence
  Synthetic oligonucleotide
cccgcgcgacggatgcaagatcttgttaaa

SEQ ID NO: 369690 - DNA, 30 bp, Artificial Sequence
  Synthetic oligonucleotide
caattatctacgtctccagtagaatttaaa

SEQ ID NO: 369691 - DNA, 30 bp, Artificial Sequence
  Synthetic oligonucleotide
aaagtgagggtcatcttccgagcatttaaa

SEQ ID NO: 369692 - DNA, 30 bp, Artificial Sequence
  Synthetic oligonucleotide
ataaacagcccagattctactgcatttaaa

SEQ ID NO: 369693 - DNA, 30 bp, Artificial Sequence
  Synthetic oligonucleotide
gtttacagaggtccgtcagagtcatttaaa

SEQ ID NO: 369694 - DNA, 30 bp, Artificial Sequence
  Synthetic oligonucleotide
cggtttgacgtgtcaggaaggccctttaaa

SEQ ID NO: 369695 - DNA, 30 bp, Artificial Sequence
  Synthetic oligonucleotide
taagtgtaggttcccatggctgcctttaaa

SEQ ID NO: 369696 - DNA, 30 bp, Artificial Sequence
  Synthetic oligonucleotide
aacggatggtttcactgtgtatgctttaaa

SEQ ID NO: 369697 - DNA, 30 bp, Artificial Sequence
  Synthetic oligonucleotide
gagcatccacaccactacactgtctttaaa

SEQ ID NO: 369698 - DNA, 30 bp, Artificial Sequence
  Synthetic oligonucleotide
atgtagaggagttaagggtgtttgtttaaa

SEQ ID NO: 369699 - DNA, 30 bp, Artificial Sequence
  Synthetic oligonucleotide
cggtccgcatccgattatttaagttttaaa

SEQ ID NO: 369700 - DNA, 30 bp, Artificial Sequence
  Synthetic oligonucleotide
ttccggtacagttctcggctattttttaaa

SEQ ID NO: 369701 - DNA, 30 bp, Artificial Sequence
  Synthetic oligonucleotide
agcttttctatggttccgaaagccaaacaa

SEQ ID NO: 369702 - DNA, 30 bp, Artificial Sequence
  Synthetic oligonucleotide
tgcaattaatgaggccggtgttagaaacaa

SEQ ID NO: 369703 - DNA, 30 bp, Artificial Sequence
  Synthetic oligonucleotide
aaacctaaagacgtgattatgatgaaacaa

SEQ ID NO: 369704 - DNA, 30 bp, Artificial Sequence
  Synthetic oligonucleotide
ttcttgttctattagcacggcaataaacaa

SEQ ID NO: 369705 - DNA, 30 bp, Artificial Sequence
  Synthetic oligonucleotide
gcctcaatgcgatcattcggatctaaacaa

SEQ ID NO: 369706 - DNA, 30 bp, Artificial Sequence
  Synthetic oligonucleotide
aaactctggagccagcttgtcaaacaacaa

SEQ ID NO: 369707 - DNA, 30 bp, Artificial Sequence
  Synthetic oligonucleotide
tgactctatcggtgttggtgtcaacaacaa

SEQ ID NO: 369708 - DNA, 30 bp, Artificial Sequence
  Synthetic oligonucleotide
ccgataagggcccgtagtattccacaacaa

SEQ ID NO: 369709 - DNA, 30 bp, Artificial Sequence
  Synthetic oligonucleotide
aacgctgttaattccctcccggcccaacaa

SEQ ID NO: 369710 - DNA, 30 bp, Artificial Sequence
  Synthetic oligonucleotide
ctagttggtgtagagttgtaacgccaacaa

SEQ ID NO: 369711 - DNA, 30 bp, Artificial Sequence
  Synthetic oligonucleotide
agtcgggtacaaccttagatgaagcaacaa

SEQ ID NO: 369712 - DNA, 30 bp, Artificial Sequence
  Synthetic oligonucleotide
ttttataatgcccttcaactgcagcaacaa

SEQ ID NO: 369713 - DNA, 30 bp, Artificial Sequence
  Synthetic oligonucleotide
gatgtgcggaaactggttgctgggcaacaa

SEQ ID NO: 369714 - DNA, 30 bp, Artificial Sequence
  Synthetic oligonucleotide
ctagatgatcactacggacggatgcaacaa

SEQ ID NO: 369715 - DNA, 30 bp, Artificial Sequence
  Synthetic oligonucleotide
tggtaattttaggttgaccaagatcaacaa

SEQ ID NO: 369716 - DNA, 30 bp, Artificial Sequence
  Synthetic oligonucleotide
atctcacattgtacctatcgagatcaacaa

SEQ ID NO: 369717 - DNA, 30 bp, Artificial Sequence
  Synthetic oligonucleotide
gggcgccgggtatcgggtactgatcaacaa

SEQ ID NO: 369718 - DNA, 30 bp, Artificial Sequence
  Synthetic oligonucleotide
gcggcagatgcccctatcggtattcaacaa

SEQ ID NO: 369719 - DNA, 30 bp, Artificial Sequence
  Synthetic oligonucleotide
tgaccccttcgttaaggtgaggccgaacaa

SEQ ID NO: 369720 - DNA, 30 bp, Artificial Sequence
  Synthetic oligonucleotide
gcacgagaagcggtcgcagaacgcgaacaa

SEQ ID NO: 369721 - DNA, 30 bp, Artificial Sequence
  Synthetic oligonucleotide
gggctattatgtataaaacgcggggaacaa

SEQ ID NO: 369722 - DNA, 30 bp, Artificial Sequence
  Synthetic oligonucleotide
ccacccccgtacgtctgactttttgaacaa

SEQ ID NO: 369723 - DNA, 30 bp, Artificial Sequence
  Synthetic oligonucleotide
ggcagggggacgccgtattgtaaataacaa

SEQ ID NO: 369724 - DNA, 30 bp, Artificial Sequence
  Synthetic oligonucleotide
agcgcggcacagaaaggcccctaataacaa

SEQ ID NO: 369725 - DNA, 30 bp, Artificial Sequence
  Synthetic oligonucleotide
aggtttgttcatcgccgtttaggctaacaa

SEQ ID NO: 369726 - DNA, 30 bp, Artificial Sequence
  Synthetic oligonucleotide
caaaatagggtgacacataagatctaacaa

SEQ ID NO: 369727 - DNA, 30 bp, Artificial Sequence
  Synthetic oligonucleotide
aggtcgacacgcctttcgatcttctaacaa

SEQ ID NO: 369728 - DNA, 30 bp, Artificial Sequence
  Synthetic oligonucleotide
ataggcatatgtaaaatcaaattgtaacaa

SEQ ID NO: 369729 - DNA, 30 bp, Artificial Sequence
  Synthetic oligonucleotide
actttcgggaaagcatggcgtttgtaacaa

SEQ ID NO: 369730 - DNA, 30 bp, Artificial Sequence
  Synthetic oligonucleotide
ttaaaaatgaactaaatcgcctattaacaa

SEQ ID NO: 369731 - DNA, 30 bp, Artificial Sequence
  Synthetic oligonucleotide
tggcttcattcgacagccccagtttaacaa

SEQ ID NO: 369732 - DNA, 30 bp, Artificial Sequence
  Synthetic oligonucleotide
gctgttcctgagggtccgagtttaacacaa

SEQ ID NO: 369733 - DNA, 30 bp, Artificial Sequence
  Synthetic oligonucleotide
aaaacagagggtgatgcatatggcacacaa

SEQ ID NO: 369734 - DNA, 30 bp, Artificial Sequence
  Synthetic oligonucleotide
aacttatctataaactcggtccggacacaa

SEQ ID NO: 369735 - DNA, 30 bp, Artificial Sequence
  Synthetic oligonucleotide
caatgtgactaggagcatcgacgtacacaa

SEQ ID NO: 369736 - DNA, 30 bp, Artificial Sequence
  Synthetic oligonucleotide
ttccactcttgatcaatatcgcttacacaa

SEQ ID NO: 369737 - DNA, 30 bp, Artificial Sequence
  Synthetic oligonucleotide
gaacccgacgcactatgagatgcaccacaa

SEQ ID NO: 369738 - DNA, 30 bp, Artificial Sequence
  Synthetic oligonucleotide
ctcgttgttatgcggtcattatccccacaa

SEQ ID NO: 369739 - DNA, 30 bp, Artificial Sequence
  Synthetic oligonucleotide
gctgattatagaacgctggggtctccacaa

SEQ ID NO: 369740 - DNA, 30 bp, Artificial Sequence
  Synthetic oligonucleotide
tcacacgttggcctgtcggatggtccacaa

SEQ ID NO: 369741 - DNA, 30 bp, Artificial Sequence
  Synthetic oligonucleotide
ttcgtatttcacccccggtagtttccacaa

SEQ ID NO: 369742 - DNA, 30 bp, Artificial Sequence
  Synthetic oligonucleotide
cgggacatagatcgcaggggttacgcacaa

SEQ ID NO: 369743 - DNA, 30 bp, Artificial Sequence
  Synthetic oligonucleotide
aactctttgtgacaacggtacgcatcacaa

SEQ ID NO: 369744 - DNA, 30 bp, Artificial Sequence
  Synthetic oligonucleotide
gcgaattcggtgaaaggcttctcatcacaa

SEQ ID NO: 369745 - DNA, 30 bp, Artificial Sequence
  Synthetic oligonucleotide
ctcgactcagcctcaatcggcatatcacaa

SEQ ID NO: 369746 - DNA, 30 bp, Artificial Sequence
  Synthetic oligonucleotide
aaacgcataagtgcattcctaggttcacaa

SEQ ID NO: 369747 - DNA, 30 bp, Artificial Sequence
  Synthetic oligonucleotide
cacttcaacgggctaagcgtcgtttcacaa

SEQ ID NO: 369748 - DNA, 30 bp, Artificial Sequence
  Synthetic oligonucleotide
gaaagccagtattgacgaagcaaaagacaa

SEQ ID NO: 369749 - DNA, 30 bp, Artificial Sequence
  Synthetic oligonucleotide
tctcgatgtaactgcgtgccttcaagacaa

SEQ ID NO: 369750 - DNA, 30 bp, Artificial Sequence
  Synthetic oligonucleotide
ccccttgatctatatcacctatagagacaa

SEQ ID NO: 369751 - DNA, 30 bp, Artificial Sequence
  Synthetic oligonucleotide
agtggtcctatcggaacgccggcgagacaa

SEQ ID NO: 369752 - DNA, 30 bp, Artificial Sequence
  Synthetic oligonucleotide
tgtttctagagagcctggaggcatagacaa

SEQ ID NO: 369753 - DNA, 30 bp, Artificial Sequence
  Synthetic oligonucleotide
aagtacattttattagggggttgtagacaa

SEQ ID NO: 369754 - DNA, 30 bp, Artificial Sequence
  Synthetic oligonucleotide
tcgtgcactgttttatttagagcacgacaa

SEQ ID NO: 369755 - DNA, 30 bp, Artificial Sequence
  Synthetic oligonucleotide
ggagaaactggtgtgatatattcacgacaa

SEQ ID NO: 369756 - DNA, 30 bp, Artificial Sequence
  Synthetic oligonucleotide
gccatgtacctggtcttgggagtacgacaa

SEQ ID NO: 369757 - DNA, 30 bp, Artificial Sequence
  Synthetic oligonucleotide
ttagatagtccgtttccctcttaccgacaa

SEQ ID NO: 369758 - DNA, 30 bp, Artificial Sequence
  Synthetic oligonucleotide
atattggaccggttaatagggccccgacaa

SEQ ID NO: 369759 - DNA, 30 bp, Artificial Sequence
  Synthetic oligonucleotide
attttgttgtgagcgagggtccatcgacaa

SEQ ID NO: 369760 - DNA, 30 bp, Artificial Sequence
  Synthetic oligonucleotide
ccagggtacgagcctgttcgcgctcgacaa

SEQ ID NO: 369761 - DNA, 30 bp, Artificial Sequence
  Synthetic oligonucleotide
gatgaattttcgtatggtagattaggacaa

SEQ ID NO: 369762 - DNA, 30 bp, Artificial Sequence
  Synthetic oligonucleotide
cttgagccaaagcttcaactcttaggacaa

SEQ ID NO: 369763 - DNA, 30 bp, Artificial Sequence
  Synthetic oligonucleotide
cagtcccggaccaggcgacgtctcggacaa

SEQ ID NO: 369764 - DNA, 30 bp, Artificial Sequence
  Synthetic oligonucleotide
gattagaccgttgacatacttaagggacaa

SEQ ID NO: 369765 - DNA, 30 bp, Artificial Sequence
  Synthetic oligonucleotide
ggcctgggataacccggacattagggacaa

SEQ ID NO: 369766 - DNA, 30 bp, Artificial Sequence
  Synthetic oligonucleotide
atgaactaccatcattcaggggtgggacaa

SEQ ID NO: 369767 - DNA, 30 bp, Artificial Sequence
  Synthetic oligonucleotide
taactgcacagccgcgctctcttgggacaa

SEQ ID NO: 369768 - DNA, 30 bp, Artificial Sequence
  Synthetic oligonucleotide
taagtctcgattaaataagaatttggacaa

SEQ ID NO: 369769 - DNA, 30 bp, Artificial Sequence
  Synthetic oligonucleotide
cggcggcaggagtcccgtgtacaatgacaa

SEQ ID NO: 369770 - DNA, 30 bp, Artificial Sequence
  Synthetic oligonucleotide
tgccgcaaaagtgtcgatgttatatgacaa

SEQ ID NO: 369771 - DNA, 30 bp, Artificial Sequence
  Synthetic oligonucleotide
aaaatgtccgagaaacattgagcgtgacaa

SEQ ID NO: 369772 - DNA, 30 bp, Artificial Sequence
  Synthetic oligonucleotide
aataggtttcaagagtcgccccggtgacaa

SEQ ID NO: 369773 - DNA, 30 bp, Artificial Sequence
  Synthetic oligonucleotide
ctatagtcaggggccgattgcgcttgacaa

SEQ ID NO: 369774 - DNA, 30 bp, Artificial Sequence
  Synthetic oligonucleotide
tttgtgcaacactcactgcacatttgacaa

SEQ ID NO: 369775 - DNA, 30 bp, Artificial Sequence
  Synthetic oligonucleotide
tgaatggccgctagtaggctgagcatacaa

SEQ ID NO: 369776 - DNA, 30 bp, Artificial Sequence
  Synthetic oligonucleotide
gatgggctgtatgctaggtccgagatacaa

SEQ ID NO: 369777 - DNA, 30 bp, Artificial Sequence
  Synthetic oligonucleotide
caaataaataggtatatgacctcgatacaa

SEQ ID NO: 369778 - DNA, 30 bp, Artificial Sequence
  Synthetic oligonucleotide
gtgtatctctcgactgaactaatgatacaa

SEQ ID NO: 369779 - DNA, 30 bp, Artificial Sequence
  Synthetic oligonucleotide
cgtcgggacgcggcagtcaagcatatacaa

SEQ ID NO: 369780 - DNA, 31 bp, Artificial Sequence
  Synthetic oligonucleotide
ctggcctcggcgcacgaggatgactatacaa

SEQ ID NO: 369781 - DNA, 30 bp, Artificial Sequence
  Synthetic oligonucleotide
tgtacgggccgtgtggcagtgcctatacaa

SEQ ID NO: 369782 - DNA, 30 bp, Artificial Sequence
  Synthetic oligonucleotide
tgatgtccagagttatagatacgtatacaa

SEQ ID NO: 369783 - DNA, 30 bp, Artificial Sequence
  Synthetic oligonucleotide
ccatataggcggcatattcgggtactacaa

SEQ ID NO: 369784 - DNA, 30 bp, Artificial Sequence
  Synthetic oligonucleotide
aacatgaattgaccaccctgacacctacaa

SEQ ID NO: 369785 - DNA, 30 bp, Artificial Sequence
  Synthetic oligonucleotide
atcataggatctgcgaacgagttcctacaa

SEQ ID NO: 369786 - DNA, 30 bp, Artificial Sequence
  Synthetic oligonucleotide
tggtctgatatcagcatcggagtgctacaa

SEQ ID NO: 369787 - DNA, 30 bp, Artificial Sequence
  Synthetic oligonucleotide
ataggcgaccccgagctgattcacgtacaa

SEQ ID NO: 369788 - DNA, 30 bp, Artificial Sequence
  Synthetic oligonucleotide
aaatgaagacttgcggaggcaccggtacaa

SEQ ID NO: 369789 - DNA, 30 bp, Artificial Sequence
  Synthetic oligonucleotide
cgaactccggaattataccgattggtacaa

SEQ ID NO: 369790 - DNA, 30 bp, Artificial Sequence
  Synthetic oligonucleotide
aatccttaagtaactgcgtgtagtgtacaa

SEQ ID NO: 369791 - DNA, 30 bp, Artificial Sequence
  Synthetic oligonucleotide
atagtactagcggtaccggtgcgattacaa

SEQ ID NO: 369792 - DNA, 30 bp, Artificial Sequence
  Synthetic oligonucleotide
gttcctacataaatccgctttcgattacaa

SEQ ID NO: 369793 - DNA, 30 bp, Artificial Sequence
  Synthetic oligonucleotide
catcgttgtccacgctcggatatattacaa

SEQ ID NO: 369794 - DNA, 30 bp, Artificial Sequence
  Synthetic oligonucleotide
gcccgtgacgtcagggcgtctgggttacaa

SEQ ID NO: 369795 - DNA, 30 bp, Artificial Sequence
  Synthetic oligonucleotide
tgactacaaatatgggttaaaaaaaaccaa

SEQ ID NO: 369796 - DNA, 30 bp, Artificial Sequence
  Synthetic oligonucleotide
tttaggattggtccctaagagttaaaccaa

SEQ ID NO: 369797 - DNA, 30 bp, Artificial Sequence
  Synthetic oligonucleotide
caatttagtgatggtcgtagacgcaaccaa

SEQ ID NO: 369798 - DNA, 30 bp, Artificial Sequence
  Synthetic oligonucleotide
ccagtcacctgttggagtcgaacgaaccaa

SEQ ID NO: 369799 - DNA, 30 bp, Artificial Sequence
  Synthetic oligonucleotide
ttcggattcacactcgaaaaagggaaccaa

SEQ ID NO: 369800 - DNA, 30 bp, Artificial Sequence
  Synthetic oligonucleotide
gctatcaattattgacaactggataaccaa

SEQ ID NO: 369801 - DNA, 30 bp, Artificial Sequence
  Synthetic oligonucleotide
ccgcaatcgatagcgtaggactgtaaccaa

SEQ ID NO: 369802 - DNA, 30 bp, Artificial Sequence
  Synthetic oligonucleotide
ggtgacaggtccttgacacgtccccaccaa

SEQ ID NO: 369803 - DNA, 30 bp, Artificial Sequence
  Synthetic oligonucleotide
cgtatatatgttctctttagtatccaccaa

SEQ ID NO: 369804 - DNA, 30 bp, Artificial Sequence
  Synthetic oligonucleotide
aatatagcgctttcccaatcgtagcaccaa

SEQ ID NO: 369805 - DNA, 30 bp, Artificial Sequence
  Synthetic oligonucleotide
attgcagcgatgaagcacccagcgcaccaa

SEQ ID NO: 369806 - DNA, 30 bp, Artificial Sequence
  Synthetic oligonucleotide
tctggggaacagccattggcctggcaccaa

SEQ ID NO: 369807 - DNA, 30 bp, Artificial Sequence
  Synthetic oligonucleotide
tttatcagccgtctatggcaggtgcaccaa

SEQ ID NO: 369808 - DNA, 30 bp, Artificial Sequence
  Synthetic oligonucleotide
agtaggttcgcgtccgcagattatcaccaa

SEQ ID NO: 369809 - DNA, 30 bp, Artificial Sequence
  Synthetic oligonucleotide
gctttgcggtaccgttgattacgtcaccaa

SEQ ID NO: 369810 - DNA, 30 bp, Artificial Sequence
  Synthetic oligonucleotide
ttttcacgggaatggcaagcaacagaccaa

SEQ ID NO: 369811 - DNA, 30 bp, Artificial Sequence
  Synthetic oligonucleotide
gggtcctaacccagacagggaggcgaccaa

SEQ ID NO: 369812 - DNA, 30 bp, Artificial Sequence
  Synthetic oligonucleotide
tgtgaaagggtattccccctaggcgaccaa

SEQ ID NO: 369813 - DNA, 30 bp, Artificial Sequence
  Synthetic oligonucleotide
gtccgccgaaatgtttgttgtatcgaccaa

SEQ ID NO: 369814 - DNA, 30 bp, Artificial Sequence
  Synthetic oligonucleotide
tcaatttctttcgcggatgtgtgggaccaa

SEQ ID NO: 369815 - DNA, 30 bp, Artificial Sequence
  Synthetic oligonucleotide
ggtaacacgggcctatattaattggaccaa

SEQ ID NO: 369816 - DNA, 30 bp, Artificial Sequence
  Synthetic oligonucleotide
atctggctgaaaactaactcttaataccaa

SEQ ID NO: 369817 - DNA, 30 bp, Artificial Sequence
  Synthetic oligonucleotide
cttgtaccgagagtacgtaatagctaccaa

SEQ ID NO: 369818 - DNA, 30 bp, Artificial Sequence
  Synthetic oligonucleotide
gaaggccacaactattgatgcacaacccaa

SEQ ID NO: 369819 - DNA, 30 bp, Artificial Sequence
  Synthetic oligonucleotide
gttcgtaacggcccgaacaagacaacccaa

SEQ ID NO: 369820 - DNA, 30 bp, Artificial Sequence
  Synthetic oligonucleotide
cgcaaaatagacgaggcaatggtaacccaa

SEQ ID NO: 369821 - DNA, 30 bp, Artificial Sequence
  Synthetic oligonucleotide
ggcattcttgcttacgtgtcggacacccaa

SEQ ID NO: 369822 - DNA, 30 bp, Artificial Sequence
  Synthetic oligonucleotide
tagcggagcaagaggtcgaactgcacccaa

SEQ ID NO: 369823 - DNA, 30 bp, Artificial Sequence
  Synthetic oligonucleotide
gctctgctactgttcaccttagatacccaa

SEQ ID NO: 369824 - DNA, 30 bp, Artificial Sequence
  Synthetic oligonucleotide
tgcggactgttgctagtcctcactacccaa

SEQ ID NO: 369825 - DNA, 30 bp, Artificial Sequence
  Synthetic oligonucleotide
tcattcaatgggtttgcggcttttacccaa

SEQ ID NO: 369826 - DNA, 30 bp, Artificial Sequence
  Synthetic oligonucleotide
cctccagcggaagtacagggttcaccccaa

SEQ ID NO: 369827 - DNA, 30 bp, Artificial Sequence
  Synthetic oligonucleotide
cggtgttgcatcatctgcgaatccccccaa

SEQ ID NO: 369828 - DNA, 30 bp, Artificial Sequence
  Synthetic oligonucleotide
cggggacgtgcggactagcatgggccccaa

SEQ ID NO: 369829 - DNA, 30 bp, Artificial Sequence
  Synthetic oligonucleotide
atgtacgaactatagggccagcctccccaa

SEQ ID NO: 369830 - DNA, 30 bp, Artificial Sequence
  Synthetic oligonucleotide
aaacccaattaaatgaatatgaacgcccaa

SEQ ID NO: 369831 - DNA, 30 bp, Artificial Sequence
  Synthetic oligonucleotide
tcttgttaaaagaccggtcagttcgcccaa

SEQ ID NO: 369832 - DNA, 30 bp, Artificial Sequence
  Synthetic oligonucleotide
gccatcgggactcctcacatgtaggcccaa

SEQ ID NO: 369833 - DNA, 30 bp, Artificial Sequence
  Synthetic oligonucleotide
gtattgtaccacggtttgatcggggcccaa

SEQ ID NO: 369834 - DNA, 30 bp, Artificial Sequence
  Synthetic oligonucleotide
acaggttgcattacaagggtaactgcccaa

SEQ ID NO: 369835 - DNA, 29 bp, Artificial Sequence
  Synthetic oligonucleotide
gggagcagtctcgtcgagcgcctgcccaa

SEQ ID NO: 369836 - DNA, 30 bp, Artificial Sequence
  Synthetic oligonucleotide
gtaaaaattagccggtggtgggctgcccaa

SEQ ID NO: 369837 - DNA, 30 bp, Artificial Sequence
  Synthetic oligonucleotide
attcatggcaatgttcatgtgagtgcccaa

SEQ ID NO: 369838 - DNA, 30 bp, Artificial Sequence
  Synthetic oligonucleotide
ctcttcacaattgcctgatactttgcccaa

SEQ ID NO: 369839 - DNA, 30 bp, Artificial Sequence
  Synthetic oligonucleotide
ccagtcacttggggggcacgtcagtcccaa

SEQ ID NO: 369840 - DNA, 30 bp, Artificial Sequence
  Synthetic oligonucleotide
acgcatatcgatggaccaacaaggtcccaa

SEQ ID NO: 369841 - DNA, 30 bp, Artificial Sequence
  Synthetic oligonucleotide
agccatagaattcatttactgggaagccaa

SEQ ID NO: 369842 - DNA, 30 bp, Artificial Sequence
  Synthetic oligonucleotide
cggccccgcgggcgagtgccattaagccaa

SEQ ID NO: 369843 - DNA, 30 bp, Artificial Sequence
  Synthetic oligonucleotide
cgaacagcgatcggacagctcgggagccaa

SEQ ID NO: 369844 - DNA, 30 bp, Artificial Sequence
  Synthetic oligonucleotide
gcccttgagtacgcgggggcgcctagccaa

SEQ ID NO: 369845 - DNA, 30 bp, Artificial Sequence
  Synthetic oligonucleotide
tgcaccagacgcccaccattgcgtagccaa

SEQ ID NO: 369846 - DNA, 30 bp, Artificial Sequence
  Synthetic oligonucleotide
ctgcatgcggggcaaatctggaaccgccaa

SEQ ID NO: 369847 - DNA, 30 bp, Artificial Sequence
  Synthetic oligonucleotide
cggacacgggcgaaagaatgacgccgccaa

SEQ ID NO: 369848 - DNA, 30 bp, Artificial Sequence
  Synthetic oligonucleotide
gatattaattggcggatcatagggcgccaa

SEQ ID NO: 369849 - DNA, 30 bp, Artificial Sequence
  Synthetic oligonucleotide
gctgaccactgctaccgcatttatcgccaa

SEQ ID NO: 369850 - DNA, 30 bp, Artificial Sequence
  Synthetic oligonucleotide
gtgtaaggttgtctgagtggctcaggccaa

SEQ ID NO: 369851 - DNA, 30 bp, Artificial Sequence
  Synthetic oligonucleotide
cttcgttggaatttccgtgataccggccaa

SEQ ID NO: 369852 - DNA, 30 bp, Artificial Sequence
  Synthetic oligonucleotide
gctaaggactggaagcccacgtccggccaa

SEQ ID NO: 369853 - DNA, 30 bp, Artificial Sequence
  Synthetic oligonucleotide
gacacatccggaacgctaggccttggccaa

SEQ ID NO: 369854 - DNA, 30 bp, Artificial Sequence
  Synthetic oligonucleotide
gttcactaagctctaaaggaacgctgccaa

SEQ ID NO: 369855 - DNA, 30 bp, Artificial Sequence
  Synthetic oligonucleotide
actcgggctgcagccgcggccggttgccaa

SEQ ID NO: 369856 - DNA, 30 bp, Artificial Sequence
  Synthetic oligonucleotide
cctcctcgtggcgatggagtaggaatccaa

SEQ ID NO: 369857 - DNA, 30 bp, Artificial Sequence
  Synthetic oligonucleotide
gataccgtttctgtgtaggttataatccaa

SEQ ID NO: 369858 - DNA, 30 bp, Artificial Sequence
  Synthetic oligonucleotide
caatacggtacggcgaatgttttaatccaa

SEQ ID NO: 369859 - DNA, 30 bp, Artificial Sequence
  Synthetic oligonucleotide
aagccatatagacgagtcatctagatccaa

SEQ ID NO: 369860 - DNA, 30 bp, Artificial Sequence
  Synthetic oligonucleotide
ttcaactgccatattcagccgtagatccaa

SEQ ID NO: 369861 - DNA, 30 bp, Artificial Sequence
  Synthetic oligonucleotide
tatagatgtgtcccctatctggatatccaa

SEQ ID NO: 369862 - DNA, 30 bp, Artificial Sequence
  Synthetic oligonucleotide
cgcgtccacttcgggggaccaagtatccaa

SEQ ID NO: 369863 - DNA, 30 bp, Artificial Sequence
  Synthetic oligonucleotide
aatcgcaactagcatacgccgtttatccaa

SEQ ID NO: 369864 - DNA, 30 bp, Artificial Sequence
  Synthetic oligonucleotide
gccacgcaagattcatgcgctcagctccaa

SEQ ID NO: 369865 - DNA, 30 bp, Artificial Sequence
  Synthetic oligonucleotide
cagttctcgcagttttaactacatctccaa

SEQ ID NO: 369866 - DNA, 30 bp, Artificial Sequence
  Synthetic oligonucleotide
tatcaacagctccagtcgatttctctccaa

SEQ ID NO: 369867 - DNA, 30 bp, Artificial Sequence
  Synthetic oligonucleotide
atataaccagtctttggtaggtaagtccaa

SEQ ID NO: 369868 - DNA, 30 bp, Artificial Sequence
  Synthetic oligonucleotide
gatgattttcgtatacgaaacacagtccaa

SEQ ID NO: 369869 - DNA, 30 bp, Artificial Sequence
  Synthetic oligonucleotide
actacgcctactttgcaaaatctcgtccaa

SEQ ID NO: 369870 - DNA, 30 bp, Artificial Sequence
  Synthetic oligonucleotide
atatccgtgatcaaggtgggccatgtccaa

SEQ ID NO: 369871 - DNA, 30 bp, Artificial Sequence
  Synthetic oligonucleotide
agggagtatgagaaaggatgtcatgtccaa

SEQ ID NO: 369872 - DNA, 30 bp, Artificial Sequence
  Synthetic oligonucleotide
gccgtccgaagacaattgggtaaattccaa

SEQ ID NO: 369873 - DNA, 30 bp, Artificial Sequence
  Synthetic oligonucleotide
actgtatagagattgtgaggatatttccaa

SEQ ID NO: 369874 - DNA, 30 bp, Artificial Sequence
  Synthetic oligonucleotide
gtggcatcgctctgctactgccgtttccaa

SEQ ID NO: 369875 - DNA, 30 bp, Artificial Sequence
  Synthetic oligonucleotide
gcagttatgcaacgagccttttaaaagcaa

SEQ ID NO: 369876 - DNA, 30 bp, Artificial Sequence
  Synthetic oligonucleotide
ttgcgcgtttattccggattgtgcaagcaa

SEQ ID NO: 369877 - DNA, 30 bp, Artificial Sequence
  Synthetic oligonucleotide
gaccaattgcttacttcaattctgaagcaa

SEQ ID NO: 369878 - DNA, 30 bp, Artificial Sequence
  Synthetic oligonucleotide
ttgtagcgtctcaattagaacgataagcaa

SEQ ID NO: 369879 - DNA, 30 bp, Artificial Sequence
  Synthetic oligonucleotide
ttgttctaatccctaactttttgtaagcaa

SEQ ID NO: 369880 - DNA, 29 bp, Artificial Sequence
  Synthetic oligonucleotide
gttctttcgaatgcgaagtagttaagcaa

SEQ ID NO: 369881 - DNA, 30 bp, Artificial Sequence
  Synthetic oligonucleotide
ctggaaggcgtacggatcattgcacagcaa

SEQ ID NO: 369882 - DNA, 30 bp, Artificial Sequence
  Synthetic oligonucleotide
tgagtgtatgctaggcgttatcaccagcaa

SEQ ID NO: 369883 - DNA, 30 bp, Artificial Sequence
  Synthetic oligonucleotide
tgaggaacggttaccatttggcctcagcaa

SEQ ID NO: 369884 - DNA, 30 bp, Artificial Sequence
  Synthetic oligonucleotide
gcaacattgcaaggaacgttagaagagcaa

SEQ ID NO: 369885 - DNA, 30 bp, Artificial Sequence
  Synthetic oligonucleotide
acttgcactggaggtagcaagagcgagcaa

SEQ ID NO: 369886 - DNA, 30 bp, Artificial Sequence
  Synthetic oligonucleotide
aggatcgcggcacgaataatgtgggagcaa

SEQ ID NO: 369887 - DNA, 30 bp, Artificial Sequence
  Synthetic oligonucleotide
tctgatagcaggattggtctgtatgagcaa

SEQ ID NO: 369888 - DNA, 30 bp, Artificial Sequence
  Synthetic oligonucleotide
tggacctgcgttcccgcaaacattgagcaa

SEQ ID NO: 369889 - DNA, 30 bp, Artificial Sequence
  Synthetic oligonucleotide
cgcatctgtccgagcgagtcctcgtagcaa

SEQ ID NO: 369890 - DNA, 30 bp, Artificial Sequence
  Synthetic oligonucleotide
tggcgacgcggacgtgttacaatgtagcaa

SEQ ID NO: 369891 - DNA, 30 bp, Artificial Sequence
  Synthetic oligonucleotide
gcaagcatttaatcgtatgacatgtagcaa

SEQ ID NO: 369892 - DNA, 30 bp, Artificial Sequence
  Synthetic oligonucleotide
taccttatccccgggtgttcaagaacgcaa

SEQ ID NO: 369893 - DNA, 30 bp, Artificial Sequence
  Synthetic oligonucleotide
gtgtgttcacagcggctgttgctaacgcaa

SEQ ID NO: 369894 - DNA, 30 bp, Artificial Sequence
  Synthetic oligonucleotide
ggacaggcacgcctgtggcctttaacgcaa

SEQ ID NO: 369895 - DNA, 30 bp, Artificial Sequence
  Synthetic oligonucleotide
ctaattaaagttacgatatcctccacgcaa

SEQ ID NO: 369896 - DNA, 30 bp, Artificial Sequence
  Synthetic oligonucleotide
ttcgggcaatagggttgatgtggcacgcaa

SEQ ID NO: 369897 - DNA, 30 bp, Artificial Sequence
  Synthetic oligonucleotide
atctgcttgggtcaacgagccgtcacgcaa

SEQ ID NO: 369898 - DNA, 30 bp, Artificial Sequence
  Synthetic oligonucleotide
cattttatacacaatgatctagatacgcaa

SEQ ID NO: 369899 - DNA, 30 bp, Artificial Sequence
  Synthetic oligonucleotide
atggacatttgcgcgagatcgtctacgcaa

SEQ ID NO: 369900 - DNA, 30 bp, Artificial Sequence
  Synthetic oligonucleotide
cgcatgtactcatgattattcagtacgcaa

SEQ ID NO: 369901 - DNA, 30 bp, Artificial Sequence
  Synthetic oligonucleotide
gtcactgaatgacagctagcccttacgcaa

SEQ ID NO: 369902 - DNA, 30 bp, Artificial Sequence
  Synthetic oligonucleotide
aggttctgtagcatggcggtagcaccgcaa

SEQ ID NO: 369903 - DNA, 30 bp, Artificial Sequence
  Synthetic oligonucleotide
gttacctttaccagtactctactaccgcaa

SEQ ID NO: 369904 - DNA, 30 bp, Artificial Sequence
  Synthetic oligonucleotide
gagcggaaacagcctacgatcggcccgcaa

SEQ ID NO: 369905 - DNA, 30 bp, Artificial Sequence
  Synthetic oligonucleotide
tttttgtgctcggatgacagtgatccgcaa

SEQ ID NO: 369906 - DNA, 30 bp, Artificial Sequence
  Synthetic oligonucleotide
tatgtaagtggtcaggctttaggtccgcaa

SEQ ID NO: 369907 - DNA, 30 bp, Artificial Sequence
  Synthetic oligonucleotide
actaacacgggccatatgaggtgagcgcaa

SEQ ID NO: 369908 - DNA, 30 bp, Artificial Sequence
  Synthetic oligonucleotide
cagggtgttacatcggctcgactagcgcaa

SEQ ID NO: 369909 - DNA, 30 bp, Artificial Sequence
  Synthetic oligonucleotide
agagtggcgtacactcgcgtcgtagcgcaa

SEQ ID NO: 369910 - DNA, 30 bp, Artificial Sequence
  Synthetic oligonucleotide
tgtcaggcgagctgggttggaaaggcgcaa

SEQ ID NO: 369911 - DNA, 30 bp, Artificial Sequence
  Synthetic oligonucleotide
atagaggcacagattgtaagtggtgcgcaa

SEQ ID NO: 369912 - DNA, 30 bp, Artificial Sequence
  Synthetic oligonucleotide
tgaaacagcagtgccggtggggaatcgcaa

SEQ ID NO: 369913 - DNA, 30 bp, Artificial Sequence
  Synthetic oligonucleotide
gtttaagtgaatcgcgttgtataatcgcaa

SEQ ID NO: 369914 - DNA, 30 bp, Artificial Sequence
  Synthetic oligonucleotide
tcatctaaacgtaaatggtatggatcgcaa

SEQ ID NO: 369915 - DNA, 30 bp, Artificial Sequence
  Synthetic oligonucleotide
gtgaatcatcgtggatggccttactcgcaa

SEQ ID NO: 369916 - DNA, 30 bp, Artificial Sequence
  Synthetic oligonucleotide
ggtacttttcagtctcccgagccctcgcaa

SEQ ID NO: 369917 - DNA, 30 bp, Artificial Sequence
  Synthetic oligonucleotide
gccacgtatcttgggcgcatgcgctcgcaa

SEQ ID NO: 369918 - DNA, 30 bp, Artificial Sequence
  Synthetic oligonucleotide
gtgactacagacgcgagattaatctcgcaa

SEQ ID NO: 369919 - DNA, 30 bp, Artificial Sequence
  Synthetic oligonucleotide
gtggctcaggtgggcgataccccgtcgcaa

SEQ ID NO: 369920 - DNA, 30 bp, Artificial Sequence
  Synthetic oligonucleotide
atccccccggctgggctaaattcgtcgcaa

SEQ ID NO: 369921 - DNA, 30 bp, Artificial Sequence
  Synthetic oligonucleotide
aagaggtccgccgaatagcgtgtgtcgcaa

SEQ ID NO: 369922 - DNA, 30 bp, Artificial Sequence
  Synthetic oligonucleotide
agggcccttcttgcgttaggtgtgtcgcaa

SEQ ID NO: 369923 - DNA, 30 bp, Artificial Sequence
  Synthetic oligonucleotide
gtctcctcgtggagtatgaggaattcgcaa

SEQ ID NO: 369924 - DNA, 30 bp, Artificial Sequence
  Synthetic oligonucleotide
atgacagcagccagaacggtctattcgcaa

SEQ ID NO: 369925 - DNA, 30 bp, Artificial Sequence
  Synthetic oligonucleotide
gaaacgcacactatggtacgtcaaaggcaa

SEQ ID NO: 369926 - DNA, 30 bp, Artificial Sequence
  Synthetic oligonucleotide
tagttggctctacttgagatgcgaaggcaa

SEQ ID NO: 369927 - DNA, 30 bp, Artificial Sequence
  Synthetic oligonucleotide
gtctaagaggtggctggtgtaaccaggcaa

SEQ ID NO: 369928 - DNA, 30 bp, Artificial Sequence
  Synthetic oligonucleotide
tttatcgatttggaattggatgtcaggcaa

SEQ ID NO: 369929 - DNA, 30 bp, Artificial Sequence
  Synthetic oligonucleotide
ttgagtccggttactcacgttcagaggcaa

SEQ ID NO: 369930 - DNA, 30 bp, Artificial Sequence
  Synthetic oligonucleotide
attagttactcaataatacaatagaggcaa

SEQ ID NO: 369931 - DNA, 30 bp, Artificial Sequence
  Synthetic oligonucleotide
tccccactaaagtgtccggaccataggcaa

SEQ ID NO: 369932 - DNA, 30 bp, Artificial Sequence
  Synthetic oligonucleotide
aaccagggtccgagtacagacggtaggcaa

SEQ ID NO: 369933 - DNA, 30 bp, Artificial Sequence
  Synthetic oligonucleotide
ataaggtcaggtgcgatacgcgttaggcaa

SEQ ID NO: 369934 - DNA, 30 bp, Artificial Sequence
  Synthetic oligonucleotide
tggagggaagcagcgtaggggacccggcaa

SEQ ID NO: 369935 - DNA, 30 bp, Artificial Sequence
  Synthetic oligonucleotide
ggttagtttcagtacatcctaagccggcaa

SEQ ID NO: 369936 - DNA, 30 bp, Artificial Sequence
  Synthetic oligonucleotide
tctggtcttaaaccgaacgccatccggcaa

SEQ ID NO: 369937 - DNA, 30 bp, Artificial Sequence
  Synthetic oligonucleotide
gagtccggtatagtgcgtaacacgcggcaa

SEQ ID NO: 369938 - DNA, 30 bp, Artificial Sequence
  Synthetic oligonucleotide
ctagcattggttattttcgactggcggcaa

SEQ ID NO: 369939 - DNA, 30 bp, Artificial Sequence
  Synthetic oligonucleotide
accgcgagctctgagtctatgagtcggcaa

SEQ ID NO: 369940 - DNA, 30 bp, Artificial Sequence
  Synthetic oligonucleotide
atcagcggcccgcaggatgcaagagggcaa

SEQ ID NO: 369941 - DNA, 30 bp, Artificial Sequence
  Synthetic oligonucleotide
gtgcgaggagatactggccttatagggcaa

SEQ ID NO: 369942 - DNA, 30 bp, Artificial Sequence
  Synthetic oligonucleotide
cttggtgaccgctctggataagtcgggcaa

SEQ ID NO: 369943 - DNA, 30 bp, Artificial Sequence
  Synthetic oligonucleotide
tatggaccccgggctcatcagtgggggcaa

SEQ ID NO: 369944 - DNA, 30 bp, Artificial Sequence
  Synthetic oligonucleotide
tgtcgaatcgtcttacgaacccatgggcaa

SEQ ID NO: 369945 - DNA, 30 bp, Artificial Sequence
  Synthetic oligonucleotide
agcattgatgcatgcgcatatgctgggcaa

SEQ ID NO: 369946 - DNA, 30 bp, Artificial Sequence
  Synthetic oligonucleotide
gggaggccgacgcaggtatgtctatggcaa

SEQ ID NO: 369947 - DNA, 30 bp, Artificial Sequence
  Synthetic oligonucleotide
gactgcaaataaaggctctgctgctggcaa

SEQ ID NO: 369948 - DNA, 30 bp, Artificial Sequence
  Synthetic oligonucleotide
cctctgtataatttagcgtttacgtggcaa

SEQ ID NO: 369949 - DNA, 30 bp, Artificial Sequence
  Synthetic oligonucleotide
ggtttcagtgatgattagcatgattggcaa

SEQ ID NO: 369950 - DNA, 30 bp, Artificial Sequence
  Synthetic oligonucleotide
aattgattgaaccggctagggtgttggcaa

SEQ ID NO: 369951 - DNA, 30 bp, Artificial Sequence
  Synthetic oligonucleotide
caagaagtcagtgggggacgttaaatgcaa

SEQ ID NO: 369952 - DNA, 30 bp, Artificial Sequence
  Synthetic oligonucleotide
cgagatttagtcgcacgcggcacaatgcaa

SEQ ID NO: 369953 - DNA, 30 bp, Artificial Sequence
  Synthetic oligonucleotide
aagagcaatagcataagcaccccaatgcaa

SEQ ID NO: 369954 - DNA, 30 bp, Artificial Sequence
  Synthetic oligonucleotide
ttataatcatggtcgtaacgatcaatgcaa

SEQ ID NO: 369955 - DNA, 30 bp, Artificial Sequence
  Synthetic oligonucleotide
attatacatgcctatacgtagaccatgcaa

SEQ ID NO: 369956 - DNA, 30 bp, Artificial Sequence
  Synthetic oligonucleotide
gaccgggaagttcctgcagttgcgatgcaa

SEQ ID NO: 369957 - DNA, 30 bp, Artificial Sequence
  Synthetic oligonucleotide
tcattaacaaatccggaaaccttgatgcaa

SEQ ID NO: 369958 - DNA, 30 bp, Artificial Sequence
  Synthetic oligonucleotide
tggggtaaatgatgttcgggtttgatgcaa

SEQ ID NO: 369959 - DNA, 30 bp, Artificial Sequence
  Synthetic oligonucleotide
gttgggcttgtccaggcaagctctatgcaa

SEQ ID NO: 369960 - DNA, 30 bp, Artificial Sequence
  Synthetic oligonucleotide
tggatgagcctctgcttgccggttatgcaa

SEQ ID NO: 369961 - DNA, 30 bp, Artificial Sequence
  Synthetic oligonucleotide
gcagacgttggcctaggggatgttatgcaa

SEQ ID NO: 369962 - DNA, 30 bp, Artificial Sequence
  Synthetic oligonucleotide
gttcggactctctgtgtgagtaaactgcaa

SEQ ID NO: 369963 - DNA, 30 bp, Artificial Sequence
  Synthetic oligonucleotide
catagggctttggtggcacaatggctgcaa

SEQ ID NO: 369964 - DNA, 30 bp, Artificial Sequence
  Synthetic oligonucleotide
gtgactggggccccggcgtaagttctgcaa

SEQ ID NO: 369965 - DNA, 30 bp, Artificial Sequence
  Synthetic oligonucleotide
gaatgaattggctttgcatcaagagtgcaa

SEQ ID NO: 369966 - DNA, 30 bp, Artificial Sequence
  Synthetic oligonucleotide
cgcctctcaaattaatgccccagagtgcaa

SEQ ID NO: 369967 - DNA, 30 bp, Artificial Sequence
  Synthetic oligonucleotide
aacgatgcagaagactagccttacgtgcaa

SEQ ID NO: 369968 - DNA, 30 bp, Artificial Sequence
  Synthetic oligonucleotide
tgacttgatgctacactccggaaggtgcaa

SEQ ID NO: 369969 - DNA, 30 bp, Artificial Sequence
  Synthetic oligonucleotide
ggttcccggtaacgcccacgtcctgtgcaa

SEQ ID NO: 369970 - DNA, 30 bp, Artificial Sequence
  Synthetic oligonucleotide
acggtcgctatcgttgaattctcattgcaa

SEQ ID NO: 369971 - DNA, 30 bp, Artificial Sequence
  Synthetic oligonucleotide
cctggacagttgtcatcattattattgcaa

SEQ ID NO: 369972 - DNA, 30 bp, Artificial Sequence
  Synthetic oligonucleotide
ttcttgcgtgctaaaagaactcacttgcaa

SEQ ID NO: 369973 - DNA, 30 bp, Artificial Sequence
  Synthetic oligonucleotide
acaacttgtgtacggtaaaaaaagttgcaa

SEQ ID NO: 369974 - DNA, 30 bp, Artificial Sequence
  Synthetic oligonucleotide
tcaaatcataaccgcctataacggttgcaa

SEQ ID NO: 369975 - DNA, 30 bp, Artificial Sequence
  Synthetic oligonucleotide
ggtgatatggtccgtatatgaatgttgcaa

SEQ ID NO: 369976 - DNA, 30 bp, Artificial Sequence
  Synthetic oligonucleotide
ctggttacacccgggtttatgcaaaatcaa

SEQ ID NO: 369977 - DNA, 30 bp, Artificial Sequence
  Synthetic oligonucleotide
atttgttaatgaatcttacacacaaatcaa

SEQ ID NO: 369978 - DNA, 30 bp, Artificial Sequence
  Synthetic oligonucleotide
ggccgtacgtagcccacacgcaacaatcaa

SEQ ID NO: 369979 - DNA, 30 bp, Artificial Sequence
  Synthetic oligonucleotide
ctatgcctgctaatatcggagcacaatcaa

SEQ ID NO: 369980 - DNA, 30 bp, Artificial Sequence
  Synthetic oligonucleotide
tttgcaacccgcttgacaaatggcaatcaa

SEQ ID NO: 369981 - DNA, 30 bp, Artificial Sequence
  Synthetic oligonucleotide
tccgtctgaggcttacgcaaaaagaatcaa

SEQ ID NO: 369982 - DNA, 30 bp, Artificial Sequence
  Synthetic oligonucleotide
taggaatgcagggtcgttttgtcgaatcaa

SEQ ID NO: 369983 - DNA, 30 bp, Artificial Sequence
  Synthetic oligonucleotide
tcaccaacttaggaacgatcaaataatcaa

SEQ ID NO: 369984 - DNA, 30 bp, Artificial Sequence
  Synthetic oligonucleotide
ggaaaatctggaatgctaaccactaatcaa

SEQ ID NO: 369985 - DNA, 30 bp, Artificial Sequence
  Synthetic oligonucleotide
agaatggacaaaagctcttatattaatcaa

SEQ ID NO: 369986 - DNA, 30 bp, Artificial Sequence
  Synthetic oligonucleotide
actggataagggcggtatcatgcacatcaa

SEQ ID NO: 369987 - DNA, 30 bp, Artificial Sequence
  Synthetic oligonucleotide
ttcggctattctccactcttgagacatcaa

SEQ ID NO: 369988 - DNA, 30 bp, Artificial Sequence
  Synthetic oligonucleotide
aagcacccggcgctttttaatgtacatcaa

SEQ ID NO: 369989 - DNA, 30 bp, Artificial Sequence
  Synthetic oligonucleotide
gtaaaggaggctgatccattgggccatcaa

SEQ ID NO: 369990 - DNA, 30 bp, Artificial Sequence
  Synthetic oligonucleotide
aacacggagctggccgtgtggcagcatcaa

SEQ ID NO: 369991 - DNA, 30 bp, Artificial Sequence
  Synthetic oligonucleotide
aacttttttgctgcgtggcaggagcatcaa

SEQ ID NO: 369992 - DNA, 30 bp, Artificial Sequence
  Synthetic oligonucleotide
gccgaccgcgggcctgccgagccgcatcaa

SEQ ID NO: 369993 - DNA, 30 bp, Artificial Sequence
  Synthetic oligonucleotide
gcattgatcaccagggctaatgggcatcaa

SEQ ID NO: 369994 - DNA, 30 bp, Artificial Sequence
  Synthetic oligonucleotide
cgtgacattatgttagggcggtaagatcaa

SEQ ID NO: 369995 - DNA, 30 bp, Artificial Sequence
  Synthetic oligonucleotide
tgtggcgcaggtaagaaatggatagatcaa

SEQ ID NO: 369996 - DNA, 30 bp, Artificial Sequence
  Synthetic oligonucleotide
agctgcaatacgcggttgccagccgatcaa

SEQ ID NO: 369997 - DNA, 30 bp, Artificial Sequence
  Synthetic oligonucleotide
tgactatgtccgcataaactggccgatcaa

SEQ ID NO: 369998 - DNA, 30 bp, Artificial Sequence
  Synthetic oligonucleotide
aagaaggaccatcatgatcgctccgatcaa

SEQ ID NO: 369999 - DNA, 30 bp, Artificial Sequence
  Synthetic oligonucleotide
gaaagccgacccaaatattacacggatcaa

SEQ ID NO: 370000 - DNA, 30 bp, Artificial Sequence
  Synthetic oligonucleotide
gatatggcttatccgtaggatacggatcaa

SEQ ID NO: 370001 - DNA, 30 bp, Artificial Sequence
  Synthetic oligonucleotide
gatgattgatccggataggatgcggatcaa

SEQ ID NO: 370002 - DNA, 30 bp, Artificial Sequence
  Synthetic oligonucleotide
tagggactggcataaatcatacgggatcaa

SEQ ID NO: 370003 - DNA, 30 bp, Artificial Sequence
  Synthetic oligonucleotide
gggcggcggcccgtccggggccctgatcaa

SEQ ID NO: 370004 - DNA, 30 bp, Artificial Sequence
  Synthetic oligonucleotide
gagactgacaacaggtgctaagaatatcaa

SEQ ID NO: 370005 - DNA, 30 bp, Artificial Sequence
  Synthetic oligonucleotide
tggttgttcctgcatgtcgaaatatatcaa

SEQ ID NO: 370006 - DNA, 30 bp, Artificial Sequence
  Synthetic oligonucleotide
aagggtcagcgcaaatttattggctatcaa

SEQ ID NO: 370007 - DNA, 30 bp, Artificial Sequence
  Synthetic oligonucleotide
gtgtgatccaccatctctactctctatcaa

SEQ ID NO: 370008 - DNA, 30 bp, Artificial Sequence
  Synthetic oligonucleotide
atgcgccttgcgggcgcggcccagtatcaa

SEQ ID NO: 370009 - DNA, 30 bp, Artificial Sequence
  Synthetic oligonucleotide
gaggccggcgaccctgtgacatagtatcaa

SEQ ID NO: 370010 - DNA, 30 bp, Artificial Sequence
  Synthetic oligonucleotide
taacaggaggaattatcaattaattatcaa

SEQ ID NO: 370011 - DNA, 30 bp, Artificial Sequence
  Synthetic oligonucleotide
ggcatttaatccggttcccagtcttatcaa

SEQ ID NO: 370012 - DNA, 30 bp, Artificial Sequence
  Synthetic oligonucleotide
acataacgcaagaaagcttcaataactcaa

SEQ ID NO: 370013 - DNA, 30 bp, Artificial Sequence
  Synthetic oligonucleotide
ataggggagtattccccctccggtactcaa

SEQ ID NO: 370014 - DNA, 30 bp, Artificial Sequence
  Synthetic oligonucleotide
actcgagtaagctaataattcggtactcaa

SEQ ID NO: 370015 - DNA, 30 bp, Artificial Sequence
  Synthetic oligonucleotide
tggggcccagggtgcggaggtaaacctcaa

SEQ ID NO: 370016 - DNA, 30 bp, Artificial Sequence
  Synthetic oligonucleotide
aatccctaggatgacggtgggcaacctcaa

SEQ ID NO: 370017 - DNA, 30 bp, Artificial Sequence
  Synthetic oligonucleotide
tcttatatttgtgtgctggctgcacctcaa

SEQ ID NO: 370018 - DNA, 30 bp, Artificial Sequence
  Synthetic oligonucleotide
actgatcgactaacgtcttgtcgacctcaa

SEQ ID NO: 370019 - DNA, 30 bp, Artificial Sequence
  Synthetic oligonucleotide
ggaacgagggaagaccccggtggccctcaa

SEQ ID NO: 370020 - DNA, 30 bp, Artificial Sequence
  Synthetic oligonucleotide
tgattcaatggggaaataggagtgcctcaa

SEQ ID NO: 370021 - DNA, 30 bp, Artificial Sequence
  Synthetic oligonucleotide
gttatatgacaagatgctggtaatcctcaa

SEQ ID NO: 370022 - DNA, 30 bp, Artificial Sequence
  Synthetic oligonucleotide
aggaattttgtattacgataaggtcctcaa

SEQ ID NO: 370023 - DNA, 30 bp, Artificial Sequence
  Synthetic oligonucleotide
gagtctgtcgccaaagccaactgtcctcaa

SEQ ID NO: 370024 - DNA, 30 bp, Artificial Sequence
  Synthetic oligonucleotide
gagaatggcggaaacagtctagttcctcaa

SEQ ID NO: 370025 - DNA, 30 bp, Artificial Sequence
  Synthetic oligonucleotide
tccgtaaagtggcttccagacaaagctcaa

SEQ ID NO: 370026 - DNA, 30 bp, Artificial Sequence
  Synthetic oligonucleotide
gctcactctcccggttggacacgagctcaa

SEQ ID NO: 370027 - DNA, 30 bp, Artificial Sequence
  Synthetic oligonucleotide
actattagccaccggttatccggagctcaa

SEQ ID NO: 370028 - DNA, 30 bp, Artificial Sequence
  Synthetic oligonucleotide
ggcctttgatatcttaacgcacaggctcaa

SEQ ID NO: 370029 - DNA, 30 bp, Artificial Sequence
  Synthetic oligonucleotide
cgatacgctgatgtacatttaatggctcaa

SEQ ID NO: 370030 - DNA, 30 bp, Artificial Sequence
  Synthetic oligonucleotide
caggtcagttgcgatccgcacattgctcaa

SEQ ID NO: 370031 - DNA, 30 bp, Artificial Sequence
  Synthetic oligonucleotide
ccacttgtgatgaggggatgcgaatctcaa

SEQ ID NO: 370032 - DNA, 30 bp, Artificial Sequence
  Synthetic oligonucleotide
gctagttagataagttgggcctcatctcaa

SEQ ID NO: 370033 - DNA, 30 bp, Artificial Sequence
  Synthetic oligonucleotide
atggtccgactgatacagcagttatctcaa

SEQ ID NO: 370034 - DNA, 30 bp, Artificial Sequence
  Synthetic oligonucleotide
ctagtcccgattagtcggcctcactctcaa

SEQ ID NO: 370035 - DNA, 30 bp, Artificial Sequence
  Synthetic oligonucleotide
agccaagagcgccctatagttcgctctcaa

SEQ ID NO: 370036 - DNA, 30 bp, Artificial Sequence
  Synthetic oligonucleotide
ttggaccctcgtggtcgtttagggtctcaa

SEQ ID NO: 370037 - DNA, 30 bp, Artificial Sequence
  Synthetic oligonucleotide
tttggagagacacctctaatttattctcaa

SEQ ID NO: 370038 - DNA, 30 bp, Artificial Sequence
  Synthetic oligonucleotide
tctgcactcatgagatgcactacttctcaa

SEQ ID NO: 370039 - DNA, 30 bp, Artificial Sequence
  Synthetic oligonucleotide
atactgcacactatgaggtatcgttctcaa

SEQ ID NO: 370040 - DNA, 30 bp, Artificial Sequence
  Synthetic oligonucleotide
ctaatagaagcagttcatccatgttctcaa

SEQ ID NO: 370041 - DNA, 30 bp, Artificial Sequence
  Synthetic oligonucleotide
tctgcgccggcggtaaacacgagaagtcaa

SEQ ID NO: 370042 - DNA, 30 bp, Artificial Sequence
  Synthetic oligonucleotide
aaggattggacgattcccttgtacagtcaa

SEQ ID NO: 370043 - DNA, 30 bp, Artificial Sequence
  Synthetic oligonucleotide
gcaaaagcccaaatcctagacgtcagtcaa

SEQ ID NO: 370044 - DNA, 30 bp, Artificial Sequence
  Synthetic oligonucleotide
gaactacaagattgaatttgcgagagtcaa

SEQ ID NO: 370045 - DNA, 30 bp, Artificial Sequence
  Synthetic oligonucleotide
gtaatgggatcaggttgtaccttgagtcaa

SEQ ID NO: 370046 - DNA, 30 bp, Artificial Sequence
  Synthetic oligonucleotide
accgggtccacaaaaggtgttttgagtcaa

SEQ ID NO: 370047 - DNA, 30 bp, Artificial Sequence
  Synthetic oligonucleotide
atcgaacgttctcattcaaaccatagtcaa

SEQ ID NO: 370048 - DNA, 30 bp, Artificial Sequence
  Synthetic oligonucleotide
gggtttccaccgggacgtggagttagtcaa

SEQ ID NO: 370049 - DNA, 30 bp, Artificial Sequence
  Synthetic oligonucleotide
atggaagaatattttaaatatcgacgtcaa

SEQ ID NO: 370050 - DNA, 30 bp, Artificial Sequence
  Synthetic oligonucleotide
ttcacagtccatcagtaacgcggacgtcaa

SEQ ID NO: 370051 - DNA, 30 bp, Artificial Sequence
  Synthetic oligonucleotide
gtacgcgtctctcgataagagatacgtcaa

SEQ ID NO: 370052 - DNA, 30 bp, Artificial Sequence
  Synthetic oligonucleotide
tgctcgctcgggacttcagttacccgtcaa

SEQ ID NO: 370053 - DNA, 29 bp, Artificial Sequence
  Synthetic oligonucleotide
gatcgcttgaggaagcctcggtgcgtcaa

SEQ ID NO: 370054 - DNA, 30 bp, Artificial Sequence
  Synthetic oligonucleotide
tttaagattagcatcttcttaaaaggtcaa

SEQ ID NO: 370055 - DNA, 30 bp, Artificial Sequence
  Synthetic oligonucleotide
atctactgggtatcactccggaaaggtcaa

SEQ ID NO: 370056 - DNA, 30 bp, Artificial Sequence
  Synthetic oligonucleotide
tgacttttctggtgtccgggttggggtcaa

SEQ ID NO: 370057 - DNA, 30 bp, Artificial Sequence
  Synthetic oligonucleotide
aaggagttagatacttgttgcctgggtcaa

SEQ ID NO: 370058 - DNA, 30 bp, Artificial Sequence
  Synthetic oligonucleotide
ggggtgtaatgatagtcctgcttgggtcaa

SEQ ID NO: 370059 - DNA, 30 bp, Artificial Sequence
  Synthetic oligonucleotide
cctgtctccatgtaggagacccatggtcaa

SEQ ID NO: 370060 - DNA, 30 bp, Artificial Sequence
  Synthetic oligonucleotide
tatccaggtggtgtggatacttatggtcaa

SEQ ID NO: 370061 - DNA, 30 bp, Artificial Sequence
  Synthetic oligonucleotide
cctctgaggtggggcgccatgggtggtcaa

SEQ ID NO: 370062 - DNA, 30 bp, Artificial Sequence
  Synthetic oligonucleotide
ttacaaatcccattatggacctgtggtcaa

SEQ ID NO: 370063 - DNA, 30 bp, Artificial Sequence
  Synthetic oligonucleotide
agatcagtacaataggcagcaattggtcaa

SEQ ID NO: 370064 - DNA, 30 bp, Artificial Sequence
  Synthetic oligonucleotide
gttctcattttcacaaggccacactgtcaa

SEQ ID NO: 370065 - DNA, 30 bp, Artificial Sequence
  Synthetic oligonucleotide
ttcgggggttcatagacaagcatctgtcaa

SEQ ID NO: 370066 - DNA, 30 bp, Artificial Sequence
  Synthetic oligonucleotide
ctacatgttaaagcttgtcgactctgtcaa

SEQ ID NO: 370067 - DNA, 30 bp, Artificial Sequence
  Synthetic oligonucleotide
tgcgttttttgcgaacgtccgaggtgtcaa

SEQ ID NO: 370068 - DNA, 30 bp, Artificial Sequence
  Synthetic oligonucleotide
tcctgcaccgttttgatacctcggtgtcaa

SEQ ID NO: 370069 - DNA, 30 bp, Artificial Sequence
  Synthetic oligonucleotide
gacccctagtcacctaatgcatattgtcaa

SEQ ID NO: 370070 - DNA, 30 bp, Artificial Sequence
  Synthetic oligonucleotide
tggttaaaacgataggtctcagcttgtcaa

SEQ ID NO: 370071 - DNA, 30 bp, Artificial Sequence
  Synthetic oligonucleotide
gcacgtcgttggaaaaccgaaggttgtcaa

SEQ ID NO: 370072 - DNA, 30 bp, Artificial Sequence
  Synthetic oligonucleotide
attgcctgagcgcagagaaagcaaattcaa

SEQ ID NO: 370073 - DNA, 30 bp, Artificial Sequence
  Synthetic oligonucleotide
tttcgagggaggctgtgacaagcaattcaa

SEQ ID NO: 370074 - DNA, 30 bp, Artificial Sequence
  Synthetic oligonucleotide
ataaaggttcatgggagagtagacattcaa

SEQ ID NO: 370075 - DNA, 30 bp, Artificial Sequence
  Synthetic oligonucleotide
ctctatagatgccggggtgtgctcattcaa

SEQ ID NO: 370076 - DNA, 30 bp, Artificial Sequence
  Synthetic oligonucleotide
ctcgcaataggccctagtatcttcattcaa

SEQ ID NO: 370077 - DNA, 30 bp, Artificial Sequence
  Synthetic oligonucleotide
tttaaagttgcaacggatgcgttcattcaa

SEQ ID NO: 370078 - DNA, 30 bp, Artificial Sequence
  Synthetic oligonucleotide
atacgcagcacgttcgaagtagggattcaa

SEQ ID NO: 370079 - DNA, 30 bp, Artificial Sequence
  Synthetic oligonucleotide
aacgcgcggctacgtgatacacgtattcaa

SEQ ID NO: 370080 - DNA, 30 bp, Artificial Sequence
  Synthetic oligonucleotide
ttgcgcggtacgacctaacgagttattcaa

SEQ ID NO: 370081 - DNA, 30 bp, Artificial Sequence
  Synthetic oligonucleotide
ttaaagtggcgataaacaaattttattcaa

SEQ ID NO: 370082 - DNA, 30 bp, Artificial Sequence
  Synthetic oligonucleotide
atccaccctagacgccgactgtgacttcaa

SEQ ID NO: 370083 - DNA, 30 bp, Artificial Sequence
  Synthetic oligonucleotide
caccttctactgggtgcaagcgcccttcaa

SEQ ID NO: 370084 - DNA, 30 bp, Artificial Sequence
  Synthetic oligonucleotide
aatgatttagatttcgtctaacagcttcaa

SEQ ID NO: 370085 - DNA, 30 bp, Artificial Sequence
  Synthetic oligonucleotide
ctagcgaaaggtcacatctcctcgcttcaa

SEQ ID NO: 370086 - DNA, 30 bp, Artificial Sequence
  Synthetic oligonucleotide
cctgtgctacgtgccacaaataatcttcaa

SEQ ID NO: 370087 - DNA, 30 bp, Artificial Sequence
  Synthetic oligonucleotide
gaaagtgtgcctggtacatcccctcttcaa

SEQ ID NO: 370088 - DNA, 30 bp, Artificial Sequence
  Synthetic oligonucleotide
agtgagcgtcggtttcggcgggctcttcaa

SEQ ID NO: 370089 - DNA, 30 bp, Artificial Sequence
  Synthetic oligonucleotide
atagaggggttaaaagcagaaattcttcaa

SEQ ID NO: 370090 - DNA, 30 bp, Artificial Sequence
  Synthetic oligonucleotide
ttagcgtggttacggtaatggcttcttcaa

SEQ ID NO: 370091 - DNA, 30 bp, Artificial Sequence
  Synthetic oligonucleotide
tagttccatggcggttccgtgcttcttcaa

SEQ ID NO: 370092 - DNA, 30 bp, Artificial Sequence
  Synthetic oligonucleotide
atcaccctgggtagtcgggcagcagttcaa

SEQ ID NO: 370093 - DNA, 30 bp, Artificial Sequence
  Synthetic oligonucleotide
gctgaaccaggtaactagatgtcagttcaa

SEQ ID NO: 370094 - DNA, 30 bp, Artificial Sequence
  Synthetic oligonucleotide
cactgggtattttgaggcctgttagttcaa

SEQ ID NO: 370095 - DNA, 30 bp, Artificial Sequence
  Synthetic oligonucleotide
aatagctggaccaaagaaacgtaggttcaa

SEQ ID NO: 370096 - DNA, 30 bp, Artificial Sequence
  Synthetic oligonucleotide
ggaatccctcaggaccctctccgggttcaa

SEQ ID NO: 370097 - DNA, 30 bp, Artificial Sequence
  Synthetic oligonucleotide
attttaatcagagcataatcgctggttcaa

SEQ ID NO: 370098 - DNA, 30 bp, Artificial Sequence
  Synthetic oligonucleotide
ttagctgttttacgggaaagtaatgttcaa

SEQ ID NO: 370099 - DNA, 30 bp, Artificial Sequence
  Synthetic oligonucleotide
ctccattaaagatgatttaagactgttcaa

SEQ ID NO: 370100 - DNA, 30 bp, Artificial Sequence
  Synthetic oligonucleotide
ctagtgaggcgggaatggtttactgttcaa

SEQ ID NO: 370101 - DNA, 30 bp, Artificial Sequence
  Synthetic oligonucleotide
cagggcaatttccgggaactgaaatttcaa

SEQ ID NO: 370102 - DNA, 30 bp, Artificial Sequence
  Synthetic oligonucleotide
ctgtactggagtcctcattacgaatttcaa

SEQ ID NO: 370103 - DNA, 30 bp, Artificial Sequence
  Synthetic oligonucleotide
gatttcagtacactgagggctccatttcaa

SEQ ID NO: 370104 - DNA, 30 bp, Artificial Sequence
  Synthetic oligonucleotide
cagccgtccgtaaatgcgtctggatttcaa

SEQ ID NO: 370105 - DNA, 30 bp, Artificial Sequence
  Synthetic oligonucleotide
agatacagattgcattgttctcgctttcaa

SEQ ID NO: 370106 - DNA, 30 bp, Artificial Sequence
  Synthetic oligonucleotide
cactgtaatgtgcgttttatgggctttcaa

SEQ ID NO: 370107 - DNA, 30 bp, Artificial Sequence
  Synthetic oligonucleotide
caaaattggaacatatattgttgctttcaa

SEQ ID NO: 370108 - DNA, 30 bp, Artificial Sequence
  Synthetic oligonucleotide
cgcgcgtaggcgcgctcggctttctttcaa

SEQ ID NO: 370109 - DNA, 30 bp, Artificial Sequence
  Synthetic oligonucleotide
agcatagggctcatctagcgaaagtttcaa

SEQ ID NO: 370110 - DNA, 30 bp, Artificial Sequence
  Synthetic oligonucleotide
gagagtacgccggaaagctgaaggtttcaa

SEQ ID NO: 370111 - DNA, 30 bp, Artificial Sequence
  Synthetic oligonucleotide
ttgattacgtttcactacagaggttttcaa

SEQ ID NO: 370112 - DNA, 30 bp, Artificial Sequence
  Synthetic oligonucleotide
aaatccgagggcatattttaaacaaaagaa

SEQ ID NO: 370113 - DNA, 30 bp, Artificial Sequence
  Synthetic oligonucleotide
aggccacggccagtggcatagggaaaagaa

SEQ ID NO: 370114 - DNA, 30 bp, Artificial Sequence
  Synthetic oligonucleotide
tctgtgtccacatatctgtagaccaaagaa

SEQ ID NO: 370115 - DNA, 30 bp, Artificial Sequence
  Synthetic oligonucleotide
gatatccatgcttcgtatgcgttcaaagaa

SEQ ID NO: 370116 - DNA, 30 bp, Artificial Sequence
  Synthetic oligonucleotide
catataatagggaccgagatagtgaaagaa

SEQ ID NO: 370117 - DNA, 30 bp, Artificial Sequence
  Synthetic oligonucleotide
acacttggctcgccgccgttacataaagaa

SEQ ID NO: 370118 - DNA, 30 bp, Artificial Sequence
  Synthetic oligonucleotide
cacatccgcagcaaggtcacagataaagaa

SEQ ID NO: 370119 - DNA, 30 bp, Artificial Sequence
  Synthetic oligonucleotide
ttgacgtattctcgatagagatgtaaagaa

SEQ ID NO: 370120 - DNA, 30 bp, Artificial Sequence
  Synthetic oligonucleotide
tccggccacagtgctttaacatgacaagaa

SEQ ID NO: 370121 - DNA, 30 bp, Artificial Sequence
  Synthetic oligonucleotide
aaatgccagcgcgcggtcaatgtacaagaa

SEQ ID NO: 370122 - DNA, 30 bp, Artificial Sequence
  Synthetic oligonucleotide
ttagatgatgacttcttgtaatctcaagaa

SEQ ID NO: 370123 - DNA, 30 bp, Artificial Sequence
  Synthetic oligonucleotide
aaatattacggttgagggtcatctcaagaa

SEQ ID NO: 370124 - DNA, 30 bp, Artificial Sequence
  Synthetic oligonucleotide
gccgcgttctgtgaatcgaccgtagaagaa

SEQ ID NO: 370125 - DNA, 30 bp, Artificial Sequence
  Synthetic oligonucleotide
gctttgtcacgaaatgcctatcacgaagaa

SEQ ID NO: 370126 - DNA, 30 bp, Artificial Sequence
  Synthetic oligonucleotide
cgtttcgcagctgcaaactaacgcgaagaa

SEQ ID NO: 370127 - DNA, 30 bp, Artificial Sequence
  Synthetic oligonucleotide
ttcatataccgttccagagtctgcgaagaa

SEQ ID NO: 370128 - DNA, 30 bp, Artificial Sequence
  Synthetic oligonucleotide
gttttacggaatgtgtctaggcatgaagaa

SEQ ID NO: 370129 - DNA, 30 bp, Artificial Sequence
  Synthetic oligonucleotide
acccaatatacttggtgctcaggtgaagaa

SEQ ID NO: 370130 - DNA, 30 bp, Artificial Sequence
  Synthetic oligonucleotide
actgagggggtggctggctcataataagaa

SEQ ID NO: 370131 - DNA, 30 bp, Artificial Sequence
  Synthetic oligonucleotide
gtcagagggttgtctcgggtattataagaa

SEQ ID NO: 370132 - DNA, 30 bp, Artificial Sequence
  Synthetic oligonucleotide
gtagtcgtgcggccccgacaggtctaagaa

SEQ ID NO: 370133 - DNA, 30 bp, Artificial Sequence
  Synthetic oligonucleotide
aatatccagagggcccacctagagtaagaa

SEQ ID NO: 370134 - DNA, 30 bp, Artificial Sequence
  Synthetic oligonucleotide
gaagcagaaggtgcagaattactttaagaa

SEQ ID NO: 370135 - DNA, 30 bp, Artificial Sequence
  Synthetic oligonucleotide
attttgtaggttacaaaacgtcaaacagaa

SEQ ID NO: 370136 - DNA, 30 bp, Artificial Sequence
  Synthetic oligonucleotide
gattgatgagctgacctagatgaaacagaa

SEQ ID NO: 370137 - DNA, 30 bp, Artificial Sequence
  Synthetic oligonucleotide
tagtgacggtaccaacagtggttaacagaa

SEQ ID NO: 370138 - DNA, 30 bp, Artificial Sequence
  Synthetic oligonucleotide
cgtagtgtgtatccagctaatttaacagaa

SEQ ID NO: 370139 - DNA, 30 bp, Artificial Sequence
  Synthetic oligonucleotide
cttggacttataaattgttctttaacagaa

SEQ ID NO: 370140 - DNA, 30 bp, Artificial Sequence
  Synthetic oligonucleotide
aatagtgatatccgatcggacgacacagaa

SEQ ID NO: 370141 - DNA, 30 bp, Artificial Sequence
  Synthetic oligonucleotide
tattcacgaggaagtgtggcagtcacagaa

SEQ ID NO: 370142 - DNA, 30 bp, Artificial Sequence
  Synthetic oligonucleotide
tcatagcagcccttaaagagcccgacagaa

SEQ ID NO: 370143 - DNA, 30 bp, Artificial Sequence
  Synthetic oligonucleotide
ttagtgttagtaactccatctgcgacagaa

SEQ ID NO: 370144 - DNA, 30 bp, Artificial Sequence
  Synthetic oligonucleotide
agggtctcttgtagcgtgcacctgacagaa

SEQ ID NO: 370145 - DNA, 30 bp, Artificial Sequence
  Synthetic oligonucleotide
catggcgcgaggaatgcaataactacagaa

SEQ ID NO: 370146 - DNA, 30 bp, Artificial Sequence
  Synthetic oligonucleotide
ctcgttatcacaggcttccgtcgtacagaa

SEQ ID NO: 370147 - DNA, 30 bp, Artificial Sequence
  Synthetic oligonucleotide
aaatcggtagaccggtagaggtgtacagaa

SEQ ID NO: 370148 - DNA, 30 bp, Artificial Sequence
  Synthetic oligonucleotide
aacatttcggcgtgaatcaagcacgcagaa

SEQ ID NO: 370149 - DNA, 30 bp, Artificial Sequence
  Synthetic oligonucleotide
cttgggggatggtgttacccagacgcagaa

SEQ ID NO: 370150 - DNA, 30 bp, Artificial Sequence
  Synthetic oligonucleotide
tgagcggatcttggaatcaggcgggcagaa

SEQ ID NO: 370151 - DNA, 30 bp, Artificial Sequence
  Synthetic oligonucleotide
ggaataaatataatctgcgagttggcagaa

SEQ ID NO: 370152 - DNA, 30 bp, Artificial Sequence
  Synthetic oligonucleotide
acatcggtcggactgacaagagatgcagaa

SEQ ID NO: 370153 - DNA, 30 bp, Artificial Sequence
  Synthetic oligonucleotide
ccttcgctgtggcacccaagaacatcagaa

SEQ ID NO: 370154 - DNA, 30 bp, Artificial Sequence
  Synthetic oligonucleotide
ttcaacccggttgatggtgtgcactcagaa

SEQ ID NO: 370155 - DNA, 30 bp, Artificial Sequence
  Synthetic oligonucleotide
tagcccacgggcaacgccatgtactcagaa

SEQ ID NO: 370156 - DNA, 30 bp, Artificial Sequence
  Synthetic oligonucleotide
tgggtcccagaggggggcccacagtcagaa

SEQ ID NO: 370157 - DNA, 30 bp, Artificial Sequence
  Synthetic oligonucleotide
taggtacattggcgtccaaacgcttcagaa

SEQ ID NO: 370158 - DNA, 30 bp, Artificial Sequence
  Synthetic oligonucleotide
gatctgtcgtgactccacgggatttcagaa

SEQ ID NO: 370159 - DNA, 30 bp, Artificial Sequence
  Synthetic oligonucleotide
ggaattgacaatagcttgtatctttcagaa

SEQ ID NO: 370160 - DNA, 30 bp, Artificial Sequence
  Synthetic oligonucleotide
gctcctggcgtcctgggacttaaaagagaa

SEQ ID NO: 370161 - DNA, 30 bp, Artificial Sequence
  Synthetic oligonucleotide
ttaagatataatttaagatacgtaagagaa

SEQ ID NO: 370162 - DNA, 30 bp, Artificial Sequence
  Synthetic oligonucleotide
aaagagttcaggtggccatattacagagaa

SEQ ID NO: 370163 - DNA, 30 bp, Artificial Sequence
  Synthetic oligonucleotide
gtaatccccggcttcttcggagccagagaa

SEQ ID NO: 370164 - DNA, 30 bp, Artificial Sequence
  Synthetic oligonucleotide
ccgattattttgacgttccggaagagagaa

SEQ ID NO: 370165 - DNA, 30 bp, Artificial Sequence
  Synthetic oligonucleotide
gagaatcctcgccattcgatcaatagagaa

SEQ ID NO: 370166 - DNA, 30 bp, Artificial Sequence
  Synthetic oligonucleotide
gttgctttgctcataaggacgaatagagaa

SEQ ID NO: 370167 - DNA, 30 bp, Artificial Sequence
  Synthetic oligonucleotide
gaccgaaaaggacctgttaaattacgagaa

SEQ ID NO: 370168 - DNA, 30 bp, Artificial Sequence
  Synthetic oligonucleotide
atctaggacgactgtttaactacgcgagaa

SEQ ID NO: 370169 - DNA, 30 bp, Artificial Sequence
  Synthetic oligonucleotide
ctcctgtcccgcctggtcttaatgcgagaa

SEQ ID NO: 370170 - DNA, 30 bp, Artificial Sequence
  Synthetic oligonucleotide
catcgaattcgctgaacaaccgaaggagaa

SEQ ID NO: 370171 - DNA, 30 bp, Artificial Sequence
  Synthetic oligonucleotide
ataggatgcaaggtcgactctctaggagaa

SEQ ID NO: 370172 - DNA, 30 bp, Artificial Sequence
  Synthetic oligonucleotide
tctctggtgcggttccgactggcgggagaa

SEQ ID NO: 370173 - DNA, 30 bp, Artificial Sequence
  Synthetic oligonucleotide
cagatctctgacgacgccctggggggagaa

SEQ ID NO: 370174 - DNA, 30 bp, Artificial Sequence
  Synthetic oligonucleotide
aagttaagtgttagaccagtccgtggagaa

SEQ ID NO: 370175 - DNA, 30 bp, Artificial Sequence
  Synthetic oligonucleotide
tatcacgatgctgaagtattgtttggagaa

SEQ ID NO: 370176 - DNA, 30 bp, Artificial Sequence
  Synthetic oligonucleotide
ccaccacagcgttaccctctccaatgagaa

SEQ ID NO: 370177 - DNA, 30 bp, Artificial Sequence
  Synthetic oligonucleotide
ttagagctgtcagacacagatcaatgagaa

SEQ ID NO: 370178 - DNA, 30 bp, Artificial Sequence
  Synthetic oligonucleotide
ttgagtattgctaacaggcatatatgagaa

SEQ ID NO: 370179 - DNA, 30 bp, Artificial Sequence
  Synthetic oligonucleotide
atagttccggagataggaacagtatgagaa

SEQ ID NO: 370180 - DNA, 30 bp, Artificial Sequence
  Synthetic oligonucleotide
tagttgtattcgactagcttcaactgagaa

SEQ ID NO: 370181 - DNA, 30 bp, Artificial Sequence
  Synthetic oligonucleotide
gtgcttagcgcttgattttctaactgagaa

SEQ ID NO: 370182 - DNA, 30 bp, Artificial Sequence
  Synthetic oligonucleotide
atttagtcggaagcggtgggtcgctgagaa

SEQ ID NO: 370183 - DNA, 30 bp, Artificial Sequence
  Synthetic oligonucleotide
tttttgtcacggggtaggcagggctgagaa

SEQ ID NO: 370184 - DNA, 30 bp, Artificial Sequence
  Synthetic oligonucleotide
gcgcttattgctggtttttggtagtgagaa

SEQ ID NO: 370185 - DNA, 30 bp, Artificial Sequence
  Synthetic oligonucleotide
ttcgattccccaaggttgggggattgagaa

SEQ ID NO: 370186 - DNA, 30 bp, Artificial Sequence
  Synthetic oligonucleotide
tatagtgcaattaatcgtccatattgagaa

SEQ ID NO: 370187 - DNA, 30 bp, Artificial Sequence
  Synthetic oligonucleotide
atttgtcacctagcgattcttccaatagaa

SEQ ID NO: 370188 - DNA, 30 bp, Artificial Sequence
  Synthetic oligonucleotide
tgagagcagctaccaactatcgccatagaa

SEQ ID NO: 370189 - DNA, 30 bp, Artificial Sequence
  Synthetic oligonucleotide
acattccatgaactagctcgtaggatagaa

SEQ ID NO: 370190 - DNA, 30 bp, Artificial Sequence
  Synthetic oligonucleotide
attaaaatccagaatgtctcgtatatagaa

SEQ ID NO: 370191 - DNA, 30 bp, Artificial Sequence
  Synthetic oligonucleotide
cggtcgcttccctgcttctattacctagaa

SEQ ID NO: 370192 - DNA, 30 bp, Artificial Sequence
  Synthetic oligonucleotide
taactcgaccagctgtacccaaccctagaa

SEQ ID NO: 370193 - DNA, 30 bp, Artificial Sequence
  Synthetic oligonucleotide
gatttggggggcgcggtgctcgccctagaa

SEQ ID NO: 370194 - DNA, 30 bp, Artificial Sequence
  Synthetic oligonucleotide
aaacatcctagtcattcgctgatcctagaa

SEQ ID NO: 370195 - DNA, 30 bp, Artificial Sequence
  Synthetic oligonucleotide
ccgcgttcaccgagcgtctcgctcctagaa

SEQ ID NO: 370196 - DNA, 30 bp, Artificial Sequence
  Synthetic oligonucleotide
gaaagctagccagcgattcgtacgctagaa

SEQ ID NO: 370197 - DNA, 30 bp, Artificial Sequence
  Synthetic oligonucleotide
tatatttccccaaggattgagttgctagaa

SEQ ID NO: 370198 - DNA, 30 bp, Artificial Sequence
  Synthetic oligonucleotide
gagtctgaacagccatttgcagttctagaa

SEQ ID NO: 370199 - DNA, 30 bp, Artificial Sequence
  Synthetic oligonucleotide
gctattctaatcacataccagaaagtagaa

SEQ ID NO: 370200 - DNA, 30 bp, Artificial Sequence
  Synthetic oligonucleotide
actgagcctcatcgactcagcgaagtagaa

SEQ ID NO: 370201 - DNA, 30 bp, Artificial Sequence
  Synthetic oligonucleotide
aaaatcgcgtctaagtcgtgcggagtagaa

SEQ ID NO: 370202 - DNA, 30 bp, Artificial Sequence
  Synthetic oligonucleotide
gagtactacccgataaacagcttcgtagaa

SEQ ID NO: 370203 - DNA, 30 bp, Artificial Sequence
  Synthetic oligonucleotide
cagttctcgggatgtatcaagtcggtagaa

SEQ ID NO: 370204 - DNA, 30 bp, Artificial Sequence
  Synthetic oligonucleotide
attgagtgcccaaattgccttgtggtagaa

SEQ ID NO: 370205 - DNA, 30 bp, Artificial Sequence
  Synthetic oligonucleotide
gtggtcatggcgctgttagcggatgtagaa

SEQ ID NO: 370206 - DNA, 30 bp, Artificial Sequence
  Synthetic oligonucleotide
gacagcaggtcccaaatgatagcattagaa

SEQ ID NO: 370207 - DNA, 30 bp, Artificial Sequence
  Synthetic oligonucleotide
tctgtcccatggtacagaatggctttagaa

SEQ ID NO: 370208 - DNA, 30 bp, Artificial Sequence
  Synthetic oligonucleotide
gaaggggctcatccattcgctgctttagaa

SEQ ID NO: 370209 - DNA, 30 bp, Artificial Sequence
  Synthetic oligonucleotide
agccctacactcggcggctcctaaaacgaa

SEQ ID NO: 370210 - DNA, 30 bp, Artificial Sequence
  Synthetic oligonucleotide
aaattacactaaagtaccccgtaaaacgaa

SEQ ID NO: 370211 - DNA, 30 bp, Artificial Sequence
  Synthetic oligonucleotide
gcgcttttttcagcctttctaagaaacgaa

SEQ ID NO: 370212 - DNA, 30 bp, Artificial Sequence
  Synthetic oligonucleotide
agttcaattgtgctttaaggggacaacgaa

SEQ ID NO: 370213 - DNA, 30 bp, Artificial Sequence
  Synthetic oligonucleotide
tttctacgcgggacaatgtgggggaacgaa

SEQ ID NO: 370214 - DNA, 30 bp, Artificial Sequence
  Synthetic oligonucleotide
gagtcaaaaggcgcaatttttgctaacgaa

SEQ ID NO: 370215 - DNA, 30 bp, Artificial Sequence
  Synthetic oligonucleotide
cttcccttattcgccagattgtctaacgaa

SEQ ID NO: 370216 - DNA, 30 bp, Artificial Sequence
  Synthetic oligonucleotide
gagtaaggtattaggaatttccgtaacgaa

SEQ ID NO: 370217 - DNA, 30 bp, Artificial Sequence
  Synthetic oligonucleotide
ccaaactatcttgctcgtgatggtaacgaa

SEQ ID NO: 370218 - DNA, 30 bp, Artificial Sequence
  Synthetic oligonucleotide
aatgggtcacctcatgaggttctacacgaa

SEQ ID NO: 370219 - DNA, 30 bp, Artificial Sequence
  Synthetic oligonucleotide
ttctgcagaacaccatgttttctgcacgaa

SEQ ID NO: 370220 - DNA, 30 bp, Artificial Sequence
  Synthetic oligonucleotide
tcctacggttagggggttccatatcacgaa

SEQ ID NO: 370221 - DNA, 30 bp, Artificial Sequence
  Synthetic oligonucleotide
agatcgattaatttccgcacgtatcacgaa

SEQ ID NO: 370222 - DNA, 28 bp, Artificial Sequence
  Synthetic oligonucleotide
atgagcttagaaggcgactcttcacgaa

SEQ ID NO: 370223 - DNA, 30 bp, Artificial Sequence
  Synthetic oligonucleotide
aagatttctccttaaaaacgacacgacgaa

SEQ ID NO: 370224 - DNA, 30 bp, Artificial Sequence
  Synthetic oligonucleotide
gcgggagcgtcgttagagagtgacgacgaa

SEQ ID NO: 370225 - DNA, 30 bp, Artificial Sequence
  Synthetic oligonucleotide
gtacctttcacttgaaaggatgaggacgaa

SEQ ID NO: 370226 - DNA, 30 bp, Artificial Sequence
  Synthetic oligonucleotide
gcttactctcgttgtaacagacgggacgaa

SEQ ID NO: 370227 - DNA, 30 bp, Artificial Sequence
  Synthetic oligonucleotide
ttgtagacctaagctctctgacgggacgaa

SEQ ID NO: 370228 - DNA, 30 bp, Artificial Sequence
  Synthetic oligonucleotide
taagtacacgctcgttcaggctgggacgaa

SEQ ID NO: 370229 - DNA, 30 bp, Artificial Sequence
  Synthetic oligonucleotide
gagtaaacttacgttacttaacctgacgaa

SEQ ID NO: 370230 - DNA, 30 bp, Artificial Sequence
  Synthetic oligonucleotide
ttatagtaagttcggtcgggagctgacgaa

SEQ ID NO: 370231 - DNA, 30 bp, Artificial Sequence
  Synthetic oligonucleotide
ccttgccacccgcacaatctacgtgacgaa

SEQ ID NO: 370232 - DNA, 30 bp, Artificial Sequence
  Synthetic oligonucleotide
aggccggtggccacctttacccactacgaa

SEQ ID NO: 370233 - DNA, 30 bp, Artificial Sequence
  Synthetic oligonucleotide
aggtaatgtgatcctgtctgcggctacgaa

SEQ ID NO: 370234 - DNA, 30 bp, Artificial Sequence
  Synthetic oligonucleotide
cattgtctagtgttatcatcggtttacgaa

SEQ ID NO: 370235 - DNA, 30 bp, Artificial Sequence
  Synthetic oligonucleotide
ttgcacgatctttggcgagggcaaaccgaa

SEQ ID NO: 370236 - DNA, 30 bp, Artificial Sequence
  Synthetic oligonucleotide
caaaattggaggcctcgattagccaccgaa

SEQ ID NO: 370237 - DNA, 31 bp, Artificial Sequence
  Synthetic oligonucleotide
gcaggagtttaaggaaaaagatcgcaccgaa

SEQ ID NO: 370238 - DNA, 30 bp, Artificial Sequence
  Synthetic oligonucleotide
taaccttggtgtacaggtagaggcaccgaa

SEQ ID NO: 370239 - DNA, 30 bp, Artificial Sequence
  Synthetic oligonucleotide
catttaaggttgcgagggatttataccgaa

SEQ ID NO: 370240 - DNA, 30 bp, Artificial Sequence
  Synthetic oligonucleotide
gctcatgggtgtaagtatccacaccccgaa

SEQ ID NO: 370241 - DNA, 30 bp, Artificial Sequence
  Synthetic oligonucleotide
atatctgggggagttttagcacaccccgaa

SEQ ID NO: 370242 - DNA, 30 bp, Artificial Sequence
  Synthetic oligonucleotide
gatccatataagttcatgcttttcgccgaa

SEQ ID NO: 370243 - DNA, 30 bp, Artificial Sequence
  Synthetic oligonucleotide
tgggtaaaagtataggtatacgcggccgaa

SEQ ID NO: 370244 - DNA, 30 bp, Artificial Sequence
  Synthetic oligonucleotide
tttcatagcccattgatcggtatggccgaa

SEQ ID NO: 370245 - DNA, 30 bp, Artificial Sequence
  Synthetic oligonucleotide
cacttttttggctcacaaggtgaatccgaa

SEQ ID NO: 370246 - DNA, 30 bp, Artificial Sequence
  Synthetic oligonucleotide
attatcatccgtgcggccagccgatccgaa

SEQ ID NO: 370247 - DNA, 30 bp, Artificial Sequence
  Synthetic oligonucleotide
gtccttgatgagtacgattctaactccgaa

SEQ ID NO: 370248 - DNA, 30 bp, Artificial Sequence
  Synthetic oligonucleotide
taaaccaaaccctttctttaagactccgaa

SEQ ID NO: 370249 - DNA, 30 bp, Artificial Sequence
  Synthetic oligonucleotide
acgggcgcttaacatttgatcgcgtccgaa

SEQ ID NO: 370250 - DNA, 30 bp, Artificial Sequence
  Synthetic oligonucleotide
tctcccatcaaagatagcatattgtccgaa

SEQ ID NO: 370251 - DNA, 30 bp, Artificial Sequence
  Synthetic oligonucleotide
tcacacatacttgcactagacctttccgaa

SEQ ID NO: 370252 - DNA, 30 bp, Artificial Sequence
  Synthetic oligonucleotide
caagtcgtcctcataaggcagcacagcgaa

SEQ ID NO: 370253 - DNA, 30 bp, Artificial Sequence
  Synthetic oligonucleotide
gccgaagagtgggattcggatgccagcgaa

SEQ ID NO: 370254 - DNA, 30 bp, Artificial Sequence
  Synthetic oligonucleotide
gtatggacgctcattctgtccatcagcgaa

SEQ ID NO: 370255 - DNA, 30 bp, Artificial Sequence
  Synthetic oligonucleotide
acaagctgcgcaaagccgcttccacgcgaa

SEQ ID NO: 370256 - DNA, 30 bp, Artificial Sequence
  Synthetic oligonucleotide
ctccattgggagaagggttggttccgcgaa

SEQ ID NO: 370257 - DNA, 30 bp, Artificial Sequence
  Synthetic oligonucleotide
tttccgggacggtatctagttctgcgcgaa

SEQ ID NO: 370258 - DNA, 30 bp, Artificial Sequence
  Synthetic oligonucleotide
gtctctggatataattcgaaggttcgcgaa

SEQ ID NO: 370259 - DNA, 30 bp, Artificial Sequence
  Synthetic oligonucleotide
catgagcccacacaaccgttctgaggcgaa

SEQ ID NO: 370260 - DNA, 30 bp, Artificial Sequence
  Synthetic oligonucleotide
atagattgctactcgtctcgtgacggcgaa

SEQ ID NO: 370261 - DNA, 30 bp, Artificial Sequence
  Synthetic oligonucleotide
taaaggcaccgaaagtgtaccgagggcgaa

SEQ ID NO: 370262 - DNA, 30 bp, Artificial Sequence
  Synthetic oligonucleotide
tagcagagagtcgccgtgtgcttgggcgaa

SEQ ID NO: 370263 - DNA, 30 bp, Artificial Sequence
  Synthetic oligonucleotide
tattccggctattgcggatagtctggcgaa

SEQ ID NO: 370264 - DNA, 30 bp, Artificial Sequence
  Synthetic oligonucleotide
attattatatgaaccgtgaacaaatgcgaa

SEQ ID NO: 370265 - DNA, 30 bp, Artificial Sequence
  Synthetic oligonucleotide
taaatctatgtatgggacgtcatatgcgaa

SEQ ID NO: 370266 - DNA, 30 bp, Artificial Sequence
  Synthetic oligonucleotide
tagtgactaaatataaaggtcatatgcgaa

SEQ ID NO: 370267 - DNA, 30 bp, Artificial Sequence
  Synthetic oligonucleotide
gctacactctaccttcctcgcgtatgcgaa

SEQ ID NO: 370268 - DNA, 30 bp, Artificial Sequence
  Synthetic oligonucleotide
ttcccaaatactgaggccagccactgcgaa

SEQ ID NO: 370269 - DNA, 30 bp, Artificial Sequence
  Synthetic oligonucleotide
agtatccccactatgcctacaccttgcgaa

SEQ ID NO: 370270 - DNA, 30 bp, Artificial Sequence
  Synthetic oligonucleotide
ggggcagctttgatgacggtagaaatcgaa

SEQ ID NO: 370271 - DNA, 30 bp, Artificial Sequence
  Synthetic oligonucleotide
cggtcccacgcgacctccgtggagatcgaa

SEQ ID NO: 370272 - DNA, 30 bp, Artificial Sequence
  Synthetic oligonucleotide
cctgccgtttagatactagttcatatcgaa

SEQ ID NO: 370273 - DNA, 30 bp, Artificial Sequence
  Synthetic oligonucleotide
ggggatccgtacgtgcaattttatatcgaa

SEQ ID NO: 370274 - DNA, 30 bp, Artificial Sequence
  Synthetic oligonucleotide
accagtcgttattcgtcgtccacactcgaa

SEQ ID NO: 370275 - DNA, 30 bp, Artificial Sequence
  Synthetic oligonucleotide
ggtgggagacgaaagactatgagcctcgaa

SEQ ID NO: 370276 - DNA, 30 bp, Artificial Sequence
  Synthetic oligonucleotide
atacgctgggtcgatgttccgccgctcgaa

SEQ ID NO: 370277 - DNA, 30 bp, Artificial Sequence
  Synthetic oligonucleotide
gcaaatgcgtaccgccgaggagtgctcgaa

SEQ ID NO: 370278 - DNA, 30 bp, Artificial Sequence
  Synthetic oligonucleotide
gtgctgtcttgtcgtatacgcactctcgaa

SEQ ID NO: 370279 - DNA, 30 bp, Artificial Sequence
  Synthetic oligonucleotide
tacacacataatccgtagcaattagtcgaa

SEQ ID NO: 370280 - DNA, 30 bp, Artificial Sequence
  Synthetic oligonucleotide
attttcgtacaacccgataggtgcgtcgaa

SEQ ID NO: 370281 - DNA, 30 bp, Artificial Sequence
  Synthetic oligonucleotide
attggaatttccatgacaacgttcgtcgaa

SEQ ID NO: 370282 - DNA, 30 bp, Artificial Sequence
  Synthetic oligonucleotide
tagctaagatacccttatgcagcggtcgaa

SEQ ID NO: 370283 - DNA, 30 bp, Artificial Sequence
  Synthetic oligonucleotide
aaacactatcccctgcgtctggatgtcgaa

SEQ ID NO: 370284 - DNA, 30 bp, Artificial Sequence
  Synthetic oligonucleotide
ttttgctggcatcaactgatcaaattcgaa

SEQ ID NO: 370285 - DNA, 30 bp, Artificial Sequence
  Synthetic oligonucleotide
accattatagatcgtttgcggtaattcgaa

SEQ ID NO: 370286 - DNA, 30 bp, Artificial Sequence
  Synthetic oligonucleotide
tcgacgctggtacgacctcagagattcgaa

SEQ ID NO: 370287 - DNA, 30 bp, Artificial Sequence
  Synthetic oligonucleotide
tgtggatgccacaatgtgcatcccttcgaa

SEQ ID NO: 370288 - DNA, 30 bp, Artificial Sequence
  Synthetic oligonucleotide
atcatggaagtcttatgttggaagttcgaa

SEQ ID NO: 370289 - DNA, 30 bp, Artificial Sequence
  Synthetic oligonucleotide
aaggacgcgcagtatcggttaagcaaggaa

SEQ ID NO: 370290 - DNA, 30 bp, Artificial Sequence
  Synthetic oligonucleotide
gcacagattgtcactcgatgaatcaaggaa

SEQ ID NO: 370291 - DNA, 30 bp, Artificial Sequence
  Synthetic oligonucleotide
ataaggaacttctgtgttaaggtgaaggaa

SEQ ID NO: 370292 - DNA, 30 bp, Artificial Sequence
  Synthetic oligonucleotide
tctagggttccaatattatctactaaggaa

SEQ ID NO: 370293 - DNA, 30 bp, Artificial Sequence
  Synthetic oligonucleotide
tttcacgaccgccgttgtgtcaaacaggaa

SEQ ID NO: 370294 - DNA, 30 bp, Artificial Sequence
  Synthetic oligonucleotide
gactacggatctttccgcaataaacaggaa

SEQ ID NO: 370295 - DNA, 30 bp, Artificial Sequence
  Synthetic oligonucleotide
gtcgtacgaagtattacatagtaacaggaa

SEQ ID NO: 370296 - DNA, 30 bp, Artificial Sequence
  Synthetic oligonucleotide
agccggggctgcgccaattgctcccaggaa

SEQ ID NO: 370297 - DNA, 30 bp, Artificial Sequence
  Synthetic oligonucleotide
gaccatttttaatccagcaagaggcaggaa

SEQ ID NO: 370298 - DNA, 30 bp, Artificial Sequence
  Synthetic oligonucleotide
tagaggtgctggttaacccgacggcaggaa

SEQ ID NO: 370299 - DNA, 30 bp, Artificial Sequence
  Synthetic oligonucleotide
ctttcgaacggaatcacaccggtgcaggaa

SEQ ID NO: 370300 - DNA, 30 bp, Artificial Sequence
  Synthetic oligonucleotide
gactgcactgggttcgtagctgtgcaggaa

SEQ ID NO: 370301 - DNA, 30 bp, Artificial Sequence
  Synthetic oligonucleotide
ggttcatctcggacttaggtccctcaggaa

SEQ ID NO: 370302 - DNA, 30 bp, Artificial Sequence
  Synthetic oligonucleotide
agcattaccagcccttggcattgtcaggaa

SEQ ID NO: 370303 - DNA, 31 bp, Artificial Sequence
  Synthetic oligonucleotide
acgttttggcaagcggtgctcccaagaggaa

SEQ ID NO: 370304 - DNA, 30 bp, Artificial Sequence
  Synthetic oligonucleotide
tgtcggatgggctaacccgggagagaggaa

SEQ ID NO: 370305 - DNA, 30 bp, Artificial Sequence
  Synthetic oligonucleotide
attcgtggggctagacacccgcaggaggaa

SEQ ID NO: 370306 - DNA, 30 bp, Artificial Sequence
  Synthetic oligonucleotide
aatctatgctggttctaccactctgaggaa

SEQ ID NO: 370307 - DNA, 30 bp, Artificial Sequence
  Synthetic oligonucleotide
acaataagtgtgggtcttcttgttgaggaa

SEQ ID NO: 370308 - DNA, 30 bp, Artificial Sequence
  Synthetic oligonucleotide
tcggactaatagggctgccatgaataggaa

SEQ ID NO: 370309 - DNA, 30 bp, Artificial Sequence
  Synthetic oligonucleotide
atcatcaccgtccacaccactacataggaa

SEQ ID NO: 370310 - DNA, 30 bp, Artificial Sequence
  Synthetic oligonucleotide
ctgaaattgtactgcttatagatataggaa

SEQ ID NO: 370311 - DNA, 30 bp, Artificial Sequence
  Synthetic oligonucleotide
atactgccccgtcagccgggtatataggaa

SEQ ID NO: 370312 - DNA, 30 bp, Artificial Sequence
  Synthetic oligonucleotide
tgttagtcgagaccattgggaggctaggaa

SEQ ID NO: 370313 - DNA, 30 bp, Artificial Sequence
  Synthetic oligonucleotide
cattacgtccgaacacgcaaaatctaggaa

SEQ ID NO: 370314 - DNA, 30 bp, Artificial Sequence
  Synthetic oligonucleotide
ggccactggctactgttccttgggtaggaa

SEQ ID NO: 370315 - DNA, 30 bp, Artificial Sequence
  Synthetic oligonucleotide
cccgtgtgcccgtttcagttaatgtaggaa

SEQ ID NO: 370316 - DNA, 30 bp, Artificial Sequence
  Synthetic oligonucleotide
agtacctattcggtaacgattaattaggaa

SEQ ID NO: 370317 - DNA, 30 bp, Artificial Sequence
  Synthetic oligonucleotide
gggtataattacaactcatgtgcttaggaa

SEQ ID NO: 370318 - DNA, 30 bp, Artificial Sequence
  Synthetic oligonucleotide
aggggatttctacgactcatgtgttaggaa

SEQ ID NO: 370319 - DNA, 30 bp, Artificial Sequence
  Synthetic oligonucleotide
tatttgctagcagaatacaaggaaacggaa

SEQ ID NO: 370320 - DNA, 30 bp, Artificial Sequence
  Synthetic oligonucleotide
gtgacagtatcgttggctttcataacggaa

SEQ ID NO: 370321 - DNA, 30 bp, Artificial Sequence
  Synthetic oligonucleotide
gtcttttcgagtactaggaaactaacggaa

SEQ ID NO: 370322 - DNA, 30 bp, Artificial Sequence
  Synthetic oligonucleotide
atcaatggctcatgagttaatttaacggaa

SEQ ID NO: 370323 - DNA, 30 bp, Artificial Sequence
  Synthetic oligonucleotide
atttacgggagtattgagtttcgcacggaa

SEQ ID NO: 370324 - DNA, 30 bp, Artificial Sequence
  Synthetic oligonucleotide
ggaatccgtttagataagacagagacggaa

SEQ ID NO: 370325 - DNA, 30 bp, Artificial Sequence
  Synthetic oligonucleotide
gcgcaagtcatttacacgacgcggacggaa

SEQ ID NO: 370326 - DNA, 30 bp, Artificial Sequence
  Synthetic oligonucleotide
cgacgctttaaaatttagaccgctacggaa

SEQ ID NO: 370327 - DNA, 30 bp, Artificial Sequence
  Synthetic oligonucleotide
gtatccactgcaaggcatgcatttacggaa

SEQ ID NO: 370328 - DNA, 30 bp, Artificial Sequence
  Synthetic oligonucleotide
agagggctttataggattatcagaccggaa

SEQ ID NO: 370329 - DNA, 30 bp, Artificial Sequence
  Synthetic oligonucleotide
ccctacttgtgaccccaaaacgacccggaa

SEQ ID NO: 370330 - DNA, 30 bp, Artificial Sequence
  Synthetic oligonucleotide
cttttcaccccccatcttgaatacccggaa

SEQ ID NO: 370331 - DNA, 30 bp, Artificial Sequence
  Synthetic oligonucleotide
ggctcctcgcagacgtactaacgcccggaa

SEQ ID NO: 370332 - DNA, 30 bp, Artificial Sequence
  Synthetic oligonucleotide
aaagaatgccctcatatgtgtttcccggaa

SEQ ID NO: 370333 - DNA, 30 bp, Artificial Sequence
  Synthetic oligonucleotide
ctcgtggtgaagacgtcaagacggccggaa

SEQ ID NO: 370334 - DNA, 30 bp, Artificial Sequence
  Synthetic oligonucleotide
gtcattggcactgagatgctcatgccggaa

SEQ ID NO: 370335 - DNA, 30 bp, Artificial Sequence
  Synthetic oligonucleotide
tttataagccagtctggataggatccggaa

SEQ ID NO: 370336 - DNA, 30 bp, Artificial Sequence
  Synthetic oligonucleotide
atcttaactggcttagcgggggctccggaa

SEQ ID NO: 370337 - DNA, 30 bp, Artificial Sequence
  Synthetic oligonucleotide
gatctcaataccgtgacacattgtccggaa

SEQ ID NO: 370338 - DNA, 30 bp, Artificial Sequence
  Synthetic oligonucleotide
gctttcacgtgtagttctgtacgagcggaa

SEQ ID NO: 370339 - DNA, 30 bp, Artificial Sequence
  Synthetic oligonucleotide
ggtggcatccctttcacacgcggagcggaa

SEQ ID NO: 370340 - DNA, 30 bp, Artificial Sequence
  Synthetic oligonucleotide
gtacaccgagacgttctccgatgagcggaa

SEQ ID NO: 370341 - DNA, 30 bp, Artificial Sequence
  Synthetic oligonucleotide
acaggcatgtatgcgcgtccagacgcggaa

SEQ ID NO: 370342 - DNA, 30 bp, Artificial Sequence
  Synthetic oligonucleotide
gtctacgaaatatctgatgatggcgcggaa

SEQ ID NO: 370343 - DNA, 30 bp, Artificial Sequence
  Synthetic oligonucleotide
tgccaacctagtgcgtccgagatggcggaa

SEQ ID NO: 370344 - DNA, 30 bp, Artificial Sequence
  Synthetic oligonucleotide
gaatttggcacagccggacaagatgcggaa

SEQ ID NO: 370345 - DNA, 30 bp, Artificial Sequence
  Synthetic oligonucleotide
ttttatacagttgttttgccgtactcggaa

SEQ ID NO: 370346 - DNA, 30 bp, Artificial Sequence
  Synthetic oligonucleotide
atgactttcggagttcagattgtctcggaa

SEQ ID NO: 370347 - DNA, 30 bp, Artificial Sequence
  Synthetic oligonucleotide
gttaatacatccaagtattttccgtcggaa

SEQ ID NO: 370348 - DNA, 30 bp, Artificial Sequence
  Synthetic oligonucleotide
gttgactgcgggatctgccgtgggtcggaa

SEQ ID NO: 370349 - DNA, 30 bp, Artificial Sequence
  Synthetic oligonucleotide
agttgttgctaactgatgggtccaagggaa

SEQ ID NO: 370350 - DNA, 30 bp, Artificial Sequence
  Synthetic oligonucleotide
cattgttagaaatttcgctacagaagggaa

SEQ ID NO: 370351 - DNA, 30 bp, Artificial Sequence
  Synthetic oligonucleotide
acataccgcacgacagttatgtgaagggaa

SEQ ID NO: 370352 - DNA, 30 bp, Artificial Sequence
  Synthetic oligonucleotide
gaacgtgggcccagttcgcgtataagggaa

SEQ ID NO: 370353 - DNA, 30 bp, Artificial Sequence
  Synthetic oligonucleotide
gcacttaaaacgactttgcttgacagggaa

SEQ ID NO: 370354 - DNA, 30 bp, Artificial Sequence
  Synthetic oligonucleotide
gatctacgccttagtgccacatacagggaa

SEQ ID NO: 370355 - DNA, 30 bp, Artificial Sequence
  Synthetic oligonucleotide
acgccagagatccgttcagcagccagggaa

SEQ ID NO: 370356 - DNA, 30 bp, Artificial Sequence
  Synthetic oligonucleotide
aggatgaggttccgtgtgcaaggcagggaa

SEQ ID NO: 370357 - DNA, 31 bp, Artificial Sequence
  Synthetic oligonucleotide
ggggaccaggagggctaatgacatcagggaa

SEQ ID NO: 370358 - DNA, 30 bp, Artificial Sequence
  Synthetic oligonucleotide
attcggactctgcgtggactttagagggaa

SEQ ID NO: 370359 - DNA, 30 bp, Artificial Sequence
  Synthetic oligonucleotide
gcttggtacaccatttctcccggtagggaa

SEQ ID NO: 370360 - DNA, 30 bp, Artificial Sequence
  Synthetic oligonucleotide
acttacttacgaaactacgtgtttagggaa

SEQ ID NO: 370361 - DNA, 30 bp, Artificial Sequence
  Synthetic oligonucleotide
agcctccgtgtagttgacggggaacgggaa

SEQ ID NO: 370362 - DNA, 30 bp, Artificial Sequence
  Synthetic oligonucleotide
tggctagccagctgcgcgacgacacgggaa

SEQ ID NO: 370363 - DNA, 30 bp, Artificial Sequence
  Synthetic oligonucleotide
gtctaggtttcgggtcatatccgacgggaa

SEQ ID NO: 370364 - DNA, 30 bp, Artificial Sequence
  Synthetic oligonucleotide
aggatcttggtaggaacgcacgaccgggaa

SEQ ID NO: 370365 - DNA, 30 bp, Artificial Sequence
  Synthetic oligonucleotide
taacaacaattatgggtggtgtcccgggaa

SEQ ID NO: 370366 - DNA, 30 bp, Artificial Sequence
  Synthetic oligonucleotide
gcatgatgggtcattgcctatggccgggaa

SEQ ID NO: 370367 - DNA, 30 bp, Artificial Sequence
  Synthetic oligonucleotide
aagccatctgctgaacagcctctgcgggaa

SEQ ID NO: 370368 - DNA, 30 bp, Artificial Sequence
  Synthetic oligonucleotide
ggtataactatattactggccaatcgggaa

SEQ ID NO: 370369 - DNA, 30 bp, Artificial Sequence
  Synthetic oligonucleotide
tgcgatcgcctgccccctttaactcgggaa

SEQ ID NO: 370370 - DNA, 30 bp, Artificial Sequence
  Synthetic oligonucleotide
cacggcatttgtgcgacgcaagctcgggaa

SEQ ID NO: 370371 - DNA, 30 bp, Artificial Sequence
  Synthetic oligonucleotide
ctaccgttgtacggtctatcgagtcgggaa

SEQ ID NO: 370372 - DNA, 30 bp, Artificial Sequence
  Synthetic oligonucleotide
gtttaaagtgctcaattctaccttcgggaa

SEQ ID NO: 370373 - DNA, 30 bp, Artificial Sequence
  Synthetic oligonucleotide
ggggattattggatggaaatcaaaggggaa

SEQ ID NO: 370374 - DNA, 30 bp, Artificial Sequence
  Synthetic oligonucleotide
gtgatgcacggcccttatcgcgaaggggaa

SEQ ID NO: 370375 - DNA, 30 bp, Artificial Sequence
  Synthetic oligonucleotide
aaagattggctcgttgacatactaggggaa

SEQ ID NO: 370376 - DNA, 30 bp, Artificial Sequence
  Synthetic oligonucleotide
cgtttacaatctgacgacccacccggggaa

SEQ ID NO: 370377 - DNA, 30 bp, Artificial Sequence
  Synthetic oligonucleotide
accctgggatataaacgtgtcgagggggaa

SEQ ID NO: 370378 - DNA, 30 bp, Artificial Sequence
  Synthetic oligonucleotide
atttatggttgaccaagaaggtgtggggaa

SEQ ID NO: 370379 - DNA, 31 bp, Artificial Sequence
  Synthetic oligonucleotide
tcgcccccataggttctgcgtgtgatgggaa

SEQ ID NO: 370380 - DNA, 30 bp, Artificial Sequence
  Synthetic oligonucleotide
cgcccgggccagagcgcctacatatgggaa

SEQ ID NO: 370381 - DNA, 30 bp, Artificial Sequence
  Synthetic oligonucleotide
ttccgagcatgtatatttcttctatgggaa

SEQ ID NO: 370382 - DNA, 30 bp, Artificial Sequence
  Synthetic oligonucleotide
ttagcgttccgaggctcataggactgggaa

SEQ ID NO: 370383 - DNA, 30 bp, Artificial Sequence
  Synthetic oligonucleotide
gtcacggtgagggcgcggagtgactgggaa

SEQ ID NO: 370384 - DNA, 30 bp, Artificial Sequence
  Synthetic oligonucleotide
taggctcttccaccattaagatcctgggaa

SEQ ID NO: 370385 - DNA, 30 bp, Artificial Sequence
  Synthetic oligonucleotide
gtgtcataggccactcgaacatagtgggaa

SEQ ID NO: 370386 - DNA, 30 bp, Artificial Sequence
  Synthetic oligonucleotide
ggggtagacaactacagtaaccggtgggaa

SEQ ID NO: 370387 - DNA, 30 bp, Artificial Sequence
  Synthetic oligonucleotide
tttaggttcaagcgaattgcccattgggaa

SEQ ID NO: 370388 - DNA, 30 bp, Artificial Sequence
  Synthetic oligonucleotide
gttgcgcccgcatctccgattggttgggaa

SEQ ID NO: 370389 - DNA, 30 bp, Artificial Sequence
  Synthetic oligonucleotide
aggcagcttacggacgtaaagaaaatggaa

SEQ ID NO: 370390 - DNA, 30 bp, Artificial Sequence
  Synthetic oligonucleotide
gatgattaggcaggcccgtcattaatggaa

SEQ ID NO: 370391 - DNA, 30 bp, Artificial Sequence
  Synthetic oligonucleotide
tacttttacagtgatcatgcctggatggaa

SEQ ID NO: 370392 - DNA, 30 bp, Artificial Sequence
  Synthetic oligonucleotide
aactaattctgagttgagtatcctatggaa

SEQ ID NO: 370393 - DNA, 30 bp, Artificial Sequence
  Synthetic oligonucleotide
gtcccgcttagagccgcgtgcagtatggaa

SEQ ID NO: 370394 - DNA, 30 bp, Artificial Sequence
  Synthetic oligonucleotide
ccccatacagcgtagtatgaaggtatggaa

SEQ ID NO: 370395 - DNA, 30 bp, Artificial Sequence
  Synthetic oligonucleotide
tcgccggtctcatatgttcgcattatggaa

SEQ ID NO: 370396 - DNA, 30 bp, Artificial Sequence
  Synthetic oligonucleotide
tagaatagttcaagcttcggaaaactggaa

SEQ ID NO: 370397 - DNA, 30 bp, Artificial Sequence
  Synthetic oligonucleotide
acatgtcgatccagtctagattgactggaa

SEQ ID NO: 370398 - DNA, 30 bp, Artificial Sequence
  Synthetic oligonucleotide
gactgtatctacgtggcggtatcgctggaa

SEQ ID NO: 370399 - DNA, 31 bp, Artificial Sequence
  Synthetic oligonucleotide
aagttattgactagttcgtcctcatctggaa

SEQ ID NO: 370400 - DNA, 30 bp, Artificial Sequence
  Synthetic oligonucleotide
gaagtatcgtccagggtggggcaagtggaa

SEQ ID NO: 370401 - DNA, 30 bp, Artificial Sequence
  Synthetic oligonucleotide
ggacctggcttgccacaagtaacagtggaa

SEQ ID NO: 370402 - DNA, 30 bp, Artificial Sequence
  Synthetic oligonucleotide
tccctcggtgacacacttacgcacgtggaa

SEQ ID NO: 370403 - DNA, 30 bp, Artificial Sequence
  Synthetic oligonucleotide
cactcccctggaaacttttcaatcgtggaa

SEQ ID NO: 370404 - DNA, 30 bp, Artificial Sequence
  Synthetic oligonucleotide
gttgggaggcatagcaagatatgggtggaa

SEQ ID NO: 370405 - DNA, 30 bp, Artificial Sequence
  Synthetic oligonucleotide
tgtatctactcccggtaaagtctggtggaa

SEQ ID NO: 370406 - DNA, 30 bp, Artificial Sequence
  Synthetic oligonucleotide
actccgtgcggctggtgcctagtggtggaa

SEQ ID NO: 370407 - DNA, 30 bp, Artificial Sequence
  Synthetic oligonucleotide
tcgggaattaccgcctagccgaatgtggaa

SEQ ID NO: 370408 - DNA, 30 bp, Artificial Sequence
  Synthetic oligonucleotide
cgtgaaatactgagtagaccctatgtggaa

SEQ ID NO: 370409 - DNA, 31 bp, Artificial Sequence
  Synthetic oligonucleotide
acgcttgtaactattttaacggtatgtggaa

SEQ ID NO: 370410 - DNA, 30 bp, Artificial Sequence
  Synthetic oligonucleotide
cctcgtcgagagccttggcggagattggaa

SEQ ID NO: 370411 - DNA, 30 bp, Artificial Sequence
  Synthetic oligonucleotide
ggatatagttggggaccgtcgcacttggaa

SEQ ID NO: 370412 - DNA, 30 bp, Artificial Sequence
  Synthetic oligonucleotide
ctcgacagattttgtacaggtggcttggaa

SEQ ID NO: 370413 - DNA, 30 bp, Artificial Sequence
  Synthetic oligonucleotide
tatagaaagcgccggctcgtttcgttggaa

SEQ ID NO: 370414 - DNA, 30 bp, Artificial Sequence
  Synthetic oligonucleotide
catagattccgtacaggtaatatgttggaa

SEQ ID NO: 370415 - DNA, 30 bp, Artificial Sequence
  Synthetic oligonucleotide
actacctcgggttcccgacattatttggaa

SEQ ID NO: 370416 - DNA, 30 bp, Artificial Sequence
  Synthetic oligonucleotide
gggcgcatgagcatacgtagtcctttggaa

SEQ ID NO: 370417 - DNA, 30 bp, Artificial Sequence
  Synthetic oligonucleotide
tagttaaagattattcagatgtgtttggaa

SEQ ID NO: 370418 - DNA, 30 bp, Artificial Sequence
  Synthetic oligonucleotide
actttacttgcgctgtgtgtgtaaaatgaa

SEQ ID NO: 370419 - DNA, 30 bp, Artificial Sequence
  Synthetic oligonucleotide
agtgttaggggtgttgaaacatgaaatgaa

SEQ ID NO: 370420 - DNA, 30 bp, Artificial Sequence
  Synthetic oligonucleotide
tctacacaaactagtgtggacctaaatgaa

SEQ ID NO: 370421 - DNA, 30 bp, Artificial Sequence
  Synthetic oligonucleotide
ggtaggccgcacagaagcctgcacaatgaa

SEQ ID NO: 370422 - DNA, 30 bp, Artificial Sequence
  Synthetic oligonucleotide
taagatcttttcgtgcggtccgccaatgaa

SEQ ID NO: 370423 - DNA, 30 bp, Artificial Sequence
  Synthetic oligonucleotide
agaagcttgtttcaccgtggggtgaatgaa

SEQ ID NO: 370424 - DNA, 30 bp, Artificial Sequence
  Synthetic oligonucleotide
gtttgtataaccggatcgggatctaatgaa

SEQ ID NO: 370425 - DNA, 31 bp, Artificial Sequence
  Synthetic oligonucleotide
gcatcggtgccttcggaccaagacacatgaa

SEQ ID NO: 370426 - DNA, 30 bp, Artificial Sequence
  Synthetic oligonucleotide
tgatgccgtattttaatggtaccacatgaa

SEQ ID NO: 370427 - DNA, 30 bp, Artificial Sequence
  Synthetic oligonucleotide
gtgaatcccccacctcacatgtcacatgaa

SEQ ID NO: 370428 - DNA, 30 bp, Artificial Sequence
  Synthetic oligonucleotide
ctacgcttgtagctgggtgtacgccatgaa

SEQ ID NO: 370429 - DNA, 30 bp, Artificial Sequence
  Synthetic oligonucleotide
actatttgcgctctgcttagaatccatgaa

SEQ ID NO: 370430 - DNA, 30 bp, Artificial Sequence
  Synthetic oligonucleotide
catttggaccggaagataggggggcatgaa

SEQ ID NO: 370431 - DNA, 30 bp, Artificial Sequence
  Synthetic oligonucleotide
gacaaagttagctctcagggagtgcatgaa

SEQ ID NO: 370432 - DNA, 30 bp, Artificial Sequence
  Synthetic oligonucleotide
agtccgctctatctcatagagaaagatgaa

SEQ ID NO: 370433 - DNA, 30 bp, Artificial Sequence
  Synthetic oligonucleotide
tctttcacctaatttaccttccacgatgaa

SEQ ID NO: 370434 - DNA, 30 bp, Artificial Sequence
  Synthetic oligonucleotide
tttatgaccaaaggcattgtgtccgatgaa

SEQ ID NO: 370435 - DNA, 30 bp, Artificial Sequence
  Synthetic oligonucleotide
gaatacacagctgtagggttaagcgatgaa

SEQ ID NO: 370436 - DNA, 30 bp, Artificial Sequence
  Synthetic oligonucleotide
cggccctatcggctttccctaagtgatgaa

SEQ ID NO: 370437 - DNA, 30 bp, Artificial Sequence
  Synthetic oligonucleotide
agcacacttctgtgatagccacactatgaa

SEQ ID NO: 370438 - DNA, 29 bp, Artificial Sequence
  Synthetic oligonucleotide
tgcttaaagaactcctataggactatgaa

SEQ ID NO: 370439 - DNA, 30 bp, Artificial Sequence
  Synthetic oligonucleotide
gctagcgaacgggccccgcagaattatgaa

SEQ ID NO: 370440 - DNA, 30 bp, Artificial Sequence
  Synthetic oligonucleotide
atcacttaaaaaggctggtgaagttatgaa

SEQ ID NO: 370441 - DNA, 30 bp, Artificial Sequence
  Synthetic oligonucleotide
tcatcagggctgccccctaaaggttatgaa

SEQ ID NO: 370442 - DNA, 30 bp, Artificial Sequence
  Synthetic oligonucleotide
aagtctatgttatgaacataattaactgaa

SEQ ID NO: 370443 - DNA, 30 bp, Artificial Sequence
  Synthetic oligonucleotide
aatgcatgttcgaatgggtgtggcactgaa

SEQ ID NO: 370444 - DNA, 30 bp, Artificial Sequence
  Synthetic oligonucleotide
aattagctcaagcgatcggtcgtcactgaa

SEQ ID NO: 370445 - DNA, 30 bp, Artificial Sequence
  Synthetic oligonucleotide
accattcataaagcggcttctgtgactgaa

SEQ ID NO: 370446 - DNA, 30 bp, Artificial Sequence
  Synthetic oligonucleotide
tgacgttaccgttctatgggacttactgaa

SEQ ID NO: 370447 - DNA, 30 bp, Artificial Sequence
  Synthetic oligonucleotide
tgctctaccgccggattagaggttactgaa

SEQ ID NO: 370448 - DNA, 30 bp, Artificial Sequence
  Synthetic oligonucleotide
cagagataacgtaaggcgactacacctgaa

SEQ ID NO: 370449 - DNA, 30 bp, Artificial Sequence
  Synthetic oligonucleotide
gaggggtgccattataggcgccgacctgaa

SEQ ID NO: 370450 - DNA, 30 bp, Artificial Sequence
  Synthetic oligonucleotide
gacaggacccccattggggagtaccctgaa

SEQ ID NO: 370451 - DNA, 30 bp, Artificial Sequence
  Synthetic oligonucleotide
ccgtaaggatcctttgaatccgtccctgaa

SEQ ID NO: 370452 - DNA, 30 bp, Artificial Sequence
  Synthetic oligonucleotide
agatgcacagctagctgccggcagcctgaa

SEQ ID NO: 370453 - DNA, 30 bp, Artificial Sequence
  Synthetic oligonucleotide
attatcatcctcgatagggtttagcctgaa

SEQ ID NO: 370454 - DNA, 30 bp, Artificial Sequence
  Synthetic oligonucleotide
ccctacgggaccagctattggcctcctgaa

SEQ ID NO: 370455 - DNA, 30 bp, Artificial Sequence
  Synthetic oligonucleotide
ttgagcaataatctaaacttcaaagctgaa

SEQ ID NO: 370456 - DNA, 30 bp, Artificial Sequence
  Synthetic oligonucleotide
gactctagaagtacacggaataacgctgaa

SEQ ID NO: 370457 - DNA, 30 bp, Artificial Sequence
  Synthetic oligonucleotide
ctataggcagtaagcaatagggccgctgaa

SEQ ID NO: 370458 - DNA, 30 bp, Artificial Sequence
  Synthetic oligonucleotide
ggtttacagcggcaccaccggtctgctgaa

SEQ ID NO: 370459 - DNA, 30 bp, Artificial Sequence
  Synthetic oligonucleotide
gtttaggcattcggaattcgttcatctgaa

SEQ ID NO: 370460 - DNA, 30 bp, Artificial Sequence
  Synthetic oligonucleotide
atagtgtaccctacaagtggtcagtctgaa

SEQ ID NO: 370461 - DNA, 30 bp, Artificial Sequence
  Synthetic oligonucleotide
accaatttgcgaacgaaacgcttgtctgaa

SEQ ID NO: 370462 - DNA, 30 bp, Artificial Sequence
  Synthetic oligonucleotide
tatccccagatacagtaccgtttgtctgaa

SEQ ID NO: 370463 - DNA, 30 bp, Artificial Sequence
  Synthetic oligonucleotide
taataatcgcaatagattgtttgttctgaa

SEQ ID NO: 370464 - DNA, 30 bp, Artificial Sequence
  Synthetic oligonucleotide
catgggttacagaacctaagttaaagtgaa

SEQ ID NO: 370465 - DNA, 30 bp, Artificial Sequence
  Synthetic oligonucleotide
ccattatacactcggcatgttcgaagtgaa

SEQ ID NO: 370466 - DNA, 30 bp, Artificial Sequence
  Synthetic oligonucleotide
atctgcgagaggattagatgggacagtgaa

SEQ ID NO: 370467 - DNA, 30 bp, Artificial Sequence
  Synthetic oligonucleotide
gtgtattcccaggacgggaactgcagtgaa

SEQ ID NO: 370468 - DNA, 30 bp, Artificial Sequence
  Synthetic oligonucleotide
gcgtgaaatgtatcgcctttgatcagtgaa

SEQ ID NO: 370469 - DNA, 30 bp, Artificial Sequence
  Synthetic oligonucleotide
acgaagcgtgagaatagtggaccgagtgaa

SEQ ID NO: 370470 - DNA, 30 bp, Artificial Sequence
  Synthetic oligonucleotide
ttgccgctcgctaaagatagcgcgagtgaa

SEQ ID NO: 370471 - DNA, 30 bp, Artificial Sequence
  Synthetic oligonucleotide
ttcaatccacgcttgtgcgtttggagtgaa

SEQ ID NO: 370472 - DNA, 30 bp, Artificial Sequence
  Synthetic oligonucleotide
cgtataccgttttgcattcaagctagtgaa

SEQ ID NO: 370473 - DNA, 30 bp, Artificial Sequence
  Synthetic oligonucleotide
tcatgaggccctttaggttcaggtagtgaa

SEQ ID NO: 370474 - DNA, 30 bp, Artificial Sequence
  Synthetic oligonucleotide
ggcccattgcattgttgccatgaacgtgaa

SEQ ID NO: 370475 - DNA, 30 bp, Artificial Sequence
  Synthetic oligonucleotide
actggattgacttcagaccttcgacgtgaa

SEQ ID NO: 370476 - DNA, 30 bp, Artificial Sequence
  Synthetic oligonucleotide
atctcaccgagtcacctaagagaccgtgaa

SEQ ID NO: 370477 - DNA, 30 bp, Artificial Sequence
  Synthetic oligonucleotide
attgcgttaggtcatgtgcactaccgtgaa

SEQ ID NO: 370478 - DNA, 30 bp, Artificial Sequence
  Synthetic oligonucleotide
gattaagggtgttgtctgaaatcccgtgaa

SEQ ID NO: 370479 - DNA, 30 bp, Artificial Sequence
  Synthetic oligonucleotide
ggctgtggatgtattggttaaggccgtgaa

SEQ ID NO: 370480 - DNA, 30 bp, Artificial Sequence
  Synthetic oligonucleotide
taatgaaaattagttgggtgcatccgtgaa

SEQ ID NO: 370481 - DNA, 30 bp, Artificial Sequence
  Synthetic oligonucleotide
aaagaagccgcaagcatcctttagcgtgaa

SEQ ID NO: 370482 - DNA, 30 bp, Artificial Sequence
  Synthetic oligonucleotide
agccagagcctaagttccttacggcgtgaa

SEQ ID NO: 370483 - DNA, 30 bp, Artificial Sequence
  Synthetic oligonucleotide
cctatattaggatagtgatccgtgcgtgaa

SEQ ID NO: 370484 - DNA, 30 bp, Artificial Sequence
  Synthetic oligonucleotide
tttgagatttcaccactgcgcacaggtgaa

SEQ ID NO: 370485 - DNA, 30 bp, Artificial Sequence
  Synthetic oligonucleotide
ggagcggtctcttaggcattgtcaggtgaa

SEQ ID NO: 370486 - DNA, 30 bp, Artificial Sequence
  Synthetic oligonucleotide
agaatctccaacatgaaaacggacggtgaa

SEQ ID NO: 370487 - DNA, 30 bp, Artificial Sequence
  Synthetic oligonucleotide
gcaagcctcgcaagacagtctcgcggtgaa

SEQ ID NO: 370488 - DNA, 30 bp, Artificial Sequence
  Synthetic oligonucleotide
taaagtctcgcgaaaatcgcatgcggtgaa

SEQ ID NO: 370489 - DNA, 30 bp, Artificial Sequence
  Synthetic oligonucleotide
agtaggaacatggaatctactgtcggtgaa

SEQ ID NO: 370490 - DNA, 30 bp, Artificial Sequence
  Synthetic oligonucleotide
aacataagcagaagaaggtagaggggtgaa

SEQ ID NO: 370491 - DNA, 30 bp, Artificial Sequence
  Synthetic oligonucleotide
tgggcttccttacacgtaacgatgggtgaa

SEQ ID NO: 370492 - DNA, 30 bp, Artificial Sequence
  Synthetic oligonucleotide
tagattcacttacgggcccagttgggtgaa

SEQ ID NO: 370493 - DNA, 30 bp, Artificial Sequence
  Synthetic oligonucleotide
cggcaggtaagctttctcagttatggtgaa

SEQ ID NO: 370494 - DNA, 30 bp, Artificial Sequence
  Synthetic oligonucleotide
atctcaaccgccgggcccatgccatgtgaa

SEQ ID NO: 370495 - DNA, 30 bp, Artificial Sequence
  Synthetic oligonucleotide
tcgtctgggctgcatgcacgtgcatgtgaa

SEQ ID NO: 370496 - DNA, 30 bp, Artificial Sequence
  Synthetic oligonucleotide
atggatgactatttctgacggtcgtgtgaa

SEQ ID NO: 370497 - DNA, 30 bp, Artificial Sequence
  Synthetic oligonucleotide
gcacaatgaaccattggacgcgcttgtgaa

SEQ ID NO: 370498 - DNA, 30 bp, Artificial Sequence
  Synthetic oligonucleotide
agtatccttttttacaagaaagaaattgaa

SEQ ID NO: 370499 - DNA, 30 bp, Artificial Sequence
  Synthetic oligonucleotide
tattaaagcgcagtaagccatgaaattgaa

SEQ ID NO: 370500 - DNA, 30 bp, Artificial Sequence
  Synthetic oligonucleotide
gcacagagtaattcgtcttaataaattgaa

SEQ ID NO: 370501 - DNA, 30 bp, Artificial Sequence
  Synthetic oligonucleotide
atccagggagctgcgatgtttgtaattgaa

SEQ ID NO: 370502 - DNA, 30 bp, Artificial Sequence
  Synthetic oligonucleotide
ctcgcgcaaaagacgcacatgaacattgaa

SEQ ID NO: 370503 - DNA, 30 bp, Artificial Sequence
  Synthetic oligonucleotide
aatgcagcaataaattgcgggtgcattgaa

SEQ ID NO: 370504 - DNA, 30 bp, Artificial Sequence
  Synthetic oligonucleotide
ctggtagcataagccatggtcatcattgaa

SEQ ID NO: 370505 - DNA, 30 bp, Artificial Sequence
  Synthetic oligonucleotide
ggtactcggtgatcagacgcattcattgaa

SEQ ID NO: 370506 - DNA, 30 bp, Artificial Sequence
  Synthetic oligonucleotide
aatactgatttctagccagtgcagattgaa

SEQ ID NO: 370507 - DNA, 30 bp, Artificial Sequence
  Synthetic oligonucleotide
atggaattatgtttgtagtgagttattgaa

SEQ ID NO: 370508 - DNA, 30 bp, Artificial Sequence
  Synthetic oligonucleotide
gataccaggaatagcgttagtacacttgaa

SEQ ID NO: 370509 - DNA, 30 bp, Artificial Sequence
  Synthetic oligonucleotide
gccttcggttgaagctaccttacccttgaa

SEQ ID NO: 370510 - DNA, 30 bp, Artificial Sequence
  Synthetic oligonucleotide
ctagttctgatgtcgtacggaaaagttgaa

SEQ ID NO: 370511 - DNA, 30 bp, Artificial Sequence
  Synthetic oligonucleotide
aagtctaaaagcgccacggtattagttgaa

SEQ ID NO: 370512 - DNA, 30 bp, Artificial Sequence
  Synthetic oligonucleotide
taacactgaaatcgtccgtacaacgttgaa

SEQ ID NO: 370513 - DNA, 30 bp, Artificial Sequence
  Synthetic oligonucleotide
actgtgtccatgggaaactcaagcgttgaa

SEQ ID NO: 370514 - DNA, 30 bp, Artificial Sequence
  Synthetic oligonucleotide
ctcgacgcatgtaaagcggaaggcgttgaa

SEQ ID NO: 370515 - DNA, 30 bp, Artificial Sequence
  Synthetic oligonucleotide
ttagcctaatgcttcctcattttcgttgaa

SEQ ID NO: 370516 - DNA, 30 bp, Artificial Sequence
  Synthetic oligonucleotide
ccgggtctacgattctacgtcacggttgaa

SEQ ID NO: 370517 - DNA, 30 bp, Artificial Sequence
  Synthetic oligonucleotide
gtgccaaacgcttcacaagtcccggttgaa

SEQ ID NO: 370518 - DNA, 30 bp, Artificial Sequence
  Synthetic oligonucleotide
gccgttggtctcggtattaaagtggttgaa

SEQ ID NO: 370519 - DNA, 30 bp, Artificial Sequence
  Synthetic oligonucleotide
aaggatattggcgccgactattatgttgaa

SEQ ID NO: 370520 - DNA, 30 bp, Artificial Sequence
  Synthetic oligonucleotide
gccagtactgtttgccttgggtctgttgaa

SEQ ID NO: 370521 - DNA, 30 bp, Artificial Sequence
  Synthetic oligonucleotide
tgccttctcgggctgattttaaaatttgaa

SEQ ID NO: 370522 - DNA, 30 bp, Artificial Sequence
  Synthetic oligonucleotide
caaacggtaatggcacagttacaatttgaa

SEQ ID NO: 370523 - DNA, 30 bp, Artificial Sequence
  Synthetic oligonucleotide
accatactcttcggcgggtaccaatttgaa

SEQ ID NO: 370524 - DNA, 30 bp, Artificial Sequence
  Synthetic oligonucleotide
gagattggtactggcccgcagggatttgaa

SEQ ID NO: 370525 - DNA, 30 bp, Artificial Sequence
  Synthetic oligonucleotide
aacttattgagggacaaggcgaactttgaa

SEQ ID NO: 370526 - DNA, 30 bp, Artificial Sequence
  Synthetic oligonucleotide
gggacttgagatttcatctgaatctttgaa

SEQ ID NO: 370527 - DNA, 30 bp, Artificial Sequence
  Synthetic oligonucleotide
acgtcttaatgttagtccgaagagtttgaa

SEQ ID NO: 370528 - DNA, 30 bp, Artificial Sequence
  Synthetic oligonucleotide
gctaatttacaacaacactaactgtttgaa

SEQ ID NO: 370529 - DNA, 30 bp, Artificial Sequence
  Synthetic oligonucleotide
ggcgtctttggagtgcaccgggattttgaa

SEQ ID NO: 370530 - DNA, 30 bp, Artificial Sequence
  Synthetic oligonucleotide
agatttcatacgggttccggatcttttgaa

SEQ ID NO: 370531 - DNA, 30 bp, Artificial Sequence
  Synthetic oligonucleotide
tttgttaaagactcaggtcgaacaaaataa

SEQ ID NO: 370532 - DNA, 29 bp, Artificial Sequence
  Synthetic oligonucleotide
gctagtaggcccagtcttgcctcaaataa

SEQ ID NO: 370533 - DNA, 30 bp, Artificial Sequence
  Synthetic oligonucleotide
ttacaaatttgacaaccagtaatgaaataa

SEQ ID NO: 370534 - DNA, 30 bp, Artificial Sequence
  Synthetic oligonucleotide
attcagcgcggaggagcactttataaataa

SEQ ID NO: 370535 - DNA, 30 bp, Artificial Sequence
  Synthetic oligonucleotide
gagatatggtcacgtgtcagatctaaataa

SEQ ID NO: 370536 - DNA, 30 bp, Artificial Sequence
  Synthetic oligonucleotide
agtcacaagggtcttctttatagtaaataa

SEQ ID NO: 370537 - DNA, 30 bp, Artificial Sequence
  Synthetic oligonucleotide
ctaagtgtcgcgccatatcactttaaataa

SEQ ID NO: 370538 - DNA, 30 bp, Artificial Sequence
  Synthetic oligonucleotide
agtatcagcacgttgtttgaggaacaataa

SEQ ID NO: 370539 - DNA, 30 bp, Artificial Sequence
  Synthetic oligonucleotide
aatcgatccgtgactaggacaacacaataa

SEQ ID NO: 370540 - DNA, 30 bp, Artificial Sequence
  Synthetic oligonucleotide
gacttcctacttagagctctggcacaataa

SEQ ID NO: 370541 - DNA, 30 bp, Artificial Sequence
  Synthetic oligonucleotide
ggagtaagttctccagcgatagcccaataa

SEQ ID NO: 370542 - DNA, 30 bp, Artificial Sequence
  Synthetic oligonucleotide
cttgtatctcgtagctacaacgagcaataa

SEQ ID NO: 370543 - DNA, 30 bp, Artificial Sequence
  Synthetic oligonucleotide
agtagcaccccaactgattggcaagaataa

SEQ ID NO: 370544 - DNA, 30 bp, Artificial Sequence
  Synthetic oligonucleotide
atgagcaggtatccaactgatgcagaataa

SEQ ID NO: 370545 - DNA, 30 bp, Artificial Sequence
  Synthetic oligonucleotide
gggagaattatagatggcatgcacgaataa

SEQ ID NO: 370546 - DNA, 30 bp, Artificial Sequence
  Synthetic oligonucleotide
ggaaagggtaccgaacctcaactcgaataa

SEQ ID NO: 370547 - DNA, 30 bp, Artificial Sequence
  Synthetic oligonucleotide
ggaatattctcacgcaagatggcggaataa

SEQ ID NO: 370548 - DNA, 30 bp, Artificial Sequence
  Synthetic oligonucleotide
aatcatagtaccccgtgaaaactggaataa

SEQ ID NO: 370549 - DNA, 30 bp, Artificial Sequence
  Synthetic oligonucleotide
tctggtgggtgcgagccatgcctggaataa

SEQ ID NO: 370550 - DNA, 30 bp, Artificial Sequence
  Synthetic oligonucleotide
cgcggcaagattgtcaattatctggaataa

SEQ ID NO: 370551 - DNA, 30 bp, Artificial Sequence
  Synthetic oligonucleotide
ccgcatgggtcttatcgagacactgaataa

SEQ ID NO: 370552 - DNA, 30 bp, Artificial Sequence
  Synthetic oligonucleotide
cgtgtcgacctctataagtaggaataataa

SEQ ID NO: 370553 - DNA, 30 bp, Artificial Sequence
  Synthetic oligonucleotide
cattgggggaggagcggtagggaataataa

SEQ ID NO: 370554 - DNA, 30 bp, Artificial Sequence
  Synthetic oligonucleotide
ctctaaatttttcgtacccgaccataataa

SEQ ID NO: 370555 - DNA, 30 bp, Artificial Sequence
  Synthetic oligonucleotide
gtagcacacaacgcgggctaattataataa

SEQ ID NO: 370556 - DNA, 30 bp, Artificial Sequence
  Synthetic oligonucleotide
tgagtgtaatgagcttctctctgctaataa

SEQ ID NO: 370557 - DNA, 30 bp, Artificial Sequence
  Synthetic oligonucleotide
gttgtcaatcaggaggtgatcaagtaataa

SEQ ID NO: 370558 - DNA, 30 bp, Artificial Sequence
  Synthetic oligonucleotide
aaaagtgtagaacttctcgtgcggtaataa

SEQ ID NO: 370559 - DNA, 30 bp, Artificial Sequence
  Synthetic oligonucleotide
ctacagctacggtttttccagaattaataa

SEQ ID NO: 370560 - DNA, 30 bp, Artificial Sequence
  Synthetic oligonucleotide
cttgctgtaatcattttactatcttaataa

SEQ ID NO: 370561 - DNA, 30 bp, Artificial Sequence
  Synthetic oligonucleotide
tcagaagttcttcccttagctggttaataa

SEQ ID NO: 370562 - DNA, 30 bp, Artificial Sequence
  Synthetic oligonucleotide
cgctggccacaacttacatgattaacataa

SEQ ID NO: 370563 - DNA, 30 bp, Artificial Sequence
  Synthetic oligonucleotide
tatgcgatgaaacttggtaacctcacataa

SEQ ID NO: 370564 - DNA, 30 bp, Artificial Sequence
  Synthetic oligonucleotide
cgcggctaagccgggacatttttgacataa

SEQ ID NO: 370565 - DNA, 30 bp, Artificial Sequence
  Synthetic oligonucleotide
tgatagagtacccgcactttctctacataa

SEQ ID NO: 370566 - DNA, 30 bp, Artificial Sequence
  Synthetic oligonucleotide
tccactggacggcaggttggcggtacataa

SEQ ID NO: 370567 - DNA, 30 bp, Artificial Sequence
  Synthetic oligonucleotide
gaaatactgagcgatggaaatataccataa

SEQ ID NO: 370568 - DNA, 30 bp, Artificial Sequence
  Synthetic oligonucleotide
ggatggccttggaaccggtgaaggccataa

SEQ ID NO: 370569 - DNA, 30 bp, Artificial Sequence
  Synthetic oligonucleotide
gcgccccgtccacggctgtagctgccataa

SEQ ID NO: 370570 - DNA, 30 bp, Artificial Sequence
  Synthetic oligonucleotide
actctcaagtaaggtcccctacgtccataa

SEQ ID NO: 370571 - DNA, 30 bp, Artificial Sequence
  Synthetic oligonucleotide
aatcgtgtaggactttctgaaggtccataa

SEQ ID NO: 370572 - DNA, 30 bp, Artificial Sequence
  Synthetic oligonucleotide
tctagtactcagattagatgagaagcataa

SEQ ID NO: 370573 - DNA, 30 bp, Artificial Sequence
  Synthetic oligonucleotide
atctaacttcaaaccagtagcgaagcataa

SEQ ID NO: 370574 - DNA, 30 bp, Artificial Sequence
  Synthetic oligonucleotide
gaaaccaggctctctaagatttcagcataa

SEQ ID NO: 370575 - DNA, 30 bp, Artificial Sequence
  Synthetic oligonucleotide
ctaattacaggatacctgacaatagcataa

SEQ ID NO: 370576 - DNA, 30 bp, Artificial Sequence
  Synthetic oligonucleotide
acttatatcctcgggaccaggtacgcataa

SEQ ID NO: 370577 - DNA, 30 bp, Artificial Sequence
  Synthetic oligonucleotide
aacgtcgtgccctcaggggcatcggcataa

SEQ ID NO: 370578 - DNA, 30 bp, Artificial Sequence
  Synthetic oligonucleotide
atctgcggtgggggactcttgcgggcataa

SEQ ID NO: 370579 - DNA, 30 bp, Artificial Sequence
  Synthetic oligonucleotide
gagtgcaagttagcgctactcatggcataa

SEQ ID NO: 370580 - DNA, 30 bp, Artificial Sequence
  Synthetic oligonucleotide
cacgggagcaggtgcggggccgtggcataa

SEQ ID NO: 370581 - DNA, 30 bp, Artificial Sequence
  Synthetic oligonucleotide
tgtagatgaaggggtcgtgcgttggcataa

SEQ ID NO: 370582 - DNA, 30 bp, Artificial Sequence
  Synthetic oligonucleotide
gaagttctgatagggcaccggagtgcataa

SEQ ID NO: 370583 - DNA, 30 bp, Artificial Sequence
  Synthetic oligonucleotide
gtgagcttcaggttatagtctattgcataa

SEQ ID NO: 370584 - DNA, 30 bp, Artificial Sequence
  Synthetic oligonucleotide
ttaatgcgattaattagtattcttgcataa

SEQ ID NO: 370585 - DNA, 30 bp, Artificial Sequence
  Synthetic oligonucleotide
tcgtttctcaacttgccgaggtaatcataa

SEQ ID NO: 370586 - DNA, 30 bp, Artificial Sequence
  Synthetic oligonucleotide
ttctgaaaacgtccttattcctgatcataa

SEQ ID NO: 370587 - DNA, 30 bp, Artificial Sequence
  Synthetic oligonucleotide
gctgtaggtcatctatgttgatgctcataa

SEQ ID NO: 370588 - DNA, 30 bp, Artificial Sequence
  Synthetic oligonucleotide
acaccggataagagcaggatgggttcataa

SEQ ID NO: 370589 - DNA, 30 bp, Artificial Sequence
  Synthetic oligonucleotide
caatctcaagtagcgattatcttttcataa

SEQ ID NO: 370590 - DNA, 30 bp, Artificial Sequence
  Synthetic oligonucleotide
tcttcggcgagagcggtccgtaaaagataa

SEQ ID NO: 370591 - DNA, 30 bp, Artificial Sequence
  Synthetic oligonucleotide
acgggcatatcttaacttagttcaagataa

SEQ ID NO: 370592 - DNA, 30 bp, Artificial Sequence
  Synthetic oligonucleotide
tttgatgacaaccgcattaagagaagataa

SEQ ID NO: 370593 - DNA, 30 bp, Artificial Sequence
  Synthetic oligonucleotide
tttgcagtcccttgataggatgacagataa

SEQ ID NO: 370594 - DNA, 30 bp, Artificial Sequence
  Synthetic oligonucleotide
aaaccttcgcacggtgtgagatccagataa

SEQ ID NO: 370595 - DNA, 30 bp, Artificial Sequence
  Synthetic oligonucleotide
acgctctagcgtctgtatgtacgtagataa

SEQ ID NO: 370596 - DNA, 30 bp, Artificial Sequence
  Synthetic oligonucleotide
tgtaacgtcgctccgactgaccgtagataa

SEQ ID NO: 370597 - DNA, 29 bp, Artificial Sequence
  Synthetic oligonucleotide
tctgtactagcggtgtgtgccttagataa

SEQ ID NO: 370598 - DNA, 30 bp, Artificial Sequence
  Synthetic oligonucleotide
agcgataactatggccaagtcctacgataa

SEQ ID NO: 370599 - DNA, 30 bp, Artificial Sequence
  Synthetic oligonucleotide
aatgggctcggatcgctagcccaccgataa

SEQ ID NO: 370600 - DNA, 30 bp, Artificial Sequence
  Synthetic oligonucleotide
acatttatcgagggaattaccccccgataa

SEQ ID NO: 370601 - DNA, 30 bp, Artificial Sequence
  Synthetic oligonucleotide
gcactagatagacgtctatcgtcccgataa

SEQ ID NO: 370602 - DNA, 30 bp, Artificial Sequence
  Synthetic oligonucleotide
gaaaacgagagagttttcttcaagcgataa

SEQ ID NO: 370603 - DNA, 30 bp, Artificial Sequence
  Synthetic oligonucleotide
caaccgcgtaggttactcgaagcgcgataa

SEQ ID NO: 370604 - DNA, 30 bp, Artificial Sequence
  Synthetic oligonucleotide
aactaggtatcttttcatttctcgcgataa

SEQ ID NO: 370605 - DNA, 30 bp, Artificial Sequence
  Synthetic oligonucleotide
cataacaccacgtgtttgggcctgcgataa

SEQ ID NO: 370606 - DNA, 30 bp, Artificial Sequence
  Synthetic oligonucleotide
gtacgtcgcgctcttctacggcatcgataa

SEQ ID NO: 370607 - DNA, 30 bp, Artificial Sequence
  Synthetic oligonucleotide
agcggttcgctgcagaacctctgcggataa

SEQ ID NO: 370608 - DNA, 30 bp, Artificial Sequence
  Synthetic oligonucleotide
atcgctatgccccagagccggatcggataa

SEQ ID NO: 370609 - DNA, 30 bp, Artificial Sequence
  Synthetic oligonucleotide
ttgatatcgtcatcaatagcgcggggataa

SEQ ID NO: 370610 - DNA, 30 bp, Artificial Sequence
  Synthetic oligonucleotide
gcgcacttccggtcttaaacgtggggataa

SEQ ID NO: 370611 - DNA, 30 bp, Artificial Sequence
  Synthetic oligonucleotide
gctcacccgccaaagacaacacatggataa

SEQ ID NO: 370612 - DNA, 30 bp, Artificial Sequence
  Synthetic oligonucleotide
ttcgactatctgcggtccaattttggataa

SEQ ID NO: 370613 - DNA, 30 bp, Artificial Sequence
  Synthetic oligonucleotide
gtaagctggtcagagactcagaaatgataa

SEQ ID NO: 370614 - DNA, 30 bp, Artificial Sequence
  Synthetic oligonucleotide
cgactcgcgtcttagctgaaccaatgataa

SEQ ID NO: 370615 - DNA, 30 bp, Artificial Sequence
  Synthetic oligonucleotide
cataacggagctatgggccgttaatgataa

SEQ ID NO: 370616 - DNA, 30 bp, Artificial Sequence
  Synthetic oligonucleotide
gtttaggattatggttttacgttatgataa

SEQ ID NO: 370617 - DNA, 30 bp, Artificial Sequence
  Synthetic oligonucleotide
tatctcgtgtaaggctgcatccactgataa

SEQ ID NO: 370618 - DNA, 30 bp, Artificial Sequence
  Synthetic oligonucleotide
aaggctctggagaatttgggctcctgataa

SEQ ID NO: 370619 - DNA, 30 bp, Artificial Sequence
  Synthetic oligonucleotide
atataatatgaacacttctttgagtgataa

SEQ ID NO: 370620 - DNA, 30 bp, Artificial Sequence
  Synthetic oligonucleotide
aacggtctcgtttgaacattagcgtgataa

SEQ ID NO: 370621 - DNA, 30 bp, Artificial Sequence
  Synthetic oligonucleotide
gaattaacgtgatccttacactcgtgataa

SEQ ID NO: 370622 - DNA, 30 bp, Artificial Sequence
  Synthetic oligonucleotide
aagattctccttgctgcagaccggtgataa

SEQ ID NO: 370623 - DNA, 30 bp, Artificial Sequence
  Synthetic oligonucleotide
ttaattcttttggtctggtcccggtgataa

SEQ ID NO: 370624 - DNA, 30 bp, Artificial Sequence
  Synthetic oligonucleotide
catagatttcgtttcgtcttagtttgataa

SEQ ID NO: 370625 - DNA, 30 bp, Artificial Sequence
  Synthetic oligonucleotide
ctcggaaatatccggcgggaataaatataa

SEQ ID NO: 370626 - DNA, 30 bp, Artificial Sequence
  Synthetic oligonucleotide
tgaccgcaccttcagggatgcgtaatataa

SEQ ID NO: 370627 - DNA, 30 bp, Artificial Sequence
  Synthetic oligonucleotide
tggcacgcatggatacattcagacatataa

SEQ ID NO: 370628 - DNA, 30 bp, Artificial Sequence
  Synthetic oligonucleotide
gcccgataccatttgaacgagtccatataa

SEQ ID NO: 370629 - DNA, 30 bp, Artificial Sequence
  Synthetic oligonucleotide
agtgtcttacagcacctggagcgcatataa

SEQ ID NO: 370630 - DNA, 30 bp, Artificial Sequence
  Synthetic oligonucleotide
ctccgcttcaccccatacacaggcatataa

SEQ ID NO: 370631 - DNA, 30 bp, Artificial Sequence
  Synthetic oligonucleotide
gatcattcgccattctctaaactcatataa

SEQ ID NO: 370632 - DNA, 30 bp, Artificial Sequence
  Synthetic oligonucleotide
cgttgaataacacgttgagtcttcatataa

SEQ ID NO: 370633 - DNA, 30 bp, Artificial Sequence
  Synthetic oligonucleotide
aaatcgaacaattctttaatgatgatataa

SEQ ID NO: 370634 - DNA, 30 bp, Artificial Sequence
  Synthetic oligonucleotide
ttgggactagagatcgggatcgttatataa

SEQ ID NO: 370635 - DNA, 30 bp, Artificial Sequence
  Synthetic oligonucleotide
agcgcattgtggcctcggcggtgactataa

SEQ ID NO: 370636 - DNA, 30 bp, Artificial Sequence
  Synthetic oligonucleotide
gcatcagcggagaatgcgactgacctataa

SEQ ID NO: 370637 - DNA, 30 bp, Artificial Sequence
  Synthetic oligonucleotide
gatacattaggggcttacgagtagctataa

SEQ ID NO: 370638 - DNA, 30 bp, Artificial Sequence
  Synthetic oligonucleotide
atttgggaagcataatattggtagctataa

SEQ ID NO: 370639 - DNA, 30 bp, Artificial Sequence
  Synthetic oligonucleotide
accgccttagaattattatctcatctataa

SEQ ID NO: 370640 - DNA, 30 bp, Artificial Sequence
  Synthetic oligonucleotide
tgcgaaggatatccttcgtgcgatctataa

SEQ ID NO: 370641 - DNA, 30 bp, Artificial Sequence
  Synthetic oligonucleotide
tagcgacccatgaaactacccacagtataa

SEQ ID NO: 370642 - DNA, 30 bp, Artificial Sequence
  Synthetic oligonucleotide
cggaggtatctttactggggtccagtataa

SEQ ID NO: 370643 - DNA, 30 bp, Artificial Sequence
  Synthetic oligonucleotide
gtcatagtggttcaacgaacagtagtataa

SEQ ID NO: 370644 - DNA, 30 bp, Artificial Sequence
  Synthetic oligonucleotide
taaacgaacagttgttacttattagtataa

SEQ ID NO: 370645 - DNA, 30 bp, Artificial Sequence
  Synthetic oligonucleotide
gtatggaaatgctacgacaggcgcgtataa

SEQ ID NO: 370646 - DNA, 30 bp, Artificial Sequence
  Synthetic oligonucleotide
ccgcaaccttcggcacctagcttcgtataa

SEQ ID NO: 370647 - DNA, 30 bp, Artificial Sequence
  Synthetic oligonucleotide
ttttcggggaaatctggtccttaggtataa

SEQ ID NO: 370648 - DNA, 30 bp, Artificial Sequence
  Synthetic oligonucleotide
tgtatatctagtcaagatcagacggtataa

SEQ ID NO: 370649 - DNA, 30 bp, Artificial Sequence
  Synthetic oligonucleotide
tacctcccgatttccgcgcgcgtggtataa

SEQ ID NO: 370650 - DNA, 30 bp, Artificial Sequence
  Synthetic oligonucleotide
aacccttatcttcggtagtagagtgtataa

SEQ ID NO: 370651 - DNA, 29 bp, Artificial Sequence
  Synthetic oligonucleotide
cactgtaagaggtactttgccttgtataa

SEQ ID NO: 370652 - DNA, 30 bp, Artificial Sequence
  Synthetic oligonucleotide
ctaggacgcttacttacaaaagaattataa

SEQ ID NO: 370653 - DNA, 31 bp, Artificial Sequence
  Synthetic oligonucleotide
ggtcgttctcgggttgcacggcacattataa

SEQ ID NO: 370654 - DNA, 30 bp, Artificial Sequence
  Synthetic oligonucleotide
ctaccaaagtgacatgtgggcgcattataa

SEQ ID NO: 370655 - DNA, 30 bp, Artificial Sequence
  Synthetic oligonucleotide
gtaaatacatctatatacgccaccttataa

SEQ ID NO: 370656 - DNA, 30 bp, Artificial Sequence
  Synthetic oligonucleotide
gtcgcatcccgccaccagccaatcttataa

SEQ ID NO: 370657 - DNA, 30 bp, Artificial Sequence
  Synthetic oligonucleotide
cataactgcacatagttgattgtcttataa

SEQ ID NO: 370658 - DNA, 30 bp, Artificial Sequence
  Synthetic oligonucleotide
gagggaattgtggatcacctcccgttataa

SEQ ID NO: 370659 - DNA, 30 bp, Artificial Sequence
  Synthetic oligonucleotide
ctcgacatatgaaagttgacatttttataa

SEQ ID NO: 370660 - DNA, 30 bp, Artificial Sequence
  Synthetic oligonucleotide
tgtattttctgcttagctgactcaaactaa

SEQ ID NO: 370661 - DNA, 30 bp, Artificial Sequence
  Synthetic oligonucleotide
cctaatgttaaggggcagaacggaaactaa

SEQ ID NO: 370662 - DNA, 30 bp, Artificial Sequence
  Synthetic oligonucleotide
ctactacgaattgggaccgatagcaactaa

SEQ ID NO: 370663 - DNA, 30 bp, Artificial Sequence
  Synthetic oligonucleotide
ctcattttgaccacctgggcccagaactaa

SEQ ID NO: 370664 - DNA, 30 bp, Artificial Sequence
  Synthetic oligonucleotide
caatgtctcccttctagggcagggaactaa

SEQ ID NO: 370665 - DNA, 30 bp, Artificial Sequence
  Synthetic oligonucleotide
gcgtcggtttttacaatttgtaaacactaa

SEQ ID NO: 370666 - DNA, 30 bp, Artificial Sequence
  Synthetic oligonucleotide
cttacaacggttgatttcggacgacactaa

SEQ ID NO: 370667 - DNA, 30 bp, Artificial Sequence
  Synthetic oligonucleotide
tgcatcaagactttgaagtagcgacactaa

SEQ ID NO: 370668 - DNA, 30 bp, Artificial Sequence
  Synthetic oligonucleotide
agcgtatttgtaagggcatagatacactaa

SEQ ID NO: 370669 - DNA, 30 bp, Artificial Sequence
  Synthetic oligonucleotide
tatccgaaggatacgtgatctttacactaa

SEQ ID NO: 370670 - DNA, 30 bp, Artificial Sequence
  Synthetic oligonucleotide
ggatctggagacacccgcgggcaccactaa

SEQ ID NO: 370671 - DNA, 30 bp, Artificial Sequence
  Synthetic oligonucleotide
ggagttcagctactacgacaggagcactaa

SEQ ID NO: 370672 - DNA, 30 bp, Artificial Sequence
  Synthetic oligonucleotide
agtcgtaagtgaaaaaggacatgtcactaa

SEQ ID NO: 370673 - DNA, 30 bp, Artificial Sequence
  Synthetic oligonucleotide
agtgttccatcgatcacctcaaaagactaa

SEQ ID NO: 370674 - DNA, 30 bp, Artificial Sequence
  Synthetic oligonucleotide
tgagatggtcacggttattagcaagactaa

SEQ ID NO: 370675 - DNA, 30 bp, Artificial Sequence
  Synthetic oligonucleotide
gacagcattacttttattgcgagcgactaa

SEQ ID NO: 370676 - DNA, 30 bp, Artificial Sequence
  Synthetic oligonucleotide
cccatgtttatgcgtgagagttaggactaa

SEQ ID NO: 370677 - DNA, 30 bp, Artificial Sequence
  Synthetic oligonucleotide
cgctggccaactggttttacaaatgactaa

SEQ ID NO: 370678 - DNA, 30 bp, Artificial Sequence
  Synthetic oligonucleotide
ttgccgtcccgaatctagcgcgctgactaa

SEQ ID NO: 370679 - DNA, 30 bp, Artificial Sequence
  Synthetic oligonucleotide
ctcatcctgtcgcgacggctgggtgactaa

SEQ ID NO: 370680 - DNA, 30 bp, Artificial Sequence
  Synthetic oligonucleotide
taatcttaggggtatataacttgctactaa

SEQ ID NO: 370681 - DNA, 30 bp, Artificial Sequence
  Synthetic oligonucleotide
tgcgcgtagtttcgggatctttggtactaa

SEQ ID NO: 370682 - DNA, 30 bp, Artificial Sequence
  Synthetic oligonucleotide
gtatcaataccacaaatcggtatttactaa

SEQ ID NO: 370683 - DNA, 30 bp, Artificial Sequence
  Synthetic oligonucleotide
gcacgtttatgattgaggtagtgaacctaa

SEQ ID NO: 370684 - DNA, 30 bp, Artificial Sequence
  Synthetic oligonucleotide
ttctgatgtcaatcacacacgataacctaa

SEQ ID NO: 370685 - DNA, 30 bp, Artificial Sequence
  Synthetic oligonucleotide
tccatatgcgacccattacacttcacctaa

SEQ ID NO: 370686 - DNA, 30 bp, Artificial Sequence
  Synthetic oligonucleotide
cggtatgccgttagataccgcgggacctaa

SEQ ID NO: 370687 - DNA, 30 bp, Artificial Sequence
  Synthetic oligonucleotide
gcatggtcttacacagagagcgtgacctaa

SEQ ID NO: 370688 - DNA, 31 bp, Artificial Sequence
  Synthetic oligonucleotide
gacagggtttggagttacgcgggatacctaa

SEQ ID NO: 370689 - DNA, 30 bp, Artificial Sequence
  Synthetic oligonucleotide
aaatattagcgatagtgatccaagccctaa

SEQ ID NO: 370690 - DNA, 30 bp, Artificial Sequence
  Synthetic oligonucleotide
gagaagtctgtgtcttccgactggccctaa

SEQ ID NO: 370691 - DNA, 30 bp, Artificial Sequence
  Synthetic oligonucleotide
agcccggtatttcattatttcattccctaa

SEQ ID NO: 370692 - DNA, 30 bp, Artificial Sequence
  Synthetic oligonucleotide
gctacccaacctgtacgtatgctagcctaa

SEQ ID NO: 370693 - DNA, 30 bp, Artificial Sequence
  Synthetic oligonucleotide
agagagcatgactattggactcgcgcctaa

SEQ ID NO: 370694 - DNA, 30 bp, Artificial Sequence
  Synthetic oligonucleotide
cgctagcctgagcgcagaaatgaggcctaa

SEQ ID NO: 370695 - DNA, 30 bp, Artificial Sequence
  Synthetic oligonucleotide
aaaacagcatgtttcatgcacatggcctaa

SEQ ID NO: 370696 - DNA, 30 bp, Artificial Sequence
  Synthetic oligonucleotide
gcatacagggttgttgaagccctggcctaa

SEQ ID NO: 370697 - DNA, 30 bp, Artificial Sequence
  Synthetic oligonucleotide
tgttggaaatattagaggacctttgcctaa

SEQ ID NO: 370698 - DNA, 30 bp, Artificial Sequence
  Synthetic oligonucleotide
cgtcttttatgaagatcctacaactcctaa

SEQ ID NO: 370699 - DNA, 30 bp, Artificial Sequence
  Synthetic oligonucleotide
aaatttagtaagtgccccgagatctcctaa

SEQ ID NO: 370700 - DNA, 30 bp, Artificial Sequence
  Synthetic oligonucleotide
gaaatgacacggcaaatcgagttctcctaa

SEQ ID NO: 370701 - DNA, 30 bp, Artificial Sequence
  Synthetic oligonucleotide
gccttggcgaacggatgcatatagtcctaa

SEQ ID NO: 370702 - DNA, 30 bp, Artificial Sequence
  Synthetic oligonucleotide
ggggtttcatcaaattttcgtgggtcctaa

SEQ ID NO: 370703 - DNA, 30 bp, Artificial Sequence
  Synthetic oligonucleotide
ttcatctagttttggacaggggtgtcctaa

SEQ ID NO: 370704 - DNA, 30 bp, Artificial Sequence
  Synthetic oligonucleotide
cgagtaacatatacggatactagttcctaa

SEQ ID NO: 370705 - DNA, 30 bp, Artificial Sequence
  Synthetic oligonucleotide
cgtaataccgacacaagattggaaagctaa

SEQ ID NO: 370706 - DNA, 30 bp, Artificial Sequence
  Synthetic oligonucleotide
ctgttggtcaggtgctcccgcagaagctaa

SEQ ID NO: 370707 - DNA, 30 bp, Artificial Sequence
  Synthetic oligonucleotide
gcttcaaaacggcggcccagtataagctaa

SEQ ID NO: 370708 - DNA, 30 bp, Artificial Sequence
  Synthetic oligonucleotide
tatttgagggttgaagtgacaaccagctaa

SEQ ID NO: 370709 - DNA, 30 bp, Artificial Sequence
  Synthetic oligonucleotide
caagattgatagtggtggcgtaggagctaa

SEQ ID NO: 370710 - DNA, 30 bp, Artificial Sequence
  Synthetic oligonucleotide
ttttcaagcttcgcacaagtattgagctaa

SEQ ID NO: 370711 - DNA, 30 bp, Artificial Sequence
  Synthetic oligonucleotide
taatataagctatcatagctgaatagctaa

SEQ ID NO: 370712 - DNA, 30 bp, Artificial Sequence
  Synthetic oligonucleotide
acaccgtcgctgcgcgcttcctatagctaa

SEQ ID NO: 370713 - DNA, 30 bp, Artificial Sequence
  Synthetic oligonucleotide
gtaacgcagacatacccgtgccgtagctaa

SEQ ID NO: 370714 - DNA, 30 bp, Artificial Sequence
  Synthetic oligonucleotide
cgagttactcatgctcgtggagtccgctaa

SEQ ID NO: 370715 - DNA, 30 bp, Artificial Sequence
  Synthetic oligonucleotide
ggcagacagaatgaatgtccgcagcgctaa

SEQ ID NO: 370716 - DNA, 30 bp, Artificial Sequence
  Synthetic oligonucleotide
ttgatccacccgcgcctattaacgcgctaa

SEQ ID NO: 370717 - DNA, 30 bp, Artificial Sequence
  Synthetic oligonucleotide
gatttttaagctcaagctaaagtgcgctaa

SEQ ID NO: 370718 - DNA, 30 bp, Artificial Sequence
  Synthetic oligonucleotide
cagcgccactttggcgcccaaaaaggctaa

SEQ ID NO: 370719 - DNA, 30 bp, Artificial Sequence
  Synthetic oligonucleotide
gctctgtccgcactgtcgaagtaaggctaa

SEQ ID NO: 370720 - DNA, 30 bp, Artificial Sequence
  Synthetic oligonucleotide
gtggggtatatgagactcaatggaggctaa

SEQ ID NO: 370721 - DNA, 30 bp, Artificial Sequence
  Synthetic oligonucleotide
cgctccacccagtaattcaaagtcggctaa

SEQ ID NO: 370722 - DNA, 30 bp, Artificial Sequence
  Synthetic oligonucleotide
acctgcaccaccgtttgcggacagggctaa

SEQ ID NO: 370723 - DNA, 30 bp, Artificial Sequence
  Synthetic oligonucleotide
aaaatgggctcgctgactgtttagggctaa

SEQ ID NO: 370724 - DNA, 30 bp, Artificial Sequence
  Synthetic oligonucleotide
tgttcgtctgctagtacggctacgggctaa

SEQ ID NO: 370725 - DNA, 30 bp, Artificial Sequence
  Synthetic oligonucleotide
ggtacccatcggtattttgccaatggctaa

SEQ ID NO: 370726 - DNA, 30 bp, Artificial Sequence
  Synthetic oligonucleotide
gtagtctgcgcactgtgtttatatggctaa

SEQ ID NO: 370727 - DNA, 30 bp, Artificial Sequence
  Synthetic oligonucleotide
tctgttcaggcctctatgaaggctggctaa

SEQ ID NO: 370728 - DNA, 30 bp, Artificial Sequence
  Synthetic oligonucleotide
gtaatgtcaagcatgccgtcgaaatgctaa

SEQ ID NO: 370729 - DNA, 30 bp, Artificial Sequence
  Synthetic oligonucleotide
ccataattgcttggtaatagtccatgctaa

SEQ ID NO: 370730 - DNA, 30 bp, Artificial Sequence
  Synthetic oligonucleotide
accaaaagaatcagcaagttgctatgctaa

SEQ ID NO: 370731 - DNA, 30 bp, Artificial Sequence
  Synthetic oligonucleotide
cactatctagtccgattaatctcgtgctaa

SEQ ID NO: 370732 - DNA, 30 bp, Artificial Sequence
  Synthetic oligonucleotide
gtctcatgccctacaaccgggcattgctaa

SEQ ID NO: 370733 - DNA, 30 bp, Artificial Sequence
  Synthetic oligonucleotide
gtatacctaccgcgctcaactgcaatctaa

SEQ ID NO: 370734 - DNA, 30 bp, Artificial Sequence
  Synthetic oligonucleotide
gattaagaacgtggccgcttagcgatctaa

SEQ ID NO: 370735 - DNA, 30 bp, Artificial Sequence
  Synthetic oligonucleotide
caatatctgccttgggctccatcgatctaa

SEQ ID NO: 370736 - DNA, 30 bp, Artificial Sequence
  Synthetic oligonucleotide
tgaagttcgtgaacactctgggatatctaa

SEQ ID NO: 370737 - DNA, 29 bp, Artificial Sequence
  Synthetic oligonucleotide
aactacaatggcggtaacgagttatctaa

SEQ ID NO: 370738 - DNA, 30 bp, Artificial Sequence
  Synthetic oligonucleotide
aaacaactcagtgtcagttaacacctctaa

SEQ ID NO: 370739 - DNA, 30 bp, Artificial Sequence
  Synthetic oligonucleotide
ccgatgggccagcacgttgctgccctctaa

SEQ ID NO: 370740 - DNA, 30 bp, Artificial Sequence
  Synthetic oligonucleotide
gcgcggtcgtcggctttgagtactctctaa

SEQ ID NO: 370741 - DNA, 30 bp, Artificial Sequence
  Synthetic oligonucleotide
cggggaccctgccacacatcatgtctctaa

SEQ ID NO: 370742 - DNA, 30 bp, Artificial Sequence
  Synthetic oligonucleotide
cagcgtttggcgtggcttaataaagtctaa

SEQ ID NO: 370743 - DNA, 30 bp, Artificial Sequence
  Synthetic oligonucleotide
tttacactatactgatctggcccagtctaa

SEQ ID NO: 370744 - DNA, 30 bp, Artificial Sequence
  Synthetic oligonucleotide
tacaaatcgcaatctttcgtgtgagtctaa

SEQ ID NO: 370745 - DNA, 30 bp, Artificial Sequence
  Synthetic oligonucleotide
taatggtaagaatatgttttaggggtctaa

SEQ ID NO: 370746 - DNA, 30 bp, Artificial Sequence
  Synthetic oligonucleotide
cccgtatctgctctacgcgagggggtctaa

SEQ ID NO: 370747 - DNA, 30 bp, Artificial Sequence
  Synthetic oligonucleotide
gatatgccattatttcgtggcgtggtctaa

SEQ ID NO: 370748 - DNA, 30 bp, Artificial Sequence
  Synthetic oligonucleotide
tccagaaatatcgccacggtgcttgtctaa

SEQ ID NO: 370749 - DNA, 30 bp, Artificial Sequence
  Synthetic oligonucleotide
ctgccggtagtaggacctgaggcattctaa

SEQ ID NO: 370750 - DNA, 30 bp, Artificial Sequence
  Synthetic oligonucleotide
gatgcacgcacaatagcctggtcattctaa

SEQ ID NO: 370751 - DNA, 30 bp, Artificial Sequence
  Synthetic oligonucleotide
gagagacatagcggggaggggtgcttctaa

SEQ ID NO: 370752 - DNA, 30 bp, Artificial Sequence
  Synthetic oligonucleotide
catatacattgcccaagcagcaggttctaa

SEQ ID NO: 370753 - DNA, 30 bp, Artificial Sequence
  Synthetic oligonucleotide
tatggcgcccgccaagggtgtcaaaagtaa

SEQ ID NO: 370754 - DNA, 30 bp, Artificial Sequence
  Synthetic oligonucleotide
ttaaactcccgtggtatgaaccgcaagtaa

SEQ ID NO: 370755 - DNA, 30 bp, Artificial Sequence
  Synthetic oligonucleotide
gttgctttcttaaacacctatttcaagtaa

SEQ ID NO: 370756 - DNA, 30 bp, Artificial Sequence
  Synthetic oligonucleotide
agtgactaaatatcgtcgtatttcaagtaa

SEQ ID NO: 370757 - DNA, 30 bp, Artificial Sequence
  Synthetic oligonucleotide
gcctacgcggattgtcataacccgaagtaa

SEQ ID NO: 370758 - DNA, 30 bp, Artificial Sequence
  Synthetic oligonucleotide
attctcctccatccagacccggggaagtaa

SEQ ID NO: 370759 - DNA, 30 bp, Artificial Sequence
  Synthetic oligonucleotide
ttgcctccggcgtcggacatgagtaagtaa

SEQ ID NO: 370760 - DNA, 30 bp, Artificial Sequence
  Synthetic oligonucleotide
agtggcaattgtataagcctcggtaagtaa

SEQ ID NO: 370761 - DNA, 30 bp, Artificial Sequence
  Synthetic oligonucleotide
gttgatggcaacgcggttaataaacagtaa

SEQ ID NO: 370762 - DNA, 30 bp, Artificial Sequence
  Synthetic oligonucleotide
ttaatggggcggtaacctacatgacagtaa

SEQ ID NO: 370763 - DNA, 30 bp, Artificial Sequence
  Synthetic oligonucleotide
tctcgaaccacggtgtgtggaaagcagtaa

SEQ ID NO: 370764 - DNA, 30 bp, Artificial Sequence
  Synthetic oligonucleotide
aagcgagttatcgaggaccgagagcagtaa

SEQ ID NO: 370765 - DNA, 30 bp, Artificial Sequence
  Synthetic oligonucleotide
gtgaaacattctcgaggtagctagcagtaa

SEQ ID NO: 370766 - DNA, 30 bp, Artificial Sequence
  Synthetic oligonucleotide
atcgctccccgggtcggtacagcgcagtaa

SEQ ID NO: 370767 - DNA, 30 bp, Artificial Sequence
  Synthetic oligonucleotide
gggtcggagacttcgccctgaatgcagtaa

SEQ ID NO: 370768 - DNA, 30 bp, Artificial Sequence
  Synthetic oligonucleotide
acctctaggatcaagccgaccttgcagtaa

SEQ ID NO: 370769 - DNA, 30 bp, Artificial Sequence
  Synthetic oligonucleotide
gtctgttatgaccatgcgagaggtcagtaa

SEQ ID NO: 370770 - DNA, 30 bp, Artificial Sequence
  Synthetic oligonucleotide
ctctagctcgggcagggtccttgtcagtaa

SEQ ID NO: 370771 - DNA, 30 bp, Artificial Sequence
  Synthetic oligonucleotide
tggctacgcggtagtcagatctttcagtaa

SEQ ID NO: 370772 - DNA, 30 bp, Artificial Sequence
  Synthetic oligonucleotide
tatgatttcatagtaggtgctgtagagtaa

SEQ ID NO: 370773 - DNA, 30 bp, Artificial Sequence
  Synthetic oligonucleotide
aggtatttgacagcagagcacctggagtaa

SEQ ID NO: 370774 - DNA, 30 bp, Artificial Sequence
  Synthetic oligonucleotide
aactttgagtgagatggcgggagtgagtaa

SEQ ID NO: 370775 - DNA, 30 bp, Artificial Sequence
  Synthetic oligonucleotide
ccaacgaggatccgtactttctgtgagtaa

SEQ ID NO: 370776 - DNA, 30 bp, Artificial Sequence
  Synthetic oligonucleotide
gtaacgatgcatatgttgtaggtatagtaa

SEQ ID NO: 370777 - DNA, 30 bp, Artificial Sequence
  Synthetic oligonucleotide
gaggtcttcggcagacgtagcgagtagtaa

SEQ ID NO: 370778 - DNA, 30 bp, Artificial Sequence
  Synthetic oligonucleotide
gagttcctcaagcctctccaagtgtagtaa

SEQ ID NO: 370779 - DNA, 30 bp, Artificial Sequence
  Synthetic oligonucleotide
tcaactattcaatcttgtcgctattagtaa

SEQ ID NO: 370780 - DNA, 30 bp, Artificial Sequence
  Synthetic oligonucleotide
tagctacggtatgtggtttggtcttagtaa

SEQ ID NO: 370781 - DNA, 30 bp, Artificial Sequence
  Synthetic oligonucleotide
ctgtggtacgtaatgctactgcaaacgtaa

SEQ ID NO: 370782 - DNA, 30 bp, Artificial Sequence
  Synthetic oligonucleotide
agctctgttgcctcttggagccacacgtaa

SEQ ID NO: 370783 - DNA, 30 bp, Artificial Sequence
  Synthetic oligonucleotide
ggactgcgtagcagcgatcctgtcacgtaa

SEQ ID NO: 370784 - DNA, 30 bp, Artificial Sequence
  Synthetic oligonucleotide
taatatgggatgatcgcacgtgagacgtaa

SEQ ID NO: 370785 - DNA, 30 bp, Artificial Sequence
  Synthetic oligonucleotide
ttaagttctcaatatggatacacgacgtaa

SEQ ID NO: 370786 - DNA, 30 bp, Artificial Sequence
  Synthetic oligonucleotide
atatgaatcggggcctcatgcttgacgtaa

SEQ ID NO: 370787 - DNA, 30 bp, Artificial Sequence
  Synthetic oligonucleotide
tacacgatccggatctcggcgccgccgtaa

SEQ ID NO: 370788 - DNA, 30 bp, Artificial Sequence
  Synthetic oligonucleotide
tgaccctactaagttgaatgtccgccgtaa

SEQ ID NO: 370789 - DNA, 30 bp, Artificial Sequence
  Synthetic oligonucleotide
gtccatcacttttcagaaaattcgccgtaa

SEQ ID NO: 370790 - DNA, 30 bp, Artificial Sequence
  Synthetic oligonucleotide
attccagttatcaacgtttcattgccgtaa

SEQ ID NO: 370791 - DNA, 30 bp, Artificial Sequence
  Synthetic oligonucleotide
acgtattaggactataagcgtactccgtaa

SEQ ID NO: 370792 - DNA, 31 bp, Artificial Sequence
  Synthetic oligonucleotide
aaacagttcttacgtcggcgatcaagcgtaa

SEQ ID NO: 370793 - DNA, 30 bp, Artificial Sequence
  Synthetic oligonucleotide
tgtacttagagctcagaaggcgaagcgtaa

SEQ ID NO: 370794 - DNA, 30 bp, Artificial Sequence
  Synthetic oligonucleotide
ttcgctaaggtggtgcgaccgtcagcgtaa

SEQ ID NO: 370795 - DNA, 30 bp, Artificial Sequence
  Synthetic oligonucleotide
ggatagtgctatacattgctatacgcgtaa

SEQ ID NO: 370796 - DNA, 30 bp, Artificial Sequence
  Synthetic oligonucleotide
gacccaagtgttatgcaccttaccgcgtaa

SEQ ID NO: 370797 - DNA, 30 bp, Artificial Sequence
  Synthetic oligonucleotide
tttatggactccttagggttcgccgcgtaa

SEQ ID NO: 370798 - DNA, 30 bp, Artificial Sequence
  Synthetic oligonucleotide
ccaatatatgagtacagacctctcgcgtaa

SEQ ID NO: 370799 - DNA, 30 bp, Artificial Sequence
  Synthetic oligonucleotide
gcatgcgcataacttaggtcttctgcgtaa

SEQ ID NO: 370800 - DNA, 30 bp, Artificial Sequence
  Synthetic oligonucleotide
ggagtccgtgttatcatcaaagactcgtaa

SEQ ID NO: 370801 - DNA, 30 bp, Artificial Sequence
  Synthetic oligonucleotide
gtaggtctgtctggcctttcagactcgtaa

SEQ ID NO: 370802 - DNA, 30 bp, Artificial Sequence
  Synthetic oligonucleotide
ttactaacactgtgcatcaggccctcgtaa

SEQ ID NO: 370803 - DNA, 30 bp, Artificial Sequence
  Synthetic oligonucleotide
gcgcttcgaatttctgcgaacctctcgtaa

SEQ ID NO: 370804 - DNA, 30 bp, Artificial Sequence
  Synthetic oligonucleotide
gtccttcatagtccggcgtgtgcgtcgtaa

SEQ ID NO: 370805 - DNA, 30 bp, Artificial Sequence
  Synthetic oligonucleotide
aaaaatttcaggtaagtcgaagtgtcgtaa

SEQ ID NO: 370806 - DNA, 30 bp, Artificial Sequence
  Synthetic oligonucleotide
gagcgaattctcatgtgttaacattcgtaa

SEQ ID NO: 370807 - DNA, 30 bp, Artificial Sequence
  Synthetic oligonucleotide
ataaacgccaattaactaggttaaaggtaa

SEQ ID NO: 370808 - DNA, 30 bp, Artificial Sequence
  Synthetic oligonucleotide
cggccagtgtggatgggtaactcaaggtaa

SEQ ID NO: 370809 - DNA, 30 bp, Artificial Sequence
  Synthetic oligonucleotide
ctcattcggttattgcgcgcatgaaggtaa

SEQ ID NO: 370810 - DNA, 30 bp, Artificial Sequence
  Synthetic oligonucleotide
ccgggtagtgttcgccgattatacaggtaa

SEQ ID NO: 370811 - DNA, 30 bp, Artificial Sequence
  Synthetic oligonucleotide
gaaacttcaggtataagaggttacaggtaa

SEQ ID NO: 370812 - DNA, 30 bp, Artificial Sequence
  Synthetic oligonucleotide
aaagcatgtattagtgatcgatgcaggtaa

SEQ ID NO: 370813 - DNA, 30 bp, Artificial Sequence
  Synthetic oligonucleotide
taagttggagcattatcaccgtgcaggtaa

SEQ ID NO: 370814 - DNA, 30 bp, Artificial Sequence
  Synthetic oligonucleotide
cgctgctaatgctgtacaacgatcaggtaa

SEQ ID NO: 370815 - DNA, 30 bp, Artificial Sequence
  Synthetic oligonucleotide
gtaggtgatttgtgttcgtggatcaggtaa

SEQ ID NO: 370816 - DNA, 30 bp, Artificial Sequence
  Synthetic oligonucleotide
gaatcccataccaaaccgaaattcaggtaa

SEQ ID NO: 370817 - DNA, 30 bp, Artificial Sequence
  Synthetic oligonucleotide
tcttagaataagctggcatatcctaggtaa

SEQ ID NO: 370818 - DNA, 30 bp, Artificial Sequence
  Synthetic oligonucleotide
taatttccgaggtcagttattgctaggtaa

SEQ ID NO: 370819 - DNA, 30 bp, Artificial Sequence
  Synthetic oligonucleotide
aatacgtatggtacaacgtctcaacggtaa

SEQ ID NO: 370820 - DNA, 30 bp, Artificial Sequence
  Synthetic oligonucleotide
ttacacttcaggtacagttaaacacggtaa

SEQ ID NO: 370821 - DNA, 30 bp, Artificial Sequence
  Synthetic oligonucleotide
tcctgtaagaagttcatgcttacacggtaa

SEQ ID NO: 370822 - DNA, 30 bp, Artificial Sequence
  Synthetic oligonucleotide
ttgaggctgtgaagttacgtaagacggtaa

SEQ ID NO: 370823 - DNA, 30 bp, Artificial Sequence
  Synthetic oligonucleotide
gcgttgttgaaaagccagcgtttacggtaa

SEQ ID NO: 370824 - DNA, 30 bp, Artificial Sequence
  Synthetic oligonucleotide
attaaactcaagcactttcgtgcccggtaa

SEQ ID NO: 370825 - DNA, 30 bp, Artificial Sequence
  Synthetic oligonucleotide
cttcttcatgagttaagttggtcgcggtaa

SEQ ID NO: 370826 - DNA, 30 bp, Artificial Sequence
  Synthetic oligonucleotide
tgtgacacgtggcagtttatcaggcggtaa

SEQ ID NO: 370827 - DNA, 30 bp, Artificial Sequence
  Synthetic oligonucleotide
atgggattctagggtggtataatgcggtaa

SEQ ID NO: 370828 - DNA, 30 bp, Artificial Sequence
  Synthetic oligonucleotide
tttgaactaaagagcaaccaaattcggtaa

SEQ ID NO: 370829 - DNA, 30 bp, Artificial Sequence
  Synthetic oligonucleotide
attcggggaattcgttagcgtacagggtaa

SEQ ID NO: 370830 - DNA, 30 bp, Artificial Sequence
  Synthetic oligonucleotide
accgtctcgtatctgggtagctcagggtaa

SEQ ID NO: 370831 - DNA, 30 bp, Artificial Sequence
  Synthetic oligonucleotide
ccgatggtatattatactgcaggagggtaa

SEQ ID NO: 370832 - DNA, 30 bp, Artificial Sequence
  Synthetic oligonucleotide
ctggaccctcaagcatacggtctagggtaa

SEQ ID NO: 370833 - DNA, 30 bp, Artificial Sequence
  Synthetic oligonucleotide
gtccagtccccgcccccggagttagggtaa

SEQ ID NO: 370834 - DNA, 30 bp, Artificial Sequence
  Synthetic oligonucleotide
gcgcgggtagcggctcgaggaaacgggtaa

SEQ ID NO: 370835 - DNA, 30 bp, Artificial Sequence
  Synthetic oligonucleotide
gaagctgtatagaggcattaaagcgggtaa

SEQ ID NO: 370836 - DNA, 30 bp, Artificial Sequence
  Synthetic oligonucleotide
aggtagatgaagcagcccatcttcgggtaa

SEQ ID NO: 370837 - DNA, 30 bp, Artificial Sequence
  Synthetic oligonucleotide
gcacattttcggagcacgattttcgggtaa

SEQ ID NO: 370838 - DNA, 30 bp, Artificial Sequence
  Synthetic oligonucleotide
aaattagaaagcgccttcatataggggtaa

SEQ ID NO: 370839 - DNA, 30 bp, Artificial Sequence
  Synthetic oligonucleotide
ctttatattgaaagtgcgatataggggtaa

SEQ ID NO: 370840 - DNA, 30 bp, Artificial Sequence
  Synthetic oligonucleotide
ctacccagagacacaaaagatactgggtaa

SEQ ID NO: 370841 - DNA, 30 bp, Artificial Sequence
  Synthetic oligonucleotide
acataaaaagtcccccggacaattgggtaa

SEQ ID NO: 370842 - DNA, 30 bp, Artificial Sequence
  Synthetic oligonucleotide
tcttaggggttacccatgcacctatggtaa

SEQ ID NO: 370843 - DNA, 30 bp, Artificial Sequence
  Synthetic oligonucleotide
ttggcaagccactgcgaagttgactggtaa

SEQ ID NO: 370844 - DNA, 30 bp, Artificial Sequence
  Synthetic oligonucleotide
gtcataaatcagttacgaacggcctggtaa

SEQ ID NO: 370845 - DNA, 30 bp, Artificial Sequence
  Synthetic oligonucleotide
ataacttagtgcctcatctgacagtggtaa

SEQ ID NO: 370846 - DNA, 30 bp, Artificial Sequence
  Synthetic oligonucleotide
tgataggacgttcgcacgtggccgtggtaa

SEQ ID NO: 370847 - DNA, 30 bp, Artificial Sequence
  Synthetic oligonucleotide
tcacattaacttctaggagctctgtggtaa

SEQ ID NO: 370848 - DNA, 30 bp, Artificial Sequence
  Synthetic oligonucleotide
ggtcttggcgtcgccaaactccattggtaa

SEQ ID NO: 370849 - DNA, 30 bp, Artificial Sequence
  Synthetic oligonucleotide
ggaagaaattacttaggttctcgttggtaa

SEQ ID NO: 370850 - DNA, 30 bp, Artificial Sequence
  Synthetic oligonucleotide
ctgcgtagcacgtccttagtttaaatgtaa

SEQ ID NO: 370851 - DNA, 30 bp, Artificial Sequence
  Synthetic oligonucleotide
gttatgtgtcctttgagcactacaatgtaa

SEQ ID NO: 370852 - DNA, 30 bp, Artificial Sequence
  Synthetic oligonucleotide
gcggggacgcatcttgtcactcgaatgtaa

SEQ ID NO: 370853 - DNA, 30 bp, Artificial Sequence
  Synthetic oligonucleotide
cgcagagcaaaatgctcttaggtaatgtaa

SEQ ID NO: 370854 - DNA, 30 bp, Artificial Sequence
  Synthetic oligonucleotide
gtgatagaggtcttatgcggcttaatgtaa

SEQ ID NO: 370855 - DNA, 30 bp, Artificial Sequence
  Synthetic oligonucleotide
gcaaccgcccacggacgcttagcgatgtaa

SEQ ID NO: 370856 - DNA, 30 bp, Artificial Sequence
  Synthetic oligonucleotide
attcattcctgagggttactggcgatgtaa

SEQ ID NO: 370857 - DNA, 28 bp, Artificial Sequence
  Synthetic oligonucleotide
tagagggatttatgtaagcatgatgtaa

SEQ ID NO: 370858 - DNA, 30 bp, Artificial Sequence
  Synthetic oligonucleotide
cgggggcggggcgaacttgtattgatgtaa

SEQ ID NO: 370859 - DNA, 30 bp, Artificial Sequence
  Synthetic oligonucleotide
ggttcgtgtgatgtatcagttaatatgtaa

SEQ ID NO: 370860 - DNA, 30 bp, Artificial Sequence
  Synthetic oligonucleotide
ctagcggttttcgtccctattactatgtaa

SEQ ID NO: 370861 - DNA, 30 bp, Artificial Sequence
  Synthetic oligonucleotide
aaacatagtaaagcttatggtgttatgtaa

SEQ ID NO: 370862 - DNA, 30 bp, Artificial Sequence
  Synthetic oligonucleotide
aatttgttattaggagccaaggaactgtaa

SEQ ID NO: 370863 - DNA, 30 bp, Artificial Sequence
  Synthetic oligonucleotide
aatacttatgtttgtgcgtacccactgtaa

SEQ ID NO: 370864 - DNA, 30 bp, Artificial Sequence
  Synthetic oligonucleotide
gtcgtccggtcctatagaaagatactgtaa

SEQ ID NO: 370865 - DNA, 30 bp, Artificial Sequence
  Synthetic oligonucleotide
ctgggatgcaggccacaaaaccatctgtaa

SEQ ID NO: 370866 - DNA, 30 bp, Artificial Sequence
  Synthetic oligonucleotide
acttctggttctgtggggtgcgaagtgtaa

SEQ ID NO: 370867 - DNA, 30 bp, Artificial Sequence
  Synthetic oligonucleotide
tagatgtttcggtgcggtatgcgcgtgtaa

SEQ ID NO: 370868 - DNA, 30 bp, Artificial Sequence
  Synthetic oligonucleotide
ggccatgtcattgaatacctcgctgtgtaa

SEQ ID NO: 370869 - DNA, 30 bp, Artificial Sequence
  Synthetic oligonucleotide
gatcacgcggaagaaaaatcctgtgtgtaa

SEQ ID NO: 370870 - DNA, 30 bp, Artificial Sequence
  Synthetic oligonucleotide
ttatcctggtactaggccgaaaccttgtaa

SEQ ID NO: 370871 - DNA, 30 bp, Artificial Sequence
  Synthetic oligonucleotide
ccaatagataacgctgtttaaaagttgtaa

SEQ ID NO: 370872 - DNA, 30 bp, Artificial Sequence
  Synthetic oligonucleotide
tagtaacaaccctaggtatcatggttgtaa

SEQ ID NO: 370873 - DNA, 30 bp, Artificial Sequence
  Synthetic oligonucleotide
gaatgcgtagtctctaagagaaaaaattaa

SEQ ID NO: 370874 - DNA, 30 bp, Artificial Sequence
  Synthetic oligonucleotide
tgtgaaatcgacttgggtaagaaaaattaa

SEQ ID NO: 370875 - DNA, 30 bp, Artificial Sequence
  Synthetic oligonucleotide
caatagtggagaatgttgcgttaaaattaa

SEQ ID NO: 370876 - DNA, 30 bp, Artificial Sequence
  Synthetic oligonucleotide
ccaagcgatatagtcaaaccaaacaattaa

SEQ ID NO: 370877 - DNA, 30 bp, Artificial Sequence
  Synthetic oligonucleotide
ttacagtgtgtcggatttgcacgcaattaa

SEQ ID NO: 370878 - DNA, 30 bp, Artificial Sequence
  Synthetic oligonucleotide
accggttcatttgtactgtgatgcaattaa

SEQ ID NO: 370879 - DNA, 30 bp, Artificial Sequence
  Synthetic oligonucleotide
tagaggtactgtgaattacgaaataattaa

SEQ ID NO: 370880 - DNA, 30 bp, Artificial Sequence
  Synthetic oligonucleotide
tggcaaagggattgagaggcacataattaa

SEQ ID NO: 370881 - DNA, 30 bp, Artificial Sequence
  Synthetic oligonucleotide
ccctttatagtggctacggttcataattaa

SEQ ID NO: 370882 - DNA, 30 bp, Artificial Sequence
  Synthetic oligonucleotide
ggcttgtagtgagggatattaagtaattaa

SEQ ID NO: 370883 - DNA, 30 bp, Artificial Sequence
  Synthetic oligonucleotide
gtacttttccgtgaggtgtgtattaattaa

SEQ ID NO: 370884 - DNA, 30 bp, Artificial Sequence
  Synthetic oligonucleotide
tgaacaagcatgagtagagttattaattaa

SEQ ID NO: 370885 - DNA, 30 bp, Artificial Sequence
  Synthetic oligonucleotide
cttaggctaaattgcttccagatacattaa

SEQ ID NO: 370886 - DNA, 30 bp, Artificial Sequence
  Synthetic oligonucleotide
gttagtggtacctggcacaaactccattaa

SEQ ID NO: 370887 - DNA, 30 bp, Artificial Sequence
  Synthetic oligonucleotide
caagcgcgtaatttggttgcatatcattaa

SEQ ID NO: 370888 - DNA, 30 bp, Artificial Sequence
  Synthetic oligonucleotide
tctccttcgaagagtgttcactctcattaa

SEQ ID NO: 370889 - DNA, 30 bp, Artificial Sequence
  Synthetic oligonucleotide
ggggttcctatagtcacatcttaagattaa

SEQ ID NO: 370890 - DNA, 30 bp, Artificial Sequence
  Synthetic oligonucleotide
ccttttaatattccggaaaagccagattaa

SEQ ID NO: 370891 - DNA, 30 bp, Artificial Sequence
  Synthetic oligonucleotide
cgtactttgcatttatagttagcagattaa

SEQ ID NO: 370892 - DNA, 30 bp, Artificial Sequence
  Synthetic oligonucleotide
tgaaacggacatatggccttctgagattaa

SEQ ID NO: 370893 - DNA, 30 bp, Artificial Sequence
  Synthetic oligonucleotide
accatcctatggtaggccactcccgattaa

SEQ ID NO: 370894 - DNA, 30 bp, Artificial Sequence
  Synthetic oligonucleotide
taaggctatcctacttatcgaagtgattaa

SEQ ID NO: 370895 - DNA, 30 bp, Artificial Sequence
  Synthetic oligonucleotide
ttcagttaaacggatggcgcatttgattaa

SEQ ID NO: 370896 - DNA, 30 bp, Artificial Sequence
  Synthetic oligonucleotide
tttcgagtacaacacagattctcatattaa

SEQ ID NO: 370897 - DNA, 30 bp, Artificial Sequence
  Synthetic oligonucleotide
taaccgctcgtccagaacacatggtattaa

SEQ ID NO: 370898 - DNA, 30 bp, Artificial Sequence
  Synthetic oligonucleotide
gtcaggtagtgtacaagtttgttgtattaa

SEQ ID NO: 370899 - DNA, 30 bp, Artificial Sequence
  Synthetic oligonucleotide
tagattcacgacttggacggttattattaa

SEQ ID NO: 370900 - DNA, 30 bp, Artificial Sequence
  Synthetic oligonucleotide
gattcagctagagataatgtaggaacttaa

SEQ ID NO: 370901 - DNA, 30 bp, Artificial Sequence
  Synthetic oligonucleotide
gtcacgaaccctgtgaaccttttaacttaa

SEQ ID NO: 370902 - DNA, 30 bp, Artificial Sequence
  Synthetic oligonucleotide
tgcactcatgttgggtagcagcacacttaa

SEQ ID NO: 370903 - DNA, 30 bp, Artificial Sequence
  Synthetic oligonucleotide
tgatagacgtacagtaaatattgcacttaa

SEQ ID NO: 370904 - DNA, 30 bp, Artificial Sequence
  Synthetic oligonucleotide
atcacaagagtccccgtccgtctcacttaa

SEQ ID NO: 370905 - DNA, 30 bp, Artificial Sequence
  Synthetic oligonucleotide
cgggaatcgcaatattgtcctttcacttaa

SEQ ID NO: 370906 - DNA, 30 bp, Artificial Sequence
  Synthetic oligonucleotide
gaaacacaattacttgtccttgcgacttaa

SEQ ID NO: 370907 - DNA, 30 bp, Artificial Sequence
  Synthetic oligonucleotide
cccaaggatgggcacgataacactacttaa

SEQ ID NO: 370908 - DNA, 30 bp, Artificial Sequence
  Synthetic oligonucleotide
aattccatgcgaagatcctgccttacttaa

SEQ ID NO: 370909 - DNA, 30 bp, Artificial Sequence
  Synthetic oligonucleotide
aatggaaagtttatccattaacaaccttaa

SEQ ID NO: 370910 - DNA, 30 bp, Artificial Sequence
  Synthetic oligonucleotide
ataatagcagattgagatccttaaccttaa

SEQ ID NO: 370911 - DNA, 30 bp, Artificial Sequence
  Synthetic oligonucleotide
caggaatcggtgaacggactgctcccttaa

SEQ ID NO: 370912 - DNA, 30 bp, Artificial Sequence
  Synthetic oligonucleotide
ttgagtgcgcggcgactttactagccttaa

SEQ ID NO: 370913 - DNA, 30 bp, Artificial Sequence
  Synthetic oligonucleotide
ctttagtaacgtataatatataggccttaa

SEQ ID NO: 370914 - DNA, 30 bp, Artificial Sequence
  Synthetic oligonucleotide
tgcggccggcaacagagcactctgccttaa

SEQ ID NO: 370915 - DNA, 30 bp, Artificial Sequence
  Synthetic oligonucleotide
tgggtgcccacacggtacgattaagcttaa

SEQ ID NO: 370916 - DNA, 30 bp, Artificial Sequence
  Synthetic oligonucleotide
ggaacttcgctgacacggccttaagcttaa

SEQ ID NO: 370917 - DNA, 30 bp, Artificial Sequence
  Synthetic oligonucleotide
agcaacccgcccttaaaccatggagcttaa

SEQ ID NO: 370918 - DNA, 30 bp, Artificial Sequence
  Synthetic oligonucleotide
tcccgcgcgcacaaattacctttagcttaa

SEQ ID NO: 370919 - DNA, 30 bp, Artificial Sequence
  Synthetic oligonucleotide
gttacattctttcaaacccggggcgcttaa

SEQ ID NO: 370920 - DNA, 30 bp, Artificial Sequence
  Synthetic oligonucleotide
ctggcgcacacattctagtgcttcgcttaa

SEQ ID NO: 370921 - DNA, 30 bp, Artificial Sequence
  Synthetic oligonucleotide
ttgcccagctctattcaacaaacggcttaa

SEQ ID NO: 370922 - DNA, 30 bp, Artificial Sequence
  Synthetic oligonucleotide
ttacccgtggttctgaggaacacggcttaa

SEQ ID NO: 370923 - DNA, 30 bp, Artificial Sequence
  Synthetic oligonucleotide
taaagggagaggcgcggaatcaaatcttaa

SEQ ID NO: 370924 - DNA, 30 bp, Artificial Sequence
  Synthetic oligonucleotide
aatgactcaattttaaagggacaatcttaa

SEQ ID NO: 370925 - DNA, 30 bp, Artificial Sequence
  Synthetic oligonucleotide
gccataacagtttaagcgctagaatcttaa

SEQ ID NO: 370926 - DNA, 30 bp, Artificial Sequence
  Synthetic oligonucleotide
cgtccgccatattgaatgtaataatcttaa

SEQ ID NO: 370927 - DNA, 30 bp, Artificial Sequence
  Synthetic oligonucleotide
tatctgcgctgggagggaagaatctcttaa

SEQ ID NO: 370928 - DNA, 30 bp, Artificial Sequence
  Synthetic oligonucleotide
ttgtttgttagagttgatctttagtcttaa

SEQ ID NO: 370929 - DNA, 30 bp, Artificial Sequence
  Synthetic oligonucleotide
agatctttgggtatctagtgcttgtcttaa

SEQ ID NO: 370930 - DNA, 30 bp, Artificial Sequence
  Synthetic oligonucleotide
gaaagttgtgcataagtacattattcttaa

SEQ ID NO: 370931 - DNA, 30 bp, Artificial Sequence
  Synthetic oligonucleotide
tgatcagcgatattttctaatagttcttaa

SEQ ID NO: 370932 - DNA, 30 bp, Artificial Sequence
  Synthetic oligonucleotide
catcgatgtaccttatcatgtgtttcttaa

SEQ ID NO: 370933 - DNA, 30 bp, Artificial Sequence
  Synthetic oligonucleotide
gaagtatgggatagttgcaccagaagttaa

SEQ ID NO: 370934 - DNA, 30 bp, Artificial Sequence
  Synthetic oligonucleotide
actcacgtatgacgcaaattccgcagttaa

SEQ ID NO: 370935 - DNA, 30 bp, Artificial Sequence
  Synthetic oligonucleotide
atcaggccggcttttttaaacctcagttaa

SEQ ID NO: 370936 - DNA, 30 bp, Artificial Sequence
  Synthetic oligonucleotide
aagttcgattcattttatctatcgagttaa

SEQ ID NO: 370937 - DNA, 30 bp, Artificial Sequence
  Synthetic oligonucleotide
tgggaaaatgtttggtatatggggagttaa

SEQ ID NO: 370938 - DNA, 30 bp, Artificial Sequence
  Synthetic oligonucleotide
caagaatggaggacgttgatgtggagttaa

SEQ ID NO: 370939 - DNA, 30 bp, Artificial Sequence
  Synthetic oligonucleotide
tttcgaaatttacggagaatcctgagttaa

SEQ ID NO: 370940 - DNA, 30 bp, Artificial Sequence
  Synthetic oligonucleotide
tgaatcgcaagccacacgagcttgagttaa

SEQ ID NO: 370941 - DNA, 30 bp, Artificial Sequence
  Synthetic oligonucleotide
gtatgccgcactacatacttcgaccgttaa

SEQ ID NO: 370942 - DNA, 30 bp, Artificial Sequence
  Synthetic oligonucleotide
taacgctagaagatctttcctccccgttaa

SEQ ID NO: 370943 - DNA, 30 bp, Artificial Sequence
  Synthetic oligonucleotide
taggattacaatatgtggatggtccgttaa

SEQ ID NO: 370944 - DNA, 30 bp, Artificial Sequence
  Synthetic oligonucleotide
agcacgtacaactgacttggcacgcgttaa

SEQ ID NO: 370945 - DNA, 30 bp, Artificial Sequence
  Synthetic oligonucleotide
accccgcgccttttcatacctgggcgttaa

SEQ ID NO: 370946 - DNA, 30 bp, Artificial Sequence
  Synthetic oligonucleotide
caggatgccgggccatttgtaactcgttaa

SEQ ID NO: 370947 - DNA, 30 bp, Artificial Sequence
  Synthetic oligonucleotide
agttagagattctaaaatattactcgttaa

SEQ ID NO: 370948 - DNA, 30 bp, Artificial Sequence
  Synthetic oligonucleotide
ttcttattttcgaacgagtgaagtcgttaa

SEQ ID NO: 370949 - DNA, 30 bp, Artificial Sequence
  Synthetic oligonucleotide
ccaaaaggttcacccctctacagtcgttaa

SEQ ID NO: 370950 - DNA, 30 bp, Artificial Sequence
  Synthetic oligonucleotide
gcatcggatcgataaatttcataaggttaa

SEQ ID NO: 370951 - DNA, 30 bp, Artificial Sequence
  Synthetic oligonucleotide
actacatgtttttgcggcccctcaggttaa

SEQ ID NO: 370952 - DNA, 30 bp, Artificial Sequence
  Synthetic oligonucleotide
cacagactatttgagccagcacacggttaa

SEQ ID NO: 370953 - DNA, 30 bp, Artificial Sequence
  Synthetic oligonucleotide
aagctaataggtttaaacgtcgacggttaa

SEQ ID NO: 370954 - DNA, 30 bp, Artificial Sequence
  Synthetic oligonucleotide
tgggtcatcagcgtctaaccgcccggttaa

SEQ ID NO: 370955 - DNA, 30 bp, Artificial Sequence
  Synthetic oligonucleotide
ttgagcaagcgtcttccggaaaagggttaa

SEQ ID NO: 370956 - DNA, 30 bp, Artificial Sequence
  Synthetic oligonucleotide
taacctcctttctcaatatcgcatggttaa

SEQ ID NO: 370957 - DNA, 30 bp, Artificial Sequence
  Synthetic oligonucleotide
agactgctgtgagctactcatcttggttaa

SEQ ID NO: 370958 - DNA, 30 bp, Artificial Sequence
  Synthetic oligonucleotide
aagttggagttagtttcattttttggttaa

SEQ ID NO: 370959 - DNA, 31 bp, Artificial Sequence
  Synthetic oligonucleotide
tcaccatccgacaggttaatattaatgttaa

SEQ ID NO: 370960 - DNA, 30 bp, Artificial Sequence
  Synthetic oligonucleotide
atttgggagctaggaactccaacatgttaa

SEQ ID NO: 370961 - DNA, 30 bp, Artificial Sequence
  Synthetic oligonucleotide
atctgactcggctctcgcggacgatgttaa

SEQ ID NO: 370962 - DNA, 30 bp, Artificial Sequence
  Synthetic oligonucleotide
gccgctcatggctaacccgacatatgttaa

SEQ ID NO: 370963 - DNA, 30 bp, Artificial Sequence
  Synthetic oligonucleotide
gactagggcttgattgtgttcatatgttaa

SEQ ID NO: 370964 - DNA, 30 bp, Artificial Sequence
  Synthetic oligonucleotide
agttggatcaagcaatagactcactgttaa

SEQ ID NO: 370965 - DNA, 30 bp, Artificial Sequence
  Synthetic oligonucleotide
ctagcaatttcgagacgagagcagtgttaa

SEQ ID NO: 370966 - DNA, 30 bp, Artificial Sequence
  Synthetic oligonucleotide
attaggctctaatctgcggaagattgttaa

SEQ ID NO: 370967 - DNA, 30 bp, Artificial Sequence
  Synthetic oligonucleotide
ggacgtactgacagttaccctaaaatttaa

SEQ ID NO: 370968 - DNA, 30 bp, Artificial Sequence
  Synthetic oligonucleotide
acgtttacataatgtcatatctcaatttaa

SEQ ID NO: 370969 - DNA, 30 bp, Artificial Sequence
  Synthetic oligonucleotide
agaaggatacatgtaataaattcaatttaa

SEQ ID NO: 370970 - DNA, 30 bp, Artificial Sequence
  Synthetic oligonucleotide
tctcaggtctgttgatagtgtataatttaa

SEQ ID NO: 370971 - DNA, 30 bp, Artificial Sequence
  Synthetic oligonucleotide
attgaggattgtctagaagggcacatttaa

SEQ ID NO: 370972 - DNA, 30 bp, Artificial Sequence
  Synthetic oligonucleotide
atttgtgtcgtgcatgagccatgcatttaa

SEQ ID NO: 370973 - DNA, 30 bp, Artificial Sequence
  Synthetic oligonucleotide
gggtttatggttgtttgagatccgatttaa

SEQ ID NO: 370974 - DNA, 30 bp, Artificial Sequence
  Synthetic oligonucleotide
ccggcaccgaggtatccaccggtgatttaa

SEQ ID NO: 370975 - DNA, 30 bp, Artificial Sequence
  Synthetic oligonucleotide
tatccctcaagcaattgcgctcatatttaa

SEQ ID NO: 370976 - DNA, 30 bp, Artificial Sequence
  Synthetic oligonucleotide
acccatacgggcggagagcgtagtatttaa

SEQ ID NO: 370977 - DNA, 30 bp, Artificial Sequence
  Synthetic oligonucleotide
cagcgaccccagacttcgcagcttatttaa

SEQ ID NO: 370978 - DNA, 30 bp, Artificial Sequence
  Synthetic oligonucleotide
tacgaattgctcatatgtatctttatttaa

SEQ ID NO: 370979 - DNA, 30 bp, Artificial Sequence
  Synthetic oligonucleotide
atatcggggaagaagtttccataactttaa

SEQ ID NO: 370980 - DNA, 30 bp, Artificial Sequence
  Synthetic oligonucleotide
aaaccgaagcagtgccccgtgtcactttaa

SEQ ID NO: 370981 - DNA, 30 bp, Artificial Sequence
  Synthetic oligonucleotide
aatatcgggaatacatactttagactttaa

SEQ ID NO: 370982 - DNA, 30 bp, Artificial Sequence
  Synthetic oligonucleotide
aacgcctgcagctttttcctaggcctttaa

SEQ ID NO: 370983 - DNA, 30 bp, Artificial Sequence
  Synthetic oligonucleotide
gcctatcggctcaagagtcaggtcctttaa

SEQ ID NO: 370984 - DNA, 30 bp, Artificial Sequence
  Synthetic oligonucleotide
gccggaagagcacgggaacgtgggctttaa

SEQ ID NO: 370985 - DNA, 30 bp, Artificial Sequence
  Synthetic oligonucleotide
atgttgtatgaccccttcacttggctttaa

SEQ ID NO: 370986 - DNA, 30 bp, Artificial Sequence
  Synthetic oligonucleotide
taatcagacccatcgaggacggtgctttaa

SEQ ID NO: 370987 - DNA, 30 bp, Artificial Sequence
  Synthetic oligonucleotide
cacagaggccaatctttcctgaaagtttaa

SEQ ID NO: 370988 - DNA, 30 bp, Artificial Sequence
  Synthetic oligonucleotide
ccggtccgggacgggttcagctaagtttaa

SEQ ID NO: 370989 - DNA, 30 bp, Artificial Sequence
  Synthetic oligonucleotide
gggggacatcgaagagtcccaggagtttaa

SEQ ID NO: 370990 - DNA, 30 bp, Artificial Sequence
  Synthetic oligonucleotide
cacgaggaatctggattactaggagtttaa

SEQ ID NO: 370991 - DNA, 30 bp, Artificial Sequence
  Synthetic oligonucleotide
tcgtaaaacgtttttacgtcacccgtttaa

SEQ ID NO: 370992 - DNA, 30 bp, Artificial Sequence
  Synthetic oligonucleotide
gtgatagacttagcgagcggcttcgtttaa

SEQ ID NO: 370993 - DNA, 30 bp, Artificial Sequence
  Synthetic oligonucleotide
gcgacgtcatagctgtttacgtcggtttaa

SEQ ID NO: 370994 - DNA, 30 bp, Artificial Sequence
  Synthetic oligonucleotide
catccaatgccctagttgatagaattttaa

SEQ ID NO: 370995 - DNA, 30 bp, Artificial Sequence
  Synthetic oligonucleotide
gtctacgcatatctgacccaccgattttaa

SEQ ID NO: 370996 - DNA, 30 bp, Artificial Sequence
  Synthetic oligonucleotide
cataaagccaggatccgatagttattttaa

SEQ ID NO: 370997 - DNA, 30 bp, Artificial Sequence
  Synthetic oligonucleotide
cggacaagtcgggtggacaggcacttttaa

SEQ ID NO: 370998 - DNA, 30 bp, Artificial Sequence
  Synthetic oligonucleotide
tctagtcatgcacactagacgtacttttaa

SEQ ID NO: 370999 - DNA, 30 bp, Artificial Sequence
  Synthetic oligonucleotide
tatacctgtggacagctagtcatcttttaa

SEQ ID NO: 371000 - DNA, 30 bp, Artificial Sequence
  Synthetic oligonucleotide
agaagactcgtgcatatgataaggttttaa

SEQ ID NO: 371001 - DNA, 30 bp, Artificial Sequence
  Synthetic oligonucleotide
cggtagcactaacctgcactctggttttaa

SEQ ID NO: 371002 - DNA, 30 bp, Artificial Sequence
  Synthetic oligonucleotide
agagggtacttcgtcgaacattatttttaa

SEQ ID NO: 371003 - DNA, 30 bp, Artificial Sequence
  Synthetic oligonucleotide
cccgtcaaagggtacgatagttctttttaa

SEQ ID NO: 371004 - DNA, 30 bp, Artificial Sequence
  Synthetic oligonucleotide
atggattcagcacacatcccgcgtttttaa

SEQ ID NO: 371005 - DNA, 30 bp, Artificial Sequence
  Synthetic oligonucleotide
ggggttatattggtccagtggaaaaaaaca

SEQ ID NO: 371006 - DNA, 30 bp, Artificial Sequence
  Synthetic oligonucleotide
acagcttggttacgtagagtctaaaaaaca

SEQ ID NO: 371007 - DNA, 30 bp, Artificial Sequence
  Synthetic oligonucleotide
caggttataattgcaataagcgacaaaaca

SEQ ID NO: 371008 - DNA, 30 bp, Artificial Sequence
  Synthetic oligonucleotide
tgtcgactacgttcttaggagtacaaaaca

SEQ ID NO: 371009 - DNA, 31 bp, Artificial Sequence
  Synthetic oligonucleotide
attaactgaactccttcctgaaatcaaaaca

SEQ ID NO: 371010 - DNA, 30 bp, Artificial Sequence
  Synthetic oligonucleotide
aacctgctgataccaggaaccccgaaaaca

SEQ ID NO: 371011 - DNA, 30 bp, Artificial Sequence
  Synthetic oligonucleotide
ttgacatcattagttaagtagcggaaaaca

SEQ ID NO: 371012 - DNA, 30 bp, Artificial Sequence
  Synthetic oligonucleotide
atccgccgagtcaggcggagctataaaaca

SEQ ID NO: 371013 - DNA, 30 bp, Artificial Sequence
  Synthetic oligonucleotide
taggcgaaggcctatcaggcgcctaaaaca

SEQ ID NO: 371014 - DNA, 30 bp, Artificial Sequence
  Synthetic oligonucleotide
gggtattctcaatgttacacaattaaaaca

SEQ ID NO: 371015 - DNA, 30 bp, Artificial Sequence
  Synthetic oligonucleotide
atagctctacagttgggtaaggttaaaaca

SEQ ID NO: 371016 - DNA, 30 bp, Artificial Sequence
  Synthetic oligonucleotide
gatttgttgcgatcagagaacgcacaaaca

SEQ ID NO: 371017 - DNA, 30 bp, Artificial Sequence
  Synthetic oligonucleotide
gaagcttgtggggcgtcaagctaccaaaca

SEQ ID NO: 371018 - DNA, 30 bp, Artificial Sequence
  Synthetic oligonucleotide
gctgcgttataagttagctgaaggcaaaca

SEQ ID NO: 371019 - DNA, 30 bp, Artificial Sequence
  Synthetic oligonucleotide
atcatcccattcttaaagagtaggcaaaca

SEQ ID NO: 371020 - DNA, 30 bp, Artificial Sequence
  Synthetic oligonucleotide
tttgcatgagacgggtcacgtaatcaaaca

SEQ ID NO: 371021 - DNA, 30 bp, Artificial Sequence
  Synthetic oligonucleotide
cacctgtcctgacggttaagacctcaaaca

SEQ ID NO: 371022 - DNA, 30 bp, Artificial Sequence
  Synthetic oligonucleotide
cacctgcactaagtaactagctctcaaaca

SEQ ID NO: 371023 - DNA, 30 bp, Artificial Sequence
  Synthetic oligonucleotide
gatatgttacacatacgaatgtctcaaaca

SEQ ID NO: 371024 - DNA, 30 bp, Artificial Sequence
  Synthetic oligonucleotide
ggacttgggttaggtagctaaccagaaaca

SEQ ID NO: 371025 - DNA, 30 bp, Artificial Sequence
  Synthetic oligonucleotide
ggttcttccagaggtgttttaggagaaaca

SEQ ID NO: 371026 - DNA, 30 bp, Artificial Sequence
  Synthetic oligonucleotide
atcgctcttttagtaaagaacctagaaaca

SEQ ID NO: 371027 - DNA, 30 bp, Artificial Sequence
  Synthetic oligonucleotide
gggactcactatcttgcgcaggccgaaaca

SEQ ID NO: 371028 - DNA, 30 bp, Artificial Sequence
  Synthetic oligonucleotide
taaagctggagggttcacattgatgaaaca

SEQ ID NO: 371029 - DNA, 30 bp, Artificial Sequence
  Synthetic oligonucleotide
aaggcggcggtggcgtttcaggttgaaaca

SEQ ID NO: 371030 - DNA, 30 bp, Artificial Sequence
  Synthetic oligonucleotide
ggttcaatatgttcagatataccataaaca

SEQ ID NO: 371031 - DNA, 30 bp, Artificial Sequence
  Synthetic oligonucleotide
ccgtctaatactgcagttaaggtctaaaca

SEQ ID NO: 371032 - DNA, 30 bp, Artificial Sequence
  Synthetic oligonucleotide
accacaggtgtcaggtaggattggtaaaca

SEQ ID NO: 371033 - DNA, 30 bp, Artificial Sequence
  Synthetic oligonucleotide
aacgtaggacctacaggtggaatgtaaaca

SEQ ID NO: 371034 - DNA, 30 bp, Artificial Sequence
  Synthetic oligonucleotide
gtagtgaggtttaccggacctgtgtaaaca

SEQ ID NO: 371035 - DNA, 30 bp, Artificial Sequence
  Synthetic oligonucleotide
ctgtccatcgtgctagggcgtgtgtaaaca

SEQ ID NO: 371036 - DNA, 30 bp, Artificial Sequence
  Synthetic oligonucleotide
acgattgtcaaactgttgaggttttaaaca

SEQ ID NO: 371037 - DNA, 30 bp, Artificial Sequence
  Synthetic oligonucleotide
tgtggtatgaacttgagtggcaaaacaaca

SEQ ID NO: 371038 - DNA, 30 bp, Artificial Sequence
  Synthetic oligonucleotide
gttttaaagaactaaacctggctaacaaca

SEQ ID NO: 371039 - DNA, 30 bp, Artificial Sequence
  Synthetic oligonucleotide
tctctaattgatcctgcgtacttaacaaca

SEQ ID NO: 371040 - DNA, 30 bp, Artificial Sequence
  Synthetic oligonucleotide
caggcacggcctacccaaatagagacaaca

SEQ ID NO: 371041 - DNA, 30 bp, Artificial Sequence
  Synthetic oligonucleotide
tcagttgagagtctactcgagtctacaaca

SEQ ID NO: 371042 - DNA, 30 bp, Artificial Sequence
  Synthetic oligonucleotide
cgccttcaggtcacgacaatgggtacaaca

SEQ ID NO: 371043 - DNA, 30 bp, Artificial Sequence
  Synthetic oligonucleotide
gttgctgtgggacgcgattgcccaccaaca

SEQ ID NO: 371044 - DNA, 30 bp, Artificial Sequence
  Synthetic oligonucleotide
gaagtagttgtgagggattttcgaccaaca

SEQ ID NO: 371045 - DNA, 30 bp, Artificial Sequence
  Synthetic oligonucleotide
ctacattataagtcttgctgcgtaccaaca

SEQ ID NO: 371046 - DNA, 30 bp, Artificial Sequence
  Synthetic oligonucleotide
acgtgacccgatgcaggtaagctcccaaca

SEQ ID NO: 371047 - DNA, 30 bp, Artificial Sequence
  Synthetic oligonucleotide
ccaatcatgaggatcatcgtattcccaaca

SEQ ID NO: 371048 - DNA, 30 bp, Artificial Sequence
  Synthetic oligonucleotide
ttgtcatgatgtacccagttttcgccaaca

SEQ ID NO: 371049 - DNA, 30 bp, Artificial Sequence
  Synthetic oligonucleotide
aagacctgcatggtcaccggttggccaaca

SEQ ID NO: 371050 - DNA, 30 bp, Artificial Sequence
  Synthetic oligonucleotide
aaggccggaaatcctcaaaataatccaaca

SEQ ID NO: 371051 - DNA, 30 bp, Artificial Sequence
  Synthetic oligonucleotide
gggctcaggctacggagcttccctccaaca

SEQ ID NO: 371052 - DNA, 30 bp, Artificial Sequence
  Synthetic oligonucleotide
ggtggctactaattgttgaacggtccaaca

SEQ ID NO: 371053 - DNA, 30 bp, Artificial Sequence
  Synthetic oligonucleotide
gatttgtgccctttaggtttaggagcaaca

SEQ ID NO: 371054 - DNA, 30 bp, Artificial Sequence
  Synthetic oligonucleotide
acattgcatggtctagaagtattagcaaca

SEQ ID NO: 371055 - DNA, 31 bp, Artificial Sequence
  Synthetic oligonucleotide
cttctgtttgatataagaccaatgcgcaaca

SEQ ID NO: 371056 - DNA, 30 bp, Artificial Sequence
  Synthetic oligonucleotide
atgatgggcgacctagacttgatcgcaaca

SEQ ID NO: 371057 - DNA, 30 bp, Artificial Sequence
  Synthetic oligonucleotide
cgctttcgcatgattcttgaaagggcaaca

SEQ ID NO: 371058 - DNA, 30 bp, Artificial Sequence
  Synthetic oligonucleotide
ttataagccagtatcgcagtcagggcaaca

SEQ ID NO: 371059 - DNA, 30 bp, Artificial Sequence
  Synthetic oligonucleotide
cgcataatctcgaggaacatgatggcaaca

SEQ ID NO: 371060 - DNA, 30 bp, Artificial Sequence
  Synthetic oligonucleotide
atagagggcgggccctaggtgggtgcaaca

SEQ ID NO: 371061 - DNA, 30 bp, Artificial Sequence
  Synthetic oligonucleotide
aatcctgacgtcatccggctgtttgcaaca

SEQ ID NO: 371062 - DNA, 30 bp, Artificial Sequence
  Synthetic oligonucleotide
tattgaaataatcagacgttaagatcaaca

SEQ ID NO: 371063 - DNA, 30 bp, Artificial Sequence
  Synthetic oligonucleotide
atgggctacttggtcccatcgcgatcaaca

SEQ ID NO: 371064 - DNA, 30 bp, Artificial Sequence
  Synthetic oligonucleotide
cagcaattataacggctacaagactcaaca

SEQ ID NO: 371065 - DNA, 30 bp, Artificial Sequence
  Synthetic oligonucleotide
acgcggggccagttgagacttgattcaaca

SEQ ID NO: 371066 - DNA, 30 bp, Artificial Sequence
  Synthetic oligonucleotide
gttgtcctctgtgatcgaagaggttcaaca

SEQ ID NO: 371067 - DNA, 30 bp, Artificial Sequence
  Synthetic oligonucleotide
aatatattacgaatttaagcggccagaaca

SEQ ID NO: 371068 - DNA, 30 bp, Artificial Sequence
  Synthetic oligonucleotide
actctgcattaggaagtcactttcagaaca

SEQ ID NO: 371069 - DNA, 30 bp, Artificial Sequence
  Synthetic oligonucleotide
gttggtacatcgtaatgcagtcagagaaca

SEQ ID NO: 371070 - DNA, 30 bp, Artificial Sequence
  Synthetic oligonucleotide
gaaacccgacatgatctaatttatagaaca

SEQ ID NO: 371071 - DNA, 30 bp, Artificial Sequence
  Synthetic oligonucleotide
ttaccagcacatcatcggattccacgaaca

SEQ ID NO: 371072 - DNA, 30 bp, Artificial Sequence
  Synthetic oligonucleotide
tatgcaatagtatcttgaatgctgcgaaca

SEQ ID NO: 371073 - DNA, 30 bp, Artificial Sequence
  Synthetic oligonucleotide
atgcccccaacggggaggctgcctcgaaca

SEQ ID NO: 371074 - DNA, 31 bp, Artificial Sequence
  Synthetic oligonucleotide
caattagattgaacatgaagtccttcgaaca

SEQ ID NO: 371075 - DNA, 30 bp, Artificial Sequence
  Synthetic oligonucleotide
cagcattccgcgggttcgtcggaaggaaca

SEQ ID NO: 371076 - DNA, 30 bp, Artificial Sequence
  Synthetic oligonucleotide
acacgtctttcagtacttcgggtcggaaca

SEQ ID NO: 371077 - DNA, 30 bp, Artificial Sequence
  Synthetic oligonucleotide
ctcttccaagccgctccgtacaagggaaca

SEQ ID NO: 371078 - DNA, 29 bp, Artificial Sequence
  Synthetic oligonucleotide
cttgtgctactttgtcgcatccgggaaca

SEQ ID NO: 371079 - DNA, 30 bp, Artificial Sequence
  Synthetic oligonucleotide
ctcatttaggcctaataggcacggggaaca

SEQ ID NO: 371080 - DNA, 30 bp, Artificial Sequence
  Synthetic oligonucleotide
gtttagggtttagtcgtggtggtgggaaca

SEQ ID NO: 371081 - DNA, 30 bp, Artificial Sequence
  Synthetic oligonucleotide
gggacctcaaagaaccaaaaatttggaaca

SEQ ID NO: 371082 - DNA, 30 bp, Artificial Sequence
  Synthetic oligonucleotide
tcattagtgtataatagtcacgcatgaaca

SEQ ID NO: 371083 - DNA, 30 bp, Artificial Sequence
  Synthetic oligonucleotide
aattgaccaagtgccgtaaaaggatgaaca

SEQ ID NO: 371084 - DNA, 30 bp, Artificial Sequence
  Synthetic oligonucleotide
gagctccatggcccccaatgtgtatgaaca

SEQ ID NO: 371085 - DNA, 30 bp, Artificial Sequence
  Synthetic oligonucleotide
tcgttagtctagtatttccgacactgaaca

SEQ ID NO: 371086 - DNA, 30 bp, Artificial Sequence
  Synthetic oligonucleotide
catgttaactgatatatatcatcctgaaca

SEQ ID NO: 371087 - DNA, 30 bp, Artificial Sequence
  Synthetic oligonucleotide
aggagtcaattgccaatgcggatctgaaca

SEQ ID NO: 371088 - DNA, 30 bp, Artificial Sequence
  Synthetic oligonucleotide
ggaagtcgaaaacgctcacgaaagtgaaca

SEQ ID NO: 371089 - DNA, 30 bp, Artificial Sequence
  Synthetic oligonucleotide
aaacacggtatgacagtggtgttgtgaaca

SEQ ID NO: 371090 - DNA, 30 bp, Artificial Sequence
  Synthetic oligonucleotide
agcctaagattttgtttgtatagttgaaca

SEQ ID NO: 371091 - DNA, 30 bp, Artificial Sequence
  Synthetic oligonucleotide
gagtgtaagaagatggaattcatttgaaca

SEQ ID NO: 371092 - DNA, 30 bp, Artificial Sequence
  Synthetic oligonucleotide
ggtcataagcggttgtagcataaaataaca

SEQ ID NO: 371093 - DNA, 30 bp, Artificial Sequence
  Synthetic oligonucleotide
gccactcaagtaagacgcgcccaaataaca

SEQ ID NO: 371094 - DNA, 30 bp, Artificial Sequence
  Synthetic oligonucleotide
gcacattcgacatagctccatgccataaca

SEQ ID NO: 371095 - DNA, 30 bp, Artificial Sequence
  Synthetic oligonucleotide
gtcagagttacctattgcgcacgcataaca

SEQ ID NO: 371096 - DNA, 30 bp, Artificial Sequence
  Synthetic oligonucleotide
gtcaggttctgacatcgcctttctataaca

SEQ ID NO: 371097 - DNA, 30 bp, Artificial Sequence
  Synthetic oligonucleotide
cattccagcaagccatgggtcattataaca

SEQ ID NO: 371098 - DNA, 30 bp, Artificial Sequence
  Synthetic oligonucleotide
gtgaaaataaggcctcgatgctaactaaca

SEQ ID NO: 371099 - DNA, 30 bp, Artificial Sequence
  Synthetic oligonucleotide
cttgcgccggcggcggctacggggctaaca

SEQ ID NO: 371100 - DNA, 30 bp, Artificial Sequence
  Synthetic oligonucleotide
actgttgggatacggatcatcgtgctaaca

SEQ ID NO: 371101 - DNA, 30 bp, Artificial Sequence
  Synthetic oligonucleotide
aacatgcatcaggtagatcaattgctaaca

SEQ ID NO: 371102 - DNA, 30 bp, Artificial Sequence
  Synthetic oligonucleotide
tctatgggtcagcgtccaaagtatctaaca

SEQ ID NO: 371103 - DNA, 30 bp, Artificial Sequence
  Synthetic oligonucleotide
ccgtgccccatatactaaatctttctaaca

SEQ ID NO: 371104 - DNA, 30 bp, Artificial Sequence
  Synthetic oligonucleotide
tagtaattaaggttactcttcaaagtaaca

SEQ ID NO: 371105 - DNA, 30 bp, Artificial Sequence
  Synthetic oligonucleotide
gaagttatattgtaggggacttaagtaaca

SEQ ID NO: 371106 - DNA, 30 bp, Artificial Sequence
  Synthetic oligonucleotide
ggaattgaatacctgcgcgacacagtaaca

SEQ ID NO: 371107 - DNA, 30 bp, Artificial Sequence
  Synthetic oligonucleotide
cggagttctgcaaggatatagcccgtaaca

SEQ ID NO: 371108 - DNA, 30 bp, Artificial Sequence
  Synthetic oligonucleotide
cgaaagtatccttatgccactgccgtaaca

SEQ ID NO: 371109 - DNA, 30 bp, Artificial Sequence
  Synthetic oligonucleotide
aatatttaattagcagtggcacaggtaaca

SEQ ID NO: 371110 - DNA, 30 bp, Artificial Sequence
  Synthetic oligonucleotide
gacattcagtttatcgcaggtcgggtaaca

SEQ ID NO: 371111 - DNA, 30 bp, Artificial Sequence
  Synthetic oligonucleotide
tcaggacaactcactatattgttggtaaca

SEQ ID NO: 371112 - DNA, 30 bp, Artificial Sequence
  Synthetic oligonucleotide
ttacattatggggttggctctcttgtaaca

SEQ ID NO: 371113 - DNA, 30 bp, Artificial Sequence
  Synthetic oligonucleotide
aggctgcctccggtcggtgcatgcttaaca

SEQ ID NO: 371114 - DNA, 30 bp, Artificial Sequence
  Synthetic oligonucleotide
caaaatgctactccttacgctacgttaaca

SEQ ID NO: 371115 - DNA, 30 bp, Artificial Sequence
  Synthetic oligonucleotide
tctcgcgataaacaggcgattccgttaaca

SEQ ID NO: 371116 - DNA, 30 bp, Artificial Sequence
  Synthetic oligonucleotide
tcatgataggcgttgttcacatggttaaca

SEQ ID NO: 371117 - DNA, 30 bp, Artificial Sequence
  Synthetic oligonucleotide
ccatggagataaacgcttggatggttaaca

SEQ ID NO: 371118 - DNA, 30 bp, Artificial Sequence
  Synthetic oligonucleotide
ggtctagcaggtttctaccgcatgttaaca

SEQ ID NO: 371119 - DNA, 30 bp, Artificial Sequence
  Synthetic oligonucleotide
aacttctgagcaaccccgtgtactttaaca

SEQ ID NO: 371120 - DNA, 30 bp, Artificial Sequence
  Synthetic oligonucleotide
ctagggatttttcggtaagccgttttaaca

SEQ ID NO: 371121 - DNA, 30 bp, Artificial Sequence
  Synthetic oligonucleotide
gtctatcgttacactaggtgccaaaacaca

SEQ ID NO: 371122 - DNA, 30 bp, Artificial Sequence
  Synthetic oligonucleotide
cgcggcgagcttggcgatagagcgaacaca

SEQ ID NO: 371123 - DNA, 30 bp, Artificial Sequence
  Synthetic oligonucleotide
aagaccgttaaagtctcagcgcggaacaca

SEQ ID NO: 371124 - DNA, 30 bp, Artificial Sequence
  Synthetic oligonucleotide
tgagaagggggttcgggcctattgaacaca

SEQ ID NO: 371125 - DNA, 30 bp, Artificial Sequence
  Synthetic oligonucleotide
gcattctgtggtcaggtaactaaacacaca

SEQ ID NO: 371126 - DNA, 30 bp, Artificial Sequence
  Synthetic oligonucleotide
acttatccgggattgtgtacttgacacaca

SEQ ID NO: 371127 - DNA, 30 bp, Artificial Sequence
  Synthetic oligonucleotide
atatgttctgaggagtacccatagcacaca

SEQ ID NO: 371128 - DNA, 30 bp, Artificial Sequence
  Synthetic oligonucleotide
acctgcgggtagtttaactgcacgcacaca

SEQ ID NO: 371129 - DNA, 30 bp, Artificial Sequence
  Synthetic oligonucleotide
gggcctgtttcaggtatggcgcaagacaca

SEQ ID NO: 371130 - DNA, 30 bp, Artificial Sequence
  Synthetic oligonucleotide
gctatctatccgcgtaataggtcagacaca

SEQ ID NO: 371131 - DNA, 30 bp, Artificial Sequence
  Synthetic oligonucleotide
cagccatgggttcagcattactgagacaca

SEQ ID NO: 371132 - DNA, 30 bp, Artificial Sequence
  Synthetic oligonucleotide
agctcttggcgtttcgaagaagacgacaca

SEQ ID NO: 371133 - DNA, 30 bp, Artificial Sequence
  Synthetic oligonucleotide
ctcacccttgcctgaaagagagtggacaca

SEQ ID NO: 371134 - DNA, 30 bp, Artificial Sequence
  Synthetic oligonucleotide
aatgcctaaatcattagattattggacaca

SEQ ID NO: 371135 - DNA, 30 bp, Artificial Sequence
  Synthetic oligonucleotide
tgtcctttgggctcttgcgttaatgacaca

SEQ ID NO: 371136 - DNA, 30 bp, Artificial Sequence
  Synthetic oligonucleotide
catgtaaacagtggtcaggcgcgtgacaca

SEQ ID NO: 371137 - DNA, 30 bp, Artificial Sequence
  Synthetic oligonucleotide
agagatttatcgtatgagtaacttgacaca

SEQ ID NO: 371138 - DNA, 30 bp, Artificial Sequence
  Synthetic oligonucleotide
gctgggaaatatgtcttctccagatacaca

SEQ ID NO: 371139 - DNA, 30 bp, Artificial Sequence
  Synthetic oligonucleotide
caagcatggagtttaaggtagagctacaca

SEQ ID NO: 371140 - DNA, 30 bp, Artificial Sequence
  Synthetic oligonucleotide
ttggcttggtaccagacatcctagtacaca

SEQ ID NO: 371141 - DNA, 30 bp, Artificial Sequence
  Synthetic oligonucleotide
agaaactcaagggaaccgcttcggtacaca

SEQ ID NO: 371142 - DNA, 30 bp, Artificial Sequence
  Synthetic oligonucleotide
ctggatcagggcttttcggcaggttacaca

SEQ ID NO: 371143 - DNA, 30 bp, Artificial Sequence
  Synthetic oligonucleotide
accctatagagtcaaccccgttgttacaca

SEQ ID NO: 371144 - DNA, 30 bp, Artificial Sequence
  Synthetic oligonucleotide
gcagcacgctttagcctatctgtttacaca

SEQ ID NO: 371145 - DNA, 30 bp, Artificial Sequence
  Synthetic oligonucleotide
aggctatgtcgggcgtaaacgcaaaccaca

SEQ ID NO: 371146 - DNA, 30 bp, Artificial Sequence
  Synthetic oligonucleotide
ggtgcgcgacatttggaccttccaaccaca

SEQ ID NO: 371147 - DNA, 30 bp, Artificial Sequence
  Synthetic oligonucleotide
ctctggttgggctaattactggcaaccaca

SEQ ID NO: 371148 - DNA, 30 bp, Artificial Sequence
  Synthetic oligonucleotide
acaccataagccacgtttcttcacaccaca

SEQ ID NO: 371149 - DNA, 30 bp, Artificial Sequence
  Synthetic oligonucleotide
gacagtgtctctaattacagtttgaccaca

SEQ ID NO: 371150 - DNA, 30 bp, Artificial Sequence
  Synthetic oligonucleotide
aagcccatagggttttgtactactaccaca

SEQ ID NO: 371151 - DNA, 30 bp, Artificial Sequence
  Synthetic oligonucleotide
tccatcatactcggtcctcacatacccaca

SEQ ID NO: 371152 - DNA, 30 bp, Artificial Sequence
  Synthetic oligonucleotide
actcatatatctacttaatatacccccaca

SEQ ID NO: 371153 - DNA, 30 bp, Artificial Sequence
  Synthetic oligonucleotide
attataaagacgctgtctataggccccaca

SEQ ID NO: 371154 - DNA, 30 bp, Artificial Sequence
  Synthetic oligonucleotide
gcattcctcgcctagatgctcaggcccaca

SEQ ID NO: 371155 - DNA, 30 bp, Artificial Sequence
  Synthetic oligonucleotide
atcaccgccgtatgattgtgaacagccaca

SEQ ID NO: 371156 - DNA, 30 bp, Artificial Sequence
  Synthetic oligonucleotide
aaggccgcgacaaagtggatactagccaca

SEQ ID NO: 371157 - DNA, 30 bp, Artificial Sequence
  Synthetic oligonucleotide
caccttagcgccctagcgcgacatgccaca

SEQ ID NO: 371158 - DNA, 30 bp, Artificial Sequence
  Synthetic oligonucleotide
ctcggaggtcggatggtgttaattgccaca

SEQ ID NO: 371159 - DNA, 30 bp, Artificial Sequence
  Synthetic oligonucleotide
ctttcatctcatgaaatgacgcttgccaca

SEQ ID NO: 371160 - DNA, 30 bp, Artificial Sequence
  Synthetic oligonucleotide
aagccccgaacgcgttcatatgggtccaca

SEQ ID NO: 371161 - DNA, 30 bp, Artificial Sequence
  Synthetic oligonucleotide
atatatcacagagtcgcgcggggttccaca

SEQ ID NO: 371162 - DNA, 30 bp, Artificial Sequence
  Synthetic oligonucleotide
tgagtgctccgatacttattcatgagcaca

SEQ ID NO: 371163 - DNA, 30 bp, Artificial Sequence
  Synthetic oligonucleotide
gaccccataatgtagcggcaatcacgcaca

SEQ ID NO: 371164 - DNA, 30 bp, Artificial Sequence
  Synthetic oligonucleotide
aaccctgaaagggttacaagggtgcgcaca

SEQ ID NO: 371165 - DNA, 30 bp, Artificial Sequence
  Synthetic oligonucleotide
cattgagtgacgatgcgaatacgtcgcaca

SEQ ID NO: 371166 - DNA, 30 bp, Artificial Sequence
  Synthetic oligonucleotide
aagtgcggttgtataaaccatttaggcaca

SEQ ID NO: 371167 - DNA, 30 bp, Artificial Sequence
  Synthetic oligonucleotide
ctcaaggatgcagccgctatagtcggcaca

SEQ ID NO: 371168 - DNA, 30 bp, Artificial Sequence
  Synthetic oligonucleotide
gccgtattggttagtgaataactgggcaca

SEQ ID NO: 371169 - DNA, 30 bp, Artificial Sequence
  Synthetic oligonucleotide
ctcctaaaagatgttcgtcgtaatggcaca

SEQ ID NO: 371170 - DNA, 30 bp, Artificial Sequence
  Synthetic oligonucleotide
gaggtagtcttttttactggttaatgcaca

SEQ ID NO: 371171 - DNA, 30 bp, Artificial Sequence
  Synthetic oligonucleotide
gttcctgggtcggtggtttgttcatgcaca

SEQ ID NO: 371172 - DNA, 30 bp, Artificial Sequence
  Synthetic oligonucleotide
ctgtcaacccccatcagaattggatgcaca

SEQ ID NO: 371173 - DNA, 30 bp, Artificial Sequence
  Synthetic oligonucleotide
ttactaatacattcttgcgaaatttgcaca

SEQ ID NO: 371174 - DNA, 30 bp, Artificial Sequence
  Synthetic oligonucleotide
accaataccatgcaatttgacatttgcaca

SEQ ID NO: 371175 - DNA, 30 bp, Artificial Sequence
  Synthetic oligonucleotide
gttcacttttattaggcaagggtttgcaca

SEQ ID NO: 371176 - DNA, 30 bp, Artificial Sequence
  Synthetic oligonucleotide
ctaatgacgcggtgtaggcccggaatcaca

SEQ ID NO: 371177 - DNA, 30 bp, Artificial Sequence
  Synthetic oligonucleotide
caggacgtttagcggctggatttaatcaca

SEQ ID NO: 371178 - DNA, 30 bp, Artificial Sequence
  Synthetic oligonucleotide
acaagcgtggtccgctgcgcagccatcaca

SEQ ID NO: 371179 - DNA, 30 bp, Artificial Sequence
  Synthetic oligonucleotide
ccactacccgctgcagtggacagcatcaca

SEQ ID NO: 371180 - DNA, 30 bp, Artificial Sequence
  Synthetic oligonucleotide
atgcgaccagttacccgcgttgatatcaca

SEQ ID NO: 371181 - DNA, 30 bp, Artificial Sequence
  Synthetic oligonucleotide
atctatgcagcactctacgcgcctatcaca

SEQ ID NO: 371182 - DNA, 30 bp, Artificial Sequence
  Synthetic oligonucleotide
ggcaattacacaatgtacgtcgttatcaca

SEQ ID NO: 371183 - DNA, 30 bp, Artificial Sequence
  Synthetic oligonucleotide
gagatctcgtaactggcttgatttatcaca

SEQ ID NO: 371184 - DNA, 30 bp, Artificial Sequence
  Synthetic oligonucleotide
tttgttgcgtggccgacgttgaacctcaca

SEQ ID NO: 371185 - DNA, 30 bp, Artificial Sequence
  Synthetic oligonucleotide
tcgtctccaccacgcgattgccacctcaca

SEQ ID NO: 371186 - DNA, 30 bp, Artificial Sequence
  Synthetic oligonucleotide
gcgtagtatgtatctttttccccgctcaca

SEQ ID NO: 371187 - DNA, 30 bp, Artificial Sequence
  Synthetic oligonucleotide
aggggcccgtgagtactgacgctgctcaca

SEQ ID NO: 371188 - DNA, 30 bp, Artificial Sequence
  Synthetic oligonucleotide
gtagtgtgctgataaacgttaggtctcaca

SEQ ID NO: 371189 - DNA, 30 bp, Artificial Sequence
  Synthetic oligonucleotide
aacttaaattcctacacctgattagtcaca

SEQ ID NO: 371190 - DNA, 30 bp, Artificial Sequence
  Synthetic oligonucleotide
gacggtttctgggtcccagtcaccgtcaca

SEQ ID NO: 371191 - DNA, 30 bp, Artificial Sequence
  Synthetic oligonucleotide
tgtatgaactcatacaatacgacggtcaca

SEQ ID NO: 371192 - DNA, 30 bp, Artificial Sequence
  Synthetic oligonucleotide
catgtcgcaagattttaaccaccggtcaca

SEQ ID NO: 371193 - DNA, 30 bp, Artificial Sequence
  Synthetic oligonucleotide
gaggtttgtctgtttggcaaatcggtcaca

SEQ ID NO: 371194 - DNA, 30 bp, Artificial Sequence
  Synthetic oligonucleotide
agctttttgtggggggcataaagggtcaca

SEQ ID NO: 371195 - DNA, 30 bp, Artificial Sequence
  Synthetic oligonucleotide
gagataactctatcaactcaatcattcaca

SEQ ID NO: 371196 - DNA, 30 bp, Artificial Sequence
  Synthetic oligonucleotide
gatcgcaaacgcgccaggcgcggattcaca

SEQ ID NO: 371197 - DNA, 31 bp, Artificial Sequence
  Synthetic oligonucleotide
gtagttttaaagataaaattcgatattcaca

SEQ ID NO: 371198 - DNA, 30 bp, Artificial Sequence
  Synthetic oligonucleotide
cgcgtggaaccataagatcggtccttcaca

SEQ ID NO: 371199 - DNA, 30 bp, Artificial Sequence
  Synthetic oligonucleotide
acttcgaccaccccggcaatcggcttcaca

SEQ ID NO: 371200 - DNA, 30 bp, Artificial Sequence
  Synthetic oligonucleotide
agtaatttacgtctcgctagagggttcaca

SEQ ID NO: 371201 - DNA, 30 bp, Artificial Sequence
  Synthetic oligonucleotide
tgggtattgattggggaaaaactgttcaca

SEQ ID NO: 371202 - DNA, 30 bp, Artificial Sequence
  Synthetic oligonucleotide
ctgggaggagctttggaacatgtgttcaca

SEQ ID NO: 371203 - DNA, 30 bp, Artificial Sequence
  Synthetic oligonucleotide
gcatgactatcttttaatttagaaaagaca

SEQ ID NO: 371204 - DNA, 30 bp, Artificial Sequence
  Synthetic oligonucleotide
tgagtaccaggcagcgttggacagaagaca

SEQ ID NO: 371205 - DNA, 30 bp, Artificial Sequence
  Synthetic oligonucleotide
ttaaaataatggcgtctcgtagttaagaca

SEQ ID NO: 371206 - DNA, 30 bp, Artificial Sequence
  Synthetic oligonucleotide
tgtctattgtaaaaaaggtgttaacagaca

SEQ ID NO: 371207 - DNA, 30 bp, Artificial Sequence
  Synthetic oligonucleotide
ggtatcaaccagtgtaaacaaagacagaca

SEQ ID NO: 371208 - DNA, 30 bp, Artificial Sequence
  Synthetic oligonucleotide
ggtcctccaggctatccaggggaccagaca

SEQ ID NO: 371209 - DNA, 30 bp, Artificial Sequence
  Synthetic oligonucleotide
tgttagggggcgagcgctcttgcgcagaca

SEQ ID NO: 371210 - DNA, 30 bp, Artificial Sequence
  Synthetic oligonucleotide
tgtttggacttgcgggcttgtgtgcagaca

SEQ ID NO: 371211 - DNA, 30 bp, Artificial Sequence
  Synthetic oligonucleotide
aatacgagggcgcagatgagaggtcagaca

SEQ ID NO: 371212 - DNA, 30 bp, Artificial Sequence
  Synthetic oligonucleotide
acgttggaagccagttagtctattcagaca

SEQ ID NO: 371213 - DNA, 30 bp, Artificial Sequence
  Synthetic oligonucleotide
ttcgttagggcctgtaggtccgttcagaca

SEQ ID NO: 371214 - DNA, 31 bp, Artificial Sequence
  Synthetic oligonucleotide
aagcggatgcactcgacgacttggagagaca

SEQ ID NO: 371215 - DNA, 30 bp, Artificial Sequence
  Synthetic oligonucleotide
ttgtatgatttggagattggactagagaca

SEQ ID NO: 371216 - DNA, 30 bp, Artificial Sequence
  Synthetic oligonucleotide
acttggaaaatcaaattgcatttagagaca

SEQ ID NO: 371217 - DNA, 30 bp, Artificial Sequence
  Synthetic oligonucleotide
ttgatttaagcaattgaacctttagagaca

SEQ ID NO: 371218 - DNA, 30 bp, Artificial Sequence
  Synthetic oligonucleotide
agggggcaggttggaggggtctacgagaca

SEQ ID NO: 371219 - DNA, 30 bp, Artificial Sequence
  Synthetic oligonucleotide
ctccaaagcgggaaattcattcccgagaca

SEQ ID NO: 371220 - DNA, 30 bp, Artificial Sequence
  Synthetic oligonucleotide
ggtgctctccagccacaggggggcgagaca

SEQ ID NO: 371221 - DNA, 31 bp, Artificial Sequence
  Synthetic oligonucleotide
gcggggattatagttccatctaacggagaca

SEQ ID NO: 371222 - DNA, 30 bp, Artificial Sequence
  Synthetic oligonucleotide
acctgtcccacttctcatcaggtggagaca

SEQ ID NO: 371223 - DNA, 30 bp, Artificial Sequence
  Synthetic oligonucleotide
tcctgtatcggccgactcgaattggagaca

SEQ ID NO: 371224 - DNA, 30 bp, Artificial Sequence
  Synthetic oligonucleotide
atatatagcatccccttcaactgatagaca

SEQ ID NO: 371225 - DNA, 30 bp, Artificial Sequence
  Synthetic oligonucleotide
tacgggggtcgtttatcacccggctagaca

SEQ ID NO: 371226 - DNA, 30 bp, Artificial Sequence
  Synthetic oligonucleotide
tacgcagcggggtgggtgatctagtagaca

SEQ ID NO: 371227 - DNA, 30 bp, Artificial Sequence
  Synthetic oligonucleotide
aacagaaacacatcctagcttttgtagaca

SEQ ID NO: 371228 - DNA, 30 bp, Artificial Sequence
  Synthetic oligonucleotide
gagagtaccaagcgcacttgtgcttagaca

SEQ ID NO: 371229 - DNA, 30 bp, Artificial Sequence
  Synthetic oligonucleotide
gtactgctactaaaattccgtggttagaca

SEQ ID NO: 371230 - DNA, 30 bp, Artificial Sequence
  Synthetic oligonucleotide
gcttctaaattcgcatctctgcaaacgaca

SEQ ID NO: 371231 - DNA, 30 bp, Artificial Sequence
  Synthetic oligonucleotide
tccgcaagtactgtcacccgagcaacgaca

SEQ ID NO: 371232 - DNA, 30 bp, Artificial Sequence
  Synthetic oligonucleotide
tattgaagttagtcaaattttgacacgaca

SEQ ID NO: 371233 - DNA, 30 bp, Artificial Sequence
  Synthetic oligonucleotide
ggcgccagctagagttttagcaccacgaca

SEQ ID NO: 371234 - DNA, 30 bp, Artificial Sequence
  Synthetic oligonucleotide
tctgttggcagtaattccagctagacgaca

SEQ ID NO: 371235 - DNA, 30 bp, Artificial Sequence
  Synthetic oligonucleotide
tataacgtctaggctatttagctgacgaca

SEQ ID NO: 371236 - DNA, 30 bp, Artificial Sequence
  Synthetic oligonucleotide
agctgtgtagtaccttgtcctttgacgaca

SEQ ID NO: 371237 - DNA, 30 bp, Artificial Sequence
  Synthetic oligonucleotide
gctatgaggtacgatgcctaattaccgaca

SEQ ID NO: 371238 - DNA, 30 bp, Artificial Sequence
  Synthetic oligonucleotide
ctgtagtcatgctcgcgaccgccgccgaca

SEQ ID NO: 371239 - DNA, 30 bp, Artificial Sequence
  Synthetic oligonucleotide
agactctagttgtaatggtaacttccgaca

SEQ ID NO: 371240 - DNA, 30 bp, Artificial Sequence
  Synthetic oligonucleotide
gtcttgcgaccatttgcacctaaagcgaca

SEQ ID NO: 371241 - DNA, 30 bp, Artificial Sequence
  Synthetic oligonucleotide
atcattcaagatacgattacatgagcgaca

SEQ ID NO: 371242 - DNA, 30 bp, Artificial Sequence
  Synthetic oligonucleotide
ctgtgtgcccggcctgggacgtgggcgaca

SEQ ID NO: 371243 - DNA, 30 bp, Artificial Sequence
  Synthetic oligonucleotide
gcaacatcctttacacacgttttggcgaca

SEQ ID NO: 371244 - DNA, 30 bp, Artificial Sequence
  Synthetic oligonucleotide
aggaattatactcatagtataattgcgaca

SEQ ID NO: 371245 - DNA, 30 bp, Artificial Sequence
  Synthetic oligonucleotide
ggatacggcattatgcgcggtgttgcgaca

SEQ ID NO: 371246 - DNA, 30 bp, Artificial Sequence
  Synthetic oligonucleotide
acgcagccccttaccggcgccgaatcgaca

SEQ ID NO: 371247 - DNA, 30 bp, Artificial Sequence
  Synthetic oligonucleotide
actgattgtgtatcaactctacactcgaca

SEQ ID NO: 371248 - DNA, 30 bp, Artificial Sequence
  Synthetic oligonucleotide
ggtgctctactgtgaacatgcagctcgaca

SEQ ID NO: 371249 - DNA, 30 bp, Artificial Sequence
  Synthetic oligonucleotide
aggaacggagtctagttttgcacaaggaca

SEQ ID NO: 371250 - DNA, 30 bp, Artificial Sequence
  Synthetic oligonucleotide
tgcccgcggcgcagtgctcccggaaggaca

SEQ ID NO: 371251 - DNA, 30 bp, Artificial Sequence
  Synthetic oligonucleotide
ttagggactatggtgcgggcaggcaggaca

SEQ ID NO: 371252 - DNA, 30 bp, Artificial Sequence
  Synthetic oligonucleotide
cagtcggaagcagcatttaggcagaggaca

SEQ ID NO: 371253 - DNA, 30 bp, Artificial Sequence
  Synthetic oligonucleotide
gacagaacgaggttttgtaaaccgaggaca

SEQ ID NO: 371254 - DNA, 30 bp, Artificial Sequence
  Synthetic oligonucleotide
ttgtatctagagcgcagagtatggaggaca

SEQ ID NO: 371255 - DNA, 30 bp, Artificial Sequence
  Synthetic oligonucleotide
cgtacggggaaggtcctgtgtactaggaca

SEQ ID NO: 371256 - DNA, 30 bp, Artificial Sequence
  Synthetic oligonucleotide
gaatggacaggaagccctagccgccggaca

SEQ ID NO: 371257 - DNA, 30 bp, Artificial Sequence
  Synthetic oligonucleotide
tggaatccagcaccagcaaacttccggaca

SEQ ID NO: 371258 - DNA, 30 bp, Artificial Sequence
  Synthetic oligonucleotide
gtgtatggtgacgggctgaccgagcggaca

SEQ ID NO: 371259 - DNA, 30 bp, Artificial Sequence
  Synthetic oligonucleotide
agaggtcaggtttttggacagtggcggaca

SEQ ID NO: 371260 - DNA, 30 bp, Artificial Sequence
  Synthetic oligonucleotide
tctggtcaggagatcgttctcctgcggaca

SEQ ID NO: 371261 - DNA, 30 bp, Artificial Sequence
  Synthetic oligonucleotide
taagacgtagcgttggctagtgttcggaca

SEQ ID NO: 371262 - DNA, 30 bp, Artificial Sequence
  Synthetic oligonucleotide
gtgtcataaagcggcgcatggtcagggaca

SEQ ID NO: 371263 - DNA, 30 bp, Artificial Sequence
  Synthetic oligonucleotide
ccggaacctagttagccggaccccgggaca

SEQ ID NO: 371264 - DNA, 30 bp, Artificial Sequence
  Synthetic oligonucleotide
ggcttcaacaataaggtttacgccgggaca

SEQ ID NO: 371265 - DNA, 30 bp, Artificial Sequence
  Synthetic oligonucleotide
ttctcgcatgcgacttggctacgcgggaca

SEQ ID NO: 371266 - DNA, 30 bp, Artificial Sequence
  Synthetic oligonucleotide
atacttgtctgataaggcttacgcgggaca

SEQ ID NO: 371267 - DNA, 30 bp, Artificial Sequence
  Synthetic oligonucleotide
ttcggtttgaccaaggctgcgatcgggaca

SEQ ID NO: 371268 - DNA, 30 bp, Artificial Sequence
  Synthetic oligonucleotide
gttatacccgctgccgtcgcgacggggaca

SEQ ID NO: 371269 - DNA, 30 bp, Artificial Sequence
  Synthetic oligonucleotide
ctcccccaccgggttaggtattctgggaca

SEQ ID NO: 371270 - DNA, 30 bp, Artificial Sequence
  Synthetic oligonucleotide
gtgaaaccggaccggcgcaaatttgggaca

SEQ ID NO: 371271 - DNA, 30 bp, Artificial Sequence
  Synthetic oligonucleotide
gtatcttcagctgaacaaactgcatggaca

SEQ ID NO: 371272 - DNA, 30 bp, Artificial Sequence
  Synthetic oligonucleotide
agtgatccgcgaaggcctcggatatggaca

SEQ ID NO: 371273 - DNA, 30 bp, Artificial Sequence
  Synthetic oligonucleotide
atccatcgataagaaggtgcattatggaca

SEQ ID NO: 371274 - DNA, 30 bp, Artificial Sequence
  Synthetic oligonucleotide
ggagtgtatataaggtgccacctctggaca

SEQ ID NO: 371275 - DNA, 30 bp, Artificial Sequence
  Synthetic oligonucleotide
aattagcattcatgtattcggctctggaca

SEQ ID NO: 371276 - DNA, 30 bp, Artificial Sequence
  Synthetic oligonucleotide
ggaatttatgtttcgctgggtacgtggaca

SEQ ID NO: 371277 - DNA, 30 bp, Artificial Sequence
  Synthetic oligonucleotide
tcttatctttgtaattaaggaccgtggaca

SEQ ID NO: 371278 - DNA, 30 bp, Artificial Sequence
  Synthetic oligonucleotide
ggttgaaatgaattacaatcatcgtggaca

SEQ ID NO: 371279 - DNA, 30 bp, Artificial Sequence
  Synthetic oligonucleotide
gatcaggtaaatcggtggggacggtggaca

SEQ ID NO: 371280 - DNA, 30 bp, Artificial Sequence
  Synthetic oligonucleotide
ctccggggtatggctaattctatttggaca

SEQ ID NO: 371281 - DNA, 30 bp, Artificial Sequence
  Synthetic oligonucleotide
aaagaactgctgtgataaatgctttggaca

SEQ ID NO: 371282 - DNA, 30 bp, Artificial Sequence
  Synthetic oligonucleotide
aggagcgaaaatggttataacttttggaca

SEQ ID NO: 371283 - DNA, 30 bp, Artificial Sequence
  Synthetic oligonucleotide
cgcatgccttaacccggagacgacatgaca

SEQ ID NO: 371284 - DNA, 30 bp, Artificial Sequence
  Synthetic oligonucleotide
gcaatagtcccctgccagataagcatgaca

SEQ ID NO: 371285 - DNA, 30 bp, Artificial Sequence
  Synthetic oligonucleotide
ccttagtctcatgtactggtaagcatgaca

SEQ ID NO: 371286 - DNA, 30 bp, Artificial Sequence
  Synthetic oligonucleotide
atggaccttatgggatctctcaggatgaca

SEQ ID NO: 371287 - DNA, 30 bp, Artificial Sequence
  Synthetic oligonucleotide
taaccgatgcttttcggcgcacggatgaca

SEQ ID NO: 371288 - DNA, 30 bp, Artificial Sequence
  Synthetic oligonucleotide
gaatccccaataaggatagcatggatgaca

SEQ ID NO: 371289 - DNA, 30 bp, Artificial Sequence
  Synthetic oligonucleotide
tggtcggtcagcatcttttaaagactgaca

SEQ ID NO: 371290 - DNA, 30 bp, Artificial Sequence
  Synthetic oligonucleotide
ggattataacgatgtattgattggctgaca

SEQ ID NO: 371291 - DNA, 30 bp, Artificial Sequence
  Synthetic oligonucleotide
atttgccagatcggtttttaactgctgaca

SEQ ID NO: 371292 - DNA, 30 bp, Artificial Sequence
  Synthetic oligonucleotide
gagataccttctgtaaattttaaagtgaca

SEQ ID NO: 371293 - DNA, 30 bp, Artificial Sequence
  Synthetic oligonucleotide
aacgctagatggatcactgtgacagtgaca

SEQ ID NO: 371294 - DNA, 30 bp, Artificial Sequence
  Synthetic oligonucleotide
cttgtaagctctctttagaacaacgtgaca

SEQ ID NO: 371295 - DNA, 30 bp, Artificial Sequence
  Synthetic oligonucleotide
ggatcttccgacagcagggctgtggtgaca

SEQ ID NO: 371296 - DNA, 30 bp, Artificial Sequence
  Synthetic oligonucleotide
ctacgtggttttcgcaagatggatgtgaca

SEQ ID NO: 371297 - DNA, 30 bp, Artificial Sequence
  Synthetic oligonucleotide
gcggtggcatagaaatgggactaattgaca

SEQ ID NO: 371298 - DNA, 30 bp, Artificial Sequence
  Synthetic oligonucleotide
tcagtggacgatgcaatgaggtgattgaca

SEQ ID NO: 371299 - DNA, 30 bp, Artificial Sequence
  Synthetic oligonucleotide
tcgttgcgggtatacccacttacgttgaca

SEQ ID NO: 371300 - DNA, 30 bp, Artificial Sequence
  Synthetic oligonucleotide
atactgaataggcggtgttatccgttgaca

SEQ ID NO: 371301 - DNA, 30 bp, Artificial Sequence
  Synthetic oligonucleotide
tgttccgttttcataaatcagttgttgaca

SEQ ID NO: 371302 - DNA, 30 bp, Artificial Sequence
  Synthetic oligonucleotide
atctaccactagcgtttaacagatttgaca

SEQ ID NO: 371303 - DNA, 30 bp, Artificial Sequence
  Synthetic oligonucleotide
aataatgcctcggggaggacttgtttgaca

SEQ ID NO: 371304 - DNA, 30 bp, Artificial Sequence
  Synthetic oligonucleotide
tacaactctgaaaggccttggaaaaataca

SEQ ID NO: 371305 - DNA, 30 bp, Artificial Sequence
  Synthetic oligonucleotide
ctgaagggctaattcttcagttcaaataca

SEQ ID NO: 371306 - DNA, 30 bp, Artificial Sequence
  Synthetic oligonucleotide
ggtctggagcgggtcgagagctgaaataca

SEQ ID NO: 371307 - DNA, 30 bp, Artificial Sequence
  Synthetic oligonucleotide
tgtgccggattcggtctaatcttaaataca

SEQ ID NO: 371308 - DNA, 30 bp, Artificial Sequence
  Synthetic oligonucleotide
actattcatgttgtgcgtcggttaaataca

SEQ ID NO: 371309 - DNA, 30 bp, Artificial Sequence
  Synthetic oligonucleotide
tcgcggttacccagaatacgtatcaataca

SEQ ID NO: 371310 - DNA, 30 bp, Artificial Sequence
  Synthetic oligonucleotide
ggttcccgccagccgcacgtaccgaataca

SEQ ID NO: 371311 - DNA, 30 bp, Artificial Sequence
  Synthetic oligonucleotide
atgggtagcgggtgctttgttaggaataca

SEQ ID NO: 371312 - DNA, 30 bp, Artificial Sequence
  Synthetic oligonucleotide
attcttccggggtctccagatagtaataca

SEQ ID NO: 371313 - DNA, 30 bp, Artificial Sequence
  Synthetic oligonucleotide
ccgacactgccacgaattgacggtaataca

SEQ ID NO: 371314 - DNA, 30 bp, Artificial Sequence
  Synthetic oligonucleotide
gacccggcaactgcaagtctcacacataca

SEQ ID NO: 371315 - DNA, 30 bp, Artificial Sequence
  Synthetic oligonucleotide
ggaaattcctggtggtattagagacataca

SEQ ID NO: 371316 - DNA, 30 bp, Artificial Sequence
  Synthetic oligonucleotide
acatagcggtttggccccgcaaaccataca

SEQ ID NO: 371317 - DNA, 30 bp, Artificial Sequence
  Synthetic oligonucleotide
cacaactacgtagcgaaatgtaggcataca

SEQ ID NO: 371318 - DNA, 30 bp, Artificial Sequence
  Synthetic oligonucleotide
attacttcatcaaagccgttacggcataca

SEQ ID NO: 371319 - DNA, 30 bp, Artificial Sequence
  Synthetic oligonucleotide
cttgggatttgtccgactatgcggcataca

SEQ ID NO: 371320 - DNA, 30 bp, Artificial Sequence
  Synthetic oligonucleotide
aatgtacgccattttattctatgtcataca

SEQ ID NO: 371321 - DNA, 30 bp, Artificial Sequence
  Synthetic oligonucleotide
gttgggttttataccgttcatgcagataca

SEQ ID NO: 371322 - DNA, 30 bp, Artificial Sequence
  Synthetic oligonucleotide
aggtggcggaggtatggagccagagataca

SEQ ID NO: 371323 - DNA, 30 bp, Artificial Sequence
  Synthetic oligonucleotide
taagggcagtgagcagcaatatgagataca

SEQ ID NO: 371324 - DNA, 30 bp, Artificial Sequence
  Synthetic oligonucleotide
tacattatttgaattaattgtgacgataca

SEQ ID NO: 371325 - DNA, 30 bp, Artificial Sequence
  Synthetic oligonucleotide
cagcgctccttggccgggctcggcgataca

SEQ ID NO: 371326 - DNA, 30 bp, Artificial Sequence
  Synthetic oligonucleotide
aaggcacttcacgattacgcgagggataca

SEQ ID NO: 371327 - DNA, 30 bp, Artificial Sequence
  Synthetic oligonucleotide
aaccgtattaggatcggcccacatgataca

SEQ ID NO: 371328 - DNA, 30 bp, Artificial Sequence
  Synthetic oligonucleotide
tcatcccctgaatggatcccagatgataca

SEQ ID NO: 371329 - DNA, 30 bp, Artificial Sequence
  Synthetic oligonucleotide
ttatgatagagggaccacagcgttgataca

SEQ ID NO: 371330 - DNA, 30 bp, Artificial Sequence
  Synthetic oligonucleotide
acggagcagacgttatagccagaatataca

SEQ ID NO: 371331 - DNA, 30 bp, Artificial Sequence
  Synthetic oligonucleotide
tcatccatgaaaccagcctggtaatataca

SEQ ID NO: 371332 - DNA, 28 bp, Artificial Sequence
  Synthetic oligonucleotide
gaccagcggtctcgtttccgtatataca

SEQ ID NO: 371333 - DNA, 26 bp, Artificial Sequence
  Synthetic oligonucleotide
aggctcgtcaatggagagcgtataca

SEQ ID NO: 371334 - DNA, 30 bp, Artificial Sequence
  Synthetic oligonucleotide
aatcctgtgcgcgtcgtcctggcgtataca

SEQ ID NO: 371335 - DNA, 30 bp, Artificial Sequence
  Synthetic oligonucleotide
ttagttttaaatcgccatgtagaaactaca

SEQ ID NO: 371336 - DNA, 30 bp, Artificial Sequence
  Synthetic oligonucleotide
gaaatgttgcttggctcaggctcaactaca

SEQ ID NO: 371337 - DNA, 30 bp, Artificial Sequence
  Synthetic oligonucleotide
tatagggtaatgctacaagctgtaactaca

SEQ ID NO: 371338 - DNA, 30 bp, Artificial Sequence
  Synthetic oligonucleotide
ctataacagaatcactgacttgacactaca

SEQ ID NO: 371339 - DNA, 30 bp, Artificial Sequence
  Synthetic oligonucleotide
cgcagacgttctctgaccaatcccactaca

SEQ ID NO: 371340 - DNA, 30 bp, Artificial Sequence
  Synthetic oligonucleotide
tgacccgcgcgaagaccgatactcactaca

SEQ ID NO: 371341 - DNA, 30 bp, Artificial Sequence
  Synthetic oligonucleotide
tttgtcactagatacgaagagttcactaca

SEQ ID NO: 371342 - DNA, 30 bp, Artificial Sequence
  Synthetic oligonucleotide
cagttagacaagcttgctgacgagactaca

SEQ ID NO: 371343 - DNA, 30 bp, Artificial Sequence
  Synthetic oligonucleotide
atagggtcggaaaagtattcggagactaca

SEQ ID NO: 371344 - DNA, 30 bp, Artificial Sequence
  Synthetic oligonucleotide
accgtattcaccagagcccgtatgactaca

SEQ ID NO: 371345 - DNA, 30 bp, Artificial Sequence
  Synthetic oligonucleotide
cttgcaatcgctcaaaggtccctgactaca

SEQ ID NO: 371346 - DNA, 30 bp, Artificial Sequence
  Synthetic oligonucleotide
cccagtggattataagtcagaaatactaca

SEQ ID NO: 371347 - DNA, 30 bp, Artificial Sequence
  Synthetic oligonucleotide
ggatggcttatagcgtctacttgccctaca

SEQ ID NO: 371348 - DNA, 30 bp, Artificial Sequence
  Synthetic oligonucleotide
gctcagctccctataccgcccgtccctaca

SEQ ID NO: 371349 - DNA, 30 bp, Artificial Sequence
  Synthetic oligonucleotide
ttatgggattaaacggttataaagcctaca

SEQ ID NO: 371350 - DNA, 30 bp, Artificial Sequence
  Synthetic oligonucleotide
gccccactggagaggtcgcggactcctaca

SEQ ID NO: 371351 - DNA, 30 bp, Artificial Sequence
  Synthetic oligonucleotide
aggtttatttcaacggtcgttgaagctaca

SEQ ID NO: 371352 - DNA, 30 bp, Artificial Sequence
  Synthetic oligonucleotide
gcatatagtggtcaactggattacgctaca

SEQ ID NO: 371353 - DNA, 30 bp, Artificial Sequence
  Synthetic oligonucleotide
accaagaaaaccacccggcctcccgctaca

SEQ ID NO: 371354 - DNA, 30 bp, Artificial Sequence
  Synthetic oligonucleotide
tgagtagggtgatgtacggagcaggctaca

SEQ ID NO: 371355 - DNA, 30 bp, Artificial Sequence
  Synthetic oligonucleotide
gagggggatagtcccgggacctctgctaca

SEQ ID NO: 371356 - DNA, 30 bp, Artificial Sequence
  Synthetic oligonucleotide
agaattagcactatgtttgcgttatctaca

SEQ ID NO: 371357 - DNA, 31 bp, Artificial Sequence
  Synthetic oligonucleotide
agagtaaaaggatggacgctatttatctaca

SEQ ID NO: 371358 - DNA, 30 bp, Artificial Sequence
  Synthetic oligonucleotide
ttaattcgtctatttctaatttgctctaca

SEQ ID NO: 371359 - DNA, 30 bp, Artificial Sequence
  Synthetic oligonucleotide
ggctctgatattcgagcgtactcgtctaca

SEQ ID NO: 371360 - DNA, 30 bp, Artificial Sequence
  Synthetic oligonucleotide
gtgtggaatcgtgctgggctctcgtctaca

SEQ ID NO: 371361 - DNA, 30 bp, Artificial Sequence
  Synthetic oligonucleotide
tgtgtcaagtctgagtgcacccggtctaca

SEQ ID NO: 371362 - DNA, 30 bp, Artificial Sequence
  Synthetic oligonucleotide
ccctcgcacctttgaaattgtatgtctaca

SEQ ID NO: 371363 - DNA, 30 bp, Artificial Sequence
  Synthetic oligonucleotide
atgctaccttatcgcttacggttgtctaca

SEQ ID NO: 371364 - DNA, 30 bp, Artificial Sequence
  Synthetic oligonucleotide
tctcggtgtaagcggtcctatttttctaca

SEQ ID NO: 371365 - DNA, 30 bp, Artificial Sequence
  Synthetic oligonucleotide
gctgttcttgactttggcgggaaaagtaca

SEQ ID NO: 371366 - DNA, 30 bp, Artificial Sequence
  Synthetic oligonucleotide
cgtcgcagccaagttgattacgaaagtaca

SEQ ID NO: 371367 - DNA, 30 bp, Artificial Sequence
  Synthetic oligonucleotide
aggacaaacgcttgtattgctataagtaca

SEQ ID NO: 371368 - DNA, 30 bp, Artificial Sequence
  Synthetic oligonucleotide
cctggcgtaaccgtttggtgtataagtaca

SEQ ID NO: 371369 - DNA, 30 bp, Artificial Sequence
  Synthetic oligonucleotide
ggctaagtaagggggtaaaccctaagtaca

SEQ ID NO: 371370 - DNA, 30 bp, Artificial Sequence
  Synthetic oligonucleotide
gcatacacgatcagacgtaatctaagtaca

SEQ ID NO: 371371 - DNA, 30 bp, Artificial Sequence
  Synthetic oligonucleotide
aatgattcgagcttgccctttgggagtaca

SEQ ID NO: 371372 - DNA, 30 bp, Artificial Sequence
  Synthetic oligonucleotide
ccgtgttaccttaggcttaatactagtaca

SEQ ID NO: 371373 - DNA, 30 bp, Artificial Sequence
  Synthetic oligonucleotide
atcaagctcagtttggatgttgctagtaca

SEQ ID NO: 371374 - DNA, 30 bp, Artificial Sequence
  Synthetic oligonucleotide
gcatgtcatcgccgcatcttaggacgtaca

SEQ ID NO: 371375 - DNA, 30 bp, Artificial Sequence
  Synthetic oligonucleotide
catgtggctccgaatgtatgcgcccgtaca

SEQ ID NO: 371376 - DNA, 30 bp, Artificial Sequence
  Synthetic oligonucleotide
gttgaagataggtcatatcacgcgcgtaca

SEQ ID NO: 371377 - DNA, 30 bp, Artificial Sequence
  Synthetic oligonucleotide
ttagtcaaactagacatatcttcgcgtaca

SEQ ID NO: 371378 - DNA, 30 bp, Artificial Sequence
  Synthetic oligonucleotide
gaattccgttcacaagctcaacggcgtaca

SEQ ID NO: 371379 - DNA, 30 bp, Artificial Sequence
  Synthetic oligonucleotide
agtaattgtgtggagtgacacagtcgtaca

SEQ ID NO: 371380 - DNA, 30 bp, Artificial Sequence
  Synthetic oligonucleotide
tattatagcacgtatagtagtgttcgtaca

SEQ ID NO: 371381 - DNA, 30 bp, Artificial Sequence
  Synthetic oligonucleotide
actcgcagttcgaatgccctgaccggtaca

SEQ ID NO: 371382 - DNA, 30 bp, Artificial Sequence
  Synthetic oligonucleotide
agattgttgagcggtataatgactggtaca

SEQ ID NO: 371383 - DNA, 30 bp, Artificial Sequence
  Synthetic oligonucleotide
caacggaagtcgacgtcttgtactggtaca

SEQ ID NO: 371384 - DNA, 30 bp, Artificial Sequence
  Synthetic oligonucleotide
gtaaacggatttacggtagagcgtggtaca

SEQ ID NO: 371385 - DNA, 30 bp, Artificial Sequence
  Synthetic oligonucleotide
atatgaacggaactacgtgctaaatgtaca

SEQ ID NO: 371386 - DNA, 30 bp, Artificial Sequence
  Synthetic oligonucleotide
tagctagacgggcttatacctcaatgtaca

SEQ ID NO: 371387 - DNA, 30 bp, Artificial Sequence
  Synthetic oligonucleotide
gtgcgcctactagactttataatctgtaca

SEQ ID NO: 371388 - DNA, 30 bp, Artificial Sequence
  Synthetic oligonucleotide
acataattactatatggcttgttctgtaca

SEQ ID NO: 371389 - DNA, 30 bp, Artificial Sequence
  Synthetic oligonucleotide
tccctaaacggagatgactttgcgtgtaca

SEQ ID NO: 371390 - DNA, 30 bp, Artificial Sequence
  Synthetic oligonucleotide
gttttaactagactgggttgcccttgtaca

SEQ ID NO: 371391 - DNA, 30 bp, Artificial Sequence
  Synthetic oligonucleotide
gaggatctagtaaaaccgtgccaaattaca

SEQ ID NO: 371392 - DNA, 30 bp, Artificial Sequence
  Synthetic oligonucleotide
gaggtcaacatttccaacccctccattaca

SEQ ID NO: 371393 - DNA, 30 bp, Artificial Sequence
  Synthetic oligonucleotide
tcgcatgattatgtccgagtagagattaca

SEQ ID NO: 371394 - DNA, 30 bp, Artificial Sequence
  Synthetic oligonucleotide
attttaccggacgaactttctctgattaca

SEQ ID NO: 371395 - DNA, 30 bp, Artificial Sequence
  Synthetic oligonucleotide
ggtctactagagcctcctgcgtatattaca

SEQ ID NO: 371396 - DNA, 30 bp, Artificial Sequence
  Synthetic oligonucleotide
atgactgaatgagacaagttgtcacttaca

SEQ ID NO: 371397 - DNA, 30 bp, Artificial Sequence
  Synthetic oligonucleotide
cggccaattaggtcacgtaacagacttaca

SEQ ID NO: 371398 - DNA, 30 bp, Artificial Sequence
  Synthetic oligonucleotide
gtagaatccaacttgcgctacacccttaca

SEQ ID NO: 371399 - DNA, 30 bp, Artificial Sequence
  Synthetic oligonucleotide
gaggggactggacggtcggtgtgtcttaca

SEQ ID NO: 371400 - DNA, 30 bp, Artificial Sequence
  Synthetic oligonucleotide
ggatcgtgacggcaggtatcccttcttaca

SEQ ID NO: 371401 - DNA, 30 bp, Artificial Sequence
  Synthetic oligonucleotide
caactaacctctactagtaggtaagttaca

SEQ ID NO: 371402 - DNA, 30 bp, Artificial Sequence
  Synthetic oligonucleotide
agatgtttcgtgttgtatcgggaggttaca

SEQ ID NO: 371403 - DNA, 30 bp, Artificial Sequence
  Synthetic oligonucleotide
gcactgacgactatcattatgacggttaca

SEQ ID NO: 371404 - DNA, 30 bp, Artificial Sequence
  Synthetic oligonucleotide
gtttaattcccgcatgatgtgacggttaca

SEQ ID NO: 371405 - DNA, 30 bp, Artificial Sequence
  Synthetic oligonucleotide
taacatgctgtgcgtaaagaggcggttaca

SEQ ID NO: 371406 - DNA, 30 bp, Artificial Sequence
  Synthetic oligonucleotide
aaaaagagagactttttaatgggggttaca

SEQ ID NO: 371407 - DNA, 30 bp, Artificial Sequence
  Synthetic oligonucleotide
gtcaatcgcccactcttagggggtgttaca

SEQ ID NO: 371408 - DNA, 30 bp, Artificial Sequence
  Synthetic oligonucleotide
tatcacccggataatccttgtggtgttaca

SEQ ID NO: 371409 - DNA, 29 bp, Artificial Sequence
  Synthetic oligonucleotide
aggtgttctgttaacatcgaattgttaca

SEQ ID NO: 371410 - DNA, 30 bp, Artificial Sequence
  Synthetic oligonucleotide
acgcctttccaaacgctccgaaaatttaca

SEQ ID NO: 371411 - DNA, 30 bp, Artificial Sequence
  Synthetic oligonucleotide
aagagcgtccacatgtcccagacatttaca

SEQ ID NO: 371412 - DNA, 30 bp, Artificial Sequence
  Synthetic oligonucleotide
cacctaacaagaggacttataatatttaca

SEQ ID NO: 371413 - DNA, 30 bp, Artificial Sequence
  Synthetic oligonucleotide
gaagtagtacgcgttacacttgactttaca

SEQ ID NO: 371414 - DNA, 30 bp, Artificial Sequence
  Synthetic oligonucleotide
ttctattttgaatggagaacttcgtttaca

SEQ ID NO: 371415 - DNA, 30 bp, Artificial Sequence
  Synthetic oligonucleotide
aagatcgctaagttaattacaggttttaca

SEQ ID NO: 371416 - DNA, 30 bp, Artificial Sequence
  Synthetic oligonucleotide
ctgatagacacacgacgtgtaatttttaca

SEQ ID NO: 371417 - DNA, 30 bp, Artificial Sequence
  Synthetic oligonucleotide
gccggtcaacacagtagaagtctttttaca

SEQ ID NO: 371418 - DNA, 30 bp, Artificial Sequence
  Synthetic oligonucleotide
aaatttagacttgggggcacaagaaaacca

SEQ ID NO: 371419 - DNA, 30 bp, Artificial Sequence
  Synthetic oligonucleotide
gtatacgctatttatgtaatatacaaacca

SEQ ID NO: 371420 - DNA, 30 bp, Artificial Sequence
  Synthetic oligonucleotide
gaatttctggctgaaccatgcgagaaacca

SEQ ID NO: 371421 - DNA, 30 bp, Artificial Sequence
  Synthetic oligonucleotide
ctaagatttagtaattttgtttagaaacca

SEQ ID NO: 371422 - DNA, 30 bp, Artificial Sequence
  Synthetic oligonucleotide
aattggccgcggagatcggtttctaaacca

SEQ ID NO: 371423 - DNA, 30 bp, Artificial Sequence
  Synthetic oligonucleotide
gcagcctagtgtagaatggggagtaaacca

SEQ ID NO: 371424 - DNA, 30 bp, Artificial Sequence
  Synthetic oligonucleotide
ggcagattgggtcccgagaaaaaacaacca

SEQ ID NO: 371425 - DNA, 30 bp, Artificial Sequence
  Synthetic oligonucleotide
atatttaattttacgaacgaaagacaacca

SEQ ID NO: 371426 - DNA, 30 bp, Artificial Sequence
  Synthetic oligonucleotide
tcgagatcgtatggctccgggacgcaacca

SEQ ID NO: 371427 - DNA, 30 bp, Artificial Sequence
  Synthetic oligonucleotide
tcgccacccaacccgccaaccaatcaacca

SEQ ID NO: 371428 - DNA, 30 bp, Artificial Sequence
  Synthetic oligonucleotide
ctaaccgcgccgcccgcggagattcaacca

SEQ ID NO: 371429 - DNA, 30 bp, Artificial Sequence
  Synthetic oligonucleotide
actctttgataaggaatattgcccgaacca

SEQ ID NO: 371430 - DNA, 30 bp, Artificial Sequence
  Synthetic oligonucleotide
attggaacacagcgcctagcgtgcgaacca

SEQ ID NO: 371431 - DNA, 30 bp, Artificial Sequence
  Synthetic oligonucleotide
gtgcctttcggtattgggccgggggaacca

SEQ ID NO: 371432 - DNA, 30 bp, Artificial Sequence
  Synthetic oligonucleotide
agttatagtgtaatggctcattgggaacca

SEQ ID NO: 371433 - DNA, 31 bp, Artificial Sequence
  Synthetic oligonucleotide
gaagccagctccctgggaggaggaataacca

SEQ ID NO: 371434 - DNA, 30 bp, Artificial Sequence
  Synthetic oligonucleotide
aagggctctcgagagatgcattcataacca

SEQ ID NO: 371435 - DNA, 30 bp, Artificial Sequence
  Synthetic oligonucleotide
atgttcgggcagttcatcgcaagataacca

SEQ ID NO: 371436 - DNA, 30 bp, Artificial Sequence
  Synthetic oligonucleotide
ggattcataaccctctttgggggataacca

SEQ ID NO: 371437 - DNA, 30 bp, Artificial Sequence
  Synthetic oligonucleotide
tataattactagtggcagaccgtataacca

SEQ ID NO: 371438 - DNA, 30 bp, Artificial Sequence
  Synthetic oligonucleotide
ggtcggacgcgatgttagtcgtcctaacca

SEQ ID NO: 371439 - DNA, 30 bp, Artificial Sequence
  Synthetic oligonucleotide
tctcaaagttcatcataactgctctaacca

SEQ ID NO: 371440 - DNA, 30 bp, Artificial Sequence
  Synthetic oligonucleotide
gggattgtctgtcccagatttgggtaacca

SEQ ID NO: 371441 - DNA, 30 bp, Artificial Sequence
  Synthetic oligonucleotide
ttaaaagattccttacacagcatgtaacca

SEQ ID NO: 371442 - DNA, 30 bp, Artificial Sequence
  Synthetic oligonucleotide
aaattgtcactgtgcataggtctaacacca

SEQ ID NO: 371443 - DNA, 31 bp, Artificial Sequence
  Synthetic oligonucleotide
catgccgcctgtccaacgggcggatacacca

SEQ ID NO: 371444 - DNA, 30 bp, Artificial Sequence
  Synthetic oligonucleotide
tattagcgtcacattctaggtgttacacca

SEQ ID NO: 371445 - DNA, 30 bp, Artificial Sequence
  Synthetic oligonucleotide
tttcaaaattacgagtattctcaaccacca

SEQ ID NO: 371446 - DNA, 30 bp, Artificial Sequence
  Synthetic oligonucleotide
gctggcctgcgcgacgagggggcaccacca

SEQ ID NO: 371447 - DNA, 30 bp, Artificial Sequence
  Synthetic oligonucleotide
ctagcctggtccctttaccagataccacca

SEQ ID NO: 371448 - DNA, 30 bp, Artificial Sequence
  Synthetic oligonucleotide
agtgacgcttaagtgacagccaacccacca

SEQ ID NO: 371449 - DNA, 30 bp, Artificial Sequence
  Synthetic oligonucleotide
aaactaccgaggcagttaatagagccacca

SEQ ID NO: 371450 - DNA, 30 bp, Artificial Sequence
  Synthetic oligonucleotide
gccatggcgacggtacatcatcggccacca

SEQ ID NO: 371451 - DNA, 30 bp, Artificial Sequence
  Synthetic oligonucleotide
agtgacatgaggaattccaagaatccacca

SEQ ID NO: 371452 - DNA, 30 bp, Artificial Sequence
  Synthetic oligonucleotide
ctggtaagggacgcccttctgtatccacca

SEQ ID NO: 371453 - DNA, 30 bp, Artificial Sequence
  Synthetic oligonucleotide
cgcctatacgtggacaatgtcccagcacca

SEQ ID NO: 371454 - DNA, 30 bp, Artificial Sequence
  Synthetic oligonucleotide
taagctccctcccgtccgtcggtagcacca

SEQ ID NO: 371455 - DNA, 30 bp, Artificial Sequence
  Synthetic oligonucleotide
taaaacaaatgcgagaatcagaacgcacca

SEQ ID NO: 371456 - DNA, 30 bp, Artificial Sequence
  Synthetic oligonucleotide
cgtaattacctaagtagatcacgcgcacca

SEQ ID NO: 371457 - DNA, 30 bp, Artificial Sequence
  Synthetic oligonucleotide
aagatggaggttggcacgggtttggcacca

SEQ ID NO: 371458 - DNA, 30 bp, Artificial Sequence
  Synthetic oligonucleotide
gcccgtctccatgtgttcgaaagtgcacca

SEQ ID NO: 371459 - DNA, 30 bp, Artificial Sequence
  Synthetic oligonucleotide
agtcttttgatttaaagcaacggatcacca

SEQ ID NO: 371460 - DNA, 30 bp, Artificial Sequence
  Synthetic oligonucleotide
agagccaggttctaccaaccgtcgtcacca

SEQ ID NO: 371461 - DNA, 30 bp, Artificial Sequence
  Synthetic oligonucleotide
acgcttgggcgctaatcgatatggtcacca

SEQ ID NO: 371462 - DNA, 30 bp, Artificial Sequence
  Synthetic oligonucleotide
aaaaagcttctacttgctgggataagacca

SEQ ID NO: 371463 - DNA, 30 bp, Artificial Sequence
  Synthetic oligonucleotide
gacctacctaggtatggacactccagacca

SEQ ID NO: 371464 - DNA, 30 bp, Artificial Sequence
  Synthetic oligonucleotide
tgtaattataaaacgctgcgttccagacca

SEQ ID NO: 371465 - DNA, 30 bp, Artificial Sequence
  Synthetic oligonucleotide
aggtaacgccggccagaagcgtagagacca

SEQ ID NO: 371466 - DNA, 30 bp, Artificial Sequence
  Synthetic oligonucleotide
tcgacggtactaatgcgacgttagagacca

SEQ ID NO: 371467 - DNA, 30 bp, Artificial Sequence
  Synthetic oligonucleotide
tgagtgaatacgcaagcattcacgagacca

SEQ ID NO: 371468 - DNA, 30 bp, Artificial Sequence
  Synthetic oligonucleotide
gggataacgtctcatcaccacaggagacca

SEQ ID NO: 371469 - DNA, 30 bp, Artificial Sequence
  Synthetic oligonucleotide
aagaaatagtcatccgtattcgctagacca

SEQ ID NO: 371470 - DNA, 30 bp, Artificial Sequence
  Synthetic oligonucleotide
ccctataatttgttcagcgggagacgacca

SEQ ID NO: 371471 - DNA, 30 bp, Artificial Sequence
  Synthetic oligonucleotide
cttctgggcgataaccgtccctgacgacca

SEQ ID NO: 371472 - DNA, 30 bp, Artificial Sequence
  Synthetic oligonucleotide
tacaagaggccatgtgggagaaatcgacca

SEQ ID NO: 371473 - DNA, 30 bp, Artificial Sequence
  Synthetic oligonucleotide
agttcaggtctgacttctggggcaggacca

SEQ ID NO: 371474 - DNA, 30 bp, Artificial Sequence
  Synthetic oligonucleotide
catggtgattaagctgcttatcctggacca

SEQ ID NO: 371475 - DNA, 30 bp, Artificial Sequence
  Synthetic oligonucleotide
gatgcttctcacaagaaagtatctggacca

SEQ ID NO: 371476 - DNA, 30 bp, Artificial Sequence
  Synthetic oligonucleotide
tctgttggcatggttgcttctggtggacca

SEQ ID NO: 371477 - DNA, 30 bp, Artificial Sequence
  Synthetic oligonucleotide
cgccatgggagttcggagcgaccatgacca

SEQ ID NO: 371478 - DNA, 30 bp, Artificial Sequence
  Synthetic oligonucleotide
atgtgtaaatattgaagttgcatatgacca

SEQ ID NO: 371479 - DNA, 30 bp, Artificial Sequence
  Synthetic oligonucleotide
ccctgattaaaggccatgggctactgacca

SEQ ID NO: 371480 - DNA, 30 bp, Artificial Sequence
  Synthetic oligonucleotide
gccatttctggcagatctctcgtctgacca

SEQ ID NO: 371481 - DNA, 30 bp, Artificial Sequence
  Synthetic oligonucleotide
tatgagaatggtaggagtttcgtctgacca

SEQ ID NO: 371482 - DNA, 30 bp, Artificial Sequence
  Synthetic oligonucleotide
cggcgcttttaggcatccgacctgtgacca

SEQ ID NO: 371483 - DNA, 30 bp, Artificial Sequence
  Synthetic oligonucleotide
gcgtttacaatgaagagttcatcaatacca

SEQ ID NO: 371484 - DNA, 30 bp, Artificial Sequence
  Synthetic oligonucleotide
attttcggtgacataccagtatgaatacca

SEQ ID NO: 371485 - DNA, 30 bp, Artificial Sequence
  Synthetic oligonucleotide
gggggcattcaccgaaccgtttgaatacca

SEQ ID NO: 371486 - DNA, 30 bp, Artificial Sequence
  Synthetic oligonucleotide
caagccagtgacggggacaggaacatacca

SEQ ID NO: 371487 - DNA, 30 bp, Artificial Sequence
  Synthetic oligonucleotide
catgtcactcacacaaagtgcgacatacca

SEQ ID NO: 371488 - DNA, 30 bp, Artificial Sequence
  Synthetic oligonucleotide
ttgtgccttcacacatccggtggcatacca

SEQ ID NO: 371489 - DNA, 30 bp, Artificial Sequence
  Synthetic oligonucleotide
tggattctcatcgaatttaggtgtatacca

SEQ ID NO: 371490 - DNA, 30 bp, Artificial Sequence
  Synthetic oligonucleotide
gatatgtagtcttcttcccagagactacca

SEQ ID NO: 371491 - DNA, 30 bp, Artificial Sequence
  Synthetic oligonucleotide
aatttccaggccatggatctgtgactacca

SEQ ID NO: 371492 - DNA, 30 bp, Artificial Sequence
  Synthetic oligonucleotide
cataactcctgatccaatggcttactacca

SEQ ID NO: 371493 - DNA, 30 bp, Artificial Sequence
  Synthetic oligonucleotide
ttaaactcggatatccccttcttactacca

SEQ ID NO: 371494 - DNA, 30 bp, Artificial Sequence
  Synthetic oligonucleotide
gcagggctcataatcgacaggtccctacca

SEQ ID NO: 371495 - DNA, 30 bp, Artificial Sequence
  Synthetic oligonucleotide
ttgacttgatagacgcatctagatctacca

SEQ ID NO: 371496 - DNA, 30 bp, Artificial Sequence
  Synthetic oligonucleotide
gagtaaggcttgagtagacacgtagtacca

SEQ ID NO: 371497 - DNA, 30 bp, Artificial Sequence
  Synthetic oligonucleotide
catcccacttttaagctggccttagtacca

SEQ ID NO: 371498 - DNA, 30 bp, Artificial Sequence
  Synthetic oligonucleotide
ttgccctatttccggtaatcagccgtacca

SEQ ID NO: 371499 - DNA, 30 bp, Artificial Sequence
  Synthetic oligonucleotide
gcccttactcatatgaatgatagggtacca

SEQ ID NO: 371500 - DNA, 30 bp, Artificial Sequence
  Synthetic oligonucleotide
cacataagaccatagttctacgtggtacca

SEQ ID NO: 371501 - DNA, 30 bp, Artificial Sequence
  Synthetic oligonucleotide
accagtacgatgggtatggacactgtacca

SEQ ID NO: 371502 - DNA, 30 bp, Artificial Sequence
  Synthetic oligonucleotide
ctctattataatagatgagcacaattacca

SEQ ID NO: 371503 - DNA, 30 bp, Artificial Sequence
  Synthetic oligonucleotide
tacttaacacacatctagcacacattacca

SEQ ID NO: 371504 - DNA, 30 bp, Artificial Sequence
  Synthetic oligonucleotide
tcttggacccatttgattgttggattacca

SEQ ID NO: 371505 - DNA, 30 bp, Artificial Sequence
  Synthetic oligonucleotide
tttgcttctctacgtgcctcgatcttacca

SEQ ID NO: 371506 - DNA, 30 bp, Artificial Sequence
  Synthetic oligonucleotide
gcccgaaatccggttaatagggtcttacca

SEQ ID NO: 371507 - DNA, 30 bp, Artificial Sequence
  Synthetic oligonucleotide
acccgctttgaattataagtttcgttacca

SEQ ID NO: 371508 - DNA, 30 bp, Artificial Sequence
  Synthetic oligonucleotide
tcgggttcaggcgcgcaaattttgttacca

SEQ ID NO: 371509 - DNA, 30 bp, Artificial Sequence
  Synthetic oligonucleotide
acaccaacattctatacagtgtatttacca

SEQ ID NO: 371510 - DNA, 30 bp, Artificial Sequence
  Synthetic oligonucleotide
cagagagaatactttggttttcttttacca

SEQ ID NO: 371511 - DNA, 30 bp, Artificial Sequence
  Synthetic oligonucleotide
gagtcggtagtcaaggagtatcaaaaccca

SEQ ID NO: 371512 - DNA, 31 bp, Artificial Sequence
  Synthetic oligonucleotide
cggatttgatgatcttctcaagtggaaccca

SEQ ID NO: 371513 - DNA, 30 bp, Artificial Sequence
  Synthetic oligonucleotide
tcgtgatctttcggatgaaagatgaaccca

SEQ ID NO: 371514 - DNA, 30 bp, Artificial Sequence
  Synthetic oligonucleotide
ataaacagaaagggaaggtgtgtacaccca

SEQ ID NO: 371515 - DNA, 30 bp, Artificial Sequence
  Synthetic oligonucleotide
acgcactccgtaacataggaggcgcaccca

SEQ ID NO: 371516 - DNA, 30 bp, Artificial Sequence
  Synthetic oligonucleotide
attcgtaagctgaagaatgattcgcaccca

SEQ ID NO: 371517 - DNA, 30 bp, Artificial Sequence
  Synthetic oligonucleotide
aactctgcgacgtccgaggtgtcagaccca

SEQ ID NO: 371518 - DNA, 30 bp, Artificial Sequence
  Synthetic oligonucleotide
gtaggttcgtaggaacacgtctcggaccca

SEQ ID NO: 371519 - DNA, 30 bp, Artificial Sequence
  Synthetic oligonucleotide
gtctcccgtattacagctaatcgggaccca

SEQ ID NO: 371520 - DNA, 30 bp, Artificial Sequence
  Synthetic oligonucleotide
ccgtgacaacggaagtttcatatggaccca

SEQ ID NO: 371521 - DNA, 30 bp, Artificial Sequence
  Synthetic oligonucleotide
cccgctccggaaccacgacatgatgaccca

SEQ ID NO: 371522 - DNA, 30 bp, Artificial Sequence
  Synthetic oligonucleotide
cactgggaactgaaagtgctctctgaccca

SEQ ID NO: 371523 - DNA, 30 bp, Artificial Sequence
  Synthetic oligonucleotide
ccacgttgtgccgtaaacgatattgaccca

SEQ ID NO: 371524 - DNA, 30 bp, Artificial Sequence
  Synthetic oligonucleotide
aaaggtagcaatacctgcccaaaataccca

SEQ ID NO: 371525 - DNA, 30 bp, Artificial Sequence
  Synthetic oligonucleotide
tcgactccgtagggacgctggtgataccca

SEQ ID NO: 371526 - DNA, 30 bp, Artificial Sequence
  Synthetic oligonucleotide
atccttaccggtcacaccgaagactaccca

SEQ ID NO: 371527 - DNA, 30 bp, Artificial Sequence
  Synthetic oligonucleotide
agttcggattatcggaatgagcagtaccca

SEQ ID NO: 371528 - DNA, 30 bp, Artificial Sequence
  Synthetic oligonucleotide
tcgcacagtggcaagaagcctccttaccca

SEQ ID NO: 371529 - DNA, 30 bp, Artificial Sequence
  Synthetic oligonucleotide
tcaccgagatagaatttgagatgttaccca

SEQ ID NO: 371530 - DNA, 30 bp, Artificial Sequence
  Synthetic oligonucleotide
ggtgatctgcgcgaagggtatatttaccca

SEQ ID NO: 371531 - DNA, 30 bp, Artificial Sequence
  Synthetic oligonucleotide
cgcatcgatgaagttttggatagaacccca

SEQ ID NO: 371532 - DNA, 31 bp, Artificial Sequence
  Synthetic oligonucleotide
tgcccggttatccttatcataacgaacccca

SEQ ID NO: 371533 - DNA, 30 bp, Artificial Sequence
  Synthetic oligonucleotide
gttcaacgaggacttgtttctcgcacccca

SEQ ID NO: 371534 - DNA, 30 bp, Artificial Sequence
  Synthetic oligonucleotide
aaactgtcacggtacgaacagtgtacccca

SEQ ID NO: 371535 - DNA, 30 bp, Artificial Sequence
  Synthetic oligonucleotide
ggctggttaatgaaacctcgggttacccca

SEQ ID NO: 371536 - DNA, 30 bp, Artificial Sequence
  Synthetic oligonucleotide
ttttgaagcagtggagaagaggcaccccca

SEQ ID NO: 371537 - DNA, 30 bp, Artificial Sequence
  Synthetic oligonucleotide
ccgtacgcattctatggtggtatcccccca

SEQ ID NO: 371538 - DNA, 30 bp, Artificial Sequence
  Synthetic oligonucleotide
gtacatacgaggttattggagtggccccca

SEQ ID NO: 371539 - DNA, 30 bp, Artificial Sequence
  Synthetic oligonucleotide
tagggttgctatagggacacgtgtccccca

SEQ ID NO: 371540 - DNA, 30 bp, Artificial Sequence
  Synthetic oligonucleotide
atcgaagtaccaattagctcgaacgcccca

SEQ ID NO: 371541 - DNA, 30 bp, Artificial Sequence
  Synthetic oligonucleotide
gctaacagaaggagcaagttccacgcccca

SEQ ID NO: 371542 - DNA, 30 bp, Artificial Sequence
  Synthetic oligonucleotide
tgacctaaaggctgagccgcccaggcccca

SEQ ID NO: 371543 - DNA, 30 bp, Artificial Sequence
  Synthetic oligonucleotide
ggaaagaccctcgaatttcacagggcccca

SEQ ID NO: 371544 - DNA, 30 bp, Artificial Sequence
  Synthetic oligonucleotide
ttatctattaaacccggtagactggcccca

SEQ ID NO: 371545 - DNA, 30 bp, Artificial Sequence
  Synthetic oligonucleotide
taatacctttgctccacaagcgtgtcccca

SEQ ID NO: 371546 - DNA, 30 bp, Artificial Sequence
  Synthetic oligonucleotide
gtaagtgattattgtgcaggacattcccca

SEQ ID NO: 371547 - DNA, 30 bp, Artificial Sequence
  Synthetic oligonucleotide
aatcctaaaagagacgtttctagttcccca

SEQ ID NO: 371548 - DNA, 30 bp, Artificial Sequence
  Synthetic oligonucleotide
ccccaactgggggctgcagtattcagccca

SEQ ID NO: 371549 - DNA, 30 bp, Artificial Sequence
  Synthetic oligonucleotide
tgaccccaacatgctatgatgacacgccca

SEQ ID NO: 371550 - DNA, 30 bp, Artificial Sequence
  Synthetic oligonucleotide
taattacaacaccagtctgttagccgccca

SEQ ID NO: 371551 - DNA, 30 bp, Artificial Sequence
  Synthetic oligonucleotide
caagtagttagtggtcggttataaggccca

SEQ ID NO: 371552 - DNA, 30 bp, Artificial Sequence
  Synthetic oligonucleotide
gatgtctgggcaggagtggggacaggccca

SEQ ID NO: 371553 - DNA, 30 bp, Artificial Sequence
  Synthetic oligonucleotide
tctggatttgggataagcagtacaggccca

SEQ ID NO: 371554 - DNA, 30 bp, Artificial Sequence
  Synthetic oligonucleotide
ctcatcgttccacacgattagaacggccca

SEQ ID NO: 371555 - DNA, 30 bp, Artificial Sequence
  Synthetic oligonucleotide
ctatgcaacgcgcctgcactaatgggccca

SEQ ID NO: 371556 - DNA, 30 bp, Artificial Sequence
  Synthetic oligonucleotide
gcagcgatgcataggtgatgagatggccca

SEQ ID NO: 371557 - DNA, 30 bp, Artificial Sequence
  Synthetic oligonucleotide
gccagcgctgccattatgggtactggccca

SEQ ID NO: 371558 - DNA, 30 bp, Artificial Sequence
  Synthetic oligonucleotide
aaaattgttccgtacgttgggcattgccca

SEQ ID NO: 371559 - DNA, 30 bp, Artificial Sequence
  Synthetic oligonucleotide
gtggtccggcaaccgggtaagtattgccca

SEQ ID NO: 371560 - DNA, 30 bp, Artificial Sequence
  Synthetic oligonucleotide
ctgcaggtaccctacctgtgtaaaatccca

SEQ ID NO: 371561 - DNA, 29 bp, Artificial Sequence
  Synthetic oligonucleotide
tactatcattggtattataatcaatccca

SEQ ID NO: 371562 - DNA, 30 bp, Artificial Sequence
  Synthetic oligonucleotide
cgtgcatccattagatggaaaataatccca

SEQ ID NO: 371563 - DNA, 30 bp, Artificial Sequence
  Synthetic oligonucleotide
acttttccacacatggactcgataatccca

SEQ ID NO: 371564 - DNA, 30 bp, Artificial Sequence
  Synthetic oligonucleotide
tgtgcttctcattggatggcactaatccca

SEQ ID NO: 371565 - DNA, 30 bp, Artificial Sequence
  Synthetic oligonucleotide
tcaaatcagttttacgattgttacatccca

SEQ ID NO: 371566 - DNA, 30 bp, Artificial Sequence
  Synthetic oligonucleotide
gaagacgtttatcgaataccctccatccca

SEQ ID NO: 371567 - DNA, 30 bp, Artificial Sequence
  Synthetic oligonucleotide
gatagggtgacgccaagactggctatccca

SEQ ID NO: 371568 - DNA, 30 bp, Artificial Sequence
  Synthetic oligonucleotide
aggttgcccgcgtcgatttacacactccca

SEQ ID NO: 371569 - DNA, 30 bp, Artificial Sequence
  Synthetic oligonucleotide
caggggggcagtacgaagtccacactccca

SEQ ID NO: 371570 - DNA, 30 bp, Artificial Sequence
  Synthetic oligonucleotide
ctatggcgcttacctcgggctcacctccca

SEQ ID NO: 371571 - DNA, 30 bp, Artificial Sequence
  Synthetic oligonucleotide
gcggcagtccgtcgtcaacatagcctccca

SEQ ID NO: 371572 - DNA, 30 bp, Artificial Sequence
  Synthetic oligonucleotide
tgggatagataaaggtccctcgagctccca

SEQ ID NO: 371573 - DNA, 30 bp, Artificial Sequence
  Synthetic oligonucleotide
agacgcggtttgacaccgcctagagtccca

SEQ ID NO: 371574 - DNA, 30 bp, Artificial Sequence
  Synthetic oligonucleotide
agttgtcgatgcggttccaacttagtccca

SEQ ID NO: 371575 - DNA, 30 bp, Artificial Sequence
  Synthetic oligonucleotide
gcaggacgcgggcacacctaacacgtccca

SEQ ID NO: 371576 - DNA, 30 bp, Artificial Sequence
  Synthetic oligonucleotide
ttacggacctaacccttgaaggcggtccca

SEQ ID NO: 371577 - DNA, 30 bp, Artificial Sequence
  Synthetic oligonucleotide
atgcgtacggtttcacggcaagccttccca

SEQ ID NO: 371578 - DNA, 30 bp, Artificial Sequence
  Synthetic oligonucleotide
gtaacaacttccaagattcttgtcttccca

SEQ ID NO: 371579 - DNA, 30 bp, Artificial Sequence
  Synthetic oligonucleotide
cttttggaaaccttaatcagagagttccca

SEQ ID NO: 371580 - DNA, 30 bp, Artificial Sequence
  Synthetic oligonucleotide
accttcgcatagggccgtagggggttccca

SEQ ID NO: 371581 - DNA, 30 bp, Artificial Sequence
  Synthetic oligonucleotide
atggtacggttggaatccggggggttccca

SEQ ID NO: 371582 - DNA, 30 bp, Artificial Sequence
  Synthetic oligonucleotide
ctacggagtataatcgaatttgtgttccca

SEQ ID NO: 371583 - DNA, 30 bp, Artificial Sequence
  Synthetic oligonucleotide
agaaaactttaccctcagtgaagtttccca

SEQ ID NO: 371584 - DNA, 30 bp, Artificial Sequence
  Synthetic oligonucleotide
aaggctttgagaggtcctggcatcaagcca

SEQ ID NO: 371585 - DNA, 30 bp, Artificial Sequence
  Synthetic oligonucleotide
cagttatcgtcccgcggcagatgtaagcca

SEQ ID NO: 371586 - DNA, 30 bp, Artificial Sequence
  Synthetic oligonucleotide
gccgccagcaaaacagtgatcattaagcca

SEQ ID NO: 371587 - DNA, 30 bp, Artificial Sequence
  Synthetic oligonucleotide
gctggtatgtagccttcacctgaacagcca

SEQ ID NO: 371588 - DNA, 30 bp, Artificial Sequence
  Synthetic oligonucleotide
agaaaggccgatggagtctcctcccagcca

SEQ ID NO: 371589 - DNA, 30 bp, Artificial Sequence
  Synthetic oligonucleotide
ttatagcattagtgcattattccgcagcca

SEQ ID NO: 371590 - DNA, 30 bp, Artificial Sequence
  Synthetic oligonucleotide
tgatagggtcgatgcagtgccactcagcca

SEQ ID NO: 371591 - DNA, 30 bp, Artificial Sequence
  Synthetic oligonucleotide
gctgttaaagcaatagcacttgctcagcca

SEQ ID NO: 371592 - DNA, 30 bp, Artificial Sequence
  Synthetic oligonucleotide
gatccgtgtgcgttgaacgggcttcagcca

SEQ ID NO: 371593 - DNA, 30 bp, Artificial Sequence
  Synthetic oligonucleotide
tctttactttattcagtcgtcagagagcca

SEQ ID NO: 371594 - DNA, 30 bp, Artificial Sequence
  Synthetic oligonucleotide
gtcacctgggagcagggcaaatccgagcca

SEQ ID NO: 371595 - DNA, 30 bp, Artificial Sequence
  Synthetic oligonucleotide
atctcaaataaatgacaacacgcggagcca

SEQ ID NO: 371596 - DNA, 30 bp, Artificial Sequence
  Synthetic oligonucleotide
gcaaaccatatacggttagagcgggagcca

SEQ ID NO: 371597 - DNA, 30 bp, Artificial Sequence
  Synthetic oligonucleotide
aaggggtattgaggcgctaggccatagcca

SEQ ID NO: 371598 - DNA, 30 bp, Artificial Sequence
  Synthetic oligonucleotide
agctttataaaagcatgcccatagtagcca

SEQ ID NO: 371599 - DNA, 30 bp, Artificial Sequence
  Synthetic oligonucleotide
cgggttagttacggtcttgactcgtagcca

SEQ ID NO: 371600 - DNA, 30 bp, Artificial Sequence
  Synthetic oligonucleotide
gtgatttagcgactggtacagaggtagcca

SEQ ID NO: 371601 - DNA, 30 bp, Artificial Sequence
  Synthetic oligonucleotide
atctcgtgtctccgaatactggacacgcca

SEQ ID NO: 371602 - DNA, 30 bp, Artificial Sequence
  Synthetic oligonucleotide
gatcacagtaaatgtttaggtcccacgcca

SEQ ID NO: 371603 - DNA, 30 bp, Artificial Sequence
  Synthetic oligonucleotide
taaacaattataatattatggttcacgcca

SEQ ID NO: 371604 - DNA, 30 bp, Artificial Sequence
  Synthetic oligonucleotide
tcggtacgtaccactactaaacagacgcca

SEQ ID NO: 371605 - DNA, 30 bp, Artificial Sequence
  Synthetic oligonucleotide
cttaggttaatcataatacataggacgcca

SEQ ID NO: 371606 - DNA, 30 bp, Artificial Sequence
  Synthetic oligonucleotide
atcagcccggaaaggaatctctttacgcca

SEQ ID NO: 371607 - DNA, 30 bp, Artificial Sequence
  Synthetic oligonucleotide
gaatagctggggcggcattcgggaccgcca

SEQ ID NO: 371608 - DNA, 30 bp, Artificial Sequence
  Synthetic oligonucleotide
tctggatatggtccgcattacgacccgcca

SEQ ID NO: 371609 - DNA, 30 bp, Artificial Sequence
  Synthetic oligonucleotide
tccgctgtagacaccgccatactcccgcca

SEQ ID NO: 371610 - DNA, 30 bp, Artificial Sequence
  Synthetic oligonucleotide
gtacggcgtggtgctcgaaagcatccgcca

SEQ ID NO: 371611 - DNA, 30 bp, Artificial Sequence
  Synthetic oligonucleotide
aacgtttctagatgagtacaggatccgcca

SEQ ID NO: 371612 - DNA, 30 bp, Artificial Sequence
  Synthetic oligonucleotide
gcggggtacatcaagggcccggcagcgcca

SEQ ID NO: 371613 - DNA, 30 bp, Artificial Sequence
  Synthetic oligonucleotide
gaaggcgggaaggattaaacttcagcgcca

SEQ ID NO: 371614 - DNA, 30 bp, Artificial Sequence
  Synthetic oligonucleotide
atttaagacaggcttttacacaccgcgcca

SEQ ID NO: 371615 - DNA, 30 bp, Artificial Sequence
  Synthetic oligonucleotide
agtttgcatttgaacaaccccacggcgcca

SEQ ID NO: 371616 - DNA, 30 bp, Artificial Sequence
  Synthetic oligonucleotide
atagatgagtcacgctgtgcaagggcgcca

SEQ ID NO: 371617 - DNA, 30 bp, Artificial Sequence
  Synthetic oligonucleotide
gtgaattgttaggttcagagtagtgcgcca

SEQ ID NO: 371618 - DNA, 30 bp, Artificial Sequence
  Synthetic oligonucleotide
gctggtcgtggtatgatagtttcatcgcca

SEQ ID NO: 371619 - DNA, 30 bp, Artificial Sequence
  Synthetic oligonucleotide
acttcagtaaggtcacctagccactcgcca

SEQ ID NO: 371620 - DNA, 30 bp, Artificial Sequence
  Synthetic oligonucleotide
gctctaaagaggtgttagccagactcgcca

SEQ ID NO: 371621 - DNA, 30 bp, Artificial Sequence
  Synthetic oligonucleotide
aagggtgtctcataacacaggacctcgcca

SEQ ID NO: 371622 - DNA, 30 bp, Artificial Sequence
  Synthetic oligonucleotide
atgcgtgtgggacgtagttaaccttcgcca

SEQ ID NO: 371623 - DNA, 30 bp, Artificial Sequence
  Synthetic oligonucleotide
ggcattcggggctacaaatagccttcgcca

SEQ ID NO: 371624 - DNA, 30 bp, Artificial Sequence
  Synthetic oligonucleotide
cgttatgcaacaggcgacgagtcaaggcca

SEQ ID NO: 371625 - DNA, 30 bp, Artificial Sequence
  Synthetic oligonucleotide
ttcttgtagacgggcattaatcacaggcca

SEQ ID NO: 371626 - DNA, 30 bp, Artificial Sequence
  Synthetic oligonucleotide
ttttggtgcttaggtttccggggcaggcca

SEQ ID NO: 371627 - DNA, 30 bp, Artificial Sequence
  Synthetic oligonucleotide
aaagcctaagcatgatgacagatcaggcca

SEQ ID NO: 371628 - DNA, 30 bp, Artificial Sequence
  Synthetic oligonucleotide
gaatccataaagaaagtttatcagaggcca

SEQ ID NO: 371629 - DNA, 30 bp, Artificial Sequence
  Synthetic oligonucleotide
ggtcgttttactatgtaaggtccgaggcca

SEQ ID NO: 371630 - DNA, 30 bp, Artificial Sequence
  Synthetic oligonucleotide
atgcacgaatccgagtctctctcgaggcca

SEQ ID NO: 371631 - DNA, 30 bp, Artificial Sequence
  Synthetic oligonucleotide
aaccagtccaaactgaagatatcacggcca

SEQ ID NO: 371632 - DNA, 30 bp, Artificial Sequence
  Synthetic oligonucleotide
gaactggactccaaatcaaacgaccggcca

SEQ ID NO: 371633 - DNA, 30 bp, Artificial Sequence
  Synthetic oligonucleotide
aacagttgatgaggagagtggccccggcca

SEQ ID NO: 371634 - DNA, 30 bp, Artificial Sequence
  Synthetic oligonucleotide
aatttaaacgggtgaggttgaagtcggcca

SEQ ID NO: 371635 - DNA, 30 bp, Artificial Sequence
  Synthetic oligonucleotide
cggccccatgtgtgctggagtgcagggcca

SEQ ID NO: 371636 - DNA, 30 bp, Artificial Sequence
  Synthetic oligonucleotide
gattccgcggactttagccggttagggcca

SEQ ID NO: 371637 - DNA, 30 bp, Artificial Sequence
  Synthetic oligonucleotide
aaggtatcacacggctaatcggcggggcca

SEQ ID NO: 371638 - DNA, 30 bp, Artificial Sequence
  Synthetic oligonucleotide
ttgtgggctattgcccccactccctggcca

SEQ ID NO: 371639 - DNA, 30 bp, Artificial Sequence
  Synthetic oligonucleotide
atggttgaatataatagttatttctggcca

SEQ ID NO: 371640 - DNA, 30 bp, Artificial Sequence
  Synthetic oligonucleotide
aggccctacagcccactaggcatgtggcca

SEQ ID NO: 371641 - DNA, 30 bp, Artificial Sequence
  Synthetic oligonucleotide
gtacccgtcttttatagcaattattggcca

SEQ ID NO: 371642 - DNA, 30 bp, Artificial Sequence
  Synthetic oligonucleotide
gatttaccactaagcaaggagatttggcca

SEQ ID NO: 371643 - DNA, 30 bp, Artificial Sequence
  Synthetic oligonucleotide
tcggtgagggaggtggcacaattttggcca

SEQ ID NO: 371644 - DNA, 30 bp, Artificial Sequence
  Synthetic oligonucleotide
cattaccacttagctaagtgagaaatgcca

SEQ ID NO: 371645 - DNA, 30 bp, Artificial Sequence
  Synthetic oligonucleotide
taatactggtgtagttcgaggtaaatgcca

SEQ ID NO: 371646 - DNA, 30 bp, Artificial Sequence
  Synthetic oligonucleotide
attaaagataagtgttgtctgtaaatgcca

SEQ ID NO: 371647 - DNA, 30 bp, Artificial Sequence
  Synthetic oligonucleotide
ttgagtggctataagtaaccgcacatgcca

SEQ ID NO: 371648 - DNA, 30 bp, Artificial Sequence
  Synthetic oligonucleotide
gaacccttcacactagacgggatgatgcca

SEQ ID NO: 371649 - DNA, 30 bp, Artificial Sequence
  Synthetic oligonucleotide
aatcgtccatgcggactccacgctatgcca

SEQ ID NO: 371650 - DNA, 30 bp, Artificial Sequence
  Synthetic oligonucleotide
ttagagtagatattatagatcgcgctgcca

SEQ ID NO: 371651 - DNA, 30 bp, Artificial Sequence
  Synthetic oligonucleotide
ggcctgtccagatccttctactggctgcca

SEQ ID NO: 371652 - DNA, 30 bp, Artificial Sequence
  Synthetic oligonucleotide
tcatatgcatttttcgtacacactctgcca

SEQ ID NO: 371653 - DNA, 30 bp, Artificial Sequence
  Synthetic oligonucleotide
gaaacccgaagaggtagcggtgcagtgcca

SEQ ID NO: 371654 - DNA, 30 bp, Artificial Sequence
  Synthetic oligonucleotide
cagcaattgtgattccgaaattcagtgcca

SEQ ID NO: 371655 - DNA, 30 bp, Artificial Sequence
  Synthetic oligonucleotide
tcggcaggcgttaaggggcgaggagtgcca

SEQ ID NO: 371656 - DNA, 30 bp, Artificial Sequence
  Synthetic oligonucleotide
aggcggccgcgctacagttcgttagtgcca

SEQ ID NO: 371657 - DNA, 30 bp, Artificial Sequence
  Synthetic oligonucleotide
gaacggtcgctcaggttgaggtcggtgcca

SEQ ID NO: 371658 - DNA, 30 bp, Artificial Sequence
  Synthetic oligonucleotide
gagaggtctagatagacggggtgattgcca

SEQ ID NO: 371659 - DNA, 30 bp, Artificial Sequence
  Synthetic oligonucleotide
ccaaatcgaccataaggaggttgattgcca

SEQ ID NO: 371660 - DNA, 30 bp, Artificial Sequence
  Synthetic oligonucleotide
gcaaaccctacatcggtaaaagatttgcca

SEQ ID NO: 371661 - DNA, 30 bp, Artificial Sequence
  Synthetic oligonucleotide
aacaatggagtgtgaacccaccgtttgcca

SEQ ID NO: 371662 - DNA, 30 bp, Artificial Sequence
  Synthetic oligonucleotide
actgtgagaggtcgtttgaaatgtttgcca

SEQ ID NO: 371663 - DNA, 30 bp, Artificial Sequence
  Synthetic oligonucleotide
aatcccgccaaagtcggctggtttttgcca

SEQ ID NO: 371664 - DNA, 30 bp, Artificial Sequence
  Synthetic oligonucleotide
aagaaaggacttcgcatccgcgaaaatcca

SEQ ID NO: 371665 - DNA, 30 bp, Artificial Sequence
  Synthetic oligonucleotide
gcatgactgcttttggaaaatccaaatcca

SEQ ID NO: 371666 - DNA, 30 bp, Artificial Sequence
  Synthetic oligonucleotide
gggtatgagatcctggatctgtcaaatcca

SEQ ID NO: 371667 - DNA, 30 bp, Artificial Sequence
  Synthetic oligonucleotide
gcatgggagtattattcatctgccaatcca

SEQ ID NO: 371668 - DNA, 30 bp, Artificial Sequence
  Synthetic oligonucleotide
ttacggagccttggaaaacacagcaatcca

SEQ ID NO: 371669 - DNA, 30 bp, Artificial Sequence
  Synthetic oligonucleotide
accctaaaaagcgcaatggttgctaatcca

SEQ ID NO: 371670 - DNA, 30 bp, Artificial Sequence
  Synthetic oligonucleotide
ggctgacgttagactgagacatctaatcca

SEQ ID NO: 371671 - DNA, 30 bp, Artificial Sequence
  Synthetic oligonucleotide
ggcaggacaatataatgtcgaccacatcca

SEQ ID NO: 371672 - DNA, 30 bp, Artificial Sequence
  Synthetic oligonucleotide
tgcgatttacgtttgtgaattggacatcca

SEQ ID NO: 371673 - DNA, 30 bp, Artificial Sequence
  Synthetic oligonucleotide
gtgcctccatatgcccgcagtcgccatcca

SEQ ID NO: 371674 - DNA, 30 bp, Artificial Sequence
  Synthetic oligonucleotide
tttatgggcatcttgaacaagcagcatcca

SEQ ID NO: 371675 - DNA, 30 bp, Artificial Sequence
  Synthetic oligonucleotide
ggacgttgaaaaattacattccacgatcca

SEQ ID NO: 371676 - DNA, 30 bp, Artificial Sequence
  Synthetic oligonucleotide
attacagtggggcgacatttaagcgatcca

SEQ ID NO: 371677 - DNA, 30 bp, Artificial Sequence
  Synthetic oligonucleotide
acgaagcttacgtgtacaccgggggatcca

SEQ ID NO: 371678 - DNA, 30 bp, Artificial Sequence
  Synthetic oligonucleotide
gttagcaggacagagttcataaatgatcca

SEQ ID NO: 371679 - DNA, 30 bp, Artificial Sequence
  Synthetic oligonucleotide
gtggatctgcagattattgggcgtgatcca

SEQ ID NO: 371680 - DNA, 30 bp, Artificial Sequence
  Synthetic oligonucleotide
gggtggcgcgaacgcccgagcggtgatcca

SEQ ID NO: 371681 - DNA, 30 bp, Artificial Sequence
  Synthetic oligonucleotide
ataattccccgcgccagttgggaatatcca

SEQ ID NO: 371682 - DNA, 30 bp, Artificial Sequence
  Synthetic oligonucleotide
tccgtacgtacttccagtgtaatatatcca

SEQ ID NO: 371683 - DNA, 30 bp, Artificial Sequence
  Synthetic oligonucleotide
ccccagatatttaagcaaggctgctatcca

SEQ ID NO: 371684 - DNA, 30 bp, Artificial Sequence
  Synthetic oligonucleotide
ccagatttcttagatgggcaattctatcca

SEQ ID NO: 371685 - DNA, 30 bp, Artificial Sequence
  Synthetic oligonucleotide
gttaattcctgaccgtctctctcgtatcca

SEQ ID NO: 371686 - DNA, 30 bp, Artificial Sequence
  Synthetic oligonucleotide
tgtatacttcgtttctagggggattatcca

SEQ ID NO: 371687 - DNA, 30 bp, Artificial Sequence
  Synthetic oligonucleotide
ctgcctctgaatgcttccggggcgactcca

SEQ ID NO: 371688 - DNA, 30 bp, Artificial Sequence
  Synthetic oligonucleotide
accccatgacaaaggtggtataatactcca

SEQ ID NO: 371689 - DNA, 30 bp, Artificial Sequence
  Synthetic oligonucleotide
gtagcagaggtggtaggtaacccccctcca

SEQ ID NO: 371690 - DNA, 30 bp, Artificial Sequence
  Synthetic oligonucleotide
aacacatttctcacaaaagtggtccctcca

SEQ ID NO: 371691 - DNA, 30 bp, Artificial Sequence
  Synthetic oligonucleotide
caacttggtattcaggtttttgggcctcca

SEQ ID NO: 371692 - DNA, 30 bp, Artificial Sequence
  Synthetic oligonucleotide
actctcggcgatagatcaaaagcagctcca

SEQ ID NO: 371693 - DNA, 30 bp, Artificial Sequence
  Synthetic oligonucleotide
tgtacaattagagcccctaccgccgctcca

SEQ ID NO: 371694 - DNA, 30 bp, Artificial Sequence
  Synthetic oligonucleotide
gcagcgaagtgtgcaaaaaatttcgctcca

SEQ ID NO: 371695 - DNA, 30 bp, Artificial Sequence
  Synthetic oligonucleotide
ggctatggtacatgtctaacacgggctcca

SEQ ID NO: 371696 - DNA, 30 bp, Artificial Sequence
  Synthetic oligonucleotide
ataaacctttcagtgcggatcagatctcca

SEQ ID NO: 371697 - DNA, 30 bp, Artificial Sequence
  Synthetic oligonucleotide
ttggtgagtctatgtacagaaccgtctcca

SEQ ID NO: 371698 - DNA, 30 bp, Artificial Sequence
  Synthetic oligonucleotide
gaacccaaaaaggcagtgtcaaattctcca

SEQ ID NO: 371699 - DNA, 30 bp, Artificial Sequence
  Synthetic oligonucleotide
ctgactactgcaagccgctatatttctcca

SEQ ID NO: 371700 - DNA, 30 bp, Artificial Sequence
  Synthetic oligonucleotide
cacccaggaactttctcccgcgtaagtcca

SEQ ID NO: 371701 - DNA, 30 bp, Artificial Sequence
  Synthetic oligonucleotide
tagcgcgtgtccgcatgggttaccagtcca

SEQ ID NO: 371702 - DNA, 30 bp, Artificial Sequence
  Synthetic oligonucleotide
gccacaggctggcatcgtttgcagagtcca

SEQ ID NO: 371703 - DNA, 30 bp, Artificial Sequence
  Synthetic oligonucleotide
gctacggtaactaggtttcggtctagtcca

SEQ ID NO: 371704 - DNA, 30 bp, Artificial Sequence
  Synthetic oligonucleotide
gctggggtcacaatgtcacggagacgtcca

SEQ ID NO: 371705 - DNA, 30 bp, Artificial Sequence
  Synthetic oligonucleotide
tgatccttggaacgtgatagtacccgtcca

SEQ ID NO: 371706 - DNA, 30 bp, Artificial Sequence
  Synthetic oligonucleotide
agccagtgaaagacgagccattcgcgtcca

SEQ ID NO: 371707 - DNA, 30 bp, Artificial Sequence
  Synthetic oligonucleotide
cattcggcatgtctcggcctcctgcgtcca

SEQ ID NO: 371708 - DNA, 30 bp, Artificial Sequence
  Synthetic oligonucleotide
tcgagctttagcgggacttttttgcgtcca

SEQ ID NO: 371709 - DNA, 30 bp, Artificial Sequence
  Synthetic oligonucleotide
agcatgcgcaaaacataacccaacggtcca

SEQ ID NO: 371710 - DNA, 30 bp, Artificial Sequence
  Synthetic oligonucleotide
ctttgctcggacacagatcccttcggtcca

SEQ ID NO: 371711 - DNA, 30 bp, Artificial Sequence
  Synthetic oligonucleotide
aaattgtaacggagaagagtttagggtcca

SEQ ID NO: 371712 - DNA, 30 bp, Artificial Sequence
  Synthetic oligonucleotide
acgtgatgcaaggatatgccccgctgtcca

SEQ ID NO: 371713 - DNA, 30 bp, Artificial Sequence
  Synthetic oligonucleotide
aagcggctgatatgcttgaaactctgtcca

SEQ ID NO: 371714 - DNA, 30 bp, Artificial Sequence
  Synthetic oligonucleotide
ttgcatgtggagatatgtgtagcgtgtcca

SEQ ID NO: 371715 - DNA, 30 bp, Artificial Sequence
  Synthetic oligonucleotide
atgcagtacatacgtggagcgtaaattcca

SEQ ID NO: 371716 - DNA, 30 bp, Artificial Sequence
  Synthetic oligonucleotide
caccggcgtggaatttggattacaattcca

SEQ ID NO: 371717 - DNA, 30 bp, Artificial Sequence
  Synthetic oligonucleotide
tataagcacgcgaaagggcacgcaattcca

SEQ ID NO: 371718 - DNA, 30 bp, Artificial Sequence
  Synthetic oligonucleotide
ttggatatctggaggggttacttaattcca

SEQ ID NO: 371719 - DNA, 30 bp, Artificial Sequence
  Synthetic oligonucleotide
tcagtgcgtatgtgattgaggatcattcca

SEQ ID NO: 371720 - DNA, 30 bp, Artificial Sequence
  Synthetic oligonucleotide
ttaattaacgggcaatttcttatcattcca

SEQ ID NO: 371721 - DNA, 30 bp, Artificial Sequence
  Synthetic oligonucleotide
acttggatagatattgggtatccgattcca

SEQ ID NO: 371722 - DNA, 30 bp, Artificial Sequence
  Synthetic oligonucleotide
gaggataagccgatgacgtagcggattcca

SEQ ID NO: 371723 - DNA, 30 bp, Artificial Sequence
  Synthetic oligonucleotide
taactaccagggattccggacaatattcca

SEQ ID NO: 371724 - DNA, 30 bp, Artificial Sequence
  Synthetic oligonucleotide
atactacgtaatccttcaactattattcca

SEQ ID NO: 371725 - DNA, 30 bp, Artificial Sequence
  Synthetic oligonucleotide
cccatggttggggaagtggtggtccttcca

SEQ ID NO: 371726 - DNA, 30 bp, Artificial Sequence
  Synthetic oligonucleotide
aactctaatggaatttgggagcagcttcca

SEQ ID NO: 371727 - DNA, 30 bp, Artificial Sequence
  Synthetic oligonucleotide
ttccagatcgtgaccattcaatcgcttcca

SEQ ID NO: 371728 - DNA, 30 bp, Artificial Sequence
  Synthetic oligonucleotide
ttaccgtcgctggttggaggtaatcttcca

SEQ ID NO: 371729 - DNA, 30 bp, Artificial Sequence
  Synthetic oligonucleotide
aatcgggactttcatatatatgcagttcca

SEQ ID NO: 371730 - DNA, 30 bp, Artificial Sequence
  Synthetic oligonucleotide
aagcgcgggatgagtttagagatagttcca

SEQ ID NO: 371731 - DNA, 30 bp, Artificial Sequence
  Synthetic oligonucleotide
cctcataactatggggcgccgagcgttcca

SEQ ID NO: 371732 - DNA, 30 bp, Artificial Sequence
  Synthetic oligonucleotide
cttttggaagaatatctaactcgcgttcca

SEQ ID NO: 371733 - DNA, 30 bp, Artificial Sequence
  Synthetic oligonucleotide
ttgttgttagggacacgaccaacggttcca

SEQ ID NO: 371734 - DNA, 30 bp, Artificial Sequence
  Synthetic oligonucleotide
ttggcattgcggtcaacgatagcggttcca

SEQ ID NO: 371735 - DNA, 30 bp, Artificial Sequence
  Synthetic oligonucleotide
aagaaaagccgtagttaaaaccgggttcca

SEQ ID NO: 371736 - DNA, 30 bp, Artificial Sequence
  Synthetic oligonucleotide
ggatgttaattctgcaaccattgggttcca

SEQ ID NO: 371737 - DNA, 30 bp, Artificial Sequence
  Synthetic oligonucleotide
ggcctcagttttagattgtaacatgttcca

SEQ ID NO: 371738 - DNA, 30 bp, Artificial Sequence
  Synthetic oligonucleotide
ctgggaattagtggtaacacccctgttcca

SEQ ID NO: 371739 - DNA, 30 bp, Artificial Sequence
  Synthetic oligonucleotide
ggtagtggagaaattccctgtgttgttcca

SEQ ID NO: 371740 - DNA, 30 bp, Artificial Sequence
  Synthetic oligonucleotide
cgcacgggcatcattcgatacggatttcca

SEQ ID NO: 371741 - DNA, 30 bp, Artificial Sequence
  Synthetic oligonucleotide
agccaataggtcttgccgagctgctttcca

SEQ ID NO: 371742 - DNA, 30 bp, Artificial Sequence
  Synthetic oligonucleotide
tagcactcctcctgaatttccatctttcca

SEQ ID NO: 371743 - DNA, 31 bp, Artificial Sequence
  Synthetic oligonucleotide
tcaggtatggataagtccggatccgtttcca

SEQ ID NO: 371744 - DNA, 30 bp, Artificial Sequence
  Synthetic oligonucleotide
aagtagtgcaaggaatcgccattgtttcca

SEQ ID NO: 371745 - DNA, 30 bp, Artificial Sequence
  Synthetic oligonucleotide
ttccaattcccggtagttcattcttttcca

SEQ ID NO: 371746 - DNA, 30 bp, Artificial Sequence
  Synthetic oligonucleotide
tactgcctgaacaccttcttgggttttcca

SEQ ID NO: 371747 - DNA, 30 bp, Artificial Sequence
  Synthetic oligonucleotide
gtgccaacttactcaataccagtttttcca

SEQ ID NO: 371748 - DNA, 30 bp, Artificial Sequence
  Synthetic oligonucleotide
atggattggtctacttgtttatagaaagca

SEQ ID NO: 371749 - DNA, 30 bp, Artificial Sequence
  Synthetic oligonucleotide
gcccagttggtggcgtatgtcctgaaagca

SEQ ID NO: 371750 - DNA, 30 bp, Artificial Sequence
  Synthetic oligonucleotide
attacaattgaactcgttgtgtataaagca

SEQ ID NO: 371751 - DNA, 30 bp, Artificial Sequence
  Synthetic oligonucleotide
acactacgcaattgaatcgggcagcaagca

SEQ ID NO: 371752 - DNA, 30 bp, Artificial Sequence
  Synthetic oligonucleotide
tttatcataaatcgtgttttggagcaagca

SEQ ID NO: 371753 - DNA, 30 bp, Artificial Sequence
  Synthetic oligonucleotide
gtaatgttcgtagaaatgtctcatcaagca

SEQ ID NO: 371754 - DNA, 30 bp, Artificial Sequence
  Synthetic oligonucleotide
gcccgcgtatgcggcaacagataagaagca

SEQ ID NO: 371755 - DNA, 30 bp, Artificial Sequence
  Synthetic oligonucleotide
gggggtcatgtacgtttgtgaccagaagca

SEQ ID NO: 371756 - DNA, 30 bp, Artificial Sequence
  Synthetic oligonucleotide
ggtgccgtgcttccaaacaattaggaagca

SEQ ID NO: 371757 - DNA, 31 bp, Artificial Sequence
  Synthetic oligonucleotide
gaaattaacagtggcatggaaggcggaagca

SEQ ID NO: 371758 - DNA, 30 bp, Artificial Sequence
  Synthetic oligonucleotide
aagtaattgctaactggctcggatgaagca

SEQ ID NO: 371759 - DNA, 30 bp, Artificial Sequence
  Synthetic oligonucleotide
ttagcaccggatgctcagatcattgaagca

SEQ ID NO: 371760 - DNA, 30 bp, Artificial Sequence
  Synthetic oligonucleotide
ggaatgttcttaaggcgatgggttgaagca

SEQ ID NO: 371761 - DNA, 30 bp, Artificial Sequence
  Synthetic oligonucleotide
gagtaacgggtgaaacgggttacataagca

SEQ ID NO: 371762 - DNA, 30 bp, Artificial Sequence
  Synthetic oligonucleotide
cagttttacttacggactaggtcataagca

SEQ ID NO: 371763 - DNA, 30 bp, Artificial Sequence
  Synthetic oligonucleotide
cactccatttgttagtaacacctataagca

SEQ ID NO: 371764 - DNA, 30 bp, Artificial Sequence
  Synthetic oligonucleotide
tatccttgaataaattcttaagtataagca

SEQ ID NO: 371765 - DNA, 30 bp, Artificial Sequence
  Synthetic oligonucleotide
gctggtatgggttctgtccaattataagca

SEQ ID NO: 371766 - DNA, 31 bp, Artificial Sequence
  Synthetic oligonucleotide
tcgcagcatagagcagcgtgcattataagca

SEQ ID NO: 371767 - DNA, 30 bp, Artificial Sequence
  Synthetic oligonucleotide
agcaaccagctccgctggtcaaactaagca

SEQ ID NO: 371768 - DNA, 30 bp, Artificial Sequence
  Synthetic oligonucleotide
ccgataagcatctgccgctaagactaagca

SEQ ID NO: 371769 - DNA, 30 bp, Artificial Sequence
  Synthetic oligonucleotide
ctaaattacgtaatggcctcagcgtaagca

SEQ ID NO: 371770 - DNA, 30 bp, Artificial Sequence
  Synthetic oligonucleotide
ttctcagcctgctcagattctggttaagca

SEQ ID NO: 371771 - DNA, 30 bp, Artificial Sequence
  Synthetic oligonucleotide
gcgtcggtttctttcccaaatctttaagca

SEQ ID NO: 371772 - DNA, 30 bp, Artificial Sequence
  Synthetic oligonucleotide
tcatcgtgtctgtatagatcgcaaacagca

SEQ ID NO: 371773 - DNA, 30 bp, Artificial Sequence
  Synthetic oligonucleotide
ggtctatatacgtttccttgtagcacagca

SEQ ID NO: 371774 - DNA, 30 bp, Artificial Sequence
  Synthetic oligonucleotide
gtgttggggtcggaatgtaagatcacagca

SEQ ID NO: 371775 - DNA, 30 bp, Artificial Sequence
  Synthetic oligonucleotide
ggcgatgttcgcttccccatcaatacagca

SEQ ID NO: 371776 - DNA, 30 bp, Artificial Sequence
  Synthetic oligonucleotide
tcatttaccgctttccttcagactacagca

SEQ ID NO: 371777 - DNA, 30 bp, Artificial Sequence
  Synthetic oligonucleotide
ggtttattcccacaagtgaagtctacagca

SEQ ID NO: 371778 - DNA, 30 bp, Artificial Sequence
  Synthetic oligonucleotide
tctcatcgccgagtatcgaccagtacagca

SEQ ID NO: 371779 - DNA, 30 bp, Artificial Sequence
  Synthetic oligonucleotide
cggtggtaagcatgcagcccttaaccagca

SEQ ID NO: 371780 - DNA, 30 bp, Artificial Sequence
  Synthetic oligonucleotide
ttgctgcacgcggatatgtctaacccagca

SEQ ID NO: 371781 - DNA, 30 bp, Artificial Sequence
  Synthetic oligonucleotide
aacggaactccttggttagcccacccagca

SEQ ID NO: 371782 - DNA, 30 bp, Artificial Sequence
  Synthetic oligonucleotide
tacacagttcatgcgtgatctcccccagca

SEQ ID NO: 371783 - DNA, 30 bp, Artificial Sequence
  Synthetic oligonucleotide
gaataagtgacgcaccgtctaatcccagca

SEQ ID NO: 371784 - DNA, 30 bp, Artificial Sequence
  Synthetic oligonucleotide
tgcagttaattgacctgtacagatccagca

SEQ ID NO: 371785 - DNA, 30 bp, Artificial Sequence
  Synthetic oligonucleotide
ctttcgaaaggtgtacgcgcgcgtccagca

SEQ ID NO: 371786 - DNA, 30 bp, Artificial Sequence
  Synthetic oligonucleotide
ggtagctggacaattgcagcatgtccagca

SEQ ID NO: 371787 - DNA, 30 bp, Artificial Sequence
  Synthetic oligonucleotide
tcctctaaggcaatgagtagatgtccagca

SEQ ID NO: 371788 - DNA, 30 bp, Artificial Sequence
  Synthetic oligonucleotide
tcattttgaagcaacggctcttgtccagca

SEQ ID NO: 371789 - DNA, 30 bp, Artificial Sequence
  Synthetic oligonucleotide
ctgtttgtggtggcttaattgggagcagca

SEQ ID NO: 371790 - DNA, 30 bp, Artificial Sequence
  Synthetic oligonucleotide
aggcggcacaaattttgccagcacgcagca

SEQ ID NO: 371791 - DNA, 30 bp, Artificial Sequence
  Synthetic oligonucleotide
tgacggggggacattcatgtagccgcagca

SEQ ID NO: 371792 - DNA, 30 bp, Artificial Sequence
  Synthetic oligonucleotide
aaggccgccgtcccttcagtcatgtcagca

SEQ ID NO: 371793 - DNA, 30 bp, Artificial Sequence
  Synthetic oligonucleotide
ggaacatccgtagaaacggatgattcagca

SEQ ID NO: 371794 - DNA, 30 bp, Artificial Sequence
  Synthetic oligonucleotide
gatttatagcagattagaattgcttcagca

SEQ ID NO: 371795 - DNA, 31 bp, Artificial Sequence
  Synthetic oligonucleotide
tgggtcattttcccacggtttacgaagagca

SEQ ID NO: 371796 - DNA, 30 bp, Artificial Sequence
  Synthetic oligonucleotide
gaaaccgggggactgcactagagcagagca

SEQ ID NO: 371797 - DNA, 30 bp, Artificial Sequence
  Synthetic oligonucleotide
gatgttcattagtggacggtgatcagagca

SEQ ID NO: 371798 - DNA, 30 bp, Artificial Sequence
  Synthetic oligonucleotide
tgctgggtgtaccgcagttgatgtagagca

SEQ ID NO: 371799 - DNA, 30 bp, Artificial Sequence
  Synthetic oligonucleotide
tcacagcatgacaccggtatctcacgagca

SEQ ID NO: 371800 - DNA, 30 bp, Artificial Sequence
  Synthetic oligonucleotide
ggctctattctgttgagaaaggcccgagca

SEQ ID NO: 371801 - DNA, 30 bp, Artificial Sequence
  Synthetic oligonucleotide
cgttgcggaggtccccgtatgtcccgagca

SEQ ID NO: 371802 - DNA, 30 bp, Artificial Sequence
  Synthetic oligonucleotide
cgacggcatgagctactcgtctttcgagca

SEQ ID NO: 371803 - DNA, 30 bp, Artificial Sequence
  Synthetic oligonucleotide
cgaacatgaccttgctacaagcacggagca

SEQ ID NO: 371804 - DNA, 30 bp, Artificial Sequence
  Synthetic oligonucleotide
atgtggtattttcatttgcgtcccggagca

SEQ ID NO: 371805 - DNA, 30 bp, Artificial Sequence
  Synthetic oligonucleotide
cccggatctctccccctcaagttcggagca

SEQ ID NO: 371806 - DNA, 30 bp, Artificial Sequence
  Synthetic oligonucleotide
tctagtggtcatctgaggtgaacgggagca

SEQ ID NO: 371807 - DNA, 30 bp, Artificial Sequence
  Synthetic oligonucleotide
gccgcctacacgaaactggtatcgggagca

SEQ ID NO: 371808 - DNA, 30 bp, Artificial Sequence
  Synthetic oligonucleotide
gcaccgcggaatgacaccataaggggagca

SEQ ID NO: 371809 - DNA, 30 bp, Artificial Sequence
  Synthetic oligonucleotide
gtattttcgtagtgaagaagcagtggagca

SEQ ID NO: 371810 - DNA, 31 bp, Artificial Sequence
  Synthetic oligonucleotide
ttaaaaagagtaactattgtcatcatgagca

SEQ ID NO: 371811 - DNA, 30 bp, Artificial Sequence
  Synthetic oligonucleotide
cttacagtgatggccttcggtgtatgagca

SEQ ID NO: 371812 - DNA, 30 bp, Artificial Sequence
  Synthetic oligonucleotide
actttcgcgtacttggcccaacaaatagca

SEQ ID NO: 371813 - DNA, 30 bp, Artificial Sequence
  Synthetic oligonucleotide
cagaaggagcagcagcttctccaaatagca

SEQ ID NO: 371814 - DNA, 30 bp, Artificial Sequence
  Synthetic oligonucleotide
gtagtgcgcttggagctagcctaaatagca

SEQ ID NO: 371815 - DNA, 30 bp, Artificial Sequence
  Synthetic oligonucleotide
tatttgatctctcaagaaccatcaatagca

SEQ ID NO: 371816 - DNA, 30 bp, Artificial Sequence
  Synthetic oligonucleotide
ccgaagcccagccagcgaccgcctatagca

SEQ ID NO: 371817 - DNA, 30 bp, Artificial Sequence
  Synthetic oligonucleotide
tgggttagcagcaccgtttggggtatagca

SEQ ID NO: 371818 - DNA, 30 bp, Artificial Sequence
  Synthetic oligonucleotide
gaagactctcggaatatcggttgtatagca

SEQ ID NO: 371819 - DNA, 30 bp, Artificial Sequence
  Synthetic oligonucleotide
gtactgccagtggactagtccgttatagca

SEQ ID NO: 371820 - DNA, 31 bp, Artificial Sequence
  Synthetic oligonucleotide
ttgcgatcgctgccttcagggtcaactagca

SEQ ID NO: 371821 - DNA, 30 bp, Artificial Sequence
  Synthetic oligonucleotide
ggggccaatgagaacgcgaaacgactagca

SEQ ID NO: 371822 - DNA, 30 bp, Artificial Sequence
  Synthetic oligonucleotide
gcatatataagttgctagtgcaacctagca

SEQ ID NO: 371823 - DNA, 30 bp, Artificial Sequence
  Synthetic oligonucleotide
gcgcggtgcgacaactcaaaatcgctagca

SEQ ID NO: 371824 - DNA, 30 bp, Artificial Sequence
  Synthetic oligonucleotide
aacagttttatgccccaacggcggctagca

SEQ ID NO: 371825 - DNA, 30 bp, Artificial Sequence
  Synthetic oligonucleotide
aagcgtcttaggtttgtcggtcttctagca

SEQ ID NO: 371826 - DNA, 30 bp, Artificial Sequence
  Synthetic oligonucleotide
ggcaaccgatgtacatctacgacagtagca

SEQ ID NO: 371827 - DNA, 30 bp, Artificial Sequence
  Synthetic oligonucleotide
attacggtacatttcagttgcggagtagca

SEQ ID NO: 371828 - DNA, 30 bp, Artificial Sequence
  Synthetic oligonucleotide
cgctggctgggggctctagaagtagtagca

SEQ ID NO: 371829 - DNA, 30 bp, Artificial Sequence
  Synthetic oligonucleotide
tcctacctggcccaccagtttaccgtagca

SEQ ID NO: 371830 - DNA, 30 bp, Artificial Sequence
  Synthetic oligonucleotide
gcactgtttgcaagcgtgcagtaggtagca

SEQ ID NO: 371831 - DNA, 30 bp, Artificial Sequence
  Synthetic oligonucleotide
taattgtatgggataatctgacgggtagca

SEQ ID NO: 371832 - DNA, 30 bp, Artificial Sequence
  Synthetic oligonucleotide
gtcgaccctaatcgaagtggccttgtagca

SEQ ID NO: 371833 - DNA, 30 bp, Artificial Sequence
  Synthetic oligonucleotide
ggatcgaaaggtaaggttactccattagca

SEQ ID NO: 371834 - DNA, 30 bp, Artificial Sequence
  Synthetic oligonucleotide
aatttaccaggttctggatgcggattagca

SEQ ID NO: 371835 - DNA, 30 bp, Artificial Sequence
  Synthetic oligonucleotide
cacttggttgtcacgtagcagtgattagca

SEQ ID NO: 371836 - DNA, 30 bp, Artificial Sequence
  Synthetic oligonucleotide
ggctcagtcaggtcactaacggacttagca

SEQ ID NO: 371837 - DNA, 30 bp, Artificial Sequence
  Synthetic oligonucleotide
gtacatccgtttgttccgatacagttagca

SEQ ID NO: 371838 - DNA, 30 bp, Artificial Sequence
  Synthetic oligonucleotide
tgtttgtatcatggagttagtcggttagca

SEQ ID NO: 371839 - DNA, 30 bp, Artificial Sequence
  Synthetic oligonucleotide
gcatactcagtcattactgtagatttagca

SEQ ID NO: 371840 - DNA, 30 bp, Artificial Sequence
  Synthetic oligonucleotide
taatttctatgtggtgccctttctttagca

SEQ ID NO: 371841 - DNA, 30 bp, Artificial Sequence
  Synthetic oligonucleotide
gatgccggttcgggcagagtcacgaacgca

SEQ ID NO: 371842 - DNA, 30 bp, Artificial Sequence
  Synthetic oligonucleotide
atcacttaccctcgactgacggataacgca

SEQ ID NO: 371843 - DNA, 30 bp, Artificial Sequence
  Synthetic oligonucleotide
ttaagcctttaggttgaatattctaacgca

SEQ ID NO: 371844 - DNA, 30 bp, Artificial Sequence
  Synthetic oligonucleotide
gggcgacgctgaacgcgacataaacacgca

SEQ ID NO: 371845 - DNA, 30 bp, Artificial Sequence
  Synthetic oligonucleotide
ttagttctcgtcaacggcgatgaacacgca

SEQ ID NO: 371846 - DNA, 30 bp, Artificial Sequence
  Synthetic oligonucleotide
aaacggccgtatacaatcctcaaccacgca

SEQ ID NO: 371847 - DNA, 30 bp, Artificial Sequence
  Synthetic oligonucleotide
acttagttgacggaaaactgtgcccacgca

SEQ ID NO: 371848 - DNA, 30 bp, Artificial Sequence
  Synthetic oligonucleotide
tcggattgtcgtcaaggacgacagcacgca

SEQ ID NO: 371849 - DNA, 30 bp, Artificial Sequence
  Synthetic oligonucleotide
cttgtcccgatttcgttcaaagcgcacgca

SEQ ID NO: 371850 - DNA, 30 bp, Artificial Sequence
  Synthetic oligonucleotide
gcagtgggtttgggtcagcaacatcacgca

SEQ ID NO: 371851 - DNA, 30 bp, Artificial Sequence
  Synthetic oligonucleotide
tgcatcacgcgtaggattgtcgctcacgca

SEQ ID NO: 371852 - DNA, 30 bp, Artificial Sequence
  Synthetic oligonucleotide
gaaaaaccggtgacgtcattccttcacgca

SEQ ID NO: 371853 - DNA, 30 bp, Artificial Sequence
  Synthetic oligonucleotide
gtagtccgggtcctccaggggcttcacgca

SEQ ID NO: 371854 - DNA, 30 bp, Artificial Sequence
  Synthetic oligonucleotide
caatggattattcttcgacccgaagacgca

SEQ ID NO: 371855 - DNA, 30 bp, Artificial Sequence
  Synthetic oligonucleotide
gccgactacgggaacatacttttagacgca

SEQ ID NO: 371856 - DNA, 30 bp, Artificial Sequence
  Synthetic oligonucleotide
taagttcggagttccagaataaaggacgca

SEQ ID NO: 371857 - DNA, 30 bp, Artificial Sequence
  Synthetic oligonucleotide
aacgtgcgacatggatccatgaaggacgca

SEQ ID NO: 371858 - DNA, 30 bp, Artificial Sequence
  Synthetic oligonucleotide
cggagctaagcttgtgcaagttaggacgca

SEQ ID NO: 371859 - DNA, 30 bp, Artificial Sequence
  Synthetic oligonucleotide
catgaacgacgctcacgggctcgggacgca

SEQ ID NO: 371860 - DNA, 30 bp, Artificial Sequence
  Synthetic oligonucleotide
atggtgtgtttattgttgagaatggacgca

SEQ ID NO: 371861 - DNA, 30 bp, Artificial Sequence
  Synthetic oligonucleotide
gcagggaggtagaaaaggcacgtggacgca

SEQ ID NO: 371862 - DNA, 30 bp, Artificial Sequence
  Synthetic oligonucleotide
tgaaatagcacatgcttcggcgtggacgca

SEQ ID NO: 371863 - DNA, 30 bp, Artificial Sequence
  Synthetic oligonucleotide
ctattaacgagcgggttcgggtaatacgca

SEQ ID NO: 371864 - DNA, 30 bp, Artificial Sequence
  Synthetic oligonucleotide
acgctgtatatgttagcgaagacatacgca

SEQ ID NO: 371865 - DNA, 30 bp, Artificial Sequence
  Synthetic oligonucleotide
tattacgctactacgattcactgatacgca

SEQ ID NO: 371866 - DNA, 30 bp, Artificial Sequence
  Synthetic oligonucleotide
tttcgccgagattagacagtggactacgca

SEQ ID NO: 371867 - DNA, 30 bp, Artificial Sequence
  Synthetic oligonucleotide
aacagatcattatggatcccggtctacgca

SEQ ID NO: 371868 - DNA, 30 bp, Artificial Sequence
  Synthetic oligonucleotide
tatcaggccaaatgtcacagagcgtacgca

SEQ ID NO: 371869 - DNA, 30 bp, Artificial Sequence
  Synthetic oligonucleotide
gttggtccaaggtccattacttattacgca

SEQ ID NO: 371870 - DNA, 30 bp, Artificial Sequence
  Synthetic oligonucleotide
gcaaaattcccatttagattttcttacgca

SEQ ID NO: 371871 - DNA, 30 bp, Artificial Sequence
  Synthetic oligonucleotide
aaaaagccgtctaggttcttgcgttacgca

SEQ ID NO: 371872 - DNA, 30 bp, Artificial Sequence
  Synthetic oligonucleotide
ggtctaaaagcggttccgacgagaaccgca

SEQ ID NO: 371873 - DNA, 30 bp, Artificial Sequence
  Synthetic oligonucleotide
gcatcgggtcactccgaggtgaacaccgca

SEQ ID NO: 371874 - DNA, 30 bp, Artificial Sequence
  Synthetic oligonucleotide
gtcaacggtttagcacgcattgtcaccgca

SEQ ID NO: 371875 - DNA, 30 bp, Artificial Sequence
  Synthetic oligonucleotide
aagttttacgtacccaggcctggtaccgca

SEQ ID NO: 371876 - DNA, 40 bp, Artificial Sequence
  Synthetic oligonucleotide
gagccgcaggagttccgcaaagatagaagtgtgtaccgca

SEQ ID NO: 371877 - DNA, 30 bp, Artificial Sequence
  Synthetic oligonucleotide
cggctacatctggactcgcaagcacccgca

SEQ ID NO: 371878 - DNA, 30 bp, Artificial Sequence
  Synthetic oligonucleotide
taaaaaggattagagaactaacgacccgca

SEQ ID NO: 371879 - DNA, 30 bp, Artificial Sequence
  Synthetic oligonucleotide
actagtagaaacaaccgtatgacgcccgca

SEQ ID NO: 371880 - DNA, 30 bp, Artificial Sequence
  Synthetic oligonucleotide
ccatttgccacatcaaagttgcggcccgca

SEQ ID NO: 371881 - DNA, 30 bp, Artificial Sequence
  Synthetic oligonucleotide
ggaattacacctgcggaaaactacgccgca

SEQ ID NO: 371882 - DNA, 30 bp, Artificial Sequence
  Synthetic oligonucleotide
ccgagtggcatgttggaattgtacgccgca

SEQ ID NO: 371883 - DNA, 30 bp, Artificial Sequence
  Synthetic oligonucleotide
cccccaccggcaagtcattctaccgccgca

SEQ ID NO: 371884 - DNA, 30 bp, Artificial Sequence
  Synthetic oligonucleotide
cattttagggtataagtgaagtccgccgca

SEQ ID NO: 371885 - DNA, 30 bp, Artificial Sequence
  Synthetic oligonucleotide
gtgttccacaagatacagggactcgccgca

SEQ ID NO: 371886 - DNA, 30 bp, Artificial Sequence
  Synthetic oligonucleotide
cagttgcacttcaggggccttacggccgca

SEQ ID NO: 371887 - DNA, 30 bp, Artificial Sequence
  Synthetic oligonucleotide
tggaccgtctccctgcgtttacgtgccgca

SEQ ID NO: 371888 - DNA, 30 bp, Artificial Sequence
  Synthetic oligonucleotide
gattctcgagtatagttgagaaggtccgca

SEQ ID NO: 371889 - DNA, 30 bp, Artificial Sequence
  Synthetic oligonucleotide
tatttgcggtcatgacagaaacaaagcgca

SEQ ID NO: 371890 - DNA, 30 bp, Artificial Sequence
  Synthetic oligonucleotide
gtgagtagcttaactgtggcataaagcgca

SEQ ID NO: 371891 - DNA, 30 bp, Artificial Sequence
  Synthetic oligonucleotide
tccatttccctccggagactagcaagcgca

SEQ ID NO: 371892 - DNA, 30 bp, Artificial Sequence
  Synthetic oligonucleotide
caccgttccttagccttaacgaacagcgca

SEQ ID NO: 371893 - DNA, 30 bp, Artificial Sequence
  Synthetic oligonucleotide
gtaccagagatggctaaattagccagcgca

SEQ ID NO: 371894 - DNA, 30 bp, Artificial Sequence
  Synthetic oligonucleotide
ggaatcgctcatcagacaattgggagcgca

SEQ ID NO: 371895 - DNA, 30 bp, Artificial Sequence
  Synthetic oligonucleotide
tcagtctaagtgtatcctcttgctagcgca

SEQ ID NO: 371896 - DNA, 30 bp, Artificial Sequence
  Synthetic oligonucleotide
agcagcgaacttacacgtgttaaacgcgca

SEQ ID NO: 371897 - DNA, 30 bp, Artificial Sequence
  Synthetic oligonucleotide
ggtgcgtagacaggtagtggctcacgcgca

SEQ ID NO: 371898 - DNA, 30 bp, Artificial Sequence
  Synthetic oligonucleotide
ttcgcgaaacgaaaaatgtatttccgcgca

SEQ ID NO: 371899 - DNA, 30 bp, Artificial Sequence
  Synthetic oligonucleotide
ggcagctatttaagttgtctacgtcgcgca

SEQ ID NO: 371900 - DNA, 30 bp, Artificial Sequence
  Synthetic oligonucleotide
aggtcgcggggtctgcgcttgaaaggcgca

SEQ ID NO: 371901 - DNA, 30 bp, Artificial Sequence
  Synthetic oligonucleotide
ttaaaatacggtgcattttgtacaggcgca

SEQ ID NO: 371902 - DNA, 30 bp, Artificial Sequence
  Synthetic oligonucleotide
cgcgccagtatccgactgggattaggcgca

SEQ ID NO: 371903 - DNA, 30 bp, Artificial Sequence
  Synthetic oligonucleotide
tttgataaatgcggaaggtaatacggcgca

SEQ ID NO: 371904 - DNA, 31 bp, Artificial Sequence
  Synthetic oligonucleotide
aatccgacaatatagcctgacccccggcgca

SEQ ID NO: 371905 - DNA, 30 bp, Artificial Sequence
  Synthetic oligonucleotide
tgcgattttcccgttgcggtgatcggcgca

SEQ ID NO: 371906 - DNA, 30 bp, Artificial Sequence
  Synthetic oligonucleotide
gcggctccggcagggtgggttgtcggcgca

SEQ ID NO: 371907 - DNA, 30 bp, Artificial Sequence
  Synthetic oligonucleotide
acttcacgtgagcgacttgcagctggcgca

SEQ ID NO: 371908 - DNA, 30 bp, Artificial Sequence
  Synthetic oligonucleotide
ttaaggaatatcggtatagccccctgcgca

SEQ ID NO: 371909 - DNA, 30 bp, Artificial Sequence
  Synthetic oligonucleotide
gatgctcaaggaaaaatgaggccctgcgca

SEQ ID NO: 371910 - DNA, 30 bp, Artificial Sequence
  Synthetic oligonucleotide
gttcacatataccattcactgcgctgcgca

SEQ ID NO: 371911 - DNA, 30 bp, Artificial Sequence
  Synthetic oligonucleotide
tatcacatggtaccactaccgggctgcgca

SEQ ID NO: 371912 - DNA, 30 bp, Artificial Sequence
  Synthetic oligonucleotide
gggcgttgttactccagtaatgtctgcgca

SEQ ID NO: 371913 - DNA, 30 bp, Artificial Sequence
  Synthetic oligonucleotide
attcactgtcctgcacattagacaatcgca

SEQ ID NO: 371914 - DNA, 30 bp, Artificial Sequence
  Synthetic oligonucleotide
tttacagaagttcaacctgttacaatcgca

SEQ ID NO: 371915 - DNA, 30 bp, Artificial Sequence
  Synthetic oligonucleotide
ctggattatccggacgctgaaatcatcgca

SEQ ID NO: 371916 - DNA, 30 bp, Artificial Sequence
  Synthetic oligonucleotide
gtattactagagccatgcgaaactatcgca

SEQ ID NO: 371917 - DNA, 30 bp, Artificial Sequence
  Synthetic oligonucleotide
acctgagcggagggagtaaatggtatcgca

SEQ ID NO: 371918 - DNA, 30 bp, Artificial Sequence
  Synthetic oligonucleotide
ataacgccggtgggagcatggattctcgca

SEQ ID NO: 371919 - DNA, 30 bp, Artificial Sequence
  Synthetic oligonucleotide
ttgcctatgtaaagtttgggccttctcgca

SEQ ID NO: 371920 - DNA, 30 bp, Artificial Sequence
  Synthetic oligonucleotide
tgaagtactgcgtctgcggcttcagtcgca

SEQ ID NO: 371921 - DNA, 30 bp, Artificial Sequence
  Synthetic oligonucleotide
accatgcgaggtggttaggtccacgtcgca

SEQ ID NO: 371922 - DNA, 30 bp, Artificial Sequence
  Synthetic oligonucleotide
gctatttcggtctcacctctacgcgtcgca

SEQ ID NO: 371923 - DNA, 30 bp, Artificial Sequence
  Synthetic oligonucleotide
aagggtttttaaggaatctagtgcgtcgca

SEQ ID NO: 371924 - DNA, 30 bp, Artificial Sequence
  Synthetic oligonucleotide
gctgcccttggcgcggactacaaggtcgca

SEQ ID NO: 371925 - DNA, 30 bp, Artificial Sequence
  Synthetic oligonucleotide
gtccagtggtctcacacccaacttgtcgca

SEQ ID NO: 371926 - DNA, 30 bp, Artificial Sequence
  Synthetic oligonucleotide
gcgatttttaagcataacgacgttgtcgca

SEQ ID NO: 371927 - DNA, 30 bp, Artificial Sequence
  Synthetic oligonucleotide
cgactggtccctccgggacgtgttgtcgca

SEQ ID NO: 371928 - DNA, 30 bp, Artificial Sequence
  Synthetic oligonucleotide
ggtcgggctatcatagattgatttgtcgca

SEQ ID NO: 371929 - DNA, 30 bp, Artificial Sequence
  Synthetic oligonucleotide
ctgaatgttgtactgaatatgtttgtcgca

SEQ ID NO: 371930 - DNA, 30 bp, Artificial Sequence
  Synthetic oligonucleotide
cctaaccattacaagatgtaagcattcgca

SEQ ID NO: 371931 - DNA, 30 bp, Artificial Sequence
  Synthetic oligonucleotide
tgtttaggcgggtactttcgccgattcgca

SEQ ID NO: 371932 - DNA, 30 bp, Artificial Sequence
  Synthetic oligonucleotide
aaccgaagatgaaagatcacgggattcgca

SEQ ID NO: 371933 - DNA, 30 bp, Artificial Sequence
  Synthetic oligonucleotide
gggtttgatgaaagctgttaatggttcgca

SEQ ID NO: 371934 - DNA, 30 bp, Artificial Sequence
  Synthetic oligonucleotide
tggaacgttacggtagtcccactgttcgca

SEQ ID NO: 371935 - DNA, 30 bp, Artificial Sequence
  Synthetic oligonucleotide
tgatcgggtttttgcgacgagcaaaaggca

SEQ ID NO: 371936 - DNA, 30 bp, Artificial Sequence
  Synthetic oligonucleotide
acgtcagggtcttagcgctcgagaaaggca

SEQ ID NO: 371937 - DNA, 30 bp, Artificial Sequence
  Synthetic oligonucleotide
gcatgtgttatatcccccaggcacaaggca

SEQ ID NO: 371938 - DNA, 30 bp, Artificial Sequence
  Synthetic oligonucleotide
acccatcaagccacatcttgaagcaaggca

SEQ ID NO: 371939 - DNA, 30 bp, Artificial Sequence
  Synthetic oligonucleotide
actcttgtgatcggcccgaggagcaaggca

SEQ ID NO: 371940 - DNA, 30 bp, Artificial Sequence
  Synthetic oligonucleotide
tcaacattgggaggacgactgcagaaggca

SEQ ID NO: 371941 - DNA, 30 bp, Artificial Sequence
  Synthetic oligonucleotide
tctctttgatgtgcactacgatctaaggca

SEQ ID NO: 371942 - DNA, 30 bp, Artificial Sequence
  Synthetic oligonucleotide
cgacagcctacttaacaagcgggtaaggca

SEQ ID NO: 371943 - DNA, 30 bp, Artificial Sequence
  Synthetic oligonucleotide
gatcaggacgggttctgcgggcaacaggca

SEQ ID NO: 371944 - DNA, 30 bp, Artificial Sequence
  Synthetic oligonucleotide
ttcctgttcctgtcgttgttattacaggca

SEQ ID NO: 371945 - DNA, 30 bp, Artificial Sequence
  Synthetic oligonucleotide
tgtccaaggcctaagatgttgtgccaggca

SEQ ID NO: 371946 - DNA, 30 bp, Artificial Sequence
  Synthetic oligonucleotide
tgtctgagtcgcttcattttgctccaggca

SEQ ID NO: 371947 - DNA, 30 bp, Artificial Sequence
  Synthetic oligonucleotide
atacaaaggagcttagtgtacacgcaggca

SEQ ID NO: 371948 - DNA, 30 bp, Artificial Sequence
  Synthetic oligonucleotide
aaggttttctagttggattcgctgcaggca

SEQ ID NO: 371949 - DNA, 30 bp, Artificial Sequence
  Synthetic oligonucleotide
tgcctccacagcttgttagcaagcgaggca

SEQ ID NO: 371950 - DNA, 30 bp, Artificial Sequence
  Synthetic oligonucleotide
aggattcagattaccagcatgcgcgaggca

SEQ ID NO: 371951 - DNA, 30 bp, Artificial Sequence
  Synthetic oligonucleotide
agttagctacgggatttacggccggaggca

SEQ ID NO: 371952 - DNA, 30 bp, Artificial Sequence
  Synthetic oligonucleotide
gtgtccccggttcaccatcgtccggaggca

SEQ ID NO: 371953 - DNA, 30 bp, Artificial Sequence
  Synthetic oligonucleotide
ggagttatcaacgcctaattagcggaggca

SEQ ID NO: 371954 - DNA, 30 bp, Artificial Sequence
  Synthetic oligonucleotide
ggtacgggaattggcgttggcttggaggca

SEQ ID NO: 371955 - DNA, 30 bp, Artificial Sequence
  Synthetic oligonucleotide
aaattcgataagaccaagtctgttgaggca

SEQ ID NO: 371956 - DNA, 30 bp, Artificial Sequence
  Synthetic oligonucleotide
tttcgagtgtagttggtaactaaataggca

SEQ ID NO: 371957 - DNA, 30 bp, Artificial Sequence
  Synthetic oligonucleotide
aaagtcacaccgctggccgattcataggca

SEQ ID NO: 371958 - DNA, 30 bp, Artificial Sequence
  Synthetic oligonucleotide
ccggttatccatcttcgacggcagtaggca

SEQ ID NO: 371959 - DNA, 30 bp, Artificial Sequence
  Synthetic oligonucleotide
ctttggtattttccgcgtcgagggtaggca

SEQ ID NO: 371960 - DNA, 30 bp, Artificial Sequence
  Synthetic oligonucleotide
cgttatcagtactaattagtgaaaacggca

SEQ ID NO: 371961 - DNA, 30 bp, Artificial Sequence
  Synthetic oligonucleotide
agacgacgtctccgtgtagggataacggca

SEQ ID NO: 371962 - DNA, 30 bp, Artificial Sequence
  Synthetic oligonucleotide
gaatctgcacgatagcccacacgcacggca

SEQ ID NO: 371963 - DNA, 29 bp, Artificial Sequence
  Synthetic oligonucleotide
gcgttactctggatagctcagagacggca

SEQ ID NO: 371964 - DNA, 30 bp, Artificial Sequence
  Synthetic oligonucleotide
tccgactttctttatccttcgacgacggca

SEQ ID NO: 371965 - DNA, 30 bp, Artificial Sequence
  Synthetic oligonucleotide
cggggactctccgcaagttggactacggca

SEQ ID NO: 371966 - DNA, 29 bp, Artificial Sequence
  Synthetic oligonucleotide
tctatccaatgtagagtgtttgtacggca

SEQ ID NO: 371967 - DNA, 30 bp, Artificial Sequence
  Synthetic oligonucleotide
gttacatcccatggccttatacaaccggca

SEQ ID NO: 371968 - DNA, 30 bp, Artificial Sequence
  Synthetic oligonucleotide
tgtgctagcaatttcaaggaaaacccggca

SEQ ID NO: 371969 - DNA, 30 bp, Artificial Sequence
  Synthetic oligonucleotide
cactttggagactgaattgcattgccggca

SEQ ID NO: 371970 - DNA, 30 bp, Artificial Sequence
  Synthetic oligonucleotide
cccacgtcgcagaggcaagcgtgtccggca

SEQ ID NO: 371971 - DNA, 30 bp, Artificial Sequence
  Synthetic oligonucleotide
tacgctttggaccctgaatgtgtagcggca

SEQ ID NO: 371972 - DNA, 30 bp, Artificial Sequence
  Synthetic oligonucleotide
cacagcggagcggagaccgggggggcggca

SEQ ID NO: 371973 - DNA, 30 bp, Artificial Sequence
  Synthetic oligonucleotide
catcaagtataacgtatacctttggcggca

SEQ ID NO: 371974 - DNA, 30 bp, Artificial Sequence
  Synthetic oligonucleotide
gatagctttgagtcggtcaatcatgcggca

SEQ ID NO: 371975 - DNA, 30 bp, Artificial Sequence
  Synthetic oligonucleotide
gtttataaagggccaaactacgatgcggca

SEQ ID NO: 371976 - DNA, 30 bp, Artificial Sequence
  Synthetic oligonucleotide
agagcttagcgccgtgatacttaatcggca

SEQ ID NO: 371977 - DNA, 30 bp, Artificial Sequence
  Synthetic oligonucleotide
acacattgtttgtgcgcgagccactcggca

SEQ ID NO: 371978 - DNA, 30 bp, Artificial Sequence
  Synthetic oligonucleotide
ggcatacccttggccggggcctattcggca

SEQ ID NO: 371979 - DNA, 30 bp, Artificial Sequence
  Synthetic oligonucleotide
ggccacgttaactacccatatagaagggca

SEQ ID NO: 371980 - DNA, 30 bp, Artificial Sequence
  Synthetic oligonucleotide
gacgctagctagccagatataggaagggca

SEQ ID NO: 371981 - DNA, 30 bp, Artificial Sequence
  Synthetic oligonucleotide
gtccaactggcactcgcctaacgcagggca

SEQ ID NO: 371982 - DNA, 30 bp, Artificial Sequence
  Synthetic oligonucleotide
acttgatgggcgtatgcgtggttcagggca

SEQ ID NO: 371983 - DNA, 30 bp, Artificial Sequence
  Synthetic oligonucleotide
cacatgaccgtagctctcttgttcagggca

SEQ ID NO: 371984 - DNA, 30 bp, Artificial Sequence
  Synthetic oligonucleotide
tcctagaggtctggttttcagtggagggca

SEQ ID NO: 371985 - DNA, 30 bp, Artificial Sequence
  Synthetic oligonucleotide
aagtgagcctcgtattacgggctgagggca

SEQ ID NO: 371986 - DNA, 30 bp, Artificial Sequence
  Synthetic oligonucleotide
attacgttatggaatttagataatagggca

SEQ ID NO: 371987 - DNA, 30 bp, Artificial Sequence
  Synthetic oligonucleotide
ttacacataatatggaccacgcatagggca

SEQ ID NO: 371988 - DNA, 30 bp, Artificial Sequence
  Synthetic oligonucleotide
agttttctacagtcgtccaataaacgggca

SEQ ID NO: 371989 - DNA, 30 bp, Artificial Sequence
  Synthetic oligonucleotide
tttgtttataaacttccacactgacgggca

SEQ ID NO: 371990 - DNA, 30 bp, Artificial Sequence
  Synthetic oligonucleotide
gtcacctacgcgcttacggactggcgggca

SEQ ID NO: 371991 - DNA, 30 bp, Artificial Sequence
  Synthetic oligonucleotide
aatccgatgaagagctaggtcgatcgggca

SEQ ID NO: 371992 - DNA, 30 bp, Artificial Sequence
  Synthetic oligonucleotide
attgagatacatcatcttggttatcgggca

SEQ ID NO: 371993 - DNA, 30 bp, Artificial Sequence
  Synthetic oligonucleotide
ccggaaggtatgcagatgaaaggtcgggca

SEQ ID NO: 371994 - DNA, 30 bp, Artificial Sequence
  Synthetic oligonucleotide
gctatatgcttctagcaatagcaaggggca

SEQ ID NO: 371995 - DNA, 30 bp, Artificial Sequence
  Synthetic oligonucleotide
ggtctgaagagagttatgcgcaacggggca

SEQ ID NO: 371996 - DNA, 30 bp, Artificial Sequence
  Synthetic oligonucleotide
ggggcggaccctgacctgcgggacggggca

SEQ ID NO: 371997 - DNA, 30 bp, Artificial Sequence
  Synthetic oligonucleotide
agttttaattgagtcgtctaacgcggggca

SEQ ID NO: 371998 - DNA, 30 bp, Artificial Sequence
  Synthetic oligonucleotide
gagtggtctatagcaatggatatcggggca

SEQ ID NO: 371999 - DNA, 30 bp, Artificial Sequence
  Synthetic oligonucleotide
tcgtagcaaacacgcacataaaagggggca

SEQ ID NO: 372000 - DNA, 30 bp, Artificial Sequence
  Synthetic oligonucleotide
ggtgagggctttagttattggccgggggca

SEQ ID NO: 372001 - DNA, 30 bp, Artificial Sequence
  Synthetic oligonucleotide
atggtgacgaatgggcagggttcgggggca

SEQ ID NO: 372002 - DNA, 30 bp, Artificial Sequence
  Synthetic oligonucleotide
ctaaaaagttctatgttcgcaatgggggca

SEQ ID NO: 372003 - DNA, 30 bp, Artificial Sequence
  Synthetic oligonucleotide
atcaattaccgaaatgactcagctggggca

SEQ ID NO: 372004 - DNA, 30 bp, Artificial Sequence
  Synthetic oligonucleotide
ttatcgatacaacttcgtgacagtggggca

SEQ ID NO: 372005 - DNA, 30 bp, Artificial Sequence
  Synthetic oligonucleotide
aatagggaactgtacggccgtagatgggca

SEQ ID NO: 372006 - DNA, 30 bp, Artificial Sequence
  Synthetic oligonucleotide
ttggttttcactggctatgacgtatgggca

SEQ ID NO: 372007 - DNA, 30 bp, Artificial Sequence
  Synthetic oligonucleotide
tacggcgtagaaaagatggtaagctgggca

SEQ ID NO: 372008 - DNA, 30 bp, Artificial Sequence
  Synthetic oligonucleotide
ttaggtaatacctatttgactaagtgggca

SEQ ID NO: 372009 - DNA, 30 bp, Artificial Sequence
  Synthetic oligonucleotide
gggagattcctttataaattcatttgggca

SEQ ID NO: 372010 - DNA, 30 bp, Artificial Sequence
  Synthetic oligonucleotide
aatcagggggcagacgttagtctttgggca

SEQ ID NO: 372011 - DNA, 30 bp, Artificial Sequence
  Synthetic oligonucleotide
tttggataagcgccttcaatttacatggca

SEQ ID NO: 372012 - DNA, 30 bp, Artificial Sequence
  Synthetic oligonucleotide
tccgtagaaatctggacgccagtcatggca

SEQ ID NO: 372013 - DNA, 30 bp, Artificial Sequence
  Synthetic oligonucleotide
ttagacagtcttgacgtcctcttcatggca

SEQ ID NO: 372014 - DNA, 30 bp, Artificial Sequence
  Synthetic oligonucleotide
gtgtatcttttgagcctgaggtagatggca

SEQ ID NO: 372015 - DNA, 30 bp, Artificial Sequence
  Synthetic oligonucleotide
ctccacaggccatgaacctgaggtatggca

SEQ ID NO: 372016 - DNA, 30 bp, Artificial Sequence
  Synthetic oligonucleotide
tagagtaagcccggcagttatggtatggca

SEQ ID NO: 372017 - DNA, 30 bp, Artificial Sequence
  Synthetic oligonucleotide
ataccccagggtttaagagcccgactggca

SEQ ID NO: 372018 - DNA, 30 bp, Artificial Sequence
  Synthetic oligonucleotide
gaagatcctgcgtgagactctatactggca

SEQ ID NO: 372019 - DNA, 30 bp, Artificial Sequence
  Synthetic oligonucleotide
ggcaaccgcctatgtctatcgcagctggca

SEQ ID NO: 372020 - DNA, 30 bp, Artificial Sequence
  Synthetic oligonucleotide
gtaggtgtgtttgggcccgtgatgctggca

SEQ ID NO: 372021 - DNA, 30 bp, Artificial Sequence
  Synthetic oligonucleotide
acatttaaggaccagactggcaatctggca

SEQ ID NO: 372022 - DNA, 30 bp, Artificial Sequence
  Synthetic oligonucleotide
gataggaatattttcggctagcatctggca

SEQ ID NO: 372023 - DNA, 30 bp, Artificial Sequence
  Synthetic oligonucleotide
atgggtcaccttttttaggcctctctggca

SEQ ID NO: 372024 - DNA, 30 bp, Artificial Sequence
  Synthetic oligonucleotide
taagcataccgggtaaagctttctctggca

SEQ ID NO: 372025 - DNA, 30 bp, Artificial Sequence
  Synthetic oligonucleotide
gagcactatcgactcaatctttttctggca

SEQ ID NO: 372026 - DNA, 30 bp, Artificial Sequence
  Synthetic oligonucleotide
gtaacagtcaactctgggtaccgagtggca

SEQ ID NO: 372027 - DNA, 30 bp, Artificial Sequence
  Synthetic oligonucleotide
cgcaagcaattgccgcgcccgcgggtggca

SEQ ID NO: 372028 - DNA, 30 bp, Artificial Sequence
  Synthetic oligonucleotide
gccgggggcgcccatctcggagctgtggca

SEQ ID NO: 372029 - DNA, 30 bp, Artificial Sequence
  Synthetic oligonucleotide
gacccctttaatcattcctcgtcattggca

SEQ ID NO: 372030 - DNA, 30 bp, Artificial Sequence
  Synthetic oligonucleotide
gtttcgtatttttaaacgtatatattggca

SEQ ID NO: 372031 - DNA, 30 bp, Artificial Sequence
  Synthetic oligonucleotide
atggccgtgcgcagcaataatgtattggca

SEQ ID NO: 372032 - DNA, 30 bp, Artificial Sequence
  Synthetic oligonucleotide
caaaccttgagaatcattatccacttggca

SEQ ID NO: 372033 - DNA, 30 bp, Artificial Sequence
  Synthetic oligonucleotide
tgggacggttcatcccatggtggcttggca

SEQ ID NO: 372034 - DNA, 30 bp, Artificial Sequence
  Synthetic oligonucleotide
tagaagacagccaaaaggctaactttggca

SEQ ID NO: 372035 - DNA, 30 bp, Artificial Sequence
  Synthetic oligonucleotide
cgccagaatttgaggaacatacgtttggca

SEQ ID NO: 372036 - DNA, 30 bp, Artificial Sequence
  Synthetic oligonucleotide
gaaaaatgcaatatagcgcgttacaatgca

SEQ ID NO: 372037 - DNA, 30 bp, Artificial Sequence
  Synthetic oligonucleotide
atattagtcgcccagtgactgcccaatgca

SEQ ID NO: 372038 - DNA, 30 bp, Artificial Sequence
  Synthetic oligonucleotide
ggaccaccactaacggccgcgcagaatgca

SEQ ID NO: 372039 - DNA, 30 bp, Artificial Sequence
  Synthetic oligonucleotide
atacgcttgaacttgagtcgcttgaatgca

SEQ ID NO: 372040 - DNA, 30 bp, Artificial Sequence
  Synthetic oligonucleotide
agccggtgagatatgcataggtataatgca

SEQ ID NO: 372041 - DNA, 30 bp, Artificial Sequence
  Synthetic oligonucleotide
gtttagcattcaggaacatcgcctaatgca

SEQ ID NO: 372042 - DNA, 30 bp, Artificial Sequence
  Synthetic oligonucleotide
ggattgctgagggctatagggaaacatgca

SEQ ID NO: 372043 - DNA, 30 bp, Artificial Sequence
  Synthetic oligonucleotide
gataatgtcgccgcgagatcataacatgca

SEQ ID NO: 372044 - DNA, 30 bp, Artificial Sequence
  Synthetic oligonucleotide
ctgtaaactacgggagtcgtaagacatgca

SEQ ID NO: 372045 - DNA, 30 bp, Artificial Sequence
  Synthetic oligonucleotide
tgatatgttctcggctacgagaagcatgca

SEQ ID NO: 372046 - DNA, 30 bp, Artificial Sequence
  Synthetic oligonucleotide
gaagtctactcaccggtgttggagcatgca

SEQ ID NO: 372047 - DNA, 30 bp, Artificial Sequence
  Synthetic oligonucleotide
ttctaccggatcggtatgagttttcatgca

SEQ ID NO: 372048 - DNA, 30 bp, Artificial Sequence
  Synthetic oligonucleotide
gaacatcccgcattaaggccggcggatgca

SEQ ID NO: 372049 - DNA, 30 bp, Artificial Sequence
  Synthetic oligonucleotide
agcttgcgctcacattcaggttgggatgca

SEQ ID NO: 372050 - DNA, 30 bp, Artificial Sequence
  Synthetic oligonucleotide
gttggaagatcactgaatataattgatgca

SEQ ID NO: 372051 - DNA, 30 bp, Artificial Sequence
  Synthetic oligonucleotide
gatcagaatatgtcgttactcattgatgca

SEQ ID NO: 372052 - DNA, 30 bp, Artificial Sequence
  Synthetic oligonucleotide
cccgatttgtactttgattaggttgatgca

SEQ ID NO: 372053 - DNA, 30 bp, Artificial Sequence
  Synthetic oligonucleotide
ctagggtcagcccgaggcttttaatatgca

SEQ ID NO: 372054 - DNA, 30 bp, Artificial Sequence
  Synthetic oligonucleotide
tgattttcaagcaaatcgagaccatatgca

SEQ ID NO: 372055 - DNA, 30 bp, Artificial Sequence
  Synthetic oligonucleotide
gtaccactttggacctcgtcttcatatgca

SEQ ID NO: 372056 - DNA, 30 bp, Artificial Sequence
  Synthetic oligonucleotide
aattgctgactcccaaaagtatactatgca

SEQ ID NO: 372057 - DNA, 30 bp, Artificial Sequence
  Synthetic oligonucleotide
gtcttactgtcgcgtgccctttagtatgca

SEQ ID NO: 372058 - DNA, 30 bp, Artificial Sequence
  Synthetic oligonucleotide
ggcgtctgccacttacgtagtacgtatgca

SEQ ID NO: 372059 - DNA, 30 bp, Artificial Sequence
  Synthetic oligonucleotide
gcggtctataacttttgcatgccgtatgca

SEQ ID NO: 372060 - DNA, 30 bp, Artificial Sequence
  Synthetic oligonucleotide
ggatctagggtttatagtctcgcgtatgca

SEQ ID NO: 372061 - DNA, 30 bp, Artificial Sequence
  Synthetic oligonucleotide
ttacatgtgtgagtcaattgcttttatgca

SEQ ID NO: 372062 - DNA, 30 bp, Artificial Sequence
  Synthetic oligonucleotide
accagaggtttaaccagtccggacactgca

SEQ ID NO: 372063 - DNA, 30 bp, Artificial Sequence
  Synthetic oligonucleotide
ccggttcatacacttgtggaaaagactgca

SEQ ID NO: 372064 - DNA, 30 bp, Artificial Sequence
  Synthetic oligonucleotide
atgctctccaagttgccctcattgactgca

SEQ ID NO: 372065 - DNA, 30 bp, Artificial Sequence
  Synthetic oligonucleotide
taacccgatgattagatttttaaacctgca

SEQ ID NO: 372066 - DNA, 30 bp, Artificial Sequence
  Synthetic oligonucleotide
ctaccgggaaaacttcgcgctgtacctgca

SEQ ID NO: 372067 - DNA, 30 bp, Artificial Sequence
  Synthetic oligonucleotide
tgggtgcagctaaagccaaacggccctgca

SEQ ID NO: 372068 - DNA, 30 bp, Artificial Sequence
  Synthetic oligonucleotide
ctacgatagacttttaaatgcagtcctgca

SEQ ID NO: 372069 - DNA, 30 bp, Artificial Sequence
  Synthetic oligonucleotide
agaagatctgcgggttgaatccgcgctgca

SEQ ID NO: 372070 - DNA, 30 bp, Artificial Sequence
  Synthetic oligonucleotide
aagttgttttacaagaggatgtttgctgca

SEQ ID NO: 372071 - DNA, 30 bp, Artificial Sequence
  Synthetic oligonucleotide
ctcgggagacccttcccaaataactctgca

SEQ ID NO: 372072 - DNA, 30 bp, Artificial Sequence
  Synthetic oligonucleotide
ctttagggctctctacgtagtggctctgca

SEQ ID NO: 372073 - DNA, 30 bp, Artificial Sequence
  Synthetic oligonucleotide
ggctaggtctagtatccaacacgcagtgca

SEQ ID NO: 372074 - DNA, 27 bp, Artificial Sequence
  Synthetic oligonucleotide
ctacgcttcattgcaaatcgcagtgca

SEQ ID NO: 372075 - DNA, 30 bp, Artificial Sequence
  Synthetic oligonucleotide
tgcattgcggactagcaagcacagagtgca

SEQ ID NO: 372076 - DNA, 30 bp, Artificial Sequence
  Synthetic oligonucleotide
ttttcgttgataccacggcttaagcgtgca

SEQ ID NO: 372077 - DNA, 30 bp, Artificial Sequence
  Synthetic oligonucleotide
ttccgtgataagccctgccaactgcgtgca

SEQ ID NO: 372078 - DNA, 30 bp, Artificial Sequence
  Synthetic oligonucleotide
agtgatagagaagtgcagaagcgtcgtgca

SEQ ID NO: 372079 - DNA, 30 bp, Artificial Sequence
  Synthetic oligonucleotide
cagtaggactatgaatactgacaaggtgca

SEQ ID NO: 372080 - DNA, 30 bp, Artificial Sequence
  Synthetic oligonucleotide
ataggtcttcacgggaccgttaggggtgca

SEQ ID NO: 372081 - DNA, 30 bp, Artificial Sequence
  Synthetic oligonucleotide
ctccgagcgggtcgcagacggcggggtgca

SEQ ID NO: 372082 - DNA, 30 bp, Artificial Sequence
  Synthetic oligonucleotide
gcacatgtccaaccattgtccaaatgtgca

SEQ ID NO: 372083 - DNA, 30 bp, Artificial Sequence
  Synthetic oligonucleotide
aatagcatggcatcgtcaatcagatgtgca

SEQ ID NO: 372084 - DNA, 30 bp, Artificial Sequence
  Synthetic oligonucleotide
ttcgtccgtaaagtatcccggatatgtgca

SEQ ID NO: 372085 - DNA, 30 bp, Artificial Sequence
  Synthetic oligonucleotide
gactattagcagcttactcgcgtatgtgca

SEQ ID NO: 372086 - DNA, 30 bp, Artificial Sequence
  Synthetic oligonucleotide
tagggaagccctcggcactaaccctgtgca

SEQ ID NO: 372087 - DNA, 31 bp, Artificial Sequence
  Synthetic oligonucleotide
tagcctcagcagcctctagcttgggtgtgca

SEQ ID NO: 372088 - DNA, 27 bp, Artificial Sequence
  Synthetic oligonucleotide
aacagggagatcctttataaaattgca

SEQ ID NO: 372089 - DNA, 30 bp, Artificial Sequence
  Synthetic oligonucleotide
acaatcggcatcagctagcgaccaattgca

SEQ ID NO: 372090 - DNA, 30 bp, Artificial Sequence
  Synthetic oligonucleotide
ttgtggacgctacgggccctaagcattgca

SEQ ID NO: 372091 - DNA, 30 bp, Artificial Sequence
  Synthetic oligonucleotide
atacctttagaaaccgtgtgttcgattgca

SEQ ID NO: 372092 - DNA, 30 bp, Artificial Sequence
  Synthetic oligonucleotide
cgactcagcccgggaaagcccgggattgca

SEQ ID NO: 372093 - DNA, 30 bp, Artificial Sequence
  Synthetic oligonucleotide
atgtatataggacagtaagattttattgca

SEQ ID NO: 372094 - DNA, 30 bp, Artificial Sequence
  Synthetic oligonucleotide
tccaaagcgtggaagtcggagtcccttgca

SEQ ID NO: 372095 - DNA, 30 bp, Artificial Sequence
  Synthetic oligonucleotide
agcgcccagaacccgccccacgtccttgca

SEQ ID NO: 372096 - DNA, 30 bp, Artificial Sequence
  Synthetic oligonucleotide
gtagttatctacttagagattgtccttgca

SEQ ID NO: 372097 - DNA, 30 bp, Artificial Sequence
  Synthetic oligonucleotide
tcgataggacatacaccaagggcgcttgca

SEQ ID NO: 372098 - DNA, 30 bp, Artificial Sequence
  Synthetic oligonucleotide
agagctacgccgagtacgcactcgcttgca

SEQ ID NO: 372099 - DNA, 30 bp, Artificial Sequence
  Synthetic oligonucleotide
ttttaactacgactgcgactggtgcttgca

SEQ ID NO: 372100 - DNA, 30 bp, Artificial Sequence
  Synthetic oligonucleotide
gaactcgtcggaacctgcctcggtcttgca

SEQ ID NO: 372101 - DNA, 30 bp, Artificial Sequence
  Synthetic oligonucleotide
cccggcaataaacccaaccaggtcgttgca

SEQ ID NO: 372102 - DNA, 30 bp, Artificial Sequence
  Synthetic oligonucleotide
aatcctacgaagggaaacagccaggttgca

SEQ ID NO: 372103 - DNA, 30 bp, Artificial Sequence
  Synthetic oligonucleotide
cttgccagcccctaaaccgaataggttgca

SEQ ID NO: 372104 - DNA, 30 bp, Artificial Sequence
  Synthetic oligonucleotide
agcctcggcgactacgccttaacggttgca

SEQ ID NO: 372105 - DNA, 30 bp, Artificial Sequence
  Synthetic oligonucleotide
aaaagtgtgagttgctgacggatggttgca

SEQ ID NO: 372106 - DNA, 30 bp, Artificial Sequence
  Synthetic oligonucleotide
gcaggagctactcccgccgtgtttgttgca

SEQ ID NO: 372107 - DNA, 30 bp, Artificial Sequence
  Synthetic oligonucleotide
tttcattattaaccgtgacaccaatttgca

SEQ ID NO: 372108 - DNA, 30 bp, Artificial Sequence
  Synthetic oligonucleotide
gcagaaatagcctccaattttgaatttgca

SEQ ID NO: 372109 - DNA, 30 bp, Artificial Sequence
  Synthetic oligonucleotide
ggcggatatctacttaaaggcacatttgca

SEQ ID NO: 372110 - DNA, 30 bp, Artificial Sequence
  Synthetic oligonucleotide
agacttcagcaggtaatgtcgaactttgca

SEQ ID NO: 372111 - DNA, 30 bp, Artificial Sequence
  Synthetic oligonucleotide
ctaaggcccagggtcccaacggggtttgca

SEQ ID NO: 372112 - DNA, 30 bp, Artificial Sequence
  Synthetic oligonucleotide
gatctggcgcttcgtccagaggaaaaatca

SEQ ID NO: 372113 - DNA, 30 bp, Artificial Sequence
  Synthetic oligonucleotide
gctcctttctcggctctcgagacaaaatca

SEQ ID NO: 372114 - DNA, 30 bp, Artificial Sequence
  Synthetic oligonucleotide
catataagcttaacgcgagagagaaaatca

SEQ ID NO: 372115 - DNA, 30 bp, Artificial Sequence
  Synthetic oligonucleotide
agagggcacgcgcaatccattgagaaatca

SEQ ID NO: 372116 - DNA, 30 bp, Artificial Sequence
  Synthetic oligonucleotide
ttattgaaaataatttcaagtgttaaatca

SEQ ID NO: 372117 - DNA, 30 bp, Artificial Sequence
  Synthetic oligonucleotide
aaagtgtttatagtaagaaagaaacaatca

SEQ ID NO: 372118 - DNA, 30 bp, Artificial Sequence
  Synthetic oligonucleotide
taaagtgcttcctgtaggtaaaaccaatca

SEQ ID NO: 372119 - DNA, 30 bp, Artificial Sequence
  Synthetic oligonucleotide
attttatgcatgtataaaatgtaccaatca

SEQ ID NO: 372120 - DNA, 30 bp, Artificial Sequence
  Synthetic oligonucleotide
ggcagctggattgctatctgccgccaatca

SEQ ID NO: 372121 - DNA, 30 bp, Artificial Sequence
  Synthetic oligonucleotide
catccacgtgccctcatacgcacgcaatca

SEQ ID NO: 372122 - DNA, 30 bp, Artificial Sequence
  Synthetic oligonucleotide
aaacctgaggagaggtttattaggcaatca

SEQ ID NO: 372123 - DNA, 30 bp, Artificial Sequence
  Synthetic oligonucleotide
ttagttcatgatgaattggaagatcaatca

SEQ ID NO: 372124 - DNA, 30 bp, Artificial Sequence
  Synthetic oligonucleotide
aatgcgctcatgagtaattgccctcaatca

SEQ ID NO: 372125 - DNA, 30 bp, Artificial Sequence
  Synthetic oligonucleotide
aaaaccaagatgactaaagattgagaatca

SEQ ID NO: 372126 - DNA, 30 bp, Artificial Sequence
  Synthetic oligonucleotide
tatgggaatgagaattttattgtcgaatca

SEQ ID NO: 372127 - DNA, 30 bp, Artificial Sequence
  Synthetic oligonucleotide
atagtctttatagagtaacccctggaatca

SEQ ID NO: 372128 - DNA, 30 bp, Artificial Sequence
  Synthetic oligonucleotide
aatgtaactatgagcctgggctcataatca

SEQ ID NO: 372129 - DNA, 30 bp, Artificial Sequence
  Synthetic oligonucleotide
gaaggggattcgtcgtactggcgataatca

SEQ ID NO: 372130 - DNA, 30 bp, Artificial Sequence
  Synthetic oligonucleotide
ttaaatgggcatcaggctaatcgataatca

SEQ ID NO: 372131 - DNA, 30 bp, Artificial Sequence
  Synthetic oligonucleotide
gggctttgaggttacaaggtctactaatca

SEQ ID NO: 372132 - DNA, 30 bp, Artificial Sequence
  Synthetic oligonucleotide
cctagcccgtacgaccagcatccgtaatca

SEQ ID NO: 372133 - DNA, 30 bp, Artificial Sequence
  Synthetic oligonucleotide
ccctctttgttgatagagtcgccaacatca

SEQ ID NO: 372134 - DNA, 30 bp, Artificial Sequence
  Synthetic oligonucleotide
acggctcgagggtacccctagaccacatca

SEQ ID NO: 372135 - DNA, 30 bp, Artificial Sequence
  Synthetic oligonucleotide
gtcatgggatcatacgtgccatgcacatca

SEQ ID NO: 372136 - DNA, 30 bp, Artificial Sequence
  Synthetic oligonucleotide
ctcgagtgagtgtatatattcgtcacatca

SEQ ID NO: 372137 - DNA, 30 bp, Artificial Sequence
  Synthetic oligonucleotide
acccatccatagcgtggatttttcacatca

SEQ ID NO: 372138 - DNA, 30 bp, Artificial Sequence
  Synthetic oligonucleotide
aggctcaataactttgacggagttacatca

SEQ ID NO: 372139 - DNA, 30 bp, Artificial Sequence
  Synthetic oligonucleotide
catcgatatcgtacctacaatttaccatca

SEQ ID NO: 372140 - DNA, 30 bp, Artificial Sequence
  Synthetic oligonucleotide
cccatgaagtgacccgaatgtaccccatca

SEQ ID NO: 372141 - DNA, 30 bp, Artificial Sequence
  Synthetic oligonucleotide
ataatttgttcatttcaccatttcccatca

SEQ ID NO: 372142 - DNA, 30 bp, Artificial Sequence
  Synthetic oligonucleotide
tttccttttgagtatatctgagagccatca

SEQ ID NO: 372143 - DNA, 30 bp, Artificial Sequence
  Synthetic oligonucleotide
gccaatatagacgaacagatcaggccatca

SEQ ID NO: 372144 - DNA, 30 bp, Artificial Sequence
  Synthetic oligonucleotide
aaggatggtaaatctgggattctgccatca

SEQ ID NO: 372145 - DNA, 30 bp, Artificial Sequence
  Synthetic oligonucleotide
ttaacgccttccagactttgacctccatca

SEQ ID NO: 372146 - DNA, 30 bp, Artificial Sequence
  Synthetic oligonucleotide
ttgtgcagaatggggcccagttctccatca

SEQ ID NO: 372147 - DNA, 30 bp, Artificial Sequence
  Synthetic oligonucleotide
tgtatttcagttgcatttttaaccgcatca

SEQ ID NO: 372148 - DNA, 30 bp, Artificial Sequence
  Synthetic oligonucleotide
gagttggttatccatgcgttgtaggcatca

SEQ ID NO: 372149 - DNA, 30 bp, Artificial Sequence
  Synthetic oligonucleotide
taaggcgctgtatttgccgaacttgcatca

SEQ ID NO: 372150 - DNA, 30 bp, Artificial Sequence
  Synthetic oligonucleotide
ggtgtaaaaagtgcttgcattcaatcatca

SEQ ID NO: 372151 - DNA, 30 bp, Artificial Sequence
  Synthetic oligonucleotide
tattctgtcttgctatattgcacatcatca

SEQ ID NO: 372152 - DNA, 30 bp, Artificial Sequence
  Synthetic oligonucleotide
atgggttccgagccaagtgcgagctcatca

SEQ ID NO: 372153 - DNA, 30 bp, Artificial Sequence
  Synthetic oligonucleotide
aattgatattgtcattttacgggctcatca

SEQ ID NO: 372154 - DNA, 30 bp, Artificial Sequence
  Synthetic oligonucleotide
gggccataatcccgctctcgttattcatca

SEQ ID NO: 372155 - DNA, 30 bp, Artificial Sequence
  Synthetic oligonucleotide
aattaagtggataaatgctgcagttcatca

SEQ ID NO: 372156 - DNA, 30 bp, Artificial Sequence
  Synthetic oligonucleotide
tccaattcccgagtgattagccgttcatca

SEQ ID NO: 372157 - DNA, 30 bp, Artificial Sequence
  Synthetic oligonucleotide
aatcggtcgtgtaggggtatagggagatca

SEQ ID NO: 372158 - DNA, 30 bp, Artificial Sequence
  Synthetic oligonucleotide
aaagtgggaacgtttgtcctttatagatca

SEQ ID NO: 372159 - DNA, 30 bp, Artificial Sequence
  Synthetic oligonucleotide
agccggaagatagttccatcgtctagatca

SEQ ID NO: 372160 - DNA, 30 bp, Artificial Sequence
  Synthetic oligonucleotide
ataaggagagcggagccaggatgtagatca

SEQ ID NO: 372161 - DNA, 30 bp, Artificial Sequence
  Synthetic oligonucleotide
ggctaatacgactggaacggatttagatca

SEQ ID NO: 372162 - DNA, 30 bp, Artificial Sequence
  Synthetic oligonucleotide
gaaaagtaggttcgtcgtccgggccgatca

SEQ ID NO: 372163 - DNA, 30 bp, Artificial Sequence
  Synthetic oligonucleotide
taaaccgccggtgaacgactgtcgcgatca

SEQ ID NO: 372164 - DNA, 30 bp, Artificial Sequence
  Synthetic oligonucleotide
taactcggcgatactagaacggctcgatca

SEQ ID NO: 372165 - DNA, 30 bp, Artificial Sequence
  Synthetic oligonucleotide
gactgcgacgtacttacgtacattcgatca

SEQ ID NO: 372166 - DNA, 30 bp, Artificial Sequence
  Synthetic oligonucleotide
gacgcattcacaatcctttttattcgatca

SEQ ID NO: 372167 - DNA, 30 bp, Artificial Sequence
  Synthetic oligonucleotide
gcatatttgccagtataattggttcgatca

SEQ ID NO: 372168 - DNA, 30 bp, Artificial Sequence
  Synthetic oligonucleotide
ccataaattgcggaggggtttataggatca

SEQ ID NO: 372169 - DNA, 30 bp, Artificial Sequence
  Synthetic oligonucleotide
cgaagtcagtcagaaaccgcagacggatca

SEQ ID NO: 372170 - DNA, 30 bp, Artificial Sequence
  Synthetic oligonucleotide
ggattgagtacctggtagggttacggatca

SEQ ID NO: 372171 - DNA, 30 bp, Artificial Sequence
  Synthetic oligonucleotide
aattacagtctgagggaaatgtagggatca

SEQ ID NO: 372172 - DNA, 30 bp, Artificial Sequence
  Synthetic oligonucleotide
tatgtgtgccgtcggcacctcaggggatca

SEQ ID NO: 372173 - DNA, 30 bp, Artificial Sequence
  Synthetic oligonucleotide
cgttttcgtattgtacaattgatgggatca

SEQ ID NO: 372174 - DNA, 30 bp, Artificial Sequence
  Synthetic oligonucleotide
gtgtgggttagatgacgcacccctggatca

SEQ ID NO: 372175 - DNA, 30 bp, Artificial Sequence
  Synthetic oligonucleotide
gagccatacttatttattcggtctggatca

SEQ ID NO: 372176 - DNA, 30 bp, Artificial Sequence
  Synthetic oligonucleotide
gatctgtatcgattgtatgtacttggatca

SEQ ID NO: 372177 - DNA, 30 bp, Artificial Sequence
  Synthetic oligonucleotide
gatcatgcgccccctacgctaggatgatca

SEQ ID NO: 372178 - DNA, 30 bp, Artificial Sequence
  Synthetic oligonucleotide
tgcaagtaataattcgatggcttatgatca

SEQ ID NO: 372179 - DNA, 30 bp, Artificial Sequence
  Synthetic oligonucleotide
taatatccgggctactgtgtttcctgatca

SEQ ID NO: 372180 - DNA, 30 bp, Artificial Sequence
  Synthetic oligonucleotide
cgtagctccgtttcagccaggctctgatca

SEQ ID NO: 372181 - DNA, 30 bp, Artificial Sequence
  Synthetic oligonucleotide
tgagtaatacgttctccttgcgcttgatca

SEQ ID NO: 372182 - DNA, 30 bp, Artificial Sequence
  Synthetic oligonucleotide
tccagtgaacacgccttgcagagttgatca

SEQ ID NO: 372183 - DNA, 30 bp, Artificial Sequence
  Synthetic oligonucleotide
agaacacgaatgccaacggcatgttgatca

SEQ ID NO: 372184 - DNA, 30 bp, Artificial Sequence
  Synthetic oligonucleotide
ggtataatattaggtacacgcctttgatca

SEQ ID NO: 372185 - DNA, 30 bp, Artificial Sequence
  Synthetic oligonucleotide
ttcagctacataacaatggtgacaatatca

SEQ ID NO: 372186 - DNA, 30 bp, Artificial Sequence
  Synthetic oligonucleotide
tataagcagttgctgcgaagcggaatatca

SEQ ID NO: 372187 - DNA, 30 bp, Artificial Sequence
  Synthetic oligonucleotide
atgaataattttttgtaaggacacatatca

SEQ ID NO: 372188 - DNA, 31 bp, Artificial Sequence
  Synthetic oligonucleotide
taaacgctcgttgaaccacacgtccatatca

SEQ ID NO: 372189 - DNA, 30 bp, Artificial Sequence
  Synthetic oligonucleotide
gaaaattgaacctgagaatattccatatca

SEQ ID NO: 372190 - DNA, 30 bp, Artificial Sequence
  Synthetic oligonucleotide
ttgtgcaaccagccgtggcagtgcatatca

SEQ ID NO: 372191 - DNA, 30 bp, Artificial Sequence
  Synthetic oligonucleotide
taagccctacgcgtgcgtatggtcatatca

SEQ ID NO: 372192 - DNA, 30 bp, Artificial Sequence
  Synthetic oligonucleotide
catgtgttgggttgctccgaatatatatca

SEQ ID NO: 372193 - DNA, 30 bp, Artificial Sequence
  Synthetic oligonucleotide
aggttgaatctcagtcttcatatactatca

SEQ ID NO: 372194 - DNA, 30 bp, Artificial Sequence
  Synthetic oligonucleotide
gtcgctgcgaggttttatttgcccctatca

SEQ ID NO: 372195 - DNA, 30 bp, Artificial Sequence
  Synthetic oligonucleotide
gccattcaaaccaatataaagtctctatca

SEQ ID NO: 372196 - DNA, 30 bp, Artificial Sequence
  Synthetic oligonucleotide
cacgatccgtatgcgcagcaaaaggtatca

SEQ ID NO: 372197 - DNA, 30 bp, Artificial Sequence
  Synthetic oligonucleotide
atttacctatagagattcggggaggtatca

SEQ ID NO: 372198 - DNA, 30 bp, Artificial Sequence
  Synthetic oligonucleotide
tttgtcaaacctgatcctatgagggtatca

SEQ ID NO: 372199 - DNA, 30 bp, Artificial Sequence
  Synthetic oligonucleotide
gcggtgccttcaggcgtcttacaattatca

SEQ ID NO: 372200 - DNA, 30 bp, Artificial Sequence
  Synthetic oligonucleotide
cgcgggaactgactccgctggagattatca

SEQ ID NO: 372201 - DNA, 30 bp, Artificial Sequence
  Synthetic oligonucleotide
cccctgagtaggtatttaacggtattatca

SEQ ID NO: 372202 - DNA, 30 bp, Artificial Sequence
  Synthetic oligonucleotide
ctgtaacggaactactgatagggcttatca

SEQ ID NO: 372203 - DNA, 30 bp, Artificial Sequence
  Synthetic oligonucleotide
attctagtgaacgcaagtgcgcagttatca

SEQ ID NO: 372204 - DNA, 30 bp, Artificial Sequence
  Synthetic oligonucleotide
atgcattgtggatgaaaacgccggttatca

SEQ ID NO: 372205 - DNA, 30 bp, Artificial Sequence
  Synthetic oligonucleotide
cgatctgacctaaagtgactccggttatca

SEQ ID NO: 372206 - DNA, 30 bp, Artificial Sequence
  Synthetic oligonucleotide
tggatgggtgcgacggcccgagtgttatca

SEQ ID NO: 372207 - DNA, 30 bp, Artificial Sequence
  Synthetic oligonucleotide
gtataaacagtttggtatctatatttatca

SEQ ID NO: 372208 - DNA, 30 bp, Artificial Sequence
  Synthetic oligonucleotide
atagtggctagtaacgaaactgtaaactca

SEQ ID NO: 372209 - DNA, 30 bp, Artificial Sequence
  Synthetic oligonucleotide
ccaaacgcgctaactttctctatcaactca

SEQ ID NO: 372210 - DNA, 30 bp, Artificial Sequence
  Synthetic oligonucleotide
gggcgatctataaggtgcagatggaactca

SEQ ID NO: 372211 - DNA, 30 bp, Artificial Sequence
  Synthetic oligonucleotide
ccgacgttagttggaatctattggaactca

SEQ ID NO: 372212 - DNA, 30 bp, Artificial Sequence
  Synthetic oligonucleotide
ttaggatgcgctctactccccatgaactca

SEQ ID NO: 372213 - DNA, 30 bp, Artificial Sequence
  Synthetic oligonucleotide
tcttatgtgagacactacagagctaactca

SEQ ID NO: 372214 - DNA, 30 bp, Artificial Sequence
  Synthetic oligonucleotide
ctactaagtaagtaatatcacgcacactca

SEQ ID NO: 372215 - DNA, 30 bp, Artificial Sequence
  Synthetic oligonucleotide
aggccgctttgagcccttcatcggcactca

SEQ ID NO: 372216 - DNA, 30 bp, Artificial Sequence
  Synthetic oligonucleotide
gaggcttaaccggctgagggcgatcactca

SEQ ID NO: 372217 - DNA, 30 bp, Artificial Sequence
  Synthetic oligonucleotide
aagctgactaatactgacgcggatcactca

SEQ ID NO: 372218 - DNA, 30 bp, Artificial Sequence
  Synthetic oligonucleotide
aaatcccgtatacgggagcaataagactca

SEQ ID NO: 372219 - DNA, 30 bp, Artificial Sequence
  Synthetic oligonucleotide
ttagcaatctatacaaatgtaatagactca

SEQ ID NO: 372220 - DNA, 30 bp, Artificial Sequence
  Synthetic oligonucleotide
ggactcagcttggagagctttctcgactca

SEQ ID NO: 372221 - DNA, 30 bp, Artificial Sequence
  Synthetic oligonucleotide
ggtacgcgtgtttcttctcagacggactca

SEQ ID NO: 372222 - DNA, 30 bp, Artificial Sequence
  Synthetic oligonucleotide
tgtgcgatcaccgggcgcgacgtggactca

SEQ ID NO: 372223 - DNA, 30 bp, Artificial Sequence
  Synthetic oligonucleotide
tatctttctggtagaaccatctctgactca

SEQ ID NO: 372224 - DNA, 30 bp, Artificial Sequence
  Synthetic oligonucleotide
gctttcgggagctcgtaattacttgactca

SEQ ID NO: 372225 - DNA, 30 bp, Artificial Sequence
  Synthetic oligonucleotide
ttagcaacgtaacgtaatgcactctactca

SEQ ID NO: 372226 - DNA, 30 bp, Artificial Sequence
  Synthetic oligonucleotide
aaacaatgaataaactagggcttgtactca

SEQ ID NO: 372227 - DNA, 30 bp, Artificial Sequence
  Synthetic oligonucleotide
gaacatataggggtatattaagattactca

SEQ ID NO: 372228 - DNA, 30 bp, Artificial Sequence
  Synthetic oligonucleotide
gtacgtcgcttcttatatagaggttactca

SEQ ID NO: 372229 - DNA, 30 bp, Artificial Sequence
  Synthetic oligonucleotide
aagtcaagaggaaacggactgatttactca

SEQ ID NO: 372230 - DNA, 29 bp, Artificial Sequence
  Synthetic oligonucleotide
cggaactaaactttgaatccttttactca

SEQ ID NO: 372231 - DNA, 30 bp, Artificial Sequence
  Synthetic oligonucleotide
atataacgccacgacgtaaggcaaacctca

SEQ ID NO: 372232 - DNA, 30 bp, Artificial Sequence
  Synthetic oligonucleotide
accggtacggtacattccgacgcaacctca

SEQ ID NO: 372233 - DNA, 30 bp, Artificial Sequence
  Synthetic oligonucleotide
ttacgcgttcggatatgatgcggcacctca

SEQ ID NO: 372234 - DNA, 30 bp, Artificial Sequence
  Synthetic oligonucleotide
tcgtgggcagtttaggtcgattgcacctca

SEQ ID NO: 372235 - DNA, 30 bp, Artificial Sequence
  Synthetic oligonucleotide
cgacaagaggttcctcgggagaagacctca

SEQ ID NO: 372236 - DNA, 30 bp, Artificial Sequence
  Synthetic oligonucleotide
gccggcggcacctatggtaagcaaccctca

SEQ ID NO: 372237 - DNA, 30 bp, Artificial Sequence
  Synthetic oligonucleotide
caattgaatgtccgacgaaatcaaccctca

SEQ ID NO: 372238 - DNA, 30 bp, Artificial Sequence
  Synthetic oligonucleotide
gtgcctaaatggggttcattaagaccctca

SEQ ID NO: 372239 - DNA, 30 bp, Artificial Sequence
  Synthetic oligonucleotide
gagggattagcccaggagcggaacccctca

SEQ ID NO: 372240 - DNA, 30 bp, Artificial Sequence
  Synthetic oligonucleotide
catacccgatgatcagccatagacccctca

SEQ ID NO: 372241 - DNA, 30 bp, Artificial Sequence
  Synthetic oligonucleotide
atgacgaccaattcggaattcgccccctca

SEQ ID NO: 372242 - DNA, 30 bp, Artificial Sequence
  Synthetic oligonucleotide
tgtgaacagcgaggggatcaacgcccctca

SEQ ID NO: 372243 - DNA, 30 bp, Artificial Sequence
  Synthetic oligonucleotide
ttcttaacagttagtcgtgatttcccctca

SEQ ID NO: 372244 - DNA, 30 bp, Artificial Sequence
  Synthetic oligonucleotide
attcggatacggtttctccctgagccctca

SEQ ID NO: 372245 - DNA, 30 bp, Artificial Sequence
  Synthetic oligonucleotide
gtatctcgttgggcgaactcacatccctca

SEQ ID NO: 372246 - DNA, 30 bp, Artificial Sequence
  Synthetic oligonucleotide
acagaggttttaacttaggtggaagcctca

SEQ ID NO: 372247 - DNA, 30 bp, Artificial Sequence
  Synthetic oligonucleotide
cagaccaggtaattttaggtgtccgcctca

SEQ ID NO: 372248 - DNA, 30 bp, Artificial Sequence
  Synthetic oligonucleotide
agtcccgtttgggactgtttaagcgcctca

SEQ ID NO: 372249 - DNA, 30 bp, Artificial Sequence
  Synthetic oligonucleotide
gtccgagcgctcctcttatattcggcctca

SEQ ID NO: 372250 - DNA, 30 bp, Artificial Sequence
  Synthetic oligonucleotide
attggtcgcatacccgtagccaatgcctca

SEQ ID NO: 372251 - DNA, 30 bp, Artificial Sequence
  Synthetic oligonucleotide
acacaaggcaatcgctgcaattctgcctca

SEQ ID NO: 372252 - DNA, 30 bp, Artificial Sequence
  Synthetic oligonucleotide
ctggacatttcgatgctatggattgcctca

SEQ ID NO: 372253 - DNA, 30 bp, Artificial Sequence
  Synthetic oligonucleotide
ggaatcctaaatttcgtgtacaaatcctca

SEQ ID NO: 372254 - DNA, 30 bp, Artificial Sequence
  Synthetic oligonucleotide
tttgagaactatcggtccgccagatcctca

SEQ ID NO: 372255 - DNA, 30 bp, Artificial Sequence
  Synthetic oligonucleotide
tgggtgaaggttttacgcaaattctcctca

SEQ ID NO: 372256 - DNA, 30 bp, Artificial Sequence
  Synthetic oligonucleotide
cccaactggggaagaccagccgagtcctca

SEQ ID NO: 372257 - DNA, 30 bp, Artificial Sequence
  Synthetic oligonucleotide
gcaaaagtatattgtacgggcgtgtcctca

SEQ ID NO: 372258 - DNA, 30 bp, Artificial Sequence
  Synthetic oligonucleotide
agattaccgcgacgatatcacgcttcctca

SEQ ID NO: 372259 - DNA, 30 bp, Artificial Sequence
  Synthetic oligonucleotide
gtattataactccgcccgtcgagaagctca

SEQ ID NO: 372260 - DNA, 30 bp, Artificial Sequence
  Synthetic oligonucleotide
gtctctcaggtagagagttaatgaagctca

SEQ ID NO: 372261 - DNA, 30 bp, Artificial Sequence
  Synthetic oligonucleotide
tgggttgtggacgcgtcctgttgaagctca

SEQ ID NO: 372262 - DNA, 30 bp, Artificial Sequence
  Synthetic oligonucleotide
taactagacgctgttcatgcaataagctca

SEQ ID NO: 372263 - DNA, 30 bp, Artificial Sequence
  Synthetic oligonucleotide
accctgtctatgccagtgagctccagctca

SEQ ID NO: 372264 - DNA, 30 bp, Artificial Sequence
  Synthetic oligonucleotide
gtatctcactttgtttgtcgtctgagctca

SEQ ID NO: 372265 - DNA, 30 bp, Artificial Sequence
  Synthetic oligonucleotide
ggtcgattagtgtcattactcaatagctca

SEQ ID NO: 372266 - DNA, 30 bp, Artificial Sequence
  Synthetic oligonucleotide
gtatcctcacacagaatatgtcatagctca

SEQ ID NO: 372267 - DNA, 30 bp, Artificial Sequence
  Synthetic oligonucleotide
ggtcataatattcaaggtttgcttagctca

SEQ ID NO: 372268 - DNA, 30 bp, Artificial Sequence
  Synthetic oligonucleotide
cccacggtgactccaccagaccaacgctca

SEQ ID NO: 372269 - DNA, 30 bp, Artificial Sequence
  Synthetic oligonucleotide
aacaggaattaatccgtccgtgcccgctca

SEQ ID NO: 372270 - DNA, 30 bp, Artificial Sequence
  Synthetic oligonucleotide
gttcacccactttgagagtagtcccgctca

SEQ ID NO: 372271 - DNA, 30 bp, Artificial Sequence
  Synthetic oligonucleotide
aatctactcgtcgtccacagatctcgctca

SEQ ID NO: 372272 - DNA, 30 bp, Artificial Sequence
  Synthetic oligonucleotide
atatcgacggtgctgcaaatgtaaggctca

SEQ ID NO: 372273 - DNA, 30 bp, Artificial Sequence
  Synthetic oligonucleotide
tatcgtaatccctcggccattccaggctca

SEQ ID NO: 372274 - DNA, 30 bp, Artificial Sequence
  Synthetic oligonucleotide
tctgatctggtgcacctaagaagcggctca

SEQ ID NO: 372275 - DNA, 30 bp, Artificial Sequence
  Synthetic oligonucleotide
ggtaattgtcctcgccactcgtgcggctca

SEQ ID NO: 372276 - DNA, 30 bp, Artificial Sequence
  Synthetic oligonucleotide
tgatgagcggacaccacatgtgtcggctca

SEQ ID NO: 372277 - DNA, 30 bp, Artificial Sequence
  Synthetic oligonucleotide
cttagtcgcgtcgcgtgtcgccggggctca

SEQ ID NO: 372278 - DNA, 30 bp, Artificial Sequence
  Synthetic oligonucleotide
taattctgctgtcttgaagcgctgggctca

SEQ ID NO: 372279 - DNA, 30 bp, Artificial Sequence
  Synthetic oligonucleotide
aggctcttccgatttgatacgggtggctca

SEQ ID NO: 372280 - DNA, 30 bp, Artificial Sequence
  Synthetic oligonucleotide
tggtattgatggctcacggaagttggctca

SEQ ID NO: 372281 - DNA, 30 bp, Artificial Sequence
  Synthetic oligonucleotide
atatagagttgacctatgcaccactgctca

SEQ ID NO: 372282 - DNA, 30 bp, Artificial Sequence
  Synthetic oligonucleotide
aaatgaacttgcacgcggttgtcctgctca

SEQ ID NO: 372283 - DNA, 30 bp, Artificial Sequence
  Synthetic oligonucleotide
gaatcctggaacctgtacgataattgctca

SEQ ID NO: 372284 - DNA, 30 bp, Artificial Sequence
  Synthetic oligonucleotide
attatgccaacgcttgtgggtgattgctca

SEQ ID NO: 372285 - DNA, 30 bp, Artificial Sequence
  Synthetic oligonucleotide
gcgccgggaaaatgatttaggggttgctca

SEQ ID NO: 372286 - DNA, 30 bp, Artificial Sequence
  Synthetic oligonucleotide
gtcacatacgggggaatagttttttgctca

SEQ ID NO: 372287 - DNA, 30 bp, Artificial Sequence
  Synthetic oligonucleotide
gcaagtctccagggtaaaacactgatctca

SEQ ID NO: 372288 - DNA, 30 bp, Artificial Sequence
  Synthetic oligonucleotide
tggcagtaggttaccggacaacatatctca

SEQ ID NO: 372289 - DNA, 30 bp, Artificial Sequence
  Synthetic oligonucleotide
ccaccattagcacgctcggcagctatctca

SEQ ID NO: 372290 - DNA, 30 bp, Artificial Sequence
  Synthetic oligonucleotide
cgccatgaggaaggaacaagtcatctctca

SEQ ID NO: 372291 - DNA, 30 bp, Artificial Sequence
  Synthetic oligonucleotide
tgactccataacggcgacggaactctctca

SEQ ID NO: 372292 - DNA, 30 bp, Artificial Sequence
  Synthetic oligonucleotide
ctaaatttatcgagcgtcaatggagtctca

SEQ ID NO: 372293 - DNA, 30 bp, Artificial Sequence
  Synthetic oligonucleotide
agatgccacagtacgtctacgttagtctca

SEQ ID NO: 372294 - DNA, 30 bp, Artificial Sequence
  Synthetic oligonucleotide
agaattggcgacaggtttcgcagggtctca

SEQ ID NO: 372295 - DNA, 30 bp, Artificial Sequence
  Synthetic oligonucleotide
ggttggttggggttgaacctccttgtctca

SEQ ID NO: 372296 - DNA, 30 bp, Artificial Sequence
  Synthetic oligonucleotide
ttagctgaagaagcagacttatttgtctca

SEQ ID NO: 372297 - DNA, 30 bp, Artificial Sequence
  Synthetic oligonucleotide
cagtcgaatgccacgtcgacaatattctca

SEQ ID NO: 372298 - DNA, 30 bp, Artificial Sequence
  Synthetic oligonucleotide
tttgtattcatagaaatcaaacggttctca

SEQ ID NO: 372299 - DNA, 30 bp, Artificial Sequence
  Synthetic oligonucleotide
ttttggtccttcttccggcaagatttctca

SEQ ID NO: 372300 - DNA, 30 bp, Artificial Sequence
  Synthetic oligonucleotide
acagctacaagtctttatgccattttctca

SEQ ID NO: 372301 - DNA, 30 bp, Artificial Sequence
  Synthetic oligonucleotide
aaaacggagggtcccgaggagaaaaagtca

SEQ ID NO: 372302 - DNA, 30 bp, Artificial Sequence
  Synthetic oligonucleotide
cggtctatttccgtgtactcgacaaagtca

SEQ ID NO: 372303 - DNA, 30 bp, Artificial Sequence
  Synthetic oligonucleotide
gtagggttgttataaagtagatcaaagtca

SEQ ID NO: 372304 - DNA, 30 bp, Artificial Sequence
  Synthetic oligonucleotide
caagcctcagatgaccaattacgcaagtca

SEQ ID NO: 372305 - DNA, 31 bp, Artificial Sequence
  Synthetic oligonucleotide
cagtctgattggccacgagcgaatcaagtca

SEQ ID NO: 372306 - DNA, 30 bp, Artificial Sequence
  Synthetic oligonucleotide
gggtgcaactgagctgtccgttggaagtca

SEQ ID NO: 372307 - DNA, 30 bp, Artificial Sequence
  Synthetic oligonucleotide
gctcgatttagtgacgctccaagtaagtca

SEQ ID NO: 372308 - DNA, 30 bp, Artificial Sequence
  Synthetic oligonucleotide
gaatatgctaatccccattgctgtaagtca

SEQ ID NO: 372309 - DNA, 30 bp, Artificial Sequence
  Synthetic oligonucleotide
agggagcttttcttcggaacgtttaagtca

SEQ ID NO: 372310 - DNA, 30 bp, Artificial Sequence
  Synthetic oligonucleotide
ccactgtattcgctgttactggagcagtca

SEQ ID NO: 372311 - DNA, 30 bp, Artificial Sequence
  Synthetic oligonucleotide
tgccttcaccagactttttcggtagagtca

SEQ ID NO: 372312 - DNA, 30 bp, Artificial Sequence
  Synthetic oligonucleotide
aagatcatatttccgctaggcggggagtca

SEQ ID NO: 372313 - DNA, 30 bp, Artificial Sequence
  Synthetic oligonucleotide
ttttgttccgccgattgtcccttggagtca

SEQ ID NO: 372314 - DNA, 30 bp, Artificial Sequence
  Synthetic oligonucleotide
cttattgtagggtaagttacaactgagtca

SEQ ID NO: 372315 - DNA, 30 bp, Artificial Sequence
  Synthetic oligonucleotide
cgtatcaaggtttcaggggccactgagtca

SEQ ID NO: 372316 - DNA, 30 bp, Artificial Sequence
  Synthetic oligonucleotide
cagaccccatgccgaacagccgctgagtca

SEQ ID NO: 372317 - DNA, 30 bp, Artificial Sequence
  Synthetic oligonucleotide
ggagaacgtaggggaatacctggtgagtca

SEQ ID NO: 372318 - DNA, 30 bp, Artificial Sequence
  Synthetic oligonucleotide
aagtctctctctgtaccgacaattgagtca

SEQ ID NO: 372319 - DNA, 30 bp, Artificial Sequence
  Synthetic oligonucleotide
atgttatccagttaatctgtaaaatagtca

SEQ ID NO: 372320 - DNA, 30 bp, Artificial Sequence
  Synthetic oligonucleotide
gcttcgtataagactgcttcgagatagtca

SEQ ID NO: 372321 - DNA, 30 bp, Artificial Sequence
  Synthetic oligonucleotide
ttaagacaaataatagcggcacgatagtca

SEQ ID NO: 372322 - DNA, 29 bp, Artificial Sequence
  Synthetic oligonucleotide
tgagctggcgggtaagcagactatagtca

SEQ ID NO: 372323 - DNA, 30 bp, Artificial Sequence
  Synthetic oligonucleotide
gttgggtgtacgggatgtgtactatagtca

SEQ ID NO: 372324 - DNA, 30 bp, Artificial Sequence
  Synthetic oligonucleotide
cctaatggcagacacgctcattactagtca

SEQ ID NO: 372325 - DNA, 30 bp, Artificial Sequence
  Synthetic oligonucleotide
ggctgacgtaagggtattacaccctagtca

SEQ ID NO: 372326 - DNA, 30 bp, Artificial Sequence
  Synthetic oligonucleotide
agaacttcgcacgggcgaacgccctagtca

SEQ ID NO: 372327 - DNA, 30 bp, Artificial Sequence
  Synthetic oligonucleotide
acgcctttacacaagatattagcgtagtca

SEQ ID NO: 372328 - DNA, 30 bp, Artificial Sequence
  Synthetic oligonucleotide
actgttagggcttctagtcctcggtagtca

SEQ ID NO: 372329 - DNA, 30 bp, Artificial Sequence
  Synthetic oligonucleotide
gctgatattcagaggggcatgagttagtca

SEQ ID NO: 372330 - DNA, 30 bp, Artificial Sequence
  Synthetic oligonucleotide
aggattgtacccagccgagcgtgttagtca

SEQ ID NO: 372331 - DNA, 30 bp, Artificial Sequence
  Synthetic oligonucleotide
ggaaacatccgcatgaaccgtgacacgtca

SEQ ID NO: 372332 - DNA, 30 bp, Artificial Sequence
  Synthetic oligonucleotide
ggaaacgtgattgaggtaaactacacgtca

SEQ ID NO: 372333 - DNA, 30 bp, Artificial Sequence
  Synthetic oligonucleotide
ttacgaatcagacgttcagcattgacgtca

SEQ ID NO: 372334 - DNA, 30 bp, Artificial Sequence
  Synthetic oligonucleotide
acaatgtaagactggcaatgctatacgtca

SEQ ID NO: 372335 - DNA, 30 bp, Artificial Sequence
  Synthetic oligonucleotide
gaaataaggtggaatgacaatataccgtca

SEQ ID NO: 372336 - DNA, 31 bp, Artificial Sequence
  Synthetic oligonucleotide
gtcgtcggcccagacgggttttgtaccgtca

SEQ ID NO: 372337 - DNA, 30 bp, Artificial Sequence
  Synthetic oligonucleotide
attgacttgtgtacgtagacattaccgtca

SEQ ID NO: 372338 - DNA, 30 bp, Artificial Sequence
  Synthetic oligonucleotide
caaaagacgcgctgggaatagaacccgtca

SEQ ID NO: 372339 - DNA, 30 bp, Artificial Sequence
  Synthetic oligonucleotide
aaactcgggggtgacagggacttcccgtca

SEQ ID NO: 372340 - DNA, 30 bp, Artificial Sequence
  Synthetic oligonucleotide
ttgagcttgcgggcaggaacccagccgtca

SEQ ID NO: 372341 - DNA, 30 bp, Artificial Sequence
  Synthetic oligonucleotide
ttgaagcaagtgaggactcattagccgtca

SEQ ID NO: 372342 - DNA, 30 bp, Artificial Sequence
  Synthetic oligonucleotide
ggtaacacgatcacagacggcatgccgtca

SEQ ID NO: 372343 - DNA, 30 bp, Artificial Sequence
  Synthetic oligonucleotide
ggcattcgacaacctgcgactacagcgtca

SEQ ID NO: 372344 - DNA, 30 bp, Artificial Sequence
  Synthetic oligonucleotide
ctctgggacttactaatgtttccagcgtca

SEQ ID NO: 372345 - DNA, 30 bp, Artificial Sequence
  Synthetic oligonucleotide
tgttggcttcttgcacccggcacggcgtca

SEQ ID NO: 372346 - DNA, 30 bp, Artificial Sequence
  Synthetic oligonucleotide
agagcacttggtcgaccgaggcatgcgtca

SEQ ID NO: 372347 - DNA, 40 bp, Artificial Sequence
  Synthetic oligonucleotide
cgtcctctgcttagttacttgaacagtacatgctgcgtca

SEQ ID NO: 372348 - DNA, 30 bp, Artificial Sequence
  Synthetic oligonucleotide
ctcagcccagaagttattatcggtgcgtca

SEQ ID NO: 372349 - DNA, 30 bp, Artificial Sequence
  Synthetic oligonucleotide
agttagacgcgactgcgtgcttgtgcgtca

SEQ ID NO: 372350 - DNA, 30 bp, Artificial Sequence
  Synthetic oligonucleotide
gtgcaaccatttatggctagatactcgtca

SEQ ID NO: 372351 - DNA, 30 bp, Artificial Sequence
  Synthetic oligonucleotide
gttaggcttatgggtcagggtctctcgtca

SEQ ID NO: 372352 - DNA, 30 bp, Artificial Sequence
  Synthetic oligonucleotide
gcaagcagctaatattagaatttctcgtca

SEQ ID NO: 372353 - DNA, 30 bp, Artificial Sequence
  Synthetic oligonucleotide
actgtgcgatgaccccgtacgacttcgtca

SEQ ID NO: 372354 - DNA, 30 bp, Artificial Sequence
  Synthetic oligonucleotide
agtaaacgtccgaccgcgaggatttcgtca

SEQ ID NO: 372355 - DNA, 30 bp, Artificial Sequence
  Synthetic oligonucleotide
tgttggcgcatcacggtacggttttcgtca

SEQ ID NO: 372356 - DNA, 30 bp, Artificial Sequence
  Synthetic oligonucleotide
aaccgtgttttgtatgacgggcaaaggtca

SEQ ID NO: 372357 - DNA, 30 bp, Artificial Sequence
  Synthetic oligonucleotide
cattagggtgcagtgccctagacaaggtca

SEQ ID NO: 372358 - DNA, 30 bp, Artificial Sequence
  Synthetic oligonucleotide
aataatagggagtaacaagcgtcaaggtca

SEQ ID NO: 372359 - DNA, 30 bp, Artificial Sequence
  Synthetic oligonucleotide
ttagtgcgtttcgagatgcccggaaggtca

SEQ ID NO: 372360 - DNA, 30 bp, Artificial Sequence
  Synthetic oligonucleotide
agatgtgaagcgggtcctgctgagaggtca

SEQ ID NO: 372361 - DNA, 30 bp, Artificial Sequence
  Synthetic oligonucleotide
caggccgtgagttggtcacagccgaggtca

SEQ ID NO: 372362 - DNA, 30 bp, Artificial Sequence
  Synthetic oligonucleotide
ggtcgataggtataaattcactggaggtca

SEQ ID NO: 372363 - DNA, 30 bp, Artificial Sequence
  Synthetic oligonucleotide
acagcttataacatcatgatagctaggtca

SEQ ID NO: 372364 - DNA, 30 bp, Artificial Sequence
  Synthetic oligonucleotide
tagggtcatgggagttgactataacggtca

SEQ ID NO: 372365 - DNA, 30 bp, Artificial Sequence
  Synthetic oligonucleotide
attggcgcaacgccggtacgtgcccggtca

SEQ ID NO: 372366 - DNA, 30 bp, Artificial Sequence
  Synthetic oligonucleotide
ttcgtattcgagcgcctactgcggcggtca

SEQ ID NO: 372367 - DNA, 30 bp, Artificial Sequence
  Synthetic oligonucleotide
cgtctctaactgaggcacgctactcggtca

SEQ ID NO: 372368 - DNA, 30 bp, Artificial Sequence
  Synthetic oligonucleotide
accgggaagttacggagcatcattcggtca

SEQ ID NO: 372369 - DNA, 30 bp, Artificial Sequence
  Synthetic oligonucleotide
aactgacagggactccggtcacgcgggtca

SEQ ID NO: 372370 - DNA, 30 bp, Artificial Sequence
  Synthetic oligonucleotide
gctcgaaagacgatctgtcggtgcgggtca

SEQ ID NO: 372371 - DNA, 30 bp, Artificial Sequence
  Synthetic oligonucleotide
tgagtatgtcagtgcctgttaagggggtca

SEQ ID NO: 372372 - DNA, 30 bp, Artificial Sequence
  Synthetic oligonucleotide
cgcgttcacagggaggcgcttttggggtca

SEQ ID NO: 372373 - DNA, 30 bp, Artificial Sequence
  Synthetic oligonucleotide
gtatctgacttcgcctacgattctgggtca

SEQ ID NO: 372374 - DNA, 30 bp, Artificial Sequence
  Synthetic oligonucleotide
cagaaatgactcccaagagctagtgggtca

SEQ ID NO: 372375 - DNA, 30 bp, Artificial Sequence
  Synthetic oligonucleotide
ttttagttgggatatccttgccgtgggtca

SEQ ID NO: 372376 - DNA, 30 bp, Artificial Sequence
  Synthetic oligonucleotide
cattccctctacatagttcgtcaatggtca

SEQ ID NO: 372377 - DNA, 30 bp, Artificial Sequence
  Synthetic oligonucleotide
tggttttcagtcaattcacaaccatggtca

SEQ ID NO: 372378 - DNA, 30 bp, Artificial Sequence
  Synthetic oligonucleotide
tccaagacggttccgtgttggtcatggtca

SEQ ID NO: 372379 - DNA, 30 bp, Artificial Sequence
  Synthetic oligonucleotide
ttaacatctaagtacacatacgtatggtca

SEQ ID NO: 372380 - DNA, 30 bp, Artificial Sequence
  Synthetic oligonucleotide
ttttgcgacactagacaatatctgtggtca

SEQ ID NO: 372381 - DNA, 30 bp, Artificial Sequence
  Synthetic oligonucleotide
gcgatcgttttagtgctaatccattggtca

SEQ ID NO: 372382 - DNA, 30 bp, Artificial Sequence
  Synthetic oligonucleotide
tcgccatgtgtgtgcacgtgaatttggtca

SEQ ID NO: 372383 - DNA, 30 bp, Artificial Sequence
  Synthetic oligonucleotide
atacatgtattatgtatgtacataatgtca

SEQ ID NO: 372384 - DNA, 30 bp, Artificial Sequence
  Synthetic oligonucleotide
gtcgttatagttggacggtctatcatgtca

SEQ ID NO: 372385 - DNA, 30 bp, Artificial Sequence
  Synthetic oligonucleotide
cgtgtatactgaacaattgcgcagatgtca

SEQ ID NO: 372386 - DNA, 30 bp, Artificial Sequence
  Synthetic oligonucleotide
tgcccgctgtggtgttgctgtaatatgtca

SEQ ID NO: 372387 - DNA, 30 bp, Artificial Sequence
  Synthetic oligonucleotide
ggtagcgccttttcgttttcagagctgtca

SEQ ID NO: 372388 - DNA, 30 bp, Artificial Sequence
  Synthetic oligonucleotide
ttattgtgtaccacaccattgtggctgtca

SEQ ID NO: 372389 - DNA, 30 bp, Artificial Sequence
  Synthetic oligonucleotide
tagttattgaggtcttaagcatctctgtca

SEQ ID NO: 372390 - DNA, 30 bp, Artificial Sequence
  Synthetic oligonucleotide
ggaaactgtggctcaagtcactaagtgtca

SEQ ID NO: 372391 - DNA, 30 bp, Artificial Sequence
  Synthetic oligonucleotide
gatatcaggcgtaacgctattcgagtgtca

SEQ ID NO: 372392 - DNA, 30 bp, Artificial Sequence
  Synthetic oligonucleotide
catagcatcaaaggcccctatatcgtgtca

SEQ ID NO: 372393 - DNA, 30 bp, Artificial Sequence
  Synthetic oligonucleotide
ggcggtaattggagttgcggaggggtgtca

SEQ ID NO: 372394 - DNA, 30 bp, Artificial Sequence
  Synthetic oligonucleotide
caaggattctgggtcggccggtgggtgtca

SEQ ID NO: 372395 - DNA, 30 bp, Artificial Sequence
  Synthetic oligonucleotide
gggtccatgtaatgataatgccatgtgtca

SEQ ID NO: 372396 - DNA, 30 bp, Artificial Sequence
  Synthetic oligonucleotide
ctttaatcgaagggccccatccgtgtgtca

SEQ ID NO: 372397 - DNA, 30 bp, Artificial Sequence
  Synthetic oligonucleotide
gccgccctatgtcgaacaccccaattgtca

SEQ ID NO: 372398 - DNA, 30 bp, Artificial Sequence
  Synthetic oligonucleotide
ttttctaacacgggcaagcccccattgtca

SEQ ID NO: 372399 - DNA, 30 bp, Artificial Sequence
  Synthetic oligonucleotide
gatcttttgccagatcagaacagcttgtca

SEQ ID NO: 372400 - DNA, 30 bp, Artificial Sequence
  Synthetic oligonucleotide
tccgagctctattacgaaagcgagttgtca

SEQ ID NO: 372401 - DNA, 30 bp, Artificial Sequence
  Synthetic oligonucleotide
gtgtggtggttccggtcacaaacgttgtca

SEQ ID NO: 372402 - DNA, 30 bp, Artificial Sequence
  Synthetic oligonucleotide
tgggctgtgttacgggtcaatccgttgtca

SEQ ID NO: 372403 - DNA, 30 bp, Artificial Sequence
  Synthetic oligonucleotide
aaattataattggtctgtcaattgttgtca

SEQ ID NO: 372404 - DNA, 31 bp, Artificial Sequence
  Synthetic oligonucleotide
ttccgaggggcatcgccagtggttgttgtca

SEQ ID NO: 372405 - DNA, 31 bp, Artificial Sequence
  Synthetic oligonucleotide
gtcggaactgtttcccgagctgttgttgtca

SEQ ID NO: 372406 - DNA, 30 bp, Artificial Sequence
  Synthetic oligonucleotide
ttatcgccacggtacagaaatcctttgtca

SEQ ID NO: 372407 - DNA, 30 bp, Artificial Sequence
  Synthetic oligonucleotide
actactaggttccccgcaagcggtttgtca

SEQ ID NO: 372408 - DNA, 29 bp, Artificial Sequence
  Synthetic oligonucleotide
ggatgggataatctgtattagttttgtca

SEQ ID NO: 372409 - DNA, 30 bp, Artificial Sequence
  Synthetic oligonucleotide
tagcaaggattgtatatgatttaaaattca

SEQ ID NO: 372410 - DNA, 30 bp, Artificial Sequence
  Synthetic oligonucleotide
ggcaataaaggcgagaggctgggtaattca

SEQ ID NO: 372411 - DNA, 30 bp, Artificial Sequence
  Synthetic oligonucleotide
ggttgccactttatttcccaaatacattca

SEQ ID NO: 372412 - DNA, 30 bp, Artificial Sequence
  Synthetic oligonucleotide
tattcggcttgcgttgatataatccattca

SEQ ID NO: 372413 - DNA, 30 bp, Artificial Sequence
  Synthetic oligonucleotide
gggtatcaggcattggcgcgagcgcattca

SEQ ID NO: 372414 - DNA, 30 bp, Artificial Sequence
  Synthetic oligonucleotide
cctttcatattcactcattggggtcattca

SEQ ID NO: 372415 - DNA, 30 bp, Artificial Sequence
  Synthetic oligonucleotide
atgggcggcacgaaaaggggccttcattca

SEQ ID NO: 372416 - DNA, 30 bp, Artificial Sequence
  Synthetic oligonucleotide
taaacactattcagcgtccttcttcattca

SEQ ID NO: 372417 - DNA, 30 bp, Artificial Sequence
  Synthetic oligonucleotide
aaatgctggttcccggacagcaaggattca

SEQ ID NO: 372418 - DNA, 30 bp, Artificial Sequence
  Synthetic oligonucleotide
cggtgtgcgcataactatttacgggattca

SEQ ID NO: 372419 - DNA, 30 bp, Artificial Sequence
  Synthetic oligonucleotide
atcattaagacgctcactatctgggattca

SEQ ID NO: 372420 - DNA, 30 bp, Artificial Sequence
  Synthetic oligonucleotide
gtagtgaatgtcctagaatagttggattca

SEQ ID NO: 372421 - DNA, 30 bp, Artificial Sequence
  Synthetic oligonucleotide
gtcggggttatctgcgtgagtttggattca

SEQ ID NO: 372422 - DNA, 30 bp, Artificial Sequence
  Synthetic oligonucleotide
cgtctgtctggatgagggtaccctgattca

SEQ ID NO: 372423 - DNA, 30 bp, Artificial Sequence
  Synthetic oligonucleotide
tatgcgaagcgtccagtccctcggtattca

SEQ ID NO: 372424 - DNA, 30 bp, Artificial Sequence
  Synthetic oligonucleotide
acgacggcgtcttggtaaccatggtattca

SEQ ID NO: 372425 - DNA, 30 bp, Artificial Sequence
  Synthetic oligonucleotide
ccctgtcgcccgtagggtcacttcacttca

SEQ ID NO: 372426 - DNA, 30 bp, Artificial Sequence
  Synthetic oligonucleotide
tgtaacctcccatgaagggaagagacttca

SEQ ID NO: 372427 - DNA, 30 bp, Artificial Sequence
  Synthetic oligonucleotide
ctaaagaaacattcgtaatgggtgacttca

SEQ ID NO: 372428 - DNA, 30 bp, Artificial Sequence
  Synthetic oligonucleotide
cacgcgcagggctcggcgcagcctacttca

SEQ ID NO: 372429 - DNA, 30 bp, Artificial Sequence
  Synthetic oligonucleotide
atgttcaattagttccttaccgttacttca

SEQ ID NO: 372430 - DNA, 30 bp, Artificial Sequence
  Synthetic oligonucleotide
acatcttcttacgtgtacatgcacccttca

SEQ ID NO: 372431 - DNA, 30 bp, Artificial Sequence
  Synthetic oligonucleotide
aaagaagaagtatttcgccccgccccttca

SEQ ID NO: 372432 - DNA, 30 bp, Artificial Sequence
  Synthetic oligonucleotide
gaaggctcatgtgttcgactcgccccttca

SEQ ID NO: 372433 - DNA, 30 bp, Artificial Sequence
  Synthetic oligonucleotide
ttatttcaatcttaagaggatgccccttca

SEQ ID NO: 372434 - DNA, 30 bp, Artificial Sequence
  Synthetic oligonucleotide
actggactgttctatcaagtgggcccttca

SEQ ID NO: 372435 - DNA, 30 bp, Artificial Sequence
  Synthetic oligonucleotide
aaactgcgttgcattccacaactgccttca

SEQ ID NO: 372436 - DNA, 30 bp, Artificial Sequence
  Synthetic oligonucleotide
gactggaaatggtcaagagacttgccttca

SEQ ID NO: 372437 - DNA, 30 bp, Artificial Sequence
  Synthetic oligonucleotide
cagagtatggtccaaataggagatccttca

SEQ ID NO: 372438 - DNA, 30 bp, Artificial Sequence
  Synthetic oligonucleotide
ctttatacactccgtaaggcggttccttca

SEQ ID NO: 372439 - DNA, 30 bp, Artificial Sequence
  Synthetic oligonucleotide
gagataactcccaccgctttttacgcttca

SEQ ID NO: 372440 - DNA, 30 bp, Artificial Sequence
  Synthetic oligonucleotide
tgcatagctcggaaggcgttcaaggcttca

SEQ ID NO: 372441 - DNA, 30 bp, Artificial Sequence
  Synthetic oligonucleotide
agggcatatacgaaggtaacgcgggcttca

SEQ ID NO: 372442 - DNA, 30 bp, Artificial Sequence
  Synthetic oligonucleotide
gccttaagttcaaacaaggaagaatcttca

SEQ ID NO: 372443 - DNA, 30 bp, Artificial Sequence
  Synthetic oligonucleotide
gccaccagtgtccccggttctgaatcttca

SEQ ID NO: 372444 - DNA, 30 bp, Artificial Sequence
  Synthetic oligonucleotide
tgtccgcacatcgtgacatggtaatcttca

SEQ ID NO: 372445 - DNA, 30 bp, Artificial Sequence
  Synthetic oligonucleotide
aggtttatggctcacaaggaggactcttca

SEQ ID NO: 372446 - DNA, 30 bp, Artificial Sequence
  Synthetic oligonucleotide
gatactctagtgctgtaagcgtcctcttca

SEQ ID NO: 372447 - DNA, 30 bp, Artificial Sequence
  Synthetic oligonucleotide
ttggcggcaaatctgaatatccagtcttca

SEQ ID NO: 372448 - DNA, 30 bp, Artificial Sequence
  Synthetic oligonucleotide
tggtcttgtggggaacgtaataggtcttca

SEQ ID NO: 372449 - DNA, 30 bp, Artificial Sequence
  Synthetic oligonucleotide
aggggtactcgatggacggagctgtcttca

SEQ ID NO: 372450 - DNA, 30 bp, Artificial Sequence
  Synthetic oligonucleotide
aagagttcgcaacaacagcatttgtcttca

SEQ ID NO: 372451 - DNA, 30 bp, Artificial Sequence
  Synthetic oligonucleotide
ggatcagacgcctgcgggagcgtttcttca

SEQ ID NO: 372452 - DNA, 30 bp, Artificial Sequence
  Synthetic oligonucleotide
cgacgatcagccatatcttggaaaagttca

SEQ ID NO: 372453 - DNA, 30 bp, Artificial Sequence
  Synthetic oligonucleotide
gccgcacacatgtctaaaaagacaagttca

SEQ ID NO: 372454 - DNA, 30 bp, Artificial Sequence
  Synthetic oligonucleotide
tgagcacaatttgctagtaagacaagttca

SEQ ID NO: 372455 - DNA, 30 bp, Artificial Sequence
  Synthetic oligonucleotide
caacttcatcgcaagcaggttgacagttca

SEQ ID NO: 372456 - DNA, 30 bp, Artificial Sequence
  Synthetic oligonucleotide
acttataccgtcgtattaactaccagttca

SEQ ID NO: 372457 - DNA, 30 bp, Artificial Sequence
  Synthetic oligonucleotide
aaacatccctgttccatgtaacccagttca

SEQ ID NO: 372458 - DNA, 30 bp, Artificial Sequence
  Synthetic oligonucleotide
cgatttatgttggtagaatgttgcagttca

SEQ ID NO: 372459 - DNA, 30 bp, Artificial Sequence
  Synthetic oligonucleotide
acacggctagttttaaaatatgtcagttca

SEQ ID NO: 372460 - DNA, 30 bp, Artificial Sequence
  Synthetic oligonucleotide
acacttggctacgagggcccactgagttca

SEQ ID NO: 372461 - DNA, 30 bp, Artificial Sequence
  Synthetic oligonucleotide
gaggagccactgaaacgcctgctgagttca

SEQ ID NO: 372462 - DNA, 30 bp, Artificial Sequence
  Synthetic oligonucleotide
ggctaagcagttctgttacaccatagttca

SEQ ID NO: 372463 - DNA, 30 bp, Artificial Sequence
  Synthetic oligonucleotide
gcgtctcactactcgaacaatactagttca

SEQ ID NO: 372464 - DNA, 30 bp, Artificial Sequence
  Synthetic oligonucleotide
gttggtatctgattaaactattctagttca

SEQ ID NO: 372465 - DNA, 30 bp, Artificial Sequence
  Synthetic oligonucleotide
attgcgttccacagcacccacagtagttca

SEQ ID NO: 372466 - DNA, 30 bp, Artificial Sequence
  Synthetic oligonucleotide
ccacgattggaaaaacacagcagacgttca

SEQ ID NO: 372467 - DNA, 30 bp, Artificial Sequence
  Synthetic oligonucleotide
gtcctggcccccaggtggtacctacgttca

SEQ ID NO: 372468 - DNA, 30 bp, Artificial Sequence
  Synthetic oligonucleotide
gagtaggggtaagtgttgtcgcgccgttca

SEQ ID NO: 372469 - DNA, 30 bp, Artificial Sequence
  Synthetic oligonucleotide
taataatgcccttggtcgataaggcgttca

SEQ ID NO: 372470 - DNA, 30 bp, Artificial Sequence
  Synthetic oligonucleotide
tcggcgcaatagtggatacggaggcgttca

SEQ ID NO: 372471 - DNA, 30 bp, Artificial Sequence
  Synthetic oligonucleotide
ggggtgccacagtcggtgttaaatcgttca

SEQ ID NO: 372472 - DNA, 30 bp, Artificial Sequence
  Synthetic oligonucleotide
atgtctctccgtctaagcgtccatcgttca

SEQ ID NO: 372473 - DNA, 30 bp, Artificial Sequence
  Synthetic oligonucleotide
gggcttggccaagcggttgacattcgttca

SEQ ID NO: 372474 - DNA, 30 bp, Artificial Sequence
  Synthetic oligonucleotide
gggcatccttcaaggaatgaacttcgttca

SEQ ID NO: 372475 - DNA, 30 bp, Artificial Sequence
  Synthetic oligonucleotide
taaacaaacgccaacgcgtagccaggttca

SEQ ID NO: 372476 - DNA, 30 bp, Artificial Sequence
  Synthetic oligonucleotide
tcgcgattaatccttgttgcacgcggttca

SEQ ID NO: 372477 - DNA, 30 bp, Artificial Sequence
  Synthetic oligonucleotide
cttaaggtcagttggaatcgccgcggttca

SEQ ID NO: 372478 - DNA, 30 bp, Artificial Sequence
  Synthetic oligonucleotide
ctgcagaacaagacaaatgaactcggttca

SEQ ID NO: 372479 - DNA, 30 bp, Artificial Sequence
  Synthetic oligonucleotide
ttcaaactctacctaggggtagagggttca

SEQ ID NO: 372480 - DNA, 30 bp, Artificial Sequence
  Synthetic oligonucleotide
tagccgaatgtaacgcagagtaggggttca

SEQ ID NO: 372481 - DNA, 30 bp, Artificial Sequence
  Synthetic oligonucleotide
cgttaggccgtggtctttactgtgggttca

SEQ ID NO: 372482 - DNA, 30 bp, Artificial Sequence
  Synthetic oligonucleotide
tgcactaccaatatgcagccgcatggttca

SEQ ID NO: 372483 - DNA, 30 bp, Artificial Sequence
  Synthetic oligonucleotide
caacattgtggtgtaaaacccgcctgttca

SEQ ID NO: 372484 - DNA, 30 bp, Artificial Sequence
  Synthetic oligonucleotide
cggtcttcgtgtgagccctctcagtgttca

SEQ ID NO: 372485 - DNA, 30 bp, Artificial Sequence
  Synthetic oligonucleotide
acgtgatgtaaattgtcagagctgtgttca

SEQ ID NO: 372486 - DNA, 30 bp, Artificial Sequence
  Synthetic oligonucleotide
gagatccactgtattcgatcgatttgttca

SEQ ID NO: 372487 - DNA, 30 bp, Artificial Sequence
  Synthetic oligonucleotide
cctgattatttgtgacgtagataaatttca

SEQ ID NO: 372488 - DNA, 30 bp, Artificial Sequence
  Synthetic oligonucleotide
ttgagtgggctaaaccttggtagaatttca

SEQ ID NO: 372489 - DNA, 30 bp, Artificial Sequence
  Synthetic oligonucleotide
cgcattgggatacgtgttggaataatttca

SEQ ID NO: 372490 - DNA, 30 bp, Artificial Sequence
  Synthetic oligonucleotide
ctaaacggcgtgagaatatgcagcatttca

SEQ ID NO: 372491 - DNA, 30 bp, Artificial Sequence
  Synthetic oligonucleotide
tgtgaagacgtcagaggagccatcatttca

SEQ ID NO: 372492 - DNA, 29 bp, Artificial Sequence
  Synthetic oligonucleotide
ataggcagcctcattcggaggatatttca

SEQ ID NO: 372493 - DNA, 30 bp, Artificial Sequence
  Synthetic oligonucleotide
acacatcacattaaaaacaggtatatttca

SEQ ID NO: 372494 - DNA, 30 bp, Artificial Sequence
  Synthetic oligonucleotide
tctgatctagataaaagttctagtatttca

SEQ ID NO: 372495 - DNA, 30 bp, Artificial Sequence
  Synthetic oligonucleotide
catttgaccccgatattgataggtatttca

SEQ ID NO: 372496 - DNA, 30 bp, Artificial Sequence
  Synthetic oligonucleotide
ctgagatctattgcttctttccgactttca

SEQ ID NO: 372497 - DNA, 30 bp, Artificial Sequence
  Synthetic oligonucleotide
gaaggtgagggtactccgctactactttca

SEQ ID NO: 372498 - DNA, 29 bp, Artificial Sequence
  Synthetic oligonucleotide
tggctagacacgtttaaatagacctttca

SEQ ID NO: 372499 - DNA, 30 bp, Artificial Sequence
  Synthetic oligonucleotide
taaatgtgtctgattcaggtgacgctttca

SEQ ID NO: 372500 - DNA, 30 bp, Artificial Sequence
  Synthetic oligonucleotide
catgtggccgtgctaaggtcagcgctttca

SEQ ID NO: 372501 - DNA, 30 bp, Artificial Sequence
  Synthetic oligonucleotide
cagaggttttgttggaaagtaagtctttca

SEQ ID NO: 372502 - DNA, 30 bp, Artificial Sequence
  Synthetic oligonucleotide
gcgagttggctaccggcaaggagtctttca

SEQ ID NO: 372503 - DNA, 30 bp, Artificial Sequence
  Synthetic oligonucleotide
tgtgtgatgggtcctagtcaattcgtttca

SEQ ID NO: 372504 - DNA, 30 bp, Artificial Sequence
  Synthetic oligonucleotide
aggattgatagttattacggaccggtttca

SEQ ID NO: 372505 - DNA, 30 bp, Artificial Sequence
  Synthetic oligonucleotide
gtaactagctgctcggcaaaacttgtttca

SEQ ID NO: 372506 - DNA, 30 bp, Artificial Sequence
  Synthetic oligonucleotide
acaattaaggtaatcgaaaaagttgtttca

SEQ ID NO: 372507 - DNA, 30 bp, Artificial Sequence
  Synthetic oligonucleotide
gcattcgagtgttcaattagggttgtttca

SEQ ID NO: 372508 - DNA, 30 bp, Artificial Sequence
  Synthetic oligonucleotide
ggcccgacagctcttctactacaattttca

SEQ ID NO: 372509 - DNA, 30 bp, Artificial Sequence
  Synthetic oligonucleotide
ttcacgggtgtgcactcttcgttattttca

SEQ ID NO: 372510 - DNA, 31 bp, Artificial Sequence
  Synthetic oligonucleotide
acgctatacttgggagtcgttcaacttttca

SEQ ID NO: 372511 - DNA, 30 bp, Artificial Sequence
  Synthetic oligonucleotide
ggcaggtgcttgaaagggcgggcgttttca

SEQ ID NO: 372512 - DNA, 30 bp, Artificial Sequence
  Synthetic oligonucleotide
cgtcagtgctacaaaacatcattgttttca

SEQ ID NO: 372513 - DNA, 30 bp, Artificial Sequence
  Synthetic oligonucleotide
tcatgctaaggggccgaggaggttttttca

SEQ ID NO: 372514 - DNA, 30 bp, Artificial Sequence
  Synthetic oligonucleotide
gtgctatttcccagcacgacagaaaaaaga

SEQ ID NO: 372515 - DNA, 30 bp, Artificial Sequence
  Synthetic oligonucleotide
ctttacggctagagagtatttacaaaaaga

SEQ ID NO: 372516 - DNA, 30 bp, Artificial Sequence
  Synthetic oligonucleotide
cgcatctgccaaccccacggcagaaaaaga

SEQ ID NO: 372517 - DNA, 30 bp, Artificial Sequence
  Synthetic oligonucleotide
ttgcctgttagggggattgccggaaaaaga

SEQ ID NO: 372518 - DNA, 30 bp, Artificial Sequence
  Synthetic oligonucleotide
ttggtgcagagatttgcggctaccaaaaga

SEQ ID NO: 372519 - DNA, 30 bp, Artificial Sequence
  Synthetic oligonucleotide
ttggtcagagtagggtttcaaaagaaaaga

SEQ ID NO: 372520 - DNA, 30 bp, Artificial Sequence
  Synthetic oligonucleotide
cctcttgtcaaatcagacttgcagaaaaga

SEQ ID NO: 372521 - DNA, 30 bp, Artificial Sequence
  Synthetic oligonucleotide
tctttcgagcttgcgtctctcacgaaaaga

SEQ ID NO: 372522 - DNA, 30 bp, Artificial Sequence
  Synthetic oligonucleotide
gaggtccgcactgcactaaccaggaaaaga

SEQ ID NO: 372523 - DNA, 30 bp, Artificial Sequence
  Synthetic oligonucleotide
tcttagcatgggacaaaggacctgaaaaga

SEQ ID NO: 372524 - DNA, 30 bp, Artificial Sequence
  Synthetic oligonucleotide
ctaggtattaggactggcgaggtgaaaaga

SEQ ID NO: 372525 - DNA, 30 bp, Artificial Sequence
  Synthetic oligonucleotide
aactgctatgtatcctcaaattataaaaga

SEQ ID NO: 372526 - DNA, 31 bp, Artificial Sequence
  Synthetic oligonucleotide
agcggacttgtgattgaggctgtctaaaaga

SEQ ID NO: 372527 - DNA, 30 bp, Artificial Sequence
  Synthetic oligonucleotide
cgccccttaccggaatcaagcagtaaaaga

SEQ ID NO: 372528 - DNA, 30 bp, Artificial Sequence
  Synthetic oligonucleotide
gtctggctgcattggcccaacgttaaaaga

SEQ ID NO: 372529 - DNA, 30 bp, Artificial Sequence
  Synthetic oligonucleotide
tcgacgttcgagacttcattgttacaaaga

SEQ ID NO: 372530 - DNA, 30 bp, Artificial Sequence
  Synthetic oligonucleotide
agtgcactgtatggccattaggaccaaaga

SEQ ID NO: 372531 - DNA, 30 bp, Artificial Sequence
  Synthetic oligonucleotide
gaatactgagggcccctcatgaggcaaaga

SEQ ID NO: 372532 - DNA, 30 bp, Artificial Sequence
  Synthetic oligonucleotide
tagtatgccataatccgtactaatcaaaga

SEQ ID NO: 372533 - DNA, 30 bp, Artificial Sequence
  Synthetic oligonucleotide
atgttatgaagtagagagccttctcaaaga

SEQ ID NO: 372534 - DNA, 30 bp, Artificial Sequence
  Synthetic oligonucleotide
aattttgtgttaaaacttattaaagaaaga

SEQ ID NO: 372535 - DNA, 30 bp, Artificial Sequence
  Synthetic oligonucleotide
gtaactagcgtgtgaaagtgggcagaaaga

SEQ ID NO: 372536 - DNA, 30 bp, Artificial Sequence
  Synthetic oligonucleotide
tattgtcatagaactgcaaaacgagaaaga

SEQ ID NO: 372537 - DNA, 30 bp, Artificial Sequence
  Synthetic oligonucleotide
cagtttcaggcgttagatcagttcgaaaga

SEQ ID NO: 372538 - DNA, 30 bp, Artificial Sequence
  Synthetic oligonucleotide
gccgttattacttgcgagctacgggaaaga

SEQ ID NO: 372539 - DNA, 30 bp, Artificial Sequence
  Synthetic oligonucleotide
ttgtaaaattccgccctttcagatgaaaga

SEQ ID NO: 372540 - DNA, 30 bp, Artificial Sequence
  Synthetic oligonucleotide
agccatcggatgcgcacgcagtctgaaaga

SEQ ID NO: 372541 - DNA, 30 bp, Artificial Sequence
  Synthetic oligonucleotide
tgtatcaacggccaatgaagtgttgaaaga

SEQ ID NO: 372542 - DNA, 29 bp, Artificial Sequence
  Synthetic oligonucleotide
attgcccctcatcagctcaggcataaaga

SEQ ID NO: 372543 - DNA, 30 bp, Artificial Sequence
  Synthetic oligonucleotide
ggcattgacccagccgcgattgactaaaga

SEQ ID NO: 372544 - DNA, 30 bp, Artificial Sequence
  Synthetic oligonucleotide
ttcttgcagaatttcctaggtgcgtaaaga

SEQ ID NO: 372545 - DNA, 30 bp, Artificial Sequence
  Synthetic oligonucleotide
atctatgttcgaaaaggcagatcgtaaaga

SEQ ID NO: 372546 - DNA, 30 bp, Artificial Sequence
  Synthetic oligonucleotide
cgattcattcctcagagggactcttaaaga

SEQ ID NO: 372547 - DNA, 30 bp, Artificial Sequence
  Synthetic oligonucleotide
ttcttcgtgcggcctaatggcaaaacaaga

SEQ ID NO: 372548 - DNA, 30 bp, Artificial Sequence
  Synthetic oligonucleotide
cgtccggtataacgtacgcgaccaacaaga

SEQ ID NO: 372549 - DNA, 30 bp, Artificial Sequence
  Synthetic oligonucleotide
tgtaatccagtgggacgaggtcacacaaga

SEQ ID NO: 372550 - DNA, 30 bp, Artificial Sequence
  Synthetic oligonucleotide
acgaagattcgccgcgttctttagacaaga

SEQ ID NO: 372551 - DNA, 30 bp, Artificial Sequence
  Synthetic oligonucleotide
catgaggagatatttgggtctcctacaaga

SEQ ID NO: 372552 - DNA, 30 bp, Artificial Sequence
  Synthetic oligonucleotide
gacatagacttggtataggcgtacccaaga

SEQ ID NO: 372553 - DNA, 30 bp, Artificial Sequence
  Synthetic oligonucleotide
ggcacttgctttgagtagttcgtcccaaga

SEQ ID NO: 372554 - DNA, 30 bp, Artificial Sequence
  Synthetic oligonucleotide
ggtatacgatttggccgtcgctgtccaaga

SEQ ID NO: 372555 - DNA, 30 bp, Artificial Sequence
  Synthetic oligonucleotide
tctgtgcgagtcagattctggattccaaga

SEQ ID NO: 372556 - DNA, 30 bp, Artificial Sequence
  Synthetic oligonucleotide
acgccggtcctattctactatatagcaaga

SEQ ID NO: 372557 - DNA, 30 bp, Artificial Sequence
  Synthetic oligonucleotide
aacatagcgtaccatatcgattacgcaaga

SEQ ID NO: 372558 - DNA, 30 bp, Artificial Sequence
  Synthetic oligonucleotide
gactccttaggtggtcgcagagcggcaaga

SEQ ID NO: 372559 - DNA, 30 bp, Artificial Sequence
  Synthetic oligonucleotide
gaaactgccgattttataggcatggcaaga

SEQ ID NO: 372560 - DNA, 30 bp, Artificial Sequence
  Synthetic oligonucleotide
tatgatgaagacctcggtattgcatcaaga

SEQ ID NO: 372561 - DNA, 30 bp, Artificial Sequence
  Synthetic oligonucleotide
gatcaccgttaaggggcttcttcatcaaga

SEQ ID NO: 372562 - DNA, 30 bp, Artificial Sequence
  Synthetic oligonucleotide
atccagtactcgcgtgtgcttaagtcaaga

SEQ ID NO: 372563 - DNA, 30 bp, Artificial Sequence
  Synthetic oligonucleotide
tgggggtcgccactcccatctatttcaaga

SEQ ID NO: 372564 - DNA, 30 bp, Artificial Sequence
  Synthetic oligonucleotide
gataattggcctggatccttcgacagaaga

SEQ ID NO: 372565 - DNA, 30 bp, Artificial Sequence
  Synthetic oligonucleotide
tgacctcttcgcgctcgtaatagcagaaga

SEQ ID NO: 372566 - DNA, 30 bp, Artificial Sequence
  Synthetic oligonucleotide
gaagcgcgatcatactgagaattcagaaga

SEQ ID NO: 372567 - DNA, 30 bp, Artificial Sequence
  Synthetic oligonucleotide
agcgacttatctataggcctggtgagaaga

SEQ ID NO: 372568 - DNA, 30 bp, Artificial Sequence
  Synthetic oligonucleotide
aaccactctggacatcaaaccgctagaaga

SEQ ID NO: 372569 - DNA, 30 bp, Artificial Sequence
  Synthetic oligonucleotide
gtccgattcaacggcatgaattctagaaga

SEQ ID NO: 372570 - DNA, 30 bp, Artificial Sequence
  Synthetic oligonucleotide
tgtctcggaagagaccctgcgcgtagaaga

SEQ ID NO: 372571 - DNA, 30 bp, Artificial Sequence
  Synthetic oligonucleotide
gatccgacaacattgaagctacgacgaaga

SEQ ID NO: 372572 - DNA, 30 bp, Artificial Sequence
  Synthetic oligonucleotide
agtgatggggcgactactgatgtccgaaga

SEQ ID NO: 372573 - DNA, 30 bp, Artificial Sequence
  Synthetic oligonucleotide
atccggctagcttaatcccataatcgaaga

SEQ ID NO: 372574 - DNA, 30 bp, Artificial Sequence
  Synthetic oligonucleotide
aataacgcttggccggtaggctatcgaaga

SEQ ID NO: 372575 - DNA, 30 bp, Artificial Sequence
  Synthetic oligonucleotide
ctgtcggacccagcagtggctcctcgaaga

SEQ ID NO: 372576 - DNA, 30 bp, Artificial Sequence
  Synthetic oligonucleotide
tgggacctcttcttgggtccttcaggaaga

SEQ ID NO: 372577 - DNA, 30 bp, Artificial Sequence
  Synthetic oligonucleotide
aagtgcctgggccgcatagattgaggaaga

SEQ ID NO: 372578 - DNA, 30 bp, Artificial Sequence
  Synthetic oligonucleotide
taattagcaaacggcgcttagtacggaaga

SEQ ID NO: 372579 - DNA, 30 bp, Artificial Sequence
  Synthetic oligonucleotide
aagattcttatgaaaggcagttacggaaga

SEQ ID NO: 372580 - DNA, 30 bp, Artificial Sequence
  Synthetic oligonucleotide
gataaacgacactttcttaaaacgggaaga

SEQ ID NO: 372581 - DNA, 30 bp, Artificial Sequence
  Synthetic oligonucleotide
aactggcagaccaccggaccggcatgaaga

SEQ ID NO: 372582 - DNA, 27 bp, Artificial Sequence
  Synthetic oligonucleotide
aaccttaaatcagtcaggggctgaaga

SEQ ID NO: 372583 - DNA, 30 bp, Artificial Sequence
  Synthetic oligonucleotide
ttaacactgcgtctagggtttaggtgaaga

SEQ ID NO: 372584 - DNA, 30 bp, Artificial Sequence
  Synthetic oligonucleotide
ttcacagaggtatgaggcaacgattgaaga

SEQ ID NO: 372585 - DNA, 30 bp, Artificial Sequence
  Synthetic oligonucleotide
gctgttagcgccttaaatgtgtattgaaga

SEQ ID NO: 372586 - DNA, 30 bp, Artificial Sequence
  Synthetic oligonucleotide
ccactatttacggaaatcaacccttgaaga

SEQ ID NO: 372587 - DNA, 30 bp, Artificial Sequence
  Synthetic oligonucleotide
agttacctgtccctgagcccaggttgaaga

SEQ ID NO: 372588 - DNA, 30 bp, Artificial Sequence
  Synthetic oligonucleotide
tgttcctgtctcaaagcggtaatttgaaga

SEQ ID NO: 372589 - DNA, 30 bp, Artificial Sequence
  Synthetic oligonucleotide
gggcgccctcccgcattaaagttttgaaga

SEQ ID NO: 372590 - DNA, 30 bp, Artificial Sequence
  Synthetic oligonucleotide
ggaacaaactttaggagccgtagaataaga

SEQ ID NO: 372591 - DNA, 30 bp, Artificial Sequence
  Synthetic oligonucleotide
caggaccagaggcttagaattgggataaga

SEQ ID NO: 372592 - DNA, 30 bp, Artificial Sequence
  Synthetic oligonucleotide
cctgatggttatggtatgcagtggataaga

SEQ ID NO: 372593 - DNA, 31 bp, Artificial Sequence
  Synthetic oligonucleotide
tgcctagacctccgctttatctatgataaga

SEQ ID NO: 372594 - DNA, 30 bp, Artificial Sequence
  Synthetic oligonucleotide
taatcgagagttattgagagtgatataaga

SEQ ID NO: 372595 - DNA, 30 bp, Artificial Sequence
  Synthetic oligonucleotide
ggggagtacatggccataatggctataaga

SEQ ID NO: 372596 - DNA, 30 bp, Artificial Sequence
  Synthetic oligonucleotide
ttaccttagaagttatcagacgttataaga

SEQ ID NO: 372597 - DNA, 30 bp, Artificial Sequence
  Synthetic oligonucleotide
acttgtttgtacacgacgccattactaaga

SEQ ID NO: 372598 - DNA, 30 bp, Artificial Sequence
  Synthetic oligonucleotide
ctctaaaagtaggacggtcagaacctaaga

SEQ ID NO: 372599 - DNA, 30 bp, Artificial Sequence
  Synthetic oligonucleotide
gcctgctggttcatcgtgcaggacctaaga

SEQ ID NO: 372600 - DNA, 30 bp, Artificial Sequence
  Synthetic oligonucleotide
tgcctacaggcaagtgtgcgcgggctaaga

SEQ ID NO: 372601 - DNA, 30 bp, Artificial Sequence
  Synthetic oligonucleotide
attcgcagggacaaagaacttttgctaaga

SEQ ID NO: 372602 - DNA, 30 bp, Artificial Sequence
  Synthetic oligonucleotide
ggcgtgtgactcagcatagatcatctaaga

SEQ ID NO: 372603 - DNA, 30 bp, Artificial Sequence
  Synthetic oligonucleotide
tcgtgggttactcataaaggctctctaaga

SEQ ID NO: 372604 - DNA, 30 bp, Artificial Sequence
  Synthetic oligonucleotide
aggataaattcagaattttggagagtaaga

SEQ ID NO: 372605 - DNA, 30 bp, Artificial Sequence
  Synthetic oligonucleotide
tggtggagtgcggacacggtacccgtaaga

SEQ ID NO: 372606 - DNA, 30 bp, Artificial Sequence
  Synthetic oligonucleotide
gtgaccgtgtcttttgggaccgccgtaaga

SEQ ID NO: 372607 - DNA, 30 bp, Artificial Sequence
  Synthetic oligonucleotide
caaataaatgtcctatatagtattgtaaga

SEQ ID NO: 372608 - DNA, 30 bp, Artificial Sequence
  Synthetic oligonucleotide
cgttccctagttggtgcttgcaaattaaga

SEQ ID NO: 372609 - DNA, 30 bp, Artificial Sequence
  Synthetic oligonucleotide
aaggaaactatttgttgtcacacattaaga

SEQ ID NO: 372610 - DNA, 30 bp, Artificial Sequence
  Synthetic oligonucleotide
tgatcgacctgccaacccctcagattaaga

SEQ ID NO: 372611 - DNA, 30 bp, Artificial Sequence
  Synthetic oligonucleotide
cctatgaccctcgacgcctccaacttaaga

SEQ ID NO: 372612 - DNA, 30 bp, Artificial Sequence
  Synthetic oligonucleotide
gtacctgggggccgcgtgagcgtcttaaga

SEQ ID NO: 372613 - DNA, 30 bp, Artificial Sequence
  Synthetic oligonucleotide
tagggtgatatgagggtagtccatttaaga

SEQ ID NO: 372614 - DNA, 30 bp, Artificial Sequence
  Synthetic oligonucleotide
ccacaggggggtacaatatattgtttaaga

SEQ ID NO: 372615 - DNA, 30 bp, Artificial Sequence
  Synthetic oligonucleotide
taatggcaagtagaccacacgattttaaga

SEQ ID NO: 372616 - DNA, 30 bp, Artificial Sequence
  Synthetic oligonucleotide
atctaacatgaggtctacttgtttttaaga

SEQ ID NO: 372617 - DNA, 30 bp, Artificial Sequence
  Synthetic oligonucleotide
attcggaaatcactccgcacgccaaacaga

SEQ ID NO: 372618 - DNA, 30 bp, Artificial Sequence
  Synthetic oligonucleotide
tttcaagctcgagattcaggcttcaacaga

SEQ ID NO: 372619 - DNA, 30 bp, Artificial Sequence
  Synthetic oligonucleotide
gtctcgaagaggccttgctaatagaacaga

SEQ ID NO: 372620 - DNA, 30 bp, Artificial Sequence
  Synthetic oligonucleotide
taaataatctttggcttgtgtaggaacaga

SEQ ID NO: 372621 - DNA, 30 bp, Artificial Sequence
  Synthetic oligonucleotide
aagatcgtttgttattctgtaactaacaga

SEQ ID NO: 372622 - DNA, 30 bp, Artificial Sequence
  Synthetic oligonucleotide
gctgggcgatactgagcatctagtaacaga

SEQ ID NO: 372623 - DNA, 30 bp, Artificial Sequence
  Synthetic oligonucleotide
agatacataattctgttacctcttaacaga

SEQ ID NO: 372624 - DNA, 30 bp, Artificial Sequence
  Synthetic oligonucleotide
ctgtatatagactcgtttccggttaacaga

SEQ ID NO: 372625 - DNA, 30 bp, Artificial Sequence
  Synthetic oligonucleotide
gatgacgttccctgaggtttataacacaga

SEQ ID NO: 372626 - DNA, 30 bp, Artificial Sequence
  Synthetic oligonucleotide
ttactagtgatagctttaaaggttcacaga

SEQ ID NO: 372627 - DNA, 30 bp, Artificial Sequence
  Synthetic oligonucleotide
cggtgggtctcgatggagtatgaagacaga

SEQ ID NO: 372628 - DNA, 30 bp, Artificial Sequence
  Synthetic oligonucleotide
gagtcgggcttaacatctctcaccgacaga

SEQ ID NO: 372629 - DNA, 31 bp, Artificial Sequence
  Synthetic oligonucleotide
cctttgcttgcagtcatgctcgttcgacaga

SEQ ID NO: 372630 - DNA, 30 bp, Artificial Sequence
  Synthetic oligonucleotide
ggcgcgatgccgcatctacatttggacaga

SEQ ID NO: 372631 - DNA, 30 bp, Artificial Sequence
  Synthetic oligonucleotide
tataatttgactcgtgtttaatatgacaga

SEQ ID NO: 372632 - DNA, 30 bp, Artificial Sequence
  Synthetic oligonucleotide
cgcgcgaggcatacttttaaggctgacaga

SEQ ID NO: 372633 - DNA, 30 bp, Artificial Sequence
  Synthetic oligonucleotide
atgttgaatctcgtcagatcttgtgacaga

SEQ ID NO: 372634 - DNA, 30 bp, Artificial Sequence
  Synthetic oligonucleotide
gtaagctcccataagtgtcacccatacaga

SEQ ID NO: 372635 - DNA, 30 bp, Artificial Sequence
  Synthetic oligonucleotide
cggggttacgctcgaggactattctacaga

SEQ ID NO: 372636 - DNA, 30 bp, Artificial Sequence
  Synthetic oligonucleotide
atattaggaacgtagcgtagtaagtacaga

SEQ ID NO: 372637 - DNA, 30 bp, Artificial Sequence
  Synthetic oligonucleotide
gtagcttcgcgcataacatcttagtacaga

SEQ ID NO: 372638 - DNA, 30 bp, Artificial Sequence
  Synthetic oligonucleotide
actctccggccgctgtatccacgcaccaga

SEQ ID NO: 372639 - DNA, 30 bp, Artificial Sequence
  Synthetic oligonucleotide
atggttggttacatactgtatgtgaccaga

SEQ ID NO: 372640 - DNA, 30 bp, Artificial Sequence
  Synthetic oligonucleotide
aataactgtgcatcccggcgtcgtaccaga

SEQ ID NO: 372641 - DNA, 30 bp, Artificial Sequence
  Synthetic oligonucleotide
accctgtcaacgatttttttaaagcccaga

SEQ ID NO: 372642 - DNA, 30 bp, Artificial Sequence
  Synthetic oligonucleotide
gtaggttggggcagccggagattgcccaga

SEQ ID NO: 372643 - DNA, 30 bp, Artificial Sequence
  Synthetic oligonucleotide
gattggcactatgaggtcggtattcccaga

SEQ ID NO: 372644 - DNA, 30 bp, Artificial Sequence
  Synthetic oligonucleotide
ttcacctaggaacctcgacgagtcgccaga

SEQ ID NO: 372645 - DNA, 30 bp, Artificial Sequence
  Synthetic oligonucleotide
ggatggtccaagagacattttagggccaga

SEQ ID NO: 372646 - DNA, 30 bp, Artificial Sequence
  Synthetic oligonucleotide
cctatcgttctgctgatatgcatggccaga

SEQ ID NO: 372647 - DNA, 30 bp, Artificial Sequence
  Synthetic oligonucleotide
agcattctgaccattgcgtatactgccaga

SEQ ID NO: 372648 - DNA, 30 bp, Artificial Sequence
  Synthetic oligonucleotide
gtccacattttgggtttaggatcctccaga

SEQ ID NO: 372649 - DNA, 30 bp, Artificial Sequence
  Synthetic oligonucleotide
ggctcattttacctcctggccacgagcaga

SEQ ID NO: 372650 - DNA, 30 bp, Artificial Sequence
  Synthetic oligonucleotide
agcaacctcttcttgtcaaggacgagcaga

SEQ ID NO: 372651 - DNA, 30 bp, Artificial Sequence
  Synthetic oligonucleotide
gtatatgctgtcacaaaagggggtagcaga

SEQ ID NO: 372652 - DNA, 30 bp, Artificial Sequence
  Synthetic oligonucleotide
ttatgatagtgacagcatatggttagcaga

SEQ ID NO: 372653 - DNA, 30 bp, Artificial Sequence
  Synthetic oligonucleotide
ttgaacaggtaaaggggatcttaacgcaga

SEQ ID NO: 372654 - DNA, 30 bp, Artificial Sequence
  Synthetic oligonucleotide
agtacgagtatcgaagcttgtcttcgcaga

SEQ ID NO: 372655 - DNA, 30 bp, Artificial Sequence
  Synthetic oligonucleotide
ccagccaacggtccctctgctgaaggcaga

SEQ ID NO: 372656 - DNA, 29 bp, Artificial Sequence
  Synthetic oligonucleotide
ttcctgcgcccagtacacgtataggcaga

SEQ ID NO: 372657 - DNA, 30 bp, Artificial Sequence
  Synthetic oligonucleotide
aatgtatatttcttggggcaactaggcaga

SEQ ID NO: 372658 - DNA, 30 bp, Artificial Sequence
  Synthetic oligonucleotide
gttctgggttgggtgcgcacagagggcaga

SEQ ID NO: 372659 - DNA, 30 bp, Artificial Sequence
  Synthetic oligonucleotide
tccatgtaaattagtgataaatagggcaga

SEQ ID NO: 372660 - DNA, 30 bp, Artificial Sequence
  Synthetic oligonucleotide
tttgctggtgactaacacgtccggggcaga

SEQ ID NO: 372661 - DNA, 30 bp, Artificial Sequence
  Synthetic oligonucleotide
aatgatgtactcgtctactaaagtggcaga

SEQ ID NO: 372662 - DNA, 30 bp, Artificial Sequence
  Synthetic oligonucleotide
aatggtcgggaataagggcgcggtggcaga

SEQ ID NO: 372663 - DNA, 30 bp, Artificial Sequence
  Synthetic oligonucleotide
aagttatacgagcgcccagcgccatgcaga

SEQ ID NO: 372664 - DNA, 30 bp, Artificial Sequence
  Synthetic oligonucleotide
tcgcaagttgccaggcctacgggatgcaga

SEQ ID NO: 372665 - DNA, 30 bp, Artificial Sequence
  Synthetic oligonucleotide
gtgattctgttcccgaacatgggatgcaga

SEQ ID NO: 372666 - DNA, 30 bp, Artificial Sequence
  Synthetic oligonucleotide
gttacggacttacggctcgctatgtgcaga

SEQ ID NO: 372667 - DNA, 30 bp, Artificial Sequence
  Synthetic oligonucleotide
attgcatgggctggtggcctaggttgcaga

SEQ ID NO: 372668 - DNA, 30 bp, Artificial Sequence
  Synthetic oligonucleotide
agtcaactcagcagtgatacaaaaatcaga

SEQ ID NO: 372669 - DNA, 30 bp, Artificial Sequence
  Synthetic oligonucleotide
tcttgagaattctcaggcctcaacatcaga

SEQ ID NO: 372670 - DNA, 30 bp, Artificial Sequence
  Synthetic oligonucleotide
gaagcagatatcttatacggcgccatcaga

SEQ ID NO: 372671 - DNA, 30 bp, Artificial Sequence
  Synthetic oligonucleotide
ttcaagtaactggagtttatagtgctcaga

SEQ ID NO: 372672 - DNA, 30 bp, Artificial Sequence
  Synthetic oligonucleotide
aattgacgcacggttggttactctctcaga

SEQ ID NO: 372673 - DNA, 30 bp, Artificial Sequence
  Synthetic oligonucleotide
ctgtatttcgggttgagagggcgtctcaga

SEQ ID NO: 372674 - DNA, 30 bp, Artificial Sequence
  Synthetic oligonucleotide
aaattcctgtaacgctagatagacgtcaga

SEQ ID NO: 372675 - DNA, 30 bp, Artificial Sequence
  Synthetic oligonucleotide
ggcgatgcggtaccttttatggacgtcaga

SEQ ID NO: 372676 - DNA, 30 bp, Artificial Sequence
  Synthetic oligonucleotide
cggagcactgcacaccccctacaggtcaga

SEQ ID NO: 372677 - DNA, 30 bp, Artificial Sequence
  Synthetic oligonucleotide
tatacgcactgccgcaagccgagggtcaga

SEQ ID NO: 372678 - DNA, 30 bp, Artificial Sequence
  Synthetic oligonucleotide
tttacgatacgattagcgacgtatgtcaga

SEQ ID NO: 372679 - DNA, 31 bp, Artificial Sequence
  Synthetic oligonucleotide
gccctgaaatgctatacagacaaaattcaga

SEQ ID NO: 372680 - DNA, 30 bp, Artificial Sequence
  Synthetic oligonucleotide
ttatgttactctcctatgtaactattcaga

SEQ ID NO: 372681 - DNA, 30 bp, Artificial Sequence
  Synthetic oligonucleotide
ttgacgcgcagatccacctaagtattcaga

SEQ ID NO: 372682 - DNA, 30 bp, Artificial Sequence
  Synthetic oligonucleotide
attgcaatacagtgacgttctctcttcaga

SEQ ID NO: 372683 - DNA, 30 bp, Artificial Sequence
  Synthetic oligonucleotide
gtgcggtgctagcagaaaggttcgttcaga

SEQ ID NO: 372684 - DNA, 30 bp, Artificial Sequence
  Synthetic oligonucleotide
gcactggttacaactataggcagtttcaga

SEQ ID NO: 372685 - DNA, 30 bp, Artificial Sequence
  Synthetic oligonucleotide
ggaaacctatctaatctagttattttcaga

SEQ ID NO: 372686 - DNA, 30 bp, Artificial Sequence
  Synthetic oligonucleotide
aataatattgccgggggagtcggaaagaga

SEQ ID NO: 372687 - DNA, 30 bp, Artificial Sequence
  Synthetic oligonucleotide
taccttccgcattgtcattaagcgaagaga

SEQ ID NO: 372688 - DNA, 30 bp, Artificial Sequence
  Synthetic oligonucleotide
taaagtattaagcttccatgaggacagaga

SEQ ID NO: 372689 - DNA, 30 bp, Artificial Sequence
  Synthetic oligonucleotide
gcaggcttttcgagctatccactcgagaga

SEQ ID NO: 372690 - DNA, 30 bp, Artificial Sequence
  Synthetic oligonucleotide
cgtatatatgcctccacgcaagaggagaga

SEQ ID NO: 372691 - DNA, 30 bp, Artificial Sequence
  Synthetic oligonucleotide
ctcatcagtaaagaccaaccctcggagaga

SEQ ID NO: 372692 - DNA, 30 bp, Artificial Sequence
  Synthetic oligonucleotide
tatcaatgggttcaattctcgtgatagaga

SEQ ID NO: 372693 - DNA, 30 bp, Artificial Sequence
  Synthetic oligonucleotide
acgggtaagatatcttgtcggcgctagaga

SEQ ID NO: 372694 - DNA, 30 bp, Artificial Sequence
  Synthetic oligonucleotide
aataaattggggcaatgtatgccttagaga

SEQ ID NO: 372695 - DNA, 30 bp, Artificial Sequence
  Synthetic oligonucleotide
accagttccattatcgcgtatagttagaga

SEQ ID NO: 372696 - DNA, 30 bp, Artificial Sequence
  Synthetic oligonucleotide
tacggacggattcggggaagattttagaga

SEQ ID NO: 372697 - DNA, 29 bp, Artificial Sequence
  Synthetic oligonucleotide
ggggttcgggaacgagatatagcacgaga

SEQ ID NO: 372698 - DNA, 31 bp, Artificial Sequence
  Synthetic oligonucleotide
cccacggccgcttgcttagaccggcacgaga

SEQ ID NO: 372699 - DNA, 30 bp, Artificial Sequence
  Synthetic oligonucleotide
cgctagcagttagtaaccccaacgacgaga

SEQ ID NO: 372700 - DNA, 30 bp, Artificial Sequence
  Synthetic oligonucleotide
agttcgctcgcagtagtagataggacgaga

SEQ ID NO: 372701 - DNA, 30 bp, Artificial Sequence
  Synthetic oligonucleotide
gcatagctcgaacatgcacacatgacgaga

SEQ ID NO: 372702 - DNA, 30 bp, Artificial Sequence
  Synthetic oligonucleotide
aatgctcatgtctttgctgatgtaccgaga

SEQ ID NO: 372703 - DNA, 30 bp, Artificial Sequence
  Synthetic oligonucleotide
gcatgcgacgtttcccaactagagccgaga

SEQ ID NO: 372704 - DNA, 30 bp, Artificial Sequence
  Synthetic oligonucleotide
agaccggtgcacatcttttcgattccgaga

SEQ ID NO: 372705 - DNA, 30 bp, Artificial Sequence
  Synthetic oligonucleotide
tttgtaaccgtaggcgtcgtacgagcgaga

SEQ ID NO: 372706 - DNA, 30 bp, Artificial Sequence
  Synthetic oligonucleotide
gacagctgaacgccattcggtaacgcgaga

SEQ ID NO: 372707 - DNA, 30 bp, Artificial Sequence
  Synthetic oligonucleotide
attaattttaaacgagaaatattcgcgaga

SEQ ID NO: 372708 - DNA, 30 bp, Artificial Sequence
  Synthetic oligonucleotide
ttcggcggacccaagcgtatatgggcgaga

SEQ ID NO: 372709 - DNA, 30 bp, Artificial Sequence
  Synthetic oligonucleotide
gggtgccggcgttacctgggagtggcgaga

SEQ ID NO: 372710 - DNA, 30 bp, Artificial Sequence
  Synthetic oligonucleotide
ctttcgtcaaagtgtccttcagaatcgaga

SEQ ID NO: 372711 - DNA, 30 bp, Artificial Sequence
  Synthetic oligonucleotide
taggtttaggggcgatctctttcatcgaga

SEQ ID NO: 372712 - DNA, 30 bp, Artificial Sequence
  Synthetic oligonucleotide
aagttcattctcctgccataaatatcgaga

SEQ ID NO: 372713 - DNA, 30 bp, Artificial Sequence
  Synthetic oligonucleotide
ttgtcatcaaatagttaacgccgctcgaga

SEQ ID NO: 372714 - DNA, 30 bp, Artificial Sequence
  Synthetic oligonucleotide
catatagaacctaacgccagctagtcgaga

SEQ ID NO: 372715 - DNA, 30 bp, Artificial Sequence
  Synthetic oligonucleotide
gggttagttgcacgtcctcatcattcgaga

SEQ ID NO: 372716 - DNA, 30 bp, Artificial Sequence
  Synthetic oligonucleotide
gagacacgtttgggccgggtcatttcgaga

SEQ ID NO: 372717 - DNA, 30 bp, Artificial Sequence
  Synthetic oligonucleotide
ttctgttattccgcctattaccaaaggaga

SEQ ID NO: 372718 - DNA, 30 bp, Artificial Sequence
  Synthetic oligonucleotide
cagattttattaagttcggaggaaaggaga

SEQ ID NO: 372719 - DNA, 30 bp, Artificial Sequence
  Synthetic oligonucleotide
agatatcggtttgtccctgcactaaggaga

SEQ ID NO: 372720 - DNA, 30 bp, Artificial Sequence
  Synthetic oligonucleotide
gtacaacagtgtggcggcgcgaacaggaga

SEQ ID NO: 372721 - DNA, 30 bp, Artificial Sequence
  Synthetic oligonucleotide
tttgggttttagctgtcacatcacaggaga

SEQ ID NO: 372722 - DNA, 30 bp, Artificial Sequence
  Synthetic oligonucleotide
gtatagaaggcttgggcgataaccaggaga

SEQ ID NO: 372723 - DNA, 30 bp, Artificial Sequence
  Synthetic oligonucleotide
taggatctttaagcgtatctgttcaggaga

SEQ ID NO: 372724 - DNA, 30 bp, Artificial Sequence
  Synthetic oligonucleotide
acgtgtgcttggggccctttcgtgaggaga

SEQ ID NO: 372725 - DNA, 30 bp, Artificial Sequence
  Synthetic oligonucleotide
gagtagtctaatacgaggctgtgtaggaga

SEQ ID NO: 372726 - DNA, 30 bp, Artificial Sequence
  Synthetic oligonucleotide
ttatccgtactttaagaccgggaacggaga

SEQ ID NO: 372727 - DNA, 30 bp, Artificial Sequence
  Synthetic oligonucleotide
ttaagccctggaaagtaataactacggaga

SEQ ID NO: 372728 - DNA, 30 bp, Artificial Sequence
  Synthetic oligonucleotide
ttacaaatggctgttatccagttacggaga

SEQ ID NO: 372729 - DNA, 30 bp, Artificial Sequence
  Synthetic oligonucleotide
cctccgtgcaatgaagccaataaccggaga

SEQ ID NO: 372730 - DNA, 30 bp, Artificial Sequence
  Synthetic oligonucleotide
taggtccgtctataggggccgcaccggaga

SEQ ID NO: 372731 - DNA, 30 bp, Artificial Sequence
  Synthetic oligonucleotide
gaaaatggacttgttagctcctcccggaga

SEQ ID NO: 372732 - DNA, 30 bp, Artificial Sequence
  Synthetic oligonucleotide
tacctcagagtgtggcctcgggagcggaga

SEQ ID NO: 372733 - DNA, 30 bp, Artificial Sequence
  Synthetic oligonucleotide
gcggatccatcaccgggcccgccggggaga

SEQ ID NO: 372734 - DNA, 30 bp, Artificial Sequence
  Synthetic oligonucleotide
cctcttaaatcttaacaaatcgcatggaga

SEQ ID NO: 372735 - DNA, 30 bp, Artificial Sequence
  Synthetic oligonucleotide
ccgcccgatttatcgagtaagtgctggaga

SEQ ID NO: 372736 - DNA, 30 bp, Artificial Sequence
  Synthetic oligonucleotide
cacccattagtcgagtcattgaggtggaga

SEQ ID NO: 372737 - DNA, 30 bp, Artificial Sequence
  Synthetic oligonucleotide
caagaactctaattcaattgtatgtggaga

SEQ ID NO: 372738 - DNA, 30 bp, Artificial Sequence
  Synthetic oligonucleotide
gcaggtcacgttgcctgcgaaaagatgaga

SEQ ID NO: 372739 - DNA, 30 bp, Artificial Sequence
  Synthetic oligonucleotide
aatgcgaggaatgagccagcggctatgaga

SEQ ID NO: 372740 - DNA, 30 bp, Artificial Sequence
  Synthetic oligonucleotide
cgatccaatacatgacaaatctgactgaga

SEQ ID NO: 372741 - DNA, 30 bp, Artificial Sequence
  Synthetic oligonucleotide
atcctcaaatggacacgatgtatactgaga

SEQ ID NO: 372742 - DNA, 30 bp, Artificial Sequence
  Synthetic oligonucleotide
ccgctcccaactttaacgacgattctgaga

SEQ ID NO: 372743 - DNA, 30 bp, Artificial Sequence
  Synthetic oligonucleotide
aacctgaatagagggctcgagtccgtgaga

SEQ ID NO: 372744 - DNA, 30 bp, Artificial Sequence
  Synthetic oligonucleotide
gacactatgctgtgcaacacgagcgtgaga

SEQ ID NO: 372745 - DNA, 30 bp, Artificial Sequence
  Synthetic oligonucleotide
ggtatgcagacggacgtttatttggtgaga

SEQ ID NO: 372746 - DNA, 30 bp, Artificial Sequence
  Synthetic oligonucleotide
agagcgccagctgtcagggtaacattgaga

SEQ ID NO: 372747 - DNA, 30 bp, Artificial Sequence
  Synthetic oligonucleotide
ctcttaaccagtatataaggacacttgaga

SEQ ID NO: 372748 - DNA, 30 bp, Artificial Sequence
  Synthetic oligonucleotide
gcgtttaacggcagacactttcacttgaga

SEQ ID NO: 372749 - DNA, 30 bp, Artificial Sequence
  Synthetic oligonucleotide
gtgaggtttggttacatttactcgttgaga

SEQ ID NO: 372750 - DNA, 30 bp, Artificial Sequence
  Synthetic oligonucleotide
aacatccgtgtttatttgattcacaataga

SEQ ID NO: 372751 - DNA, 30 bp, Artificial Sequence
  Synthetic oligonucleotide
attccgaaccactggcaattcgacaataga

SEQ ID NO: 372752 - DNA, 30 bp, Artificial Sequence
  Synthetic oligonucleotide
ctcgacggatggtcctcggccgtcaataga

SEQ ID NO: 372753 - DNA, 30 bp, Artificial Sequence
  Synthetic oligonucleotide
ccgcgggtaggtagatgctgtaagaataga

SEQ ID NO: 372754 - DNA, 30 bp, Artificial Sequence
  Synthetic oligonucleotide
ttacacgtgtgcgagatgttcgcgaataga

SEQ ID NO: 372755 - DNA, 31 bp, Artificial Sequence
  Synthetic oligonucleotide
gagctcttcgctgtagctagtactgaataga

SEQ ID NO: 372756 - DNA, 30 bp, Artificial Sequence
  Synthetic oligonucleotide
cgatgaacgcccgggacgagcacacataga

SEQ ID NO: 372757 - DNA, 30 bp, Artificial Sequence
  Synthetic oligonucleotide
cagttgacagcccttcgaggtgcacataga

SEQ ID NO: 372758 - DNA, 30 bp, Artificial Sequence
  Synthetic oligonucleotide
taggtctgcgatgtcgagcgaacccataga

SEQ ID NO: 372759 - DNA, 30 bp, Artificial Sequence
  Synthetic oligonucleotide
aatcacaagagaaatattttgtcccataga

SEQ ID NO: 372760 - DNA, 30 bp, Artificial Sequence
  Synthetic oligonucleotide
gggtatttagctggcggtcccgggcataga

SEQ ID NO: 372761 - DNA, 30 bp, Artificial Sequence
  Synthetic oligonucleotide
ccattattcgtcttagcagcgaatcataga

SEQ ID NO: 372762 - DNA, 30 bp, Artificial Sequence
  Synthetic oligonucleotide
gaggtgtgtgatttgagggctcgtcataga

SEQ ID NO: 372763 - DNA, 30 bp, Artificial Sequence
  Synthetic oligonucleotide
tcaacattcgtatgaccaatgcaagataga

SEQ ID NO: 372764 - DNA, 30 bp, Artificial Sequence
  Synthetic oligonucleotide
gggcggaatctatcgcaggccacagataga

SEQ ID NO: 372765 - DNA, 30 bp, Artificial Sequence
  Synthetic oligonucleotide
cggctcgacggcggctaggagccagataga

SEQ ID NO: 372766 - DNA, 30 bp, Artificial Sequence
  Synthetic oligonucleotide
gatatacaagtgttgggtgagaaggataga

SEQ ID NO: 372767 - DNA, 30 bp, Artificial Sequence
  Synthetic oligonucleotide
gttggctccgaagcttctgacccggataga

SEQ ID NO: 372768 - DNA, 30 bp, Artificial Sequence
  Synthetic oligonucleotide
tttttgcatagtgttcatgtatatgataga

SEQ ID NO: 372769 - DNA, 30 bp, Artificial Sequence
  Synthetic oligonucleotide
gaacatttatgcatctctccgactgataga

SEQ ID NO: 372770 - DNA, 30 bp, Artificial Sequence
  Synthetic oligonucleotide
ctatagtgttaacgtgtggattctgataga

SEQ ID NO: 372771 - DNA, 30 bp, Artificial Sequence
  Synthetic oligonucleotide
gaaacctgtcccggaggagaggtatataga

SEQ ID NO: 372772 - DNA, 30 bp, Artificial Sequence
  Synthetic oligonucleotide
tatagatagtcagctccttcggtatataga

SEQ ID NO: 372773 - DNA, 30 bp, Artificial Sequence
  Synthetic oligonucleotide
gtatatcctggatggattcttaactataga

SEQ ID NO: 372774 - DNA, 29 bp, Artificial Sequence
  Synthetic oligonucleotide
cgggataggcagccgctatctgttataga

SEQ ID NO: 372775 - DNA, 30 bp, Artificial Sequence
  Synthetic oligonucleotide
gaagtgtatgtctaaatggattgttataga

SEQ ID NO: 372776 - DNA, 30 bp, Artificial Sequence
  Synthetic oligonucleotide
ccaatatatctacaaaagatgagaactaga

SEQ ID NO: 372777 - DNA, 30 bp, Artificial Sequence
  Synthetic oligonucleotide
gtaggttcttcgacgacgacatagactaga

SEQ ID NO: 372778 - DNA, 30 bp, Artificial Sequence
  Synthetic oligonucleotide
cactattaacgggttataccgccgactaga

SEQ ID NO: 372779 - DNA, 30 bp, Artificial Sequence
  Synthetic oligonucleotide
agcaattggtcgtagtaacaaattactaga

SEQ ID NO: 372780 - DNA, 30 bp, Artificial Sequence
  Synthetic oligonucleotide
accgtcctcttagtcctcccgtaacctaga

SEQ ID NO: 372781 - DNA, 30 bp, Artificial Sequence
  Synthetic oligonucleotide
acataggccgtatttcaaagcggacctaga

SEQ ID NO: 372782 - DNA, 30 bp, Artificial Sequence
  Synthetic oligonucleotide
ttcgaccaatcagtgtgtgttttacctaga

SEQ ID NO: 372783 - DNA, 30 bp, Artificial Sequence
  Synthetic oligonucleotide
caaggacaagcgtctggttgcaaccctaga

SEQ ID NO: 372784 - DNA, 30 bp, Artificial Sequence
  Synthetic oligonucleotide
tgagatctctctaatgggtccatccctaga

SEQ ID NO: 372785 - DNA, 30 bp, Artificial Sequence
  Synthetic oligonucleotide
gagacgcccgcgcgtgtggtgcatcctaga

SEQ ID NO: 372786 - DNA, 30 bp, Artificial Sequence
  Synthetic oligonucleotide
gatacacatccggtgtactaggctcctaga

SEQ ID NO: 372787 - DNA, 30 bp, Artificial Sequence
  Synthetic oligonucleotide
accatgattgtaaggcttttaattcctaga

SEQ ID NO: 372788 - DNA, 30 bp, Artificial Sequence
  Synthetic oligonucleotide
attatcccttcacgtcgcaactttcctaga

SEQ ID NO: 372789 - DNA, 30 bp, Artificial Sequence
  Synthetic oligonucleotide
actgaggcattctgctggtgttgagctaga

SEQ ID NO: 372790 - DNA, 30 bp, Artificial Sequence
  Synthetic oligonucleotide
catcttggcttgtagttgtcgggcgctaga

SEQ ID NO: 372791 - DNA, 30 bp, Artificial Sequence
  Synthetic oligonucleotide
ggacaggtacaggagcagcgtgctgctaga

SEQ ID NO: 372792 - DNA, 30 bp, Artificial Sequence
  Synthetic oligonucleotide
aactaggtttttgcacaaaacaaatctaga

SEQ ID NO: 372793 - DNA, 30 bp, Artificial Sequence
  Synthetic oligonucleotide
tgcgttgccatttaggcaatcccatctaga

SEQ ID NO: 372794 - DNA, 30 bp, Artificial Sequence
  Synthetic oligonucleotide
tcgtcatttccgtttaggataccctctaga

SEQ ID NO: 372795 - DNA, 30 bp, Artificial Sequence
  Synthetic oligonucleotide
aggcttgacgttttagctttattgtctaga

SEQ ID NO: 372796 - DNA, 30 bp, Artificial Sequence
  Synthetic oligonucleotide
atggcgcgattgcccgcctgcgcttctaga

SEQ ID NO: 372797 - DNA, 30 bp, Artificial Sequence
  Synthetic oligonucleotide
ttctcactcaggtactgacacagttctaga

SEQ ID NO: 372798 - DNA, 30 bp, Artificial Sequence
  Synthetic oligonucleotide
tactgatctggcattggcggacgttctaga

SEQ ID NO: 372799 - DNA, 30 bp, Artificial Sequence
  Synthetic oligonucleotide
ctatatagtcagacaagaaaatgttctaga

SEQ ID NO: 372800 - DNA, 30 bp, Artificial Sequence
  Synthetic oligonucleotide
taagacgcagacagggatcataagagtaga

SEQ ID NO: 372801 - DNA, 30 bp, Artificial Sequence
  Synthetic oligonucleotide
catctccaccttgtggaacacgcgagtaga

SEQ ID NO: 372802 - DNA, 30 bp, Artificial Sequence
  Synthetic oligonucleotide
gactccattggattccaatagtatagtaga

SEQ ID NO: 372803 - DNA, 30 bp, Artificial Sequence
  Synthetic oligonucleotide
aacgccgtgtaaaggttcgtgcgtagtaga

SEQ ID NO: 372804 - DNA, 30 bp, Artificial Sequence
  Synthetic oligonucleotide
acttcgacacatgtgtcacattttagtaga

SEQ ID NO: 372805 - DNA, 30 bp, Artificial Sequence
  Synthetic oligonucleotide
ttggcttagaccgctactgaaatacgtaga

SEQ ID NO: 372806 - DNA, 30 bp, Artificial Sequence
  Synthetic oligonucleotide
gacggctctcgccaattgtatttccgtaga

SEQ ID NO: 372807 - DNA, 30 bp, Artificial Sequence
  Synthetic oligonucleotide
caatttactgtcaaagaggcacggcgtaga

SEQ ID NO: 372808 - DNA, 30 bp, Artificial Sequence
  Synthetic oligonucleotide
acctatgtgctcctatctggggatcgtaga

SEQ ID NO: 372809 - DNA, 30 bp, Artificial Sequence
  Synthetic oligonucleotide
ggctcgggccttctttacgcggcaggtaga

SEQ ID NO: 372810 - DNA, 30 bp, Artificial Sequence
  Synthetic oligonucleotide
gagggctacgaaaatatcccaacgggtaga

SEQ ID NO: 372811 - DNA, 30 bp, Artificial Sequence
  Synthetic oligonucleotide
ccacgtaatcgtgatcagataaatggtaga

SEQ ID NO: 372812 - DNA, 30 bp, Artificial Sequence
  Synthetic oligonucleotide
aagccataatcgcttgagacgcgtggtaga

SEQ ID NO: 372813 - DNA, 30 bp, Artificial Sequence
  Synthetic oligonucleotide
tctagacttgacgtgtcatggcttggtaga

SEQ ID NO: 372814 - DNA, 30 bp, Artificial Sequence
  Synthetic oligonucleotide
aaaaataccagcatgaggttttactgtaga

SEQ ID NO: 372815 - DNA, 30 bp, Artificial Sequence
  Synthetic oligonucleotide
ctccaagaaagtaatgaggcggtctgtaga

SEQ ID NO: 372816 - DNA, 30 bp, Artificial Sequence
  Synthetic oligonucleotide
tggtcgtaggacggcttttggttctgtaga

SEQ ID NO: 372817 - DNA, 30 bp, Artificial Sequence
  Synthetic oligonucleotide
gacccgtctcgcttcacgtttaagtgtaga

SEQ ID NO: 372818 - DNA, 30 bp, Artificial Sequence
  Synthetic oligonucleotide
gtaatttagagtggggaaaacagttgtaga

SEQ ID NO: 372819 - DNA, 30 bp, Artificial Sequence
  Synthetic oligonucleotide
tgactctgtggaagataagagatttgtaga

SEQ ID NO: 372820 - DNA, 30 bp, Artificial Sequence
  Synthetic oligonucleotide
ccatatccgaacttagtccgcgtttgtaga

SEQ ID NO: 372821 - DNA, 30 bp, Artificial Sequence
  Synthetic oligonucleotide
ttagatactgaacgcggttatgccattaga

SEQ ID NO: 372822 - DNA, 30 bp, Artificial Sequence
  Synthetic oligonucleotide
ttgggcagcccagtcccggggagcattaga

SEQ ID NO: 372823 - DNA, 30 bp, Artificial Sequence
  Synthetic oligonucleotide
aacatagtcgtttataacgcaagtattaga

SEQ ID NO: 372824 - DNA, 29 bp, Artificial Sequence
  Synthetic oligonucleotide
ttgggcttactggtaacaacgttattaga

SEQ ID NO: 372825 - DNA, 30 bp, Artificial Sequence
  Synthetic oligonucleotide
gatcatgactgaccagccctcatccttaga

SEQ ID NO: 372826 - DNA, 30 bp, Artificial Sequence
  Synthetic oligonucleotide
tgtgcgaagtagttaagatcacatcttaga

SEQ ID NO: 372827 - DNA, 30 bp, Artificial Sequence
  Synthetic oligonucleotide
gtatgacgtcgccggcataacatagttaga

SEQ ID NO: 372828 - DNA, 30 bp, Artificial Sequence
  Synthetic oligonucleotide
gtaacgatgaccggtcctttttacgttaga

SEQ ID NO: 372829 - DNA, 30 bp, Artificial Sequence
  Synthetic oligonucleotide
ctggcagttgtcatccggaaaagggttaga

SEQ ID NO: 372830 - DNA, 30 bp, Artificial Sequence
  Synthetic oligonucleotide
gcgatcttcgtcaaccacgccagggttaga

SEQ ID NO: 372831 - DNA, 30 bp, Artificial Sequence
  Synthetic oligonucleotide
cctctccggtccgattcactcagatttaga

SEQ ID NO: 372832 - DNA, 30 bp, Artificial Sequence
  Synthetic oligonucleotide
tagctgcgaacatacacgtacatatttaga

SEQ ID NO: 372833 - DNA, 30 bp, Artificial Sequence
  Synthetic oligonucleotide
taatagaaacagcactatgcaaactttaga

SEQ ID NO: 372834 - DNA, 30 bp, Artificial Sequence
  Synthetic oligonucleotide
gaaccacggtccacatgaacgcactttaga

SEQ ID NO: 372835 - DNA, 30 bp, Artificial Sequence
  Synthetic oligonucleotide
tcagttatgcatagtaacgattactttaga

SEQ ID NO: 372836 - DNA, 30 bp, Artificial Sequence
  Synthetic oligonucleotide
gggttcttaacgcaccatggcaggtttaga

SEQ ID NO: 372837 - DNA, 30 bp, Artificial Sequence
  Synthetic oligonucleotide
atcggacagcgactccgtacgctgtttaga

SEQ ID NO: 372838 - DNA, 30 bp, Artificial Sequence
  Synthetic oligonucleotide
ccatgtgtcgcggaaatgcgcacttttaga

SEQ ID NO: 372839 - DNA, 30 bp, Artificial Sequence
  Synthetic oligonucleotide
aaagagtacgcggtctggttagtttttaga

SEQ ID NO: 372840 - DNA, 30 bp, Artificial Sequence
  Synthetic oligonucleotide
cgggctgatgacagagactggtacaaacga

SEQ ID NO: 372841 - DNA, 30 bp, Artificial Sequence
  Synthetic oligonucleotide
catacgctccggggggacaactccaaacga

SEQ ID NO: 372842 - DNA, 30 bp, Artificial Sequence
  Synthetic oligonucleotide
atagactctagtttctgatacgtcaaacga

SEQ ID NO: 372843 - DNA, 30 bp, Artificial Sequence
  Synthetic oligonucleotide
atgctcgcccactatttcacgtagaaacga

SEQ ID NO: 372844 - DNA, 30 bp, Artificial Sequence
  Synthetic oligonucleotide
aaaacctttttaaggcgaggtgggaaacga

SEQ ID NO: 372845 - DNA, 30 bp, Artificial Sequence
  Synthetic oligonucleotide
ggacccttgagtctttaaacttggaaacga

SEQ ID NO: 372846 - DNA, 30 bp, Artificial Sequence
  Synthetic oligonucleotide
tcagcacgtactggtactgccgaacaacga

SEQ ID NO: 372847 - DNA, 30 bp, Artificial Sequence
  Synthetic oligonucleotide
ggcgcggggttattccgccttgtacaacga

SEQ ID NO: 372848 - DNA, 30 bp, Artificial Sequence
  Synthetic oligonucleotide
gcaatacaaacgggaagcgctgtccaacga

SEQ ID NO: 372849 - DNA, 30 bp, Artificial Sequence
  Synthetic oligonucleotide
atggcatagaataaatgaacgccgcaacga

SEQ ID NO: 372850 - DNA, 30 bp, Artificial Sequence
  Synthetic oligonucleotide
agtgtccgtcaccggggggttccgcaacga

SEQ ID NO: 372851 - DNA, 30 bp, Artificial Sequence
  Synthetic oligonucleotide
catctgtggcttataatagcgctgcaacga

SEQ ID NO: 372852 - DNA, 30 bp, Artificial Sequence
  Synthetic oligonucleotide
aacacattcagtaaacaccttacagaacga

SEQ ID NO: 372853 - DNA, 30 bp, Artificial Sequence
  Synthetic oligonucleotide
gaagcgttaccgtgaacgggcagcgaacga

SEQ ID NO: 372854 - DNA, 30 bp, Artificial Sequence
  Synthetic oligonucleotide
gcgtagaattgcgggttacaactcgaacga

SEQ ID NO: 372855 - DNA, 30 bp, Artificial Sequence
  Synthetic oligonucleotide
ggctgatggacatttatatgcatggaacga

SEQ ID NO: 372856 - DNA, 30 bp, Artificial Sequence
  Synthetic oligonucleotide
gtttctatagagggattcgataatgaacga

SEQ ID NO: 372857 - DNA, 30 bp, Artificial Sequence
  Synthetic oligonucleotide
aaagcttcgttacaaaaaggcggtgaacga

SEQ ID NO: 372858 - DNA, 30 bp, Artificial Sequence
  Synthetic oligonucleotide
gatcaattcgttaaagcagcttgtgaacga

SEQ ID NO: 372859 - DNA, 30 bp, Artificial Sequence
  Synthetic oligonucleotide
ttttaaggtgaatacaggtatacataacga

SEQ ID NO: 372860 - DNA, 30 bp, Artificial Sequence
  Synthetic oligonucleotide
ttcgtttaagcaattcgtcctaagtaacga

SEQ ID NO: 372861 - DNA, 30 bp, Artificial Sequence
  Synthetic oligonucleotide
tcgctcaggtgacttactttttagtaacga

SEQ ID NO: 372862 - DNA, 30 bp, Artificial Sequence
  Synthetic oligonucleotide
gcagccccttatagcacactggggtaacga

SEQ ID NO: 372863 - DNA, 30 bp, Artificial Sequence
  Synthetic oligonucleotide
tcagcgttcaacttgatagtcctgtaacga

SEQ ID NO: 372864 - DNA, 30 bp, Artificial Sequence
  Synthetic oligonucleotide
ggcgttcataattggagagccgtgtaacga

SEQ ID NO: 372865 - DNA, 30 bp, Artificial Sequence
  Synthetic oligonucleotide
acatacggtcggcagctagtaataacacga

SEQ ID NO: 372866 - DNA, 30 bp, Artificial Sequence
  Synthetic oligonucleotide
tatcgtaaggtcgttgaagcccgcacacga

SEQ ID NO: 372867 - DNA, 30 bp, Artificial Sequence
  Synthetic oligonucleotide
atcgggtgtttcattcggaaattcacacga

SEQ ID NO: 372868 - DNA, 30 bp, Artificial Sequence
  Synthetic oligonucleotide
tcccagtattgaggcctgccgccgacacga

SEQ ID NO: 372869 - DNA, 30 bp, Artificial Sequence
  Synthetic oligonucleotide
ggattcgataggttgtgaccatggacacga

SEQ ID NO: 372870 - DNA, 30 bp, Artificial Sequence
  Synthetic oligonucleotide
tagacgccgctggatccagacactacacga

SEQ ID NO: 372871 - DNA, 30 bp, Artificial Sequence
  Synthetic oligonucleotide
gtagaccagatgtctgcgacacttacacga

SEQ ID NO: 372872 - DNA, 30 bp, Artificial Sequence
  Synthetic oligonucleotide
agccgatgggttgcgcatggggcggcacga

SEQ ID NO: 372873 - DNA, 30 bp, Artificial Sequence
  Synthetic oligonucleotide
gttgaggggcaggtcagggttttggcacga

SEQ ID NO: 372874 - DNA, 30 bp, Artificial Sequence
  Synthetic oligonucleotide
cgcaagatgcaacgattcagtcatgcacga

SEQ ID NO: 372875 - DNA, 30 bp, Artificial Sequence
  Synthetic oligonucleotide
tcagagccttgcacaaagtatttatcacga

SEQ ID NO: 372876 - DNA, 30 bp, Artificial Sequence
  Synthetic oligonucleotide
ttggcagtacttagttattcttcctcacga

SEQ ID NO: 372877 - DNA, 30 bp, Artificial Sequence
  Synthetic oligonucleotide
cattctccgtctacgggtgataagtcacga

SEQ ID NO: 372878 - DNA, 30 bp, Artificial Sequence
  Synthetic oligonucleotide
gcgttcttttcagtgagcgcagagtcacga

SEQ ID NO: 372879 - DNA, 30 bp, Artificial Sequence
  Synthetic oligonucleotide
tgtttaacaattcagtaacggcggtcacga

SEQ ID NO: 372880 - DNA, 30 bp, Artificial Sequence
  Synthetic oligonucleotide
ttcttaagtgttatatatccggattcacga

SEQ ID NO: 372881 - DNA, 30 bp, Artificial Sequence
  Synthetic oligonucleotide
ctgggaatgttcattctggagggaagacga

SEQ ID NO: 372882 - DNA, 30 bp, Artificial Sequence
  Synthetic oligonucleotide
gcttcaggcgcttcttgcgttcagagacga

SEQ ID NO: 372883 - DNA, 30 bp, Artificial Sequence
  Synthetic oligonucleotide
gtaacgtcaagcattcgcaatgcccgacga

SEQ ID NO: 372884 - DNA, 30 bp, Artificial Sequence
  Synthetic oligonucleotide
gtgggtatttcaacccgtttagagcgacga

SEQ ID NO: 372885 - DNA, 30 bp, Artificial Sequence
  Synthetic oligonucleotide
gttgtatcttacttggcggactctcgacga

SEQ ID NO: 372886 - DNA, 30 bp, Artificial Sequence
  Synthetic oligonucleotide
cagatagtaggtagttatctctccggacga

SEQ ID NO: 372887 - DNA, 30 bp, Artificial Sequence
  Synthetic oligonucleotide
ccccacctgcaacccttagatatcggacga

SEQ ID NO: 372888 - DNA, 30 bp, Artificial Sequence
  Synthetic oligonucleotide
aacgggctattgttagcctcaaagggacga

SEQ ID NO: 372889 - DNA, 30 bp, Artificial Sequence
  Synthetic oligonucleotide
tttcattgcatcctgcggaatgcgggacga

SEQ ID NO: 372890 - DNA, 30 bp, Artificial Sequence
  Synthetic oligonucleotide
cgggatgttcatgcagtaagaagtggacga

SEQ ID NO: 372891 - DNA, 30 bp, Artificial Sequence
  Synthetic oligonucleotide
ttacgcgggcttcatgtgctaggtggacga

SEQ ID NO: 372892 - DNA, 30 bp, Artificial Sequence
  Synthetic oligonucleotide
tcattcagccaagacctcatagttggacga

SEQ ID NO: 372893 - DNA, 30 bp, Artificial Sequence
  Synthetic oligonucleotide
gggagcatctagcgggaccctagatgacga

SEQ ID NO: 372894 - DNA, 30 bp, Artificial Sequence
  Synthetic oligonucleotide
ttccgatgacacgatgattaggtgtgacga

SEQ ID NO: 372895 - DNA, 30 bp, Artificial Sequence
  Synthetic oligonucleotide
acaagtatatagaaagcgtgtctttgacga

SEQ ID NO: 372896 - DNA, 30 bp, Artificial Sequence
  Synthetic oligonucleotide
gaagaataggagcgacgtagtcacatacga

SEQ ID NO: 372897 - DNA, 30 bp, Artificial Sequence
  Synthetic oligonucleotide
aatagcgctttacctaatggctacatacga

SEQ ID NO: 372898 - DNA, 30 bp, Artificial Sequence
  Synthetic oligonucleotide
gtgaagtacgcgtattcctaaagtatacga

SEQ ID NO: 372899 - DNA, 30 bp, Artificial Sequence
  Synthetic oligonucleotide
gcgcattgtaactattacggtagtatacga

SEQ ID NO: 372900 - DNA, 30 bp, Artificial Sequence
  Synthetic oligonucleotide
tggcaacgcttcgtaagatgtggtatacga

SEQ ID NO: 372901 - DNA, 30 bp, Artificial Sequence
  Synthetic oligonucleotide
aaccacctaaagacgggtattcacctacga

SEQ ID NO: 372902 - DNA, 30 bp, Artificial Sequence
  Synthetic oligonucleotide
aagcacaacttacgttatcaagacctacga

SEQ ID NO: 372903 - DNA, 30 bp, Artificial Sequence
  Synthetic oligonucleotide
ccccaatgcagtcctcaaggtggcctacga

SEQ ID NO: 372904 - DNA, 30 bp, Artificial Sequence
  Synthetic oligonucleotide
ttcgcgggagtcttaaaaaatcgtctacga

SEQ ID NO: 372905 - DNA, 30 bp, Artificial Sequence
  Synthetic oligonucleotide
tttcataactcagaccatcatcaagtacga

SEQ ID NO: 372906 - DNA, 30 bp, Artificial Sequence
  Synthetic oligonucleotide
aagaactcgtagactagaagtcgagtacga

SEQ ID NO: 372907 - DNA, 30 bp, Artificial Sequence
  Synthetic oligonucleotide
tatgattacaagtccatcaacaacgtacga

SEQ ID NO: 372908 - DNA, 30 bp, Artificial Sequence
  Synthetic oligonucleotide
gccgtgccagtattgattcgttccgtacga

SEQ ID NO: 372909 - DNA, 30 bp, Artificial Sequence
  Synthetic oligonucleotide
ctacacttaagtcctagcgtgtgcgtacga

SEQ ID NO: 372910 - DNA, 30 bp, Artificial Sequence
  Synthetic oligonucleotide
gtaatcagtaaaacttgacgcgtcgtacga

SEQ ID NO: 372911 - DNA, 30 bp, Artificial Sequence
  Synthetic oligonucleotide
aggaactgtactaacgtctcagcggtacga

SEQ ID NO: 372912 - DNA, 30 bp, Artificial Sequence
  Synthetic oligonucleotide
agcttgatctgttagctttaaagggtacga

SEQ ID NO: 372913 - DNA, 30 bp, Artificial Sequence
  Synthetic oligonucleotide
ccctcttaggaaaatgcccagcgggtacga

SEQ ID NO: 372914 - DNA, 30 bp, Artificial Sequence
  Synthetic oligonucleotide
cgcagcgattataaatcgtggggggtacga

SEQ ID NO: 372915 - DNA, 30 bp, Artificial Sequence
  Synthetic oligonucleotide
gacaccgtccggtgactgtaaggattacga

SEQ ID NO: 372916 - DNA, 30 bp, Artificial Sequence
  Synthetic oligonucleotide
agcagaataataagtcctgtagtattacga

SEQ ID NO: 372917 - DNA, 30 bp, Artificial Sequence
  Synthetic oligonucleotide
tcggcctggtaattgtgacgccccttacga

SEQ ID NO: 372918 - DNA, 30 bp, Artificial Sequence
  Synthetic oligonucleotide
gtacccctatagggacatgctttcttacga

SEQ ID NO: 372919 - DNA, 30 bp, Artificial Sequence
  Synthetic oligonucleotide
tttcctatcggtcaagcattggagttacga

SEQ ID NO: 372920 - DNA, 30 bp, Artificial Sequence
  Synthetic oligonucleotide
tagtagcatttactctggatgccgttacga

SEQ ID NO: 372921 - DNA, 29 bp, Artificial Sequence
  Synthetic oligonucleotide
gtatgagtgctcgagaccgcctaaaccga

SEQ ID NO: 372922 - DNA, 30 bp, Artificial Sequence
  Synthetic oligonucleotide
ttcattgcatatgcagaggtttacaaccga

SEQ ID NO: 372923 - DNA, 30 bp, Artificial Sequence
  Synthetic oligonucleotide
agttagtgatgtataacggcctggaaccga

SEQ ID NO: 372924 - DNA, 30 bp, Artificial Sequence
  Synthetic oligonucleotide
gtctcgttgccaccacccttgctgaaccga

SEQ ID NO: 372925 - DNA, 30 bp, Artificial Sequence
  Synthetic oligonucleotide
gttccgcctcgaggtcgataagtgaaccga

SEQ ID NO: 372926 - DNA, 30 bp, Artificial Sequence
  Synthetic oligonucleotide
atgtgtggctcgaccggggtcgtgaaccga

SEQ ID NO: 372927 - DNA, 30 bp, Artificial Sequence
  Synthetic oligonucleotide
ctactgcgtcggcccaatatcggtaaccga

SEQ ID NO: 372928 - DNA, 30 bp, Artificial Sequence
  Synthetic oligonucleotide
ctccccgccccctcgttcccgccacaccga

SEQ ID NO: 372929 - DNA, 30 bp, Artificial Sequence
  Synthetic oligonucleotide
gggggccctgtttatcttcatggacaccga

SEQ ID NO: 372930 - DNA, 30 bp, Artificial Sequence
  Synthetic oligonucleotide
cctatcattttgacagtagaagtacaccga

SEQ ID NO: 372931 - DNA, 30 bp, Artificial Sequence
  Synthetic oligonucleotide
gtattggcacgagggtaccaatagcaccga

SEQ ID NO: 372932 - DNA, 30 bp, Artificial Sequence
  Synthetic oligonucleotide
atcacgcctacggaagtatagacgcaccga

SEQ ID NO: 372933 - DNA, 30 bp, Artificial Sequence
  Synthetic oligonucleotide
actgtctgatgcctccgtcgtaaagaccga

SEQ ID NO: 372934 - DNA, 30 bp, Artificial Sequence
  Synthetic oligonucleotide
atgtttgtcgaacgtgagccgggagaccga

SEQ ID NO: 372935 - DNA, 30 bp, Artificial Sequence
  Synthetic oligonucleotide
aaaaacgaccaggtaatcaggcccgaccga

SEQ ID NO: 372936 - DNA, 30 bp, Artificial Sequence
  Synthetic oligonucleotide
aatccgcggacggttttatagggggaccga

SEQ ID NO: 372937 - DNA, 30 bp, Artificial Sequence
  Synthetic oligonucleotide
ttctccaaaaacctcgactcacctgaccga

SEQ ID NO: 372938 - DNA, 30 bp, Artificial Sequence
  Synthetic oligonucleotide
aatggatctggagtttatccataataccga

SEQ ID NO: 372939 - DNA, 30 bp, Artificial Sequence
  Synthetic oligonucleotide
gatacgggtagaaatgatcatctataccga

SEQ ID NO: 372940 - DNA, 30 bp, Artificial Sequence
  Synthetic oligonucleotide
ttaccatccttgaacggtgaccactaccga

SEQ ID NO: 372941 - DNA, 30 bp, Artificial Sequence
  Synthetic oligonucleotide
atgttaaaagctaccacgaccctgtaccga

SEQ ID NO: 372942 - DNA, 30 bp, Artificial Sequence
  Synthetic oligonucleotide
gccgttgaactggttcctggcacttaccga

SEQ ID NO: 372943 - DNA, 30 bp, Artificial Sequence
  Synthetic oligonucleotide
ccgtctctataactgatgtatctttaccga

SEQ ID NO: 372944 - DNA, 30 bp, Artificial Sequence
  Synthetic oligonucleotide
gtatcgggaagtcaagagctgcgaacccga

SEQ ID NO: 372945 - DNA, 30 bp, Artificial Sequence
  Synthetic oligonucleotide
taccgttctgaaaatagtcaccccacccga

SEQ ID NO: 372946 - DNA, 30 bp, Artificial Sequence
  Synthetic oligonucleotide
tagtacatcacgcacggccggggcacccga

SEQ ID NO: 372947 - DNA, 30 bp, Artificial Sequence
  Synthetic oligonucleotide
tttcgtaccgatccttattaaatcacccga

SEQ ID NO: 372948 - DNA, 30 bp, Artificial Sequence
  Synthetic oligonucleotide
ctgaggggccttccgaatcagttaccccga

SEQ ID NO: 372949 - DNA, 30 bp, Artificial Sequence
  Synthetic oligonucleotide
tagtttgacgaacaatcgggtggcccccga

SEQ ID NO: 372950 - DNA, 30 bp, Artificial Sequence
  Synthetic oligonucleotide
aataaataatgccgatagagttcgccccga

SEQ ID NO: 372951 - DNA, 30 bp, Artificial Sequence
  Synthetic oligonucleotide
ccgacatcggagcgctactaagaagcccga

SEQ ID NO: 372952 - DNA, 30 bp, Artificial Sequence
  Synthetic oligonucleotide
tatatgagctagaaccggtaaactgcccga

SEQ ID NO: 372953 - DNA, 30 bp, Artificial Sequence
  Synthetic oligonucleotide
aaggttagatacggcctactcttatcccga

SEQ ID NO: 372954 - DNA, 30 bp, Artificial Sequence
  Synthetic oligonucleotide
ttaatctcgtaaggattctcgggttcccga

SEQ ID NO: 372955 - DNA, 30 bp, Artificial Sequence
  Synthetic oligonucleotide
gagaagggtccggttttgccccaaagccga

SEQ ID NO: 372956 - DNA, 30 bp, Artificial Sequence
  Synthetic oligonucleotide
gcacgtctgcatcaagcaaagataagccga

SEQ ID NO: 372957 - DNA, 30 bp, Artificial Sequence
  Synthetic oligonucleotide
cttacttcatttgtgagtggcgtaagccga

SEQ ID NO: 372958 - DNA, 30 bp, Artificial Sequence
  Synthetic oligonucleotide
gtctccgtggatgggttctcccacagccga

SEQ ID NO: 372959 - DNA, 30 bp, Artificial Sequence
  Synthetic oligonucleotide
cttatttcgcggcgcacgggacgtagccga

SEQ ID NO: 372960 - DNA, 30 bp, Artificial Sequence
  Synthetic oligonucleotide
ctgaggcggattaagggctcatttagccga

SEQ ID NO: 372961 - DNA, 30 bp, Artificial Sequence
  Synthetic oligonucleotide
actccttagctgaaggctcccacacgccga

SEQ ID NO: 372962 - DNA, 30 bp, Artificial Sequence
  Synthetic oligonucleotide
tcgagagtgggcgagcatgcaccacgccga

SEQ ID NO: 372963 - DNA, 30 bp, Artificial Sequence
  Synthetic oligonucleotide
tggttagtcaagtgtgctttcaggcgccga

SEQ ID NO: 372964 - DNA, 30 bp, Artificial Sequence
  Synthetic oligonucleotide
gtccgccataagcaccatcgtagaggccga

SEQ ID NO: 372965 - DNA, 30 bp, Artificial Sequence
  Synthetic oligonucleotide
agcagcacccctagcaccgcgataggccga

SEQ ID NO: 372966 - DNA, 30 bp, Artificial Sequence
  Synthetic oligonucleotide
tgatactagtcagctgagcggctaggccga

SEQ ID NO: 372967 - DNA, 30 bp, Artificial Sequence
  Synthetic oligonucleotide
caaattgctcggtttctgcagttaggccga

SEQ ID NO: 372968 - DNA, 30 bp, Artificial Sequence
  Synthetic oligonucleotide
tggtggggctggaagtattacaacggccga

SEQ ID NO: 372969 - DNA, 30 bp, Artificial Sequence
  Synthetic oligonucleotide
tcgaacaagattttaggctgccggggccga

SEQ ID NO: 372970 - DNA, 30 bp, Artificial Sequence
  Synthetic oligonucleotide
atcataatccccgcgttcattaatggccga

SEQ ID NO: 372971 - DNA, 30 bp, Artificial Sequence
  Synthetic oligonucleotide
tgaaaaatgacttaggtacattctggccga

SEQ ID NO: 372972 - DNA, 30 bp, Artificial Sequence
  Synthetic oligonucleotide
ctagctcgaggagagtttgtaacatgccga

SEQ ID NO: 372973 - DNA, 30 bp, Artificial Sequence
  Synthetic oligonucleotide
cttacgcggatcaacccgactggttgccga

SEQ ID NO: 372974 - DNA, 30 bp, Artificial Sequence
  Synthetic oligonucleotide
gaatatcgtgaagtcgacctgtaaatccga

SEQ ID NO: 372975 - DNA, 30 bp, Artificial Sequence
  Synthetic oligonucleotide
gtttatagctctaatttcaagaccatccga

SEQ ID NO: 372976 - DNA, 30 bp, Artificial Sequence
  Synthetic oligonucleotide
cgcgatgggactaagtatgagtccatccga

SEQ ID NO: 372977 - DNA, 29 bp, Artificial Sequence
  Synthetic oligonucleotide
aatgcaaacgtgctacaccctgcatccga

SEQ ID NO: 372978 - DNA, 30 bp, Artificial Sequence
  Synthetic oligonucleotide
gttagaaaggtttctcggcagttgatccga

SEQ ID NO: 372979 - DNA, 30 bp, Artificial Sequence
  Synthetic oligonucleotide
cacgttatttatgctgctatgtatatccga

SEQ ID NO: 372980 - DNA, 30 bp, Artificial Sequence
  Synthetic oligonucleotide
cgatatcggccccgcatcgcagctatccga

SEQ ID NO: 372981 - DNA, 30 bp, Artificial Sequence
  Synthetic oligonucleotide
cctctaaggtttctcacgctacgtatccga

SEQ ID NO: 372982 - DNA, 30 bp, Artificial Sequence
  Synthetic oligonucleotide
ggcgtgactcagtccggctatggtatccga

SEQ ID NO: 372983 - DNA, 30 bp, Artificial Sequence
  Synthetic oligonucleotide
tcgtgccgcccagttactaggagcctccga

SEQ ID NO: 372984 - DNA, 30 bp, Artificial Sequence
  Synthetic oligonucleotide
gaaacatgcctccaactcttactgctccga

SEQ ID NO: 372985 - DNA, 30 bp, Artificial Sequence
  Synthetic oligonucleotide
gcctttaccacctgaagtaacctgctccga

SEQ ID NO: 372986 - DNA, 30 bp, Artificial Sequence
  Synthetic oligonucleotide
acagtgtcaagcttgtgcgacgctctccga

SEQ ID NO: 372987 - DNA, 30 bp, Artificial Sequence
  Synthetic oligonucleotide
taacatattcggtcactttttattctccga

SEQ ID NO: 372988 - DNA, 30 bp, Artificial Sequence
  Synthetic oligonucleotide
gtcctaagtctaccgccatgttgagtccga

SEQ ID NO: 372989 - DNA, 30 bp, Artificial Sequence
  Synthetic oligonucleotide
gcacggtttagacaatagctatgtgtccga

SEQ ID NO: 372990 - DNA, 30 bp, Artificial Sequence
  Synthetic oligonucleotide
gttgtctagaaccagctacagattgtccga

SEQ ID NO: 372991 - DNA, 30 bp, Artificial Sequence
  Synthetic oligonucleotide
tgtccacacggtgcgttcttcttcttccga

SEQ ID NO: 372992 - DNA, 30 bp, Artificial Sequence
  Synthetic oligonucleotide
tagctgtggtgtcgtagccccaatttccga

SEQ ID NO: 372993 - DNA, 30 bp, Artificial Sequence
  Synthetic oligonucleotide
tatgtgggcgttgtcgccggggatttccga

SEQ ID NO: 372994 - DNA, 30 bp, Artificial Sequence
  Synthetic oligonucleotide
tgcaatctccagtcactaatggatttccga

SEQ ID NO: 372995 - DNA, 30 bp, Artificial Sequence
  Synthetic oligonucleotide
ccgggccacgtagataggaattatttccga

SEQ ID NO: 372996 - DNA, 30 bp, Artificial Sequence
  Synthetic oligonucleotide
ggattatgtcaagaaggagtacttttccga

SEQ ID NO: 372997 - DNA, 30 bp, Artificial Sequence
  Synthetic oligonucleotide
ctgtagggaaatcgccacattgaaaagcga

SEQ ID NO: 372998 - DNA, 30 bp, Artificial Sequence
  Synthetic oligonucleotide
tgcagaccagagtctccgttgtgaaagcga

SEQ ID NO: 372999 - DNA, 30 bp, Artificial Sequence
  Synthetic oligonucleotide
gtgcgactggcttaagtctgatgcaagcga

SEQ ID NO: 373000 - DNA, 30 bp, Artificial Sequence
  Synthetic oligonucleotide
ccatagcccgacacgggatctttcaagcga

SEQ ID NO: 373001 - DNA, 30 bp, Artificial Sequence
  Synthetic oligonucleotide
gagcgggatactcatggggtaacgaagcga

SEQ ID NO: 373002 - DNA, 30 bp, Artificial Sequence
  Synthetic oligonucleotide
atgggtttataaattaacgattggaagcga

SEQ ID NO: 373003 - DNA, 30 bp, Artificial Sequence
  Synthetic oligonucleotide
ttagtagtactggaacgtggtgtgaagcga

SEQ ID NO: 373004 - DNA, 30 bp, Artificial Sequence
  Synthetic oligonucleotide
aaagttgctattgaagcagtcagtaagcga

SEQ ID NO: 373005 - DNA, 30 bp, Artificial Sequence
  Synthetic oligonucleotide
tataccttgctttgccgccctgaccagcga

SEQ ID NO: 373006 - DNA, 30 bp, Artificial Sequence
  Synthetic oligonucleotide
cagggctattatattgaggggacccagcga

SEQ ID NO: 373007 - DNA, 30 bp, Artificial Sequence
  Synthetic oligonucleotide
cggacgggtccacctgtaggcccgcagcga

SEQ ID NO: 373008 - DNA, 30 bp, Artificial Sequence
  Synthetic oligonucleotide
ccatcttgtgttcggttaggcgctcagcga

SEQ ID NO: 373009 - DNA, 30 bp, Artificial Sequence
  Synthetic oligonucleotide
tccaccgtcgaaagagatcgttgtcagcga

SEQ ID NO: 373010 - DNA, 30 bp, Artificial Sequence
  Synthetic oligonucleotide
ctgagtcaccgcaccgtcagcgtcgagcga

SEQ ID NO: 373011 - DNA, 30 bp, Artificial Sequence
  Synthetic oligonucleotide
gacggctggtctaaaggattcaaggagcga

SEQ ID NO: 373012 - DNA, 30 bp, Artificial Sequence
  Synthetic oligonucleotide
cgggcgcccagtccatcccttggggagcga

SEQ ID NO: 373013 - DNA, 30 bp, Artificial Sequence
  Synthetic oligonucleotide
gtacgggctagggcccacacctatgagcga

SEQ ID NO: 373014 - DNA, 30 bp, Artificial Sequence
  Synthetic oligonucleotide
ggcataattggtcgttctgtttgctagcga

SEQ ID NO: 373015 - DNA, 30 bp, Artificial Sequence
  Synthetic oligonucleotide
aacctgcgtcaaacacgctcagcgtagcga

SEQ ID NO: 373016 - DNA, 30 bp, Artificial Sequence
  Synthetic oligonucleotide
cctaggcaatatttagaggctatgtagcga

SEQ ID NO: 373017 - DNA, 30 bp, Artificial Sequence
  Synthetic oligonucleotide
aaataagttttaggtcactagtaaacgcga

SEQ ID NO: 373018 - DNA, 30 bp, Artificial Sequence
  Synthetic oligonucleotide
tcagcatttgcggtaaatggatgaacgcga

SEQ ID NO: 373019 - DNA, 30 bp, Artificial Sequence
  Synthetic oligonucleotide
ttagtccggctcctagaatgactaacgcga

SEQ ID NO: 373020 - DNA, 30 bp, Artificial Sequence
  Synthetic oligonucleotide
ttgaggtctcggaacaacacagagacgcga

SEQ ID NO: 373021 - DNA, 30 bp, Artificial Sequence
  Synthetic oligonucleotide
agcggtgaacttcttgacctttggacgcga

SEQ ID NO: 373022 - DNA, 30 bp, Artificial Sequence
  Synthetic oligonucleotide
gaactcttcgtactaaactccgatacgcga

SEQ ID NO: 373023 - DNA, 30 bp, Artificial Sequence
  Synthetic oligonucleotide
cttaccatcgtatgatttcggggtacgcga

SEQ ID NO: 373024 - DNA, 30 bp, Artificial Sequence
  Synthetic oligonucleotide
ttcgacatactgccacactggattacgcga

SEQ ID NO: 373025 - DNA, 30 bp, Artificial Sequence
  Synthetic oligonucleotide
ttcggggtgcaaatatccttgtaaccgcga

SEQ ID NO: 373026 - DNA, 30 bp, Artificial Sequence
  Synthetic oligonucleotide
tcacattgaagctcatgtgccgcaccgcga

SEQ ID NO: 373027 - DNA, 30 bp, Artificial Sequence
  Synthetic oligonucleotide
ttcgggacaggtgaagacggcggcccgcga

SEQ ID NO: 373028 - DNA, 30 bp, Artificial Sequence
  Synthetic oligonucleotide
ctgagaaattgttaagccacggagccgcga

SEQ ID NO: 373029 - DNA, 30 bp, Artificial Sequence
  Synthetic oligonucleotide
ctcgcgccctccatacataagccgccgcga

SEQ ID NO: 373030 - DNA, 30 bp, Artificial Sequence
  Synthetic oligonucleotide
gcactccccttactcttccatgtgccgcga

SEQ ID NO: 373031 - DNA, 30 bp, Artificial Sequence
  Synthetic oligonucleotide
acatgatagatcgggtctagggatccgcga

SEQ ID NO: 373032 - DNA, 30 bp, Artificial Sequence
  Synthetic oligonucleotide
attgatatatcgaggacaacgattccgcga

SEQ ID NO: 373033 - DNA, 30 bp, Artificial Sequence
  Synthetic oligonucleotide
tccaccgtgtcctatagtttccttccgcga

SEQ ID NO: 373034 - DNA, 30 bp, Artificial Sequence
  Synthetic oligonucleotide
gacatgcgcgctggtacttaataagcgcga

SEQ ID NO: 373035 - DNA, 30 bp, Artificial Sequence
  Synthetic oligonucleotide
cctttctagaagctcttggatagagcgcga

SEQ ID NO: 373036 - DNA, 30 bp, Artificial Sequence
  Synthetic oligonucleotide
acgttagtttagtctgcgcgccacgcgcga

SEQ ID NO: 373037 - DNA, 30 bp, Artificial Sequence
  Synthetic oligonucleotide
taaaggtcggtattggcagcagacgcgcga

SEQ ID NO: 373038 - DNA, 30 bp, Artificial Sequence
  Synthetic oligonucleotide
ggagctaaacgggatgggataaccgcgcga

SEQ ID NO: 373039 - DNA, 31 bp, Artificial Sequence
  Synthetic oligonucleotide
ctactggctctacctcgagaggtgtgcgcga

SEQ ID NO: 373040 - DNA, 30 bp, Artificial Sequence
  Synthetic oligonucleotide
acacggaactggctccccgggtgtgcgcga

SEQ ID NO: 373041 - DNA, 30 bp, Artificial Sequence
  Synthetic oligonucleotide
cctgcaatttaagggcggaaagcatcgcga

SEQ ID NO: 373042 - DNA, 30 bp, Artificial Sequence
  Synthetic oligonucleotide
tgctcgtacgaggttcccgtgagatcgcga

SEQ ID NO: 373043 - DNA, 30 bp, Artificial Sequence
  Synthetic oligonucleotide
aaaccatgctatagtgagtttcactcgcga

SEQ ID NO: 373044 - DNA, 30 bp, Artificial Sequence
  Synthetic oligonucleotide
agaaggccaaaggtcgttcaggactcgcga

SEQ ID NO: 373045 - DNA, 30 bp, Artificial Sequence
  Synthetic oligonucleotide
catccgatccttttgtaacagtactcgcga

SEQ ID NO: 373046 - DNA, 30 bp, Artificial Sequence
  Synthetic oligonucleotide
gttagagcgcttaggcgcttcagctcgcga

SEQ ID NO: 373047 - DNA, 30 bp, Artificial Sequence
  Synthetic oligonucleotide
tgcggccttgaacgactcaagtggtcgcga

SEQ ID NO: 373048 - DNA, 30 bp, Artificial Sequence
  Synthetic oligonucleotide
ggaggagacagttagatttactgttcgcga

SEQ ID NO: 373049 - DNA, 30 bp, Artificial Sequence
  Synthetic oligonucleotide
cgcggcgacgcaaggcgtggggtttcgcga

SEQ ID NO: 373050 - DNA, 30 bp, Artificial Sequence
  Synthetic oligonucleotide
atagcgcgcttcgcttgtgctgtttcgcga

SEQ ID NO: 373051 - DNA, 30 bp, Artificial Sequence
  Synthetic oligonucleotide
atgaacgctattatgattttaaaaaggcga

SEQ ID NO: 373052 - DNA, 30 bp, Artificial Sequence
  Synthetic oligonucleotide
gaactgaagttccttgtaatgaaaaggcga

SEQ ID NO: 373053 - DNA, 30 bp, Artificial Sequence
  Synthetic oligonucleotide
gttaagtcatgtaatgcagttaaaaggcga

SEQ ID NO: 373054 - DNA, 30 bp, Artificial Sequence
  Synthetic oligonucleotide
tgcctgaacgaggtaaatacgcacaggcga

SEQ ID NO: 373055 - DNA, 30 bp, Artificial Sequence
  Synthetic oligonucleotide
tctgtaactagactgtcaaggtcgaggcga

SEQ ID NO: 373056 - DNA, 30 bp, Artificial Sequence
  Synthetic oligonucleotide
atgtatatggtacctgcgaaggtacggcga

SEQ ID NO: 373057 - DNA, 30 bp, Artificial Sequence
  Synthetic oligonucleotide
tggaggattttcgctgtaagcccgcggcga

SEQ ID NO: 373058 - DNA, 30 bp, Artificial Sequence
  Synthetic oligonucleotide
tggaacgatcgcacacgcttttctcggcga

SEQ ID NO: 373059 - DNA, 30 bp, Artificial Sequence
  Synthetic oligonucleotide
ctaggtattgtaattactccccttcggcga

SEQ ID NO: 373060 - DNA, 30 bp, Artificial Sequence
  Synthetic oligonucleotide
tcaggggccgtgtgtcaccccagagggcga

SEQ ID NO: 373061 - DNA, 30 bp, Artificial Sequence
  Synthetic oligonucleotide
gatgaggcatagctacatggacccgggcga

SEQ ID NO: 373062 - DNA, 30 bp, Artificial Sequence
  Synthetic oligonucleotide
ataaactataatggttggcctggggggcga

SEQ ID NO: 373063 - DNA, 30 bp, Artificial Sequence
  Synthetic oligonucleotide
tatgggtcgtgctagtaacgtggtgggcga

SEQ ID NO: 373064 - DNA, 30 bp, Artificial Sequence
  Synthetic oligonucleotide
tgaattaaagactcccaataatcatggcga

SEQ ID NO: 373065 - DNA, 30 bp, Artificial Sequence
  Synthetic oligonucleotide
tttatgagggtggctcgggcctgctggcga

SEQ ID NO: 373066 - DNA, 30 bp, Artificial Sequence
  Synthetic oligonucleotide
gattcagggcgcacaaggcgttggtggcga

SEQ ID NO: 373067 - DNA, 30 bp, Artificial Sequence
  Synthetic oligonucleotide
gcaccagtttccatgcaatgatgttggcga

SEQ ID NO: 373068 - DNA, 30 bp, Artificial Sequence
  Synthetic oligonucleotide
taccttgcgggtaagcttagcgtttggcga

SEQ ID NO: 373069 - DNA, 30 bp, Artificial Sequence
  Synthetic oligonucleotide
tttgatagagctcatgcctagtaaatgcga

SEQ ID NO: 373070 - DNA, 30 bp, Artificial Sequence
  Synthetic oligonucleotide
cctcctagttatgagctggaaataatgcga

SEQ ID NO: 373071 - DNA, 30 bp, Artificial Sequence
  Synthetic oligonucleotide
atcgatgtttcgcgatgaaactccatgcga

SEQ ID NO: 373072 - DNA, 30 bp, Artificial Sequence
  Synthetic oligonucleotide
gtggcgataccataacgactcatgatgcga

SEQ ID NO: 373073 - DNA, 30 bp, Artificial Sequence
  Synthetic oligonucleotide
ctcttgtgtcggcctcgacttggcctgcga

SEQ ID NO: 373074 - DNA, 30 bp, Artificial Sequence
  Synthetic oligonucleotide
ttcgtctaaattgtagtactattcctgcga

SEQ ID NO: 373075 - DNA, 30 bp, Artificial Sequence
  Synthetic oligonucleotide
acagggacgtaagagggttctgatctgcga

SEQ ID NO: 373076 - DNA, 30 bp, Artificial Sequence
  Synthetic oligonucleotide
gagtcggcacaccgtagatcgcttctgcga

SEQ ID NO: 373077 - DNA, 30 bp, Artificial Sequence
  Synthetic oligonucleotide
tcgcaggctagggtgtctactagagtgcga

SEQ ID NO: 373078 - DNA, 30 bp, Artificial Sequence
  Synthetic oligonucleotide
aaatataggggccccaagtactacgtgcga

SEQ ID NO: 373079 - DNA, 30 bp, Artificial Sequence
  Synthetic oligonucleotide
aatggttttttagttccatctaccgtgcga

SEQ ID NO: 373080 - DNA, 30 bp, Artificial Sequence
  Synthetic oligonucleotide
aaatctatctgtgcagccgagatcgtgcga

SEQ ID NO: 373081 - DNA, 30 bp, Artificial Sequence
  Synthetic oligonucleotide
caatcgctaccctcccgttctacggtgcga

SEQ ID NO: 373082 - DNA, 30 bp, Artificial Sequence
  Synthetic oligonucleotide
caggcgttaaagcatatcattgatgtgcga

SEQ ID NO: 373083 - DNA, 30 bp, Artificial Sequence
  Synthetic oligonucleotide
cgaatctagcctcatgtgacgcgattgcga

SEQ ID NO: 373084 - DNA, 30 bp, Artificial Sequence
  Synthetic oligonucleotide
gtagtgtcggtggtatcgcacatattgcga

SEQ ID NO: 373085 - DNA, 30 bp, Artificial Sequence
  Synthetic oligonucleotide
gtccacgctaatcagcttactcgcttgcga

SEQ ID NO: 373086 - DNA, 30 bp, Artificial Sequence
  Synthetic oligonucleotide
cgtgaagggtgccagatagtaaaaaatcga

SEQ ID NO: 373087 - DNA, 30 bp, Artificial Sequence
  Synthetic oligonucleotide
tccaatacgagaccgtttgacgaaaatcga

SEQ ID NO: 373088 - DNA, 30 bp, Artificial Sequence
  Synthetic oligonucleotide
cttcattcttctagggtatttacaaatcga

SEQ ID NO: 373089 - DNA, 30 bp, Artificial Sequence
  Synthetic oligonucleotide
gagtctgtatgatatgtttacccaaatcga

SEQ ID NO: 373090 - DNA, 30 bp, Artificial Sequence
  Synthetic oligonucleotide
gaattacagaaacatagattaaccaatcga

SEQ ID NO: 373091 - DNA, 30 bp, Artificial Sequence
  Synthetic oligonucleotide
aaattggttctatcgaccaagagcaatcga

SEQ ID NO: 373092 - DNA, 30 bp, Artificial Sequence
  Synthetic oligonucleotide
accttcaacggcattcccgtacctaatcga

SEQ ID NO: 373093 - DNA, 30 bp, Artificial Sequence
  Synthetic oligonucleotide
atccaggcaggagtacatgttattaatcga

SEQ ID NO: 373094 - DNA, 30 bp, Artificial Sequence
  Synthetic oligonucleotide
cactagggtctctctgaccggtttaatcga

SEQ ID NO: 373095 - DNA, 30 bp, Artificial Sequence
  Synthetic oligonucleotide
tgtaaaagtgtccgcgtttcaagacatcga

SEQ ID NO: 373096 - DNA, 30 bp, Artificial Sequence
  Synthetic oligonucleotide
tactgggtacttatggtgtcgggccatcga

SEQ ID NO: 373097 - DNA, 30 bp, Artificial Sequence
  Synthetic oligonucleotide
ctagcggtaacctccggcgtttcgcatcga

SEQ ID NO: 373098 - DNA, 30 bp, Artificial Sequence
  Synthetic oligonucleotide
gatcgtagttaccacaaggatactcatcga

SEQ ID NO: 373099 - DNA, 30 bp, Artificial Sequence
  Synthetic oligonucleotide
aaaacgccggataatttacactgtcatcga

SEQ ID NO: 373100 - DNA, 30 bp, Artificial Sequence
  Synthetic oligonucleotide
gtttgtcttcttcactatcgtacagatcga

SEQ ID NO: 373101 - DNA, 30 bp, Artificial Sequence
  Synthetic oligonucleotide
ggtcctcgcatcggcgtacgtttagatcga

SEQ ID NO: 373102 - DNA, 30 bp, Artificial Sequence
  Synthetic oligonucleotide
agtcgccgctatttgctttatcgcgatcga

SEQ ID NO: 373103 - DNA, 30 bp, Artificial Sequence
  Synthetic oligonucleotide
cttggttgtgaggggttgtccggcgatcga

SEQ ID NO: 373104 - DNA, 30 bp, Artificial Sequence
  Synthetic oligonucleotide
ttaggtccctgggaagagggggtcgatcga

SEQ ID NO: 373105 - DNA, 30 bp, Artificial Sequence
  Synthetic oligonucleotide
attgtgaatcgactcgacactaaggatcga

SEQ ID NO: 373106 - DNA, 30 bp, Artificial Sequence
  Synthetic oligonucleotide
tgtgtattccagtcttattgttaggatcga

SEQ ID NO: 373107 - DNA, 30 bp, Artificial Sequence
  Synthetic oligonucleotide
agtatagcgatgctccgcaggactgatcga

SEQ ID NO: 373108 - DNA, 30 bp, Artificial Sequence
  Synthetic oligonucleotide
ggtcctttatggtcccttgttccctatcga

SEQ ID NO: 373109 - DNA, 30 bp, Artificial Sequence
  Synthetic oligonucleotide
cacacattcgtgccttttcgatgctatcga

SEQ ID NO: 373110 - DNA, 30 bp, Artificial Sequence
  Synthetic oligonucleotide
acgttatactgccgtgtcgactcgtatcga

SEQ ID NO: 373111 - DNA, 30 bp, Artificial Sequence
  Synthetic oligonucleotide
tgtctaaatatgctcagtatactgtatcga

SEQ ID NO: 373112 - DNA, 30 bp, Artificial Sequence
  Synthetic oligonucleotide
cctatttttctaatccacgcagcttatcga

SEQ ID NO: 373113 - DNA, 30 bp, Artificial Sequence
  Synthetic oligonucleotide
gaattgccaacaggtcagtagtcttatcga

SEQ ID NO: 373114 - DNA, 30 bp, Artificial Sequence
  Synthetic oligonucleotide
tttggcgtgcttaaagcgagtgccactcga

SEQ ID NO: 373115 - DNA, 30 bp, Artificial Sequence
  Synthetic oligonucleotide
tttggaaatgcctcgcctcacaatactcga

SEQ ID NO: 373116 - DNA, 30 bp, Artificial Sequence
  Synthetic oligonucleotide
agtttcaatcgtttgttgtattatactcga

SEQ ID NO: 373117 - DNA, 30 bp, Artificial Sequence
  Synthetic oligonucleotide
ggggggcagaggcgagcgtggtgtactcga

SEQ ID NO: 373118 - DNA, 30 bp, Artificial Sequence
  Synthetic oligonucleotide
gagggaggtactgaatcgtggggacctcga

SEQ ID NO: 373119 - DNA, 30 bp, Artificial Sequence
  Synthetic oligonucleotide
aattatgggcacaatagtgaggcgcctcga

SEQ ID NO: 373120 - DNA, 30 bp, Artificial Sequence
  Synthetic oligonucleotide
aaatacgtcgtgagtgccccaatgcctcga

SEQ ID NO: 373121 - DNA, 30 bp, Artificial Sequence
  Synthetic oligonucleotide
atccactttaaggaggttgctttagctcga

SEQ ID NO: 373122 - DNA, 30 bp, Artificial Sequence
  Synthetic oligonucleotide
gtcgatcaggatcatgcaactttcgctcga

SEQ ID NO: 373123 - DNA, 30 bp, Artificial Sequence
  Synthetic oligonucleotide
tgttggtgtcagcaggtaccctaggctcga

SEQ ID NO: 373124 - DNA, 25 bp, Artificial Sequence
  Synthetic oligonucleotide
cgtttgctaggaattaatggctcga

SEQ ID NO: 373125 - DNA, 30 bp, Artificial Sequence
  Synthetic oligonucleotide
aaaaaactagagacggaacctcctgctcga

SEQ ID NO: 373126 - DNA, 30 bp, Artificial Sequence
  Synthetic oligonucleotide
aaatatcgcgttttcatgaacattgctcga

SEQ ID NO: 373127 - DNA, 30 bp, Artificial Sequence
  Synthetic oligonucleotide
ggcgccttaccaggttattacggatctcga

SEQ ID NO: 373128 - DNA, 30 bp, Artificial Sequence
  Synthetic oligonucleotide
taataagaaacttctaggttagaaagtcga

SEQ ID NO: 373129 - DNA, 30 bp, Artificial Sequence
  Synthetic oligonucleotide
gaagcttgtgatgcgctgttcaccagtcga

SEQ ID NO: 373130 - DNA, 30 bp, Artificial Sequence
  Synthetic oligonucleotide
ttgattgtgagacatgtataatagagtcga

SEQ ID NO: 373131 - DNA, 30 bp, Artificial Sequence
  Synthetic oligonucleotide
tgttgctaatccaagattaatgatagtcga

SEQ ID NO: 373132 - DNA, 30 bp, Artificial Sequence
  Synthetic oligonucleotide
aattgcagagtagagaagttccctagtcga

SEQ ID NO: 373133 - DNA, 30 bp, Artificial Sequence
  Synthetic oligonucleotide
atgccattatacttcggagcacggcgtcga

SEQ ID NO: 373134 - DNA, 30 bp, Artificial Sequence
  Synthetic oligonucleotide
gaagccgcacagtattgtgccagcggtcga

SEQ ID NO: 373135 - DNA, 30 bp, Artificial Sequence
  Synthetic oligonucleotide
aacacacccctgagggtccccggcggtcga

SEQ ID NO: 373136 - DNA, 30 bp, Artificial Sequence
  Synthetic oligonucleotide
ttgtaactggccgatcgcgacgcgggtcga

SEQ ID NO: 373137 - DNA, 30 bp, Artificial Sequence
  Synthetic oligonucleotide
tgtcgccacgtcgctacgcattatggtcga

SEQ ID NO: 373138 - DNA, 30 bp, Artificial Sequence
  Synthetic oligonucleotide
aatacactcacctcgtttacaattggtcga

SEQ ID NO: 373139 - DNA, 30 bp, Artificial Sequence
  Synthetic oligonucleotide
gccatggttgtcactccggagaaatgtcga

SEQ ID NO: 373140 - DNA, 30 bp, Artificial Sequence
  Synthetic oligonucleotide
ggattgcacgctcttgtggctcaatgtcga

SEQ ID NO: 373141 - DNA, 30 bp, Artificial Sequence
  Synthetic oligonucleotide
tcgggacacgagggcctcgccccatgtcga

SEQ ID NO: 373142 - DNA, 30 bp, Artificial Sequence
  Synthetic oligonucleotide
tgtgtctgggccactaaacagttatgtcga

SEQ ID NO: 373143 - DNA, 30 bp, Artificial Sequence
  Synthetic oligonucleotide
tagtttggatcgtgcccatatatctgtcga

SEQ ID NO: 373144 - DNA, 30 bp, Artificial Sequence
  Synthetic oligonucleotide
ccaactctgaccaacttagtgtagtgtcga

SEQ ID NO: 373145 - DNA, 30 bp, Artificial Sequence
  Synthetic oligonucleotide
ttgacagaaagcgcactctacaggtgtcga

SEQ ID NO: 373146 - DNA, 30 bp, Artificial Sequence
  Synthetic oligonucleotide
gctgaactacacatctcgtggatttgtcga

SEQ ID NO: 373147 - DNA, 30 bp, Artificial Sequence
  Synthetic oligonucleotide
cagtatttggcagataacgatctttgtcga

SEQ ID NO: 373148 - DNA, 30 bp, Artificial Sequence
  Synthetic oligonucleotide
caacatacaggtgttcgcatacgaattcga

SEQ ID NO: 373149 - DNA, 30 bp, Artificial Sequence
  Synthetic oligonucleotide
ggtattggttcgctgctatcaacgattcga

SEQ ID NO: 373150 - DNA, 30 bp, Artificial Sequence
  Synthetic oligonucleotide
aagatagctgtaatgcttggacggattcga

SEQ ID NO: 373151 - DNA, 30 bp, Artificial Sequence
  Synthetic oligonucleotide
gttaggtagccacacgggcgactgattcga

SEQ ID NO: 373152 - DNA, 30 bp, Artificial Sequence
  Synthetic oligonucleotide
tggcattggagccgacgttaagtgattcga

SEQ ID NO: 373153 - DNA, 30 bp, Artificial Sequence
  Synthetic oligonucleotide
tttgggtacaagtaatagctctgtattcga

SEQ ID NO: 373154 - DNA, 30 bp, Artificial Sequence
  Synthetic oligonucleotide
atgatttcccacgtgcgcgacggacttcga

SEQ ID NO: 373155 - DNA, 30 bp, Artificial Sequence
  Synthetic oligonucleotide
atcctggcagttcaattcagaatacttcga

SEQ ID NO: 373156 - DNA, 30 bp, Artificial Sequence
  Synthetic oligonucleotide
taatcgatagcgcttccatactatcttcga

SEQ ID NO: 373157 - DNA, 30 bp, Artificial Sequence
  Synthetic oligonucleotide
ttatttgattcccatagggcgcgagttcga

SEQ ID NO: 373158 - DNA, 30 bp, Artificial Sequence
  Synthetic oligonucleotide
atcggatacatttctattaaacccgttcga

SEQ ID NO: 373159 - DNA, 30 bp, Artificial Sequence
  Synthetic oligonucleotide
ggacgatacacttcgtgtagattcgttcga

SEQ ID NO: 373160 - DNA, 30 bp, Artificial Sequence
  Synthetic oligonucleotide
acccgttaaggacaaaccgtgaaggttcga

SEQ ID NO: 373161 - DNA, 30 bp, Artificial Sequence
  Synthetic oligonucleotide
aaactgcacaccagttaaaacgaggttcga

SEQ ID NO: 373162 - DNA, 30 bp, Artificial Sequence
  Synthetic oligonucleotide
gtccgattgtttagtgagcccgcggttcga

SEQ ID NO: 373163 - DNA, 30 bp, Artificial Sequence
  Synthetic oligonucleotide
gataactaatcatccgtaaacttggttcga

SEQ ID NO: 373164 - DNA, 30 bp, Artificial Sequence
  Synthetic oligonucleotide
ggtctcttatggcgttttacgcgtgttcga

SEQ ID NO: 373165 - DNA, 30 bp, Artificial Sequence
  Synthetic oligonucleotide
atgacttatctaaatgtcagggtatttcga

SEQ ID NO: 373166 - DNA, 30 bp, Artificial Sequence
  Synthetic oligonucleotide
cttcttcagaataagcaacgccgctttcga

SEQ ID NO: 373167 - DNA, 30 bp, Artificial Sequence
  Synthetic oligonucleotide
agaattggatggatttaaaggggctttcga

SEQ ID NO: 373168 - DNA, 30 bp, Artificial Sequence
  Synthetic oligonucleotide
actccaccagtggtagcaaggaggtttcga

SEQ ID NO: 373169 - DNA, 30 bp, Artificial Sequence
  Synthetic oligonucleotide
agagccatgataaggcatgcggtgtttcga

SEQ ID NO: 373170 - DNA, 30 bp, Artificial Sequence
  Synthetic oligonucleotide
ggtcttcagttgtgcctctgccaaaaagga

SEQ ID NO: 373171 - DNA, 30 bp, Artificial Sequence
  Synthetic oligonucleotide
ctccttatgtgaacgctcctgcaaaaagga

SEQ ID NO: 373172 - DNA, 30 bp, Artificial Sequence
  Synthetic oligonucleotide
aagccccccatgaaatcacctttaaaagga

SEQ ID NO: 373173 - DNA, 30 bp, Artificial Sequence
  Synthetic oligonucleotide
tatgatggcgccaataacggtatcaaagga

SEQ ID NO: 373174 - DNA, 30 bp, Artificial Sequence
  Synthetic oligonucleotide
agctcattcgctaccgtttaagataaagga

SEQ ID NO: 373175 - DNA, 30 bp, Artificial Sequence
  Synthetic oligonucleotide
ctgaaccagccggtagcatctcctaaagga

SEQ ID NO: 373176 - DNA, 30 bp, Artificial Sequence
  Synthetic oligonucleotide
ttcaattttgcatggtaaaagggtaaagga

SEQ ID NO: 373177 - DNA, 30 bp, Artificial Sequence
  Synthetic oligonucleotide
gaaaactcaaggctagaatcgcaccaagga

SEQ ID NO: 373178 - DNA, 30 bp, Artificial Sequence
  Synthetic oligonucleotide
actatccaatagaccctttcaaagcaagga

SEQ ID NO: 373179 - DNA, 30 bp, Artificial Sequence
  Synthetic oligonucleotide
atcataaatttcgtggagtgcgcgcaagga

SEQ ID NO: 373180 - DNA, 30 bp, Artificial Sequence
  Synthetic oligonucleotide
ccggaatccgtagtgggatcggggcaagga

SEQ ID NO: 373181 - DNA, 30 bp, Artificial Sequence
  Synthetic oligonucleotide
tctctaatcgaataatcagaatacgaagga

SEQ ID NO: 373182 - DNA, 30 bp, Artificial Sequence
  Synthetic oligonucleotide
attatagcctctgccatatgcggggaagga

SEQ ID NO: 373183 - DNA, 30 bp, Artificial Sequence
  Synthetic oligonucleotide
tttagggagctattgaacttcgtggaagga

SEQ ID NO: 373184 - DNA, 29 bp, Artificial Sequence
  Synthetic oligonucleotide
gctaacttgtcacgggtgtgattgaagga

SEQ ID NO: 373185 - DNA, 30 bp, Artificial Sequence
  Synthetic oligonucleotide
tagagaagaattgcgaggacgcttgaagga

SEQ ID NO: 373186 - DNA, 30 bp, Artificial Sequence
  Synthetic oligonucleotide
cacgttaaccaatcttatccacgataagga

SEQ ID NO: 373187 - DNA, 30 bp, Artificial Sequence
  Synthetic oligonucleotide
gccgattggagctgattgtcgcgataagga

SEQ ID NO: 373188 - DNA, 30 bp, Artificial Sequence
  Synthetic oligonucleotide
tagtttattcaagttaggtcatactaagga

SEQ ID NO: 373189 - DNA, 30 bp, Artificial Sequence
  Synthetic oligonucleotide
agatactgaagtccgtcgcgcggctaagga

SEQ ID NO: 373190 - DNA, 30 bp, Artificial Sequence
  Synthetic oligonucleotide
tgctaggctcaggtgcaagagaagtaagga

SEQ ID NO: 373191 - DNA, 30 bp, Artificial Sequence
  Synthetic oligonucleotide
tgtcttatcgaggggccttcaccgtaagga

SEQ ID NO: 373192 - DNA, 30 bp, Artificial Sequence
  Synthetic oligonucleotide
tgtacgacacaggcgtcagcacgttaagga

SEQ ID NO: 373193 - DNA, 30 bp, Artificial Sequence
  Synthetic oligonucleotide
tactctgtcacacaggggacgtggacagga

SEQ ID NO: 373194 - DNA, 30 bp, Artificial Sequence
  Synthetic oligonucleotide
ttcctttgtacttcataacctgatacagga

SEQ ID NO: 373195 - DNA, 30 bp, Artificial Sequence
  Synthetic oligonucleotide
acattctatactgcgctaatgtatacagga

SEQ ID NO: 373196 - DNA, 30 bp, Artificial Sequence
  Synthetic oligonucleotide
gcaggctactgtcctggccatgctacagga

SEQ ID NO: 373197 - DNA, 30 bp, Artificial Sequence
  Synthetic oligonucleotide
tatcaacaaacctaattcggttctacagga

SEQ ID NO: 373198 - DNA, 30 bp, Artificial Sequence
  Synthetic oligonucleotide
gtatgtcggtaatgcccaatgattacagga

SEQ ID NO: 373199 - DNA, 30 bp, Artificial Sequence
  Synthetic oligonucleotide
gttcattggtagggtcaggtgtttacagga

SEQ ID NO: 373200 - DNA, 30 bp, Artificial Sequence
  Synthetic oligonucleotide
gcgtgaaatcacgcctgcggtgacccagga

SEQ ID NO: 373201 - DNA, 30 bp, Artificial Sequence
  Synthetic oligonucleotide
ggtcggcacaagctggggcagcccccagga

SEQ ID NO: 373202 - DNA, 30 bp, Artificial Sequence
  Synthetic oligonucleotide
gcagtgatttatatcgccatccctccagga

SEQ ID NO: 373203 - DNA, 31 bp, Artificial Sequence
  Synthetic oligonucleotide
aagcgaccggggtctaaattacgttccagga

SEQ ID NO: 373204 - DNA, 30 bp, Artificial Sequence
  Synthetic oligonucleotide
gggcacgcattggccgctcttgtagcagga

SEQ ID NO: 373205 - DNA, 30 bp, Artificial Sequence
  Synthetic oligonucleotide
gagtttcgattcgcctataagtgtgcagga

SEQ ID NO: 373206 - DNA, 30 bp, Artificial Sequence
  Synthetic oligonucleotide
gacgtaaatctgtggtaaacatcatcagga

SEQ ID NO: 373207 - DNA, 30 bp, Artificial Sequence
  Synthetic oligonucleotide
tgtggttttccgcggtcaagtatatcagga

SEQ ID NO: 373208 - DNA, 30 bp, Artificial Sequence
  Synthetic oligonucleotide
tatttaggcatagtgacggcgccgtcagga

SEQ ID NO: 373209 - DNA, 30 bp, Artificial Sequence
  Synthetic oligonucleotide
agctcgtcatgacgcaatatgccgtcagga

SEQ ID NO: 373210 - DNA, 30 bp, Artificial Sequence
  Synthetic oligonucleotide
ttcaactgtagttacggaagttcgtcagga

SEQ ID NO: 373211 - DNA, 30 bp, Artificial Sequence
  Synthetic oligonucleotide
aagcgctaatccgtaccttacgtgtcagga

SEQ ID NO: 373212 - DNA, 30 bp, Artificial Sequence
  Synthetic oligonucleotide
aaaagatcacagtaggtgaatccttcagga

SEQ ID NO: 373213 - DNA, 30 bp, Artificial Sequence
  Synthetic oligonucleotide
tttgccccttagcatgaccaggcttcagga

SEQ ID NO: 373214 - DNA, 30 bp, Artificial Sequence
  Synthetic oligonucleotide
tatgctacaaagaccggagggccaagagga

SEQ ID NO: 373215 - DNA, 30 bp, Artificial Sequence
  Synthetic oligonucleotide
aaaagtacgtccgcttctacctcaagagga

SEQ ID NO: 373216 - DNA, 30 bp, Artificial Sequence
  Synthetic oligonucleotide
tctgctttgtctataccgttgcgaagagga

SEQ ID NO: 373217 - DNA, 30 bp, Artificial Sequence
  Synthetic oligonucleotide
aatctatgcccagctttcaaaggaagagga

SEQ ID NO: 373218 - DNA, 30 bp, Artificial Sequence
  Synthetic oligonucleotide
tggaagctgaattgggggagaagcagagga

SEQ ID NO: 373219 - DNA, 30 bp, Artificial Sequence
  Synthetic oligonucleotide
gttacagcgcctacgaagacgcagagagga

SEQ ID NO: 373220 - DNA, 30 bp, Artificial Sequence
  Synthetic oligonucleotide
ggagcccttttgttacgtacgacgagagga

SEQ ID NO: 373221 - DNA, 30 bp, Artificial Sequence
  Synthetic oligonucleotide
aagcttgatttattagagtctttgagagga

SEQ ID NO: 373222 - DNA, 30 bp, Artificial Sequence
  Synthetic oligonucleotide
agactaggcgaataggtctaaaatagagga

SEQ ID NO: 373223 - DNA, 30 bp, Artificial Sequence
  Synthetic oligonucleotide
aagaggatgattcgccacgggacacgagga

SEQ ID NO: 373224 - DNA, 30 bp, Artificial Sequence
  Synthetic oligonucleotide
tctcggactacgtcgccttgatcacgagga

SEQ ID NO: 373225 - DNA, 30 bp, Artificial Sequence
  Synthetic oligonucleotide
cggacttcggtgacgtcccaaggacgagga

SEQ ID NO: 373226 - DNA, 30 bp, Artificial Sequence
  Synthetic oligonucleotide
ctattttgatagcgagggctaatacgagga

SEQ ID NO: 373227 - DNA, 30 bp, Artificial Sequence
  Synthetic oligonucleotide
tattgagcattcgaaatcgatctacgagga

SEQ ID NO: 373228 - DNA, 29 bp, Artificial Sequence
  Synthetic oligonucleotide
tgtctacccgccgttatttaaagcgagga

SEQ ID NO: 373229 - DNA, 30 bp, Artificial Sequence
  Synthetic oligonucleotide
ttactgagccttataggctccgggcgagga

SEQ ID NO: 373230 - DNA, 30 bp, Artificial Sequence
  Synthetic oligonucleotide
aggatgtagtatatccgcgtcgggcgagga

SEQ ID NO: 373231 - DNA, 30 bp, Artificial Sequence
  Synthetic oligonucleotide
ttgtgtagggtttgtccggcatttcgagga

SEQ ID NO: 373232 - DNA, 30 bp, Artificial Sequence
  Synthetic oligonucleotide
tggggcaaagcgaaggcacagtaaggagga

SEQ ID NO: 373233 - DNA, 30 bp, Artificial Sequence
  Synthetic oligonucleotide
tgattgccgtgaatcccgaatataggagga

SEQ ID NO: 373234 - DNA, 30 bp, Artificial Sequence
  Synthetic oligonucleotide
aaatcctcctagacgactcatctaggagga

SEQ ID NO: 373235 - DNA, 30 bp, Artificial Sequence
  Synthetic oligonucleotide
tgacaccgggccagggcgtgagacggagga

SEQ ID NO: 373236 - DNA, 30 bp, Artificial Sequence
  Synthetic oligonucleotide
ttgcccgcattatagttatctggcggagga

SEQ ID NO: 373237 - DNA, 30 bp, Artificial Sequence
  Synthetic oligonucleotide
tcagctccacaggtaccgtaacaatgagga

SEQ ID NO: 373238 - DNA, 30 bp, Artificial Sequence
  Synthetic oligonucleotide
catcgactccaaatgaaatggcaatgagga

SEQ ID NO: 373239 - DNA, 30 bp, Artificial Sequence
  Synthetic oligonucleotide
tccggccaagcatcccttcaggactgagga

SEQ ID NO: 373240 - DNA, 30 bp, Artificial Sequence
  Synthetic oligonucleotide
acacctccaggcgtcacgccttcctgagga

SEQ ID NO: 373241 - DNA, 30 bp, Artificial Sequence
  Synthetic oligonucleotide
attcataaatttagaaaccgtgggtgagga

SEQ ID NO: 373242 - DNA, 30 bp, Artificial Sequence
  Synthetic oligonucleotide
ggccatcatgtcgccgatgtttattgagga

SEQ ID NO: 373243 - DNA, 30 bp, Artificial Sequence
  Synthetic oligonucleotide
cggttttagataatacatatgtcttgagga

SEQ ID NO: 373244 - DNA, 30 bp, Artificial Sequence
  Synthetic oligonucleotide
aactacacaaactatgctggtgtttgagga

SEQ ID NO: 373245 - DNA, 30 bp, Artificial Sequence
  Synthetic oligonucleotide
tggcagaagtaaaaaaagctataaatagga

SEQ ID NO: 373246 - DNA, 30 bp, Artificial Sequence
  Synthetic oligonucleotide
gctgataagttcgtatccgacgcaatagga

SEQ ID NO: 373247 - DNA, 30 bp, Artificial Sequence
  Synthetic oligonucleotide
tataaacccagggacggtaggtcaatagga

SEQ ID NO: 373248 - DNA, 30 bp, Artificial Sequence
  Synthetic oligonucleotide
agtacgatcaaaccccatggtcccatagga

SEQ ID NO: 373249 - DNA, 30 bp, Artificial Sequence
  Synthetic oligonucleotide
aaacgacttttcactcagctcgggatagga

SEQ ID NO: 373250 - DNA, 30 bp, Artificial Sequence
  Synthetic oligonucleotide
ggtggctggtatcagaccaaagatatagga

SEQ ID NO: 373251 - DNA, 30 bp, Artificial Sequence
  Synthetic oligonucleotide
tgtgtcgtacgctagttaagtcttatagga

SEQ ID NO: 373252 - DNA, 30 bp, Artificial Sequence
  Synthetic oligonucleotide
agctttacgtaataatgcacatttatagga

SEQ ID NO: 373253 - DNA, 30 bp, Artificial Sequence
  Synthetic oligonucleotide
gaatcctgtacactggtcctcgtactagga

SEQ ID NO: 373254 - DNA, 30 bp, Artificial Sequence
  Synthetic oligonucleotide
tattggtacgaccaatggctctcgctagga

SEQ ID NO: 373255 - DNA, 30 bp, Artificial Sequence
  Synthetic oligonucleotide
aggcatcgaacagtatatcccattctagga

SEQ ID NO: 373256 - DNA, 30 bp, Artificial Sequence
  Synthetic oligonucleotide
ttagtgtgttgcaaccacgatattctagga

SEQ ID NO: 373257 - DNA, 30 bp, Artificial Sequence
  Synthetic oligonucleotide
cgatgttgaatgttcacagacacagtagga

SEQ ID NO: 373258 - DNA, 30 bp, Artificial Sequence
  Synthetic oligonucleotide
gtgagtatgtagcccggacgcacagtagga

SEQ ID NO: 373259 - DNA, 30 bp, Artificial Sequence
  Synthetic oligonucleotide
gtttgtatggccaagcgtatagacgtagga

SEQ ID NO: 373260 - DNA, 30 bp, Artificial Sequence
  Synthetic oligonucleotide
gtcaattccccccgctcagctatggtagga

SEQ ID NO: 373261 - DNA, 30 bp, Artificial Sequence
  Synthetic oligonucleotide
ccgcatggttaaatatgtgctatggtagga

SEQ ID NO: 373262 - DNA, 30 bp, Artificial Sequence
  Synthetic oligonucleotide
cggtggtgggcatggcactcgtttgtagga

SEQ ID NO: 373263 - DNA, 30 bp, Artificial Sequence
  Synthetic oligonucleotide
gcaacgctgtaccgactttcagcattagga

SEQ ID NO: 373264 - DNA, 30 bp, Artificial Sequence
  Synthetic oligonucleotide
gaacgatctttcgattcgggaatattagga

SEQ ID NO: 373265 - DNA, 30 bp, Artificial Sequence
  Synthetic oligonucleotide
acaaattagtaatgtcgcagactattagga

SEQ ID NO: 373266 - DNA, 30 bp, Artificial Sequence
  Synthetic oligonucleotide
cccaatcactttgaccgctcggtattagga

SEQ ID NO: 373267 - DNA, 30 bp, Artificial Sequence
  Synthetic oligonucleotide
ggtctcccaacacaaggctgcaccttagga

SEQ ID NO: 373268 - DNA, 30 bp, Artificial Sequence
  Synthetic oligonucleotide
aatctggcatataacactgccaggttagga

SEQ ID NO: 373269 - DNA, 30 bp, Artificial Sequence
  Synthetic oligonucleotide
ggctctgtggtgtttcttctccggttagga

SEQ ID NO: 373270 - DNA, 30 bp, Artificial Sequence
  Synthetic oligonucleotide
gagtcactggagtttcatcaagtgttagga

SEQ ID NO: 373271 - DNA, 30 bp, Artificial Sequence
  Synthetic oligonucleotide
gttccacatcaattcacggtctatttagga

SEQ ID NO: 373272 - DNA, 30 bp, Artificial Sequence
  Synthetic oligonucleotide
cgcacctggttgaactgaaagcgtttagga

SEQ ID NO: 373273 - DNA, 30 bp, Artificial Sequence
  Synthetic oligonucleotide
tcccccggaggcgcatagcaaccaaacgga

SEQ ID NO: 373274 - DNA, 30 bp, Artificial Sequence
  Synthetic oligonucleotide
aatgtcagtctttttgcatacgcaaacgga

SEQ ID NO: 373275 - DNA, 30 bp, Artificial Sequence
  Synthetic oligonucleotide
gactaataacgcgcggctctgggaaacgga

SEQ ID NO: 373276 - DNA, 30 bp, Artificial Sequence
  Synthetic oligonucleotide
acttacgcacaccggtggtcctgaaacgga

SEQ ID NO: 373277 - DNA, 30 bp, Artificial Sequence
  Synthetic oligonucleotide
gtcacttctaatccgtaatatgtaaacgga

SEQ ID NO: 373278 - DNA, 30 bp, Artificial Sequence
  Synthetic oligonucleotide
accgctaagccgtcccataattccaacgga

SEQ ID NO: 373279 - DNA, 30 bp, Artificial Sequence
  Synthetic oligonucleotide
acactatttagtatgtgtgaaggcaacgga

SEQ ID NO: 373280 - DNA, 30 bp, Artificial Sequence
  Synthetic oligonucleotide
atgaggcgcccgagccggaatgggaacgga

SEQ ID NO: 373281 - DNA, 30 bp, Artificial Sequence
  Synthetic oligonucleotide
taatcgcgcactcctccatagatgaacgga

SEQ ID NO: 373282 - DNA, 26 bp, Artificial Sequence
  Synthetic oligonucleotide
ggaaacagacgtcggtgctgaacgga

SEQ ID NO: 373283 - DNA, 30 bp, Artificial Sequence
  Synthetic oligonucleotide
acaggtctgtcgtacttgcataataacgga

SEQ ID NO: 373284 - DNA, 30 bp, Artificial Sequence
  Synthetic oligonucleotide
tactagccctgggggcttcggtctaacgga

SEQ ID NO: 373285 - DNA, 30 bp, Artificial Sequence
  Synthetic oligonucleotide
aaagattaagtactatgaacttgacacgga

SEQ ID NO: 373286 - DNA, 30 bp, Artificial Sequence
  Synthetic oligonucleotide
gggaatttgatcagggccgatcgccacgga

SEQ ID NO: 373287 - DNA, 29 bp, Artificial Sequence
  Synthetic oligonucleotide
tccaaggctgtagccaggttgagcacgga

SEQ ID NO: 373288 - DNA, 30 bp, Artificial Sequence
  Synthetic oligonucleotide
taaagctcaaacgtcattagagggcacgga

SEQ ID NO: 373289 - DNA, 30 bp, Artificial Sequence
  Synthetic oligonucleotide
tgtccttataagttggtcgtcagtcacgga

SEQ ID NO: 373290 - DNA, 30 bp, Artificial Sequence
  Synthetic oligonucleotide
cagatacccggcagagttactaaagacgga

SEQ ID NO: 373291 - DNA, 30 bp, Artificial Sequence
  Synthetic oligonucleotide
gcccatcgccatccgacatcaagagacgga

SEQ ID NO: 373292 - DNA, 30 bp, Artificial Sequence
  Synthetic oligonucleotide
aaaaccgtcacggccacctctggagacgga

SEQ ID NO: 373293 - DNA, 30 bp, Artificial Sequence
  Synthetic oligonucleotide
gatcgaattgtactatatgggtacgacgga

SEQ ID NO: 373294 - DNA, 30 bp, Artificial Sequence
  Synthetic oligonucleotide
caatctcgggggttgtaggcaggcgacgga

SEQ ID NO: 373295 - DNA, 30 bp, Artificial Sequence
  Synthetic oligonucleotide
tcacagggtctcatggctgttttcgacgga

SEQ ID NO: 373296 - DNA, 30 bp, Artificial Sequence
  Synthetic oligonucleotide
tgcagtaaaacgtaacgacgatcggacgga

SEQ ID NO: 373297 - DNA, 30 bp, Artificial Sequence
  Synthetic oligonucleotide
accgcctcgtccaaataagtatactacgga

SEQ ID NO: 373298 - DNA, 30 bp, Artificial Sequence
  Synthetic oligonucleotide
acgcattaaaagtgcgggaactgctacgga

SEQ ID NO: 373299 - DNA, 30 bp, Artificial Sequence
  Synthetic oligonucleotide
tagcgatgcctgtccaggcttcattacgga

SEQ ID NO: 373300 - DNA, 30 bp, Artificial Sequence
  Synthetic oligonucleotide
aaaggggtatgtcgtccgcacacttacgga

SEQ ID NO: 373301 - DNA, 30 bp, Artificial Sequence
  Synthetic oligonucleotide
attttatttcgtgaaaatagaggcaccgga

SEQ ID NO: 373302 - DNA, 30 bp, Artificial Sequence
  Synthetic oligonucleotide
gtaccggcgacatggaatggtaataccgga

SEQ ID NO: 373303 - DNA, 30 bp, Artificial Sequence
  Synthetic oligonucleotide
tttaggagccttagttgaacatataccgga

SEQ ID NO: 373304 - DNA, 30 bp, Artificial Sequence
  Synthetic oligonucleotide
caatgtgcgggggtgttacgttataccgga

SEQ ID NO: 373305 - DNA, 30 bp, Artificial Sequence
  Synthetic oligonucleotide
atgggacaattgagagcgtggctccccgga

SEQ ID NO: 373306 - DNA, 30 bp, Artificial Sequence
  Synthetic oligonucleotide
gttcgaatcatccagccatgggctcccgga

SEQ ID NO: 373307 - DNA, 30 bp, Artificial Sequence
  Synthetic oligonucleotide
cggttgtacaatttccggtccgcagccgga

SEQ ID NO: 373308 - DNA, 30 bp, Artificial Sequence
  Synthetic oligonucleotide
actacctcgtatagttgtaggtgggccgga

SEQ ID NO: 373309 - DNA, 30 bp, Artificial Sequence
  Synthetic oligonucleotide
tcgaggtcagagtccttgaattcatccgga

SEQ ID NO: 373310 - DNA, 30 bp, Artificial Sequence
  Synthetic oligonucleotide
tctgtgaattagccagtgcgaggatccgga

SEQ ID NO: 373311 - DNA, 30 bp, Artificial Sequence
  Synthetic oligonucleotide
ttttcgacttgagtgcagttctgatccgga

SEQ ID NO: 373312 - DNA, 30 bp, Artificial Sequence
  Synthetic oligonucleotide
cagggtttgtctctctggcatgtatccgga

SEQ ID NO: 373313 - DNA, 30 bp, Artificial Sequence
  Synthetic oligonucleotide
tgcccgcatccagcaagatagcagtccgga

SEQ ID NO: 373314 - DNA, 30 bp, Artificial Sequence
  Synthetic oligonucleotide
ctttttgtcttcagtcgggttgagtccgga

SEQ ID NO: 373315 - DNA, 30 bp, Artificial Sequence
  Synthetic oligonucleotide
acgttatgggtttgcgttcggacgtccgga

SEQ ID NO: 373316 - DNA, 30 bp, Artificial Sequence
  Synthetic oligonucleotide
cccgactgtttcctgggggtgccgtccgga

SEQ ID NO: 373317 - DNA, 30 bp, Artificial Sequence
  Synthetic oligonucleotide
agagagagaaatttctccctgcgttccgga

SEQ ID NO: 373318 - DNA, 30 bp, Artificial Sequence
  Synthetic oligonucleotide
tagcgggtgtacctaggggtcttttccgga

SEQ ID NO: 373319 - DNA, 30 bp, Artificial Sequence
  Synthetic oligonucleotide
gcctagccgaggggtctcaacccaagcgga

SEQ ID NO: 373320 - DNA, 30 bp, Artificial Sequence
  Synthetic oligonucleotide
aggatttataggtcggcgttattaagcgga

SEQ ID NO: 373321 - DNA, 30 bp, Artificial Sequence
  Synthetic oligonucleotide
ggcaatgagtaggctctaggggacagcgga

SEQ ID NO: 373322 - DNA, 30 bp, Artificial Sequence
  Synthetic oligonucleotide
tggttgggtcgagttgtgatatcgagcgga

SEQ ID NO: 373323 - DNA, 30 bp, Artificial Sequence
  Synthetic oligonucleotide
atagttcggaaaagactgttgcatagcgga

SEQ ID NO: 373324 - DNA, 30 bp, Artificial Sequence
  Synthetic oligonucleotide
ttgtttgaagccagtacaacaattagcgga

SEQ ID NO: 373325 - DNA, 30 bp, Artificial Sequence
  Synthetic oligonucleotide
cgctcttgtgcgtcccagtaaggccgcgga

SEQ ID NO: 373326 - DNA, 30 bp, Artificial Sequence
  Synthetic oligonucleotide
gaaaagtgacctcttggggggcagcgcgga

SEQ ID NO: 373327 - DNA, 30 bp, Artificial Sequence
  Synthetic oligonucleotide
actggggcagttcaaacggctataggcgga

SEQ ID NO: 373328 - DNA, 30 bp, Artificial Sequence
  Synthetic oligonucleotide
ctggcgctcattacgagtgaggccggcgga

SEQ ID NO: 373329 - DNA, 30 bp, Artificial Sequence
  Synthetic oligonucleotide
aaactttacgattgacttcaagcgggcgga

SEQ ID NO: 373330 - DNA, 30 bp, Artificial Sequence
  Synthetic oligonucleotide
aagcctttacgaaaaggtttatactgcgga

SEQ ID NO: 373331 - DNA, 31 bp, Artificial Sequence
  Synthetic oligonucleotide
ctacaaccggccgcaacgttatatgtgcgga

SEQ ID NO: 373332 - DNA, 30 bp, Artificial Sequence
  Synthetic oligonucleotide
atgatttgctgcgctccccgcaaaatcgga

SEQ ID NO: 373333 - DNA, 30 bp, Artificial Sequence
  Synthetic oligonucleotide
ttattttaatgagatgttggttaaatcgga

SEQ ID NO: 373334 - DNA, 30 bp, Artificial Sequence
  Synthetic oligonucleotide
atgatagatactggtagatctggaatcgga

SEQ ID NO: 373335 - DNA, 30 bp, Artificial Sequence
  Synthetic oligonucleotide
gcgtaatattacgcatataagtatatcgga

SEQ ID NO: 373336 - DNA, 30 bp, Artificial Sequence
  Synthetic oligonucleotide
gtaggatatgctacagctttccttatcgga

SEQ ID NO: 373337 - DNA, 30 bp, Artificial Sequence
  Synthetic oligonucleotide
aagttccaacgaccggccccgtttatcgga

SEQ ID NO: 373338 - DNA, 30 bp, Artificial Sequence
  Synthetic oligonucleotide
gtgctctcttcatgcgaacgcctactcgga

SEQ ID NO: 373339 - DNA, 30 bp, Artificial Sequence
  Synthetic oligonucleotide
tgaatcaagtccggcaacagggagctcgga

SEQ ID NO: 373340 - DNA, 30 bp, Artificial Sequence
  Synthetic oligonucleotide
ggatatgctaggatttgtagacaagtcgga

SEQ ID NO: 373341 - DNA, 30 bp, Artificial Sequence
  Synthetic oligonucleotide
atacacggtagtcaatgttcaacagtcgga

SEQ ID NO: 373342 - DNA, 30 bp, Artificial Sequence
  Synthetic oligonucleotide
atcaacggcgatgacatatatacagtcgga

SEQ ID NO: 373343 - DNA, 30 bp, Artificial Sequence
  Synthetic oligonucleotide
gtcttaaactttctggtaagataggtcgga

SEQ ID NO: 373344 - DNA, 30 bp, Artificial Sequence
  Synthetic oligonucleotide
tttacagtattagtgttaatgacattcgga

SEQ ID NO: 373345 - DNA, 30 bp, Artificial Sequence
  Synthetic oligonucleotide
gctgtacgccccgagcattacaagttcgga

SEQ ID NO: 373346 - DNA, 30 bp, Artificial Sequence
  Synthetic oligonucleotide
taaaactcgtacggtctgagacagttcgga

SEQ ID NO: 373347 - DNA, 30 bp, Artificial Sequence
  Synthetic oligonucleotide
gcaacggcggccagaccatcgtggttcgga

SEQ ID NO: 373348 - DNA, 30 bp, Artificial Sequence
  Synthetic oligonucleotide
tgccaagggtgagccctgggggatttcgga

SEQ ID NO: 373349 - DNA, 30 bp, Artificial Sequence
  Synthetic oligonucleotide
aaaaccctagctagcccagattatttcgga

SEQ ID NO: 373350 - DNA, 30 bp, Artificial Sequence
  Synthetic oligonucleotide
agaatctgacctacaatggcttgtttcgga

SEQ ID NO: 373351 - DNA, 30 bp, Artificial Sequence
  Synthetic oligonucleotide
aaggctccgtagcagggacgttgtttcgga

SEQ ID NO: 373352 - DNA, 30 bp, Artificial Sequence
  Synthetic oligonucleotide
agatcgatgcgccgcacataacttttcgga

SEQ ID NO: 373353 - DNA, 30 bp, Artificial Sequence
  Synthetic oligonucleotide
catttatgtccaggactcatgtaaaaggga

SEQ ID NO: 373354 - DNA, 30 bp, Artificial Sequence
  Synthetic oligonucleotide
atattactgacagccggcatttccaaggga

SEQ ID NO: 373355 - DNA, 30 bp, Artificial Sequence
  Synthetic oligonucleotide
aatgcaggacacgaggcagacgtcaaggga

SEQ ID NO: 373356 - DNA, 30 bp, Artificial Sequence
  Synthetic oligonucleotide
caattcagtatgttatggactcagaaggga

SEQ ID NO: 373357 - DNA, 30 bp, Artificial Sequence
  Synthetic oligonucleotide
cctagtggcggggcagcggattagaaggga

SEQ ID NO: 373358 - DNA, 30 bp, Artificial Sequence
  Synthetic oligonucleotide
atttacgtatctaaaaactctgcgaaggga

SEQ ID NO: 373359 - DNA, 30 bp, Artificial Sequence
  Synthetic oligonucleotide
gcgacgcctccactgtaagtttcgaaggga

SEQ ID NO: 373360 - DNA, 30 bp, Artificial Sequence
  Synthetic oligonucleotide
ttgtcgagtttgcgtgaaacattgaaggga

SEQ ID NO: 373361 - DNA, 29 bp, Artificial Sequence
  Synthetic oligonucleotide
ggtgccaccgggttattgaacataaggga

SEQ ID NO: 373362 - DNA, 30 bp, Artificial Sequence
  Synthetic oligonucleotide
gacagcggtgcgcccccctacactaaggga

SEQ ID NO: 373363 - DNA, 30 bp, Artificial Sequence
  Synthetic oligonucleotide
ccctgatttctcatctgggatactaaggga

SEQ ID NO: 373364 - DNA, 30 bp, Artificial Sequence
  Synthetic oligonucleotide
ctattactagggttattgtaagttaaggga

SEQ ID NO: 373365 - DNA, 30 bp, Artificial Sequence
  Synthetic oligonucleotide
tagcccgcaaactggacctggtaacaggga

SEQ ID NO: 373366 - DNA, 30 bp, Artificial Sequence
  Synthetic oligonucleotide
ttctgctttgggtagacggggagacaggga

SEQ ID NO: 373367 - DNA, 30 bp, Artificial Sequence
  Synthetic oligonucleotide
tcttatttctatcatgtagaaagccaggga

SEQ ID NO: 373368 - DNA, 30 bp, Artificial Sequence
  Synthetic oligonucleotide
gtggggtcagtgtgacctgggtgccaggga

SEQ ID NO: 373369 - DNA, 30 bp, Artificial Sequence
  Synthetic oligonucleotide
aggctgtcggttggcaagcaagtgcaggga

SEQ ID NO: 373370 - DNA, 30 bp, Artificial Sequence
  Synthetic oligonucleotide
ttcactcgggggtcgtccgtccgtcaggga

SEQ ID NO: 373371 - DNA, 30 bp, Artificial Sequence
  Synthetic oligonucleotide
ctcggcgataggaatacaggtcttcaggga

SEQ ID NO: 373372 - DNA, 30 bp, Artificial Sequence
  Synthetic oligonucleotide
tcctgcctagccgttggtagctttcaggga

SEQ ID NO: 373373 - DNA, 30 bp, Artificial Sequence
  Synthetic oligonucleotide
aagcattcggtccatagtgtttttcaggga

SEQ ID NO: 373374 - DNA, 30 bp, Artificial Sequence
  Synthetic oligonucleotide
gcgcaggaccgtcctcatagtcaagaggga

SEQ ID NO: 373375 - DNA, 31 bp, Artificial Sequence
  Synthetic oligonucleotide
gtttccaggttagatactagacggagaggga

SEQ ID NO: 373376 - DNA, 30 bp, Artificial Sequence
  Synthetic oligonucleotide
tctgagaattttccatgtgggaacgaggga

SEQ ID NO: 373377 - DNA, 30 bp, Artificial Sequence
  Synthetic oligonucleotide
cgcgcaaactgatcctgtacgcgggaggga

SEQ ID NO: 373378 - DNA, 30 bp, Artificial Sequence
  Synthetic oligonucleotide
atccgggggctcttaaccccgtgggaggga

SEQ ID NO: 373379 - DNA, 30 bp, Artificial Sequence
  Synthetic oligonucleotide
aaacatctgctcgataattggcgtgaggga

SEQ ID NO: 373380 - DNA, 30 bp, Artificial Sequence
  Synthetic oligonucleotide
gtgccaaacggcctacccaccaaataggga

SEQ ID NO: 373381 - DNA, 30 bp, Artificial Sequence
  Synthetic oligonucleotide
caagcggggggtctcctgccagaataggga

SEQ ID NO: 373382 - DNA, 30 bp, Artificial Sequence
  Synthetic oligonucleotide
gtagaatgttctcttaataagcgataggga

SEQ ID NO: 373383 - DNA, 30 bp, Artificial Sequence
  Synthetic oligonucleotide
tgtagttgatctacatatctcaactaggga

SEQ ID NO: 373384 - DNA, 30 bp, Artificial Sequence
  Synthetic oligonucleotide
cccgatatatatttccaaatcgactaggga

SEQ ID NO: 373385 - DNA, 30 bp, Artificial Sequence
  Synthetic oligonucleotide
ggctggttctggggaacgttttactaggga

SEQ ID NO: 373386 - DNA, 30 bp, Artificial Sequence
  Synthetic oligonucleotide
acggttccgcaagtggcgcgcgggtaggga

SEQ ID NO: 373387 - DNA, 30 bp, Artificial Sequence
  Synthetic oligonucleotide
tcgggccgttcaacttgtctactgtaggga

SEQ ID NO: 373388 - DNA, 30 bp, Artificial Sequence
  Synthetic oligonucleotide
tgcaaatttttggacgctctacattaggga

SEQ ID NO: 373389 - DNA, 30 bp, Artificial Sequence
  Synthetic oligonucleotide
tgaaagacatgatatagcgggctttaggga

SEQ ID NO: 373390 - DNA, 30 bp, Artificial Sequence
  Synthetic oligonucleotide
atatcgtggcgcttatactaacaaacggga

SEQ ID NO: 373391 - DNA, 30 bp, Artificial Sequence
  Synthetic oligonucleotide
attgttggcctcgacgagcaggcaacggga

SEQ ID NO: 373392 - DNA, 30 bp, Artificial Sequence
  Synthetic oligonucleotide
atgatcctaaatcattaggattcaacggga

SEQ ID NO: 373393 - DNA, 30 bp, Artificial Sequence
  Synthetic oligonucleotide
ggggttcacaattaacccattggaacggga

SEQ ID NO: 373394 - DNA, 30 bp, Artificial Sequence
  Synthetic oligonucleotide
ttgtgacgagcgtcgggagctcccacggga

SEQ ID NO: 373395 - DNA, 30 bp, Artificial Sequence
  Synthetic oligonucleotide
gagacacgtcgtaattgactttgcacggga

SEQ ID NO: 373396 - DNA, 30 bp, Artificial Sequence
  Synthetic oligonucleotide
tccacgcgtgacatcgcgtcatatacggga

SEQ ID NO: 373397 - DNA, 30 bp, Artificial Sequence
  Synthetic oligonucleotide
gggttagtcaagagtgatacccctacggga

SEQ ID NO: 373398 - DNA, 30 bp, Artificial Sequence
  Synthetic oligonucleotide
aaactgcttgctggcatgattcaaccggga

SEQ ID NO: 373399 - DNA, 30 bp, Artificial Sequence
  Synthetic oligonucleotide
cttcatgtacggacaataatcggaccggga

SEQ ID NO: 373400 - DNA, 30 bp, Artificial Sequence
  Synthetic oligonucleotide
agcaatgaagaggcatactccctaccggga

SEQ ID NO: 373401 - DNA, 30 bp, Artificial Sequence
  Synthetic oligonucleotide
ttttacttgttgagtcggtctgtaccggga

SEQ ID NO: 373402 - DNA, 30 bp, Artificial Sequence
  Synthetic oligonucleotide
tttcgtgcgtgagaaatatggctcccggga

SEQ ID NO: 373403 - DNA, 30 bp, Artificial Sequence
  Synthetic oligonucleotide
cccagtctcgccggaatcggtctcccggga

SEQ ID NO: 373404 - DNA, 30 bp, Artificial Sequence
  Synthetic oligonucleotide
ctgcaagtctctgcggaaagttggccggga

SEQ ID NO: 373405 - DNA, 30 bp, Artificial Sequence
  Synthetic oligonucleotide
ataccaccttgccatatcgacggtccggga

SEQ ID NO: 373406 - DNA, 30 bp, Artificial Sequence
  Synthetic oligonucleotide
aaaaagcggggtacagatgattgtccggga

SEQ ID NO: 373407 - DNA, 30 bp, Artificial Sequence
  Synthetic oligonucleotide
ttttcgatcggatgaacgaaccgagcggga

SEQ ID NO: 373408 - DNA, 30 bp, Artificial Sequence
  Synthetic oligonucleotide
cagtgtagtttagggaccatcggagcggga

SEQ ID NO: 373409 - DNA, 30 bp, Artificial Sequence
  Synthetic oligonucleotide
ctcttggacttatacccatttgccgcggga

SEQ ID NO: 373410 - DNA, 30 bp, Artificial Sequence
  Synthetic oligonucleotide
tacacgggcttgtatagaggaccggcggga

SEQ ID NO: 373411 - DNA, 30 bp, Artificial Sequence
  Synthetic oligonucleotide
ggcgcctttctctcgcccatataatcggga

SEQ ID NO: 373412 - DNA, 30 bp, Artificial Sequence
  Synthetic oligonucleotide
acacgatgatgagaatatcctttatcggga

SEQ ID NO: 373413 - DNA, 30 bp, Artificial Sequence
  Synthetic oligonucleotide
aagtttctaacctcgctccccggctcggga

SEQ ID NO: 373414 - DNA, 30 bp, Artificial Sequence
  Synthetic oligonucleotide
tagactccgtaactcaggctctgctcggga

SEQ ID NO: 373415 - DNA, 30 bp, Artificial Sequence
  Synthetic oligonucleotide
atttgaatgcatgatatgtatacgtcggga

SEQ ID NO: 373416 - DNA, 30 bp, Artificial Sequence
  Synthetic oligonucleotide
gataataagtaccatgtcttagcgtcggga

SEQ ID NO: 373417 - DNA, 30 bp, Artificial Sequence
  Synthetic oligonucleotide
cgtaattggatacacttaataatttcggga

SEQ ID NO: 373418 - DNA, 29 bp, Artificial Sequence
  Synthetic oligonucleotide
taagttgccctacaccatgtcccagggga

SEQ ID NO: 373419 - DNA, 30 bp, Artificial Sequence
  Synthetic oligonucleotide
cgagtttagtatcgtgtcggggccagggga

SEQ ID NO: 373420 - DNA, 30 bp, Artificial Sequence
  Synthetic oligonucleotide
ctccctggcaacctacggtccggcagggga

SEQ ID NO: 373421 - DNA, 30 bp, Artificial Sequence
  Synthetic oligonucleotide
attctcaagggttggagtggcctcagggga

SEQ ID NO: 373422 - DNA, 30 bp, Artificial Sequence
  Synthetic oligonucleotide
acatcatgtaggagagacatacggagggga

SEQ ID NO: 373423 - DNA, 31 bp, Artificial Sequence
  Synthetic oligonucleotide
ggagagggtgactcattaaaccttgagggga

SEQ ID NO: 373424 - DNA, 30 bp, Artificial Sequence
  Synthetic oligonucleotide
gcctggcccacgtaaggggtcactagggga

SEQ ID NO: 373425 - DNA, 30 bp, Artificial Sequence
  Synthetic oligonucleotide
tgctcgtatatgattacacggactagggga

SEQ ID NO: 373426 - DNA, 30 bp, Artificial Sequence
  Synthetic oligonucleotide
gctcgtctccttgtcccactagctagggga

SEQ ID NO: 373427 - DNA, 30 bp, Artificial Sequence
  Synthetic oligonucleotide
tcagtatattggggacaattctgtagggga

SEQ ID NO: 373428 - DNA, 30 bp, Artificial Sequence
  Synthetic oligonucleotide
aggattcgcttagagacaacaagacgggga

SEQ ID NO: 373429 - DNA, 30 bp, Artificial Sequence
  Synthetic oligonucleotide
tttccgaccagggacttaaattgacgggga

SEQ ID NO: 373430 - DNA, 30 bp, Artificial Sequence
  Synthetic oligonucleotide
ccggcgggtgacgatgctcccggccgggga

SEQ ID NO: 373431 - DNA, 30 bp, Artificial Sequence
  Synthetic oligonucleotide
tagcaactgccgtcattcccaaagcgggga

SEQ ID NO: 373432 - DNA, 30 bp, Artificial Sequence
  Synthetic oligonucleotide
tgcgtcgttcaagactccattacgcgggga

SEQ ID NO: 373433 - DNA, 30 bp, Artificial Sequence
  Synthetic oligonucleotide
gtcactgtaccgcctcaataccggcgggga

SEQ ID NO: 373434 - DNA, 30 bp, Artificial Sequence
  Synthetic oligonucleotide
agaggtttgcgaagacactcccggcgggga

SEQ ID NO: 373435 - DNA, 30 bp, Artificial Sequence
  Synthetic oligonucleotide
tcggtacggacctaggtgccgcatcgggga

SEQ ID NO: 373436 - DNA, 30 bp, Artificial Sequence
  Synthetic oligonucleotide
cccgattacagctacgaccgtcctcgggga

SEQ ID NO: 373437 - DNA, 30 bp, Artificial Sequence
  Synthetic oligonucleotide
gacaacgattgcaagcttgcttttcgggga

SEQ ID NO: 373438 - DNA, 40 bp, Artificial Sequence
  Synthetic oligonucleotide
aagataataaattcatggtatggtcggggaccggggggga

SEQ ID NO: 373439 - DNA, 40 bp, Artificial Sequence
  Synthetic oligonucleotide
aagataatacattcatggtatgatcggggatcggggggga

SEQ ID NO: 373440 - DNA, 40 bp, Artificial Sequence
  Synthetic oligonucleotide
aagattatacattcatggtatggtcggggatcggggggga

SEQ ID NO: 373441 - DNA, 40 bp, Artificial Sequence
  Synthetic oligonucleotide
aagataatacattcatggtctggtcggggatcggggggga

SEQ ID NO: 373442 - DNA, 40 bp, Artificial Sequence
  Synthetic oligonucleotide
aagataatacattcatggtttggtcggggatcggggggga

SEQ ID NO: 373443 - DNA, 37 bp, Artificial Sequence
  Synthetic oligonucleotide
aagataatacattcatggtgtcggggatcggggggga

SEQ ID NO: 373444 - DNA, 38 bp, Artificial Sequence
  Synthetic oligonucleotide
aagataatacattcatggtatggtcggggatgggggga

SEQ ID NO: 373445 - DNA, 31 bp, Artificial Sequence
  Synthetic oligonucleotide
tttttgttgttgaatgtagggcgtgggggga

SEQ ID NO: 373446 - DNA, 30 bp, Artificial Sequence
  Synthetic oligonucleotide
ggcgtcgcggcatgaacgttaaatggggga

SEQ ID NO: 373447 - DNA, 30 bp, Artificial Sequence
  Synthetic oligonucleotide
ggaatgtgacccctacttggtgatggggga

SEQ ID NO: 373448 - DNA, 30 bp, Artificial Sequence
  Synthetic oligonucleotide
ctagttaggctattacatcaccttggggga

SEQ ID NO: 373449 - DNA, 30 bp, Artificial Sequence
  Synthetic oligonucleotide
aactgatatgacattcccccttttggggga

SEQ ID NO: 373450 - DNA, 30 bp, Artificial Sequence
  Synthetic oligonucleotide
aagcgtcgactctcacaaaccggatgggga

SEQ ID NO: 373451 - DNA, 30 bp, Artificial Sequence
  Synthetic oligonucleotide
tggggggtcaaccaagcttgaccttgggga

SEQ ID NO: 373452 - DNA, 30 bp, Artificial Sequence
  Synthetic oligonucleotide
gtattagtactgattgactgtgtttgggga

SEQ ID NO: 373453 - DNA, 30 bp, Artificial Sequence
  Synthetic oligonucleotide
gtattttaagctacagacagaagaatggga

SEQ ID NO: 373454 - DNA, 30 bp, Artificial Sequence
  Synthetic oligonucleotide
tccagagggtcaacaattagtataatggga

SEQ ID NO: 373455 - DNA, 30 bp, Artificial Sequence
  Synthetic oligonucleotide
caatatcatcctctagcgatgttaatggga

SEQ ID NO: 373456 - DNA, 30 bp, Artificial Sequence
  Synthetic oligonucleotide
cgaaggcgttggcttcctacacgcatggga

SEQ ID NO: 373457 - DNA, 30 bp, Artificial Sequence
  Synthetic oligonucleotide
cacgagcttccccgtggactcggcatggga

SEQ ID NO: 373458 - DNA, 30 bp, Artificial Sequence
  Synthetic oligonucleotide
gtgttcaagcgtttttcggtctagatggga

SEQ ID NO: 373459 - DNA, 30 bp, Artificial Sequence
  Synthetic oligonucleotide
aagcatgtgtcaccataaccatggatggga

SEQ ID NO: 373460 - DNA, 30 bp, Artificial Sequence
  Synthetic oligonucleotide
acccgtagcgatgaatatgtcactatggga

SEQ ID NO: 373461 - DNA, 30 bp, Artificial Sequence
  Synthetic oligonucleotide
caaattacgtttgccacaccaagtatggga

SEQ ID NO: 373462 - DNA, 30 bp, Artificial Sequence
  Synthetic oligonucleotide
cattagtgggtgcgaaggctggttatggga

SEQ ID NO: 373463 - DNA, 30 bp, Artificial Sequence
  Synthetic oligonucleotide
atagccttgctttgacagcaacacctggga

SEQ ID NO: 373464 - DNA, 30 bp, Artificial Sequence
  Synthetic oligonucleotide
tattcgataacgaacattgtagtcctggga

SEQ ID NO: 373465 - DNA, 30 bp, Artificial Sequence
  Synthetic oligonucleotide
cttacgtggtataccgacgatcagctggga

SEQ ID NO: 373466 - DNA, 30 bp, Artificial Sequence
  Synthetic oligonucleotide
gttactaaatggccctagaggttgctggga

SEQ ID NO: 373467 - DNA, 30 bp, Artificial Sequence
  Synthetic oligonucleotide
gtttagccggggtcatgttacggtctggga

SEQ ID NO: 373468 - DNA, 30 bp, Artificial Sequence
  Synthetic oligonucleotide
gcgccttacaaggctggtcaggtagtggga

SEQ ID NO: 373469 - DNA, 30 bp, Artificial Sequence
  Synthetic oligonucleotide
ctttaaagggcgaaggaaacggtcgtggga

SEQ ID NO: 373470 - DNA, 30 bp, Artificial Sequence
  Synthetic oligonucleotide
tatctgtagcgtgctcttcttacggtggga

SEQ ID NO: 373471 - DNA, 30 bp, Artificial Sequence
  Synthetic oligonucleotide
actcaacatgagcacaacctgtatgtggga

SEQ ID NO: 373472 - DNA, 30 bp, Artificial Sequence
  Synthetic oligonucleotide
tacgtgaaatttaggcaagagcctgtggga

SEQ ID NO: 373473 - DNA, 30 bp, Artificial Sequence
  Synthetic oligonucleotide
gcgcacgtcagcgagcacctatgtgtggga

SEQ ID NO: 373474 - DNA, 30 bp, Artificial Sequence
  Synthetic oligonucleotide
aggcttcaatgacactgtatagtattggga

SEQ ID NO: 373475 - DNA, 30 bp, Artificial Sequence
  Synthetic oligonucleotide
aaatcattcacacctgattaatgcttggga

SEQ ID NO: 373476 - DNA, 30 bp, Artificial Sequence
  Synthetic oligonucleotide
cggtttaatatcgtgctggcctggttggga

SEQ ID NO: 373477 - DNA, 30 bp, Artificial Sequence
  Synthetic oligonucleotide
ttctctaggccgcgatagtatgtgttggga

SEQ ID NO: 373478 - DNA, 30 bp, Artificial Sequence
  Synthetic oligonucleotide
acaatgcttttcagtgtattacatttggga

SEQ ID NO: 373479 - DNA, 30 bp, Artificial Sequence
  Synthetic oligonucleotide
gggggtctatcgcccgttaagtgtttggga

SEQ ID NO: 373480 - DNA, 30 bp, Artificial Sequence
  Synthetic oligonucleotide
tgtagtccggtaagccactttgaaaatgga

SEQ ID NO: 373481 - DNA, 30 bp, Artificial Sequence
  Synthetic oligonucleotide
aagctctcataatgccacgcatacaatgga

SEQ ID NO: 373482 - DNA, 30 bp, Artificial Sequence
  Synthetic oligonucleotide
catagttccatccccggggaagagaatgga

SEQ ID NO: 373483 - DNA, 30 bp, Artificial Sequence
  Synthetic oligonucleotide
cttcgtattcgcagacctagattgaatgga

SEQ ID NO: 373484 - DNA, 30 bp, Artificial Sequence
  Synthetic oligonucleotide
cggcccgacatagagatctatcataatgga

SEQ ID NO: 373485 - DNA, 30 bp, Artificial Sequence
  Synthetic oligonucleotide
gtcactatcatgttgctttattaacatgga

SEQ ID NO: 373486 - DNA, 30 bp, Artificial Sequence
  Synthetic oligonucleotide
caagtaggagactttatcgaccgccatgga

SEQ ID NO: 373487 - DNA, 30 bp, Artificial Sequence
  Synthetic oligonucleotide
gatcagtcgtcattgccatcgactcatgga

SEQ ID NO: 373488 - DNA, 31 bp, Artificial Sequence
  Synthetic oligonucleotide
gtttgccacaagagaaggctaaggtcatgga

SEQ ID NO: 373489 - DNA, 30 bp, Artificial Sequence
  Synthetic oligonucleotide
tataatatgatttgcagggcgaaagatgga

SEQ ID NO: 373490 - DNA, 30 bp, Artificial Sequence
  Synthetic oligonucleotide
acaggtgtactatcccgataatccgatgga

SEQ ID NO: 373491 - DNA, 30 bp, Artificial Sequence
  Synthetic oligonucleotide
ccgggcactttggatggcaacaaggatgga

SEQ ID NO: 373492 - DNA, 30 bp, Artificial Sequence
  Synthetic oligonucleotide
gaaaatagcaaattggacagcgatgatgga

SEQ ID NO: 373493 - DNA, 30 bp, Artificial Sequence
  Synthetic oligonucleotide
tccacgtgcatccactaaccatatgatgga

SEQ ID NO: 373494 - DNA, 30 bp, Artificial Sequence
  Synthetic oligonucleotide
gggttccgggggggtaagttcagtgatgga

SEQ ID NO: 373495 - DNA, 30 bp, Artificial Sequence
  Synthetic oligonucleotide
tgcagaatataggcaatccagcaatatgga

SEQ ID NO: 373496 - DNA, 30 bp, Artificial Sequence
  Synthetic oligonucleotide
gatcgcgtgctcgagtatatgccatatgga

SEQ ID NO: 373497 - DNA, 30 bp, Artificial Sequence
  Synthetic oligonucleotide
attctgttatgctacacactgctatatgga

SEQ ID NO: 373498 - DNA, 30 bp, Artificial Sequence
  Synthetic oligonucleotide
agggtactcataaaaccagggttatatgga

SEQ ID NO: 373499 - DNA, 30 bp, Artificial Sequence
  Synthetic oligonucleotide
taagcagcaacacgaccttgtttatatgga

SEQ ID NO: 373500 - DNA, 30 bp, Artificial Sequence
  Synthetic oligonucleotide
ggatgggtttgccagttattgctctatgga

SEQ ID NO: 373501 - DNA, 28 bp, Artificial Sequence
  Synthetic oligonucleotide
gaaagttgggaaaagatgggtctatgga

SEQ ID NO: 373502 - DNA, 30 bp, Artificial Sequence
  Synthetic oligonucleotide
aaagatcttgaagttgggtgacattatgga

SEQ ID NO: 373503 - DNA, 30 bp, Artificial Sequence
  Synthetic oligonucleotide
acaaaagctgtcggggcttagccttatgga

SEQ ID NO: 373504 - DNA, 30 bp, Artificial Sequence
  Synthetic oligonucleotide
tactagattaattcgacgtatgaaactgga

SEQ ID NO: 373505 - DNA, 30 bp, Artificial Sequence
  Synthetic oligonucleotide
aagggcggccgtcagttttacacaactgga

SEQ ID NO: 373506 - DNA, 31 bp, Artificial Sequence
  Synthetic oligonucleotide
gctgctgagtatattaaacggcacaactgga

SEQ ID NO: 373507 - DNA, 30 bp, Artificial Sequence
  Synthetic oligonucleotide
ctatattggggtggtgcgcctagaactgga

SEQ ID NO: 373508 - DNA, 30 bp, Artificial Sequence
  Synthetic oligonucleotide
aagcatcagtcgacgcccagcgccactgga

SEQ ID NO: 373509 - DNA, 30 bp, Artificial Sequence
  Synthetic oligonucleotide
aatgccgtaaagcatgccccgatcactgga

SEQ ID NO: 373510 - DNA, 30 bp, Artificial Sequence
  Synthetic oligonucleotide
agctttttgaacaggtcgaatctgactgga

SEQ ID NO: 373511 - DNA, 30 bp, Artificial Sequence
  Synthetic oligonucleotide
atggccctggaaataggtagataacctgga

SEQ ID NO: 373512 - DNA, 30 bp, Artificial Sequence
  Synthetic oligonucleotide
ggctcactcttaactatatagcgacctgga

SEQ ID NO: 373513 - DNA, 30 bp, Artificial Sequence
  Synthetic oligonucleotide
ttcaacttggctaagcgtaaaggacctgga

SEQ ID NO: 373514 - DNA, 30 bp, Artificial Sequence
  Synthetic oligonucleotide
gatatctaggagctagatcagggacctgga

SEQ ID NO: 373515 - DNA, 30 bp, Artificial Sequence
  Synthetic oligonucleotide
tattcaccgcccaaaatgtaatgacctgga

SEQ ID NO: 373516 - DNA, 30 bp, Artificial Sequence
  Synthetic oligonucleotide
tggtcaattattgtcgtacttcaccctgga

SEQ ID NO: 373517 - DNA, 30 bp, Artificial Sequence
  Synthetic oligonucleotide
cctgcgtatcatgggatagttgaccctgga

SEQ ID NO: 373518 - DNA, 30 bp, Artificial Sequence
  Synthetic oligonucleotide
ggtatatggctaggaccgctactccctgga

SEQ ID NO: 373519 - DNA, 30 bp, Artificial Sequence
  Synthetic oligonucleotide
agaatttcctgtaacggcaatttccctgga

SEQ ID NO: 373520 - DNA, 30 bp, Artificial Sequence
  Synthetic oligonucleotide
ccaatcgctacgtcatgcacggggcctgga

SEQ ID NO: 373521 - DNA, 30 bp, Artificial Sequence
  Synthetic oligonucleotide
gagtccaaccaaaacatcatgttgcctgga

SEQ ID NO: 373522 - DNA, 30 bp, Artificial Sequence
  Synthetic oligonucleotide
atccaataacggagcacaatctttcctgga

SEQ ID NO: 373523 - DNA, 30 bp, Artificial Sequence
  Synthetic oligonucleotide
cgcggacaaacctttcgtccgaaagctgga

SEQ ID NO: 373524 - DNA, 30 bp, Artificial Sequence
  Synthetic oligonucleotide
cccaagccacgtcataatgggtacgctgga

SEQ ID NO: 373525 - DNA, 30 bp, Artificial Sequence
  Synthetic oligonucleotide
tagttgctaggtttcacgccaatcgctgga

SEQ ID NO: 373526 - DNA, 30 bp, Artificial Sequence
  Synthetic oligonucleotide
ggaactcagcctaacatctgcttcgctgga

SEQ ID NO: 373527 - DNA, 30 bp, Artificial Sequence
  Synthetic oligonucleotide
cgccccattggccaccagtggtaggctgga

SEQ ID NO: 373528 - DNA, 31 bp, Artificial Sequence
  Synthetic oligonucleotide
tgtcatacgatccttagtgacagatgctgga

SEQ ID NO: 373529 - DNA, 30 bp, Artificial Sequence
  Synthetic oligonucleotide
aaaagccaacggttttgaacttctgctgga

SEQ ID NO: 373530 - DNA, 30 bp, Artificial Sequence
  Synthetic oligonucleotide
tggtatatgtgtagattatttcgtgctgga

SEQ ID NO: 373531 - DNA, 30 bp, Artificial Sequence
  Synthetic oligonucleotide
cagagacggcagagccgttcgtgtgctgga

SEQ ID NO: 373532 - DNA, 30 bp, Artificial Sequence
  Synthetic oligonucleotide
ttatccgatgctattagccgtatatctgga

SEQ ID NO: 373533 - DNA, 30 bp, Artificial Sequence
  Synthetic oligonucleotide
gagtggccaacatattataagctatctgga

SEQ ID NO: 373534 - DNA, 37 bp, Artificial Sequence
  Synthetic oligonucleotide
tgttttccttcttacctttatgctgcgtcactctgga

SEQ ID NO: 373535 - DNA, 30 bp, Artificial Sequence
  Synthetic oligonucleotide
cctggggagaagccacatggtcactctgga

SEQ ID NO: 373536 - DNA, 30 bp, Artificial Sequence
  Synthetic oligonucleotide
aatatcaacacccgtatgttcagctctgga

SEQ ID NO: 373537 - DNA, 30 bp, Artificial Sequence
  Synthetic oligonucleotide
acattggacggaacaaagtgactctctgga

SEQ ID NO: 373538 - DNA, 30 bp, Artificial Sequence
  Synthetic oligonucleotide
ttttgacctacctcaacagacgtgtctgga

SEQ ID NO: 373539 - DNA, 30 bp, Artificial Sequence
  Synthetic oligonucleotide
gcgaggtgtatcttggcctcggtgtctgga

SEQ ID NO: 373540 - DNA, 30 bp, Artificial Sequence
  Synthetic oligonucleotide
tgtttaatgggcaattaagttaattctgga

SEQ ID NO: 373541 - DNA, 30 bp, Artificial Sequence
  Synthetic oligonucleotide
tcattattaggatgccggacgacttctgga

SEQ ID NO: 373542 - DNA, 30 bp, Artificial Sequence
  Synthetic oligonucleotide
gccttagatggacttagaggtgcttctgga

SEQ ID NO: 373543 - DNA, 30 bp, Artificial Sequence
  Synthetic oligonucleotide
acaatgactgttgtaggctgcaggagtgga

SEQ ID NO: 373544 - DNA, 30 bp, Artificial Sequence
  Synthetic oligonucleotide
cgttaccttcggtaccagcatcatagtgga

SEQ ID NO: 373545 - DNA, 30 bp, Artificial Sequence
  Synthetic oligonucleotide
caagcaggggctctggaaagaggtagtgga

SEQ ID NO: 373546 - DNA, 30 bp, Artificial Sequence
  Synthetic oligonucleotide
atttgtcgactggcccaccgttgtagtgga

SEQ ID NO: 373547 - DNA, 30 bp, Artificial Sequence
  Synthetic oligonucleotide
ttatcgttttggggactaattccacgtgga

SEQ ID NO: 373548 - DNA, 30 bp, Artificial Sequence
  Synthetic oligonucleotide
aaatctcgcaagtcatatccatagcgtgga

SEQ ID NO: 373549 - DNA, 30 bp, Artificial Sequence
  Synthetic oligonucleotide
tggaatagaggtggaggactgtagcgtgga

SEQ ID NO: 373550 - DNA, 30 bp, Artificial Sequence
  Synthetic oligonucleotide
cgttcaggctcccatgaatgggatcgtgga

SEQ ID NO: 373551 - DNA, 30 bp, Artificial Sequence
  Synthetic oligonucleotide
gcatcactgacttgcccatgcattcgtgga

SEQ ID NO: 373552 - DNA, 30 bp, Artificial Sequence
  Synthetic oligonucleotide
tacttggtcgagaattccctatttcgtgga

SEQ ID NO: 373553 - DNA, 30 bp, Artificial Sequence
  Synthetic oligonucleotide
tcgagttgggtttcgcatatgcaaggtgga

SEQ ID NO: 373554 - DNA, 30 bp, Artificial Sequence
  Synthetic oligonucleotide
ctcttgtctatggcgggtgtttaaggtgga

SEQ ID NO: 373555 - DNA, 30 bp, Artificial Sequence
  Synthetic oligonucleotide
gttgggtattcaactaatactgcaggtgga

SEQ ID NO: 373556 - DNA, 30 bp, Artificial Sequence
  Synthetic oligonucleotide
attaattctcactaactggaatacggtgga

SEQ ID NO: 373557 - DNA, 30 bp, Artificial Sequence
  Synthetic oligonucleotide
cagcctctgcgttgcgcaggtaccggtgga

SEQ ID NO: 373558 - DNA, 30 bp, Artificial Sequence
  Synthetic oligonucleotide
gcccggggactaatgaaaccaccgggtgga

SEQ ID NO: 373559 - DNA, 30 bp, Artificial Sequence
  Synthetic oligonucleotide
ttaacgagaactatcaataacgcgggtgga

SEQ ID NO: 373560 - DNA, 30 bp, Artificial Sequence
  Synthetic oligonucleotide
ggtacgttatgttgaataagctcgggtgga

SEQ ID NO: 373561 - DNA, 30 bp, Artificial Sequence
  Synthetic oligonucleotide
ttgttctgctttcgtgtacgaaggggtgga

SEQ ID NO: 373562 - DNA, 30 bp, Artificial Sequence
  Synthetic oligonucleotide
atggcccggtaaggttatgtggggggtgga

SEQ ID NO: 373563 - DNA, 30 bp, Artificial Sequence
  Synthetic oligonucleotide
ggcggttctagtttggctaattatggtgga

SEQ ID NO: 373564 - DNA, 30 bp, Artificial Sequence
  Synthetic oligonucleotide
gatgaacccgggtgtaccagctttggtgga

SEQ ID NO: 373565 - DNA, 30 bp, Artificial Sequence
  Synthetic oligonucleotide
cgctaggtatgaccctccgcttgatgtgga

SEQ ID NO: 373566 - DNA, 30 bp, Artificial Sequence
  Synthetic oligonucleotide
gacagcaagttagtcgcagccgactgtgga

SEQ ID NO: 373567 - DNA, 30 bp, Artificial Sequence
  Synthetic oligonucleotide
acaggtggctacggtaaccggatctgtgga

SEQ ID NO: 373568 - DNA, 30 bp, Artificial Sequence
  Synthetic oligonucleotide
cctcgttttggctaatggaatatctgtgga

SEQ ID NO: 373569 - DNA, 30 bp, Artificial Sequence
  Synthetic oligonucleotide
atcgccctgctgtcctttgttgagtgtgga

SEQ ID NO: 373570 - DNA, 30 bp, Artificial Sequence
  Synthetic oligonucleotide
accttctaataggtcacgcattcgtgtgga

SEQ ID NO: 373571 - DNA, 30 bp, Artificial Sequence
  Synthetic oligonucleotide
tcgctgcagactcgatgcgcactgtgtgga

SEQ ID NO: 373572 - DNA, 30 bp, Artificial Sequence
  Synthetic oligonucleotide
cttctgaagaccgtccttgtaggttgtgga

SEQ ID NO: 373573 - DNA, 30 bp, Artificial Sequence
  Synthetic oligonucleotide
atgtgtaagtttagcgatgtaaaaattgga

SEQ ID NO: 373574 - DNA, 30 bp, Artificial Sequence
  Synthetic oligonucleotide
gcccaagttgaggtccatcgaccaattgga

SEQ ID NO: 373575 - DNA, 30 bp, Artificial Sequence
  Synthetic oligonucleotide
gcaacaaaaaggccaaataagaccattgga

SEQ ID NO: 373576 - DNA, 30 bp, Artificial Sequence
  Synthetic oligonucleotide
caatttacgtgtagaaagatcttcattgga

SEQ ID NO: 373577 - DNA, 30 bp, Artificial Sequence
  Synthetic oligonucleotide
attgctgcgaagtcctttatgttcattgga

SEQ ID NO: 373578 - DNA, 30 bp, Artificial Sequence
  Synthetic oligonucleotide
ggagtacgggactagtgcggcaagattgga

SEQ ID NO: 373579 - DNA, 30 bp, Artificial Sequence
  Synthetic oligonucleotide
acggcagtaccaactgggtgcgagattgga

SEQ ID NO: 373580 - DNA, 30 bp, Artificial Sequence
  Synthetic oligonucleotide
gcacagaatagccgcttgcgggcgattgga

SEQ ID NO: 373581 - DNA, 30 bp, Artificial Sequence
  Synthetic oligonucleotide
atgcccttagggcaccgtaaggggattgga

SEQ ID NO: 373582 - DNA, 30 bp, Artificial Sequence
  Synthetic oligonucleotide
atcatgtaggacgatgaatatttgattgga

SEQ ID NO: 373583 - DNA, 30 bp, Artificial Sequence
  Synthetic oligonucleotide
ccctgttccaatacgaaggagcatattgga

SEQ ID NO: 373584 - DNA, 30 bp, Artificial Sequence
  Synthetic oligonucleotide
aagtctatttgggtaggtacgcttattgga

SEQ ID NO: 373585 - DNA, 30 bp, Artificial Sequence
  Synthetic oligonucleotide
gaaacacaaacgactaggtttcttattgga

SEQ ID NO: 373586 - DNA, 30 bp, Artificial Sequence
  Synthetic oligonucleotide
tttacaagcacagatttgtcaccacttgga

SEQ ID NO: 373587 - DNA, 30 bp, Artificial Sequence
  Synthetic oligonucleotide
gaagccatttttaaacacttgggacttgga

SEQ ID NO: 373588 - DNA, 30 bp, Artificial Sequence
  Synthetic oligonucleotide
tgttcacacgttaggagaatactacttgga

SEQ ID NO: 373589 - DNA, 30 bp, Artificial Sequence
  Synthetic oligonucleotide
ctcgattaagaagttattctgttacttgga

SEQ ID NO: 373590 - DNA, 30 bp, Artificial Sequence
  Synthetic oligonucleotide
attactatgctcgaggagttatcccttgga

SEQ ID NO: 373591 - DNA, 30 bp, Artificial Sequence
  Synthetic oligonucleotide
ttcctgctagcacatcgggcgctccttgga

SEQ ID NO: 373592 - DNA, 30 bp, Artificial Sequence
  Synthetic oligonucleotide
gctacgctgttctgcatgtcgttccttgga

SEQ ID NO: 373593 - DNA, 30 bp, Artificial Sequence
  Synthetic oligonucleotide
ccaatatggcctgttagcccagggcttgga

SEQ ID NO: 373594 - DNA, 30 bp, Artificial Sequence
  Synthetic oligonucleotide
caaatttagacgtcagtaaaatgcgttgga

SEQ ID NO: 373595 - DNA, 30 bp, Artificial Sequence
  Synthetic oligonucleotide
tttctcatccgtctttctgttatcgttgga

SEQ ID NO: 373596 - DNA, 30 bp, Artificial Sequence
  Synthetic oligonucleotide
tccccaatggtgaaggtttaacaggttgga

SEQ ID NO: 373597 - DNA, 30 bp, Artificial Sequence
  Synthetic oligonucleotide
cgataagcgcgcaccgttgaagctgttgga

SEQ ID NO: 373598 - DNA, 30 bp, Artificial Sequence
  Synthetic oligonucleotide
acgggtccctatccttttaggcactttgga

SEQ ID NO: 373599 - DNA, 30 bp, Artificial Sequence
  Synthetic oligonucleotide
cttgtgactccgtctcactgtctctttgga

SEQ ID NO: 373600 - DNA, 30 bp, Artificial Sequence
  Synthetic oligonucleotide
ccattgctttgcgtgcgttattggtttgga

SEQ ID NO: 373601 - DNA, 30 bp, Artificial Sequence
  Synthetic oligonucleotide
aaaaggtaccggaatattgcagtttttgga

SEQ ID NO: 373602 - DNA, 30 bp, Artificial Sequence
  Synthetic oligonucleotide
tcctgacgggatatgttggcgtaaaaatga

SEQ ID NO: 373603 - DNA, 30 bp, Artificial Sequence
  Synthetic oligonucleotide
gatgataaacagttgcccctccgaaaatga

SEQ ID NO: 373604 - DNA, 30 bp, Artificial Sequence
  Synthetic oligonucleotide
ttgattagattccgctagcaaaggaaatga

SEQ ID NO: 373605 - DNA, 30 bp, Artificial Sequence
  Synthetic oligonucleotide
tgactccgccaacgttaaagggtgaaatga

SEQ ID NO: 373606 - DNA, 30 bp, Artificial Sequence
  Synthetic oligonucleotide
ttggtgggggtcgccgaaagctcacaatga

SEQ ID NO: 373607 - DNA, 30 bp, Artificial Sequence
  Synthetic oligonucleotide
agagcttttctggcagaacttggacaatga

SEQ ID NO: 373608 - DNA, 30 bp, Artificial Sequence
  Synthetic oligonucleotide
aagaattcctctaattcaggacaccaatga

SEQ ID NO: 373609 - DNA, 30 bp, Artificial Sequence
  Synthetic oligonucleotide
gtgtaatgctattagcttgcataccaatga

SEQ ID NO: 373610 - DNA, 30 bp, Artificial Sequence
  Synthetic oligonucleotide
gaagcaagctcacctgcggcgattcaatga

SEQ ID NO: 373611 - DNA, 30 bp, Artificial Sequence
  Synthetic oligonucleotide
tgaagcgtacacacaaggtatgttcaatga

SEQ ID NO: 373612 - DNA, 30 bp, Artificial Sequence
  Synthetic oligonucleotide
aatcgtcctcgggcaaactgtgtagaatga

SEQ ID NO: 373613 - DNA, 30 bp, Artificial Sequence
  Synthetic oligonucleotide
taaagcctttatttgtctagttacgaatga

SEQ ID NO: 373614 - DNA, 30 bp, Artificial Sequence
  Synthetic oligonucleotide
aggtctgttggtagcccccatttcgaatga

SEQ ID NO: 373615 - DNA, 30 bp, Artificial Sequence
  Synthetic oligonucleotide
aaagccacgcaatatctggggtaggaatga

SEQ ID NO: 373616 - DNA, 30 bp, Artificial Sequence
  Synthetic oligonucleotide
caaacgtttttgtaaattgggtaggaatga

SEQ ID NO: 373617 - DNA, 30 bp, Artificial Sequence
  Synthetic oligonucleotide
tctggcgtttaagctacctgtcatgaatga

SEQ ID NO: 373618 - DNA, 30 bp, Artificial Sequence
  Synthetic oligonucleotide
agtgggcaacaacctcgtgggtctgaatga

SEQ ID NO: 373619 - DNA, 30 bp, Artificial Sequence
  Synthetic oligonucleotide
aatcggccaggttcggaataaagtgaatga

SEQ ID NO: 373620 - DNA, 30 bp, Artificial Sequence
  Synthetic oligonucleotide
tgttattcatagaacaaacactttgaatga

SEQ ID NO: 373621 - DNA, 30 bp, Artificial Sequence
  Synthetic oligonucleotide
cagacagcgtatggtcatccgtaataatga

SEQ ID NO: 373622 - DNA, 30 bp, Artificial Sequence
  Synthetic oligonucleotide
cgttattgctgtgcgaattttagataatga

SEQ ID NO: 373623 - DNA, 30 bp, Artificial Sequence
  Synthetic oligonucleotide
aaaggtacggcagtctcttccgtataatga

SEQ ID NO: 373624 - DNA, 30 bp, Artificial Sequence
  Synthetic oligonucleotide
acctttggaaattcatccggggtataatga

SEQ ID NO: 373625 - DNA, 30 bp, Artificial Sequence
  Synthetic oligonucleotide
ggattagaatcggatgtgctactgccatga

SEQ ID NO: 373626 - DNA, 30 bp, Artificial Sequence
  Synthetic oligonucleotide
gtgcatccggttgggacataccatccatga

SEQ ID NO: 373627 - DNA, 30 bp, Artificial Sequence
  Synthetic oligonucleotide
ggctctttccattgcgcacctggcgcatga

SEQ ID NO: 373628 - DNA, 30 bp, Artificial Sequence
  Synthetic oligonucleotide
cacccatgaataggcaggatcagggcatga

SEQ ID NO: 373629 - DNA, 30 bp, Artificial Sequence
  Synthetic oligonucleotide
atgggacacctccttctctttagtgcatga

SEQ ID NO: 373630 - DNA, 30 bp, Artificial Sequence
  Synthetic oligonucleotide
tcatcgactctacccttagagattgcatga

SEQ ID NO: 373631 - DNA, 30 bp, Artificial Sequence
  Synthetic oligonucleotide
ggactgctcatgaaacggtaaggatcatga

SEQ ID NO: 373632 - DNA, 31 bp, Artificial Sequence
  Synthetic oligonucleotide
ctggctccgacgtattctggatggatcatga

SEQ ID NO: 373633 - DNA, 30 bp, Artificial Sequence
  Synthetic oligonucleotide
acggggcaccgcctctgcaatttatcatga

SEQ ID NO: 373634 - DNA, 30 bp, Artificial Sequence
  Synthetic oligonucleotide
ggggatggtcccgatctggtcaggtcatga

SEQ ID NO: 373635 - DNA, 30 bp, Artificial Sequence
  Synthetic oligonucleotide
gctggtttccatggggctacggggtcatga

SEQ ID NO: 373636 - DNA, 30 bp, Artificial Sequence
  Synthetic oligonucleotide
cgacaattaccatcactcagatggtcatga

SEQ ID NO: 373637 - DNA, 30 bp, Artificial Sequence
  Synthetic oligonucleotide
ggtgggagtgtagtctgaggatattcatga

SEQ ID NO: 373638 - DNA, 30 bp, Artificial Sequence
  Synthetic oligonucleotide
ttctgacataaggccattgccttttcatga

SEQ ID NO: 373639 - DNA, 30 bp, Artificial Sequence
  Synthetic oligonucleotide
ttagggcgtacatagcgcagaacaagatga

SEQ ID NO: 373640 - DNA, 30 bp, Artificial Sequence
  Synthetic oligonucleotide
tccgattgaggcaacgccccaaacagatga

SEQ ID NO: 373641 - DNA, 30 bp, Artificial Sequence
  Synthetic oligonucleotide
tagcagtcaacttgactgcaggacagatga

SEQ ID NO: 373642 - DNA, 30 bp, Artificial Sequence
  Synthetic oligonucleotide
atgtatgaacgtgggtccataatcagatga

SEQ ID NO: 373643 - DNA, 30 bp, Artificial Sequence
  Synthetic oligonucleotide
gctgatttagatgctttcctcgtgagatga

SEQ ID NO: 373644 - DNA, 30 bp, Artificial Sequence
  Synthetic oligonucleotide
tgggtacataatcggttagccactagatga

SEQ ID NO: 373645 - DNA, 30 bp, Artificial Sequence
  Synthetic oligonucleotide
ggagaggcattgccacccctacgtagatga

SEQ ID NO: 373646 - DNA, 30 bp, Artificial Sequence
  Synthetic oligonucleotide
gacagttagggggcgagttcaggtagatga

SEQ ID NO: 373647 - DNA, 30 bp, Artificial Sequence
  Synthetic oligonucleotide
agaacttgttcataaccattgattagatga

SEQ ID NO: 373648 - DNA, 30 bp, Artificial Sequence
  Synthetic oligonucleotide
ttttactgctgtagttaataatttagatga

SEQ ID NO: 373649 - DNA, 30 bp, Artificial Sequence
  Synthetic oligonucleotide
tgggcggtgccggcgggagacgcgcgatga

SEQ ID NO: 373650 - DNA, 30 bp, Artificial Sequence
  Synthetic oligonucleotide
atctttcacggtccggcgtatgctcgatga

SEQ ID NO: 373651 - DNA, 30 bp, Artificial Sequence
  Synthetic oligonucleotide
aaacaactaatgtgccaagacgtaggatga

SEQ ID NO: 373652 - DNA, 30 bp, Artificial Sequence
  Synthetic oligonucleotide
ctgtattggtcgagttactacgtaggatga

SEQ ID NO: 373653 - DNA, 30 bp, Artificial Sequence
  Synthetic oligonucleotide
ggttcgtcgcatggcgtcatgaccggatga

SEQ ID NO: 373654 - DNA, 30 bp, Artificial Sequence
  Synthetic oligonucleotide
caacagcacccgcgtcgagagcccggatga

SEQ ID NO: 373655 - DNA, 30 bp, Artificial Sequence
  Synthetic oligonucleotide
atcctaactagttaatgggggttgggatga

SEQ ID NO: 373656 - DNA, 30 bp, Artificial Sequence
  Synthetic oligonucleotide
agacggaggggccctggccatactggatga

SEQ ID NO: 373657 - DNA, 30 bp, Artificial Sequence
  Synthetic oligonucleotide
cagacaacggcagttcggcggaactgatga

SEQ ID NO: 373658 - DNA, 30 bp, Artificial Sequence
  Synthetic oligonucleotide
accggatagttattgtatgatccctgatga

SEQ ID NO: 373659 - DNA, 30 bp, Artificial Sequence
  Synthetic oligonucleotide
gattaactacgttttaaccctggctgatga

SEQ ID NO: 373660 - DNA, 30 bp, Artificial Sequence
  Synthetic oligonucleotide
ataaacgttaactaattagccctctgatga

SEQ ID NO: 373661 - DNA, 30 bp, Artificial Sequence
  Synthetic oligonucleotide
aatctgtgcggacatatagtcacgtgatga

SEQ ID NO: 373662 - DNA, 30 bp, Artificial Sequence
  Synthetic oligonucleotide
ttttcgtttaccagccactgagtgtgatga

SEQ ID NO: 373663 - DNA, 30 bp, Artificial Sequence
  Synthetic oligonucleotide
tatgccgctggacttttcgtagtttgatga

SEQ ID NO: 373664 - DNA, 31 bp, Artificial Sequence
  Synthetic oligonucleotide
aatccagattgtcctctaagacaaaatatga

SEQ ID NO: 373665 - DNA, 30 bp, Artificial Sequence
  Synthetic oligonucleotide
cccgccatggttcccgacaatggaatatga

SEQ ID NO: 373666 - DNA, 30 bp, Artificial Sequence
  Synthetic oligonucleotide
ggattcattcagcgtaggttgtacatatga

SEQ ID NO: 373667 - DNA, 30 bp, Artificial Sequence
  Synthetic oligonucleotide
cgattctcacgtctccagtgttgcatatga

SEQ ID NO: 373668 - DNA, 30 bp, Artificial Sequence
  Synthetic oligonucleotide
ttaggtgtaccacgtcggcacttcatatga

SEQ ID NO: 373669 - DNA, 30 bp, Artificial Sequence
  Synthetic oligonucleotide
aatcaaatataggaatttctatagatatga

SEQ ID NO: 373670 - DNA, 30 bp, Artificial Sequence
  Synthetic oligonucleotide
aaagaccttggtttgttgctccggatatga

SEQ ID NO: 373671 - DNA, 30 bp, Artificial Sequence
  Synthetic oligonucleotide
ttcatatgtttaatattggacgatatatga

SEQ ID NO: 373672 - DNA, 30 bp, Artificial Sequence
  Synthetic oligonucleotide
atgccacctatcgttaaggacgctatatga

SEQ ID NO: 373673 - DNA, 30 bp, Artificial Sequence
  Synthetic oligonucleotide
ggtatagattcctttgcgttttcactatga

SEQ ID NO: 373674 - DNA, 30 bp, Artificial Sequence
  Synthetic oligonucleotide
ctatattcggttaacacagagggcctatga

SEQ ID NO: 373675 - DNA, 30 bp, Artificial Sequence
  Synthetic oligonucleotide
tatgcatctccgttgcatgctggcctatga

SEQ ID NO: 373676 - DNA, 30 bp, Artificial Sequence
  Synthetic oligonucleotide
aagcacgggttacatggccacattctatga

SEQ ID NO: 373677 - DNA, 30 bp, Artificial Sequence
  Synthetic oligonucleotide
gcttgttaaccggcagcggtgcaagtatga

SEQ ID NO: 373678 - DNA, 30 bp, Artificial Sequence
  Synthetic oligonucleotide
ggatcgaactagcttcataaactagtatga

SEQ ID NO: 373679 - DNA, 30 bp, Artificial Sequence
  Synthetic oligonucleotide
caaacatacggcaatgacagtttagtatga

SEQ ID NO: 373680 - DNA, 30 bp, Artificial Sequence
  Synthetic oligonucleotide
gccccgccgctgagtacaataaccgtatga

SEQ ID NO: 373681 - DNA, 30 bp, Artificial Sequence
  Synthetic oligonucleotide
aggtttacatgattctacgtttcggtatga

SEQ ID NO: 373682 - DNA, 30 bp, Artificial Sequence
  Synthetic oligonucleotide
cggtccgtagccacgtgtgtcggggtatga

SEQ ID NO: 373683 - DNA, 30 bp, Artificial Sequence
  Synthetic oligonucleotide
tatagatcgtgtcaaccccggctggtatga

SEQ ID NO: 373684 - DNA, 30 bp, Artificial Sequence
  Synthetic oligonucleotide
ccgggggacagtgtacccttctctgtatga

SEQ ID NO: 373685 - DNA, 30 bp, Artificial Sequence
  Synthetic oligonucleotide
tcagaaaagcctcgtttcagacgattatga

SEQ ID NO: 373686 - DNA, 30 bp, Artificial Sequence
  Synthetic oligonucleotide
aacaatcactggggtatcgtcggcttatga

SEQ ID NO: 373687 - DNA, 30 bp, Artificial Sequence
  Synthetic oligonucleotide
tgctaggcatagcccttgtataatttatga

SEQ ID NO: 373688 - DNA, 30 bp, Artificial Sequence
  Synthetic oligonucleotide
gaacgtcaatgtattaactcaagtttatga

SEQ ID NO: 373689 - DNA, 30 bp, Artificial Sequence
  Synthetic oligonucleotide
aaatatgttatacgatcgaacagtttatga

SEQ ID NO: 373690 - DNA, 30 bp, Artificial Sequence
  Synthetic oligonucleotide
aatgttcgaattaggctagccggtttatga

SEQ ID NO: 373691 - DNA, 30 bp, Artificial Sequence
  Synthetic oligonucleotide
tgagagacctcagaggtttagattttatga

SEQ ID NO: 373692 - DNA, 30 bp, Artificial Sequence
  Synthetic oligonucleotide
atagggcaataaggaaaatcccttttatga

SEQ ID NO: 373693 - DNA, 29 bp, Artificial Sequence
  Synthetic oligonucleotide
tgtaatatcagtcaaatcgtcaaaactga

SEQ ID NO: 373694 - DNA, 30 bp, Artificial Sequence
  Synthetic oligonucleotide
gtaggtagtgaattgacctcgacaaactga

SEQ ID NO: 373695 - DNA, 30 bp, Artificial Sequence
  Synthetic oligonucleotide
acgcacgttagaatacgaatctgaaactga

SEQ ID NO: 373696 - DNA, 30 bp, Artificial Sequence
  Synthetic oligonucleotide
gggattgtaagtcacggaattctaaactga

SEQ ID NO: 373697 - DNA, 30 bp, Artificial Sequence
  Synthetic oligonucleotide
ctgatcacacgacgtttggaaatcaactga

SEQ ID NO: 373698 - DNA, 30 bp, Artificial Sequence
  Synthetic oligonucleotide
ttaaatctagggtcttgactaatcaactga

SEQ ID NO: 373699 - DNA, 30 bp, Artificial Sequence
  Synthetic oligonucleotide
agtcacagcaacatgcacgtcgtcaactga

SEQ ID NO: 373700 - DNA, 30 bp, Artificial Sequence
  Synthetic oligonucleotide
caggttaccttattggacgtaaggaactga

SEQ ID NO: 373701 - DNA, 30 bp, Artificial Sequence
  Synthetic oligonucleotide
tctgctaaaaaagggcaactatataactga

SEQ ID NO: 373702 - DNA, 30 bp, Artificial Sequence
  Synthetic oligonucleotide
gccagttgtcagcttgcagtccgacactga

SEQ ID NO: 373703 - DNA, 30 bp, Artificial Sequence
  Synthetic oligonucleotide
agctctcgcacttcactgccaatacactga

SEQ ID NO: 373704 - DNA, 30 bp, Artificial Sequence
  Synthetic oligonucleotide
tgtatttatccctgatgacgtctacactga

SEQ ID NO: 373705 - DNA, 30 bp, Artificial Sequence
  Synthetic oligonucleotide
gcgaatggctgtcaatcaactagccactga

SEQ ID NO: 373706 - DNA, 30 bp, Artificial Sequence
  Synthetic oligonucleotide
ttggacacaactatgtcgggggtccactga

SEQ ID NO: 373707 - DNA, 30 bp, Artificial Sequence
  Synthetic oligonucleotide
ttgtaggacgcgaaggccttatagcactga

SEQ ID NO: 373708 - DNA, 30 bp, Artificial Sequence
  Synthetic oligonucleotide
attatgcttctcgtgaaccaccatcactga

SEQ ID NO: 373709 - DNA, 30 bp, Artificial Sequence
  Synthetic oligonucleotide
atagatcttaatccgtaagcgattcactga

SEQ ID NO: 373710 - DNA, 30 bp, Artificial Sequence
  Synthetic oligonucleotide
attatcacctgaggtgttggaccagactga

SEQ ID NO: 373711 - DNA, 30 bp, Artificial Sequence
  Synthetic oligonucleotide
aataattcaaactagggtatccacgactga

SEQ ID NO: 373712 - DNA, 30 bp, Artificial Sequence
  Synthetic oligonucleotide
aaaaggtataggcttagcacaccggactga

SEQ ID NO: 373713 - DNA, 30 bp, Artificial Sequence
  Synthetic oligonucleotide
gtattcagttctaagtattgtttggactga

SEQ ID NO: 373714 - DNA, 30 bp, Artificial Sequence
  Synthetic oligonucleotide
atggagcgttcgccatctaaccaatactga

SEQ ID NO: 373715 - DNA, 30 bp, Artificial Sequence
  Synthetic oligonucleotide
cctctatatgagtttgctagaccatactga

SEQ ID NO: 373716 - DNA, 30 bp, Artificial Sequence
  Synthetic oligonucleotide
gcacagttaatcttacgtacgatatactga

SEQ ID NO: 373717 - DNA, 30 bp, Artificial Sequence
  Synthetic oligonucleotide
agtaatgcttgctttcgagcatcctactga

SEQ ID NO: 373718 - DNA, 30 bp, Artificial Sequence
  Synthetic oligonucleotide
ggtttcatcggggcgtcgtccgtgtactga

SEQ ID NO: 373719 - DNA, 30 bp, Artificial Sequence
  Synthetic oligonucleotide
ccacagtcccaggttattcagtattactga

SEQ ID NO: 373720 - DNA, 30 bp, Artificial Sequence
  Synthetic oligonucleotide
gaccattcccactttaactgtcacacctga

SEQ ID NO: 373721 - DNA, 30 bp, Artificial Sequence
  Synthetic oligonucleotide
cagcgggctcaaccggtaagcaatacctga

SEQ ID NO: 373722 - DNA, 30 bp, Artificial Sequence
  Synthetic oligonucleotide
tggggtttcagcaggctaaggggtacctga

SEQ ID NO: 373723 - DNA, 30 bp, Artificial Sequence
  Synthetic oligonucleotide
cttttatctcgtggtagttgccttacctga

SEQ ID NO: 373724 - DNA, 30 bp, Artificial Sequence
  Synthetic oligonucleotide
acagcggaaaaagcctttgcagcaccctga

SEQ ID NO: 373725 - DNA, 30 bp, Artificial Sequence
  Synthetic oligonucleotide
cgcgagcgtacacaaattttccacccctga

SEQ ID NO: 373726 - DNA, 30 bp, Artificial Sequence
  Synthetic oligonucleotide
ccgctgttaactcaatatccgttgccctga

SEQ ID NO: 373727 - DNA, 30 bp, Artificial Sequence
  Synthetic oligonucleotide
tcgactaacatagctcgctaacatccctga

SEQ ID NO: 373728 - DNA, 30 bp, Artificial Sequence
  Synthetic oligonucleotide
taattaaggccagagcccccagatccctga

SEQ ID NO: 373729 - DNA, 30 bp, Artificial Sequence
  Synthetic oligonucleotide
aaatgtacggtctaacttataggtccctga

SEQ ID NO: 373730 - DNA, 30 bp, Artificial Sequence
  Synthetic oligonucleotide
atgtcgtgtgatggtgaatcatttccctga

SEQ ID NO: 373731 - DNA, 30 bp, Artificial Sequence
  Synthetic oligonucleotide
tgtttatgtaggtgattgaccggggcctga

SEQ ID NO: 373732 - DNA, 30 bp, Artificial Sequence
  Synthetic oligonucleotide
aagaagctacttaaagagtccctggcctga

SEQ ID NO: 373733 - DNA, 30 bp, Artificial Sequence
  Synthetic oligonucleotide
ctcacgagcctcccgatacgtggctcctga

SEQ ID NO: 373734 - DNA, 30 bp, Artificial Sequence
  Synthetic oligonucleotide
ggcgagaccccgtagactatgtgctcctga

SEQ ID NO: 373735 - DNA, 30 bp, Artificial Sequence
  Synthetic oligonucleotide
ttaagttggtatttgcatcagtggtcctga

SEQ ID NO: 373736 - DNA, 30 bp, Artificial Sequence
  Synthetic oligonucleotide
ttttttggactacctatatgcgtaagctga

SEQ ID NO: 373737 - DNA, 30 bp, Artificial Sequence
  Synthetic oligonucleotide
ctcgcgtgcttgttcgaaccgaacagctga

SEQ ID NO: 373738 - DNA, 30 bp, Artificial Sequence
  Synthetic oligonucleotide
tacggaccggggttacacgggagcagctga

SEQ ID NO: 373739 - DNA, 30 bp, Artificial Sequence
  Synthetic oligonucleotide
acttaagtgcggtttagttgaacgagctga

SEQ ID NO: 373740 - DNA, 30 bp, Artificial Sequence
  Synthetic oligonucleotide
cccaagctaagtttccgtgttggtagctga

SEQ ID NO: 373741 - DNA, 30 bp, Artificial Sequence
  Synthetic oligonucleotide
agtgattatgtaatagggagatgtagctga

SEQ ID NO: 373742 - DNA, 30 bp, Artificial Sequence
  Synthetic oligonucleotide
gcgaaaccaatgctccaggcagttagctga

SEQ ID NO: 373743 - DNA, 30 bp, Artificial Sequence
  Synthetic oligonucleotide
tcagcccacgtacattaaccgatacgctga

SEQ ID NO: 373744 - DNA, 30 bp, Artificial Sequence
  Synthetic oligonucleotide
cgtaactcgcagagataccaaacccgctga

SEQ ID NO: 373745 - DNA, 30 bp, Artificial Sequence
  Synthetic oligonucleotide
ggtagttcggaggagtcttccaggcgctga

SEQ ID NO: 373746 - DNA, 30 bp, Artificial Sequence
  Synthetic oligonucleotide
cttcagcctagaaatagtcatcatcgctga

SEQ ID NO: 373747 - DNA, 30 bp, Artificial Sequence
  Synthetic oligonucleotide
atcatcctatgtacagctcctctaggctga

SEQ ID NO: 373748 - DNA, 30 bp, Artificial Sequence
  Synthetic oligonucleotide
gccaacatgcgacccgttatgtacggctga

SEQ ID NO: 373749 - DNA, 30 bp, Artificial Sequence
  Synthetic oligonucleotide
caaggagctcgccgtaccaaggccggctga

SEQ ID NO: 373750 - DNA, 30 bp, Artificial Sequence
  Synthetic oligonucleotide
tatctaatctctttgagagaccatggctga

SEQ ID NO: 373751 - DNA, 30 bp, Artificial Sequence
  Synthetic oligonucleotide
tcggtaatgccgctcaaaataggatgctga

SEQ ID NO: 373752 - DNA, 30 bp, Artificial Sequence
  Synthetic oligonucleotide
aggtatcaattcatggggggcatgtgctga

SEQ ID NO: 373753 - DNA, 30 bp, Artificial Sequence
  Synthetic oligonucleotide
ggtcttaacttacggacccctttgtgctga

SEQ ID NO: 373754 - DNA, 30 bp, Artificial Sequence
  Synthetic oligonucleotide
caattactttaacgttcactccaaatctga

SEQ ID NO: 373755 - DNA, 30 bp, Artificial Sequence
  Synthetic oligonucleotide
ttaaaggttcctgcaatagctctcatctga

SEQ ID NO: 373756 - DNA, 30 bp, Artificial Sequence
  Synthetic oligonucleotide
ccaaaatgttaagggctacagtatatctga

SEQ ID NO: 373757 - DNA, 30 bp, Artificial Sequence
  Synthetic oligonucleotide
caaaatgagctgttcgttcagtatatctga

SEQ ID NO: 373758 - DNA, 30 bp, Artificial Sequence
  Synthetic oligonucleotide
gactcaggctctcgcttggccgttatctga

SEQ ID NO: 373759 - DNA, 30 bp, Artificial Sequence
  Synthetic oligonucleotide
tcagatcggctggatagtcacctactctga

SEQ ID NO: 373760 - DNA, 30 bp, Artificial Sequence
  Synthetic oligonucleotide
catccattggatcctgtgctggacctctga

SEQ ID NO: 373761 - DNA, 30 bp, Artificial Sequence
  Synthetic oligonucleotide
cgtcgactggcacatactgcggccctctga

SEQ ID NO: 373762 - DNA, 30 bp, Artificial Sequence
  Synthetic oligonucleotide
taacatgatgatttggattaagtcctctga

SEQ ID NO: 373763 - DNA, 30 bp, Artificial Sequence
  Synthetic oligonucleotide
atttagagctaatgccggagttggctctga

SEQ ID NO: 373764 - DNA, 30 bp, Artificial Sequence
  Synthetic oligonucleotide
gtcaaccctgggaaaatctggtaagtctga

SEQ ID NO: 373765 - DNA, 30 bp, Artificial Sequence
  Synthetic oligonucleotide
catcgaagcattctcaatgcggcagtctga

SEQ ID NO: 373766 - DNA, 30 bp, Artificial Sequence
  Synthetic oligonucleotide
ttaagtaatcagcccttcgtcctagtctga

SEQ ID NO: 373767 - DNA, 30 bp, Artificial Sequence
  Synthetic oligonucleotide
ttgtcaagcctcgcgtttggtaatgtctga

SEQ ID NO: 373768 - DNA, 30 bp, Artificial Sequence
  Synthetic oligonucleotide
acaatgcctaagcaagtaagtgatgtctga

SEQ ID NO: 373769 - DNA, 30 bp, Artificial Sequence
  Synthetic oligonucleotide
cgcataatgaattgcgctttagtattctga

SEQ ID NO: 373770 - DNA, 30 bp, Artificial Sequence
  Synthetic oligonucleotide
cacccttgcgcatcaatagtggtattctga

SEQ ID NO: 373771 - DNA, 30 bp, Artificial Sequence
  Synthetic oligonucleotide
ccggctctagccagactgcaaactttctga

SEQ ID NO: 373772 - DNA, 30 bp, Artificial Sequence
  Synthetic oligonucleotide
atgttcccattcttctcacgaattttctga

SEQ ID NO: 373773 - DNA, 30 bp, Artificial Sequence
  Synthetic oligonucleotide
gatgtctatgtctttcgggcagcaaagtga

SEQ ID NO: 373774 - DNA, 30 bp, Artificial Sequence
  Synthetic oligonucleotide
gatcggcaaatcacattatcggttaagtga

SEQ ID NO: 373775 - DNA, 30 bp, Artificial Sequence
  Synthetic oligonucleotide
cagcccatctgaagggagactgcacagtga

SEQ ID NO: 373776 - DNA, 30 bp, Artificial Sequence
  Synthetic oligonucleotide
cgccagttcaattttggggcaggacagtga

SEQ ID NO: 373777 - DNA, 30 bp, Artificial Sequence
  Synthetic oligonucleotide
cgcggcagggcttcccactcaggacagtga

SEQ ID NO: 373778 - DNA, 30 bp, Artificial Sequence
  Synthetic oligonucleotide
gattatactacgacgttgcgggagcagtga

SEQ ID NO: 373779 - DNA, 30 bp, Artificial Sequence
  Synthetic oligonucleotide
gatgatcatatgcagcagtccacgcagtga

SEQ ID NO: 373780 - DNA, 30 bp, Artificial Sequence
  Synthetic oligonucleotide
accaagctcagtacgttgtaaccgcagtga

SEQ ID NO: 373781 - DNA, 30 bp, Artificial Sequence
  Synthetic oligonucleotide
ccttgtgctaaatatcggacgaatcagtga

SEQ ID NO: 373782 - DNA, 30 bp, Artificial Sequence
  Synthetic oligonucleotide
atctgtggaaatgtataagggagtcagtga

SEQ ID NO: 373783 - DNA, 30 bp, Artificial Sequence
  Synthetic oligonucleotide
tcatcatcgaccggttgtcccagagagtga

SEQ ID NO: 373784 - DNA, 30 bp, Artificial Sequence
  Synthetic oligonucleotide
cgcatcccctaggtgggaaagttagagtga

SEQ ID NO: 373785 - DNA, 30 bp, Artificial Sequence
  Synthetic oligonucleotide
aaagctaatcaacgcagccaagtcgagtga

SEQ ID NO: 373786 - DNA, 30 bp, Artificial Sequence
  Synthetic oligonucleotide
tattagggtttaccgtgtaagttatagtga

SEQ ID NO: 373787 - DNA, 30 bp, Artificial Sequence
  Synthetic oligonucleotide
tggaccgatagcgcttcagaagtctagtga

SEQ ID NO: 373788 - DNA, 30 bp, Artificial Sequence
  Synthetic oligonucleotide
aatagactatctgctattagtgattagtga

SEQ ID NO: 373789 - DNA, 30 bp, Artificial Sequence
  Synthetic oligonucleotide
gtattgtaaccgttctagttgtaaacgtga

SEQ ID NO: 373790 - DNA, 30 bp, Artificial Sequence
  Synthetic oligonucleotide
aaatgtctgcggcatagaagacgaacgtga

SEQ ID NO: 373791 - DNA, 30 bp, Artificial Sequence
  Synthetic oligonucleotide
gactaagccacttctggtcgttgaacgtga

SEQ ID NO: 373792 - DNA, 30 bp, Artificial Sequence
  Synthetic oligonucleotide
gtatttctcacgcactaagtaagcacgtga

SEQ ID NO: 373793 - DNA, 30 bp, Artificial Sequence
  Synthetic oligonucleotide
ttcgggaattcgctagtcttactcacgtga

SEQ ID NO: 373794 - DNA, 30 bp, Artificial Sequence
  Synthetic oligonucleotide
aaattcaaaagtggcccccgagggacgtga

SEQ ID NO: 373795 - DNA, 30 bp, Artificial Sequence
  Synthetic oligonucleotide
attccgaatgtcactaccggccttacgtga

SEQ ID NO: 373796 - DNA, 30 bp, Artificial Sequence
  Synthetic oligonucleotide
gtcattctggaacgctgtacaaaaccgtga

SEQ ID NO: 373797 - DNA, 30 bp, Artificial Sequence
  Synthetic oligonucleotide
tgttacggactaaggtgacggtaaccgtga

SEQ ID NO: 373798 - DNA, 30 bp, Artificial Sequence
  Synthetic oligonucleotide
atatttctagagaggttagcactaccgtga

SEQ ID NO: 373799 - DNA, 30 bp, Artificial Sequence
  Synthetic oligonucleotide
tacctccacatacgacaggcctatccgtga

SEQ ID NO: 373800 - DNA, 30 bp, Artificial Sequence
  Synthetic oligonucleotide
ttggtaggacgcgtcgaacccttagcgtga

SEQ ID NO: 373801 - DNA, 30 bp, Artificial Sequence
  Synthetic oligonucleotide
gggtacggcaaagtcccgctatacgcgtga

SEQ ID NO: 373802 - DNA, 30 bp, Artificial Sequence
  Synthetic oligonucleotide
gtgttgttccatgtcacttcgaccgcgtga

SEQ ID NO: 373803 - DNA, 30 bp, Artificial Sequence
  Synthetic oligonucleotide
ctcgagttaaagatgtggtcctcatcgtga

SEQ ID NO: 373804 - DNA, 30 bp, Artificial Sequence
  Synthetic oligonucleotide
acgtcccaatgggccccgctgatatcgtga

SEQ ID NO: 373805 - DNA, 30 bp, Artificial Sequence
  Synthetic oligonucleotide
ggatactctgttagaatcaatatctcgtga

SEQ ID NO: 373806 - DNA, 30 bp, Artificial Sequence
  Synthetic oligonucleotide
ctcggtttcagactaccgagatagtcgtga

SEQ ID NO: 373807 - DNA, 30 bp, Artificial Sequence
  Synthetic oligonucleotide
actataacatgaactttctagtcgtcgtga

SEQ ID NO: 373808 - DNA, 30 bp, Artificial Sequence
  Synthetic oligonucleotide
cgcgggtaccggacataacgaaggtcgtga

SEQ ID NO: 373809 - DNA, 30 bp, Artificial Sequence
  Synthetic oligonucleotide
acctgaggacccggttacgctacttcgtga

SEQ ID NO: 373810 - DNA, 30 bp, Artificial Sequence
  Synthetic oligonucleotide
gctcgggtcggacaccggttagcttcgtga

SEQ ID NO: 373811 - DNA, 30 bp, Artificial Sequence
  Synthetic oligonucleotide
cggtaagcctcgtggttttccctttcgtga

SEQ ID NO: 373812 - DNA, 30 bp, Artificial Sequence
  Synthetic oligonucleotide
ttggtcctgagctacactgtgaaaaggtga

SEQ ID NO: 373813 - DNA, 30 bp, Artificial Sequence
  Synthetic oligonucleotide
aggagtaggaggctttgccaatacaggtga

SEQ ID NO: 373814 - DNA, 25 bp, Artificial Sequence
  Synthetic oligonucleotide
ggggacgcactcgtatatgaggtga

SEQ ID NO: 373815 - DNA, 30 bp, Artificial Sequence
  Synthetic oligonucleotide
tcactaaagcactaagttatcacacggtga

SEQ ID NO: 373816 - DNA, 30 bp, Artificial Sequence
  Synthetic oligonucleotide
aggtaattttgagtaacgaaaccacggtga

SEQ ID NO: 373817 - DNA, 30 bp, Artificial Sequence
  Synthetic oligonucleotide
gggatggcaggctccggcatcgaccggtga

SEQ ID NO: 373818 - DNA, 30 bp, Artificial Sequence
  Synthetic oligonucleotide
tataactcggtccctggtgacacccggtga

SEQ ID NO: 373819 - DNA, 30 bp, Artificial Sequence
  Synthetic oligonucleotide
gaaagtgttgttcagggtggtacgcggtga

SEQ ID NO: 373820 - DNA, 30 bp, Artificial Sequence
  Synthetic oligonucleotide
ttgtaacgacacccacggagtagtcggtga

SEQ ID NO: 373821 - DNA, 30 bp, Artificial Sequence
  Synthetic oligonucleotide
cccagtggggccgcatacacttgagggtga

SEQ ID NO: 373822 - DNA, 30 bp, Artificial Sequence
  Synthetic oligonucleotide
aatgattccgcaggaccggttttagggtga

SEQ ID NO: 373823 - DNA, 30 bp, Artificial Sequence
  Synthetic oligonucleotide
agttatttcttgcacataaggggcgggtga

SEQ ID NO: 373824 - DNA, 30 bp, Artificial Sequence
  Synthetic oligonucleotide
caaaggtggctataaattgacctcgggtga

SEQ ID NO: 373825 - DNA, 30 bp, Artificial Sequence
  Synthetic oligonucleotide
aagactcttttaacgagaaagtgggggtga

SEQ ID NO: 373826 - DNA, 30 bp, Artificial Sequence
  Synthetic oligonucleotide
tgaggcgtgagtgctgtgtccgtggggtga

SEQ ID NO: 373827 - DNA, 30 bp, Artificial Sequence
  Synthetic oligonucleotide
gcgatgggtgcgggccatttcgtggggtga

SEQ ID NO: 373828 - DNA, 30 bp, Artificial Sequence
  Synthetic oligonucleotide
cctatcgcataaaaaaggccggtggggtga

SEQ ID NO: 373829 - DNA, 30 bp, Artificial Sequence
  Synthetic oligonucleotide
gtatccataaagaaataagttacatggtga

SEQ ID NO: 373830 - DNA, 30 bp, Artificial Sequence
  Synthetic oligonucleotide
atgagacagccagtatcgatttcatggtga

SEQ ID NO: 373831 - DNA, 30 bp, Artificial Sequence
  Synthetic oligonucleotide
gttattgttgatgtaatgggggtatggtga

SEQ ID NO: 373832 - DNA, 30 bp, Artificial Sequence
  Synthetic oligonucleotide
taagtgattagagtcgaaggggggtggtga

SEQ ID NO: 373833 - DNA, 30 bp, Artificial Sequence
  Synthetic oligonucleotide
agagcgtctccgcatacccgctggtggtga

SEQ ID NO: 373834 - DNA, 30 bp, Artificial Sequence
  Synthetic oligonucleotide
agattaattcttttcttgcacagttggtga

SEQ ID NO: 373835 - DNA, 30 bp, Artificial Sequence
  Synthetic oligonucleotide
ttcaaggtatgggtggtcatcataatgtga

SEQ ID NO: 373836 - DNA, 30 bp, Artificial Sequence
  Synthetic oligonucleotide
ttattaggatatacaaaaagcgtaatgtga

SEQ ID NO: 373837 - DNA, 30 bp, Artificial Sequence
  Synthetic oligonucleotide
attctcggtccttcgatcctactcatgtga

SEQ ID NO: 373838 - DNA, 30 bp, Artificial Sequence
  Synthetic oligonucleotide
taagtgcgtatcttggtcgagaggatgtga

SEQ ID NO: 373839 - DNA, 30 bp, Artificial Sequence
  Synthetic oligonucleotide
ggagtaacaagcatcccctggcggatgtga

SEQ ID NO: 373840 - DNA, 30 bp, Artificial Sequence
  Synthetic oligonucleotide
ccgggtaaatattcaatttatggtatgtga

SEQ ID NO: 373841 - DNA, 30 bp, Artificial Sequence
  Synthetic oligonucleotide
tgcatctaaaattgttctgaggtactgtga

SEQ ID NO: 373842 - DNA, 30 bp, Artificial Sequence
  Synthetic oligonucleotide
accgactttgaaatcgctctctcgctgtga

SEQ ID NO: 373843 - DNA, 30 bp, Artificial Sequence
  Synthetic oligonucleotide
attagtggagacagaggctgggttctgtga

SEQ ID NO: 373844 - DNA, 30 bp, Artificial Sequence
  Synthetic oligonucleotide
cgtttagtcatcgtcagagaccccgtgtga

SEQ ID NO: 373845 - DNA, 30 bp, Artificial Sequence
  Synthetic oligonucleotide
gacgcgttgtttaatacggattgcgtgtga

SEQ ID NO: 373846 - DNA, 30 bp, Artificial Sequence
  Synthetic oligonucleotide
gttagccagtgccactatgggcaggtgtga

SEQ ID NO: 373847 - DNA, 30 bp, Artificial Sequence
  Synthetic oligonucleotide
gccggaaacgtattgcacgtataggtgtga

SEQ ID NO: 373848 - DNA, 30 bp, Artificial Sequence
  Synthetic oligonucleotide
agattccaatgagcatttgcggttgtgtga

SEQ ID NO: 373849 - DNA, 30 bp, Artificial Sequence
  Synthetic oligonucleotide
gaacttgtgtgtagttttgtgttcttgtga

SEQ ID NO: 373850 - DNA, 30 bp, Artificial Sequence
  Synthetic oligonucleotide
atacggtctttatgatctctctcgttgtga

SEQ ID NO: 373851 - DNA, 30 bp, Artificial Sequence
  Synthetic oligonucleotide
ctgcatgtcaccaaaacctggaatttgtga

SEQ ID NO: 373852 - DNA, 30 bp, Artificial Sequence
  Synthetic oligonucleotide
gctctcatatacgaaatggcgggtttgtga

SEQ ID NO: 373853 - DNA, 30 bp, Artificial Sequence
  Synthetic oligonucleotide
taccggcgcaagacttaagccatgaattga

SEQ ID NO: 373854 - DNA, 30 bp, Artificial Sequence
  Synthetic oligonucleotide
ttgtagttacaaacgactactatgaattga

SEQ ID NO: 373855 - DNA, 30 bp, Artificial Sequence
  Synthetic oligonucleotide
ttctccatgtaagaaccaacgttgaattga

SEQ ID NO: 373856 - DNA, 30 bp, Artificial Sequence
  Synthetic oligonucleotide
cgactcgagcccgcctatatttctaattga

SEQ ID NO: 373857 - DNA, 30 bp, Artificial Sequence
  Synthetic oligonucleotide
atgaccattctggagataggtggtaattga

SEQ ID NO: 373858 - DNA, 30 bp, Artificial Sequence
  Synthetic oligonucleotide
ctataatccctctattcgttcgttaattga

SEQ ID NO: 373859 - DNA, 30 bp, Artificial Sequence
  Synthetic oligonucleotide
ggttaccgcccaacctcctagtttaattga

SEQ ID NO: 373860 - DNA, 30 bp, Artificial Sequence
  Synthetic oligonucleotide
tctttgatggggacattggcccgacattga

SEQ ID NO: 373861 - DNA, 30 bp, Artificial Sequence
  Synthetic oligonucleotide
gtatgacttctatctactggggtacattga

SEQ ID NO: 373862 - DNA, 30 bp, Artificial Sequence
  Synthetic oligonucleotide
aggttggataggtgtatcacctaccattga

SEQ ID NO: 373863 - DNA, 30 bp, Artificial Sequence
  Synthetic oligonucleotide
ggatccagccgtcatttgaaggcccattga

SEQ ID NO: 373864 - DNA, 30 bp, Artificial Sequence
  Synthetic oligonucleotide
atatgtgtcacctaggggtgggcccattga

SEQ ID NO: 373865 - DNA, 30 bp, Artificial Sequence
  Synthetic oligonucleotide
gtacagtagcagggatgctcattccattga

SEQ ID NO: 373866 - DNA, 30 bp, Artificial Sequence
  Synthetic oligonucleotide
gcgagcgttagcatgcgttagacgcattga

SEQ ID NO: 373867 - DNA, 30 bp, Artificial Sequence
  Synthetic oligonucleotide
atcttaaaactacctgaaggccctcattga

SEQ ID NO: 373868 - DNA, 30 bp, Artificial Sequence
  Synthetic oligonucleotide
tgagaggcatccggacggggaggagattga

SEQ ID NO: 373869 - DNA, 30 bp, Artificial Sequence
  Synthetic oligonucleotide
gattaaaatgcttttgtggacctagattga

SEQ ID NO: 373870 - DNA, 30 bp, Artificial Sequence
  Synthetic oligonucleotide
tcttggctatgacaagacttgaacgattga

SEQ ID NO: 373871 - DNA, 30 bp, Artificial Sequence
  Synthetic oligonucleotide
cccacaaccaacacagactgtagcgattga

SEQ ID NO: 373872 - DNA, 30 bp, Artificial Sequence
  Synthetic oligonucleotide
tcgacactggctgagctagctttcgattga

SEQ ID NO: 373873 - DNA, 30 bp, Artificial Sequence
  Synthetic oligonucleotide
cctgctcagtaccaacccatcctggattga

SEQ ID NO: 373874 - DNA, 30 bp, Artificial Sequence
  Synthetic oligonucleotide
taatggctagtgggtcggagaactgattga

SEQ ID NO: 373875 - DNA, 27 bp, Artificial Sequence
  Synthetic oligonucleotide
ctttagggaccagaatcagctgattga

SEQ ID NO: 373876 - DNA, 30 bp, Artificial Sequence
  Synthetic oligonucleotide
actgcaacgtaaaagtggacttttgattga

SEQ ID NO: 373877 - DNA, 30 bp, Artificial Sequence
  Synthetic oligonucleotide
cagttatcgatgagaggctgcttatattga

SEQ ID NO: 373878 - DNA, 30 bp, Artificial Sequence
  Synthetic oligonucleotide
cttctcgtcttggtctccgtgacctattga

SEQ ID NO: 373879 - DNA, 30 bp, Artificial Sequence
  Synthetic oligonucleotide
gttcataaaagggcttgactcggttattga

SEQ ID NO: 373880 - DNA, 30 bp, Artificial Sequence
  Synthetic oligonucleotide
gcgtgatgactggagtagcttacaacttga

SEQ ID NO: 373881 - DNA, 30 bp, Artificial Sequence
  Synthetic oligonucleotide
attagtcgaccttgatgcaccagaacttga

SEQ ID NO: 373882 - DNA, 30 bp, Artificial Sequence
  Synthetic oligonucleotide
acttgcaaattctattgagtgagcacttga

SEQ ID NO: 373883 - DNA, 30 bp, Artificial Sequence
  Synthetic oligonucleotide
gtctcacttaagtaggccaggctcacttga

SEQ ID NO: 373884 - DNA, 30 bp, Artificial Sequence
  Synthetic oligonucleotide
tagccggtttggatctaatgtacgacttga

SEQ ID NO: 373885 - DNA, 30 bp, Artificial Sequence
  Synthetic oligonucleotide
atcacccaagcaggcgaagtctatacttga

SEQ ID NO: 373886 - DNA, 30 bp, Artificial Sequence
  Synthetic oligonucleotide
aatccgtccggtcgcgggcagtctacttga

SEQ ID NO: 373887 - DNA, 30 bp, Artificial Sequence
  Synthetic oligonucleotide
tctcagtgtgaagccacattgattacttga

SEQ ID NO: 373888 - DNA, 30 bp, Artificial Sequence
  Synthetic oligonucleotide
ccatgatacatagcatctagcgttacttga

SEQ ID NO: 373889 - DNA, 30 bp, Artificial Sequence
  Synthetic oligonucleotide
ccgtgtaatgttcaaacatgtagaccttga

SEQ ID NO: 373890 - DNA, 30 bp, Artificial Sequence
  Synthetic oligonucleotide
ataatttcaccaaccacggaatacccttga

SEQ ID NO: 373891 - DNA, 30 bp, Artificial Sequence
  Synthetic oligonucleotide
taggcttcggtgatagtcggaacagcttga

SEQ ID NO: 373892 - DNA, 30 bp, Artificial Sequence
  Synthetic oligonucleotide
gatcccgcagttgatatcggtagagcttga

SEQ ID NO: 373893 - DNA, 30 bp, Artificial Sequence
  Synthetic oligonucleotide
ttcaattctacatgtcaaagattagcttga

SEQ ID NO: 373894 - DNA, 30 bp, Artificial Sequence
  Synthetic oligonucleotide
ggcttcaaccagaacgctgtaagcgcttga

SEQ ID NO: 373895 - DNA, 30 bp, Artificial Sequence
  Synthetic oligonucleotide
ggtcgactacgtttgatatatagggcttga

SEQ ID NO: 373896 - DNA, 30 bp, Artificial Sequence
  Synthetic oligonucleotide
ctgttgggggcctctggaacccatgcttga

SEQ ID NO: 373897 - DNA, 30 bp, Artificial Sequence
  Synthetic oligonucleotide
ggtccagctatcatggattatattgcttga

SEQ ID NO: 373898 - DNA, 30 bp, Artificial Sequence
  Synthetic oligonucleotide
tatactacggcatatgtatgcgaatcttga

SEQ ID NO: 373899 - DNA, 30 bp, Artificial Sequence
  Synthetic oligonucleotide
gccatgtaagggactgtaagagcatcttga

SEQ ID NO: 373900 - DNA, 30 bp, Artificial Sequence
  Synthetic oligonucleotide
acattcaggtggtagacaattagctcttga

SEQ ID NO: 373901 - DNA, 30 bp, Artificial Sequence
  Synthetic oligonucleotide
cgctctacagcacatgcttgaacgtcttga

SEQ ID NO: 373902 - DNA, 30 bp, Artificial Sequence
  Synthetic oligonucleotide
ccaccaaacgcgtggcggaccgattcttga

SEQ ID NO: 373903 - DNA, 30 bp, Artificial Sequence
  Synthetic oligonucleotide
tgaccagtaaagagaataacatattcttga

SEQ ID NO: 373904 - DNA, 30 bp, Artificial Sequence
  Synthetic oligonucleotide
ccccgtaatattagcttcggaagttcttga

SEQ ID NO: 373905 - DNA, 30 bp, Artificial Sequence
  Synthetic oligonucleotide
gcctttccagggaacctcgggagttcttga

SEQ ID NO: 373906 - DNA, 30 bp, Artificial Sequence
  Synthetic oligonucleotide
agaaaggggctatgtctgaaccgttcttga

SEQ ID NO: 373907 - DNA, 30 bp, Artificial Sequence
  Synthetic oligonucleotide
actcaatcacggaagttgatgttttcttga

SEQ ID NO: 373908 - DNA, 30 bp, Artificial Sequence
  Synthetic oligonucleotide
gtatattttaggcaaattgctcagagttga

SEQ ID NO: 373909 - DNA, 30 bp, Artificial Sequence
  Synthetic oligonucleotide
cggggtatatttaagccagtacggagttga

SEQ ID NO: 373910 - DNA, 30 bp, Artificial Sequence
  Synthetic oligonucleotide
tctggctgaggattgttcctgaaacgttga

SEQ ID NO: 373911 - DNA, 30 bp, Artificial Sequence
  Synthetic oligonucleotide
attcaaccaacatataccaagcgacgttga

SEQ ID NO: 373912 - DNA, 30 bp, Artificial Sequence
  Synthetic oligonucleotide
gtgcaatccgcagctgctattctacgttga

SEQ ID NO: 373913 - DNA, 30 bp, Artificial Sequence
  Synthetic oligonucleotide
cgaggtcgcagaaacccgccattacgttga

SEQ ID NO: 373914 - DNA, 30 bp, Artificial Sequence
  Synthetic oligonucleotide
agtcctaagtttcgagcagcctaccgttga

SEQ ID NO: 373915 - DNA, 30 bp, Artificial Sequence
  Synthetic oligonucleotide
atacgacgttgatagctagattagcgttga

SEQ ID NO: 373916 - DNA, 30 bp, Artificial Sequence
  Synthetic oligonucleotide
agttatttcttatttcttgttttgcgttga

SEQ ID NO: 373917 - DNA, 30 bp, Artificial Sequence
  Synthetic oligonucleotide
ttgtgaaactataacctaccgtatcgttga

SEQ ID NO: 373918 - DNA, 30 bp, Artificial Sequence
  Synthetic oligonucleotide
cggtggtaaaaaatcgccgcacgtcgttga

SEQ ID NO: 373919 - DNA, 30 bp, Artificial Sequence
  Synthetic oligonucleotide
gcttccaggaatatgcaggaccaaggttga

SEQ ID NO: 373920 - DNA, 30 bp, Artificial Sequence
  Synthetic oligonucleotide
taacttcgagtgcaaatgaatgtaggttga

SEQ ID NO: 373921 - DNA, 30 bp, Artificial Sequence
  Synthetic oligonucleotide
gagacctcgaaagtgtggggacgcggttga

SEQ ID NO: 373922 - DNA, 30 bp, Artificial Sequence
  Synthetic oligonucleotide
gtttacaggttcctcgatctacgcggttga

SEQ ID NO: 373923 - DNA, 30 bp, Artificial Sequence
  Synthetic oligonucleotide
tagcaggcaattcggttgacatgcggttga

SEQ ID NO: 373924 - DNA, 30 bp, Artificial Sequence
  Synthetic oligonucleotide
tagtaagcttaagacgacttaaggggttga

SEQ ID NO: 373925 - DNA, 30 bp, Artificial Sequence
  Synthetic oligonucleotide
gcagtctagcgcgattatgtatggggttga

SEQ ID NO: 373926 - DNA, 30 bp, Artificial Sequence
  Synthetic oligonucleotide
cggggatgaaggattgtttatatgggttga

SEQ ID NO: 373927 - DNA, 30 bp, Artificial Sequence
  Synthetic oligonucleotide
ggggagcagatatacaacggtatgggttga

SEQ ID NO: 373928 - DNA, 30 bp, Artificial Sequence
  Synthetic oligonucleotide
agtcgtattatatgcgtatgacatggttga

SEQ ID NO: 373929 - DNA, 30 bp, Artificial Sequence
  Synthetic oligonucleotide
gaacttcctgcttttcgtatttcatgttga

SEQ ID NO: 373930 - DNA, 30 bp, Artificial Sequence
  Synthetic oligonucleotide
tttatgtacgattttcagggttgatgttga

SEQ ID NO: 373931 - DNA, 30 bp, Artificial Sequence
  Synthetic oligonucleotide
actcgtatcgggtatactaaaacttgttga

SEQ ID NO: 373932 - DNA, 30 bp, Artificial Sequence
  Synthetic oligonucleotide
gccccggaggggctaaggcgaccttgttga

SEQ ID NO: 373933 - DNA, 30 bp, Artificial Sequence
  Synthetic oligonucleotide
taattctttactaccgagagtacaatttga

SEQ ID NO: 373934 - DNA, 30 bp, Artificial Sequence
  Synthetic oligonucleotide
gagttgcggtaacgttaaaaatacatttga

SEQ ID NO: 373935 - DNA, 30 bp, Artificial Sequence
  Synthetic oligonucleotide
aagcgggttacgactttgttgtacatttga

SEQ ID NO: 373936 - DNA, 30 bp, Artificial Sequence
  Synthetic oligonucleotide
ccaagatgaccaggtctctatatcatttga

SEQ ID NO: 373937 - DNA, 30 bp, Artificial Sequence
  Synthetic oligonucleotide
ggtagtggtacctttatccgcaggatttga

SEQ ID NO: 373938 - DNA, 30 bp, Artificial Sequence
  Synthetic oligonucleotide
gagcagactctaatggtaggtcggatttga

SEQ ID NO: 373939 - DNA, 30 bp, Artificial Sequence
  Synthetic oligonucleotide
gctagccagtgctcactaaatttgatttga

SEQ ID NO: 373940 - DNA, 30 bp, Artificial Sequence
  Synthetic oligonucleotide
atctctaggatcgtgggagtgtctatttga

SEQ ID NO: 373941 - DNA, 30 bp, Artificial Sequence
  Synthetic oligonucleotide
aatcgaaaaccgaagggtgtatttatttga

SEQ ID NO: 373942 - DNA, 30 bp, Artificial Sequence
  Synthetic oligonucleotide
cggccaaatgcaccctgcgattttatttga

SEQ ID NO: 373943 - DNA, 30 bp, Artificial Sequence
  Synthetic oligonucleotide
tacgacaaatcagcgagccaatcactttga

SEQ ID NO: 373944 - DNA, 30 bp, Artificial Sequence
  Synthetic oligonucleotide
ggataaggtatctcggcgatgaacctttga

SEQ ID NO: 373945 - DNA, 30 bp, Artificial Sequence
  Synthetic oligonucleotide
tcaaacagttgtaattgtttcttcctttga

SEQ ID NO: 373946 - DNA, 30 bp, Artificial Sequence
  Synthetic oligonucleotide
ccctaagcgctatcgcccgctttcctttga

SEQ ID NO: 373947 - DNA, 30 bp, Artificial Sequence
  Synthetic oligonucleotide
acactgttgagctttttcaccgagctttga

SEQ ID NO: 373948 - DNA, 30 bp, Artificial Sequence
  Synthetic oligonucleotide
ggattacaggggcgatcgatcgctctttga

SEQ ID NO: 373949 - DNA, 30 bp, Artificial Sequence
  Synthetic oligonucleotide
acgccatctcactggggcagttgtctttga

SEQ ID NO: 373950 - DNA, 30 bp, Artificial Sequence
  Synthetic oligonucleotide
tgaccatgagagcaatattggtgagtttga

SEQ ID NO: 373951 - DNA, 30 bp, Artificial Sequence
  Synthetic oligonucleotide
tagatacaagtgtcctatagtatagtttga

SEQ ID NO: 373952 - DNA, 30 bp, Artificial Sequence
  Synthetic oligonucleotide
gggaggtaattgtcctgcgggtacgtttga

SEQ ID NO: 373953 - DNA, 30 bp, Artificial Sequence
  Synthetic oligonucleotide
cctctcttttttgtgcattctttcgtttga

SEQ ID NO: 373954 - DNA, 30 bp, Artificial Sequence
  Synthetic oligonucleotide
cagtcaactctcatgaagcgaaatgtttga

SEQ ID NO: 373955 - DNA, 30 bp, Artificial Sequence
  Synthetic oligonucleotide
ttaggtcgaagcacggtgttgtatgtttga

SEQ ID NO: 373956 - DNA, 30 bp, Artificial Sequence
  Synthetic oligonucleotide
gcaatacaatgcccatgtgtaggtgtttga

SEQ ID NO: 373957 - DNA, 30 bp, Artificial Sequence
  Synthetic oligonucleotide
tggatggacaggcacagctcaagattttga

SEQ ID NO: 373958 - DNA, 30 bp, Artificial Sequence
  Synthetic oligonucleotide
ttgacccaaggattgatctgttacttttga

SEQ ID NO: 373959 - DNA, 30 bp, Artificial Sequence
  Synthetic oligonucleotide
ttgtttcacctcatttgcataatcttttga

SEQ ID NO: 373960 - DNA, 30 bp, Artificial Sequence
  Synthetic oligonucleotide
gaagctctgactcatccacctgcgttttga

SEQ ID NO: 373961 - DNA, 30 bp, Artificial Sequence
  Synthetic oligonucleotide
tatgacgctccaagggcaagcgatttttga

SEQ ID NO: 373962 - DNA, 30 bp, Artificial Sequence
  Synthetic oligonucleotide
ctagtcctggtgcttggaaaacctttttga

SEQ ID NO: 373963 - DNA, 30 bp, Artificial Sequence
  Synthetic oligonucleotide
gtggagttattatgcaaggtcagtttttga

SEQ ID NO: 373964 - DNA, 30 bp, Artificial Sequence
  Synthetic oligonucleotide
cccactaatatttcaacgttataaaaaata

SEQ ID NO: 373965 - DNA, 30 bp, Artificial Sequence
  Synthetic oligonucleotide
ccgggctatccgtggcagttgacaaaaata

SEQ ID NO: 373966 - DNA, 30 bp, Artificial Sequence
  Synthetic oligonucleotide
ttaattctatatagcttgtgtagaaaaata

SEQ ID NO: 373967 - DNA, 30 bp, Artificial Sequence
  Synthetic oligonucleotide
tgtatcgaacacgctcgtgaatacaaaata

SEQ ID NO: 373968 - DNA, 30 bp, Artificial Sequence
  Synthetic oligonucleotide
agcctaaaattacgtgtctcttacaaaata

SEQ ID NO: 373969 - DNA, 30 bp, Artificial Sequence
  Synthetic oligonucleotide
gcagatagtaggttgaataaaaccaaaata

SEQ ID NO: 373970 - DNA, 30 bp, Artificial Sequence
  Synthetic oligonucleotide
gaaagataatggctagggtagttcaaaata

SEQ ID NO: 373971 - DNA, 30 bp, Artificial Sequence
  Synthetic oligonucleotide
agatttggtgaattgtatcaacagaaaata

SEQ ID NO: 373972 - DNA, 30 bp, Artificial Sequence
  Synthetic oligonucleotide
tatgagtcctggcgactacaatataaaata

SEQ ID NO: 373973 - DNA, 30 bp, Artificial Sequence
  Synthetic oligonucleotide
tagtcggcccaaaggaatgcatctaaaata

SEQ ID NO: 373974 - DNA, 30 bp, Artificial Sequence
  Synthetic oligonucleotide
gctcctacgattcaacgccagtctaaaata

SEQ ID NO: 373975 - DNA, 30 bp, Artificial Sequence
  Synthetic oligonucleotide
cggctcaacacatatttatttcttaaaata

SEQ ID NO: 373976 - DNA, 30 bp, Artificial Sequence
  Synthetic oligonucleotide
gatggttaacgctctccgcgcgtacaaata

SEQ ID NO: 373977 - DNA, 30 bp, Artificial Sequence
  Synthetic oligonucleotide
ttaattctcgatctttgtcatttccaaata

SEQ ID NO: 373978 - DNA, 30 bp, Artificial Sequence
  Synthetic oligonucleotide
gtaaatcccaaagcgtgaggccagcaaata

SEQ ID NO: 373979 - DNA, 30 bp, Artificial Sequence
  Synthetic oligonucleotide
ccgagaattgagccgctggatgggcaaata

SEQ ID NO: 373980 - DNA, 30 bp, Artificial Sequence
  Synthetic oligonucleotide
gtaaggaaagacgtagcaaaacctcaaata

SEQ ID NO: 373981 - DNA, 30 bp, Artificial Sequence
  Synthetic oligonucleotide
ggtgtatacctggactaattgtctcaaata

SEQ ID NO: 373982 - DNA, 30 bp, Artificial Sequence
  Synthetic oligonucleotide
catgttgacagaatgaagcattttcaaata

SEQ ID NO: 373983 - DNA, 30 bp, Artificial Sequence
  Synthetic oligonucleotide
caaaattgacgtttcttcagttaagaaata

SEQ ID NO: 373984 - DNA, 30 bp, Artificial Sequence
  Synthetic oligonucleotide
gcttcatttcgttctcgctccgacgaaata

SEQ ID NO: 373985 - DNA, 30 bp, Artificial Sequence
  Synthetic oligonucleotide
ttgttcgtatccacttctagcgccgaaata

SEQ ID NO: 373986 - DNA, 30 bp, Artificial Sequence
  Synthetic oligonucleotide
gcacatttgtatagcgcattgccggaaata

SEQ ID NO: 373987 - DNA, 30 bp, Artificial Sequence
  Synthetic oligonucleotide
aattaaaggaatgaacccaccagggaaata

SEQ ID NO: 373988 - DNA, 30 bp, Artificial Sequence
  Synthetic oligonucleotide
taactcaacaaacccctctgctttgaaata

SEQ ID NO: 373989 - DNA, 30 bp, Artificial Sequence
  Synthetic oligonucleotide
gcttcactgtcttcaaatgactagtaaata

SEQ ID NO: 373990 - DNA, 30 bp, Artificial Sequence
  Synthetic oligonucleotide
agttactgatcctttccccagaggtaaata

SEQ ID NO: 373991 - DNA, 30 bp, Artificial Sequence
  Synthetic oligonucleotide
aatgtcaggttccagagatataggtaaata

SEQ ID NO: 373992 - DNA, 30 bp, Artificial Sequence
  Synthetic oligonucleotide
ctaagaacagttattataaaatggtaaata

SEQ ID NO: 373993 - DNA, 30 bp, Artificial Sequence
  Synthetic oligonucleotide
cactcggacccgctatatgctgattaaata

SEQ ID NO: 373994 - DNA, 30 bp, Artificial Sequence
  Synthetic oligonucleotide
gcgccttgatgcgtcgaatgcacttaaata

SEQ ID NO: 373995 - DNA, 30 bp, Artificial Sequence
  Synthetic oligonucleotide
cttgacgtcatccatgtcccgacttaaata

SEQ ID NO: 373996 - DNA, 30 bp, Artificial Sequence
  Synthetic oligonucleotide
catacgagttcgttataggaaaaaacaata

SEQ ID NO: 373997 - DNA, 30 bp, Artificial Sequence
  Synthetic oligonucleotide
atcgtggatcattagtccagattaacaata

SEQ ID NO: 373998 - DNA, 30 bp, Artificial Sequence
  Synthetic oligonucleotide
cgtgatcttgcagccataccattcacaata

SEQ ID NO: 373999 - DNA, 30 bp, Artificial Sequence
  Synthetic oligonucleotide
atcagatttgcctttcaacgccggacaata

SEQ ID NO: 374000 - DNA, 30 bp, Artificial Sequence
  Synthetic oligonucleotide
gaggttagatttaatatttgatctacaata

SEQ ID NO: 374001 - DNA, 30 bp, Artificial Sequence
  Synthetic oligonucleotide
ttttaaacacacatcgatccccgtacaata

SEQ ID NO: 374002 - DNA, 30 bp, Artificial Sequence
  Synthetic oligonucleotide
tcagaggcatttaagcataaaattacaata

SEQ ID NO: 374003 - DNA, 30 bp, Artificial Sequence
  Synthetic oligonucleotide
agctttgacttcagcgctccgcacccaata

SEQ ID NO: 374004 - DNA, 30 bp, Artificial Sequence
  Synthetic oligonucleotide
gtaggacctctttaacttccacccccaata

SEQ ID NO: 374005 - DNA, 30 bp, Artificial Sequence
  Synthetic oligonucleotide
gtgtcacatggggcgttaattgagccaata

SEQ ID NO: 374006 - DNA, 30 bp, Artificial Sequence
  Synthetic oligonucleotide
acagactaatctgccgggctcgatccaata

SEQ ID NO: 374007 - DNA, 30 bp, Artificial Sequence
  Synthetic oligonucleotide
aaccgagtgagagctggttcatctccaata

SEQ ID NO: 374008 - DNA, 30 bp, Artificial Sequence
  Synthetic oligonucleotide
tgaactaccttgggcaccatgtttccaata

SEQ ID NO: 374009 - DNA, 30 bp, Artificial Sequence
  Synthetic oligonucleotide
tatgagtgatccaaggtacaataagcaata

SEQ ID NO: 374010 - DNA, 30 bp, Artificial Sequence
  Synthetic oligonucleotide
gacttagtgaaaaacgttactggagcaata

SEQ ID NO: 374011 - DNA, 30 bp, Artificial Sequence
  Synthetic oligonucleotide
aaacatttacgggtacagacgtccgcaata

SEQ ID NO: 374012 - DNA, 30 bp, Artificial Sequence
  Synthetic oligonucleotide
cgggcctggccagccttttcaagggcaata

SEQ ID NO: 374013 - DNA, 30 bp, Artificial Sequence
  Synthetic oligonucleotide
gatctttatatcacattgcacctggcaata

SEQ ID NO: 374014 - DNA, 30 bp, Artificial Sequence
  Synthetic oligonucleotide
ttaacgggaaaagtcgcgatgactgcaata

SEQ ID NO: 374015 - DNA, 30 bp, Artificial Sequence
  Synthetic oligonucleotide
cgtaatacaccccgatccagctgtgcaata

SEQ ID NO: 374016 - DNA, 30 bp, Artificial Sequence
  Synthetic oligonucleotide
ataaacagaagattatttctatcatcaata

SEQ ID NO: 374017 - DNA, 30 bp, Artificial Sequence
  Synthetic oligonucleotide
cgaatatatgttggagccttaatatcaata

SEQ ID NO: 374018 - DNA, 30 bp, Artificial Sequence
  Synthetic oligonucleotide
tgagacgacttagacgttgtgggctcaata

SEQ ID NO: 374019 - DNA, 30 bp, Artificial Sequence
  Synthetic oligonucleotide
tggcactctcagggttaattctcgtcaata

SEQ ID NO: 374020 - DNA, 30 bp, Artificial Sequence
  Synthetic oligonucleotide
cactcaacggaccatgcgaaattgtcaata

SEQ ID NO: 374021 - DNA, 30 bp, Artificial Sequence
  Synthetic oligonucleotide
gactaaacaatcccttcaccgttgtcaata

SEQ ID NO: 374022 - DNA, 30 bp, Artificial Sequence
  Synthetic oligonucleotide
attatatggcccaccgttccaccttcaata

SEQ ID NO: 374023 - DNA, 30 bp, Artificial Sequence
  Synthetic oligonucleotide
gtgacccagggtagattggaccacagaata

SEQ ID NO: 374024 - DNA, 30 bp, Artificial Sequence
  Synthetic oligonucleotide
acgcccacggtgctcatctttggcagaata

SEQ ID NO: 374025 - DNA, 30 bp, Artificial Sequence
  Synthetic oligonucleotide
gggatatatactaagtctttgtgcagaata

SEQ ID NO: 374026 - DNA, 30 bp, Artificial Sequence
  Synthetic oligonucleotide
aagtcgcgctcaacgtagcagatcagaata

SEQ ID NO: 374027 - DNA, 30 bp, Artificial Sequence
  Synthetic oligonucleotide
gtttcgccgtcatccaagagactcagaata

SEQ ID NO: 374028 - DNA, 30 bp, Artificial Sequence
  Synthetic oligonucleotide
ctccgaacacatcattggtccttcagaata

SEQ ID NO: 374029 - DNA, 30 bp, Artificial Sequence
  Synthetic oligonucleotide
tagcctccttgtaatggaaggcttagaata

SEQ ID NO: 374030 - DNA, 30 bp, Artificial Sequence
  Synthetic oligonucleotide
atttcgcctgagtcggaaaacgttagaata

SEQ ID NO: 374031 - DNA, 30 bp, Artificial Sequence
  Synthetic oligonucleotide
gtaacgcgtactttgtgacccaggcgaata

SEQ ID NO: 374032 - DNA, 30 bp, Artificial Sequence
  Synthetic oligonucleotide
cacccagtgctcaatttgactgggcgaata

SEQ ID NO: 374033 - DNA, 30 bp, Artificial Sequence
  Synthetic oligonucleotide
aaccttgtaagaatcggcaatattcgaata

SEQ ID NO: 374034 - DNA, 30 bp, Artificial Sequence
  Synthetic oligonucleotide
ccatcagttggtttcttaatgtttcgaata

SEQ ID NO: 374035 - DNA, 30 bp, Artificial Sequence
  Synthetic oligonucleotide
aggatccaacacgcttagcaagaaggaata

SEQ ID NO: 374036 - DNA, 30 bp, Artificial Sequence
  Synthetic oligonucleotide
tggaagcgagatatcgagttttaaggaata

SEQ ID NO: 374037 - DNA, 30 bp, Artificial Sequence
  Synthetic oligonucleotide
accgttctaagctataggaccaccggaata

SEQ ID NO: 374038 - DNA, 30 bp, Artificial Sequence
  Synthetic oligonucleotide
tgcctgcaagtgccaagaagtggcggaata

SEQ ID NO: 374039 - DNA, 30 bp, Artificial Sequence
  Synthetic oligonucleotide
atgttcttaatccttcggggtatgggaata

SEQ ID NO: 374040 - DNA, 30 bp, Artificial Sequence
  Synthetic oligonucleotide
ttcgggaacccccagttactcgctggaata

SEQ ID NO: 374041 - DNA, 30 bp, Artificial Sequence
  Synthetic oligonucleotide
aaattcgtttcatcggcctactctggaata

SEQ ID NO: 374042 - DNA, 30 bp, Artificial Sequence
  Synthetic oligonucleotide
tccgaggcgataccttatatctctggaata

SEQ ID NO: 374043 - DNA, 30 bp, Artificial Sequence
  Synthetic oligonucleotide
tcgttgccccgaagcttttttgaatgaata

SEQ ID NO: 374044 - DNA, 30 bp, Artificial Sequence
  Synthetic oligonucleotide
ttggatgcatggggagatgcaggatgaata

SEQ ID NO: 374045 - DNA, 30 bp, Artificial Sequence
  Synthetic oligonucleotide
ttttagacatactcctatcggaactgaata

SEQ ID NO: 374046 - DNA, 30 bp, Artificial Sequence
  Synthetic oligonucleotide
agcttccgtcgcgtcatcttcccgtgaata

SEQ ID NO: 374047 - DNA, 30 bp, Artificial Sequence
  Synthetic oligonucleotide
ttcgtgttgggtgcacatcacttttgaata

SEQ ID NO: 374048 - DNA, 30 bp, Artificial Sequence
  Synthetic oligonucleotide
actacgtcagacagactaaatgaaataata

SEQ ID NO: 374049 - DNA, 30 bp, Artificial Sequence
  Synthetic oligonucleotide
actaatgttgccctctgtaggacaataata

SEQ ID NO: 374050 - DNA, 30 bp, Artificial Sequence
  Synthetic oligonucleotide
agcctttaagaaacaccttctacaataata

SEQ ID NO: 374051 - DNA, 30 bp, Artificial Sequence
  Synthetic oligonucleotide
gcggtggtcaggcaacgtatggtaataata

SEQ ID NO: 374052 - DNA, 30 bp, Artificial Sequence
  Synthetic oligonucleotide
ttgcggaccggcgatatatagaacataata

SEQ ID NO: 374053 - DNA, 30 bp, Artificial Sequence
  Synthetic oligonucleotide
aaaatccaacactcgaaccacgccataata

SEQ ID NO: 374054 - DNA, 25 bp, Artificial Sequence
  Synthetic oligonucleotide
gaaagcggattgtttgaggataata

SEQ ID NO: 374055 - DNA, 30 bp, Artificial Sequence
  Synthetic oligonucleotide
cgcctcaataagataattaaatggataata

SEQ ID NO: 374056 - DNA, 30 bp, Artificial Sequence
  Synthetic oligonucleotide
gaccctgtcaatcctggccctgtgataata

SEQ ID NO: 374057 - DNA, 30 bp, Artificial Sequence
  Synthetic oligonucleotide
ccgaacgggggatctactttcagtataata

SEQ ID NO: 374058 - DNA, 30 bp, Artificial Sequence
  Synthetic oligonucleotide
atcagttcacattacgaaactagactaata

SEQ ID NO: 374059 - DNA, 30 bp, Artificial Sequence
  Synthetic oligonucleotide
tatctgaagttcaggctgtctatactaata

SEQ ID NO: 374060 - DNA, 30 bp, Artificial Sequence
  Synthetic oligonucleotide
taacgtaacatttttctaagtctactaata

SEQ ID NO: 374061 - DNA, 30 bp, Artificial Sequence
  Synthetic oligonucleotide
ctccagggttgaatcggatggtacctaata

SEQ ID NO: 374062 - DNA, 30 bp, Artificial Sequence
  Synthetic oligonucleotide
cgcctgatgtacatatgatcgctcctaata

SEQ ID NO: 374063 - DNA, 30 bp, Artificial Sequence
  Synthetic oligonucleotide
tttcaccactatttttaaccaatgctaata

SEQ ID NO: 374064 - DNA, 30 bp, Artificial Sequence
  Synthetic oligonucleotide
ggaatattcgtaaaagactattatctaata

SEQ ID NO: 374065 - DNA, 30 bp, Artificial Sequence
  Synthetic oligonucleotide
actggatgaatagtacacacgggtctaata

SEQ ID NO: 374066 - DNA, 30 bp, Artificial Sequence
  Synthetic oligonucleotide
catctctgtagcctgctagaggttctaata

SEQ ID NO: 374067 - DNA, 30 bp, Artificial Sequence
  Synthetic oligonucleotide
gtttccatgtgatgtcccaacccagtaata

SEQ ID NO: 374068 - DNA, 30 bp, Artificial Sequence
  Synthetic oligonucleotide
tcagccggttccggtacccaactcgtaata

SEQ ID NO: 374069 - DNA, 30 bp, Artificial Sequence
  Synthetic oligonucleotide
aagattatacacaagatctctatggtaata

SEQ ID NO: 374070 - DNA, 28 bp, Artificial Sequence
  Synthetic oligonucleotide
ctttacaaaagaccctcggggtgtaata

SEQ ID NO: 374071 - DNA, 30 bp, Artificial Sequence
  Synthetic oligonucleotide
aatagcctcccagtattaggaattgtaata

SEQ ID NO: 374072 - DNA, 30 bp, Artificial Sequence
  Synthetic oligonucleotide
actaacctgacataacaggtcattgtaata

SEQ ID NO: 374073 - DNA, 30 bp, Artificial Sequence
  Synthetic oligonucleotide
gcctaacacacgagccacagcacattaata

SEQ ID NO: 374074 - DNA, 30 bp, Artificial Sequence
  Synthetic oligonucleotide
ggactcgttctgaatgcattaatattaata

SEQ ID NO: 374075 - DNA, 30 bp, Artificial Sequence
  Synthetic oligonucleotide
tggctgataatgactcgctaatacttaata

SEQ ID NO: 374076 - DNA, 30 bp, Artificial Sequence
  Synthetic oligonucleotide
tggtatggggtttcacgcatgcccttaata

SEQ ID NO: 374077 - DNA, 30 bp, Artificial Sequence
  Synthetic oligonucleotide
gtctagtgctcgccagtcgatatcttaata

SEQ ID NO: 374078 - DNA, 30 bp, Artificial Sequence
  Synthetic oligonucleotide
tggcggaaaattaaacggaaagcgttaata

SEQ ID NO: 374079 - DNA, 30 bp, Artificial Sequence
  Synthetic oligonucleotide
catgtatctcaacgagatagcgctttaata

SEQ ID NO: 374080 - DNA, 30 bp, Artificial Sequence
  Synthetic oligonucleotide
aaccggtcagatatctatttctctttaata

SEQ ID NO: 374081 - DNA, 30 bp, Artificial Sequence
  Synthetic oligonucleotide
ggggttaagatgaccctttatagtttaata

SEQ ID NO: 374082 - DNA, 30 bp, Artificial Sequence
  Synthetic oligonucleotide
tcttcaaaaattttacgcaggtaaaacata

SEQ ID NO: 374083 - DNA, 30 bp, Artificial Sequence
  Synthetic oligonucleotide
gtcatagacacccgacccctgggaaacata

SEQ ID NO: 374084 - DNA, 30 bp, Artificial Sequence
  Synthetic oligonucleotide
ggagttgcgtagtggatccgtataaacata

SEQ ID NO: 374085 - DNA, 30 bp, Artificial Sequence
  Synthetic oligonucleotide
tacagtggatcggaggtcactttaaacata

SEQ ID NO: 374086 - DNA, 30 bp, Artificial Sequence
  Synthetic oligonucleotide
cataagaacggcgcacacgcagccaacata

SEQ ID NO: 374087 - DNA, 30 bp, Artificial Sequence
  Synthetic oligonucleotide
agtggacgccattgttatagatgcaacata

SEQ ID NO: 374088 - DNA, 30 bp, Artificial Sequence
  Synthetic oligonucleotide
cggataagccgcagaagccgtttcaacata

SEQ ID NO: 374089 - DNA, 30 bp, Artificial Sequence
  Synthetic oligonucleotide
ggcgttggcaggatcggcaacgcgaacata

SEQ ID NO: 374090 - DNA, 30 bp, Artificial Sequence
  Synthetic oligonucleotide
gcacctgacactctgatgtggaggaacata

SEQ ID NO: 374091 - DNA, 30 bp, Artificial Sequence
  Synthetic oligonucleotide
ggatagtgttcatagtttcaatggaacata

SEQ ID NO: 374092 - DNA, 30 bp, Artificial Sequence
  Synthetic oligonucleotide
gggcaagattgggcaggagtatataacata

SEQ ID NO: 374093 - DNA, 30 bp, Artificial Sequence
  Synthetic oligonucleotide
tatcgtgacatcggagacttgggtaacata

SEQ ID NO: 374094 - DNA, 30 bp, Artificial Sequence
  Synthetic oligonucleotide
cagttgtggttagacataaagtaacacata

SEQ ID NO: 374095 - DNA, 30 bp, Artificial Sequence
  Synthetic oligonucleotide
tgcccgtctgaatcattacgacagcacata

SEQ ID NO: 374096 - DNA, 30 bp, Artificial Sequence
  Synthetic oligonucleotide
accggataacgtgcgtttaccacgcacata

SEQ ID NO: 374097 - DNA, 30 bp, Artificial Sequence
  Synthetic oligonucleotide
ctggaccggtcatctttaataaggcacata

SEQ ID NO: 374098 - DNA, 30 bp, Artificial Sequence
  Synthetic oligonucleotide
acatagatttgtgtttctatattgcacata

SEQ ID NO: 374099 - DNA, 30 bp, Artificial Sequence
  Synthetic oligonucleotide
tgctgggtcttcgcaaagtactgtcacata

SEQ ID NO: 374100 - DNA, 30 bp, Artificial Sequence
  Synthetic oligonucleotide
ctatgagcagagaagtatgtcaaagacata

SEQ ID NO: 374101 - DNA, 30 bp, Artificial Sequence
  Synthetic oligonucleotide
gtaagtctaattgtggtgctcgaagacata

SEQ ID NO: 374102 - DNA, 30 bp, Artificial Sequence
  Synthetic oligonucleotide
gagtactgggaacccgttattggagacata

SEQ ID NO: 374103 - DNA, 30 bp, Artificial Sequence
  Synthetic oligonucleotide
ttgaataatttgaaaaggttagccgacata

SEQ ID NO: 374104 - DNA, 30 bp, Artificial Sequence
  Synthetic oligonucleotide
ggtccgttcatcgagccctgccgggacata

SEQ ID NO: 374105 - DNA, 30 bp, Artificial Sequence
  Synthetic oligonucleotide
tcgatagacaaaagggccaacgctgacata

SEQ ID NO: 374106 - DNA, 30 bp, Artificial Sequence
  Synthetic oligonucleotide
ttaccaggttggagaactcggcaatacata

SEQ ID NO: 374107 - DNA, 30 bp, Artificial Sequence
  Synthetic oligonucleotide
tgtctgggtatgtgaagagctgaatacata

SEQ ID NO: 374108 - DNA, 30 bp, Artificial Sequence
  Synthetic oligonucleotide
gataacgctaattgtgggcctggatacata

SEQ ID NO: 374109 - DNA, 30 bp, Artificial Sequence
  Synthetic oligonucleotide
gaacatcttatgacccactgctgctacata

SEQ ID NO: 374110 - DNA, 30 bp, Artificial Sequence
  Synthetic oligonucleotide
aaagaagcgctgaaatataccgtctacata

SEQ ID NO: 374111 - DNA, 30 bp, Artificial Sequence
  Synthetic oligonucleotide
ggtatcttccccatgagaaggttgtacata

SEQ ID NO: 374112 - DNA, 30 bp, Artificial Sequence
  Synthetic oligonucleotide
gaccaaggaaatttttgggctagaaccata

SEQ ID NO: 374113 - DNA, 30 bp, Artificial Sequence
  Synthetic oligonucleotide
gcaggggggtcctgtcaacaggacaccata

SEQ ID NO: 374114 - DNA, 30 bp, Artificial Sequence
  Synthetic oligonucleotide
attctgattcggggttaaagtatcaccata

SEQ ID NO: 374115 - DNA, 30 bp, Artificial Sequence
  Synthetic oligonucleotide
cacatatccgcgggacacgtggataccata

SEQ ID NO: 374116 - DNA, 30 bp, Artificial Sequence
  Synthetic oligonucleotide
aaggtaaaccatccccttgggtttaccata

SEQ ID NO: 374117 - DNA, 30 bp, Artificial Sequence
  Synthetic oligonucleotide
gtcgtgggtcgtaaatgtagacaacccata

SEQ ID NO: 374118 - DNA, 30 bp, Artificial Sequence
  Synthetic oligonucleotide
atccacgtacggttggcaatagtccccata

SEQ ID NO: 374119 - DNA, 30 bp, Artificial Sequence
  Synthetic oligonucleotide
ctagcgaaccggaacacactttaagccata

SEQ ID NO: 374120 - DNA, 30 bp, Artificial Sequence
  Synthetic oligonucleotide
tcagatgaaaccctgggatattcagccata

SEQ ID NO: 374121 - DNA, 30 bp, Artificial Sequence
  Synthetic oligonucleotide
atgcctttccactgccgagtaagagccata

SEQ ID NO: 374122 - DNA, 30 bp, Artificial Sequence
  Synthetic oligonucleotide
gtattcaggtctctggagctccaggccata

SEQ ID NO: 374123 - DNA, 30 bp, Artificial Sequence
  Synthetic oligonucleotide
catatttgccggggtaacgcctcggccata

SEQ ID NO: 374124 - DNA, 30 bp, Artificial Sequence
  Synthetic oligonucleotide
cctgatggtatccagatgcaactggccata

SEQ ID NO: 374125 - DNA, 30 bp, Artificial Sequence
  Synthetic oligonucleotide
ctctcatacaagcacgaaattagtgccata

SEQ ID NO: 374126 - DNA, 30 bp, Artificial Sequence
  Synthetic oligonucleotide
cggctatgcggttgggcggcggaatccata

SEQ ID NO: 374127 - DNA, 30 bp, Artificial Sequence
  Synthetic oligonucleotide
ctcggtgcccgttcggcggaaacatccata

SEQ ID NO: 374128 - DNA, 30 bp, Artificial Sequence
  Synthetic oligonucleotide
gatgcatagtgcctatgtggaatatccata

SEQ ID NO: 374129 - DNA, 30 bp, Artificial Sequence
  Synthetic oligonucleotide
cgcaatcctttcctaggatttatatccata

SEQ ID NO: 374130 - DNA, 30 bp, Artificial Sequence
  Synthetic oligonucleotide
ctttaagccttgtctgaccgtaactccata

SEQ ID NO: 374131 - DNA, 30 bp, Artificial Sequence
  Synthetic oligonucleotide
tagaacacccgcatgtatgtttactccata

SEQ ID NO: 374132 - DNA, 30 bp, Artificial Sequence
  Synthetic oligonucleotide
attcgaccatcatctgagacggagtccata

SEQ ID NO: 374133 - DNA, 30 bp, Artificial Sequence
  Synthetic oligonucleotide
tctggctgcctggcgcttgcatgttccata

SEQ ID NO: 374134 - DNA, 30 bp, Artificial Sequence
  Synthetic oligonucleotide
attgacagaggtgtgcgattgacaagcata

SEQ ID NO: 374135 - DNA, 30 bp, Artificial Sequence
  Synthetic oligonucleotide
atctgatttgtaccgacatatacaagcata

SEQ ID NO: 374136 - DNA, 30 bp, Artificial Sequence
  Synthetic oligonucleotide
taaccatctagttctttagacccaagcata

SEQ ID NO: 374137 - DNA, 30 bp, Artificial Sequence
  Synthetic oligonucleotide
tcagctccgcgatgagacaagatcagcata

SEQ ID NO: 374138 - DNA, 30 bp, Artificial Sequence
  Synthetic oligonucleotide
tttaacaggcgcggcccatttcggagcata

SEQ ID NO: 374139 - DNA, 30 bp, Artificial Sequence
  Synthetic oligonucleotide
cgcaacgattgcgtatgtcttatgagcata

SEQ ID NO: 374140 - DNA, 30 bp, Artificial Sequence
  Synthetic oligonucleotide
agtagtctgctcatcccccctcatagcata

SEQ ID NO: 374141 - DNA, 30 bp, Artificial Sequence
  Synthetic oligonucleotide
taagcaagaacagtattgtttactagcata

SEQ ID NO: 374142 - DNA, 30 bp, Artificial Sequence
  Synthetic oligonucleotide
gggtatgcatacccttgcacgtttagcata

SEQ ID NO: 374143 - DNA, 30 bp, Artificial Sequence
  Synthetic oligonucleotide
tgctctcgcaaaaacggtttacgacgcata

SEQ ID NO: 374144 - DNA, 30 bp, Artificial Sequence
  Synthetic oligonucleotide
gcgcgtcctagcgggagtcttagccgcata

SEQ ID NO: 374145 - DNA, 30 bp, Artificial Sequence
  Synthetic oligonucleotide
cactggatttatcatgatattggccgcata

SEQ ID NO: 374146 - DNA, 30 bp, Artificial Sequence
  Synthetic oligonucleotide
gtcataagctcccttgttgtcactcgcata

SEQ ID NO: 374147 - DNA, 30 bp, Artificial Sequence
  Synthetic oligonucleotide
gcgggtgtcgccgcgcaaatgactcgcata

SEQ ID NO: 374148 - DNA, 30 bp, Artificial Sequence
  Synthetic oligonucleotide
cggtaatgattctggtacgttggaggcata

SEQ ID NO: 374149 - DNA, 30 bp, Artificial Sequence
  Synthetic oligonucleotide
tataggtagtaagatctggatctaggcata

SEQ ID NO: 374150 - DNA, 30 bp, Artificial Sequence
  Synthetic oligonucleotide
ggattgatgttggcgggggccgtaggcata

SEQ ID NO: 374151 - DNA, 30 bp, Artificial Sequence
  Synthetic oligonucleotide
taacatggagtatgtttaacagccggcata

SEQ ID NO: 374152 - DNA, 30 bp, Artificial Sequence
  Synthetic oligonucleotide
tatgcgcatctgtatgatgagagcggcata

SEQ ID NO: 374153 - DNA, 30 bp, Artificial Sequence
  Synthetic oligonucleotide
actattaaatagttacaggacggcggcata

SEQ ID NO: 374154 - DNA, 30 bp, Artificial Sequence
  Synthetic oligonucleotide
aaacaaactcgtttgggaatccagggcata

SEQ ID NO: 374155 - DNA, 30 bp, Artificial Sequence
  Synthetic oligonucleotide
atagtgcacttagtcatccaagggggcata

SEQ ID NO: 374156 - DNA, 30 bp, Artificial Sequence
  Synthetic oligonucleotide
caggggtattatagttcttgagggggcata

SEQ ID NO: 374157 - DNA, 30 bp, Artificial Sequence
  Synthetic oligonucleotide
tcatatagccacgagatagtgcctggcata

SEQ ID NO: 374158 - DNA, 30 bp, Artificial Sequence
  Synthetic oligonucleotide
cgtattccatgtatatgaaccgcctgcata

SEQ ID NO: 374159 - DNA, 30 bp, Artificial Sequence
  Synthetic oligonucleotide
taatgctgaacgcactaggatagctgcata

SEQ ID NO: 374160 - DNA, 30 bp, Artificial Sequence
  Synthetic oligonucleotide
gaatacacaatatcaatggagcagtgcata

SEQ ID NO: 374161 - DNA, 30 bp, Artificial Sequence
  Synthetic oligonucleotide
aaaagcaacggattgcagaatcagtgcata

SEQ ID NO: 374162 - DNA, 30 bp, Artificial Sequence
  Synthetic oligonucleotide
caccctcacttaccacgttttgagtgcata

SEQ ID NO: 374163 - DNA, 30 bp, Artificial Sequence
  Synthetic oligonucleotide
cctccgttatctggacggctacggtgcata

SEQ ID NO: 374164 - DNA, 30 bp, Artificial Sequence
  Synthetic oligonucleotide
catctcaccaagttgcgtcagatgtgcata

SEQ ID NO: 374165 - DNA, 30 bp, Artificial Sequence
  Synthetic oligonucleotide
tgcacgcggactgatgtttcagtgtgcata

SEQ ID NO: 374166 - DNA, 30 bp, Artificial Sequence
  Synthetic oligonucleotide
aaacggtgcagctttcatctttattgcata

SEQ ID NO: 374167 - DNA, 30 bp, Artificial Sequence
  Synthetic oligonucleotide
gtcttgcgtgaggaagccatacgaatcata

SEQ ID NO: 374168 - DNA, 30 bp, Artificial Sequence
  Synthetic oligonucleotide
ttggaatcggtttgtgttacgctaatcata

SEQ ID NO: 374169 - DNA, 30 bp, Artificial Sequence
  Synthetic oligonucleotide
gtctagaaaagtggaattggcttaatcata

SEQ ID NO: 374170 - DNA, 30 bp, Artificial Sequence
  Synthetic oligonucleotide
aattgttcgagtgtaggcgatttaatcata

SEQ ID NO: 374171 - DNA, 30 bp, Artificial Sequence
  Synthetic oligonucleotide
gagttctagcgttgagcaggagccatcata

SEQ ID NO: 374172 - DNA, 30 bp, Artificial Sequence
  Synthetic oligonucleotide
gggtaagaaatgtctacgcacagcatcata

SEQ ID NO: 374173 - DNA, 29 bp, Artificial Sequence
  Synthetic oligonucleotide
aactggtctcacttactcgaaagatcata

SEQ ID NO: 374174 - DNA, 30 bp, Artificial Sequence
  Synthetic oligonucleotide
acctttatgacccgggtcacagatatcata

SEQ ID NO: 374175 - DNA, 30 bp, Artificial Sequence
  Synthetic oligonucleotide
catgccgacctttccgagcatattatcata

SEQ ID NO: 374176 - DNA, 30 bp, Artificial Sequence
  Synthetic oligonucleotide
aaaggtttaggtttgacctaagttatcata

SEQ ID NO: 374177 - DNA, 30 bp, Artificial Sequence
  Synthetic oligonucleotide
tgaacctgtgagccctgaagcacactcata

SEQ ID NO: 374178 - DNA, 30 bp, Artificial Sequence
  Synthetic oligonucleotide
caaaggacggccctaatacctttcctcata

SEQ ID NO: 374179 - DNA, 30 bp, Artificial Sequence
  Synthetic oligonucleotide
cgtggtggaatctgtaaaggggctctcata

SEQ ID NO: 374180 - DNA, 30 bp, Artificial Sequence
  Synthetic oligonucleotide
tactgggcgtcaagggcgcatgctctcata

SEQ ID NO: 374181 - DNA, 30 bp, Artificial Sequence
  Synthetic oligonucleotide
gaaccgctaagggatagtttaattctcata

SEQ ID NO: 374182 - DNA, 30 bp, Artificial Sequence
  Synthetic oligonucleotide
tatggcattcgtacatacattcgagtcata

SEQ ID NO: 374183 - DNA, 30 bp, Artificial Sequence
  Synthetic oligonucleotide
agtgtgtttatagggagccgtgccgtcata

SEQ ID NO: 374184 - DNA, 30 bp, Artificial Sequence
  Synthetic oligonucleotide
tgcgacggccactgtaaacgaagcgtcata

SEQ ID NO: 374185 - DNA, 30 bp, Artificial Sequence
  Synthetic oligonucleotide
gggtcaagaacacaaccctaatgggtcata

SEQ ID NO: 374186 - DNA, 30 bp, Artificial Sequence
  Synthetic oligonucleotide
aaaggatcgtatattaatgtgcctgtcata

SEQ ID NO: 374187 - DNA, 30 bp, Artificial Sequence
  Synthetic oligonucleotide
cctttaatgctgcgtggggtgtctgtcata

SEQ ID NO: 374188 - DNA, 30 bp, Artificial Sequence
  Synthetic oligonucleotide
atcatgaggctgtctctacgtaaattcata

SEQ ID NO: 374189 - DNA, 30 bp, Artificial Sequence
  Synthetic oligonucleotide
taacttaacgccgtggaggttccattcata

SEQ ID NO: 374190 - DNA, 30 bp, Artificial Sequence
  Synthetic oligonucleotide
acagccaatctcatcaccatttgattcata

SEQ ID NO: 374191 - DNA, 30 bp, Artificial Sequence
  Synthetic oligonucleotide
atgtcagcaaggggcttccgagccttcata

SEQ ID NO: 374192 - DNA, 30 bp, Artificial Sequence
  Synthetic oligonucleotide
ttggaatcccaattgcgcatatagttcata

SEQ ID NO: 374193 - DNA, 30 bp, Artificial Sequence
  Synthetic oligonucleotide
tctgacagggccccactatatgcgttcata

SEQ ID NO: 374194 - DNA, 30 bp, Artificial Sequence
  Synthetic oligonucleotide
aaccaagtctgccttgtccagtcgttcata

SEQ ID NO: 374195 - DNA, 30 bp, Artificial Sequence
  Synthetic oligonucleotide
caaccgatcgatgtgctattggatttcata

SEQ ID NO: 374196 - DNA, 30 bp, Artificial Sequence
  Synthetic oligonucleotide
cgtattaatggaacagacacttctttcata

SEQ ID NO: 374197 - DNA, 30 bp, Artificial Sequence
  Synthetic oligonucleotide
ccttggcgatcaaaatacggtcgtttcata

SEQ ID NO: 374198 - DNA, 30 bp, Artificial Sequence
  Synthetic oligonucleotide
atgtccagaaaggttaattgtattttcata

SEQ ID NO: 374199 - DNA, 30 bp, Artificial Sequence
  Synthetic oligonucleotide
caatcattccaattaacgctgggaaagata

SEQ ID NO: 374200 - DNA, 30 bp, Artificial Sequence
  Synthetic oligonucleotide
ggctcggttatcctgaataaaataaagata

SEQ ID NO: 374201 - DNA, 30 bp, Artificial Sequence
  Synthetic oligonucleotide
tgttaattggcttcaaagtcattaaagata

SEQ ID NO: 374202 - DNA, 30 bp, Artificial Sequence
  Synthetic oligonucleotide
cccccatgtccgtctgtctgtcacaagata

SEQ ID NO: 374203 - DNA, 30 bp, Artificial Sequence
  Synthetic oligonucleotide
atttagtactaagtgcgcttacagaagata

SEQ ID NO: 374204 - DNA, 30 bp, Artificial Sequence
  Synthetic oligonucleotide
gcttctcatacaagtttacgttcgaagata

SEQ ID NO: 374205 - DNA, 30 bp, Artificial Sequence
  Synthetic oligonucleotide
ccggcgcggaaacaattccgacggaagata

SEQ ID NO: 374206 - DNA, 30 bp, Artificial Sequence
  Synthetic oligonucleotide
acctacgtagcaccctcggtagctaagata

SEQ ID NO: 374207 - DNA, 30 bp, Artificial Sequence
  Synthetic oligonucleotide
gatctaggcacctatttcgtgattaagata

SEQ ID NO: 374208 - DNA, 30 bp, Artificial Sequence
  Synthetic oligonucleotide
gtagttatcaacgcccgtcagtaacagata

SEQ ID NO: 374209 - DNA, 30 bp, Artificial Sequence
  Synthetic oligonucleotide
aaagttaccatacattggcaatgacagata

SEQ ID NO: 374210 - DNA, 30 bp, Artificial Sequence
  Synthetic oligonucleotide
ggctatggatccgcgttgcgtatacagata

SEQ ID NO: 374211 - DNA, 30 bp, Artificial Sequence
  Synthetic oligonucleotide
tgctgacgataaaatagcaatctacagata

SEQ ID NO: 374212 - DNA, 30 bp, Artificial Sequence
  Synthetic oligonucleotide
tggtcaatgtcaggtgccatggaccagata

SEQ ID NO: 374213 - DNA, 30 bp, Artificial Sequence
  Synthetic oligonucleotide
ataacatgagccgtacccttgcgccagata

SEQ ID NO: 374214 - DNA, 30 bp, Artificial Sequence
  Synthetic oligonucleotide
gtctgtgtccagagacaaatacggcagata

SEQ ID NO: 374215 - DNA, 30 bp, Artificial Sequence
  Synthetic oligonucleotide
gacgttctgcctccctggttagggcagata

SEQ ID NO: 374216 - DNA, 30 bp, Artificial Sequence
  Synthetic oligonucleotide
aaagcagcaactcagctccttccagagata

SEQ ID NO: 374217 - DNA, 30 bp, Artificial Sequence
  Synthetic oligonucleotide
tggttcgtcaatagtgatcccagagagata

SEQ ID NO: 374218 - DNA, 30 bp, Artificial Sequence
  Synthetic oligonucleotide
ggaattcctgagatcaacgaatacgagata

SEQ ID NO: 374219 - DNA, 30 bp, Artificial Sequence
  Synthetic oligonucleotide
ggtaccgtagcactataggcttccgagata

SEQ ID NO: 374220 - DNA, 30 bp, Artificial Sequence
  Synthetic oligonucleotide
cattgctgccctgcaagtaggatcgagata

SEQ ID NO: 374221 - DNA, 30 bp, Artificial Sequence
  Synthetic oligonucleotide
tagagggtacaatatagattcagggagata

SEQ ID NO: 374222 - DNA, 30 bp, Artificial Sequence
  Synthetic oligonucleotide
gctcgttatgccattatctcaggggagata

SEQ ID NO: 374223 - DNA, 30 bp, Artificial Sequence
  Synthetic oligonucleotide
gatatgggctcgtatagacatagtgagata

SEQ ID NO: 374224 - DNA, 30 bp, Artificial Sequence
  Synthetic oligonucleotide
ctagcaacagtcgtggcgcgtagtgagata

SEQ ID NO: 374225 - DNA, 30 bp, Artificial Sequence
  Synthetic oligonucleotide
ctatgcagatagttctattacccatagata

SEQ ID NO: 374226 - DNA, 30 bp, Artificial Sequence
  Synthetic oligonucleotide
gaataccgaggtgttggtccgtcatagata

SEQ ID NO: 374227 - DNA, 30 bp, Artificial Sequence
  Synthetic oligonucleotide
ctggcgtatcggtgaaaaataagatagata

SEQ ID NO: 374228 - DNA, 30 bp, Artificial Sequence
  Synthetic oligonucleotide
tgcctgagcttcggaaggctattatagata

SEQ ID NO: 374229 - DNA, 30 bp, Artificial Sequence
  Synthetic oligonucleotide
gtgttgccctctaatcgatggacctagata

SEQ ID NO: 374230 - DNA, 30 bp, Artificial Sequence
  Synthetic oligonucleotide
gttgttcagttcacggtgggttggtagata

SEQ ID NO: 374231 - DNA, 30 bp, Artificial Sequence
  Synthetic oligonucleotide
aagcagcaatatgcacgcgatctgtagata

SEQ ID NO: 374232 - DNA, 30 bp, Artificial Sequence
  Synthetic oligonucleotide
accgatgttagttagacgcgacgaacgata

SEQ ID NO: 374233 - DNA, 30 bp, Artificial Sequence
  Synthetic oligonucleotide
cctatttggcccggaattgacggaacgata

SEQ ID NO: 374234 - DNA, 30 bp, Artificial Sequence
  Synthetic oligonucleotide
tgtggataagattagatacttgtaacgata

SEQ ID NO: 374235 - DNA, 30 bp, Artificial Sequence
  Synthetic oligonucleotide
agaaaaaatgtctcggggccccacacgata

SEQ ID NO: 374236 - DNA, 31 bp, Artificial Sequence
  Synthetic oligonucleotide
atagagtctatcagataaaatcgagacgata

SEQ ID NO: 374237 - DNA, 30 bp, Artificial Sequence
  Synthetic oligonucleotide
gtttctgcaagaaatccgctcgctacgata

SEQ ID NO: 374238 - DNA, 30 bp, Artificial Sequence
  Synthetic oligonucleotide
tgaaggtaactaatctggttacttacgata

SEQ ID NO: 374239 - DNA, 30 bp, Artificial Sequence
  Synthetic oligonucleotide
gttaggaatttctccccaatataaccgata

SEQ ID NO: 374240 - DNA, 30 bp, Artificial Sequence
  Synthetic oligonucleotide
tcgtctaagacggtagggcgcagaccgata

SEQ ID NO: 374241 - DNA, 30 bp, Artificial Sequence
  Synthetic oligonucleotide
gtgtttgataagatatctaagtgaccgata

SEQ ID NO: 374242 - DNA, 30 bp, Artificial Sequence
  Synthetic oligonucleotide
tctgcacccactctcgggatgtacccgata

SEQ ID NO: 374243 - DNA, 30 bp, Artificial Sequence
  Synthetic oligonucleotide
gcatgtaggcattccgcctattacccgata

SEQ ID NO: 374244 - DNA, 30 bp, Artificial Sequence
  Synthetic oligonucleotide
ccactaccctagatgtttaataccccgata

SEQ ID NO: 374245 - DNA, 30 bp, Artificial Sequence
  Synthetic oligonucleotide
ggaagtatttcctagggtaaagcgccgata

SEQ ID NO: 374246 - DNA, 30 bp, Artificial Sequence
  Synthetic oligonucleotide
atagagagcctttgcgttgaaactccgata

SEQ ID NO: 374247 - DNA, 30 bp, Artificial Sequence
  Synthetic oligonucleotide
cctaagcgtgccaaagcgacgtaagcgata

SEQ ID NO: 374248 - DNA, 30 bp, Artificial Sequence
  Synthetic oligonucleotide
acgcagtgatgtcgggagcgctcagcgata

SEQ ID NO: 374249 - DNA, 30 bp, Artificial Sequence
  Synthetic oligonucleotide
ctgccgcactagcccggggcgaccgcgata

SEQ ID NO: 374250 - DNA, 30 bp, Artificial Sequence
  Synthetic oligonucleotide
cctaagactaatagtgtgtcgcaggcgata

SEQ ID NO: 374251 - DNA, 30 bp, Artificial Sequence
  Synthetic oligonucleotide
atcagttatccccgtatcacgcgggcgata

SEQ ID NO: 374252 - DNA, 30 bp, Artificial Sequence
  Synthetic oligonucleotide
tacttgcattacaccttgtcccatgcgata

SEQ ID NO: 374253 - DNA, 30 bp, Artificial Sequence
  Synthetic oligonucleotide
tttcagcactgtgaagcaaagacctcgata

SEQ ID NO: 374254 - DNA, 30 bp, Artificial Sequence
  Synthetic oligonucleotide
gatgccgacgtagtcccgctctcctcgata

SEQ ID NO: 374255 - DNA, 30 bp, Artificial Sequence
  Synthetic oligonucleotide
acgtccatatctgcaattcaactgtcgata

SEQ ID NO: 374256 - DNA, 30 bp, Artificial Sequence
  Synthetic oligonucleotide
gccggtagcgtcaaagtttgtgcttcgata

SEQ ID NO: 374257 - DNA, 30 bp, Artificial Sequence
  Synthetic oligonucleotide
gaaacggatgcgcatattcacacaaggata

SEQ ID NO: 374258 - DNA, 30 bp, Artificial Sequence
  Synthetic oligonucleotide
ccgctcctctccagcttgaaactaaggata

SEQ ID NO: 374259 - DNA, 30 bp, Artificial Sequence
  Synthetic oligonucleotide
ggccacgaccaccgtcaggtagccaggata

SEQ ID NO: 374260 - DNA, 30 bp, Artificial Sequence
  Synthetic oligonucleotide
acctatggatgtatttagtgccaacggata

SEQ ID NO: 374261 - DNA, 30 bp, Artificial Sequence
  Synthetic oligonucleotide
ggacaagagtcctaggccatagaacggata

SEQ ID NO: 374262 - DNA, 30 bp, Artificial Sequence
  Synthetic oligonucleotide
ctgtacagatctaggcaaccgccacggata

SEQ ID NO: 374263 - DNA, 30 bp, Artificial Sequence
  Synthetic oligonucleotide
agtaatagcaagcattacagaaaccggata

SEQ ID NO: 374264 - DNA, 30 bp, Artificial Sequence
  Synthetic oligonucleotide
acgctcatcaccaaaaacccataccggata

SEQ ID NO: 374265 - DNA, 30 bp, Artificial Sequence
  Synthetic oligonucleotide
cctctagagtagcggtctgcaggccggata

SEQ ID NO: 374266 - DNA, 30 bp, Artificial Sequence
  Synthetic oligonucleotide
ggtgttctggacgaagtttggtgccggata

SEQ ID NO: 374267 - DNA, 30 bp, Artificial Sequence
  Synthetic oligonucleotide
caatcggggcgacctcacataatccggata

SEQ ID NO: 374268 - DNA, 30 bp, Artificial Sequence
  Synthetic oligonucleotide
cctgaccgtcgcatagcgacaacgcggata

SEQ ID NO: 374269 - DNA, 30 bp, Artificial Sequence
  Synthetic oligonucleotide
agaccatctcgtccatatcagtggcggata

SEQ ID NO: 374270 - DNA, 30 bp, Artificial Sequence
  Synthetic oligonucleotide
cctgctgcgagctctctaaatttgcggata

SEQ ID NO: 374271 - DNA, 30 bp, Artificial Sequence
  Synthetic oligonucleotide
taacgatatattcatgaaggtaatcggata

SEQ ID NO: 374272 - DNA, 30 bp, Artificial Sequence
  Synthetic oligonucleotide
gacgtatgacggatgaagcaatgtcggata

SEQ ID NO: 374273 - DNA, 30 bp, Artificial Sequence
  Synthetic oligonucleotide
tcaggggtaagggaatgtgggtttcggata

SEQ ID NO: 374274 - DNA, 30 bp, Artificial Sequence
  Synthetic oligonucleotide
aagctcgggtattcagggttggaagggata

SEQ ID NO: 374275 - DNA, 30 bp, Artificial Sequence
  Synthetic oligonucleotide
gcatacgctgccacaatacgtccagggata

SEQ ID NO: 374276 - DNA, 30 bp, Artificial Sequence
  Synthetic oligonucleotide
ttacgcctgatcgttatcaggaacgggata

SEQ ID NO: 374277 - DNA, 30 bp, Artificial Sequence
  Synthetic oligonucleotide
gtaagcagctctgccgtttattgcgggata

SEQ ID NO: 374278 - DNA, 30 bp, Artificial Sequence
  Synthetic oligonucleotide
aatgtgatttgggtgatgttatcggggata

SEQ ID NO: 374279 - DNA, 30 bp, Artificial Sequence
  Synthetic oligonucleotide
aaggagcctgcacgtgagtgaatggggata

SEQ ID NO: 374280 - DNA, 30 bp, Artificial Sequence
  Synthetic oligonucleotide
cccgggagatgtgggggaatccatgggata

SEQ ID NO: 374281 - DNA, 30 bp, Artificial Sequence
  Synthetic oligonucleotide
gaccgaatcaggttcccagtatctgggata

SEQ ID NO: 374282 - DNA, 30 bp, Artificial Sequence
  Synthetic oligonucleotide
caaaccaaacagcaccacgcacgtgggata

SEQ ID NO: 374283 - DNA, 30 bp, Artificial Sequence
  Synthetic oligonucleotide
aataggtgattggaggtgccataatggata

SEQ ID NO: 374284 - DNA, 30 bp, Artificial Sequence
  Synthetic oligonucleotide
agtaatgcgtgtaaagcgtcctcatggata

SEQ ID NO: 374285 - DNA, 30 bp, Artificial Sequence
  Synthetic oligonucleotide
ttattcgttagccgtaccgagatatggata

SEQ ID NO: 374286 - DNA, 30 bp, Artificial Sequence
  Synthetic oligonucleotide
ccaaccacccattgggtattttattggata

SEQ ID NO: 374287 - DNA, 30 bp, Artificial Sequence
  Synthetic oligonucleotide
ccgcaagcgcttcgccatatggtttggata

SEQ ID NO: 374288 - DNA, 30 bp, Artificial Sequence
  Synthetic oligonucleotide
aagtcttagaatgtggggccgaaaatgata

SEQ ID NO: 374289 - DNA, 30 bp, Artificial Sequence
  Synthetic oligonucleotide
ctttagacggtagtgtaatttaaaatgata

SEQ ID NO: 374290 - DNA, 30 bp, Artificial Sequence
  Synthetic oligonucleotide
tcccatcaggatgtcatgaaggacatgata

SEQ ID NO: 374291 - DNA, 30 bp, Artificial Sequence
  Synthetic oligonucleotide
cgcccgtccttgcacgccatgaatatgata

SEQ ID NO: 374292 - DNA, 30 bp, Artificial Sequence
  Synthetic oligonucleotide
gctgttcttataagtcctggatgtatgata

SEQ ID NO: 374293 - DNA, 30 bp, Artificial Sequence
  Synthetic oligonucleotide
tttcaacatccccatgtacattgtatgata

SEQ ID NO: 374294 - DNA, 30 bp, Artificial Sequence
  Synthetic oligonucleotide
aagtcaacggtgattttcagtacactgata

SEQ ID NO: 374295 - DNA, 30 bp, Artificial Sequence
  Synthetic oligonucleotide
aaagtaaggcgtttgaaaacccgactgata

SEQ ID NO: 374296 - DNA, 30 bp, Artificial Sequence
  Synthetic oligonucleotide
cttcgattatttgagtgtagagcgctgata

SEQ ID NO: 374297 - DNA, 30 bp, Artificial Sequence
  Synthetic oligonucleotide
gcggcactacgaatggccttatcgctgata

SEQ ID NO: 374298 - DNA, 30 bp, Artificial Sequence
  Synthetic oligonucleotide
agccggttgtgggcaacgagcgtgctgata

SEQ ID NO: 374299 - DNA, 30 bp, Artificial Sequence
  Synthetic oligonucleotide
ggactggttcgtacggtattgatagtgata

SEQ ID NO: 374300 - DNA, 30 bp, Artificial Sequence
  Synthetic oligonucleotide
gtggggtatatcttgctgccgctagtgata

SEQ ID NO: 374301 - DNA, 30 bp, Artificial Sequence
  Synthetic oligonucleotide
gaattaggatgtagagaggtccacgtgata

SEQ ID NO: 374302 - DNA, 30 bp, Artificial Sequence
  Synthetic oligonucleotide
gcgtcttgatagtcactacttttcgtgata

SEQ ID NO: 374303 - DNA, 30 bp, Artificial Sequence
  Synthetic oligonucleotide
cgtgcaaagtcagttggaatggtggtgata

SEQ ID NO: 374304 - DNA, 30 bp, Artificial Sequence
  Synthetic oligonucleotide
tcaagtttctgtagagagtgtattgtgata

SEQ ID NO: 374305 - DNA, 30 bp, Artificial Sequence
  Synthetic oligonucleotide
ccggtgccaccctgtctggcagttgtgata

SEQ ID NO: 374306 - DNA, 30 bp, Artificial Sequence
  Synthetic oligonucleotide
ccatcggcactcggcatacagcaattgata

SEQ ID NO: 374307 - DNA, 30 bp, Artificial Sequence
  Synthetic oligonucleotide
acccccacttatgcaccccggaacttgata

SEQ ID NO: 374308 - DNA, 30 bp, Artificial Sequence
  Synthetic oligonucleotide
actagctagctacaagggtacggcttgata

SEQ ID NO: 374309 - DNA, 30 bp, Artificial Sequence
  Synthetic oligonucleotide
gcatcttctctacatagatcgttcttgata

SEQ ID NO: 374310 - DNA, 30 bp, Artificial Sequence
  Synthetic oligonucleotide
gaagggggtgcggtcgtcggtccgttgata

SEQ ID NO: 374311 - DNA, 30 bp, Artificial Sequence
  Synthetic oligonucleotide
gatatcgtccgtcataggtacaatttgata

SEQ ID NO: 374312 - DNA, 30 bp, Artificial Sequence
  Synthetic oligonucleotide
ttggtgacgatagataatggaacaaatata

SEQ ID NO: 374313 - DNA, 30 bp, Artificial Sequence
  Synthetic oligonucleotide
gcgctcgaccagtgttagtggacaaatata

SEQ ID NO: 374314 - DNA, 30 bp, Artificial Sequence
  Synthetic oligonucleotide
catggcgtcttgttaaatgttccaaatata

SEQ ID NO: 374315 - DNA, 30 bp, Artificial Sequence
  Synthetic oligonucleotide
gtaatgtgatcgtgcgaggtttcaaatata

SEQ ID NO: 374316 - DNA, 30 bp, Artificial Sequence
  Synthetic oligonucleotide
tttagaggtaggtgaaactgggacaatata

SEQ ID NO: 374317 - DNA, 30 bp, Artificial Sequence
  Synthetic oligonucleotide
aaacttcgccacctggctaaagagaatata

SEQ ID NO: 374318 - DNA, 30 bp, Artificial Sequence
  Synthetic oligonucleotide
ttatgcatttcgagtcgtaattttaatata

SEQ ID NO: 374319 - DNA, 30 bp, Artificial Sequence
  Synthetic oligonucleotide
ttgacctagtaaggtcgtaaactacatata

SEQ ID NO: 374320 - DNA, 30 bp, Artificial Sequence
  Synthetic oligonucleotide
tagattacaccctgctagatgtaccatata

SEQ ID NO: 374321 - DNA, 30 bp, Artificial Sequence
  Synthetic oligonucleotide
acgcaccactgtatggtgccatcccatata

SEQ ID NO: 374322 - DNA, 30 bp, Artificial Sequence
  Synthetic oligonucleotide
ataggacagtaaaacaaacgcgcgcatata

SEQ ID NO: 374323 - DNA, 30 bp, Artificial Sequence
  Synthetic oligonucleotide
ttggatgcaaatattaggttgtcgcatata

SEQ ID NO: 374324 - DNA, 30 bp, Artificial Sequence
  Synthetic oligonucleotide
cgggtcaagtgctgatgctcggggcatata

SEQ ID NO: 374325 - DNA, 30 bp, Artificial Sequence
  Synthetic oligonucleotide
tcctgacagtcattaattgcgcatcatata

SEQ ID NO: 374326 - DNA, 30 bp, Artificial Sequence
  Synthetic oligonucleotide
gttgtatagccttggattataccagatata

SEQ ID NO: 374327 - DNA, 30 bp, Artificial Sequence
  Synthetic oligonucleotide
gcctcttagagcgatacagtgagagatata

SEQ ID NO: 374328 - DNA, 30 bp, Artificial Sequence
  Synthetic oligonucleotide
ggcgatagtacgagaataacgcacgatata

SEQ ID NO: 374329 - DNA, 30 bp, Artificial Sequence
  Synthetic oligonucleotide
ggcctatttgtcccagccgattaggatata

SEQ ID NO: 374330 - DNA, 30 bp, Artificial Sequence
  Synthetic oligonucleotide
atcaataatgtcctcgtcgttttggatata

SEQ ID NO: 374331 - DNA, 30 bp, Artificial Sequence
  Synthetic oligonucleotide
aatgacaagtggggccttctaaatgatata

SEQ ID NO: 374332 - DNA, 30 bp, Artificial Sequence
  Synthetic oligonucleotide
cctccatactgctcgatgggcactgatata

SEQ ID NO: 374333 - DNA, 30 bp, Artificial Sequence
  Synthetic oligonucleotide
caaagacgatcgtgacaatgacttgatata

SEQ ID NO: 374334 - DNA, 30 bp, Artificial Sequence
  Synthetic oligonucleotide
gtaattctaagccggaagaaagaatatata

SEQ ID NO: 374335 - DNA, 30 bp, Artificial Sequence
  Synthetic oligonucleotide
agctttagatcacagattcctagatatata

SEQ ID NO: 374336 - DNA, 30 bp, Artificial Sequence
  Synthetic oligonucleotide
ataagtcacctagccgtctaagtatatata

SEQ ID NO: 374337 - DNA, 30 bp, Artificial Sequence
  Synthetic oligonucleotide
ggttctagggaaagtcagtgtaactatata

SEQ ID NO: 374338 - DNA, 30 bp, Artificial Sequence
  Synthetic oligonucleotide
gaagttaacggtgtgtctataagctatata

SEQ ID NO: 374339 - DNA, 30 bp, Artificial Sequence
  Synthetic oligonucleotide
cagaggggtactatagaagccacgtatata

SEQ ID NO: 374340 - DNA, 30 bp, Artificial Sequence
  Synthetic oligonucleotide
acgactataagctctcttagttggtatata

SEQ ID NO: 374341 - DNA, 30 bp, Artificial Sequence
  Synthetic oligonucleotide
acgattttagacttctagatcgtgtatata

SEQ ID NO: 374342 - DNA, 30 bp, Artificial Sequence
  Synthetic oligonucleotide
ttgcaccgtcaaacgataggtgtgtatata

SEQ ID NO: 374343 - DNA, 30 bp, Artificial Sequence
  Synthetic oligonucleotide
gagaggtcaatgatcccaagtatttatata

SEQ ID NO: 374344 - DNA, 30 bp, Artificial Sequence
  Synthetic oligonucleotide
caaacatccgtattcaacggcctttatata

SEQ ID NO: 374345 - DNA, 30 bp, Artificial Sequence
  Synthetic oligonucleotide
caagtcgacttcgatggatgccaaactata

SEQ ID NO: 374346 - DNA, 30 bp, Artificial Sequence
  Synthetic oligonucleotide
gaagtatgaagccattgcaccggaactata

SEQ ID NO: 374347 - DNA, 30 bp, Artificial Sequence
  Synthetic oligonucleotide
ctattctcaaccaaaggtgcagagactata

SEQ ID NO: 374348 - DNA, 30 bp, Artificial Sequence
  Synthetic oligonucleotide
agctgcgctgtatatgtcggaaggactata

SEQ ID NO: 374349 - DNA, 30 bp, Artificial Sequence
  Synthetic oligonucleotide
tgactacactgtcaattgtcagatactata

SEQ ID NO: 374350 - DNA, 30 bp, Artificial Sequence
  Synthetic oligonucleotide
ttgacatgaacggaggtaatctatactata

SEQ ID NO: 374351 - DNA, 30 bp, Artificial Sequence
  Synthetic oligonucleotide
gcatctcgcggtaccgaggcaggtactata

SEQ ID NO: 374352 - DNA, 30 bp, Artificial Sequence
  Synthetic oligonucleotide
gtttagtgaatggttacgcctggtactata

SEQ ID NO: 374353 - DNA, 30 bp, Artificial Sequence
  Synthetic oligonucleotide
tctgggcaatagtgtcagggactacctata

SEQ ID NO: 374354 - DNA, 30 bp, Artificial Sequence
  Synthetic oligonucleotide
gaagacgggattacagccttattacctata

SEQ ID NO: 374355 - DNA, 30 bp, Artificial Sequence
  Synthetic oligonucleotide
tcagcggtacgcaggtctagccgccctata

SEQ ID NO: 374356 - DNA, 30 bp, Artificial Sequence
  Synthetic oligonucleotide
cagatattccggtcggaatgtcatcctata

SEQ ID NO: 374357 - DNA, 30 bp, Artificial Sequence
  Synthetic oligonucleotide
gatggaagcaacataatcgtgggtcctata

SEQ ID NO: 374358 - DNA, 30 bp, Artificial Sequence
  Synthetic oligonucleotide
tgactagaggtcgcagactacattcctata

SEQ ID NO: 374359 - DNA, 30 bp, Artificial Sequence
  Synthetic oligonucleotide
ggcgcaatcggtacagcttgttaagctata

SEQ ID NO: 374360 - DNA, 30 bp, Artificial Sequence
  Synthetic oligonucleotide
tgctgagacacatgtggcgctgtagctata

SEQ ID NO: 374361 - DNA, 30 bp, Artificial Sequence
  Synthetic oligonucleotide
actggataggtttccctttctgaggctata

SEQ ID NO: 374362 - DNA, 31 bp, Artificial Sequence
  Synthetic oligonucleotide
atttatccggtaatatgcaaccacggctata

SEQ ID NO: 374363 - DNA, 30 bp, Artificial Sequence
  Synthetic oligonucleotide
ctggaccggaagacgcttatttcggctata

SEQ ID NO: 374364 - DNA, 30 bp, Artificial Sequence
  Synthetic oligonucleotide
gcaatgatcaccgttacgctgcgggctata

SEQ ID NO: 374365 - DNA, 30 bp, Artificial Sequence
  Synthetic oligonucleotide
tacactccgccacggagtaaagtggctata

SEQ ID NO: 374366 - DNA, 30 bp, Artificial Sequence
  Synthetic oligonucleotide
aaagaggcatattgatggattgatgctata

SEQ ID NO: 374367 - DNA, 30 bp, Artificial Sequence
  Synthetic oligonucleotide
gaaaaatggagcccatgtctctatgctata

SEQ ID NO: 374368 - DNA, 30 bp, Artificial Sequence
  Synthetic oligonucleotide
ggaaaatggcgtaggagaaatggtgctata

SEQ ID NO: 374369 - DNA, 30 bp, Artificial Sequence
  Synthetic oligonucleotide
atcagatcctccgtaaaaacgtcatctata

SEQ ID NO: 374370 - DNA, 30 bp, Artificial Sequence
  Synthetic oligonucleotide
ctggattatgctgtggcgacagactctata

SEQ ID NO: 374371 - DNA, 30 bp, Artificial Sequence
  Synthetic oligonucleotide
atttggcgcccggccaaaggaacttctata

SEQ ID NO: 374372 - DNA, 30 bp, Artificial Sequence
  Synthetic oligonucleotide
gagtgcgatatatcgtgaacttgttctata

SEQ ID NO: 374373 - DNA, 30 bp, Artificial Sequence
  Synthetic oligonucleotide
gtcgccttaaagtattcagagaaaagtata

SEQ ID NO: 374374 - DNA, 30 bp, Artificial Sequence
  Synthetic oligonucleotide
cataataggctcagcgagacccaaagtata

SEQ ID NO: 374375 - DNA, 30 bp, Artificial Sequence
  Synthetic oligonucleotide
gacgctcagaggtagcgctaaagaagtata

SEQ ID NO: 374376 - DNA, 30 bp, Artificial Sequence
  Synthetic oligonucleotide
gtgacttcgtattttagagagaacagtata

SEQ ID NO: 374377 - DNA, 30 bp, Artificial Sequence
  Synthetic oligonucleotide
aggttagaattgaagaacagccgcagtata

SEQ ID NO: 374378 - DNA, 30 bp, Artificial Sequence
  Synthetic oligonucleotide
cctcgacagaagcttatcgggccgagtata

SEQ ID NO: 374379 - DNA, 30 bp, Artificial Sequence
  Synthetic oligonucleotide
acgcactagctacaatcagttttgagtata

SEQ ID NO: 374380 - DNA, 30 bp, Artificial Sequence
  Synthetic oligonucleotide
actcgtctatcttgataacgatgtagtata

SEQ ID NO: 374381 - DNA, 30 bp, Artificial Sequence
  Synthetic oligonucleotide
ttacgatcacagtgtcttatacttagtata

SEQ ID NO: 374382 - DNA, 30 bp, Artificial Sequence
  Synthetic oligonucleotide
acatgggaacccgggcagcaggttagtata

SEQ ID NO: 374383 - DNA, 30 bp, Artificial Sequence
  Synthetic oligonucleotide
ggacgaagaatctacatgcgaacacgtata

SEQ ID NO: 374384 - DNA, 30 bp, Artificial Sequence
  Synthetic oligonucleotide
gacataccgttgtcccacgcgccacgtata

SEQ ID NO: 374385 - DNA, 30 bp, Artificial Sequence
  Synthetic oligonucleotide
taattggacttagcactcgcttcacgtata

SEQ ID NO: 374386 - DNA, 30 bp, Artificial Sequence
  Synthetic oligonucleotide
ttctgtgacgggttacaactaagacgtata

SEQ ID NO: 374387 - DNA, 30 bp, Artificial Sequence
  Synthetic oligonucleotide
agcgactcaattttaacgtcgtagcgtata

SEQ ID NO: 374388 - DNA, 30 bp, Artificial Sequence
  Synthetic oligonucleotide
acccttgcctgaatttaaggtgggcgtata

SEQ ID NO: 374389 - DNA, 30 bp, Artificial Sequence
  Synthetic oligonucleotide
gattatcgactttccagggccggaggtata

SEQ ID NO: 374390 - DNA, 30 bp, Artificial Sequence
  Synthetic oligonucleotide
aagataacgcacgctacgtttcacggtata

SEQ ID NO: 374391 - DNA, 30 bp, Artificial Sequence
  Synthetic oligonucleotide
accgacgtgtcgcagggcagcggcggtata

SEQ ID NO: 374392 - DNA, 27 bp, Artificial Sequence
  Synthetic oligonucleotide
aacaaatatctacaggaagtcggtata

SEQ ID NO: 374393 - DNA, 30 bp, Artificial Sequence
  Synthetic oligonucleotide
tgaaatacgaagttacatgcgcatggtata

SEQ ID NO: 374394 - DNA, 30 bp, Artificial Sequence
  Synthetic oligonucleotide
agagaatcctttaaagggagagctggtata

SEQ ID NO: 374395 - DNA, 30 bp, Artificial Sequence
  Synthetic oligonucleotide
ccctacgctcggctagacctacaatgtata

SEQ ID NO: 374396 - DNA, 30 bp, Artificial Sequence
  Synthetic oligonucleotide
cgccatcgggtcactgtcgttcaatgtata

SEQ ID NO: 374397 - DNA, 30 bp, Artificial Sequence
  Synthetic oligonucleotide
tcatgaggatgttgatttggaagatgtata

SEQ ID NO: 374398 - DNA, 30 bp, Artificial Sequence
  Synthetic oligonucleotide
ggggttacggggctcggggtaggatgtata

SEQ ID NO: 374399 - DNA, 30 bp, Artificial Sequence
  Synthetic oligonucleotide
cttacatttatctgcgaaactggatgtata

SEQ ID NO: 374400 - DNA, 30 bp, Artificial Sequence
  Synthetic oligonucleotide
gctcatggccaaaagggtactgactgtata

SEQ ID NO: 374401 - DNA, 30 bp, Artificial Sequence
  Synthetic oligonucleotide
gattggtacctgtttgctttgaagtgtata

SEQ ID NO: 374402 - DNA, 30 bp, Artificial Sequence
  Synthetic oligonucleotide
tggtcttcaaacagtcgttccgagtgtata

SEQ ID NO: 374403 - DNA, 30 bp, Artificial Sequence
  Synthetic oligonucleotide
atccaatccctctactcgaactggtgtata

SEQ ID NO: 374404 - DNA, 30 bp, Artificial Sequence
  Synthetic oligonucleotide
acattatcatgataagccaggcattgtata

SEQ ID NO: 374405 - DNA, 30 bp, Artificial Sequence
  Synthetic oligonucleotide
acagtcccttgtgatgcaagagattgtata

SEQ ID NO: 374406 - DNA, 30 bp, Artificial Sequence
  Synthetic oligonucleotide
cgagtgtgtttgcttcggaatgaaattata

SEQ ID NO: 374407 - DNA, 30 bp, Artificial Sequence
  Synthetic oligonucleotide
tagtcccactctagcatccagacaattata

SEQ ID NO: 374408 - DNA, 30 bp, Artificial Sequence
  Synthetic oligonucleotide
tgtaagtgataaaaaaaatcgttaattata

SEQ ID NO: 374409 - DNA, 30 bp, Artificial Sequence
  Synthetic oligonucleotide
tatttgatgtatggtcgaggtggcattata

SEQ ID NO: 374410 - DNA, 30 bp, Artificial Sequence
  Synthetic oligonucleotide
caccagagtgcttctataggggcgattata

SEQ ID NO: 374411 - DNA, 30 bp, Artificial Sequence
  Synthetic oligonucleotide
ctgacgtggaacctcgtttctcatattata

SEQ ID NO: 374412 - DNA, 30 bp, Artificial Sequence
  Synthetic oligonucleotide
gctacgactgacctacttaagaaacttata

SEQ ID NO: 374413 - DNA, 30 bp, Artificial Sequence
  Synthetic oligonucleotide
taaggtgctcaaaacgcaagatcacttata

SEQ ID NO: 374414 - DNA, 30 bp, Artificial Sequence
  Synthetic oligonucleotide
caaataaagggaatgtattcactacttata

SEQ ID NO: 374415 - DNA, 30 bp, Artificial Sequence
  Synthetic oligonucleotide
cttatttactgaataagttgtgtacttata

SEQ ID NO: 374416 - DNA, 30 bp, Artificial Sequence
  Synthetic oligonucleotide
taagctaaggcagtgcgtggtatccttata

SEQ ID NO: 374417 - DNA, 31 bp, Artificial Sequence
  Synthetic oligonucleotide
gggtaatactggataagcccccgagcttata

SEQ ID NO: 374418 - DNA, 30 bp, Artificial Sequence
  Synthetic oligonucleotide
gtaactgtcgtggtcggtagcgagcttata

SEQ ID NO: 374419 - DNA, 30 bp, Artificial Sequence
  Synthetic oligonucleotide
ccataatcttgaggcgtccggatgcttata

SEQ ID NO: 374420 - DNA, 30 bp, Artificial Sequence
  Synthetic oligonucleotide
gtggatgcaaatcgtcacgagtcagttata

SEQ ID NO: 374421 - DNA, 30 bp, Artificial Sequence
  Synthetic oligonucleotide
gggaaacaagtttttagccttagagttata

SEQ ID NO: 374422 - DNA, 30 bp, Artificial Sequence
  Synthetic oligonucleotide
ttaggggtcgcgtgtagtattcccgttata

SEQ ID NO: 374423 - DNA, 30 bp, Artificial Sequence
  Synthetic oligonucleotide
tatgttaaattctttcagacattcgttata

SEQ ID NO: 374424 - DNA, 30 bp, Artificial Sequence
  Synthetic oligonucleotide
atggataaacggtcggacgtaccggttata

SEQ ID NO: 374425 - DNA, 30 bp, Artificial Sequence
  Synthetic oligonucleotide
attattcggcctctaccagaacgggttata

SEQ ID NO: 374426 - DNA, 30 bp, Artificial Sequence
  Synthetic oligonucleotide
tcccgtcacgtgacctgtattatggttata

SEQ ID NO: 374427 - DNA, 30 bp, Artificial Sequence
  Synthetic oligonucleotide
ctcgaataaccaaaagtgtagttggttata

SEQ ID NO: 374428 - DNA, 30 bp, Artificial Sequence
  Synthetic oligonucleotide
caagacttaggttgagctttgaatgttata

SEQ ID NO: 374429 - DNA, 30 bp, Artificial Sequence
  Synthetic oligonucleotide
aagagtatagcatgtactatttatgttata

SEQ ID NO: 374430 - DNA, 30 bp, Artificial Sequence
  Synthetic oligonucleotide
ccaagttgggtttgcaacaaaagatttata

SEQ ID NO: 374431 - DNA, 30 bp, Artificial Sequence
  Synthetic oligonucleotide
aaggaataggtctgtaaacttagatttata

SEQ ID NO: 374432 - DNA, 30 bp, Artificial Sequence
  Synthetic oligonucleotide
ggtaaatggaacaaccctagaggatttata

SEQ ID NO: 374433 - DNA, 30 bp, Artificial Sequence
  Synthetic oligonucleotide
cgtcgccacccgtggactggaaactttata

SEQ ID NO: 374434 - DNA, 30 bp, Artificial Sequence
  Synthetic oligonucleotide
tcaaacggcttcgcgaaatggccctttata

SEQ ID NO: 374435 - DNA, 30 bp, Artificial Sequence
  Synthetic oligonucleotide
gcgttgttcgattgtcgtcgttgctttata

SEQ ID NO: 374436 - DNA, 30 bp, Artificial Sequence
  Synthetic oligonucleotide
ggctacagctgagtattggccatctttata

SEQ ID NO: 374437 - DNA, 30 bp, Artificial Sequence
  Synthetic oligonucleotide
gaccgtagttattgtgtctttctctttata

SEQ ID NO: 374438 - DNA, 30 bp, Artificial Sequence
  Synthetic oligonucleotide
atcgcgtggtatgcagttaatgtctttata

SEQ ID NO: 374439 - DNA, 30 bp, Artificial Sequence
  Synthetic oligonucleotide
acttaggcggattatagggcggagtttata

SEQ ID NO: 374440 - DNA, 30 bp, Artificial Sequence
  Synthetic oligonucleotide
tgtcgtaagcgcccaccgaaatagtttata

SEQ ID NO: 374441 - DNA, 30 bp, Artificial Sequence
  Synthetic oligonucleotide
cagaaatcgtctttatcctgcgcgtttata

SEQ ID NO: 374442 - DNA, 30 bp, Artificial Sequence
  Synthetic oligonucleotide
ctcatgaagtttgaattaaaatggtttata

SEQ ID NO: 374443 - DNA, 30 bp, Artificial Sequence
  Synthetic oligonucleotide
atcagggcttaaacgcattgatattttata

SEQ ID NO: 374444 - DNA, 30 bp, Artificial Sequence
  Synthetic oligonucleotide
cgagcctgatgcaggacaccagtttttata

SEQ ID NO: 374445 - DNA, 30 bp, Artificial Sequence
  Synthetic oligonucleotide
tgtaacgtgacaaaaagagtagtttttata

SEQ ID NO: 374446 - DNA, 30 bp, Artificial Sequence
  Synthetic oligonucleotide
caaatgtagccacttaaatttgccaaacta

SEQ ID NO: 374447 - DNA, 30 bp, Artificial Sequence
  Synthetic oligonucleotide
acataggctctctagtgaattcgcaaacta

SEQ ID NO: 374448 - DNA, 30 bp, Artificial Sequence
  Synthetic oligonucleotide
tatacgtattaaaacaggcactgcaaacta

SEQ ID NO: 374449 - DNA, 30 bp, Artificial Sequence
  Synthetic oligonucleotide
gggaaaccaaaattttgacgatggaaacta

SEQ ID NO: 374450 - DNA, 30 bp, Artificial Sequence
  Synthetic oligonucleotide
gaggtggttactgaaagtgttgctaaacta

SEQ ID NO: 374451 - DNA, 30 bp, Artificial Sequence
  Synthetic oligonucleotide
tgcaatggcgctgtatatgttgcacaacta

SEQ ID NO: 374452 - DNA, 30 bp, Artificial Sequence
  Synthetic oligonucleotide
ttcgattctaccgacaagctggtacaacta

SEQ ID NO: 374453 - DNA, 30 bp, Artificial Sequence
  Synthetic oligonucleotide
ggctagggttctgggcaggggtaccaacta

SEQ ID NO: 374454 - DNA, 30 bp, Artificial Sequence
  Synthetic oligonucleotide
ctaatggaaagttttactgccacgcaacta

SEQ ID NO: 374455 - DNA, 30 bp, Artificial Sequence
  Synthetic oligonucleotide
gcctggtataaacctggattccatcaacta

SEQ ID NO: 374456 - DNA, 30 bp, Artificial Sequence
  Synthetic oligonucleotide
tagtgagcagtctatgtgatctatcaacta

SEQ ID NO: 374457 - DNA, 30 bp, Artificial Sequence
  Synthetic oligonucleotide
gagtagtcccgcccctgaagatttcaacta

SEQ ID NO: 374458 - DNA, 30 bp, Artificial Sequence
  Synthetic oligonucleotide
ggtctctccggggtaatggacgaagaacta

SEQ ID NO: 374459 - DNA, 30 bp, Artificial Sequence
  Synthetic oligonucleotide
ctccggcagcttattgcgagacacgaacta

SEQ ID NO: 374460 - DNA, 30 bp, Artificial Sequence
  Synthetic oligonucleotide
ctaaaattaaggttttgagcccacgaacta

SEQ ID NO: 374461 - DNA, 30 bp, Artificial Sequence
  Synthetic oligonucleotide
agataatctctgattatcgctcgcgaacta

SEQ ID NO: 374462 - DNA, 30 bp, Artificial Sequence
  Synthetic oligonucleotide
ttgttcaatgtgaaaagtggagaggaacta

SEQ ID NO: 374463 - DNA, 30 bp, Artificial Sequence
  Synthetic oligonucleotide
ctcgcttgaaggtttggagatagggaacta

SEQ ID NO: 374464 - DNA, 30 bp, Artificial Sequence
  Synthetic oligonucleotide
tggggggtctcgtggctacgattggaacta

SEQ ID NO: 374465 - DNA, 30 bp, Artificial Sequence
  Synthetic oligonucleotide
gtccaacctaaatttggtacttcataacta

SEQ ID NO: 374466 - DNA, 30 bp, Artificial Sequence
  Synthetic oligonucleotide
tttatcaagtgggaaatgacccgataacta

SEQ ID NO: 374467 - DNA, 30 bp, Artificial Sequence
  Synthetic oligonucleotide
gggaatgtaaagtctacatgtatataacta

SEQ ID NO: 374468 - DNA, 30 bp, Artificial Sequence
  Synthetic oligonucleotide
ctggccccagccagaattcatccctaacta

SEQ ID NO: 374469 - DNA, 30 bp, Artificial Sequence
  Synthetic oligonucleotide
tacgacccaggcataggctcgcgctaacta

SEQ ID NO: 374470 - DNA, 30 bp, Artificial Sequence
  Synthetic oligonucleotide
gtcacccaagtacacaagacccggtaacta

SEQ ID NO: 374471 - DNA, 30 bp, Artificial Sequence
  Synthetic oligonucleotide
agtatcggcgccagctttcgtcattaacta

SEQ ID NO: 374472 - DNA, 30 bp, Artificial Sequence
  Synthetic oligonucleotide
atgcaccattccgttatcagatattaacta

SEQ ID NO: 374473 - DNA, 30 bp, Artificial Sequence
  Synthetic oligonucleotide
cgcaaacgtctagacccaccgtcttaacta

SEQ ID NO: 374474 - DNA, 30 bp, Artificial Sequence
  Synthetic oligonucleotide
gctagtattgattcgtgtgatggttaacta

SEQ ID NO: 374475 - DNA, 30 bp, Artificial Sequence
  Synthetic oligonucleotide
agtgggagctgaagcccgacatgttaacta

SEQ ID NO: 374476 - DNA, 30 bp, Artificial Sequence
  Synthetic oligonucleotide
ctgtaaggtcgccgggctcccatttaacta

SEQ ID NO: 374477 - DNA, 30 bp, Artificial Sequence
  Synthetic oligonucleotide
atcgatgctgattgccgcattgtttaacta

SEQ ID NO: 374478 - DNA, 30 bp, Artificial Sequence
  Synthetic oligonucleotide
gggaacccacttccccgaaggggaacacta

SEQ ID NO: 374479 - DNA, 30 bp, Artificial Sequence
  Synthetic oligonucleotide
cgcgtaagttagttgcaggactgaacacta

SEQ ID NO: 374480 - DNA, 30 bp, Artificial Sequence
  Synthetic oligonucleotide
aattgcgatgtgtgaataatagtaacacta

SEQ ID NO: 374481 - DNA, 30 bp, Artificial Sequence
  Synthetic oligonucleotide
ataattgtctcgcttgtttatagcacacta

SEQ ID NO: 374482 - DNA, 30 bp, Artificial Sequence
  Synthetic oligonucleotide
cactcagaatcgctggattcgttgacacta

SEQ ID NO: 374483 - DNA, 30 bp, Artificial Sequence
  Synthetic oligonucleotide
catcagtttctgttacggtggtttacacta

SEQ ID NO: 374484 - DNA, 30 bp, Artificial Sequence
  Synthetic oligonucleotide
ctgatcggagacatgtggacaacaccacta

SEQ ID NO: 374485 - DNA, 30 bp, Artificial Sequence
  Synthetic oligonucleotide
gacaggctagacctcaagtctctaccacta

SEQ ID NO: 374486 - DNA, 30 bp, Artificial Sequence
  Synthetic oligonucleotide
gatcttatgtggctgcggggtctaccacta

SEQ ID NO: 374487 - DNA, 30 bp, Artificial Sequence
  Synthetic oligonucleotide
gcagacatctaactatcaggattaccacta

SEQ ID NO: 374488 - DNA, 30 bp, Artificial Sequence
  Synthetic oligonucleotide
gcgactctaactttaaatcttaccccacta

SEQ ID NO: 374489 - DNA, 30 bp, Artificial Sequence
  Synthetic oligonucleotide
ggtaagcaaatataagtccgtggcccacta

SEQ ID NO: 374490 - DNA, 30 bp, Artificial Sequence
  Synthetic oligonucleotide
tcgatctgtgtgactaaaaataatccacta

SEQ ID NO: 374491 - DNA, 30 bp, Artificial Sequence
  Synthetic oligonucleotide
gagtcgaccaatggccgcgaacttccacta

SEQ ID NO: 374492 - DNA, 30 bp, Artificial Sequence
  Synthetic oligonucleotide
agcctcgattatttcgctgcctgagcacta

SEQ ID NO: 374493 - DNA, 30 bp, Artificial Sequence
  Synthetic oligonucleotide
gctatccagcgtacgtaacacggcgcacta

SEQ ID NO: 374494 - DNA, 30 bp, Artificial Sequence
  Synthetic oligonucleotide
ggttattgcgcggtccatacgttcgcacta

SEQ ID NO: 374495 - DNA, 30 bp, Artificial Sequence
  Synthetic oligonucleotide
gcatgtcggaatcattgttggttcgcacta

SEQ ID NO: 374496 - DNA, 30 bp, Artificial Sequence
  Synthetic oligonucleotide
cctcaggtggttatgattgcaatggcacta

SEQ ID NO: 374497 - DNA, 30 bp, Artificial Sequence
  Synthetic oligonucleotide
gaagttagctcggcttacggactggcacta

SEQ ID NO: 374498 - DNA, 30 bp, Artificial Sequence
  Synthetic oligonucleotide
tatccttgttgtgtggtaggagctgcacta

SEQ ID NO: 374499 - DNA, 30 bp, Artificial Sequence
  Synthetic oligonucleotide
agtttcgtcgtacaagaagcctgtgcacta

SEQ ID NO: 374500 - DNA, 30 bp, Artificial Sequence
  Synthetic oligonucleotide
caattaagatagccgcccggcgttgcacta

SEQ ID NO: 374501 - DNA, 30 bp, Artificial Sequence
  Synthetic oligonucleotide
tacggaccggtacctattgaagaatcacta

SEQ ID NO: 374502 - DNA, 30 bp, Artificial Sequence
  Synthetic oligonucleotide
tactggggcacattggctatctaatcacta

SEQ ID NO: 374503 - DNA, 30 bp, Artificial Sequence
  Synthetic oligonucleotide
ctgaaactccctgtcaatcctatatcacta

SEQ ID NO: 374504 - DNA, 30 bp, Artificial Sequence
  Synthetic oligonucleotide
tatttaggcgcatagacgcggtactcacta

SEQ ID NO: 374505 - DNA, 30 bp, Artificial Sequence
  Synthetic oligonucleotide
cgtacggtggaccaaaagccgtcctcacta

SEQ ID NO: 374506 - DNA, 30 bp, Artificial Sequence
  Synthetic oligonucleotide
tagagtagacctcaacctatgtggtcacta

SEQ ID NO: 374507 - DNA, 30 bp, Artificial Sequence
  Synthetic oligonucleotide
cgggcggaaaaagtcgtcattgattcacta

SEQ ID NO: 374508 - DNA, 30 bp, Artificial Sequence
  Synthetic oligonucleotide
tagaacctgtgttacaattgtggttcacta

SEQ ID NO: 374509 - DNA, 30 bp, Artificial Sequence
  Synthetic oligonucleotide
cgggaactcctatattactataaaagacta

SEQ ID NO: 374510 - DNA, 30 bp, Artificial Sequence
  Synthetic oligonucleotide
cgttctctaagatgatcttggtaaagacta

SEQ ID NO: 374511 - DNA, 30 bp, Artificial Sequence
  Synthetic oligonucleotide
tctctgagaaatgtatctgtaagaagacta

SEQ ID NO: 374512 - DNA, 30 bp, Artificial Sequence
  Synthetic oligonucleotide
gtcagcttgatagctattcacggaagacta

SEQ ID NO: 374513 - DNA, 30 bp, Artificial Sequence
  Synthetic oligonucleotide
gaaaacgttggggggactatgggaagacta

SEQ ID NO: 374514 - DNA, 30 bp, Artificial Sequence
  Synthetic oligonucleotide
tgccccacagggggtggactcttaagacta

SEQ ID NO: 374515 - DNA, 30 bp, Artificial Sequence
  Synthetic oligonucleotide
cgtagggcgcatcatacacttcacagacta

SEQ ID NO: 374516 - DNA, 30 bp, Artificial Sequence
  Synthetic oligonucleotide
tcatcggtatctgaaattgtacagagacta

SEQ ID NO: 374517 - DNA, 30 bp, Artificial Sequence
  Synthetic oligonucleotide
tgtaagttcggtcgttgcaccgagagacta

SEQ ID NO: 374518 - DNA, 30 bp, Artificial Sequence
  Synthetic oligonucleotide
ggtaatgatcggtagctaaggtatagacta

SEQ ID NO: 374519 - DNA, 30 bp, Artificial Sequence
  Synthetic oligonucleotide
aagtattagggacgcttcaactctagacta

SEQ ID NO: 374520 - DNA, 30 bp, Artificial Sequence
  Synthetic oligonucleotide
atagcctggagatatttcccggtacgacta

SEQ ID NO: 374521 - DNA, 30 bp, Artificial Sequence
  Synthetic oligonucleotide
tgtctagccttactaggagcataccgacta

SEQ ID NO: 374522 - DNA, 30 bp, Artificial Sequence
  Synthetic oligonucleotide
cagggcctaatgagatagacggcccgacta

SEQ ID NO: 374523 - DNA, 30 bp, Artificial Sequence
  Synthetic oligonucleotide
tcgagcttgtcgaagacccgtgcccgacta

SEQ ID NO: 374524 - DNA, 30 bp, Artificial Sequence
  Synthetic oligonucleotide
gttgcgagaacatagttcccattgcgacta

SEQ ID NO: 374525 - DNA, 30 bp, Artificial Sequence
  Synthetic oligonucleotide
gctccatacggcataagcttagaaggacta

SEQ ID NO: 374526 - DNA, 30 bp, Artificial Sequence
  Synthetic oligonucleotide
tggtatgacacgttgtgcgtgtgaggacta

SEQ ID NO: 374527 - DNA, 30 bp, Artificial Sequence
  Synthetic oligonucleotide
cgacgccaggttgtattaggtttaggacta

SEQ ID NO: 374528 - DNA, 30 bp, Artificial Sequence
  Synthetic oligonucleotide
aaggacaccatgcggctttatgagggacta

SEQ ID NO: 374529 - DNA, 30 bp, Artificial Sequence
  Synthetic oligonucleotide
gccgttaacagtacgcgaagtgagggacta

SEQ ID NO: 374530 - DNA, 30 bp, Artificial Sequence
  Synthetic oligonucleotide
ccttagaaactgcctaggtaatcgggacta

SEQ ID NO: 374531 - DNA, 30 bp, Artificial Sequence
  Synthetic oligonucleotide
gacagtgttagtttattttaacggggacta

SEQ ID NO: 374532 - DNA, 30 bp, Artificial Sequence
  Synthetic oligonucleotide
tatgatgatctgagggatcttatgggacta

SEQ ID NO: 374533 - DNA, 30 bp, Artificial Sequence
  Synthetic oligonucleotide
tgccaacttgcagcagacgaacctggacta

SEQ ID NO: 374534 - DNA, 30 bp, Artificial Sequence
  Synthetic oligonucleotide
agtccgacagcacaggctgctggtggacta

SEQ ID NO: 374535 - DNA, 30 bp, Artificial Sequence
  Synthetic oligonucleotide
tcgacggctatccccgtgattttatgacta

SEQ ID NO: 374536 - DNA, 30 bp, Artificial Sequence
  Synthetic oligonucleotide
acggcgcgcaggagataacgcggctgacta

SEQ ID NO: 374537 - DNA, 30 bp, Artificial Sequence
  Synthetic oligonucleotide
tatactggaaatgaaaaaggtctttgacta

SEQ ID NO: 374538 - DNA, 30 bp, Artificial Sequence
  Synthetic oligonucleotide
ggtgttggggacagcaccaagtaaatacta

SEQ ID NO: 374539 - DNA, 30 bp, Artificial Sequence
  Synthetic oligonucleotide
aggaaattggttattgaaatgacaatacta

SEQ ID NO: 374540 - DNA, 30 bp, Artificial Sequence
  Synthetic oligonucleotide
tcaagggggtctcccctgagcaatatacta

SEQ ID NO: 374541 - DNA, 30 bp, Artificial Sequence
  Synthetic oligonucleotide
aactgcagccgccgagatggcaatatacta

SEQ ID NO: 374542 - DNA, 30 bp, Artificial Sequence
  Synthetic oligonucleotide
actgtacataagggccctggcactatacta

SEQ ID NO: 374543 - DNA, 30 bp, Artificial Sequence
  Synthetic oligonucleotide
tcggcttccactggagattctcgtatacta

SEQ ID NO: 374544 - DNA, 30 bp, Artificial Sequence
  Synthetic oligonucleotide
gctcatgtagtgctcttaggcattatacta

SEQ ID NO: 374545 - DNA, 30 bp, Artificial Sequence
  Synthetic oligonucleotide
tcgattctccttcagcacatgtttatacta

SEQ ID NO: 374546 - DNA, 30 bp, Artificial Sequence
  Synthetic oligonucleotide
ttgactaatggcttaaaatcttatctacta

SEQ ID NO: 374547 - DNA, 30 bp, Artificial Sequence
  Synthetic oligonucleotide
tcggaatttaggttgtaccgttatctacta

SEQ ID NO: 374548 - DNA, 30 bp, Artificial Sequence
  Synthetic oligonucleotide
tacgcccaggggtgccggcaggaggtacta

SEQ ID NO: 374549 - DNA, 30 bp, Artificial Sequence
  Synthetic oligonucleotide
gaaataaagtgaatatcagattgggtacta

SEQ ID NO: 374550 - DNA, 30 bp, Artificial Sequence
  Synthetic oligonucleotide
agtccggtgtcgtatgcagatgtggtacta

SEQ ID NO: 374551 - DNA, 30 bp, Artificial Sequence
  Synthetic oligonucleotide
gtggacgtcgcacagtagtgaatgttacta

SEQ ID NO: 374552 - DNA, 30 bp, Artificial Sequence
  Synthetic oligonucleotide
ctcaaggcccaacgacctggcaatttacta

SEQ ID NO: 374553 - DNA, 30 bp, Artificial Sequence
  Synthetic oligonucleotide
tgggtatcactcagtgggtacactttacta

SEQ ID NO: 374554 - DNA, 30 bp, Artificial Sequence
  Synthetic oligonucleotide
gtgttctaactctaatataccggtttacta

SEQ ID NO: 374555 - DNA, 30 bp, Artificial Sequence
  Synthetic oligonucleotide
agaattagtggcccagctggcgcaaaccta

SEQ ID NO: 374556 - DNA, 30 bp, Artificial Sequence
  Synthetic oligonucleotide
gtttacggcgcccagatagtttaccaccta

SEQ ID NO: 374557 - DNA, 30 bp, Artificial Sequence
  Synthetic oligonucleotide
atataataaacttacacgtggcgccaccta

SEQ ID NO: 374558 - DNA, 30 bp, Artificial Sequence
  Synthetic oligonucleotide
cgaacatgtgagcagcaaagacggcaccta

SEQ ID NO: 374559 - DNA, 31 bp, Artificial Sequence
  Synthetic oligonucleotide
tttcattacctggacggaatgcatgcaccta

SEQ ID NO: 374560 - DNA, 30 bp, Artificial Sequence
  Synthetic oligonucleotide
acagcgcgtctatttcggagcagtcaccta

SEQ ID NO: 374561 - DNA, 30 bp, Artificial Sequence
  Synthetic oligonucleotide
aataggatgcatggtgagccattagaccta

SEQ ID NO: 374562 - DNA, 30 bp, Artificial Sequence
  Synthetic oligonucleotide
ttcctatttgacgaatgtacatgcgaccta

SEQ ID NO: 374563 - DNA, 30 bp, Artificial Sequence
  Synthetic oligonucleotide
aatttggtacgtggaacatgacaggaccta

SEQ ID NO: 374564 - DNA, 30 bp, Artificial Sequence
  Synthetic oligonucleotide
gggcatttcaaaggctactttggggaccta

SEQ ID NO: 374565 - DNA, 30 bp, Artificial Sequence
  Synthetic oligonucleotide
tattagaatactctgctcatgcctgaccta

SEQ ID NO: 374566 - DNA, 30 bp, Artificial Sequence
  Synthetic oligonucleotide
agttcaccggaggttaagtcatcctaccta

SEQ ID NO: 374567 - DNA, 30 bp, Artificial Sequence
  Synthetic oligonucleotide
aggtttaaattgggggtatgagtctaccta

SEQ ID NO: 374568 - DNA, 30 bp, Artificial Sequence
  Synthetic oligonucleotide
tagggtagtcgaatcttaacgcagtaccta

SEQ ID NO: 374569 - DNA, 30 bp, Artificial Sequence
  Synthetic oligonucleotide
accgggaagaggtacgtctacgcgtaccta

SEQ ID NO: 374570 - DNA, 30 bp, Artificial Sequence
  Synthetic oligonucleotide
tgtcatagagatacataatcatgttaccta

SEQ ID NO: 374571 - DNA, 30 bp, Artificial Sequence
  Synthetic oligonucleotide
ccaccgggtttgcgcccgttgtgaacccta

SEQ ID NO: 374572 - DNA, 30 bp, Artificial Sequence
  Synthetic oligonucleotide
tagatacaatatcaacaagatttaacccta

SEQ ID NO: 374573 - DNA, 30 bp, Artificial Sequence
  Synthetic oligonucleotide
agtactcgtgtatttcattgggacacccta

SEQ ID NO: 374574 - DNA, 30 bp, Artificial Sequence
  Synthetic oligonucleotide
aacaaagatcatattccgtctatcacccta

SEQ ID NO: 374575 - DNA, 30 bp, Artificial Sequence
  Synthetic oligonucleotide
ctctcgtgtacgacgagtggattaccccta

SEQ ID NO: 374576 - DNA, 30 bp, Artificial Sequence
  Synthetic oligonucleotide
aactcaccagtcttcggccactacccccta

SEQ ID NO: 374577 - DNA, 30 bp, Artificial Sequence
  Synthetic oligonucleotide
tagggtaaacggtaatcagtagccccccta

SEQ ID NO: 374578 - DNA, 30 bp, Artificial Sequence
  Synthetic oligonucleotide
atggctcgactctagcgttgccggccccta

SEQ ID NO: 374579 - DNA, 30 bp, Artificial Sequence
  Synthetic oligonucleotide
aaaccgccggtagtgtatgggatgccccta

SEQ ID NO: 374580 - DNA, 30 bp, Artificial Sequence
  Synthetic oligonucleotide
ttggaaaccttaaaatctacggaagcccta

SEQ ID NO: 374581 - DNA, 30 bp, Artificial Sequence
  Synthetic oligonucleotide
aatacgtgcctatcatctggttgtgcccta

SEQ ID NO: 374582 - DNA, 30 bp, Artificial Sequence
  Synthetic oligonucleotide
tccagctccgggcttgctacgccctcccta

SEQ ID NO: 374583 - DNA, 30 bp, Artificial Sequence
  Synthetic oligonucleotide
gcatatcctgttactgtaccgatctcccta

SEQ ID NO: 374584 - DNA, 30 bp, Artificial Sequence
  Synthetic oligonucleotide
tctcagggaaccgcgagaagagattcccta

SEQ ID NO: 374585 - DNA, 30 bp, Artificial Sequence
  Synthetic oligonucleotide
ctgtactcttagttatatagcgattcccta

SEQ ID NO: 374586 - DNA, 30 bp, Artificial Sequence
  Synthetic oligonucleotide
taccttcgtctgagatgtcgtttttcccta

SEQ ID NO: 374587 - DNA, 30 bp, Artificial Sequence
  Synthetic oligonucleotide
taattatctacaccgcataatgtaagccta

SEQ ID NO: 374588 - DNA, 30 bp, Artificial Sequence
  Synthetic oligonucleotide
tattattcgaaaagtggtgtacccagccta

SEQ ID NO: 374589 - DNA, 30 bp, Artificial Sequence
  Synthetic oligonucleotide
gaccatatacattgggtcttacagagccta

SEQ ID NO: 374590 - DNA, 30 bp, Artificial Sequence
  Synthetic oligonucleotide
aaatagaattcttaaagcggtcggagccta

SEQ ID NO: 374591 - DNA, 30 bp, Artificial Sequence
  Synthetic oligonucleotide
taaaggaccgtagtaaatcgttcacgccta

SEQ ID NO: 374592 - DNA, 30 bp, Artificial Sequence
  Synthetic oligonucleotide
gcgtccgtcattactcaacgtttccgccta

SEQ ID NO: 374593 - DNA, 30 bp, Artificial Sequence
  Synthetic oligonucleotide
gaattcatattgattggcctggagcgccta

SEQ ID NO: 374594 - DNA, 30 bp, Artificial Sequence
  Synthetic oligonucleotide
acgacctaaagtcgacctacggcgcgccta

SEQ ID NO: 374595 - DNA, 30 bp, Artificial Sequence
  Synthetic oligonucleotide
aattataacggcaattggcactggcgccta

SEQ ID NO: 374596 - DNA, 30 bp, Artificial Sequence
  Synthetic oligonucleotide
cagtctgaaagaacctgggtttttcgccta

SEQ ID NO: 374597 - DNA, 30 bp, Artificial Sequence
  Synthetic oligonucleotide
agctcggaacagagctttgtgctcggccta

SEQ ID NO: 374598 - DNA, 30 bp, Artificial Sequence
  Synthetic oligonucleotide
gtgcgtcttacaatgaccacaccatgccta

SEQ ID NO: 374599 - DNA, 30 bp, Artificial Sequence
  Synthetic oligonucleotide
attagcggagtgcctcatctacagtgccta

SEQ ID NO: 374600 - DNA, 30 bp, Artificial Sequence
  Synthetic oligonucleotide
gaatttgaatgggaccgtagtgagtgccta

SEQ ID NO: 374601 - DNA, 30 bp, Artificial Sequence
  Synthetic oligonucleotide
cgctggcagaagatgtagaaatgaatccta

SEQ ID NO: 374602 - DNA, 30 bp, Artificial Sequence
  Synthetic oligonucleotide
ggttcactgatgctcctgcgtgaactccta

SEQ ID NO: 374603 - DNA, 30 bp, Artificial Sequence
  Synthetic oligonucleotide
gccgataaaggcctaaatgcctgagtccta

SEQ ID NO: 374604 - DNA, 30 bp, Artificial Sequence
  Synthetic oligonucleotide
ggattacccctatcgtgtgagatagtccta

SEQ ID NO: 374605 - DNA, 30 bp, Artificial Sequence
  Synthetic oligonucleotide
agaactggttcagatctcggggccgtccta

SEQ ID NO: 374606 - DNA, 30 bp, Artificial Sequence
  Synthetic oligonucleotide
ggttagcgttattcacaaatatccgtccta

SEQ ID NO: 374607 - DNA, 30 bp, Artificial Sequence
  Synthetic oligonucleotide
gagattaaagttcgcgcatccagcgtccta

SEQ ID NO: 374608 - DNA, 30 bp, Artificial Sequence
  Synthetic oligonucleotide
taatagaggtctaggtcgtttatcgtccta

SEQ ID NO: 374609 - DNA, 30 bp, Artificial Sequence
  Synthetic oligonucleotide
cgactgttcgccccggactagaaggtccta

SEQ ID NO: 374610 - DNA, 30 bp, Artificial Sequence
  Synthetic oligonucleotide
attcagtagagcctaggagccgcggtccta

SEQ ID NO: 374611 - DNA, 30 bp, Artificial Sequence
  Synthetic oligonucleotide
cgctggagcccgatcaagcacagattccta

SEQ ID NO: 374612 - DNA, 30 bp, Artificial Sequence
  Synthetic oligonucleotide
cccgctaacgtggagggacggtgattccta

SEQ ID NO: 374613 - DNA, 30 bp, Artificial Sequence
  Synthetic oligonucleotide
agcgttagcagaggtaaggatttcttccta

SEQ ID NO: 374614 - DNA, 30 bp, Artificial Sequence
  Synthetic oligonucleotide
attgtgcctgactagaccctctctttccta

SEQ ID NO: 374615 - DNA, 30 bp, Artificial Sequence
  Synthetic oligonucleotide
ccaaatcagagagtcagcctcggaaagcta

SEQ ID NO: 374616 - DNA, 30 bp, Artificial Sequence
  Synthetic oligonucleotide
gacatccatcattggtggggcgtaaagcta

SEQ ID NO: 374617 - DNA, 30 bp, Artificial Sequence
  Synthetic oligonucleotide
taattcgtggctcacaaaccattaaagcta

SEQ ID NO: 374618 - DNA, 30 bp, Artificial Sequence
  Synthetic oligonucleotide
gaacggaagtattgccttttctacaagcta

SEQ ID NO: 374619 - DNA, 30 bp, Artificial Sequence
  Synthetic oligonucleotide
aaggtatttcaaatttatagtcccaagcta

SEQ ID NO: 374620 - DNA, 30 bp, Artificial Sequence
  Synthetic oligonucleotide
cgttttcacacctcaataggagggaagcta

SEQ ID NO: 374621 - DNA, 30 bp, Artificial Sequence
  Synthetic oligonucleotide
ccgttatcgctttccccaatgctgaagcta

SEQ ID NO: 374622 - DNA, 30 bp, Artificial Sequence
  Synthetic oligonucleotide
ccgtatcgtgagttttaccatcctaagcta

SEQ ID NO: 374623 - DNA, 30 bp, Artificial Sequence
  Synthetic oligonucleotide
cggggttatctgtgaccaatttttaagcta

SEQ ID NO: 374624 - DNA, 30 bp, Artificial Sequence
  Synthetic oligonucleotide
aggagttgtatacctccctgtcaacagcta

SEQ ID NO: 374625 - DNA, 30 bp, Artificial Sequence
  Synthetic oligonucleotide
agggcgaggtttcccatagccacgcagcta

SEQ ID NO: 374626 - DNA, 30 bp, Artificial Sequence
  Synthetic oligonucleotide
aaacttatggcaaatcgcggttggcagcta

SEQ ID NO: 374627 - DNA, 30 bp, Artificial Sequence
  Synthetic oligonucleotide
agacttatccaggaacgggtctgtcagcta

SEQ ID NO: 374628 - DNA, 30 bp, Artificial Sequence
  Synthetic oligonucleotide
gatcctccagtagtttggtacgaagagcta

SEQ ID NO: 374629 - DNA, 30 bp, Artificial Sequence
  Synthetic oligonucleotide
gcagtgcaacgtaaataccgtatcgagcta

SEQ ID NO: 374630 - DNA, 30 bp, Artificial Sequence
  Synthetic oligonucleotide
tgagtcatgaaatctaatcgaacggagcta

SEQ ID NO: 374631 - DNA, 30 bp, Artificial Sequence
  Synthetic oligonucleotide
cttattcggcgaagataagtctcatagcta

SEQ ID NO: 374632 - DNA, 30 bp, Artificial Sequence
  Synthetic oligonucleotide
ataatgaccacatgcgggataccctagcta

SEQ ID NO: 374633 - DNA, 30 bp, Artificial Sequence
  Synthetic oligonucleotide
tacgccaacgatcgtcatagggcgtagcta

SEQ ID NO: 374634 - DNA, 30 bp, Artificial Sequence
  Synthetic oligonucleotide
tggggcattaaaataggcgtcgtgtagcta

SEQ ID NO: 374635 - DNA, 30 bp, Artificial Sequence
  Synthetic oligonucleotide
agagatcctcgatatgccgacgattagcta

SEQ ID NO: 374636 - DNA, 30 bp, Artificial Sequence
  Synthetic oligonucleotide
tcgagctagcataaatacctcgcttagcta

SEQ ID NO: 374637 - DNA, 30 bp, Artificial Sequence
  Synthetic oligonucleotide
gtggtatagtaggccaaagtattttagcta

SEQ ID NO: 374638 - DNA, 30 bp, Artificial Sequence
  Synthetic oligonucleotide
cggacaattgggtggattggaggcacgcta

SEQ ID NO: 374639 - DNA, 30 bp, Artificial Sequence
  Synthetic oligonucleotide
ttcaggaggtaatttcaagcctagacgcta

SEQ ID NO: 374640 - DNA, 30 bp, Artificial Sequence
  Synthetic oligonucleotide
aataacggacgcgtgtttagtgcgacgcta

SEQ ID NO: 374641 - DNA, 30 bp, Artificial Sequence
  Synthetic oligonucleotide
gggcggtatgacgcctggaatcggacgcta

SEQ ID NO: 374642 - DNA, 30 bp, Artificial Sequence
  Synthetic oligonucleotide
gccgtcctttgtaaacccctggatacgcta

SEQ ID NO: 374643 - DNA, 29 bp, Artificial Sequence
  Synthetic oligonucleotide
ctgccaccggcgatgcggtggagccgcta

SEQ ID NO: 374644 - DNA, 30 bp, Artificial Sequence
  Synthetic oligonucleotide
taaggtttaaaccagagcgataatccgcta

SEQ ID NO: 374645 - DNA, 30 bp, Artificial Sequence
  Synthetic oligonucleotide
acatgcgtgtttttgaggatatcagcgcta

SEQ ID NO: 374646 - DNA, 30 bp, Artificial Sequence
  Synthetic oligonucleotide
tagcctatatagtatatggtagccgcgcta

SEQ ID NO: 374647 - DNA, 30 bp, Artificial Sequence
  Synthetic oligonucleotide
caacgggtaagtggcggggagagggcgcta

SEQ ID NO: 374648 - DNA, 30 bp, Artificial Sequence
  Synthetic oligonucleotide
gaggggagacaaagcaatagaaagtcgcta

SEQ ID NO: 374649 - DNA, 30 bp, Artificial Sequence
  Synthetic oligonucleotide
cagggcccgtggacggtgcggagcaggcta

SEQ ID NO: 374650 - DNA, 30 bp, Artificial Sequence
  Synthetic oligonucleotide
gctaggcacgtaaacaatgtaaagaggcta

SEQ ID NO: 374651 - DNA, 30 bp, Artificial Sequence
  Synthetic oligonucleotide
gccgccgagaaacatagcgcccagaggcta

SEQ ID NO: 374652 - DNA, 30 bp, Artificial Sequence
  Synthetic oligonucleotide
gcttgacggggaatacattgttagaggcta

SEQ ID NO: 374653 - DNA, 30 bp, Artificial Sequence
  Synthetic oligonucleotide
cccagacgctttgctgacaatgggaggcta

SEQ ID NO: 374654 - DNA, 30 bp, Artificial Sequence
  Synthetic oligonucleotide
tcagcttcgtggaacatagcgcataggcta

SEQ ID NO: 374655 - DNA, 30 bp, Artificial Sequence
  Synthetic oligonucleotide
agtgggggtttcggaggatcaagtaggcta

SEQ ID NO: 374656 - DNA, 30 bp, Artificial Sequence
  Synthetic oligonucleotide
cacgacctaatattcatctagggtaggcta

SEQ ID NO: 374657 - DNA, 30 bp, Artificial Sequence
  Synthetic oligonucleotide
aaagttaagtaatttacgtcttttaggcta

SEQ ID NO: 374658 - DNA, 30 bp, Artificial Sequence
  Synthetic oligonucleotide
tatgtgggggtctccgactatggccggcta

SEQ ID NO: 374659 - DNA, 30 bp, Artificial Sequence
  Synthetic oligonucleotide
ttcatagcgttaggcaagctcatgcggcta

SEQ ID NO: 374660 - DNA, 30 bp, Artificial Sequence
  Synthetic oligonucleotide
gttctgttcccttggcgaggatctcggcta

SEQ ID NO: 374661 - DNA, 30 bp, Artificial Sequence
  Synthetic oligonucleotide
tactatttgatatgggatgcgtgtcggcta

SEQ ID NO: 374662 - DNA, 30 bp, Artificial Sequence
  Synthetic oligonucleotide
ataattaggttcccgacagtatgagggcta

SEQ ID NO: 374663 - DNA, 30 bp, Artificial Sequence
  Synthetic oligonucleotide
tcctcggaaagatttcggcttcccgggcta

SEQ ID NO: 374664 - DNA, 30 bp, Artificial Sequence
  Synthetic oligonucleotide
cggcctcctttggtacagactagcgggcta

SEQ ID NO: 374665 - DNA, 30 bp, Artificial Sequence
  Synthetic oligonucleotide
aaattgacaccgattctacacttcgggcta

SEQ ID NO: 374666 - DNA, 30 bp, Artificial Sequence
  Synthetic oligonucleotide
aatttgaaagacgcgatcgctggggggcta

SEQ ID NO: 374667 - DNA, 30 bp, Artificial Sequence
  Synthetic oligonucleotide
catcacgtatagagaaacgctgttgggcta

SEQ ID NO: 374668 - DNA, 30 bp, Artificial Sequence
  Synthetic oligonucleotide
gcggttaattccgctgagctgagatggcta

SEQ ID NO: 374669 - DNA, 30 bp, Artificial Sequence
  Synthetic oligonucleotide
gcaactgctaaggttgatggcctatggcta

SEQ ID NO: 374670 - DNA, 30 bp, Artificial Sequence
  Synthetic oligonucleotide
actgccaggctggagccgtacccttggcta

SEQ ID NO: 374671 - DNA, 30 bp, Artificial Sequence
  Synthetic oligonucleotide
ctactgctagtccggtggtaagtttggcta

SEQ ID NO: 374672 - DNA, 30 bp, Artificial Sequence
  Synthetic oligonucleotide
agatgatgatggatactaggttgaatgcta

SEQ ID NO: 374673 - DNA, 30 bp, Artificial Sequence
  Synthetic oligonucleotide
ggatctgggttaggtaaccctaagatgcta

SEQ ID NO: 374674 - DNA, 30 bp, Artificial Sequence
  Synthetic oligonucleotide
atgtgaatactttaaagcgccgcgatgcta

SEQ ID NO: 374675 - DNA, 30 bp, Artificial Sequence
  Synthetic oligonucleotide
ggtttctctcaaaactccgtactgatgcta

SEQ ID NO: 374676 - DNA, 30 bp, Artificial Sequence
  Synthetic oligonucleotide
ccacgtcagccagcgataccttctatgcta

SEQ ID NO: 374677 - DNA, 30 bp, Artificial Sequence
  Synthetic oligonucleotide
ttttgggggctatgtaaagattttatgcta

SEQ ID NO: 374678 - DNA, 30 bp, Artificial Sequence
  Synthetic oligonucleotide
cagatgcatggtgctgcagctagcctgcta

SEQ ID NO: 374679 - DNA, 30 bp, Artificial Sequence
  Synthetic oligonucleotide
gttttgttgtgtgataggttatagctgcta

SEQ ID NO: 374680 - DNA, 30 bp, Artificial Sequence
  Synthetic oligonucleotide
gtgcaacagaactgttgcctggctctgcta

SEQ ID NO: 374681 - DNA, 30 bp, Artificial Sequence
  Synthetic oligonucleotide
attcagggggcctatacatacgttctgcta

SEQ ID NO: 374682 - DNA, 30 bp, Artificial Sequence
  Synthetic oligonucleotide
tagggtcaagatttgacactatgagtgcta

SEQ ID NO: 374683 - DNA, 30 bp, Artificial Sequence
  Synthetic oligonucleotide
cttcaatagaaaaggaactgacacgtgcta

SEQ ID NO: 374684 - DNA, 30 bp, Artificial Sequence
  Synthetic oligonucleotide
taggtagtcttcgttaacgattgcgtgcta

SEQ ID NO: 374685 - DNA, 30 bp, Artificial Sequence
  Synthetic oligonucleotide
gcaacaaactgtatgggccgcggggtgcta

SEQ ID NO: 374686 - DNA, 30 bp, Artificial Sequence
  Synthetic oligonucleotide
taactgataacgccgggacggctggtgcta

SEQ ID NO: 374687 - DNA, 30 bp, Artificial Sequence
  Synthetic oligonucleotide
ttagtctacgtaatcaggtctgaattgcta

SEQ ID NO: 374688 - DNA, 30 bp, Artificial Sequence
  Synthetic oligonucleotide
atccatcttaaattcaggcccgcattgcta

SEQ ID NO: 374689 - DNA, 30 bp, Artificial Sequence
  Synthetic oligonucleotide
aaaaacattagtggcgggattagcttgcta

SEQ ID NO: 374690 - DNA, 30 bp, Artificial Sequence
  Synthetic oligonucleotide
acgctaaattacagctgaattcagttgcta

SEQ ID NO: 374691 - DNA, 30 bp, Artificial Sequence
  Synthetic oligonucleotide
cccagcatgagctcgtcacgcaaaaatcta

SEQ ID NO: 374692 - DNA, 30 bp, Artificial Sequence
  Synthetic oligonucleotide
ttaacatgatggcaatcgtcgccaaatcta

SEQ ID NO: 374693 - DNA, 30 bp, Artificial Sequence
  Synthetic oligonucleotide
tggtgtcctcatggcggcggccccaatcta

SEQ ID NO: 374694 - DNA, 29 bp, Artificial Sequence
  Synthetic oligonucleotide
cggttcagcgtcacgcttaatggaatcta

SEQ ID NO: 374695 - DNA, 29 bp, Artificial Sequence
  Synthetic oligonucleotide
ccactgcctaacgctggttccgtaatcta

SEQ ID NO: 374696 - DNA, 30 bp, Artificial Sequence
  Synthetic oligonucleotide
taaccaatcgtggatggcttatgtaatcta

SEQ ID NO: 374697 - DNA, 30 bp, Artificial Sequence
  Synthetic oligonucleotide
tcccagtagggctagatcctgcaacatcta

SEQ ID NO: 374698 - DNA, 30 bp, Artificial Sequence
  Synthetic oligonucleotide
cttcagattctttgagacaatagacatcta

SEQ ID NO: 374699 - DNA, 30 bp, Artificial Sequence
  Synthetic oligonucleotide
ggagagtgatacctggttgttatccatcta

SEQ ID NO: 374700 - DNA, 30 bp, Artificial Sequence
  Synthetic oligonucleotide
cttagccgcaggtgggatttcgctcatcta

SEQ ID NO: 374701 - DNA, 30 bp, Artificial Sequence
  Synthetic oligonucleotide
aaagcttatggcatctgagcacgtcatcta

SEQ ID NO: 374702 - DNA, 30 bp, Artificial Sequence
  Synthetic oligonucleotide
gatatcccgccagttttcccaggagatcta

SEQ ID NO: 374703 - DNA, 30 bp, Artificial Sequence
  Synthetic oligonucleotide
tagtagatccggggtttacacctagatcta

SEQ ID NO: 374704 - DNA, 30 bp, Artificial Sequence
  Synthetic oligonucleotide
tcatcaccattagacgtcagcaacgatcta

SEQ ID NO: 374705 - DNA, 30 bp, Artificial Sequence
  Synthetic oligonucleotide
agagtacccggggtaagatcataggatcta

SEQ ID NO: 374706 - DNA, 30 bp, Artificial Sequence
  Synthetic oligonucleotide
agaacagacgctgaaggaaagtaggatcta

SEQ ID NO: 374707 - DNA, 30 bp, Artificial Sequence
  Synthetic oligonucleotide
gaactaatagcaatttgtaatccggatcta

SEQ ID NO: 374708 - DNA, 30 bp, Artificial Sequence
  Synthetic oligonucleotide
taagttaggttcaagatacaggcggatcta

SEQ ID NO: 374709 - DNA, 30 bp, Artificial Sequence
  Synthetic oligonucleotide
tatgttatttttcggcaagcggactatcta

SEQ ID NO: 374710 - DNA, 30 bp, Artificial Sequence
  Synthetic oligonucleotide
cgtatagactgttaattttttggctatcta

SEQ ID NO: 374711 - DNA, 30 bp, Artificial Sequence
  Synthetic oligonucleotide
aaaacatctcgtgtaggaacgatgtatcta

SEQ ID NO: 374712 - DNA, 30 bp, Artificial Sequence
  Synthetic oligonucleotide
gctcgattcgtcaaaccgtggagttatcta

SEQ ID NO: 374713 - DNA, 30 bp, Artificial Sequence
  Synthetic oligonucleotide
gatcgtagataatctggaaaaggttatcta

SEQ ID NO: 374714 - DNA, 30 bp, Artificial Sequence
  Synthetic oligonucleotide
gtgctcttttgagactggtcatacactcta

SEQ ID NO: 374715 - DNA, 30 bp, Artificial Sequence
  Synthetic oligonucleotide
gatagaccgatgcccttccggggacctcta

SEQ ID NO: 374716 - DNA, 30 bp, Artificial Sequence
  Synthetic oligonucleotide
tagcaacggttgcgcccttgcatacctcta

SEQ ID NO: 374717 - DNA, 30 bp, Artificial Sequence
  Synthetic oligonucleotide
aacccgcacatacgtcagatatgccctcta

SEQ ID NO: 374718 - DNA, 30 bp, Artificial Sequence
  Synthetic oligonucleotide
ttgttcggagctggtggcctgccgcctcta

SEQ ID NO: 374719 - DNA, 30 bp, Artificial Sequence
  Synthetic oligonucleotide
gactccgtcgaggtaataaagaatcctcta

SEQ ID NO: 374720 - DNA, 30 bp, Artificial Sequence
  Synthetic oligonucleotide
ggcaaccggaaaattttaagctttcctcta

SEQ ID NO: 374721 - DNA, 30 bp, Artificial Sequence
  Synthetic oligonucleotide
aggactgcatcttagttcagcggagctcta

SEQ ID NO: 374722 - DNA, 30 bp, Artificial Sequence
  Synthetic oligonucleotide
gggtgcaggacagtccgcagcctcgctcta

SEQ ID NO: 374723 - DNA, 30 bp, Artificial Sequence
  Synthetic oligonucleotide
ttgttgtcgaacagatggacgttggctcta

SEQ ID NO: 374724 - DNA, 30 bp, Artificial Sequence
  Synthetic oligonucleotide
gccggaacatttccttgagaatctgctcta

SEQ ID NO: 374725 - DNA, 30 bp, Artificial Sequence
  Synthetic oligonucleotide
gtcatcggctaaatcgtcatgagatctcta

SEQ ID NO: 374726 - DNA, 30 bp, Artificial Sequence
  Synthetic oligonucleotide
gcataagataccatacttatgggatctcta

SEQ ID NO: 374727 - DNA, 30 bp, Artificial Sequence
  Synthetic oligonucleotide
tcgtatccctctaagctaggtagctctcta

SEQ ID NO: 374728 - DNA, 30 bp, Artificial Sequence
  Synthetic oligonucleotide
cgtgcttcactacccagtccattgtctcta

SEQ ID NO: 374729 - DNA, 30 bp, Artificial Sequence
  Synthetic oligonucleotide
gtgggaggatggtcgtgagcgaattctcta

SEQ ID NO: 374730 - DNA, 30 bp, Artificial Sequence
  Synthetic oligonucleotide
catcccgttttagtaatgaatatttctcta

SEQ ID NO: 374731 - DNA, 30 bp, Artificial Sequence
  Synthetic oligonucleotide
ggtcaccagcctcagctgtttgaaagtcta

SEQ ID NO: 374732 - DNA, 30 bp, Artificial Sequence
  Synthetic oligonucleotide
gaggtttagtagattgaaggaacaagtcta

SEQ ID NO: 374733 - DNA, 30 bp, Artificial Sequence
  Synthetic oligonucleotide
cttatcttgtcaacagtaataacaagtcta

SEQ ID NO: 374734 - DNA, 30 bp, Artificial Sequence
  Synthetic oligonucleotide
aaaatatgctatcgacattcgacaagtcta

SEQ ID NO: 374735 - DNA, 30 bp, Artificial Sequence
  Synthetic oligonucleotide
gcagcgcaccaataaggctaattcagtcta

SEQ ID NO: 374736 - DNA, 30 bp, Artificial Sequence
  Synthetic oligonucleotide
attggcgacgcccacataagaacgagtcta

SEQ ID NO: 374737 - DNA, 30 bp, Artificial Sequence
  Synthetic oligonucleotide
gattggatggagcagcacgtagggagtcta

SEQ ID NO: 374738 - DNA, 30 bp, Artificial Sequence
  Synthetic oligonucleotide
ccctgggtcgatcacggcgagttgagtcta

SEQ ID NO: 374739 - DNA, 30 bp, Artificial Sequence
  Synthetic oligonucleotide
caagtagggcttgtctccgtgcatagtcta

SEQ ID NO: 374740 - DNA, 30 bp, Artificial Sequence
  Synthetic oligonucleotide
tttgaaatgctaggattccgcgatagtcta

SEQ ID NO: 374741 - DNA, 30 bp, Artificial Sequence
  Synthetic oligonucleotide
tggtagtctggctttggggtatcacgtcta

SEQ ID NO: 374742 - DNA, 30 bp, Artificial Sequence
  Synthetic oligonucleotide
gcgttatccacagacccccaggtccgtcta

SEQ ID NO: 374743 - DNA, 30 bp, Artificial Sequence
  Synthetic oligonucleotide
aatgtataaatcctgcccgttaagcgtcta

SEQ ID NO: 374744 - DNA, 30 bp, Artificial Sequence
  Synthetic oligonucleotide
acccaacctttacaaagaagctcgcgtcta

SEQ ID NO: 374745 - DNA, 30 bp, Artificial Sequence
  Synthetic oligonucleotide
gttgggtcacctcaagctccggggcgtcta

SEQ ID NO: 374746 - DNA, 30 bp, Artificial Sequence
  Synthetic oligonucleotide
atgtagcttactgactagacggcaggtcta

SEQ ID NO: 374747 - DNA, 30 bp, Artificial Sequence
  Synthetic oligonucleotide
aatatgagtctacgtaacaggcgaggtcta

SEQ ID NO: 374748 - DNA, 30 bp, Artificial Sequence
  Synthetic oligonucleotide
attgtggattttacatatttagtaggtcta

SEQ ID NO: 374749 - DNA, 30 bp, Artificial Sequence
  Synthetic oligonucleotide
taaacccgatgggaaggggtaaccggtcta

SEQ ID NO: 374750 - DNA, 30 bp, Artificial Sequence
  Synthetic oligonucleotide
aactacgatgtgttcttacggtagggtcta

SEQ ID NO: 374751 - DNA, 30 bp, Artificial Sequence
  Synthetic oligonucleotide
gcctggtccatggggtaactgactggtcta

SEQ ID NO: 374752 - DNA, 30 bp, Artificial Sequence
  Synthetic oligonucleotide
aatgtggtcttttctcaaaatagtggtcta

SEQ ID NO: 374753 - DNA, 30 bp, Artificial Sequence
  Synthetic oligonucleotide
ccctgtgctacatacggagtcccatgtcta

SEQ ID NO: 374754 - DNA, 30 bp, Artificial Sequence
  Synthetic oligonucleotide
taatctagtacccttgctacttcatgtcta

SEQ ID NO: 374755 - DNA, 30 bp, Artificial Sequence
  Synthetic oligonucleotide
ccttcactacgatattagcctagatgtcta

SEQ ID NO: 374756 - DNA, 30 bp, Artificial Sequence
  Synthetic oligonucleotide
tcatatgattcaagctagagcaactgtcta

SEQ ID NO: 374757 - DNA, 30 bp, Artificial Sequence
  Synthetic oligonucleotide
ttgagtaagaaattcatcggaagctgtcta

SEQ ID NO: 374758 - DNA, 30 bp, Artificial Sequence
  Synthetic oligonucleotide
ctgcagcctgtaacgatgtatgggtgtcta

SEQ ID NO: 374759 - DNA, 30 bp, Artificial Sequence
  Synthetic oligonucleotide
tacccgtcgggcaggttaccagattgtcta

SEQ ID NO: 374760 - DNA, 30 bp, Artificial Sequence
  Synthetic oligonucleotide
aggttctgatactcccgtcacgcaattcta

SEQ ID NO: 374761 - DNA, 30 bp, Artificial Sequence
  Synthetic oligonucleotide
gaagtccttgtcagcgtacaacgcattcta

SEQ ID NO: 374762 - DNA, 30 bp, Artificial Sequence
  Synthetic oligonucleotide
taacagctcttcatgttaatgcggattcta

SEQ ID NO: 374763 - DNA, 30 bp, Artificial Sequence
  Synthetic oligonucleotide
ccaccacagataactcatgttcggattcta

SEQ ID NO: 374764 - DNA, 30 bp, Artificial Sequence
  Synthetic oligonucleotide
tgcaattgacctgagagtccgagtattcta

SEQ ID NO: 374765 - DNA, 30 bp, Artificial Sequence
  Synthetic oligonucleotide
tcgctagaataggtctatctccgtattcta

SEQ ID NO: 374766 - DNA, 30 bp, Artificial Sequence
  Synthetic oligonucleotide
aattagtgccaaatgaccatcgaacttcta

SEQ ID NO: 374767 - DNA, 30 bp, Artificial Sequence
  Synthetic oligonucleotide
ttacactccctgtgaaatagggaacttcta

SEQ ID NO: 374768 - DNA, 30 bp, Artificial Sequence
  Synthetic oligonucleotide
cagtttggtgaggggactaatctacttcta

SEQ ID NO: 374769 - DNA, 30 bp, Artificial Sequence
  Synthetic oligonucleotide
aagcgaggatcacgtgaatagagccttcta

SEQ ID NO: 374770 - DNA, 30 bp, Artificial Sequence
  Synthetic oligonucleotide
acttctattcggtctcctaccatccttcta

SEQ ID NO: 374771 - DNA, 30 bp, Artificial Sequence
  Synthetic oligonucleotide
cacagggctatatgggagtttgcgcttcta

SEQ ID NO: 374772 - DNA, 30 bp, Artificial Sequence
  Synthetic oligonucleotide
ttaggctgttactaaacatcgaatcttcta

SEQ ID NO: 374773 - DNA, 30 bp, Artificial Sequence
  Synthetic oligonucleotide
acttccaggaaaatgaactaccatcttcta

SEQ ID NO: 374774 - DNA, 30 bp, Artificial Sequence
  Synthetic oligonucleotide
ctgggtagtttttaggtccagtgtcttcta

SEQ ID NO: 374775 - DNA, 30 bp, Artificial Sequence
  Synthetic oligonucleotide
catgcggattatactccattgtgtcttcta

SEQ ID NO: 374776 - DNA, 30 bp, Artificial Sequence
  Synthetic oligonucleotide
catagggccaacaaggcggttagagttcta

SEQ ID NO: 374777 - DNA, 30 bp, Artificial Sequence
  Synthetic oligonucleotide
ttggtgctccacgacgaggacgtagttcta

SEQ ID NO: 374778 - DNA, 30 bp, Artificial Sequence
  Synthetic oligonucleotide
catcattagaccacggaaacgcaggttcta

SEQ ID NO: 374779 - DNA, 30 bp, Artificial Sequence
  Synthetic oligonucleotide
gctatcgagggtccgtgttcaagggttcta

SEQ ID NO: 374780 - DNA, 30 bp, Artificial Sequence
  Synthetic oligonucleotide
acggaaagccatgtaggtttactggttcta

SEQ ID NO: 374781 - DNA, 30 bp, Artificial Sequence
  Synthetic oligonucleotide
aaggataaaagatccaatcatttggttcta

SEQ ID NO: 374782 - DNA, 30 bp, Artificial Sequence
  Synthetic oligonucleotide
tttggagtacgataaggatttaatgttcta

SEQ ID NO: 374783 - DNA, 30 bp, Artificial Sequence
  Synthetic oligonucleotide
taactggatatagaagtgggaggtgttcta

SEQ ID NO: 374784 - DNA, 30 bp, Artificial Sequence
  Synthetic oligonucleotide
gttatggcatgataaagggaggactttcta

SEQ ID NO: 374785 - DNA, 30 bp, Artificial Sequence
  Synthetic oligonucleotide
agagtgttttggtcctttactcgctttcta

SEQ ID NO: 374786 - DNA, 30 bp, Artificial Sequence
  Synthetic oligonucleotide
gcaccgataccgattcccgttctctttcta

SEQ ID NO: 374787 - DNA, 29 bp, Artificial Sequence
  Synthetic oligonucleotide
agtgctgtccggatatgaatcggtttcta

SEQ ID NO: 374788 - DNA, 30 bp, Artificial Sequence
  Synthetic oligonucleotide
aataccgataatcggccccgtgtgtttcta

SEQ ID NO: 374789 - DNA, 30 bp, Artificial Sequence
  Synthetic oligonucleotide
catagcgttaggcaacgtttccattttcta

SEQ ID NO: 374790 - DNA, 30 bp, Artificial Sequence
  Synthetic oligonucleotide
ttgttgccatccggtcaagctcaaaaagta

SEQ ID NO: 374791 - DNA, 30 bp, Artificial Sequence
  Synthetic oligonucleotide
tgctagtcagggctaattagtataaaagta

SEQ ID NO: 374792 - DNA, 30 bp, Artificial Sequence
  Synthetic oligonucleotide
ttcgctcttaaggtgctgtcgaagaaagta

SEQ ID NO: 374793 - DNA, 30 bp, Artificial Sequence
  Synthetic oligonucleotide
taacacttaaaacgccgacagtagaaagta

SEQ ID NO: 374794 - DNA, 30 bp, Artificial Sequence
  Synthetic oligonucleotide
gagttatcaagcaagataaactcgaaagta

SEQ ID NO: 374795 - DNA, 30 bp, Artificial Sequence
  Synthetic oligonucleotide
aggagctactgcgcagatcccgtgaaagta

SEQ ID NO: 374796 - DNA, 30 bp, Artificial Sequence
  Synthetic oligonucleotide
tgccggagtcggaggacgcgtcataaagta

SEQ ID NO: 374797 - DNA, 30 bp, Artificial Sequence
  Synthetic oligonucleotide
agccgggtacttgcatagctgagtaaagta

SEQ ID NO: 374798 - DNA, 30 bp, Artificial Sequence
  Synthetic oligonucleotide
gtttcagctatccattagttgccacaagta

SEQ ID NO: 374799 - DNA, 30 bp, Artificial Sequence
  Synthetic oligonucleotide
ctcaaacggaccagtatacttgcacaagta

SEQ ID NO: 374800 - DNA, 30 bp, Artificial Sequence
  Synthetic oligonucleotide
ctatgaccagcccgggttgcataccaagta

SEQ ID NO: 374801 - DNA, 30 bp, Artificial Sequence
  Synthetic oligonucleotide
agctgaacgcagactaagtcgagccaagta

SEQ ID NO: 374802 - DNA, 30 bp, Artificial Sequence
  Synthetic oligonucleotide
tgtctgtaatgcatgacacaagtccaagta

SEQ ID NO: 374803 - DNA, 30 bp, Artificial Sequence
  Synthetic oligonucleotide
ggaactatgtagtgagtttattggcaagta

SEQ ID NO: 374804 - DNA, 30 bp, Artificial Sequence
  Synthetic oligonucleotide
gtccgggttcgtcagcgacgagttcaagta

SEQ ID NO: 374805 - DNA, 30 bp, Artificial Sequence
  Synthetic oligonucleotide
gaaatccagtgtagcaattaatttcaagta

SEQ ID NO: 374806 - DNA, 30 bp, Artificial Sequence
  Synthetic oligonucleotide
aacaaaagagttacctttgttacagaagta

SEQ ID NO: 374807 - DNA, 30 bp, Artificial Sequence
  Synthetic oligonucleotide
taccgacatgccgcaggaatcgcagaagta

SEQ ID NO: 374808 - DNA, 30 bp, Artificial Sequence
  Synthetic oligonucleotide
gtccatatggcattcacctcgcacgaagta

SEQ ID NO: 374809 - DNA, 30 bp, Artificial Sequence
  Synthetic oligonucleotide
gtccgtccgtgggaattaatggtcgaagta

SEQ ID NO: 374810 - DNA, 30 bp, Artificial Sequence
  Synthetic oligonucleotide
tgcaagcttgcgtccccgggacaggaagta

SEQ ID NO: 374811 - DNA, 30 bp, Artificial Sequence
  Synthetic oligonucleotide
ttctctatgggatggtaattcaaataagta

SEQ ID NO: 374812 - DNA, 30 bp, Artificial Sequence
  Synthetic oligonucleotide
gttgcatacttccacgatgctacataagta

SEQ ID NO: 374813 - DNA, 30 bp, Artificial Sequence
  Synthetic oligonucleotide
attctgtacgcttacgtaaggtcataagta

SEQ ID NO: 374814 - DNA, 30 bp, Artificial Sequence
  Synthetic oligonucleotide
atgggccgtaagtcagtcattgtctaagta

SEQ ID NO: 374815 - DNA, 30 bp, Artificial Sequence
  Synthetic oligonucleotide
ttcaacgtgacgatagtgactttctaagta

SEQ ID NO: 374816 - DNA, 30 bp, Artificial Sequence
  Synthetic oligonucleotide
cttctgctcgctagtgggacttagtaagta

SEQ ID NO: 374817 - DNA, 30 bp, Artificial Sequence
  Synthetic oligonucleotide
tttgggattggcatgtaccatccgtaagta

SEQ ID NO: 374818 - DNA, 30 bp, Artificial Sequence
  Synthetic oligonucleotide
aatgaaaatttttacgtctacgtgtaagta

SEQ ID NO: 374819 - DNA, 30 bp, Artificial Sequence
  Synthetic oligonucleotide
ttctagaatgttctcctagacaattaagta

SEQ ID NO: 374820 - DNA, 30 bp, Artificial Sequence
  Synthetic oligonucleotide
gttgtcattgtgatcataacacattaagta

SEQ ID NO: 374821 - DNA, 30 bp, Artificial Sequence
  Synthetic oligonucleotide
ttggccaaggctaagagccagcattaagta

SEQ ID NO: 374822 - DNA, 30 bp, Artificial Sequence
  Synthetic oligonucleotide
ctctgggagcgccgtgttaataaaacagta

SEQ ID NO: 374823 - DNA, 30 bp, Artificial Sequence
  Synthetic oligonucleotide
cgctcgcaattaaatacttaaataacagta

SEQ ID NO: 374824 - DNA, 28 bp, Artificial Sequence
  Synthetic oligonucleotide
cggcacaacgttcaccacacgcacagta

SEQ ID NO: 374825 - DNA, 30 bp, Artificial Sequence
  Synthetic oligonucleotide
tccggcaaccggaagttcgcgtagacagta

SEQ ID NO: 374826 - DNA, 30 bp, Artificial Sequence
  Synthetic oligonucleotide
tattgtttttgatacctccttaggacagta

SEQ ID NO: 374827 - DNA, 30 bp, Artificial Sequence
  Synthetic oligonucleotide
cccgccattggagacgacgctcggacagta

SEQ ID NO: 374828 - DNA, 30 bp, Artificial Sequence
  Synthetic oligonucleotide
ggcaattcagccttaacttttttgacagta

SEQ ID NO: 374829 - DNA, 30 bp, Artificial Sequence
  Synthetic oligonucleotide
tgtttaattttataacaagtccgtacagta

SEQ ID NO: 374830 - DNA, 30 bp, Artificial Sequence
  Synthetic oligonucleotide
aatttaagcaacagcgtgtgagaaccagta

SEQ ID NO: 374831 - DNA, 30 bp, Artificial Sequence
  Synthetic oligonucleotide
tgcgcgcacatgcctatgctaatcccagta

SEQ ID NO: 374832 - DNA, 30 bp, Artificial Sequence
  Synthetic oligonucleotide
tgcggtgtatacctcagtagcgggccagta

SEQ ID NO: 374833 - DNA, 30 bp, Artificial Sequence
  Synthetic oligonucleotide
aacacgcattaggatagcgatgggccagta

SEQ ID NO: 374834 - DNA, 30 bp, Artificial Sequence
  Synthetic oligonucleotide
aaccaagatcggagcgaacagttgccagta

SEQ ID NO: 374835 - DNA, 30 bp, Artificial Sequence
  Synthetic oligonucleotide
caacatttaattatgttccaagttccagta

SEQ ID NO: 374836 - DNA, 30 bp, Artificial Sequence
  Synthetic oligonucleotide
aaagcgcacagatatgtcgtggaagcagta

SEQ ID NO: 374837 - DNA, 30 bp, Artificial Sequence
  Synthetic oligonucleotide
ttgaggccgggtagccctggtagagcagta

SEQ ID NO: 374838 - DNA, 30 bp, Artificial Sequence
  Synthetic oligonucleotide
tagaaaggattaccgtgaaccgccgcagta

SEQ ID NO: 374839 - DNA, 30 bp, Artificial Sequence
  Synthetic oligonucleotide
ggatctaacctgtcgaggcaccgcgcagta

SEQ ID NO: 374840 - DNA, 31 bp, Artificial Sequence
  Synthetic oligonucleotide
agtagatctcggtgtaaattataaggcagta

SEQ ID NO: 374841 - DNA, 30 bp, Artificial Sequence
  Synthetic oligonucleotide
ctctttcggttcctcaacctcgcggcagta

SEQ ID NO: 374842 - DNA, 30 bp, Artificial Sequence
  Synthetic oligonucleotide
tcttttcgtaaatgttcctcgtcggcagta

SEQ ID NO: 374843 - DNA, 30 bp, Artificial Sequence
  Synthetic oligonucleotide
gtcttatgagtaccacggcctcgggcagta

SEQ ID NO: 374844 - DNA, 30 bp, Artificial Sequence
  Synthetic oligonucleotide
ccgggtcattgggggggagccttggcagta

SEQ ID NO: 374845 - DNA, 30 bp, Artificial Sequence
  Synthetic oligonucleotide
caagagattggacatacgtctaaatcagta

SEQ ID NO: 374846 - DNA, 30 bp, Artificial Sequence
  Synthetic oligonucleotide
acacataatgcgtccctggggatctcagta

SEQ ID NO: 374847 - DNA, 30 bp, Artificial Sequence
  Synthetic oligonucleotide
gttcctagtctagcggtgatcacgtcagta

SEQ ID NO: 374848 - DNA, 30 bp, Artificial Sequence
  Synthetic oligonucleotide
gaattgaagactgcgattttgtcttcagta

SEQ ID NO: 374849 - DNA, 30 bp, Artificial Sequence
  Synthetic oligonucleotide
gatacgtgactggtttacgctagaagagta

SEQ ID NO: 374850 - DNA, 30 bp, Artificial Sequence
  Synthetic oligonucleotide
atggtataacataagtttccgcggagagta

SEQ ID NO: 374851 - DNA, 30 bp, Artificial Sequence
  Synthetic oligonucleotide
gccgataacggcggctaataggatagagta

SEQ ID NO: 374852 - DNA, 30 bp, Artificial Sequence
  Synthetic oligonucleotide
ctataatacctggggtatgaaagtagagta

SEQ ID NO: 374853 - DNA, 30 bp, Artificial Sequence
  Synthetic oligonucleotide
ttaccaataacccctggcgtgggacgagta

SEQ ID NO: 374854 - DNA, 30 bp, Artificial Sequence
  Synthetic oligonucleotide
aactagcgtgagtaagaaactttacgagta

SEQ ID NO: 374855 - DNA, 30 bp, Artificial Sequence
  Synthetic oligonucleotide
ttagcacggcagccaactgcatagcgagta

SEQ ID NO: 374856 - DNA, 30 bp, Artificial Sequence
  Synthetic oligonucleotide
cattcaaatgtctgagcggtctagcgagta

SEQ ID NO: 374857 - DNA, 30 bp, Artificial Sequence
  Synthetic oligonucleotide
acctaataagaattcgattttgatcgagta

SEQ ID NO: 374858 - DNA, 30 bp, Artificial Sequence
  Synthetic oligonucleotide
ggtattactccgatgttttctggtcgagta

SEQ ID NO: 374859 - DNA, 30 bp, Artificial Sequence
  Synthetic oligonucleotide
agtatcaagtcccaccgacgcacaggagta

SEQ ID NO: 374860 - DNA, 30 bp, Artificial Sequence
  Synthetic oligonucleotide
aatctagggcgttaccgtccgataggagta

SEQ ID NO: 374861 - DNA, 30 bp, Artificial Sequence
  Synthetic oligonucleotide
ggccgccggtctcgggcgtttgtcggagta

SEQ ID NO: 374862 - DNA, 30 bp, Artificial Sequence
  Synthetic oligonucleotide
gacccgggttggatccgtagggcgggagta

SEQ ID NO: 374863 - DNA, 30 bp, Artificial Sequence
  Synthetic oligonucleotide
ctaattagctgtgctaagttgttgggagta

SEQ ID NO: 374864 - DNA, 30 bp, Artificial Sequence
  Synthetic oligonucleotide
ggtaaaagagttctctaggggtatggagta

SEQ ID NO: 374865 - DNA, 30 bp, Artificial Sequence
  Synthetic oligonucleotide
gggcattatctgtgttgggggtttggagta

SEQ ID NO: 374866 - DNA, 30 bp, Artificial Sequence
  Synthetic oligonucleotide
gtactccttggaaactctcataaatgagta

SEQ ID NO: 374867 - DNA, 30 bp, Artificial Sequence
  Synthetic oligonucleotide
caccaggacggtacccatgtataatgagta

SEQ ID NO: 374868 - DNA, 30 bp, Artificial Sequence
  Synthetic oligonucleotide
ttggagctcggtttgtaggataactgagta

SEQ ID NO: 374869 - DNA, 30 bp, Artificial Sequence
  Synthetic oligonucleotide
aaaaaataaatcatgttctaagactgagta

SEQ ID NO: 374870 - DNA, 30 bp, Artificial Sequence
  Synthetic oligonucleotide
tgtaagggtcccggttttcgagtctgagta

SEQ ID NO: 374871 - DNA, 30 bp, Artificial Sequence
  Synthetic oligonucleotide
gcagttgttgcatattagtagacgtgagta

SEQ ID NO: 374872 - DNA, 30 bp, Artificial Sequence
  Synthetic oligonucleotide
ttccccaatgggggtgcgtattggtgagta

SEQ ID NO: 374873 - DNA, 30 bp, Artificial Sequence
  Synthetic oligonucleotide
cattttgggatttctaaagataattgagta

SEQ ID NO: 374874 - DNA, 30 bp, Artificial Sequence
  Synthetic oligonucleotide
tccttgccgtgtaccaccgtaaacatagta

SEQ ID NO: 374875 - DNA, 30 bp, Artificial Sequence
  Synthetic oligonucleotide
ccccgacctaacgacgactgttgcatagta

SEQ ID NO: 374876 - DNA, 30 bp, Artificial Sequence
  Synthetic oligonucleotide
ttgggtgagtccaagtaaagagtcatagta

SEQ ID NO: 374877 - DNA, 30 bp, Artificial Sequence
  Synthetic oligonucleotide
tacgccgtagccatcatatgagtcatagta

SEQ ID NO: 374878 - DNA, 30 bp, Artificial Sequence
  Synthetic oligonucleotide
tggcaggcgcgtacgtcagcggtcatagta

SEQ ID NO: 374879 - DNA, 30 bp, Artificial Sequence
  Synthetic oligonucleotide
ttatccaggaattagcaacagttcatagta

SEQ ID NO: 374880 - DNA, 30 bp, Artificial Sequence
  Synthetic oligonucleotide
gccacatagccgaacggaggcttgatagta

SEQ ID NO: 374881 - DNA, 30 bp, Artificial Sequence
  Synthetic oligonucleotide
cttgggtttacgaatgtgtcggatatagta

SEQ ID NO: 374882 - DNA, 30 bp, Artificial Sequence
  Synthetic oligonucleotide
gcgtagaagctagcccctcgttgtatagta

SEQ ID NO: 374883 - DNA, 30 bp, Artificial Sequence
  Synthetic oligonucleotide
ccttatgcgtggcggaccctcatactagta

SEQ ID NO: 374884 - DNA, 30 bp, Artificial Sequence
  Synthetic oligonucleotide
tctaaagccggctgcatggagttcctagta

SEQ ID NO: 374885 - DNA, 30 bp, Artificial Sequence
  Synthetic oligonucleotide
atattggatctcgtgatttcttggctagta

SEQ ID NO: 374886 - DNA, 30 bp, Artificial Sequence
  Synthetic oligonucleotide
attcgtaagtgtggatcgggcggtctagta

SEQ ID NO: 374887 - DNA, 30 bp, Artificial Sequence
  Synthetic oligonucleotide
gacacgtcttgaatttcagccattctagta

SEQ ID NO: 374888 - DNA, 30 bp, Artificial Sequence
  Synthetic oligonucleotide
ggagtgtaagctaatgttgcgacagtagta

SEQ ID NO: 374889 - DNA, 30 bp, Artificial Sequence
  Synthetic oligonucleotide
tacatctcttatggcggcttacgagtagta

SEQ ID NO: 374890 - DNA, 30 bp, Artificial Sequence
  Synthetic oligonucleotide
tggcgacaacaaactacgtacgtggtagta

SEQ ID NO: 374891 - DNA, 30 bp, Artificial Sequence
  Synthetic oligonucleotide
gcttctgttatggcatatggagatgtagta

SEQ ID NO: 374892 - DNA, 30 bp, Artificial Sequence
  Synthetic oligonucleotide
ctagcccgaatatgccgtggagatgtagta

SEQ ID NO: 374893 - DNA, 30 bp, Artificial Sequence
  Synthetic oligonucleotide
ggagaccccaagacatcggcaactgtagta

SEQ ID NO: 374894 - DNA, 30 bp, Artificial Sequence
  Synthetic oligonucleotide
cttcagttcagttcggagttcgttgtagta

SEQ ID NO: 374895 - DNA, 30 bp, Artificial Sequence
  Synthetic oligonucleotide
acccaattttggtgcgttggaaaattagta

SEQ ID NO: 374896 - DNA, 30 bp, Artificial Sequence
  Synthetic oligonucleotide
gacgagcgggagtttttagacacattagta

SEQ ID NO: 374897 - DNA, 30 bp, Artificial Sequence
  Synthetic oligonucleotide
gctataacgtcttagtagagtcgattagta

SEQ ID NO: 374898 - DNA, 30 bp, Artificial Sequence
  Synthetic oligonucleotide
ccgtccgctttaacggcatttggattagta

SEQ ID NO: 374899 - DNA, 30 bp, Artificial Sequence
  Synthetic oligonucleotide
caattgaatcagaccattaaaatattagta

SEQ ID NO: 374900 - DNA, 30 bp, Artificial Sequence
  Synthetic oligonucleotide
tcccaaagaggatggagtacacccttagta

SEQ ID NO: 374901 - DNA, 30 bp, Artificial Sequence
  Synthetic oligonucleotide
agtgacagactgtgtctattacctttagta

SEQ ID NO: 374902 - DNA, 30 bp, Artificial Sequence
  Synthetic oligonucleotide
ataaggctattggctggcggatctttagta

SEQ ID NO: 374903 - DNA, 30 bp, Artificial Sequence
  Synthetic oligonucleotide
gggcttccgagtcttgagggacttttagta

SEQ ID NO: 374904 - DNA, 30 bp, Artificial Sequence
  Synthetic oligonucleotide
aaactctctagagggagcagccaaaacgta

SEQ ID NO: 374905 - DNA, 30 bp, Artificial Sequence
  Synthetic oligonucleotide
gaccggcaatatagaatggcggtaaacgta

SEQ ID NO: 374906 - DNA, 30 bp, Artificial Sequence
  Synthetic oligonucleotide
gaccggcaatatagaatggctgtaaacgta

SEQ ID NO: 374907 - DNA, 30 bp, Artificial Sequence
  Synthetic oligonucleotide
acggtgctgtccagcgcttatcgcaacgta

SEQ ID NO: 374908 - DNA, 30 bp, Artificial Sequence
  Synthetic oligonucleotide
gcctcggagatcgcggcggttgtcaacgta

SEQ ID NO: 374909 - DNA, 30 bp, Artificial Sequence
  Synthetic oligonucleotide
acttcagccgtgcggtcttaaaagaacgta

SEQ ID NO: 374910 - DNA, 30 bp, Artificial Sequence
  Synthetic oligonucleotide
gagctcacattagaccccactatgaacgta

SEQ ID NO: 374911 - DNA, 30 bp, Artificial Sequence
  Synthetic oligonucleotide
aatttgggctccccgtgaaaactccacgta

SEQ ID NO: 374912 - DNA, 30 bp, Artificial Sequence
  Synthetic oligonucleotide
gtacagagtccgatccttcacgagcacgta

SEQ ID NO: 374913 - DNA, 30 bp, Artificial Sequence
  Synthetic oligonucleotide
ctcacaatgttcaagacggcggggcacgta

SEQ ID NO: 374914 - DNA, 30 bp, Artificial Sequence
  Synthetic oligonucleotide
cccagcagttgctaatgggtatggcacgta

SEQ ID NO: 374915 - DNA, 30 bp, Artificial Sequence
  Synthetic oligonucleotide
gctttgtcgttttcactttaggttcacgta

SEQ ID NO: 374916 - DNA, 30 bp, Artificial Sequence
  Synthetic oligonucleotide
acaggcggcgacgtacaaacggccgacgta

SEQ ID NO: 374917 - DNA, 29 bp, Artificial Sequence
  Synthetic oligonucleotide
ccgcggccacacttgcctgctaggacgta

SEQ ID NO: 374918 - DNA, 30 bp, Artificial Sequence
  Synthetic oligonucleotide
aacgattagcacaatcgattatgggacgta

SEQ ID NO: 374919 - DNA, 30 bp, Artificial Sequence
  Synthetic oligonucleotide
tagtgaggtatttatggataatgtgacgta

SEQ ID NO: 374920 - DNA, 30 bp, Artificial Sequence
  Synthetic oligonucleotide
ttctgtgcaaaattagcgtataaatacgta

SEQ ID NO: 374921 - DNA, 31 bp, Artificial Sequence
  Synthetic oligonucleotide
ttgtcgcaaatcatagctttatatatacgta

SEQ ID NO: 374922 - DNA, 30 bp, Artificial Sequence
  Synthetic oligonucleotide
ttataaataaaccatgcatctagctacgta

SEQ ID NO: 374923 - DNA, 30 bp, Artificial Sequence
  Synthetic oligonucleotide
gtcatacggtttcctattcttcgctacgta

SEQ ID NO: 374924 - DNA, 30 bp, Artificial Sequence
  Synthetic oligonucleotide
ttactgtttcacatctacacggattacgta

SEQ ID NO: 374925 - DNA, 30 bp, Artificial Sequence
  Synthetic oligonucleotide
actcccacagccatcattctaatttacgta

SEQ ID NO: 374926 - DNA, 30 bp, Artificial Sequence
  Synthetic oligonucleotide
ttactcggagggcttcaatgacgaaccgta

SEQ ID NO: 374927 - DNA, 30 bp, Artificial Sequence
  Synthetic oligonucleotide
taagaattaacctgaaacgggctaaccgta

SEQ ID NO: 374928 - DNA, 30 bp, Artificial Sequence
  Synthetic oligonucleotide
cgtagggcagcatttaggaatttcaccgta

SEQ ID NO: 374929 - DNA, 30 bp, Artificial Sequence
  Synthetic oligonucleotide
ttgcaacttctgaatcgtgcatcgaccgta

SEQ ID NO: 374930 - DNA, 30 bp, Artificial Sequence
  Synthetic oligonucleotide
tacactcttaaggtctcgtagattaccgta

SEQ ID NO: 374931 - DNA, 30 bp, Artificial Sequence
  Synthetic oligonucleotide
ctataacgttatctataatcctaacccgta

SEQ ID NO: 374932 - DNA, 30 bp, Artificial Sequence
  Synthetic oligonucleotide
ccagtctaaggactcatcacaacacccgta

SEQ ID NO: 374933 - DNA, 30 bp, Artificial Sequence
  Synthetic oligonucleotide
aaatagacagttgtgtttagggaccccgta

SEQ ID NO: 374934 - DNA, 30 bp, Artificial Sequence
  Synthetic oligonucleotide
tgacaaacgattaggtgcacgacagccgta

SEQ ID NO: 374935 - DNA, 30 bp, Artificial Sequence
  Synthetic oligonucleotide
gtatatggcattctcttcgtgaccgccgta

SEQ ID NO: 374936 - DNA, 30 bp, Artificial Sequence
  Synthetic oligonucleotide
tagacaggttatgtcacctgtctggccgta

SEQ ID NO: 374937 - DNA, 31 bp, Artificial Sequence
  Synthetic oligonucleotide
tgttttgtcagtaatggtacatatctccgta

SEQ ID NO: 374938 - DNA, 30 bp, Artificial Sequence
  Synthetic oligonucleotide
gttttatttccaaggagacgctattccgta

SEQ ID NO: 374939 - DNA, 26 bp, Artificial Sequence
  Synthetic oligonucleotide
aaacatacagatccatccgttccgta

SEQ ID NO: 374940 - DNA, 30 bp, Artificial Sequence
  Synthetic oligonucleotide
ggctaacttttcctctagcccacaagcgta

SEQ ID NO: 374941 - DNA, 30 bp, Artificial Sequence
  Synthetic oligonucleotide
ctccgctggaaggggtacttcgacagcgta

SEQ ID NO: 374942 - DNA, 30 bp, Artificial Sequence
  Synthetic oligonucleotide
cctcctggagacacatccgtatccagcgta

SEQ ID NO: 374943 - DNA, 30 bp, Artificial Sequence
  Synthetic oligonucleotide
tcttcatcattcgacctcaggtgcagcgta

SEQ ID NO: 374944 - DNA, 30 bp, Artificial Sequence
  Synthetic oligonucleotide
cgaaggaacagaaaccaatgactcagcgta

SEQ ID NO: 374945 - DNA, 30 bp, Artificial Sequence
  Synthetic oligonucleotide
gatatgcgggccatgagcctaaatagcgta

SEQ ID NO: 374946 - DNA, 30 bp, Artificial Sequence
  Synthetic oligonucleotide
acgaaccgacccactacatagaatagcgta

SEQ ID NO: 374947 - DNA, 30 bp, Artificial Sequence
  Synthetic oligonucleotide
gtggtatgagatttctcagctcatagcgta

SEQ ID NO: 374948 - DNA, 30 bp, Artificial Sequence
  Synthetic oligonucleotide
gatacaactgtataattaccctatagcgta

SEQ ID NO: 374949 - DNA, 30 bp, Artificial Sequence
  Synthetic oligonucleotide
ctagactaggcgcgacttattactagcgta

SEQ ID NO: 374950 - DNA, 30 bp, Artificial Sequence
  Synthetic oligonucleotide
atataactttacctgttaaacgttagcgta

SEQ ID NO: 374951 - DNA, 30 bp, Artificial Sequence
  Synthetic oligonucleotide
acggcaaagctaggggtcatgccgcgcgta

SEQ ID NO: 374952 - DNA, 31 bp, Artificial Sequence
  Synthetic oligonucleotide
gtgtggatatcaagatttttgtaggcgcgta

SEQ ID NO: 374953 - DNA, 30 bp, Artificial Sequence
  Synthetic oligonucleotide
gcgtactgcaaaagcctcaagctgcgcgta

SEQ ID NO: 374954 - DNA, 30 bp, Artificial Sequence
  Synthetic oligonucleotide
ccggaataccggcatagctctctgcgcgta

SEQ ID NO: 374955 - DNA, 30 bp, Artificial Sequence
  Synthetic oligonucleotide
agcagggataaccctactacccgtcgcgta

SEQ ID NO: 374956 - DNA, 30 bp, Artificial Sequence
  Synthetic oligonucleotide
cccgcatggtagattgcgacttgtcgcgta

SEQ ID NO: 374957 - DNA, 30 bp, Artificial Sequence
  Synthetic oligonucleotide
gctcttgtctgggatgctatcattcgcgta

SEQ ID NO: 374958 - DNA, 30 bp, Artificial Sequence
  Synthetic oligonucleotide
gacctgacgttaacggctctgtgaggcgta

SEQ ID NO: 374959 - DNA, 30 bp, Artificial Sequence
  Synthetic oligonucleotide
atcccacgttgaatggtgctcttaggcgta

SEQ ID NO: 374960 - DNA, 30 bp, Artificial Sequence
  Synthetic oligonucleotide
ctagcaaacggccgacaagtagagggcgta

SEQ ID NO: 374961 - DNA, 30 bp, Artificial Sequence
  Synthetic oligonucleotide
ttgccagcgctcgtgacatccttgggcgta

SEQ ID NO: 374962 - DNA, 30 bp, Artificial Sequence
  Synthetic oligonucleotide
ggtcgtattcacactgatgtgttgggcgta

SEQ ID NO: 374963 - DNA, 30 bp, Artificial Sequence
  Synthetic oligonucleotide
tgtttagccttaggacgtcgaatatgcgta

SEQ ID NO: 374964 - DNA, 30 bp, Artificial Sequence
  Synthetic oligonucleotide
aaatgcttcggagtcatccatgactgcgta

SEQ ID NO: 374965 - DNA, 30 bp, Artificial Sequence
  Synthetic oligonucleotide
gtgcagatcctccggctgcagccctgcgta

SEQ ID NO: 374966 - DNA, 30 bp, Artificial Sequence
  Synthetic oligonucleotide
ttattgtccagaccagtagctgcctgcgta

SEQ ID NO: 374967 - DNA, 30 bp, Artificial Sequence
  Synthetic oligonucleotide
acgggggagcatagtaggctcctctgcgta

SEQ ID NO: 374968 - DNA, 30 bp, Artificial Sequence
  Synthetic oligonucleotide
tgtgtgagtaagtatgacgtgccgtgcgta

SEQ ID NO: 374969 - DNA, 30 bp, Artificial Sequence
  Synthetic oligonucleotide
tctcagggcaaacggattactgcgtgcgta

SEQ ID NO: 374970 - DNA, 30 bp, Artificial Sequence
  Synthetic oligonucleotide
acagctacgaccagtacggacgggtgcgta

SEQ ID NO: 374971 - DNA, 30 bp, Artificial Sequence
  Synthetic oligonucleotide
gaaagcgacacacatcagatcaacatcgta

SEQ ID NO: 374972 - DNA, 30 bp, Artificial Sequence
  Synthetic oligonucleotide
gatcagaattattctattagtaccatcgta

SEQ ID NO: 374973 - DNA, 30 bp, Artificial Sequence
  Synthetic oligonucleotide
ataatcttcgttgcccaattgggcatcgta

SEQ ID NO: 374974 - DNA, 30 bp, Artificial Sequence
  Synthetic oligonucleotide
attcaggtacttcttccctaaaagatcgta

SEQ ID NO: 374975 - DNA, 30 bp, Artificial Sequence
  Synthetic oligonucleotide
aaatcttaccgttaacacgcgaggatcgta

SEQ ID NO: 374976 - DNA, 30 bp, Artificial Sequence
  Synthetic oligonucleotide
gtcatcgcggttgactagaagctgatcgta

SEQ ID NO: 374977 - DNA, 30 bp, Artificial Sequence
  Synthetic oligonucleotide
agcattactacggggcaagagcgtatcgta

SEQ ID NO: 374978 - DNA, 30 bp, Artificial Sequence
  Synthetic oligonucleotide
gatacacgacgaagacgtatcggtatcgta

SEQ ID NO: 374979 - DNA, 30 bp, Artificial Sequence
  Synthetic oligonucleotide
tattgcaatggcggcaacaaagttatcgta

SEQ ID NO: 374980 - DNA, 30 bp, Artificial Sequence
  Synthetic oligonucleotide
gatccggtaacatcgtattattgcctcgta

SEQ ID NO: 374981 - DNA, 30 bp, Artificial Sequence
  Synthetic oligonucleotide
caccttagacggttcaaatatattctcgta

SEQ ID NO: 374982 - DNA, 30 bp, Artificial Sequence
  Synthetic oligonucleotide
gagatcacgcaaagaaccacaatagtcgta

SEQ ID NO: 374983 - DNA, 30 bp, Artificial Sequence
  Synthetic oligonucleotide
attagtgcagtgacatggataatcgtcgta

SEQ ID NO: 374984 - DNA, 30 bp, Artificial Sequence
  Synthetic oligonucleotide
gacatccttatttagtgaacgtaggtcgta

SEQ ID NO: 374985 - DNA, 30 bp, Artificial Sequence
  Synthetic oligonucleotide
tcgtaacctgcgcttttgttgacggtcgta

SEQ ID NO: 374986 - DNA, 30 bp, Artificial Sequence
  Synthetic oligonucleotide
gaagatcagttggaactttttacggtcgta

SEQ ID NO: 374987 - DNA, 30 bp, Artificial Sequence
  Synthetic oligonucleotide
aggtttggtggggttcagtatattgtcgta

SEQ ID NO: 374988 - DNA, 30 bp, Artificial Sequence
  Synthetic oligonucleotide
acccatctagtactgctgtacatattcgta

SEQ ID NO: 374989 - DNA, 30 bp, Artificial Sequence
  Synthetic oligonucleotide
acagactcgtacgctacgtgatgcttcgta

SEQ ID NO: 374990 - DNA, 30 bp, Artificial Sequence
  Synthetic oligonucleotide
ttagctttgtattagataggtaagttcgta

SEQ ID NO: 374991 - DNA, 30 bp, Artificial Sequence
  Synthetic oligonucleotide
atttacgtagtttcttttatggagttcgta

SEQ ID NO: 374992 - DNA, 30 bp, Artificial Sequence
  Synthetic oligonucleotide
ggtatgttccctgataatagagaaaaggta

SEQ ID NO: 374993 - DNA, 30 bp, Artificial Sequence
  Synthetic oligonucleotide
cggacctttaactctcctagacgaaaggta

SEQ ID NO: 374994 - DNA, 30 bp, Artificial Sequence
  Synthetic oligonucleotide
agcaagtgctaacgaatctaattaaaggta

SEQ ID NO: 374995 - DNA, 30 bp, Artificial Sequence
  Synthetic oligonucleotide
tactgaagtttcttttgtgcctacaaggta

SEQ ID NO: 374996 - DNA, 30 bp, Artificial Sequence
  Synthetic oligonucleotide
cgctgcgactctggactgctgggcaaggta

SEQ ID NO: 374997 - DNA, 30 bp, Artificial Sequence
  Synthetic oligonucleotide
accccatgcaaatgtattggcacgaaggta

SEQ ID NO: 374998 - DNA, 30 bp, Artificial Sequence
  Synthetic oligonucleotide
ggctcttggcgatccacgataaggaaggta

SEQ ID NO: 374999 - DNA, 30 bp, Artificial Sequence
  Synthetic oligonucleotide
tggtagggggtacccggcgggaggaaggta

SEQ ID NO: 375000 - DNA, 30 bp, Artificial Sequence
  Synthetic oligonucleotide
gattattatatcaaacggtgacataaggta

SEQ ID NO: 375001 - DNA, 30 bp, Artificial Sequence
  Synthetic oligonucleotide
gcatactcagactatagagctgcacaggta

SEQ ID NO: 375002 - DNA, 30 bp, Artificial Sequence
  Synthetic oligonucleotide
tttctcggttatgtgattaaacgacaggta

SEQ ID NO: 375003 - DNA, 30 bp, Artificial Sequence
  Synthetic oligonucleotide
cactaaaatgtttttagtttgatccaggta

SEQ ID NO: 375004 - DNA, 30 bp, Artificial Sequence
  Synthetic oligonucleotide
attatatataagaatgccctgtagcaggta

SEQ ID NO: 375005 - DNA, 30 bp, Artificial Sequence
  Synthetic oligonucleotide
gcgccccgtacgaagggatcgccgcaggta

SEQ ID NO: 375006 - DNA, 30 bp, Artificial Sequence
  Synthetic oligonucleotide
tccaaggtgggaaagcagcgccggcaggta

SEQ ID NO: 375007 - DNA, 30 bp, Artificial Sequence
  Synthetic oligonucleotide
gttgtgtaatcatgactggaggtgcaggta

SEQ ID NO: 375008 - DNA, 30 bp, Artificial Sequence
  Synthetic oligonucleotide
cctagtgcaggatcagatcaggttcaggta

SEQ ID NO: 375009 - DNA, 30 bp, Artificial Sequence
  Synthetic oligonucleotide
atcggacaccgataaagacacggagaggta

SEQ ID NO: 375010 - DNA, 30 bp, Artificial Sequence
  Synthetic oligonucleotide
agtcgttttccatcagggccttgagaggta

SEQ ID NO: 375011 - DNA, 30 bp, Artificial Sequence
  Synthetic oligonucleotide
ttctcagggaagcgtacctctatagaggta

SEQ ID NO: 375012 - DNA, 30 bp, Artificial Sequence
  Synthetic oligonucleotide
aatcattgtcagtcaggtaagttagaggta

SEQ ID NO: 375013 - DNA, 30 bp, Artificial Sequence
  Synthetic oligonucleotide
cattgggaagaatgtgtactagaggaggta

SEQ ID NO: 375014 - DNA, 30 bp, Artificial Sequence
  Synthetic oligonucleotide
ctgtcttgtgtggtatcatagacggaggta

SEQ ID NO: 375015 - DNA, 30 bp, Artificial Sequence
  Synthetic oligonucleotide
gcctattacgcactaaatggctatgaggta

SEQ ID NO: 375016 - DNA, 30 bp, Artificial Sequence
  Synthetic oligonucleotide
tcaaaagtttagtattgagaatctgaggta

SEQ ID NO: 375017 - DNA, 30 bp, Artificial Sequence
  Synthetic oligonucleotide
atccagacggccgagtactgccgtgaggta

SEQ ID NO: 375018 - DNA, 30 bp, Artificial Sequence
  Synthetic oligonucleotide
gcatgttattggcggctccttgaataggta

SEQ ID NO: 375019 - DNA, 30 bp, Artificial Sequence
  Synthetic oligonucleotide
tagggacgtagcatgtaactccgataggta

SEQ ID NO: 375020 - DNA, 30 bp, Artificial Sequence
  Synthetic oligonucleotide
tgtaatgcatatagcggggttatataggta

SEQ ID NO: 375021 - DNA, 30 bp, Artificial Sequence
  Synthetic oligonucleotide
gtaaggcgttagtcgggatcgacctaggta

SEQ ID NO: 375022 - DNA, 30 bp, Artificial Sequence
  Synthetic oligonucleotide
tgaacccgtactatcgatttcgcctaggta

SEQ ID NO: 375023 - DNA, 30 bp, Artificial Sequence
  Synthetic oligonucleotide
catgtagttgatttttgtggatgctaggta

SEQ ID NO: 375024 - DNA, 30 bp, Artificial Sequence
  Synthetic oligonucleotide
tgatcctatagtgtgtagaattattaggta

SEQ ID NO: 375025 - DNA, 30 bp, Artificial Sequence
  Synthetic oligonucleotide
atagaatgcaactttgttgtgttttaggta

SEQ ID NO: 375026 - DNA, 30 bp, Artificial Sequence
  Synthetic oligonucleotide
gaatggcaactgcagcgtacagtaacggta

SEQ ID NO: 375027 - DNA, 30 bp, Artificial Sequence
  Synthetic oligonucleotide
attgaacatatacttgatcatttcacggta

SEQ ID NO: 375028 - DNA, 30 bp, Artificial Sequence
  Synthetic oligonucleotide
tccgttccccataaaccatgtaagacggta

SEQ ID NO: 375029 - DNA, 30 bp, Artificial Sequence
  Synthetic oligonucleotide
aaccgggctgaaatatgatatcttacggta

SEQ ID NO: 375030 - DNA, 30 bp, Artificial Sequence
  Synthetic oligonucleotide
cgtcagaagtttagatatttacgaccggta

SEQ ID NO: 375031 - DNA, 30 bp, Artificial Sequence
  Synthetic oligonucleotide
taacacatatcaaatttcaccatcccggta

SEQ ID NO: 375032 - DNA, 30 bp, Artificial Sequence
  Synthetic oligonucleotide
gaacaatagtttcgggttagtatcccggta

SEQ ID NO: 375033 - DNA, 31 bp, Artificial Sequence
  Synthetic oligonucleotide
gaaacgtagtcagttgttatgagagccggta

SEQ ID NO: 375034 - DNA, 30 bp, Artificial Sequence
  Synthetic oligonucleotide
aaggttgtcattcgacctaccatgccggta

SEQ ID NO: 375035 - DNA, 30 bp, Artificial Sequence
  Synthetic oligonucleotide
catgctcgagggagggttgcgagtccggta

SEQ ID NO: 375036 - DNA, 30 bp, Artificial Sequence
  Synthetic oligonucleotide
tgctggggactatgtcgggtacgtccggta

SEQ ID NO: 375037 - DNA, 31 bp, Artificial Sequence
  Synthetic oligonucleotide
aacgcgcataggttttcaaagaattccggta

SEQ ID NO: 375038 - DNA, 30 bp, Artificial Sequence
  Synthetic oligonucleotide
tttatggccaaccatggatagtgagcggta

SEQ ID NO: 375039 - DNA, 30 bp, Artificial Sequence
  Synthetic oligonucleotide
aatggcactcacctctgatgaatggcggta

SEQ ID NO: 375040 - DNA, 30 bp, Artificial Sequence
  Synthetic oligonucleotide
taagctaacaaacgtgctatggatgcggta

SEQ ID NO: 375041 - DNA, 30 bp, Artificial Sequence
  Synthetic oligonucleotide
gttagagttgtacttagtgcatatgcggta

SEQ ID NO: 375042 - DNA, 30 bp, Artificial Sequence
  Synthetic oligonucleotide
atacgtcatgaattaccagccttatcggta

SEQ ID NO: 375043 - DNA, 30 bp, Artificial Sequence
  Synthetic oligonucleotide
attcaagatgcctgtcccgcctactcggta

SEQ ID NO: 375044 - DNA, 30 bp, Artificial Sequence
  Synthetic oligonucleotide
tagacgggtgttaccgcggagcgctcggta

SEQ ID NO: 375045 - DNA, 30 bp, Artificial Sequence
  Synthetic oligonucleotide
aggctcatacaaggaattatggcaagggta

SEQ ID NO: 375046 - DNA, 30 bp, Artificial Sequence
  Synthetic oligonucleotide
tacctggtcacccagtttccatacagggta

SEQ ID NO: 375047 - DNA, 30 bp, Artificial Sequence
  Synthetic oligonucleotide
atccgtggcctctacgaatccggcagggta

SEQ ID NO: 375048 - DNA, 30 bp, Artificial Sequence
  Synthetic oligonucleotide
tcatctttatgggatttccgcaaacgggta

SEQ ID NO: 375049 - DNA, 30 bp, Artificial Sequence
  Synthetic oligonucleotide
gctgggagattcttcctgtgggcacgggta

SEQ ID NO: 375050 - DNA, 30 bp, Artificial Sequence
  Synthetic oligonucleotide
ctagcgctacgtcctacgcggtcacgggta

SEQ ID NO: 375051 - DNA, 30 bp, Artificial Sequence
  Synthetic oligonucleotide
gcgcttccgtttcacttaaggggacgggta

SEQ ID NO: 375052 - DNA, 30 bp, Artificial Sequence
  Synthetic oligonucleotide
attgcggtaacagcacgcgaggtacgggta

SEQ ID NO: 375053 - DNA, 30 bp, Artificial Sequence
  Synthetic oligonucleotide
agcacatagcatcactgcggatgccgggta

SEQ ID NO: 375054 - DNA, 30 bp, Artificial Sequence
  Synthetic oligonucleotide
tgatccacctatagttattcactccgggta

SEQ ID NO: 375055 - DNA, 30 bp, Artificial Sequence
  Synthetic oligonucleotide
gcctccggccacttgaataataggcgggta

SEQ ID NO: 375056 - DNA, 30 bp, Artificial Sequence
  Synthetic oligonucleotide
gctaaggtcgcacgcctgtgattgcgggta

SEQ ID NO: 375057 - DNA, 30 bp, Artificial Sequence
  Synthetic oligonucleotide
accgcccgaagtatacatgtctatcgggta

SEQ ID NO: 375058 - DNA, 30 bp, Artificial Sequence
  Synthetic oligonucleotide
gactacctgaccgtgcttgcgggtcgggta

SEQ ID NO: 375059 - DNA, 30 bp, Artificial Sequence
  Synthetic oligonucleotide
gcagaacgaggttctatcatcgttcgggta

SEQ ID NO: 375060 - DNA, 30 bp, Artificial Sequence
  Synthetic oligonucleotide
aaaccaatctcgaatcaaggaccaggggta

SEQ ID NO: 375061 - DNA, 30 bp, Artificial Sequence
  Synthetic oligonucleotide
gtcccggacatacgtaatctgcgaggggta

SEQ ID NO: 375062 - DNA, 30 bp, Artificial Sequence
  Synthetic oligonucleotide
agatctgacataataatgggggtaggggta

SEQ ID NO: 375063 - DNA, 30 bp, Artificial Sequence
  Synthetic oligonucleotide
ttaaattgccatccgtttacggccggggta

SEQ ID NO: 375064 - DNA, 30 bp, Artificial Sequence
  Synthetic oligonucleotide
ccggatagtgttgtgggttaaatcggggta

SEQ ID NO: 375065 - DNA, 30 bp, Artificial Sequence
  Synthetic oligonucleotide
gtcagtgagttagcttgatttgggggggta

SEQ ID NO: 375066 - DNA, 30 bp, Artificial Sequence
  Synthetic oligonucleotide
gcgtactccgaaccacattgtaaatgggta

SEQ ID NO: 375067 - DNA, 30 bp, Artificial Sequence
  Synthetic oligonucleotide
atttatatccgagagagaagtcaatgggta

SEQ ID NO: 375068 - DNA, 30 bp, Artificial Sequence
  Synthetic oligonucleotide
tcaccggtagggaccctactactatgggta

SEQ ID NO: 375069 - DNA, 30 bp, Artificial Sequence
  Synthetic oligonucleotide
atctttacatatccattcatccagtgggta

SEQ ID NO: 375070 - DNA, 30 bp, Artificial Sequence
  Synthetic oligonucleotide
actttatgcagtcctctcatttcgtgggta

SEQ ID NO: 375071 - DNA, 30 bp, Artificial Sequence
  Synthetic oligonucleotide
tttaactgtataagctagataagaatggta

SEQ ID NO: 375072 - DNA, 30 bp, Artificial Sequence
  Synthetic oligonucleotide
tacgtcattttcttcgaacgtataatggta

SEQ ID NO: 375073 - DNA, 30 bp, Artificial Sequence
  Synthetic oligonucleotide
gcgctgtgttcactagtggtactaatggta

SEQ ID NO: 375074 - DNA, 30 bp, Artificial Sequence
  Synthetic oligonucleotide
gcaagaatagcgagagtatatgcgatggta

SEQ ID NO: 375075 - DNA, 30 bp, Artificial Sequence
  Synthetic oligonucleotide
ttgcatgatgttaagatggcaaggatggta

SEQ ID NO: 375076 - DNA, 30 bp, Artificial Sequence
  Synthetic oligonucleotide
gagtcgctatgtactcaagccgatatggta

SEQ ID NO: 375077 - DNA, 30 bp, Artificial Sequence
  Synthetic oligonucleotide
ggggacaggaagtagccgctctctatggta

SEQ ID NO: 375078 - DNA, 30 bp, Artificial Sequence
  Synthetic oligonucleotide
ttaggggtccagcacgggcgtagtatggta

SEQ ID NO: 375079 - DNA, 31 bp, Artificial Sequence
  Synthetic oligonucleotide
accgcggcaacaaaaaccgacccgtatggta

SEQ ID NO: 375080 - DNA, 30 bp, Artificial Sequence
  Synthetic oligonucleotide
gaggcctttgctaagagccacattatggta

SEQ ID NO: 375081 - DNA, 30 bp, Artificial Sequence
  Synthetic oligonucleotide
actgcttatttcgaatttagcgaactggta

SEQ ID NO: 375082 - DNA, 30 bp, Artificial Sequence
  Synthetic oligonucleotide
tgcatcataatatgtggttgcgcactggta

SEQ ID NO: 375083 - DNA, 30 bp, Artificial Sequence
  Synthetic oligonucleotide
gctgcatcgggatcaataaccttactggta

SEQ ID NO: 375084 - DNA, 30 bp, Artificial Sequence
  Synthetic oligonucleotide
gatctgtcgaggtaattgggagacctggta

SEQ ID NO: 375085 - DNA, 30 bp, Artificial Sequence
  Synthetic oligonucleotide
tttcaggttgtacatgaagcacccctggta

SEQ ID NO: 375086 - DNA, 30 bp, Artificial Sequence
  Synthetic oligonucleotide
ggtttggatctctacggactgcccctggta

SEQ ID NO: 375087 - DNA, 30 bp, Artificial Sequence
  Synthetic oligonucleotide
ccatgtcattttacttacgtgcgcctggta

SEQ ID NO: 375088 - DNA, 30 bp, Artificial Sequence
  Synthetic oligonucleotide
gatcaacctaaccgcacatgcttgctggta

SEQ ID NO: 375089 - DNA, 30 bp, Artificial Sequence
  Synthetic oligonucleotide
gcatacgcatggatgttgcgggatctggta

SEQ ID NO: 375090 - DNA, 30 bp, Artificial Sequence
  Synthetic oligonucleotide
agcattgatagtatgacgggttaagtggta

SEQ ID NO: 375091 - DNA, 30 bp, Artificial Sequence
  Synthetic oligonucleotide
tattacaaatagaaattactgaccgtggta

SEQ ID NO: 375092 - DNA, 30 bp, Artificial Sequence
  Synthetic oligonucleotide
tgttaactacggtcaaagccgccggtggta

SEQ ID NO: 375093 - DNA, 30 bp, Artificial Sequence
  Synthetic oligonucleotide
tatcccgcgaatgaacagggtactgtggta

SEQ ID NO: 375094 - DNA, 30 bp, Artificial Sequence
  Synthetic oligonucleotide
ggaatttaagggatgacttgctctgtggta

SEQ ID NO: 375095 - DNA, 30 bp, Artificial Sequence
  Synthetic oligonucleotide
attcggttatggctcgttcgacaattggta

SEQ ID NO: 375096 - DNA, 30 bp, Artificial Sequence
  Synthetic oligonucleotide
ccctccccccctacttggctacaattggta

SEQ ID NO: 375097 - DNA, 30 bp, Artificial Sequence
  Synthetic oligonucleotide
tgtcctacccacactctggctagattggta

SEQ ID NO: 375098 - DNA, 30 bp, Artificial Sequence
  Synthetic oligonucleotide
cttcaaaagctgtgctggtagatattggta

SEQ ID NO: 375099 - DNA, 30 bp, Artificial Sequence
  Synthetic oligonucleotide
cgggagtctagccacgttggtatattggta

SEQ ID NO: 375100 - DNA, 30 bp, Artificial Sequence
  Synthetic oligonucleotide
aagttttactggtgtcctttcgtattggta

SEQ ID NO: 375101 - DNA, 30 bp, Artificial Sequence
  Synthetic oligonucleotide
tatgttgcggatctcgcacaactcttggta

SEQ ID NO: 375102 - DNA, 30 bp, Artificial Sequence
  Synthetic oligonucleotide
ttaatgtgataggctctagcggtcttggta

SEQ ID NO: 375103 - DNA, 30 bp, Artificial Sequence
  Synthetic oligonucleotide
catccgggtcggttttactgtaagttggta

SEQ ID NO: 375104 - DNA, 30 bp, Artificial Sequence
  Synthetic oligonucleotide
ggacgacagcttacgccacaacagttggta

SEQ ID NO: 375105 - DNA, 30 bp, Artificial Sequence
  Synthetic oligonucleotide
ttactgcaactgtaacggcaaacgttggta

SEQ ID NO: 375106 - DNA, 30 bp, Artificial Sequence
  Synthetic oligonucleotide
atggagagattttgtacggaatcgttggta

SEQ ID NO: 375107 - DNA, 30 bp, Artificial Sequence
  Synthetic oligonucleotide
atcccagcatcaaaaaaggtcaggttggta

SEQ ID NO: 375108 - DNA, 30 bp, Artificial Sequence
  Synthetic oligonucleotide
ggagatatatttcccgatttagctttggta

SEQ ID NO: 375109 - DNA, 30 bp, Artificial Sequence
  Synthetic oligonucleotide
tcaacccgttagcaggaagccagtttggta

SEQ ID NO: 375110 - DNA, 30 bp, Artificial Sequence
  Synthetic oligonucleotide
tgaccagttacgccttaacattttttggta

SEQ ID NO: 375111 - DNA, 30 bp, Artificial Sequence
  Synthetic oligonucleotide
acatcgatacaggagaggccttttttggta

SEQ ID NO: 375112 - DNA, 31 bp, Artificial Sequence
  Synthetic oligonucleotide
accatcccccccaggaggctttataaatgta

SEQ ID NO: 375113 - DNA, 30 bp, Artificial Sequence
  Synthetic oligonucleotide
gtcgtaagatatctcagtcgcgtaaatgta

SEQ ID NO: 375114 - DNA, 30 bp, Artificial Sequence
  Synthetic oligonucleotide
tggtcatgtaatacattggtgaacaatgta

SEQ ID NO: 375115 - DNA, 30 bp, Artificial Sequence
  Synthetic oligonucleotide
acaagtgtacgtagtcacgagagcaatgta

SEQ ID NO: 375116 - DNA, 30 bp, Artificial Sequence
  Synthetic oligonucleotide
gtctcatatgctggctcgaacggcaatgta

SEQ ID NO: 375117 - DNA, 30 bp, Artificial Sequence
  Synthetic oligonucleotide
ttcaaatgaccaataatctgagagaatgta

SEQ ID NO: 375118 - DNA, 30 bp, Artificial Sequence
  Synthetic oligonucleotide
tcatcccttggcttagtatttgggaatgta

SEQ ID NO: 375119 - DNA, 30 bp, Artificial Sequence
  Synthetic oligonucleotide
attgcgtcgtcaattatcacgctgaatgta

SEQ ID NO: 375120 - DNA, 30 bp, Artificial Sequence
  Synthetic oligonucleotide
gagtaacttggtaatcaggaaaataatgta

SEQ ID NO: 375121 - DNA, 30 bp, Artificial Sequence
  Synthetic oligonucleotide
tctggtgagttctggagctattataatgta

SEQ ID NO: 375122 - DNA, 30 bp, Artificial Sequence
  Synthetic oligonucleotide
gaattacgtatttgtcggctcgctaatgta

SEQ ID NO: 375123 - DNA, 30 bp, Artificial Sequence
  Synthetic oligonucleotide
aaactcttcgaggtgagcgtaattaatgta

SEQ ID NO: 375124 - DNA, 30 bp, Artificial Sequence
  Synthetic oligonucleotide
ttctaaaaaatcttgtacgctcttaatgta

SEQ ID NO: 375125 - DNA, 30 bp, Artificial Sequence
  Synthetic oligonucleotide
ctcgtatttgcgggccattagccacatgta

SEQ ID NO: 375126 - DNA, 30 bp, Artificial Sequence
  Synthetic oligonucleotide
atgccgcatgattctctacaacgacatgta

SEQ ID NO: 375127 - DNA, 30 bp, Artificial Sequence
  Synthetic oligonucleotide
gcataagacgcttgcgtaacgacgcatgta

SEQ ID NO: 375128 - DNA, 30 bp, Artificial Sequence
  Synthetic oligonucleotide
cccaagggactaacgtacgtcggtcatgta

SEQ ID NO: 375129 - DNA, 30 bp, Artificial Sequence
  Synthetic oligonucleotide
gcagaaatacaggagaggcagattcatgta

SEQ ID NO: 375130 - DNA, 30 bp, Artificial Sequence
  Synthetic oligonucleotide
acgtggctatcaaaacaggatcttcatgta

SEQ ID NO: 375131 - DNA, 30 bp, Artificial Sequence
  Synthetic oligonucleotide
tattaggaaccacaccgggcatcagatgta

SEQ ID NO: 375132 - DNA, 30 bp, Artificial Sequence
  Synthetic oligonucleotide
agcattcgactcaccgattatggagatgta

SEQ ID NO: 375133 - DNA, 30 bp, Artificial Sequence
  Synthetic oligonucleotide
gtcgatgtcggttcgacatgggtagatgta

SEQ ID NO: 375134 - DNA, 30 bp, Artificial Sequence
  Synthetic oligonucleotide
atatttctgatcagatcgacaatcgatgta

SEQ ID NO: 375135 - DNA, 30 bp, Artificial Sequence
  Synthetic oligonucleotide
atttaaagataagcatcatccaaggatgta

SEQ ID NO: 375136 - DNA, 30 bp, Artificial Sequence
  Synthetic oligonucleotide
aaggtgcagtatttctatttgaaggatgta

SEQ ID NO: 375137 - DNA, 30 bp, Artificial Sequence
  Synthetic oligonucleotide
aacgaacacccagctctttaagtggatgta

SEQ ID NO: 375138 - DNA, 30 bp, Artificial Sequence
  Synthetic oligonucleotide
tctttagccatcaacaatcttgtggatgta

SEQ ID NO: 375139 - DNA, 30 bp, Artificial Sequence
  Synthetic oligonucleotide
aatgtgcacccgaaattacttcatgatgta

SEQ ID NO: 375140 - DNA, 30 bp, Artificial Sequence
  Synthetic oligonucleotide
ctatagcctggtatttctatggatgatgta

SEQ ID NO: 375141 - DNA, 30 bp, Artificial Sequence
  Synthetic oligonucleotide
tctctatgtgtagtaagtagacctgatgta

SEQ ID NO: 375142 - DNA, 31 bp, Artificial Sequence
  Synthetic oligonucleotide
tgcaatataagcattaaaggattctgatgta

SEQ ID NO: 375143 - DNA, 30 bp, Artificial Sequence
  Synthetic oligonucleotide
cgtcaggcacactccacggtcgttgatgta

SEQ ID NO: 375144 - DNA, 30 bp, Artificial Sequence
  Synthetic oligonucleotide
agcggtggccatactgtcccatttgatgta

SEQ ID NO: 375145 - DNA, 30 bp, Artificial Sequence
  Synthetic oligonucleotide
aacgtggtggatatttttctcaaatatgta

SEQ ID NO: 375146 - DNA, 30 bp, Artificial Sequence
  Synthetic oligonucleotide
cgaattcctctctgcctttagcgatatgta

SEQ ID NO: 375147 - DNA, 30 bp, Artificial Sequence
  Synthetic oligonucleotide
aacagtgataacagacacggttgatatgta

SEQ ID NO: 375148 - DNA, 30 bp, Artificial Sequence
  Synthetic oligonucleotide
tccggatttgggaccctgttaatatatgta

SEQ ID NO: 375149 - DNA, 30 bp, Artificial Sequence
  Synthetic oligonucleotide
atcatgttacccgggaccatctactatgta

SEQ ID NO: 375150 - DNA, 30 bp, Artificial Sequence
  Synthetic oligonucleotide
taacagtcctatctcctactgccctatgta

SEQ ID NO: 375151 - DNA, 30 bp, Artificial Sequence
  Synthetic oligonucleotide
gtgcgctcaacgcctggccagtcctatgta

SEQ ID NO: 375152 - DNA, 30 bp, Artificial Sequence
  Synthetic oligonucleotide
ggctctttctaggcgagaccgcgctatgta

SEQ ID NO: 375153 - DNA, 30 bp, Artificial Sequence
  Synthetic oligonucleotide
gctagctgtctaaagtctcgtaattatgta

SEQ ID NO: 375154 - DNA, 30 bp, Artificial Sequence
  Synthetic oligonucleotide
ttggattaagtgtagactggctattatgta

SEQ ID NO: 375155 - DNA, 30 bp, Artificial Sequence
  Synthetic oligonucleotide
acattttgcatggtcagagagcgttatgta

SEQ ID NO: 375156 - DNA, 30 bp, Artificial Sequence
  Synthetic oligonucleotide
atagggttccggcccgtggctatttatgta

SEQ ID NO: 375157 - DNA, 30 bp, Artificial Sequence
  Synthetic oligonucleotide
atgatagtggcagcaaacgttctttatgta

SEQ ID NO: 375158 - DNA, 30 bp, Artificial Sequence
  Synthetic oligonucleotide
gtttttccaaaggatggtacataaactgta

SEQ ID NO: 375159 - DNA, 30 bp, Artificial Sequence
  Synthetic oligonucleotide
agatcattagctttctatgccatgactgta

SEQ ID NO: 375160 - DNA, 30 bp, Artificial Sequence
  Synthetic oligonucleotide
gtttacaacttcacttaaccctatactgta

SEQ ID NO: 375161 - DNA, 30 bp, Artificial Sequence
  Synthetic oligonucleotide
atttgcagaacgaacccaccggctactgta

SEQ ID NO: 375162 - DNA, 30 bp, Artificial Sequence
  Synthetic oligonucleotide
tattagtcctttcgtaagtgatctactgta

SEQ ID NO: 375163 - DNA, 30 bp, Artificial Sequence
  Synthetic oligonucleotide
tgctgttcgtgtattaggcaagtacctgta

SEQ ID NO: 375164 - DNA, 30 bp, Artificial Sequence
  Synthetic oligonucleotide
gttacgtgatctcctgtcactatccctgta

SEQ ID NO: 375165 - DNA, 30 bp, Artificial Sequence
  Synthetic oligonucleotide
tttgtcctcagtccgcataaaagtcctgta

SEQ ID NO: 375166 - DNA, 30 bp, Artificial Sequence
  Synthetic oligonucleotide
gcatgttagtggcacttggggggtcctgta

SEQ ID NO: 375167 - DNA, 30 bp, Artificial Sequence
  Synthetic oligonucleotide
acaaagcccaggtacatagggtacgctgta

SEQ ID NO: 375168 - DNA, 30 bp, Artificial Sequence
  Synthetic oligonucleotide
acctcacctttaacctgaatgttcgctgta

SEQ ID NO: 375169 - DNA, 30 bp, Artificial Sequence
  Synthetic oligonucleotide
aagtaatggtgtgacggctcacaggctgta

SEQ ID NO: 375170 - DNA, 30 bp, Artificial Sequence
  Synthetic oligonucleotide
ttatgatggatagaagtcgggtctgctgta

SEQ ID NO: 375171 - DNA, 30 bp, Artificial Sequence
  Synthetic oligonucleotide
gccatacgcggttggctgtagcttgctgta

SEQ ID NO: 375172 - DNA, 30 bp, Artificial Sequence
  Synthetic oligonucleotide
caagtgggtcagtggggcgaaggatctgta

SEQ ID NO: 375173 - DNA, 30 bp, Artificial Sequence
  Synthetic oligonucleotide
gtttcgatatgctttgtcgagaactctgta

SEQ ID NO: 375174 - DNA, 30 bp, Artificial Sequence
  Synthetic oligonucleotide
gtgcgtgacggtacatcgagggactctgta

SEQ ID NO: 375175 - DNA, 30 bp, Artificial Sequence
  Synthetic oligonucleotide
gcatccatcccgacagaggaacattctgta

SEQ ID NO: 375176 - DNA, 30 bp, Artificial Sequence
  Synthetic oligonucleotide
gagaaaaaagcgccattgatccgttctgta

SEQ ID NO: 375177 - DNA, 30 bp, Artificial Sequence
  Synthetic oligonucleotide
gcatgaggtggccctgtcaccggttctgta

SEQ ID NO: 375178 - DNA, 30 bp, Artificial Sequence
  Synthetic oligonucleotide
ccgtgagtaccacgtgggcttttttctgta

SEQ ID NO: 375179 - DNA, 30 bp, Artificial Sequence
  Synthetic oligonucleotide
tagtatctgcttgtcaaaccaggaagtgta

SEQ ID NO: 375180 - DNA, 30 bp, Artificial Sequence
  Synthetic oligonucleotide
ctttacagaagtctttatcctatcagtgta

SEQ ID NO: 375181 - DNA, 30 bp, Artificial Sequence
  Synthetic oligonucleotide
gaactatcttcctgacctcgcgagagtgta

SEQ ID NO: 375182 - DNA, 30 bp, Artificial Sequence
  Synthetic oligonucleotide
tggtcacattgtggacccttatagagtgta

SEQ ID NO: 375183 - DNA, 30 bp, Artificial Sequence
  Synthetic oligonucleotide
tccttactttcggatggaagaccgagtgta

SEQ ID NO: 375184 - DNA, 30 bp, Artificial Sequence
  Synthetic oligonucleotide
gatatagcctacttacagacgccgagtgta

SEQ ID NO: 375185 - DNA, 30 bp, Artificial Sequence
  Synthetic oligonucleotide
cttgataaaccttataactattgtagtgta

SEQ ID NO: 375186 - DNA, 30 bp, Artificial Sequence
  Synthetic oligonucleotide
ggccgggctggtgataatcgaaaacgtgta

SEQ ID NO: 375187 - DNA, 30 bp, Artificial Sequence
  Synthetic oligonucleotide
ccagccggctttgagaatgtcgcacgtgta

SEQ ID NO: 375188 - DNA, 30 bp, Artificial Sequence
  Synthetic oligonucleotide
gctgttttcgggaatatttaggcacgtgta

SEQ ID NO: 375189 - DNA, 30 bp, Artificial Sequence
  Synthetic oligonucleotide
ttgtgagggattcgttcaacggcacgtgta

SEQ ID NO: 375190 - DNA, 30 bp, Artificial Sequence
  Synthetic oligonucleotide
ctttgattcggtgattttcccaagcgtgta

SEQ ID NO: 375191 - DNA, 30 bp, Artificial Sequence
  Synthetic oligonucleotide
ggtatcactcgatgtgccagcacgcgtgta

SEQ ID NO: 375192 - DNA, 30 bp, Artificial Sequence
  Synthetic oligonucleotide
ctcagcacgggccgttgactcacgcgtgta

SEQ ID NO: 375193 - DNA, 30 bp, Artificial Sequence
  Synthetic oligonucleotide
ggttataatttcacattcctccgtcgtgta

SEQ ID NO: 375194 - DNA, 30 bp, Artificial Sequence
  Synthetic oligonucleotide
gtctgtttatgcgtgtgatccattcgtgta

SEQ ID NO: 375195 - DNA, 30 bp, Artificial Sequence
  Synthetic oligonucleotide
cataagcttgcccgtatttaatttcgtgta

SEQ ID NO: 375196 - DNA, 30 bp, Artificial Sequence
  Synthetic oligonucleotide
acatccagtggacatttcggtgaaggtgta

SEQ ID NO: 375197 - DNA, 30 bp, Artificial Sequence
  Synthetic oligonucleotide
tgattgctgttacagcatccgagaggtgta

SEQ ID NO: 375198 - DNA, 30 bp, Artificial Sequence
  Synthetic oligonucleotide
cggcgtacacagcagtaactttccggtgta

SEQ ID NO: 375199 - DNA, 30 bp, Artificial Sequence
  Synthetic oligonucleotide
ctttattcatggtacagacgcgagggtgta

SEQ ID NO: 375200 - DNA, 30 bp, Artificial Sequence
  Synthetic oligonucleotide
acagtctgacatggccgcgtatagggtgta

SEQ ID NO: 375201 - DNA, 30 bp, Artificial Sequence
  Synthetic oligonucleotide
aacggtccgaagcggaggcttacgggtgta

SEQ ID NO: 375202 - DNA, 30 bp, Artificial Sequence
  Synthetic oligonucleotide
atccggtccttagatagggtgcggggtgta

SEQ ID NO: 375203 - DNA, 30 bp, Artificial Sequence
  Synthetic oligonucleotide
aaatcaggttcctcgaattcgctgggtgta

SEQ ID NO: 375204 - DNA, 30 bp, Artificial Sequence
  Synthetic oligonucleotide
ttgcacccaggccgtatcattactggtgta

SEQ ID NO: 375205 - DNA, 29 bp, Artificial Sequence
  Synthetic oligonucleotide
aaagttagtcaatcgagtctcctggtgta

SEQ ID NO: 375206 - DNA, 30 bp, Artificial Sequence
  Synthetic oligonucleotide
gttaagggagggcagtggtaacgatgtgta

SEQ ID NO: 375207 - DNA, 30 bp, Artificial Sequence
  Synthetic oligonucleotide
tcgaacgcatcacttcgcgacatctgtgta

SEQ ID NO: 375208 - DNA, 30 bp, Artificial Sequence
  Synthetic oligonucleotide
gataatctctatccagaagcggtgtgtgta

SEQ ID NO: 375209 - DNA, 30 bp, Artificial Sequence
  Synthetic oligonucleotide
ttcaccttgatcacgtgagagtattgtgta

SEQ ID NO: 375210 - DNA, 30 bp, Artificial Sequence
  Synthetic oligonucleotide
ggtactcaagctggtacttgaccttgtgta

SEQ ID NO: 375211 - DNA, 30 bp, Artificial Sequence
  Synthetic oligonucleotide
gggatgtcgtccccaggggttctttgtgta

SEQ ID NO: 375212 - DNA, 30 bp, Artificial Sequence
  Synthetic oligonucleotide
aggtccgtaagggtgggcagagaaattgta

SEQ ID NO: 375213 - DNA, 30 bp, Artificial Sequence
  Synthetic oligonucleotide
agtaatactcggcacttagccagcattgta

SEQ ID NO: 375214 - DNA, 30 bp, Artificial Sequence
  Synthetic oligonucleotide
cacagcagtcggtagtagcccgcgattgta

SEQ ID NO: 375215 - DNA, 30 bp, Artificial Sequence
  Synthetic oligonucleotide
atacttggcttgtatttaaatgcgattgta

SEQ ID NO: 375216 - DNA, 30 bp, Artificial Sequence
  Synthetic oligonucleotide
ctgggcagaaggggtgggttatatattgta

SEQ ID NO: 375217 - DNA, 30 bp, Artificial Sequence
  Synthetic oligonucleotide
ataattagatttcctccccgtcgtattgta

SEQ ID NO: 375218 - DNA, 30 bp, Artificial Sequence
  Synthetic oligonucleotide
ttgagatccgcagtccattgcgttattgta

SEQ ID NO: 375219 - DNA, 30 bp, Artificial Sequence
  Synthetic oligonucleotide
ggaatgaacgcgttatagccaagacttgta

SEQ ID NO: 375220 - DNA, 30 bp, Artificial Sequence
  Synthetic oligonucleotide
gaccgtataggtaacggccctctacttgta

SEQ ID NO: 375221 - DNA, 30 bp, Artificial Sequence
  Synthetic oligonucleotide
cggcgggccctggaggctcaggtacttgta

SEQ ID NO: 375222 - DNA, 30 bp, Artificial Sequence
  Synthetic oligonucleotide
aatacggggcaatagaacggtaaccttgta

SEQ ID NO: 375223 - DNA, 30 bp, Artificial Sequence
  Synthetic oligonucleotide
tgaggggagcttccttcgtttaagcttgta

SEQ ID NO: 375224 - DNA, 30 bp, Artificial Sequence
  Synthetic oligonucleotide
gcacgcctagtaaacggggcatctcttgta

SEQ ID NO: 375225 - DNA, 30 bp, Artificial Sequence
  Synthetic oligonucleotide
atcgacagccctgacaatacgtgtcttgta

SEQ ID NO: 375226 - DNA, 30 bp, Artificial Sequence
  Synthetic oligonucleotide
aagaaggcttcacgcaattcacgagttgta

SEQ ID NO: 375227 - DNA, 30 bp, Artificial Sequence
  Synthetic oligonucleotide
gttgcgggattcgcagcgcagttagttgta

SEQ ID NO: 375228 - DNA, 30 bp, Artificial Sequence
  Synthetic oligonucleotide
tcttcagtcgtatcagggcgtttagttgta

SEQ ID NO: 375229 - DNA, 30 bp, Artificial Sequence
  Synthetic oligonucleotide
ttcattgtgaatcgaatttttgaggttgta

SEQ ID NO: 375230 - DNA, 30 bp, Artificial Sequence
  Synthetic oligonucleotide
tagacacgcgctcgaggacgcccggttgta

SEQ ID NO: 375231 - DNA, 30 bp, Artificial Sequence
  Synthetic oligonucleotide
ttattttgataggacgacatctgggttgta

SEQ ID NO: 375232 - DNA, 30 bp, Artificial Sequence
  Synthetic oligonucleotide
caactaatcaggcgctcaacattggttgta

SEQ ID NO: 375233 - DNA, 30 bp, Artificial Sequence
  Synthetic oligonucleotide
aatcagcgttgatccatttggttggttgta

SEQ ID NO: 375234 - DNA, 30 bp, Artificial Sequence
  Synthetic oligonucleotide
cacggtacgccccacctatcggctgttgta

SEQ ID NO: 375235 - DNA, 30 bp, Artificial Sequence
  Synthetic oligonucleotide
agccatatagagaggttctataaatttgta

SEQ ID NO: 375236 - DNA, 30 bp, Artificial Sequence
  Synthetic oligonucleotide
tgaaaaatgcattgactgccggaatttgta

SEQ ID NO: 375237 - DNA, 30 bp, Artificial Sequence
  Synthetic oligonucleotide
atcccgttacagactgtagagtcatttgta

SEQ ID NO: 375238 - DNA, 30 bp, Artificial Sequence
  Synthetic oligonucleotide
cccgattgattgcgaaaggcgtcatttgta

SEQ ID NO: 375239 - DNA, 30 bp, Artificial Sequence
  Synthetic oligonucleotide
cctggtctctggcccatgtcattatttgta

SEQ ID NO: 375240 - DNA, 30 bp, Artificial Sequence
  Synthetic oligonucleotide
acccaactaccattattgtgcgcctttgta

SEQ ID NO: 375241 - DNA, 30 bp, Artificial Sequence
  Synthetic oligonucleotide
tcattaggaataaatatatatgcctttgta

SEQ ID NO: 375242 - DNA, 30 bp, Artificial Sequence
  Synthetic oligonucleotide
cttcgcggtatatcctctcggtagtttgta

SEQ ID NO: 375243 - DNA, 30 bp, Artificial Sequence
  Synthetic oligonucleotide
acttaatatgaacgatactacgcgtttgta

SEQ ID NO: 375244 - DNA, 30 bp, Artificial Sequence
  Synthetic oligonucleotide
gtgttgctatggaagggttgtcgttttgta

SEQ ID NO: 375245 - DNA, 30 bp, Artificial Sequence
  Synthetic oligonucleotide
ggtaacgagccagatgcttgatgttttgta

SEQ ID NO: 375246 - DNA, 30 bp, Artificial Sequence
  Synthetic oligonucleotide
ggggggtagcaaaggatcttacaaaaatta

SEQ ID NO: 375247 - DNA, 30 bp, Artificial Sequence
  Synthetic oligonucleotide
gactattgggcatttatgatccgaaaatta

SEQ ID NO: 375248 - DNA, 30 bp, Artificial Sequence
  Synthetic oligonucleotide
aatgtagaaatataattcatttgaaaatta

SEQ ID NO: 375249 - DNA, 30 bp, Artificial Sequence
  Synthetic oligonucleotide
caaaagagggtattttgtacacgcaaatta

SEQ ID NO: 375250 - DNA, 30 bp, Artificial Sequence
  Synthetic oligonucleotide
attagacgaagatggctaactcgcaaatta

SEQ ID NO: 375251 - DNA, 30 bp, Artificial Sequence
  Synthetic oligonucleotide
gttgataatggcggcaaccttaagaaatta

SEQ ID NO: 375252 - DNA, 30 bp, Artificial Sequence
  Synthetic oligonucleotide
gctttccagagtaatgtgatcacgaaatta

SEQ ID NO: 375253 - DNA, 30 bp, Artificial Sequence
  Synthetic oligonucleotide
actagggtcggctggaatctggataaatta

SEQ ID NO: 375254 - DNA, 30 bp, Artificial Sequence
  Synthetic oligonucleotide
gtaggccagtcgttcgacactggacaatta

SEQ ID NO: 375255 - DNA, 30 bp, Artificial Sequence
  Synthetic oligonucleotide
ataaatttggtcgggctatctggacaatta

SEQ ID NO: 375256 - DNA, 30 bp, Artificial Sequence
  Synthetic oligonucleotide
agatgataaatctaatgtctgatacaatta

SEQ ID NO: 375257 - DNA, 31 bp, Artificial Sequence
  Synthetic oligonucleotide
tagtgcctaatgttcacttacgaaccaatta

SEQ ID NO: 375258 - DNA, 30 bp, Artificial Sequence
  Synthetic oligonucleotide
ttcccacagggaagcggccatcaccaatta

SEQ ID NO: 375259 - DNA, 30 bp, Artificial Sequence
  Synthetic oligonucleotide
atcggcttacgtctttattcataccaatta

SEQ ID NO: 375260 - DNA, 30 bp, Artificial Sequence
  Synthetic oligonucleotide
gcgtgacgcctgaacgttacgaggcaatta

SEQ ID NO: 375261 - DNA, 30 bp, Artificial Sequence
  Synthetic oligonucleotide
gcatctgtctgacggaaaataatgcaatta

SEQ ID NO: 375262 - DNA, 30 bp, Artificial Sequence
  Synthetic oligonucleotide
tatatgggactacgagggggcatgcaatta

SEQ ID NO: 375263 - DNA, 30 bp, Artificial Sequence
  Synthetic oligonucleotide
ctatgatataattcacccacaaatcaatta

SEQ ID NO: 375264 - DNA, 30 bp, Artificial Sequence
  Synthetic oligonucleotide
aactagacgacttgcccgcctgatcaatta

SEQ ID NO: 375265 - DNA, 30 bp, Artificial Sequence
  Synthetic oligonucleotide
tgcaggtgtgttaaactattatttcaatta

SEQ ID NO: 375266 - DNA, 30 bp, Artificial Sequence
  Synthetic oligonucleotide
cataacgctttataaaggacgaaagaatta

SEQ ID NO: 375267 - DNA, 30 bp, Artificial Sequence
  Synthetic oligonucleotide
aaataaattttctgaatacctcacgaatta

SEQ ID NO: 375268 - DNA, 30 bp, Artificial Sequence
  Synthetic oligonucleotide
gaccttgcaatatcaagagaacaggaatta

SEQ ID NO: 375269 - DNA, 30 bp, Artificial Sequence
  Synthetic oligonucleotide
gagctgactgtaaacttcggccaggaatta

SEQ ID NO: 375270 - DNA, 30 bp, Artificial Sequence
  Synthetic oligonucleotide
gattatgtctaggtagatggcgaggaatta

SEQ ID NO: 375271 - DNA, 30 bp, Artificial Sequence
  Synthetic oligonucleotide
ctatagaaaaaccagtcaagtagggaatta

SEQ ID NO: 375272 - DNA, 30 bp, Artificial Sequence
  Synthetic oligonucleotide
catgaccaagccttgcttttccgggaatta

SEQ ID NO: 375273 - DNA, 30 bp, Artificial Sequence
  Synthetic oligonucleotide
gtgtcgtgcagcagtatacgaggggaatta

SEQ ID NO: 375274 - DNA, 30 bp, Artificial Sequence
  Synthetic oligonucleotide
gggtagtgttcttttatgagaatggaatta

SEQ ID NO: 375275 - DNA, 30 bp, Artificial Sequence
  Synthetic oligonucleotide
acttcggtgatacgcaagtagatggaatta

SEQ ID NO: 375276 - DNA, 30 bp, Artificial Sequence
  Synthetic oligonucleotide
aaagtaatgatttagttaggtttggaatta

SEQ ID NO: 375277 - DNA, 30 bp, Artificial Sequence
  Synthetic oligonucleotide
aattaccccgcatggaaatgaagtgaatta

SEQ ID NO: 375278 - DNA, 30 bp, Artificial Sequence
  Synthetic oligonucleotide
tagagacgcacttgagcgcgggttgaatta

SEQ ID NO: 375279 - DNA, 30 bp, Artificial Sequence
  Synthetic oligonucleotide
cctcggtataccgtcgctatgcgataatta

SEQ ID NO: 375280 - DNA, 30 bp, Artificial Sequence
  Synthetic oligonucleotide
ggaccgcgccggtcattcgactgctaatta

SEQ ID NO: 375281 - DNA, 30 bp, Artificial Sequence
  Synthetic oligonucleotide
ctttagtaggataccgggtgtatctaatta

SEQ ID NO: 375282 - DNA, 30 bp, Artificial Sequence
  Synthetic oligonucleotide
gactatcagtgatccactacgttctaatta

SEQ ID NO: 375283 - DNA, 30 bp, Artificial Sequence
  Synthetic oligonucleotide
tggcgctgcgaacaacaagcgcagtaatta

SEQ ID NO: 375284 - DNA, 30 bp, Artificial Sequence
  Synthetic oligonucleotide
tccgaagtgactctctgtagatagtaatta

SEQ ID NO: 375285 - DNA, 30 bp, Artificial Sequence
  Synthetic oligonucleotide
aatgcgttctcatacgcatatacgtaatta

SEQ ID NO: 375286 - DNA, 30 bp, Artificial Sequence
  Synthetic oligonucleotide
cttgaagtgtaccagaaacaccattaatta

SEQ ID NO: 375287 - DNA, 30 bp, Artificial Sequence
  Synthetic oligonucleotide
cctaatatcaacgacagctgtagttaatta

SEQ ID NO: 375288 - DNA, 30 bp, Artificial Sequence
  Synthetic oligonucleotide
ccgatgagggctccctctggcataacatta

SEQ ID NO: 375289 - DNA, 30 bp, Artificial Sequence
  Synthetic oligonucleotide
ctcatttgccactatttttaggtaacatta

SEQ ID NO: 375290 - DNA, 30 bp, Artificial Sequence
  Synthetic oligonucleotide
tgacagtccggaatactcctcgccacatta

SEQ ID NO: 375291 - DNA, 30 bp, Artificial Sequence
  Synthetic oligonucleotide
taggtgctacaaagctccgtggtcacatta

SEQ ID NO: 375292 - DNA, 30 bp, Artificial Sequence
  Synthetic oligonucleotide
cccacacgataagttcgacgccggacatta

SEQ ID NO: 375293 - DNA, 30 bp, Artificial Sequence
  Synthetic oligonucleotide
ggataatggagattcaacttaaatacatta

SEQ ID NO: 375294 - DNA, 30 bp, Artificial Sequence
  Synthetic oligonucleotide
tatacgtcgtcctcgaagactcacccatta

SEQ ID NO: 375295 - DNA, 30 bp, Artificial Sequence
  Synthetic oligonucleotide
gaagccgaattttcaggacaaagcccatta

SEQ ID NO: 375296 - DNA, 30 bp, Artificial Sequence
  Synthetic oligonucleotide
ctagctcagaactccggtcctatcccatta

SEQ ID NO: 375297 - DNA, 30 bp, Artificial Sequence
  Synthetic oligonucleotide
ggaactctcaccaggaagggcttcccatta

SEQ ID NO: 375298 - DNA, 30 bp, Artificial Sequence
  Synthetic oligonucleotide
aggcgggcctactaagataaagagccatta

SEQ ID NO: 375299 - DNA, 30 bp, Artificial Sequence
  Synthetic oligonucleotide
ctgtaactcgccttaaattggaaagcatta

SEQ ID NO: 375300 - DNA, 30 bp, Artificial Sequence
  Synthetic oligonucleotide
gtcccagcctgcaaaaatcgtcaagcatta

SEQ ID NO: 375301 - DNA, 30 bp, Artificial Sequence
  Synthetic oligonucleotide
tacaaatagccagcctgcacgagagcatta

SEQ ID NO: 375302 - DNA, 30 bp, Artificial Sequence
  Synthetic oligonucleotide
gttcctaaactcgtaccagtaggagcatta

SEQ ID NO: 375303 - DNA, 30 bp, Artificial Sequence
  Synthetic oligonucleotide
aggtattcctttttttaacggggagcatta

SEQ ID NO: 375304 - DNA, 30 bp, Artificial Sequence
  Synthetic oligonucleotide
acaaggaccatgtgtcagcggaacgcatta

SEQ ID NO: 375305 - DNA, 30 bp, Artificial Sequence
  Synthetic oligonucleotide
cccgacgtaccaaccaacaatgccgcatta

SEQ ID NO: 375306 - DNA, 30 bp, Artificial Sequence
  Synthetic oligonucleotide
gcagaagaggcccggttggcgagcgcatta

SEQ ID NO: 375307 - DNA, 30 bp, Artificial Sequence
  Synthetic oligonucleotide
ggcctgacaatgtggtttgtcaaggcatta

SEQ ID NO: 375308 - DNA, 30 bp, Artificial Sequence
  Synthetic oligonucleotide
aagcggtcaactgctgtagcatcggcatta

SEQ ID NO: 375309 - DNA, 30 bp, Artificial Sequence
  Synthetic oligonucleotide
acccagatattttaagttatagtggcatta

SEQ ID NO: 375310 - DNA, 30 bp, Artificial Sequence
  Synthetic oligonucleotide
aaaaacttgcagagaatagcccatgcatta

SEQ ID NO: 375311 - DNA, 30 bp, Artificial Sequence
  Synthetic oligonucleotide
ggtaagcgccataatggatacgatgcatta

SEQ ID NO: 375312 - DNA, 30 bp, Artificial Sequence
  Synthetic oligonucleotide
tctactgtacggttcgcaggtcgtgcatta

SEQ ID NO: 375313 - DNA, 30 bp, Artificial Sequence
  Synthetic oligonucleotide
tcgtgcagatgctataagttatgtgcatta

SEQ ID NO: 375314 - DNA, 30 bp, Artificial Sequence
  Synthetic oligonucleotide
cagtaaggcggtatgacgactgcatcatta

SEQ ID NO: 375315 - DNA, 30 bp, Artificial Sequence
  Synthetic oligonucleotide
gaagaactcgtaattctctcatgatcatta

SEQ ID NO: 375316 - DNA, 30 bp, Artificial Sequence
  Synthetic oligonucleotide
ggtatatcagcttcaagtctcccctcatta

SEQ ID NO: 375317 - DNA, 30 bp, Artificial Sequence
  Synthetic oligonucleotide
tgaattttgctcccaaaggaggcctcatta

SEQ ID NO: 375318 - DNA, 30 bp, Artificial Sequence
  Synthetic oligonucleotide
ctacaatacgcaccaatggattcctcatta

SEQ ID NO: 375319 - DNA, 30 bp, Artificial Sequence
  Synthetic oligonucleotide
ctatcttatatgctaaggctatgctcatta

SEQ ID NO: 375320 - DNA, 30 bp, Artificial Sequence
  Synthetic oligonucleotide
atcaaaatatggttagagccattctcatta

SEQ ID NO: 375321 - DNA, 30 bp, Artificial Sequence
  Synthetic oligonucleotide
aaagcaatttggtgtaccggtaagtcatta

SEQ ID NO: 375322 - DNA, 30 bp, Artificial Sequence
  Synthetic oligonucleotide
tcatacataaatccaaggtctgggtcatta

SEQ ID NO: 375323 - DNA, 30 bp, Artificial Sequence
  Synthetic oligonucleotide
ggactaactataggtattgggttgtcatta

SEQ ID NO: 375324 - DNA, 30 bp, Artificial Sequence
  Synthetic oligonucleotide
cagtttgagtacagtcgctcgcattcatta

SEQ ID NO: 375325 - DNA, 30 bp, Artificial Sequence
  Synthetic oligonucleotide
cgtaacttgtaatgcaatgccgattcatta

SEQ ID NO: 375326 - DNA, 30 bp, Artificial Sequence
  Synthetic oligonucleotide
ctcggggtaagggttgcggctatttcatta

SEQ ID NO: 375327 - DNA, 30 bp, Artificial Sequence
  Synthetic oligonucleotide
ggcttctctaacacatcatgactttcatta

SEQ ID NO: 375328 - DNA, 30 bp, Artificial Sequence
  Synthetic oligonucleotide
tccaatgtctagacaagatgtctttcatta

SEQ ID NO: 375329 - DNA, 30 bp, Artificial Sequence
  Synthetic oligonucleotide
taagctacggatgttccgtactcaagatta

SEQ ID NO: 375330 - DNA, 30 bp, Artificial Sequence
  Synthetic oligonucleotide
accgaagtaccgtacatacgcaccagatta

SEQ ID NO: 375331 - DNA, 30 bp, Artificial Sequence
  Synthetic oligonucleotide
gctttttaccgcttaaggaaggccagatta

SEQ ID NO: 375332 - DNA, 30 bp, Artificial Sequence
  Synthetic oligonucleotide
ttgacaagctaccgtgtggacgcgagatta

SEQ ID NO: 375333 - DNA, 30 bp, Artificial Sequence
  Synthetic oligonucleotide
gcagaatgggtaggttcccatttgagatta

SEQ ID NO: 375334 - DNA, 30 bp, Artificial Sequence
  Synthetic oligonucleotide
gtgtaggtaccgccgggcctttctagatta

SEQ ID NO: 375335 - DNA, 30 bp, Artificial Sequence
  Synthetic oligonucleotide
ctccgggacatatttcagaatcgtagatta

SEQ ID NO: 375336 - DNA, 30 bp, Artificial Sequence
  Synthetic oligonucleotide
cttcgttgtaccccaccaagtggtagatta

SEQ ID NO: 375337 - DNA, 30 bp, Artificial Sequence
  Synthetic oligonucleotide
ccaataccgcagagacatcagtttagatta

SEQ ID NO: 375338 - DNA, 30 bp, Artificial Sequence
  Synthetic oligonucleotide
gcgaacgtctttcctattctccgacgatta

SEQ ID NO: 375339 - DNA, 30 bp, Artificial Sequence
  Synthetic oligonucleotide
tggtttcattttctactgtatcgacgatta

SEQ ID NO: 375340 - DNA, 30 bp, Artificial Sequence
  Synthetic oligonucleotide
aaaagggtctggacgggcccgttgcgatta

SEQ ID NO: 375341 - DNA, 30 bp, Artificial Sequence
  Synthetic oligonucleotide
aaaatgcctccttataacgggtttcgatta

SEQ ID NO: 375342 - DNA, 30 bp, Artificial Sequence
  Synthetic oligonucleotide
tcttattgcctacaatctgtattaggatta

SEQ ID NO: 375343 - DNA, 30 bp, Artificial Sequence
  Synthetic oligonucleotide
gaagacgggatggacatttacaacggatta

SEQ ID NO: 375344 - DNA, 30 bp, Artificial Sequence
  Synthetic oligonucleotide
gtctaaccatgtaaaatatcctccggatta

SEQ ID NO: 375345 - DNA, 30 bp, Artificial Sequence
  Synthetic oligonucleotide
cagagccttacatcaggtaactgcggatta

SEQ ID NO: 375346 - DNA, 30 bp, Artificial Sequence
  Synthetic oligonucleotide
tctttagaaaaggtaccggctgtcggatta

SEQ ID NO: 375347 - DNA, 30 bp, Artificial Sequence
  Synthetic oligonucleotide
gattacacccggatccactgatagggatta

SEQ ID NO: 375348 - DNA, 30 bp, Artificial Sequence
  Synthetic oligonucleotide
gagagcacggatagaaataccccgggatta

SEQ ID NO: 375349 - DNA, 30 bp, Artificial Sequence
  Synthetic oligonucleotide
tttgaaattacataatgaggtctgggatta

SEQ ID NO: 375350 - DNA, 30 bp, Artificial Sequence
  Synthetic oligonucleotide
gcaatgtccttaagacggtaggatggatta

SEQ ID NO: 375351 - DNA, 30 bp, Artificial Sequence
  Synthetic oligonucleotide
ctggattaaatacattacacacgtggatta

SEQ ID NO: 375352 - DNA, 30 bp, Artificial Sequence
  Synthetic oligonucleotide
gaaaccccagataggctgtgggtatgatta

SEQ ID NO: 375353 - DNA, 30 bp, Artificial Sequence
  Synthetic oligonucleotide
gattcagtaccaattcaatagaactgatta

SEQ ID NO: 375354 - DNA, 30 bp, Artificial Sequence
  Synthetic oligonucleotide
aatcatgtggtgaatggtcgcccctgatta

SEQ ID NO: 375355 - DNA, 30 bp, Artificial Sequence
  Synthetic oligonucleotide
tccatttagaatagatacgaggcctgatta

SEQ ID NO: 375356 - DNA, 30 bp, Artificial Sequence
  Synthetic oligonucleotide
ggtagccgttaatggcacttcaagtgatta

SEQ ID NO: 375357 - DNA, 30 bp, Artificial Sequence
  Synthetic oligonucleotide
tttggcggtggccaccgtgtccggtgatta

SEQ ID NO: 375358 - DNA, 30 bp, Artificial Sequence
  Synthetic oligonucleotide
gcactacctaacgaccagtaatggtgatta

SEQ ID NO: 375359 - DNA, 30 bp, Artificial Sequence
  Synthetic oligonucleotide
gcggtggcgtgaaataatggtatgtgatta

SEQ ID NO: 375360 - DNA, 30 bp, Artificial Sequence
  Synthetic oligonucleotide
ttctggaacaccaattctactgtgtgatta

SEQ ID NO: 375361 - DNA, 30 bp, Artificial Sequence
  Synthetic oligonucleotide
ctttaacgtaatgagggggacttgtgatta

SEQ ID NO: 375362 - DNA, 30 bp, Artificial Sequence
  Synthetic oligonucleotide
aagcaaaactgctgattggcgtaaatatta

SEQ ID NO: 375363 - DNA, 30 bp, Artificial Sequence
  Synthetic oligonucleotide
atgagaggttcccatgccaacataatatta

SEQ ID NO: 375364 - DNA, 30 bp, Artificial Sequence
  Synthetic oligonucleotide
tctggcgtccgattgccagtaaacatatta

SEQ ID NO: 375365 - DNA, 30 bp, Artificial Sequence
  Synthetic oligonucleotide
agcgatcggacatctctaatgcagatatta

SEQ ID NO: 375366 - DNA, 30 bp, Artificial Sequence
  Synthetic oligonucleotide
cataatattcgcaagttgggcgctatatta

SEQ ID NO: 375367 - DNA, 30 bp, Artificial Sequence
  Synthetic oligonucleotide
aacgaggacgaagtcttcgattctatatta

SEQ ID NO: 375368 - DNA, 27 bp, Artificial Sequence
  Synthetic oligonucleotide
tatctggacgtagtgtgaggtatatta

SEQ ID NO: 375369 - DNA, 30 bp, Artificial Sequence
  Synthetic oligonucleotide
cttgagtggtacacgaaattttcactatta

SEQ ID NO: 375370 - DNA, 30 bp, Artificial Sequence
  Synthetic oligonucleotide
cgcgaggggtcgcccatatttactctatta

SEQ ID NO: 375371 - DNA, 30 bp, Artificial Sequence
  Synthetic oligonucleotide
ttagagaatatttggactgaatgagtatta

SEQ ID NO: 375372 - DNA, 30 bp, Artificial Sequence
  Synthetic oligonucleotide
agacaaacaccgggataacggtccgtatta

SEQ ID NO: 375373 - DNA, 30 bp, Artificial Sequence
  Synthetic oligonucleotide
cgccacccgcttttaatgagataggtatta

SEQ ID NO: 375374 - DNA, 30 bp, Artificial Sequence
  Synthetic oligonucleotide
tcaattttgttgctaagctcctaggtatta

SEQ ID NO: 375375 - DNA, 30 bp, Artificial Sequence
  Synthetic oligonucleotide
ccccacttagggcaagtgcgaatggtatta

SEQ ID NO: 375376 - DNA, 30 bp, Artificial Sequence
  Synthetic oligonucleotide
ggaccgcgaattccagatagggatgtatta

SEQ ID NO: 375377 - DNA, 30 bp, Artificial Sequence
  Synthetic oligonucleotide
gcttatggaggcgctacgtggcctgtatta

SEQ ID NO: 375378 - DNA, 30 bp, Artificial Sequence
  Synthetic oligonucleotide
atgtacataccggtctaccatagtgtatta

SEQ ID NO: 375379 - DNA, 30 bp, Artificial Sequence
  Synthetic oligonucleotide
accgtgggggcgctgtgtataccattatta

SEQ ID NO: 375380 - DNA, 30 bp, Artificial Sequence
  Synthetic oligonucleotide
gttgcatacacgttctgcaacagattatta

SEQ ID NO: 375381 - DNA, 30 bp, Artificial Sequence
  Synthetic oligonucleotide
gtctaagttatataaatgaatagattatta

SEQ ID NO: 375382 - DNA, 30 bp, Artificial Sequence
  Synthetic oligonucleotide
gttcttaggcaccgaggttgagtattatta

SEQ ID NO: 375383 - DNA, 30 bp, Artificial Sequence
  Synthetic oligonucleotide
cttatacatgtataagtcaagtacttatta

SEQ ID NO: 375384 - DNA, 30 bp, Artificial Sequence
  Synthetic oligonucleotide
aatcgtatgacatggctagctcgcttatta

SEQ ID NO: 375385 - DNA, 30 bp, Artificial Sequence
  Synthetic oligonucleotide
tgggtccgacctagcataccgcagttatta

SEQ ID NO: 375386 - DNA, 30 bp, Artificial Sequence
  Synthetic oligonucleotide
cgcccctggatgccggggcgatagttatta

SEQ ID NO: 375387 - DNA, 30 bp, Artificial Sequence
  Synthetic oligonucleotide
cggagagtaccgctcacgttagcgttatta

SEQ ID NO: 375388 - DNA, 30 bp, Artificial Sequence
  Synthetic oligonucleotide
ggaattaacggtgcgcaagctgcgttatta

SEQ ID NO: 375389 - DNA, 30 bp, Artificial Sequence
  Synthetic oligonucleotide
ggtcaccgccattgcacgacgaggttatta

SEQ ID NO: 375390 - DNA, 30 bp, Artificial Sequence
  Synthetic oligonucleotide
cgttcactctaggtagtacctaggttatta

SEQ ID NO: 375391 - DNA, 30 bp, Artificial Sequence
  Synthetic oligonucleotide
ttctaatttggctgtatcaccctgttatta

SEQ ID NO: 375392 - DNA, 30 bp, Artificial Sequence
  Synthetic oligonucleotide
taagggaccatttacgcgagggtgttatta

SEQ ID NO: 375393 - DNA, 30 bp, Artificial Sequence
  Synthetic oligonucleotide
gtcaggccaaaagctcactgacgtttatta

SEQ ID NO: 375394 - DNA, 30 bp, Artificial Sequence
  Synthetic oligonucleotide
gctagccgaccatttgatgcacaaaactta

SEQ ID NO: 375395 - DNA, 30 bp, Artificial Sequence
  Synthetic oligonucleotide
ggccgcgcctcccaacatcgatgcaactta

SEQ ID NO: 375396 - DNA, 30 bp, Artificial Sequence
  Synthetic oligonucleotide
attatgcaccaccactgggtgatcaactta

SEQ ID NO: 375397 - DNA, 30 bp, Artificial Sequence
  Synthetic oligonucleotide
cgcagtagcttagtgtccggccaacactta

SEQ ID NO: 375398 - DNA, 30 bp, Artificial Sequence
  Synthetic oligonucleotide
attcgggagattgtatccagcgaacactta

SEQ ID NO: 375399 - DNA, 30 bp, Artificial Sequence
  Synthetic oligonucleotide
ttgtctccgggaaggaagttatcacactta

SEQ ID NO: 375400 - DNA, 30 bp, Artificial Sequence
  Synthetic oligonucleotide
gttctaaatcgggtaataccaatacactta

SEQ ID NO: 375401 - DNA, 30 bp, Artificial Sequence
  Synthetic oligonucleotide
gtttcaaaggccgaattgaatcagcactta

SEQ ID NO: 375402 - DNA, 30 bp, Artificial Sequence
  Synthetic oligonucleotide
tggtcataatttgtatgctcacatcactta

SEQ ID NO: 375403 - DNA, 30 bp, Artificial Sequence
  Synthetic oligonucleotide
ccgttacgtggcggagatccgggtcactta

SEQ ID NO: 375404 - DNA, 30 bp, Artificial Sequence
  Synthetic oligonucleotide
ttacgatatggcatctgtcgatttcactta

SEQ ID NO: 375405 - DNA, 30 bp, Artificial Sequence
  Synthetic oligonucleotide
acacagaaaccccattttcgtccagactta

SEQ ID NO: 375406 - DNA, 30 bp, Artificial Sequence
  Synthetic oligonucleotide
ggagttgtgaaccgggggttggacgactta

SEQ ID NO: 375407 - DNA, 30 bp, Artificial Sequence
  Synthetic oligonucleotide
tttaccccaaaaatagaatacaccgactta

SEQ ID NO: 375408 - DNA, 30 bp, Artificial Sequence
  Synthetic oligonucleotide
gtgctaaagcaaaaagttgaaaatgactta

SEQ ID NO: 375409 - DNA, 30 bp, Artificial Sequence
  Synthetic oligonucleotide
ggtgaacttacgtggcatcttcatgactta

SEQ ID NO: 375410 - DNA, 30 bp, Artificial Sequence
  Synthetic oligonucleotide
aacgtttgtatcttatggcatggtgactta

SEQ ID NO: 375411 - DNA, 30 bp, Artificial Sequence
  Synthetic oligonucleotide
cacacagataataatatttcgcgctactta

SEQ ID NO: 375412 - DNA, 30 bp, Artificial Sequence
  Synthetic oligonucleotide
gcggagtgtttcttgtccaatccgtactta

SEQ ID NO: 375413 - DNA, 30 bp, Artificial Sequence
  Synthetic oligonucleotide
atttgacgcgttactagtgtaaggtactta

SEQ ID NO: 375414 - DNA, 30 bp, Artificial Sequence
  Synthetic oligonucleotide
atttcggtgtctatggttacacattactta

SEQ ID NO: 375415 - DNA, 30 bp, Artificial Sequence
  Synthetic oligonucleotide
tgtcccatcatactattaggcggttactta

SEQ ID NO: 375416 - DNA, 30 bp, Artificial Sequence
  Synthetic oligonucleotide
catcggtcatttctgcttcatatttactta

SEQ ID NO: 375417 - DNA, 30 bp, Artificial Sequence
  Synthetic oligonucleotide
acatagccgaagtacgttagcacaacctta

SEQ ID NO: 375418 - DNA, 30 bp, Artificial Sequence
  Synthetic oligonucleotide
tcccgcaactcgggtatccctcgcacctta

SEQ ID NO: 375419 - DNA, 30 bp, Artificial Sequence
  Synthetic oligonucleotide
gctggcctcaccataatggtgttgacctta

SEQ ID NO: 375420 - DNA, 30 bp, Artificial Sequence
  Synthetic oligonucleotide
agggattctaatacatggtagataccctta

SEQ ID NO: 375421 - DNA, 30 bp, Artificial Sequence
  Synthetic oligonucleotide
ttggcgacgtgaaaaagttgattaccctta

SEQ ID NO: 375422 - DNA, 30 bp, Artificial Sequence
  Synthetic oligonucleotide
aatgcactcaatagcgtatgacgcccctta

SEQ ID NO: 375423 - DNA, 30 bp, Artificial Sequence
  Synthetic oligonucleotide
gcagctcatgatttcatcttgcgtccctta

SEQ ID NO: 375424 - DNA, 30 bp, Artificial Sequence
  Synthetic oligonucleotide
ctttggttaggttcggagacaaacgcctta

SEQ ID NO: 375425 - DNA, 30 bp, Artificial Sequence
  Synthetic oligonucleotide
tcatctttggctaacggttacgaggcctta

SEQ ID NO: 375426 - DNA, 30 bp, Artificial Sequence
  Synthetic oligonucleotide
ggagaacatctaggaggaaacggggcctta

SEQ ID NO: 375427 - DNA, 30 bp, Artificial Sequence
  Synthetic oligonucleotide
tcggaactgcataatgcagatactgcctta

SEQ ID NO: 375428 - DNA, 30 bp, Artificial Sequence
  Synthetic oligonucleotide
agagctccatgatacctacatggtgcctta

SEQ ID NO: 375429 - DNA, 30 bp, Artificial Sequence
  Synthetic oligonucleotide
taggtaacggatatatttttttgtgcctta

SEQ ID NO: 375430 - DNA, 30 bp, Artificial Sequence
  Synthetic oligonucleotide
tgaacagatcgactagtgttcgttgcctta

SEQ ID NO: 375431 - DNA, 30 bp, Artificial Sequence
  Synthetic oligonucleotide
aatgttctgagcagtgtcgaactctcctta

SEQ ID NO: 375432 - DNA, 30 bp, Artificial Sequence
  Synthetic oligonucleotide
gagtcgaggattagggcctgatcgtcctta

SEQ ID NO: 375433 - DNA, 30 bp, Artificial Sequence
  Synthetic oligonucleotide
agaagaggcgaatattttctatggtcctta

SEQ ID NO: 375434 - DNA, 30 bp, Artificial Sequence
  Synthetic oligonucleotide
caatagagatatatgggcttcctgtcctta

SEQ ID NO: 375435 - DNA, 30 bp, Artificial Sequence
  Synthetic oligonucleotide
tcatgctgggcgtggcagcaattgtcctta

SEQ ID NO: 375436 - DNA, 30 bp, Artificial Sequence
  Synthetic oligonucleotide
atcttagcgcatagaaccttgcattcctta

SEQ ID NO: 375437 - DNA, 30 bp, Artificial Sequence
  Synthetic oligonucleotide
ggcctcagaggcggaaaagcggaaagctta

SEQ ID NO: 375438 - DNA, 30 bp, Artificial Sequence
  Synthetic oligonucleotide
ggttaggaaacttgcgttccaggaagctta

SEQ ID NO: 375439 - DNA, 30 bp, Artificial Sequence
  Synthetic oligonucleotide
cggggtacgtctatcttggtcggaagctta

SEQ ID NO: 375440 - DNA, 30 bp, Artificial Sequence
  Synthetic oligonucleotide
cttggccttagcctaatgaccgtaagctta

SEQ ID NO: 375441 - DNA, 30 bp, Artificial Sequence
  Synthetic oligonucleotide
ttcacttcagtaacctggcgaaccagctta

SEQ ID NO: 375442 - DNA, 30 bp, Artificial Sequence
  Synthetic oligonucleotide
tcaaaaaccggaatttcacgcgtcagctta

SEQ ID NO: 375443 - DNA, 30 bp, Artificial Sequence
  Synthetic oligonucleotide
tccgtaagtaggggcaatgacgtgagctta

SEQ ID NO: 375444 - DNA, 30 bp, Artificial Sequence
  Synthetic oligonucleotide
tggcgctacatatcaggtcgtagtagctta

SEQ ID NO: 375445 - DNA, 30 bp, Artificial Sequence
  Synthetic oligonucleotide
gaaaagaaagctaatcgtgccgttagctta

SEQ ID NO: 375446 - DNA, 30 bp, Artificial Sequence
  Synthetic oligonucleotide
gtcgggttaggatccccaaagagacgctta

SEQ ID NO: 375447 - DNA, 30 bp, Artificial Sequence
  Synthetic oligonucleotide
cccagacgtaccgaccgtgtgcagcgctta

SEQ ID NO: 375448 - DNA, 30 bp, Artificial Sequence
  Synthetic oligonucleotide
gagatttagcttatctacactacgcgctta

SEQ ID NO: 375449 - DNA, 30 bp, Artificial Sequence
  Synthetic oligonucleotide
tcaaccacgcgagtgctgcctccgcgctta

SEQ ID NO: 375450 - DNA, 30 bp, Artificial Sequence
  Synthetic oligonucleotide
tgttgtttcgatgagccctgtcggcgctta

SEQ ID NO: 375451 - DNA, 30 bp, Artificial Sequence
  Synthetic oligonucleotide
ggagattgtttccaagcatatactcgctta

SEQ ID NO: 375452 - DNA, 30 bp, Artificial Sequence
  Synthetic oligonucleotide
cccttgcataacatgacggaagctcgctta

SEQ ID NO: 375453 - DNA, 30 bp, Artificial Sequence
  Synthetic oligonucleotide
ttcttgaaactggcataggaatgtcgctta

SEQ ID NO: 375454 - DNA, 30 bp, Artificial Sequence
  Synthetic oligonucleotide
aatattggaaacccgcggcctaaaggctta

SEQ ID NO: 375455 - DNA, 30 bp, Artificial Sequence
  Synthetic oligonucleotide
agtaggggtcagtttcgataggcaggctta

SEQ ID NO: 375456 - DNA, 30 bp, Artificial Sequence
  Synthetic oligonucleotide
tagaatattgttccttaccgatagggctta

SEQ ID NO: 375457 - DNA, 30 bp, Artificial Sequence
  Synthetic oligonucleotide
tggtcgaggagaaagtgcggcgcgggctta

SEQ ID NO: 375458 - DNA, 30 bp, Artificial Sequence
  Synthetic oligonucleotide
gatggacagcgccggaaatgttcgggctta

SEQ ID NO: 375459 - DNA, 30 bp, Artificial Sequence
  Synthetic oligonucleotide
tcctacgtggcaggtgatcaacctggctta

SEQ ID NO: 375460 - DNA, 30 bp, Artificial Sequence
  Synthetic oligonucleotide
agcaaattgcagcacaaggatattggctta

SEQ ID NO: 375461 - DNA, 30 bp, Artificial Sequence
  Synthetic oligonucleotide
gaataagatattatggccgaagttggctta

SEQ ID NO: 375462 - DNA, 30 bp, Artificial Sequence
  Synthetic oligonucleotide
tgaaccccgggctttaggactagatgctta

SEQ ID NO: 375463 - DNA, 30 bp, Artificial Sequence
  Synthetic oligonucleotide
atgcccgatataggtcataaacgatgctta

SEQ ID NO: 375464 - DNA, 30 bp, Artificial Sequence
  Synthetic oligonucleotide
aatttgaacgtttgccgttaaacgtgctta

SEQ ID NO: 375465 - DNA, 30 bp, Artificial Sequence
  Synthetic oligonucleotide
tacgatgcttacgggccatacgtgtgctta

SEQ ID NO: 375466 - DNA, 30 bp, Artificial Sequence
  Synthetic oligonucleotide
gctaagggaagacgtagggggttgtgctta

SEQ ID NO: 375467 - DNA, 30 bp, Artificial Sequence
  Synthetic oligonucleotide
cgctgatcgtgggcaacatgtggttgctta

SEQ ID NO: 375468 - DNA, 30 bp, Artificial Sequence
  Synthetic oligonucleotide
cgattgcttccgacgctagctgcaatctta

SEQ ID NO: 375469 - DNA, 30 bp, Artificial Sequence
  Synthetic oligonucleotide
taagaagtagttttgaagtcgcagatctta

SEQ ID NO: 375470 - DNA, 30 bp, Artificial Sequence
  Synthetic oligonucleotide
agctagccttctcaagctgaggagatctta

SEQ ID NO: 375471 - DNA, 30 bp, Artificial Sequence
  Synthetic oligonucleotide
accccacgagattctaacgctgagatctta

SEQ ID NO: 375472 - DNA, 30 bp, Artificial Sequence
  Synthetic oligonucleotide
taaaccttaatggtagaaaacacgatctta

SEQ ID NO: 375473 - DNA, 30 bp, Artificial Sequence
  Synthetic oligonucleotide
tgatcctcacgggctaacgctacgatctta

SEQ ID NO: 375474 - DNA, 30 bp, Artificial Sequence
  Synthetic oligonucleotide
tgccaacgggtagatcctagagggatctta

SEQ ID NO: 375475 - DNA, 30 bp, Artificial Sequence
  Synthetic oligonucleotide
gaagaaaagaaaggctgctttttgatctta

SEQ ID NO: 375476 - DNA, 30 bp, Artificial Sequence
  Synthetic oligonucleotide
gacgcaacctttatatttgcgtatatctta

SEQ ID NO: 375477 - DNA, 30 bp, Artificial Sequence
  Synthetic oligonucleotide
tttaaatcactcgtacggaatactatctta

SEQ ID NO: 375478 - DNA, 31 bp, Artificial Sequence
  Synthetic oligonucleotide
aggatctaagtgtttaggttgggttatctta

SEQ ID NO: 375479 - DNA, 30 bp, Artificial Sequence
  Synthetic oligonucleotide
acaagcaatagttatcctcaaattctctta

SEQ ID NO: 375480 - DNA, 30 bp, Artificial Sequence
  Synthetic oligonucleotide
atcgtttataacgccgtatgcgcagtctta

SEQ ID NO: 375481 - DNA, 30 bp, Artificial Sequence
  Synthetic oligonucleotide
tagaaaccagcttaggcgtactcagtctta

SEQ ID NO: 375482 - DNA, 30 bp, Artificial Sequence
  Synthetic oligonucleotide
ggtgataacggggacagttcacgcgtctta

SEQ ID NO: 375483 - DNA, 30 bp, Artificial Sequence
  Synthetic oligonucleotide
aatgtttttgaagatggacaactcgtctta

SEQ ID NO: 375484 - DNA, 30 bp, Artificial Sequence
  Synthetic oligonucleotide
catcaggtccactgcaaagcgagggtctta

SEQ ID NO: 375485 - DNA, 30 bp, Artificial Sequence
  Synthetic oligonucleotide
tcaacagaaaccgttagggagtatgtctta

SEQ ID NO: 375486 - DNA, 30 bp, Artificial Sequence
  Synthetic oligonucleotide
catgccgggtatgtaatatgagctgtctta

SEQ ID NO: 375487 - DNA, 30 bp, Artificial Sequence
  Synthetic oligonucleotide
gcgtttacgggatggcacaaccgtgtctta

SEQ ID NO: 375488 - DNA, 30 bp, Artificial Sequence
  Synthetic oligonucleotide
gtagtaaaaagatgctttggtattgtctta

SEQ ID NO: 375489 - DNA, 30 bp, Artificial Sequence
  Synthetic oligonucleotide
gatagcgacgagatatgtcaccaattctta

SEQ ID NO: 375490 - DNA, 30 bp, Artificial Sequence
  Synthetic oligonucleotide
ctacaaacgcggaccgcaaacaagttctta

SEQ ID NO: 375491 - DNA, 30 bp, Artificial Sequence
  Synthetic oligonucleotide
ctactagcattaaagatgatttagttctta

SEQ ID NO: 375492 - DNA, 30 bp, Artificial Sequence
  Synthetic oligonucleotide
atagttatggtaggtaccgatactttctta

SEQ ID NO: 375493 - DNA, 30 bp, Artificial Sequence
  Synthetic oligonucleotide
agaagggcctaagaataaattgctttctta

SEQ ID NO: 375494 - DNA, 30 bp, Artificial Sequence
  Synthetic oligonucleotide
gactttgtggtcaggttcaggccaaagtta

SEQ ID NO: 375495 - DNA, 30 bp, Artificial Sequence
  Synthetic oligonucleotide
ctttgggggtttgatgtatgggtcaagtta

SEQ ID NO: 375496 - DNA, 30 bp, Artificial Sequence
  Synthetic oligonucleotide
cccacctaaacaagctaatgagagaagtta

SEQ ID NO: 375497 - DNA, 30 bp, Artificial Sequence
  Synthetic oligonucleotide
actcctcgtttcttattccacatgaagtta

SEQ ID NO: 375498 - DNA, 31 bp, Artificial Sequence
  Synthetic oligonucleotide
tttcaaggtgggcactaaactccgacagtta

SEQ ID NO: 375499 - DNA, 30 bp, Artificial Sequence
  Synthetic oligonucleotide
ctgaccagtggaacgtctggtgtacagtta

SEQ ID NO: 375500 - DNA, 30 bp, Artificial Sequence
  Synthetic oligonucleotide
gaatcgtagtagttcgctcgacagcagtta

SEQ ID NO: 375501 - DNA, 30 bp, Artificial Sequence
  Synthetic oligonucleotide
cgccagatgttgcttgttgaacggcagtta

SEQ ID NO: 375502 - DNA, 30 bp, Artificial Sequence
  Synthetic oligonucleotide
gcactactgtatcccaatgcaagtcagtta

SEQ ID NO: 375503 - DNA, 30 bp, Artificial Sequence
  Synthetic oligonucleotide
tataaaaaagcctaaaagacgtttcagtta

SEQ ID NO: 375504 - DNA, 30 bp, Artificial Sequence
  Synthetic oligonucleotide
gcgggtcagtcctctgcagcgtttcagtta

SEQ ID NO: 375505 - DNA, 30 bp, Artificial Sequence
  Synthetic oligonucleotide
ggtcagtctctgtatcaaacgtaagagtta

SEQ ID NO: 375506 - DNA, 30 bp, Artificial Sequence
  Synthetic oligonucleotide
cgtgtgatcccatatcgccctccagagtta

SEQ ID NO: 375507 - DNA, 30 bp, Artificial Sequence
  Synthetic oligonucleotide
taccggaagaactggcatcgctgagagtta

SEQ ID NO: 375508 - DNA, 30 bp, Artificial Sequence
  Synthetic oligonucleotide
ggttagttgcgatggttgtccatagagtta

SEQ ID NO: 375509 - DNA, 30 bp, Artificial Sequence
  Synthetic oligonucleotide
attctccaaacgagacctctgatagagtta

SEQ ID NO: 375510 - DNA, 30 bp, Artificial Sequence
  Synthetic oligonucleotide
tggatgttcgaagactcgcccgtagagtta

SEQ ID NO: 375511 - DNA, 30 bp, Artificial Sequence
  Synthetic oligonucleotide
agtgctagggcacaactcgacttagagtta

SEQ ID NO: 375512 - DNA, 30 bp, Artificial Sequence
  Synthetic oligonucleotide
aatgttcttccaatgttgggatccgagtta

SEQ ID NO: 375513 - DNA, 30 bp, Artificial Sequence
  Synthetic oligonucleotide
tcagttcaaagcggcgaacgtagcgagtta

SEQ ID NO: 375514 - DNA, 30 bp, Artificial Sequence
  Synthetic oligonucleotide
taatcctgggttagtggttttatcgagtta

SEQ ID NO: 375515 - DNA, 30 bp, Artificial Sequence
  Synthetic oligonucleotide
tgttcgttcatctgtgcattgaatgagtta

SEQ ID NO: 375516 - DNA, 30 bp, Artificial Sequence
  Synthetic oligonucleotide
cgaggcacccccggtgtcccgtttgagtta

SEQ ID NO: 375517 - DNA, 30 bp, Artificial Sequence
  Synthetic oligonucleotide
gatatgttcctgcagctcaaggcatagtta

SEQ ID NO: 375518 - DNA, 30 bp, Artificial Sequence
  Synthetic oligonucleotide
tcgaaacagctacggggaagtccctagtta

SEQ ID NO: 375519 - DNA, 30 bp, Artificial Sequence
  Synthetic oligonucleotide
atcggaatagcttaagggttggtctagtta

SEQ ID NO: 375520 - DNA, 30 bp, Artificial Sequence
  Synthetic oligonucleotide
tggttatccgaaagttgttaagggtagtta

SEQ ID NO: 375521 - DNA, 30 bp, Artificial Sequence
  Synthetic oligonucleotide
actgccgcaaacgttactatgctgtagtta

SEQ ID NO: 375522 - DNA, 30 bp, Artificial Sequence
  Synthetic oligonucleotide
gcagcacaccgacgtgcttgtcgttagtta

SEQ ID NO: 375523 - DNA, 30 bp, Artificial Sequence
  Synthetic oligonucleotide
cgacaatcaaaggatcgccctttttagtta

SEQ ID NO: 375524 - DNA, 30 bp, Artificial Sequence
  Synthetic oligonucleotide
tccctaataaggttgggctggacaacgtta

SEQ ID NO: 375525 - DNA, 30 bp, Artificial Sequence
  Synthetic oligonucleotide
caagtttagataggggaagtagtaacgtta

SEQ ID NO: 375526 - DNA, 30 bp, Artificial Sequence
  Synthetic oligonucleotide
caaatactggcacatggtgactgcacgtta

SEQ ID NO: 375527 - DNA, 30 bp, Artificial Sequence
  Synthetic oligonucleotide
ttgttatacgttgataaagagaagacgtta

SEQ ID NO: 375528 - DNA, 30 bp, Artificial Sequence
  Synthetic oligonucleotide
tatccgtgatcctaccgtactcggacgtta

SEQ ID NO: 375529 - DNA, 30 bp, Artificial Sequence
  Synthetic oligonucleotide
tgatagtacgacggctgtgtgcatacgtta

SEQ ID NO: 375530 - DNA, 30 bp, Artificial Sequence
  Synthetic oligonucleotide
ggcctgttgggcaaagggtccgatacgtta

SEQ ID NO: 375531 - DNA, 30 bp, Artificial Sequence
  Synthetic oligonucleotide
tttcaacagcgttcctcagtgaaaccgtta

SEQ ID NO: 375532 - DNA, 30 bp, Artificial Sequence
  Synthetic oligonucleotide
cagcttgttccataatgaaggaacccgtta

SEQ ID NO: 375533 - DNA, 30 bp, Artificial Sequence
  Synthetic oligonucleotide
agcttctaataagtttgtaggctcccgtta

SEQ ID NO: 375534 - DNA, 30 bp, Artificial Sequence
  Synthetic oligonucleotide
acggtaaatgttaaaaattatcggccgtta

SEQ ID NO: 375535 - DNA, 30 bp, Artificial Sequence
  Synthetic oligonucleotide
caacctcaggggatattcctttggccgtta

SEQ ID NO: 375536 - DNA, 30 bp, Artificial Sequence
  Synthetic oligonucleotide
gtaggccataagtcaacctatctgccgtta

SEQ ID NO: 375537 - DNA, 30 bp, Artificial Sequence
  Synthetic oligonucleotide
acaagtcaagcacgggatgtgtctccgtta

SEQ ID NO: 375538 - DNA, 30 bp, Artificial Sequence
  Synthetic oligonucleotide
agtcaggcactgttgtgcctgtaagcgtta

SEQ ID NO: 375539 - DNA, 30 bp, Artificial Sequence
  Synthetic oligonucleotide
gcccggcttctaccgatgtaaccagcgtta

SEQ ID NO: 375540 - DNA, 30 bp, Artificial Sequence
  Synthetic oligonucleotide
agcaaaactgggacagtgtaggcagcgtta

SEQ ID NO: 375541 - DNA, 30 bp, Artificial Sequence
  Synthetic oligonucleotide
ctctttagtggttactgggtcagagcgtta

SEQ ID NO: 375542 - DNA, 30 bp, Artificial Sequence
  Synthetic oligonucleotide
accgtctgcgcgctggaactattcgcgtta

SEQ ID NO: 375543 - DNA, 30 bp, Artificial Sequence
  Synthetic oligonucleotide
tggcgcgggcgcgtggttaggtcggcgtta

SEQ ID NO: 375544 - DNA, 30 bp, Artificial Sequence
  Synthetic oligonucleotide
aacagcgacagtgatgacttcctggcgtta

SEQ ID NO: 375545 - DNA, 30 bp, Artificial Sequence
  Synthetic oligonucleotide
ctccacgtcccgccggtttaccctgcgtta

SEQ ID NO: 375546 - DNA, 30 bp, Artificial Sequence
  Synthetic oligonucleotide
cgtcctgttcttaaggataagtcatcgtta

SEQ ID NO: 375547 - DNA, 30 bp, Artificial Sequence
  Synthetic oligonucleotide
gtgaattaggtaagagcttggctatcgtta

SEQ ID NO: 375548 - DNA, 30 bp, Artificial Sequence
  Synthetic oligonucleotide
cagggacgcatcgtgtcccgtgactcgtta

SEQ ID NO: 375549 - DNA, 30 bp, Artificial Sequence
  Synthetic oligonucleotide
cgcccctagcgacgactcagcttctcgtta

SEQ ID NO: 375550 - DNA, 30 bp, Artificial Sequence
  Synthetic oligonucleotide
ttcggacagcgttagatgttcaattcgtta

SEQ ID NO: 375551 - DNA, 30 bp, Artificial Sequence
  Synthetic oligonucleotide
ttgaagtaactagcactggtggcttcgtta

SEQ ID NO: 375552 - DNA, 30 bp, Artificial Sequence
  Synthetic oligonucleotide
tcaaccaccgctgggtaatcgttttcgtta

SEQ ID NO: 375553 - DNA, 30 bp, Artificial Sequence
  Synthetic oligonucleotide
tgacattatgaaccgctagtatgaaggtta

SEQ ID NO: 375554 - DNA, 30 bp, Artificial Sequence
  Synthetic oligonucleotide
gggttagatcggcaaagtatattaaggtta

SEQ ID NO: 375555 - DNA, 30 bp, Artificial Sequence
  Synthetic oligonucleotide
gaataggatggagtcgaattgttaaggtta

SEQ ID NO: 375556 - DNA, 30 bp, Artificial Sequence
  Synthetic oligonucleotide
agctgagcagggcccgacggcccgaggtta

SEQ ID NO: 375557 - DNA, 30 bp, Artificial Sequence
  Synthetic oligonucleotide
tcacgacgactttacgaatgccggaggtta

SEQ ID NO: 375558 - DNA, 30 bp, Artificial Sequence
  Synthetic oligonucleotide
gtatcaatcaaacccggccaaattaggtta

SEQ ID NO: 375559 - DNA, 30 bp, Artificial Sequence
  Synthetic oligonucleotide
atattggcattagcgccctatattaggtta

SEQ ID NO: 375560 - DNA, 30 bp, Artificial Sequence
  Synthetic oligonucleotide
tcatgttgggtcagcgcagtctgacggtta

SEQ ID NO: 375561 - DNA, 30 bp, Artificial Sequence
  Synthetic oligonucleotide
ttctctgaacccagcggatttgtacggtta

SEQ ID NO: 375562 - DNA, 30 bp, Artificial Sequence
  Synthetic oligonucleotide
acagttttctatagaatgtactaccggtta

SEQ ID NO: 375563 - DNA, 30 bp, Artificial Sequence
  Synthetic oligonucleotide
aacacggagggtgaggcggcccgccggtta

SEQ ID NO: 375564 - DNA, 30 bp, Artificial Sequence
  Synthetic oligonucleotide
tgcaaaacggtcctttcgcggatgcggtta

SEQ ID NO: 375565 - DNA, 30 bp, Artificial Sequence
  Synthetic oligonucleotide
ctcgcgcaacttcgcaggttgatgcggtta

SEQ ID NO: 375566 - DNA, 30 bp, Artificial Sequence
  Synthetic oligonucleotide
gccggtagtgactgattcctgcatcggtta

SEQ ID NO: 375567 - DNA, 30 bp, Artificial Sequence
  Synthetic oligonucleotide
tagatttgaccagagatcggcagagggtta

SEQ ID NO: 375568 - DNA, 30 bp, Artificial Sequence
  Synthetic oligonucleotide
gaacatccgtctaggctcctgaccgggtta

SEQ ID NO: 375569 - DNA, 30 bp, Artificial Sequence
  Synthetic oligonucleotide
cactgcgaaccagacggattagtcgggtta

SEQ ID NO: 375570 - DNA, 30 bp, Artificial Sequence
  Synthetic oligonucleotide
tccacgcatatgaggccgcctatggggtta

SEQ ID NO: 375571 - DNA, 30 bp, Artificial Sequence
  Synthetic oligonucleotide
ccttgagattccgaccagctatatgggtta

SEQ ID NO: 375572 - DNA, 30 bp, Artificial Sequence
  Synthetic oligonucleotide
aacctagatcaaagctaggtccttgggtta

SEQ ID NO: 375573 - DNA, 30 bp, Artificial Sequence
  Synthetic oligonucleotide
ttggggtatcacaatgaagacgttgggtta

SEQ ID NO: 375574 - DNA, 30 bp, Artificial Sequence
  Synthetic oligonucleotide
ctgcggcagtacggttaagcctaatggtta

SEQ ID NO: 375575 - DNA, 30 bp, Artificial Sequence
  Synthetic oligonucleotide
tcaccaaccgtatggaccggagtatggtta

SEQ ID NO: 375576 - DNA, 30 bp, Artificial Sequence
  Synthetic oligonucleotide
ttatccgcataaccggccagcgcgtggtta

SEQ ID NO: 375577 - DNA, 30 bp, Artificial Sequence
  Synthetic oligonucleotide
cagatcaactcatcatagacaatgtggtta

SEQ ID NO: 375578 - DNA, 30 bp, Artificial Sequence
  Synthetic oligonucleotide
cctacaggtattcatcattggttgtggtta

SEQ ID NO: 375579 - DNA, 30 bp, Artificial Sequence
  Synthetic oligonucleotide
ttagctgaatatatgcgtgggtaaatgtta

SEQ ID NO: 375580 - DNA, 30 bp, Artificial Sequence
  Synthetic oligonucleotide
aaggagctgatccacataactgacatgtta

SEQ ID NO: 375581 - DNA, 30 bp, Artificial Sequence
  Synthetic oligonucleotide
gctgggagacttgctgatcggtccatgtta

SEQ ID NO: 375582 - DNA, 30 bp, Artificial Sequence
  Synthetic oligonucleotide
ttaatatgatcaagctgacagatgatgtta

SEQ ID NO: 375583 - DNA, 30 bp, Artificial Sequence
  Synthetic oligonucleotide
gtgactttgtcgctacatgtacttatgtta

SEQ ID NO: 375584 - DNA, 30 bp, Artificial Sequence
  Synthetic oligonucleotide
tcggatgcgagcaacgtaaagacgctgtta

SEQ ID NO: 375585 - DNA, 30 bp, Artificial Sequence
  Synthetic oligonucleotide
gtatctgtcaggggcatcagaagtctgtta

SEQ ID NO: 375586 - DNA, 30 bp, Artificial Sequence
  Synthetic oligonucleotide
aggcgtggtcctccagtcagctgtctgtta

SEQ ID NO: 375587 - DNA, 30 bp, Artificial Sequence
  Synthetic oligonucleotide
aacagtaaaggctctggacataaagtgtta

SEQ ID NO: 375588 - DNA, 30 bp, Artificial Sequence
  Synthetic oligonucleotide
aagcccgtctagtcttttctcctagtgtta

SEQ ID NO: 375589 - DNA, 30 bp, Artificial Sequence
  Synthetic oligonucleotide
ggtacatgcaagaccctgagacacgtgtta

SEQ ID NO: 375590 - DNA, 30 bp, Artificial Sequence
  Synthetic oligonucleotide
ctctccgtgtagcgctaaaatcacgtgtta

SEQ ID NO: 375591 - DNA, 30 bp, Artificial Sequence
  Synthetic oligonucleotide
gtcagcaaacatgctaagatagccgtgtta

SEQ ID NO: 375592 - DNA, 30 bp, Artificial Sequence
  Synthetic oligonucleotide
gacgataagttagctacgcctttcgtgtta

SEQ ID NO: 375593 - DNA, 30 bp, Artificial Sequence
  Synthetic oligonucleotide
gggttgatcgcacgggcgctaacggtgtta

SEQ ID NO: 375594 - DNA, 30 bp, Artificial Sequence
  Synthetic oligonucleotide
taccaagatattagaccatttgcggtgtta

SEQ ID NO: 375595 - DNA, 30 bp, Artificial Sequence
  Synthetic oligonucleotide
atgtacctggccggtcgccccgatgtgtta

SEQ ID NO: 375596 - DNA, 30 bp, Artificial Sequence
  Synthetic oligonucleotide
agtgcgggatagcatacatagtatgtgtta

SEQ ID NO: 375597 - DNA, 30 bp, Artificial Sequence
  Synthetic oligonucleotide
gccgaaggttccagaaagaatcctgtgtta

SEQ ID NO: 375598 - DNA, 30 bp, Artificial Sequence
  Synthetic oligonucleotide
cctacgtcgaattttggttccggtgtgtta

SEQ ID NO: 375599 - DNA, 30 bp, Artificial Sequence
  Synthetic oligonucleotide
gtaggaacttaatgggtggcatttgtgtta

SEQ ID NO: 375600 - DNA, 30 bp, Artificial Sequence
  Synthetic oligonucleotide
cgcccttttggcggacggtattttgtgtta

SEQ ID NO: 375601 - DNA, 30 bp, Artificial Sequence
  Synthetic oligonucleotide
caagggtaaatgacgtccaggtaattgtta

SEQ ID NO: 375602 - DNA, 30 bp, Artificial Sequence
  Synthetic oligonucleotide
tactaggctgtattcatatgaggattgtta

SEQ ID NO: 375603 - DNA, 30 bp, Artificial Sequence
  Synthetic oligonucleotide
tagaatggatactttacgggcggattgtta

SEQ ID NO: 375604 - DNA, 30 bp, Artificial Sequence
  Synthetic oligonucleotide
ctctgaactagtcttcatgatagtttgtta

SEQ ID NO: 375605 - DNA, 30 bp, Artificial Sequence
  Synthetic oligonucleotide
ggctaactagtcctccactgccgtttgtta

SEQ ID NO: 375606 - DNA, 30 bp, Artificial Sequence
  Synthetic oligonucleotide
aaggacggaatatctcatgtagaaaattta

SEQ ID NO: 375607 - DNA, 30 bp, Artificial Sequence
  Synthetic oligonucleotide
aaatgcatacgttttagcttagcaaattta

SEQ ID NO: 375608 - DNA, 30 bp, Artificial Sequence
  Synthetic oligonucleotide
agcccgcccgccaatccgttttgaaattta

SEQ ID NO: 375609 - DNA, 30 bp, Artificial Sequence
  Synthetic oligonucleotide
gagtacagcacgagtggtcagttaaattta

SEQ ID NO: 375610 - DNA, 30 bp, Artificial Sequence
  Synthetic oligonucleotide
gaaggcttatgcatttttaacagcaattta

SEQ ID NO: 375611 - DNA, 30 bp, Artificial Sequence
  Synthetic oligonucleotide
gcagtagctggtcatctacacagcaattta

SEQ ID NO: 375612 - DNA, 30 bp, Artificial Sequence
  Synthetic oligonucleotide
tagaccgccctgtgaaggtgcgtcaattta

SEQ ID NO: 375613 - DNA, 30 bp, Artificial Sequence
  Synthetic oligonucleotide
gttcaattaggcactataagtttcaattta

SEQ ID NO: 375614 - DNA, 30 bp, Artificial Sequence
  Synthetic oligonucleotide
atgttcttacaatcggctggctagaattta

SEQ ID NO: 375615 - DNA, 30 bp, Artificial Sequence
  Synthetic oligonucleotide
cagcgtccggaaactcttccacggaattta

SEQ ID NO: 375616 - DNA, 30 bp, Artificial Sequence
  Synthetic oligonucleotide
caaatccatgaaacaacctaaactaattta

SEQ ID NO: 375617 - DNA, 30 bp, Artificial Sequence
  Synthetic oligonucleotide
gtagggaatacctcccattaaagtaattta

SEQ ID NO: 375618 - DNA, 30 bp, Artificial Sequence
  Synthetic oligonucleotide
atcattaacgtagagtcttcctgtaattta

SEQ ID NO: 375619 - DNA, 30 bp, Artificial Sequence
  Synthetic oligonucleotide
gggcgagagcattaatttggcggacattta

SEQ ID NO: 375620 - DNA, 30 bp, Artificial Sequence
  Synthetic oligonucleotide
gaaagccacagcaacgcgcctgtacattta

SEQ ID NO: 375621 - DNA, 30 bp, Artificial Sequence
  Synthetic oligonucleotide
tgtggtgtttattaacagactatccattta

SEQ ID NO: 375622 - DNA, 30 bp, Artificial Sequence
  Synthetic oligonucleotide
gatgtcactaaaagttttttatcgcattta

SEQ ID NO: 375623 - DNA, 30 bp, Artificial Sequence
  Synthetic oligonucleotide
tttctgctaaaaagacaatgccatcattta

SEQ ID NO: 375624 - DNA, 30 bp, Artificial Sequence
  Synthetic oligonucleotide
aggagcttctgacgcctgagagatcattta

SEQ ID NO: 375625 - DNA, 30 bp, Artificial Sequence
  Synthetic oligonucleotide
tcttactaagtcgcatgtctagatcattta

SEQ ID NO: 375626 - DNA, 30 bp, Artificial Sequence
  Synthetic oligonucleotide
gagtggatagtagttcgagctgatcattta

SEQ ID NO: 375627 - DNA, 30 bp, Artificial Sequence
  Synthetic oligonucleotide
ggatgtgttcagtcgtggtttcaagattta

SEQ ID NO: 375628 - DNA, 30 bp, Artificial Sequence
  Synthetic oligonucleotide
acaggtgaaatgaaaagtttcggagattta

SEQ ID NO: 375629 - DNA, 30 bp, Artificial Sequence
  Synthetic oligonucleotide
cggtttcactttgaagtaccccccgattta

SEQ ID NO: 375630 - DNA, 30 bp, Artificial Sequence
  Synthetic oligonucleotide
caacggatccggtgggctcgctcggattta

SEQ ID NO: 375631 - DNA, 30 bp, Artificial Sequence
  Synthetic oligonucleotide
tttcattccaacatcgctttgtcggattta

SEQ ID NO: 375632 - DNA, 30 bp, Artificial Sequence
  Synthetic oligonucleotide
gtggccaggcgccgcgtaaaaatggattta

SEQ ID NO: 375633 - DNA, 30 bp, Artificial Sequence
  Synthetic oligonucleotide
caggcttgaaatttgctttagatggattta

SEQ ID NO: 375634 - DNA, 30 bp, Artificial Sequence
  Synthetic oligonucleotide
gtcctttcaagctgcattttatatgattta

SEQ ID NO: 375635 - DNA, 30 bp, Artificial Sequence
  Synthetic oligonucleotide
gccaacgcgcgcaacgaggcggtatattta

SEQ ID NO: 375636 - DNA, 30 bp, Artificial Sequence
  Synthetic oligonucleotide
acccgagtccttagaatcgatcactattta

SEQ ID NO: 375637 - DNA, 30 bp, Artificial Sequence
  Synthetic oligonucleotide
gttcagcatatcgcttctattcactattta

SEQ ID NO: 375638 - DNA, 30 bp, Artificial Sequence
  Synthetic oligonucleotide
gatccccaagatgcgattgtgccctattta

SEQ ID NO: 375639 - DNA, 30 bp, Artificial Sequence
  Synthetic oligonucleotide
cgacttggagtttataaggtatcctattta

SEQ ID NO: 375640 - DNA, 30 bp, Artificial Sequence
  Synthetic oligonucleotide
gtcacaacagcgaagtgttagggctattta

SEQ ID NO: 375641 - DNA, 30 bp, Artificial Sequence
  Synthetic oligonucleotide
acgcgggtgctaatatacggagagtattta

SEQ ID NO: 375642 - DNA, 30 bp, Artificial Sequence
  Synthetic oligonucleotide
tcatttaggcggccaagtgccacgtattta

SEQ ID NO: 375643 - DNA, 30 bp, Artificial Sequence
  Synthetic oligonucleotide
agacggtctagtcgatcgttggggtattta

SEQ ID NO: 375644 - DNA, 30 bp, Artificial Sequence
  Synthetic oligonucleotide
aaagtcaattgaaccagtgcgttgtattta

SEQ ID NO: 375645 - DNA, 30 bp, Artificial Sequence
  Synthetic oligonucleotide
gagaagaggtacctcttcaataattattta

SEQ ID NO: 375646 - DNA, 30 bp, Artificial Sequence
  Synthetic oligonucleotide
tgccagccgcgtaagacatagtgttattta

SEQ ID NO: 375647 - DNA, 30 bp, Artificial Sequence
  Synthetic oligonucleotide
gtgtccagcggtaatctgaaggtttattta

SEQ ID NO: 375648 - DNA, 30 bp, Artificial Sequence
  Synthetic oligonucleotide
gctagcggatgtctatacggggcaacttta

SEQ ID NO: 375649 - DNA, 30 bp, Artificial Sequence
  Synthetic oligonucleotide
ccgactcataagaccgtgtgcttaacttta

SEQ ID NO: 375650 - DNA, 30 bp, Artificial Sequence
  Synthetic oligonucleotide
cgccttcggttaatggaagttatcacttta

SEQ ID NO: 375651 - DNA, 30 bp, Artificial Sequence
  Synthetic oligonucleotide
tagcggaaatgcggacacgcgttcacttta

SEQ ID NO: 375652 - DNA, 30 bp, Artificial Sequence
  Synthetic oligonucleotide
gcctaaagcaattctactactgtgacttta

SEQ ID NO: 375653 - DNA, 30 bp, Artificial Sequence
  Synthetic oligonucleotide
cccgcgcaattggtttaaattactacttta

SEQ ID NO: 375654 - DNA, 30 bp, Artificial Sequence
  Synthetic oligonucleotide
cattcggtcctttcgaaggtctgtacttta

SEQ ID NO: 375655 - DNA, 30 bp, Artificial Sequence
  Synthetic oligonucleotide
aggatatattacagatgggcgaccccttta

SEQ ID NO: 375656 - DNA, 30 bp, Artificial Sequence
  Synthetic oligonucleotide
gaggatctggtattaaggtatggcccttta

SEQ ID NO: 375657 - DNA, 30 bp, Artificial Sequence
  Synthetic oligonucleotide
cagagttggcatctgtccacgaagccttta

SEQ ID NO: 375658 - DNA, 30 bp, Artificial Sequence
  Synthetic oligonucleotide
tcgaaggtattagctcctttcctgccttta

SEQ ID NO: 375659 - DNA, 30 bp, Artificial Sequence
  Synthetic oligonucleotide
ccgaggacgttatttactagttgtccttta

SEQ ID NO: 375660 - DNA, 30 bp, Artificial Sequence
  Synthetic oligonucleotide
taccagccctaagcatgacggcacgcttta

SEQ ID NO: 375661 - DNA, 30 bp, Artificial Sequence
  Synthetic oligonucleotide
cgagaatgtttactgccactctacgcttta

SEQ ID NO: 375662 - DNA, 30 bp, Artificial Sequence
  Synthetic oligonucleotide
aacactagcgagactaaatcgagcgcttta

SEQ ID NO: 375663 - DNA, 31 bp, Artificial Sequence
  Synthetic oligonucleotide
gaagaattcctagctattgaggatcgcttta

SEQ ID NO: 375664 - DNA, 30 bp, Artificial Sequence
  Synthetic oligonucleotide
tacaattgtcataggaacagagtcgcttta

SEQ ID NO: 375665 - DNA, 30 bp, Artificial Sequence
  Synthetic oligonucleotide
ggctcacaggctcgtggcgacaaggcttta

SEQ ID NO: 375666 - DNA, 30 bp, Artificial Sequence
  Synthetic oligonucleotide
tcatgcattgaccacccgtaaacggcttta

SEQ ID NO: 375667 - DNA, 30 bp, Artificial Sequence
  Synthetic oligonucleotide
ccgaacaacagacccgtgattttatcttta

SEQ ID NO: 375668 - DNA, 30 bp, Artificial Sequence
  Synthetic oligonucleotide
gatactctgagcttactataatgctcttta

SEQ ID NO: 375669 - DNA, 30 bp, Artificial Sequence
  Synthetic oligonucleotide
cagatgcgactgtccgtacgtctctcttta

SEQ ID NO: 375670 - DNA, 30 bp, Artificial Sequence
  Synthetic oligonucleotide
ggcgcgtacttaatctggtaggtctcttta

SEQ ID NO: 375671 - DNA, 30 bp, Artificial Sequence
  Synthetic oligonucleotide
aagctcgtttcatacccgaaggtgtcttta

SEQ ID NO: 375672 - DNA, 30 bp, Artificial Sequence
  Synthetic oligonucleotide
catcgtgccggaacctgctcggcttcttta

SEQ ID NO: 375673 - DNA, 30 bp, Artificial Sequence
  Synthetic oligonucleotide
acgttaaaggtaagtagaagcctttcttta

SEQ ID NO: 375674 - DNA, 30 bp, Artificial Sequence
  Synthetic oligonucleotide
atcttgtcgctacaaaattgccaaagttta

SEQ ID NO: 375675 - DNA, 30 bp, Artificial Sequence
  Synthetic oligonucleotide
ggaagaggcagtgccctaaatacaagttta

SEQ ID NO: 375676 - DNA, 30 bp, Artificial Sequence
  Synthetic oligonucleotide
gccgccgaacgtgcacctggaccaagttta

SEQ ID NO: 375677 - DNA, 30 bp, Artificial Sequence
  Synthetic oligonucleotide
tcgagtaatccccctcgatgcaacagttta

SEQ ID NO: 375678 - DNA, 30 bp, Artificial Sequence
  Synthetic oligonucleotide
acggaccccacgttgatctacagcagttta

SEQ ID NO: 375679 - DNA, 30 bp, Artificial Sequence
  Synthetic oligonucleotide
gggcttccccacctgaccatagagagttta

SEQ ID NO: 375680 - DNA, 30 bp, Artificial Sequence
  Synthetic oligonucleotide
gcccatgaggtggtgctggaaacgagttta

SEQ ID NO: 375681 - DNA, 30 bp, Artificial Sequence
  Synthetic oligonucleotide
ttgtctggtgacacacgaggcgcgagttta

SEQ ID NO: 375682 - DNA, 30 bp, Artificial Sequence
  Synthetic oligonucleotide
ttaaaacgtaccacgccaccctggagttta

SEQ ID NO: 375683 - DNA, 30 bp, Artificial Sequence
  Synthetic oligonucleotide
gacatctactcaatcaaggatcatagttta

SEQ ID NO: 375684 - DNA, 30 bp, Artificial Sequence
  Synthetic oligonucleotide
aggcaggagtttagaacgcgtcatagttta

SEQ ID NO: 375685 - DNA, 30 bp, Artificial Sequence
  Synthetic oligonucleotide
ctaactcgtaccacaagtggtgatagttta

SEQ ID NO: 375686 - DNA, 30 bp, Artificial Sequence
  Synthetic oligonucleotide
cttgcacggcaattctgtcacgttagttta

SEQ ID NO: 375687 - DNA, 30 bp, Artificial Sequence
  Synthetic oligonucleotide
tcccaccctcgggaaaaaatcatacgttta

SEQ ID NO: 375688 - DNA, 30 bp, Artificial Sequence
  Synthetic oligonucleotide
gtaacccaaccggaggtaagaaaccgttta

SEQ ID NO: 375689 - DNA, 28 bp, Artificial Sequence
  Synthetic oligonucleotide
agcggtaaaaatgcggcgagaccgttta

SEQ ID NO: 375690 - DNA, 30 bp, Artificial Sequence
  Synthetic oligonucleotide
ttttcggaggaaggaagggtctcgcgttta

SEQ ID NO: 375691 - DNA, 30 bp, Artificial Sequence
  Synthetic oligonucleotide
gcggttcagaatgtatgatagaggcgttta

SEQ ID NO: 375692 - DNA, 30 bp, Artificial Sequence
  Synthetic oligonucleotide
gataattagttcgctaaagctgggcgttta

SEQ ID NO: 375693 - DNA, 30 bp, Artificial Sequence
  Synthetic oligonucleotide
aggaccagaacgccccggcaagtgcgttta

SEQ ID NO: 375694 - DNA, 30 bp, Artificial Sequence
  Synthetic oligonucleotide
gattgaagccttgcttcgaggtgtcgttta

SEQ ID NO: 375695 - DNA, 30 bp, Artificial Sequence
  Synthetic oligonucleotide
tataatgtcctagtccaagtcgaaggttta

SEQ ID NO: 375696 - DNA, 30 bp, Artificial Sequence
  Synthetic oligonucleotide
agcgttacgtgtgcgagggcacgaggttta

SEQ ID NO: 375697 - DNA, 30 bp, Artificial Sequence
  Synthetic oligonucleotide
ttaaacgggatgaaaggagggggaggttta

SEQ ID NO: 375698 - DNA, 30 bp, Artificial Sequence
  Synthetic oligonucleotide
aaatggaggataaagtacttgggaggttta

SEQ ID NO: 375699 - DNA, 30 bp, Artificial Sequence
  Synthetic oligonucleotide
cgtttatattacaaagtggctctaggttta

SEQ ID NO: 375700 - DNA, 30 bp, Artificial Sequence
  Synthetic oligonucleotide
cacgaatggttcccgccagccgtaggttta

SEQ ID NO: 375701 - DNA, 30 bp, Artificial Sequence
  Synthetic oligonucleotide
gtagaagaatttctgcagcatgccggttta

SEQ ID NO: 375702 - DNA, 30 bp, Artificial Sequence
  Synthetic oligonucleotide
gctgcaaactgggtgttaaggaagggttta

SEQ ID NO: 375703 - DNA, 30 bp, Artificial Sequence
  Synthetic oligonucleotide
gccactgtgaaaagtgtacagtagggttta

SEQ ID NO: 375704 - DNA, 30 bp, Artificial Sequence
  Synthetic oligonucleotide
cgtcttttagtttcggagatgtcgggttta

SEQ ID NO: 375705 - DNA, 30 bp, Artificial Sequence
  Synthetic oligonucleotide
tcaaagctaaagctgtgcacagtgggttta

SEQ ID NO: 375706 - DNA, 30 bp, Artificial Sequence
  Synthetic oligonucleotide
gtggcatttagataattcgaatatggttta

SEQ ID NO: 375707 - DNA, 30 bp, Artificial Sequence
  Synthetic oligonucleotide
tcgccgctattggaagcttcggctggttta

SEQ ID NO: 375708 - DNA, 30 bp, Artificial Sequence
  Synthetic oligonucleotide
gtctcattaattttacatactcgtggttta

SEQ ID NO: 375709 - DNA, 30 bp, Artificial Sequence
  Synthetic oligonucleotide
aggcattttggcgcatgatggattggttta

SEQ ID NO: 375710 - DNA, 30 bp, Artificial Sequence
  Synthetic oligonucleotide
aaggaaatgacttaggacccgcttggttta

SEQ ID NO: 375711 - DNA, 30 bp, Artificial Sequence
  Synthetic oligonucleotide
catccccagagcgtttcaagcaaatgttta

SEQ ID NO: 375712 - DNA, 31 bp, Artificial Sequence
  Synthetic oligonucleotide
ggggtcttagtatcacatgtgtgtatgttta

SEQ ID NO: 375713 - DNA, 30 bp, Artificial Sequence
  Synthetic oligonucleotide
catcccctattacgaccggatagctgttta

SEQ ID NO: 375714 - DNA, 30 bp, Artificial Sequence
  Synthetic oligonucleotide
tttgtaaactctaccgtcaccggctgttta

SEQ ID NO: 375715 - DNA, 30 bp, Artificial Sequence
  Synthetic oligonucleotide
cattactctacatcagtatttaattgttta

SEQ ID NO: 375716 - DNA, 30 bp, Artificial Sequence
  Synthetic oligonucleotide
tgtatagaacaattataattcgattgttta

SEQ ID NO: 375717 - DNA, 30 bp, Artificial Sequence
  Synthetic oligonucleotide
aaggggactgtgccttgccggggttgttta

SEQ ID NO: 375718 - DNA, 30 bp, Artificial Sequence
  Synthetic oligonucleotide
gcggaaccgactcacagccatcaaatttta

SEQ ID NO: 375719 - DNA, 30 bp, Artificial Sequence
  Synthetic oligonucleotide
gactcgtacttagttttgttatgaatttta

SEQ ID NO: 375720 - DNA, 30 bp, Artificial Sequence
  Synthetic oligonucleotide
tagattgtcggtgtagctctctgaatttta

SEQ ID NO: 375721 - DNA, 30 bp, Artificial Sequence
  Synthetic oligonucleotide
taggaattgcacagatgaaaacacatttta

SEQ ID NO: 375722 - DNA, 30 bp, Artificial Sequence
  Synthetic oligonucleotide
gttatatcgtgatactagatccgcatttta

SEQ ID NO: 375723 - DNA, 30 bp, Artificial Sequence
  Synthetic oligonucleotide
ttcataacctccaaagcgaccggcatttta

SEQ ID NO: 375724 - DNA, 30 bp, Artificial Sequence
  Synthetic oligonucleotide
cttgtcgagcaccctaccagacagatttta

SEQ ID NO: 375725 - DNA, 30 bp, Artificial Sequence
  Synthetic oligonucleotide
gaacaatttaagagaaggattgggatttta

SEQ ID NO: 375726 - DNA, 30 bp, Artificial Sequence
  Synthetic oligonucleotide
cagatcgggtttcatcctaataaactttta

SEQ ID NO: 375727 - DNA, 30 bp, Artificial Sequence
  Synthetic oligonucleotide
caagcacttgactaagacaggcccctttta

SEQ ID NO: 375728 - DNA, 30 bp, Artificial Sequence
  Synthetic oligonucleotide
cgattcacagaacgggtcacctccctttta

SEQ ID NO: 375729 - DNA, 30 bp, Artificial Sequence
  Synthetic oligonucleotide
ctacttcatgcgattttcagatggctttta

SEQ ID NO: 375730 - DNA, 30 bp, Artificial Sequence
  Synthetic oligonucleotide
cagtgttatgacatccaatatattctttta

SEQ ID NO: 375731 - DNA, 30 bp, Artificial Sequence
  Synthetic oligonucleotide
ctaaatccggcccttagtaaccaagtttta

SEQ ID NO: 375732 - DNA, 30 bp, Artificial Sequence
  Synthetic oligonucleotide
agaggtgaagcccgatgggggccagtttta

SEQ ID NO: 375733 - DNA, 30 bp, Artificial Sequence
  Synthetic oligonucleotide
gtggtatgggacccatcaccaggcgtttta

SEQ ID NO: 375734 - DNA, 30 bp, Artificial Sequence
  Synthetic oligonucleotide
gagtgatgatcaagggctccttgcgtttta

SEQ ID NO: 375735 - DNA, 30 bp, Artificial Sequence
  Synthetic oligonucleotide
gccgacatatgtaatcacgggaaggtttta

SEQ ID NO: 375736 - DNA, 30 bp, Artificial Sequence
  Synthetic oligonucleotide
acaaaatctgggcacaggttgttggtttta

SEQ ID NO: 375737 - DNA, 30 bp, Artificial Sequence
  Synthetic oligonucleotide
agctgcaggaacatgaatgactatgtttta

SEQ ID NO: 375738 - DNA, 30 bp, Artificial Sequence
  Synthetic oligonucleotide
cggcgttgaatccagcttctggttgtttta

SEQ ID NO: 375739 - DNA, 30 bp, Artificial Sequence
  Synthetic oligonucleotide
ggaaaaattcggaaggcggcagaattttta

SEQ ID NO: 375740 - DNA, 30 bp, Artificial Sequence
  Synthetic oligonucleotide
ttagacagtgcatagtaagttctattttta

SEQ ID NO: 375741 - DNA, 30 bp, Artificial Sequence
  Synthetic oligonucleotide
caggaggactcagccatgatccccttttta

SEQ ID NO: 375742 - DNA, 30 bp, Artificial Sequence
  Synthetic oligonucleotide
cgctcagagattgttagtagggtcttttta

SEQ ID NO: 375743 - DNA, 30 bp, Artificial Sequence
  Synthetic oligonucleotide
accaccaggagactacaataattcttttta

SEQ ID NO: 375744 - DNA, 30 bp, Artificial Sequence
  Synthetic oligonucleotide
tcaatctggacacagcacgccatgttttta

SEQ ID NO: 375745 - DNA, 30 bp, Artificial Sequence
  Synthetic oligonucleotide
ggaggggagttcacgggccgccctttttta

SEQ ID NO: 375746 - DNA, 30 bp, Artificial Sequence
  Synthetic oligonucleotide
tgcgcatgaactcagccggagggtttttta

SEQ ID NO: 375747 - DNA, 30 bp, Artificial Sequence
  Synthetic oligonucleotide
cccggagcgcgaggggtagtgtaaaaaaac

SEQ ID NO: 375748 - DNA, 30 bp, Artificial Sequence
  Synthetic oligonucleotide
tagacatatgggccatactgcccaaaaaac

SEQ ID NO: 375749 - DNA, 30 bp, Artificial Sequence
  Synthetic oligonucleotide
cattttgaagcccccaaggctgtaaaaaac

SEQ ID NO: 375750 - DNA, 30 bp, Artificial Sequence
  Synthetic oligonucleotide
cattgtataaggcgccagaataacaaaaac

SEQ ID NO: 375751 - DNA, 30 bp, Artificial Sequence
  Synthetic oligonucleotide
cgccgcagaagaacgtatcacgacaaaaac

SEQ ID NO: 375752 - DNA, 30 bp, Artificial Sequence
  Synthetic oligonucleotide
ggatgcaaaactcccggacgagccaaaaac

SEQ ID NO: 375753 - DNA, 30 bp, Artificial Sequence
  Synthetic oligonucleotide
gtacggctctttggcgaatccgataaaaac

SEQ ID NO: 375754 - DNA, 30 bp, Artificial Sequence
  Synthetic oligonucleotide
tacgactcgtcagacgaagattataaaaac

SEQ ID NO: 375755 - DNA, 30 bp, Artificial Sequence
  Synthetic oligonucleotide
aaaggtgaaacctcgctacgaggtaaaaac

SEQ ID NO: 375756 - DNA, 30 bp, Artificial Sequence
  Synthetic oligonucleotide
tttcgcgctgggtgtacaatgtaacaaaac

SEQ ID NO: 375757 - DNA, 30 bp, Artificial Sequence
  Synthetic oligonucleotide
ttggggattgtgttacgctagtaccaaaac

SEQ ID NO: 375758 - DNA, 30 bp, Artificial Sequence
  Synthetic oligonucleotide
aatatatattcagtgggactgagccaaaac

SEQ ID NO: 375759 - DNA, 30 bp, Artificial Sequence
  Synthetic oligonucleotide
ggatggtgcgaaggtgatgcgcagcaaaac

SEQ ID NO: 375760 - DNA, 30 bp, Artificial Sequence
  Synthetic oligonucleotide
gcatttacttgcattgaatttaggcaaaac

SEQ ID NO: 375761 - DNA, 30 bp, Artificial Sequence
  Synthetic oligonucleotide
ccagcagtcgtgtaccatttcatgcaaaac

SEQ ID NO: 375762 - DNA, 30 bp, Artificial Sequence
  Synthetic oligonucleotide
gggggttccgatggcttgtctaatcaaaac

SEQ ID NO: 375763 - DNA, 30 bp, Artificial Sequence
  Synthetic oligonucleotide
ccaatcctgcgtgatctaaagagtcaaaac

SEQ ID NO: 375764 - DNA, 30 bp, Artificial Sequence
  Synthetic oligonucleotide
aacgataaccccatgcacacaattcaaaac

SEQ ID NO: 375765 - DNA, 30 bp, Artificial Sequence
  Synthetic oligonucleotide
ctttttcgttgccatgagagcgcagaaaac

SEQ ID NO: 375766 - DNA, 30 bp, Artificial Sequence
  Synthetic oligonucleotide
ccttgggactctattatgcgcgtggaaaac

SEQ ID NO: 375767 - DNA, 30 bp, Artificial Sequence
  Synthetic oligonucleotide
tttcgctgagaggattaggaaattgaaaac

SEQ ID NO: 375768 - DNA, 30 bp, Artificial Sequence
  Synthetic oligonucleotide
gaaaggattatctgccaattgccataaaac

SEQ ID NO: 375769 - DNA, 30 bp, Artificial Sequence
  Synthetic oligonucleotide
tgaacataaatttatgatggtctctaaaac

SEQ ID NO: 375770 - DNA, 30 bp, Artificial Sequence
  Synthetic oligonucleotide
aagtagaaaaggtttgtatttaggtaaaac

SEQ ID NO: 375771 - DNA, 30 bp, Artificial Sequence
  Synthetic oligonucleotide
aatgcccaattaggtgtcccagggtaaaac

SEQ ID NO: 375772 - DNA, 30 bp, Artificial Sequence
  Synthetic oligonucleotide
ggatttgactgattcaatacgtcttaaaac

SEQ ID NO: 375773 - DNA, 30 bp, Artificial Sequence
  Synthetic oligonucleotide
gctggacggtactacaatttgtcttaaaac

SEQ ID NO: 375774 - DNA, 30 bp, Artificial Sequence
  Synthetic oligonucleotide
aacgccctgaagcattaatgtcgttaaaac

SEQ ID NO: 375775 - DNA, 30 bp, Artificial Sequence
  Synthetic oligonucleotide
agtgcgggtcccaatattaggctttaaaac

SEQ ID NO: 375776 - DNA, 30 bp, Artificial Sequence
  Synthetic oligonucleotide
gaggatgggaatgcgagtattctttaaaac

SEQ ID NO: 375777 - DNA, 30 bp, Artificial Sequence
  Synthetic oligonucleotide
acaatttgccaccttattctggacacaaac

SEQ ID NO: 375778 - DNA, 30 bp, Artificial Sequence
  Synthetic oligonucleotide
tgagatcataggttctgtgcatagacaaac

SEQ ID NO: 375779 - DNA, 30 bp, Artificial Sequence
  Synthetic oligonucleotide
cacggagattcatgggtccgggtgacaaac

SEQ ID NO: 375780 - DNA, 30 bp, Artificial Sequence
  Synthetic oligonucleotide
gggttccgtcggtatagtgagactacaaac

SEQ ID NO: 375781 - DNA, 30 bp, Artificial Sequence
  Synthetic oligonucleotide
acctctagcatcgagccctcttctacaaac

SEQ ID NO: 375782 - DNA, 30 bp, Artificial Sequence
  Synthetic oligonucleotide
aaggtaccggttttacggagaggtacaaac

SEQ ID NO: 375783 - DNA, 30 bp, Artificial Sequence
  Synthetic oligonucleotide
gctcgactcgcattgtgtacggaaccaaac

SEQ ID NO: 375784 - DNA, 30 bp, Artificial Sequence
  Synthetic oligonucleotide
attgggttgtcagaggctatcctaccaaac

SEQ ID NO: 375785 - DNA, 30 bp, Artificial Sequence
  Synthetic oligonucleotide
tctttcgtaaccttgccaggggtaccaaac

SEQ ID NO: 375786 - DNA, 30 bp, Artificial Sequence
  Synthetic oligonucleotide
cttgaaaaggtttaacgaattcccccaaac

SEQ ID NO: 375787 - DNA, 30 bp, Artificial Sequence
  Synthetic oligonucleotide
aattaattggattggcgacgggagccaaac

SEQ ID NO: 375788 - DNA, 30 bp, Artificial Sequence
  Synthetic oligonucleotide
cttccggccggcgagttggttgagccaaac

SEQ ID NO: 375789 - DNA, 30 bp, Artificial Sequence
  Synthetic oligonucleotide
cacatgcgtcgtgagtccctgccgccaaac

SEQ ID NO: 375790 - DNA, 30 bp, Artificial Sequence
  Synthetic oligonucleotide
atctcgttctatgttggcccgtatccaaac

SEQ ID NO: 375791 - DNA, 30 bp, Artificial Sequence
  Synthetic oligonucleotide
aatctggtggaggacaagtcgagtccaaac

SEQ ID NO: 375792 - DNA, 30 bp, Artificial Sequence
  Synthetic oligonucleotide
gagtaaaataatcaaacgatctgagcaaac

SEQ ID NO: 375793 - DNA, 30 bp, Artificial Sequence
  Synthetic oligonucleotide
aacggcaggctttctaaatcatacgcaaac

SEQ ID NO: 375794 - DNA, 30 bp, Artificial Sequence
  Synthetic oligonucleotide
gatacaacgccaacaattgactgggcaaac

SEQ ID NO: 375795 - DNA, 30 bp, Artificial Sequence
  Synthetic oligonucleotide
ggcagcatccagcgggacaatctggcaaac

SEQ ID NO: 375796 - DNA, 30 bp, Artificial Sequence
  Synthetic oligonucleotide
tacacccagttttcaggtacgtatgcaaac

SEQ ID NO: 375797 - DNA, 30 bp, Artificial Sequence
  Synthetic oligonucleotide
gtcacgtagccagtcaggctgagtgcaaac

SEQ ID NO: 375798 - DNA, 31 bp, Artificial Sequence
  Synthetic oligonucleotide
ctaccgaatagttgctatcgggtttgcaaac

SEQ ID NO: 375799 - DNA, 30 bp, Artificial Sequence
  Synthetic oligonucleotide
acacctggtatcaacctagaatcatcaaac

SEQ ID NO: 375800 - DNA, 30 bp, Artificial Sequence
  Synthetic oligonucleotide
tatgaggagctctatggagaaagatcaaac

SEQ ID NO: 375801 - DNA, 30 bp, Artificial Sequence
  Synthetic oligonucleotide
accctgcggggaccaatcagccgatcaaac

SEQ ID NO: 375802 - DNA, 30 bp, Artificial Sequence
  Synthetic oligonucleotide
ggcggggattggtgacttcccggatcaaac

SEQ ID NO: 375803 - DNA, 30 bp, Artificial Sequence
  Synthetic oligonucleotide
aaggtcatactgcattgaacatactcaaac

SEQ ID NO: 375804 - DNA, 30 bp, Artificial Sequence
  Synthetic oligonucleotide
gggtccacttccaacagcggtacgtcaaac

SEQ ID NO: 375805 - DNA, 30 bp, Artificial Sequence
  Synthetic oligonucleotide
cggcactgtaagggccccggccggtcaaac

SEQ ID NO: 375806 - DNA, 30 bp, Artificial Sequence
  Synthetic oligonucleotide
gctgtcagaacggtgtggagtgggtcaaac

SEQ ID NO: 375807 - DNA, 31 bp, Artificial Sequence
  Synthetic oligonucleotide
gaagctatccagcacgattcaggtgtcaaac

SEQ ID NO: 375808 - DNA, 30 bp, Artificial Sequence
  Synthetic oligonucleotide
ttttcctgggagtgggggagtgaaagaaac

SEQ ID NO: 375809 - DNA, 30 bp, Artificial Sequence
  Synthetic oligonucleotide
gattatggagcgtaattcgcatcaagaaac

SEQ ID NO: 375810 - DNA, 30 bp, Artificial Sequence
  Synthetic oligonucleotide
gcaggtatcaggttctcgccacacagaaac

SEQ ID NO: 375811 - DNA, 30 bp, Artificial Sequence
  Synthetic oligonucleotide
tagagtcacggttacacttacgtcagaaac

SEQ ID NO: 375812 - DNA, 30 bp, Artificial Sequence
  Synthetic oligonucleotide
agggtgtgctcaccttgcagcaagagaaac

SEQ ID NO: 375813 - DNA, 30 bp, Artificial Sequence
  Synthetic oligonucleotide
actaaggtgtccaatgtaacatatagaaac

SEQ ID NO: 375814 - DNA, 30 bp, Artificial Sequence
  Synthetic oligonucleotide
tgtaaagatccgttgcctattactagaaac

SEQ ID NO: 375815 - DNA, 30 bp, Artificial Sequence
  Synthetic oligonucleotide
gcagacttagggtaccgagtggctagaaac

SEQ ID NO: 375816 - DNA, 30 bp, Artificial Sequence
  Synthetic oligonucleotide
tggtcagtataactttgtgcacgccgaaac

SEQ ID NO: 375817 - DNA, 30 bp, Artificial Sequence
  Synthetic oligonucleotide
gttccattgaatttgaaagggattcgaaac

SEQ ID NO: 375818 - DNA, 30 bp, Artificial Sequence
  Synthetic oligonucleotide
ctaccttcgagactagctcgtaaaggaaac

SEQ ID NO: 375819 - DNA, 30 bp, Artificial Sequence
  Synthetic oligonucleotide
aggtgagcatgaaatgtgggagcaggaaac

SEQ ID NO: 375820 - DNA, 30 bp, Artificial Sequence
  Synthetic oligonucleotide
gcgcataaatacgtggggaccgcaggaaac

SEQ ID NO: 375821 - DNA, 30 bp, Artificial Sequence
  Synthetic oligonucleotide
tcgtgggaccccccatacccctctggaaac

SEQ ID NO: 375822 - DNA, 30 bp, Artificial Sequence
  Synthetic oligonucleotide
caaccgccacacaatggggtacgtggaaac

SEQ ID NO: 375823 - DNA, 30 bp, Artificial Sequence
  Synthetic oligonucleotide
tatagtccaatacattgaccccaatgaaac

SEQ ID NO: 375824 - DNA, 30 bp, Artificial Sequence
  Synthetic oligonucleotide
ggacctactcgcgggctgtatgaatgaaac

SEQ ID NO: 375825 - DNA, 30 bp, Artificial Sequence
  Synthetic oligonucleotide
gcagatccgtaccaaatctggtcatgaaac

SEQ ID NO: 375826 - DNA, 30 bp, Artificial Sequence
  Synthetic oligonucleotide
tgggctggtatgaatttaaaatgatgaaac

SEQ ID NO: 375827 - DNA, 30 bp, Artificial Sequence
  Synthetic oligonucleotide
aggtgatggatgctttcgcaggtatgaaac

SEQ ID NO: 375828 - DNA, 30 bp, Artificial Sequence
  Synthetic oligonucleotide
ttacgtaggaaacagtgttcttgctgaaac

SEQ ID NO: 375829 - DNA, 30 bp, Artificial Sequence
  Synthetic oligonucleotide
agtgcacgggcggttcacattcagtgaaac

SEQ ID NO: 375830 - DNA, 30 bp, Artificial Sequence
  Synthetic oligonucleotide
cagcgtgtctatctatgcagtgtgtgaaac

SEQ ID NO: 375831 - DNA, 30 bp, Artificial Sequence
  Synthetic oligonucleotide
taattaacctgcaggtaacaggaaataaac

SEQ ID NO: 375832 - DNA, 30 bp, Artificial Sequence
  Synthetic oligonucleotide
gggtcgcccgaaaagggctaaacaataaac

SEQ ID NO: 375833 - DNA, 30 bp, Artificial Sequence
  Synthetic oligonucleotide
atgaagattgcaatgatggtacgaataaac

SEQ ID NO: 375834 - DNA, 30 bp, Artificial Sequence
  Synthetic oligonucleotide
ggcaagcgtctttctgaggaaataataaac

SEQ ID NO: 375835 - DNA, 30 bp, Artificial Sequence
  Synthetic oligonucleotide
tggcgttaatgcatttgatattccataaac

SEQ ID NO: 375836 - DNA, 30 bp, Artificial Sequence
  Synthetic oligonucleotide
gtctgttaatagttttatggtggcataaac

SEQ ID NO: 375837 - DNA, 30 bp, Artificial Sequence
  Synthetic oligonucleotide
tagaactcctgtggtacgctaatcataaac

SEQ ID NO: 375838 - DNA, 30 bp, Artificial Sequence
  Synthetic oligonucleotide
caagattcgtaatctcaggcagagataaac

SEQ ID NO: 375839 - DNA, 30 bp, Artificial Sequence
  Synthetic oligonucleotide
gaacacactgtcggtgtcctcacgataaac

SEQ ID NO: 375840 - DNA, 30 bp, Artificial Sequence
  Synthetic oligonucleotide
tccatgaaactggttctcgcacggataaac

SEQ ID NO: 375841 - DNA, 30 bp, Artificial Sequence
  Synthetic oligonucleotide
ttgatctgtttaaggcccggtcatataaac

SEQ ID NO: 375842 - DNA, 30 bp, Artificial Sequence
  Synthetic oligonucleotide
ggaatcggcactttgatgcttgatataaac

SEQ ID NO: 375843 - DNA, 30 bp, Artificial Sequence
  Synthetic oligonucleotide
gttgatcttgatgttaaagataatctaaac

SEQ ID NO: 375844 - DNA, 30 bp, Artificial Sequence
  Synthetic oligonucleotide
gttttgcgctggtggagtggctatctaaac

SEQ ID NO: 375845 - DNA, 30 bp, Artificial Sequence
  Synthetic oligonucleotide
gggtgttgggatggcactgcgtgtctaaac

SEQ ID NO: 375846 - DNA, 30 bp, Artificial Sequence
  Synthetic oligonucleotide
caccggcggcccgtgaccatgccagtaaac

SEQ ID NO: 375847 - DNA, 30 bp, Artificial Sequence
  Synthetic oligonucleotide
gttatggaaaacatccgaacgtacgtaaac

SEQ ID NO: 375848 - DNA, 30 bp, Artificial Sequence
  Synthetic oligonucleotide
catgcagcgcggcgctggagagccgtaaac

SEQ ID NO: 375849 - DNA, 30 bp, Artificial Sequence
  Synthetic oligonucleotide
gtactacctggaaggtttcctgaggtaaac

SEQ ID NO: 375850 - DNA, 30 bp, Artificial Sequence
  Synthetic oligonucleotide
cccccggcatgttgcgtctctaatgtaaac

SEQ ID NO: 375851 - DNA, 30 bp, Artificial Sequence
  Synthetic oligonucleotide
ggtgcctttgggttgtccgacgctgtaaac

SEQ ID NO: 375852 - DNA, 30 bp, Artificial Sequence
  Synthetic oligonucleotide
accaagatctcccacctctgggctgtaaac

SEQ ID NO: 375853 - DNA, 30 bp, Artificial Sequence
  Synthetic oligonucleotide
caccaacctgttcgtcaaccatctgtaaac

SEQ ID NO: 375854 - DNA, 30 bp, Artificial Sequence
  Synthetic oligonucleotide
gtctcactatttctaatgagacgtgtaaac

SEQ ID NO: 375855 - DNA, 30 bp, Artificial Sequence
  Synthetic oligonucleotide
catttgtggttgccccagaaacttgtaaac

SEQ ID NO: 375856 - DNA, 30 bp, Artificial Sequence
  Synthetic oligonucleotide
gtcccgggcaggcatgccttttttgtaaac

SEQ ID NO: 375857 - DNA, 30 bp, Artificial Sequence
  Synthetic oligonucleotide
agggaataattatttccattccaattaaac

SEQ ID NO: 375858 - DNA, 30 bp, Artificial Sequence
  Synthetic oligonucleotide
tggatgggctgtttagggctggaattaaac

SEQ ID NO: 375859 - DNA, 30 bp, Artificial Sequence
  Synthetic oligonucleotide
ttacagcgcaatcgttgaggaacattaaac

SEQ ID NO: 375860 - DNA, 31 bp, Artificial Sequence
  Synthetic oligonucleotide
gagaggcccggggtgcaaagatgcattaaac

SEQ ID NO: 375861 - DNA, 30 bp, Artificial Sequence
  Synthetic oligonucleotide
gggtgtactactatacagttgcccttaaac

SEQ ID NO: 375862 - DNA, 30 bp, Artificial Sequence
  Synthetic oligonucleotide
cttggataatcgaaacaaatcaagttaaac

SEQ ID NO: 375863 - DNA, 30 bp, Artificial Sequence
  Synthetic oligonucleotide
ttccgtaagataaaatgcgtagcgttaaac

SEQ ID NO: 375864 - DNA, 30 bp, Artificial Sequence
  Synthetic oligonucleotide
tggatattgctacaggatcgtaggttaaac

SEQ ID NO: 375865 - DNA, 30 bp, Artificial Sequence
  Synthetic oligonucleotide
caagaaacacctctcatgtgcgggttaaac

SEQ ID NO: 375866 - DNA, 30 bp, Artificial Sequence
  Synthetic oligonucleotide
gcgcagataactgcttttttctctttaaac

SEQ ID NO: 375867 - DNA, 30 bp, Artificial Sequence
  Synthetic oligonucleotide
tgggtaaggtggtcagtatgagttttaaac

SEQ ID NO: 375868 - DNA, 30 bp, Artificial Sequence
  Synthetic oligonucleotide
gtgcatctttcatatctatttagaaacaac

SEQ ID NO: 375869 - DNA, 30 bp, Artificial Sequence
  Synthetic oligonucleotide
agtctaaacgttcggtgcccgcgaaacaac

SEQ ID NO: 375870 - DNA, 30 bp, Artificial Sequence
  Synthetic oligonucleotide
taccctcagccagcactgagcgccaacaac

SEQ ID NO: 375871 - DNA, 30 bp, Artificial Sequence
  Synthetic oligonucleotide
agactttgagcttgtatgggtgtcaacaac

SEQ ID NO: 375872 - DNA, 30 bp, Artificial Sequence
  Synthetic oligonucleotide
atattacatggttcgacgggttataacaac

SEQ ID NO: 375873 - DNA, 30 bp, Artificial Sequence
  Synthetic oligonucleotide
ggagtacccgtgtgttaactaactaacaac

SEQ ID NO: 375874 - DNA, 30 bp, Artificial Sequence
  Synthetic oligonucleotide
agaaactctgcttcttaagccccacacaac

SEQ ID NO: 375875 - DNA, 30 bp, Artificial Sequence
  Synthetic oligonucleotide
gcaacgtccaacgttggtcttcggcacaac

SEQ ID NO: 375876 - DNA, 30 bp, Artificial Sequence
  Synthetic oligonucleotide
cgtatctctctgatttgtttatgtcacaac

SEQ ID NO: 375877 - DNA, 30 bp, Artificial Sequence
  Synthetic oligonucleotide
ctcggcagcggttgaattgagtaagacaac

SEQ ID NO: 375878 - DNA, 30 bp, Artificial Sequence
  Synthetic oligonucleotide
gcaccactgacgtgtttggtgccatacaac

SEQ ID NO: 375879 - DNA, 30 bp, Artificial Sequence
  Synthetic oligonucleotide
ggattaaatcagaggggaactccctacaac

SEQ ID NO: 375880 - DNA, 30 bp, Artificial Sequence
  Synthetic oligonucleotide
ttgtcctctgcgccgaaccgtaagtacaac

SEQ ID NO: 375881 - DNA, 30 bp, Artificial Sequence
  Synthetic oligonucleotide
tacgcagatgcttctgggctatggtacaac

SEQ ID NO: 375882 - DNA, 30 bp, Artificial Sequence
  Synthetic oligonucleotide
gccccagttatgagtacttagcgttacaac

SEQ ID NO: 375883 - DNA, 30 bp, Artificial Sequence
  Synthetic oligonucleotide
ccagaagcactactgttcatttcaaccaac

SEQ ID NO: 375884 - DNA, 30 bp, Artificial Sequence
  Synthetic oligonucleotide
aagaggtcaagctcccgtgcggccaccaac

SEQ ID NO: 375885 - DNA, 30 bp, Artificial Sequence
  Synthetic oligonucleotide
tgctagctgcgtgttctacggattaccaac

SEQ ID NO: 375886 - DNA, 30 bp, Artificial Sequence
  Synthetic oligonucleotide
ctgcctatgatatgaggtgttagccccaac

SEQ ID NO: 375887 - DNA, 30 bp, Artificial Sequence
  Synthetic oligonucleotide
cactcgtcgtatcaccacaagaagcccaac

SEQ ID NO: 375888 - DNA, 30 bp, Artificial Sequence
  Synthetic oligonucleotide
gaagttgcactcaagtccgcggtagccaac

SEQ ID NO: 375889 - DNA, 30 bp, Artificial Sequence
  Synthetic oligonucleotide
gtctcgacgggggagcgcggtggggccaac

SEQ ID NO: 375890 - DNA, 30 bp, Artificial Sequence
  Synthetic oligonucleotide
cagatccggctattctgagccggtgccaac

SEQ ID NO: 375891 - DNA, 30 bp, Artificial Sequence
  Synthetic oligonucleotide
atgtctaccatgcagccgaaaaaatccaac

SEQ ID NO: 375892 - DNA, 30 bp, Artificial Sequence
  Synthetic oligonucleotide
aaagtccgctaggacaacctccgatccaac

SEQ ID NO: 375893 - DNA, 30 bp, Artificial Sequence
  Synthetic oligonucleotide
tagttgtagggcaggaacggtatatccaac

SEQ ID NO: 375894 - DNA, 30 bp, Artificial Sequence
  Synthetic oligonucleotide
agaggagatcgggcaaccagtttatccaac

SEQ ID NO: 375895 - DNA, 30 bp, Artificial Sequence
  Synthetic oligonucleotide
cttcggtgtagggctaaaggtaactccaac

SEQ ID NO: 375896 - DNA, 30 bp, Artificial Sequence
  Synthetic oligonucleotide
tagggctatgagagtcctctaaagtccaac

SEQ ID NO: 375897 - DNA, 30 bp, Artificial Sequence
  Synthetic oligonucleotide
ccatccataccgggcgcctccgattccaac

SEQ ID NO: 375898 - DNA, 30 bp, Artificial Sequence
  Synthetic oligonucleotide
cgtcgccatatgtccactgaggacagcaac

SEQ ID NO: 375899 - DNA, 30 bp, Artificial Sequence
  Synthetic oligonucleotide
tcttatccctaaactgcgtggtacagcaac

SEQ ID NO: 375900 - DNA, 30 bp, Artificial Sequence
  Synthetic oligonucleotide
taggaggtaaaggaggttgctctcagcaac

SEQ ID NO: 375901 - DNA, 30 bp, Artificial Sequence
  Synthetic oligonucleotide
gtacttgtgtgtctatcaatacagagcaac

SEQ ID NO: 375902 - DNA, 30 bp, Artificial Sequence
  Synthetic oligonucleotide
atgttcagctatcgtgtaacgttgagcaac

SEQ ID NO: 375903 - DNA, 28 bp, Artificial Sequence
  Synthetic oligonucleotide
gacaagagattgctctattgctagcaac

SEQ ID NO: 375904 - DNA, 30 bp, Artificial Sequence
  Synthetic oligonucleotide
ccaatccatgggtacgccggttctagcaac

SEQ ID NO: 375905 - DNA, 30 bp, Artificial Sequence
  Synthetic oligonucleotide
ttgtagtagtatatatctccgaaacgcaac

SEQ ID NO: 375906 - DNA, 30 bp, Artificial Sequence
  Synthetic oligonucleotide
ctttgtggtaccggtcgcgcgagacgcaac

SEQ ID NO: 375907 - DNA, 30 bp, Artificial Sequence
  Synthetic oligonucleotide
gtcaagtgagcatgttatggaaaccgcaac

SEQ ID NO: 375908 - DNA, 30 bp, Artificial Sequence
  Synthetic oligonucleotide
ccacgtgtaatccctttgttcccccgcaac

SEQ ID NO: 375909 - DNA, 30 bp, Artificial Sequence
  Synthetic oligonucleotide
tcctacgccccctactggatgaagcgcaac

SEQ ID NO: 375910 - DNA, 30 bp, Artificial Sequence
  Synthetic oligonucleotide
agcgctcctagccttctgggaattcgcaac

SEQ ID NO: 375911 - DNA, 30 bp, Artificial Sequence
  Synthetic oligonucleotide
agaagcacgttacacatgtgtcaaggcaac

SEQ ID NO: 375912 - DNA, 30 bp, Artificial Sequence
  Synthetic oligonucleotide
acgcgccttttgatatcatcagcaggcaac

SEQ ID NO: 375913 - DNA, 30 bp, Artificial Sequence
  Synthetic oligonucleotide
agcattacttgacgtgtatccggaggcaac

SEQ ID NO: 375914 - DNA, 30 bp, Artificial Sequence
  Synthetic oligonucleotide
acggattgagcccttgtcctcgccggcaac

SEQ ID NO: 375915 - DNA, 30 bp, Artificial Sequence
  Synthetic oligonucleotide
tactagttcatacacatgcatggcggcaac

SEQ ID NO: 375916 - DNA, 30 bp, Artificial Sequence
  Synthetic oligonucleotide
agcattatctccgctcatactggcggcaac

SEQ ID NO: 375917 - DNA, 30 bp, Artificial Sequence
  Synthetic oligonucleotide
ggggtataaatcaaggggtgttatggcaac

SEQ ID NO: 375918 - DNA, 30 bp, Artificial Sequence
  Synthetic oligonucleotide
cgttcagccgtagcctctgaacttggcaac

SEQ ID NO: 375919 - DNA, 30 bp, Artificial Sequence
  Synthetic oligonucleotide
cttaggatatgagcaggtgccaaatgcaac

SEQ ID NO: 375920 - DNA, 30 bp, Artificial Sequence
  Synthetic oligonucleotide
aacggccattctgtgtccgataaatgcaac

SEQ ID NO: 375921 - DNA, 30 bp, Artificial Sequence
  Synthetic oligonucleotide
gtctattgagggggcaacgttaaatgcaac

SEQ ID NO: 375922 - DNA, 30 bp, Artificial Sequence
  Synthetic oligonucleotide
atcatggggtcggcttctcagagatgcaac

SEQ ID NO: 375923 - DNA, 30 bp, Artificial Sequence
  Synthetic oligonucleotide
cattcgtggacctggttcttcaaaatcaac

SEQ ID NO: 375924 - DNA, 30 bp, Artificial Sequence
  Synthetic oligonucleotide
ccagcgtgggtcgctggggccgctatcaac

SEQ ID NO: 375925 - DNA, 30 bp, Artificial Sequence
  Synthetic oligonucleotide
ctacttaagggcgtgctaaccattatcaac

SEQ ID NO: 375926 - DNA, 30 bp, Artificial Sequence
  Synthetic oligonucleotide
cgccagcattggaccgaaggtagactcaac

SEQ ID NO: 375927 - DNA, 30 bp, Artificial Sequence
  Synthetic oligonucleotide
tgtgtttcgtcataccctctttgactcaac

SEQ ID NO: 375928 - DNA, 30 bp, Artificial Sequence
  Synthetic oligonucleotide
gtttaggatacacggggcatggccctcaac

SEQ ID NO: 375929 - DNA, 30 bp, Artificial Sequence
  Synthetic oligonucleotide
agggaacacataagttcatgggcgctcaac

SEQ ID NO: 375930 - DNA, 30 bp, Artificial Sequence
  Synthetic oligonucleotide
aatccacaccacgcttccctggcgctcaac

SEQ ID NO: 375931 - DNA, 30 bp, Artificial Sequence
  Synthetic oligonucleotide
ggaactagaaacctttcatttagagtcaac

SEQ ID NO: 375932 - DNA, 30 bp, Artificial Sequence
  Synthetic oligonucleotide
tgggaagatgctttccctatatgagtcaac

SEQ ID NO: 375933 - DNA, 30 bp, Artificial Sequence
  Synthetic oligonucleotide
ttgtctccatcctcgcccgggcacgtcaac

SEQ ID NO: 375934 - DNA, 30 bp, Artificial Sequence
  Synthetic oligonucleotide
aagtagggcccccgggaaccgagggtcaac

SEQ ID NO: 375935 - DNA, 30 bp, Artificial Sequence
  Synthetic oligonucleotide
aatgcgcggagcccgtatcgaagattcaac

SEQ ID NO: 375936 - DNA, 30 bp, Artificial Sequence
  Synthetic oligonucleotide
acagtctgattgcggatctccatattcaac

SEQ ID NO: 375937 - DNA, 30 bp, Artificial Sequence
  Synthetic oligonucleotide
agactattcaccggcttcgactgcttcaac

SEQ ID NO: 375938 - DNA, 30 bp, Artificial Sequence
  Synthetic oligonucleotide
actgctcacgcgaccatgccagagttcaac

SEQ ID NO: 375939 - DNA, 30 bp, Artificial Sequence
  Synthetic oligonucleotide
acctaccacgctgctccattactgttcaac

SEQ ID NO: 375940 - DNA, 30 bp, Artificial Sequence
  Synthetic oligonucleotide
accacggatgggtacacgcgagtgttcaac

SEQ ID NO: 375941 - DNA, 30 bp, Artificial Sequence
  Synthetic oligonucleotide
gtgcagcgtacgacaagagatttgttcaac

SEQ ID NO: 375942 - DNA, 30 bp, Artificial Sequence
  Synthetic oligonucleotide
gtctaccgtttggaagggcaaaatttcaac

SEQ ID NO: 375943 - DNA, 30 bp, Artificial Sequence
  Synthetic oligonucleotide
atgtgtacctaaatcagtttgtatttcaac

SEQ ID NO: 375944 - DNA, 30 bp, Artificial Sequence
  Synthetic oligonucleotide
tcgtctaactaggacatacttattttcaac

SEQ ID NO: 375945 - DNA, 30 bp, Artificial Sequence
  Synthetic oligonucleotide
agacgagcccaacctatgacgtttttcaac

SEQ ID NO: 375946 - DNA, 30 bp, Artificial Sequence
  Synthetic oligonucleotide
ctctcaaaacacttgtgcttagcaaagaac

SEQ ID NO: 375947 - DNA, 30 bp, Artificial Sequence
  Synthetic oligonucleotide
agataggactttgcatgtcattgaaagaac

SEQ ID NO: 375948 - DNA, 31 bp, Artificial Sequence
  Synthetic oligonucleotide
cactcactgctaggtgcgtcttttaaagaac

SEQ ID NO: 375949 - DNA, 30 bp, Artificial Sequence
  Synthetic oligonucleotide
tgtatgagttaatccggcaacggcaagaac

SEQ ID NO: 375950 - DNA, 30 bp, Artificial Sequence
  Synthetic oligonucleotide
cgttctatgtggcttggtattttcaagaac

SEQ ID NO: 375951 - DNA, 30 bp, Artificial Sequence
  Synthetic oligonucleotide
ctgtccctgaatggcggcatcccgaagaac

SEQ ID NO: 375952 - DNA, 30 bp, Artificial Sequence
  Synthetic oligonucleotide
gctaacagcttagagtcgctgtataagaac

SEQ ID NO: 375953 - DNA, 30 bp, Artificial Sequence
  Synthetic oligonucleotide
caacttctcgcataatgactaagacagaac

SEQ ID NO: 375954 - DNA, 30 bp, Artificial Sequence
  Synthetic oligonucleotide
ttcacccttgagtagcataccctacagaac

SEQ ID NO: 375955 - DNA, 30 bp, Artificial Sequence
  Synthetic oligonucleotide
cagaggttgttagacccctaacgccagaac

SEQ ID NO: 375956 - DNA, 30 bp, Artificial Sequence
  Synthetic oligonucleotide
tcagtagaatgagggccccgactgcagaac

SEQ ID NO: 375957 - DNA, 30 bp, Artificial Sequence
  Synthetic oligonucleotide
atttttgaagaacgcgaattaccagagaac

SEQ ID NO: 375958 - DNA, 30 bp, Artificial Sequence
  Synthetic oligonucleotide
ttcccaactagttttattgcctgagagaac

SEQ ID NO: 375959 - DNA, 30 bp, Artificial Sequence
  Synthetic oligonucleotide
atgccggtgtccatagccggtcacgagaac

SEQ ID NO: 375960 - DNA, 30 bp, Artificial Sequence
  Synthetic oligonucleotide
ttgacttattgcggattgggtcccgagaac

SEQ ID NO: 375961 - DNA, 30 bp, Artificial Sequence
  Synthetic oligonucleotide
gaggtagcctggggccacagagcggagaac

SEQ ID NO: 375962 - DNA, 30 bp, Artificial Sequence
  Synthetic oligonucleotide
gctctggctacgcgacccggtttggagaac

SEQ ID NO: 375963 - DNA, 30 bp, Artificial Sequence
  Synthetic oligonucleotide
agcgttcatgaagacaggttccctgagaac

SEQ ID NO: 375964 - DNA, 30 bp, Artificial Sequence
  Synthetic oligonucleotide
gtagccgaacacgttgtgtatcaatagaac

SEQ ID NO: 375965 - DNA, 30 bp, Artificial Sequence
  Synthetic oligonucleotide
atttggtagattataaacgagacatagaac

SEQ ID NO: 375966 - DNA, 30 bp, Artificial Sequence
  Synthetic oligonucleotide
agagatttgtgtgagatattcatatagaac

SEQ ID NO: 375967 - DNA, 30 bp, Artificial Sequence
  Synthetic oligonucleotide
gataccgagctcacgcactttgactagaac

SEQ ID NO: 375968 - DNA, 30 bp, Artificial Sequence
  Synthetic oligonucleotide
cctgatgagtagtcaatgaaactgtagaac

SEQ ID NO: 375969 - DNA, 30 bp, Artificial Sequence
  Synthetic oligonucleotide
gtatgggcttgacgtaacagaaattagaac

SEQ ID NO: 375970 - DNA, 30 bp, Artificial Sequence
  Synthetic oligonucleotide
ctgggctaaagccaagtgtggtattagaac

SEQ ID NO: 375971 - DNA, 30 bp, Artificial Sequence
  Synthetic oligonucleotide
ttaggattaaggatgtccctttcttagaac

SEQ ID NO: 375972 - DNA, 30 bp, Artificial Sequence
  Synthetic oligonucleotide
aaggcattcttatatcccatgcgttagaac

SEQ ID NO: 375973 - DNA, 30 bp, Artificial Sequence
  Synthetic oligonucleotide
tggaaatttagccatatgttgctttagaac

SEQ ID NO: 375974 - DNA, 30 bp, Artificial Sequence
  Synthetic oligonucleotide
aaaagatcgtcaatgtgggctcccacgaac

SEQ ID NO: 375975 - DNA, 30 bp, Artificial Sequence
  Synthetic oligonucleotide
aagaaaatatattctactggtcgcacgaac

SEQ ID NO: 375976 - DNA, 30 bp, Artificial Sequence
  Synthetic oligonucleotide
gcctatgggtgtccattataaccgacgaac

SEQ ID NO: 375977 - DNA, 30 bp, Artificial Sequence
  Synthetic oligonucleotide
aataaggaaaatatcttggggtcgacgaac

SEQ ID NO: 375978 - DNA, 30 bp, Artificial Sequence
  Synthetic oligonucleotide
cctctaagcaccggtcgcgtccctacgaac

SEQ ID NO: 375979 - DNA, 30 bp, Artificial Sequence
  Synthetic oligonucleotide
tcggctcggcctattctatcaagtacgaac

SEQ ID NO: 375980 - DNA, 30 bp, Artificial Sequence
  Synthetic oligonucleotide
aacaatgtagggctgtgaatttgtacgaac

SEQ ID NO: 375981 - DNA, 30 bp, Artificial Sequence
  Synthetic oligonucleotide
gtctactatcgatagccaggctagccgaac

SEQ ID NO: 375982 - DNA, 30 bp, Artificial Sequence
  Synthetic oligonucleotide
cgggcggccaggaggccaattcctccgaac

SEQ ID NO: 375983 - DNA, 30 bp, Artificial Sequence
  Synthetic oligonucleotide
gcttgacaggttggtatgagagcagcgaac

SEQ ID NO: 375984 - DNA, 30 bp, Artificial Sequence
  Synthetic oligonucleotide
ggccagggttactataaacgcttagcgaac

SEQ ID NO: 375985 - DNA, 30 bp, Artificial Sequence
  Synthetic oligonucleotide
cacggaaccttccgtcggttggacgcgaac

SEQ ID NO: 375986 - DNA, 30 bp, Artificial Sequence
  Synthetic oligonucleotide
actagatctatggtgaattcgatcgcgaac

SEQ ID NO: 375987 - DNA, 30 bp, Artificial Sequence
  Synthetic oligonucleotide
gcttaattttagtatatccccccggcgaac

SEQ ID NO: 375988 - DNA, 30 bp, Artificial Sequence
  Synthetic oligonucleotide
agcctcgtcaaatcaccaaatttggcgaac

SEQ ID NO: 375989 - DNA, 30 bp, Artificial Sequence
  Synthetic oligonucleotide
gatggaggcgaggggccttgttctgcgaac

SEQ ID NO: 375990 - DNA, 30 bp, Artificial Sequence
  Synthetic oligonucleotide
aggatctattagccaatggtaaaatcgaac

SEQ ID NO: 375991 - DNA, 30 bp, Artificial Sequence
  Synthetic oligonucleotide
gaccctttcaacgcgtggaaaccatcgaac

SEQ ID NO: 375992 - DNA, 30 bp, Artificial Sequence
  Synthetic oligonucleotide
gctctactaagagtcgtaatttcatcgaac

SEQ ID NO: 375993 - DNA, 30 bp, Artificial Sequence
  Synthetic oligonucleotide
gctagcgaattcagcaactcgaactcgaac

SEQ ID NO: 375994 - DNA, 30 bp, Artificial Sequence
  Synthetic oligonucleotide
attagtcattaatgtatcgtatcttcgaac

SEQ ID NO: 375995 - DNA, 30 bp, Artificial Sequence
  Synthetic oligonucleotide
ttagtaactcgacacgtgggtttttcgaac

SEQ ID NO: 375996 - DNA, 30 bp, Artificial Sequence
  Synthetic oligonucleotide
gggtgtcccgttggcttatattaaaggaac

SEQ ID NO: 375997 - DNA, 30 bp, Artificial Sequence
  Synthetic oligonucleotide
acatggcgaactcgttagacgggcaggaac

SEQ ID NO: 375998 - DNA, 30 bp, Artificial Sequence
  Synthetic oligonucleotide
tacgggtcggtctgtggagttgtcaggaac

SEQ ID NO: 375999 - DNA, 30 bp, Artificial Sequence
  Synthetic oligonucleotide
agtcactttgggagagtacgaatgaggaac

SEQ ID NO: 376000 - DNA, 30 bp, Artificial Sequence
  Synthetic oligonucleotide
cactgcccgccagagtgtgtgatgaggaac

SEQ ID NO: 376001 - DNA, 30 bp, Artificial Sequence
  Synthetic oligonucleotide
aaatggtaggctatgtaaagtgagcggaac

SEQ ID NO: 376002 - DNA, 30 bp, Artificial Sequence
  Synthetic oligonucleotide
aagtcacagttagagctgactacgcggaac

SEQ ID NO: 376003 - DNA, 30 bp, Artificial Sequence
  Synthetic oligonucleotide
aaagaatgctagtactttttaaggcggaac

SEQ ID NO: 376004 - DNA, 30 bp, Artificial Sequence
  Synthetic oligonucleotide
gtcgatcaactagccactatatggcggaac

SEQ ID NO: 376005 - DNA, 30 bp, Artificial Sequence
  Synthetic oligonucleotide
aaaccgaaatggatggtatattcagggaac

SEQ ID NO: 376006 - DNA, 30 bp, Artificial Sequence
  Synthetic oligonucleotide
ctttcttctctattggcggaaagagggaac

SEQ ID NO: 376007 - DNA, 30 bp, Artificial Sequence
  Synthetic oligonucleotide
ataaatcgttgtcccgttcgtcacgggaac

SEQ ID NO: 376008 - DNA, 30 bp, Artificial Sequence
  Synthetic oligonucleotide
gtcgcttttgcaaaacgattgcccgggaac

SEQ ID NO: 376009 - DNA, 30 bp, Artificial Sequence
  Synthetic oligonucleotide
ggataaaggccggtccgttcactcgggaac

SEQ ID NO: 376010 - DNA, 30 bp, Artificial Sequence
  Synthetic oligonucleotide
cttatgaatgctgaggtcgagaaggggaac

SEQ ID NO: 376011 - DNA, 30 bp, Artificial Sequence
  Synthetic oligonucleotide
tagcaattcacacgattgtattcggggaac

SEQ ID NO: 376012 - DNA, 30 bp, Artificial Sequence
  Synthetic oligonucleotide
cacgattaatcaaagttcgacagggggaac

SEQ ID NO: 376013 - DNA, 30 bp, Artificial Sequence
  Synthetic oligonucleotide
tccctggtggggttaacggcaggggggaac

SEQ ID NO: 376014 - DNA, 30 bp, Artificial Sequence
  Synthetic oligonucleotide
ccgtccctcaaaatctacgaatgggggaac

SEQ ID NO: 376015 - DNA, 30 bp, Artificial Sequence
  Synthetic oligonucleotide
aagccggtctgggcccgttaagatgggaac

SEQ ID NO: 376016 - DNA, 30 bp, Artificial Sequence
  Synthetic oligonucleotide
taaagtgttgaatcagtgaatgctgggaac

SEQ ID NO: 376017 - DNA, 30 bp, Artificial Sequence
  Synthetic oligonucleotide
atcgggctatatagttacttagtatggaac

SEQ ID NO: 376018 - DNA, 30 bp, Artificial Sequence
  Synthetic oligonucleotide
agtcacgtgtctttccctccgcactggaac

SEQ ID NO: 376019 - DNA, 30 bp, Artificial Sequence
  Synthetic oligonucleotide
agacagttgagagcatatctgtcctggaac

SEQ ID NO: 376020 - DNA, 30 bp, Artificial Sequence
  Synthetic oligonucleotide
taacgattcaatcactttccgagttggaac

SEQ ID NO: 376021 - DNA, 30 bp, Artificial Sequence
  Synthetic oligonucleotide
acagtatagtctagcagcccagtttggaac

SEQ ID NO: 376022 - DNA, 30 bp, Artificial Sequence
  Synthetic oligonucleotide
tgcctgaagcttcacccgtgccacatgaac

SEQ ID NO: 376023 - DNA, 30 bp, Artificial Sequence
  Synthetic oligonucleotide
gacctgttgggtgaaggattccccatgaac

SEQ ID NO: 376024 - DNA, 30 bp, Artificial Sequence
  Synthetic oligonucleotide
agactcatgtttatcattgaaagcatgaac

SEQ ID NO: 376025 - DNA, 30 bp, Artificial Sequence
  Synthetic oligonucleotide
tgtaataaggctcggtctttggtcatgaac

SEQ ID NO: 376026 - DNA, 30 bp, Artificial Sequence
  Synthetic oligonucleotide
gcggagttgccaacgcgcactttcatgaac

SEQ ID NO: 376027 - DNA, 30 bp, Artificial Sequence
  Synthetic oligonucleotide
ctgcagggctccttcatctacgcgatgaac

SEQ ID NO: 376028 - DNA, 30 bp, Artificial Sequence
  Synthetic oligonucleotide
acacgtctgttttaggtgacgtgtatgaac

SEQ ID NO: 376029 - DNA, 30 bp, Artificial Sequence
  Synthetic oligonucleotide
ggttgtctacaataggttctaaaactgaac

SEQ ID NO: 376030 - DNA, 30 bp, Artificial Sequence
  Synthetic oligonucleotide
tatgtgacgagaaatccatggtaactgaac

SEQ ID NO: 376031 - DNA, 30 bp, Artificial Sequence
  Synthetic oligonucleotide
atgacttagagctctcttagcaccctgaac

SEQ ID NO: 376032 - DNA, 26 bp, Artificial Sequence
  Synthetic oligonucleotide
ggattatatatctaggcaccctgaac

SEQ ID NO: 376033 - DNA, 30 bp, Artificial Sequence
  Synthetic oligonucleotide
aatcatatcaacagagtgcataggctgaac

SEQ ID NO: 376034 - DNA, 30 bp, Artificial Sequence
  Synthetic oligonucleotide
gcgttcatacccaagggtcttaggctgaac

SEQ ID NO: 376035 - DNA, 30 bp, Artificial Sequence
  Synthetic oligonucleotide
caatctcaggttagggttaccgttctgaac

SEQ ID NO: 376036 - DNA, 30 bp, Artificial Sequence
  Synthetic oligonucleotide
agttaattgctatccgaaccttaagtgaac

SEQ ID NO: 376037 - DNA, 30 bp, Artificial Sequence
  Synthetic oligonucleotide
agttttggatagtttaacagtgccgtgaac

SEQ ID NO: 376038 - DNA, 30 bp, Artificial Sequence
  Synthetic oligonucleotide
gactggcttcaacatgaggcacgcgtgaac

SEQ ID NO: 376039 - DNA, 30 bp, Artificial Sequence
  Synthetic oligonucleotide
agtaagccttggtttacggcgtatgtgaac

SEQ ID NO: 376040 - DNA, 30 bp, Artificial Sequence
  Synthetic oligonucleotide
gcctcagggggaaccatgtcgactgtgaac

SEQ ID NO: 376041 - DNA, 30 bp, Artificial Sequence
  Synthetic oligonucleotide
cgagactcacgactattagtgagtgtgaac

SEQ ID NO: 376042 - DNA, 30 bp, Artificial Sequence
  Synthetic oligonucleotide
tgcgcaggtaggcgttctaggtaattgaac

SEQ ID NO: 376043 - DNA, 30 bp, Artificial Sequence
  Synthetic oligonucleotide
catctattcggttctcggatgaagttgaac

SEQ ID NO: 376044 - DNA, 30 bp, Artificial Sequence
  Synthetic oligonucleotide
tacattggtctagactgatagtcgttgaac

SEQ ID NO: 376045 - DNA, 30 bp, Artificial Sequence
  Synthetic oligonucleotide
atacaccatgtttcatacgggtcgttgaac

SEQ ID NO: 376046 - DNA, 30 bp, Artificial Sequence
  Synthetic oligonucleotide
atcaaaggcgccatctctgagtatttgaac

SEQ ID NO: 376047 - DNA, 30 bp, Artificial Sequence
  Synthetic oligonucleotide
tgcaccgctctttgccgtatccgtttgaac

SEQ ID NO: 376048 - DNA, 30 bp, Artificial Sequence
  Synthetic oligonucleotide
ttgcggagagctaaattgtctattttgaac

SEQ ID NO: 376049 - DNA, 30 bp, Artificial Sequence
  Synthetic oligonucleotide
acgtggttgctgcagtcggaatttttgaac

SEQ ID NO: 376050 - DNA, 30 bp, Artificial Sequence
  Synthetic oligonucleotide
gtgcaattagcttacgatctataaaataac

SEQ ID NO: 376051 - DNA, 30 bp, Artificial Sequence
  Synthetic oligonucleotide
ctcgatcagaggttattcaacgcaaataac

SEQ ID NO: 376052 - DNA, 30 bp, Artificial Sequence
  Synthetic oligonucleotide
acctatggattggattggaccggaaataac

SEQ ID NO: 376053 - DNA, 30 bp, Artificial Sequence
  Synthetic oligonucleotide
agctgccgggtgataacagcatgaaataac

SEQ ID NO: 376054 - DNA, 30 bp, Artificial Sequence
  Synthetic oligonucleotide
acagcagaaactgaagcactagtaaataac

SEQ ID NO: 376055 - DNA, 30 bp, Artificial Sequence
  Synthetic oligonucleotide
aagttaccgccgccgtgcttgtgcaataac

SEQ ID NO: 376056 - DNA, 30 bp, Artificial Sequence
  Synthetic oligonucleotide
atcatccggggaccccccgtaatcaataac

SEQ ID NO: 376057 - DNA, 30 bp, Artificial Sequence
  Synthetic oligonucleotide
gttagtccgtaagtacagggtcagaataac

SEQ ID NO: 376058 - DNA, 30 bp, Artificial Sequence
  Synthetic oligonucleotide
agtggatcttggcactgccatgagaataac

SEQ ID NO: 376059 - DNA, 30 bp, Artificial Sequence
  Synthetic oligonucleotide
ggaataatttaggggacatcctggaataac

SEQ ID NO: 376060 - DNA, 30 bp, Artificial Sequence
  Synthetic oligonucleotide
ctggtgtgatcctaagattttatgaataac

SEQ ID NO: 376061 - DNA, 30 bp, Artificial Sequence
  Synthetic oligonucleotide
gtgcttacgccctaacgtttgctgaataac

SEQ ID NO: 376062 - DNA, 30 bp, Artificial Sequence
  Synthetic oligonucleotide
cgctacttcgggacagtcgttcctaataac

SEQ ID NO: 376063 - DNA, 30 bp, Artificial Sequence
  Synthetic oligonucleotide
gtctgttgtgacggaactggtaagcataac

SEQ ID NO: 376064 - DNA, 30 bp, Artificial Sequence
  Synthetic oligonucleotide
ctgagtaatgagtacgaatcaatgcataac

SEQ ID NO: 376065 - DNA, 30 bp, Artificial Sequence
  Synthetic oligonucleotide
caattgaccctatatatctcccatcataac

SEQ ID NO: 376066 - DNA, 30 bp, Artificial Sequence
  Synthetic oligonucleotide
ctcgaggatatgggttaatatcgtcataac

SEQ ID NO: 376067 - DNA, 30 bp, Artificial Sequence
  Synthetic oligonucleotide
gtactatgttacttaggaggtgttcataac

SEQ ID NO: 376068 - DNA, 30 bp, Artificial Sequence
  Synthetic oligonucleotide
ttcaagtcgatccctgttctgaacgataac

SEQ ID NO: 376069 - DNA, 30 bp, Artificial Sequence
  Synthetic oligonucleotide
ggagtcgaacaacaacggcggagcgataac

SEQ ID NO: 376070 - DNA, 30 bp, Artificial Sequence
  Synthetic oligonucleotide
attagggattcacaggtttatcatgataac

SEQ ID NO: 376071 - DNA, 30 bp, Artificial Sequence
  Synthetic oligonucleotide
tactactaccgaatgtgattctatgataac

SEQ ID NO: 376072 - DNA, 30 bp, Artificial Sequence
  Synthetic oligonucleotide
acgtagtcaatgcaacgcaggtgatataac

SEQ ID NO: 376073 - DNA, 30 bp, Artificial Sequence
  Synthetic oligonucleotide
tagaccgagtttgtaaggaggcagtataac

SEQ ID NO: 376074 - DNA, 30 bp, Artificial Sequence
  Synthetic oligonucleotide
caattgatctgcggatttgtagcgtataac

SEQ ID NO: 376075 - DNA, 30 bp, Artificial Sequence
  Synthetic oligonucleotide
gatgcccctaagcaagagtacttgtataac

SEQ ID NO: 376076 - DNA, 30 bp, Artificial Sequence
  Synthetic oligonucleotide
gcgtataatcttactatcgtttcttataac

SEQ ID NO: 376077 - DNA, 30 bp, Artificial Sequence
  Synthetic oligonucleotide
acatatatataatagcgccactgttataac

SEQ ID NO: 376078 - DNA, 30 bp, Artificial Sequence
  Synthetic oligonucleotide
atagtttaaagatgaccctctctttataac

SEQ ID NO: 376079 - DNA, 30 bp, Artificial Sequence
  Synthetic oligonucleotide
taatagtaagtctagttttatgtttataac

SEQ ID NO: 376080 - DNA, 30 bp, Artificial Sequence
  Synthetic oligonucleotide
taccggatttacggcaaaacgtaaactaac

SEQ ID NO: 376081 - DNA, 30 bp, Artificial Sequence
  Synthetic oligonucleotide
gtttcctgtacggatgccattccaactaac

SEQ ID NO: 376082 - DNA, 30 bp, Artificial Sequence
  Synthetic oligonucleotide
taataaaattgacttccaggcggaactaac

SEQ ID NO: 376083 - DNA, 30 bp, Artificial Sequence
  Synthetic oligonucleotide
gtcggggtcaggcccgtgtaacgcactaac

SEQ ID NO: 376084 - DNA, 30 bp, Artificial Sequence
  Synthetic oligonucleotide
aattaaccatctcggggccacggcactaac

SEQ ID NO: 376085 - DNA, 30 bp, Artificial Sequence
  Synthetic oligonucleotide
agatcgatggtgcttatacgctctactaac

SEQ ID NO: 376086 - DNA, 30 bp, Artificial Sequence
  Synthetic oligonucleotide
acacaattgcgtttgcatgtgtttactaac

SEQ ID NO: 376087 - DNA, 30 bp, Artificial Sequence
  Synthetic oligonucleotide
gatatcggatattatctgctgtaccctaac

SEQ ID NO: 376088 - DNA, 30 bp, Artificial Sequence
  Synthetic oligonucleotide
agtgctgtgttacaagtatcagcgcctaac

SEQ ID NO: 376089 - DNA, 30 bp, Artificial Sequence
  Synthetic oligonucleotide
aggactccaggggcacgactttctcctaac

SEQ ID NO: 376090 - DNA, 30 bp, Artificial Sequence
  Synthetic oligonucleotide
gttgaactgaggaggggcccttttcctaac

SEQ ID NO: 376091 - DNA, 30 bp, Artificial Sequence
  Synthetic oligonucleotide
gcggagtcgtgtttagattcaagagctaac

SEQ ID NO: 376092 - DNA, 30 bp, Artificial Sequence
  Synthetic oligonucleotide
aagttcgcgagtgggcaccaactcgctaac

SEQ ID NO: 376093 - DNA, 30 bp, Artificial Sequence
  Synthetic oligonucleotide
agccgtgtggcaattggcgcctaggctaac

SEQ ID NO: 376094 - DNA, 30 bp, Artificial Sequence
  Synthetic oligonucleotide
atggaaaccattaagtttacgtcggctaac

SEQ ID NO: 376095 - DNA, 30 bp, Artificial Sequence
  Synthetic oligonucleotide
ggacggtacgacgcactattacgggctaac

SEQ ID NO: 376096 - DNA, 30 bp, Artificial Sequence
  Synthetic oligonucleotide
ttgggagctggtaaaggtaagaatgctaac

SEQ ID NO: 376097 - DNA, 30 bp, Artificial Sequence
  Synthetic oligonucleotide
acaaaagcgttgggaagtaaaagatctaac

SEQ ID NO: 376098 - DNA, 30 bp, Artificial Sequence
  Synthetic oligonucleotide
ggacgactatggcgcgatagaagctctaac

SEQ ID NO: 376099 - DNA, 30 bp, Artificial Sequence
  Synthetic oligonucleotide
acatggttatgatagttgattgtctctaac

SEQ ID NO: 376100 - DNA, 30 bp, Artificial Sequence
  Synthetic oligonucleotide
acgatagacctatgattgtcgccgtctaac

SEQ ID NO: 376101 - DNA, 30 bp, Artificial Sequence
  Synthetic oligonucleotide
ccttaggttagtaacaaatccaggtctaac

SEQ ID NO: 376102 - DNA, 30 bp, Artificial Sequence
  Synthetic oligonucleotide
tccggggtataccaggttcggaattctaac

SEQ ID NO: 376103 - DNA, 30 bp, Artificial Sequence
  Synthetic oligonucleotide
tcacgtttgggttagaacttcaaaagtaac

SEQ ID NO: 376104 - DNA, 30 bp, Artificial Sequence
  Synthetic oligonucleotide
agtagaacctttttccggtgagaaagtaac

SEQ ID NO: 376105 - DNA, 30 bp, Artificial Sequence
  Synthetic oligonucleotide
tcgcggctgtgttcaacaatggagagtaac

SEQ ID NO: 376106 - DNA, 30 bp, Artificial Sequence
  Synthetic oligonucleotide
gctcgaaggcgcccttttttagggagtaac

SEQ ID NO: 376107 - DNA, 30 bp, Artificial Sequence
  Synthetic oligonucleotide
taggctgatgaaaaagttatggggagtaac

SEQ ID NO: 376108 - DNA, 30 bp, Artificial Sequence
  Synthetic oligonucleotide
gtagcgtggaagcagagcttttgtagtaac

SEQ ID NO: 376109 - DNA, 30 bp, Artificial Sequence
  Synthetic oligonucleotide
gcgtcacgattcatcctcgggtcacgtaac

SEQ ID NO: 376110 - DNA, 30 bp, Artificial Sequence
  Synthetic oligonucleotide
ctcgtctatcagtagaaggagctacgtaac

SEQ ID NO: 376111 - DNA, 30 bp, Artificial Sequence
  Synthetic oligonucleotide
ttcgacgttcattattatggagcgcgtaac

SEQ ID NO: 376112 - DNA, 30 bp, Artificial Sequence
  Synthetic oligonucleotide
gtcacaacataggaacaacgtgcgcgtaac

SEQ ID NO: 376113 - DNA, 30 bp, Artificial Sequence
  Synthetic oligonucleotide
aatatatcatgccatggtaagtatcgtaac

SEQ ID NO: 376114 - DNA, 30 bp, Artificial Sequence
  Synthetic oligonucleotide
ccttgctttagaggaattgcaattcgtaac

SEQ ID NO: 376115 - DNA, 30 bp, Artificial Sequence
  Synthetic oligonucleotide
tagacacttatctaggaatgggaaggtaac

SEQ ID NO: 376116 - DNA, 30 bp, Artificial Sequence
  Synthetic oligonucleotide
ctatatagtatgagcgaagacagaggtaac

SEQ ID NO: 376117 - DNA, 30 bp, Artificial Sequence
  Synthetic oligonucleotide
ttgcctggagctagtaatctcgacggtaac

SEQ ID NO: 376118 - DNA, 30 bp, Artificial Sequence
  Synthetic oligonucleotide
gcatgtcgcattcagcaatcgcccggtaac

SEQ ID NO: 376119 - DNA, 30 bp, Artificial Sequence
  Synthetic oligonucleotide
agcaaggaacacagaaagacaatcggtaac

SEQ ID NO: 376120 - DNA, 30 bp, Artificial Sequence
  Synthetic oligonucleotide
gggaagcagtatcggatgcgggtcggtaac

SEQ ID NO: 376121 - DNA, 30 bp, Artificial Sequence
  Synthetic oligonucleotide
tcagcatgatatgccgcaagattcggtaac

SEQ ID NO: 376122 - DNA, 30 bp, Artificial Sequence
  Synthetic oligonucleotide
tccctaggcgtcacggtgtggcagggtaac

SEQ ID NO: 376123 - DNA, 30 bp, Artificial Sequence
  Synthetic oligonucleotide
cgtctcacgtgttgatcgacaaatggtaac

SEQ ID NO: 376124 - DNA, 30 bp, Artificial Sequence
  Synthetic oligonucleotide
gggacccccgctcagctctgagaatgtaac

SEQ ID NO: 376125 - DNA, 30 bp, Artificial Sequence
  Synthetic oligonucleotide
gatttcaatccaatcgtgtaggcatgtaac

SEQ ID NO: 376126 - DNA, 30 bp, Artificial Sequence
  Synthetic oligonucleotide
tgatttctggatagggaatgatgatgtaac

SEQ ID NO: 376127 - DNA, 30 bp, Artificial Sequence
  Synthetic oligonucleotide
gagctgatagctcccctctaatactgtaac

SEQ ID NO: 376128 - DNA, 30 bp, Artificial Sequence
  Synthetic oligonucleotide
tcccacactgaaagacaccatccctgtaac

SEQ ID NO: 376129 - DNA, 30 bp, Artificial Sequence
  Synthetic oligonucleotide
gctttcataattaaagacgaagcctgtaac

SEQ ID NO: 376130 - DNA, 30 bp, Artificial Sequence
  Synthetic oligonucleotide
agggacacgttcgctccgcacgcctgtaac

SEQ ID NO: 376131 - DNA, 30 bp, Artificial Sequence
  Synthetic oligonucleotide
ttgataacacagggtacccctgcctgtaac

SEQ ID NO: 376132 - DNA, 30 bp, Artificial Sequence
  Synthetic oligonucleotide
gctatgagctcgtcttcacgggtctgtaac

SEQ ID NO: 376133 - DNA, 30 bp, Artificial Sequence
  Synthetic oligonucleotide
ggtggatttaagagtaagtcagcttgtaac

SEQ ID NO: 376134 - DNA, 30 bp, Artificial Sequence
  Synthetic oligonucleotide
ttatgtcgaatcgatcgtgacagaattaac

SEQ ID NO: 376135 - DNA, 30 bp, Artificial Sequence
  Synthetic oligonucleotide
aaagcgagtaagtataactccataattaac

SEQ ID NO: 376136 - DNA, 30 bp, Artificial Sequence
  Synthetic oligonucleotide
atttcgaattggaggtgcactttaattaac

SEQ ID NO: 376137 - DNA, 30 bp, Artificial Sequence
  Synthetic oligonucleotide
gtcattataacgttgtttccccacattaac

SEQ ID NO: 376138 - DNA, 30 bp, Artificial Sequence
  Synthetic oligonucleotide
acggcatcaggaggctttatgtacattaac

SEQ ID NO: 376139 - DNA, 30 bp, Artificial Sequence
  Synthetic oligonucleotide
gccaaaccatctttgagttaggtcattaac

SEQ ID NO: 376140 - DNA, 30 bp, Artificial Sequence
  Synthetic oligonucleotide
aacagcgtaatcaggagcccctagattaac

SEQ ID NO: 376141 - DNA, 30 bp, Artificial Sequence
  Synthetic oligonucleotide
cgcccgggcaaatagcgttgaattattaac

SEQ ID NO: 376142 - DNA, 30 bp, Artificial Sequence
  Synthetic oligonucleotide
tgttcttgttatcaggtatagcttattaac

SEQ ID NO: 376143 - DNA, 30 bp, Artificial Sequence
  Synthetic oligonucleotide
cggtactctgccgaggcaagtgtacttaac

SEQ ID NO: 376144 - DNA, 30 bp, Artificial Sequence
  Synthetic oligonucleotide
tgacgttgggccagatgccgagcccttaac

SEQ ID NO: 376145 - DNA, 30 bp, Artificial Sequence
  Synthetic oligonucleotide
gcaccccaagcgaacttcatcttccttaac

SEQ ID NO: 376146 - DNA, 30 bp, Artificial Sequence
  Synthetic oligonucleotide
aataaggtttggagggcacgaaggcttaac

SEQ ID NO: 376147 - DNA, 30 bp, Artificial Sequence
  Synthetic oligonucleotide
ctagaaacagctaaaattgaatgtcttaac

SEQ ID NO: 376148 - DNA, 30 bp, Artificial Sequence
  Synthetic oligonucleotide
gaaaactaagtaggtagccaaggagttaac

SEQ ID NO: 376149 - DNA, 30 bp, Artificial Sequence
  Synthetic oligonucleotide
tgcaagtgttggacccctattgccgttaac

SEQ ID NO: 376150 - DNA, 30 bp, Artificial Sequence
  Synthetic oligonucleotide
tcttcaaggacttacgctgaagtcgttaac

SEQ ID NO: 376151 - DNA, 30 bp, Artificial Sequence
  Synthetic oligonucleotide
gatgtgacgtagtgggcattagaggttaac

SEQ ID NO: 376152 - DNA, 30 bp, Artificial Sequence
  Synthetic oligonucleotide
cacaggcatgaacactttttaaatgttaac

SEQ ID NO: 376153 - DNA, 30 bp, Artificial Sequence
  Synthetic oligonucleotide
atgtgtctttttaaaccagggaatgttaac

SEQ ID NO: 376154 - DNA, 30 bp, Artificial Sequence
  Synthetic oligonucleotide
cggctatgacgggctacgtagtgtgttaac

SEQ ID NO: 376155 - DNA, 30 bp, Artificial Sequence
  Synthetic oligonucleotide
cctatgcatattcaggggctgattgttaac

SEQ ID NO: 376156 - DNA, 30 bp, Artificial Sequence
  Synthetic oligonucleotide
ccaccaggtcggctcaagcaggaatttaac

SEQ ID NO: 376157 - DNA, 30 bp, Artificial Sequence
  Synthetic oligonucleotide
aacaagctagatcccatacacgcatttaac

SEQ ID NO: 376158 - DNA, 30 bp, Artificial Sequence
  Synthetic oligonucleotide
acaggcctaacaataggtttccgatttaac

SEQ ID NO: 376159 - DNA, 30 bp, Artificial Sequence
  Synthetic oligonucleotide
gtgatctgcactcaataaggtttctttaac

SEQ ID NO: 376160 - DNA, 30 bp, Artificial Sequence
  Synthetic oligonucleotide
agaatgatttctatcgggtcatattttaac

SEQ ID NO: 376161 - DNA, 30 bp, Artificial Sequence
  Synthetic oligonucleotide
gaaatagtaagtgatagtaatggttttaac

SEQ ID NO: 376162 - DNA, 30 bp, Artificial Sequence
  Synthetic oligonucleotide
attaacagtttgcctggaaatgcaaaacac

SEQ ID NO: 376163 - DNA, 31 bp, Artificial Sequence
  Synthetic oligonucleotide
ctccccaataagtatcagcacaggaaaacac

SEQ ID NO: 376164 - DNA, 30 bp, Artificial Sequence
  Synthetic oligonucleotide
agtcattcgcctgatcggctgtgaaaacac

SEQ ID NO: 376165 - DNA, 30 bp, Artificial Sequence
  Synthetic oligonucleotide
caagtgtgtggttgggaataccacaaacac

SEQ ID NO: 376166 - DNA, 30 bp, Artificial Sequence
  Synthetic oligonucleotide
tgctactcatataggtcctgacccaaacac

SEQ ID NO: 376167 - DNA, 30 bp, Artificial Sequence
  Synthetic oligonucleotide
ccatgatatacggctaccgtaatcaaacac

SEQ ID NO: 376168 - DNA, 30 bp, Artificial Sequence
  Synthetic oligonucleotide
tattttagccattcacatcgggataaacac

SEQ ID NO: 376169 - DNA, 30 bp, Artificial Sequence
  Synthetic oligonucleotide
gggcggcaagcaagttacttggataaacac

SEQ ID NO: 376170 - DNA, 30 bp, Artificial Sequence
  Synthetic oligonucleotide
aatgagttggaaacgttgtgttgacaacac

SEQ ID NO: 376171 - DNA, 30 bp, Artificial Sequence
  Synthetic oligonucleotide
tattgcttaatggggcaattggtccaacac

SEQ ID NO: 376172 - DNA, 30 bp, Artificial Sequence
  Synthetic oligonucleotide
tagtgattgcattaagcagtatcgcaacac

SEQ ID NO: 376173 - DNA, 30 bp, Artificial Sequence
  Synthetic oligonucleotide
cagattctcttcttgtctcacaaagaacac

SEQ ID NO: 376174 - DNA, 30 bp, Artificial Sequence
  Synthetic oligonucleotide
tagcggacaatcaccactcagcgagaacac

SEQ ID NO: 376175 - DNA, 30 bp, Artificial Sequence
  Synthetic oligonucleotide
agcatggctacacaggcagttatagaacac

SEQ ID NO: 376176 - DNA, 30 bp, Artificial Sequence
  Synthetic oligonucleotide
gagtatatcagcggagcgcagttagaacac

SEQ ID NO: 376177 - DNA, 30 bp, Artificial Sequence
  Synthetic oligonucleotide
gtgtcccagccgtgctaagcaaacgaacac

SEQ ID NO: 376178 - DNA, 30 bp, Artificial Sequence
  Synthetic oligonucleotide
gcatgtgccgtaaaacattgcgcggaacac

SEQ ID NO: 376179 - DNA, 30 bp, Artificial Sequence
  Synthetic oligonucleotide
gggataccctgcggtcaggtaagggaacac

SEQ ID NO: 376180 - DNA, 30 bp, Artificial Sequence
  Synthetic oligonucleotide
gtgcgcttttgagccagtggcaatgaacac

SEQ ID NO: 376181 - DNA, 30 bp, Artificial Sequence
  Synthetic oligonucleotide
cttagcctctgtatgtactgggatgaacac

SEQ ID NO: 376182 - DNA, 30 bp, Artificial Sequence
  Synthetic oligonucleotide
tgggttcccaaaaacagtggtagataacac

SEQ ID NO: 376183 - DNA, 30 bp, Artificial Sequence
  Synthetic oligonucleotide
attgagtgaccggatagctaatcttaacac

SEQ ID NO: 376184 - DNA, 30 bp, Artificial Sequence
  Synthetic oligonucleotide
gaactcagctctcattcagctcgaacacac

SEQ ID NO: 376185 - DNA, 30 bp, Artificial Sequence
  Synthetic oligonucleotide
tgatggttgggctatcatgttggaacacac

SEQ ID NO: 376186 - DNA, 30 bp, Artificial Sequence
  Synthetic oligonucleotide
cgtttcagtctaaatgaaacatgcacacac

SEQ ID NO: 376187 - DNA, 30 bp, Artificial Sequence
  Synthetic oligonucleotide
gacggagaagcagagagctcgttaccacac

SEQ ID NO: 376188 - DNA, 30 bp, Artificial Sequence
  Synthetic oligonucleotide
acaccggggaataatagtaattccccacac

SEQ ID NO: 376189 - DNA, 30 bp, Artificial Sequence
  Synthetic oligonucleotide
ggacaccctggccgtcccgctcggccacac

SEQ ID NO: 376190 - DNA, 30 bp, Artificial Sequence
  Synthetic oligonucleotide
ggaacgccatcattgatattatggccacac

SEQ ID NO: 376191 - DNA, 30 bp, Artificial Sequence
  Synthetic oligonucleotide
gggtgagtctgggaaggaatgtggccacac

SEQ ID NO: 376192 - DNA, 30 bp, Artificial Sequence
  Synthetic oligonucleotide
gaaatgtaaatgctacggtataatccacac

SEQ ID NO: 376193 - DNA, 30 bp, Artificial Sequence
  Synthetic oligonucleotide
ctgactgccgccataggcaaacaagcacac

SEQ ID NO: 376194 - DNA, 30 bp, Artificial Sequence
  Synthetic oligonucleotide
gcgtcatcctggattacgtgcggcgcacac

SEQ ID NO: 376195 - DNA, 30 bp, Artificial Sequence
  Synthetic oligonucleotide
tttcaaattctagtacggcgggtcgcacac

SEQ ID NO: 376196 - DNA, 30 bp, Artificial Sequence
  Synthetic oligonucleotide
acatcacttacactggcggcagaatcacac

SEQ ID NO: 376197 - DNA, 30 bp, Artificial Sequence
  Synthetic oligonucleotide
gtatctgtgaagcgggtttcagcatcacac

SEQ ID NO: 376198 - DNA, 30 bp, Artificial Sequence
  Synthetic oligonucleotide
attgcggctagcggcgcgtgaacctcacac

SEQ ID NO: 376199 - DNA, 30 bp, Artificial Sequence
  Synthetic oligonucleotide
ctttggtggaagcctgtttgattgtcacac

SEQ ID NO: 376200 - DNA, 30 bp, Artificial Sequence
  Synthetic oligonucleotide
ctcaggagttggtgagcgcggaattcacac

SEQ ID NO: 376201 - DNA, 30 bp, Artificial Sequence
  Synthetic oligonucleotide
ctgctatttaaataaaaaatacattcacac

SEQ ID NO: 376202 - DNA, 30 bp, Artificial Sequence
  Synthetic oligonucleotide
gtgccgctgctaaacgtcggagcttcacac

SEQ ID NO: 376203 - DNA, 30 bp, Artificial Sequence
  Synthetic oligonucleotide
gatgccgtttcttcacaattagtttcacac

SEQ ID NO: 376204 - DNA, 30 bp, Artificial Sequence
  Synthetic oligonucleotide
atcaatggaagcgggtgcagtgcaagacac

SEQ ID NO: 376205 - DNA, 30 bp, Artificial Sequence
  Synthetic oligonucleotide
ttgcgaagacagttttgcactataagacac

SEQ ID NO: 376206 - DNA, 30 bp, Artificial Sequence
  Synthetic oligonucleotide
ggctacttttataatgggaatagcagacac

SEQ ID NO: 376207 - DNA, 30 bp, Artificial Sequence
  Synthetic oligonucleotide
ctcgaactgtcaaagtagtttcagagacac

SEQ ID NO: 376208 - DNA, 30 bp, Artificial Sequence
  Synthetic oligonucleotide
ctaggacacgtcgcgacacgccagcgacac

SEQ ID NO: 376209 - DNA, 30 bp, Artificial Sequence
  Synthetic oligonucleotide
actactctttcggggactactcgtcgacac

SEQ ID NO: 376210 - DNA, 30 bp, Artificial Sequence
  Synthetic oligonucleotide
gttctcataacggacgtaaggtaaggacac

SEQ ID NO: 376211 - DNA, 30 bp, Artificial Sequence
  Synthetic oligonucleotide
cacctcctcagtgaataatcacgaggacac

SEQ ID NO: 376212 - DNA, 30 bp, Artificial Sequence
  Synthetic oligonucleotide
tgtctggtgcactgatccaatctaggacac

SEQ ID NO: 376213 - DNA, 30 bp, Artificial Sequence
  Synthetic oligonucleotide
cctgcgataaaatgaatgggtcctggacac

SEQ ID NO: 376214 - DNA, 30 bp, Artificial Sequence
  Synthetic oligonucleotide
cttaattggaatgcctaagtaggtggacac

SEQ ID NO: 376215 - DNA, 30 bp, Artificial Sequence
  Synthetic oligonucleotide
gaagacacctttagaagtactcttggacac

SEQ ID NO: 376216 - DNA, 30 bp, Artificial Sequence
  Synthetic oligonucleotide
aatgtgaaacactcagcctagttatgacac

SEQ ID NO: 376217 - DNA, 30 bp, Artificial Sequence
  Synthetic oligonucleotide
atgcttgcagatctacgttaacactgacac

SEQ ID NO: 376218 - DNA, 30 bp, Artificial Sequence
  Synthetic oligonucleotide
acaagccccacttaaagtcggccctgacac

SEQ ID NO: 376219 - DNA, 30 bp, Artificial Sequence
  Synthetic oligonucleotide
cggtaacctacgcacagttgagtctgacac

SEQ ID NO: 376220 - DNA, 30 bp, Artificial Sequence
  Synthetic oligonucleotide
cctggtggtggtgaggtagccacgtgacac

SEQ ID NO: 376221 - DNA, 30 bp, Artificial Sequence
  Synthetic oligonucleotide
acctacttaacgtacagcatatcgtgacac

SEQ ID NO: 376222 - DNA, 30 bp, Artificial Sequence
  Synthetic oligonucleotide
cctggttataacaggagcccttcttgacac

SEQ ID NO: 376223 - DNA, 30 bp, Artificial Sequence
  Synthetic oligonucleotide
atcgtacatgaggccaagggaacaatacac

SEQ ID NO: 376224 - DNA, 30 bp, Artificial Sequence
  Synthetic oligonucleotide
cgtataatacttttcgctgttgcaatacac

SEQ ID NO: 376225 - DNA, 30 bp, Artificial Sequence
  Synthetic oligonucleotide
gttcgagtagatgcgtgatctctaatacac

SEQ ID NO: 376226 - DNA, 30 bp, Artificial Sequence
  Synthetic oligonucleotide
catctgtgggatccgtgacgcgacatacac

SEQ ID NO: 376227 - DNA, 30 bp, Artificial Sequence
  Synthetic oligonucleotide
acctttgctgactgacaacggtacatacac

SEQ ID NO: 376228 - DNA, 30 bp, Artificial Sequence
  Synthetic oligonucleotide
ggcatacgggtggtacggcggcgcatacac

SEQ ID NO: 376229 - DNA, 30 bp, Artificial Sequence
  Synthetic oligonucleotide
atgtctttaagaataacgcttccgatacac

SEQ ID NO: 376230 - DNA, 30 bp, Artificial Sequence
  Synthetic oligonucleotide
tcttctgatcaactgctatattggatacac

SEQ ID NO: 376231 - DNA, 30 bp, Artificial Sequence
  Synthetic oligonucleotide
gtcgatcatggggacgtatggctactacac

SEQ ID NO: 376232 - DNA, 30 bp, Artificial Sequence
  Synthetic oligonucleotide
actctgtggggcaaatataccttcctacac

SEQ ID NO: 376233 - DNA, 30 bp, Artificial Sequence
  Synthetic oligonucleotide
aaggtagactgtcagttcaataggctacac

SEQ ID NO: 376234 - DNA, 30 bp, Artificial Sequence
  Synthetic oligonucleotide
aatgggttcgggatttcttctggagtacac

SEQ ID NO: 376235 - DNA, 30 bp, Artificial Sequence
  Synthetic oligonucleotide
agcagctggccttgtaggagttgagtacac

SEQ ID NO: 376236 - DNA, 30 bp, Artificial Sequence
  Synthetic oligonucleotide
tggcgcgtttaagcaatgttccgcgtacac

SEQ ID NO: 376237 - DNA, 30 bp, Artificial Sequence
  Synthetic oligonucleotide
aataacggcaggcaccgactcgaggtacac

SEQ ID NO: 376238 - DNA, 30 bp, Artificial Sequence
  Synthetic oligonucleotide
gcaagtgcttactgaccgtggacggtacac

SEQ ID NO: 376239 - DNA, 30 bp, Artificial Sequence
  Synthetic oligonucleotide
taacgcatatttctatgtcagttggtacac

SEQ ID NO: 376240 - DNA, 30 bp, Artificial Sequence
  Synthetic oligonucleotide
caattgtattcgcctaaggacgatgtacac

SEQ ID NO: 376241 - DNA, 30 bp, Artificial Sequence
  Synthetic oligonucleotide
aaagcagcacttctgagtaagggtgtacac

SEQ ID NO: 376242 - DNA, 30 bp, Artificial Sequence
  Synthetic oligonucleotide
cgctgtctgtccttacgacaatgtgtacac

SEQ ID NO: 376243 - DNA, 30 bp, Artificial Sequence
  Synthetic oligonucleotide
ctcccaaaccatatcctatataaattacac

SEQ ID NO: 376244 - DNA, 30 bp, Artificial Sequence
  Synthetic oligonucleotide
ttatcgggcgaatcagcacaaccattacac

SEQ ID NO: 376245 - DNA, 30 bp, Artificial Sequence
  Synthetic oligonucleotide
gagccaggacgcttggccctcggattacac

SEQ ID NO: 376246 - DNA, 30 bp, Artificial Sequence
  Synthetic oligonucleotide
gggtagtacgggcccgccttgactttacac

SEQ ID NO: 376247 - DNA, 30 bp, Artificial Sequence
  Synthetic oligonucleotide
aaccccctcaaacgacctggacctttacac

SEQ ID NO: 376248 - DNA, 30 bp, Artificial Sequence
  Synthetic oligonucleotide
agattcctttcatcaagacaggaaaaccac

SEQ ID NO: 376249 - DNA, 30 bp, Artificial Sequence
  Synthetic oligonucleotide
attgccggtttacgagtcgatccaaaccac

SEQ ID NO: 376250 - DNA, 30 bp, Artificial Sequence
  Synthetic oligonucleotide
gcaggttgcatcggtcagagtgcaaaccac

SEQ ID NO: 376251 - DNA, 30 bp, Artificial Sequence
  Synthetic oligonucleotide
agatatgcatcagccctatagagaaaccac

SEQ ID NO: 376252 - DNA, 30 bp, Artificial Sequence
  Synthetic oligonucleotide
ctcacgatttatgccctacgtcgcaaccac

SEQ ID NO: 376253 - DNA, 30 bp, Artificial Sequence
  Synthetic oligonucleotide
tctgggtaccgattgtgttttaggaaccac

SEQ ID NO: 376254 - DNA, 29 bp, Artificial Sequence
  Synthetic oligonucleotide
agcagcccctgatgtcctcagctaaccac

SEQ ID NO: 376255 - DNA, 30 bp, Artificial Sequence
  Synthetic oligonucleotide
aaattgttacaaacaaacacaggtaaccac

SEQ ID NO: 376256 - DNA, 30 bp, Artificial Sequence
  Synthetic oligonucleotide
tccaggtggagaggtgtccatattaaccac

SEQ ID NO: 376257 - DNA, 30 bp, Artificial Sequence
  Synthetic oligonucleotide
aagccggtacttgcatacgtccgacaccac

SEQ ID NO: 376258 - DNA, 30 bp, Artificial Sequence
  Synthetic oligonucleotide
ataggttgacgcaataagaggacccaccac

SEQ ID NO: 376259 - DNA, 30 bp, Artificial Sequence
  Synthetic oligonucleotide
gttcgacaagctgcacaaccattagaccac

SEQ ID NO: 376260 - DNA, 30 bp, Artificial Sequence
  Synthetic oligonucleotide
ggcgtttgaatgctccatcgcaacgaccac

SEQ ID NO: 376261 - DNA, 30 bp, Artificial Sequence
  Synthetic oligonucleotide
gcctggtcgaccagaagttagcgcgaccac

SEQ ID NO: 376262 - DNA, 30 bp, Artificial Sequence
  Synthetic oligonucleotide
gccctaacgacacccccgacaagggaccac

SEQ ID NO: 376263 - DNA, 30 bp, Artificial Sequence
  Synthetic oligonucleotide
gaggaacggtctagcactgtacctgaccac

SEQ ID NO: 376264 - DNA, 30 bp, Artificial Sequence
  Synthetic oligonucleotide
ttagccagctaaccacggtcatttgaccac

SEQ ID NO: 376265 - DNA, 30 bp, Artificial Sequence
  Synthetic oligonucleotide
tgactataatggcaaccggctgcgtaccac

SEQ ID NO: 376266 - DNA, 30 bp, Artificial Sequence
  Synthetic oligonucleotide
ggaaaacatagaaacgctaaaatttaccac

SEQ ID NO: 376267 - DNA, 30 bp, Artificial Sequence
  Synthetic oligonucleotide
gctggtttcggatcgttctccaaaacccac

SEQ ID NO: 376268 - DNA, 30 bp, Artificial Sequence
  Synthetic oligonucleotide
ctccaccaggggaccacgtgcataacccac

SEQ ID NO: 376269 - DNA, 31 bp, Artificial Sequence
  Synthetic oligonucleotide
gcattgcccactaacccgttcttccacccac

SEQ ID NO: 376270 - DNA, 30 bp, Artificial Sequence
  Synthetic oligonucleotide
gaagcgccccgtctcaacatgggcccccac

SEQ ID NO: 376271 - DNA, 30 bp, Artificial Sequence
  Synthetic oligonucleotide
tagaaagtcacccttcgaaccttgccccac

SEQ ID NO: 376272 - DNA, 30 bp, Artificial Sequence
  Synthetic oligonucleotide
cggttatgtctggctggctatcttccccac

SEQ ID NO: 376273 - DNA, 30 bp, Artificial Sequence
  Synthetic oligonucleotide
cattcagtactcacgctataacccgcccac

SEQ ID NO: 376274 - DNA, 30 bp, Artificial Sequence
  Synthetic oligonucleotide
gtgtggtgtctcactgcttttatcgcccac

SEQ ID NO: 376275 - DNA, 30 bp, Artificial Sequence
  Synthetic oligonucleotide
gtgggcttacaacgagtccgagatgcccac

SEQ ID NO: 376276 - DNA, 30 bp, Artificial Sequence
  Synthetic oligonucleotide
gttgtcagcgtacccgatgtcgatgcccac

SEQ ID NO: 376277 - DNA, 30 bp, Artificial Sequence
  Synthetic oligonucleotide
ttggtatgccattatcatatggttgcccac

SEQ ID NO: 376278 - DNA, 30 bp, Artificial Sequence
  Synthetic oligonucleotide
catcgatacgctggggactttcagtcccac

SEQ ID NO: 376279 - DNA, 30 bp, Artificial Sequence
  Synthetic oligonucleotide
gatgcattgtacgcaataacttggtcccac

SEQ ID NO: 376280 - DNA, 30 bp, Artificial Sequence
  Synthetic oligonucleotide
atgtcctgggacagtcttggcgcttcccac

SEQ ID NO: 376281 - DNA, 30 bp, Artificial Sequence
  Synthetic oligonucleotide
ttgaaactgttaaaggctcgagacagccac

SEQ ID NO: 376282 - DNA, 30 bp, Artificial Sequence
  Synthetic oligonucleotide
cccttaatagtcagctacatcgacagccac

SEQ ID NO: 376283 - DNA, 30 bp, Artificial Sequence
  Synthetic oligonucleotide
tatgggtatgtcaatgcggaccggagccac

SEQ ID NO: 376284 - DNA, 30 bp, Artificial Sequence
  Synthetic oligonucleotide
gaggggcggcggactcactgaagtagccac

SEQ ID NO: 376285 - DNA, 30 bp, Artificial Sequence
  Synthetic oligonucleotide
aaatgcgccatacctagtgatgtacgccac

SEQ ID NO: 376286 - DNA, 30 bp, Artificial Sequence
  Synthetic oligonucleotide
aacctttggcaaaaataaaatgcccgccac

SEQ ID NO: 376287 - DNA, 30 bp, Artificial Sequence
  Synthetic oligonucleotide
aaagaccgaggtccggttcttctgcgccac

SEQ ID NO: 376288 - DNA, 30 bp, Artificial Sequence
  Synthetic oligonucleotide
cggctagcatacccggccttacgtcgccac

SEQ ID NO: 376289 - DNA, 30 bp, Artificial Sequence
  Synthetic oligonucleotide
gtttcagttcctccaccagcgggtcgccac

SEQ ID NO: 376290 - DNA, 30 bp, Artificial Sequence
  Synthetic oligonucleotide
gttataggactctttaatcacagaggccac

SEQ ID NO: 376291 - DNA, 30 bp, Artificial Sequence
  Synthetic oligonucleotide
gtcgctattgaatgtcgagaactcggccac

SEQ ID NO: 376292 - DNA, 30 bp, Artificial Sequence
  Synthetic oligonucleotide
aacggagctaccggtaggtaaaggggccac

SEQ ID NO: 376293 - DNA, 30 bp, Artificial Sequence
  Synthetic oligonucleotide
tctcatgtcctaagtaggattaggggccac

SEQ ID NO: 376294 - DNA, 30 bp, Artificial Sequence
  Synthetic oligonucleotide
gcttgaggggcatagggtccagggggccac

SEQ ID NO: 376295 - DNA, 30 bp, Artificial Sequence
  Synthetic oligonucleotide
tcgataaaggtgcggtaggtcgggggccac

SEQ ID NO: 376296 - DNA, 30 bp, Artificial Sequence
  Synthetic oligonucleotide
aagttgtcgtgaattgaataatcgtgccac

SEQ ID NO: 376297 - DNA, 30 bp, Artificial Sequence
  Synthetic oligonucleotide
cccgtttactagatggctacacgttgccac

SEQ ID NO: 376298 - DNA, 30 bp, Artificial Sequence
  Synthetic oligonucleotide
cagtttcacgcatcatgtcaggcaatccac

SEQ ID NO: 376299 - DNA, 30 bp, Artificial Sequence
  Synthetic oligonucleotide
ctcggtagagcaggtgtgggtagaatccac

SEQ ID NO: 376300 - DNA, 30 bp, Artificial Sequence
  Synthetic oligonucleotide
tcctcccggggtccaccctacctcatccac

SEQ ID NO: 376301 - DNA, 30 bp, Artificial Sequence
  Synthetic oligonucleotide
ttttgttccaaaacgggccaagagatccac

SEQ ID NO: 376302 - DNA, 30 bp, Artificial Sequence
  Synthetic oligonucleotide
ggaacaaaaaacccagcgtcttcgatccac

SEQ ID NO: 376303 - DNA, 30 bp, Artificial Sequence
  Synthetic oligonucleotide
gacattgtttaaccataatgtcggatccac

SEQ ID NO: 376304 - DNA, 30 bp, Artificial Sequence
  Synthetic oligonucleotide
tttagtgatagcgggcgcgtcttgatccac

SEQ ID NO: 376305 - DNA, 30 bp, Artificial Sequence
  Synthetic oligonucleotide
ggggtccccgggcttgactacattatccac

SEQ ID NO: 376306 - DNA, 30 bp, Artificial Sequence
  Synthetic oligonucleotide
cactttgggcgggttatcaccgaactccac

SEQ ID NO: 376307 - DNA, 30 bp, Artificial Sequence
  Synthetic oligonucleotide
gtggtcctaaaagtgtctccaagactccac

SEQ ID NO: 376308 - DNA, 30 bp, Artificial Sequence
  Synthetic oligonucleotide
ttaactttggctgcaacttaagacctccac

SEQ ID NO: 376309 - DNA, 30 bp, Artificial Sequence
  Synthetic oligonucleotide
atttagtcctcgcatccgttagccctccac

SEQ ID NO: 376310 - DNA, 30 bp, Artificial Sequence
  Synthetic oligonucleotide
attcgtgataacatgccaggtcttctccac

SEQ ID NO: 376311 - DNA, 30 bp, Artificial Sequence
  Synthetic oligonucleotide
tatccgaaactgcgctaggcgtcagtccac

SEQ ID NO: 376312 - DNA, 30 bp, Artificial Sequence
  Synthetic oligonucleotide
tccaataggctgccggtactcggcgtccac

SEQ ID NO: 376313 - DNA, 30 bp, Artificial Sequence
  Synthetic oligonucleotide
gcacttgtccgccgaggcattagattccac

SEQ ID NO: 376314 - DNA, 30 bp, Artificial Sequence
  Synthetic oligonucleotide
tccagtatactgtcacaccgtgccttccac

SEQ ID NO: 376315 - DNA, 30 bp, Artificial Sequence
  Synthetic oligonucleotide
acacgggtcccgtagtacgcgaagttccac

SEQ ID NO: 376316 - DNA, 30 bp, Artificial Sequence
  Synthetic oligonucleotide
gagcatattgtactcatttttgatttccac

SEQ ID NO: 376317 - DNA, 30 bp, Artificial Sequence
  Synthetic oligonucleotide
ttgtccccctccttgaagtcttgtttccac

SEQ ID NO: 376318 - DNA, 30 bp, Artificial Sequence
  Synthetic oligonucleotide
cttgaactcagtcggtcgagttaaaagcac

SEQ ID NO: 376319 - DNA, 30 bp, Artificial Sequence
  Synthetic oligonucleotide
gccagacctatggaatggacagtcaagcac

SEQ ID NO: 376320 - DNA, 30 bp, Artificial Sequence
  Synthetic oligonucleotide
tcggttcccagctagctggcgcagaagcac

SEQ ID NO: 376321 - DNA, 30 bp, Artificial Sequence
  Synthetic oligonucleotide
gggggctgatcattgttggcattgaagcac

SEQ ID NO: 376322 - DNA, 30 bp, Artificial Sequence
  Synthetic oligonucleotide
ggtaattcctctttcgaagaaggacagcac

SEQ ID NO: 376323 - DNA, 30 bp, Artificial Sequence
  Synthetic oligonucleotide
tagcggattaagatccctacacaccagcac

SEQ ID NO: 376324 - DNA, 30 bp, Artificial Sequence
  Synthetic oligonucleotide
cgggtgccgtaatgttgatgggaccagcac

SEQ ID NO: 376325 - DNA, 30 bp, Artificial Sequence
  Synthetic oligonucleotide
atgttgcgaggaattattaccgcccagcac

SEQ ID NO: 376326 - DNA, 30 bp, Artificial Sequence
  Synthetic oligonucleotide
cacccatgtctggtaacaggggcccagcac

SEQ ID NO: 376327 - DNA, 30 bp, Artificial Sequence
  Synthetic oligonucleotide
cgcaccgggtaccctcccgccaagcagcac

SEQ ID NO: 376328 - DNA, 30 bp, Artificial Sequence
  Synthetic oligonucleotide
caggtgatcaagtctacaggagtgcagcac

SEQ ID NO: 376329 - DNA, 30 bp, Artificial Sequence
  Synthetic oligonucleotide
cacccgcaattaggacacggcattcagcac

SEQ ID NO: 376330 - DNA, 30 bp, Artificial Sequence
  Synthetic oligonucleotide
gcgatccacgtgagtccttggtaagagcac

SEQ ID NO: 376331 - DNA, 30 bp, Artificial Sequence
  Synthetic oligonucleotide
ccccctggggaaaaggaaaaagacgagcac

SEQ ID NO: 376332 - DNA, 30 bp, Artificial Sequence
  Synthetic oligonucleotide
acaggggctaagccacgcagctgtgagcac

SEQ ID NO: 376333 - DNA, 30 bp, Artificial Sequence
  Synthetic oligonucleotide
taaccttttaagcagttaaactcatagcac

SEQ ID NO: 376334 - DNA, 30 bp, Artificial Sequence
  Synthetic oligonucleotide
aaagcgtacatcaattctacgcgatagcac

SEQ ID NO: 376335 - DNA, 30 bp, Artificial Sequence
  Synthetic oligonucleotide
gtcaggttgggctcttgctagctatagcac

SEQ ID NO: 376336 - DNA, 30 bp, Artificial Sequence
  Synthetic oligonucleotide
gagctaacgaggcatcgccaattttagcac

SEQ ID NO: 376337 - DNA, 30 bp, Artificial Sequence
  Synthetic oligonucleotide
aaggtataataaaggggcccggagacgcac

SEQ ID NO: 376338 - DNA, 30 bp, Artificial Sequence
  Synthetic oligonucleotide
tgcggacttacgcacacgtatgcaccgcac

SEQ ID NO: 376339 - DNA, 30 bp, Artificial Sequence
  Synthetic oligonucleotide
actaacctacgcgtcccaggcgtaccgcac

SEQ ID NO: 376340 - DNA, 30 bp, Artificial Sequence
  Synthetic oligonucleotide
gcggtttcaggttggtcggtcattccgcac

SEQ ID NO: 376341 - DNA, 30 bp, Artificial Sequence
  Synthetic oligonucleotide
ccagtctgaggggatccggcgcaagcgcac

SEQ ID NO: 376342 - DNA, 30 bp, Artificial Sequence
  Synthetic oligonucleotide
ggagcacgcatgcacctttgatcagcgcac

SEQ ID NO: 376343 - DNA, 30 bp, Artificial Sequence
  Synthetic oligonucleotide
ccctagaccctgggttctaagaacgcgcac

SEQ ID NO: 376344 - DNA, 30 bp, Artificial Sequence
  Synthetic oligonucleotide
gcgagcactttgagcggaggtcccgcgcac

SEQ ID NO: 376345 - DNA, 30 bp, Artificial Sequence
  Synthetic oligonucleotide
gcagggcacgggaaacacgcagcggcgcac

SEQ ID NO: 376346 - DNA, 31 bp, Artificial Sequence
  Synthetic oligonucleotide
taactggctccttaatgtttgatcggcgcac

SEQ ID NO: 376347 - DNA, 30 bp, Artificial Sequence
  Synthetic oligonucleotide
atttcagaccctccgacaggcgcatcgcac

SEQ ID NO: 376348 - DNA, 30 bp, Artificial Sequence
  Synthetic oligonucleotide
gaattagttaggccaaggatggactcgcac

SEQ ID NO: 376349 - DNA, 30 bp, Artificial Sequence
  Synthetic oligonucleotide
cctccgagggaattcgggagtacctcgcac

SEQ ID NO: 376350 - DNA, 30 bp, Artificial Sequence
  Synthetic oligonucleotide
aacaagacgagccgtgtatcgatctcgcac

SEQ ID NO: 376351 - DNA, 30 bp, Artificial Sequence
  Synthetic oligonucleotide
tcctagttcccgactaggtccttctcgcac

SEQ ID NO: 376352 - DNA, 30 bp, Artificial Sequence
  Synthetic oligonucleotide
tccctgtccagatcagtggggttttcgcac

SEQ ID NO: 376353 - DNA, 30 bp, Artificial Sequence
  Synthetic oligonucleotide
ccgcagtgactggtagtattcctaaggcac

SEQ ID NO: 376354 - DNA, 30 bp, Artificial Sequence
  Synthetic oligonucleotide
atatatgtttcccgtaggtataacaggcac

SEQ ID NO: 376355 - DNA, 30 bp, Artificial Sequence
  Synthetic oligonucleotide
atcctcccataccggcagtcgtccaggcac

SEQ ID NO: 376356 - DNA, 30 bp, Artificial Sequence
  Synthetic oligonucleotide
tgcggaaacagaattgccatcaataggcac

SEQ ID NO: 376357 - DNA, 30 bp, Artificial Sequence
  Synthetic oligonucleotide
actgtcatgatatcatcagtgtataggcac

SEQ ID NO: 376358 - DNA, 30 bp, Artificial Sequence
  Synthetic oligonucleotide
ctgccagggtacttatataacgttaggcac

SEQ ID NO: 376359 - DNA, 30 bp, Artificial Sequence
  Synthetic oligonucleotide
aatgaagtgcacgcctcggccccccggcac

SEQ ID NO: 376360 - DNA, 30 bp, Artificial Sequence
  Synthetic oligonucleotide
agttgtggggatcctataacatcgcggcac

SEQ ID NO: 376361 - DNA, 30 bp, Artificial Sequence
  Synthetic oligonucleotide
gtcaaattcataaagagtctttggcggcac

SEQ ID NO: 376362 - DNA, 30 bp, Artificial Sequence
  Synthetic oligonucleotide
caatccaagattcttaaaaggggtcggcac

SEQ ID NO: 376363 - DNA, 30 bp, Artificial Sequence
  Synthetic oligonucleotide
catcaatctggcgcaaaactgtttcggcac

SEQ ID NO: 376364 - DNA, 30 bp, Artificial Sequence
  Synthetic oligonucleotide
tcgtctagcacgcgacagaatcaagggcac

SEQ ID NO: 376365 - DNA, 30 bp, Artificial Sequence
  Synthetic oligonucleotide
tcttagctttatttggtgtgtccagggcac

SEQ ID NO: 376366 - DNA, 30 bp, Artificial Sequence
  Synthetic oligonucleotide
ctacgccttgcacatctcatcagagggcac

SEQ ID NO: 376367 - DNA, 30 bp, Artificial Sequence
  Synthetic oligonucleotide
gttctgatctaggtcatttctcgagggcac

SEQ ID NO: 376368 - DNA, 30 bp, Artificial Sequence
  Synthetic oligonucleotide
ataactaagagatagtagttaaacgggcac

SEQ ID NO: 376369 - DNA, 30 bp, Artificial Sequence
  Synthetic oligonucleotide
ctaaggcttggcggaaacgacgtcgggcac

SEQ ID NO: 376370 - DNA, 30 bp, Artificial Sequence
  Synthetic oligonucleotide
attaaccacggggaagcggtggaggggcac

SEQ ID NO: 376371 - DNA, 30 bp, Artificial Sequence
  Synthetic oligonucleotide
ggtgttggcgacagatcagtttgggggcac

SEQ ID NO: 376372 - DNA, 30 bp, Artificial Sequence
  Synthetic oligonucleotide
gtgtggcgatcattagccataaatgggcac

SEQ ID NO: 376373 - DNA, 30 bp, Artificial Sequence
  Synthetic oligonucleotide
gctttccgcctgaacaatgtgtgtgggcac

SEQ ID NO: 376374 - DNA, 30 bp, Artificial Sequence
  Synthetic oligonucleotide
atgtgtaggaaacccgtccaaattgggcac

SEQ ID NO: 376375 - DNA, 30 bp, Artificial Sequence
  Synthetic oligonucleotide
gcttacaggggggttctattgtaatggcac

SEQ ID NO: 376376 - DNA, 30 bp, Artificial Sequence
  Synthetic oligonucleotide
aaaatgagctgcagcccgctagtatggcac

SEQ ID NO: 376377 - DNA, 30 bp, Artificial Sequence
  Synthetic oligonucleotide
cgttatttctaagcctgtatacactggcac

SEQ ID NO: 376378 - DNA, 30 bp, Artificial Sequence
  Synthetic oligonucleotide
aacgtaaacgactattagtatccgtggcac

SEQ ID NO: 376379 - DNA, 30 bp, Artificial Sequence
  Synthetic oligonucleotide
taacttagcaagaaagcctggcattggcac

SEQ ID NO: 376380 - DNA, 30 bp, Artificial Sequence
  Synthetic oligonucleotide
ccggtgggatttagtctatttatttggcac

SEQ ID NO: 376381 - DNA, 30 bp, Artificial Sequence
  Synthetic oligonucleotide
ggaggtgggatctttggaggggtttggcac

SEQ ID NO: 376382 - DNA, 30 bp, Artificial Sequence
  Synthetic oligonucleotide
gaaatggttcattactgctggaaaatgcac

SEQ ID NO: 376383 - DNA, 30 bp, Artificial Sequence
  Synthetic oligonucleotide
tgcatcaaagcactatatgagcgaatgcac

SEQ ID NO: 376384 - DNA, 30 bp, Artificial Sequence
  Synthetic oligonucleotide
acctcgtagatctaaatcggcaagatgcac

SEQ ID NO: 376385 - DNA, 30 bp, Artificial Sequence
  Synthetic oligonucleotide
gtttcccggatatgcccaagcgggatgcac

SEQ ID NO: 376386 - DNA, 30 bp, Artificial Sequence
  Synthetic oligonucleotide
acttcttaaccgaaaacacttgggatgcac

SEQ ID NO: 376387 - DNA, 30 bp, Artificial Sequence
  Synthetic oligonucleotide
cacgctaatattgcacttttcatgatgcac

SEQ ID NO: 376388 - DNA, 30 bp, Artificial Sequence
  Synthetic oligonucleotide
actcagtgagatgagcatcggaaactgcac

SEQ ID NO: 376389 - DNA, 30 bp, Artificial Sequence
  Synthetic oligonucleotide
cggtgatagccttgaactggtgcactgcac

SEQ ID NO: 376390 - DNA, 30 bp, Artificial Sequence
  Synthetic oligonucleotide
cgaaagcgtataagggaactaaccctgcac

SEQ ID NO: 376391 - DNA, 30 bp, Artificial Sequence
  Synthetic oligonucleotide
taagatatatgtttaacccagcgcctgcac

SEQ ID NO: 376392 - DNA, 30 bp, Artificial Sequence
  Synthetic oligonucleotide
acggtctggttgtgtgcgtgcgcagtgcac

SEQ ID NO: 376393 - DNA, 30 bp, Artificial Sequence
  Synthetic oligonucleotide
ctccaatgttacaaacaatttagagtgcac

SEQ ID NO: 376394 - DNA, 30 bp, Artificial Sequence
  Synthetic oligonucleotide
tcaggcacttaggtattcttcaacgtgcac

SEQ ID NO: 376395 - DNA, 30 bp, Artificial Sequence
  Synthetic oligonucleotide
cgataggcagaatacgagtggaacgtgcac

SEQ ID NO: 376396 - DNA, 30 bp, Artificial Sequence
  Synthetic oligonucleotide
acccttttccagttgatgagatgcgtgcac

SEQ ID NO: 376397 - DNA, 30 bp, Artificial Sequence
  Synthetic oligonucleotide
tttcgatctggttaatcctgcgtcgtgcac

SEQ ID NO: 376398 - DNA, 30 bp, Artificial Sequence
  Synthetic oligonucleotide
taagaatcaagattacgtatgatggtgcac

SEQ ID NO: 376399 - DNA, 30 bp, Artificial Sequence
  Synthetic oligonucleotide
cgagcctactgcaaggctataaatgtgcac

SEQ ID NO: 376400 - DNA, 30 bp, Artificial Sequence
  Synthetic oligonucleotide
gtaagtcatagttctgatccgcgtgtgcac

SEQ ID NO: 376401 - DNA, 30 bp, Artificial Sequence
  Synthetic oligonucleotide
tgattacgctaatctccacgagctttgcac

SEQ ID NO: 376402 - DNA, 30 bp, Artificial Sequence
  Synthetic oligonucleotide
gtctaatcaattttgtgaatgtcaaatcac

SEQ ID NO: 376403 - DNA, 30 bp, Artificial Sequence
  Synthetic oligonucleotide
cagtttgattaagaagcgaggggaaatcac

SEQ ID NO: 376404 - DNA, 30 bp, Artificial Sequence
  Synthetic oligonucleotide
ccctactctgcgcttctatagagcaatcac

SEQ ID NO: 376405 - DNA, 30 bp, Artificial Sequence
  Synthetic oligonucleotide
atgtctagcaactaacgctcgtggaatcac

SEQ ID NO: 376406 - DNA, 30 bp, Artificial Sequence
  Synthetic oligonucleotide
caccccaactccaatcgtcttctgaatcac

SEQ ID NO: 376407 - DNA, 30 bp, Artificial Sequence
  Synthetic oligonucleotide
gaactaggagctgcgatggttctgaatcac

SEQ ID NO: 376408 - DNA, 30 bp, Artificial Sequence
  Synthetic oligonucleotide
gtatgggcctcattactggtcgataatcac

SEQ ID NO: 376409 - DNA, 30 bp, Artificial Sequence
  Synthetic oligonucleotide
ctacttcggtttttaatgatcggtaatcac

SEQ ID NO: 376410 - DNA, 30 bp, Artificial Sequence
  Synthetic oligonucleotide
ggttgaggacgagtctcagtgtttaatcac

SEQ ID NO: 376411 - DNA, 30 bp, Artificial Sequence
  Synthetic oligonucleotide
aagaccctctctccccgtttcgaacatcac

SEQ ID NO: 376412 - DNA, 30 bp, Artificial Sequence
  Synthetic oligonucleotide
gtcgggagctatgtgtaaggattacatcac

SEQ ID NO: 376413 - DNA, 30 bp, Artificial Sequence
  Synthetic oligonucleotide
tttcttcatagcaccgtgtggttccatcac

SEQ ID NO: 376414 - DNA, 30 bp, Artificial Sequence
  Synthetic oligonucleotide
gttttatcagaatggggaagggtgcatcac

SEQ ID NO: 376415 - DNA, 30 bp, Artificial Sequence
  Synthetic oligonucleotide
tacatttcagacgtacattacggtcatcac

SEQ ID NO: 376416 - DNA, 30 bp, Artificial Sequence
  Synthetic oligonucleotide
agtttggatggaagatctataatagatcac

SEQ ID NO: 376417 - DNA, 30 bp, Artificial Sequence
  Synthetic oligonucleotide
aaagcgaattaggccctcttctaggatcac

SEQ ID NO: 376418 - DNA, 30 bp, Artificial Sequence
  Synthetic oligonucleotide
gtttcacttggagaaagttcgtaggatcac

SEQ ID NO: 376419 - DNA, 30 bp, Artificial Sequence
  Synthetic oligonucleotide
aatcatagcccatccatgtcgggggatcac

SEQ ID NO: 376420 - DNA, 30 bp, Artificial Sequence
  Synthetic oligonucleotide
ttatcccgcacacagggttatatggatcac

SEQ ID NO: 376421 - DNA, 30 bp, Artificial Sequence
  Synthetic oligonucleotide
gccattccttggcgcagttctatggatcac

SEQ ID NO: 376422 - DNA, 30 bp, Artificial Sequence
  Synthetic oligonucleotide
cgcacttttggcaacgtatcgaatgatcac

SEQ ID NO: 376423 - DNA, 30 bp, Artificial Sequence
  Synthetic oligonucleotide
acttaaccctgtagtccagggtatgatcac

SEQ ID NO: 376424 - DNA, 30 bp, Artificial Sequence
  Synthetic oligonucleotide
aactgggcatgctgtggagccactgatcac

SEQ ID NO: 376425 - DNA, 30 bp, Artificial Sequence
  Synthetic oligonucleotide
gaattggcgtgactgcgaataaaatatcac

SEQ ID NO: 376426 - DNA, 30 bp, Artificial Sequence
  Synthetic oligonucleotide
atgttatcacctgacctgcctacatatcac

SEQ ID NO: 376427 - DNA, 30 bp, Artificial Sequence
  Synthetic oligonucleotide
ggtctcaatagcgactgctgtgtatatcac

SEQ ID NO: 376428 - DNA, 30 bp, Artificial Sequence
  Synthetic oligonucleotide
tactttactatctttgaatcggcctatcac

SEQ ID NO: 376429 - DNA, 30 bp, Artificial Sequence
  Synthetic oligonucleotide
tgtggggttaaggtatgatcgcagtatcac

SEQ ID NO: 376430 - DNA, 30 bp, Artificial Sequence
  Synthetic oligonucleotide
taaggcgccttggcgaatatttagtatcac

SEQ ID NO: 376431 - DNA, 30 bp, Artificial Sequence
  Synthetic oligonucleotide
gatttcgatgaaggatcgtgcgcgtatcac

SEQ ID NO: 376432 - DNA, 30 bp, Artificial Sequence
  Synthetic oligonucleotide
gacacacaaggtgcgtgggccttgtatcac

SEQ ID NO: 376433 - DNA, 30 bp, Artificial Sequence
  Synthetic oligonucleotide
atgcagaccattgttggatagtattatcac

SEQ ID NO: 376434 - DNA, 30 bp, Artificial Sequence
  Synthetic oligonucleotide
gggatcgatcccggaggcttagcttatcac

SEQ ID NO: 376435 - DNA, 30 bp, Artificial Sequence
  Synthetic oligonucleotide
aaatgagcccttatcttagacctttatcac

SEQ ID NO: 376436 - DNA, 30 bp, Artificial Sequence
  Synthetic oligonucleotide
cgatcctgataatggcaggctctttatcac

SEQ ID NO: 376437 - DNA, 30 bp, Artificial Sequence
  Synthetic oligonucleotide
gtgagggttctactctcagttctttatcac

SEQ ID NO: 376438 - DNA, 30 bp, Artificial Sequence
  Synthetic oligonucleotide
ctatcgtcaaagttccatgtataacctcac

SEQ ID NO: 376439 - DNA, 30 bp, Artificial Sequence
  Synthetic oligonucleotide
aaaagggcaatggtgtgctagcaccctcac

SEQ ID NO: 376440 - DNA, 30 bp, Artificial Sequence
  Synthetic oligonucleotide
gacagttcgcctaggaaactagaagctcac

SEQ ID NO: 376441 - DNA, 30 bp, Artificial Sequence
  Synthetic oligonucleotide
cgtcatcagttgccactatccgacgctcac

SEQ ID NO: 376442 - DNA, 30 bp, Artificial Sequence
  Synthetic oligonucleotide
acattgagagttatatcagtcctatctcac

SEQ ID NO: 376443 - DNA, 30 bp, Artificial Sequence
  Synthetic oligonucleotide
aatgcaaccgtgggaacagataactctcac

SEQ ID NO: 376444 - DNA, 30 bp, Artificial Sequence
  Synthetic oligonucleotide
ttaaggaatgaagtaatatgggagtctcac

SEQ ID NO: 376445 - DNA, 30 bp, Artificial Sequence
  Synthetic oligonucleotide
attcatttgtcgcaaaatcatacgtctcac

SEQ ID NO: 376446 - DNA, 30 bp, Artificial Sequence
  Synthetic oligonucleotide
aacatatgaatatccaatcagcgaagtcac

SEQ ID NO: 376447 - DNA, 30 bp, Artificial Sequence
  Synthetic oligonucleotide
ggatatccccgggcaagtggcataagtcac

SEQ ID NO: 376448 - DNA, 30 bp, Artificial Sequence
  Synthetic oligonucleotide
cgtcaattatggacataagcgataagtcac

SEQ ID NO: 376449 - DNA, 30 bp, Artificial Sequence
  Synthetic oligonucleotide
ggtcgttagcggataagataacggagtcac

SEQ ID NO: 376450 - DNA, 30 bp, Artificial Sequence
  Synthetic oligonucleotide
ccctcactctcaggatccatgctgagtcac

SEQ ID NO: 376451 - DNA, 30 bp, Artificial Sequence
  Synthetic oligonucleotide
tgggtaatatataatacgggtcctagtcac

SEQ ID NO: 376452 - DNA, 30 bp, Artificial Sequence
  Synthetic oligonucleotide
gtaggtctcgtcagtaagtgtattagtcac

SEQ ID NO: 376453 - DNA, 30 bp, Artificial Sequence
  Synthetic oligonucleotide
ttcctcgagcccggggatccctaacgtcac

SEQ ID NO: 376454 - DNA, 30 bp, Artificial Sequence
  Synthetic oligonucleotide
agtaaataatgtacgtaaacctgacgtcac

SEQ ID NO: 376455 - DNA, 30 bp, Artificial Sequence
  Synthetic oligonucleotide
gcgtctttcaagactaaactttcccgtcac

SEQ ID NO: 376456 - DNA, 30 bp, Artificial Sequence
  Synthetic oligonucleotide
taacttggtggggtggcgctaaggcgtcac

SEQ ID NO: 376457 - DNA, 30 bp, Artificial Sequence
  Synthetic oligonucleotide
taactcgaatttggggtacgcctgcgtcac

SEQ ID NO: 376458 - DNA, 30 bp, Artificial Sequence
  Synthetic oligonucleotide
gtataaccgatcggtgatacatctcgtcac

SEQ ID NO: 376459 - DNA, 30 bp, Artificial Sequence
  Synthetic oligonucleotide
aagaacgactttatagcgggcattcgtcac

SEQ ID NO: 376460 - DNA, 30 bp, Artificial Sequence
  Synthetic oligonucleotide
aatcggacgttttctccgctgccaggtcac

SEQ ID NO: 376461 - DNA, 30 bp, Artificial Sequence
  Synthetic oligonucleotide
aggaccggatggaggagtgctagaggtcac

SEQ ID NO: 376462 - DNA, 30 bp, Artificial Sequence
  Synthetic oligonucleotide
taatcgggagcccgtagtcgattaggtcac

SEQ ID NO: 376463 - DNA, 30 bp, Artificial Sequence
  Synthetic oligonucleotide
tgcttgtggaatatgccgggtcacggtcac

SEQ ID NO: 376464 - DNA, 30 bp, Artificial Sequence
  Synthetic oligonucleotide
atgggctgaacatccggcccatccggtcac

SEQ ID NO: 376465 - DNA, 30 bp, Artificial Sequence
  Synthetic oligonucleotide
gaactagttctgcgatcctttttcggtcac

SEQ ID NO: 376466 - DNA, 30 bp, Artificial Sequence
  Synthetic oligonucleotide
cgcgcaatttcactcggacacaggggtcac

SEQ ID NO: 376467 - DNA, 30 bp, Artificial Sequence
  Synthetic oligonucleotide
tgtcaacaccagaaatcttggctgggtcac

SEQ ID NO: 376468 - DNA, 30 bp, Artificial Sequence
  Synthetic oligonucleotide
gcctaattactatggtcaggcgcatgtcac

SEQ ID NO: 376469 - DNA, 30 bp, Artificial Sequence
  Synthetic oligonucleotide
atacgtactactatgaacggctgatgtcac

SEQ ID NO: 376470 - DNA, 30 bp, Artificial Sequence
  Synthetic oligonucleotide
gaatatgcagcattgtggggggactgtcac

SEQ ID NO: 376471 - DNA, 30 bp, Artificial Sequence
  Synthetic oligonucleotide
tgcggatcaaggcgctggcctcagtgtcac

SEQ ID NO: 376472 - DNA, 30 bp, Artificial Sequence
  Synthetic oligonucleotide
gcatccttcgggatcaaggacttgtgtcac

SEQ ID NO: 376473 - DNA, 30 bp, Artificial Sequence
  Synthetic oligonucleotide
gtgcacttggttgttccacggctttgtcac

SEQ ID NO: 376474 - DNA, 30 bp, Artificial Sequence
  Synthetic oligonucleotide
tctacggccactggtcattatagaattcac

SEQ ID NO: 376475 - DNA, 30 bp, Artificial Sequence
  Synthetic oligonucleotide
tagcgatctaagctctcgtcaataattcac

SEQ ID NO: 376476 - DNA, 30 bp, Artificial Sequence
  Synthetic oligonucleotide
gtcacatgtgagcccgaggcgaacattcac

SEQ ID NO: 376477 - DNA, 30 bp, Artificial Sequence
  Synthetic oligonucleotide
atcgatgcacctctttcccacatcattcac

SEQ ID NO: 376478 - DNA, 30 bp, Artificial Sequence
  Synthetic oligonucleotide
gaacaaattcctctctgtgtattcattcac

SEQ ID NO: 376479 - DNA, 30 bp, Artificial Sequence
  Synthetic oligonucleotide
atcgctcgccattgatacttttagattcac

SEQ ID NO: 376480 - DNA, 30 bp, Artificial Sequence
  Synthetic oligonucleotide
aacgccggtctaaatccaaagccgattcac

SEQ ID NO: 376481 - DNA, 30 bp, Artificial Sequence
  Synthetic oligonucleotide
tccttactagaaggctatcacttgattcac

SEQ ID NO: 376482 - DNA, 30 bp, Artificial Sequence
  Synthetic oligonucleotide
acatggtgtccccggcgcggagttattcac

SEQ ID NO: 376483 - DNA, 30 bp, Artificial Sequence
  Synthetic oligonucleotide
gcaaaatgccttattaaaagctcacttcac

SEQ ID NO: 376484 - DNA, 30 bp, Artificial Sequence
  Synthetic oligonucleotide
gacgtaatctcttctagaagatcccttcac

SEQ ID NO: 376485 - DNA, 30 bp, Artificial Sequence
  Synthetic oligonucleotide
cagtaaagtcttcctgtgacgggccttcac

SEQ ID NO: 376486 - DNA, 30 bp, Artificial Sequence
  Synthetic oligonucleotide
acacataagcgactagcacgtatccttcac

SEQ ID NO: 376487 - DNA, 30 bp, Artificial Sequence
  Synthetic oligonucleotide
aacgttagaggacaggccgcagtccttcac

SEQ ID NO: 376488 - DNA, 30 bp, Artificial Sequence
  Synthetic oligonucleotide
tacgacacagatggtaatatgaagcttcac

SEQ ID NO: 376489 - DNA, 30 bp, Artificial Sequence
  Synthetic oligonucleotide
caacgaaacgctcccactatacggcttcac

SEQ ID NO: 376490 - DNA, 30 bp, Artificial Sequence
  Synthetic oligonucleotide
cgaatcagcaattcccctcgacctcttcac

SEQ ID NO: 376491 - DNA, 30 bp, Artificial Sequence
  Synthetic oligonucleotide
tatcacacgctcttctaggatgacgttcac

SEQ ID NO: 376492 - DNA, 30 bp, Artificial Sequence
  Synthetic oligonucleotide
gcagggaaaatgggatttgccggcgttcac

SEQ ID NO: 376493 - DNA, 30 bp, Artificial Sequence
  Synthetic oligonucleotide
acatagcagccgtacattatcatcgttcac

SEQ ID NO: 376494 - DNA, 30 bp, Artificial Sequence
  Synthetic oligonucleotide
gggatttgccaacggccggtctgggttcac

SEQ ID NO: 376495 - DNA, 30 bp, Artificial Sequence
  Synthetic oligonucleotide
cccatattcgcattcgcccgaactgttcac

SEQ ID NO: 376496 - DNA, 30 bp, Artificial Sequence
  Synthetic oligonucleotide
aaaacagtaaatcgatcagtgactgttcac

SEQ ID NO: 376497 - DNA, 30 bp, Artificial Sequence
  Synthetic oligonucleotide
actgtatccctcagggccggaacatttcac

SEQ ID NO: 376498 - DNA, 30 bp, Artificial Sequence
  Synthetic oligonucleotide
tggacaagcaacccggcgctctactttcac

SEQ ID NO: 376499 - DNA, 30 bp, Artificial Sequence
  Synthetic oligonucleotide
ttctcaacacctccatgtgacgcctttcac

SEQ ID NO: 376500 - DNA, 30 bp, Artificial Sequence
  Synthetic oligonucleotide
ttaacactacagccggcattccagtttcac

SEQ ID NO: 376501 - DNA, 30 bp, Artificial Sequence
  Synthetic oligonucleotide
gagagataatggagctgacagtgttttcac

SEQ ID NO: 376502 - DNA, 34 bp, Artificial Sequence
  Synthetic oligonucleotide
gatactagtccaccacgtgtccatcagaaaagac

SEQ ID NO: 376503 - DNA, 30 bp, Artificial Sequence
  Synthetic oligonucleotide
gtagtattgtaaagtaactgtataaaagac

SEQ ID NO: 376504 - DNA, 30 bp, Artificial Sequence
  Synthetic oligonucleotide
acattccaataactctctcgaaccaaagac

SEQ ID NO: 376505 - DNA, 30 bp, Artificial Sequence
  Synthetic oligonucleotide
aattttggcgggttctcacgctagaaagac

SEQ ID NO: 376506 - DNA, 30 bp, Artificial Sequence
  Synthetic oligonucleotide
tttcagccggagtgatcatggacgaaagac

SEQ ID NO: 376507 - DNA, 30 bp, Artificial Sequence
  Synthetic oligonucleotide
tgatcctaaaggtcatgttaaaggaaagac

SEQ ID NO: 376508 - DNA, 30 bp, Artificial Sequence
  Synthetic oligonucleotide
taaggctccatagcagataatgctaaagac

SEQ ID NO: 376509 - DNA, 30 bp, Artificial Sequence
  Synthetic oligonucleotide
ggttgcaaaacgttgacgctcattaaagac

SEQ ID NO: 376510 - DNA, 30 bp, Artificial Sequence
  Synthetic oligonucleotide
tggtcggtggtgatctgtatcccacaagac

SEQ ID NO: 376511 - DNA, 30 bp, Artificial Sequence
  Synthetic oligonucleotide
atctatgaactcgttaggtaaggccaagac

SEQ ID NO: 376512 - DNA, 31 bp, Artificial Sequence
  Synthetic oligonucleotide
gataatcgggtttcgtgaaaatatccaagac

SEQ ID NO: 376513 - DNA, 30 bp, Artificial Sequence
  Synthetic oligonucleotide
ctcaatattaacgtcaactcagtgcaagac

SEQ ID NO: 376514 - DNA, 30 bp, Artificial Sequence
  Synthetic oligonucleotide
aattccttggctctgtacactgctcaagac

SEQ ID NO: 376515 - DNA, 30 bp, Artificial Sequence
  Synthetic oligonucleotide
aaaaacaatcaacaatagtcggttcaagac

SEQ ID NO: 376516 - DNA, 30 bp, Artificial Sequence
  Synthetic oligonucleotide
cccctcgtactagcccgtggtcacgaagac

SEQ ID NO: 376517 - DNA, 30 bp, Artificial Sequence
  Synthetic oligonucleotide
gcacactgacaacagcagtaataggaagac

SEQ ID NO: 376518 - DNA, 30 bp, Artificial Sequence
  Synthetic oligonucleotide
taaccattcgatggccataaagcggaagac

SEQ ID NO: 376519 - DNA, 30 bp, Artificial Sequence
  Synthetic oligonucleotide
gcccacaaatctagtgtacgttgggaagac

SEQ ID NO: 376520 - DNA, 30 bp, Artificial Sequence
  Synthetic oligonucleotide
aataagttaaactggcctactggctaagac

SEQ ID NO: 376521 - DNA, 30 bp, Artificial Sequence
  Synthetic oligonucleotide
tttaaggcacagattatcgacccgtaagac

SEQ ID NO: 376522 - DNA, 30 bp, Artificial Sequence
  Synthetic oligonucleotide
ccgtgtcagcgccattaggagcattaagac

SEQ ID NO: 376523 - DNA, 30 bp, Artificial Sequence
  Synthetic oligonucleotide
ggtttggggatgcacgttgcatgttaagac

SEQ ID NO: 376524 - DNA, 30 bp, Artificial Sequence
  Synthetic oligonucleotide
atgcaggccaagagggaaggagtcacagac

SEQ ID NO: 376525 - DNA, 30 bp, Artificial Sequence
  Synthetic oligonucleotide
gtatacttagtaaacccaggttggacagac

SEQ ID NO: 376526 - DNA, 30 bp, Artificial Sequence
  Synthetic oligonucleotide
tgggatagccgactcccgccagttacagac

SEQ ID NO: 376527 - DNA, 30 bp, Artificial Sequence
  Synthetic oligonucleotide
cacagacacgcttgtatcatttaaccagac

SEQ ID NO: 376528 - DNA, 30 bp, Artificial Sequence
  Synthetic oligonucleotide
gctacataaaatggctgtcatctgccagac

SEQ ID NO: 376529 - DNA, 30 bp, Artificial Sequence
  Synthetic oligonucleotide
ggtcttcagaccccgtgaagcaatccagac

SEQ ID NO: 376530 - DNA, 30 bp, Artificial Sequence
  Synthetic oligonucleotide
cagtgctggggcagtcccgtgccagcagac

SEQ ID NO: 376531 - DNA, 30 bp, Artificial Sequence
  Synthetic oligonucleotide
tatgaggaccgcatgaacacagcagcagac

SEQ ID NO: 376532 - DNA, 31 bp, Artificial Sequence
  Synthetic oligonucleotide
ccaggggcttaaactagggctgggagcagac

SEQ ID NO: 376533 - DNA, 30 bp, Artificial Sequence
  Synthetic oligonucleotide
aatggcagtccgaatttgtccggcgcagac

SEQ ID NO: 376534 - DNA, 30 bp, Artificial Sequence
  Synthetic oligonucleotide
tcctgatatttataatagggtacggcagac

SEQ ID NO: 376535 - DNA, 30 bp, Artificial Sequence
  Synthetic oligonucleotide
gttactaaccgtacaattgcaatggcagac

SEQ ID NO: 376536 - DNA, 30 bp, Artificial Sequence
  Synthetic oligonucleotide
catgctcggcagcagcggaatttggcagac

SEQ ID NO: 376537 - DNA, 30 bp, Artificial Sequence
  Synthetic oligonucleotide
caacacggttcacacccgttgtttgcagac

SEQ ID NO: 376538 - DNA, 30 bp, Artificial Sequence
  Synthetic oligonucleotide
tcgcgcctttacgactccagcaaatcagac

SEQ ID NO: 376539 - DNA, 29 bp, Artificial Sequence
  Synthetic oligonucleotide
ctagtcatgaactgcggtatacgtcagac

SEQ ID NO: 376540 - DNA, 30 bp, Artificial Sequence
  Synthetic oligonucleotide
ttcttcgctaacggggggtgatcgtcagac

SEQ ID NO: 376541 - DNA, 30 bp, Artificial Sequence
  Synthetic oligonucleotide
agattccttagctgtagggtctcgtcagac

SEQ ID NO: 376542 - DNA, 30 bp, Artificial Sequence
  Synthetic oligonucleotide
ttagttaaccgtacatggcgtgggtcagac

SEQ ID NO: 376543 - DNA, 30 bp, Artificial Sequence
  Synthetic oligonucleotide
ttcacttccgtctctgacggtttgtcagac

SEQ ID NO: 376544 - DNA, 30 bp, Artificial Sequence
  Synthetic oligonucleotide
aaatccagaagtgtcgtatgacattcagac

SEQ ID NO: 376545 - DNA, 30 bp, Artificial Sequence
  Synthetic oligonucleotide
accgattatatcgacgcctggtattcagac

SEQ ID NO: 376546 - DNA, 30 bp, Artificial Sequence
  Synthetic oligonucleotide
ccgataggcacagggtagtctgcaagagac

SEQ ID NO: 376547 - DNA, 30 bp, Artificial Sequence
  Synthetic oligonucleotide
gtctaattcacgcatcaatttggaagagac

SEQ ID NO: 376548 - DNA, 30 bp, Artificial Sequence
  Synthetic oligonucleotide
tactgatgattcttgttaggaaccagagac

SEQ ID NO: 376549 - DNA, 30 bp, Artificial Sequence
  Synthetic oligonucleotide
ctatgtggctcaactctttagtgcagagac

SEQ ID NO: 376550 - DNA, 30 bp, Artificial Sequence
  Synthetic oligonucleotide
ttgcaatgggcttttgggaaagtcagagac

SEQ ID NO: 376551 - DNA, 30 bp, Artificial Sequence
  Synthetic oligonucleotide
tggcgaggcacgcacaaggataggagagac

SEQ ID NO: 376552 - DNA, 30 bp, Artificial Sequence
  Synthetic oligonucleotide
gcataataattaacggtctgttatagagac

SEQ ID NO: 376553 - DNA, 30 bp, Artificial Sequence
  Synthetic oligonucleotide
aaacggtgttcctttcagtccggtagagac

SEQ ID NO: 376554 - DNA, 30 bp, Artificial Sequence
  Synthetic oligonucleotide
gtagtcttgccttagcatttggttagagac

SEQ ID NO: 376555 - DNA, 30 bp, Artificial Sequence
  Synthetic oligonucleotide
atgactatagaaattggagttccacgagac

SEQ ID NO: 376556 - DNA, 30 bp, Artificial Sequence
  Synthetic oligonucleotide
tggcagggaatcgtcgagaaaaaccgagac

SEQ ID NO: 376557 - DNA, 30 bp, Artificial Sequence
  Synthetic oligonucleotide
atcgcgagccgcgcactgctccatcgagac

SEQ ID NO: 376558 - DNA, 30 bp, Artificial Sequence
  Synthetic oligonucleotide
agcatttggagtcagggcactgctcgagac

SEQ ID NO: 376559 - DNA, 30 bp, Artificial Sequence
  Synthetic oligonucleotide
gcgatcagttttcgggtttttctaggagac

SEQ ID NO: 376560 - DNA, 30 bp, Artificial Sequence
  Synthetic oligonucleotide
gatttcgcctagaagctacccgagggagac

SEQ ID NO: 376561 - DNA, 30 bp, Artificial Sequence
  Synthetic oligonucleotide
aagatccgttgtcgctctagggatggagac

SEQ ID NO: 376562 - DNA, 30 bp, Artificial Sequence
  Synthetic oligonucleotide
tgtccaacccctatattttggtgtggagac

SEQ ID NO: 376563 - DNA, 29 bp, Artificial Sequence
  Synthetic oligonucleotide
tgagtgcatacatttacggtgttggagac

SEQ ID NO: 376564 - DNA, 30 bp, Artificial Sequence
  Synthetic oligonucleotide
gacccgataacttcctagtgaagatgagac

SEQ ID NO: 376565 - DNA, 30 bp, Artificial Sequence
  Synthetic oligonucleotide
agagatgtagttcgcatcaggatatgagac

SEQ ID NO: 376566 - DNA, 30 bp, Artificial Sequence
  Synthetic oligonucleotide
gtgtgtgctgtggctagccaatcctgagac

SEQ ID NO: 376567 - DNA, 30 bp, Artificial Sequence
  Synthetic oligonucleotide
aaattccaaaaaaatgtatcttcctgagac

SEQ ID NO: 376568 - DNA, 30 bp, Artificial Sequence
  Synthetic oligonucleotide
gtcggtctcgctaggatcccgcggtgagac

SEQ ID NO: 376569 - DNA, 30 bp, Artificial Sequence
  Synthetic oligonucleotide
tacccgtctcaaaaccggaagacaatagac

SEQ ID NO: 376570 - DNA, 30 bp, Artificial Sequence
  Synthetic oligonucleotide
gccgtatgcgactataaaagtaacatagac

SEQ ID NO: 376571 - DNA, 30 bp, Artificial Sequence
  Synthetic oligonucleotide
gcgcgcgtaagcgtctgcgcgtggatagac

SEQ ID NO: 376572 - DNA, 30 bp, Artificial Sequence
  Synthetic oligonucleotide
aatcggtatggtcgatgggattctatagac

SEQ ID NO: 376573 - DNA, 30 bp, Artificial Sequence
  Synthetic oligonucleotide
cgagcgtttatagtccactaaagtatagac

SEQ ID NO: 376574 - DNA, 30 bp, Artificial Sequence
  Synthetic oligonucleotide
gacacacgtctcacgaagcacctactagac

SEQ ID NO: 376575 - DNA, 30 bp, Artificial Sequence
  Synthetic oligonucleotide
tttaggcatgggggttactcagtactagac

SEQ ID NO: 376576 - DNA, 30 bp, Artificial Sequence
  Synthetic oligonucleotide
agaagagcctttccgggtttttacctagac

SEQ ID NO: 376577 - DNA, 30 bp, Artificial Sequence
  Synthetic oligonucleotide
gggtctaagtttgacacggtctccctagac

SEQ ID NO: 376578 - DNA, 30 bp, Artificial Sequence
  Synthetic oligonucleotide
tggttgtccaacgataggccttatctagac

SEQ ID NO: 376579 - DNA, 30 bp, Artificial Sequence
  Synthetic oligonucleotide
tcgctacgagcggtgtttattattctagac

SEQ ID NO: 376580 - DNA, 30 bp, Artificial Sequence
  Synthetic oligonucleotide
aaggctcggttgtggcaccttcttctagac

SEQ ID NO: 376581 - DNA, 30 bp, Artificial Sequence
  Synthetic oligonucleotide
cgcctagtcattcacttgtctaaagtagac

SEQ ID NO: 376582 - DNA, 30 bp, Artificial Sequence
  Synthetic oligonucleotide
agtggcgatcccgtatccaccgtagtagac

SEQ ID NO: 376583 - DNA, 30 bp, Artificial Sequence
  Synthetic oligonucleotide
ttctgcctaagcgtcttcgcacccgtagac

SEQ ID NO: 376584 - DNA, 30 bp, Artificial Sequence
  Synthetic oligonucleotide
ggggtttcctgtaggagccagctcgtagac

SEQ ID NO: 376585 - DNA, 30 bp, Artificial Sequence
  Synthetic oligonucleotide
cgatttcggggatctctcgtgaaggtagac

SEQ ID NO: 376586 - DNA, 30 bp, Artificial Sequence
  Synthetic oligonucleotide
acggacgtgcagatattgtactgggtagac

SEQ ID NO: 376587 - DNA, 30 bp, Artificial Sequence
  Synthetic oligonucleotide
ggggcgtcgcgcttccctcgatgtgtagac

SEQ ID NO: 376588 - DNA, 31 bp, Artificial Sequence
  Synthetic oligonucleotide
ctcaagagatttgcacggctgatgtgtagac

SEQ ID NO: 376589 - DNA, 30 bp, Artificial Sequence
  Synthetic oligonucleotide
atataacactgttggctggctcgattagac

SEQ ID NO: 376590 - DNA, 30 bp, Artificial Sequence
  Synthetic oligonucleotide
gggccactcagccgtccgcagtccttagac

SEQ ID NO: 376591 - DNA, 30 bp, Artificial Sequence
  Synthetic oligonucleotide
ctactgcattggtgattaaagcgcttagac

SEQ ID NO: 376592 - DNA, 30 bp, Artificial Sequence
  Synthetic oligonucleotide
tgcggtactttcgtagcgtggcgcttagac

SEQ ID NO: 376593 - DNA, 30 bp, Artificial Sequence
  Synthetic oligonucleotide
cgcggagcgtaatacgcactgttcttagac

SEQ ID NO: 376594 - DNA, 30 bp, Artificial Sequence
  Synthetic oligonucleotide
ctgtgagggttcagtcgtagaaatttagac

SEQ ID NO: 376595 - DNA, 30 bp, Artificial Sequence
  Synthetic oligonucleotide
acaaggtgagccgattacagtcttttagac

SEQ ID NO: 376596 - DNA, 30 bp, Artificial Sequence
  Synthetic oligonucleotide
cgccgctctttcagaagggcatttttagac

SEQ ID NO: 376597 - DNA, 30 bp, Artificial Sequence
  Synthetic oligonucleotide
gaggatgtcgcctgtgtgagtataaacgac

SEQ ID NO: 376598 - DNA, 30 bp, Artificial Sequence
  Synthetic oligonucleotide
ggtgtgcacggccaggatggagtaaacgac

SEQ ID NO: 376599 - DNA, 30 bp, Artificial Sequence
  Synthetic oligonucleotide
tttatatggtatccggtcttagtaaacgac

SEQ ID NO: 376600 - DNA, 30 bp, Artificial Sequence
  Synthetic oligonucleotide
ctctcgctcctcaagaggagctacaacgac

SEQ ID NO: 376601 - DNA, 30 bp, Artificial Sequence
  Synthetic oligonucleotide
aggtttttaatggtggcaacgtccaacgac

SEQ ID NO: 376602 - DNA, 30 bp, Artificial Sequence
  Synthetic oligonucleotide
taatacgaagctcatgttcctggcaacgac

SEQ ID NO: 376603 - DNA, 30 bp, Artificial Sequence
  Synthetic oligonucleotide
cactgtatacttaataagtcgtagaacgac

SEQ ID NO: 376604 - DNA, 30 bp, Artificial Sequence
  Synthetic oligonucleotide
ccttaaaattgcacgggtgggagtaacgac

SEQ ID NO: 376605 - DNA, 30 bp, Artificial Sequence
  Synthetic oligonucleotide
atcctcgctcgacctaaagaagttaacgac

SEQ ID NO: 376606 - DNA, 30 bp, Artificial Sequence
  Synthetic oligonucleotide
gtgtttgtctgcgatgacaagacacacgac

SEQ ID NO: 376607 - DNA, 30 bp, Artificial Sequence
  Synthetic oligonucleotide
tgctccgagtatattttaaatcgacacgac

SEQ ID NO: 376608 - DNA, 31 bp, Artificial Sequence
  Synthetic oligonucleotide
tattgcatagggttcagcaaactgacacgac

SEQ ID NO: 376609 - DNA, 30 bp, Artificial Sequence
  Synthetic oligonucleotide
agctagacgctcgggggaacactacacgac

SEQ ID NO: 376610 - DNA, 30 bp, Artificial Sequence
  Synthetic oligonucleotide
gtgttgttcatcgagaagttggcgcacgac

SEQ ID NO: 376611 - DNA, 30 bp, Artificial Sequence
  Synthetic oligonucleotide
ggaccgcggtccggaaagaacattcacgac

SEQ ID NO: 376612 - DNA, 30 bp, Artificial Sequence
  Synthetic oligonucleotide
gtgaccaatccccctcatttctcagacgac

SEQ ID NO: 376613 - DNA, 30 bp, Artificial Sequence
  Synthetic oligonucleotide
ggttctgtaaacaccagccaacgcgacgac

SEQ ID NO: 376614 - DNA, 30 bp, Artificial Sequence
  Synthetic oligonucleotide
tgggcatgatcgttatgctctggcgacgac

SEQ ID NO: 376615 - DNA, 30 bp, Artificial Sequence
  Synthetic oligonucleotide
gaacaggaagtagtcaattccctggacgac

SEQ ID NO: 376616 - DNA, 30 bp, Artificial Sequence
  Synthetic oligonucleotide
ttatagcaatgcctcgcagaggttgacgac

SEQ ID NO: 376617 - DNA, 30 bp, Artificial Sequence
  Synthetic oligonucleotide
gattgtaatacggcggagttctaatacgac

SEQ ID NO: 376618 - DNA, 30 bp, Artificial Sequence
  Synthetic oligonucleotide
gatgtcgactcgcggggcccgtcctacgac

SEQ ID NO: 376619 - DNA, 30 bp, Artificial Sequence
  Synthetic oligonucleotide
cgctttctctagctacttagggggtacgac

SEQ ID NO: 376620 - DNA, 30 bp, Artificial Sequence
  Synthetic oligonucleotide
ccccgttccggatgctttagaggcaccgac

SEQ ID NO: 376621 - DNA, 30 bp, Artificial Sequence
  Synthetic oligonucleotide
gactcctaataccgtggcgacgtgaccgac

SEQ ID NO: 376622 - DNA, 30 bp, Artificial Sequence
  Synthetic oligonucleotide
acctctagggcgggtcgtgccgctaccgac

SEQ ID NO: 376623 - DNA, 30 bp, Artificial Sequence
  Synthetic oligonucleotide
gatagttcaaaatccacaaacgttaccgac

SEQ ID NO: 376624 - DNA, 30 bp, Artificial Sequence
  Synthetic oligonucleotide
caggggaggaaggatagtggtagacccgac

SEQ ID NO: 376625 - DNA, 30 bp, Artificial Sequence
  Synthetic oligonucleotide
ggaacagcgttgtctggtgacaaccccgac

SEQ ID NO: 376626 - DNA, 30 bp, Artificial Sequence
  Synthetic oligonucleotide
ggggtcacgccctaaggtgttattcccgac

SEQ ID NO: 376627 - DNA, 30 bp, Artificial Sequence
  Synthetic oligonucleotide
tgattattctaggtgtagctacaagccgac

SEQ ID NO: 376628 - DNA, 30 bp, Artificial Sequence
  Synthetic oligonucleotide
attctgcgaggctacaagtgtcaagccgac

SEQ ID NO: 376629 - DNA, 30 bp, Artificial Sequence
  Synthetic oligonucleotide
ctgaccggtgagcaccaggtgagagccgac

SEQ ID NO: 376630 - DNA, 30 bp, Artificial Sequence
  Synthetic oligonucleotide
gcagcttgttgcttaaagtcttcggccgac

SEQ ID NO: 376631 - DNA, 30 bp, Artificial Sequence
  Synthetic oligonucleotide
ttcgctaggttgatgcactagctctccgac

SEQ ID NO: 376632 - DNA, 30 bp, Artificial Sequence
  Synthetic oligonucleotide
gagcttacactaacaagacagacgtccgac

SEQ ID NO: 376633 - DNA, 30 bp, Artificial Sequence
  Synthetic oligonucleotide
gggtgatgacagatctgtaagtattccgac

SEQ ID NO: 376634 - DNA, 30 bp, Artificial Sequence
  Synthetic oligonucleotide
agctcttaaattcacgcaatttcttccgac

SEQ ID NO: 376635 - DNA, 30 bp, Artificial Sequence
  Synthetic oligonucleotide
ttgacaattacacagtcctatgaaagcgac

SEQ ID NO: 376636 - DNA, 30 bp, Artificial Sequence
  Synthetic oligonucleotide
gatcctcgcggcttaggtgtgagaagcgac

SEQ ID NO: 376637 - DNA, 30 bp, Artificial Sequence
  Synthetic oligonucleotide
aataaataaatgggttatacatcgagcgac

SEQ ID NO: 376638 - DNA, 30 bp, Artificial Sequence
  Synthetic oligonucleotide
ggcgggtccacgccggcatggtcgagcgac

SEQ ID NO: 376639 - DNA, 30 bp, Artificial Sequence
  Synthetic oligonucleotide
cgcgacagggtaagcacgtacatgagcgac

SEQ ID NO: 376640 - DNA, 30 bp, Artificial Sequence
  Synthetic oligonucleotide
gcgtcggtctgcagcactctcaggcgcgac

SEQ ID NO: 376641 - DNA, 30 bp, Artificial Sequence
  Synthetic oligonucleotide
ttgacttgggcctattggggtctgcgcgac

SEQ ID NO: 376642 - DNA, 30 bp, Artificial Sequence
  Synthetic oligonucleotide
cgataatgatacagttagatgactcgcgac

SEQ ID NO: 376643 - DNA, 30 bp, Artificial Sequence
  Synthetic oligonucleotide
atatcgtagtcccgtccaataggtcgcgac

SEQ ID NO: 376644 - DNA, 30 bp, Artificial Sequence
  Synthetic oligonucleotide
gtacctttactgcttcctcggtacggcgac

SEQ ID NO: 376645 - DNA, 30 bp, Artificial Sequence
  Synthetic oligonucleotide
gttgctaagaacccttttagtcccggcgac

SEQ ID NO: 376646 - DNA, 30 bp, Artificial Sequence
  Synthetic oligonucleotide
gtgcgctactgaatataccccttcggcgac

SEQ ID NO: 376647 - DNA, 30 bp, Artificial Sequence
  Synthetic oligonucleotide
gtccctgagatttttgtattatgtggcgac

SEQ ID NO: 376648 - DNA, 30 bp, Artificial Sequence
  Synthetic oligonucleotide
aatgcaatttgatttagtatacaatgcgac

SEQ ID NO: 376649 - DNA, 30 bp, Artificial Sequence
  Synthetic oligonucleotide
ggtagatgctcatactgggcctcatgcgac

SEQ ID NO: 376650 - DNA, 30 bp, Artificial Sequence
  Synthetic oligonucleotide
gaagtcttatcgtctaagtctccctgcgac

SEQ ID NO: 376651 - DNA, 30 bp, Artificial Sequence
  Synthetic oligonucleotide
ttgcccattattggttcccggcagtgcgac

SEQ ID NO: 376652 - DNA, 30 bp, Artificial Sequence
  Synthetic oligonucleotide
tttagatgaagatttatgcattcttgcgac

SEQ ID NO: 376653 - DNA, 30 bp, Artificial Sequence
  Synthetic oligonucleotide
acgtcccttcgcgtgatgaagctttgcgac

SEQ ID NO: 376654 - DNA, 30 bp, Artificial Sequence
  Synthetic oligonucleotide
tatgacgtgcgggtgatgattcaaatcgac

SEQ ID NO: 376655 - DNA, 30 bp, Artificial Sequence
  Synthetic oligonucleotide
attaaaccgcatgctttatgcaacatcgac

SEQ ID NO: 376656 - DNA, 30 bp, Artificial Sequence
  Synthetic oligonucleotide
gtatgcctggggattgtgcacaccatcgac

SEQ ID NO: 376657 - DNA, 30 bp, Artificial Sequence
  Synthetic oligonucleotide
cgatgcgactcgcataccgccgagatcgac

SEQ ID NO: 376658 - DNA, 30 bp, Artificial Sequence
  Synthetic oligonucleotide
tgcatgatctttgcgtttgggggtatcgac

SEQ ID NO: 376659 - DNA, 30 bp, Artificial Sequence
  Synthetic oligonucleotide
cgactggtacgtggcccctagtgtatcgac

SEQ ID NO: 376660 - DNA, 30 bp, Artificial Sequence
  Synthetic oligonucleotide
caatgtatacaatacggagctcgactcgac

SEQ ID NO: 376661 - DNA, 30 bp, Artificial Sequence
  Synthetic oligonucleotide
aaatacttattttggagagtactactcgac

SEQ ID NO: 376662 - DNA, 30 bp, Artificial Sequence
  Synthetic oligonucleotide
ccaccttcagacgcccattttgacctcgac

SEQ ID NO: 376663 - DNA, 30 bp, Artificial Sequence
  Synthetic oligonucleotide
atcagtactagtcgatgcggcacgctcgac

SEQ ID NO: 376664 - DNA, 30 bp, Artificial Sequence
  Synthetic oligonucleotide
ggcgttacttccgcgaagtacatagtcgac

SEQ ID NO: 376665 - DNA, 30 bp, Artificial Sequence
  Synthetic oligonucleotide
attgggtcggacggcgcggtacatgtcgac

SEQ ID NO: 376666 - DNA, 30 bp, Artificial Sequence
  Synthetic oligonucleotide
ctccacatttgcggggcccttcatgtcgac

SEQ ID NO: 376667 - DNA, 29 bp, Artificial Sequence
  Synthetic oligonucleotide
ccttttttcaaattggggagattgtcgac

SEQ ID NO: 376668 - DNA, 30 bp, Artificial Sequence
  Synthetic oligonucleotide
tagcagcgcccgagaatcggttttgtcgac

SEQ ID NO: 376669 - DNA, 30 bp, Artificial Sequence
  Synthetic oligonucleotide
accacgccaagttgaggcgtgtcattcgac

SEQ ID NO: 376670 - DNA, 30 bp, Artificial Sequence
  Synthetic oligonucleotide
tataacaccatcatctaccggcccttcgac

SEQ ID NO: 376671 - DNA, 30 bp, Artificial Sequence
  Synthetic oligonucleotide
ttttgacggcgcgcttcgtggtccttcgac

SEQ ID NO: 376672 - DNA, 30 bp, Artificial Sequence
  Synthetic oligonucleotide
cctaatttatattaaaaggtggggttcgac

SEQ ID NO: 376673 - DNA, 30 bp, Artificial Sequence
  Synthetic oligonucleotide
gacagagcaaccgtataatttttgttcgac

SEQ ID NO: 376674 - DNA, 30 bp, Artificial Sequence
  Synthetic oligonucleotide
aaaccagcaccacgcagtagaagtttcgac

SEQ ID NO: 376675 - DNA, 30 bp, Artificial Sequence
  Synthetic oligonucleotide
ggttgggatcacggaggatgcataaaggac

SEQ ID NO: 376676 - DNA, 30 bp, Artificial Sequence
  Synthetic oligonucleotide
aatggtacaagtaccgctcagataaaggac

SEQ ID NO: 376677 - DNA, 30 bp, Artificial Sequence
  Synthetic oligonucleotide
cgtgggtataaacttcagacaatcaaggac

SEQ ID NO: 376678 - DNA, 30 bp, Artificial Sequence
  Synthetic oligonucleotide
cagtcgagactgtctctcacagtcaaggac

SEQ ID NO: 376679 - DNA, 30 bp, Artificial Sequence
  Synthetic oligonucleotide
gcccgccttatagagttgtcttggaaggac

SEQ ID NO: 376680 - DNA, 30 bp, Artificial Sequence
  Synthetic oligonucleotide
cccactagctaaaatcagctctttaaggac

SEQ ID NO: 376681 - DNA, 30 bp, Artificial Sequence
  Synthetic oligonucleotide
agcatgttcgtgacccctggccaacaggac

SEQ ID NO: 376682 - DNA, 30 bp, Artificial Sequence
  Synthetic oligonucleotide
aggaaaatctataaaagtacgtcacaggac

SEQ ID NO: 376683 - DNA, 30 bp, Artificial Sequence
  Synthetic oligonucleotide
agaggcacgcatcggtacgacggacaggac

SEQ ID NO: 376684 - DNA, 30 bp, Artificial Sequence
  Synthetic oligonucleotide
caacattccccataacacccttgacaggac

SEQ ID NO: 376685 - DNA, 30 bp, Artificial Sequence
  Synthetic oligonucleotide
gcggcctttgggatttatgcgtgccaggac

SEQ ID NO: 376686 - DNA, 30 bp, Artificial Sequence
  Synthetic oligonucleotide
gcgccgcgccgttcttctacgcttcaggac

SEQ ID NO: 376687 - DNA, 30 bp, Artificial Sequence
  Synthetic oligonucleotide
aactcgtcgtcgcctgtaaccatagaggac

SEQ ID NO: 376688 - DNA, 30 bp, Artificial Sequence
  Synthetic oligonucleotide
aagcagtgcctcggccaacgcatagaggac

SEQ ID NO: 376689 - DNA, 30 bp, Artificial Sequence
  Synthetic oligonucleotide
agtaggacttaataagagtgtttagaggac

SEQ ID NO: 376690 - DNA, 30 bp, Artificial Sequence
  Synthetic oligonucleotide
gtatcatcgtgttttgacagaggtgaggac

SEQ ID NO: 376691 - DNA, 30 bp, Artificial Sequence
  Synthetic oligonucleotide
ttctctggtagggcgcgacgcgttgaggac

SEQ ID NO: 376692 - DNA, 30 bp, Artificial Sequence
  Synthetic oligonucleotide
aaacaaattgatggtgggagtgttgaggac

SEQ ID NO: 376693 - DNA, 30 bp, Artificial Sequence
  Synthetic oligonucleotide
accgcgcgggacacttgttaaagctaggac

SEQ ID NO: 376694 - DNA, 30 bp, Artificial Sequence
  Synthetic oligonucleotide
caatctaacatgagacttgacagctaggac

SEQ ID NO: 376695 - DNA, 30 bp, Artificial Sequence
  Synthetic oligonucleotide
aggctgtactttggtattaatatctaggac

SEQ ID NO: 376696 - DNA, 31 bp, Artificial Sequence
  Synthetic oligonucleotide
ttgtggtatgcaatagagtatagggtaggac

SEQ ID NO: 376697 - DNA, 30 bp, Artificial Sequence
  Synthetic oligonucleotide
gattgttttaggactagagaggcttaggac

SEQ ID NO: 376698 - DNA, 30 bp, Artificial Sequence
  Synthetic oligonucleotide
tacgtacggaagtccgcggaagtttaggac

SEQ ID NO: 376699 - DNA, 30 bp, Artificial Sequence
  Synthetic oligonucleotide
gagcaggaaagatctccgttgtgaacggac

SEQ ID NO: 376700 - DNA, 30 bp, Artificial Sequence
  Synthetic oligonucleotide
agtaagccgtcggactatttggtaacggac

SEQ ID NO: 376701 - DNA, 30 bp, Artificial Sequence
  Synthetic oligonucleotide
cagttaggctgtgcttcagttaccacggac

SEQ ID NO: 376702 - DNA, 30 bp, Artificial Sequence
  Synthetic oligonucleotide
tatgtaatttcgtccaaaagacccacggac

SEQ ID NO: 376703 - DNA, 30 bp, Artificial Sequence
  Synthetic oligonucleotide
gatctacgtgttagcgccagaagcacggac

SEQ ID NO: 376704 - DNA, 30 bp, Artificial Sequence
  Synthetic oligonucleotide
tggtcgtgttgactacggcgcatgacggac

SEQ ID NO: 376705 - DNA, 30 bp, Artificial Sequence
  Synthetic oligonucleotide
aaaaatggcatagcccacctccctacggac

SEQ ID NO: 376706 - DNA, 30 bp, Artificial Sequence
  Synthetic oligonucleotide
ccgaacgttgcaagggggttaccaccggac

SEQ ID NO: 376707 - DNA, 30 bp, Artificial Sequence
  Synthetic oligonucleotide
aggaaatgcgacgcttttcgtgtcccggac

SEQ ID NO: 376708 - DNA, 30 bp, Artificial Sequence
  Synthetic oligonucleotide
tagttgtcttggaactgggttaacgcggac

SEQ ID NO: 376709 - DNA, 30 bp, Artificial Sequence
  Synthetic oligonucleotide
aactgttgcacaggttacgggttcgcggac

SEQ ID NO: 376710 - DNA, 30 bp, Artificial Sequence
  Synthetic oligonucleotide
ctggaatcgaatccggtgtctgcggcggac

SEQ ID NO: 376711 - DNA, 30 bp, Artificial Sequence
  Synthetic oligonucleotide
tgtctggcgcagaatggttatatggcggac

SEQ ID NO: 376712 - DNA, 30 bp, Artificial Sequence
  Synthetic oligonucleotide
ctaaaaggtaaaaaggatatgtctgcggac

SEQ ID NO: 376713 - DNA, 30 bp, Artificial Sequence
  Synthetic oligonucleotide
cttgcgtcggacaggcaattatgatcggac

SEQ ID NO: 376714 - DNA, 30 bp, Artificial Sequence
  Synthetic oligonucleotide
gaatatacgatgtttagataagcctcggac

SEQ ID NO: 376715 - DNA, 30 bp, Artificial Sequence
  Synthetic oligonucleotide
tcttagagcgagtccgtactacgctcggac

SEQ ID NO: 376716 - DNA, 30 bp, Artificial Sequence
  Synthetic oligonucleotide
tccttgaattcgtgtcgattaggctcggac

SEQ ID NO: 376717 - DNA, 30 bp, Artificial Sequence
  Synthetic oligonucleotide
tttagtcagtactttcttgtatggtcggac

SEQ ID NO: 376718 - DNA, 30 bp, Artificial Sequence
  Synthetic oligonucleotide
aggtctcagccgaaggcatttctgtcggac

SEQ ID NO: 376719 - DNA, 30 bp, Artificial Sequence
  Synthetic oligonucleotide
gatagcgcgcgacgtacttaattgtcggac

SEQ ID NO: 376720 - DNA, 30 bp, Artificial Sequence
  Synthetic oligonucleotide
aaaaatcgcaattgggactttcattcggac

SEQ ID NO: 376721 - DNA, 30 bp, Artificial Sequence
  Synthetic oligonucleotide
cgctagagagtatagctgtgataaagggac

SEQ ID NO: 376722 - DNA, 30 bp, Artificial Sequence
  Synthetic oligonucleotide
tctcgagtatttatggacgttttaagggac

SEQ ID NO: 376723 - DNA, 30 bp, Artificial Sequence
  Synthetic oligonucleotide
agctttgtcagattagaggaggacagggac

SEQ ID NO: 376724 - DNA, 30 bp, Artificial Sequence
  Synthetic oligonucleotide
gtcaattttacacctccttaattcagggac

SEQ ID NO: 376725 - DNA, 30 bp, Artificial Sequence
  Synthetic oligonucleotide
tcttttgaccagttaccttggggtagggac

SEQ ID NO: 376726 - DNA, 30 bp, Artificial Sequence
  Synthetic oligonucleotide
gcactggaatctgcgattactgttagggac

SEQ ID NO: 376727 - DNA, 30 bp, Artificial Sequence
  Synthetic oligonucleotide
ctggtaattatctcgttttaccaacgggac

SEQ ID NO: 376728 - DNA, 30 bp, Artificial Sequence
  Synthetic oligonucleotide
attcgatttgggcacactgcctgacgggac

SEQ ID NO: 376729 - DNA, 30 bp, Artificial Sequence
  Synthetic oligonucleotide
tgcatctttcacgacttattgacccgggac

SEQ ID NO: 376730 - DNA, 30 bp, Artificial Sequence
  Synthetic oligonucleotide
ttcatggttaatacgaaagtggcccgggac

SEQ ID NO: 376731 - DNA, 30 bp, Artificial Sequence
  Synthetic oligonucleotide
agcctatgcgtgtattcaccacagcgggac

SEQ ID NO: 376732 - DNA, 30 bp, Artificial Sequence
  Synthetic oligonucleotide
atctctctcacaccagcgtaaactcgggac

SEQ ID NO: 376733 - DNA, 30 bp, Artificial Sequence
  Synthetic oligonucleotide
tccaatggcaaatagctagcagagggggac

SEQ ID NO: 376734 - DNA, 30 bp, Artificial Sequence
  Synthetic oligonucleotide
gggaatcaatttttgcgattggcgggggac

SEQ ID NO: 376735 - DNA, 30 bp, Artificial Sequence
  Synthetic oligonucleotide
tgagagtgcatacgatctaaatcgggggac

SEQ ID NO: 376736 - DNA, 30 bp, Artificial Sequence
  Synthetic oligonucleotide
tacttcgggatgtgctttctttctggggac

SEQ ID NO: 376737 - DNA, 30 bp, Artificial Sequence
  Synthetic oligonucleotide
aggtaatcatgattgacagccgcatgggac

SEQ ID NO: 376738 - DNA, 30 bp, Artificial Sequence
  Synthetic oligonucleotide
gtttgatgcggctgtcagtatggatgggac

SEQ ID NO: 376739 - DNA, 30 bp, Artificial Sequence
  Synthetic oligonucleotide
ggaggacgtgatcgcgagtgattatgggac

SEQ ID NO: 376740 - DNA, 30 bp, Artificial Sequence
  Synthetic oligonucleotide
gcacagtaccaccccgcacccaactgggac

SEQ ID NO: 376741 - DNA, 30 bp, Artificial Sequence
  Synthetic oligonucleotide
ccgcagattcttcgcatcgtggactgggac

SEQ ID NO: 376742 - DNA, 30 bp, Artificial Sequence
  Synthetic oligonucleotide
gcgcccccgctgaccgagaggtcgtgggac

SEQ ID NO: 376743 - DNA, 30 bp, Artificial Sequence
  Synthetic oligonucleotide
aaacgatctcgcgtacatctgacttgggac

SEQ ID NO: 376744 - DNA, 30 bp, Artificial Sequence
  Synthetic oligonucleotide
aaggttcgtttcacgcgtgcaagttgggac

SEQ ID NO: 376745 - DNA, 30 bp, Artificial Sequence
  Synthetic oligonucleotide
ccggttaggtgcctgcatcaacaaatggac

SEQ ID NO: 376746 - DNA, 30 bp, Artificial Sequence
  Synthetic oligonucleotide
ttggataagttgtattgctgaatcatggac

SEQ ID NO: 376747 - DNA, 30 bp, Artificial Sequence
  Synthetic oligonucleotide
gaaagcagtctccctgtgaagaatatggac

SEQ ID NO: 376748 - DNA, 30 bp, Artificial Sequence
  Synthetic oligonucleotide
gcgtgaccttgttggtctgagcatatggac

SEQ ID NO: 376749 - DNA, 30 bp, Artificial Sequence
  Synthetic oligonucleotide
gtagggctataaggcttaccgcttatggac

SEQ ID NO: 376750 - DNA, 30 bp, Artificial Sequence
  Synthetic oligonucleotide
taatgagctttaagagacctcgaactggac

SEQ ID NO: 376751 - DNA, 30 bp, Artificial Sequence
  Synthetic oligonucleotide
ctgttacgtacgtatgggcgactactggac

SEQ ID NO: 376752 - DNA, 30 bp, Artificial Sequence
  Synthetic oligonucleotide
tacatatgagtcattgcgcaagacctggac

SEQ ID NO: 376753 - DNA, 30 bp, Artificial Sequence
  Synthetic oligonucleotide
ctatagaggtatgagttttgatccctggac

SEQ ID NO: 376754 - DNA, 30 bp, Artificial Sequence
  Synthetic oligonucleotide
ggctagttagcggtgtctgttcgcctggac

SEQ ID NO: 376755 - DNA, 30 bp, Artificial Sequence
  Synthetic oligonucleotide
tctggtaagcttggtacccggaatctggac

SEQ ID NO: 376756 - DNA, 30 bp, Artificial Sequence
  Synthetic oligonucleotide
ggtcagtattggcgcccccggtgtctggac

SEQ ID NO: 376757 - DNA, 30 bp, Artificial Sequence
  Synthetic oligonucleotide
gtacggttggaggcgggcggaacagtggac

SEQ ID NO: 376758 - DNA, 30 bp, Artificial Sequence
  Synthetic oligonucleotide
cttcacctccgtacatcggtacgagtggac

SEQ ID NO: 376759 - DNA, 30 bp, Artificial Sequence
  Synthetic oligonucleotide
gctgtagggcggaagcatttgctagtggac

SEQ ID NO: 376760 - DNA, 30 bp, Artificial Sequence
  Synthetic oligonucleotide
gtaatcggaggtatgtcaattgacgtggac

SEQ ID NO: 376761 - DNA, 30 bp, Artificial Sequence
  Synthetic oligonucleotide
attagtgaatgtcgaatagtgttcgtggac

SEQ ID NO: 376762 - DNA, 30 bp, Artificial Sequence
  Synthetic oligonucleotide
gctcatccgtatgaatcatgatcggtggac

SEQ ID NO: 376763 - DNA, 30 bp, Artificial Sequence
  Synthetic oligonucleotide
ggaggctgcgctttactgcaaggggtggac

SEQ ID NO: 376764 - DNA, 30 bp, Artificial Sequence
  Synthetic oligonucleotide
cggcagctccgggcaggacgaaatgtggac

SEQ ID NO: 376765 - DNA, 30 bp, Artificial Sequence
  Synthetic oligonucleotide
ggccattccgataacttacgaaatgtggac

SEQ ID NO: 376766 - DNA, 30 bp, Artificial Sequence
  Synthetic oligonucleotide
tttcgttcggcaaattagcctgctgtggac

SEQ ID NO: 376767 - DNA, 30 bp, Artificial Sequence
  Synthetic oligonucleotide
acggtataggtgtgcgtctgaattgtggac

SEQ ID NO: 376768 - DNA, 30 bp, Artificial Sequence
  Synthetic oligonucleotide
acaggcggagcgcacgcgagtgttgtggac

SEQ ID NO: 376769 - DNA, 30 bp, Artificial Sequence
  Synthetic oligonucleotide
gcataagacttccgtatggtgtcattggac

SEQ ID NO: 376770 - DNA, 30 bp, Artificial Sequence
  Synthetic oligonucleotide
aaaaacgggccaataagctttcgattggac

SEQ ID NO: 376771 - DNA, 30 bp, Artificial Sequence
  Synthetic oligonucleotide
gaaactccgaaaaattttgccaccttggac

SEQ ID NO: 376772 - DNA, 30 bp, Artificial Sequence
  Synthetic oligonucleotide
acctgctctataacacggaacacgttggac

SEQ ID NO: 376773 - DNA, 30 bp, Artificial Sequence
  Synthetic oligonucleotide
ctagttgtaagaaataggcttatgttggac

SEQ ID NO: 376774 - DNA, 30 bp, Artificial Sequence
  Synthetic oligonucleotide
atatctcgtaagacaataatcttgttggac

SEQ ID NO: 376775 - DNA, 30 bp, Artificial Sequence
  Synthetic oligonucleotide
attgggggagaaaagttgagcgccaatgac

SEQ ID NO: 376776 - DNA, 30 bp, Artificial Sequence
  Synthetic oligonucleotide
cccgtcgatttgcgtccggctgcgaatgac

SEQ ID NO: 376777 - DNA, 30 bp, Artificial Sequence
  Synthetic oligonucleotide
gggttctcttcggttaaagttaggaatgac

SEQ ID NO: 376778 - DNA, 30 bp, Artificial Sequence
  Synthetic oligonucleotide
gaaagtctagcgagcaggaattgtaatgac

SEQ ID NO: 376779 - DNA, 30 bp, Artificial Sequence
  Synthetic oligonucleotide
gaatctcaaagtctacggtactaacatgac

SEQ ID NO: 376780 - DNA, 30 bp, Artificial Sequence
  Synthetic oligonucleotide
tagtcaatgccaggcctcgtcctacatgac

SEQ ID NO: 376781 - DNA, 30 bp, Artificial Sequence
  Synthetic oligonucleotide
aaatcaccaaacaattgagatagccatgac

SEQ ID NO: 376782 - DNA, 30 bp, Artificial Sequence
  Synthetic oligonucleotide
ttatatctgggcggggccgaatagcatgac

SEQ ID NO: 376783 - DNA, 30 bp, Artificial Sequence
  Synthetic oligonucleotide
gccgcctaggagagaggcatccatcatgac

SEQ ID NO: 376784 - DNA, 30 bp, Artificial Sequence
  Synthetic oligonucleotide
gggtctcctttcgggacctagctcgatgac

SEQ ID NO: 376785 - DNA, 30 bp, Artificial Sequence
  Synthetic oligonucleotide
ggcgggacttattcccttatataggatgac

SEQ ID NO: 376786 - DNA, 30 bp, Artificial Sequence
  Synthetic oligonucleotide
cgccgtagtagggacaggacctgatatgac

SEQ ID NO: 376787 - DNA, 30 bp, Artificial Sequence
  Synthetic oligonucleotide
ttatatgtacaccgccgggcgttatatgac

SEQ ID NO: 376788 - DNA, 30 bp, Artificial Sequence
  Synthetic oligonucleotide
ctgtccgaatcgacgaagtctatctatgac

SEQ ID NO: 376789 - DNA, 30 bp, Artificial Sequence
  Synthetic oligonucleotide
tcgtacggttatattacgtgcctctatgac

SEQ ID NO: 376790 - DNA, 30 bp, Artificial Sequence
  Synthetic oligonucleotide
gttaggggttataacattttcacgtatgac

SEQ ID NO: 376791 - DNA, 30 bp, Artificial Sequence
  Synthetic oligonucleotide
caagataggggttgtcctggtcggtatgac

SEQ ID NO: 376792 - DNA, 30 bp, Artificial Sequence
  Synthetic oligonucleotide
tggcaccctgggtagaggtgatattatgac

SEQ ID NO: 376793 - DNA, 30 bp, Artificial Sequence
  Synthetic oligonucleotide
caacccggccggtgaggtctatcaactgac

SEQ ID NO: 376794 - DNA, 29 bp, Artificial Sequence
  Synthetic oligonucleotide
atttgtgctggacatgtaggggaactgac

SEQ ID NO: 376795 - DNA, 30 bp, Artificial Sequence
  Synthetic oligonucleotide
gttattttgaattaatgctcggagactgac

SEQ ID NO: 376796 - DNA, 30 bp, Artificial Sequence
  Synthetic oligonucleotide
gtttcaaaacattaaattggcccgactgac

SEQ ID NO: 376797 - DNA, 30 bp, Artificial Sequence
  Synthetic oligonucleotide
ttagacggtcaaacgagaaggtcgactgac

SEQ ID NO: 376798 - DNA, 30 bp, Artificial Sequence
  Synthetic oligonucleotide
gtaaacagggatcttcgggtcgggactgac

SEQ ID NO: 376799 - DNA, 30 bp, Artificial Sequence
  Synthetic oligonucleotide
gctgtcatgccatcaagagcacatactgac

SEQ ID NO: 376800 - DNA, 30 bp, Artificial Sequence
  Synthetic oligonucleotide
ttacattataatctggtcaaaattactgac

SEQ ID NO: 376801 - DNA, 30 bp, Artificial Sequence
  Synthetic oligonucleotide
gagacctatatgccgtctatccttactgac

SEQ ID NO: 376802 - DNA, 30 bp, Artificial Sequence
  Synthetic oligonucleotide
agttaatcccgacccatgataccacctgac

SEQ ID NO: 376803 - DNA, 30 bp, Artificial Sequence
  Synthetic oligonucleotide
agttaatccctacccatgataccacctgac

SEQ ID NO: 376804 - DNA, 30 bp, Artificial Sequence
  Synthetic oligonucleotide
cagacgtcaaacatagtgattttccctgac

SEQ ID NO: 376805 - DNA, 30 bp, Artificial Sequence
  Synthetic oligonucleotide
tcacaaaggctcccagatctatgtcctgac

SEQ ID NO: 376806 - DNA, 30 bp, Artificial Sequence
  Synthetic oligonucleotide
tacctatggtaacgcgggaatcaagctgac

SEQ ID NO: 376807 - DNA, 30 bp, Artificial Sequence
  Synthetic oligonucleotide
acaccagttgcttcacttatattagctgac

SEQ ID NO: 376808 - DNA, 30 bp, Artificial Sequence
  Synthetic oligonucleotide
cgccatcacaaataaggaggctccgctgac

SEQ ID NO: 376809 - DNA, 30 bp, Artificial Sequence
  Synthetic oligonucleotide
aaaggtcttagcctgaattatcaggctgac

SEQ ID NO: 376810 - DNA, 30 bp, Artificial Sequence
  Synthetic oligonucleotide
gtgtttgcttgtgtcaaccgagcggctgac

SEQ ID NO: 376811 - DNA, 30 bp, Artificial Sequence
  Synthetic oligonucleotide
cactgtgttactcatatacccgttgctgac

SEQ ID NO: 376812 - DNA, 30 bp, Artificial Sequence
  Synthetic oligonucleotide
tgccctggacagcataagatgcaatctgac

SEQ ID NO: 376813 - DNA, 30 bp, Artificial Sequence
  Synthetic oligonucleotide
ggcaccagcaggacgtatggaacatctgac

SEQ ID NO: 376814 - DNA, 30 bp, Artificial Sequence
  Synthetic oligonucleotide
acaagcggtctacgctccgtagcgtctgac

SEQ ID NO: 376815 - DNA, 30 bp, Artificial Sequence
  Synthetic oligonucleotide
caagcattgcagccacgtacttcaagtgac

SEQ ID NO: 376816 - DNA, 30 bp, Artificial Sequence
  Synthetic oligonucleotide
tcaattgtgcacggtctgtaatgcagtgac

SEQ ID NO: 376817 - DNA, 30 bp, Artificial Sequence
  Synthetic oligonucleotide
cagttcctcggcggatgaacgacgagtgac

SEQ ID NO: 376818 - DNA, 30 bp, Artificial Sequence
  Synthetic oligonucleotide
gttatggacttgtttgagttaggacgtgac

SEQ ID NO: 376819 - DNA, 30 bp, Artificial Sequence
  Synthetic oligonucleotide
gagcgtaggtgcagcatataaccgcgtgac

SEQ ID NO: 376820 - DNA, 30 bp, Artificial Sequence
  Synthetic oligonucleotide
gaaggtccttacagtttatgtgcgcgtgac

SEQ ID NO: 376821 - DNA, 30 bp, Artificial Sequence
  Synthetic oligonucleotide
ttctgatcatacaaggtacgattcggtgac

SEQ ID NO: 376822 - DNA, 30 bp, Artificial Sequence
  Synthetic oligonucleotide
taagtaccattggcatggtttcttggtgac

SEQ ID NO: 376823 - DNA, 30 bp, Artificial Sequence
  Synthetic oligonucleotide
gagtgtgtttagagcgagagtctatgtgac

SEQ ID NO: 376824 - DNA, 30 bp, Artificial Sequence
  Synthetic oligonucleotide
tccgctgagaccggcacggtagactgtgac

SEQ ID NO: 376825 - DNA, 30 bp, Artificial Sequence
  Synthetic oligonucleotide
ctagtgacacactaacgggcgcgctgtgac

SEQ ID NO: 376826 - DNA, 30 bp, Artificial Sequence
  Synthetic oligonucleotide
gcgtcttaggatcttaccgtatcgtgtgac

SEQ ID NO: 376827 - DNA, 30 bp, Artificial Sequence
  Synthetic oligonucleotide
cgtgctgggtcacaaccattaagttgtgac

SEQ ID NO: 376828 - DNA, 30 bp, Artificial Sequence
  Synthetic oligonucleotide
tggctagcccgcggtgacactcaaattgac

SEQ ID NO: 376829 - DNA, 30 bp, Artificial Sequence
  Synthetic oligonucleotide
cttcgttacagccccgacgcggaaattgac

SEQ ID NO: 376830 - DNA, 30 bp, Artificial Sequence
  Synthetic oligonucleotide
gtcgcgaagcgggcggggcgcataattgac

SEQ ID NO: 376831 - DNA, 30 bp, Artificial Sequence
  Synthetic oligonucleotide
aaggtagatacttgaactacctgcattgac

SEQ ID NO: 376832 - DNA, 30 bp, Artificial Sequence
  Synthetic oligonucleotide
acggcggattcctagaataatacgattgac

SEQ ID NO: 376833 - DNA, 30 bp, Artificial Sequence
  Synthetic oligonucleotide
ccgacttttgtggttttcggagttattgac

SEQ ID NO: 376834 - DNA, 30 bp, Artificial Sequence
  Synthetic oligonucleotide
gggctcgaacataagatgtatggccttgac

SEQ ID NO: 376835 - DNA, 30 bp, Artificial Sequence
  Synthetic oligonucleotide
aacgcgaccccgtctcggaaagagcttgac

SEQ ID NO: 376836 - DNA, 30 bp, Artificial Sequence
  Synthetic oligonucleotide
tggatattacgggagaacgttgggcttgac

SEQ ID NO: 376837 - DNA, 30 bp, Artificial Sequence
  Synthetic oligonucleotide
aaacgacgaaatcgcaagcgtggtcttgac

SEQ ID NO: 376838 - DNA, 30 bp, Artificial Sequence
  Synthetic oligonucleotide
tttggttcgcttgctttgaatgttcttgac

SEQ ID NO: 376839 - DNA, 30 bp, Artificial Sequence
  Synthetic oligonucleotide
ctcaggttagaccgacaagccaaagttgac

SEQ ID NO: 376840 - DNA, 30 bp, Artificial Sequence
  Synthetic oligonucleotide
gaagatggaatgcttagaagttcagttgac

SEQ ID NO: 376841 - DNA, 30 bp, Artificial Sequence
  Synthetic oligonucleotide
gcagcaaatcagcgagcaagggtagttgac

SEQ ID NO: 376842 - DNA, 30 bp, Artificial Sequence
  Synthetic oligonucleotide
gcaaaacagacaaacaacgtacacgttgac

SEQ ID NO: 376843 - DNA, 30 bp, Artificial Sequence
  Synthetic oligonucleotide
tttaaagattcttaaatagagatcgttgac

SEQ ID NO: 376844 - DNA, 30 bp, Artificial Sequence
  Synthetic oligonucleotide
tgattctaatcctataaaaaatcggttgac

SEQ ID NO: 376845 - DNA, 30 bp, Artificial Sequence
  Synthetic oligonucleotide
aagggaagctgcaggaacaccactgttgac

SEQ ID NO: 376846 - DNA, 30 bp, Artificial Sequence
  Synthetic oligonucleotide
gggggcttagaatctgctgccgctgttgac

SEQ ID NO: 376847 - DNA, 30 bp, Artificial Sequence
  Synthetic oligonucleotide
aaaataagaaaacagtagcttccatttgac

SEQ ID NO: 376848 - DNA, 30 bp, Artificial Sequence
  Synthetic oligonucleotide
gtaaactagtccagatctccagcatttgac

SEQ ID NO: 376849 - DNA, 30 bp, Artificial Sequence
  Synthetic oligonucleotide
gtatgacaaagatatcctggtagatttgac

SEQ ID NO: 376850 - DNA, 30 bp, Artificial Sequence
  Synthetic oligonucleotide
atcccacatccgacgtactggcgatttgac

SEQ ID NO: 376851 - DNA, 30 bp, Artificial Sequence
  Synthetic oligonucleotide
taggccctggatccattctgtgactttgac

SEQ ID NO: 376852 - DNA, 30 bp, Artificial Sequence
  Synthetic oligonucleotide
gactaccggtctgttagaaggaagtttgac

SEQ ID NO: 376853 - DNA, 30 bp, Artificial Sequence
  Synthetic oligonucleotide
tggtctgcgtctaagtaaccaatttttgac

SEQ ID NO: 376854 - DNA, 30 bp, Artificial Sequence
  Synthetic oligonucleotide
ttttgggtccccttcaaaccacaaaaatac

SEQ ID NO: 376855 - DNA, 30 bp, Artificial Sequence
  Synthetic oligonucleotide
taattagcgtaataacaagaccaaaaatac

SEQ ID NO: 376856 - DNA, 30 bp, Artificial Sequence
  Synthetic oligonucleotide
tacttaaagacagggactcctagcaaatac

SEQ ID NO: 376857 - DNA, 30 bp, Artificial Sequence
  Synthetic oligonucleotide
ctcggttgctatccgcttcaaggcaaatac

SEQ ID NO: 376858 - DNA, 30 bp, Artificial Sequence
  Synthetic oligonucleotide
aaggggcgtcggctgcccggaggcaaatac

SEQ ID NO: 376859 - DNA, 30 bp, Artificial Sequence
  Synthetic oligonucleotide
ctaatatactgtcagattggctcgaaatac

SEQ ID NO: 376860 - DNA, 30 bp, Artificial Sequence
  Synthetic oligonucleotide
aatgtcgtcaggaacgtcgcgtcgaaatac

SEQ ID NO: 376861 - DNA, 30 bp, Artificial Sequence
  Synthetic oligonucleotide
aaaatctccaacacgtgtatgaggaaatac

SEQ ID NO: 376862 - DNA, 30 bp, Artificial Sequence
  Synthetic oligonucleotide
acttcatagggggtgacgggcgggaaatac

SEQ ID NO: 376863 - DNA, 30 bp, Artificial Sequence
  Synthetic oligonucleotide
gacagcctaggttgactcaaggtgaaatac

SEQ ID NO: 376864 - DNA, 30 bp, Artificial Sequence
  Synthetic oligonucleotide
accccaaggatgaattgtcgggttaaatac

SEQ ID NO: 376865 - DNA, 30 bp, Artificial Sequence
  Synthetic oligonucleotide
atcttaaacgtacgcacggggcgccaatac

SEQ ID NO: 376866 - DNA, 30 bp, Artificial Sequence
  Synthetic oligonucleotide
cgcctgtgtcacttgttatcctacgaatac

SEQ ID NO: 376867 - DNA, 30 bp, Artificial Sequence
  Synthetic oligonucleotide
gcattgtgttccactagaaagacggaatac

SEQ ID NO: 376868 - DNA, 30 bp, Artificial Sequence
  Synthetic oligonucleotide
ctgccacatatgagcgcaacccgggaatac

SEQ ID NO: 376869 - DNA, 30 bp, Artificial Sequence
  Synthetic oligonucleotide
ttcacgttatggagtgagaagcaataatac

SEQ ID NO: 376870 - DNA, 30 bp, Artificial Sequence
  Synthetic oligonucleotide
tggctcgaaagacagttttgtcaataatac

SEQ ID NO: 376871 - DNA, 30 bp, Artificial Sequence
  Synthetic oligonucleotide
acaaccgccacaccgaacgaatgataatac

SEQ ID NO: 376872 - DNA, 30 bp, Artificial Sequence
  Synthetic oligonucleotide
tgcagtgaattaggcgcaacgatctaatac

SEQ ID NO: 376873 - DNA, 30 bp, Artificial Sequence
  Synthetic oligonucleotide
ggcgattgggatgctggtgaaaggtaatac

SEQ ID NO: 376874 - DNA, 30 bp, Artificial Sequence
  Synthetic oligonucleotide
actcggaatggaatcaggcttcggtaatac

SEQ ID NO: 376875 - DNA, 30 bp, Artificial Sequence
  Synthetic oligonucleotide
ggatataacgtgtaacagtaaatgtaatac

SEQ ID NO: 376876 - DNA, 30 bp, Artificial Sequence
  Synthetic oligonucleotide
ccaagactggagcccaactcgatgtaatac

SEQ ID NO: 376877 - DNA, 30 bp, Artificial Sequence
  Synthetic oligonucleotide
acctaataattaaaaattggggtgtaatac

SEQ ID NO: 376878 - DNA, 30 bp, Artificial Sequence
  Synthetic oligonucleotide
ggcgtgtttataagggcgtctttgtaatac

SEQ ID NO: 376879 - DNA, 30 bp, Artificial Sequence
  Synthetic oligonucleotide
ttgggcagttaagtgagattagattaatac

SEQ ID NO: 376880 - DNA, 30 bp, Artificial Sequence
  Synthetic oligonucleotide
taataagacagtgcgcattttatttaatac

SEQ ID NO: 376881 - DNA, 30 bp, Artificial Sequence
  Synthetic oligonucleotide
acgcaatctacccgagtgaccgtttaatac

SEQ ID NO: 376882 - DNA, 30 bp, Artificial Sequence
  Synthetic oligonucleotide
agtaggaaggcgcaacacgttaaaacatac

SEQ ID NO: 376883 - DNA, 30 bp, Artificial Sequence
  Synthetic oligonucleotide
gtattaaaaacgtttagagataacacatac

SEQ ID NO: 376884 - DNA, 30 bp, Artificial Sequence
  Synthetic oligonucleotide
acgcaggggacagagttttctgggacatac

SEQ ID NO: 376885 - DNA, 30 bp, Artificial Sequence
  Synthetic oligonucleotide
aattgtgtgctgtcccatatccttacatac

SEQ ID NO: 376886 - DNA, 30 bp, Artificial Sequence
  Synthetic oligonucleotide
tataaatacacattagccatctttacatac

SEQ ID NO: 376887 - DNA, 30 bp, Artificial Sequence
  Synthetic oligonucleotide
aatccacagttggcgcgcatttttacatac

SEQ ID NO: 376888 - DNA, 30 bp, Artificial Sequence
  Synthetic oligonucleotide
gtcataatggaaggggtcagatccccatac

SEQ ID NO: 376889 - DNA, 30 bp, Artificial Sequence
  Synthetic oligonucleotide
agactaagaacttcgttcgccgagccatac

SEQ ID NO: 376890 - DNA, 30 bp, Artificial Sequence
  Synthetic oligonucleotide
aaagctctgaaaaccgacggcacgccatac

SEQ ID NO: 376891 - DNA, 27 bp, Artificial Sequence
  Synthetic oligonucleotide
gtatttataggaaatgtgcgtccatac

SEQ ID NO: 376892 - DNA, 30 bp, Artificial Sequence
  Synthetic oligonucleotide
aaatggttccagggcaaacataaagcatac

SEQ ID NO: 376893 - DNA, 30 bp, Artificial Sequence
  Synthetic oligonucleotide
tgtgtgggcggccaattatattgagcatac

SEQ ID NO: 376894 - DNA, 30 bp, Artificial Sequence
  Synthetic oligonucleotide
tagatttggacgttgtcggaagtagcatac

SEQ ID NO: 376895 - DNA, 30 bp, Artificial Sequence
  Synthetic oligonucleotide
tcagtatgtcagccctattctgtagcatac

SEQ ID NO: 376896 - DNA, 30 bp, Artificial Sequence
  Synthetic oligonucleotide
gtttcgccaggcaacctgcgggccgcatac

SEQ ID NO: 376897 - DNA, 30 bp, Artificial Sequence
  Synthetic oligonucleotide
ttgtggttccctttcatggcatccgcatac

SEQ ID NO: 376898 - DNA, 30 bp, Artificial Sequence
  Synthetic oligonucleotide
ctaatcccgaatgggggattacgtgcatac

SEQ ID NO: 376899 - DNA, 30 bp, Artificial Sequence
  Synthetic oligonucleotide
agaaggaggtgtatcctgaaatgtgcatac

SEQ ID NO: 376900 - DNA, 30 bp, Artificial Sequence
  Synthetic oligonucleotide
aaaattcggaatttatggctatgtgcatac

SEQ ID NO: 376901 - DNA, 30 bp, Artificial Sequence
  Synthetic oligonucleotide
cgcagcgggcaagggtacgttcaatcatac

SEQ ID NO: 376902 - DNA, 30 bp, Artificial Sequence
  Synthetic oligonucleotide
ctacactagaggacgcacgatacatcatac

SEQ ID NO: 376903 - DNA, 30 bp, Artificial Sequence
  Synthetic oligonucleotide
tgacagatcctgggtaacataaggtcatac

SEQ ID NO: 376904 - DNA, 30 bp, Artificial Sequence
  Synthetic oligonucleotide
gtgttcggtagcaaaggtctatggtcatac

SEQ ID NO: 376905 - DNA, 30 bp, Artificial Sequence
  Synthetic oligonucleotide
gcaggtcgggtcgatagggctgtgtcatac

SEQ ID NO: 376906 - DNA, 30 bp, Artificial Sequence
  Synthetic oligonucleotide
aaagatgaagcaagcgttaagccttcatac

SEQ ID NO: 376907 - DNA, 30 bp, Artificial Sequence
  Synthetic oligonucleotide
tggtatagcaactctccttgcataagatac

SEQ ID NO: 376908 - DNA, 30 bp, Artificial Sequence
  Synthetic oligonucleotide
gtcctttcgcaaggtcgtttagtgagatac

SEQ ID NO: 376909 - DNA, 30 bp, Artificial Sequence
  Synthetic oligonucleotide
aggtagaacgaatacactctggtgagatac

SEQ ID NO: 376910 - DNA, 30 bp, Artificial Sequence
  Synthetic oligonucleotide
cgcagtagcttcagggaaagtaaacgatac

SEQ ID NO: 376911 - DNA, 30 bp, Artificial Sequence
  Synthetic oligonucleotide
gatgattaactgggggaccttcaacgatac

SEQ ID NO: 376912 - DNA, 30 bp, Artificial Sequence
  Synthetic oligonucleotide
tcttttgcaacaggatcttgcacacgatac

SEQ ID NO: 376913 - DNA, 30 bp, Artificial Sequence
  Synthetic oligonucleotide
gaacatcaaatcaagagtgtatgacgatac

SEQ ID NO: 376914 - DNA, 30 bp, Artificial Sequence
  Synthetic oligonucleotide
atattatttagtagctggaagatacgatac

SEQ ID NO: 376915 - DNA, 30 bp, Artificial Sequence
  Synthetic oligonucleotide
ggattcagcggtatcacccgtccccgatac

SEQ ID NO: 376916 - DNA, 30 bp, Artificial Sequence
  Synthetic oligonucleotide
tcaaaaatactaagagacatgaagcgatac

SEQ ID NO: 376917 - DNA, 30 bp, Artificial Sequence
  Synthetic oligonucleotide
atgagtgcgtgcctgccactcaatcgatac

SEQ ID NO: 376918 - DNA, 30 bp, Artificial Sequence
  Synthetic oligonucleotide
atggcacactcgtttcgtaaagttcgatac

SEQ ID NO: 376919 - DNA, 30 bp, Artificial Sequence
  Synthetic oligonucleotide
gagggtagccgcggctctgtgaacggatac

SEQ ID NO: 376920 - DNA, 30 bp, Artificial Sequence
  Synthetic oligonucleotide
gatctggggccatctaactctgacggatac

SEQ ID NO: 376921 - DNA, 30 bp, Artificial Sequence
  Synthetic oligonucleotide
ttcgcccatgtaagtagcacttgcggatac

SEQ ID NO: 376922 - DNA, 30 bp, Artificial Sequence
  Synthetic oligonucleotide
gcagtaatgaatgtcagcttgctgggatac

SEQ ID NO: 376923 - DNA, 30 bp, Artificial Sequence
  Synthetic oligonucleotide
ctagttgtgagaatttggatgagatgatac

SEQ ID NO: 376924 - DNA, 30 bp, Artificial Sequence
  Synthetic oligonucleotide
cataatcattttactggcaggttgtgatac

SEQ ID NO: 376925 - DNA, 30 bp, Artificial Sequence
  Synthetic oligonucleotide
gtgtgcgaaaaactgcattgcgtttgatac

SEQ ID NO: 376926 - DNA, 30 bp, Artificial Sequence
  Synthetic oligonucleotide
ggctctttaaagtgagaaaattgaatatac

SEQ ID NO: 376927 - DNA, 30 bp, Artificial Sequence
  Synthetic oligonucleotide
aacaaatggtgtaacttgtatgccatatac

SEQ ID NO: 376928 - DNA, 30 bp, Artificial Sequence
  Synthetic oligonucleotide
ttcattcctgccacgtcgtgccggatatac

SEQ ID NO: 376929 - DNA, 30 bp, Artificial Sequence
  Synthetic oligonucleotide
cgcggacctcaagcctcctttattatatac

SEQ ID NO: 376930 - DNA, 30 bp, Artificial Sequence
  Synthetic oligonucleotide
tgctccgtcgaacatttgccatcactatac

SEQ ID NO: 376931 - DNA, 30 bp, Artificial Sequence
  Synthetic oligonucleotide
tgtgttcgagaccgcacaagcgtactatac

SEQ ID NO: 376932 - DNA, 30 bp, Artificial Sequence
  Synthetic oligonucleotide
gtcatccggacccgtttagtgaacctatac

SEQ ID NO: 376933 - DNA, 30 bp, Artificial Sequence
  Synthetic oligonucleotide
tctaattgagtttgcgccaataccctatac

SEQ ID NO: 376934 - DNA, 30 bp, Artificial Sequence
  Synthetic oligonucleotide
cgcattggatgtaccaggcagaagctatac

SEQ ID NO: 376935 - DNA, 30 bp, Artificial Sequence
  Synthetic oligonucleotide
ttctcatggggagtaagggcctgagtatac

SEQ ID NO: 376936 - DNA, 30 bp, Artificial Sequence
  Synthetic oligonucleotide
agccgagtggagctaacccaggacgtatac

SEQ ID NO: 376937 - DNA, 30 bp, Artificial Sequence
  Synthetic oligonucleotide
aataatatttttgcagtctatgccgtatac

SEQ ID NO: 376938 - DNA, 30 bp, Artificial Sequence
  Synthetic oligonucleotide
ttcgacgtgcccggcacatagggcgtatac

SEQ ID NO: 376939 - DNA, 30 bp, Artificial Sequence
  Synthetic oligonucleotide
taatacttattcctagaataagtcgtatac

SEQ ID NO: 376940 - DNA, 30 bp, Artificial Sequence
  Synthetic oligonucleotide
tcgtgtttcgcgttggcctaaaaggtatac

SEQ ID NO: 376941 - DNA, 30 bp, Artificial Sequence
  Synthetic oligonucleotide
gattgctggacgtaagtatctgaggtatac

SEQ ID NO: 376942 - DNA, 30 bp, Artificial Sequence
  Synthetic oligonucleotide
gtggtttattggagtgtacattaggtatac

SEQ ID NO: 376943 - DNA, 30 bp, Artificial Sequence
  Synthetic oligonucleotide
ttcaggtaagataagtaacctccggtatac

SEQ ID NO: 376944 - DNA, 30 bp, Artificial Sequence
  Synthetic oligonucleotide
tccctttttcgggagcacttggatgtatac

SEQ ID NO: 376945 - DNA, 30 bp, Artificial Sequence
  Synthetic oligonucleotide
gcagatccgaagaagtaatttggtgtatac

SEQ ID NO: 376946 - DNA, 30 bp, Artificial Sequence
  Synthetic oligonucleotide
aagacgtggtcgtccccacgatttgtatac

SEQ ID NO: 376947 - DNA, 30 bp, Artificial Sequence
  Synthetic oligonucleotide
gcacgatcgtatgactcgtgacaattatac

SEQ ID NO: 376948 - DNA, 30 bp, Artificial Sequence
  Synthetic oligonucleotide
gcttcggccattgtagtgggctcattatac

SEQ ID NO: 376949 - DNA, 30 bp, Artificial Sequence
  Synthetic oligonucleotide
ctagcggatactttaagcgacctcttatac

SEQ ID NO: 376950 - DNA, 30 bp, Artificial Sequence
  Synthetic oligonucleotide
acatgggcggcctaaaaagccccgttatac

SEQ ID NO: 376951 - DNA, 30 bp, Artificial Sequence
  Synthetic oligonucleotide
ttcgctcccgatgtcctcatcctgttatac

SEQ ID NO: 376952 - DNA, 30 bp, Artificial Sequence
  Synthetic oligonucleotide
gctcggacctgactgggcctccatttatac

SEQ ID NO: 376953 - DNA, 30 bp, Artificial Sequence
  Synthetic oligonucleotide
gcctattactatattgaattagaaaactac

SEQ ID NO: 376954 - DNA, 30 bp, Artificial Sequence
  Synthetic oligonucleotide
gatatagagcggcctggcttttaaaactac

SEQ ID NO: 376955 - DNA, 30 bp, Artificial Sequence
  Synthetic oligonucleotide
taggtcatgggttccgccagagcgaactac

SEQ ID NO: 376956 - DNA, 30 bp, Artificial Sequence
  Synthetic oligonucleotide
atcggggctccgatggttcacaggaactac

SEQ ID NO: 376957 - DNA, 30 bp, Artificial Sequence
  Synthetic oligonucleotide
cacatttgatatgtacaagggtggaactac

SEQ ID NO: 376958 - DNA, 30 bp, Artificial Sequence
  Synthetic oligonucleotide
tggacgaatgatgtacatatctataactac

SEQ ID NO: 376959 - DNA, 30 bp, Artificial Sequence
  Synthetic oligonucleotide
ggccaaacacatgcttggccgtataactac

SEQ ID NO: 376960 - DNA, 30 bp, Artificial Sequence
  Synthetic oligonucleotide
taaaaactgagacagggttcagaacactac

SEQ ID NO: 376961 - DNA, 30 bp, Artificial Sequence
  Synthetic oligonucleotide
caaatgagtacacgcatgtgaatacactac

SEQ ID NO: 376962 - DNA, 30 bp, Artificial Sequence
  Synthetic oligonucleotide
tgcgcgcacggagatggatggtgccactac

SEQ ID NO: 376963 - DNA, 30 bp, Artificial Sequence
  Synthetic oligonucleotide
taaattacaacggtcaaagtggcgcactac

SEQ ID NO: 376964 - DNA, 30 bp, Artificial Sequence
  Synthetic oligonucleotide
gagacatttggaccggatggctcgcactac

SEQ ID NO: 376965 - DNA, 30 bp, Artificial Sequence
  Synthetic oligonucleotide
gttatttaggctgtaacatagtcgcactac

SEQ ID NO: 376966 - DNA, 30 bp, Artificial Sequence
  Synthetic oligonucleotide
ggatatactagaccgtgtcggcatcactac

SEQ ID NO: 376967 - DNA, 30 bp, Artificial Sequence
  Synthetic oligonucleotide
aggtaattcgcgcagtctttcgctcactac

SEQ ID NO: 376968 - DNA, 30 bp, Artificial Sequence
  Synthetic oligonucleotide
ggtcttcgattttcttgggtctcagactac

SEQ ID NO: 376969 - DNA, 30 bp, Artificial Sequence
  Synthetic oligonucleotide
cgtgcagttgggtcaggtggaggagactac

SEQ ID NO: 376970 - DNA, 30 bp, Artificial Sequence
  Synthetic oligonucleotide
caaattaatcactgttacactggagactac

SEQ ID NO: 376971 - DNA, 30 bp, Artificial Sequence
  Synthetic oligonucleotide
aggcttattcctttaacccccatagactac

SEQ ID NO: 376972 - DNA, 30 bp, Artificial Sequence
  Synthetic oligonucleotide
tgattggtccgtccactgacgctagactac

SEQ ID NO: 376973 - DNA, 30 bp, Artificial Sequence
  Synthetic oligonucleotide
ataagtagctcgtgagcagaatgggactac

SEQ ID NO: 376974 - DNA, 30 bp, Artificial Sequence
  Synthetic oligonucleotide
gttgactagtggaagtcagtaaaatactac

SEQ ID NO: 376975 - DNA, 30 bp, Artificial Sequence
  Synthetic oligonucleotide
gttggctcagccacattccgctgatactac

SEQ ID NO: 376976 - DNA, 30 bp, Artificial Sequence
  Synthetic oligonucleotide
cctaatagttagagaggtttactatactac

SEQ ID NO: 376977 - DNA, 30 bp, Artificial Sequence
  Synthetic oligonucleotide
cccccgacgggtagagctaagctatactac

SEQ ID NO: 376978 - DNA, 30 bp, Artificial Sequence
  Synthetic oligonucleotide
atgtagatttgcgatctaatatgctactac

SEQ ID NO: 376979 - DNA, 30 bp, Artificial Sequence
  Synthetic oligonucleotide
cggtttttgtggataccgttactgtactac

SEQ ID NO: 376980 - DNA, 30 bp, Artificial Sequence
  Synthetic oligonucleotide
tctgctccgcaacgagcacatacaacctac

SEQ ID NO: 376981 - DNA, 30 bp, Artificial Sequence
  Synthetic oligonucleotide
attcagcgcatgctcagtcgccccacctac

SEQ ID NO: 376982 - DNA, 30 bp, Artificial Sequence
  Synthetic oligonucleotide
tggggtactccaatttaggagagcacctac

SEQ ID NO: 376983 - DNA, 30 bp, Artificial Sequence
  Synthetic oligonucleotide
gtcttaccgtagtcttttcagtagacctac

SEQ ID NO: 376984 - DNA, 30 bp, Artificial Sequence
  Synthetic oligonucleotide
atatattatacccgctccttagcgacctac

SEQ ID NO: 376985 - DNA, 30 bp, Artificial Sequence
  Synthetic oligonucleotide
gcgcctgggtacctggatggctcgacctac

SEQ ID NO: 376986 - DNA, 30 bp, Artificial Sequence
  Synthetic oligonucleotide
gcagtcctgaagtttagcttatggacctac

SEQ ID NO: 376987 - DNA, 31 bp, Artificial Sequence
  Synthetic oligonucleotide
gcttctcttaatgattaacgtaacaccctac

SEQ ID NO: 376988 - DNA, 30 bp, Artificial Sequence
  Synthetic oligonucleotide
agtcgggactcgttcggatggccaccctac

SEQ ID NO: 376989 - DNA, 30 bp, Artificial Sequence
  Synthetic oligonucleotide
aacttggtctattacggcccgataccctac

SEQ ID NO: 376990 - DNA, 30 bp, Artificial Sequence
  Synthetic oligonucleotide
cttcaaatagctaccctctctataccctac

SEQ ID NO: 376991 - DNA, 30 bp, Artificial Sequence
  Synthetic oligonucleotide
tgccccgatatttagtaccgatacccctac

SEQ ID NO: 376992 - DNA, 30 bp, Artificial Sequence
  Synthetic oligonucleotide
actccttatttccgccatctttgcccctac

SEQ ID NO: 376993 - DNA, 30 bp, Artificial Sequence
  Synthetic oligonucleotide
cctttccggtcaacagtgctcgggccctac

SEQ ID NO: 376994 - DNA, 30 bp, Artificial Sequence
  Synthetic oligonucleotide
gctgatatgtacttaaacataatgccctac

SEQ ID NO: 376995 - DNA, 30 bp, Artificial Sequence
  Synthetic oligonucleotide
aatcctcctggaaacggctacaatccctac

SEQ ID NO: 376996 - DNA, 30 bp, Artificial Sequence
  Synthetic oligonucleotide
actggaaccccggttgtggcatgggcctac

SEQ ID NO: 376997 - DNA, 30 bp, Artificial Sequence
  Synthetic oligonucleotide
atacggagtgccacctagaaagtggcctac

SEQ ID NO: 376998 - DNA, 30 bp, Artificial Sequence
  Synthetic oligonucleotide
ttacaattttcatctaggataactgcctac

SEQ ID NO: 376999 - DNA, 30 bp, Artificial Sequence
  Synthetic oligonucleotide
gtattcttataaacgagtctttcatcctac

SEQ ID NO: 377000 - DNA, 30 bp, Artificial Sequence
  Synthetic oligonucleotide
cgttgctgaatgttcgcgtctttgtcctac

SEQ ID NO: 377001 - DNA, 30 bp, Artificial Sequence
  Synthetic oligonucleotide
caggggctgattgtgtttagttattcctac

SEQ ID NO: 377002 - DNA, 30 bp, Artificial Sequence
  Synthetic oligonucleotide
tatcgatatttagaacgacgttgttcctac

SEQ ID NO: 377003 - DNA, 30 bp, Artificial Sequence
  Synthetic oligonucleotide
ccgccgtactaagctatgccgtccagctac

SEQ ID NO: 377004 - DNA, 30 bp, Artificial Sequence
  Synthetic oligonucleotide
agtgtgttactggcactattgtgcagctac

SEQ ID NO: 377005 - DNA, 30 bp, Artificial Sequence
  Synthetic oligonucleotide
gtaagtcctgggtgcagagcggggagctac

SEQ ID NO: 377006 - DNA, 30 bp, Artificial Sequence
  Synthetic oligonucleotide
taactgccccgggaccacgcacatagctac

SEQ ID NO: 377007 - DNA, 30 bp, Artificial Sequence
  Synthetic oligonucleotide
ctcaaccaaccattatactgccgtagctac

SEQ ID NO: 377008 - DNA, 30 bp, Artificial Sequence
  Synthetic oligonucleotide
cagaaacgttccaacgtttaaaaacgctac

SEQ ID NO: 377009 - DNA, 30 bp, Artificial Sequence
  Synthetic oligonucleotide
gttttatcatcaatacggtaggtccgctac

SEQ ID NO: 377010 - DNA, 30 bp, Artificial Sequence
  Synthetic oligonucleotide
ggtgggaaaattggtggaagtccgcgctac

SEQ ID NO: 377011 - DNA, 30 bp, Artificial Sequence
  Synthetic oligonucleotide
acttctgcggcctatttcttagttcgctac

SEQ ID NO: 377012 - DNA, 30 bp, Artificial Sequence
  Synthetic oligonucleotide
gttcgttgattgatatgtcccagaggctac

SEQ ID NO: 377013 - DNA, 30 bp, Artificial Sequence
  Synthetic oligonucleotide
cggtaaccaattacttggtgatccggctac

SEQ ID NO: 377014 - DNA, 30 bp, Artificial Sequence
  Synthetic oligonucleotide
tgggttcacatcgtctatttcttcggctac

SEQ ID NO: 377015 - DNA, 30 bp, Artificial Sequence
  Synthetic oligonucleotide
agttttcagaagcgcaatacaaggggctac

SEQ ID NO: 377016 - DNA, 30 bp, Artificial Sequence
  Synthetic oligonucleotide
ggcaggtgccgtaaagagacggtgggctac

SEQ ID NO: 377017 - DNA, 30 bp, Artificial Sequence
  Synthetic oligonucleotide
caccagacactcctgtggttggtgggctac

SEQ ID NO: 377018 - DNA, 30 bp, Artificial Sequence
  Synthetic oligonucleotide
ttcccagtccctggtcctaaattgggctac

SEQ ID NO: 377019 - DNA, 30 bp, Artificial Sequence
  Synthetic oligonucleotide
tttatcgaggtgctacacgtaactggctac

SEQ ID NO: 377020 - DNA, 30 bp, Artificial Sequence
  Synthetic oligonucleotide
gcagtggatctaatcatagatgctggctac

SEQ ID NO: 377021 - DNA, 30 bp, Artificial Sequence
  Synthetic oligonucleotide
atgcaaaaccccggggcattgccatgctac

SEQ ID NO: 377022 - DNA, 30 bp, Artificial Sequence
  Synthetic oligonucleotide
tttagccctccactctctagagcctgctac

SEQ ID NO: 377023 - DNA, 30 bp, Artificial Sequence
  Synthetic oligonucleotide
cagatattttcgcgcctaggtacgtgctac

SEQ ID NO: 377024 - DNA, 30 bp, Artificial Sequence
  Synthetic oligonucleotide
agtctcggtaattacaaggacacttgctac

SEQ ID NO: 377025 - DNA, 30 bp, Artificial Sequence
  Synthetic oligonucleotide
ttcgtagattctaatgggaacagaatctac

SEQ ID NO: 377026 - DNA, 30 bp, Artificial Sequence
  Synthetic oligonucleotide
ctttccttctagttccaccaaataatctac

SEQ ID NO: 377027 - DNA, 30 bp, Artificial Sequence
  Synthetic oligonucleotide
ccaagagatgcatcagtgaggcatatctac

SEQ ID NO: 377028 - DNA, 30 bp, Artificial Sequence
  Synthetic oligonucleotide
gtccagtggggtagctctcttgctatctac

SEQ ID NO: 377029 - DNA, 30 bp, Artificial Sequence
  Synthetic oligonucleotide
agctccagtagagatagcaaaattatctac

SEQ ID NO: 377030 - DNA, 30 bp, Artificial Sequence
  Synthetic oligonucleotide
gacagaaccaacccgctcagacttatctac

SEQ ID NO: 377031 - DNA, 30 bp, Artificial Sequence
  Synthetic oligonucleotide
gaagattctacgtataaacacaaactctac

SEQ ID NO: 377032 - DNA, 30 bp, Artificial Sequence
  Synthetic oligonucleotide
gttgcgcatagattcccaacacgcctctac

SEQ ID NO: 377033 - DNA, 30 bp, Artificial Sequence
  Synthetic oligonucleotide
gaacggcagtaatccaatccaggcctctac

SEQ ID NO: 377034 - DNA, 30 bp, Artificial Sequence
  Synthetic oligonucleotide
gtatatggtatcggggtgtcgcggctctac

SEQ ID NO: 377035 - DNA, 30 bp, Artificial Sequence
  Synthetic oligonucleotide
gcgcgcttaatatctagtttgaatctctac

SEQ ID NO: 377036 - DNA, 30 bp, Artificial Sequence
  Synthetic oligonucleotide
gcaaatgtggttagtcatgtaagtctctac

SEQ ID NO: 377037 - DNA, 30 bp, Artificial Sequence
  Synthetic oligonucleotide
aattgtcactgatacattgcgtacgtctac

SEQ ID NO: 377038 - DNA, 30 bp, Artificial Sequence
  Synthetic oligonucleotide
tgattctccagtgggctagtagatgtctac

SEQ ID NO: 377039 - DNA, 30 bp, Artificial Sequence
  Synthetic oligonucleotide
agtcctgaactcggttcagctggattctac

SEQ ID NO: 377040 - DNA, 30 bp, Artificial Sequence
  Synthetic oligonucleotide
gcagtccggtaaaaacaataaatcttctac

SEQ ID NO: 377041 - DNA, 30 bp, Artificial Sequence
  Synthetic oligonucleotide
cggaaaggcgctgtcgctcagtcgttctac

SEQ ID NO: 377042 - DNA, 30 bp, Artificial Sequence
  Synthetic oligonucleotide
acgcaccctcgaaccgcaagagggttctac

SEQ ID NO: 377043 - DNA, 30 bp, Artificial Sequence
  Synthetic oligonucleotide
aatgagtacttcattcttggggggttctac

SEQ ID NO: 377044 - DNA, 30 bp, Artificial Sequence
  Synthetic oligonucleotide
tgacaaacctcgcacacgtcagtgttctac

SEQ ID NO: 377045 - DNA, 30 bp, Artificial Sequence
  Synthetic oligonucleotide
aaggtctggatgccgcttattataaagtac

SEQ ID NO: 377046 - DNA, 30 bp, Artificial Sequence
  Synthetic oligonucleotide
gagcctggccggtgtgtggaattaaagtac

SEQ ID NO: 377047 - DNA, 30 bp, Artificial Sequence
  Synthetic oligonucleotide
ctggtcgattcctcgacgcgtcacaagtac

SEQ ID NO: 377048 - DNA, 30 bp, Artificial Sequence
  Synthetic oligonucleotide
cgtcacttcaagaaattctcatacaagtac

SEQ ID NO: 377049 - DNA, 30 bp, Artificial Sequence
  Synthetic oligonucleotide
caaagggcccttgtcacagggtacaagtac

SEQ ID NO: 377050 - DNA, 30 bp, Artificial Sequence
  Synthetic oligonucleotide
ttagaaagtcagctgtccgaattcaagtac

SEQ ID NO: 377051 - DNA, 31 bp, Artificial Sequence
  Synthetic oligonucleotide
atgtaatcttggatgtttaattaggaagtac

SEQ ID NO: 377052 - DNA, 30 bp, Artificial Sequence
  Synthetic oligonucleotide
acaacctctattcagaactccgtgaagtac

SEQ ID NO: 377053 - DNA, 30 bp, Artificial Sequence
  Synthetic oligonucleotide
actaactagtaaaccgcgaggcataagtac

SEQ ID NO: 377054 - DNA, 30 bp, Artificial Sequence
  Synthetic oligonucleotide
cacgagctctttgttggctgtgataagtac

SEQ ID NO: 377055 - DNA, 30 bp, Artificial Sequence
  Synthetic oligonucleotide
tagcaacacgtcacgcggttcattaagtac

SEQ ID NO: 377056 - DNA, 30 bp, Artificial Sequence
  Synthetic oligonucleotide
gcagaggtattacgagctgtgccacagtac

SEQ ID NO: 377057 - DNA, 30 bp, Artificial Sequence
  Synthetic oligonucleotide
tgcacgcaagaaaggtcgatggatcagtac

SEQ ID NO: 377058 - DNA, 30 bp, Artificial Sequence
  Synthetic oligonucleotide
tgctgcctgaggctgtactggactcagtac

SEQ ID NO: 377059 - DNA, 30 bp, Artificial Sequence
  Synthetic oligonucleotide
aatggcaaagctttggtgacacttcagtac

SEQ ID NO: 377060 - DNA, 30 bp, Artificial Sequence
  Synthetic oligonucleotide
atgcagctgttttatcaatggaaagagtac

SEQ ID NO: 377061 - DNA, 30 bp, Artificial Sequence
  Synthetic oligonucleotide
cttacagtccaagttcggcgttgagagtac

SEQ ID NO: 377062 - DNA, 30 bp, Artificial Sequence
  Synthetic oligonucleotide
ggatcagaagtctcgacacgaaacgagtac

SEQ ID NO: 377063 - DNA, 30 bp, Artificial Sequence
  Synthetic oligonucleotide
acggcctgtttaaattcctttgccgagtac

SEQ ID NO: 377064 - DNA, 30 bp, Artificial Sequence
  Synthetic oligonucleotide
tatcattacaatcatcgagcgtccgagtac

SEQ ID NO: 377065 - DNA, 30 bp, Artificial Sequence
  Synthetic oligonucleotide
aggggactattctatgacgccgaggagtac

SEQ ID NO: 377066 - DNA, 30 bp, Artificial Sequence
  Synthetic oligonucleotide
atattgggtgcttactcgcgttcggagtac

SEQ ID NO: 377067 - DNA, 30 bp, Artificial Sequence
  Synthetic oligonucleotide
gattacctactaccgcttaatagggagtac

SEQ ID NO: 377068 - DNA, 30 bp, Artificial Sequence
  Synthetic oligonucleotide
gagccgtcgctttacgtagacacatagtac

SEQ ID NO: 377069 - DNA, 30 bp, Artificial Sequence
  Synthetic oligonucleotide
ccaagtcttctatgattgtagggatagtac

SEQ ID NO: 377070 - DNA, 30 bp, Artificial Sequence
  Synthetic oligonucleotide
accgcgtgatcgtctactcttggatagtac

SEQ ID NO: 377071 - DNA, 30 bp, Artificial Sequence
  Synthetic oligonucleotide
ctcaagcaaacccgcaatgcaatatagtac

SEQ ID NO: 377072 - DNA, 30 bp, Artificial Sequence
  Synthetic oligonucleotide
gtaaagctgccggttaagataatctagtac

SEQ ID NO: 377073 - DNA, 30 bp, Artificial Sequence
  Synthetic oligonucleotide
agtcactatctggggcgctgcacttagtac

SEQ ID NO: 377074 - DNA, 30 bp, Artificial Sequence
  Synthetic oligonucleotide
gtggtaaaatagagtacgatggaaacgtac

SEQ ID NO: 377075 - DNA, 30 bp, Artificial Sequence
  Synthetic oligonucleotide
ttaaatgacgggtggcggttatgaacgtac

SEQ ID NO: 377076 - DNA, 30 bp, Artificial Sequence
  Synthetic oligonucleotide
gttagtaacccagccgggtgattaacgtac

SEQ ID NO: 377077 - DNA, 30 bp, Artificial Sequence
  Synthetic oligonucleotide
aaaacgttccacagaagtaacgacacgtac

SEQ ID NO: 377078 - DNA, 30 bp, Artificial Sequence
  Synthetic oligonucleotide
tcctgctattgaaggcgacagcccacgtac

SEQ ID NO: 377079 - DNA, 30 bp, Artificial Sequence
  Synthetic oligonucleotide
aatgcgagataggaacgcaccgccacgtac

SEQ ID NO: 377080 - DNA, 30 bp, Artificial Sequence
  Synthetic oligonucleotide
ctactaacgccctaagcactttccacgtac

SEQ ID NO: 377081 - DNA, 30 bp, Artificial Sequence
  Synthetic oligonucleotide
gatttgtttaacttaacgagcgggacgtac

SEQ ID NO: 377082 - DNA, 30 bp, Artificial Sequence
  Synthetic oligonucleotide
gctgtgacgtacaacagaaatcttacgtac

SEQ ID NO: 377083 - DNA, 30 bp, Artificial Sequence
  Synthetic oligonucleotide
cgccgaatgatgtgcgttatggcaccgtac

SEQ ID NO: 377084 - DNA, 30 bp, Artificial Sequence
  Synthetic oligonucleotide
gtctttcatagacggttagcgtcaccgtac

SEQ ID NO: 377085 - DNA, 30 bp, Artificial Sequence
  Synthetic oligonucleotide
ggaactacggtcgggtcaagaggcccgtac

SEQ ID NO: 377086 - DNA, 30 bp, Artificial Sequence
  Synthetic oligonucleotide
cgggtaacatgcagcctagcattcccgtac

SEQ ID NO: 377087 - DNA, 30 bp, Artificial Sequence
  Synthetic oligonucleotide
gaagcgagaaatgctgttacatttccgtac

SEQ ID NO: 377088 - DNA, 30 bp, Artificial Sequence
  Synthetic oligonucleotide
gcaatacacaccttcaaagtctcagcgtac

SEQ ID NO: 377089 - DNA, 30 bp, Artificial Sequence
  Synthetic oligonucleotide
aaaagtcactctggaaatactagagcgtac

SEQ ID NO: 377090 - DNA, 30 bp, Artificial Sequence
  Synthetic oligonucleotide
cgaactatattgtataggtaataggcgtac

SEQ ID NO: 377091 - DNA, 30 bp, Artificial Sequence
  Synthetic oligonucleotide
aatataagaagcacctggtatatggcgtac

SEQ ID NO: 377092 - DNA, 30 bp, Artificial Sequence
  Synthetic oligonucleotide
accatagataatatgcaaaaagtggcgtac

SEQ ID NO: 377093 - DNA, 30 bp, Artificial Sequence
  Synthetic oligonucleotide
tctgggttgttgtaacgtcgtactgcgtac

SEQ ID NO: 377094 - DNA, 30 bp, Artificial Sequence
  Synthetic oligonucleotide
ccgcgacggcgccttggagcacttgcgtac

SEQ ID NO: 377095 - DNA, 31 bp, Artificial Sequence
  Synthetic oligonucleotide
tttacctcatgggttacagtactactcgtac

SEQ ID NO: 377096 - DNA, 30 bp, Artificial Sequence
  Synthetic oligonucleotide
ttgccctgctacaattgcgtcccttcgtac

SEQ ID NO: 377097 - DNA, 30 bp, Artificial Sequence
  Synthetic oligonucleotide
tctcgacaagcaacgcataagccttcgtac

SEQ ID NO: 377098 - DNA, 30 bp, Artificial Sequence
  Synthetic oligonucleotide
gtgtacgccctataaatgcacatgaggtac

SEQ ID NO: 377099 - DNA, 27 bp, Artificial Sequence
  Synthetic oligonucleotide
ttaaccgatgtgcgagcactgaggtac

SEQ ID NO: 377100 - DNA, 30 bp, Artificial Sequence
  Synthetic oligonucleotide
tcaggtcacggacgctgattggataggtac

SEQ ID NO: 377101 - DNA, 30 bp, Artificial Sequence
  Synthetic oligonucleotide
gtatcacacttaagcaaacagccacggtac

SEQ ID NO: 377102 - DNA, 30 bp, Artificial Sequence
  Synthetic oligonucleotide
tttcgccgcctcagtaagaaataccggtac

SEQ ID NO: 377103 - DNA, 31 bp, Artificial Sequence
  Synthetic oligonucleotide
ttagcggatggacaccataacgccccggtac

SEQ ID NO: 377104 - DNA, 30 bp, Artificial Sequence
  Synthetic oligonucleotide
tccgtagcggaagatcatctaatccggtac

SEQ ID NO: 377105 - DNA, 30 bp, Artificial Sequence
  Synthetic oligonucleotide
gtatgtaccgacggtacgtcacatcggtac

SEQ ID NO: 377106 - DNA, 30 bp, Artificial Sequence
  Synthetic oligonucleotide
gtaaatgtccttatacgaacagatcggtac

SEQ ID NO: 377107 - DNA, 30 bp, Artificial Sequence
  Synthetic oligonucleotide
tgggcccaagccgcaccggttactcggtac

SEQ ID NO: 377108 - DNA, 30 bp, Artificial Sequence
  Synthetic oligonucleotide
tattaatcccgctgatccagcgctcggtac

SEQ ID NO: 377109 - DNA, 30 bp, Artificial Sequence
  Synthetic oligonucleotide
gttattggaacgaacatctcatgtcggtac

SEQ ID NO: 377110 - DNA, 30 bp, Artificial Sequence
  Synthetic oligonucleotide
attcgcgaccttctgaagccctaagggtac

SEQ ID NO: 377111 - DNA, 30 bp, Artificial Sequence
  Synthetic oligonucleotide
agtagtctcaataaagtcgtgccagggtac

SEQ ID NO: 377112 - DNA, 30 bp, Artificial Sequence
  Synthetic oligonucleotide
gcatacgtgtcgtctacgcacagggggtac

SEQ ID NO: 377113 - DNA, 30 bp, Artificial Sequence
  Synthetic oligonucleotide
cggcgaatctaaaagggtcccggggggtac

SEQ ID NO: 377114 - DNA, 30 bp, Artificial Sequence
  Synthetic oligonucleotide
acatccaggcagacagctctggctgggtac

SEQ ID NO: 377115 - DNA, 30 bp, Artificial Sequence
  Synthetic oligonucleotide
caagggtctctccccctgagatcgtggtac

SEQ ID NO: 377116 - DNA, 30 bp, Artificial Sequence
  Synthetic oligonucleotide
ctagttccaaactacaagtcgaattggtac

SEQ ID NO: 377117 - DNA, 30 bp, Artificial Sequence
  Synthetic oligonucleotide
tgtggtttaccaacacagtagtattggtac

SEQ ID NO: 377118 - DNA, 30 bp, Artificial Sequence
  Synthetic oligonucleotide
tgcttttttagcggacagtaaccaatgtac

SEQ ID NO: 377119 - DNA, 30 bp, Artificial Sequence
  Synthetic oligonucleotide
taacgttgctatggatgtatgcggatgtac

SEQ ID NO: 377120 - DNA, 30 bp, Artificial Sequence
  Synthetic oligonucleotide
caatcgccgataatctaacggtggatgtac

SEQ ID NO: 377121 - DNA, 30 bp, Artificial Sequence
  Synthetic oligonucleotide
gttgagttgcgcctgcttggttggatgtac

SEQ ID NO: 377122 - DNA, 30 bp, Artificial Sequence
  Synthetic oligonucleotide
gcgttagtgaagcttgtagcaactatgtac

SEQ ID NO: 377123 - DNA, 30 bp, Artificial Sequence
  Synthetic oligonucleotide
gagcacacaaaggtcctgcgacctatgtac

SEQ ID NO: 377124 - DNA, 30 bp, Artificial Sequence
  Synthetic oligonucleotide
gcggccggttcgtaattgatggttatgtac

SEQ ID NO: 377125 - DNA, 30 bp, Artificial Sequence
  Synthetic oligonucleotide
ggtgatagtacgtaacttcataaactgtac

SEQ ID NO: 377126 - DNA, 30 bp, Artificial Sequence
  Synthetic oligonucleotide
tatgccttctcgcggaagagagcactgtac

SEQ ID NO: 377127 - DNA, 30 bp, Artificial Sequence
  Synthetic oligonucleotide
ccagcaaagagaaccctagaaggactgtac

SEQ ID NO: 377128 - DNA, 30 bp, Artificial Sequence
  Synthetic oligonucleotide
tggagacccagccgcgttaacgcgctgtac

SEQ ID NO: 377129 - DNA, 30 bp, Artificial Sequence
  Synthetic oligonucleotide
cagattatttcttcgcgtaccgtgctgtac

SEQ ID NO: 377130 - DNA, 30 bp, Artificial Sequence
  Synthetic oligonucleotide
aacggttcttatcacggttcagaagtgtac

SEQ ID NO: 377131 - DNA, 30 bp, Artificial Sequence
  Synthetic oligonucleotide
cggtgcgcttactcacgcggattagtgtac

SEQ ID NO: 377132 - DNA, 30 bp, Artificial Sequence
  Synthetic oligonucleotide
atggcctttgccctcaattatatcgtgtac

SEQ ID NO: 377133 - DNA, 30 bp, Artificial Sequence
  Synthetic oligonucleotide
gggagggtggggtcgaaacgggtcgtgtac

SEQ ID NO: 377134 - DNA, 30 bp, Artificial Sequence
  Synthetic oligonucleotide
gtgtaattggcactccttaccgcggtgtac

SEQ ID NO: 377135 - DNA, 30 bp, Artificial Sequence
  Synthetic oligonucleotide
ggtacaatactacacgctcgctcggtgtac

SEQ ID NO: 377136 - DNA, 30 bp, Artificial Sequence
  Synthetic oligonucleotide
agatattcggaattccgatatggggtgtac

SEQ ID NO: 377137 - DNA, 30 bp, Artificial Sequence
  Synthetic oligonucleotide
gaaccgcacgtcccctacagcgtggtgtac

SEQ ID NO: 377138 - DNA, 30 bp, Artificial Sequence
  Synthetic oligonucleotide
gtgaaacttcgtagattaaacgatgtgtac

SEQ ID NO: 377139 - DNA, 30 bp, Artificial Sequence
  Synthetic oligonucleotide
gaacgcttcgtcgcgagcggctatgtgtac

SEQ ID NO: 377140 - DNA, 30 bp, Artificial Sequence
  Synthetic oligonucleotide
agtcgttctactgaaatccacgctgtgtac

SEQ ID NO: 377141 - DNA, 30 bp, Artificial Sequence
  Synthetic oligonucleotide
gatatagacttttcctagtcggttgtgtac

SEQ ID NO: 377142 - DNA, 30 bp, Artificial Sequence
  Synthetic oligonucleotide
gttcatggaatcccgtgtgtgaaattgtac

SEQ ID NO: 377143 - DNA, 30 bp, Artificial Sequence
  Synthetic oligonucleotide
gggagtgaggttgttggcggggaattgtac

SEQ ID NO: 377144 - DNA, 30 bp, Artificial Sequence
  Synthetic oligonucleotide
gagtctaacacgattaagtgatgattgtac

SEQ ID NO: 377145 - DNA, 30 bp, Artificial Sequence
  Synthetic oligonucleotide
tgtaactaggatcgtagaccttgattgtac

SEQ ID NO: 377146 - DNA, 30 bp, Artificial Sequence
  Synthetic oligonucleotide
tcagcagaagaactcgactgtaacttgtac

SEQ ID NO: 377147 - DNA, 30 bp, Artificial Sequence
  Synthetic oligonucleotide
ataaagacagcacgtataatttccttgtac

SEQ ID NO: 377148 - DNA, 30 bp, Artificial Sequence
  Synthetic oligonucleotide
agaatacatttggcgtgacatggcttgtac

SEQ ID NO: 377149 - DNA, 30 bp, Artificial Sequence
  Synthetic oligonucleotide
gaatgtccgctgtgagataacatcttgtac

SEQ ID NO: 377150 - DNA, 30 bp, Artificial Sequence
  Synthetic oligonucleotide
tggcgcaattttagtgcaataacgttgtac

SEQ ID NO: 377151 - DNA, 30 bp, Artificial Sequence
  Synthetic oligonucleotide
acccgggtccggtacgccgcccatttgtac

SEQ ID NO: 377152 - DNA, 30 bp, Artificial Sequence
  Synthetic oligonucleotide
tgtcaccatgaacggtgcagtgatttgtac

SEQ ID NO: 377153 - DNA, 30 bp, Artificial Sequence
  Synthetic oligonucleotide
ctctgtcgacgttttatgcagtgtttgtac

SEQ ID NO: 377154 - DNA, 30 bp, Artificial Sequence
  Synthetic oligonucleotide
tggtttgatttggggtgggtggaaaattac

SEQ ID NO: 377155 - DNA, 30 bp, Artificial Sequence
  Synthetic oligonucleotide
agcgctggctctactgagacaataaattac

SEQ ID NO: 377156 - DNA, 30 bp, Artificial Sequence
  Synthetic oligonucleotide
atatacagaacgccaaagtaggtaaattac

SEQ ID NO: 377157 - DNA, 30 bp, Artificial Sequence
  Synthetic oligonucleotide
gtgcagtgagatttagctataaccaattac

SEQ ID NO: 377158 - DNA, 30 bp, Artificial Sequence
  Synthetic oligonucleotide
aatcgcagggggttattaggatccaattac

SEQ ID NO: 377159 - DNA, 30 bp, Artificial Sequence
  Synthetic oligonucleotide
ccccgtgttagagaggaatgggtcaattac

SEQ ID NO: 377160 - DNA, 30 bp, Artificial Sequence
  Synthetic oligonucleotide
catcgaattttcggatgaaccacgaattac

SEQ ID NO: 377161 - DNA, 30 bp, Artificial Sequence
  Synthetic oligonucleotide
gaggctcgcatatcaggggccaataattac

SEQ ID NO: 377162 - DNA, 30 bp, Artificial Sequence
  Synthetic oligonucleotide
gccgtgtttcagtctcagagccataattac

SEQ ID NO: 377163 - DNA, 30 bp, Artificial Sequence
  Synthetic oligonucleotide
tacgttcctcgctgatttagggataattac

SEQ ID NO: 377164 - DNA, 30 bp, Artificial Sequence
  Synthetic oligonucleotide
tgagcttactctagaatctgttataattac

SEQ ID NO: 377165 - DNA, 30 bp, Artificial Sequence
  Synthetic oligonucleotide
aatccttgcctttgctggtagtgacattac

SEQ ID NO: 377166 - DNA, 30 bp, Artificial Sequence
  Synthetic oligonucleotide
acgcacgttagctgtgtactacggcattac

SEQ ID NO: 377167 - DNA, 30 bp, Artificial Sequence
  Synthetic oligonucleotide
gaaagggataggatgtggcagattcattac

SEQ ID NO: 377168 - DNA, 30 bp, Artificial Sequence
  Synthetic oligonucleotide
tatgttaagtcttgttctgtgcttcattac

SEQ ID NO: 377169 - DNA, 30 bp, Artificial Sequence
  Synthetic oligonucleotide
gggattacaattgtaacagcccaagattac

SEQ ID NO: 377170 - DNA, 30 bp, Artificial Sequence
  Synthetic oligonucleotide
taatcaagatcgccaccattggtagattac

SEQ ID NO: 377171 - DNA, 30 bp, Artificial Sequence
  Synthetic oligonucleotide
caggcatccagacggatttttgacgattac

SEQ ID NO: 377172 - DNA, 30 bp, Artificial Sequence
  Synthetic oligonucleotide
tttgtgcttagcagggtttccatcgattac

SEQ ID NO: 377173 - DNA, 30 bp, Artificial Sequence
  Synthetic oligonucleotide
tcactgaatatttaaggctggacggattac

SEQ ID NO: 377174 - DNA, 30 bp, Artificial Sequence
  Synthetic oligonucleotide
aggagcatatcgggcctacttccggattac

SEQ ID NO: 377175 - DNA, 30 bp, Artificial Sequence
  Synthetic oligonucleotide
ttaccgtattcagaatgaaggatggattac

SEQ ID NO: 377176 - DNA, 30 bp, Artificial Sequence
  Synthetic oligonucleotide
gggttcacctgatggagtcacgtggattac

SEQ ID NO: 377177 - DNA, 30 bp, Artificial Sequence
  Synthetic oligonucleotide
tcacagcgatggtttaaacctcgtgattac

SEQ ID NO: 377178 - DNA, 30 bp, Artificial Sequence
  Synthetic oligonucleotide
aagtaatggacgcggtaagctggtgattac

SEQ ID NO: 377179 - DNA, 30 bp, Artificial Sequence
  Synthetic oligonucleotide
taatcctaggtatcgctatagattgattac

SEQ ID NO: 377180 - DNA, 30 bp, Artificial Sequence
  Synthetic oligonucleotide
ttccaagacgggctcgtaggcaaatattac

SEQ ID NO: 377181 - DNA, 30 bp, Artificial Sequence
  Synthetic oligonucleotide
ggttttaaggaatcggagaatagatattac

SEQ ID NO: 377182 - DNA, 30 bp, Artificial Sequence
  Synthetic oligonucleotide
tgggtttcctctccagtactacgatattac

SEQ ID NO: 377183 - DNA, 30 bp, Artificial Sequence
  Synthetic oligonucleotide
ctataatagagacacctagtcgactattac

SEQ ID NO: 377184 - DNA, 30 bp, Artificial Sequence
  Synthetic oligonucleotide
cggggcgctagcacagccggggactattac

SEQ ID NO: 377185 - DNA, 30 bp, Artificial Sequence
  Synthetic oligonucleotide
gggtcgccaatgagcgttggggagtattac

SEQ ID NO: 377186 - DNA, 30 bp, Artificial Sequence
  Synthetic oligonucleotide
cccttcctgacagtgggcagccggtattac

SEQ ID NO: 377187 - DNA, 30 bp, Artificial Sequence
  Synthetic oligonucleotide
gcgttaggtagcactacgtagttgtattac

SEQ ID NO: 377188 - DNA, 30 bp, Artificial Sequence
  Synthetic oligonucleotide
gacagacgaacagggtatagccaaacttac

SEQ ID NO: 377189 - DNA, 30 bp, Artificial Sequence
  Synthetic oligonucleotide
ttcacttttgcatcactggcgccaacttac

SEQ ID NO: 377190 - DNA, 30 bp, Artificial Sequence
  Synthetic oligonucleotide
acttggttatatacaactgagttaacttac

SEQ ID NO: 377191 - DNA, 30 bp, Artificial Sequence
  Synthetic oligonucleotide
gcggtggatcatcaccaacctgacacttac

SEQ ID NO: 377192 - DNA, 30 bp, Artificial Sequence
  Synthetic oligonucleotide
tgaatgacccacagtctcagattgacttac

SEQ ID NO: 377193 - DNA, 30 bp, Artificial Sequence
  Synthetic oligonucleotide
tccgtgatggactgcagttgtcctacttac

SEQ ID NO: 377194 - DNA, 30 bp, Artificial Sequence
  Synthetic oligonucleotide
aaactgtcgaagcatacctaggttacttac

SEQ ID NO: 377195 - DNA, 30 bp, Artificial Sequence
  Synthetic oligonucleotide
tgtaaaagtaaacaggatggagcaccttac

SEQ ID NO: 377196 - DNA, 30 bp, Artificial Sequence
  Synthetic oligonucleotide
ggctgagtttacctcgccccattaccttac

SEQ ID NO: 377197 - DNA, 30 bp, Artificial Sequence
  Synthetic oligonucleotide
tcttctttactgttgcgcccgcacccttac

SEQ ID NO: 377198 - DNA, 30 bp, Artificial Sequence
  Synthetic oligonucleotide
gatctaaatccacagtacgcacgcccttac

SEQ ID NO: 377199 - DNA, 30 bp, Artificial Sequence
  Synthetic oligonucleotide
gtcaacatgcgtgagcactatttcccttac

SEQ ID NO: 377200 - DNA, 30 bp, Artificial Sequence
  Synthetic oligonucleotide
attgcacggttacaaatggaaacgccttac

SEQ ID NO: 377201 - DNA, 30 bp, Artificial Sequence
  Synthetic oligonucleotide
tccgattttattttacagagcacgccttac

SEQ ID NO: 377202 - DNA, 30 bp, Artificial Sequence
  Synthetic oligonucleotide
acgaatgatcgtctcaccgacgcgccttac

SEQ ID NO: 377203 - DNA, 30 bp, Artificial Sequence
  Synthetic oligonucleotide
gtgggaacgaggccttttgggttgccttac

SEQ ID NO: 377204 - DNA, 30 bp, Artificial Sequence
  Synthetic oligonucleotide
atccagatagtggcctgataaaatccttac

SEQ ID NO: 377205 - DNA, 30 bp, Artificial Sequence
  Synthetic oligonucleotide
gttttgatgtatagggggaaccatccttac

SEQ ID NO: 377206 - DNA, 30 bp, Artificial Sequence
  Synthetic oligonucleotide
acggtaatgatacagcagctggttccttac

SEQ ID NO: 377207 - DNA, 30 bp, Artificial Sequence
  Synthetic oligonucleotide
tattgatttggggacgggtttcaagcttac

SEQ ID NO: 377208 - DNA, 30 bp, Artificial Sequence
  Synthetic oligonucleotide
caaaaggttggggaagatcctatagcttac

SEQ ID NO: 377209 - DNA, 30 bp, Artificial Sequence
  Synthetic oligonucleotide
gaaatccaggaatgaagggcagacgcttac

SEQ ID NO: 377210 - DNA, 30 bp, Artificial Sequence
  Synthetic oligonucleotide
atccggtgccccagttcaagtgccgcttac

SEQ ID NO: 377211 - DNA, 30 bp, Artificial Sequence
  Synthetic oligonucleotide
gattggataaagcgcgggtccgcggcttac

SEQ ID NO: 377212 - DNA, 30 bp, Artificial Sequence
  Synthetic oligonucleotide
gatagattcaggtgtgattggttggcttac

SEQ ID NO: 377213 - DNA, 30 bp, Artificial Sequence
  Synthetic oligonucleotide
gatcgattaacaagattagggtaatcttac

SEQ ID NO: 377214 - DNA, 30 bp, Artificial Sequence
  Synthetic oligonucleotide
ggcacgtattttggactattttggtcttac

SEQ ID NO: 377215 - DNA, 30 bp, Artificial Sequence
  Synthetic oligonucleotide
gaaggtcatttgtgcgcgggtagttcttac

SEQ ID NO: 377216 - DNA, 30 bp, Artificial Sequence
  Synthetic oligonucleotide
aggtgggcgggagaggtagaggtttcttac

SEQ ID NO: 377217 - DNA, 30 bp, Artificial Sequence
  Synthetic oligonucleotide
tgcagactgagacatggtcaagtcagttac

SEQ ID NO: 377218 - DNA, 30 bp, Artificial Sequence
  Synthetic oligonucleotide
tgataggccccgacctgttcacttagttac

SEQ ID NO: 377219 - DNA, 30 bp, Artificial Sequence
  Synthetic oligonucleotide
ctctttcagctttcagtgaaaaaacgttac

SEQ ID NO: 377220 - DNA, 30 bp, Artificial Sequence
  Synthetic oligonucleotide
cacgtctctagacagagcaaccaacgttac

SEQ ID NO: 377221 - DNA, 30 bp, Artificial Sequence
  Synthetic oligonucleotide
tggttatgatcaagagaatgattacgttac

SEQ ID NO: 377222 - DNA, 30 bp, Artificial Sequence
  Synthetic oligonucleotide
catctcgcagcggtataggaacaccgttac

SEQ ID NO: 377223 - DNA, 30 bp, Artificial Sequence
  Synthetic oligonucleotide
tgtttggagcggcccgtcataacgcgttac

SEQ ID NO: 377224 - DNA, 30 bp, Artificial Sequence
  Synthetic oligonucleotide
caaagcaggatcacggacttgattcgttac

SEQ ID NO: 377225 - DNA, 30 bp, Artificial Sequence
  Synthetic oligonucleotide
tagattgcccctggcgcccacaaaggttac

SEQ ID NO: 377226 - DNA, 30 bp, Artificial Sequence
  Synthetic oligonucleotide
agcactggctctttgtggcgtcaaggttac

SEQ ID NO: 377227 - DNA, 30 bp, Artificial Sequence
  Synthetic oligonucleotide
tatggtaaggaagggctccagtggggttac

SEQ ID NO: 377228 - DNA, 30 bp, Artificial Sequence
  Synthetic oligonucleotide
taggggtaatcggtagagactatgggttac

SEQ ID NO: 377229 - DNA, 30 bp, Artificial Sequence
  Synthetic oligonucleotide
tgcaaaggcacaaattgcaattatggttac

SEQ ID NO: 377230 - DNA, 30 bp, Artificial Sequence
  Synthetic oligonucleotide
ttcaagtaatccataaggatcgctggttac

SEQ ID NO: 377231 - DNA, 29 bp, Artificial Sequence
  Synthetic oligonucleotide
acaagtccggcgatctgtaacgtggttac

SEQ ID NO: 377232 - DNA, 30 bp, Artificial Sequence
  Synthetic oligonucleotide
aacatcctccaagccgttgagcaatgttac

SEQ ID NO: 377233 - DNA, 30 bp, Artificial Sequence
  Synthetic oligonucleotide
tatgagttgggccaaacagccgcatgttac

SEQ ID NO: 377234 - DNA, 30 bp, Artificial Sequence
  Synthetic oligonucleotide
aagttcattattattttggcggcatgttac

SEQ ID NO: 377235 - DNA, 30 bp, Artificial Sequence
  Synthetic oligonucleotide
ataatctcaaaaaggtcatggtgatgttac

SEQ ID NO: 377236 - DNA, 30 bp, Artificial Sequence
  Synthetic oligonucleotide
aggattattccccacacacgtgtatgttac

SEQ ID NO: 377237 - DNA, 30 bp, Artificial Sequence
  Synthetic oligonucleotide
gaccgttaatgtgttaagctcgcctgttac

SEQ ID NO: 377238 - DNA, 30 bp, Artificial Sequence
  Synthetic oligonucleotide
cacgagcctagatggcagcaaaagtgttac

SEQ ID NO: 377239 - DNA, 30 bp, Artificial Sequence
  Synthetic oligonucleotide
ttatgtctttccagtcgtgaagcgtgttac

SEQ ID NO: 377240 - DNA, 30 bp, Artificial Sequence
  Synthetic oligonucleotide
gtatggagaattaaaaatatgatgtgttac

SEQ ID NO: 377241 - DNA, 30 bp, Artificial Sequence
  Synthetic oligonucleotide
ctctcagtggaccgagacgctgcttgttac

SEQ ID NO: 377242 - DNA, 30 bp, Artificial Sequence
  Synthetic oligonucleotide
atcagagactcaacagcgtgaacaatttac

SEQ ID NO: 377243 - DNA, 30 bp, Artificial Sequence
  Synthetic oligonucleotide
aagggagatcggatcacttggagaatttac

SEQ ID NO: 377244 - DNA, 30 bp, Artificial Sequence
  Synthetic oligonucleotide
actcgcatggggagacacaggtacatttac

SEQ ID NO: 377245 - DNA, 30 bp, Artificial Sequence
  Synthetic oligonucleotide
atagtagattgcgagttttccagcatttac

SEQ ID NO: 377246 - DNA, 30 bp, Artificial Sequence
  Synthetic oligonucleotide
taagaagctacaaacgtgaatcagatttac

SEQ ID NO: 377247 - DNA, 30 bp, Artificial Sequence
  Synthetic oligonucleotide
tttaaagaattctggttcattgatatttac

SEQ ID NO: 377248 - DNA, 30 bp, Artificial Sequence
  Synthetic oligonucleotide
agaaacacccacaagctcgggcttatttac

SEQ ID NO: 377249 - DNA, 30 bp, Artificial Sequence
  Synthetic oligonucleotide
tagcgaccagatgctgatcgaaccctttac

SEQ ID NO: 377250 - DNA, 30 bp, Artificial Sequence
  Synthetic oligonucleotide
caacggatcgccgcagagagctatctttac

SEQ ID NO: 377251 - DNA, 30 bp, Artificial Sequence
  Synthetic oligonucleotide
cgtaaacatgaaatgtacaaacgtctttac

SEQ ID NO: 377252 - DNA, 30 bp, Artificial Sequence
  Synthetic oligonucleotide
atagaaacctgcgggggacccgttctttac

SEQ ID NO: 377253 - DNA, 30 bp, Artificial Sequence
  Synthetic oligonucleotide
gagagcaggggacaacttttcaaagtttac

SEQ ID NO: 377254 - DNA, 30 bp, Artificial Sequence
  Synthetic oligonucleotide
cctaaatcgggcctcgttcgctcagtttac

SEQ ID NO: 377255 - DNA, 30 bp, Artificial Sequence
  Synthetic oligonucleotide
cgtaaggggtaatcctacaaaatagtttac

SEQ ID NO: 377256 - DNA, 30 bp, Artificial Sequence
  Synthetic oligonucleotide
tacctcgcacatgcactttgtcgggtttac

SEQ ID NO: 377257 - DNA, 30 bp, Artificial Sequence
  Synthetic oligonucleotide
tgttacgaggaaggacggcagttggtttac

SEQ ID NO: 377258 - DNA, 30 bp, Artificial Sequence
  Synthetic oligonucleotide
atatggactatccttctaggctctgtttac

SEQ ID NO: 377259 - DNA, 30 bp, Artificial Sequence
  Synthetic oligonucleotide
gagccaaaccttaaatccttcggcttttac

SEQ ID NO: 377260 - DNA, 30 bp, Artificial Sequence
  Synthetic oligonucleotide
ggtcggtccgcgccgacgataaagttttac

SEQ ID NO: 377261 - DNA, 30 bp, Artificial Sequence
  Synthetic oligonucleotide
atcggggtgttaattagggagtagttttac

SEQ ID NO: 377262 - DNA, 30 bp, Artificial Sequence
  Synthetic oligonucleotide
tggtgttagagtatctaatgatcgttttac

SEQ ID NO: 377263 - DNA, 30 bp, Artificial Sequence
  Synthetic oligonucleotide
ttcagttagccaagaacttcaaggttttac

SEQ ID NO: 377264 - DNA, 30 bp, Artificial Sequence
  Synthetic oligonucleotide
agtgtcctgctatctatagatagtttttac

SEQ ID NO: 377265 - DNA, 30 bp, Artificial Sequence
  Synthetic oligonucleotide
aaatttctgggagggaatacatgaaaaacc

SEQ ID NO: 377266 - DNA, 30 bp, Artificial Sequence
  Synthetic oligonucleotide
ttgaaggtcgggcagtatgcagccaaaacc

SEQ ID NO: 377267 - DNA, 30 bp, Artificial Sequence
  Synthetic oligonucleotide
ggaatacaactacgtagctaaggcaaaacc

SEQ ID NO: 377268 - DNA, 30 bp, Artificial Sequence
  Synthetic oligonucleotide
gtgtcatccgaagttataaacacgaaaacc

SEQ ID NO: 377269 - DNA, 30 bp, Artificial Sequence
  Synthetic oligonucleotide
tagcaacgagtaggagcaagattgaaaacc

SEQ ID NO: 377270 - DNA, 30 bp, Artificial Sequence
  Synthetic oligonucleotide
aatatcagggtatcacagagttataaaacc

SEQ ID NO: 377271 - DNA, 30 bp, Artificial Sequence
  Synthetic oligonucleotide
tatccgtcaatatgcgggctgactaaaacc

SEQ ID NO: 377272 - DNA, 30 bp, Artificial Sequence
  Synthetic oligonucleotide
attctcagaagccacccgttaagacaaacc

SEQ ID NO: 377273 - DNA, 30 bp, Artificial Sequence
  Synthetic oligonucleotide
gctcttttaacatatcccaagctacaaacc

SEQ ID NO: 377274 - DNA, 30 bp, Artificial Sequence
  Synthetic oligonucleotide
gcacgttttggtgaaaacgcccaccaaacc

SEQ ID NO: 377275 - DNA, 30 bp, Artificial Sequence
  Synthetic oligonucleotide
atttgccaaacgtgagcatactaccaaacc

SEQ ID NO: 377276 - DNA, 30 bp, Artificial Sequence
  Synthetic oligonucleotide
accaacaaggcacccttgctttaccaaacc

SEQ ID NO: 377277 - DNA, 30 bp, Artificial Sequence
  Synthetic oligonucleotide
agtgcgggcttggagttacgagcgcaaacc

SEQ ID NO: 377278 - DNA, 30 bp, Artificial Sequence
  Synthetic oligonucleotide
gaaaaggcgactccgtttcttgcgcaaacc

SEQ ID NO: 377279 - DNA, 30 bp, Artificial Sequence
  Synthetic oligonucleotide
ttacgacagttaatgcgttttgggcaaacc

SEQ ID NO: 377280 - DNA, 30 bp, Artificial Sequence
  Synthetic oligonucleotide
ttaatgacacgcaagtttagtgctcaaacc

SEQ ID NO: 377281 - DNA, 30 bp, Artificial Sequence
  Synthetic oligonucleotide
ggcacggagactttttaattaagagaaacc

SEQ ID NO: 377282 - DNA, 30 bp, Artificial Sequence
  Synthetic oligonucleotide
aactgcagaaagatagcgcttcccgaaacc

SEQ ID NO: 377283 - DNA, 30 bp, Artificial Sequence
  Synthetic oligonucleotide
gcgacccgctatagtatcttatgtgaaacc

SEQ ID NO: 377284 - DNA, 30 bp, Artificial Sequence
  Synthetic oligonucleotide
aatgttgaccaagggaaacatcttgaaacc

SEQ ID NO: 377285 - DNA, 30 bp, Artificial Sequence
  Synthetic oligonucleotide
tgtaaccaagctctgaggacatttgaaacc

SEQ ID NO: 377286 - DNA, 30 bp, Artificial Sequence
  Synthetic oligonucleotide
gggtgaatagtggcgaaacggtttgaaacc

SEQ ID NO: 377287 - DNA, 30 bp, Artificial Sequence
  Synthetic oligonucleotide
actaagctcacgcgtgagtcgtgctaaacc

SEQ ID NO: 377288 - DNA, 30 bp, Artificial Sequence
  Synthetic oligonucleotide
agacatgtcgcactacagcagatctaaacc

SEQ ID NO: 377289 - DNA, 30 bp, Artificial Sequence
  Synthetic oligonucleotide
aagccgtttggtctacttgccctgtaaacc

SEQ ID NO: 377290 - DNA, 30 bp, Artificial Sequence
  Synthetic oligonucleotide
acctgtgcgacgctagcatagtcttaaacc

SEQ ID NO: 377291 - DNA, 30 bp, Artificial Sequence
  Synthetic oligonucleotide
agtaatcggtcatataaaagacgttaaacc

SEQ ID NO: 377292 - DNA, 30 bp, Artificial Sequence
  Synthetic oligonucleotide
agtggcgcgtgtggtttgggagacacaacc

SEQ ID NO: 377293 - DNA, 30 bp, Artificial Sequence
  Synthetic oligonucleotide
ctagagccatcgacagatcgcggcacaacc

SEQ ID NO: 377294 - DNA, 30 bp, Artificial Sequence
  Synthetic oligonucleotide
gactaccaagcgtaaccacgatagacaacc

SEQ ID NO: 377295 - DNA, 30 bp, Artificial Sequence
  Synthetic oligonucleotide
gtaactattactgagctaattacgacaacc

SEQ ID NO: 377296 - DNA, 30 bp, Artificial Sequence
  Synthetic oligonucleotide
tcagatgtgcctggtgaaatttcgacaacc

SEQ ID NO: 377297 - DNA, 30 bp, Artificial Sequence
  Synthetic oligonucleotide
acgtgtggtatttctgtttaaatgacaacc

SEQ ID NO: 377298 - DNA, 30 bp, Artificial Sequence
  Synthetic oligonucleotide
gtactcggcctgacggaaaaactgacaacc

SEQ ID NO: 377299 - DNA, 30 bp, Artificial Sequence
  Synthetic oligonucleotide
ccaatttgcagctacacgcgttatacaacc

SEQ ID NO: 377300 - DNA, 30 bp, Artificial Sequence
  Synthetic oligonucleotide
ctcggaaggtatttaggcaaaggcccaacc

SEQ ID NO: 377301 - DNA, 30 bp, Artificial Sequence
  Synthetic oligonucleotide
ggcacgtatgcctgttattgttagccaacc

SEQ ID NO: 377302 - DNA, 30 bp, Artificial Sequence
  Synthetic oligonucleotide
cgtcgcacattatcagaacccatgccaacc

SEQ ID NO: 377303 - DNA, 30 bp, Artificial Sequence
  Synthetic oligonucleotide
actgctgtgcggcaaggcttaagtccaacc

SEQ ID NO: 377304 - DNA, 30 bp, Artificial Sequence
  Synthetic oligonucleotide
gagcccctagcttgcgcatcacaagcaacc

SEQ ID NO: 377305 - DNA, 30 bp, Artificial Sequence
  Synthetic oligonucleotide
gcagcttcccatctgtattctgaggcaacc

SEQ ID NO: 377306 - DNA, 30 bp, Artificial Sequence
  Synthetic oligonucleotide
acagatacgtcacgtttttaatgggcaacc

SEQ ID NO: 377307 - DNA, 30 bp, Artificial Sequence
  Synthetic oligonucleotide
aagtccctggtctatgatcgaaatgcaacc

SEQ ID NO: 377308 - DNA, 30 bp, Artificial Sequence
  Synthetic oligonucleotide
tttagaatctgcggaacagaccctgcaacc

SEQ ID NO: 377309 - DNA, 30 bp, Artificial Sequence
  Synthetic oligonucleotide
caggttgtgtccgggctcctgggtgcaacc

SEQ ID NO: 377310 - DNA, 30 bp, Artificial Sequence
  Synthetic oligonucleotide
ttctactgacctgaactattgctatcaacc

SEQ ID NO: 377311 - DNA, 30 bp, Artificial Sequence
  Synthetic oligonucleotide
agtgatgagaccctcggtaaggagtcaacc

SEQ ID NO: 377312 - DNA, 30 bp, Artificial Sequence
  Synthetic oligonucleotide
tgtgggcggaagcggatactccggtcaacc

SEQ ID NO: 377313 - DNA, 30 bp, Artificial Sequence
  Synthetic oligonucleotide
agaaatactgtatcatgtataatgtcaacc

SEQ ID NO: 377314 - DNA, 30 bp, Artificial Sequence
  Synthetic oligonucleotide
gggcctaaggggcgaagccgccattcaacc

SEQ ID NO: 377315 - DNA, 30 bp, Artificial Sequence
  Synthetic oligonucleotide
atggtattgcggcgtcacgttagttcaacc

SEQ ID NO: 377316 - DNA, 30 bp, Artificial Sequence
  Synthetic oligonucleotide
tactataattctctgctaccgtaaagaacc

SEQ ID NO: 377317 - DNA, 30 bp, Artificial Sequence
  Synthetic oligonucleotide
ttaacgactgcccaaaggtcatcaagaacc

SEQ ID NO: 377318 - DNA, 30 bp, Artificial Sequence
  Synthetic oligonucleotide
gaaaaccaagcagaactagtgtgaagaacc

SEQ ID NO: 377319 - DNA, 30 bp, Artificial Sequence
  Synthetic oligonucleotide
ctctcctggtatctgagacgatacagaacc

SEQ ID NO: 377320 - DNA, 30 bp, Artificial Sequence
  Synthetic oligonucleotide
tgccacatcttatggcgcctccccagaacc

SEQ ID NO: 377321 - DNA, 30 bp, Artificial Sequence
  Synthetic oligonucleotide
gatctaagggagtgttcaggcttcagaacc

SEQ ID NO: 377322 - DNA, 30 bp, Artificial Sequence
  Synthetic oligonucleotide
agaatagtccctgatctttggtcgagaacc

SEQ ID NO: 377323 - DNA, 30 bp, Artificial Sequence
  Synthetic oligonucleotide
tctggttcggactaatgtgtcccacgaacc

SEQ ID NO: 377324 - DNA, 30 bp, Artificial Sequence
  Synthetic oligonucleotide
gcgtattttcgagtcgaaacagtacgaacc

SEQ ID NO: 377325 - DNA, 30 bp, Artificial Sequence
  Synthetic oligonucleotide
tgtacataggcttgatgaaaaaaccgaacc

SEQ ID NO: 377326 - DNA, 30 bp, Artificial Sequence
  Synthetic oligonucleotide
gggatttcctttgtcgtatttaaccgaacc

SEQ ID NO: 377327 - DNA, 30 bp, Artificial Sequence
  Synthetic oligonucleotide
tccagtcgcataagcagaggataccgaacc

SEQ ID NO: 377328 - DNA, 30 bp, Artificial Sequence
  Synthetic oligonucleotide
agggaacatggtatggaatacagtcgaacc

SEQ ID NO: 377329 - DNA, 30 bp, Artificial Sequence
  Synthetic oligonucleotide
gtttttcggtgcaacaaaggcagtcgaacc

SEQ ID NO: 377330 - DNA, 30 bp, Artificial Sequence
  Synthetic oligonucleotide
agccgacgtcgcacaagtaacgcaggaacc

SEQ ID NO: 377331 - DNA, 30 bp, Artificial Sequence
  Synthetic oligonucleotide
ccactttcggttatagatttcttaggaacc

SEQ ID NO: 377332 - DNA, 30 bp, Artificial Sequence
  Synthetic oligonucleotide
gtctcagtatcgcctgcaagtatgggaacc

SEQ ID NO: 377333 - DNA, 30 bp, Artificial Sequence
  Synthetic oligonucleotide
aagaccctatatgccatggatgatggaacc

SEQ ID NO: 377334 - DNA, 30 bp, Artificial Sequence
  Synthetic oligonucleotide
agatatgaaatgtgttgaaagtttggaacc

SEQ ID NO: 377335 - DNA, 30 bp, Artificial Sequence
  Synthetic oligonucleotide
caattagcataactcggtggcaaatgaacc

SEQ ID NO: 377336 - DNA, 30 bp, Artificial Sequence
  Synthetic oligonucleotide
tcaatagtagacgttccagttacatgaacc

SEQ ID NO: 377337 - DNA, 30 bp, Artificial Sequence
  Synthetic oligonucleotide
gcaactcatagccggtaacatttatgaacc

SEQ ID NO: 377338 - DNA, 30 bp, Artificial Sequence
  Synthetic oligonucleotide
tagaagtctaggttccgtgaccagtgaacc

SEQ ID NO: 377339 - DNA, 30 bp, Artificial Sequence
  Synthetic oligonucleotide
tttgccacctttatatggtttcagtgaacc

SEQ ID NO: 377340 - DNA, 30 bp, Artificial Sequence
  Synthetic oligonucleotide
ggcgctctattggaccaggaagattgaacc

SEQ ID NO: 377341 - DNA, 30 bp, Artificial Sequence
  Synthetic oligonucleotide
aatgatcacaattcaacacggtgaataacc

SEQ ID NO: 377342 - DNA, 30 bp, Artificial Sequence
  Synthetic oligonucleotide
taatagtcgcaccgtatgtagataataacc

SEQ ID NO: 377343 - DNA, 30 bp, Artificial Sequence
  Synthetic oligonucleotide
atgcactacattctgagatgactaataacc

SEQ ID NO: 377344 - DNA, 30 bp, Artificial Sequence
  Synthetic oligonucleotide
aatacaattaagaacgttgtatggataacc

SEQ ID NO: 377345 - DNA, 30 bp, Artificial Sequence
  Synthetic oligonucleotide
aagggttgtgcgaggggtgggttgataacc

SEQ ID NO: 377346 - DNA, 30 bp, Artificial Sequence
  Synthetic oligonucleotide
atctattggctttcgtccacatctataacc

SEQ ID NO: 377347 - DNA, 30 bp, Artificial Sequence
  Synthetic oligonucleotide
taaactaacatgctgcaccttagactaacc

SEQ ID NO: 377348 - DNA, 30 bp, Artificial Sequence
  Synthetic oligonucleotide
ctctcgtacctcggggtgaacgtactaacc

SEQ ID NO: 377349 - DNA, 30 bp, Artificial Sequence
  Synthetic oligonucleotide
caaaaataccgcaatgcgggcatcctaacc

SEQ ID NO: 377350 - DNA, 30 bp, Artificial Sequence
  Synthetic oligonucleotide
tgccggtatagtaacacttgggtcctaacc

SEQ ID NO: 377351 - DNA, 30 bp, Artificial Sequence
  Synthetic oligonucleotide
aatccagagagtatcgggacttcgctaacc

SEQ ID NO: 377352 - DNA, 30 bp, Artificial Sequence
  Synthetic oligonucleotide
ttacgcgatattaatgtccctgaagtaacc

SEQ ID NO: 377353 - DNA, 30 bp, Artificial Sequence
  Synthetic oligonucleotide
attgtaaaccggttaaagatcagagtaacc

SEQ ID NO: 377354 - DNA, 30 bp, Artificial Sequence
  Synthetic oligonucleotide
ggtatcgtaaggaatatgaagatagtaacc

SEQ ID NO: 377355 - DNA, 30 bp, Artificial Sequence
  Synthetic oligonucleotide
ggaaattagtgttagtctagtcacgtaacc

SEQ ID NO: 377356 - DNA, 30 bp, Artificial Sequence
  Synthetic oligonucleotide
actacttttacctttcttacgttcgtaacc

SEQ ID NO: 377357 - DNA, 30 bp, Artificial Sequence
  Synthetic oligonucleotide
gtaaacttgtcgagtcaatttcatgtaacc

SEQ ID NO: 377358 - DNA, 30 bp, Artificial Sequence
  Synthetic oligonucleotide
tcacgatgtagaggcatagattttgtaacc

SEQ ID NO: 377359 - DNA, 30 bp, Artificial Sequence
  Synthetic oligonucleotide
tattgcatttagatttttatatccttaacc

SEQ ID NO: 377360 - DNA, 30 bp, Artificial Sequence
  Synthetic oligonucleotide
acggtgaccgtgctgtcatacgttttaacc

SEQ ID NO: 377361 - DNA, 30 bp, Artificial Sequence
  Synthetic oligonucleotide
gcagatccgtctcattcgtcggtaaacacc

SEQ ID NO: 377362 - DNA, 30 bp, Artificial Sequence
  Synthetic oligonucleotide
tatctactggataccgtgactgagaacacc

SEQ ID NO: 377363 - DNA, 30 bp, Artificial Sequence
  Synthetic oligonucleotide
caagcaagtactttatggtcgcgtaacacc

SEQ ID NO: 377364 - DNA, 30 bp, Artificial Sequence
  Synthetic oligonucleotide
cctttgacaatagtcgatcattgtaacacc

SEQ ID NO: 377365 - DNA, 30 bp, Artificial Sequence
  Synthetic oligonucleotide
aaagatatggaagcacatgcgtaccacacc

SEQ ID NO: 377366 - DNA, 30 bp, Artificial Sequence
  Synthetic oligonucleotide
catgatcagaccggctgggggccgcacacc

SEQ ID NO: 377367 - DNA, 30 bp, Artificial Sequence
  Synthetic oligonucleotide
aataactgtgttgcaggagtttcgcacacc

SEQ ID NO: 377368 - DNA, 30 bp, Artificial Sequence
  Synthetic oligonucleotide
gaggtcaggggtaaaaagttatcagacacc

SEQ ID NO: 377369 - DNA, 30 bp, Artificial Sequence
  Synthetic oligonucleotide
aggtatcgctttcagttaaacccggacacc

SEQ ID NO: 377370 - DNA, 30 bp, Artificial Sequence
  Synthetic oligonucleotide
caccgaaatttcttgaactatgcggacacc

SEQ ID NO: 377371 - DNA, 30 bp, Artificial Sequence
  Synthetic oligonucleotide
agtatgttgcatcgactttagtcggacacc

SEQ ID NO: 377372 - DNA, 30 bp, Artificial Sequence
  Synthetic oligonucleotide
tttaccggtaatgcactatcgttggacacc

SEQ ID NO: 377373 - DNA, 30 bp, Artificial Sequence
  Synthetic oligonucleotide
tttagatagggtcctttgtgtcgtgacacc

SEQ ID NO: 377374 - DNA, 30 bp, Artificial Sequence
  Synthetic oligonucleotide
acaggtggtccaaggggcttaggatacacc

SEQ ID NO: 377375 - DNA, 30 bp, Artificial Sequence
  Synthetic oligonucleotide
tagcatcgctctcgacagacccggtacacc

SEQ ID NO: 377376 - DNA, 30 bp, Artificial Sequence
  Synthetic oligonucleotide
gccgcccacagaagtcaaggattttacacc

SEQ ID NO: 377377 - DNA, 30 bp, Artificial Sequence
  Synthetic oligonucleotide
ggccgggctttccgggtggacggaaccacc

SEQ ID NO: 377378 - DNA, 30 bp, Artificial Sequence
  Synthetic oligonucleotide
aacatcccacacgtgtcagttcgcaccacc

SEQ ID NO: 377379 - DNA, 30 bp, Artificial Sequence
  Synthetic oligonucleotide
gcaggcattccttaaattgaccgccccacc

SEQ ID NO: 377380 - DNA, 30 bp, Artificial Sequence
  Synthetic oligonucleotide
gataatcctgtgagtctcgggttccccacc

SEQ ID NO: 377381 - DNA, 30 bp, Artificial Sequence
  Synthetic oligonucleotide
agatggctacgacagacagtgaagcccacc

SEQ ID NO: 377382 - DNA, 30 bp, Artificial Sequence
  Synthetic oligonucleotide
cggccatctcatggcttggcagagcccacc

SEQ ID NO: 377383 - DNA, 30 bp, Artificial Sequence
  Synthetic oligonucleotide
ataaatccttagtgcaagttgagtcccacc

SEQ ID NO: 377384 - DNA, 30 bp, Artificial Sequence
  Synthetic oligonucleotide
gactgggaatttaacgaaaacgttcccacc

SEQ ID NO: 377385 - DNA, 30 bp, Artificial Sequence
  Synthetic oligonucleotide
gcattcacggttctccggttcggagccacc

SEQ ID NO: 377386 - DNA, 30 bp, Artificial Sequence
  Synthetic oligonucleotide
ccggctttatattatgagttttgagccacc

SEQ ID NO: 377387 - DNA, 30 bp, Artificial Sequence
  Synthetic oligonucleotide
atgacgggaagcgggctacccctagccacc

SEQ ID NO: 377388 - DNA, 30 bp, Artificial Sequence
  Synthetic oligonucleotide
ggaggcagcaagtcagataacgactccacc

SEQ ID NO: 377389 - DNA, 30 bp, Artificial Sequence
  Synthetic oligonucleotide
atgaaattgaaggccgcacgtaagtccacc

SEQ ID NO: 377390 - DNA, 30 bp, Artificial Sequence
  Synthetic oligonucleotide
cggtatcggtgacactgtgaggggtccacc

SEQ ID NO: 377391 - DNA, 30 bp, Artificial Sequence
  Synthetic oligonucleotide
ggagttgtgcgtcttcccttgaacagcacc

SEQ ID NO: 377392 - DNA, 29 bp, Artificial Sequence
  Synthetic oligonucleotide
aggggctagcaaagagtgttctgagcacc

SEQ ID NO: 377393 - DNA, 30 bp, Artificial Sequence
  Synthetic oligonucleotide
cggggggtctatgacatacagactagcacc

SEQ ID NO: 377394 - DNA, 30 bp, Artificial Sequence
  Synthetic oligonucleotide
ttaatgacctgcctcaactcgactagcacc

SEQ ID NO: 377395 - DNA, 30 bp, Artificial Sequence
  Synthetic oligonucleotide
ggtcttggcgtacctccttggcgtagcacc

SEQ ID NO: 377396 - DNA, 30 bp, Artificial Sequence
  Synthetic oligonucleotide
cggtgagcaccgatctttcggcaacgcacc

SEQ ID NO: 377397 - DNA, 30 bp, Artificial Sequence
  Synthetic oligonucleotide
ccgctctggagggatctctacacacgcacc

SEQ ID NO: 377398 - DNA, 30 bp, Artificial Sequence
  Synthetic oligonucleotide
cgggggactctagtagtatttacacgcacc

SEQ ID NO: 377399 - DNA, 30 bp, Artificial Sequence
  Synthetic oligonucleotide
atcactgaacgagtccgaatctcacgcacc

SEQ ID NO: 377400 - DNA, 30 bp, Artificial Sequence
  Synthetic oligonucleotide
acaacggatatgggtgcttttagacgcacc

SEQ ID NO: 377401 - DNA, 30 bp, Artificial Sequence
  Synthetic oligonucleotide
atgtagggtccagggatgcggatacgcacc

SEQ ID NO: 377402 - DNA, 28 bp, Artificial Sequence
  Synthetic oligonucleotide
tttagggacaaggtcgcttgtgcgcacc

SEQ ID NO: 377403 - DNA, 30 bp, Artificial Sequence
  Synthetic oligonucleotide
aagtgacgtctctactaggaatctcgcacc

SEQ ID NO: 377404 - DNA, 30 bp, Artificial Sequence
  Synthetic oligonucleotide
acctccccttgagaagcgaagattcgcacc

SEQ ID NO: 377405 - DNA, 30 bp, Artificial Sequence
  Synthetic oligonucleotide
ggccgggtctcgctgtgtaatcttcgcacc

SEQ ID NO: 377406 - DNA, 30 bp, Artificial Sequence
  Synthetic oligonucleotide
taactgtcgcagaggacgcgtacaggcacc

SEQ ID NO: 377407 - DNA, 30 bp, Artificial Sequence
  Synthetic oligonucleotide
ctctcgataatgaaagtgctaccgggcacc

SEQ ID NO: 377408 - DNA, 30 bp, Artificial Sequence
  Synthetic oligonucleotide
agctcgaagacgtgatcggcaaggggcacc

SEQ ID NO: 377409 - DNA, 30 bp, Artificial Sequence
  Synthetic oligonucleotide
gcgttgcctaagtttatgacaagatgcacc

SEQ ID NO: 377410 - DNA, 30 bp, Artificial Sequence
  Synthetic oligonucleotide
agtagatagccagggtttgttaactgcacc

SEQ ID NO: 377411 - DNA, 30 bp, Artificial Sequence
  Synthetic oligonucleotide
cggcaggcgcagacttggatagattgcacc

SEQ ID NO: 377412 - DNA, 30 bp, Artificial Sequence
  Synthetic oligonucleotide
atataaggcatggtgtcccgatattgcacc

SEQ ID NO: 377413 - DNA, 30 bp, Artificial Sequence
  Synthetic oligonucleotide
gtaacttggccatagacagcacacatcacc

SEQ ID NO: 377414 - DNA, 30 bp, Artificial Sequence
  Synthetic oligonucleotide
caaacactcttagtcccgtgcggcatcacc

SEQ ID NO: 377415 - DNA, 30 bp, Artificial Sequence
  Synthetic oligonucleotide
aagacgaagcaagttacacgattcatcacc

SEQ ID NO: 377416 - DNA, 30 bp, Artificial Sequence
  Synthetic oligonucleotide
acaggaacccgttcattggaacagatcacc

SEQ ID NO: 377417 - DNA, 30 bp, Artificial Sequence
  Synthetic oligonucleotide
ttgattggcactatgggatgaccgatcacc

SEQ ID NO: 377418 - DNA, 30 bp, Artificial Sequence
  Synthetic oligonucleotide
atgtgaaaattcagcagaggcaggatcacc

SEQ ID NO: 377419 - DNA, 30 bp, Artificial Sequence
  Synthetic oligonucleotide
cataccaagaggcgtaattggcggatcacc

SEQ ID NO: 377420 - DNA, 30 bp, Artificial Sequence
  Synthetic oligonucleotide
cgtttcctcccccgcgtttgatggatcacc

SEQ ID NO: 377421 - DNA, 30 bp, Artificial Sequence
  Synthetic oligonucleotide
cataggataagttgacgttcgtggatcacc

SEQ ID NO: 377422 - DNA, 30 bp, Artificial Sequence
  Synthetic oligonucleotide
gggtcgtgactgtcattacattggatcacc

SEQ ID NO: 377423 - DNA, 30 bp, Artificial Sequence
  Synthetic oligonucleotide
actttaaccaccccagggcagcctatcacc

SEQ ID NO: 377424 - DNA, 30 bp, Artificial Sequence
  Synthetic oligonucleotide
aggatcacagaattgccgcgttctatcacc

SEQ ID NO: 377425 - DNA, 30 bp, Artificial Sequence
  Synthetic oligonucleotide
aaacgccgacagaacgggcccacactcacc

SEQ ID NO: 377426 - DNA, 30 bp, Artificial Sequence
  Synthetic oligonucleotide
gggtgcgtggggactcctcggatcctcacc

SEQ ID NO: 377427 - DNA, 30 bp, Artificial Sequence
  Synthetic oligonucleotide
atctaccgggagttgcagtaagggctcacc

SEQ ID NO: 377428 - DNA, 30 bp, Artificial Sequence
  Synthetic oligonucleotide
attagtcgtggatcgtgaaaggttctcacc

SEQ ID NO: 377429 - DNA, 30 bp, Artificial Sequence
  Synthetic oligonucleotide
tcgcggcgtgcgtgagaatttgcagtcacc

SEQ ID NO: 377430 - DNA, 30 bp, Artificial Sequence
  Synthetic oligonucleotide
caagaataacagataggttgatacgtcacc

SEQ ID NO: 377431 - DNA, 30 bp, Artificial Sequence
  Synthetic oligonucleotide
gggggtgagagatcttgcgacggcgtcacc

SEQ ID NO: 377432 - DNA, 30 bp, Artificial Sequence
  Synthetic oligonucleotide
gacggaatcacggggtgactttatgtcacc

SEQ ID NO: 377433 - DNA, 30 bp, Artificial Sequence
  Synthetic oligonucleotide
cgttggtcagttatgatttaactattcacc

SEQ ID NO: 377434 - DNA, 30 bp, Artificial Sequence
  Synthetic oligonucleotide
ggactaatgtagtacccacctaggttcacc

SEQ ID NO: 377435 - DNA, 30 bp, Artificial Sequence
  Synthetic oligonucleotide
cgcactttaagtatagactgtgggttcacc

SEQ ID NO: 377436 - DNA, 30 bp, Artificial Sequence
  Synthetic oligonucleotide
gtgtgtctgcccagggatcacaatttcacc

SEQ ID NO: 377437 - DNA, 30 bp, Artificial Sequence
  Synthetic oligonucleotide
ccgcagagagggtgtgaacatggaaagacc

SEQ ID NO: 377438 - DNA, 30 bp, Artificial Sequence
  Synthetic oligonucleotide
tatataaggcgagaggcccggttaaagacc

SEQ ID NO: 377439 - DNA, 30 bp, Artificial Sequence
  Synthetic oligonucleotide
ctgtttgctcggcaaatgggctacaagacc

SEQ ID NO: 377440 - DNA, 30 bp, Artificial Sequence
  Synthetic oligonucleotide
taatgcggcgtaggtacgtatcgcaagacc

SEQ ID NO: 377441 - DNA, 30 bp, Artificial Sequence
  Synthetic oligonucleotide
gagatcacctcacccttgttggtcaagacc

SEQ ID NO: 377442 - DNA, 30 bp, Artificial Sequence
  Synthetic oligonucleotide
gcctcatatggttttatacagacgaagacc

SEQ ID NO: 377443 - DNA, 30 bp, Artificial Sequence
  Synthetic oligonucleotide
gctgcttttagaacccatgcagggaagacc

SEQ ID NO: 377444 - DNA, 30 bp, Artificial Sequence
  Synthetic oligonucleotide
gggcgatacaggtcattcgtgatgaagacc

SEQ ID NO: 377445 - DNA, 30 bp, Artificial Sequence
  Synthetic oligonucleotide
aaggtgcacgcagcgaatgatcataagacc

SEQ ID NO: 377446 - DNA, 30 bp, Artificial Sequence
  Synthetic oligonucleotide
tgccttgatttataccacgctacacagacc

SEQ ID NO: 377447 - DNA, 30 bp, Artificial Sequence
  Synthetic oligonucleotide
attggagactgtagaaggccgagacagacc

SEQ ID NO: 377448 - DNA, 30 bp, Artificial Sequence
  Synthetic oligonucleotide
tacactggagccccaagctgccgccagacc

SEQ ID NO: 377449 - DNA, 30 bp, Artificial Sequence
  Synthetic oligonucleotide
agctcagaccggtgaggctaaatccagacc

SEQ ID NO: 377450 - DNA, 30 bp, Artificial Sequence
  Synthetic oligonucleotide
tgatagcggctgggtccggcatggcagacc

SEQ ID NO: 377451 - DNA, 30 bp, Artificial Sequence
  Synthetic oligonucleotide
cgatcagaaagcggtgggtccattcagacc

SEQ ID NO: 377452 - DNA, 30 bp, Artificial Sequence
  Synthetic oligonucleotide
gtattaaacacaccgcgatgttaagagacc

SEQ ID NO: 377453 - DNA, 30 bp, Artificial Sequence
  Synthetic oligonucleotide
agtattactacagtttatggaaacgagacc

SEQ ID NO: 377454 - DNA, 30 bp, Artificial Sequence
  Synthetic oligonucleotide
cacgcacgtagcgtgtaacaatacgagacc

SEQ ID NO: 377455 - DNA, 29 bp, Artificial Sequence
  Synthetic oligonucleotide
cacagctgcagaactttttgtgcgagacc

SEQ ID NO: 377456 - DNA, 30 bp, Artificial Sequence
  Synthetic oligonucleotide
aactagccgaccgcccccaaacgggagacc

SEQ ID NO: 377457 - DNA, 30 bp, Artificial Sequence
  Synthetic oligonucleotide
gatggaacttccgacaaattatctgagacc

SEQ ID NO: 377458 - DNA, 30 bp, Artificial Sequence
  Synthetic oligonucleotide
ggttatcttgaatgtgggagacaatagacc

SEQ ID NO: 377459 - DNA, 30 bp, Artificial Sequence
  Synthetic oligonucleotide
tacaaggcttcgaatctggatatctagacc

SEQ ID NO: 377460 - DNA, 30 bp, Artificial Sequence
  Synthetic oligonucleotide
gcaaacgttagggctcatagatcgtagacc

SEQ ID NO: 377461 - DNA, 30 bp, Artificial Sequence
  Synthetic oligonucleotide
gtaaaacccatgcatcctgccttgtagacc

SEQ ID NO: 377462 - DNA, 30 bp, Artificial Sequence
  Synthetic oligonucleotide
tcttagattagggaggagagtttaacgacc

SEQ ID NO: 377463 - DNA, 30 bp, Artificial Sequence
  Synthetic oligonucleotide
ttatgccctgcgagtgctcatctcacgacc

SEQ ID NO: 377464 - DNA, 30 bp, Artificial Sequence
  Synthetic oligonucleotide
agtccctggggttaacatgctgtcacgacc

SEQ ID NO: 377465 - DNA, 30 bp, Artificial Sequence
  Synthetic oligonucleotide
agagggctccgactagcaattgagacgacc

SEQ ID NO: 377466 - DNA, 30 bp, Artificial Sequence
  Synthetic oligonucleotide
tataagatttgacagattgtccggacgacc

SEQ ID NO: 377467 - DNA, 30 bp, Artificial Sequence
  Synthetic oligonucleotide
cccgcgatcgacaggggagtgcaaccgacc

SEQ ID NO: 377468 - DNA, 30 bp, Artificial Sequence
  Synthetic oligonucleotide
gtaggtattgcctcgtagactgtcccgacc

SEQ ID NO: 377469 - DNA, 30 bp, Artificial Sequence
  Synthetic oligonucleotide
acgagaatcaaggatcgcattgaagcgacc

SEQ ID NO: 377470 - DNA, 30 bp, Artificial Sequence
  Synthetic oligonucleotide
accctcgtagggaatcgtcaataagcgacc

SEQ ID NO: 377471 - DNA, 30 bp, Artificial Sequence
  Synthetic oligonucleotide
tatgtttaatcctacacgcagagcgcgacc

SEQ ID NO: 377472 - DNA, 30 bp, Artificial Sequence
  Synthetic oligonucleotide
tcaaacagccgaatctccaactgggcgacc

SEQ ID NO: 377473 - DNA, 30 bp, Artificial Sequence
  Synthetic oligonucleotide
agggactaaccttttttagactgggcgacc

SEQ ID NO: 377474 - DNA, 30 bp, Artificial Sequence
  Synthetic oligonucleotide
catggcatgacatctcgattgcatgcgacc

SEQ ID NO: 377475 - DNA, 30 bp, Artificial Sequence
  Synthetic oligonucleotide
ccgtacccgtacgccaaggtgctatcgacc

SEQ ID NO: 377476 - DNA, 30 bp, Artificial Sequence
  Synthetic oligonucleotide
gagaatagcgcggggggtcaaatctcgacc

SEQ ID NO: 377477 - DNA, 30 bp, Artificial Sequence
  Synthetic oligonucleotide
gatataatactagtgatggaaacgtcgacc

SEQ ID NO: 377478 - DNA, 30 bp, Artificial Sequence
  Synthetic oligonucleotide
tacaggagaagaaactggtataattcgacc

SEQ ID NO: 377479 - DNA, 30 bp, Artificial Sequence
  Synthetic oligonucleotide
atgtagacgtgggttgtacgcagttcgacc

SEQ ID NO: 377480 - DNA, 30 bp, Artificial Sequence
  Synthetic oligonucleotide
tatcgaggtgagaggcctgtttaaaggacc

SEQ ID NO: 377481 - DNA, 30 bp, Artificial Sequence
  Synthetic oligonucleotide
taatttatcagggtggccatcgcaaggacc

SEQ ID NO: 377482 - DNA, 30 bp, Artificial Sequence
  Synthetic oligonucleotide
gataggagaagccttaaggcaaacaggacc

SEQ ID NO: 377483 - DNA, 30 bp, Artificial Sequence
  Synthetic oligonucleotide
gaagtcacgtcgcttgagcaaggcaggacc

SEQ ID NO: 377484 - DNA, 30 bp, Artificial Sequence
  Synthetic oligonucleotide
gctgcatatctagtaccagctcttaggacc

SEQ ID NO: 377485 - DNA, 30 bp, Artificial Sequence
  Synthetic oligonucleotide
gaaaggtaatcattttatcataaacggacc

SEQ ID NO: 377486 - DNA, 30 bp, Artificial Sequence
  Synthetic oligonucleotide
tggcgacagttaccatctcagcgacggacc

SEQ ID NO: 377487 - DNA, 30 bp, Artificial Sequence
  Synthetic oligonucleotide
atttctaaataagctcgagggtgccggacc

SEQ ID NO: 377488 - DNA, 30 bp, Artificial Sequence
  Synthetic oligonucleotide
agcgtgggtatggttatgtgggagcggacc

SEQ ID NO: 377489 - DNA, 30 bp, Artificial Sequence
  Synthetic oligonucleotide
cggctccctctagtcggcaacgtgcggacc

SEQ ID NO: 377490 - DNA, 30 bp, Artificial Sequence
  Synthetic oligonucleotide
taaattgtcgatgtttctgaggttcggacc

SEQ ID NO: 377491 - DNA, 30 bp, Artificial Sequence
  Synthetic oligonucleotide
cttctcaaccgttgtgttaagaaagggacc

SEQ ID NO: 377492 - DNA, 30 bp, Artificial Sequence
  Synthetic oligonucleotide
tcagtaaatctgtgtggacgacacgggacc

SEQ ID NO: 377493 - DNA, 30 bp, Artificial Sequence
  Synthetic oligonucleotide
ttcttctggggaaagctcgcccgcgggacc

SEQ ID NO: 377494 - DNA, 30 bp, Artificial Sequence
  Synthetic oligonucleotide
tagcttgagaacagtatccagttggggacc

SEQ ID NO: 377495 - DNA, 30 bp, Artificial Sequence
  Synthetic oligonucleotide
agttggatacacttttcaggtagtgggacc

SEQ ID NO: 377496 - DNA, 30 bp, Artificial Sequence
  Synthetic oligonucleotide
ggtctaatcttggcgccctatggtgggacc

SEQ ID NO: 377497 - DNA, 30 bp, Artificial Sequence
  Synthetic oligonucleotide
gtaaacggattttgcgtaaggtgtgggacc

SEQ ID NO: 377498 - DNA, 30 bp, Artificial Sequence
  Synthetic oligonucleotide
gggcttcggctagaagggatggttgggacc

SEQ ID NO: 377499 - DNA, 30 bp, Artificial Sequence
  Synthetic oligonucleotide
ccgctcccataacatgtcactggatggacc

SEQ ID NO: 377500 - DNA, 30 bp, Artificial Sequence
  Synthetic oligonucleotide
ggggagattagtttaagctcactctggacc

SEQ ID NO: 377501 - DNA, 30 bp, Artificial Sequence
  Synthetic oligonucleotide
catcaggacagagtattaccggcgtggacc

SEQ ID NO: 377502 - DNA, 30 bp, Artificial Sequence
  Synthetic oligonucleotide
tgagcagttccctcttaagccgggtggacc

SEQ ID NO: 377503 - DNA, 30 bp, Artificial Sequence
  Synthetic oligonucleotide
attgagtagagccttgcctagtggtggacc

SEQ ID NO: 377504 - DNA, 30 bp, Artificial Sequence
  Synthetic oligonucleotide
agtgtatcgtgctgtgatttgacttggacc

SEQ ID NO: 377505 - DNA, 30 bp, Artificial Sequence
  Synthetic oligonucleotide
tcgatcaaccgtgccctgggacgttggacc

SEQ ID NO: 377506 - DNA, 30 bp, Artificial Sequence
  Synthetic oligonucleotide
aaaagattttgatatagactgtaaatgacc

SEQ ID NO: 377507 - DNA, 30 bp, Artificial Sequence
  Synthetic oligonucleotide
gagcagcagcgtgacgttgacctaatgacc

SEQ ID NO: 377508 - DNA, 30 bp, Artificial Sequence
  Synthetic oligonucleotide
atcaccgtaaggagatactttaacatgacc

SEQ ID NO: 377509 - DNA, 30 bp, Artificial Sequence
  Synthetic oligonucleotide
cgtgttctgattcccgattcccacatgacc

SEQ ID NO: 377510 - DNA, 30 bp, Artificial Sequence
  Synthetic oligonucleotide
cgagtgccgttgcaaaggcttacgatgacc

SEQ ID NO: 377511 - DNA, 30 bp, Artificial Sequence
  Synthetic oligonucleotide
gggagacatcagggcaagctctggatgacc

SEQ ID NO: 377512 - DNA, 30 bp, Artificial Sequence
  Synthetic oligonucleotide
tagcgaaaaagtgttagtactagtatgacc

SEQ ID NO: 377513 - DNA, 30 bp, Artificial Sequence
  Synthetic oligonucleotide
cacgggaagagtcaggtcaggattatgacc

SEQ ID NO: 377514 - DNA, 30 bp, Artificial Sequence
  Synthetic oligonucleotide
gggcggagtgtgggatcagtttttatgacc

SEQ ID NO: 377515 - DNA, 30 bp, Artificial Sequence
  Synthetic oligonucleotide
tggaatacatgtatgaacacccacctgacc

SEQ ID NO: 377516 - DNA, 30 bp, Artificial Sequence
  Synthetic oligonucleotide
aaacatgtgtctttgtctcgaaagctgacc

SEQ ID NO: 377517 - DNA, 30 bp, Artificial Sequence
  Synthetic oligonucleotide
aataccgggtggggctttgatgtgctgacc

SEQ ID NO: 377518 - DNA, 30 bp, Artificial Sequence
  Synthetic oligonucleotide
gtttgccagaaatgtgtctcctgtctgacc

SEQ ID NO: 377519 - DNA, 30 bp, Artificial Sequence
  Synthetic oligonucleotide
gatagattcacagctcgttgcgcagtgacc

SEQ ID NO: 377520 - DNA, 30 bp, Artificial Sequence
  Synthetic oligonucleotide
gtggcttttatatcgaacatgtcagtgacc

SEQ ID NO: 377521 - DNA, 30 bp, Artificial Sequence
  Synthetic oligonucleotide
gggttattagcttaatctctaagggtgacc

SEQ ID NO: 377522 - DNA, 30 bp, Artificial Sequence
  Synthetic oligonucleotide
tttgcgtggaattaaaccgtacgggtgacc

SEQ ID NO: 377523 - DNA, 30 bp, Artificial Sequence
  Synthetic oligonucleotide
ggttatttagggggtgagctcggggtgacc

SEQ ID NO: 377524 - DNA, 30 bp, Artificial Sequence
  Synthetic oligonucleotide
gtccaagtagtggggcgttggtgtgtgacc

SEQ ID NO: 377525 - DNA, 30 bp, Artificial Sequence
  Synthetic oligonucleotide
gctcttaaagcccggcgtcgatacttgacc

SEQ ID NO: 377526 - DNA, 30 bp, Artificial Sequence
  Synthetic oligonucleotide
tctctttgccgttcagtgctacagttgacc

SEQ ID NO: 377527 - DNA, 30 bp, Artificial Sequence
  Synthetic oligonucleotide
aggcgccggtagcgtaccgtcgatttgacc

SEQ ID NO: 377528 - DNA, 30 bp, Artificial Sequence
  Synthetic oligonucleotide
atcatcccgtaaggggtgacatatttgacc

SEQ ID NO: 377529 - DNA, 30 bp, Artificial Sequence
  Synthetic oligonucleotide
gccctaatgcgtgtgtcgataactttgacc

SEQ ID NO: 377530 - DNA, 30 bp, Artificial Sequence
  Synthetic oligonucleotide
gatcgcagcggaacgtaccatgctttgacc

SEQ ID NO: 377531 - DNA, 30 bp, Artificial Sequence
  Synthetic oligonucleotide
ttggtcaatcaatctgtgctccgtttgacc

SEQ ID NO: 377532 - DNA, 30 bp, Artificial Sequence
  Synthetic oligonucleotide
cacgtgctttcatatcgaagactgaatacc

SEQ ID NO: 377533 - DNA, 30 bp, Artificial Sequence
  Synthetic oligonucleotide
cccagaaccgaattgacagtttttaatacc

SEQ ID NO: 377534 - DNA, 30 bp, Artificial Sequence
  Synthetic oligonucleotide
tttaagaatgaggattcatttgcacatacc

SEQ ID NO: 377535 - DNA, 30 bp, Artificial Sequence
  Synthetic oligonucleotide
cttagttggacctagtaggacggccatacc

SEQ ID NO: 377536 - DNA, 30 bp, Artificial Sequence
  Synthetic oligonucleotide
ccgaaggtaatcaactacgattagcatacc

SEQ ID NO: 377537 - DNA, 30 bp, Artificial Sequence
  Synthetic oligonucleotide
gtatagccactggcagtatccacgcatacc

SEQ ID NO: 377538 - DNA, 30 bp, Artificial Sequence
  Synthetic oligonucleotide
tttcagggttcggaaagccggatgcatacc

SEQ ID NO: 377539 - DNA, 30 bp, Artificial Sequence
  Synthetic oligonucleotide
aaaagctgcgtatagaaggcgaatcatacc

SEQ ID NO: 377540 - DNA, 29 bp, Artificial Sequence
  Synthetic oligonucleotide
tcgtgacgcggtacaagattagtcatacc

SEQ ID NO: 377541 - DNA, 30 bp, Artificial Sequence
  Synthetic oligonucleotide
ctggaaatggctacgtcccccgttcatacc

SEQ ID NO: 377542 - DNA, 30 bp, Artificial Sequence
  Synthetic oligonucleotide
ttggccaggttagtgtttgaggttcatacc

SEQ ID NO: 377543 - DNA, 30 bp, Artificial Sequence
  Synthetic oligonucleotide
tccgctcggacagtcgagtggtcagatacc

SEQ ID NO: 377544 - DNA, 30 bp, Artificial Sequence
  Synthetic oligonucleotide
agatgatgttgaggccaggtttcagatacc

SEQ ID NO: 377545 - DNA, 30 bp, Artificial Sequence
  Synthetic oligonucleotide
gaggcaattcatgaggagtattgagatacc

SEQ ID NO: 377546 - DNA, 30 bp, Artificial Sequence
  Synthetic oligonucleotide
ccggatcaaaatcctgatcggtgggatacc

SEQ ID NO: 377547 - DNA, 30 bp, Artificial Sequence
  Synthetic oligonucleotide
tcctagtaggtatataggacgctggatacc

SEQ ID NO: 377548 - DNA, 30 bp, Artificial Sequence
  Synthetic oligonucleotide
aacctctccgagctcgtatctgatgatacc

SEQ ID NO: 377549 - DNA, 30 bp, Artificial Sequence
  Synthetic oligonucleotide
tccaaataaattcgacccattattgatacc

SEQ ID NO: 377550 - DNA, 30 bp, Artificial Sequence
  Synthetic oligonucleotide
tagaggtggcgttggccatttgttgatacc

SEQ ID NO: 377551 - DNA, 30 bp, Artificial Sequence
  Synthetic oligonucleotide
agaatgctggctagaattccagaatatacc

SEQ ID NO: 377552 - DNA, 30 bp, Artificial Sequence
  Synthetic oligonucleotide
ctggataatataattctatgcacatatacc

SEQ ID NO: 377553 - DNA, 30 bp, Artificial Sequence
  Synthetic oligonucleotide
cttccacagggcagccgatgtcactatacc

SEQ ID NO: 377554 - DNA, 30 bp, Artificial Sequence
  Synthetic oligonucleotide
ggcctgtcaggtgctcgaaaaccctatacc

SEQ ID NO: 377555 - DNA, 30 bp, Artificial Sequence
  Synthetic oligonucleotide
gtggcggcccaatgaccgtataagtatacc

SEQ ID NO: 377556 - DNA, 30 bp, Artificial Sequence
  Synthetic oligonucleotide
tgaggcgtccaggccaacccgcggtatacc

SEQ ID NO: 377557 - DNA, 30 bp, Artificial Sequence
  Synthetic oligonucleotide
ctataggcaacaagcaaagcatggtatacc

SEQ ID NO: 377558 - DNA, 30 bp, Artificial Sequence
  Synthetic oligonucleotide
cccctcacctccaagtcattaatgtatacc

SEQ ID NO: 377559 - DNA, 30 bp, Artificial Sequence
  Synthetic oligonucleotide
aagcgacgcacaattaatgatggttatacc

SEQ ID NO: 377560 - DNA, 30 bp, Artificial Sequence
  Synthetic oligonucleotide
gctccgaaccaggaaacggtattttatacc

SEQ ID NO: 377561 - DNA, 30 bp, Artificial Sequence
  Synthetic oligonucleotide
cccacacgtccgacatcatggggaactacc

SEQ ID NO: 377562 - DNA, 30 bp, Artificial Sequence
  Synthetic oligonucleotide
ctatgcacgtttgtcgggagaagcactacc

SEQ ID NO: 377563 - DNA, 30 bp, Artificial Sequence
  Synthetic oligonucleotide
atcatgaatagagtgcgcttcaaacctacc

SEQ ID NO: 377564 - DNA, 30 bp, Artificial Sequence
  Synthetic oligonucleotide
catgagtttacaacgtaagggccacctacc

SEQ ID NO: 377565 - DNA, 30 bp, Artificial Sequence
  Synthetic oligonucleotide
ctatttcacaagctggactacgcccctacc

SEQ ID NO: 377566 - DNA, 30 bp, Artificial Sequence
  Synthetic oligonucleotide
ctgtaacgtcaaaccatatccacgcctacc

SEQ ID NO: 377567 - DNA, 30 bp, Artificial Sequence
  Synthetic oligonucleotide
aagatggttgggggttgctgagggcctacc

SEQ ID NO: 377568 - DNA, 30 bp, Artificial Sequence
  Synthetic oligonucleotide
ttgtatattgtgcgtgtgttttctcctacc

SEQ ID NO: 377569 - DNA, 30 bp, Artificial Sequence
  Synthetic oligonucleotide
taggcaacaagctgcttgttctaagctacc

SEQ ID NO: 377570 - DNA, 30 bp, Artificial Sequence
  Synthetic oligonucleotide
gatttaaacaggatctttcggtgagctacc

SEQ ID NO: 377571 - DNA, 30 bp, Artificial Sequence
  Synthetic oligonucleotide
ggaatgattcctaaaatcctttgagctacc

SEQ ID NO: 377572 - DNA, 30 bp, Artificial Sequence
  Synthetic oligonucleotide
gcaatcgcacaaatcattacgttagctacc

SEQ ID NO: 377573 - DNA, 30 bp, Artificial Sequence
  Synthetic oligonucleotide
ctcgtaggtatcaaggtttggaacgctacc

SEQ ID NO: 377574 - DNA, 30 bp, Artificial Sequence
  Synthetic oligonucleotide
gtcacgcacctacgaaacgtctccgctacc

SEQ ID NO: 377575 - DNA, 30 bp, Artificial Sequence
  Synthetic oligonucleotide
tgcggcaaccgatggtcgccttccgctacc

SEQ ID NO: 377576 - DNA, 30 bp, Artificial Sequence
  Synthetic oligonucleotide
tttagacgctgatttactcgggtggctacc

SEQ ID NO: 377577 - DNA, 30 bp, Artificial Sequence
  Synthetic oligonucleotide
gggtctgcaatctcgattgaagttgctacc

SEQ ID NO: 377578 - DNA, 30 bp, Artificial Sequence
  Synthetic oligonucleotide
cgtcgcgaggtgtcgcaagcagttgctacc

SEQ ID NO: 377579 - DNA, 30 bp, Artificial Sequence
  Synthetic oligonucleotide
atacttaagtggataggcacgtgatctacc

SEQ ID NO: 377580 - DNA, 30 bp, Artificial Sequence
  Synthetic oligonucleotide
ctctgttatatggaggggggtccgtctacc

SEQ ID NO: 377581 - DNA, 30 bp, Artificial Sequence
  Synthetic oligonucleotide
atgcgggcggttgcgcagctccggtctacc

SEQ ID NO: 377582 - DNA, 30 bp, Artificial Sequence
  Synthetic oligonucleotide
agccactgacactttgtgtacgcttctacc

SEQ ID NO: 377583 - DNA, 30 bp, Artificial Sequence
  Synthetic oligonucleotide
tgtcgggcacgtgtggtacctacaagtacc

SEQ ID NO: 377584 - DNA, 30 bp, Artificial Sequence
  Synthetic oligonucleotide
gggccgcggcgataaaatcctgcaagtacc

SEQ ID NO: 377585 - DNA, 30 bp, Artificial Sequence
  Synthetic oligonucleotide
acccagataactcgagcttccaacagtacc

SEQ ID NO: 377586 - DNA, 29 bp, Artificial Sequence
  Synthetic oligonucleotide
aattccgggctggaagtttatgcagtacc

SEQ ID NO: 377587 - DNA, 30 bp, Artificial Sequence
  Synthetic oligonucleotide
gccagttataaccgttaattcactagtacc

SEQ ID NO: 377588 - DNA, 30 bp, Artificial Sequence
  Synthetic oligonucleotide
gggtcgtgactaaagggcggtgctagtacc

SEQ ID NO: 377589 - DNA, 30 bp, Artificial Sequence
  Synthetic oligonucleotide
ctggtgcttatcgaagttagaaaccgtacc

SEQ ID NO: 377590 - DNA, 30 bp, Artificial Sequence
  Synthetic oligonucleotide
ttggtagctaaaatgccatagggccgtacc

SEQ ID NO: 377591 - DNA, 30 bp, Artificial Sequence
  Synthetic oligonucleotide
tcgaggcatggcggttgcctcaagcgtacc

SEQ ID NO: 377592 - DNA, 30 bp, Artificial Sequence
  Synthetic oligonucleotide
gtcttatcctttggaatctcttagcgtacc

SEQ ID NO: 377593 - DNA, 30 bp, Artificial Sequence
  Synthetic oligonucleotide
aatattgaaaccagcgttttcacgcgtacc

SEQ ID NO: 377594 - DNA, 30 bp, Artificial Sequence
  Synthetic oligonucleotide
cagaacgtttaacataatactgaaggtacc

SEQ ID NO: 377595 - DNA, 30 bp, Artificial Sequence
  Synthetic oligonucleotide
tcccgttctagagggaaagccccaggtacc

SEQ ID NO: 377596 - DNA, 30 bp, Artificial Sequence
  Synthetic oligonucleotide
taccaatgaccggaggcggctgacggtacc

SEQ ID NO: 377597 - DNA, 30 bp, Artificial Sequence
  Synthetic oligonucleotide
cggtaaaaacgttccgattagagcggtacc

SEQ ID NO: 377598 - DNA, 30 bp, Artificial Sequence
  Synthetic oligonucleotide
atgtatacgcagtttgctatattcggtacc

SEQ ID NO: 377599 - DNA, 30 bp, Artificial Sequence
  Synthetic oligonucleotide
gactcgtccacgagaaatgtccagggtacc

SEQ ID NO: 377600 - DNA, 30 bp, Artificial Sequence
  Synthetic oligonucleotide
actaccagaaacataataccgcggggtacc

SEQ ID NO: 377601 - DNA, 30 bp, Artificial Sequence
  Synthetic oligonucleotide
cacgggtaattagacgtgctaatgggtacc

SEQ ID NO: 377602 - DNA, 30 bp, Artificial Sequence
  Synthetic oligonucleotide
atgcagatccgttccaggggtgttggtacc

SEQ ID NO: 377603 - DNA, 30 bp, Artificial Sequence
  Synthetic oligonucleotide
cggatacgccagctcctaaggatatgtacc

SEQ ID NO: 377604 - DNA, 30 bp, Artificial Sequence
  Synthetic oligonucleotide
tgtgtcctacgagcctgtaacatgtgtacc

SEQ ID NO: 377605 - DNA, 30 bp, Artificial Sequence
  Synthetic oligonucleotide
agaggggggccagggggacctttgtgtacc

SEQ ID NO: 377606 - DNA, 30 bp, Artificial Sequence
  Synthetic oligonucleotide
tcttgccggaggtccttcttaagcattacc

SEQ ID NO: 377607 - DNA, 30 bp, Artificial Sequence
  Synthetic oligonucleotide
gtgaatttctacttgacataatagattacc

SEQ ID NO: 377608 - DNA, 30 bp, Artificial Sequence
  Synthetic oligonucleotide
gtaactatatgatacctccccaggattacc

SEQ ID NO: 377609 - DNA, 30 bp, Artificial Sequence
  Synthetic oligonucleotide
tgcgtcaggcccagatgttgtgggattacc

SEQ ID NO: 377610 - DNA, 30 bp, Artificial Sequence
  Synthetic oligonucleotide
ctttacagaacctgtaatagtatgattacc

SEQ ID NO: 377611 - DNA, 30 bp, Artificial Sequence
  Synthetic oligonucleotide
gcctgcattaaggtcagacagggtattacc

SEQ ID NO: 377612 - DNA, 30 bp, Artificial Sequence
  Synthetic oligonucleotide
cccagaattgagggtgcaacggaccttacc

SEQ ID NO: 377613 - DNA, 30 bp, Artificial Sequence
  Synthetic oligonucleotide
gaccggggcttcaagaaactctcccttacc

SEQ ID NO: 377614 - DNA, 30 bp, Artificial Sequence
  Synthetic oligonucleotide
cagcaattaataaatcaccggggccttacc

SEQ ID NO: 377615 - DNA, 30 bp, Artificial Sequence
  Synthetic oligonucleotide
tcatctcacacctctttgacctgccttacc

SEQ ID NO: 377616 - DNA, 30 bp, Artificial Sequence
  Synthetic oligonucleotide
aaaagctcgggagtagcgagggagcttacc

SEQ ID NO: 377617 - DNA, 30 bp, Artificial Sequence
  Synthetic oligonucleotide
cccacccacgctgtagacaacgggcttacc

SEQ ID NO: 377618 - DNA, 30 bp, Artificial Sequence
  Synthetic oligonucleotide
gaattcgatgtgctggaacaactgcttacc

SEQ ID NO: 377619 - DNA, 30 bp, Artificial Sequence
  Synthetic oligonucleotide
cagccaatacgttgcttcgtgcttcttacc

SEQ ID NO: 377620 - DNA, 30 bp, Artificial Sequence
  Synthetic oligonucleotide
tcggctagcacacactcccgataagttacc

SEQ ID NO: 377621 - DNA, 30 bp, Artificial Sequence
  Synthetic oligonucleotide
gggtagctttctccaatcgtgaacgttacc

SEQ ID NO: 377622 - DNA, 30 bp, Artificial Sequence
  Synthetic oligonucleotide
ctaaaatcatggtgctccgcgcaggttacc

SEQ ID NO: 377623 - DNA, 30 bp, Artificial Sequence
  Synthetic oligonucleotide
cttaccttagcagttttagtaacggttacc

SEQ ID NO: 377624 - DNA, 30 bp, Artificial Sequence
  Synthetic oligonucleotide
actctgctgcaagcgtattcagcggttacc

SEQ ID NO: 377625 - DNA, 30 bp, Artificial Sequence
  Synthetic oligonucleotide
aatcggtccgatcaagaactcctggttacc

SEQ ID NO: 377626 - DNA, 30 bp, Artificial Sequence
  Synthetic oligonucleotide
gcggcaccgccaccatatgcgcgatttacc

SEQ ID NO: 377627 - DNA, 30 bp, Artificial Sequence
  Synthetic oligonucleotide
aggagtgctaatctagaaggctgatttacc

SEQ ID NO: 377628 - DNA, 30 bp, Artificial Sequence
  Synthetic oligonucleotide
gcattggcaaaagctactctaatatttacc

SEQ ID NO: 377629 - DNA, 30 bp, Artificial Sequence
  Synthetic oligonucleotide
gcgccctgacggaatattataatctttacc

SEQ ID NO: 377630 - DNA, 30 bp, Artificial Sequence
  Synthetic oligonucleotide
gtgagacgatttgtctaccagtggtttacc

SEQ ID NO: 377631 - DNA, 30 bp, Artificial Sequence
  Synthetic oligonucleotide
ggtaattaaaagtcatgtgccatgtttacc

SEQ ID NO: 377632 - DNA, 30 bp, Artificial Sequence
  Synthetic oligonucleotide
taccttcccatcgaccgttaacattttacc

SEQ ID NO: 377633 - DNA, 30 bp, Artificial Sequence
  Synthetic oligonucleotide
cgagggtctgaagggagctgtgattttacc

SEQ ID NO: 377634 - DNA, 30 bp, Artificial Sequence
  Synthetic oligonucleotide
taaacctgcgtatagttgccgggaaaaccc

SEQ ID NO: 377635 - DNA, 30 bp, Artificial Sequence
  Synthetic oligonucleotide
acattggtgatttgggttcccttcaaaccc

SEQ ID NO: 377636 - DNA, 30 bp, Artificial Sequence
  Synthetic oligonucleotide
cataacaggccaacgtcgctatagaaaccc

SEQ ID NO: 377637 - DNA, 30 bp, Artificial Sequence
  Synthetic oligonucleotide
gtgggtctaagccaacactggatgaaaccc

SEQ ID NO: 377638 - DNA, 30 bp, Artificial Sequence
  Synthetic oligonucleotide
gtttaagggtcgaaggtcatattgaaaccc

SEQ ID NO: 377639 - DNA, 30 bp, Artificial Sequence
  Synthetic oligonucleotide
cacgctgacgtctagggtctacgtaaaccc

SEQ ID NO: 377640 - DNA, 30 bp, Artificial Sequence
  Synthetic oligonucleotide
tttctgtggggcgcacctatgattaaaccc

SEQ ID NO: 377641 - DNA, 30 bp, Artificial Sequence
  Synthetic oligonucleotide
gcctttttatcttagcccaaaggacaaccc

SEQ ID NO: 377642 - DNA, 30 bp, Artificial Sequence
  Synthetic oligonucleotide
aaccagctatgcgggtggtattgacaaccc

SEQ ID NO: 377643 - DNA, 30 bp, Artificial Sequence
  Synthetic oligonucleotide
attagatcatcggcgcgtccattacaaccc

SEQ ID NO: 377644 - DNA, 30 bp, Artificial Sequence
  Synthetic oligonucleotide
taagggataaggtgcaactgggtccaaccc

SEQ ID NO: 377645 - DNA, 30 bp, Artificial Sequence
  Synthetic oligonucleotide
tgctgaggcacttaatcgattaagcaaccc

SEQ ID NO: 377646 - DNA, 30 bp, Artificial Sequence
  Synthetic oligonucleotide
accagctgataagcagggacacaagaaccc

SEQ ID NO: 377647 - DNA, 30 bp, Artificial Sequence
  Synthetic oligonucleotide
ggttgtgggtctgcgttttctccagaaccc

SEQ ID NO: 377648 - DNA, 30 bp, Artificial Sequence
  Synthetic oligonucleotide
acggcaacgcgtcgggttcctcccgaaccc

SEQ ID NO: 377649 - DNA, 30 bp, Artificial Sequence
  Synthetic oligonucleotide
ttcgttgtcgagcatggtaaacgcgaaccc

SEQ ID NO: 377650 - DNA, 30 bp, Artificial Sequence
  Synthetic oligonucleotide
ttcgttctgagaatcgatactatcgaaccc

SEQ ID NO: 377651 - DNA, 30 bp, Artificial Sequence
  Synthetic oligonucleotide
cccggcggtattgttctatcgtgggaaccc

SEQ ID NO: 377652 - DNA, 30 bp, Artificial Sequence
  Synthetic oligonucleotide
cttcctcccatcacctagtctgatgaaccc

SEQ ID NO: 377653 - DNA, 30 bp, Artificial Sequence
  Synthetic oligonucleotide
ctacttaagtgtggaccaaagggtgaaccc

SEQ ID NO: 377654 - DNA, 30 bp, Artificial Sequence
  Synthetic oligonucleotide
cagagtaagcgaccaaagtgggttgaaccc

SEQ ID NO: 377655 - DNA, 25 bp, Artificial Sequence
  Synthetic oligonucleotide
tggtaatcaagtcgtgaaataaccc

SEQ ID NO: 377656 - DNA, 30 bp, Artificial Sequence
  Synthetic oligonucleotide
aaggggtgtgcagtggcccttgcataaccc

SEQ ID NO: 377657 - DNA, 30 bp, Artificial Sequence
  Synthetic oligonucleotide
tgcaattatcaatatgtcccatcataaccc

SEQ ID NO: 377658 - DNA, 30 bp, Artificial Sequence
  Synthetic oligonucleotide
gtactcaagacgcaccggtagatataaccc

SEQ ID NO: 377659 - DNA, 30 bp, Artificial Sequence
  Synthetic oligonucleotide
tctctacacaaatcgtatgggtgctaaccc

SEQ ID NO: 377660 - DNA, 30 bp, Artificial Sequence
  Synthetic oligonucleotide
ctcttgtcagtttaaaaagatttctaaccc

SEQ ID NO: 377661 - DNA, 30 bp, Artificial Sequence
  Synthetic oligonucleotide
gccagggttgaagtggctacgcattaaccc

SEQ ID NO: 377662 - DNA, 30 bp, Artificial Sequence
  Synthetic oligonucleotide
gaagggttcgtaaccctattcggttaaccc

SEQ ID NO: 377663 - DNA, 30 bp, Artificial Sequence
  Synthetic oligonucleotide
gatccagccgtatccggattgtgttaaccc

SEQ ID NO: 377664 - DNA, 30 bp, Artificial Sequence
  Synthetic oligonucleotide
tgaattgtacgatcgagaggttaaacaccc

SEQ ID NO: 377665 - DNA, 30 bp, Artificial Sequence
  Synthetic oligonucleotide
gctcaatagctaggggcggtagccacaccc

SEQ ID NO: 377666 - DNA, 30 bp, Artificial Sequence
  Synthetic oligonucleotide
ggtcgctgttgggaacatttattcacaccc

SEQ ID NO: 377667 - DNA, 30 bp, Artificial Sequence
  Synthetic oligonucleotide
atctgtttcaaggtaaagaattagacaccc

SEQ ID NO: 377668 - DNA, 30 bp, Artificial Sequence
  Synthetic oligonucleotide
ctctaccggaagatgcttacagggacaccc

SEQ ID NO: 377669 - DNA, 30 bp, Artificial Sequence
  Synthetic oligonucleotide
ttaactcgtagtgctaggaggtctacaccc

SEQ ID NO: 377670 - DNA, 30 bp, Artificial Sequence
  Synthetic oligonucleotide
gggggtgaacctgctttagggagtacaccc

SEQ ID NO: 377671 - DNA, 30 bp, Artificial Sequence
  Synthetic oligonucleotide
atacatggcaatcatggcgtttaaccaccc

SEQ ID NO: 377672 - DNA, 26 bp, Artificial Sequence
  Synthetic oligonucleotide
accttagaggtctgagattaccaccc

SEQ ID NO: 377673 - DNA, 30 bp, Artificial Sequence
  Synthetic oligonucleotide
gctcgggtgctgcaaaccgcaccgccaccc

SEQ ID NO: 377674 - DNA, 30 bp, Artificial Sequence
  Synthetic oligonucleotide
tgactctagaccgttatgcggcttccaccc

SEQ ID NO: 377675 - DNA, 30 bp, Artificial Sequence
  Synthetic oligonucleotide
acgcggtaaagagcgtcttaaaacgcaccc

SEQ ID NO: 377676 - DNA, 30 bp, Artificial Sequence
  Synthetic oligonucleotide
gattcagctagcgcaggagttctcgcaccc

SEQ ID NO: 377677 - DNA, 30 bp, Artificial Sequence
  Synthetic oligonucleotide
aaccgacgtatggtttgatggccggcaccc

SEQ ID NO: 377678 - DNA, 30 bp, Artificial Sequence
  Synthetic oligonucleotide
cgggatatccaactgatgaccgatgcaccc

SEQ ID NO: 377679 - DNA, 30 bp, Artificial Sequence
  Synthetic oligonucleotide
aatataatcaaacctattagaggtgcaccc

SEQ ID NO: 377680 - DNA, 30 bp, Artificial Sequence
  Synthetic oligonucleotide
atggcgcaccggtcctaccggggtgcaccc

SEQ ID NO: 377681 - DNA, 30 bp, Artificial Sequence
  Synthetic oligonucleotide
atgacttcctcaatgtacggtggtgcaccc

SEQ ID NO: 377682 - DNA, 30 bp, Artificial Sequence
  Synthetic oligonucleotide
aactgtcgcgttatgtgtgtgtgtgcaccc

SEQ ID NO: 377683 - DNA, 30 bp, Artificial Sequence
  Synthetic oligonucleotide
ggacacttccacgtggagatgaagtcaccc

SEQ ID NO: 377684 - DNA, 30 bp, Artificial Sequence
  Synthetic oligonucleotide
cagagggtctcaggtctttttcggtcaccc

SEQ ID NO: 377685 - DNA, 30 bp, Artificial Sequence
  Synthetic oligonucleotide
ggacagcggtttggggggttctaaagaccc

SEQ ID NO: 377686 - DNA, 30 bp, Artificial Sequence
  Synthetic oligonucleotide
aatcgctggtctatacagcattcaagaccc

SEQ ID NO: 377687 - DNA, 30 bp, Artificial Sequence
  Synthetic oligonucleotide
aaggcagggtaggcttcctaatccagaccc

SEQ ID NO: 377688 - DNA, 30 bp, Artificial Sequence
  Synthetic oligonucleotide
tggcctaaattagatatctttgtcagaccc

SEQ ID NO: 377689 - DNA, 29 bp, Artificial Sequence
  Synthetic oligonucleotide
gtttgattacgagatgaattaagagaccc

SEQ ID NO: 377690 - DNA, 30 bp, Artificial Sequence
  Synthetic oligonucleotide
atgtagtaatagcaagatagatggagaccc

SEQ ID NO: 377691 - DNA, 30 bp, Artificial Sequence
  Synthetic oligonucleotide
cagattgtagcgggtatgttatttagaccc

SEQ ID NO: 377692 - DNA, 30 bp, Artificial Sequence
  Synthetic oligonucleotide
ctattcttgcatcgtaaatgaggacgaccc

SEQ ID NO: 377693 - DNA, 30 bp, Artificial Sequence
  Synthetic oligonucleotide
tattgctaaagtgctatgacgtgacgaccc

SEQ ID NO: 377694 - DNA, 30 bp, Artificial Sequence
  Synthetic oligonucleotide
aactgatcgttcctcatcaagatacgaccc

SEQ ID NO: 377695 - DNA, 30 bp, Artificial Sequence
  Synthetic oligonucleotide
cagtgttactattcttttaatgtacgaccc

SEQ ID NO: 377696 - DNA, 30 bp, Artificial Sequence
  Synthetic oligonucleotide
gaaccaccaagttcataaggtacgcgaccc

SEQ ID NO: 377697 - DNA, 30 bp, Artificial Sequence
  Synthetic oligonucleotide
aggaagggtaaagggacacccctgcgaccc

SEQ ID NO: 377698 - DNA, 30 bp, Artificial Sequence
  Synthetic oligonucleotide
cgggttgacaggcgacaatttgctcgaccc

SEQ ID NO: 377699 - DNA, 30 bp, Artificial Sequence
  Synthetic oligonucleotide
cctctaagaaggtctccctcaccaggaccc

SEQ ID NO: 377700 - DNA, 30 bp, Artificial Sequence
  Synthetic oligonucleotide
agtaactagtcgtagcgctatcgaggaccc

SEQ ID NO: 377701 - DNA, 30 bp, Artificial Sequence
  Synthetic oligonucleotide
ggatgaccccatggttgggcagtaggaccc

SEQ ID NO: 377702 - DNA, 30 bp, Artificial Sequence
  Synthetic oligonucleotide
cgggtcacgtactcgcatacttccggaccc

SEQ ID NO: 377703 - DNA, 30 bp, Artificial Sequence
  Synthetic oligonucleotide
attttagcgcggacctacaaactcggaccc

SEQ ID NO: 377704 - DNA, 29 bp, Artificial Sequence
  Synthetic oligonucleotide
tagactgatgatggctcggagtcggaccc

SEQ ID NO: 377705 - DNA, 30 bp, Artificial Sequence
  Synthetic oligonucleotide
aggggtggggataattgctccccgggaccc

SEQ ID NO: 377706 - DNA, 30 bp, Artificial Sequence
  Synthetic oligonucleotide
atagccatttcagggtcatcacgtggaccc

SEQ ID NO: 377707 - DNA, 30 bp, Artificial Sequence
  Synthetic oligonucleotide
atcactttaatgtggcactatcgtggaccc

SEQ ID NO: 377708 - DNA, 30 bp, Artificial Sequence
  Synthetic oligonucleotide
tatgttgtctaccagacgggagaatgaccc

SEQ ID NO: 377709 - DNA, 30 bp, Artificial Sequence
  Synthetic oligonucleotide
ccaagattttctgttaaaaaggtctgaccc

SEQ ID NO: 377710 - DNA, 30 bp, Artificial Sequence
  Synthetic oligonucleotide
cttgtaggaagcgtttggcaaaagtgaccc

SEQ ID NO: 377711 - DNA, 30 bp, Artificial Sequence
  Synthetic oligonucleotide
gtttgctgtactcagaccccgcagtgaccc

SEQ ID NO: 377712 - DNA, 30 bp, Artificial Sequence
  Synthetic oligonucleotide
cgattatagcccgagctgtgctcgtgaccc

SEQ ID NO: 377713 - DNA, 30 bp, Artificial Sequence
  Synthetic oligonucleotide
gttaactgtaatagttagagtttgtgaccc

SEQ ID NO: 377714 - DNA, 30 bp, Artificial Sequence
  Synthetic oligonucleotide
aataacggtcgcaaagttgtaatcataccc

SEQ ID NO: 377715 - DNA, 30 bp, Artificial Sequence
  Synthetic oligonucleotide
cgcaatgcagcttccaaatggtagataccc

SEQ ID NO: 377716 - DNA, 30 bp, Artificial Sequence
  Synthetic oligonucleotide
ctgccctttgttgttaagtgtgcgataccc

SEQ ID NO: 377717 - DNA, 30 bp, Artificial Sequence
  Synthetic oligonucleotide
gggcggcccgtgatcagacatatgataccc

SEQ ID NO: 377718 - DNA, 30 bp, Artificial Sequence
  Synthetic oligonucleotide
cgggaacactctttataacatgcactaccc

SEQ ID NO: 377719 - DNA, 30 bp, Artificial Sequence
  Synthetic oligonucleotide
aggaatgcccccaccacacggttcctaccc

SEQ ID NO: 377720 - DNA, 30 bp, Artificial Sequence
  Synthetic oligonucleotide
aaaccttactccgaatggaacgcgctaccc

SEQ ID NO: 377721 - DNA, 30 bp, Artificial Sequence
  Synthetic oligonucleotide
atatgtgccgggttatgtaaccttctaccc

SEQ ID NO: 377722 - DNA, 30 bp, Artificial Sequence
  Synthetic oligonucleotide
attacataatatgattgggggtcagtaccc

SEQ ID NO: 377723 - DNA, 30 bp, Artificial Sequence
  Synthetic oligonucleotide
aattggtgtagctatcgcgataacgtaccc

SEQ ID NO: 377724 - DNA, 30 bp, Artificial Sequence
  Synthetic oligonucleotide
acccatcaactagaacaaaaggccgtaccc

SEQ ID NO: 377725 - DNA, 30 bp, Artificial Sequence
  Synthetic oligonucleotide
gtggatccgtgaatcgctttatcggtaccc

SEQ ID NO: 377726 - DNA, 30 bp, Artificial Sequence
  Synthetic oligonucleotide
tagggtacggttgacgatttgtgggtaccc

SEQ ID NO: 377727 - DNA, 30 bp, Artificial Sequence
  Synthetic oligonucleotide
agtttattggaaaccggggattctgtaccc

SEQ ID NO: 377728 - DNA, 30 bp, Artificial Sequence
  Synthetic oligonucleotide
gaagacagctgaatcgttcaatagttaccc

SEQ ID NO: 377729 - DNA, 30 bp, Artificial Sequence
  Synthetic oligonucleotide
ttttgaccgtcgactccgaccaaaaacccc

SEQ ID NO: 377730 - DNA, 30 bp, Artificial Sequence
  Synthetic oligonucleotide
accggcatatctcagtgcagagaaaacccc

SEQ ID NO: 377731 - DNA, 30 bp, Artificial Sequence
  Synthetic oligonucleotide
gaatgtgtgagggctattaaatgcaacccc

SEQ ID NO: 377732 - DNA, 30 bp, Artificial Sequence
  Synthetic oligonucleotide
tcattaatacagtgcccactcacccacccc

SEQ ID NO: 377733 - DNA, 30 bp, Artificial Sequence
  Synthetic oligonucleotide
ggagaatgtgaccatgttaatgtccacccc

SEQ ID NO: 377734 - DNA, 30 bp, Artificial Sequence
  Synthetic oligonucleotide
ctatcaaccgtgttatcgccggcagacccc

SEQ ID NO: 377735 - DNA, 30 bp, Artificial Sequence
  Synthetic oligonucleotide
acagctggagccattggatcatgagacccc

SEQ ID NO: 377736 - DNA, 30 bp, Artificial Sequence
  Synthetic oligonucleotide
cctgggaagcagggttcactgcatgacccc

SEQ ID NO: 377737 - DNA, 30 bp, Artificial Sequence
  Synthetic oligonucleotide
gtcagagagaatattccattcatatacccc

SEQ ID NO: 377738 - DNA, 30 bp, Artificial Sequence
  Synthetic oligonucleotide
tagccacttttggccatccgccgctacccc

SEQ ID NO: 377739 - DNA, 30 bp, Artificial Sequence
  Synthetic oligonucleotide
cggtttgtggatgcggtctttgaacccccc

SEQ ID NO: 377740 - DNA, 30 bp, Artificial Sequence
  Synthetic oligonucleotide
agtaggacatttccggcgtttacgcccccc

SEQ ID NO: 377741 - DNA, 30 bp, Artificial Sequence
  Synthetic oligonucleotide
aaaactaggcaatctactttactcgccccc

SEQ ID NO: 377742 - DNA, 30 bp, Artificial Sequence
  Synthetic oligonucleotide
gtctggggctaccaataggaatcggccccc

SEQ ID NO: 377743 - DNA, 30 bp, Artificial Sequence
  Synthetic oligonucleotide
gcaataccaatgttcgttaactcggccccc

SEQ ID NO: 377744 - DNA, 30 bp, Artificial Sequence
  Synthetic oligonucleotide
gccctagcggtggggtaagacaagtccccc

SEQ ID NO: 377745 - DNA, 30 bp, Artificial Sequence
  Synthetic oligonucleotide
gtttcggccaactttcttggggatagcccc

SEQ ID NO: 377746 - DNA, 30 bp, Artificial Sequence
  Synthetic oligonucleotide
cagccgcaatatgagctagatgctagcccc

SEQ ID NO: 377747 - DNA, 30 bp, Artificial Sequence
  Synthetic oligonucleotide
agaggagtgctctcaactttagttagcccc

SEQ ID NO: 377748 - DNA, 30 bp, Artificial Sequence
  Synthetic oligonucleotide
gtaagtagcgcgccaccagacgcccgcccc

SEQ ID NO: 377749 - DNA, 30 bp, Artificial Sequence
  Synthetic oligonucleotide
aagggtctaatatgtgggcattgccgcccc

SEQ ID NO: 377750 - DNA, 30 bp, Artificial Sequence
  Synthetic oligonucleotide
ccaatgtcgggcaggaaggaagtccgcccc

SEQ ID NO: 377751 - DNA, 30 bp, Artificial Sequence
  Synthetic oligonucleotide
ggaattccggcaggtctcgttgagcgcccc

SEQ ID NO: 377752 - DNA, 30 bp, Artificial Sequence
  Synthetic oligonucleotide
cggcgacagatataggggtcttcgcgcccc

SEQ ID NO: 377753 - DNA, 30 bp, Artificial Sequence
  Synthetic oligonucleotide
gaaacataaatgtttgtcggatgtcgcccc

SEQ ID NO: 377754 - DNA, 30 bp, Artificial Sequence
  Synthetic oligonucleotide
acttcagggggatactggtcgtaaggcccc

SEQ ID NO: 377755 - DNA, 30 bp, Artificial Sequence
  Synthetic oligonucleotide
aatgcttccaacatctctcggttaggcccc

SEQ ID NO: 377756 - DNA, 30 bp, Artificial Sequence
  Synthetic oligonucleotide
ataaggtttggtccgtatggggccggcccc

SEQ ID NO: 377757 - DNA, 30 bp, Artificial Sequence
  Synthetic oligonucleotide
gattatgtaacgcgtatcccaggcggcccc

SEQ ID NO: 377758 - DNA, 30 bp, Artificial Sequence
  Synthetic oligonucleotide
ctatcgccaggcttccgtgaagtcggcccc

SEQ ID NO: 377759 - DNA, 30 bp, Artificial Sequence
  Synthetic oligonucleotide
attcgagacgacttagctttatggggcccc

SEQ ID NO: 377760 - DNA, 30 bp, Artificial Sequence
  Synthetic oligonucleotide
ccttctgaacggtttttgaacgtgtgcccc

SEQ ID NO: 377761 - DNA, 30 bp, Artificial Sequence
  Synthetic oligonucleotide
gtggatgagaaggataactattaaatcccc

SEQ ID NO: 377762 - DNA, 30 bp, Artificial Sequence
  Synthetic oligonucleotide
cgtatatgttaacgaactcggtcaatcccc

SEQ ID NO: 377763 - DNA, 30 bp, Artificial Sequence
  Synthetic oligonucleotide
catccctctccctcgtaaatgcacatcccc

SEQ ID NO: 377764 - DNA, 30 bp, Artificial Sequence
  Synthetic oligonucleotide
gttatacaatatcaaagaattcccatcccc

SEQ ID NO: 377765 - DNA, 30 bp, Artificial Sequence
  Synthetic oligonucleotide
gtaactccatttggaaaggtctttatcccc

SEQ ID NO: 377766 - DNA, 30 bp, Artificial Sequence
  Synthetic oligonucleotide
agtgaaggtactcacagaacactagtcccc

SEQ ID NO: 377767 - DNA, 30 bp, Artificial Sequence
  Synthetic oligonucleotide
gcgcttaatacacttactaaaacggtcccc

SEQ ID NO: 377768 - DNA, 30 bp, Artificial Sequence
  Synthetic oligonucleotide
tgaatgtatcggcgtaacgggtcggtcccc

SEQ ID NO: 377769 - DNA, 30 bp, Artificial Sequence
  Synthetic oligonucleotide
ataggacgttataatgttaatctggtcccc

SEQ ID NO: 377770 - DNA, 30 bp, Artificial Sequence
  Synthetic oligonucleotide
aagaagggccattttatatagaccttcccc

SEQ ID NO: 377771 - DNA, 30 bp, Artificial Sequence
  Synthetic oligonucleotide
ataccgctagctttcagcctgtaaaagccc

SEQ ID NO: 377772 - DNA, 30 bp, Artificial Sequence
  Synthetic oligonucleotide
cgggaggcagctgttaccattagaaagccc

SEQ ID NO: 377773 - DNA, 30 bp, Artificial Sequence
  Synthetic oligonucleotide
ttggcagactcgtggggtcgcgtcaagccc

SEQ ID NO: 377774 - DNA, 30 bp, Artificial Sequence
  Synthetic oligonucleotide
aagtcgaggagagaacatgtgtataagccc

SEQ ID NO: 377775 - DNA, 30 bp, Artificial Sequence
  Synthetic oligonucleotide
atcctgttgttagactgcttttctaagccc

SEQ ID NO: 377776 - DNA, 30 bp, Artificial Sequence
  Synthetic oligonucleotide
tcgcagtggagttgcttactcgttaagccc

SEQ ID NO: 377777 - DNA, 30 bp, Artificial Sequence
  Synthetic oligonucleotide
agaagcctttcttagtaccgagggcagccc

SEQ ID NO: 377778 - DNA, 30 bp, Artificial Sequence
  Synthetic oligonucleotide
agtgattccaatattggagctaatcagccc

SEQ ID NO: 377779 - DNA, 30 bp, Artificial Sequence
  Synthetic oligonucleotide
gctttagtagggcttctttccgctcagccc

SEQ ID NO: 377780 - DNA, 30 bp, Artificial Sequence
  Synthetic oligonucleotide
agtaggtttcaatcaggctgatgagagccc

SEQ ID NO: 377781 - DNA, 30 bp, Artificial Sequence
  Synthetic oligonucleotide
tggtaaatgttgcctgtactgtgagagccc

SEQ ID NO: 377782 - DNA, 30 bp, Artificial Sequence
  Synthetic oligonucleotide
attacgtttcgtcttggttcaaaggagccc

SEQ ID NO: 377783 - DNA, 30 bp, Artificial Sequence
  Synthetic oligonucleotide
ccggttccgatcggttgcgggacggagccc

SEQ ID NO: 377784 - DNA, 30 bp, Artificial Sequence
  Synthetic oligonucleotide
gtgctggttagtactttaagcgcggagccc

SEQ ID NO: 377785 - DNA, 30 bp, Artificial Sequence
  Synthetic oligonucleotide
tccagcttcgcaccgagtcaattggagccc

SEQ ID NO: 377786 - DNA, 30 bp, Artificial Sequence
  Synthetic oligonucleotide
caatgataattatgagctgcgactgagccc

SEQ ID NO: 377787 - DNA, 30 bp, Artificial Sequence
  Synthetic oligonucleotide
gcaatcagtgaacgtgggccacgtgagccc

SEQ ID NO: 377788 - DNA, 30 bp, Artificial Sequence
  Synthetic oligonucleotide
aaagtataagggttcagatgggcatagccc

SEQ ID NO: 377789 - DNA, 30 bp, Artificial Sequence
  Synthetic oligonucleotide
gtgggaggtgatatccagcccgtatagccc

SEQ ID NO: 377790 - DNA, 30 bp, Artificial Sequence
  Synthetic oligonucleotide
gacatggccctcggagcgaataactagccc

SEQ ID NO: 377791 - DNA, 30 bp, Artificial Sequence
  Synthetic oligonucleotide
cgtttgctgggatataggtatggctagccc

SEQ ID NO: 377792 - DNA, 30 bp, Artificial Sequence
  Synthetic oligonucleotide
ctcaaggtgggtgtccatgtatagtagccc

SEQ ID NO: 377793 - DNA, 30 bp, Artificial Sequence
  Synthetic oligonucleotide
atgccgtatgcaagctgacgggggtagccc

SEQ ID NO: 377794 - DNA, 30 bp, Artificial Sequence
  Synthetic oligonucleotide
gacccaattcatgcgaaacacggttagccc

SEQ ID NO: 377795 - DNA, 30 bp, Artificial Sequence
  Synthetic oligonucleotide
aaggaacatgcaatgtgcgtgaaaacgccc

SEQ ID NO: 377796 - DNA, 30 bp, Artificial Sequence
  Synthetic oligonucleotide
aagtcatagttatactttggccccacgccc

SEQ ID NO: 377797 - DNA, 30 bp, Artificial Sequence
  Synthetic oligonucleotide
tcccaatgggtcccaaggtcagagacgccc

SEQ ID NO: 377798 - DNA, 30 bp, Artificial Sequence
  Synthetic oligonucleotide
gtccacagcgggatcgcgtgctcgacgccc

SEQ ID NO: 377799 - DNA, 30 bp, Artificial Sequence
  Synthetic oligonucleotide
ccaatattttggatgcgatacgatacgccc

SEQ ID NO: 377800 - DNA, 31 bp, Artificial Sequence
  Synthetic oligonucleotide
atttgggtgcaggacttgtctgtggccgccc

SEQ ID NO: 377801 - DNA, 30 bp, Artificial Sequence
  Synthetic oligonucleotide
cctctcgcctcttacaccgtttctccgccc

SEQ ID NO: 377802 - DNA, 30 bp, Artificial Sequence
  Synthetic oligonucleotide
gttgcaagaacaagtcgctgaggtccgccc

SEQ ID NO: 377803 - DNA, 30 bp, Artificial Sequence
  Synthetic oligonucleotide
aatcatcgtgcggaaagtcagtctgcgccc

SEQ ID NO: 377804 - DNA, 30 bp, Artificial Sequence
  Synthetic oligonucleotide
ttatgatgtctatcctacaggattgcgccc

SEQ ID NO: 377805 - DNA, 30 bp, Artificial Sequence
  Synthetic oligonucleotide
gccctataggtggaataatagcttgcgccc

SEQ ID NO: 377806 - DNA, 30 bp, Artificial Sequence
  Synthetic oligonucleotide
gactcgatagtaacacgaaaaccctcgccc

SEQ ID NO: 377807 - DNA, 30 bp, Artificial Sequence
  Synthetic oligonucleotide
gcgggttccccgtgtgccactagttcgccc

SEQ ID NO: 377808 - DNA, 30 bp, Artificial Sequence
  Synthetic oligonucleotide
gacgtaccgaggcggtttctctacaggccc

SEQ ID NO: 377809 - DNA, 30 bp, Artificial Sequence
  Synthetic oligonucleotide
atactcggagacgcgtaatcaatcaggccc

SEQ ID NO: 377810 - DNA, 30 bp, Artificial Sequence
  Synthetic oligonucleotide
attgattcctttggtagaagagataggccc

SEQ ID NO: 377811 - DNA, 30 bp, Artificial Sequence
  Synthetic oligonucleotide
acaaagtctaggtgaggtgtttataggccc

SEQ ID NO: 377812 - DNA, 30 bp, Artificial Sequence
  Synthetic oligonucleotide
gcatatgtcatgttactcgtacttaggccc

SEQ ID NO: 377813 - DNA, 30 bp, Artificial Sequence
  Synthetic oligonucleotide
aatggtgactggatcagccggcttaggccc

SEQ ID NO: 377814 - DNA, 30 bp, Artificial Sequence
  Synthetic oligonucleotide
acttcctgagtacacatagtgtttaggccc

SEQ ID NO: 377815 - DNA, 30 bp, Artificial Sequence
  Synthetic oligonucleotide
acactcagaatcgtttgcaacaaacggccc

SEQ ID NO: 377816 - DNA, 30 bp, Artificial Sequence
  Synthetic oligonucleotide
cgaacttttgcaagccttgtgttacggccc

SEQ ID NO: 377817 - DNA, 30 bp, Artificial Sequence
  Synthetic oligonucleotide
accggatccatctactaccaactggggccc

SEQ ID NO: 377818 - DNA, 30 bp, Artificial Sequence
  Synthetic oligonucleotide
ctcaatatacggtttagacgagatgggccc

SEQ ID NO: 377819 - DNA, 30 bp, Artificial Sequence
  Synthetic oligonucleotide
gatgaaactgttgatggtatcagtgggccc

SEQ ID NO: 377820 - DNA, 30 bp, Artificial Sequence
  Synthetic oligonucleotide
cacctgacgttcgtgggccacacatggccc

SEQ ID NO: 377821 - DNA, 30 bp, Artificial Sequence
  Synthetic oligonucleotide
cgaatctcctatttaggtatcgcatggccc

SEQ ID NO: 377822 - DNA, 30 bp, Artificial Sequence
  Synthetic oligonucleotide
gaccagacagttaagacataatcatggccc

SEQ ID NO: 377823 - DNA, 30 bp, Artificial Sequence
  Synthetic oligonucleotide
aatgaaagagccaatggtttcgtctggccc

SEQ ID NO: 377824 - DNA, 30 bp, Artificial Sequence
  Synthetic oligonucleotide
ctgcaccgttcgattgacgagaagtggccc

SEQ ID NO: 377825 - DNA, 30 bp, Artificial Sequence
  Synthetic oligonucleotide
gtatttcaaggaaaaaatattgcttggccc

SEQ ID NO: 377826 - DNA, 30 bp, Artificial Sequence
  Synthetic oligonucleotide
gctcattacgtcatactctagcaaatgccc

SEQ ID NO: 377827 - DNA, 30 bp, Artificial Sequence
  Synthetic oligonucleotide
actctagcccgcaaatccccatcaatgccc

SEQ ID NO: 377828 - DNA, 30 bp, Artificial Sequence
  Synthetic oligonucleotide
ccttaggttttatacatgctggttatgccc

SEQ ID NO: 377829 - DNA, 30 bp, Artificial Sequence
  Synthetic oligonucleotide
tacatattctatctacactaaaaactgccc

SEQ ID NO: 377830 - DNA, 30 bp, Artificial Sequence
  Synthetic oligonucleotide
gggccgtttctccacggcgctttactgccc

SEQ ID NO: 377831 - DNA, 30 bp, Artificial Sequence
  Synthetic oligonucleotide
taggtgattgatgcaatcagctagctgccc

SEQ ID NO: 377832 - DNA, 30 bp, Artificial Sequence
  Synthetic oligonucleotide
ctaccgaggcaagtgttagatacgctgccc

SEQ ID NO: 377833 - DNA, 30 bp, Artificial Sequence
  Synthetic oligonucleotide
attcacccttagttaggagtcaggctgccc

SEQ ID NO: 377834 - DNA, 30 bp, Artificial Sequence
  Synthetic oligonucleotide
gcataaccgcttcattataacgttctgccc

SEQ ID NO: 377835 - DNA, 30 bp, Artificial Sequence
  Synthetic oligonucleotide
agactaaatttcgaatagcgcacagtgccc

SEQ ID NO: 377836 - DNA, 30 bp, Artificial Sequence
  Synthetic oligonucleotide
aagagtcacacaagcggactgtaggtgccc

SEQ ID NO: 377837 - DNA, 30 bp, Artificial Sequence
  Synthetic oligonucleotide
aatgtatcaggccggctaatgggggtgccc

SEQ ID NO: 377838 - DNA, 30 bp, Artificial Sequence
  Synthetic oligonucleotide
cacaaacctttgacggttggactggtgccc

SEQ ID NO: 377839 - DNA, 30 bp, Artificial Sequence
  Synthetic oligonucleotide
acttactccggtcctcgcgcattggtgccc

SEQ ID NO: 377840 - DNA, 30 bp, Artificial Sequence
  Synthetic oligonucleotide
ttcgacagccgacagacgccggatgtgccc

SEQ ID NO: 377841 - DNA, 30 bp, Artificial Sequence
  Synthetic oligonucleotide
gctatgtgaaacggagtcgaacgattgccc

SEQ ID NO: 377842 - DNA, 30 bp, Artificial Sequence
  Synthetic oligonucleotide
gtaggactgattttacgttgagacttgccc

SEQ ID NO: 377843 - DNA, 30 bp, Artificial Sequence
  Synthetic oligonucleotide
atatagcagtgaaacccccctgctttgccc

SEQ ID NO: 377844 - DNA, 30 bp, Artificial Sequence
  Synthetic oligonucleotide
gggggacttttgaggcccggccgtttgccc

SEQ ID NO: 377845 - DNA, 30 bp, Artificial Sequence
  Synthetic oligonucleotide
gttaatagtagaaagtaggtgcgaaatccc

SEQ ID NO: 377846 - DNA, 30 bp, Artificial Sequence
  Synthetic oligonucleotide
atgatgcacacgccgttctgcaggaatccc

SEQ ID NO: 377847 - DNA, 30 bp, Artificial Sequence
  Synthetic oligonucleotide
tatatgcaatcgacggagtgcttgaatccc

SEQ ID NO: 377848 - DNA, 30 bp, Artificial Sequence
  Synthetic oligonucleotide
aataaaccatttttagtgacgactaatccc

SEQ ID NO: 377849 - DNA, 30 bp, Artificial Sequence
  Synthetic oligonucleotide
ttggatgcgtgagatcacctgccacatccc

SEQ ID NO: 377850 - DNA, 30 bp, Artificial Sequence
  Synthetic oligonucleotide
gctaggccgcgtattgaggtcttccatccc

SEQ ID NO: 377851 - DNA, 30 bp, Artificial Sequence
  Synthetic oligonucleotide
atcgggattgtattatctcaagcagatccc

SEQ ID NO: 377852 - DNA, 30 bp, Artificial Sequence
  Synthetic oligonucleotide
agcaccctcccagcatgcccggtagatccc

SEQ ID NO: 377853 - DNA, 30 bp, Artificial Sequence
  Synthetic oligonucleotide
tggcgatctatggggcctcaggccgatccc

SEQ ID NO: 377854 - DNA, 30 bp, Artificial Sequence
  Synthetic oligonucleotide
gacccaggttatgatacgaagggtgatccc

SEQ ID NO: 377855 - DNA, 30 bp, Artificial Sequence
  Synthetic oligonucleotide
ctggcttcccaaattgacggtacatatccc

SEQ ID NO: 377856 - DNA, 30 bp, Artificial Sequence
  Synthetic oligonucleotide
cctgttcttcggacgggtttcgtatatccc

SEQ ID NO: 377857 - DNA, 30 bp, Artificial Sequence
  Synthetic oligonucleotide
ctggtcactatacggggtgtgttatatccc

SEQ ID NO: 377858 - DNA, 30 bp, Artificial Sequence
  Synthetic oligonucleotide
ttggcaagttcactatttgtgatctatccc

SEQ ID NO: 377859 - DNA, 30 bp, Artificial Sequence
  Synthetic oligonucleotide
agacaggggtgttatttcgtagtctatccc

SEQ ID NO: 377860 - DNA, 30 bp, Artificial Sequence
  Synthetic oligonucleotide
gaattacggggatcgaggcaagagtatccc

SEQ ID NO: 377861 - DNA, 30 bp, Artificial Sequence
  Synthetic oligonucleotide
tacagagtacctaaaaatccgccgtatccc

SEQ ID NO: 377862 - DNA, 30 bp, Artificial Sequence
  Synthetic oligonucleotide
tgattgaaggaaagatcaacttcgtatccc

SEQ ID NO: 377863 - DNA, 30 bp, Artificial Sequence
  Synthetic oligonucleotide
gaagacattaaaaccttgtgacggtatccc

SEQ ID NO: 377864 - DNA, 30 bp, Artificial Sequence
  Synthetic oligonucleotide
ttaaagcatacaatcacgcgagggtatccc

SEQ ID NO: 377865 - DNA, 30 bp, Artificial Sequence
  Synthetic oligonucleotide
aggatgaatatcgctggagccgtttatccc

SEQ ID NO: 377866 - DNA, 30 bp, Artificial Sequence
  Synthetic oligonucleotide
atgccagttagtgatgatcgcgtttatccc

SEQ ID NO: 377867 - DNA, 30 bp, Artificial Sequence
  Synthetic oligonucleotide
ggttctcgccaacctattggcaggactccc

SEQ ID NO: 377868 - DNA, 30 bp, Artificial Sequence
  Synthetic oligonucleotide
cggcaggtgttttaaatgagagatactccc

SEQ ID NO: 377869 - DNA, 30 bp, Artificial Sequence
  Synthetic oligonucleotide
aggcagccggttccgtctgcaacacctccc

SEQ ID NO: 377870 - DNA, 30 bp, Artificial Sequence
  Synthetic oligonucleotide
ctttccgcaaggaagcgcgtcagccctccc

SEQ ID NO: 377871 - DNA, 30 bp, Artificial Sequence
  Synthetic oligonucleotide
ggcaagacgccgccattagccgagcctccc

SEQ ID NO: 377872 - DNA, 30 bp, Artificial Sequence
  Synthetic oligonucleotide
aggaatgtactgcaaattcaatagcctccc

SEQ ID NO: 377873 - DNA, 30 bp, Artificial Sequence
  Synthetic oligonucleotide
gtatacggatggttgaggcattggcctccc

SEQ ID NO: 377874 - DNA, 30 bp, Artificial Sequence
  Synthetic oligonucleotide
agtcgggggcacgtcggacttatggctccc

SEQ ID NO: 377875 - DNA, 30 bp, Artificial Sequence
  Synthetic oligonucleotide
cggtgtttgcgctatcaactttggtctccc

SEQ ID NO: 377876 - DNA, 30 bp, Artificial Sequence
  Synthetic oligonucleotide
atcgtctttcgtctcttctggctttctccc

SEQ ID NO: 377877 - DNA, 30 bp, Artificial Sequence
  Synthetic oligonucleotide
ctcaagagatttgttgtagttaaaagtccc

SEQ ID NO: 377878 - DNA, 30 bp, Artificial Sequence
  Synthetic oligonucleotide
tacacagcattccgggataatgaaagtccc

SEQ ID NO: 377879 - DNA, 30 bp, Artificial Sequence
  Synthetic oligonucleotide
cgcattgcctcagggattctcaacagtccc

SEQ ID NO: 377880 - DNA, 30 bp, Artificial Sequence
  Synthetic oligonucleotide
ggaatcccatccacttggagcgccagtccc

SEQ ID NO: 377881 - DNA, 30 bp, Artificial Sequence
  Synthetic oligonucleotide
tgggttaaggcggggttcctttagagtccc

SEQ ID NO: 377882 - DNA, 30 bp, Artificial Sequence
  Synthetic oligonucleotide
cctacgtgggtaccgcacgtggaacgtccc

SEQ ID NO: 377883 - DNA, 30 bp, Artificial Sequence
  Synthetic oligonucleotide
caaaggagggtagggcccccgcgccgtccc

SEQ ID NO: 377884 - DNA, 30 bp, Artificial Sequence
  Synthetic oligonucleotide
ggactcatattttatcatatggtaggtccc

SEQ ID NO: 377885 - DNA, 30 bp, Artificial Sequence
  Synthetic oligonucleotide
agtggggagataaccgtatcttacggtccc

SEQ ID NO: 377886 - DNA, 30 bp, Artificial Sequence
  Synthetic oligonucleotide
gccctcaaaggtactgcccaactcggtccc

SEQ ID NO: 377887 - DNA, 30 bp, Artificial Sequence
  Synthetic oligonucleotide
tttagtatgtgtgatcgtcttccgggtccc

SEQ ID NO: 377888 - DNA, 30 bp, Artificial Sequence
  Synthetic oligonucleotide
cgtatgtcgtggtaccaaataatgggtccc

SEQ ID NO: 377889 - DNA, 30 bp, Artificial Sequence
  Synthetic oligonucleotide
gccttggccaacccactaacggctggtccc

SEQ ID NO: 377890 - DNA, 30 bp, Artificial Sequence
  Synthetic oligonucleotide
atacgtacttaggtcgcggggagtggtccc

SEQ ID NO: 377891 - DNA, 30 bp, Artificial Sequence
  Synthetic oligonucleotide
gcatgggcaataacggaagttattggtccc

SEQ ID NO: 377892 - DNA, 30 bp, Artificial Sequence
  Synthetic oligonucleotide
cgtaaagcccatggggctcatgttggtccc

SEQ ID NO: 377893 - DNA, 30 bp, Artificial Sequence
  Synthetic oligonucleotide
gactgctaagacgtccggaatgactgtccc

SEQ ID NO: 377894 - DNA, 30 bp, Artificial Sequence
  Synthetic oligonucleotide
aatcaaggagcaagatcaagctgctgtccc

SEQ ID NO: 377895 - DNA, 30 bp, Artificial Sequence
  Synthetic oligonucleotide
tacaagtttcaggctttattgttttgtccc

SEQ ID NO: 377896 - DNA, 30 bp, Artificial Sequence
  Synthetic oligonucleotide
tagcatgttccctctaggtggaaaattccc

SEQ ID NO: 377897 - DNA, 30 bp, Artificial Sequence
  Synthetic oligonucleotide
agcacgtcctttgagttgggatcaattccc

SEQ ID NO: 377898 - DNA, 30 bp, Artificial Sequence
  Synthetic oligonucleotide
cacagttacttccatttccattgaattccc

SEQ ID NO: 377899 - DNA, 30 bp, Artificial Sequence
  Synthetic oligonucleotide
gagacggaggaggttcctaaagtaattccc

SEQ ID NO: 377900 - DNA, 30 bp, Artificial Sequence
  Synthetic oligonucleotide
taataaagttggaatatctttcccattccc

SEQ ID NO: 377901 - DNA, 30 bp, Artificial Sequence
  Synthetic oligonucleotide
ggaccaacctatgcctcctctggcattccc

SEQ ID NO: 377902 - DNA, 30 bp, Artificial Sequence
  Synthetic oligonucleotide
ctggaaggactagctctattggtcattccc

SEQ ID NO: 377903 - DNA, 30 bp, Artificial Sequence
  Synthetic oligonucleotide
tggacacagcggtacggcatatgtattccc

SEQ ID NO: 377904 - DNA, 30 bp, Artificial Sequence
  Synthetic oligonucleotide
tatgatggtatgcatcataataaacttccc

SEQ ID NO: 377905 - DNA, 30 bp, Artificial Sequence
  Synthetic oligonucleotide
ccattcagtctactattctacgaacttccc

SEQ ID NO: 377906 - DNA, 30 bp, Artificial Sequence
  Synthetic oligonucleotide
cctctgcttatcgcccccataatccttccc

SEQ ID NO: 377907 - DNA, 30 bp, Artificial Sequence
  Synthetic oligonucleotide
cggggaaaagcgtttgtttacacgcttccc

SEQ ID NO: 377908 - DNA, 30 bp, Artificial Sequence
  Synthetic oligonucleotide
cacgcttgggcgggtattggcaatcttccc

SEQ ID NO: 377909 - DNA, 30 bp, Artificial Sequence
  Synthetic oligonucleotide
gaacttcaaagtcattagcagcacgttccc

SEQ ID NO: 377910 - DNA, 30 bp, Artificial Sequence
  Synthetic oligonucleotide
ggttctgtcctaaattttcgagacgttccc

SEQ ID NO: 377911 - DNA, 30 bp, Artificial Sequence
  Synthetic oligonucleotide
tcggtgtacggttgaacacctttcgttccc

SEQ ID NO: 377912 - DNA, 30 bp, Artificial Sequence
  Synthetic oligonucleotide
attggcgtaaatcagtctacagcggttccc

SEQ ID NO: 377913 - DNA, 30 bp, Artificial Sequence
  Synthetic oligonucleotide
cgtacgcaaaagtctggtaaaatggttccc

SEQ ID NO: 377914 - DNA, 30 bp, Artificial Sequence
  Synthetic oligonucleotide
tcccggtagggttcagacggtatggttccc

SEQ ID NO: 377915 - DNA, 30 bp, Artificial Sequence
  Synthetic oligonucleotide
gcgggattttaaccgattttgctggttccc

SEQ ID NO: 377916 - DNA, 30 bp, Artificial Sequence
  Synthetic oligonucleotide
tatcgtctgggacgttatccaactgttccc

SEQ ID NO: 377917 - DNA, 30 bp, Artificial Sequence
  Synthetic oligonucleotide
ttagtacgcgcgatggtacaggcatttccc

SEQ ID NO: 377918 - DNA, 30 bp, Artificial Sequence
  Synthetic oligonucleotide
caacatgagtcgataagcttctcctttccc

SEQ ID NO: 377919 - DNA, 30 bp, Artificial Sequence
  Synthetic oligonucleotide
ttcaaaataggtccttctgatggttttccc

SEQ ID NO: 377920 - DNA, 30 bp, Artificial Sequence
  Synthetic oligonucleotide
tttataccccccttacatgagatttttccc

SEQ ID NO: 377921 - DNA, 30 bp, Artificial Sequence
  Synthetic oligonucleotide
taaagacaggaggtctggaattaaaaagcc

SEQ ID NO: 377922 - DNA, 30 bp, Artificial Sequence
  Synthetic oligonucleotide
gcataaaggtcagtctaagattcaaaagcc

SEQ ID NO: 377923 - DNA, 30 bp, Artificial Sequence
  Synthetic oligonucleotide
ccggactctgtttatgagcggcccaaagcc

SEQ ID NO: 377924 - DNA, 30 bp, Artificial Sequence
  Synthetic oligonucleotide
actatagctagtttaacctggtgcaaagcc

SEQ ID NO: 377925 - DNA, 30 bp, Artificial Sequence
  Synthetic oligonucleotide
ttcacttctcgccagagtcatgtcaaagcc

SEQ ID NO: 377926 - DNA, 30 bp, Artificial Sequence
  Synthetic oligonucleotide
ttgacacggtacaaactgtagtagaaagcc

SEQ ID NO: 377927 - DNA, 30 bp, Artificial Sequence
  Synthetic oligonucleotide
ttggctgtcacgcccgcactcttgaaagcc

SEQ ID NO: 377928 - DNA, 30 bp, Artificial Sequence
  Synthetic oligonucleotide
gcataaacaggacgcgaccccaataaagcc

SEQ ID NO: 377929 - DNA, 30 bp, Artificial Sequence
  Synthetic oligonucleotide
gtgcaaagccatgcaaatcaggtacaagcc

SEQ ID NO: 377930 - DNA, 30 bp, Artificial Sequence
  Synthetic oligonucleotide
tggataagtagtgggcgcattgaccaagcc

SEQ ID NO: 377931 - DNA, 30 bp, Artificial Sequence
  Synthetic oligonucleotide
caatttcgattcatagctatcattcaagcc

SEQ ID NO: 377932 - DNA, 30 bp, Artificial Sequence
  Synthetic oligonucleotide
gtcagacctcctggattacctgttcaagcc

SEQ ID NO: 377933 - DNA, 30 bp, Artificial Sequence
  Synthetic oligonucleotide
gcgcataactgtcttagacgagcagaagcc

SEQ ID NO: 377934 - DNA, 30 bp, Artificial Sequence
  Synthetic oligonucleotide
atagactgaagctattgtcgactcgaagcc

SEQ ID NO: 377935 - DNA, 30 bp, Artificial Sequence
  Synthetic oligonucleotide
cagacttctgtcgagatatgaagggaagcc

SEQ ID NO: 377936 - DNA, 30 bp, Artificial Sequence
  Synthetic oligonucleotide
ctttctagcggctccgtcaggttggaagcc

SEQ ID NO: 377937 - DNA, 30 bp, Artificial Sequence
  Synthetic oligonucleotide
aggagtgtcattatgtagttggaataagcc

SEQ ID NO: 377938 - DNA, 30 bp, Artificial Sequence
  Synthetic oligonucleotide
gaagctcagccgtgtaccagctaataagcc

SEQ ID NO: 377939 - DNA, 30 bp, Artificial Sequence
  Synthetic oligonucleotide
ccggggaatttcaccacagttccataagcc

SEQ ID NO: 377940 - DNA, 30 bp, Artificial Sequence
  Synthetic oligonucleotide
atgctcgcttttatcccggagagctaagcc

SEQ ID NO: 377941 - DNA, 30 bp, Artificial Sequence
  Synthetic oligonucleotide
accttctaacggcttagtcgcccgtaagcc

SEQ ID NO: 377942 - DNA, 30 bp, Artificial Sequence
  Synthetic oligonucleotide
aactaaaggagtctgaatttcaattaagcc

SEQ ID NO: 377943 - DNA, 30 bp, Artificial Sequence
  Synthetic oligonucleotide
ggaatgtgctatccgggaggcctttaagcc

SEQ ID NO: 377944 - DNA, 30 bp, Artificial Sequence
  Synthetic oligonucleotide
gttacggcccaattttggggagtttaagcc

SEQ ID NO: 377945 - DNA, 30 bp, Artificial Sequence
  Synthetic oligonucleotide
atcgctagtgacgctatcaattaaacagcc

SEQ ID NO: 377946 - DNA, 30 bp, Artificial Sequence
  Synthetic oligonucleotide
ctaagtccgcttcaagcggttctaacagcc

SEQ ID NO: 377947 - DNA, 30 bp, Artificial Sequence
  Synthetic oligonucleotide
gcggggggctagggcgtttaagacacagcc

SEQ ID NO: 377948 - DNA, 26 bp, Artificial Sequence
  Synthetic oligonucleotide
cactaattgtacctacagccacagcc

SEQ ID NO: 377949 - DNA, 30 bp, Artificial Sequence
  Synthetic oligonucleotide
cagaagttattgcactgtgtccagacagcc

SEQ ID NO: 377950 - DNA, 30 bp, Artificial Sequence
  Synthetic oligonucleotide
gcggtgctcactacctcttaacgtacagcc

SEQ ID NO: 377951 - DNA, 30 bp, Artificial Sequence
  Synthetic oligonucleotide
aaccgctttacgtttccgtactgaccagcc

SEQ ID NO: 377952 - DNA, 30 bp, Artificial Sequence
  Synthetic oligonucleotide
ggttagcttctatttaagtgcaacccagcc

SEQ ID NO: 377953 - DNA, 30 bp, Artificial Sequence
  Synthetic oligonucleotide
aggttgttaggccatgataactgcccagcc

SEQ ID NO: 377954 - DNA, 30 bp, Artificial Sequence
  Synthetic oligonucleotide
gtgagaagaggcagtggaataaatccagcc

SEQ ID NO: 377955 - DNA, 30 bp, Artificial Sequence
  Synthetic oligonucleotide
gtctcggagttcacggggtactctccagcc

SEQ ID NO: 377956 - DNA, 30 bp, Artificial Sequence
  Synthetic oligonucleotide
cagtgccagttttacacactggaagcagcc

SEQ ID NO: 377957 - DNA, 30 bp, Artificial Sequence
  Synthetic oligonucleotide
gtttggtgggatctagacgtggaagcagcc

SEQ ID NO: 377958 - DNA, 30 bp, Artificial Sequence
  Synthetic oligonucleotide
agttttcgttagataacgaacggggcagcc

SEQ ID NO: 377959 - DNA, 30 bp, Artificial Sequence
  Synthetic oligonucleotide
ggacgcttaagggaatcgcgtttggcagcc

SEQ ID NO: 377960 - DNA, 30 bp, Artificial Sequence
  Synthetic oligonucleotide
atgagatgcggggagatacctaatgcagcc

SEQ ID NO: 377961 - DNA, 30 bp, Artificial Sequence
  Synthetic oligonucleotide
tcaacgtccttgggagacatggatgcagcc

SEQ ID NO: 377962 - DNA, 30 bp, Artificial Sequence
  Synthetic oligonucleotide
aaattgccaaaagcggcaagcgaatcagcc

SEQ ID NO: 377963 - DNA, 30 bp, Artificial Sequence
  Synthetic oligonucleotide
tataagacatactgatacatttcatcagcc

SEQ ID NO: 377964 - DNA, 30 bp, Artificial Sequence
  Synthetic oligonucleotide
attttactcgtggcgattcaagtatcagcc

SEQ ID NO: 377965 - DNA, 30 bp, Artificial Sequence
  Synthetic oligonucleotide
gcggtaggtacactattcggcggctcagcc

SEQ ID NO: 377966 - DNA, 30 bp, Artificial Sequence
  Synthetic oligonucleotide
gcccgtacgtccggcgctgtgccgtcagcc

SEQ ID NO: 377967 - DNA, 30 bp, Artificial Sequence
  Synthetic oligonucleotide
gaacaggtcgcctttgcgggaaggtcagcc

SEQ ID NO: 377968 - DNA, 30 bp, Artificial Sequence
  Synthetic oligonucleotide
tcggacggcggcctatgctagaggtcagcc

SEQ ID NO: 377969 - DNA, 30 bp, Artificial Sequence
  Synthetic oligonucleotide
gtgggcgtacatggtcatagtcattcagcc

SEQ ID NO: 377970 - DNA, 30 bp, Artificial Sequence
  Synthetic oligonucleotide
tgacacgcccgtgctggtgtcatttcagcc

SEQ ID NO: 377971 - DNA, 25 bp, Artificial Sequence
  Synthetic oligonucleotide
taatgaaggtctgtctaacagagcc

SEQ ID NO: 377972 - DNA, 30 bp, Artificial Sequence
  Synthetic oligonucleotide
aattaataattacgggagcgagacagagcc

SEQ ID NO: 377973 - DNA, 30 bp, Artificial Sequence
  Synthetic oligonucleotide
cgaatgtaacatctgttaacttgcagagcc

SEQ ID NO: 377974 - DNA, 30 bp, Artificial Sequence
  Synthetic oligonucleotide
acgggataaatttggtcacgttgcagagcc

SEQ ID NO: 377975 - DNA, 30 bp, Artificial Sequence
  Synthetic oligonucleotide
gatggatcgcaatcaaccggcccgagagcc

SEQ ID NO: 377976 - DNA, 30 bp, Artificial Sequence
  Synthetic oligonucleotide
cagcataatttgattcgtttttatagagcc

SEQ ID NO: 377977 - DNA, 30 bp, Artificial Sequence
  Synthetic oligonucleotide
agttaactggatgacccacgtctacgagcc

SEQ ID NO: 377978 - DNA, 30 bp, Artificial Sequence
  Synthetic oligonucleotide
aggcaacaattgttttcagcccgccgagcc

SEQ ID NO: 377979 - DNA, 30 bp, Artificial Sequence
  Synthetic oligonucleotide
gagggcttaaagttccacgagacgcgagcc

SEQ ID NO: 377980 - DNA, 30 bp, Artificial Sequence
  Synthetic oligonucleotide
atttgggccacaggtatggggttgcgagcc

SEQ ID NO: 377981 - DNA, 30 bp, Artificial Sequence
  Synthetic oligonucleotide
aacttcctattagcgccgatacatcgagcc

SEQ ID NO: 377982 - DNA, 30 bp, Artificial Sequence
  Synthetic oligonucleotide
agaccatgactggtattttgcattcgagcc

SEQ ID NO: 377983 - DNA, 30 bp, Artificial Sequence
  Synthetic oligonucleotide
atgcgaaggggattatctatgcgcggagcc

SEQ ID NO: 377984 - DNA, 30 bp, Artificial Sequence
  Synthetic oligonucleotide
ttaaactgtcggtaacgatcagcgggagcc

SEQ ID NO: 377985 - DNA, 30 bp, Artificial Sequence
  Synthetic oligonucleotide
acagcatcgcatctggctggtaggggagcc

SEQ ID NO: 377986 - DNA, 30 bp, Artificial Sequence
  Synthetic oligonucleotide
caatcttggagtaacctgtatcggggagcc

SEQ ID NO: 377987 - DNA, 30 bp, Artificial Sequence
  Synthetic oligonucleotide
cgctgatccggtatcacgcccttgggagcc

SEQ ID NO: 377988 - DNA, 30 bp, Artificial Sequence
  Synthetic oligonucleotide
ggtctacccataagcgatagtgatggagcc

SEQ ID NO: 377989 - DNA, 30 bp, Artificial Sequence
  Synthetic oligonucleotide
ctgttcctcaggagaggcgctgtatgagcc

SEQ ID NO: 377990 - DNA, 30 bp, Artificial Sequence
  Synthetic oligonucleotide
ccgcttaaacgaaggttataatcgtgagcc

SEQ ID NO: 377991 - DNA, 30 bp, Artificial Sequence
  Synthetic oligonucleotide
ggagttctccagaagatggacgtgtgagcc

SEQ ID NO: 377992 - DNA, 30 bp, Artificial Sequence
  Synthetic oligonucleotide
caccttgcacgaacctcctcaccttgagcc

SEQ ID NO: 377993 - DNA, 30 bp, Artificial Sequence
  Synthetic oligonucleotide
ataaaaatacccggatcgaaaataatagcc

SEQ ID NO: 377994 - DNA, 30 bp, Artificial Sequence
  Synthetic oligonucleotide
ctaatagggaattatcttactctaatagcc

SEQ ID NO: 377995 - DNA, 30 bp, Artificial Sequence
  Synthetic oligonucleotide
cttattacaggtcccagttatagcatagcc

SEQ ID NO: 377996 - DNA, 30 bp, Artificial Sequence
  Synthetic oligonucleotide
taatcggggatcgcctcagatgcgatagcc

SEQ ID NO: 377997 - DNA, 30 bp, Artificial Sequence
  Synthetic oligonucleotide
tcaatttgcagaaacccgacaaggatagcc

SEQ ID NO: 377998 - DNA, 30 bp, Artificial Sequence
  Synthetic oligonucleotide
tactcagatttttaatagggtaggatagcc

SEQ ID NO: 377999 - DNA, 30 bp, Artificial Sequence
  Synthetic oligonucleotide
tcctctggagagaatcgtggacggatagcc

SEQ ID NO: 378000 - DNA, 29 bp, Artificial Sequence
  Synthetic oligonucleotide
ctatttcatgggggtagaaatgtatagcc

SEQ ID NO: 378001 - DNA, 30 bp, Artificial Sequence
  Synthetic oligonucleotide
ggctcaataaggtgcgacagcattatagcc

SEQ ID NO: 378002 - DNA, 30 bp, Artificial Sequence
  Synthetic oligonucleotide
gctcttaggcatcacggattttacctagcc

SEQ ID NO: 378003 - DNA, 30 bp, Artificial Sequence
  Synthetic oligonucleotide
gtctctaaacccggacatagttccctagcc

SEQ ID NO: 378004 - DNA, 30 bp, Artificial Sequence
  Synthetic oligonucleotide
ttgttagttaaggacaccgggacgctagcc

SEQ ID NO: 378005 - DNA, 30 bp, Artificial Sequence
  Synthetic oligonucleotide
aaagcagagcacggggttcttcgtctagcc

SEQ ID NO: 378006 - DNA, 30 bp, Artificial Sequence
  Synthetic oligonucleotide
attaccctgattaactagtatagagtagcc

SEQ ID NO: 378007 - DNA, 30 bp, Artificial Sequence
  Synthetic oligonucleotide
agtggacgtgggtgatctacggccgtagcc

SEQ ID NO: 378008 - DNA, 30 bp, Artificial Sequence
  Synthetic oligonucleotide
gggcttatgtaacacgtggtcggcgtagcc

SEQ ID NO: 378009 - DNA, 30 bp, Artificial Sequence
  Synthetic oligonucleotide
atctctgtgctggggtagattccggtagcc

SEQ ID NO: 378010 - DNA, 30 bp, Artificial Sequence
  Synthetic oligonucleotide
cagttcagcgccctccgtttcgaattagcc

SEQ ID NO: 378011 - DNA, 30 bp, Artificial Sequence
  Synthetic oligonucleotide
cttcccgacaccctaaatcaatcattagcc

SEQ ID NO: 378012 - DNA, 30 bp, Artificial Sequence
  Synthetic oligonucleotide
ttcacttgatgtaaaataggtttattagcc

SEQ ID NO: 378013 - DNA, 30 bp, Artificial Sequence
  Synthetic oligonucleotide
gtgccatacatgaactacgttgtcttagcc

SEQ ID NO: 378014 - DNA, 30 bp, Artificial Sequence
  Synthetic oligonucleotide
aaaaacccgatatacatatcgaagttagcc

SEQ ID NO: 378015 - DNA, 30 bp, Artificial Sequence
  Synthetic oligonucleotide
ggtagattggtgccactgataacgttagcc

SEQ ID NO: 378016 - DNA, 30 bp, Artificial Sequence
  Synthetic oligonucleotide
gataaattgattccgggttatgcgttagcc

SEQ ID NO: 378017 - DNA, 30 bp, Artificial Sequence
  Synthetic oligonucleotide
gcgcatgaaagttgacatctaaggttagcc

SEQ ID NO: 378018 - DNA, 30 bp, Artificial Sequence
  Synthetic oligonucleotide
cgccgcaaacatgctacctgcttgttagcc

SEQ ID NO: 378019 - DNA, 30 bp, Artificial Sequence
  Synthetic oligonucleotide
aagaatgcattagcgcttccccatttagcc

SEQ ID NO: 378020 - DNA, 30 bp, Artificial Sequence
  Synthetic oligonucleotide
gttaagaacccagaagttgcaagtttagcc

SEQ ID NO: 378021 - DNA, 30 bp, Artificial Sequence
  Synthetic oligonucleotide
tttgtctaggatactatttaaggtttagcc

SEQ ID NO: 378022 - DNA, 30 bp, Artificial Sequence
  Synthetic oligonucleotide
gtcggtatccatctatggtaggacaacgcc

SEQ ID NO: 378023 - DNA, 30 bp, Artificial Sequence
  Synthetic oligonucleotide
tcatggcctacgtcagggccctgcaacgcc

SEQ ID NO: 378024 - DNA, 30 bp, Artificial Sequence
  Synthetic oligonucleotide
accgttatgtttgtcgccgtacggaacgcc

SEQ ID NO: 378025 - DNA, 30 bp, Artificial Sequence
  Synthetic oligonucleotide
aagacataggtaaaagtgcaacataacgcc

SEQ ID NO: 378026 - DNA, 30 bp, Artificial Sequence
  Synthetic oligonucleotide
ctagatggcgggcagccgaatagtaacgcc

SEQ ID NO: 378027 - DNA, 30 bp, Artificial Sequence
  Synthetic oligonucleotide
gtgcccgtataacaggtgccataacacgcc

SEQ ID NO: 378028 - DNA, 30 bp, Artificial Sequence
  Synthetic oligonucleotide
ttcaggtaaaatctgaccctaccacacgcc

SEQ ID NO: 378029 - DNA, 30 bp, Artificial Sequence
  Synthetic oligonucleotide
taattaatgggaattagaaatatacacgcc

SEQ ID NO: 378030 - DNA, 30 bp, Artificial Sequence
  Synthetic oligonucleotide
agtagatattaacgtgcatattaccacgcc

SEQ ID NO: 378031 - DNA, 30 bp, Artificial Sequence
  Synthetic oligonucleotide
ccacaaatacccagtgtaatctcgcacgcc

SEQ ID NO: 378032 - DNA, 30 bp, Artificial Sequence
  Synthetic oligonucleotide
actcaacgcgtaatcagtggctgtcacgcc

SEQ ID NO: 378033 - DNA, 30 bp, Artificial Sequence
  Synthetic oligonucleotide
ggcaatgagtggttgaatattgttcacgcc

SEQ ID NO: 378034 - DNA, 30 bp, Artificial Sequence
  Synthetic oligonucleotide
attgacgaatgcgaccattcccccgacgcc

SEQ ID NO: 378035 - DNA, 30 bp, Artificial Sequence
  Synthetic oligonucleotide
ggggagactggagcaataaatgctgacgcc

SEQ ID NO: 378036 - DNA, 30 bp, Artificial Sequence
  Synthetic oligonucleotide
aaaataggcagggttgcttgtgctgacgcc

SEQ ID NO: 378037 - DNA, 30 bp, Artificial Sequence
  Synthetic oligonucleotide
aaagagcatcacccgatttcgcaatacgcc

SEQ ID NO: 378038 - DNA, 30 bp, Artificial Sequence
  Synthetic oligonucleotide
gacgcaggtaccgaatttgctgcatacgcc

SEQ ID NO: 378039 - DNA, 30 bp, Artificial Sequence
  Synthetic oligonucleotide
ggttaccttaaatttattggagactacgcc

SEQ ID NO: 378040 - DNA, 30 bp, Artificial Sequence
  Synthetic oligonucleotide
acgttcacagacagcggcgggttctacgcc

SEQ ID NO: 378041 - DNA, 30 bp, Artificial Sequence
  Synthetic oligonucleotide
gggaactggtcttctaagtccaagtacgcc

SEQ ID NO: 378042 - DNA, 30 bp, Artificial Sequence
  Synthetic oligonucleotide
gaaaggagtcccattttgtggcattacgcc

SEQ ID NO: 378043 - DNA, 29 bp, Artificial Sequence
  Synthetic oligonucleotide
ggcaaactcgcttccccgtgccttacgcc

SEQ ID NO: 378044 - DNA, 30 bp, Artificial Sequence
  Synthetic oligonucleotide
cgtacgctcgtgccgccataaggttacgcc

SEQ ID NO: 378045 - DNA, 30 bp, Artificial Sequence
  Synthetic oligonucleotide
aaagcccgtactgaagttcaagcaaccgcc

SEQ ID NO: 378046 - DNA, 30 bp, Artificial Sequence
  Synthetic oligonucleotide
cacgtctgcgcggtcgggtacgtaaccgcc

SEQ ID NO: 378047 - DNA, 30 bp, Artificial Sequence
  Synthetic oligonucleotide
aattagatatgtggtcgatgcgacaccgcc

SEQ ID NO: 378048 - DNA, 30 bp, Artificial Sequence
  Synthetic oligonucleotide
agtcggtggggtctgttcaaatctaccgcc

SEQ ID NO: 378049 - DNA, 30 bp, Artificial Sequence
  Synthetic oligonucleotide
cccagcaacaatcggaacacccttaccgcc

SEQ ID NO: 378050 - DNA, 30 bp, Artificial Sequence
  Synthetic oligonucleotide
tatgggtgttgactctggtgtgttaccgcc

SEQ ID NO: 378051 - DNA, 30 bp, Artificial Sequence
  Synthetic oligonucleotide
aacacgcctttaaattacgtctttaccgcc

SEQ ID NO: 378052 - DNA, 30 bp, Artificial Sequence
  Synthetic oligonucleotide
ccacgtgttggccaggcatgaaaacccgcc

SEQ ID NO: 378053 - DNA, 30 bp, Artificial Sequence
  Synthetic oligonucleotide
ggccctgtagcgaacgatctgttacccgcc

SEQ ID NO: 378054 - DNA, 30 bp, Artificial Sequence
  Synthetic oligonucleotide
gcgtgatcaagcctcaaggtcagtcccgcc

SEQ ID NO: 378055 - DNA, 30 bp, Artificial Sequence
  Synthetic oligonucleotide
tcgttaagagcacatcagtggcgtcccgcc

SEQ ID NO: 378056 - DNA, 30 bp, Artificial Sequence
  Synthetic oligonucleotide
ttcaacttgccccaagagtcgatcgccgcc

SEQ ID NO: 378057 - DNA, 31 bp, Artificial Sequence
  Synthetic oligonucleotide
actgtcgttagatcaatggtggtgatccgcc

SEQ ID NO: 378058 - DNA, 30 bp, Artificial Sequence
  Synthetic oligonucleotide
gcacggagaactttgcggaagtgttccgcc

SEQ ID NO: 378059 - DNA, 30 bp, Artificial Sequence
  Synthetic oligonucleotide
acatccctttccggcacgacaggaagcgcc

SEQ ID NO: 378060 - DNA, 30 bp, Artificial Sequence
  Synthetic oligonucleotide
ccaaaaatattgtctctacggataagcgcc

SEQ ID NO: 378061 - DNA, 30 bp, Artificial Sequence
  Synthetic oligonucleotide
tgtacatgttatgattacgtctacagcgcc

SEQ ID NO: 378062 - DNA, 30 bp, Artificial Sequence
  Synthetic oligonucleotide
gtaacgctgctaatcgaaacccccagcgcc

SEQ ID NO: 378063 - DNA, 30 bp, Artificial Sequence
  Synthetic oligonucleotide
taaaatcgttcagtcaggatgggcagcgcc

SEQ ID NO: 378064 - DNA, 30 bp, Artificial Sequence
  Synthetic oligonucleotide
attgtatgcagggatgactttaatagcgcc

SEQ ID NO: 378065 - DNA, 30 bp, Artificial Sequence
  Synthetic oligonucleotide
ggggccgcgacggttctatcggttagcgcc

SEQ ID NO: 378066 - DNA, 30 bp, Artificial Sequence
  Synthetic oligonucleotide
taagtatcgacgtgagggatcacacgcgcc

SEQ ID NO: 378067 - DNA, 30 bp, Artificial Sequence
  Synthetic oligonucleotide
tgttcctaaaaaatcctccatcaccgcgcc

SEQ ID NO: 378068 - DNA, 30 bp, Artificial Sequence
  Synthetic oligonucleotide
ttaacaccactagcaccgttcgggcgcgcc

SEQ ID NO: 378069 - DNA, 30 bp, Artificial Sequence
  Synthetic oligonucleotide
agtcaaacgattgccttttgccttcgcgcc

SEQ ID NO: 378070 - DNA, 30 bp, Artificial Sequence
  Synthetic oligonucleotide
ggcaatggtagtttccgctgctgcggcgcc

SEQ ID NO: 378071 - DNA, 30 bp, Artificial Sequence
  Synthetic oligonucleotide
tcgaactacaggatgtgctcgacgggcgcc

SEQ ID NO: 378072 - DNA, 30 bp, Artificial Sequence
  Synthetic oligonucleotide
caaaatgtataaattcagaacctgggcgcc

SEQ ID NO: 378073 - DNA, 30 bp, Artificial Sequence
  Synthetic oligonucleotide
gcaggctaaagccgcattgttactggcgcc

SEQ ID NO: 378074 - DNA, 30 bp, Artificial Sequence
  Synthetic oligonucleotide
cgacagactagtatcgccgcctttggcgcc

SEQ ID NO: 378075 - DNA, 30 bp, Artificial Sequence
  Synthetic oligonucleotide
gcactcaagacgtaaaatactatatgcgcc

SEQ ID NO: 378076 - DNA, 30 bp, Artificial Sequence
  Synthetic oligonucleotide
tgtacaggggacattggacctatatgcgcc

SEQ ID NO: 378077 - DNA, 30 bp, Artificial Sequence
  Synthetic oligonucleotide
ctctgtcagacccgctagattaagtgcgcc

SEQ ID NO: 378078 - DNA, 30 bp, Artificial Sequence
  Synthetic oligonucleotide
cccgcaggacagcgaaaactttcgtgcgcc

SEQ ID NO: 378079 - DNA, 30 bp, Artificial Sequence
  Synthetic oligonucleotide
tgtcttccacacaaggatgctatgtgcgcc

SEQ ID NO: 378080 - DNA, 30 bp, Artificial Sequence
  Synthetic oligonucleotide
ccttgactctctttgagaaggaacatcgcc

SEQ ID NO: 378081 - DNA, 30 bp, Artificial Sequence
  Synthetic oligonucleotide
tggtacccttaggatccttcggccatcgcc

SEQ ID NO: 378082 - DNA, 30 bp, Artificial Sequence
  Synthetic oligonucleotide
aactaagcggaggttcctcgtatcatcgcc

SEQ ID NO: 378083 - DNA, 30 bp, Artificial Sequence
  Synthetic oligonucleotide
agccagcactaacgaacataaactatcgcc

SEQ ID NO: 378084 - DNA, 30 bp, Artificial Sequence
  Synthetic oligonucleotide
gatagatttgcgtaagtacacattatcgcc

SEQ ID NO: 378085 - DNA, 30 bp, Artificial Sequence
  Synthetic oligonucleotide
acagtgacccggtgttgtaatggactcgcc

SEQ ID NO: 378086 - DNA, 30 bp, Artificial Sequence
  Synthetic oligonucleotide
cgagagtagcctcagcggctaggcctcgcc

SEQ ID NO: 378087 - DNA, 30 bp, Artificial Sequence
  Synthetic oligonucleotide
ttagctgtatcatagtatggcgcgctcgcc

SEQ ID NO: 378088 - DNA, 30 bp, Artificial Sequence
  Synthetic oligonucleotide
gtgctaagcgacgaaaggtagttgctcgcc

SEQ ID NO: 378089 - DNA, 30 bp, Artificial Sequence
  Synthetic oligonucleotide
cgatatcggaatgcctagaatattctcgcc

SEQ ID NO: 378090 - DNA, 30 bp, Artificial Sequence
  Synthetic oligonucleotide
agcgttattggctgatatttgcaagtcgcc

SEQ ID NO: 378091 - DNA, 29 bp, Artificial Sequence
  Synthetic oligonucleotide
tgggatatagctaggaccgccccgtcgcc

SEQ ID NO: 378092 - DNA, 30 bp, Artificial Sequence
  Synthetic oligonucleotide
ttctttacaaggatgtatgaggttgtcgcc

SEQ ID NO: 378093 - DNA, 30 bp, Artificial Sequence
  Synthetic oligonucleotide
atgattcgttcgaagtgtttaggattcgcc

SEQ ID NO: 378094 - DNA, 30 bp, Artificial Sequence
  Synthetic oligonucleotide
ttttagtgcccacgtatacacaaaaaggcc

SEQ ID NO: 378095 - DNA, 30 bp, Artificial Sequence
  Synthetic oligonucleotide
aaagaattgaccgatccgtttaaaaaggcc

SEQ ID NO: 378096 - DNA, 30 bp, Artificial Sequence
  Synthetic oligonucleotide
gtaaaggcagaatacctcaggtaaaaggcc

SEQ ID NO: 378097 - DNA, 30 bp, Artificial Sequence
  Synthetic oligonucleotide
aaatccgaatctttcatcaagcgaaaggcc

SEQ ID NO: 378098 - DNA, 30 bp, Artificial Sequence
  Synthetic oligonucleotide
tctaagatttgactggccggcgtcaaggcc

SEQ ID NO: 378099 - DNA, 30 bp, Artificial Sequence
  Synthetic oligonucleotide
cgttcttcctaagaagtacgtttcaaggcc

SEQ ID NO: 378100 - DNA, 30 bp, Artificial Sequence
  Synthetic oligonucleotide
ttcggtcacacgacgctcgcaaagaaggcc

SEQ ID NO: 378101 - DNA, 30 bp, Artificial Sequence
  Synthetic oligonucleotide
cacatattgcaagcccacggtcagaaggcc

SEQ ID NO: 378102 - DNA, 30 bp, Artificial Sequence
  Synthetic oligonucleotide
ggccacgtctatcctctgtcattgaaggcc

SEQ ID NO: 378103 - DNA, 30 bp, Artificial Sequence
  Synthetic oligonucleotide
attcgcgactgtcgcggcaagcaacaggcc

SEQ ID NO: 378104 - DNA, 30 bp, Artificial Sequence
  Synthetic oligonucleotide
cctggtatatttgagttgtgatcgcaggcc

SEQ ID NO: 378105 - DNA, 30 bp, Artificial Sequence
  Synthetic oligonucleotide
ttattaccccccaattgatggattcaggcc

SEQ ID NO: 378106 - DNA, 30 bp, Artificial Sequence
  Synthetic oligonucleotide
ggccgtcgcccggtgcccaatgtagaggcc

SEQ ID NO: 378107 - DNA, 30 bp, Artificial Sequence
  Synthetic oligonucleotide
cagaatccctttttcaaatcatacgaggcc

SEQ ID NO: 378108 - DNA, 30 bp, Artificial Sequence
  Synthetic oligonucleotide
aaaacggtatttgtccattcgatcgaggcc

SEQ ID NO: 378109 - DNA, 30 bp, Artificial Sequence
  Synthetic oligonucleotide
ggccttaaacgaagtactaagacggaggcc

SEQ ID NO: 378110 - DNA, 30 bp, Artificial Sequence
  Synthetic oligonucleotide
tgaggctacgttgacagcataggtgaggcc

SEQ ID NO: 378111 - DNA, 30 bp, Artificial Sequence
  Synthetic oligonucleotide
ttaattgcaatgtataagaagttataggcc

SEQ ID NO: 378112 - DNA, 30 bp, Artificial Sequence
  Synthetic oligonucleotide
agacctgagaccctatatactcagtaggcc

SEQ ID NO: 378113 - DNA, 30 bp, Artificial Sequence
  Synthetic oligonucleotide
tactatagcagtagccagcttgagtaggcc

SEQ ID NO: 378114 - DNA, 30 bp, Artificial Sequence
  Synthetic oligonucleotide
tacgcccgtgcatataacttaagttaggcc

SEQ ID NO: 378115 - DNA, 30 bp, Artificial Sequence
  Synthetic oligonucleotide
ccgtgaactgacctagacggtagttaggcc

SEQ ID NO: 378116 - DNA, 30 bp, Artificial Sequence
  Synthetic oligonucleotide
accagtgccaggcatgggcaacgttaggcc

SEQ ID NO: 378117 - DNA, 30 bp, Artificial Sequence
  Synthetic oligonucleotide
ttaggcatagcagtttggcgcggttaggcc

SEQ ID NO: 378118 - DNA, 30 bp, Artificial Sequence
  Synthetic oligonucleotide
ggtaaatgcaagattttcatataaacggcc

SEQ ID NO: 378119 - DNA, 30 bp, Artificial Sequence
  Synthetic oligonucleotide
acgctgtctctcgtgtgatatcgaacggcc

SEQ ID NO: 378120 - DNA, 30 bp, Artificial Sequence
  Synthetic oligonucleotide
aactgctgcttggagtctcaatgaacggcc

SEQ ID NO: 378121 - DNA, 30 bp, Artificial Sequence
  Synthetic oligonucleotide
aagacggtgcaagttaatagcctaacggcc

SEQ ID NO: 378122 - DNA, 30 bp, Artificial Sequence
  Synthetic oligonucleotide
gatagtaagtcgtagggtgaacctacggcc

SEQ ID NO: 378123 - DNA, 30 bp, Artificial Sequence
  Synthetic oligonucleotide
cgggtacggagggcagggggatgtacggcc

SEQ ID NO: 378124 - DNA, 31 bp, Artificial Sequence
  Synthetic oligonucleotide
tcctctatcgttttgaaaaaatcttacggcc

SEQ ID NO: 378125 - DNA, 30 bp, Artificial Sequence
  Synthetic oligonucleotide
aatgggtttgtgcctgacggcgttacggcc

SEQ ID NO: 378126 - DNA, 30 bp, Artificial Sequence
  Synthetic oligonucleotide
tctacccgtagatgtattacttttacggcc

SEQ ID NO: 378127 - DNA, 30 bp, Artificial Sequence
  Synthetic oligonucleotide
gcgggtcattttcttacgtgagtaccggcc

SEQ ID NO: 378128 - DNA, 30 bp, Artificial Sequence
  Synthetic oligonucleotide
cccctcataataattgcgaacttcccggcc

SEQ ID NO: 378129 - DNA, 30 bp, Artificial Sequence
  Synthetic oligonucleotide
taatatcatacaaattttcacacgccggcc

SEQ ID NO: 378130 - DNA, 30 bp, Artificial Sequence
  Synthetic oligonucleotide
ctcagagaattaagagttttgcgtccggcc

SEQ ID NO: 378131 - DNA, 30 bp, Artificial Sequence
  Synthetic oligonucleotide
atcacctcgctaataattacgcttccggcc

SEQ ID NO: 378132 - DNA, 30 bp, Artificial Sequence
  Synthetic oligonucleotide
tatcgatgggaaagttttcgctgagcggcc

SEQ ID NO: 378133 - DNA, 30 bp, Artificial Sequence
  Synthetic oligonucleotide
actagcatctcatacggcacgtgcgcggcc

SEQ ID NO: 378134 - DNA, 30 bp, Artificial Sequence
  Synthetic oligonucleotide
cagtatgccccgactacgacgacatcggcc

SEQ ID NO: 378135 - DNA, 30 bp, Artificial Sequence
  Synthetic oligonucleotide
tcttcgcattggtaagccgggttatcggcc

SEQ ID NO: 378136 - DNA, 30 bp, Artificial Sequence
  Synthetic oligonucleotide
ctatgcgatgctattagctctgactcggcc

SEQ ID NO: 378137 - DNA, 30 bp, Artificial Sequence
  Synthetic oligonucleotide
cgtgatgtggtcgaatgctggggctcggcc

SEQ ID NO: 378138 - DNA, 30 bp, Artificial Sequence
  Synthetic oligonucleotide
ccgacgacaggggtggaacggcggtcggcc

SEQ ID NO: 378139 - DNA, 30 bp, Artificial Sequence
  Synthetic oligonucleotide
gaccttcattaggggttgttcctgtcggcc

SEQ ID NO: 378140 - DNA, 30 bp, Artificial Sequence
  Synthetic oligonucleotide
taagcggctctctcatgtgacgtgtcggcc

SEQ ID NO: 378141 - DNA, 30 bp, Artificial Sequence
  Synthetic oligonucleotide
tgccgcataaagagacctggagcttcggcc

SEQ ID NO: 378142 - DNA, 30 bp, Artificial Sequence
  Synthetic oligonucleotide
taaaagcttagtactataagtgtaagggcc

SEQ ID NO: 378143 - DNA, 29 bp, Artificial Sequence
  Synthetic oligonucleotide
gggcacaatttactgccacacacagggcc

SEQ ID NO: 378144 - DNA, 30 bp, Artificial Sequence
  Synthetic oligonucleotide
cactgtagatgccaatttacgtgcagggcc

SEQ ID NO: 378145 - DNA, 30 bp, Artificial Sequence
  Synthetic oligonucleotide
gaggatggctgtgctgctctcatcagggcc

SEQ ID NO: 378146 - DNA, 30 bp, Artificial Sequence
  Synthetic oligonucleotide
cccggttagctagctcaaataccgagggcc

SEQ ID NO: 378147 - DNA, 30 bp, Artificial Sequence
  Synthetic oligonucleotide
gcctcaagagggtcacatcgtaggagggcc

SEQ ID NO: 378148 - DNA, 30 bp, Artificial Sequence
  Synthetic oligonucleotide
attctgcgggtttataagacttatagggcc

SEQ ID NO: 378149 - DNA, 30 bp, Artificial Sequence
  Synthetic oligonucleotide
ttcggccaaaccgtttggtcccgtagggcc

SEQ ID NO: 378150 - DNA, 30 bp, Artificial Sequence
  Synthetic oligonucleotide
ccgtcgattttaagaattttgtgacgggcc

SEQ ID NO: 378151 - DNA, 30 bp, Artificial Sequence
  Synthetic oligonucleotide
cagccccgctagggcccgaacttacgggcc

SEQ ID NO: 378152 - DNA, 30 bp, Artificial Sequence
  Synthetic oligonucleotide
ccgtgggttgtgagggattgcatccgggcc

SEQ ID NO: 378153 - DNA, 30 bp, Artificial Sequence
  Synthetic oligonucleotide
aggcttcaccgacctcactgcgttcgggcc

SEQ ID NO: 378154 - DNA, 30 bp, Artificial Sequence
  Synthetic oligonucleotide
ttctttagcacttcataaaagagaggggcc

SEQ ID NO: 378155 - DNA, 30 bp, Artificial Sequence
  Synthetic oligonucleotide
cgtttattgtaactcagtaataacggggcc

SEQ ID NO: 378156 - DNA, 30 bp, Artificial Sequence
  Synthetic oligonucleotide
aacgagattcttgtaaaggctcggggggcc

SEQ ID NO: 378157 - DNA, 30 bp, Artificial Sequence
  Synthetic oligonucleotide
ttagaaagtcacagggattcagaatgggcc

SEQ ID NO: 378158 - DNA, 30 bp, Artificial Sequence
  Synthetic oligonucleotide
cgggaggttatttattcagacgcctgggcc

SEQ ID NO: 378159 - DNA, 30 bp, Artificial Sequence
  Synthetic oligonucleotide
atttatcggatgtgggttggggtctgggcc

SEQ ID NO: 378160 - DNA, 30 bp, Artificial Sequence
  Synthetic oligonucleotide
gaggtgcccaaaatcaaggcggggtgggcc

SEQ ID NO: 378161 - DNA, 30 bp, Artificial Sequence
  Synthetic oligonucleotide
atagttcaactggtagaccactggtgggcc

SEQ ID NO: 378162 - DNA, 30 bp, Artificial Sequence
  Synthetic oligonucleotide
cgctacttcagaatgcgtcacagttgggcc

SEQ ID NO: 378163 - DNA, 30 bp, Artificial Sequence
  Synthetic oligonucleotide
cactaacttgtcaagcggaccctttgggcc

SEQ ID NO: 378164 - DNA, 30 bp, Artificial Sequence
  Synthetic oligonucleotide
attttaacagggtcgtcatgtgtttgggcc

SEQ ID NO: 378165 - DNA, 30 bp, Artificial Sequence
  Synthetic oligonucleotide
aagtcgtagtccgcaattagtcaaatggcc

SEQ ID NO: 378166 - DNA, 30 bp, Artificial Sequence
  Synthetic oligonucleotide
atctaaagatctctagtccagccaatggcc

SEQ ID NO: 378167 - DNA, 30 bp, Artificial Sequence
  Synthetic oligonucleotide
tctgagtttgcttagcgctatcgcatggcc

SEQ ID NO: 378168 - DNA, 30 bp, Artificial Sequence
  Synthetic oligonucleotide
taaccaggtacacgaaaccaaggcatggcc

SEQ ID NO: 378169 - DNA, 30 bp, Artificial Sequence
  Synthetic oligonucleotide
gccgtgtacgattgccgaagtatcatggcc

SEQ ID NO: 378170 - DNA, 30 bp, Artificial Sequence
  Synthetic oligonucleotide
taaagatgaaacattctaactcctatggcc

SEQ ID NO: 378171 - DNA, 30 bp, Artificial Sequence
  Synthetic oligonucleotide
ttactggaggatcagacactctctatggcc

SEQ ID NO: 378172 - DNA, 30 bp, Artificial Sequence
  Synthetic oligonucleotide
agggtgcattccggagtgtagggcctggcc

SEQ ID NO: 378173 - DNA, 30 bp, Artificial Sequence
  Synthetic oligonucleotide
tacgtggggttttataactgcaagctggcc

SEQ ID NO: 378174 - DNA, 30 bp, Artificial Sequence
  Synthetic oligonucleotide
cacggcgttctgttgccttaggttctggcc

SEQ ID NO: 378175 - DNA, 30 bp, Artificial Sequence
  Synthetic oligonucleotide
cgaggaatgcgccgccaatttaaagtggcc

SEQ ID NO: 378176 - DNA, 30 bp, Artificial Sequence
  Synthetic oligonucleotide
gggtcatactccactggcttagcagtggcc

SEQ ID NO: 378177 - DNA, 30 bp, Artificial Sequence
  Synthetic oligonucleotide
ctagaatgccactagaaaccgaacgtggcc

SEQ ID NO: 378178 - DNA, 30 bp, Artificial Sequence
  Synthetic oligonucleotide
tttggtccgagacgtcgattccgtgtggcc

SEQ ID NO: 378179 - DNA, 30 bp, Artificial Sequence
  Synthetic oligonucleotide
aggtagtcacctgcttgggctgcattggcc

SEQ ID NO: 378180 - DNA, 30 bp, Artificial Sequence
  Synthetic oligonucleotide
ttagtggttggctggttgaccgtattggcc

SEQ ID NO: 378181 - DNA, 30 bp, Artificial Sequence
  Synthetic oligonucleotide
actaaagcctcctgtgcagtggcgttggcc

SEQ ID NO: 378182 - DNA, 30 bp, Artificial Sequence
  Synthetic oligonucleotide
attaacacagccccaggcgtattgttggcc

SEQ ID NO: 378183 - DNA, 30 bp, Artificial Sequence
  Synthetic oligonucleotide
cacaaaaccctacaggtatggcttttggcc

SEQ ID NO: 378184 - DNA, 30 bp, Artificial Sequence
  Synthetic oligonucleotide
ggagtaccaggatgatgcatgcgcaatgcc

SEQ ID NO: 378185 - DNA, 30 bp, Artificial Sequence
  Synthetic oligonucleotide
gatcccggcataggcggacgacggaatgcc

SEQ ID NO: 378186 - DNA, 30 bp, Artificial Sequence
  Synthetic oligonucleotide
atattggcgtgttaacggagccaacatgcc

SEQ ID NO: 378187 - DNA, 30 bp, Artificial Sequence
  Synthetic oligonucleotide
tggcttcctgcaaaatgtacatgacatgcc

SEQ ID NO: 378188 - DNA, 30 bp, Artificial Sequence
  Synthetic oligonucleotide
ggccttagagtcgcattcaacaaccatgcc

SEQ ID NO: 378189 - DNA, 30 bp, Artificial Sequence
  Synthetic oligonucleotide
cttccccgctcccttgatgggtagcatgcc

SEQ ID NO: 378190 - DNA, 30 bp, Artificial Sequence
  Synthetic oligonucleotide
ttaacagttagagcggatcactgtcatgcc

SEQ ID NO: 378191 - DNA, 30 bp, Artificial Sequence
  Synthetic oligonucleotide
ccgccataagtaggaaacccccttcatgcc

SEQ ID NO: 378192 - DNA, 30 bp, Artificial Sequence
  Synthetic oligonucleotide
aatcagaacacttcgtctatttttcatgcc

SEQ ID NO: 378193 - DNA, 30 bp, Artificial Sequence
  Synthetic oligonucleotide
cccctagtagcgactcagaccaaagatgcc

SEQ ID NO: 378194 - DNA, 30 bp, Artificial Sequence
  Synthetic oligonucleotide
ataacgcggatcgcggtcccctcagatgcc

SEQ ID NO: 378195 - DNA, 30 bp, Artificial Sequence
  Synthetic oligonucleotide
ggtaccggggggagcgggtgggacgatgcc

SEQ ID NO: 378196 - DNA, 31 bp, Artificial Sequence
  Synthetic oligonucleotide
gcactaggttggtagcttgatctccgatgcc

SEQ ID NO: 378197 - DNA, 30 bp, Artificial Sequence
  Synthetic oligonucleotide
gacagattctcgcagtaaatcgtcgatgcc

SEQ ID NO: 378198 - DNA, 30 bp, Artificial Sequence
  Synthetic oligonucleotide
atacagcgtgttgggcggtagtctgatgcc

SEQ ID NO: 378199 - DNA, 30 bp, Artificial Sequence
  Synthetic oligonucleotide
ggtagactttaatggcggactggtgatgcc

SEQ ID NO: 378200 - DNA, 30 bp, Artificial Sequence
  Synthetic oligonucleotide
cgtaataattcacggtgtgtatttgatgcc

SEQ ID NO: 378201 - DNA, 30 bp, Artificial Sequence
  Synthetic oligonucleotide
cgagcagggctgatccttcgaggctatgcc

SEQ ID NO: 378202 - DNA, 30 bp, Artificial Sequence
  Synthetic oligonucleotide
cacccctagataataacagtgcattatgcc

SEQ ID NO: 378203 - DNA, 30 bp, Artificial Sequence
  Synthetic oligonucleotide
cggccgtggtcgccgcggcaaagttatgcc

SEQ ID NO: 378204 - DNA, 30 bp, Artificial Sequence
  Synthetic oligonucleotide
agtgaggttccgaggttatagtgttatgcc

SEQ ID NO: 378205 - DNA, 30 bp, Artificial Sequence
  Synthetic oligonucleotide
ggttccttgtacttcacggacatttatgcc

SEQ ID NO: 378206 - DNA, 30 bp, Artificial Sequence
  Synthetic oligonucleotide
ccctattatagcggctcagctataactgcc

SEQ ID NO: 378207 - DNA, 30 bp, Artificial Sequence
  Synthetic oligonucleotide
ccgccccaccggcgcccgatgctaactgcc

SEQ ID NO: 378208 - DNA, 30 bp, Artificial Sequence
  Synthetic oligonucleotide
tgcgcggagaagtaggggccccacactgcc

SEQ ID NO: 378209 - DNA, 30 bp, Artificial Sequence
  Synthetic oligonucleotide
attggaccatttattcccaagtacactgcc

SEQ ID NO: 378210 - DNA, 30 bp, Artificial Sequence
  Synthetic oligonucleotide
gcaacggtaggggacttgttaaagactgcc

SEQ ID NO: 378211 - DNA, 30 bp, Artificial Sequence
  Synthetic oligonucleotide
tactctcgccagtacgtccagtcgactgcc

SEQ ID NO: 378212 - DNA, 30 bp, Artificial Sequence
  Synthetic oligonucleotide
caaacacatccactttggatttcgactgcc

SEQ ID NO: 378213 - DNA, 30 bp, Artificial Sequence
  Synthetic oligonucleotide
atcgggccgaaccctagctatatgactgcc

SEQ ID NO: 378214 - DNA, 30 bp, Artificial Sequence
  Synthetic oligonucleotide
aactacgctcagcgacgctaaaatactgcc

SEQ ID NO: 378215 - DNA, 30 bp, Artificial Sequence
  Synthetic oligonucleotide
ctacaaaggttatcaggcctcacacctgcc

SEQ ID NO: 378216 - DNA, 29 bp, Artificial Sequence
  Synthetic oligonucleotide
atgtctccggtaacggcgccgtacctgcc

SEQ ID NO: 378217 - DNA, 30 bp, Artificial Sequence
  Synthetic oligonucleotide
tcacggagagtttttccaccattacctgcc

SEQ ID NO: 378218 - DNA, 30 bp, Artificial Sequence
  Synthetic oligonucleotide
gtccgtttccgacagagggcgctccctgcc

SEQ ID NO: 378219 - DNA, 30 bp, Artificial Sequence
  Synthetic oligonucleotide
tagaggaaaagaaatgatgcagcgcctgcc

SEQ ID NO: 378220 - DNA, 30 bp, Artificial Sequence
  Synthetic oligonucleotide
tgcaggtactgcgtaattttcgcgcctgcc

SEQ ID NO: 378221 - DNA, 30 bp, Artificial Sequence
  Synthetic oligonucleotide
atcggtgtggggtacggcagatgtcctgcc

SEQ ID NO: 378222 - DNA, 30 bp, Artificial Sequence
  Synthetic oligonucleotide
ccttggagaacagttcccgccaactctgcc

SEQ ID NO: 378223 - DNA, 30 bp, Artificial Sequence
  Synthetic oligonucleotide
gaacctatgaatggctttatgaactctgcc

SEQ ID NO: 378224 - DNA, 30 bp, Artificial Sequence
  Synthetic oligonucleotide
gcgcataaagtattgtttggaccgtctgcc

SEQ ID NO: 378225 - DNA, 30 bp, Artificial Sequence
  Synthetic oligonucleotide
ttccagatttcttcgagctcgcggtctgcc

SEQ ID NO: 378226 - DNA, 30 bp, Artificial Sequence
  Synthetic oligonucleotide
acgtgacagaaattttaacagccttctgcc

SEQ ID NO: 378227 - DNA, 30 bp, Artificial Sequence
  Synthetic oligonucleotide
ccagactatcgatggcagacgacaagtgcc

SEQ ID NO: 378228 - DNA, 30 bp, Artificial Sequence
  Synthetic oligonucleotide
gacccgtaataccagtatacacgcagtgcc

SEQ ID NO: 378229 - DNA, 30 bp, Artificial Sequence
  Synthetic oligonucleotide
tatgtcattcggcgggctccccctagtgcc

SEQ ID NO: 378230 - DNA, 30 bp, Artificial Sequence
  Synthetic oligonucleotide
aatagggtataagaagggtaagctagtgcc

SEQ ID NO: 378231 - DNA, 30 bp, Artificial Sequence
  Synthetic oligonucleotide
tcaccatgtgccatggcggcttttagtgcc

SEQ ID NO: 378232 - DNA, 30 bp, Artificial Sequence
  Synthetic oligonucleotide
atacttgggagctctagatgaacacgtgcc

SEQ ID NO: 378233 - DNA, 30 bp, Artificial Sequence
  Synthetic oligonucleotide
aatcgaccgcttaatatgcgtacacgtgcc

SEQ ID NO: 378234 - DNA, 30 bp, Artificial Sequence
  Synthetic oligonucleotide
acacgcgtgatgttccaatgtagccgtgcc

SEQ ID NO: 378235 - DNA, 30 bp, Artificial Sequence
  Synthetic oligonucleotide
ggtacctgtcaccctcacactacgcgtgcc

SEQ ID NO: 378236 - DNA, 30 bp, Artificial Sequence
  Synthetic oligonucleotide
gaaccgttggcagacggggcgttgcgtgcc

SEQ ID NO: 378237 - DNA, 30 bp, Artificial Sequence
  Synthetic oligonucleotide
gaggtacttggtaccaaacgttatcgtgcc

SEQ ID NO: 378238 - DNA, 30 bp, Artificial Sequence
  Synthetic oligonucleotide
cgattgacctaacgctcagaaattcgtgcc

SEQ ID NO: 378239 - DNA, 30 bp, Artificial Sequence
  Synthetic oligonucleotide
acaggagcatgatcaaagcactttcgtgcc

SEQ ID NO: 378240 - DNA, 30 bp, Artificial Sequence
  Synthetic oligonucleotide
ggcccgctcagtcagcctgattgaggtgcc

SEQ ID NO: 378241 - DNA, 30 bp, Artificial Sequence
  Synthetic oligonucleotide
gttggtctgcgttgcacgatgcacggtgcc

SEQ ID NO: 378242 - DNA, 30 bp, Artificial Sequence
  Synthetic oligonucleotide
gccacttatcgagtcgaggatcacggtgcc

SEQ ID NO: 378243 - DNA, 30 bp, Artificial Sequence
  Synthetic oligonucleotide
ctggagacctagaaactttgagtcggtgcc

SEQ ID NO: 378244 - DNA, 30 bp, Artificial Sequence
  Synthetic oligonucleotide
gcccgtgaatctctatctagaacgggtgcc

SEQ ID NO: 378245 - DNA, 30 bp, Artificial Sequence
  Synthetic oligonucleotide
gaggccatgcaaactcggcgcccgggtgcc

SEQ ID NO: 378246 - DNA, 30 bp, Artificial Sequence
  Synthetic oligonucleotide
gtagtattatttctgtggggcgatggtgcc

SEQ ID NO: 378247 - DNA, 30 bp, Artificial Sequence
  Synthetic oligonucleotide
cagacgtattcaatcgcaatgtgatgtgcc

SEQ ID NO: 378248 - DNA, 30 bp, Artificial Sequence
  Synthetic oligonucleotide
gcagttagcctcgccgcagtcctatgtgcc

SEQ ID NO: 378249 - DNA, 30 bp, Artificial Sequence
  Synthetic oligonucleotide
gggctccgtctgggacctaacaactgtgcc

SEQ ID NO: 378250 - DNA, 30 bp, Artificial Sequence
  Synthetic oligonucleotide
tagtcctgctccttgtccatctcttgtgcc

SEQ ID NO: 378251 - DNA, 30 bp, Artificial Sequence
  Synthetic oligonucleotide
actgagagcaatctcttgtcgacaattgcc

SEQ ID NO: 378252 - DNA, 30 bp, Artificial Sequence
  Synthetic oligonucleotide
cacacatactccctcgagcgcaacattgcc

SEQ ID NO: 378253 - DNA, 30 bp, Artificial Sequence
  Synthetic oligonucleotide
cctgtcatgtacgctcagagccttattgcc

SEQ ID NO: 378254 - DNA, 30 bp, Artificial Sequence
  Synthetic oligonucleotide
caagcctgttagaggaagctgccacttgcc

SEQ ID NO: 378255 - DNA, 30 bp, Artificial Sequence
  Synthetic oligonucleotide
actaccgggctcagcggatcgcgccttgcc

SEQ ID NO: 378256 - DNA, 30 bp, Artificial Sequence
  Synthetic oligonucleotide
cgtcaggcgggatcagccactacgcttgcc

SEQ ID NO: 378257 - DNA, 30 bp, Artificial Sequence
  Synthetic oligonucleotide
gtgataaattagaaacatcgctcgcttgcc

SEQ ID NO: 378258 - DNA, 30 bp, Artificial Sequence
  Synthetic oligonucleotide
ggattacggaaggtgcgtatacatcttgcc

SEQ ID NO: 378259 - DNA, 30 bp, Artificial Sequence
  Synthetic oligonucleotide
ctgagcatagaaaccaggtagcctcttgcc

SEQ ID NO: 378260 - DNA, 30 bp, Artificial Sequence
  Synthetic oligonucleotide
gggtatgcttggaccattgttaaagttgcc

SEQ ID NO: 378261 - DNA, 30 bp, Artificial Sequence
  Synthetic oligonucleotide
tcgaggcaacgaaataggcgttcagttgcc

SEQ ID NO: 378262 - DNA, 30 bp, Artificial Sequence
  Synthetic oligonucleotide
ataatccttcagcgcggcggaagcgttgcc

SEQ ID NO: 378263 - DNA, 30 bp, Artificial Sequence
  Synthetic oligonucleotide
tagggaggtgtgggcagagctattgttgcc

SEQ ID NO: 378264 - DNA, 30 bp, Artificial Sequence
  Synthetic oligonucleotide
tggggcagctgtagataagtgtgttttgcc

SEQ ID NO: 378265 - DNA, 30 bp, Artificial Sequence
  Synthetic oligonucleotide
tttcatcgatggtctgcccgattaaaatcc

SEQ ID NO: 378266 - DNA, 30 bp, Artificial Sequence
  Synthetic oligonucleotide
atatataaagtcctggcactcgacaaatcc

SEQ ID NO: 378267 - DNA, 30 bp, Artificial Sequence
  Synthetic oligonucleotide
acattctgtattagcgtcgaaaccaaatcc

SEQ ID NO: 378268 - DNA, 30 bp, Artificial Sequence
  Synthetic oligonucleotide
tgcgccaaggagtaccccccgagcaaatcc

SEQ ID NO: 378269 - DNA, 30 bp, Artificial Sequence
  Synthetic oligonucleotide
cccggtctgtgttaaagcgtggggaaatcc

SEQ ID NO: 378270 - DNA, 30 bp, Artificial Sequence
  Synthetic oligonucleotide
aggtcaatggtaatagacgatatgaaatcc

SEQ ID NO: 378271 - DNA, 30 bp, Artificial Sequence
  Synthetic oligonucleotide
gcttgaggtcagaaggagcaattgaaatcc

SEQ ID NO: 378272 - DNA, 30 bp, Artificial Sequence
  Synthetic oligonucleotide
tggataaaattagaatctcatttgaaatcc

SEQ ID NO: 378273 - DNA, 30 bp, Artificial Sequence
  Synthetic oligonucleotide
gctggcagccgagggtgaatctgacaatcc

SEQ ID NO: 378274 - DNA, 30 bp, Artificial Sequence
  Synthetic oligonucleotide
gtgaagtccgccaaccctgatgaccaatcc

SEQ ID NO: 378275 - DNA, 30 bp, Artificial Sequence
  Synthetic oligonucleotide
gactaagctgagcggacacacggccaatcc

SEQ ID NO: 378276 - DNA, 30 bp, Artificial Sequence
  Synthetic oligonucleotide
ttttgctcttgggacaacaaagcgcaatcc

SEQ ID NO: 378277 - DNA, 30 bp, Artificial Sequence
  Synthetic oligonucleotide
aggggatcacgacattaggaaaggcaatcc

SEQ ID NO: 378278 - DNA, 30 bp, Artificial Sequence
  Synthetic oligonucleotide
cttctctaagacccgtccactttgcaatcc

SEQ ID NO: 378279 - DNA, 30 bp, Artificial Sequence
  Synthetic oligonucleotide
gttctctgcggaccgtagaagaaagaatcc

SEQ ID NO: 378280 - DNA, 30 bp, Artificial Sequence
  Synthetic oligonucleotide
gtaaggcgactaatcaattttgaagaatcc

SEQ ID NO: 378281 - DNA, 30 bp, Artificial Sequence
  Synthetic oligonucleotide
ctatacaaataacatgtgcccaacgaatcc

SEQ ID NO: 378282 - DNA, 30 bp, Artificial Sequence
  Synthetic oligonucleotide
agctatcggtacttctattcagccgaatcc

SEQ ID NO: 378283 - DNA, 30 bp, Artificial Sequence
  Synthetic oligonucleotide
cgccagaactcgaaaagagatccggaatcc

SEQ ID NO: 378284 - DNA, 30 bp, Artificial Sequence
  Synthetic oligonucleotide
atgcgggactagtccaactgcttggaatcc

SEQ ID NO: 378285 - DNA, 30 bp, Artificial Sequence
  Synthetic oligonucleotide
agtagataacattcgcacagccatgaatcc

SEQ ID NO: 378286 - DNA, 30 bp, Artificial Sequence
  Synthetic oligonucleotide
gaaacttttcaccgaccggtaactgaatcc

SEQ ID NO: 378287 - DNA, 30 bp, Artificial Sequence
  Synthetic oligonucleotide
aagtcgacattcccagggacggctgaatcc

SEQ ID NO: 378288 - DNA, 30 bp, Artificial Sequence
  Synthetic oligonucleotide
tgcacctcaattttagcttatgaataatcc

SEQ ID NO: 378289 - DNA, 30 bp, Artificial Sequence
  Synthetic oligonucleotide
taccggtaatacggtaatgggtcataatcc

SEQ ID NO: 378290 - DNA, 30 bp, Artificial Sequence
  Synthetic oligonucleotide
gattcagagagtcatggcccaatataatcc

SEQ ID NO: 378291 - DNA, 30 bp, Artificial Sequence
  Synthetic oligonucleotide
cacggacgggcctggtgccgtcactaatcc

SEQ ID NO: 378292 - DNA, 30 bp, Artificial Sequence
  Synthetic oligonucleotide
ttatcgagagttttgaacttagtctaatcc

SEQ ID NO: 378293 - DNA, 30 bp, Artificial Sequence
  Synthetic oligonucleotide
tcgcagccggaaggcagtcgacagtaatcc

SEQ ID NO: 378294 - DNA, 30 bp, Artificial Sequence
  Synthetic oligonucleotide
tgtaatggccactcaattggctattaatcc

SEQ ID NO: 378295 - DNA, 30 bp, Artificial Sequence
  Synthetic oligonucleotide
gattggagcccggagcgcaggcgaacatcc

SEQ ID NO: 378296 - DNA, 30 bp, Artificial Sequence
  Synthetic oligonucleotide
tgacgacaataaccatccttagggacatcc

SEQ ID NO: 378297 - DNA, 30 bp, Artificial Sequence
  Synthetic oligonucleotide
aaagccggtaattctgaggtggatacatcc

SEQ ID NO: 378298 - DNA, 30 bp, Artificial Sequence
  Synthetic oligonucleotide
cccaactcctaggtcttcggctcgccatcc

SEQ ID NO: 378299 - DNA, 30 bp, Artificial Sequence
  Synthetic oligonucleotide
gggtggctatcaatttccttataagcatcc

SEQ ID NO: 378300 - DNA, 30 bp, Artificial Sequence
  Synthetic oligonucleotide
gagcgcaacaagagacggtgtgtcgcatcc

SEQ ID NO: 378301 - DNA, 30 bp, Artificial Sequence
  Synthetic oligonucleotide
cccgtatatcagtaccgctcaaaatcatcc

SEQ ID NO: 378302 - DNA, 30 bp, Artificial Sequence
  Synthetic oligonucleotide
catgatagaggcatttccctagcctcatcc

SEQ ID NO: 378303 - DNA, 30 bp, Artificial Sequence
  Synthetic oligonucleotide
ggctggagtggccatacattcgcctcatcc

SEQ ID NO: 378304 - DNA, 30 bp, Artificial Sequence
  Synthetic oligonucleotide
ttcaattggaggaacttggggcggtcatcc

SEQ ID NO: 378305 - DNA, 30 bp, Artificial Sequence
  Synthetic oligonucleotide
attccactggccaggatggttgggtcatcc

SEQ ID NO: 378306 - DNA, 30 bp, Artificial Sequence
  Synthetic oligonucleotide
taggaagtttattcgctataatcttcatcc

SEQ ID NO: 378307 - DNA, 30 bp, Artificial Sequence
  Synthetic oligonucleotide
ttctatggcaaacacggcttatcttcatcc

SEQ ID NO: 378308 - DNA, 30 bp, Artificial Sequence
  Synthetic oligonucleotide
caaagatatgttatctctcgaggttcatcc

SEQ ID NO: 378309 - DNA, 30 bp, Artificial Sequence
  Synthetic oligonucleotide
gcgccgtgactttgaagggccatttcatcc

SEQ ID NO: 378310 - DNA, 30 bp, Artificial Sequence
  Synthetic oligonucleotide
tcatttgcctgccatccagattcaagatcc

SEQ ID NO: 378311 - DNA, 30 bp, Artificial Sequence
  Synthetic oligonucleotide
gtctcgccatctactccagtggtaagatcc

SEQ ID NO: 378312 - DNA, 30 bp, Artificial Sequence
  Synthetic oligonucleotide
gattgagtagttgacaggctgtccagatcc

SEQ ID NO: 378313 - DNA, 30 bp, Artificial Sequence
  Synthetic oligonucleotide
aattcaggaggatcactagaattcagatcc

SEQ ID NO: 378314 - DNA, 30 bp, Artificial Sequence
  Synthetic oligonucleotide
aggtcttaaagatactcagcagggagatcc

SEQ ID NO: 378315 - DNA, 30 bp, Artificial Sequence
  Synthetic oligonucleotide
cttatatagtcatgggcaattgatagatcc

SEQ ID NO: 378316 - DNA, 30 bp, Artificial Sequence
  Synthetic oligonucleotide
ggagttaccgcgcaagcagaaaaacgatcc

SEQ ID NO: 378317 - DNA, 30 bp, Artificial Sequence
  Synthetic oligonucleotide
ttaagatctcggaacgagataacccgatcc

SEQ ID NO: 378318 - DNA, 30 bp, Artificial Sequence
  Synthetic oligonucleotide
ggtacatataaggtaagctggtagcgatcc

SEQ ID NO: 378319 - DNA, 30 bp, Artificial Sequence
  Synthetic oligonucleotide
aatcaaacgtgggtcgtatcagcgcgatcc

SEQ ID NO: 378320 - DNA, 30 bp, Artificial Sequence
  Synthetic oligonucleotide
ccgggccctgcagaacccctctcgcgatcc

SEQ ID NO: 378321 - DNA, 30 bp, Artificial Sequence
  Synthetic oligonucleotide
atcgaatacttcacctgctagtttcgatcc

SEQ ID NO: 378322 - DNA, 30 bp, Artificial Sequence
  Synthetic oligonucleotide
ttgggtgtcttgcattcgcacttaggatcc

SEQ ID NO: 378323 - DNA, 30 bp, Artificial Sequence
  Synthetic oligonucleotide
ggtctacggacgtcctcgtaaaacggatcc

SEQ ID NO: 378324 - DNA, 30 bp, Artificial Sequence
  Synthetic oligonucleotide
aataacggtgccgaaaccatttgcggatcc

SEQ ID NO: 378325 - DNA, 31 bp, Artificial Sequence
  Synthetic oligonucleotide
ttggagcaatcgggttggggtacagggatcc

SEQ ID NO: 378326 - DNA, 30 bp, Artificial Sequence
  Synthetic oligonucleotide
gaaagctgaatgtaaataggaacatgatcc

SEQ ID NO: 378327 - DNA, 30 bp, Artificial Sequence
  Synthetic oligonucleotide
gcggacgtgcggtagaaagacccatgatcc

SEQ ID NO: 378328 - DNA, 30 bp, Artificial Sequence
  Synthetic oligonucleotide
tctagactacgtgacgcggtattatgatcc

SEQ ID NO: 378329 - DNA, 30 bp, Artificial Sequence
  Synthetic oligonucleotide
gacgccaggctcggcgagctatgctgatcc

SEQ ID NO: 378330 - DNA, 30 bp, Artificial Sequence
  Synthetic oligonucleotide
tggtgtcgtgaaggatggctttgttgatcc

SEQ ID NO: 378331 - DNA, 30 bp, Artificial Sequence
  Synthetic oligonucleotide
tggaggttacttcaagaccggagaatatcc

SEQ ID NO: 378332 - DNA, 30 bp, Artificial Sequence
  Synthetic oligonucleotide
cagcttccctttcttgctctgttaatatcc

SEQ ID NO: 378333 - DNA, 30 bp, Artificial Sequence
  Synthetic oligonucleotide
atcattacaggagacgtagaagggatatcc

SEQ ID NO: 378334 - DNA, 30 bp, Artificial Sequence
  Synthetic oligonucleotide
caacatatgttgttattaagtgtgatatcc

SEQ ID NO: 378335 - DNA, 30 bp, Artificial Sequence
  Synthetic oligonucleotide
ctctgctttaaaggtcaaaggcatatatcc

SEQ ID NO: 378336 - DNA, 30 bp, Artificial Sequence
  Synthetic oligonucleotide
tactctagccgggcaagggtgtgactatcc

SEQ ID NO: 378337 - DNA, 30 bp, Artificial Sequence
  Synthetic oligonucleotide
ttcacccattctttccgctctttactatcc

SEQ ID NO: 378338 - DNA, 30 bp, Artificial Sequence
  Synthetic oligonucleotide
gtctggacagttgagagtatgaatctatcc

SEQ ID NO: 378339 - DNA, 30 bp, Artificial Sequence
  Synthetic oligonucleotide
tggacgtaatgggcaatgatttctctatcc

SEQ ID NO: 378340 - DNA, 30 bp, Artificial Sequence
  Synthetic oligonucleotide
tattgtttgttctccagcgaagcagtatcc

SEQ ID NO: 378341 - DNA, 30 bp, Artificial Sequence
  Synthetic oligonucleotide
gagcacgtcgagcactatctcggcgtatcc

SEQ ID NO: 378342 - DNA, 30 bp, Artificial Sequence
  Synthetic oligonucleotide
ggtcaatcgttctcagctatatgcgtatcc

SEQ ID NO: 378343 - DNA, 30 bp, Artificial Sequence
  Synthetic oligonucleotide
caaaactgaaaagcgaccgtgtgcgtatcc

SEQ ID NO: 378344 - DNA, 30 bp, Artificial Sequence
  Synthetic oligonucleotide
tcgcattcgtctcggctggctttcgtatcc

SEQ ID NO: 378345 - DNA, 30 bp, Artificial Sequence
  Synthetic oligonucleotide
tggcattgcgcaatcttatgattggtatcc

SEQ ID NO: 378346 - DNA, 30 bp, Artificial Sequence
  Synthetic oligonucleotide
attgaactcggagctacacaacatgtatcc

SEQ ID NO: 378347 - DNA, 30 bp, Artificial Sequence
  Synthetic oligonucleotide
gcggaagacctggtaatgaacgttgtatcc

SEQ ID NO: 378348 - DNA, 30 bp, Artificial Sequence
  Synthetic oligonucleotide
gttggatatttgaaattcccggttgtatcc

SEQ ID NO: 378349 - DNA, 30 bp, Artificial Sequence
  Synthetic oligonucleotide
agaaggtggatacacacagaggaattatcc

SEQ ID NO: 378350 - DNA, 30 bp, Artificial Sequence
  Synthetic oligonucleotide
gcggatttgaaggtttcatcatagttatcc

SEQ ID NO: 378351 - DNA, 30 bp, Artificial Sequence
  Synthetic oligonucleotide
cagacgaactgattcacagttaggttatcc

SEQ ID NO: 378352 - DNA, 30 bp, Artificial Sequence
  Synthetic oligonucleotide
gcgccacgccttcaaccacgggtgttatcc

SEQ ID NO: 378353 - DNA, 30 bp, Artificial Sequence
  Synthetic oligonucleotide
gcttaagcagacgatgcaagattgttatcc

SEQ ID NO: 378354 - DNA, 30 bp, Artificial Sequence
  Synthetic oligonucleotide
ataggcattcggttgatatggtctttatcc

SEQ ID NO: 378355 - DNA, 30 bp, Artificial Sequence
  Synthetic oligonucleotide
aactaccggtagacgggtattagtttatcc

SEQ ID NO: 378356 - DNA, 30 bp, Artificial Sequence
  Synthetic oligonucleotide
gggctaccgggctacaccagcggtttatcc

SEQ ID NO: 378357 - DNA, 30 bp, Artificial Sequence
  Synthetic oligonucleotide
atgtgaaaccttgcacttggcattttatcc

SEQ ID NO: 378358 - DNA, 30 bp, Artificial Sequence
  Synthetic oligonucleotide
gatgagaaaagtaggtatttggttttatcc

SEQ ID NO: 378359 - DNA, 30 bp, Artificial Sequence
  Synthetic oligonucleotide
tatagagtgcttctccacaaagcgaactcc

SEQ ID NO: 378360 - DNA, 30 bp, Artificial Sequence
  Synthetic oligonucleotide
actatagatagactgcgcaagaataactcc

SEQ ID NO: 378361 - DNA, 30 bp, Artificial Sequence
  Synthetic oligonucleotide
tactccctgataactgcccttgataactcc

SEQ ID NO: 378362 - DNA, 30 bp, Artificial Sequence
  Synthetic oligonucleotide
aaagatgcagtgtcacaatggattaactcc

SEQ ID NO: 378363 - DNA, 30 bp, Artificial Sequence
  Synthetic oligonucleotide
ataggggtacagaagaggctgcttaactcc

SEQ ID NO: 378364 - DNA, 30 bp, Artificial Sequence
  Synthetic oligonucleotide
atcattcgccgcgtttctagcccacactcc

SEQ ID NO: 378365 - DNA, 30 bp, Artificial Sequence
  Synthetic oligonucleotide
aggccgcgtcctgacttatatcggcactcc

SEQ ID NO: 378366 - DNA, 30 bp, Artificial Sequence
  Synthetic oligonucleotide
ttgcagcttcagtacgtgaatgggcactcc

SEQ ID NO: 378367 - DNA, 30 bp, Artificial Sequence
  Synthetic oligonucleotide
tctagaggaatgctactacggtatcactcc

SEQ ID NO: 378368 - DNA, 30 bp, Artificial Sequence
  Synthetic oligonucleotide
gaaaggaaattaatttttgattgcgactcc

SEQ ID NO: 378369 - DNA, 30 bp, Artificial Sequence
  Synthetic oligonucleotide
accgagccctaaagacggatagcggactcc

SEQ ID NO: 378370 - DNA, 30 bp, Artificial Sequence
  Synthetic oligonucleotide
atcttcatgataggattgcgcttggactcc

SEQ ID NO: 378371 - DNA, 31 bp, Artificial Sequence
  Synthetic oligonucleotide
ttaaatgtgacctccggcggagtgctactcc

SEQ ID NO: 378372 - DNA, 30 bp, Artificial Sequence
  Synthetic oligonucleotide
aagtctggccgacctttcgcaatctactcc

SEQ ID NO: 378373 - DNA, 30 bp, Artificial Sequence
  Synthetic oligonucleotide
tcgcggtggccataggagtttaggtactcc

SEQ ID NO: 378374 - DNA, 30 bp, Artificial Sequence
  Synthetic oligonucleotide
agttctatggtaaaaatgtttcggtactcc

SEQ ID NO: 378375 - DNA, 30 bp, Artificial Sequence
  Synthetic oligonucleotide
atggatcgctctagcagtgaacattactcc

SEQ ID NO: 378376 - DNA, 30 bp, Artificial Sequence
  Synthetic oligonucleotide
caaaatgggcggtggttaacgaacacctcc

SEQ ID NO: 378377 - DNA, 30 bp, Artificial Sequence
  Synthetic oligonucleotide
gtcacctgatcggctaatttagacacctcc

SEQ ID NO: 378378 - DNA, 30 bp, Artificial Sequence
  Synthetic oligonucleotide
gggttatgagcttaataactcgggacctcc

SEQ ID NO: 378379 - DNA, 30 bp, Artificial Sequence
  Synthetic oligonucleotide
ggaataaaggggccgaatattgggacctcc

SEQ ID NO: 378380 - DNA, 30 bp, Artificial Sequence
  Synthetic oligonucleotide
cgatcgccggcctcaggattacatacctcc

SEQ ID NO: 378381 - DNA, 30 bp, Artificial Sequence
  Synthetic oligonucleotide
tcagtattgcaggttggtacggttacctcc

SEQ ID NO: 378382 - DNA, 30 bp, Artificial Sequence
  Synthetic oligonucleotide
caggcacatgagagggcaactggaccctcc

SEQ ID NO: 378383 - DNA, 30 bp, Artificial Sequence
  Synthetic oligonucleotide
aaatatagtacacgtagtaaagagccctcc

SEQ ID NO: 378384 - DNA, 30 bp, Artificial Sequence
  Synthetic oligonucleotide
taggaccatctgttttcatatccgccctcc

SEQ ID NO: 378385 - DNA, 30 bp, Artificial Sequence
  Synthetic oligonucleotide
ctgacactcgactgtgacctggcgccctcc

SEQ ID NO: 378386 - DNA, 30 bp, Artificial Sequence
  Synthetic oligonucleotide
cacctaacatgtcgtcttccgactccctcc

SEQ ID NO: 378387 - DNA, 30 bp, Artificial Sequence
  Synthetic oligonucleotide
tgatagctgaccagggtgcttcgtccctcc

SEQ ID NO: 378388 - DNA, 30 bp, Artificial Sequence
  Synthetic oligonucleotide
gatcttcctatacttaggaataaagcctcc

SEQ ID NO: 378389 - DNA, 30 bp, Artificial Sequence
  Synthetic oligonucleotide
acggcaggcgaggcatgcccgatggcctcc

SEQ ID NO: 378390 - DNA, 30 bp, Artificial Sequence
  Synthetic oligonucleotide
tcaagatctacgggctgtatccgtgcctcc

SEQ ID NO: 378391 - DNA, 30 bp, Artificial Sequence
  Synthetic oligonucleotide
gcaatgagcgtttcgtaagaaggtgcctcc

SEQ ID NO: 378392 - DNA, 30 bp, Artificial Sequence
  Synthetic oligonucleotide
cccatcatatgtacacacgtctgatcctcc

SEQ ID NO: 378393 - DNA, 30 bp, Artificial Sequence
  Synthetic oligonucleotide
tgcgtcagccaggcttggcgggtatcctcc

SEQ ID NO: 378394 - DNA, 30 bp, Artificial Sequence
  Synthetic oligonucleotide
aaggagattataggctagataaactcctcc

SEQ ID NO: 378395 - DNA, 30 bp, Artificial Sequence
  Synthetic oligonucleotide
ttcgactgaacaccgtatctcagctcctcc

SEQ ID NO: 378396 - DNA, 30 bp, Artificial Sequence
  Synthetic oligonucleotide
taaaggcacaagggaactccggtctcctcc

SEQ ID NO: 378397 - DNA, 30 bp, Artificial Sequence
  Synthetic oligonucleotide
gactttaaacccgaggctacactgtcctcc

SEQ ID NO: 378398 - DNA, 30 bp, Artificial Sequence
  Synthetic oligonucleotide
tcatatgcttggatcagcatttgttcctcc

SEQ ID NO: 378399 - DNA, 30 bp, Artificial Sequence
  Synthetic oligonucleotide
caaaggagcgtttgtaattgtcggagctcc

SEQ ID NO: 378400 - DNA, 31 bp, Artificial Sequence
  Synthetic oligonucleotide
gttccaaatagtgtaatataccctgagctcc

SEQ ID NO: 378401 - DNA, 30 bp, Artificial Sequence
  Synthetic oligonucleotide
tcctaagctgctttctgtcgtcatagctcc

SEQ ID NO: 378402 - DNA, 30 bp, Artificial Sequence
  Synthetic oligonucleotide
ttaaattaggacatacaggcttatagctcc

SEQ ID NO: 378403 - DNA, 30 bp, Artificial Sequence
  Synthetic oligonucleotide
aaagctgttgggaatagctcccttagctcc

SEQ ID NO: 378404 - DNA, 30 bp, Artificial Sequence
  Synthetic oligonucleotide
ccaagagggcatttgcgttggcaacgctcc

SEQ ID NO: 378405 - DNA, 30 bp, Artificial Sequence
  Synthetic oligonucleotide
taagcatatttggtaatgcatctgcgctcc

SEQ ID NO: 378406 - DNA, 30 bp, Artificial Sequence
  Synthetic oligonucleotide
acaccaatgtatattccggctactcgctcc

SEQ ID NO: 378407 - DNA, 30 bp, Artificial Sequence
  Synthetic oligonucleotide
tctgcagcgaggtcctaaacgggcggctcc

SEQ ID NO: 378408 - DNA, 30 bp, Artificial Sequence
  Synthetic oligonucleotide
gacgccgactaccttgagtccaagggctcc

SEQ ID NO: 378409 - DNA, 30 bp, Artificial Sequence
  Synthetic oligonucleotide
gtgtagctatcattcagtcgcaagggctcc

SEQ ID NO: 378410 - DNA, 30 bp, Artificial Sequence
  Synthetic oligonucleotide
acagatttgggcgtgtgctgcacgggctcc

SEQ ID NO: 378411 - DNA, 30 bp, Artificial Sequence
  Synthetic oligonucleotide
ttttattaaggttctgtgtgatcctgctcc

SEQ ID NO: 378412 - DNA, 30 bp, Artificial Sequence
  Synthetic oligonucleotide
ctttgtcgggaaataactagcgtctgctcc

SEQ ID NO: 378413 - DNA, 30 bp, Artificial Sequence
  Synthetic oligonucleotide
ttgtatctgtaatctgcctcgggtctctcc

SEQ ID NO: 378414 - DNA, 30 bp, Artificial Sequence
  Synthetic oligonucleotide
attaaaacggggaaagcttatggtctctcc

SEQ ID NO: 378415 - DNA, 30 bp, Artificial Sequence
  Synthetic oligonucleotide
aatgatgtaggctgagaactttgagtctcc

SEQ ID NO: 378416 - DNA, 30 bp, Artificial Sequence
  Synthetic oligonucleotide
tgcgagcaaggtagcactataatagtctcc

SEQ ID NO: 378417 - DNA, 30 bp, Artificial Sequence
  Synthetic oligonucleotide
gggcggctgtgcagctatcgcgtggtctcc

SEQ ID NO: 378418 - DNA, 30 bp, Artificial Sequence
  Synthetic oligonucleotide
tcatgccacgcaatgaaaggttcattctcc

SEQ ID NO: 378419 - DNA, 30 bp, Artificial Sequence
  Synthetic oligonucleotide
aattcgggactttcggtcttaaggttctcc

SEQ ID NO: 378420 - DNA, 30 bp, Artificial Sequence
  Synthetic oligonucleotide
gcagagtttacttgtgctgttccaaagtcc

SEQ ID NO: 378421 - DNA, 30 bp, Artificial Sequence
  Synthetic oligonucleotide
gaagcaactatggaccaaaccgcaaagtcc

SEQ ID NO: 378422 - DNA, 30 bp, Artificial Sequence
  Synthetic oligonucleotide
ctacctgatacagataaaaaattcaagtcc

SEQ ID NO: 378423 - DNA, 30 bp, Artificial Sequence
  Synthetic oligonucleotide
atcttcatttccccagaaatcgtacagtcc

SEQ ID NO: 378424 - DNA, 30 bp, Artificial Sequence
  Synthetic oligonucleotide
acaactacttaataggcggaacagcagtcc

SEQ ID NO: 378425 - DNA, 30 bp, Artificial Sequence
  Synthetic oligonucleotide
acaggaacggaactccggctaaggcagtcc

SEQ ID NO: 378426 - DNA, 30 bp, Artificial Sequence
  Synthetic oligonucleotide
gttacacgtttaccaactacagggcagtcc

SEQ ID NO: 378427 - DNA, 30 bp, Artificial Sequence
  Synthetic oligonucleotide
ctctcgtaccgacattataacatgcagtcc

SEQ ID NO: 378428 - DNA, 30 bp, Artificial Sequence
  Synthetic oligonucleotide
acataaggcacaggtcattgttctcagtcc

SEQ ID NO: 378429 - DNA, 30 bp, Artificial Sequence
  Synthetic oligonucleotide
gtcataatgtcgctacgcggaaaagagtcc

SEQ ID NO: 378430 - DNA, 30 bp, Artificial Sequence
  Synthetic oligonucleotide
ttctcaacatccggagcatgtgaagagtcc

SEQ ID NO: 378431 - DNA, 30 bp, Artificial Sequence
  Synthetic oligonucleotide
atttgggcgccattctttctgatagagtcc

SEQ ID NO: 378432 - DNA, 30 bp, Artificial Sequence
  Synthetic oligonucleotide
aaataggtgattccatcttatcaggagtcc

SEQ ID NO: 378433 - DNA, 30 bp, Artificial Sequence
  Synthetic oligonucleotide
tttatagtaaagggggaattaacggagtcc

SEQ ID NO: 378434 - DNA, 30 bp, Artificial Sequence
  Synthetic oligonucleotide
caaactaccgtatggtaaataccggagtcc

SEQ ID NO: 378435 - DNA, 30 bp, Artificial Sequence
  Synthetic oligonucleotide
ttcaaacagtggatagggtactcggagtcc

SEQ ID NO: 378436 - DNA, 30 bp, Artificial Sequence
  Synthetic oligonucleotide
aaggtattgctagaaagaagttctgagtcc

SEQ ID NO: 378437 - DNA, 30 bp, Artificial Sequence
  Synthetic oligonucleotide
gtagttcagtagacggaagtattctagtcc

SEQ ID NO: 378438 - DNA, 30 bp, Artificial Sequence
  Synthetic oligonucleotide
cggttattcccttgctggaggtagtagtcc

SEQ ID NO: 378439 - DNA, 30 bp, Artificial Sequence
  Synthetic oligonucleotide
ggctaagtgttgccagggctgccttagtcc

SEQ ID NO: 378440 - DNA, 30 bp, Artificial Sequence
  Synthetic oligonucleotide
ctagtactacccaaccggatactttagtcc

SEQ ID NO: 378441 - DNA, 30 bp, Artificial Sequence
  Synthetic oligonucleotide
cataagggagctagcccttttataacgtcc

SEQ ID NO: 378442 - DNA, 30 bp, Artificial Sequence
  Synthetic oligonucleotide
agcaaaagcgtgcccctcaatatcacgtcc

SEQ ID NO: 378443 - DNA, 30 bp, Artificial Sequence
  Synthetic oligonucleotide
tggcatagagcgttcaacccttagacgtcc

SEQ ID NO: 378444 - DNA, 30 bp, Artificial Sequence
  Synthetic oligonucleotide
ggggttaagtccttacgtctaaggacgtcc

SEQ ID NO: 378445 - DNA, 30 bp, Artificial Sequence
  Synthetic oligonucleotide
gaatggttcgtagtgatattcgggacgtcc

SEQ ID NO: 378446 - DNA, 30 bp, Artificial Sequence
  Synthetic oligonucleotide
tctacaggcgaccatctgaactatacgtcc

SEQ ID NO: 378447 - DNA, 30 bp, Artificial Sequence
  Synthetic oligonucleotide
caggcttacaggaagcgaagttacccgtcc

SEQ ID NO: 378448 - DNA, 30 bp, Artificial Sequence
  Synthetic oligonucleotide
atttcagcacagaactgaattttcccgtcc

SEQ ID NO: 378449 - DNA, 30 bp, Artificial Sequence
  Synthetic oligonucleotide
gtgaaggtagctgtaccggctaagccgtcc

SEQ ID NO: 378450 - DNA, 30 bp, Artificial Sequence
  Synthetic oligonucleotide
gtcctctaggtgtcttctactcaagcgtcc

SEQ ID NO: 378451 - DNA, 30 bp, Artificial Sequence
  Synthetic oligonucleotide
actttcataacgtcaaaatcaggagcgtcc

SEQ ID NO: 378452 - DNA, 30 bp, Artificial Sequence
  Synthetic oligonucleotide
tggattccgaggcttgttagacgcgcgtcc

SEQ ID NO: 378453 - DNA, 30 bp, Artificial Sequence
  Synthetic oligonucleotide
gtttcgtaattttttcggcatttcgcgtcc

SEQ ID NO: 378454 - DNA, 30 bp, Artificial Sequence
  Synthetic oligonucleotide
agtatgagcaagagctgcgtgactgcgtcc

SEQ ID NO: 378455 - DNA, 30 bp, Artificial Sequence
  Synthetic oligonucleotide
gccaagtatagcatctaactataatcgtcc

SEQ ID NO: 378456 - DNA, 30 bp, Artificial Sequence
  Synthetic oligonucleotide
gccgaaaaaagcaggttgcatatatcgtcc

SEQ ID NO: 378457 - DNA, 30 bp, Artificial Sequence
  Synthetic oligonucleotide
ttagtcaggagcacagagtttatctcgtcc

SEQ ID NO: 378458 - DNA, 30 bp, Artificial Sequence
  Synthetic oligonucleotide
gtactcaggagaagtacaggggcttcgtcc

SEQ ID NO: 378459 - DNA, 30 bp, Artificial Sequence
  Synthetic oligonucleotide
tccccgcgatgatcctgatcaatttcgtcc

SEQ ID NO: 378460 - DNA, 30 bp, Artificial Sequence
  Synthetic oligonucleotide
agattgaagtccttcggaggataaaggtcc

SEQ ID NO: 378461 - DNA, 30 bp, Artificial Sequence
  Synthetic oligonucleotide
aacccactaccgaagaccttgacaaggtcc

SEQ ID NO: 378462 - DNA, 30 bp, Artificial Sequence
  Synthetic oligonucleotide
tggcgcgcgcgggtgtcgtcgggcaggtcc

SEQ ID NO: 378463 - DNA, 30 bp, Artificial Sequence
  Synthetic oligonucleotide
ttgttggcatcgtggcgaagttgcaggtcc

SEQ ID NO: 378464 - DNA, 30 bp, Artificial Sequence
  Synthetic oligonucleotide
acaatacttgtaagtcttacactcaggtcc

SEQ ID NO: 378465 - DNA, 30 bp, Artificial Sequence
  Synthetic oligonucleotide
aagacagtatacggaatttggctcaggtcc

SEQ ID NO: 378466 - DNA, 30 bp, Artificial Sequence
  Synthetic oligonucleotide
taagggctcatgcatgccctcacgaggtcc

SEQ ID NO: 378467 - DNA, 30 bp, Artificial Sequence
  Synthetic oligonucleotide
aagttgagtgtagatcaacctccgaggtcc

SEQ ID NO: 378468 - DNA, 30 bp, Artificial Sequence
  Synthetic oligonucleotide
attacaaactctgcttattcttgacggtcc

SEQ ID NO: 378469 - DNA, 30 bp, Artificial Sequence
  Synthetic oligonucleotide
agatttcaggatgccttggcgacccggtcc

SEQ ID NO: 378470 - DNA, 30 bp, Artificial Sequence
  Synthetic oligonucleotide
tttcttttgctcagtcataccactcggtcc

SEQ ID NO: 378471 - DNA, 30 bp, Artificial Sequence
  Synthetic oligonucleotide
atgtgtccagaagggccgcatcttcggtcc

SEQ ID NO: 378472 - DNA, 30 bp, Artificial Sequence
  Synthetic oligonucleotide
gtaatggggaactctaccatcaaagggtcc

SEQ ID NO: 378473 - DNA, 30 bp, Artificial Sequence
  Synthetic oligonucleotide
tgtgtacttgaatggcgggctgcggggtcc

SEQ ID NO: 378474 - DNA, 30 bp, Artificial Sequence
  Synthetic oligonucleotide
caagggtgtcagtctccgcggctggggtcc

SEQ ID NO: 378475 - DNA, 30 bp, Artificial Sequence
  Synthetic oligonucleotide
gtatagtacgctgtcaaggtgaaatggtcc

SEQ ID NO: 378476 - DNA, 28 bp, Artificial Sequence
  Synthetic oligonucleotide
tgctagttttatgttatccagttggtcc

SEQ ID NO: 378477 - DNA, 30 bp, Artificial Sequence
  Synthetic oligonucleotide
atacttactttcaagagcccgtgttggtcc

SEQ ID NO: 378478 - DNA, 30 bp, Artificial Sequence
  Synthetic oligonucleotide
acccgttaaatggacaacgttaaaatgtcc

SEQ ID NO: 378479 - DNA, 30 bp, Artificial Sequence
  Synthetic oligonucleotide
gcttcttgctcttcgtatcgccccatgtcc

SEQ ID NO: 378480 - DNA, 30 bp, Artificial Sequence
  Synthetic oligonucleotide
agtggttgctttgttcgattcttcatgtcc

SEQ ID NO: 378481 - DNA, 30 bp, Artificial Sequence
  Synthetic oligonucleotide
atacaacgacacctggactctaggatgtcc

SEQ ID NO: 378482 - DNA, 30 bp, Artificial Sequence
  Synthetic oligonucleotide
gaggatgtcttgtacatatttatgatgtcc

SEQ ID NO: 378483 - DNA, 30 bp, Artificial Sequence
  Synthetic oligonucleotide
taagcgggaaaaagcctcggcgaactgtcc

SEQ ID NO: 378484 - DNA, 30 bp, Artificial Sequence
  Synthetic oligonucleotide
aatgttttgttatcatcaagttagctgtcc

SEQ ID NO: 378485 - DNA, 30 bp, Artificial Sequence
  Synthetic oligonucleotide
gtttcgaactggtaccaccgttcgctgtcc

SEQ ID NO: 378486 - DNA, 30 bp, Artificial Sequence
  Synthetic oligonucleotide
attgttatctaaagcagtcgtctgctgtcc

SEQ ID NO: 378487 - DNA, 30 bp, Artificial Sequence
  Synthetic oligonucleotide
gacggcgacgcggcgtcggctgcagtgtcc

SEQ ID NO: 378488 - DNA, 30 bp, Artificial Sequence
  Synthetic oligonucleotide
taaattacatcgacagacttctgagtgtcc

SEQ ID NO: 378489 - DNA, 30 bp, Artificial Sequence
  Synthetic oligonucleotide
ggtatatctggagggtggcgtaccgtgtcc

SEQ ID NO: 378490 - DNA, 30 bp, Artificial Sequence
  Synthetic oligonucleotide
atcttgctaatttgcctgagagccgtgtcc

SEQ ID NO: 378491 - DNA, 30 bp, Artificial Sequence
  Synthetic oligonucleotide
ccagaccggcaataggtattgagcgtgtcc

SEQ ID NO: 378492 - DNA, 30 bp, Artificial Sequence
  Synthetic oligonucleotide
taatatagactgaattgcagaggtgtgtcc

SEQ ID NO: 378493 - DNA, 30 bp, Artificial Sequence
  Synthetic oligonucleotide
gtaaaccgttaatgagaatgtcaattgtcc

SEQ ID NO: 378494 - DNA, 30 bp, Artificial Sequence
  Synthetic oligonucleotide
tagtatcgaggttcgaagcaatcattgtcc

SEQ ID NO: 378495 - DNA, 30 bp, Artificial Sequence
  Synthetic oligonucleotide
cgatggcgtcgatccgcggccgccttgtcc

SEQ ID NO: 378496 - DNA, 30 bp, Artificial Sequence
  Synthetic oligonucleotide
tctactgtggttctcccaatccaaaattcc

SEQ ID NO: 378497 - DNA, 30 bp, Artificial Sequence
  Synthetic oligonucleotide
catgacaagcgctgccggatagaaaattcc

SEQ ID NO: 378498 - DNA, 30 bp, Artificial Sequence
  Synthetic oligonucleotide
gtattcccacccagttttacgttaaattcc

SEQ ID NO: 378499 - DNA, 30 bp, Artificial Sequence
  Synthetic oligonucleotide
gaggtgaaaaagcagtaaattgtcaattcc

SEQ ID NO: 378500 - DNA, 30 bp, Artificial Sequence
  Synthetic oligonucleotide
gtagatcaggccatacttcggcagaattcc

SEQ ID NO: 378501 - DNA, 30 bp, Artificial Sequence
  Synthetic oligonucleotide
cacggacacaatggttacgtgttgaattcc

SEQ ID NO: 378502 - DNA, 30 bp, Artificial Sequence
  Synthetic oligonucleotide
ctgcgtagctggaacttatttgctaattcc

SEQ ID NO: 378503 - DNA, 30 bp, Artificial Sequence
  Synthetic oligonucleotide
ggcataaaggttcttaatatcccacattcc

SEQ ID NO: 378504 - DNA, 30 bp, Artificial Sequence
  Synthetic oligonucleotide
ctcttaaaatgctgaatcccggcacattcc

SEQ ID NO: 378505 - DNA, 29 bp, Artificial Sequence
  Synthetic oligonucleotide
ccgaaggccaccagccgctagcccattcc

SEQ ID NO: 378506 - DNA, 30 bp, Artificial Sequence
  Synthetic oligonucleotide
atgttctcccatgaacgtggggcccattcc

SEQ ID NO: 378507 - DNA, 30 bp, Artificial Sequence
  Synthetic oligonucleotide
atccgtttctctacgtagatattccattcc

SEQ ID NO: 378508 - DNA, 30 bp, Artificial Sequence
  Synthetic oligonucleotide
ctaggatttttcactgagtgtttccattcc

SEQ ID NO: 378509 - DNA, 30 bp, Artificial Sequence
  Synthetic oligonucleotide
ggcggggagctggggggcaacgagcattcc

SEQ ID NO: 378510 - DNA, 30 bp, Artificial Sequence
  Synthetic oligonucleotide
ttgatactgcgacgtaggaaaagtcattcc

SEQ ID NO: 378511 - DNA, 30 bp, Artificial Sequence
  Synthetic oligonucleotide
ctggaagtcttaattacgtgtctagattcc

SEQ ID NO: 378512 - DNA, 30 bp, Artificial Sequence
  Synthetic oligonucleotide
cctgtgtaggcatgatacctacacgattcc

SEQ ID NO: 378513 - DNA, 30 bp, Artificial Sequence
  Synthetic oligonucleotide
gagagataatgcgtctaactctccgattcc

SEQ ID NO: 378514 - DNA, 30 bp, Artificial Sequence
  Synthetic oligonucleotide
gcgtttaagcctagacaacgtgcggattcc

SEQ ID NO: 378515 - DNA, 30 bp, Artificial Sequence
  Synthetic oligonucleotide
tcatctatggaacaacctcgaggtgattcc

SEQ ID NO: 378516 - DNA, 30 bp, Artificial Sequence
  Synthetic oligonucleotide
tcgcaacaccatccgcctatgcttgattcc

SEQ ID NO: 378517 - DNA, 30 bp, Artificial Sequence
  Synthetic oligonucleotide
aacgtcaaggtgtaaacatggggatattcc

SEQ ID NO: 378518 - DNA, 30 bp, Artificial Sequence
  Synthetic oligonucleotide
tgagagtaaccacgctcaaggatatattcc

SEQ ID NO: 378519 - DNA, 30 bp, Artificial Sequence
  Synthetic oligonucleotide
ctactaaatacgctcatcgaagactattcc

SEQ ID NO: 378520 - DNA, 30 bp, Artificial Sequence
  Synthetic oligonucleotide
attgaggcgacttggtgttagccctattcc

SEQ ID NO: 378521 - DNA, 30 bp, Artificial Sequence
  Synthetic oligonucleotide
gtacgttccttgttgccttggggctattcc

SEQ ID NO: 378522 - DNA, 30 bp, Artificial Sequence
  Synthetic oligonucleotide
actgagtgaacggccccgggaatctattcc

SEQ ID NO: 378523 - DNA, 30 bp, Artificial Sequence
  Synthetic oligonucleotide
gatttgtataattaagtcaagcagtattcc

SEQ ID NO: 378524 - DNA, 30 bp, Artificial Sequence
  Synthetic oligonucleotide
tttgaacggcatcaacgaaggcggtattcc

SEQ ID NO: 378525 - DNA, 30 bp, Artificial Sequence
  Synthetic oligonucleotide
agttgaatatttatgtgtaggctaacttcc

SEQ ID NO: 378526 - DNA, 30 bp, Artificial Sequence
  Synthetic oligonucleotide
ggtgctgacgcccaacgtgtggtaacttcc

SEQ ID NO: 378527 - DNA, 30 bp, Artificial Sequence
  Synthetic oligonucleotide
cactttacttacgactatgaatacacttcc

SEQ ID NO: 378528 - DNA, 30 bp, Artificial Sequence
  Synthetic oligonucleotide
acagaaagtaatgaagtcgggagcacttcc

SEQ ID NO: 378529 - DNA, 30 bp, Artificial Sequence
  Synthetic oligonucleotide
gacagtcgaggcctgcatggacggacttcc

SEQ ID NO: 378530 - DNA, 30 bp, Artificial Sequence
  Synthetic oligonucleotide
aaagggtgctggcgcgtataaccaccttcc

SEQ ID NO: 378531 - DNA, 30 bp, Artificial Sequence
  Synthetic oligonucleotide
atctagggatttaaggcctagtcaccttcc

SEQ ID NO: 378532 - DNA, 30 bp, Artificial Sequence
  Synthetic oligonucleotide
cagccctataggccaaatccagtcccttcc

SEQ ID NO: 378533 - DNA, 30 bp, Artificial Sequence
  Synthetic oligonucleotide
gccatatgtaaacaggctcagtggccttcc

SEQ ID NO: 378534 - DNA, 30 bp, Artificial Sequence
  Synthetic oligonucleotide
ggcggtcaagtaggatactcgattccttcc

SEQ ID NO: 378535 - DNA, 30 bp, Artificial Sequence
  Synthetic oligonucleotide
ctgcatattgggcgaggaacgtttccttcc

SEQ ID NO: 378536 - DNA, 30 bp, Artificial Sequence
  Synthetic oligonucleotide
tttccgtgtgagagagaccgatgagcttcc

SEQ ID NO: 378537 - DNA, 30 bp, Artificial Sequence
  Synthetic oligonucleotide
ggatttacggacccgcgaacgtgcgcttcc

SEQ ID NO: 378538 - DNA, 30 bp, Artificial Sequence
  Synthetic oligonucleotide
attcacgcaatatctcatacgaaggcttcc

SEQ ID NO: 378539 - DNA, 30 bp, Artificial Sequence
  Synthetic oligonucleotide
ccccctgccaaggcccataccaaatcttcc

SEQ ID NO: 378540 - DNA, 30 bp, Artificial Sequence
  Synthetic oligonucleotide
ctactattattattgtacggctaatcttcc

SEQ ID NO: 378541 - DNA, 30 bp, Artificial Sequence
  Synthetic oligonucleotide
gtcggtaaatttagctctcggacgtcttcc

SEQ ID NO: 378542 - DNA, 30 bp, Artificial Sequence
  Synthetic oligonucleotide
aaattgtcaaatcttgatactgcgtcttcc

SEQ ID NO: 378543 - DNA, 30 bp, Artificial Sequence
  Synthetic oligonucleotide
cccgtacgaccgccaaactacaggtcttcc

SEQ ID NO: 378544 - DNA, 30 bp, Artificial Sequence
  Synthetic oligonucleotide
gggaaacaggtgggtagcgggacttcttcc

SEQ ID NO: 378545 - DNA, 30 bp, Artificial Sequence
  Synthetic oligonucleotide
aggtgtttatggttctaagccgtttcttcc

SEQ ID NO: 378546 - DNA, 30 bp, Artificial Sequence
  Synthetic oligonucleotide
gtttacggtgaggcaatgtgacaaagttcc

SEQ ID NO: 378547 - DNA, 30 bp, Artificial Sequence
  Synthetic oligonucleotide
tgctcccattatgaccgaccgaacagttcc

SEQ ID NO: 378548 - DNA, 30 bp, Artificial Sequence
  Synthetic oligonucleotide
tggactctaataacaagtagtcccagttcc

SEQ ID NO: 378549 - DNA, 30 bp, Artificial Sequence
  Synthetic oligonucleotide
attgcaaatatcgtggcagtggtcagttcc

SEQ ID NO: 378550 - DNA, 30 bp, Artificial Sequence
  Synthetic oligonucleotide
cggacctagtcgcaaggtgtctagagttcc

SEQ ID NO: 378551 - DNA, 30 bp, Artificial Sequence
  Synthetic oligonucleotide
tgccccacagtcgtttttgtcttgagttcc

SEQ ID NO: 378552 - DNA, 30 bp, Artificial Sequence
  Synthetic oligonucleotide
ccatcgccatgcgtaaatactaatagttcc

SEQ ID NO: 378553 - DNA, 30 bp, Artificial Sequence
  Synthetic oligonucleotide
ttattttcatggttctacaccctacgttcc

SEQ ID NO: 378554 - DNA, 30 bp, Artificial Sequence
  Synthetic oligonucleotide
tgggcggatggaaaagcagattgccgttcc

SEQ ID NO: 378555 - DNA, 30 bp, Artificial Sequence
  Synthetic oligonucleotide
gcggcaggagcttgtaccacagtccgttcc

SEQ ID NO: 378556 - DNA, 30 bp, Artificial Sequence
  Synthetic oligonucleotide
aagggatttggtagggcacggaacggttcc

SEQ ID NO: 378557 - DNA, 30 bp, Artificial Sequence
  Synthetic oligonucleotide
ccttggaaaaattttacgggtaccggttcc

SEQ ID NO: 378558 - DNA, 30 bp, Artificial Sequence
  Synthetic oligonucleotide
ccaaactaagggttggtgtcacgcggttcc

SEQ ID NO: 378559 - DNA, 30 bp, Artificial Sequence
  Synthetic oligonucleotide
actttgcgtgttcagtttaggtgcggttcc

SEQ ID NO: 378560 - DNA, 30 bp, Artificial Sequence
  Synthetic oligonucleotide
atccgccctcctttttggcgctggggttcc

SEQ ID NO: 378561 - DNA, 30 bp, Artificial Sequence
  Synthetic oligonucleotide
aggctccagatgtcacgcttttatggttcc

SEQ ID NO: 378562 - DNA, 30 bp, Artificial Sequence
  Synthetic oligonucleotide
ttcgcagtcttcgcggctcggccatgttcc

SEQ ID NO: 378563 - DNA, 30 bp, Artificial Sequence
  Synthetic oligonucleotide
gtgcgccatataatagcgaacagctgttcc

SEQ ID NO: 378564 - DNA, 30 bp, Artificial Sequence
  Synthetic oligonucleotide
ataggcgccgactagcggttaaagtgttcc

SEQ ID NO: 378565 - DNA, 30 bp, Artificial Sequence
  Synthetic oligonucleotide
gctgttcgacagcattttaggtgttgttcc

SEQ ID NO: 378566 - DNA, 30 bp, Artificial Sequence
  Synthetic oligonucleotide
aagaggcgtgcgccgaacaaaatttgttcc

SEQ ID NO: 378567 - DNA, 30 bp, Artificial Sequence
  Synthetic oligonucleotide
tcctatgtcagttctggttcagtttgttcc

SEQ ID NO: 378568 - DNA, 30 bp, Artificial Sequence
  Synthetic oligonucleotide
acgttttttctctgccctgggcccatttcc

SEQ ID NO: 378569 - DNA, 30 bp, Artificial Sequence
  Synthetic oligonucleotide
gttcagtgacagactttctacttgatttcc

SEQ ID NO: 378570 - DNA, 30 bp, Artificial Sequence
  Synthetic oligonucleotide
atctatgtattaagctttactgctatttcc

SEQ ID NO: 378571 - DNA, 30 bp, Artificial Sequence
  Synthetic oligonucleotide
ctaagccattgcaaaggtacccgtatttcc

SEQ ID NO: 378572 - DNA, 30 bp, Artificial Sequence
  Synthetic oligonucleotide
ctgcttatggagatgcaattccaactttcc

SEQ ID NO: 378573 - DNA, 30 bp, Artificial Sequence
  Synthetic oligonucleotide
gtccccaattgatcaacgcgcccactttcc

SEQ ID NO: 378574 - DNA, 30 bp, Artificial Sequence
  Synthetic oligonucleotide
ccaaatagtacgggaggccagtttctttcc

SEQ ID NO: 378575 - DNA, 30 bp, Artificial Sequence
  Synthetic oligonucleotide
gcactagggcctcaaagctatgaggtttcc

SEQ ID NO: 378576 - DNA, 30 bp, Artificial Sequence
  Synthetic oligonucleotide
atgcggacctagcgccgggggaatgtttcc

SEQ ID NO: 378577 - DNA, 30 bp, Artificial Sequence
  Synthetic oligonucleotide
ttactaaccatatagtaacttattgtttcc

SEQ ID NO: 378578 - DNA, 31 bp, Artificial Sequence
  Synthetic oligonucleotide
attaacaggtgcgaatattgctacattttcc

SEQ ID NO: 378579 - DNA, 30 bp, Artificial Sequence
  Synthetic oligonucleotide
atttcttagccgaaccctaaacgattttcc

SEQ ID NO: 378580 - DNA, 30 bp, Artificial Sequence
  Synthetic oligonucleotide
aatcctgaaaacctagccaaccgattttcc

SEQ ID NO: 378581 - DNA, 30 bp, Artificial Sequence
  Synthetic oligonucleotide
tgagcgtaaaattacgtgcgccggttttcc

SEQ ID NO: 378582 - DNA, 30 bp, Artificial Sequence
  Synthetic oligonucleotide
ggattaagcacctggctctatcatttttcc

SEQ ID NO: 378583 - DNA, 30 bp, Artificial Sequence
  Synthetic oligonucleotide
tgcgattaccttttaccgggacgtttttcc

SEQ ID NO: 378584 - DNA, 30 bp, Artificial Sequence
  Synthetic oligonucleotide
cgaaatgtcattaatttaacgggtttttcc

SEQ ID NO: 378585 - DNA, 30 bp, Artificial Sequence
  Synthetic oligonucleotide
cgcatccacggtaatttagatttaaaaagc

SEQ ID NO: 378586 - DNA, 30 bp, Artificial Sequence
  Synthetic oligonucleotide
agtgcgtatatgtcagcgagagacaaaagc

SEQ ID NO: 378587 - DNA, 30 bp, Artificial Sequence
  Synthetic oligonucleotide
ttagtttttcaagtgcgcgtttgcaaaagc

SEQ ID NO: 378588 - DNA, 30 bp, Artificial Sequence
  Synthetic oligonucleotide
tatcatttatctcggagtccaatcaaaagc

SEQ ID NO: 378589 - DNA, 30 bp, Artificial Sequence
  Synthetic oligonucleotide
gctggccgctgttccctttcaactaaaagc

SEQ ID NO: 378590 - DNA, 30 bp, Artificial Sequence
  Synthetic oligonucleotide
cctatgcaattgattacttataaacaaagc

SEQ ID NO: 378591 - DNA, 30 bp, Artificial Sequence
  Synthetic oligonucleotide
atcatgatggtcgttaatcacgcgcaaagc

SEQ ID NO: 378592 - DNA, 30 bp, Artificial Sequence
  Synthetic oligonucleotide
ttcagtcagcaccccccggataggcaaagc

SEQ ID NO: 378593 - DNA, 30 bp, Artificial Sequence
  Synthetic oligonucleotide
gcggaagtataatttcgattacatcaaagc

SEQ ID NO: 378594 - DNA, 30 bp, Artificial Sequence
  Synthetic oligonucleotide
ccgccctccgcatttcttgactatcaaagc

SEQ ID NO: 378595 - DNA, 30 bp, Artificial Sequence
  Synthetic oligonucleotide
ccacacctgtcgtcgctccgccttcaaagc

SEQ ID NO: 378596 - DNA, 30 bp, Artificial Sequence
  Synthetic oligonucleotide
attgaaagtcgtgatggaacaagagaaagc

SEQ ID NO: 378597 - DNA, 30 bp, Artificial Sequence
  Synthetic oligonucleotide
tgtcagcccgccaaccgcaagtgcgaaagc

SEQ ID NO: 378598 - DNA, 30 bp, Artificial Sequence
  Synthetic oligonucleotide
atactacttagatagccgcacgcggaaagc

SEQ ID NO: 378599 - DNA, 30 bp, Artificial Sequence
  Synthetic oligonucleotide
ttattgcctaatggagatccccgggaaagc

SEQ ID NO: 378600 - DNA, 30 bp, Artificial Sequence
  Synthetic oligonucleotide
tctttgtccgattattggggctgggaaagc

SEQ ID NO: 378601 - DNA, 30 bp, Artificial Sequence
  Synthetic oligonucleotide
ctgaaatacacgtgaggtccttatgaaagc

SEQ ID NO: 378602 - DNA, 30 bp, Artificial Sequence
  Synthetic oligonucleotide
attgtagcacacgcctcccttgttgaaagc

SEQ ID NO: 378603 - DNA, 30 bp, Artificial Sequence
  Synthetic oligonucleotide
gttggagccgatcgtacatcaaaataaagc

SEQ ID NO: 378604 - DNA, 30 bp, Artificial Sequence
  Synthetic oligonucleotide
aacagtaagtacctgggggatccataaagc

SEQ ID NO: 378605 - DNA, 30 bp, Artificial Sequence
  Synthetic oligonucleotide
gtagcctctcgggtatagagtggataaagc

SEQ ID NO: 378606 - DNA, 30 bp, Artificial Sequence
  Synthetic oligonucleotide
gcaatcgcctgggtagatgaatactaaagc

SEQ ID NO: 378607 - DNA, 30 bp, Artificial Sequence
  Synthetic oligonucleotide
gaactggtagctcgttatagcccctaaagc

SEQ ID NO: 378608 - DNA, 30 bp, Artificial Sequence
  Synthetic oligonucleotide
ctcgtttactatgaccggtccagctaaagc

SEQ ID NO: 378609 - DNA, 30 bp, Artificial Sequence
  Synthetic oligonucleotide
tagcataggctgacgtgcgtcccgtaaagc

SEQ ID NO: 378610 - DNA, 30 bp, Artificial Sequence
  Synthetic oligonucleotide
taggaggcgcccagtgttacgttttaaagc

SEQ ID NO: 378611 - DNA, 30 bp, Artificial Sequence
  Synthetic oligonucleotide
gctggtagagtaaagaattggtgaacaagc

SEQ ID NO: 378612 - DNA, 30 bp, Artificial Sequence
  Synthetic oligonucleotide
ataaggtcatgcttggggtacctaacaagc

SEQ ID NO: 378613 - DNA, 30 bp, Artificial Sequence
  Synthetic oligonucleotide
ttaaaactatacgcgtcacgggtaacaagc

SEQ ID NO: 378614 - DNA, 30 bp, Artificial Sequence
  Synthetic oligonucleotide
gactagaggtttaccgggaaccccacaagc

SEQ ID NO: 378615 - DNA, 30 bp, Artificial Sequence
  Synthetic oligonucleotide
tttactagatcgctcttagtatcgacaagc

SEQ ID NO: 378616 - DNA, 30 bp, Artificial Sequence
  Synthetic oligonucleotide
gaggcacttggctcaggtatgatgacaagc

SEQ ID NO: 378617 - DNA, 30 bp, Artificial Sequence
  Synthetic oligonucleotide
gggtcgaaataatcaggtactcatacaagc

SEQ ID NO: 378618 - DNA, 30 bp, Artificial Sequence
  Synthetic oligonucleotide
gaagcgctacttgcaggcttgactacaagc

SEQ ID NO: 378619 - DNA, 30 bp, Artificial Sequence
  Synthetic oligonucleotide
gatctgttatttccttgggtgagtacaagc

SEQ ID NO: 378620 - DNA, 30 bp, Artificial Sequence
  Synthetic oligonucleotide
gtagaacgccaaactcagcactgtacaagc

SEQ ID NO: 378621 - DNA, 30 bp, Artificial Sequence
  Synthetic oligonucleotide
cacagctgacgtttatttgtagaagcaagc

SEQ ID NO: 378622 - DNA, 30 bp, Artificial Sequence
  Synthetic oligonucleotide
tggtaccttagtaataggaaacgcgcaagc

SEQ ID NO: 378623 - DNA, 30 bp, Artificial Sequence
  Synthetic oligonucleotide
gagaatgcgaatagctgccctcaggcaagc

SEQ ID NO: 378624 - DNA, 30 bp, Artificial Sequence
  Synthetic oligonucleotide
agccccccttgggcctaagatgaggcaagc

SEQ ID NO: 378625 - DNA, 30 bp, Artificial Sequence
  Synthetic oligonucleotide
ctcgcctgttccatgagtttacaatcaagc

SEQ ID NO: 378626 - DNA, 30 bp, Artificial Sequence
  Synthetic oligonucleotide
ggtatagatcccggcgtcacgggctcaagc

SEQ ID NO: 378627 - DNA, 30 bp, Artificial Sequence
  Synthetic oligonucleotide
ggattgtccgaagtagcgtacaagtcaagc

SEQ ID NO: 378628 - DNA, 30 bp, Artificial Sequence
  Synthetic oligonucleotide
tcaagaattcagctttttacggcgtcaagc

SEQ ID NO: 378629 - DNA, 30 bp, Artificial Sequence
  Synthetic oligonucleotide
aatagcttgttagatcctctccggtcaagc

SEQ ID NO: 378630 - DNA, 30 bp, Artificial Sequence
  Synthetic oligonucleotide
tagggatagtgccgtgtttacctcagaagc

SEQ ID NO: 378631 - DNA, 30 bp, Artificial Sequence
  Synthetic oligonucleotide
tttcggagaacaagcgcaggattcagaagc

SEQ ID NO: 378632 - DNA, 30 bp, Artificial Sequence
  Synthetic oligonucleotide
gggggccaacggtctatgaaggagagaagc

SEQ ID NO: 378633 - DNA, 30 bp, Artificial Sequence
  Synthetic oligonucleotide
ggcgggtccaattttttttaactgagaagc

SEQ ID NO: 378634 - DNA, 30 bp, Artificial Sequence
  Synthetic oligonucleotide
gatgcactgctacaatgatcctgccgaagc

SEQ ID NO: 378635 - DNA, 29 bp, Artificial Sequence
  Synthetic oligonucleotide
tacaacctcgcgtgtatcactagcgaagc

SEQ ID NO: 378636 - DNA, 30 bp, Artificial Sequence
  Synthetic oligonucleotide
atctgaattgcataatgttgctagcgaagc

SEQ ID NO: 378637 - DNA, 30 bp, Artificial Sequence
  Synthetic oligonucleotide
ccaaaccacatacgctcactacatcgaagc

SEQ ID NO: 378638 - DNA, 30 bp, Artificial Sequence
  Synthetic oligonucleotide
tcccataatgcgtctatcacgaaaggaagc

SEQ ID NO: 378639 - DNA, 30 bp, Artificial Sequence
  Synthetic oligonucleotide
agtcgattgcataattatcgaaccggaagc

SEQ ID NO: 378640 - DNA, 30 bp, Artificial Sequence
  Synthetic oligonucleotide
tgatagctcgtcagaataaactgcggaagc

SEQ ID NO: 378641 - DNA, 30 bp, Artificial Sequence
  Synthetic oligonucleotide
gccgggcccacaggtaacattccgggaagc

SEQ ID NO: 378642 - DNA, 30 bp, Artificial Sequence
  Synthetic oligonucleotide
gccaagagactcgcgactaacgtgggaagc

SEQ ID NO: 378643 - DNA, 30 bp, Artificial Sequence
  Synthetic oligonucleotide
gctgttggtgcgcgcacctgcttgggaagc

SEQ ID NO: 378644 - DNA, 30 bp, Artificial Sequence
  Synthetic oligonucleotide
agtagatcccgaattaattactatggaagc

SEQ ID NO: 378645 - DNA, 30 bp, Artificial Sequence
  Synthetic oligonucleotide
tggtgcctagttcgcacactgcaatgaagc

SEQ ID NO: 378646 - DNA, 30 bp, Artificial Sequence
  Synthetic oligonucleotide
cttggttattagctcaatgattaatgaagc

SEQ ID NO: 378647 - DNA, 30 bp, Artificial Sequence
  Synthetic oligonucleotide
tacactgcgtccaggcattgcagatgaagc

SEQ ID NO: 378648 - DNA, 30 bp, Artificial Sequence
  Synthetic oligonucleotide
gctttcccgatagtcgtccaagtatgaagc

SEQ ID NO: 378649 - DNA, 30 bp, Artificial Sequence
  Synthetic oligonucleotide
aagcttattcaagaggagaacaattgaagc

SEQ ID NO: 378650 - DNA, 30 bp, Artificial Sequence
  Synthetic oligonucleotide
tcctgatagaatactctgtggccttgaagc

SEQ ID NO: 378651 - DNA, 30 bp, Artificial Sequence
  Synthetic oligonucleotide
cggcatcgtgactacagggcgtcttgaagc

SEQ ID NO: 378652 - DNA, 30 bp, Artificial Sequence
  Synthetic oligonucleotide
tacttattttaggctggagggtcaataagc

SEQ ID NO: 378653 - DNA, 30 bp, Artificial Sequence
  Synthetic oligonucleotide
tccgtatgtaagggtatggaatgcataagc

SEQ ID NO: 378654 - DNA, 30 bp, Artificial Sequence
  Synthetic oligonucleotide
acttaagatctagggtttctagggataagc

SEQ ID NO: 378655 - DNA, 30 bp, Artificial Sequence
  Synthetic oligonucleotide
ctatgagtcaaccaccccagcggactaagc

SEQ ID NO: 378656 - DNA, 30 bp, Artificial Sequence
  Synthetic oligonucleotide
aggtgaaatagagttttcttttccctaagc

SEQ ID NO: 378657 - DNA, 30 bp, Artificial Sequence
  Synthetic oligonucleotide
atagtgcgtcgctgtaaaaatatcctaagc

SEQ ID NO: 378658 - DNA, 30 bp, Artificial Sequence
  Synthetic oligonucleotide
tctttaattctacgagacggtgggctaagc

SEQ ID NO: 378659 - DNA, 30 bp, Artificial Sequence
  Synthetic oligonucleotide
tatatacgtgagaccgcaagcgatctaagc

SEQ ID NO: 378660 - DNA, 29 bp, Artificial Sequence
  Synthetic oligonucleotide
gcgtctgatccaatggttactatctaagc

SEQ ID NO: 378661 - DNA, 30 bp, Artificial Sequence
  Synthetic oligonucleotide
tgagtttggatatcatcattaagcgtaagc

SEQ ID NO: 378662 - DNA, 30 bp, Artificial Sequence
  Synthetic oligonucleotide
tgcccgcgcgagaaggcgtgtatcgtaagc

SEQ ID NO: 378663 - DNA, 30 bp, Artificial Sequence
  Synthetic oligonucleotide
atgtactctgtcttggtaaacgtcgtaagc

SEQ ID NO: 378664 - DNA, 30 bp, Artificial Sequence
  Synthetic oligonucleotide
taaatctaagttcatatgtgccgggtaagc

SEQ ID NO: 378665 - DNA, 30 bp, Artificial Sequence
  Synthetic oligonucleotide
aaatcattccatttctggatgtgggtaagc

SEQ ID NO: 378666 - DNA, 30 bp, Artificial Sequence
  Synthetic oligonucleotide
cttatttaatgtggaatgccctctgtaagc

SEQ ID NO: 378667 - DNA, 29 bp, Artificial Sequence
  Synthetic oligonucleotide
aactagtcgaggcacctgaatgtgtaagc

SEQ ID NO: 378668 - DNA, 30 bp, Artificial Sequence
  Synthetic oligonucleotide
aagatgcaggacttcagtatggaaaacagc

SEQ ID NO: 378669 - DNA, 30 bp, Artificial Sequence
  Synthetic oligonucleotide
ccacaaaaggggcggaaagtttaaaacagc

SEQ ID NO: 378670 - DNA, 30 bp, Artificial Sequence
  Synthetic oligonucleotide
taaaacctacataatctggctttaaacagc

SEQ ID NO: 378671 - DNA, 30 bp, Artificial Sequence
  Synthetic oligonucleotide
gaatgccttgccatttgcgagggcaacagc

SEQ ID NO: 378672 - DNA, 30 bp, Artificial Sequence
  Synthetic oligonucleotide
taaccaacccgggtacccttggctaacagc

SEQ ID NO: 378673 - DNA, 30 bp, Artificial Sequence
  Synthetic oligonucleotide
tgacgacaacaacgcaaaccgtgtaacagc

SEQ ID NO: 378674 - DNA, 30 bp, Artificial Sequence
  Synthetic oligonucleotide
gcttgactttgggcagaagatagacacagc

SEQ ID NO: 378675 - DNA, 30 bp, Artificial Sequence
  Synthetic oligonucleotide
agagcgttctttggtaactgcggacacagc

SEQ ID NO: 378676 - DNA, 30 bp, Artificial Sequence
  Synthetic oligonucleotide
gttgtctagctacttggcgcactacacagc

SEQ ID NO: 378677 - DNA, 30 bp, Artificial Sequence
  Synthetic oligonucleotide
tgatgattaggcaccatcaaataccacagc

SEQ ID NO: 378678 - DNA, 30 bp, Artificial Sequence
  Synthetic oligonucleotide
acgcgggccagcttggcagctccgcacagc

SEQ ID NO: 378679 - DNA, 30 bp, Artificial Sequence
  Synthetic oligonucleotide
ctaaaattggcactgcaagggtggcacagc

SEQ ID NO: 378680 - DNA, 30 bp, Artificial Sequence
  Synthetic oligonucleotide
tcccgttcatcggggctaaacaatcacagc

SEQ ID NO: 378681 - DNA, 30 bp, Artificial Sequence
  Synthetic oligonucleotide
tgaagactccaacggcgtacatatcacagc

SEQ ID NO: 378682 - DNA, 30 bp, Artificial Sequence
  Synthetic oligonucleotide
tcgtacatggggactcgttgcgctcacagc

SEQ ID NO: 378683 - DNA, 30 bp, Artificial Sequence
  Synthetic oligonucleotide
aacaggtccttacgctactgacgagacagc

SEQ ID NO: 378684 - DNA, 30 bp, Artificial Sequence
  Synthetic oligonucleotide
acaggggtttagatccaatcctcggacagc

SEQ ID NO: 378685 - DNA, 30 bp, Artificial Sequence
  Synthetic oligonucleotide
aggtttgctaagccacctcctaatgacagc

SEQ ID NO: 378686 - DNA, 30 bp, Artificial Sequence
  Synthetic oligonucleotide
ttgcacggttgacactagatgtcctacagc

SEQ ID NO: 378687 - DNA, 30 bp, Artificial Sequence
  Synthetic oligonucleotide
tcccccgatcggaagtttattgtctacagc

SEQ ID NO: 378688 - DNA, 30 bp, Artificial Sequence
  Synthetic oligonucleotide
gatggaaatcgctcttaggaaatgtacagc

SEQ ID NO: 378689 - DNA, 30 bp, Artificial Sequence
  Synthetic oligonucleotide
catgtagcgggcactctagatgtgtacagc

SEQ ID NO: 378690 - DNA, 30 bp, Artificial Sequence
  Synthetic oligonucleotide
cagacactgcgctttttagttgtgtacagc

SEQ ID NO: 378691 - DNA, 30 bp, Artificial Sequence
  Synthetic oligonucleotide
aaccaagcatgaataaaccgcttttacagc

SEQ ID NO: 378692 - DNA, 30 bp, Artificial Sequence
  Synthetic oligonucleotide
acccgggtaccatccgtcagcgcaaccagc

SEQ ID NO: 378693 - DNA, 30 bp, Artificial Sequence
  Synthetic oligonucleotide
gtatataggcgcgctcccaatgagaccagc

SEQ ID NO: 378694 - DNA, 30 bp, Artificial Sequence
  Synthetic oligonucleotide
acagtgaaaagggttgtagtacaacccagc

SEQ ID NO: 378695 - DNA, 30 bp, Artificial Sequence
  Synthetic oligonucleotide
cttcaggggtggccattgggtggacccagc

SEQ ID NO: 378696 - DNA, 30 bp, Artificial Sequence
  Synthetic oligonucleotide
gcaatgggcttgtcatacggaatacccagc

SEQ ID NO: 378697 - DNA, 30 bp, Artificial Sequence
  Synthetic oligonucleotide
gaaacagggtgggccatatcttcgcccagc

SEQ ID NO: 378698 - DNA, 30 bp, Artificial Sequence
  Synthetic oligonucleotide
taattatccatcagacattgcaggcccagc

SEQ ID NO: 378699 - DNA, 30 bp, Artificial Sequence
  Synthetic oligonucleotide
agcacatctgagtttggaagtaacgccagc

SEQ ID NO: 378700 - DNA, 30 bp, Artificial Sequence
  Synthetic oligonucleotide
tatctagtatacattcttggcaccgccagc

SEQ ID NO: 378701 - DNA, 30 bp, Artificial Sequence
  Synthetic oligonucleotide
cggctaatggctccgggtgagggggccagc

SEQ ID NO: 378702 - DNA, 30 bp, Artificial Sequence
  Synthetic oligonucleotide
atacctctcgtagaatgttagcgtgccagc

SEQ ID NO: 378703 - DNA, 30 bp, Artificial Sequence
  Synthetic oligonucleotide
cgtgttcggtgtaagacatattgtgccagc

SEQ ID NO: 378704 - DNA, 30 bp, Artificial Sequence
  Synthetic oligonucleotide
agtataaactgaatcctgatgcagtccagc

SEQ ID NO: 378705 - DNA, 30 bp, Artificial Sequence
  Synthetic oligonucleotide
gtccaatggtggggccaaccgatttccagc

SEQ ID NO: 378706 - DNA, 30 bp, Artificial Sequence
  Synthetic oligonucleotide
acttagaaactaaaggcacgcttttccagc

SEQ ID NO: 378707 - DNA, 29 bp, Artificial Sequence
  Synthetic oligonucleotide
gacattcgtacgggagtatgccaagcagc

SEQ ID NO: 378708 - DNA, 30 bp, Artificial Sequence
  Synthetic oligonucleotide
gcagcaaagtagttcgcagatctcagcagc

SEQ ID NO: 378709 - DNA, 30 bp, Artificial Sequence
  Synthetic oligonucleotide
atacagttgcgtctgcctttaattagcagc

SEQ ID NO: 378710 - DNA, 30 bp, Artificial Sequence
  Synthetic oligonucleotide
gctgcagttttcctcacggactttagcagc

SEQ ID NO: 378711 - DNA, 30 bp, Artificial Sequence
  Synthetic oligonucleotide
tagttctgtcatgagctactacaccgcagc

SEQ ID NO: 378712 - DNA, 30 bp, Artificial Sequence
  Synthetic oligonucleotide
aaacgtagcggtgcttagtgaacgcgcagc

SEQ ID NO: 378713 - DNA, 30 bp, Artificial Sequence
  Synthetic oligonucleotide
gtggaggctgaatatggttgtgctcgcagc

SEQ ID NO: 378714 - DNA, 30 bp, Artificial Sequence
  Synthetic oligonucleotide
gtggatgcctgaacgtcatctctaggcagc

SEQ ID NO: 378715 - DNA, 30 bp, Artificial Sequence
  Synthetic oligonucleotide
tgccggcttggacccctggtcaacggcagc

SEQ ID NO: 378716 - DNA, 30 bp, Artificial Sequence
  Synthetic oligonucleotide
cggtttaggtaacgaacagattcgggcagc

SEQ ID NO: 378717 - DNA, 30 bp, Artificial Sequence
  Synthetic oligonucleotide
tgatgttgactttatggtggcaggggcagc

SEQ ID NO: 378718 - DNA, 30 bp, Artificial Sequence
  Synthetic oligonucleotide
tctggaaatcggctttttacgcgtggcagc

SEQ ID NO: 378719 - DNA, 30 bp, Artificial Sequence
  Synthetic oligonucleotide
ttgaagcgacctacttacgtttaatgcagc

SEQ ID NO: 378720 - DNA, 30 bp, Artificial Sequence
  Synthetic oligonucleotide
cggcgaccccgcgtcactcggagatgcagc

SEQ ID NO: 378721 - DNA, 30 bp, Artificial Sequence
  Synthetic oligonucleotide
gttgtcaatgttgatgtataattatgcagc

SEQ ID NO: 378722 - DNA, 30 bp, Artificial Sequence
  Synthetic oligonucleotide
atgcaggagcctcaagaccggttctgcagc

SEQ ID NO: 378723 - DNA, 30 bp, Artificial Sequence
  Synthetic oligonucleotide
atagacgcacgttagtcaaacccgtgcagc

SEQ ID NO: 378724 - DNA, 30 bp, Artificial Sequence
  Synthetic oligonucleotide
atcgggattcgcgtcacttgacgaatcagc

SEQ ID NO: 378725 - DNA, 30 bp, Artificial Sequence
  Synthetic oligonucleotide
gacagggaatgaacggccgggggcatcagc

SEQ ID NO: 378726 - DNA, 30 bp, Artificial Sequence
  Synthetic oligonucleotide
actgatcagttgctgtattacatcatcagc

SEQ ID NO: 378727 - DNA, 30 bp, Artificial Sequence
  Synthetic oligonucleotide
ggcccggcttaaattcttggattcatcagc

SEQ ID NO: 378728 - DNA, 30 bp, Artificial Sequence
  Synthetic oligonucleotide
gcatcctgagtcgactatctaaggatcagc

SEQ ID NO: 378729 - DNA, 30 bp, Artificial Sequence
  Synthetic oligonucleotide
attagttcgtcgtcggttgaaatgatcagc

SEQ ID NO: 378730 - DNA, 30 bp, Artificial Sequence
  Synthetic oligonucleotide
ccagaggtttactacatgcgagatatcagc

SEQ ID NO: 378731 - DNA, 30 bp, Artificial Sequence
  Synthetic oligonucleotide
taaatacaggcgtaaccgcggagtatcagc

SEQ ID NO: 378732 - DNA, 30 bp, Artificial Sequence
  Synthetic oligonucleotide
tgctggaagcgggcgaatgcagcgctcagc

SEQ ID NO: 378733 - DNA, 30 bp, Artificial Sequence
  Synthetic oligonucleotide
ctctctgaatgtgacagctgacgtctcagc

SEQ ID NO: 378734 - DNA, 30 bp, Artificial Sequence
  Synthetic oligonucleotide
atgcgctgacaatctacatagagcgtcagc

SEQ ID NO: 378735 - DNA, 30 bp, Artificial Sequence
  Synthetic oligonucleotide
gcctcgagcacgtaatacgcgggcgtcagc

SEQ ID NO: 378736 - DNA, 30 bp, Artificial Sequence
  Synthetic oligonucleotide
agatacgctcgagggcatgcagaggtcagc

SEQ ID NO: 378737 - DNA, 30 bp, Artificial Sequence
  Synthetic oligonucleotide
gccattccataagtttttcacgaggtcagc

SEQ ID NO: 378738 - DNA, 30 bp, Artificial Sequence
  Synthetic oligonucleotide
tgatgtcccggcgcccgcgcacgattcagc

SEQ ID NO: 378739 - DNA, 30 bp, Artificial Sequence
  Synthetic oligonucleotide
tagtaccgcctccggagtgggtacttcagc

SEQ ID NO: 378740 - DNA, 30 bp, Artificial Sequence
  Synthetic oligonucleotide
agacccaaattggcccaccgtggcttcagc

SEQ ID NO: 378741 - DNA, 30 bp, Artificial Sequence
  Synthetic oligonucleotide
tgatacattgttggggcacccattttcagc

SEQ ID NO: 378742 - DNA, 30 bp, Artificial Sequence
  Synthetic oligonucleotide
atgcaaacctccattacgatctataagagc

SEQ ID NO: 378743 - DNA, 30 bp, Artificial Sequence
  Synthetic oligonucleotide
cctctacatggatacggcattttacagagc

SEQ ID NO: 378744 - DNA, 30 bp, Artificial Sequence
  Synthetic oligonucleotide
atgagacgctcgctgcctaagaaccagagc

SEQ ID NO: 378745 - DNA, 30 bp, Artificial Sequence
  Synthetic oligonucleotide
aagttacaacttatcaaattattccagagc

SEQ ID NO: 378746 - DNA, 30 bp, Artificial Sequence
  Synthetic oligonucleotide
gtgcaaagttacaaggtcttatcgcagagc

SEQ ID NO: 378747 - DNA, 30 bp, Artificial Sequence
  Synthetic oligonucleotide
tggtgcgcgaatcggaggctcttgcagagc

SEQ ID NO: 378748 - DNA, 30 bp, Artificial Sequence
  Synthetic oligonucleotide
caagtcccatttacagcgcgttgtcagagc

SEQ ID NO: 378749 - DNA, 30 bp, Artificial Sequence
  Synthetic oligonucleotide
ttatcagcgccatactattgactagagagc

SEQ ID NO: 378750 - DNA, 30 bp, Artificial Sequence
  Synthetic oligonucleotide
gagaacgtggaaaagtcagcagccgagagc

SEQ ID NO: 378751 - DNA, 30 bp, Artificial Sequence
  Synthetic oligonucleotide
ttaatttactagagagcgattctcgagagc

SEQ ID NO: 378752 - DNA, 30 bp, Artificial Sequence
  Synthetic oligonucleotide
gtccccatatagatagtactcagggagagc

SEQ ID NO: 378753 - DNA, 30 bp, Artificial Sequence
  Synthetic oligonucleotide
ttaggtgtattcccatctccgatggagagc

SEQ ID NO: 378754 - DNA, 30 bp, Artificial Sequence
  Synthetic oligonucleotide
caatgccctctaccggtaggctatgagagc

SEQ ID NO: 378755 - DNA, 30 bp, Artificial Sequence
  Synthetic oligonucleotide
tacttctagacattactccggcaatagagc

SEQ ID NO: 378756 - DNA, 30 bp, Artificial Sequence
  Synthetic oligonucleotide
gcaagaattgtcaagttagaaatatagagc

SEQ ID NO: 378757 - DNA, 30 bp, Artificial Sequence
  Synthetic oligonucleotide
gcgcctcaatgaggtcctcgtacgtagagc

SEQ ID NO: 378758 - DNA, 30 bp, Artificial Sequence
  Synthetic oligonucleotide
ctgccaggctgctgcactggcgggtagagc

SEQ ID NO: 378759 - DNA, 30 bp, Artificial Sequence
  Synthetic oligonucleotide
gcacatgcctacgcgataggtgggtagagc

SEQ ID NO: 378760 - DNA, 30 bp, Artificial Sequence
  Synthetic oligonucleotide
tgcgtagcagtccattagaggatgtagagc

SEQ ID NO: 378761 - DNA, 30 bp, Artificial Sequence
  Synthetic oligonucleotide
gacctagtagtctgcaatgaggtttagagc

SEQ ID NO: 378762 - DNA, 30 bp, Artificial Sequence
  Synthetic oligonucleotide
aaggagctggccggggaggggtgcacgagc

SEQ ID NO: 378763 - DNA, 30 bp, Artificial Sequence
  Synthetic oligonucleotide
caaaactaaatttaaagtctcgtcacgagc

SEQ ID NO: 378764 - DNA, 30 bp, Artificial Sequence
  Synthetic oligonucleotide
cgtggggggaactggggccttgatacgagc

SEQ ID NO: 378765 - DNA, 30 bp, Artificial Sequence
  Synthetic oligonucleotide
taggcttctaacattcccctgacgccgagc

SEQ ID NO: 378766 - DNA, 30 bp, Artificial Sequence
  Synthetic oligonucleotide
tgatgcccccactccaagtgtgggccgagc

SEQ ID NO: 378767 - DNA, 31 bp, Artificial Sequence
  Synthetic oligonucleotide
agaggtgtacgaaaatatcactctagcgagc

SEQ ID NO: 378768 - DNA, 30 bp, Artificial Sequence
  Synthetic oligonucleotide
cacagccttacgtccgggagacatgcgagc

SEQ ID NO: 378769 - DNA, 30 bp, Artificial Sequence
  Synthetic oligonucleotide
cactctggattttggcgactcgaatcgagc

SEQ ID NO: 378770 - DNA, 30 bp, Artificial Sequence
  Synthetic oligonucleotide
tgatgacagcagagaatgatatcatcgagc

SEQ ID NO: 378771 - DNA, 30 bp, Artificial Sequence
  Synthetic oligonucleotide
cgtcatgatggctctgcttgcagatcgagc

SEQ ID NO: 378772 - DNA, 30 bp, Artificial Sequence
  Synthetic oligonucleotide
agtaggtataatcaagaattttcctcgagc

SEQ ID NO: 378773 - DNA, 30 bp, Artificial Sequence
  Synthetic oligonucleotide
tggcatgagagtaaactaacgacgtcgagc

SEQ ID NO: 378774 - DNA, 30 bp, Artificial Sequence
  Synthetic oligonucleotide
atctctgtggggctaacggataggtcgagc

SEQ ID NO: 378775 - DNA, 30 bp, Artificial Sequence
  Synthetic oligonucleotide
tccacggacaggtacggaaggggttcgagc

SEQ ID NO: 378776 - DNA, 30 bp, Artificial Sequence
  Synthetic oligonucleotide
ggtatgtttagatactaacaatcaaggagc

SEQ ID NO: 378777 - DNA, 30 bp, Artificial Sequence
  Synthetic oligonucleotide
tgcctacaacgggggtaaggatcaaggagc

SEQ ID NO: 378778 - DNA, 30 bp, Artificial Sequence
  Synthetic oligonucleotide
tcggctttacagtcatcgccccccaggagc

SEQ ID NO: 378779 - DNA, 30 bp, Artificial Sequence
  Synthetic oligonucleotide
ttaatagagactgtttttgagcttaggagc

SEQ ID NO: 378780 - DNA, 30 bp, Artificial Sequence
  Synthetic oligonucleotide
ttcgctgctacaatttatgccgttaggagc

SEQ ID NO: 378781 - DNA, 30 bp, Artificial Sequence
  Synthetic oligonucleotide
cttaactttatacggacgacagttcggagc

SEQ ID NO: 378782 - DNA, 30 bp, Artificial Sequence
  Synthetic oligonucleotide
agtatggacggggaatgaggtgttcggagc

SEQ ID NO: 378783 - DNA, 30 bp, Artificial Sequence
  Synthetic oligonucleotide
tcacaagcgattactggaagattcgggagc

SEQ ID NO: 378784 - DNA, 30 bp, Artificial Sequence
  Synthetic oligonucleotide
cgacaaggctttgcctgtggcacggggagc

SEQ ID NO: 378785 - DNA, 30 bp, Artificial Sequence
  Synthetic oligonucleotide
ctatccgttcgattgtcacctacggggagc

SEQ ID NO: 378786 - DNA, 30 bp, Artificial Sequence
  Synthetic oligonucleotide
tttgaatacggtactgcatggtcggggagc

SEQ ID NO: 378787 - DNA, 30 bp, Artificial Sequence
  Synthetic oligonucleotide
acttggtcatggtcttgttccgttgggagc

SEQ ID NO: 378788 - DNA, 30 bp, Artificial Sequence
  Synthetic oligonucleotide
atttggacaattgagcgtatcacatggagc

SEQ ID NO: 378789 - DNA, 30 bp, Artificial Sequence
  Synthetic oligonucleotide
aatatcagagcggcagtctgtacctggagc

SEQ ID NO: 378790 - DNA, 30 bp, Artificial Sequence
  Synthetic oligonucleotide
gcggattcgctagatttgtgagtctggagc

SEQ ID NO: 378791 - DNA, 30 bp, Artificial Sequence
  Synthetic oligonucleotide
ggactcaagcgacgagagccccagtggagc

SEQ ID NO: 378792 - DNA, 30 bp, Artificial Sequence
  Synthetic oligonucleotide
cgaaccttacgtgtgaaaagcgcgtggagc

SEQ ID NO: 378793 - DNA, 30 bp, Artificial Sequence
  Synthetic oligonucleotide
tatagaatagaaggaccgagtgcgtggagc

SEQ ID NO: 378794 - DNA, 30 bp, Artificial Sequence
  Synthetic oligonucleotide
tattgtggagcaaaagtgtgcccaatgagc

SEQ ID NO: 378795 - DNA, 30 bp, Artificial Sequence
  Synthetic oligonucleotide
gtgagatgaatattagtgaacgtaatgagc

SEQ ID NO: 378796 - DNA, 30 bp, Artificial Sequence
  Synthetic oligonucleotide
gaactctacgggatggcacaatccatgagc

SEQ ID NO: 378797 - DNA, 30 bp, Artificial Sequence
  Synthetic oligonucleotide
gtagacgctttatttcccatgaccctgagc

SEQ ID NO: 378798 - DNA, 30 bp, Artificial Sequence
  Synthetic oligonucleotide
gcgcattcaagctcaagtgaacggctgagc

SEQ ID NO: 378799 - DNA, 30 bp, Artificial Sequence
  Synthetic oligonucleotide
agtgcccgtagcggcaaaactattctgagc

SEQ ID NO: 378800 - DNA, 30 bp, Artificial Sequence
  Synthetic oligonucleotide
tagaggtaggtatccaatgcaatcgtgagc

SEQ ID NO: 378801 - DNA, 30 bp, Artificial Sequence
  Synthetic oligonucleotide
acctccgaggtatatgatgcaggggtgagc

SEQ ID NO: 378802 - DNA, 30 bp, Artificial Sequence
  Synthetic oligonucleotide
cggatggctgactcttgttggatggtgagc

SEQ ID NO: 378803 - DNA, 30 bp, Artificial Sequence
  Synthetic oligonucleotide
gttaccacggccttgcttgccaaattgagc

SEQ ID NO: 378804 - DNA, 30 bp, Artificial Sequence
  Synthetic oligonucleotide
cagcgaagattcgtcactcttaaattgagc

SEQ ID NO: 378805 - DNA, 30 bp, Artificial Sequence
  Synthetic oligonucleotide
ttcctcgcttcaatgggagaagtattgagc

SEQ ID NO: 378806 - DNA, 30 bp, Artificial Sequence
  Synthetic oligonucleotide
agaccggggtgaaaatcaccgctcttgagc

SEQ ID NO: 378807 - DNA, 30 bp, Artificial Sequence
  Synthetic oligonucleotide
gagcgacaactcaagtgttggaagttgagc

SEQ ID NO: 378808 - DNA, 30 bp, Artificial Sequence
  Synthetic oligonucleotide
aatctagtttacgaatatacctgtttgagc

SEQ ID NO: 378809 - DNA, 30 bp, Artificial Sequence
  Synthetic oligonucleotide
aaattctggcgcaactttcccataaatagc

SEQ ID NO: 378810 - DNA, 30 bp, Artificial Sequence
  Synthetic oligonucleotide
tatcgattgctagaaaatctcttcaatagc

SEQ ID NO: 378811 - DNA, 30 bp, Artificial Sequence
  Synthetic oligonucleotide
tacgatcgcgatctaagtggaaataatagc

SEQ ID NO: 378812 - DNA, 30 bp, Artificial Sequence
  Synthetic oligonucleotide
gcagatcaaatggcgcgatatattaatagc

SEQ ID NO: 378813 - DNA, 30 bp, Artificial Sequence
  Synthetic oligonucleotide
tttggactatagtgattaccacaacatagc

SEQ ID NO: 378814 - DNA, 31 bp, Artificial Sequence
  Synthetic oligonucleotide
ctgttacgctggtgaatactgttaacatagc

SEQ ID NO: 378815 - DNA, 30 bp, Artificial Sequence
  Synthetic oligonucleotide
atccaagactaatgcgcggtatcccatagc

SEQ ID NO: 378816 - DNA, 30 bp, Artificial Sequence
  Synthetic oligonucleotide
caacattctaagtgctttttgtatcatagc

SEQ ID NO: 378817 - DNA, 30 bp, Artificial Sequence
  Synthetic oligonucleotide
cctagctgaggtcgcggtgaaactcatagc

SEQ ID NO: 378818 - DNA, 30 bp, Artificial Sequence
  Synthetic oligonucleotide
taggttggctgacctactacaggtcatagc

SEQ ID NO: 378819 - DNA, 30 bp, Artificial Sequence
  Synthetic oligonucleotide
agattttcgaaccggtctgccctagatagc

SEQ ID NO: 378820 - DNA, 30 bp, Artificial Sequence
  Synthetic oligonucleotide
agtccaacctaaatagttgatgtagatagc

SEQ ID NO: 378821 - DNA, 30 bp, Artificial Sequence
  Synthetic oligonucleotide
tatcggagctccacaagccgaactgatagc

SEQ ID NO: 378822 - DNA, 30 bp, Artificial Sequence
  Synthetic oligonucleotide
ctacttggcggtagcaaggccggatatagc

SEQ ID NO: 378823 - DNA, 30 bp, Artificial Sequence
  Synthetic oligonucleotide
caaggtggtgtttggccgccggcctatagc

SEQ ID NO: 378824 - DNA, 30 bp, Artificial Sequence
  Synthetic oligonucleotide
ttctggagcgtgcttaaagcatattatagc

SEQ ID NO: 378825 - DNA, 30 bp, Artificial Sequence
  Synthetic oligonucleotide
gtgagggtataggcctgcaagcgcactagc

SEQ ID NO: 378826 - DNA, 30 bp, Artificial Sequence
  Synthetic oligonucleotide
aaaacggcagcgcgtgcacacaagactagc

SEQ ID NO: 378827 - DNA, 30 bp, Artificial Sequence
  Synthetic oligonucleotide
gtaactccccgtctagttttagagactagc

SEQ ID NO: 378828 - DNA, 30 bp, Artificial Sequence
  Synthetic oligonucleotide
aacctggtggatctgtagcgtaatactagc

SEQ ID NO: 378829 - DNA, 30 bp, Artificial Sequence
  Synthetic oligonucleotide
ggactcggaaccacgggggggtgccctagc

SEQ ID NO: 378830 - DNA, 30 bp, Artificial Sequence
  Synthetic oligonucleotide
agtcgagtagttagatgtcccgtagctagc

SEQ ID NO: 378831 - DNA, 30 bp, Artificial Sequence
  Synthetic oligonucleotide
gcagtaggggtcaatctacaggacgctagc

SEQ ID NO: 378832 - DNA, 30 bp, Artificial Sequence
  Synthetic oligonucleotide
gagtatcgttactgcggtcacgtggctagc

SEQ ID NO: 378833 - DNA, 30 bp, Artificial Sequence
  Synthetic oligonucleotide
gatatagggtcgcacacaatctttgctagc

SEQ ID NO: 378834 - DNA, 30 bp, Artificial Sequence
  Synthetic oligonucleotide
tatcaacacgcgtgagctttctactctagc

SEQ ID NO: 378835 - DNA, 30 bp, Artificial Sequence
  Synthetic oligonucleotide
ctcagagtgcctgtgactgaacggtctagc

SEQ ID NO: 378836 - DNA, 30 bp, Artificial Sequence
  Synthetic oligonucleotide
ggattaactttagaggattaactaagtagc

SEQ ID NO: 378837 - DNA, 30 bp, Artificial Sequence
  Synthetic oligonucleotide
atatggtttgggggacgttcgatcagtagc

SEQ ID NO: 378838 - DNA, 30 bp, Artificial Sequence
  Synthetic oligonucleotide
aagctagcagctcatagttagacgagtagc

SEQ ID NO: 378839 - DNA, 30 bp, Artificial Sequence
  Synthetic oligonucleotide
tccggcggcttgattccccgtaatagtagc

SEQ ID NO: 378840 - DNA, 30 bp, Artificial Sequence
  Synthetic oligonucleotide
cgaccgggtgatattcggaggcatagtagc

SEQ ID NO: 378841 - DNA, 30 bp, Artificial Sequence
  Synthetic oligonucleotide
ggcaatgtcgtccgctctttgacacgtagc

SEQ ID NO: 378842 - DNA, 30 bp, Artificial Sequence
  Synthetic oligonucleotide
gacagggaaacacatatttgaggacgtagc

SEQ ID NO: 378843 - DNA, 30 bp, Artificial Sequence
  Synthetic oligonucleotide
acagcaaggtgctgaccataacaccgtagc

SEQ ID NO: 378844 - DNA, 30 bp, Artificial Sequence
  Synthetic oligonucleotide
atgaactattctcgctctactagccgtagc

SEQ ID NO: 378845 - DNA, 30 bp, Artificial Sequence
  Synthetic oligonucleotide
cgtgcataagggcttgaccttatcggtagc

SEQ ID NO: 378846 - DNA, 30 bp, Artificial Sequence
  Synthetic oligonucleotide
aaggcgggtgtcccctattacgggggtagc

SEQ ID NO: 378847 - DNA, 30 bp, Artificial Sequence
  Synthetic oligonucleotide
catatactgtgatgttactgcatgggtagc

SEQ ID NO: 378848 - DNA, 30 bp, Artificial Sequence
  Synthetic oligonucleotide
gagtaacctgttaagccgttagtgggtagc

SEQ ID NO: 378849 - DNA, 30 bp, Artificial Sequence
  Synthetic oligonucleotide
gcctttggggctcaactgcgcaatggtagc

SEQ ID NO: 378850 - DNA, 30 bp, Artificial Sequence
  Synthetic oligonucleotide
cctatctcacgccccctcatagttggtagc

SEQ ID NO: 378851 - DNA, 30 bp, Artificial Sequence
  Synthetic oligonucleotide
tgataggtgttagttctccaagagtgtagc

SEQ ID NO: 378852 - DNA, 30 bp, Artificial Sequence
  Synthetic oligonucleotide
ttgatcctcgcggtggattaatagtgtagc

SEQ ID NO: 378853 - DNA, 30 bp, Artificial Sequence
  Synthetic oligonucleotide
ccgggaccttcgtccgagttggcgtgtagc

SEQ ID NO: 378854 - DNA, 30 bp, Artificial Sequence
  Synthetic oligonucleotide
gatcgggtttagagtgtaagttattgtagc

SEQ ID NO: 378855 - DNA, 30 bp, Artificial Sequence
  Synthetic oligonucleotide
tcatagatatttcttgaccgcgaaattagc

SEQ ID NO: 378856 - DNA, 30 bp, Artificial Sequence
  Synthetic oligonucleotide
gcatctcgaggtcagcggccaccaattagc

SEQ ID NO: 378857 - DNA, 30 bp, Artificial Sequence
  Synthetic oligonucleotide
ctgccgctgacacgggatagactgattagc

SEQ ID NO: 378858 - DNA, 30 bp, Artificial Sequence
  Synthetic oligonucleotide
cgagcagggttcaaccaagtattgattagc

SEQ ID NO: 378859 - DNA, 30 bp, Artificial Sequence
  Synthetic oligonucleotide
tgggatgcatgcatagcgaagttgattagc

SEQ ID NO: 378860 - DNA, 30 bp, Artificial Sequence
  Synthetic oligonucleotide
agcgctatcattcatgcttggttgattagc

SEQ ID NO: 378861 - DNA, 30 bp, Artificial Sequence
  Synthetic oligonucleotide
tacgtggaatactgttcggaccatattagc

SEQ ID NO: 378862 - DNA, 30 bp, Artificial Sequence
  Synthetic oligonucleotide
attggtatcacagtactcctttctattagc

SEQ ID NO: 378863 - DNA, 30 bp, Artificial Sequence
  Synthetic oligonucleotide
ctctccgcattcatggaaggggttattagc

SEQ ID NO: 378864 - DNA, 30 bp, Artificial Sequence
  Synthetic oligonucleotide
ctctatgtgggaaggtttttgaaacttagc

SEQ ID NO: 378865 - DNA, 30 bp, Artificial Sequence
  Synthetic oligonucleotide
aaagtgtaaggcaaattagagaggcttagc

SEQ ID NO: 378866 - DNA, 30 bp, Artificial Sequence
  Synthetic oligonucleotide
cgcagggatcacctggagatttggcttagc

SEQ ID NO: 378867 - DNA, 30 bp, Artificial Sequence
  Synthetic oligonucleotide
gacagggcaaagacaggcacggttcttagc

SEQ ID NO: 378868 - DNA, 30 bp, Artificial Sequence
  Synthetic oligonucleotide
gtattacttaggcctttgtgctgggttagc

SEQ ID NO: 378869 - DNA, 30 bp, Artificial Sequence
  Synthetic oligonucleotide
agagttcatactggtcaactcgtggttagc

SEQ ID NO: 378870 - DNA, 30 bp, Artificial Sequence
  Synthetic oligonucleotide
tgataatcgcactccacttttggtgttagc

SEQ ID NO: 378871 - DNA, 30 bp, Artificial Sequence
  Synthetic oligonucleotide
gaggggaccgagtccctaaggccctttagc

SEQ ID NO: 378872 - DNA, 30 bp, Artificial Sequence
  Synthetic oligonucleotide
tggtctgttaaaccgaggacacagtttagc

SEQ ID NO: 378873 - DNA, 30 bp, Artificial Sequence
  Synthetic oligonucleotide
ctcttggtctgcatgtactgataaaaacgc

SEQ ID NO: 378874 - DNA, 30 bp, Artificial Sequence
  Synthetic oligonucleotide
tttctggggtcccgataagtctaaaaacgc

SEQ ID NO: 378875 - DNA, 30 bp, Artificial Sequence
  Synthetic oligonucleotide
tattccagacgtgtgaacgaggcaaaacgc

SEQ ID NO: 378876 - DNA, 30 bp, Artificial Sequence
  Synthetic oligonucleotide
agaattggatcaaagtaagaagtgaaacgc

SEQ ID NO: 378877 - DNA, 30 bp, Artificial Sequence
  Synthetic oligonucleotide
ccaaggcgttcaatagctttcttgaaacgc

SEQ ID NO: 378878 - DNA, 30 bp, Artificial Sequence
  Synthetic oligonucleotide
gtataatgttcatctgtctagcgacaacgc

SEQ ID NO: 378879 - DNA, 30 bp, Artificial Sequence
  Synthetic oligonucleotide
ccggtatagtggagaaaggtgccccaacgc

SEQ ID NO: 378880 - DNA, 30 bp, Artificial Sequence
  Synthetic oligonucleotide
cctattatcgactagatagactcgcaacgc

SEQ ID NO: 378881 - DNA, 30 bp, Artificial Sequence
  Synthetic oligonucleotide
tattcataaaaaagatgggcacgtcaacgc

SEQ ID NO: 378882 - DNA, 30 bp, Artificial Sequence
  Synthetic oligonucleotide
cgatctgacgggcaccaattgctcgaacgc

SEQ ID NO: 378883 - DNA, 30 bp, Artificial Sequence
  Synthetic oligonucleotide
atacccatgtgtggacgttaacgggaacgc

SEQ ID NO: 378884 - DNA, 30 bp, Artificial Sequence
  Synthetic oligonucleotide
tacaaaggatgttctgtccatggggaacgc

SEQ ID NO: 378885 - DNA, 30 bp, Artificial Sequence
  Synthetic oligonucleotide
taccgtaatgggtatatgtgaatggaacgc

SEQ ID NO: 378886 - DNA, 30 bp, Artificial Sequence
  Synthetic oligonucleotide
acataatctctcttgcaagcccatgaacgc

SEQ ID NO: 378887 - DNA, 30 bp, Artificial Sequence
  Synthetic oligonucleotide
agtgggtaagatgtcatgcgttctgaacgc

SEQ ID NO: 378888 - DNA, 30 bp, Artificial Sequence
  Synthetic oligonucleotide
aagccaggcggtttattgctttcctaacgc

SEQ ID NO: 378889 - DNA, 30 bp, Artificial Sequence
  Synthetic oligonucleotide
ccacacatcgcgtggctggtttcctaacgc

SEQ ID NO: 378890 - DNA, 30 bp, Artificial Sequence
  Synthetic oligonucleotide
tgcaatctactagagaatatagtctaacgc

SEQ ID NO: 378891 - DNA, 30 bp, Artificial Sequence
  Synthetic oligonucleotide
aagttggtacggtcccagatcaattaacgc

SEQ ID NO: 378892 - DNA, 30 bp, Artificial Sequence
  Synthetic oligonucleotide
agacaaaacctcttggtcggttgaacacgc

SEQ ID NO: 378893 - DNA, 30 bp, Artificial Sequence
  Synthetic oligonucleotide
cagttgattatggaacgagctaagacacgc

SEQ ID NO: 378894 - DNA, 30 bp, Artificial Sequence
  Synthetic oligonucleotide
cacgaggcaccgtagtctatatcaccacgc

SEQ ID NO: 378895 - DNA, 30 bp, Artificial Sequence
  Synthetic oligonucleotide
agtgaacgtcgtgcgttgtcattgccacgc

SEQ ID NO: 378896 - DNA, 30 bp, Artificial Sequence
  Synthetic oligonucleotide
ctcatagtgacgaaacatcagtatccacgc

SEQ ID NO: 378897 - DNA, 30 bp, Artificial Sequence
  Synthetic oligonucleotide
tcagccatcaagtgaaccttcgttccacgc

SEQ ID NO: 378898 - DNA, 30 bp, Artificial Sequence
  Synthetic oligonucleotide
ggctcagtacatcgctggtacatagcacgc

SEQ ID NO: 378899 - DNA, 30 bp, Artificial Sequence
  Synthetic oligonucleotide
aggaaaagctccgtcggccatgacgcacgc

SEQ ID NO: 378900 - DNA, 30 bp, Artificial Sequence
  Synthetic oligonucleotide
attccggtccgcaaagtattgcgcgcacgc

SEQ ID NO: 378901 - DNA, 30 bp, Artificial Sequence
  Synthetic oligonucleotide
atatcgggttttcgactgagattggcacgc

SEQ ID NO: 378902 - DNA, 29 bp, Artificial Sequence
  Synthetic oligonucleotide
tgggtccacttcggcgaggatttgcacgc

SEQ ID NO: 378903 - DNA, 30 bp, Artificial Sequence
  Synthetic oligonucleotide
tctgtagagagccgcgtagagcgatcacgc

SEQ ID NO: 378904 - DNA, 30 bp, Artificial Sequence
  Synthetic oligonucleotide
cgactctcttataggttagcttactcacgc

SEQ ID NO: 378905 - DNA, 30 bp, Artificial Sequence
  Synthetic oligonucleotide
tagaaactatagtgaaaacgcccctcacgc

SEQ ID NO: 378906 - DNA, 30 bp, Artificial Sequence
  Synthetic oligonucleotide
acggtgaacaactcctctagcatctcacgc

SEQ ID NO: 378907 - DNA, 30 bp, Artificial Sequence
  Synthetic oligonucleotide
agatgtgttcagatggttcgcaggtcacgc

SEQ ID NO: 378908 - DNA, 30 bp, Artificial Sequence
  Synthetic oligonucleotide
ggtaacagtcagttttgtccaccaagacgc

SEQ ID NO: 378909 - DNA, 30 bp, Artificial Sequence
  Synthetic oligonucleotide
caactaccaccaagaagggagttaagacgc

SEQ ID NO: 378910 - DNA, 30 bp, Artificial Sequence
  Synthetic oligonucleotide
tagagacaaacctattcacactccagacgc

SEQ ID NO: 378911 - DNA, 30 bp, Artificial Sequence
  Synthetic oligonucleotide
ccgctcgccatgtgggcctggagcagacgc

SEQ ID NO: 378912 - DNA, 30 bp, Artificial Sequence
  Synthetic oligonucleotide
tactctactcaaatgtattggaggagacgc

SEQ ID NO: 378913 - DNA, 30 bp, Artificial Sequence
  Synthetic oligonucleotide
ggaggtaaggctgcgaagtcacatagacgc

SEQ ID NO: 378914 - DNA, 30 bp, Artificial Sequence
  Synthetic oligonucleotide
catatcgtaaggcatgggtgatcacgacgc

SEQ ID NO: 378915 - DNA, 30 bp, Artificial Sequence
  Synthetic oligonucleotide
acacatttggacgcgctctgtgtacgacgc

SEQ ID NO: 378916 - DNA, 30 bp, Artificial Sequence
  Synthetic oligonucleotide
ataattataggtaaaatgcgttcccgacgc

SEQ ID NO: 378917 - DNA, 30 bp, Artificial Sequence
  Synthetic oligonucleotide
agtaatacaagctgctttccaatccgacgc

SEQ ID NO: 378918 - DNA, 30 bp, Artificial Sequence
  Synthetic oligonucleotide
tgtacatggactgcctatttgttccgacgc

SEQ ID NO: 378919 - DNA, 30 bp, Artificial Sequence
  Synthetic oligonucleotide
gtatgagccaccaattcgcaatttcgacgc

SEQ ID NO: 378920 - DNA, 30 bp, Artificial Sequence
  Synthetic oligonucleotide
aagagcgagaagaaaaggggtaacggacgc

SEQ ID NO: 378921 - DNA, 30 bp, Artificial Sequence
  Synthetic oligonucleotide
gggccaaggacggcgccaaacaccggacgc

SEQ ID NO: 378922 - DNA, 30 bp, Artificial Sequence
  Synthetic oligonucleotide
tttgggcgtccatggaacaacaagggacgc

SEQ ID NO: 378923 - DNA, 30 bp, Artificial Sequence
  Synthetic oligonucleotide
gctgccaatattctcttaccccagggacgc

SEQ ID NO: 378924 - DNA, 30 bp, Artificial Sequence
  Synthetic oligonucleotide
gatgataaggcactagcgtcatcgggacgc

SEQ ID NO: 378925 - DNA, 30 bp, Artificial Sequence
  Synthetic oligonucleotide
cggataagtaagtgagcgtaaagctgacgc

SEQ ID NO: 378926 - DNA, 30 bp, Artificial Sequence
  Synthetic oligonucleotide
tgtccgtaatagggacggcctgtctgacgc

SEQ ID NO: 378927 - DNA, 30 bp, Artificial Sequence
  Synthetic oligonucleotide
cctgctcctacaagtaagacactaatacgc

SEQ ID NO: 378928 - DNA, 30 bp, Artificial Sequence
  Synthetic oligonucleotide
atacattgtaacagatttctattaatacgc

SEQ ID NO: 378929 - DNA, 30 bp, Artificial Sequence
  Synthetic oligonucleotide
ataacccgatcatcacagtttgacatacgc

SEQ ID NO: 378930 - DNA, 30 bp, Artificial Sequence
  Synthetic oligonucleotide
tccgctgagagatagcaagttgccatacgc

SEQ ID NO: 378931 - DNA, 30 bp, Artificial Sequence
  Synthetic oligonucleotide
ctaatgtgacggcaagggcaggtcatacgc

SEQ ID NO: 378932 - DNA, 30 bp, Artificial Sequence
  Synthetic oligonucleotide
taattgatggcggcagggtagaagatacgc

SEQ ID NO: 378933 - DNA, 30 bp, Artificial Sequence
  Synthetic oligonucleotide
ttcgatagttgtatgcacactacgatacgc

SEQ ID NO: 378934 - DNA, 30 bp, Artificial Sequence
  Synthetic oligonucleotide
gaaaccgaagcggggtaggctgcgatacgc

SEQ ID NO: 378935 - DNA, 30 bp, Artificial Sequence
  Synthetic oligonucleotide
cgagatcctgagtatgggccacggatacgc

SEQ ID NO: 378936 - DNA, 30 bp, Artificial Sequence
  Synthetic oligonucleotide
gtgactaaatttgcacgttacaatatacgc

SEQ ID NO: 378937 - DNA, 30 bp, Artificial Sequence
  Synthetic oligonucleotide
aaactgtcccttaaaaattggaatatacgc

SEQ ID NO: 378938 - DNA, 30 bp, Artificial Sequence
  Synthetic oligonucleotide
aaacgcgccgagcgatcgtgtcgtatacgc

SEQ ID NO: 378939 - DNA, 30 bp, Artificial Sequence
  Synthetic oligonucleotide
gggatgcgtaacaacgccaccgaactacgc

SEQ ID NO: 378940 - DNA, 30 bp, Artificial Sequence
  Synthetic oligonucleotide
tcagtgtaattagccactgaacacctacgc

SEQ ID NO: 378941 - DNA, 30 bp, Artificial Sequence
  Synthetic oligonucleotide
gggccaagctaaagaggtcttaccctacgc

SEQ ID NO: 378942 - DNA, 30 bp, Artificial Sequence
  Synthetic oligonucleotide
atgaaggttttcaagctggaaagcgtacgc

SEQ ID NO: 378943 - DNA, 30 bp, Artificial Sequence
  Synthetic oligonucleotide
actggcggatatgcccgggttgtcgtacgc

SEQ ID NO: 378944 - DNA, 30 bp, Artificial Sequence
  Synthetic oligonucleotide
ccccgagatgctaaaccactgttggtacgc

SEQ ID NO: 378945 - DNA, 30 bp, Artificial Sequence
  Synthetic oligonucleotide
ttcgtgtcttactatgttctgattgtacgc

SEQ ID NO: 378946 - DNA, 30 bp, Artificial Sequence
  Synthetic oligonucleotide
tctatactcagcatatattcacccttacgc

SEQ ID NO: 378947 - DNA, 30 bp, Artificial Sequence
  Synthetic oligonucleotide
tggtaagacaggtttagcgtcctcttacgc

SEQ ID NO: 378948 - DNA, 30 bp, Artificial Sequence
  Synthetic oligonucleotide
ttcgttgggaggattgagcattcgttacgc

SEQ ID NO: 378949 - DNA, 30 bp, Artificial Sequence
  Synthetic oligonucleotide
cacagacttgtacgaagctggtggttacgc

SEQ ID NO: 378950 - DNA, 30 bp, Artificial Sequence
  Synthetic oligonucleotide
actaaatgagcacttaaacgcttgttacgc

SEQ ID NO: 378951 - DNA, 30 bp, Artificial Sequence
  Synthetic oligonucleotide
agaatgatataaattttcgtctatttacgc

SEQ ID NO: 378952 - DNA, 30 bp, Artificial Sequence
  Synthetic oligonucleotide
ggcgttagggacagaagaaattgtttacgc

SEQ ID NO: 378953 - DNA, 30 bp, Artificial Sequence
  Synthetic oligonucleotide
gttcgcctgtcgattgaaagaatcaaccgc

SEQ ID NO: 378954 - DNA, 30 bp, Artificial Sequence
  Synthetic oligonucleotide
gcgggtctgtactcgccttcgcagaaccgc

SEQ ID NO: 378955 - DNA, 30 bp, Artificial Sequence
  Synthetic oligonucleotide
atagctgcaggtgtaatggaaccgaaccgc

SEQ ID NO: 378956 - DNA, 30 bp, Artificial Sequence
  Synthetic oligonucleotide
ggcactgtttgattacagactaggaaccgc

SEQ ID NO: 378957 - DNA, 30 bp, Artificial Sequence
  Synthetic oligonucleotide
attcatcggaagattttatcagataaccgc

SEQ ID NO: 378958 - DNA, 30 bp, Artificial Sequence
  Synthetic oligonucleotide
agcaaagagagcgttatgaccctccaccgc

SEQ ID NO: 378959 - DNA, 30 bp, Artificial Sequence
  Synthetic oligonucleotide
ggatagtgtgcttctatttgggtgcaccgc

SEQ ID NO: 378960 - DNA, 30 bp, Artificial Sequence
  Synthetic oligonucleotide
cttgaaaacatatatatggacttgcaccgc

SEQ ID NO: 378961 - DNA, 30 bp, Artificial Sequence
  Synthetic oligonucleotide
ccattatcttcaacgtgattctttcaccgc

SEQ ID NO: 378962 - DNA, 30 bp, Artificial Sequence
  Synthetic oligonucleotide
cggagtgcacaatagcttggcaaagaccgc

SEQ ID NO: 378963 - DNA, 30 bp, Artificial Sequence
  Synthetic oligonucleotide
atactctcgcgacggccatgcacagaccgc

SEQ ID NO: 378964 - DNA, 30 bp, Artificial Sequence
  Synthetic oligonucleotide
tagatacggtctggcgatcgttcagaccgc

SEQ ID NO: 378965 - DNA, 31 bp, Artificial Sequence
  Synthetic oligonucleotide
gtacaagtactttccatgccgcaacgaccgc

SEQ ID NO: 378966 - DNA, 30 bp, Artificial Sequence
  Synthetic oligonucleotide
acgaatatctagtactcacacccggaccgc

SEQ ID NO: 378967 - DNA, 30 bp, Artificial Sequence
  Synthetic oligonucleotide
atggcggacagaatttgacttgcggaccgc

SEQ ID NO: 378968 - DNA, 30 bp, Artificial Sequence
  Synthetic oligonucleotide
ttagagtcaatttccaacatagttgaccgc

SEQ ID NO: 378969 - DNA, 30 bp, Artificial Sequence
  Synthetic oligonucleotide
acggtatcaatgtttcaacttagataccgc

SEQ ID NO: 378970 - DNA, 30 bp, Artificial Sequence
  Synthetic oligonucleotide
attatagggatcgctgctagccggtaccgc

SEQ ID NO: 378971 - DNA, 30 bp, Artificial Sequence
  Synthetic oligonucleotide
gcaagtgagttctccgcaggctaaacccgc

SEQ ID NO: 378972 - DNA, 30 bp, Artificial Sequence
  Synthetic oligonucleotide
aagtaagggcgcaggaaagtaacaacccgc

SEQ ID NO: 378973 - DNA, 28 bp, Artificial Sequence
  Synthetic oligonucleotide
ctgcatcagtgttcaattaggaacccgc

SEQ ID NO: 378974 - DNA, 30 bp, Artificial Sequence
  Synthetic oligonucleotide
tcggttatacccggtacacggttaacccgc

SEQ ID NO: 378975 - DNA, 30 bp, Artificial Sequence
  Synthetic oligonucleotide
ggtatagtagttagtagcgtcaacacccgc

SEQ ID NO: 378976 - DNA, 30 bp, Artificial Sequence
  Synthetic oligonucleotide
gaggacgcatgttgtgcagagacgacccgc

SEQ ID NO: 378977 - DNA, 30 bp, Artificial Sequence
  Synthetic oligonucleotide
tacagtcccatccgtagaactggtacccgc

SEQ ID NO: 378978 - DNA, 30 bp, Artificial Sequence
  Synthetic oligonucleotide
gtttgccttagttgtcattgtcgaccccgc

SEQ ID NO: 378979 - DNA, 30 bp, Artificial Sequence
  Synthetic oligonucleotide
attcgtcagtttgaggtatgtagcgcccgc

SEQ ID NO: 378980 - DNA, 30 bp, Artificial Sequence
  Synthetic oligonucleotide
cgtccgttaccggataaatgcagggcccgc

SEQ ID NO: 378981 - DNA, 30 bp, Artificial Sequence
  Synthetic oligonucleotide
caggggtacaattgtgcctgtatggcccgc

SEQ ID NO: 378982 - DNA, 30 bp, Artificial Sequence
  Synthetic oligonucleotide
atgcttacgtttactcaattgtgtgcccgc

SEQ ID NO: 378983 - DNA, 30 bp, Artificial Sequence
  Synthetic oligonucleotide
ggtcgggccctgccgagctggcaatcccgc

SEQ ID NO: 378984 - DNA, 30 bp, Artificial Sequence
  Synthetic oligonucleotide
tgatgggaggctgcctgctggacgtcccgc

SEQ ID NO: 378985 - DNA, 30 bp, Artificial Sequence
  Synthetic oligonucleotide
agtttcagtaggatcgggttttattcccgc

SEQ ID NO: 378986 - DNA, 30 bp, Artificial Sequence
  Synthetic oligonucleotide
tttttggaacgtcgatagttcaaaagccgc

SEQ ID NO: 378987 - DNA, 30 bp, Artificial Sequence
  Synthetic oligonucleotide
gatacgactgtcccgcccactgtcagccgc

SEQ ID NO: 378988 - DNA, 30 bp, Artificial Sequence
  Synthetic oligonucleotide
agcagccactagtagtcctcaatgagccgc

SEQ ID NO: 378989 - DNA, 30 bp, Artificial Sequence
  Synthetic oligonucleotide
agagcgcttgaaatacttaactatagccgc

SEQ ID NO: 378990 - DNA, 30 bp, Artificial Sequence
  Synthetic oligonucleotide
gagatcacttgacctctagttagtagccgc

SEQ ID NO: 378991 - DNA, 30 bp, Artificial Sequence
  Synthetic oligonucleotide
tggggaagtttcattcttgaccttcgccgc

SEQ ID NO: 378992 - DNA, 30 bp, Artificial Sequence
  Synthetic oligonucleotide
aacaacgaatttatatgagatgtaggccgc

SEQ ID NO: 378993 - DNA, 30 bp, Artificial Sequence
  Synthetic oligonucleotide
tccgaatcggttggagtgatgtgcggccgc

SEQ ID NO: 378994 - DNA, 30 bp, Artificial Sequence
  Synthetic oligonucleotide
gatgtcgttctctagactcggtagggccgc

SEQ ID NO: 378995 - DNA, 30 bp, Artificial Sequence
  Synthetic oligonucleotide
ctctggcaatatatagagcagtcgggccgc

SEQ ID NO: 378996 - DNA, 30 bp, Artificial Sequence
  Synthetic oligonucleotide
gctctgccaacttaatcttggttgggccgc

SEQ ID NO: 378997 - DNA, 30 bp, Artificial Sequence
  Synthetic oligonucleotide
gggactatgatttcaaacttttatggccgc

SEQ ID NO: 378998 - DNA, 30 bp, Artificial Sequence
  Synthetic oligonucleotide
tcccggcccctgttgccctcatctggccgc

SEQ ID NO: 378999 - DNA, 30 bp, Artificial Sequence
  Synthetic oligonucleotide
atcaatcgccttgcatgcagcctatgccgc

SEQ ID NO: 379000 - DNA, 30 bp, Artificial Sequence
  Synthetic oligonucleotide
cgccacatgcagcaatagataatttgccgc

SEQ ID NO: 379001 - DNA, 30 bp, Artificial Sequence
  Synthetic oligonucleotide
aattgtgactctagatttgatgaaatccgc

SEQ ID NO: 379002 - DNA, 30 bp, Artificial Sequence
  Synthetic oligonucleotide
agcgcggtccaagacattttgtgaatccgc

SEQ ID NO: 379003 - DNA, 30 bp, Artificial Sequence
  Synthetic oligonucleotide
cgtgtaacgagagacatatggggcatccgc

SEQ ID NO: 379004 - DNA, 30 bp, Artificial Sequence
  Synthetic oligonucleotide
tctcaattaatggccaaggacatgatccgc

SEQ ID NO: 379005 - DNA, 30 bp, Artificial Sequence
  Synthetic oligonucleotide
tcagcaatcataggggagtagggactccgc

SEQ ID NO: 379006 - DNA, 30 bp, Artificial Sequence
  Synthetic oligonucleotide
aattggtatgcctggacgcggggcctccgc

SEQ ID NO: 379007 - DNA, 30 bp, Artificial Sequence
  Synthetic oligonucleotide
tgtaccagtcccaggaatagtttcctccgc

SEQ ID NO: 379008 - DNA, 30 bp, Artificial Sequence
  Synthetic oligonucleotide
agttgggccgggggtcgggggaatctccgc

SEQ ID NO: 379009 - DNA, 30 bp, Artificial Sequence
  Synthetic oligonucleotide
tgccacagaggctgtgcctgtgcagtccgc

SEQ ID NO: 379010 - DNA, 30 bp, Artificial Sequence
  Synthetic oligonucleotide
gtctatcgtaagacggtagaatccgtccgc

SEQ ID NO: 379011 - DNA, 30 bp, Artificial Sequence
  Synthetic oligonucleotide
tacatactctggactaggttgggcgtccgc

SEQ ID NO: 379012 - DNA, 30 bp, Artificial Sequence
  Synthetic oligonucleotide
ttattgctggtgtaggcgaacaaggtccgc

SEQ ID NO: 379013 - DNA, 30 bp, Artificial Sequence
  Synthetic oligonucleotide
ttcgcggcaagttctatactataggtccgc

SEQ ID NO: 379014 - DNA, 30 bp, Artificial Sequence
  Synthetic oligonucleotide
tgcaacctccacctaggatctaatgtccgc

SEQ ID NO: 379015 - DNA, 30 bp, Artificial Sequence
  Synthetic oligonucleotide
gaaagtatgggcgtctggatccctgtccgc

SEQ ID NO: 379016 - DNA, 30 bp, Artificial Sequence
  Synthetic oligonucleotide
tctaggaagatccatacattgtctgtccgc

SEQ ID NO: 379017 - DNA, 30 bp, Artificial Sequence
  Synthetic oligonucleotide
accaatctatctatattctcggttgtccgc

SEQ ID NO: 379018 - DNA, 30 bp, Artificial Sequence
  Synthetic oligonucleotide
ttgagcccccttgattaactttgattccgc

SEQ ID NO: 379019 - DNA, 30 bp, Artificial Sequence
  Synthetic oligonucleotide
tggtatatatgcccgagggaaaccttccgc

SEQ ID NO: 379020 - DNA, 30 bp, Artificial Sequence
  Synthetic oligonucleotide
gacgttttcccatcagcatcggtcttccgc

SEQ ID NO: 379021 - DNA, 30 bp, Artificial Sequence
  Synthetic oligonucleotide
aattgatacattttgtaatggtcgttccgc

SEQ ID NO: 379022 - DNA, 30 bp, Artificial Sequence
  Synthetic oligonucleotide
tgaaccgttgtggatcgttcagggttccgc

SEQ ID NO: 379023 - DNA, 30 bp, Artificial Sequence
  Synthetic oligonucleotide
cgagtcgtgcgcccactgcctggtttccgc

SEQ ID NO: 379024 - DNA, 30 bp, Artificial Sequence
  Synthetic oligonucleotide
tcagcatggcctttttaaggccttttccgc

SEQ ID NO: 379025 - DNA, 30 bp, Artificial Sequence
  Synthetic oligonucleotide
gcacgctcagccattgtgcatataaagcgc

SEQ ID NO: 379026 - DNA, 30 bp, Artificial Sequence
  Synthetic oligonucleotide
accactttattggtctggtggttaaagcgc

SEQ ID NO: 379027 - DNA, 30 bp, Artificial Sequence
  Synthetic oligonucleotide
aattccaccagaaagaccgaactcaagcgc

SEQ ID NO: 379028 - DNA, 30 bp, Artificial Sequence
  Synthetic oligonucleotide
tcagccgtgcatgaattggaattcaagcgc

SEQ ID NO: 379029 - DNA, 30 bp, Artificial Sequence
  Synthetic oligonucleotide
cgcatccacgagaatttataagggaagcgc

SEQ ID NO: 379030 - DNA, 30 bp, Artificial Sequence
  Synthetic oligonucleotide
gacttgtgatattaggactacatgaagcgc

SEQ ID NO: 379031 - DNA, 30 bp, Artificial Sequence
  Synthetic oligonucleotide
ggtgactgttgtcaaaaagccttgaagcgc

SEQ ID NO: 379032 - DNA, 30 bp, Artificial Sequence
  Synthetic oligonucleotide
atgtcatgatcaggatacggtcataagcgc

SEQ ID NO: 379033 - DNA, 30 bp, Artificial Sequence
  Synthetic oligonucleotide
agcctaccaaggtgaagtgcagctaagcgc

SEQ ID NO: 379034 - DNA, 30 bp, Artificial Sequence
  Synthetic oligonucleotide
tttacagtccgcgggggagtacttaagcgc

SEQ ID NO: 379035 - DNA, 31 bp, Artificial Sequence
  Synthetic oligonucleotide
actcaagcttgagcggttggttggccagcgc

SEQ ID NO: 379036 - DNA, 30 bp, Artificial Sequence
  Synthetic oligonucleotide
gagagcgattatcctcttcactcgcagcgc

SEQ ID NO: 379037 - DNA, 30 bp, Artificial Sequence
  Synthetic oligonucleotide
gagtccttgttcactcgccaacatcagcgc

SEQ ID NO: 379038 - DNA, 30 bp, Artificial Sequence
  Synthetic oligonucleotide
cccgtccttcgtttaagggctgatcagcgc

SEQ ID NO: 379039 - DNA, 30 bp, Artificial Sequence
  Synthetic oligonucleotide
gattaagagagaggattggaataagagcgc

SEQ ID NO: 379040 - DNA, 30 bp, Artificial Sequence
  Synthetic oligonucleotide
gtgaaacttgctaaggcttataacgagcgc

SEQ ID NO: 379041 - DNA, 30 bp, Artificial Sequence
  Synthetic oligonucleotide
tgtttcctattatagacgtcgaccgagcgc

SEQ ID NO: 379042 - DNA, 30 bp, Artificial Sequence
  Synthetic oligonucleotide
gttccctccagttcacccacgtccgagcgc

SEQ ID NO: 379043 - DNA, 30 bp, Artificial Sequence
  Synthetic oligonucleotide
tgtttccgggtttagatacgactggagcgc

SEQ ID NO: 379044 - DNA, 30 bp, Artificial Sequence
  Synthetic oligonucleotide
cagtctcatagtttagagagtaatgagcgc

SEQ ID NO: 379045 - DNA, 30 bp, Artificial Sequence
  Synthetic oligonucleotide
tacattaggtactaagttacctgatagcgc

SEQ ID NO: 379046 - DNA, 30 bp, Artificial Sequence
  Synthetic oligonucleotide
caattcacagttcggaattagacctagcgc

SEQ ID NO: 379047 - DNA, 30 bp, Artificial Sequence
  Synthetic oligonucleotide
accttgggcacagcacgcttggagtagcgc

SEQ ID NO: 379048 - DNA, 30 bp, Artificial Sequence
  Synthetic oligonucleotide
gccgatgaagacctccgtcaaacttagcgc

SEQ ID NO: 379049 - DNA, 30 bp, Artificial Sequence
  Synthetic oligonucleotide
tgaaatctcatatgacgcatggaaacgcgc

SEQ ID NO: 379050 - DNA, 30 bp, Artificial Sequence
  Synthetic oligonucleotide
taagggcatgcagagcgatgccagacgcgc

SEQ ID NO: 379051 - DNA, 30 bp, Artificial Sequence
  Synthetic oligonucleotide
cgtcgacggtatctgattgccacgacgcgc

SEQ ID NO: 379052 - DNA, 30 bp, Artificial Sequence
  Synthetic oligonucleotide
cgtcatgagttgtcaccgtacgcgacgcgc

SEQ ID NO: 379053 - DNA, 30 bp, Artificial Sequence
  Synthetic oligonucleotide
ttgttccccagatcccgtcctcggacgcgc

SEQ ID NO: 379054 - DNA, 30 bp, Artificial Sequence
  Synthetic oligonucleotide
ttcataggttgtacgcattaatatacgcgc

SEQ ID NO: 379055 - DNA, 30 bp, Artificial Sequence
  Synthetic oligonucleotide
tcggccttgttaacgcttcgggaaccgcgc

SEQ ID NO: 379056 - DNA, 30 bp, Artificial Sequence
  Synthetic oligonucleotide
tctttgcaggcttagccctcgccaccgcgc

SEQ ID NO: 379057 - DNA, 30 bp, Artificial Sequence
  Synthetic oligonucleotide
ggggcaggttgacaaatacctaacccgcgc

SEQ ID NO: 379058 - DNA, 30 bp, Artificial Sequence
  Synthetic oligonucleotide
agtacgtatcacttccttacgccgccgcgc

SEQ ID NO: 379059 - DNA, 30 bp, Artificial Sequence
  Synthetic oligonucleotide
gattatatcccggataaagctaacgcgcgc

SEQ ID NO: 379060 - DNA, 30 bp, Artificial Sequence
  Synthetic oligonucleotide
aaaaaaatcactgttacccgctcatcgcgc

SEQ ID NO: 379061 - DNA, 30 bp, Artificial Sequence
  Synthetic oligonucleotide
tcctgttcgagagtgccgtactcctcgcgc

SEQ ID NO: 379062 - DNA, 30 bp, Artificial Sequence
  Synthetic oligonucleotide
ttggatgaatattgtcataagacgtcgcgc

SEQ ID NO: 379063 - DNA, 30 bp, Artificial Sequence
  Synthetic oligonucleotide
ctcagtcgaagttccaacggcgcttcgcgc

SEQ ID NO: 379064 - DNA, 30 bp, Artificial Sequence
  Synthetic oligonucleotide
cacccggttgggcacgaccggctttcgcgc

SEQ ID NO: 379065 - DNA, 30 bp, Artificial Sequence
  Synthetic oligonucleotide
ttggtcgatcagatagttcacctaaggcgc

SEQ ID NO: 379066 - DNA, 30 bp, Artificial Sequence
  Synthetic oligonucleotide
gtcgagatggagacgcgcatagtaaggcgc

SEQ ID NO: 379067 - DNA, 30 bp, Artificial Sequence
  Synthetic oligonucleotide
ggaccgattttcagcacatggaccaggcgc

SEQ ID NO: 379068 - DNA, 30 bp, Artificial Sequence
  Synthetic oligonucleotide
cctagtatggggtaactgcctctcaggcgc

SEQ ID NO: 379069 - DNA, 30 bp, Artificial Sequence
  Synthetic oligonucleotide
atggcgttatggtgaacaaattgacggcgc

SEQ ID NO: 379070 - DNA, 30 bp, Artificial Sequence
  Synthetic oligonucleotide
cccattcgactgggttcctgagtacggcgc

SEQ ID NO: 379071 - DNA, 30 bp, Artificial Sequence
  Synthetic oligonucleotide
tgctgttcgagtcgtttacgtgtacggcgc

SEQ ID NO: 379072 - DNA, 30 bp, Artificial Sequence
  Synthetic oligonucleotide
gcggtcgggagacatttttgtgagcggcgc

SEQ ID NO: 379073 - DNA, 30 bp, Artificial Sequence
  Synthetic oligonucleotide
tgaccaaattgtcttgtgaagttgcggcgc

SEQ ID NO: 379074 - DNA, 28 bp, Artificial Sequence
  Synthetic oligonucleotide
cgtgataggtatgtaggcaagtcggcgc

SEQ ID NO: 379075 - DNA, 30 bp, Artificial Sequence
  Synthetic oligonucleotide
agtatatcgacggcgacacaaattcggcgc

SEQ ID NO: 379076 - DNA, 30 bp, Artificial Sequence
  Synthetic oligonucleotide
ttatgcccgccatccgttgttatagggcgc

SEQ ID NO: 379077 - DNA, 30 bp, Artificial Sequence
  Synthetic oligonucleotide
taaacctcttctcacgtgagaaacgggcgc

SEQ ID NO: 379078 - DNA, 30 bp, Artificial Sequence
  Synthetic oligonucleotide
acagggcatgtacgacccttgtaggggcgc

SEQ ID NO: 379079 - DNA, 30 bp, Artificial Sequence
  Synthetic oligonucleotide
atcttccagtgcactttaggtggggggcgc

SEQ ID NO: 379080 - DNA, 30 bp, Artificial Sequence
  Synthetic oligonucleotide
gaataattccctcgatgggaacgtgggcgc

SEQ ID NO: 379081 - DNA, 30 bp, Artificial Sequence
  Synthetic oligonucleotide
gagggttaggtatgtctcagggcatggcgc

SEQ ID NO: 379082 - DNA, 30 bp, Artificial Sequence
  Synthetic oligonucleotide
ttgtctaccacatacatggcaggctggcgc

SEQ ID NO: 379083 - DNA, 30 bp, Artificial Sequence
  Synthetic oligonucleotide
acggggcctatattaaagtcgcggtggcgc

SEQ ID NO: 379084 - DNA, 30 bp, Artificial Sequence
  Synthetic oligonucleotide
ttacttctgaagtcatgctaatgttggcgc

SEQ ID NO: 379085 - DNA, 30 bp, Artificial Sequence
  Synthetic oligonucleotide
ggatcggataattggaatatcccaatgcgc

SEQ ID NO: 379086 - DNA, 30 bp, Artificial Sequence
  Synthetic oligonucleotide
cccgccaaaaagtagtggccaggaatgcgc

SEQ ID NO: 379087 - DNA, 30 bp, Artificial Sequence
  Synthetic oligonucleotide
tgtcagattatgtgagtggtccccatgcgc

SEQ ID NO: 379088 - DNA, 30 bp, Artificial Sequence
  Synthetic oligonucleotide
gagttcttgcgattgtaacaaaggatgcgc

SEQ ID NO: 379089 - DNA, 27 bp, Artificial Sequence
  Synthetic oligonucleotide
gcgtcgcgaggaagacatgggatgcgc

SEQ ID NO: 379090 - DNA, 30 bp, Artificial Sequence
  Synthetic oligonucleotide
atgggaaatggtttggttttactgatgcgc

SEQ ID NO: 379091 - DNA, 30 bp, Artificial Sequence
  Synthetic oligonucleotide
gctctagtgtcaaacggcagattgatgcgc

SEQ ID NO: 379092 - DNA, 30 bp, Artificial Sequence
  Synthetic oligonucleotide
tgttattgtcctaaacttagccgactgcgc

SEQ ID NO: 379093 - DNA, 31 bp, Artificial Sequence
  Synthetic oligonucleotide
actcacataaccgatttagcaacacctgcgc

SEQ ID NO: 379094 - DNA, 31 bp, Artificial Sequence
  Synthetic oligonucleotide
ggggtatatccataactttgttcacctgcgc

SEQ ID NO: 379095 - DNA, 30 bp, Artificial Sequence
  Synthetic oligonucleotide
tgtgacgtaagttggctgcatttcctgcgc

SEQ ID NO: 379096 - DNA, 30 bp, Artificial Sequence
  Synthetic oligonucleotide
cttgcggggcatacgctgtatcagctgcgc

SEQ ID NO: 379097 - DNA, 30 bp, Artificial Sequence
  Synthetic oligonucleotide
ggggtccccctatatataggtcttctgcgc

SEQ ID NO: 379098 - DNA, 30 bp, Artificial Sequence
  Synthetic oligonucleotide
cccactcatgtctaacggctggtggtgcgc

SEQ ID NO: 379099 - DNA, 30 bp, Artificial Sequence
  Synthetic oligonucleotide
cgtgcggtgtgcaacatagtcaatgtgcgc

SEQ ID NO: 379100 - DNA, 30 bp, Artificial Sequence
  Synthetic oligonucleotide
gctaaataaggtgtcagctgccaattgcgc

SEQ ID NO: 379101 - DNA, 30 bp, Artificial Sequence
  Synthetic oligonucleotide
tctagcgaacaagcctctcctgtcttgcgc

SEQ ID NO: 379102 - DNA, 30 bp, Artificial Sequence
  Synthetic oligonucleotide
gggcatttcgctatttataatggtttgcgc

SEQ ID NO: 379103 - DNA, 30 bp, Artificial Sequence
  Synthetic oligonucleotide
cctccttcaatcttacgttgtggtttgcgc

SEQ ID NO: 379104 - DNA, 30 bp, Artificial Sequence
  Synthetic oligonucleotide
ccaacttcgcctatgtccgtggccaatcgc

SEQ ID NO: 379105 - DNA, 30 bp, Artificial Sequence
  Synthetic oligonucleotide
taacggtggtacttagtccaactgaatcgc

SEQ ID NO: 379106 - DNA, 30 bp, Artificial Sequence
  Synthetic oligonucleotide
tcccttaattatgcgtgccttccccatcgc

SEQ ID NO: 379107 - DNA, 30 bp, Artificial Sequence
  Synthetic oligonucleotide
aactctcgcctaccgagttgtaagcatcgc

SEQ ID NO: 379108 - DNA, 30 bp, Artificial Sequence
  Synthetic oligonucleotide
gattacatgacagatcgttacaggcatcgc

SEQ ID NO: 379109 - DNA, 30 bp, Artificial Sequence
  Synthetic oligonucleotide
cagatgccagaaacttgatcggtgcatcgc

SEQ ID NO: 379110 - DNA, 30 bp, Artificial Sequence
  Synthetic oligonucleotide
gccatgcgtacagttatttcattagatcgc

SEQ ID NO: 379111 - DNA, 30 bp, Artificial Sequence
  Synthetic oligonucleotide
aaacgccgccgatgtttcctagtggatcgc

SEQ ID NO: 379112 - DNA, 30 bp, Artificial Sequence
  Synthetic oligonucleotide
gagcgccgaagggtctcctacaatgatcgc

SEQ ID NO: 379113 - DNA, 30 bp, Artificial Sequence
  Synthetic oligonucleotide
ggtgcggggactggcaatttagcatatcgc

SEQ ID NO: 379114 - DNA, 30 bp, Artificial Sequence
  Synthetic oligonucleotide
acacggtatatgcaccccttattatatcgc

SEQ ID NO: 379115 - DNA, 30 bp, Artificial Sequence
  Synthetic oligonucleotide
cgtagttaccattggcacaaggactatcgc

SEQ ID NO: 379116 - DNA, 30 bp, Artificial Sequence
  Synthetic oligonucleotide
gcagtaccaattgcgtccctcgtctatcgc

SEQ ID NO: 379117 - DNA, 30 bp, Artificial Sequence
  Synthetic oligonucleotide
tcagatatcatgacttacgaggtctatcgc

SEQ ID NO: 379118 - DNA, 30 bp, Artificial Sequence
  Synthetic oligonucleotide
cctatcgaagatatgattttcctgtatcgc

SEQ ID NO: 379119 - DNA, 30 bp, Artificial Sequence
  Synthetic oligonucleotide
atacctcttcgtcaatggatatacactcgc

SEQ ID NO: 379120 - DNA, 30 bp, Artificial Sequence
  Synthetic oligonucleotide
ctttgtgcaaggctgcttaggagcactcgc

SEQ ID NO: 379121 - DNA, 30 bp, Artificial Sequence
  Synthetic oligonucleotide
ttgctcgatcaaaaatttattaagactcgc

SEQ ID NO: 379122 - DNA, 30 bp, Artificial Sequence
  Synthetic oligonucleotide
agtcatgatgaacgttcatgggcgactcgc

SEQ ID NO: 379123 - DNA, 30 bp, Artificial Sequence
  Synthetic oligonucleotide
gagactagaaggtgcgttaagtgtactcgc

SEQ ID NO: 379124 - DNA, 30 bp, Artificial Sequence
  Synthetic oligonucleotide
aatctggtacgattgtacgtgcttactcgc

SEQ ID NO: 379125 - DNA, 30 bp, Artificial Sequence
  Synthetic oligonucleotide
gttaatatctggcactatgtctttactcgc

SEQ ID NO: 379126 - DNA, 30 bp, Artificial Sequence
  Synthetic oligonucleotide
attggatacgtacaattcgtacaccctcgc

SEQ ID NO: 379127 - DNA, 30 bp, Artificial Sequence
  Synthetic oligonucleotide
agtaaattgtcttggtgattttaccctcgc

SEQ ID NO: 379128 - DNA, 30 bp, Artificial Sequence
  Synthetic oligonucleotide
agtcggtagtatgggttgtttggccctcgc

SEQ ID NO: 379129 - DNA, 30 bp, Artificial Sequence
  Synthetic oligonucleotide
gcggccgctttagggaaggatcggcctcgc

SEQ ID NO: 379130 - DNA, 30 bp, Artificial Sequence
  Synthetic oligonucleotide
tttgcctccgggcgagtgcacccagctcgc

SEQ ID NO: 379131 - DNA, 30 bp, Artificial Sequence
  Synthetic oligonucleotide
ggatcggttgtaccctcgcggttagctcgc

SEQ ID NO: 379132 - DNA, 30 bp, Artificial Sequence
  Synthetic oligonucleotide
gtaggcgcgtcgtgctcagcggccgctcgc

SEQ ID NO: 379133 - DNA, 30 bp, Artificial Sequence
  Synthetic oligonucleotide
ctttagactggttcggaatttcgtgctcgc

SEQ ID NO: 379134 - DNA, 30 bp, Artificial Sequence
  Synthetic oligonucleotide
atccggaatgacgctgtagacccatctcgc

SEQ ID NO: 379135 - DNA, 30 bp, Artificial Sequence
  Synthetic oligonucleotide
acctgaaacgcgtccactgtagcctctcgc

SEQ ID NO: 379136 - DNA, 30 bp, Artificial Sequence
  Synthetic oligonucleotide
acggcgggtctgctggacggcggctctcgc

SEQ ID NO: 379137 - DNA, 30 bp, Artificial Sequence
  Synthetic oligonucleotide
tcctggatagacgctatcccgttgtctcgc

SEQ ID NO: 379138 - DNA, 30 bp, Artificial Sequence
  Synthetic oligonucleotide
ttgttaagtctccgaaaacaactttctcgc

SEQ ID NO: 379139 - DNA, 30 bp, Artificial Sequence
  Synthetic oligonucleotide
atgacggggccgcgcgcggtttgaagtcgc

SEQ ID NO: 379140 - DNA, 30 bp, Artificial Sequence
  Synthetic oligonucleotide
tcagtaagatggatccggggtgtcagtcgc

SEQ ID NO: 379141 - DNA, 30 bp, Artificial Sequence
  Synthetic oligonucleotide
tcacctggagtttcggttgttttgagtcgc

SEQ ID NO: 379142 - DNA, 30 bp, Artificial Sequence
  Synthetic oligonucleotide
tcagtacacgctcatacacgcgctagtcgc

SEQ ID NO: 379143 - DNA, 30 bp, Artificial Sequence
  Synthetic oligonucleotide
tagtgtggccaaccgtgcataattagtcgc

SEQ ID NO: 379144 - DNA, 30 bp, Artificial Sequence
  Synthetic oligonucleotide
tctttggtgagcgttgcggcttgccgtcgc

SEQ ID NO: 379145 - DNA, 30 bp, Artificial Sequence
  Synthetic oligonucleotide
gatgtgattaaatcggggatcgtccgtcgc

SEQ ID NO: 379146 - DNA, 30 bp, Artificial Sequence
  Synthetic oligonucleotide
caccttaagacagtggacgtacagcgtcgc

SEQ ID NO: 379147 - DNA, 30 bp, Artificial Sequence
  Synthetic oligonucleotide
acttcgctaaaggcgggatcctcgcgtcgc

SEQ ID NO: 379148 - DNA, 30 bp, Artificial Sequence
  Synthetic oligonucleotide
ctgcctcgacgggttattatctcgcgtcgc

SEQ ID NO: 379149 - DNA, 30 bp, Artificial Sequence
  Synthetic oligonucleotide
gcaagatttttgggactggtaactcgtcgc

SEQ ID NO: 379150 - DNA, 30 bp, Artificial Sequence
  Synthetic oligonucleotide
tgggtcttagagaagaggcccggtcgtcgc

SEQ ID NO: 379151 - DNA, 30 bp, Artificial Sequence
  Synthetic oligonucleotide
gcggttaggtcgcccagggctcttcgtcgc

SEQ ID NO: 379152 - DNA, 30 bp, Artificial Sequence
  Synthetic oligonucleotide
tacactcttcatcgaatttgttaaggtcgc

SEQ ID NO: 379153 - DNA, 30 bp, Artificial Sequence
  Synthetic oligonucleotide
aatatatagcggtcgactcctgccggtcgc

SEQ ID NO: 379154 - DNA, 30 bp, Artificial Sequence
  Synthetic oligonucleotide
tggttgtcacgggtatatattgaatgtcgc

SEQ ID NO: 379155 - DNA, 30 bp, Artificial Sequence
  Synthetic oligonucleotide
cgatcataccttcgaaagtctagctgtcgc

SEQ ID NO: 379156 - DNA, 30 bp, Artificial Sequence
  Synthetic oligonucleotide
gccaagactccgtgagacagatagtgtcgc

SEQ ID NO: 379157 - DNA, 30 bp, Artificial Sequence
  Synthetic oligonucleotide
ctcgcaagaccgggaaagaaattgtgtcgc

SEQ ID NO: 379158 - DNA, 31 bp, Artificial Sequence
  Synthetic oligonucleotide
atgttaaggctaggcttacatggattgtcgc

SEQ ID NO: 379159 - DNA, 30 bp, Artificial Sequence
  Synthetic oligonucleotide
ggcttcctcggtggagagcgtagttgtcgc

SEQ ID NO: 379160 - DNA, 30 bp, Artificial Sequence
  Synthetic oligonucleotide
tttgctgccggtctcttagtaccaattcgc

SEQ ID NO: 379161 - DNA, 30 bp, Artificial Sequence
  Synthetic oligonucleotide
acgtgcattataaaagtcagtaatattcgc

SEQ ID NO: 379162 - DNA, 30 bp, Artificial Sequence
  Synthetic oligonucleotide
tttatttggtggagtcaattaaaagttcgc

SEQ ID NO: 379163 - DNA, 30 bp, Artificial Sequence
  Synthetic oligonucleotide
ataaagacccgaagtagggttccagttcgc

SEQ ID NO: 379164 - DNA, 30 bp, Artificial Sequence
  Synthetic oligonucleotide
gttatacaaaaagagcagctattcgttcgc

SEQ ID NO: 379165 - DNA, 30 bp, Artificial Sequence
  Synthetic oligonucleotide
ggcccgaatagtagatggcagtatgttcgc

SEQ ID NO: 379166 - DNA, 30 bp, Artificial Sequence
  Synthetic oligonucleotide
gatagtatgtagggggtatctaaatttcgc

SEQ ID NO: 379167 - DNA, 30 bp, Artificial Sequence
  Synthetic oligonucleotide
cagcggcgcgcgacagcgatcgaatttcgc

SEQ ID NO: 379168 - DNA, 30 bp, Artificial Sequence
  Synthetic oligonucleotide
acccaaatgtgttactccagcccatttcgc

SEQ ID NO: 379169 - DNA, 30 bp, Artificial Sequence
  Synthetic oligonucleotide
gtgttttcactacctagacgctgatttcgc

SEQ ID NO: 379170 - DNA, 30 bp, Artificial Sequence
  Synthetic oligonucleotide
ggtgctccaggatccggacccgagtttcgc

SEQ ID NO: 379171 - DNA, 30 bp, Artificial Sequence
  Synthetic oligonucleotide
cggcagctagacattagaccaccgtttcgc

SEQ ID NO: 379172 - DNA, 30 bp, Artificial Sequence
  Synthetic oligonucleotide
aatgacttagtaactaagacctgaaaaggc

SEQ ID NO: 379173 - DNA, 30 bp, Artificial Sequence
  Synthetic oligonucleotide
gcaacggcttcgagtgttggcagcaaaggc

SEQ ID NO: 379174 - DNA, 30 bp, Artificial Sequence
  Synthetic oligonucleotide
tttcctagagttgcggtggaaaggaaaggc

SEQ ID NO: 379175 - DNA, 30 bp, Artificial Sequence
  Synthetic oligonucleotide
agaagatcggaggcccgtggtgggaaaggc

SEQ ID NO: 379176 - DNA, 30 bp, Artificial Sequence
  Synthetic oligonucleotide
gggggacttcgtactgcaactttgaaaggc

SEQ ID NO: 379177 - DNA, 29 bp, Artificial Sequence
  Synthetic oligonucleotide
aagagcatttgcgtacgatgaataaaggc

SEQ ID NO: 379178 - DNA, 30 bp, Artificial Sequence
  Synthetic oligonucleotide
tcccaggatgctagggtctgaggtaaaggc

SEQ ID NO: 379179 - DNA, 30 bp, Artificial Sequence
  Synthetic oligonucleotide
tctcttacaaacgctccgcacggtaaaggc

SEQ ID NO: 379180 - DNA, 30 bp, Artificial Sequence
  Synthetic oligonucleotide
ttgtagtcgtaatgctgttgctgacaaggc

SEQ ID NO: 379181 - DNA, 31 bp, Artificial Sequence
  Synthetic oligonucleotide
tcggtaggttttctagtcaaaactccaaggc

SEQ ID NO: 379182 - DNA, 30 bp, Artificial Sequence
  Synthetic oligonucleotide
acactgcaccggaagtcaaggttccaaggc

SEQ ID NO: 379183 - DNA, 30 bp, Artificial Sequence
  Synthetic oligonucleotide
ttattatcgtctgaccagaaagagcaaggc

SEQ ID NO: 379184 - DNA, 30 bp, Artificial Sequence
  Synthetic oligonucleotide
tgacggccctgggtcttcctcgggcaaggc

SEQ ID NO: 379185 - DNA, 30 bp, Artificial Sequence
  Synthetic oligonucleotide
gctattcatcacttggatgctgtgcaaggc

SEQ ID NO: 379186 - DNA, 30 bp, Artificial Sequence
  Synthetic oligonucleotide
ggtttcgtttaacctcgcggtgatcaaggc

SEQ ID NO: 379187 - DNA, 30 bp, Artificial Sequence
  Synthetic oligonucleotide
gtagtgggcgctgctagaaggactcaaggc

SEQ ID NO: 379188 - DNA, 30 bp, Artificial Sequence
  Synthetic oligonucleotide
ttcaggcttgtgagatatactcgtcaaggc

SEQ ID NO: 379189 - DNA, 30 bp, Artificial Sequence
  Synthetic oligonucleotide
tcgcctagatcctggtcttgcggtcaaggc

SEQ ID NO: 379190 - DNA, 30 bp, Artificial Sequence
  Synthetic oligonucleotide
agggaagcgataccactgatgggtcaaggc

SEQ ID NO: 379191 - DNA, 30 bp, Artificial Sequence
  Synthetic oligonucleotide
aggctctactggatactgttccgagaaggc

SEQ ID NO: 379192 - DNA, 30 bp, Artificial Sequence
  Synthetic oligonucleotide
gatttaagcatacggtctgtgtgcgaaggc

SEQ ID NO: 379193 - DNA, 30 bp, Artificial Sequence
  Synthetic oligonucleotide
gaagcgtcctcgcacgggacctcggaaggc

SEQ ID NO: 379194 - DNA, 30 bp, Artificial Sequence
  Synthetic oligonucleotide
acggaaacccccctaaaacggggggaaggc

SEQ ID NO: 379195 - DNA, 30 bp, Artificial Sequence
  Synthetic oligonucleotide
ctcttgtaatataagtggtaaacataaggc

SEQ ID NO: 379196 - DNA, 30 bp, Artificial Sequence
  Synthetic oligonucleotide
ctcaatttcacttgtgccggttgataaggc

SEQ ID NO: 379197 - DNA, 30 bp, Artificial Sequence
  Synthetic oligonucleotide
acccacaaacgcagactaacagtataaggc

SEQ ID NO: 379198 - DNA, 31 bp, Artificial Sequence
  Synthetic oligonucleotide
gaggtaagctgcatctaaggtttcgtaaggc

SEQ ID NO: 379199 - DNA, 30 bp, Artificial Sequence
  Synthetic oligonucleotide
agcaacttgtgaactgaaagccggtaaggc

SEQ ID NO: 379200 - DNA, 30 bp, Artificial Sequence
  Synthetic oligonucleotide
tgaacgaccgttcatgctacgaggacaggc

SEQ ID NO: 379201 - DNA, 30 bp, Artificial Sequence
  Synthetic oligonucleotide
atagggcgtgcatggaaccaagggacaggc

SEQ ID NO: 379202 - DNA, 30 bp, Artificial Sequence
  Synthetic oligonucleotide
taactgatgagcatcattcagatgacaggc

SEQ ID NO: 379203 - DNA, 30 bp, Artificial Sequence
  Synthetic oligonucleotide
gcaagaaccccccttgcctggaaaccaggc

SEQ ID NO: 379204 - DNA, 30 bp, Artificial Sequence
  Synthetic oligonucleotide
ttcagtagtaggatgggaggcgtcccaggc

SEQ ID NO: 379205 - DNA, 30 bp, Artificial Sequence
  Synthetic oligonucleotide
ctctatcggaccggttctcgagagccaggc

SEQ ID NO: 379206 - DNA, 30 bp, Artificial Sequence
  Synthetic oligonucleotide
cgacgccgtcccgagacgttcaggccaggc

SEQ ID NO: 379207 - DNA, 30 bp, Artificial Sequence
  Synthetic oligonucleotide
tagccgggtcttcaggccgcacctccaggc

SEQ ID NO: 379208 - DNA, 30 bp, Artificial Sequence
  Synthetic oligonucleotide
tcgtcgcgtagttgatcaaagtgagcaggc

SEQ ID NO: 379209 - DNA, 30 bp, Artificial Sequence
  Synthetic oligonucleotide
tagcaaaggttgtccgggggagaggcaggc

SEQ ID NO: 379210 - DNA, 30 bp, Artificial Sequence
  Synthetic oligonucleotide
taacggtcctatgtcttatgagaggcaggc

SEQ ID NO: 379211 - DNA, 30 bp, Artificial Sequence
  Synthetic oligonucleotide
gggaaaatgcttttgaaggtgtaggcaggc

SEQ ID NO: 379212 - DNA, 30 bp, Artificial Sequence
  Synthetic oligonucleotide
tattggtaatacaccgggccatgtgcaggc

SEQ ID NO: 379213 - DNA, 30 bp, Artificial Sequence
  Synthetic oligonucleotide
gcaatctgctaatctatggcagaatcaggc

SEQ ID NO: 379214 - DNA, 30 bp, Artificial Sequence
  Synthetic oligonucleotide
ggcaatcaattacggatatgggtctcaggc

SEQ ID NO: 379215 - DNA, 30 bp, Artificial Sequence
  Synthetic oligonucleotide
caataaccgggcgcgcttggccagtcaggc

SEQ ID NO: 379216 - DNA, 29 bp, Artificial Sequence
  Synthetic oligonucleotide
taccgatcgtgcggtttaatacttcaggc

SEQ ID NO: 379217 - DNA, 30 bp, Artificial Sequence
  Synthetic oligonucleotide
gcttattctttttctgacattacttcaggc

SEQ ID NO: 379218 - DNA, 30 bp, Artificial Sequence
  Synthetic oligonucleotide
gtctgagctacgcgtaccggaatttcaggc

SEQ ID NO: 379219 - DNA, 30 bp, Artificial Sequence
  Synthetic oligonucleotide
tgccttgcgctcttgcgggcaacaagaggc

SEQ ID NO: 379220 - DNA, 30 bp, Artificial Sequence
  Synthetic oligonucleotide
ggacccaagcgcatttactattcaagaggc

SEQ ID NO: 379221 - DNA, 30 bp, Artificial Sequence
  Synthetic oligonucleotide
ggtaagtctaaatgcatcctcgtaagaggc

SEQ ID NO: 379222 - DNA, 30 bp, Artificial Sequence
  Synthetic oligonucleotide
ctaaaatcatcccggggtggtgtaagaggc

SEQ ID NO: 379223 - DNA, 30 bp, Artificial Sequence
  Synthetic oligonucleotide
tgtgcgtaatcatcatggacacacagaggc

SEQ ID NO: 379224 - DNA, 30 bp, Artificial Sequence
  Synthetic oligonucleotide
acgtcaacataatgtacggttatgagaggc

SEQ ID NO: 379225 - DNA, 30 bp, Artificial Sequence
  Synthetic oligonucleotide
tagccacacatcagggccggtaatagaggc

SEQ ID NO: 379226 - DNA, 30 bp, Artificial Sequence
  Synthetic oligonucleotide
tagatatggggggtatgcttgcatagaggc

SEQ ID NO: 379227 - DNA, 30 bp, Artificial Sequence
  Synthetic oligonucleotide
gggaatctctacgagatctttctacgaggc

SEQ ID NO: 379228 - DNA, 30 bp, Artificial Sequence
  Synthetic oligonucleotide
cagacaggcgggtactgcaacgtacgaggc

SEQ ID NO: 379229 - DNA, 30 bp, Artificial Sequence
  Synthetic oligonucleotide
ctgactctcattttgtagtactggcgaggc

SEQ ID NO: 379230 - DNA, 30 bp, Artificial Sequence
  Synthetic oligonucleotide
cactcttagtggcccacgcatatgcgaggc

SEQ ID NO: 379231 - DNA, 30 bp, Artificial Sequence
  Synthetic oligonucleotide
gaccaagggcgctgacgtccaactcgaggc

SEQ ID NO: 379232 - DNA, 30 bp, Artificial Sequence
  Synthetic oligonucleotide
taagaactaggatggacagggtgtcgaggc

SEQ ID NO: 379233 - DNA, 30 bp, Artificial Sequence
  Synthetic oligonucleotide
aaacagctagagaaaagtgcccccggaggc

SEQ ID NO: 379234 - DNA, 30 bp, Artificial Sequence
  Synthetic oligonucleotide
attaactaagttactccctcccgcggaggc

SEQ ID NO: 379235 - DNA, 30 bp, Artificial Sequence
  Synthetic oligonucleotide
cctcgatattatcaaaacctacgatgaggc

SEQ ID NO: 379236 - DNA, 30 bp, Artificial Sequence
  Synthetic oligonucleotide
cttgtgaacataatggagaagttatgaggc

SEQ ID NO: 379237 - DNA, 30 bp, Artificial Sequence
  Synthetic oligonucleotide
atcgttttttccaaatagtcatcgtgaggc

SEQ ID NO: 379238 - DNA, 30 bp, Artificial Sequence
  Synthetic oligonucleotide
agttccgtatctctctcaatattgtgaggc

SEQ ID NO: 379239 - DNA, 30 bp, Artificial Sequence
  Synthetic oligonucleotide
cacagtaagagcccagtattcgattgaggc

SEQ ID NO: 379240 - DNA, 30 bp, Artificial Sequence
  Synthetic oligonucleotide
taagattaaatgccctagtcagccataggc

SEQ ID NO: 379241 - DNA, 30 bp, Artificial Sequence
  Synthetic oligonucleotide
caccgcgttttctcggggggaagtataggc

SEQ ID NO: 379242 - DNA, 30 bp, Artificial Sequence
  Synthetic oligonucleotide
cagcaccgtaagcgggctcgcattataggc

SEQ ID NO: 379243 - DNA, 30 bp, Artificial Sequence
  Synthetic oligonucleotide
agtcttagctcgatgacacaagccctaggc

SEQ ID NO: 379244 - DNA, 30 bp, Artificial Sequence
  Synthetic oligonucleotide
ggtctttaacgcgaatgcagactcctaggc

SEQ ID NO: 379245 - DNA, 30 bp, Artificial Sequence
  Synthetic oligonucleotide
accactcctatgtgtcaaacaaagctaggc

SEQ ID NO: 379246 - DNA, 30 bp, Artificial Sequence
  Synthetic oligonucleotide
gggcacacagcatatcggcccgttctaggc

SEQ ID NO: 379247 - DNA, 30 bp, Artificial Sequence
  Synthetic oligonucleotide
aagcccgattcccctggctggcacgtaggc

SEQ ID NO: 379248 - DNA, 30 bp, Artificial Sequence
  Synthetic oligonucleotide
tcttctgcttgttgagtgaaagaggtaggc

SEQ ID NO: 379249 - DNA, 30 bp, Artificial Sequence
  Synthetic oligonucleotide
gacacttacacggggcagtttggggtaggc

SEQ ID NO: 379250 - DNA, 30 bp, Artificial Sequence
  Synthetic oligonucleotide
tccaggcaactaggatatgggcctgtaggc

SEQ ID NO: 379251 - DNA, 30 bp, Artificial Sequence
  Synthetic oligonucleotide
cgctttgattttcagggtagttccttaggc

SEQ ID NO: 379252 - DNA, 30 bp, Artificial Sequence
  Synthetic oligonucleotide
gcagtacaaaccatatcgcgtccgttaggc

SEQ ID NO: 379253 - DNA, 30 bp, Artificial Sequence
  Synthetic oligonucleotide
cgagtcttgaagtctcatgccaggttaggc

SEQ ID NO: 379254 - DNA, 30 bp, Artificial Sequence
  Synthetic oligonucleotide
ggagccaattttggttcgaaactgttaggc

SEQ ID NO: 379255 - DNA, 30 bp, Artificial Sequence
  Synthetic oligonucleotide
tccctaaaccagttctatggaaatttaggc

SEQ ID NO: 379256 - DNA, 30 bp, Artificial Sequence
  Synthetic oligonucleotide
gaatagacagagtggacttgagatttaggc

SEQ ID NO: 379257 - DNA, 30 bp, Artificial Sequence
  Synthetic oligonucleotide
tgtgccccgatattgcagtgcactttaggc

SEQ ID NO: 379258 - DNA, 30 bp, Artificial Sequence
  Synthetic oligonucleotide
tgttagccggaagctactcctcaaaacggc

SEQ ID NO: 379259 - DNA, 30 bp, Artificial Sequence
  Synthetic oligonucleotide
taacaccaaacctaccagagttggaacggc

SEQ ID NO: 379260 - DNA, 30 bp, Artificial Sequence
  Synthetic oligonucleotide
gtagcgcggggcgagtcactgcaacacggc

SEQ ID NO: 379261 - DNA, 30 bp, Artificial Sequence
  Synthetic oligonucleotide
atgaatccaggtatatattgattacacggc

SEQ ID NO: 379262 - DNA, 30 bp, Artificial Sequence
  Synthetic oligonucleotide
tgtgtgtccccgacccggcgacgccacggc

SEQ ID NO: 379263 - DNA, 30 bp, Artificial Sequence
  Synthetic oligonucleotide
gttacgagggtgtatcccacggtccacggc

SEQ ID NO: 379264 - DNA, 30 bp, Artificial Sequence
  Synthetic oligonucleotide
gccgtagatggcaattcaagggtgcacggc

SEQ ID NO: 379265 - DNA, 30 bp, Artificial Sequence
  Synthetic oligonucleotide
ccccgagatgttaaccagtcacttcacggc

SEQ ID NO: 379266 - DNA, 30 bp, Artificial Sequence
  Synthetic oligonucleotide
agattgcgtagcgaatggcggggagacggc

SEQ ID NO: 379267 - DNA, 30 bp, Artificial Sequence
  Synthetic oligonucleotide
atgctttgcgctttatactctatagacggc

SEQ ID NO: 379268 - DNA, 30 bp, Artificial Sequence
  Synthetic oligonucleotide
tgacaaggatggcaatttcggttagacggc

SEQ ID NO: 379269 - DNA, 30 bp, Artificial Sequence
  Synthetic oligonucleotide
attggttcaggctgggccttcctggacggc

SEQ ID NO: 379270 - DNA, 30 bp, Artificial Sequence
  Synthetic oligonucleotide
agatacttgttagtgccggctcttgacggc

SEQ ID NO: 379271 - DNA, 30 bp, Artificial Sequence
  Synthetic oligonucleotide
tttacggttatgtactatctttactacggc

SEQ ID NO: 379272 - DNA, 30 bp, Artificial Sequence
  Synthetic oligonucleotide
gatcgacccttgggggcatctaagtacggc

SEQ ID NO: 379273 - DNA, 30 bp, Artificial Sequence
  Synthetic oligonucleotide
ggtcgctatgggatactttaatagtacggc

SEQ ID NO: 379274 - DNA, 31 bp, Artificial Sequence
  Synthetic oligonucleotide
ggggggtaaaaggtccgtgatccggtacggc

SEQ ID NO: 379275 - DNA, 30 bp, Artificial Sequence
  Synthetic oligonucleotide
tacctcgtgggtggttcacctatgtacggc

SEQ ID NO: 379276 - DNA, 30 bp, Artificial Sequence
  Synthetic oligonucleotide
actatattctacacgaggtactattacggc

SEQ ID NO: 379277 - DNA, 30 bp, Artificial Sequence
  Synthetic oligonucleotide
ttagtgaaatgacgtttgaacgaaaccggc

SEQ ID NO: 379278 - DNA, 30 bp, Artificial Sequence
  Synthetic oligonucleotide
actgttacaggaggcgtaaggacaaccggc

SEQ ID NO: 379279 - DNA, 30 bp, Artificial Sequence
  Synthetic oligonucleotide
cttacccggatggccctaagagctaccggc

SEQ ID NO: 379280 - DNA, 30 bp, Artificial Sequence
  Synthetic oligonucleotide
tattaagaatgaccgtacaaaattaccggc

SEQ ID NO: 379281 - DNA, 30 bp, Artificial Sequence
  Synthetic oligonucleotide
tcagggttatcttgcatctgcccccccggc

SEQ ID NO: 379282 - DNA, 30 bp, Artificial Sequence
  Synthetic oligonucleotide
aaacccggaagagccagaccacgccccggc

SEQ ID NO: 379283 - DNA, 30 bp, Artificial Sequence
  Synthetic oligonucleotide
tcttatagatatattttcatgctccccggc

SEQ ID NO: 379284 - DNA, 30 bp, Artificial Sequence
  Synthetic oligonucleotide
agtagccgataaaaaagtctgttccccggc

SEQ ID NO: 379285 - DNA, 30 bp, Artificial Sequence
  Synthetic oligonucleotide
cagaaattcagcttgggatgtagtcccggc

SEQ ID NO: 379286 - DNA, 30 bp, Artificial Sequence
  Synthetic oligonucleotide
tatcctatgcgtccaaacaggttagccggc

SEQ ID NO: 379287 - DNA, 30 bp, Artificial Sequence
  Synthetic oligonucleotide
ttagcagaggggttatattggttagccggc

SEQ ID NO: 379288 - DNA, 30 bp, Artificial Sequence
  Synthetic oligonucleotide
ttgcccagaacaataatcattagcgccggc

SEQ ID NO: 379289 - DNA, 30 bp, Artificial Sequence
  Synthetic oligonucleotide
ttaccagtagatagaccggcccgcgccggc

SEQ ID NO: 379290 - DNA, 30 bp, Artificial Sequence
  Synthetic oligonucleotide
agattttagcagccatcgggaagggccggc

SEQ ID NO: 379291 - DNA, 31 bp, Artificial Sequence
  Synthetic oligonucleotide
tacatacctataggagaggtgctgggccggc

SEQ ID NO: 379292 - DNA, 30 bp, Artificial Sequence
  Synthetic oligonucleotide
gcagttctgcagcgcatggagtgggccggc

SEQ ID NO: 379293 - DNA, 30 bp, Artificial Sequence
  Synthetic oligonucleotide
agcagcatgcgccgtactataagatccggc

SEQ ID NO: 379294 - DNA, 30 bp, Artificial Sequence
  Synthetic oligonucleotide
tctattaaaaggttcatgcagcgttccggc

SEQ ID NO: 379295 - DNA, 30 bp, Artificial Sequence
  Synthetic oligonucleotide
aagacccgtacgaggtcctgtcgttccggc

SEQ ID NO: 379296 - DNA, 30 bp, Artificial Sequence
  Synthetic oligonucleotide
tacagggatttggaccgtcttggttccggc

SEQ ID NO: 379297 - DNA, 30 bp, Artificial Sequence
  Synthetic oligonucleotide
ctatccatcgctatagatggtcagagcggc

SEQ ID NO: 379298 - DNA, 30 bp, Artificial Sequence
  Synthetic oligonucleotide
atgtcaagttagcccgcataagtacgcggc

SEQ ID NO: 379299 - DNA, 30 bp, Artificial Sequence
  Synthetic oligonucleotide
gttaactaacttgttttcgattcgcgcggc

SEQ ID NO: 379300 - DNA, 30 bp, Artificial Sequence
  Synthetic oligonucleotide
tcctcaccgtttctcagtagtttgcgcggc

SEQ ID NO: 379301 - DNA, 30 bp, Artificial Sequence
  Synthetic oligonucleotide
catctttcgtagtttttatgcaaaggcggc

SEQ ID NO: 379302 - DNA, 30 bp, Artificial Sequence
  Synthetic oligonucleotide
gtggcgccgtcctttgtcatactcggcggc

SEQ ID NO: 379303 - DNA, 30 bp, Artificial Sequence
  Synthetic oligonucleotide
tcttgagtcctccagcgggatgatggcggc

SEQ ID NO: 379304 - DNA, 30 bp, Artificial Sequence
  Synthetic oligonucleotide
ccacgtggctcgactatcctggcatgcggc

SEQ ID NO: 379305 - DNA, 30 bp, Artificial Sequence
  Synthetic oligonucleotide
tagccccacaacgacgtgagaggttgcggc

SEQ ID NO: 379306 - DNA, 30 bp, Artificial Sequence
  Synthetic oligonucleotide
cagttaacgcaaaaactatgaggttgcggc

SEQ ID NO: 379307 - DNA, 30 bp, Artificial Sequence
  Synthetic oligonucleotide
atctttagtgttgttcgggctatttgcggc

SEQ ID NO: 379308 - DNA, 30 bp, Artificial Sequence
  Synthetic oligonucleotide
cgtatgacttctagaagggcatccatcggc

SEQ ID NO: 379309 - DNA, 30 bp, Artificial Sequence
  Synthetic oligonucleotide
agtgcgaagcagcccaggttatccatcggc

SEQ ID NO: 379310 - DNA, 30 bp, Artificial Sequence
  Synthetic oligonucleotide
agagatgcccgtatcagtgcttagatcggc

SEQ ID NO: 379311 - DNA, 30 bp, Artificial Sequence
  Synthetic oligonucleotide
ttgccacccgttcaccagatgaaactcggc

SEQ ID NO: 379312 - DNA, 30 bp, Artificial Sequence
  Synthetic oligonucleotide
atgatccctcccgccggcggtatactcggc

SEQ ID NO: 379313 - DNA, 30 bp, Artificial Sequence
  Synthetic oligonucleotide
tgagcgggtccctcgccgcagacgctcggc

SEQ ID NO: 379314 - DNA, 30 bp, Artificial Sequence
  Synthetic oligonucleotide
tggcgaccgcttgaagcgtcggggctcggc

SEQ ID NO: 379315 - DNA, 30 bp, Artificial Sequence
  Synthetic oligonucleotide
aaagactccgaacgtagcttattgctcggc

SEQ ID NO: 379316 - DNA, 30 bp, Artificial Sequence
  Synthetic oligonucleotide
tccaggcgcccgcctagataacgggtcggc

SEQ ID NO: 379317 - DNA, 30 bp, Artificial Sequence
  Synthetic oligonucleotide
cgcgcaggcgggaagcagtcggtggtcggc

SEQ ID NO: 379318 - DNA, 30 bp, Artificial Sequence
  Synthetic oligonucleotide
tgtttagtgcggcccactcctttcttcggc

SEQ ID NO: 379319 - DNA, 30 bp, Artificial Sequence
  Synthetic oligonucleotide
gaagcttcagttgataattacttgttcggc

SEQ ID NO: 379320 - DNA, 30 bp, Artificial Sequence
  Synthetic oligonucleotide
ttaaacgaaccacgggcttaacatttcggc

SEQ ID NO: 379321 - DNA, 30 bp, Artificial Sequence
  Synthetic oligonucleotide
ttcacactagcgcctctcccacgtttcggc

SEQ ID NO: 379322 - DNA, 30 bp, Artificial Sequence
  Synthetic oligonucleotide
ttcctcgagacatgtccacgaaaaaagggc

SEQ ID NO: 379323 - DNA, 30 bp, Artificial Sequence
  Synthetic oligonucleotide
gtgaatatccgcagtgagtcgggcaagggc

SEQ ID NO: 379324 - DNA, 30 bp, Artificial Sequence
  Synthetic oligonucleotide
gcccaattctgagccccgatttagaagggc

SEQ ID NO: 379325 - DNA, 30 bp, Artificial Sequence
  Synthetic oligonucleotide
gtgggtctgtggcgccacgtttcgaagggc

SEQ ID NO: 379326 - DNA, 30 bp, Artificial Sequence
  Synthetic oligonucleotide
atgggtgtcatggggactatagtgaagggc

SEQ ID NO: 379327 - DNA, 30 bp, Artificial Sequence
  Synthetic oligonucleotide
aactgactttaattgacttcgcataagggc

SEQ ID NO: 379328 - DNA, 30 bp, Artificial Sequence
  Synthetic oligonucleotide
gacaaccatagactgcccgaggataagggc

SEQ ID NO: 379329 - DNA, 30 bp, Artificial Sequence
  Synthetic oligonucleotide
gttgatttagatccaaagttggataagggc

SEQ ID NO: 379330 - DNA, 30 bp, Artificial Sequence
  Synthetic oligonucleotide
ggttaatatgagggctatacgcctaagggc

SEQ ID NO: 379331 - DNA, 30 bp, Artificial Sequence
  Synthetic oligonucleotide
atatcaactcttcgatcagtcattaagggc

SEQ ID NO: 379332 - DNA, 30 bp, Artificial Sequence
  Synthetic oligonucleotide
ctagccgacgcatttcgcttccagcagggc

SEQ ID NO: 379333 - DNA, 30 bp, Artificial Sequence
  Synthetic oligonucleotide
tttaagactggcttatcaacatagcagggc

SEQ ID NO: 379334 - DNA, 30 bp, Artificial Sequence
  Synthetic oligonucleotide
ggcgatgctatggcggtgactgtgcagggc

SEQ ID NO: 379335 - DNA, 30 bp, Artificial Sequence
  Synthetic oligonucleotide
gtagcgtatgaaacggagtataccgagggc

SEQ ID NO: 379336 - DNA, 30 bp, Artificial Sequence
  Synthetic oligonucleotide
acaactgatcgtaagctttaatccgagggc

SEQ ID NO: 379337 - DNA, 30 bp, Artificial Sequence
  Synthetic oligonucleotide
ggatgactttggttcactattctggagggc

SEQ ID NO: 379338 - DNA, 30 bp, Artificial Sequence
  Synthetic oligonucleotide
cgaatcctctcgcgaagacgggtggagggc

SEQ ID NO: 379339 - DNA, 30 bp, Artificial Sequence
  Synthetic oligonucleotide
tatagggtattcggtgcataaacatagggc

SEQ ID NO: 379340 - DNA, 30 bp, Artificial Sequence
  Synthetic oligonucleotide
tgagcgcttgctttaatggcgctatagggc

SEQ ID NO: 379341 - DNA, 30 bp, Artificial Sequence
  Synthetic oligonucleotide
aaggcctcgggtgaaggacgccagacgggc

SEQ ID NO: 379342 - DNA, 30 bp, Artificial Sequence
  Synthetic oligonucleotide
aaagaaaaccctgatcatatatggacgggc

SEQ ID NO: 379343 - DNA, 30 bp, Artificial Sequence
  Synthetic oligonucleotide
tacgctaagacaaccgctgcttggacgggc

SEQ ID NO: 379344 - DNA, 30 bp, Artificial Sequence
  Synthetic oligonucleotide
tagtagatattgggtcacgcgttgacgggc

SEQ ID NO: 379345 - DNA, 30 bp, Artificial Sequence
  Synthetic oligonucleotide
acatgatgcggtagataagccgacccgggc

SEQ ID NO: 379346 - DNA, 30 bp, Artificial Sequence
  Synthetic oligonucleotide
ctgattgggtaacttgcggggctcccgggc

SEQ ID NO: 379347 - DNA, 30 bp, Artificial Sequence
  Synthetic oligonucleotide
tgccgacaggatttcgaagccacgccgggc

SEQ ID NO: 379348 - DNA, 30 bp, Artificial Sequence
  Synthetic oligonucleotide
aatgtgatactctcgaccaagtatccgggc

SEQ ID NO: 379349 - DNA, 30 bp, Artificial Sequence
  Synthetic oligonucleotide
tattgtgattagccgcttacgggagcgggc

SEQ ID NO: 379350 - DNA, 30 bp, Artificial Sequence
  Synthetic oligonucleotide
tcatatggtaagtctcgggctttagcgggc

SEQ ID NO: 379351 - DNA, 30 bp, Artificial Sequence
  Synthetic oligonucleotide
ccagagctggatgtcaattcgaccgcgggc

SEQ ID NO: 379352 - DNA, 30 bp, Artificial Sequence
  Synthetic oligonucleotide
ggtacatccgtacgagctcctgtcgcgggc

SEQ ID NO: 379353 - DNA, 30 bp, Artificial Sequence
  Synthetic oligonucleotide
tcggttcaaaagagttcaacgggtgcgggc

SEQ ID NO: 379354 - DNA, 30 bp, Artificial Sequence
  Synthetic oligonucleotide
tagatcactgaacgaacttcctgtgcgggc

SEQ ID NO: 379355 - DNA, 30 bp, Artificial Sequence
  Synthetic oligonucleotide
tatatactccaggtaggaaagaaatcgggc

SEQ ID NO: 379356 - DNA, 30 bp, Artificial Sequence
  Synthetic oligonucleotide
agccctattgctacgtaagtttagtcgggc

SEQ ID NO: 379357 - DNA, 30 bp, Artificial Sequence
  Synthetic oligonucleotide
aaagcggggcgcttggagcgagggtcgggc

SEQ ID NO: 379358 - DNA, 30 bp, Artificial Sequence
  Synthetic oligonucleotide
cccatgtcgggggtcatgtccatttcgggc

SEQ ID NO: 379359 - DNA, 30 bp, Artificial Sequence
  Synthetic oligonucleotide
ttaacacaaatttcagcatccgtttcgggc

SEQ ID NO: 379360 - DNA, 30 bp, Artificial Sequence
  Synthetic oligonucleotide
aagttggttgttggacgcttaaaaaggggc

SEQ ID NO: 379361 - DNA, 30 bp, Artificial Sequence
  Synthetic oligonucleotide
tttatcacagagcgggcttaggcaaggggc

SEQ ID NO: 379362 - DNA, 30 bp, Artificial Sequence
  Synthetic oligonucleotide
atctcatatacggttcgttaggcaaggggc

SEQ ID NO: 379363 - DNA, 30 bp, Artificial Sequence
  Synthetic oligonucleotide
agtttgtagttaaacgtacggtcaaggggc

SEQ ID NO: 379364 - DNA, 30 bp, Artificial Sequence
  Synthetic oligonucleotide
gccttgcggaagcgggggggtgccaggggc

SEQ ID NO: 379365 - DNA, 30 bp, Artificial Sequence
  Synthetic oligonucleotide
gtacatggggattagtcttaagtcaggggc

SEQ ID NO: 379366 - DNA, 30 bp, Artificial Sequence
  Synthetic oligonucleotide
attatgacaccatcctatgatttgaggggc

SEQ ID NO: 379367 - DNA, 30 bp, Artificial Sequence
  Synthetic oligonucleotide
agttctcggctgacacagggcaataggggc

SEQ ID NO: 379368 - DNA, 30 bp, Artificial Sequence
  Synthetic oligonucleotide
ccaatgacaaacacatttgccactaggggc

SEQ ID NO: 379369 - DNA, 30 bp, Artificial Sequence
  Synthetic oligonucleotide
atgccacgcattagatcacgtgttaggggc

SEQ ID NO: 379370 - DNA, 30 bp, Artificial Sequence
  Synthetic oligonucleotide
ctaatagactatttagttcgtatacggggc

SEQ ID NO: 379371 - DNA, 30 bp, Artificial Sequence
  Synthetic oligonucleotide
atatcgactcattccgaaaagcagcggggc

SEQ ID NO: 379372 - DNA, 30 bp, Artificial Sequence
  Synthetic oligonucleotide
ccactaaagtataagcccttctagcggggc

SEQ ID NO: 379373 - DNA, 30 bp, Artificial Sequence
  Synthetic oligonucleotide
aaattgaggctcggtagcgcactgcggggc

SEQ ID NO: 379374 - DNA, 30 bp, Artificial Sequence
  Synthetic oligonucleotide
tcgctgtaagatctgttttaacatcggggc

SEQ ID NO: 379375 - DNA, 30 bp, Artificial Sequence
  Synthetic oligonucleotide
cgctagtgggttttgacatttacagggggc

SEQ ID NO: 379376 - DNA, 30 bp, Artificial Sequence
  Synthetic oligonucleotide
tttacgcgaacgctatgggttccagggggc

SEQ ID NO: 379377 - DNA, 30 bp, Artificial Sequence
  Synthetic oligonucleotide
ccgtctaagagacaggcgttcatcgggggc

SEQ ID NO: 379378 - DNA, 30 bp, Artificial Sequence
  Synthetic oligonucleotide
atctgagggctatggccgaccagggggggc

SEQ ID NO: 379379 - DNA, 30 bp, Artificial Sequence
  Synthetic oligonucleotide
cctcccctcgtaattgcgaagatggggggc

SEQ ID NO: 379380 - DNA, 30 bp, Artificial Sequence
  Synthetic oligonucleotide
ggaagaccggggtcagatccgctggggggc

SEQ ID NO: 379381 - DNA, 30 bp, Artificial Sequence
  Synthetic oligonucleotide
accgtcaaggtctaggaattccatgggggc

SEQ ID NO: 379382 - DNA, 31 bp, Artificial Sequence
  Synthetic oligonucleotide
gaataccaaagccacgtaacggcctgggggc

SEQ ID NO: 379383 - DNA, 30 bp, Artificial Sequence
  Synthetic oligonucleotide
agtcccgccacagtgtcattggttgggggc

SEQ ID NO: 379384 - DNA, 31 bp, Artificial Sequence
  Synthetic oligonucleotide
ttatcccttaaatagtacaagctttgggggc

SEQ ID NO: 379385 - DNA, 30 bp, Artificial Sequence
  Synthetic oligonucleotide
cttattggcccgcaatactcgaaatggggc

SEQ ID NO: 379386 - DNA, 30 bp, Artificial Sequence
  Synthetic oligonucleotide
gagtaaccgatatatacggagcgatggggc

SEQ ID NO: 379387 - DNA, 30 bp, Artificial Sequence
  Synthetic oligonucleotide
cccttcctaaatgtgaggtgcacctggggc

SEQ ID NO: 379388 - DNA, 30 bp, Artificial Sequence
  Synthetic oligonucleotide
acacggtcctgcagtgcttgcacaatgggc

SEQ ID NO: 379389 - DNA, 30 bp, Artificial Sequence
  Synthetic oligonucleotide
ggtgactactttaacactctttgaatgggc

SEQ ID NO: 379390 - DNA, 30 bp, Artificial Sequence
  Synthetic oligonucleotide
gtccagaacgtctatggtgggcgcatgggc

SEQ ID NO: 379391 - DNA, 30 bp, Artificial Sequence
  Synthetic oligonucleotide
acatgtacgtcctctttatgtctgatgggc

SEQ ID NO: 379392 - DNA, 30 bp, Artificial Sequence
  Synthetic oligonucleotide
cctgggtgggggacctggacctctatgggc

SEQ ID NO: 379393 - DNA, 30 bp, Artificial Sequence
  Synthetic oligonucleotide
agtcataaagtagactcgggttttatgggc

SEQ ID NO: 379394 - DNA, 30 bp, Artificial Sequence
  Synthetic oligonucleotide
gacggagtgtcccatccgcgatcgctgggc

SEQ ID NO: 379395 - DNA, 30 bp, Artificial Sequence
  Synthetic oligonucleotide
gcataccgggccatcggcgcgaggctgggc

SEQ ID NO: 379396 - DNA, 30 bp, Artificial Sequence
  Synthetic oligonucleotide
accccagaccgatctagggccgctctgggc

SEQ ID NO: 379397 - DNA, 30 bp, Artificial Sequence
  Synthetic oligonucleotide
atcgcttcgactgatatcatgtctctgggc

SEQ ID NO: 379398 - DNA, 30 bp, Artificial Sequence
  Synthetic oligonucleotide
attagttaacgattgtgtatctaagtgggc

SEQ ID NO: 379399 - DNA, 30 bp, Artificial Sequence
  Synthetic oligonucleotide
ttcccctctcgtagcggtcgctcagtgggc

SEQ ID NO: 379400 - DNA, 30 bp, Artificial Sequence
  Synthetic oligonucleotide
ttatgctaaaacgcagggtatagagtgggc

SEQ ID NO: 379401 - DNA, 30 bp, Artificial Sequence
  Synthetic oligonucleotide
cgtcagggaaactgtggtgccggggtgggc

SEQ ID NO: 379402 - DNA, 30 bp, Artificial Sequence
  Synthetic oligonucleotide
aatacggggtataaatagatcctggtgggc

SEQ ID NO: 379403 - DNA, 30 bp, Artificial Sequence
  Synthetic oligonucleotide
aggtaaatgcccgacgctgtcttggtgggc

SEQ ID NO: 379404 - DNA, 30 bp, Artificial Sequence
  Synthetic oligonucleotide
gctcgcctaaaggaatctggaaatgtgggc

SEQ ID NO: 379405 - DNA, 30 bp, Artificial Sequence
  Synthetic oligonucleotide
ggcactaatggggatggtccgcaattgggc

SEQ ID NO: 379406 - DNA, 30 bp, Artificial Sequence
  Synthetic oligonucleotide
tccggtcatatgcttagcgcagtattgggc

SEQ ID NO: 379407 - DNA, 30 bp, Artificial Sequence
  Synthetic oligonucleotide
ggatgcctcactcaaaactgcttcttgggc

SEQ ID NO: 379408 - DNA, 30 bp, Artificial Sequence
  Synthetic oligonucleotide
caggttttcccgaggcgcggggagttgggc

SEQ ID NO: 379409 - DNA, 30 bp, Artificial Sequence
  Synthetic oligonucleotide
aagatatccaacgcggaatttaatttgggc

SEQ ID NO: 379410 - DNA, 30 bp, Artificial Sequence
  Synthetic oligonucleotide
gtttcggctcttttagtgccgcgaaatggc

SEQ ID NO: 379411 - DNA, 30 bp, Artificial Sequence
  Synthetic oligonucleotide
tgttagcagtacacttggtctataaatggc

SEQ ID NO: 379412 - DNA, 30 bp, Artificial Sequence
  Synthetic oligonucleotide
gtgtcaagcagaccttcacagagcaatggc

SEQ ID NO: 379413 - DNA, 30 bp, Artificial Sequence
  Synthetic oligonucleotide
caccaaccacactgtgcctcccagaatggc

SEQ ID NO: 379414 - DNA, 30 bp, Artificial Sequence
  Synthetic oligonucleotide
acatggaatgttggctgtgtaacgaatggc

SEQ ID NO: 379415 - DNA, 30 bp, Artificial Sequence
  Synthetic oligonucleotide
ggggacttgtgcaggacccgccgtaatggc

SEQ ID NO: 379416 - DNA, 30 bp, Artificial Sequence
  Synthetic oligonucleotide
gcgatttctgatatgcattagattaatggc

SEQ ID NO: 379417 - DNA, 30 bp, Artificial Sequence
  Synthetic oligonucleotide
acctcggaagcaactgtagcctgacatggc

SEQ ID NO: 379418 - DNA, 30 bp, Artificial Sequence
  Synthetic oligonucleotide
atcttacgcttggttggactcgaccatggc

SEQ ID NO: 379419 - DNA, 30 bp, Artificial Sequence
  Synthetic oligonucleotide
cagagatcatccgacgtttccagccatggc

SEQ ID NO: 379420 - DNA, 30 bp, Artificial Sequence
  Synthetic oligonucleotide
atctgaaggcgcgcgtagctttgtcatggc

SEQ ID NO: 379421 - DNA, 30 bp, Artificial Sequence
  Synthetic oligonucleotide
cctatgtacaggcattgagccctagatggc

SEQ ID NO: 379422 - DNA, 30 bp, Artificial Sequence
  Synthetic oligonucleotide
gatatttaaaaggtggattcaaaggatggc

SEQ ID NO: 379423 - DNA, 30 bp, Artificial Sequence
  Synthetic oligonucleotide
tattggctagggaagtttggatcggatggc

SEQ ID NO: 379424 - DNA, 30 bp, Artificial Sequence
  Synthetic oligonucleotide
gcaatgtgagtttaagataatcgatatggc

SEQ ID NO: 379425 - DNA, 30 bp, Artificial Sequence
  Synthetic oligonucleotide
taattggcgatatccccgtgacactatggc

SEQ ID NO: 379426 - DNA, 30 bp, Artificial Sequence
  Synthetic oligonucleotide
ggagccaaaaaacaagcgcctcactatggc

SEQ ID NO: 379427 - DNA, 30 bp, Artificial Sequence
  Synthetic oligonucleotide
gaagacaggtttctttaaacgttttatggc

SEQ ID NO: 379428 - DNA, 30 bp, Artificial Sequence
  Synthetic oligonucleotide
tgggttcatgtcgatgatgacacaactggc

SEQ ID NO: 379429 - DNA, 30 bp, Artificial Sequence
  Synthetic oligonucleotide
gccaagaaagccgggcataacagaactggc

SEQ ID NO: 379430 - DNA, 30 bp, Artificial Sequence
  Synthetic oligonucleotide
aattagatgaacagtcgtctaatgactggc

SEQ ID NO: 379431 - DNA, 30 bp, Artificial Sequence
  Synthetic oligonucleotide
gacggacgtgcttggcgccgcttgactggc

SEQ ID NO: 379432 - DNA, 30 bp, Artificial Sequence
  Synthetic oligonucleotide
attgcagcgactgtactaaagcctactggc

SEQ ID NO: 379433 - DNA, 30 bp, Artificial Sequence
  Synthetic oligonucleotide
catttcaacgacaccattgctacccctggc

SEQ ID NO: 379434 - DNA, 30 bp, Artificial Sequence
  Synthetic oligonucleotide
catcccgaggcctagcgccggcgccctggc

SEQ ID NO: 379435 - DNA, 30 bp, Artificial Sequence
  Synthetic oligonucleotide
tgaagtacgtgtaagcccctttggcctggc

SEQ ID NO: 379436 - DNA, 30 bp, Artificial Sequence
  Synthetic oligonucleotide
gatcagttcgttggattaaggtctcctggc

SEQ ID NO: 379437 - DNA, 30 bp, Artificial Sequence
  Synthetic oligonucleotide
taacaaggagccggtcaaggtggtcctggc

SEQ ID NO: 379438 - DNA, 30 bp, Artificial Sequence
  Synthetic oligonucleotide
ttattttcggtgttcattagaccagctggc

SEQ ID NO: 379439 - DNA, 30 bp, Artificial Sequence
  Synthetic oligonucleotide
gcgttacgattccattcccgtgacgctggc

SEQ ID NO: 379440 - DNA, 30 bp, Artificial Sequence
  Synthetic oligonucleotide
gacttaagaaacgcgctgcgtaaggctggc

SEQ ID NO: 379441 - DNA, 30 bp, Artificial Sequence
  Synthetic oligonucleotide
ttatatttcgtaataggcgctctggctggc

SEQ ID NO: 379442 - DNA, 30 bp, Artificial Sequence
  Synthetic oligonucleotide
ccagctgatagttagtaggcttttgctggc

SEQ ID NO: 379443 - DNA, 30 bp, Artificial Sequence
  Synthetic oligonucleotide
aaagatatcatggggtattaatcatctggc

SEQ ID NO: 379444 - DNA, 30 bp, Artificial Sequence
  Synthetic oligonucleotide
aacattgatcttgaccactaaatgtctggc

SEQ ID NO: 379445 - DNA, 30 bp, Artificial Sequence
  Synthetic oligonucleotide
agtgagcaacgtgcaacttccatgtctggc

SEQ ID NO: 379446 - DNA, 30 bp, Artificial Sequence
  Synthetic oligonucleotide
tgcagcttcacacctctcaaattttctggc

SEQ ID NO: 379447 - DNA, 30 bp, Artificial Sequence
  Synthetic oligonucleotide
aaagacgtctttactgacatgtcgagtggc

SEQ ID NO: 379448 - DNA, 30 bp, Artificial Sequence
  Synthetic oligonucleotide
ggtaccaagtagaggtaaggcctacgtggc

SEQ ID NO: 379449 - DNA, 30 bp, Artificial Sequence
  Synthetic oligonucleotide
atgccctttagcctagaaaagacgcgtggc

SEQ ID NO: 379450 - DNA, 30 bp, Artificial Sequence
  Synthetic oligonucleotide
aatcttcattggtcaaaacaaacaggtggc

SEQ ID NO: 379451 - DNA, 30 bp, Artificial Sequence
  Synthetic oligonucleotide
gtaccagatcagcttttccggggaggtggc

SEQ ID NO: 379452 - DNA, 30 bp, Artificial Sequence
  Synthetic oligonucleotide
aaacgtcttgtaaaaaaattcataggtggc

SEQ ID NO: 379453 - DNA, 30 bp, Artificial Sequence
  Synthetic oligonucleotide
ggaacatggttagtgctgggttgcggtggc

SEQ ID NO: 379454 - DNA, 30 bp, Artificial Sequence
  Synthetic oligonucleotide
cgcgggtagccagagggttgggctggtggc

SEQ ID NO: 379455 - DNA, 30 bp, Artificial Sequence
  Synthetic oligonucleotide
attgtgagtacacttcaactaacatgtggc

SEQ ID NO: 379456 - DNA, 30 bp, Artificial Sequence
  Synthetic oligonucleotide
tgtcagctttgggatatgtctgcatgtggc

SEQ ID NO: 379457 - DNA, 30 bp, Artificial Sequence
  Synthetic oligonucleotide
ctagcctaactctgatgtactttatgtggc

SEQ ID NO: 379458 - DNA, 30 bp, Artificial Sequence
  Synthetic oligonucleotide
aggaccggttggggtagagacttctgtggc

SEQ ID NO: 379459 - DNA, 30 bp, Artificial Sequence
  Synthetic oligonucleotide
tctaagcagtatatatctgcagtgtgtggc

SEQ ID NO: 379460 - DNA, 30 bp, Artificial Sequence
  Synthetic oligonucleotide
ctcgtacgacgttaattatgggattgtggc

SEQ ID NO: 379461 - DNA, 30 bp, Artificial Sequence
  Synthetic oligonucleotide
ggttcagtatcagaaaatagcaaaattggc

SEQ ID NO: 379462 - DNA, 30 bp, Artificial Sequence
  Synthetic oligonucleotide
gaaaagggtaccatataatgaccaattggc

SEQ ID NO: 379463 - DNA, 30 bp, Artificial Sequence
  Synthetic oligonucleotide
tttgggaatgtcggggcgaaatgaattggc

SEQ ID NO: 379464 - DNA, 30 bp, Artificial Sequence
  Synthetic oligonucleotide
tggaatgtttgttcggtccgctacattggc

SEQ ID NO: 379465 - DNA, 30 bp, Artificial Sequence
  Synthetic oligonucleotide
cgcccatctgagctaaaatgatgcattggc

SEQ ID NO: 379466 - DNA, 30 bp, Artificial Sequence
  Synthetic oligonucleotide
tggttctcaagacatgtaataaagattggc

SEQ ID NO: 379467 - DNA, 30 bp, Artificial Sequence
  Synthetic oligonucleotide
atatttgtacagggtcagtactgtattggc

SEQ ID NO: 379468 - DNA, 30 bp, Artificial Sequence
  Synthetic oligonucleotide
cgcaagtagaatcggacgaagcttattggc

SEQ ID NO: 379469 - DNA, 30 bp, Artificial Sequence
  Synthetic oligonucleotide
atggcccgaatgccaggatagaaacttggc

SEQ ID NO: 379470 - DNA, 30 bp, Artificial Sequence
  Synthetic oligonucleotide
tcactaattatcctttttggtccccttggc

SEQ ID NO: 379471 - DNA, 30 bp, Artificial Sequence
  Synthetic oligonucleotide
agctttaggtgggtaatatgagggcttggc

SEQ ID NO: 379472 - DNA, 30 bp, Artificial Sequence
  Synthetic oligonucleotide
gaattctaacgccagtgtcacagtcttggc

SEQ ID NO: 379473 - DNA, 31 bp, Artificial Sequence
  Synthetic oligonucleotide
gcaaattcaggctcgcgtattacgtcttggc

SEQ ID NO: 379474 - DNA, 30 bp, Artificial Sequence
  Synthetic oligonucleotide
cttatcctgggctgaccgcgtggtcttggc

SEQ ID NO: 379475 - DNA, 30 bp, Artificial Sequence
  Synthetic oligonucleotide
ttgggttcaatatctgcgtacaaagttggc

SEQ ID NO: 379476 - DNA, 30 bp, Artificial Sequence
  Synthetic oligonucleotide
gagtgctgctatcgttgcgcgaacgttggc

SEQ ID NO: 379477 - DNA, 30 bp, Artificial Sequence
  Synthetic oligonucleotide
gatatttcacgggattggaaagaggttggc

SEQ ID NO: 379478 - DNA, 30 bp, Artificial Sequence
  Synthetic oligonucleotide
gtgcactcgatgtaaatgccgcgctttggc

SEQ ID NO: 379479 - DNA, 30 bp, Artificial Sequence
  Synthetic oligonucleotide
ttcattcaaattaagtatctgtgctttggc

SEQ ID NO: 379480 - DNA, 30 bp, Artificial Sequence
  Synthetic oligonucleotide
caatagcgaatgttgactttgatctttggc

SEQ ID NO: 379481 - DNA, 30 bp, Artificial Sequence
  Synthetic oligonucleotide
cacacgtagctggaaacttttcggtttggc

SEQ ID NO: 379482 - DNA, 30 bp, Artificial Sequence
  Synthetic oligonucleotide
gacttaaacattatttcagggacttttggc

SEQ ID NO: 379483 - DNA, 30 bp, Artificial Sequence
  Synthetic oligonucleotide
gctgcgtcctgcaacttacaaccttttggc

SEQ ID NO: 379484 - DNA, 30 bp, Artificial Sequence
  Synthetic oligonucleotide
gccacgtcattctcaattatgagttttggc

SEQ ID NO: 379485 - DNA, 30 bp, Artificial Sequence
  Synthetic oligonucleotide
taaacaccgattgagccgttggaaaaatgc

SEQ ID NO: 379486 - DNA, 30 bp, Artificial Sequence
  Synthetic oligonucleotide
tggtggctcgacgccgcgggtgcaaaatgc

SEQ ID NO: 379487 - DNA, 30 bp, Artificial Sequence
  Synthetic oligonucleotide
gctatcaaagattacagtcacatcaaatgc

SEQ ID NO: 379488 - DNA, 30 bp, Artificial Sequence
  Synthetic oligonucleotide
gtgacggacgtacgttcgagcactaaatgc

SEQ ID NO: 379489 - DNA, 30 bp, Artificial Sequence
  Synthetic oligonucleotide
aacctcccccggatcccagagcagcaatgc

SEQ ID NO: 379490 - DNA, 30 bp, Artificial Sequence
  Synthetic oligonucleotide
aagctcgatttcctcattgggttgcaatgc

SEQ ID NO: 379491 - DNA, 30 bp, Artificial Sequence
  Synthetic oligonucleotide
ccggcattatatatattgcccaatcaatgc

SEQ ID NO: 379492 - DNA, 30 bp, Artificial Sequence
  Synthetic oligonucleotide
aaaatcgctatccaataattaactcaatgc

SEQ ID NO: 379493 - DNA, 30 bp, Artificial Sequence
  Synthetic oligonucleotide
gccaattgcgtcaattagaggggtcaatgc

SEQ ID NO: 379494 - DNA, 30 bp, Artificial Sequence
  Synthetic oligonucleotide
ctgctcactcactcacggggctgcgaatgc

SEQ ID NO: 379495 - DNA, 30 bp, Artificial Sequence
  Synthetic oligonucleotide
atgttgctgagggcacatcacacggaatgc

SEQ ID NO: 379496 - DNA, 35 bp, Artificial Sequence
  Synthetic oligonucleotide
tgtgtcagcatgaggagtcagaaggtgtggaatgc

SEQ ID NO: 379497 - DNA, 30 bp, Artificial Sequence
  Synthetic oligonucleotide
tggtttcatcgccaatactccgaataatgc

SEQ ID NO: 379498 - DNA, 30 bp, Artificial Sequence
  Synthetic oligonucleotide
agcgttcggcgccgaaagtcggtataatgc

SEQ ID NO: 379499 - DNA, 30 bp, Artificial Sequence
  Synthetic oligonucleotide
gttggatggcaaagatacaggaattaatgc

SEQ ID NO: 379500 - DNA, 30 bp, Artificial Sequence
  Synthetic oligonucleotide
attgtgaaactaacgcacatttcttaatgc

SEQ ID NO: 379501 - DNA, 30 bp, Artificial Sequence
  Synthetic oligonucleotide
gggcgtacctgggtacgtcgtaaaacatgc

SEQ ID NO: 379502 - DNA, 30 bp, Artificial Sequence
  Synthetic oligonucleotide
actctaagacgcctaagcccctcgacatgc

SEQ ID NO: 379503 - DNA, 30 bp, Artificial Sequence
  Synthetic oligonucleotide
cgagcagcaggtgtagacattcgtacatgc

SEQ ID NO: 379504 - DNA, 29 bp, Artificial Sequence
  Synthetic oligonucleotide
taagaaagcagggttctacaattacatgc

SEQ ID NO: 379505 - DNA, 30 bp, Artificial Sequence
  Synthetic oligonucleotide
tgcctcgcaaatgtattgatgacaccatgc

SEQ ID NO: 379506 - DNA, 30 bp, Artificial Sequence
  Synthetic oligonucleotide
ctacgggccaccggacaccaagtaccatgc

SEQ ID NO: 379507 - DNA, 30 bp, Artificial Sequence
  Synthetic oligonucleotide
tatctgtgcgtgggcgtagagctgccatgc

SEQ ID NO: 379508 - DNA, 30 bp, Artificial Sequence
  Synthetic oligonucleotide
ggtaggtcgtcgcccatgattcttccatgc

SEQ ID NO: 379509 - DNA, 30 bp, Artificial Sequence
  Synthetic oligonucleotide
tgactggccacgtgcaaccgttaagcatgc

SEQ ID NO: 379510 - DNA, 30 bp, Artificial Sequence
  Synthetic oligonucleotide
gcccttacgtgaaagtttatcagagcatgc

SEQ ID NO: 379511 - DNA, 30 bp, Artificial Sequence
  Synthetic oligonucleotide
gttatttagattcatctactaagcgcatgc

SEQ ID NO: 379512 - DNA, 30 bp, Artificial Sequence
  Synthetic oligonucleotide
ttagtattccagacattgagcagcgcatgc

SEQ ID NO: 379513 - DNA, 30 bp, Artificial Sequence
  Synthetic oligonucleotide
atcatctgggacttcagtcaacgcgcatgc

SEQ ID NO: 379514 - DNA, 30 bp, Artificial Sequence
  Synthetic oligonucleotide
gccagtatcggaataccgcttggggcatgc

SEQ ID NO: 379515 - DNA, 30 bp, Artificial Sequence
  Synthetic oligonucleotide
gttggactcagtggttcgtcctagtcatgc

SEQ ID NO: 379516 - DNA, 30 bp, Artificial Sequence
  Synthetic oligonucleotide
tgatgtaatccgaccgttgtatggtcatgc

SEQ ID NO: 379517 - DNA, 30 bp, Artificial Sequence
  Synthetic oligonucleotide
gcagatcgcctctgagaattcatgtcatgc

SEQ ID NO: 379518 - DNA, 30 bp, Artificial Sequence
  Synthetic oligonucleotide
caatgcttaggagaggacctcggaagatgc

SEQ ID NO: 379519 - DNA, 30 bp, Artificial Sequence
  Synthetic oligonucleotide
cgaagctggggcatcatcacccgcagatgc

SEQ ID NO: 379520 - DNA, 30 bp, Artificial Sequence
  Synthetic oligonucleotide
atcagggaactgtggctagcctgcagatgc

SEQ ID NO: 379521 - DNA, 30 bp, Artificial Sequence
  Synthetic oligonucleotide
atattggcgacaaaggaaagtaggagatgc

SEQ ID NO: 379522 - DNA, 30 bp, Artificial Sequence
  Synthetic oligonucleotide
cggtcgcttttactcaagatatggagatgc

SEQ ID NO: 379523 - DNA, 30 bp, Artificial Sequence
  Synthetic oligonucleotide
acggttgtggggggggattcatcccgatgc

SEQ ID NO: 379524 - DNA, 30 bp, Artificial Sequence
  Synthetic oligonucleotide
gctaatgcgtacatcgttagtcggcgatgc

SEQ ID NO: 379525 - DNA, 30 bp, Artificial Sequence
  Synthetic oligonucleotide
cccctgctttagaaccgtgagtatcgatgc

SEQ ID NO: 379526 - DNA, 30 bp, Artificial Sequence
  Synthetic oligonucleotide
aggtgtgaccgaaccacatggccaggatgc

SEQ ID NO: 379527 - DNA, 30 bp, Artificial Sequence
  Synthetic oligonucleotide
agagtcacccggggctcggatcacggatgc

SEQ ID NO: 379528 - DNA, 29 bp, Artificial Sequence
  Synthetic oligonucleotide
ggttctgtgcgacatatttacccggatgc

SEQ ID NO: 379529 - DNA, 30 bp, Artificial Sequence
  Synthetic oligonucleotide
ctgatttagcttttaaagctagagggatgc

SEQ ID NO: 379530 - DNA, 30 bp, Artificial Sequence
  Synthetic oligonucleotide
aaccaaagccgtcccctacgctcgggatgc

SEQ ID NO: 379531 - DNA, 30 bp, Artificial Sequence
  Synthetic oligonucleotide
gacacaccgccaagggacgtacggggatgc

SEQ ID NO: 379532 - DNA, 30 bp, Artificial Sequence
  Synthetic oligonucleotide
tagtcgctggctaatttggatttgggatgc

SEQ ID NO: 379533 - DNA, 30 bp, Artificial Sequence
  Synthetic oligonucleotide
tagataattaagggtgttaggtctggatgc

SEQ ID NO: 379534 - DNA, 30 bp, Artificial Sequence
  Synthetic oligonucleotide
actcgcgaatgattagtatagtttggatgc

SEQ ID NO: 379535 - DNA, 30 bp, Artificial Sequence
  Synthetic oligonucleotide
ggtatcgatctcctagtctgccgatgatgc

SEQ ID NO: 379536 - DNA, 30 bp, Artificial Sequence
  Synthetic oligonucleotide
acctccatgttaatgcgtataggctgatgc

SEQ ID NO: 379537 - DNA, 30 bp, Artificial Sequence
  Synthetic oligonucleotide
aactacagcaactaagtaggagattgatgc

SEQ ID NO: 379538 - DNA, 30 bp, Artificial Sequence
  Synthetic oligonucleotide
aatgtcgcaacgaacgattggggttgatgc

SEQ ID NO: 379539 - DNA, 31 bp, Artificial Sequence
  Synthetic oligonucleotide
ggtgccgcccgtccatttagccgaaatatgc

SEQ ID NO: 379540 - DNA, 30 bp, Artificial Sequence
  Synthetic oligonucleotide
ccaacgggttatgtcgttgggaagatatgc

SEQ ID NO: 379541 - DNA, 30 bp, Artificial Sequence
  Synthetic oligonucleotide
acccgtatcaaactacttccaactatatgc

SEQ ID NO: 379542 - DNA, 30 bp, Artificial Sequence
  Synthetic oligonucleotide
agcactagaaaggtctaagacgctatatgc

SEQ ID NO: 379543 - DNA, 26 bp, Artificial Sequence
  Synthetic oligonucleotide
attaggaaaaatatttatgtatatgc

SEQ ID NO: 379544 - DNA, 30 bp, Artificial Sequence
  Synthetic oligonucleotide
ggcccagagtgatctgactcatcactatgc

SEQ ID NO: 379545 - DNA, 30 bp, Artificial Sequence
  Synthetic oligonucleotide
ctcggatgtgctggctatgccttactatgc

SEQ ID NO: 379546 - DNA, 30 bp, Artificial Sequence
  Synthetic oligonucleotide
aaataaagggtgggattcattatcctatgc

SEQ ID NO: 379547 - DNA, 30 bp, Artificial Sequence
  Synthetic oligonucleotide
cgcgagggatatgaatagatattcctatgc

SEQ ID NO: 379548 - DNA, 30 bp, Artificial Sequence
  Synthetic oligonucleotide
cttactggtcgttaccaggcgttcctatgc

SEQ ID NO: 379549 - DNA, 30 bp, Artificial Sequence
  Synthetic oligonucleotide
caactcgtacaccaacgttggacgctatgc

SEQ ID NO: 379550 - DNA, 30 bp, Artificial Sequence
  Synthetic oligonucleotide
agcgcgggctactatttctgcttgctatgc

SEQ ID NO: 379551 - DNA, 30 bp, Artificial Sequence
  Synthetic oligonucleotide
gggcgcgcttcccccaccacctccgtatgc

SEQ ID NO: 379552 - DNA, 30 bp, Artificial Sequence
  Synthetic oligonucleotide
ctgcagtctcgcgtaaatgggggcgtatgc

SEQ ID NO: 379553 - DNA, 30 bp, Artificial Sequence
  Synthetic oligonucleotide
tttcacggtatgcagtggttaaaggtatgc

SEQ ID NO: 379554 - DNA, 30 bp, Artificial Sequence
  Synthetic oligonucleotide
tgcttttagggggtcatcgcgatggtatgc

SEQ ID NO: 379555 - DNA, 31 bp, Artificial Sequence
  Synthetic oligonucleotide
ccaggaatacttcgctgcgatcctggtatgc

SEQ ID NO: 379556 - DNA, 30 bp, Artificial Sequence
  Synthetic oligonucleotide
gtctcatagtcggggtggaccttggtatgc

SEQ ID NO: 379557 - DNA, 30 bp, Artificial Sequence
  Synthetic oligonucleotide
gtcaatgctacgaactgaaggcatgtatgc

SEQ ID NO: 379558 - DNA, 30 bp, Artificial Sequence
  Synthetic oligonucleotide
gtattaaagcacactgggaacagtgtatgc

SEQ ID NO: 379559 - DNA, 30 bp, Artificial Sequence
  Synthetic oligonucleotide
cctctaggtggtagtgaaacagaattatgc

SEQ ID NO: 379560 - DNA, 30 bp, Artificial Sequence
  Synthetic oligonucleotide
cgataaagtgcacacagcgcacagttatgc

SEQ ID NO: 379561 - DNA, 30 bp, Artificial Sequence
  Synthetic oligonucleotide
tttacaggtccatgtaacattcaaaactgc

SEQ ID NO: 379562 - DNA, 30 bp, Artificial Sequence
  Synthetic oligonucleotide
acaatcggtaaggttcgctgcttaaactgc

SEQ ID NO: 379563 - DNA, 30 bp, Artificial Sequence
  Synthetic oligonucleotide
ggcgcttatggttactggaaaggcaactgc

SEQ ID NO: 379564 - DNA, 30 bp, Artificial Sequence
  Synthetic oligonucleotide
tattactcatttgagtcagagttcaactgc

SEQ ID NO: 379565 - DNA, 30 bp, Artificial Sequence
  Synthetic oligonucleotide
gatatgaagcttgggttatgaagtaactgc

SEQ ID NO: 379566 - DNA, 30 bp, Artificial Sequence
  Synthetic oligonucleotide
accataagcttgatgaaacgggttaactgc

SEQ ID NO: 379567 - DNA, 30 bp, Artificial Sequence
  Synthetic oligonucleotide
gcttttagagtatttctgcacgaccactgc

SEQ ID NO: 379568 - DNA, 30 bp, Artificial Sequence
  Synthetic oligonucleotide
aggctactggctctgatctattaccactgc

SEQ ID NO: 379569 - DNA, 30 bp, Artificial Sequence
  Synthetic oligonucleotide
tagggaatgtttataattcagcagcactgc

SEQ ID NO: 379570 - DNA, 30 bp, Artificial Sequence
  Synthetic oligonucleotide
agggggcatcagtaggccgcccggcactgc

SEQ ID NO: 379571 - DNA, 30 bp, Artificial Sequence
  Synthetic oligonucleotide
tactgtctgagatcccttctgatgcactgc

SEQ ID NO: 379572 - DNA, 30 bp, Artificial Sequence
  Synthetic oligonucleotide
tttagcagataatgaaccgtaaaagactgc

SEQ ID NO: 379573 - DNA, 30 bp, Artificial Sequence
  Synthetic oligonucleotide
gtagcatacctttcaccgcatccagactgc

SEQ ID NO: 379574 - DNA, 30 bp, Artificial Sequence
  Synthetic oligonucleotide
ctacgatccccgtatggttaaatcgactgc

SEQ ID NO: 379575 - DNA, 30 bp, Artificial Sequence
  Synthetic oligonucleotide
tagacctatatatgaaggcgacaggactgc

SEQ ID NO: 379576 - DNA, 30 bp, Artificial Sequence
  Synthetic oligonucleotide
tccatcctctgacattactaaacggactgc

SEQ ID NO: 379577 - DNA, 30 bp, Artificial Sequence
  Synthetic oligonucleotide
tcttgcctttattagtaaggagctgactgc

SEQ ID NO: 379578 - DNA, 30 bp, Artificial Sequence
  Synthetic oligonucleotide
aaagtgtcaagcctgggataactatactgc

SEQ ID NO: 379579 - DNA, 30 bp, Artificial Sequence
  Synthetic oligonucleotide
cgggcattgttggacgggcagagctactgc

SEQ ID NO: 379580 - DNA, 30 bp, Artificial Sequence
  Synthetic oligonucleotide
ggtgaacaacgcgtaagccaatgctactgc

SEQ ID NO: 379581 - DNA, 30 bp, Artificial Sequence
  Synthetic oligonucleotide
atgaaaggcagcggcgtctacacttactgc

SEQ ID NO: 379582 - DNA, 30 bp, Artificial Sequence
  Synthetic oligonucleotide
gaaaccagtaaaatgtaactccgttactgc

SEQ ID NO: 379583 - DNA, 30 bp, Artificial Sequence
  Synthetic oligonucleotide
ttcgttaaacgtccgaatgtacacacctgc

SEQ ID NO: 379584 - DNA, 30 bp, Artificial Sequence
  Synthetic oligonucleotide
cttcttaacgctataagaccaacgacctgc

SEQ ID NO: 379585 - DNA, 30 bp, Artificial Sequence
  Synthetic oligonucleotide
ggcattacagcatggacatttattacctgc

SEQ ID NO: 379586 - DNA, 30 bp, Artificial Sequence
  Synthetic oligonucleotide
attcaataatgggcaagtcgaccaccctgc

SEQ ID NO: 379587 - DNA, 30 bp, Artificial Sequence
  Synthetic oligonucleotide
taaactctgtgtggcgtgtttccaccctgc

SEQ ID NO: 379588 - DNA, 30 bp, Artificial Sequence
  Synthetic oligonucleotide
cctttcactagcggagattcgcagccctgc

SEQ ID NO: 379589 - DNA, 30 bp, Artificial Sequence
  Synthetic oligonucleotide
atatagtggtgtacacaattatgagcctgc

SEQ ID NO: 379590 - DNA, 30 bp, Artificial Sequence
  Synthetic oligonucleotide
gcgcatattattcacgtgctacccgcctgc

SEQ ID NO: 379591 - DNA, 30 bp, Artificial Sequence
  Synthetic oligonucleotide
gatctggccgaaggcaagttacgggcctgc

SEQ ID NO: 379592 - DNA, 30 bp, Artificial Sequence
  Synthetic oligonucleotide
aagacaaggtttagatcggctaactcctgc

SEQ ID NO: 379593 - DNA, 30 bp, Artificial Sequence
  Synthetic oligonucleotide
aatctacggagagagggttatcgctcctgc

SEQ ID NO: 379594 - DNA, 30 bp, Artificial Sequence
  Synthetic oligonucleotide
gacactattttcgcctattaaacttcctgc

SEQ ID NO: 379595 - DNA, 30 bp, Artificial Sequence
  Synthetic oligonucleotide
tagggaaaactcgacaagggtggttcctgc

SEQ ID NO: 379596 - DNA, 30 bp, Artificial Sequence
  Synthetic oligonucleotide
tttgggccaggttaatgggtaatttcctgc

SEQ ID NO: 379597 - DNA, 30 bp, Artificial Sequence
  Synthetic oligonucleotide
atgcggaagaaacaagtgattagaagctgc

SEQ ID NO: 379598 - DNA, 30 bp, Artificial Sequence
  Synthetic oligonucleotide
atttagggtaatcatggaatgctaagctgc

SEQ ID NO: 379599 - DNA, 30 bp, Artificial Sequence
  Synthetic oligonucleotide
ccagcctgttcattaggtggcaacagctgc

SEQ ID NO: 379600 - DNA, 30 bp, Artificial Sequence
  Synthetic oligonucleotide
agactgagatcagagatgattctcagctgc

SEQ ID NO: 379601 - DNA, 30 bp, Artificial Sequence
  Synthetic oligonucleotide
ctctgggaactaatatgcactacgagctgc

SEQ ID NO: 379602 - DNA, 30 bp, Artificial Sequence
  Synthetic oligonucleotide
atttggctgtactctgccagttcgagctgc

SEQ ID NO: 379603 - DNA, 30 bp, Artificial Sequence
  Synthetic oligonucleotide
gtctcaaccgttgccgagaactatagctgc

SEQ ID NO: 379604 - DNA, 30 bp, Artificial Sequence
  Synthetic oligonucleotide
ccttcaatatctggggataaccaacgctgc

SEQ ID NO: 379605 - DNA, 30 bp, Artificial Sequence
  Synthetic oligonucleotide
aagtagctctgcggggaaattgagcgctgc

SEQ ID NO: 379606 - DNA, 30 bp, Artificial Sequence
  Synthetic oligonucleotide
gtccttagttaaagcgacccagctcgctgc

SEQ ID NO: 379607 - DNA, 30 bp, Artificial Sequence
  Synthetic oligonucleotide
ggttctagactgaattaacttagtcgctgc

SEQ ID NO: 379608 - DNA, 30 bp, Artificial Sequence
  Synthetic oligonucleotide
aatcctggtatggctttaagtcgtcgctgc

SEQ ID NO: 379609 - DNA, 30 bp, Artificial Sequence
  Synthetic oligonucleotide
atggcagctcctgggcatgcggaaggctgc

SEQ ID NO: 379610 - DNA, 30 bp, Artificial Sequence
  Synthetic oligonucleotide
acgatgggccatgggctggtatgcggctgc

SEQ ID NO: 379611 - DNA, 30 bp, Artificial Sequence
  Synthetic oligonucleotide
tgatggagaatgttggcgaggccgggctgc

SEQ ID NO: 379612 - DNA, 30 bp, Artificial Sequence
  Synthetic oligonucleotide
gcggtgcggcaggaatacggtagatgctgc

SEQ ID NO: 379613 - DNA, 30 bp, Artificial Sequence
  Synthetic oligonucleotide
actggataccagaagcagcggcgatgctgc

SEQ ID NO: 379614 - DNA, 30 bp, Artificial Sequence
  Synthetic oligonucleotide
tgttatctggctgggagattgatctgctgc

SEQ ID NO: 379615 - DNA, 30 bp, Artificial Sequence
  Synthetic oligonucleotide
cgcgataagggacgtacgcaagtctgctgc

SEQ ID NO: 379616 - DNA, 30 bp, Artificial Sequence
  Synthetic oligonucleotide
cacggggcatttagagcgagggtctgctgc

SEQ ID NO: 379617 - DNA, 30 bp, Artificial Sequence
  Synthetic oligonucleotide
gtccaacagctttagaccttaaagtgctgc

SEQ ID NO: 379618 - DNA, 30 bp, Artificial Sequence
  Synthetic oligonucleotide
aaaaatcgctcacacgattagacgatctgc

SEQ ID NO: 379619 - DNA, 30 bp, Artificial Sequence
  Synthetic oligonucleotide
cgtactgtttgggccccctctatgatctgc

SEQ ID NO: 379620 - DNA, 30 bp, Artificial Sequence
  Synthetic oligonucleotide
aaaaccaatcattcttcatgcagtatctgc

SEQ ID NO: 379621 - DNA, 30 bp, Artificial Sequence
  Synthetic oligonucleotide
gaagcttgctgcggcaaacacagcctctgc

SEQ ID NO: 379622 - DNA, 30 bp, Artificial Sequence
  Synthetic oligonucleotide
cagattagaatagggcttgctcggctctgc

SEQ ID NO: 379623 - DNA, 30 bp, Artificial Sequence
  Synthetic oligonucleotide
tttttttattaaatcgagtaaagtctctgc

SEQ ID NO: 379624 - DNA, 30 bp, Artificial Sequence
  Synthetic oligonucleotide
gcggtcgctcgtattagatttctggtctgc

SEQ ID NO: 379625 - DNA, 30 bp, Artificial Sequence
  Synthetic oligonucleotide
actatttcacaatacggggcatgtgtctgc

SEQ ID NO: 379626 - DNA, 30 bp, Artificial Sequence
  Synthetic oligonucleotide
gctgccggccgagttagtaagtttgtctgc

SEQ ID NO: 379627 - DNA, 30 bp, Artificial Sequence
  Synthetic oligonucleotide
cgggttttcgctgaggcctctagattctgc

SEQ ID NO: 379628 - DNA, 30 bp, Artificial Sequence
  Synthetic oligonucleotide
attacgtcatgaactttgaatagtttctgc

SEQ ID NO: 379629 - DNA, 30 bp, Artificial Sequence
  Synthetic oligonucleotide
cggacggctctatcgcgagcttttttctgc

SEQ ID NO: 379630 - DNA, 30 bp, Artificial Sequence
  Synthetic oligonucleotide
taaggcgcagcatggttggaccaaaagtgc

SEQ ID NO: 379631 - DNA, 30 bp, Artificial Sequence
  Synthetic oligonucleotide
agacgaagcattatcgcgactccaaagtgc

SEQ ID NO: 379632 - DNA, 30 bp, Artificial Sequence
  Synthetic oligonucleotide
attagattgagtgatatcttttgaaagtgc

SEQ ID NO: 379633 - DNA, 30 bp, Artificial Sequence
  Synthetic oligonucleotide
ataagccgcacatgaaatgagatcaagtgc

SEQ ID NO: 379634 - DNA, 30 bp, Artificial Sequence
  Synthetic oligonucleotide
taccctcatcaatgccatgttgtgaagtgc

SEQ ID NO: 379635 - DNA, 30 bp, Artificial Sequence
  Synthetic oligonucleotide
ccagggtcgatcagcagcaattttaagtgc

SEQ ID NO: 379636 - DNA, 30 bp, Artificial Sequence
  Synthetic oligonucleotide
ttgaagttttcttgcgtgccgaaacagtgc

SEQ ID NO: 379637 - DNA, 30 bp, Artificial Sequence
  Synthetic oligonucleotide
ataagtccaacaatgactaccggacagtgc

SEQ ID NO: 379638 - DNA, 30 bp, Artificial Sequence
  Synthetic oligonucleotide
ggacctttctcgtcaattccggcgcagtgc

SEQ ID NO: 379639 - DNA, 30 bp, Artificial Sequence
  Synthetic oligonucleotide
cctcacccagcgccaaccgagatgcagtgc

SEQ ID NO: 379640 - DNA, 30 bp, Artificial Sequence
  Synthetic oligonucleotide
ttggggctggactgatcatgtagtcagtgc

SEQ ID NO: 379641 - DNA, 30 bp, Artificial Sequence
  Synthetic oligonucleotide
cgaagggttgacgtggtcagggccgagtgc

SEQ ID NO: 379642 - DNA, 30 bp, Artificial Sequence
  Synthetic oligonucleotide
agagtaagcagcatcggttgagaggagtgc

SEQ ID NO: 379643 - DNA, 30 bp, Artificial Sequence
  Synthetic oligonucleotide
tgatatatgttgtacattcgattggagtgc

SEQ ID NO: 379644 - DNA, 30 bp, Artificial Sequence
  Synthetic oligonucleotide
ttaccgcttttcgccacaaagtatgagtgc

SEQ ID NO: 379645 - DNA, 30 bp, Artificial Sequence
  Synthetic oligonucleotide
cttacgcttaatcgttacgaacgatagtgc

SEQ ID NO: 379646 - DNA, 30 bp, Artificial Sequence
  Synthetic oligonucleotide
tggaagcattattctatgcgggcctagtgc

SEQ ID NO: 379647 - DNA, 30 bp, Artificial Sequence
  Synthetic oligonucleotide
acatcacagatgttgcgccttcgctagtgc

SEQ ID NO: 379648 - DNA, 30 bp, Artificial Sequence
  Synthetic oligonucleotide
atttggtcagctaaaaagaaattgtagtgc

SEQ ID NO: 379649 - DNA, 30 bp, Artificial Sequence
  Synthetic oligonucleotide
gattgtacaaaaaaagatgggttgtagtgc

SEQ ID NO: 379650 - DNA, 30 bp, Artificial Sequence
  Synthetic oligonucleotide
cccagtcacgggttaattgtcataacgtgc

SEQ ID NO: 379651 - DNA, 30 bp, Artificial Sequence
  Synthetic oligonucleotide
agagcgtctacttaccacgggttaacgtgc

SEQ ID NO: 379652 - DNA, 30 bp, Artificial Sequence
  Synthetic oligonucleotide
caggcccgctcagacacgaatctcacgtgc

SEQ ID NO: 379653 - DNA, 30 bp, Artificial Sequence
  Synthetic oligonucleotide
cactacaaataaccttgcgaggtcacgtgc

SEQ ID NO: 379654 - DNA, 30 bp, Artificial Sequence
  Synthetic oligonucleotide
cagatggtatggacggcccgcaagacgtgc

SEQ ID NO: 379655 - DNA, 30 bp, Artificial Sequence
  Synthetic oligonucleotide
gattcgactcagatagtacgtatgacgtgc

SEQ ID NO: 379656 - DNA, 30 bp, Artificial Sequence
  Synthetic oligonucleotide
aactatcaggcatggcacgaacttacgtgc

SEQ ID NO: 379657 - DNA, 30 bp, Artificial Sequence
  Synthetic oligonucleotide
gaaactctagaatcctggaaatcaccgtgc

SEQ ID NO: 379658 - DNA, 30 bp, Artificial Sequence
  Synthetic oligonucleotide
tggtggtgtatatatgacgttataccgtgc

SEQ ID NO: 379659 - DNA, 31 bp, Artificial Sequence
  Synthetic oligonucleotide
ggtatgttctatatgcggctcgaacccgtgc

SEQ ID NO: 379660 - DNA, 30 bp, Artificial Sequence
  Synthetic oligonucleotide
cccttcacttattacatcgctcagccgtgc

SEQ ID NO: 379661 - DNA, 30 bp, Artificial Sequence
  Synthetic oligonucleotide
gcaaatgtctcaattgtgcacaggccgtgc

SEQ ID NO: 379662 - DNA, 30 bp, Artificial Sequence
  Synthetic oligonucleotide
taaggctcagctactatattctggccgtgc

SEQ ID NO: 379663 - DNA, 30 bp, Artificial Sequence
  Synthetic oligonucleotide
gcgattcacaagatcaattccgatccgtgc

SEQ ID NO: 379664 - DNA, 30 bp, Artificial Sequence
  Synthetic oligonucleotide
ttgggtcactaccaattggattcggcgtgc

SEQ ID NO: 379665 - DNA, 30 bp, Artificial Sequence
  Synthetic oligonucleotide
taagtaatcgttgaccatactatggcgtgc

SEQ ID NO: 379666 - DNA, 30 bp, Artificial Sequence
  Synthetic oligonucleotide
taccacgaatcaccataggttacatcgtgc

SEQ ID NO: 379667 - DNA, 30 bp, Artificial Sequence
  Synthetic oligonucleotide
cgacggagcgtgagccttggattctcgtgc

SEQ ID NO: 379668 - DNA, 27 bp, Artificial Sequence
  Synthetic oligonucleotide
ggtgtcacaacggatgaccggtcgtgc

SEQ ID NO: 379669 - DNA, 30 bp, Artificial Sequence
  Synthetic oligonucleotide
taggactggttggatcatgcgcacaggtgc

SEQ ID NO: 379670 - DNA, 30 bp, Artificial Sequence
  Synthetic oligonucleotide
gcttataagtcacgggagggtgggaggtgc

SEQ ID NO: 379671 - DNA, 30 bp, Artificial Sequence
  Synthetic oligonucleotide
ctgtatatggtcagcggcgtacataggtgc

SEQ ID NO: 379672 - DNA, 30 bp, Artificial Sequence
  Synthetic oligonucleotide
aatgcgtgcctttttaagtatactaggtgc

SEQ ID NO: 379673 - DNA, 30 bp, Artificial Sequence
  Synthetic oligonucleotide
tgcaaggttcccgtaatgaaatttaggtgc

SEQ ID NO: 379674 - DNA, 30 bp, Artificial Sequence
  Synthetic oligonucleotide
tatggtaactaatacccctgtaaacggtgc

SEQ ID NO: 379675 - DNA, 30 bp, Artificial Sequence
  Synthetic oligonucleotide
atagggagatcaagaagtatagaccggtgc

SEQ ID NO: 379676 - DNA, 30 bp, Artificial Sequence
  Synthetic oligonucleotide
ttatctgtactcggtacttccaagcggtgc

SEQ ID NO: 379677 - DNA, 30 bp, Artificial Sequence
  Synthetic oligonucleotide
gcgccaccggtgtgcgacgtcttgcggtgc

SEQ ID NO: 379678 - DNA, 30 bp, Artificial Sequence
  Synthetic oligonucleotide
gttaggtatttaaccgtcgtaaatcggtgc

SEQ ID NO: 379679 - DNA, 30 bp, Artificial Sequence
  Synthetic oligonucleotide
ccggatgttctaacccctaggattcggtgc

SEQ ID NO: 379680 - DNA, 30 bp, Artificial Sequence
  Synthetic oligonucleotide
cttagagcatgggccgctcagtttcggtgc

SEQ ID NO: 379681 - DNA, 30 bp, Artificial Sequence
  Synthetic oligonucleotide
atccttatccggtgcgcggcgaccgggtgc

SEQ ID NO: 379682 - DNA, 30 bp, Artificial Sequence
  Synthetic oligonucleotide
cccaaaatcgattttaacaactaggggtgc

SEQ ID NO: 379683 - DNA, 30 bp, Artificial Sequence
  Synthetic oligonucleotide
cacttgccctcccgacaatactgggggtgc

SEQ ID NO: 379684 - DNA, 30 bp, Artificial Sequence
  Synthetic oligonucleotide
gttgcatcgatacagataacgtatgggtgc

SEQ ID NO: 379685 - DNA, 30 bp, Artificial Sequence
  Synthetic oligonucleotide
aaacaccgtgaagaagataccactgggtgc

SEQ ID NO: 379686 - DNA, 30 bp, Artificial Sequence
  Synthetic oligonucleotide
aaattacgtgtccacagtatgacatggtgc

SEQ ID NO: 379687 - DNA, 30 bp, Artificial Sequence
  Synthetic oligonucleotide
tatactggttataataggtcgtcatggtgc

SEQ ID NO: 379688 - DNA, 30 bp, Artificial Sequence
  Synthetic oligonucleotide
ccgacgatacgtcgacctagcggctggtgc

SEQ ID NO: 379689 - DNA, 30 bp, Artificial Sequence
  Synthetic oligonucleotide
gaataccatgaagctgtgaatgtctggtgc

SEQ ID NO: 379690 - DNA, 30 bp, Artificial Sequence
  Synthetic oligonucleotide
cgcccgtcaaacgccgggctaatgtggtgc

SEQ ID NO: 379691 - DNA, 30 bp, Artificial Sequence
  Synthetic oligonucleotide
gttgatactacataaagtgtcacttggtgc

SEQ ID NO: 379692 - DNA, 30 bp, Artificial Sequence
  Synthetic oligonucleotide
ctcagcatgatggcaaaaggattttggtgc

SEQ ID NO: 379693 - DNA, 30 bp, Artificial Sequence
  Synthetic oligonucleotide
atgtctctgaatagcttttctgtaatgtgc

SEQ ID NO: 379694 - DNA, 30 bp, Artificial Sequence
  Synthetic oligonucleotide
tgcccaaagtaatgcatgaggttaatgtgc

SEQ ID NO: 379695 - DNA, 30 bp, Artificial Sequence
  Synthetic oligonucleotide
ggaagttgaacgggtggtgcccacatgtgc

SEQ ID NO: 379696 - DNA, 30 bp, Artificial Sequence
  Synthetic oligonucleotide
cattttgtaatgggttaaagtttcatgtgc

SEQ ID NO: 379697 - DNA, 30 bp, Artificial Sequence
  Synthetic oligonucleotide
agatgcaacacatcagggaattagatgtgc

SEQ ID NO: 379698 - DNA, 30 bp, Artificial Sequence
  Synthetic oligonucleotide
gacgtcggccgaggccacttcaggatgtgc

SEQ ID NO: 379699 - DNA, 30 bp, Artificial Sequence
  Synthetic oligonucleotide
gtggtttgtggggtgtcgttgtggatgtgc

SEQ ID NO: 379700 - DNA, 30 bp, Artificial Sequence
  Synthetic oligonucleotide
gctaacgccaggagatgaggaatgatgtgc

SEQ ID NO: 379701 - DNA, 30 bp, Artificial Sequence
  Synthetic oligonucleotide
cccaccttctacgggacgcacgttatgtgc

SEQ ID NO: 379702 - DNA, 30 bp, Artificial Sequence
  Synthetic oligonucleotide
gtaagctagatagatggggtcgtcctgtgc

SEQ ID NO: 379703 - DNA, 30 bp, Artificial Sequence
  Synthetic oligonucleotide
cctactataggcccccggctcaggctgtgc

SEQ ID NO: 379704 - DNA, 30 bp, Artificial Sequence
  Synthetic oligonucleotide
ggtcgtcggtcgcataatattcatctgtgc

SEQ ID NO: 379705 - DNA, 30 bp, Artificial Sequence
  Synthetic oligonucleotide
atcgaacgcgtgtgatacatgatcgtgtgc

SEQ ID NO: 379706 - DNA, 30 bp, Artificial Sequence
  Synthetic oligonucleotide
aacagatattattgagaccgtagtgtgtgc

SEQ ID NO: 379707 - DNA, 30 bp, Artificial Sequence
  Synthetic oligonucleotide
agaatgtgatgcgtctatggacttgtgtgc

SEQ ID NO: 379708 - DNA, 30 bp, Artificial Sequence
  Synthetic oligonucleotide
gattgggtaatttacttcggtgttgtgtgc

SEQ ID NO: 379709 - DNA, 30 bp, Artificial Sequence
  Synthetic oligonucleotide
aaagcatccagacaaggaggaaacttgtgc

SEQ ID NO: 379710 - DNA, 30 bp, Artificial Sequence
  Synthetic oligonucleotide
catcccctgcacgatcaggaaccgttgtgc

SEQ ID NO: 379711 - DNA, 30 bp, Artificial Sequence
  Synthetic oligonucleotide
tgttcggttcttctgttcccatctttgtgc

SEQ ID NO: 379712 - DNA, 30 bp, Artificial Sequence
  Synthetic oligonucleotide
tgtttcgaccgtggacattattgaaattgc

SEQ ID NO: 379713 - DNA, 30 bp, Artificial Sequence
  Synthetic oligonucleotide
gcacgccggattccacgtctaagcaattgc

SEQ ID NO: 379714 - DNA, 30 bp, Artificial Sequence
  Synthetic oligonucleotide
aatctcgcaagctccacataaggcaattgc

SEQ ID NO: 379715 - DNA, 30 bp, Artificial Sequence
  Synthetic oligonucleotide
ctgcggcgctcgaattttccccagaattgc

SEQ ID NO: 379716 - DNA, 31 bp, Artificial Sequence
  Synthetic oligonucleotide
gcatagggagagatttagctttgggaattgc

SEQ ID NO: 379717 - DNA, 30 bp, Artificial Sequence
  Synthetic oligonucleotide
ccgatatgggtgatggttttttaacattgc

SEQ ID NO: 379718 - DNA, 30 bp, Artificial Sequence
  Synthetic oligonucleotide
gaaaagtttcgagtcagagcttcacattgc

SEQ ID NO: 379719 - DNA, 30 bp, Artificial Sequence
  Synthetic oligonucleotide
gacgggtaatgaagcggcaatttacattgc

SEQ ID NO: 379720 - DNA, 30 bp, Artificial Sequence
  Synthetic oligonucleotide
gtgcaactcttaattatattaaaccattgc

SEQ ID NO: 379721 - DNA, 30 bp, Artificial Sequence
  Synthetic oligonucleotide
cgccgtttaggcgtttcgagggaccattgc

SEQ ID NO: 379722 - DNA, 30 bp, Artificial Sequence
  Synthetic oligonucleotide
actgttcatatcatagctgaaccgcattgc

SEQ ID NO: 379723 - DNA, 30 bp, Artificial Sequence
  Synthetic oligonucleotide
aacgacctagtttaccggggcaggcattgc

SEQ ID NO: 379724 - DNA, 30 bp, Artificial Sequence
  Synthetic oligonucleotide
attgctagttcggaaatagccgatcattgc

SEQ ID NO: 379725 - DNA, 30 bp, Artificial Sequence
  Synthetic oligonucleotide
gatcggtattatttgctagtcatagattgc

SEQ ID NO: 379726 - DNA, 30 bp, Artificial Sequence
  Synthetic oligonucleotide
ggagactaactccccactctgcacgattgc

SEQ ID NO: 379727 - DNA, 30 bp, Artificial Sequence
  Synthetic oligonucleotide
gatagtattccaaagtatgatcgggattgc

SEQ ID NO: 379728 - DNA, 30 bp, Artificial Sequence
  Synthetic oligonucleotide
agaccccccgcatcccatagaatggattgc

SEQ ID NO: 379729 - DNA, 30 bp, Artificial Sequence
  Synthetic oligonucleotide
gaaccttttaattgggaatgtaatgattgc

SEQ ID NO: 379730 - DNA, 30 bp, Artificial Sequence
  Synthetic oligonucleotide
tgggtcgatctcaggggagtgatatattgc

SEQ ID NO: 379731 - DNA, 30 bp, Artificial Sequence
  Synthetic oligonucleotide
ctttgccgtaaaaggaacgcactatattgc

SEQ ID NO: 379732 - DNA, 30 bp, Artificial Sequence
  Synthetic oligonucleotide
acccagtccccgtaggataattgctattgc

SEQ ID NO: 379733 - DNA, 30 bp, Artificial Sequence
  Synthetic oligonucleotide
atgctgtgcgtgaactaagctgtctattgc

SEQ ID NO: 379734 - DNA, 30 bp, Artificial Sequence
  Synthetic oligonucleotide
cagctattacgatcatacggagagtattgc

SEQ ID NO: 379735 - DNA, 30 bp, Artificial Sequence
  Synthetic oligonucleotide
aacagcccattcaaatcggtattaacttgc

SEQ ID NO: 379736 - DNA, 30 bp, Artificial Sequence
  Synthetic oligonucleotide
taggctccgtgcctggattcatccacttgc

SEQ ID NO: 379737 - DNA, 30 bp, Artificial Sequence
  Synthetic oligonucleotide
ttagtgtctctcaaccccgcgtctacttgc

SEQ ID NO: 379738 - DNA, 30 bp, Artificial Sequence
  Synthetic oligonucleotide
ttagcatactacactccgatatgtacttgc

SEQ ID NO: 379739 - DNA, 30 bp, Artificial Sequence
  Synthetic oligonucleotide
gcgggttaggtcatagtacctgaaccttgc

SEQ ID NO: 379740 - DNA, 30 bp, Artificial Sequence
  Synthetic oligonucleotide
caactgttaagttccagcgactccccttgc

SEQ ID NO: 379741 - DNA, 30 bp, Artificial Sequence
  Synthetic oligonucleotide
gcaaacgtagttgactagacgtccccttgc

SEQ ID NO: 379742 - DNA, 30 bp, Artificial Sequence
  Synthetic oligonucleotide
ttaatttattctcaatgctaaggcccttgc

SEQ ID NO: 379743 - DNA, 30 bp, Artificial Sequence
  Synthetic oligonucleotide
acgcgccgcgatgcaaggtaccaagcttgc

SEQ ID NO: 379744 - DNA, 30 bp, Artificial Sequence
  Synthetic oligonucleotide
tacaggaccctcctcttattcccagcttgc

SEQ ID NO: 379745 - DNA, 30 bp, Artificial Sequence
  Synthetic oligonucleotide
aatcaagcgctgaacgtatcccccgcttgc

SEQ ID NO: 379746 - DNA, 30 bp, Artificial Sequence
  Synthetic oligonucleotide
gtcaacgaggaacgtttggcgttggcttgc

SEQ ID NO: 379747 - DNA, 30 bp, Artificial Sequence
  Synthetic oligonucleotide
taagccacgcaatgtagacgaaatgcttgc

SEQ ID NO: 379748 - DNA, 30 bp, Artificial Sequence
  Synthetic oligonucleotide
taattcgacagctgcgcctgatgtgcttgc

SEQ ID NO: 379749 - DNA, 30 bp, Artificial Sequence
  Synthetic oligonucleotide
ttaccggttatgctttaaccaggctcttgc

SEQ ID NO: 379750 - DNA, 30 bp, Artificial Sequence
  Synthetic oligonucleotide
tgccacgtcccaagattaactcggtcttgc

SEQ ID NO: 379751 - DNA, 30 bp, Artificial Sequence
  Synthetic oligonucleotide
attttgaataacgtcatgtgcgattcttgc

SEQ ID NO: 379752 - DNA, 30 bp, Artificial Sequence
  Synthetic oligonucleotide
gctgttctcttgacttcaaggagcagttgc

SEQ ID NO: 379753 - DNA, 30 bp, Artificial Sequence
  Synthetic oligonucleotide
gggtggttaatctgacatggaggcagttgc

SEQ ID NO: 379754 - DNA, 30 bp, Artificial Sequence
  Synthetic oligonucleotide
ggacctacagacttgccgagccggagttgc

SEQ ID NO: 379755 - DNA, 30 bp, Artificial Sequence
  Synthetic oligonucleotide
agtttggcctggcggtgagccttgagttgc

SEQ ID NO: 379756 - DNA, 30 bp, Artificial Sequence
  Synthetic oligonucleotide
taggcccccgtggacataaaatttagttgc

SEQ ID NO: 379757 - DNA, 30 bp, Artificial Sequence
  Synthetic oligonucleotide
gctgtgcggaggatagttgccctccgttgc

SEQ ID NO: 379758 - DNA, 30 bp, Artificial Sequence
  Synthetic oligonucleotide
catctttaggtcttaatagcacagcgttgc

SEQ ID NO: 379759 - DNA, 30 bp, Artificial Sequence
  Synthetic oligonucleotide
taggtcgatttagtgggtaattctcgttgc

SEQ ID NO: 379760 - DNA, 30 bp, Artificial Sequence
  Synthetic oligonucleotide
gttagacgaccatagaatacacgtcgttgc

SEQ ID NO: 379761 - DNA, 30 bp, Artificial Sequence
  Synthetic oligonucleotide
tgtagactcaagatgttggcttgtcgttgc

SEQ ID NO: 379762 - DNA, 30 bp, Artificial Sequence
  Synthetic oligonucleotide
ctcttacgtttttttagaggtattcgttgc

SEQ ID NO: 379763 - DNA, 30 bp, Artificial Sequence
  Synthetic oligonucleotide
agtaataagcggttgggttttggcggttgc

SEQ ID NO: 379764 - DNA, 30 bp, Artificial Sequence
  Synthetic oligonucleotide
gctggcctaatgaggtctcagctgggttgc

SEQ ID NO: 379765 - DNA, 30 bp, Artificial Sequence
  Synthetic oligonucleotide
ggctttgtaggcgcgagaatcctatgttgc

SEQ ID NO: 379766 - DNA, 30 bp, Artificial Sequence
  Synthetic oligonucleotide
atagaatggtacatcagagggttatgttgc

SEQ ID NO: 379767 - DNA, 30 bp, Artificial Sequence
  Synthetic oligonucleotide
ttaaacagtgatgcgttgtgcatgtgttgc

SEQ ID NO: 379768 - DNA, 30 bp, Artificial Sequence
  Synthetic oligonucleotide
tgacctttacagttagggtatttgtgttgc

SEQ ID NO: 379769 - DNA, 30 bp, Artificial Sequence
  Synthetic oligonucleotide
ttgggaatcatagctgcgcctttgtgttgc

SEQ ID NO: 379770 - DNA, 30 bp, Artificial Sequence
  Synthetic oligonucleotide
tactacccaatcatacctatccattgttgc

SEQ ID NO: 379771 - DNA, 30 bp, Artificial Sequence
  Synthetic oligonucleotide
tgacttcttttctagtaatcgcaaatttgc

SEQ ID NO: 379772 - DNA, 30 bp, Artificial Sequence
  Synthetic oligonucleotide
agtcttaatggcaaggatgagtaaatttgc

SEQ ID NO: 379773 - DNA, 30 bp, Artificial Sequence
  Synthetic oligonucleotide
ctctattcagatctcggtaattaaatttgc

SEQ ID NO: 379774 - DNA, 30 bp, Artificial Sequence
  Synthetic oligonucleotide
catcgtagcgactcttatattttcctttgc

SEQ ID NO: 379775 - DNA, 30 bp, Artificial Sequence
  Synthetic oligonucleotide
attcaacgttgttggagaccccggctttgc

SEQ ID NO: 379776 - DNA, 30 bp, Artificial Sequence
  Synthetic oligonucleotide
caggtagattaaaatctgataagtctttgc

SEQ ID NO: 379777 - DNA, 30 bp, Artificial Sequence
  Synthetic oligonucleotide
cagagtaaacgtgtgagacaagttctttgc

SEQ ID NO: 379778 - DNA, 30 bp, Artificial Sequence
  Synthetic oligonucleotide
ccaagagcccgatgggacctgcaagtttgc

SEQ ID NO: 379779 - DNA, 30 bp, Artificial Sequence
  Synthetic oligonucleotide
gcccccctgttagtgattcagtgagtttgc

SEQ ID NO: 379780 - DNA, 30 bp, Artificial Sequence
  Synthetic oligonucleotide
atacccagcggctgtcaattattagtttgc

SEQ ID NO: 379781 - DNA, 30 bp, Artificial Sequence
  Synthetic oligonucleotide
ccttggatcagctttcatttgacggtttgc

SEQ ID NO: 379782 - DNA, 30 bp, Artificial Sequence
  Synthetic oligonucleotide
gaaaagaccatactataaaggtcggtttgc

SEQ ID NO: 379783 - DNA, 30 bp, Artificial Sequence
  Synthetic oligonucleotide
cttaatctcgggctactttcactggtttgc

SEQ ID NO: 379784 - DNA, 30 bp, Artificial Sequence
  Synthetic oligonucleotide
gcacatcaaagacgcgagagaaatgtttgc

SEQ ID NO: 379785 - DNA, 30 bp, Artificial Sequence
  Synthetic oligonucleotide
atcaggctccttctatcccgttatgtttgc

SEQ ID NO: 379786 - DNA, 30 bp, Artificial Sequence
  Synthetic oligonucleotide
agcattctaatctggagattcactgtttgc

SEQ ID NO: 379787 - DNA, 30 bp, Artificial Sequence
  Synthetic oligonucleotide
gataagactgcgatggatgcctcgttttgc

SEQ ID NO: 379788 - DNA, 30 bp, Artificial Sequence
  Synthetic oligonucleotide
cacctagttatttcacaggttgtgttttgc

SEQ ID NO: 379789 - DNA, 30 bp, Artificial Sequence
  Synthetic oligonucleotide
gccaaatatacaaagctattgaatttttgc

SEQ ID NO: 379790 - DNA, 30 bp, Artificial Sequence
  Synthetic oligonucleotide
ggtcaccagcgttcacttcgacctttttgc

SEQ ID NO: 379791 - DNA, 30 bp, Artificial Sequence
  Synthetic oligonucleotide
acactcctccgctaatcagactaaaaaatc

SEQ ID NO: 379792 - DNA, 30 bp, Artificial Sequence
  Synthetic oligonucleotide
ttaagactcgaattgattaagaacaaaatc

SEQ ID NO: 379793 - DNA, 30 bp, Artificial Sequence
  Synthetic oligonucleotide
gtaataattcgctcttccagtcggaaaatc

SEQ ID NO: 379794 - DNA, 30 bp, Artificial Sequence
  Synthetic oligonucleotide
tcactctgaggggcagcgtgtcggaaaatc

SEQ ID NO: 379795 - DNA, 30 bp, Artificial Sequence
  Synthetic oligonucleotide
gtaatgcggccagtgcgacactggaaaatc

SEQ ID NO: 379796 - DNA, 30 bp, Artificial Sequence
  Synthetic oligonucleotide
caccttccttgagtatcgggcgctaaaatc

SEQ ID NO: 379797 - DNA, 30 bp, Artificial Sequence
  Synthetic oligonucleotide
agcacgctgctctccccccgggctaaaatc

SEQ ID NO: 379798 - DNA, 30 bp, Artificial Sequence
  Synthetic oligonucleotide
cataatttctatacctgcacctcacaaatc

SEQ ID NO: 379799 - DNA, 30 bp, Artificial Sequence
  Synthetic oligonucleotide
ttattagtctcgtggctaaaggatcaaatc

SEQ ID NO: 379800 - DNA, 30 bp, Artificial Sequence
  Synthetic oligonucleotide
ataaaggaagacgcataacaaggtcaaatc

SEQ ID NO: 379801 - DNA, 30 bp, Artificial Sequence
  Synthetic oligonucleotide
gcttcatgaaactcgtaactggaagaaatc

SEQ ID NO: 379802 - DNA, 30 bp, Artificial Sequence
  Synthetic oligonucleotide
ggaaatcttctccgctgaacaccagaaatc

SEQ ID NO: 379803 - DNA, 30 bp, Artificial Sequence
  Synthetic oligonucleotide
ataatatggaacgctgtatggggagaaatc

SEQ ID NO: 379804 - DNA, 30 bp, Artificial Sequence
  Synthetic oligonucleotide
tgagtcaagtccactccaagggtagaaatc

SEQ ID NO: 379805 - DNA, 30 bp, Artificial Sequence
  Synthetic oligonucleotide
aattaccactatctttggacggaggaaatc

SEQ ID NO: 379806 - DNA, 30 bp, Artificial Sequence
  Synthetic oligonucleotide
tattatcagtaccattggcattaggaaatc

SEQ ID NO: 379807 - DNA, 30 bp, Artificial Sequence
  Synthetic oligonucleotide
ctggagtgcaacaacatcaactctgaaatc

SEQ ID NO: 379808 - DNA, 30 bp, Artificial Sequence
  Synthetic oligonucleotide
ggcaaatattgtccgtacacggaataaatc

SEQ ID NO: 379809 - DNA, 30 bp, Artificial Sequence
  Synthetic oligonucleotide
ggccacgatggtacgtgccagcgctaaatc

SEQ ID NO: 379810 - DNA, 30 bp, Artificial Sequence
  Synthetic oligonucleotide
aaaataggaaagatttcaatattctaaatc

SEQ ID NO: 379811 - DNA, 30 bp, Artificial Sequence
  Synthetic oligonucleotide
gtagtatgatccgacgcgaactcgtaaatc

SEQ ID NO: 379812 - DNA, 30 bp, Artificial Sequence
  Synthetic oligonucleotide
gtacagcttctgttgagttcagcttaaatc

SEQ ID NO: 379813 - DNA, 30 bp, Artificial Sequence
  Synthetic oligonucleotide
cttaataagtactaaagcggggaaacaatc

SEQ ID NO: 379814 - DNA, 30 bp, Artificial Sequence
  Synthetic oligonucleotide
ttaggttcggactctgtcaaaggaacaatc

SEQ ID NO: 379815 - DNA, 30 bp, Artificial Sequence
  Synthetic oligonucleotide
tcaccagcgttgcgaaagcgatggacaatc

SEQ ID NO: 379816 - DNA, 30 bp, Artificial Sequence
  Synthetic oligonucleotide
cgcttcatagttcgtcgcgatcaaccaatc

SEQ ID NO: 379817 - DNA, 30 bp, Artificial Sequence
  Synthetic oligonucleotide
gcttaccgtcaaaattgtcgtcaaccaatc

SEQ ID NO: 379818 - DNA, 30 bp, Artificial Sequence
  Synthetic oligonucleotide
gattacttaaagtaaggtgttgggccaatc

SEQ ID NO: 379819 - DNA, 30 bp, Artificial Sequence
  Synthetic oligonucleotide
agtttgcgtttggcgcgagtcctgccaatc

SEQ ID NO: 379820 - DNA, 30 bp, Artificial Sequence
  Synthetic oligonucleotide
ggtatgaggcacatcttggatcatccaatc

SEQ ID NO: 379821 - DNA, 30 bp, Artificial Sequence
  Synthetic oligonucleotide
acgtactaggttatcgcgtaagctccaatc

SEQ ID NO: 379822 - DNA, 30 bp, Artificial Sequence
  Synthetic oligonucleotide
ttatctggggtggttgctcagtaagcaatc

SEQ ID NO: 379823 - DNA, 30 bp, Artificial Sequence
  Synthetic oligonucleotide
gttcgccgttagggttcatgggaggcaatc

SEQ ID NO: 379824 - DNA, 30 bp, Artificial Sequence
  Synthetic oligonucleotide
aaaacgtgcggcaactccgcagtggcaatc

SEQ ID NO: 379825 - DNA, 30 bp, Artificial Sequence
  Synthetic oligonucleotide
agaaatcggcggccagcagcggatgcaatc

SEQ ID NO: 379826 - DNA, 30 bp, Artificial Sequence
  Synthetic oligonucleotide
catataggatgtttaagcagaactgcaatc

SEQ ID NO: 379827 - DNA, 30 bp, Artificial Sequence
  Synthetic oligonucleotide
ttcaacgcgggtttcagaaacagtgcaatc

SEQ ID NO: 379828 - DNA, 30 bp, Artificial Sequence
  Synthetic oligonucleotide
cagcttaaaaacagcctatagtttgcaatc

SEQ ID NO: 379829 - DNA, 30 bp, Artificial Sequence
  Synthetic oligonucleotide
gagtaatatgatctctgcggaaaatcaatc

SEQ ID NO: 379830 - DNA, 30 bp, Artificial Sequence
  Synthetic oligonucleotide
atataccgtagtccagctgtatcttcaatc

SEQ ID NO: 379831 - DNA, 30 bp, Artificial Sequence
  Synthetic oligonucleotide
actgtattaactcaacacaagggttcaatc

SEQ ID NO: 379832 - DNA, 30 bp, Artificial Sequence
  Synthetic oligonucleotide
cgataccggttcgtattctcagcaagaatc

SEQ ID NO: 379833 - DNA, 30 bp, Artificial Sequence
  Synthetic oligonucleotide
ggccgagcgctaggttgacggtgaagaatc

SEQ ID NO: 379834 - DNA, 30 bp, Artificial Sequence
  Synthetic oligonucleotide
acatgatgagtagtaccttgttacagaatc

SEQ ID NO: 379835 - DNA, 30 bp, Artificial Sequence
  Synthetic oligonucleotide
tgagatccggcctctcacccgtccagaatc

SEQ ID NO: 379836 - DNA, 30 bp, Artificial Sequence
  Synthetic oligonucleotide
accagcggcaacgaatttcaccgcagaatc

SEQ ID NO: 379837 - DNA, 30 bp, Artificial Sequence
  Synthetic oligonucleotide
gagggtcgataactcgcgaactcgagaatc

SEQ ID NO: 379838 - DNA, 30 bp, Artificial Sequence
  Synthetic oligonucleotide
acttggcctcccgaatttggagggagaatc

SEQ ID NO: 379839 - DNA, 30 bp, Artificial Sequence
  Synthetic oligonucleotide
tggctgggtattagggcatgtctgagaatc

SEQ ID NO: 379840 - DNA, 30 bp, Artificial Sequence
  Synthetic oligonucleotide
tatgaccggtcatggattcaaaatagaatc

SEQ ID NO: 379841 - DNA, 30 bp, Artificial Sequence
  Synthetic oligonucleotide
gtcgtctaagcttcgggttttgatagaatc

SEQ ID NO: 379842 - DNA, 30 bp, Artificial Sequence
  Synthetic oligonucleotide
gtgtaaggcggcttccaacagcctagaatc

SEQ ID NO: 379843 - DNA, 30 bp, Artificial Sequence
  Synthetic oligonucleotide
cttggtttggataatcccatacgtagaatc

SEQ ID NO: 379844 - DNA, 30 bp, Artificial Sequence
  Synthetic oligonucleotide
tgagaaactaaagtctgacgacttagaatc

SEQ ID NO: 379845 - DNA, 30 bp, Artificial Sequence
  Synthetic oligonucleotide
tttgcgtacggggggattcaccttagaatc

SEQ ID NO: 379846 - DNA, 30 bp, Artificial Sequence
  Synthetic oligonucleotide
gcagttcatcttgtggtacaaggccgaatc

SEQ ID NO: 379847 - DNA, 30 bp, Artificial Sequence
  Synthetic oligonucleotide
catttacattaagtaaagcggcggcgaatc

SEQ ID NO: 379848 - DNA, 30 bp, Artificial Sequence
  Synthetic oligonucleotide
gaagggattgcgcaacatgatcgtcgaatc

SEQ ID NO: 379849 - DNA, 30 bp, Artificial Sequence
  Synthetic oligonucleotide
ctagaaatcgcgccatgtagttcaggaatc

SEQ ID NO: 379850 - DNA, 30 bp, Artificial Sequence
  Synthetic oligonucleotide
aagaatcttggactggacctaggaggaatc

SEQ ID NO: 379851 - DNA, 30 bp, Artificial Sequence
  Synthetic oligonucleotide
cccatatcgagtctcgggggttgcggaatc

SEQ ID NO: 379852 - DNA, 30 bp, Artificial Sequence
  Synthetic oligonucleotide
acgattaattttggatgcgtacgtggaatc

SEQ ID NO: 379853 - DNA, 30 bp, Artificial Sequence
  Synthetic oligonucleotide
gtaagggacgccctgaaaacatttggaatc

SEQ ID NO: 379854 - DNA, 30 bp, Artificial Sequence
  Synthetic oligonucleotide
taccacagccttgattctaatgaatgaatc

SEQ ID NO: 379855 - DNA, 30 bp, Artificial Sequence
  Synthetic oligonucleotide
gccggtggatatgatagtaccgactgaatc

SEQ ID NO: 379856 - DNA, 30 bp, Artificial Sequence
  Synthetic oligonucleotide
ggtagccgtcgcggctcgataatctgaatc

SEQ ID NO: 379857 - DNA, 30 bp, Artificial Sequence
  Synthetic oligonucleotide
tgaattcgctttgggaaaccggtctgaatc

SEQ ID NO: 379858 - DNA, 30 bp, Artificial Sequence
  Synthetic oligonucleotide
tgcttgcaggggtgcttgggggtctgaatc

SEQ ID NO: 379859 - DNA, 30 bp, Artificial Sequence
  Synthetic oligonucleotide
cttaacgatttacgagactttaggtgaatc

SEQ ID NO: 379860 - DNA, 30 bp, Artificial Sequence
  Synthetic oligonucleotide
ggccacttgtctataatcgcgaattgaatc

SEQ ID NO: 379861 - DNA, 30 bp, Artificial Sequence
  Synthetic oligonucleotide
tgattgcaatggagtattcgcgtttgaatc

SEQ ID NO: 379862 - DNA, 27 bp, Artificial Sequence
  Synthetic oligonucleotide
cgtcttcaggggaggccataaataatc

SEQ ID NO: 379863 - DNA, 30 bp, Artificial Sequence
  Synthetic oligonucleotide
aaacttgttgtgtgaagcgagcgcataatc

SEQ ID NO: 379864 - DNA, 30 bp, Artificial Sequence
  Synthetic oligonucleotide
agaggatgggtatcctgaccgctcataatc

SEQ ID NO: 379865 - DNA, 30 bp, Artificial Sequence
  Synthetic oligonucleotide
cgagttcgtggctaggtctacttcataatc

SEQ ID NO: 379866 - DNA, 30 bp, Artificial Sequence
  Synthetic oligonucleotide
tgaacgtttcgtaatgccgaggagataatc

SEQ ID NO: 379867 - DNA, 30 bp, Artificial Sequence
  Synthetic oligonucleotide
gtcagagttgataaacggtaccggataatc

SEQ ID NO: 379868 - DNA, 30 bp, Artificial Sequence
  Synthetic oligonucleotide
gataatgggaagatatgcggtgatataatc

SEQ ID NO: 379869 - DNA, 30 bp, Artificial Sequence
  Synthetic oligonucleotide
tctgacgagctcgcccaattgtatataatc

SEQ ID NO: 379870 - DNA, 30 bp, Artificial Sequence
  Synthetic oligonucleotide
cacgaatgtttgaaattctatagtataatc

SEQ ID NO: 379871 - DNA, 30 bp, Artificial Sequence
  Synthetic oligonucleotide
tttggaacgaaaaagtccttgtgtataatc

SEQ ID NO: 379872 - DNA, 30 bp, Artificial Sequence
  Synthetic oligonucleotide
tcctggggtgctaggcgttgtgaactaatc

SEQ ID NO: 379873 - DNA, 30 bp, Artificial Sequence
  Synthetic oligonucleotide
ggctgtgagttgttagtggcttaactaatc

SEQ ID NO: 379874 - DNA, 30 bp, Artificial Sequence
  Synthetic oligonucleotide
ttgtaattgccgaacttgaacggactaatc

SEQ ID NO: 379875 - DNA, 30 bp, Artificial Sequence
  Synthetic oligonucleotide
gcaagatcatactaagcgctgtgactaatc

SEQ ID NO: 379876 - DNA, 30 bp, Artificial Sequence
  Synthetic oligonucleotide
cttaagttgagtccagcattatagctaatc

SEQ ID NO: 379877 - DNA, 30 bp, Artificial Sequence
  Synthetic oligonucleotide
tgattttggccattcaactaggggctaatc

SEQ ID NO: 379878 - DNA, 30 bp, Artificial Sequence
  Synthetic oligonucleotide
cgtttatttaagcggaagactaatctaatc

SEQ ID NO: 379879 - DNA, 30 bp, Artificial Sequence
  Synthetic oligonucleotide
tatagactagtgtatacaacggatctaatc

SEQ ID NO: 379880 - DNA, 30 bp, Artificial Sequence
  Synthetic oligonucleotide
ttcaacgtaacaaattaaagaggtctaatc

SEQ ID NO: 379881 - DNA, 30 bp, Artificial Sequence
  Synthetic oligonucleotide
aggagagtcccatgtaacttatacgtaatc

SEQ ID NO: 379882 - DNA, 30 bp, Artificial Sequence
  Synthetic oligonucleotide
acacggcagagcgtgttatgctaggtaatc

SEQ ID NO: 379883 - DNA, 30 bp, Artificial Sequence
  Synthetic oligonucleotide
actttgggggatcgtgagggcagggtaatc

SEQ ID NO: 379884 - DNA, 30 bp, Artificial Sequence
  Synthetic oligonucleotide
ggtatcagaggtacttcgtactgggtaatc

SEQ ID NO: 379885 - DNA, 30 bp, Artificial Sequence
  Synthetic oligonucleotide
gcagaagtgaatcagcttacggctgtaatc

SEQ ID NO: 379886 - DNA, 30 bp, Artificial Sequence
  Synthetic oligonucleotide
gacaagggcctatttcagtctcgtgtaatc

SEQ ID NO: 379887 - DNA, 30 bp, Artificial Sequence
  Synthetic oligonucleotide
aatccggtagctttcggtacaggtgtaatc

SEQ ID NO: 379888 - DNA, 27 bp, Artificial Sequence
  Synthetic oligonucleotide
ggaaagcagccatatctaaaattaatc

SEQ ID NO: 379889 - DNA, 30 bp, Artificial Sequence
  Synthetic oligonucleotide
actgggttacgcgtctgccgcccattaatc

SEQ ID NO: 379890 - DNA, 29 bp, Artificial Sequence
  Synthetic oligonucleotide
taaaagagttactaacagggatcttaatc

SEQ ID NO: 379891 - DNA, 30 bp, Artificial Sequence
  Synthetic oligonucleotide
ggacatctcttgatagcgaaggggttaatc

SEQ ID NO: 379892 - DNA, 30 bp, Artificial Sequence
  Synthetic oligonucleotide
gattggaaattctgcctgcgcgatttaatc

SEQ ID NO: 379893 - DNA, 30 bp, Artificial Sequence
  Synthetic oligonucleotide
gtaaagtggatatacaatcatactttaatc

SEQ ID NO: 379894 - DNA, 30 bp, Artificial Sequence
  Synthetic oligonucleotide
cgtggcaatgcgggtgagcccacgaacatc

SEQ ID NO: 379895 - DNA, 30 bp, Artificial Sequence
  Synthetic oligonucleotide
cccatgtacgaattcggttcccggaacatc

SEQ ID NO: 379896 - DNA, 30 bp, Artificial Sequence
  Synthetic oligonucleotide
tgtggtatttaaaataggtctctgaacatc

SEQ ID NO: 379897 - DNA, 30 bp, Artificial Sequence
  Synthetic oligonucleotide
gtgcgttaccgccatcaccggcttaacatc

SEQ ID NO: 379898 - DNA, 30 bp, Artificial Sequence
  Synthetic oligonucleotide
cgttggggttcctgcagcgggagacacatc

SEQ ID NO: 379899 - DNA, 30 bp, Artificial Sequence
  Synthetic oligonucleotide
cttcgacagcgtggttttgagaaccacatc

SEQ ID NO: 379900 - DNA, 30 bp, Artificial Sequence
  Synthetic oligonucleotide
gctgctaattctttacaatcgcaccacatc

SEQ ID NO: 379901 - DNA, 30 bp, Artificial Sequence
  Synthetic oligonucleotide
ggacctctgtggcagtggtaggcccacatc

SEQ ID NO: 379902 - DNA, 30 bp, Artificial Sequence
  Synthetic oligonucleotide
cggtccagacttttgctcatacgccacatc

SEQ ID NO: 379903 - DNA, 30 bp, Artificial Sequence
  Synthetic oligonucleotide
tcatttggcgggtttgactaatagcacatc

SEQ ID NO: 379904 - DNA, 30 bp, Artificial Sequence
  Synthetic oligonucleotide
gtgaatgagctggtcgaaaaagctcacatc

SEQ ID NO: 379905 - DNA, 30 bp, Artificial Sequence
  Synthetic oligonucleotide
tcctccctaaatcttcaaccatctcacatc

SEQ ID NO: 379906 - DNA, 30 bp, Artificial Sequence
  Synthetic oligonucleotide
ttcaaaccttgaagaagccggtctcacatc

SEQ ID NO: 379907 - DNA, 30 bp, Artificial Sequence
  Synthetic oligonucleotide
gaaccgtactcttccagagtttgtcacatc

SEQ ID NO: 379908 - DNA, 30 bp, Artificial Sequence
  Synthetic oligonucleotide
ggtctccaagtcttcctgttgcgagacatc

SEQ ID NO: 379909 - DNA, 30 bp, Artificial Sequence
  Synthetic oligonucleotide
tctgataggcaggccggtcgagacgacatc

SEQ ID NO: 379910 - DNA, 30 bp, Artificial Sequence
  Synthetic oligonucleotide
ttacaggtccaaggacctagcatatacatc

SEQ ID NO: 379911 - DNA, 30 bp, Artificial Sequence
  Synthetic oligonucleotide
cggctgaagctggttagacctaagtacatc

SEQ ID NO: 379912 - DNA, 30 bp, Artificial Sequence
  Synthetic oligonucleotide
tatctcgacagccatatgactacgtacatc

SEQ ID NO: 379913 - DNA, 30 bp, Artificial Sequence
  Synthetic oligonucleotide
ttataaatggagttcactcatctgtacatc

SEQ ID NO: 379914 - DNA, 30 bp, Artificial Sequence
  Synthetic oligonucleotide
cggattattaatcccacgtggccttacatc

SEQ ID NO: 379915 - DNA, 30 bp, Artificial Sequence
  Synthetic oligonucleotide
gatgccgatcctagcggctcacgaaccatc

SEQ ID NO: 379916 - DNA, 30 bp, Artificial Sequence
  Synthetic oligonucleotide
tttgggtcgcctagcccaatcgagaccatc

SEQ ID NO: 379917 - DNA, 30 bp, Artificial Sequence
  Synthetic oligonucleotide
ccaggaaggcgttacggagttttgaccatc

SEQ ID NO: 379918 - DNA, 30 bp, Artificial Sequence
  Synthetic oligonucleotide
gttaggtgcaataggagatgttgtaccatc

SEQ ID NO: 379919 - DNA, 30 bp, Artificial Sequence
  Synthetic oligonucleotide
agacgcaatcaccctaacttgtaacccatc

SEQ ID NO: 379920 - DNA, 30 bp, Artificial Sequence
  Synthetic oligonucleotide
gaaaaggagctagtgtttggggcccccatc

SEQ ID NO: 379921 - DNA, 30 bp, Artificial Sequence
  Synthetic oligonucleotide
actatgtgcaagtgtttctcgccgcccatc

SEQ ID NO: 379922 - DNA, 30 bp, Artificial Sequence
  Synthetic oligonucleotide
agggcgtcataggcgggtcagattcccatc

SEQ ID NO: 379923 - DNA, 30 bp, Artificial Sequence
  Synthetic oligonucleotide
aatggcctgatatcactacatattcccatc

SEQ ID NO: 379924 - DNA, 30 bp, Artificial Sequence
  Synthetic oligonucleotide
tccaaaagccccggaatagatcttcccatc

SEQ ID NO: 379925 - DNA, 30 bp, Artificial Sequence
  Synthetic oligonucleotide
cacgatcaatagtgcgttcttatcgccatc

SEQ ID NO: 379926 - DNA, 30 bp, Artificial Sequence
  Synthetic oligonucleotide
gaggctcacactgcagatccggaggccatc

SEQ ID NO: 379927 - DNA, 30 bp, Artificial Sequence
  Synthetic oligonucleotide
tcgtaatggttccacagcagcacggccatc

SEQ ID NO: 379928 - DNA, 30 bp, Artificial Sequence
  Synthetic oligonucleotide
aagaaccctcacgtttcactaagtgccatc

SEQ ID NO: 379929 - DNA, 30 bp, Artificial Sequence
  Synthetic oligonucleotide
agagtatgatccagtaattcgattgccatc

SEQ ID NO: 379930 - DNA, 30 bp, Artificial Sequence
  Synthetic oligonucleotide
catcattgtacgtgcttaatttaatccatc

SEQ ID NO: 379931 - DNA, 30 bp, Artificial Sequence
  Synthetic oligonucleotide
cagtctttcgtaatacagtaaacatccatc

SEQ ID NO: 379932 - DNA, 30 bp, Artificial Sequence
  Synthetic oligonucleotide
cattatgtttacaaatggggtccctccatc

SEQ ID NO: 379933 - DNA, 30 bp, Artificial Sequence
  Synthetic oligonucleotide
catgtgtgggggtgcagcaatagctccatc

SEQ ID NO: 379934 - DNA, 30 bp, Artificial Sequence
  Synthetic oligonucleotide
tacagttgtttatactgagaattctccatc

SEQ ID NO: 379935 - DNA, 30 bp, Artificial Sequence
  Synthetic oligonucleotide
gaccatcggggacccgccgactcgtccatc

SEQ ID NO: 379936 - DNA, 30 bp, Artificial Sequence
  Synthetic oligonucleotide
attcaaattctgaacaataatttgtccatc

SEQ ID NO: 379937 - DNA, 30 bp, Artificial Sequence
  Synthetic oligonucleotide
aacatccatttaatgaccaatagttccatc

SEQ ID NO: 379938 - DNA, 30 bp, Artificial Sequence
  Synthetic oligonucleotide
gaagcactcttccagatgcatcaaagcatc

SEQ ID NO: 379939 - DNA, 30 bp, Artificial Sequence
  Synthetic oligonucleotide
acgtggcgaaaggtcgtccggggcagcatc

SEQ ID NO: 379940 - DNA, 30 bp, Artificial Sequence
  Synthetic oligonucleotide
gccgaagtagggggacggggaaagagcatc

SEQ ID NO: 379941 - DNA, 30 bp, Artificial Sequence
  Synthetic oligonucleotide
cttctacacctaccgccataattgagcatc

SEQ ID NO: 379942 - DNA, 30 bp, Artificial Sequence
  Synthetic oligonucleotide
gtggatcgttattgcgccttacatagcatc

SEQ ID NO: 379943 - DNA, 30 bp, Artificial Sequence
  Synthetic oligonucleotide
gcaacacctccttaaaattcttatagcatc

SEQ ID NO: 379944 - DNA, 30 bp, Artificial Sequence
  Synthetic oligonucleotide
atcgcgggtgatgacaacttgactagcatc

SEQ ID NO: 379945 - DNA, 30 bp, Artificial Sequence
  Synthetic oligonucleotide
acaggatgtaatatgctaaccatacgcatc

SEQ ID NO: 379946 - DNA, 30 bp, Artificial Sequence
  Synthetic oligonucleotide
aatgaacgatagatcgacttgtcaggcatc

SEQ ID NO: 379947 - DNA, 30 bp, Artificial Sequence
  Synthetic oligonucleotide
gaaaaaagctattgcaaacattacggcatc

SEQ ID NO: 379948 - DNA, 30 bp, Artificial Sequence
  Synthetic oligonucleotide
gagttatctgccccttctgatgccggcatc

SEQ ID NO: 379949 - DNA, 30 bp, Artificial Sequence
  Synthetic oligonucleotide
ataactatcaaaagcgcttttgccggcatc

SEQ ID NO: 379950 - DNA, 30 bp, Artificial Sequence
  Synthetic oligonucleotide
tcgcaccaccatggtagtcgtttcggcatc

SEQ ID NO: 379951 - DNA, 30 bp, Artificial Sequence
  Synthetic oligonucleotide
cttccatggcctgcctcagtggggggcatc

SEQ ID NO: 379952 - DNA, 30 bp, Artificial Sequence
  Synthetic oligonucleotide
ttaggccaacagtgcaaccggagctgcatc

SEQ ID NO: 379953 - DNA, 30 bp, Artificial Sequence
  Synthetic oligonucleotide
aaaaaccagccgagtcaacctcgctgcatc

SEQ ID NO: 379954 - DNA, 30 bp, Artificial Sequence
  Synthetic oligonucleotide
ggatgcagaaaactcaagcgccggtgcatc

SEQ ID NO: 379955 - DNA, 30 bp, Artificial Sequence
  Synthetic oligonucleotide
gcgtcatagtccgtagttcattggtgcatc

SEQ ID NO: 379956 - DNA, 30 bp, Artificial Sequence
  Synthetic oligonucleotide
actccgataagggagagctgcacttgcatc

SEQ ID NO: 379957 - DNA, 30 bp, Artificial Sequence
  Synthetic oligonucleotide
tgatgttgttgatctgcgtcacaaatcatc

SEQ ID NO: 379958 - DNA, 30 bp, Artificial Sequence
  Synthetic oligonucleotide
agactcagactgccatggtaggcaatcatc

SEQ ID NO: 379959 - DNA, 30 bp, Artificial Sequence
  Synthetic oligonucleotide
acctacttgcaatgtgagtctgcaatcatc

SEQ ID NO: 379960 - DNA, 30 bp, Artificial Sequence
  Synthetic oligonucleotide
gaggaccttatgggtttctggctaatcatc

SEQ ID NO: 379961 - DNA, 30 bp, Artificial Sequence
  Synthetic oligonucleotide
tcctatattgagcactcaggaagcatcatc

SEQ ID NO: 379962 - DNA, 30 bp, Artificial Sequence
  Synthetic oligonucleotide
aagttatccgttattttggggagcatcatc

SEQ ID NO: 379963 - DNA, 30 bp, Artificial Sequence
  Synthetic oligonucleotide
tagggatcctgccactgagagaggatcatc

SEQ ID NO: 379964 - DNA, 30 bp, Artificial Sequence
  Synthetic oligonucleotide
aatcgaggttattccggttttgctatcatc

SEQ ID NO: 379965 - DNA, 30 bp, Artificial Sequence
  Synthetic oligonucleotide
cagatttaaatcaagaacggagttatcatc

SEQ ID NO: 379966 - DNA, 30 bp, Artificial Sequence
  Synthetic oligonucleotide
cacgttgtggcagtgtgcagagagctcatc

SEQ ID NO: 379967 - DNA, 30 bp, Artificial Sequence
  Synthetic oligonucleotide
gcagttcgcgtataatggcttgagctcatc

SEQ ID NO: 379968 - DNA, 30 bp, Artificial Sequence
  Synthetic oligonucleotide
aaccatactcaaacactgagacggctcatc

SEQ ID NO: 379969 - DNA, 30 bp, Artificial Sequence
  Synthetic oligonucleotide
caggaggaccgctcgtaaaagcggctcatc

SEQ ID NO: 379970 - DNA, 30 bp, Artificial Sequence
  Synthetic oligonucleotide
tgcgatttttacactgtcattcggctcatc

SEQ ID NO: 379971 - DNA, 30 bp, Artificial Sequence
  Synthetic oligonucleotide
ggtagttcaaacgcgaagggatggctcatc

SEQ ID NO: 379972 - DNA, 30 bp, Artificial Sequence
  Synthetic oligonucleotide
tactgaaatgtccgatatttacatctcatc

SEQ ID NO: 379973 - DNA, 30 bp, Artificial Sequence
  Synthetic oligonucleotide
agcaatagctaccgggtcaacattctcatc

SEQ ID NO: 379974 - DNA, 30 bp, Artificial Sequence
  Synthetic oligonucleotide
gattacctggctcaagagcctattctcatc

SEQ ID NO: 379975 - DNA, 30 bp, Artificial Sequence
  Synthetic oligonucleotide
ccacgctctctgtatgtagtttatgtcatc

SEQ ID NO: 379976 - DNA, 30 bp, Artificial Sequence
  Synthetic oligonucleotide
gccaactatgcgataactccgcctgtcatc

SEQ ID NO: 379977 - DNA, 30 bp, Artificial Sequence
  Synthetic oligonucleotide
atgaaaactatgcgttccaagacattcatc

SEQ ID NO: 379978 - DNA, 30 bp, Artificial Sequence
  Synthetic oligonucleotide
acggtagctactgattatatctcattcatc

SEQ ID NO: 379979 - DNA, 30 bp, Artificial Sequence
  Synthetic oligonucleotide
atgaccgcttgacggatggattgattcatc

SEQ ID NO: 379980 - DNA, 30 bp, Artificial Sequence
  Synthetic oligonucleotide
cattgcgccgcactggcgcctaccttcatc

SEQ ID NO: 379981 - DNA, 30 bp, Artificial Sequence
  Synthetic oligonucleotide
agtttatgccggaatggcatattcttcatc

SEQ ID NO: 379982 - DNA, 30 bp, Artificial Sequence
  Synthetic oligonucleotide
gcaatcaagatgattaagaggaggttcatc

SEQ ID NO: 379983 - DNA, 30 bp, Artificial Sequence
  Synthetic oligonucleotide
gccaaaacttgaaccaaatcggatttcatc

SEQ ID NO: 379984 - DNA, 30 bp, Artificial Sequence
  Synthetic oligonucleotide
tgtggttggcttccctctacgtctttcatc

SEQ ID NO: 379985 - DNA, 30 bp, Artificial Sequence
  Synthetic oligonucleotide
gttcgtggatacgaatatcatcgtttcatc

SEQ ID NO: 379986 - DNA, 30 bp, Artificial Sequence
  Synthetic oligonucleotide
agtggcgtgttgtaggctatataaaagatc

SEQ ID NO: 379987 - DNA, 30 bp, Artificial Sequence
  Synthetic oligonucleotide
gtccataggcggctccttcggagaaagatc

SEQ ID NO: 379988 - DNA, 30 bp, Artificial Sequence
  Synthetic oligonucleotide
attagattcgcataatctgcgggaaagatc

SEQ ID NO: 379989 - DNA, 30 bp, Artificial Sequence
  Synthetic oligonucleotide
gcggatcgccgtcgcaaagacagcaagatc

SEQ ID NO: 379990 - DNA, 30 bp, Artificial Sequence
  Synthetic oligonucleotide
caagtcccagagggcgctccacggaagatc

SEQ ID NO: 379991 - DNA, 30 bp, Artificial Sequence
  Synthetic oligonucleotide
ttttcgaaacttccgatcagatggaagatc

SEQ ID NO: 379992 - DNA, 30 bp, Artificial Sequence
  Synthetic oligonucleotide
ttaggcccaataccagtataccataagatc

SEQ ID NO: 379993 - DNA, 30 bp, Artificial Sequence
  Synthetic oligonucleotide
aagactacgtttggacattttagtaagatc

SEQ ID NO: 379994 - DNA, 30 bp, Artificial Sequence
  Synthetic oligonucleotide
aatggcattctgtgtgtggaatttaagatc

SEQ ID NO: 379995 - DNA, 30 bp, Artificial Sequence
  Synthetic oligonucleotide
ctgcctaagttgtcggttctgggacagatc

SEQ ID NO: 379996 - DNA, 30 bp, Artificial Sequence
  Synthetic oligonucleotide
ctggattacttataatcagttggacagatc

SEQ ID NO: 379997 - DNA, 30 bp, Artificial Sequence
  Synthetic oligonucleotide
cattgttagggggacatataaattcagatc

SEQ ID NO: 379998 - DNA, 30 bp, Artificial Sequence
  Synthetic oligonucleotide
gtcaggtccaaggccgcagtttaagagatc

SEQ ID NO: 379999 - DNA, 30 bp, Artificial Sequence
  Synthetic oligonucleotide
ggcagtccatactattgtcctgcagagatc

SEQ ID NO: 380000 - DNA, 30 bp, Artificial Sequence
  Synthetic oligonucleotide
atgcggttttggtcatcggttaacgagatc

SEQ ID NO: 380001 - DNA, 30 bp, Artificial Sequence
  Synthetic oligonucleotide
tcggagcttccaaacacagtggccgagatc

SEQ ID NO: 380002 - DNA, 30 bp, Artificial Sequence
  Synthetic oligonucleotide
gagttgcactcgaatatctgaggggagatc

SEQ ID NO: 380003 - DNA, 30 bp, Artificial Sequence
  Synthetic oligonucleotide
aagtgtccatgagtctttgtaggtgagatc

SEQ ID NO: 380004 - DNA, 30 bp, Artificial Sequence
  Synthetic oligonucleotide
gcttgtattgtataacaaagcattgagatc

SEQ ID NO: 380005 - DNA, 30 bp, Artificial Sequence
  Synthetic oligonucleotide
aacctatggttggtagggttagaatagatc

SEQ ID NO: 380006 - DNA, 30 bp, Artificial Sequence
  Synthetic oligonucleotide
tgtttacgagattccgtccggagatagatc

SEQ ID NO: 380007 - DNA, 30 bp, Artificial Sequence
  Synthetic oligonucleotide
actcatacatccacccttgcggtatagatc

SEQ ID NO: 380008 - DNA, 30 bp, Artificial Sequence
  Synthetic oligonucleotide
aaaggatatcacattcacttactctagatc

SEQ ID NO: 380009 - DNA, 30 bp, Artificial Sequence
  Synthetic oligonucleotide
gttcgccggacaagccggtcaaattagatc

SEQ ID NO: 380010 - DNA, 30 bp, Artificial Sequence
  Synthetic oligonucleotide
aatcggattcggtaattttttaattagatc

SEQ ID NO: 380011 - DNA, 30 bp, Artificial Sequence
  Synthetic oligonucleotide
agtcgggtatcgccgttcttgtgttagatc

SEQ ID NO: 380012 - DNA, 30 bp, Artificial Sequence
  Synthetic oligonucleotide
ttgatagaatctttcctcccaggcacgatc

SEQ ID NO: 380013 - DNA, 30 bp, Artificial Sequence
  Synthetic oligonucleotide
tagtctagagttagccacaacaggacgatc

SEQ ID NO: 380014 - DNA, 30 bp, Artificial Sequence
  Synthetic oligonucleotide
agtctggactccgccgcggcatggacgatc

SEQ ID NO: 380015 - DNA, 30 bp, Artificial Sequence
  Synthetic oligonucleotide
tagattgggatggtcgtcgcctggacgatc

SEQ ID NO: 380016 - DNA, 30 bp, Artificial Sequence
  Synthetic oligonucleotide
aggataatgctcgcaggatccctgacgatc

SEQ ID NO: 380017 - DNA, 30 bp, Artificial Sequence
  Synthetic oligonucleotide
tgggcgattctggtctaatgcgatacgatc

SEQ ID NO: 380018 - DNA, 30 bp, Artificial Sequence
  Synthetic oligonucleotide
taacttcagacatatgtcgggagtacgatc

SEQ ID NO: 380019 - DNA, 30 bp, Artificial Sequence
  Synthetic oligonucleotide
gccgtaggtgacaatatccgctgtacgatc

SEQ ID NO: 380020 - DNA, 30 bp, Artificial Sequence
  Synthetic oligonucleotide
aagtatatggatattgaaccatcaccgatc

SEQ ID NO: 380021 - DNA, 30 bp, Artificial Sequence
  Synthetic oligonucleotide
ttagggacacttggaggcataataccgatc

SEQ ID NO: 380022 - DNA, 30 bp, Artificial Sequence
  Synthetic oligonucleotide
gagtatatgcacgcatataggtatccgatc

SEQ ID NO: 380023 - DNA, 30 bp, Artificial Sequence
  Synthetic oligonucleotide
ttgtaaattatgtttgctaactaagcgatc

SEQ ID NO: 380024 - DNA, 30 bp, Artificial Sequence
  Synthetic oligonucleotide
tatacgttttcgagtcgaggcgtcgcgatc

SEQ ID NO: 380025 - DNA, 30 bp, Artificial Sequence
  Synthetic oligonucleotide
gggggtaccggtacacttttaagggcgatc

SEQ ID NO: 380026 - DNA, 30 bp, Artificial Sequence
  Synthetic oligonucleotide
tgatccacatatttccgctacgttgcgatc

SEQ ID NO: 380027 - DNA, 30 bp, Artificial Sequence
  Synthetic oligonucleotide
cctcgtagatcggaggttcctcaatcgatc

SEQ ID NO: 380028 - DNA, 30 bp, Artificial Sequence
  Synthetic oligonucleotide
cagttataaatcacacctgcaagatcgatc

SEQ ID NO: 380029 - DNA, 30 bp, Artificial Sequence
  Synthetic oligonucleotide
gcattctgggactcgagtacacgctcgatc

SEQ ID NO: 380030 - DNA, 30 bp, Artificial Sequence
  Synthetic oligonucleotide
gaatggagcatgccgaggaattcgtcgatc

SEQ ID NO: 380031 - DNA, 30 bp, Artificial Sequence
  Synthetic oligonucleotide
attttgaccgattgcttagaggattcgatc

SEQ ID NO: 380032 - DNA, 30 bp, Artificial Sequence
  Synthetic oligonucleotide
cacggtagtcatttaatcgatccttcgatc

SEQ ID NO: 380033 - DNA, 30 bp, Artificial Sequence
  Synthetic oligonucleotide
tcagtgctttctgtatcagggtgaaggatc

SEQ ID NO: 380034 - DNA, 30 bp, Artificial Sequence
  Synthetic oligonucleotide
agactaattcattcgctgagtaacaggatc

SEQ ID NO: 380035 - DNA, 30 bp, Artificial Sequence
  Synthetic oligonucleotide
gggtccgctttactaagcgaccacaggatc

SEQ ID NO: 380036 - DNA, 30 bp, Artificial Sequence
  Synthetic oligonucleotide
ctaactcgtattatggcaggtacgaggatc

SEQ ID NO: 380037 - DNA, 30 bp, Artificial Sequence
  Synthetic oligonucleotide
gccgtgcaagaactgccgtagatgaggatc

SEQ ID NO: 380038 - DNA, 30 bp, Artificial Sequence
  Synthetic oligonucleotide
accagatgacgctggttggaatctaggatc

SEQ ID NO: 380039 - DNA, 30 bp, Artificial Sequence
  Synthetic oligonucleotide
cgcagcctagtatacttccatgaccggatc

SEQ ID NO: 380040 - DNA, 30 bp, Artificial Sequence
  Synthetic oligonucleotide
cgaggtggctattgctacaagctccggatc

SEQ ID NO: 380041 - DNA, 30 bp, Artificial Sequence
  Synthetic oligonucleotide
acttaattgtacttggcgataccgcggatc

SEQ ID NO: 380042 - DNA, 30 bp, Artificial Sequence
  Synthetic oligonucleotide
gagtctaacttcggcccagctgggcggatc

SEQ ID NO: 380043 - DNA, 30 bp, Artificial Sequence
  Synthetic oligonucleotide
tctcgaggacgatcgataaacctgcggatc

SEQ ID NO: 380044 - DNA, 30 bp, Artificial Sequence
  Synthetic oligonucleotide
ttgacttcgagtagagaaaattatcggatc

SEQ ID NO: 380045 - DNA, 30 bp, Artificial Sequence
  Synthetic oligonucleotide
actaatattattcgaatctgaagtcggatc

SEQ ID NO: 380046 - DNA, 30 bp, Artificial Sequence
  Synthetic oligonucleotide
gctgaagtgcacttgccccctattcggatc

SEQ ID NO: 380047 - DNA, 30 bp, Artificial Sequence
  Synthetic oligonucleotide
aaccaggctagggggtgtaaacaagggatc

SEQ ID NO: 380048 - DNA, 30 bp, Artificial Sequence
  Synthetic oligonucleotide
tccctgtgcagggagatgatgtaagggatc

SEQ ID NO: 380049 - DNA, 30 bp, Artificial Sequence
  Synthetic oligonucleotide
tatccgcacgttgtcttttctgtagggatc

SEQ ID NO: 380050 - DNA, 30 bp, Artificial Sequence
  Synthetic oligonucleotide
tgtatgaggatctccgggctgccggggatc

SEQ ID NO: 380051 - DNA, 30 bp, Artificial Sequence
  Synthetic oligonucleotide
ggctgcatcaccctagttttcttggggatc

SEQ ID NO: 380052 - DNA, 30 bp, Artificial Sequence
  Synthetic oligonucleotide
gggtttgggcctcatgcaatccatgggatc

SEQ ID NO: 380053 - DNA, 30 bp, Artificial Sequence
  Synthetic oligonucleotide
gagctaatttgaagggtaaggactgggatc

SEQ ID NO: 380054 - DNA, 30 bp, Artificial Sequence
  Synthetic oligonucleotide
aaccccagtcccggggaactcggtgggatc

SEQ ID NO: 380055 - DNA, 30 bp, Artificial Sequence
  Synthetic oligonucleotide
attgtattaggaacaaatccggtatggatc

SEQ ID NO: 380056 - DNA, 30 bp, Artificial Sequence
  Synthetic oligonucleotide
acagagccggtgtcgttttggcactggatc

SEQ ID NO: 380057 - DNA, 30 bp, Artificial Sequence
  Synthetic oligonucleotide
tccccctaacgacgggattaatcctggatc

SEQ ID NO: 380058 - DNA, 30 bp, Artificial Sequence
  Synthetic oligonucleotide
aatgagataaaattcttaaagcagtggatc

SEQ ID NO: 380059 - DNA, 30 bp, Artificial Sequence
  Synthetic oligonucleotide
gggtgcgggtagtggctctgtggttggatc

SEQ ID NO: 380060 - DNA, 30 bp, Artificial Sequence
  Synthetic oligonucleotide
cagacacgtggattcatgtgtacaatgatc

SEQ ID NO: 380061 - DNA, 30 bp, Artificial Sequence
  Synthetic oligonucleotide
tttcatataatcagaagtctgccaatgatc

SEQ ID NO: 380062 - DNA, 30 bp, Artificial Sequence
  Synthetic oligonucleotide
ggttagcatgacttatggtgtaccatgatc

SEQ ID NO: 380063 - DNA, 30 bp, Artificial Sequence
  Synthetic oligonucleotide
gcttatggggaagcgggcgcatccatgatc

SEQ ID NO: 380064 - DNA, 30 bp, Artificial Sequence
  Synthetic oligonucleotide
aggtttaccaaaaacatattttccatgatc

SEQ ID NO: 380065 - DNA, 30 bp, Artificial Sequence
  Synthetic oligonucleotide
ccataacccaacgacagtaatgcactgatc

SEQ ID NO: 380066 - DNA, 30 bp, Artificial Sequence
  Synthetic oligonucleotide
agccttgattgagtgtattaacacctgatc

SEQ ID NO: 380067 - DNA, 30 bp, Artificial Sequence
  Synthetic oligonucleotide
gcttcaaaaacgtcttcgcaggacctgatc

SEQ ID NO: 380068 - DNA, 30 bp, Artificial Sequence
  Synthetic oligonucleotide
tgaccgacaaatcagcatggcttcctgatc

SEQ ID NO: 380069 - DNA, 30 bp, Artificial Sequence
  Synthetic oligonucleotide
caccgccgattaccccgggcttagctgatc

SEQ ID NO: 380070 - DNA, 30 bp, Artificial Sequence
  Synthetic oligonucleotide
gaatatccgttttgctcataggaagtgatc

SEQ ID NO: 380071 - DNA, 30 bp, Artificial Sequence
  Synthetic oligonucleotide
agatgaaggagtagtcagttggtcgtgatc

SEQ ID NO: 380072 - DNA, 30 bp, Artificial Sequence
  Synthetic oligonucleotide
ggtaaagtaagggcctatcggttggtgatc

SEQ ID NO: 380073 - DNA, 30 bp, Artificial Sequence
  Synthetic oligonucleotide
taagcaacatgcgtcggagctgctgtgatc

SEQ ID NO: 380074 - DNA, 30 bp, Artificial Sequence
  Synthetic oligonucleotide
tgactggatggtaaaagtctgaaattgatc

SEQ ID NO: 380075 - DNA, 30 bp, Artificial Sequence
  Synthetic oligonucleotide
caccctgcgggcatagcgaacggcttgatc

SEQ ID NO: 380076 - DNA, 30 bp, Artificial Sequence
  Synthetic oligonucleotide
actgcttttgcaaaatgcgcggagttgatc

SEQ ID NO: 380077 - DNA, 30 bp, Artificial Sequence
  Synthetic oligonucleotide
atgcgtggagggacaataatatagttgatc

SEQ ID NO: 380078 - DNA, 30 bp, Artificial Sequence
  Synthetic oligonucleotide
tcagctgtattcaacaaatgcacgttgatc

SEQ ID NO: 380079 - DNA, 30 bp, Artificial Sequence
  Synthetic oligonucleotide
gcggcctctatttgtggaacccggttgatc

SEQ ID NO: 380080 - DNA, 30 bp, Artificial Sequence
  Synthetic oligonucleotide
atgtgtaaggctgcggcctctgggttgatc

SEQ ID NO: 380081 - DNA, 30 bp, Artificial Sequence
  Synthetic oligonucleotide
tgacgggatgtcggccgctacattttgatc

SEQ ID NO: 380082 - DNA, 30 bp, Artificial Sequence
  Synthetic oligonucleotide
tacggttcatcagactcatctaggaatatc

SEQ ID NO: 380083 - DNA, 30 bp, Artificial Sequence
  Synthetic oligonucleotide
gttcgaggactttcgaagttatgtaatatc

SEQ ID NO: 380084 - DNA, 30 bp, Artificial Sequence
  Synthetic oligonucleotide
tgggggtaccggcagctccaggttaatatc

SEQ ID NO: 380085 - DNA, 30 bp, Artificial Sequence
  Synthetic oligonucleotide
agcgagtgtgcggtagccagtacacatatc

SEQ ID NO: 380086 - DNA, 29 bp, Artificial Sequence
  Synthetic oligonucleotide
atgggactcgttgcaagtgtgtccatatc

SEQ ID NO: 380087 - DNA, 30 bp, Artificial Sequence
  Synthetic oligonucleotide
gatattagggacagaacatgtgggcatatc

SEQ ID NO: 380088 - DNA, 30 bp, Artificial Sequence
  Synthetic oligonucleotide
agtcaatgataagacagcagtgtgcatatc

SEQ ID NO: 380089 - DNA, 29 bp, Artificial Sequence
  Synthetic oligonucleotide
ggctgggggtcagtgccacagttcatatc

SEQ ID NO: 380090 - DNA, 30 bp, Artificial Sequence
  Synthetic oligonucleotide
ggatccttggatcgttaactgaacgatatc

SEQ ID NO: 380091 - DNA, 30 bp, Artificial Sequence
  Synthetic oligonucleotide
ttccagatcggtgccggacaggacgatatc

SEQ ID NO: 380092 - DNA, 30 bp, Artificial Sequence
  Synthetic oligonucleotide
cctcccgagccggacattatccccgatatc

SEQ ID NO: 380093 - DNA, 30 bp, Artificial Sequence
  Synthetic oligonucleotide
ccatgggacgttttggttcgtcaggatatc

SEQ ID NO: 380094 - DNA, 30 bp, Artificial Sequence
  Synthetic oligonucleotide
aggaccatttgtgcagctgaagcggatatc

SEQ ID NO: 380095 - DNA, 30 bp, Artificial Sequence
  Synthetic oligonucleotide
acctacgctattggccattatgtggatatc

SEQ ID NO: 380096 - DNA, 30 bp, Artificial Sequence
  Synthetic oligonucleotide
tgcccataaaagtcgcttccccatgatatc

SEQ ID NO: 380097 - DNA, 30 bp, Artificial Sequence
  Synthetic oligonucleotide
ccgccggcagaacccgcccagtatgatatc

SEQ ID NO: 380098 - DNA, 30 bp, Artificial Sequence
  Synthetic oligonucleotide
gtgaggtctagttccgcggctactgatatc

SEQ ID NO: 380099 - DNA, 30 bp, Artificial Sequence
  Synthetic oligonucleotide
gaagggccgcgtacaagcgctaaatatatc

SEQ ID NO: 380100 - DNA, 30 bp, Artificial Sequence
  Synthetic oligonucleotide
aagagggggactggatttccgggatatatc

SEQ ID NO: 380101 - DNA, 30 bp, Artificial Sequence
  Synthetic oligonucleotide
tagtgcgatctcattacgcggttatatatc

SEQ ID NO: 380102 - DNA, 31 bp, Artificial Sequence
  Synthetic oligonucleotide
aagaataagactcaggatgtacgactatatc

SEQ ID NO: 380103 - DNA, 30 bp, Artificial Sequence
  Synthetic oligonucleotide
acagatattgaccttcccaaaatttatatc

SEQ ID NO: 380104 - DNA, 30 bp, Artificial Sequence
  Synthetic oligonucleotide
ccttttagcacagttattttaaccactatc

SEQ ID NO: 380105 - DNA, 30 bp, Artificial Sequence
  Synthetic oligonucleotide
ccgctggcacagccgatttaacttactatc

SEQ ID NO: 380106 - DNA, 30 bp, Artificial Sequence
  Synthetic oligonucleotide
atattgggagcccagggagcgtgggctatc

SEQ ID NO: 380107 - DNA, 30 bp, Artificial Sequence
  Synthetic oligonucleotide
cgggactgtgaccccagggtcacatctatc

SEQ ID NO: 380108 - DNA, 30 bp, Artificial Sequence
  Synthetic oligonucleotide
ctgggatagaattttgtacagtcctctatc

SEQ ID NO: 380109 - DNA, 30 bp, Artificial Sequence
  Synthetic oligonucleotide
gatcgatatgagaagccggcattctctatc

SEQ ID NO: 380110 - DNA, 30 bp, Artificial Sequence
  Synthetic oligonucleotide
aaaatatgctgggcaacggaaaattctatc

SEQ ID NO: 380111 - DNA, 30 bp, Artificial Sequence
  Synthetic oligonucleotide
atcataaagtaggataatgcacgttctatc

SEQ ID NO: 380112 - DNA, 30 bp, Artificial Sequence
  Synthetic oligonucleotide
cccagcagaggcagagcgtgattaagtatc

SEQ ID NO: 380113 - DNA, 30 bp, Artificial Sequence
  Synthetic oligonucleotide
aaagcgtgattgtggacaaagttaagtatc

SEQ ID NO: 380114 - DNA, 30 bp, Artificial Sequence
  Synthetic oligonucleotide
tctatatcggaactagaaccattcagtatc

SEQ ID NO: 380115 - DNA, 30 bp, Artificial Sequence
  Synthetic oligonucleotide
gatggtacactcgatggaatgtagagtatc

SEQ ID NO: 380116 - DNA, 30 bp, Artificial Sequence
  Synthetic oligonucleotide
tcttttactgcttatcccgtgtagagtatc

SEQ ID NO: 380117 - DNA, 30 bp, Artificial Sequence
  Synthetic oligonucleotide
acgatatatggaagaattgactggagtatc

SEQ ID NO: 380118 - DNA, 30 bp, Artificial Sequence
  Synthetic oligonucleotide
gctcgacgaccattttcttgttttagtatc

SEQ ID NO: 380119 - DNA, 30 bp, Artificial Sequence
  Synthetic oligonucleotide
cgtgagttcggcccaaccgagccacgtatc

SEQ ID NO: 380120 - DNA, 30 bp, Artificial Sequence
  Synthetic oligonucleotide
atttagaaaaaggtggttatcatacgtatc

SEQ ID NO: 380121 - DNA, 30 bp, Artificial Sequence
  Synthetic oligonucleotide
taggggtgagatagcaattttgaccgtatc

SEQ ID NO: 380122 - DNA, 30 bp, Artificial Sequence
  Synthetic oligonucleotide
tgaaaccttgaccaacccttagcccgtatc

SEQ ID NO: 380123 - DNA, 30 bp, Artificial Sequence
  Synthetic oligonucleotide
ttcccactcacgtaacgcttatcccgtatc

SEQ ID NO: 380124 - DNA, 30 bp, Artificial Sequence
  Synthetic oligonucleotide
tctgtcctaacttttggtagcaagcgtatc

SEQ ID NO: 380125 - DNA, 30 bp, Artificial Sequence
  Synthetic oligonucleotide
cgcaggtcccttaaggacttctggcgtatc

SEQ ID NO: 380126 - DNA, 30 bp, Artificial Sequence
  Synthetic oligonucleotide
tattgcggtgaaatggtgcacatgcgtatc

SEQ ID NO: 380127 - DNA, 30 bp, Artificial Sequence
  Synthetic oligonucleotide
cccacctgtgagaggagcagccctcgtatc

SEQ ID NO: 380128 - DNA, 30 bp, Artificial Sequence
  Synthetic oligonucleotide
ttgtcattatacctatcccgatgtcgtatc

SEQ ID NO: 380129 - DNA, 30 bp, Artificial Sequence
  Synthetic oligonucleotide
cattgagctctccaattctgcaacggtatc

SEQ ID NO: 380130 - DNA, 30 bp, Artificial Sequence
  Synthetic oligonucleotide
tcttcactatgaaattatctttacggtatc

SEQ ID NO: 380131 - DNA, 30 bp, Artificial Sequence
  Synthetic oligonucleotide
gcccaagatacaaagagatactccggtatc

SEQ ID NO: 380132 - DNA, 30 bp, Artificial Sequence
  Synthetic oligonucleotide
gtgggaggaactgagcgtcggacgggtatc

SEQ ID NO: 380133 - DNA, 30 bp, Artificial Sequence
  Synthetic oligonucleotide
atggaggttcacaatgttgggacgggtatc

SEQ ID NO: 380134 - DNA, 30 bp, Artificial Sequence
  Synthetic oligonucleotide
acatgtcggcgggcaccggtgacgggtatc

SEQ ID NO: 380135 - DNA, 30 bp, Artificial Sequence
  Synthetic oligonucleotide
agatcaccctacgcgtatgcacggggtatc

SEQ ID NO: 380136 - DNA, 30 bp, Artificial Sequence
  Synthetic oligonucleotide
ctcccgtagtttgtctttatgcggggtatc

SEQ ID NO: 380137 - DNA, 30 bp, Artificial Sequence
  Synthetic oligonucleotide
aagctaagccagaccattatgtctggtatc

SEQ ID NO: 380138 - DNA, 30 bp, Artificial Sequence
  Synthetic oligonucleotide
atcaacagtgattggcgcgggggatgtatc

SEQ ID NO: 380139 - DNA, 30 bp, Artificial Sequence
  Synthetic oligonucleotide
aaggtggtgctttttcacggcacctgtatc

SEQ ID NO: 380140 - DNA, 30 bp, Artificial Sequence
  Synthetic oligonucleotide
ttcccctataattgctagaccacgtgtatc

SEQ ID NO: 380141 - DNA, 30 bp, Artificial Sequence
  Synthetic oligonucleotide
tgtgcgttagtcgccataccgacgtgtatc

SEQ ID NO: 380142 - DNA, 30 bp, Artificial Sequence
  Synthetic oligonucleotide
ggaagcaggtgtaacatatatacgtgtatc

SEQ ID NO: 380143 - DNA, 30 bp, Artificial Sequence
  Synthetic oligonucleotide
gtcagaccggtttcctggggcttgtgtatc

SEQ ID NO: 380144 - DNA, 30 bp, Artificial Sequence
  Synthetic oligonucleotide
gcagatatcttaatagaacctatttgtatc

SEQ ID NO: 380145 - DNA, 30 bp, Artificial Sequence
  Synthetic oligonucleotide
ctggtggcaggtacgtggatctaaattatc

SEQ ID NO: 380146 - DNA, 30 bp, Artificial Sequence
  Synthetic oligonucleotide
caggtatgcacttttgtgtgatgaattatc

SEQ ID NO: 380147 - DNA, 30 bp, Artificial Sequence
  Synthetic oligonucleotide
acaggaatcatagtatactttaccattatc

SEQ ID NO: 380148 - DNA, 30 bp, Artificial Sequence
  Synthetic oligonucleotide
gaaacctattaaggtgaacacccgattatc

SEQ ID NO: 380149 - DNA, 30 bp, Artificial Sequence
  Synthetic oligonucleotide
agggatggaagtatacggcggtggattatc

SEQ ID NO: 380150 - DNA, 30 bp, Artificial Sequence
  Synthetic oligonucleotide
gtaagacactatgcgccactcctgattatc

SEQ ID NO: 380151 - DNA, 30 bp, Artificial Sequence
  Synthetic oligonucleotide
tggaggccacacatagcggcgttgattatc

SEQ ID NO: 380152 - DNA, 30 bp, Artificial Sequence
  Synthetic oligonucleotide
aatatggaccgatgcctgtactttattatc

SEQ ID NO: 380153 - DNA, 30 bp, Artificial Sequence
  Synthetic oligonucleotide
ctcaaagagttgcctacacatgcacttatc

SEQ ID NO: 380154 - DNA, 30 bp, Artificial Sequence
  Synthetic oligonucleotide
gctggagtgagatggtaacccagacttatc

SEQ ID NO: 380155 - DNA, 30 bp, Artificial Sequence
  Synthetic oligonucleotide
actctgcttataaccgggtgtgtacttatc

SEQ ID NO: 380156 - DNA, 30 bp, Artificial Sequence
  Synthetic oligonucleotide
cttcgtcgggtgaacacgctgaaccttatc

SEQ ID NO: 380157 - DNA, 30 bp, Artificial Sequence
  Synthetic oligonucleotide
ccgtgcggcaccggatcatgatgccttatc

SEQ ID NO: 380158 - DNA, 30 bp, Artificial Sequence
  Synthetic oligonucleotide
tccgctggctacgctaggcgcgatcttatc

SEQ ID NO: 380159 - DNA, 30 bp, Artificial Sequence
  Synthetic oligonucleotide
tatcagagcgaccgccaacctagtcttatc

SEQ ID NO: 380160 - DNA, 30 bp, Artificial Sequence
  Synthetic oligonucleotide
aagtactctaagctttttaggaaagttatc

SEQ ID NO: 380161 - DNA, 30 bp, Artificial Sequence
  Synthetic oligonucleotide
gcgaaaaagcgaatacttggggcagttatc

SEQ ID NO: 380162 - DNA, 30 bp, Artificial Sequence
  Synthetic oligonucleotide
tgataagtagggaaactcttctgagttatc

SEQ ID NO: 380163 - DNA, 30 bp, Artificial Sequence
  Synthetic oligonucleotide
tgtgcattacagaagtagttagatgttatc

SEQ ID NO: 380164 - DNA, 30 bp, Artificial Sequence
  Synthetic oligonucleotide
ggagcgtcttagtgtttagcatgatttatc

SEQ ID NO: 380165 - DNA, 30 bp, Artificial Sequence
  Synthetic oligonucleotide
ttgtgcgacgataatttaaggtactttatc

SEQ ID NO: 380166 - DNA, 30 bp, Artificial Sequence
  Synthetic oligonucleotide
atgggagaccttccgcacgagtcctttatc

SEQ ID NO: 380167 - DNA, 30 bp, Artificial Sequence
  Synthetic oligonucleotide
tcattaagatttacactcccccagtttatc

SEQ ID NO: 380168 - DNA, 30 bp, Artificial Sequence
  Synthetic oligonucleotide
tcacagggtgtgttgttagacgcgtttatc

SEQ ID NO: 380169 - DNA, 30 bp, Artificial Sequence
  Synthetic oligonucleotide
ggctgttgcgctttaaatgtctcgtttatc

SEQ ID NO: 380170 - DNA, 30 bp, Artificial Sequence
  Synthetic oligonucleotide
gattctccctcgaaaagggacctgtttatc

SEQ ID NO: 380171 - DNA, 30 bp, Artificial Sequence
  Synthetic oligonucleotide
ttgggaatagcatcatcgtgcatttttatc

SEQ ID NO: 380172 - DNA, 30 bp, Artificial Sequence
  Synthetic oligonucleotide
cctatagacgctagagaagtgttttttatc

SEQ ID NO: 380173 - DNA, 30 bp, Artificial Sequence
  Synthetic oligonucleotide
atgacagttcctgtccaatcacgaaaactc

SEQ ID NO: 380174 - DNA, 29 bp, Artificial Sequence
  Synthetic oligonucleotide
accgactataacctaactactgaaaactc

SEQ ID NO: 380175 - DNA, 30 bp, Artificial Sequence
  Synthetic oligonucleotide
cgcataagtcctctacggtgggtaaaactc

SEQ ID NO: 380176 - DNA, 30 bp, Artificial Sequence
  Synthetic oligonucleotide
cacgggcacgtgatagatttctataaactc

SEQ ID NO: 380177 - DNA, 30 bp, Artificial Sequence
  Synthetic oligonucleotide
gaacgatgacgtgcagtagggtataaactc

SEQ ID NO: 380178 - DNA, 30 bp, Artificial Sequence
  Synthetic oligonucleotide
tagcagaacataatgtcttggcgtaaactc

SEQ ID NO: 380179 - DNA, 30 bp, Artificial Sequence
  Synthetic oligonucleotide
gtcagaggctaaaccttatgggttaaactc

SEQ ID NO: 380180 - DNA, 30 bp, Artificial Sequence
  Synthetic oligonucleotide
agtttaggaacactccagataggacaactc

SEQ ID NO: 380181 - DNA, 30 bp, Artificial Sequence
  Synthetic oligonucleotide
ggtcttctatgtcgcgtggttaaccaactc

SEQ ID NO: 380182 - DNA, 30 bp, Artificial Sequence
  Synthetic oligonucleotide
ggtatggtcacggcaatctaattccaactc

SEQ ID NO: 380183 - DNA, 30 bp, Artificial Sequence
  Synthetic oligonucleotide
tgaaggcccgctcaggggcgcaagcaactc

SEQ ID NO: 380184 - DNA, 30 bp, Artificial Sequence
  Synthetic oligonucleotide
aatacgacattgtggagtggcaggcaactc

SEQ ID NO: 380185 - DNA, 30 bp, Artificial Sequence
  Synthetic oligonucleotide
gattgtagaagtaggaaccctcgtcaactc

SEQ ID NO: 380186 - DNA, 32 bp, Artificial Sequence
  Synthetic oligonucleotide
gtgaccctatccgtccccgccggcaagaactc

SEQ ID NO: 380187 - DNA, 30 bp, Artificial Sequence
  Synthetic oligonucleotide
ctggagcttgtacgacccgctaccgaactc

SEQ ID NO: 380188 - DNA, 30 bp, Artificial Sequence
  Synthetic oligonucleotide
ggagtccgttctggatacagaagcgaactc

SEQ ID NO: 380189 - DNA, 30 bp, Artificial Sequence
  Synthetic oligonucleotide
cggccgtattatcctggactgggcgaactc

SEQ ID NO: 380190 - DNA, 30 bp, Artificial Sequence
  Synthetic oligonucleotide
ttgtgagagttattgaattgcccggaactc

SEQ ID NO: 380191 - DNA, 30 bp, Artificial Sequence
  Synthetic oligonucleotide
aaaatcccttcaaaactactcgctgaactc

SEQ ID NO: 380192 - DNA, 30 bp, Artificial Sequence
  Synthetic oligonucleotide
gtagtataatacataccagatacataactc

SEQ ID NO: 380193 - DNA, 30 bp, Artificial Sequence
  Synthetic oligonucleotide
atgcctgcagccaaagtgcttacataactc

SEQ ID NO: 380194 - DNA, 30 bp, Artificial Sequence
  Synthetic oligonucleotide
tacgatctttataggaatattcgataactc

SEQ ID NO: 380195 - DNA, 30 bp, Artificial Sequence
  Synthetic oligonucleotide
gaaaggataacccgggttaaatactaactc

SEQ ID NO: 380196 - DNA, 30 bp, Artificial Sequence
  Synthetic oligonucleotide
tgataatttccgtggtcacatggctaactc

SEQ ID NO: 380197 - DNA, 30 bp, Artificial Sequence
  Synthetic oligonucleotide
acattccgcaaaggatgctcggagtaactc

SEQ ID NO: 380198 - DNA, 30 bp, Artificial Sequence
  Synthetic oligonucleotide
cagcgattaaacgatcctgccgcgtaactc

SEQ ID NO: 380199 - DNA, 30 bp, Artificial Sequence
  Synthetic oligonucleotide
aattagccgccaccgagtgtgaggtaactc

SEQ ID NO: 380200 - DNA, 30 bp, Artificial Sequence
  Synthetic oligonucleotide
tcacctgacatgacgtatacgtcttaactc

SEQ ID NO: 380201 - DNA, 30 bp, Artificial Sequence
  Synthetic oligonucleotide
ccagtaagaggatccaaacttttttaactc

SEQ ID NO: 380202 - DNA, 30 bp, Artificial Sequence
  Synthetic oligonucleotide
ggacttaaggcaacggtccgacgaacactc

SEQ ID NO: 380203 - DNA, 30 bp, Artificial Sequence
  Synthetic oligonucleotide
cccgtcgaattgtaatcccgttggacactc

SEQ ID NO: 380204 - DNA, 30 bp, Artificial Sequence
  Synthetic oligonucleotide
tgatacttcgtggagcagtcctatacactc

SEQ ID NO: 380205 - DNA, 30 bp, Artificial Sequence
  Synthetic oligonucleotide
agcgatacagtatactctggtattacactc

SEQ ID NO: 380206 - DNA, 30 bp, Artificial Sequence
  Synthetic oligonucleotide
ccatatgcgccgcctttaagccttacactc

SEQ ID NO: 380207 - DNA, 30 bp, Artificial Sequence
  Synthetic oligonucleotide
tggacccgtccaccgcatgactaaccactc

SEQ ID NO: 380208 - DNA, 30 bp, Artificial Sequence
  Synthetic oligonucleotide
ttccggcatcgtgacttaatacgaccactc

SEQ ID NO: 380209 - DNA, 30 bp, Artificial Sequence
  Synthetic oligonucleotide
ggcatatatttctatgtcatgtgaccactc

SEQ ID NO: 380210 - DNA, 30 bp, Artificial Sequence
  Synthetic oligonucleotide
gatcatatctgtcgtagtggtggagcactc

SEQ ID NO: 380211 - DNA, 30 bp, Artificial Sequence
  Synthetic oligonucleotide
tcacaccaggttagacgagacaccgcactc

SEQ ID NO: 380212 - DNA, 30 bp, Artificial Sequence
  Synthetic oligonucleotide
ttgtctacatgggcggtaattggggcactc

SEQ ID NO: 380213 - DNA, 30 bp, Artificial Sequence
  Synthetic oligonucleotide
cacggcggggatgcagccgtagaatcactc

SEQ ID NO: 380214 - DNA, 30 bp, Artificial Sequence
  Synthetic oligonucleotide
gccaaccgcgaacccaccccgggctcactc

SEQ ID NO: 380215 - DNA, 30 bp, Artificial Sequence
  Synthetic oligonucleotide
gcttaatctaagacgctttatccgtcactc

SEQ ID NO: 380216 - DNA, 30 bp, Artificial Sequence
  Synthetic oligonucleotide
gatagctgccccattgacttgttttcactc

SEQ ID NO: 380217 - DNA, 30 bp, Artificial Sequence
  Synthetic oligonucleotide
cttaacatgagtatcgacataaaaagactc

SEQ ID NO: 380218 - DNA, 30 bp, Artificial Sequence
  Synthetic oligonucleotide
agaacaataggcagagtctttttgagactc

SEQ ID NO: 380219 - DNA, 30 bp, Artificial Sequence
  Synthetic oligonucleotide
tgatgcttggatatatttcatagtagactc

SEQ ID NO: 380220 - DNA, 30 bp, Artificial Sequence
  Synthetic oligonucleotide
ctgagtcctgctccttcgttcgcacgactc

SEQ ID NO: 380221 - DNA, 30 bp, Artificial Sequence
  Synthetic oligonucleotide
gcaaagtgacattccctatttgatcgactc

SEQ ID NO: 380222 - DNA, 30 bp, Artificial Sequence
  Synthetic oligonucleotide
acccaggaaacgaggtctcacagtcgactc

SEQ ID NO: 380223 - DNA, 30 bp, Artificial Sequence
  Synthetic oligonucleotide
tcctacctgtgagtccataagattcgactc

SEQ ID NO: 380224 - DNA, 30 bp, Artificial Sequence
  Synthetic oligonucleotide
cagcatgcatgtactcgctattaaggactc

SEQ ID NO: 380225 - DNA, 30 bp, Artificial Sequence
  Synthetic oligonucleotide
tattaattagcgaatgatacattaggactc

SEQ ID NO: 380226 - DNA, 30 bp, Artificial Sequence
  Synthetic oligonucleotide
gtctacatactcattgttcctctcggactc

SEQ ID NO: 380227 - DNA, 30 bp, Artificial Sequence
  Synthetic oligonucleotide
gatcggagccgtaacttcttaaatggactc

SEQ ID NO: 380228 - DNA, 30 bp, Artificial Sequence
  Synthetic oligonucleotide
ctaagatagacgttgcatatttctggactc

SEQ ID NO: 380229 - DNA, 30 bp, Artificial Sequence
  Synthetic oligonucleotide
tgactattgatcaggcgacggtgatgactc

SEQ ID NO: 380230 - DNA, 30 bp, Artificial Sequence
  Synthetic oligonucleotide
agcaacagggctcccaccaccgattgactc

SEQ ID NO: 380231 - DNA, 30 bp, Artificial Sequence
  Synthetic oligonucleotide
ctaagcaaacgtggagacacagtaatactc

SEQ ID NO: 380232 - DNA, 30 bp, Artificial Sequence
  Synthetic oligonucleotide
cagcaagccaacacccgcagagtaatactc

SEQ ID NO: 380233 - DNA, 30 bp, Artificial Sequence
  Synthetic oligonucleotide
tcacccttatccggacttagtggcatactc

SEQ ID NO: 380234 - DNA, 30 bp, Artificial Sequence
  Synthetic oligonucleotide
cttcttcgaattgttgtattattcatactc

SEQ ID NO: 380235 - DNA, 30 bp, Artificial Sequence
  Synthetic oligonucleotide
ccgcggccatagtaatgggtttagatactc

SEQ ID NO: 380236 - DNA, 30 bp, Artificial Sequence
  Synthetic oligonucleotide
ggcaacgaaaccggcctctgcaggatactc

SEQ ID NO: 380237 - DNA, 30 bp, Artificial Sequence
  Synthetic oligonucleotide
ccttccaatcaatcgactcatacactactc

SEQ ID NO: 380238 - DNA, 30 bp, Artificial Sequence
  Synthetic oligonucleotide
ttcccagaaactacatgctctggactactc

SEQ ID NO: 380239 - DNA, 30 bp, Artificial Sequence
  Synthetic oligonucleotide
gttcaggacacgtaccggggccagctactc

SEQ ID NO: 380240 - DNA, 30 bp, Artificial Sequence
  Synthetic oligonucleotide
aggtagaggtccgacggaagcggtctactc

SEQ ID NO: 380241 - DNA, 30 bp, Artificial Sequence
  Synthetic oligonucleotide
gggctcgccaagtggactgtcaaagtactc

SEQ ID NO: 380242 - DNA, 30 bp, Artificial Sequence
  Synthetic oligonucleotide
tgtttcttgcctcggacgcactaagtactc

SEQ ID NO: 380243 - DNA, 30 bp, Artificial Sequence
  Synthetic oligonucleotide
ataagtaaatggatttaaactgtcgtactc

SEQ ID NO: 380244 - DNA, 30 bp, Artificial Sequence
  Synthetic oligonucleotide
ttgtgtaagacccgtcgtgaagttgtactc

SEQ ID NO: 380245 - DNA, 30 bp, Artificial Sequence
  Synthetic oligonucleotide
ctccatgtatgacgaggtgatgacttactc

SEQ ID NO: 380246 - DNA, 30 bp, Artificial Sequence
  Synthetic oligonucleotide
attaaccgtctcgcgcaccgtagcttactc

SEQ ID NO: 380247 - DNA, 27 bp, Artificial Sequence
  Synthetic oligonucleotide
gattaggtttatgttatgccgttactc

SEQ ID NO: 380248 - DNA, 30 bp, Artificial Sequence
  Synthetic oligonucleotide
tggtggatttactggtatttggtgttactc

SEQ ID NO: 380249 - DNA, 30 bp, Artificial Sequence
  Synthetic oligonucleotide
gtggattccgctcctgattgtgcaaacctc

SEQ ID NO: 380250 - DNA, 30 bp, Artificial Sequence
  Synthetic oligonucleotide
gtagacagagttcaactagcaaacaacctc

SEQ ID NO: 380251 - DNA, 30 bp, Artificial Sequence
  Synthetic oligonucleotide
tccagacgcaaattgtccaaaattaacctc

SEQ ID NO: 380252 - DNA, 30 bp, Artificial Sequence
  Synthetic oligonucleotide
agaggcgttgtgaggaaccgataacacctc

SEQ ID NO: 380253 - DNA, 30 bp, Artificial Sequence
  Synthetic oligonucleotide
ggttccggagcctggagctgcacgcacctc

SEQ ID NO: 380254 - DNA, 30 bp, Artificial Sequence
  Synthetic oligonucleotide
ccctattaggagtccacagttccgcacctc

SEQ ID NO: 380255 - DNA, 30 bp, Artificial Sequence
  Synthetic oligonucleotide
accacagttatctcaggcgcccggcacctc

SEQ ID NO: 380256 - DNA, 30 bp, Artificial Sequence
  Synthetic oligonucleotide
gaaagaaattacttgaccgcgctgcacctc

SEQ ID NO: 380257 - DNA, 29 bp, Artificial Sequence
  Synthetic oligonucleotide
taaaacaaacgggatagctaagtcacctc

SEQ ID NO: 380258 - DNA, 30 bp, Artificial Sequence
  Synthetic oligonucleotide
taactcaaatcgtttgcatttaacgacctc

SEQ ID NO: 380259 - DNA, 31 bp, Artificial Sequence
  Synthetic oligonucleotide
cgtaaatccccctttgtgccgtcaggacctc

SEQ ID NO: 380260 - DNA, 30 bp, Artificial Sequence
  Synthetic oligonucleotide
ctccgcggcactagcgtcatggtggacctc

SEQ ID NO: 380261 - DNA, 30 bp, Artificial Sequence
  Synthetic oligonucleotide
accacgaaagcgccatattattatgacctc

SEQ ID NO: 380262 - DNA, 30 bp, Artificial Sequence
  Synthetic oligonucleotide
atgatttaagcttgctcattcatatacctc

SEQ ID NO: 380263 - DNA, 30 bp, Artificial Sequence
  Synthetic oligonucleotide
accacgccgagcagtcgtggcacctacctc

SEQ ID NO: 380264 - DNA, 30 bp, Artificial Sequence
  Synthetic oligonucleotide
tcctaagagcaacccgaggggccgtacctc

SEQ ID NO: 380265 - DNA, 30 bp, Artificial Sequence
  Synthetic oligonucleotide
ctaagagggactgcagccgcgccaaccctc

SEQ ID NO: 380266 - DNA, 30 bp, Artificial Sequence
  Synthetic oligonucleotide
caagattgttcagacatcaaatacaccctc

SEQ ID NO: 380267 - DNA, 30 bp, Artificial Sequence
  Synthetic oligonucleotide
gggagcgttcactacacgagatgcaccctc

SEQ ID NO: 380268 - DNA, 30 bp, Artificial Sequence
  Synthetic oligonucleotide
gtgctaaaatcgcaacaatgattcaccctc

SEQ ID NO: 380269 - DNA, 30 bp, Artificial Sequence
  Synthetic oligonucleotide
ggatgtggacggcactatccacggaccctc

SEQ ID NO: 380270 - DNA, 30 bp, Artificial Sequence
  Synthetic oligonucleotide
gttcaaatagtatagaaaggtctgaccctc

SEQ ID NO: 380271 - DNA, 30 bp, Artificial Sequence
  Synthetic oligonucleotide
cctggaccggttccttcggggactaccctc

SEQ ID NO: 380272 - DNA, 30 bp, Artificial Sequence
  Synthetic oligonucleotide
gctggtcatttctcgctgttctaacccctc

SEQ ID NO: 380273 - DNA, 30 bp, Artificial Sequence
  Synthetic oligonucleotide
cgaaaccggtcaatttccgccagccccctc

SEQ ID NO: 380274 - DNA, 30 bp, Artificial Sequence
  Synthetic oligonucleotide
gaaaaggcaacacatctaggttagcccctc

SEQ ID NO: 380275 - DNA, 30 bp, Artificial Sequence
  Synthetic oligonucleotide
ctatatacagaagtatgtgtcgcgcccctc

SEQ ID NO: 380276 - DNA, 30 bp, Artificial Sequence
  Synthetic oligonucleotide
taggctcctcgtatgagttagtggcccctc

SEQ ID NO: 380277 - DNA, 30 bp, Artificial Sequence
  Synthetic oligonucleotide
ttttgttggagttatccacccattcccctc

SEQ ID NO: 380278 - DNA, 30 bp, Artificial Sequence
  Synthetic oligonucleotide
gggctattactcattgcctgagaagccctc

SEQ ID NO: 380279 - DNA, 30 bp, Artificial Sequence
  Synthetic oligonucleotide
gatgcttatacagaagaaatttcagccctc

SEQ ID NO: 380280 - DNA, 30 bp, Artificial Sequence
  Synthetic oligonucleotide
tttgtaaccctttatagaatacgggccctc

SEQ ID NO: 380281 - DNA, 30 bp, Artificial Sequence
  Synthetic oligonucleotide
gagcaaattacgtgctatgggatggccctc

SEQ ID NO: 380282 - DNA, 30 bp, Artificial Sequence
  Synthetic oligonucleotide
cggcgatccgaccgtaggtgcgctgccctc

SEQ ID NO: 380283 - DNA, 30 bp, Artificial Sequence
  Synthetic oligonucleotide
tccccaccaagaactggcgtaacatccctc

SEQ ID NO: 380284 - DNA, 30 bp, Artificial Sequence
  Synthetic oligonucleotide
tagatgtgttgtgaggacggtgtgtccctc

SEQ ID NO: 380285 - DNA, 30 bp, Artificial Sequence
  Synthetic oligonucleotide
ggtgtcttgtatttaacaacattgtccctc

SEQ ID NO: 380286 - DNA, 30 bp, Artificial Sequence
  Synthetic oligonucleotide
gctgttttgaatcatgataggagaagcctc

SEQ ID NO: 380287 - DNA, 30 bp, Artificial Sequence
  Synthetic oligonucleotide
ggggctcagaaacgaggccgaataagcctc

SEQ ID NO: 380288 - DNA, 30 bp, Artificial Sequence
  Synthetic oligonucleotide
ccccggacagaatctgaccctttaagcctc

SEQ ID NO: 380289 - DNA, 30 bp, Artificial Sequence
  Synthetic oligonucleotide
ggtgttccaggtgaaggcattggcagcctc

SEQ ID NO: 380290 - DNA, 30 bp, Artificial Sequence
  Synthetic oligonucleotide
gcaaacttgtgtgccttgcgtcggagcctc

SEQ ID NO: 380291 - DNA, 30 bp, Artificial Sequence
  Synthetic oligonucleotide
cgcgcccccgcctatgcaacgttgagcctc

SEQ ID NO: 380292 - DNA, 30 bp, Artificial Sequence
  Synthetic oligonucleotide
gactatacgaaatttagccattatagcctc

SEQ ID NO: 380293 - DNA, 30 bp, Artificial Sequence
  Synthetic oligonucleotide
accccatatattctagatcgctgccgcctc

SEQ ID NO: 380294 - DNA, 30 bp, Artificial Sequence
  Synthetic oligonucleotide
aatccagcggcagtctgtcactatcgcctc

SEQ ID NO: 380295 - DNA, 30 bp, Artificial Sequence
  Synthetic oligonucleotide
gagcaaacgccataatgctttattcgcctc

SEQ ID NO: 380296 - DNA, 30 bp, Artificial Sequence
  Synthetic oligonucleotide
cgtttgtgtccaacactttgcgacggcctc

SEQ ID NO: 380297 - DNA, 30 bp, Artificial Sequence
  Synthetic oligonucleotide
tgttcgatgggtgccactaagtccggcctc

SEQ ID NO: 380298 - DNA, 30 bp, Artificial Sequence
  Synthetic oligonucleotide
ttcacaaaagtccgttattagaagggcctc

SEQ ID NO: 380299 - DNA, 30 bp, Artificial Sequence
  Synthetic oligonucleotide
tcagcccaagcgtaagagttgcatggcctc

SEQ ID NO: 380300 - DNA, 30 bp, Artificial Sequence
  Synthetic oligonucleotide
tccaactagccatattgtctctctggcctc

SEQ ID NO: 380301 - DNA, 30 bp, Artificial Sequence
  Synthetic oligonucleotide
ttagagccggtttgaccaaagcggtgcctc

SEQ ID NO: 380302 - DNA, 30 bp, Artificial Sequence
  Synthetic oligonucleotide
taccgagtcccttccggtaccaattgcctc

SEQ ID NO: 380303 - DNA, 30 bp, Artificial Sequence
  Synthetic oligonucleotide
tgtcatccatgaggctgacatcgcatcctc

SEQ ID NO: 380304 - DNA, 30 bp, Artificial Sequence
  Synthetic oligonucleotide
catacgaacacacctgggtttgggatcctc

SEQ ID NO: 380305 - DNA, 30 bp, Artificial Sequence
  Synthetic oligonucleotide
tggcaatccatgcatagctcggatatcctc

SEQ ID NO: 380306 - DNA, 30 bp, Artificial Sequence
  Synthetic oligonucleotide
aacgcctccgcggggtcagtcactatcctc

SEQ ID NO: 380307 - DNA, 30 bp, Artificial Sequence
  Synthetic oligonucleotide
tctccagcgcctgtgggcggataactcctc

SEQ ID NO: 380308 - DNA, 30 bp, Artificial Sequence
  Synthetic oligonucleotide
gtggtctcgtcgcttattagcatactcctc

SEQ ID NO: 380309 - DNA, 30 bp, Artificial Sequence
  Synthetic oligonucleotide
tttaacgcgaatcgtccaccgttactcctc

SEQ ID NO: 380310 - DNA, 30 bp, Artificial Sequence
  Synthetic oligonucleotide
tttagatcggagaggtaaggtgccctcctc

SEQ ID NO: 380311 - DNA, 30 bp, Artificial Sequence
  Synthetic oligonucleotide
aatttgagatcctttcttacgtgagtcctc

SEQ ID NO: 380312 - DNA, 30 bp, Artificial Sequence
  Synthetic oligonucleotide
ggtacagatttaccgcgttataacgtcctc

SEQ ID NO: 380313 - DNA, 30 bp, Artificial Sequence
  Synthetic oligonucleotide
cgaatttgttatttttcaggacaggtcctc

SEQ ID NO: 380314 - DNA, 30 bp, Artificial Sequence
  Synthetic oligonucleotide
tagaccttcgttgtacgtcttagggtcctc

SEQ ID NO: 380315 - DNA, 30 bp, Artificial Sequence
  Synthetic oligonucleotide
cttgaagcggtgccatgctcgcgggtcctc

SEQ ID NO: 380316 - DNA, 30 bp, Artificial Sequence
  Synthetic oligonucleotide
aagggaatctatttagtgcaaattgtcctc

SEQ ID NO: 380317 - DNA, 30 bp, Artificial Sequence
  Synthetic oligonucleotide
tatgttcgtgtggactaggaaaaattcctc

SEQ ID NO: 380318 - DNA, 30 bp, Artificial Sequence
  Synthetic oligonucleotide
tgttagcgccacatgctcaaacaattcctc

SEQ ID NO: 380319 - DNA, 30 bp, Artificial Sequence
  Synthetic oligonucleotide
cggtttagggcgcgcacacttgtattcctc

SEQ ID NO: 380320 - DNA, 30 bp, Artificial Sequence
  Synthetic oligonucleotide
aacttgctatcatggtccagaaggttcctc

SEQ ID NO: 380321 - DNA, 30 bp, Artificial Sequence
  Synthetic oligonucleotide
atgaggtttatgtgcttgaagtttttcctc

SEQ ID NO: 380322 - DNA, 30 bp, Artificial Sequence
  Synthetic oligonucleotide
gtttaaagaactgaagaagtctaaaagctc

SEQ ID NO: 380323 - DNA, 30 bp, Artificial Sequence
  Synthetic oligonucleotide
gtgccggtggcggttggatgcaacaagctc

SEQ ID NO: 380324 - DNA, 30 bp, Artificial Sequence
  Synthetic oligonucleotide
gattaaaacgtaaaactttctgcgaagctc

SEQ ID NO: 380325 - DNA, 30 bp, Artificial Sequence
  Synthetic oligonucleotide
aacctgagtttaagctagcagcggcagctc

SEQ ID NO: 380326 - DNA, 30 bp, Artificial Sequence
  Synthetic oligonucleotide
gtatcgacgtcatgtatgttgttagagctc

SEQ ID NO: 380327 - DNA, 30 bp, Artificial Sequence
  Synthetic oligonucleotide
ctgatgggtgaagtagtgtttcaggagctc

SEQ ID NO: 380328 - DNA, 30 bp, Artificial Sequence
  Synthetic oligonucleotide
gcattgtacacagtccaatgctaggagctc

SEQ ID NO: 380329 - DNA, 30 bp, Artificial Sequence
  Synthetic oligonucleotide
gcaatatatagcttgccgctcgcggagctc

SEQ ID NO: 380330 - DNA, 30 bp, Artificial Sequence
  Synthetic oligonucleotide
atgcaaactcacgactgtacggtggagctc

SEQ ID NO: 380331 - DNA, 30 bp, Artificial Sequence
  Synthetic oligonucleotide
tttagtgtcgtgacgaacattgtggagctc

SEQ ID NO: 380332 - DNA, 30 bp, Artificial Sequence
  Synthetic oligonucleotide
ggtcaatgaagtatcttatcctgtgagctc

SEQ ID NO: 380333 - DNA, 30 bp, Artificial Sequence
  Synthetic oligonucleotide
tagaggggccaactgttcatgcaatagctc

SEQ ID NO: 380334 - DNA, 30 bp, Artificial Sequence
  Synthetic oligonucleotide
gttgccccgcacgtccatttataatagctc

SEQ ID NO: 380335 - DNA, 30 bp, Artificial Sequence
  Synthetic oligonucleotide
tgcaagggtatagtaggaccctgctagctc

SEQ ID NO: 380336 - DNA, 30 bp, Artificial Sequence
  Synthetic oligonucleotide
atagaccggtaaccctagcctaggtagctc

SEQ ID NO: 380337 - DNA, 30 bp, Artificial Sequence
  Synthetic oligonucleotide
cataaggtcattggtctaaaatggtagctc

SEQ ID NO: 380338 - DNA, 30 bp, Artificial Sequence
  Synthetic oligonucleotide
ttgagcgtgcgcacgcggcggacttagctc

SEQ ID NO: 380339 - DNA, 30 bp, Artificial Sequence
  Synthetic oligonucleotide
cctatcgcattcggcagcccgatttagctc

SEQ ID NO: 380340 - DNA, 30 bp, Artificial Sequence
  Synthetic oligonucleotide
tgtgtttagggggtggaatgtgtttagctc

SEQ ID NO: 380341 - DNA, 30 bp, Artificial Sequence
  Synthetic oligonucleotide
tacgtattgctaaggttaatatgaacgctc

SEQ ID NO: 380342 - DNA, 30 bp, Artificial Sequence
  Synthetic oligonucleotide
ttcttcgtgcttacaggaattatcacgctc

SEQ ID NO: 380343 - DNA, 30 bp, Artificial Sequence
  Synthetic oligonucleotide
caaggtgtagaagccgcgtacgcgacgctc

SEQ ID NO: 380344 - DNA, 30 bp, Artificial Sequence
  Synthetic oligonucleotide
cgccgcccagtaacaaggtgtgcgacgctc

SEQ ID NO: 380345 - DNA, 30 bp, Artificial Sequence
  Synthetic oligonucleotide
tacctagggagtaacctcgcgtcgacgctc

SEQ ID NO: 380346 - DNA, 30 bp, Artificial Sequence
  Synthetic oligonucleotide
tgaccggtccgaagcagtccccatacgctc

SEQ ID NO: 380347 - DNA, 30 bp, Artificial Sequence
  Synthetic oligonucleotide
aaagtcaattgaggccaaaactgtacgctc

SEQ ID NO: 380348 - DNA, 30 bp, Artificial Sequence
  Synthetic oligonucleotide
acacgaaacgttgcgatctagattacgctc

SEQ ID NO: 380349 - DNA, 30 bp, Artificial Sequence
  Synthetic oligonucleotide
atagtcttgatgtgcaagaagcgaccgctc

SEQ ID NO: 380350 - DNA, 30 bp, Artificial Sequence
  Synthetic oligonucleotide
ccgccgctgggctaagtcaaaggaccgctc

SEQ ID NO: 380351 - DNA, 30 bp, Artificial Sequence
  Synthetic oligonucleotide
tgactgttatgtatactaaaagggccgctc

SEQ ID NO: 380352 - DNA, 30 bp, Artificial Sequence
  Synthetic oligonucleotide
acgctatggatgaattacgcatatccgctc

SEQ ID NO: 380353 - DNA, 30 bp, Artificial Sequence
  Synthetic oligonucleotide
cattccaatcctccttagaagtgtccgctc

SEQ ID NO: 380354 - DNA, 30 bp, Artificial Sequence
  Synthetic oligonucleotide
taatccctcggatatatctgataagcgctc

SEQ ID NO: 380355 - DNA, 30 bp, Artificial Sequence
  Synthetic oligonucleotide
agaattagccgagtggagacagacgcgctc

SEQ ID NO: 380356 - DNA, 30 bp, Artificial Sequence
  Synthetic oligonucleotide
gcgacagcgcgttctcatatgagcgcgctc

SEQ ID NO: 380357 - DNA, 30 bp, Artificial Sequence
  Synthetic oligonucleotide
tacatgacttgtctgggttttttcgcgctc

SEQ ID NO: 380358 - DNA, 30 bp, Artificial Sequence
  Synthetic oligonucleotide
aacacagcaccgctttgtagcacggcgctc

SEQ ID NO: 380359 - DNA, 30 bp, Artificial Sequence
  Synthetic oligonucleotide
tacctatgcgagacgttattttctgcgctc

SEQ ID NO: 380360 - DNA, 30 bp, Artificial Sequence
  Synthetic oligonucleotide
gtagcatgggacatatctattgaatcgctc

SEQ ID NO: 380361 - DNA, 30 bp, Artificial Sequence
  Synthetic oligonucleotide
gccatggccgcgcaacggccgacatcgctc

SEQ ID NO: 380362 - DNA, 30 bp, Artificial Sequence
  Synthetic oligonucleotide
gtaaagtggcgagtcagatgcccatcgctc

SEQ ID NO: 380363 - DNA, 30 bp, Artificial Sequence
  Synthetic oligonucleotide
gagtagttgctcgcgacaccttgatcgctc

SEQ ID NO: 380364 - DNA, 30 bp, Artificial Sequence
  Synthetic oligonucleotide
aagtggagactttggtatacacactcgctc

SEQ ID NO: 380365 - DNA, 29 bp, Artificial Sequence
  Synthetic oligonucleotide
gtaatatgattgtgatcaatagaaggctc

SEQ ID NO: 380366 - DNA, 30 bp, Artificial Sequence
  Synthetic oligonucleotide
gcttccatacagtcactagacaacaggctc

SEQ ID NO: 380367 - DNA, 30 bp, Artificial Sequence
  Synthetic oligonucleotide
agaagtattattgaaccgttgctcaggctc

SEQ ID NO: 380368 - DNA, 31 bp, Artificial Sequence
  Synthetic oligonucleotide
cctgatgattccgggtatacgcctgaggctc

SEQ ID NO: 380369 - DNA, 30 bp, Artificial Sequence
  Synthetic oligonucleotide
ataaccatcgcgtattgggaagtgaggctc

SEQ ID NO: 380370 - DNA, 31 bp, Artificial Sequence
  Synthetic oligonucleotide
gctgaaactcccggctggaactgttaggctc

SEQ ID NO: 380371 - DNA, 30 bp, Artificial Sequence
  Synthetic oligonucleotide
tactcttttagaatgtgacgctcacggctc

SEQ ID NO: 380372 - DNA, 30 bp, Artificial Sequence
  Synthetic oligonucleotide
aacacagaagcacaggcggtagtccggctc

SEQ ID NO: 380373 - DNA, 30 bp, Artificial Sequence
  Synthetic oligonucleotide
tgggttccaggacgaaaagtcttgcggctc

SEQ ID NO: 380374 - DNA, 30 bp, Artificial Sequence
  Synthetic oligonucleotide
cggacatgtattccctgatgaaatcggctc

SEQ ID NO: 380375 - DNA, 30 bp, Artificial Sequence
  Synthetic oligonucleotide
acattaaattgtccgccgtaatgagggctc

SEQ ID NO: 380376 - DNA, 30 bp, Artificial Sequence
  Synthetic oligonucleotide
cgtcgctaatgattcaggactatagggctc

SEQ ID NO: 380377 - DNA, 30 bp, Artificial Sequence
  Synthetic oligonucleotide
gaataaatagatcctaacttgaaggggctc

SEQ ID NO: 380378 - DNA, 30 bp, Artificial Sequence
  Synthetic oligonucleotide
actttgggcaccctgtactttccggggctc

SEQ ID NO: 380379 - DNA, 30 bp, Artificial Sequence
  Synthetic oligonucleotide
ggtaatggatcatgtagtgtaatggggctc

SEQ ID NO: 380380 - DNA, 30 bp, Artificial Sequence
  Synthetic oligonucleotide
actgtcgcccgccatctacaacatgggctc

SEQ ID NO: 380381 - DNA, 31 bp, Artificial Sequence
  Synthetic oligonucleotide
ccggcataagggggaatagcgggctgggctc

SEQ ID NO: 380382 - DNA, 30 bp, Artificial Sequence
  Synthetic oligonucleotide
agtcgatcgccaagttcacagcaatggctc

SEQ ID NO: 380383 - DNA, 30 bp, Artificial Sequence
  Synthetic oligonucleotide
gccgtggacgcgaaatcagccatatggctc

SEQ ID NO: 380384 - DNA, 30 bp, Artificial Sequence
  Synthetic oligonucleotide
gaaatgatgtggaaagcggttatatggctc

SEQ ID NO: 380385 - DNA, 30 bp, Artificial Sequence
  Synthetic oligonucleotide
atttataattgaggcttgatcgtatggctc

SEQ ID NO: 380386 - DNA, 30 bp, Artificial Sequence
  Synthetic oligonucleotide
gtcatagcatggacgtgcaaccactggctc

SEQ ID NO: 380387 - DNA, 30 bp, Artificial Sequence
  Synthetic oligonucleotide
gaccgtggtcgctacaacagcaattggctc

SEQ ID NO: 380388 - DNA, 30 bp, Artificial Sequence
  Synthetic oligonucleotide
aatccttggtgaatcttcgagataatgctc

SEQ ID NO: 380389 - DNA, 30 bp, Artificial Sequence
  Synthetic oligonucleotide
ctcgaactcacggtgcgctcacccatgctc

SEQ ID NO: 380390 - DNA, 30 bp, Artificial Sequence
  Synthetic oligonucleotide
tgtgtacgataggggccttgcggcatgctc

SEQ ID NO: 380391 - DNA, 30 bp, Artificial Sequence
  Synthetic oligonucleotide
tcgtaaggccctgtttatgatgcgatgctc

SEQ ID NO: 380392 - DNA, 30 bp, Artificial Sequence
  Synthetic oligonucleotide
gatgcatggattttctatgtcttgatgctc

SEQ ID NO: 380393 - DNA, 30 bp, Artificial Sequence
  Synthetic oligonucleotide
tcgcccacactggccagtaagaatatgctc

SEQ ID NO: 380394 - DNA, 30 bp, Artificial Sequence
  Synthetic oligonucleotide
gtgcatgctcggcctgagttatttatgctc

SEQ ID NO: 380395 - DNA, 30 bp, Artificial Sequence
  Synthetic oligonucleotide
ccgacattggcccttgcccttaaactgctc

SEQ ID NO: 380396 - DNA, 30 bp, Artificial Sequence
  Synthetic oligonucleotide
ggagaagctatctcgtacttaagcctgctc

SEQ ID NO: 380397 - DNA, 30 bp, Artificial Sequence
  Synthetic oligonucleotide
gtcgacgcataacctggaactagcctgctc

SEQ ID NO: 380398 - DNA, 30 bp, Artificial Sequence
  Synthetic oligonucleotide
tacaaatgctcggctgagcataggctgctc

SEQ ID NO: 380399 - DNA, 30 bp, Artificial Sequence
  Synthetic oligonucleotide
cccgttgcttgtactaaggttgatctgctc

SEQ ID NO: 380400 - DNA, 30 bp, Artificial Sequence
  Synthetic oligonucleotide
ttggctgaggtatgttaccggtgtctgctc

SEQ ID NO: 380401 - DNA, 30 bp, Artificial Sequence
  Synthetic oligonucleotide
ttagatggatgtgtcattgtcaaagtgctc

SEQ ID NO: 380402 - DNA, 30 bp, Artificial Sequence
  Synthetic oligonucleotide
ggttcggcgtcagcaagcaaaacagtgctc

SEQ ID NO: 380403 - DNA, 30 bp, Artificial Sequence
  Synthetic oligonucleotide
ggaaaccggtcaacaggacaaatagtgctc

SEQ ID NO: 380404 - DNA, 30 bp, Artificial Sequence
  Synthetic oligonucleotide
agaaagttatatatccttaatttcgtgctc

SEQ ID NO: 380405 - DNA, 30 bp, Artificial Sequence
  Synthetic oligonucleotide
gttagccgcggtgggtgctagaaattgctc

SEQ ID NO: 380406 - DNA, 30 bp, Artificial Sequence
  Synthetic oligonucleotide
ctgtctatacacgatatattttcattgctc

SEQ ID NO: 380407 - DNA, 30 bp, Artificial Sequence
  Synthetic oligonucleotide
agtgtggagtcagcgtcaaaatgattgctc

SEQ ID NO: 380408 - DNA, 30 bp, Artificial Sequence
  Synthetic oligonucleotide
tgcccttacacacgacccattcacttgctc

SEQ ID NO: 380409 - DNA, 30 bp, Artificial Sequence
  Synthetic oligonucleotide
tacaatagtattaatataactcccttgctc

SEQ ID NO: 380410 - DNA, 30 bp, Artificial Sequence
  Synthetic oligonucleotide
gcgcgacggtgttgttgagcaacgttgctc

SEQ ID NO: 380411 - DNA, 30 bp, Artificial Sequence
  Synthetic oligonucleotide
taagccacgcatagggagctggtgttgctc

SEQ ID NO: 380412 - DNA, 30 bp, Artificial Sequence
  Synthetic oligonucleotide
tattcaggatacttctttcgtcttttgctc

SEQ ID NO: 380413 - DNA, 30 bp, Artificial Sequence
  Synthetic oligonucleotide
ggggaggcccgggatcaaccataaaatctc

SEQ ID NO: 380414 - DNA, 30 bp, Artificial Sequence
  Synthetic oligonucleotide
ataaattggggtattagggctcgaaatctc

SEQ ID NO: 380415 - DNA, 30 bp, Artificial Sequence
  Synthetic oligonucleotide
caacatttaggggctaatatgataaatctc

SEQ ID NO: 380416 - DNA, 30 bp, Artificial Sequence
  Synthetic oligonucleotide
atgtggctattcttcttcgtcttaaatctc

SEQ ID NO: 380417 - DNA, 30 bp, Artificial Sequence
  Synthetic oligonucleotide
ctcgtctatggaggcacatggtacaatctc

SEQ ID NO: 380418 - DNA, 30 bp, Artificial Sequence
  Synthetic oligonucleotide
ggaagtgatatatatggggctatgaatctc

SEQ ID NO: 380419 - DNA, 30 bp, Artificial Sequence
  Synthetic oligonucleotide
agtagtgaatgcgctattcacgataatctc

SEQ ID NO: 380420 - DNA, 30 bp, Artificial Sequence
  Synthetic oligonucleotide
atcaagagacctgccccagacagacatctc

SEQ ID NO: 380421 - DNA, 30 bp, Artificial Sequence
  Synthetic oligonucleotide
tatgctagatcattggagaaaatacatctc

SEQ ID NO: 380422 - DNA, 30 bp, Artificial Sequence
  Synthetic oligonucleotide
gcttagccgtagcgatcaagcgcccatctc

SEQ ID NO: 380423 - DNA, 30 bp, Artificial Sequence
  Synthetic oligonucleotide
cctatagcatattatgacgatccgcatctc

SEQ ID NO: 380424 - DNA, 30 bp, Artificial Sequence
  Synthetic oligonucleotide
ataggactcggttgcaagtctgcgcatctc

SEQ ID NO: 380425 - DNA, 30 bp, Artificial Sequence
  Synthetic oligonucleotide
tcaacgatccctaagattgactcgcatctc

SEQ ID NO: 380426 - DNA, 30 bp, Artificial Sequence
  Synthetic oligonucleotide
cggaactggaaaacgtcaaccgggcatctc

SEQ ID NO: 380427 - DNA, 30 bp, Artificial Sequence
  Synthetic oligonucleotide
caatctgttggccggaatcttaaagatctc

SEQ ID NO: 380428 - DNA, 30 bp, Artificial Sequence
  Synthetic oligonucleotide
tgggttaaatccttaagtggacaagatctc

SEQ ID NO: 380429 - DNA, 30 bp, Artificial Sequence
  Synthetic oligonucleotide
ttactcacactgtgttgcagtaccgatctc

SEQ ID NO: 380430 - DNA, 28 bp, Artificial Sequence
  Synthetic oligonucleotide
gacaccacctgtagaagggcaggatctc

SEQ ID NO: 380431 - DNA, 30 bp, Artificial Sequence
  Synthetic oligonucleotide
cgaccgtcagggtataggatctgtgatctc

SEQ ID NO: 380432 - DNA, 30 bp, Artificial Sequence
  Synthetic oligonucleotide
tgatcctgattatccgcgatccttgatctc

SEQ ID NO: 380433 - DNA, 30 bp, Artificial Sequence
  Synthetic oligonucleotide
ctaggtatatttagtggggttctatatctc

SEQ ID NO: 380434 - DNA, 30 bp, Artificial Sequence
  Synthetic oligonucleotide
gtgtgatacctcagtctctcaatgtatctc

SEQ ID NO: 380435 - DNA, 30 bp, Artificial Sequence
  Synthetic oligonucleotide
atagaaaggatggattcccggatgtatctc

SEQ ID NO: 380436 - DNA, 30 bp, Artificial Sequence
  Synthetic oligonucleotide
acaaataggatggcttgttcttcttatctc

SEQ ID NO: 380437 - DNA, 30 bp, Artificial Sequence
  Synthetic oligonucleotide
ttacagctcgcgtgtggtaaggcgactctc

SEQ ID NO: 380438 - DNA, 30 bp, Artificial Sequence
  Synthetic oligonucleotide
caaatttgttaggtgctttccgatactctc

SEQ ID NO: 380439 - DNA, 30 bp, Artificial Sequence
  Synthetic oligonucleotide
ccagacccttgtagtacgaacgaccctctc

SEQ ID NO: 380440 - DNA, 30 bp, Artificial Sequence
  Synthetic oligonucleotide
tatagaatgtacacgcgtttctgccctctc

SEQ ID NO: 380441 - DNA, 30 bp, Artificial Sequence
  Synthetic oligonucleotide
tagagttaaatagtatgtaaagttcctctc

SEQ ID NO: 380442 - DNA, 30 bp, Artificial Sequence
  Synthetic oligonucleotide
gtgtcagattgagcgtttagcgtagctctc

SEQ ID NO: 380443 - DNA, 30 bp, Artificial Sequence
  Synthetic oligonucleotide
cggtttaacatgcgttataccgccgctctc

SEQ ID NO: 380444 - DNA, 30 bp, Artificial Sequence
  Synthetic oligonucleotide
agccaagtttacaccaagcggttcgctctc

SEQ ID NO: 380445 - DNA, 30 bp, Artificial Sequence
  Synthetic oligonucleotide
agagacttagcagacggttaagtggctctc

SEQ ID NO: 380446 - DNA, 30 bp, Artificial Sequence
  Synthetic oligonucleotide
ccaactgccacttaatctttaggatctctc

SEQ ID NO: 380447 - DNA, 30 bp, Artificial Sequence
  Synthetic oligonucleotide
ttcacgtgggcgtgggttaaggcctctctc

SEQ ID NO: 380448 - DNA, 30 bp, Artificial Sequence
  Synthetic oligonucleotide
gggatatagtgactggtttagggctctctc

SEQ ID NO: 380449 - DNA, 30 bp, Artificial Sequence
  Synthetic oligonucleotide
atgctcccgtggccctgcgtgcattctctc

SEQ ID NO: 380450 - DNA, 30 bp, Artificial Sequence
  Synthetic oligonucleotide
cgcgcacgaggagttctggtaataagtctc

SEQ ID NO: 380451 - DNA, 30 bp, Artificial Sequence
  Synthetic oligonucleotide
tggggtgtaccctgttcagcactgagtctc

SEQ ID NO: 380452 - DNA, 30 bp, Artificial Sequence
  Synthetic oligonucleotide
acagcggtaccggcggtcataaaacgtctc

SEQ ID NO: 380453 - DNA, 30 bp, Artificial Sequence
  Synthetic oligonucleotide
ctctgcgatttcagtgggggcatacgtctc

SEQ ID NO: 380454 - DNA, 30 bp, Artificial Sequence
  Synthetic oligonucleotide
tcaccattcgccatttgtcgtctacgtctc

SEQ ID NO: 380455 - DNA, 30 bp, Artificial Sequence
  Synthetic oligonucleotide
cagaacccggatgtgaggaaattacgtctc

SEQ ID NO: 380456 - DNA, 30 bp, Artificial Sequence
  Synthetic oligonucleotide
tactggccagctgtaccctgggtccgtctc

SEQ ID NO: 380457 - DNA, 30 bp, Artificial Sequence
  Synthetic oligonucleotide
ctaccaacaagataccgggttgctcgtctc

SEQ ID NO: 380458 - DNA, 30 bp, Artificial Sequence
  Synthetic oligonucleotide
gagaaggggtaccgcgcaatcggtcgtctc

SEQ ID NO: 380459 - DNA, 30 bp, Artificial Sequence
  Synthetic oligonucleotide
ccatcaggtgtctgacttaagggtcgtctc

SEQ ID NO: 380460 - DNA, 30 bp, Artificial Sequence
  Synthetic oligonucleotide
acaaggttcatgtctgtgagcccaggtctc

SEQ ID NO: 380461 - DNA, 30 bp, Artificial Sequence
  Synthetic oligonucleotide
tgaacttactctaattaaagccgaggtctc

SEQ ID NO: 380462 - DNA, 30 bp, Artificial Sequence
  Synthetic oligonucleotide
gtgttttcttaaggattcaggcgaggtctc

SEQ ID NO: 380463 - DNA, 30 bp, Artificial Sequence
  Synthetic oligonucleotide
ttcattagcgtaagagtaataataggtctc

SEQ ID NO: 380464 - DNA, 30 bp, Artificial Sequence
  Synthetic oligonucleotide
atctcatgtgatgcggagccgataggtctc

SEQ ID NO: 380465 - DNA, 30 bp, Artificial Sequence
  Synthetic oligonucleotide
gcatgggccgtaaatgcttatttgggtctc

SEQ ID NO: 380466 - DNA, 30 bp, Artificial Sequence
  Synthetic oligonucleotide
ctgtgtcgcagttattgagtgaatggtctc

SEQ ID NO: 380467 - DNA, 30 bp, Artificial Sequence
  Synthetic oligonucleotide
aacgagtccttgtgctctaacgatggtctc

SEQ ID NO: 380468 - DNA, 30 bp, Artificial Sequence
  Synthetic oligonucleotide
gaacaacactttaaacaagtggatggtctc

SEQ ID NO: 380469 - DNA, 30 bp, Artificial Sequence
  Synthetic oligonucleotide
gatacgtaaatccggttctgccaatgtctc

SEQ ID NO: 380470 - DNA, 30 bp, Artificial Sequence
  Synthetic oligonucleotide
tgcttcagaaccaaggacttggaatgtctc

SEQ ID NO: 380471 - DNA, 30 bp, Artificial Sequence
  Synthetic oligonucleotide
actcaaatagtactttacagtgaaattctc

SEQ ID NO: 380472 - DNA, 30 bp, Artificial Sequence
  Synthetic oligonucleotide
cgtgttacatcagggcaaattctgattctc

SEQ ID NO: 380473 - DNA, 30 bp, Artificial Sequence
  Synthetic oligonucleotide
accaggaagggcttcactgagcgtattctc

SEQ ID NO: 380474 - DNA, 30 bp, Artificial Sequence
  Synthetic oligonucleotide
tcggaccttatatctacactgggtattctc

SEQ ID NO: 380475 - DNA, 30 bp, Artificial Sequence
  Synthetic oligonucleotide
accttgaaacttgagtatttagaagttctc

SEQ ID NO: 380476 - DNA, 30 bp, Artificial Sequence
  Synthetic oligonucleotide
agctcctaaaaacttctcgcagacgttctc

SEQ ID NO: 380477 - DNA, 30 bp, Artificial Sequence
  Synthetic oligonucleotide
aaagagacagcctcattctttgccgttctc

SEQ ID NO: 380478 - DNA, 30 bp, Artificial Sequence
  Synthetic oligonucleotide
gaatgaatagcctaccaaaaatccgttctc

SEQ ID NO: 380479 - DNA, 30 bp, Artificial Sequence
  Synthetic oligonucleotide
tttagcgtaacggatgttatggtggttctc

SEQ ID NO: 380480 - DNA, 30 bp, Artificial Sequence
  Synthetic oligonucleotide
tgctagacccctgagttccctcatgttctc

SEQ ID NO: 380481 - DNA, 30 bp, Artificial Sequence
  Synthetic oligonucleotide
ctgagaatgatgtgtcacgcaggatttctc

SEQ ID NO: 380482 - DNA, 30 bp, Artificial Sequence
  Synthetic oligonucleotide
ttgtctagagtatcgcgttatacgtttctc

SEQ ID NO: 380483 - DNA, 30 bp, Artificial Sequence
  Synthetic oligonucleotide
tccccatgtcaatggtcggcgctgtttctc

SEQ ID NO: 380484 - DNA, 30 bp, Artificial Sequence
  Synthetic oligonucleotide
ccggggtttacgcccgtctggccttttctc

SEQ ID NO: 380485 - DNA, 30 bp, Artificial Sequence
  Synthetic oligonucleotide
gattgtcccaggagttcggtgccttttctc

SEQ ID NO: 380486 - DNA, 30 bp, Artificial Sequence
  Synthetic oligonucleotide
atggctcctgggcattgaattctttttctc

SEQ ID NO: 380487 - DNA, 30 bp, Artificial Sequence
  Synthetic oligonucleotide
tgaagactggcagtactagaggaaaaagtc

SEQ ID NO: 380488 - DNA, 30 bp, Artificial Sequence
  Synthetic oligonucleotide
gtcaagtcctctagattcggctaaaaagtc

SEQ ID NO: 380489 - DNA, 30 bp, Artificial Sequence
  Synthetic oligonucleotide
gcttaaaatatctagatggtgataaaagtc

SEQ ID NO: 380490 - DNA, 30 bp, Artificial Sequence
  Synthetic oligonucleotide
ggttttccggggaataggcataagaaagtc

SEQ ID NO: 380491 - DNA, 30 bp, Artificial Sequence
  Synthetic oligonucleotide
gatagcaacgctggaccgtctctgaaagtc

SEQ ID NO: 380492 - DNA, 30 bp, Artificial Sequence
  Synthetic oligonucleotide
gttataggagcagagtaattacgtaaagtc

SEQ ID NO: 380493 - DNA, 30 bp, Artificial Sequence
  Synthetic oligonucleotide
tatgagcttggagatttactgggtaaagtc

SEQ ID NO: 380494 - DNA, 30 bp, Artificial Sequence
  Synthetic oligonucleotide
gagggttctacaaaaacgggtattaaagtc

SEQ ID NO: 380495 - DNA, 30 bp, Artificial Sequence
  Synthetic oligonucleotide
gagcatcagaggttaataggtgttaaagtc

SEQ ID NO: 380496 - DNA, 30 bp, Artificial Sequence
  Synthetic oligonucleotide
gaacctgtgatacgggtgcagagacaagtc

SEQ ID NO: 380497 - DNA, 30 bp, Artificial Sequence
  Synthetic oligonucleotide
aaaacatctaattggatgaatgcgcaagtc

SEQ ID NO: 380498 - DNA, 30 bp, Artificial Sequence
  Synthetic oligonucleotide
atggcacaggctcatgggttgcatcaagtc

SEQ ID NO: 380499 - DNA, 30 bp, Artificial Sequence
  Synthetic oligonucleotide
tttaactagcctacaacatgggaagaagtc

SEQ ID NO: 380500 - DNA, 30 bp, Artificial Sequence
  Synthetic oligonucleotide
gaccaacttggtcaagttccacgagaagtc

SEQ ID NO: 380501 - DNA, 30 bp, Artificial Sequence
  Synthetic oligonucleotide
cagggatatatgcagtactctaacgaagtc

SEQ ID NO: 380502 - DNA, 30 bp, Artificial Sequence
  Synthetic oligonucleotide
tcagagaggtagcgtgtcacggatgaagtc

SEQ ID NO: 380503 - DNA, 30 bp, Artificial Sequence
  Synthetic oligonucleotide
attgatcaggactttaagacttactaagtc

SEQ ID NO: 380504 - DNA, 30 bp, Artificial Sequence
  Synthetic oligonucleotide
gcgcagtttgtaaccagggtttactaagtc

SEQ ID NO: 380505 - DNA, 30 bp, Artificial Sequence
  Synthetic oligonucleotide
gacgtagcacgagatttccgaagctaagtc

SEQ ID NO: 380506 - DNA, 30 bp, Artificial Sequence
  Synthetic oligonucleotide
taatcagtctacaggcatatagtgtaagtc

SEQ ID NO: 380507 - DNA, 30 bp, Artificial Sequence
  Synthetic oligonucleotide
tacggaagccgtttgctttctgtgtaagtc

SEQ ID NO: 380508 - DNA, 30 bp, Artificial Sequence
  Synthetic oligonucleotide
cagactttacatgttaggacagcttaagtc

SEQ ID NO: 380509 - DNA, 30 bp, Artificial Sequence
  Synthetic oligonucleotide
accttagcttgagagggacgtcaaacagtc

SEQ ID NO: 380510 - DNA, 30 bp, Artificial Sequence
  Synthetic oligonucleotide
cagcagtttttcgccgtttacagcacagtc

SEQ ID NO: 380511 - DNA, 30 bp, Artificial Sequence
  Synthetic oligonucleotide
tttagggccccttggcggtgaatgacagtc

SEQ ID NO: 380512 - DNA, 28 bp, Artificial Sequence
  Synthetic oligonucleotide
gagtataacgagtagggatgttacagtc

SEQ ID NO: 380513 - DNA, 30 bp, Artificial Sequence
  Synthetic oligonucleotide
gatcaccatatgtgagccccctgaccagtc

SEQ ID NO: 380514 - DNA, 30 bp, Artificial Sequence
  Synthetic oligonucleotide
ttttgacatccatgtggaacactaccagtc

SEQ ID NO: 380515 - DNA, 30 bp, Artificial Sequence
  Synthetic oligonucleotide
ctaccgcgtggcttcaggacccccccagtc

SEQ ID NO: 380516 - DNA, 30 bp, Artificial Sequence
  Synthetic oligonucleotide
tataagtggcttcatgtgatcgtgccagtc

SEQ ID NO: 380517 - DNA, 30 bp, Artificial Sequence
  Synthetic oligonucleotide
cactaatcaggcatcggatggggtccagtc

SEQ ID NO: 380518 - DNA, 30 bp, Artificial Sequence
  Synthetic oligonucleotide
acttaattgtcatcgcttgattcggcagtc

SEQ ID NO: 380519 - DNA, 30 bp, Artificial Sequence
  Synthetic oligonucleotide
ggaacatttccgctcagatactgggcagtc

SEQ ID NO: 380520 - DNA, 30 bp, Artificial Sequence
  Synthetic oligonucleotide
tagctgggtaggtctccgtatatggcagtc

SEQ ID NO: 380521 - DNA, 30 bp, Artificial Sequence
  Synthetic oligonucleotide
aggcctcacggtatgtatacatttgcagtc

SEQ ID NO: 380522 - DNA, 30 bp, Artificial Sequence
  Synthetic oligonucleotide
cggtcacggtaggttgtgtaccgctcagtc

SEQ ID NO: 380523 - DNA, 30 bp, Artificial Sequence
  Synthetic oligonucleotide
tgatattaaccaacgcgttattacagagtc

SEQ ID NO: 380524 - DNA, 30 bp, Artificial Sequence
  Synthetic oligonucleotide
gagagccaatgctgactcccattcagagtc

SEQ ID NO: 380525 - DNA, 30 bp, Artificial Sequence
  Synthetic oligonucleotide
ggccttgcactactaggcagccagagagtc

SEQ ID NO: 380526 - DNA, 30 bp, Artificial Sequence
  Synthetic oligonucleotide
atacttggttgtgtcttctaggagagagtc

SEQ ID NO: 380527 - DNA, 30 bp, Artificial Sequence
  Synthetic oligonucleotide
ccaagtcaggtttccctcgggtagagagtc

SEQ ID NO: 380528 - DNA, 30 bp, Artificial Sequence
  Synthetic oligonucleotide
gcgccgtccgtgactcgatcatggagagtc

SEQ ID NO: 380529 - DNA, 30 bp, Artificial Sequence
  Synthetic oligonucleotide
tgactaaaaagtgtcgccatgttgagagtc

SEQ ID NO: 380530 - DNA, 30 bp, Artificial Sequence
  Synthetic oligonucleotide
ggatcgttggcctcccccggcaatagagtc

SEQ ID NO: 380531 - DNA, 30 bp, Artificial Sequence
  Synthetic oligonucleotide
gttgcgggtctgggcctctcgcgacgagtc

SEQ ID NO: 380532 - DNA, 30 bp, Artificial Sequence
  Synthetic oligonucleotide
caccactcgcacgcgcaggggaagcgagtc

SEQ ID NO: 380533 - DNA, 30 bp, Artificial Sequence
  Synthetic oligonucleotide
gaaatttcaactcgctgaatgatgcgagtc

SEQ ID NO: 380534 - DNA, 30 bp, Artificial Sequence
  Synthetic oligonucleotide
ttcaccgactcagtggtccactctcgagtc

SEQ ID NO: 380535 - DNA, 30 bp, Artificial Sequence
  Synthetic oligonucleotide
gagtgtgcgaccacataaagtacgggagtc

SEQ ID NO: 380536 - DNA, 30 bp, Artificial Sequence
  Synthetic oligonucleotide
gtagaccctggtattccggatgcgggagtc

SEQ ID NO: 380537 - DNA, 30 bp, Artificial Sequence
  Synthetic oligonucleotide
caccggcacatagagggctcggggggagtc

SEQ ID NO: 380538 - DNA, 30 bp, Artificial Sequence
  Synthetic oligonucleotide
aatccatcatggtgacctgcagcatgagtc

SEQ ID NO: 380539 - DNA, 30 bp, Artificial Sequence
  Synthetic oligonucleotide
tccatgtgtggcggcctttttctatgagtc

SEQ ID NO: 380540 - DNA, 30 bp, Artificial Sequence
  Synthetic oligonucleotide
agttcttgagtctatatcgtcgtatgagtc

SEQ ID NO: 380541 - DNA, 30 bp, Artificial Sequence
  Synthetic oligonucleotide
tagagatgttgcagctcaacgttatgagtc

SEQ ID NO: 380542 - DNA, 30 bp, Artificial Sequence
  Synthetic oligonucleotide
gattgaagtatcgtcacccttgtctgagtc

SEQ ID NO: 380543 - DNA, 30 bp, Artificial Sequence
  Synthetic oligonucleotide
ccccaccagcagaggttttatttaatagtc

SEQ ID NO: 380544 - DNA, 30 bp, Artificial Sequence
  Synthetic oligonucleotide
gcttacgctcaatcataacactacatagtc

SEQ ID NO: 380545 - DNA, 30 bp, Artificial Sequence
  Synthetic oligonucleotide
cccgtccatcgttcttgtgatttcatagtc

SEQ ID NO: 380546 - DNA, 30 bp, Artificial Sequence
  Synthetic oligonucleotide
atgcatgctttaatgcatttcgtgatagtc

SEQ ID NO: 380547 - DNA, 30 bp, Artificial Sequence
  Synthetic oligonucleotide
ggaagattgagagactatttttttatagtc

SEQ ID NO: 380548 - DNA, 30 bp, Artificial Sequence
  Synthetic oligonucleotide
attctccacggtgctgaacgcgccctagtc

SEQ ID NO: 380549 - DNA, 30 bp, Artificial Sequence
  Synthetic oligonucleotide
attgccatctaatataatcagcggctagtc

SEQ ID NO: 380550 - DNA, 30 bp, Artificial Sequence
  Synthetic oligonucleotide
cttagggatttggataaccaatgtctagtc

SEQ ID NO: 380551 - DNA, 40 bp, Artificial Sequence
  Synthetic oligonucleotide
ttgaactctacagcactcgaatggttctctataagtagtc

SEQ ID NO: 380552 - DNA, 30 bp, Artificial Sequence
  Synthetic oligonucleotide
ttgctcatgagatgtccacatgcagtagtc

SEQ ID NO: 380553 - DNA, 30 bp, Artificial Sequence
  Synthetic oligonucleotide
cgtgtggggtttcaatgaatacccgtagtc

SEQ ID NO: 380554 - DNA, 30 bp, Artificial Sequence
  Synthetic oligonucleotide
gcttggttggcgaccccttagcaggtagtc

SEQ ID NO: 380555 - DNA, 30 bp, Artificial Sequence
  Synthetic oligonucleotide
gtgcatggcttttgtaccatagcggtagtc

SEQ ID NO: 380556 - DNA, 30 bp, Artificial Sequence
  Synthetic oligonucleotide
tccgtcctaggtcacgcgcggtcggtagtc

SEQ ID NO: 380557 - DNA, 30 bp, Artificial Sequence
  Synthetic oligonucleotide
taagggacggacacgtctataggggtagtc

SEQ ID NO: 380558 - DNA, 30 bp, Artificial Sequence
  Synthetic oligonucleotide
tacttcccccaagaaatgttatttgtagtc

SEQ ID NO: 380559 - DNA, 30 bp, Artificial Sequence
  Synthetic oligonucleotide
gctacggtgagatagaccctataattagtc

SEQ ID NO: 380560 - DNA, 30 bp, Artificial Sequence
  Synthetic oligonucleotide
aatttggggcaagcgatgcgccgattagtc

SEQ ID NO: 380561 - DNA, 30 bp, Artificial Sequence
  Synthetic oligonucleotide
agcacagttctcgagtcccgacacttagtc

SEQ ID NO: 380562 - DNA, 30 bp, Artificial Sequence
  Synthetic oligonucleotide
attctgatgcggtgtgaatgcgccttagtc

SEQ ID NO: 380563 - DNA, 30 bp, Artificial Sequence
  Synthetic oligonucleotide
cgtcgtgttctcccagccgcggtcttagtc

SEQ ID NO: 380564 - DNA, 30 bp, Artificial Sequence
  Synthetic oligonucleotide
gtagcctttaattgaaaagagagtttagtc

SEQ ID NO: 380565 - DNA, 30 bp, Artificial Sequence
  Synthetic oligonucleotide
actgtttctccagtaatttcgcttttagtc

SEQ ID NO: 380566 - DNA, 30 bp, Artificial Sequence
  Synthetic oligonucleotide
tcttcgcgataggtggcgaggagaaacgtc

SEQ ID NO: 380567 - DNA, 30 bp, Artificial Sequence
  Synthetic oligonucleotide
ttagccggcaacatcctgaacggaaacgtc

SEQ ID NO: 380568 - DNA, 30 bp, Artificial Sequence
  Synthetic oligonucleotide
tagagtggaactctagtgcatgtcaacgtc

SEQ ID NO: 380569 - DNA, 30 bp, Artificial Sequence
  Synthetic oligonucleotide
ccggactgtacaaaggagacttttaacgtc

SEQ ID NO: 380570 - DNA, 30 bp, Artificial Sequence
  Synthetic oligonucleotide
cgtcgagtatatgtgggcccctcacacgtc

SEQ ID NO: 380571 - DNA, 30 bp, Artificial Sequence
  Synthetic oligonucleotide
gtacctgtacaggacggaaatttacacgtc

SEQ ID NO: 380572 - DNA, 30 bp, Artificial Sequence
  Synthetic oligonucleotide
ttacgatggtgttaaaaacctgggcacgtc

SEQ ID NO: 380573 - DNA, 30 bp, Artificial Sequence
  Synthetic oligonucleotide
ctttatgccatcgccgcggtgagagacgtc

SEQ ID NO: 380574 - DNA, 30 bp, Artificial Sequence
  Synthetic oligonucleotide
ctggcctcgggcgagatccccggtgacgtc

SEQ ID NO: 380575 - DNA, 30 bp, Artificial Sequence
  Synthetic oligonucleotide
gtgaccgtatgtgacgtcgattgctacgtc

SEQ ID NO: 380576 - DNA, 30 bp, Artificial Sequence
  Synthetic oligonucleotide
agttaaacttgcgttacaatgaagtacgtc

SEQ ID NO: 380577 - DNA, 30 bp, Artificial Sequence
  Synthetic oligonucleotide
gattacctctgaaaactaggattgtacgtc

SEQ ID NO: 380578 - DNA, 30 bp, Artificial Sequence
  Synthetic oligonucleotide
catgtgtcggtagttcattccgccaccgtc

SEQ ID NO: 380579 - DNA, 30 bp, Artificial Sequence
  Synthetic oligonucleotide
gctctccacagggagcaatccctcaccgtc

SEQ ID NO: 380580 - DNA, 30 bp, Artificial Sequence
  Synthetic oligonucleotide
ggaccttacggggataggcttcataccgtc

SEQ ID NO: 380581 - DNA, 30 bp, Artificial Sequence
  Synthetic oligonucleotide
aataaggcagaatatgggttattgcccgtc

SEQ ID NO: 380582 - DNA, 30 bp, Artificial Sequence
  Synthetic oligonucleotide
atttaagctcactagcagagacaagccgtc

SEQ ID NO: 380583 - DNA, 30 bp, Artificial Sequence
  Synthetic oligonucleotide
ttcgtgttataactgccttcgttcgccgtc

SEQ ID NO: 380584 - DNA, 30 bp, Artificial Sequence
  Synthetic oligonucleotide
aacattaaggtattccattaaaaatccgtc

SEQ ID NO: 380585 - DNA, 30 bp, Artificial Sequence
  Synthetic oligonucleotide
ttcgcactaaatagctttcctttatccgtc

SEQ ID NO: 380586 - DNA, 30 bp, Artificial Sequence
  Synthetic oligonucleotide
ccagcacatcgtcgtataaaattaagcgtc

SEQ ID NO: 380587 - DNA, 30 bp, Artificial Sequence
  Synthetic oligonucleotide
taagtttggatcgatacgtaacacagcgtc

SEQ ID NO: 380588 - DNA, 30 bp, Artificial Sequence
  Synthetic oligonucleotide
ggctagataaaattcttacgccacagcgtc

SEQ ID NO: 380589 - DNA, 30 bp, Artificial Sequence
  Synthetic oligonucleotide
attctatcttagaccccccgccagagcgtc

SEQ ID NO: 380590 - DNA, 30 bp, Artificial Sequence
  Synthetic oligonucleotide
ggctttttggttaatgtcgcgcggagcgtc

SEQ ID NO: 380591 - DNA, 30 bp, Artificial Sequence
  Synthetic oligonucleotide
gttcggactacatccagattgcgtagcgtc

SEQ ID NO: 380592 - DNA, 30 bp, Artificial Sequence
  Synthetic oligonucleotide
ttcctcgcttaatcgtgatttattagcgtc

SEQ ID NO: 380593 - DNA, 30 bp, Artificial Sequence
  Synthetic oligonucleotide
tgtcatgagaagtgagacggctttagcgtc

SEQ ID NO: 380594 - DNA, 30 bp, Artificial Sequence
  Synthetic oligonucleotide
tgcagccaaagtttttggtaccaacgcgtc

SEQ ID NO: 380595 - DNA, 30 bp, Artificial Sequence
  Synthetic oligonucleotide
aaatgaacctgatttcactgctaacgcgtc

SEQ ID NO: 380596 - DNA, 30 bp, Artificial Sequence
  Synthetic oligonucleotide
cttttatataagcaacaacacacacgcgtc

SEQ ID NO: 380597 - DNA, 30 bp, Artificial Sequence
  Synthetic oligonucleotide
gccagatcgatggatgaacagatccgcgtc

SEQ ID NO: 380598 - DNA, 30 bp, Artificial Sequence
  Synthetic oligonucleotide
cccgttttgaaccggactactcagcgcgtc

SEQ ID NO: 380599 - DNA, 30 bp, Artificial Sequence
  Synthetic oligonucleotide
gcgaaatttgtccaggcttgatatcgcgtc

SEQ ID NO: 380600 - DNA, 30 bp, Artificial Sequence
  Synthetic oligonucleotide
tgtcatttgttggaatcgcgcggtcgcgtc

SEQ ID NO: 380601 - DNA, 30 bp, Artificial Sequence
  Synthetic oligonucleotide
gaatccccctattgctaaatggccggcgtc

SEQ ID NO: 380602 - DNA, 30 bp, Artificial Sequence
  Synthetic oligonucleotide
ctaactcagcaacccctcggcggcggcgtc

SEQ ID NO: 380603 - DNA, 29 bp, Artificial Sequence
  Synthetic oligonucleotide
tctacctttaggaaactacatgcggcgtc

SEQ ID NO: 380604 - DNA, 30 bp, Artificial Sequence
  Synthetic oligonucleotide
ctgtcgaactggtctagctctccgggcgtc

SEQ ID NO: 380605 - DNA, 30 bp, Artificial Sequence
  Synthetic oligonucleotide
gaccctacgccacgaatgggggatggcgtc

SEQ ID NO: 380606 - DNA, 30 bp, Artificial Sequence
  Synthetic oligonucleotide
gcccttgtaggggtggaagggtatggcgtc

SEQ ID NO: 380607 - DNA, 30 bp, Artificial Sequence
  Synthetic oligonucleotide
agattatattcggggacgttaggatgcgtc

SEQ ID NO: 380608 - DNA, 30 bp, Artificial Sequence
  Synthetic oligonucleotide
caagcctggcgagtagggatcatctgcgtc

SEQ ID NO: 380609 - DNA, 30 bp, Artificial Sequence
  Synthetic oligonucleotide
gtacagcgcattttgccttaaatttgcgtc

SEQ ID NO: 380610 - DNA, 30 bp, Artificial Sequence
  Synthetic oligonucleotide
atcctggacgagatattagatcaaatcgtc

SEQ ID NO: 380611 - DNA, 30 bp, Artificial Sequence
  Synthetic oligonucleotide
ggtctgcagggaactagttcgaacatcgtc

SEQ ID NO: 380612 - DNA, 30 bp, Artificial Sequence
  Synthetic oligonucleotide
agccagaaatctttccgtaattgactcgtc

SEQ ID NO: 380613 - DNA, 30 bp, Artificial Sequence
  Synthetic oligonucleotide
gtccaacaatatctttgtagatgcctcgtc

SEQ ID NO: 380614 - DNA, 30 bp, Artificial Sequence
  Synthetic oligonucleotide
ggggccagcgctataagcccttggctcgtc

SEQ ID NO: 380615 - DNA, 30 bp, Artificial Sequence
  Synthetic oligonucleotide
ccaaatgacggtgcattctctcaagtcgtc

SEQ ID NO: 380616 - DNA, 30 bp, Artificial Sequence
  Synthetic oligonucleotide
gacggagcactagtagtggcgatagtcgtc

SEQ ID NO: 380617 - DNA, 30 bp, Artificial Sequence
  Synthetic oligonucleotide
cgccgaacgccattcgaataaacggtcgtc

SEQ ID NO: 380618 - DNA, 30 bp, Artificial Sequence
  Synthetic oligonucleotide
accccgataatagtgtcgctcggggtcgtc

SEQ ID NO: 380619 - DNA, 30 bp, Artificial Sequence
  Synthetic oligonucleotide
gtcctgcctagtggaagatcctgggtcgtc

SEQ ID NO: 380620 - DNA, 30 bp, Artificial Sequence
  Synthetic oligonucleotide
gtctgcgaaagtcgccaggtgggtgtcgtc

SEQ ID NO: 380621 - DNA, 30 bp, Artificial Sequence
  Synthetic oligonucleotide
agttcatatcccctgagaatgcgattcgtc

SEQ ID NO: 380622 - DNA, 30 bp, Artificial Sequence
  Synthetic oligonucleotide
tcgaaaataggggaagtcacggggttcgtc

SEQ ID NO: 380623 - DNA, 30 bp, Artificial Sequence
  Synthetic oligonucleotide
aggctcctaaagtcatccagggctttcgtc

SEQ ID NO: 380624 - DNA, 30 bp, Artificial Sequence
  Synthetic oligonucleotide
gcggcccagtcatggtcgtttacaaaggtc

SEQ ID NO: 380625 - DNA, 30 bp, Artificial Sequence
  Synthetic oligonucleotide
aagctgtgagcagtatccggattcaaggtc

SEQ ID NO: 380626 - DNA, 30 bp, Artificial Sequence
  Synthetic oligonucleotide
gttagcattaagcaaccacagccacaggtc

SEQ ID NO: 380627 - DNA, 30 bp, Artificial Sequence
  Synthetic oligonucleotide
ctgacatactcattggagacctggcaggtc

SEQ ID NO: 380628 - DNA, 30 bp, Artificial Sequence
  Synthetic oligonucleotide
tcgacgcagagctcccctaatcgtcaggtc

SEQ ID NO: 380629 - DNA, 30 bp, Artificial Sequence
  Synthetic oligonucleotide
ggtggtattactcaagcggatgacgaggtc

SEQ ID NO: 380630 - DNA, 30 bp, Artificial Sequence
  Synthetic oligonucleotide
gtttctgacataaagactgtctaggaggtc

SEQ ID NO: 380631 - DNA, 30 bp, Artificial Sequence
  Synthetic oligonucleotide
tagtctacatttcgagaaatgtatgaggtc

SEQ ID NO: 380632 - DNA, 30 bp, Artificial Sequence
  Synthetic oligonucleotide
gagggatgcactggaagcgtggtataggtc

SEQ ID NO: 380633 - DNA, 30 bp, Artificial Sequence
  Synthetic oligonucleotide
agttatgaaaattaatgctttagctaggtc

SEQ ID NO: 380634 - DNA, 30 bp, Artificial Sequence
  Synthetic oligonucleotide
aacactaagttttagctgcaaggctaggtc

SEQ ID NO: 380635 - DNA, 30 bp, Artificial Sequence
  Synthetic oligonucleotide
tctcgttcggccaatggaagggggtaggtc

SEQ ID NO: 380636 - DNA, 30 bp, Artificial Sequence
  Synthetic oligonucleotide
gtggctacgctaacgtgattggcaacggtc

SEQ ID NO: 380637 - DNA, 31 bp, Artificial Sequence
  Synthetic oligonucleotide
ccgttaaagatatgtcacataatcaacggtc

SEQ ID NO: 380638 - DNA, 30 bp, Artificial Sequence
  Synthetic oligonucleotide
tgcgcacgctttgcgagggtgagaacggtc

SEQ ID NO: 380639 - DNA, 30 bp, Artificial Sequence
  Synthetic oligonucleotide
ttaaaatgcgtaacaatcgtccgcacggtc

SEQ ID NO: 380640 - DNA, 30 bp, Artificial Sequence
  Synthetic oligonucleotide
ttaatccttcttggggaaaatcgcacggtc

SEQ ID NO: 380641 - DNA, 30 bp, Artificial Sequence
  Synthetic oligonucleotide
tagcgacagcaaacctgttaggagacggtc

SEQ ID NO: 380642 - DNA, 30 bp, Artificial Sequence
  Synthetic oligonucleotide
acgaaatatcgtacttatggaaggacggtc

SEQ ID NO: 380643 - DNA, 30 bp, Artificial Sequence
  Synthetic oligonucleotide
tttcactataacgcttcgttatctacggtc

SEQ ID NO: 380644 - DNA, 30 bp, Artificial Sequence
  Synthetic oligonucleotide
tattttggtactttcagtgaagaaccggtc

SEQ ID NO: 380645 - DNA, 30 bp, Artificial Sequence
  Synthetic oligonucleotide
atcagaaggtgcgacgccacatcaccggtc

SEQ ID NO: 380646 - DNA, 30 bp, Artificial Sequence
  Synthetic oligonucleotide
cagccctgtcaggccgaatgttgaccggtc

SEQ ID NO: 380647 - DNA, 30 bp, Artificial Sequence
  Synthetic oligonucleotide
atgagtgtgtgcaaacgtttgaacccggtc

SEQ ID NO: 380648 - DNA, 30 bp, Artificial Sequence
  Synthetic oligonucleotide
atttataagtacgcattatcactcccggtc

SEQ ID NO: 380649 - DNA, 30 bp, Artificial Sequence
  Synthetic oligonucleotide
gaatacttgccgatgaggcaccatccggtc

SEQ ID NO: 380650 - DNA, 30 bp, Artificial Sequence
  Synthetic oligonucleotide
ctagcgaggcacccgcgacggtatccggtc

SEQ ID NO: 380651 - DNA, 30 bp, Artificial Sequence
  Synthetic oligonucleotide
gcagtctacagccaaattaattgtccggtc

SEQ ID NO: 380652 - DNA, 30 bp, Artificial Sequence
  Synthetic oligonucleotide
acgccagtcttggcaagcttggacgcggtc

SEQ ID NO: 380653 - DNA, 30 bp, Artificial Sequence
  Synthetic oligonucleotide
tcctctgctcaggagttgattgcatcggtc

SEQ ID NO: 380654 - DNA, 30 bp, Artificial Sequence
  Synthetic oligonucleotide
cacactctttgatcatcgcacctatcggtc

SEQ ID NO: 380655 - DNA, 30 bp, Artificial Sequence
  Synthetic oligonucleotide
cgtcgtgcaatcgtagaatcgaactcggtc

SEQ ID NO: 380656 - DNA, 30 bp, Artificial Sequence
  Synthetic oligonucleotide
gactctgacggaaacccaagctactcggtc

SEQ ID NO: 380657 - DNA, 30 bp, Artificial Sequence
  Synthetic oligonucleotide
tattcagtacagggctaagccaaaagggtc

SEQ ID NO: 380658 - DNA, 27 bp, Artificial Sequence
  Synthetic oligonucleotide
gtctgatgcctcgctcagagaagggtc

SEQ ID NO: 380659 - DNA, 30 bp, Artificial Sequence
  Synthetic oligonucleotide
ctaagaggtaaatttagttttggaagggtc

SEQ ID NO: 380660 - DNA, 30 bp, Artificial Sequence
  Synthetic oligonucleotide
actcgccagctccagaataggataagggtc

SEQ ID NO: 380661 - DNA, 30 bp, Artificial Sequence
  Synthetic oligonucleotide
agggctctgtcttaccaataacggagggtc

SEQ ID NO: 380662 - DNA, 30 bp, Artificial Sequence
  Synthetic oligonucleotide
taccctcaatttatcagtcacgtgagggtc

SEQ ID NO: 380663 - DNA, 30 bp, Artificial Sequence
  Synthetic oligonucleotide
ccggtggttggacttaatgtacaccgggtc

SEQ ID NO: 380664 - DNA, 30 bp, Artificial Sequence
  Synthetic oligonucleotide
tgaggaagatactagcgataaccccgggtc

SEQ ID NO: 380665 - DNA, 30 bp, Artificial Sequence
  Synthetic oligonucleotide
ggcccagggcgactactcaagccccgggtc

SEQ ID NO: 380666 - DNA, 30 bp, Artificial Sequence
  Synthetic oligonucleotide
ctgttgggcaccctgcacgtccctcgggtc

SEQ ID NO: 380667 - DNA, 30 bp, Artificial Sequence
  Synthetic oligonucleotide
aatgcgaacacctctgcatctcaaggggtc

SEQ ID NO: 380668 - DNA, 30 bp, Artificial Sequence
  Synthetic oligonucleotide
ggggctgtctggagttttccataaggggtc

SEQ ID NO: 380669 - DNA, 30 bp, Artificial Sequence
  Synthetic oligonucleotide
gcccaggagggctatgcgtgtggaggggtc

SEQ ID NO: 380670 - DNA, 30 bp, Artificial Sequence
  Synthetic oligonucleotide
ttcctgggtgatatgattccgcccggggtc

SEQ ID NO: 380671 - DNA, 30 bp, Artificial Sequence
  Synthetic oligonucleotide
gctcgtaattacaacgtaacctccggggtc

SEQ ID NO: 380672 - DNA, 30 bp, Artificial Sequence
  Synthetic oligonucleotide
ccttgcgttggctaaactaacgcgggggtc

SEQ ID NO: 380673 - DNA, 30 bp, Artificial Sequence
  Synthetic oligonucleotide
atcagacggtacgggttgggaaggggggtc

SEQ ID NO: 380674 - DNA, 30 bp, Artificial Sequence
  Synthetic oligonucleotide
tatatgggagttaagcgccacactggggtc

SEQ ID NO: 380675 - DNA, 30 bp, Artificial Sequence
  Synthetic oligonucleotide
gtcctggtataagaaattacaagtggggtc

SEQ ID NO: 380676 - DNA, 30 bp, Artificial Sequence
  Synthetic oligonucleotide
ttgtcagttatatgatgtataagtggggtc

SEQ ID NO: 380677 - DNA, 30 bp, Artificial Sequence
  Synthetic oligonucleotide
ccgttctgtgtgaatacaagagaatgggtc

SEQ ID NO: 380678 - DNA, 30 bp, Artificial Sequence
  Synthetic oligonucleotide
gttatcattgggtatcgacctgcatgggtc

SEQ ID NO: 380679 - DNA, 30 bp, Artificial Sequence
  Synthetic oligonucleotide
aacagacgggagggatcaggcccctgggtc

SEQ ID NO: 380680 - DNA, 30 bp, Artificial Sequence
  Synthetic oligonucleotide
tgagcatggtttttgtaggcgagctgggtc

SEQ ID NO: 380681 - DNA, 30 bp, Artificial Sequence
  Synthetic oligonucleotide
tacgggtgtattcagaccgattgctgggtc

SEQ ID NO: 380682 - DNA, 30 bp, Artificial Sequence
  Synthetic oligonucleotide
ggcggttatgtgcggtcagcgacgtgggtc

SEQ ID NO: 380683 - DNA, 30 bp, Artificial Sequence
  Synthetic oligonucleotide
atattcttcttacgtaaatcatattgggtc

SEQ ID NO: 380684 - DNA, 30 bp, Artificial Sequence
  Synthetic oligonucleotide
taggttatagggtatattatgtcttgggtc

SEQ ID NO: 380685 - DNA, 30 bp, Artificial Sequence
  Synthetic oligonucleotide
gaaaggtagaccggtgccacggtttgggtc

SEQ ID NO: 380686 - DNA, 30 bp, Artificial Sequence
  Synthetic oligonucleotide
ttgatcgccgggcctaatattgtttgggtc

SEQ ID NO: 380687 - DNA, 30 bp, Artificial Sequence
  Synthetic oligonucleotide
aatccgtgaaatagacaaattgcaatggtc

SEQ ID NO: 380688 - DNA, 30 bp, Artificial Sequence
  Synthetic oligonucleotide
tcgtgtttcgatgttcagaccagaatggtc

SEQ ID NO: 380689 - DNA, 30 bp, Artificial Sequence
  Synthetic oligonucleotide
cggtataaactaacgtaagcgctcatggtc

SEQ ID NO: 380690 - DNA, 30 bp, Artificial Sequence
  Synthetic oligonucleotide
gaaaaaacctcggggacttacaagatggtc

SEQ ID NO: 380691 - DNA, 30 bp, Artificial Sequence
  Synthetic oligonucleotide
gaccacaacgttaccgaatgggcgatggtc

SEQ ID NO: 380692 - DNA, 30 bp, Artificial Sequence
  Synthetic oligonucleotide
cttgataatacagaagtatggtcgatggtc

SEQ ID NO: 380693 - DNA, 30 bp, Artificial Sequence
  Synthetic oligonucleotide
tttggcctccaggaggcactgaggatggtc

SEQ ID NO: 380694 - DNA, 30 bp, Artificial Sequence
  Synthetic oligonucleotide
attaggcacggccaagcatctatgatggtc

SEQ ID NO: 380695 - DNA, 30 bp, Artificial Sequence
  Synthetic oligonucleotide
aaaagagattgactgagccgtctgatggtc

SEQ ID NO: 380696 - DNA, 30 bp, Artificial Sequence
  Synthetic oligonucleotide
gatcctcaacttgtttcttgcattatggtc

SEQ ID NO: 380697 - DNA, 30 bp, Artificial Sequence
  Synthetic oligonucleotide
gcaataataggcgccagttagcaactggtc

SEQ ID NO: 380698 - DNA, 30 bp, Artificial Sequence
  Synthetic oligonucleotide
tgttagtggataggaggagcttgactggtc

SEQ ID NO: 380699 - DNA, 30 bp, Artificial Sequence
  Synthetic oligonucleotide
ttaggcaggccatttataattgacctggtc

SEQ ID NO: 380700 - DNA, 30 bp, Artificial Sequence
  Synthetic oligonucleotide
tccagcttcccttgattctacgcgctggtc

SEQ ID NO: 380701 - DNA, 30 bp, Artificial Sequence
  Synthetic oligonucleotide
tcgccttagaggatcggtacacggctggtc

SEQ ID NO: 380702 - DNA, 30 bp, Artificial Sequence
  Synthetic oligonucleotide
gaagctgttgtagcgtccgaagggctggtc

SEQ ID NO: 380703 - DNA, 30 bp, Artificial Sequence
  Synthetic oligonucleotide
ctagccggcataccgacggtcacagtggtc

SEQ ID NO: 380704 - DNA, 30 bp, Artificial Sequence
  Synthetic oligonucleotide
cttttgcgaactatggttcggggagtggtc

SEQ ID NO: 380705 - DNA, 30 bp, Artificial Sequence
  Synthetic oligonucleotide
gcgttgcgcagaccaccctaccccgtggtc

SEQ ID NO: 380706 - DNA, 30 bp, Artificial Sequence
  Synthetic oligonucleotide
atcccttagtctatgcctgagggcgtggtc

SEQ ID NO: 380707 - DNA, 30 bp, Artificial Sequence
  Synthetic oligonucleotide
ggccgacagagaatcatcttatatgtggtc

SEQ ID NO: 380708 - DNA, 30 bp, Artificial Sequence
  Synthetic oligonucleotide
aagggaaccttaaaggggtgccgtgtggtc

SEQ ID NO: 380709 - DNA, 30 bp, Artificial Sequence
  Synthetic oligonucleotide
tcgttgaacgtccccggtatgtgtgtggtc

SEQ ID NO: 380710 - DNA, 30 bp, Artificial Sequence
  Synthetic oligonucleotide
gtaaggaagcaaagaccgcattttgtggtc

SEQ ID NO: 380711 - DNA, 30 bp, Artificial Sequence
  Synthetic oligonucleotide
ggaattgttatgaaggaaactaagttggtc

SEQ ID NO: 380712 - DNA, 30 bp, Artificial Sequence
  Synthetic oligonucleotide
gagttcatagcaacatggaaaaggttggtc

SEQ ID NO: 380713 - DNA, 30 bp, Artificial Sequence
  Synthetic oligonucleotide
aggagtccgcaacgaagacgtactttggtc

SEQ ID NO: 380714 - DNA, 30 bp, Artificial Sequence
  Synthetic oligonucleotide
ccacgcgacttggtaaggtcggctttggtc

SEQ ID NO: 380715 - DNA, 30 bp, Artificial Sequence
  Synthetic oligonucleotide
acgggtgcccgcaatgctacctttttggtc

SEQ ID NO: 380716 - DNA, 30 bp, Artificial Sequence
  Synthetic oligonucleotide
acgtttcagccggcccggtatcgaaatgtc

SEQ ID NO: 380717 - DNA, 30 bp, Artificial Sequence
  Synthetic oligonucleotide
ccatgttggagaaggagactcctaaatgtc

SEQ ID NO: 380718 - DNA, 30 bp, Artificial Sequence
  Synthetic oligonucleotide
acccgttattcaaaatattatcccaatgtc

SEQ ID NO: 380719 - DNA, 30 bp, Artificial Sequence
  Synthetic oligonucleotide
catctaattggttaaagcaaccagaatgtc

SEQ ID NO: 380720 - DNA, 30 bp, Artificial Sequence
  Synthetic oligonucleotide
ctatcaagggactcataccgcgagaatgtc

SEQ ID NO: 380721 - DNA, 30 bp, Artificial Sequence
  Synthetic oligonucleotide
atgtagaattggcactctgttaggaatgtc

SEQ ID NO: 380722 - DNA, 30 bp, Artificial Sequence
  Synthetic oligonucleotide
ggaggtgcctcggttgcggtgctgaatgtc

SEQ ID NO: 380723 - DNA, 30 bp, Artificial Sequence
  Synthetic oligonucleotide
gaaatgctaatgtgtcgtcaggctaatgtc

SEQ ID NO: 380724 - DNA, 30 bp, Artificial Sequence
  Synthetic oligonucleotide
gaacctgactcaaagcgggtcgcacatgtc

SEQ ID NO: 380725 - DNA, 30 bp, Artificial Sequence
  Synthetic oligonucleotide
atcaacggatttgtaaatgtgccccatgtc

SEQ ID NO: 380726 - DNA, 30 bp, Artificial Sequence
  Synthetic oligonucleotide
gtgctatgagatatgggatcgtcccatgtc

SEQ ID NO: 380727 - DNA, 30 bp, Artificial Sequence
  Synthetic oligonucleotide
ctctatcatgactaaaacttttatcatgtc

SEQ ID NO: 380728 - DNA, 30 bp, Artificial Sequence
  Synthetic oligonucleotide
cagacagatactggggtgcctgttcatgtc

SEQ ID NO: 380729 - DNA, 30 bp, Artificial Sequence
  Synthetic oligonucleotide
taaggtactttcgccctcctcggcgatgtc

SEQ ID NO: 380730 - DNA, 30 bp, Artificial Sequence
  Synthetic oligonucleotide
ggacgccagtcgtctacgtgaggggatgtc

SEQ ID NO: 380731 - DNA, 30 bp, Artificial Sequence
  Synthetic oligonucleotide
tagttctgcaggaagtattcgcatgatgtc

SEQ ID NO: 380732 - DNA, 30 bp, Artificial Sequence
  Synthetic oligonucleotide
tcgtgactcctacggcgcctctatgatgtc

SEQ ID NO: 380733 - DNA, 30 bp, Artificial Sequence
  Synthetic oligonucleotide
tcatttcgaaacggcatttagattgatgtc

SEQ ID NO: 380734 - DNA, 30 bp, Artificial Sequence
  Synthetic oligonucleotide
tagacgcggctaatatgaaagtttgatgtc

SEQ ID NO: 380735 - DNA, 30 bp, Artificial Sequence
  Synthetic oligonucleotide
ttcggctcaccgatagctatttaatatgtc

SEQ ID NO: 380736 - DNA, 30 bp, Artificial Sequence
  Synthetic oligonucleotide
tcctctcgcctcgcagaggagagatatgtc

SEQ ID NO: 380737 - DNA, 30 bp, Artificial Sequence
  Synthetic oligonucleotide
tatcaattcattaaacattggagctatgtc

SEQ ID NO: 380738 - DNA, 30 bp, Artificial Sequence
  Synthetic oligonucleotide
gcgagtccgataaccttcggtatctatgtc

SEQ ID NO: 380739 - DNA, 30 bp, Artificial Sequence
  Synthetic oligonucleotide
ctgtgcgcggtcaaaagttagtattatgtc

SEQ ID NO: 380740 - DNA, 30 bp, Artificial Sequence
  Synthetic oligonucleotide
ctcgacacagtatacaactaggtttatgtc

SEQ ID NO: 380741 - DNA, 30 bp, Artificial Sequence
  Synthetic oligonucleotide
tataagacacttgtgacactagtcactgtc

SEQ ID NO: 380742 - DNA, 30 bp, Artificial Sequence
  Synthetic oligonucleotide
catgtgcgattgtgatcagctctgactgtc

SEQ ID NO: 380743 - DNA, 30 bp, Artificial Sequence
  Synthetic oligonucleotide
tacccattccaatggtaacgctatcctgtc

SEQ ID NO: 380744 - DNA, 30 bp, Artificial Sequence
  Synthetic oligonucleotide
agctgaacctgcagactgcaatctcctgtc

SEQ ID NO: 380745 - DNA, 30 bp, Artificial Sequence
  Synthetic oligonucleotide
gacgcataccgaagaagaggcggagctgtc

SEQ ID NO: 380746 - DNA, 30 bp, Artificial Sequence
  Synthetic oligonucleotide
cttcgtcgaatctgtcaatgacacgctgtc

SEQ ID NO: 380747 - DNA, 30 bp, Artificial Sequence
  Synthetic oligonucleotide
ttaaccggatatcacggacttagggctgtc

SEQ ID NO: 380748 - DNA, 30 bp, Artificial Sequence
  Synthetic oligonucleotide
attccgattgcgaaattggcagatgctgtc

SEQ ID NO: 380749 - DNA, 30 bp, Artificial Sequence
  Synthetic oligonucleotide
ctacatgatacccgaggggtagtatctgtc

SEQ ID NO: 380750 - DNA, 30 bp, Artificial Sequence
  Synthetic oligonucleotide
gcagcatcccacggtacacaggcctctgtc

SEQ ID NO: 380751 - DNA, 30 bp, Artificial Sequence
  Synthetic oligonucleotide
cgtcggttttaattatgcgcatcgtctgtc

SEQ ID NO: 380752 - DNA, 31 bp, Artificial Sequence
  Synthetic oligonucleotide
tgtacaggttgatatactcttatggtctgtc

SEQ ID NO: 380753 - DNA, 30 bp, Artificial Sequence
  Synthetic oligonucleotide
ccctctggggctcgacctggaagaagtgtc

SEQ ID NO: 380754 - DNA, 30 bp, Artificial Sequence
  Synthetic oligonucleotide
ccacgttccttggtggcagtgggaagtgtc

SEQ ID NO: 380755 - DNA, 30 bp, Artificial Sequence
  Synthetic oligonucleotide
caatttagttgggatgaccataccagtgtc

SEQ ID NO: 380756 - DNA, 30 bp, Artificial Sequence
  Synthetic oligonucleotide
ggttgtaggggtctgtcggactgcagtgtc

SEQ ID NO: 380757 - DNA, 30 bp, Artificial Sequence
  Synthetic oligonucleotide
ggataaatttcggtgtaacgcacgagtgtc

SEQ ID NO: 380758 - DNA, 30 bp, Artificial Sequence
  Synthetic oligonucleotide
acccggtgtatccacgtatgacggagtgtc

SEQ ID NO: 380759 - DNA, 30 bp, Artificial Sequence
  Synthetic oligonucleotide
gttccagcttcgtaggtgatgaaacgtgtc

SEQ ID NO: 380760 - DNA, 30 bp, Artificial Sequence
  Synthetic oligonucleotide
tttaagaggaaattttagtacgcacgtgtc

SEQ ID NO: 380761 - DNA, 30 bp, Artificial Sequence
  Synthetic oligonucleotide
actccgctcgatggcggctgggcacgtgtc

SEQ ID NO: 380762 - DNA, 30 bp, Artificial Sequence
  Synthetic oligonucleotide
cagtatgcactcacgcttctgtcgcgtgtc

SEQ ID NO: 380763 - DNA, 30 bp, Artificial Sequence
  Synthetic oligonucleotide
attcatggatgagtatcaacttatcgtgtc

SEQ ID NO: 380764 - DNA, 30 bp, Artificial Sequence
  Synthetic oligonucleotide
tctgtccaccacgaagactcagctcgtgtc

SEQ ID NO: 380765 - DNA, 30 bp, Artificial Sequence
  Synthetic oligonucleotide
acagtacctgtggtacgcgcgtctcgtgtc

SEQ ID NO: 380766 - DNA, 30 bp, Artificial Sequence
  Synthetic oligonucleotide
tattggctgtcaatagttgtaggtcgtgtc

SEQ ID NO: 380767 - DNA, 30 bp, Artificial Sequence
  Synthetic oligonucleotide
gcgaccccgagcctcaccataatcggtgtc

SEQ ID NO: 380768 - DNA, 30 bp, Artificial Sequence
  Synthetic oligonucleotide
tgaattaaaatagtgtgggaaacgggtgtc

SEQ ID NO: 380769 - DNA, 30 bp, Artificial Sequence
  Synthetic oligonucleotide
ttccaaatacgtagattactggcgggtgtc

SEQ ID NO: 380770 - DNA, 30 bp, Artificial Sequence
  Synthetic oligonucleotide
aagcaggtcatgaactgcgggcttggtgtc

SEQ ID NO: 380771 - DNA, 30 bp, Artificial Sequence
  Synthetic oligonucleotide
acccttgacccagtactacaaacatgtgtc

SEQ ID NO: 380772 - DNA, 30 bp, Artificial Sequence
  Synthetic oligonucleotide
ccagttaatgttaaaattccaacatgtgtc

SEQ ID NO: 380773 - DNA, 30 bp, Artificial Sequence
  Synthetic oligonucleotide
cccccccgagcaaatgaggtacactgtgtc

SEQ ID NO: 380774 - DNA, 30 bp, Artificial Sequence
  Synthetic oligonucleotide
gtcgggtaacgctttacatccttgtgtgtc

SEQ ID NO: 380775 - DNA, 30 bp, Artificial Sequence
  Synthetic oligonucleotide
ttctgagaactgcgtgagggtaaaattgtc

SEQ ID NO: 380776 - DNA, 30 bp, Artificial Sequence
  Synthetic oligonucleotide
ggtaatattacaaccgtttgtcgaattgtc

SEQ ID NO: 380777 - DNA, 30 bp, Artificial Sequence
  Synthetic oligonucleotide
gggtggatcacaagaaggggcctcattgtc

SEQ ID NO: 380778 - DNA, 30 bp, Artificial Sequence
  Synthetic oligonucleotide
atacaagaattgaggcagagaaaacttgtc

SEQ ID NO: 380779 - DNA, 30 bp, Artificial Sequence
  Synthetic oligonucleotide
cgaaaggcacagtatggtcactagcttgtc

SEQ ID NO: 380780 - DNA, 30 bp, Artificial Sequence
  Synthetic oligonucleotide
ctaggaggtcctaggcgggggactcttgtc

SEQ ID NO: 380781 - DNA, 30 bp, Artificial Sequence
  Synthetic oligonucleotide
ctgagtagggatgagacaatcgaagttgtc

SEQ ID NO: 380782 - DNA, 30 bp, Artificial Sequence
  Synthetic oligonucleotide
acgacgacaacattacttgccatagttgtc

SEQ ID NO: 380783 - DNA, 30 bp, Artificial Sequence
  Synthetic oligonucleotide
ctttgcttgctactcgttgaccatgttgtc

SEQ ID NO: 380784 - DNA, 30 bp, Artificial Sequence
  Synthetic oligonucleotide
agttcgccccgaagcatcagatctgttgtc

SEQ ID NO: 380785 - DNA, 30 bp, Artificial Sequence
  Synthetic oligonucleotide
atagccgtagtaagtatgggtgttgttgtc

SEQ ID NO: 380786 - DNA, 30 bp, Artificial Sequence
  Synthetic oligonucleotide
aaattgatgggttactatttgaaatttgtc

SEQ ID NO: 380787 - DNA, 30 bp, Artificial Sequence
  Synthetic oligonucleotide
catcttcctgactgtgccacaacatttgtc

SEQ ID NO: 380788 - DNA, 30 bp, Artificial Sequence
  Synthetic oligonucleotide
tcatctacgccccatacatggctctttgtc

SEQ ID NO: 380789 - DNA, 30 bp, Artificial Sequence
  Synthetic oligonucleotide
attgaactggatgcatctacgcagtttgtc

SEQ ID NO: 380790 - DNA, 30 bp, Artificial Sequence
  Synthetic oligonucleotide
ccgggctggttggttattcgtaggtttgtc

SEQ ID NO: 380791 - DNA, 30 bp, Artificial Sequence
  Synthetic oligonucleotide
tgaaagattgggctgtccgactattttgtc

SEQ ID NO: 380792 - DNA, 30 bp, Artificial Sequence
  Synthetic oligonucleotide
tcaagttctacaagattagtcacttttgtc

SEQ ID NO: 380793 - DNA, 30 bp, Artificial Sequence
  Synthetic oligonucleotide
gctttgccgaactacttgtatatttttgtc

SEQ ID NO: 380794 - DNA, 30 bp, Artificial Sequence
  Synthetic oligonucleotide
gagctcgctaaggctcagcaacaaaaattc

SEQ ID NO: 380795 - DNA, 30 bp, Artificial Sequence
  Synthetic oligonucleotide
tgcgtagctcgcgatacacaggacaaattc

SEQ ID NO: 380796 - DNA, 30 bp, Artificial Sequence
  Synthetic oligonucleotide
acctttcttactaccttagcctccaaattc

SEQ ID NO: 380797 - DNA, 30 bp, Artificial Sequence
  Synthetic oligonucleotide
accacgctccttgaaaggagtatcaaattc

SEQ ID NO: 380798 - DNA, 30 bp, Artificial Sequence
  Synthetic oligonucleotide
gtatgttatttgcgtccattagtcaaattc

SEQ ID NO: 380799 - DNA, 30 bp, Artificial Sequence
  Synthetic oligonucleotide
agacaacattgacattgtatatagaaattc

SEQ ID NO: 380800 - DNA, 30 bp, Artificial Sequence
  Synthetic oligonucleotide
ctaagctaggatgcaattataccacaattc

SEQ ID NO: 380801 - DNA, 30 bp, Artificial Sequence
  Synthetic oligonucleotide
ttaatgaatccccctagttgggaccaattc

SEQ ID NO: 380802 - DNA, 30 bp, Artificial Sequence
  Synthetic oligonucleotide
aactagcttgggcggagtaagcagcaattc

SEQ ID NO: 380803 - DNA, 30 bp, Artificial Sequence
  Synthetic oligonucleotide
tgaactcttgcataggtctatccgcaattc

SEQ ID NO: 380804 - DNA, 30 bp, Artificial Sequence
  Synthetic oligonucleotide
cttaatcacatggcgcaagaggcagaattc

SEQ ID NO: 380805 - DNA, 30 bp, Artificial Sequence
  Synthetic oligonucleotide
tcagggtcatatagcaagttctcagaattc

SEQ ID NO: 380806 - DNA, 30 bp, Artificial Sequence
  Synthetic oligonucleotide
accggcaaatggcattgattcggagaattc

SEQ ID NO: 380807 - DNA, 30 bp, Artificial Sequence
  Synthetic oligonucleotide
acgtgattatctgctcttttgtgagaattc

SEQ ID NO: 380808 - DNA, 30 bp, Artificial Sequence
  Synthetic oligonucleotide
tctctgaaagtcaacacacaactcgaattc

SEQ ID NO: 380809 - DNA, 30 bp, Artificial Sequence
  Synthetic oligonucleotide
gtcattttcgtctcagataatggggaattc

SEQ ID NO: 380810 - DNA, 30 bp, Artificial Sequence
  Synthetic oligonucleotide
taagatcatgcagaggagcaaatggaattc

SEQ ID NO: 380811 - DNA, 30 bp, Artificial Sequence
  Synthetic oligonucleotide
cgttacttttggggggtttcggatgaattc

SEQ ID NO: 380812 - DNA, 30 bp, Artificial Sequence
  Synthetic oligonucleotide
gagacgacattaatatcgtatcctgaattc

SEQ ID NO: 380813 - DNA, 30 bp, Artificial Sequence
  Synthetic oligonucleotide
atggagagcacgttcattttggaataattc

SEQ ID NO: 380814 - DNA, 30 bp, Artificial Sequence
  Synthetic oligonucleotide
gcgcgttaggctatatagaagtaataattc

SEQ ID NO: 380815 - DNA, 30 bp, Artificial Sequence
  Synthetic oligonucleotide
acttcaaggtcgacaaaagtaatctaattc

SEQ ID NO: 380816 - DNA, 30 bp, Artificial Sequence
  Synthetic oligonucleotide
acctacaggctggcctatagtttctaattc

SEQ ID NO: 380817 - DNA, 30 bp, Artificial Sequence
  Synthetic oligonucleotide
taggttgggaaggatcggagccggtaattc

SEQ ID NO: 380818 - DNA, 30 bp, Artificial Sequence
  Synthetic oligonucleotide
agcagtgaaagcatccaacaggattaattc

SEQ ID NO: 380819 - DNA, 30 bp, Artificial Sequence
  Synthetic oligonucleotide
ccccaaccgagttgtataggtagttaattc

SEQ ID NO: 380820 - DNA, 30 bp, Artificial Sequence
  Synthetic oligonucleotide
aattgcctggtctggaccggtcaaacattc

SEQ ID NO: 380821 - DNA, 30 bp, Artificial Sequence
  Synthetic oligonucleotide
cggtgggaaacgatgatcttaacaacattc

SEQ ID NO: 380822 - DNA, 30 bp, Artificial Sequence
  Synthetic oligonucleotide
gagctcgaatctgtagtatgcgcaacattc

SEQ ID NO: 380823 - DNA, 30 bp, Artificial Sequence
  Synthetic oligonucleotide
gttctacgagagtgctattcggtaacattc

SEQ ID NO: 380824 - DNA, 30 bp, Artificial Sequence
  Synthetic oligonucleotide
tgaaggtccccgttgacgccgcacacattc

SEQ ID NO: 380825 - DNA, 30 bp, Artificial Sequence
  Synthetic oligonucleotide
cagttaactaagggtgtacgtagcacattc

SEQ ID NO: 380826 - DNA, 30 bp, Artificial Sequence
  Synthetic oligonucleotide
agtcaataatctccgggtgggctcacattc

SEQ ID NO: 380827 - DNA, 30 bp, Artificial Sequence
  Synthetic oligonucleotide
agtcgtaaaattacgggtgattagacattc

SEQ ID NO: 380828 - DNA, 30 bp, Artificial Sequence
  Synthetic oligonucleotide
gcaagccaagaaatgcattaccatacattc

SEQ ID NO: 380829 - DNA, 30 bp, Artificial Sequence
  Synthetic oligonucleotide
actatgtcgggtgcgactgttgtaccattc

SEQ ID NO: 380830 - DNA, 30 bp, Artificial Sequence
  Synthetic oligonucleotide
gtaaaagagaatttcttttctggtccattc

SEQ ID NO: 380831 - DNA, 30 bp, Artificial Sequence
  Synthetic oligonucleotide
caatgcagggcgttgcagaaacaagcattc

SEQ ID NO: 380832 - DNA, 30 bp, Artificial Sequence
  Synthetic oligonucleotide
cctctgacatgacaggttagacaagcattc

SEQ ID NO: 380833 - DNA, 30 bp, Artificial Sequence
  Synthetic oligonucleotide
atcacagattttgcggccgggggcgcattc

SEQ ID NO: 380834 - DNA, 30 bp, Artificial Sequence
  Synthetic oligonucleotide
gttaatgagtcacatcggtctggggcattc

SEQ ID NO: 380835 - DNA, 30 bp, Artificial Sequence
  Synthetic oligonucleotide
ataagtgcttgcggctacagactggcattc

SEQ ID NO: 380836 - DNA, 30 bp, Artificial Sequence
  Synthetic oligonucleotide
tttccccataacaaattttttgaatcattc

SEQ ID NO: 380837 - DNA, 30 bp, Artificial Sequence
  Synthetic oligonucleotide
acgggcgcgccccggcccggactatcattc

SEQ ID NO: 380838 - DNA, 30 bp, Artificial Sequence
  Synthetic oligonucleotide
gcggcttgtaggatcgtgacttcctcattc

SEQ ID NO: 380839 - DNA, 30 bp, Artificial Sequence
  Synthetic oligonucleotide
gttttagggcaaatcggaccaaagtcattc

SEQ ID NO: 380840 - DNA, 30 bp, Artificial Sequence
  Synthetic oligonucleotide
atagctaagtttttgaataaccagtcattc

SEQ ID NO: 380841 - DNA, 30 bp, Artificial Sequence
  Synthetic oligonucleotide
ccatctgtaagattacatacgacttcattc

SEQ ID NO: 380842 - DNA, 30 bp, Artificial Sequence
  Synthetic oligonucleotide
gaagacaaaaggttgtacgatatttcattc

SEQ ID NO: 380843 - DNA, 30 bp, Artificial Sequence
  Synthetic oligonucleotide
gtggtaagacaactgtcggacaaaagattc

SEQ ID NO: 380844 - DNA, 30 bp, Artificial Sequence
  Synthetic oligonucleotide
gggagtccgatgatttgcacgccaagattc

SEQ ID NO: 380845 - DNA, 30 bp, Artificial Sequence
  Synthetic oligonucleotide
gggattaaatatccggttattttaagattc

SEQ ID NO: 380846 - DNA, 30 bp, Artificial Sequence
  Synthetic oligonucleotide
caataccctctcgtaaccacacccagattc

SEQ ID NO: 380847 - DNA, 30 bp, Artificial Sequence
  Synthetic oligonucleotide
catgggcgagtatgtcttgccccgagattc

SEQ ID NO: 380848 - DNA, 30 bp, Artificial Sequence
  Synthetic oligonucleotide
gatatatagcagctgtattatactagattc

SEQ ID NO: 380849 - DNA, 30 bp, Artificial Sequence
  Synthetic oligonucleotide
gcgggcgtggtggttcagtagtttagattc

SEQ ID NO: 380850 - DNA, 30 bp, Artificial Sequence
  Synthetic oligonucleotide
tggcgttagcaccctgatggggtccgattc

SEQ ID NO: 380851 - DNA, 30 bp, Artificial Sequence
  Synthetic oligonucleotide
catcgtgtattcaaagacacgatgcgattc

SEQ ID NO: 380852 - DNA, 30 bp, Artificial Sequence
  Synthetic oligonucleotide
tggccgtagaggagtaggtgggatcgattc

SEQ ID NO: 380853 - DNA, 30 bp, Artificial Sequence
  Synthetic oligonucleotide
caaattaaggtgggagcgctttatcgattc

SEQ ID NO: 380854 - DNA, 30 bp, Artificial Sequence
  Synthetic oligonucleotide
gccttaggaggtgtctcaccgagtcgattc

SEQ ID NO: 380855 - DNA, 30 bp, Artificial Sequence
  Synthetic oligonucleotide
cggttcagaacttatgctcagggaggattc

SEQ ID NO: 380856 - DNA, 30 bp, Artificial Sequence
  Synthetic oligonucleotide
gactctgaggagtactattaagggggattc

SEQ ID NO: 380857 - DNA, 30 bp, Artificial Sequence
  Synthetic oligonucleotide
aactaaatttgacttatattgtatggattc

SEQ ID NO: 380858 - DNA, 30 bp, Artificial Sequence
  Synthetic oligonucleotide
gaaggacaacgatgtattcttttatgattc

SEQ ID NO: 380859 - DNA, 30 bp, Artificial Sequence
  Synthetic oligonucleotide
aatagcggtattggcctgcgacactgattc

SEQ ID NO: 380860 - DNA, 30 bp, Artificial Sequence
  Synthetic oligonucleotide
ctatttacttgccaatcttattcgtgattc

SEQ ID NO: 380861 - DNA, 30 bp, Artificial Sequence
  Synthetic oligonucleotide
ggccaactattctgttctcaattgtgattc

SEQ ID NO: 380862 - DNA, 29 bp, Artificial Sequence
  Synthetic oligonucleotide
cagttcgtagttatcccagggattgattc

SEQ ID NO: 380863 - DNA, 30 bp, Artificial Sequence
  Synthetic oligonucleotide
tcttcctgatgtccaaacgactattgattc

SEQ ID NO: 380864 - DNA, 30 bp, Artificial Sequence
  Synthetic oligonucleotide
agtcttaagacgttcctccattattgattc

SEQ ID NO: 380865 - DNA, 30 bp, Artificial Sequence
  Synthetic oligonucleotide
ttcgagatgtgactgagtgagttcatattc

SEQ ID NO: 380866 - DNA, 30 bp, Artificial Sequence
  Synthetic oligonucleotide
ggtagcggcgtatttgttgagccgatattc

SEQ ID NO: 380867 - DNA, 30 bp, Artificial Sequence
  Synthetic oligonucleotide
ggagccggggttttcatgttcgggatattc

SEQ ID NO: 380868 - DNA, 30 bp, Artificial Sequence
  Synthetic oligonucleotide
gcatatatggcaactcaataaaatatattc

SEQ ID NO: 380869 - DNA, 30 bp, Artificial Sequence
  Synthetic oligonucleotide
taaaggacgataaggatgggacaactattc

SEQ ID NO: 380870 - DNA, 30 bp, Artificial Sequence
  Synthetic oligonucleotide
gttcgagactaaaattttgaagaactattc

SEQ ID NO: 380871 - DNA, 30 bp, Artificial Sequence
  Synthetic oligonucleotide
gccgcgaccgtaggatataacacactattc

SEQ ID NO: 380872 - DNA, 30 bp, Artificial Sequence
  Synthetic oligonucleotide
tggttctcccatcacaatgctagactattc

SEQ ID NO: 380873 - DNA, 30 bp, Artificial Sequence
  Synthetic oligonucleotide
gatcgcggactcatttgccgtggactattc

SEQ ID NO: 380874 - DNA, 30 bp, Artificial Sequence
  Synthetic oligonucleotide
gtcgggtcttgagtttaggaatgactattc

SEQ ID NO: 380875 - DNA, 30 bp, Artificial Sequence
  Synthetic oligonucleotide
gctgtacagcgcttagtatctctcctattc

SEQ ID NO: 380876 - DNA, 30 bp, Artificial Sequence
  Synthetic oligonucleotide
atattctatttagggtagtgctggctattc

SEQ ID NO: 380877 - DNA, 30 bp, Artificial Sequence
  Synthetic oligonucleotide
gaagatatacgcatagggaaacatctattc

SEQ ID NO: 380878 - DNA, 30 bp, Artificial Sequence
  Synthetic oligonucleotide
tgcagaaatgactcgtctaatagtctattc

SEQ ID NO: 380879 - DNA, 31 bp, Artificial Sequence
  Synthetic oligonucleotide
acagtgactttcggcaaagaggtgtctattc

SEQ ID NO: 380880 - DNA, 30 bp, Artificial Sequence
  Synthetic oligonucleotide
ataaaattggaatctactgagattctattc

SEQ ID NO: 380881 - DNA, 30 bp, Artificial Sequence
  Synthetic oligonucleotide
tgcggctaaattcatgatagatttctattc

SEQ ID NO: 380882 - DNA, 30 bp, Artificial Sequence
  Synthetic oligonucleotide
caagggtgatttactagccgctgagtattc

SEQ ID NO: 380883 - DNA, 30 bp, Artificial Sequence
  Synthetic oligonucleotide
gacggttgattctattcgacagcggtattc

SEQ ID NO: 380884 - DNA, 30 bp, Artificial Sequence
  Synthetic oligonucleotide
ctgattattccattcaatgattcggtattc

SEQ ID NO: 380885 - DNA, 30 bp, Artificial Sequence
  Synthetic oligonucleotide
ggggtatcccgggtgatacagtgggtattc

SEQ ID NO: 380886 - DNA, 30 bp, Artificial Sequence
  Synthetic oligonucleotide
gagcgcttaatagccacatcacctgtattc

SEQ ID NO: 380887 - DNA, 30 bp, Artificial Sequence
  Synthetic oligonucleotide
acacggagaccggactcagtggctgtattc

SEQ ID NO: 380888 - DNA, 30 bp, Artificial Sequence
  Synthetic oligonucleotide
agagctcatagcacagaacgctcattattc

SEQ ID NO: 380889 - DNA, 30 bp, Artificial Sequence
  Synthetic oligonucleotide
aatataaggcataaatgagggttattattc

SEQ ID NO: 380890 - DNA, 30 bp, Artificial Sequence
  Synthetic oligonucleotide
aacgaatcagtgtcccacagtacgttattc

SEQ ID NO: 380891 - DNA, 30 bp, Artificial Sequence
  Synthetic oligonucleotide
tagttagtgaaaagaatgaaatggttattc

SEQ ID NO: 380892 - DNA, 30 bp, Artificial Sequence
  Synthetic oligonucleotide
aactggtcgtctcttacaacgaatttattc

SEQ ID NO: 380893 - DNA, 30 bp, Artificial Sequence
  Synthetic oligonucleotide
agaagctgggggctctactggcatttattc

SEQ ID NO: 380894 - DNA, 30 bp, Artificial Sequence
  Synthetic oligonucleotide
gcagctatcaggttgtgttcctttttattc

SEQ ID NO: 380895 - DNA, 30 bp, Artificial Sequence
  Synthetic oligonucleotide
tctagagccggcacaatggtaacaaacttc

SEQ ID NO: 380896 - DNA, 30 bp, Artificial Sequence
  Synthetic oligonucleotide
caccgtgccaagttagccttaccaaacttc

SEQ ID NO: 380897 - DNA, 30 bp, Artificial Sequence
  Synthetic oligonucleotide
ggaagttttgaacggattaattgaaacttc

SEQ ID NO: 380898 - DNA, 30 bp, Artificial Sequence
  Synthetic oligonucleotide
gcgggtgaccatgcatcctatataaacttc

SEQ ID NO: 380899 - DNA, 30 bp, Artificial Sequence
  Synthetic oligonucleotide
ccagtggtccagtggattgccgtaaacttc

SEQ ID NO: 380900 - DNA, 30 bp, Artificial Sequence
  Synthetic oligonucleotide
gcaggaatttatataattttagataacttc

SEQ ID NO: 380901 - DNA, 30 bp, Artificial Sequence
  Synthetic oligonucleotide
agcgtgccaaacgggcacacatataacttc

SEQ ID NO: 380902 - DNA, 30 bp, Artificial Sequence
  Synthetic oligonucleotide
atggcttaccgtacccccgcctataacttc

SEQ ID NO: 380903 - DNA, 30 bp, Artificial Sequence
  Synthetic oligonucleotide
agtataaccagcacttgccagcttaacttc

SEQ ID NO: 380904 - DNA, 30 bp, Artificial Sequence
  Synthetic oligonucleotide
attatcggcgcaaattagataagacacttc

SEQ ID NO: 380905 - DNA, 30 bp, Artificial Sequence
  Synthetic oligonucleotide
agtaggctggccaagcttactccccacttc

SEQ ID NO: 380906 - DNA, 30 bp, Artificial Sequence
  Synthetic oligonucleotide
caacctgtccagactgatggggcccacttc

SEQ ID NO: 380907 - DNA, 30 bp, Artificial Sequence
  Synthetic oligonucleotide
tgcttgaggcatgcacgtagctgccacttc

SEQ ID NO: 380908 - DNA, 30 bp, Artificial Sequence
  Synthetic oligonucleotide
gccagctcggtatataatgatgcgcacttc

SEQ ID NO: 380909 - DNA, 30 bp, Artificial Sequence
  Synthetic oligonucleotide
cgggattcttatatatgggtgcggcacttc

SEQ ID NO: 380910 - DNA, 30 bp, Artificial Sequence
  Synthetic oligonucleotide
ccgctagaccgagatacatgcactcacttc

SEQ ID NO: 380911 - DNA, 30 bp, Artificial Sequence
  Synthetic oligonucleotide
ctagttacaggacgcacgctacaagacttc

SEQ ID NO: 380912 - DNA, 30 bp, Artificial Sequence
  Synthetic oligonucleotide
cctattagtgttgtaagaagactagacttc

SEQ ID NO: 380913 - DNA, 30 bp, Artificial Sequence
  Synthetic oligonucleotide
atattattattcgggacactacaggacttc

SEQ ID NO: 380914 - DNA, 30 bp, Artificial Sequence
  Synthetic oligonucleotide
ccatatggtcggcaccgcatggcggacttc

SEQ ID NO: 380915 - DNA, 30 bp, Artificial Sequence
  Synthetic oligonucleotide
ttggaataatgagggcgctcacgggacttc

SEQ ID NO: 380916 - DNA, 30 bp, Artificial Sequence
  Synthetic oligonucleotide
gaatgggaggggacgtgatatctggacttc

SEQ ID NO: 380917 - DNA, 30 bp, Artificial Sequence
  Synthetic oligonucleotide
gcttccatgtgaaaccctgccatctacttc

SEQ ID NO: 380918 - DNA, 30 bp, Artificial Sequence
  Synthetic oligonucleotide
actcggtgaagaggcttagagaggtacttc

SEQ ID NO: 380919 - DNA, 30 bp, Artificial Sequence
  Synthetic oligonucleotide
cggagctttaacctgttggtactgtacttc

SEQ ID NO: 380920 - DNA, 30 bp, Artificial Sequence
  Synthetic oligonucleotide
tatttctgagttccagattttcgttacttc

SEQ ID NO: 380921 - DNA, 30 bp, Artificial Sequence
  Synthetic oligonucleotide
gcatttgttacaagttatagaatttacttc

SEQ ID NO: 380922 - DNA, 30 bp, Artificial Sequence
  Synthetic oligonucleotide
tattgccataaagaaaaggcgctttacttc

SEQ ID NO: 380923 - DNA, 30 bp, Artificial Sequence
  Synthetic oligonucleotide
agtgctggtataccgttcttacaaaccttc

SEQ ID NO: 380924 - DNA, 30 bp, Artificial Sequence
  Synthetic oligonucleotide
gacacttaggtcggattgttaccgaccttc

SEQ ID NO: 380925 - DNA, 30 bp, Artificial Sequence
  Synthetic oligonucleotide
gacggctttgctcactcggcagggaccttc

SEQ ID NO: 380926 - DNA, 30 bp, Artificial Sequence
  Synthetic oligonucleotide
tgtctaacactattagtcatcattaccttc

SEQ ID NO: 380927 - DNA, 30 bp, Artificial Sequence
  Synthetic oligonucleotide
gagtatatccatcaaatatgcgaccccttc

SEQ ID NO: 380928 - DNA, 30 bp, Artificial Sequence
  Synthetic oligonucleotide
gccgggaatggtcaaattcatcgccccttc

SEQ ID NO: 380929 - DNA, 30 bp, Artificial Sequence
  Synthetic oligonucleotide
tccttttcttcgagtagaaagctccccttc

SEQ ID NO: 380930 - DNA, 30 bp, Artificial Sequence
  Synthetic oligonucleotide
tcactgttatcatgcggtaagtcgcccttc

SEQ ID NO: 380931 - DNA, 30 bp, Artificial Sequence
  Synthetic oligonucleotide
gcagagctccccatactgacgtatcccttc

SEQ ID NO: 380932 - DNA, 30 bp, Artificial Sequence
  Synthetic oligonucleotide
acggtccatcacatagtcgtgggtcccttc

SEQ ID NO: 380933 - DNA, 30 bp, Artificial Sequence
  Synthetic oligonucleotide
tgtagccaggttcgtcacatggaagccttc

SEQ ID NO: 380934 - DNA, 30 bp, Artificial Sequence
  Synthetic oligonucleotide
catatgtgtgttaatctgacttcagccttc

SEQ ID NO: 380935 - DNA, 30 bp, Artificial Sequence
  Synthetic oligonucleotide
gctccgcaaaatacattgcgtgtggccttc

SEQ ID NO: 380936 - DNA, 30 bp, Artificial Sequence
  Synthetic oligonucleotide
aaggtgtattgagtgcatttaagatccttc

SEQ ID NO: 380937 - DNA, 31 bp, Artificial Sequence
  Synthetic oligonucleotide
gctggcataagcgatactggctatatccttc

SEQ ID NO: 380938 - DNA, 30 bp, Artificial Sequence
  Synthetic oligonucleotide
ccttaagtaccactgccagcacgttccttc

SEQ ID NO: 380939 - DNA, 29 bp, Artificial Sequence
  Synthetic oligonucleotide
tataaggttcgcgtcccagtagaagcttc

SEQ ID NO: 380940 - DNA, 30 bp, Artificial Sequence
  Synthetic oligonucleotide
gaccacacactggtgaaagctttaagcttc

SEQ ID NO: 380941 - DNA, 30 bp, Artificial Sequence
  Synthetic oligonucleotide
gttcaagtgcattcgcgcagtgtcagcttc

SEQ ID NO: 380942 - DNA, 30 bp, Artificial Sequence
  Synthetic oligonucleotide
tgttgcttggcatacacccagtggagcttc

SEQ ID NO: 380943 - DNA, 30 bp, Artificial Sequence
  Synthetic oligonucleotide
agatctggaccacttccagtggctagcttc

SEQ ID NO: 380944 - DNA, 30 bp, Artificial Sequence
  Synthetic oligonucleotide
tgcttgctcgtcctagtcgttagccgcttc

SEQ ID NO: 380945 - DNA, 30 bp, Artificial Sequence
  Synthetic oligonucleotide
tgtagtgcgaaataagcggctatccgcttc

SEQ ID NO: 380946 - DNA, 30 bp, Artificial Sequence
  Synthetic oligonucleotide
cccaccctggagtgcgagttattccgcttc

SEQ ID NO: 380947 - DNA, 30 bp, Artificial Sequence
  Synthetic oligonucleotide
accctcgtggtaacacaagtgcgtcgcttc

SEQ ID NO: 380948 - DNA, 30 bp, Artificial Sequence
  Synthetic oligonucleotide
atgtaataagccacaagtatcaaaggcttc

SEQ ID NO: 380949 - DNA, 30 bp, Artificial Sequence
  Synthetic oligonucleotide
tgaccttatcgacggcacggaaccggcttc

SEQ ID NO: 380950 - DNA, 30 bp, Artificial Sequence
  Synthetic oligonucleotide
tagaaagggacaggtatgtctgagggcttc

SEQ ID NO: 380951 - DNA, 30 bp, Artificial Sequence
  Synthetic oligonucleotide
atttatgccttgggagatgactagggcttc

SEQ ID NO: 380952 - DNA, 30 bp, Artificial Sequence
  Synthetic oligonucleotide
tatatcctctaggatcaagattagggcttc

SEQ ID NO: 380953 - DNA, 29 bp, Artificial Sequence
  Synthetic oligonucleotide
gaaaaactcccggaagtcacatgggcttc

SEQ ID NO: 380954 - DNA, 30 bp, Artificial Sequence
  Synthetic oligonucleotide
taaagaacagtgcactattgcgttggcttc

SEQ ID NO: 380955 - DNA, 30 bp, Artificial Sequence
  Synthetic oligonucleotide
tggctagcccaagccgccacctaatgcttc

SEQ ID NO: 380956 - DNA, 30 bp, Artificial Sequence
  Synthetic oligonucleotide
tgtatttgtctagttcttcccaattgcttc

SEQ ID NO: 380957 - DNA, 30 bp, Artificial Sequence
  Synthetic oligonucleotide
agtgatatagcagcgtatacaatttgcttc

SEQ ID NO: 380958 - DNA, 30 bp, Artificial Sequence
  Synthetic oligonucleotide
gtcgctagttgattctcttagctttgcttc

SEQ ID NO: 380959 - DNA, 30 bp, Artificial Sequence
  Synthetic oligonucleotide
ggcgaggatcttattcccagacaaatcttc

SEQ ID NO: 380960 - DNA, 30 bp, Artificial Sequence
  Synthetic oligonucleotide
cgtactaactgtagatggttagccatcttc

SEQ ID NO: 380961 - DNA, 30 bp, Artificial Sequence
  Synthetic oligonucleotide
tttaggaacgcagggtatggctgcatcttc

SEQ ID NO: 380962 - DNA, 30 bp, Artificial Sequence
  Synthetic oligonucleotide
cctggacagaagaaggttccgctcatcttc

SEQ ID NO: 380963 - DNA, 30 bp, Artificial Sequence
  Synthetic oligonucleotide
aacaggttcattgatggatgctggatcttc

SEQ ID NO: 380964 - DNA, 30 bp, Artificial Sequence
  Synthetic oligonucleotide
aatacatggggagggtcttagtatatcttc

SEQ ID NO: 380965 - DNA, 30 bp, Artificial Sequence
  Synthetic oligonucleotide
cgtacccagaattaatatagacgtatcttc

SEQ ID NO: 380966 - DNA, 30 bp, Artificial Sequence
  Synthetic oligonucleotide
attcgcgtgcaagagcctacggagctcttc

SEQ ID NO: 380967 - DNA, 30 bp, Artificial Sequence
  Synthetic oligonucleotide
atactcctactcatactataaacgctcttc

SEQ ID NO: 380968 - DNA, 30 bp, Artificial Sequence
  Synthetic oligonucleotide
accgccctaggcctcatgcggaaagtcttc

SEQ ID NO: 380969 - DNA, 30 bp, Artificial Sequence
  Synthetic oligonucleotide
gtgtgcacaggcccagttgaacacgtcttc

SEQ ID NO: 380970 - DNA, 30 bp, Artificial Sequence
  Synthetic oligonucleotide
cacttgcggcccgctgagagggacgtcttc

SEQ ID NO: 380971 - DNA, 30 bp, Artificial Sequence
  Synthetic oligonucleotide
agaaatatcggtgcttcttggcaggtcttc

SEQ ID NO: 380972 - DNA, 30 bp, Artificial Sequence
  Synthetic oligonucleotide
cggatagattttctacgagagtgtgtcttc

SEQ ID NO: 380973 - DNA, 30 bp, Artificial Sequence
  Synthetic oligonucleotide
tactgaattccacacacaattgttgtcttc

SEQ ID NO: 380974 - DNA, 30 bp, Artificial Sequence
  Synthetic oligonucleotide
ctatcgctctcggtttattttgcattcttc

SEQ ID NO: 380975 - DNA, 30 bp, Artificial Sequence
  Synthetic oligonucleotide
cagaggtgtgacgcggatgtcgtattcttc

SEQ ID NO: 380976 - DNA, 30 bp, Artificial Sequence
  Synthetic oligonucleotide
catcttcactaaagcgcggtattgttcttc

SEQ ID NO: 380977 - DNA, 30 bp, Artificial Sequence
  Synthetic oligonucleotide
ttatggtgcgcacacagtgtccctttcttc

SEQ ID NO: 380978 - DNA, 30 bp, Artificial Sequence
  Synthetic oligonucleotide
tcggagctcccgttggatctccgtttcttc

SEQ ID NO: 380979 - DNA, 30 bp, Artificial Sequence
  Synthetic oligonucleotide
gcccacgagagtaagggatagcttttcttc

SEQ ID NO: 380980 - DNA, 30 bp, Artificial Sequence
  Synthetic oligonucleotide
caccggtacgacggtcggttgtttttcttc

SEQ ID NO: 380981 - DNA, 30 bp, Artificial Sequence
  Synthetic oligonucleotide
cacgagccttgtgccgtttaggtaaagttc

SEQ ID NO: 380982 - DNA, 30 bp, Artificial Sequence
  Synthetic oligonucleotide
tgaagttagtatttggcggttacgaagttc

SEQ ID NO: 380983 - DNA, 30 bp, Artificial Sequence
  Synthetic oligonucleotide
tatcggaactgaactggttctaataagttc

SEQ ID NO: 380984 - DNA, 30 bp, Artificial Sequence
  Synthetic oligonucleotide
ggggcggtaggtggtcttttatataagttc

SEQ ID NO: 380985 - DNA, 30 bp, Artificial Sequence
  Synthetic oligonucleotide
cttaggtatcagtttggaaggagtaagttc

SEQ ID NO: 380986 - DNA, 30 bp, Artificial Sequence
  Synthetic oligonucleotide
ttcaaatgaagatgatttaggggtaagttc

SEQ ID NO: 380987 - DNA, 30 bp, Artificial Sequence
  Synthetic oligonucleotide
gaaatgtgatctactcagctgggtaagttc

SEQ ID NO: 380988 - DNA, 30 bp, Artificial Sequence
  Synthetic oligonucleotide
taacgcattatagaggtgtaaacccagttc

SEQ ID NO: 380989 - DNA, 30 bp, Artificial Sequence
  Synthetic oligonucleotide
gcgaccgaggggctttgaccaccccagttc

SEQ ID NO: 380990 - DNA, 30 bp, Artificial Sequence
  Synthetic oligonucleotide
tccattgcgtagtaagcaggaaatcagttc

SEQ ID NO: 380991 - DNA, 30 bp, Artificial Sequence
  Synthetic oligonucleotide
gcgtataagatgtaaagttgttttcagttc

SEQ ID NO: 380992 - DNA, 30 bp, Artificial Sequence
  Synthetic oligonucleotide
ccagtagaggtcggtttagaggcagagttc

SEQ ID NO: 380993 - DNA, 30 bp, Artificial Sequence
  Synthetic oligonucleotide
tgccccaccagtttgacacaaggagagttc

SEQ ID NO: 380994 - DNA, 30 bp, Artificial Sequence
  Synthetic oligonucleotide
ttccatgccaaccgtccacaaggcgagttc

SEQ ID NO: 380995 - DNA, 30 bp, Artificial Sequence
  Synthetic oligonucleotide
atttcaaatacagcaacactcgaggagttc

SEQ ID NO: 380996 - DNA, 30 bp, Artificial Sequence
  Synthetic oligonucleotide
atggctaaacgtaggctccgaccggagttc

SEQ ID NO: 380997 - DNA, 30 bp, Artificial Sequence
  Synthetic oligonucleotide
ggcgggtcggcgggccgtggcgcggagttc

SEQ ID NO: 380998 - DNA, 30 bp, Artificial Sequence
  Synthetic oligonucleotide
cctgcgtggaccgataacgattcggagttc

SEQ ID NO: 380999 - DNA, 30 bp, Artificial Sequence
  Synthetic oligonucleotide
gaccggtattccgtgatcaggttggagttc

SEQ ID NO: 381000 - DNA, 30 bp, Artificial Sequence
  Synthetic oligonucleotide
cctaaagatgcaggagagcatcgatagttc

SEQ ID NO: 381001 - DNA, 30 bp, Artificial Sequence
  Synthetic oligonucleotide
cattgttccaaatcatgatctcgatagttc

SEQ ID NO: 381002 - DNA, 30 bp, Artificial Sequence
  Synthetic oligonucleotide
caagttttcttgggttaaatgggatagttc

SEQ ID NO: 381003 - DNA, 30 bp, Artificial Sequence
  Synthetic oligonucleotide
acttacccactatcgatgagcagctagttc

SEQ ID NO: 381004 - DNA, 30 bp, Artificial Sequence
  Synthetic oligonucleotide
cgcttctatgtaagcgaacggagctagttc

SEQ ID NO: 381005 - DNA, 30 bp, Artificial Sequence
  Synthetic oligonucleotide
cggctcaaaccgtcaaaatcgcgctagttc

SEQ ID NO: 381006 - DNA, 30 bp, Artificial Sequence
  Synthetic oligonucleotide
catttcctagcacgaaggttcgcgtagttc

SEQ ID NO: 381007 - DNA, 30 bp, Artificial Sequence
  Synthetic oligonucleotide
aagaggggattttaccgagcgcgttagttc

SEQ ID NO: 381008 - DNA, 30 bp, Artificial Sequence
  Synthetic oligonucleotide
actaggccatcataattgtaaaccacgttc

SEQ ID NO: 381009 - DNA, 30 bp, Artificial Sequence
  Synthetic oligonucleotide
cgtggattcaacacgagaggcgttacgttc

SEQ ID NO: 381010 - DNA, 30 bp, Artificial Sequence
  Synthetic oligonucleotide
gagggagggtagtcagaggtcaacccgttc

SEQ ID NO: 381011 - DNA, 30 bp, Artificial Sequence
  Synthetic oligonucleotide
gccagagctaatacttaccgtcccccgttc

SEQ ID NO: 381012 - DNA, 30 bp, Artificial Sequence
  Synthetic oligonucleotide
tctaatcatttccgaagaccccacgcgttc

SEQ ID NO: 381013 - DNA, 30 bp, Artificial Sequence
  Synthetic oligonucleotide
ctttgagtaagggatgttattagcgcgttc

SEQ ID NO: 381014 - DNA, 30 bp, Artificial Sequence
  Synthetic oligonucleotide
ggtagccctaaggggtggttttgcgcgttc

SEQ ID NO: 381015 - DNA, 29 bp, Artificial Sequence
  Synthetic oligonucleotide
tttccgttgccgagcggtaagtggcgttc

SEQ ID NO: 381016 - DNA, 30 bp, Artificial Sequence
  Synthetic oligonucleotide
tgggtaaactactatggtagggctgcgttc

SEQ ID NO: 381017 - DNA, 30 bp, Artificial Sequence
  Synthetic oligonucleotide
ttcataagttgcgcgagtgatcgatcgttc

SEQ ID NO: 381018 - DNA, 30 bp, Artificial Sequence
  Synthetic oligonucleotide
ctcttatgcgaacgatgtgtatgatcgttc

SEQ ID NO: 381019 - DNA, 30 bp, Artificial Sequence
  Synthetic oligonucleotide
ataaggcatctctgtcccaatccctcgttc

SEQ ID NO: 381020 - DNA, 30 bp, Artificial Sequence
  Synthetic oligonucleotide
ggctcacgcggttttaacggcctctcgttc

SEQ ID NO: 381021 - DNA, 30 bp, Artificial Sequence
  Synthetic oligonucleotide
tagttatggtcggttgaggctgagtcgttc

SEQ ID NO: 381022 - DNA, 30 bp, Artificial Sequence
  Synthetic oligonucleotide
gtactttaaacacttatcgttgagtcgttc

SEQ ID NO: 381023 - DNA, 30 bp, Artificial Sequence
  Synthetic oligonucleotide
ctattcaagcgggcggcaggcgggtcgttc

SEQ ID NO: 381024 - DNA, 30 bp, Artificial Sequence
  Synthetic oligonucleotide
atataataggaggagtggagcctttcgttc

SEQ ID NO: 381025 - DNA, 30 bp, Artificial Sequence
  Synthetic oligonucleotide
gcgctatgatcgttcaaacgtaaaaggttc

SEQ ID NO: 381026 - DNA, 30 bp, Artificial Sequence
  Synthetic oligonucleotide
acttgcgaaacagtgagactctaaaggttc

SEQ ID NO: 381027 - DNA, 30 bp, Artificial Sequence
  Synthetic oligonucleotide
gcgagtgagtcccggtctggaacaaggttc

SEQ ID NO: 381028 - DNA, 30 bp, Artificial Sequence
  Synthetic oligonucleotide
acgtctgtgcaagtccctaatacaaggttc

SEQ ID NO: 381029 - DNA, 30 bp, Artificial Sequence
  Synthetic oligonucleotide
atcccccaatctacggtaacgccaaggttc

SEQ ID NO: 381030 - DNA, 30 bp, Artificial Sequence
  Synthetic oligonucleotide
cttcgttacgttattcccataagcaggttc

SEQ ID NO: 381031 - DNA, 30 bp, Artificial Sequence
  Synthetic oligonucleotide
aagggtgcctaggtgaaagttagcaggttc

SEQ ID NO: 381032 - DNA, 30 bp, Artificial Sequence
  Synthetic oligonucleotide
tctaacgggagagagccaatggtcaggttc

SEQ ID NO: 381033 - DNA, 30 bp, Artificial Sequence
  Synthetic oligonucleotide
tccttaccggtgtgagtaggtccgaggttc

SEQ ID NO: 381034 - DNA, 30 bp, Artificial Sequence
  Synthetic oligonucleotide
attcctcggctatttcgcgctgggaggttc

SEQ ID NO: 381035 - DNA, 30 bp, Artificial Sequence
  Synthetic oligonucleotide
gatagaggaatctaaaagtgtgggaggttc

SEQ ID NO: 381036 - DNA, 30 bp, Artificial Sequence
  Synthetic oligonucleotide
gtaatgttccgaaaggatctcttgaggttc

SEQ ID NO: 381037 - DNA, 30 bp, Artificial Sequence
  Synthetic oligonucleotide
aagtacatcatcacaaacgtagataggttc

SEQ ID NO: 381038 - DNA, 30 bp, Artificial Sequence
  Synthetic oligonucleotide
caggtaggattggggtatagagctaggttc

SEQ ID NO: 381039 - DNA, 30 bp, Artificial Sequence
  Synthetic oligonucleotide
tccgagtcccttatggggtgggctaggttc

SEQ ID NO: 381040 - DNA, 30 bp, Artificial Sequence
  Synthetic oligonucleotide
gaggttcatagtagagaatcttgtaggttc

SEQ ID NO: 381041 - DNA, 30 bp, Artificial Sequence
  Synthetic oligonucleotide
gatggggcaaactgcgattagatacggttc

SEQ ID NO: 381042 - DNA, 30 bp, Artificial Sequence
  Synthetic oligonucleotide
atgtcagacatggtaattttcagccggttc

SEQ ID NO: 381043 - DNA, 30 bp, Artificial Sequence
  Synthetic oligonucleotide
gctacctttaatcttcggatgggccggttc

SEQ ID NO: 381044 - DNA, 30 bp, Artificial Sequence
  Synthetic oligonucleotide
cccgcaccggctgacggtaacccgcggttc

SEQ ID NO: 381045 - DNA, 30 bp, Artificial Sequence
  Synthetic oligonucleotide
gcccgtttaatcttagtacgttaagggttc

SEQ ID NO: 381046 - DNA, 30 bp, Artificial Sequence
  Synthetic oligonucleotide
tatcaagtatctagtacggatggagggttc

SEQ ID NO: 381047 - DNA, 30 bp, Artificial Sequence
  Synthetic oligonucleotide
tagtctctggtgagtggatggctagggttc

SEQ ID NO: 381048 - DNA, 30 bp, Artificial Sequence
  Synthetic oligonucleotide
ctggccatgactcacggtcacaccgggttc

SEQ ID NO: 381049 - DNA, 30 bp, Artificial Sequence
  Synthetic oligonucleotide
tacacctgtgcatagaccacggtcgggttc

SEQ ID NO: 381050 - DNA, 30 bp, Artificial Sequence
  Synthetic oligonucleotide
gtgtgcccagtacaacccgaagaggggttc

SEQ ID NO: 381051 - DNA, 30 bp, Artificial Sequence
  Synthetic oligonucleotide
tacacttctaagtccagattctaggggttc

SEQ ID NO: 381052 - DNA, 30 bp, Artificial Sequence
  Synthetic oligonucleotide
attcaaagccaactcttcgttgcggggttc

SEQ ID NO: 381053 - DNA, 30 bp, Artificial Sequence
  Synthetic oligonucleotide
gaggtgctcgcaggcggcaaaagggggttc

SEQ ID NO: 381054 - DNA, 30 bp, Artificial Sequence
  Synthetic oligonucleotide
ctggcttgtgcaaaaagataaggggggttc

SEQ ID NO: 381055 - DNA, 30 bp, Artificial Sequence
  Synthetic oligonucleotide
gaatcactcaccgttttgtcaggggggttc

SEQ ID NO: 381056 - DNA, 30 bp, Artificial Sequence
  Synthetic oligonucleotide
cacagcttagccccagagttttatgggttc

SEQ ID NO: 381057 - DNA, 30 bp, Artificial Sequence
  Synthetic oligonucleotide
ggctgtagttagagaaggggaagctggttc

SEQ ID NO: 381058 - DNA, 30 bp, Artificial Sequence
  Synthetic oligonucleotide
tcgtttagccgagacgcagatcgctggttc

SEQ ID NO: 381059 - DNA, 30 bp, Artificial Sequence
  Synthetic oligonucleotide
cgactaaatacgtctgtggtatgctggttc

SEQ ID NO: 381060 - DNA, 30 bp, Artificial Sequence
  Synthetic oligonucleotide
aggtacacggacccggcacataaaatgttc

SEQ ID NO: 381061 - DNA, 30 bp, Artificial Sequence
  Synthetic oligonucleotide
cgtggtccaagaacgaatttggaaatgttc

SEQ ID NO: 381062 - DNA, 30 bp, Artificial Sequence
  Synthetic oligonucleotide
taactaatggctcagaaccaatagatgttc

SEQ ID NO: 381063 - DNA, 30 bp, Artificial Sequence
  Synthetic oligonucleotide
acattgaaagtacacgcgacatctatgttc

SEQ ID NO: 381064 - DNA, 29 bp, Artificial Sequence
  Synthetic oligonucleotide
agttgagacggtactactatccactgttc

SEQ ID NO: 381065 - DNA, 30 bp, Artificial Sequence
  Synthetic oligonucleotide
tcagtcggggactaacagataagactgttc

SEQ ID NO: 381066 - DNA, 30 bp, Artificial Sequence
  Synthetic oligonucleotide
acgtttacacaactgacaggatatctgttc

SEQ ID NO: 381067 - DNA, 30 bp, Artificial Sequence
  Synthetic oligonucleotide
cacatttcgagcgtgcgattcgttctgttc

SEQ ID NO: 381068 - DNA, 30 bp, Artificial Sequence
  Synthetic oligonucleotide
ttggattggatcggtcacatccaagtgttc

SEQ ID NO: 381069 - DNA, 30 bp, Artificial Sequence
  Synthetic oligonucleotide
gggattactaggctataacacctagtgttc

SEQ ID NO: 381070 - DNA, 30 bp, Artificial Sequence
  Synthetic oligonucleotide
aattcggcggaaaaattaacctcggtgttc

SEQ ID NO: 381071 - DNA, 30 bp, Artificial Sequence
  Synthetic oligonucleotide
ggaaagcgggttcaagatgttcctgtgttc

SEQ ID NO: 381072 - DNA, 30 bp, Artificial Sequence
  Synthetic oligonucleotide
gatggaacgcacgcgcggaacagattgttc

SEQ ID NO: 381073 - DNA, 30 bp, Artificial Sequence
  Synthetic oligonucleotide
caaaagattaaataggttaaagtattgttc

SEQ ID NO: 381074 - DNA, 30 bp, Artificial Sequence
  Synthetic oligonucleotide
atatatcttctcattgtttaaatcttgttc

SEQ ID NO: 381075 - DNA, 30 bp, Artificial Sequence
  Synthetic oligonucleotide
gatgtcagaggtctctcctactagttgttc

SEQ ID NO: 381076 - DNA, 30 bp, Artificial Sequence
  Synthetic oligonucleotide
gagcgagtcgttcgtgacgcaacgttgttc

SEQ ID NO: 381077 - DNA, 30 bp, Artificial Sequence
  Synthetic oligonucleotide
atcctgttcactgcatctaacgggttgttc

SEQ ID NO: 381078 - DNA, 30 bp, Artificial Sequence
  Synthetic oligonucleotide
gttaggagttggttttaacaggatttgttc

SEQ ID NO: 381079 - DNA, 30 bp, Artificial Sequence
  Synthetic oligonucleotide
tatcgtggcaaccttgtcattgaaaatttc

SEQ ID NO: 381080 - DNA, 30 bp, Artificial Sequence
  Synthetic oligonucleotide
tcctagtatgcttagatggaaataaatttc

SEQ ID NO: 381081 - DNA, 30 bp, Artificial Sequence
  Synthetic oligonucleotide
aggattgctcatcttggatgagtaaatttc

SEQ ID NO: 381082 - DNA, 30 bp, Artificial Sequence
  Synthetic oligonucleotide
tgagggtacatgtagcgtgggagcaatttc

SEQ ID NO: 381083 - DNA, 30 bp, Artificial Sequence
  Synthetic oligonucleotide
atggcgagatggctaaggtacgggaatttc

SEQ ID NO: 381084 - DNA, 30 bp, Artificial Sequence
  Synthetic oligonucleotide
ctcaatacagacggggcctcccctaatttc

SEQ ID NO: 381085 - DNA, 30 bp, Artificial Sequence
  Synthetic oligonucleotide
gtaagtcagtataaatcgtaaagtaatttc

SEQ ID NO: 381086 - DNA, 30 bp, Artificial Sequence
  Synthetic oligonucleotide
ttaaacccctcagtaccgacgagtaatttc

SEQ ID NO: 381087 - DNA, 30 bp, Artificial Sequence
  Synthetic oligonucleotide
gagttgtacgaatagttgagttaacatttc

SEQ ID NO: 381088 - DNA, 30 bp, Artificial Sequence
  Synthetic oligonucleotide
cagtaagtctcaccgggagaaacacatttc

SEQ ID NO: 381089 - DNA, 30 bp, Artificial Sequence
  Synthetic oligonucleotide
cgttgcaatgcttgacggtgtccacatttc

SEQ ID NO: 381090 - DNA, 30 bp, Artificial Sequence
  Synthetic oligonucleotide
aagaactccctagtgcctagattacatttc

SEQ ID NO: 381091 - DNA, 30 bp, Artificial Sequence
  Synthetic oligonucleotide
agcagctccatgaaggcgtcacaccatttc

SEQ ID NO: 381092 - DNA, 30 bp, Artificial Sequence
  Synthetic oligonucleotide
gatggaaaagttaccgagggtgcgcatttc

SEQ ID NO: 381093 - DNA, 30 bp, Artificial Sequence
  Synthetic oligonucleotide
atatagattcgtgcgagtagcgctcatttc

SEQ ID NO: 381094 - DNA, 30 bp, Artificial Sequence
  Synthetic oligonucleotide
accatttgaagttcactgagacgtcatttc

SEQ ID NO: 381095 - DNA, 30 bp, Artificial Sequence
  Synthetic oligonucleotide
cggaggagaagggtcactcgacttcatttc

SEQ ID NO: 381096 - DNA, 30 bp, Artificial Sequence
  Synthetic oligonucleotide
ttcgataatgccaaacagtaacaagatttc

SEQ ID NO: 381097 - DNA, 30 bp, Artificial Sequence
  Synthetic oligonucleotide
gctaaccgccattagtagacataagatttc

SEQ ID NO: 381098 - DNA, 30 bp, Artificial Sequence
  Synthetic oligonucleotide
tccagggtgagataacctgtaagagatttc

SEQ ID NO: 381099 - DNA, 30 bp, Artificial Sequence
  Synthetic oligonucleotide
tcaactaatctcacaaattcggatgatttc

SEQ ID NO: 381100 - DNA, 30 bp, Artificial Sequence
  Synthetic oligonucleotide
tgggatggcctaaatccatcaggtgatttc

SEQ ID NO: 381101 - DNA, 30 bp, Artificial Sequence
  Synthetic oligonucleotide
tatgaagagacccatgcttgatgatatttc

SEQ ID NO: 381102 - DNA, 30 bp, Artificial Sequence
  Synthetic oligonucleotide
caataactacttgaagtttaacactatttc

SEQ ID NO: 381103 - DNA, 30 bp, Artificial Sequence
  Synthetic oligonucleotide
caatcacacgccctactagctgtgtatttc

SEQ ID NO: 381104 - DNA, 30 bp, Artificial Sequence
  Synthetic oligonucleotide
ctccgttcctgttctgttatcgtttatttc

SEQ ID NO: 381105 - DNA, 30 bp, Artificial Sequence
  Synthetic oligonucleotide
ctaagtttgttaaccattggaataactttc

SEQ ID NO: 381106 - DNA, 30 bp, Artificial Sequence
  Synthetic oligonucleotide
gctgaagctttgggaaggggggacactttc

SEQ ID NO: 381107 - DNA, 30 bp, Artificial Sequence
  Synthetic oligonucleotide
gagattacctatttcaatataatgactttc

SEQ ID NO: 381108 - DNA, 30 bp, Artificial Sequence
  Synthetic oligonucleotide
gtacaagccttacaaagtaggcatactttc

SEQ ID NO: 381109 - DNA, 30 bp, Artificial Sequence
  Synthetic oligonucleotide
ttagtggggtgggacacgcgctgacctttc

SEQ ID NO: 381110 - DNA, 30 bp, Artificial Sequence
  Synthetic oligonucleotide
actatcactttttattgtcacctccctttc

SEQ ID NO: 381111 - DNA, 30 bp, Artificial Sequence
  Synthetic oligonucleotide
tttgacgatagaggccgtaggaatcctttc

SEQ ID NO: 381112 - DNA, 30 bp, Artificial Sequence
  Synthetic oligonucleotide
ttaggacctcatttgagctttcatcctttc

SEQ ID NO: 381113 - DNA, 30 bp, Artificial Sequence
  Synthetic oligonucleotide
catacagccttcaacactagacgtcctttc

SEQ ID NO: 381114 - DNA, 30 bp, Artificial Sequence
  Synthetic oligonucleotide
ggcgctgtatgattaaggagctgcgctttc

SEQ ID NO: 381115 - DNA, 30 bp, Artificial Sequence
  Synthetic oligonucleotide
gtccgtgtaggtttaacagagtgcgctttc

SEQ ID NO: 381116 - DNA, 30 bp, Artificial Sequence
  Synthetic oligonucleotide
tattagcgtggatcatatgaggcggctttc

SEQ ID NO: 381117 - DNA, 30 bp, Artificial Sequence
  Synthetic oligonucleotide
tgcttagattcggacgggaggagggctttc

SEQ ID NO: 381118 - DNA, 30 bp, Artificial Sequence
  Synthetic oligonucleotide
gaattcgtcactggggcaccggctgctttc

SEQ ID NO: 381119 - DNA, 30 bp, Artificial Sequence
  Synthetic oligonucleotide
gatctggccaacctataagcggttgctttc

SEQ ID NO: 381120 - DNA, 30 bp, Artificial Sequence
  Synthetic oligonucleotide
ggccagtagttgttcgggaatgaatctttc

SEQ ID NO: 381121 - DNA, 30 bp, Artificial Sequence
  Synthetic oligonucleotide
gaaatggcgtccgcccgagcttaatctttc

SEQ ID NO: 381122 - DNA, 30 bp, Artificial Sequence
  Synthetic oligonucleotide
tcagtcgaattccgtggtcaggtctctttc

SEQ ID NO: 381123 - DNA, 31 bp, Artificial Sequence
  Synthetic oligonucleotide
atccatgaaagggcacagtgcccagtctttc

SEQ ID NO: 381124 - DNA, 30 bp, Artificial Sequence
  Synthetic oligonucleotide
taagcataagctaatctgggatgttctttc

SEQ ID NO: 381125 - DNA, 30 bp, Artificial Sequence
  Synthetic oligonucleotide
agagtaatcgaggcctttcataaaagtttc

SEQ ID NO: 381126 - DNA, 30 bp, Artificial Sequence
  Synthetic oligonucleotide
tttaacaatggaagttcgcccccaagtttc

SEQ ID NO: 381127 - DNA, 30 bp, Artificial Sequence
  Synthetic oligonucleotide
attccgcaggcccatgcgccaataagtttc

SEQ ID NO: 381128 - DNA, 30 bp, Artificial Sequence
  Synthetic oligonucleotide
aagactgctatttttgtaatgttaagtttc

SEQ ID NO: 381129 - DNA, 30 bp, Artificial Sequence
  Synthetic oligonucleotide
tgcgaccggttaagctcaataagtagtttc

SEQ ID NO: 381130 - DNA, 30 bp, Artificial Sequence
  Synthetic oligonucleotide
ccagaaatagagggcaaaagacaacgtttc

SEQ ID NO: 381131 - DNA, 30 bp, Artificial Sequence
  Synthetic oligonucleotide
ggcttagacggtacgaacccccaacgtttc

SEQ ID NO: 381132 - DNA, 30 bp, Artificial Sequence
  Synthetic oligonucleotide
atgcgtaaaaccaaaccgagcccccgtttc

SEQ ID NO: 381133 - DNA, 30 bp, Artificial Sequence
  Synthetic oligonucleotide
tcagaaggccgcggcactggatcgcgtttc

SEQ ID NO: 381134 - DNA, 30 bp, Artificial Sequence
  Synthetic oligonucleotide
taggttacagaccttttgcaataaggtttc

SEQ ID NO: 381135 - DNA, 30 bp, Artificial Sequence
  Synthetic oligonucleotide
tacagttgccgacatggttctgcaggtttc

SEQ ID NO: 381136 - DNA, 30 bp, Artificial Sequence
  Synthetic oligonucleotide
agacataacaatatatatatatgaggtttc

SEQ ID NO: 381137 - DNA, 30 bp, Artificial Sequence
  Synthetic oligonucleotide
tagcgctctttatgtaataaaggcggtttc

SEQ ID NO: 381138 - DNA, 30 bp, Artificial Sequence
  Synthetic oligonucleotide
caatttaataggaattcgaaaaggggtttc

SEQ ID NO: 381139 - DNA, 30 bp, Artificial Sequence
  Synthetic oligonucleotide
ttgttgaatttgcgaaaggtgatgggtttc

SEQ ID NO: 381140 - DNA, 30 bp, Artificial Sequence
  Synthetic oligonucleotide
ccccttccgtcgggcggttttcgatgtttc

SEQ ID NO: 381141 - DNA, 30 bp, Artificial Sequence
  Synthetic oligonucleotide
ctagctcattaagagaccatagtatgtttc

SEQ ID NO: 381142 - DNA, 30 bp, Artificial Sequence
  Synthetic oligonucleotide
acatttatcacggatggagaccagtgtttc

SEQ ID NO: 381143 - DNA, 30 bp, Artificial Sequence
  Synthetic oligonucleotide
aacaccacgcgctacgagtcggggtgtttc

SEQ ID NO: 381144 - DNA, 30 bp, Artificial Sequence
  Synthetic oligonucleotide
cggtgcattcagatctagcgcaattgtttc

SEQ ID NO: 381145 - DNA, 30 bp, Artificial Sequence
  Synthetic oligonucleotide
ggatgtttcccagtcccgcctgcttgtttc

SEQ ID NO: 381146 - DNA, 30 bp, Artificial Sequence
  Synthetic oligonucleotide
tagctccgcaacttgtaacttggaattttc

SEQ ID NO: 381147 - DNA, 30 bp, Artificial Sequence
  Synthetic oligonucleotide
atccttaaataggaggggccgatcattttc

SEQ ID NO: 381148 - DNA, 30 bp, Artificial Sequence
  Synthetic oligonucleotide
tctaaggctggtcttgctggagagattttc

SEQ ID NO: 381149 - DNA, 30 bp, Artificial Sequence
  Synthetic oligonucleotide
agcgactgttatgggaatggatagattttc

SEQ ID NO: 381150 - DNA, 30 bp, Artificial Sequence
  Synthetic oligonucleotide
atctaggcactagtggggcaagtgattttc

SEQ ID NO: 381151 - DNA, 30 bp, Artificial Sequence
  Synthetic oligonucleotide
agatacacgaagttactggcgtatattttc

SEQ ID NO: 381152 - DNA, 30 bp, Artificial Sequence
  Synthetic oligonucleotide
gggcgagtagaatgccttacctttattttc

SEQ ID NO: 381153 - DNA, 30 bp, Artificial Sequence
  Synthetic oligonucleotide
gacaccatggcacaccctcgtagccttttc

SEQ ID NO: 381154 - DNA, 30 bp, Artificial Sequence
  Synthetic oligonucleotide
cattgaatcagtgatgcgtaggagcttttc

SEQ ID NO: 381155 - DNA, 30 bp, Artificial Sequence
  Synthetic oligonucleotide
caaattcgcgcaccttaccgccctcttttc

SEQ ID NO: 381156 - DNA, 30 bp, Artificial Sequence
  Synthetic oligonucleotide
tatagatacgagagagagttgcctcttttc

SEQ ID NO: 381157 - DNA, 30 bp, Artificial Sequence
  Synthetic oligonucleotide
ctgggcggataatagatggatgttcttttc

SEQ ID NO: 381158 - DNA, 30 bp, Artificial Sequence
  Synthetic oligonucleotide
ctttcgagtgacctgtcacattgagttttc

SEQ ID NO: 381159 - DNA, 30 bp, Artificial Sequence
  Synthetic oligonucleotide
gtataacaacctatgccccgattagttttc

SEQ ID NO: 381160 - DNA, 30 bp, Artificial Sequence
  Synthetic oligonucleotide
aactccgaagaatggtttagcgtcgttttc

SEQ ID NO: 381161 - DNA, 30 bp, Artificial Sequence
  Synthetic oligonucleotide
aaaactaaactaatgcaggctttcgttttc

SEQ ID NO: 381162 - DNA, 30 bp, Artificial Sequence
  Synthetic oligonucleotide
tgattaatagccgaggaacttatggttttc

SEQ ID NO: 381163 - DNA, 30 bp, Artificial Sequence
  Synthetic oligonucleotide
gaagtctccacgggtgttaacaaatttttc

SEQ ID NO: 381164 - DNA, 30 bp, Artificial Sequence
  Synthetic oligonucleotide
gtgcgggaattcgggatccgggcatttttc

SEQ ID NO: 381165 - DNA, 30 bp, Artificial Sequence
  Synthetic oligonucleotide
gctgccacgcgagccttaataatatttttc

SEQ ID NO: 381166 - DNA, 30 bp, Artificial Sequence
  Synthetic oligonucleotide
ggcgttagggaatcacaagggacctttttc

SEQ ID NO: 381167 - DNA, 30 bp, Artificial Sequence
  Synthetic oligonucleotide
ttgcaactggttctcgggctcgcctttttc

SEQ ID NO: 381168 - DNA, 30 bp, Artificial Sequence
  Synthetic oligonucleotide
agcaagaacaagaccctttcactgtttttc

SEQ ID NO: 381169 - DNA, 30 bp, Artificial Sequence
  Synthetic oligonucleotide
ccattgtcaccgggccggtccacttttttc

SEQ ID NO: 381170 - DNA, 30 bp, Artificial Sequence
  Synthetic oligonucleotide
ttaggacaccagacaaacatacgttttttc

SEQ ID NO: 381171 - DNA, 30 bp, Artificial Sequence
  Synthetic oligonucleotide
tacgctactaatcggcctgactaaaaaaag

SEQ ID NO: 381172 - DNA, 30 bp, Artificial Sequence
  Synthetic oligonucleotide
gcgaggattccccgaatctaatcaaaaaag

SEQ ID NO: 381173 - DNA, 30 bp, Artificial Sequence
  Synthetic oligonucleotide
gtagatccgtgcttctagttctccaaaaag

SEQ ID NO: 381174 - DNA, 30 bp, Artificial Sequence
  Synthetic oligonucleotide
cataccgcttaggagagttgtgtcaaaaag

SEQ ID NO: 381175 - DNA, 30 bp, Artificial Sequence
  Synthetic oligonucleotide
aaaattcaacggcttgagagccataaaaag

SEQ ID NO: 381176 - DNA, 30 bp, Artificial Sequence
  Synthetic oligonucleotide
attcgtcgttcgtacgtacaacctaaaaag

SEQ ID NO: 381177 - DNA, 30 bp, Artificial Sequence
  Synthetic oligonucleotide
atcagtcttgaggtgactggtgctaaaaag

SEQ ID NO: 381178 - DNA, 30 bp, Artificial Sequence
  Synthetic oligonucleotide
ccggcatcttgattgctatctagacaaaag

SEQ ID NO: 381179 - DNA, 30 bp, Artificial Sequence
  Synthetic oligonucleotide
gatctttataaataaggaacagtccaaaag

SEQ ID NO: 381180 - DNA, 30 bp, Artificial Sequence
  Synthetic oligonucleotide
gtctggcagttcgccagtttttatcaaaag

SEQ ID NO: 381181 - DNA, 30 bp, Artificial Sequence
  Synthetic oligonucleotide
aatcactgaatagaaggcactgctcaaaag

SEQ ID NO: 381182 - DNA, 30 bp, Artificial Sequence
  Synthetic oligonucleotide
agggagtgctatagaagcttgtctcaaaag

SEQ ID NO: 381183 - DNA, 31 bp, Artificial Sequence
  Synthetic oligonucleotide
tgaggaagcctgaagggccaaatgtcaaaag

SEQ ID NO: 381184 - DNA, 30 bp, Artificial Sequence
  Synthetic oligonucleotide
aagagacttactcatcattctaaagaaaag

SEQ ID NO: 381185 - DNA, 30 bp, Artificial Sequence
  Synthetic oligonucleotide
tgcttactttaaagaagtccttaagaaaag

SEQ ID NO: 381186 - DNA, 30 bp, Artificial Sequence
  Synthetic oligonucleotide
tattcgagtctatgggtctatccagaaaag

SEQ ID NO: 381187 - DNA, 30 bp, Artificial Sequence
  Synthetic oligonucleotide
ttcaactgtaacaccttgactatcgaaaag

SEQ ID NO: 381188 - DNA, 30 bp, Artificial Sequence
  Synthetic oligonucleotide
ttaacctggcggttccagtggacggaaaag

SEQ ID NO: 381189 - DNA, 30 bp, Artificial Sequence
  Synthetic oligonucleotide
ggacaaaggtggtagatggattcggaaaag

SEQ ID NO: 381190 - DNA, 30 bp, Artificial Sequence
  Synthetic oligonucleotide
tctttacaatcgagcccagtttcggaaaag

SEQ ID NO: 381191 - DNA, 30 bp, Artificial Sequence
  Synthetic oligonucleotide
gagattgacctgcgtagcttagatgaaaag

SEQ ID NO: 381192 - DNA, 30 bp, Artificial Sequence
  Synthetic oligonucleotide
cagttacacacttttaggtatgctgaaaag

SEQ ID NO: 381193 - DNA, 30 bp, Artificial Sequence
  Synthetic oligonucleotide
ctacatccgagtcttacgtagtctgaaaag

SEQ ID NO: 381194 - DNA, 30 bp, Artificial Sequence
  Synthetic oligonucleotide
tgtatggctagttgcgttgcagttgaaaag

SEQ ID NO: 381195 - DNA, 30 bp, Artificial Sequence
  Synthetic oligonucleotide
tttccactaaaaggcggacattgataaaag

SEQ ID NO: 381196 - DNA, 30 bp, Artificial Sequence
  Synthetic oligonucleotide
atttggcgtggactatctgattgataaaag

SEQ ID NO: 381197 - DNA, 30 bp, Artificial Sequence
  Synthetic oligonucleotide
aatggaaagttagttatttaattgtaaaag

SEQ ID NO: 381198 - DNA, 30 bp, Artificial Sequence
  Synthetic oligonucleotide
gctcagaacttatgttgcaatagaacaaag

SEQ ID NO: 381199 - DNA, 30 bp, Artificial Sequence
  Synthetic oligonucleotide
cctatcgttgctttgtaatagaccacaaag

SEQ ID NO: 381200 - DNA, 30 bp, Artificial Sequence
  Synthetic oligonucleotide
gaactgggttattcagcataatagacaaag

SEQ ID NO: 381201 - DNA, 30 bp, Artificial Sequence
  Synthetic oligonucleotide
ccgaatccacaatgttgtggtgctacaaag

SEQ ID NO: 381202 - DNA, 30 bp, Artificial Sequence
  Synthetic oligonucleotide
atatctcgtaacattgatacaattacaaag

SEQ ID NO: 381203 - DNA, 30 bp, Artificial Sequence
  Synthetic oligonucleotide
attggggtctcggcggtcccaattacaaag

SEQ ID NO: 381204 - DNA, 30 bp, Artificial Sequence
  Synthetic oligonucleotide
ctatggtatgtagatactttatttacaaag

SEQ ID NO: 381205 - DNA, 30 bp, Artificial Sequence
  Synthetic oligonucleotide
ttgtcaaacgagaatgtagatttaccaaag

SEQ ID NO: 381206 - DNA, 30 bp, Artificial Sequence
  Synthetic oligonucleotide
acctctgacgtcttcgaacgcaccccaaag

SEQ ID NO: 381207 - DNA, 30 bp, Artificial Sequence
  Synthetic oligonucleotide
gaattctctgtcgtgtcgtacgagccaaag

SEQ ID NO: 381208 - DNA, 30 bp, Artificial Sequence
  Synthetic oligonucleotide
gattagaagaatcagtattccgcgccaaag

SEQ ID NO: 381209 - DNA, 30 bp, Artificial Sequence
  Synthetic oligonucleotide
tatataacacattagtagaggtcgccaaag

SEQ ID NO: 381210 - DNA, 30 bp, Artificial Sequence
  Synthetic oligonucleotide
aattaagtagcaagcgtcggagtgccaaag

SEQ ID NO: 381211 - DNA, 30 bp, Artificial Sequence
  Synthetic oligonucleotide
gtataaaagatggactcgttgtatccaaag

SEQ ID NO: 381212 - DNA, 30 bp, Artificial Sequence
  Synthetic oligonucleotide
tacactcttcgttctattaatgttccaaag

SEQ ID NO: 381213 - DNA, 31 bp, Artificial Sequence
  Synthetic oligonucleotide
gcttgttctatggtccacattatttccaaag

SEQ ID NO: 381214 - DNA, 30 bp, Artificial Sequence
  Synthetic oligonucleotide
accattgacgacatagcccgctccgcaaag

SEQ ID NO: 381215 - DNA, 30 bp, Artificial Sequence
  Synthetic oligonucleotide
gggatttggaagaggtggaacggcgcaaag

SEQ ID NO: 381216 - DNA, 30 bp, Artificial Sequence
  Synthetic oligonucleotide
aaatttgcttaattgaacatctgcgcaaag

SEQ ID NO: 381217 - DNA, 30 bp, Artificial Sequence
  Synthetic oligonucleotide
aaatatttgggttcgtcctggggtgcaaag

SEQ ID NO: 381218 - DNA, 30 bp, Artificial Sequence
  Synthetic oligonucleotide
tgcttcgagtgtctcacagttattgcaaag

SEQ ID NO: 381219 - DNA, 30 bp, Artificial Sequence
  Synthetic oligonucleotide
gtcacttgctgtcttgcatgacaatcaaag

SEQ ID NO: 381220 - DNA, 30 bp, Artificial Sequence
  Synthetic oligonucleotide
actctcattacattcttaaggcgctcaaag

SEQ ID NO: 381221 - DNA, 30 bp, Artificial Sequence
  Synthetic oligonucleotide
atgtctcttcgagcagctggtttctcaaag

SEQ ID NO: 381222 - DNA, 30 bp, Artificial Sequence
  Synthetic oligonucleotide
ctagctgtcaaaactcgtcaggggtcaaag

SEQ ID NO: 381223 - DNA, 30 bp, Artificial Sequence
  Synthetic oligonucleotide
gcaagtggtttataactgaaaacttcaaag

SEQ ID NO: 381224 - DNA, 30 bp, Artificial Sequence
  Synthetic oligonucleotide
ccctaagtatgagattccggggtttcaaag

SEQ ID NO: 381225 - DNA, 30 bp, Artificial Sequence
  Synthetic oligonucleotide
ttgcgatactaacacagcccagtaagaaag

SEQ ID NO: 381226 - DNA, 30 bp, Artificial Sequence
  Synthetic oligonucleotide
tgagggtctacccttagacattgcagaaag

SEQ ID NO: 381227 - DNA, 30 bp, Artificial Sequence
  Synthetic oligonucleotide
ggagttcaagtttagatataactgagaaag

SEQ ID NO: 381228 - DNA, 30 bp, Artificial Sequence
  Synthetic oligonucleotide
acttgggtaactcagctaccacatagaaag

SEQ ID NO: 381229 - DNA, 30 bp, Artificial Sequence
  Synthetic oligonucleotide
gatagctcgtctgcgatgggttcacgaaag

SEQ ID NO: 381230 - DNA, 30 bp, Artificial Sequence
  Synthetic oligonucleotide
agtagtcataaatcaacacggctacgaaag

SEQ ID NO: 381231 - DNA, 30 bp, Artificial Sequence
  Synthetic oligonucleotide
tctcgaaatgccgccttcgcgtcgcgaaag

SEQ ID NO: 381232 - DNA, 30 bp, Artificial Sequence
  Synthetic oligonucleotide
tatctatgcgcagggggcagtgtgcgaaag

SEQ ID NO: 381233 - DNA, 30 bp, Artificial Sequence
  Synthetic oligonucleotide
aacgacagaagcattttcttgaatcgaaag

SEQ ID NO: 381234 - DNA, 30 bp, Artificial Sequence
  Synthetic oligonucleotide
ttcttgtcaacaaatgggaggcttcgaaag

SEQ ID NO: 381235 - DNA, 30 bp, Artificial Sequence
  Synthetic oligonucleotide
gcgcctggtgaccggcattctgttcgaaag

SEQ ID NO: 381236 - DNA, 30 bp, Artificial Sequence
  Synthetic oligonucleotide
tgccaggtcgtgtactcatggagaggaaag

SEQ ID NO: 381237 - DNA, 30 bp, Artificial Sequence
  Synthetic oligonucleotide
acgcttgttctcacatatacgggaggaaag

SEQ ID NO: 381238 - DNA, 30 bp, Artificial Sequence
  Synthetic oligonucleotide
gaccggttaaacatctatgtttgaggaaag

SEQ ID NO: 381239 - DNA, 30 bp, Artificial Sequence
  Synthetic oligonucleotide
ctatacgctggctcttggtataccggaaag

SEQ ID NO: 381240 - DNA, 30 bp, Artificial Sequence
  Synthetic oligonucleotide
gattgggaggagcgccccgtcgccggaaag

SEQ ID NO: 381241 - DNA, 30 bp, Artificial Sequence
  Synthetic oligonucleotide
tacgtcgttgttccgaaaggtctcggaaag

SEQ ID NO: 381242 - DNA, 30 bp, Artificial Sequence
  Synthetic oligonucleotide
gccgattggtacgaatattgctcgggaaag

SEQ ID NO: 381243 - DNA, 30 bp, Artificial Sequence
  Synthetic oligonucleotide
caagggttgcgtctgcatttcaggggaaag

SEQ ID NO: 381244 - DNA, 30 bp, Artificial Sequence
  Synthetic oligonucleotide
tttaagtctggggttaacgaggatggaaag

SEQ ID NO: 381245 - DNA, 30 bp, Artificial Sequence
  Synthetic oligonucleotide
gcgaacaacacaactgttgttcgtggaaag

SEQ ID NO: 381246 - DNA, 30 bp, Artificial Sequence
  Synthetic oligonucleotide
ctgaagaataggagtgaattggttggaaag

SEQ ID NO: 381247 - DNA, 30 bp, Artificial Sequence
  Synthetic oligonucleotide
gtgtacgcggcgcagcagagggcgtgaaag

SEQ ID NO: 381248 - DNA, 30 bp, Artificial Sequence
  Synthetic oligonucleotide
catttccacctagttgtctactgttgaaag

SEQ ID NO: 381249 - DNA, 30 bp, Artificial Sequence
  Synthetic oligonucleotide
ttttactaagctaaaaacatggaaataaag

SEQ ID NO: 381250 - DNA, 30 bp, Artificial Sequence
  Synthetic oligonucleotide
cgtgaagattagattaacggttgcataaag

SEQ ID NO: 381251 - DNA, 30 bp, Artificial Sequence
  Synthetic oligonucleotide
attctgtcattagtatttgtctagataaag

SEQ ID NO: 381252 - DNA, 30 bp, Artificial Sequence
  Synthetic oligonucleotide
gtttgtcttcagcggcaagggcctataaag

SEQ ID NO: 381253 - DNA, 30 bp, Artificial Sequence
  Synthetic oligonucleotide
atggattgggtccattaccattttataaag

SEQ ID NO: 381254 - DNA, 30 bp, Artificial Sequence
  Synthetic oligonucleotide
gtagacgtgatgattccaccagaactaaag

SEQ ID NO: 381255 - DNA, 30 bp, Artificial Sequence
  Synthetic oligonucleotide
gtggatctttattactctaggacactaaag

SEQ ID NO: 381256 - DNA, 30 bp, Artificial Sequence
  Synthetic oligonucleotide
taatggggggtcaacggtgaggcactaaag

SEQ ID NO: 381257 - DNA, 30 bp, Artificial Sequence
  Synthetic oligonucleotide
taatatagaattaatccttgatcactaaag

SEQ ID NO: 381258 - DNA, 30 bp, Artificial Sequence
  Synthetic oligonucleotide
agtcatgaggaggcagcatgaagactaaag

SEQ ID NO: 381259 - DNA, 30 bp, Artificial Sequence
  Synthetic oligonucleotide
agattacgttgagttgtaatgcacctaaag

SEQ ID NO: 381260 - DNA, 30 bp, Artificial Sequence
  Synthetic oligonucleotide
gcacggaattgcgggaggcgcactctaaag

SEQ ID NO: 381261 - DNA, 30 bp, Artificial Sequence
  Synthetic oligonucleotide
ctaattacgagtttcaagatccgtctaaag

SEQ ID NO: 381262 - DNA, 30 bp, Artificial Sequence
  Synthetic oligonucleotide
aagtggatcggtcgaggtcttaaagtaaag

SEQ ID NO: 381263 - DNA, 30 bp, Artificial Sequence
  Synthetic oligonucleotide
tacctggacagcccggtacaaagagtaaag

SEQ ID NO: 381264 - DNA, 30 bp, Artificial Sequence
  Synthetic oligonucleotide
cacctaaccttttcgaatggtagagtaaag

SEQ ID NO: 381265 - DNA, 30 bp, Artificial Sequence
  Synthetic oligonucleotide
ggaccgtacgctacatcggatggagtaaag

SEQ ID NO: 381266 - DNA, 30 bp, Artificial Sequence
  Synthetic oligonucleotide
ccgtattttggttgtgcccggggcgtaaag

SEQ ID NO: 381267 - DNA, 30 bp, Artificial Sequence
  Synthetic oligonucleotide
gctgtgagtcgtgggatgtatcaggtaaag

SEQ ID NO: 381268 - DNA, 30 bp, Artificial Sequence
  Synthetic oligonucleotide
gagagagcagaggctgcgacttgggtaaag

SEQ ID NO: 381269 - DNA, 30 bp, Artificial Sequence
  Synthetic oligonucleotide
tggctgagaactgcttcttgtggtgtaaag

SEQ ID NO: 381270 - DNA, 30 bp, Artificial Sequence
  Synthetic oligonucleotide
gcatgctttgaacgctactgggttgtaaag

SEQ ID NO: 381271 - DNA, 30 bp, Artificial Sequence
  Synthetic oligonucleotide
gtcaggagcgtacatgtcgggtaattaaag

SEQ ID NO: 381272 - DNA, 30 bp, Artificial Sequence
  Synthetic oligonucleotide
gataagggcctcgttctactcacattaaag

SEQ ID NO: 381273 - DNA, 30 bp, Artificial Sequence
  Synthetic oligonucleotide
tcatgaatggagtgagttcagacattaaag

SEQ ID NO: 381274 - DNA, 30 bp, Artificial Sequence
  Synthetic oligonucleotide
cgtacgaagggactgttagtatcattaaag

SEQ ID NO: 381275 - DNA, 30 bp, Artificial Sequence
  Synthetic oligonucleotide
gaatcctaaggtaagatggtttcattaaag

SEQ ID NO: 381276 - DNA, 30 bp, Artificial Sequence
  Synthetic oligonucleotide
gaccccgtacaccatcagcgtgacttaaag

SEQ ID NO: 381277 - DNA, 30 bp, Artificial Sequence
  Synthetic oligonucleotide
ggtaagggcttatcagggaagcccttaaag

SEQ ID NO: 381278 - DNA, 30 bp, Artificial Sequence
  Synthetic oligonucleotide
agagagtgtgaactcgcttgtaagttaaag

SEQ ID NO: 381279 - DNA, 30 bp, Artificial Sequence
  Synthetic oligonucleotide
acgtggttaaagcaacaccctgttttaaag

SEQ ID NO: 381280 - DNA, 30 bp, Artificial Sequence
  Synthetic oligonucleotide
atttggggtagcgaatccaataaaaacaag

SEQ ID NO: 381281 - DNA, 30 bp, Artificial Sequence
  Synthetic oligonucleotide
aaagggatttatcggttacgcatcaacaag

SEQ ID NO: 381282 - DNA, 30 bp, Artificial Sequence
  Synthetic oligonucleotide
accgtgaatatatggcggtctgtgaacaag

SEQ ID NO: 381283 - DNA, 30 bp, Artificial Sequence
  Synthetic oligonucleotide
acgataagtatggatcgtcgtgttaacaag

SEQ ID NO: 381284 - DNA, 30 bp, Artificial Sequence
  Synthetic oligonucleotide
gtgaatgagcagttcgggtgatcagacaag

SEQ ID NO: 381285 - DNA, 30 bp, Artificial Sequence
  Synthetic oligonucleotide
ttcatacatccgttagccctggaggacaag

SEQ ID NO: 381286 - DNA, 30 bp, Artificial Sequence
  Synthetic oligonucleotide
ggcgtgatacgcttgcatcagttggacaag

SEQ ID NO: 381287 - DNA, 30 bp, Artificial Sequence
  Synthetic oligonucleotide
ttactaaggttttttcgatttaaatacaag

SEQ ID NO: 381288 - DNA, 30 bp, Artificial Sequence
  Synthetic oligonucleotide
cgatacattctcgatgtctcgtgatacaag

SEQ ID NO: 381289 - DNA, 30 bp, Artificial Sequence
  Synthetic oligonucleotide
ttgttcttatacgacccaagctgctacaag

SEQ ID NO: 381290 - DNA, 30 bp, Artificial Sequence
  Synthetic oligonucleotide
ggttagagttaaaatctccaaaggtacaag

SEQ ID NO: 381291 - DNA, 30 bp, Artificial Sequence
  Synthetic oligonucleotide
ccccagtagttaaccacgccttattacaag

SEQ ID NO: 381292 - DNA, 30 bp, Artificial Sequence
  Synthetic oligonucleotide
gagtcccgcaccaacgtaaaccacaccaag

SEQ ID NO: 381293 - DNA, 30 bp, Artificial Sequence
  Synthetic oligonucleotide
agcccacttagcttagattaggtcaccaag

SEQ ID NO: 381294 - DNA, 30 bp, Artificial Sequence
  Synthetic oligonucleotide
ctatctcgagttgtctgtgcagagaccaag

SEQ ID NO: 381295 - DNA, 30 bp, Artificial Sequence
  Synthetic oligonucleotide
ggggctaagggcactaggtcgacgaccaag

SEQ ID NO: 381296 - DNA, 30 bp, Artificial Sequence
  Synthetic oligonucleotide
gcgttggttattagggaggctgggcccaag

SEQ ID NO: 381297 - DNA, 30 bp, Artificial Sequence
  Synthetic oligonucleotide
ggaactatcactaaatattttcctcccaag

SEQ ID NO: 381298 - DNA, 30 bp, Artificial Sequence
  Synthetic oligonucleotide
caaatggattgcgtgcttgtcgctcccaag

SEQ ID NO: 381299 - DNA, 30 bp, Artificial Sequence
  Synthetic oligonucleotide
cgaggtctttgaccgaaacgatccgccaag

SEQ ID NO: 381300 - DNA, 30 bp, Artificial Sequence
  Synthetic oligonucleotide
agacgctaacaatggcacgttaaggccaag

SEQ ID NO: 381301 - DNA, 30 bp, Artificial Sequence
  Synthetic oligonucleotide
ccccttaggttgagtaattcggtggccaag

SEQ ID NO: 381302 - DNA, 30 bp, Artificial Sequence
  Synthetic oligonucleotide
atcaaatatatgatcgatgacgcatccaag

SEQ ID NO: 381303 - DNA, 30 bp, Artificial Sequence
  Synthetic oligonucleotide
ttgccctttagctccggataaccgtccaag

SEQ ID NO: 381304 - DNA, 30 bp, Artificial Sequence
  Synthetic oligonucleotide
atcttatctgggtaaatatgagattccaag

SEQ ID NO: 381305 - DNA, 30 bp, Artificial Sequence
  Synthetic oligonucleotide
gctggcactgtgtggagattatattccaag

SEQ ID NO: 381306 - DNA, 30 bp, Artificial Sequence
  Synthetic oligonucleotide
gtcgaaaagcgcggtcacctgtattccaag

SEQ ID NO: 381307 - DNA, 30 bp, Artificial Sequence
  Synthetic oligonucleotide
gtgttatatacggtcgctccaacaagcaag

SEQ ID NO: 381308 - DNA, 30 bp, Artificial Sequence
  Synthetic oligonucleotide
tttctgacatggcgtactgcacgaagcaag

SEQ ID NO: 381309 - DNA, 29 bp, Artificial Sequence
  Synthetic oligonucleotide
taccatgagacctaaacttgttaagcaag

SEQ ID NO: 381310 - DNA, 30 bp, Artificial Sequence
  Synthetic oligonucleotide
ataatcctttgcgtattccgtaacagcaag

SEQ ID NO: 381311 - DNA, 30 bp, Artificial Sequence
  Synthetic oligonucleotide
tagtaagagtccgattaccccgacagcaag

SEQ ID NO: 381312 - DNA, 30 bp, Artificial Sequence
  Synthetic oligonucleotide
gcaaatgtgtccgcgacaacggacagcaag

SEQ ID NO: 381313 - DNA, 30 bp, Artificial Sequence
  Synthetic oligonucleotide
aagtggctatagcacggagtactgagcaag

SEQ ID NO: 381314 - DNA, 30 bp, Artificial Sequence
  Synthetic oligonucleotide
aaaggtacggccgtggctgattatagcaag

SEQ ID NO: 381315 - DNA, 30 bp, Artificial Sequence
  Synthetic oligonucleotide
tatctaagggaggacataagagctagcaag

SEQ ID NO: 381316 - DNA, 30 bp, Artificial Sequence
  Synthetic oligonucleotide
ttaataaagattctcgtaacaggtagcaag

SEQ ID NO: 381317 - DNA, 30 bp, Artificial Sequence
  Synthetic oligonucleotide
caaccggggttcctccctgttacacgcaag

SEQ ID NO: 381318 - DNA, 30 bp, Artificial Sequence
  Synthetic oligonucleotide
cagagcattctagtaaataatttacgcaag

SEQ ID NO: 381319 - DNA, 30 bp, Artificial Sequence
  Synthetic oligonucleotide
ctttcgtaggatttctaagtctcccgcaag

SEQ ID NO: 381320 - DNA, 30 bp, Artificial Sequence
  Synthetic oligonucleotide
ttcttgaacttctcttagttttcgcgcaag

SEQ ID NO: 381321 - DNA, 30 bp, Artificial Sequence
  Synthetic oligonucleotide
ctcaaggaccctagtaaaacgaggcgcaag

SEQ ID NO: 381322 - DNA, 30 bp, Artificial Sequence
  Synthetic oligonucleotide
aattaaaaattcacccaggtctcaggcaag

SEQ ID NO: 381323 - DNA, 30 bp, Artificial Sequence
  Synthetic oligonucleotide
ctgtcgtcgcaacgcgagagcggaggcaag

SEQ ID NO: 381324 - DNA, 30 bp, Artificial Sequence
  Synthetic oligonucleotide
ggtacatatccaagcagccctcacggcaag

SEQ ID NO: 381325 - DNA, 30 bp, Artificial Sequence
  Synthetic oligonucleotide
tggaatccggctatgaatcccgtcggcaag

SEQ ID NO: 381326 - DNA, 30 bp, Artificial Sequence
  Synthetic oligonucleotide
ttgtgaccacctatgtagcgtacgggcaag

SEQ ID NO: 381327 - DNA, 30 bp, Artificial Sequence
  Synthetic oligonucleotide
aagagtatacgtgccacttaatcgggcaag

SEQ ID NO: 381328 - DNA, 30 bp, Artificial Sequence
  Synthetic oligonucleotide
agagtcgacgaggggaggcgacggggcaag

SEQ ID NO: 381329 - DNA, 30 bp, Artificial Sequence
  Synthetic oligonucleotide
accgtgccgatattgttctctcggggcaag

SEQ ID NO: 381330 - DNA, 30 bp, Artificial Sequence
  Synthetic oligonucleotide
cttgagtatgaggatgtttccatgggcaag

SEQ ID NO: 381331 - DNA, 30 bp, Artificial Sequence
  Synthetic oligonucleotide
attgcttagcaatcctttccacctggcaag

SEQ ID NO: 381332 - DNA, 30 bp, Artificial Sequence
  Synthetic oligonucleotide
gttccgtctaagcaccttatggttggcaag

SEQ ID NO: 381333 - DNA, 30 bp, Artificial Sequence
  Synthetic oligonucleotide
gaggcgcacagacatcttatacgatgcaag

SEQ ID NO: 381334 - DNA, 31 bp, Artificial Sequence
  Synthetic oligonucleotide
tcaaacgggtcggtaaacggtgggatgcaag

SEQ ID NO: 381335 - DNA, 30 bp, Artificial Sequence
  Synthetic oligonucleotide
atgtaacactcagaccgatggaagtgcaag

SEQ ID NO: 381336 - DNA, 30 bp, Artificial Sequence
  Synthetic oligonucleotide
gtaggggtatatgtttgtagtacgtgcaag

SEQ ID NO: 381337 - DNA, 30 bp, Artificial Sequence
  Synthetic oligonucleotide
tgtgctctagttaaatgttttccgtgcaag

SEQ ID NO: 381338 - DNA, 30 bp, Artificial Sequence
  Synthetic oligonucleotide
aataggtgaacgggtgccctaacttgcaag

SEQ ID NO: 381339 - DNA, 30 bp, Artificial Sequence
  Synthetic oligonucleotide
aattcccatgcgtccgtaagtacttgcaag

SEQ ID NO: 381340 - DNA, 30 bp, Artificial Sequence
  Synthetic oligonucleotide
gcatcagtgtgaaggcagcgtaaaatcaag

SEQ ID NO: 381341 - DNA, 29 bp, Artificial Sequence
  Synthetic oligonucleotide
actccttcacgtattggcgttaaatcaag

SEQ ID NO: 381342 - DNA, 30 bp, Artificial Sequence
  Synthetic oligonucleotide
caggttacgttggtgatcttcgtaatcaag

SEQ ID NO: 381343 - DNA, 30 bp, Artificial Sequence
  Synthetic oligonucleotide
acactcaaaaaaccggcgctatacatcaag

SEQ ID NO: 381344 - DNA, 30 bp, Artificial Sequence
  Synthetic oligonucleotide
atcagtgattcggccagaatccatatcaag

SEQ ID NO: 381345 - DNA, 30 bp, Artificial Sequence
  Synthetic oligonucleotide
aatctaccacatttgtggtcacagctcaag

SEQ ID NO: 381346 - DNA, 30 bp, Artificial Sequence
  Synthetic oligonucleotide
aattttatcgagagtatatcatagctcaag

SEQ ID NO: 381347 - DNA, 30 bp, Artificial Sequence
  Synthetic oligonucleotide
tgacaaatggcccagccgaagttgctcaag

SEQ ID NO: 381348 - DNA, 30 bp, Artificial Sequence
  Synthetic oligonucleotide
gccttagaaataacagtttttattctcaag

SEQ ID NO: 381349 - DNA, 31 bp, Artificial Sequence
  Synthetic oligonucleotide
atatggaagtgattccggcgaagcagtcaag

SEQ ID NO: 381350 - DNA, 30 bp, Artificial Sequence
  Synthetic oligonucleotide
agcataatgtacataaccgggggagtcaag

SEQ ID NO: 381351 - DNA, 30 bp, Artificial Sequence
  Synthetic oligonucleotide
aatacggattcttgaaagcgatcggtcaag

SEQ ID NO: 381352 - DNA, 30 bp, Artificial Sequence
  Synthetic oligonucleotide
atcaagagccccgtggactcgcgggtcaag

SEQ ID NO: 381353 - DNA, 30 bp, Artificial Sequence
  Synthetic oligonucleotide
ccagcagcgcttgcgggggcttaattcaag

SEQ ID NO: 381354 - DNA, 30 bp, Artificial Sequence
  Synthetic oligonucleotide
tggtctgtactcaatgttattgcattcaag

SEQ ID NO: 381355 - DNA, 30 bp, Artificial Sequence
  Synthetic oligonucleotide
ttttcgaacacaacgtaacgccagttcaag

SEQ ID NO: 381356 - DNA, 30 bp, Artificial Sequence
  Synthetic oligonucleotide
ttatatcctagctgaaataaatcgttcaag

SEQ ID NO: 381357 - DNA, 30 bp, Artificial Sequence
  Synthetic oligonucleotide
ggacaccgtattgcatgaaaagtgttcaag

SEQ ID NO: 381358 - DNA, 30 bp, Artificial Sequence
  Synthetic oligonucleotide
gatcaatgctcagagaatattgtgttcaag

SEQ ID NO: 381359 - DNA, 30 bp, Artificial Sequence
  Synthetic oligonucleotide
catttgtgtttgcaagtattgtctttcaag

SEQ ID NO: 381360 - DNA, 30 bp, Artificial Sequence
  Synthetic oligonucleotide
gttggactcatactgtttgtgtttttcaag

SEQ ID NO: 381361 - DNA, 30 bp, Artificial Sequence
  Synthetic oligonucleotide
acgcttcctgtttcacgaagtaaaaagaag

SEQ ID NO: 381362 - DNA, 30 bp, Artificial Sequence
  Synthetic oligonucleotide
ggtgcggcacattacttgccgagaaagaag

SEQ ID NO: 381363 - DNA, 30 bp, Artificial Sequence
  Synthetic oligonucleotide
cgacaacattgagtggtgccttagaagaag

SEQ ID NO: 381364 - DNA, 30 bp, Artificial Sequence
  Synthetic oligonucleotide
atggacaggtgccgacggcagccgaagaag

SEQ ID NO: 381365 - DNA, 30 bp, Artificial Sequence
  Synthetic oligonucleotide
tatctcttttctacgaaagcaatgaagaag

SEQ ID NO: 381366 - DNA, 30 bp, Artificial Sequence
  Synthetic oligonucleotide
atcgtttgatatagtggatatgttaagaag

SEQ ID NO: 381367 - DNA, 30 bp, Artificial Sequence
  Synthetic oligonucleotide
tcctgcttgtttgtgccaaccgtccagaag

SEQ ID NO: 381368 - DNA, 30 bp, Artificial Sequence
  Synthetic oligonucleotide
attcaggttctaatctcctgattgcagaag

SEQ ID NO: 381369 - DNA, 30 bp, Artificial Sequence
  Synthetic oligonucleotide
gcaagtatctctttaggtggcttgcagaag

SEQ ID NO: 381370 - DNA, 30 bp, Artificial Sequence
  Synthetic oligonucleotide
gaccgaatgacacatccgttaaatcagaag

SEQ ID NO: 381371 - DNA, 30 bp, Artificial Sequence
  Synthetic oligonucleotide
ttttctgaattcatgtctcaatttcagaag

SEQ ID NO: 381372 - DNA, 30 bp, Artificial Sequence
  Synthetic oligonucleotide
catccttggaccacaggccaggcagagaag

SEQ ID NO: 381373 - DNA, 30 bp, Artificial Sequence
  Synthetic oligonucleotide
gtattctcctcctccggtcccgttgagaag

SEQ ID NO: 381374 - DNA, 30 bp, Artificial Sequence
  Synthetic oligonucleotide
gtattagcaggggccctcgaataatagaag

SEQ ID NO: 381375 - DNA, 30 bp, Artificial Sequence
  Synthetic oligonucleotide
catttagaaccgtgtaggctatgatagaag

SEQ ID NO: 381376 - DNA, 30 bp, Artificial Sequence
  Synthetic oligonucleotide
gacgtttacagtaagttagtgaagtagaag

SEQ ID NO: 381377 - DNA, 30 bp, Artificial Sequence
  Synthetic oligonucleotide
ctcggcccatattatgagcacaaaacgaag

SEQ ID NO: 381378 - DNA, 30 bp, Artificial Sequence
  Synthetic oligonucleotide
tataagattacttgggagccagcaacgaag

SEQ ID NO: 381379 - DNA, 30 bp, Artificial Sequence
  Synthetic oligonucleotide
ttctggcatccattggcaataaacacgaag

SEQ ID NO: 381380 - DNA, 30 bp, Artificial Sequence
  Synthetic oligonucleotide
ttgcaatcggaatttttgcccaacacgaag

SEQ ID NO: 381381 - DNA, 30 bp, Artificial Sequence
  Synthetic oligonucleotide
ggcgattttttcggctctatacacacgaag

SEQ ID NO: 381382 - DNA, 30 bp, Artificial Sequence
  Synthetic oligonucleotide
ttgcgtgcttgctagttgtttcacacgaag

SEQ ID NO: 381383 - DNA, 30 bp, Artificial Sequence
  Synthetic oligonucleotide
ctctcgcctgtttgccgctctcgtacgaag

SEQ ID NO: 381384 - DNA, 30 bp, Artificial Sequence
  Synthetic oligonucleotide
ccagggggagcactaaaccgttgtacgaag

SEQ ID NO: 381385 - DNA, 30 bp, Artificial Sequence
  Synthetic oligonucleotide
tatttggtagcacgcgtggaccaaccgaag

SEQ ID NO: 381386 - DNA, 30 bp, Artificial Sequence
  Synthetic oligonucleotide
attactgaaaagggatctagtaatccgaag

SEQ ID NO: 381387 - DNA, 30 bp, Artificial Sequence
  Synthetic oligonucleotide
ttggacgaagcacagagacgttatccgaag

SEQ ID NO: 381388 - DNA, 28 bp, Artificial Sequence
  Synthetic oligonucleotide
ttcctgaagaagattgagccgtccgaag

SEQ ID NO: 381389 - DNA, 30 bp, Artificial Sequence
  Synthetic oligonucleotide
atctggttcatgacaggtatagaagcgaag

SEQ ID NO: 381390 - DNA, 30 bp, Artificial Sequence
  Synthetic oligonucleotide
cttgatcttcgcccttcgggcagagcgaag

SEQ ID NO: 381391 - DNA, 30 bp, Artificial Sequence
  Synthetic oligonucleotide
tattatgggttgcccgcgacgtgagcgaag

SEQ ID NO: 381392 - DNA, 30 bp, Artificial Sequence
  Synthetic oligonucleotide
attctacatgttcgggcgtaggacgcgaag

SEQ ID NO: 381393 - DNA, 30 bp, Artificial Sequence
  Synthetic oligonucleotide
ttccgcctggggttgcccccatatgcgaag

SEQ ID NO: 381394 - DNA, 30 bp, Artificial Sequence
  Synthetic oligonucleotide
tatatgtacttatatcgtctacaatcgaag

SEQ ID NO: 381395 - DNA, 30 bp, Artificial Sequence
  Synthetic oligonucleotide
ggatatagtatactgtcaagagaatcgaag

SEQ ID NO: 381396 - DNA, 30 bp, Artificial Sequence
  Synthetic oligonucleotide
gtgctattccagtattataacccatcgaag

SEQ ID NO: 381397 - DNA, 30 bp, Artificial Sequence
  Synthetic oligonucleotide
tataacagtacgcaggcaagcctatcgaag

SEQ ID NO: 381398 - DNA, 30 bp, Artificial Sequence
  Synthetic oligonucleotide
ttattggggcatatattgatagactcgaag

SEQ ID NO: 381399 - DNA, 30 bp, Artificial Sequence
  Synthetic oligonucleotide
gcttgcaggagcgcggtacgatggtcgaag

SEQ ID NO: 381400 - DNA, 30 bp, Artificial Sequence
  Synthetic oligonucleotide
gttgaaaatatattaattgtatggtcgaag

SEQ ID NO: 381401 - DNA, 30 bp, Artificial Sequence
  Synthetic oligonucleotide
tgaatgcccaccgttagcggttggtcgaag

SEQ ID NO: 381402 - DNA, 30 bp, Artificial Sequence
  Synthetic oligonucleotide
tttaaaggttcacataggaaactttcgaag

SEQ ID NO: 381403 - DNA, 30 bp, Artificial Sequence
  Synthetic oligonucleotide
gagtggttatgcgaacaaggacgaaggaag

SEQ ID NO: 381404 - DNA, 30 bp, Artificial Sequence
  Synthetic oligonucleotide
tagtctcgtggactctcaggtgtaaggaag

SEQ ID NO: 381405 - DNA, 30 bp, Artificial Sequence
  Synthetic oligonucleotide
gcgtctaacttgacatggacggccaggaag

SEQ ID NO: 381406 - DNA, 30 bp, Artificial Sequence
  Synthetic oligonucleotide
cacccggaatccccgcgtctttagaggaag

SEQ ID NO: 381407 - DNA, 30 bp, Artificial Sequence
  Synthetic oligonucleotide
gaatgacttactcggagtctacggaggaag

SEQ ID NO: 381408 - DNA, 30 bp, Artificial Sequence
  Synthetic oligonucleotide
tcgaattactcagcaatcactgggaggaag

SEQ ID NO: 381409 - DNA, 30 bp, Artificial Sequence
  Synthetic oligonucleotide
agccctcgggtgagttcttccggtaggaag

SEQ ID NO: 381410 - DNA, 30 bp, Artificial Sequence
  Synthetic oligonucleotide
ttgagttcagcacgtgtctgtgtacggaag

SEQ ID NO: 381411 - DNA, 30 bp, Artificial Sequence
  Synthetic oligonucleotide
tggttattgcatgagtgatacctccggaag

SEQ ID NO: 381412 - DNA, 30 bp, Artificial Sequence
  Synthetic oligonucleotide
gaaatccgcttctattgggcaagtcggaag

SEQ ID NO: 381413 - DNA, 30 bp, Artificial Sequence
  Synthetic oligonucleotide
gtttttaatagggggcgagttctagggaag

SEQ ID NO: 381414 - DNA, 30 bp, Artificial Sequence
  Synthetic oligonucleotide
gtactttgtgcactgagaagcttagggaag

SEQ ID NO: 381415 - DNA, 30 bp, Artificial Sequence
  Synthetic oligonucleotide
aaaaccgcggctccaccagtagacgggaag

SEQ ID NO: 381416 - DNA, 30 bp, Artificial Sequence
  Synthetic oligonucleotide
cggcaaggacgcggacgaaatggcgggaag

SEQ ID NO: 381417 - DNA, 30 bp, Artificial Sequence
  Synthetic oligonucleotide
tcattttacgggattatgggtctggggaag

SEQ ID NO: 381418 - DNA, 30 bp, Artificial Sequence
  Synthetic oligonucleotide
aaccccgctaaaggtgttccgaaatggaag

SEQ ID NO: 381419 - DNA, 30 bp, Artificial Sequence
  Synthetic oligonucleotide
tttgacacaagctcaccaactagatggaag

SEQ ID NO: 381420 - DNA, 30 bp, Artificial Sequence
  Synthetic oligonucleotide
gatgcaagcgtactcgcgtgcatatggaag

SEQ ID NO: 381421 - DNA, 30 bp, Artificial Sequence
  Synthetic oligonucleotide
gttccggattcaacccacaggcactggaag

SEQ ID NO: 381422 - DNA, 30 bp, Artificial Sequence
  Synthetic oligonucleotide
ctagtccttggctacgaggcggagtggaag

SEQ ID NO: 381423 - DNA, 30 bp, Artificial Sequence
  Synthetic oligonucleotide
actgtcctaacgccagctcgtatgtggaag

SEQ ID NO: 381424 - DNA, 30 bp, Artificial Sequence
  Synthetic oligonucleotide
agtcgtccagtaatagggaagacttggaag

SEQ ID NO: 381425 - DNA, 30 bp, Artificial Sequence
  Synthetic oligonucleotide
aatagagttgggattgtgtccatttggaag

SEQ ID NO: 381426 - DNA, 30 bp, Artificial Sequence
  Synthetic oligonucleotide
aatttctccgctatagcgtagatttggaag

SEQ ID NO: 381427 - DNA, 30 bp, Artificial Sequence
  Synthetic oligonucleotide
ttcggtcttgctcagatcaatacaatgaag

SEQ ID NO: 381428 - DNA, 30 bp, Artificial Sequence
  Synthetic oligonucleotide
agagttttggcttcaagacaggtaatgaag

SEQ ID NO: 381429 - DNA, 30 bp, Artificial Sequence
  Synthetic oligonucleotide
acgcacaatcaaggaggccctgatatgaag

SEQ ID NO: 381430 - DNA, 30 bp, Artificial Sequence
  Synthetic oligonucleotide
caattcttaccctgcgcggttgatatgaag

SEQ ID NO: 381431 - DNA, 30 bp, Artificial Sequence
  Synthetic oligonucleotide
gactctacggaataatattaaggtatgaag

SEQ ID NO: 381432 - DNA, 30 bp, Artificial Sequence
  Synthetic oligonucleotide
gtagaatagggatggacttagcgcctgaag

SEQ ID NO: 381433 - DNA, 30 bp, Artificial Sequence
  Synthetic oligonucleotide
gacctcgggcctactatttttatagtgaag

SEQ ID NO: 381434 - DNA, 30 bp, Artificial Sequence
  Synthetic oligonucleotide
ttcgaccaatcatagttcctccaggtgaag

SEQ ID NO: 381435 - DNA, 30 bp, Artificial Sequence
  Synthetic oligonucleotide
gccgatgaagtgcacacattatcggtgaag

SEQ ID NO: 381436 - DNA, 30 bp, Artificial Sequence
  Synthetic oligonucleotide
acagacccaccccggcgcggtcctgtgaag

SEQ ID NO: 381437 - DNA, 30 bp, Artificial Sequence
  Synthetic oligonucleotide
cagcaggtaatcaatgttacgaaattgaag

SEQ ID NO: 381438 - DNA, 30 bp, Artificial Sequence
  Synthetic oligonucleotide
gtgaattttatgcggacggtaggattgaag

SEQ ID NO: 381439 - DNA, 30 bp, Artificial Sequence
  Synthetic oligonucleotide
atggctacaaaattcttgggtggattgaag

SEQ ID NO: 381440 - DNA, 30 bp, Artificial Sequence
  Synthetic oligonucleotide
ggtgtagccgtttgtccgacagtattgaag

SEQ ID NO: 381441 - DNA, 30 bp, Artificial Sequence
  Synthetic oligonucleotide
taggacttccgacttgattaagacttgaag

SEQ ID NO: 381442 - DNA, 30 bp, Artificial Sequence
  Synthetic oligonucleotide
ctgctctggtccatgctgtataagttgaag

SEQ ID NO: 381443 - DNA, 30 bp, Artificial Sequence
  Synthetic oligonucleotide
tgttttagtgctgtctctctgctgttgaag

SEQ ID NO: 381444 - DNA, 30 bp, Artificial Sequence
  Synthetic oligonucleotide
ggactgcgatctgatacgcgagctttgaag

SEQ ID NO: 381445 - DNA, 30 bp, Artificial Sequence
  Synthetic oligonucleotide
actttcctacaccggccgccttgcaataag

SEQ ID NO: 381446 - DNA, 30 bp, Artificial Sequence
  Synthetic oligonucleotide
aagcactcaccgggtggacacaagaataag

SEQ ID NO: 381447 - DNA, 30 bp, Artificial Sequence
  Synthetic oligonucleotide
atacctagggctaagtggccatgtaataag

SEQ ID NO: 381448 - DNA, 30 bp, Artificial Sequence
  Synthetic oligonucleotide
gaggattaaagctcgacggagagacataag

SEQ ID NO: 381449 - DNA, 30 bp, Artificial Sequence
  Synthetic oligonucleotide
ggttaggcacctttagcgtaattacataag

SEQ ID NO: 381450 - DNA, 30 bp, Artificial Sequence
  Synthetic oligonucleotide
cacaaccatgatgcgtggataaaccataag

SEQ ID NO: 381451 - DNA, 30 bp, Artificial Sequence
  Synthetic oligonucleotide
gccataggtgacgtagatgcatgccataag

SEQ ID NO: 381452 - DNA, 30 bp, Artificial Sequence
  Synthetic oligonucleotide
ggtcagctagtgtgggctaggaggcataag

SEQ ID NO: 381453 - DNA, 30 bp, Artificial Sequence
  Synthetic oligonucleotide
ttggctctttataccgattgtgggcataag

SEQ ID NO: 381454 - DNA, 30 bp, Artificial Sequence
  Synthetic oligonucleotide
aaggccagccttgcatgcgatctgcataag

SEQ ID NO: 381455 - DNA, 30 bp, Artificial Sequence
  Synthetic oligonucleotide
tctcgattgtgctgcaagtttctgcataag

SEQ ID NO: 381456 - DNA, 30 bp, Artificial Sequence
  Synthetic oligonucleotide
cgcacaatatgtcgaatcagacatcataag

SEQ ID NO: 381457 - DNA, 30 bp, Artificial Sequence
  Synthetic oligonucleotide
gcacacgtcccactggcatttattcataag

SEQ ID NO: 381458 - DNA, 30 bp, Artificial Sequence
  Synthetic oligonucleotide
atgggcgcatagagcgtcctgtaagataag

SEQ ID NO: 381459 - DNA, 30 bp, Artificial Sequence
  Synthetic oligonucleotide
gtttcacagaccgctcaacgcaccgataag

SEQ ID NO: 381460 - DNA, 30 bp, Artificial Sequence
  Synthetic oligonucleotide
gaatcgtaaggaagaactactttcgataag

SEQ ID NO: 381461 - DNA, 30 bp, Artificial Sequence
  Synthetic oligonucleotide
cgaagctcagcgtccggggaacgggataag

SEQ ID NO: 381462 - DNA, 30 bp, Artificial Sequence
  Synthetic oligonucleotide
tgaccctacaataaagtttacgttgataag

SEQ ID NO: 381463 - DNA, 30 bp, Artificial Sequence
  Synthetic oligonucleotide
atgtaaggggtttgtttgtcagtgtataag

SEQ ID NO: 381464 - DNA, 30 bp, Artificial Sequence
  Synthetic oligonucleotide
cttctcgcgggcgaaaaggaatattataag

SEQ ID NO: 381465 - DNA, 30 bp, Artificial Sequence
  Synthetic oligonucleotide
tttaacatacgtcccaaatcgtattataag

SEQ ID NO: 381466 - DNA, 30 bp, Artificial Sequence
  Synthetic oligonucleotide
ttagaaagtggttggacccgactttataag

SEQ ID NO: 381467 - DNA, 30 bp, Artificial Sequence
  Synthetic oligonucleotide
cattcaatgtcggtcaccccgccaactaag

SEQ ID NO: 381468 - DNA, 30 bp, Artificial Sequence
  Synthetic oligonucleotide
cgaaatttgtgatctgggggtgcaactaag

SEQ ID NO: 381469 - DNA, 31 bp, Artificial Sequence
  Synthetic oligonucleotide
ccttatggttgtgtgtatctagtgaactaag

SEQ ID NO: 381470 - DNA, 30 bp, Artificial Sequence
  Synthetic oligonucleotide
gggatttaggttaagctcaacgacactaag

SEQ ID NO: 381471 - DNA, 30 bp, Artificial Sequence
  Synthetic oligonucleotide
tagcgtttgcagactagacacacgactaag

SEQ ID NO: 381472 - DNA, 30 bp, Artificial Sequence
  Synthetic oligonucleotide
ttctatgcgcgtcgttagtaagggactaag

SEQ ID NO: 381473 - DNA, 30 bp, Artificial Sequence
  Synthetic oligonucleotide
gtacctgtcgcggaacccaatatgactaag

SEQ ID NO: 381474 - DNA, 30 bp, Artificial Sequence
  Synthetic oligonucleotide
ttggtctctataaagatatctaatactaag

SEQ ID NO: 381475 - DNA, 30 bp, Artificial Sequence
  Synthetic oligonucleotide
aatccatcttaaatggtcaatcctactaag

SEQ ID NO: 381476 - DNA, 30 bp, Artificial Sequence
  Synthetic oligonucleotide
gaccactggtgacggcttctgtgtactaag

SEQ ID NO: 381477 - DNA, 30 bp, Artificial Sequence
  Synthetic oligonucleotide
gaaatcgactctgaagaagtagttactaag

SEQ ID NO: 381478 - DNA, 30 bp, Artificial Sequence
  Synthetic oligonucleotide
tccagtgatactgcggcgtggcggcctaag

SEQ ID NO: 381479 - DNA, 31 bp, Artificial Sequence
  Synthetic oligonucleotide
tgataggctagatctttagcatctgcctaag

SEQ ID NO: 381480 - DNA, 30 bp, Artificial Sequence
  Synthetic oligonucleotide
atgagttatagatacttgacggtgcctaag

SEQ ID NO: 381481 - DNA, 30 bp, Artificial Sequence
  Synthetic oligonucleotide
acttggtggattatattacagttgcctaag

SEQ ID NO: 381482 - DNA, 29 bp, Artificial Sequence
  Synthetic oligonucleotide
cttgggcgggaaacacgagcactcctaag

SEQ ID NO: 381483 - DNA, 30 bp, Artificial Sequence
  Synthetic oligonucleotide
aaaataaggaaaaattgcaactacgctaag

SEQ ID NO: 381484 - DNA, 30 bp, Artificial Sequence
  Synthetic oligonucleotide
gctctctcggaaaacacgggcatcgctaag

SEQ ID NO: 381485 - DNA, 30 bp, Artificial Sequence
  Synthetic oligonucleotide
atgggaaactcttaatggtcttttgctaag

SEQ ID NO: 381486 - DNA, 30 bp, Artificial Sequence
  Synthetic oligonucleotide
acctgcgggggattccgtgaaggatctaag

SEQ ID NO: 381487 - DNA, 30 bp, Artificial Sequence
  Synthetic oligonucleotide
aacgcgtactaagctgtagcaacttctaag

SEQ ID NO: 381488 - DNA, 30 bp, Artificial Sequence
  Synthetic oligonucleotide
gatggtgttttgcccggtgctctttctaag

SEQ ID NO: 381489 - DNA, 30 bp, Artificial Sequence
  Synthetic oligonucleotide
gcgccatgtcgtgttagttctgtttctaag

SEQ ID NO: 381490 - DNA, 30 bp, Artificial Sequence
  Synthetic oligonucleotide
tgttttcgcgtgggcgctttgttgagtaag

SEQ ID NO: 381491 - DNA, 30 bp, Artificial Sequence
  Synthetic oligonucleotide
ggatgagtcttcggaccttattcccgtaag

SEQ ID NO: 381492 - DNA, 30 bp, Artificial Sequence
  Synthetic oligonucleotide
taagtcctgtgtagctgggcgttccgtaag

SEQ ID NO: 381493 - DNA, 30 bp, Artificial Sequence
  Synthetic oligonucleotide
cgagaggataccctctcacggacgcgtaag

SEQ ID NO: 381494 - DNA, 30 bp, Artificial Sequence
  Synthetic oligonucleotide
atgacgccttagctataagtctcgcgtaag

SEQ ID NO: 381495 - DNA, 30 bp, Artificial Sequence
  Synthetic oligonucleotide
agacccgtgtgacgctagaacggtcgtaag

SEQ ID NO: 381496 - DNA, 30 bp, Artificial Sequence
  Synthetic oligonucleotide
gcagttttacgatttggacctattcgtaag

SEQ ID NO: 381497 - DNA, 30 bp, Artificial Sequence
  Synthetic oligonucleotide
acgaaaacgtatgtgaccgcatttcgtaag

SEQ ID NO: 381498 - DNA, 30 bp, Artificial Sequence
  Synthetic oligonucleotide
atactactctcctcatctactgaaggtaag

SEQ ID NO: 381499 - DNA, 30 bp, Artificial Sequence
  Synthetic oligonucleotide
tcggagcttttttgctgacgctaaggtaag

SEQ ID NO: 381500 - DNA, 30 bp, Artificial Sequence
  Synthetic oligonucleotide
aagttttaatacccacggcaaacaggtaag

SEQ ID NO: 381501 - DNA, 30 bp, Artificial Sequence
  Synthetic oligonucleotide
tccactgtagatagtctgggttcaggtaag

SEQ ID NO: 381502 - DNA, 30 bp, Artificial Sequence
  Synthetic oligonucleotide
ttcaaagattaacgccacgcatgcggtaag

SEQ ID NO: 381503 - DNA, 30 bp, Artificial Sequence
  Synthetic oligonucleotide
gctgggctggatgagtgccacgatggtaag

SEQ ID NO: 381504 - DNA, 30 bp, Artificial Sequence
  Synthetic oligonucleotide
tatacatctgtgcctgggacacctggtaag

SEQ ID NO: 381505 - DNA, 30 bp, Artificial Sequence
  Synthetic oligonucleotide
ggaggtctatcactttacgactctggtaag

SEQ ID NO: 381506 - DNA, 30 bp, Artificial Sequence
  Synthetic oligonucleotide
acgatggaaagccttgtatcgtttggtaag

SEQ ID NO: 381507 - DNA, 30 bp, Artificial Sequence
  Synthetic oligonucleotide
ataagtttagtcctactgacgttatgtaag

SEQ ID NO: 381508 - DNA, 30 bp, Artificial Sequence
  Synthetic oligonucleotide
ttacatttctccgtgactcacgtctgtaag

SEQ ID NO: 381509 - DNA, 30 bp, Artificial Sequence
  Synthetic oligonucleotide
tataagttggggtagcaaacaacgtgtaag

SEQ ID NO: 381510 - DNA, 30 bp, Artificial Sequence
  Synthetic oligonucleotide
gggacagggatgacgtgccgctaaattaag

SEQ ID NO: 381511 - DNA, 31 bp, Artificial Sequence
  Synthetic oligonucleotide
caggcgttgctggcgacgattgcacattaag

SEQ ID NO: 381512 - DNA, 30 bp, Artificial Sequence
  Synthetic oligonucleotide
aatctgtaatagaaagcctcattcattaag

SEQ ID NO: 381513 - DNA, 30 bp, Artificial Sequence
  Synthetic oligonucleotide
aggcgagctcctgaatcggtggtgattaag

SEQ ID NO: 381514 - DNA, 30 bp, Artificial Sequence
  Synthetic oligonucleotide
ggtggttggcgtgactttagaaaacttaag

SEQ ID NO: 381515 - DNA, 30 bp, Artificial Sequence
  Synthetic oligonucleotide
agtgaatgacatagtcagcgcatccttaag

SEQ ID NO: 381516 - DNA, 30 bp, Artificial Sequence
  Synthetic oligonucleotide
aatttaagccaaaacaggagaaggcttaag

SEQ ID NO: 381517 - DNA, 30 bp, Artificial Sequence
  Synthetic oligonucleotide
gtacatgagacggggggtgctcatcttaag

SEQ ID NO: 381518 - DNA, 30 bp, Artificial Sequence
  Synthetic oligonucleotide
tttaaccaactttggtttcaggaagttaag

SEQ ID NO: 381519 - DNA, 30 bp, Artificial Sequence
  Synthetic oligonucleotide
gccgccactcttggggactacacagttaag

SEQ ID NO: 381520 - DNA, 30 bp, Artificial Sequence
  Synthetic oligonucleotide
ggagtactttcactgctattcggcgttaag

SEQ ID NO: 381521 - DNA, 30 bp, Artificial Sequence
  Synthetic oligonucleotide
gcagatcactggacatgggcagtcgttaag

SEQ ID NO: 381522 - DNA, 30 bp, Artificial Sequence
  Synthetic oligonucleotide
tacttgctggcggtgtttgacgtcgttaag

SEQ ID NO: 381523 - DNA, 30 bp, Artificial Sequence
  Synthetic oligonucleotide
ccatggagcgcacgatcactaaaggttaag

SEQ ID NO: 381524 - DNA, 30 bp, Artificial Sequence
  Synthetic oligonucleotide
ctatcgctttttcgacttcgacaggttaag

SEQ ID NO: 381525 - DNA, 30 bp, Artificial Sequence
  Synthetic oligonucleotide
tagtctggctacagttgagtggaggttaag

SEQ ID NO: 381526 - DNA, 30 bp, Artificial Sequence
  Synthetic oligonucleotide
aaatgctgaaagtctgatgcataggttaag

SEQ ID NO: 381527 - DNA, 30 bp, Artificial Sequence
  Synthetic oligonucleotide
tttctggattactcgagcacgtaggttaag

SEQ ID NO: 381528 - DNA, 30 bp, Artificial Sequence
  Synthetic oligonucleotide
cctatggttttttgacacgggacggttaag

SEQ ID NO: 381529 - DNA, 30 bp, Artificial Sequence
  Synthetic oligonucleotide
ggccccctgtgttagcattgcttggttaag

SEQ ID NO: 381530 - DNA, 30 bp, Artificial Sequence
  Synthetic oligonucleotide
ggaggctaaaaggaatgagtacatgttaag

SEQ ID NO: 381531 - DNA, 30 bp, Artificial Sequence
  Synthetic oligonucleotide
taagatcaatcaattaccttattatttaag

SEQ ID NO: 381532 - DNA, 30 bp, Artificial Sequence
  Synthetic oligonucleotide
tgattgtttgcgtcaaaaagctgctttaag

SEQ ID NO: 381533 - DNA, 30 bp, Artificial Sequence
  Synthetic oligonucleotide
gcgcttatcagtcggtcaacgtagtttaag

SEQ ID NO: 381534 - DNA, 30 bp, Artificial Sequence
  Synthetic oligonucleotide
atacattgttggctagtaggcgcgtttaag

SEQ ID NO: 381535 - DNA, 30 bp, Artificial Sequence
  Synthetic oligonucleotide
aagcccagttctgaccggaatcattttaag

SEQ ID NO: 381536 - DNA, 30 bp, Artificial Sequence
  Synthetic oligonucleotide
gtagatcggataactggcgcaccttttaag

SEQ ID NO: 381537 - DNA, 30 bp, Artificial Sequence
  Synthetic oligonucleotide
cttcagcacccgacttgggcgccttttaag

SEQ ID NO: 381538 - DNA, 30 bp, Artificial Sequence
  Synthetic oligonucleotide
gcagagaataattcgtgagtgttttttaag

SEQ ID NO: 381539 - DNA, 30 bp, Artificial Sequence
  Synthetic oligonucleotide
ggtaaactggcatggtatcctttttttaag

SEQ ID NO: 381540 - DNA, 30 bp, Artificial Sequence
  Synthetic oligonucleotide
gcagttaaaatgagccggctcacaaaacag

SEQ ID NO: 381541 - DNA, 30 bp, Artificial Sequence
  Synthetic oligonucleotide
cactggtcatgcactacccacataaaacag

SEQ ID NO: 381542 - DNA, 30 bp, Artificial Sequence
  Synthetic oligonucleotide
ccttatggtggtttcctctcggtgaaacag

SEQ ID NO: 381543 - DNA, 30 bp, Artificial Sequence
  Synthetic oligonucleotide
tcattggctgtatagagacatagtaaacag

SEQ ID NO: 381544 - DNA, 30 bp, Artificial Sequence
  Synthetic oligonucleotide
ggttctgtttcttccagttgttttaaacag

SEQ ID NO: 381545 - DNA, 30 bp, Artificial Sequence
  Synthetic oligonucleotide
gacgcgggaactagggtgtcgatacaacag

SEQ ID NO: 381546 - DNA, 30 bp, Artificial Sequence
  Synthetic oligonucleotide
gaaagtcaagacaacgtagatgtacaacag

SEQ ID NO: 381547 - DNA, 31 bp, Artificial Sequence
  Synthetic oligonucleotide
aatggtttcaacgttgtcaggtgtccaacag

SEQ ID NO: 381548 - DNA, 30 bp, Artificial Sequence
  Synthetic oligonucleotide
tttcttgggaggggactgtgacggcaacag

SEQ ID NO: 381549 - DNA, 30 bp, Artificial Sequence
  Synthetic oligonucleotide
ccataatagctgactagcgtagggcaacag

SEQ ID NO: 381550 - DNA, 30 bp, Artificial Sequence
  Synthetic oligonucleotide
ggggtctgactcagctcggaacctcaacag

SEQ ID NO: 381551 - DNA, 30 bp, Artificial Sequence
  Synthetic oligonucleotide
ctgttcgacggtaggttgagcacagaacag

SEQ ID NO: 381552 - DNA, 30 bp, Artificial Sequence
  Synthetic oligonucleotide
taatatcgtcttctgtgtgtcttagaacag

SEQ ID NO: 381553 - DNA, 31 bp, Artificial Sequence
  Synthetic oligonucleotide
taagttaagcagcagtctcataggcgaacag

SEQ ID NO: 381554 - DNA, 30 bp, Artificial Sequence
  Synthetic oligonucleotide
tggatatcgccgtccactggccaggaacag

SEQ ID NO: 381555 - DNA, 30 bp, Artificial Sequence
  Synthetic oligonucleotide
tcgcacaatagcgaccgaggcactgaacag

SEQ ID NO: 381556 - DNA, 30 bp, Artificial Sequence
  Synthetic oligonucleotide
gcgaggtaataggacggaaataactaacag

SEQ ID NO: 381557 - DNA, 30 bp, Artificial Sequence
  Synthetic oligonucleotide
gaatagtgtataattagataactctaacag

SEQ ID NO: 381558 - DNA, 30 bp, Artificial Sequence
  Synthetic oligonucleotide
atcacgatatgggttgttgtgttctaacag

SEQ ID NO: 381559 - DNA, 30 bp, Artificial Sequence
  Synthetic oligonucleotide
ttaaacgtacacattcaggatatttaacag

SEQ ID NO: 381560 - DNA, 30 bp, Artificial Sequence
  Synthetic oligonucleotide
tattataggttggctgccaaggaaacacag

SEQ ID NO: 381561 - DNA, 30 bp, Artificial Sequence
  Synthetic oligonucleotide
gtctaaacaatcttatgcgagtacacacag

SEQ ID NO: 381562 - DNA, 30 bp, Artificial Sequence
  Synthetic oligonucleotide
cacttcatacaggtcgataggctgacacag

SEQ ID NO: 381563 - DNA, 30 bp, Artificial Sequence
  Synthetic oligonucleotide
gaggtcgcattgcgctcgcataatacacag

SEQ ID NO: 381564 - DNA, 30 bp, Artificial Sequence
  Synthetic oligonucleotide
tagcatacaggtgtctgcctctcaccacag

SEQ ID NO: 381565 - DNA, 30 bp, Artificial Sequence
  Synthetic oligonucleotide
tggggtgtgcgcaagcgataatgaccacag

SEQ ID NO: 381566 - DNA, 30 bp, Artificial Sequence
  Synthetic oligonucleotide
ggttatgcatgcatttcaaccataccacag

SEQ ID NO: 381567 - DNA, 30 bp, Artificial Sequence
  Synthetic oligonucleotide
aaggcggccggaacgggggtgaaagcacag

SEQ ID NO: 381568 - DNA, 30 bp, Artificial Sequence
  Synthetic oligonucleotide
tctcgatttccagctcgtcggtcagcacag

SEQ ID NO: 381569 - DNA, 30 bp, Artificial Sequence
  Synthetic oligonucleotide
gtcccagtcttccaaaaattattagcacag

SEQ ID NO: 381570 - DNA, 30 bp, Artificial Sequence
  Synthetic oligonucleotide
taccaccagttgaatgtatctggcgcacag

SEQ ID NO: 381571 - DNA, 30 bp, Artificial Sequence
  Synthetic oligonucleotide
gtccaagacattttataaagaatggcacag

SEQ ID NO: 381572 - DNA, 30 bp, Artificial Sequence
  Synthetic oligonucleotide
tgactaatatacaaactgtccgtggcacag

SEQ ID NO: 381573 - DNA, 30 bp, Artificial Sequence
  Synthetic oligonucleotide
gcttgaatttagttcaattgcaatgcacag

SEQ ID NO: 381574 - DNA, 30 bp, Artificial Sequence
  Synthetic oligonucleotide
gtgctgtgtgatgaaaatctacttgcacag

SEQ ID NO: 381575 - DNA, 30 bp, Artificial Sequence
  Synthetic oligonucleotide
aggtaaacatgttcgttttatgttgcacag

SEQ ID NO: 381576 - DNA, 30 bp, Artificial Sequence
  Synthetic oligonucleotide
taaatttgtctaaagtacaatcactcacag

SEQ ID NO: 381577 - DNA, 30 bp, Artificial Sequence
  Synthetic oligonucleotide
tgctacaccgtcgttgtcattgggtcacag

SEQ ID NO: 381578 - DNA, 30 bp, Artificial Sequence
  Synthetic oligonucleotide
atcatagaattaactattcgtatcagacag

SEQ ID NO: 381579 - DNA, 31 bp, Artificial Sequence
  Synthetic oligonucleotide
taagcaatatggatgattttagactagacag

SEQ ID NO: 381580 - DNA, 30 bp, Artificial Sequence
  Synthetic oligonucleotide
gtttggcgccgtctctggcttgaacgacag

SEQ ID NO: 381581 - DNA, 30 bp, Artificial Sequence
  Synthetic oligonucleotide
taacactaatccaccttgccagcacgacag

SEQ ID NO: 381582 - DNA, 30 bp, Artificial Sequence
  Synthetic oligonucleotide
cggtgttccctgatacagctaatgcgacag

SEQ ID NO: 381583 - DNA, 30 bp, Artificial Sequence
  Synthetic oligonucleotide
tagaccgatagggtataaattcatcgacag

SEQ ID NO: 381584 - DNA, 30 bp, Artificial Sequence
  Synthetic oligonucleotide
atgtacgcgtactgcctcttctctcgacag

SEQ ID NO: 381585 - DNA, 30 bp, Artificial Sequence
  Synthetic oligonucleotide
ccaacggaccagtaacatggccaaggacag

SEQ ID NO: 381586 - DNA, 30 bp, Artificial Sequence
  Synthetic oligonucleotide
cgcacaggttttgatctctgtcaaggacag

SEQ ID NO: 381587 - DNA, 30 bp, Artificial Sequence
  Synthetic oligonucleotide
ctgcgcaatataatgtgcgcataaggacag

SEQ ID NO: 381588 - DNA, 30 bp, Artificial Sequence
  Synthetic oligonucleotide
aacaaacgtgttacgttagataacggacag

SEQ ID NO: 381589 - DNA, 30 bp, Artificial Sequence
  Synthetic oligonucleotide
ccggggcctctggatccttaggcgggacag

SEQ ID NO: 381590 - DNA, 30 bp, Artificial Sequence
  Synthetic oligonucleotide
tgtatggcgcgtatctttctgttctgacag

SEQ ID NO: 381591 - DNA, 30 bp, Artificial Sequence
  Synthetic oligonucleotide
gatgcggttgataagtattcgcggtgacag

SEQ ID NO: 381592 - DNA, 30 bp, Artificial Sequence
  Synthetic oligonucleotide
attagtggaagaggtgtgagttggtgacag

SEQ ID NO: 381593 - DNA, 30 bp, Artificial Sequence
  Synthetic oligonucleotide
aaaaaggaagcaatgatatgcgtgtgacag

SEQ ID NO: 381594 - DNA, 30 bp, Artificial Sequence
  Synthetic oligonucleotide
ttgcccaagttatagcttgagttaatacag

SEQ ID NO: 381595 - DNA, 30 bp, Artificial Sequence
  Synthetic oligonucleotide
atcaatctgcggcttacggggacactacag

SEQ ID NO: 381596 - DNA, 30 bp, Artificial Sequence
  Synthetic oligonucleotide
ccatgattcgccgaccgtcctgtactacag

SEQ ID NO: 381597 - DNA, 30 bp, Artificial Sequence
  Synthetic oligonucleotide
ggctcgaggtccagcatgcctgtgctacag

SEQ ID NO: 381598 - DNA, 30 bp, Artificial Sequence
  Synthetic oligonucleotide
gacgctcagctgaagaaggggactctacag

SEQ ID NO: 381599 - DNA, 30 bp, Artificial Sequence
  Synthetic oligonucleotide
cacgctgtcgtggtggcgcgaggtctacag

SEQ ID NO: 381600 - DNA, 30 bp, Artificial Sequence
  Synthetic oligonucleotide
gggctacgcaacgtactgcggtttctacag

SEQ ID NO: 381601 - DNA, 30 bp, Artificial Sequence
  Synthetic oligonucleotide
gccggcaggttacagacacattcagtacag

SEQ ID NO: 381602 - DNA, 30 bp, Artificial Sequence
  Synthetic oligonucleotide
tgtagttgaccagaccgaaccctagtacag

SEQ ID NO: 381603 - DNA, 30 bp, Artificial Sequence
  Synthetic oligonucleotide
aggacacgagtcgagcgcagacccgtacag

SEQ ID NO: 381604 - DNA, 30 bp, Artificial Sequence
  Synthetic oligonucleotide
ggctccataattacagaattcccggtacag

SEQ ID NO: 381605 - DNA, 30 bp, Artificial Sequence
  Synthetic oligonucleotide
aacaatcgaaaccatttcctttgtgtacag

SEQ ID NO: 381606 - DNA, 30 bp, Artificial Sequence
  Synthetic oligonucleotide
cctgcagtattattcgtctagtaattacag

SEQ ID NO: 381607 - DNA, 30 bp, Artificial Sequence
  Synthetic oligonucleotide
ttactgtaatcttgtagtagaagattacag

SEQ ID NO: 381608 - DNA, 30 bp, Artificial Sequence
  Synthetic oligonucleotide
tgcagccagttgatttggagtcgcttacag

SEQ ID NO: 381609 - DNA, 30 bp, Artificial Sequence
  Synthetic oligonucleotide
tcaaatacatggcaccgtagatttttacag

SEQ ID NO: 381610 - DNA, 30 bp, Artificial Sequence
  Synthetic oligonucleotide
tttaatcccgtctcaaagaggtttttacag

SEQ ID NO: 381611 - DNA, 30 bp, Artificial Sequence
  Synthetic oligonucleotide
gtaattactttcgtccgttatttcaaccag

SEQ ID NO: 381612 - DNA, 30 bp, Artificial Sequence
  Synthetic oligonucleotide
tcgaaccccgctacctgacgtgagaaccag

SEQ ID NO: 381613 - DNA, 30 bp, Artificial Sequence
  Synthetic oligonucleotide
tatgttgaattcatacgtcggtataaccag

SEQ ID NO: 381614 - DNA, 30 bp, Artificial Sequence
  Synthetic oligonucleotide
ttacgaataacactggacggaacgcaccag

SEQ ID NO: 381615 - DNA, 30 bp, Artificial Sequence
  Synthetic oligonucleotide
gccgcttccccagcgtgtcacccgcaccag

SEQ ID NO: 381616 - DNA, 30 bp, Artificial Sequence
  Synthetic oligonucleotide
tgtacttcatgcctctcagactcgcaccag

SEQ ID NO: 381617 - DNA, 30 bp, Artificial Sequence
  Synthetic oligonucleotide
gtccacattcaaatggaccgcaatcaccag

SEQ ID NO: 381618 - DNA, 30 bp, Artificial Sequence
  Synthetic oligonucleotide
aacttaaaggggggctatgaaatagaccag

SEQ ID NO: 381619 - DNA, 30 bp, Artificial Sequence
  Synthetic oligonucleotide
tgtacttccccgtgtgcgacgtccgaccag

SEQ ID NO: 381620 - DNA, 30 bp, Artificial Sequence
  Synthetic oligonucleotide
gacgcacggtgcggatttaggcgcgaccag

SEQ ID NO: 381621 - DNA, 30 bp, Artificial Sequence
  Synthetic oligonucleotide
catatgaagactcctcagagaggggaccag

SEQ ID NO: 381622 - DNA, 30 bp, Artificial Sequence
  Synthetic oligonucleotide
cttgatgtgtgtagggagacgaaataccag

SEQ ID NO: 381623 - DNA, 30 bp, Artificial Sequence
  Synthetic oligonucleotide
tacgccctgaggccacataatttataccag

SEQ ID NO: 381624 - DNA, 30 bp, Artificial Sequence
  Synthetic oligonucleotide
ttttatgtgcagccttgactatgctaccag

SEQ ID NO: 381625 - DNA, 30 bp, Artificial Sequence
  Synthetic oligonucleotide
tgaccgttcatgagtcgtggtcagtaccag

SEQ ID NO: 381626 - DNA, 30 bp, Artificial Sequence
  Synthetic oligonucleotide
caagtattaagtagcgggttgtcttaccag

SEQ ID NO: 381627 - DNA, 30 bp, Artificial Sequence
  Synthetic oligonucleotide
gataggtgaggaatcaggtcgtccacccag

SEQ ID NO: 381628 - DNA, 30 bp, Artificial Sequence
  Synthetic oligonucleotide
gctccgccaagtgggcgaaacaggacccag

SEQ ID NO: 381629 - DNA, 30 bp, Artificial Sequence
  Synthetic oligonucleotide
atggggtggaatcactgggggtggacccag

SEQ ID NO: 381630 - DNA, 30 bp, Artificial Sequence
  Synthetic oligonucleotide
tgctgccaataggttaggcgagtgacccag

SEQ ID NO: 381631 - DNA, 30 bp, Artificial Sequence
  Synthetic oligonucleotide
tgaggtacgggatttagttctgtgacccag

SEQ ID NO: 381632 - DNA, 30 bp, Artificial Sequence
  Synthetic oligonucleotide
gggatgggataaagtgtaatggcaccccag

SEQ ID NO: 381633 - DNA, 30 bp, Artificial Sequence
  Synthetic oligonucleotide
tgtctgtttatgttgactgtccacccccag

SEQ ID NO: 381634 - DNA, 30 bp, Artificial Sequence
  Synthetic oligonucleotide
gtaaacttacacttgagagggaagccccag

SEQ ID NO: 381635 - DNA, 30 bp, Artificial Sequence
  Synthetic oligonucleotide
atatccaacggcttggtcgacccgccccag

SEQ ID NO: 381636 - DNA, 30 bp, Artificial Sequence
  Synthetic oligonucleotide
attgctcttcactctcttctcccgccccag

SEQ ID NO: 381637 - DNA, 30 bp, Artificial Sequence
  Synthetic oligonucleotide
ccggagtaagctcggggctgtactccccag

SEQ ID NO: 381638 - DNA, 30 bp, Artificial Sequence
  Synthetic oligonucleotide
caaaatccggactaatggcacgaagcccag

SEQ ID NO: 381639 - DNA, 30 bp, Artificial Sequence
  Synthetic oligonucleotide
ttcttgtacatgtcctgatcaagtgcccag

SEQ ID NO: 381640 - DNA, 30 bp, Artificial Sequence
  Synthetic oligonucleotide
agaagaccaaatacgaagcgctggtcccag

SEQ ID NO: 381641 - DNA, 30 bp, Artificial Sequence
  Synthetic oligonucleotide
ggttctagggcgcattcatttcgaagccag

SEQ ID NO: 381642 - DNA, 30 bp, Artificial Sequence
  Synthetic oligonucleotide
tcttgctcacagagggtggtgcagagccag

SEQ ID NO: 381643 - DNA, 30 bp, Artificial Sequence
  Synthetic oligonucleotide
tttgaagttgagactttggatattagccag

SEQ ID NO: 381644 - DNA, 30 bp, Artificial Sequence
  Synthetic oligonucleotide
atcgtatttgagatcattttcgaacgccag

SEQ ID NO: 381645 - DNA, 30 bp, Artificial Sequence
  Synthetic oligonucleotide
cagagggtggctgaatagccgcgacgccag

SEQ ID NO: 381646 - DNA, 30 bp, Artificial Sequence
  Synthetic oligonucleotide
gttctatagcttgcgtgtgccggacgccag

SEQ ID NO: 381647 - DNA, 30 bp, Artificial Sequence
  Synthetic oligonucleotide
aagtctttaaatagccccaaaagccgccag

SEQ ID NO: 381648 - DNA, 30 bp, Artificial Sequence
  Synthetic oligonucleotide
tgcagaaatcggcggtacgccaggcgccag

SEQ ID NO: 381649 - DNA, 30 bp, Artificial Sequence
  Synthetic oligonucleotide
caactgtctcatagttataaatctcgccag

SEQ ID NO: 381650 - DNA, 30 bp, Artificial Sequence
  Synthetic oligonucleotide
atttcggttcagccacaagtttttcgccag

SEQ ID NO: 381651 - DNA, 30 bp, Artificial Sequence
  Synthetic oligonucleotide
atcctggaggccttcgttaccggaggccag

SEQ ID NO: 381652 - DNA, 30 bp, Artificial Sequence
  Synthetic oligonucleotide
gcccggactcacaatttaatttgcggccag

SEQ ID NO: 381653 - DNA, 30 bp, Artificial Sequence
  Synthetic oligonucleotide
ggagagggcaactgtcgtagtacgggccag

SEQ ID NO: 381654 - DNA, 30 bp, Artificial Sequence
  Synthetic oligonucleotide
cgatcatcgggctcgacggatctatgccag

SEQ ID NO: 381655 - DNA, 30 bp, Artificial Sequence
  Synthetic oligonucleotide
attttaggagctccgaacccagagtgccag

SEQ ID NO: 381656 - DNA, 30 bp, Artificial Sequence
  Synthetic oligonucleotide
agcacggcgctaaataacaaagcgtgccag

SEQ ID NO: 381657 - DNA, 30 bp, Artificial Sequence
  Synthetic oligonucleotide
aactggatgtactatacccactcgtgccag

SEQ ID NO: 381658 - DNA, 30 bp, Artificial Sequence
  Synthetic oligonucleotide
accgatagggttcatggagtcctcatccag

SEQ ID NO: 381659 - DNA, 30 bp, Artificial Sequence
  Synthetic oligonucleotide
tcaagcgaagcggggagcgtgaagatccag

SEQ ID NO: 381660 - DNA, 30 bp, Artificial Sequence
  Synthetic oligonucleotide
tgtccggagactgcaccttctgtgatccag

SEQ ID NO: 381661 - DNA, 30 bp, Artificial Sequence
  Synthetic oligonucleotide
tcctcaaccttatagatcggacgtatccag

SEQ ID NO: 381662 - DNA, 30 bp, Artificial Sequence
  Synthetic oligonucleotide
ccttgcctccgacgcggtgctcacctccag

SEQ ID NO: 381663 - DNA, 30 bp, Artificial Sequence
  Synthetic oligonucleotide
agatgactgatcttggggattagcctccag

SEQ ID NO: 381664 - DNA, 30 bp, Artificial Sequence
  Synthetic oligonucleotide
tatccggtgatagggcgccctcggctccag

SEQ ID NO: 381665 - DNA, 30 bp, Artificial Sequence
  Synthetic oligonucleotide
cccaacaggggtcccggtagtatgctccag

SEQ ID NO: 381666 - DNA, 30 bp, Artificial Sequence
  Synthetic oligonucleotide
cctgatggagataccactttggatctccag

SEQ ID NO: 381667 - DNA, 30 bp, Artificial Sequence
  Synthetic oligonucleotide
atatccaatggaatttatagctttctccag

SEQ ID NO: 381668 - DNA, 30 bp, Artificial Sequence
  Synthetic oligonucleotide
cttgagcctcgcaatagtttataagtccag

SEQ ID NO: 381669 - DNA, 30 bp, Artificial Sequence
  Synthetic oligonucleotide
ttgcgcaggcgggcttaaaaacccgtccag

SEQ ID NO: 381670 - DNA, 30 bp, Artificial Sequence
  Synthetic oligonucleotide
ggctaggagcttcatatatacaaggtccag

SEQ ID NO: 381671 - DNA, 30 bp, Artificial Sequence
  Synthetic oligonucleotide
ttcaggagtcgaacacagtcattggtccag

SEQ ID NO: 381672 - DNA, 30 bp, Artificial Sequence
  Synthetic oligonucleotide
gaaactggtatgaatgatttcttggtccag

SEQ ID NO: 381673 - DNA, 30 bp, Artificial Sequence
  Synthetic oligonucleotide
ccaacgcactagcttgttctagatgtccag

SEQ ID NO: 381674 - DNA, 30 bp, Artificial Sequence
  Synthetic oligonucleotide
agggataatccgggattctctatattccag

SEQ ID NO: 381675 - DNA, 30 bp, Artificial Sequence
  Synthetic oligonucleotide
cggacgtagacttaaagcattttattccag

SEQ ID NO: 381676 - DNA, 30 bp, Artificial Sequence
  Synthetic oligonucleotide
gaatctcttacgcgtgcgtttttcttccag

SEQ ID NO: 381677 - DNA, 30 bp, Artificial Sequence
  Synthetic oligonucleotide
aagaatacgacgtctcagaggcctttccag

SEQ ID NO: 381678 - DNA, 30 bp, Artificial Sequence
  Synthetic oligonucleotide
gagtctcttgagtttggtccacttttccag

SEQ ID NO: 381679 - DNA, 30 bp, Artificial Sequence
  Synthetic oligonucleotide
caaaccgggagactcccagggtttttccag

SEQ ID NO: 381680 - DNA, 30 bp, Artificial Sequence
  Synthetic oligonucleotide
acagtctctcagttggcacgaaaaaagcag

SEQ ID NO: 381681 - DNA, 30 bp, Artificial Sequence
  Synthetic oligonucleotide
tactcttttatcaggtgccgtacaaagcag

SEQ ID NO: 381682 - DNA, 30 bp, Artificial Sequence
  Synthetic oligonucleotide
atgcttcttgttgctactatgcccaagcag

SEQ ID NO: 381683 - DNA, 30 bp, Artificial Sequence
  Synthetic oligonucleotide
attgcaggaagaaatttgtttgtcaagcag

SEQ ID NO: 381684 - DNA, 30 bp, Artificial Sequence
  Synthetic oligonucleotide
agcgctaaatgactataaaagtcgaagcag

SEQ ID NO: 381685 - DNA, 30 bp, Artificial Sequence
  Synthetic oligonucleotide
acaaagcgtctccgagtttggcgtaagcag

SEQ ID NO: 381686 - DNA, 30 bp, Artificial Sequence
  Synthetic oligonucleotide
gggtccggtttggacgccagtcaacagcag

SEQ ID NO: 381687 - DNA, 30 bp, Artificial Sequence
  Synthetic oligonucleotide
aaaagagtatctccaacggtggcacagcag

SEQ ID NO: 381688 - DNA, 30 bp, Artificial Sequence
  Synthetic oligonucleotide
gcgtataagaacatctctacttgacagcag

SEQ ID NO: 381689 - DNA, 30 bp, Artificial Sequence
  Synthetic oligonucleotide
aatgtcggaaaacttctcccagagcagcag

SEQ ID NO: 381690 - DNA, 30 bp, Artificial Sequence
  Synthetic oligonucleotide
ctgggagtggtgtgataattcgagcagcag

SEQ ID NO: 381691 - DNA, 30 bp, Artificial Sequence
  Synthetic oligonucleotide
ttgatctccccccggtatccctctcagcag

SEQ ID NO: 381692 - DNA, 30 bp, Artificial Sequence
  Synthetic oligonucleotide
agtttatcgatcgtaatgataggtcagcag

SEQ ID NO: 381693 - DNA, 30 bp, Artificial Sequence
  Synthetic oligonucleotide
gagtatcaagttcttttttatagggagcag

SEQ ID NO: 381694 - DNA, 30 bp, Artificial Sequence
  Synthetic oligonucleotide
agatttacactggccacgacctgtgagcag

SEQ ID NO: 381695 - DNA, 30 bp, Artificial Sequence
  Synthetic oligonucleotide
ccccattcatacccaacaacccttgagcag

SEQ ID NO: 381696 - DNA, 30 bp, Artificial Sequence
  Synthetic oligonucleotide
accggcggtcaaggtggccgggttgagcag

SEQ ID NO: 381697 - DNA, 30 bp, Artificial Sequence
  Synthetic oligonucleotide
gcatgactaaatggctgattttactagcag

SEQ ID NO: 381698 - DNA, 30 bp, Artificial Sequence
  Synthetic oligonucleotide
tccgggtcattctccgaaggaccctagcag

SEQ ID NO: 381699 - DNA, 30 bp, Artificial Sequence
  Synthetic oligonucleotide
tgttaacgacgtaagagtgcgatctagcag

SEQ ID NO: 381700 - DNA, 30 bp, Artificial Sequence
  Synthetic oligonucleotide
gatcaccattgcccgctccggagaacgcag

SEQ ID NO: 381701 - DNA, 30 bp, Artificial Sequence
  Synthetic oligonucleotide
gcaaaacgtcaagggaccgttaacacgcag

SEQ ID NO: 381702 - DNA, 30 bp, Artificial Sequence
  Synthetic oligonucleotide
gagaaactgcggttggacctggacacgcag

SEQ ID NO: 381703 - DNA, 30 bp, Artificial Sequence
  Synthetic oligonucleotide
aggggctatgctctggtatagtacacgcag

SEQ ID NO: 381704 - DNA, 30 bp, Artificial Sequence
  Synthetic oligonucleotide
gccgtgaaccattggtatgcagccacgcag

SEQ ID NO: 381705 - DNA, 30 bp, Artificial Sequence
  Synthetic oligonucleotide
aatatccggaacgccacgacaccgacgcag

SEQ ID NO: 381706 - DNA, 30 bp, Artificial Sequence
  Synthetic oligonucleotide
ggtaggcatgggatgtcggaatggacgcag

SEQ ID NO: 381707 - DNA, 30 bp, Artificial Sequence
  Synthetic oligonucleotide
gaggattcaagcttgtttatagcaccgcag

SEQ ID NO: 381708 - DNA, 30 bp, Artificial Sequence
  Synthetic oligonucleotide
cggtactctcagagaccataacgaccgcag

SEQ ID NO: 381709 - DNA, 30 bp, Artificial Sequence
  Synthetic oligonucleotide
acgagcaatcctccatgcccgttaccgcag

SEQ ID NO: 381710 - DNA, 30 bp, Artificial Sequence
  Synthetic oligonucleotide
aagttttgtacagtgggctttaacccgcag

SEQ ID NO: 381711 - DNA, 30 bp, Artificial Sequence
  Synthetic oligonucleotide
ctagctgccgcatagtgaggttacccgcag

SEQ ID NO: 381712 - DNA, 30 bp, Artificial Sequence
  Synthetic oligonucleotide
agcatactccacttaacgtcttggccgcag

SEQ ID NO: 381713 - DNA, 30 bp, Artificial Sequence
  Synthetic oligonucleotide
gttcggcggaaaattgcgtgtgctccgcag

SEQ ID NO: 381714 - DNA, 30 bp, Artificial Sequence
  Synthetic oligonucleotide
ggcaatttggaaactggcaattttccgcag

SEQ ID NO: 381715 - DNA, 30 bp, Artificial Sequence
  Synthetic oligonucleotide
aaatttgcgcaaatgtctcgacaggcgcag

SEQ ID NO: 381716 - DNA, 30 bp, Artificial Sequence
  Synthetic oligonucleotide
cttagaaggcttgagattcaatatgcgcag

SEQ ID NO: 381717 - DNA, 30 bp, Artificial Sequence
  Synthetic oligonucleotide
ggataccttaacccctgtaccgaatcgcag

SEQ ID NO: 381718 - DNA, 29 bp, Artificial Sequence
  Synthetic oligonucleotide
gctcgaaggaacgtaagtccgggtcgcag

SEQ ID NO: 381719 - DNA, 30 bp, Artificial Sequence
  Synthetic oligonucleotide
atttgcggaccaaaagtataaatgtcgcag

SEQ ID NO: 381720 - DNA, 30 bp, Artificial Sequence
  Synthetic oligonucleotide
ggtctcaaatacaccgcaaagatttcgcag

SEQ ID NO: 381721 - DNA, 30 bp, Artificial Sequence
  Synthetic oligonucleotide
atattcgccactacgttgtctaaaaggcag

SEQ ID NO: 381722 - DNA, 30 bp, Artificial Sequence
  Synthetic oligonucleotide
atgttcggtttctttcacgcacaaaggcag

SEQ ID NO: 381723 - DNA, 30 bp, Artificial Sequence
  Synthetic oligonucleotide
aagtgagactagttggtgtttccaaggcag

SEQ ID NO: 381724 - DNA, 30 bp, Artificial Sequence
  Synthetic oligonucleotide
gtctgtttggtgcaaatatgaaagaggcag

SEQ ID NO: 381725 - DNA, 30 bp, Artificial Sequence
  Synthetic oligonucleotide
tgtttaacataaattcgactgtcgaggcag

SEQ ID NO: 381726 - DNA, 30 bp, Artificial Sequence
  Synthetic oligonucleotide
gcgggtttttggattaggtggaggaggcag

SEQ ID NO: 381727 - DNA, 30 bp, Artificial Sequence
  Synthetic oligonucleotide
gataaacaagagaccgcgagaatgaggcag

SEQ ID NO: 381728 - DNA, 30 bp, Artificial Sequence
  Synthetic oligonucleotide
agatggtctttcttcagaacgcgtaggcag

SEQ ID NO: 381729 - DNA, 30 bp, Artificial Sequence
  Synthetic oligonucleotide
aatactcgtcggccgtaccagcaacggcag

SEQ ID NO: 381730 - DNA, 30 bp, Artificial Sequence
  Synthetic oligonucleotide
gggcatttcttagcccggactttacggcag

SEQ ID NO: 381731 - DNA, 30 bp, Artificial Sequence
  Synthetic oligonucleotide
tgtctttttaggatatcacagtagcggcag

SEQ ID NO: 381732 - DNA, 30 bp, Artificial Sequence
  Synthetic oligonucleotide
taggcccacgcgctccatgggcgagggcag

SEQ ID NO: 381733 - DNA, 30 bp, Artificial Sequence
  Synthetic oligonucleotide
gagatatggcgtgcaccgccaaacgggcag

SEQ ID NO: 381734 - DNA, 30 bp, Artificial Sequence
  Synthetic oligonucleotide
catctgaagtagccgatccgttacgggcag

SEQ ID NO: 381735 - DNA, 30 bp, Artificial Sequence
  Synthetic oligonucleotide
tgtatttgcgaacgccatacttatgggcag

SEQ ID NO: 381736 - DNA, 30 bp, Artificial Sequence
  Synthetic oligonucleotide
cggggtccctggtctaggcggactgggcag

SEQ ID NO: 381737 - DNA, 30 bp, Artificial Sequence
  Synthetic oligonucleotide
gggtttgggatgactagcacgggatggcag

SEQ ID NO: 381738 - DNA, 30 bp, Artificial Sequence
  Synthetic oligonucleotide
ctcttgagtttaagcgtagcaagctggcag

SEQ ID NO: 381739 - DNA, 30 bp, Artificial Sequence
  Synthetic oligonucleotide
tgacttaaggggcaatgtaattcttggcag

SEQ ID NO: 381740 - DNA, 30 bp, Artificial Sequence
  Synthetic oligonucleotide
ttgggatgcgccaattccacccgttggcag

SEQ ID NO: 381741 - DNA, 30 bp, Artificial Sequence
  Synthetic oligonucleotide
ttcgttccagttcatacgtcacgaatgcag

SEQ ID NO: 381742 - DNA, 30 bp, Artificial Sequence
  Synthetic oligonucleotide
cgccagcggtagcatgcgtcctgaatgcag

SEQ ID NO: 381743 - DNA, 30 bp, Artificial Sequence
  Synthetic oligonucleotide
ggaactcaaacccttatccgcagactgcag

SEQ ID NO: 381744 - DNA, 30 bp, Artificial Sequence
  Synthetic oligonucleotide
cttgtgggcaactcatacattgtcctgcag

SEQ ID NO: 381745 - DNA, 30 bp, Artificial Sequence
  Synthetic oligonucleotide
gcctgccacgggtgggtacccaagctgcag

SEQ ID NO: 381746 - DNA, 30 bp, Artificial Sequence
  Synthetic oligonucleotide
atgcccttcaggctgattaccgggctgcag

SEQ ID NO: 381747 - DNA, 30 bp, Artificial Sequence
  Synthetic oligonucleotide
ggagtcaaggtcggtgcgctgctgctgcag

SEQ ID NO: 381748 - DNA, 30 bp, Artificial Sequence
  Synthetic oligonucleotide
gtaagttgatctggtttcttctgagtgcag

SEQ ID NO: 381749 - DNA, 30 bp, Artificial Sequence
  Synthetic oligonucleotide
ctcagtaactgcccagtcaattcggtgcag

SEQ ID NO: 381750 - DNA, 30 bp, Artificial Sequence
  Synthetic oligonucleotide
ccgctgtcaagggggaaaagcagcttgcag

SEQ ID NO: 381751 - DNA, 30 bp, Artificial Sequence
  Synthetic oligonucleotide
gaaagtttgattttacatccaatgttgcag

SEQ ID NO: 381752 - DNA, 30 bp, Artificial Sequence
  Synthetic oligonucleotide
gaaatcattataatcctgtctcgaaatcag

SEQ ID NO: 381753 - DNA, 30 bp, Artificial Sequence
  Synthetic oligonucleotide
ttcttggttcggtatttcagcgtaaatcag

SEQ ID NO: 381754 - DNA, 30 bp, Artificial Sequence
  Synthetic oligonucleotide
ctgtgatactatgggtagttgcagaatcag

SEQ ID NO: 381755 - DNA, 30 bp, Artificial Sequence
  Synthetic oligonucleotide
tgggccatctttcacgtgctgccacatcag

SEQ ID NO: 381756 - DNA, 30 bp, Artificial Sequence
  Synthetic oligonucleotide
ggggtattttagagatggctcgtacatcag

SEQ ID NO: 381757 - DNA, 30 bp, Artificial Sequence
  Synthetic oligonucleotide
ttctgggtagtggacccgcctttacatcag

SEQ ID NO: 381758 - DNA, 30 bp, Artificial Sequence
  Synthetic oligonucleotide
aaagtttagtcagtaatgggctcgcatcag

SEQ ID NO: 381759 - DNA, 30 bp, Artificial Sequence
  Synthetic oligonucleotide
gaaaagacattctacgggttctcgcatcag

SEQ ID NO: 381760 - DNA, 30 bp, Artificial Sequence
  Synthetic oligonucleotide
ttacagttacacgtaaccttgcgcgatcag

SEQ ID NO: 381761 - DNA, 30 bp, Artificial Sequence
  Synthetic oligonucleotide
cgtacagcatgatgcccatttgaggatcag

SEQ ID NO: 381762 - DNA, 30 bp, Artificial Sequence
  Synthetic oligonucleotide
ccatagttaaaccgctagtggtcggatcag

SEQ ID NO: 381763 - DNA, 30 bp, Artificial Sequence
  Synthetic oligonucleotide
taagatgacggtcatccaagcactgatcag

SEQ ID NO: 381764 - DNA, 30 bp, Artificial Sequence
  Synthetic oligonucleotide
tctcacgtagtgacgcttggccgtgatcag

SEQ ID NO: 381765 - DNA, 30 bp, Artificial Sequence
  Synthetic oligonucleotide
aaagacggtggtccgcgcgagggtgatcag

SEQ ID NO: 381766 - DNA, 30 bp, Artificial Sequence
  Synthetic oligonucleotide
gaagttatcgaacgcccttacatatatcag

SEQ ID NO: 381767 - DNA, 30 bp, Artificial Sequence
  Synthetic oligonucleotide
agtcccccattcattatgtggatctatcag

SEQ ID NO: 381768 - DNA, 30 bp, Artificial Sequence
  Synthetic oligonucleotide
gtatgggtggttataactcccccttatcag

SEQ ID NO: 381769 - DNA, 30 bp, Artificial Sequence
  Synthetic oligonucleotide
ctctacgccctgccgacaaacatcactcag

SEQ ID NO: 381770 - DNA, 30 bp, Artificial Sequence
  Synthetic oligonucleotide
gttgtgcgggggtatcagcggccgactcag

SEQ ID NO: 381771 - DNA, 30 bp, Artificial Sequence
  Synthetic oligonucleotide
gcactccggccggtgctgctggcgactcag

SEQ ID NO: 381772 - DNA, 30 bp, Artificial Sequence
  Synthetic oligonucleotide
aaaatcctttatggaccggttagtactcag

SEQ ID NO: 381773 - DNA, 30 bp, Artificial Sequence
  Synthetic oligonucleotide
gttttaagccttaggagtataatgcctcag

SEQ ID NO: 381774 - DNA, 30 bp, Artificial Sequence
  Synthetic oligonucleotide
atactgcggtccagaggtgcccctcctcag

SEQ ID NO: 381775 - DNA, 30 bp, Artificial Sequence
  Synthetic oligonucleotide
aaaagccgtcaagtcgagattaaagctcag

SEQ ID NO: 381776 - DNA, 30 bp, Artificial Sequence
  Synthetic oligonucleotide
aataatcctaacgtgtttaagatagctcag

SEQ ID NO: 381777 - DNA, 30 bp, Artificial Sequence
  Synthetic oligonucleotide
atacactcggaggattttcccgtagctcag

SEQ ID NO: 381778 - DNA, 30 bp, Artificial Sequence
  Synthetic oligonucleotide
cagtgctacccggacagtgggttagctcag

SEQ ID NO: 381779 - DNA, 30 bp, Artificial Sequence
  Synthetic oligonucleotide
gtggcattatttgcgaatgcgcccgctcag

SEQ ID NO: 381780 - DNA, 30 bp, Artificial Sequence
  Synthetic oligonucleotide
agctactctagtgggttaaattccgctcag

SEQ ID NO: 381781 - DNA, 30 bp, Artificial Sequence
  Synthetic oligonucleotide
agcgacagtattgacatttgtgtggctcag

SEQ ID NO: 381782 - DNA, 30 bp, Artificial Sequence
  Synthetic oligonucleotide
ttgagttgacccgccacaattagatctcag

SEQ ID NO: 381783 - DNA, 30 bp, Artificial Sequence
  Synthetic oligonucleotide
cggggtgacgtagtcacgaacggatctcag

SEQ ID NO: 381784 - DNA, 30 bp, Artificial Sequence
  Synthetic oligonucleotide
cccatgtgatagcgtgtcctaatatctcag

SEQ ID NO: 381785 - DNA, 30 bp, Artificial Sequence
  Synthetic oligonucleotide
aaattcatagggcggtccgctgtatctcag

SEQ ID NO: 381786 - DNA, 30 bp, Artificial Sequence
  Synthetic oligonucleotide
tttcctgaggacgaccgtttgtcctctcag

SEQ ID NO: 381787 - DNA, 30 bp, Artificial Sequence
  Synthetic oligonucleotide
tagtacgtagaaagacgagacagctctcag

SEQ ID NO: 381788 - DNA, 30 bp, Artificial Sequence
  Synthetic oligonucleotide
ctttgtcgtcgggaggagactagttctcag

SEQ ID NO: 381789 - DNA, 30 bp, Artificial Sequence
  Synthetic oligonucleotide
aagaaatttgtgagaaccggtctttctcag

SEQ ID NO: 381790 - DNA, 30 bp, Artificial Sequence
  Synthetic oligonucleotide
tgctttagatcgcgtaacgtggcaagtcag

SEQ ID NO: 381791 - DNA, 30 bp, Artificial Sequence
  Synthetic oligonucleotide
ggcatttggcttatggaaacgtacagtcag

SEQ ID NO: 381792 - DNA, 30 bp, Artificial Sequence
  Synthetic oligonucleotide
accctgatcacttaagcttgttccagtcag

SEQ ID NO: 381793 - DNA, 30 bp, Artificial Sequence
  Synthetic oligonucleotide
ctgtgcaactctcggagacccctcagtcag

SEQ ID NO: 381794 - DNA, 30 bp, Artificial Sequence
  Synthetic oligonucleotide
acggtggaggcagagacaattctgcgtcag

SEQ ID NO: 381795 - DNA, 30 bp, Artificial Sequence
  Synthetic oligonucleotide
cgtggcatggccaggcagtaacgcggtcag

SEQ ID NO: 381796 - DNA, 30 bp, Artificial Sequence
  Synthetic oligonucleotide
tatctctactcttccgactataggggtcag

SEQ ID NO: 381797 - DNA, 30 bp, Artificial Sequence
  Synthetic oligonucleotide
aacggagggatggcttagttccactgtcag

SEQ ID NO: 381798 - DNA, 30 bp, Artificial Sequence
  Synthetic oligonucleotide
ttgatgggagggcgctataaaatgtgtcag

SEQ ID NO: 381799 - DNA, 30 bp, Artificial Sequence
  Synthetic oligonucleotide
acatatcaaaggaatgacgattattgtcag

SEQ ID NO: 381800 - DNA, 30 bp, Artificial Sequence
  Synthetic oligonucleotide
gagaatatgtagttgactattacttgtcag

SEQ ID NO: 381801 - DNA, 30 bp, Artificial Sequence
  Synthetic oligonucleotide
caatccggagttcttcgactctgaattcag

SEQ ID NO: 381802 - DNA, 30 bp, Artificial Sequence
  Synthetic oligonucleotide
gtgcctccggagaacggggttaggattcag

SEQ ID NO: 381803 - DNA, 30 bp, Artificial Sequence
  Synthetic oligonucleotide
cactttgagacggttttcaaagggattcag

SEQ ID NO: 381804 - DNA, 30 bp, Artificial Sequence
  Synthetic oligonucleotide
taaaatgccctgttacgtcaagttattcag

SEQ ID NO: 381805 - DNA, 30 bp, Artificial Sequence
  Synthetic oligonucleotide
atgccgggcgcacagtcgtattcgcttcag

SEQ ID NO: 381806 - DNA, 30 bp, Artificial Sequence
  Synthetic oligonucleotide
tcccccgggcatcatacgtcacctcttcag

SEQ ID NO: 381807 - DNA, 30 bp, Artificial Sequence
  Synthetic oligonucleotide
gcccaacttaacattttatgagaagttcag

SEQ ID NO: 381808 - DNA, 30 bp, Artificial Sequence
  Synthetic oligonucleotide
gttgttgcttgaatgttccgatcagttcag

SEQ ID NO: 381809 - DNA, 30 bp, Artificial Sequence
  Synthetic oligonucleotide
ttgtcagtctggtagactgaatccgttcag

SEQ ID NO: 381810 - DNA, 30 bp, Artificial Sequence
  Synthetic oligonucleotide
attggggagtgcttcgttaccggcgttcag

SEQ ID NO: 381811 - DNA, 31 bp, Artificial Sequence
  Synthetic oligonucleotide
tactcatacgccttacgcacaaacggttcag

SEQ ID NO: 381812 - DNA, 30 bp, Artificial Sequence
  Synthetic oligonucleotide
tttgtcataatgcgtgcgaaggcggttcag

SEQ ID NO: 381813 - DNA, 30 bp, Artificial Sequence
  Synthetic oligonucleotide
aatccgccgttctatacttgaggggttcag

SEQ ID NO: 381814 - DNA, 30 bp, Artificial Sequence
  Synthetic oligonucleotide
aattatcttgcgaaattgttctgggttcag

SEQ ID NO: 381815 - DNA, 30 bp, Artificial Sequence
  Synthetic oligonucleotide
cgaaaaattgtggatgttacacttgttcag

SEQ ID NO: 381816 - DNA, 30 bp, Artificial Sequence
  Synthetic oligonucleotide
ccgggtgaattcgttccgttgcaatttcag

SEQ ID NO: 381817 - DNA, 30 bp, Artificial Sequence
  Synthetic oligonucleotide
gattcgagccgtcagactttacgctttcag

SEQ ID NO: 381818 - DNA, 30 bp, Artificial Sequence
  Synthetic oligonucleotide
cctaacagggccttctaacactcgtttcag

SEQ ID NO: 381819 - DNA, 29 bp, Artificial Sequence
  Synthetic oligonucleotide
cgggatcgttaactgcccgtgggtttcag

SEQ ID NO: 381820 - DNA, 30 bp, Artificial Sequence
  Synthetic oligonucleotide
acgcaagctgcgtccgctgctctgtttcag

SEQ ID NO: 381821 - DNA, 30 bp, Artificial Sequence
  Synthetic oligonucleotide
ttcctccgtattgggaaaacaaattttcag

SEQ ID NO: 381822 - DNA, 30 bp, Artificial Sequence
  Synthetic oligonucleotide
tactgctctggtacctcttagcattttcag

SEQ ID NO: 381823 - DNA, 30 bp, Artificial Sequence
  Synthetic oligonucleotide
cgaatctgcgttatccattgcgattttcag

SEQ ID NO: 381824 - DNA, 30 bp, Artificial Sequence
  Synthetic oligonucleotide
aaccaatttattaaagaatcggattttcag

SEQ ID NO: 381825 - DNA, 30 bp, Artificial Sequence
  Synthetic oligonucleotide
aatagagcgaaatgtacgaactattttcag

SEQ ID NO: 381826 - DNA, 30 bp, Artificial Sequence
  Synthetic oligonucleotide
aatctcacactgtggcttgctgagaaagag

SEQ ID NO: 381827 - DNA, 30 bp, Artificial Sequence
  Synthetic oligonucleotide
ttcgacctggcaccctaggctatacaagag

SEQ ID NO: 381828 - DNA, 30 bp, Artificial Sequence
  Synthetic oligonucleotide
gctcttcagaagtctggaattttccaagag

SEQ ID NO: 381829 - DNA, 30 bp, Artificial Sequence
  Synthetic oligonucleotide
gatttagacctagtaccggtatcgcaagag

SEQ ID NO: 381830 - DNA, 29 bp, Artificial Sequence
  Synthetic oligonucleotide
gcgcatcggctgagtcagtacttcaagag

SEQ ID NO: 381831 - DNA, 30 bp, Artificial Sequence
  Synthetic oligonucleotide
aactatataaaacaatggtggccagaagag

SEQ ID NO: 381832 - DNA, 30 bp, Artificial Sequence
  Synthetic oligonucleotide
ctccttccagcacactaatcttcagaagag

SEQ ID NO: 381833 - DNA, 30 bp, Artificial Sequence
  Synthetic oligonucleotide
aatcgaagcttccgttttctgaaggaagag

SEQ ID NO: 381834 - DNA, 30 bp, Artificial Sequence
  Synthetic oligonucleotide
tttaggagaatatatgctgtcctggaagag

SEQ ID NO: 381835 - DNA, 30 bp, Artificial Sequence
  Synthetic oligonucleotide
tctttccaaccatgtcagaaacttgaagag

SEQ ID NO: 381836 - DNA, 30 bp, Artificial Sequence
  Synthetic oligonucleotide
tccggcattccgccggcttcgacataagag

SEQ ID NO: 381837 - DNA, 30 bp, Artificial Sequence
  Synthetic oligonucleotide
tctcatcgaaatggtaggtggtggtaagag

SEQ ID NO: 381838 - DNA, 30 bp, Artificial Sequence
  Synthetic oligonucleotide
tcgaactataataaaccgcggtaaacagag

SEQ ID NO: 381839 - DNA, 30 bp, Artificial Sequence
  Synthetic oligonucleotide
tcctagttcgccggtcgctacataacagag

SEQ ID NO: 381840 - DNA, 30 bp, Artificial Sequence
  Synthetic oligonucleotide
ccggagatcacacggccggaccagacagag

SEQ ID NO: 381841 - DNA, 30 bp, Artificial Sequence
  Synthetic oligonucleotide
tggcgtattggaaagccttgtgagacagag

SEQ ID NO: 381842 - DNA, 30 bp, Artificial Sequence
  Synthetic oligonucleotide
ggttcttatgaggccacctaagctacagag

SEQ ID NO: 381843 - DNA, 30 bp, Artificial Sequence
  Synthetic oligonucleotide
tcccgtcgcggtcgatgattgggcgcagag

SEQ ID NO: 381844 - DNA, 30 bp, Artificial Sequence
  Synthetic oligonucleotide
tgatatgggcccttactggatctggcagag

SEQ ID NO: 381845 - DNA, 30 bp, Artificial Sequence
  Synthetic oligonucleotide
caaagacccggtccgggacgtgtggcagag

SEQ ID NO: 381846 - DNA, 30 bp, Artificial Sequence
  Synthetic oligonucleotide
tacggccatactcccaagggtttggcagag

SEQ ID NO: 381847 - DNA, 30 bp, Artificial Sequence
  Synthetic oligonucleotide
aatctggtcctggaatatttagttgcagag

SEQ ID NO: 381848 - DNA, 30 bp, Artificial Sequence
  Synthetic oligonucleotide
cgccgtaagcgtggtctccatccatcagag

SEQ ID NO: 381849 - DNA, 30 bp, Artificial Sequence
  Synthetic oligonucleotide
ataccattaagcagagctcgcggctcagag

SEQ ID NO: 381850 - DNA, 30 bp, Artificial Sequence
  Synthetic oligonucleotide
aatgagatatacgcagttgtgaagtcagag

SEQ ID NO: 381851 - DNA, 30 bp, Artificial Sequence
  Synthetic oligonucleotide
cttttatcgggatcgatggttaattcagag

SEQ ID NO: 381852 - DNA, 30 bp, Artificial Sequence
  Synthetic oligonucleotide
gtctgtccatttcagctggattattcagag

SEQ ID NO: 381853 - DNA, 30 bp, Artificial Sequence
  Synthetic oligonucleotide
attttcagcggattcacggatacttcagag

SEQ ID NO: 381854 - DNA, 30 bp, Artificial Sequence
  Synthetic oligonucleotide
aggtcgatcaaggaaattaagagttcagag

SEQ ID NO: 381855 - DNA, 30 bp, Artificial Sequence
  Synthetic oligonucleotide
gtacccaacaaggaaccttattgttcagag

SEQ ID NO: 381856 - DNA, 30 bp, Artificial Sequence
  Synthetic oligonucleotide
tcaaatgacgtttgaaatataatttcagag

SEQ ID NO: 381857 - DNA, 30 bp, Artificial Sequence
  Synthetic oligonucleotide
gcaaacccaggccggtgtatgatttcagag

SEQ ID NO: 381858 - DNA, 30 bp, Artificial Sequence
  Synthetic oligonucleotide
gaaatatcttctacccacacctcaagagag

SEQ ID NO: 381859 - DNA, 30 bp, Artificial Sequence
  Synthetic oligonucleotide
tgcgaataaggtaggcttacttcaagagag

SEQ ID NO: 381860 - DNA, 30 bp, Artificial Sequence
  Synthetic oligonucleotide
gtaaataaacgggcttacgtcttaagagag

SEQ ID NO: 381861 - DNA, 30 bp, Artificial Sequence
  Synthetic oligonucleotide
gctataacggtctaaattagagccagagag

SEQ ID NO: 381862 - DNA, 30 bp, Artificial Sequence
  Synthetic oligonucleotide
gctctaaaggcttgaagagacgtcagagag

SEQ ID NO: 381863 - DNA, 30 bp, Artificial Sequence
  Synthetic oligonucleotide
gagccatatggctcgtcggtttcgcgagag

SEQ ID NO: 381864 - DNA, 31 bp, Artificial Sequence
  Synthetic oligonucleotide
tacaggggacccccgcgattaaacaggagag

SEQ ID NO: 381865 - DNA, 30 bp, Artificial Sequence
  Synthetic oligonucleotide
ttgggatataaggatacaggcccaggagag

SEQ ID NO: 381866 - DNA, 30 bp, Artificial Sequence
  Synthetic oligonucleotide
acaccccgcgagagcgcctactacggagag

SEQ ID NO: 381867 - DNA, 30 bp, Artificial Sequence
  Synthetic oligonucleotide
gttcgtatcctgcacgctggacgcggagag

SEQ ID NO: 381868 - DNA, 30 bp, Artificial Sequence
  Synthetic oligonucleotide
gggcggcacctcgatctcggtaagggagag

SEQ ID NO: 381869 - DNA, 30 bp, Artificial Sequence
  Synthetic oligonucleotide
ttaacccattcttttatagtagtgggagag

SEQ ID NO: 381870 - DNA, 30 bp, Artificial Sequence
  Synthetic oligonucleotide
tagacaggctatgacatcgtttgtggagag

SEQ ID NO: 381871 - DNA, 30 bp, Artificial Sequence
  Synthetic oligonucleotide
ctctgtctagtacagagctggcactgagag

SEQ ID NO: 381872 - DNA, 30 bp, Artificial Sequence
  Synthetic oligonucleotide
cccactcattagctgtatcactagtgagag

SEQ ID NO: 381873 - DNA, 30 bp, Artificial Sequence
  Synthetic oligonucleotide
agtcaagttgggggcagtcacacttgagag

SEQ ID NO: 381874 - DNA, 30 bp, Artificial Sequence
  Synthetic oligonucleotide
ataggaaacatgtggcatctcgcgatagag

SEQ ID NO: 381875 - DNA, 30 bp, Artificial Sequence
  Synthetic oligonucleotide
cctagctgtgtttacgtgcacaggatagag

SEQ ID NO: 381876 - DNA, 30 bp, Artificial Sequence
  Synthetic oligonucleotide
ggatttagaactatctaccgtatgatagag

SEQ ID NO: 381877 - DNA, 30 bp, Artificial Sequence
  Synthetic oligonucleotide
tcgctctctacggccgtcggtttgatagag

SEQ ID NO: 381878 - DNA, 30 bp, Artificial Sequence
  Synthetic oligonucleotide
gaacttctgtactaacgtcgaaatatagag

SEQ ID NO: 381879 - DNA, 30 bp, Artificial Sequence
  Synthetic oligonucleotide
tataagattaccaggcgtgttactatagag

SEQ ID NO: 381880 - DNA, 30 bp, Artificial Sequence
  Synthetic oligonucleotide
tcgatttccttgacatgacaatttatagag

SEQ ID NO: 381881 - DNA, 30 bp, Artificial Sequence
  Synthetic oligonucleotide
ctgctaaaggttgtgcttagcgtactagag

SEQ ID NO: 381882 - DNA, 30 bp, Artificial Sequence
  Synthetic oligonucleotide
ttccaagtctagcaagtattgaacctagag

SEQ ID NO: 381883 - DNA, 30 bp, Artificial Sequence
  Synthetic oligonucleotide
acatctggggactgtacgtgatccctagag

SEQ ID NO: 381884 - DNA, 30 bp, Artificial Sequence
  Synthetic oligonucleotide
tggggactcgtggcaggtatcaatctagag

SEQ ID NO: 381885 - DNA, 30 bp, Artificial Sequence
  Synthetic oligonucleotide
ctacacgtgtccggccagctatctctagag

SEQ ID NO: 381886 - DNA, 30 bp, Artificial Sequence
  Synthetic oligonucleotide
cgaatggatccggctgggtattaagtagag

SEQ ID NO: 381887 - DNA, 30 bp, Artificial Sequence
  Synthetic oligonucleotide
atagaacacgtactgtaccgacgcgtagag

SEQ ID NO: 381888 - DNA, 30 bp, Artificial Sequence
  Synthetic oligonucleotide
gcacttgccacaacgcagacgtgcgtagag

SEQ ID NO: 381889 - DNA, 30 bp, Artificial Sequence
  Synthetic oligonucleotide
tacacttaagccgtccatggaaaggtagag

SEQ ID NO: 381890 - DNA, 30 bp, Artificial Sequence
  Synthetic oligonucleotide
ggttagccaggggctggttgtccggtagag

SEQ ID NO: 381891 - DNA, 30 bp, Artificial Sequence
  Synthetic oligonucleotide
tttattggatctttactgagcgtggtagag

SEQ ID NO: 381892 - DNA, 30 bp, Artificial Sequence
  Synthetic oligonucleotide
ctatgtcgctctatcctcatatatgtagag

SEQ ID NO: 381893 - DNA, 30 bp, Artificial Sequence
  Synthetic oligonucleotide
gcggttgctagtttacttttcccattagag

SEQ ID NO: 381894 - DNA, 30 bp, Artificial Sequence
  Synthetic oligonucleotide
tagaaaggtttgttggtccgatatttagag

SEQ ID NO: 381895 - DNA, 30 bp, Artificial Sequence
  Synthetic oligonucleotide
gccctagcctttatgagatgaattttagag

SEQ ID NO: 381896 - DNA, 30 bp, Artificial Sequence
  Synthetic oligonucleotide
agatagatagtgtgcaaaaaaacaaacgag

SEQ ID NO: 381897 - DNA, 30 bp, Artificial Sequence
  Synthetic oligonucleotide
aatgaccagatcgttgtatcggacaacgag

SEQ ID NO: 381898 - DNA, 30 bp, Artificial Sequence
  Synthetic oligonucleotide
atgcatatcaaaaaccacagacgcaacgag

SEQ ID NO: 381899 - DNA, 30 bp, Artificial Sequence
  Synthetic oligonucleotide
ttcatattggagtcccaggtcccgaacgag

SEQ ID NO: 381900 - DNA, 30 bp, Artificial Sequence
  Synthetic oligonucleotide
atgcgctttacagataatctttcacacgag

SEQ ID NO: 381901 - DNA, 30 bp, Artificial Sequence
  Synthetic oligonucleotide
cggtcgtcaccgtttacggcccgacacgag

SEQ ID NO: 381902 - DNA, 30 bp, Artificial Sequence
  Synthetic oligonucleotide
ccctaggggagacgatgtgacaagcacgag

SEQ ID NO: 381903 - DNA, 30 bp, Artificial Sequence
  Synthetic oligonucleotide
gatacacatttcacatctatggtgcacgag

SEQ ID NO: 381904 - DNA, 30 bp, Artificial Sequence
  Synthetic oligonucleotide
gcatgaagttttcctgataaatgtcacgag

SEQ ID NO: 381905 - DNA, 30 bp, Artificial Sequence
  Synthetic oligonucleotide
atgaacgaaccacccgtgtaactcgacgag

SEQ ID NO: 381906 - DNA, 30 bp, Artificial Sequence
  Synthetic oligonucleotide
cagattacatgcgcacgggttgtggacgag

SEQ ID NO: 381907 - DNA, 30 bp, Artificial Sequence
  Synthetic oligonucleotide
actctgtcggtctgtatcaggcttgacgag

SEQ ID NO: 381908 - DNA, 30 bp, Artificial Sequence
  Synthetic oligonucleotide
tatctaccaattaggtttataacatacgag

SEQ ID NO: 381909 - DNA, 30 bp, Artificial Sequence
  Synthetic oligonucleotide
tatccaccgaaaattttatttacctacgag

SEQ ID NO: 381910 - DNA, 30 bp, Artificial Sequence
  Synthetic oligonucleotide
acagtatcgcgcgttaaagcatgctacgag

SEQ ID NO: 381911 - DNA, 30 bp, Artificial Sequence
  Synthetic oligonucleotide
tgtggataaactgtgaggtcactgtacgag

SEQ ID NO: 381912 - DNA, 30 bp, Artificial Sequence
  Synthetic oligonucleotide
aaattgccccgaagggtccccccttacgag

SEQ ID NO: 381913 - DNA, 30 bp, Artificial Sequence
  Synthetic oligonucleotide
ccttgacacgcttattcgcccttgaccgag

SEQ ID NO: 381914 - DNA, 30 bp, Artificial Sequence
  Synthetic oligonucleotide
ctctggtcgctgtaagtgcgttaacccgag

SEQ ID NO: 381915 - DNA, 30 bp, Artificial Sequence
  Synthetic oligonucleotide
gatggcaggccggagtctcggtgacccgag

SEQ ID NO: 381916 - DNA, 30 bp, Artificial Sequence
  Synthetic oligonucleotide
acctccttaggctgtataacggggcccgag

SEQ ID NO: 381917 - DNA, 30 bp, Artificial Sequence
  Synthetic oligonucleotide
agacgctcgctcagacttgaaacagccgag

SEQ ID NO: 381918 - DNA, 30 bp, Artificial Sequence
  Synthetic oligonucleotide
atcacccttccagcagtatttgcatccgag

SEQ ID NO: 381919 - DNA, 30 bp, Artificial Sequence
  Synthetic oligonucleotide
cacggtcctggcggggttgcttagtccgag

SEQ ID NO: 381920 - DNA, 30 bp, Artificial Sequence
  Synthetic oligonucleotide
tgggtggaaccatcctctaatagttccgag

SEQ ID NO: 381921 - DNA, 30 bp, Artificial Sequence
  Synthetic oligonucleotide
tggtcgttggcaggtggttagttttccgag

SEQ ID NO: 381922 - DNA, 30 bp, Artificial Sequence
  Synthetic oligonucleotide
tgggggaggatggcgccggtcaaaagcgag

SEQ ID NO: 381923 - DNA, 30 bp, Artificial Sequence
  Synthetic oligonucleotide
aggaagcacacgccagtcttaggaagcgag

SEQ ID NO: 381924 - DNA, 30 bp, Artificial Sequence
  Synthetic oligonucleotide
ttgctggagcgtgtgtgccgtaacagcgag

SEQ ID NO: 381925 - DNA, 30 bp, Artificial Sequence
  Synthetic oligonucleotide
accataccggttttaaaagcgcttagcgag

SEQ ID NO: 381926 - DNA, 30 bp, Artificial Sequence
  Synthetic oligonucleotide
acacagaatttacgccgccgcctccgcgag

SEQ ID NO: 381927 - DNA, 30 bp, Artificial Sequence
  Synthetic oligonucleotide
ggttggacgggtcttttagctgctcgcgag

SEQ ID NO: 381928 - DNA, 30 bp, Artificial Sequence
  Synthetic oligonucleotide
gcggccggggacgctatgagactcggcgag

SEQ ID NO: 381929 - DNA, 30 bp, Artificial Sequence
  Synthetic oligonucleotide
catggaaatttaccggcatagtggggcgag

SEQ ID NO: 381930 - DNA, 30 bp, Artificial Sequence
  Synthetic oligonucleotide
attaaacggacgcggtactgttatggcgag

SEQ ID NO: 381931 - DNA, 30 bp, Artificial Sequence
  Synthetic oligonucleotide
gtacgtgggtggctggtatggagtggcgag

SEQ ID NO: 381932 - DNA, 30 bp, Artificial Sequence
  Synthetic oligonucleotide
agtgcattagttgaatagttttgtggcgag

SEQ ID NO: 381933 - DNA, 30 bp, Artificial Sequence
  Synthetic oligonucleotide
gcctggacaaaaatcaaacattttggcgag

SEQ ID NO: 381934 - DNA, 30 bp, Artificial Sequence
  Synthetic oligonucleotide
gttagttatgaggcggctaacgtatgcgag

SEQ ID NO: 381935 - DNA, 30 bp, Artificial Sequence
  Synthetic oligonucleotide
gcacgcaacattaattcaggtttttgcgag

SEQ ID NO: 381936 - DNA, 30 bp, Artificial Sequence
  Synthetic oligonucleotide
gatattgtggtgaagacagctgcaatcgag

SEQ ID NO: 381937 - DNA, 30 bp, Artificial Sequence
  Synthetic oligonucleotide
acggcggatcgattatctttcgtaatcgag

SEQ ID NO: 381938 - DNA, 30 bp, Artificial Sequence
  Synthetic oligonucleotide
agtgccagtaagtgccccgtcttaatcgag

SEQ ID NO: 381939 - DNA, 30 bp, Artificial Sequence
  Synthetic oligonucleotide
agttccatgcgaaggcacttggacatcgag

SEQ ID NO: 381940 - DNA, 30 bp, Artificial Sequence
  Synthetic oligonucleotide
agtaatctacaccctatgagctacatcgag

SEQ ID NO: 381941 - DNA, 30 bp, Artificial Sequence
  Synthetic oligonucleotide
caagtggagtattctacctataagatcgag

SEQ ID NO: 381942 - DNA, 30 bp, Artificial Sequence
  Synthetic oligonucleotide
attccgcgtgctgaccatgtcttgatcgag

SEQ ID NO: 381943 - DNA, 30 bp, Artificial Sequence
  Synthetic oligonucleotide
acttctatataccatgttaagttgatcgag

SEQ ID NO: 381944 - DNA, 30 bp, Artificial Sequence
  Synthetic oligonucleotide
cgtcactcgattaaacggcgttgcctcgag

SEQ ID NO: 381945 - DNA, 30 bp, Artificial Sequence
  Synthetic oligonucleotide
tttctggaatgtttggtaagttcgctcgag

SEQ ID NO: 381946 - DNA, 30 bp, Artificial Sequence
  Synthetic oligonucleotide
ggaagtggccagggcaataagtcagtcgag

SEQ ID NO: 381947 - DNA, 30 bp, Artificial Sequence
  Synthetic oligonucleotide
actctcgcgagatattgtacgagcgtcgag

SEQ ID NO: 381948 - DNA, 30 bp, Artificial Sequence
  Synthetic oligonucleotide
ggggcccgtcacgacatgcgacgtgtcgag

SEQ ID NO: 381949 - DNA, 30 bp, Artificial Sequence
  Synthetic oligonucleotide
aaccatgacgcctgaggtttgtgattcgag

SEQ ID NO: 381950 - DNA, 30 bp, Artificial Sequence
  Synthetic oligonucleotide
tttctatattccgcgcgtatcagcttcgag

SEQ ID NO: 381951 - DNA, 30 bp, Artificial Sequence
  Synthetic oligonucleotide
gctggtgacaagccggacaagggcttcgag

SEQ ID NO: 381952 - DNA, 30 bp, Artificial Sequence
  Synthetic oligonucleotide
cttttaacaacaacgcggaggccaaaggag

SEQ ID NO: 381953 - DNA, 30 bp, Artificial Sequence
  Synthetic oligonucleotide
tgctgacggtccaccatcgtggtaaaggag

SEQ ID NO: 381954 - DNA, 30 bp, Artificial Sequence
  Synthetic oligonucleotide
ctcatgtgccacgaccaactacgcaaggag

SEQ ID NO: 381955 - DNA, 30 bp, Artificial Sequence
  Synthetic oligonucleotide
atcttgcttgattggtgactcgagaaggag

SEQ ID NO: 381956 - DNA, 30 bp, Artificial Sequence
  Synthetic oligonucleotide
cctaatacaatgctggttggccctcaggag

SEQ ID NO: 381957 - DNA, 30 bp, Artificial Sequence
  Synthetic oligonucleotide
tggttgagaagcgtatgatgaaaagaggag

SEQ ID NO: 381958 - DNA, 30 bp, Artificial Sequence
  Synthetic oligonucleotide
actcttcctatcagtacatttgcagaggag

SEQ ID NO: 381959 - DNA, 30 bp, Artificial Sequence
  Synthetic oligonucleotide
tttttggtcaggagcaatcgcgtggaggag

SEQ ID NO: 381960 - DNA, 30 bp, Artificial Sequence
  Synthetic oligonucleotide
ggtctattgcctcggggccgggtggaggag

SEQ ID NO: 381961 - DNA, 30 bp, Artificial Sequence
  Synthetic oligonucleotide
ggcaagctattcttatttgttcctgaggag

SEQ ID NO: 381962 - DNA, 30 bp, Artificial Sequence
  Synthetic oligonucleotide
aaaccatttttgcacggtgcataataggag

SEQ ID NO: 381963 - DNA, 30 bp, Artificial Sequence
  Synthetic oligonucleotide
ttcggacttactattagcgatgcctaggag

SEQ ID NO: 381964 - DNA, 30 bp, Artificial Sequence
  Synthetic oligonucleotide
actcaatatgaggaggacaggtggtaggag

SEQ ID NO: 381965 - DNA, 30 bp, Artificial Sequence
  Synthetic oligonucleotide
gatcattccgtttgacacccgtcttaggag

SEQ ID NO: 381966 - DNA, 30 bp, Artificial Sequence
  Synthetic oligonucleotide
acaataggcgttcgctcgtgaggttaggag

SEQ ID NO: 381967 - DNA, 30 bp, Artificial Sequence
  Synthetic oligonucleotide
tgtactggcacgtcaaaacacctttaggag

SEQ ID NO: 381968 - DNA, 30 bp, Artificial Sequence
  Synthetic oligonucleotide
cgcctggagggcatcgacgcaataacggag

SEQ ID NO: 381969 - DNA, 30 bp, Artificial Sequence
  Synthetic oligonucleotide
gctataatggttgaattttacgccacggag

SEQ ID NO: 381970 - DNA, 30 bp, Artificial Sequence
  Synthetic oligonucleotide
gcagtgcgggaccgcagggcggagacggag

SEQ ID NO: 381971 - DNA, 30 bp, Artificial Sequence
  Synthetic oligonucleotide
agtcaacgacgtaccccttgtgtgacggag

SEQ ID NO: 381972 - DNA, 30 bp, Artificial Sequence
  Synthetic oligonucleotide
gccgattagtgcacatgcacaactccggag

SEQ ID NO: 381973 - DNA, 31 bp, Artificial Sequence
  Synthetic oligonucleotide
aacgacgtaggcggagttaactgacgcggag

SEQ ID NO: 381974 - DNA, 30 bp, Artificial Sequence
  Synthetic oligonucleotide
ccgtcccacctgagggagcgcacggcggag

SEQ ID NO: 381975 - DNA, 30 bp, Artificial Sequence
  Synthetic oligonucleotide
ctagactgcagtagtgcgatggtggcggag

SEQ ID NO: 381976 - DNA, 30 bp, Artificial Sequence
  Synthetic oligonucleotide
aagaatttaaaaggggggtgaattgcggag

SEQ ID NO: 381977 - DNA, 30 bp, Artificial Sequence
  Synthetic oligonucleotide
gccagatagttttgtgctccctggtcggag

SEQ ID NO: 381978 - DNA, 30 bp, Artificial Sequence
  Synthetic oligonucleotide
cattgtcttctaaccaaggctcgttcggag

SEQ ID NO: 381979 - DNA, 30 bp, Artificial Sequence
  Synthetic oligonucleotide
ttcaagcatcttatggaatgtatttcggag

SEQ ID NO: 381980 - DNA, 30 bp, Artificial Sequence
  Synthetic oligonucleotide
gagttattcccgtttacactaccaagggag

SEQ ID NO: 381981 - DNA, 30 bp, Artificial Sequence
  Synthetic oligonucleotide
gagataagataatcagcaagccatagggag

SEQ ID NO: 381982 - DNA, 30 bp, Artificial Sequence
  Synthetic oligonucleotide
tgcggcgacatacaatctggcagtagggag

SEQ ID NO: 381983 - DNA, 30 bp, Artificial Sequence
  Synthetic oligonucleotide
cggccatggtgacatcgcggtacacgggag

SEQ ID NO: 381984 - DNA, 30 bp, Artificial Sequence
  Synthetic oligonucleotide
tccacccgggcgtacacttgcccccgggag

SEQ ID NO: 381985 - DNA, 30 bp, Artificial Sequence
  Synthetic oligonucleotide
ctaagtactaatactgcttagttccgggag

SEQ ID NO: 381986 - DNA, 30 bp, Artificial Sequence
  Synthetic oligonucleotide
agcgccgtcaaattgtagactgctcgggag

SEQ ID NO: 381987 - DNA, 30 bp, Artificial Sequence
  Synthetic oligonucleotide
aagtgaaggcttgaacgtctctgtcgggag

SEQ ID NO: 381988 - DNA, 30 bp, Artificial Sequence
  Synthetic oligonucleotide
acgctgctaagctccaaccatttcggggag

SEQ ID NO: 381989 - DNA, 30 bp, Artificial Sequence
  Synthetic oligonucleotide
aaccaggtttagaatccagtattatgggag

SEQ ID NO: 381990 - DNA, 30 bp, Artificial Sequence
  Synthetic oligonucleotide
ccactcgtggccactttccaaggctgggag

SEQ ID NO: 381991 - DNA, 30 bp, Artificial Sequence
  Synthetic oligonucleotide
atgtgcaagtcggacgcgcatctctgggag

SEQ ID NO: 381992 - DNA, 30 bp, Artificial Sequence
  Synthetic oligonucleotide
ttgtagtcatggggataattagagtgggag

SEQ ID NO: 381993 - DNA, 30 bp, Artificial Sequence
  Synthetic oligonucleotide
gtccacatgtgcgtccagccatattgggag

SEQ ID NO: 381994 - DNA, 31 bp, Artificial Sequence
  Synthetic oligonucleotide
cccgcgtgaacgagatatcgcttattgggag

SEQ ID NO: 381995 - DNA, 30 bp, Artificial Sequence
  Synthetic oligonucleotide
gaacgattagcaatacattgactttgggag

SEQ ID NO: 381996 - DNA, 30 bp, Artificial Sequence
  Synthetic oligonucleotide
gattaatgtgagacccactatataatggag

SEQ ID NO: 381997 - DNA, 30 bp, Artificial Sequence
  Synthetic oligonucleotide
tttgaatggccaataatatggaccatggag

SEQ ID NO: 381998 - DNA, 30 bp, Artificial Sequence
  Synthetic oligonucleotide
gggtctagtttgataaaagggagcatggag

SEQ ID NO: 381999 - DNA, 30 bp, Artificial Sequence
  Synthetic oligonucleotide
aacggagcactggcatttcctaatatggag

SEQ ID NO: 382000 - DNA, 30 bp, Artificial Sequence
  Synthetic oligonucleotide
gttctgattttgagcgtatcagatatggag

SEQ ID NO: 382001 - DNA, 30 bp, Artificial Sequence
  Synthetic oligonucleotide
cattcacccgtaatggccgattctatggag

SEQ ID NO: 382002 - DNA, 30 bp, Artificial Sequence
  Synthetic oligonucleotide
acctcactcagataccctgtgtttatggag

SEQ ID NO: 382003 - DNA, 30 bp, Artificial Sequence
  Synthetic oligonucleotide
tactttaaaaaaccagtcgcatcactggag

SEQ ID NO: 382004 - DNA, 30 bp, Artificial Sequence
  Synthetic oligonucleotide
tagcattgggttgacgcgttgaacctggag

SEQ ID NO: 382005 - DNA, 30 bp, Artificial Sequence
  Synthetic oligonucleotide
gaaccaagaaaggtagaagagcatctggag

SEQ ID NO: 382006 - DNA, 30 bp, Artificial Sequence
  Synthetic oligonucleotide
ggcgccccttattgtatcactgaagtggag

SEQ ID NO: 382007 - DNA, 30 bp, Artificial Sequence
  Synthetic oligonucleotide
tatgttttgcatatgagcggctaagtggag

SEQ ID NO: 382008 - DNA, 30 bp, Artificial Sequence
  Synthetic oligonucleotide
ctgagcctggatccaatagtgagggtggag

SEQ ID NO: 382009 - DNA, 30 bp, Artificial Sequence
  Synthetic oligonucleotide
atatctttgcaaggagaacgcgcattggag

SEQ ID NO: 382010 - DNA, 30 bp, Artificial Sequence
  Synthetic oligonucleotide
ttagcttggtccgagttacccatattggag

SEQ ID NO: 382011 - DNA, 30 bp, Artificial Sequence
  Synthetic oligonucleotide
ctttagtgttacgattggatgctattggag

SEQ ID NO: 382012 - DNA, 30 bp, Artificial Sequence
  Synthetic oligonucleotide
gatggaattgacaggggcttacgcttggag

SEQ ID NO: 382013 - DNA, 30 bp, Artificial Sequence
  Synthetic oligonucleotide
tccctctgatccccaccggtcctcttggag

SEQ ID NO: 382014 - DNA, 30 bp, Artificial Sequence
  Synthetic oligonucleotide
tatctaactcggtcccgtagcaggttggag

SEQ ID NO: 382015 - DNA, 30 bp, Artificial Sequence
  Synthetic oligonucleotide
acttttgcgagtaataagcaatctttggag

SEQ ID NO: 382016 - DNA, 30 bp, Artificial Sequence
  Synthetic oligonucleotide
ggattgcctaaatcccaggaccgaaatgag

SEQ ID NO: 382017 - DNA, 30 bp, Artificial Sequence
  Synthetic oligonucleotide
ctctaatattcgcttgcaaattggaatgag

SEQ ID NO: 382018 - DNA, 30 bp, Artificial Sequence
  Synthetic oligonucleotide
attaacttcagacgatgatgtggtaatgag

SEQ ID NO: 382019 - DNA, 30 bp, Artificial Sequence
  Synthetic oligonucleotide
aaagtcaataaattttttctatgtaatgag

SEQ ID NO: 382020 - DNA, 30 bp, Artificial Sequence
  Synthetic oligonucleotide
tatcctaactttgagggtggcctacatgag

SEQ ID NO: 382021 - DNA, 30 bp, Artificial Sequence
  Synthetic oligonucleotide
aggttgtttaaacgtatgttgtaccatgag

SEQ ID NO: 382022 - DNA, 30 bp, Artificial Sequence
  Synthetic oligonucleotide
catgccaagtaggcgttgtctcagcatgag

SEQ ID NO: 382023 - DNA, 30 bp, Artificial Sequence
  Synthetic oligonucleotide
tacggcgataaacaacattcagatcatgag

SEQ ID NO: 382024 - DNA, 30 bp, Artificial Sequence
  Synthetic oligonucleotide
aatgcatctagcttcagcctagcagatgag

SEQ ID NO: 382025 - DNA, 30 bp, Artificial Sequence
  Synthetic oligonucleotide
accgcgacaacccgccagaccagcgatgag

SEQ ID NO: 382026 - DNA, 30 bp, Artificial Sequence
  Synthetic oligonucleotide
tgtggaactttctcatcgtaacatgatgag

SEQ ID NO: 382027 - DNA, 30 bp, Artificial Sequence
  Synthetic oligonucleotide
aggaacagcggaatttaatctgaatatgag

SEQ ID NO: 382028 - DNA, 30 bp, Artificial Sequence
  Synthetic oligonucleotide
atataaaggtcacaatgtgtaagatatgag

SEQ ID NO: 382029 - DNA, 30 bp, Artificial Sequence
  Synthetic oligonucleotide
ttctcgggtagcactctttaaccctatgag

SEQ ID NO: 382030 - DNA, 30 bp, Artificial Sequence
  Synthetic oligonucleotide
tttgtgcaggggcgccaaaaatcttatgag

SEQ ID NO: 382031 - DNA, 30 bp, Artificial Sequence
  Synthetic oligonucleotide
tagaacccctttccaggaggctcttatgag

SEQ ID NO: 382032 - DNA, 30 bp, Artificial Sequence
  Synthetic oligonucleotide
ttcttgcttttatctcttcacggcactgag

SEQ ID NO: 382033 - DNA, 30 bp, Artificial Sequence
  Synthetic oligonucleotide
ctccaacgtattagtctaccatggactgag

SEQ ID NO: 382034 - DNA, 30 bp, Artificial Sequence
  Synthetic oligonucleotide
gacgcgccccaattcgggatttggactgag

SEQ ID NO: 382035 - DNA, 30 bp, Artificial Sequence
  Synthetic oligonucleotide
ccaagtgttctctatgaacgcttgactgag

SEQ ID NO: 382036 - DNA, 30 bp, Artificial Sequence
  Synthetic oligonucleotide
atcaaattcaaagatatcctgtgacctgag

SEQ ID NO: 382037 - DNA, 30 bp, Artificial Sequence
  Synthetic oligonucleotide
agaatatgaataggtggcgctaagcctgag

SEQ ID NO: 382038 - DNA, 30 bp, Artificial Sequence
  Synthetic oligonucleotide
gagaaactcagggccgatatgctgcctgag

SEQ ID NO: 382039 - DNA, 30 bp, Artificial Sequence
  Synthetic oligonucleotide
attcttagaagaatagtggcagatcctgag

SEQ ID NO: 382040 - DNA, 30 bp, Artificial Sequence
  Synthetic oligonucleotide
ttcactggcactccctatgggtatcctgag

SEQ ID NO: 382041 - DNA, 30 bp, Artificial Sequence
  Synthetic oligonucleotide
tgtaaattattgtggcatatcaaagctgag

SEQ ID NO: 382042 - DNA, 30 bp, Artificial Sequence
  Synthetic oligonucleotide
gccattagggctttcatgagtccagctgag

SEQ ID NO: 382043 - DNA, 30 bp, Artificial Sequence
  Synthetic oligonucleotide
ccctcggggggggacacaattatagctgag

SEQ ID NO: 382044 - DNA, 30 bp, Artificial Sequence
  Synthetic oligonucleotide
ggatttactctagtgggacgttttgctgag

SEQ ID NO: 382045 - DNA, 30 bp, Artificial Sequence
  Synthetic oligonucleotide
cgatggccacttcgcaaatgtgtctctgag

SEQ ID NO: 382046 - DNA, 30 bp, Artificial Sequence
  Synthetic oligonucleotide
tatgtagaatctatgctcattgcgtctgag

SEQ ID NO: 382047 - DNA, 30 bp, Artificial Sequence
  Synthetic oligonucleotide
agctataaagggtcatagcagcattctgag

SEQ ID NO: 382048 - DNA, 30 bp, Artificial Sequence
  Synthetic oligonucleotide
tataaaggagtaactaagcttcgttctgag

SEQ ID NO: 382049 - DNA, 30 bp, Artificial Sequence
  Synthetic oligonucleotide
aacacttatcatctcaccgtcaaaagtgag

SEQ ID NO: 382050 - DNA, 30 bp, Artificial Sequence
  Synthetic oligonucleotide
tatctaccggagtaaccgcagcgaagtgag

SEQ ID NO: 382051 - DNA, 30 bp, Artificial Sequence
  Synthetic oligonucleotide
ctacctgttataatgcggattagacgtgag

SEQ ID NO: 382052 - DNA, 30 bp, Artificial Sequence
  Synthetic oligonucleotide
taactacaaccatacaggctgttccgtgag

SEQ ID NO: 382053 - DNA, 30 bp, Artificial Sequence
  Synthetic oligonucleotide
gccgcacccgggttaaacggttggcgtgag

SEQ ID NO: 382054 - DNA, 30 bp, Artificial Sequence
  Synthetic oligonucleotide
acatatagaactcgcgtctttcgaggtgag

SEQ ID NO: 382055 - DNA, 30 bp, Artificial Sequence
  Synthetic oligonucleotide
cgacagacgagctggtgtcggacgggtgag

SEQ ID NO: 382056 - DNA, 30 bp, Artificial Sequence
  Synthetic oligonucleotide
atcgcacgtgtcttcaaaggggctggtgag

SEQ ID NO: 382057 - DNA, 30 bp, Artificial Sequence
  Synthetic oligonucleotide
aagactgttcactgacatcaggaatgtgag

SEQ ID NO: 382058 - DNA, 30 bp, Artificial Sequence
  Synthetic oligonucleotide
atggagactaggacactaacattatgtgag

SEQ ID NO: 382059 - DNA, 30 bp, Artificial Sequence
  Synthetic oligonucleotide
tagatataatttattaaggtgtactgtgag

SEQ ID NO: 382060 - DNA, 30 bp, Artificial Sequence
  Synthetic oligonucleotide
ctaataatttccctgcggacaccaattgag

SEQ ID NO: 382061 - DNA, 30 bp, Artificial Sequence
  Synthetic oligonucleotide
gtttgtaagaatactgttacgccaattgag

SEQ ID NO: 382062 - DNA, 30 bp, Artificial Sequence
  Synthetic oligonucleotide
tgcaaacagatgatggaggactgaattgag

SEQ ID NO: 382063 - DNA, 30 bp, Artificial Sequence
  Synthetic oligonucleotide
gttcgtagcggtttaaaagttttaattgag

SEQ ID NO: 382064 - DNA, 30 bp, Artificial Sequence
  Synthetic oligonucleotide
attcgattttgacggaatgtcttcattgag

SEQ ID NO: 382065 - DNA, 30 bp, Artificial Sequence
  Synthetic oligonucleotide
gcagtctccaaacgacaggcctcgattgag

SEQ ID NO: 382066 - DNA, 30 bp, Artificial Sequence
  Synthetic oligonucleotide
aattgcaaacaggaccctgccgggattgag

SEQ ID NO: 382067 - DNA, 30 bp, Artificial Sequence
  Synthetic oligonucleotide
actggaaacctacagtggcgatctattgag

SEQ ID NO: 382068 - DNA, 30 bp, Artificial Sequence
  Synthetic oligonucleotide
ctgacactgttcgcatgttcgacagttgag

SEQ ID NO: 382069 - DNA, 30 bp, Artificial Sequence
  Synthetic oligonucleotide
actcttagaatttcatggacacgcgttgag

SEQ ID NO: 382070 - DNA, 30 bp, Artificial Sequence
  Synthetic oligonucleotide
ggctcggctggggaggatcccactgttgag

SEQ ID NO: 382071 - DNA, 30 bp, Artificial Sequence
  Synthetic oligonucleotide
gttgctttgacttgagccaaaccatttgag

SEQ ID NO: 382072 - DNA, 30 bp, Artificial Sequence
  Synthetic oligonucleotide
gagaaatctataccatatggcgcatttgag

SEQ ID NO: 382073 - DNA, 30 bp, Artificial Sequence
  Synthetic oligonucleotide
cacgagtttcgtactccgatattatttgag

SEQ ID NO: 382074 - DNA, 30 bp, Artificial Sequence
  Synthetic oligonucleotide
gagcgactaggtctagcccgaaggtttgag

SEQ ID NO: 382075 - DNA, 30 bp, Artificial Sequence
  Synthetic oligonucleotide
gttaaaacgtcaagggttataatgtttgag

SEQ ID NO: 382076 - DNA, 30 bp, Artificial Sequence
  Synthetic oligonucleotide
ctctagacttagacaactcggatgtttgag

SEQ ID NO: 382077 - DNA, 30 bp, Artificial Sequence
  Synthetic oligonucleotide
gctcggtcgcaactttgtcaattaaaatag

SEQ ID NO: 382078 - DNA, 30 bp, Artificial Sequence
  Synthetic oligonucleotide
taaagcaggagcaaagagggacgcaaatag

SEQ ID NO: 382079 - DNA, 30 bp, Artificial Sequence
  Synthetic oligonucleotide
ataggtggagacgtccgaggcctcaaatag

SEQ ID NO: 382080 - DNA, 30 bp, Artificial Sequence
  Synthetic oligonucleotide
gcaactccctccccgcgggcatagaaatag

SEQ ID NO: 382081 - DNA, 30 bp, Artificial Sequence
  Synthetic oligonucleotide
tgactcggtgcactcggctagcggaaatag

SEQ ID NO: 382082 - DNA, 30 bp, Artificial Sequence
  Synthetic oligonucleotide
aataggtccttcgatatatttgggaaatag

SEQ ID NO: 382083 - DNA, 30 bp, Artificial Sequence
  Synthetic oligonucleotide
gattccgaacgccagttcgttcgtaaatag

SEQ ID NO: 382084 - DNA, 30 bp, Artificial Sequence
  Synthetic oligonucleotide
aagcatttcatattgtaggttaaccaatag

SEQ ID NO: 382085 - DNA, 30 bp, Artificial Sequence
  Synthetic oligonucleotide
gtttatgcatgcccgacagtccgccaatag

SEQ ID NO: 382086 - DNA, 30 bp, Artificial Sequence
  Synthetic oligonucleotide
acagaatgggcggacgagttactccaatag

SEQ ID NO: 382087 - DNA, 30 bp, Artificial Sequence
  Synthetic oligonucleotide
attaggtgtacaattccggcaactcaatag

SEQ ID NO: 382088 - DNA, 30 bp, Artificial Sequence
  Synthetic oligonucleotide
tattaagtggtactgagatcgggtcaatag

SEQ ID NO: 382089 - DNA, 30 bp, Artificial Sequence
  Synthetic oligonucleotide
tgtagcttccgtacccgagaggttcaatag

SEQ ID NO: 382090 - DNA, 30 bp, Artificial Sequence
  Synthetic oligonucleotide
gtagtatggtggacatcttatatcgaatag

SEQ ID NO: 382091 - DNA, 30 bp, Artificial Sequence
  Synthetic oligonucleotide
gttggaggcagccgtgcgacgaaggaatag

SEQ ID NO: 382092 - DNA, 30 bp, Artificial Sequence
  Synthetic oligonucleotide
cttttggggcgcaatacgcgtatggaatag

SEQ ID NO: 382093 - DNA, 30 bp, Artificial Sequence
  Synthetic oligonucleotide
tcccagccgtacatatccattttggaatag

SEQ ID NO: 382094 - DNA, 30 bp, Artificial Sequence
  Synthetic oligonucleotide
ttagtaattgattatcaataacatgaatag

SEQ ID NO: 382095 - DNA, 30 bp, Artificial Sequence
  Synthetic oligonucleotide
gcgtctgggaaaaagttaccgtttgaatag

SEQ ID NO: 382096 - DNA, 30 bp, Artificial Sequence
  Synthetic oligonucleotide
tagtcgtctaaaaagttatagcaataatag

SEQ ID NO: 382097 - DNA, 30 bp, Artificial Sequence
  Synthetic oligonucleotide
ggcagaccaacacacagtagagtataatag

SEQ ID NO: 382098 - DNA, 30 bp, Artificial Sequence
  Synthetic oligonucleotide
agcttcagtttggacccaacggtataatag

SEQ ID NO: 382099 - DNA, 30 bp, Artificial Sequence
  Synthetic oligonucleotide
gtttccttcatccatgacctattataatag

SEQ ID NO: 382100 - DNA, 30 bp, Artificial Sequence
  Synthetic oligonucleotide
gatagttcaccatttacgggtagctaatag

SEQ ID NO: 382101 - DNA, 30 bp, Artificial Sequence
  Synthetic oligonucleotide
tgatacaggcactcgtggtgcccgtaatag

SEQ ID NO: 382102 - DNA, 30 bp, Artificial Sequence
  Synthetic oligonucleotide
cgccacggtgatagacgggtagcgtaatag

SEQ ID NO: 382103 - DNA, 30 bp, Artificial Sequence
  Synthetic oligonucleotide
aacaacgtcttgtataacaggatgtaatag

SEQ ID NO: 382104 - DNA, 30 bp, Artificial Sequence
  Synthetic oligonucleotide
atcagtctcagaattttatggacttaatag

SEQ ID NO: 382105 - DNA, 30 bp, Artificial Sequence
  Synthetic oligonucleotide
aatcgctgtacgcgtaagctgacttaatag

SEQ ID NO: 382106 - DNA, 30 bp, Artificial Sequence
  Synthetic oligonucleotide
gtagttgaggaacgcgcgcttgcaacatag

SEQ ID NO: 382107 - DNA, 30 bp, Artificial Sequence
  Synthetic oligonucleotide
ggttcacataacctggttgaggtaacatag

SEQ ID NO: 382108 - DNA, 30 bp, Artificial Sequence
  Synthetic oligonucleotide
acttttacgctgaggatcgtcttaacatag

SEQ ID NO: 382109 - DNA, 30 bp, Artificial Sequence
  Synthetic oligonucleotide
tgatcaaggttacgtggaattaagacatag

SEQ ID NO: 382110 - DNA, 30 bp, Artificial Sequence
  Synthetic oligonucleotide
aagagcacggaacgcctcacatatacatag

SEQ ID NO: 382111 - DNA, 30 bp, Artificial Sequence
  Synthetic oligonucleotide
cgcaacgtgtgcttgcgggctagtacatag

SEQ ID NO: 382112 - DNA, 30 bp, Artificial Sequence
  Synthetic oligonucleotide
attggcagatggcgcatggctattacatag

SEQ ID NO: 382113 - DNA, 30 bp, Artificial Sequence
  Synthetic oligonucleotide
tctctatgaatcggatcacttgttacatag

SEQ ID NO: 382114 - DNA, 30 bp, Artificial Sequence
  Synthetic oligonucleotide
ttaaatgggtgcgcctctcgctttacatag

SEQ ID NO: 382115 - DNA, 30 bp, Artificial Sequence
  Synthetic oligonucleotide
gagatggcctgcgaccttatagcaccatag

SEQ ID NO: 382116 - DNA, 30 bp, Artificial Sequence
  Synthetic oligonucleotide
gccggacattgcgggtctaccaagccatag

SEQ ID NO: 382117 - DNA, 30 bp, Artificial Sequence
  Synthetic oligonucleotide
ggcagcatcttcagcctaaagctagcatag

SEQ ID NO: 382118 - DNA, 30 bp, Artificial Sequence
  Synthetic oligonucleotide
ggatcccaccgagtactcagttacgcatag

SEQ ID NO: 382119 - DNA, 30 bp, Artificial Sequence
  Synthetic oligonucleotide
tagagtttcacgtggtagagaactgcatag

SEQ ID NO: 382120 - DNA, 30 bp, Artificial Sequence
  Synthetic oligonucleotide
tgccccgtgaaagacgttcaatctgcatag

SEQ ID NO: 382121 - DNA, 30 bp, Artificial Sequence
  Synthetic oligonucleotide
atccgcacttgctctgcgaagcaatcatag

SEQ ID NO: 382122 - DNA, 30 bp, Artificial Sequence
  Synthetic oligonucleotide
cggcgtcttaagcccgcgtggcaatcatag

SEQ ID NO: 382123 - DNA, 30 bp, Artificial Sequence
  Synthetic oligonucleotide
atctactgttgcatcatccccccatcatag

SEQ ID NO: 382124 - DNA, 30 bp, Artificial Sequence
  Synthetic oligonucleotide
tgttggactaccgtacgttctctatcatag

SEQ ID NO: 382125 - DNA, 30 bp, Artificial Sequence
  Synthetic oligonucleotide
taataagaagtcctccgcggaccctcatag

SEQ ID NO: 382126 - DNA, 30 bp, Artificial Sequence
  Synthetic oligonucleotide
ccccatagggctcccgcctccgtctcatag

SEQ ID NO: 382127 - DNA, 28 bp, Artificial Sequence
  Synthetic oligonucleotide
atagagaactgccactgagacgtcatag

SEQ ID NO: 382128 - DNA, 30 bp, Artificial Sequence
  Synthetic oligonucleotide
ttcaggtaggcaggttcttggtgtagatag

SEQ ID NO: 382129 - DNA, 30 bp, Artificial Sequence
  Synthetic oligonucleotide
acattcgacacttttcgtttggttagatag

SEQ ID NO: 382130 - DNA, 30 bp, Artificial Sequence
  Synthetic oligonucleotide
gaatatcgacgcccgcgaatatgacgatag

SEQ ID NO: 382131 - DNA, 30 bp, Artificial Sequence
  Synthetic oligonucleotide
cactgcaagacaatcgacctcgtccgatag

SEQ ID NO: 382132 - DNA, 30 bp, Artificial Sequence
  Synthetic oligonucleotide
cccagtgtaaatagtttgtcccagcgatag

SEQ ID NO: 382133 - DNA, 30 bp, Artificial Sequence
  Synthetic oligonucleotide
aaattcgccgaattcaatgtaaggcgatag

SEQ ID NO: 382134 - DNA, 30 bp, Artificial Sequence
  Synthetic oligonucleotide
attggacacgagacgcgatcagtgcgatag

SEQ ID NO: 382135 - DNA, 30 bp, Artificial Sequence
  Synthetic oligonucleotide
taaaacgtccgtagcagcacaaaaggatag

SEQ ID NO: 382136 - DNA, 30 bp, Artificial Sequence
  Synthetic oligonucleotide
actaatacacgtcggctaattaaaggatag

SEQ ID NO: 382137 - DNA, 30 bp, Artificial Sequence
  Synthetic oligonucleotide
tcaggtagtaagccctagctgcaaggatag

SEQ ID NO: 382138 - DNA, 30 bp, Artificial Sequence
  Synthetic oligonucleotide
acgactgcctataggtctattaccggatag

SEQ ID NO: 382139 - DNA, 30 bp, Artificial Sequence
  Synthetic oligonucleotide
cgctgggtgctgggcataatagggggatag

SEQ ID NO: 382140 - DNA, 30 bp, Artificial Sequence
  Synthetic oligonucleotide
tttgtgcttcaatacacggtagctggatag

SEQ ID NO: 382141 - DNA, 30 bp, Artificial Sequence
  Synthetic oligonucleotide
gaacgcatgtttgcaggggctagatgatag

SEQ ID NO: 382142 - DNA, 30 bp, Artificial Sequence
  Synthetic oligonucleotide
ctacgtctcccgtaaagcgggggatgatag

SEQ ID NO: 382143 - DNA, 30 bp, Artificial Sequence
  Synthetic oligonucleotide
tcgaatactatcgtggaatgtgtatgatag

SEQ ID NO: 382144 - DNA, 30 bp, Artificial Sequence
  Synthetic oligonucleotide
taataaccaggatagtgagtagtctgatag

SEQ ID NO: 382145 - DNA, 30 bp, Artificial Sequence
  Synthetic oligonucleotide
ctccatcgacatgaatatcccgtctgatag

SEQ ID NO: 382146 - DNA, 30 bp, Artificial Sequence
  Synthetic oligonucleotide
gtttcgattctattagcgttatattgatag

SEQ ID NO: 382147 - DNA, 30 bp, Artificial Sequence
  Synthetic oligonucleotide
cgcctaagagatatttttgggagttgatag

SEQ ID NO: 382148 - DNA, 30 bp, Artificial Sequence
  Synthetic oligonucleotide
gaattaagaatataacgattattttgatag

SEQ ID NO: 382149 - DNA, 30 bp, Artificial Sequence
  Synthetic oligonucleotide
gatgtggcggtagttgtcacctaaatatag

SEQ ID NO: 382150 - DNA, 30 bp, Artificial Sequence
  Synthetic oligonucleotide
gctttgacataggcgctatcaagaatatag

SEQ ID NO: 382151 - DNA, 30 bp, Artificial Sequence
  Synthetic oligonucleotide
tgaatcagcagctagatagtaggaatatag

SEQ ID NO: 382152 - DNA, 30 bp, Artificial Sequence
  Synthetic oligonucleotide
ataaggctctaagcagtctgagtaatatag

SEQ ID NO: 382153 - DNA, 30 bp, Artificial Sequence
  Synthetic oligonucleotide
ggttctgatctgcgtggcgttgtaatatag

SEQ ID NO: 382154 - DNA, 30 bp, Artificial Sequence
  Synthetic oligonucleotide
tcgctcaatttcgcccagcggcacatatag

SEQ ID NO: 382155 - DNA, 30 bp, Artificial Sequence
  Synthetic oligonucleotide
ccttgtcaatagcgctggatggccatatag

SEQ ID NO: 382156 - DNA, 30 bp, Artificial Sequence
  Synthetic oligonucleotide
cgcatgcaaatccagcataggcagatatag

SEQ ID NO: 382157 - DNA, 30 bp, Artificial Sequence
  Synthetic oligonucleotide
acgctcttcggatctctaggagcgatatag

SEQ ID NO: 382158 - DNA, 30 bp, Artificial Sequence
  Synthetic oligonucleotide
ccatttggttctaccacccttactatatag

SEQ ID NO: 382159 - DNA, 30 bp, Artificial Sequence
  Synthetic oligonucleotide
gccccgtctaacagggctcaagctatatag

SEQ ID NO: 382160 - DNA, 30 bp, Artificial Sequence
  Synthetic oligonucleotide
aatttagcacttagagaccggcttatatag

SEQ ID NO: 382161 - DNA, 30 bp, Artificial Sequence
  Synthetic oligonucleotide
tgctaaagatcgcaggacctcacactatag

SEQ ID NO: 382162 - DNA, 30 bp, Artificial Sequence
  Synthetic oligonucleotide
gaagaaatctgtcacttgtggccactatag

SEQ ID NO: 382163 - DNA, 30 bp, Artificial Sequence
  Synthetic oligonucleotide
tttgagcaatagtgagatttcaccctatag

SEQ ID NO: 382164 - DNA, 31 bp, Artificial Sequence
  Synthetic oligonucleotide
agaattgtgttacacataattttccctatag

SEQ ID NO: 382165 - DNA, 30 bp, Artificial Sequence
  Synthetic oligonucleotide
gctctcgttagtggacagcctacgctatag

SEQ ID NO: 382166 - DNA, 30 bp, Artificial Sequence
  Synthetic oligonucleotide
gctagaacagagccccggcccccgctatag

SEQ ID NO: 382167 - DNA, 30 bp, Artificial Sequence
  Synthetic oligonucleotide
tgcgtgagggagtgtctggcgttgctatag

SEQ ID NO: 382168 - DNA, 30 bp, Artificial Sequence
  Synthetic oligonucleotide
tggcttaccccggtaaatcgtgatctatag

SEQ ID NO: 382169 - DNA, 30 bp, Artificial Sequence
  Synthetic oligonucleotide
cgtctactatgcgcaataaacatagtatag

SEQ ID NO: 382170 - DNA, 30 bp, Artificial Sequence
  Synthetic oligonucleotide
ctcgcctactcagtttaggggtccgtatag

SEQ ID NO: 382171 - DNA, 30 bp, Artificial Sequence
  Synthetic oligonucleotide
agattaagttagcagacttagtgcgtatag

SEQ ID NO: 382172 - DNA, 30 bp, Artificial Sequence
  Synthetic oligonucleotide
gtagtagctgtcacctctctaagtgtatag

SEQ ID NO: 382173 - DNA, 30 bp, Artificial Sequence
  Synthetic oligonucleotide
gtacccctagtcaattggcggagtgtatag

SEQ ID NO: 382174 - DNA, 30 bp, Artificial Sequence
  Synthetic oligonucleotide
tcacatttctacaaaatcgcacgtgtatag

SEQ ID NO: 382175 - DNA, 30 bp, Artificial Sequence
  Synthetic oligonucleotide
gtaccacaccatttgaagagcaaattatag

SEQ ID NO: 382176 - DNA, 30 bp, Artificial Sequence
  Synthetic oligonucleotide
tctttaattcagggaaagacagaattatag

SEQ ID NO: 382177 - DNA, 30 bp, Artificial Sequence
  Synthetic oligonucleotide
cgaacactattctcgtattagtgattatag

SEQ ID NO: 382178 - DNA, 30 bp, Artificial Sequence
  Synthetic oligonucleotide
aacgtttcgtcactaggagcgcccttatag

SEQ ID NO: 382179 - DNA, 30 bp, Artificial Sequence
  Synthetic oligonucleotide
ctatcattcaatagcgcggcgcccttatag

SEQ ID NO: 382180 - DNA, 30 bp, Artificial Sequence
  Synthetic oligonucleotide
gaggcgctgagcactaaacggcccttatag

SEQ ID NO: 382181 - DNA, 30 bp, Artificial Sequence
  Synthetic oligonucleotide
gcgttacacgctttccaagcctgcttatag

SEQ ID NO: 382182 - DNA, 30 bp, Artificial Sequence
  Synthetic oligonucleotide
acgctgcaatgcgatgttggtttcttatag

SEQ ID NO: 382183 - DNA, 30 bp, Artificial Sequence
  Synthetic oligonucleotide
ctaacgttcgactacggtgaaaagttatag

SEQ ID NO: 382184 - DNA, 30 bp, Artificial Sequence
  Synthetic oligonucleotide
gtacaggtcaaatatcttgaggtgttatag

SEQ ID NO: 382185 - DNA, 30 bp, Artificial Sequence
  Synthetic oligonucleotide
tgcatgtcgcctggacgcatttatttatag

SEQ ID NO: 382186 - DNA, 30 bp, Artificial Sequence
  Synthetic oligonucleotide
acaaaattacgttcgacaaatcgtttatag

SEQ ID NO: 382187 - DNA, 30 bp, Artificial Sequence
  Synthetic oligonucleotide
ctgatcacaggcggcatgcaaagaaactag

SEQ ID NO: 382188 - DNA, 30 bp, Artificial Sequence
  Synthetic oligonucleotide
aatctgacaggtgatcatcggtccaactag

SEQ ID NO: 382189 - DNA, 30 bp, Artificial Sequence
  Synthetic oligonucleotide
gtaagtgcggcctgtagcagagcgaactag

SEQ ID NO: 382190 - DNA, 30 bp, Artificial Sequence
  Synthetic oligonucleotide
aatgctccttcatctcactgttcgaactag

SEQ ID NO: 382191 - DNA, 30 bp, Artificial Sequence
  Synthetic oligonucleotide
gcctagacttacactcttgttcgtaactag

SEQ ID NO: 382192 - DNA, 30 bp, Artificial Sequence
  Synthetic oligonucleotide
taagggacctcgtggtccgaagcacactag

SEQ ID NO: 382193 - DNA, 30 bp, Artificial Sequence
  Synthetic oligonucleotide
tgccactcaaacttttcgactgtacactag

SEQ ID NO: 382194 - DNA, 30 bp, Artificial Sequence
  Synthetic oligonucleotide
taacttacaagtccgacgaaatagcactag

SEQ ID NO: 382195 - DNA, 30 bp, Artificial Sequence
  Synthetic oligonucleotide
gttcacgaaaatttgacgcttcggcactag

SEQ ID NO: 382196 - DNA, 30 bp, Artificial Sequence
  Synthetic oligonucleotide
tctgaccgcgaagttataaattttcactag

SEQ ID NO: 382197 - DNA, 30 bp, Artificial Sequence
  Synthetic oligonucleotide
cactcggtactaaggggttattgcgactag

SEQ ID NO: 382198 - DNA, 30 bp, Artificial Sequence
  Synthetic oligonucleotide
caaacgttataattgtctggcccggactag

SEQ ID NO: 382199 - DNA, 30 bp, Artificial Sequence
  Synthetic oligonucleotide
cattgaacagcgtcactaggaggtgactag

SEQ ID NO: 382200 - DNA, 30 bp, Artificial Sequence
  Synthetic oligonucleotide
accaagttcattgggatcacccaatactag

SEQ ID NO: 382201 - DNA, 30 bp, Artificial Sequence
  Synthetic oligonucleotide
tatagatagccataagtttatgggtactag

SEQ ID NO: 382202 - DNA, 30 bp, Artificial Sequence
  Synthetic oligonucleotide
agctattactgtatcgacggcctttactag

SEQ ID NO: 382203 - DNA, 30 bp, Artificial Sequence
  Synthetic oligonucleotide
gagatctagcacaaattagaagtttactag

SEQ ID NO: 382204 - DNA, 30 bp, Artificial Sequence
  Synthetic oligonucleotide
ggtcttcttctcacttgtagacacacctag

SEQ ID NO: 382205 - DNA, 30 bp, Artificial Sequence
  Synthetic oligonucleotide
agacgcatcggtaggatactacacacctag

SEQ ID NO: 382206 - DNA, 30 bp, Artificial Sequence
  Synthetic oligonucleotide
aacatttagtattagtgtctaccgacctag

SEQ ID NO: 382207 - DNA, 30 bp, Artificial Sequence
  Synthetic oligonucleotide
taatacgagacccgcgccggagggacctag

SEQ ID NO: 382208 - DNA, 30 bp, Artificial Sequence
  Synthetic oligonucleotide
ggtagtgtttgttatattagggttacctag

SEQ ID NO: 382209 - DNA, 30 bp, Artificial Sequence
  Synthetic oligonucleotide
accctccaagggccatcattcgggccctag

SEQ ID NO: 382210 - DNA, 30 bp, Artificial Sequence
  Synthetic oligonucleotide
gaagatgtacatccctacggttttccctag

SEQ ID NO: 382211 - DNA, 30 bp, Artificial Sequence
  Synthetic oligonucleotide
gcgattttattggttgatacagcagcctag

SEQ ID NO: 382212 - DNA, 30 bp, Artificial Sequence
  Synthetic oligonucleotide
ctcgcagtaattaaagacgtattagcctag

SEQ ID NO: 382213 - DNA, 30 bp, Artificial Sequence
  Synthetic oligonucleotide
gctaatctgaaattacgtaagcatgcctag

SEQ ID NO: 382214 - DNA, 30 bp, Artificial Sequence
  Synthetic oligonucleotide
aaggtaacggaaacttgagtctttgcctag

SEQ ID NO: 382215 - DNA, 30 bp, Artificial Sequence
  Synthetic oligonucleotide
aaagatcgagttgccttgcaatcatcctag

SEQ ID NO: 382216 - DNA, 30 bp, Artificial Sequence
  Synthetic oligonucleotide
gaaaatgctcggtggtatctcctatcctag

SEQ ID NO: 382217 - DNA, 30 bp, Artificial Sequence
  Synthetic oligonucleotide
ctgcgatacagacacagggcgtcgtcctag

SEQ ID NO: 382218 - DNA, 30 bp, Artificial Sequence
  Synthetic oligonucleotide
gaggttatcgcgttaatgaatcattcctag

SEQ ID NO: 382219 - DNA, 30 bp, Artificial Sequence
  Synthetic oligonucleotide
aatgtgcggatcccagggtcttattcctag

SEQ ID NO: 382220 - DNA, 30 bp, Artificial Sequence
  Synthetic oligonucleotide
cgccggcaattccctagacggagttcctag

SEQ ID NO: 382221 - DNA, 30 bp, Artificial Sequence
  Synthetic oligonucleotide
atctctaacattgtcgtataacgttcctag

SEQ ID NO: 382222 - DNA, 30 bp, Artificial Sequence
  Synthetic oligonucleotide
ggatgtacatcccctggccgatacagctag

SEQ ID NO: 382223 - DNA, 30 bp, Artificial Sequence
  Synthetic oligonucleotide
tttgtctccatgggtgcgtacgagagctag

SEQ ID NO: 382224 - DNA, 30 bp, Artificial Sequence
  Synthetic oligonucleotide
agtcatggcaacatagcttatacgagctag

SEQ ID NO: 382225 - DNA, 30 bp, Artificial Sequence
  Synthetic oligonucleotide
accgcattaataggacgacgcattagctag

SEQ ID NO: 382226 - DNA, 30 bp, Artificial Sequence
  Synthetic oligonucleotide
gaacttttgaagtagtttcgtcttagctag

SEQ ID NO: 382227 - DNA, 30 bp, Artificial Sequence
  Synthetic oligonucleotide
attcaaaagctcgcctgatctaaacgctag

SEQ ID NO: 382228 - DNA, 30 bp, Artificial Sequence
  Synthetic oligonucleotide
tcagttactagcacttctaagttacgctag

SEQ ID NO: 382229 - DNA, 30 bp, Artificial Sequence
  Synthetic oligonucleotide
aaaccgcgtccgcgtgtgataaagcgctag

SEQ ID NO: 382230 - DNA, 30 bp, Artificial Sequence
  Synthetic oligonucleotide
gagtacggtgccactcaagtgctgcgctag

SEQ ID NO: 382231 - DNA, 30 bp, Artificial Sequence
  Synthetic oligonucleotide
gcccaagcgaaatgtcacgccgatcgctag

SEQ ID NO: 382232 - DNA, 30 bp, Artificial Sequence
  Synthetic oligonucleotide
tcactatgtctacaaccaggacctcgctag

SEQ ID NO: 382233 - DNA, 30 bp, Artificial Sequence
  Synthetic oligonucleotide
tacagcattctgcattagctcgaaggctag

SEQ ID NO: 382234 - DNA, 30 bp, Artificial Sequence
  Synthetic oligonucleotide
attattacgccatatatccatagcggctag

SEQ ID NO: 382235 - DNA, 30 bp, Artificial Sequence
  Synthetic oligonucleotide
caaatatccctaaataaagcgaagggctag

SEQ ID NO: 382236 - DNA, 30 bp, Artificial Sequence
  Synthetic oligonucleotide
ttcaggacagtagacccgacgtatggctag

SEQ ID NO: 382237 - DNA, 30 bp, Artificial Sequence
  Synthetic oligonucleotide
ggccggttaatctatagctggcctggctag

SEQ ID NO: 382238 - DNA, 30 bp, Artificial Sequence
  Synthetic oligonucleotide
gcgggggtaaggttctgggaacgtggctag

SEQ ID NO: 382239 - DNA, 30 bp, Artificial Sequence
  Synthetic oligonucleotide
gcgaaagtgtaaaccagatccgaatgctag

SEQ ID NO: 382240 - DNA, 30 bp, Artificial Sequence
  Synthetic oligonucleotide
agttgcccttttctcccgaaaacctgctag

SEQ ID NO: 382241 - DNA, 30 bp, Artificial Sequence
  Synthetic oligonucleotide
ttattgttagctcgattgctctcgtgctag

SEQ ID NO: 382242 - DNA, 30 bp, Artificial Sequence
  Synthetic oligonucleotide
attgcctggttgcaggggaatcggtgctag

SEQ ID NO: 382243 - DNA, 30 bp, Artificial Sequence
  Synthetic oligonucleotide
aactactatcacttcagttcttggtgctag

SEQ ID NO: 382244 - DNA, 30 bp, Artificial Sequence
  Synthetic oligonucleotide
ggctcctcaacgatttcatgtgacatctag

SEQ ID NO: 382245 - DNA, 30 bp, Artificial Sequence
  Synthetic oligonucleotide
tcatgagtgattttgttgcgctcgatctag

SEQ ID NO: 382246 - DNA, 30 bp, Artificial Sequence
  Synthetic oligonucleotide
tttgacgatcgtggagtcagtaggatctag

SEQ ID NO: 382247 - DNA, 30 bp, Artificial Sequence
  Synthetic oligonucleotide
ttctgcacatttgtccaatgctgtatctag

SEQ ID NO: 382248 - DNA, 30 bp, Artificial Sequence
  Synthetic oligonucleotide
gacttaggctcattactgcggggtctctag

SEQ ID NO: 382249 - DNA, 30 bp, Artificial Sequence
  Synthetic oligonucleotide
aagcgtgcttgttaaaaatggattctctag

SEQ ID NO: 382250 - DNA, 30 bp, Artificial Sequence
  Synthetic oligonucleotide
gtatccaaacgtctggatggatacgtctag

SEQ ID NO: 382251 - DNA, 30 bp, Artificial Sequence
  Synthetic oligonucleotide
gtatctgttctcgtactcgtaatggtctag

SEQ ID NO: 382252 - DNA, 30 bp, Artificial Sequence
  Synthetic oligonucleotide
tatcatggtaggctcgtttgtgtattctag

SEQ ID NO: 382253 - DNA, 31 bp, Artificial Sequence
  Synthetic oligonucleotide
cttgcctagagagcgttcgaccaacttctag

SEQ ID NO: 382254 - DNA, 30 bp, Artificial Sequence
  Synthetic oligonucleotide
tcccgaatttacaactccatcatcttctag

SEQ ID NO: 382255 - DNA, 30 bp, Artificial Sequence
  Synthetic oligonucleotide
ctattggtttgtttcctcgggtggttctag

SEQ ID NO: 382256 - DNA, 30 bp, Artificial Sequence
  Synthetic oligonucleotide
tacatgttttcaatttaaggaattttctag

SEQ ID NO: 382257 - DNA, 30 bp, Artificial Sequence
  Synthetic oligonucleotide
ctactgacactatgacgtacccttttctag

SEQ ID NO: 382258 - DNA, 30 bp, Artificial Sequence
  Synthetic oligonucleotide
ggtcctgagctcggggtcatccttttctag

SEQ ID NO: 382259 - DNA, 30 bp, Artificial Sequence
  Synthetic oligonucleotide
ccggtcacggttctcctgctataaaagtag

SEQ ID NO: 382260 - DNA, 30 bp, Artificial Sequence
  Synthetic oligonucleotide
gctggatatttgtattagcgctaaaagtag

SEQ ID NO: 382261 - DNA, 30 bp, Artificial Sequence
  Synthetic oligonucleotide
gtggggacccgcactcagtacgtgaagtag

SEQ ID NO: 382262 - DNA, 30 bp, Artificial Sequence
  Synthetic oligonucleotide
ttcgttcatatgttgccgcgggataagtag

SEQ ID NO: 382263 - DNA, 30 bp, Artificial Sequence
  Synthetic oligonucleotide
ttcagacagttaggagccccttataagtag

SEQ ID NO: 382264 - DNA, 30 bp, Artificial Sequence
  Synthetic oligonucleotide
gctctgcggtctgttgccagatttaagtag

SEQ ID NO: 382265 - DNA, 30 bp, Artificial Sequence
  Synthetic oligonucleotide
ttagccatcgggaccgtgtgcgtacagtag

SEQ ID NO: 382266 - DNA, 30 bp, Artificial Sequence
  Synthetic oligonucleotide
atttcaatctacccaagcccgcaccagtag

SEQ ID NO: 382267 - DNA, 30 bp, Artificial Sequence
  Synthetic oligonucleotide
ttcttgtgaagatacttattagagcagtag

SEQ ID NO: 382268 - DNA, 30 bp, Artificial Sequence
  Synthetic oligonucleotide
gccgagggttgagttggcagggcgcagtag

SEQ ID NO: 382269 - DNA, 30 bp, Artificial Sequence
  Synthetic oligonucleotide
tgagctgaaacccacctcttgagtcagtag

SEQ ID NO: 382270 - DNA, 30 bp, Artificial Sequence
  Synthetic oligonucleotide
atcgggtctggtattgattttggtcagtag

SEQ ID NO: 382271 - DNA, 30 bp, Artificial Sequence
  Synthetic oligonucleotide
cgcctcaacgccgttacaggacttcagtag

SEQ ID NO: 382272 - DNA, 30 bp, Artificial Sequence
  Synthetic oligonucleotide
tccgtcatcgtgggtaagtgagttcagtag

SEQ ID NO: 382273 - DNA, 30 bp, Artificial Sequence
  Synthetic oligonucleotide
ctccaggacttaacgccgcgcagagagtag

SEQ ID NO: 382274 - DNA, 30 bp, Artificial Sequence
  Synthetic oligonucleotide
cgaccctcgggccgctcatgacccgagtag

SEQ ID NO: 382275 - DNA, 30 bp, Artificial Sequence
  Synthetic oligonucleotide
ggcgggatctgagggtaacggactgagtag

SEQ ID NO: 382276 - DNA, 30 bp, Artificial Sequence
  Synthetic oligonucleotide
cgacatctttgaccggctgtgtgtgagtag

SEQ ID NO: 382277 - DNA, 30 bp, Artificial Sequence
  Synthetic oligonucleotide
gcaggtcggtacagtattggtaaatagtag

SEQ ID NO: 382278 - DNA, 30 bp, Artificial Sequence
  Synthetic oligonucleotide
gttaatcgtgcaggtaatatacgatagtag

SEQ ID NO: 382279 - DNA, 30 bp, Artificial Sequence
  Synthetic oligonucleotide
ctatagtgttcggcaatataaggctagtag

SEQ ID NO: 382280 - DNA, 30 bp, Artificial Sequence
  Synthetic oligonucleotide
gatagagcaataccaccggccggctagtag

SEQ ID NO: 382281 - DNA, 30 bp, Artificial Sequence
  Synthetic oligonucleotide
tatactgcgtgccgtgccgtcgtctagtag

SEQ ID NO: 382282 - DNA, 30 bp, Artificial Sequence
  Synthetic oligonucleotide
ttaaatactggcacagtgccttcgtagtag

SEQ ID NO: 382283 - DNA, 30 bp, Artificial Sequence
  Synthetic oligonucleotide
acccgagttcttgtttacaaggcttagtag

SEQ ID NO: 382284 - DNA, 30 bp, Artificial Sequence
  Synthetic oligonucleotide
ggtgacttactgcccctgatcagttagtag

SEQ ID NO: 382285 - DNA, 30 bp, Artificial Sequence
  Synthetic oligonucleotide
gtaagccgctattaggatgttgccacgtag

SEQ ID NO: 382286 - DNA, 30 bp, Artificial Sequence
  Synthetic oligonucleotide
tcacgattcgtcgttctcactaagacgtag

SEQ ID NO: 382287 - DNA, 30 bp, Artificial Sequence
  Synthetic oligonucleotide
ggtttagggctcttacgcgtagaaccgtag

SEQ ID NO: 382288 - DNA, 30 bp, Artificial Sequence
  Synthetic oligonucleotide
gtgggcctagcacggctctagttaccgtag

SEQ ID NO: 382289 - DNA, 30 bp, Artificial Sequence
  Synthetic oligonucleotide
tcttaggactacgctgcttcgagcccgtag

SEQ ID NO: 382290 - DNA, 30 bp, Artificial Sequence
  Synthetic oligonucleotide
tactggactctctgttagagactcccgtag

SEQ ID NO: 382291 - DNA, 30 bp, Artificial Sequence
  Synthetic oligonucleotide
cggcccaggccgcggagtcagctcccgtag

SEQ ID NO: 382292 - DNA, 30 bp, Artificial Sequence
  Synthetic oligonucleotide
ataggatcacctgctattggtaatccgtag

SEQ ID NO: 382293 - DNA, 30 bp, Artificial Sequence
  Synthetic oligonucleotide
tcgactagtcgaccgctggcatgtccgtag

SEQ ID NO: 382294 - DNA, 30 bp, Artificial Sequence
  Synthetic oligonucleotide
catgatagtgtaccagatatggttccgtag

SEQ ID NO: 382295 - DNA, 30 bp, Artificial Sequence
  Synthetic oligonucleotide
ttaataccagggtctacgtgaggagcgtag

SEQ ID NO: 382296 - DNA, 30 bp, Artificial Sequence
  Synthetic oligonucleotide
aaggttatttcccggcattgaaaggcgtag

SEQ ID NO: 382297 - DNA, 30 bp, Artificial Sequence
  Synthetic oligonucleotide
tgaacttatcgggatttttcagaggcgtag

SEQ ID NO: 382298 - DNA, 30 bp, Artificial Sequence
  Synthetic oligonucleotide
gcggacggaagccacggtcgtgcggcgtag

SEQ ID NO: 382299 - DNA, 30 bp, Artificial Sequence
  Synthetic oligonucleotide
tttaaacgacaattgaagtttctggcgtag

SEQ ID NO: 382300 - DNA, 30 bp, Artificial Sequence
  Synthetic oligonucleotide
tgagtgatcgtcgagcgactaaatgcgtag

SEQ ID NO: 382301 - DNA, 30 bp, Artificial Sequence
  Synthetic oligonucleotide
ggccttaaagaaggtcgggtggtatcgtag

SEQ ID NO: 382302 - DNA, 30 bp, Artificial Sequence
  Synthetic oligonucleotide
aatcatagcgctgtagcattaaggtcgtag

SEQ ID NO: 382303 - DNA, 30 bp, Artificial Sequence
  Synthetic oligonucleotide
acctcttttgagtatactgaaccgaggtag

SEQ ID NO: 382304 - DNA, 30 bp, Artificial Sequence
  Synthetic oligonucleotide
ccggatcattcaggatggtttggtaggtag

SEQ ID NO: 382305 - DNA, 30 bp, Artificial Sequence
  Synthetic oligonucleotide
gacttaacgggttgcaatgcacttaggtag

SEQ ID NO: 382306 - DNA, 30 bp, Artificial Sequence
  Synthetic oligonucleotide
gcttcaatcatatgaaggcataaacggtag

SEQ ID NO: 382307 - DNA, 30 bp, Artificial Sequence
  Synthetic oligonucleotide
tcggttttacgaagtctacatatacggtag

SEQ ID NO: 382308 - DNA, 30 bp, Artificial Sequence
  Synthetic oligonucleotide
agcgggcacgcctaggtttaggcccggtag

SEQ ID NO: 382309 - DNA, 30 bp, Artificial Sequence
  Synthetic oligonucleotide
ccaagcacattcagaggcatagagcggtag

SEQ ID NO: 382310 - DNA, 31 bp, Artificial Sequence
  Synthetic oligonucleotide
tcgggacaggaagtagaaactgacgcggtag

SEQ ID NO: 382311 - DNA, 30 bp, Artificial Sequence
  Synthetic oligonucleotide
tgtagcacatcggtaatccctatgcggtag

SEQ ID NO: 382312 - DNA, 31 bp, Artificial Sequence
  Synthetic oligonucleotide
agtgatcgtcgcttccactctaacagggtag

SEQ ID NO: 382313 - DNA, 30 bp, Artificial Sequence
  Synthetic oligonucleotide
gaaaatcttcataccagcaagtgcgggtag

SEQ ID NO: 382314 - DNA, 30 bp, Artificial Sequence
  Synthetic oligonucleotide
actccacttttcggccgtcaaatggggtag

SEQ ID NO: 382315 - DNA, 30 bp, Artificial Sequence
  Synthetic oligonucleotide
gaagagtcacaaagaacccagtatgggtag

SEQ ID NO: 382316 - DNA, 30 bp, Artificial Sequence
  Synthetic oligonucleotide
tcctatctaccagaatagggggctgggtag

SEQ ID NO: 382317 - DNA, 30 bp, Artificial Sequence
  Synthetic oligonucleotide
aagtttgattggatctctggcgttgggtag

SEQ ID NO: 382318 - DNA, 30 bp, Artificial Sequence
  Synthetic oligonucleotide
gtttgggtccagtttttcgggttatggtag

SEQ ID NO: 382319 - DNA, 30 bp, Artificial Sequence
  Synthetic oligonucleotide
acgatgagttttgtaaggatatactggtag

SEQ ID NO: 382320 - DNA, 30 bp, Artificial Sequence
  Synthetic oligonucleotide
tattaaatccctacatactttacctggtag

SEQ ID NO: 382321 - DNA, 30 bp, Artificial Sequence
  Synthetic oligonucleotide
cagtgtactggtaagtggttccgctggtag

SEQ ID NO: 382322 - DNA, 30 bp, Artificial Sequence
  Synthetic oligonucleotide
gtctcaaccattctgatttagaattggtag

SEQ ID NO: 382323 - DNA, 30 bp, Artificial Sequence
  Synthetic oligonucleotide
gtatagaatgtgcgtctttcaacttggtag

SEQ ID NO: 382324 - DNA, 30 bp, Artificial Sequence
  Synthetic oligonucleotide
tagcgttctagacgcgttatcatttggtag

SEQ ID NO: 382325 - DNA, 30 bp, Artificial Sequence
  Synthetic oligonucleotide
tacttggttaccgtgtttacaccaatgtag

SEQ ID NO: 382326 - DNA, 30 bp, Artificial Sequence
  Synthetic oligonucleotide
ctgtgtttacttctatggtgaggaatgtag

SEQ ID NO: 382327 - DNA, 30 bp, Artificial Sequence
  Synthetic oligonucleotide
caatcggagtattcatgcatgtacatgtag

SEQ ID NO: 382328 - DNA, 30 bp, Artificial Sequence
  Synthetic oligonucleotide
aatgctctccactcctggattggcatgtag

SEQ ID NO: 382329 - DNA, 30 bp, Artificial Sequence
  Synthetic oligonucleotide
aaaatgatccatccctaaaatgggatgtag

SEQ ID NO: 382330 - DNA, 30 bp, Artificial Sequence
  Synthetic oligonucleotide
aaaagatgtaagtaccttaaatatatgtag

SEQ ID NO: 382331 - DNA, 31 bp, Artificial Sequence
  Synthetic oligonucleotide
tgcagacttctgcatattagacggtatgtag

SEQ ID NO: 382332 - DNA, 30 bp, Artificial Sequence
  Synthetic oligonucleotide
cctgttgtgcaggcggtctcatgtatgtag

SEQ ID NO: 382333 - DNA, 30 bp, Artificial Sequence
  Synthetic oligonucleotide
ttctacggttctatcatacccccactgtag

SEQ ID NO: 382334 - DNA, 30 bp, Artificial Sequence
  Synthetic oligonucleotide
gacgcttgccgcagttatagccacctgtag

SEQ ID NO: 382335 - DNA, 30 bp, Artificial Sequence
  Synthetic oligonucleotide
gtactattatggtggtctaatcagctgtag

SEQ ID NO: 382336 - DNA, 30 bp, Artificial Sequence
  Synthetic oligonucleotide
gcgggatactaacgtggcgcaccgctgtag

SEQ ID NO: 382337 - DNA, 30 bp, Artificial Sequence
  Synthetic oligonucleotide
agtacggtttattatgacgctaatctgtag

SEQ ID NO: 382338 - DNA, 30 bp, Artificial Sequence
  Synthetic oligonucleotide
ccgggtttacgtgcgtacgtaagtctgtag

SEQ ID NO: 382339 - DNA, 30 bp, Artificial Sequence
  Synthetic oligonucleotide
gtccccgccacaccataaagataagtgtag

SEQ ID NO: 382340 - DNA, 30 bp, Artificial Sequence
  Synthetic oligonucleotide
tggcacccagaataagtcggtgtagtgtag

SEQ ID NO: 382341 - DNA, 30 bp, Artificial Sequence
  Synthetic oligonucleotide
ggagcgattcgtggtagtagtatggtgtag

SEQ ID NO: 382342 - DNA, 30 bp, Artificial Sequence
  Synthetic oligonucleotide
gtatcacgcggtctataaaggtatgtgtag

SEQ ID NO: 382343 - DNA, 30 bp, Artificial Sequence
  Synthetic oligonucleotide
tctctgcataggaacatattgcaattgtag

SEQ ID NO: 382344 - DNA, 30 bp, Artificial Sequence
  Synthetic oligonucleotide
aattaagtaagagccaatggtacattgtag

SEQ ID NO: 382345 - DNA, 30 bp, Artificial Sequence
  Synthetic oligonucleotide
tccacgtcaccaggccgggtgcgattgtag

SEQ ID NO: 382346 - DNA, 30 bp, Artificial Sequence
  Synthetic oligonucleotide
tattcatctctgtatgcaagcgcgttgtag

SEQ ID NO: 382347 - DNA, 30 bp, Artificial Sequence
  Synthetic oligonucleotide
accccgggccatgcgtgttacgggttgtag

SEQ ID NO: 382348 - DNA, 30 bp, Artificial Sequence
  Synthetic oligonucleotide
gtgcttgtcgtcttgctactcagtttgtag

SEQ ID NO: 382349 - DNA, 30 bp, Artificial Sequence
  Synthetic oligonucleotide
ccgcctaactgttagtaggtgcgtttgtag

SEQ ID NO: 382350 - DNA, 30 bp, Artificial Sequence
  Synthetic oligonucleotide
gtcttgacgtacgagttgctgcgaaattag

SEQ ID NO: 382351 - DNA, 30 bp, Artificial Sequence
  Synthetic oligonucleotide
aattgagcgggttacaaaaatttaaattag

SEQ ID NO: 382352 - DNA, 30 bp, Artificial Sequence
  Synthetic oligonucleotide
agatttctaaagagatcaccacacaattag

SEQ ID NO: 382353 - DNA, 30 bp, Artificial Sequence
  Synthetic oligonucleotide
tatgaatgagggctccgccggggcaattag

SEQ ID NO: 382354 - DNA, 30 bp, Artificial Sequence
  Synthetic oligonucleotide
gaaggagtaagtacatcataaacgaattag

SEQ ID NO: 382355 - DNA, 30 bp, Artificial Sequence
  Synthetic oligonucleotide
catcttatattcataccacggttgaattag

SEQ ID NO: 382356 - DNA, 30 bp, Artificial Sequence
  Synthetic oligonucleotide
ctaagtgatggagcgaggcctacacattag

SEQ ID NO: 382357 - DNA, 30 bp, Artificial Sequence
  Synthetic oligonucleotide
tttccaacatgatccggaacaggacattag

SEQ ID NO: 382358 - DNA, 30 bp, Artificial Sequence
  Synthetic oligonucleotide
aatctggaggtaatagggagagtacattag

SEQ ID NO: 382359 - DNA, 30 bp, Artificial Sequence
  Synthetic oligonucleotide
catttagtcgcgcaatctgtgatccattag

SEQ ID NO: 382360 - DNA, 30 bp, Artificial Sequence
  Synthetic oligonucleotide
caatacgtttaaggatattcagggcattag

SEQ ID NO: 382361 - DNA, 30 bp, Artificial Sequence
  Synthetic oligonucleotide
ccgatcttataaaccaggcgggggcattag

SEQ ID NO: 382362 - DNA, 30 bp, Artificial Sequence
  Synthetic oligonucleotide
cacggccgtcagcacagtctcgatcattag

SEQ ID NO: 382363 - DNA, 30 bp, Artificial Sequence
  Synthetic oligonucleotide
gatattcgtgtcactgtggattatcattag

SEQ ID NO: 382364 - DNA, 30 bp, Artificial Sequence
  Synthetic oligonucleotide
cggtaaaggaatgcgttaaagtcagattag

SEQ ID NO: 382365 - DNA, 30 bp, Artificial Sequence
  Synthetic oligonucleotide
ggtcattttacactgccggtaatagattag

SEQ ID NO: 382366 - DNA, 30 bp, Artificial Sequence
  Synthetic oligonucleotide
ttccaagtttctacgatatcataggattag

SEQ ID NO: 382367 - DNA, 30 bp, Artificial Sequence
  Synthetic oligonucleotide
tctatccgccaactataagttgcggattag

SEQ ID NO: 382368 - DNA, 30 bp, Artificial Sequence
  Synthetic oligonucleotide
cccagggggtcccggagggtggaatattag

SEQ ID NO: 382369 - DNA, 30 bp, Artificial Sequence
  Synthetic oligonucleotide
cagacagcccataacatttctctatattag

SEQ ID NO: 382370 - DNA, 30 bp, Artificial Sequence
  Synthetic oligonucleotide
ttaagggcgccttcgcgtactttctattag

SEQ ID NO: 382371 - DNA, 30 bp, Artificial Sequence
  Synthetic oligonucleotide
aagttacgtgagtcatccttcaggtattag

SEQ ID NO: 382372 - DNA, 30 bp, Artificial Sequence
  Synthetic oligonucleotide
ttgatgatgtgcagtagaaccatgtattag

SEQ ID NO: 382373 - DNA, 30 bp, Artificial Sequence
  Synthetic oligonucleotide
gtcagtagtgagcctgcacaggtgtattag

SEQ ID NO: 382374 - DNA, 30 bp, Artificial Sequence
  Synthetic oligonucleotide
tggttaggtcccatctcgcctgattattag

SEQ ID NO: 382375 - DNA, 30 bp, Artificial Sequence
  Synthetic oligonucleotide
gaatcactcagcttgggtcttcgttattag

SEQ ID NO: 382376 - DNA, 30 bp, Artificial Sequence
  Synthetic oligonucleotide
tatgtggtctatatagaatttggttattag

SEQ ID NO: 382377 - DNA, 30 bp, Artificial Sequence
  Synthetic oligonucleotide
atcaaatgagggcagacggtcttttattag

SEQ ID NO: 382378 - DNA, 30 bp, Artificial Sequence
  Synthetic oligonucleotide
cttcacttttgtacgtcacagtcaacttag

SEQ ID NO: 382379 - DNA, 30 bp, Artificial Sequence
  Synthetic oligonucleotide
ttctgcaaggcctagagccgcggaacttag

SEQ ID NO: 382380 - DNA, 30 bp, Artificial Sequence
  Synthetic oligonucleotide
ttgttgagtttcataaacgaaagcacttag

SEQ ID NO: 382381 - DNA, 30 bp, Artificial Sequence
  Synthetic oligonucleotide
aaacaagcccatgacgattgactcacttag

SEQ ID NO: 382382 - DNA, 30 bp, Artificial Sequence
  Synthetic oligonucleotide
gtgactacactgtagagaaaatcgacttag

SEQ ID NO: 382383 - DNA, 30 bp, Artificial Sequence
  Synthetic oligonucleotide
atccgatcaggcgcacgcgcggctacttag

SEQ ID NO: 382384 - DNA, 30 bp, Artificial Sequence
  Synthetic oligonucleotide
acatgggacgcttataatctcattacttag

SEQ ID NO: 382385 - DNA, 30 bp, Artificial Sequence
  Synthetic oligonucleotide
gggaggatactcccaacgcgccttacttag

SEQ ID NO: 382386 - DNA, 30 bp, Artificial Sequence
  Synthetic oligonucleotide
gacgatcgggtttagtaaatttacccttag

SEQ ID NO: 382387 - DNA, 30 bp, Artificial Sequence
  Synthetic oligonucleotide
tgaatggggaaggactatgttatcccttag

SEQ ID NO: 382388 - DNA, 30 bp, Artificial Sequence
  Synthetic oligonucleotide
caaagctcggaagtgggtcttttgccttag

SEQ ID NO: 382389 - DNA, 30 bp, Artificial Sequence
  Synthetic oligonucleotide
gtcctcgggacaccaggttagtatccttag

SEQ ID NO: 382390 - DNA, 30 bp, Artificial Sequence
  Synthetic oligonucleotide
cctagcacctcgattagatggtatccttag

SEQ ID NO: 382391 - DNA, 30 bp, Artificial Sequence
  Synthetic oligonucleotide
ttatgtacattgggtgcccagcgtccttag

SEQ ID NO: 382392 - DNA, 30 bp, Artificial Sequence
  Synthetic oligonucleotide
ggtcggaataagccaatactatgggcttag

SEQ ID NO: 382393 - DNA, 30 bp, Artificial Sequence
  Synthetic oligonucleotide
gccaatggttgggaaacacgcgcatcttag

SEQ ID NO: 382394 - DNA, 30 bp, Artificial Sequence
  Synthetic oligonucleotide
gtaattgttggttatgcttaggagtcttag

SEQ ID NO: 382395 - DNA, 30 bp, Artificial Sequence
  Synthetic oligonucleotide
tatacaaaatttgtctagagttagtcttag

SEQ ID NO: 382396 - DNA, 30 bp, Artificial Sequence
  Synthetic oligonucleotide
atgtctaagggagtagaggcttggtcttag

SEQ ID NO: 382397 - DNA, 30 bp, Artificial Sequence
  Synthetic oligonucleotide
gcttccgtgcccaagaacatcatttcttag

SEQ ID NO: 382398 - DNA, 30 bp, Artificial Sequence
  Synthetic oligonucleotide
tttggtgtcaggggtaaggaaagaagttag

SEQ ID NO: 382399 - DNA, 30 bp, Artificial Sequence
  Synthetic oligonucleotide
accctttaggtgttgtgcgttgtaagttag

SEQ ID NO: 382400 - DNA, 30 bp, Artificial Sequence
  Synthetic oligonucleotide
aaagcttgaggatccacacaaagcagttag

SEQ ID NO: 382401 - DNA, 30 bp, Artificial Sequence
  Synthetic oligonucleotide
gcttacggacacctctaccagatcagttag

SEQ ID NO: 382402 - DNA, 30 bp, Artificial Sequence
  Synthetic oligonucleotide
cgatctatagaattgctttgcctcagttag

SEQ ID NO: 382403 - DNA, 30 bp, Artificial Sequence
  Synthetic oligonucleotide
tgggttctacgttttcgaagctagagttag

SEQ ID NO: 382404 - DNA, 30 bp, Artificial Sequence
  Synthetic oligonucleotide
cggtagtatcttcgtagttagtggagttag

SEQ ID NO: 382405 - DNA, 30 bp, Artificial Sequence
  Synthetic oligonucleotide
gatctactccaaagtacatgattgagttag

SEQ ID NO: 382406 - DNA, 30 bp, Artificial Sequence
  Synthetic oligonucleotide
gttagctttcccgcatttctaagtagttag

SEQ ID NO: 382407 - DNA, 30 bp, Artificial Sequence
  Synthetic oligonucleotide
tttgtaaagtacctacttcttagtagttag

SEQ ID NO: 382408 - DNA, 30 bp, Artificial Sequence
  Synthetic oligonucleotide
agtacataggtcgtcggatgccaacgttag

SEQ ID NO: 382409 - DNA, 30 bp, Artificial Sequence
  Synthetic oligonucleotide
actgcttatgatgaaactggtttacgttag

SEQ ID NO: 382410 - DNA, 30 bp, Artificial Sequence
  Synthetic oligonucleotide
tggtagaacgtactaggtaagcgccgttag

SEQ ID NO: 382411 - DNA, 30 bp, Artificial Sequence
  Synthetic oligonucleotide
actccatttcccgtctatccttggcgttag

SEQ ID NO: 382412 - DNA, 30 bp, Artificial Sequence
  Synthetic oligonucleotide
gctgtccggtattgcgactaagaaggttag

SEQ ID NO: 382413 - DNA, 30 bp, Artificial Sequence
  Synthetic oligonucleotide
ctctcaactcggtcatacaagccaggttag

SEQ ID NO: 382414 - DNA, 30 bp, Artificial Sequence
  Synthetic oligonucleotide
catatctgtctagcgaaattgataggttag

SEQ ID NO: 382415 - DNA, 30 bp, Artificial Sequence
  Synthetic oligonucleotide
aaccttaaattatgagaagcgaccggttag

SEQ ID NO: 382416 - DNA, 30 bp, Artificial Sequence
  Synthetic oligonucleotide
tttgacaccctacatatctaagccggttag

SEQ ID NO: 382417 - DNA, 31 bp, Artificial Sequence
  Synthetic oligonucleotide
gagactattctcccatttaaagtagggttag

SEQ ID NO: 382418 - DNA, 30 bp, Artificial Sequence
  Synthetic oligonucleotide
tggttcaacatacccggagacctgggttag

SEQ ID NO: 382419 - DNA, 30 bp, Artificial Sequence
  Synthetic oligonucleotide
tccttgcatgaagtattgtagaatggttag

SEQ ID NO: 382420 - DNA, 30 bp, Artificial Sequence
  Synthetic oligonucleotide
tgattccagggctatgattttagtggttag

SEQ ID NO: 382421 - DNA, 30 bp, Artificial Sequence
  Synthetic oligonucleotide
caaactaagtagaaaactagttcatgttag

SEQ ID NO: 382422 - DNA, 30 bp, Artificial Sequence
  Synthetic oligonucleotide
gagcgtgttctaatgttcattagctgttag

SEQ ID NO: 382423 - DNA, 30 bp, Artificial Sequence
  Synthetic oligonucleotide
gtccgaagtaattaggcgtttcgctgttag

SEQ ID NO: 382424 - DNA, 30 bp, Artificial Sequence
  Synthetic oligonucleotide
caactcgctttggtcaaagttgagtgttag

SEQ ID NO: 382425 - DNA, 29 bp, Artificial Sequence
  Synthetic oligonucleotide
atcgcagggcatgcaacgtctagtgttag

SEQ ID NO: 382426 - DNA, 30 bp, Artificial Sequence
  Synthetic oligonucleotide
tatacactgtactaaagactacggtgttag

SEQ ID NO: 382427 - DNA, 30 bp, Artificial Sequence
  Synthetic oligonucleotide
taaactgcggggcgcgcgcaatggtgttag

SEQ ID NO: 382428 - DNA, 31 bp, Artificial Sequence
  Synthetic oligonucleotide
attcataaaggttatcatacctataatttag

SEQ ID NO: 382429 - DNA, 31 bp, Artificial Sequence
  Synthetic oligonucleotide
ttgttgaacatgtccatcggagcgcatttag

SEQ ID NO: 382430 - DNA, 30 bp, Artificial Sequence
  Synthetic oligonucleotide
tctgatagtcactggatcccgatcatttag

SEQ ID NO: 382431 - DNA, 30 bp, Artificial Sequence
  Synthetic oligonucleotide
tacttggaatcaatttgtgtaatgatttag

SEQ ID NO: 382432 - DNA, 30 bp, Artificial Sequence
  Synthetic oligonucleotide
cagcactcgtctactgatgaatatatttag

SEQ ID NO: 382433 - DNA, 30 bp, Artificial Sequence
  Synthetic oligonucleotide
ttcaaagtaaagtgggccagcctactttag

SEQ ID NO: 382434 - DNA, 30 bp, Artificial Sequence
  Synthetic oligonucleotide
cccaggtcctaaacatcgccgcccctttag

SEQ ID NO: 382435 - DNA, 30 bp, Artificial Sequence
  Synthetic oligonucleotide
tctgattaaagggattatgtggtcctttag

SEQ ID NO: 382436 - DNA, 30 bp, Artificial Sequence
  Synthetic oligonucleotide
aacgtgaatcattcggagacgtcgctttag

SEQ ID NO: 382437 - DNA, 30 bp, Artificial Sequence
  Synthetic oligonucleotide
agatcaagagcgtattgtcttactctttag

SEQ ID NO: 382438 - DNA, 30 bp, Artificial Sequence
  Synthetic oligonucleotide
ctggctagtggagactttatgcctctttag

SEQ ID NO: 382439 - DNA, 30 bp, Artificial Sequence
  Synthetic oligonucleotide
agcgagttactcttaataacatctctttag

SEQ ID NO: 382440 - DNA, 30 bp, Artificial Sequence
  Synthetic oligonucleotide
ctgttgactagctctgcccgttgagtttag

SEQ ID NO: 382441 - DNA, 30 bp, Artificial Sequence
  Synthetic oligonucleotide
acgggtcgtagctcacgtacgcaggtttag

SEQ ID NO: 382442 - DNA, 29 bp, Artificial Sequence
  Synthetic oligonucleotide
ggtatcctaattcgtgcgtgggggtttag

SEQ ID NO: 382443 - DNA, 30 bp, Artificial Sequence
  Synthetic oligonucleotide
ggcctacctgtatttttgcgacatgtttag

SEQ ID NO: 382444 - DNA, 30 bp, Artificial Sequence
  Synthetic oligonucleotide
aatagtagcgccgttggaccgtgtgtttag

SEQ ID NO: 382445 - DNA, 30 bp, Artificial Sequence
  Synthetic oligonucleotide
acttgctccagacagtgggagaaattttag

SEQ ID NO: 382446 - DNA, 30 bp, Artificial Sequence
  Synthetic oligonucleotide
accagagctaatatcttctttaaattttag

SEQ ID NO: 382447 - DNA, 30 bp, Artificial Sequence
  Synthetic oligonucleotide
ccacgccaatgagtttgggaggaattttag

SEQ ID NO: 382448 - DNA, 30 bp, Artificial Sequence
  Synthetic oligonucleotide
atgggcgcaggatgttcttcaacattttag

SEQ ID NO: 382449 - DNA, 30 bp, Artificial Sequence
  Synthetic oligonucleotide
gcacggctcggaactggacgtgccttttag

SEQ ID NO: 382450 - DNA, 30 bp, Artificial Sequence
  Synthetic oligonucleotide
ctaagttcttgttagacaccgctgttttag

SEQ ID NO: 382451 - DNA, 30 bp, Artificial Sequence
  Synthetic oligonucleotide
gggtcgattcggacgaaagttctgttttag

SEQ ID NO: 382452 - DNA, 30 bp, Artificial Sequence
  Synthetic oligonucleotide
ggaattgaagtttcgatacctgctttttag

SEQ ID NO: 382453 - DNA, 30 bp, Artificial Sequence
  Synthetic oligonucleotide
ggggtagccctcttagtggtaaaaaaaacg

SEQ ID NO: 382454 - DNA, 30 bp, Artificial Sequence
  Synthetic oligonucleotide
caggtgaatacgccttaacgtggaaaaacg

SEQ ID NO: 382455 - DNA, 30 bp, Artificial Sequence
  Synthetic oligonucleotide
cggaaccgtcgctactacgccagcaaaacg

SEQ ID NO: 382456 - DNA, 30 bp, Artificial Sequence
  Synthetic oligonucleotide
cgatacgttttggaacagtttagcaaaacg

SEQ ID NO: 382457 - DNA, 30 bp, Artificial Sequence
  Synthetic oligonucleotide
aacttgtaccattaatgtctggctaaaacg

SEQ ID NO: 382458 - DNA, 30 bp, Artificial Sequence
  Synthetic oligonucleotide
gattaccccggtaggttgcaagttaaaacg

SEQ ID NO: 382459 - DNA, 30 bp, Artificial Sequence
  Synthetic oligonucleotide
caatccggtagcttgtctgaggcagaaacg

SEQ ID NO: 382460 - DNA, 30 bp, Artificial Sequence
  Synthetic oligonucleotide
tttctggggcacagtggacgtggagaaacg

SEQ ID NO: 382461 - DNA, 30 bp, Artificial Sequence
  Synthetic oligonucleotide
gctgcggcctttttagtgctctacgaaacg

SEQ ID NO: 382462 - DNA, 30 bp, Artificial Sequence
  Synthetic oligonucleotide
aaacttcgtataggacagtacctcgaaacg

SEQ ID NO: 382463 - DNA, 30 bp, Artificial Sequence
  Synthetic oligonucleotide
ctacatactttttttcagattttcgaaacg

SEQ ID NO: 382464 - DNA, 30 bp, Artificial Sequence
  Synthetic oligonucleotide
tggtgtagcgctactacaccgctggaaacg

SEQ ID NO: 382465 - DNA, 30 bp, Artificial Sequence
  Synthetic oligonucleotide
acgtgttgacgcccctccagtcgtgaaacg

SEQ ID NO: 382466 - DNA, 30 bp, Artificial Sequence
  Synthetic oligonucleotide
gccccactggagcgcatatagcgctaaacg

SEQ ID NO: 382467 - DNA, 30 bp, Artificial Sequence
  Synthetic oligonucleotide
tattgacgcagggagactctcatttaaacg

SEQ ID NO: 382468 - DNA, 30 bp, Artificial Sequence
  Synthetic oligonucleotide
caatccaaacttgcctgtacgcgaacaacg

SEQ ID NO: 382469 - DNA, 30 bp, Artificial Sequence
  Synthetic oligonucleotide
tgcccgatctcgctgggctattgcacaacg

SEQ ID NO: 382470 - DNA, 29 bp, Artificial Sequence
  Synthetic oligonucleotide
aagagttggatcggttggcgcagacaacg

SEQ ID NO: 382471 - DNA, 30 bp, Artificial Sequence
  Synthetic oligonucleotide
tagcggatttacttttaaagctcgacaacg

SEQ ID NO: 382472 - DNA, 30 bp, Artificial Sequence
  Synthetic oligonucleotide
ttggggagcgtcactgagggatggacaacg

SEQ ID NO: 382473 - DNA, 30 bp, Artificial Sequence
  Synthetic oligonucleotide
ggtcggctcagggaaaaacctagaccaacg

SEQ ID NO: 382474 - DNA, 30 bp, Artificial Sequence
  Synthetic oligonucleotide
taaagtactcgtacagatactctgccaacg

SEQ ID NO: 382475 - DNA, 30 bp, Artificial Sequence
  Synthetic oligonucleotide
tgggggtgtacgcaggagggatatccaacg

SEQ ID NO: 382476 - DNA, 30 bp, Artificial Sequence
  Synthetic oligonucleotide
gtgcgccactcgcgagctcttagtccaacg

SEQ ID NO: 382477 - DNA, 30 bp, Artificial Sequence
  Synthetic oligonucleotide
ttactgtcattcacgattagttaagcaacg

SEQ ID NO: 382478 - DNA, 30 bp, Artificial Sequence
  Synthetic oligonucleotide
ctaccttccatagggagtggcggcgcaacg

SEQ ID NO: 382479 - DNA, 30 bp, Artificial Sequence
  Synthetic oligonucleotide
gtagtcaccaatagtagccgattcgcaacg

SEQ ID NO: 382480 - DNA, 30 bp, Artificial Sequence
  Synthetic oligonucleotide
ataattatggtattgcatagagaggcaacg

SEQ ID NO: 382481 - DNA, 30 bp, Artificial Sequence
  Synthetic oligonucleotide
gataagccgataagttgcggtgaggcaacg

SEQ ID NO: 382482 - DNA, 30 bp, Artificial Sequence
  Synthetic oligonucleotide
gtgccgtccctggtagcaagcagggcaacg

SEQ ID NO: 382483 - DNA, 30 bp, Artificial Sequence
  Synthetic oligonucleotide
cgctgggcccactagcagatcagggcaacg

SEQ ID NO: 382484 - DNA, 30 bp, Artificial Sequence
  Synthetic oligonucleotide
ttttgcctttggctacattaagcatcaacg

SEQ ID NO: 382485 - DNA, 30 bp, Artificial Sequence
  Synthetic oligonucleotide
gtagattgtcgagttatatccccgtcaacg

SEQ ID NO: 382486 - DNA, 30 bp, Artificial Sequence
  Synthetic oligonucleotide
cattcgggggttttgtataggaggtcaacg

SEQ ID NO: 382487 - DNA, 30 bp, Artificial Sequence
  Synthetic oligonucleotide
gggcacccgtgccctcttagtaggtcaacg

SEQ ID NO: 382488 - DNA, 30 bp, Artificial Sequence
  Synthetic oligonucleotide
tagtatccccatcattagaaagtttcaacg

SEQ ID NO: 382489 - DNA, 30 bp, Artificial Sequence
  Synthetic oligonucleotide
ccatctacacttgtctaaaccttttcaacg

SEQ ID NO: 382490 - DNA, 30 bp, Artificial Sequence
  Synthetic oligonucleotide
tcgtaggccagagataacgtttcaagaacg

SEQ ID NO: 382491 - DNA, 30 bp, Artificial Sequence
  Synthetic oligonucleotide
ttgctatctatcatcaggatattaagaacg

SEQ ID NO: 382492 - DNA, 25 bp, Artificial Sequence
  Synthetic oligonucleotide
agagttgcataaactatgcagaacg

SEQ ID NO: 382493 - DNA, 30 bp, Artificial Sequence
  Synthetic oligonucleotide
ttatataaatcaactaaaaaggatagaacg

SEQ ID NO: 382494 - DNA, 30 bp, Artificial Sequence
  Synthetic oligonucleotide
gcattaacgccttccagtttcggtcgaacg

SEQ ID NO: 382495 - DNA, 30 bp, Artificial Sequence
  Synthetic oligonucleotide
aagttaaagtacattgtgcagggtcgaacg

SEQ ID NO: 382496 - DNA, 30 bp, Artificial Sequence
  Synthetic oligonucleotide
aaaaagtcaagagactggttgtaaggaacg

SEQ ID NO: 382497 - DNA, 30 bp, Artificial Sequence
  Synthetic oligonucleotide
gggcgccgcagcgagcaacaagcaggaacg

SEQ ID NO: 382498 - DNA, 30 bp, Artificial Sequence
  Synthetic oligonucleotide
gaggggactctaaatgggttggcaggaacg

SEQ ID NO: 382499 - DNA, 30 bp, Artificial Sequence
  Synthetic oligonucleotide
gcccaggttgtgagtaccgggtcaggaacg

SEQ ID NO: 382500 - DNA, 30 bp, Artificial Sequence
  Synthetic oligonucleotide
tatagaccaaatgcacaatatataggaacg

SEQ ID NO: 382501 - DNA, 30 bp, Artificial Sequence
  Synthetic oligonucleotide
gcacgattcgcaacactgaggctaggaacg

SEQ ID NO: 382502 - DNA, 30 bp, Artificial Sequence
  Synthetic oligonucleotide
cgctgtcgccctgaatgcgccatcggaacg

SEQ ID NO: 382503 - DNA, 30 bp, Artificial Sequence
  Synthetic oligonucleotide
tgcactgcgtcttacacgttccggggaacg

SEQ ID NO: 382504 - DNA, 30 bp, Artificial Sequence
  Synthetic oligonucleotide
ttttagagctgggataaccctcatggaacg

SEQ ID NO: 382505 - DNA, 30 bp, Artificial Sequence
  Synthetic oligonucleotide
tgttccgcaaccagacgtctttatggaacg

SEQ ID NO: 382506 - DNA, 30 bp, Artificial Sequence
  Synthetic oligonucleotide
gtcgctggatcccatgggatctctggaacg

SEQ ID NO: 382507 - DNA, 30 bp, Artificial Sequence
  Synthetic oligonucleotide
agttctccttatagtgcccagtgatgaacg

SEQ ID NO: 382508 - DNA, 30 bp, Artificial Sequence
  Synthetic oligonucleotide
gatggaacacagttatcttgtttatgaacg

SEQ ID NO: 382509 - DNA, 30 bp, Artificial Sequence
  Synthetic oligonucleotide
agccgaatgaatcagatttgttcctgaacg

SEQ ID NO: 382510 - DNA, 30 bp, Artificial Sequence
  Synthetic oligonucleotide
gatgtcccaccaagtcatcacatctgaacg

SEQ ID NO: 382511 - DNA, 30 bp, Artificial Sequence
  Synthetic oligonucleotide
tgtgccggagacatactttatgtctgaacg

SEQ ID NO: 382512 - DNA, 30 bp, Artificial Sequence
  Synthetic oligonucleotide
ggtttattgacagaacaactgacgtgaacg

SEQ ID NO: 382513 - DNA, 30 bp, Artificial Sequence
  Synthetic oligonucleotide
ataacttgttgcaaaatctgtgtgtgaacg

SEQ ID NO: 382514 - DNA, 30 bp, Artificial Sequence
  Synthetic oligonucleotide
gttgcaaaagctaagctacatttttgaacg

SEQ ID NO: 382515 - DNA, 30 bp, Artificial Sequence
  Synthetic oligonucleotide
aacattattttaggctcagacgcaataacg

SEQ ID NO: 382516 - DNA, 30 bp, Artificial Sequence
  Synthetic oligonucleotide
tgattgtgatcccgtctgacgataataacg

SEQ ID NO: 382517 - DNA, 30 bp, Artificial Sequence
  Synthetic oligonucleotide
ggagatagtatcttttgtgacttaataacg

SEQ ID NO: 382518 - DNA, 30 bp, Artificial Sequence
  Synthetic oligonucleotide
aatttcgcttgaagccatgggggcataacg

SEQ ID NO: 382519 - DNA, 30 bp, Artificial Sequence
  Synthetic oligonucleotide
ggattatcctagtaatcccatcggataacg

SEQ ID NO: 382520 - DNA, 30 bp, Artificial Sequence
  Synthetic oligonucleotide
gggtatatcctgaaaaatatccgtataacg

SEQ ID NO: 382521 - DNA, 30 bp, Artificial Sequence
  Synthetic oligonucleotide
caaggcgtgccctagcacggctttataacg

SEQ ID NO: 382522 - DNA, 30 bp, Artificial Sequence
  Synthetic oligonucleotide
gggacgggcatgacccccaaggggctaacg

SEQ ID NO: 382523 - DNA, 30 bp, Artificial Sequence
  Synthetic oligonucleotide
gatttataggtatcgttcaaagatctaacg

SEQ ID NO: 382524 - DNA, 30 bp, Artificial Sequence
  Synthetic oligonucleotide
ggcccccttggcaagtaaccacttctaacg

SEQ ID NO: 382525 - DNA, 30 bp, Artificial Sequence
  Synthetic oligonucleotide
ttatgcctacgatagacgtagccagtaacg

SEQ ID NO: 382526 - DNA, 30 bp, Artificial Sequence
  Synthetic oligonucleotide
gggttacccctatgatcacacgcagtaacg

SEQ ID NO: 382527 - DNA, 30 bp, Artificial Sequence
  Synthetic oligonucleotide
cattccgcagctcatgcgaggtcagtaacg

SEQ ID NO: 382528 - DNA, 30 bp, Artificial Sequence
  Synthetic oligonucleotide
aaatttgcgaccgaaactggatgcgtaacg

SEQ ID NO: 382529 - DNA, 30 bp, Artificial Sequence
  Synthetic oligonucleotide
agtcgcaactatgcgtggttaacggtaacg

SEQ ID NO: 382530 - DNA, 30 bp, Artificial Sequence
  Synthetic oligonucleotide
gttggtattagctatatacaccgggtaacg

SEQ ID NO: 382531 - DNA, 30 bp, Artificial Sequence
  Synthetic oligonucleotide
actcgttaaactatattaaccaggttaacg

SEQ ID NO: 382532 - DNA, 30 bp, Artificial Sequence
  Synthetic oligonucleotide
tggagattagaaaatacgggtcttttaacg

SEQ ID NO: 382533 - DNA, 30 bp, Artificial Sequence
  Synthetic oligonucleotide
gagtcttggcgagtactatcataaaacacg

SEQ ID NO: 382534 - DNA, 30 bp, Artificial Sequence
  Synthetic oligonucleotide
gccctacctatcttagggcatctaaacacg

SEQ ID NO: 382535 - DNA, 30 bp, Artificial Sequence
  Synthetic oligonucleotide
cggcttaacggtcagggaacttccaacacg

SEQ ID NO: 382536 - DNA, 30 bp, Artificial Sequence
  Synthetic oligonucleotide
aatctaaggaaacacctatacgtgaacacg

SEQ ID NO: 382537 - DNA, 30 bp, Artificial Sequence
  Synthetic oligonucleotide
atataaagactcttttaagagtataacacg

SEQ ID NO: 382538 - DNA, 30 bp, Artificial Sequence
  Synthetic oligonucleotide
ggggggtcaatacaacgattcagtaacacg

SEQ ID NO: 382539 - DNA, 30 bp, Artificial Sequence
  Synthetic oligonucleotide
cgtagggctctgacgctaatgcaccacacg

SEQ ID NO: 382540 - DNA, 30 bp, Artificial Sequence
  Synthetic oligonucleotide
gactgaacgtgggtgcggacgtcccacacg

SEQ ID NO: 382541 - DNA, 30 bp, Artificial Sequence
  Synthetic oligonucleotide
agagctgctaggaagggtcgatagcacacg

SEQ ID NO: 382542 - DNA, 30 bp, Artificial Sequence
  Synthetic oligonucleotide
aaagtgcatcgttttttgtaaccgcacacg

SEQ ID NO: 382543 - DNA, 30 bp, Artificial Sequence
  Synthetic oligonucleotide
gcatgtgtcgtactgataaagcatcacacg

SEQ ID NO: 382544 - DNA, 30 bp, Artificial Sequence
  Synthetic oligonucleotide
ttaccgacagttcggagtttaattcacacg

SEQ ID NO: 382545 - DNA, 30 bp, Artificial Sequence
  Synthetic oligonucleotide
aataattcgggaattactaaatccgacacg

SEQ ID NO: 382546 - DNA, 30 bp, Artificial Sequence
  Synthetic oligonucleotide
acttctggcacaaggttagcgtgggacacg

SEQ ID NO: 382547 - DNA, 30 bp, Artificial Sequence
  Synthetic oligonucleotide
agcacttgaagccgtctagaactggacacg

SEQ ID NO: 382548 - DNA, 30 bp, Artificial Sequence
  Synthetic oligonucleotide
tggggtacagcgctaactgttgtggacacg

SEQ ID NO: 382549 - DNA, 30 bp, Artificial Sequence
  Synthetic oligonucleotide
agccggccacagattaattcctcctacacg

SEQ ID NO: 382550 - DNA, 30 bp, Artificial Sequence
  Synthetic oligonucleotide
cccgcagggatccacgcctgagcgtacacg

SEQ ID NO: 382551 - DNA, 30 bp, Artificial Sequence
  Synthetic oligonucleotide
atcgacaaatacctagcacaggtgtacacg

SEQ ID NO: 382552 - DNA, 30 bp, Artificial Sequence
  Synthetic oligonucleotide
gcgtggttcctatcacccgtaaattacacg

SEQ ID NO: 382553 - DNA, 30 bp, Artificial Sequence
  Synthetic oligonucleotide
ttgggtgaccttagcaggttttgttacacg

SEQ ID NO: 382554 - DNA, 30 bp, Artificial Sequence
  Synthetic oligonucleotide
ggtcattatatacgtggtctcgacaccacg

SEQ ID NO: 382555 - DNA, 30 bp, Artificial Sequence
  Synthetic oligonucleotide
ttagattgaacgtcttgtgggctcaccacg

SEQ ID NO: 382556 - DNA, 30 bp, Artificial Sequence
  Synthetic oligonucleotide
tgggttaccggtgaagattttctgaccacg

SEQ ID NO: 382557 - DNA, 30 bp, Artificial Sequence
  Synthetic oligonucleotide
ttgaggactggtatcgacgcggataccacg

SEQ ID NO: 382558 - DNA, 30 bp, Artificial Sequence
  Synthetic oligonucleotide
gcatgtgtgtcgaagtaattaattaccacg

SEQ ID NO: 382559 - DNA, 30 bp, Artificial Sequence
  Synthetic oligonucleotide
gattccaagaaaccccggctttttaccacg

SEQ ID NO: 382560 - DNA, 30 bp, Artificial Sequence
  Synthetic oligonucleotide
cccactcaaatcttagtaacttaacccacg

SEQ ID NO: 382561 - DNA, 30 bp, Artificial Sequence
  Synthetic oligonucleotide
ataggttgttatcaggtgctcattcccacg

SEQ ID NO: 382562 - DNA, 30 bp, Artificial Sequence
  Synthetic oligonucleotide
gctataccttttagcaaaattctagccacg

SEQ ID NO: 382563 - DNA, 30 bp, Artificial Sequence
  Synthetic oligonucleotide
cgattcctcacgcactcaggcgtagccacg

SEQ ID NO: 382564 - DNA, 30 bp, Artificial Sequence
  Synthetic oligonucleotide
acaacttgatgatgctaaataagcgccacg

SEQ ID NO: 382565 - DNA, 30 bp, Artificial Sequence
  Synthetic oligonucleotide
taaagtgttccgagccgtatcatgtccacg

SEQ ID NO: 382566 - DNA, 30 bp, Artificial Sequence
  Synthetic oligonucleotide
ggaaagcaattatcatgccgttcttccacg

SEQ ID NO: 382567 - DNA, 30 bp, Artificial Sequence
  Synthetic oligonucleotide
atcgttcacggttttagtgtgtaaagcacg

SEQ ID NO: 382568 - DNA, 30 bp, Artificial Sequence
  Synthetic oligonucleotide
atcacgggcactttaaagacgataagcacg

SEQ ID NO: 382569 - DNA, 30 bp, Artificial Sequence
  Synthetic oligonucleotide
attggaacttcgtttcaaaccaacagcacg

SEQ ID NO: 382570 - DNA, 30 bp, Artificial Sequence
  Synthetic oligonucleotide
tttcacccagtctacgctctgtgcagcacg

SEQ ID NO: 382571 - DNA, 30 bp, Artificial Sequence
  Synthetic oligonucleotide
actaatcagctacctcaagtcttgagcacg

SEQ ID NO: 382572 - DNA, 30 bp, Artificial Sequence
  Synthetic oligonucleotide
accaaatatatgtgattcgcgtatagcacg

SEQ ID NO: 382573 - DNA, 30 bp, Artificial Sequence
  Synthetic oligonucleotide
tatttagaactattcttctggactagcacg

SEQ ID NO: 382574 - DNA, 30 bp, Artificial Sequence
  Synthetic oligonucleotide
ggctacgggcgagggatttggcctagcacg

SEQ ID NO: 382575 - DNA, 30 bp, Artificial Sequence
  Synthetic oligonucleotide
acttcgttcacgggagtccggttccgcacg

SEQ ID NO: 382576 - DNA, 30 bp, Artificial Sequence
  Synthetic oligonucleotide
atggtgccactatcctcagaagagcgcacg

SEQ ID NO: 382577 - DNA, 30 bp, Artificial Sequence
  Synthetic oligonucleotide
gatcgacgcgacagtcgattttagcgcacg

SEQ ID NO: 382578 - DNA, 30 bp, Artificial Sequence
  Synthetic oligonucleotide
taactcgccggctcgcccgttacaggcacg

SEQ ID NO: 382579 - DNA, 30 bp, Artificial Sequence
  Synthetic oligonucleotide
aggatctttgcgggtattagttacggcacg

SEQ ID NO: 382580 - DNA, 30 bp, Artificial Sequence
  Synthetic oligonucleotide
gagatcatactggtttttcaattcggcacg

SEQ ID NO: 382581 - DNA, 30 bp, Artificial Sequence
  Synthetic oligonucleotide
cacaccttccttacgcgtcgatggggcacg

SEQ ID NO: 382582 - DNA, 30 bp, Artificial Sequence
  Synthetic oligonucleotide
atctcgcaacacgggttacaagatggcacg

SEQ ID NO: 382583 - DNA, 30 bp, Artificial Sequence
  Synthetic oligonucleotide
ggaccctgcgcgggtttacaagatggcacg

SEQ ID NO: 382584 - DNA, 30 bp, Artificial Sequence
  Synthetic oligonucleotide
accttggaatacgtccatcggcctggcacg

SEQ ID NO: 382585 - DNA, 30 bp, Artificial Sequence
  Synthetic oligonucleotide
gcagctgagaaaggtccggccagtggcacg

SEQ ID NO: 382586 - DNA, 30 bp, Artificial Sequence
  Synthetic oligonucleotide
gtgaaaggcaagcccctttcctgatgcacg

SEQ ID NO: 382587 - DNA, 30 bp, Artificial Sequence
  Synthetic oligonucleotide
gcaaggtagacgcttaatatgttatgcacg

SEQ ID NO: 382588 - DNA, 30 bp, Artificial Sequence
  Synthetic oligonucleotide
cagcggacgtctctgcaatcaaactgcacg

SEQ ID NO: 382589 - DNA, 30 bp, Artificial Sequence
  Synthetic oligonucleotide
gtcgcgtgcctcctacaattgtgctgcacg

SEQ ID NO: 382590 - DNA, 30 bp, Artificial Sequence
  Synthetic oligonucleotide
gttacattcaagatgtcgtactcaatcacg

SEQ ID NO: 382591 - DNA, 30 bp, Artificial Sequence
  Synthetic oligonucleotide
tttaaacgcacagagcggtgacgaatcacg

SEQ ID NO: 382592 - DNA, 31 bp, Artificial Sequence
  Synthetic oligonucleotide
agtatcagcagtggaccgttacgtaatcacg

SEQ ID NO: 382593 - DNA, 30 bp, Artificial Sequence
  Synthetic oligonucleotide
ctgaggtcggtttttttgcatcccatcacg

SEQ ID NO: 382594 - DNA, 30 bp, Artificial Sequence
  Synthetic oligonucleotide
gctagctacgctgattcggcagtcatcacg

SEQ ID NO: 382595 - DNA, 30 bp, Artificial Sequence
  Synthetic oligonucleotide
cggatatgcgggggggactcattcatcacg

SEQ ID NO: 382596 - DNA, 30 bp, Artificial Sequence
  Synthetic oligonucleotide
gtccccaagtagactcgaatctagatcacg

SEQ ID NO: 382597 - DNA, 30 bp, Artificial Sequence
  Synthetic oligonucleotide
gccattcatcagaataacattactatcacg

SEQ ID NO: 382598 - DNA, 30 bp, Artificial Sequence
  Synthetic oligonucleotide
agtacgggtcttggatcaggggctatcacg

SEQ ID NO: 382599 - DNA, 30 bp, Artificial Sequence
  Synthetic oligonucleotide
cgggtgggtttttttggcaaccgtatcacg

SEQ ID NO: 382600 - DNA, 30 bp, Artificial Sequence
  Synthetic oligonucleotide
ttaacagggggagtacgattgttactcacg

SEQ ID NO: 382601 - DNA, 30 bp, Artificial Sequence
  Synthetic oligonucleotide
atcttattaggtgtcgctgccaccctcacg

SEQ ID NO: 382602 - DNA, 30 bp, Artificial Sequence
  Synthetic oligonucleotide
gcacgcaacgcgtactatgtgggcctcacg

SEQ ID NO: 382603 - DNA, 30 bp, Artificial Sequence
  Synthetic oligonucleotide
agtcataggctgtacatttgttcagtcacg

SEQ ID NO: 382604 - DNA, 32 bp, Artificial Sequence
  Synthetic oligonucleotide
tgttttccttcttacctttatgctgcgtcacg

SEQ ID NO: 382605 - DNA, 30 bp, Artificial Sequence
  Synthetic oligonucleotide
gggcctgcgatacggccaggttctgtcacg

SEQ ID NO: 382606 - DNA, 31 bp, Artificial Sequence
  Synthetic oligonucleotide
acgcagaagcgctgttggtaatattgtcacg

SEQ ID NO: 382607 - DNA, 30 bp, Artificial Sequence
  Synthetic oligonucleotide
aagaaccgggctaactataatgtcttcacg

SEQ ID NO: 382608 - DNA, 30 bp, Artificial Sequence
  Synthetic oligonucleotide
tccaacggtttttagggttactctttcacg

SEQ ID NO: 382609 - DNA, 30 bp, Artificial Sequence
  Synthetic oligonucleotide
gaaacgtgggactcattccttattttcacg

SEQ ID NO: 382610 - DNA, 30 bp, Artificial Sequence
  Synthetic oligonucleotide
attcttcgtctactgacgggctacaagacg

SEQ ID NO: 382611 - DNA, 30 bp, Artificial Sequence
  Synthetic oligonucleotide
acgatgcacccgttagggagcttgaagacg

SEQ ID NO: 382612 - DNA, 30 bp, Artificial Sequence
  Synthetic oligonucleotide
ataagtgttaccgtccatcttcgtaagacg

SEQ ID NO: 382613 - DNA, 30 bp, Artificial Sequence
  Synthetic oligonucleotide
acgccagccgtgacagtaagctaacagacg

SEQ ID NO: 382614 - DNA, 30 bp, Artificial Sequence
  Synthetic oligonucleotide
gctgtctttcgtggacgcgctttacagacg

SEQ ID NO: 382615 - DNA, 30 bp, Artificial Sequence
  Synthetic oligonucleotide
caatcggcacatgctcttgggggccagacg

SEQ ID NO: 382616 - DNA, 30 bp, Artificial Sequence
  Synthetic oligonucleotide
aaggtgggtttattgtactaacatcagacg

SEQ ID NO: 382617 - DNA, 30 bp, Artificial Sequence
  Synthetic oligonucleotide
gaaggcccggcatgtgacctggatcagacg

SEQ ID NO: 382618 - DNA, 30 bp, Artificial Sequence
  Synthetic oligonucleotide
gtaactgcaacatttacttgttatcagacg

SEQ ID NO: 382619 - DNA, 30 bp, Artificial Sequence
  Synthetic oligonucleotide
aaatgacatccaacaatcgatggcgagacg

SEQ ID NO: 382620 - DNA, 30 bp, Artificial Sequence
  Synthetic oligonucleotide
ggactacagttatttatcccactggagacg

SEQ ID NO: 382621 - DNA, 30 bp, Artificial Sequence
  Synthetic oligonucleotide
cggctcgatactcagatgaggttatagacg

SEQ ID NO: 382622 - DNA, 30 bp, Artificial Sequence
  Synthetic oligonucleotide
ctaacaagctcaggtggctgagactagacg

SEQ ID NO: 382623 - DNA, 30 bp, Artificial Sequence
  Synthetic oligonucleotide
ccaacattgtcaatctgaaagtgttagacg

SEQ ID NO: 382624 - DNA, 30 bp, Artificial Sequence
  Synthetic oligonucleotide
tcgctcacggcttacggtagttaaacgacg

SEQ ID NO: 382625 - DNA, 30 bp, Artificial Sequence
  Synthetic oligonucleotide
ggtagggttgtagaattattcacaacgacg

SEQ ID NO: 382626 - DNA, 30 bp, Artificial Sequence
  Synthetic oligonucleotide
tctcaagtaagttacaagtccgcaacgacg

SEQ ID NO: 382627 - DNA, 30 bp, Artificial Sequence
  Synthetic oligonucleotide
gacgacttcgattgcaggcagttaacgacg

SEQ ID NO: 382628 - DNA, 30 bp, Artificial Sequence
  Synthetic oligonucleotide
gtttcaagctttggcacgtcaatcacgacg

SEQ ID NO: 382629 - DNA, 30 bp, Artificial Sequence
  Synthetic oligonucleotide
gagctctattgcgtcgtcacatcgacgacg

SEQ ID NO: 382630 - DNA, 30 bp, Artificial Sequence
  Synthetic oligonucleotide
atagaatggtacgtggctttaactacgacg

SEQ ID NO: 382631 - DNA, 30 bp, Artificial Sequence
  Synthetic oligonucleotide
ccggccaacttaatgccgattactacgacg

SEQ ID NO: 382632 - DNA, 30 bp, Artificial Sequence
  Synthetic oligonucleotide
ggtcactgtagtctcgaatggtacccgacg

SEQ ID NO: 382633 - DNA, 30 bp, Artificial Sequence
  Synthetic oligonucleotide
tacagggcccttagtaagatgaccccgacg

SEQ ID NO: 382634 - DNA, 30 bp, Artificial Sequence
  Synthetic oligonucleotide
accagaaaaactatagctccttgagcgacg

SEQ ID NO: 382635 - DNA, 30 bp, Artificial Sequence
  Synthetic oligonucleotide
agcagatcataaagttgggtggtagcgacg

SEQ ID NO: 382636 - DNA, 30 bp, Artificial Sequence
  Synthetic oligonucleotide
ggaagtttatatattacgtccttagcgacg

SEQ ID NO: 382637 - DNA, 30 bp, Artificial Sequence
  Synthetic oligonucleotide
cgggtacttctggatttcttaggatcgacg

SEQ ID NO: 382638 - DNA, 30 bp, Artificial Sequence
  Synthetic oligonucleotide
ggcacttgtcagcctgttgactgatcgacg

SEQ ID NO: 382639 - DNA, 30 bp, Artificial Sequence
  Synthetic oligonucleotide
tcgtcctcacggcaaagtcatgactcgacg

SEQ ID NO: 382640 - DNA, 30 bp, Artificial Sequence
  Synthetic oligonucleotide
gggatggattgcttggagagcgtttcgacg

SEQ ID NO: 382641 - DNA, 30 bp, Artificial Sequence
  Synthetic oligonucleotide
gatctttcaaactatctgcgaacaaggacg

SEQ ID NO: 382642 - DNA, 30 bp, Artificial Sequence
  Synthetic oligonucleotide
ttacggttctcttctacgccaggaaggacg

SEQ ID NO: 382643 - DNA, 30 bp, Artificial Sequence
  Synthetic oligonucleotide
gccaccgtcagtaaaacagctaggaggacg

SEQ ID NO: 382644 - DNA, 30 bp, Artificial Sequence
  Synthetic oligonucleotide
ctagggcttccccgtcattgcttgaggacg

SEQ ID NO: 382645 - DNA, 30 bp, Artificial Sequence
  Synthetic oligonucleotide
caagtgctctgccgtaggcctttgaggacg

SEQ ID NO: 382646 - DNA, 30 bp, Artificial Sequence
  Synthetic oligonucleotide
ctaaggtgggatcgggacctctataggacg

SEQ ID NO: 382647 - DNA, 30 bp, Artificial Sequence
  Synthetic oligonucleotide
gacgccaatcagaagtcgtgtactaggacg

SEQ ID NO: 382648 - DNA, 30 bp, Artificial Sequence
  Synthetic oligonucleotide
acacctgggtttcatcaaatcgaacggacg

SEQ ID NO: 382649 - DNA, 30 bp, Artificial Sequence
  Synthetic oligonucleotide
ggtcatattttacggcgccaatcacggacg

SEQ ID NO: 382650 - DNA, 30 bp, Artificial Sequence
  Synthetic oligonucleotide
gtagatacaagcccgtacttgctacggacg

SEQ ID NO: 382651 - DNA, 30 bp, Artificial Sequence
  Synthetic oligonucleotide
gccacaaagctatcgtctgttggccggacg

SEQ ID NO: 382652 - DNA, 30 bp, Artificial Sequence
  Synthetic oligonucleotide
atcagaatattctggcattattagcggacg

SEQ ID NO: 382653 - DNA, 30 bp, Artificial Sequence
  Synthetic oligonucleotide
gttatacgtgcggctcactgccgcgggacg

SEQ ID NO: 382654 - DNA, 30 bp, Artificial Sequence
  Synthetic oligonucleotide
aggccgggacttaacggtggtggcgggacg

SEQ ID NO: 382655 - DNA, 30 bp, Artificial Sequence
  Synthetic oligonucleotide
aatgtatatgtggggtgcagtgtcgggacg

SEQ ID NO: 382656 - DNA, 31 bp, Artificial Sequence
  Synthetic oligonucleotide
ttgttgtctcaggctaaatcatccggggacg

SEQ ID NO: 382657 - DNA, 30 bp, Artificial Sequence
  Synthetic oligonucleotide
atctcaatcggatataccctcctggggacg

SEQ ID NO: 382658 - DNA, 30 bp, Artificial Sequence
  Synthetic oligonucleotide
ggtacgaccacgacgaaccggagatggacg

SEQ ID NO: 382659 - DNA, 30 bp, Artificial Sequence
  Synthetic oligonucleotide
acaaggaacaaactgcaattttgatggacg

SEQ ID NO: 382660 - DNA, 30 bp, Artificial Sequence
  Synthetic oligonucleotide
tgaatcgtgtagagggtgttagtatggacg

SEQ ID NO: 382661 - DNA, 30 bp, Artificial Sequence
  Synthetic oligonucleotide
cttgcccatctatgaagttcaaactggacg

SEQ ID NO: 382662 - DNA, 30 bp, Artificial Sequence
  Synthetic oligonucleotide
tctgctccatcagggttgaggcactggacg

SEQ ID NO: 382663 - DNA, 30 bp, Artificial Sequence
  Synthetic oligonucleotide
aaatgagcatataagaccgactgctggacg

SEQ ID NO: 382664 - DNA, 30 bp, Artificial Sequence
  Synthetic oligonucleotide
ttacgcgataatcacgccaaatagtggacg

SEQ ID NO: 382665 - DNA, 30 bp, Artificial Sequence
  Synthetic oligonucleotide
tgcaaaatgaagggagcgaagctgtggacg

SEQ ID NO: 382666 - DNA, 30 bp, Artificial Sequence
  Synthetic oligonucleotide
cattagtgttacctttttatagcttggacg

SEQ ID NO: 382667 - DNA, 30 bp, Artificial Sequence
  Synthetic oligonucleotide
tgatcaggtacgaaaagtgaatcttggacg

SEQ ID NO: 382668 - DNA, 30 bp, Artificial Sequence
  Synthetic oligonucleotide
tatggcaatgcgaataccgtgtcaatgacg

SEQ ID NO: 382669 - DNA, 30 bp, Artificial Sequence
  Synthetic oligonucleotide
gcagctcctgactgaactaaggtaatgacg

SEQ ID NO: 382670 - DNA, 30 bp, Artificial Sequence
  Synthetic oligonucleotide
gtgctatacctcgctcagcactccatgacg

SEQ ID NO: 382671 - DNA, 30 bp, Artificial Sequence
  Synthetic oligonucleotide
cagccaggctattattgcagactcatgacg

SEQ ID NO: 382672 - DNA, 30 bp, Artificial Sequence
  Synthetic oligonucleotide
tgaataagtctaaatcagaataggatgacg

SEQ ID NO: 382673 - DNA, 30 bp, Artificial Sequence
  Synthetic oligonucleotide
tgtgttcggaaaaatttcggctgtatgacg

SEQ ID NO: 382674 - DNA, 30 bp, Artificial Sequence
  Synthetic oligonucleotide
ccggataaatgtaaagagctccggctgacg

SEQ ID NO: 382675 - DNA, 30 bp, Artificial Sequence
  Synthetic oligonucleotide
tagaccagctaatgatttccgattctgacg

SEQ ID NO: 382676 - DNA, 30 bp, Artificial Sequence
  Synthetic oligonucleotide
actgtatgaagaaccattcttgttctgacg

SEQ ID NO: 382677 - DNA, 30 bp, Artificial Sequence
  Synthetic oligonucleotide
ttagatatctgagcgacctcctaagtgacg

SEQ ID NO: 382678 - DNA, 30 bp, Artificial Sequence
  Synthetic oligonucleotide
gcccttgacttcggtatacgagtagtgacg

SEQ ID NO: 382679 - DNA, 30 bp, Artificial Sequence
  Synthetic oligonucleotide
aacctgaaaccttattaacgaaacgtgacg

SEQ ID NO: 382680 - DNA, 30 bp, Artificial Sequence
  Synthetic oligonucleotide
tgaaatgggttttcctgggtaaacgtgacg

SEQ ID NO: 382681 - DNA, 30 bp, Artificial Sequence
  Synthetic oligonucleotide
cgcatccgttggcggttcttgagcgtgacg

SEQ ID NO: 382682 - DNA, 30 bp, Artificial Sequence
  Synthetic oligonucleotide
agaccttgaagtgggtatgagttcgtgacg

SEQ ID NO: 382683 - DNA, 30 bp, Artificial Sequence
  Synthetic oligonucleotide
aaacacgttagtttagtctagcgggtgacg

SEQ ID NO: 382684 - DNA, 30 bp, Artificial Sequence
  Synthetic oligonucleotide
tctttaggcacgcgtctacaatgtgtgacg

SEQ ID NO: 382685 - DNA, 30 bp, Artificial Sequence
  Synthetic oligonucleotide
tttcataaggaaggggctggctttgtgacg

SEQ ID NO: 382686 - DNA, 30 bp, Artificial Sequence
  Synthetic oligonucleotide
ctagaactgtgcgtcggtcttcaattgacg

SEQ ID NO: 382687 - DNA, 30 bp, Artificial Sequence
  Synthetic oligonucleotide
cagttggtagcattatgataagacttgacg

SEQ ID NO: 382688 - DNA, 30 bp, Artificial Sequence
  Synthetic oligonucleotide
ggacgggtacaatcgccgtgggacttgacg

SEQ ID NO: 382689 - DNA, 30 bp, Artificial Sequence
  Synthetic oligonucleotide
gaacggcatagttcttctgttttcttgacg

SEQ ID NO: 382690 - DNA, 30 bp, Artificial Sequence
  Synthetic oligonucleotide
tgaagccgatttggctattcaaatttgacg

SEQ ID NO: 382691 - DNA, 30 bp, Artificial Sequence
  Synthetic oligonucleotide
ttaatcacaggaggtgcccctaatttgacg

SEQ ID NO: 382692 - DNA, 30 bp, Artificial Sequence
  Synthetic oligonucleotide
cctgtcatgtcggtgatcatttctttgacg

SEQ ID NO: 382693 - DNA, 30 bp, Artificial Sequence
  Synthetic oligonucleotide
atcggtacttcatgtaaccttcaaaatacg

SEQ ID NO: 382694 - DNA, 30 bp, Artificial Sequence
  Synthetic oligonucleotide
ataatgactaggctaagttgatcaaatacg

SEQ ID NO: 382695 - DNA, 30 bp, Artificial Sequence
  Synthetic oligonucleotide
atgtgggatttggtattgttagtaaatacg

SEQ ID NO: 382696 - DNA, 30 bp, Artificial Sequence
  Synthetic oligonucleotide
ggataggttttgtccaagtatagcaatacg

SEQ ID NO: 382697 - DNA, 30 bp, Artificial Sequence
  Synthetic oligonucleotide
atacgttcatacccatatttccgcaatacg

SEQ ID NO: 382698 - DNA, 30 bp, Artificial Sequence
  Synthetic oligonucleotide
ttggtcatacgttgtcgctagtgcaatacg

SEQ ID NO: 382699 - DNA, 30 bp, Artificial Sequence
  Synthetic oligonucleotide
tttacagtgcggccactcgaaatcaatacg

SEQ ID NO: 382700 - DNA, 30 bp, Artificial Sequence
  Synthetic oligonucleotide
cgaccgttgtggggctatcttcataatacg

SEQ ID NO: 382701 - DNA, 30 bp, Artificial Sequence
  Synthetic oligonucleotide
gggtatagtcggcatccgaaccgacatacg

SEQ ID NO: 382702 - DNA, 30 bp, Artificial Sequence
  Synthetic oligonucleotide
ttcagataggactgaggtggtcgccatacg

SEQ ID NO: 382703 - DNA, 30 bp, Artificial Sequence
  Synthetic oligonucleotide
ggctaattagtgtcttcacaaattcatacg

SEQ ID NO: 382704 - DNA, 30 bp, Artificial Sequence
  Synthetic oligonucleotide
gcacgatctggtttaagaataattcatacg

SEQ ID NO: 382705 - DNA, 30 bp, Artificial Sequence
  Synthetic oligonucleotide
gcgacatctgtatcggaacaaacagatacg

SEQ ID NO: 382706 - DNA, 30 bp, Artificial Sequence
  Synthetic oligonucleotide
cagggcagatttcaagaagctgtagatacg

SEQ ID NO: 382707 - DNA, 30 bp, Artificial Sequence
  Synthetic oligonucleotide
taaattgaagagtgatatcctgccgatacg

SEQ ID NO: 382708 - DNA, 30 bp, Artificial Sequence
  Synthetic oligonucleotide
ttcactacggatttactacatcaggatacg

SEQ ID NO: 382709 - DNA, 30 bp, Artificial Sequence
  Synthetic oligonucleotide
tattgtcattgtcggaatagaatggatacg

SEQ ID NO: 382710 - DNA, 30 bp, Artificial Sequence
  Synthetic oligonucleotide
acagatataagcgctcaccttggctatacg

SEQ ID NO: 382711 - DNA, 30 bp, Artificial Sequence
  Synthetic oligonucleotide
aggtcgaagttgcgtaaaacgtgctatacg

SEQ ID NO: 382712 - DNA, 30 bp, Artificial Sequence
  Synthetic oligonucleotide
tttatatagggacgtgcaagctcgtatacg

SEQ ID NO: 382713 - DNA, 30 bp, Artificial Sequence
  Synthetic oligonucleotide
atttggatccctcctaactcacggtatacg

SEQ ID NO: 382714 - DNA, 30 bp, Artificial Sequence
  Synthetic oligonucleotide
taacgatatttccgtagcgacaattatacg

SEQ ID NO: 382715 - DNA, 30 bp, Artificial Sequence
  Synthetic oligonucleotide
ggatagaatcctttagcctggtattatacg

SEQ ID NO: 382716 - DNA, 30 bp, Artificial Sequence
  Synthetic oligonucleotide
atctaagttctacttcgaaaccgacctacg

SEQ ID NO: 382717 - DNA, 30 bp, Artificial Sequence
  Synthetic oligonucleotide
gctcggtcgaaggtgcttcctttacctacg

SEQ ID NO: 382718 - DNA, 30 bp, Artificial Sequence
  Synthetic oligonucleotide
tgaagtatttcagagctaattaagcctacg

SEQ ID NO: 382719 - DNA, 30 bp, Artificial Sequence
  Synthetic oligonucleotide
ggaacaaaccgcacgcatagctcgcctacg

SEQ ID NO: 382720 - DNA, 30 bp, Artificial Sequence
  Synthetic oligonucleotide
tgccccgagacttgttctcgtaggcctacg

SEQ ID NO: 382721 - DNA, 30 bp, Artificial Sequence
  Synthetic oligonucleotide
gaaatctacgcacggacattcgtgcctacg

SEQ ID NO: 382722 - DNA, 30 bp, Artificial Sequence
  Synthetic oligonucleotide
ggaatattcgagatcgagcattatcctacg

SEQ ID NO: 382723 - DNA, 30 bp, Artificial Sequence
  Synthetic oligonucleotide
tacacctttgatgccaagttcactcctacg

SEQ ID NO: 382724 - DNA, 31 bp, Artificial Sequence
  Synthetic oligonucleotide
gtccaccttgcacgtgaaaaagactcctacg

SEQ ID NO: 382725 - DNA, 30 bp, Artificial Sequence
  Synthetic oligonucleotide
ggaattgtcatggtaaacctaagtcctacg

SEQ ID NO: 382726 - DNA, 30 bp, Artificial Sequence
  Synthetic oligonucleotide
gtacctttaggggtaccggagggtcctacg

SEQ ID NO: 382727 - DNA, 30 bp, Artificial Sequence
  Synthetic oligonucleotide
ttgtccgcttaacggcagctctgtcctacg

SEQ ID NO: 382728 - DNA, 30 bp, Artificial Sequence
  Synthetic oligonucleotide
tttccggggaggggaagtaagtaagctacg

SEQ ID NO: 382729 - DNA, 30 bp, Artificial Sequence
  Synthetic oligonucleotide
gggcgtggtcgtcccttgaggacagctacg

SEQ ID NO: 382730 - DNA, 30 bp, Artificial Sequence
  Synthetic oligonucleotide
ttccactgtgagcatcttggctcagctacg

SEQ ID NO: 382731 - DNA, 30 bp, Artificial Sequence
  Synthetic oligonucleotide
gcagtgactggcgagctcgggttggctacg

SEQ ID NO: 382732 - DNA, 30 bp, Artificial Sequence
  Synthetic oligonucleotide
tgtagctaggctcctaagagtttatctacg

SEQ ID NO: 382733 - DNA, 30 bp, Artificial Sequence
  Synthetic oligonucleotide
gcttacagaatcaaacgcgctgcctctacg

SEQ ID NO: 382734 - DNA, 30 bp, Artificial Sequence
  Synthetic oligonucleotide
tatcttcatggggacgtccattcctctacg

SEQ ID NO: 382735 - DNA, 30 bp, Artificial Sequence
  Synthetic oligonucleotide
gccgatgagcccctctttaagtgctctacg

SEQ ID NO: 382736 - DNA, 31 bp, Artificial Sequence
  Synthetic oligonucleotide
tacccgcctccggtgcttgcaaacgtctacg

SEQ ID NO: 382737 - DNA, 30 bp, Artificial Sequence
  Synthetic oligonucleotide
attagtagccaacaagtatttgtgtctacg

SEQ ID NO: 382738 - DNA, 30 bp, Artificial Sequence
  Synthetic oligonucleotide
aggttaattcctcatacttcgaattctacg

SEQ ID NO: 382739 - DNA, 30 bp, Artificial Sequence
  Synthetic oligonucleotide
catccgcacctgtccctgaaatattctacg

SEQ ID NO: 382740 - DNA, 30 bp, Artificial Sequence
  Synthetic oligonucleotide
tatcttgccaaagagcacgagataagtacg

SEQ ID NO: 382741 - DNA, 30 bp, Artificial Sequence
  Synthetic oligonucleotide
aacgtatagtcttgtgtacaaggcagtacg

SEQ ID NO: 382742 - DNA, 30 bp, Artificial Sequence
  Synthetic oligonucleotide
tagtcccgcatcccgcaggtgcgtagtacg

SEQ ID NO: 382743 - DNA, 30 bp, Artificial Sequence
  Synthetic oligonucleotide
gttcggtaactgtaaccctgtcgacgtacg

SEQ ID NO: 382744 - DNA, 30 bp, Artificial Sequence
  Synthetic oligonucleotide
tgtctcataccgcgttcacttcatcgtacg

SEQ ID NO: 382745 - DNA, 30 bp, Artificial Sequence
  Synthetic oligonucleotide
gtcattgtgcttacggcattgaaaggtacg

SEQ ID NO: 382746 - DNA, 30 bp, Artificial Sequence
  Synthetic oligonucleotide
taaggtggtggggggcctgggcaaggtacg

SEQ ID NO: 382747 - DNA, 30 bp, Artificial Sequence
  Synthetic oligonucleotide
ggccgtacattggaaggatctcaaggtacg

SEQ ID NO: 382748 - DNA, 30 bp, Artificial Sequence
  Synthetic oligonucleotide
tattcgaatctctctttacgacgcggtacg

SEQ ID NO: 382749 - DNA, 30 bp, Artificial Sequence
  Synthetic oligonucleotide
gtttccggtatgcatcggcctgtgggtacg

SEQ ID NO: 382750 - DNA, 30 bp, Artificial Sequence
  Synthetic oligonucleotide
aggtccttggggcttaagtactgtggtacg

SEQ ID NO: 382751 - DNA, 30 bp, Artificial Sequence
  Synthetic oligonucleotide
tcttcaattggccatgaggtttgatgtacg

SEQ ID NO: 382752 - DNA, 30 bp, Artificial Sequence
  Synthetic oligonucleotide
ggttgaataagtaatttgctcacgtgtacg

SEQ ID NO: 382753 - DNA, 30 bp, Artificial Sequence
  Synthetic oligonucleotide
ggttaatgtgcccgacataacacttgtacg

SEQ ID NO: 382754 - DNA, 30 bp, Artificial Sequence
  Synthetic oligonucleotide
ccgcaatgattaactaaaactatttgtacg

SEQ ID NO: 382755 - DNA, 30 bp, Artificial Sequence
  Synthetic oligonucleotide
acctaactgagcggggtgttcacaattacg

SEQ ID NO: 382756 - DNA, 30 bp, Artificial Sequence
  Synthetic oligonucleotide
ggccgtgcgatcgtatctctgtccattacg

SEQ ID NO: 382757 - DNA, 30 bp, Artificial Sequence
  Synthetic oligonucleotide
ttaagtccgccgcaaggtggggcacttacg

SEQ ID NO: 382758 - DNA, 30 bp, Artificial Sequence
  Synthetic oligonucleotide
gttatttaatctgcagaatcctgacttacg

SEQ ID NO: 382759 - DNA, 30 bp, Artificial Sequence
  Synthetic oligonucleotide
ccaacactgctgcattaggtagcgcttacg

SEQ ID NO: 382760 - DNA, 30 bp, Artificial Sequence
  Synthetic oligonucleotide
aacctaagtagagtggtgacctcgcttacg

SEQ ID NO: 382761 - DNA, 30 bp, Artificial Sequence
  Synthetic oligonucleotide
cggtgtgcttgtaggtccttagggcttacg

SEQ ID NO: 382762 - DNA, 30 bp, Artificial Sequence
  Synthetic oligonucleotide
tactactctgtgcggcttcagaatcttacg

SEQ ID NO: 382763 - DNA, 30 bp, Artificial Sequence
  Synthetic oligonucleotide
tacgcttactgagttagacggtaagttacg

SEQ ID NO: 382764 - DNA, 30 bp, Artificial Sequence
  Synthetic oligonucleotide
ctgcagccgccgtgtcctatagcagttacg

SEQ ID NO: 382765 - DNA, 30 bp, Artificial Sequence
  Synthetic oligonucleotide
catcaatgtcggtggcatacgaacgttacg

SEQ ID NO: 382766 - DNA, 30 bp, Artificial Sequence
  Synthetic oligonucleotide
attgtaacttagtgggtaaacagcgttacg

SEQ ID NO: 382767 - DNA, 30 bp, Artificial Sequence
  Synthetic oligonucleotide
ggatcacatacgtgttcgcttccggttacg

SEQ ID NO: 382768 - DNA, 30 bp, Artificial Sequence
  Synthetic oligonucleotide
gcggacgggtctaacctcagggtggttacg

SEQ ID NO: 382769 - DNA, 30 bp, Artificial Sequence
  Synthetic oligonucleotide
ttgtatagcgacacgatgacgctatttacg

SEQ ID NO: 382770 - DNA, 30 bp, Artificial Sequence
  Synthetic oligonucleotide
tattcataagggccaacgagtgtatttacg

SEQ ID NO: 382771 - DNA, 30 bp, Artificial Sequence
  Synthetic oligonucleotide
aaaattttcgctagatctcgggcgtttacg

SEQ ID NO: 382772 - DNA, 30 bp, Artificial Sequence
  Synthetic oligonucleotide
gattttccacaactggaatagatttttacg

SEQ ID NO: 382773 - DNA, 30 bp, Artificial Sequence
  Synthetic oligonucleotide
aggaaaaatcctccttttttacagaaaccg

SEQ ID NO: 382774 - DNA, 26 bp, Artificial Sequence
  Synthetic oligonucleotide
catcgctagcgatatctaggaaaccg

SEQ ID NO: 382775 - DNA, 30 bp, Artificial Sequence
  Synthetic oligonucleotide
agatgtctctgattaatctttaggaaaccg

SEQ ID NO: 382776 - DNA, 29 bp, Artificial Sequence
  Synthetic oligonucleotide
aatgcaagtgtttacacgtcgataaaccg

SEQ ID NO: 382777 - DNA, 30 bp, Artificial Sequence
  Synthetic oligonucleotide
cataagtgggggatttaatgtcgccaaccg

SEQ ID NO: 382778 - DNA, 30 bp, Artificial Sequence
  Synthetic oligonucleotide
atttccatgcgcgtgcgaaatggccaaccg

SEQ ID NO: 382779 - DNA, 30 bp, Artificial Sequence
  Synthetic oligonucleotide
tctttactatgcggggtggctttccaaccg

SEQ ID NO: 382780 - DNA, 30 bp, Artificial Sequence
  Synthetic oligonucleotide
tttaggtcaccggactatccggggcaaccg

SEQ ID NO: 382781 - DNA, 30 bp, Artificial Sequence
  Synthetic oligonucleotide
atatagttgggcgagacctccgtgcaaccg

SEQ ID NO: 382782 - DNA, 30 bp, Artificial Sequence
  Synthetic oligonucleotide
tggggtcctttgtttactgaccatcaaccg

SEQ ID NO: 382783 - DNA, 30 bp, Artificial Sequence
  Synthetic oligonucleotide
gtgaatctgattgcatggcacagagaaccg

SEQ ID NO: 382784 - DNA, 30 bp, Artificial Sequence
  Synthetic oligonucleotide
tcacgtagcgttttgcaacgcctagaaccg

SEQ ID NO: 382785 - DNA, 30 bp, Artificial Sequence
  Synthetic oligonucleotide
ttacagacttcaactgaacttctagaaccg

SEQ ID NO: 382786 - DNA, 30 bp, Artificial Sequence
  Synthetic oligonucleotide
gttatagccaatccattcacgggggaaccg

SEQ ID NO: 382787 - DNA, 30 bp, Artificial Sequence
  Synthetic oligonucleotide
ggtgatcgactgaacaagagtcttgaaccg

SEQ ID NO: 382788 - DNA, 30 bp, Artificial Sequence
  Synthetic oligonucleotide
caacggttaggtcacgtactacggtaaccg

SEQ ID NO: 382789 - DNA, 30 bp, Artificial Sequence
  Synthetic oligonucleotide
aaccagacatacgaaatgcggtggtaaccg

SEQ ID NO: 382790 - DNA, 30 bp, Artificial Sequence
  Synthetic oligonucleotide
tccgcggttaatcacactggtatgtaaccg

SEQ ID NO: 382791 - DNA, 30 bp, Artificial Sequence
  Synthetic oligonucleotide
gacggattgggggttctttacggttaaccg

SEQ ID NO: 382792 - DNA, 30 bp, Artificial Sequence
  Synthetic oligonucleotide
ggaccggatgctcaaaagctagcaacaccg

SEQ ID NO: 382793 - DNA, 30 bp, Artificial Sequence
  Synthetic oligonucleotide
aatataactgagagctgggtaaacacaccg

SEQ ID NO: 382794 - DNA, 30 bp, Artificial Sequence
  Synthetic oligonucleotide
gttccaagggttgagcttggaggcacaccg

SEQ ID NO: 382795 - DNA, 30 bp, Artificial Sequence
  Synthetic oligonucleotide
catttttgtggggggatgagttcgacaccg

SEQ ID NO: 382796 - DNA, 30 bp, Artificial Sequence
  Synthetic oligonucleotide
agtcagttcagccatggagtcactacaccg

SEQ ID NO: 382797 - DNA, 30 bp, Artificial Sequence
  Synthetic oligonucleotide
gatcagatcacaattacgggcgttacaccg

SEQ ID NO: 382798 - DNA, 30 bp, Artificial Sequence
  Synthetic oligonucleotide
acaggagggacttagggatttgtcccaccg

SEQ ID NO: 382799 - DNA, 30 bp, Artificial Sequence
  Synthetic oligonucleotide
gactccagtcccatttcatcgctgccaccg

SEQ ID NO: 382800 - DNA, 30 bp, Artificial Sequence
  Synthetic oligonucleotide
ggtctggctcgtgccaagtgatttccaccg

SEQ ID NO: 382801 - DNA, 30 bp, Artificial Sequence
  Synthetic oligonucleotide
gggttttaggatggatgtcagctcgcaccg

SEQ ID NO: 382802 - DNA, 30 bp, Artificial Sequence
  Synthetic oligonucleotide
ttatccggttttgtgatgagttaggcaccg

SEQ ID NO: 382803 - DNA, 30 bp, Artificial Sequence
  Synthetic oligonucleotide
tgcaaacttttgtatgtatccttggcaccg

SEQ ID NO: 382804 - DNA, 30 bp, Artificial Sequence
  Synthetic oligonucleotide
ttaacccctatattctccataggtgcaccg

SEQ ID NO: 382805 - DNA, 30 bp, Artificial Sequence
  Synthetic oligonucleotide
tatttatatagaggagtcagtgtatcaccg

SEQ ID NO: 382806 - DNA, 30 bp, Artificial Sequence
  Synthetic oligonucleotide
cataaataaaggctttgggacaggtcaccg

SEQ ID NO: 382807 - DNA, 30 bp, Artificial Sequence
  Synthetic oligonucleotide
gaaaaaaccccaatagtgcgtggttcaccg

SEQ ID NO: 382808 - DNA, 30 bp, Artificial Sequence
  Synthetic oligonucleotide
cttgtgtatctcggaaacgatcccagaccg

SEQ ID NO: 382809 - DNA, 30 bp, Artificial Sequence
  Synthetic oligonucleotide
gacattctgggaatcgagtctattagaccg

SEQ ID NO: 382810 - DNA, 30 bp, Artificial Sequence
  Synthetic oligonucleotide
tgttttatagtatcgcacttactacgaccg

SEQ ID NO: 382811 - DNA, 30 bp, Artificial Sequence
  Synthetic oligonucleotide
gatctttggctcccgtgccattgtcgaccg

SEQ ID NO: 382812 - DNA, 30 bp, Artificial Sequence
  Synthetic oligonucleotide
gtttactgaaattgctgtcgtcgaggaccg

SEQ ID NO: 382813 - DNA, 30 bp, Artificial Sequence
  Synthetic oligonucleotide
tcatgatacccgcgggacaccaacggaccg

SEQ ID NO: 382814 - DNA, 30 bp, Artificial Sequence
  Synthetic oligonucleotide
aaccgacactcgcagtccatcgacggaccg

SEQ ID NO: 382815 - DNA, 30 bp, Artificial Sequence
  Synthetic oligonucleotide
agtcctatgggaaaacagatagtcggaccg

SEQ ID NO: 382816 - DNA, 30 bp, Artificial Sequence
  Synthetic oligonucleotide
acaccctaacgacccttcccgtagggaccg

SEQ ID NO: 382817 - DNA, 30 bp, Artificial Sequence
  Synthetic oligonucleotide
ggctcatggtgatgtgcgaacatgggaccg

SEQ ID NO: 382818 - DNA, 30 bp, Artificial Sequence
  Synthetic oligonucleotide
aaaaaatctattgagcctatactgggaccg

SEQ ID NO: 382819 - DNA, 30 bp, Artificial Sequence
  Synthetic oligonucleotide
caggcgtcctagattaattagtctggaccg

SEQ ID NO: 382820 - DNA, 30 bp, Artificial Sequence
  Synthetic oligonucleotide
taactgacacctgttggcctagagataccg

SEQ ID NO: 382821 - DNA, 30 bp, Artificial Sequence
  Synthetic oligonucleotide
tgtcgacgcacacttgtcgaggggataccg

SEQ ID NO: 382822 - DNA, 30 bp, Artificial Sequence
  Synthetic oligonucleotide
agggtgaagccacggtacggatctataccg

SEQ ID NO: 382823 - DNA, 30 bp, Artificial Sequence
  Synthetic oligonucleotide
gaacagaggatggacactggccttataccg

SEQ ID NO: 382824 - DNA, 30 bp, Artificial Sequence
  Synthetic oligonucleotide
gcggtcttcaatatctgtaaaaatctaccg

SEQ ID NO: 382825 - DNA, 30 bp, Artificial Sequence
  Synthetic oligonucleotide
gcgctgtgtccgcggttggtacgagtaccg

SEQ ID NO: 382826 - DNA, 29 bp, Artificial Sequence
  Synthetic oligonucleotide
cgactgactatacacagacggccgtaccg

SEQ ID NO: 382827 - DNA, 30 bp, Artificial Sequence
  Synthetic oligonucleotide
tctctacatataactggggcactcgtaccg

SEQ ID NO: 382828 - DNA, 30 bp, Artificial Sequence
  Synthetic oligonucleotide
ttgtacccctggcagaacttaatggtaccg

SEQ ID NO: 382829 - DNA, 30 bp, Artificial Sequence
  Synthetic oligonucleotide
acagatcgactcaccatgacccgattaccg

SEQ ID NO: 382830 - DNA, 30 bp, Artificial Sequence
  Synthetic oligonucleotide
ggacgtaggacatttgagggccagttaccg

SEQ ID NO: 382831 - DNA, 30 bp, Artificial Sequence
  Synthetic oligonucleotide
tacttcagtgtatccggtgaggttttaccg

SEQ ID NO: 382832 - DNA, 30 bp, Artificial Sequence
  Synthetic oligonucleotide
tctcgccacccggtggtcgttagaaacccg

SEQ ID NO: 382833 - DNA, 30 bp, Artificial Sequence
  Synthetic oligonucleotide
ggcaaaatacacatcccgctacgcaacccg

SEQ ID NO: 382834 - DNA, 30 bp, Artificial Sequence
  Synthetic oligonucleotide
tcatggtttatgacacctgtcaggaacccg

SEQ ID NO: 382835 - DNA, 30 bp, Artificial Sequence
  Synthetic oligonucleotide
caccgcacattaaacactgcacggaacccg

SEQ ID NO: 382836 - DNA, 30 bp, Artificial Sequence
  Synthetic oligonucleotide
gttcagggcgaatcttcctgtcggaacccg

SEQ ID NO: 382837 - DNA, 30 bp, Artificial Sequence
  Synthetic oligonucleotide
aattgcccatgcgttatggacaataacccg

SEQ ID NO: 382838 - DNA, 30 bp, Artificial Sequence
  Synthetic oligonucleotide
aaattcaaaaattaaagagcgggacacccg

SEQ ID NO: 382839 - DNA, 30 bp, Artificial Sequence
  Synthetic oligonucleotide
aggcttcaagagccttattcatgccacccg

SEQ ID NO: 382840 - DNA, 30 bp, Artificial Sequence
  Synthetic oligonucleotide
agcagattagggcatcccgtgggtcacccg

SEQ ID NO: 382841 - DNA, 30 bp, Artificial Sequence
  Synthetic oligonucleotide
gcgggtgtaaatttaacaagggttcacccg

SEQ ID NO: 382842 - DNA, 30 bp, Artificial Sequence
  Synthetic oligonucleotide
gatcagcaattacaggatctgtgagacccg

SEQ ID NO: 382843 - DNA, 30 bp, Artificial Sequence
  Synthetic oligonucleotide
gtcataattgatccacagacacccgacccg

SEQ ID NO: 382844 - DNA, 30 bp, Artificial Sequence
  Synthetic oligonucleotide
tttctatggcaacaagtccgtggcgacccg

SEQ ID NO: 382845 - DNA, 30 bp, Artificial Sequence
  Synthetic oligonucleotide
taggcatggacgctttataaatgcgacccg

SEQ ID NO: 382846 - DNA, 30 bp, Artificial Sequence
  Synthetic oligonucleotide
tggaaaaatatctatcaataataggacccg

SEQ ID NO: 382847 - DNA, 30 bp, Artificial Sequence
  Synthetic oligonucleotide
tcacatgcgggggatcatcattagtacccg

SEQ ID NO: 382848 - DNA, 30 bp, Artificial Sequence
  Synthetic oligonucleotide
ttctcggtccgtagggtgtttcattacccg

SEQ ID NO: 382849 - DNA, 29 bp, Artificial Sequence
  Synthetic oligonucleotide
gggaccaggtattgaagcacgcaaccccg

SEQ ID NO: 382850 - DNA, 30 bp, Artificial Sequence
  Synthetic oligonucleotide
gctaggtcgatgcatcaccttggcaccccg

SEQ ID NO: 382851 - DNA, 30 bp, Artificial Sequence
  Synthetic oligonucleotide
aagaaattaagtgtgcaaaatttcaccccg

SEQ ID NO: 382852 - DNA, 30 bp, Artificial Sequence
  Synthetic oligonucleotide
accagcaggttgcaacggcttatacccccg

SEQ ID NO: 382853 - DNA, 30 bp, Artificial Sequence
  Synthetic oligonucleotide
attaattaacaagcttttgtatagcccccg

SEQ ID NO: 382854 - DNA, 30 bp, Artificial Sequence
  Synthetic oligonucleotide
tagttttaggagatcctctaaggtcccccg

SEQ ID NO: 382855 - DNA, 30 bp, Artificial Sequence
  Synthetic oligonucleotide
cgggacagatggcattcgggatttcccccg

SEQ ID NO: 382856 - DNA, 30 bp, Artificial Sequence
  Synthetic oligonucleotide
atttacacggacagacctttgcaagccccg

SEQ ID NO: 382857 - DNA, 30 bp, Artificial Sequence
  Synthetic oligonucleotide
tacttagcccccggcgtgccttgagccccg

SEQ ID NO: 382858 - DNA, 30 bp, Artificial Sequence
  Synthetic oligonucleotide
caacacagtcgaccccctttgtaggccccg

SEQ ID NO: 382859 - DNA, 30 bp, Artificial Sequence
  Synthetic oligonucleotide
gtattcgccgaccaatagaggccggccccg

SEQ ID NO: 382860 - DNA, 30 bp, Artificial Sequence
  Synthetic oligonucleotide
aaaagctctaaatcgcagtgatgggccccg

SEQ ID NO: 382861 - DNA, 30 bp, Artificial Sequence
  Synthetic oligonucleotide
ccagtgaggcagaggcgagcagatgccccg

SEQ ID NO: 382862 - DNA, 30 bp, Artificial Sequence
  Synthetic oligonucleotide
gaggtcgggctcaatgtaactattgccccg

SEQ ID NO: 382863 - DNA, 30 bp, Artificial Sequence
  Synthetic oligonucleotide
tcatcgcagtcacgtgaaggaaaatccccg

SEQ ID NO: 382864 - DNA, 30 bp, Artificial Sequence
  Synthetic oligonucleotide
gaaggtcctattcggagaagggaatccccg

SEQ ID NO: 382865 - DNA, 30 bp, Artificial Sequence
  Synthetic oligonucleotide
tatgtagtcaacgcggttatctcaagcccg

SEQ ID NO: 382866 - DNA, 30 bp, Artificial Sequence
  Synthetic oligonucleotide
ccgcgcaagactctacgggtattaagcccg

SEQ ID NO: 382867 - DNA, 30 bp, Artificial Sequence
  Synthetic oligonucleotide
gttctagtattagcctcggtccacagcccg

SEQ ID NO: 382868 - DNA, 30 bp, Artificial Sequence
  Synthetic oligonucleotide
ctgacggcttcttcgaagccgggcagcccg

SEQ ID NO: 382869 - DNA, 30 bp, Artificial Sequence
  Synthetic oligonucleotide
cacgtttgggcgaaaggataacggagcccg

SEQ ID NO: 382870 - DNA, 30 bp, Artificial Sequence
  Synthetic oligonucleotide
tgtcaggttacattctaggcaattagcccg

SEQ ID NO: 382871 - DNA, 30 bp, Artificial Sequence
  Synthetic oligonucleotide
taaacctcgaaacgcggccagacacgcccg

SEQ ID NO: 382872 - DNA, 30 bp, Artificial Sequence
  Synthetic oligonucleotide
tgcgttaagcgaatcgtaagcgtacgcccg

SEQ ID NO: 382873 - DNA, 30 bp, Artificial Sequence
  Synthetic oligonucleotide
tgatccgcccaatttgatacaatccgcccg

SEQ ID NO: 382874 - DNA, 30 bp, Artificial Sequence
  Synthetic oligonucleotide
aatcttcgttgcgggccatccactcgcccg

SEQ ID NO: 382875 - DNA, 30 bp, Artificial Sequence
  Synthetic oligonucleotide
gccacgcagccttgcaaagattaaggcccg

SEQ ID NO: 382876 - DNA, 30 bp, Artificial Sequence
  Synthetic oligonucleotide
gatcactagttaaactcgggtgcaggcccg

SEQ ID NO: 382877 - DNA, 30 bp, Artificial Sequence
  Synthetic oligonucleotide
accttattgccgaatttcgaaggaggcccg

SEQ ID NO: 382878 - DNA, 30 bp, Artificial Sequence
  Synthetic oligonucleotide
ttttcgtttcaagatatgaagaccggcccg

SEQ ID NO: 382879 - DNA, 30 bp, Artificial Sequence
  Synthetic oligonucleotide
tttccgacacaactggatcgtatcggcccg

SEQ ID NO: 382880 - DNA, 30 bp, Artificial Sequence
  Synthetic oligonucleotide
agacgttgagcgagtgtgtaggggggcccg

SEQ ID NO: 382881 - DNA, 30 bp, Artificial Sequence
  Synthetic oligonucleotide
aacctaccccgacattagaattggggcccg

SEQ ID NO: 382882 - DNA, 30 bp, Artificial Sequence
  Synthetic oligonucleotide
aatcaacgcgagtgcgagcaacactgcccg

SEQ ID NO: 382883 - DNA, 30 bp, Artificial Sequence
  Synthetic oligonucleotide
cgaccccgggtgtggcacttggcctgcccg

SEQ ID NO: 382884 - DNA, 30 bp, Artificial Sequence
  Synthetic oligonucleotide
ctgtcaccggacacgccctttgtctgcccg

SEQ ID NO: 382885 - DNA, 30 bp, Artificial Sequence
  Synthetic oligonucleotide
gtacaagagcatcaggattttctgtgcccg

SEQ ID NO: 382886 - DNA, 30 bp, Artificial Sequence
  Synthetic oligonucleotide
cccacggaaggcgcgtattgtcagatcccg

SEQ ID NO: 382887 - DNA, 30 bp, Artificial Sequence
  Synthetic oligonucleotide
cagatgccagttgacagacgctgtatcccg

SEQ ID NO: 382888 - DNA, 30 bp, Artificial Sequence
  Synthetic oligonucleotide
agctagatgttgcattacctaattatcccg

SEQ ID NO: 382889 - DNA, 30 bp, Artificial Sequence
  Synthetic oligonucleotide
ttaagaatgcgttctgacctccaactcccg

SEQ ID NO: 382890 - DNA, 30 bp, Artificial Sequence
  Synthetic oligonucleotide
acatcaagattaaggtggtcagcactcccg

SEQ ID NO: 382891 - DNA, 30 bp, Artificial Sequence
  Synthetic oligonucleotide
tattctaccaaaggcaacgacagactcccg

SEQ ID NO: 382892 - DNA, 30 bp, Artificial Sequence
  Synthetic oligonucleotide
taggttcctgagtactggtcattactcccg

SEQ ID NO: 382893 - DNA, 30 bp, Artificial Sequence
  Synthetic oligonucleotide
tagaagtgtgtgaccagatacatgctcccg

SEQ ID NO: 382894 - DNA, 30 bp, Artificial Sequence
  Synthetic oligonucleotide
cccaaggtaagacattggataaacgtcccg

SEQ ID NO: 382895 - DNA, 30 bp, Artificial Sequence
  Synthetic oligonucleotide
tgtaaaggcggagagcccggccgggtcccg

SEQ ID NO: 382896 - DNA, 30 bp, Artificial Sequence
  Synthetic oligonucleotide
gggaaacctcagttcgcacgggcattcccg

SEQ ID NO: 382897 - DNA, 30 bp, Artificial Sequence
  Synthetic oligonucleotide
gatgctttacgacacgggcatggattcccg

SEQ ID NO: 382898 - DNA, 30 bp, Artificial Sequence
  Synthetic oligonucleotide
gctttcttctttatgctcgggaggttcccg

SEQ ID NO: 382899 - DNA, 30 bp, Artificial Sequence
  Synthetic oligonucleotide
gagccagctgaattaatactttatttcccg

SEQ ID NO: 382900 - DNA, 30 bp, Artificial Sequence
  Synthetic oligonucleotide
gcacagacgggttcaccttgcactttcccg

SEQ ID NO: 382901 - DNA, 30 bp, Artificial Sequence
  Synthetic oligonucleotide
tatcagtagattctcagattccgtttcccg

SEQ ID NO: 382902 - DNA, 30 bp, Artificial Sequence
  Synthetic oligonucleotide
gctgcacagattgaagtgcttgcaaagccg

SEQ ID NO: 382903 - DNA, 30 bp, Artificial Sequence
  Synthetic oligonucleotide
gaggttaggagttattcttgcaacaagccg

SEQ ID NO: 382904 - DNA, 30 bp, Artificial Sequence
  Synthetic oligonucleotide
ttaaggtcgattaatttggtggagaagccg

SEQ ID NO: 382905 - DNA, 30 bp, Artificial Sequence
  Synthetic oligonucleotide
tgagcggaaggcttttgaaacctgaagccg

SEQ ID NO: 382906 - DNA, 30 bp, Artificial Sequence
  Synthetic oligonucleotide
ttaaccggccctcaaagctggcttaagccg

SEQ ID NO: 382907 - DNA, 30 bp, Artificial Sequence
  Synthetic oligonucleotide
accggcttgcggaagcgaagtacacagccg

SEQ ID NO: 382908 - DNA, 30 bp, Artificial Sequence
  Synthetic oligonucleotide
aattttctcgaacaagatggcgtccagccg

SEQ ID NO: 382909 - DNA, 30 bp, Artificial Sequence
  Synthetic oligonucleotide
caattctcaagatataaggcgtggcagccg

SEQ ID NO: 382910 - DNA, 30 bp, Artificial Sequence
  Synthetic oligonucleotide
ccgtatttaatacgccgcggtgaagagccg

SEQ ID NO: 382911 - DNA, 30 bp, Artificial Sequence
  Synthetic oligonucleotide
cctagcgctttgaatactgtctcagagccg

SEQ ID NO: 382912 - DNA, 30 bp, Artificial Sequence
  Synthetic oligonucleotide
attcaccgatccgttagtaagcctgagccg

SEQ ID NO: 382913 - DNA, 30 bp, Artificial Sequence
  Synthetic oligonucleotide
agtatgacccaacacgagaaaccgtagccg

SEQ ID NO: 382914 - DNA, 30 bp, Artificial Sequence
  Synthetic oligonucleotide
ttagcttatggctcctcctacatgtagccg

SEQ ID NO: 382915 - DNA, 30 bp, Artificial Sequence
  Synthetic oligonucleotide
gtttttatgtaccggctacaatcttagccg

SEQ ID NO: 382916 - DNA, 30 bp, Artificial Sequence
  Synthetic oligonucleotide
ttaagtaagaccataatggcgaacacgccg

SEQ ID NO: 382917 - DNA, 31 bp, Artificial Sequence
  Synthetic oligonucleotide
cccatttaagcaacgaacttctctgacgccg

SEQ ID NO: 382918 - DNA, 30 bp, Artificial Sequence
  Synthetic oligonucleotide
gcaattcgcattatatgcccttcaccgccg

SEQ ID NO: 382919 - DNA, 30 bp, Artificial Sequence
  Synthetic oligonucleotide
ggcagtccaggggacttgtgggtcccgccg

SEQ ID NO: 382920 - DNA, 30 bp, Artificial Sequence
  Synthetic oligonucleotide
tagaaactcgcaggcgcctcaacgccgccg

SEQ ID NO: 382921 - DNA, 30 bp, Artificial Sequence
  Synthetic oligonucleotide
ttagacatagtccccggcagttcgccgccg

SEQ ID NO: 382922 - DNA, 29 bp, Artificial Sequence
  Synthetic oligonucleotide
ttcctactgcgcgtcaaccattgccgccg

SEQ ID NO: 382923 - DNA, 30 bp, Artificial Sequence
  Synthetic oligonucleotide
gaacatcgtttaaaatgacttgccgcgccg

SEQ ID NO: 382924 - DNA, 30 bp, Artificial Sequence
  Synthetic oligonucleotide
ttctgctgagctatacaagctggggcgccg

SEQ ID NO: 382925 - DNA, 30 bp, Artificial Sequence
  Synthetic oligonucleotide
aattctttactttatgtcgtactctcgccg

SEQ ID NO: 382926 - DNA, 30 bp, Artificial Sequence
  Synthetic oligonucleotide
actgactcctctcggagaggcctctcgccg

SEQ ID NO: 382927 - DNA, 30 bp, Artificial Sequence
  Synthetic oligonucleotide
acggctacgtacgcgttatacccgtcgccg

SEQ ID NO: 382928 - DNA, 30 bp, Artificial Sequence
  Synthetic oligonucleotide
aagtaggcacagtaaacggtcaggtcgccg

SEQ ID NO: 382929 - DNA, 30 bp, Artificial Sequence
  Synthetic oligonucleotide
gtgtcagtatgggttcgtggattgtcgccg

SEQ ID NO: 382930 - DNA, 30 bp, Artificial Sequence
  Synthetic oligonucleotide
aggcatcagcggtagttaaactattcgccg

SEQ ID NO: 382931 - DNA, 30 bp, Artificial Sequence
  Synthetic oligonucleotide
gagtgcacgagaccctcaaaaatttcgccg

SEQ ID NO: 382932 - DNA, 30 bp, Artificial Sequence
  Synthetic oligonucleotide
tggggcggaggtagacccgattgaaggccg

SEQ ID NO: 382933 - DNA, 30 bp, Artificial Sequence
  Synthetic oligonucleotide
tttactgtacacgtgagaatcaccaggccg

SEQ ID NO: 382934 - DNA, 30 bp, Artificial Sequence
  Synthetic oligonucleotide
atcttgttgccatcggggtaccccaggccg

SEQ ID NO: 382935 - DNA, 30 bp, Artificial Sequence
  Synthetic oligonucleotide
gatgtagggaactgggggatacgcaggccg

SEQ ID NO: 382936 - DNA, 30 bp, Artificial Sequence
  Synthetic oligonucleotide
acacggacagggtctgcgtggtgcaggccg

SEQ ID NO: 382937 - DNA, 30 bp, Artificial Sequence
  Synthetic oligonucleotide
ttaatggtcagagacagacggatgaggccg

SEQ ID NO: 382938 - DNA, 30 bp, Artificial Sequence
  Synthetic oligonucleotide
tgaatgtattcgttaatattgctgaggccg

SEQ ID NO: 382939 - DNA, 30 bp, Artificial Sequence
  Synthetic oligonucleotide
tgcttatacgggcccacagatcctaggccg

SEQ ID NO: 382940 - DNA, 30 bp, Artificial Sequence
  Synthetic oligonucleotide
actgctttgtgataattacccgtccggccg

SEQ ID NO: 382941 - DNA, 30 bp, Artificial Sequence
  Synthetic oligonucleotide
ggcggatgtcggccccatacgcggcggccg

SEQ ID NO: 382942 - DNA, 30 bp, Artificial Sequence
  Synthetic oligonucleotide
tttggcggcatatcatacggttctcggccg

SEQ ID NO: 382943 - DNA, 30 bp, Artificial Sequence
  Synthetic oligonucleotide
tacgttacccagttagcaaatcccgggccg

SEQ ID NO: 382944 - DNA, 30 bp, Artificial Sequence
  Synthetic oligonucleotide
ggaagcgctgccaaggtatggcatgggccg

SEQ ID NO: 382945 - DNA, 30 bp, Artificial Sequence
  Synthetic oligonucleotide
cagtagagaaaagaagagcatattgggccg

SEQ ID NO: 382946 - DNA, 30 bp, Artificial Sequence
  Synthetic oligonucleotide
tgtggattaaggcacatgggtaaatggccg

SEQ ID NO: 382947 - DNA, 30 bp, Artificial Sequence
  Synthetic oligonucleotide
tactggactggcagaatggatgggtggccg

SEQ ID NO: 382948 - DNA, 30 bp, Artificial Sequence
  Synthetic oligonucleotide
ctaatccctcaatgccattgtacttggccg

SEQ ID NO: 382949 - DNA, 30 bp, Artificial Sequence
  Synthetic oligonucleotide
ggctgcattctgatgcagtcgggttggccg

SEQ ID NO: 382950 - DNA, 30 bp, Artificial Sequence
  Synthetic oligonucleotide
tgggcaaagtaacaccgtcggctttggccg

SEQ ID NO: 382951 - DNA, 30 bp, Artificial Sequence
  Synthetic oligonucleotide
caatggatcaccagctctggagtttggccg

SEQ ID NO: 382952 - DNA, 30 bp, Artificial Sequence
  Synthetic oligonucleotide
cgatcgcccacgccaacgacgctaatgccg

SEQ ID NO: 382953 - DNA, 30 bp, Artificial Sequence
  Synthetic oligonucleotide
atccgaattttgaatatccctcagatgccg

SEQ ID NO: 382954 - DNA, 30 bp, Artificial Sequence
  Synthetic oligonucleotide
catattagggtataaaccgcttggatgccg

SEQ ID NO: 382955 - DNA, 30 bp, Artificial Sequence
  Synthetic oligonucleotide
ctgacgtcgtcgggcacctgcgatatgccg

SEQ ID NO: 382956 - DNA, 30 bp, Artificial Sequence
  Synthetic oligonucleotide
atattactaccgtgtgttgtgggtatgccg

SEQ ID NO: 382957 - DNA, 30 bp, Artificial Sequence
  Synthetic oligonucleotide
ttagcagctcggcggctaccaattatgccg

SEQ ID NO: 382958 - DNA, 30 bp, Artificial Sequence
  Synthetic oligonucleotide
cactcttgtattgaatgtgttggactgccg

SEQ ID NO: 382959 - DNA, 30 bp, Artificial Sequence
  Synthetic oligonucleotide
cggatcaaagctttttgagcttacctgccg

SEQ ID NO: 382960 - DNA, 30 bp, Artificial Sequence
  Synthetic oligonucleotide
aatagggatcccggatctgcgaccctgccg

SEQ ID NO: 382961 - DNA, 30 bp, Artificial Sequence
  Synthetic oligonucleotide
gtatataaagatggaaaccctaatctgccg

SEQ ID NO: 382962 - DNA, 30 bp, Artificial Sequence
  Synthetic oligonucleotide
tttcggggggcaaatttgaagagtctgccg

SEQ ID NO: 382963 - DNA, 30 bp, Artificial Sequence
  Synthetic oligonucleotide
gtatgccaacaagagccacagatagtgccg

SEQ ID NO: 382964 - DNA, 30 bp, Artificial Sequence
  Synthetic oligonucleotide
gctctcggcaaatcaacattagtagtgccg

SEQ ID NO: 382965 - DNA, 30 bp, Artificial Sequence
  Synthetic oligonucleotide
aacctaaagcccctaacgcacaccgtgccg

SEQ ID NO: 382966 - DNA, 30 bp, Artificial Sequence
  Synthetic oligonucleotide
gtagtgttcaagggtatggtgttcgtgccg

SEQ ID NO: 382967 - DNA, 30 bp, Artificial Sequence
  Synthetic oligonucleotide
acttccctgaacatgcccccgtgggtgccg

SEQ ID NO: 382968 - DNA, 30 bp, Artificial Sequence
  Synthetic oligonucleotide
tcactgatcagtgtccgtaatagtgtgccg

SEQ ID NO: 382969 - DNA, 30 bp, Artificial Sequence
  Synthetic oligonucleotide
ttaggggcctatatggccagaacattgccg

SEQ ID NO: 382970 - DNA, 30 bp, Artificial Sequence
  Synthetic oligonucleotide
aaagccgagcttgggtgtaaatcattgccg

SEQ ID NO: 382971 - DNA, 30 bp, Artificial Sequence
  Synthetic oligonucleotide
cccacttacttagatgccgcgctattgccg

SEQ ID NO: 382972 - DNA, 30 bp, Artificial Sequence
  Synthetic oligonucleotide
gtaggacatacaccgggttttctgttgccg

SEQ ID NO: 382973 - DNA, 30 bp, Artificial Sequence
  Synthetic oligonucleotide
cgcgttacgattttgcattctgtgttgccg

SEQ ID NO: 382974 - DNA, 30 bp, Artificial Sequence
  Synthetic oligonucleotide
cgagttttcaaccaatcttgtactttgccg

SEQ ID NO: 382975 - DNA, 30 bp, Artificial Sequence
  Synthetic oligonucleotide
tagcttcttagcatgtgtcagcctttgccg

SEQ ID NO: 382976 - DNA, 31 bp, Artificial Sequence
  Synthetic oligonucleotide
cagagcgcacctccgtaaataagctttgccg

SEQ ID NO: 382977 - DNA, 30 bp, Artificial Sequence
  Synthetic oligonucleotide
tggaagacgtttacatacgctgcaaatccg

SEQ ID NO: 382978 - DNA, 30 bp, Artificial Sequence
  Synthetic oligonucleotide
ttcacacaaaagcatctggaatccaatccg

SEQ ID NO: 382979 - DNA, 30 bp, Artificial Sequence
  Synthetic oligonucleotide
acgaccgtcagtaatgttggattcaatccg

SEQ ID NO: 382980 - DNA, 30 bp, Artificial Sequence
  Synthetic oligonucleotide
gagccccctatatgcgcgtaaaataatccg

SEQ ID NO: 382981 - DNA, 30 bp, Artificial Sequence
  Synthetic oligonucleotide
ctttctggtggacaaagcagacataatccg

SEQ ID NO: 382982 - DNA, 30 bp, Artificial Sequence
  Synthetic oligonucleotide
gcctagggcttgtcgaggtgcgataatccg

SEQ ID NO: 382983 - DNA, 30 bp, Artificial Sequence
  Synthetic oligonucleotide
gaaatacgccgtaaaagttcttctaatccg

SEQ ID NO: 382984 - DNA, 30 bp, Artificial Sequence
  Synthetic oligonucleotide
tttcgttaaccgcttccaccgtcgcatccg

SEQ ID NO: 382985 - DNA, 30 bp, Artificial Sequence
  Synthetic oligonucleotide
gtatagagtgtactcgtgtagattcatccg

SEQ ID NO: 382986 - DNA, 30 bp, Artificial Sequence
  Synthetic oligonucleotide
ttgtgcgatgtatcccagttgtgagatccg

SEQ ID NO: 382987 - DNA, 30 bp, Artificial Sequence
  Synthetic oligonucleotide
taacgcagagtgagggtactggccgatccg

SEQ ID NO: 382988 - DNA, 30 bp, Artificial Sequence
  Synthetic oligonucleotide
gagcgctaacgttaatgaccgcaggatccg

SEQ ID NO: 382989 - DNA, 30 bp, Artificial Sequence
  Synthetic oligonucleotide
gcaactgccagccaacccctcaaatatccg

SEQ ID NO: 382990 - DNA, 30 bp, Artificial Sequence
  Synthetic oligonucleotide
aggactatttaatcaacatgatgatatccg

SEQ ID NO: 382991 - DNA, 30 bp, Artificial Sequence
  Synthetic oligonucleotide
gtaatgtagccctgtagttaatcgtatccg

SEQ ID NO: 382992 - DNA, 30 bp, Artificial Sequence
  Synthetic oligonucleotide
tccccgggagcttacggcatgatgtatccg

SEQ ID NO: 382993 - DNA, 30 bp, Artificial Sequence
  Synthetic oligonucleotide
aacgattatttaagcaagccagcaactccg

SEQ ID NO: 382994 - DNA, 30 bp, Artificial Sequence
  Synthetic oligonucleotide
gacacgatgttccatcctaggacgactccg

SEQ ID NO: 382995 - DNA, 30 bp, Artificial Sequence
  Synthetic oligonucleotide
aacttgtctggtcagacggtcgcgactccg

SEQ ID NO: 382996 - DNA, 30 bp, Artificial Sequence
  Synthetic oligonucleotide
gatgggccctccgttatgagcagtactccg

SEQ ID NO: 382997 - DNA, 30 bp, Artificial Sequence
  Synthetic oligonucleotide
gccgatgagcaccagtatgcccttactccg

SEQ ID NO: 382998 - DNA, 30 bp, Artificial Sequence
  Synthetic oligonucleotide
cattgttatgctgggacttggtaacctccg

SEQ ID NO: 382999 - DNA, 30 bp, Artificial Sequence
  Synthetic oligonucleotide
attctgataaaaagataagtgacacctccg

SEQ ID NO: 383000 - DNA, 30 bp, Artificial Sequence
  Synthetic oligonucleotide
cacctcctgatgtaaaggctcgtccctccg

SEQ ID NO: 383001 - DNA, 30 bp, Artificial Sequence
  Synthetic oligonucleotide
ccggtatggccaagaccggccggatctccg

SEQ ID NO: 383002 - DNA, 30 bp, Artificial Sequence
  Synthetic oligonucleotide
tttcgcggtcatgttcgttgagtgtctccg

SEQ ID NO: 383003 - DNA, 30 bp, Artificial Sequence
  Synthetic oligonucleotide
ctgaagggactcgctaggccaacaagtccg

SEQ ID NO: 383004 - DNA, 30 bp, Artificial Sequence
  Synthetic oligonucleotide
tcgtgctacgcagttaggaacatgagtccg

SEQ ID NO: 383005 - DNA, 31 bp, Artificial Sequence
  Synthetic oligonucleotide
cacattttgtctgttttagtcattacgtccg

SEQ ID NO: 383006 - DNA, 30 bp, Artificial Sequence
  Synthetic oligonucleotide
gactcatgaggccacgtccgtatccgtccg

SEQ ID NO: 383007 - DNA, 30 bp, Artificial Sequence
  Synthetic oligonucleotide
tgaatttcactagtgataccctatcgtccg

SEQ ID NO: 383008 - DNA, 30 bp, Artificial Sequence
  Synthetic oligonucleotide
atattagccacctacgtcagttgaggtccg

SEQ ID NO: 383009 - DNA, 30 bp, Artificial Sequence
  Synthetic oligonucleotide
tatttgttctttgagtattatataggtccg

SEQ ID NO: 383010 - DNA, 30 bp, Artificial Sequence
  Synthetic oligonucleotide
cggaacgagtcttcatagaaaaacggtccg

SEQ ID NO: 383011 - DNA, 30 bp, Artificial Sequence
  Synthetic oligonucleotide
ggtgctgtggtaggccatgattacggtccg

SEQ ID NO: 383012 - DNA, 30 bp, Artificial Sequence
  Synthetic oligonucleotide
ccgtcccctagtacaccatggcccggtccg

SEQ ID NO: 383013 - DNA, 30 bp, Artificial Sequence
  Synthetic oligonucleotide
tagcttatattccccagcacaagcggtccg

SEQ ID NO: 383014 - DNA, 30 bp, Artificial Sequence
  Synthetic oligonucleotide
tcgccggcacacctgcacagttagggtccg

SEQ ID NO: 383015 - DNA, 30 bp, Artificial Sequence
  Synthetic oligonucleotide
tgagagtccccacaaacttaaggtggtccg

SEQ ID NO: 383016 - DNA, 30 bp, Artificial Sequence
  Synthetic oligonucleotide
agattccggaatgccctcagatgtggtccg

SEQ ID NO: 383017 - DNA, 30 bp, Artificial Sequence
  Synthetic oligonucleotide
attcggacgaaatgtctaacgtaatgtccg

SEQ ID NO: 383018 - DNA, 30 bp, Artificial Sequence
  Synthetic oligonucleotide
ataataagcttgcgaaataacccatgtccg

SEQ ID NO: 383019 - DNA, 30 bp, Artificial Sequence
  Synthetic oligonucleotide
gttccaagaggcttaggttttaggtgtccg

SEQ ID NO: 383020 - DNA, 30 bp, Artificial Sequence
  Synthetic oligonucleotide
gtatgttatgcaggccatacttcttgtccg

SEQ ID NO: 383021 - DNA, 30 bp, Artificial Sequence
  Synthetic oligonucleotide
gctaactagttaccggatatctccattccg

SEQ ID NO: 383022 - DNA, 30 bp, Artificial Sequence
  Synthetic oligonucleotide
ctctcctctccgttaaatccacgcattccg

SEQ ID NO: 383023 - DNA, 30 bp, Artificial Sequence
  Synthetic oligonucleotide
tcggcctaaagaaagtgtggggtgattccg

SEQ ID NO: 383024 - DNA, 30 bp, Artificial Sequence
  Synthetic oligonucleotide
tgatgataccgtagccagaactcgcttccg

SEQ ID NO: 383025 - DNA, 30 bp, Artificial Sequence
  Synthetic oligonucleotide
gcgcggcatcgagtttgaccccatcttccg

SEQ ID NO: 383026 - DNA, 30 bp, Artificial Sequence
  Synthetic oligonucleotide
agaagtcgagaccgccgtccgagtcttccg

SEQ ID NO: 383027 - DNA, 30 bp, Artificial Sequence
  Synthetic oligonucleotide
atcttggcgtccccagtgaacgttcttccg

SEQ ID NO: 383028 - DNA, 30 bp, Artificial Sequence
  Synthetic oligonucleotide
tgacggaccaatggtggctgggtagttccg

SEQ ID NO: 383029 - DNA, 30 bp, Artificial Sequence
  Synthetic oligonucleotide
gcacaggcttttcatttcttgtgcgttccg

SEQ ID NO: 383030 - DNA, 30 bp, Artificial Sequence
  Synthetic oligonucleotide
ttccaaaatgaacggcaatggagggttccg

SEQ ID NO: 383031 - DNA, 30 bp, Artificial Sequence
  Synthetic oligonucleotide
ccgcgctgatagcgctctttaaatgttccg

SEQ ID NO: 383032 - DNA, 30 bp, Artificial Sequence
  Synthetic oligonucleotide
agccgtggagtcagtacccactatgttccg

SEQ ID NO: 383033 - DNA, 30 bp, Artificial Sequence
  Synthetic oligonucleotide
cacgtgtcaaaggaacgaggaattgttccg

SEQ ID NO: 383034 - DNA, 30 bp, Artificial Sequence
  Synthetic oligonucleotide
gagggacttccttacgcctggggatttccg

SEQ ID NO: 383035 - DNA, 30 bp, Artificial Sequence
  Synthetic oligonucleotide
ctcttaggcgcatctaagcgatgatttccg

SEQ ID NO: 383036 - DNA, 30 bp, Artificial Sequence
  Synthetic oligonucleotide
gatttgtacacaccagaaatctgatttccg

SEQ ID NO: 383037 - DNA, 30 bp, Artificial Sequence
  Synthetic oligonucleotide
ataatgcacaacaatcgtcatatatttccg

SEQ ID NO: 383038 - DNA, 30 bp, Artificial Sequence
  Synthetic oligonucleotide
taattaccatagaccagcttagagtttccg

SEQ ID NO: 383039 - DNA, 30 bp, Artificial Sequence
  Synthetic oligonucleotide
ttcatctttaataaagaggaaaattttccg

SEQ ID NO: 383040 - DNA, 30 bp, Artificial Sequence
  Synthetic oligonucleotide
ttgcagtcctttaagtccttccattttccg

SEQ ID NO: 383041 - DNA, 30 bp, Artificial Sequence
  Synthetic oligonucleotide
aacacggtaccgtgtctcggcatttttccg

SEQ ID NO: 383042 - DNA, 30 bp, Artificial Sequence
  Synthetic oligonucleotide
aaaattacttgcggcatactgataaaagcg

SEQ ID NO: 383043 - DNA, 30 bp, Artificial Sequence
  Synthetic oligonucleotide
ggcttttagtggagtaaaggagtaaaagcg

SEQ ID NO: 383044 - DNA, 30 bp, Artificial Sequence
  Synthetic oligonucleotide
gtcacgacgctgagcggtcttaacaaagcg

SEQ ID NO: 383045 - DNA, 30 bp, Artificial Sequence
  Synthetic oligonucleotide
ttgccacgggtattagtaacattgaaagcg

SEQ ID NO: 383046 - DNA, 30 bp, Artificial Sequence
  Synthetic oligonucleotide
ctttagagctgccgcgagtgcagtaaagcg

SEQ ID NO: 383047 - DNA, 30 bp, Artificial Sequence
  Synthetic oligonucleotide
tacgttgcctaacaccggcttagtaaagcg

SEQ ID NO: 383048 - DNA, 30 bp, Artificial Sequence
  Synthetic oligonucleotide
aaaatggctttagaaggtgatcaacaagcg

SEQ ID NO: 383049 - DNA, 30 bp, Artificial Sequence
  Synthetic oligonucleotide
tcggctttacgctcgggcgagagccaagcg

SEQ ID NO: 383050 - DNA, 30 bp, Artificial Sequence
  Synthetic oligonucleotide
tacatgcggaaccgcctgggtgtccaagcg

SEQ ID NO: 383051 - DNA, 30 bp, Artificial Sequence
  Synthetic oligonucleotide
aatcgctttgccacaaaatttaatcaagcg

SEQ ID NO: 383052 - DNA, 30 bp, Artificial Sequence
  Synthetic oligonucleotide
ttcattcgacgaactgatggtcgtcaagcg

SEQ ID NO: 383053 - DNA, 30 bp, Artificial Sequence
  Synthetic oligonucleotide
gtgtgcgcctgcaatcattgatttcaagcg

SEQ ID NO: 383054 - DNA, 30 bp, Artificial Sequence
  Synthetic oligonucleotide
ttggcgttcgtcttgaatgggtaggaagcg

SEQ ID NO: 383055 - DNA, 30 bp, Artificial Sequence
  Synthetic oligonucleotide
gagtagtgggggacacataggcttgaagcg

SEQ ID NO: 383056 - DNA, 30 bp, Artificial Sequence
  Synthetic oligonucleotide
cgcggtcgcataagcccgtagtcataagcg

SEQ ID NO: 383057 - DNA, 30 bp, Artificial Sequence
  Synthetic oligonucleotide
ctgggaccggcccgcagaactagataagcg

SEQ ID NO: 383058 - DNA, 30 bp, Artificial Sequence
  Synthetic oligonucleotide
ttatatcagacctgcctcagtcactaagcg

SEQ ID NO: 383059 - DNA, 30 bp, Artificial Sequence
  Synthetic oligonucleotide
ggcggggtgcagcaggcggcggcctaagcg

SEQ ID NO: 383060 - DNA, 30 bp, Artificial Sequence
  Synthetic oligonucleotide
cactttcgcgggtcttgttgacggtaagcg

SEQ ID NO: 383061 - DNA, 30 bp, Artificial Sequence
  Synthetic oligonucleotide
attaatttatactactaggaagtttaagcg

SEQ ID NO: 383062 - DNA, 30 bp, Artificial Sequence
  Synthetic oligonucleotide
ggggggcttggaggtaggcagaaaacagcg

SEQ ID NO: 383063 - DNA, 30 bp, Artificial Sequence
  Synthetic oligonucleotide
gcccgattcggtcagtaggccacaacagcg

SEQ ID NO: 383064 - DNA, 30 bp, Artificial Sequence
  Synthetic oligonucleotide
gtttatttcccaccaaggacgacaacagcg

SEQ ID NO: 383065 - DNA, 30 bp, Artificial Sequence
  Synthetic oligonucleotide
cctgacggttcgggggtggtcttaacagcg

SEQ ID NO: 383066 - DNA, 30 bp, Artificial Sequence
  Synthetic oligonucleotide
tttcctagatgcacgtccgaaaccacagcg

SEQ ID NO: 383067 - DNA, 30 bp, Artificial Sequence
  Synthetic oligonucleotide
cgactatgaggataataggtcgagacagcg

SEQ ID NO: 383068 - DNA, 30 bp, Artificial Sequence
  Synthetic oligonucleotide
tgttttgtctatacagctgcctggacagcg

SEQ ID NO: 383069 - DNA, 29 bp, Artificial Sequence
  Synthetic oligonucleotide
tattctggttatgccattcgtgtacagcg

SEQ ID NO: 383070 - DNA, 30 bp, Artificial Sequence
  Synthetic oligonucleotide
tactcctaggccgcctagcaattcccagcg

SEQ ID NO: 383071 - DNA, 30 bp, Artificial Sequence
  Synthetic oligonucleotide
catctataatcaatgatatccacggcagcg

SEQ ID NO: 383072 - DNA, 30 bp, Artificial Sequence
  Synthetic oligonucleotide
ttgggtatgtccgcggcagtcagtgcagcg

SEQ ID NO: 383073 - DNA, 30 bp, Artificial Sequence
  Synthetic oligonucleotide
aggccacctctcaggttggagtgtgcagcg

SEQ ID NO: 383074 - DNA, 30 bp, Artificial Sequence
  Synthetic oligonucleotide
attagctgagaatatggctattgatcagcg

SEQ ID NO: 383075 - DNA, 30 bp, Artificial Sequence
  Synthetic oligonucleotide
ccgactagtttcggaacgtaagactcagcg

SEQ ID NO: 383076 - DNA, 30 bp, Artificial Sequence
  Synthetic oligonucleotide
catgcatagggcctgcagcagccgtcagcg

SEQ ID NO: 383077 - DNA, 30 bp, Artificial Sequence
  Synthetic oligonucleotide
tatttcgcatttatcgaaaataattcagcg

SEQ ID NO: 383078 - DNA, 30 bp, Artificial Sequence
  Synthetic oligonucleotide
atgcaatgcgcgctgtgaaggttttcagcg

SEQ ID NO: 383079 - DNA, 30 bp, Artificial Sequence
  Synthetic oligonucleotide
atagctgctcacgtagatggtaaaagagcg

SEQ ID NO: 383080 - DNA, 30 bp, Artificial Sequence
  Synthetic oligonucleotide
aactttgatattacaggattgacgagagcg

SEQ ID NO: 383081 - DNA, 30 bp, Artificial Sequence
  Synthetic oligonucleotide
caaattacacggtgaaccgcctcgagagcg

SEQ ID NO: 383082 - DNA, 30 bp, Artificial Sequence
  Synthetic oligonucleotide
gcttccactcctcgggtgacgtatagagcg

SEQ ID NO: 383083 - DNA, 30 bp, Artificial Sequence
  Synthetic oligonucleotide
gtgggctgagagattttttttgttagagcg

SEQ ID NO: 383084 - DNA, 30 bp, Artificial Sequence
  Synthetic oligonucleotide
aacagcccccgataaaaaactcggcgagcg

SEQ ID NO: 383085 - DNA, 30 bp, Artificial Sequence
  Synthetic oligonucleotide
gtaactggccgacggtgcagatggcgagcg

SEQ ID NO: 383086 - DNA, 30 bp, Artificial Sequence
  Synthetic oligonucleotide
gattccatctagttatggtagattcgagcg

SEQ ID NO: 383087 - DNA, 30 bp, Artificial Sequence
  Synthetic oligonucleotide
tactggacgatgcgccctaagtttcgagcg

SEQ ID NO: 383088 - DNA, 30 bp, Artificial Sequence
  Synthetic oligonucleotide
gattgcggctcgcgagacgtatacggagcg

SEQ ID NO: 383089 - DNA, 30 bp, Artificial Sequence
  Synthetic oligonucleotide
ggaatacagcgaattttcgattacggagcg

SEQ ID NO: 383090 - DNA, 30 bp, Artificial Sequence
  Synthetic oligonucleotide
gtcggggcgtcgcgttttctagccggagcg

SEQ ID NO: 383091 - DNA, 30 bp, Artificial Sequence
  Synthetic oligonucleotide
ctctatccataccgggtatgcgctggagcg

SEQ ID NO: 383092 - DNA, 30 bp, Artificial Sequence
  Synthetic oligonucleotide
gtcggccctttatccgtatgccagtgagcg

SEQ ID NO: 383093 - DNA, 30 bp, Artificial Sequence
  Synthetic oligonucleotide
gaaccgcggagacgggccgtctcgtgagcg

SEQ ID NO: 383094 - DNA, 30 bp, Artificial Sequence
  Synthetic oligonucleotide
gtttatcgaaattctattcgaaattgagcg

SEQ ID NO: 383095 - DNA, 30 bp, Artificial Sequence
  Synthetic oligonucleotide
aagggaatagcgagactcggactttgagcg

SEQ ID NO: 383096 - DNA, 30 bp, Artificial Sequence
  Synthetic oligonucleotide
tgtggctggcgtggcagatgggcgatagcg

SEQ ID NO: 383097 - DNA, 30 bp, Artificial Sequence
  Synthetic oligonucleotide
cttttaattaaacagcggacgactatagcg

SEQ ID NO: 383098 - DNA, 30 bp, Artificial Sequence
  Synthetic oligonucleotide
aacagggagatttttgtttgcagtatagcg

SEQ ID NO: 383099 - DNA, 30 bp, Artificial Sequence
  Synthetic oligonucleotide
ccccgcctaactcggtggactgttatagcg

SEQ ID NO: 383100 - DNA, 30 bp, Artificial Sequence
  Synthetic oligonucleotide
gtacgcttcagaagaaagtattttatagcg

SEQ ID NO: 383101 - DNA, 30 bp, Artificial Sequence
  Synthetic oligonucleotide
gttcgggcccctctgggtcgccacctagcg

SEQ ID NO: 383102 - DNA, 30 bp, Artificial Sequence
  Synthetic oligonucleotide
acccggaagcccatcctggtcgggctagcg

SEQ ID NO: 383103 - DNA, 30 bp, Artificial Sequence
  Synthetic oligonucleotide
gagtatcatgaatattatggggggctagcg

SEQ ID NO: 383104 - DNA, 30 bp, Artificial Sequence
  Synthetic oligonucleotide
gttagtgtagtgcggcgcaaccaagtagcg

SEQ ID NO: 383105 - DNA, 30 bp, Artificial Sequence
  Synthetic oligonucleotide
ttaaaaaggacaagatcctttttagtagcg

SEQ ID NO: 383106 - DNA, 30 bp, Artificial Sequence
  Synthetic oligonucleotide
tgcggtggcattctcgtttgcctggtagcg

SEQ ID NO: 383107 - DNA, 30 bp, Artificial Sequence
  Synthetic oligonucleotide
tgaaactttgccattaaactatttgtagcg

SEQ ID NO: 383108 - DNA, 30 bp, Artificial Sequence
  Synthetic oligonucleotide
tatctggaatcctttatacttcaattagcg

SEQ ID NO: 383109 - DNA, 30 bp, Artificial Sequence
  Synthetic oligonucleotide
accggatcgtctcacggcctgtaattagcg

SEQ ID NO: 383110 - DNA, 30 bp, Artificial Sequence
  Synthetic oligonucleotide
ggcttggtatagtcgctactcgccttagcg

SEQ ID NO: 383111 - DNA, 30 bp, Artificial Sequence
  Synthetic oligonucleotide
tcaagtaaattatcccatgctcgcttagcg

SEQ ID NO: 383112 - DNA, 30 bp, Artificial Sequence
  Synthetic oligonucleotide
tcgtactttaagccttccgctggcttagcg

SEQ ID NO: 383113 - DNA, 30 bp, Artificial Sequence
  Synthetic oligonucleotide
acccatatggaccctgtatgagctttagcg

SEQ ID NO: 383114 - DNA, 30 bp, Artificial Sequence
  Synthetic oligonucleotide
gaatccgatacgattttgcagaaaaacgcg

SEQ ID NO: 383115 - DNA, 30 bp, Artificial Sequence
  Synthetic oligonucleotide
ttcagtcccagtcctacgcgccgaaacgcg

SEQ ID NO: 383116 - DNA, 30 bp, Artificial Sequence
  Synthetic oligonucleotide
aatacatcgtgtaagggtctgggaaacgcg

SEQ ID NO: 383117 - DNA, 30 bp, Artificial Sequence
  Synthetic oligonucleotide
aaatgaaaccgtgctgggcccttaaacgcg

SEQ ID NO: 383118 - DNA, 30 bp, Artificial Sequence
  Synthetic oligonucleotide
gccagcccgaatctcgttacatagaacgcg

SEQ ID NO: 383119 - DNA, 30 bp, Artificial Sequence
  Synthetic oligonucleotide
gtgcacaagcagagtctattaccgaacgcg

SEQ ID NO: 383120 - DNA, 30 bp, Artificial Sequence
  Synthetic oligonucleotide
tcttttacgcaccctgcgagagaacacgcg

SEQ ID NO: 383121 - DNA, 30 bp, Artificial Sequence
  Synthetic oligonucleotide
attatcactagccaccgttgcgcacacgcg

SEQ ID NO: 383122 - DNA, 30 bp, Artificial Sequence
  Synthetic oligonucleotide
attcacggttactaaaaggtgagacacgcg

SEQ ID NO: 383123 - DNA, 30 bp, Artificial Sequence
  Synthetic oligonucleotide
tgcctaggccttgtcgcgtccggccacgcg

SEQ ID NO: 383124 - DNA, 30 bp, Artificial Sequence
  Synthetic oligonucleotide
agccaaagttaaagtacaatgctccacgcg

SEQ ID NO: 383125 - DNA, 30 bp, Artificial Sequence
  Synthetic oligonucleotide
gatatgcgttcgcaagtatggcttcacgcg

SEQ ID NO: 383126 - DNA, 30 bp, Artificial Sequence
  Synthetic oligonucleotide
ctgacttctaccagatgcctacacgacgcg

SEQ ID NO: 383127 - DNA, 30 bp, Artificial Sequence
  Synthetic oligonucleotide
atctctaactgtaatgtctagtccgacgcg

SEQ ID NO: 383128 - DNA, 30 bp, Artificial Sequence
  Synthetic oligonucleotide
caactaagaagtagtgataaaaaggacgcg

SEQ ID NO: 383129 - DNA, 30 bp, Artificial Sequence
  Synthetic oligonucleotide
tccggcgtgcacaacgaaattaaggacgcg

SEQ ID NO: 383130 - DNA, 30 bp, Artificial Sequence
  Synthetic oligonucleotide
tagattgctcattggcggctaacggacgcg

SEQ ID NO: 383131 - DNA, 30 bp, Artificial Sequence
  Synthetic oligonucleotide
agttaaaaatcacaattcacgggggacgcg

SEQ ID NO: 383132 - DNA, 30 bp, Artificial Sequence
  Synthetic oligonucleotide
ccctgtaaataacgagttacgcatgacgcg

SEQ ID NO: 383133 - DNA, 30 bp, Artificial Sequence
  Synthetic oligonucleotide
attgtgatcgttggttatgcttctgacgcg

SEQ ID NO: 383134 - DNA, 30 bp, Artificial Sequence
  Synthetic oligonucleotide
atcgggcactgctggatacgatgatacgcg

SEQ ID NO: 383135 - DNA, 30 bp, Artificial Sequence
  Synthetic oligonucleotide
actcgactcgaatagtaagacttgtacgcg

SEQ ID NO: 383136 - DNA, 30 bp, Artificial Sequence
  Synthetic oligonucleotide
gtcaaggtgccccatagtcgttattacgcg

SEQ ID NO: 383137 - DNA, 30 bp, Artificial Sequence
  Synthetic oligonucleotide
gttatactcaccggtgggtgagaaaccgcg

SEQ ID NO: 383138 - DNA, 30 bp, Artificial Sequence
  Synthetic oligonucleotide
aggctggctaaaggggacaacccaaccgcg

SEQ ID NO: 383139 - DNA, 30 bp, Artificial Sequence
  Synthetic oligonucleotide
gcattatcttgtattgatagcgcaaccgcg

SEQ ID NO: 383140 - DNA, 30 bp, Artificial Sequence
  Synthetic oligonucleotide
aaggcgcagattaagggtggggccaccgcg

SEQ ID NO: 383141 - DNA, 30 bp, Artificial Sequence
  Synthetic oligonucleotide
tcatcgaagtaaagtccaaaattgaccgcg

SEQ ID NO: 383142 - DNA, 30 bp, Artificial Sequence
  Synthetic oligonucleotide
ttgcaggggcttttagctatgtataccgcg

SEQ ID NO: 383143 - DNA, 30 bp, Artificial Sequence
  Synthetic oligonucleotide
cggagaacgtagtgctcggatcggcccgcg

SEQ ID NO: 383144 - DNA, 30 bp, Artificial Sequence
  Synthetic oligonucleotide
gtaggccgtggcctctgggtacgagccgcg

SEQ ID NO: 383145 - DNA, 30 bp, Artificial Sequence
  Synthetic oligonucleotide
accctcgttttcaatatggcttgagccgcg

SEQ ID NO: 383146 - DNA, 30 bp, Artificial Sequence
  Synthetic oligonucleotide
accgtggtcttacaaaggcacaacgccgcg

SEQ ID NO: 383147 - DNA, 30 bp, Artificial Sequence
  Synthetic oligonucleotide
gtcagccgttgctcgcaagctcacgccgcg

SEQ ID NO: 383148 - DNA, 30 bp, Artificial Sequence
  Synthetic oligonucleotide
gtcacccggtaacgactccaaaccgccgcg

SEQ ID NO: 383149 - DNA, 30 bp, Artificial Sequence
  Synthetic oligonucleotide
agcttagggttataaaattctaaggccgcg

SEQ ID NO: 383150 - DNA, 30 bp, Artificial Sequence
  Synthetic oligonucleotide
tcgctgatcacgtagttatgggaggccgcg

SEQ ID NO: 383151 - DNA, 30 bp, Artificial Sequence
  Synthetic oligonucleotide
tgttaagtgcggctcaacatgttggccgcg

SEQ ID NO: 383152 - DNA, 30 bp, Artificial Sequence
  Synthetic oligonucleotide
attgttggagtgtgtaacctagctgccgcg

SEQ ID NO: 383153 - DNA, 30 bp, Artificial Sequence
  Synthetic oligonucleotide
ggaggtaatgttgacacgatggtctccgcg

SEQ ID NO: 383154 - DNA, 30 bp, Artificial Sequence
  Synthetic oligonucleotide
tgacgggcccgccaaccagacaagtccgcg

SEQ ID NO: 383155 - DNA, 30 bp, Artificial Sequence
  Synthetic oligonucleotide
ctgacagtatgcagtaggtcgtagtccgcg

SEQ ID NO: 383156 - DNA, 30 bp, Artificial Sequence
  Synthetic oligonucleotide
cccagcccatggtgactcacggtaagcgcg

SEQ ID NO: 383157 - DNA, 30 bp, Artificial Sequence
  Synthetic oligonucleotide
ctatacaatcataaatggttttgcagcgcg

SEQ ID NO: 383158 - DNA, 30 bp, Artificial Sequence
  Synthetic oligonucleotide
atctgatgttctgatttgcgttcgagcgcg

SEQ ID NO: 383159 - DNA, 30 bp, Artificial Sequence
  Synthetic oligonucleotide
attccaacggagagtttaccgtctagcgcg

SEQ ID NO: 383160 - DNA, 30 bp, Artificial Sequence
  Synthetic oligonucleotide
atcttcacgaaaaagagcttggcacgcgcg

SEQ ID NO: 383161 - DNA, 30 bp, Artificial Sequence
  Synthetic oligonucleotide
ccctgtacgtgaagggggctttaccgcgcg

SEQ ID NO: 383162 - DNA, 30 bp, Artificial Sequence
  Synthetic oligonucleotide
tttagtttgcaccggacccactgtcgcgcg

SEQ ID NO: 383163 - DNA, 30 bp, Artificial Sequence
  Synthetic oligonucleotide
gttgattgaggccggacgaaggttcgcgcg

SEQ ID NO: 383164 - DNA, 30 bp, Artificial Sequence
  Synthetic oligonucleotide
gtcgaggaaaagtgcataatggcaggcgcg

SEQ ID NO: 383165 - DNA, 30 bp, Artificial Sequence
  Synthetic oligonucleotide
cagtcccggacgcgcgatcattccggcgcg

SEQ ID NO: 383166 - DNA, 30 bp, Artificial Sequence
  Synthetic oligonucleotide
tagaggttggaccgccgcgcatatggcgcg

SEQ ID NO: 383167 - DNA, 30 bp, Artificial Sequence
  Synthetic oligonucleotide
aacaactaatcaattatgagctctggcgcg

SEQ ID NO: 383168 - DNA, 30 bp, Artificial Sequence
  Synthetic oligonucleotide
acgcggagcaggcttgttatgtctggcgcg

SEQ ID NO: 383169 - DNA, 30 bp, Artificial Sequence
  Synthetic oligonucleotide
ccataggcagtagacgcgacgggtggcgcg

SEQ ID NO: 383170 - DNA, 30 bp, Artificial Sequence
  Synthetic oligonucleotide
cactcccatcgggttaagtgggaatgcgcg

SEQ ID NO: 383171 - DNA, 30 bp, Artificial Sequence
  Synthetic oligonucleotide
accagatcgttgtgtttaaatagatgcgcg

SEQ ID NO: 383172 - DNA, 30 bp, Artificial Sequence
  Synthetic oligonucleotide
cgactaagcgcagcagaggagcactgcgcg

SEQ ID NO: 383173 - DNA, 30 bp, Artificial Sequence
  Synthetic oligonucleotide
ccagtccatagcttatttgtcttctgcgcg

SEQ ID NO: 383174 - DNA, 30 bp, Artificial Sequence
  Synthetic oligonucleotide
tcactggatatcgaagggtcttgcatcgcg

SEQ ID NO: 383175 - DNA, 30 bp, Artificial Sequence
  Synthetic oligonucleotide
gtatgggaataatgtctctgtgccctcgcg

SEQ ID NO: 383176 - DNA, 30 bp, Artificial Sequence
  Synthetic oligonucleotide
ccataggtactcgtgttcccattcctcgcg

SEQ ID NO: 383177 - DNA, 30 bp, Artificial Sequence
  Synthetic oligonucleotide
gaacctggtgggcgcgttcttgagctcgcg

SEQ ID NO: 383178 - DNA, 30 bp, Artificial Sequence
  Synthetic oligonucleotide
gtaaacgccccccagcttagttgtctcgcg

SEQ ID NO: 383179 - DNA, 30 bp, Artificial Sequence
  Synthetic oligonucleotide
gctgtgatcgtatgtccgaatcccgtcgcg

SEQ ID NO: 383180 - DNA, 30 bp, Artificial Sequence
  Synthetic oligonucleotide
gcccactaggccttgctcatgtaggtcgcg

SEQ ID NO: 383181 - DNA, 30 bp, Artificial Sequence
  Synthetic oligonucleotide
tatacggagtactaagttattcgattcgcg

SEQ ID NO: 383182 - DNA, 30 bp, Artificial Sequence
  Synthetic oligonucleotide
gggataatctgtttcagcattttattcgcg

SEQ ID NO: 383183 - DNA, 30 bp, Artificial Sequence
  Synthetic oligonucleotide
ggaagtctgttaagtatagaaagtttcgcg

SEQ ID NO: 383184 - DNA, 30 bp, Artificial Sequence
  Synthetic oligonucleotide
gcgatgaggaggttcgttttatgtttcgcg

SEQ ID NO: 383185 - DNA, 30 bp, Artificial Sequence
  Synthetic oligonucleotide
gcatcccttcacgacctgagaataaaggcg

SEQ ID NO: 383186 - DNA, 30 bp, Artificial Sequence
  Synthetic oligonucleotide
tttctatctttccttaacctgatcaaggcg

SEQ ID NO: 383187 - DNA, 30 bp, Artificial Sequence
  Synthetic oligonucleotide
gatgatttcaggagttagggaaggaaggcg

SEQ ID NO: 383188 - DNA, 30 bp, Artificial Sequence
  Synthetic oligonucleotide
cctacttttccggttgacgtggataaggcg

SEQ ID NO: 383189 - DNA, 30 bp, Artificial Sequence
  Synthetic oligonucleotide
gtaggcgatgtcatttcaaggtctaaggcg

SEQ ID NO: 383190 - DNA, 30 bp, Artificial Sequence
  Synthetic oligonucleotide
atcggtgagtcttggagaatacgtaaggcg

SEQ ID NO: 383191 - DNA, 30 bp, Artificial Sequence
  Synthetic oligonucleotide
tctatttcgttagttacaaggggtaaggcg

SEQ ID NO: 383192 - DNA, 30 bp, Artificial Sequence
  Synthetic oligonucleotide
gcagctttaggtgcttagctaattaaggcg

SEQ ID NO: 383193 - DNA, 30 bp, Artificial Sequence
  Synthetic oligonucleotide
tgatgggatcagatcaaatggtaacaggcg

SEQ ID NO: 383194 - DNA, 30 bp, Artificial Sequence
  Synthetic oligonucleotide
ctttgagctgctcatacgccccggcaggcg

SEQ ID NO: 383195 - DNA, 30 bp, Artificial Sequence
  Synthetic oligonucleotide
aggacaccgttagaagccgtgatgcaggcg

SEQ ID NO: 383196 - DNA, 30 bp, Artificial Sequence
  Synthetic oligonucleotide
aatgcacgtagcagagagaaactgcaggcg

SEQ ID NO: 383197 - DNA, 30 bp, Artificial Sequence
  Synthetic oligonucleotide
gaaaacaacacgtaaccaagcctgcaggcg

SEQ ID NO: 383198 - DNA, 30 bp, Artificial Sequence
  Synthetic oligonucleotide
gttacgaacagccatagatccgctcaggcg

SEQ ID NO: 383199 - DNA, 30 bp, Artificial Sequence
  Synthetic oligonucleotide
taactgatttgtgacccggctagtcaggcg

SEQ ID NO: 383200 - DNA, 30 bp, Artificial Sequence
  Synthetic oligonucleotide
tggacttattagtagttagggggtcaggcg

SEQ ID NO: 383201 - DNA, 30 bp, Artificial Sequence
  Synthetic oligonucleotide
agcgaagcaatgaatcaggtaattcaggcg

SEQ ID NO: 383202 - DNA, 30 bp, Artificial Sequence
  Synthetic oligonucleotide
tagcgcagtgcggtaccagtggtagaggcg

SEQ ID NO: 383203 - DNA, 30 bp, Artificial Sequence
  Synthetic oligonucleotide
gcgtctcgcttaaactgcgaggacgaggcg

SEQ ID NO: 383204 - DNA, 30 bp, Artificial Sequence
  Synthetic oligonucleotide
gcttcttagtgcctgcaagctttcgaggcg

SEQ ID NO: 383205 - DNA, 30 bp, Artificial Sequence
  Synthetic oligonucleotide
ttaggccacggagagctggttggggaggcg

SEQ ID NO: 383206 - DNA, 30 bp, Artificial Sequence
  Synthetic oligonucleotide
acgccggaaattaaatatcagattgaggcg

SEQ ID NO: 383207 - DNA, 30 bp, Artificial Sequence
  Synthetic oligonucleotide
ttacgagtgccttccaacctgattgaggcg

SEQ ID NO: 383208 - DNA, 30 bp, Artificial Sequence
  Synthetic oligonucleotide
tttgacgcataatcgcatcaagactaggcg

SEQ ID NO: 383209 - DNA, 30 bp, Artificial Sequence
  Synthetic oligonucleotide
atgtttcagggattatatgcaatgtaggcg

SEQ ID NO: 383210 - DNA, 30 bp, Artificial Sequence
  Synthetic oligonucleotide
cccaaccatggtatctaactattgtaggcg

SEQ ID NO: 383211 - DNA, 30 bp, Artificial Sequence
  Synthetic oligonucleotide
ggatcgggagcatgtgtactacgttaggcg

SEQ ID NO: 383212 - DNA, 31 bp, Artificial Sequence
  Synthetic oligonucleotide
gattagatatacagtagacgaagccacggcg

SEQ ID NO: 383213 - DNA, 30 bp, Artificial Sequence
  Synthetic oligonucleotide
ttttccaagggtcgggaccactgcacggcg

SEQ ID NO: 383214 - DNA, 30 bp, Artificial Sequence
  Synthetic oligonucleotide
ggctagaacctcaatgtggtttagacggcg

SEQ ID NO: 383215 - DNA, 30 bp, Artificial Sequence
  Synthetic oligonucleotide
gatcaagaaatgagactcttaatgacggcg

SEQ ID NO: 383216 - DNA, 30 bp, Artificial Sequence
  Synthetic oligonucleotide
taaatctctgactagtggcacacaccggcg

SEQ ID NO: 383217 - DNA, 31 bp, Artificial Sequence
  Synthetic oligonucleotide
ctctcttcgcagattaggagcgtcaccggcg

SEQ ID NO: 383218 - DNA, 30 bp, Artificial Sequence
  Synthetic oligonucleotide
tacaatcgaacctactgtcgcaccccggcg

SEQ ID NO: 383219 - DNA, 30 bp, Artificial Sequence
  Synthetic oligonucleotide
tccactgtggacggcatggaacgcccggcg

SEQ ID NO: 383220 - DNA, 30 bp, Artificial Sequence
  Synthetic oligonucleotide
gatcttcatccagttgcggaacggccggcg

SEQ ID NO: 383221 - DNA, 30 bp, Artificial Sequence
  Synthetic oligonucleotide
attcccttaaaaccgtcgtggcatccggcg

SEQ ID NO: 383222 - DNA, 30 bp, Artificial Sequence
  Synthetic oligonucleotide
ggcgtagatatagcgcagtcgactccggcg

SEQ ID NO: 383223 - DNA, 30 bp, Artificial Sequence
  Synthetic oligonucleotide
ggccgatggttggttatagatgctccggcg

SEQ ID NO: 383224 - DNA, 30 bp, Artificial Sequence
  Synthetic oligonucleotide
ttaagagccgacatgttgcacggtccggcg

SEQ ID NO: 383225 - DNA, 29 bp, Artificial Sequence
  Synthetic oligonucleotide
tgtcaacgaactctgttgtattagcggcg

SEQ ID NO: 383226 - DNA, 30 bp, Artificial Sequence
  Synthetic oligonucleotide
aatcactacgggcaagccaaactggcggcg

SEQ ID NO: 383227 - DNA, 30 bp, Artificial Sequence
  Synthetic oligonucleotide
tccgttaaggatgcgcgcgatgtggcggcg

SEQ ID NO: 383228 - DNA, 30 bp, Artificial Sequence
  Synthetic oligonucleotide
attcgaagttccgactgttccaatgcggcg

SEQ ID NO: 383229 - DNA, 30 bp, Artificial Sequence
  Synthetic oligonucleotide
aatctcgggaaatgttggttttgatcggcg

SEQ ID NO: 383230 - DNA, 30 bp, Artificial Sequence
  Synthetic oligonucleotide
agctactagaacgagctgggtttatcggcg

SEQ ID NO: 383231 - DNA, 30 bp, Artificial Sequence
  Synthetic oligonucleotide
aacagataataaggacgaacgtactcggcg

SEQ ID NO: 383232 - DNA, 30 bp, Artificial Sequence
  Synthetic oligonucleotide
atgcgttggggggtcacaggggcctcggcg

SEQ ID NO: 383233 - DNA, 30 bp, Artificial Sequence
  Synthetic oligonucleotide
ggtagtcgctccttgccagtccggtcggcg

SEQ ID NO: 383234 - DNA, 30 bp, Artificial Sequence
  Synthetic oligonucleotide
gtgttcgttccaccaggtcgtaattcggcg

SEQ ID NO: 383235 - DNA, 30 bp, Artificial Sequence
  Synthetic oligonucleotide
cccggttagagcatgtaacgcatttcggcg

SEQ ID NO: 383236 - DNA, 30 bp, Artificial Sequence
  Synthetic oligonucleotide
acgtggcactacgaagataacttttcggcg

SEQ ID NO: 383237 - DNA, 30 bp, Artificial Sequence
  Synthetic oligonucleotide
gcgcagcaatgggcatgcgcctcaagggcg

SEQ ID NO: 383238 - DNA, 30 bp, Artificial Sequence
  Synthetic oligonucleotide
ttctcgcctaataacgttaacataagggcg

SEQ ID NO: 383239 - DNA, 30 bp, Artificial Sequence
  Synthetic oligonucleotide
ctctgctattgtcttacaacacacagggcg

SEQ ID NO: 383240 - DNA, 30 bp, Artificial Sequence
  Synthetic oligonucleotide
gggatcggagcctcactggtggtgagggcg

SEQ ID NO: 383241 - DNA, 30 bp, Artificial Sequence
  Synthetic oligonucleotide
ttgtggagatcaacagactaacatagggcg

SEQ ID NO: 383242 - DNA, 30 bp, Artificial Sequence
  Synthetic oligonucleotide
tgggtatattggggagtcgaccatagggcg

SEQ ID NO: 383243 - DNA, 30 bp, Artificial Sequence
  Synthetic oligonucleotide
gacacggccccctcctgccgtcatagggcg

SEQ ID NO: 383244 - DNA, 30 bp, Artificial Sequence
  Synthetic oligonucleotide
aagggttgagaagtgaagttttatagggcg

SEQ ID NO: 383245 - DNA, 29 bp, Artificial Sequence
  Synthetic oligonucleotide
tccccgtgggggtactattctctagggcg

SEQ ID NO: 383246 - DNA, 30 bp, Artificial Sequence
  Synthetic oligonucleotide
ttcttatcatgtgaagaccttcaccgggcg

SEQ ID NO: 383247 - DNA, 30 bp, Artificial Sequence
  Synthetic oligonucleotide
tagaaaaaggcagtaaatgttctccgggcg

SEQ ID NO: 383248 - DNA, 30 bp, Artificial Sequence
  Synthetic oligonucleotide
caaatgtagttccaatctccggagcgggcg

SEQ ID NO: 383249 - DNA, 30 bp, Artificial Sequence
  Synthetic oligonucleotide
acagggttttacctagtggctttgcgggcg

SEQ ID NO: 383250 - DNA, 30 bp, Artificial Sequence
  Synthetic oligonucleotide
atttcagaactcggcagtcggcctcgggcg

SEQ ID NO: 383251 - DNA, 30 bp, Artificial Sequence
  Synthetic oligonucleotide
cagtctgtttatctgtcaacggtcggggcg

SEQ ID NO: 383252 - DNA, 30 bp, Artificial Sequence
  Synthetic oligonucleotide
ttcatcacgtcacacttttctaagggggcg

SEQ ID NO: 383253 - DNA, 30 bp, Artificial Sequence
  Synthetic oligonucleotide
tagccgaccttcaaggagagtcctggggcg

SEQ ID NO: 383254 - DNA, 30 bp, Artificial Sequence
  Synthetic oligonucleotide
gcagactcttggacactccaagaatgggcg

SEQ ID NO: 383255 - DNA, 30 bp, Artificial Sequence
  Synthetic oligonucleotide
gcggtgcccaaccccgggtttagatgggcg

SEQ ID NO: 383256 - DNA, 30 bp, Artificial Sequence
  Synthetic oligonucleotide
aagtgacatgttaaattcaacagctgggcg

SEQ ID NO: 383257 - DNA, 30 bp, Artificial Sequence
  Synthetic oligonucleotide
gattatatctagcacctccctacgtgggcg

SEQ ID NO: 383258 - DNA, 30 bp, Artificial Sequence
  Synthetic oligonucleotide
cgcctttaggatatcatcactccgtgggcg

SEQ ID NO: 383259 - DNA, 31 bp, Artificial Sequence
  Synthetic oligonucleotide
gggtagcacaaagcctttcgtgaattgggcg

SEQ ID NO: 383260 - DNA, 30 bp, Artificial Sequence
  Synthetic oligonucleotide
cggtagctacccaaatcaggcctgatggcg

SEQ ID NO: 383261 - DNA, 30 bp, Artificial Sequence
  Synthetic oligonucleotide
ggttgtgaacccttcagagagttgatggcg

SEQ ID NO: 383262 - DNA, 30 bp, Artificial Sequence
  Synthetic oligonucleotide
ctgaccaaatttacctttcgcactatggcg

SEQ ID NO: 383263 - DNA, 30 bp, Artificial Sequence
  Synthetic oligonucleotide
aaaaagatttgaacgggaatgattatggcg

SEQ ID NO: 383264 - DNA, 30 bp, Artificial Sequence
  Synthetic oligonucleotide
atagttgatacgcgtatcactggactggcg

SEQ ID NO: 383265 - DNA, 30 bp, Artificial Sequence
  Synthetic oligonucleotide
tctcagcttgacggcaatcatttcctggcg

SEQ ID NO: 383266 - DNA, 30 bp, Artificial Sequence
  Synthetic oligonucleotide
ccactaacgatgacgtccaaaccgctggcg

SEQ ID NO: 383267 - DNA, 30 bp, Artificial Sequence
  Synthetic oligonucleotide
tcagtatccagggttactacaagtctggcg

SEQ ID NO: 383268 - DNA, 30 bp, Artificial Sequence
  Synthetic oligonucleotide
atatacatccaggcgggggtatgagtggcg

SEQ ID NO: 383269 - DNA, 30 bp, Artificial Sequence
  Synthetic oligonucleotide
cggtgtccaagttcgaggaaagtagtggcg

SEQ ID NO: 383270 - DNA, 30 bp, Artificial Sequence
  Synthetic oligonucleotide
agatgtaacgcagttggcctaaaggtggcg

SEQ ID NO: 383271 - DNA, 30 bp, Artificial Sequence
  Synthetic oligonucleotide
ttcctttcacgagaacgcagttaggtggcg

SEQ ID NO: 383272 - DNA, 30 bp, Artificial Sequence
  Synthetic oligonucleotide
aattcagatgttaattaaacgagggtggcg

SEQ ID NO: 383273 - DNA, 30 bp, Artificial Sequence
  Synthetic oligonucleotide
cgaggggctttctggagcaacatcttggcg

SEQ ID NO: 383274 - DNA, 30 bp, Artificial Sequence
  Synthetic oligonucleotide
agttccaagcgtacacagtggccgttggcg

SEQ ID NO: 383275 - DNA, 30 bp, Artificial Sequence
  Synthetic oligonucleotide
gtaacttacggtttcttggggagaaatgcg

SEQ ID NO: 383276 - DNA, 30 bp, Artificial Sequence
  Synthetic oligonucleotide
tattggaatggatgggcgcatcgaaatgcg

SEQ ID NO: 383277 - DNA, 30 bp, Artificial Sequence
  Synthetic oligonucleotide
tcttttacaactaccgttaagaacaatgcg

SEQ ID NO: 383278 - DNA, 30 bp, Artificial Sequence
  Synthetic oligonucleotide
accgtcccatcccaagtgacggccaatgcg

SEQ ID NO: 383279 - DNA, 30 bp, Artificial Sequence
  Synthetic oligonucleotide
actccacagggatagcgttctgcgaatgcg

SEQ ID NO: 383280 - DNA, 30 bp, Artificial Sequence
  Synthetic oligonucleotide
gggatgtattaatataaaactagtaatgcg

SEQ ID NO: 383281 - DNA, 30 bp, Artificial Sequence
  Synthetic oligonucleotide
acaacccgttcgggtgtgcgcggtaatgcg

SEQ ID NO: 383282 - DNA, 30 bp, Artificial Sequence
  Synthetic oligonucleotide
aacgtcatcgcccccacagcatgtaatgcg

SEQ ID NO: 383283 - DNA, 30 bp, Artificial Sequence
  Synthetic oligonucleotide
cacctacatagaacgcctactacacatgcg

SEQ ID NO: 383284 - DNA, 30 bp, Artificial Sequence
  Synthetic oligonucleotide
aaaactggcaagtccattaatccacatgcg

SEQ ID NO: 383285 - DNA, 30 bp, Artificial Sequence
  Synthetic oligonucleotide
tgtggtgaatacactctcccacgacatgcg

SEQ ID NO: 383286 - DNA, 30 bp, Artificial Sequence
  Synthetic oligonucleotide
aactggaactcggttcagttacagcatgcg

SEQ ID NO: 383287 - DNA, 30 bp, Artificial Sequence
  Synthetic oligonucleotide
tggttgcagagaagcggtgcaagtcatgcg

SEQ ID NO: 383288 - DNA, 30 bp, Artificial Sequence
  Synthetic oligonucleotide
ggcggctcgacttctaataggagcgatgcg

SEQ ID NO: 383289 - DNA, 30 bp, Artificial Sequence
  Synthetic oligonucleotide
catcctaatgaccatcgtagtcgcgatgcg

SEQ ID NO: 383290 - DNA, 30 bp, Artificial Sequence
  Synthetic oligonucleotide
gtgagtcggtttgctcatacgtgcgatgcg

SEQ ID NO: 383291 - DNA, 30 bp, Artificial Sequence
  Synthetic oligonucleotide
ttttcatccttcgtacaaagagtggatgcg

SEQ ID NO: 383292 - DNA, 30 bp, Artificial Sequence
  Synthetic oligonucleotide
gcgccctttgctataagagaacttgatgcg

SEQ ID NO: 383293 - DNA, 30 bp, Artificial Sequence
  Synthetic oligonucleotide
tggcacgcaaatagtacttttaagtatgcg

SEQ ID NO: 383294 - DNA, 30 bp, Artificial Sequence
  Synthetic oligonucleotide
aggattggcaggtggtacctatagtatgcg

SEQ ID NO: 383295 - DNA, 30 bp, Artificial Sequence
  Synthetic oligonucleotide
ttgtaccgggcccggcctttggcgtatgcg

SEQ ID NO: 383296 - DNA, 30 bp, Artificial Sequence
  Synthetic oligonucleotide
acacctggagtctcttgctcttggtatgcg

SEQ ID NO: 383297 - DNA, 30 bp, Artificial Sequence
  Synthetic oligonucleotide
gattgggcaatctagagcttgggttatgcg

SEQ ID NO: 383298 - DNA, 30 bp, Artificial Sequence
  Synthetic oligonucleotide
tgggaagttatgaaacgttgcatttatgcg

SEQ ID NO: 383299 - DNA, 30 bp, Artificial Sequence
  Synthetic oligonucleotide
aactgtagtttcaagtcgatagtttatgcg

SEQ ID NO: 383300 - DNA, 30 bp, Artificial Sequence
  Synthetic oligonucleotide
caccgttggtctggcctccagttaactgcg

SEQ ID NO: 383301 - DNA, 30 bp, Artificial Sequence
  Synthetic oligonucleotide
taattgtaatgttttaagcgctccactgcg

SEQ ID NO: 383302 - DNA, 30 bp, Artificial Sequence
  Synthetic oligonucleotide
aaatggtcatgccgggggtatatcactgcg

SEQ ID NO: 383303 - DNA, 30 bp, Artificial Sequence
  Synthetic oligonucleotide
ttacgacgccaaacccgccgatagactgcg

SEQ ID NO: 383304 - DNA, 30 bp, Artificial Sequence
  Synthetic oligonucleotide
tgactttcccgaggcaggatcaggactgcg

SEQ ID NO: 383305 - DNA, 30 bp, Artificial Sequence
  Synthetic oligonucleotide
ctgaagtgccacacatgtcaattgactgcg

SEQ ID NO: 383306 - DNA, 30 bp, Artificial Sequence
  Synthetic oligonucleotide
gtcagagctgcgaatgtccatttgactgcg

SEQ ID NO: 383307 - DNA, 30 bp, Artificial Sequence
  Synthetic oligonucleotide
cctcaaggtcttacggtgagtagacctgcg

SEQ ID NO: 383308 - DNA, 30 bp, Artificial Sequence
  Synthetic oligonucleotide
gtgttcggggttacggctgaggcgcctgcg

SEQ ID NO: 383309 - DNA, 30 bp, Artificial Sequence
  Synthetic oligonucleotide
gccgcgggggagggttacgcccggcctgcg

SEQ ID NO: 383310 - DNA, 30 bp, Artificial Sequence
  Synthetic oligonucleotide
acctgcagacaaggatcacactgtcctgcg

SEQ ID NO: 383311 - DNA, 30 bp, Artificial Sequence
  Synthetic oligonucleotide
acagtttgctgtgctggttgcaaagctgcg

SEQ ID NO: 383312 - DNA, 30 bp, Artificial Sequence
  Synthetic oligonucleotide
gcagatacgtttcagggaccacaagctgcg

SEQ ID NO: 383313 - DNA, 30 bp, Artificial Sequence
  Synthetic oligonucleotide
gtcatttttaagaaagatgaactcgctgcg

SEQ ID NO: 383314 - DNA, 30 bp, Artificial Sequence
  Synthetic oligonucleotide
cgggagccgtgtgtatggttattggctgcg

SEQ ID NO: 383315 - DNA, 30 bp, Artificial Sequence
  Synthetic oligonucleotide
cccgtatctgctcgggtgcagaatgctgcg

SEQ ID NO: 383316 - DNA, 30 bp, Artificial Sequence
  Synthetic oligonucleotide
gcgaaccacgcaagcgggtcagcctctgcg

SEQ ID NO: 383317 - DNA, 30 bp, Artificial Sequence
  Synthetic oligonucleotide
tatgttaatgtgactcacttggtctctgcg

SEQ ID NO: 383318 - DNA, 30 bp, Artificial Sequence
  Synthetic oligonucleotide
cggggttcgctagaatatgaatggtctgcg

SEQ ID NO: 383319 - DNA, 30 bp, Artificial Sequence
  Synthetic oligonucleotide
tccccacatctaaggcacattagaagtgcg

SEQ ID NO: 383320 - DNA, 30 bp, Artificial Sequence
  Synthetic oligonucleotide
gtggctgaccagttgaaaatacgcagtgcg

SEQ ID NO: 383321 - DNA, 30 bp, Artificial Sequence
  Synthetic oligonucleotide
agaacatgcagcagctcttcaaagagtgcg

SEQ ID NO: 383322 - DNA, 30 bp, Artificial Sequence
  Synthetic oligonucleotide
ttattggtacaaagcgggttctagagtgcg

SEQ ID NO: 383323 - DNA, 30 bp, Artificial Sequence
  Synthetic oligonucleotide
atggccccataaggccgtagattgagtgcg

SEQ ID NO: 383324 - DNA, 30 bp, Artificial Sequence
  Synthetic oligonucleotide
tagaggtgacactgcaatcattttagtgcg

SEQ ID NO: 383325 - DNA, 30 bp, Artificial Sequence
  Synthetic oligonucleotide
gcatctggatgagctagtaaaaggcgtgcg

SEQ ID NO: 383326 - DNA, 30 bp, Artificial Sequence
  Synthetic oligonucleotide
atctttcagtcgatgtcacacttgcgtgcg

SEQ ID NO: 383327 - DNA, 30 bp, Artificial Sequence
  Synthetic oligonucleotide
agcctagggttgtcgctctaatttcgtgcg

SEQ ID NO: 383328 - DNA, 30 bp, Artificial Sequence
  Synthetic oligonucleotide
tgccccctttaggaggttccgcacggtgcg

SEQ ID NO: 383329 - DNA, 30 bp, Artificial Sequence
  Synthetic oligonucleotide
ctttattacaatgtgtgaaccaccggtgcg

SEQ ID NO: 383330 - DNA, 30 bp, Artificial Sequence
  Synthetic oligonucleotide
ccccttcacaccacccccccaacgggtgcg

SEQ ID NO: 383331 - DNA, 30 bp, Artificial Sequence
  Synthetic oligonucleotide
tgaaatcgcagctgacaataatcgggtgcg

SEQ ID NO: 383332 - DNA, 30 bp, Artificial Sequence
  Synthetic oligonucleotide
attcgactccggcaagcgtagctgggtgcg

SEQ ID NO: 383333 - DNA, 30 bp, Artificial Sequence
  Synthetic oligonucleotide
aaatccggaatagatgatgaacgtggtgcg

SEQ ID NO: 383334 - DNA, 30 bp, Artificial Sequence
  Synthetic oligonucleotide
ggaagctcccggggaaggcggtcatgtgcg

SEQ ID NO: 383335 - DNA, 30 bp, Artificial Sequence
  Synthetic oligonucleotide
tccattcttcaaaactcctttgagtgtgcg

SEQ ID NO: 383336 - DNA, 30 bp, Artificial Sequence
  Synthetic oligonucleotide
ctccatatgttcctattttggtagtgtgcg

SEQ ID NO: 383337 - DNA, 30 bp, Artificial Sequence
  Synthetic oligonucleotide
ctatgcacgccacattctaactggtgtgcg

SEQ ID NO: 383338 - DNA, 30 bp, Artificial Sequence
  Synthetic oligonucleotide
cgaatctttactttacaccagcaaattgcg

SEQ ID NO: 383339 - DNA, 30 bp, Artificial Sequence
  Synthetic oligonucleotide
aaatagatggtgctgctttagcgaattgcg

SEQ ID NO: 383340 - DNA, 30 bp, Artificial Sequence
  Synthetic oligonucleotide
cagtttgcaatttggtattcccacattgcg

SEQ ID NO: 383341 - DNA, 30 bp, Artificial Sequence
  Synthetic oligonucleotide
ggacacacaaacatttctgttggcattgcg

SEQ ID NO: 383342 - DNA, 30 bp, Artificial Sequence
  Synthetic oligonucleotide
agtcctacacttgttcacaggatcattgcg

SEQ ID NO: 383343 - DNA, 30 bp, Artificial Sequence
  Synthetic oligonucleotide
attcggtgtacgtatggtaccttgattgcg

SEQ ID NO: 383344 - DNA, 30 bp, Artificial Sequence
  Synthetic oligonucleotide
gcatccctgttcatgtgttgagcccttgcg

SEQ ID NO: 383345 - DNA, 30 bp, Artificial Sequence
  Synthetic oligonucleotide
tcctactgagtcagcacattaggccttgcg

SEQ ID NO: 383346 - DNA, 30 bp, Artificial Sequence
  Synthetic oligonucleotide
atcatggtggagtatagttagctccttgcg

SEQ ID NO: 383347 - DNA, 30 bp, Artificial Sequence
  Synthetic oligonucleotide
tatgctcgtagacccgatggacttcttgcg

SEQ ID NO: 383348 - DNA, 30 bp, Artificial Sequence
  Synthetic oligonucleotide
tgggtaattcaagtctgaatatcagttgcg

SEQ ID NO: 383349 - DNA, 30 bp, Artificial Sequence
  Synthetic oligonucleotide
aggcttttagctgctgtactgcgagttgcg

SEQ ID NO: 383350 - DNA, 30 bp, Artificial Sequence
  Synthetic oligonucleotide
aagacgccaggtattcatggtaacgttgcg

SEQ ID NO: 383351 - DNA, 30 bp, Artificial Sequence
  Synthetic oligonucleotide
aatggattctttcaccataattacgttgcg

SEQ ID NO: 383352 - DNA, 30 bp, Artificial Sequence
  Synthetic oligonucleotide
atctatgctttctgtgatgtagccgttgcg

SEQ ID NO: 383353 - DNA, 30 bp, Artificial Sequence
  Synthetic oligonucleotide
tgtaaaccagtcgtagactggcgggttgcg

SEQ ID NO: 383354 - DNA, 30 bp, Artificial Sequence
  Synthetic oligonucleotide
ttgtggacgcgtaggtcgcaaactgttgcg

SEQ ID NO: 383355 - DNA, 30 bp, Artificial Sequence
  Synthetic oligonucleotide
ggattcttcgtatcttgctcgtctgttgcg

SEQ ID NO: 383356 - DNA, 30 bp, Artificial Sequence
  Synthetic oligonucleotide
tgggggaccagagcgcaatctggtgttgcg

SEQ ID NO: 383357 - DNA, 30 bp, Artificial Sequence
  Synthetic oligonucleotide
gttaccaggatggaatcgtctgtctttgcg

SEQ ID NO: 383358 - DNA, 30 bp, Artificial Sequence
  Synthetic oligonucleotide
tattgcttaagttccatttgttcgtttgcg

SEQ ID NO: 383359 - DNA, 30 bp, Artificial Sequence
  Synthetic oligonucleotide
ttgcacgctaaacaggtacttatgtttgcg

SEQ ID NO: 383360 - DNA, 30 bp, Artificial Sequence
  Synthetic oligonucleotide
gcgttcatctagcgttgacaacattttgcg

SEQ ID NO: 383361 - DNA, 30 bp, Artificial Sequence
  Synthetic oligonucleotide
aagtctgagggcggttaaaatcattttgcg

SEQ ID NO: 383362 - DNA, 30 bp, Artificial Sequence
  Synthetic oligonucleotide
gttagtaagtttattgttagcaacaaatcg

SEQ ID NO: 383363 - DNA, 30 bp, Artificial Sequence
  Synthetic oligonucleotide
ggttgcggttaagccgctgcagccaaatcg

SEQ ID NO: 383364 - DNA, 30 bp, Artificial Sequence
  Synthetic oligonucleotide
gatatcgaacttcagaacacctgcaaatcg

SEQ ID NO: 383365 - DNA, 30 bp, Artificial Sequence
  Synthetic oligonucleotide
cggatttatcctgtgttgtaatctaaatcg

SEQ ID NO: 383366 - DNA, 30 bp, Artificial Sequence
  Synthetic oligonucleotide
aataaaatacttggacagggcggacaatcg

SEQ ID NO: 383367 - DNA, 30 bp, Artificial Sequence
  Synthetic oligonucleotide
ggtgaggccacggcgctgaaagtccaatcg

SEQ ID NO: 383368 - DNA, 30 bp, Artificial Sequence
  Synthetic oligonucleotide
ttgcatagctggattcttctcatgcaatcg

SEQ ID NO: 383369 - DNA, 30 bp, Artificial Sequence
  Synthetic oligonucleotide
ggccccccaagtgggtgtaatgctcaatcg

SEQ ID NO: 383370 - DNA, 30 bp, Artificial Sequence
  Synthetic oligonucleotide
tgtattaacgcgtaacttccacgtcaatcg

SEQ ID NO: 383371 - DNA, 30 bp, Artificial Sequence
  Synthetic oligonucleotide
cattatatgttaccgacctttgacgaatcg

SEQ ID NO: 383372 - DNA, 30 bp, Artificial Sequence
  Synthetic oligonucleotide
cctcattaatcgtacgtactggccgaatcg

SEQ ID NO: 383373 - DNA, 30 bp, Artificial Sequence
  Synthetic oligonucleotide
gggagatagtccaagagaaggaaggaatcg

SEQ ID NO: 383374 - DNA, 30 bp, Artificial Sequence
  Synthetic oligonucleotide
ttagttcgcaaggagggtaaagatgaatcg

SEQ ID NO: 383375 - DNA, 30 bp, Artificial Sequence
  Synthetic oligonucleotide
ttacaacacggaaggccccgacgctaatcg

SEQ ID NO: 383376 - DNA, 30 bp, Artificial Sequence
  Synthetic oligonucleotide
gtagcccgttatgtgcgcgccggctaatcg

SEQ ID NO: 383377 - DNA, 30 bp, Artificial Sequence
  Synthetic oligonucleotide
tgcctgaatcctggattgaacgcttaatcg

SEQ ID NO: 383378 - DNA, 30 bp, Artificial Sequence
  Synthetic oligonucleotide
aaccgtctcgggcacgcaataagttaatcg

SEQ ID NO: 383379 - DNA, 30 bp, Artificial Sequence
  Synthetic oligonucleotide
ggactaatgcaaatgagacatttttaatcg

SEQ ID NO: 383380 - DNA, 30 bp, Artificial Sequence
  Synthetic oligonucleotide
gcttcgaaacgtctggttaacggaacatcg

SEQ ID NO: 383381 - DNA, 30 bp, Artificial Sequence
  Synthetic oligonucleotide
tggcggccatatgtatatttagatacatcg

SEQ ID NO: 383382 - DNA, 30 bp, Artificial Sequence
  Synthetic oligonucleotide
gtctatgtgcactggggttatcttacatcg

SEQ ID NO: 383383 - DNA, 30 bp, Artificial Sequence
  Synthetic oligonucleotide
cggacgcgttacgcggtagcttaaccatcg

SEQ ID NO: 383384 - DNA, 30 bp, Artificial Sequence
  Synthetic oligonucleotide
ggttcgagtaggttctatgggtcagcatcg

SEQ ID NO: 383385 - DNA, 30 bp, Artificial Sequence
  Synthetic oligonucleotide
accaaacgacggcctgtccatgacgcatcg

SEQ ID NO: 383386 - DNA, 30 bp, Artificial Sequence
  Synthetic oligonucleotide
cttggtctaccgccacggggcactgcatcg

SEQ ID NO: 383387 - DNA, 30 bp, Artificial Sequence
  Synthetic oligonucleotide
gccgattagccctgaacattccctgcatcg

SEQ ID NO: 383388 - DNA, 30 bp, Artificial Sequence
  Synthetic oligonucleotide
agtctgccgtgttccactgtaggtgcatcg

SEQ ID NO: 383389 - DNA, 30 bp, Artificial Sequence
  Synthetic oligonucleotide
agtatgctgcgcaagactttaatatcatcg

SEQ ID NO: 383390 - DNA, 30 bp, Artificial Sequence
  Synthetic oligonucleotide
gagacgaaattgatgtttgtatcctcatcg

SEQ ID NO: 383391 - DNA, 30 bp, Artificial Sequence
  Synthetic oligonucleotide
tagaagcatccagagacgaaaagctcatcg

SEQ ID NO: 383392 - DNA, 30 bp, Artificial Sequence
  Synthetic oligonucleotide
cgcatccgacattctagaacgcaaagatcg

SEQ ID NO: 383393 - DNA, 30 bp, Artificial Sequence
  Synthetic oligonucleotide
ctaaactaaagtcaagtcgcacacagatcg

SEQ ID NO: 383394 - DNA, 30 bp, Artificial Sequence
  Synthetic oligonucleotide
ggataaaggtcgtatctcggtatcagatcg

SEQ ID NO: 383395 - DNA, 30 bp, Artificial Sequence
  Synthetic oligonucleotide
gttgacgcgggtctactgattcaacgatcg

SEQ ID NO: 383396 - DNA, 29 bp, Artificial Sequence
  Synthetic oligonucleotide
taacgtaacagctgaccgtggaacgatcg

SEQ ID NO: 383397 - DNA, 30 bp, Artificial Sequence
  Synthetic oligonucleotide
ggcttatagggtttttctacgctacgatcg

SEQ ID NO: 383398 - DNA, 30 bp, Artificial Sequence
  Synthetic oligonucleotide
accgcggggagtcgcagaaatctacgatcg

SEQ ID NO: 383399 - DNA, 30 bp, Artificial Sequence
  Synthetic oligonucleotide
cggtaccggagggcgtgttagttccgatcg

SEQ ID NO: 383400 - DNA, 30 bp, Artificial Sequence
  Synthetic oligonucleotide
aagcctttctgtaaaaggccgttccgatcg

SEQ ID NO: 383401 - DNA, 30 bp, Artificial Sequence
  Synthetic oligonucleotide
catccctgctcgatgtcgtcacggcgatcg

SEQ ID NO: 383402 - DNA, 30 bp, Artificial Sequence
  Synthetic oligonucleotide
aggggcgtagcttggaccccgggtcgatcg

SEQ ID NO: 383403 - DNA, 30 bp, Artificial Sequence
  Synthetic oligonucleotide
atacatccccgaggcctgtccccaggatcg

SEQ ID NO: 383404 - DNA, 30 bp, Artificial Sequence
  Synthetic oligonucleotide
atgcagaatcgcgaaccacaaagaggatcg

SEQ ID NO: 383405 - DNA, 30 bp, Artificial Sequence
  Synthetic oligonucleotide
gaatgccaatggctgaccgcaagaggatcg

SEQ ID NO: 383406 - DNA, 30 bp, Artificial Sequence
  Synthetic oligonucleotide
attgatcataaattaaagcctagaggatcg

SEQ ID NO: 383407 - DNA, 30 bp, Artificial Sequence
  Synthetic oligonucleotide
taattttgtcttgtctggtttagaggatcg

SEQ ID NO: 383408 - DNA, 29 bp, Artificial Sequence
  Synthetic oligonucleotide
ggagcagtgcattctctacgggcggatcg

SEQ ID NO: 383409 - DNA, 30 bp, Artificial Sequence
  Synthetic oligonucleotide
atctaacatatatgcctcgtttagggatcg

SEQ ID NO: 383410 - DNA, 30 bp, Artificial Sequence
  Synthetic oligonucleotide
tttatgatacgctaagatggaggatgatcg

SEQ ID NO: 383411 - DNA, 30 bp, Artificial Sequence
  Synthetic oligonucleotide
gcgatctgtaaaccaacagtgaactgatcg

SEQ ID NO: 383412 - DNA, 30 bp, Artificial Sequence
  Synthetic oligonucleotide
gacaattaggccagttcgactgactgatcg

SEQ ID NO: 383413 - DNA, 30 bp, Artificial Sequence
  Synthetic oligonucleotide
ctcttgtccatgattttcggtagctgatcg

SEQ ID NO: 383414 - DNA, 30 bp, Artificial Sequence
  Synthetic oligonucleotide
agagattatcgcccgcttatagtctgatcg

SEQ ID NO: 383415 - DNA, 30 bp, Artificial Sequence
  Synthetic oligonucleotide
tactcctaggcagcacaaatttcgtgatcg

SEQ ID NO: 383416 - DNA, 30 bp, Artificial Sequence
  Synthetic oligonucleotide
tcaacctcaagacccgcaatggtttgatcg

SEQ ID NO: 383417 - DNA, 30 bp, Artificial Sequence
  Synthetic oligonucleotide
tcttatgacgtcctattcgcaaaaatatcg

SEQ ID NO: 383418 - DNA, 30 bp, Artificial Sequence
  Synthetic oligonucleotide
ccatccgatatggccagggccaaaatatcg

SEQ ID NO: 383419 - DNA, 30 bp, Artificial Sequence
  Synthetic oligonucleotide
tgtagaattttgcaacgcccgaaaatatcg

SEQ ID NO: 383420 - DNA, 30 bp, Artificial Sequence
  Synthetic oligonucleotide
ttcagtcaggcctttttgctagcaatatcg

SEQ ID NO: 383421 - DNA, 30 bp, Artificial Sequence
  Synthetic oligonucleotide
atgaatatatgacgctaggaggcaatatcg

SEQ ID NO: 383422 - DNA, 30 bp, Artificial Sequence
  Synthetic oligonucleotide
ggtgaaggtcggaggcccggtagaatatcg

SEQ ID NO: 383423 - DNA, 30 bp, Artificial Sequence
  Synthetic oligonucleotide
cgtcctcataagatccgcaagcacatatcg

SEQ ID NO: 383424 - DNA, 30 bp, Artificial Sequence
  Synthetic oligonucleotide
tcaagccaagatcgaaaccatcagatatcg

SEQ ID NO: 383425 - DNA, 30 bp, Artificial Sequence
  Synthetic oligonucleotide
tatacgctcgatcgggatatatatatatcg

SEQ ID NO: 383426 - DNA, 30 bp, Artificial Sequence
  Synthetic oligonucleotide
tagtagtaacccgcgccagacggtatatcg

SEQ ID NO: 383427 - DNA, 30 bp, Artificial Sequence
  Synthetic oligonucleotide
agatggagtactgtcactcgtgttatatcg

SEQ ID NO: 383428 - DNA, 30 bp, Artificial Sequence
  Synthetic oligonucleotide
gaacaagtgttcgatactaagtttatatcg

SEQ ID NO: 383429 - DNA, 30 bp, Artificial Sequence
  Synthetic oligonucleotide
ttcagatgtggtggcttcctgcacctatcg

SEQ ID NO: 383430 - DNA, 30 bp, Artificial Sequence
  Synthetic oligonucleotide
tgtactttttatacggagtcatagctatcg

SEQ ID NO: 383431 - DNA, 30 bp, Artificial Sequence
  Synthetic oligonucleotide
gtcggcagcccaaaggatgccgggctatcg

SEQ ID NO: 383432 - DNA, 30 bp, Artificial Sequence
  Synthetic oligonucleotide
cgtggttaggtcgataactcacaagtatcg

SEQ ID NO: 383433 - DNA, 30 bp, Artificial Sequence
  Synthetic oligonucleotide
ctaatatcgttatgacgctaaacagtatcg

SEQ ID NO: 383434 - DNA, 30 bp, Artificial Sequence
  Synthetic oligonucleotide
agaaacgttctcctatgacgacgagtatcg

SEQ ID NO: 383435 - DNA, 30 bp, Artificial Sequence
  Synthetic oligonucleotide
aaccaaaagcatatatcaattatcgtatcg

SEQ ID NO: 383436 - DNA, 30 bp, Artificial Sequence
  Synthetic oligonucleotide
aacccggactagaatgatcggagggtatcg

SEQ ID NO: 383437 - DNA, 30 bp, Artificial Sequence
  Synthetic oligonucleotide
atggttataaagagctaatacttggtatcg

SEQ ID NO: 383438 - DNA, 30 bp, Artificial Sequence
  Synthetic oligonucleotide
ttgtttgaaagaacacatacaattgtatcg

SEQ ID NO: 383439 - DNA, 30 bp, Artificial Sequence
  Synthetic oligonucleotide
tttcatagccccccagcgtcatacttatcg

SEQ ID NO: 383440 - DNA, 30 bp, Artificial Sequence
  Synthetic oligonucleotide
atgatcgctgttcggctaaggccgttatcg

SEQ ID NO: 383441 - DNA, 30 bp, Artificial Sequence
  Synthetic oligonucleotide
gtttgacgcgtaggggtagaaatgttatcg

SEQ ID NO: 383442 - DNA, 30 bp, Artificial Sequence
  Synthetic oligonucleotide
ccgagtggtacgttcttggtaacgaactcg

SEQ ID NO: 383443 - DNA, 29 bp, Artificial Sequence
  Synthetic oligonucleotide
ttaaaatcaccaatagagttccgaactcg

SEQ ID NO: 383444 - DNA, 30 bp, Artificial Sequence
  Synthetic oligonucleotide
ggagacttcagatctattctggggaactcg

SEQ ID NO: 383445 - DNA, 30 bp, Artificial Sequence
  Synthetic oligonucleotide
cgttggatatttttaggtaacgctaactcg

SEQ ID NO: 383446 - DNA, 30 bp, Artificial Sequence
  Synthetic oligonucleotide
tccaggggcagcagacatactagtaactcg

SEQ ID NO: 383447 - DNA, 30 bp, Artificial Sequence
  Synthetic oligonucleotide
tgcatatcagctgaggcagagaggcactcg

SEQ ID NO: 383448 - DNA, 30 bp, Artificial Sequence
  Synthetic oligonucleotide
acggtgtccatgttgccacaactagactcg

SEQ ID NO: 383449 - DNA, 30 bp, Artificial Sequence
  Synthetic oligonucleotide
tattgtatcgttactgcgcgtaacgactcg

SEQ ID NO: 383450 - DNA, 30 bp, Artificial Sequence
  Synthetic oligonucleotide
ggttgtaccctgtatagtggtaaggactcg

SEQ ID NO: 383451 - DNA, 30 bp, Artificial Sequence
  Synthetic oligonucleotide
ggggggcattctcagccttagagtgactcg

SEQ ID NO: 383452 - DNA, 30 bp, Artificial Sequence
  Synthetic oligonucleotide
ggtcagtattttattagaaagagatactcg

SEQ ID NO: 383453 - DNA, 30 bp, Artificial Sequence
  Synthetic oligonucleotide
gcaatactgcgtttaagggtaggatactcg

SEQ ID NO: 383454 - DNA, 30 bp, Artificial Sequence
  Synthetic oligonucleotide
aatgtactcaggtggagatttgtatactcg

SEQ ID NO: 383455 - DNA, 31 bp, Artificial Sequence
  Synthetic oligonucleotide
gtaagccagagcttgcgcgcgagtctactcg

SEQ ID NO: 383456 - DNA, 30 bp, Artificial Sequence
  Synthetic oligonucleotide
atctctactttttcggcgtgaagaacctcg

SEQ ID NO: 383457 - DNA, 30 bp, Artificial Sequence
  Synthetic oligonucleotide
taagcactatacgtactcgcccgtacctcg

SEQ ID NO: 383458 - DNA, 30 bp, Artificial Sequence
  Synthetic oligonucleotide
gaatataacttaacatttagatttacctcg

SEQ ID NO: 383459 - DNA, 30 bp, Artificial Sequence
  Synthetic oligonucleotide
gtgtcgacccgagtcaacatcagaccctcg

SEQ ID NO: 383460 - DNA, 30 bp, Artificial Sequence
  Synthetic oligonucleotide
caagggtccattaaagcttgattaccctcg

SEQ ID NO: 383461 - DNA, 30 bp, Artificial Sequence
  Synthetic oligonucleotide
ggacctgtcattcggtgagcacacccctcg

SEQ ID NO: 383462 - DNA, 30 bp, Artificial Sequence
  Synthetic oligonucleotide
tctcagtatcactcgcatgaggggccctcg

SEQ ID NO: 383463 - DNA, 30 bp, Artificial Sequence
  Synthetic oligonucleotide
gaagggttcggtgcctcgtcctctccctcg

SEQ ID NO: 383464 - DNA, 30 bp, Artificial Sequence
  Synthetic oligonucleotide
tagtgtatttgttcacttacgggagcctcg

SEQ ID NO: 383465 - DNA, 30 bp, Artificial Sequence
  Synthetic oligonucleotide
cgcccccaaaggtgggcagccggcgcctcg

SEQ ID NO: 383466 - DNA, 30 bp, Artificial Sequence
  Synthetic oligonucleotide
tagcagggcggccatagggaaacggcctcg

SEQ ID NO: 383467 - DNA, 30 bp, Artificial Sequence
  Synthetic oligonucleotide
gtaccaggtggggcttataagggggcctcg

SEQ ID NO: 383468 - DNA, 30 bp, Artificial Sequence
  Synthetic oligonucleotide
ggtctactacccgtgcacgctggggcctcg

SEQ ID NO: 383469 - DNA, 31 bp, Artificial Sequence
  Synthetic oligonucleotide
gccccgtaataggacacgtacatgatcctcg

SEQ ID NO: 383470 - DNA, 30 bp, Artificial Sequence
  Synthetic oligonucleotide
cgcccacccgggttactcaacatctcctcg

SEQ ID NO: 383471 - DNA, 30 bp, Artificial Sequence
  Synthetic oligonucleotide
cggaatagcccgcagatctactgttcctcg

SEQ ID NO: 383472 - DNA, 30 bp, Artificial Sequence
  Synthetic oligonucleotide
ttacagatattcggcagacctgcaagctcg

SEQ ID NO: 383473 - DNA, 30 bp, Artificial Sequence
  Synthetic oligonucleotide
tcccttggtctatcggccagcatgagctcg

SEQ ID NO: 383474 - DNA, 30 bp, Artificial Sequence
  Synthetic oligonucleotide
aatgccatatatttgcaaggaggtagctcg

SEQ ID NO: 383475 - DNA, 30 bp, Artificial Sequence
  Synthetic oligonucleotide
cggtggtgtgtttggaatgggtgtagctcg

SEQ ID NO: 383476 - DNA, 30 bp, Artificial Sequence
  Synthetic oligonucleotide
tagagtatgtgatggatcggtcgacgctcg

SEQ ID NO: 383477 - DNA, 30 bp, Artificial Sequence
  Synthetic oligonucleotide
gtggggccccccaaagttaaattacgctcg

SEQ ID NO: 383478 - DNA, 30 bp, Artificial Sequence
  Synthetic oligonucleotide
aagttcactggtcctattagtgtgcgctcg

SEQ ID NO: 383479 - DNA, 30 bp, Artificial Sequence
  Synthetic oligonucleotide
ctctatatagattaagctagaactcgctcg

SEQ ID NO: 383480 - DNA, 30 bp, Artificial Sequence
  Synthetic oligonucleotide
ttccaaaacaaatgttcctatgttcgctcg

SEQ ID NO: 383481 - DNA, 30 bp, Artificial Sequence
  Synthetic oligonucleotide
cctgatcggtgaagttccccccaatgctcg

SEQ ID NO: 383482 - DNA, 30 bp, Artificial Sequence
  Synthetic oligonucleotide
acctatccaaatacgtcacggagatgctcg

SEQ ID NO: 383483 - DNA, 30 bp, Artificial Sequence
  Synthetic oligonucleotide
gaaaagcagctgaggttcgtatcgtgctcg

SEQ ID NO: 383484 - DNA, 30 bp, Artificial Sequence
  Synthetic oligonucleotide
attgagctaagagcgcgcttgcattgctcg

SEQ ID NO: 383485 - DNA, 30 bp, Artificial Sequence
  Synthetic oligonucleotide
acctgacggggattgatattttattgctcg

SEQ ID NO: 383486 - DNA, 30 bp, Artificial Sequence
  Synthetic oligonucleotide
tgcctgtaatggtagcatagctcaatctcg

SEQ ID NO: 383487 - DNA, 30 bp, Artificial Sequence
  Synthetic oligonucleotide
aactacagtacagataacgcaataatctcg

SEQ ID NO: 383488 - DNA, 30 bp, Artificial Sequence
  Synthetic oligonucleotide
gtagcagaaggcacgttaggttacatctcg

SEQ ID NO: 383489 - DNA, 30 bp, Artificial Sequence
  Synthetic oligonucleotide
cggcgccaagagtccggtaggtatatctcg

SEQ ID NO: 383490 - DNA, 30 bp, Artificial Sequence
  Synthetic oligonucleotide
tttaaacggcccttgttgttccctatctcg

SEQ ID NO: 383491 - DNA, 30 bp, Artificial Sequence
  Synthetic oligonucleotide
gtctagaaagcccaccgcatggttatctcg

SEQ ID NO: 383492 - DNA, 30 bp, Artificial Sequence
  Synthetic oligonucleotide
gcataatctaataacttagccaatctctcg

SEQ ID NO: 383493 - DNA, 30 bp, Artificial Sequence
  Synthetic oligonucleotide
tagatggcggttttcctaggggctctctcg

SEQ ID NO: 383494 - DNA, 30 bp, Artificial Sequence
  Synthetic oligonucleotide
tcagagacaaacccaggcggttgtctctcg

SEQ ID NO: 383495 - DNA, 30 bp, Artificial Sequence
  Synthetic oligonucleotide
gtaggtacggagtggagacatcaggtctcg

SEQ ID NO: 383496 - DNA, 30 bp, Artificial Sequence
  Synthetic oligonucleotide
cgtacaatgcgcctctgtcacaatgtctcg

SEQ ID NO: 383497 - DNA, 30 bp, Artificial Sequence
  Synthetic oligonucleotide
tgttccatcccgatcaccatctgtgtctcg

SEQ ID NO: 383498 - DNA, 30 bp, Artificial Sequence
  Synthetic oligonucleotide
tacagggtaaataatctttgctttgtctcg

SEQ ID NO: 383499 - DNA, 30 bp, Artificial Sequence
  Synthetic oligonucleotide
ttacaaatcactgccgtaagacagttctcg

SEQ ID NO: 383500 - DNA, 30 bp, Artificial Sequence
  Synthetic oligonucleotide
tttagctcagaagtaccaataccaaagtcg

SEQ ID NO: 383501 - DNA, 30 bp, Artificial Sequence
  Synthetic oligonucleotide
gctttgagcagttggtaaatgtcaaagtcg

SEQ ID NO: 383502 - DNA, 30 bp, Artificial Sequence
  Synthetic oligonucleotide
catgcacgaaattagggggaaataaagtcg

SEQ ID NO: 383503 - DNA, 30 bp, Artificial Sequence
  Synthetic oligonucleotide
ttacggggcatactggtattattcaagtcg

SEQ ID NO: 383504 - DNA, 30 bp, Artificial Sequence
  Synthetic oligonucleotide
ggtgctctccgcctgttatatcagaagtcg

SEQ ID NO: 383505 - DNA, 30 bp, Artificial Sequence
  Synthetic oligonucleotide
ggggtatagtggccgatgcctattaagtcg

SEQ ID NO: 383506 - DNA, 30 bp, Artificial Sequence
  Synthetic oligonucleotide
catcaataatagaaatgcaacgttaagtcg

SEQ ID NO: 383507 - DNA, 30 bp, Artificial Sequence
  Synthetic oligonucleotide
accctttgattctgttttataaagcagtcg

SEQ ID NO: 383508 - DNA, 30 bp, Artificial Sequence
  Synthetic oligonucleotide
ctacacagctgttttgaagtgggagagtcg

SEQ ID NO: 383509 - DNA, 30 bp, Artificial Sequence
  Synthetic oligonucleotide
tttgccttttcgacctccgcgatagagtcg

SEQ ID NO: 383510 - DNA, 30 bp, Artificial Sequence
  Synthetic oligonucleotide
cctaattacctgtgtggaagattatagtcg

SEQ ID NO: 383511 - DNA, 30 bp, Artificial Sequence
  Synthetic oligonucleotide
taggcgcctgcagccggaacaggctagtcg

SEQ ID NO: 383512 - DNA, 30 bp, Artificial Sequence
  Synthetic oligonucleotide
ggatagccaggggaatagactttctagtcg

SEQ ID NO: 383513 - DNA, 30 bp, Artificial Sequence
  Synthetic oligonucleotide
tgcgtagacgcaggtactaggtcgtagtcg

SEQ ID NO: 383514 - DNA, 30 bp, Artificial Sequence
  Synthetic oligonucleotide
aaaatctctgctaaaacagtgagttagtcg

SEQ ID NO: 383515 - DNA, 30 bp, Artificial Sequence
  Synthetic oligonucleotide
gactgaactcttccagcatcggacacgtcg

SEQ ID NO: 383516 - DNA, 30 bp, Artificial Sequence
  Synthetic oligonucleotide
ggttctcgttcaggactgggatcaccgtcg

SEQ ID NO: 383517 - DNA, 30 bp, Artificial Sequence
  Synthetic oligonucleotide
cactcagttagggggcctcagcggccgtcg

SEQ ID NO: 383518 - DNA, 30 bp, Artificial Sequence
  Synthetic oligonucleotide
acgacggcaggatgtagacgacgtccgtcg

SEQ ID NO: 383519 - DNA, 30 bp, Artificial Sequence
  Synthetic oligonucleotide
agatagtatcttaaaggttgtcgagcgtcg

SEQ ID NO: 383520 - DNA, 30 bp, Artificial Sequence
  Synthetic oligonucleotide
ggggttttaggtcccgatctggtatcgtcg

SEQ ID NO: 383521 - DNA, 30 bp, Artificial Sequence
  Synthetic oligonucleotide
gtaatcagtatttaatcggagtactcgtcg

SEQ ID NO: 383522 - DNA, 30 bp, Artificial Sequence
  Synthetic oligonucleotide
gtgtgtaaaagcctagaatatatttcgtcg

SEQ ID NO: 383523 - DNA, 30 bp, Artificial Sequence
  Synthetic oligonucleotide
cgccatttcgaaacattgcactacaggtcg

SEQ ID NO: 383524 - DNA, 30 bp, Artificial Sequence
  Synthetic oligonucleotide
gcggttgttgctttaatcgtatccaggtcg

SEQ ID NO: 383525 - DNA, 30 bp, Artificial Sequence
  Synthetic oligonucleotide
gttcggtctctcagagagtcgagcaggtcg

SEQ ID NO: 383526 - DNA, 30 bp, Artificial Sequence
  Synthetic oligonucleotide
agtacgtattatccctgattaacacggtcg

SEQ ID NO: 383527 - DNA, 30 bp, Artificial Sequence
  Synthetic oligonucleotide
tttgaagagaagatattgcatacacggtcg

SEQ ID NO: 383528 - DNA, 30 bp, Artificial Sequence
  Synthetic oligonucleotide
gtcgagcgtggtcataaagagtcacggtcg

SEQ ID NO: 383529 - DNA, 30 bp, Artificial Sequence
  Synthetic oligonucleotide
agggtacgcgtggggtaaagagtacggtcg

SEQ ID NO: 383530 - DNA, 30 bp, Artificial Sequence
  Synthetic oligonucleotide
cgtcagtagtggtgactcagattacggtcg

SEQ ID NO: 383531 - DNA, 30 bp, Artificial Sequence
  Synthetic oligonucleotide
ttcttgaatgctttggcaatacaccggtcg

SEQ ID NO: 383532 - DNA, 30 bp, Artificial Sequence
  Synthetic oligonucleotide
ccagcagaggttacacgcagcgaccggtcg

SEQ ID NO: 383533 - DNA, 30 bp, Artificial Sequence
  Synthetic oligonucleotide
ccttcagtttgttatgttgccctccggtcg

SEQ ID NO: 383534 - DNA, 30 bp, Artificial Sequence
  Synthetic oligonucleotide
tcaatttgatggaatttacgcaggcggtcg

SEQ ID NO: 383535 - DNA, 30 bp, Artificial Sequence
  Synthetic oligonucleotide
taaacatgtcagattatgaccaatcggtcg

SEQ ID NO: 383536 - DNA, 30 bp, Artificial Sequence
  Synthetic oligonucleotide
aagctttgagggttcagtgtgaatcggtcg

SEQ ID NO: 383537 - DNA, 29 bp, Artificial Sequence
  Synthetic oligonucleotide
tttgcggatactggttaggggttcggtcg

SEQ ID NO: 383538 - DNA, 30 bp, Artificial Sequence
  Synthetic oligonucleotide
atcctaagaggccatgactctcacgggtcg

SEQ ID NO: 383539 - DNA, 30 bp, Artificial Sequence
  Synthetic oligonucleotide
ggtgtagttgtactggatggcaatgggtcg

SEQ ID NO: 383540 - DNA, 30 bp, Artificial Sequence
  Synthetic oligonucleotide
tcggtcgtccgcgatgaccaaggtgggtcg

SEQ ID NO: 383541 - DNA, 30 bp, Artificial Sequence
  Synthetic oligonucleotide
aaggcgcgttatgtcccaatataatggtcg

SEQ ID NO: 383542 - DNA, 30 bp, Artificial Sequence
  Synthetic oligonucleotide
tcttgcttagtgttgggtgagcgatggtcg

SEQ ID NO: 383543 - DNA, 30 bp, Artificial Sequence
  Synthetic oligonucleotide
ttattcatagactgcctaggaatatggtcg

SEQ ID NO: 383544 - DNA, 30 bp, Artificial Sequence
  Synthetic oligonucleotide
acagggtggccgaccatgacactatggtcg

SEQ ID NO: 383545 - DNA, 30 bp, Artificial Sequence
  Synthetic oligonucleotide
ttgcattaggcacgtataattttatggtcg

SEQ ID NO: 383546 - DNA, 30 bp, Artificial Sequence
  Synthetic oligonucleotide
tcccgaccactagcttcacgttgctggtcg

SEQ ID NO: 383547 - DNA, 30 bp, Artificial Sequence
  Synthetic oligonucleotide
ttgcggttgtcgtcgactttattctggtcg

SEQ ID NO: 383548 - DNA, 30 bp, Artificial Sequence
  Synthetic oligonucleotide
gaaaactccgaaaaacccccatagtggtcg

SEQ ID NO: 383549 - DNA, 30 bp, Artificial Sequence
  Synthetic oligonucleotide
cgtatcagcgctcgttgagctggttggtcg

SEQ ID NO: 383550 - DNA, 30 bp, Artificial Sequence
  Synthetic oligonucleotide
atttgagtctgtgtaggtatctcaatgtcg

SEQ ID NO: 383551 - DNA, 30 bp, Artificial Sequence
  Synthetic oligonucleotide
gtgattagcagtcagttagtttgaatgtcg

SEQ ID NO: 383552 - DNA, 31 bp, Artificial Sequence
  Synthetic oligonucleotide
tagtctggggatcatcagctccctaatgtcg

SEQ ID NO: 383553 - DNA, 30 bp, Artificial Sequence
  Synthetic oligonucleotide
attcattatggctgtgcagcctgcatgtcg

SEQ ID NO: 383554 - DNA, 30 bp, Artificial Sequence
  Synthetic oligonucleotide
attgcaacgagcaaacgctcaatcatgtcg

SEQ ID NO: 383555 - DNA, 30 bp, Artificial Sequence
  Synthetic oligonucleotide
gggggagggcttgcgcgcaagaggatgtcg

SEQ ID NO: 383556 - DNA, 30 bp, Artificial Sequence
  Synthetic oligonucleotide
ggagcacgtactgcggggtggaatatgtcg

SEQ ID NO: 383557 - DNA, 30 bp, Artificial Sequence
  Synthetic oligonucleotide
ggcaaatctgttttgagattgagtatgtcg

SEQ ID NO: 383558 - DNA, 30 bp, Artificial Sequence
  Synthetic oligonucleotide
ggcgttacatgggctgttgagattatgtcg

SEQ ID NO: 383559 - DNA, 30 bp, Artificial Sequence
  Synthetic oligonucleotide
acaggacacatgtgaaagcctcccctgtcg

SEQ ID NO: 383560 - DNA, 30 bp, Artificial Sequence
  Synthetic oligonucleotide
tgggagactgtatgcgcaatcctcctgtcg

SEQ ID NO: 383561 - DNA, 30 bp, Artificial Sequence
  Synthetic oligonucleotide
ctctttatttttccatttagtgtgctgtcg

SEQ ID NO: 383562 - DNA, 30 bp, Artificial Sequence
  Synthetic oligonucleotide
actaggtgccaagaccagggggctctgtcg

SEQ ID NO: 383563 - DNA, 30 bp, Artificial Sequence
  Synthetic oligonucleotide
gtacgttacgcccttttcattgacgtgtcg

SEQ ID NO: 383564 - DNA, 30 bp, Artificial Sequence
  Synthetic oligonucleotide
tctcgggtgaggaagtgcagggtcttgtcg

SEQ ID NO: 383565 - DNA, 30 bp, Artificial Sequence
  Synthetic oligonucleotide
aagtttgtacggttcgcttcgaatttgtcg

SEQ ID NO: 383566 - DNA, 30 bp, Artificial Sequence
  Synthetic oligonucleotide
cattcctcaaaaacgttcttatatttgtcg

SEQ ID NO: 383567 - DNA, 30 bp, Artificial Sequence
  Synthetic oligonucleotide
tgcacgctccgcatacgcgctgaaaattcg

SEQ ID NO: 383568 - DNA, 30 bp, Artificial Sequence
  Synthetic oligonucleotide
tatatagggataattatgtattcaaattcg

SEQ ID NO: 383569 - DNA, 30 bp, Artificial Sequence
  Synthetic oligonucleotide
gggtactagctggtgaatcattgaaattcg

SEQ ID NO: 383570 - DNA, 30 bp, Artificial Sequence
  Synthetic oligonucleotide
ttcatagccagaaaaggtgttattaattcg

SEQ ID NO: 383571 - DNA, 30 bp, Artificial Sequence
  Synthetic oligonucleotide
taagcaaaagggtgcgggtattaacattcg

SEQ ID NO: 383572 - DNA, 30 bp, Artificial Sequence
  Synthetic oligonucleotide
tcgtcaacgggacaagacaaagaccattcg

SEQ ID NO: 383573 - DNA, 30 bp, Artificial Sequence
  Synthetic oligonucleotide
ctgcttaaagaaagcatggagcgccattcg

SEQ ID NO: 383574 - DNA, 30 bp, Artificial Sequence
  Synthetic oligonucleotide
tagagtaacctatggtgaggttcgcattcg

SEQ ID NO: 383575 - DNA, 30 bp, Artificial Sequence
  Synthetic oligonucleotide
tctcaactgacgagtgttaatactcattcg

SEQ ID NO: 383576 - DNA, 30 bp, Artificial Sequence
  Synthetic oligonucleotide
ggattttgggtaaagatgggacctcattcg

SEQ ID NO: 383577 - DNA, 30 bp, Artificial Sequence
  Synthetic oligonucleotide
gacggatgtatctggggaggacccgattcg

SEQ ID NO: 383578 - DNA, 30 bp, Artificial Sequence
  Synthetic oligonucleotide
caaatcaacgcatctggcacataggattcg

SEQ ID NO: 383579 - DNA, 30 bp, Artificial Sequence
  Synthetic oligonucleotide
gacgatgcataagcacatatctgggattcg

SEQ ID NO: 383580 - DNA, 30 bp, Artificial Sequence
  Synthetic oligonucleotide
aaagtccgtcttaatggctattgtgattcg

SEQ ID NO: 383581 - DNA, 30 bp, Artificial Sequence
  Synthetic oligonucleotide
ctacaagtcctcttagtttccccatattcg

SEQ ID NO: 383582 - DNA, 30 bp, Artificial Sequence
  Synthetic oligonucleotide
ccaaggttgtggagctggcttagatattcg

SEQ ID NO: 383583 - DNA, 30 bp, Artificial Sequence
  Synthetic oligonucleotide
agccctttagtagcggaccaatgctattcg

SEQ ID NO: 383584 - DNA, 30 bp, Artificial Sequence
  Synthetic oligonucleotide
ttgtagcataagactcataaaaagtattcg

SEQ ID NO: 383585 - DNA, 30 bp, Artificial Sequence
  Synthetic oligonucleotide
atcgactatgatcccgggtggaattattcg

SEQ ID NO: 383586 - DNA, 30 bp, Artificial Sequence
  Synthetic oligonucleotide
cctgccggagcaatgctcgactcttattcg

SEQ ID NO: 383587 - DNA, 30 bp, Artificial Sequence
  Synthetic oligonucleotide
gcactttatacgagggcctgaagttattcg

SEQ ID NO: 383588 - DNA, 30 bp, Artificial Sequence
  Synthetic oligonucleotide
gtttagaatggcggtattcagagttattcg

SEQ ID NO: 383589 - DNA, 30 bp, Artificial Sequence
  Synthetic oligonucleotide
ggttctggctaaaggctttaaccaacttcg

SEQ ID NO: 383590 - DNA, 30 bp, Artificial Sequence
  Synthetic oligonucleotide
gaactccataataatgatctgcccacttcg

SEQ ID NO: 383591 - DNA, 30 bp, Artificial Sequence
  Synthetic oligonucleotide
attttaagatcacatgtttacgtcacttcg

SEQ ID NO: 383592 - DNA, 30 bp, Artificial Sequence
  Synthetic oligonucleotide
acagattttactcgcttggaggagacttcg

SEQ ID NO: 383593 - DNA, 30 bp, Artificial Sequence
  Synthetic oligonucleotide
ctggacttcggggccggaggtagaccttcg

SEQ ID NO: 383594 - DNA, 30 bp, Artificial Sequence
  Synthetic oligonucleotide
ttctcttaagtggagtgcccggacccttcg

SEQ ID NO: 383595 - DNA, 30 bp, Artificial Sequence
  Synthetic oligonucleotide
acagtgagatttcctatttgagctccttcg

SEQ ID NO: 383596 - DNA, 30 bp, Artificial Sequence
  Synthetic oligonucleotide
tagagcaattccccaggctagccagcttcg

SEQ ID NO: 383597 - DNA, 30 bp, Artificial Sequence
  Synthetic oligonucleotide
caagtttaaggtcaggacgtggacgcttcg

SEQ ID NO: 383598 - DNA, 30 bp, Artificial Sequence
  Synthetic oligonucleotide
taagtcaaatgttgtataccagccgcttcg

SEQ ID NO: 383599 - DNA, 30 bp, Artificial Sequence
  Synthetic oligonucleotide
gcttcaatcttgacgctcactaaggcttcg

SEQ ID NO: 383600 - DNA, 30 bp, Artificial Sequence
  Synthetic oligonucleotide
caagaagcccttctaggccgggaggcttcg

SEQ ID NO: 383601 - DNA, 30 bp, Artificial Sequence
  Synthetic oligonucleotide
tttgtataggcatttcaactggtggcttcg

SEQ ID NO: 383602 - DNA, 31 bp, Artificial Sequence
  Synthetic oligonucleotide
gcatatgtgcacattatacatcactgcttcg

SEQ ID NO: 383603 - DNA, 30 bp, Artificial Sequence
  Synthetic oligonucleotide
gagtatcccgagcgaaatctggttgcttcg

SEQ ID NO: 383604 - DNA, 30 bp, Artificial Sequence
  Synthetic oligonucleotide
ggtctgcaggacgcgaaacaacgttcttcg

SEQ ID NO: 383605 - DNA, 30 bp, Artificial Sequence
  Synthetic oligonucleotide
tacgtgtggccttctaacgttaaaagttcg

SEQ ID NO: 383606 - DNA, 30 bp, Artificial Sequence
  Synthetic oligonucleotide
actccggctgcaggtcaggtcataagttcg

SEQ ID NO: 383607 - DNA, 30 bp, Artificial Sequence
  Synthetic oligonucleotide
gagaggatgtttaccatacagataagttcg

SEQ ID NO: 383608 - DNA, 30 bp, Artificial Sequence
  Synthetic oligonucleotide
agtatgaacccatgggtttggctcagttcg

SEQ ID NO: 383609 - DNA, 30 bp, Artificial Sequence
  Synthetic oligonucleotide
gtttaacgctcattagcagcagggagttcg

SEQ ID NO: 383610 - DNA, 30 bp, Artificial Sequence
  Synthetic oligonucleotide
gggctctataaatgttctcgattgagttcg

SEQ ID NO: 383611 - DNA, 30 bp, Artificial Sequence
  Synthetic oligonucleotide
gctagtccggatcccgggatgagtagttcg

SEQ ID NO: 383612 - DNA, 30 bp, Artificial Sequence
  Synthetic oligonucleotide
cgccgtcatgttaggctatgccttagttcg

SEQ ID NO: 383613 - DNA, 30 bp, Artificial Sequence
  Synthetic oligonucleotide
gtgcttgcttaattaagcttatttagttcg

SEQ ID NO: 383614 - DNA, 30 bp, Artificial Sequence
  Synthetic oligonucleotide
gcgtttttactgaagttacgagaacgttcg

SEQ ID NO: 383615 - DNA, 30 bp, Artificial Sequence
  Synthetic oligonucleotide
gattaaaagatttacatcactacacgttcg

SEQ ID NO: 383616 - DNA, 30 bp, Artificial Sequence
  Synthetic oligonucleotide
aaagagggcaagtttgagttttcgcgttcg

SEQ ID NO: 383617 - DNA, 30 bp, Artificial Sequence
  Synthetic oligonucleotide
cgtgctctgcatggaacgattcggcgttcg

SEQ ID NO: 383618 - DNA, 30 bp, Artificial Sequence
  Synthetic oligonucleotide
cctgttggcacaaagtgttaacatcgttcg

SEQ ID NO: 383619 - DNA, 30 bp, Artificial Sequence
  Synthetic oligonucleotide
gggagaaatgaagtataagtacttcgttcg

SEQ ID NO: 383620 - DNA, 30 bp, Artificial Sequence
  Synthetic oligonucleotide
ctacagatatcacttataatttatggttcg

SEQ ID NO: 383621 - DNA, 30 bp, Artificial Sequence
  Synthetic oligonucleotide
tttacattttcagcaagtcaacctggttcg

SEQ ID NO: 383622 - DNA, 30 bp, Artificial Sequence
  Synthetic oligonucleotide
tcataaaggggtgtatttactattggttcg

SEQ ID NO: 383623 - DNA, 30 bp, Artificial Sequence
  Synthetic oligonucleotide
gatataaacggcaacggcccgggatgttcg

SEQ ID NO: 383624 - DNA, 30 bp, Artificial Sequence
  Synthetic oligonucleotide
aagcttgcacacacccgctaaatatgttcg

SEQ ID NO: 383625 - DNA, 30 bp, Artificial Sequence
  Synthetic oligonucleotide
gctatgttgtataaaagaaaaacctgttcg

SEQ ID NO: 383626 - DNA, 30 bp, Artificial Sequence
  Synthetic oligonucleotide
ccttaggatttcgggcacgccatttgttcg

SEQ ID NO: 383627 - DNA, 30 bp, Artificial Sequence
  Synthetic oligonucleotide
gcggatgttaggtggaggccccaaatttcg

SEQ ID NO: 383628 - DNA, 30 bp, Artificial Sequence
  Synthetic oligonucleotide
agtataattacatggaggacggacatttcg

SEQ ID NO: 383629 - DNA, 30 bp, Artificial Sequence
  Synthetic oligonucleotide
agaacttgttttctgtggctttacatttcg

SEQ ID NO: 383630 - DNA, 30 bp, Artificial Sequence
  Synthetic oligonucleotide
taatcacatggaaattaccttcatatttcg

SEQ ID NO: 383631 - DNA, 30 bp, Artificial Sequence
  Synthetic oligonucleotide
ttcatttgtgggacggaaccaggtatttcg

SEQ ID NO: 383632 - DNA, 30 bp, Artificial Sequence
  Synthetic oligonucleotide
ggtcgctcattcagagatagtcaactttcg

SEQ ID NO: 383633 - DNA, 30 bp, Artificial Sequence
  Synthetic oligonucleotide
tgcgttcttaacatacagtttcaactttcg

SEQ ID NO: 383634 - DNA, 30 bp, Artificial Sequence
  Synthetic oligonucleotide
ggggatagtatagactagttgtaactttcg

SEQ ID NO: 383635 - DNA, 30 bp, Artificial Sequence
  Synthetic oligonucleotide
cacagaactggtgcgtggtgcaccctttcg

SEQ ID NO: 383636 - DNA, 30 bp, Artificial Sequence
  Synthetic oligonucleotide
tactatactccgatcccgccctcgctttcg

SEQ ID NO: 383637 - DNA, 30 bp, Artificial Sequence
  Synthetic oligonucleotide
aagccgggaggactatgagttggtctttcg

SEQ ID NO: 383638 - DNA, 30 bp, Artificial Sequence
  Synthetic oligonucleotide
gttatggagccaaaggtagtctgtctttcg

SEQ ID NO: 383639 - DNA, 30 bp, Artificial Sequence
  Synthetic oligonucleotide
ctggatagtgcggaagttggaaaagtttcg

SEQ ID NO: 383640 - DNA, 30 bp, Artificial Sequence
  Synthetic oligonucleotide
ttactaacaaatgtagaccatccagtttcg

SEQ ID NO: 383641 - DNA, 30 bp, Artificial Sequence
  Synthetic oligonucleotide
aagacttacatgcgttgatcggcagtttcg

SEQ ID NO: 383642 - DNA, 30 bp, Artificial Sequence
  Synthetic oligonucleotide
tgccagcgtacatactttcgtttcgtttcg

SEQ ID NO: 383643 - DNA, 30 bp, Artificial Sequence
  Synthetic oligonucleotide
aaagggagttcgaattgcctgctggtttcg

SEQ ID NO: 383644 - DNA, 30 bp, Artificial Sequence
  Synthetic oligonucleotide
taaaatagctcgttaccgggtcttgtttcg

SEQ ID NO: 383645 - DNA, 30 bp, Artificial Sequence
  Synthetic oligonucleotide
cgccccatattgcgcccataagggttttcg

SEQ ID NO: 383646 - DNA, 30 bp, Artificial Sequence
  Synthetic oligonucleotide
taatataggtctcggaatttagctttttcg

SEQ ID NO: 383647 - DNA, 30 bp, Artificial Sequence
  Synthetic oligonucleotide
gtacgagtaggcactgaaagaggtttttcg

SEQ ID NO: 383648 - DNA, 30 bp, Artificial Sequence
  Synthetic oligonucleotide
acatatacagccgctatttttaaaaaaagg

SEQ ID NO: 383649 - DNA, 30 bp, Artificial Sequence
  Synthetic oligonucleotide
tgtttatcagtgtattcgaagaagaaaagg

SEQ ID NO: 383650 - DNA, 30 bp, Artificial Sequence
  Synthetic oligonucleotide
aatataagtgcggtcgtcaatacgaaaagg

SEQ ID NO: 383651 - DNA, 30 bp, Artificial Sequence
  Synthetic oligonucleotide
agcgacgcgcagagcagaacccttaaaagg

SEQ ID NO: 383652 - DNA, 30 bp, Artificial Sequence
  Synthetic oligonucleotide
gtacagattccgaatggggtagttaaaagg

SEQ ID NO: 383653 - DNA, 30 bp, Artificial Sequence
  Synthetic oligonucleotide
ctgatcagtcagtagtccctagaacaaagg

SEQ ID NO: 383654 - DNA, 26 bp, Artificial Sequence
  Synthetic oligonucleotide
tttgggccgacctgtatctacaaagg

SEQ ID NO: 383655 - DNA, 30 bp, Artificial Sequence
  Synthetic oligonucleotide
attcacatcaacagcgcttaagcgcaaagg

SEQ ID NO: 383656 - DNA, 30 bp, Artificial Sequence
  Synthetic oligonucleotide
tgcttgatccctgcaactaggttgcaaagg

SEQ ID NO: 383657 - DNA, 31 bp, Artificial Sequence
  Synthetic oligonucleotide
gacttaacaaatattacgtcggcccgaaagg

SEQ ID NO: 383658 - DNA, 30 bp, Artificial Sequence
  Synthetic oligonucleotide
tatgggcccgcgcgcgttggcctcgaaagg

SEQ ID NO: 383659 - DNA, 28 bp, Artificial Sequence
  Synthetic oligonucleotide
ccctggcccgtcgcgcggtaaggaaagg

SEQ ID NO: 383660 - DNA, 30 bp, Artificial Sequence
  Synthetic oligonucleotide
gcgttgctcctgtatggttttccggaaagg

SEQ ID NO: 383661 - DNA, 30 bp, Artificial Sequence
  Synthetic oligonucleotide
ttataactgtcgtgtcgtaatgcggaaagg

SEQ ID NO: 383662 - DNA, 30 bp, Artificial Sequence
  Synthetic oligonucleotide
aattcgccctgcccgagcatgtcggaaagg

SEQ ID NO: 383663 - DNA, 30 bp, Artificial Sequence
  Synthetic oligonucleotide
tgacccgccgttaagcgcttctgggaaagg

SEQ ID NO: 383664 - DNA, 30 bp, Artificial Sequence
  Synthetic oligonucleotide
agtacagtctttcaaagaagaagataaagg

SEQ ID NO: 383665 - DNA, 30 bp, Artificial Sequence
  Synthetic oligonucleotide
cggtcaacaatgagagcgctcggataaagg

SEQ ID NO: 383666 - DNA, 30 bp, Artificial Sequence
  Synthetic oligonucleotide
ggagtcctaagtatcaaactgtactaaagg

SEQ ID NO: 383667 - DNA, 30 bp, Artificial Sequence
  Synthetic oligonucleotide
gagttgtattaatattttccgttctaaagg

SEQ ID NO: 383668 - DNA, 30 bp, Artificial Sequence
  Synthetic oligonucleotide
ggtattctggccgtgttaagtatgtaaagg

SEQ ID NO: 383669 - DNA, 30 bp, Artificial Sequence
  Synthetic oligonucleotide
taagtaaataaacaagcgcgtcaaacaagg

SEQ ID NO: 383670 - DNA, 30 bp, Artificial Sequence
  Synthetic oligonucleotide
cacgtcaacgtaaccagacgcgcgacaagg

SEQ ID NO: 383671 - DNA, 30 bp, Artificial Sequence
  Synthetic oligonucleotide
gaaagtgccgaactaaacctttcgacaagg

SEQ ID NO: 383672 - DNA, 30 bp, Artificial Sequence
  Synthetic oligonucleotide
gggttgttcggccactatccgaggacaagg

SEQ ID NO: 383673 - DNA, 30 bp, Artificial Sequence
  Synthetic oligonucleotide
aattcaattcgtaagcggttactgacaagg

SEQ ID NO: 383674 - DNA, 30 bp, Artificial Sequence
  Synthetic oligonucleotide
ggctcgggggcgtagtggttagtgacaagg

SEQ ID NO: 383675 - DNA, 30 bp, Artificial Sequence
  Synthetic oligonucleotide
gactaacaccaggtaccttgtcatacaagg

SEQ ID NO: 383676 - DNA, 30 bp, Artificial Sequence
  Synthetic oligonucleotide
gaaacaccccactggaagctggatacaagg

SEQ ID NO: 383677 - DNA, 30 bp, Artificial Sequence
  Synthetic oligonucleotide
tccaagtcggcgtgttcactttctacaagg

SEQ ID NO: 383678 - DNA, 31 bp, Artificial Sequence
  Synthetic oligonucleotide
catggattatgatggtggagttattacaagg

SEQ ID NO: 383679 - DNA, 30 bp, Artificial Sequence
  Synthetic oligonucleotide
gttcagcattggtgtgcacgggccccaagg

SEQ ID NO: 383680 - DNA, 30 bp, Artificial Sequence
  Synthetic oligonucleotide
tcggacaattaatttgatgacaggccaagg

SEQ ID NO: 383681 - DNA, 30 bp, Artificial Sequence
  Synthetic oligonucleotide
tactagacattaggcgtaacgggtccaagg

SEQ ID NO: 383682 - DNA, 30 bp, Artificial Sequence
  Synthetic oligonucleotide
ctaaatacatgggagcgggcaggcgcaagg

SEQ ID NO: 383683 - DNA, 30 bp, Artificial Sequence
  Synthetic oligonucleotide
tggttggtggcgcaggcaagcatggcaagg

SEQ ID NO: 383684 - DNA, 30 bp, Artificial Sequence
  Synthetic oligonucleotide
ggtaaatgcgtcgtaactttcatctcaagg

SEQ ID NO: 383685 - DNA, 30 bp, Artificial Sequence
  Synthetic oligonucleotide
tttataagaacgctaatgggtaagtcaagg

SEQ ID NO: 383686 - DNA, 30 bp, Artificial Sequence
  Synthetic oligonucleotide
gtacgtgtatatcttcctcgcaaaagaagg

SEQ ID NO: 383687 - DNA, 30 bp, Artificial Sequence
  Synthetic oligonucleotide
agcattattaaccctgcaagtataagaagg

SEQ ID NO: 383688 - DNA, 30 bp, Artificial Sequence
  Synthetic oligonucleotide
gcaatattgtgtgctaatgagcacagaagg

SEQ ID NO: 383689 - DNA, 30 bp, Artificial Sequence
  Synthetic oligonucleotide
gagcaccaactggaggtaaagtacagaagg

SEQ ID NO: 383690 - DNA, 30 bp, Artificial Sequence
  Synthetic oligonucleotide
attctggtcttcaccatctctgccagaagg

SEQ ID NO: 383691 - DNA, 30 bp, Artificial Sequence
  Synthetic oligonucleotide
aacactcccttgagtttcaatggcagaagg

SEQ ID NO: 383692 - DNA, 30 bp, Artificial Sequence
  Synthetic oligonucleotide
gtaccacaggggctgttaaacttcagaagg

SEQ ID NO: 383693 - DNA, 30 bp, Artificial Sequence
  Synthetic oligonucleotide
gtgccaggttttctggtgtatttcagaagg

SEQ ID NO: 383694 - DNA, 30 bp, Artificial Sequence
  Synthetic oligonucleotide
tccgaaacgcagaccaacagaaggagaagg

SEQ ID NO: 383695 - DNA, 30 bp, Artificial Sequence
  Synthetic oligonucleotide
attgatgtagttaatcaaattattagaagg

SEQ ID NO: 383696 - DNA, 30 bp, Artificial Sequence
  Synthetic oligonucleotide
tcagtgtctaaacaaacaagaatacgaagg

SEQ ID NO: 383697 - DNA, 30 bp, Artificial Sequence
  Synthetic oligonucleotide
caagcatcgttaacgctagtactacgaagg

SEQ ID NO: 383698 - DNA, 30 bp, Artificial Sequence
  Synthetic oligonucleotide
ctcattatgttgggaacggcccaccgaagg

SEQ ID NO: 383699 - DNA, 30 bp, Artificial Sequence
  Synthetic oligonucleotide
gaatatcctccgctcactcgccgtcgaagg

SEQ ID NO: 383700 - DNA, 30 bp, Artificial Sequence
  Synthetic oligonucleotide
ttttcggaggccaaaggcccagtcggaagg

SEQ ID NO: 383701 - DNA, 30 bp, Artificial Sequence
  Synthetic oligonucleotide
atatcctagggcggccccggtaaatgaagg

SEQ ID NO: 383702 - DNA, 30 bp, Artificial Sequence
  Synthetic oligonucleotide
agtggtgaggcgcgcgcagagctctgaagg

SEQ ID NO: 383703 - DNA, 30 bp, Artificial Sequence
  Synthetic oligonucleotide
gaacgcatatgagcctgggcaaagtgaagg

SEQ ID NO: 383704 - DNA, 30 bp, Artificial Sequence
  Synthetic oligonucleotide
ttgtggtagacttggatctacgcgtgaagg

SEQ ID NO: 383705 - DNA, 30 bp, Artificial Sequence
  Synthetic oligonucleotide
gtgttgaccgaaaccctactacggtgaagg

SEQ ID NO: 383706 - DNA, 30 bp, Artificial Sequence
  Synthetic oligonucleotide
atggttagctgggtacagatgtcttgaagg

SEQ ID NO: 383707 - DNA, 30 bp, Artificial Sequence
  Synthetic oligonucleotide
ctgcaccatgaacaggtttatacaataagg

SEQ ID NO: 383708 - DNA, 30 bp, Artificial Sequence
  Synthetic oligonucleotide
gtatccggtgaaacaccgtcgcacataagg

SEQ ID NO: 383709 - DNA, 30 bp, Artificial Sequence
  Synthetic oligonucleotide
tcgagtagcaccttgggaggaaagataagg

SEQ ID NO: 383710 - DNA, 30 bp, Artificial Sequence
  Synthetic oligonucleotide
tattaaggatagggccgggttaagataagg

SEQ ID NO: 383711 - DNA, 30 bp, Artificial Sequence
  Synthetic oligonucleotide
agcgatcctctaatatctttaattataagg

SEQ ID NO: 383712 - DNA, 30 bp, Artificial Sequence
  Synthetic oligonucleotide
aattcgatgtaacccggttagcaactaagg

SEQ ID NO: 383713 - DNA, 30 bp, Artificial Sequence
  Synthetic oligonucleotide
gggtctcgatgatttaaagcactactaagg

SEQ ID NO: 383714 - DNA, 30 bp, Artificial Sequence
  Synthetic oligonucleotide
ttaatctccccgtcttgtttgcggctaagg

SEQ ID NO: 383715 - DNA, 30 bp, Artificial Sequence
  Synthetic oligonucleotide
tgacttgcggatagccatataatcgtaagg

SEQ ID NO: 383716 - DNA, 30 bp, Artificial Sequence
  Synthetic oligonucleotide
gcctcaagccgtttgtgtataaaggtaagg

SEQ ID NO: 383717 - DNA, 30 bp, Artificial Sequence
  Synthetic oligonucleotide
ccattttctagtgtgtactataaggtaagg

SEQ ID NO: 383718 - DNA, 30 bp, Artificial Sequence
  Synthetic oligonucleotide
gtgttacgcattggcctgaaatcggtaagg

SEQ ID NO: 383719 - DNA, 30 bp, Artificial Sequence
  Synthetic oligonucleotide
gggccccgagacttgggggggagggtaagg

SEQ ID NO: 383720 - DNA, 30 bp, Artificial Sequence
  Synthetic oligonucleotide
atggtggtgtcatttggcgttgatgtaagg

SEQ ID NO: 383721 - DNA, 30 bp, Artificial Sequence
  Synthetic oligonucleotide
ctcttgaagggcgtaaaatcctaattaagg

SEQ ID NO: 383722 - DNA, 30 bp, Artificial Sequence
  Synthetic oligonucleotide
gcagcaacaagtaccggtagcggattaagg

SEQ ID NO: 383723 - DNA, 30 bp, Artificial Sequence
  Synthetic oligonucleotide
tacggccattttttctagccatgattaagg

SEQ ID NO: 383724 - DNA, 30 bp, Artificial Sequence
  Synthetic oligonucleotide
ctatcgcatgttacagtacaaacgttaagg

SEQ ID NO: 383725 - DNA, 30 bp, Artificial Sequence
  Synthetic oligonucleotide
ggaaaattgtgcaaaatcccatcgttaagg

SEQ ID NO: 383726 - DNA, 30 bp, Artificial Sequence
  Synthetic oligonucleotide
atgggaatagaggtcaaggcgcgtttaagg

SEQ ID NO: 383727 - DNA, 30 bp, Artificial Sequence
  Synthetic oligonucleotide
caacaagtatgtcggtaggctctcaacagg

SEQ ID NO: 383728 - DNA, 30 bp, Artificial Sequence
  Synthetic oligonucleotide
tcgcggattttttgtattcataagaacagg

SEQ ID NO: 383729 - DNA, 30 bp, Artificial Sequence
  Synthetic oligonucleotide
ctaccatcagtttgtatctctcataacagg

SEQ ID NO: 383730 - DNA, 30 bp, Artificial Sequence
  Synthetic oligonucleotide
ataagcgggcccggatacagccaccacagg

SEQ ID NO: 383731 - DNA, 30 bp, Artificial Sequence
  Synthetic oligonucleotide
aggagacccagcgcttcggctgcccacagg

SEQ ID NO: 383732 - DNA, 30 bp, Artificial Sequence
  Synthetic oligonucleotide
agcggtaaagctgggtaatctgctcacagg

SEQ ID NO: 383733 - DNA, 30 bp, Artificial Sequence
  Synthetic oligonucleotide
atttagacaaaccttgggacttcggacagg

SEQ ID NO: 383734 - DNA, 30 bp, Artificial Sequence
  Synthetic oligonucleotide
gagaaacggcgcctttaaaaatttgacagg

SEQ ID NO: 383735 - DNA, 30 bp, Artificial Sequence
  Synthetic oligonucleotide
aggtgctatttaggagagtgtggctacagg

SEQ ID NO: 383736 - DNA, 30 bp, Artificial Sequence
  Synthetic oligonucleotide
acgttctcgtggccaaaagtgatctacagg

SEQ ID NO: 383737 - DNA, 30 bp, Artificial Sequence
  Synthetic oligonucleotide
tagcaactctgaacgcgtgatctctacagg

SEQ ID NO: 383738 - DNA, 30 bp, Artificial Sequence
  Synthetic oligonucleotide
caggtgacagacggagaccaccagtacagg

SEQ ID NO: 383739 - DNA, 30 bp, Artificial Sequence
  Synthetic oligonucleotide
taatcctgtaggcttggggccccgtacagg

SEQ ID NO: 383740 - DNA, 30 bp, Artificial Sequence
  Synthetic oligonucleotide
tccagctctaaatatgaatttgggtacagg

SEQ ID NO: 383741 - DNA, 30 bp, Artificial Sequence
  Synthetic oligonucleotide
tgtatttcaggacattatcacttttacagg

SEQ ID NO: 383742 - DNA, 30 bp, Artificial Sequence
  Synthetic oligonucleotide
gtcacaggtctggcgcgggcgtgaaccagg

SEQ ID NO: 383743 - DNA, 30 bp, Artificial Sequence
  Synthetic oligonucleotide
aagagcctgtattcagactcagcgaccagg

SEQ ID NO: 383744 - DNA, 30 bp, Artificial Sequence
  Synthetic oligonucleotide
ctacctctttagtcacactgcgggaccagg

SEQ ID NO: 383745 - DNA, 30 bp, Artificial Sequence
  Synthetic oligonucleotide
gttcgctccttcggaggatttatacccagg

SEQ ID NO: 383746 - DNA, 30 bp, Artificial Sequence
  Synthetic oligonucleotide
gtggcctcttctgggaaccgggaccccagg

SEQ ID NO: 383747 - DNA, 30 bp, Artificial Sequence
  Synthetic oligonucleotide
atttgaatttgaatctatctcgcccccagg

SEQ ID NO: 383748 - DNA, 30 bp, Artificial Sequence
  Synthetic oligonucleotide
ttcccgccccggaatagatatggtcccagg

SEQ ID NO: 383749 - DNA, 30 bp, Artificial Sequence
  Synthetic oligonucleotide
aaacgctattagcctccggacccagccagg

SEQ ID NO: 383750 - DNA, 30 bp, Artificial Sequence
  Synthetic oligonucleotide
acatggcgaacaaccatagcattcgccagg

SEQ ID NO: 383751 - DNA, 30 bp, Artificial Sequence
  Synthetic oligonucleotide
caaattctgtctatagcagtaatggccagg

SEQ ID NO: 383752 - DNA, 30 bp, Artificial Sequence
  Synthetic oligonucleotide
ctctatcggttccgtttctttgtggccagg

SEQ ID NO: 383753 - DNA, 30 bp, Artificial Sequence
  Synthetic oligonucleotide
ccactggcgccttgccagtggcaatccagg

SEQ ID NO: 383754 - DNA, 30 bp, Artificial Sequence
  Synthetic oligonucleotide
aatcagtatccaagacaaataccctccagg

SEQ ID NO: 383755 - DNA, 30 bp, Artificial Sequence
  Synthetic oligonucleotide
cagtcagcgagtagtgctcgttggtccagg

SEQ ID NO: 383756 - DNA, 30 bp, Artificial Sequence
  Synthetic oligonucleotide
gcacgatgcctgggagtgcttcattccagg

SEQ ID NO: 383757 - DNA, 30 bp, Artificial Sequence
  Synthetic oligonucleotide
gaataatcaggcaaggcgggttattccagg

SEQ ID NO: 383758 - DNA, 30 bp, Artificial Sequence
  Synthetic oligonucleotide
tgtagctcctaaacgggcttcttttccagg

SEQ ID NO: 383759 - DNA, 30 bp, Artificial Sequence
  Synthetic oligonucleotide
gtatcataatcagttgttctccacagcagg

SEQ ID NO: 383760 - DNA, 30 bp, Artificial Sequence
  Synthetic oligonucleotide
ctattggctccacgcgcccaagggagcagg

SEQ ID NO: 383761 - DNA, 30 bp, Artificial Sequence
  Synthetic oligonucleotide
ggccggggcccattttgcgttactagcagg

SEQ ID NO: 383762 - DNA, 30 bp, Artificial Sequence
  Synthetic oligonucleotide
taacagtctggcatgtcacgctaacgcagg

SEQ ID NO: 383763 - DNA, 30 bp, Artificial Sequence
  Synthetic oligonucleotide
aagttaaaatcaggattgggctaacgcagg

SEQ ID NO: 383764 - DNA, 30 bp, Artificial Sequence
  Synthetic oligonucleotide
tccgcgcggcggttcctttatccccgcagg

SEQ ID NO: 383765 - DNA, 30 bp, Artificial Sequence
  Synthetic oligonucleotide
ttcctctctgtatacacttcgctccgcagg

SEQ ID NO: 383766 - DNA, 30 bp, Artificial Sequence
  Synthetic oligonucleotide
tgtcttttaaatccatttgcattgcgcagg

SEQ ID NO: 383767 - DNA, 30 bp, Artificial Sequence
  Synthetic oligonucleotide
tgaagtctggtcaatgactatgttcgcagg

SEQ ID NO: 383768 - DNA, 30 bp, Artificial Sequence
  Synthetic oligonucleotide
gggccgttctgcaactacacaggaggcagg

SEQ ID NO: 383769 - DNA, 30 bp, Artificial Sequence
  Synthetic oligonucleotide
tctggtccgggcaattatagggccggcagg

SEQ ID NO: 383770 - DNA, 30 bp, Artificial Sequence
  Synthetic oligonucleotide
ggtccaccggtaggtacagtaattggcagg

SEQ ID NO: 383771 - DNA, 30 bp, Artificial Sequence
  Synthetic oligonucleotide
actggcaggcgccatgcttggccatgcagg

SEQ ID NO: 383772 - DNA, 30 bp, Artificial Sequence
  Synthetic oligonucleotide
ctgggttgtctatttttgaggtactgcagg

SEQ ID NO: 383773 - DNA, 30 bp, Artificial Sequence
  Synthetic oligonucleotide
tttcgccggtgggttagttgggcctgcagg

SEQ ID NO: 383774 - DNA, 30 bp, Artificial Sequence
  Synthetic oligonucleotide
gctcgggcgaaggggcgttggagctgcagg

SEQ ID NO: 383775 - DNA, 30 bp, Artificial Sequence
  Synthetic oligonucleotide
tctgacatcgccagaagttgatcgtgcagg

SEQ ID NO: 383776 - DNA, 30 bp, Artificial Sequence
  Synthetic oligonucleotide
gatccgcagcagaccccggactgttgcagg

SEQ ID NO: 383777 - DNA, 30 bp, Artificial Sequence
  Synthetic oligonucleotide
cgcaccacaaccagtatctagttttgcagg

SEQ ID NO: 383778 - DNA, 30 bp, Artificial Sequence
  Synthetic oligonucleotide
gatacctaagtatgagctcatcaaatcagg

SEQ ID NO: 383779 - DNA, 30 bp, Artificial Sequence
  Synthetic oligonucleotide
tatagagatataccatagggaggaatcagg

SEQ ID NO: 383780 - DNA, 30 bp, Artificial Sequence
  Synthetic oligonucleotide
acatacaattgagctcgttggctgatcagg

SEQ ID NO: 383781 - DNA, 30 bp, Artificial Sequence
  Synthetic oligonucleotide
tgtgaactccggcaggttgcgactatcagg

SEQ ID NO: 383782 - DNA, 30 bp, Artificial Sequence
  Synthetic oligonucleotide
tcattacctgagtgcgtcttgcttatcagg

SEQ ID NO: 383783 - DNA, 30 bp, Artificial Sequence
  Synthetic oligonucleotide
attactgaagcctattgccttgaactcagg

SEQ ID NO: 383784 - DNA, 30 bp, Artificial Sequence
  Synthetic oligonucleotide
tatttgggaatgtatatgagccgactcagg

SEQ ID NO: 383785 - DNA, 30 bp, Artificial Sequence
  Synthetic oligonucleotide
cagatcccgatcagggaaaccctgctcagg

SEQ ID NO: 383786 - DNA, 30 bp, Artificial Sequence
  Synthetic oligonucleotide
accgaaacgctaagaacccagtctctcagg

SEQ ID NO: 383787 - DNA, 30 bp, Artificial Sequence
  Synthetic oligonucleotide
tgttaaataatgatgaaccacgcagtcagg

SEQ ID NO: 383788 - DNA, 30 bp, Artificial Sequence
  Synthetic oligonucleotide
ctccgtcactacgcatgggggggggtcagg

SEQ ID NO: 383789 - DNA, 30 bp, Artificial Sequence
  Synthetic oligonucleotide
tgccgaggggtgaacgtaacaggtgtcagg

SEQ ID NO: 383790 - DNA, 30 bp, Artificial Sequence
  Synthetic oligonucleotide
tactcggatctttgggatttcattgtcagg

SEQ ID NO: 383791 - DNA, 30 bp, Artificial Sequence
  Synthetic oligonucleotide
acatttaggtgagcttgctctattgtcagg

SEQ ID NO: 383792 - DNA, 30 bp, Artificial Sequence
  Synthetic oligonucleotide
tattccatcttgctagcatcaaaattcagg

SEQ ID NO: 383793 - DNA, 30 bp, Artificial Sequence
  Synthetic oligonucleotide
cctcgtggttacaggttggagcacttcagg

SEQ ID NO: 383794 - DNA, 30 bp, Artificial Sequence
  Synthetic oligonucleotide
ggactggggacgaaccaccgtcacttcagg

SEQ ID NO: 383795 - DNA, 30 bp, Artificial Sequence
  Synthetic oligonucleotide
ttttcttggggtatgtgatacaagttcagg

SEQ ID NO: 383796 - DNA, 30 bp, Artificial Sequence
  Synthetic oligonucleotide
gagggggggggaaattcgcgctagttcagg

SEQ ID NO: 383797 - DNA, 30 bp, Artificial Sequence
  Synthetic oligonucleotide
gatgactggccaggatggacaggtttcagg

SEQ ID NO: 383798 - DNA, 30 bp, Artificial Sequence
  Synthetic oligonucleotide
ccaaaccctgattcagttccaattttcagg

SEQ ID NO: 383799 - DNA, 30 bp, Artificial Sequence
  Synthetic oligonucleotide
tagggcccgaacgacttggcttttttcagg

SEQ ID NO: 383800 - DNA, 30 bp, Artificial Sequence
  Synthetic oligonucleotide
attatatgctggtattataggttaaagagg

SEQ ID NO: 383801 - DNA, 30 bp, Artificial Sequence
  Synthetic oligonucleotide
gaacttgttgtccatactgcatacaagagg

SEQ ID NO: 383802 - DNA, 30 bp, Artificial Sequence
  Synthetic oligonucleotide
tccagttttgatttagcgccattcaagagg

SEQ ID NO: 383803 - DNA, 30 bp, Artificial Sequence
  Synthetic oligonucleotide
gagtgaactgtttttgaaggcacgaagagg

SEQ ID NO: 383804 - DNA, 30 bp, Artificial Sequence
  Synthetic oligonucleotide
gaagggaaatacccttcccgaccacagagg

SEQ ID NO: 383805 - DNA, 30 bp, Artificial Sequence
  Synthetic oligonucleotide
gtgcatgcaagtatgaaaccaaggcagagg

SEQ ID NO: 383806 - DNA, 30 bp, Artificial Sequence
  Synthetic oligonucleotide
ggattcggtgtggtaagcgaatcatagagg

SEQ ID NO: 383807 - DNA, 30 bp, Artificial Sequence
  Synthetic oligonucleotide
gcgacttccttcgatgtcgcaggatagagg

SEQ ID NO: 383808 - DNA, 30 bp, Artificial Sequence
  Synthetic oligonucleotide
ctcctggttggtacaccttctcgctagagg

SEQ ID NO: 383809 - DNA, 30 bp, Artificial Sequence
  Synthetic oligonucleotide
gttcttctgtgttgttattggatctagagg

SEQ ID NO: 383810 - DNA, 30 bp, Artificial Sequence
  Synthetic oligonucleotide
tagcactttgaactatgaaaagtctagagg

SEQ ID NO: 383811 - DNA, 30 bp, Artificial Sequence
  Synthetic oligonucleotide
tgtagccaggagacggccagtcgttagagg

SEQ ID NO: 383812 - DNA, 30 bp, Artificial Sequence
  Synthetic oligonucleotide
gccttagcactcaatttctttcgaccgagg

SEQ ID NO: 383813 - DNA, 30 bp, Artificial Sequence
  Synthetic oligonucleotide
cttcatgagagactctagtgtaacccgagg

SEQ ID NO: 383814 - DNA, 30 bp, Artificial Sequence
  Synthetic oligonucleotide
ggcccggcaaagcttggataatatccgagg

SEQ ID NO: 383815 - DNA, 30 bp, Artificial Sequence
  Synthetic oligonucleotide
ggatcccggaaaagtttaacgtttccgagg

SEQ ID NO: 383816 - DNA, 30 bp, Artificial Sequence
  Synthetic oligonucleotide
aaccggaacctgcgaagtttctcagcgagg

SEQ ID NO: 383817 - DNA, 30 bp, Artificial Sequence
  Synthetic oligonucleotide
aacttaggttgaagtcggagcgctgcgagg

SEQ ID NO: 383818 - DNA, 30 bp, Artificial Sequence
  Synthetic oligonucleotide
gacacaaggtctccgtataaaagctcgagg

SEQ ID NO: 383819 - DNA, 30 bp, Artificial Sequence
  Synthetic oligonucleotide
tgttagcttagtcgaaagtaacagtcgagg

SEQ ID NO: 383820 - DNA, 30 bp, Artificial Sequence
  Synthetic oligonucleotide
attcgtcccggaggcccaatactgtcgagg

SEQ ID NO: 383821 - DNA, 30 bp, Artificial Sequence
  Synthetic oligonucleotide
ctgaacttactgaattagctgggttcgagg

SEQ ID NO: 383822 - DNA, 30 bp, Artificial Sequence
  Synthetic oligonucleotide
tacggccatagtgctccgataaaaaggagg

SEQ ID NO: 383823 - DNA, 30 bp, Artificial Sequence
  Synthetic oligonucleotide
gaagggaaatacgtttaggtcacaaggagg

SEQ ID NO: 383824 - DNA, 30 bp, Artificial Sequence
  Synthetic oligonucleotide
ttccctcaaatccgatgaagcaacaggagg

SEQ ID NO: 383825 - DNA, 30 bp, Artificial Sequence
  Synthetic oligonucleotide
agcggaccgacgggcttgtaaatcaggagg

SEQ ID NO: 383826 - DNA, 30 bp, Artificial Sequence
  Synthetic oligonucleotide
gggtaggcagaggtcaactctgtcaggagg

SEQ ID NO: 383827 - DNA, 30 bp, Artificial Sequence
  Synthetic oligonucleotide
atgccgcaggcaatggaattcttcaggagg

SEQ ID NO: 383828 - DNA, 30 bp, Artificial Sequence
  Synthetic oligonucleotide
tttgccacgcataaggttacttctaggagg

SEQ ID NO: 383829 - DNA, 30 bp, Artificial Sequence
  Synthetic oligonucleotide
aaatggtgcgcccgtgcgctccgtaggagg

SEQ ID NO: 383830 - DNA, 31 bp, Artificial Sequence
  Synthetic oligonucleotide
ctcttggcggttgctacgtgctcttaggagg

SEQ ID NO: 383831 - DNA, 30 bp, Artificial Sequence
  Synthetic oligonucleotide
gataatacggaccaggctggtagccggagg

SEQ ID NO: 383832 - DNA, 30 bp, Artificial Sequence
  Synthetic oligonucleotide
aaggaagaccgccgtgtgtaacggcggagg

SEQ ID NO: 383833 - DNA, 30 bp, Artificial Sequence
  Synthetic oligonucleotide
cctcactactagatgtggagtagtcggagg

SEQ ID NO: 383834 - DNA, 30 bp, Artificial Sequence
  Synthetic oligonucleotide
catcactagaaatggcctaaccaagggagg

SEQ ID NO: 383835 - DNA, 30 bp, Artificial Sequence
  Synthetic oligonucleotide
ttacacttaaacatgatatcaacagggagg

SEQ ID NO: 383836 - DNA, 30 bp, Artificial Sequence
  Synthetic oligonucleotide
tactgggtttaaaagccttgaatagggagg

SEQ ID NO: 383837 - DNA, 30 bp, Artificial Sequence
  Synthetic oligonucleotide
gcctcgtgtgtttgcaagactttcgggagg

SEQ ID NO: 383838 - DNA, 31 bp, Artificial Sequence
  Synthetic oligonucleotide
acctcagcagggatgcaggccgatggggagg

SEQ ID NO: 383839 - DNA, 30 bp, Artificial Sequence
  Synthetic oligonucleotide
ggatactgaggggttttggttaatgggagg

SEQ ID NO: 383840 - DNA, 30 bp, Artificial Sequence
  Synthetic oligonucleotide
ttgatggcctgcgtgattcctactgggagg

SEQ ID NO: 383841 - DNA, 30 bp, Artificial Sequence
  Synthetic oligonucleotide
cacctgccagagaatggtgtgtctgggagg

SEQ ID NO: 383842 - DNA, 30 bp, Artificial Sequence
  Synthetic oligonucleotide
ggcaccgactcgtaagtaccggttgggagg

SEQ ID NO: 383843 - DNA, 30 bp, Artificial Sequence
  Synthetic oligonucleotide
ttattctacgagatattggatgaatggagg

SEQ ID NO: 383844 - DNA, 30 bp, Artificial Sequence
  Synthetic oligonucleotide
ggctgttccactcgtgctatacgatggagg

SEQ ID NO: 383845 - DNA, 30 bp, Artificial Sequence
  Synthetic oligonucleotide
gttcatcggagtcacgatatagactggagg

SEQ ID NO: 383846 - DNA, 30 bp, Artificial Sequence
  Synthetic oligonucleotide
tggctctgtccgattcgtcagagctggagg

SEQ ID NO: 383847 - DNA, 30 bp, Artificial Sequence
  Synthetic oligonucleotide
gaggatttcttggcgaaagttctctggagg

SEQ ID NO: 383848 - DNA, 30 bp, Artificial Sequence
  Synthetic oligonucleotide
tatactcagcataatttctcagcgtggagg

SEQ ID NO: 383849 - DNA, 30 bp, Artificial Sequence
  Synthetic oligonucleotide
ggtctcccgatgggatctgtaccttggagg

SEQ ID NO: 383850 - DNA, 30 bp, Artificial Sequence
  Synthetic oligonucleotide
ttgcttaggccaccaggatcaatttggagg

SEQ ID NO: 383851 - DNA, 30 bp, Artificial Sequence
  Synthetic oligonucleotide
agtatagcgggggacggggcgatttggagg

SEQ ID NO: 383852 - DNA, 30 bp, Artificial Sequence
  Synthetic oligonucleotide
tccttcaggtgtgaccagcatttttggagg

SEQ ID NO: 383853 - DNA, 30 bp, Artificial Sequence
  Synthetic oligonucleotide
tcctttccgagactggcgattaaaatgagg

SEQ ID NO: 383854 - DNA, 30 bp, Artificial Sequence
  Synthetic oligonucleotide
tctaacgctggggtctgtggagaaatgagg

SEQ ID NO: 383855 - DNA, 30 bp, Artificial Sequence
  Synthetic oligonucleotide
tctaactattaagtaccgctggcaatgagg

SEQ ID NO: 383856 - DNA, 30 bp, Artificial Sequence
  Synthetic oligonucleotide
tgccaggccgttcaggatctcataatgagg

SEQ ID NO: 383857 - DNA, 30 bp, Artificial Sequence
  Synthetic oligonucleotide
tttctagtatgccgacgaccccggatgagg

SEQ ID NO: 383858 - DNA, 30 bp, Artificial Sequence
  Synthetic oligonucleotide
tgggccaaactgcttttggtttcactgagg

SEQ ID NO: 383859 - DNA, 30 bp, Artificial Sequence
  Synthetic oligonucleotide
attctaggcgagataacgaaccccctgagg

SEQ ID NO: 383860 - DNA, 30 bp, Artificial Sequence
  Synthetic oligonucleotide
ctgttcataactcaatgcttgtgcctgagg

SEQ ID NO: 383861 - DNA, 30 bp, Artificial Sequence
  Synthetic oligonucleotide
atatgcatggccacacagtccgggctgagg

SEQ ID NO: 383862 - DNA, 30 bp, Artificial Sequence
  Synthetic oligonucleotide
ataatccataatacagcggttactctgagg

SEQ ID NO: 383863 - DNA, 30 bp, Artificial Sequence
  Synthetic oligonucleotide
gaaacccaaaggctgatgcaactagtgagg

SEQ ID NO: 383864 - DNA, 30 bp, Artificial Sequence
  Synthetic oligonucleotide
ggacaacacgtgcgtaaccgtcacgtgagg

SEQ ID NO: 383865 - DNA, 30 bp, Artificial Sequence
  Synthetic oligonucleotide
gtggtgcttgtggtaatgaacacggtgagg

SEQ ID NO: 383866 - DNA, 30 bp, Artificial Sequence
  Synthetic oligonucleotide
ttcaaatttcgacaccagcggtgtgtgagg

SEQ ID NO: 383867 - DNA, 30 bp, Artificial Sequence
  Synthetic oligonucleotide
gggaagctgcctagggtcgaagttgtgagg

SEQ ID NO: 383868 - DNA, 30 bp, Artificial Sequence
  Synthetic oligonucleotide
aagcctaagacacatcgtaaagatttgagg

SEQ ID NO: 383869 - DNA, 30 bp, Artificial Sequence
  Synthetic oligonucleotide
gttgacacaggagttcgtactggtttgagg

SEQ ID NO: 383870 - DNA, 30 bp, Artificial Sequence
  Synthetic oligonucleotide
atcaaactcccgcggcgagggtgtttgagg

SEQ ID NO: 383871 - DNA, 30 bp, Artificial Sequence
  Synthetic oligonucleotide
ttatctcgaacctgtgcaaacccaaatagg

SEQ ID NO: 383872 - DNA, 30 bp, Artificial Sequence
  Synthetic oligonucleotide
aactggttatgtcggtcgcacataaatagg

SEQ ID NO: 383873 - DNA, 30 bp, Artificial Sequence
  Synthetic oligonucleotide
gcaactatagtaaaccaatatcgcaatagg

SEQ ID NO: 383874 - DNA, 30 bp, Artificial Sequence
  Synthetic oligonucleotide
gctgtttcgttaacctgggaattcaatagg

SEQ ID NO: 383875 - DNA, 30 bp, Artificial Sequence
  Synthetic oligonucleotide
gggtaaggtccgcattgcacaaagaatagg

SEQ ID NO: 383876 - DNA, 30 bp, Artificial Sequence
  Synthetic oligonucleotide
atttgtgtagagatcgtctattcgaatagg

SEQ ID NO: 383877 - DNA, 30 bp, Artificial Sequence
  Synthetic oligonucleotide
tctgacgaggttagattccttcggaatagg

SEQ ID NO: 383878 - DNA, 30 bp, Artificial Sequence
  Synthetic oligonucleotide
gtcgcgtccaggggacatgttgggaatagg

SEQ ID NO: 383879 - DNA, 30 bp, Artificial Sequence
  Synthetic oligonucleotide
tgtgcgggtcgcgctatcgctgtgaatagg

SEQ ID NO: 383880 - DNA, 30 bp, Artificial Sequence
  Synthetic oligonucleotide
ctcgctttataaggaaacgtcttgaatagg

SEQ ID NO: 383881 - DNA, 30 bp, Artificial Sequence
  Synthetic oligonucleotide
cttatactctcggtaccaggctgtaatagg

SEQ ID NO: 383882 - DNA, 30 bp, Artificial Sequence
  Synthetic oligonucleotide
gcctcagggtagtgagaaccttcccatagg

SEQ ID NO: 383883 - DNA, 30 bp, Artificial Sequence
  Synthetic oligonucleotide
tatcgcgcgtatggcatgatacgccatagg

SEQ ID NO: 383884 - DNA, 30 bp, Artificial Sequence
  Synthetic oligonucleotide
aaaccggcgaaccgagaggtttgccatagg

SEQ ID NO: 383885 - DNA, 30 bp, Artificial Sequence
  Synthetic oligonucleotide
atacttcctgtgtcattatgaaagcatagg

SEQ ID NO: 383886 - DNA, 30 bp, Artificial Sequence
  Synthetic oligonucleotide
acgttccgaaggcaggtttggaagcatagg

SEQ ID NO: 383887 - DNA, 30 bp, Artificial Sequence
  Synthetic oligonucleotide
aatttattttgttgcttcggcccgcatagg

SEQ ID NO: 383888 - DNA, 30 bp, Artificial Sequence
  Synthetic oligonucleotide
agcggcattttaagcgatatgatgcatagg

SEQ ID NO: 383889 - DNA, 30 bp, Artificial Sequence
  Synthetic oligonucleotide
taaaaccctgtaaaaggtcccctgcatagg

SEQ ID NO: 383890 - DNA, 30 bp, Artificial Sequence
  Synthetic oligonucleotide
ccggtttcgggtgacgcccactttcatagg

SEQ ID NO: 383891 - DNA, 30 bp, Artificial Sequence
  Synthetic oligonucleotide
taccgttcacgacatgaatacctagatagg

SEQ ID NO: 383892 - DNA, 30 bp, Artificial Sequence
  Synthetic oligonucleotide
ggcgctcattccctgagcgcactcgatagg

SEQ ID NO: 383893 - DNA, 30 bp, Artificial Sequence
  Synthetic oligonucleotide
atccgagtttgagccctcgagacggatagg

SEQ ID NO: 383894 - DNA, 30 bp, Artificial Sequence
  Synthetic oligonucleotide
tactgtctaacagacttattaggggatagg

SEQ ID NO: 383895 - DNA, 30 bp, Artificial Sequence
  Synthetic oligonucleotide
ccaaatgttgtgaagggctccatggatagg

SEQ ID NO: 383896 - DNA, 30 bp, Artificial Sequence
  Synthetic oligonucleotide
tattagtagaaggagcgtgtgattgatagg

SEQ ID NO: 383897 - DNA, 30 bp, Artificial Sequence
  Synthetic oligonucleotide
ataaagcgtttgcaatataattttgatagg

SEQ ID NO: 383898 - DNA, 30 bp, Artificial Sequence
  Synthetic oligonucleotide
ggttaaatgcgtacttttattgtatatagg

SEQ ID NO: 383899 - DNA, 30 bp, Artificial Sequence
  Synthetic oligonucleotide
ataatttgcggattaaagcagttatatagg

SEQ ID NO: 383900 - DNA, 30 bp, Artificial Sequence
  Synthetic oligonucleotide
tcgttagaatcacgaccagcacactatagg

SEQ ID NO: 383901 - DNA, 30 bp, Artificial Sequence
  Synthetic oligonucleotide
gaggtggaaaagcgagggttcgggtatagg

SEQ ID NO: 383902 - DNA, 30 bp, Artificial Sequence
  Synthetic oligonucleotide
ctattaaacaagggggggtgagtgtatagg

SEQ ID NO: 383903 - DNA, 30 bp, Artificial Sequence
  Synthetic oligonucleotide
ggatttctatttggaactcagttgtatagg

SEQ ID NO: 383904 - DNA, 30 bp, Artificial Sequence
  Synthetic oligonucleotide
catattttgggtgcgcttagccattatagg

SEQ ID NO: 383905 - DNA, 30 bp, Artificial Sequence
  Synthetic oligonucleotide
tcttagtcttcaccgggatgaatttatagg

SEQ ID NO: 383906 - DNA, 30 bp, Artificial Sequence
  Synthetic oligonucleotide
cgggactaacaattccgtgtggcaactagg

SEQ ID NO: 383907 - DNA, 30 bp, Artificial Sequence
  Synthetic oligonucleotide
ttaggactttttaaccggtggcgaactagg

SEQ ID NO: 383908 - DNA, 30 bp, Artificial Sequence
  Synthetic oligonucleotide
taccgtcgacggggaggccggataactagg

SEQ ID NO: 383909 - DNA, 30 bp, Artificial Sequence
  Synthetic oligonucleotide
acaaagcacgtagagttataagccactagg

SEQ ID NO: 383910 - DNA, 30 bp, Artificial Sequence
  Synthetic oligonucleotide
tcctcggccaacgatttttaattcactagg

SEQ ID NO: 383911 - DNA, 30 bp, Artificial Sequence
  Synthetic oligonucleotide
cagacccctttaacagtggaccggactagg

SEQ ID NO: 383912 - DNA, 30 bp, Artificial Sequence
  Synthetic oligonucleotide
taagtacaaaagcctttaggctggactagg

SEQ ID NO: 383913 - DNA, 30 bp, Artificial Sequence
  Synthetic oligonucleotide
cctaaactttttgcgtctgacttgactagg

SEQ ID NO: 383914 - DNA, 30 bp, Artificial Sequence
  Synthetic oligonucleotide
tatttctgtgatagtatatacactactagg

SEQ ID NO: 383915 - DNA, 30 bp, Artificial Sequence
  Synthetic oligonucleotide
ctagttggaacaggtgtattaccccctagg

SEQ ID NO: 383916 - DNA, 30 bp, Artificial Sequence
  Synthetic oligonucleotide
gtcgcatctacttaaaaaattttccctagg

SEQ ID NO: 383917 - DNA, 30 bp, Artificial Sequence
  Synthetic oligonucleotide
gcataggtgcgcctcgcaaaaactcctagg

SEQ ID NO: 383918 - DNA, 30 bp, Artificial Sequence
  Synthetic oligonucleotide
tcacatttggattatcgatacactcctagg

SEQ ID NO: 383919 - DNA, 30 bp, Artificial Sequence
  Synthetic oligonucleotide
aatgctgagataagtgggacgcttcctagg

SEQ ID NO: 383920 - DNA, 30 bp, Artificial Sequence
  Synthetic oligonucleotide
agtgggagcgtctggagtgtagcagctagg

SEQ ID NO: 383921 - DNA, 30 bp, Artificial Sequence
  Synthetic oligonucleotide
gtaaaattagtacttacactttcagctagg

SEQ ID NO: 383922 - DNA, 30 bp, Artificial Sequence
  Synthetic oligonucleotide
cacggctataaggtgcgacgcttagctagg

SEQ ID NO: 383923 - DNA, 31 bp, Artificial Sequence
  Synthetic oligonucleotide
gggggcttgcattacgctggcgcacgctagg

SEQ ID NO: 383924 - DNA, 30 bp, Artificial Sequence
  Synthetic oligonucleotide
gcctagcttctccacacaatatctgctagg

SEQ ID NO: 383925 - DNA, 30 bp, Artificial Sequence
  Synthetic oligonucleotide
atctaagtgatcgggcccaactgtgctagg

SEQ ID NO: 383926 - DNA, 30 bp, Artificial Sequence
  Synthetic oligonucleotide
aaaagccacggaaaatgatgctgtgctagg

SEQ ID NO: 383927 - DNA, 30 bp, Artificial Sequence
  Synthetic oligonucleotide
agttataacaattactcgcacattgctagg

SEQ ID NO: 383928 - DNA, 30 bp, Artificial Sequence
  Synthetic oligonucleotide
agcttttgagcggcacgcaagtttgctagg

SEQ ID NO: 383929 - DNA, 30 bp, Artificial Sequence
  Synthetic oligonucleotide
cgcgtcatcgtatcgtcgcgctgatctagg

SEQ ID NO: 383930 - DNA, 30 bp, Artificial Sequence
  Synthetic oligonucleotide
aacaccgttacaagaaggtgtaactctagg

SEQ ID NO: 383931 - DNA, 30 bp, Artificial Sequence
  Synthetic oligonucleotide
atgttgtctgtggccaattgcacctctagg

SEQ ID NO: 383932 - DNA, 30 bp, Artificial Sequence
  Synthetic oligonucleotide
gccatcttcgtacagcaacataattctagg

SEQ ID NO: 383933 - DNA, 30 bp, Artificial Sequence
  Synthetic oligonucleotide
tttcaagcccggcaacgtgtgagttctagg

SEQ ID NO: 383934 - DNA, 30 bp, Artificial Sequence
  Synthetic oligonucleotide
ctcctgatataacagtgccggtcaagtagg

SEQ ID NO: 383935 - DNA, 30 bp, Artificial Sequence
  Synthetic oligonucleotide
ttataagtgattctcttcggttcaagtagg

SEQ ID NO: 383936 - DNA, 30 bp, Artificial Sequence
  Synthetic oligonucleotide
caaagcccggtcgtaccacacttaagtagg

SEQ ID NO: 383937 - DNA, 30 bp, Artificial Sequence
  Synthetic oligonucleotide
cggtggtagtagctgcctgtgatcagtagg

SEQ ID NO: 383938 - DNA, 30 bp, Artificial Sequence
  Synthetic oligonucleotide
tcctccccctaaggagaggggccgagtagg

SEQ ID NO: 383939 - DNA, 30 bp, Artificial Sequence
  Synthetic oligonucleotide
ccggtatgtcgctcataaacctcgagtagg

SEQ ID NO: 383940 - DNA, 30 bp, Artificial Sequence
  Synthetic oligonucleotide
gttcactgtggtgcttaaccttcgagtagg

SEQ ID NO: 383941 - DNA, 30 bp, Artificial Sequence
  Synthetic oligonucleotide
ccgcctcctgcagagtaattatggagtagg

SEQ ID NO: 383942 - DNA, 30 bp, Artificial Sequence
  Synthetic oligonucleotide
ctgccggggtctgaaatactccatagtagg

SEQ ID NO: 383943 - DNA, 30 bp, Artificial Sequence
  Synthetic oligonucleotide
ccgttaccttgaatgctcgggcgacgtagg

SEQ ID NO: 383944 - DNA, 30 bp, Artificial Sequence
  Synthetic oligonucleotide
atattgtttcagaataagccaatacgtagg

SEQ ID NO: 383945 - DNA, 30 bp, Artificial Sequence
  Synthetic oligonucleotide
taataacttaacgatgatggtttacgtagg

SEQ ID NO: 383946 - DNA, 30 bp, Artificial Sequence
  Synthetic oligonucleotide
taaaagatattgtgggaaagttaccgtagg

SEQ ID NO: 383947 - DNA, 30 bp, Artificial Sequence
  Synthetic oligonucleotide
tctgtgcttgactgccataacgcccgtagg

SEQ ID NO: 383948 - DNA, 30 bp, Artificial Sequence
  Synthetic oligonucleotide
tagcttctggacatacaaatgtcgcgtagg

SEQ ID NO: 383949 - DNA, 30 bp, Artificial Sequence
  Synthetic oligonucleotide
gtgcgtttaataactgaccgtcctcgtagg

SEQ ID NO: 383950 - DNA, 30 bp, Artificial Sequence
  Synthetic oligonucleotide
ttattaggatcatcggggtcttgtcgtagg

SEQ ID NO: 383951 - DNA, 30 bp, Artificial Sequence
  Synthetic oligonucleotide
ggttcaatagtcatatagatataaggtagg

SEQ ID NO: 383952 - DNA, 30 bp, Artificial Sequence
  Synthetic oligonucleotide
agccccgtatagtataacgaactaggtagg

SEQ ID NO: 383953 - DNA, 30 bp, Artificial Sequence
  Synthetic oligonucleotide
catagtggatcctcatacccgtacggtagg

SEQ ID NO: 383954 - DNA, 30 bp, Artificial Sequence
  Synthetic oligonucleotide
gatgtgtacaagtttctccactccggtagg

SEQ ID NO: 383955 - DNA, 30 bp, Artificial Sequence
  Synthetic oligonucleotide
ttatctgggcacagtcccgttcagggtagg

SEQ ID NO: 383956 - DNA, 30 bp, Artificial Sequence
  Synthetic oligonucleotide
aatcctagtggatttcgaacttcgggtagg

SEQ ID NO: 383957 - DNA, 30 bp, Artificial Sequence
  Synthetic oligonucleotide
gaagccagcgaatataaaattgggggtagg

SEQ ID NO: 383958 - DNA, 30 bp, Artificial Sequence
  Synthetic oligonucleotide
ggagcatcagaccgccgatgcggtggtagg

SEQ ID NO: 383959 - DNA, 30 bp, Artificial Sequence
  Synthetic oligonucleotide
tcaattttaaggtcctttctgtaatgtagg

SEQ ID NO: 383960 - DNA, 30 bp, Artificial Sequence
  Synthetic oligonucleotide
accttacccgactccgtagtcttatgtagg

SEQ ID NO: 383961 - DNA, 30 bp, Artificial Sequence
  Synthetic oligonucleotide
atcgcaaggttcgatattcatttctgtagg

SEQ ID NO: 383962 - DNA, 30 bp, Artificial Sequence
  Synthetic oligonucleotide
gaatacgcaccatagagtaccaaaattagg

SEQ ID NO: 383963 - DNA, 30 bp, Artificial Sequence
  Synthetic oligonucleotide
ccgacccattcacacagaacgttaattagg

SEQ ID NO: 383964 - DNA, 30 bp, Artificial Sequence
  Synthetic oligonucleotide
gttggaagacctcttgttagcaacattagg

SEQ ID NO: 383965 - DNA, 30 bp, Artificial Sequence
  Synthetic oligonucleotide
tgacacggcccctgtaagtaggacattagg

SEQ ID NO: 383966 - DNA, 30 bp, Artificial Sequence
  Synthetic oligonucleotide
taaatatgtgccgggcccattcatattagg

SEQ ID NO: 383967 - DNA, 30 bp, Artificial Sequence
  Synthetic oligonucleotide
aaaattagtgaggtgacggaaccacttagg

SEQ ID NO: 383968 - DNA, 30 bp, Artificial Sequence
  Synthetic oligonucleotide
cgtattgtttactgccatagaagccttagg

SEQ ID NO: 383969 - DNA, 30 bp, Artificial Sequence
  Synthetic oligonucleotide
gccaccgccatccgaccctcccatcttagg

SEQ ID NO: 383970 - DNA, 30 bp, Artificial Sequence
  Synthetic oligonucleotide
tgtccgtaagatcggtgaagacttcttagg

SEQ ID NO: 383971 - DNA, 30 bp, Artificial Sequence
  Synthetic oligonucleotide
tttcagataaaaagtttaaaatttcttagg

SEQ ID NO: 383972 - DNA, 30 bp, Artificial Sequence
  Synthetic oligonucleotide
tgttttagcgccggccaaagaccagttagg

SEQ ID NO: 383973 - DNA, 30 bp, Artificial Sequence
  Synthetic oligonucleotide
gcaccgatagccattaaaataagagttagg

SEQ ID NO: 383974 - DNA, 30 bp, Artificial Sequence
  Synthetic oligonucleotide
ggaacaacgagggtaaaaccccgagttagg

SEQ ID NO: 383975 - DNA, 30 bp, Artificial Sequence
  Synthetic oligonucleotide
tgtcactctgatatccctgcgtgagttagg

SEQ ID NO: 383976 - DNA, 30 bp, Artificial Sequence
  Synthetic oligonucleotide
ttatgtgtcatcctatactattacgttagg

SEQ ID NO: 383977 - DNA, 30 bp, Artificial Sequence
  Synthetic oligonucleotide
gatcggcgctattcattggttgccgttagg

SEQ ID NO: 383978 - DNA, 29 bp, Artificial Sequence
  Synthetic oligonucleotide
gaatagacaagggaagtcttgtcgttagg

SEQ ID NO: 383979 - DNA, 30 bp, Artificial Sequence
  Synthetic oligonucleotide
gggggtgcgttaagtaccgaacaggttagg

SEQ ID NO: 383980 - DNA, 30 bp, Artificial Sequence
  Synthetic oligonucleotide
ggatacgttatcacatgatccgcggttagg

SEQ ID NO: 383981 - DNA, 30 bp, Artificial Sequence
  Synthetic oligonucleotide
tcattaaggctgttattttagtcggttagg

SEQ ID NO: 383982 - DNA, 30 bp, Artificial Sequence
  Synthetic oligonucleotide
tgaccccaggcccttctggcgggggttagg

SEQ ID NO: 383983 - DNA, 30 bp, Artificial Sequence
  Synthetic oligonucleotide
gaggacacgaggtttggggagtgggttagg

SEQ ID NO: 383984 - DNA, 30 bp, Artificial Sequence
  Synthetic oligonucleotide
cctagttaactaactctagatacatttagg

SEQ ID NO: 383985 - DNA, 30 bp, Artificial Sequence
  Synthetic oligonucleotide
taacgagggattggttgtaaggcatttagg

SEQ ID NO: 383986 - DNA, 30 bp, Artificial Sequence
  Synthetic oligonucleotide
tctagatcccgggtacaatatcgatttagg

SEQ ID NO: 383987 - DNA, 30 bp, Artificial Sequence
  Synthetic oligonucleotide
taacgctaggttcaagttctcctatttagg

SEQ ID NO: 383988 - DNA, 30 bp, Artificial Sequence
  Synthetic oligonucleotide
tgagggaataggtctcatggatactttagg

SEQ ID NO: 383989 - DNA, 30 bp, Artificial Sequence
  Synthetic oligonucleotide
ctgaccccaaatgaagccagtccctttagg

SEQ ID NO: 383990 - DNA, 30 bp, Artificial Sequence
  Synthetic oligonucleotide
gaatggtgataatatcccatcagctttagg

SEQ ID NO: 383991 - DNA, 30 bp, Artificial Sequence
  Synthetic oligonucleotide
taaagcataagggagcaatacggctttagg

SEQ ID NO: 383992 - DNA, 30 bp, Artificial Sequence
  Synthetic oligonucleotide
cacggttcaccccgcagagtatgctttagg

SEQ ID NO: 383993 - DNA, 30 bp, Artificial Sequence
  Synthetic oligonucleotide
gataatgtgggggcgctggaggggtttagg

SEQ ID NO: 383994 - DNA, 30 bp, Artificial Sequence
  Synthetic oligonucleotide
cgcgacggacgcatcacggccctgtttagg

SEQ ID NO: 383995 - DNA, 30 bp, Artificial Sequence
  Synthetic oligonucleotide
ctcagctggcggtcagtatcacattttagg

SEQ ID NO: 383996 - DNA, 30 bp, Artificial Sequence
  Synthetic oligonucleotide
caagtcatttggtctagtgtagattttagg

SEQ ID NO: 383997 - DNA, 30 bp, Artificial Sequence
  Synthetic oligonucleotide
ccgtcctccggcgggatgggcggaaaacgg

SEQ ID NO: 383998 - DNA, 30 bp, Artificial Sequence
  Synthetic oligonucleotide
cccgtcggaatttttatgcttgtaaaacgg

SEQ ID NO: 383999 - DNA, 30 bp, Artificial Sequence
  Synthetic oligonucleotide
tattggttggccttttatgaccacaaacgg

SEQ ID NO: 384000 - DNA, 30 bp, Artificial Sequence
  Synthetic oligonucleotide
tttaccctgccagagcgcagccccaaacgg

SEQ ID NO: 384001 - DNA, 30 bp, Artificial Sequence
  Synthetic oligonucleotide
cagttgaacagactcacgtgggccaaacgg

SEQ ID NO: 384002 - DNA, 30 bp, Artificial Sequence
  Synthetic oligonucleotide
gcgcgtactattggatcgagttccaaacgg

SEQ ID NO: 384003 - DNA, 30 bp, Artificial Sequence
  Synthetic oligonucleotide
tcgttatcttcgtattcaccaagcaaacgg

SEQ ID NO: 384004 - DNA, 30 bp, Artificial Sequence
  Synthetic oligonucleotide
cagtaacgacagttgtcgtaaaagaaacgg

SEQ ID NO: 384005 - DNA, 30 bp, Artificial Sequence
  Synthetic oligonucleotide
ccgtctatcacgcaaatggttgcgaaacgg

SEQ ID NO: 384006 - DNA, 30 bp, Artificial Sequence
  Synthetic oligonucleotide
acttactgattatgctgcgggcgtaaacgg

SEQ ID NO: 384007 - DNA, 30 bp, Artificial Sequence
  Synthetic oligonucleotide
gccactggcaagtttggaatcaaacaacgg

SEQ ID NO: 384008 - DNA, 30 bp, Artificial Sequence
  Synthetic oligonucleotide
cttgaagttattagtagaccgccacaacgg

SEQ ID NO: 384009 - DNA, 30 bp, Artificial Sequence
  Synthetic oligonucleotide
cgtctcgcgggtctcaggataagacaacgg

SEQ ID NO: 384010 - DNA, 30 bp, Artificial Sequence
  Synthetic oligonucleotide
gtcacgtttaggccgtggcgtcgacaacgg

SEQ ID NO: 384011 - DNA, 30 bp, Artificial Sequence
  Synthetic oligonucleotide
aagcctattcccagcctgggtatacaacgg

SEQ ID NO: 384012 - DNA, 30 bp, Artificial Sequence
  Synthetic oligonucleotide
cctttcatcacgtctagcccgctccaacgg

SEQ ID NO: 384013 - DNA, 30 bp, Artificial Sequence
  Synthetic oligonucleotide
gtgttgtaccacagcgggaataatcaacgg

SEQ ID NO: 384014 - DNA, 30 bp, Artificial Sequence
  Synthetic oligonucleotide
ctcaaggggacaacttgttaagatcaacgg

SEQ ID NO: 384015 - DNA, 30 bp, Artificial Sequence
  Synthetic oligonucleotide
ccgtcgcaggcgagggtaatacgtcaacgg

SEQ ID NO: 384016 - DNA, 30 bp, Artificial Sequence
  Synthetic oligonucleotide
ctgagtctacaggttgacaagttagaacgg

SEQ ID NO: 384017 - DNA, 30 bp, Artificial Sequence
  Synthetic oligonucleotide
tgagttaacgggtttacgctgatcgaacgg

SEQ ID NO: 384018 - DNA, 30 bp, Artificial Sequence
  Synthetic oligonucleotide
gaattaaggactccgggtttacgggaacgg

SEQ ID NO: 384019 - DNA, 30 bp, Artificial Sequence
  Synthetic oligonucleotide
catcgacccctctgtcggtgtctggaacgg

SEQ ID NO: 384020 - DNA, 30 bp, Artificial Sequence
  Synthetic oligonucleotide
gagtatgaagaatgcgtggatagtgaacgg

SEQ ID NO: 384021 - DNA, 30 bp, Artificial Sequence
  Synthetic oligonucleotide
ttgattgcgcgcacgagttccattgaacgg

SEQ ID NO: 384022 - DNA, 30 bp, Artificial Sequence
  Synthetic oligonucleotide
tactcttgaatttcgacatctgcataacgg

SEQ ID NO: 384023 - DNA, 30 bp, Artificial Sequence
  Synthetic oligonucleotide
gcactcattgcaatgacattccgataacgg

SEQ ID NO: 384024 - DNA, 30 bp, Artificial Sequence
  Synthetic oligonucleotide
atgttgacacaagcgcagagtttataacgg

SEQ ID NO: 384025 - DNA, 30 bp, Artificial Sequence
  Synthetic oligonucleotide
gtcgaaagacttattccagccccctaacgg

SEQ ID NO: 384026 - DNA, 30 bp, Artificial Sequence
  Synthetic oligonucleotide
cattcgaaccctaacccagttccgtaacgg

SEQ ID NO: 384027 - DNA, 30 bp, Artificial Sequence
  Synthetic oligonucleotide
taggttacgcgaggttaagcggggtaacgg

SEQ ID NO: 384028 - DNA, 30 bp, Artificial Sequence
  Synthetic oligonucleotide
cggctaacccacgttaaatgccgttaacgg

SEQ ID NO: 384029 - DNA, 30 bp, Artificial Sequence
  Synthetic oligonucleotide
atgatacattgttagccgcgcctttaacgg

SEQ ID NO: 384030 - DNA, 30 bp, Artificial Sequence
  Synthetic oligonucleotide
aagccccgattgataaagggtacaacacgg

SEQ ID NO: 384031 - DNA, 30 bp, Artificial Sequence
  Synthetic oligonucleotide
gcgtgtaagggtaaactggggagaacacgg

SEQ ID NO: 384032 - DNA, 30 bp, Artificial Sequence
  Synthetic oligonucleotide
aagtcggtggttagtcgcccattaacacgg

SEQ ID NO: 384033 - DNA, 30 bp, Artificial Sequence
  Synthetic oligonucleotide
tcgcagtatctattcttgtgagcgacacgg

SEQ ID NO: 384034 - DNA, 30 bp, Artificial Sequence
  Synthetic oligonucleotide
acatgttaaatctaacggaatgcgacacgg

SEQ ID NO: 384035 - DNA, 30 bp, Artificial Sequence
  Synthetic oligonucleotide
atgacccgggcaacacatcgtaatacacgg

SEQ ID NO: 384036 - DNA, 30 bp, Artificial Sequence
  Synthetic oligonucleotide
taatagttctaacgaataagaactacacgg

SEQ ID NO: 384037 - DNA, 30 bp, Artificial Sequence
  Synthetic oligonucleotide
ttacatttggagaatgctatccctacacgg

SEQ ID NO: 384038 - DNA, 30 bp, Artificial Sequence
  Synthetic oligonucleotide
cgatacgagtccggttacgtctttacacgg

SEQ ID NO: 384039 - DNA, 30 bp, Artificial Sequence
  Synthetic oligonucleotide
tagattcgttttgatattaatagcccacgg

SEQ ID NO: 384040 - DNA, 30 bp, Artificial Sequence
  Synthetic oligonucleotide
tattgtaagtgtttaagtgttgtcccacgg

SEQ ID NO: 384041 - DNA, 30 bp, Artificial Sequence
  Synthetic oligonucleotide
cgcgaatggtcagaagtcgcatcgccacgg

SEQ ID NO: 384042 - DNA, 30 bp, Artificial Sequence
  Synthetic oligonucleotide
aacatccgatacatctaaggacctccacgg

SEQ ID NO: 384043 - DNA, 30 bp, Artificial Sequence
  Synthetic oligonucleotide
ttatctgttcccgagtatgaccgtccacgg

SEQ ID NO: 384044 - DNA, 30 bp, Artificial Sequence
  Synthetic oligonucleotide
gtcctaaccggccaacgaaattaagcacgg

SEQ ID NO: 384045 - DNA, 30 bp, Artificial Sequence
  Synthetic oligonucleotide
caattcccagcgctacaggcgggagcacgg

SEQ ID NO: 384046 - DNA, 30 bp, Artificial Sequence
  Synthetic oligonucleotide
gtagaccctggctttcgcttaatagcacgg

SEQ ID NO: 384047 - DNA, 29 bp, Artificial Sequence
  Synthetic oligonucleotide
taaatgcggtgctcgtgtgtcaggcacgg

SEQ ID NO: 384048 - DNA, 30 bp, Artificial Sequence
  Synthetic oligonucleotide
taaacttaaagactcaatgcttcggcacgg

SEQ ID NO: 384049 - DNA, 30 bp, Artificial Sequence
  Synthetic oligonucleotide
gccagtaatcggacccttctctgggcacgg

SEQ ID NO: 384050 - DNA, 30 bp, Artificial Sequence
  Synthetic oligonucleotide
gcacgtctgctaagcgattagatggcacgg

SEQ ID NO: 384051 - DNA, 30 bp, Artificial Sequence
  Synthetic oligonucleotide
accgagaatggaatggctcccaatgcacgg

SEQ ID NO: 384052 - DNA, 30 bp, Artificial Sequence
  Synthetic oligonucleotide
tatatctccggggaaagaggtgcatcacgg

SEQ ID NO: 384053 - DNA, 30 bp, Artificial Sequence
  Synthetic oligonucleotide
ctcacatttttcgacgttttacgatcacgg

SEQ ID NO: 384054 - DNA, 30 bp, Artificial Sequence
  Synthetic oligonucleotide
ttagcacttaagagtagggagtgatcacgg

SEQ ID NO: 384055 - DNA, 30 bp, Artificial Sequence
  Synthetic oligonucleotide
gggttttccaaaatttcatttcgctcacgg

SEQ ID NO: 384056 - DNA, 30 bp, Artificial Sequence
  Synthetic oligonucleotide
gtccggggtattggagggatgccgtcacgg

SEQ ID NO: 384057 - DNA, 30 bp, Artificial Sequence
  Synthetic oligonucleotide
atctaaaaggcggcgtgttgggattcacgg

SEQ ID NO: 384058 - DNA, 30 bp, Artificial Sequence
  Synthetic oligonucleotide
tgcaccgtatagcctaagaaaggaagacgg

SEQ ID NO: 384059 - DNA, 30 bp, Artificial Sequence
  Synthetic oligonucleotide
ctataagtcgtagtgtgagtcaatagacgg

SEQ ID NO: 384060 - DNA, 30 bp, Artificial Sequence
  Synthetic oligonucleotide
tccggagtgttagtatgggtctatagacgg

SEQ ID NO: 384061 - DNA, 30 bp, Artificial Sequence
  Synthetic oligonucleotide
gccaactgggtgtacatgtagcttagacgg

SEQ ID NO: 384062 - DNA, 30 bp, Artificial Sequence
  Synthetic oligonucleotide
cagctaatgagggacaaactttaacgacgg

SEQ ID NO: 384063 - DNA, 30 bp, Artificial Sequence
  Synthetic oligonucleotide
cctggagtatcaggggctcgcctacgacgg

SEQ ID NO: 384064 - DNA, 30 bp, Artificial Sequence
  Synthetic oligonucleotide
tgtaccactggtcgcatgtcatcccgacgg

SEQ ID NO: 384065 - DNA, 30 bp, Artificial Sequence
  Synthetic oligonucleotide
acggtatacagctatgtaacgttccgacgg

SEQ ID NO: 384066 - DNA, 31 bp, Artificial Sequence
  Synthetic oligonucleotide
tagggtgccacactcgcgacgggggcgacgg

SEQ ID NO: 384067 - DNA, 30 bp, Artificial Sequence
  Synthetic oligonucleotide
taacgctagagaccgtactatcatcgacgg

SEQ ID NO: 384068 - DNA, 30 bp, Artificial Sequence
  Synthetic oligonucleotide
agcttggtgttaatactgtcatatcgacgg

SEQ ID NO: 384069 - DNA, 30 bp, Artificial Sequence
  Synthetic oligonucleotide
cggtgcttccttaggtatacgtcaggacgg

SEQ ID NO: 384070 - DNA, 30 bp, Artificial Sequence
  Synthetic oligonucleotide
cctagccaagtggctctgaacatgggacgg

SEQ ID NO: 384071 - DNA, 30 bp, Artificial Sequence
  Synthetic oligonucleotide
tcgagccaaccctaggcgggagttggacgg

SEQ ID NO: 384072 - DNA, 30 bp, Artificial Sequence
  Synthetic oligonucleotide
ggcattgactatcctgaatgccgatgacgg

SEQ ID NO: 384073 - DNA, 30 bp, Artificial Sequence
  Synthetic oligonucleotide
acttgtcgtcgtggacctgtagtatgacgg

SEQ ID NO: 384074 - DNA, 30 bp, Artificial Sequence
  Synthetic oligonucleotide
catacgaaatattagggatctgactgacgg

SEQ ID NO: 384075 - DNA, 30 bp, Artificial Sequence
  Synthetic oligonucleotide
gagttgacgaaagtgtaatagccctgacgg

SEQ ID NO: 384076 - DNA, 30 bp, Artificial Sequence
  Synthetic oligonucleotide
cacaccgtgcacggatgaattatctgacgg

SEQ ID NO: 384077 - DNA, 30 bp, Artificial Sequence
  Synthetic oligonucleotide
taactagtcactatttatgattggtgacgg

SEQ ID NO: 384078 - DNA, 30 bp, Artificial Sequence
  Synthetic oligonucleotide
atcttcggacgtaaaaccatcttcatacgg

SEQ ID NO: 384079 - DNA, 30 bp, Artificial Sequence
  Synthetic oligonucleotide
attttgcaactctccggcccgaagatacgg

SEQ ID NO: 384080 - DNA, 30 bp, Artificial Sequence
  Synthetic oligonucleotide
ggcgatagcgtcgctatttccctgatacgg

SEQ ID NO: 384081 - DNA, 30 bp, Artificial Sequence
  Synthetic oligonucleotide
ggccatagctttccgaaaagcctgatacgg

SEQ ID NO: 384082 - DNA, 30 bp, Artificial Sequence
  Synthetic oligonucleotide
gttacacggcgatgcgattttaatatacgg

SEQ ID NO: 384083 - DNA, 30 bp, Artificial Sequence
  Synthetic oligonucleotide
gcgagtcccgcagcgtaaaaatatatacgg

SEQ ID NO: 384084 - DNA, 30 bp, Artificial Sequence
  Synthetic oligonucleotide
aatacgaagccgatagcccaatatatacgg

SEQ ID NO: 384085 - DNA, 30 bp, Artificial Sequence
  Synthetic oligonucleotide
caggggattggagtgttacatagtatacgg

SEQ ID NO: 384086 - DNA, 30 bp, Artificial Sequence
  Synthetic oligonucleotide
ggaatcagcttaagcagatgacaactacgg

SEQ ID NO: 384087 - DNA, 30 bp, Artificial Sequence
  Synthetic oligonucleotide
ttcgattgaagcatataggacgacctacgg

SEQ ID NO: 384088 - DNA, 30 bp, Artificial Sequence
  Synthetic oligonucleotide
tcctcctgtaggaatgacaggtgcctacgg

SEQ ID NO: 384089 - DNA, 30 bp, Artificial Sequence
  Synthetic oligonucleotide
gggagactgcactgcttagagaatctacgg

SEQ ID NO: 384090 - DNA, 30 bp, Artificial Sequence
  Synthetic oligonucleotide
tgaagcttagtagacccattgaatctacgg

SEQ ID NO: 384091 - DNA, 30 bp, Artificial Sequence
  Synthetic oligonucleotide
aaaaagagttcatacaagatgcgtctacgg

SEQ ID NO: 384092 - DNA, 30 bp, Artificial Sequence
  Synthetic oligonucleotide
caagacctgcttattgtggacggtctacgg

SEQ ID NO: 384093 - DNA, 30 bp, Artificial Sequence
  Synthetic oligonucleotide
aaagtacaagttcaaactattgaagtacgg

SEQ ID NO: 384094 - DNA, 30 bp, Artificial Sequence
  Synthetic oligonucleotide
catccttgcataccaggataaatagtacgg

SEQ ID NO: 384095 - DNA, 30 bp, Artificial Sequence
  Synthetic oligonucleotide
cagagtataggtcataatgaccacgtacgg

SEQ ID NO: 384096 - DNA, 30 bp, Artificial Sequence
  Synthetic oligonucleotide
aacgcgggtacgttagcccctaccgtacgg

SEQ ID NO: 384097 - DNA, 30 bp, Artificial Sequence
  Synthetic oligonucleotide
atgacatagtgacatacttgtagggtacgg

SEQ ID NO: 384098 - DNA, 30 bp, Artificial Sequence
  Synthetic oligonucleotide
taataagttgtgtgcgggagaatggtacgg

SEQ ID NO: 384099 - DNA, 30 bp, Artificial Sequence
  Synthetic oligonucleotide
agtcctaatttttggggaatgatggtacgg

SEQ ID NO: 384100 - DNA, 30 bp, Artificial Sequence
  Synthetic oligonucleotide
taggaccgtaattgcatttatatggtacgg

SEQ ID NO: 384101 - DNA, 30 bp, Artificial Sequence
  Synthetic oligonucleotide
gcgcgtaggacgggtgcgtcttatgtacgg

SEQ ID NO: 384102 - DNA, 30 bp, Artificial Sequence
  Synthetic oligonucleotide
atccaacctaactaaaatatatctgtacgg

SEQ ID NO: 384103 - DNA, 30 bp, Artificial Sequence
  Synthetic oligonucleotide
tttgacacagaggtggtctacggattacgg

SEQ ID NO: 384104 - DNA, 30 bp, Artificial Sequence
  Synthetic oligonucleotide
ggaaaagagtgctctcccacgctattacgg

SEQ ID NO: 384105 - DNA, 30 bp, Artificial Sequence
  Synthetic oligonucleotide
gttaagattgaatttcagggagccttacgg

SEQ ID NO: 384106 - DNA, 30 bp, Artificial Sequence
  Synthetic oligonucleotide
agttgaggcggcggtgtattgtatttacgg

SEQ ID NO: 384107 - DNA, 30 bp, Artificial Sequence
  Synthetic oligonucleotide
attgccgcgttccttaaaagggctttacgg

SEQ ID NO: 384108 - DNA, 30 bp, Artificial Sequence
  Synthetic oligonucleotide
tccagagctcttcgaaagagaagaaaccgg

SEQ ID NO: 384109 - DNA, 30 bp, Artificial Sequence
  Synthetic oligonucleotide
ttgctggttagatggaagtggggaaaccgg

SEQ ID NO: 384110 - DNA, 30 bp, Artificial Sequence
  Synthetic oligonucleotide
agaggaacaaatggaggacgggtaaaccgg

SEQ ID NO: 384111 - DNA, 30 bp, Artificial Sequence
  Synthetic oligonucleotide
actcgggcgtcttgcattacacacaaccgg

SEQ ID NO: 384112 - DNA, 30 bp, Artificial Sequence
  Synthetic oligonucleotide
ataatagttacggagaagcagcagaaccgg

SEQ ID NO: 384113 - DNA, 30 bp, Artificial Sequence
  Synthetic oligonucleotide
gtcctcggggggccgcaggcaatacaccgg

SEQ ID NO: 384114 - DNA, 30 bp, Artificial Sequence
  Synthetic oligonucleotide
caccgaatattcaatatattggagcaccgg

SEQ ID NO: 384115 - DNA, 30 bp, Artificial Sequence
  Synthetic oligonucleotide
gagttgctacactagttgtgtccgcaccgg

SEQ ID NO: 384116 - DNA, 30 bp, Artificial Sequence
  Synthetic oligonucleotide
ttaaaagacaaggtgtctggtaggcaccgg

SEQ ID NO: 384117 - DNA, 30 bp, Artificial Sequence
  Synthetic oligonucleotide
actaaaggcccataggatatccggcaccgg

SEQ ID NO: 384118 - DNA, 30 bp, Artificial Sequence
  Synthetic oligonucleotide
tagacgaatagacacttttctcgtcaccgg

SEQ ID NO: 384119 - DNA, 30 bp, Artificial Sequence
  Synthetic oligonucleotide
acgaatcccaagcgtcttctatttcaccgg

SEQ ID NO: 384120 - DNA, 30 bp, Artificial Sequence
  Synthetic oligonucleotide
acatgcgggtcgataacccgacaggaccgg

SEQ ID NO: 384121 - DNA, 30 bp, Artificial Sequence
  Synthetic oligonucleotide
cctagtactaactcaggagtattggaccgg

SEQ ID NO: 384122 - DNA, 30 bp, Artificial Sequence
  Synthetic oligonucleotide
cttacatgacgatattaggtattggaccgg

SEQ ID NO: 384123 - DNA, 30 bp, Artificial Sequence
  Synthetic oligonucleotide
caaaagccgcgctagttgggtaatgaccgg

SEQ ID NO: 384124 - DNA, 30 bp, Artificial Sequence
  Synthetic oligonucleotide
agcaacttctctctatggtacattgaccgg

SEQ ID NO: 384125 - DNA, 30 bp, Artificial Sequence
  Synthetic oligonucleotide
gtagttcgtttccgtgacatacttgaccgg

SEQ ID NO: 384126 - DNA, 30 bp, Artificial Sequence
  Synthetic oligonucleotide
gcagcaccaactttcacgaatggataccgg

SEQ ID NO: 384127 - DNA, 30 bp, Artificial Sequence
  Synthetic oligonucleotide
gtcaaagctaccatgagacgtatataccgg

SEQ ID NO: 384128 - DNA, 30 bp, Artificial Sequence
  Synthetic oligonucleotide
cgccgcacaagtcccacgccaacctaccgg

SEQ ID NO: 384129 - DNA, 30 bp, Artificial Sequence
  Synthetic oligonucleotide
tggcaattacggttctacgtgttctaccgg

SEQ ID NO: 384130 - DNA, 30 bp, Artificial Sequence
  Synthetic oligonucleotide
aaccgatcactctacttgcccaagtaccgg

SEQ ID NO: 384131 - DNA, 30 bp, Artificial Sequence
  Synthetic oligonucleotide
gggagtcttacgtaagagctggggtaccgg

SEQ ID NO: 384132 - DNA, 27 bp, Artificial Sequence
  Synthetic oligonucleotide
agacggctggctcaaccgatgtaccgg

SEQ ID NO: 384133 - DNA, 30 bp, Artificial Sequence
  Synthetic oligonucleotide
gttgtcgcttccaaaggtatgacaacccgg

SEQ ID NO: 384134 - DNA, 30 bp, Artificial Sequence
  Synthetic oligonucleotide
aggtaccggtacaaagttttgtgaacccgg

SEQ ID NO: 384135 - DNA, 30 bp, Artificial Sequence
  Synthetic oligonucleotide
aggagctgatcacacccctggaatacccgg

SEQ ID NO: 384136 - DNA, 30 bp, Artificial Sequence
  Synthetic oligonucleotide
ctggaagtattgtacccttcatgaccccgg

SEQ ID NO: 384137 - DNA, 30 bp, Artificial Sequence
  Synthetic oligonucleotide
ttcggacgccgagactagagttgaccccgg

SEQ ID NO: 384138 - DNA, 30 bp, Artificial Sequence
  Synthetic oligonucleotide
ccaagctgccatattatcagtgtaccccgg

SEQ ID NO: 384139 - DNA, 30 bp, Artificial Sequence
  Synthetic oligonucleotide
ctgacatcaacattaagctaacacccccgg

SEQ ID NO: 384140 - DNA, 30 bp, Artificial Sequence
  Synthetic oligonucleotide
gaccgcgtgacgtcgctgcctcagccccgg

SEQ ID NO: 384141 - DNA, 30 bp, Artificial Sequence
  Synthetic oligonucleotide
aataacctcaacgggattaattaggcccgg

SEQ ID NO: 384142 - DNA, 30 bp, Artificial Sequence
  Synthetic oligonucleotide
tgcgaaccatgcccgttaaccggtgcccgg

SEQ ID NO: 384143 - DNA, 30 bp, Artificial Sequence
  Synthetic oligonucleotide
tcaactaattccggcaccaccggatcccgg

SEQ ID NO: 384144 - DNA, 30 bp, Artificial Sequence
  Synthetic oligonucleotide
gaacatagtacaacgggcaaaccctcccgg

SEQ ID NO: 384145 - DNA, 30 bp, Artificial Sequence
  Synthetic oligonucleotide
ccattaatcaaacacgaaagcggctcccgg

SEQ ID NO: 384146 - DNA, 30 bp, Artificial Sequence
  Synthetic oligonucleotide
caacgtctttgacaggttgagcggtcccgg

SEQ ID NO: 384147 - DNA, 30 bp, Artificial Sequence
  Synthetic oligonucleotide
taaggacatggccggctaggatcttcccgg

SEQ ID NO: 384148 - DNA, 30 bp, Artificial Sequence
  Synthetic oligonucleotide
agtacgcgaggttcgggcgtctgttcccgg

SEQ ID NO: 384149 - DNA, 30 bp, Artificial Sequence
  Synthetic oligonucleotide
aaggcatgacatctataaatatgaagccgg

SEQ ID NO: 384150 - DNA, 30 bp, Artificial Sequence
  Synthetic oligonucleotide
gtgcaccgaggccaggaagggcacagccgg

SEQ ID NO: 384151 - DNA, 30 bp, Artificial Sequence
  Synthetic oligonucleotide
taatgttgggaaaattttcaatgcagccgg

SEQ ID NO: 384152 - DNA, 30 bp, Artificial Sequence
  Synthetic oligonucleotide
gatttatagagtaattactcaatcagccgg

SEQ ID NO: 384153 - DNA, 30 bp, Artificial Sequence
  Synthetic oligonucleotide
ccggaggtcggaagcgtctatctcagccgg

SEQ ID NO: 384154 - DNA, 30 bp, Artificial Sequence
  Synthetic oligonucleotide
gacccttgcacttgtagacctctcagccgg

SEQ ID NO: 384155 - DNA, 30 bp, Artificial Sequence
  Synthetic oligonucleotide
tgtacctatgtgggccgagcgctacgccgg

SEQ ID NO: 384156 - DNA, 30 bp, Artificial Sequence
  Synthetic oligonucleotide
gggtgcctgcgccgcctaatcgcgcgccgg

SEQ ID NO: 384157 - DNA, 30 bp, Artificial Sequence
  Synthetic oligonucleotide
ggtatcgcaaccttatcttcatgtcgccgg

SEQ ID NO: 384158 - DNA, 30 bp, Artificial Sequence
  Synthetic oligonucleotide
ggatcgattgtgaaatatcttttaggccgg

SEQ ID NO: 384159 - DNA, 30 bp, Artificial Sequence
  Synthetic oligonucleotide
gggtcatccatctttttggtgatcggccgg

SEQ ID NO: 384160 - DNA, 30 bp, Artificial Sequence
  Synthetic oligonucleotide
ggagggtaatattaataggacaagggccgg

SEQ ID NO: 384161 - DNA, 30 bp, Artificial Sequence
  Synthetic oligonucleotide
ttaatttaagtaaaaggcgaatagggccgg

SEQ ID NO: 384162 - DNA, 30 bp, Artificial Sequence
  Synthetic oligonucleotide
aagagagacaaacgaaggctgtagggccgg

SEQ ID NO: 384163 - DNA, 30 bp, Artificial Sequence
  Synthetic oligonucleotide
ctggagactagatgggtttaggcgggccgg

SEQ ID NO: 384164 - DNA, 30 bp, Artificial Sequence
  Synthetic oligonucleotide
gtacgaataatgtgggctgtgttgggccgg

SEQ ID NO: 384165 - DNA, 30 bp, Artificial Sequence
  Synthetic oligonucleotide
ccgctccggatacttggcaatagctgccgg

SEQ ID NO: 384166 - DNA, 30 bp, Artificial Sequence
  Synthetic oligonucleotide
atatccttgccgtctaagcttcgctgccgg

SEQ ID NO: 384167 - DNA, 30 bp, Artificial Sequence
  Synthetic oligonucleotide
tatccggacggtgttcggacgcaaatccgg

SEQ ID NO: 384168 - DNA, 30 bp, Artificial Sequence
  Synthetic oligonucleotide
tttatgctgctgctaagaggatgaatccgg

SEQ ID NO: 384169 - DNA, 30 bp, Artificial Sequence
  Synthetic oligonucleotide
ggagggctaattctcaccgggtagatccgg

SEQ ID NO: 384170 - DNA, 30 bp, Artificial Sequence
  Synthetic oligonucleotide
tgacgaggcacaggagtgtcagcgatccgg

SEQ ID NO: 384171 - DNA, 30 bp, Artificial Sequence
  Synthetic oligonucleotide
gagtttggggtaagttcatagtgactccgg

SEQ ID NO: 384172 - DNA, 30 bp, Artificial Sequence
  Synthetic oligonucleotide
tttgccgtctcattaagccaaagcctccgg

SEQ ID NO: 384173 - DNA, 30 bp, Artificial Sequence
  Synthetic oligonucleotide
attcttgaaggaagcttgactccgctccgg

SEQ ID NO: 384174 - DNA, 30 bp, Artificial Sequence
  Synthetic oligonucleotide
agggtaagtcgcccggactctatgctccgg

SEQ ID NO: 384175 - DNA, 30 bp, Artificial Sequence
  Synthetic oligonucleotide
atagggaatcagcacagggagagtctccgg

SEQ ID NO: 384176 - DNA, 30 bp, Artificial Sequence
  Synthetic oligonucleotide
aaaggtagcttgagtgtctctcaagtccgg

SEQ ID NO: 384177 - DNA, 30 bp, Artificial Sequence
  Synthetic oligonucleotide
gggtaccgcttggcggcggaaagcgtccgg

SEQ ID NO: 384178 - DNA, 30 bp, Artificial Sequence
  Synthetic oligonucleotide
aaataagggtacctgaagacatgcgtccgg

SEQ ID NO: 384179 - DNA, 30 bp, Artificial Sequence
  Synthetic oligonucleotide
gtggctatgagcgatgggtaaagggtccgg

SEQ ID NO: 384180 - DNA, 30 bp, Artificial Sequence
  Synthetic oligonucleotide
cgcagtaaacaaaatggtcaacgggtccgg

SEQ ID NO: 384181 - DNA, 30 bp, Artificial Sequence
  Synthetic oligonucleotide
gttgatagttaaacttgtaggcatgtccgg

SEQ ID NO: 384182 - DNA, 30 bp, Artificial Sequence
  Synthetic oligonucleotide
cgccacaaaccgactagctactatgtccgg

SEQ ID NO: 384183 - DNA, 30 bp, Artificial Sequence
  Synthetic oligonucleotide
agagagccccaagccactgacggtgtccgg

SEQ ID NO: 384184 - DNA, 30 bp, Artificial Sequence
  Synthetic oligonucleotide
tccttacgtgctcaccacttcttattccgg

SEQ ID NO: 384185 - DNA, 30 bp, Artificial Sequence
  Synthetic oligonucleotide
agtagcgtgtcaagcgttctacacttccgg

SEQ ID NO: 384186 - DNA, 30 bp, Artificial Sequence
  Synthetic oligonucleotide
tctagggggtgcacactaagatccttccgg

SEQ ID NO: 384187 - DNA, 30 bp, Artificial Sequence
  Synthetic oligonucleotide
aagatttgttctgagctttgtggcttccgg

SEQ ID NO: 384188 - DNA, 30 bp, Artificial Sequence
  Synthetic oligonucleotide
ccatcgttgttatcgggcgttggtttccgg

SEQ ID NO: 384189 - DNA, 30 bp, Artificial Sequence
  Synthetic oligonucleotide
gcatcttagccatgttggttgtgcaagcgg

SEQ ID NO: 384190 - DNA, 30 bp, Artificial Sequence
  Synthetic oligonucleotide
gtaaatataggagctaacgtgtcgaagcgg

SEQ ID NO: 384191 - DNA, 30 bp, Artificial Sequence
  Synthetic oligonucleotide
tgctccgcatgcagggcaatcgctaagcgg

SEQ ID NO: 384192 - DNA, 30 bp, Artificial Sequence
  Synthetic oligonucleotide
cgtattgacgtgtcgcttgtccgtaagcgg

SEQ ID NO: 384193 - DNA, 30 bp, Artificial Sequence
  Synthetic oligonucleotide
agatcaatgttatcgtcatattgtaagcgg

SEQ ID NO: 384194 - DNA, 30 bp, Artificial Sequence
  Synthetic oligonucleotide
gagacttgtcagaaggttagtttacagcgg

SEQ ID NO: 384195 - DNA, 30 bp, Artificial Sequence
  Synthetic oligonucleotide
agtatctatgaaaaggtattaggccagcgg

SEQ ID NO: 384196 - DNA, 30 bp, Artificial Sequence
  Synthetic oligonucleotide
agaggtttctctcatcgctgtttccagcgg

SEQ ID NO: 384197 - DNA, 30 bp, Artificial Sequence
  Synthetic oligonucleotide
tttgtgggtaataggtagttggggcagcgg

SEQ ID NO: 384198 - DNA, 30 bp, Artificial Sequence
  Synthetic oligonucleotide
cataatttactcaaacgcaatgggcagcgg

SEQ ID NO: 384199 - DNA, 30 bp, Artificial Sequence
  Synthetic oligonucleotide
ttaatatgtcccgccagcggtcatcagcgg

SEQ ID NO: 384200 - DNA, 30 bp, Artificial Sequence
  Synthetic oligonucleotide
atggcctagatgacgctgtggcaagagcgg

SEQ ID NO: 384201 - DNA, 30 bp, Artificial Sequence
  Synthetic oligonucleotide
tgttgaatgagcaggacagtatccgagcgg

SEQ ID NO: 384202 - DNA, 30 bp, Artificial Sequence
  Synthetic oligonucleotide
gtcactaagcttgctcatcttcaggagcgg

SEQ ID NO: 384203 - DNA, 30 bp, Artificial Sequence
  Synthetic oligonucleotide
accgaagttcaaagggggttctgggagcgg

SEQ ID NO: 384204 - DNA, 30 bp, Artificial Sequence
  Synthetic oligonucleotide
gtgtgggtgggggggaggagcggtgagcgg

SEQ ID NO: 384205 - DNA, 30 bp, Artificial Sequence
  Synthetic oligonucleotide
accctgcactggtgactcttccaatagcgg

SEQ ID NO: 384206 - DNA, 30 bp, Artificial Sequence
  Synthetic oligonucleotide
ggtttatgatcgtattgtgtaggatagcgg

SEQ ID NO: 384207 - DNA, 30 bp, Artificial Sequence
  Synthetic oligonucleotide
cataaaccttccggctgcagggtatagcgg

SEQ ID NO: 384208 - DNA, 30 bp, Artificial Sequence
  Synthetic oligonucleotide
aaactttcccagtgactaaatacctagcgg

SEQ ID NO: 384209 - DNA, 30 bp, Artificial Sequence
  Synthetic oligonucleotide
aattgaggtctggccattgacgcctagcgg

SEQ ID NO: 384210 - DNA, 30 bp, Artificial Sequence
  Synthetic oligonucleotide
gctcaatgaatgtgacgtggggcctagcgg

SEQ ID NO: 384211 - DNA, 30 bp, Artificial Sequence
  Synthetic oligonucleotide
agcattcttgggcaggtgcggatgtagcgg

SEQ ID NO: 384212 - DNA, 30 bp, Artificial Sequence
  Synthetic oligonucleotide
gaataaacccattgcgagttgcattagcgg

SEQ ID NO: 384213 - DNA, 30 bp, Artificial Sequence
  Synthetic oligonucleotide
acaaaactgctggttgacggcacttagcgg

SEQ ID NO: 384214 - DNA, 30 bp, Artificial Sequence
  Synthetic oligonucleotide
gcactgcggacaactatgtcgctttagcgg

SEQ ID NO: 384215 - DNA, 30 bp, Artificial Sequence
  Synthetic oligonucleotide
ggtgtattcagcagagcaatcagaacgcgg

SEQ ID NO: 384216 - DNA, 30 bp, Artificial Sequence
  Synthetic oligonucleotide
tgtatgttatatcatacgaagcgaacgcgg

SEQ ID NO: 384217 - DNA, 30 bp, Artificial Sequence
  Synthetic oligonucleotide
acaatggagcaaccgacgcacataacgcgg

SEQ ID NO: 384218 - DNA, 30 bp, Artificial Sequence
  Synthetic oligonucleotide
acatgttgcaatattgtgatacccacgcgg

SEQ ID NO: 384219 - DNA, 30 bp, Artificial Sequence
  Synthetic oligonucleotide
agcagggtaaaaataccagtttggacgcgg

SEQ ID NO: 384220 - DNA, 30 bp, Artificial Sequence
  Synthetic oligonucleotide
cttcatgctacctgacgagtccatacgcgg

SEQ ID NO: 384221 - DNA, 30 bp, Artificial Sequence
  Synthetic oligonucleotide
accggctaagcggggaatcgggctacgcgg

SEQ ID NO: 384222 - DNA, 30 bp, Artificial Sequence
  Synthetic oligonucleotide
ggacacgctcgggccggcctcagaccgcgg

SEQ ID NO: 384223 - DNA, 30 bp, Artificial Sequence
  Synthetic oligonucleotide
acttgttcatttcccgcagtgggaccgcgg

SEQ ID NO: 384224 - DNA, 30 bp, Artificial Sequence
  Synthetic oligonucleotide
gttattgccgtatgtggtcaatccccgcgg

SEQ ID NO: 384225 - DNA, 30 bp, Artificial Sequence
  Synthetic oligonucleotide
aagtgagtgcgtaattcaattgctccgcgg

SEQ ID NO: 384226 - DNA, 30 bp, Artificial Sequence
  Synthetic oligonucleotide
gaagctgttggcactaggtgcccagcgcgg

SEQ ID NO: 384227 - DNA, 30 bp, Artificial Sequence
  Synthetic oligonucleotide
tgccgggcggtctcctgaaaaagagcgcgg

SEQ ID NO: 384228 - DNA, 30 bp, Artificial Sequence
  Synthetic oligonucleotide
aactggacgcatatacatctaatggcgcgg

SEQ ID NO: 384229 - DNA, 30 bp, Artificial Sequence
  Synthetic oligonucleotide
ggagaatacccgcggaaccagtgtgcgcgg

SEQ ID NO: 384230 - DNA, 30 bp, Artificial Sequence
  Synthetic oligonucleotide
tttgggaacttgaggggattaggctcgcgg

SEQ ID NO: 384231 - DNA, 30 bp, Artificial Sequence
  Synthetic oligonucleotide
tgggtgcatcgcgttgacagaatctcgcgg

SEQ ID NO: 384232 - DNA, 30 bp, Artificial Sequence
  Synthetic oligonucleotide
ctctgtaccaaatccgtccctaagtcgcgg

SEQ ID NO: 384233 - DNA, 30 bp, Artificial Sequence
  Synthetic oligonucleotide
cccaacgggggacggaataataggtcgcgg

SEQ ID NO: 384234 - DNA, 30 bp, Artificial Sequence
  Synthetic oligonucleotide
cgccacctggtggcgccacgttattcgcgg

SEQ ID NO: 384235 - DNA, 30 bp, Artificial Sequence
  Synthetic oligonucleotide
gatttaatcgctttaactctaataaggcgg

SEQ ID NO: 384236 - DNA, 30 bp, Artificial Sequence
  Synthetic oligonucleotide
gttgacggtaccgtcaagtatttcaggcgg

SEQ ID NO: 384237 - DNA, 30 bp, Artificial Sequence
  Synthetic oligonucleotide
cagagcctcatagataaaggtcgtaggcgg

SEQ ID NO: 384238 - DNA, 30 bp, Artificial Sequence
  Synthetic oligonucleotide
tttcaaatgcttagtggatgtccgcggcgg

SEQ ID NO: 384239 - DNA, 30 bp, Artificial Sequence
  Synthetic oligonucleotide
tttgcaaagcggactatcgcccatcggcgg

SEQ ID NO: 384240 - DNA, 30 bp, Artificial Sequence
  Synthetic oligonucleotide
ctacggcagggagccatcgtctatcggcgg

SEQ ID NO: 384241 - DNA, 30 bp, Artificial Sequence
  Synthetic oligonucleotide
ggcagcttctggtagggagacggagggcgg

SEQ ID NO: 384242 - DNA, 30 bp, Artificial Sequence
  Synthetic oligonucleotide
ataacggaacaccagcggagaaccgggcgg

SEQ ID NO: 384243 - DNA, 30 bp, Artificial Sequence
  Synthetic oligonucleotide
cgccccctcgaagcctagaaccccgggcgg

SEQ ID NO: 384244 - DNA, 30 bp, Artificial Sequence
  Synthetic oligonucleotide
cgttgacaactggcaagccgtctcgggcgg

SEQ ID NO: 384245 - DNA, 30 bp, Artificial Sequence
  Synthetic oligonucleotide
aaacagttcgggttttattaaaatgggcgg

SEQ ID NO: 384246 - DNA, 30 bp, Artificial Sequence
  Synthetic oligonucleotide
aattatgttgataaattgcacgatgggcgg

SEQ ID NO: 384247 - DNA, 30 bp, Artificial Sequence
  Synthetic oligonucleotide
gaaaggcttaccaaaatcatccgtgggcgg

SEQ ID NO: 384248 - DNA, 30 bp, Artificial Sequence
  Synthetic oligonucleotide
atttgatcaaatatttgcagaaaatggcgg

SEQ ID NO: 384249 - DNA, 30 bp, Artificial Sequence
  Synthetic oligonucleotide
cggagcgcacacgacacctgtagatggcgg

SEQ ID NO: 384250 - DNA, 30 bp, Artificial Sequence
  Synthetic oligonucleotide
tgatgtggtttaggctgaataggatggcgg

SEQ ID NO: 384251 - DNA, 30 bp, Artificial Sequence
  Synthetic oligonucleotide
agccctggttataagcaagagccctggcgg

SEQ ID NO: 384252 - DNA, 30 bp, Artificial Sequence
  Synthetic oligonucleotide
ccgtcacagcacggagagtgcggctggcgg

SEQ ID NO: 384253 - DNA, 30 bp, Artificial Sequence
  Synthetic oligonucleotide
actggttggctgacctagggcccttggcgg

SEQ ID NO: 384254 - DNA, 30 bp, Artificial Sequence
  Synthetic oligonucleotide
gtgcgaaccgattaaatatgtcgttggcgg

SEQ ID NO: 384255 - DNA, 30 bp, Artificial Sequence
  Synthetic oligonucleotide
aaaagaattatcatatttgaattaatgcgg

SEQ ID NO: 384256 - DNA, 30 bp, Artificial Sequence
  Synthetic oligonucleotide
catacacgctcttaattagtttacatgcgg

SEQ ID NO: 384257 - DNA, 30 bp, Artificial Sequence
  Synthetic oligonucleotide
acgtaaacttgattagtcatacgcatgcgg

SEQ ID NO: 384258 - DNA, 30 bp, Artificial Sequence
  Synthetic oligonucleotide
gggatatatgcattgatctaccggatgcgg

SEQ ID NO: 384259 - DNA, 30 bp, Artificial Sequence
  Synthetic oligonucleotide
gtgggatatgcgacactcggcttgatgcgg

SEQ ID NO: 384260 - DNA, 30 bp, Artificial Sequence
  Synthetic oligonucleotide
cagggcgttggtatctatatctgtatgcgg

SEQ ID NO: 384261 - DNA, 30 bp, Artificial Sequence
  Synthetic oligonucleotide
gggtactgggggtccgctactattatgcgg

SEQ ID NO: 384262 - DNA, 30 bp, Artificial Sequence
  Synthetic oligonucleotide
aattattggggtcgattgagactactgcgg

SEQ ID NO: 384263 - DNA, 30 bp, Artificial Sequence
  Synthetic oligonucleotide
accgagcattgctcgacgaagggcctgcgg

SEQ ID NO: 384264 - DNA, 30 bp, Artificial Sequence
  Synthetic oligonucleotide
atgggaactatctaaagaactagcgtgcgg

SEQ ID NO: 384265 - DNA, 30 bp, Artificial Sequence
  Synthetic oligonucleotide
atagctactgtacgtagcgaacgcgtgcgg

SEQ ID NO: 384266 - DNA, 30 bp, Artificial Sequence
  Synthetic oligonucleotide
tggctccgcaccacaaacccattcgtgcgg

SEQ ID NO: 384267 - DNA, 30 bp, Artificial Sequence
  Synthetic oligonucleotide
atcatttcatcggccagctgagccttgcgg

SEQ ID NO: 384268 - DNA, 30 bp, Artificial Sequence
  Synthetic oligonucleotide
aatccccaggagttgatagttcagttgcgg

SEQ ID NO: 384269 - DNA, 30 bp, Artificial Sequence
  Synthetic oligonucleotide
ggtatcccctattaactaggtgggttgcgg

SEQ ID NO: 384270 - DNA, 30 bp, Artificial Sequence
  Synthetic oligonucleotide
gaagacgacgcgcatcttgagccaaatcgg

SEQ ID NO: 384271 - DNA, 30 bp, Artificial Sequence
  Synthetic oligonucleotide
tgcccccccaggctgcatcgttacaatcgg

SEQ ID NO: 384272 - DNA, 30 bp, Artificial Sequence
  Synthetic oligonucleotide
gcttttcgtgtgagctaaagtcccaatcgg

SEQ ID NO: 384273 - DNA, 30 bp, Artificial Sequence
  Synthetic oligonucleotide
tcgtgatttatcaccctccgttccaatcgg

SEQ ID NO: 384274 - DNA, 30 bp, Artificial Sequence
  Synthetic oligonucleotide
ggcaggtcctagccgacttcgaggaatcgg

SEQ ID NO: 384275 - DNA, 30 bp, Artificial Sequence
  Synthetic oligonucleotide
ccttcttcaagtaatatagaggttaatcgg

SEQ ID NO: 384276 - DNA, 30 bp, Artificial Sequence
  Synthetic oligonucleotide
tttataagagtgcagataaatcgacatcgg

SEQ ID NO: 384277 - DNA, 30 bp, Artificial Sequence
  Synthetic oligonucleotide
ggggatgcccgaggcacgcgatatcatcgg

SEQ ID NO: 384278 - DNA, 30 bp, Artificial Sequence
  Synthetic oligonucleotide
tggtagtgcagcggcctcaaatcagatcgg

SEQ ID NO: 384279 - DNA, 30 bp, Artificial Sequence
  Synthetic oligonucleotide
agtgcttgtttggtcgtcgtgcgagatcgg

SEQ ID NO: 384280 - DNA, 30 bp, Artificial Sequence
  Synthetic oligonucleotide
cacgagtctgtctacctgcattccgatcgg

SEQ ID NO: 384281 - DNA, 30 bp, Artificial Sequence
  Synthetic oligonucleotide
gccggtccgagtcattcggaacgcgatcgg

SEQ ID NO: 384282 - DNA, 30 bp, Artificial Sequence
  Synthetic oligonucleotide
cagctcatgacaaaggtccctaaggatcgg

SEQ ID NO: 384283 - DNA, 30 bp, Artificial Sequence
  Synthetic oligonucleotide
aactgcacttagtacgctagttgtgatcgg

SEQ ID NO: 384284 - DNA, 30 bp, Artificial Sequence
  Synthetic oligonucleotide
gcttaaaaagcagacccgggtcttgatcgg

SEQ ID NO: 384285 - DNA, 30 bp, Artificial Sequence
  Synthetic oligonucleotide
tgcgagctcatagcgagaaaaccatatcgg

SEQ ID NO: 384286 - DNA, 30 bp, Artificial Sequence
  Synthetic oligonucleotide
aagaaaattccctgtgattggctatatcgg

SEQ ID NO: 384287 - DNA, 30 bp, Artificial Sequence
  Synthetic oligonucleotide
ttaactcaaataggacggggtccgtatcgg

SEQ ID NO: 384288 - DNA, 30 bp, Artificial Sequence
  Synthetic oligonucleotide
ctgtgctcgttctaacgattcaggtatcgg

SEQ ID NO: 384289 - DNA, 30 bp, Artificial Sequence
  Synthetic oligonucleotide
cacatactcgcccttcctgaatattatcgg

SEQ ID NO: 384290 - DNA, 31 bp, Artificial Sequence
  Synthetic oligonucleotide
gcattgttatgaagggggttgacaaactcgg

SEQ ID NO: 384291 - DNA, 30 bp, Artificial Sequence
  Synthetic oligonucleotide
gagacaccttttgcagcggcgcaaactcgg

SEQ ID NO: 384292 - DNA, 30 bp, Artificial Sequence
  Synthetic oligonucleotide
agtttaatagaacgatgtatttcaactcgg

SEQ ID NO: 384293 - DNA, 30 bp, Artificial Sequence
  Synthetic oligonucleotide
aaatgtatggacttgggctggtacactcgg

SEQ ID NO: 384294 - DNA, 30 bp, Artificial Sequence
  Synthetic oligonucleotide
ggatttccgacgtgcggatgagggactcgg

SEQ ID NO: 384295 - DNA, 30 bp, Artificial Sequence
  Synthetic oligonucleotide
ccccgggagaaagtcagacacctgactcgg

SEQ ID NO: 384296 - DNA, 30 bp, Artificial Sequence
  Synthetic oligonucleotide
cttacagtatattcatcgtgtcatactcgg

SEQ ID NO: 384297 - DNA, 30 bp, Artificial Sequence
  Synthetic oligonucleotide
tacgacggaacacaaggtgaggaacctcgg

SEQ ID NO: 384298 - DNA, 30 bp, Artificial Sequence
  Synthetic oligonucleotide
gggtgcggttgggcctttccctaccctcgg

SEQ ID NO: 384299 - DNA, 30 bp, Artificial Sequence
  Synthetic oligonucleotide
agccgcggttcgtcattcggagcccctcgg

SEQ ID NO: 384300 - DNA, 30 bp, Artificial Sequence
  Synthetic oligonucleotide
aatctgctataattcagtcaccggcctcgg

SEQ ID NO: 384301 - DNA, 30 bp, Artificial Sequence
  Synthetic oligonucleotide
ggtgttcgtacccaagtctggatgcctcgg

SEQ ID NO: 384302 - DNA, 30 bp, Artificial Sequence
  Synthetic oligonucleotide
atttctgtgttgaatacggctttgcctcgg

SEQ ID NO: 384303 - DNA, 30 bp, Artificial Sequence
  Synthetic oligonucleotide
cttaccactagtatgctccaaggagctcgg

SEQ ID NO: 384304 - DNA, 30 bp, Artificial Sequence
  Synthetic oligonucleotide
gtttatgtaggtctgtgcctagacgctcgg

SEQ ID NO: 384305 - DNA, 30 bp, Artificial Sequence
  Synthetic oligonucleotide
ttaggtctaaagaccgacacggatgctcgg

SEQ ID NO: 384306 - DNA, 30 bp, Artificial Sequence
  Synthetic oligonucleotide
ggtttttaacagacgaggcttgatgctcgg

SEQ ID NO: 384307 - DNA, 30 bp, Artificial Sequence
  Synthetic oligonucleotide
acctcagagcgataattggcgactgctcgg

SEQ ID NO: 384308 - DNA, 30 bp, Artificial Sequence
  Synthetic oligonucleotide
gctgttacgagtgagcttgatgaatctcgg

SEQ ID NO: 384309 - DNA, 30 bp, Artificial Sequence
  Synthetic oligonucleotide
gacagcgcgacgtgggctgccggctctcgg

SEQ ID NO: 384310 - DNA, 30 bp, Artificial Sequence
  Synthetic oligonucleotide
aagtatttgtatagatgtctctcgtctcgg

SEQ ID NO: 384311 - DNA, 30 bp, Artificial Sequence
  Synthetic oligonucleotide
caaggtgtatcgccgtccaatcggtctcgg

SEQ ID NO: 384312 - DNA, 30 bp, Artificial Sequence
  Synthetic oligonucleotide
atatagtacgtaattgtcattgtgtctcgg

SEQ ID NO: 384313 - DNA, 30 bp, Artificial Sequence
  Synthetic oligonucleotide
gtacttattgatcaatcacttggttctcgg

SEQ ID NO: 384314 - DNA, 30 bp, Artificial Sequence
  Synthetic oligonucleotide
ggaaaaccattggggtcattgatcagtcgg

SEQ ID NO: 384315 - DNA, 30 bp, Artificial Sequence
  Synthetic oligonucleotide
aagaatcgtatttaacaatagtcgagtcgg

SEQ ID NO: 384316 - DNA, 30 bp, Artificial Sequence
  Synthetic oligonucleotide
tacgacatgtaaatagtcgatcggagtcgg

SEQ ID NO: 384317 - DNA, 30 bp, Artificial Sequence
  Synthetic oligonucleotide
agatgcgatgtgtagatgcgtcggagtcgg

SEQ ID NO: 384318 - DNA, 30 bp, Artificial Sequence
  Synthetic oligonucleotide
ttacagcatgctcaagagcaggatagtcgg

SEQ ID NO: 384319 - DNA, 29 bp, Artificial Sequence
  Synthetic oligonucleotide
gcgccacttctctcgtgttagctagtcgg

SEQ ID NO: 384320 - DNA, 30 bp, Artificial Sequence
  Synthetic oligonucleotide
aaccagactagagcatagtgggagcgtcgg

SEQ ID NO: 384321 - DNA, 30 bp, Artificial Sequence
  Synthetic oligonucleotide
gaacaggtgcattgaccgacaacgcgtcgg

SEQ ID NO: 384322 - DNA, 30 bp, Artificial Sequence
  Synthetic oligonucleotide
aattaagtttttaagagggcatatcgtcgg

SEQ ID NO: 384323 - DNA, 30 bp, Artificial Sequence
  Synthetic oligonucleotide
ggagttttgataagctcggcagttcgtcgg

SEQ ID NO: 384324 - DNA, 30 bp, Artificial Sequence
  Synthetic oligonucleotide
ccaaacaacccggaattatgggttcgtcgg

SEQ ID NO: 384325 - DNA, 30 bp, Artificial Sequence
  Synthetic oligonucleotide
ctcacgattagttaggggctgtttcgtcgg

SEQ ID NO: 384326 - DNA, 30 bp, Artificial Sequence
  Synthetic oligonucleotide
cgtccgtcgggtgggactgggccgggtcgg

SEQ ID NO: 384327 - DNA, 30 bp, Artificial Sequence
  Synthetic oligonucleotide
cctcttggattggtgcaggtttggggtcgg

SEQ ID NO: 384328 - DNA, 30 bp, Artificial Sequence
  Synthetic oligonucleotide
ttgttctaacgcgtcgatgatcatggtcgg

SEQ ID NO: 384329 - DNA, 30 bp, Artificial Sequence
  Synthetic oligonucleotide
atagtatgtgccacgccacttgatggtcgg

SEQ ID NO: 384330 - DNA, 30 bp, Artificial Sequence
  Synthetic oligonucleotide
tgcggggttttgcccagatcgaagtgtcgg

SEQ ID NO: 384331 - DNA, 30 bp, Artificial Sequence
  Synthetic oligonucleotide
aaattttcgttattagcccaacggtgtcgg

SEQ ID NO: 384332 - DNA, 30 bp, Artificial Sequence
  Synthetic oligonucleotide
taaattcgtgtttatatgatagggtgtcgg

SEQ ID NO: 384333 - DNA, 30 bp, Artificial Sequence
  Synthetic oligonucleotide
aaagttagtatttaggacattaattgtcgg

SEQ ID NO: 384334 - DNA, 30 bp, Artificial Sequence
  Synthetic oligonucleotide
agtaaaatggaggtattgcatagttgtcgg

SEQ ID NO: 384335 - DNA, 30 bp, Artificial Sequence
  Synthetic oligonucleotide
cgctagtcaacagggccttccgtaattcgg

SEQ ID NO: 384336 - DNA, 30 bp, Artificial Sequence
  Synthetic oligonucleotide
aaacaggatgatttttgggcctacattcgg

SEQ ID NO: 384337 - DNA, 30 bp, Artificial Sequence
  Synthetic oligonucleotide
cccgcacaacttgagaggctggtcattcgg

SEQ ID NO: 384338 - DNA, 30 bp, Artificial Sequence
  Synthetic oligonucleotide
aaaactcatctagttgactcgcatattcgg

SEQ ID NO: 384339 - DNA, 30 bp, Artificial Sequence
  Synthetic oligonucleotide
aaaccggtgtggagtcggaccggtattcgg

SEQ ID NO: 384340 - DNA, 30 bp, Artificial Sequence
  Synthetic oligonucleotide
agttagggtgtgaccagtacgcttattcgg

SEQ ID NO: 384341 - DNA, 30 bp, Artificial Sequence
  Synthetic oligonucleotide
ctggatctcattagaatctatacacttcgg

SEQ ID NO: 384342 - DNA, 30 bp, Artificial Sequence
  Synthetic oligonucleotide
ataatcgagtgaattctacaagtgcttcgg

SEQ ID NO: 384343 - DNA, 30 bp, Artificial Sequence
  Synthetic oligonucleotide
tatgtacaacaggattttttagctcttcgg

SEQ ID NO: 384344 - DNA, 30 bp, Artificial Sequence
  Synthetic oligonucleotide
ggtggttgcctatttcgaaggcaagttcgg

SEQ ID NO: 384345 - DNA, 29 bp, Artificial Sequence
  Synthetic oligonucleotide
tcgggataatctatccttctaaggttcgg

SEQ ID NO: 384346 - DNA, 30 bp, Artificial Sequence
  Synthetic oligonucleotide
acagggtcatctcttcgcctgagggttcgg

SEQ ID NO: 384347 - DNA, 30 bp, Artificial Sequence
  Synthetic oligonucleotide
ataaataatggtacggggctagtggttcgg

SEQ ID NO: 384348 - DNA, 30 bp, Artificial Sequence
  Synthetic oligonucleotide
tttagtaggaggaagtttatgtatgttcgg

SEQ ID NO: 384349 - DNA, 30 bp, Artificial Sequence
  Synthetic oligonucleotide
ctacccttccacctcgtggcgacctttcgg

SEQ ID NO: 384350 - DNA, 30 bp, Artificial Sequence
  Synthetic oligonucleotide
ctaacgacgaagtaccgcctacggtttcgg

SEQ ID NO: 384351 - DNA, 30 bp, Artificial Sequence
  Synthetic oligonucleotide
acgagccgatcccttttttggctgtttcgg

SEQ ID NO: 384352 - DNA, 30 bp, Artificial Sequence
  Synthetic oligonucleotide
catccttttagctaacgacctacaaaaggg

SEQ ID NO: 384353 - DNA, 30 bp, Artificial Sequence
  Synthetic oligonucleotide
agagggggaaagaatgaaatcagaaaaggg

SEQ ID NO: 384354 - DNA, 30 bp, Artificial Sequence
  Synthetic oligonucleotide
aagagtcctagaagcttagttaccaaaggg

SEQ ID NO: 384355 - DNA, 30 bp, Artificial Sequence
  Synthetic oligonucleotide
gtataagcttagagcaaggcccggaaaggg

SEQ ID NO: 384356 - DNA, 30 bp, Artificial Sequence
  Synthetic oligonucleotide
gcaaggggcgtaggaagtaaacctaaaggg

SEQ ID NO: 384357 - DNA, 30 bp, Artificial Sequence
  Synthetic oligonucleotide
gcgaccagatgtctatggccgtgtaaaggg

SEQ ID NO: 384358 - DNA, 28 bp, Artificial Sequence
  Synthetic oligonucleotide
attaaaggtcatattggagtcacaaggg

SEQ ID NO: 384359 - DNA, 30 bp, Artificial Sequence
  Synthetic oligonucleotide
gaacatatcgggccactagggttccaaggg

SEQ ID NO: 384360 - DNA, 30 bp, Artificial Sequence
  Synthetic oligonucleotide
ggaccaggctccatgcattaacggcaaggg

SEQ ID NO: 384361 - DNA, 30 bp, Artificial Sequence
  Synthetic oligonucleotide
gcctcggaattgtcacagacgctagaaggg

SEQ ID NO: 384362 - DNA, 30 bp, Artificial Sequence
  Synthetic oligonucleotide
aaacaccatggggtccggcatctcgaaggg

SEQ ID NO: 384363 - DNA, 30 bp, Artificial Sequence
  Synthetic oligonucleotide
aatttgatcaatcactgggactaggaaggg

SEQ ID NO: 384364 - DNA, 30 bp, Artificial Sequence
  Synthetic oligonucleotide
agcaaagggttacacggggtggctgaaggg

SEQ ID NO: 384365 - DNA, 30 bp, Artificial Sequence
  Synthetic oligonucleotide
ttcggtccaatagagtgagaagcataaggg

SEQ ID NO: 384366 - DNA, 30 bp, Artificial Sequence
  Synthetic oligonucleotide
ccaggctgatcgggctccccggcataaggg

SEQ ID NO: 384367 - DNA, 30 bp, Artificial Sequence
  Synthetic oligonucleotide
aggggcattgtcggttggccggggtaaggg

SEQ ID NO: 384368 - DNA, 30 bp, Artificial Sequence
  Synthetic oligonucleotide
aacaaagatgtatatccgggccattaaggg

SEQ ID NO: 384369 - DNA, 30 bp, Artificial Sequence
  Synthetic oligonucleotide
taacgtgtggttccgatgagcgattaaggg

SEQ ID NO: 384370 - DNA, 30 bp, Artificial Sequence
  Synthetic oligonucleotide
ccaatattgttctcaatacgcttttaaggg

SEQ ID NO: 384371 - DNA, 30 bp, Artificial Sequence
  Synthetic oligonucleotide
atttgatgtacacacatgcaatacacaggg

SEQ ID NO: 384372 - DNA, 30 bp, Artificial Sequence
  Synthetic oligonucleotide
ctacacggattccctcggctaaggacaggg

SEQ ID NO: 384373 - DNA, 30 bp, Artificial Sequence
  Synthetic oligonucleotide
atactaataataaattattcaaatacaggg

SEQ ID NO: 384374 - DNA, 30 bp, Artificial Sequence
  Synthetic oligonucleotide
actccttgacaagttctttaggaaccaggg

SEQ ID NO: 384375 - DNA, 30 bp, Artificial Sequence
  Synthetic oligonucleotide
gggaacgggcgatggggatgcgtcccaggg

SEQ ID NO: 384376 - DNA, 30 bp, Artificial Sequence
  Synthetic oligonucleotide
tgtaagcgatttaagtgcacggtcccaggg

SEQ ID NO: 384377 - DNA, 30 bp, Artificial Sequence
  Synthetic oligonucleotide
ctcgtgtgcgagaacataatggcgccaggg

SEQ ID NO: 384378 - DNA, 30 bp, Artificial Sequence
  Synthetic oligonucleotide
ggcgtcgactcgataaacgcggtgccaggg

SEQ ID NO: 384379 - DNA, 30 bp, Artificial Sequence
  Synthetic oligonucleotide
ggcctgggtcgagatccggttgtgccaggg

SEQ ID NO: 384380 - DNA, 30 bp, Artificial Sequence
  Synthetic oligonucleotide
tccctacgttcaggctgcggtagtccaggg

SEQ ID NO: 384381 - DNA, 30 bp, Artificial Sequence
  Synthetic oligonucleotide
tgctcaggcaagagttctggtaaggcaggg

SEQ ID NO: 384382 - DNA, 30 bp, Artificial Sequence
  Synthetic oligonucleotide
ggtcgtagaatctgatggttggaggcaggg

SEQ ID NO: 384383 - DNA, 30 bp, Artificial Sequence
  Synthetic oligonucleotide
gtcatctcaatgccacattattgtgcaggg

SEQ ID NO: 384384 - DNA, 30 bp, Artificial Sequence
  Synthetic oligonucleotide
cagtgtctgagcccccgtctctcatcaggg

SEQ ID NO: 384385 - DNA, 30 bp, Artificial Sequence
  Synthetic oligonucleotide
ttgacaagcatctgaggcctggtatcaggg

SEQ ID NO: 384386 - DNA, 30 bp, Artificial Sequence
  Synthetic oligonucleotide
ctagtacattctcatattacagactcaggg

SEQ ID NO: 384387 - DNA, 30 bp, Artificial Sequence
  Synthetic oligonucleotide
ttcgtgccggaactccatgtgatgtcaggg

SEQ ID NO: 384388 - DNA, 30 bp, Artificial Sequence
  Synthetic oligonucleotide
tgcgagacgcggtgcctgacgcattcaggg

SEQ ID NO: 384389 - DNA, 30 bp, Artificial Sequence
  Synthetic oligonucleotide
agccttaatgttgtgtcagcttgttcaggg

SEQ ID NO: 384390 - DNA, 30 bp, Artificial Sequence
  Synthetic oligonucleotide
atatggagccgcatgctacacccaagaggg

SEQ ID NO: 384391 - DNA, 30 bp, Artificial Sequence
  Synthetic oligonucleotide
ggtttttattggtttcgaactttaagaggg

SEQ ID NO: 384392 - DNA, 30 bp, Artificial Sequence
  Synthetic oligonucleotide
cttgagttctagatttcgggcctgagaggg

SEQ ID NO: 384393 - DNA, 30 bp, Artificial Sequence
  Synthetic oligonucleotide
tacagaattggaagttcactctctagaggg

SEQ ID NO: 384394 - DNA, 30 bp, Artificial Sequence
  Synthetic oligonucleotide
ggaacgttattctctgacattggtagaggg

SEQ ID NO: 384395 - DNA, 30 bp, Artificial Sequence
  Synthetic oligonucleotide
gagaaaactatggctttaggtattagaggg

SEQ ID NO: 384396 - DNA, 30 bp, Artificial Sequence
  Synthetic oligonucleotide
gtcatggccctaccttgccccacacgaggg

SEQ ID NO: 384397 - DNA, 30 bp, Artificial Sequence
  Synthetic oligonucleotide
gctacttatatcgtgtttccggggcgaggg

SEQ ID NO: 384398 - DNA, 30 bp, Artificial Sequence
  Synthetic oligonucleotide
aaagggcccccggcaagcgatgggcgaggg

SEQ ID NO: 384399 - DNA, 30 bp, Artificial Sequence
  Synthetic oligonucleotide
ctctgctcggtagcttctgcgtctcgaggg

SEQ ID NO: 384400 - DNA, 30 bp, Artificial Sequence
  Synthetic oligonucleotide
ttaggcgtgtgtgggtcagtgggaggaggg

SEQ ID NO: 384401 - DNA, 30 bp, Artificial Sequence
  Synthetic oligonucleotide
taagcttatatcccgacatgagtcggaggg

SEQ ID NO: 384402 - DNA, 30 bp, Artificial Sequence
  Synthetic oligonucleotide
acccgcagtttgatcgctacacatggaggg

SEQ ID NO: 384403 - DNA, 30 bp, Artificial Sequence
  Synthetic oligonucleotide
agtatttatcgtttttcggcttatggaggg

SEQ ID NO: 384404 - DNA, 30 bp, Artificial Sequence
  Synthetic oligonucleotide
gcccccgggtgatctaaaccatctggaggg

SEQ ID NO: 384405 - DNA, 30 bp, Artificial Sequence
  Synthetic oligonucleotide
agtaagggacctttcggaaacggatgaggg

SEQ ID NO: 384406 - DNA, 30 bp, Artificial Sequence
  Synthetic oligonucleotide
gttgaagggcccggatgtgttttatgaggg

SEQ ID NO: 384407 - DNA, 30 bp, Artificial Sequence
  Synthetic oligonucleotide
atgtgacggagctatatgagcggctgaggg

SEQ ID NO: 384408 - DNA, 30 bp, Artificial Sequence
  Synthetic oligonucleotide
atatcttatcctatgagctgcctttgaggg

SEQ ID NO: 384409 - DNA, 30 bp, Artificial Sequence
  Synthetic oligonucleotide
gattgtttaatgccatatagtgacataggg

SEQ ID NO: 384410 - DNA, 30 bp, Artificial Sequence
  Synthetic oligonucleotide
ctcataatcccagcatccacgtacctaggg

SEQ ID NO: 384411 - DNA, 30 bp, Artificial Sequence
  Synthetic oligonucleotide
aacatgcgttacgcagatagcgccctaggg

SEQ ID NO: 384412 - DNA, 30 bp, Artificial Sequence
  Synthetic oligonucleotide
atttggggcctgagcgtatgaaggctaggg

SEQ ID NO: 384413 - DNA, 30 bp, Artificial Sequence
  Synthetic oligonucleotide
aaggtgttccattgcttggctgctctaggg

SEQ ID NO: 384414 - DNA, 30 bp, Artificial Sequence
  Synthetic oligonucleotide
cctacaagggtcatgtctaggcaagtaggg

SEQ ID NO: 384415 - DNA, 30 bp, Artificial Sequence
  Synthetic oligonucleotide
ttagtatgcttcgtgaatacagcagtaggg

SEQ ID NO: 384416 - DNA, 30 bp, Artificial Sequence
  Synthetic oligonucleotide
cgggaacctcatggtcagatccgagtaggg

SEQ ID NO: 384417 - DNA, 30 bp, Artificial Sequence
  Synthetic oligonucleotide
ggggcctgccaggttgaggttctagtaggg

SEQ ID NO: 384418 - DNA, 30 bp, Artificial Sequence
  Synthetic oligonucleotide
cgtactctggtgtcgcatcaggtagtaggg

SEQ ID NO: 384419 - DNA, 30 bp, Artificial Sequence
  Synthetic oligonucleotide
acggagatcaattaaaagaggttagtaggg

SEQ ID NO: 384420 - DNA, 30 bp, Artificial Sequence
  Synthetic oligonucleotide
ggggcgtgacattatcacacaaccgtaggg

SEQ ID NO: 384421 - DNA, 30 bp, Artificial Sequence
  Synthetic oligonucleotide
actgagaggaccttcgcggcgggcgtaggg

SEQ ID NO: 384422 - DNA, 30 bp, Artificial Sequence
  Synthetic oligonucleotide
aaacaccgtgtcacctgcggaccattaggg

SEQ ID NO: 384423 - DNA, 30 bp, Artificial Sequence
  Synthetic oligonucleotide
ttagtagcgttttcttgcatatcattaggg

SEQ ID NO: 384424 - DNA, 30 bp, Artificial Sequence
  Synthetic oligonucleotide
aagaaccgctatattatgggtctcttaggg

SEQ ID NO: 384425 - DNA, 30 bp, Artificial Sequence
  Synthetic oligonucleotide
tccccgcggaggcccttctgtgagttaggg

SEQ ID NO: 384426 - DNA, 30 bp, Artificial Sequence
  Synthetic oligonucleotide
aaattcactcacaaggaatccccgttaggg

SEQ ID NO: 384427 - DNA, 30 bp, Artificial Sequence
  Synthetic oligonucleotide
aacgctcgtcggggaagctatccgttaggg

SEQ ID NO: 384428 - DNA, 30 bp, Artificial Sequence
  Synthetic oligonucleotide
attaccaagagttgtcataagaatttaggg

SEQ ID NO: 384429 - DNA, 30 bp, Artificial Sequence
  Synthetic oligonucleotide
cggctcgcagccaaagcacggactttaggg

SEQ ID NO: 384430 - DNA, 30 bp, Artificial Sequence
  Synthetic oligonucleotide
gcaaatttaatcagagtaagaggtttaggg

SEQ ID NO: 384431 - DNA, 30 bp, Artificial Sequence
  Synthetic oligonucleotide
aaaagttcataatcacggtagcttttaggg

SEQ ID NO: 384432 - DNA, 30 bp, Artificial Sequence
  Synthetic oligonucleotide
acacttatatccaagtatactgttttaggg

SEQ ID NO: 384433 - DNA, 30 bp, Artificial Sequence
  Synthetic oligonucleotide
ggcatatgaaggcaggcccacaacaacggg

SEQ ID NO: 384434 - DNA, 30 bp, Artificial Sequence
  Synthetic oligonucleotide
gaagcgttcgttcacatcgaatacaacggg

SEQ ID NO: 384435 - DNA, 30 bp, Artificial Sequence
  Synthetic oligonucleotide
cacaaggcaacggggatgtgctggaacggg

SEQ ID NO: 384436 - DNA, 30 bp, Artificial Sequence
  Synthetic oligonucleotide
actaatagacacactcacgtttggaacggg

SEQ ID NO: 384437 - DNA, 30 bp, Artificial Sequence
  Synthetic oligonucleotide
aagtgtacctacggctatacactgaacggg

SEQ ID NO: 384438 - DNA, 30 bp, Artificial Sequence
  Synthetic oligonucleotide
tgatgctaatacaagttacttctgaacggg

SEQ ID NO: 384439 - DNA, 30 bp, Artificial Sequence
  Synthetic oligonucleotide
tggctctaagacccggtaggcgataacggg

SEQ ID NO: 384440 - DNA, 30 bp, Artificial Sequence
  Synthetic oligonucleotide
atatcagactgttgactgcatcaacacggg

SEQ ID NO: 384441 - DNA, 30 bp, Artificial Sequence
  Synthetic oligonucleotide
ttttttgcgggggtatgagcattacacggg

SEQ ID NO: 384442 - DNA, 30 bp, Artificial Sequence
  Synthetic oligonucleotide
tgactgagaaccatagatggtttacacggg

SEQ ID NO: 384443 - DNA, 30 bp, Artificial Sequence
  Synthetic oligonucleotide
gagatagatgaggcaggcctgcctcacggg

SEQ ID NO: 384444 - DNA, 30 bp, Artificial Sequence
  Synthetic oligonucleotide
gctgggggggggaggtggtgggaagacggg

SEQ ID NO: 384445 - DNA, 30 bp, Artificial Sequence
  Synthetic oligonucleotide
tacgtcttggttgcgggttaataagacggg

SEQ ID NO: 384446 - DNA, 30 bp, Artificial Sequence
  Synthetic oligonucleotide
ccgtgtcggcccccaaccagtagagacggg

SEQ ID NO: 384447 - DNA, 30 bp, Artificial Sequence
  Synthetic oligonucleotide
agcaaaaaactttgcaatgtcagcgacggg

SEQ ID NO: 384448 - DNA, 30 bp, Artificial Sequence
  Synthetic oligonucleotide
gtcactataaaatatttgaataaggacggg

SEQ ID NO: 384449 - DNA, 30 bp, Artificial Sequence
  Synthetic oligonucleotide
cagatctgcgtgccgcctgaataggacggg

SEQ ID NO: 384450 - DNA, 30 bp, Artificial Sequence
  Synthetic oligonucleotide
tcaaatgttggatacgaagccctggacggg

SEQ ID NO: 384451 - DNA, 30 bp, Artificial Sequence
  Synthetic oligonucleotide
cctacgacctatgtcgcgaatggtgacggg

SEQ ID NO: 384452 - DNA, 30 bp, Artificial Sequence
  Synthetic oligonucleotide
tataaatgttcaggccagtctattgacggg

SEQ ID NO: 384453 - DNA, 30 bp, Artificial Sequence
  Synthetic oligonucleotide
aattgcagaggtcaggagacggttgacggg

SEQ ID NO: 384454 - DNA, 30 bp, Artificial Sequence
  Synthetic oligonucleotide
ccagttcccacgtgggcctcacaatacggg

SEQ ID NO: 384455 - DNA, 30 bp, Artificial Sequence
  Synthetic oligonucleotide
ttaggctacgctagatgttggctatacggg

SEQ ID NO: 384456 - DNA, 30 bp, Artificial Sequence
  Synthetic oligonucleotide
atgattgtgtgcgcatattcagtatacggg

SEQ ID NO: 384457 - DNA, 30 bp, Artificial Sequence
  Synthetic oligonucleotide
tccagttagtgtgaggattataagtacggg

SEQ ID NO: 384458 - DNA, 30 bp, Artificial Sequence
  Synthetic oligonucleotide
tcaggttcactacagattttaaggtacggg

SEQ ID NO: 384459 - DNA, 30 bp, Artificial Sequence
  Synthetic oligonucleotide
tgtggacactaaattcgtagaatttacggg

SEQ ID NO: 384460 - DNA, 30 bp, Artificial Sequence
  Synthetic oligonucleotide
gatcccatggcaggcgcatcgaaaaccggg

SEQ ID NO: 384461 - DNA, 30 bp, Artificial Sequence
  Synthetic oligonucleotide
aaagtaaaaatcacttcaacggacaccggg

SEQ ID NO: 384462 - DNA, 30 bp, Artificial Sequence
  Synthetic oligonucleotide
tgacttttatatccttcgggtggcaccggg

SEQ ID NO: 384463 - DNA, 30 bp, Artificial Sequence
  Synthetic oligonucleotide
attaaaattatcgatttccggcggaccggg

SEQ ID NO: 384464 - DNA, 30 bp, Artificial Sequence
  Synthetic oligonucleotide
aagcatctcaacagaagcgaatggaccggg

SEQ ID NO: 384465 - DNA, 30 bp, Artificial Sequence
  Synthetic oligonucleotide
gacctcgacttagggggcgagcgtaccggg

SEQ ID NO: 384466 - DNA, 30 bp, Artificial Sequence
  Synthetic oligonucleotide
ggtctatttcgaggaagagtagaacccggg

SEQ ID NO: 384467 - DNA, 30 bp, Artificial Sequence
  Synthetic oligonucleotide
gagtaatcagttggcaccgaaatacccggg

SEQ ID NO: 384468 - DNA, 30 bp, Artificial Sequence
  Synthetic oligonucleotide
gaaacagataggcagtttatagtgcccggg

SEQ ID NO: 384469 - DNA, 30 bp, Artificial Sequence
  Synthetic oligonucleotide
tattactaagttgtctctcctttgcccggg

SEQ ID NO: 384470 - DNA, 30 bp, Artificial Sequence
  Synthetic oligonucleotide
gaggaggaaccccggcaggctcgagccggg

SEQ ID NO: 384471 - DNA, 30 bp, Artificial Sequence
  Synthetic oligonucleotide
aagtaataagggctcacggcggcggccggg

SEQ ID NO: 384472 - DNA, 30 bp, Artificial Sequence
  Synthetic oligonucleotide
atcatgtgtgtgtaccatcgcagggccggg

SEQ ID NO: 384473 - DNA, 30 bp, Artificial Sequence
  Synthetic oligonucleotide
ggtaaggtcggatatcttcagggggccggg

SEQ ID NO: 384474 - DNA, 30 bp, Artificial Sequence
  Synthetic oligonucleotide
gagtgggtgatgttaaagggcacatccggg

SEQ ID NO: 384475 - DNA, 30 bp, Artificial Sequence
  Synthetic oligonucleotide
cccatgcccccttcgcttggattctccggg

SEQ ID NO: 384476 - DNA, 30 bp, Artificial Sequence
  Synthetic oligonucleotide
aagggatgcggcttcaccgtagcttccggg

SEQ ID NO: 384477 - DNA, 30 bp, Artificial Sequence
  Synthetic oligonucleotide
gttcttactttggttatcaggttttccggg

SEQ ID NO: 384478 - DNA, 30 bp, Artificial Sequence
  Synthetic oligonucleotide
agttttgactatccgtctgcatcaagcggg

SEQ ID NO: 384479 - DNA, 30 bp, Artificial Sequence
  Synthetic oligonucleotide
cagattttgaataagccatgatacagcggg

SEQ ID NO: 384480 - DNA, 29 bp, Artificial Sequence
  Synthetic oligonucleotide
actacttaacgaggcagtattggagcggg

SEQ ID NO: 384481 - DNA, 30 bp, Artificial Sequence
  Synthetic oligonucleotide
gctcattcaatggactggaccgtgagcggg

SEQ ID NO: 384482 - DNA, 30 bp, Artificial Sequence
  Synthetic oligonucleotide
ccttctattatgcagagaaagcctagcggg

SEQ ID NO: 384483 - DNA, 30 bp, Artificial Sequence
  Synthetic oligonucleotide
ggctttagttgtcaactcacgcttagcggg

SEQ ID NO: 384484 - DNA, 30 bp, Artificial Sequence
  Synthetic oligonucleotide
tggcctcagctcgaggctcaggttagcggg

SEQ ID NO: 384485 - DNA, 30 bp, Artificial Sequence
  Synthetic oligonucleotide
aaaagcatgtaacgcaagctgtaacgcggg

SEQ ID NO: 384486 - DNA, 30 bp, Artificial Sequence
  Synthetic oligonucleotide
cactgaaacggcggttgtatcgcccgcggg

SEQ ID NO: 384487 - DNA, 30 bp, Artificial Sequence
  Synthetic oligonucleotide
cccggctccattacgtcgccccgccgcggg

SEQ ID NO: 384488 - DNA, 30 bp, Artificial Sequence
  Synthetic oligonucleotide
cgcgcacatttaccctaggttgctcgcggg

SEQ ID NO: 384489 - DNA, 30 bp, Artificial Sequence
  Synthetic oligonucleotide
tgtgtgtccatctatcttacaagaggcggg

SEQ ID NO: 384490 - DNA, 30 bp, Artificial Sequence
  Synthetic oligonucleotide
tcggcttgaccaccgaagactttaggcggg

SEQ ID NO: 384491 - DNA, 30 bp, Artificial Sequence
  Synthetic oligonucleotide
tcataatttatctggtatacgtgcggcggg

SEQ ID NO: 384492 - DNA, 30 bp, Artificial Sequence
  Synthetic oligonucleotide
gacttatctacggttacgccgacgggcggg

SEQ ID NO: 384493 - DNA, 30 bp, Artificial Sequence
  Synthetic oligonucleotide
gttttagggacgaaggttaatggtggcggg

SEQ ID NO: 384494 - DNA, 30 bp, Artificial Sequence
  Synthetic oligonucleotide
ggctatttaaattaacgttgtgtctgcggg

SEQ ID NO: 384495 - DNA, 30 bp, Artificial Sequence
  Synthetic oligonucleotide
gggtcctcgggaaacaggctcacgtgcggg

SEQ ID NO: 384496 - DNA, 30 bp, Artificial Sequence
  Synthetic oligonucleotide
ttttgtagggttgtaaaggtgggttgcggg

SEQ ID NO: 384497 - DNA, 30 bp, Artificial Sequence
  Synthetic oligonucleotide
agtataatcccgaggccgctcatttgcggg

SEQ ID NO: 384498 - DNA, 30 bp, Artificial Sequence
  Synthetic oligonucleotide
ttcataacgaactgctgattcgtaatcggg

SEQ ID NO: 384499 - DNA, 30 bp, Artificial Sequence
  Synthetic oligonucleotide
aagtcagtaatgttaccctaattaatcggg

SEQ ID NO: 384500 - DNA, 30 bp, Artificial Sequence
  Synthetic oligonucleotide
gaggacgtgatccaacacagtttaatcggg

SEQ ID NO: 384501 - DNA, 30 bp, Artificial Sequence
  Synthetic oligonucleotide
aacattgcgttgttacggtcactcatcggg

SEQ ID NO: 384502 - DNA, 30 bp, Artificial Sequence
  Synthetic oligonucleotide
agcgtgtctcggcgtggtccgatgatcggg

SEQ ID NO: 384503 - DNA, 30 bp, Artificial Sequence
  Synthetic oligonucleotide
cagggtctggtgatattagggcatatcggg

SEQ ID NO: 384504 - DNA, 30 bp, Artificial Sequence
  Synthetic oligonucleotide
taccactgtttttacaaggcatcactcggg

SEQ ID NO: 384505 - DNA, 30 bp, Artificial Sequence
  Synthetic oligonucleotide
ccggactcgtcggtcaaagtatccctcggg

SEQ ID NO: 384506 - DNA, 30 bp, Artificial Sequence
  Synthetic oligonucleotide
aatccatctacatgcatatatgtcctcggg

SEQ ID NO: 384507 - DNA, 30 bp, Artificial Sequence
  Synthetic oligonucleotide
actttgcgtttagccgtttaaacagtcggg

SEQ ID NO: 384508 - DNA, 30 bp, Artificial Sequence
  Synthetic oligonucleotide
agaacgacgctttataacaaaaccgtcggg

SEQ ID NO: 384509 - DNA, 30 bp, Artificial Sequence
  Synthetic oligonucleotide
ctctcgggctattttgcccgtcatgtcggg

SEQ ID NO: 384510 - DNA, 30 bp, Artificial Sequence
  Synthetic oligonucleotide
aactaggacgtaggggccgcgtatgtcggg

SEQ ID NO: 384511 - DNA, 30 bp, Artificial Sequence
  Synthetic oligonucleotide
cgtggtggccacagaatccgaaaattcggg

SEQ ID NO: 384512 - DNA, 30 bp, Artificial Sequence
  Synthetic oligonucleotide
ggttgtcgcgtacgcccataacaattcggg

SEQ ID NO: 384513 - DNA, 30 bp, Artificial Sequence
  Synthetic oligonucleotide
gagacctggaagtagatcggtcacttcggg

SEQ ID NO: 384514 - DNA, 30 bp, Artificial Sequence
  Synthetic oligonucleotide
cagttttatctgcaatatacccgcttcggg

SEQ ID NO: 384515 - DNA, 30 bp, Artificial Sequence
  Synthetic oligonucleotide
cagcttcaaaagatttccggagggttcggg

SEQ ID NO: 384516 - DNA, 30 bp, Artificial Sequence
  Synthetic oligonucleotide
aatcgtattttcggtccagatatgttcggg

SEQ ID NO: 384517 - DNA, 30 bp, Artificial Sequence
  Synthetic oligonucleotide
gcgctctattgcatctggttaaatttcggg

SEQ ID NO: 384518 - DNA, 30 bp, Artificial Sequence
  Synthetic oligonucleotide
ctatacctgcggagggaagaggatttcggg

SEQ ID NO: 384519 - DNA, 30 bp, Artificial Sequence
  Synthetic oligonucleotide
tagtatttgagagtacctatgcctttcggg

SEQ ID NO: 384520 - DNA, 30 bp, Artificial Sequence
  Synthetic oligonucleotide
cgttccagcaggagatgaagctgtttcggg

SEQ ID NO: 384521 - DNA, 30 bp, Artificial Sequence
  Synthetic oligonucleotide
tgcgggtagaaaggggtgtcccaaaagggg

SEQ ID NO: 384522 - DNA, 30 bp, Artificial Sequence
  Synthetic oligonucleotide
ggcccgtatagtctaatccaaccgaagggg

SEQ ID NO: 384523 - DNA, 30 bp, Artificial Sequence
  Synthetic oligonucleotide
cttgggcatcggttcgtcggagttaagggg

SEQ ID NO: 384524 - DNA, 30 bp, Artificial Sequence
  Synthetic oligonucleotide
ctgtcaattaacgcggtgggggttaagggg

SEQ ID NO: 384525 - DNA, 30 bp, Artificial Sequence
  Synthetic oligonucleotide
gtgcagctctggggcgtggagggccagggg

SEQ ID NO: 384526 - DNA, 30 bp, Artificial Sequence
  Synthetic oligonucleotide
atttattgcaaacagggaggcttccagggg

SEQ ID NO: 384527 - DNA, 30 bp, Artificial Sequence
  Synthetic oligonucleotide
tgctttccggcgctgaacggggagcagggg

SEQ ID NO: 384528 - DNA, 30 bp, Artificial Sequence
  Synthetic oligonucleotide
cggaattattatgggagcacgtatcagggg

SEQ ID NO: 384529 - DNA, 30 bp, Artificial Sequence
  Synthetic oligonucleotide
aagacattagtatgagcgactgttcagggg

SEQ ID NO: 384530 - DNA, 30 bp, Artificial Sequence
  Synthetic oligonucleotide
accgtgcggtcctctctctggtttcagggg

SEQ ID NO: 384531 - DNA, 30 bp, Artificial Sequence
  Synthetic oligonucleotide
ccaccctgtcatatagtacgtaacgagggg

SEQ ID NO: 384532 - DNA, 30 bp, Artificial Sequence
  Synthetic oligonucleotide
ttcattgactttcgatggttccacgagggg

SEQ ID NO: 384533 - DNA, 30 bp, Artificial Sequence
  Synthetic oligonucleotide
cgcactacttaatcctatctccccgagggg

SEQ ID NO: 384534 - DNA, 30 bp, Artificial Sequence
  Synthetic oligonucleotide
gtttgaccagtatcactgaggttcgagggg

SEQ ID NO: 384535 - DNA, 30 bp, Artificial Sequence
  Synthetic oligonucleotide
aacccctcttgatatgcaaccgaggagggg

SEQ ID NO: 384536 - DNA, 30 bp, Artificial Sequence
  Synthetic oligonucleotide
ggggagagatggtatccgcagcgtgagggg

SEQ ID NO: 384537 - DNA, 30 bp, Artificial Sequence
  Synthetic oligonucleotide
cgcacctgcacagctaggcgccactagggg

SEQ ID NO: 384538 - DNA, 30 bp, Artificial Sequence
  Synthetic oligonucleotide
gttctactgaaagataggagtcgaacgggg

SEQ ID NO: 384539 - DNA, 30 bp, Artificial Sequence
  Synthetic oligonucleotide
agaagaaagtatcactaaccaatcacgggg

SEQ ID NO: 384540 - DNA, 30 bp, Artificial Sequence
  Synthetic oligonucleotide
attgtttgccccgactagatacagacgggg

SEQ ID NO: 384541 - DNA, 30 bp, Artificial Sequence
  Synthetic oligonucleotide
ggggactctgtaggtggggatcggacgggg

SEQ ID NO: 384542 - DNA, 30 bp, Artificial Sequence
  Synthetic oligonucleotide
cgttccacgatgcactatgggcatacgggg

SEQ ID NO: 384543 - DNA, 30 bp, Artificial Sequence
  Synthetic oligonucleotide
gagggggttgaatgagaggtatgtacgggg

SEQ ID NO: 384544 - DNA, 30 bp, Artificial Sequence
  Synthetic oligonucleotide
cctaattgtcctcggttacctcacccgggg

SEQ ID NO: 384545 - DNA, 30 bp, Artificial Sequence
  Synthetic oligonucleotide
cgaagggtacaatagtatacttccccgggg

SEQ ID NO: 384546 - DNA, 30 bp, Artificial Sequence
  Synthetic oligonucleotide
ggattctgtgtcgcctagtaagtcccgggg

SEQ ID NO: 384547 - DNA, 30 bp, Artificial Sequence
  Synthetic oligonucleotide
gtatatactgaattctgctagaagccgggg

SEQ ID NO: 384548 - DNA, 30 bp, Artificial Sequence
  Synthetic oligonucleotide
cattggataaattgtggccgccctccgggg

SEQ ID NO: 384549 - DNA, 30 bp, Artificial Sequence
  Synthetic oligonucleotide
caaattgggaactcccgctgaattccgggg

SEQ ID NO: 384550 - DNA, 30 bp, Artificial Sequence
  Synthetic oligonucleotide
gaatagccggcagcgacaggaaaagcgggg

SEQ ID NO: 384551 - DNA, 30 bp, Artificial Sequence
  Synthetic oligonucleotide
cccgcctccgataaatgcgttcgagcgggg

SEQ ID NO: 384552 - DNA, 30 bp, Artificial Sequence
  Synthetic oligonucleotide
tatctgaactccagtgtaaacgtagcgggg

SEQ ID NO: 384553 - DNA, 30 bp, Artificial Sequence
  Synthetic oligonucleotide
ccgggtcccgaaacaatgggacccgcgggg

SEQ ID NO: 384554 - DNA, 30 bp, Artificial Sequence
  Synthetic oligonucleotide
aaccagtgcctacacgccagccccgcgggg

SEQ ID NO: 384555 - DNA, 30 bp, Artificial Sequence
  Synthetic oligonucleotide
cggcgtgcgggcgcggaccgtaatgcgggg

SEQ ID NO: 384556 - DNA, 30 bp, Artificial Sequence
  Synthetic oligonucleotide
ggctcggctcggcggcgcgcatatgcgggg

SEQ ID NO: 384557 - DNA, 30 bp, Artificial Sequence
  Synthetic oligonucleotide
atgatgcagaaactggcgtgatctgcgggg

SEQ ID NO: 384558 - DNA, 30 bp, Artificial Sequence
  Synthetic oligonucleotide
tattagatcggcttagtggaaacatcgggg

SEQ ID NO: 384559 - DNA, 30 bp, Artificial Sequence
  Synthetic oligonucleotide
tgcatagccagcgtattggggcggtcgggg

SEQ ID NO: 384560 - DNA, 30 bp, Artificial Sequence
  Synthetic oligonucleotide
gaaagctggataggtaatgtatcttcgggg

SEQ ID NO: 384561 - DNA, 30 bp, Artificial Sequence
  Synthetic oligonucleotide
cagtcagtatgaggccaagggctttcgggg

SEQ ID NO: 384562 - DNA, 30 bp, Artificial Sequence
  Synthetic oligonucleotide
ctgctacgcattaggacttctctttcgggg

SEQ ID NO: 384563 - DNA, 30 bp, Artificial Sequence
  Synthetic oligonucleotide
gaacctctcggtgatcctgcagtttcgggg

SEQ ID NO: 384564 - DNA, 30 bp, Artificial Sequence
  Synthetic oligonucleotide
tcaggcttttaagatataatccgaaggggg

SEQ ID NO: 384565 - DNA, 30 bp, Artificial Sequence
  Synthetic oligonucleotide
gcatacccgagctttgatatttgaaggggg

SEQ ID NO: 384566 - DNA, 30 bp, Artificial Sequence
  Synthetic oligonucleotide
cctaccccgtcgaggcaagccggcaggggg

SEQ ID NO: 384567 - DNA, 30 bp, Artificial Sequence
  Synthetic oligonucleotide
ataacgccaccaggcttacggggcaggggg

SEQ ID NO: 384568 - DNA, 30 bp, Artificial Sequence
  Synthetic oligonucleotide
ggcaataagattgactcggactataggggg

SEQ ID NO: 384569 - DNA, 30 bp, Artificial Sequence
  Synthetic oligonucleotide
ttgaccctgtaggatcttccctctaggggg

SEQ ID NO: 384570 - DNA, 30 bp, Artificial Sequence
  Synthetic oligonucleotide
tgttggccggctgtccccgaccttaggggg

SEQ ID NO: 384571 - DNA, 30 bp, Artificial Sequence
  Synthetic oligonucleotide
atgttctctttcacatgacggaaacggggg

SEQ ID NO: 384572 - DNA, 30 bp, Artificial Sequence
  Synthetic oligonucleotide
cgctgtaactgtgaccgttcccaacggggg

SEQ ID NO: 384573 - DNA, 30 bp, Artificial Sequence
  Synthetic oligonucleotide
tgaccgcgcggcattaggggtttccggggg

SEQ ID NO: 384574 - DNA, 30 bp, Artificial Sequence
  Synthetic oligonucleotide
catgttagttttgcgcgttcacctcggggg

SEQ ID NO: 384575 - DNA, 30 bp, Artificial Sequence
  Synthetic oligonucleotide
ttcttcaatgccatagatatctgtcggggg

SEQ ID NO: 384576 - DNA, 31 bp, Artificial Sequence
  Synthetic oligonucleotide
catttggacatgctgctttcggacagggggg

SEQ ID NO: 384577 - DNA, 30 bp, Artificial Sequence
  Synthetic oligonucleotide
acaaaccttttataaatgttggcagggggg

SEQ ID NO: 384578 - DNA, 30 bp, Artificial Sequence
  Synthetic oligonucleotide
cgacaacttccccgcctcctacgagggggg

SEQ ID NO: 384579 - DNA, 30 bp, Artificial Sequence
  Synthetic oligonucleotide
attccctgtgagaagacacaggtagggggg

SEQ ID NO: 384580 - DNA, 29 bp, Artificial Sequence
  Synthetic oligonucleotide
aggagtgtgcctccgtagggaacgggggg

SEQ ID NO: 384581 - DNA, 30 bp, Artificial Sequence
  Synthetic oligonucleotide
gataggggatttcgtggtgccgaggggggg

SEQ ID NO: 384582 - DNA, 30 bp, Artificial Sequence
  Synthetic oligonucleotide
gacaccatggagtctgggcagagggggggg

SEQ ID NO: 384583 - DNA, 30 bp, Artificial Sequence
  Synthetic oligonucleotide
ttctcccgggaggcaaagggcttggggggg

SEQ ID NO: 384584 - DNA, 30 bp, Artificial Sequence
  Synthetic oligonucleotide
ctaaaagcgcagactgttttatgtgggggg

SEQ ID NO: 384585 - DNA, 30 bp, Artificial Sequence
  Synthetic oligonucleotide
cggcgagtggccattgtccggcttgggggg

SEQ ID NO: 384586 - DNA, 30 bp, Artificial Sequence
  Synthetic oligonucleotide
ctagtggatttagcgtgatctgttgggggg

SEQ ID NO: 384587 - DNA, 30 bp, Artificial Sequence
  Synthetic oligonucleotide
aggactccaggacgtgggtctgttgggggg

SEQ ID NO: 384588 - DNA, 30 bp, Artificial Sequence
  Synthetic oligonucleotide
ggttctaccgaagggatcggcccgtggggg

SEQ ID NO: 384589 - DNA, 30 bp, Artificial Sequence
  Synthetic oligonucleotide
taaatgtggagatattggtagcggtggggg

SEQ ID NO: 384590 - DNA, 30 bp, Artificial Sequence
  Synthetic oligonucleotide
ccgtggtcaatcgaatggcggcggtggggg

SEQ ID NO: 384591 - DNA, 30 bp, Artificial Sequence
  Synthetic oligonucleotide
acctacagtaaggaatttcttgattggggg

SEQ ID NO: 384592 - DNA, 30 bp, Artificial Sequence
  Synthetic oligonucleotide
ggttaacgtgccactagggtctcttggggg

SEQ ID NO: 384593 - DNA, 30 bp, Artificial Sequence
  Synthetic oligonucleotide
cgcaccaaaaacaccccaacccaaatgggg

SEQ ID NO: 384594 - DNA, 30 bp, Artificial Sequence
  Synthetic oligonucleotide
gtgcttgataatagtatgatagaaatgggg

SEQ ID NO: 384595 - DNA, 30 bp, Artificial Sequence
  Synthetic oligonucleotide
gaattatcagtgaagatacacgccatgggg

SEQ ID NO: 384596 - DNA, 30 bp, Artificial Sequence
  Synthetic oligonucleotide
gttttggccatgattccaaattccatgggg

SEQ ID NO: 384597 - DNA, 30 bp, Artificial Sequence
  Synthetic oligonucleotide
cattttttggagaccttctaggctatgggg

SEQ ID NO: 384598 - DNA, 30 bp, Artificial Sequence
  Synthetic oligonucleotide
ctgggcaccggaagggtggagcgtatgggg

SEQ ID NO: 384599 - DNA, 30 bp, Artificial Sequence
  Synthetic oligonucleotide
taggggcacttatcggtacgggacctgggg

SEQ ID NO: 384600 - DNA, 30 bp, Artificial Sequence
  Synthetic oligonucleotide
tccgacacactctggattattgacctgggg

SEQ ID NO: 384601 - DNA, 30 bp, Artificial Sequence
  Synthetic oligonucleotide
cagtcagttttactcctgaacattctgggg

SEQ ID NO: 384602 - DNA, 30 bp, Artificial Sequence
  Synthetic oligonucleotide
ggcgctttgtctaaagcgaatagcgtgggg

SEQ ID NO: 384603 - DNA, 30 bp, Artificial Sequence
  Synthetic oligonucleotide
gcgaacagtaggttccaggaccgggtgggg

SEQ ID NO: 384604 - DNA, 30 bp, Artificial Sequence
  Synthetic oligonucleotide
ctgtttcgagtgaaccaatcgttggtgggg

SEQ ID NO: 384605 - DNA, 30 bp, Artificial Sequence
  Synthetic oligonucleotide
tcacctttgtttcttaatctatttgtgggg

SEQ ID NO: 384606 - DNA, 30 bp, Artificial Sequence
  Synthetic oligonucleotide
tttagtatcggatcgtgcatgtaattgggg

SEQ ID NO: 384607 - DNA, 30 bp, Artificial Sequence
  Synthetic oligonucleotide
atagttgagggatgaacatgactattgggg

SEQ ID NO: 384608 - DNA, 30 bp, Artificial Sequence
  Synthetic oligonucleotide
tagacgatccaccactaatctaccttgggg

SEQ ID NO: 384609 - DNA, 30 bp, Artificial Sequence
  Synthetic oligonucleotide
ggcagtaatcatatcgccgcagtcttgggg

SEQ ID NO: 384610 - DNA, 30 bp, Artificial Sequence
  Synthetic oligonucleotide
caaaccctgacttgtagcaacgtcttgggg

SEQ ID NO: 384611 - DNA, 30 bp, Artificial Sequence
  Synthetic oligonucleotide
agtctatggcgggctgaaaggtcgttgggg

SEQ ID NO: 384612 - DNA, 30 bp, Artificial Sequence
  Synthetic oligonucleotide
tggaatttctaatacggggtggggttgggg

SEQ ID NO: 384613 - DNA, 30 bp, Artificial Sequence
  Synthetic oligonucleotide
aagacttccacgccctcgaaaactttgggg

SEQ ID NO: 384614 - DNA, 30 bp, Artificial Sequence
  Synthetic oligonucleotide
gagtaccctaattcgaatccggctttgggg

SEQ ID NO: 384615 - DNA, 30 bp, Artificial Sequence
  Synthetic oligonucleotide
ttttcagcggctgaatgctacccaaatggg

SEQ ID NO: 384616 - DNA, 30 bp, Artificial Sequence
  Synthetic oligonucleotide
gcacccagaggtaagtgggtatggaatggg

SEQ ID NO: 384617 - DNA, 30 bp, Artificial Sequence
  Synthetic oligonucleotide
cacaaaacatgccggctgctttctaatggg

SEQ ID NO: 384618 - DNA, 30 bp, Artificial Sequence
  Synthetic oligonucleotide
atggatctcacgcagtatcttggtaatggg

SEQ ID NO: 384619 - DNA, 30 bp, Artificial Sequence
  Synthetic oligonucleotide
tggctagagccgtcactagccattaatggg

SEQ ID NO: 384620 - DNA, 30 bp, Artificial Sequence
  Synthetic oligonucleotide
taccccgctgtacgagagttttcacatggg

SEQ ID NO: 384621 - DNA, 30 bp, Artificial Sequence
  Synthetic oligonucleotide
tatgcaataaggcaccgcgccctacatggg

SEQ ID NO: 384622 - DNA, 30 bp, Artificial Sequence
  Synthetic oligonucleotide
ctatactaatgcatccgtccgttgcatggg

SEQ ID NO: 384623 - DNA, 30 bp, Artificial Sequence
  Synthetic oligonucleotide
tttcttagaagtgggcctcaaggagatggg

SEQ ID NO: 384624 - DNA, 30 bp, Artificial Sequence
  Synthetic oligonucleotide
gacgccccacctaagagtcgtcgggatggg

SEQ ID NO: 384625 - DNA, 30 bp, Artificial Sequence
  Synthetic oligonucleotide
aatagatctgtggggtttagaggggatggg

SEQ ID NO: 384626 - DNA, 30 bp, Artificial Sequence
  Synthetic oligonucleotide
gtgcccgtgcggtcccagcagcctgatggg

SEQ ID NO: 384627 - DNA, 30 bp, Artificial Sequence
  Synthetic oligonucleotide
aaagagtagctttccatattcatatatggg

SEQ ID NO: 384628 - DNA, 30 bp, Artificial Sequence
  Synthetic oligonucleotide
cttagaacaattaatgtcttgatatatggg

SEQ ID NO: 384629 - DNA, 30 bp, Artificial Sequence
  Synthetic oligonucleotide
gtcaactactgacatccctgagactatggg

SEQ ID NO: 384630 - DNA, 30 bp, Artificial Sequence
  Synthetic oligonucleotide
acggagcatccgtttttcttaatctatggg

SEQ ID NO: 384631 - DNA, 30 bp, Artificial Sequence
  Synthetic oligonucleotide
aatctgtgatgagagcgcttaaagtatggg

SEQ ID NO: 384632 - DNA, 30 bp, Artificial Sequence
  Synthetic oligonucleotide
taggacctaactttgacccggtattatggg

SEQ ID NO: 384633 - DNA, 30 bp, Artificial Sequence
  Synthetic oligonucleotide
aatgaggaggttcggtgcatagtttatggg

SEQ ID NO: 384634 - DNA, 30 bp, Artificial Sequence
  Synthetic oligonucleotide
gtaatgttttcgaggaaatgttaaactggg

SEQ ID NO: 384635 - DNA, 30 bp, Artificial Sequence
  Synthetic oligonucleotide
gaatttcaccgctagttaccgagaactggg

SEQ ID NO: 384636 - DNA, 30 bp, Artificial Sequence
  Synthetic oligonucleotide
aggttttactagtacagatcgaacactggg

SEQ ID NO: 384637 - DNA, 30 bp, Artificial Sequence
  Synthetic oligonucleotide
cgacaagataaggggccacacagacctggg

SEQ ID NO: 384638 - DNA, 30 bp, Artificial Sequence
  Synthetic oligonucleotide
gatgcaatcaaccatagcctctgacctggg

SEQ ID NO: 384639 - DNA, 30 bp, Artificial Sequence
  Synthetic oligonucleotide
cggtttattaatgcacatatggaccctggg

SEQ ID NO: 384640 - DNA, 30 bp, Artificial Sequence
  Synthetic oligonucleotide
caacgtcccacggacaggggcgcgcctggg

SEQ ID NO: 384641 - DNA, 30 bp, Artificial Sequence
  Synthetic oligonucleotide
ttaaaaacctggtatctgatcacagctggg

SEQ ID NO: 384642 - DNA, 30 bp, Artificial Sequence
  Synthetic oligonucleotide
gatcctatagcatgtcaaacttcagctggg

SEQ ID NO: 384643 - DNA, 30 bp, Artificial Sequence
  Synthetic oligonucleotide
ctgcaaaccacgtgacatcatcacgctggg

SEQ ID NO: 384644 - DNA, 30 bp, Artificial Sequence
  Synthetic oligonucleotide
agtgggtggtctttggaataataggctggg

SEQ ID NO: 384645 - DNA, 30 bp, Artificial Sequence
  Synthetic oligonucleotide
gataatatgttctctcgtaggccggctggg

SEQ ID NO: 384646 - DNA, 30 bp, Artificial Sequence
  Synthetic oligonucleotide
acccctgacactaaaatgcagtatgctggg

SEQ ID NO: 384647 - DNA, 30 bp, Artificial Sequence
  Synthetic oligonucleotide
cactcacccgtacttctgacgactgctggg

SEQ ID NO: 384648 - DNA, 30 bp, Artificial Sequence
  Synthetic oligonucleotide
aagatcttgcaatcccgcttcggatctggg

SEQ ID NO: 384649 - DNA, 30 bp, Artificial Sequence
  Synthetic oligonucleotide
gcctaaatgggattggtcgtgggctctggg

SEQ ID NO: 384650 - DNA, 30 bp, Artificial Sequence
  Synthetic oligonucleotide
ttgtacttctaggtgtatccaaggtctggg

SEQ ID NO: 384651 - DNA, 30 bp, Artificial Sequence
  Synthetic oligonucleotide
aatcctcttggtgtaactgcgatgtctggg

SEQ ID NO: 384652 - DNA, 30 bp, Artificial Sequence
  Synthetic oligonucleotide
cccatggtcgtttatggtaggacttctggg

SEQ ID NO: 384653 - DNA, 30 bp, Artificial Sequence
  Synthetic oligonucleotide
attcgctctgactccctcgctttttctggg

SEQ ID NO: 384654 - DNA, 30 bp, Artificial Sequence
  Synthetic oligonucleotide
taagagtgtttgtatagaatgcacagtggg

SEQ ID NO: 384655 - DNA, 31 bp, Artificial Sequence
  Synthetic oligonucleotide
caacagtccaggatgggtcgcggccagtggg

SEQ ID NO: 384656 - DNA, 29 bp, Artificial Sequence
  Synthetic oligonucleotide
catgtacttacatgtgtgacgggagtggg

SEQ ID NO: 384657 - DNA, 30 bp, Artificial Sequence
  Synthetic oligonucleotide
atgtggaaagtctatgtcactaatagtggg

SEQ ID NO: 384658 - DNA, 30 bp, Artificial Sequence
  Synthetic oligonucleotide
gtgaggattagaactttaggttatagtggg

SEQ ID NO: 384659 - DNA, 30 bp, Artificial Sequence
  Synthetic oligonucleotide
agttaacagaaggtacagccctcacgtggg

SEQ ID NO: 384660 - DNA, 30 bp, Artificial Sequence
  Synthetic oligonucleotide
cgcggacgcgagcgttggccccgccgtggg

SEQ ID NO: 384661 - DNA, 30 bp, Artificial Sequence
  Synthetic oligonucleotide
tccgtttcgtcgttgattcctatgcgtggg

SEQ ID NO: 384662 - DNA, 30 bp, Artificial Sequence
  Synthetic oligonucleotide
gtttgagatggtgaagattttcttcgtggg

SEQ ID NO: 384663 - DNA, 30 bp, Artificial Sequence
  Synthetic oligonucleotide
taatatacgcataagcacaaagccggtggg

SEQ ID NO: 384664 - DNA, 30 bp, Artificial Sequence
  Synthetic oligonucleotide
ataataagcggtttagcacccatcggtggg

SEQ ID NO: 384665 - DNA, 30 bp, Artificial Sequence
  Synthetic oligonucleotide
cacgggacatcagtaataatttatggtggg

SEQ ID NO: 384666 - DNA, 30 bp, Artificial Sequence
  Synthetic oligonucleotide
agtataaatttggattcaactcaatgtggg

SEQ ID NO: 384667 - DNA, 30 bp, Artificial Sequence
  Synthetic oligonucleotide
atgctcggccaagttgcaacctaatgtggg

SEQ ID NO: 384668 - DNA, 30 bp, Artificial Sequence
  Synthetic oligonucleotide
cgcatgtcgccgtcgaagtgttaatgtggg

SEQ ID NO: 384669 - DNA, 30 bp, Artificial Sequence
  Synthetic oligonucleotide
cagtttacgcttgtaacatgatcatgtggg

SEQ ID NO: 384670 - DNA, 30 bp, Artificial Sequence
  Synthetic oligonucleotide
tctttatttatacagttgataggatgtggg

SEQ ID NO: 384671 - DNA, 30 bp, Artificial Sequence
  Synthetic oligonucleotide
agttgacttgcaacgcactaactatgtggg

SEQ ID NO: 384672 - DNA, 30 bp, Artificial Sequence
  Synthetic oligonucleotide
ctacccgaagacattccgtatacctgtggg

SEQ ID NO: 384673 - DNA, 30 bp, Artificial Sequence
  Synthetic oligonucleotide
gggtaatgcggggtcttggtcgggtgtggg

SEQ ID NO: 384674 - DNA, 30 bp, Artificial Sequence
  Synthetic oligonucleotide
aagataagtgacaatacgtgtccttgtggg

SEQ ID NO: 384675 - DNA, 30 bp, Artificial Sequence
  Synthetic oligonucleotide
actagttctctttgtaactgctcttgtggg

SEQ ID NO: 384676 - DNA, 30 bp, Artificial Sequence
  Synthetic oligonucleotide
tgcggcagccaatcatgcctcgtttgtggg

SEQ ID NO: 384677 - DNA, 30 bp, Artificial Sequence
  Synthetic oligonucleotide
gagtgcgtgaaatccggcgcatccattggg

SEQ ID NO: 384678 - DNA, 30 bp, Artificial Sequence
  Synthetic oligonucleotide
aatccttttcgtgtgacatcatccattggg

SEQ ID NO: 384679 - DNA, 30 bp, Artificial Sequence
  Synthetic oligonucleotide
actacaggctaagtgcaaggtagcattggg

SEQ ID NO: 384680 - DNA, 30 bp, Artificial Sequence
  Synthetic oligonucleotide
tacactataagaagccatcgcgtcattggg

SEQ ID NO: 384681 - DNA, 30 bp, Artificial Sequence
  Synthetic oligonucleotide
tatatattaattcgtcctgccttcattggg

SEQ ID NO: 384682 - DNA, 30 bp, Artificial Sequence
  Synthetic oligonucleotide
gatccgagtatcactggccgttggattggg

SEQ ID NO: 384683 - DNA, 30 bp, Artificial Sequence
  Synthetic oligonucleotide
actagagggtaagcgggggcacctattggg

SEQ ID NO: 384684 - DNA, 30 bp, Artificial Sequence
  Synthetic oligonucleotide
aacagtctggaaaaccggcaataacttggg

SEQ ID NO: 384685 - DNA, 30 bp, Artificial Sequence
  Synthetic oligonucleotide
aactcggcaaatttgtccccgtaacttggg

SEQ ID NO: 384686 - DNA, 30 bp, Artificial Sequence
  Synthetic oligonucleotide
aaaatgtggcagcagttttttggccttggg

SEQ ID NO: 384687 - DNA, 30 bp, Artificial Sequence
  Synthetic oligonucleotide
gatgtttggattatcccacgatgccttggg

SEQ ID NO: 384688 - DNA, 30 bp, Artificial Sequence
  Synthetic oligonucleotide
acagatgaccgaaagaaacaaatccttggg

SEQ ID NO: 384689 - DNA, 30 bp, Artificial Sequence
  Synthetic oligonucleotide
ggcagtttcgcgtagtgttgcaagcttggg

SEQ ID NO: 384690 - DNA, 30 bp, Artificial Sequence
  Synthetic oligonucleotide
gtgctaagagatgcggattcgtagcttggg

SEQ ID NO: 384691 - DNA, 30 bp, Artificial Sequence
  Synthetic oligonucleotide
aacagaacctttatagccatgacagttggg

SEQ ID NO: 384692 - DNA, 30 bp, Artificial Sequence
  Synthetic oligonucleotide
ccactatctgagaggagacctccagttggg

SEQ ID NO: 384693 - DNA, 30 bp, Artificial Sequence
  Synthetic oligonucleotide
aatctggatatttgagggtgatcagttggg

SEQ ID NO: 384694 - DNA, 30 bp, Artificial Sequence
  Synthetic oligonucleotide
acccaccaatcacggtaagagaacgttggg

SEQ ID NO: 384695 - DNA, 30 bp, Artificial Sequence
  Synthetic oligonucleotide
ttcccagctgagttaccaacctacgttggg

SEQ ID NO: 384696 - DNA, 30 bp, Artificial Sequence
  Synthetic oligonucleotide
tcttgctcgataaggcggaacaccgttggg

SEQ ID NO: 384697 - DNA, 30 bp, Artificial Sequence
  Synthetic oligonucleotide
tttggctgagtgtccaacgaaatcgttggg

SEQ ID NO: 384698 - DNA, 30 bp, Artificial Sequence
  Synthetic oligonucleotide
acttacagaccgacgcagtggatcgttggg

SEQ ID NO: 384699 - DNA, 30 bp, Artificial Sequence
  Synthetic oligonucleotide
ctcgtaaatatcgagtcaactgctgttggg

SEQ ID NO: 384700 - DNA, 30 bp, Artificial Sequence
  Synthetic oligonucleotide
gttcatattaccggatcatgatactttggg

SEQ ID NO: 384701 - DNA, 30 bp, Artificial Sequence
  Synthetic oligonucleotide
accctgccgaagtctgaaggtggctttggg

SEQ ID NO: 384702 - DNA, 30 bp, Artificial Sequence
  Synthetic oligonucleotide
gaggggaggaagacccagtatctctttggg

SEQ ID NO: 384703 - DNA, 30 bp, Artificial Sequence
  Synthetic oligonucleotide
tttggtatgatgaatagctgctcgtttggg

SEQ ID NO: 384704 - DNA, 30 bp, Artificial Sequence
  Synthetic oligonucleotide
ttcgacaaagtagagggtcccgggtttggg

SEQ ID NO: 384705 - DNA, 30 bp, Artificial Sequence
  Synthetic oligonucleotide
ttggtcatcattctgagtggtttttttggg

SEQ ID NO: 384706 - DNA, 30 bp, Artificial Sequence
  Synthetic oligonucleotide
tacgtctgataagcactcgccataaaatgg

SEQ ID NO: 384707 - DNA, 30 bp, Artificial Sequence
  Synthetic oligonucleotide
aaccaattctttatccatgacacgaaatgg

SEQ ID NO: 384708 - DNA, 30 bp, Artificial Sequence
  Synthetic oligonucleotide
gaattaatcaggaagccataaccgaaatgg

SEQ ID NO: 384709 - DNA, 30 bp, Artificial Sequence
  Synthetic oligonucleotide
ttcttccgactccgcaaaagacggaaatgg

SEQ ID NO: 384710 - DNA, 30 bp, Artificial Sequence
  Synthetic oligonucleotide
agtatggcaaactttggtttgatgaaatgg

SEQ ID NO: 384711 - DNA, 30 bp, Artificial Sequence
  Synthetic oligonucleotide
gcccagaggtgcaaacacctggataaatgg

SEQ ID NO: 384712 - DNA, 30 bp, Artificial Sequence
  Synthetic oligonucleotide
gaacaacagcaccaatacgtgcgtaaatgg

SEQ ID NO: 384713 - DNA, 30 bp, Artificial Sequence
  Synthetic oligonucleotide
aattagcagtctggtcctatctttaaatgg

SEQ ID NO: 384714 - DNA, 30 bp, Artificial Sequence
  Synthetic oligonucleotide
gttttgtggacatatagtcagggacaatgg

SEQ ID NO: 384715 - DNA, 30 bp, Artificial Sequence
  Synthetic oligonucleotide
tttgtgacgggatttgtccaaacccaatgg

SEQ ID NO: 384716 - DNA, 30 bp, Artificial Sequence
  Synthetic oligonucleotide
catgaggtcggtttaaacattaggcaatgg

SEQ ID NO: 384717 - DNA, 30 bp, Artificial Sequence
  Synthetic oligonucleotide
catcgatatcccgatatgttttttcaatgg

SEQ ID NO: 384718 - DNA, 30 bp, Artificial Sequence
  Synthetic oligonucleotide
gtgaggttttctccctggcaaacagaatgg

SEQ ID NO: 384719 - DNA, 30 bp, Artificial Sequence
  Synthetic oligonucleotide
ccttacagttaagtcagtgtgggagaatgg

SEQ ID NO: 384720 - DNA, 30 bp, Artificial Sequence
  Synthetic oligonucleotide
tattacgtgacgaccctgttcaaggaatgg

SEQ ID NO: 384721 - DNA, 30 bp, Artificial Sequence
  Synthetic oligonucleotide
tcgttaacgtaccctgtggctatggaatgg

SEQ ID NO: 384722 - DNA, 30 bp, Artificial Sequence
  Synthetic oligonucleotide
taccggatttgatggccattacaataatgg

SEQ ID NO: 384723 - DNA, 30 bp, Artificial Sequence
  Synthetic oligonucleotide
taaactcgcgacttattcctgcaataatgg

SEQ ID NO: 384724 - DNA, 30 bp, Artificial Sequence
  Synthetic oligonucleotide
actctggtaggaaggtagggggaataatgg

SEQ ID NO: 384725 - DNA, 30 bp, Artificial Sequence
  Synthetic oligonucleotide
ccgggaattggatgctcacgccactaatgg

SEQ ID NO: 384726 - DNA, 30 bp, Artificial Sequence
  Synthetic oligonucleotide
atggcaccccagacgcaaaatgtctaatgg

SEQ ID NO: 384727 - DNA, 30 bp, Artificial Sequence
  Synthetic oligonucleotide
tgaagaagtaagaacgcgttattctaatgg

SEQ ID NO: 384728 - DNA, 30 bp, Artificial Sequence
  Synthetic oligonucleotide
ggcaccttatggtaacttgaccagtaatgg

SEQ ID NO: 384729 - DNA, 30 bp, Artificial Sequence
  Synthetic oligonucleotide
caaaatagcataacattgccaatgtaatgg

SEQ ID NO: 384730 - DNA, 30 bp, Artificial Sequence
  Synthetic oligonucleotide
atgtagttgttgtttaacaattgttaatgg

SEQ ID NO: 384731 - DNA, 30 bp, Artificial Sequence
  Synthetic oligonucleotide
agtgtggtcatgcataatgatatttaatgg

SEQ ID NO: 384732 - DNA, 31 bp, Artificial Sequence
  Synthetic oligonucleotide
ggaacaattggtggccccgtctgcaacatgg

SEQ ID NO: 384733 - DNA, 30 bp, Artificial Sequence
  Synthetic oligonucleotide
gtcattatgtagaatgtaaaacgcacatgg

SEQ ID NO: 384734 - DNA, 30 bp, Artificial Sequence
  Synthetic oligonucleotide
ctggaccagccagttacttggaggacatgg

SEQ ID NO: 384735 - DNA, 30 bp, Artificial Sequence
  Synthetic oligonucleotide
atgcggctagttcaggtactgtggacatgg

SEQ ID NO: 384736 - DNA, 30 bp, Artificial Sequence
  Synthetic oligonucleotide
ctgcctactcttctgatgcagattacatgg

SEQ ID NO: 384737 - DNA, 30 bp, Artificial Sequence
  Synthetic oligonucleotide
ggtcaacttggtaagatcatcccaccatgg

SEQ ID NO: 384738 - DNA, 30 bp, Artificial Sequence
  Synthetic oligonucleotide
ttcaataccgtacataacggttccccatgg

SEQ ID NO: 384739 - DNA, 30 bp, Artificial Sequence
  Synthetic oligonucleotide
tacaactcccacacgtgttccatcccatgg

SEQ ID NO: 384740 - DNA, 30 bp, Artificial Sequence
  Synthetic oligonucleotide
atagtttgcgggtaccatttaaagccatgg

SEQ ID NO: 384741 - DNA, 30 bp, Artificial Sequence
  Synthetic oligonucleotide
tccttggatttatgtgctttgtcgccatgg

SEQ ID NO: 384742 - DNA, 30 bp, Artificial Sequence
  Synthetic oligonucleotide
ggccgtgattggaggaatactactccatgg

SEQ ID NO: 384743 - DNA, 30 bp, Artificial Sequence
  Synthetic oligonucleotide
tccctacggaggcaaccgccgagtccatgg

SEQ ID NO: 384744 - DNA, 30 bp, Artificial Sequence
  Synthetic oligonucleotide
acagtttggtttgctcgtttatgtccatgg

SEQ ID NO: 384745 - DNA, 30 bp, Artificial Sequence
  Synthetic oligonucleotide
acagtttgcgtaaacacacagcacgcatgg

SEQ ID NO: 384746 - DNA, 30 bp, Artificial Sequence
  Synthetic oligonucleotide
gggcagttcatcgacactatttacgcatgg

SEQ ID NO: 384747 - DNA, 30 bp, Artificial Sequence
  Synthetic oligonucleotide
actttggggaaacaggctattggggcatgg

SEQ ID NO: 384748 - DNA, 30 bp, Artificial Sequence
  Synthetic oligonucleotide
atcaatttttagagacatcgtaaatcatgg

SEQ ID NO: 384749 - DNA, 30 bp, Artificial Sequence
  Synthetic oligonucleotide
aaaatcgtgctgactactgacagatcatgg

SEQ ID NO: 384750 - DNA, 30 bp, Artificial Sequence
  Synthetic oligonucleotide
gagataggcacccataaactagtatcatgg

SEQ ID NO: 384751 - DNA, 30 bp, Artificial Sequence
  Synthetic oligonucleotide
agcatcgaaaagctttgctacatctcatgg

SEQ ID NO: 384752 - DNA, 30 bp, Artificial Sequence
  Synthetic oligonucleotide
ttgtcctcgagctgagctataaattcatgg

SEQ ID NO: 384753 - DNA, 30 bp, Artificial Sequence
  Synthetic oligonucleotide
ttagtttggcgcggaagtttcccaagatgg

SEQ ID NO: 384754 - DNA, 30 bp, Artificial Sequence
  Synthetic oligonucleotide
gccccaggtcgtgttagcggcagaagatgg

SEQ ID NO: 384755 - DNA, 30 bp, Artificial Sequence
  Synthetic oligonucleotide
ggacagcaagcggtaactaggcgcagatgg

SEQ ID NO: 384756 - DNA, 30 bp, Artificial Sequence
  Synthetic oligonucleotide
ttccgtctggaatatataaacaagagatgg

SEQ ID NO: 384757 - DNA, 30 bp, Artificial Sequence
  Synthetic oligonucleotide
agcgcgtctcacggttgaataccgagatgg

SEQ ID NO: 384758 - DNA, 30 bp, Artificial Sequence
  Synthetic oligonucleotide
agtaattcaaaaatttatggacggagatgg

SEQ ID NO: 384759 - DNA, 30 bp, Artificial Sequence
  Synthetic oligonucleotide
aaggatgtgtgtagggatgtgtatagatgg

SEQ ID NO: 384760 - DNA, 30 bp, Artificial Sequence
  Synthetic oligonucleotide
tggtagaggtgagtctctttcgctagatgg

SEQ ID NO: 384761 - DNA, 30 bp, Artificial Sequence
  Synthetic oligonucleotide
caccatcgaagacattcgtgttgtagatgg

SEQ ID NO: 384762 - DNA, 30 bp, Artificial Sequence
  Synthetic oligonucleotide
actcctatcgaaccgctacccgcacgatgg

SEQ ID NO: 384763 - DNA, 30 bp, Artificial Sequence
  Synthetic oligonucleotide
gggagtcaccggttaagccgttaccgatgg

SEQ ID NO: 384764 - DNA, 30 bp, Artificial Sequence
  Synthetic oligonucleotide
cctcttgtgggattaagcggtggtcgatgg

SEQ ID NO: 384765 - DNA, 30 bp, Artificial Sequence
  Synthetic oligonucleotide
ttatggccggcctccctcatggcaggatgg

SEQ ID NO: 384766 - DNA, 30 bp, Artificial Sequence
  Synthetic oligonucleotide
cggatcggtggcaagcggtaaagaggatgg

SEQ ID NO: 384767 - DNA, 30 bp, Artificial Sequence
  Synthetic oligonucleotide
gctccgcagtggacgccagtccgaggatgg

SEQ ID NO: 384768 - DNA, 30 bp, Artificial Sequence
  Synthetic oligonucleotide
catgtcaaattcggttcagcacccggatgg

SEQ ID NO: 384769 - DNA, 30 bp, Artificial Sequence
  Synthetic oligonucleotide
gagatcctgcttcgatatcgtagcggatgg

SEQ ID NO: 384770 - DNA, 30 bp, Artificial Sequence
  Synthetic oligonucleotide
tatctgctgcacccaacctgtaagggatgg

SEQ ID NO: 384771 - DNA, 30 bp, Artificial Sequence
  Synthetic oligonucleotide
ggttcaaccgggagttcggcgattggatgg

SEQ ID NO: 384772 - DNA, 30 bp, Artificial Sequence
  Synthetic oligonucleotide
ttatatacctaaggaagattcgttggatgg

SEQ ID NO: 384773 - DNA, 30 bp, Artificial Sequence
  Synthetic oligonucleotide
atctgcgcacggacatcaggaacatgatgg

SEQ ID NO: 384774 - DNA, 30 bp, Artificial Sequence
  Synthetic oligonucleotide
acaaaggacgcgttccagaccacatgatgg

SEQ ID NO: 384775 - DNA, 30 bp, Artificial Sequence
  Synthetic oligonucleotide
ttcccagtgaaacggtgaattttctgatgg

SEQ ID NO: 384776 - DNA, 30 bp, Artificial Sequence
  Synthetic oligonucleotide
atcgaccgcctcggacctcctcggtgatgg

SEQ ID NO: 384777 - DNA, 30 bp, Artificial Sequence
  Synthetic oligonucleotide
ttgagctacagttagggcagatggtgatgg

SEQ ID NO: 384778 - DNA, 30 bp, Artificial Sequence
  Synthetic oligonucleotide
gttatacggggggagacggagctttgatgg

SEQ ID NO: 384779 - DNA, 30 bp, Artificial Sequence
  Synthetic oligonucleotide
ctattaacattaaaaagtggattaatatgg

SEQ ID NO: 384780 - DNA, 30 bp, Artificial Sequence
  Synthetic oligonucleotide
tagtaggaagtctgtagaaatcacatatgg

SEQ ID NO: 384781 - DNA, 30 bp, Artificial Sequence
  Synthetic oligonucleotide
taagcagggtccgtaaaacgtcgcatatgg

SEQ ID NO: 384782 - DNA, 30 bp, Artificial Sequence
  Synthetic oligonucleotide
gtcgctcaatcgaatattcatttcatatgg

SEQ ID NO: 384783 - DNA, 30 bp, Artificial Sequence
  Synthetic oligonucleotide
tttaggggggagttcggtacggagatatgg

SEQ ID NO: 384784 - DNA, 30 bp, Artificial Sequence
  Synthetic oligonucleotide
accacaatagctcgctgatgaagtatatgg

SEQ ID NO: 384785 - DNA, 30 bp, Artificial Sequence
  Synthetic oligonucleotide
gtggtgtcaacctccttcgcgtcactatgg

SEQ ID NO: 384786 - DNA, 30 bp, Artificial Sequence
  Synthetic oligonucleotide
gacttaacttatggatcatgtctcctatgg

SEQ ID NO: 384787 - DNA, 30 bp, Artificial Sequence
  Synthetic oligonucleotide
cgcggcttactcattctacagttgctatgg

SEQ ID NO: 384788 - DNA, 30 bp, Artificial Sequence
  Synthetic oligonucleotide
tggaagcgtgtgacgggatggcttctatgg

SEQ ID NO: 384789 - DNA, 30 bp, Artificial Sequence
  Synthetic oligonucleotide
gtcacgcggttgaaaaattaggttctatgg

SEQ ID NO: 384790 - DNA, 30 bp, Artificial Sequence
  Synthetic oligonucleotide
gacttaggagtatctatcgtgtttctatgg

SEQ ID NO: 384791 - DNA, 30 bp, Artificial Sequence
  Synthetic oligonucleotide
cggtcatggggcacgcgattagaagtatgg

SEQ ID NO: 384792 - DNA, 30 bp, Artificial Sequence
  Synthetic oligonucleotide
ccacgtttacgagcgttcatcgaagtatgg

SEQ ID NO: 384793 - DNA, 30 bp, Artificial Sequence
  Synthetic oligonucleotide
gtgacgccataacagtctagggcagtatgg

SEQ ID NO: 384794 - DNA, 30 bp, Artificial Sequence
  Synthetic oligonucleotide
ttacttctcatctctaccacattagtatgg

SEQ ID NO: 384795 - DNA, 30 bp, Artificial Sequence
  Synthetic oligonucleotide
ataataaagagcatgaatgtcgccgtatgg

SEQ ID NO: 384796 - DNA, 30 bp, Artificial Sequence
  Synthetic oligonucleotide
tgttatctgatataattatcctgggtatgg

SEQ ID NO: 384797 - DNA, 30 bp, Artificial Sequence
  Synthetic oligonucleotide
tcacgttatccgcgttaatgtcatgtatgg

SEQ ID NO: 384798 - DNA, 30 bp, Artificial Sequence
  Synthetic oligonucleotide
aaatgaacattggttctaacacctgtatgg

SEQ ID NO: 384799 - DNA, 30 bp, Artificial Sequence
  Synthetic oligonucleotide
ttatctaaacgcggcgctcgcgtcttatgg

SEQ ID NO: 384800 - DNA, 30 bp, Artificial Sequence
  Synthetic oligonucleotide
gtacaatccacgcctgtctgtccgttatgg

SEQ ID NO: 384801 - DNA, 30 bp, Artificial Sequence
  Synthetic oligonucleotide
ccggaaataacatcttaagaccctttatgg

SEQ ID NO: 384802 - DNA, 30 bp, Artificial Sequence
  Synthetic oligonucleotide
gccgtctcagatgctgcctcgctaaactgg

SEQ ID NO: 384803 - DNA, 30 bp, Artificial Sequence
  Synthetic oligonucleotide
cttcggatatgtagattgctcatcaactgg

SEQ ID NO: 384804 - DNA, 30 bp, Artificial Sequence
  Synthetic oligonucleotide
ttagtttgctctagtccacgctcgaactgg

SEQ ID NO: 384805 - DNA, 30 bp, Artificial Sequence
  Synthetic oligonucleotide
ttccgatggcggcgcatgtcgtggaactgg

SEQ ID NO: 384806 - DNA, 30 bp, Artificial Sequence
  Synthetic oligonucleotide
gtggcctttgcgcacagtctcagtaactgg

SEQ ID NO: 384807 - DNA, 30 bp, Artificial Sequence
  Synthetic oligonucleotide
cgaatgttagttcgaagttaagttaactgg

SEQ ID NO: 384808 - DNA, 30 bp, Artificial Sequence
  Synthetic oligonucleotide
atcattttattgcacagatgtgttaactgg

SEQ ID NO: 384809 - DNA, 30 bp, Artificial Sequence
  Synthetic oligonucleotide
cctgtctccggccggacgggaaaacactgg

SEQ ID NO: 384810 - DNA, 30 bp, Artificial Sequence
  Synthetic oligonucleotide
agttttattggatctgcgatcgcacactgg

SEQ ID NO: 384811 - DNA, 30 bp, Artificial Sequence
  Synthetic oligonucleotide
atttaacaaggtttccatgaaggacactgg

SEQ ID NO: 384812 - DNA, 30 bp, Artificial Sequence
  Synthetic oligonucleotide
tttctagccaacctagaacgaagccactgg

SEQ ID NO: 384813 - DNA, 30 bp, Artificial Sequence
  Synthetic oligonucleotide
gtcaggacgcgagccagcaagtgccactgg

SEQ ID NO: 384814 - DNA, 30 bp, Artificial Sequence
  Synthetic oligonucleotide
gcacaccgtagtatggggagttgccactgg

SEQ ID NO: 384815 - DNA, 30 bp, Artificial Sequence
  Synthetic oligonucleotide
agtcttatgttctagttgacagtccactgg

SEQ ID NO: 384816 - DNA, 30 bp, Artificial Sequence
  Synthetic oligonucleotide
acatagcttgcctatggcattggtcactgg

SEQ ID NO: 384817 - DNA, 30 bp, Artificial Sequence
  Synthetic oligonucleotide
gtcccttttctcagcggaactgtcgactgg

SEQ ID NO: 384818 - DNA, 30 bp, Artificial Sequence
  Synthetic oligonucleotide
aagaataatattcagattggaccggactgg

SEQ ID NO: 384819 - DNA, 30 bp, Artificial Sequence
  Synthetic oligonucleotide
gttcggcggggttacaactccattgactgg

SEQ ID NO: 384820 - DNA, 30 bp, Artificial Sequence
  Synthetic oligonucleotide
ttatctaaaacgttaaaaagaggctactgg

SEQ ID NO: 384821 - DNA, 30 bp, Artificial Sequence
  Synthetic oligonucleotide
tattaagtatatctatccgcaacgtactgg

SEQ ID NO: 384822 - DNA, 30 bp, Artificial Sequence
  Synthetic oligonucleotide
agcagagtctagggtctaataacttactgg

SEQ ID NO: 384823 - DNA, 30 bp, Artificial Sequence
  Synthetic oligonucleotide
atcgcagaaaaccatagatagcgttactgg

SEQ ID NO: 384824 - DNA, 30 bp, Artificial Sequence
  Synthetic oligonucleotide
caagtaactaggagacggcttggaacctgg

SEQ ID NO: 384825 - DNA, 30 bp, Artificial Sequence
  Synthetic oligonucleotide
agcggatttccgccccagggagttacctgg

SEQ ID NO: 384826 - DNA, 30 bp, Artificial Sequence
  Synthetic oligonucleotide
cgcggagcctggcgctatcagcaaccctgg

SEQ ID NO: 384827 - DNA, 30 bp, Artificial Sequence
  Synthetic oligonucleotide
aggcattgtgtcattgtcttgacaccctgg

SEQ ID NO: 384828 - DNA, 30 bp, Artificial Sequence
  Synthetic oligonucleotide
cgtgtgtattggtgagtttttaacccctgg

SEQ ID NO: 384829 - DNA, 30 bp, Artificial Sequence
  Synthetic oligonucleotide
ggttggccttttacatgcggcacgccctgg

SEQ ID NO: 384830 - DNA, 30 bp, Artificial Sequence
  Synthetic oligonucleotide
tggggtatgctgattacatgtacgccctgg

SEQ ID NO: 384831 - DNA, 30 bp, Artificial Sequence
  Synthetic oligonucleotide
ggggccagacgattatcgggtaatccctgg

SEQ ID NO: 384832 - DNA, 30 bp, Artificial Sequence
  Synthetic oligonucleotide
agctatgtggctcccgctatctttccctgg

SEQ ID NO: 384833 - DNA, 30 bp, Artificial Sequence
  Synthetic oligonucleotide
aaataatcggcatcaggtggctcagcctgg

SEQ ID NO: 384834 - DNA, 30 bp, Artificial Sequence
  Synthetic oligonucleotide
cggcgccaagcccgaccgacaggcgcctgg

SEQ ID NO: 384835 - DNA, 30 bp, Artificial Sequence
  Synthetic oligonucleotide
tctaccgaagacagtagctagtgcgcctgg

SEQ ID NO: 384836 - DNA, 30 bp, Artificial Sequence
  Synthetic oligonucleotide
ctgcgcacacaagatgcttttgaggcctgg

SEQ ID NO: 384837 - DNA, 30 bp, Artificial Sequence
  Synthetic oligonucleotide
atctgcactaatgtcccgaattgggcctgg

SEQ ID NO: 384838 - DNA, 30 bp, Artificial Sequence
  Synthetic oligonucleotide
cttggataatggacatagtttcgtgcctgg

SEQ ID NO: 384839 - DNA, 30 bp, Artificial Sequence
  Synthetic oligonucleotide
attcttgtactggggtagcgatttgcctgg

SEQ ID NO: 384840 - DNA, 30 bp, Artificial Sequence
  Synthetic oligonucleotide
agagacatacacacgctccggtcatcctgg

SEQ ID NO: 384841 - DNA, 30 bp, Artificial Sequence
  Synthetic oligonucleotide
ctccattagaacagggtgtcttcatcctgg

SEQ ID NO: 384842 - DNA, 30 bp, Artificial Sequence
  Synthetic oligonucleotide
ttatcaagaaagaacgcatcgggatcctgg

SEQ ID NO: 384843 - DNA, 30 bp, Artificial Sequence
  Synthetic oligonucleotide
tgggctgggtataagtcgagcagctcctgg

SEQ ID NO: 384844 - DNA, 30 bp, Artificial Sequence
  Synthetic oligonucleotide
gcctctatgagtgatgattgaatgtcctgg

SEQ ID NO: 384845 - DNA, 30 bp, Artificial Sequence
  Synthetic oligonucleotide
attcaaggcaatggatgattcgtgtcctgg

SEQ ID NO: 384846 - DNA, 30 bp, Artificial Sequence
  Synthetic oligonucleotide
gggagacgaggttcccagcggtcttcctgg

SEQ ID NO: 384847 - DNA, 30 bp, Artificial Sequence
  Synthetic oligonucleotide
caaccgcaagcacctttgacatagagctgg

SEQ ID NO: 384848 - DNA, 30 bp, Artificial Sequence
  Synthetic oligonucleotide
ccaagccactcagttttcgctcatagctgg

SEQ ID NO: 384849 - DNA, 30 bp, Artificial Sequence
  Synthetic oligonucleotide
atgttcgtatcggggcttagagttagctgg

SEQ ID NO: 384850 - DNA, 30 bp, Artificial Sequence
  Synthetic oligonucleotide
acctgcccgcactaagcttatgtacgctgg

SEQ ID NO: 384851 - DNA, 30 bp, Artificial Sequence
  Synthetic oligonucleotide
aatcagcatagtccgacaggcttacgctgg

SEQ ID NO: 384852 - DNA, 30 bp, Artificial Sequence
  Synthetic oligonucleotide
tagtgaactccgtgacaatagccgcgctgg

SEQ ID NO: 384853 - DNA, 30 bp, Artificial Sequence
  Synthetic oligonucleotide
acctggtaatatacctacggtactcgctgg

SEQ ID NO: 384854 - DNA, 30 bp, Artificial Sequence
  Synthetic oligonucleotide
atcgaacgcagtccctcggcattaggctgg

SEQ ID NO: 384855 - DNA, 30 bp, Artificial Sequence
  Synthetic oligonucleotide
gttggcctcattaggccaattcacggctgg

SEQ ID NO: 384856 - DNA, 30 bp, Artificial Sequence
  Synthetic oligonucleotide
aaaaggggctgactatggtccgagggctgg

SEQ ID NO: 384857 - DNA, 30 bp, Artificial Sequence
  Synthetic oligonucleotide
tctaagtttcgggactatagcggtggctgg

SEQ ID NO: 384858 - DNA, 30 bp, Artificial Sequence
  Synthetic oligonucleotide
gaaacattctagaggtcacagtaatgctgg

SEQ ID NO: 384859 - DNA, 30 bp, Artificial Sequence
  Synthetic oligonucleotide
agcagcttggggacttgcgtgagatgctgg

SEQ ID NO: 384860 - DNA, 30 bp, Artificial Sequence
  Synthetic oligonucleotide
ttatcaattatggcgggaacattatgctgg

SEQ ID NO: 384861 - DNA, 30 bp, Artificial Sequence
  Synthetic oligonucleotide
atctgaggaccaaattggcccacgtgctgg

SEQ ID NO: 384862 - DNA, 30 bp, Artificial Sequence
  Synthetic oligonucleotide
tagaacgtaagcaggaattttccttgctgg

SEQ ID NO: 384863 - DNA, 30 bp, Artificial Sequence
  Synthetic oligonucleotide
aagttttgggccgggaaagaaaggatctgg

SEQ ID NO: 384864 - DNA, 30 bp, Artificial Sequence
  Synthetic oligonucleotide
aattgtcatattccttcagctgatatctgg

SEQ ID NO: 384865 - DNA, 30 bp, Artificial Sequence
  Synthetic oligonucleotide
ggacaggcactagggttaataactatctgg

SEQ ID NO: 384866 - DNA, 30 bp, Artificial Sequence
  Synthetic oligonucleotide
gtacgaccgttatacctattcttcctctgg

SEQ ID NO: 384867 - DNA, 30 bp, Artificial Sequence
  Synthetic oligonucleotide
gccgtagattgcgggaaactcaggctctgg

SEQ ID NO: 384868 - DNA, 30 bp, Artificial Sequence
  Synthetic oligonucleotide
gatacgacaagtctggaattaacagtctgg

SEQ ID NO: 384869 - DNA, 30 bp, Artificial Sequence
  Synthetic oligonucleotide
gaaagcggcgccggccctcatacagtctgg

SEQ ID NO: 384870 - DNA, 30 bp, Artificial Sequence
  Synthetic oligonucleotide
atgtgttcgggcccttgcgttacagtctgg

SEQ ID NO: 384871 - DNA, 30 bp, Artificial Sequence
  Synthetic oligonucleotide
ctgagctgctttggcgccggtcgcgtctgg

SEQ ID NO: 384872 - DNA, 30 bp, Artificial Sequence
  Synthetic oligonucleotide
ccggttaccacaagctgcgatccggtctgg

SEQ ID NO: 384873 - DNA, 30 bp, Artificial Sequence
  Synthetic oligonucleotide
ggcgcgcggttcagcatgtacagggtctgg

SEQ ID NO: 384874 - DNA, 30 bp, Artificial Sequence
  Synthetic oligonucleotide
taccagtaaaaagcacgaattagggtctgg

SEQ ID NO: 384875 - DNA, 30 bp, Artificial Sequence
  Synthetic oligonucleotide
tttgttaaaaggcactctgtcttggtctgg

SEQ ID NO: 384876 - DNA, 30 bp, Artificial Sequence
  Synthetic oligonucleotide
ttaagaagggtacgccactagagtgtctgg

SEQ ID NO: 384877 - DNA, 30 bp, Artificial Sequence
  Synthetic oligonucleotide
atagcgtacttagggacaataacattctgg

SEQ ID NO: 384878 - DNA, 30 bp, Artificial Sequence
  Synthetic oligonucleotide
gatatcattgtctgtgtaaccccattctgg

SEQ ID NO: 384879 - DNA, 30 bp, Artificial Sequence
  Synthetic oligonucleotide
cgtgttaggtgcgacggagtcagattctgg

SEQ ID NO: 384880 - DNA, 30 bp, Artificial Sequence
  Synthetic oligonucleotide
tccggtctgatcgggtgaattagattctgg

SEQ ID NO: 384881 - DNA, 30 bp, Artificial Sequence
  Synthetic oligonucleotide
ttgtctgtagaaggccgtaagggattctgg

SEQ ID NO: 384882 - DNA, 30 bp, Artificial Sequence
  Synthetic oligonucleotide
tgttataccgcagaagtgagccccttctgg

SEQ ID NO: 384883 - DNA, 30 bp, Artificial Sequence
  Synthetic oligonucleotide
ttatggtgggcatttcttctttgcttctgg

SEQ ID NO: 384884 - DNA, 30 bp, Artificial Sequence
  Synthetic oligonucleotide
cattttagtgaacaattaattgtcttctgg

SEQ ID NO: 384885 - DNA, 30 bp, Artificial Sequence
  Synthetic oligonucleotide
acaccaaggcttctggcgaaatagttctgg

SEQ ID NO: 384886 - DNA, 30 bp, Artificial Sequence
  Synthetic oligonucleotide
tgtcctctagagtgactctaatacaagtgg

SEQ ID NO: 384887 - DNA, 30 bp, Artificial Sequence
  Synthetic oligonucleotide
cgtgcccttgtagtctccgtactcaagtgg

SEQ ID NO: 384888 - DNA, 30 bp, Artificial Sequence
  Synthetic oligonucleotide
attctccggaacatgcctaaagtcaagtgg

SEQ ID NO: 384889 - DNA, 30 bp, Artificial Sequence
  Synthetic oligonucleotide
aatcaacgatggatgggtggcttcaagtgg

SEQ ID NO: 384890 - DNA, 30 bp, Artificial Sequence
  Synthetic oligonucleotide
agttaatggagtggggcataccggaagtgg

SEQ ID NO: 384891 - DNA, 30 bp, Artificial Sequence
  Synthetic oligonucleotide
ccacatcacgcggctttttacgaacagtgg

SEQ ID NO: 384892 - DNA, 30 bp, Artificial Sequence
  Synthetic oligonucleotide
tagtcagaatgggcatttcatgaccagtgg

SEQ ID NO: 384893 - DNA, 30 bp, Artificial Sequence
  Synthetic oligonucleotide
cactgagggtagcgtatatagggccagtgg

SEQ ID NO: 384894 - DNA, 30 bp, Artificial Sequence
  Synthetic oligonucleotide
gtgagaagcttatattatatcctgcagtgg

SEQ ID NO: 384895 - DNA, 30 bp, Artificial Sequence
  Synthetic oligonucleotide
ctaactaacgtctcagattcctctcagtgg

SEQ ID NO: 384896 - DNA, 30 bp, Artificial Sequence
  Synthetic oligonucleotide
agccctaatagattaccagcgtttcagtgg

SEQ ID NO: 384897 - DNA, 30 bp, Artificial Sequence
  Synthetic oligonucleotide
tctgaagtaggaagcggagtacaagagtgg

SEQ ID NO: 384898 - DNA, 30 bp, Artificial Sequence
  Synthetic oligonucleotide
caatggcacccgttgcttcgctcagagtgg

SEQ ID NO: 384899 - DNA, 30 bp, Artificial Sequence
  Synthetic oligonucleotide
tttcgtctccggggtggcgctaacgagtgg

SEQ ID NO: 384900 - DNA, 30 bp, Artificial Sequence
  Synthetic oligonucleotide
agagagttggaaacgcttgacaccgagtgg

SEQ ID NO: 384901 - DNA, 30 bp, Artificial Sequence
  Synthetic oligonucleotide
tgttgtgtaacgaatatctcacccgagtgg

SEQ ID NO: 384902 - DNA, 30 bp, Artificial Sequence
  Synthetic oligonucleotide
taattaacgctcggcatgttccccgagtgg

SEQ ID NO: 384903 - DNA, 30 bp, Artificial Sequence
  Synthetic oligonucleotide
gcggcgggcgattcggccgggtcggagtgg

SEQ ID NO: 384904 - DNA, 30 bp, Artificial Sequence
  Synthetic oligonucleotide
tgtgggatttatgatacaaggctggagtgg

SEQ ID NO: 384905 - DNA, 30 bp, Artificial Sequence
  Synthetic oligonucleotide
tactctggggaaggctttaagcctgagtgg

SEQ ID NO: 384906 - DNA, 30 bp, Artificial Sequence
  Synthetic oligonucleotide
aaattgagcagcattttttagtgtgagtgg

SEQ ID NO: 384907 - DNA, 30 bp, Artificial Sequence
  Synthetic oligonucleotide
tatgcaacgccaccgagtaattaatagtgg

SEQ ID NO: 384908 - DNA, 30 bp, Artificial Sequence
  Synthetic oligonucleotide
aatttccatacccttcttaaccgatagtgg

SEQ ID NO: 384909 - DNA, 30 bp, Artificial Sequence
  Synthetic oligonucleotide
taggcagtatcgggtttcggatagtagtgg

SEQ ID NO: 384910 - DNA, 30 bp, Artificial Sequence
  Synthetic oligonucleotide
gcttatcggcgacccgcgaccagaacgtgg

SEQ ID NO: 384911 - DNA, 29 bp, Artificial Sequence
  Synthetic oligonucleotide
agttataaagactgtaaggtggaacgtgg

SEQ ID NO: 384912 - DNA, 30 bp, Artificial Sequence
  Synthetic oligonucleotide
gctatggtctttccttaaatttgaacgtgg

SEQ ID NO: 384913 - DNA, 30 bp, Artificial Sequence
  Synthetic oligonucleotide
cattgacaaggacctcgaagtgatacgtgg

SEQ ID NO: 384914 - DNA, 30 bp, Artificial Sequence
  Synthetic oligonucleotide
tatggacttgtacccaactacattacgtgg

SEQ ID NO: 384915 - DNA, 30 bp, Artificial Sequence
  Synthetic oligonucleotide
tgggagcaatcccggccgccgcacccgtgg

SEQ ID NO: 384916 - DNA, 30 bp, Artificial Sequence
  Synthetic oligonucleotide
aattattaaggtatttggctctatccgtgg

SEQ ID NO: 384917 - DNA, 30 bp, Artificial Sequence
  Synthetic oligonucleotide
gcatttagccgcatggatcacagtccgtgg

SEQ ID NO: 384918 - DNA, 30 bp, Artificial Sequence
  Synthetic oligonucleotide
ggtatctgctcccatttacgagcagcgtgg

SEQ ID NO: 384919 - DNA, 30 bp, Artificial Sequence
  Synthetic oligonucleotide
gttagttgatttcacttgcgagcagcgtgg

SEQ ID NO: 384920 - DNA, 30 bp, Artificial Sequence
  Synthetic oligonucleotide
caccagttgggcaacgagcggcacgcgtgg

SEQ ID NO: 384921 - DNA, 30 bp, Artificial Sequence
  Synthetic oligonucleotide
ctcttctgattcacaaaattcggggcgtgg

SEQ ID NO: 384922 - DNA, 30 bp, Artificial Sequence
  Synthetic oligonucleotide
aaaatatgtgaaaagggaagtggggcgtgg

SEQ ID NO: 384923 - DNA, 30 bp, Artificial Sequence
  Synthetic oligonucleotide
catgccatggttcaggggcgtgctgcgtgg

SEQ ID NO: 384924 - DNA, 30 bp, Artificial Sequence
  Synthetic oligonucleotide
ccttacacgacgattgtagcaaaatcgtgg

SEQ ID NO: 384925 - DNA, 30 bp, Artificial Sequence
  Synthetic oligonucleotide
cttcatgagaaaagtggccgattctcgtgg

SEQ ID NO: 384926 - DNA, 30 bp, Artificial Sequence
  Synthetic oligonucleotide
aaaaatatggccgtgtggccagcgtcgtgg

SEQ ID NO: 384927 - DNA, 30 bp, Artificial Sequence
  Synthetic oligonucleotide
tcatcgcaagcactgttgatgtattcgtgg

SEQ ID NO: 384928 - DNA, 30 bp, Artificial Sequence
  Synthetic oligonucleotide
ctttagatgctttgggccattagttcgtgg

SEQ ID NO: 384929 - DNA, 30 bp, Artificial Sequence
  Synthetic oligonucleotide
aaaaccgaccttatgatattcatttcgtgg

SEQ ID NO: 384930 - DNA, 30 bp, Artificial Sequence
  Synthetic oligonucleotide
atcgcttaggatgttcggctcagcaggtgg

SEQ ID NO: 384931 - DNA, 30 bp, Artificial Sequence
  Synthetic oligonucleotide
aaattcatggtcataaacatggcgaggtgg

SEQ ID NO: 384932 - DNA, 30 bp, Artificial Sequence
  Synthetic oligonucleotide
tgtgggttggagacggtaagcgggaggtgg

SEQ ID NO: 384933 - DNA, 30 bp, Artificial Sequence
  Synthetic oligonucleotide
aatggcaggtataccgggtcgttgaggtgg

SEQ ID NO: 384934 - DNA, 30 bp, Artificial Sequence
  Synthetic oligonucleotide
atggtcagcacactcgatgcttgtaggtgg

SEQ ID NO: 384935 - DNA, 30 bp, Artificial Sequence
  Synthetic oligonucleotide
tccgatgcctgcatgcgtcgagaacggtgg

SEQ ID NO: 384936 - DNA, 30 bp, Artificial Sequence
  Synthetic oligonucleotide
ccagcctcactaggtaaactagcacggtgg

SEQ ID NO: 384937 - DNA, 30 bp, Artificial Sequence
  Synthetic oligonucleotide
tgacccatttcggttctgggtgtacggtgg

SEQ ID NO: 384938 - DNA, 30 bp, Artificial Sequence
  Synthetic oligonucleotide
ttctgaaacgtctccgtaatcctgcggtgg

SEQ ID NO: 384939 - DNA, 30 bp, Artificial Sequence
  Synthetic oligonucleotide
aatcacccgccagatcgtcccgatcggtgg

SEQ ID NO: 384940 - DNA, 30 bp, Artificial Sequence
  Synthetic oligonucleotide
aaccctatttctaacggtatctatcggtgg

SEQ ID NO: 384941 - DNA, 30 bp, Artificial Sequence
  Synthetic oligonucleotide
tacagagtcgcttctgtgcacgctcggtgg

SEQ ID NO: 384942 - DNA, 30 bp, Artificial Sequence
  Synthetic oligonucleotide
ttccagggcgcttactcaacatacgggtgg

SEQ ID NO: 384943 - DNA, 30 bp, Artificial Sequence
  Synthetic oligonucleotide
tgtgggctcttttttagccgaaccgggtgg

SEQ ID NO: 384944 - DNA, 30 bp, Artificial Sequence
  Synthetic oligonucleotide
gattcttctcaaaggtactattccgggtgg

SEQ ID NO: 384945 - DNA, 30 bp, Artificial Sequence
  Synthetic oligonucleotide
atcactcacataactagattatgcgggtgg

SEQ ID NO: 384946 - DNA, 30 bp, Artificial Sequence
  Synthetic oligonucleotide
ccctggtttagataaacggatctcgggtgg

SEQ ID NO: 384947 - DNA, 30 bp, Artificial Sequence
  Synthetic oligonucleotide
aaatcgaattgatgccaccagttggggtgg

SEQ ID NO: 384948 - DNA, 30 bp, Artificial Sequence
  Synthetic oligonucleotide
ctttcttctatgaccccgaacaatgggtgg

SEQ ID NO: 384949 - DNA, 30 bp, Artificial Sequence
  Synthetic oligonucleotide
tgcgatcctttctaacacgaccttgggtgg

SEQ ID NO: 384950 - DNA, 30 bp, Artificial Sequence
  Synthetic oligonucleotide
acgtaatcgtaagcggcgccccttgggtgg

SEQ ID NO: 384951 - DNA, 30 bp, Artificial Sequence
  Synthetic oligonucleotide
atggatttggtcgctcttatccttgggtgg

SEQ ID NO: 384952 - DNA, 30 bp, Artificial Sequence
  Synthetic oligonucleotide
gacatatgttagactcgccggctatggtgg

SEQ ID NO: 384953 - DNA, 30 bp, Artificial Sequence
  Synthetic oligonucleotide
gagaactttccacaaaggtcggggtggtgg

SEQ ID NO: 384954 - DNA, 30 bp, Artificial Sequence
  Synthetic oligonucleotide
ttgtgtagcttgggtacacttctgtggtgg

SEQ ID NO: 384955 - DNA, 30 bp, Artificial Sequence
  Synthetic oligonucleotide
cattcacggaatgagttgtcccattggtgg

SEQ ID NO: 384956 - DNA, 30 bp, Artificial Sequence
  Synthetic oligonucleotide
tcgttgttaaatagggcagtaggttggtgg

SEQ ID NO: 384957 - DNA, 30 bp, Artificial Sequence
  Synthetic oligonucleotide
tcttgatgtggggatgtaccctcaatgtgg

SEQ ID NO: 384958 - DNA, 30 bp, Artificial Sequence
  Synthetic oligonucleotide
tacaggtaaccggacgggaaccacatgtgg

SEQ ID NO: 384959 - DNA, 30 bp, Artificial Sequence
  Synthetic oligonucleotide
gtgtctcagtggctggatgccaggatgtgg

SEQ ID NO: 384960 - DNA, 30 bp, Artificial Sequence
  Synthetic oligonucleotide
aacctggctaacaactcataacggatgtgg

SEQ ID NO: 384961 - DNA, 30 bp, Artificial Sequence
  Synthetic oligonucleotide
tggatatttccttctctcgaccggatgtgg

SEQ ID NO: 384962 - DNA, 30 bp, Artificial Sequence
  Synthetic oligonucleotide
caaggctcgtctcgatcgcacaccctgtgg

SEQ ID NO: 384963 - DNA, 30 bp, Artificial Sequence
  Synthetic oligonucleotide
agtaccagtgggtgtggcgggcgcctgtgg

SEQ ID NO: 384964 - DNA, 30 bp, Artificial Sequence
  Synthetic oligonucleotide
accctatccgtagcaagttgtttgctgtgg

SEQ ID NO: 384965 - DNA, 30 bp, Artificial Sequence
  Synthetic oligonucleotide
aagactagtcggggccacgccgatctgtgg

SEQ ID NO: 384966 - DNA, 30 bp, Artificial Sequence
  Synthetic oligonucleotide
ccattcatgggagggctatgcggtctgtgg

SEQ ID NO: 384967 - DNA, 30 bp, Artificial Sequence
  Synthetic oligonucleotide
gcgcgattactccatgcgttcgcagtgtgg

SEQ ID NO: 384968 - DNA, 30 bp, Artificial Sequence
  Synthetic oligonucleotide
cgtccgttgctttgatcctcaaacgtgtgg

SEQ ID NO: 384969 - DNA, 30 bp, Artificial Sequence
  Synthetic oligonucleotide
caaacgggcaccggcatcgcacacgtgtgg

SEQ ID NO: 384970 - DNA, 30 bp, Artificial Sequence
  Synthetic oligonucleotide
gttattacaggtgtctgtagaggcgtgtgg

SEQ ID NO: 384971 - DNA, 30 bp, Artificial Sequence
  Synthetic oligonucleotide
tcaatcttcgaacggtctagcggcgtgtgg

SEQ ID NO: 384972 - DNA, 30 bp, Artificial Sequence
  Synthetic oligonucleotide
ttacccaatcagccggtcaggttcgtgtgg

SEQ ID NO: 384973 - DNA, 30 bp, Artificial Sequence
  Synthetic oligonucleotide
cggagggggcctggtgcgtaaatggtgtgg

SEQ ID NO: 384974 - DNA, 30 bp, Artificial Sequence
  Synthetic oligonucleotide
cacgtcttaactgtcctgagtagtgtgtgg

SEQ ID NO: 384975 - DNA, 30 bp, Artificial Sequence
  Synthetic oligonucleotide
gttcggagaagcaaatcctctacattgtgg

SEQ ID NO: 384976 - DNA, 30 bp, Artificial Sequence
  Synthetic oligonucleotide
ttgcttcaagatggcgacgttgccttgtgg

SEQ ID NO: 384977 - DNA, 30 bp, Artificial Sequence
  Synthetic oligonucleotide
aggctgttcagattttctcagcctttgtgg

SEQ ID NO: 384978 - DNA, 30 bp, Artificial Sequence
  Synthetic oligonucleotide
ttcggctggatattttcgatggctttgtgg

SEQ ID NO: 384979 - DNA, 30 bp, Artificial Sequence
  Synthetic oligonucleotide
atccggcttttatcttttaccagtttgtgg

SEQ ID NO: 384980 - DNA, 30 bp, Artificial Sequence
  Synthetic oligonucleotide
tcgccaagaagtgcggcccaatttttgtgg

SEQ ID NO: 384981 - DNA, 30 bp, Artificial Sequence
  Synthetic oligonucleotide
tgccgttatggttgaggaaattcaaattgg

SEQ ID NO: 384982 - DNA, 30 bp, Artificial Sequence
  Synthetic oligonucleotide
gatgtgagctaggggactaaaataaattgg

SEQ ID NO: 384983 - DNA, 30 bp, Artificial Sequence
  Synthetic oligonucleotide
tttccacagagcccaagtttctgcaattgg

SEQ ID NO: 384984 - DNA, 30 bp, Artificial Sequence
  Synthetic oligonucleotide
tccgtgggttccacgcctggccagaattgg

SEQ ID NO: 384985 - DNA, 30 bp, Artificial Sequence
  Synthetic oligonucleotide
ttgtgtgacgcccgggtaaagaggaattgg

SEQ ID NO: 384986 - DNA, 30 bp, Artificial Sequence
  Synthetic oligonucleotide
atgcagcccaccctagccgcgaggaattgg

SEQ ID NO: 384987 - DNA, 30 bp, Artificial Sequence
  Synthetic oligonucleotide
taccggtgctagggggaacgggcacattgg

SEQ ID NO: 384988 - DNA, 30 bp, Artificial Sequence
  Synthetic oligonucleotide
gtagaaatgtgggcgccggtgaggcattgg

SEQ ID NO: 384989 - DNA, 30 bp, Artificial Sequence
  Synthetic oligonucleotide
ggggcgagttaagtttatattgggcattgg

SEQ ID NO: 384990 - DNA, 30 bp, Artificial Sequence
  Synthetic oligonucleotide
ggtctctcaagggtgcagatgttgcattgg

SEQ ID NO: 384991 - DNA, 30 bp, Artificial Sequence
  Synthetic oligonucleotide
ttgtgcccattacgtaatttttttcattgg

SEQ ID NO: 384992 - DNA, 30 bp, Artificial Sequence
  Synthetic oligonucleotide
gattattgactgctaaccactgtcgattgg

SEQ ID NO: 384993 - DNA, 30 bp, Artificial Sequence
  Synthetic oligonucleotide
gactcctatgtattattcctggatgattgg

SEQ ID NO: 384994 - DNA, 30 bp, Artificial Sequence
  Synthetic oligonucleotide
tattttgtctagataaatacccctgattgg

SEQ ID NO: 384995 - DNA, 30 bp, Artificial Sequence
  Synthetic oligonucleotide
tatctactaggagaccctaggtaatattgg

SEQ ID NO: 384996 - DNA, 30 bp, Artificial Sequence
  Synthetic oligonucleotide
ttacctggtctctggcatagttcatattgg

SEQ ID NO: 384997 - DNA, 30 bp, Artificial Sequence
  Synthetic oligonucleotide
agtcgcattatagtcaccacaatatattgg

SEQ ID NO: 384998 - DNA, 30 bp, Artificial Sequence
  Synthetic oligonucleotide
cagagttgtcccggcgtccaggcctattgg

SEQ ID NO: 384999 - DNA, 30 bp, Artificial Sequence
  Synthetic oligonucleotide
ctgagctagcaattgccatcaggctattgg

SEQ ID NO: 385000 - DNA, 30 bp, Artificial Sequence
  Synthetic oligonucleotide
gaccacatttatatcaggtgaggctattgg

SEQ ID NO: 385001 - DNA, 30 bp, Artificial Sequence
  Synthetic oligonucleotide
taagagttggacttcacttggaagtattgg

SEQ ID NO: 385002 - DNA, 30 bp, Artificial Sequence
  Synthetic oligonucleotide
actaccatttcactttagcttgagtattgg

SEQ ID NO: 385003 - DNA, 30 bp, Artificial Sequence
  Synthetic oligonucleotide
tagcaagaggtcccctttggccgttattgg

SEQ ID NO: 385004 - DNA, 30 bp, Artificial Sequence
  Synthetic oligonucleotide
cgagccggaacggtcgtgtgcttttattgg

SEQ ID NO: 385005 - DNA, 30 bp, Artificial Sequence
  Synthetic oligonucleotide
aggattaaacgacggggatttctaacttgg

SEQ ID NO: 385006 - DNA, 30 bp, Artificial Sequence
  Synthetic oligonucleotide
tttagtttgatcgaaacggacgggacttgg

SEQ ID NO: 385007 - DNA, 30 bp, Artificial Sequence
  Synthetic oligonucleotide
taaaaaatctggattaaattaatgacttgg

SEQ ID NO: 385008 - DNA, 30 bp, Artificial Sequence
  Synthetic oligonucleotide
ttgagtagtggccagtgtggacatacttgg

SEQ ID NO: 385009 - DNA, 31 bp, Artificial Sequence
  Synthetic oligonucleotide
cctttctaggcacagaaccgcagatacttgg

SEQ ID NO: 385010 - DNA, 30 bp, Artificial Sequence
  Synthetic oligonucleotide
aaaggaaaaaagcccgtacctgatacttgg

SEQ ID NO: 385011 - DNA, 30 bp, Artificial Sequence
  Synthetic oligonucleotide
aaatctgtatgccgtggactgcccccttgg

SEQ ID NO: 385012 - DNA, 30 bp, Artificial Sequence
  Synthetic oligonucleotide
gaccaacagtggactgtagggaagccttgg

SEQ ID NO: 385013 - DNA, 30 bp, Artificial Sequence
  Synthetic oligonucleotide
aaaactcaagtacctagtcgtcctccttgg

SEQ ID NO: 385014 - DNA, 30 bp, Artificial Sequence
  Synthetic oligonucleotide
gtcgtcgaataaatctcttaaattccttgg

SEQ ID NO: 385015 - DNA, 30 bp, Artificial Sequence
  Synthetic oligonucleotide
ggtaataattgggtctattcgtaagcttgg

SEQ ID NO: 385016 - DNA, 30 bp, Artificial Sequence
  Synthetic oligonucleotide
agttctatgagttactgttaacccgcttgg

SEQ ID NO: 385017 - DNA, 30 bp, Artificial Sequence
  Synthetic oligonucleotide
ttcagcaagatatggtagtaagtggcttgg

SEQ ID NO: 385018 - DNA, 30 bp, Artificial Sequence
  Synthetic oligonucleotide
ttctgaaaaccgacgatggaccaatcttgg

SEQ ID NO: 385019 - DNA, 30 bp, Artificial Sequence
  Synthetic oligonucleotide
agtgggggctttttctcacatacatcttgg

SEQ ID NO: 385020 - DNA, 30 bp, Artificial Sequence
  Synthetic oligonucleotide
gctatacaaagattcacttcttcatcttgg

SEQ ID NO: 385021 - DNA, 30 bp, Artificial Sequence
  Synthetic oligonucleotide
tgcttggtattaaatgacatgaactcttgg

SEQ ID NO: 385022 - DNA, 30 bp, Artificial Sequence
  Synthetic oligonucleotide
gacacctcgtgctcctgtactgcctcttgg

SEQ ID NO: 385023 - DNA, 30 bp, Artificial Sequence
  Synthetic oligonucleotide
agcggaattaaataggcaaggtcctcttgg

SEQ ID NO: 385024 - DNA, 30 bp, Artificial Sequence
  Synthetic oligonucleotide
agtgtaccgggggtacaactcgtctcttgg

SEQ ID NO: 385025 - DNA, 30 bp, Artificial Sequence
  Synthetic oligonucleotide
atatcgaacaacttgcgcaacgggtcttgg

SEQ ID NO: 385026 - DNA, 30 bp, Artificial Sequence
  Synthetic oligonucleotide
gtagcctttggggctggttaccgttcttgg

SEQ ID NO: 385027 - DNA, 30 bp, Artificial Sequence
  Synthetic oligonucleotide
tggctcccgcatcaacagacgtcaagttgg

SEQ ID NO: 385028 - DNA, 30 bp, Artificial Sequence
  Synthetic oligonucleotide
agcctttgccccggtgggtagtgaagttgg

SEQ ID NO: 385029 - DNA, 30 bp, Artificial Sequence
  Synthetic oligonucleotide
cagaagtcaacgcctttattccacagttgg

SEQ ID NO: 385030 - DNA, 30 bp, Artificial Sequence
  Synthetic oligonucleotide
attggtaagcgaactaacttcggcagttgg

SEQ ID NO: 385031 - DNA, 30 bp, Artificial Sequence
  Synthetic oligonucleotide
ttctcagggtgtcatgtaatggagagttgg

SEQ ID NO: 385032 - DNA, 30 bp, Artificial Sequence
  Synthetic oligonucleotide
ttaaaggctagagcataagttacgagttgg

SEQ ID NO: 385033 - DNA, 30 bp, Artificial Sequence
  Synthetic oligonucleotide
tcggctacggatactataggccggagttgg

SEQ ID NO: 385034 - DNA, 30 bp, Artificial Sequence
  Synthetic oligonucleotide
gcatcacttaaattgacgcgttctagttgg

SEQ ID NO: 385035 - DNA, 30 bp, Artificial Sequence
  Synthetic oligonucleotide
ccactataggggtaacacccccgacgttgg

SEQ ID NO: 385036 - DNA, 30 bp, Artificial Sequence
  Synthetic oligonucleotide
ccacgtacaggaacggtaagtgatcgttgg

SEQ ID NO: 385037 - DNA, 30 bp, Artificial Sequence
  Synthetic oligonucleotide
gtctagtccacctgcgaggaggctcgttgg

SEQ ID NO: 385038 - DNA, 30 bp, Artificial Sequence
  Synthetic oligonucleotide
ggtgtcgaaggaccacgtttacgtcgttgg

SEQ ID NO: 385039 - DNA, 30 bp, Artificial Sequence
  Synthetic oligonucleotide
agtcccgcgtcggcagacacaggtcgttgg

SEQ ID NO: 385040 - DNA, 30 bp, Artificial Sequence
  Synthetic oligonucleotide
actccgcttggatttcagagggaaggttgg

SEQ ID NO: 385041 - DNA, 30 bp, Artificial Sequence
  Synthetic oligonucleotide
agactgttccctctcgtacgttaaggttgg

SEQ ID NO: 385042 - DNA, 30 bp, Artificial Sequence
  Synthetic oligonucleotide
ttctctagccgtcgttgagtgggcggttgg

SEQ ID NO: 385043 - DNA, 30 bp, Artificial Sequence
  Synthetic oligonucleotide
gcatcaattcctaactcgcaatgcggttgg

SEQ ID NO: 385044 - DNA, 30 bp, Artificial Sequence
  Synthetic oligonucleotide
tggggatccgttcccatggtactcggttgg

SEQ ID NO: 385045 - DNA, 29 bp, Artificial Sequence
  Synthetic oligonucleotide
ggactagactgacgtgtctacagggttgg

SEQ ID NO: 385046 - DNA, 30 bp, Artificial Sequence
  Synthetic oligonucleotide
gctatatgcaatgctagtctgtagggttgg

SEQ ID NO: 385047 - DNA, 30 bp, Artificial Sequence
  Synthetic oligonucleotide
accgtcgcggcatactcgaatgcgggttgg

SEQ ID NO: 385048 - DNA, 30 bp, Artificial Sequence
  Synthetic oligonucleotide
gcaccgccatgcttcgagcccgctggttgg

SEQ ID NO: 385049 - DNA, 30 bp, Artificial Sequence
  Synthetic oligonucleotide
tgagatctaggtagcacctgttgtggttgg

SEQ ID NO: 385050 - DNA, 30 bp, Artificial Sequence
  Synthetic oligonucleotide
ggatttctagggtagcgtaccttatgttgg

SEQ ID NO: 385051 - DNA, 30 bp, Artificial Sequence
  Synthetic oligonucleotide
gaccaaacgtcgtacccggagagctgttgg

SEQ ID NO: 385052 - DNA, 30 bp, Artificial Sequence
  Synthetic oligonucleotide
agaatctcgaatttgttccaacagtgttgg

SEQ ID NO: 385053 - DNA, 30 bp, Artificial Sequence
  Synthetic oligonucleotide
gggtccgaacgatttgcatagacgtgttgg

SEQ ID NO: 385054 - DNA, 30 bp, Artificial Sequence
  Synthetic oligonucleotide
caccgtgttgataaaacttcacggtgttgg

SEQ ID NO: 385055 - DNA, 30 bp, Artificial Sequence
  Synthetic oligonucleotide
tgaatatacgtctccttatctgggtgttgg

SEQ ID NO: 385056 - DNA, 30 bp, Artificial Sequence
  Synthetic oligonucleotide
gcactgaataaatttcccatattttgttgg

SEQ ID NO: 385057 - DNA, 30 bp, Artificial Sequence
  Synthetic oligonucleotide
tcgaacaacaaatctcaagggttttgttgg

SEQ ID NO: 385058 - DNA, 30 bp, Artificial Sequence
  Synthetic oligonucleotide
cacgttaagtctagtcgtgggataatttgg

SEQ ID NO: 385059 - DNA, 30 bp, Artificial Sequence
  Synthetic oligonucleotide
tgcaaacattagtagaagtaatacatttgg

SEQ ID NO: 385060 - DNA, 30 bp, Artificial Sequence
  Synthetic oligonucleotide
ctgacaagtacttggtgatatgtcatttgg

SEQ ID NO: 385061 - DNA, 30 bp, Artificial Sequence
  Synthetic oligonucleotide
ttcaccccttcatcgtgcgtaatgatttgg

SEQ ID NO: 385062 - DNA, 30 bp, Artificial Sequence
  Synthetic oligonucleotide
tggatttagaccagaggatatggtatttgg

SEQ ID NO: 385063 - DNA, 30 bp, Artificial Sequence
  Synthetic oligonucleotide
atccgtttcatatatccaggaagcctttgg

SEQ ID NO: 385064 - DNA, 30 bp, Artificial Sequence
  Synthetic oligonucleotide
cactccacgacattgccacaatgtctttgg

SEQ ID NO: 385065 - DNA, 30 bp, Artificial Sequence
  Synthetic oligonucleotide
ctgccgtatcttctagggcatgttctttgg

SEQ ID NO: 385066 - DNA, 30 bp, Artificial Sequence
  Synthetic oligonucleotide
aaactcaagaaggcaaagtatatagtttgg

SEQ ID NO: 385067 - DNA, 30 bp, Artificial Sequence
  Synthetic oligonucleotide
agcaccactttatcgtatgataacgtttgg

SEQ ID NO: 385068 - DNA, 30 bp, Artificial Sequence
  Synthetic oligonucleotide
tagagttgtgtagggtttcataaggtttgg

SEQ ID NO: 385069 - DNA, 30 bp, Artificial Sequence
  Synthetic oligonucleotide
gaagaagaatggagtacaacctaggtttgg

SEQ ID NO: 385070 - DNA, 30 bp, Artificial Sequence
  Synthetic oligonucleotide
aaaaaggtcacgatccggaaactggtttgg

SEQ ID NO: 385071 - DNA, 30 bp, Artificial Sequence
  Synthetic oligonucleotide
cgtgttctgaacaacgtggcttatgtttgg

SEQ ID NO: 385072 - DNA, 30 bp, Artificial Sequence
  Synthetic oligonucleotide
gcataccgagtggcacggagctttgtttgg

SEQ ID NO: 385073 - DNA, 30 bp, Artificial Sequence
  Synthetic oligonucleotide
cagcctccggatctgattcgcggattttgg

SEQ ID NO: 385074 - DNA, 30 bp, Artificial Sequence
  Synthetic oligonucleotide
ctgggcggaccaatttcccgcttattttgg

SEQ ID NO: 385075 - DNA, 30 bp, Artificial Sequence
  Synthetic oligonucleotide
tgcggcttccaagctgatttggttttttgg

SEQ ID NO: 385076 - DNA, 30 bp, Artificial Sequence
  Synthetic oligonucleotide
aactataacaactgaagggatggaaaaatg

SEQ ID NO: 385077 - DNA, 30 bp, Artificial Sequence
  Synthetic oligonucleotide
tacggcaagagataagtgttgaggaaaatg

SEQ ID NO: 385078 - DNA, 30 bp, Artificial Sequence
  Synthetic oligonucleotide
taacttagatttgagcatttccttaaaatg

SEQ ID NO: 385079 - DNA, 30 bp, Artificial Sequence
  Synthetic oligonucleotide
gccggtacgttatatgggcgaatacaaatg

SEQ ID NO: 385080 - DNA, 30 bp, Artificial Sequence
  Synthetic oligonucleotide
ggatcttcagcacgagcaattttacaaatg

SEQ ID NO: 385081 - DNA, 30 bp, Artificial Sequence
  Synthetic oligonucleotide
tttgtcactgcactcttaatccgccaaatg

SEQ ID NO: 385082 - DNA, 30 bp, Artificial Sequence
  Synthetic oligonucleotide
aacttgagacagtgcaacgaaaagcaaatg

SEQ ID NO: 385083 - DNA, 30 bp, Artificial Sequence
  Synthetic oligonucleotide
gcggaagagaatgcctgacctgtgcaaatg

SEQ ID NO: 385084 - DNA, 30 bp, Artificial Sequence
  Synthetic oligonucleotide
tggtctgtacaagatagtcacgctcaaatg

SEQ ID NO: 385085 - DNA, 30 bp, Artificial Sequence
  Synthetic oligonucleotide
ccccgtggtccgtcctataagctagaaatg

SEQ ID NO: 385086 - DNA, 30 bp, Artificial Sequence
  Synthetic oligonucleotide
tacgggcgcatgacgttcggggtagaaatg

SEQ ID NO: 385087 - DNA, 30 bp, Artificial Sequence
  Synthetic oligonucleotide
cttaagtttgtcactgaacatggcgaaatg

SEQ ID NO: 385088 - DNA, 30 bp, Artificial Sequence
  Synthetic oligonucleotide
agacttgggcggtcagtgtgtgtcgaaatg

SEQ ID NO: 385089 - DNA, 30 bp, Artificial Sequence
  Synthetic oligonucleotide
ccatggaactaaccgtttcgagtggaaatg

SEQ ID NO: 385090 - DNA, 30 bp, Artificial Sequence
  Synthetic oligonucleotide
ttcccgtccgttgttgtaaacactgaaatg

SEQ ID NO: 385091 - DNA, 30 bp, Artificial Sequence
  Synthetic oligonucleotide
atttcattaatgagtggccgtcactaaatg

SEQ ID NO: 385092 - DNA, 30 bp, Artificial Sequence
  Synthetic oligonucleotide
ttaggtcgtcggctaatctcatagtaaatg

SEQ ID NO: 385093 - DNA, 30 bp, Artificial Sequence
  Synthetic oligonucleotide
atgtgtaagtgtcactagggaacttaaatg

SEQ ID NO: 385094 - DNA, 30 bp, Artificial Sequence
  Synthetic oligonucleotide
cgggggccattgtataaatacttttaaatg

SEQ ID NO: 385095 - DNA, 30 bp, Artificial Sequence
  Synthetic oligonucleotide
taactgacaataggtctggtatagacaatg

SEQ ID NO: 385096 - DNA, 30 bp, Artificial Sequence
  Synthetic oligonucleotide
tgcgctgacaattgacgtttggcgacaatg

SEQ ID NO: 385097 - DNA, 30 bp, Artificial Sequence
  Synthetic oligonucleotide
gatcaggattgtacgagcagtcttacaatg

SEQ ID NO: 385098 - DNA, 30 bp, Artificial Sequence
  Synthetic oligonucleotide
aagtacagatgaaggacatttcttacaatg

SEQ ID NO: 385099 - DNA, 30 bp, Artificial Sequence
  Synthetic oligonucleotide
gacgcgctgagtttaaactttgttacaatg

SEQ ID NO: 385100 - DNA, 30 bp, Artificial Sequence
  Synthetic oligonucleotide
cggtcggctggtttgataaggaacccaatg

SEQ ID NO: 385101 - DNA, 30 bp, Artificial Sequence
  Synthetic oligonucleotide
taaatcttgttcgttccctgctggccaatg

SEQ ID NO: 385102 - DNA, 30 bp, Artificial Sequence
  Synthetic oligonucleotide
agtgccttccgggtattattctatccaatg

SEQ ID NO: 385103 - DNA, 30 bp, Artificial Sequence
  Synthetic oligonucleotide
acacgtcagtacgtcactcacacagcaatg

SEQ ID NO: 385104 - DNA, 30 bp, Artificial Sequence
  Synthetic oligonucleotide
ttaatcgtcaagctttatccaggagcaatg

SEQ ID NO: 385105 - DNA, 30 bp, Artificial Sequence
  Synthetic oligonucleotide
caagcattgcttactgtatggctagcaatg

SEQ ID NO: 385106 - DNA, 30 bp, Artificial Sequence
  Synthetic oligonucleotide
cagcacgttaacgacgcgtagtgcgcaatg

SEQ ID NO: 385107 - DNA, 30 bp, Artificial Sequence
  Synthetic oligonucleotide
ctaaatggtacacgccaccgcctggcaatg

SEQ ID NO: 385108 - DNA, 30 bp, Artificial Sequence
  Synthetic oligonucleotide
gtccttattcgattcatactcgactcaatg

SEQ ID NO: 385109 - DNA, 30 bp, Artificial Sequence
  Synthetic oligonucleotide
aaaaaatttaaattgcaggtgccgtcaatg

SEQ ID NO: 385110 - DNA, 30 bp, Artificial Sequence
  Synthetic oligonucleotide
gtggcagttgttcatcggtgatggtcaatg

SEQ ID NO: 385111 - DNA, 30 bp, Artificial Sequence
  Synthetic oligonucleotide
tactatcttggtgcttaattcagttcaatg

SEQ ID NO: 385112 - DNA, 30 bp, Artificial Sequence
  Synthetic oligonucleotide
gtcccgttccatataatacagagttcaatg

SEQ ID NO: 385113 - DNA, 30 bp, Artificial Sequence
  Synthetic oligonucleotide
tttgaggaggttcacagacagggttcaatg

SEQ ID NO: 385114 - DNA, 30 bp, Artificial Sequence
  Synthetic oligonucleotide
gtaagaaggcccgttgggcagaaaagaatg

SEQ ID NO: 385115 - DNA, 30 bp, Artificial Sequence
  Synthetic oligonucleotide
atagcttgtatgcagggttaaacaagaatg

SEQ ID NO: 385116 - DNA, 30 bp, Artificial Sequence
  Synthetic oligonucleotide
ataaattatattctcactcatataagaatg

SEQ ID NO: 385117 - DNA, 30 bp, Artificial Sequence
  Synthetic oligonucleotide
tgaattcctgtcattgtaaacctaagaatg

SEQ ID NO: 385118 - DNA, 30 bp, Artificial Sequence
  Synthetic oligonucleotide
taaattgaaacttgaagcacgatcagaatg

SEQ ID NO: 385119 - DNA, 30 bp, Artificial Sequence
  Synthetic oligonucleotide
ttcttgtaatcgcacaaatagctcagaatg

SEQ ID NO: 385120 - DNA, 30 bp, Artificial Sequence
  Synthetic oligonucleotide
cggatcaacctgggctatacatggagaatg

SEQ ID NO: 385121 - DNA, 30 bp, Artificial Sequence
  Synthetic oligonucleotide
caatatatcctttaagttgagagtagaatg

SEQ ID NO: 385122 - DNA, 30 bp, Artificial Sequence
  Synthetic oligonucleotide
gtagtgatgactgctttccttcttagaatg

SEQ ID NO: 385123 - DNA, 30 bp, Artificial Sequence
  Synthetic oligonucleotide
atgtcattcgatacgcatacgacacgaatg

SEQ ID NO: 385124 - DNA, 28 bp, Artificial Sequence
  Synthetic oligonucleotide
gataggttatcacttaaccgcacgaatg

SEQ ID NO: 385125 - DNA, 30 bp, Artificial Sequence
  Synthetic oligonucleotide
agtggcttttcttgcctccgtatccgaatg

SEQ ID NO: 385126 - DNA, 30 bp, Artificial Sequence
  Synthetic oligonucleotide
gtatgtaacccacgaaacgcagggcgaatg

SEQ ID NO: 385127 - DNA, 30 bp, Artificial Sequence
  Synthetic oligonucleotide
gcattgctaggttgagaatcgcctcgaatg

SEQ ID NO: 385128 - DNA, 30 bp, Artificial Sequence
  Synthetic oligonucleotide
cttttgtgataaagtggtctcagaggaatg

SEQ ID NO: 385129 - DNA, 30 bp, Artificial Sequence
  Synthetic oligonucleotide
gtagcttccaagactggaatccgcggaatg

SEQ ID NO: 385130 - DNA, 30 bp, Artificial Sequence
  Synthetic oligonucleotide
attaccgagtgggatactctccagggaatg

SEQ ID NO: 385131 - DNA, 30 bp, Artificial Sequence
  Synthetic oligonucleotide
cttatgggttctctcgcatgaacgggaatg

SEQ ID NO: 385132 - DNA, 30 bp, Artificial Sequence
  Synthetic oligonucleotide
gctgttaatatttgcggtcgtccgggaatg

SEQ ID NO: 385133 - DNA, 30 bp, Artificial Sequence
  Synthetic oligonucleotide
tgggtttagttgtagagtagacggggaatg

SEQ ID NO: 385134 - DNA, 30 bp, Artificial Sequence
  Synthetic oligonucleotide
agggtcgaaatctcaggagctactggaatg

SEQ ID NO: 385135 - DNA, 30 bp, Artificial Sequence
  Synthetic oligonucleotide
catactgcagttactactccatctggaatg

SEQ ID NO: 385136 - DNA, 30 bp, Artificial Sequence
  Synthetic oligonucleotide
gtgatagtaacgagtgtaattattggaatg

SEQ ID NO: 385137 - DNA, 30 bp, Artificial Sequence
  Synthetic oligonucleotide
gatgtacggtgataacataggagatgaatg

SEQ ID NO: 385138 - DNA, 30 bp, Artificial Sequence
  Synthetic oligonucleotide
gcaacgctgtttaataggggctcctgaatg

SEQ ID NO: 385139 - DNA, 30 bp, Artificial Sequence
  Synthetic oligonucleotide
tgaaacccccctttttttgtatggtgaatg

SEQ ID NO: 385140 - DNA, 30 bp, Artificial Sequence
  Synthetic oligonucleotide
gtatgactcacaggaagagattggtgaatg

SEQ ID NO: 385141 - DNA, 30 bp, Artificial Sequence
  Synthetic oligonucleotide
gtaagtttagtatatccaatattgtgaatg

SEQ ID NO: 385142 - DNA, 30 bp, Artificial Sequence
  Synthetic oligonucleotide
aagtacagattgtgctcaatatattgaatg

SEQ ID NO: 385143 - DNA, 30 bp, Artificial Sequence
  Synthetic oligonucleotide
gtttacgtatcttgtgatcactaaataatg

SEQ ID NO: 385144 - DNA, 30 bp, Artificial Sequence
  Synthetic oligonucleotide
gcccttaatcccggaacgggatcaataatg

SEQ ID NO: 385145 - DNA, 30 bp, Artificial Sequence
  Synthetic oligonucleotide
catttgtgagcgaggtctagatacataatg

SEQ ID NO: 385146 - DNA, 30 bp, Artificial Sequence
  Synthetic oligonucleotide
atattctggtacgagcgccccagcataatg

SEQ ID NO: 385147 - DNA, 28 bp, Artificial Sequence
  Synthetic oligonucleotide
ccagaattgacccctgtttgtcataatg

SEQ ID NO: 385148 - DNA, 30 bp, Artificial Sequence
  Synthetic oligonucleotide
catctccgggattatgccgtggagataatg

SEQ ID NO: 385149 - DNA, 29 bp, Artificial Sequence
  Synthetic oligonucleotide
aatagttatacgtgtattgatcgataatg

SEQ ID NO: 385150 - DNA, 30 bp, Artificial Sequence
  Synthetic oligonucleotide
ttgggagtaatgttatattgcctgataatg

SEQ ID NO: 385151 - DNA, 30 bp, Artificial Sequence
  Synthetic oligonucleotide
acttcggccggtccgcggtagaccctaatg

SEQ ID NO: 385152 - DNA, 30 bp, Artificial Sequence
  Synthetic oligonucleotide
ggtggccgaaaataaacactacggctaatg

SEQ ID NO: 385153 - DNA, 30 bp, Artificial Sequence
  Synthetic oligonucleotide
cccgtgcttgtcaagctcttcgtgctaatg

SEQ ID NO: 385154 - DNA, 30 bp, Artificial Sequence
  Synthetic oligonucleotide
aattgtgccgacgggctgaggaatctaatg

SEQ ID NO: 385155 - DNA, 30 bp, Artificial Sequence
  Synthetic oligonucleotide
ccaatctggggcattgtaggtactctaatg

SEQ ID NO: 385156 - DNA, 30 bp, Artificial Sequence
  Synthetic oligonucleotide
ttagaataggttttaaatctcggagtaatg

SEQ ID NO: 385157 - DNA, 30 bp, Artificial Sequence
  Synthetic oligonucleotide
ttgagggggctgcacttattcggagtaatg

SEQ ID NO: 385158 - DNA, 30 bp, Artificial Sequence
  Synthetic oligonucleotide
cttaaatccatgatgatgcctctagtaatg

SEQ ID NO: 385159 - DNA, 30 bp, Artificial Sequence
  Synthetic oligonucleotide
ctgactgtccgaggatgacgacaggtaatg

SEQ ID NO: 385160 - DNA, 30 bp, Artificial Sequence
  Synthetic oligonucleotide
acgctatgtctgcacaagacggaggtaatg

SEQ ID NO: 385161 - DNA, 30 bp, Artificial Sequence
  Synthetic oligonucleotide
ctcagcggccacaggctttcatgggtaatg

SEQ ID NO: 385162 - DNA, 30 bp, Artificial Sequence
  Synthetic oligonucleotide
atgcaagtaaaccccgaaatgaatgtaatg

SEQ ID NO: 385163 - DNA, 30 bp, Artificial Sequence
  Synthetic oligonucleotide
agtgtaatcctgcttagtgtagctgtaatg

SEQ ID NO: 385164 - DNA, 30 bp, Artificial Sequence
  Synthetic oligonucleotide
tccagctaaaaaacccatgtttttgtaatg

SEQ ID NO: 385165 - DNA, 30 bp, Artificial Sequence
  Synthetic oligonucleotide
gtatagcggatataaatccggcaattaatg

SEQ ID NO: 385166 - DNA, 29 bp, Artificial Sequence
  Synthetic oligonucleotide
gatgacactacgggacgaagtgattaatg

SEQ ID NO: 385167 - DNA, 30 bp, Artificial Sequence
  Synthetic oligonucleotide
atctgggggtcttgccgcggcgtgttaatg

SEQ ID NO: 385168 - DNA, 30 bp, Artificial Sequence
  Synthetic oligonucleotide
attcactagtagtaaaaagtatttttaatg

SEQ ID NO: 385169 - DNA, 30 bp, Artificial Sequence
  Synthetic oligonucleotide
tacgaatgtaagtctacgatcggaaacatg

SEQ ID NO: 385170 - DNA, 30 bp, Artificial Sequence
  Synthetic oligonucleotide
gattccgcacagtggaatcatggaaacatg

SEQ ID NO: 385171 - DNA, 30 bp, Artificial Sequence
  Synthetic oligonucleotide
atttttgtaacacggttcgattacaacatg

SEQ ID NO: 385172 - DNA, 30 bp, Artificial Sequence
  Synthetic oligonucleotide
taactggttacatctcggatgttcaacatg

SEQ ID NO: 385173 - DNA, 30 bp, Artificial Sequence
  Synthetic oligonucleotide
gatgcctgtagatatattgcgcggaacatg

SEQ ID NO: 385174 - DNA, 30 bp, Artificial Sequence
  Synthetic oligonucleotide
tcccgtcagttcctcagcacatagcacatg

SEQ ID NO: 385175 - DNA, 30 bp, Artificial Sequence
  Synthetic oligonucleotide
cacctcaatctaggtcctgaaaggcacatg

SEQ ID NO: 385176 - DNA, 30 bp, Artificial Sequence
  Synthetic oligonucleotide
gagtcttggaacagtctaattttgcacatg

SEQ ID NO: 385177 - DNA, 30 bp, Artificial Sequence
  Synthetic oligonucleotide
cagtatcatatggccggttcgaatcacatg

SEQ ID NO: 385178 - DNA, 30 bp, Artificial Sequence
  Synthetic oligonucleotide
gatggtcgttcggtgccgcgggcagacatg

SEQ ID NO: 385179 - DNA, 30 bp, Artificial Sequence
  Synthetic oligonucleotide
tcgactaatcggcgaaccggtagagacatg

SEQ ID NO: 385180 - DNA, 30 bp, Artificial Sequence
  Synthetic oligonucleotide
ccggaaagttatgcagaggggctcgacatg

SEQ ID NO: 385181 - DNA, 30 bp, Artificial Sequence
  Synthetic oligonucleotide
atagaacgcctggcgggacaaatggacatg

SEQ ID NO: 385182 - DNA, 30 bp, Artificial Sequence
  Synthetic oligonucleotide
tgcctgacacttgttatttaccatgacatg

SEQ ID NO: 385183 - DNA, 30 bp, Artificial Sequence
  Synthetic oligonucleotide
aatcgaccattggctggacggaaatacatg

SEQ ID NO: 385184 - DNA, 30 bp, Artificial Sequence
  Synthetic oligonucleotide
gggtcgcccgcgtttttgcaggcatacatg

SEQ ID NO: 385185 - DNA, 30 bp, Artificial Sequence
  Synthetic oligonucleotide
agaattcggaattatatgtggcactacatg

SEQ ID NO: 385186 - DNA, 30 bp, Artificial Sequence
  Synthetic oligonucleotide
ctacctagtatgcaactccgaggctacatg

SEQ ID NO: 385187 - DNA, 30 bp, Artificial Sequence
  Synthetic oligonucleotide
ggttaattaaattttgaacggatctacatg

SEQ ID NO: 385188 - DNA, 30 bp, Artificial Sequence
  Synthetic oligonucleotide
aatggtactcagaaatgaactcattacatg

SEQ ID NO: 385189 - DNA, 27 bp, Artificial Sequence
  Synthetic oligonucleotide
tcgaaaccaatcaattctccttacatg

SEQ ID NO: 385190 - DNA, 30 bp, Artificial Sequence
  Synthetic oligonucleotide
ggcataattactatatactttgtttacatg

SEQ ID NO: 385191 - DNA, 30 bp, Artificial Sequence
  Synthetic oligonucleotide
taagtcatttatagctgcatcttttacatg

SEQ ID NO: 385192 - DNA, 30 bp, Artificial Sequence
  Synthetic oligonucleotide
aaatttgtcaggaaatcacgagaaaccatg

SEQ ID NO: 385193 - DNA, 30 bp, Artificial Sequence
  Synthetic oligonucleotide
gctgttaataaagatagttcgcgaaccatg

SEQ ID NO: 385194 - DNA, 30 bp, Artificial Sequence
  Synthetic oligonucleotide
taagcatgctgtggatctggtagtaccatg

SEQ ID NO: 385195 - DNA, 30 bp, Artificial Sequence
  Synthetic oligonucleotide
gatgggactctgtgggacatgtgtaccatg

SEQ ID NO: 385196 - DNA, 30 bp, Artificial Sequence
  Synthetic oligonucleotide
tacgccgcaaatctggtgcaacaacccatg

SEQ ID NO: 385197 - DNA, 30 bp, Artificial Sequence
  Synthetic oligonucleotide
agggttgctaatctggaagttggacccatg

SEQ ID NO: 385198 - DNA, 30 bp, Artificial Sequence
  Synthetic oligonucleotide
gtcaggagttagctcggcagccggcccatg

SEQ ID NO: 385199 - DNA, 30 bp, Artificial Sequence
  Synthetic oligonucleotide
tctcagtcccggtgttctaccagtcccatg

SEQ ID NO: 385200 - DNA, 30 bp, Artificial Sequence
  Synthetic oligonucleotide
tcgctaagtgagccgctagacatggccatg

SEQ ID NO: 385201 - DNA, 30 bp, Artificial Sequence
  Synthetic oligonucleotide
ggttgcgatcggtgagatttactggccatg

SEQ ID NO: 385202 - DNA, 30 bp, Artificial Sequence
  Synthetic oligonucleotide
gtcaagttgtatacttgtgaggatgccatg

SEQ ID NO: 385203 - DNA, 30 bp, Artificial Sequence
  Synthetic oligonucleotide
atggttcatttctgtaggcggtgtgccatg

SEQ ID NO: 385204 - DNA, 30 bp, Artificial Sequence
  Synthetic oligonucleotide
gctgacggggacccgagtaacccgtccatg

SEQ ID NO: 385205 - DNA, 30 bp, Artificial Sequence
  Synthetic oligonucleotide
ccggactacagatacatgagtgtgtccatg

SEQ ID NO: 385206 - DNA, 30 bp, Artificial Sequence
  Synthetic oligonucleotide
cccccgtatcaagccgagagactttccatg

SEQ ID NO: 385207 - DNA, 30 bp, Artificial Sequence
  Synthetic oligonucleotide
gaaacttcgatggaaacttgctacagcatg

SEQ ID NO: 385208 - DNA, 30 bp, Artificial Sequence
  Synthetic oligonucleotide
cattcaattcgtaatcatttaatgagcatg

SEQ ID NO: 385209 - DNA, 30 bp, Artificial Sequence
  Synthetic oligonucleotide
acttattgcgatcatcaaaggcctagcatg

SEQ ID NO: 385210 - DNA, 30 bp, Artificial Sequence
  Synthetic oligonucleotide
cgcgtacccttaatgcaagggtctagcatg

SEQ ID NO: 385211 - DNA, 30 bp, Artificial Sequence
  Synthetic oligonucleotide
gtgcattgtaaactatacaacggtagcatg

SEQ ID NO: 385212 - DNA, 30 bp, Artificial Sequence
  Synthetic oligonucleotide
agcaactgtagaaactatcatcttagcatg

SEQ ID NO: 385213 - DNA, 30 bp, Artificial Sequence
  Synthetic oligonucleotide
acgcataaagatacggctatgagacgcatg

SEQ ID NO: 385214 - DNA, 30 bp, Artificial Sequence
  Synthetic oligonucleotide
tcagtaatgtcggatttagctttacgcatg

SEQ ID NO: 385215 - DNA, 30 bp, Artificial Sequence
  Synthetic oligonucleotide
atcaatgaggtagggtaagatacccgcatg

SEQ ID NO: 385216 - DNA, 30 bp, Artificial Sequence
  Synthetic oligonucleotide
tacgagcagatggaatccctatagcgcatg

SEQ ID NO: 385217 - DNA, 30 bp, Artificial Sequence
  Synthetic oligonucleotide
cgacgcaacatctttatgctaccgcgcatg

SEQ ID NO: 385218 - DNA, 30 bp, Artificial Sequence
  Synthetic oligonucleotide
atccgctcgcgtgtacttgttactcgcatg

SEQ ID NO: 385219 - DNA, 30 bp, Artificial Sequence
  Synthetic oligonucleotide
gacgttaatcttcctactgggtctcgcatg

SEQ ID NO: 385220 - DNA, 31 bp, Artificial Sequence
  Synthetic oligonucleotide
ggaggatgccatctattttagcattcgcatg

SEQ ID NO: 385221 - DNA, 30 bp, Artificial Sequence
  Synthetic oligonucleotide
gtatgaatcagaccgatgtggcttcgcatg

SEQ ID NO: 385222 - DNA, 30 bp, Artificial Sequence
  Synthetic oligonucleotide
cactagggggcaagtttcgatcttcgcatg

SEQ ID NO: 385223 - DNA, 30 bp, Artificial Sequence
  Synthetic oligonucleotide
gcttaaaggaatagcagatggggcggcatg

SEQ ID NO: 385224 - DNA, 30 bp, Artificial Sequence
  Synthetic oligonucleotide
aaaagggtgtaggcgagcaatccgggcatg

SEQ ID NO: 385225 - DNA, 30 bp, Artificial Sequence
  Synthetic oligonucleotide
tgacaattaactcgggtcacccgtggcatg

SEQ ID NO: 385226 - DNA, 30 bp, Artificial Sequence
  Synthetic oligonucleotide
aacctttcacgcgcgggaataggtggcatg

SEQ ID NO: 385227 - DNA, 30 bp, Artificial Sequence
  Synthetic oligonucleotide
gcgcgtcgagcaactgcgtagtgtggcatg

SEQ ID NO: 385228 - DNA, 30 bp, Artificial Sequence
  Synthetic oligonucleotide
aattaactatccgcccagatttgtggcatg

SEQ ID NO: 385229 - DNA, 30 bp, Artificial Sequence
  Synthetic oligonucleotide
gggtttttggtgactataaatgttggcatg

SEQ ID NO: 385230 - DNA, 30 bp, Artificial Sequence
  Synthetic oligonucleotide
ttctcgtgaacactcgcggtgatatgcatg

SEQ ID NO: 385231 - DNA, 30 bp, Artificial Sequence
  Synthetic oligonucleotide
aagtcaggttggatctgacagccctgcatg

SEQ ID NO: 385232 - DNA, 30 bp, Artificial Sequence
  Synthetic oligonucleotide
acttccattggacaacgtgcgaattgcatg

SEQ ID NO: 385233 - DNA, 30 bp, Artificial Sequence
  Synthetic oligonucleotide
agttaaatacggggcgcctcttcaatcatg

SEQ ID NO: 385234 - DNA, 30 bp, Artificial Sequence
  Synthetic oligonucleotide
gtaatcgacgctagatattataggatcatg

SEQ ID NO: 385235 - DNA, 30 bp, Artificial Sequence
  Synthetic oligonucleotide
ttaattaagatctttagcccagcgctcatg

SEQ ID NO: 385236 - DNA, 30 bp, Artificial Sequence
  Synthetic oligonucleotide
ttatgtggacgataaagtagttctctcatg

SEQ ID NO: 385237 - DNA, 30 bp, Artificial Sequence
  Synthetic oligonucleotide
gcacattcgtcccccatcatctgtctcatg

SEQ ID NO: 385238 - DNA, 30 bp, Artificial Sequence
  Synthetic oligonucleotide
aggtgccgattattggcgacgtgtctcatg

SEQ ID NO: 385239 - DNA, 30 bp, Artificial Sequence
  Synthetic oligonucleotide
gaaacattttgagtagctgggattctcatg

SEQ ID NO: 385240 - DNA, 30 bp, Artificial Sequence
  Synthetic oligonucleotide
aacacgcggtcactataaggcttagtcatg

SEQ ID NO: 385241 - DNA, 30 bp, Artificial Sequence
  Synthetic oligonucleotide
attagagacatttgtgaacaaaaattcatg

SEQ ID NO: 385242 - DNA, 30 bp, Artificial Sequence
  Synthetic oligonucleotide
cgcgcgggatagttttttggataattcatg

SEQ ID NO: 385243 - DNA, 30 bp, Artificial Sequence
  Synthetic oligonucleotide
cactttcgggatggaataacttggttcatg

SEQ ID NO: 385244 - DNA, 30 bp, Artificial Sequence
  Synthetic oligonucleotide
ttacacattgcacctagacgtattttcatg

SEQ ID NO: 385245 - DNA, 30 bp, Artificial Sequence
  Synthetic oligonucleotide
tcttatataacagggatactcgcaaagatg

SEQ ID NO: 385246 - DNA, 30 bp, Artificial Sequence
  Synthetic oligonucleotide
gtattggggcctgatagtcgaaccaagatg

SEQ ID NO: 385247 - DNA, 30 bp, Artificial Sequence
  Synthetic oligonucleotide
gaagtaagcacatctagtcatcgcaagatg

SEQ ID NO: 385248 - DNA, 30 bp, Artificial Sequence
  Synthetic oligonucleotide
gactgtttgccggcacggtccgctaagatg

SEQ ID NO: 385249 - DNA, 30 bp, Artificial Sequence
  Synthetic oligonucleotide
gatgatcgatacgaatctctgattaagatg

SEQ ID NO: 385250 - DNA, 30 bp, Artificial Sequence
  Synthetic oligonucleotide
cgcaaaaaacccgtcctggtacgacagatg

SEQ ID NO: 385251 - DNA, 30 bp, Artificial Sequence
  Synthetic oligonucleotide
gttgcgtaagcgtttctttcaggtcagatg

SEQ ID NO: 385252 - DNA, 30 bp, Artificial Sequence
  Synthetic oligonucleotide
ctccgtgctttgtctacggattccgagatg

SEQ ID NO: 385253 - DNA, 30 bp, Artificial Sequence
  Synthetic oligonucleotide
aatcaagagcagttctcactagcggagatg

SEQ ID NO: 385254 - DNA, 30 bp, Artificial Sequence
  Synthetic oligonucleotide
agacgtgtctgagtagttgcacgggagatg

SEQ ID NO: 385255 - DNA, 30 bp, Artificial Sequence
  Synthetic oligonucleotide
gccagttactaccgttcttccgtggagatg

SEQ ID NO: 385256 - DNA, 30 bp, Artificial Sequence
  Synthetic oligonucleotide
ctccagtaggtttccccataaaatgagatg

SEQ ID NO: 385257 - DNA, 30 bp, Artificial Sequence
  Synthetic oligonucleotide
taatacgcccacccgtatctgcatgagatg

SEQ ID NO: 385258 - DNA, 30 bp, Artificial Sequence
  Synthetic oligonucleotide
acatgttattccgcgcaacatagtgagatg

SEQ ID NO: 385259 - DNA, 30 bp, Artificial Sequence
  Synthetic oligonucleotide
tgggtagcgacaatatacgttatatagatg

SEQ ID NO: 385260 - DNA, 30 bp, Artificial Sequence
  Synthetic oligonucleotide
ttaatgtagttgcacatctgattatagatg

SEQ ID NO: 385261 - DNA, 30 bp, Artificial Sequence
  Synthetic oligonucleotide
tctttatgagaactcgaggtatcgtagatg

SEQ ID NO: 385262 - DNA, 30 bp, Artificial Sequence
  Synthetic oligonucleotide
ggtagttgaaagaggcagagctattagatg

SEQ ID NO: 385263 - DNA, 30 bp, Artificial Sequence
  Synthetic oligonucleotide
gaaccaaagagtgccgtctattcttagatg

SEQ ID NO: 385264 - DNA, 30 bp, Artificial Sequence
  Synthetic oligonucleotide
aataatggtgtcggaccataaggttagatg

SEQ ID NO: 385265 - DNA, 30 bp, Artificial Sequence
  Synthetic oligonucleotide
gttttcttatcgaactaattcatttagatg

SEQ ID NO: 385266 - DNA, 30 bp, Artificial Sequence
  Synthetic oligonucleotide
ggaaattcaggaacggtctcgttttagatg

SEQ ID NO: 385267 - DNA, 30 bp, Artificial Sequence
  Synthetic oligonucleotide
gcggcagcatttgttgaccttgaaacgatg

SEQ ID NO: 385268 - DNA, 30 bp, Artificial Sequence
  Synthetic oligonucleotide
gattaaacagtggcgtgcgggcacacgatg

SEQ ID NO: 385269 - DNA, 30 bp, Artificial Sequence
  Synthetic oligonucleotide
gagtaagatttgctgagcccctacacgatg

SEQ ID NO: 385270 - DNA, 30 bp, Artificial Sequence
  Synthetic oligonucleotide
cgctgcagagtgttttggtagctgacgatg

SEQ ID NO: 385271 - DNA, 30 bp, Artificial Sequence
  Synthetic oligonucleotide
ctctccttgtctcaatggagctcaccgatg

SEQ ID NO: 385272 - DNA, 30 bp, Artificial Sequence
  Synthetic oligonucleotide
agacaaatacccgaagacggaagaccgatg

SEQ ID NO: 385273 - DNA, 30 bp, Artificial Sequence
  Synthetic oligonucleotide
cattaggggtataatttgtggttaccgatg

SEQ ID NO: 385274 - DNA, 30 bp, Artificial Sequence
  Synthetic oligonucleotide
tcctccacccccggctgagcagggccgatg

SEQ ID NO: 385275 - DNA, 30 bp, Artificial Sequence
  Synthetic oligonucleotide
ggttgggttgtatcgcagaggagtccgatg

SEQ ID NO: 385276 - DNA, 30 bp, Artificial Sequence
  Synthetic oligonucleotide
cttctgcgcgaagccgtgtatatggcgatg

SEQ ID NO: 385277 - DNA, 30 bp, Artificial Sequence
  Synthetic oligonucleotide
gggtacatatgtttgatccccgcctcgatg

SEQ ID NO: 385278 - DNA, 30 bp, Artificial Sequence
  Synthetic oligonucleotide
attctcatccactaccttgtacggtcgatg

SEQ ID NO: 385279 - DNA, 30 bp, Artificial Sequence
  Synthetic oligonucleotide
taataccttgtgccgtcggcaaaaaggatg

SEQ ID NO: 385280 - DNA, 30 bp, Artificial Sequence
  Synthetic oligonucleotide
tctgctacgcactctcgggtgcacaggatg

SEQ ID NO: 385281 - DNA, 30 bp, Artificial Sequence
  Synthetic oligonucleotide
ttgcctacggggggtgggcacttgaggatg

SEQ ID NO: 385282 - DNA, 30 bp, Artificial Sequence
  Synthetic oligonucleotide
aagaaagaagagatgaccgttgcacggatg

SEQ ID NO: 385283 - DNA, 30 bp, Artificial Sequence
  Synthetic oligonucleotide
acagcggtgctgtcatacacttcacggatg

SEQ ID NO: 385284 - DNA, 30 bp, Artificial Sequence
  Synthetic oligonucleotide
ggctacggccagtacttgacgttccggatg

SEQ ID NO: 385285 - DNA, 30 bp, Artificial Sequence
  Synthetic oligonucleotide
ttcggccgcagggcgcaaggctagcggatg

SEQ ID NO: 385286 - DNA, 30 bp, Artificial Sequence
  Synthetic oligonucleotide
tccataaggcgtaataggatgacgcggatg

SEQ ID NO: 385287 - DNA, 30 bp, Artificial Sequence
  Synthetic oligonucleotide
ggggtgattaaggcgctggtcctgcggatg

SEQ ID NO: 385288 - DNA, 30 bp, Artificial Sequence
  Synthetic oligonucleotide
ctggttaccgagtcgggagacttgcggatg

SEQ ID NO: 385289 - DNA, 30 bp, Artificial Sequence
  Synthetic oligonucleotide
gggactagcagcagctcaagcgcggggatg

SEQ ID NO: 385290 - DNA, 30 bp, Artificial Sequence
  Synthetic oligonucleotide
cacccctgcgcaagggtcatggtggggatg

SEQ ID NO: 385291 - DNA, 30 bp, Artificial Sequence
  Synthetic oligonucleotide
gtggcagcaccaccacaacttttggggatg

SEQ ID NO: 385292 - DNA, 30 bp, Artificial Sequence
  Synthetic oligonucleotide
tatgtcattgaatattcgatctctgggatg

SEQ ID NO: 385293 - DNA, 30 bp, Artificial Sequence
  Synthetic oligonucleotide
ggatttagtatacgcatagtcgttgggatg

SEQ ID NO: 385294 - DNA, 30 bp, Artificial Sequence
  Synthetic oligonucleotide
tagtgtatttacacagcacgtaactggatg

SEQ ID NO: 385295 - DNA, 30 bp, Artificial Sequence
  Synthetic oligonucleotide
gagttaccattcggggattttgcctggatg

SEQ ID NO: 385296 - DNA, 30 bp, Artificial Sequence
  Synthetic oligonucleotide
cattccatgttttgtaaacgcacgtggatg

SEQ ID NO: 385297 - DNA, 30 bp, Artificial Sequence
  Synthetic oligonucleotide
cccgtacatggggatggtcgcctgtggatg

SEQ ID NO: 385298 - DNA, 30 bp, Artificial Sequence
  Synthetic oligonucleotide
gcgcatttgtttgcgaccgcgtcttggatg

SEQ ID NO: 385299 - DNA, 30 bp, Artificial Sequence
  Synthetic oligonucleotide
ctaggtagcttatatacgcgaagttggatg

SEQ ID NO: 385300 - DNA, 30 bp, Artificial Sequence
  Synthetic oligonucleotide
cttggttttcaactgcacacacgttggatg

SEQ ID NO: 385301 - DNA, 30 bp, Artificial Sequence
  Synthetic oligonucleotide
catacattttgtagccggtctgtcatgatg

SEQ ID NO: 385302 - DNA, 30 bp, Artificial Sequence
  Synthetic oligonucleotide
aacagcccttcggggctggcgtggatgatg

SEQ ID NO: 385303 - DNA, 30 bp, Artificial Sequence
  Synthetic oligonucleotide
aatatggagaggtgtgcatctaaactgatg

SEQ ID NO: 385304 - DNA, 30 bp, Artificial Sequence
  Synthetic oligonucleotide
gacgtacacataaagttctatgacctgatg

SEQ ID NO: 385305 - DNA, 30 bp, Artificial Sequence
  Synthetic oligonucleotide
agaaactacaatgcggcactttttctgatg

SEQ ID NO: 385306 - DNA, 30 bp, Artificial Sequence
  Synthetic oligonucleotide
atggacgattgtaatcgggaaaacgtgatg

SEQ ID NO: 385307 - DNA, 30 bp, Artificial Sequence
  Synthetic oligonucleotide
acagtgctcaactgactgagctccgtgatg

SEQ ID NO: 385308 - DNA, 30 bp, Artificial Sequence
  Synthetic oligonucleotide
agaggtccaggcatcttttttttcgtgatg

SEQ ID NO: 385309 - DNA, 30 bp, Artificial Sequence
  Synthetic oligonucleotide
gttgtagttaatgtatccgtcccggtgatg

SEQ ID NO: 385310 - DNA, 30 bp, Artificial Sequence
  Synthetic oligonucleotide
ggcggagataactcaggtaacgcggtgatg

SEQ ID NO: 385311 - DNA, 30 bp, Artificial Sequence
  Synthetic oligonucleotide
acagcctaatccaaccgggagtcggtgatg

SEQ ID NO: 385312 - DNA, 30 bp, Artificial Sequence
  Synthetic oligonucleotide
tgcggataaccagaggttgtacaattgatg

SEQ ID NO: 385313 - DNA, 30 bp, Artificial Sequence
  Synthetic oligonucleotide
taactgcgtcacacaactgttcaattgatg

SEQ ID NO: 385314 - DNA, 30 bp, Artificial Sequence
  Synthetic oligonucleotide
gatgcctacatacaacatatcccattgatg

SEQ ID NO: 385315 - DNA, 30 bp, Artificial Sequence
  Synthetic oligonucleotide
catgagacacgcttttcaattgcattgatg

SEQ ID NO: 385316 - DNA, 30 bp, Artificial Sequence
  Synthetic oligonucleotide
gctgcagcttcaccagacggttgattgatg

SEQ ID NO: 385317 - DNA, 30 bp, Artificial Sequence
  Synthetic oligonucleotide
ttagatccgctaatggcctaaatattgatg

SEQ ID NO: 385318 - DNA, 30 bp, Artificial Sequence
  Synthetic oligonucleotide
gtaaaaggttccgatgcctagttgttgatg

SEQ ID NO: 385319 - DNA, 30 bp, Artificial Sequence
  Synthetic oligonucleotide
tgcgttggtttaagagactttcttttgatg

SEQ ID NO: 385320 - DNA, 30 bp, Artificial Sequence
  Synthetic oligonucleotide
cttgccttcgtatgcttaactaggaatatg

SEQ ID NO: 385321 - DNA, 30 bp, Artificial Sequence
  Synthetic oligonucleotide
tacatacgaacgactgcgagcatacatatg

SEQ ID NO: 385322 - DNA, 30 bp, Artificial Sequence
  Synthetic oligonucleotide
aagtttgatcatttcgcggtagcgcatatg

SEQ ID NO: 385323 - DNA, 30 bp, Artificial Sequence
  Synthetic oligonucleotide
aaagcggagcaggatgagagtgctcatatg

SEQ ID NO: 385324 - DNA, 30 bp, Artificial Sequence
  Synthetic oligonucleotide
ttcttaaagaactttttatagagtcatatg

SEQ ID NO: 385325 - DNA, 30 bp, Artificial Sequence
  Synthetic oligonucleotide
tctctagcggagacaagtcgtatagatatg

SEQ ID NO: 385326 - DNA, 30 bp, Artificial Sequence
  Synthetic oligonucleotide
gtcgatgtctagtgatatatcttagatatg

SEQ ID NO: 385327 - DNA, 30 bp, Artificial Sequence
  Synthetic oligonucleotide
caactcatccaaactcgatagtacgatatg

SEQ ID NO: 385328 - DNA, 30 bp, Artificial Sequence
  Synthetic oligonucleotide
cccggagtagacccgctaaaaaccgatatg

SEQ ID NO: 385329 - DNA, 30 bp, Artificial Sequence
  Synthetic oligonucleotide
gttttggaaggcttaacgtgcgtggatatg

SEQ ID NO: 385330 - DNA, 30 bp, Artificial Sequence
  Synthetic oligonucleotide
tggtcagatgtgtaaatgtatactgatatg

SEQ ID NO: 385331 - DNA, 30 bp, Artificial Sequence
  Synthetic oligonucleotide
agcctctacgggtcacgtagtggctatatg

SEQ ID NO: 385332 - DNA, 30 bp, Artificial Sequence
  Synthetic oligonucleotide
cagggagcgttaccagtacgctgctatatg

SEQ ID NO: 385333 - DNA, 30 bp, Artificial Sequence
  Synthetic oligonucleotide
agattctctcgggcaaccagagtctatatg

SEQ ID NO: 385334 - DNA, 30 bp, Artificial Sequence
  Synthetic oligonucleotide
gcacagctctaacacgcgatggcgtatatg

SEQ ID NO: 385335 - DNA, 30 bp, Artificial Sequence
  Synthetic oligonucleotide
taaggcgctagtatgtctacctattatatg

SEQ ID NO: 385336 - DNA, 30 bp, Artificial Sequence
  Synthetic oligonucleotide
tggagcgctccgcgacgctcaggttatatg

SEQ ID NO: 385337 - DNA, 30 bp, Artificial Sequence
  Synthetic oligonucleotide
taagtctagtacctctgccacatttatatg

SEQ ID NO: 385338 - DNA, 30 bp, Artificial Sequence
  Synthetic oligonucleotide
attccgcgcattagcatacacaaaactatg

SEQ ID NO: 385339 - DNA, 30 bp, Artificial Sequence
  Synthetic oligonucleotide
ggtcctagcaggggcttcgtaacgactatg

SEQ ID NO: 385340 - DNA, 30 bp, Artificial Sequence
  Synthetic oligonucleotide
aaaaatgatgaattgagaatttggactatg

SEQ ID NO: 385341 - DNA, 30 bp, Artificial Sequence
  Synthetic oligonucleotide
gatatgcgttactgtaatgtatatactatg

SEQ ID NO: 385342 - DNA, 30 bp, Artificial Sequence
  Synthetic oligonucleotide
attccttcactttgtccggccgttactatg

SEQ ID NO: 385343 - DNA, 30 bp, Artificial Sequence
  Synthetic oligonucleotide
acgatgcagtgtggggtggggtgacctatg

SEQ ID NO: 385344 - DNA, 30 bp, Artificial Sequence
  Synthetic oligonucleotide
ttagttcggaaggtattaaatttacctatg

SEQ ID NO: 385345 - DNA, 30 bp, Artificial Sequence
  Synthetic oligonucleotide
tgcgttttccggagggtaaggagtcctatg

SEQ ID NO: 385346 - DNA, 30 bp, Artificial Sequence
  Synthetic oligonucleotide
aacctaaaccagtctactcggggtgctatg

SEQ ID NO: 385347 - DNA, 30 bp, Artificial Sequence
  Synthetic oligonucleotide
tgccattcaacaatgaaatttagatctatg

SEQ ID NO: 385348 - DNA, 30 bp, Artificial Sequence
  Synthetic oligonucleotide
tgccggcagacgctgcctgttacgtctatg

SEQ ID NO: 385349 - DNA, 30 bp, Artificial Sequence
  Synthetic oligonucleotide
ttgggtctgataagccttgcgtaaagtatg

SEQ ID NO: 385350 - DNA, 30 bp, Artificial Sequence
  Synthetic oligonucleotide
aggcagcgcgggtttagtaagaacagtatg

SEQ ID NO: 385351 - DNA, 30 bp, Artificial Sequence
  Synthetic oligonucleotide
caagtgggttctagttctttcttgagtatg

SEQ ID NO: 385352 - DNA, 30 bp, Artificial Sequence
  Synthetic oligonucleotide
gcgtactttcgaatgagcgcacaacgtatg

SEQ ID NO: 385353 - DNA, 30 bp, Artificial Sequence
  Synthetic oligonucleotide
gtatcttctcacgcgctggaccaccgtatg

SEQ ID NO: 385354 - DNA, 30 bp, Artificial Sequence
  Synthetic oligonucleotide
caaaagggatattagtttgaaatgcgtatg

SEQ ID NO: 385355 - DNA, 30 bp, Artificial Sequence
  Synthetic oligonucleotide
aggtggaatgtttccccgacgctgcgtatg

SEQ ID NO: 385356 - DNA, 30 bp, Artificial Sequence
  Synthetic oligonucleotide
ccttagtttcatggtagaaggagaggtatg

SEQ ID NO: 385357 - DNA, 30 bp, Artificial Sequence
  Synthetic oligonucleotide
cggtatgtgtccattgatcacataggtatg

SEQ ID NO: 385358 - DNA, 30 bp, Artificial Sequence
  Synthetic oligonucleotide
tttttgggatcgggttcttaagtaggtatg

SEQ ID NO: 385359 - DNA, 30 bp, Artificial Sequence
  Synthetic oligonucleotide
taggtccagcgcacacacctggacggtatg

SEQ ID NO: 385360 - DNA, 30 bp, Artificial Sequence
  Synthetic oligonucleotide
accgcaagtgtgctatcgacggccggtatg

SEQ ID NO: 385361 - DNA, 30 bp, Artificial Sequence
  Synthetic oligonucleotide
gctcgcattaggtgggaccaacagggtatg

SEQ ID NO: 385362 - DNA, 30 bp, Artificial Sequence
  Synthetic oligonucleotide
agtatttcctagagctctagagggggtatg

SEQ ID NO: 385363 - DNA, 30 bp, Artificial Sequence
  Synthetic oligonucleotide
aggatatctaacaattggaatgtgggtatg

SEQ ID NO: 385364 - DNA, 30 bp, Artificial Sequence
  Synthetic oligonucleotide
aatactaaagtcaaattatgacctggtatg

SEQ ID NO: 385365 - DNA, 30 bp, Artificial Sequence
  Synthetic oligonucleotide
gtaggatgctgtaacttgccaccatgtatg

SEQ ID NO: 385366 - DNA, 30 bp, Artificial Sequence
  Synthetic oligonucleotide
ctaccattatggacctcaccttgctgtatg

SEQ ID NO: 385367 - DNA, 30 bp, Artificial Sequence
  Synthetic oligonucleotide
agtttataggggggcgatcataggtgtatg

SEQ ID NO: 385368 - DNA, 30 bp, Artificial Sequence
  Synthetic oligonucleotide
ttgtataacagagatctcacccattgtatg

SEQ ID NO: 385369 - DNA, 30 bp, Artificial Sequence
  Synthetic oligonucleotide
aataccggtgatagagaacttcgttgtatg

SEQ ID NO: 385370 - DNA, 30 bp, Artificial Sequence
  Synthetic oligonucleotide
cacagcgtatatagctttttaacaattatg

SEQ ID NO: 385371 - DNA, 30 bp, Artificial Sequence
  Synthetic oligonucleotide
cctcagctgcgttccatagcggcaattatg

SEQ ID NO: 385372 - DNA, 30 bp, Artificial Sequence
  Synthetic oligonucleotide
gtctacgacaatcaatattagtccattatg

SEQ ID NO: 385373 - DNA, 29 bp, Artificial Sequence
  Synthetic oligonucleotide
gccaaatcgtgccatttttggagattatg

SEQ ID NO: 385374 - DNA, 30 bp, Artificial Sequence
  Synthetic oligonucleotide
tattcaagctatgtagtagatccgattatg

SEQ ID NO: 385375 - DNA, 30 bp, Artificial Sequence
  Synthetic oligonucleotide
ttatgagtcgcaagcagatagcatattatg

SEQ ID NO: 385376 - DNA, 30 bp, Artificial Sequence
  Synthetic oligonucleotide
gcggcactgactgagtcacgcgctattatg

SEQ ID NO: 385377 - DNA, 30 bp, Artificial Sequence
  Synthetic oligonucleotide
gagaaattattgggatcgggccgtattatg

SEQ ID NO: 385378 - DNA, 30 bp, Artificial Sequence
  Synthetic oligonucleotide
atcttcttacggcattacatccttattatg

SEQ ID NO: 385379 - DNA, 30 bp, Artificial Sequence
  Synthetic oligonucleotide
ccctacatttaactaagcgagtttattatg

SEQ ID NO: 385380 - DNA, 29 bp, Artificial Sequence
  Synthetic oligonucleotide
gcccattagcttgtatgccacaacttatg

SEQ ID NO: 385381 - DNA, 30 bp, Artificial Sequence
  Synthetic oligonucleotide
ggtactatgacgtgactgaacctacttatg

SEQ ID NO: 385382 - DNA, 30 bp, Artificial Sequence
  Synthetic oligonucleotide
attgcccctaagtttcggaaattacttatg

SEQ ID NO: 385383 - DNA, 30 bp, Artificial Sequence
  Synthetic oligonucleotide
agtgtttccattataattgccgtccttatg

SEQ ID NO: 385384 - DNA, 30 bp, Artificial Sequence
  Synthetic oligonucleotide
tgacagaatgcgtacttattgttccttatg

SEQ ID NO: 385385 - DNA, 30 bp, Artificial Sequence
  Synthetic oligonucleotide
tagtcgcggactgtgtcagcatagcttatg

SEQ ID NO: 385386 - DNA, 30 bp, Artificial Sequence
  Synthetic oligonucleotide
aatatctacttccgccacccctagcttatg

SEQ ID NO: 385387 - DNA, 30 bp, Artificial Sequence
  Synthetic oligonucleotide
tccgattaaagtacctccactacgcttatg

SEQ ID NO: 385388 - DNA, 30 bp, Artificial Sequence
  Synthetic oligonucleotide
gccgaaagacttcatgtctattcgcttatg

SEQ ID NO: 385389 - DNA, 30 bp, Artificial Sequence
  Synthetic oligonucleotide
ggcgaatctttttcatgcctgagtcttatg

SEQ ID NO: 385390 - DNA, 30 bp, Artificial Sequence
  Synthetic oligonucleotide
ccgtcggggggtggctgcggtttggttatg

SEQ ID NO: 385391 - DNA, 31 bp, Artificial Sequence
  Synthetic oligonucleotide
catcccattcgcgcgaggagtacctgttatg

SEQ ID NO: 385392 - DNA, 30 bp, Artificial Sequence
  Synthetic oligonucleotide
gtgggttgtaatcaatgacttattgttatg

SEQ ID NO: 385393 - DNA, 30 bp, Artificial Sequence
  Synthetic oligonucleotide
attattttggtcccgtggtttattgttatg

SEQ ID NO: 385394 - DNA, 30 bp, Artificial Sequence
  Synthetic oligonucleotide
agttgttgatggcagagattgaaatttatg

SEQ ID NO: 385395 - DNA, 30 bp, Artificial Sequence
  Synthetic oligonucleotide
gaaacttaataaaagtaatagccatttatg

SEQ ID NO: 385396 - DNA, 30 bp, Artificial Sequence
  Synthetic oligonucleotide
aagaactggatgctagttctgatatttatg

SEQ ID NO: 385397 - DNA, 30 bp, Artificial Sequence
  Synthetic oligonucleotide
ataaaggacagcggtaactctctatttatg

SEQ ID NO: 385398 - DNA, 30 bp, Artificial Sequence
  Synthetic oligonucleotide
ggccatcattggcggcgtggcgtatttatg

SEQ ID NO: 385399 - DNA, 30 bp, Artificial Sequence
  Synthetic oligonucleotide
agaggagtggccccgttaatattatttatg

SEQ ID NO: 385400 - DNA, 30 bp, Artificial Sequence
  Synthetic oligonucleotide
aacttatgtgaacggtgcaaatcctttatg

SEQ ID NO: 385401 - DNA, 30 bp, Artificial Sequence
  Synthetic oligonucleotide
ggagggaatgggagatttatctcctttatg

SEQ ID NO: 385402 - DNA, 29 bp, Artificial Sequence
  Synthetic oligonucleotide
ctgatgttgtggaggcgtttggctttatg

SEQ ID NO: 385403 - DNA, 30 bp, Artificial Sequence
  Synthetic oligonucleotide
aaagtgtataagggaagcaggatctttatg

SEQ ID NO: 385404 - DNA, 30 bp, Artificial Sequence
  Synthetic oligonucleotide
caaaacacccaacccaagaaattctttatg

SEQ ID NO: 385405 - DNA, 30 bp, Artificial Sequence
  Synthetic oligonucleotide
cctcatgtagttcatattggctcgtttatg

SEQ ID NO: 385406 - DNA, 30 bp, Artificial Sequence
  Synthetic oligonucleotide
ggcgcctctagcgtggaggattcgtttatg

SEQ ID NO: 385407 - DNA, 31 bp, Artificial Sequence
  Synthetic oligonucleotide
cagtcggatccgggagacgagtgattttatg

SEQ ID NO: 385408 - DNA, 30 bp, Artificial Sequence
  Synthetic oligonucleotide
cgtatcccacagtcgtcgaagtattttatg

SEQ ID NO: 385409 - DNA, 30 bp, Artificial Sequence
  Synthetic oligonucleotide
catccgtacgagaggtgggttgtttttatg

SEQ ID NO: 385410 - DNA, 30 bp, Artificial Sequence
  Synthetic oligonucleotide
ctaaaatcacgcagactaagacaaaaactg

SEQ ID NO: 385411 - DNA, 30 bp, Artificial Sequence
  Synthetic oligonucleotide
ttaacatatccaggggcaggttaaaaactg

SEQ ID NO: 385412 - DNA, 30 bp, Artificial Sequence
  Synthetic oligonucleotide
tttggggacgagtgtaagtctccaaaactg

SEQ ID NO: 385413 - DNA, 30 bp, Artificial Sequence
  Synthetic oligonucleotide
tgagtcgagtttgcacatatagccaaactg

SEQ ID NO: 385414 - DNA, 30 bp, Artificial Sequence
  Synthetic oligonucleotide
acggtaacagatttccttcatcggaaactg

SEQ ID NO: 385415 - DNA, 30 bp, Artificial Sequence
  Synthetic oligonucleotide
aacgcggttgttttgccttcgcataaactg

SEQ ID NO: 385416 - DNA, 29 bp, Artificial Sequence
  Synthetic oligonucleotide
ccctccaccggttagatactcctaaactg

SEQ ID NO: 385417 - DNA, 30 bp, Artificial Sequence
  Synthetic oligonucleotide
cttatatacaacaatgacggtaaacaactg

SEQ ID NO: 385418 - DNA, 30 bp, Artificial Sequence
  Synthetic oligonucleotide
acattcggaggtccaaagagaggacaactg

SEQ ID NO: 385419 - DNA, 30 bp, Artificial Sequence
  Synthetic oligonucleotide
gattcaggtgagcccacagtaatacaactg

SEQ ID NO: 385420 - DNA, 30 bp, Artificial Sequence
  Synthetic oligonucleotide
tataagatgatgtgagtatgagcccaactg

SEQ ID NO: 385421 - DNA, 30 bp, Artificial Sequence
  Synthetic oligonucleotide
taggagcttcccgacatgatttcggaactg

SEQ ID NO: 385422 - DNA, 30 bp, Artificial Sequence
  Synthetic oligonucleotide
ggggttccgtgttacagctacatggaactg

SEQ ID NO: 385423 - DNA, 30 bp, Artificial Sequence
  Synthetic oligonucleotide
atatttaagagttgatcgtagttggaactg

SEQ ID NO: 385424 - DNA, 30 bp, Artificial Sequence
  Synthetic oligonucleotide
aacaaatgttcgtatcatataattgaactg

SEQ ID NO: 385425 - DNA, 30 bp, Artificial Sequence
  Synthetic oligonucleotide
cattctttaaaagagtgccacggataactg

SEQ ID NO: 385426 - DNA, 30 bp, Artificial Sequence
  Synthetic oligonucleotide
gtcatagatagcatgatttcgtgataactg

SEQ ID NO: 385427 - DNA, 31 bp, Artificial Sequence
  Synthetic oligonucleotide
aaaccctaatgcgagaacgtgggactaactg

SEQ ID NO: 385428 - DNA, 30 bp, Artificial Sequence
  Synthetic oligonucleotide
tagatctggagttttaatttgtgctaactg

SEQ ID NO: 385429 - DNA, 30 bp, Artificial Sequence
  Synthetic oligonucleotide
gtggaaccctggtccatgttgttctaactg

SEQ ID NO: 385430 - DNA, 30 bp, Artificial Sequence
  Synthetic oligonucleotide
gaggctaaaaacattcccaaccagtaactg

SEQ ID NO: 385431 - DNA, 30 bp, Artificial Sequence
  Synthetic oligonucleotide
aagtggctacccgataaggtcttttaactg

SEQ ID NO: 385432 - DNA, 30 bp, Artificial Sequence
  Synthetic oligonucleotide
agtccataggacaagggtttcataacactg

SEQ ID NO: 385433 - DNA, 30 bp, Artificial Sequence
  Synthetic oligonucleotide
gtgtaggcaatggggagaaaattaacactg

SEQ ID NO: 385434 - DNA, 30 bp, Artificial Sequence
  Synthetic oligonucleotide
caggcgtattatggacgtcgcaccacactg

SEQ ID NO: 385435 - DNA, 30 bp, Artificial Sequence
  Synthetic oligonucleotide
cggcatgtacgctcgccgggggtcacactg

SEQ ID NO: 385436 - DNA, 30 bp, Artificial Sequence
  Synthetic oligonucleotide
gccagcttggaggagccaattccgacactg

SEQ ID NO: 385437 - DNA, 30 bp, Artificial Sequence
  Synthetic oligonucleotide
ctacgcaggtgtcgggccatcggtacactg

SEQ ID NO: 385438 - DNA, 30 bp, Artificial Sequence
  Synthetic oligonucleotide
attgaaataatctcaaattcttttacactg

SEQ ID NO: 385439 - DNA, 30 bp, Artificial Sequence
  Synthetic oligonucleotide
ctaggatgctcgaatgagtgccaaccactg

SEQ ID NO: 385440 - DNA, 30 bp, Artificial Sequence
  Synthetic oligonucleotide
accctattacatacggggtcttgaccactg

SEQ ID NO: 385441 - DNA, 30 bp, Artificial Sequence
  Synthetic oligonucleotide
gtatctccggccgcccccgacaacccactg

SEQ ID NO: 385442 - DNA, 30 bp, Artificial Sequence
  Synthetic oligonucleotide
tacacgcggctggtatccattgccccactg

SEQ ID NO: 385443 - DNA, 30 bp, Artificial Sequence
  Synthetic oligonucleotide
attaagcgttattgggcgacaaaagcactg

SEQ ID NO: 385444 - DNA, 30 bp, Artificial Sequence
  Synthetic oligonucleotide
cctgatttacataatcggtgtaacgcactg

SEQ ID NO: 385445 - DNA, 30 bp, Artificial Sequence
  Synthetic oligonucleotide
gtgatgcgaatactgatagtttacgcactg

SEQ ID NO: 385446 - DNA, 30 bp, Artificial Sequence
  Synthetic oligonucleotide
tacctgtccttcaaactggggctcgcactg

SEQ ID NO: 385447 - DNA, 30 bp, Artificial Sequence
  Synthetic oligonucleotide
ttccggacaaataaattcggctactcactg

SEQ ID NO: 385448 - DNA, 29 bp, Artificial Sequence
  Synthetic oligonucleotide
gctcaaccagcttctcgtcgcagtcactg

SEQ ID NO: 385449 - DNA, 30 bp, Artificial Sequence
  Synthetic oligonucleotide
taattactgagctttagtttctcgtcactg

SEQ ID NO: 385450 - DNA, 30 bp, Artificial Sequence
  Synthetic oligonucleotide
tgagaccctactagggcccgtcggtcactg

SEQ ID NO: 385451 - DNA, 30 bp, Artificial Sequence
  Synthetic oligonucleotide
atcgaaaaggaaaggcggatggggtcactg

SEQ ID NO: 385452 - DNA, 30 bp, Artificial Sequence
  Synthetic oligonucleotide
tttgccacaagaggctgatgaggttcactg

SEQ ID NO: 385453 - DNA, 30 bp, Artificial Sequence
  Synthetic oligonucleotide
tgcgtcccatcgacagggtgataaagactg

SEQ ID NO: 385454 - DNA, 30 bp, Artificial Sequence
  Synthetic oligonucleotide
gttctaagactagcgcagcgcggaagactg

SEQ ID NO: 385455 - DNA, 30 bp, Artificial Sequence
  Synthetic oligonucleotide
tccagtaggatagaaaacgcacgcagactg

SEQ ID NO: 385456 - DNA, 30 bp, Artificial Sequence
  Synthetic oligonucleotide
aagtttgttaggcccaatccgtggagactg

SEQ ID NO: 385457 - DNA, 30 bp, Artificial Sequence
  Synthetic oligonucleotide
gagactaggggttatatttttaatagactg

SEQ ID NO: 385458 - DNA, 30 bp, Artificial Sequence
  Synthetic oligonucleotide
gccggggaaccctgcgatgaataacgactg

SEQ ID NO: 385459 - DNA, 30 bp, Artificial Sequence
  Synthetic oligonucleotide
accagagcaggtcctagttgggtgcgactg

SEQ ID NO: 385460 - DNA, 30 bp, Artificial Sequence
  Synthetic oligonucleotide
tactaggatgggagcccgcttttgcgactg

SEQ ID NO: 385461 - DNA, 30 bp, Artificial Sequence
  Synthetic oligonucleotide
gccccgggaacttacaggggttttcgactg

SEQ ID NO: 385462 - DNA, 30 bp, Artificial Sequence
  Synthetic oligonucleotide
ctgggaaccgcccggtggatcaccggactg

SEQ ID NO: 385463 - DNA, 30 bp, Artificial Sequence
  Synthetic oligonucleotide
gctgacgttactttcggtatatagggactg

SEQ ID NO: 385464 - DNA, 30 bp, Artificial Sequence
  Synthetic oligonucleotide
tgtaagattcaagcaacagctcggggactg

SEQ ID NO: 385465 - DNA, 30 bp, Artificial Sequence
  Synthetic oligonucleotide
atatcaacaggggtaagtacgtttggactg

SEQ ID NO: 385466 - DNA, 30 bp, Artificial Sequence
  Synthetic oligonucleotide
gagcggttagtgtccgactcgatatgactg

SEQ ID NO: 385467 - DNA, 30 bp, Artificial Sequence
  Synthetic oligonucleotide
agagcaaaggcatccaatgttctttgactg

SEQ ID NO: 385468 - DNA, 30 bp, Artificial Sequence
  Synthetic oligonucleotide
ctggcactttaggatgggatcggaatactg

SEQ ID NO: 385469 - DNA, 30 bp, Artificial Sequence
  Synthetic oligonucleotide
gggtgtattatacactcgtgtgtaatactg

SEQ ID NO: 385470 - DNA, 30 bp, Artificial Sequence
  Synthetic oligonucleotide
tagccaaaggcgtaagcgcgacacatactg

SEQ ID NO: 385471 - DNA, 30 bp, Artificial Sequence
  Synthetic oligonucleotide
aaaggaagttggccgttcttacgcatactg

SEQ ID NO: 385472 - DNA, 30 bp, Artificial Sequence
  Synthetic oligonucleotide
gtcatgcgcgtgacgcctgtattcatactg

SEQ ID NO: 385473 - DNA, 30 bp, Artificial Sequence
  Synthetic oligonucleotide
cccacgcggcgtacacctaatcggatactg

SEQ ID NO: 385474 - DNA, 30 bp, Artificial Sequence
  Synthetic oligonucleotide
cagtacacggttcgcttcacaggtatactg

SEQ ID NO: 385475 - DNA, 30 bp, Artificial Sequence
  Synthetic oligonucleotide
ttgttgtgaatttactccgatggtatactg

SEQ ID NO: 385476 - DNA, 30 bp, Artificial Sequence
  Synthetic oligonucleotide
tcctgtcacgcgtggcagcactgtatactg

SEQ ID NO: 385477 - DNA, 30 bp, Artificial Sequence
  Synthetic oligonucleotide
gttagccgatttaatgagacctaactactg

SEQ ID NO: 385478 - DNA, 30 bp, Artificial Sequence
  Synthetic oligonucleotide
taccataaccggttttctaatagactactg

SEQ ID NO: 385479 - DNA, 30 bp, Artificial Sequence
  Synthetic oligonucleotide
acaactacgttttaggataccgtactactg

SEQ ID NO: 385480 - DNA, 30 bp, Artificial Sequence
  Synthetic oligonucleotide
ggtaaaccctccatgaccaatggcctactg

SEQ ID NO: 385481 - DNA, 30 bp, Artificial Sequence
  Synthetic oligonucleotide
cggacggttattccccggcgattcctactg

SEQ ID NO: 385482 - DNA, 31 bp, Artificial Sequence
  Synthetic oligonucleotide
ctctctaaaataagactccggaacgctactg

SEQ ID NO: 385483 - DNA, 30 bp, Artificial Sequence
  Synthetic oligonucleotide
tactagcattaccgtggcaaagcgctactg

SEQ ID NO: 385484 - DNA, 30 bp, Artificial Sequence
  Synthetic oligonucleotide
ggttttaggcggtagatacactttctactg

SEQ ID NO: 385485 - DNA, 30 bp, Artificial Sequence
  Synthetic oligonucleotide
tctacttcagttatgtccacaacagtactg

SEQ ID NO: 385486 - DNA, 30 bp, Artificial Sequence
  Synthetic oligonucleotide
aacccgggcatagtgcgaccggtagtactg

SEQ ID NO: 385487 - DNA, 30 bp, Artificial Sequence
  Synthetic oligonucleotide
tgtactcacataataaggcacctcgtactg

SEQ ID NO: 385488 - DNA, 30 bp, Artificial Sequence
  Synthetic oligonucleotide
gtgtttaccaggcgcccatgtccggtactg

SEQ ID NO: 385489 - DNA, 30 bp, Artificial Sequence
  Synthetic oligonucleotide
aagtccctccgggaacgtcggggattactg

SEQ ID NO: 385490 - DNA, 30 bp, Artificial Sequence
  Synthetic oligonucleotide
agttatccatcatgtctttgaatattactg

SEQ ID NO: 385491 - DNA, 30 bp, Artificial Sequence
  Synthetic oligonucleotide
accgtcactttgatcattagaagcttactg

SEQ ID NO: 385492 - DNA, 30 bp, Artificial Sequence
  Synthetic oligonucleotide
ttgtctctttaccttcaaagtacgttactg

SEQ ID NO: 385493 - DNA, 30 bp, Artificial Sequence
  Synthetic oligonucleotide
ttcacaactagcgtagttttatcgttactg

SEQ ID NO: 385494 - DNA, 30 bp, Artificial Sequence
  Synthetic oligonucleotide
gactacccagtgaattacatacggttactg

SEQ ID NO: 385495 - DNA, 30 bp, Artificial Sequence
  Synthetic oligonucleotide
tgggcattgaccttccgagttttgttactg

SEQ ID NO: 385496 - DNA, 30 bp, Artificial Sequence
  Synthetic oligonucleotide
gatttgttattatcccgatcctccaacctg

SEQ ID NO: 385497 - DNA, 30 bp, Artificial Sequence
  Synthetic oligonucleotide
gtttagtgttgccgggtagcgctcaacctg

SEQ ID NO: 385498 - DNA, 30 bp, Artificial Sequence
  Synthetic oligonucleotide
gcgaatcaatcattttccgacgataacctg

SEQ ID NO: 385499 - DNA, 30 bp, Artificial Sequence
  Synthetic oligonucleotide
gtgtatcatattggtcccgattataacctg

SEQ ID NO: 385500 - DNA, 30 bp, Artificial Sequence
  Synthetic oligonucleotide
tgtcagtggtaaagaaagccgctgcacctg

SEQ ID NO: 385501 - DNA, 30 bp, Artificial Sequence
  Synthetic oligonucleotide
tctgacaggaagcagggtcttccagacctg

SEQ ID NO: 385502 - DNA, 30 bp, Artificial Sequence
  Synthetic oligonucleotide
cgaattgatgaacgaggttccgcagacctg

SEQ ID NO: 385503 - DNA, 30 bp, Artificial Sequence
  Synthetic oligonucleotide
atccgaagttgtcctcgggataccgacctg

SEQ ID NO: 385504 - DNA, 30 bp, Artificial Sequence
  Synthetic oligonucleotide
aactattgttagctgaaggaattggacctg

SEQ ID NO: 385505 - DNA, 30 bp, Artificial Sequence
  Synthetic oligonucleotide
tcggtattctgtacagcgcaaacctacctg

SEQ ID NO: 385506 - DNA, 30 bp, Artificial Sequence
  Synthetic oligonucleotide
gatactctatttaggcgatggtggtacctg

SEQ ID NO: 385507 - DNA, 30 bp, Artificial Sequence
  Synthetic oligonucleotide
ccgaggttcgttatctactatttgtacctg

SEQ ID NO: 385508 - DNA, 30 bp, Artificial Sequence
  Synthetic oligonucleotide
tctttagcttcatcagtgatacattacctg

SEQ ID NO: 385509 - DNA, 30 bp, Artificial Sequence
  Synthetic oligonucleotide
ccagcagcacgatctattagcaaaaccctg

SEQ ID NO: 385510 - DNA, 30 bp, Artificial Sequence
  Synthetic oligonucleotide
gcatgtttgcaggtgaagcactggaccctg

SEQ ID NO: 385511 - DNA, 30 bp, Artificial Sequence
  Synthetic oligonucleotide
gccaacacatgtaaccagcggtcacccctg

SEQ ID NO: 385512 - DNA, 30 bp, Artificial Sequence
  Synthetic oligonucleotide
tgttaacctaaacaagctaggcaccccctg

SEQ ID NO: 385513 - DNA, 30 bp, Artificial Sequence
  Synthetic oligonucleotide
ccccgtggaaggttgaattcgaagcccctg

SEQ ID NO: 385514 - DNA, 30 bp, Artificial Sequence
  Synthetic oligonucleotide
ccgtacagtgagcgctttattcagcccctg

SEQ ID NO: 385515 - DNA, 30 bp, Artificial Sequence
  Synthetic oligonucleotide
gaagtaacagagcaagaacgaaatcccctg

SEQ ID NO: 385516 - DNA, 30 bp, Artificial Sequence
  Synthetic oligonucleotide
ctgttaaaacccgccagggtcggtcccctg

SEQ ID NO: 385517 - DNA, 30 bp, Artificial Sequence
  Synthetic oligonucleotide
aaataatgcaggaaaaccatttgagccctg

SEQ ID NO: 385518 - DNA, 30 bp, Artificial Sequence
  Synthetic oligonucleotide
ggggatatagggtggagaccaaaggccctg

SEQ ID NO: 385519 - DNA, 30 bp, Artificial Sequence
  Synthetic oligonucleotide
acttactcgtaccgatttaggagtgccctg

SEQ ID NO: 385520 - DNA, 30 bp, Artificial Sequence
  Synthetic oligonucleotide
tcaaaagaagccctccgatctgaatccctg

SEQ ID NO: 385521 - DNA, 30 bp, Artificial Sequence
  Synthetic oligonucleotide
acatcttgagagatcgcccaaggatccctg

SEQ ID NO: 385522 - DNA, 30 bp, Artificial Sequence
  Synthetic oligonucleotide
agttgtaatatcccgtagtacgcctccctg

SEQ ID NO: 385523 - DNA, 30 bp, Artificial Sequence
  Synthetic oligonucleotide
atgtataattagtcagaatcttagtccctg

SEQ ID NO: 385524 - DNA, 30 bp, Artificial Sequence
  Synthetic oligonucleotide
atcattacacctataatttggctaagcctg

SEQ ID NO: 385525 - DNA, 30 bp, Artificial Sequence
  Synthetic oligonucleotide
agcggtctctcggggcagtatgtaagcctg

SEQ ID NO: 385526 - DNA, 30 bp, Artificial Sequence
  Synthetic oligonucleotide
ctataaacccaagtctgtcgcaacagcctg

SEQ ID NO: 385527 - DNA, 30 bp, Artificial Sequence
  Synthetic oligonucleotide
acagcagcggaaatattagtattcagcctg

SEQ ID NO: 385528 - DNA, 29 bp, Artificial Sequence
  Synthetic oligonucleotide
agttaggaaagccaggcgccgcgagcctg

SEQ ID NO: 385529 - DNA, 30 bp, Artificial Sequence
  Synthetic oligonucleotide
aagtatgcatcaaaacggctgttacgcctg

SEQ ID NO: 385530 - DNA, 30 bp, Artificial Sequence
  Synthetic oligonucleotide
gtattaaaaggcgactctagcgagcgcctg

SEQ ID NO: 385531 - DNA, 30 bp, Artificial Sequence
  Synthetic oligonucleotide
gatagtaagcgccccaagcgatagcgcctg

SEQ ID NO: 385532 - DNA, 30 bp, Artificial Sequence
  Synthetic oligonucleotide
acagttttcgttccgccaaggaggcgcctg

SEQ ID NO: 385533 - DNA, 30 bp, Artificial Sequence
  Synthetic oligonucleotide
gcatagtaaccaatttgcaacactcgcctg

SEQ ID NO: 385534 - DNA, 30 bp, Artificial Sequence
  Synthetic oligonucleotide
gctactaggcttgtcgtgaccctaggcctg

SEQ ID NO: 385535 - DNA, 30 bp, Artificial Sequence
  Synthetic oligonucleotide
gaaagtgtgcattaaacttgggtaggcctg

SEQ ID NO: 385536 - DNA, 30 bp, Artificial Sequence
  Synthetic oligonucleotide
gccttacaggactttcaatgattaggcctg

SEQ ID NO: 385537 - DNA, 30 bp, Artificial Sequence
  Synthetic oligonucleotide
gtcagaacctaattctaattgctcggcctg

SEQ ID NO: 385538 - DNA, 30 bp, Artificial Sequence
  Synthetic oligonucleotide
taagtaacggtaaccgaaggttcgggcctg

SEQ ID NO: 385539 - DNA, 30 bp, Artificial Sequence
  Synthetic oligonucleotide
ataaaccctagctctatgacggatggcctg

SEQ ID NO: 385540 - DNA, 30 bp, Artificial Sequence
  Synthetic oligonucleotide
gttttatgaatactgaaccagactggcctg

SEQ ID NO: 385541 - DNA, 30 bp, Artificial Sequence
  Synthetic oligonucleotide
gtagtacttaaaagttgggctgctggcctg

SEQ ID NO: 385542 - DNA, 30 bp, Artificial Sequence
  Synthetic oligonucleotide
aatgctagccatgatatactgggtggcctg

SEQ ID NO: 385543 - DNA, 30 bp, Artificial Sequence
  Synthetic oligonucleotide
acttgaaggcccctgataccttttggcctg

SEQ ID NO: 385544 - DNA, 30 bp, Artificial Sequence
  Synthetic oligonucleotide
gaacctaatcaggggtaaacgcaatgcctg

SEQ ID NO: 385545 - DNA, 30 bp, Artificial Sequence
  Synthetic oligonucleotide
agagctttagaatcgtcacgtgtatgcctg

SEQ ID NO: 385546 - DNA, 30 bp, Artificial Sequence
  Synthetic oligonucleotide
ttcggcggcacttcttttggggcctgcctg

SEQ ID NO: 385547 - DNA, 30 bp, Artificial Sequence
  Synthetic oligonucleotide
atccagggagtccacggtacttcctgcctg

SEQ ID NO: 385548 - DNA, 30 bp, Artificial Sequence
  Synthetic oligonucleotide
cacctactatccgggaaaattatctgcctg

SEQ ID NO: 385549 - DNA, 30 bp, Artificial Sequence
  Synthetic oligonucleotide
aggggtatgtaagatccccggttctgcctg

SEQ ID NO: 385550 - DNA, 30 bp, Artificial Sequence
  Synthetic oligonucleotide
gtatgagtacagaccgcaccaatgtgcctg

SEQ ID NO: 385551 - DNA, 30 bp, Artificial Sequence
  Synthetic oligonucleotide
aaataaggcaaacgatacgtaagttgcctg

SEQ ID NO: 385552 - DNA, 30 bp, Artificial Sequence
  Synthetic oligonucleotide
attccaaactcaaccatatgtttttgcctg

SEQ ID NO: 385553 - DNA, 30 bp, Artificial Sequence
  Synthetic oligonucleotide
tttctaaggaaatggaataagcacatcctg

SEQ ID NO: 385554 - DNA, 30 bp, Artificial Sequence
  Synthetic oligonucleotide
accaggtatatattgtcacaatacatcctg

SEQ ID NO: 385555 - DNA, 30 bp, Artificial Sequence
  Synthetic oligonucleotide
acattagaaactgctgtggcgttcatcctg

SEQ ID NO: 385556 - DNA, 30 bp, Artificial Sequence
  Synthetic oligonucleotide
ccattctatggtaacgatgttgatatcctg

SEQ ID NO: 385557 - DNA, 30 bp, Artificial Sequence
  Synthetic oligonucleotide
attagcggaccttagcactaaactatcctg

SEQ ID NO: 385558 - DNA, 30 bp, Artificial Sequence
  Synthetic oligonucleotide
tagcctctcctgaggagtggctctatcctg

SEQ ID NO: 385559 - DNA, 30 bp, Artificial Sequence
  Synthetic oligonucleotide
cacggtaacaccgaaacgcggcgcctcctg

SEQ ID NO: 385560 - DNA, 30 bp, Artificial Sequence
  Synthetic oligonucleotide
gcatcgggtcccgcagatcagtcgctcctg

SEQ ID NO: 385561 - DNA, 30 bp, Artificial Sequence
  Synthetic oligonucleotide
gtttcggatcggtaacgcttcgtgctcctg

SEQ ID NO: 385562 - DNA, 30 bp, Artificial Sequence
  Synthetic oligonucleotide
gagcgtgatcctcttgaagcagatctcctg

SEQ ID NO: 385563 - DNA, 30 bp, Artificial Sequence
  Synthetic oligonucleotide
gtaattcagtctagtgttacgggagtcctg

SEQ ID NO: 385564 - DNA, 30 bp, Artificial Sequence
  Synthetic oligonucleotide
agcccgtgggtgaatgcgggtatggtcctg

SEQ ID NO: 385565 - DNA, 30 bp, Artificial Sequence
  Synthetic oligonucleotide
ggatccctcggccattacctacgtgtcctg

SEQ ID NO: 385566 - DNA, 30 bp, Artificial Sequence
  Synthetic oligonucleotide
gtaggcttaattgcgaggcgctccttcctg

SEQ ID NO: 385567 - DNA, 30 bp, Artificial Sequence
  Synthetic oligonucleotide
gccactttacggccgtttggtacgttcctg

SEQ ID NO: 385568 - DNA, 30 bp, Artificial Sequence
  Synthetic oligonucleotide
cctaattccgggttcgtgtgttcgttcctg

SEQ ID NO: 385569 - DNA, 30 bp, Artificial Sequence
  Synthetic oligonucleotide
ctcaggggttcgcaatgttgccggttcctg

SEQ ID NO: 385570 - DNA, 30 bp, Artificial Sequence
  Synthetic oligonucleotide
tccgggcgtacgatccccggatcaaagctg

SEQ ID NO: 385571 - DNA, 30 bp, Artificial Sequence
  Synthetic oligonucleotide
acttagctgtggaatgcctaatgcaagctg

SEQ ID NO: 385572 - DNA, 30 bp, Artificial Sequence
  Synthetic oligonucleotide
gcacttttatcttaaggagctactaagctg

SEQ ID NO: 385573 - DNA, 30 bp, Artificial Sequence
  Synthetic oligonucleotide
caagtgaatgtaaacttggttgcacagctg

SEQ ID NO: 385574 - DNA, 30 bp, Artificial Sequence
  Synthetic oligonucleotide
gagagtctctacgatgattgaactcagctg

SEQ ID NO: 385575 - DNA, 30 bp, Artificial Sequence
  Synthetic oligonucleotide
acattttgcgtcgcgatgccatctcagctg

SEQ ID NO: 385576 - DNA, 30 bp, Artificial Sequence
  Synthetic oligonucleotide
gtggataaaaacctgcagagtcttcagctg

SEQ ID NO: 385577 - DNA, 30 bp, Artificial Sequence
  Synthetic oligonucleotide
tataaggtatgcctcatccatgcagagctg

SEQ ID NO: 385578 - DNA, 30 bp, Artificial Sequence
  Synthetic oligonucleotide
aacagcctttcgcattaggcttcagagctg

SEQ ID NO: 385579 - DNA, 30 bp, Artificial Sequence
  Synthetic oligonucleotide
acacagctgggtttttccataggcgagctg

SEQ ID NO: 385580 - DNA, 31 bp, Artificial Sequence
  Synthetic oligonucleotide
ctgtgaattgttcgctctggctaaggagctg

SEQ ID NO: 385581 - DNA, 30 bp, Artificial Sequence
  Synthetic oligonucleotide
ggcgtcttgacccagcaagagcaggagctg

SEQ ID NO: 385582 - DNA, 30 bp, Artificial Sequence
  Synthetic oligonucleotide
ccttggcacccctgcagcgaaccggagctg

SEQ ID NO: 385583 - DNA, 30 bp, Artificial Sequence
  Synthetic oligonucleotide
aatagctaccgaatacccttgaaatagctg

SEQ ID NO: 385584 - DNA, 30 bp, Artificial Sequence
  Synthetic oligonucleotide
gctggtttattacactccgggggatagctg

SEQ ID NO: 385585 - DNA, 30 bp, Artificial Sequence
  Synthetic oligonucleotide
aggattttgatttggttacaatagacgctg

SEQ ID NO: 385586 - DNA, 30 bp, Artificial Sequence
  Synthetic oligonucleotide
acctccaatctctgggcttcggatacgctg

SEQ ID NO: 385587 - DNA, 30 bp, Artificial Sequence
  Synthetic oligonucleotide
acgcaactcatgcggttggaatctacgctg

SEQ ID NO: 385588 - DNA, 30 bp, Artificial Sequence
  Synthetic oligonucleotide
ttaagacgaagttctaatacgcgtacgctg

SEQ ID NO: 385589 - DNA, 30 bp, Artificial Sequence
  Synthetic oligonucleotide
aataagaattggccacaaactggtacgctg

SEQ ID NO: 385590 - DNA, 30 bp, Artificial Sequence
  Synthetic oligonucleotide
gaaacaacgatcaacgttccttgaccgctg

SEQ ID NO: 385591 - DNA, 30 bp, Artificial Sequence
  Synthetic oligonucleotide
ggtaacatttctgtagtgggaacgccgctg

SEQ ID NO: 385592 - DNA, 30 bp, Artificial Sequence
  Synthetic oligonucleotide
gtgtactcctgttgagcggtcgctccgctg

SEQ ID NO: 385593 - DNA, 30 bp, Artificial Sequence
  Synthetic oligonucleotide
aaaatctagtgccagccgcctgcagcgctg

SEQ ID NO: 385594 - DNA, 30 bp, Artificial Sequence
  Synthetic oligonucleotide
gacgatagacgtgaacatgcatcctcgctg

SEQ ID NO: 385595 - DNA, 30 bp, Artificial Sequence
  Synthetic oligonucleotide
gttgtggggtcacatgctctcgagtcgctg

SEQ ID NO: 385596 - DNA, 30 bp, Artificial Sequence
  Synthetic oligonucleotide
ctggcctgtgaggacgatgcactgtcgctg

SEQ ID NO: 385597 - DNA, 30 bp, Artificial Sequence
  Synthetic oligonucleotide
tgatagcttcgaatttgctccgtgtcgctg

SEQ ID NO: 385598 - DNA, 30 bp, Artificial Sequence
  Synthetic oligonucleotide
tgtattctgagtgtatagtcgtattcgctg

SEQ ID NO: 385599 - DNA, 30 bp, Artificial Sequence
  Synthetic oligonucleotide
attacggtctcgcacaggagctgttcgctg

SEQ ID NO: 385600 - DNA, 30 bp, Artificial Sequence
  Synthetic oligonucleotide
cctaatatttcgaagagctgctgttcgctg

SEQ ID NO: 385601 - DNA, 30 bp, Artificial Sequence
  Synthetic oligonucleotide
gctgcgtctccgggtatatggtaaaggctg

SEQ ID NO: 385602 - DNA, 30 bp, Artificial Sequence
  Synthetic oligonucleotide
cagttatcgctagaatcgtctaagaggctg

SEQ ID NO: 385603 - DNA, 30 bp, Artificial Sequence
  Synthetic oligonucleotide
cccatcggcattttagaacccgggaggctg

SEQ ID NO: 385604 - DNA, 30 bp, Artificial Sequence
  Synthetic oligonucleotide
atgaaaaggcaagctcactgcatacggctg

SEQ ID NO: 385605 - DNA, 30 bp, Artificial Sequence
  Synthetic oligonucleotide
ctacctctcggcaggttgacttcccggctg

SEQ ID NO: 385606 - DNA, 30 bp, Artificial Sequence
  Synthetic oligonucleotide
cacctactacccggattcaatatccggctg

SEQ ID NO: 385607 - DNA, 30 bp, Artificial Sequence
  Synthetic oligonucleotide
cagcctaatcattttgaccctatccggctg

SEQ ID NO: 385608 - DNA, 30 bp, Artificial Sequence
  Synthetic oligonucleotide
tagaggattaaacttgttgtgtggcggctg

SEQ ID NO: 385609 - DNA, 30 bp, Artificial Sequence
  Synthetic oligonucleotide
ggcttagacatccgaccctccagagggctg

SEQ ID NO: 385610 - DNA, 30 bp, Artificial Sequence
  Synthetic oligonucleotide
tttacaggattaaattaacggagagggctg

SEQ ID NO: 385611 - DNA, 30 bp, Artificial Sequence
  Synthetic oligonucleotide
tttgtgtttggaagtgtgactaaggggctg

SEQ ID NO: 385612 - DNA, 30 bp, Artificial Sequence
  Synthetic oligonucleotide
ttctcgtctaggtaacttgactaggggctg

SEQ ID NO: 385613 - DNA, 30 bp, Artificial Sequence
  Synthetic oligonucleotide
gccaataaagggtggttcccatatgggctg

SEQ ID NO: 385614 - DNA, 30 bp, Artificial Sequence
  Synthetic oligonucleotide
cgccatgctcaactttccagaaactggctg

SEQ ID NO: 385615 - DNA, 30 bp, Artificial Sequence
  Synthetic oligonucleotide
tatattgctggtaatgccagatggtggctg

SEQ ID NO: 385616 - DNA, 30 bp, Artificial Sequence
  Synthetic oligonucleotide
tcgtttgcaggtatcgggttcaattggctg

SEQ ID NO: 385617 - DNA, 30 bp, Artificial Sequence
  Synthetic oligonucleotide
agcctggccgtgactacggccttaatgctg

SEQ ID NO: 385618 - DNA, 30 bp, Artificial Sequence
  Synthetic oligonucleotide
aagccaggcaagctcttgtggcccatgctg

SEQ ID NO: 385619 - DNA, 30 bp, Artificial Sequence
  Synthetic oligonucleotide
attgtctggtaatcaggctagccgatgctg

SEQ ID NO: 385620 - DNA, 30 bp, Artificial Sequence
  Synthetic oligonucleotide
agcgaagatcaccgcaacacgccgatgctg

SEQ ID NO: 385621 - DNA, 30 bp, Artificial Sequence
  Synthetic oligonucleotide
ctgcagatgctgaggatcgtgtcgatgctg

SEQ ID NO: 385622 - DNA, 30 bp, Artificial Sequence
  Synthetic oligonucleotide
ctgtaaataatgggcaaaattttgatgctg

SEQ ID NO: 385623 - DNA, 30 bp, Artificial Sequence
  Synthetic oligonucleotide
tgttcggcccttcaacctgtgtaactgctg

SEQ ID NO: 385624 - DNA, 30 bp, Artificial Sequence
  Synthetic oligonucleotide
attttatagctgatttccagtatactgctg

SEQ ID NO: 385625 - DNA, 30 bp, Artificial Sequence
  Synthetic oligonucleotide
tacaggcttataaatggacacatcctgctg

SEQ ID NO: 385626 - DNA, 30 bp, Artificial Sequence
  Synthetic oligonucleotide
atcaacgctcacggtgcggtcaggctgctg

SEQ ID NO: 385627 - DNA, 30 bp, Artificial Sequence
  Synthetic oligonucleotide
ccgccagcacgacgctgggtgtgagtgctg

SEQ ID NO: 385628 - DNA, 30 bp, Artificial Sequence
  Synthetic oligonucleotide
actacgaacctgaaaatgcacaccgtgctg

SEQ ID NO: 385629 - DNA, 30 bp, Artificial Sequence
  Synthetic oligonucleotide
gtcagcaaagcgaaaaagttctccgtgctg

SEQ ID NO: 385630 - DNA, 30 bp, Artificial Sequence
  Synthetic oligonucleotide
ttaccaggcttccgattgggtatggtgctg

SEQ ID NO: 385631 - DNA, 30 bp, Artificial Sequence
  Synthetic oligonucleotide
aaaacactaaggacctccacagaattgctg

SEQ ID NO: 385632 - DNA, 30 bp, Artificial Sequence
  Synthetic oligonucleotide
gtcacggttcgctacaatggtccgttgctg

SEQ ID NO: 385633 - DNA, 30 bp, Artificial Sequence
  Synthetic oligonucleotide
caagccccagacaagctcaagtggttgctg

SEQ ID NO: 385634 - DNA, 30 bp, Artificial Sequence
  Synthetic oligonucleotide
actaggtccttaagtggtagactgttgctg

SEQ ID NO: 385635 - DNA, 30 bp, Artificial Sequence
  Synthetic oligonucleotide
gggaaatgttctcgctgcacggttttgctg

SEQ ID NO: 385636 - DNA, 30 bp, Artificial Sequence
  Synthetic oligonucleotide
ttcgattcgaaagggctcaatgtaaatctg

SEQ ID NO: 385637 - DNA, 30 bp, Artificial Sequence
  Synthetic oligonucleotide
gagaactcccagtgggttcttgtgaatctg

SEQ ID NO: 385638 - DNA, 30 bp, Artificial Sequence
  Synthetic oligonucleotide
gggttgtattttccatatagcatacatctg

SEQ ID NO: 385639 - DNA, 30 bp, Artificial Sequence
  Synthetic oligonucleotide
gtagagcacgattaagttatttgccatctg

SEQ ID NO: 385640 - DNA, 30 bp, Artificial Sequence
  Synthetic oligonucleotide
aataaagttaaacttggcatcccgcatctg

SEQ ID NO: 385641 - DNA, 30 bp, Artificial Sequence
  Synthetic oligonucleotide
cgcaattactgcgggagcgacgcgcatctg

SEQ ID NO: 385642 - DNA, 30 bp, Artificial Sequence
  Synthetic oligonucleotide
cgtggccttcctgatttaagagatcatctg

SEQ ID NO: 385643 - DNA, 30 bp, Artificial Sequence
  Synthetic oligonucleotide
actatccaagatgcaaagtccactcatctg

SEQ ID NO: 385644 - DNA, 30 bp, Artificial Sequence
  Synthetic oligonucleotide
aacgcagcgttccgggtacgcgttcatctg

SEQ ID NO: 385645 - DNA, 30 bp, Artificial Sequence
  Synthetic oligonucleotide
taccagttggtggcccccctgttagatctg

SEQ ID NO: 385646 - DNA, 30 bp, Artificial Sequence
  Synthetic oligonucleotide
gtcaagttttattggtccctcaacgatctg

SEQ ID NO: 385647 - DNA, 30 bp, Artificial Sequence
  Synthetic oligonucleotide
atgtccaatataccggtgccctccgatctg

SEQ ID NO: 385648 - DNA, 30 bp, Artificial Sequence
  Synthetic oligonucleotide
gtactacgccccctataatctgtcgatctg

SEQ ID NO: 385649 - DNA, 30 bp, Artificial Sequence
  Synthetic oligonucleotide
tagaactcgtgaggactcccgggtgatctg

SEQ ID NO: 385650 - DNA, 30 bp, Artificial Sequence
  Synthetic oligonucleotide
ctcttttacgctatgaaacttttatatctg

SEQ ID NO: 385651 - DNA, 31 bp, Artificial Sequence
  Synthetic oligonucleotide
tctgacgtacgctagagaggggacctatctg

SEQ ID NO: 385652 - DNA, 29 bp, Artificial Sequence
  Synthetic oligonucleotide
ggaattcaggtaatactggtgagtatctg

SEQ ID NO: 385653 - DNA, 30 bp, Artificial Sequence
  Synthetic oligonucleotide
aagctttaggagagtgcttataggtatctg

SEQ ID NO: 385654 - DNA, 30 bp, Artificial Sequence
  Synthetic oligonucleotide
cagccatgtacgtccatctagatttatctg

SEQ ID NO: 385655 - DNA, 30 bp, Artificial Sequence
  Synthetic oligonucleotide
tccggcgtcgtgctgggcccgacaactctg

SEQ ID NO: 385656 - DNA, 30 bp, Artificial Sequence
  Synthetic oligonucleotide
tgctaacataaccctatgcttggaactctg

SEQ ID NO: 385657 - DNA, 30 bp, Artificial Sequence
  Synthetic oligonucleotide
attaaccatgactcataatttgatactctg

SEQ ID NO: 385658 - DNA, 30 bp, Artificial Sequence
  Synthetic oligonucleotide
cggtcgcgatgttacgcggtcattactctg

SEQ ID NO: 385659 - DNA, 30 bp, Artificial Sequence
  Synthetic oligonucleotide
gagagcggcctgtaaaatattacacctctg

SEQ ID NO: 385660 - DNA, 30 bp, Artificial Sequence
  Synthetic oligonucleotide
tgtagaataatgaggtgcgtcggacctctg

SEQ ID NO: 385661 - DNA, 30 bp, Artificial Sequence
  Synthetic oligonucleotide
taagcagacaagcccacaggtatacctctg

SEQ ID NO: 385662 - DNA, 30 bp, Artificial Sequence
  Synthetic oligonucleotide
accgacctcgcccataatccacttcctctg

SEQ ID NO: 385663 - DNA, 30 bp, Artificial Sequence
  Synthetic oligonucleotide
atccggagcagtcgggcctgccaagctctg

SEQ ID NO: 385664 - DNA, 30 bp, Artificial Sequence
  Synthetic oligonucleotide
ctcgcaaagattctcgtccaatttgctctg

SEQ ID NO: 385665 - DNA, 30 bp, Artificial Sequence
  Synthetic oligonucleotide
ttcgtggggattagtacgggggaatctctg

SEQ ID NO: 385666 - DNA, 30 bp, Artificial Sequence
  Synthetic oligonucleotide
accgtggttttatgaacgggaatatctctg

SEQ ID NO: 385667 - DNA, 30 bp, Artificial Sequence
  Synthetic oligonucleotide
tgagaagggggtcaacactccccctctctg

SEQ ID NO: 385668 - DNA, 30 bp, Artificial Sequence
  Synthetic oligonucleotide
gtgttctgagtaataatctctaagtctctg

SEQ ID NO: 385669 - DNA, 30 bp, Artificial Sequence
  Synthetic oligonucleotide
aagaggaactgcctatcggtaaattctctg

SEQ ID NO: 385670 - DNA, 30 bp, Artificial Sequence
  Synthetic oligonucleotide
cctcggcgcagtaccaaatcaatcagtctg

SEQ ID NO: 385671 - DNA, 31 bp, Artificial Sequence
  Synthetic oligonucleotide
taagcagtaactcgtgattctcaagagtctg

SEQ ID NO: 385672 - DNA, 30 bp, Artificial Sequence
  Synthetic oligonucleotide
aagaaccagagcggtggcattcagagtctg

SEQ ID NO: 385673 - DNA, 30 bp, Artificial Sequence
  Synthetic oligonucleotide
ccaaaacctgctgcatacctggatagtctg

SEQ ID NO: 385674 - DNA, 30 bp, Artificial Sequence
  Synthetic oligonucleotide
tttttcagtagcgtgtgattctatagtctg

SEQ ID NO: 385675 - DNA, 30 bp, Artificial Sequence
  Synthetic oligonucleotide
gcacttatcattatgtccgttattagtctg

SEQ ID NO: 385676 - DNA, 30 bp, Artificial Sequence
  Synthetic oligonucleotide
gaaagcgctccgatgtctgaggtgcgtctg

SEQ ID NO: 385677 - DNA, 30 bp, Artificial Sequence
  Synthetic oligonucleotide
tgtactctgcggtctggatgtcaaggtctg

SEQ ID NO: 385678 - DNA, 30 bp, Artificial Sequence
  Synthetic oligonucleotide
gcacggttattgtaacaataccgaggtctg

SEQ ID NO: 385679 - DNA, 30 bp, Artificial Sequence
  Synthetic oligonucleotide
tccgcgagcgctacggcactactaggtctg

SEQ ID NO: 385680 - DNA, 30 bp, Artificial Sequence
  Synthetic oligonucleotide
gtttccgaccccgaggttattacgggtctg

SEQ ID NO: 385681 - DNA, 30 bp, Artificial Sequence
  Synthetic oligonucleotide
cattacttttgtatcgataaggtgggtctg

SEQ ID NO: 385682 - DNA, 30 bp, Artificial Sequence
  Synthetic oligonucleotide
tgcaaacttctaggtaatggcgttggtctg

SEQ ID NO: 385683 - DNA, 30 bp, Artificial Sequence
  Synthetic oligonucleotide
atcctctgtaagatcaggcagggatgtctg

SEQ ID NO: 385684 - DNA, 30 bp, Artificial Sequence
  Synthetic oligonucleotide
taagtataatataaagagggttgatgtctg

SEQ ID NO: 385685 - DNA, 30 bp, Artificial Sequence
  Synthetic oligonucleotide
gggttacgcacctgctcgatattgtgtctg

SEQ ID NO: 385686 - DNA, 30 bp, Artificial Sequence
  Synthetic oligonucleotide
tgtgcgtaggggcggagggcctattgtctg

SEQ ID NO: 385687 - DNA, 30 bp, Artificial Sequence
  Synthetic oligonucleotide
agtagtccccgatggccggaatcttgtctg

SEQ ID NO: 385688 - DNA, 30 bp, Artificial Sequence
  Synthetic oligonucleotide
acaggacttcttaggagtactagttgtctg

SEQ ID NO: 385689 - DNA, 30 bp, Artificial Sequence
  Synthetic oligonucleotide
tcgcgaacttgtgctgtttaccaaattctg

SEQ ID NO: 385690 - DNA, 30 bp, Artificial Sequence
  Synthetic oligonucleotide
atatggacactcgcgtactgggaaattctg

SEQ ID NO: 385691 - DNA, 30 bp, Artificial Sequence
  Synthetic oligonucleotide
cagcggtctacatagtagcgggccattctg

SEQ ID NO: 385692 - DNA, 30 bp, Artificial Sequence
  Synthetic oligonucleotide
cggttacttgatgcctaattcaaacttctg

SEQ ID NO: 385693 - DNA, 30 bp, Artificial Sequence
  Synthetic oligonucleotide
aagggcgcgaagtgcatgacatcgcttctg

SEQ ID NO: 385694 - DNA, 30 bp, Artificial Sequence
  Synthetic oligonucleotide
cgagagcacagataaaaccccgatcttctg

SEQ ID NO: 385695 - DNA, 30 bp, Artificial Sequence
  Synthetic oligonucleotide
gctaacgaaggtttgttttcgcgtcttctg

SEQ ID NO: 385696 - DNA, 30 bp, Artificial Sequence
  Synthetic oligonucleotide
gactgccaccaccgtaaagggaaagttctg

SEQ ID NO: 385697 - DNA, 30 bp, Artificial Sequence
  Synthetic oligonucleotide
acatatgggtatattacttaattagttctg

SEQ ID NO: 385698 - DNA, 30 bp, Artificial Sequence
  Synthetic oligonucleotide
gggcgcaaagtctttaacgcttccgttctg

SEQ ID NO: 385699 - DNA, 30 bp, Artificial Sequence
  Synthetic oligonucleotide
gattcaattagaacgaacctgatcgttctg

SEQ ID NO: 385700 - DNA, 30 bp, Artificial Sequence
  Synthetic oligonucleotide
catggatcacatagcatctagtaggttctg

SEQ ID NO: 385701 - DNA, 30 bp, Artificial Sequence
  Synthetic oligonucleotide
ggtattgatggcaggtgtcaaagggttctg

SEQ ID NO: 385702 - DNA, 30 bp, Artificial Sequence
  Synthetic oligonucleotide
aaaccaggtggggctatgacatgtgttctg

SEQ ID NO: 385703 - DNA, 30 bp, Artificial Sequence
  Synthetic oligonucleotide
cccaaccttccgtacatgagtcgatttctg

SEQ ID NO: 385704 - DNA, 30 bp, Artificial Sequence
  Synthetic oligonucleotide
gatggggaccatgcttatatcgtatttctg

SEQ ID NO: 385705 - DNA, 30 bp, Artificial Sequence
  Synthetic oligonucleotide
gactactagaactcggaaggtcactttctg

SEQ ID NO: 385706 - DNA, 30 bp, Artificial Sequence
  Synthetic oligonucleotide
aaggggcccttgaaggaatatcagtttctg

SEQ ID NO: 385707 - DNA, 30 bp, Artificial Sequence
  Synthetic oligonucleotide
atccgcctgccgaagggtatagagtttctg

SEQ ID NO: 385708 - DNA, 30 bp, Artificial Sequence
  Synthetic oligonucleotide
gaacgtttcggacttgtataatcgtttctg

SEQ ID NO: 385709 - DNA, 30 bp, Artificial Sequence
  Synthetic oligonucleotide
ttataggtcaaccatgggtcgctaaaagtg

SEQ ID NO: 385710 - DNA, 30 bp, Artificial Sequence
  Synthetic oligonucleotide
agcacacttcggctcagtaccttaaaagtg

SEQ ID NO: 385711 - DNA, 30 bp, Artificial Sequence
  Synthetic oligonucleotide
gagaaattttctatcctaaactccaaagtg

SEQ ID NO: 385712 - DNA, 30 bp, Artificial Sequence
  Synthetic oligonucleotide
ctctcgatcaagtcacgctaccggaaagtg

SEQ ID NO: 385713 - DNA, 30 bp, Artificial Sequence
  Synthetic oligonucleotide
taacaaattttgggccggcccgtgaaagtg

SEQ ID NO: 385714 - DNA, 30 bp, Artificial Sequence
  Synthetic oligonucleotide
tgaatgggtttttttctggtgactaaagtg

SEQ ID NO: 385715 - DNA, 30 bp, Artificial Sequence
  Synthetic oligonucleotide
tggttggagccagccagtgtgtttaaagtg

SEQ ID NO: 385716 - DNA, 30 bp, Artificial Sequence
  Synthetic oligonucleotide
ttgataccatggacgtctgctgtacaagtg

SEQ ID NO: 385717 - DNA, 30 bp, Artificial Sequence
  Synthetic oligonucleotide
gacgtacccactaactcgggtcagcaagtg

SEQ ID NO: 385718 - DNA, 30 bp, Artificial Sequence
  Synthetic oligonucleotide
ttgggtgttcggtatggacagcggcaagtg

SEQ ID NO: 385719 - DNA, 30 bp, Artificial Sequence
  Synthetic oligonucleotide
atcgcattccggtactgtcagggcgaagtg

SEQ ID NO: 385720 - DNA, 30 bp, Artificial Sequence
  Synthetic oligonucleotide
gctggtccttttcgttctcatggcgaagtg

SEQ ID NO: 385721 - DNA, 30 bp, Artificial Sequence
  Synthetic oligonucleotide
atgtattaaggctgtggggacagggaagtg

SEQ ID NO: 385722 - DNA, 30 bp, Artificial Sequence
  Synthetic oligonucleotide
gtcgacgcgaatttcacactctgggaagtg

SEQ ID NO: 385723 - DNA, 30 bp, Artificial Sequence
  Synthetic oligonucleotide
cgtcctcggttcctaaacgcatactaagtg

SEQ ID NO: 385724 - DNA, 30 bp, Artificial Sequence
  Synthetic oligonucleotide
atcctgggtcctagtctcaatctctaagtg

SEQ ID NO: 385725 - DNA, 30 bp, Artificial Sequence
  Synthetic oligonucleotide
gcaacaccactatatagctctgattaagtg

SEQ ID NO: 385726 - DNA, 30 bp, Artificial Sequence
  Synthetic oligonucleotide
aacttaccttgcgtagctgggacttaagtg

SEQ ID NO: 385727 - DNA, 30 bp, Artificial Sequence
  Synthetic oligonucleotide
gaaatgataattcatgaacgcgcttaagtg

SEQ ID NO: 385728 - DNA, 30 bp, Artificial Sequence
  Synthetic oligonucleotide
gcactgaatagcgcttcgagttaaacagtg

SEQ ID NO: 385729 - DNA, 30 bp, Artificial Sequence
  Synthetic oligonucleotide
gcccgcagctcagcgtgatattcaacagtg

SEQ ID NO: 385730 - DNA, 30 bp, Artificial Sequence
  Synthetic oligonucleotide
tgagtatccatgggaatgcggaccacagtg

SEQ ID NO: 385731 - DNA, 30 bp, Artificial Sequence
  Synthetic oligonucleotide
gcaaatccgtggtctaattagcggacagtg

SEQ ID NO: 385732 - DNA, 30 bp, Artificial Sequence
  Synthetic oligonucleotide
attgtgtgacgtcggagtctggatacagtg

SEQ ID NO: 385733 - DNA, 30 bp, Artificial Sequence
  Synthetic oligonucleotide
atccgggaaagtatgcgcacttatacagtg

SEQ ID NO: 385734 - DNA, 30 bp, Artificial Sequence
  Synthetic oligonucleotide
attacgttgagcaccacatcgggtacagtg

SEQ ID NO: 385735 - DNA, 30 bp, Artificial Sequence
  Synthetic oligonucleotide
tacaagatctaaagtgatgtgggaccagtg

SEQ ID NO: 385736 - DNA, 30 bp, Artificial Sequence
  Synthetic oligonucleotide
ttgcctgcatatggacgcttggtaccagtg

SEQ ID NO: 385737 - DNA, 30 bp, Artificial Sequence
  Synthetic oligonucleotide
gtttgggtcattagggaaagttcagcagtg

SEQ ID NO: 385738 - DNA, 30 bp, Artificial Sequence
  Synthetic oligonucleotide
tactcttgtcataggacgattcgagcagtg

SEQ ID NO: 385739 - DNA, 30 bp, Artificial Sequence
  Synthetic oligonucleotide
cgaagatgtctattccttacgtacgcagtg

SEQ ID NO: 385740 - DNA, 30 bp, Artificial Sequence
  Synthetic oligonucleotide
tcacccacggatgtttgcggatgcgcagtg

SEQ ID NO: 385741 - DNA, 30 bp, Artificial Sequence
  Synthetic oligonucleotide
ccctctatgtccataagcataacggcagtg

SEQ ID NO: 385742 - DNA, 30 bp, Artificial Sequence
  Synthetic oligonucleotide
ggcagcagatacctccgttatacggcagtg

SEQ ID NO: 385743 - DNA, 30 bp, Artificial Sequence
  Synthetic oligonucleotide
atgatttgaattggtgcattctgtgcagtg

SEQ ID NO: 385744 - DNA, 30 bp, Artificial Sequence
  Synthetic oligonucleotide
atctagggagcgcctctgacaaactcagtg

SEQ ID NO: 385745 - DNA, 30 bp, Artificial Sequence
  Synthetic oligonucleotide
agcgagcaaaaagactaaggttcctcagtg

SEQ ID NO: 385746 - DNA, 30 bp, Artificial Sequence
  Synthetic oligonucleotide
caggctggcgtttgaagagtgaggtcagtg

SEQ ID NO: 385747 - DNA, 30 bp, Artificial Sequence
  Synthetic oligonucleotide
cctaaccaaagcatggtcggtactagagtg

SEQ ID NO: 385748 - DNA, 30 bp, Artificial Sequence
  Synthetic oligonucleotide
tcctttgtagtaaatagttatcttagagtg

SEQ ID NO: 385749 - DNA, 30 bp, Artificial Sequence
  Synthetic oligonucleotide
cccaacttctcctgaatagtccgacgagtg

SEQ ID NO: 385750 - DNA, 30 bp, Artificial Sequence
  Synthetic oligonucleotide
aaatcccaccaagggtcacgtagccgagtg

SEQ ID NO: 385751 - DNA, 30 bp, Artificial Sequence
  Synthetic oligonucleotide
agcacccggcaataacttgggttgcgagtg

SEQ ID NO: 385752 - DNA, 30 bp, Artificial Sequence
  Synthetic oligonucleotide
tacggagatcaggatgcgataaccggagtg

SEQ ID NO: 385753 - DNA, 30 bp, Artificial Sequence
  Synthetic oligonucleotide
ggcgttagtataaaaagccgtgggggagtg

SEQ ID NO: 385754 - DNA, 30 bp, Artificial Sequence
  Synthetic oligonucleotide
agtttgctcgctcttatcccactgggagtg

SEQ ID NO: 385755 - DNA, 30 bp, Artificial Sequence
  Synthetic oligonucleotide
actactagagagaaatacctactgggagtg

SEQ ID NO: 385756 - DNA, 30 bp, Artificial Sequence
  Synthetic oligonucleotide
gaactgcccatagtggataacggtggagtg

SEQ ID NO: 385757 - DNA, 30 bp, Artificial Sequence
  Synthetic oligonucleotide
agaaacatccaaccgccacgagttggagtg

SEQ ID NO: 385758 - DNA, 30 bp, Artificial Sequence
  Synthetic oligonucleotide
atctcggtattgttatgtttacaatgagtg

SEQ ID NO: 385759 - DNA, 30 bp, Artificial Sequence
  Synthetic oligonucleotide
tgggtggttgggggcatcgggatatgagtg

SEQ ID NO: 385760 - DNA, 30 bp, Artificial Sequence
  Synthetic oligonucleotide
ttgcgcacacgctatgcgcctgtatgagtg

SEQ ID NO: 385761 - DNA, 30 bp, Artificial Sequence
  Synthetic oligonucleotide
actttaagcggttccgaagtcacgtgagtg

SEQ ID NO: 385762 - DNA, 30 bp, Artificial Sequence
  Synthetic oligonucleotide
agttgtctccctactctgggaacttgagtg

SEQ ID NO: 385763 - DNA, 30 bp, Artificial Sequence
  Synthetic oligonucleotide
agtgtgagatgaccggtggatctttgagtg

SEQ ID NO: 385764 - DNA, 30 bp, Artificial Sequence
  Synthetic oligonucleotide
accctgcatgtgtaatatgtgtcaatagtg

SEQ ID NO: 385765 - DNA, 30 bp, Artificial Sequence
  Synthetic oligonucleotide
tagtattgctggcatattgcggagatagtg

SEQ ID NO: 385766 - DNA, 30 bp, Artificial Sequence
  Synthetic oligonucleotide
gtcactctatcgcgcaccaaaggactagtg

SEQ ID NO: 385767 - DNA, 30 bp, Artificial Sequence
  Synthetic oligonucleotide
ttgctttcgaatctcacggctcacctagtg

SEQ ID NO: 385768 - DNA, 30 bp, Artificial Sequence
  Synthetic oligonucleotide
cacaggtatacccgattcgaatacctagtg

SEQ ID NO: 385769 - DNA, 30 bp, Artificial Sequence
  Synthetic oligonucleotide
ttaccagcatatcgcacatacaagctagtg

SEQ ID NO: 385770 - DNA, 30 bp, Artificial Sequence
  Synthetic oligonucleotide
ctcggtttctacggacctggacggctagtg

SEQ ID NO: 385771 - DNA, 30 bp, Artificial Sequence
  Synthetic oligonucleotide
aacctgtcgcaccaaaaggtgctgctagtg

SEQ ID NO: 385772 - DNA, 30 bp, Artificial Sequence
  Synthetic oligonucleotide
gtcgacgacaaacacactacaaatctagtg

SEQ ID NO: 385773 - DNA, 30 bp, Artificial Sequence
  Synthetic oligonucleotide
aaatgtactaagacctactgagaggtagtg

SEQ ID NO: 385774 - DNA, 30 bp, Artificial Sequence
  Synthetic oligonucleotide
tcgcagcgaattaatttgcaaaaattagtg

SEQ ID NO: 385775 - DNA, 30 bp, Artificial Sequence
  Synthetic oligonucleotide
agaccgtatagctgaacttccccattagtg

SEQ ID NO: 385776 - DNA, 30 bp, Artificial Sequence
  Synthetic oligonucleotide
agtcgagtttgtaccatgcctagattagtg

SEQ ID NO: 385777 - DNA, 30 bp, Artificial Sequence
  Synthetic oligonucleotide
ctggaactcctcccaccaaacggattagtg

SEQ ID NO: 385778 - DNA, 30 bp, Artificial Sequence
  Synthetic oligonucleotide
cggtggttgggcactgttaaacacttagtg

SEQ ID NO: 385779 - DNA, 30 bp, Artificial Sequence
  Synthetic oligonucleotide
atttcttccgggctgatcggccgcttagtg

SEQ ID NO: 385780 - DNA, 30 bp, Artificial Sequence
  Synthetic oligonucleotide
ctcgctgcccatcaagtgttgtagttagtg

SEQ ID NO: 385781 - DNA, 30 bp, Artificial Sequence
  Synthetic oligonucleotide
gggggctgaaggagggcgaacacgttagtg

SEQ ID NO: 385782 - DNA, 30 bp, Artificial Sequence
  Synthetic oligonucleotide
acagcagggtcgtccaggaccgttttagtg

SEQ ID NO: 385783 - DNA, 30 bp, Artificial Sequence
  Synthetic oligonucleotide
gatccctttgatctggaagtctaaaacgtg

SEQ ID NO: 385784 - DNA, 30 bp, Artificial Sequence
  Synthetic oligonucleotide
gtcttgaatatagattgaacgccaaacgtg

SEQ ID NO: 385785 - DNA, 30 bp, Artificial Sequence
  Synthetic oligonucleotide
ggttcaacgttgcatttgggcataaacgtg

SEQ ID NO: 385786 - DNA, 30 bp, Artificial Sequence
  Synthetic oligonucleotide
tgtaatgacccattcatggttagtaacgtg

SEQ ID NO: 385787 - DNA, 30 bp, Artificial Sequence
  Synthetic oligonucleotide
caacttgggaacttaggtacgcgccacgtg

SEQ ID NO: 385788 - DNA, 30 bp, Artificial Sequence
  Synthetic oligonucleotide
accgtcggagcgatagtacacaggcacgtg

SEQ ID NO: 385789 - DNA, 30 bp, Artificial Sequence
  Synthetic oligonucleotide
gcccatgtttgcccaacggtttggcacgtg

SEQ ID NO: 385790 - DNA, 30 bp, Artificial Sequence
  Synthetic oligonucleotide
gctctgagaaacgtttccgacgatcacgtg

SEQ ID NO: 385791 - DNA, 30 bp, Artificial Sequence
  Synthetic oligonucleotide
gtagttttccggtagggttctactcacgtg

SEQ ID NO: 385792 - DNA, 30 bp, Artificial Sequence
  Synthetic oligonucleotide
tggacactatcgagtgtttgccaagacgtg

SEQ ID NO: 385793 - DNA, 30 bp, Artificial Sequence
  Synthetic oligonucleotide
gtaaaataattaggatcgtgctaagacgtg

SEQ ID NO: 385794 - DNA, 30 bp, Artificial Sequence
  Synthetic oligonucleotide
caaatgggggctgaacatcgcttagacgtg

SEQ ID NO: 385795 - DNA, 30 bp, Artificial Sequence
  Synthetic oligonucleotide
ttggggtgatacagaactcaccacgacgtg

SEQ ID NO: 385796 - DNA, 30 bp, Artificial Sequence
  Synthetic oligonucleotide
gggaacgcaaaagcgcaagtacccgacgtg

SEQ ID NO: 385797 - DNA, 30 bp, Artificial Sequence
  Synthetic oligonucleotide
cccgcgtccatgcggaggtctcaatacgtg

SEQ ID NO: 385798 - DNA, 30 bp, Artificial Sequence
  Synthetic oligonucleotide
ccattgttccgaacctcgtttcggtacgtg

SEQ ID NO: 385799 - DNA, 30 bp, Artificial Sequence
  Synthetic oligonucleotide
tcagatggcgactaggcccttttgtacgtg

SEQ ID NO: 385800 - DNA, 30 bp, Artificial Sequence
  Synthetic oligonucleotide
cgccggggtctagtttgacggggttacgtg

SEQ ID NO: 385801 - DNA, 30 bp, Artificial Sequence
  Synthetic oligonucleotide
gcaagttggacagcctcagtcacaaccgtg

SEQ ID NO: 385802 - DNA, 30 bp, Artificial Sequence
  Synthetic oligonucleotide
ttacatatgctaagcaaagaacgaaccgtg

SEQ ID NO: 385803 - DNA, 30 bp, Artificial Sequence
  Synthetic oligonucleotide
gtgtttgtgttcacataattgctaaccgtg

SEQ ID NO: 385804 - DNA, 30 bp, Artificial Sequence
  Synthetic oligonucleotide
atggtgagtcgcagctcaaataccaccgtg

SEQ ID NO: 385805 - DNA, 30 bp, Artificial Sequence
  Synthetic oligonucleotide
attaagcccagggaacacttctggaccgtg

SEQ ID NO: 385806 - DNA, 30 bp, Artificial Sequence
  Synthetic oligonucleotide
taggttattgtctatgccaagtggaccgtg

SEQ ID NO: 385807 - DNA, 30 bp, Artificial Sequence
  Synthetic oligonucleotide
tgccgtaaagagctgttttatatgaccgtg

SEQ ID NO: 385808 - DNA, 30 bp, Artificial Sequence
  Synthetic oligonucleotide
cgcacagtcacacggagatcggataccgtg

SEQ ID NO: 385809 - DNA, 30 bp, Artificial Sequence
  Synthetic oligonucleotide
tcacgacatgctgcacacaaatctaccgtg

SEQ ID NO: 385810 - DNA, 30 bp, Artificial Sequence
  Synthetic oligonucleotide
gtacggtcggttagctgcccatttaccgtg

SEQ ID NO: 385811 - DNA, 30 bp, Artificial Sequence
  Synthetic oligonucleotide
atgttaaaggtccataccaggcaacccgtg

SEQ ID NO: 385812 - DNA, 30 bp, Artificial Sequence
  Synthetic oligonucleotide
ccttaaggtggctatctttgtttacccgtg

SEQ ID NO: 385813 - DNA, 30 bp, Artificial Sequence
  Synthetic oligonucleotide
acggttgcgcatggtcgtaccatagccgtg

SEQ ID NO: 385814 - DNA, 30 bp, Artificial Sequence
  Synthetic oligonucleotide
tacattctagatacacatgttatggccgtg

SEQ ID NO: 385815 - DNA, 30 bp, Artificial Sequence
  Synthetic oligonucleotide
gtttcttagctcggattctgtattgccgtg

SEQ ID NO: 385816 - DNA, 30 bp, Artificial Sequence
  Synthetic oligonucleotide
cacgaataatccgcaacgaaggttgccgtg

SEQ ID NO: 385817 - DNA, 30 bp, Artificial Sequence
  Synthetic oligonucleotide
acacaatgaggggggttcattgttgccgtg

SEQ ID NO: 385818 - DNA, 30 bp, Artificial Sequence
  Synthetic oligonucleotide
tggactaaggagggacgctcgccatccgtg

SEQ ID NO: 385819 - DNA, 30 bp, Artificial Sequence
  Synthetic oligonucleotide
ggatacgaatggttgcggagactatccgtg

SEQ ID NO: 385820 - DNA, 30 bp, Artificial Sequence
  Synthetic oligonucleotide
ctccgtccttaaggcatcatacattccgtg

SEQ ID NO: 385821 - DNA, 30 bp, Artificial Sequence
  Synthetic oligonucleotide
gatcactggctcactggttagggttccgtg

SEQ ID NO: 385822 - DNA, 30 bp, Artificial Sequence
  Synthetic oligonucleotide
cgtggaaattattagcatcgtctttccgtg

SEQ ID NO: 385823 - DNA, 30 bp, Artificial Sequence
  Synthetic oligonucleotide
tgtcttagccgagaccgacgcacaagcgtg

SEQ ID NO: 385824 - DNA, 30 bp, Artificial Sequence
  Synthetic oligonucleotide
cgtatcaggcttattaggagagtaagcgtg

SEQ ID NO: 385825 - DNA, 30 bp, Artificial Sequence
  Synthetic oligonucleotide
aaagcgattccatgacaagtacaacgcgtg

SEQ ID NO: 385826 - DNA, 30 bp, Artificial Sequence
  Synthetic oligonucleotide
aatacaccgctattggtatatcaccgcgtg

SEQ ID NO: 385827 - DNA, 30 bp, Artificial Sequence
  Synthetic oligonucleotide
gtggctctctccaccatgagaggccgcgtg

SEQ ID NO: 385828 - DNA, 31 bp, Artificial Sequence
  Synthetic oligonucleotide
cgtaggtgggtgatgctgaactcgcggcgtg

SEQ ID NO: 385829 - DNA, 30 bp, Artificial Sequence
  Synthetic oligonucleotide
tgcccacactaatttgtgggacagggcgtg

SEQ ID NO: 385830 - DNA, 30 bp, Artificial Sequence
  Synthetic oligonucleotide
caacaaaagggttaaacttccacgggcgtg

SEQ ID NO: 385831 - DNA, 30 bp, Artificial Sequence
  Synthetic oligonucleotide
gacccgatggggtcgtcgttaaggggcgtg

SEQ ID NO: 385832 - DNA, 30 bp, Artificial Sequence
  Synthetic oligonucleotide
tagggtgaacaaacaagcggaaggtgcgtg

SEQ ID NO: 385833 - DNA, 30 bp, Artificial Sequence
  Synthetic oligonucleotide
gctgcatcactctgccggcccctgtgcgtg

SEQ ID NO: 385834 - DNA, 30 bp, Artificial Sequence
  Synthetic oligonucleotide
gtgtcaatattgatatatcggcaaatcgtg

SEQ ID NO: 385835 - DNA, 30 bp, Artificial Sequence
  Synthetic oligonucleotide
atagttatcgtggcgatatgaacaatcgtg

SEQ ID NO: 385836 - DNA, 30 bp, Artificial Sequence
  Synthetic oligonucleotide
gcgtaaagggaaaaattgcccgcaatcgtg

SEQ ID NO: 385837 - DNA, 30 bp, Artificial Sequence
  Synthetic oligonucleotide
attaacagaggacggttgaacgacctcgtg

SEQ ID NO: 385838 - DNA, 30 bp, Artificial Sequence
  Synthetic oligonucleotide
ttcaaaaagggtttcggagccgccctcgtg

SEQ ID NO: 385839 - DNA, 30 bp, Artificial Sequence
  Synthetic oligonucleotide
gatttattgcgatgtcaagaggagctcgtg

SEQ ID NO: 385840 - DNA, 30 bp, Artificial Sequence
  Synthetic oligonucleotide
ctcggtttaatggcgccttgcttgctcgtg

SEQ ID NO: 385841 - DNA, 30 bp, Artificial Sequence
  Synthetic oligonucleotide
ttcgctaaactagacacttgtaacgtcgtg

SEQ ID NO: 385842 - DNA, 30 bp, Artificial Sequence
  Synthetic oligonucleotide
tcggacgcacgggtgcgccgttacgtcgtg

SEQ ID NO: 385843 - DNA, 30 bp, Artificial Sequence
  Synthetic oligonucleotide
catctttgactatcgtttgtctaattcgtg

SEQ ID NO: 385844 - DNA, 30 bp, Artificial Sequence
  Synthetic oligonucleotide
agacactggcgtagtttagtaatattcgtg

SEQ ID NO: 385845 - DNA, 30 bp, Artificial Sequence
  Synthetic oligonucleotide
gtttccagacggctgggagatgacttcgtg

SEQ ID NO: 385846 - DNA, 30 bp, Artificial Sequence
  Synthetic oligonucleotide
tacgaaagacgtatctcacttgacttcgtg

SEQ ID NO: 385847 - DNA, 30 bp, Artificial Sequence
  Synthetic oligonucleotide
gaatcacgaaactcgaggaataccttcgtg

SEQ ID NO: 385848 - DNA, 30 bp, Artificial Sequence
  Synthetic oligonucleotide
ggttgttgtcgcgccgtatgcctcttcgtg

SEQ ID NO: 385849 - DNA, 30 bp, Artificial Sequence
  Synthetic oligonucleotide
ccgtagacattgttgcggttatggttcgtg

SEQ ID NO: 385850 - DNA, 30 bp, Artificial Sequence
  Synthetic oligonucleotide
gatgaataggtaaaagtctgactaaaggtg

SEQ ID NO: 385851 - DNA, 30 bp, Artificial Sequence
  Synthetic oligonucleotide
caaaaagcgccgtgttggacgttaaaggtg

SEQ ID NO: 385852 - DNA, 30 bp, Artificial Sequence
  Synthetic oligonucleotide
ctatctatttgggcttcacctggcaaggtg

SEQ ID NO: 385853 - DNA, 30 bp, Artificial Sequence
  Synthetic oligonucleotide
agttgcatggtcgggttttacgagaaggtg

SEQ ID NO: 385854 - DNA, 30 bp, Artificial Sequence
  Synthetic oligonucleotide
cgtggcgatcgagggctgtacaggaaggtg

SEQ ID NO: 385855 - DNA, 30 bp, Artificial Sequence
  Synthetic oligonucleotide
gagttaccttatacagggacacgtaaggtg

SEQ ID NO: 385856 - DNA, 30 bp, Artificial Sequence
  Synthetic oligonucleotide
aactcgcatgttgcacggaatattaaggtg

SEQ ID NO: 385857 - DNA, 30 bp, Artificial Sequence
  Synthetic oligonucleotide
caccaatgtgtggctcatagggtacaggtg

SEQ ID NO: 385858 - DNA, 30 bp, Artificial Sequence
  Synthetic oligonucleotide
taactagcctttcagcttacatagcaggtg

SEQ ID NO: 385859 - DNA, 30 bp, Artificial Sequence
  Synthetic oligonucleotide
tagttgtaaggctcggtgagtgggcaggtg

SEQ ID NO: 385860 - DNA, 30 bp, Artificial Sequence
  Synthetic oligonucleotide
tcctagcgacggctcgccacgaatcaggtg

SEQ ID NO: 385861 - DNA, 30 bp, Artificial Sequence
  Synthetic oligonucleotide
atatgcttcagttaagcactgactcaggtg

SEQ ID NO: 385862 - DNA, 30 bp, Artificial Sequence
  Synthetic oligonucleotide
tatgcaaacatccgccgccgtccagaggtg

SEQ ID NO: 385863 - DNA, 30 bp, Artificial Sequence
  Synthetic oligonucleotide
ggggcttcttgtaatgtagtcgccgaggtg

SEQ ID NO: 385864 - DNA, 30 bp, Artificial Sequence
  Synthetic oligonucleotide
tgtgccgtttataagggtttatccgaggtg

SEQ ID NO: 385865 - DNA, 30 bp, Artificial Sequence
  Synthetic oligonucleotide
catttgttgcgttgggccgtggtcgaggtg

SEQ ID NO: 385866 - DNA, 30 bp, Artificial Sequence
  Synthetic oligonucleotide
gatgttctaccaatcgcctttgcggaggtg

SEQ ID NO: 385867 - DNA, 30 bp, Artificial Sequence
  Synthetic oligonucleotide
cataggcccttgggcccattcactgaggtg

SEQ ID NO: 385868 - DNA, 30 bp, Artificial Sequence
  Synthetic oligonucleotide
aaatcatcaatctaaactcatagataggtg

SEQ ID NO: 385869 - DNA, 30 bp, Artificial Sequence
  Synthetic oligonucleotide
gaaatcttgcccatttagatatgataggtg

SEQ ID NO: 385870 - DNA, 30 bp, Artificial Sequence
  Synthetic oligonucleotide
actgcaaatatttaactgcaggactaggtg

SEQ ID NO: 385871 - DNA, 30 bp, Artificial Sequence
  Synthetic oligonucleotide
acctacagcggcacgctacggaattaggtg

SEQ ID NO: 385872 - DNA, 30 bp, Artificial Sequence
  Synthetic oligonucleotide
aggtcggacgcttacttgtgatcttaggtg

SEQ ID NO: 385873 - DNA, 30 bp, Artificial Sequence
  Synthetic oligonucleotide
ttacaggacggaaacgtttaggtttaggtg

SEQ ID NO: 385874 - DNA, 30 bp, Artificial Sequence
  Synthetic oligonucleotide
gtacacggaatattccctgagaaaacggtg

SEQ ID NO: 385875 - DNA, 30 bp, Artificial Sequence
  Synthetic oligonucleotide
cttcatatgggtcgcgctggccaaacggtg

SEQ ID NO: 385876 - DNA, 30 bp, Artificial Sequence
  Synthetic oligonucleotide
gcggcccagggtagtaaattcgaaacggtg

SEQ ID NO: 385877 - DNA, 30 bp, Artificial Sequence
  Synthetic oligonucleotide
gttggttattgcttgtgctactaaacggtg

SEQ ID NO: 385878 - DNA, 30 bp, Artificial Sequence
  Synthetic oligonucleotide
gtctgggcatgcattattttaggcacggtg

SEQ ID NO: 385879 - DNA, 30 bp, Artificial Sequence
  Synthetic oligonucleotide
tcatccagaggctttgtaagatctacggtg

SEQ ID NO: 385880 - DNA, 30 bp, Artificial Sequence
  Synthetic oligonucleotide
aacggaaactggtttattggttctacggtg

SEQ ID NO: 385881 - DNA, 30 bp, Artificial Sequence
  Synthetic oligonucleotide
catataaggccgatctttgatgaaccggtg

SEQ ID NO: 385882 - DNA, 30 bp, Artificial Sequence
  Synthetic oligonucleotide
gaactttcagagtagttagattacccggtg

SEQ ID NO: 385883 - DNA, 30 bp, Artificial Sequence
  Synthetic oligonucleotide
ctccatacacgggagggccgaggcccggtg

SEQ ID NO: 385884 - DNA, 30 bp, Artificial Sequence
  Synthetic oligonucleotide
gcccacaacccatttggtccccggccggtg

SEQ ID NO: 385885 - DNA, 30 bp, Artificial Sequence
  Synthetic oligonucleotide
gtgaatgtaactttctgtacatgtccggtg

SEQ ID NO: 385886 - DNA, 30 bp, Artificial Sequence
  Synthetic oligonucleotide
cgccgaattaaggggccccgggttccggtg

SEQ ID NO: 385887 - DNA, 30 bp, Artificial Sequence
  Synthetic oligonucleotide
aaaagctgtgcacggaagagatttccggtg

SEQ ID NO: 385888 - DNA, 30 bp, Artificial Sequence
  Synthetic oligonucleotide
agatccaccggcgccgtgtttatagcggtg

SEQ ID NO: 385889 - DNA, 30 bp, Artificial Sequence
  Synthetic oligonucleotide
gagcgcattggttgatgcttggtcgcggtg

SEQ ID NO: 385890 - DNA, 30 bp, Artificial Sequence
  Synthetic oligonucleotide
tgagaagacactcaggcaacgcctgcggtg

SEQ ID NO: 385891 - DNA, 30 bp, Artificial Sequence
  Synthetic oligonucleotide
acagctcaccttaatatgcacatctcggtg

SEQ ID NO: 385892 - DNA, 30 bp, Artificial Sequence
  Synthetic oligonucleotide
actaatgtacgatatacccagatctcggtg

SEQ ID NO: 385893 - DNA, 30 bp, Artificial Sequence
  Synthetic oligonucleotide
gacccatgacggtaaacgtctacgtcggtg

SEQ ID NO: 385894 - DNA, 30 bp, Artificial Sequence
  Synthetic oligonucleotide
ctcctggctattcgaatcgcggattcggtg

SEQ ID NO: 385895 - DNA, 30 bp, Artificial Sequence
  Synthetic oligonucleotide
ttaatgcctctagcggcgacactcagggtg

SEQ ID NO: 385896 - DNA, 30 bp, Artificial Sequence
  Synthetic oligonucleotide
gccagctgtttattgatagtcgttagggtg

SEQ ID NO: 385897 - DNA, 30 bp, Artificial Sequence
  Synthetic oligonucleotide
attaatcttcactggtgcgaagaacgggtg

SEQ ID NO: 385898 - DNA, 30 bp, Artificial Sequence
  Synthetic oligonucleotide
aataatcacttgtgattggtcttacgggtg

SEQ ID NO: 385899 - DNA, 30 bp, Artificial Sequence
  Synthetic oligonucleotide
gccgttggtgcttgcaccatcgaccgggtg

SEQ ID NO: 385900 - DNA, 30 bp, Artificial Sequence
  Synthetic oligonucleotide
gagaggacaggttcaaacacgccgcgggtg

SEQ ID NO: 385901 - DNA, 30 bp, Artificial Sequence
  Synthetic oligonucleotide
aagacgtaggaagaccatgttattcgggtg

SEQ ID NO: 385902 - DNA, 30 bp, Artificial Sequence
  Synthetic oligonucleotide
tgcaggtcatccgaaattgccttcggggtg

SEQ ID NO: 385903 - DNA, 30 bp, Artificial Sequence
  Synthetic oligonucleotide
aatttgctccgataagggtaaagtggggtg

SEQ ID NO: 385904 - DNA, 30 bp, Artificial Sequence
  Synthetic oligonucleotide
tagtgtttgtacgaggggatcagtggggtg

SEQ ID NO: 385905 - DNA, 30 bp, Artificial Sequence
  Synthetic oligonucleotide
ttttcccggtaactaggcaataactgggtg

SEQ ID NO: 385906 - DNA, 30 bp, Artificial Sequence
  Synthetic oligonucleotide
tttactaaccggtaagatcacgggtgggtg

SEQ ID NO: 385907 - DNA, 30 bp, Artificial Sequence
  Synthetic oligonucleotide
gagttccctggcatgcgtcattcttgggtg

SEQ ID NO: 385908 - DNA, 31 bp, Artificial Sequence
  Synthetic oligonucleotide
caatatttcgaacgttctttagaaaatggtg

SEQ ID NO: 385909 - DNA, 30 bp, Artificial Sequence
  Synthetic oligonucleotide
atagaagtaacttgaacggagcaaatggtg

SEQ ID NO: 385910 - DNA, 30 bp, Artificial Sequence
  Synthetic oligonucleotide
ttggaacgcgcagatatactttgaatggtg

SEQ ID NO: 385911 - DNA, 30 bp, Artificial Sequence
  Synthetic oligonucleotide
ttcacactggaattaaggattctaatggtg

SEQ ID NO: 385912 - DNA, 30 bp, Artificial Sequence
  Synthetic oligonucleotide
tgagttagaactttagtccgttacatggtg

SEQ ID NO: 385913 - DNA, 30 bp, Artificial Sequence
  Synthetic oligonucleotide
acaacccataatcagttttatcccatggtg

SEQ ID NO: 385914 - DNA, 30 bp, Artificial Sequence
  Synthetic oligonucleotide
tataattgaatagtattcatccagatggtg

SEQ ID NO: 385915 - DNA, 30 bp, Artificial Sequence
  Synthetic oligonucleotide
agacttcgctggagaaacttgtggatggtg

SEQ ID NO: 385916 - DNA, 30 bp, Artificial Sequence
  Synthetic oligonucleotide
gctgatagacaattacgcaaccttatggtg

SEQ ID NO: 385917 - DNA, 30 bp, Artificial Sequence
  Synthetic oligonucleotide
tggggttgttattgtttatctgtactggtg

SEQ ID NO: 385918 - DNA, 30 bp, Artificial Sequence
  Synthetic oligonucleotide
gaattcatatccaagtgtggcgcgctggtg

SEQ ID NO: 385919 - DNA, 30 bp, Artificial Sequence
  Synthetic oligonucleotide
agccgctccactaagcgcaaatgagtggtg

SEQ ID NO: 385920 - DNA, 30 bp, Artificial Sequence
  Synthetic oligonucleotide
tgtcccgtttagtttgagaccaccgtggtg

SEQ ID NO: 385921 - DNA, 30 bp, Artificial Sequence
  Synthetic oligonucleotide
cactatgtctcctggtattcgacggtggtg

SEQ ID NO: 385922 - DNA, 30 bp, Artificial Sequence
  Synthetic oligonucleotide
gccccttcagttaacatcatacaattggtg

SEQ ID NO: 385923 - DNA, 30 bp, Artificial Sequence
  Synthetic oligonucleotide
gcatcccatgttcgaagtatgaacttggtg

SEQ ID NO: 385924 - DNA, 30 bp, Artificial Sequence
  Synthetic oligonucleotide
aaccagtgcgactacttcccggcgttggtg

SEQ ID NO: 385925 - DNA, 30 bp, Artificial Sequence
  Synthetic oligonucleotide
ccttcggtatgtacctcttgctctttggtg

SEQ ID NO: 385926 - DNA, 30 bp, Artificial Sequence
  Synthetic oligonucleotide
atctatcagattcgtcaaccaggtttggtg

SEQ ID NO: 385927 - DNA, 30 bp, Artificial Sequence
  Synthetic oligonucleotide
gttgatagttggatccgagcttttttggtg

SEQ ID NO: 385928 - DNA, 30 bp, Artificial Sequence
  Synthetic oligonucleotide
aagggtagcagttttttctgcgcaaatgtg

SEQ ID NO: 385929 - DNA, 30 bp, Artificial Sequence
  Synthetic oligonucleotide
ggcgctcccacatagtagattcgaaatgtg

SEQ ID NO: 385930 - DNA, 30 bp, Artificial Sequence
  Synthetic oligonucleotide
tacaccgcataaatgcacggggccaatgtg

SEQ ID NO: 385931 - DNA, 30 bp, Artificial Sequence
  Synthetic oligonucleotide
ataaataatagtcgtgttaagtgcaatgtg

SEQ ID NO: 385932 - DNA, 30 bp, Artificial Sequence
  Synthetic oligonucleotide
aaccccagactgcaccttgacaggaatgtg

SEQ ID NO: 385933 - DNA, 29 bp, Artificial Sequence
  Synthetic oligonucleotide
cctctcgctaccctagtcaatataatgtg

SEQ ID NO: 385934 - DNA, 30 bp, Artificial Sequence
  Synthetic oligonucleotide
attacccaatatttagggacaaaacatgtg

SEQ ID NO: 385935 - DNA, 30 bp, Artificial Sequence
  Synthetic oligonucleotide
gatcgttttcagcgaaggaaagtccatgtg

SEQ ID NO: 385936 - DNA, 30 bp, Artificial Sequence
  Synthetic oligonucleotide
gaactgcacctagcctacgtacggcatgtg

SEQ ID NO: 385937 - DNA, 30 bp, Artificial Sequence
  Synthetic oligonucleotide
gccatgcttacacggtgtaacatgcatgtg

SEQ ID NO: 385938 - DNA, 30 bp, Artificial Sequence
  Synthetic oligonucleotide
gtgcgttagttcccgcccgttatgcatgtg

SEQ ID NO: 385939 - DNA, 30 bp, Artificial Sequence
  Synthetic oligonucleotide
gatgctaaaagcgctcggcgcattcatgtg

SEQ ID NO: 385940 - DNA, 30 bp, Artificial Sequence
  Synthetic oligonucleotide
aattaggtccatctagtttagaaagatgtg

SEQ ID NO: 385941 - DNA, 30 bp, Artificial Sequence
  Synthetic oligonucleotide
tctaggaccgtttataatgcccccgatgtg

SEQ ID NO: 385942 - DNA, 30 bp, Artificial Sequence
  Synthetic oligonucleotide
aggcctctcacttacgctgacatcgatgtg

SEQ ID NO: 385943 - DNA, 30 bp, Artificial Sequence
  Synthetic oligonucleotide
gaggttacagggccttgccctgaatatgtg

SEQ ID NO: 385944 - DNA, 30 bp, Artificial Sequence
  Synthetic oligonucleotide
ttgccgtgtctgtaacagcgggcatatgtg

SEQ ID NO: 385945 - DNA, 30 bp, Artificial Sequence
  Synthetic oligonucleotide
tgatgatacccaacaccatatgtatatgtg

SEQ ID NO: 385946 - DNA, 30 bp, Artificial Sequence
  Synthetic oligonucleotide
atttatagcataggactgtcaaagtatgtg

SEQ ID NO: 385947 - DNA, 30 bp, Artificial Sequence
  Synthetic oligonucleotide
gcactatagctcggagcatatcggtatgtg

SEQ ID NO: 385948 - DNA, 30 bp, Artificial Sequence
  Synthetic oligonucleotide
ctacactctacgaccccggtagattatgtg

SEQ ID NO: 385949 - DNA, 30 bp, Artificial Sequence
  Synthetic oligonucleotide
gtacattcgatgactaatagtgtttatgtg

SEQ ID NO: 385950 - DNA, 30 bp, Artificial Sequence
  Synthetic oligonucleotide
gtgttgttatttgccaacagtagaactgtg

SEQ ID NO: 385951 - DNA, 30 bp, Artificial Sequence
  Synthetic oligonucleotide
gattacatatgcaacacgcacggaactgtg

SEQ ID NO: 385952 - DNA, 31 bp, Artificial Sequence
  Synthetic oligonucleotide
tttcggtctatgagcttgtcgagttactgtg

SEQ ID NO: 385953 - DNA, 30 bp, Artificial Sequence
  Synthetic oligonucleotide
gctatcttcccctggaagtcgtagcctgtg

SEQ ID NO: 385954 - DNA, 30 bp, Artificial Sequence
  Synthetic oligonucleotide
gactgtgtgtgcacaacagcaatagctgtg

SEQ ID NO: 385955 - DNA, 30 bp, Artificial Sequence
  Synthetic oligonucleotide
gcttctaagtatgtctgtacacacgctgtg

SEQ ID NO: 385956 - DNA, 30 bp, Artificial Sequence
  Synthetic oligonucleotide
ccttcagtgaagaacacccgaaaggctgtg

SEQ ID NO: 385957 - DNA, 30 bp, Artificial Sequence
  Synthetic oligonucleotide
actgaacgtaggaggcagacagttgctgtg

SEQ ID NO: 385958 - DNA, 30 bp, Artificial Sequence
  Synthetic oligonucleotide
gagtccgtataagccctagattttgctgtg

SEQ ID NO: 385959 - DNA, 30 bp, Artificial Sequence
  Synthetic oligonucleotide
tattactatcggcctccaagagcctctgtg

SEQ ID NO: 385960 - DNA, 30 bp, Artificial Sequence
  Synthetic oligonucleotide
caattctccatataggttccgtcgtctgtg

SEQ ID NO: 385961 - DNA, 30 bp, Artificial Sequence
  Synthetic oligonucleotide
catcatgtctgacgccttcgggattctgtg

SEQ ID NO: 385962 - DNA, 30 bp, Artificial Sequence
  Synthetic oligonucleotide
aggttgttatatacacgcagatattctgtg

SEQ ID NO: 385963 - DNA, 30 bp, Artificial Sequence
  Synthetic oligonucleotide
agtttttatgacagtgtatcaacttctgtg

SEQ ID NO: 385964 - DNA, 30 bp, Artificial Sequence
  Synthetic oligonucleotide
caacccacttcgagctttatagcttctgtg

SEQ ID NO: 385965 - DNA, 30 bp, Artificial Sequence
  Synthetic oligonucleotide
aggatattcgggttaataatgggcagtgtg

SEQ ID NO: 385966 - DNA, 30 bp, Artificial Sequence
  Synthetic oligonucleotide
tatctgaagcttgaacaacacttcagtgtg

SEQ ID NO: 385967 - DNA, 30 bp, Artificial Sequence
  Synthetic oligonucleotide
tacagctcctcatggcaatgaatgagtgtg

SEQ ID NO: 385968 - DNA, 30 bp, Artificial Sequence
  Synthetic oligonucleotide
atcttcatgggcaattctataatgagtgtg

SEQ ID NO: 385969 - DNA, 30 bp, Artificial Sequence
  Synthetic oligonucleotide
gtacagtttgaagggcgtattggacgtgtg

SEQ ID NO: 385970 - DNA, 30 bp, Artificial Sequence
  Synthetic oligonucleotide
gttccgatgcagggtaagaacttacgtgtg

SEQ ID NO: 385971 - DNA, 30 bp, Artificial Sequence
  Synthetic oligonucleotide
tcagtcggccctattaattaagtccgtgtg

SEQ ID NO: 385972 - DNA, 30 bp, Artificial Sequence
  Synthetic oligonucleotide
catctgtatgcctcacctaccatgcgtgtg

SEQ ID NO: 385973 - DNA, 27 bp, Artificial Sequence
  Synthetic oligonucleotide
gtgggtcggttgtccggagttcgtgtg

SEQ ID NO: 385974 - DNA, 30 bp, Artificial Sequence
  Synthetic oligonucleotide
caggcttagggtcgtcagacctaaggtgtg

SEQ ID NO: 385975 - DNA, 30 bp, Artificial Sequence
  Synthetic oligonucleotide
agctcagcgcaccgcagtaaaaacggtgtg

SEQ ID NO: 385976 - DNA, 30 bp, Artificial Sequence
  Synthetic oligonucleotide
gccagtgcatttcgagtctttaccggtgtg

SEQ ID NO: 385977 - DNA, 30 bp, Artificial Sequence
  Synthetic oligonucleotide
tagacaaataccagtcatgcgcccggtgtg

SEQ ID NO: 385978 - DNA, 30 bp, Artificial Sequence
  Synthetic oligonucleotide
attgttgtgttttgagttaattagggtgtg

SEQ ID NO: 385979 - DNA, 30 bp, Artificial Sequence
  Synthetic oligonucleotide
ttctattagttactttccgatattggtgtg

SEQ ID NO: 385980 - DNA, 30 bp, Artificial Sequence
  Synthetic oligonucleotide
aatagaacgaaggtgagtgatggatgtgtg

SEQ ID NO: 385981 - DNA, 30 bp, Artificial Sequence
  Synthetic oligonucleotide
ggtattcttgcccccggttacttatgtgtg

SEQ ID NO: 385982 - DNA, 30 bp, Artificial Sequence
  Synthetic oligonucleotide
caatcggattggtaaatttcgccttgtgtg

SEQ ID NO: 385983 - DNA, 30 bp, Artificial Sequence
  Synthetic oligonucleotide
acataagtacgggggttagattgaattgtg

SEQ ID NO: 385984 - DNA, 30 bp, Artificial Sequence
  Synthetic oligonucleotide
gcacttccaacaacaggttttgacattgtg

SEQ ID NO: 385985 - DNA, 30 bp, Artificial Sequence
  Synthetic oligonucleotide
tggtaggcttccgatcctgagaccattgtg

SEQ ID NO: 385986 - DNA, 30 bp, Artificial Sequence
  Synthetic oligonucleotide
ggcctcctggggcggtaaggctccattgtg

SEQ ID NO: 385987 - DNA, 30 bp, Artificial Sequence
  Synthetic oligonucleotide
aaaaggcgtcgttgtattttacgcattgtg

SEQ ID NO: 385988 - DNA, 30 bp, Artificial Sequence
  Synthetic oligonucleotide
aaggtagacgttcaggactgtctgattgtg

SEQ ID NO: 385989 - DNA, 30 bp, Artificial Sequence
  Synthetic oligonucleotide
aaaacctgcccgcttgccgaatatattgtg

SEQ ID NO: 385990 - DNA, 30 bp, Artificial Sequence
  Synthetic oligonucleotide
aggcatcgatagtagtacggctgtattgtg

SEQ ID NO: 385991 - DNA, 30 bp, Artificial Sequence
  Synthetic oligonucleotide
gaacgcaccgtcctctttaattaacttgtg

SEQ ID NO: 385992 - DNA, 30 bp, Artificial Sequence
  Synthetic oligonucleotide
aaacatataattttgacaaaaatacttgtg

SEQ ID NO: 385993 - DNA, 30 bp, Artificial Sequence
  Synthetic oligonucleotide
agaccgtatcaggtccttcacatccttgtg

SEQ ID NO: 385994 - DNA, 30 bp, Artificial Sequence
  Synthetic oligonucleotide
tgattcattgtaaatggtaatatccttgtg

SEQ ID NO: 385995 - DNA, 30 bp, Artificial Sequence
  Synthetic oligonucleotide
tgacgctcggagacagtttttattcttgtg

SEQ ID NO: 385996 - DNA, 30 bp, Artificial Sequence
  Synthetic oligonucleotide
caagttatagcgagctggacggttcttgtg

SEQ ID NO: 385997 - DNA, 30 bp, Artificial Sequence
  Synthetic oligonucleotide
ccagtctatggccggttcgaatttcttgtg

SEQ ID NO: 385998 - DNA, 30 bp, Artificial Sequence
  Synthetic oligonucleotide
ggatgggttttgaggttaaaggaagttgtg

SEQ ID NO: 385999 - DNA, 30 bp, Artificial Sequence
  Synthetic oligonucleotide
tccttctgtaatttgatcgtcacagttgtg

SEQ ID NO: 386000 - DNA, 30 bp, Artificial Sequence
  Synthetic oligonucleotide
cagctccgcgatctccccatgatagttgtg

SEQ ID NO: 386001 - DNA, 30 bp, Artificial Sequence
  Synthetic oligonucleotide
accgaatcattaaatgtttggtgggttgtg

SEQ ID NO: 386002 - DNA, 30 bp, Artificial Sequence
  Synthetic oligonucleotide
tgattattatcaatctgcccatatgttgtg

SEQ ID NO: 386003 - DNA, 30 bp, Artificial Sequence
  Synthetic oligonucleotide
tcttctgtattcaatgatgtacctgttgtg

SEQ ID NO: 386004 - DNA, 30 bp, Artificial Sequence
  Synthetic oligonucleotide
cacattcccgtcgtttattgtattgttgtg

SEQ ID NO: 386005 - DNA, 29 bp, Artificial Sequence
  Synthetic oligonucleotide
atggagtacttaaagacccccaatttgtg

SEQ ID NO: 386006 - DNA, 30 bp, Artificial Sequence
  Synthetic oligonucleotide
caagcacatattatgccgcaaatatttgtg

SEQ ID NO: 386007 - DNA, 30 bp, Artificial Sequence
  Synthetic oligonucleotide
tgttccagagtccgaacgtctatatttgtg

SEQ ID NO: 386008 - DNA, 30 bp, Artificial Sequence
  Synthetic oligonucleotide
gtcattcgggcgggggaccgttactttgtg

SEQ ID NO: 386009 - DNA, 30 bp, Artificial Sequence
  Synthetic oligonucleotide
ccacggtaatgttaataaatttgctttgtg

SEQ ID NO: 386010 - DNA, 30 bp, Artificial Sequence
  Synthetic oligonucleotide
cacgccatatttataacactcatctttgtg

SEQ ID NO: 386011 - DNA, 30 bp, Artificial Sequence
  Synthetic oligonucleotide
ttggaccgaagcaccggaagtacgtttgtg

SEQ ID NO: 386012 - DNA, 30 bp, Artificial Sequence
  Synthetic oligonucleotide
gccaacatgagtgccctagcacggtttgtg

SEQ ID NO: 386013 - DNA, 30 bp, Artificial Sequence
  Synthetic oligonucleotide
atatcaaggttgtgctttcttgattttgtg

SEQ ID NO: 386014 - DNA, 30 bp, Artificial Sequence
  Synthetic oligonucleotide
cccaaagtccgaggcaattagtaaaaattg

SEQ ID NO: 386015 - DNA, 30 bp, Artificial Sequence
  Synthetic oligonucleotide
aaccttgcgcttcacgtccccgacaaattg

SEQ ID NO: 386016 - DNA, 30 bp, Artificial Sequence
  Synthetic oligonucleotide
cgatggctcactctatcggagcgcaaattg

SEQ ID NO: 386017 - DNA, 30 bp, Artificial Sequence
  Synthetic oligonucleotide
aacatatttcccgaccaccgtccgaaattg

SEQ ID NO: 386018 - DNA, 30 bp, Artificial Sequence
  Synthetic oligonucleotide
tacggagtcacaggccttttatataaattg

SEQ ID NO: 386019 - DNA, 30 bp, Artificial Sequence
  Synthetic oligonucleotide
acgctttctgcaatccagtccagtaaattg

SEQ ID NO: 386020 - DNA, 30 bp, Artificial Sequence
  Synthetic oligonucleotide
gagcgtttattatcgcaatgatttaaattg

SEQ ID NO: 386021 - DNA, 30 bp, Artificial Sequence
  Synthetic oligonucleotide
atccaaatcatatggcgcgcaatgcaattg

SEQ ID NO: 386022 - DNA, 30 bp, Artificial Sequence
  Synthetic oligonucleotide
gcgcttagtttgcctaagcactgtcaattg

SEQ ID NO: 386023 - DNA, 30 bp, Artificial Sequence
  Synthetic oligonucleotide
ttttgtaggtcacaggctgataacgaattg

SEQ ID NO: 386024 - DNA, 30 bp, Artificial Sequence
  Synthetic oligonucleotide
taaccagcccacgatgattgcaccgaattg

SEQ ID NO: 386025 - DNA, 30 bp, Artificial Sequence
  Synthetic oligonucleotide
caaatcaaagtcgcctatagaagcgaattg

SEQ ID NO: 386026 - DNA, 30 bp, Artificial Sequence
  Synthetic oligonucleotide
gctccaatcgatgcgcccgttcgcgaattg

SEQ ID NO: 386027 - DNA, 30 bp, Artificial Sequence
  Synthetic oligonucleotide
taaaagaatagcgccgagagtttcgaattg

SEQ ID NO: 386028 - DNA, 30 bp, Artificial Sequence
  Synthetic oligonucleotide
taaccacgccaacgctcacccagggaattg

SEQ ID NO: 386029 - DNA, 30 bp, Artificial Sequence
  Synthetic oligonucleotide
gaatatgtcacgagtgagataaatgaattg

SEQ ID NO: 386030 - DNA, 30 bp, Artificial Sequence
  Synthetic oligonucleotide
gtgggccggtatgtcatttggtaataattg

SEQ ID NO: 386031 - DNA, 30 bp, Artificial Sequence
  Synthetic oligonucleotide
tttcgacttgcattatgtatttaataattg

SEQ ID NO: 386032 - DNA, 30 bp, Artificial Sequence
  Synthetic oligonucleotide
gtattcaacgatattatcaattgataattg

SEQ ID NO: 386033 - DNA, 30 bp, Artificial Sequence
  Synthetic oligonucleotide
agcttcacagcacaagagggactataattg

SEQ ID NO: 386034 - DNA, 30 bp, Artificial Sequence
  Synthetic oligonucleotide
cgcttagcagcttttctggtactataattg

SEQ ID NO: 386035 - DNA, 30 bp, Artificial Sequence
  Synthetic oligonucleotide
cccgtcggtagattcacttagctataattg

SEQ ID NO: 386036 - DNA, 30 bp, Artificial Sequence
  Synthetic oligonucleotide
tggttccccgccggctgctgcgtataattg

SEQ ID NO: 386037 - DNA, 30 bp, Artificial Sequence
  Synthetic oligonucleotide
gttcggcacacacgataccttttataattg

SEQ ID NO: 386038 - DNA, 30 bp, Artificial Sequence
  Synthetic oligonucleotide
ttcagtgtggaagttcatgcaaactaattg

SEQ ID NO: 386039 - DNA, 30 bp, Artificial Sequence
  Synthetic oligonucleotide
aaaacgcggcgagaactgcagcactaattg

SEQ ID NO: 386040 - DNA, 30 bp, Artificial Sequence
  Synthetic oligonucleotide
cctattatggagactaggctggtctaattg

SEQ ID NO: 386041 - DNA, 30 bp, Artificial Sequence
  Synthetic oligonucleotide
aacgtagttgttaacctacgggggtaattg

SEQ ID NO: 386042 - DNA, 30 bp, Artificial Sequence
  Synthetic oligonucleotide
cgctctaaggaggggctgcacttgtaattg

SEQ ID NO: 386043 - DNA, 30 bp, Artificial Sequence
  Synthetic oligonucleotide
tttgcccatcacgcaaggatggcttaattg

SEQ ID NO: 386044 - DNA, 30 bp, Artificial Sequence
  Synthetic oligonucleotide
gtgctaataggttttccatgtggaacattg

SEQ ID NO: 386045 - DNA, 30 bp, Artificial Sequence
  Synthetic oligonucleotide
tgtttaacatctcgtgacgagataacattg

SEQ ID NO: 386046 - DNA, 30 bp, Artificial Sequence
  Synthetic oligonucleotide
ttgtcgatggagctgtgactttggacattg

SEQ ID NO: 386047 - DNA, 30 bp, Artificial Sequence
  Synthetic oligonucleotide
aatatcttcggttccggacgacatacattg

SEQ ID NO: 386048 - DNA, 30 bp, Artificial Sequence
  Synthetic oligonucleotide
gttttacgcggtgtgtttgcatctacattg

SEQ ID NO: 386049 - DNA, 30 bp, Artificial Sequence
  Synthetic oligonucleotide
tgtattactaatatacttgcatgtacattg

SEQ ID NO: 386050 - DNA, 30 bp, Artificial Sequence
  Synthetic oligonucleotide
tcggcgcgctcgccgtatagaattacattg

SEQ ID NO: 386051 - DNA, 30 bp, Artificial Sequence
  Synthetic oligonucleotide
atagccggtcttccaaactatagaccattg

SEQ ID NO: 386052 - DNA, 30 bp, Artificial Sequence
  Synthetic oligonucleotide
aacaccatatggagcgttccggagccattg

SEQ ID NO: 386053 - DNA, 30 bp, Artificial Sequence
  Synthetic oligonucleotide
cggtaaaggtccaagttgagagcagcattg

SEQ ID NO: 386054 - DNA, 30 bp, Artificial Sequence
  Synthetic oligonucleotide
gacttagtatagtgcgcctagttagcattg

SEQ ID NO: 386055 - DNA, 30 bp, Artificial Sequence
  Synthetic oligonucleotide
tagtttagcggactgaaatcaggcgcattg

SEQ ID NO: 386056 - DNA, 30 bp, Artificial Sequence
  Synthetic oligonucleotide
ttttactgagtaattcgctaaatcgcattg

SEQ ID NO: 386057 - DNA, 30 bp, Artificial Sequence
  Synthetic oligonucleotide
ccggtatatgccccagcatttctcgcattg

SEQ ID NO: 386058 - DNA, 30 bp, Artificial Sequence
  Synthetic oligonucleotide
tagggttctaaacagtgtgagttcgcattg

SEQ ID NO: 386059 - DNA, 30 bp, Artificial Sequence
  Synthetic oligonucleotide
cggaggcttgacacgtgcgatagggcattg

SEQ ID NO: 386060 - DNA, 30 bp, Artificial Sequence
  Synthetic oligonucleotide
aggcgactgtctttctcttgaggtgcattg

SEQ ID NO: 386061 - DNA, 30 bp, Artificial Sequence
  Synthetic oligonucleotide
taggcgtcacgaccagctgggatctcattg

SEQ ID NO: 386062 - DNA, 30 bp, Artificial Sequence
  Synthetic oligonucleotide
aatattcatgggcatttagcattgtcattg

SEQ ID NO: 386063 - DNA, 30 bp, Artificial Sequence
  Synthetic oligonucleotide
cttttcggcagagagattgagataagattg

SEQ ID NO: 386064 - DNA, 30 bp, Artificial Sequence
  Synthetic oligonucleotide
ggccgcatgtgtcccccacacaacagattg

SEQ ID NO: 386065 - DNA, 30 bp, Artificial Sequence
  Synthetic oligonucleotide
gtaaaaattaaaaaactcagtcacagattg

SEQ ID NO: 386066 - DNA, 30 bp, Artificial Sequence
  Synthetic oligonucleotide
atttactactaacgctaacgttgcagattg

SEQ ID NO: 386067 - DNA, 30 bp, Artificial Sequence
  Synthetic oligonucleotide
agattatatctggcatgcggtaggagattg

SEQ ID NO: 386068 - DNA, 30 bp, Artificial Sequence
  Synthetic oligonucleotide
agagaccgtgtcttatgcatgcggagattg

SEQ ID NO: 386069 - DNA, 30 bp, Artificial Sequence
  Synthetic oligonucleotide
atttgatttgatctgtatgtgttgagattg

SEQ ID NO: 386070 - DNA, 30 bp, Artificial Sequence
  Synthetic oligonucleotide
tcatcttgcaagtctggactgactagattg

SEQ ID NO: 386071 - DNA, 30 bp, Artificial Sequence
  Synthetic oligonucleotide
ggctttatctcggcgccaagccttagattg

SEQ ID NO: 386072 - DNA, 30 bp, Artificial Sequence
  Synthetic oligonucleotide
gcggtgtctatcggaattcatgttagattg

SEQ ID NO: 386073 - DNA, 30 bp, Artificial Sequence
  Synthetic oligonucleotide
ggattctaaatcgctgacggttttagattg

SEQ ID NO: 386074 - DNA, 30 bp, Artificial Sequence
  Synthetic oligonucleotide
gaacgtattcttagggtgataaaacgattg

SEQ ID NO: 386075 - DNA, 30 bp, Artificial Sequence
  Synthetic oligonucleotide
ggggtttaagccctgttgactgaacgattg

SEQ ID NO: 386076 - DNA, 30 bp, Artificial Sequence
  Synthetic oligonucleotide
gtattcgtgtcctagagtacagcacgattg

SEQ ID NO: 386077 - DNA, 30 bp, Artificial Sequence
  Synthetic oligonucleotide
attggatctagtaatcagtatggacgattg

SEQ ID NO: 386078 - DNA, 30 bp, Artificial Sequence
  Synthetic oligonucleotide
cgacagatctcaggcacaaggcaccgattg

SEQ ID NO: 386079 - DNA, 30 bp, Artificial Sequence
  Synthetic oligonucleotide
aaatccgtcaaaattattccattccgattg

SEQ ID NO: 386080 - DNA, 30 bp, Artificial Sequence
  Synthetic oligonucleotide
ggagcactagatagtacaagacttcgattg

SEQ ID NO: 386081 - DNA, 30 bp, Artificial Sequence
  Synthetic oligonucleotide
ccggcagtgggcgggctgcggacaggattg

SEQ ID NO: 386082 - DNA, 30 bp, Artificial Sequence
  Synthetic oligonucleotide
cagtgttattcgcaagatcctgccggattg

SEQ ID NO: 386083 - DNA, 30 bp, Artificial Sequence
  Synthetic oligonucleotide
attcatgagatcccgaccgttactggattg

SEQ ID NO: 386084 - DNA, 30 bp, Artificial Sequence
  Synthetic oligonucleotide
gggcccgatttcgggcaactattatgattg

SEQ ID NO: 386085 - DNA, 30 bp, Artificial Sequence
  Synthetic oligonucleotide
ttcgcgctaaaggtatgaatagcctgattg

SEQ ID NO: 386086 - DNA, 30 bp, Artificial Sequence
  Synthetic oligonucleotide
acccgagccatttcggtggtcgaaatattg

SEQ ID NO: 386087 - DNA, 30 bp, Artificial Sequence
  Synthetic oligonucleotide
tccgaacaccggcttaagtgtagaatattg

SEQ ID NO: 386088 - DNA, 30 bp, Artificial Sequence
  Synthetic oligonucleotide
taggaagttagcgtccgcttatacatattg

SEQ ID NO: 386089 - DNA, 30 bp, Artificial Sequence
  Synthetic oligonucleotide
atcatcatggagtgctgagattatatattg

SEQ ID NO: 386090 - DNA, 30 bp, Artificial Sequence
  Synthetic oligonucleotide
agattaaaccgtttaacccgtagtatattg

SEQ ID NO: 386091 - DNA, 30 bp, Artificial Sequence
  Synthetic oligonucleotide
tctattattttgtaattaggctgtatattg

SEQ ID NO: 386092 - DNA, 30 bp, Artificial Sequence
  Synthetic oligonucleotide
gtagatgctgtaagtggttgatttatattg

SEQ ID NO: 386093 - DNA, 30 bp, Artificial Sequence
  Synthetic oligonucleotide
aatcgttattctcacaactctacactattg

SEQ ID NO: 386094 - DNA, 30 bp, Artificial Sequence
  Synthetic oligonucleotide
tcggtacacattatgtgagaaagactattg

SEQ ID NO: 386095 - DNA, 30 bp, Artificial Sequence
  Synthetic oligonucleotide
gtatagaggaccgttcctctcttactattg

SEQ ID NO: 386096 - DNA, 30 bp, Artificial Sequence
  Synthetic oligonucleotide
aagcctcaataacgcattatacccctattg

SEQ ID NO: 386097 - DNA, 30 bp, Artificial Sequence
  Synthetic oligonucleotide
ttccacatacaggggattaacagcctattg

SEQ ID NO: 386098 - DNA, 30 bp, Artificial Sequence
  Synthetic oligonucleotide
ctgtttccgctattctatataaggctattg

SEQ ID NO: 386099 - DNA, 30 bp, Artificial Sequence
  Synthetic oligonucleotide
aagcgctgacgccatgcttcaatgctattg

SEQ ID NO: 386100 - DNA, 30 bp, Artificial Sequence
  Synthetic oligonucleotide
taaatattaaagagggccgtactgctattg

SEQ ID NO: 386101 - DNA, 30 bp, Artificial Sequence
  Synthetic oligonucleotide
tcggccatactcccagttggcagtctattg

SEQ ID NO: 386102 - DNA, 30 bp, Artificial Sequence
  Synthetic oligonucleotide
gtctgttacgggtacaacatgcttctattg

SEQ ID NO: 386103 - DNA, 30 bp, Artificial Sequence
  Synthetic oligonucleotide
ttaaaaacattagtgagtggagttctattg

SEQ ID NO: 386104 - DNA, 30 bp, Artificial Sequence
  Synthetic oligonucleotide
ggcccttggatgaggtctaatgttctattg

SEQ ID NO: 386105 - DNA, 30 bp, Artificial Sequence
  Synthetic oligonucleotide
tactttagatggactataataagcgtattg

SEQ ID NO: 386106 - DNA, 30 bp, Artificial Sequence
  Synthetic oligonucleotide
ttcacgaacctggcttttagatgcgtattg

SEQ ID NO: 386107 - DNA, 30 bp, Artificial Sequence
  Synthetic oligonucleotide
gacccgcgtggggtcgaagattatgtattg

SEQ ID NO: 386108 - DNA, 30 bp, Artificial Sequence
  Synthetic oligonucleotide
aatgtttaccgagatagatgttctgtattg

SEQ ID NO: 386109 - DNA, 30 bp, Artificial Sequence
  Synthetic oligonucleotide
agatggcctatgggctgtgtgagattattg

SEQ ID NO: 386110 - DNA, 30 bp, Artificial Sequence
  Synthetic oligonucleotide
ggcgccctagtggtagtcttatgattattg

SEQ ID NO: 386111 - DNA, 30 bp, Artificial Sequence
  Synthetic oligonucleotide
acctcaagggtggacgcgggctgattattg

SEQ ID NO: 386112 - DNA, 30 bp, Artificial Sequence
  Synthetic oligonucleotide
aaagctctatacctgttccgaaacttattg

SEQ ID NO: 386113 - DNA, 30 bp, Artificial Sequence
  Synthetic oligonucleotide
tttcgggtgagaactccagactacttattg

SEQ ID NO: 386114 - DNA, 30 bp, Artificial Sequence
  Synthetic oligonucleotide
aattaccggtacggtgttatcttcttattg

SEQ ID NO: 386115 - DNA, 30 bp, Artificial Sequence
  Synthetic oligonucleotide
atcccgaaatacaggggtgaagagttattg

SEQ ID NO: 386116 - DNA, 30 bp, Artificial Sequence
  Synthetic oligonucleotide
ggagcgacccaatcgctcggtgtgttattg

SEQ ID NO: 386117 - DNA, 30 bp, Artificial Sequence
  Synthetic oligonucleotide
gcttgagagacacaagtttcaaatttattg

SEQ ID NO: 386118 - DNA, 30 bp, Artificial Sequence
  Synthetic oligonucleotide
agacacgagtgatatccgtttcatttattg

SEQ ID NO: 386119 - DNA, 30 bp, Artificial Sequence
  Synthetic oligonucleotide
tcaggttcttctgatctattcgtaaacttg

SEQ ID NO: 386120 - DNA, 30 bp, Artificial Sequence
  Synthetic oligonucleotide
catgcgataagtaacgcgagctccaacttg

SEQ ID NO: 386121 - DNA, 30 bp, Artificial Sequence
  Synthetic oligonucleotide
cattagcactgctggcaccagtagaacttg

SEQ ID NO: 386122 - DNA, 30 bp, Artificial Sequence
  Synthetic oligonucleotide
gttcgtcgccagagtaggcgaagtaacttg

SEQ ID NO: 386123 - DNA, 30 bp, Artificial Sequence
  Synthetic oligonucleotide
aggttgtttcgaccagccttttttaacttg

SEQ ID NO: 386124 - DNA, 30 bp, Artificial Sequence
  Synthetic oligonucleotide
atttcggtaatctccaggctcaaacacttg

SEQ ID NO: 386125 - DNA, 30 bp, Artificial Sequence
  Synthetic oligonucleotide
taccgatctccgtataaagatggacacttg

SEQ ID NO: 386126 - DNA, 30 bp, Artificial Sequence
  Synthetic oligonucleotide
tttctcctcggagggtagaaatttcacttg

SEQ ID NO: 386127 - DNA, 30 bp, Artificial Sequence
  Synthetic oligonucleotide
tgtcgctcaaaatggacggaggcagacttg

SEQ ID NO: 386128 - DNA, 30 bp, Artificial Sequence
  Synthetic oligonucleotide
ttgctcgaccagttctgcgttcgagacttg

SEQ ID NO: 386129 - DNA, 30 bp, Artificial Sequence
  Synthetic oligonucleotide
gcatagcgtgtcttccgtactggagacttg

SEQ ID NO: 386130 - DNA, 31 bp, Artificial Sequence
  Synthetic oligonucleotide
attaagagagccgtcccatcatttagacttg

SEQ ID NO: 386131 - DNA, 30 bp, Artificial Sequence
  Synthetic oligonucleotide
gaatatcgcagtgcaggtatttctgacttg

SEQ ID NO: 386132 - DNA, 30 bp, Artificial Sequence
  Synthetic oligonucleotide
aatagctcggtgtcccggctgcactacttg

SEQ ID NO: 386133 - DNA, 30 bp, Artificial Sequence
  Synthetic oligonucleotide
gcattattatatggtacgggcctctacttg

SEQ ID NO: 386134 - DNA, 30 bp, Artificial Sequence
  Synthetic oligonucleotide
catttagctcgatgcagtaaccaaaccttg

SEQ ID NO: 386135 - DNA, 30 bp, Artificial Sequence
  Synthetic oligonucleotide
cttcctagcgggatcaggtccggcaccttg

SEQ ID NO: 386136 - DNA, 30 bp, Artificial Sequence
  Synthetic oligonucleotide
ggctactagctcaaggcagaaggacccttg

SEQ ID NO: 386137 - DNA, 30 bp, Artificial Sequence
  Synthetic oligonucleotide
cctcgcaggcaaaaagttataatacccttg

SEQ ID NO: 386138 - DNA, 30 bp, Artificial Sequence
  Synthetic oligonucleotide
gccagcatagttaaggtacttaagcccttg

SEQ ID NO: 386139 - DNA, 30 bp, Artificial Sequence
  Synthetic oligonucleotide
tatacgggcacctattttgaggaagccttg

SEQ ID NO: 386140 - DNA, 30 bp, Artificial Sequence
  Synthetic oligonucleotide
tgggttaatgttaggctctgataagccttg

SEQ ID NO: 386141 - DNA, 30 bp, Artificial Sequence
  Synthetic oligonucleotide
atattagtctttattttaagctcggccttg

SEQ ID NO: 386142 - DNA, 30 bp, Artificial Sequence
  Synthetic oligonucleotide
cctgggcaatcaatattaagttcggccttg

SEQ ID NO: 386143 - DNA, 30 bp, Artificial Sequence
  Synthetic oligonucleotide
taaggcagggacccaatagggtatgccttg

SEQ ID NO: 386144 - DNA, 30 bp, Artificial Sequence
  Synthetic oligonucleotide
gactatttgcaactaactttctcatccttg

SEQ ID NO: 386145 - DNA, 30 bp, Artificial Sequence
  Synthetic oligonucleotide
ggaatatgcatattcgcgtgattatccttg

SEQ ID NO: 386146 - DNA, 30 bp, Artificial Sequence
  Synthetic oligonucleotide
gtacgtgacaccctagaagcaacctccttg

SEQ ID NO: 386147 - DNA, 30 bp, Artificial Sequence
  Synthetic oligonucleotide
catatgagcctttaggtttttcagtccttg

SEQ ID NO: 386148 - DNA, 30 bp, Artificial Sequence
  Synthetic oligonucleotide
gtaagcggatcttttatattagagtccttg

SEQ ID NO: 386149 - DNA, 30 bp, Artificial Sequence
  Synthetic oligonucleotide
tacacagcgagcatcagaactgcgtccttg

SEQ ID NO: 386150 - DNA, 30 bp, Artificial Sequence
  Synthetic oligonucleotide
tggggatagacccagggtaaaaggtccttg

SEQ ID NO: 386151 - DNA, 30 bp, Artificial Sequence
  Synthetic oligonucleotide
ttaacagtgtaagcgaagtgactcagcttg

SEQ ID NO: 386152 - DNA, 30 bp, Artificial Sequence
  Synthetic oligonucleotide
tcaatttcaccggtaaacaggctgagcttg

SEQ ID NO: 386153 - DNA, 30 bp, Artificial Sequence
  Synthetic oligonucleotide
aagaaccgttgggtccgattacatagcttg

SEQ ID NO: 386154 - DNA, 28 bp, Artificial Sequence
  Synthetic oligonucleotide
ttcacgactaaattctcgtgaacgcttg

SEQ ID NO: 386155 - DNA, 30 bp, Artificial Sequence
  Synthetic oligonucleotide
tttgacatcaaagctacccctggacgcttg

SEQ ID NO: 386156 - DNA, 30 bp, Artificial Sequence
  Synthetic oligonucleotide
tcggttccccacaatttttagccccgcttg

SEQ ID NO: 386157 - DNA, 30 bp, Artificial Sequence
  Synthetic oligonucleotide
ggaggtatcagacgaatgcaggtccgcttg

SEQ ID NO: 386158 - DNA, 30 bp, Artificial Sequence
  Synthetic oligonucleotide
gtgagctcccgtcagattgagtctcgcttg

SEQ ID NO: 386159 - DNA, 30 bp, Artificial Sequence
  Synthetic oligonucleotide
caaaagtctaatgagtgaaactcaggcttg

SEQ ID NO: 386160 - DNA, 30 bp, Artificial Sequence
  Synthetic oligonucleotide
cagaggacttttatattgaagataggcttg

SEQ ID NO: 386161 - DNA, 30 bp, Artificial Sequence
  Synthetic oligonucleotide
aaaatgattctgatgagagcagacggcttg

SEQ ID NO: 386162 - DNA, 30 bp, Artificial Sequence
  Synthetic oligonucleotide
tcttgattgcacagtccacgggatggcttg

SEQ ID NO: 386163 - DNA, 30 bp, Artificial Sequence
  Synthetic oligonucleotide
actgagtcatgattcgactgttatggcttg

SEQ ID NO: 386164 - DNA, 30 bp, Artificial Sequence
  Synthetic oligonucleotide
tcgcataccccggtgcgttctcactgcttg

SEQ ID NO: 386165 - DNA, 30 bp, Artificial Sequence
  Synthetic oligonucleotide
aagtccgacaagaacgcaagcgactgcttg

SEQ ID NO: 386166 - DNA, 30 bp, Artificial Sequence
  Synthetic oligonucleotide
ggcatgtccatatttagaaatgggtgcttg

SEQ ID NO: 386167 - DNA, 30 bp, Artificial Sequence
  Synthetic oligonucleotide
ttgccccacaggaactggtaagattgcttg

SEQ ID NO: 386168 - DNA, 30 bp, Artificial Sequence
  Synthetic oligonucleotide
atcggatggcctgagggaaggggttgcttg

SEQ ID NO: 386169 - DNA, 30 bp, Artificial Sequence
  Synthetic oligonucleotide
gagtcaagatcggcgtaatgttgaatcttg

SEQ ID NO: 386170 - DNA, 30 bp, Artificial Sequence
  Synthetic oligonucleotide
gcatgttgtttattcaaagcgctaatcttg

SEQ ID NO: 386171 - DNA, 30 bp, Artificial Sequence
  Synthetic oligonucleotide
agggtactagtatatacgtgttatatcttg

SEQ ID NO: 386172 - DNA, 30 bp, Artificial Sequence
  Synthetic oligonucleotide
agtgtggtcccatattgaatacaactcttg

SEQ ID NO: 386173 - DNA, 30 bp, Artificial Sequence
  Synthetic oligonucleotide
aaatatcactgagtgccaaggtggctcttg

SEQ ID NO: 386174 - DNA, 30 bp, Artificial Sequence
  Synthetic oligonucleotide
ttgtttttttcattaccaattaatctcttg

SEQ ID NO: 386175 - DNA, 30 bp, Artificial Sequence
  Synthetic oligonucleotide
aaagtatacgaacgttgttttagtctcttg

SEQ ID NO: 386176 - DNA, 30 bp, Artificial Sequence
  Synthetic oligonucleotide
gtatactgtgacgcgcatctacgtctcttg

SEQ ID NO: 386177 - DNA, 30 bp, Artificial Sequence
  Synthetic oligonucleotide
ccttgatttgaagattcctttggtctcttg

SEQ ID NO: 386178 - DNA, 30 bp, Artificial Sequence
  Synthetic oligonucleotide
tgcgagtcgcaagatgcacaccttctcttg

SEQ ID NO: 386179 - DNA, 30 bp, Artificial Sequence
  Synthetic oligonucleotide
gcccgccgtccaggccccccaagagtcttg

SEQ ID NO: 386180 - DNA, 30 bp, Artificial Sequence
  Synthetic oligonucleotide
aaattaggtggcagaggctttcgtgtcttg

SEQ ID NO: 386181 - DNA, 30 bp, Artificial Sequence
  Synthetic oligonucleotide
gtaagctcggagtttgctaccaaattcttg

SEQ ID NO: 386182 - DNA, 30 bp, Artificial Sequence
  Synthetic oligonucleotide
atagactattgtccttccattatattcttg

SEQ ID NO: 386183 - DNA, 30 bp, Artificial Sequence
  Synthetic oligonucleotide
agaattcaatcgtcaaatttgaggttcttg

SEQ ID NO: 386184 - DNA, 31 bp, Artificial Sequence
  Synthetic oligonucleotide
gctctaagccgtgataaagcacggtttcttg

SEQ ID NO: 386185 - DNA, 30 bp, Artificial Sequence
  Synthetic oligonucleotide
gctgtcaagtacttcatataagttttcttg

SEQ ID NO: 386186 - DNA, 30 bp, Artificial Sequence
  Synthetic oligonucleotide
ctgcccgcggcaggggggtgggttttcttg

SEQ ID NO: 386187 - DNA, 30 bp, Artificial Sequence
  Synthetic oligonucleotide
aatacgcgcaatgtacacaaagtcaagttg

SEQ ID NO: 386188 - DNA, 30 bp, Artificial Sequence
  Synthetic oligonucleotide
cctagcccactagcggagcgggggaagttg

SEQ ID NO: 386189 - DNA, 30 bp, Artificial Sequence
  Synthetic oligonucleotide
tgttacttcatgtatcggatcatacagttg

SEQ ID NO: 386190 - DNA, 30 bp, Artificial Sequence
  Synthetic oligonucleotide
tgacttggctattatcacgagctacagttg

SEQ ID NO: 386191 - DNA, 30 bp, Artificial Sequence
  Synthetic oligonucleotide
ttccttgacggatttcttcagttccagttg

SEQ ID NO: 386192 - DNA, 30 bp, Artificial Sequence
  Synthetic oligonucleotide
tattcatgacacttacctgccacgcagttg

SEQ ID NO: 386193 - DNA, 30 bp, Artificial Sequence
  Synthetic oligonucleotide
cacctcccagcgtcagctagtgcgcagttg

SEQ ID NO: 386194 - DNA, 30 bp, Artificial Sequence
  Synthetic oligonucleotide
gtatttccaataacgggagccactcagttg

SEQ ID NO: 386195 - DNA, 30 bp, Artificial Sequence
  Synthetic oligonucleotide
caaatttaccgagcccaactagaagagttg

SEQ ID NO: 386196 - DNA, 30 bp, Artificial Sequence
  Synthetic oligonucleotide
aaaacatgttcacgaaacgctctagagttg

SEQ ID NO: 386197 - DNA, 30 bp, Artificial Sequence
  Synthetic oligonucleotide
cacgcgggcattctagctgtagccgagttg

SEQ ID NO: 386198 - DNA, 30 bp, Artificial Sequence
  Synthetic oligonucleotide
gtagggtaaaaccctatgtatatggagttg

SEQ ID NO: 386199 - DNA, 30 bp, Artificial Sequence
  Synthetic oligonucleotide
aattgttgaacaaactgaccgtgtgagttg

SEQ ID NO: 386200 - DNA, 30 bp, Artificial Sequence
  Synthetic oligonucleotide
atttaaaggtataactagatctaatagttg

SEQ ID NO: 386201 - DNA, 30 bp, Artificial Sequence
  Synthetic oligonucleotide
ctgcataaggaattctttactcgatagttg

SEQ ID NO: 386202 - DNA, 30 bp, Artificial Sequence
  Synthetic oligonucleotide
gcaagctcagcgcataggataacctagttg

SEQ ID NO: 386203 - DNA, 30 bp, Artificial Sequence
  Synthetic oligonucleotide
gaacagatcccttcttgattcccgtagttg

SEQ ID NO: 386204 - DNA, 31 bp, Artificial Sequence
  Synthetic oligonucleotide
ataagcgaggtttgtggacgtccgttagttg

SEQ ID NO: 386205 - DNA, 29 bp, Artificial Sequence
  Synthetic oligonucleotide
ttagtgttagacatgggaggggttagttg

SEQ ID NO: 386206 - DNA, 30 bp, Artificial Sequence
  Synthetic oligonucleotide
caactttgggaccacaacaattcaacgttg

SEQ ID NO: 386207 - DNA, 30 bp, Artificial Sequence
  Synthetic oligonucleotide
aagtcatttgagggggctctccacacgttg

SEQ ID NO: 386208 - DNA, 30 bp, Artificial Sequence
  Synthetic oligonucleotide
tccgactgcgaaagtagtccggacacgttg

SEQ ID NO: 386209 - DNA, 30 bp, Artificial Sequence
  Synthetic oligonucleotide
gggtccgacgagcaagtcttttacacgttg

SEQ ID NO: 386210 - DNA, 30 bp, Artificial Sequence
  Synthetic oligonucleotide
caatttgtgggaaacggtcattggacgttg

SEQ ID NO: 386211 - DNA, 30 bp, Artificial Sequence
  Synthetic oligonucleotide
ttcatgtttatctcggaatataaaccgttg

SEQ ID NO: 386212 - DNA, 30 bp, Artificial Sequence
  Synthetic oligonucleotide
cataagtcatcctgggattactcaccgttg

SEQ ID NO: 386213 - DNA, 30 bp, Artificial Sequence
  Synthetic oligonucleotide
atagacgtctaggggtcttacataccgttg

SEQ ID NO: 386214 - DNA, 30 bp, Artificial Sequence
  Synthetic oligonucleotide
aaatgtctatgcgaacaaaaatccccgttg

SEQ ID NO: 386215 - DNA, 29 bp, Artificial Sequence
  Synthetic oligonucleotide
atacaaagaggtcaaggagttgcccgttg

SEQ ID NO: 386216 - DNA, 30 bp, Artificial Sequence
  Synthetic oligonucleotide
ttcagcgatagacactggaatttcccgttg

SEQ ID NO: 386217 - DNA, 30 bp, Artificial Sequence
  Synthetic oligonucleotide
cacaggcgcttaagaccacagccgccgttg

SEQ ID NO: 386218 - DNA, 30 bp, Artificial Sequence
  Synthetic oligonucleotide
agacgcaccgttattcaagcggggccgttg

SEQ ID NO: 386219 - DNA, 30 bp, Artificial Sequence
  Synthetic oligonucleotide
tcaactcgggtacttcaattgtggccgttg

SEQ ID NO: 386220 - DNA, 30 bp, Artificial Sequence
  Synthetic oligonucleotide
aatcatggatgcgcgggttctcttccgttg

SEQ ID NO: 386221 - DNA, 30 bp, Artificial Sequence
  Synthetic oligonucleotide
gtggtgggtctggctaaagacctcgcgttg

SEQ ID NO: 386222 - DNA, 30 bp, Artificial Sequence
  Synthetic oligonucleotide
ggccaggacccgtgcagggtaggggcgttg

SEQ ID NO: 386223 - DNA, 30 bp, Artificial Sequence
  Synthetic oligonucleotide
agcgtagaacgctctcgcgtccttgcgttg

SEQ ID NO: 386224 - DNA, 30 bp, Artificial Sequence
  Synthetic oligonucleotide
gagtgagatgggcgtaggacggttgcgttg

SEQ ID NO: 386225 - DNA, 30 bp, Artificial Sequence
  Synthetic oligonucleotide
tattattgggttaagtcaacagaatcgttg

SEQ ID NO: 386226 - DNA, 30 bp, Artificial Sequence
  Synthetic oligonucleotide
tactctgcacgtttacgtctaatatcgttg

SEQ ID NO: 386227 - DNA, 30 bp, Artificial Sequence
  Synthetic oligonucleotide
cgccctggtaccacattcgcgccaaggttg

SEQ ID NO: 386228 - DNA, 30 bp, Artificial Sequence
  Synthetic oligonucleotide
gatgttcacgatttgtccgggggaaggttg

SEQ ID NO: 386229 - DNA, 30 bp, Artificial Sequence
  Synthetic oligonucleotide
ttttatagtcgataagtcagctccaggttg

SEQ ID NO: 386230 - DNA, 30 bp, Artificial Sequence
  Synthetic oligonucleotide
accaaaggcccatgggtaatatataggttg

SEQ ID NO: 386231 - DNA, 30 bp, Artificial Sequence
  Synthetic oligonucleotide
taaaggcccataacagacctttataggttg

SEQ ID NO: 386232 - DNA, 30 bp, Artificial Sequence
  Synthetic oligonucleotide
gctgcagtaaagctgagtactgctaggttg

SEQ ID NO: 386233 - DNA, 30 bp, Artificial Sequence
  Synthetic oligonucleotide
atcacagtagtacttaggtgatctaggttg

SEQ ID NO: 386234 - DNA, 30 bp, Artificial Sequence
  Synthetic oligonucleotide
tacacataaaccatcggacccttacggttg

SEQ ID NO: 386235 - DNA, 30 bp, Artificial Sequence
  Synthetic oligonucleotide
gcgtgaccgttttcgtggctgagccggttg

SEQ ID NO: 386236 - DNA, 30 bp, Artificial Sequence
  Synthetic oligonucleotide
acgcaacgccctaatactcgattgcggttg

SEQ ID NO: 386237 - DNA, 30 bp, Artificial Sequence
  Synthetic oligonucleotide
gcttcgaacaaggttttttatactcggttg

SEQ ID NO: 386238 - DNA, 30 bp, Artificial Sequence
  Synthetic oligonucleotide
gacttacaactaggagttcgatacgggttg

SEQ ID NO: 386239 - DNA, 30 bp, Artificial Sequence
  Synthetic oligonucleotide
tcgtggcaacggccactacacaccgggttg

SEQ ID NO: 386240 - DNA, 30 bp, Artificial Sequence
  Synthetic oligonucleotide
gcaacaaattactgtcaccgcgtcgggttg

SEQ ID NO: 386241 - DNA, 30 bp, Artificial Sequence
  Synthetic oligonucleotide
atttcaattgacagggtctagaaggggttg

SEQ ID NO: 386242 - DNA, 30 bp, Artificial Sequence
  Synthetic oligonucleotide
ttttgcgcggcaaagacgggaagggggttg

SEQ ID NO: 386243 - DNA, 30 bp, Artificial Sequence
  Synthetic oligonucleotide
gactcaacggtgtaaataggctgggggttg

SEQ ID NO: 386244 - DNA, 30 bp, Artificial Sequence
  Synthetic oligonucleotide
agtttgcttctaatagatagtgtggggttg

SEQ ID NO: 386245 - DNA, 30 bp, Artificial Sequence
  Synthetic oligonucleotide
taaaggtacagtcatatgatagatgggttg

SEQ ID NO: 386246 - DNA, 30 bp, Artificial Sequence
  Synthetic oligonucleotide
agggttaagtggcagggctctggatggttg

SEQ ID NO: 386247 - DNA, 30 bp, Artificial Sequence
  Synthetic oligonucleotide
gagaaactctatttagtagcggtatggttg

SEQ ID NO: 386248 - DNA, 29 bp, Artificial Sequence
  Synthetic oligonucleotide
cagcgtcgacgctcgggacgtagtggttg

SEQ ID NO: 386249 - DNA, 30 bp, Artificial Sequence
  Synthetic oligonucleotide
tcggctgtttattaaaggaacgcttggttg

SEQ ID NO: 386250 - DNA, 30 bp, Artificial Sequence
  Synthetic oligonucleotide
cccgtgcagggcacaaagagcctaatgttg

SEQ ID NO: 386251 - DNA, 30 bp, Artificial Sequence
  Synthetic oligonucleotide
caggcctatatccacttcaagcggatgttg

SEQ ID NO: 386252 - DNA, 30 bp, Artificial Sequence
  Synthetic oligonucleotide
agctgctaattgctaaaatctgttatgttg

SEQ ID NO: 386253 - DNA, 30 bp, Artificial Sequence
  Synthetic oligonucleotide
accatccctttacgtaaagtatcgctgttg

SEQ ID NO: 386254 - DNA, 30 bp, Artificial Sequence
  Synthetic oligonucleotide
atcacattataggcccagagtgtgctgttg

SEQ ID NO: 386255 - DNA, 28 bp, Artificial Sequence
  Synthetic oligonucleotide
ggggattgttcgctgacaacgtctgttg

SEQ ID NO: 386256 - DNA, 30 bp, Artificial Sequence
  Synthetic oligonucleotide
attgattgtcaaggcttgcgtccagtgttg

SEQ ID NO: 386257 - DNA, 30 bp, Artificial Sequence
  Synthetic oligonucleotide
atcctaacggtgtttctaatgttagtgttg

SEQ ID NO: 386258 - DNA, 30 bp, Artificial Sequence
  Synthetic oligonucleotide
taaccgcagcaaaagatacgccccgtgttg

SEQ ID NO: 386259 - DNA, 30 bp, Artificial Sequence
  Synthetic oligonucleotide
attgcgtaagggagtacatccctcgtgttg

SEQ ID NO: 386260 - DNA, 30 bp, Artificial Sequence
  Synthetic oligonucleotide
ttctaagagtggcctctacgcatggtgttg

SEQ ID NO: 386261 - DNA, 30 bp, Artificial Sequence
  Synthetic oligonucleotide
tcaattgaggtcaaggtaagtaatgtgttg

SEQ ID NO: 386262 - DNA, 30 bp, Artificial Sequence
  Synthetic oligonucleotide
tacatttggacacaacacgtccatgtgttg

SEQ ID NO: 386263 - DNA, 30 bp, Artificial Sequence
  Synthetic oligonucleotide
cgggtttgggttacctgatccgctgtgttg

SEQ ID NO: 386264 - DNA, 30 bp, Artificial Sequence
  Synthetic oligonucleotide
attatacaaaccgggaaacgttttgtgttg

SEQ ID NO: 386265 - DNA, 30 bp, Artificial Sequence
  Synthetic oligonucleotide
ggtctcaaggtttgacgcctgttattgttg

SEQ ID NO: 386266 - DNA, 30 bp, Artificial Sequence
  Synthetic oligonucleotide
gccgcggctcgactggagcccgaaaatttg

SEQ ID NO: 386267 - DNA, 30 bp, Artificial Sequence
  Synthetic oligonucleotide
ggggtgttgtagttgataacgagaaatttg

SEQ ID NO: 386268 - DNA, 30 bp, Artificial Sequence
  Synthetic oligonucleotide
tgtggtttacggaaatgtaacggcaatttg

SEQ ID NO: 386269 - DNA, 30 bp, Artificial Sequence
  Synthetic oligonucleotide
gcattgcaaactgtgagacgtctcaatttg

SEQ ID NO: 386270 - DNA, 30 bp, Artificial Sequence
  Synthetic oligonucleotide
gagatcttatttagtgtctatgggaatttg

SEQ ID NO: 386271 - DNA, 30 bp, Artificial Sequence
  Synthetic oligonucleotide
gccaaaacgctaccgtgcggcttgaatttg

SEQ ID NO: 386272 - DNA, 30 bp, Artificial Sequence
  Synthetic oligonucleotide
tggtcaaagctgtcaagagcggataatttg

SEQ ID NO: 386273 - DNA, 30 bp, Artificial Sequence
  Synthetic oligonucleotide
atcgactcccaacctagatcaccccatttg

SEQ ID NO: 386274 - DNA, 30 bp, Artificial Sequence
  Synthetic oligonucleotide
ggctttcagtctctcgccacctagcatttg

SEQ ID NO: 386275 - DNA, 30 bp, Artificial Sequence
  Synthetic oligonucleotide
gcaaacgccaacaactccctgatgcatttg

SEQ ID NO: 386276 - DNA, 30 bp, Artificial Sequence
  Synthetic oligonucleotide
tcctagttaccggggccttctattcatttg

SEQ ID NO: 386277 - DNA, 30 bp, Artificial Sequence
  Synthetic oligonucleotide
ctgagttaaaatgttcgagctccagatttg

SEQ ID NO: 386278 - DNA, 30 bp, Artificial Sequence
  Synthetic oligonucleotide
ttccgttctatataacccagaatcgatttg

SEQ ID NO: 386279 - DNA, 30 bp, Artificial Sequence
  Synthetic oligonucleotide
cgtataaaaataatgtcggacacggatttg

SEQ ID NO: 386280 - DNA, 30 bp, Artificial Sequence
  Synthetic oligonucleotide
cggccgaccgcagtcgttaaggcggatttg

SEQ ID NO: 386281 - DNA, 30 bp, Artificial Sequence
  Synthetic oligonucleotide
acaagtggctgtgggtatgactctgatttg

SEQ ID NO: 386282 - DNA, 30 bp, Artificial Sequence
  Synthetic oligonucleotide
atacacctcacaacttgtcagtgtgatttg

SEQ ID NO: 386283 - DNA, 30 bp, Artificial Sequence
  Synthetic oligonucleotide
taaactcaaacgacaacggtgtgctatttg

SEQ ID NO: 386284 - DNA, 30 bp, Artificial Sequence
  Synthetic oligonucleotide
ggataatgtattggaggtttgctttatttg

SEQ ID NO: 386285 - DNA, 30 bp, Artificial Sequence
  Synthetic oligonucleotide
aaggtcgtgtgtcgggcactcttgactttg

SEQ ID NO: 386286 - DNA, 30 bp, Artificial Sequence
  Synthetic oligonucleotide
gaatgacaggtccaggcagagagtactttg

SEQ ID NO: 386287 - DNA, 30 bp, Artificial Sequence
  Synthetic oligonucleotide
aatctagggcaaacaaaaatatttactttg

SEQ ID NO: 386288 - DNA, 30 bp, Artificial Sequence
  Synthetic oligonucleotide
tactacctgctcgcgttgaaccgacctttg

SEQ ID NO: 386289 - DNA, 30 bp, Artificial Sequence
  Synthetic oligonucleotide
aaattgacaattcactacacccgacctttg

SEQ ID NO: 386290 - DNA, 30 bp, Artificial Sequence
  Synthetic oligonucleotide
aagcatatctaaagccacgatacccctttg

SEQ ID NO: 386291 - DNA, 30 bp, Artificial Sequence
  Synthetic oligonucleotide
gcggaaatcaggtgcttatcgacgcctttg

SEQ ID NO: 386292 - DNA, 30 bp, Artificial Sequence
  Synthetic oligonucleotide
tgaaaagtgactggtttgtcttggcctttg

SEQ ID NO: 386293 - DNA, 30 bp, Artificial Sequence
  Synthetic oligonucleotide
gcgatagaggctcttattttagctcctttg

SEQ ID NO: 386294 - DNA, 30 bp, Artificial Sequence
  Synthetic oligonucleotide
ctgagaagactatgtagtctatctcctttg

SEQ ID NO: 386295 - DNA, 30 bp, Artificial Sequence
  Synthetic oligonucleotide
aagcccaataaaccgcatgatggtcctttg

SEQ ID NO: 386296 - DNA, 30 bp, Artificial Sequence
  Synthetic oligonucleotide
ggttagttctcgtatgtgaggtgtcctttg

SEQ ID NO: 386297 - DNA, 30 bp, Artificial Sequence
  Synthetic oligonucleotide
aaatattacatggcaataggcaaagctttg

SEQ ID NO: 386298 - DNA, 30 bp, Artificial Sequence
  Synthetic oligonucleotide
aagtaccaccattgcctcggcagagctttg

SEQ ID NO: 386299 - DNA, 30 bp, Artificial Sequence
  Synthetic oligonucleotide
taaagatgatatgttgactgcatagctttg

SEQ ID NO: 386300 - DNA, 30 bp, Artificial Sequence
  Synthetic oligonucleotide
tgctggaggtggctccgagacatcgctttg

SEQ ID NO: 386301 - DNA, 30 bp, Artificial Sequence
  Synthetic oligonucleotide
gctttagggcacgggtcactgttggctttg

SEQ ID NO: 386302 - DNA, 30 bp, Artificial Sequence
  Synthetic oligonucleotide
tgctttatactcggttcgtatcatgctttg

SEQ ID NO: 386303 - DNA, 30 bp, Artificial Sequence
  Synthetic oligonucleotide
ccaaatgggacccctttagggaaatctttg

SEQ ID NO: 386304 - DNA, 30 bp, Artificial Sequence
  Synthetic oligonucleotide
cggcaattaatgaggcccccagtctctttg

SEQ ID NO: 386305 - DNA, 30 bp, Artificial Sequence
  Synthetic oligonucleotide
tctgatttttaaatgtcaccatattctttg

SEQ ID NO: 386306 - DNA, 30 bp, Artificial Sequence
  Synthetic oligonucleotide
tggatattctttgactgaggggtttctttg

SEQ ID NO: 386307 - DNA, 30 bp, Artificial Sequence
  Synthetic oligonucleotide
aaacctaccgaagtgtgtgtcaaaagtttg

SEQ ID NO: 386308 - DNA, 30 bp, Artificial Sequence
  Synthetic oligonucleotide
tgcaggtatttctccgcaaactcaagtttg

SEQ ID NO: 386309 - DNA, 30 bp, Artificial Sequence
  Synthetic oligonucleotide
gaaaaggcagcacaggacagttcaagtttg

SEQ ID NO: 386310 - DNA, 30 bp, Artificial Sequence
  Synthetic oligonucleotide
gagttaacgtcggtactacgatgaagtttg

SEQ ID NO: 386311 - DNA, 30 bp, Artificial Sequence
  Synthetic oligonucleotide
cgaacgcgctgtcaacgtatatacagtttg

SEQ ID NO: 386312 - DNA, 30 bp, Artificial Sequence
  Synthetic oligonucleotide
gcctacagatagtgggcattccgcagtttg

SEQ ID NO: 386313 - DNA, 30 bp, Artificial Sequence
  Synthetic oligonucleotide
actacggagtcgtatcagttgtatagtttg

SEQ ID NO: 386314 - DNA, 30 bp, Artificial Sequence
  Synthetic oligonucleotide
tgctatagaaaattatctaatggtagtttg

SEQ ID NO: 386315 - DNA, 30 bp, Artificial Sequence
  Synthetic oligonucleotide
cgcttagtcgacgggtcaaaccgacgtttg

SEQ ID NO: 386316 - DNA, 30 bp, Artificial Sequence
  Synthetic oligonucleotide
agtttccaattacttggggcactacgtttg

SEQ ID NO: 386317 - DNA, 30 bp, Artificial Sequence
  Synthetic oligonucleotide
aggaatatattccaaacgtatgtccgtttg

SEQ ID NO: 386318 - DNA, 30 bp, Artificial Sequence
  Synthetic oligonucleotide
atatgatgtcaagtgccaagattccgtttg

SEQ ID NO: 386319 - DNA, 30 bp, Artificial Sequence
  Synthetic oligonucleotide
cacaaaggacatccgcaatttttccgtttg

SEQ ID NO: 386320 - DNA, 30 bp, Artificial Sequence
  Synthetic oligonucleotide
caccaggcagcgctgtgtggctagcgtttg

SEQ ID NO: 386321 - DNA, 30 bp, Artificial Sequence
  Synthetic oligonucleotide
gattatctaagggaggacagcaatcgtttg

SEQ ID NO: 386322 - DNA, 30 bp, Artificial Sequence
  Synthetic oligonucleotide
agtcgcttataggcagtactttatcgtttg

SEQ ID NO: 386323 - DNA, 30 bp, Artificial Sequence
  Synthetic oligonucleotide
aagggaagctaaactacagccggtcgtttg

SEQ ID NO: 386324 - DNA, 30 bp, Artificial Sequence
  Synthetic oligonucleotide
ttaatgtactctacgacatgccacggtttg

SEQ ID NO: 386325 - DNA, 30 bp, Artificial Sequence
  Synthetic oligonucleotide
tttactgaataggtcaagtctaccggtttg

SEQ ID NO: 386326 - DNA, 30 bp, Artificial Sequence
  Synthetic oligonucleotide
aatagtagtgttactctcggaagcggtttg

SEQ ID NO: 386327 - DNA, 30 bp, Artificial Sequence
  Synthetic oligonucleotide
gacatagagaatgggactccgccgggtttg

SEQ ID NO: 386328 - DNA, 30 bp, Artificial Sequence
  Synthetic oligonucleotide
ttatcagtaaattagtggaaattgggtttg

SEQ ID NO: 386329 - DNA, 30 bp, Artificial Sequence
  Synthetic oligonucleotide
gctccggctctttgattaatgggatgtttg

SEQ ID NO: 386330 - DNA, 30 bp, Artificial Sequence
  Synthetic oligonucleotide
gaagtcgtacagatacacgctaggtgtttg

SEQ ID NO: 386331 - DNA, 30 bp, Artificial Sequence
  Synthetic oligonucleotide
ggttctacactcgtagaacacacttgtttg

SEQ ID NO: 386332 - DNA, 30 bp, Artificial Sequence
  Synthetic oligonucleotide
tactgcagaacggtgcgccacgcttgtttg

SEQ ID NO: 386333 - DNA, 30 bp, Artificial Sequence
  Synthetic oligonucleotide
cactatgtgcagatggggaggcacattttg

SEQ ID NO: 386334 - DNA, 30 bp, Artificial Sequence
  Synthetic oligonucleotide
tccatttggaccacaaatttcgacattttg

SEQ ID NO: 386335 - DNA, 30 bp, Artificial Sequence
  Synthetic oligonucleotide
aacttgatccctgaacagtcatgcattttg

SEQ ID NO: 386336 - DNA, 30 bp, Artificial Sequence
  Synthetic oligonucleotide
cacgaaaagaggcgtgcgatcgggattttg

SEQ ID NO: 386337 - DNA, 30 bp, Artificial Sequence
  Synthetic oligonucleotide
acttacttgattacttaggcggggattttg

SEQ ID NO: 386338 - DNA, 30 bp, Artificial Sequence
  Synthetic oligonucleotide
ttgcgaaatccctgacagtttgggattttg

SEQ ID NO: 386339 - DNA, 30 bp, Artificial Sequence
  Synthetic oligonucleotide
ctcaacctcgcgactgtagtatggattttg

SEQ ID NO: 386340 - DNA, 30 bp, Artificial Sequence
  Synthetic oligonucleotide
caatatcgcccaactattgtcgtgattttg

SEQ ID NO: 386341 - DNA, 30 bp, Artificial Sequence
  Synthetic oligonucleotide
ttggaaagctaagtgcgagtctttattttg

SEQ ID NO: 386342 - DNA, 30 bp, Artificial Sequence
  Synthetic oligonucleotide
aagaggggaatatacctaaataaacttttg

SEQ ID NO: 386343 - DNA, 30 bp, Artificial Sequence
  Synthetic oligonucleotide
gtgtgtgaggttaagaaaacaccacttttg

SEQ ID NO: 386344 - DNA, 30 bp, Artificial Sequence
  Synthetic oligonucleotide
tctgggtttcctgtggagaatcgacttttg

SEQ ID NO: 386345 - DNA, 30 bp, Artificial Sequence
  Synthetic oligonucleotide
tggaaccccgctgacatcttatgacttttg

SEQ ID NO: 386346 - DNA, 30 bp, Artificial Sequence
  Synthetic oligonucleotide
caggggtctaccttatgttcagaccttttg

SEQ ID NO: 386347 - DNA, 30 bp, Artificial Sequence
  Synthetic oligonucleotide
ttgtcagaaaaaacgaaaagttcgcttttg

SEQ ID NO: 386348 - DNA, 30 bp, Artificial Sequence
  Synthetic oligonucleotide
ggcagggtgatactgagcgatgatcttttg

SEQ ID NO: 386349 - DNA, 30 bp, Artificial Sequence
  Synthetic oligonucleotide
agaggggttgcagccttccggactcttttg

SEQ ID NO: 386350 - DNA, 30 bp, Artificial Sequence
  Synthetic oligonucleotide
gtctacggcggaaacacatccattcttttg

SEQ ID NO: 386351 - DNA, 30 bp, Artificial Sequence
  Synthetic oligonucleotide
ggggcatggtaagggttggccggagttttg

SEQ ID NO: 386352 - DNA, 30 bp, Artificial Sequence
  Synthetic oligonucleotide
ataagcctcgggtagctccaatgagttttg

SEQ ID NO: 386353 - DNA, 30 bp, Artificial Sequence
  Synthetic oligonucleotide
ggtgtcttcagacggtcttgcgtagttttg

SEQ ID NO: 386354 - DNA, 30 bp, Artificial Sequence
  Synthetic oligonucleotide
cattccctcaagaaatgatggcaggttttg

SEQ ID NO: 386355 - DNA, 30 bp, Artificial Sequence
  Synthetic oligonucleotide
catccctccccgcccggagaaacatttttg

SEQ ID NO: 386356 - DNA, 30 bp, Artificial Sequence
  Synthetic oligonucleotide
gggggattttattcgcccgcatgatttttg

SEQ ID NO: 386357 - DNA, 30 bp, Artificial Sequence
  Synthetic oligonucleotide
ccctagcgtccataccgcccgcactttttg

SEQ ID NO: 386358 - DNA, 30 bp, Artificial Sequence
  Synthetic oligonucleotide
gggagttcgtactccaatcgcagctttttg

SEQ ID NO: 386359 - DNA, 30 bp, Artificial Sequence
  Synthetic oligonucleotide
tcatcgctcatcgggtcaacgcgctttttg

SEQ ID NO: 386360 - DNA, 30 bp, Artificial Sequence
  Synthetic oligonucleotide
ctccgtaggttggcgcgtaaactctttttg

SEQ ID NO: 386361 - DNA, 30 bp, Artificial Sequence
  Synthetic oligonucleotide
cgaaaatgcatcaaaggtacgttgtttttg

SEQ ID NO: 386362 - DNA, 30 bp, Artificial Sequence
  Synthetic oligonucleotide
ttggtaaatggttttacgcggaattttttg

SEQ ID NO: 386363 - DNA, 30 bp, Artificial Sequence
  Synthetic oligonucleotide
gcgacatgagttaacatctcgtaaaaaaat

SEQ ID NO: 386364 - DNA, 30 bp, Artificial Sequence
  Synthetic oligonucleotide
tggcggcttacagcgaggcattaaaaaaat

SEQ ID NO: 386365 - DNA, 30 bp, Artificial Sequence
  Synthetic oligonucleotide
tgatgagtttgactccaacctagaaaaaat

SEQ ID NO: 386366 - DNA, 30 bp, Artificial Sequence
  Synthetic oligonucleotide
tcttcctgacttccggctcatggaaaaaat

SEQ ID NO: 386367 - DNA, 30 bp, Artificial Sequence
  Synthetic oligonucleotide
cttaggctaccaatcctgacggtaaaaaat

SEQ ID NO: 386368 - DNA, 30 bp, Artificial Sequence
  Synthetic oligonucleotide
gggagtaagtcaaagagcgcagacaaaaat

SEQ ID NO: 386369 - DNA, 30 bp, Artificial Sequence
  Synthetic oligonucleotide
tgatagctcgctgtaattgcaaccaaaaat

SEQ ID NO: 386370 - DNA, 30 bp, Artificial Sequence
  Synthetic oligonucleotide
tatgagggtgacatattttcaagcaaaaat

SEQ ID NO: 386371 - DNA, 30 bp, Artificial Sequence
  Synthetic oligonucleotide
tgaatacgaagcaggaatgccagcaaaaat

SEQ ID NO: 386372 - DNA, 30 bp, Artificial Sequence
  Synthetic oligonucleotide
tctgatactgcggcgcaaatgctcaaaaat

SEQ ID NO: 386373 - DNA, 30 bp, Artificial Sequence
  Synthetic oligonucleotide
gttacacattgctttcgacaggtcaaaaat

SEQ ID NO: 386374 - DNA, 30 bp, Artificial Sequence
  Synthetic oligonucleotide
aaacttatccgtcacttatccttcaaaaat

SEQ ID NO: 386375 - DNA, 30 bp, Artificial Sequence
  Synthetic oligonucleotide
cccccgcatggttagtaggtcacgaaaaat

SEQ ID NO: 386376 - DNA, 30 bp, Artificial Sequence
  Synthetic oligonucleotide
ctggtgagactccagtgtacgaataaaaat

SEQ ID NO: 386377 - DNA, 30 bp, Artificial Sequence
  Synthetic oligonucleotide
atgaattggctgggtgcaactcttaaaaat

SEQ ID NO: 386378 - DNA, 30 bp, Artificial Sequence
  Synthetic oligonucleotide
tcctaaggggatttggcgggtcttaaaaat

SEQ ID NO: 386379 - DNA, 30 bp, Artificial Sequence
  Synthetic oligonucleotide
gagtgcctaactgaggactaaaaacaaaat

SEQ ID NO: 386380 - DNA, 30 bp, Artificial Sequence
  Synthetic oligonucleotide
cgccgcggtgttctttcgtgtaaccaaaat

SEQ ID NO: 386381 - DNA, 30 bp, Artificial Sequence
  Synthetic oligonucleotide
aggaggttccatacatgccgggaccaaaat

SEQ ID NO: 386382 - DNA, 30 bp, Artificial Sequence
  Synthetic oligonucleotide
ttcttgacgtgggcgaagggtgaccaaaat

SEQ ID NO: 386383 - DNA, 30 bp, Artificial Sequence
  Synthetic oligonucleotide
aacttgttgggggaactaggttaccaaaat

SEQ ID NO: 386384 - DNA, 30 bp, Artificial Sequence
  Synthetic oligonucleotide
atccacttgccgagtgctgcagcccaaaat

SEQ ID NO: 386385 - DNA, 30 bp, Artificial Sequence
  Synthetic oligonucleotide
gaaaccgaactcttggaacacgcccaaaat

SEQ ID NO: 386386 - DNA, 30 bp, Artificial Sequence
  Synthetic oligonucleotide
actcatactgctacgtcagggacgcaaaat

SEQ ID NO: 386387 - DNA, 30 bp, Artificial Sequence
  Synthetic oligonucleotide
gtttaaagtacggcaccgttattgcaaaat

SEQ ID NO: 386388 - DNA, 30 bp, Artificial Sequence
  Synthetic oligonucleotide
atgttaaaagcctcagcaggctatcaaaat

SEQ ID NO: 386389 - DNA, 30 bp, Artificial Sequence
  Synthetic oligonucleotide
gcggattcttcccgcggacttggtcaaaat

SEQ ID NO: 386390 - DNA, 30 bp, Artificial Sequence
  Synthetic oligonucleotide
gctgtctgcagttcatgcattcttcaaaat

SEQ ID NO: 386391 - DNA, 30 bp, Artificial Sequence
  Synthetic oligonucleotide
gtacgtatagtgatcttaggttcagaaaat

SEQ ID NO: 386392 - DNA, 30 bp, Artificial Sequence
  Synthetic oligonucleotide
gtgttaagctcgcgatagagcttagaaaat

SEQ ID NO: 386393 - DNA, 30 bp, Artificial Sequence
  Synthetic oligonucleotide
gtgcttttctcgggacgtgcaatcgaaaat

SEQ ID NO: 386394 - DNA, 30 bp, Artificial Sequence
  Synthetic oligonucleotide
tcgtgctgcctagagcagcctttcgaaaat

SEQ ID NO: 386395 - DNA, 30 bp, Artificial Sequence
  Synthetic oligonucleotide
aaatagttaactctaatgcaataggaaaat

SEQ ID NO: 386396 - DNA, 30 bp, Artificial Sequence
  Synthetic oligonucleotide
cacaatcaggaactgtgtcctacggaaaat

SEQ ID NO: 386397 - DNA, 30 bp, Artificial Sequence
  Synthetic oligonucleotide
ccactcttacagattacagtcccggaaaat

SEQ ID NO: 386398 - DNA, 30 bp, Artificial Sequence
  Synthetic oligonucleotide
agcccgctgttgcatgcacctttggaaaat

SEQ ID NO: 386399 - DNA, 30 bp, Artificial Sequence
  Synthetic oligonucleotide
ttaagccggcttaaataaagaaatgaaaat

SEQ ID NO: 386400 - DNA, 30 bp, Artificial Sequence
  Synthetic oligonucleotide
ataaaggccagttcccagactcaataaaat

SEQ ID NO: 386401 - DNA, 30 bp, Artificial Sequence
  Synthetic oligonucleotide
caaggaacgcagtggtaaaaagaataaaat

SEQ ID NO: 386402 - DNA, 30 bp, Artificial Sequence
  Synthetic oligonucleotide
gggccggtaattatagtggagtaataaaat

SEQ ID NO: 386403 - DNA, 30 bp, Artificial Sequence
  Synthetic oligonucleotide
gacaaccgcgcatagtcggggtaataaaat

SEQ ID NO: 386404 - DNA, 30 bp, Artificial Sequence
  Synthetic oligonucleotide
atcaggagcctatactggagaggataaaat

SEQ ID NO: 386405 - DNA, 30 bp, Artificial Sequence
  Synthetic oligonucleotide
gtcatcacaagaattcagtttgactaaaat

SEQ ID NO: 386406 - DNA, 30 bp, Artificial Sequence
  Synthetic oligonucleotide
tggcagggggtttaaataattagctaaaat

SEQ ID NO: 386407 - DNA, 30 bp, Artificial Sequence
  Synthetic oligonucleotide
aaccattttagggtcaccgccacgtaaaat

SEQ ID NO: 386408 - DNA, 30 bp, Artificial Sequence
  Synthetic oligonucleotide
ctcgtcttcatcacgggtgcgccttaaaat

SEQ ID NO: 386409 - DNA, 30 bp, Artificial Sequence
  Synthetic oligonucleotide
tattcgcacagggttacctcggcttaaaat

SEQ ID NO: 386410 - DNA, 30 bp, Artificial Sequence
  Synthetic oligonucleotide
attggtgataattctacgtgggcttaaaat

SEQ ID NO: 386411 - DNA, 30 bp, Artificial Sequence
  Synthetic oligonucleotide
atgctaataccggagggttcaatttaaaat

SEQ ID NO: 386412 - DNA, 30 bp, Artificial Sequence
  Synthetic oligonucleotide
gtcgtgcttccggatagagtcaaaacaaat

SEQ ID NO: 386413 - DNA, 30 bp, Artificial Sequence
  Synthetic oligonucleotide
gttgaggcttccggtatcgggcgaacaaat

SEQ ID NO: 386414 - DNA, 30 bp, Artificial Sequence
  Synthetic oligonucleotide
ggagaggggatccagggctctgtaacaaat

SEQ ID NO: 386415 - DNA, 30 bp, Artificial Sequence
  Synthetic oligonucleotide
tctgtcgcaatcggaggtatctacacaaat

SEQ ID NO: 386416 - DNA, 30 bp, Artificial Sequence
  Synthetic oligonucleotide
tcagtgtagcaggtacaccagcagacaaat

SEQ ID NO: 386417 - DNA, 30 bp, Artificial Sequence
  Synthetic oligonucleotide
aggcggttgtatagcacgagctagacaaat

SEQ ID NO: 386418 - DNA, 30 bp, Artificial Sequence
  Synthetic oligonucleotide
tgcccgctctctaggtatgcgggtacaaat

SEQ ID NO: 386419 - DNA, 30 bp, Artificial Sequence
  Synthetic oligonucleotide
ttggtgcacccgtaactatgaattacaaat

SEQ ID NO: 386420 - DNA, 30 bp, Artificial Sequence
  Synthetic oligonucleotide
ctagattccagtaggataagcaaaccaaat

SEQ ID NO: 386421 - DNA, 30 bp, Artificial Sequence
  Synthetic oligonucleotide
tcgtggtcagggcgatgcccggaaccaaat

SEQ ID NO: 386422 - DNA, 30 bp, Artificial Sequence
  Synthetic oligonucleotide
cagagtagatcattttgattcgcaccaaat

SEQ ID NO: 386423 - DNA, 30 bp, Artificial Sequence
  Synthetic oligonucleotide
gtttagcgaatcacgtcagtcggcccaaat

SEQ ID NO: 386424 - DNA, 30 bp, Artificial Sequence
  Synthetic oligonucleotide
ggaagaaagacctcagcgctgcagccaaat

SEQ ID NO: 386425 - DNA, 30 bp, Artificial Sequence
  Synthetic oligonucleotide
caatctgtatttacgggtttatcgccaaat

SEQ ID NO: 386426 - DNA, 30 bp, Artificial Sequence
  Synthetic oligonucleotide
accttgtaatctgacctggcgtcgccaaat

SEQ ID NO: 386427 - DNA, 30 bp, Artificial Sequence
  Synthetic oligonucleotide
agaacggtggtccagcgcccctgggcaaat

SEQ ID NO: 386428 - DNA, 30 bp, Artificial Sequence
  Synthetic oligonucleotide
atgcgggagataaggatatcttaatcaaat

SEQ ID NO: 386429 - DNA, 31 bp, Artificial Sequence
  Synthetic oligonucleotide
cgcgcagcttttgccaccggattcatcaaat

SEQ ID NO: 386430 - DNA, 30 bp, Artificial Sequence
  Synthetic oligonucleotide
catggcctggtgccttctggcggatcaaat

SEQ ID NO: 386431 - DNA, 30 bp, Artificial Sequence
  Synthetic oligonucleotide
aatatggaatggactggactagtatcaaat

SEQ ID NO: 386432 - DNA, 30 bp, Artificial Sequence
  Synthetic oligonucleotide
tgaccccgcacatattggaagctctcaaat

SEQ ID NO: 386433 - DNA, 30 bp, Artificial Sequence
  Synthetic oligonucleotide
agtgttcagcgctgactctacgggtcaaat

SEQ ID NO: 386434 - DNA, 30 bp, Artificial Sequence
  Synthetic oligonucleotide
gggtaacttgaaccgctttgtaattcaaat

SEQ ID NO: 386435 - DNA, 30 bp, Artificial Sequence
  Synthetic oligonucleotide
tctaaaattttcgaataaaaccattcaaat

SEQ ID NO: 386436 - DNA, 30 bp, Artificial Sequence
  Synthetic oligonucleotide
gccattgcccacttacgttattattcaaat

SEQ ID NO: 386437 - DNA, 30 bp, Artificial Sequence
  Synthetic oligonucleotide
gcaactctacggagcgcatagtaaagaaat

SEQ ID NO: 386438 - DNA, 30 bp, Artificial Sequence
  Synthetic oligonucleotide
gccggcgtgggtggacgtagttaaagaaat

SEQ ID NO: 386439 - DNA, 30 bp, Artificial Sequence
  Synthetic oligonucleotide
atatcagggcctaggatagggataagaaat

SEQ ID NO: 386440 - DNA, 30 bp, Artificial Sequence
  Synthetic oligonucleotide
cctgttttgatctaagtcttgtacagaaat

SEQ ID NO: 386441 - DNA, 30 bp, Artificial Sequence
  Synthetic oligonucleotide
ggggcgcatgctagcccttaaggcagaaat

SEQ ID NO: 386442 - DNA, 30 bp, Artificial Sequence
  Synthetic oligonucleotide
tgacattgtttggacgcgcatggcagaaat

SEQ ID NO: 386443 - DNA, 30 bp, Artificial Sequence
  Synthetic oligonucleotide
ccctaggcagctccatccgtactcagaaat

SEQ ID NO: 386444 - DNA, 30 bp, Artificial Sequence
  Synthetic oligonucleotide
aagtaggttcaaccctactggcagagaaat

SEQ ID NO: 386445 - DNA, 30 bp, Artificial Sequence
  Synthetic oligonucleotide
gtcctcagaatcgcttgctgatagagaaat

SEQ ID NO: 386446 - DNA, 30 bp, Artificial Sequence
  Synthetic oligonucleotide
gcattttagttctgtagtatctagagaaat

SEQ ID NO: 386447 - DNA, 30 bp, Artificial Sequence
  Synthetic oligonucleotide
aatcgggttcaaataaagtttgcgagaaat

SEQ ID NO: 386448 - DNA, 30 bp, Artificial Sequence
  Synthetic oligonucleotide
gtggtcccatattatggtccctatagaaat

SEQ ID NO: 386449 - DNA, 30 bp, Artificial Sequence
  Synthetic oligonucleotide
tatatgccaggagacccaccgcctagaaat

SEQ ID NO: 386450 - DNA, 30 bp, Artificial Sequence
  Synthetic oligonucleotide
gctttgcagcgggagagggttgttagaaat

SEQ ID NO: 386451 - DNA, 30 bp, Artificial Sequence
  Synthetic oligonucleotide
cttgaaaagtcgcgggcctatggccgaaat

SEQ ID NO: 386452 - DNA, 30 bp, Artificial Sequence
  Synthetic oligonucleotide
atccctcgttgtagagcgtgcatgcgaaat

SEQ ID NO: 386453 - DNA, 30 bp, Artificial Sequence
  Synthetic oligonucleotide
ttctcttaattatgcataagtgctcgaaat

SEQ ID NO: 386454 - DNA, 30 bp, Artificial Sequence
  Synthetic oligonucleotide
acgccaggcggtcgctgccctcgtcgaaat

SEQ ID NO: 386455 - DNA, 30 bp, Artificial Sequence
  Synthetic oligonucleotide
ggttccagggtagtccagcgcgaaggaaat

SEQ ID NO: 386456 - DNA, 30 bp, Artificial Sequence
  Synthetic oligonucleotide
aaccggtatctagaatggggtctcggaaat

SEQ ID NO: 386457 - DNA, 30 bp, Artificial Sequence
  Synthetic oligonucleotide
tgaggcactagggatgcgcgccagggaaat

SEQ ID NO: 386458 - DNA, 30 bp, Artificial Sequence
  Synthetic oligonucleotide
cgatcaggcagcagcccccccgctggaaat

SEQ ID NO: 386459 - DNA, 30 bp, Artificial Sequence
  Synthetic oligonucleotide
ccatgcgatgtcctaatctagtttggaaat

SEQ ID NO: 386460 - DNA, 30 bp, Artificial Sequence
  Synthetic oligonucleotide
ggaagattttatggcactgcttagtgaaat

SEQ ID NO: 386461 - DNA, 30 bp, Artificial Sequence
  Synthetic oligonucleotide
gggggtcgtcgcgatccacaggggtgaaat

SEQ ID NO: 386462 - DNA, 30 bp, Artificial Sequence
  Synthetic oligonucleotide
cggtgacactgttagatgacagattgaaat

SEQ ID NO: 386463 - DNA, 30 bp, Artificial Sequence
  Synthetic oligonucleotide
tttatctgaaaggatccacgggattgaaat

SEQ ID NO: 386464 - DNA, 30 bp, Artificial Sequence
  Synthetic oligonucleotide
tgagggaaaaaaaccgttgttacttgaaat

SEQ ID NO: 386465 - DNA, 30 bp, Artificial Sequence
  Synthetic oligonucleotide
gatgaagtataatgcttgctattttgaaat

SEQ ID NO: 386466 - DNA, 30 bp, Artificial Sequence
  Synthetic oligonucleotide
gacggttcagagcggtataaacaaataaat

SEQ ID NO: 386467 - DNA, 30 bp, Artificial Sequence
  Synthetic oligonucleotide
tccggcgtactctcggagccctaaataaat

SEQ ID NO: 386468 - DNA, 30 bp, Artificial Sequence
  Synthetic oligonucleotide
accttcacgcacccgttgaaagccataaat

SEQ ID NO: 386469 - DNA, 30 bp, Artificial Sequence
  Synthetic oligonucleotide
tcgtgggagtggagtctggaagccataaat

SEQ ID NO: 386470 - DNA, 30 bp, Artificial Sequence
  Synthetic oligonucleotide
cgggttttgctggatgaagtgtgcataaat

SEQ ID NO: 386471 - DNA, 30 bp, Artificial Sequence
  Synthetic oligonucleotide
aaagcaggccggtccaattcccagataaat

SEQ ID NO: 386472 - DNA, 30 bp, Artificial Sequence
  Synthetic oligonucleotide
acgccgcaacatagcagccgacggataaat

SEQ ID NO: 386473 - DNA, 30 bp, Artificial Sequence
  Synthetic oligonucleotide
atgccaagtcctggaacagccgctataaat

SEQ ID NO: 386474 - DNA, 30 bp, Artificial Sequence
  Synthetic oligonucleotide
agattttgagatcctttcaacagtataaat

SEQ ID NO: 386475 - DNA, 30 bp, Artificial Sequence
  Synthetic oligonucleotide
cgccagcggggacagaggagctcactaaat

SEQ ID NO: 386476 - DNA, 30 bp, Artificial Sequence
  Synthetic oligonucleotide
cgatcgtctgtacatgcggaactactaaat

SEQ ID NO: 386477 - DNA, 30 bp, Artificial Sequence
  Synthetic oligonucleotide
atacgccaattagccggggctttcctaaat

SEQ ID NO: 386478 - DNA, 30 bp, Artificial Sequence
  Synthetic oligonucleotide
aaacaaaaaggtcgtcccgccacgctaaat

SEQ ID NO: 386479 - DNA, 30 bp, Artificial Sequence
  Synthetic oligonucleotide
tctcggagacggctaagggcgtcgctaaat

SEQ ID NO: 386480 - DNA, 30 bp, Artificial Sequence
  Synthetic oligonucleotide
gtcctagttaactccggagattggctaaat

SEQ ID NO: 386481 - DNA, 30 bp, Artificial Sequence
  Synthetic oligonucleotide
cacgtggttgcagtgtccaacgatctaaat

SEQ ID NO: 386482 - DNA, 30 bp, Artificial Sequence
  Synthetic oligonucleotide
cagcgtaaactctgatcaatatatctaaat

SEQ ID NO: 386483 - DNA, 30 bp, Artificial Sequence
  Synthetic oligonucleotide
agtaggtttcaagttccacgttatctaaat

SEQ ID NO: 386484 - DNA, 30 bp, Artificial Sequence
  Synthetic oligonucleotide
ttagtcactatatatggtgtagttctaaat

SEQ ID NO: 386485 - DNA, 30 bp, Artificial Sequence
  Synthetic oligonucleotide
agaagtgtactctggagcgtatcagtaaat

SEQ ID NO: 386486 - DNA, 30 bp, Artificial Sequence
  Synthetic oligonucleotide
cctcacatctcctcttagttcttagtaaat

SEQ ID NO: 386487 - DNA, 30 bp, Artificial Sequence
  Synthetic oligonucleotide
atcgatccgagcgttttttctgacgtaaat

SEQ ID NO: 386488 - DNA, 30 bp, Artificial Sequence
  Synthetic oligonucleotide
gtactctataccttcaaacaataggtaaat

SEQ ID NO: 386489 - DNA, 30 bp, Artificial Sequence
  Synthetic oligonucleotide
gcaatagatggcgttaatagcacggtaaat

SEQ ID NO: 386490 - DNA, 30 bp, Artificial Sequence
  Synthetic oligonucleotide
ggggtcctgttctattggcgtggggtaaat

SEQ ID NO: 386491 - DNA, 30 bp, Artificial Sequence
  Synthetic oligonucleotide
aactggccatgctgtcacctaggtgtaaat

SEQ ID NO: 386492 - DNA, 30 bp, Artificial Sequence
  Synthetic oligonucleotide
tgagatttgttgacttaaaccagattaaat

SEQ ID NO: 386493 - DNA, 30 bp, Artificial Sequence
  Synthetic oligonucleotide
tttcatccgtggacggagaatggattaaat

SEQ ID NO: 386494 - DNA, 30 bp, Artificial Sequence
  Synthetic oligonucleotide
ttcagtcccgtgtgtgaaggtggattaaat

SEQ ID NO: 386495 - DNA, 30 bp, Artificial Sequence
  Synthetic oligonucleotide
tttaaaccagtcaagtacacaatattaaat

SEQ ID NO: 386496 - DNA, 30 bp, Artificial Sequence
  Synthetic oligonucleotide
cgatctggagtcctgtaaccaatcttaaat

SEQ ID NO: 386497 - DNA, 30 bp, Artificial Sequence
  Synthetic oligonucleotide
ggcgctatacttgggttagccctcttaaat

SEQ ID NO: 386498 - DNA, 30 bp, Artificial Sequence
  Synthetic oligonucleotide
gccaacagtgcaaaagatctgttcttaaat

SEQ ID NO: 386499 - DNA, 30 bp, Artificial Sequence
  Synthetic oligonucleotide
tacaatcttttagtaaagagccagttaaat

SEQ ID NO: 386500 - DNA, 30 bp, Artificial Sequence
  Synthetic oligonucleotide
gatcggcactgagtatcccagaatttaaat

SEQ ID NO: 386501 - DNA, 30 bp, Artificial Sequence
  Synthetic oligonucleotide
atgagcccgagcatattggaaattttaaat

SEQ ID NO: 386502 - DNA, 30 bp, Artificial Sequence
  Synthetic oligonucleotide
ccataactgccgtgtctgcacgttttaaat

SEQ ID NO: 386503 - DNA, 30 bp, Artificial Sequence
  Synthetic oligonucleotide
gtaaacgtgttgtcccttcactcaaacaat

SEQ ID NO: 386504 - DNA, 30 bp, Artificial Sequence
  Synthetic oligonucleotide
gggcaatcgtatgattggctgttaaacaat

SEQ ID NO: 386505 - DNA, 30 bp, Artificial Sequence
  Synthetic oligonucleotide
tgcccaataataacgccacattccaacaat

SEQ ID NO: 386506 - DNA, 30 bp, Artificial Sequence
  Synthetic oligonucleotide
atttaaaattggcagcgagtaagcaacaat

SEQ ID NO: 386507 - DNA, 30 bp, Artificial Sequence
  Synthetic oligonucleotide
tgtagcaaggaggacagacggccgaacaat

SEQ ID NO: 386508 - DNA, 30 bp, Artificial Sequence
  Synthetic oligonucleotide
aaaaccagccactctaaggcgcggaacaat

SEQ ID NO: 386509 - DNA, 30 bp, Artificial Sequence
  Synthetic oligonucleotide
attggttcagagggcacggacgggaacaat

SEQ ID NO: 386510 - DNA, 30 bp, Artificial Sequence
  Synthetic oligonucleotide
tcacggatacagattttaaatctgaacaat

SEQ ID NO: 386511 - DNA, 30 bp, Artificial Sequence
  Synthetic oligonucleotide
ttaaggctggtaacgcacatattgaacaat

SEQ ID NO: 386512 - DNA, 30 bp, Artificial Sequence
  Synthetic oligonucleotide
ggttgataaagttgggcctaagcacacaat

SEQ ID NO: 386513 - DNA, 30 bp, Artificial Sequence
  Synthetic oligonucleotide
ctcgcgactttatcgccaagggaccacaat

SEQ ID NO: 386514 - DNA, 30 bp, Artificial Sequence
  Synthetic oligonucleotide
actcaagtaatcgagagtactggccacaat

SEQ ID NO: 386515 - DNA, 30 bp, Artificial Sequence
  Synthetic oligonucleotide
tacggagtaagctttattaatacagacaat

SEQ ID NO: 386516 - DNA, 30 bp, Artificial Sequence
  Synthetic oligonucleotide
gccagtagtgtgactagggtactagacaat

SEQ ID NO: 386517 - DNA, 30 bp, Artificial Sequence
  Synthetic oligonucleotide
catattatcacaagaagaatgcaggacaat

SEQ ID NO: 386518 - DNA, 30 bp, Artificial Sequence
  Synthetic oligonucleotide
tgccctgggctatgatagagcatggacaat

SEQ ID NO: 386519 - DNA, 30 bp, Artificial Sequence
  Synthetic oligonucleotide
cacttattcccactcgcctttatggacaat

SEQ ID NO: 386520 - DNA, 30 bp, Artificial Sequence
  Synthetic oligonucleotide
gcactcggttaaaaggaatatcatgacaat

SEQ ID NO: 386521 - DNA, 30 bp, Artificial Sequence
  Synthetic oligonucleotide
ctgccatcctccggacaggggagtgacaat

SEQ ID NO: 386522 - DNA, 30 bp, Artificial Sequence
  Synthetic oligonucleotide
cctgtctcggacatctgcatgcaatacaat

SEQ ID NO: 386523 - DNA, 30 bp, Artificial Sequence
  Synthetic oligonucleotide
tatttatttctgtattaggcgatatacaat

SEQ ID NO: 386524 - DNA, 30 bp, Artificial Sequence
  Synthetic oligonucleotide
ctattgagtctctgaaacggcttatacaat

SEQ ID NO: 386525 - DNA, 30 bp, Artificial Sequence
  Synthetic oligonucleotide
gactatgcagtcaggaaaccctagtacaat

SEQ ID NO: 386526 - DNA, 30 bp, Artificial Sequence
  Synthetic oligonucleotide
ttatggacaaggtgtaaatctaggtacaat

SEQ ID NO: 386527 - DNA, 30 bp, Artificial Sequence
  Synthetic oligonucleotide
agacattgcagggcgcgacagtgttacaat

SEQ ID NO: 386528 - DNA, 30 bp, Artificial Sequence
  Synthetic oligonucleotide
tgacttggttgaaagagtactataaccaat

SEQ ID NO: 386529 - DNA, 30 bp, Artificial Sequence
  Synthetic oligonucleotide
tctgtaagtaaaatttgctagaaccccaat

SEQ ID NO: 386530 - DNA, 30 bp, Artificial Sequence
  Synthetic oligonucleotide
aaaatatgcacgttcagctaaacgcccaat

SEQ ID NO: 386531 - DNA, 30 bp, Artificial Sequence
  Synthetic oligonucleotide
agggtgctcagtatttagtgtgggcccaat

SEQ ID NO: 386532 - DNA, 30 bp, Artificial Sequence
  Synthetic oligonucleotide
ctgctctccattaaagaaatgggtcccaat

SEQ ID NO: 386533 - DNA, 30 bp, Artificial Sequence
  Synthetic oligonucleotide
tgttaatcgaagttaaatactggagccaat

SEQ ID NO: 386534 - DNA, 30 bp, Artificial Sequence
  Synthetic oligonucleotide
tggtatattggggatgatatcgccgccaat

SEQ ID NO: 386535 - DNA, 30 bp, Artificial Sequence
  Synthetic oligonucleotide
ggtcgagtgacgggaagccaatccgccaat

SEQ ID NO: 386536 - DNA, 30 bp, Artificial Sequence
  Synthetic oligonucleotide
cgaaccagtgccgaaaaaatatccgccaat

SEQ ID NO: 386537 - DNA, 30 bp, Artificial Sequence
  Synthetic oligonucleotide
accggtgtcttgtggagcggattcgccaat

SEQ ID NO: 386538 - DNA, 30 bp, Artificial Sequence
  Synthetic oligonucleotide
cgcattttactctgggattctctggccaat

SEQ ID NO: 386539 - DNA, 30 bp, Artificial Sequence
  Synthetic oligonucleotide
ttcgttgcccacttcggatgacgtgccaat

SEQ ID NO: 386540 - DNA, 30 bp, Artificial Sequence
  Synthetic oligonucleotide
tacgtgcactcggtttgacgccgatccaat

SEQ ID NO: 386541 - DNA, 30 bp, Artificial Sequence
  Synthetic oligonucleotide
cacaaccagtagacctgatccaactccaat

SEQ ID NO: 386542 - DNA, 30 bp, Artificial Sequence
  Synthetic oligonucleotide
tcagcggccggtgaacagcgcaactccaat

SEQ ID NO: 386543 - DNA, 30 bp, Artificial Sequence
  Synthetic oligonucleotide
cgttcaaatcccgcgtgtgtttcctccaat

SEQ ID NO: 386544 - DNA, 30 bp, Artificial Sequence
  Synthetic oligonucleotide
actcgggaccggccagatgtttgctccaat

SEQ ID NO: 386545 - DNA, 30 bp, Artificial Sequence
  Synthetic oligonucleotide
tccaattccttagtgggggacgtgtccaat

SEQ ID NO: 386546 - DNA, 30 bp, Artificial Sequence
  Synthetic oligonucleotide
gccgtcaattcggctctagagcgttccaat

SEQ ID NO: 386547 - DNA, 30 bp, Artificial Sequence
  Synthetic oligonucleotide
tctaactgtactatatggctctgaagcaat

SEQ ID NO: 386548 - DNA, 30 bp, Artificial Sequence
  Synthetic oligonucleotide
tgtgtgaggtatgcctgcagggccagcaat

SEQ ID NO: 386549 - DNA, 30 bp, Artificial Sequence
  Synthetic oligonucleotide
caagaatggttttatcggtcgggcagcaat

SEQ ID NO: 386550 - DNA, 30 bp, Artificial Sequence
  Synthetic oligonucleotide
gaaattgaattgctgattaaagtgagcaat

SEQ ID NO: 386551 - DNA, 30 bp, Artificial Sequence
  Synthetic oligonucleotide
cgtgtttagtggcaccatattcatagcaat

SEQ ID NO: 386552 - DNA, 30 bp, Artificial Sequence
  Synthetic oligonucleotide
atccagcataagacggccccccttagcaat

SEQ ID NO: 386553 - DNA, 30 bp, Artificial Sequence
  Synthetic oligonucleotide
ttacgcaaccaagaattacggcaacgcaat

SEQ ID NO: 386554 - DNA, 30 bp, Artificial Sequence
  Synthetic oligonucleotide
gagggagcccgacgtagaactgaacgcaat

SEQ ID NO: 386555 - DNA, 30 bp, Artificial Sequence
  Synthetic oligonucleotide
tcttatacattagaaaggaagccacgcaat

SEQ ID NO: 386556 - DNA, 30 bp, Artificial Sequence
  Synthetic oligonucleotide
ggtcatggaattaattagcttgcacgcaat

SEQ ID NO: 386557 - DNA, 30 bp, Artificial Sequence
  Synthetic oligonucleotide
aggcctggaaggtgaacttccttccgcaat

SEQ ID NO: 386558 - DNA, 30 bp, Artificial Sequence
  Synthetic oligonucleotide
acccgcatgggagactcgttcatgcgcaat

SEQ ID NO: 386559 - DNA, 30 bp, Artificial Sequence
  Synthetic oligonucleotide
ggtatgggcaataagttggtaccaggcaat

SEQ ID NO: 386560 - DNA, 30 bp, Artificial Sequence
  Synthetic oligonucleotide
tatgtaagcactgggcaatgcctaggcaat

SEQ ID NO: 386561 - DNA, 30 bp, Artificial Sequence
  Synthetic oligonucleotide
tatcgtttgcaatcattgactaccggcaat

SEQ ID NO: 386562 - DNA, 30 bp, Artificial Sequence
  Synthetic oligonucleotide
ttactagttcgggagaaactggccggcaat

SEQ ID NO: 386563 - DNA, 31 bp, Artificial Sequence
  Synthetic oligonucleotide
tcatgcggtttatcccggattatgcggcaat

SEQ ID NO: 386564 - DNA, 30 bp, Artificial Sequence
  Synthetic oligonucleotide
cctgttacactcgactactatgtcggcaat

SEQ ID NO: 386565 - DNA, 30 bp, Artificial Sequence
  Synthetic oligonucleotide
ggatttgttgcatgctatctagagggcaat

SEQ ID NO: 386566 - DNA, 30 bp, Artificial Sequence
  Synthetic oligonucleotide
tcccactagagactctaggccccgggcaat

SEQ ID NO: 386567 - DNA, 30 bp, Artificial Sequence
  Synthetic oligonucleotide
cttgtataacctgggtatccacgctgcaat

SEQ ID NO: 386568 - DNA, 30 bp, Artificial Sequence
  Synthetic oligonucleotide
gtaagatggtaatactcctgggtctgcaat

SEQ ID NO: 386569 - DNA, 30 bp, Artificial Sequence
  Synthetic oligonucleotide
gtatctttggtcatgattaggcggtgcaat

SEQ ID NO: 386570 - DNA, 30 bp, Artificial Sequence
  Synthetic oligonucleotide
ctgtccgccgcggtggttggtatgtgcaat

SEQ ID NO: 386571 - DNA, 30 bp, Artificial Sequence
  Synthetic oligonucleotide
aggatgagcatctcaggttagttgtgcaat

SEQ ID NO: 386572 - DNA, 30 bp, Artificial Sequence
  Synthetic oligonucleotide
ggcctatactttctcgtatgcgattgcaat

SEQ ID NO: 386573 - DNA, 30 bp, Artificial Sequence
  Synthetic oligonucleotide
catagattatgtcatttcggaacttgcaat

SEQ ID NO: 386574 - DNA, 30 bp, Artificial Sequence
  Synthetic oligonucleotide
gatatcaaatcaagatcaggacgttgcaat

SEQ ID NO: 386575 - DNA, 30 bp, Artificial Sequence
  Synthetic oligonucleotide
ggcagagcttatacgcattactaaatcaat

SEQ ID NO: 386576 - DNA, 30 bp, Artificial Sequence
  Synthetic oligonucleotide
acgatgccttcgagatgcagagccatcaat

SEQ ID NO: 386577 - DNA, 30 bp, Artificial Sequence
  Synthetic oligonucleotide
gcttcgatttatcaacaggacatcatcaat

SEQ ID NO: 386578 - DNA, 30 bp, Artificial Sequence
  Synthetic oligonucleotide
actgtaacgtggcagaatctgtcgatcaat

SEQ ID NO: 386579 - DNA, 30 bp, Artificial Sequence
  Synthetic oligonucleotide
cggggaatgaggggggttggtgggatcaat

SEQ ID NO: 386580 - DNA, 30 bp, Artificial Sequence
  Synthetic oligonucleotide
gaattgggactgtactcagtcggtatcaat

SEQ ID NO: 386581 - DNA, 30 bp, Artificial Sequence
  Synthetic oligonucleotide
cttgtaccagcaggttgtgatggtatcaat

SEQ ID NO: 386582 - DNA, 30 bp, Artificial Sequence
  Synthetic oligonucleotide
tggttacttaggccgtataaatttatcaat

SEQ ID NO: 386583 - DNA, 30 bp, Artificial Sequence
  Synthetic oligonucleotide
ctcacaagttacacctacaatatactcaat

SEQ ID NO: 386584 - DNA, 30 bp, Artificial Sequence
  Synthetic oligonucleotide
tttatggccctaaataccacactactcaat

SEQ ID NO: 386585 - DNA, 30 bp, Artificial Sequence
  Synthetic oligonucleotide
cacatttaatgggccctagacactctcaat

SEQ ID NO: 386586 - DNA, 30 bp, Artificial Sequence
  Synthetic oligonucleotide
ccgcattagatgaaccttagggcagtcaat

SEQ ID NO: 386587 - DNA, 30 bp, Artificial Sequence
  Synthetic oligonucleotide
tctcgggatggagtaataatagacgtcaat

SEQ ID NO: 386588 - DNA, 30 bp, Artificial Sequence
  Synthetic oligonucleotide
atccaatatggtcagggtatatctgtcaat

SEQ ID NO: 386589 - DNA, 30 bp, Artificial Sequence
  Synthetic oligonucleotide
ccgggaagctgcggtcctattcacttcaat

SEQ ID NO: 386590 - DNA, 30 bp, Artificial Sequence
  Synthetic oligonucleotide
accaatgcatgggtctcggttgacttcaat

SEQ ID NO: 386591 - DNA, 30 bp, Artificial Sequence
  Synthetic oligonucleotide
tttttgctatgtgtaaaaaacttcttcaat

SEQ ID NO: 386592 - DNA, 30 bp, Artificial Sequence
  Synthetic oligonucleotide
gaatatgaagatatgagtgggtagttcaat

SEQ ID NO: 386593 - DNA, 30 bp, Artificial Sequence
  Synthetic oligonucleotide
gttggtccacagtagttaggctatttcaat

SEQ ID NO: 386594 - DNA, 29 bp, Artificial Sequence
  Synthetic oligonucleotide
tctgcccttcgctcatggaatctttcaat

SEQ ID NO: 386595 - DNA, 30 bp, Artificial Sequence
  Synthetic oligonucleotide
gcattttagatcgtcggcacccaaaagaat

SEQ ID NO: 386596 - DNA, 30 bp, Artificial Sequence
  Synthetic oligonucleotide
cttcaccgattcaggcaatagggaaagaat

SEQ ID NO: 386597 - DNA, 30 bp, Artificial Sequence
  Synthetic oligonucleotide
gtgttaagctcgcggctgtctgtaaagaat

SEQ ID NO: 386598 - DNA, 30 bp, Artificial Sequence
  Synthetic oligonucleotide
aaggaatgctcttccggtcacggcaagaat

SEQ ID NO: 386599 - DNA, 30 bp, Artificial Sequence
  Synthetic oligonucleotide
atcacgacagcaattggctttccacagaat

SEQ ID NO: 386600 - DNA, 30 bp, Artificial Sequence
  Synthetic oligonucleotide
tgaatttggaagcaaggtatattacagaat

SEQ ID NO: 386601 - DNA, 30 bp, Artificial Sequence
  Synthetic oligonucleotide
tatatattccggagtgcattcggccagaat

SEQ ID NO: 386602 - DNA, 30 bp, Artificial Sequence
  Synthetic oligonucleotide
gcccctaatggaagggtagagctccagaat

SEQ ID NO: 386603 - DNA, 30 bp, Artificial Sequence
  Synthetic oligonucleotide
ggctagacaaggaataatgcaaagcagaat

SEQ ID NO: 386604 - DNA, 30 bp, Artificial Sequence
  Synthetic oligonucleotide
cgaaatcactgggcaggtttaaagcagaat

SEQ ID NO: 386605 - DNA, 30 bp, Artificial Sequence
  Synthetic oligonucleotide
gaagccagggataatggcggaatgcagaat

SEQ ID NO: 386606 - DNA, 30 bp, Artificial Sequence
  Synthetic oligonucleotide
tcaagtgatgcgaattcaaggaatcagaat

SEQ ID NO: 386607 - DNA, 30 bp, Artificial Sequence
  Synthetic oligonucleotide
tgcaggttcgtcatgttcatttatcagaat

SEQ ID NO: 386608 - DNA, 30 bp, Artificial Sequence
  Synthetic oligonucleotide
ggaatccgaattctatcgactactcagaat

SEQ ID NO: 386609 - DNA, 30 bp, Artificial Sequence
  Synthetic oligonucleotide
agatatcgtgactcttggcaccctcagaat

SEQ ID NO: 386610 - DNA, 30 bp, Artificial Sequence
  Synthetic oligonucleotide
tagaactacgtcccgttaattcaagagaat

SEQ ID NO: 386611 - DNA, 30 bp, Artificial Sequence
  Synthetic oligonucleotide
actctaaaggccaatattatggaagagaat

SEQ ID NO: 386612 - DNA, 30 bp, Artificial Sequence
  Synthetic oligonucleotide
tgtcgtttagcctaaaacagttaagagaat

SEQ ID NO: 386613 - DNA, 30 bp, Artificial Sequence
  Synthetic oligonucleotide
ggagcgactatcaaccggcgcacagagaat

SEQ ID NO: 386614 - DNA, 30 bp, Artificial Sequence
  Synthetic oligonucleotide
agactgaccgactctcttaagtcagagaat

SEQ ID NO: 386615 - DNA, 30 bp, Artificial Sequence
  Synthetic oligonucleotide
ttggtctaacagctataaacattagagaat

SEQ ID NO: 386616 - DNA, 30 bp, Artificial Sequence
  Synthetic oligonucleotide
atttaagcacattctacccttccatagaat

SEQ ID NO: 386617 - DNA, 30 bp, Artificial Sequence
  Synthetic oligonucleotide
taatatgctcactattggagagcctagaat

SEQ ID NO: 386618 - DNA, 30 bp, Artificial Sequence
  Synthetic oligonucleotide
acctttgtcggaccatcgattcagtagaat

SEQ ID NO: 386619 - DNA, 30 bp, Artificial Sequence
  Synthetic oligonucleotide
ttggatgtgctggtcatacagcggtagaat

SEQ ID NO: 386620 - DNA, 30 bp, Artificial Sequence
  Synthetic oligonucleotide
aggctcggaagggtattaaccctgtagaat

SEQ ID NO: 386621 - DNA, 30 bp, Artificial Sequence
  Synthetic oligonucleotide
cacagccttttgcgttttctgccttagaat

SEQ ID NO: 386622 - DNA, 31 bp, Artificial Sequence
  Synthetic oligonucleotide
ccagtttctgattcccaatccgatttagaat

SEQ ID NO: 386623 - DNA, 30 bp, Artificial Sequence
  Synthetic oligonucleotide
tataactcgtccgtgagggtcgtttagaat

SEQ ID NO: 386624 - DNA, 30 bp, Artificial Sequence
  Synthetic oligonucleotide
catactagacgatcaacgctttacacgaat

SEQ ID NO: 386625 - DNA, 30 bp, Artificial Sequence
  Synthetic oligonucleotide
gcccagatgccgaacttctcgcccacgaat

SEQ ID NO: 386626 - DNA, 30 bp, Artificial Sequence
  Synthetic oligonucleotide
atatatccaaacactaaatgtggcacgaat

SEQ ID NO: 386627 - DNA, 30 bp, Artificial Sequence
  Synthetic oligonucleotide
acaggagcattactgaaactctagacgaat

SEQ ID NO: 386628 - DNA, 30 bp, Artificial Sequence
  Synthetic oligonucleotide
ggtcgtcagcataccgactagctgacgaat

SEQ ID NO: 386629 - DNA, 30 bp, Artificial Sequence
  Synthetic oligonucleotide
gaacgcgctttgagaggcggaaatacgaat

SEQ ID NO: 386630 - DNA, 30 bp, Artificial Sequence
  Synthetic oligonucleotide
tatttgcacaggtaggtggcgtgtacgaat

SEQ ID NO: 386631 - DNA, 30 bp, Artificial Sequence
  Synthetic oligonucleotide
aaagttaggcggacgatatgtcaaccgaat

SEQ ID NO: 386632 - DNA, 30 bp, Artificial Sequence
  Synthetic oligonucleotide
atgtgcgacaattctgactagggaccgaat

SEQ ID NO: 386633 - DNA, 30 bp, Artificial Sequence
  Synthetic oligonucleotide
gtatggatttggcgcacatattcgccgaat

SEQ ID NO: 386634 - DNA, 31 bp, Artificial Sequence
  Synthetic oligonucleotide
gacgggacgcggccttgtgttgtttccgaat

SEQ ID NO: 386635 - DNA, 30 bp, Artificial Sequence
  Synthetic oligonucleotide
cattgaaaatataccgatcgcgaagcgaat

SEQ ID NO: 386636 - DNA, 30 bp, Artificial Sequence
  Synthetic oligonucleotide
aactcctttacccaggggcctatagcgaat

SEQ ID NO: 386637 - DNA, 30 bp, Artificial Sequence
  Synthetic oligonucleotide
gtaaccgctggctcaatcacggtagcgaat

SEQ ID NO: 386638 - DNA, 30 bp, Artificial Sequence
  Synthetic oligonucleotide
tacgttcgttactgatcgcgcagcgcgaat

SEQ ID NO: 386639 - DNA, 30 bp, Artificial Sequence
  Synthetic oligonucleotide
tgatttctcggtagagaaccgggcgcgaat

SEQ ID NO: 386640 - DNA, 30 bp, Artificial Sequence
  Synthetic oligonucleotide
gaggatgccagtggatattacctcgcgaat

SEQ ID NO: 386641 - DNA, 30 bp, Artificial Sequence
  Synthetic oligonucleotide
actaccaatttctcaggtactttcgcgaat

SEQ ID NO: 386642 - DNA, 30 bp, Artificial Sequence
  Synthetic oligonucleotide
tgtcgcagtgttcaagagcgccaggcgaat

SEQ ID NO: 386643 - DNA, 30 bp, Artificial Sequence
  Synthetic oligonucleotide
ccggaggttatataatacaacccggcgaat

SEQ ID NO: 386644 - DNA, 30 bp, Artificial Sequence
  Synthetic oligonucleotide
cgacatagaccttagttgtaacgggcgaat

SEQ ID NO: 386645 - DNA, 30 bp, Artificial Sequence
  Synthetic oligonucleotide
cgcagttcaaccaacctcgtatgggcgaat

SEQ ID NO: 386646 - DNA, 30 bp, Artificial Sequence
  Synthetic oligonucleotide
ccgagcaaatcgacacgcagattggcgaat

SEQ ID NO: 386647 - DNA, 30 bp, Artificial Sequence
  Synthetic oligonucleotide
gctggtgagtctgatactatccaatcgaat

SEQ ID NO: 386648 - DNA, 30 bp, Artificial Sequence
  Synthetic oligonucleotide
tctcggaatccataagaggaggaatcgaat

SEQ ID NO: 386649 - DNA, 30 bp, Artificial Sequence
  Synthetic oligonucleotide
gaaaagtgatcactgtgtcttatatcgaat

SEQ ID NO: 386650 - DNA, 30 bp, Artificial Sequence
  Synthetic oligonucleotide
ctcgcagtaccatagggcatctcctcgaat

SEQ ID NO: 386651 - DNA, 30 bp, Artificial Sequence
  Synthetic oligonucleotide
ggcgttacgtggacttatttgatctcgaat

SEQ ID NO: 386652 - DNA, 30 bp, Artificial Sequence
  Synthetic oligonucleotide
ggcatctcgctctcctagttagagtcgaat

SEQ ID NO: 386653 - DNA, 30 bp, Artificial Sequence
  Synthetic oligonucleotide
gttccgtaattattcctgcccacgtcgaat

SEQ ID NO: 386654 - DNA, 30 bp, Artificial Sequence
  Synthetic oligonucleotide
cttcccgtggcctgaaagaagccttcgaat

SEQ ID NO: 386655 - DNA, 30 bp, Artificial Sequence
  Synthetic oligonucleotide
gagtcccgtggatcactacccgtaaggaat

SEQ ID NO: 386656 - DNA, 30 bp, Artificial Sequence
  Synthetic oligonucleotide
gggcctgactgtgcgatcgcacacaggaat

SEQ ID NO: 386657 - DNA, 30 bp, Artificial Sequence
  Synthetic oligonucleotide
aatcggaataaagtatcaccctccaggaat

SEQ ID NO: 386658 - DNA, 30 bp, Artificial Sequence
  Synthetic oligonucleotide
caaggtgctcagaagtcttgcagcaggaat

SEQ ID NO: 386659 - DNA, 30 bp, Artificial Sequence
  Synthetic oligonucleotide
aagatgtctgaatgcatgtcccgcaggaat

SEQ ID NO: 386660 - DNA, 30 bp, Artificial Sequence
  Synthetic oligonucleotide
agatcaatggccgtgtgtatatgcaggaat

SEQ ID NO: 386661 - DNA, 30 bp, Artificial Sequence
  Synthetic oligonucleotide
ctcgacgtcaaagctttgtcaaagaggaat

SEQ ID NO: 386662 - DNA, 30 bp, Artificial Sequence
  Synthetic oligonucleotide
caaagccatctcgagctcacttagaggaat

SEQ ID NO: 386663 - DNA, 30 bp, Artificial Sequence
  Synthetic oligonucleotide
gctcacgtcctccgggagcagttgaggaat

SEQ ID NO: 386664 - DNA, 30 bp, Artificial Sequence
  Synthetic oligonucleotide
tgactgttgtcccaaggggtcaataggaat

SEQ ID NO: 386665 - DNA, 30 bp, Artificial Sequence
  Synthetic oligonucleotide
caaatgtggatattgaatttctataggaat

SEQ ID NO: 386666 - DNA, 30 bp, Artificial Sequence
  Synthetic oligonucleotide
cgactccgaccgttgtttcctaaccggaat

SEQ ID NO: 386667 - DNA, 30 bp, Artificial Sequence
  Synthetic oligonucleotide
ttgctatagtcggtcgacttccaccggaat

SEQ ID NO: 386668 - DNA, 30 bp, Artificial Sequence
  Synthetic oligonucleotide
tagagtggggctaccgcgctcacccggaat

SEQ ID NO: 386669 - DNA, 30 bp, Artificial Sequence
  Synthetic oligonucleotide
aaggggctcacagttaggcgtagccggaat

SEQ ID NO: 386670 - DNA, 30 bp, Artificial Sequence
  Synthetic oligonucleotide
tctggacatgttaagtttgtctggcggaat

SEQ ID NO: 386671 - DNA, 30 bp, Artificial Sequence
  Synthetic oligonucleotide
gagcaatcgatacctgctgtctctcggaat

SEQ ID NO: 386672 - DNA, 30 bp, Artificial Sequence
  Synthetic oligonucleotide
acattcggcgcggacaattcatgtcggaat

SEQ ID NO: 386673 - DNA, 30 bp, Artificial Sequence
  Synthetic oligonucleotide
tcctataaacgattcagccgtattcggaat

SEQ ID NO: 386674 - DNA, 30 bp, Artificial Sequence
  Synthetic oligonucleotide
ggattcccacgacctacggatcttcggaat

SEQ ID NO: 386675 - DNA, 30 bp, Artificial Sequence
  Synthetic oligonucleotide
agttattgggtctttgatagcatagggaat

SEQ ID NO: 386676 - DNA, 30 bp, Artificial Sequence
  Synthetic oligonucleotide
atttcctacgcgtgtacagtagccgggaat

SEQ ID NO: 386677 - DNA, 30 bp, Artificial Sequence
  Synthetic oligonucleotide
ctaaagatgtccctgattggctgcgggaat

SEQ ID NO: 386678 - DNA, 30 bp, Artificial Sequence
  Synthetic oligonucleotide
agggtttctcaacgtcttggattcgggaat

SEQ ID NO: 386679 - DNA, 30 bp, Artificial Sequence
  Synthetic oligonucleotide
cagttgcccagctactccgtgtgggggaat

SEQ ID NO: 386680 - DNA, 30 bp, Artificial Sequence
  Synthetic oligonucleotide
ctttaagtctgctacgaatagatggggaat

SEQ ID NO: 386681 - DNA, 30 bp, Artificial Sequence
  Synthetic oligonucleotide
caacatacccttttctaatcgttggggaat

SEQ ID NO: 386682 - DNA, 30 bp, Artificial Sequence
  Synthetic oligonucleotide
tacgtctgctgctttgccgcgcttgggaat

SEQ ID NO: 386683 - DNA, 30 bp, Artificial Sequence
  Synthetic oligonucleotide
cagctgacattcatttttgattttgggaat

SEQ ID NO: 386684 - DNA, 30 bp, Artificial Sequence
  Synthetic oligonucleotide
gcatgcgaaatattactccaaaaatggaat

SEQ ID NO: 386685 - DNA, 30 bp, Artificial Sequence
  Synthetic oligonucleotide
cctaaaaacgcgtaatgtctaccatggaat

SEQ ID NO: 386686 - DNA, 30 bp, Artificial Sequence
  Synthetic oligonucleotide
ataagacccttggttacctgggtatggaat

SEQ ID NO: 386687 - DNA, 30 bp, Artificial Sequence
  Synthetic oligonucleotide
gcctaagttttcagataagcatactggaat

SEQ ID NO: 386688 - DNA, 30 bp, Artificial Sequence
  Synthetic oligonucleotide
catcgtcagtaacaacttatgtactggaat

SEQ ID NO: 386689 - DNA, 30 bp, Artificial Sequence
  Synthetic oligonucleotide
attttggtcctcatctggtacacgtggaat

SEQ ID NO: 386690 - DNA, 30 bp, Artificial Sequence
  Synthetic oligonucleotide
gccgaacatattctgcaatagccgtggaat

SEQ ID NO: 386691 - DNA, 30 bp, Artificial Sequence
  Synthetic oligonucleotide
tagactgcatcaaccccacagggttggaat

SEQ ID NO: 386692 - DNA, 30 bp, Artificial Sequence
  Synthetic oligonucleotide
tctgacgggatatagaccgggttttggaat

SEQ ID NO: 386693 - DNA, 30 bp, Artificial Sequence
  Synthetic oligonucleotide
tcaatgaatggatatattgcaagaatgaat

SEQ ID NO: 386694 - DNA, 30 bp, Artificial Sequence
  Synthetic oligonucleotide
ggtatcaattcaggaataccgaccatgaat

SEQ ID NO: 386695 - DNA, 30 bp, Artificial Sequence
  Synthetic oligonucleotide
gtcgtcgaattatacgaggtatccatgaat

SEQ ID NO: 386696 - DNA, 30 bp, Artificial Sequence
  Synthetic oligonucleotide
aagatccttaagcgatgacttgtcatgaat

SEQ ID NO: 386697 - DNA, 30 bp, Artificial Sequence
  Synthetic oligonucleotide
tataaggttgatagtgtttacttcatgaat

SEQ ID NO: 386698 - DNA, 30 bp, Artificial Sequence
  Synthetic oligonucleotide
ctaagttcggatgcgtttgcttatatgaat

SEQ ID NO: 386699 - DNA, 30 bp, Artificial Sequence
  Synthetic oligonucleotide
agcaatcactcagtgaaaacattactgaat

SEQ ID NO: 386700 - DNA, 30 bp, Artificial Sequence
  Synthetic oligonucleotide
agcctactagggggattaatacacctgaat

SEQ ID NO: 386701 - DNA, 30 bp, Artificial Sequence
  Synthetic oligonucleotide
tgtggaaggattgacagcaaatacctgaat

SEQ ID NO: 386702 - DNA, 30 bp, Artificial Sequence
  Synthetic oligonucleotide
gaccacgacctctaagtcggctggctgaat

SEQ ID NO: 386703 - DNA, 30 bp, Artificial Sequence
  Synthetic oligonucleotide
cgcgtttatgtgtaaaaacattggctgaat

SEQ ID NO: 386704 - DNA, 30 bp, Artificial Sequence
  Synthetic oligonucleotide
ttatgaagaaaactgtagtcggtgctgaat

SEQ ID NO: 386705 - DNA, 30 bp, Artificial Sequence
  Synthetic oligonucleotide
atatggttttgcgatcagatctctctgaat

SEQ ID NO: 386706 - DNA, 30 bp, Artificial Sequence
  Synthetic oligonucleotide
gtccgtcctaatagccttttcatggtgaat

SEQ ID NO: 386707 - DNA, 30 bp, Artificial Sequence
  Synthetic oligonucleotide
ttctttggattacccgatagtatggtgaat

SEQ ID NO: 386708 - DNA, 30 bp, Artificial Sequence
  Synthetic oligonucleotide
acaagacctagcggtcctttgctggtgaat

SEQ ID NO: 386709 - DNA, 30 bp, Artificial Sequence
  Synthetic oligonucleotide
ggatctgcaacatcaagcatcgatgtgaat

SEQ ID NO: 386710 - DNA, 30 bp, Artificial Sequence
  Synthetic oligonucleotide
tagctagctataacgtcatggactgtgaat

SEQ ID NO: 386711 - DNA, 30 bp, Artificial Sequence
  Synthetic oligonucleotide
ccccccgtatagcatacatggcttgtgaat

SEQ ID NO: 386712 - DNA, 30 bp, Artificial Sequence
  Synthetic oligonucleotide
gtgagggtttggcgcacaatgcaattgaat

SEQ ID NO: 386713 - DNA, 30 bp, Artificial Sequence
  Synthetic oligonucleotide
ctatctttaggtttgcattcatgattgaat

SEQ ID NO: 386714 - DNA, 30 bp, Artificial Sequence
  Synthetic oligonucleotide
tagagcagaagatctgggtgctccttgaat

SEQ ID NO: 386715 - DNA, 30 bp, Artificial Sequence
  Synthetic oligonucleotide
gcatatggcatgcgagagaatttcttgaat

SEQ ID NO: 386716 - DNA, 30 bp, Artificial Sequence
  Synthetic oligonucleotide
ggtagtctcggttttgacttagcaaataat

SEQ ID NO: 386717 - DNA, 30 bp, Artificial Sequence
  Synthetic oligonucleotide
caattctttgttaaaatctctctaaataat

SEQ ID NO: 386718 - DNA, 30 bp, Artificial Sequence
  Synthetic oligonucleotide
taaaaaagtgaaggcatcgattagaataat

SEQ ID NO: 386719 - DNA, 30 bp, Artificial Sequence
  Synthetic oligonucleotide
agtatgtttgcagaccggcggcataataat

SEQ ID NO: 386720 - DNA, 30 bp, Artificial Sequence
  Synthetic oligonucleotide
aaatgcgccccaaaccaccggtttaataat

SEQ ID NO: 386721 - DNA, 30 bp, Artificial Sequence
  Synthetic oligonucleotide
tatcagcgtaccccaccttattaacataat

SEQ ID NO: 386722 - DNA, 30 bp, Artificial Sequence
  Synthetic oligonucleotide
ttgattttatcactttctccaacacataat

SEQ ID NO: 386723 - DNA, 30 bp, Artificial Sequence
  Synthetic oligonucleotide
ccggaacgccccggcggatacacacataat

SEQ ID NO: 386724 - DNA, 30 bp, Artificial Sequence
  Synthetic oligonucleotide
cagctggcgtacttctttaggtgccataat

SEQ ID NO: 386725 - DNA, 30 bp, Artificial Sequence
  Synthetic oligonucleotide
tgtatcctgaactttcaccctatccataat

SEQ ID NO: 386726 - DNA, 30 bp, Artificial Sequence
  Synthetic oligonucleotide
actatttgttaaccaagacttgggcataat

SEQ ID NO: 386727 - DNA, 30 bp, Artificial Sequence
  Synthetic oligonucleotide
gaatccgacggcgtatgaactctgcataat

SEQ ID NO: 386728 - DNA, 30 bp, Artificial Sequence
  Synthetic oligonucleotide
gttgaggcctccattaacgaggcagataat

SEQ ID NO: 386729 - DNA, 30 bp, Artificial Sequence
  Synthetic oligonucleotide
tagcataattggccgacgtattccgataat

SEQ ID NO: 386730 - DNA, 30 bp, Artificial Sequence
  Synthetic oligonucleotide
aagcgttgatcgtctggtggcagcgataat

SEQ ID NO: 386731 - DNA, 30 bp, Artificial Sequence
  Synthetic oligonucleotide
cttggctaggtatcgctccgtaaggataat

SEQ ID NO: 386732 - DNA, 30 bp, Artificial Sequence
  Synthetic oligonucleotide
ctgcatccgggtactctatcgacggataat

SEQ ID NO: 386733 - DNA, 30 bp, Artificial Sequence
  Synthetic oligonucleotide
gcggttgaatcgcaaaggtggcgggataat

SEQ ID NO: 386734 - DNA, 30 bp, Artificial Sequence
  Synthetic oligonucleotide
atgtattgaagcggtttctcaatggataat

SEQ ID NO: 386735 - DNA, 30 bp, Artificial Sequence
  Synthetic oligonucleotide
aattgcctggtgcgatcaccacctgataat

SEQ ID NO: 386736 - DNA, 30 bp, Artificial Sequence
  Synthetic oligonucleotide
ttatcgaggcggccatctaacgctgataat

SEQ ID NO: 386737 - DNA, 30 bp, Artificial Sequence
  Synthetic oligonucleotide
ataccactagcactaggggtcggtgataat

SEQ ID NO: 386738 - DNA, 30 bp, Artificial Sequence
  Synthetic oligonucleotide
gaaagcggttgaagggaatatattgataat

SEQ ID NO: 386739 - DNA, 30 bp, Artificial Sequence
  Synthetic oligonucleotide
gccaacaagtctataacccagcttgataat

SEQ ID NO: 386740 - DNA, 30 bp, Artificial Sequence
  Synthetic oligonucleotide
ctctacaacgactgcacacgatttgataat

SEQ ID NO: 386741 - DNA, 30 bp, Artificial Sequence
  Synthetic oligonucleotide
catgaagctacttgacgcggaaaatataat

SEQ ID NO: 386742 - DNA, 30 bp, Artificial Sequence
  Synthetic oligonucleotide
taccacgagaacgctggtcgagaatataat

SEQ ID NO: 386743 - DNA, 30 bp, Artificial Sequence
  Synthetic oligonucleotide
tcgtcgtacttgtgtcgaacaatatataat

SEQ ID NO: 386744 - DNA, 30 bp, Artificial Sequence
  Synthetic oligonucleotide
gatgacatttattgttgtagtttatataat

SEQ ID NO: 386745 - DNA, 30 bp, Artificial Sequence
  Synthetic oligonucleotide
cccaccttaactataccgaactactataat

SEQ ID NO: 386746 - DNA, 30 bp, Artificial Sequence
  Synthetic oligonucleotide
aaaggctaatctgaccctatcaagtataat

SEQ ID NO: 386747 - DNA, 30 bp, Artificial Sequence
  Synthetic oligonucleotide
gcaccgaaaacatgtagggtgcagtataat

SEQ ID NO: 386748 - DNA, 31 bp, Artificial Sequence
  Synthetic oligonucleotide
atacgactggtggcgcatgggagagtataat

SEQ ID NO: 386749 - DNA, 30 bp, Artificial Sequence
  Synthetic oligonucleotide
gactttgctacgacgttacgcacgtataat

SEQ ID NO: 386750 - DNA, 30 bp, Artificial Sequence
  Synthetic oligonucleotide
atcactcatgaatgtccagttccgtataat

SEQ ID NO: 386751 - DNA, 30 bp, Artificial Sequence
  Synthetic oligonucleotide
agtatcgcgccccgcgtggagccttataat

SEQ ID NO: 386752 - DNA, 30 bp, Artificial Sequence
  Synthetic oligonucleotide
caggttatgtcgatcaaaagaaaaactaat

SEQ ID NO: 386753 - DNA, 30 bp, Artificial Sequence
  Synthetic oligonucleotide
ccaaggttactgcattaagttaaaactaat

SEQ ID NO: 386754 - DNA, 30 bp, Artificial Sequence
  Synthetic oligonucleotide
agaacgtaaaaggaatgtgtttacactaat

SEQ ID NO: 386755 - DNA, 30 bp, Artificial Sequence
  Synthetic oligonucleotide
aaaatagtttccagtatgatggccactaat

SEQ ID NO: 386756 - DNA, 30 bp, Artificial Sequence
  Synthetic oligonucleotide
gcaaacattccgttagcttatccgactaat

SEQ ID NO: 386757 - DNA, 30 bp, Artificial Sequence
  Synthetic oligonucleotide
tcctgaagacgctgtactacgcggactaat

SEQ ID NO: 386758 - DNA, 30 bp, Artificial Sequence
  Synthetic oligonucleotide
aagttagtcttatagcaacgtatgactaat

SEQ ID NO: 386759 - DNA, 30 bp, Artificial Sequence
  Synthetic oligonucleotide
aggatattatctataaaccaagatactaat

SEQ ID NO: 386760 - DNA, 30 bp, Artificial Sequence
  Synthetic oligonucleotide
agtaccggtagcgtgcagctaattactaat

SEQ ID NO: 386761 - DNA, 30 bp, Artificial Sequence
  Synthetic oligonucleotide
cgcacgggagcaattgttatgtcacctaat

SEQ ID NO: 386762 - DNA, 30 bp, Artificial Sequence
  Synthetic oligonucleotide
atgtcaagcggattatcaatcgttcctaat

SEQ ID NO: 386763 - DNA, 29 bp, Artificial Sequence
  Synthetic oligonucleotide
gaccccctaagacagtagggggagctaat

SEQ ID NO: 386764 - DNA, 30 bp, Artificial Sequence
  Synthetic oligonucleotide
tactcaacatgttctacctctggcgctaat

SEQ ID NO: 386765 - DNA, 30 bp, Artificial Sequence
  Synthetic oligonucleotide
ccgcactgtggaacgggacactgcgctaat

SEQ ID NO: 386766 - DNA, 30 bp, Artificial Sequence
  Synthetic oligonucleotide
agacccctcgcgctcgaagcttgcgctaat

SEQ ID NO: 386767 - DNA, 30 bp, Artificial Sequence
  Synthetic oligonucleotide
ggtgaatcggtagagacaaaagcggctaat

SEQ ID NO: 386768 - DNA, 30 bp, Artificial Sequence
  Synthetic oligonucleotide
acctgcttgttggaaatattgtgggctaat

SEQ ID NO: 386769 - DNA, 30 bp, Artificial Sequence
  Synthetic oligonucleotide
ttcggacggacagacaaccaactggctaat

SEQ ID NO: 386770 - DNA, 30 bp, Artificial Sequence
  Synthetic oligonucleotide
gagcgaccggtggatttacaagctgctaat

SEQ ID NO: 386771 - DNA, 30 bp, Artificial Sequence
  Synthetic oligonucleotide
gaaccgaacacattcatagtaattgctaat

SEQ ID NO: 386772 - DNA, 30 bp, Artificial Sequence
  Synthetic oligonucleotide
attgtctaccatgagtcaagtggatctaat

SEQ ID NO: 386773 - DNA, 29 bp, Artificial Sequence
  Synthetic oligonucleotide
tgtgagatagccactaactgttatctaat

SEQ ID NO: 386774 - DNA, 30 bp, Artificial Sequence
  Synthetic oligonucleotide
tgtataagaggaagctcagtagactctaat

SEQ ID NO: 386775 - DNA, 30 bp, Artificial Sequence
  Synthetic oligonucleotide
accataatcgctagataatcatcctctaat

SEQ ID NO: 386776 - DNA, 31 bp, Artificial Sequence
  Synthetic oligonucleotide
gtgttcaaagcgccaacagatgcgctctaat

SEQ ID NO: 386777 - DNA, 29 bp, Artificial Sequence
  Synthetic oligonucleotide
atggcctacttatctttttacagtctaat

SEQ ID NO: 386778 - DNA, 30 bp, Artificial Sequence
  Synthetic oligonucleotide
cctatgtacggttcggctctggagtctaat

SEQ ID NO: 386779 - DNA, 30 bp, Artificial Sequence
  Synthetic oligonucleotide
ttgcccgttacttggagagacctgtctaat

SEQ ID NO: 386780 - DNA, 30 bp, Artificial Sequence
  Synthetic oligonucleotide
tctcatcgtaagaaggttagtctgtctaat

SEQ ID NO: 386781 - DNA, 30 bp, Artificial Sequence
  Synthetic oligonucleotide
ttcgatgttggtataccgtgcggttctaat

SEQ ID NO: 386782 - DNA, 30 bp, Artificial Sequence
  Synthetic oligonucleotide
catttagttcccctctaggtgagaagtaat

SEQ ID NO: 386783 - DNA, 30 bp, Artificial Sequence
  Synthetic oligonucleotide
ataacgacgggcattaccatagtaagtaat

SEQ ID NO: 386784 - DNA, 30 bp, Artificial Sequence
  Synthetic oligonucleotide
attctcgggctaagtgtgggcaacagtaat

SEQ ID NO: 386785 - DNA, 30 bp, Artificial Sequence
  Synthetic oligonucleotide
ccggaacggtgtaggtataggtccagtaat

SEQ ID NO: 386786 - DNA, 30 bp, Artificial Sequence
  Synthetic oligonucleotide
cgtaactgctaggatagtagtcgcagtaat

SEQ ID NO: 386787 - DNA, 30 bp, Artificial Sequence
  Synthetic oligonucleotide
gctgaagtgccgcgctatttaaagagtaat

SEQ ID NO: 386788 - DNA, 30 bp, Artificial Sequence
  Synthetic oligonucleotide
acctactggtttggattaatctagagtaat

SEQ ID NO: 386789 - DNA, 30 bp, Artificial Sequence
  Synthetic oligonucleotide
tacatccgggactgtcagcggccgagtaat

SEQ ID NO: 386790 - DNA, 30 bp, Artificial Sequence
  Synthetic oligonucleotide
agtatatctcagcaatacgcacggagtaat

SEQ ID NO: 386791 - DNA, 30 bp, Artificial Sequence
  Synthetic oligonucleotide
cagataagttcgttccggttagatagtaat

SEQ ID NO: 386792 - DNA, 30 bp, Artificial Sequence
  Synthetic oligonucleotide
ctttgccctaaagaggccttggatagtaat

SEQ ID NO: 386793 - DNA, 30 bp, Artificial Sequence
  Synthetic oligonucleotide
attgccagtaagtcggataattatagtaat

SEQ ID NO: 386794 - DNA, 30 bp, Artificial Sequence
  Synthetic oligonucleotide
tactgctggagaagaggttgttgtagtaat

SEQ ID NO: 386795 - DNA, 30 bp, Artificial Sequence
  Synthetic oligonucleotide
caattgtgtcgagcgcattcgtgacgtaat

SEQ ID NO: 386796 - DNA, 30 bp, Artificial Sequence
  Synthetic oligonucleotide
aacttaaggcttcgcttccgaacccgtaat

SEQ ID NO: 386797 - DNA, 30 bp, Artificial Sequence
  Synthetic oligonucleotide
gaatctacggccacatttggcactcgtaat

SEQ ID NO: 386798 - DNA, 30 bp, Artificial Sequence
  Synthetic oligonucleotide
cggagcatgttcctgtgttgtcgtcgtaat

SEQ ID NO: 386799 - DNA, 30 bp, Artificial Sequence
  Synthetic oligonucleotide
gacgatttttagactcattttgaaggtaat

SEQ ID NO: 386800 - DNA, 30 bp, Artificial Sequence
  Synthetic oligonucleotide
gactcaatgtgtcctgaatttccaggtaat

SEQ ID NO: 386801 - DNA, 30 bp, Artificial Sequence
  Synthetic oligonucleotide
tatagatagtatagaagtttgaacggtaat

SEQ ID NO: 386802 - DNA, 30 bp, Artificial Sequence
  Synthetic oligonucleotide
gggagcaacgcagcctcggaacacggtaat

SEQ ID NO: 386803 - DNA, 30 bp, Artificial Sequence
  Synthetic oligonucleotide
acatgatttagcgttcacagtcggggtaat

SEQ ID NO: 386804 - DNA, 30 bp, Artificial Sequence
  Synthetic oligonucleotide
aatacggcggaatatacgtacgatggtaat

SEQ ID NO: 386805 - DNA, 30 bp, Artificial Sequence
  Synthetic oligonucleotide
acgagaaggattctccgacgtgtatgtaat

SEQ ID NO: 386806 - DNA, 30 bp, Artificial Sequence
  Synthetic oligonucleotide
tcgcggcgagttgtaattctggcgtgtaat

SEQ ID NO: 386807 - DNA, 30 bp, Artificial Sequence
  Synthetic oligonucleotide
taacgtacttatatgcgcgtatggtgtaat

SEQ ID NO: 386808 - DNA, 31 bp, Artificial Sequence
  Synthetic oligonucleotide
ctcgtaggccgcgcgccttggttattgtaat

SEQ ID NO: 386809 - DNA, 30 bp, Artificial Sequence
  Synthetic oligonucleotide
tcctatatgcggctctcgttctgttgtaat

SEQ ID NO: 386810 - DNA, 30 bp, Artificial Sequence
  Synthetic oligonucleotide
tggcaggcttgtttgctttcactttgtaat

SEQ ID NO: 386811 - DNA, 30 bp, Artificial Sequence
  Synthetic oligonucleotide
aaagtccgctcttcgatcaggccaattaat

SEQ ID NO: 386812 - DNA, 30 bp, Artificial Sequence
  Synthetic oligonucleotide
cttaacttagcgcattgcgatagaattaat

SEQ ID NO: 386813 - DNA, 31 bp, Artificial Sequence
  Synthetic oligonucleotide
aatgacatgggatcgcgcaggcaacattaat

SEQ ID NO: 386814 - DNA, 30 bp, Artificial Sequence
  Synthetic oligonucleotide
caagcattttctagcgacagggacattaat

SEQ ID NO: 386815 - DNA, 30 bp, Artificial Sequence
  Synthetic oligonucleotide
gaatgggagggattatgattaagcattaat

SEQ ID NO: 386816 - DNA, 30 bp, Artificial Sequence
  Synthetic oligonucleotide
gcatatcagtatacaatagtgatcattaat

SEQ ID NO: 386817 - DNA, 30 bp, Artificial Sequence
  Synthetic oligonucleotide
agatccactaggatattcgacaatattaat

SEQ ID NO: 386818 - DNA, 30 bp, Artificial Sequence
  Synthetic oligonucleotide
ttcaagcgtgccgctagcggagatattaat

SEQ ID NO: 386819 - DNA, 30 bp, Artificial Sequence
  Synthetic oligonucleotide
tcctacacgtagtccgtagttagtattaat

SEQ ID NO: 386820 - DNA, 30 bp, Artificial Sequence
  Synthetic oligonucleotide
caatatggacacagcactaagcgtattaat

SEQ ID NO: 386821 - DNA, 30 bp, Artificial Sequence
  Synthetic oligonucleotide
cgcgctcacgcctccttcatggtacttaat

SEQ ID NO: 386822 - DNA, 30 bp, Artificial Sequence
  Synthetic oligonucleotide
gatgtatacgaggtcagtagcgtccttaat

SEQ ID NO: 386823 - DNA, 30 bp, Artificial Sequence
  Synthetic oligonucleotide
gaggataaggaattgcatcctccgcttaat

SEQ ID NO: 386824 - DNA, 30 bp, Artificial Sequence
  Synthetic oligonucleotide
ttgggtgacagagccctatgcgggcttaat

SEQ ID NO: 386825 - DNA, 30 bp, Artificial Sequence
  Synthetic oligonucleotide
cgcgtattaactcttggccgcgtgcttaat

SEQ ID NO: 386826 - DNA, 30 bp, Artificial Sequence
  Synthetic oligonucleotide
gcctttaatggtaaacgttcaactcttaat

SEQ ID NO: 386827 - DNA, 30 bp, Artificial Sequence
  Synthetic oligonucleotide
ttttaatatagaggacaacgaggtcttaat

SEQ ID NO: 386828 - DNA, 30 bp, Artificial Sequence
  Synthetic oligonucleotide
tctgggaggaaagtgtgattatgtcttaat

SEQ ID NO: 386829 - DNA, 30 bp, Artificial Sequence
  Synthetic oligonucleotide
tacatgcctgaagacctagcgtttcttaat

SEQ ID NO: 386830 - DNA, 30 bp, Artificial Sequence
  Synthetic oligonucleotide
acgcgaggtcatgttggggggcacgttaat

SEQ ID NO: 386831 - DNA, 30 bp, Artificial Sequence
  Synthetic oligonucleotide
atgactaagaataccctggctcacgttaat

SEQ ID NO: 386832 - DNA, 30 bp, Artificial Sequence
  Synthetic oligonucleotide
ccgtaagagcagttaccctggtacgttaat

SEQ ID NO: 386833 - DNA, 30 bp, Artificial Sequence
  Synthetic oligonucleotide
ccaagttcttcaggcgggtgttgcgttaat

SEQ ID NO: 386834 - DNA, 30 bp, Artificial Sequence
  Synthetic oligonucleotide
catcgccgtaggccattctagatcgttaat

SEQ ID NO: 386835 - DNA, 30 bp, Artificial Sequence
  Synthetic oligonucleotide
cgggaatatcttaaggatcggccggttaat

SEQ ID NO: 386836 - DNA, 30 bp, Artificial Sequence
  Synthetic oligonucleotide
gaaaatggtgagatactctgcgatgttaat

SEQ ID NO: 386837 - DNA, 30 bp, Artificial Sequence
  Synthetic oligonucleotide
tcatgagggatggtgtatgtaagtgttaat

SEQ ID NO: 386838 - DNA, 30 bp, Artificial Sequence
  Synthetic oligonucleotide
actgtttcagagcacataccgagtgttaat

SEQ ID NO: 386839 - DNA, 30 bp, Artificial Sequence
  Synthetic oligonucleotide
gacttcagacagggggaaagtctatttaat

SEQ ID NO: 386840 - DNA, 30 bp, Artificial Sequence
  Synthetic oligonucleotide
agacgttctcggctaagccacagctttaat

SEQ ID NO: 386841 - DNA, 30 bp, Artificial Sequence
  Synthetic oligonucleotide
gtggcgtagtatgctatgaacgtctttaat

SEQ ID NO: 386842 - DNA, 30 bp, Artificial Sequence
  Synthetic oligonucleotide
gagctggtgtgccctggggcaaagtttaat

SEQ ID NO: 386843 - DNA, 30 bp, Artificial Sequence
  Synthetic oligonucleotide
agcaccactactagttatcacccgtttaat

SEQ ID NO: 386844 - DNA, 30 bp, Artificial Sequence
  Synthetic oligonucleotide
tctggccgttggccgctgggtcggtttaat

SEQ ID NO: 386845 - DNA, 30 bp, Artificial Sequence
  Synthetic oligonucleotide
ggagtatacagaggggatcagtattttaat

SEQ ID NO: 386846 - DNA, 30 bp, Artificial Sequence
  Synthetic oligonucleotide
agttatctatcggacgtaacaagttttaat

SEQ ID NO: 386847 - DNA, 30 bp, Artificial Sequence
  Synthetic oligonucleotide
ccttggagcctcattaggccgcgttttaat

SEQ ID NO: 386848 - DNA, 30 bp, Artificial Sequence
  Synthetic oligonucleotide
ggcatagattttaccaatatatgttttaat

SEQ ID NO: 386849 - DNA, 30 bp, Artificial Sequence
  Synthetic oligonucleotide
gactgtagcagtgcgccgtcccggaaacat

SEQ ID NO: 386850 - DNA, 30 bp, Artificial Sequence
  Synthetic oligonucleotide
atcgtagtgtgaccacggtcgcataaacat

SEQ ID NO: 386851 - DNA, 30 bp, Artificial Sequence
  Synthetic oligonucleotide
ctacgttcgctacccacctattataaacat

SEQ ID NO: 386852 - DNA, 30 bp, Artificial Sequence
  Synthetic oligonucleotide
gtgtcgtgcagctttatccttgtacaacat

SEQ ID NO: 386853 - DNA, 30 bp, Artificial Sequence
  Synthetic oligonucleotide
aagaatctggtattacagacttgccaacat

SEQ ID NO: 386854 - DNA, 30 bp, Artificial Sequence
  Synthetic oligonucleotide
atatggccaacagttctagtctggcaacat

SEQ ID NO: 386855 - DNA, 30 bp, Artificial Sequence
  Synthetic oligonucleotide
gtacctcctagcgaggttagccctcaacat

SEQ ID NO: 386856 - DNA, 30 bp, Artificial Sequence
  Synthetic oligonucleotide
cgtttacacaacctaagacgggctcaacat

SEQ ID NO: 386857 - DNA, 30 bp, Artificial Sequence
  Synthetic oligonucleotide
tttcgctcatcaacttcacgacgtcaacat

SEQ ID NO: 386858 - DNA, 30 bp, Artificial Sequence
  Synthetic oligonucleotide
gcgcagaaatcgtttcaagaagttcaacat

SEQ ID NO: 386859 - DNA, 30 bp, Artificial Sequence
  Synthetic oligonucleotide
atgacagaggtacgccttgcaacagaacat

SEQ ID NO: 386860 - DNA, 30 bp, Artificial Sequence
  Synthetic oligonucleotide
gtggaacaaaaaggtcatggtacggaacat

SEQ ID NO: 386861 - DNA, 30 bp, Artificial Sequence
  Synthetic oligonucleotide
attcgtactaattattgctcacgggaacat

SEQ ID NO: 386862 - DNA, 30 bp, Artificial Sequence
  Synthetic oligonucleotide
accgaagatttagcggacggagtggaacat

SEQ ID NO: 386863 - DNA, 30 bp, Artificial Sequence
  Synthetic oligonucleotide
ctgcagcaagtaatagcgcaaagtgaacat

SEQ ID NO: 386864 - DNA, 30 bp, Artificial Sequence
  Synthetic oligonucleotide
catgagctgttcagccttcatattgaacat

SEQ ID NO: 386865 - DNA, 30 bp, Artificial Sequence
  Synthetic oligonucleotide
cccgttagcgcggggatagagaaataacat

SEQ ID NO: 386866 - DNA, 30 bp, Artificial Sequence
  Synthetic oligonucleotide
ttatcagtttgaacccaagacgcctaacat

SEQ ID NO: 386867 - DNA, 30 bp, Artificial Sequence
  Synthetic oligonucleotide
ggatacgtatccgttgtccgattctaacat

SEQ ID NO: 386868 - DNA, 30 bp, Artificial Sequence
  Synthetic oligonucleotide
ggaattcaggcccattttaggttctaacat

SEQ ID NO: 386869 - DNA, 30 bp, Artificial Sequence
  Synthetic oligonucleotide
aggagtatgtgtacttatttggagtaacat

SEQ ID NO: 386870 - DNA, 30 bp, Artificial Sequence
  Synthetic oligonucleotide
gtagtcccaattgtggcaatctcgtaacat

SEQ ID NO: 386871 - DNA, 30 bp, Artificial Sequence
  Synthetic oligonucleotide
gacgatacggcgttcgttagtaattaacat

SEQ ID NO: 386872 - DNA, 30 bp, Artificial Sequence
  Synthetic oligonucleotide
cgataaggattcgtgtaatgaaacacacat

SEQ ID NO: 386873 - DNA, 30 bp, Artificial Sequence
  Synthetic oligonucleotide
ttatataatggattccacacagacacacat

SEQ ID NO: 386874 - DNA, 30 bp, Artificial Sequence
  Synthetic oligonucleotide
ggtaaatatagtgatcctctaatgacacat

SEQ ID NO: 386875 - DNA, 30 bp, Artificial Sequence
  Synthetic oligonucleotide
tagagtcgcggcaatggaggggatacacat

SEQ ID NO: 386876 - DNA, 30 bp, Artificial Sequence
  Synthetic oligonucleotide
cgcaaaatgggccaggggaccagtacacat

SEQ ID NO: 386877 - DNA, 30 bp, Artificial Sequence
  Synthetic oligonucleotide
agaatcgtgcgtgtgaaatctttaccacat

SEQ ID NO: 386878 - DNA, 30 bp, Artificial Sequence
  Synthetic oligonucleotide
atgctttcgggggctgcgtgtgtcccacat

SEQ ID NO: 386879 - DNA, 30 bp, Artificial Sequence
  Synthetic oligonucleotide
cagggattaagcgacgtaatggcgccacat

SEQ ID NO: 386880 - DNA, 30 bp, Artificial Sequence
  Synthetic oligonucleotide
ggttatgtggggtgtaggatggggccacat

SEQ ID NO: 386881 - DNA, 30 bp, Artificial Sequence
  Synthetic oligonucleotide
ggcacagcatgtgctctactgctgccacat

SEQ ID NO: 386882 - DNA, 30 bp, Artificial Sequence
  Synthetic oligonucleotide
taagatagcacccctcgccaatatccacat

SEQ ID NO: 386883 - DNA, 30 bp, Artificial Sequence
  Synthetic oligonucleotide
atttcagttagggatatcccatatccacat

SEQ ID NO: 386884 - DNA, 30 bp, Artificial Sequence
  Synthetic oligonucleotide
gttcggcgatcgggagcttgcgctccacat

SEQ ID NO: 386885 - DNA, 30 bp, Artificial Sequence
  Synthetic oligonucleotide
ggctccttggtttataatactcaagcacat

SEQ ID NO: 386886 - DNA, 30 bp, Artificial Sequence
  Synthetic oligonucleotide
gcattgggtctaacaacttagaacgcacat

SEQ ID NO: 386887 - DNA, 30 bp, Artificial Sequence
  Synthetic oligonucleotide
ctgtagatacgtgggctcgagatcgcacat

SEQ ID NO: 386888 - DNA, 30 bp, Artificial Sequence
  Synthetic oligonucleotide
ccggatactagcgcaacggtgggggcacat

SEQ ID NO: 386889 - DNA, 30 bp, Artificial Sequence
  Synthetic oligonucleotide
atgctttctaggaaccgcccggttgcacat

SEQ ID NO: 386890 - DNA, 30 bp, Artificial Sequence
  Synthetic oligonucleotide
aacaaagataagtgtctgttatgctcacat

SEQ ID NO: 386891 - DNA, 30 bp, Artificial Sequence
  Synthetic oligonucleotide
ctgtcgtcaataggacaactttgctcacat

SEQ ID NO: 386892 - DNA, 30 bp, Artificial Sequence
  Synthetic oligonucleotide
gactgtaaattggattcaactatctcacat

SEQ ID NO: 386893 - DNA, 30 bp, Artificial Sequence
  Synthetic oligonucleotide
gggtttgtgagactccagctcctctcacat

SEQ ID NO: 386894 - DNA, 30 bp, Artificial Sequence
  Synthetic oligonucleotide
acgcgcacgccttgaagttattggtcacat

SEQ ID NO: 386895 - DNA, 30 bp, Artificial Sequence
  Synthetic oligonucleotide
agacgctgtacgaatgtacctcattcacat

SEQ ID NO: 386896 - DNA, 30 bp, Artificial Sequence
  Synthetic oligonucleotide
agcggaagggtgatagtagttcgttcacat

SEQ ID NO: 386897 - DNA, 30 bp, Artificial Sequence
  Synthetic oligonucleotide
gagaacggtatggttgatcagctttcacat

SEQ ID NO: 386898 - DNA, 28 bp, Artificial Sequence
  Synthetic oligonucleotide
tatgaggcttggaatttaaagaagacat

SEQ ID NO: 386899 - DNA, 30 bp, Artificial Sequence
  Synthetic oligonucleotide
atctcgcgcgaaagaatgatgcgaagacat

SEQ ID NO: 386900 - DNA, 30 bp, Artificial Sequence
  Synthetic oligonucleotide
tctctgaatttgtccgataagggaagacat

SEQ ID NO: 386901 - DNA, 30 bp, Artificial Sequence
  Synthetic oligonucleotide
ggacaatgtgttacggcggaaataagacat

SEQ ID NO: 386902 - DNA, 30 bp, Artificial Sequence
  Synthetic oligonucleotide
ggttgggccaagcaggggcacgtaagacat

SEQ ID NO: 386903 - DNA, 30 bp, Artificial Sequence
  Synthetic oligonucleotide
ttcaaatacacaaaattttgcttaagacat

SEQ ID NO: 386904 - DNA, 30 bp, Artificial Sequence
  Synthetic oligonucleotide
ctacagctagcatagtcagagttaagacat

SEQ ID NO: 386905 - DNA, 30 bp, Artificial Sequence
  Synthetic oligonucleotide
gacgccttagtgagatcttctaccagacat

SEQ ID NO: 386906 - DNA, 30 bp, Artificial Sequence
  Synthetic oligonucleotide
gagcgatcctgttgacgcgacagcagacat

SEQ ID NO: 386907 - DNA, 30 bp, Artificial Sequence
  Synthetic oligonucleotide
gtcgcattctgcggctgtatctgcagacat

SEQ ID NO: 386908 - DNA, 30 bp, Artificial Sequence
  Synthetic oligonucleotide
ataaccttggggtgtttttgtatcagacat

SEQ ID NO: 386909 - DNA, 30 bp, Artificial Sequence
  Synthetic oligonucleotide
ccaaaaaacccccgacagggcgtcagacat

SEQ ID NO: 386910 - DNA, 30 bp, Artificial Sequence
  Synthetic oligonucleotide
atctcaaggtagaagaattcaccgagacat

SEQ ID NO: 386911 - DNA, 30 bp, Artificial Sequence
  Synthetic oligonucleotide
aaaaatcagtcatgcatacgttggagacat

SEQ ID NO: 386912 - DNA, 30 bp, Artificial Sequence
  Synthetic oligonucleotide
gcagccgcgaacgagaggaatgcccgacat

SEQ ID NO: 386913 - DNA, 30 bp, Artificial Sequence
  Synthetic oligonucleotide
aggacatggtaggctttgcgcggccgacat

SEQ ID NO: 386914 - DNA, 30 bp, Artificial Sequence
  Synthetic oligonucleotide
tcgtagcaactgtgctttgcatctcgacat

SEQ ID NO: 386915 - DNA, 30 bp, Artificial Sequence
  Synthetic oligonucleotide
caaatcggtatcgctatagacacgggacat

SEQ ID NO: 386916 - DNA, 30 bp, Artificial Sequence
  Synthetic oligonucleotide
cgctcccgtccgaaatgactacggggacat

SEQ ID NO: 386917 - DNA, 30 bp, Artificial Sequence
  Synthetic oligonucleotide
gaaaagctcaataatggtacctggggacat

SEQ ID NO: 386918 - DNA, 30 bp, Artificial Sequence
  Synthetic oligonucleotide
ggaaaatctgggtgggacgattggggacat

SEQ ID NO: 386919 - DNA, 30 bp, Artificial Sequence
  Synthetic oligonucleotide
ctcgaatagagtagcatacttctgggacat

SEQ ID NO: 386920 - DNA, 30 bp, Artificial Sequence
  Synthetic oligonucleotide
agaacttaatcgcccacgtttcatggacat

SEQ ID NO: 386921 - DNA, 30 bp, Artificial Sequence
  Synthetic oligonucleotide
tatgggggcgcgatgagtccaccatgacat

SEQ ID NO: 386922 - DNA, 30 bp, Artificial Sequence
  Synthetic oligonucleotide
ccgaccaaaggcagtgattggccatgacat

SEQ ID NO: 386923 - DNA, 30 bp, Artificial Sequence
  Synthetic oligonucleotide
ttgaccttcaatcaatcgtctagctgacat

SEQ ID NO: 386924 - DNA, 30 bp, Artificial Sequence
  Synthetic oligonucleotide
gtggctggcctcttctaaaaaacgtgacat

SEQ ID NO: 386925 - DNA, 30 bp, Artificial Sequence
  Synthetic oligonucleotide
agagctgtaccggtgcacagtctgtgacat

SEQ ID NO: 386926 - DNA, 30 bp, Artificial Sequence
  Synthetic oligonucleotide
caggagcaaaataagtccggttattgacat

SEQ ID NO: 386927 - DNA, 30 bp, Artificial Sequence
  Synthetic oligonucleotide
atcgtctgacgcttgttcttctgaatacat

SEQ ID NO: 386928 - DNA, 30 bp, Artificial Sequence
  Synthetic oligonucleotide
gtttgggtataccaagatggtacgatacat

SEQ ID NO: 386929 - DNA, 30 bp, Artificial Sequence
  Synthetic oligonucleotide
tcaccacccatccgtccctatccgatacat

SEQ ID NO: 386930 - DNA, 30 bp, Artificial Sequence
  Synthetic oligonucleotide
cccgtttggacttgctgaccatggatacat

SEQ ID NO: 386931 - DNA, 30 bp, Artificial Sequence
  Synthetic oligonucleotide
tgactttaacgagggaatctcaatatacat

SEQ ID NO: 386932 - DNA, 30 bp, Artificial Sequence
  Synthetic oligonucleotide
agtgatctcttacattgactcgatatacat

SEQ ID NO: 386933 - DNA, 30 bp, Artificial Sequence
  Synthetic oligonucleotide
tgcccatgacattacagggggcgtatacat

SEQ ID NO: 386934 - DNA, 29 bp, Artificial Sequence
  Synthetic oligonucleotide
ggcgtgcaagttgtgatttgtgtatacat

SEQ ID NO: 386935 - DNA, 30 bp, Artificial Sequence
  Synthetic oligonucleotide
tactaagggtcacgcgacgcttgtatacat

SEQ ID NO: 386936 - DNA, 30 bp, Artificial Sequence
  Synthetic oligonucleotide
agtcgattcaaggcgcatatgtaactacat

SEQ ID NO: 386937 - DNA, 30 bp, Artificial Sequence
  Synthetic oligonucleotide
caccaagtggttggcggccgctgcctacat

SEQ ID NO: 386938 - DNA, 30 bp, Artificial Sequence
  Synthetic oligonucleotide
atacaggaacgccctggggtgacgctacat

SEQ ID NO: 386939 - DNA, 30 bp, Artificial Sequence
  Synthetic oligonucleotide
tgagaaagcatgatgcattggagtctacat

SEQ ID NO: 386940 - DNA, 30 bp, Artificial Sequence
  Synthetic oligonucleotide
ttttggctcggcaaaccaattacagtacat

SEQ ID NO: 386941 - DNA, 30 bp, Artificial Sequence
  Synthetic oligonucleotide
gttcttagcgcacccgccaagatagtacat

SEQ ID NO: 386942 - DNA, 30 bp, Artificial Sequence
  Synthetic oligonucleotide
atccaccctctccgcggttggtgcgtacat

SEQ ID NO: 386943 - DNA, 31 bp, Artificial Sequence
  Synthetic oligonucleotide
tggttaacggaagagtaattggttggtacat

SEQ ID NO: 386944 - DNA, 30 bp, Artificial Sequence
  Synthetic oligonucleotide
actctcggtgggatacgtcgctatgtacat

SEQ ID NO: 386945 - DNA, 30 bp, Artificial Sequence
  Synthetic oligonucleotide
tagaagtgcattacagtagaacttgtacat

SEQ ID NO: 386946 - DNA, 30 bp, Artificial Sequence
  Synthetic oligonucleotide
ctcgaatgcctagccggttcgtttgtacat

SEQ ID NO: 386947 - DNA, 30 bp, Artificial Sequence
  Synthetic oligonucleotide
catgggaaacgtaattatgcgtaattacat

SEQ ID NO: 386948 - DNA, 30 bp, Artificial Sequence
  Synthetic oligonucleotide
tagccttgtagactgacgcccacattacat

SEQ ID NO: 386949 - DNA, 30 bp, Artificial Sequence
  Synthetic oligonucleotide
agaccccgaaataggtcaataatattacat

SEQ ID NO: 386950 - DNA, 30 bp, Artificial Sequence
  Synthetic oligonucleotide
ggccttccaaatgctctgtagcccttacat

SEQ ID NO: 386951 - DNA, 30 bp, Artificial Sequence
  Synthetic oligonucleotide
tcccgacatcgcaaggctcggaagttacat

SEQ ID NO: 386952 - DNA, 30 bp, Artificial Sequence
  Synthetic oligonucleotide
cttagggtgtccaccatgggtaggttacat

SEQ ID NO: 386953 - DNA, 30 bp, Artificial Sequence
  Synthetic oligonucleotide
ctttaatgaccgtctgatttactgttacat

SEQ ID NO: 386954 - DNA, 30 bp, Artificial Sequence
  Synthetic oligonucleotide
gtccggcgtttatcttcaatacatttacat

SEQ ID NO: 386955 - DNA, 30 bp, Artificial Sequence
  Synthetic oligonucleotide
ttaccctctgatgccgttgtccatttacat

SEQ ID NO: 386956 - DNA, 30 bp, Artificial Sequence
  Synthetic oligonucleotide
aggtacctctaagatccctttactttacat

SEQ ID NO: 386957 - DNA, 30 bp, Artificial Sequence
  Synthetic oligonucleotide
gaaagggcgtagcacttcttgcctttacat

SEQ ID NO: 386958 - DNA, 30 bp, Artificial Sequence
  Synthetic oligonucleotide
tgtcgactagtgggagggctacaaaaccat

SEQ ID NO: 386959 - DNA, 30 bp, Artificial Sequence
  Synthetic oligonucleotide
tgcaggacatgccctcatgcataaaaccat

SEQ ID NO: 386960 - DNA, 30 bp, Artificial Sequence
  Synthetic oligonucleotide
gaaccaaggcgtacgtggggttcaaaccat

SEQ ID NO: 386961 - DNA, 30 bp, Artificial Sequence
  Synthetic oligonucleotide
attcagcattttttcaggcacggaaaccat

SEQ ID NO: 386962 - DNA, 30 bp, Artificial Sequence
  Synthetic oligonucleotide
ttgctgatatccagatgccatataaaccat

SEQ ID NO: 386963 - DNA, 30 bp, Artificial Sequence
  Synthetic oligonucleotide
aggggtttccgtaggagtgaccagaaccat

SEQ ID NO: 386964 - DNA, 30 bp, Artificial Sequence
  Synthetic oligonucleotide
gttggcggagccggccgtaaggctaaccat

SEQ ID NO: 386965 - DNA, 30 bp, Artificial Sequence
  Synthetic oligonucleotide
tttcggtgtagattaacactgtagcaccat

SEQ ID NO: 386966 - DNA, 30 bp, Artificial Sequence
  Synthetic oligonucleotide
tatgtggccacgtgatcgttaacgcaccat

SEQ ID NO: 386967 - DNA, 30 bp, Artificial Sequence
  Synthetic oligonucleotide
aaatcgcactcaggtttgttgaatcaccat

SEQ ID NO: 386968 - DNA, 29 bp, Artificial Sequence
  Synthetic oligonucleotide
caatgccacttaaacttcgttatcaccat

SEQ ID NO: 386969 - DNA, 30 bp, Artificial Sequence
  Synthetic oligonucleotide
gctatgctgatcaagcgtgtatctcaccat

SEQ ID NO: 386970 - DNA, 30 bp, Artificial Sequence
  Synthetic oligonucleotide
cacactattcgatacctataaattcaccat

SEQ ID NO: 386971 - DNA, 30 bp, Artificial Sequence
  Synthetic oligonucleotide
accgcatgcaatttattgtcattagaccat

SEQ ID NO: 386972 - DNA, 30 bp, Artificial Sequence
  Synthetic oligonucleotide
aataaaaaaacagcggggacggcggaccat

SEQ ID NO: 386973 - DNA, 30 bp, Artificial Sequence
  Synthetic oligonucleotide
agcaaccatgatgtagcaccggcggaccat

SEQ ID NO: 386974 - DNA, 30 bp, Artificial Sequence
  Synthetic oligonucleotide
cgggggtctcagagatcactggatgaccat

SEQ ID NO: 386975 - DNA, 30 bp, Artificial Sequence
  Synthetic oligonucleotide
tggctcaagcaattctcattgcctgaccat

SEQ ID NO: 386976 - DNA, 30 bp, Artificial Sequence
  Synthetic oligonucleotide
tctcacaccacatggtactagcactaccat

SEQ ID NO: 386977 - DNA, 30 bp, Artificial Sequence
  Synthetic oligonucleotide
ttcctttcatagacctaagtcaagtaccat

SEQ ID NO: 386978 - DNA, 30 bp, Artificial Sequence
  Synthetic oligonucleotide
atgaggattggctgttggagtctgtaccat

SEQ ID NO: 386979 - DNA, 30 bp, Artificial Sequence
  Synthetic oligonucleotide
caatattctggtctcttaacttattaccat

SEQ ID NO: 386980 - DNA, 30 bp, Artificial Sequence
  Synthetic oligonucleotide
gcgttcccctggtaacaataccaaacccat

SEQ ID NO: 386981 - DNA, 30 bp, Artificial Sequence
  Synthetic oligonucleotide
agcttggggaagcaaagcgatttaacccat

SEQ ID NO: 386982 - DNA, 30 bp, Artificial Sequence
  Synthetic oligonucleotide
tacagcttattgaactcgccttctacccat

SEQ ID NO: 386983 - DNA, 30 bp, Artificial Sequence
  Synthetic oligonucleotide
ggtcgcgtccttaatacgtggggtacccat

SEQ ID NO: 386984 - DNA, 30 bp, Artificial Sequence
  Synthetic oligonucleotide
ttctgtcagtgagcttgaagttttacccat

SEQ ID NO: 386985 - DNA, 30 bp, Artificial Sequence
  Synthetic oligonucleotide
gcgtgtcatacatggggcttctaaccccat

SEQ ID NO: 386986 - DNA, 30 bp, Artificial Sequence
  Synthetic oligonucleotide
tccggggttcagcggcctcagctaccccat

SEQ ID NO: 386987 - DNA, 30 bp, Artificial Sequence
  Synthetic oligonucleotide
gcgggtagccttgtactcttggtaccccat

SEQ ID NO: 386988 - DNA, 30 bp, Artificial Sequence
  Synthetic oligonucleotide
gaatcggcgacagtggtacaatccccccat

SEQ ID NO: 386989 - DNA, 30 bp, Artificial Sequence
  Synthetic oligonucleotide
gtcacccgtatgtaatactgttccccccat

SEQ ID NO: 386990 - DNA, 30 bp, Artificial Sequence
  Synthetic oligonucleotide
gagtacggcacacacatgccataagcccat

SEQ ID NO: 386991 - DNA, 30 bp, Artificial Sequence
  Synthetic oligonucleotide
cggacgtgtgacacctcgcactcggcccat

SEQ ID NO: 386992 - DNA, 30 bp, Artificial Sequence
  Synthetic oligonucleotide
attcatcaggagccatgagagtgggcccat

SEQ ID NO: 386993 - DNA, 30 bp, Artificial Sequence
  Synthetic oligonucleotide
actgctattgtgacaagtactatggcccat

SEQ ID NO: 386994 - DNA, 30 bp, Artificial Sequence
  Synthetic oligonucleotide
taaaaaaccagcccctaacggagtgcccat

SEQ ID NO: 386995 - DNA, 30 bp, Artificial Sequence
  Synthetic oligonucleotide
tgttatcactatataactagaaagtcccat

SEQ ID NO: 386996 - DNA, 30 bp, Artificial Sequence
  Synthetic oligonucleotide
tagatccagtgtcgatgcgtccagtcccat

SEQ ID NO: 386997 - DNA, 30 bp, Artificial Sequence
  Synthetic oligonucleotide
gctacgtccgaccccgcagaacggtcccat

SEQ ID NO: 386998 - DNA, 30 bp, Artificial Sequence
  Synthetic oligonucleotide
catgggggaatgctttcgcgagcttcccat

SEQ ID NO: 386999 - DNA, 30 bp, Artificial Sequence
  Synthetic oligonucleotide
tcgcaggtatatgtccacgtaacaagccat

SEQ ID NO: 387000 - DNA, 30 bp, Artificial Sequence
  Synthetic oligonucleotide
atgatatcttgagtgttcatttcaagccat

SEQ ID NO: 387001 - DNA, 30 bp, Artificial Sequence
  Synthetic oligonucleotide
gttatgatgctcgcaggtcgcgtcagccat

SEQ ID NO: 387002 - DNA, 30 bp, Artificial Sequence
  Synthetic oligonucleotide
ccactttcagcaatcgacaacttcagccat

SEQ ID NO: 387003 - DNA, 30 bp, Artificial Sequence
  Synthetic oligonucleotide
ggctatggatatacatctgaagatagccat

SEQ ID NO: 387004 - DNA, 30 bp, Artificial Sequence
  Synthetic oligonucleotide
gagatacatgatcgtcagctatatagccat

SEQ ID NO: 387005 - DNA, 30 bp, Artificial Sequence
  Synthetic oligonucleotide
gttcccatgatcgggcacctcactagccat

SEQ ID NO: 387006 - DNA, 30 bp, Artificial Sequence
  Synthetic oligonucleotide
gggactactggcacattggtctctagccat

SEQ ID NO: 387007 - DNA, 30 bp, Artificial Sequence
  Synthetic oligonucleotide
tgaccttggaatagttaccggtctagccat

SEQ ID NO: 387008 - DNA, 30 bp, Artificial Sequence
  Synthetic oligonucleotide
gctccaagtaagcatgaaaggcgtagccat

SEQ ID NO: 387009 - DNA, 30 bp, Artificial Sequence
  Synthetic oligonucleotide
gggattcgtgctctggtatgacttagccat

SEQ ID NO: 387010 - DNA, 30 bp, Artificial Sequence
  Synthetic oligonucleotide
gttgcgcatagattgttgctactacgccat

SEQ ID NO: 387011 - DNA, 30 bp, Artificial Sequence
  Synthetic oligonucleotide
ccaagcatgcttagttgagtctagcgccat

SEQ ID NO: 387012 - DNA, 30 bp, Artificial Sequence
  Synthetic oligonucleotide
ttatgcaatacggcctggtagttgcgccat

SEQ ID NO: 387013 - DNA, 30 bp, Artificial Sequence
  Synthetic oligonucleotide
gtagcacgatggtatgctggcagtcgccat

SEQ ID NO: 387014 - DNA, 30 bp, Artificial Sequence
  Synthetic oligonucleotide
tccataccgatggttatgacgtcaggccat

SEQ ID NO: 387015 - DNA, 30 bp, Artificial Sequence
  Synthetic oligonucleotide
acgcatcctactgtccccccattcggccat

SEQ ID NO: 387016 - DNA, 30 bp, Artificial Sequence
  Synthetic oligonucleotide
ctggggcttagccctaatttattcggccat

SEQ ID NO: 387017 - DNA, 30 bp, Artificial Sequence
  Synthetic oligonucleotide
aaacagtgttgcccatgtagagcgggccat

SEQ ID NO: 387018 - DNA, 30 bp, Artificial Sequence
  Synthetic oligonucleotide
ggctagcattgagtagacgtacgctgccat

SEQ ID NO: 387019 - DNA, 30 bp, Artificial Sequence
  Synthetic oligonucleotide
cggggcgctagagattaactaacgtgccat

SEQ ID NO: 387020 - DNA, 30 bp, Artificial Sequence
  Synthetic oligonucleotide
gtgggtccatagattactcctgcgtgccat

SEQ ID NO: 387021 - DNA, 30 bp, Artificial Sequence
  Synthetic oligonucleotide
tgatggactcagatttattcgaaaatccat

SEQ ID NO: 387022 - DNA, 30 bp, Artificial Sequence
  Synthetic oligonucleotide
cacataacgaacggccggcatagaatccat

SEQ ID NO: 387023 - DNA, 30 bp, Artificial Sequence
  Synthetic oligonucleotide
tcagtacctatccgacatcgtaacatccat

SEQ ID NO: 387024 - DNA, 30 bp, Artificial Sequence
  Synthetic oligonucleotide
taaacagcctctccgacgctagacatccat

SEQ ID NO: 387025 - DNA, 30 bp, Artificial Sequence
  Synthetic oligonucleotide
ggccgtttaaaccggctagtcagcatccat

SEQ ID NO: 387026 - DNA, 30 bp, Artificial Sequence
  Synthetic oligonucleotide
atagtactccgtgacaatgcctagatccat

SEQ ID NO: 387027 - DNA, 30 bp, Artificial Sequence
  Synthetic oligonucleotide
cacaagtcgtaggttaaatcccggatccat

SEQ ID NO: 387028 - DNA, 30 bp, Artificial Sequence
  Synthetic oligonucleotide
agactttgctgtaaggtgaaacatatccat

SEQ ID NO: 387029 - DNA, 30 bp, Artificial Sequence
  Synthetic oligonucleotide
taacttggacaccagtgttggcatatccat

SEQ ID NO: 387030 - DNA, 30 bp, Artificial Sequence
  Synthetic oligonucleotide
acctgaggaccagcagctgaaattatccat

SEQ ID NO: 387031 - DNA, 30 bp, Artificial Sequence
  Synthetic oligonucleotide
tccaatgaacttaggcgggtcatcctccat

SEQ ID NO: 387032 - DNA, 30 bp, Artificial Sequence
  Synthetic oligonucleotide
ccggacgtcgagagccacgtcgagctccat

SEQ ID NO: 387033 - DNA, 30 bp, Artificial Sequence
  Synthetic oligonucleotide
ctcctcctacctgtagtactgactctccat

SEQ ID NO: 387034 - DNA, 30 bp, Artificial Sequence
  Synthetic oligonucleotide
ggaactgcctaagtccctggcaacgtccat

SEQ ID NO: 387035 - DNA, 30 bp, Artificial Sequence
  Synthetic oligonucleotide
gtccctacgggtcccaactattacgtccat

SEQ ID NO: 387036 - DNA, 30 bp, Artificial Sequence
  Synthetic oligonucleotide
ggaaagcacggtgggaaacccttcgtccat

SEQ ID NO: 387037 - DNA, 30 bp, Artificial Sequence
  Synthetic oligonucleotide
aggcggaattacctctgtattcctgtccat

SEQ ID NO: 387038 - DNA, 30 bp, Artificial Sequence
  Synthetic oligonucleotide
acttgtaaactccagactccatctgtccat

SEQ ID NO: 387039 - DNA, 30 bp, Artificial Sequence
  Synthetic oligonucleotide
tccattcaagtcgaacaggggtctgtccat

SEQ ID NO: 387040 - DNA, 30 bp, Artificial Sequence
  Synthetic oligonucleotide
aaaggctcacggacggtagaaattgtccat

SEQ ID NO: 387041 - DNA, 30 bp, Artificial Sequence
  Synthetic oligonucleotide
gtgtgcccattgggtagggcagttgtccat

SEQ ID NO: 387042 - DNA, 30 bp, Artificial Sequence
  Synthetic oligonucleotide
aagatttcaagattggtataggttgtccat

SEQ ID NO: 387043 - DNA, 30 bp, Artificial Sequence
  Synthetic oligonucleotide
gtatggaacttcaatttgcaagaattccat

SEQ ID NO: 387044 - DNA, 30 bp, Artificial Sequence
  Synthetic oligonucleotide
ttccgtcgtcggagctaggaccgattccat

SEQ ID NO: 387045 - DNA, 30 bp, Artificial Sequence
  Synthetic oligonucleotide
gagttcaaccccgaacgtctgttattccat

SEQ ID NO: 387046 - DNA, 30 bp, Artificial Sequence
  Synthetic oligonucleotide
ctctcgtcagagaagatgcttacgttccat

SEQ ID NO: 387047 - DNA, 30 bp, Artificial Sequence
  Synthetic oligonucleotide
tccagtggttttggttatgggcatttccat

SEQ ID NO: 387048 - DNA, 30 bp, Artificial Sequence
  Synthetic oligonucleotide
tcccaaaggtcaactgtgtaggctttccat

SEQ ID NO: 387049 - DNA, 30 bp, Artificial Sequence
  Synthetic oligonucleotide
tgggtgtgtgcaaaatgtataaaaaagcat

SEQ ID NO: 387050 - DNA, 30 bp, Artificial Sequence
  Synthetic oligonucleotide
cacaagcaccgactgtcgaggtaaaagcat

SEQ ID NO: 387051 - DNA, 30 bp, Artificial Sequence
  Synthetic oligonucleotide
tccaagaaagttacgtaaagcagcaagcat

SEQ ID NO: 387052 - DNA, 30 bp, Artificial Sequence
  Synthetic oligonucleotide
gtttaggtctcccttcgtaaagtcaagcat

SEQ ID NO: 387053 - DNA, 30 bp, Artificial Sequence
  Synthetic oligonucleotide
gtggattggtttaatcatggttggaagcat

SEQ ID NO: 387054 - DNA, 30 bp, Artificial Sequence
  Synthetic oligonucleotide
tcctagctaaaggtgttgggatctaagcat

SEQ ID NO: 387055 - DNA, 30 bp, Artificial Sequence
  Synthetic oligonucleotide
ttcctccctggaccgtccatgggacagcat

SEQ ID NO: 387056 - DNA, 30 bp, Artificial Sequence
  Synthetic oligonucleotide
tacgcccgatgcccgctccacatacagcat

SEQ ID NO: 387057 - DNA, 30 bp, Artificial Sequence
  Synthetic oligonucleotide
tggccgtgtccacgacgcgaataccagcat

SEQ ID NO: 387058 - DNA, 30 bp, Artificial Sequence
  Synthetic oligonucleotide
cggtaacatccttcacgcgaagcgcagcat

SEQ ID NO: 387059 - DNA, 30 bp, Artificial Sequence
  Synthetic oligonucleotide
atcgcagcatatacatgggtatgtcagcat

SEQ ID NO: 387060 - DNA, 30 bp, Artificial Sequence
  Synthetic oligonucleotide
atcgcccgccgctattaggcctgtcagcat

SEQ ID NO: 387061 - DNA, 30 bp, Artificial Sequence
  Synthetic oligonucleotide
agctgcagtgtagtcggagtagcggagcat

SEQ ID NO: 387062 - DNA, 30 bp, Artificial Sequence
  Synthetic oligonucleotide
acgaagtgtatggcgtgcctggtatagcat

SEQ ID NO: 387063 - DNA, 30 bp, Artificial Sequence
  Synthetic oligonucleotide
aatggggcattgcgtttccgtttgtagcat

SEQ ID NO: 387064 - DNA, 30 bp, Artificial Sequence
  Synthetic oligonucleotide
tgtagcacagccgacgcatgacgttagcat

SEQ ID NO: 387065 - DNA, 30 bp, Artificial Sequence
  Synthetic oligonucleotide
catatcacccttgagacctacatttagcat

SEQ ID NO: 387066 - DNA, 30 bp, Artificial Sequence
  Synthetic oligonucleotide
cggccattagaattgaggtacgcaacgcat

SEQ ID NO: 387067 - DNA, 30 bp, Artificial Sequence
  Synthetic oligonucleotide
catctggatgccataccgtaaataacgcat

SEQ ID NO: 387068 - DNA, 30 bp, Artificial Sequence
  Synthetic oligonucleotide
caatgagtgacactggcctggcgcacgcat

SEQ ID NO: 387069 - DNA, 30 bp, Artificial Sequence
  Synthetic oligonucleotide
ctgtccattagtagtcacagtacgacgcat

SEQ ID NO: 387070 - DNA, 30 bp, Artificial Sequence
  Synthetic oligonucleotide
tttacactgggtatgctcagagatacgcat

SEQ ID NO: 387071 - DNA, 30 bp, Artificial Sequence
  Synthetic oligonucleotide
agcgtcgatatgaatcgccatcttacgcat

SEQ ID NO: 387072 - DNA, 30 bp, Artificial Sequence
  Synthetic oligonucleotide
tgcggctagtcgtggtagttgtttacgcat

SEQ ID NO: 387073 - DNA, 30 bp, Artificial Sequence
  Synthetic oligonucleotide
tctggatgattattttcttcggagccgcat

SEQ ID NO: 387074 - DNA, 30 bp, Artificial Sequence
  Synthetic oligonucleotide
ataagaaagttggctcttcatgcgccgcat

SEQ ID NO: 387075 - DNA, 30 bp, Artificial Sequence
  Synthetic oligonucleotide
atgagaccaaagtccgtgttacggccgcat

SEQ ID NO: 387076 - DNA, 30 bp, Artificial Sequence
  Synthetic oligonucleotide
catccgcagcgccagaaatccgggccgcat

SEQ ID NO: 387077 - DNA, 30 bp, Artificial Sequence
  Synthetic oligonucleotide
aacaagagataaagctcgggtccagcgcat

SEQ ID NO: 387078 - DNA, 30 bp, Artificial Sequence
  Synthetic oligonucleotide
ttaatcacctggtagtcaagtgcagcgcat

SEQ ID NO: 387079 - DNA, 30 bp, Artificial Sequence
  Synthetic oligonucleotide
ttcaagttttaatccgattttagggcgcat

SEQ ID NO: 387080 - DNA, 30 bp, Artificial Sequence
  Synthetic oligonucleotide
cctcacaaaccagtcttcgggggtgcgcat

SEQ ID NO: 387081 - DNA, 30 bp, Artificial Sequence
  Synthetic oligonucleotide
gagcgctcaccgggagaatgctcatcgcat

SEQ ID NO: 387082 - DNA, 30 bp, Artificial Sequence
  Synthetic oligonucleotide
aggatatggaaagccctataccagtcgcat

SEQ ID NO: 387083 - DNA, 30 bp, Artificial Sequence
  Synthetic oligonucleotide
gcagggtcacagtactcaccatagtcgcat

SEQ ID NO: 387084 - DNA, 30 bp, Artificial Sequence
  Synthetic oligonucleotide
cagccaattgccccaggctgtccttcgcat

SEQ ID NO: 387085 - DNA, 30 bp, Artificial Sequence
  Synthetic oligonucleotide
cgcgctcagtgcttgaaccaatcttcgcat

SEQ ID NO: 387086 - DNA, 30 bp, Artificial Sequence
  Synthetic oligonucleotide
aaactcgtgggctatgcgaagagttcgcat

SEQ ID NO: 387087 - DNA, 30 bp, Artificial Sequence
  Synthetic oligonucleotide
cttctgggaatcgggcacaaatgttcgcat

SEQ ID NO: 387088 - DNA, 30 bp, Artificial Sequence
  Synthetic oligonucleotide
ttgcctcaaaagtaggtgatataaaggcat

SEQ ID NO: 387089 - DNA, 30 bp, Artificial Sequence
  Synthetic oligonucleotide
ttttatatgggtaagtcactctaaaggcat

SEQ ID NO: 387090 - DNA, 30 bp, Artificial Sequence
  Synthetic oligonucleotide
ccctagatgccaatagacatttaaaggcat

SEQ ID NO: 387091 - DNA, 30 bp, Artificial Sequence
  Synthetic oligonucleotide
tccttttatattagtgtaatcacaaggcat

SEQ ID NO: 387092 - DNA, 30 bp, Artificial Sequence
  Synthetic oligonucleotide
gcaaagatttatccctaggtgttaaggcat

SEQ ID NO: 387093 - DNA, 30 bp, Artificial Sequence
  Synthetic oligonucleotide
aagctatatcacgtacacataagcaggcat

SEQ ID NO: 387094 - DNA, 30 bp, Artificial Sequence
  Synthetic oligonucleotide
gtcaggtaaactgccttcggaaggaggcat

SEQ ID NO: 387095 - DNA, 30 bp, Artificial Sequence
  Synthetic oligonucleotide
ttgagcatcaaactgcatccatataggcat

SEQ ID NO: 387096 - DNA, 30 bp, Artificial Sequence
  Synthetic oligonucleotide
ttacctggacacataggaggaatacggcat

SEQ ID NO: 387097 - DNA, 30 bp, Artificial Sequence
  Synthetic oligonucleotide
tccgtccgtggtaactactggccgcggcat

SEQ ID NO: 387098 - DNA, 30 bp, Artificial Sequence
  Synthetic oligonucleotide
gttgcgtgcgggccggggactatgcggcat

SEQ ID NO: 387099 - DNA, 30 bp, Artificial Sequence
  Synthetic oligonucleotide
gctcgcgatcatctggcagtagatcggcat

SEQ ID NO: 387100 - DNA, 30 bp, Artificial Sequence
  Synthetic oligonucleotide
gtaccggattatgtacttgtctgtcggcat

SEQ ID NO: 387101 - DNA, 30 bp, Artificial Sequence
  Synthetic oligonucleotide
ggcattcatcttgaaaagccaacagggcat

SEQ ID NO: 387102 - DNA, 30 bp, Artificial Sequence
  Synthetic oligonucleotide
actgccaggttcacggcccaaccagggcat

SEQ ID NO: 387103 - DNA, 31 bp, Artificial Sequence
  Synthetic oligonucleotide
tattgggtcgggatagttagactgcgggcat

SEQ ID NO: 387104 - DNA, 30 bp, Artificial Sequence
  Synthetic oligonucleotide
ttaaatgtatgagatcactttatcgggcat

SEQ ID NO: 387105 - DNA, 30 bp, Artificial Sequence
  Synthetic oligonucleotide
tcaattgctcaacatccatctcgggggcat

SEQ ID NO: 387106 - DNA, 30 bp, Artificial Sequence
  Synthetic oligonucleotide
atgccatccttggacaacaacggggggcat

SEQ ID NO: 387107 - DNA, 30 bp, Artificial Sequence
  Synthetic oligonucleotide
tacgggttcaacctaggggcgggggggcat

SEQ ID NO: 387108 - DNA, 30 bp, Artificial Sequence
  Synthetic oligonucleotide
caatttcacaacttggtcgcaagtgggcat

SEQ ID NO: 387109 - DNA, 30 bp, Artificial Sequence
  Synthetic oligonucleotide
ttaacagtccatgcactaagcctatggcat

SEQ ID NO: 387110 - DNA, 30 bp, Artificial Sequence
  Synthetic oligonucleotide
gttgcgctctagcaatttgtaggctggcat

SEQ ID NO: 387111 - DNA, 30 bp, Artificial Sequence
  Synthetic oligonucleotide
attctgaattgagagatgatattctggcat

SEQ ID NO: 387112 - DNA, 30 bp, Artificial Sequence
  Synthetic oligonucleotide
ggacaacgcctgtatcagcccttctggcat

SEQ ID NO: 387113 - DNA, 30 bp, Artificial Sequence
  Synthetic oligonucleotide
atgggtacacagttgcatggccattggcat

SEQ ID NO: 387114 - DNA, 30 bp, Artificial Sequence
  Synthetic oligonucleotide
tgtgagagagcattttcggcggaaatgcat

SEQ ID NO: 387115 - DNA, 30 bp, Artificial Sequence
  Synthetic oligonucleotide
tagcagtggctaacaatgacgtcaatgcat

SEQ ID NO: 387116 - DNA, 30 bp, Artificial Sequence
  Synthetic oligonucleotide
ttagtatgatttgcactcgtgggaatgcat

SEQ ID NO: 387117 - DNA, 30 bp, Artificial Sequence
  Synthetic oligonucleotide
gatctgctacaactgccgacgtgcatgcat

SEQ ID NO: 387118 - DNA, 30 bp, Artificial Sequence
  Synthetic oligonucleotide
caacaccgcgatgcctgattgcggatgcat

SEQ ID NO: 387119 - DNA, 30 bp, Artificial Sequence
  Synthetic oligonucleotide
tatttgatcataagcaaaaccctgatgcat

SEQ ID NO: 387120 - DNA, 30 bp, Artificial Sequence
  Synthetic oligonucleotide
taaggttaggatgctgtcatatgactgcat

SEQ ID NO: 387121 - DNA, 30 bp, Artificial Sequence
  Synthetic oligonucleotide
tcaacttagttgagggtctggtccctgcat

SEQ ID NO: 387122 - DNA, 30 bp, Artificial Sequence
  Synthetic oligonucleotide
catatcacagaacccctcctgtccctgcat

SEQ ID NO: 387123 - DNA, 30 bp, Artificial Sequence
  Synthetic oligonucleotide
atacaggcaagtcttgctgtgggcctgcat

SEQ ID NO: 387124 - DNA, 30 bp, Artificial Sequence
  Synthetic oligonucleotide
aaatagtctcgctcatttgtaatcctgcat

SEQ ID NO: 387125 - DNA, 30 bp, Artificial Sequence
  Synthetic oligonucleotide
catcaccgttggggggacaggaggctgcat

SEQ ID NO: 387126 - DNA, 30 bp, Artificial Sequence
  Synthetic oligonucleotide
ggacctcggtacataactttagggctgcat

SEQ ID NO: 387127 - DNA, 30 bp, Artificial Sequence
  Synthetic oligonucleotide
gggcttatcaggtatgctaccgatctgcat

SEQ ID NO: 387128 - DNA, 30 bp, Artificial Sequence
  Synthetic oligonucleotide
catttctcagcctatttgtatagtctgcat

SEQ ID NO: 387129 - DNA, 30 bp, Artificial Sequence
  Synthetic oligonucleotide
ggaaagttattcaccttccgcagggtgcat

SEQ ID NO: 387130 - DNA, 30 bp, Artificial Sequence
  Synthetic oligonucleotide
aaaggaaaacatgtgtttgtcactgtgcat

SEQ ID NO: 387131 - DNA, 30 bp, Artificial Sequence
  Synthetic oligonucleotide
tccgtagtggtttcgacttccaaattgcat

SEQ ID NO: 387132 - DNA, 30 bp, Artificial Sequence
  Synthetic oligonucleotide
cctccgctaagaactgccacgtcattgcat

SEQ ID NO: 387133 - DNA, 30 bp, Artificial Sequence
  Synthetic oligonucleotide
gttcatcagtataagtttgacagattgcat

SEQ ID NO: 387134 - DNA, 30 bp, Artificial Sequence
  Synthetic oligonucleotide
tcgaaaatactctgttttatagtattgcat

SEQ ID NO: 387135 - DNA, 30 bp, Artificial Sequence
  Synthetic oligonucleotide
agcctgtcacccggggggcgatcgttgcat

SEQ ID NO: 387136 - DNA, 30 bp, Artificial Sequence
  Synthetic oligonucleotide
agttatcgtctcagagaaatacggttgcat

SEQ ID NO: 387137 - DNA, 30 bp, Artificial Sequence
  Synthetic oligonucleotide
aagcgtttgttggaacccatacggttgcat

SEQ ID NO: 387138 - DNA, 30 bp, Artificial Sequence
  Synthetic oligonucleotide
actcaagctgccctaggattgtatttgcat

SEQ ID NO: 387139 - DNA, 30 bp, Artificial Sequence
  Synthetic oligonucleotide
gaagtgatcgctaggtgctggactttgcat

SEQ ID NO: 387140 - DNA, 30 bp, Artificial Sequence
  Synthetic oligonucleotide
gaaacccataatccgacatagtgaaatcat

SEQ ID NO: 387141 - DNA, 30 bp, Artificial Sequence
  Synthetic oligonucleotide
ggtggcactcttgtgttggggtgcaatcat

SEQ ID NO: 387142 - DNA, 30 bp, Artificial Sequence
  Synthetic oligonucleotide
acagttgacactgggtgagctttcaatcat

SEQ ID NO: 387143 - DNA, 30 bp, Artificial Sequence
  Synthetic oligonucleotide
tgattgcccgttgagtgatgaacgaatcat

SEQ ID NO: 387144 - DNA, 30 bp, Artificial Sequence
  Synthetic oligonucleotide
actatgagggcctatcgggcaattaatcat

SEQ ID NO: 387145 - DNA, 30 bp, Artificial Sequence
  Synthetic oligonucleotide
aaagacttccaacgatgtcttcaacatcat

SEQ ID NO: 387146 - DNA, 30 bp, Artificial Sequence
  Synthetic oligonucleotide
gctcacaagctcggctagcgcagacatcat

SEQ ID NO: 387147 - DNA, 30 bp, Artificial Sequence
  Synthetic oligonucleotide
agcctctacgtcctgcatattatacatcat

SEQ ID NO: 387148 - DNA, 30 bp, Artificial Sequence
  Synthetic oligonucleotide
ggttagtcatcgaagattttgaatcatcat

SEQ ID NO: 387149 - DNA, 30 bp, Artificial Sequence
  Synthetic oligonucleotide
gctaggaaaaaaatcttgtaactagatcat

SEQ ID NO: 387150 - DNA, 30 bp, Artificial Sequence
  Synthetic oligonucleotide
gaaaagtgcgcagccccgtatcacgatcat

SEQ ID NO: 387151 - DNA, 30 bp, Artificial Sequence
  Synthetic oligonucleotide
ctgacggcagtatcgagggtttgcgatcat

SEQ ID NO: 387152 - DNA, 30 bp, Artificial Sequence
  Synthetic oligonucleotide
ttgaagactacaagggagaattaggatcat

SEQ ID NO: 387153 - DNA, 30 bp, Artificial Sequence
  Synthetic oligonucleotide
ccctaaggacctcctcgagacttggatcat

SEQ ID NO: 387154 - DNA, 30 bp, Artificial Sequence
  Synthetic oligonucleotide
atcgtgcaccttcgttggcgcaaatatcat

SEQ ID NO: 387155 - DNA, 30 bp, Artificial Sequence
  Synthetic oligonucleotide
cctgagattgtcgcgctaaatcaatatcat

SEQ ID NO: 387156 - DNA, 30 bp, Artificial Sequence
  Synthetic oligonucleotide
catattactcaacatggattctcctatcat

SEQ ID NO: 387157 - DNA, 30 bp, Artificial Sequence
  Synthetic oligonucleotide
cgactaatattatctatcttcaagtatcat

SEQ ID NO: 387158 - DNA, 30 bp, Artificial Sequence
  Synthetic oligonucleotide
ttccctctgaacacgtaggagtcgtatcat

SEQ ID NO: 387159 - DNA, 30 bp, Artificial Sequence
  Synthetic oligonucleotide
gaatgtccagctgtctacgcttcgtatcat

SEQ ID NO: 387160 - DNA, 30 bp, Artificial Sequence
  Synthetic oligonucleotide
tagaaggtaacgcctcacggtgtgtatcat

SEQ ID NO: 387161 - DNA, 30 bp, Artificial Sequence
  Synthetic oligonucleotide
atcctccatccgacagagcacttgactcat

SEQ ID NO: 387162 - DNA, 30 bp, Artificial Sequence
  Synthetic oligonucleotide
gggtaaatcctttcgaaagttggacctcat

SEQ ID NO: 387163 - DNA, 30 bp, Artificial Sequence
  Synthetic oligonucleotide
gttagggttccggcaaattttggccctcat

SEQ ID NO: 387164 - DNA, 30 bp, Artificial Sequence
  Synthetic oligonucleotide
ggcgcactcagttatacgcaacggcctcat

SEQ ID NO: 387165 - DNA, 30 bp, Artificial Sequence
  Synthetic oligonucleotide
ttaataggaagtgcgcgtactactcctcat

SEQ ID NO: 387166 - DNA, 30 bp, Artificial Sequence
  Synthetic oligonucleotide
actcattgcgttaaggtcacaaaagctcat

SEQ ID NO: 387167 - DNA, 30 bp, Artificial Sequence
  Synthetic oligonucleotide
tgcctacacacgctaaaggggatatctcat

SEQ ID NO: 387168 - DNA, 30 bp, Artificial Sequence
  Synthetic oligonucleotide
gaatgttgtagcatcctcaagtcctctcat

SEQ ID NO: 387169 - DNA, 30 bp, Artificial Sequence
  Synthetic oligonucleotide
ggagaaacgacgcctatctggtcctctcat

SEQ ID NO: 387170 - DNA, 30 bp, Artificial Sequence
  Synthetic oligonucleotide
gaaggcctgcattatatcttggtctctcat

SEQ ID NO: 387171 - DNA, 30 bp, Artificial Sequence
  Synthetic oligonucleotide
atagcgtaacgtggatccttatgttctcat

SEQ ID NO: 387172 - DNA, 30 bp, Artificial Sequence
  Synthetic oligonucleotide
gtccctccgtgaatagatcgcatttctcat

SEQ ID NO: 387173 - DNA, 30 bp, Artificial Sequence
  Synthetic oligonucleotide
gattatggacgtgcgctgaaggacagtcat

SEQ ID NO: 387174 - DNA, 30 bp, Artificial Sequence
  Synthetic oligonucleotide
aatctggacggcttacgttctaggagtcat

SEQ ID NO: 387175 - DNA, 30 bp, Artificial Sequence
  Synthetic oligonucleotide
ggttaattgtcacacaagatccggagtcat

SEQ ID NO: 387176 - DNA, 30 bp, Artificial Sequence
  Synthetic oligonucleotide
tccgagtcgcataaagggagccatagtcat

SEQ ID NO: 387177 - DNA, 30 bp, Artificial Sequence
  Synthetic oligonucleotide
attgttgttcttgagtgtaatctacgtcat

SEQ ID NO: 387178 - DNA, 30 bp, Artificial Sequence
  Synthetic oligonucleotide
actatgcaaacgctccggtcgggccgtcat

SEQ ID NO: 387179 - DNA, 30 bp, Artificial Sequence
  Synthetic oligonucleotide
ttcgtgaccactatgaaccccatgcgtcat

SEQ ID NO: 387180 - DNA, 30 bp, Artificial Sequence
  Synthetic oligonucleotide
gttatctatcaactagaagttctgcgtcat

SEQ ID NO: 387181 - DNA, 30 bp, Artificial Sequence
  Synthetic oligonucleotide
tggcgttttggcggagtcaattgtcgtcat

SEQ ID NO: 387182 - DNA, 30 bp, Artificial Sequence
  Synthetic oligonucleotide
tgttaaaacaggttacgttataaaggtcat

SEQ ID NO: 387183 - DNA, 30 bp, Artificial Sequence
  Synthetic oligonucleotide
ctcggtgacgacaagacaacggagggtcat

SEQ ID NO: 387184 - DNA, 30 bp, Artificial Sequence
  Synthetic oligonucleotide
ggatgaaattaaagctcccgggtgggtcat

SEQ ID NO: 387185 - DNA, 30 bp, Artificial Sequence
  Synthetic oligonucleotide
ttggtaaaacatatgacatcatgtggtcat

SEQ ID NO: 387186 - DNA, 30 bp, Artificial Sequence
  Synthetic oligonucleotide
gggcccgtcaagggcgacttctgtggtcat

SEQ ID NO: 387187 - DNA, 30 bp, Artificial Sequence
  Synthetic oligonucleotide
acacatgcaccagatattggggaatgtcat

SEQ ID NO: 387188 - DNA, 30 bp, Artificial Sequence
  Synthetic oligonucleotide
gagagacagcgagtttatttaacatgtcat

SEQ ID NO: 387189 - DNA, 30 bp, Artificial Sequence
  Synthetic oligonucleotide
tttgcatatgacgcggatacttgatgtcat

SEQ ID NO: 387190 - DNA, 30 bp, Artificial Sequence
  Synthetic oligonucleotide
gccgtgtgcgacagtacgcaccactgtcat

SEQ ID NO: 387191 - DNA, 30 bp, Artificial Sequence
  Synthetic oligonucleotide
gttcccttaaacagtggggccgactgtcat

SEQ ID NO: 387192 - DNA, 30 bp, Artificial Sequence
  Synthetic oligonucleotide
tgtagataggcactgtaccgggggtgtcat

SEQ ID NO: 387193 - DNA, 30 bp, Artificial Sequence
  Synthetic oligonucleotide
gcgctcatgtcgcatggccccctttgtcat

SEQ ID NO: 387194 - DNA, 30 bp, Artificial Sequence
  Synthetic oligonucleotide
cagtaaagtggtatatcctgcgccattcat

SEQ ID NO: 387195 - DNA, 30 bp, Artificial Sequence
  Synthetic oligonucleotide
tgttgcaaaatatgtaaactttcgattcat

SEQ ID NO: 387196 - DNA, 30 bp, Artificial Sequence
  Synthetic oligonucleotide
ggcaaagacctgtggcgctcgtatattcat

SEQ ID NO: 387197 - DNA, 30 bp, Artificial Sequence
  Synthetic oligonucleotide
tcgcgctcctaggaggttcttattattcat

SEQ ID NO: 387198 - DNA, 30 bp, Artificial Sequence
  Synthetic oligonucleotide
atatgtagagcggggcatgggcaacttcat

SEQ ID NO: 387199 - DNA, 30 bp, Artificial Sequence
  Synthetic oligonucleotide
agagctactaactttagtttcagacttcat

SEQ ID NO: 387200 - DNA, 30 bp, Artificial Sequence
  Synthetic oligonucleotide
ggaatgaggtatttgtatgagtcccttcat

SEQ ID NO: 387201 - DNA, 30 bp, Artificial Sequence
  Synthetic oligonucleotide
cgtcatcacttttttagtaggcagcttcat

SEQ ID NO: 387202 - DNA, 30 bp, Artificial Sequence
  Synthetic oligonucleotide
tatttattgcgtcggttcggctagcttcat

SEQ ID NO: 387203 - DNA, 30 bp, Artificial Sequence
  Synthetic oligonucleotide
ccgaggcaatggaaagcgagctgagttcat

SEQ ID NO: 387204 - DNA, 30 bp, Artificial Sequence
  Synthetic oligonucleotide
ggtaaatgtggggaggttcggaccgttcat

SEQ ID NO: 387205 - DNA, 30 bp, Artificial Sequence
  Synthetic oligonucleotide
tacccataccttttctgttagttcgttcat

SEQ ID NO: 387206 - DNA, 31 bp, Artificial Sequence
  Synthetic oligonucleotide
ttgcactcgatgtttgacaagtttcgttcat

SEQ ID NO: 387207 - DNA, 30 bp, Artificial Sequence
  Synthetic oligonucleotide
tcggtatgcataaaaaagcctatggttcat

SEQ ID NO: 387208 - DNA, 30 bp, Artificial Sequence
  Synthetic oligonucleotide
ctgacagtcaagtggtatcagcctgttcat

SEQ ID NO: 387209 - DNA, 30 bp, Artificial Sequence
  Synthetic oligonucleotide
agtgacaacctagattcagtccaatttcat

SEQ ID NO: 387210 - DNA, 30 bp, Artificial Sequence
  Synthetic oligonucleotide
gacgttcgtttagaaggggtctaatttcat

SEQ ID NO: 387211 - DNA, 30 bp, Artificial Sequence
  Synthetic oligonucleotide
catgagtggagcactgctccgtcatttcat

SEQ ID NO: 387212 - DNA, 30 bp, Artificial Sequence
  Synthetic oligonucleotide
accaggtcggcatgatgaccctgctttcat

SEQ ID NO: 387213 - DNA, 30 bp, Artificial Sequence
  Synthetic oligonucleotide
cgggaaaaggacctaacgtccgtctttcat

SEQ ID NO: 387214 - DNA, 30 bp, Artificial Sequence
  Synthetic oligonucleotide
accaaatcagctaattacggatgaaaagat

SEQ ID NO: 387215 - DNA, 30 bp, Artificial Sequence
  Synthetic oligonucleotide
gaagttgcttctgggcatcgtcccaaagat

SEQ ID NO: 387216 - DNA, 30 bp, Artificial Sequence
  Synthetic oligonucleotide
tatgatcatagcctgatcaccggcaaagat

SEQ ID NO: 387217 - DNA, 30 bp, Artificial Sequence
  Synthetic oligonucleotide
gctatctatctgggtcgcgttgtcaaagat

SEQ ID NO: 387218 - DNA, 30 bp, Artificial Sequence
  Synthetic oligonucleotide
gatgccttgtagtttcaggatgcgaaagat

SEQ ID NO: 387219 - DNA, 30 bp, Artificial Sequence
  Synthetic oligonucleotide
gccgtgcaaatttcccgtataatgaaagat

SEQ ID NO: 387220 - DNA, 30 bp, Artificial Sequence
  Synthetic oligonucleotide
atctcgtaaggccgcgctctgatgaaagat

SEQ ID NO: 387221 - DNA, 30 bp, Artificial Sequence
  Synthetic oligonucleotide
ttcataagagaggcttataaactgaaagat

SEQ ID NO: 387222 - DNA, 30 bp, Artificial Sequence
  Synthetic oligonucleotide
tcctagtatgaacgtcactatgtgaaagat

SEQ ID NO: 387223 - DNA, 30 bp, Artificial Sequence
  Synthetic oligonucleotide
tagcagttgaagaccggacacggtaaagat

SEQ ID NO: 387224 - DNA, 30 bp, Artificial Sequence
  Synthetic oligonucleotide
acaactacattgctatatgcgcttaaagat

SEQ ID NO: 387225 - DNA, 30 bp, Artificial Sequence
  Synthetic oligonucleotide
gctactggtgtaattcgagggcttaaagat

SEQ ID NO: 387226 - DNA, 30 bp, Artificial Sequence
  Synthetic oligonucleotide
acaaaagatgccgcgctactgggccaagat

SEQ ID NO: 387227 - DNA, 30 bp, Artificial Sequence
  Synthetic oligonucleotide
gcaaattaagactggacgcgcgtagaagat

SEQ ID NO: 387228 - DNA, 30 bp, Artificial Sequence
  Synthetic oligonucleotide
agcgcatatgtctttgctactgacgaagat

SEQ ID NO: 387229 - DNA, 30 bp, Artificial Sequence
  Synthetic oligonucleotide
agtgccgttcaatacggatcggccgaagat

SEQ ID NO: 387230 - DNA, 30 bp, Artificial Sequence
  Synthetic oligonucleotide
atagcttaattcacctcttgctgcgaagat

SEQ ID NO: 387231 - DNA, 30 bp, Artificial Sequence
  Synthetic oligonucleotide
taattagcgcgccattcacatagggaagat

SEQ ID NO: 387232 - DNA, 30 bp, Artificial Sequence
  Synthetic oligonucleotide
ccagcgtactgtctgatgcacccataagat

SEQ ID NO: 387233 - DNA, 30 bp, Artificial Sequence
  Synthetic oligonucleotide
agatacaatggggtccgctacatataagat

SEQ ID NO: 387234 - DNA, 30 bp, Artificial Sequence
  Synthetic oligonucleotide
cggtcgcttcctctatgcaatcgctaagat

SEQ ID NO: 387235 - DNA, 30 bp, Artificial Sequence
  Synthetic oligonucleotide
taaattatagggaggtaactaccttaagat

SEQ ID NO: 387236 - DNA, 30 bp, Artificial Sequence
  Synthetic oligonucleotide
agaaattttgcagacggggccatttaagat

SEQ ID NO: 387237 - DNA, 30 bp, Artificial Sequence
  Synthetic oligonucleotide
ggtttccggtaactccggcgtgaaacagat

SEQ ID NO: 387238 - DNA, 30 bp, Artificial Sequence
  Synthetic oligonucleotide
ggcgtgtcgcgctaggaaatcggcacagat

SEQ ID NO: 387239 - DNA, 30 bp, Artificial Sequence
  Synthetic oligonucleotide
caggggtaggggtgtatccttagtacagat

SEQ ID NO: 387240 - DNA, 30 bp, Artificial Sequence
  Synthetic oligonucleotide
gcgcgctacagtatagagttattaccagat

SEQ ID NO: 387241 - DNA, 30 bp, Artificial Sequence
  Synthetic oligonucleotide
ttgaaactaaaaccttgcggatacccagat

SEQ ID NO: 387242 - DNA, 30 bp, Artificial Sequence
  Synthetic oligonucleotide
gctctgctttggctgcgtagtatcccagat

SEQ ID NO: 387243 - DNA, 30 bp, Artificial Sequence
  Synthetic oligonucleotide
gctatatgtatattaacctatgggccagat

SEQ ID NO: 387244 - DNA, 30 bp, Artificial Sequence
  Synthetic oligonucleotide
attcaactaatacaatggatatggccagat

SEQ ID NO: 387245 - DNA, 30 bp, Artificial Sequence
  Synthetic oligonucleotide
caagttcccactatatacgagttgccagat

SEQ ID NO: 387246 - DNA, 29 bp, Artificial Sequence
  Synthetic oligonucleotide
cgggatagtggggtttgttggttccagat

SEQ ID NO: 387247 - DNA, 30 bp, Artificial Sequence
  Synthetic oligonucleotide
tgcaatctgacttcggcaaactaagcagat

SEQ ID NO: 387248 - DNA, 30 bp, Artificial Sequence
  Synthetic oligonucleotide
tgtactactagtcgtttccgaaacgcagat

SEQ ID NO: 387249 - DNA, 30 bp, Artificial Sequence
  Synthetic oligonucleotide
tcgcctagtggcatcagctattacgcagat

SEQ ID NO: 387250 - DNA, 30 bp, Artificial Sequence
  Synthetic oligonucleotide
agctgagcgaaaatatcttgcggcgcagat

SEQ ID NO: 387251 - DNA, 30 bp, Artificial Sequence
  Synthetic oligonucleotide
agtgtagtcgcggtaccccgcgtcgcagat

SEQ ID NO: 387252 - DNA, 30 bp, Artificial Sequence
  Synthetic oligonucleotide
gcttttacaattagctgtgccaaggcagat

SEQ ID NO: 387253 - DNA, 30 bp, Artificial Sequence
  Synthetic oligonucleotide
agtacgatgcaatatagggtctaggcagat

SEQ ID NO: 387254 - DNA, 30 bp, Artificial Sequence
  Synthetic oligonucleotide
gaaaggacaccgcaactcagcccggcagat

SEQ ID NO: 387255 - DNA, 30 bp, Artificial Sequence
  Synthetic oligonucleotide
gttgtgggtcactaatgagtgaatgcagat

SEQ ID NO: 387256 - DNA, 30 bp, Artificial Sequence
  Synthetic oligonucleotide
agagcgacgcgctattcttgagatgcagat

SEQ ID NO: 387257 - DNA, 30 bp, Artificial Sequence
  Synthetic oligonucleotide
tcccactttggtctagcgttacttgcagat

SEQ ID NO: 387258 - DNA, 30 bp, Artificial Sequence
  Synthetic oligonucleotide
agtcacatgatgctgcagtgatcatcagat

SEQ ID NO: 387259 - DNA, 30 bp, Artificial Sequence
  Synthetic oligonucleotide
acagcattaagacctcggtggtagtcagat

SEQ ID NO: 387260 - DNA, 30 bp, Artificial Sequence
  Synthetic oligonucleotide
ttagactgcgaataaacgtactcgtcagat

SEQ ID NO: 387261 - DNA, 30 bp, Artificial Sequence
  Synthetic oligonucleotide
atcatcttaagagggtgcgcttattcagat

SEQ ID NO: 387262 - DNA, 30 bp, Artificial Sequence
  Synthetic oligonucleotide
taatgagtttgggcgaactttttttcagat

SEQ ID NO: 387263 - DNA, 30 bp, Artificial Sequence
  Synthetic oligonucleotide
cattctcgagacgaatctgagtatagagat

SEQ ID NO: 387264 - DNA, 30 bp, Artificial Sequence
  Synthetic oligonucleotide
aggaaatcaacgacctggttcgttagagat

SEQ ID NO: 387265 - DNA, 30 bp, Artificial Sequence
  Synthetic oligonucleotide
ggggccctcaatgcttggtatagacgagat

SEQ ID NO: 387266 - DNA, 30 bp, Artificial Sequence
  Synthetic oligonucleotide
ggaacaaacttggccgtccttagacgagat

SEQ ID NO: 387267 - DNA, 30 bp, Artificial Sequence
  Synthetic oligonucleotide
tacattgcaccacgttcgtcttgacgagat

SEQ ID NO: 387268 - DNA, 30 bp, Artificial Sequence
  Synthetic oligonucleotide
cggaactcgagtctgcatgcatgtcgagat

SEQ ID NO: 387269 - DNA, 30 bp, Artificial Sequence
  Synthetic oligonucleotide
atttattgcaagttgataatacttcgagat

SEQ ID NO: 387270 - DNA, 30 bp, Artificial Sequence
  Synthetic oligonucleotide
gctccgtcgcaacgcactgctgttcgagat

SEQ ID NO: 387271 - DNA, 30 bp, Artificial Sequence
  Synthetic oligonucleotide
agccgtgtaatgagacagtataaaggagat

SEQ ID NO: 387272 - DNA, 30 bp, Artificial Sequence
  Synthetic oligonucleotide
ccagcgcgtggttcaccacgagtcggagat

SEQ ID NO: 387273 - DNA, 30 bp, Artificial Sequence
  Synthetic oligonucleotide
ctcaaggagatgctgcggggattcggagat

SEQ ID NO: 387274 - DNA, 30 bp, Artificial Sequence
  Synthetic oligonucleotide
actgttgaattcaaaggagcacggggagat

SEQ ID NO: 387275 - DNA, 30 bp, Artificial Sequence
  Synthetic oligonucleotide
ttgctgtgttctcattagaagtggggagat

SEQ ID NO: 387276 - DNA, 30 bp, Artificial Sequence
  Synthetic oligonucleotide
gagctcagccccagtttccatcgtggagat

SEQ ID NO: 387277 - DNA, 30 bp, Artificial Sequence
  Synthetic oligonucleotide
acgcgaggtttgaccagagccgttggagat

SEQ ID NO: 387278 - DNA, 30 bp, Artificial Sequence
  Synthetic oligonucleotide
agttgtgggacatttcttagtcaatgagat

SEQ ID NO: 387279 - DNA, 30 bp, Artificial Sequence
  Synthetic oligonucleotide
aatgctacattgttggagatccggtgagat

SEQ ID NO: 387280 - DNA, 30 bp, Artificial Sequence
  Synthetic oligonucleotide
cagtattacgaggcactggcctggtgagat

SEQ ID NO: 387281 - DNA, 30 bp, Artificial Sequence
  Synthetic oligonucleotide
agaatatgcgcccgggattacacaatagat

SEQ ID NO: 387282 - DNA, 28 bp, Artificial Sequence
  Synthetic oligonucleotide
agttttgactccacgcccccacatagat

SEQ ID NO: 387283 - DNA, 30 bp, Artificial Sequence
  Synthetic oligonucleotide
gacctcctctaggcatgtgcccgcatagat

SEQ ID NO: 387284 - DNA, 30 bp, Artificial Sequence
  Synthetic oligonucleotide
aagttgatgggtcgcatgtctgagatagat

SEQ ID NO: 387285 - DNA, 30 bp, Artificial Sequence
  Synthetic oligonucleotide
tgacctttatgtcataggtccacgatagat

SEQ ID NO: 387286 - DNA, 30 bp, Artificial Sequence
  Synthetic oligonucleotide
atcataaggtctgtagcttggccgatagat

SEQ ID NO: 387287 - DNA, 30 bp, Artificial Sequence
  Synthetic oligonucleotide
tctaccaagttcgagcagggtcatatagat

SEQ ID NO: 387288 - DNA, 30 bp, Artificial Sequence
  Synthetic oligonucleotide
caaggagaggcggcattcgtcttactagat

SEQ ID NO: 387289 - DNA, 30 bp, Artificial Sequence
  Synthetic oligonucleotide
ggaaacgcatgcgtcagacctgtgctagat

SEQ ID NO: 387290 - DNA, 30 bp, Artificial Sequence
  Synthetic oligonucleotide
ggtcccaccagattttcaatgagtctagat

SEQ ID NO: 387291 - DNA, 30 bp, Artificial Sequence
  Synthetic oligonucleotide
gttggcgactgatctagtttaaaagtagat

SEQ ID NO: 387292 - DNA, 30 bp, Artificial Sequence
  Synthetic oligonucleotide
cagggggtcggagggacgtgtggtgtagat

SEQ ID NO: 387293 - DNA, 30 bp, Artificial Sequence
  Synthetic oligonucleotide
gccataagtagtatttggtgatgtgtagat

SEQ ID NO: 387294 - DNA, 30 bp, Artificial Sequence
  Synthetic oligonucleotide
cccaggttggcctattcgaccgaattagat

SEQ ID NO: 387295 - DNA, 30 bp, Artificial Sequence
  Synthetic oligonucleotide
accataccggtggtcgtatatgaattagat

SEQ ID NO: 387296 - DNA, 30 bp, Artificial Sequence
  Synthetic oligonucleotide
tagactactatgcacgccgattaattagat

SEQ ID NO: 387297 - DNA, 30 bp, Artificial Sequence
  Synthetic oligonucleotide
ctagcaaaaaaccagctcgtcacattagat

SEQ ID NO: 387298 - DNA, 30 bp, Artificial Sequence
  Synthetic oligonucleotide
gggcggagtaatatagttatgtgattagat

SEQ ID NO: 387299 - DNA, 30 bp, Artificial Sequence
  Synthetic oligonucleotide
gtcgctgctccaatggtgcagtacttagat

SEQ ID NO: 387300 - DNA, 30 bp, Artificial Sequence
  Synthetic oligonucleotide
ggtaagcgagttgtctaagtagatttagat

SEQ ID NO: 387301 - DNA, 30 bp, Artificial Sequence
  Synthetic oligonucleotide
caaggaaagagtggcgaatgtcctttagat

SEQ ID NO: 387302 - DNA, 30 bp, Artificial Sequence
  Synthetic oligonucleotide
agattccacctccccctccattgtttagat

SEQ ID NO: 387303 - DNA, 30 bp, Artificial Sequence
  Synthetic oligonucleotide
gcatgtgtccaaatttggaaatagaacgat

SEQ ID NO: 387304 - DNA, 30 bp, Artificial Sequence
  Synthetic oligonucleotide
ttctggcgagatatcgtaaccattaacgat

SEQ ID NO: 387305 - DNA, 31 bp, Artificial Sequence
  Synthetic oligonucleotide
aaatggcactctgtaatcaacccgacacgat

SEQ ID NO: 387306 - DNA, 30 bp, Artificial Sequence
  Synthetic oligonucleotide
gaactcgagaagcgtggcccccggcacgat

SEQ ID NO: 387307 - DNA, 30 bp, Artificial Sequence
  Synthetic oligonucleotide
cgggccctgcattgtattgtctgtcacgat

SEQ ID NO: 387308 - DNA, 30 bp, Artificial Sequence
  Synthetic oligonucleotide
acattggcccagaaaggcgcgcttcacgat

SEQ ID NO: 387309 - DNA, 30 bp, Artificial Sequence
  Synthetic oligonucleotide
ttagtccgaacacctggctaggcagacgat

SEQ ID NO: 387310 - DNA, 30 bp, Artificial Sequence
  Synthetic oligonucleotide
gaccccaagcgtgtgtgaacacgagacgat

SEQ ID NO: 387311 - DNA, 30 bp, Artificial Sequence
  Synthetic oligonucleotide
atgcaatcggaggattcttgtcgagacgat

SEQ ID NO: 387312 - DNA, 30 bp, Artificial Sequence
  Synthetic oligonucleotide
aacggcgttttgtgttggaacgtagacgat

SEQ ID NO: 387313 - DNA, 30 bp, Artificial Sequence
  Synthetic oligonucleotide
atactgactatccacaacggcaaggacgat

SEQ ID NO: 387314 - DNA, 30 bp, Artificial Sequence
  Synthetic oligonucleotide
ttcttggttagaaaggaagccaatgacgat

SEQ ID NO: 387315 - DNA, 30 bp, Artificial Sequence
  Synthetic oligonucleotide
gtgatcagtgctcgaaaaaacattgacgat

SEQ ID NO: 387316 - DNA, 30 bp, Artificial Sequence
  Synthetic oligonucleotide
cagcacgccataggcagcggcattgacgat

SEQ ID NO: 387317 - DNA, 30 bp, Artificial Sequence
  Synthetic oligonucleotide
aagatgcaacagctcaaggcatttgacgat

SEQ ID NO: 387318 - DNA, 30 bp, Artificial Sequence
  Synthetic oligonucleotide
gttcaagggggtcggcgtcgtaaatacgat

SEQ ID NO: 387319 - DNA, 30 bp, Artificial Sequence
  Synthetic oligonucleotide
aggtcgacgcgtttggtcggaggatacgat

SEQ ID NO: 387320 - DNA, 30 bp, Artificial Sequence
  Synthetic oligonucleotide
cgatccgccgtatcagatcctttatacgat

SEQ ID NO: 387321 - DNA, 30 bp, Artificial Sequence
  Synthetic oligonucleotide
cctaaataatcgaattcgttctgctacgat

SEQ ID NO: 387322 - DNA, 30 bp, Artificial Sequence
  Synthetic oligonucleotide
gccacgaccggtcagggcgtagtctacgat

SEQ ID NO: 387323 - DNA, 30 bp, Artificial Sequence
  Synthetic oligonucleotide
ggtcctatttatcatatggttcagtacgat

SEQ ID NO: 387324 - DNA, 30 bp, Artificial Sequence
  Synthetic oligonucleotide
agtgtctctgttgcctagagatcgtacgat

SEQ ID NO: 387325 - DNA, 30 bp, Artificial Sequence
  Synthetic oligonucleotide
aagttactctaatcattctgctcgtacgat

SEQ ID NO: 387326 - DNA, 30 bp, Artificial Sequence
  Synthetic oligonucleotide
ctcaactttcctgatggaaagctgtacgat

SEQ ID NO: 387327 - DNA, 30 bp, Artificial Sequence
  Synthetic oligonucleotide
attaattatctcccctagtctctaaccgat

SEQ ID NO: 387328 - DNA, 30 bp, Artificial Sequence
  Synthetic oligonucleotide
gacgcgaggtactcggtctaggtaaccgat

SEQ ID NO: 387329 - DNA, 30 bp, Artificial Sequence
  Synthetic oligonucleotide
ttctttgagccttgcgcctctccgaccgat

SEQ ID NO: 387330 - DNA, 30 bp, Artificial Sequence
  Synthetic oligonucleotide
tattactttcaatgggaagaatggaccgat

SEQ ID NO: 387331 - DNA, 30 bp, Artificial Sequence
  Synthetic oligonucleotide
attgattctgcaagggacagcgataccgat

SEQ ID NO: 387332 - DNA, 30 bp, Artificial Sequence
  Synthetic oligonucleotide
gacattgaatgagacgaattggataccgat

SEQ ID NO: 387333 - DNA, 30 bp, Artificial Sequence
  Synthetic oligonucleotide
ccaccgtcacattgtaagccgccccccgat

SEQ ID NO: 387334 - DNA, 30 bp, Artificial Sequence
  Synthetic oligonucleotide
cgcgataggtagtccgcctttagccccgat

SEQ ID NO: 387335 - DNA, 30 bp, Artificial Sequence
  Synthetic oligonucleotide
gtattgcctcatcgtaaaatgtcgcccgat

SEQ ID NO: 387336 - DNA, 30 bp, Artificial Sequence
  Synthetic oligonucleotide
aagaagaatgtatcttgccagaatcccgat

SEQ ID NO: 387337 - DNA, 30 bp, Artificial Sequence
  Synthetic oligonucleotide
tggatcgtgtcattcctgtccgatcccgat

SEQ ID NO: 387338 - DNA, 30 bp, Artificial Sequence
  Synthetic oligonucleotide
aatctggcccaaccctgttcaactcccgat

SEQ ID NO: 387339 - DNA, 30 bp, Artificial Sequence
  Synthetic oligonucleotide
gtttaagacgtaaccgtttctattcccgat

SEQ ID NO: 387340 - DNA, 30 bp, Artificial Sequence
  Synthetic oligonucleotide
gagtataagaagttcccaggaggagccgat

SEQ ID NO: 387341 - DNA, 30 bp, Artificial Sequence
  Synthetic oligonucleotide
tgggcagccagagtagcgtacgacgccgat

SEQ ID NO: 387342 - DNA, 30 bp, Artificial Sequence
  Synthetic oligonucleotide
acattgtcggcattcaggacttaggccgat

SEQ ID NO: 387343 - DNA, 30 bp, Artificial Sequence
  Synthetic oligonucleotide
ttactgatttctacaggacgctaatccgat

SEQ ID NO: 387344 - DNA, 30 bp, Artificial Sequence
  Synthetic oligonucleotide
cactgagaattaggcgattgtgtatccgat

SEQ ID NO: 387345 - DNA, 30 bp, Artificial Sequence
  Synthetic oligonucleotide
tgccggtagtcggaccgcaaatcctccgat

SEQ ID NO: 387346 - DNA, 30 bp, Artificial Sequence
  Synthetic oligonucleotide
aatcggatcgagagttaaggtccgtccgat

SEQ ID NO: 387347 - DNA, 30 bp, Artificial Sequence
  Synthetic oligonucleotide
ttggtgtgataaagatctcgttattccgat

SEQ ID NO: 387348 - DNA, 30 bp, Artificial Sequence
  Synthetic oligonucleotide
cccgcgtttgcttgggatttgacttccgat

SEQ ID NO: 387349 - DNA, 30 bp, Artificial Sequence
  Synthetic oligonucleotide
tactcgcgttacggacgtgagtgaagcgat

SEQ ID NO: 387350 - DNA, 30 bp, Artificial Sequence
  Synthetic oligonucleotide
agtcatgcctattgagaccaaacgagcgat

SEQ ID NO: 387351 - DNA, 30 bp, Artificial Sequence
  Synthetic oligonucleotide
aactgcccgctcgtaaccctgatgagcgat

SEQ ID NO: 387352 - DNA, 30 bp, Artificial Sequence
  Synthetic oligonucleotide
tgtagaactcttagggggagcgatagcgat

SEQ ID NO: 387353 - DNA, 30 bp, Artificial Sequence
  Synthetic oligonucleotide
cctaaaaattatgaacgggtgtttagcgat

SEQ ID NO: 387354 - DNA, 30 bp, Artificial Sequence
  Synthetic oligonucleotide
acaatccttgttggatcacacggacgcgat

SEQ ID NO: 387355 - DNA, 30 bp, Artificial Sequence
  Synthetic oligonucleotide
atgtgtaggcactgcattcacagccgcgat

SEQ ID NO: 387356 - DNA, 30 bp, Artificial Sequence
  Synthetic oligonucleotide
aaacagtacatcccaatataccgccgcgat

SEQ ID NO: 387357 - DNA, 30 bp, Artificial Sequence
  Synthetic oligonucleotide
cctgttcgtatttaaaatgtgttccgcgat

SEQ ID NO: 387358 - DNA, 30 bp, Artificial Sequence
  Synthetic oligonucleotide
tctagactccccatagacacggcgcgcgat

SEQ ID NO: 387359 - DNA, 30 bp, Artificial Sequence
  Synthetic oligonucleotide
cctaggctaccacgagctagtttgcgcgat

SEQ ID NO: 387360 - DNA, 30 bp, Artificial Sequence
  Synthetic oligonucleotide
tttaagggcttcgacttggacactcgcgat

SEQ ID NO: 387361 - DNA, 30 bp, Artificial Sequence
  Synthetic oligonucleotide
gtctgctcctgaaattcggcggacggcgat

SEQ ID NO: 387362 - DNA, 30 bp, Artificial Sequence
  Synthetic oligonucleotide
cataagaatcccatccgcaggagcggcgat

SEQ ID NO: 387363 - DNA, 30 bp, Artificial Sequence
  Synthetic oligonucleotide
cggtccttttaaatcccgggtcagggcgat

SEQ ID NO: 387364 - DNA, 30 bp, Artificial Sequence
  Synthetic oligonucleotide
gaggtgaccatggttaatatatgtggcgat

SEQ ID NO: 387365 - DNA, 30 bp, Artificial Sequence
  Synthetic oligonucleotide
tggacgttgtatcagggtcctcttggcgat

SEQ ID NO: 387366 - DNA, 30 bp, Artificial Sequence
  Synthetic oligonucleotide
ttgaggtaaggcctggtagcctttggcgat

SEQ ID NO: 387367 - DNA, 30 bp, Artificial Sequence
  Synthetic oligonucleotide
gaaaagtggattctaagctaacgttgcgat

SEQ ID NO: 387368 - DNA, 30 bp, Artificial Sequence
  Synthetic oligonucleotide
cacatatataggggaatcggcggaatcgat

SEQ ID NO: 387369 - DNA, 30 bp, Artificial Sequence
  Synthetic oligonucleotide
ttcgaatgcgaaactagatgcggcatcgat

SEQ ID NO: 387370 - DNA, 30 bp, Artificial Sequence
  Synthetic oligonucleotide
ggtattcttcgaatacgcgttcatatcgat

SEQ ID NO: 387371 - DNA, 30 bp, Artificial Sequence
  Synthetic oligonucleotide
agcaggaacgctctgttctccgctatcgat

SEQ ID NO: 387372 - DNA, 30 bp, Artificial Sequence
  Synthetic oligonucleotide
cttaaccgagatatggactaggaactcgat

SEQ ID NO: 387373 - DNA, 30 bp, Artificial Sequence
  Synthetic oligonucleotide
gtacaatggagtcacgatacggaactcgat

SEQ ID NO: 387374 - DNA, 30 bp, Artificial Sequence
  Synthetic oligonucleotide
gcaatgacgtagttcttggtgtaactcgat

SEQ ID NO: 387375 - DNA, 30 bp, Artificial Sequence
  Synthetic oligonucleotide
ttaaatcaaatgctatcacccctactcgat

SEQ ID NO: 387376 - DNA, 30 bp, Artificial Sequence
  Synthetic oligonucleotide
ccccagacgtgcagtcagcgttacctcgat

SEQ ID NO: 387377 - DNA, 30 bp, Artificial Sequence
  Synthetic oligonucleotide
tctcctctgtccgagttagttagtctcgat

SEQ ID NO: 387378 - DNA, 30 bp, Artificial Sequence
  Synthetic oligonucleotide
ccctatcccacgaaatggttgcaggtcgat

SEQ ID NO: 387379 - DNA, 30 bp, Artificial Sequence
  Synthetic oligonucleotide
actggtaaacaccttagtgtttaggtcgat

SEQ ID NO: 387380 - DNA, 30 bp, Artificial Sequence
  Synthetic oligonucleotide
agaatcgtaaggtcccagattttattcgat

SEQ ID NO: 387381 - DNA, 30 bp, Artificial Sequence
  Synthetic oligonucleotide
ttgtactcgaacaaatatttttcgttcgat

SEQ ID NO: 387382 - DNA, 30 bp, Artificial Sequence
  Synthetic oligonucleotide
cggcaaaccttcttatttactgggttcgat

SEQ ID NO: 387383 - DNA, 30 bp, Artificial Sequence
  Synthetic oligonucleotide
atatgacatatgacaatttaatggttcgat

SEQ ID NO: 387384 - DNA, 30 bp, Artificial Sequence
  Synthetic oligonucleotide
ttccgctcagttagtctgcggatgttcgat

SEQ ID NO: 387385 - DNA, 30 bp, Artificial Sequence
  Synthetic oligonucleotide
acttacagattttagaccaacgatttcgat

SEQ ID NO: 387386 - DNA, 30 bp, Artificial Sequence
  Synthetic oligonucleotide
atttagatctgtgctgtacaaagtttcgat

SEQ ID NO: 387387 - DNA, 30 bp, Artificial Sequence
  Synthetic oligonucleotide
caaacgtatgggggtactatcgccaaggat

SEQ ID NO: 387388 - DNA, 28 bp, Artificial Sequence
  Synthetic oligonucleotide
ataccatcgtataggacggatcaaggat

SEQ ID NO: 387389 - DNA, 30 bp, Artificial Sequence
  Synthetic oligonucleotide
gtcccaaactaaaccactattctgaaggat

SEQ ID NO: 387390 - DNA, 30 bp, Artificial Sequence
  Synthetic oligonucleotide
ggcttctcgtgctgggaaggtaataaggat

SEQ ID NO: 387391 - DNA, 31 bp, Artificial Sequence
  Synthetic oligonucleotide
acgcagaacgtgatcatctagcccacaggat

SEQ ID NO: 387392 - DNA, 30 bp, Artificial Sequence
  Synthetic oligonucleotide
attacagattttctgtgcaatgcacaggat

SEQ ID NO: 387393 - DNA, 30 bp, Artificial Sequence
  Synthetic oligonucleotide
ttagagtattggatactctgggtacaggat

SEQ ID NO: 387394 - DNA, 30 bp, Artificial Sequence
  Synthetic oligonucleotide
acgtccaattcgtgacgattggaccaggat

SEQ ID NO: 387395 - DNA, 30 bp, Artificial Sequence
  Synthetic oligonucleotide
agctgcgtcggcgcccctttgatccaggat

SEQ ID NO: 387396 - DNA, 30 bp, Artificial Sequence
  Synthetic oligonucleotide
tacgaagcagatattctagtgccgcaggat

SEQ ID NO: 387397 - DNA, 30 bp, Artificial Sequence
  Synthetic oligonucleotide
ccatgatatacgttggtaggtaggcaggat

SEQ ID NO: 387398 - DNA, 30 bp, Artificial Sequence
  Synthetic oligonucleotide
aagcctgtcgtgtttggactggggcaggat

SEQ ID NO: 387399 - DNA, 30 bp, Artificial Sequence
  Synthetic oligonucleotide
aacgattaattccaaagtcgggatcaggat

SEQ ID NO: 387400 - DNA, 30 bp, Artificial Sequence
  Synthetic oligonucleotide
gccattaagatgttcacctgatcagaggat

SEQ ID NO: 387401 - DNA, 30 bp, Artificial Sequence
  Synthetic oligonucleotide
tcctgctcaggctagctcacgggagaggat

SEQ ID NO: 387402 - DNA, 30 bp, Artificial Sequence
  Synthetic oligonucleotide
aagtgacgctcaatattgtatagcgaggat

SEQ ID NO: 387403 - DNA, 30 bp, Artificial Sequence
  Synthetic oligonucleotide
gatacattatcctgttcaacgcactaggat

SEQ ID NO: 387404 - DNA, 30 bp, Artificial Sequence
  Synthetic oligonucleotide
atacgcacgtcttgctctcttgactaggat

SEQ ID NO: 387405 - DNA, 30 bp, Artificial Sequence
  Synthetic oligonucleotide
gcgtataggatcacgcgactagcgtaggat

SEQ ID NO: 387406 - DNA, 30 bp, Artificial Sequence
  Synthetic oligonucleotide
tgactggactaactagtgtttatgtaggat

SEQ ID NO: 387407 - DNA, 30 bp, Artificial Sequence
  Synthetic oligonucleotide
cgtgcgagcttcgaggcctaatattaggat

SEQ ID NO: 387408 - DNA, 30 bp, Artificial Sequence
  Synthetic oligonucleotide
gcccaggcgccgtcgatttcgacttaggat

SEQ ID NO: 387409 - DNA, 30 bp, Artificial Sequence
  Synthetic oligonucleotide
tacgcggaccgctcttagaacgtttaggat

SEQ ID NO: 387410 - DNA, 30 bp, Artificial Sequence
  Synthetic oligonucleotide
gagactcttagtcaaattaaacaaacggat

SEQ ID NO: 387411 - DNA, 30 bp, Artificial Sequence
  Synthetic oligonucleotide
tatgtaaaccgcacgggcagggtcacggat

SEQ ID NO: 387412 - DNA, 30 bp, Artificial Sequence
  Synthetic oligonucleotide
gttgtggggttgtgctgacccgggacggat

SEQ ID NO: 387413 - DNA, 30 bp, Artificial Sequence
  Synthetic oligonucleotide
ttcgtgtgtttctgatcctctatgacggat

SEQ ID NO: 387414 - DNA, 30 bp, Artificial Sequence
  Synthetic oligonucleotide
ggtactattacatgataccgcgatacggat

SEQ ID NO: 387415 - DNA, 30 bp, Artificial Sequence
  Synthetic oligonucleotide
tatcgttggtccaaccgaaacactacggat

SEQ ID NO: 387416 - DNA, 30 bp, Artificial Sequence
  Synthetic oligonucleotide
tgtaatggatgtggtcccgaaattacggat

SEQ ID NO: 387417 - DNA, 30 bp, Artificial Sequence
  Synthetic oligonucleotide
gctaatgtagaacgcgaagcatcaccggat

SEQ ID NO: 387418 - DNA, 30 bp, Artificial Sequence
  Synthetic oligonucleotide
gtgctgtttaatatttggcgtctcccggat

SEQ ID NO: 387419 - DNA, 30 bp, Artificial Sequence
  Synthetic oligonucleotide
aagtcacgatggggtctttccccagcggat

SEQ ID NO: 387420 - DNA, 30 bp, Artificial Sequence
  Synthetic oligonucleotide
cgtcggtttaaggaactggatgtagcggat

SEQ ID NO: 387421 - DNA, 30 bp, Artificial Sequence
  Synthetic oligonucleotide
gtatagttgtcttagaggccgggcgcggat

SEQ ID NO: 387422 - DNA, 30 bp, Artificial Sequence
  Synthetic oligonucleotide
cgtagattttgaagcggaacgggggcggat

SEQ ID NO: 387423 - DNA, 30 bp, Artificial Sequence
  Synthetic oligonucleotide
ggactcaaacaccaggcccaagtggcggat

SEQ ID NO: 387424 - DNA, 30 bp, Artificial Sequence
  Synthetic oligonucleotide
gcagatcccatcgtttagtacgtggcggat

SEQ ID NO: 387425 - DNA, 30 bp, Artificial Sequence
  Synthetic oligonucleotide
ttcgaaaattttttcgctctaactgcggat

SEQ ID NO: 387426 - DNA, 30 bp, Artificial Sequence
  Synthetic oligonucleotide
agtcgatgttaatttaggatttgatcggat

SEQ ID NO: 387427 - DNA, 30 bp, Artificial Sequence
  Synthetic oligonucleotide
atagatggaacttagaggatcctatcggat

SEQ ID NO: 387428 - DNA, 30 bp, Artificial Sequence
  Synthetic oligonucleotide
cacgttggtcagttggctggttactcggat

SEQ ID NO: 387429 - DNA, 30 bp, Artificial Sequence
  Synthetic oligonucleotide
aagctttaaagtaaataatatgcctcggat

SEQ ID NO: 387430 - DNA, 30 bp, Artificial Sequence
  Synthetic oligonucleotide
aggtcgtgtaaccctaactttggctcggat

SEQ ID NO: 387431 - DNA, 30 bp, Artificial Sequence
  Synthetic oligonucleotide
accagctaatgtaattcgtctctctcggat

SEQ ID NO: 387432 - DNA, 30 bp, Artificial Sequence
  Synthetic oligonucleotide
cgggtacggcctgggtttcgaaggtcggat

SEQ ID NO: 387433 - DNA, 30 bp, Artificial Sequence
  Synthetic oligonucleotide
aaagtggaatacctacgttacgggtcggat

SEQ ID NO: 387434 - DNA, 30 bp, Artificial Sequence
  Synthetic oligonucleotide
ctactttaacagtcacgaagtatgtcggat

SEQ ID NO: 387435 - DNA, 30 bp, Artificial Sequence
  Synthetic oligonucleotide
aagtataaccggggccgagaccgttcggat

SEQ ID NO: 387436 - DNA, 30 bp, Artificial Sequence
  Synthetic oligonucleotide
gtagttgaagtaaacgaattcggttcggat

SEQ ID NO: 387437 - DNA, 30 bp, Artificial Sequence
  Synthetic oligonucleotide
gtttggccaacgtatggcagcatttcggat

SEQ ID NO: 387438 - DNA, 30 bp, Artificial Sequence
  Synthetic oligonucleotide
ggctcggttgtctaaggaaggctaagggat

SEQ ID NO: 387439 - DNA, 30 bp, Artificial Sequence
  Synthetic oligonucleotide
acgatgcagttgcactataaacacagggat

SEQ ID NO: 387440 - DNA, 30 bp, Artificial Sequence
  Synthetic oligonucleotide
ctattatcaaagtgaggtccgggcagggat

SEQ ID NO: 387441 - DNA, 30 bp, Artificial Sequence
  Synthetic oligonucleotide
gtcaggaaggtaacagaggcagtcagggat

SEQ ID NO: 387442 - DNA, 30 bp, Artificial Sequence
  Synthetic oligonucleotide
tttccaagactatgttgtaaattcagggat

SEQ ID NO: 387443 - DNA, 30 bp, Artificial Sequence
  Synthetic oligonucleotide
aggcggctaaggggcgggaaggcgagggat

SEQ ID NO: 387444 - DNA, 30 bp, Artificial Sequence
  Synthetic oligonucleotide
gtcaaggttgggcgtcgacgctgtagggat

SEQ ID NO: 387445 - DNA, 30 bp, Artificial Sequence
  Synthetic oligonucleotide
caacccaaacttgctcttaaggttagggat

SEQ ID NO: 387446 - DNA, 30 bp, Artificial Sequence
  Synthetic oligonucleotide
cgcctaagctacctcatacgaagacgggat

SEQ ID NO: 387447 - DNA, 30 bp, Artificial Sequence
  Synthetic oligonucleotide
caaactccagaaagtcgtcaattacgggat

SEQ ID NO: 387448 - DNA, 30 bp, Artificial Sequence
  Synthetic oligonucleotide
aaagggcgctccgtcattatgctccgggat

SEQ ID NO: 387449 - DNA, 30 bp, Artificial Sequence
  Synthetic oligonucleotide
tcggctttgatttccgtccaccagcgggat

SEQ ID NO: 387450 - DNA, 30 bp, Artificial Sequence
  Synthetic oligonucleotide
gagtttcgaacggagggtcccccgcgggat

SEQ ID NO: 387451 - DNA, 30 bp, Artificial Sequence
  Synthetic oligonucleotide
gctgcgagagtggaacccttgcatcgggat

SEQ ID NO: 387452 - DNA, 30 bp, Artificial Sequence
  Synthetic oligonucleotide
agcaatctgccgccatggatgtatcgggat

SEQ ID NO: 387453 - DNA, 30 bp, Artificial Sequence
  Synthetic oligonucleotide
tcgcaacagcccgtgttgaggcctcgggat

SEQ ID NO: 387454 - DNA, 30 bp, Artificial Sequence
  Synthetic oligonucleotide
ttggtcccaggagtaccccgcataggggat

SEQ ID NO: 387455 - DNA, 30 bp, Artificial Sequence
  Synthetic oligonucleotide
cgtaataacaacgttacggtccacggggat

SEQ ID NO: 387456 - DNA, 30 bp, Artificial Sequence
  Synthetic oligonucleotide
ttttgcagcaggggatattccccgggggat

SEQ ID NO: 387457 - DNA, 30 bp, Artificial Sequence
  Synthetic oligonucleotide
tagaagccgcaaagcgcatccaatggggat

SEQ ID NO: 387458 - DNA, 30 bp, Artificial Sequence
  Synthetic oligonucleotide
ttgttcgtgggccagttggcgtatggggat

SEQ ID NO: 387459 - DNA, 30 bp, Artificial Sequence
  Synthetic oligonucleotide
gtatcaatagaaggtaagaatgttggggat

SEQ ID NO: 387460 - DNA, 30 bp, Artificial Sequence
  Synthetic oligonucleotide
gccgcactaaccgggtacgtccagtgggat

SEQ ID NO: 387461 - DNA, 30 bp, Artificial Sequence
  Synthetic oligonucleotide
gtgacttgagtcatggattgacggtgggat

SEQ ID NO: 387462 - DNA, 30 bp, Artificial Sequence
  Synthetic oligonucleotide
ggtcataacagttagcttcgtgggtgggat

SEQ ID NO: 387463 - DNA, 30 bp, Artificial Sequence
  Synthetic oligonucleotide
agtacacctgtcggaatcatctgttgggat

SEQ ID NO: 387464 - DNA, 30 bp, Artificial Sequence
  Synthetic oligonucleotide
cagcgtggttttctcccagatatttgggat

SEQ ID NO: 387465 - DNA, 30 bp, Artificial Sequence
  Synthetic oligonucleotide
aagccgtcagtggtccagtcttcaatggat

SEQ ID NO: 387466 - DNA, 30 bp, Artificial Sequence
  Synthetic oligonucleotide
tcacatgagcgggccactgccgtcatggat

SEQ ID NO: 387467 - DNA, 30 bp, Artificial Sequence
  Synthetic oligonucleotide
ttccagcacaattcttcggcatcgatggat

SEQ ID NO: 387468 - DNA, 30 bp, Artificial Sequence
  Synthetic oligonucleotide
ttaatcagtcaaatgcaacctcggatggat

SEQ ID NO: 387469 - DNA, 30 bp, Artificial Sequence
  Synthetic oligonucleotide
tatttaaggcctgagcgattaagtatggat

SEQ ID NO: 387470 - DNA, 30 bp, Artificial Sequence
  Synthetic oligonucleotide
gcgacattactcaggtattgtcttatggat

SEQ ID NO: 387471 - DNA, 30 bp, Artificial Sequence
  Synthetic oligonucleotide
taccaccagggcgctgttggggacctggat

SEQ ID NO: 387472 - DNA, 30 bp, Artificial Sequence
  Synthetic oligonucleotide
ttggacacctattagtttaagcatctggat

SEQ ID NO: 387473 - DNA, 31 bp, Artificial Sequence
  Synthetic oligonucleotide
cataggtataaaaatgcaaactcctctggat

SEQ ID NO: 387474 - DNA, 30 bp, Artificial Sequence
  Synthetic oligonucleotide
ccagctcgcactgcacatcgcgcagtggat

SEQ ID NO: 387475 - DNA, 30 bp, Artificial Sequence
  Synthetic oligonucleotide
cagtattgtgggggtcgcgttgcagtggat

SEQ ID NO: 387476 - DNA, 30 bp, Artificial Sequence
  Synthetic oligonucleotide
gctttacttaagactttgggttgagtggat

SEQ ID NO: 387477 - DNA, 30 bp, Artificial Sequence
  Synthetic oligonucleotide
agtcgagatgtagtattagttatagtggat

SEQ ID NO: 387478 - DNA, 30 bp, Artificial Sequence
  Synthetic oligonucleotide
tttatttgtaccatcgatatccgcgtggat

SEQ ID NO: 387479 - DNA, 30 bp, Artificial Sequence
  Synthetic oligonucleotide
agacaagggaatttaataaatacggtggat

SEQ ID NO: 387480 - DNA, 30 bp, Artificial Sequence
  Synthetic oligonucleotide
gatccgtccgctttatagtttggtgtggat

SEQ ID NO: 387481 - DNA, 30 bp, Artificial Sequence
  Synthetic oligonucleotide
ggcaatcacaccgccaatcaagttgtggat

SEQ ID NO: 387482 - DNA, 30 bp, Artificial Sequence
  Synthetic oligonucleotide
ctaaccagagatatcaactacgttgtggat

SEQ ID NO: 387483 - DNA, 30 bp, Artificial Sequence
  Synthetic oligonucleotide
taaaaggggtcatcaaggttagcattggat

SEQ ID NO: 387484 - DNA, 30 bp, Artificial Sequence
  Synthetic oligonucleotide
ccgcacaatatacattactaggtattggat

SEQ ID NO: 387485 - DNA, 30 bp, Artificial Sequence
  Synthetic oligonucleotide
ataattctctaagtcggagtgaagttggat

SEQ ID NO: 387486 - DNA, 30 bp, Artificial Sequence
  Synthetic oligonucleotide
ccgatccggatccacccaggctagttggat

SEQ ID NO: 387487 - DNA, 30 bp, Artificial Sequence
  Synthetic oligonucleotide
cacttgcgcacaaactacacgccgttggat

SEQ ID NO: 387488 - DNA, 30 bp, Artificial Sequence
  Synthetic oligonucleotide
ttcattgaaggacccggccgagcgttggat

SEQ ID NO: 387489 - DNA, 30 bp, Artificial Sequence
  Synthetic oligonucleotide
gaaacgggttagatcttaaaacctttggat

SEQ ID NO: 387490 - DNA, 30 bp, Artificial Sequence
  Synthetic oligonucleotide
ttaaacaccccccctagatgagctttggat

SEQ ID NO: 387491 - DNA, 30 bp, Artificial Sequence
  Synthetic oligonucleotide
cctgagtgcgccctatgacgctctttggat

SEQ ID NO: 387492 - DNA, 30 bp, Artificial Sequence
  Synthetic oligonucleotide
ctaaattagtggcccttcaggattttggat

SEQ ID NO: 387493 - DNA, 30 bp, Artificial Sequence
  Synthetic oligonucleotide
gtcgccggcctgcaagtaatcgttttggat

SEQ ID NO: 387494 - DNA, 30 bp, Artificial Sequence
  Synthetic oligonucleotide
gggaagaaattgaagtctagtacaaatgat

SEQ ID NO: 387495 - DNA, 30 bp, Artificial Sequence
  Synthetic oligonucleotide
gcaccaacccgattatgcttaccaaatgat

SEQ ID NO: 387496 - DNA, 30 bp, Artificial Sequence
  Synthetic oligonucleotide
caataaggtcgcaggggtatacacaatgat

SEQ ID NO: 387497 - DNA, 30 bp, Artificial Sequence
  Synthetic oligonucleotide
ctaagtctctgtgcgttcgtaaagaatgat

SEQ ID NO: 387498 - DNA, 30 bp, Artificial Sequence
  Synthetic oligonucleotide
catattctttttgtattcggcccgaatgat

SEQ ID NO: 387499 - DNA, 30 bp, Artificial Sequence
  Synthetic oligonucleotide
ttgtcagtttcaccagtcttagataatgat

SEQ ID NO: 387500 - DNA, 30 bp, Artificial Sequence
  Synthetic oligonucleotide
aattcataaagacttcgcgatcctaatgat

SEQ ID NO: 387501 - DNA, 30 bp, Artificial Sequence
  Synthetic oligonucleotide
catgcatgagtttcaataattagtaatgat

SEQ ID NO: 387502 - DNA, 30 bp, Artificial Sequence
  Synthetic oligonucleotide
tacgaaagtatgctgttaagttaacatgat

SEQ ID NO: 387503 - DNA, 30 bp, Artificial Sequence
  Synthetic oligonucleotide
aactctcgtgttgcgtgtgtgggacatgat

SEQ ID NO: 387504 - DNA, 30 bp, Artificial Sequence
  Synthetic oligonucleotide
ccctctcgtgagcctgccttgcgccatgat

SEQ ID NO: 387505 - DNA, 30 bp, Artificial Sequence
  Synthetic oligonucleotide
ctagtggctttggaggactaatcgcatgat

SEQ ID NO: 387506 - DNA, 29 bp, Artificial Sequence
  Synthetic oligonucleotide
tatccagacaacttacatgaactcatgat

SEQ ID NO: 387507 - DNA, 30 bp, Artificial Sequence
  Synthetic oligonucleotide
aaatactcttgaattcgattaactcatgat

SEQ ID NO: 387508 - DNA, 30 bp, Artificial Sequence
  Synthetic oligonucleotide
actagcgtccatcggtcggattcagatgat

SEQ ID NO: 387509 - DNA, 30 bp, Artificial Sequence
  Synthetic oligonucleotide
aagccgcgcaatgtccctacttaggatgat

SEQ ID NO: 387510 - DNA, 30 bp, Artificial Sequence
  Synthetic oligonucleotide
cttccgcccgtcggcaactgtatggatgat

SEQ ID NO: 387511 - DNA, 37 bp, Artificial Sequence
  Synthetic oligonucleotide
ccttttatacgtcgctccttgacgatgaggtgatgat

SEQ ID NO: 387512 - DNA, 30 bp, Artificial Sequence
  Synthetic oligonucleotide
gtatattgtaattcagtcgaggttgatgat

SEQ ID NO: 387513 - DNA, 30 bp, Artificial Sequence
  Synthetic oligonucleotide
ggattccatttcacggtcttaacatatgat

SEQ ID NO: 387514 - DNA, 30 bp, Artificial Sequence
  Synthetic oligonucleotide
gtatgtccgcatgggggtttatactatgat

SEQ ID NO: 387515 - DNA, 30 bp, Artificial Sequence
  Synthetic oligonucleotide
atggcgttgtttctaatgattccctatgat

SEQ ID NO: 387516 - DNA, 30 bp, Artificial Sequence
  Synthetic oligonucleotide
attgggtgcgccacccgcgaggagtatgat

SEQ ID NO: 387517 - DNA, 30 bp, Artificial Sequence
  Synthetic oligonucleotide
ccataccctaggacgacttagatgtatgat

SEQ ID NO: 387518 - DNA, 30 bp, Artificial Sequence
  Synthetic oligonucleotide
cataaatgtatgtggctacagttgtatgat

SEQ ID NO: 387519 - DNA, 30 bp, Artificial Sequence
  Synthetic oligonucleotide
tctatcaccgtagttaacgacccttatgat

SEQ ID NO: 387520 - DNA, 30 bp, Artificial Sequence
  Synthetic oligonucleotide
gccggagaagaactatcatatagttatgat

SEQ ID NO: 387521 - DNA, 30 bp, Artificial Sequence
  Synthetic oligonucleotide
tgagcgttaggttgtagggtcgaaactgat

SEQ ID NO: 387522 - DNA, 30 bp, Artificial Sequence
  Synthetic oligonucleotide
acattgcccgtaattctcagttcaactgat

SEQ ID NO: 387523 - DNA, 30 bp, Artificial Sequence
  Synthetic oligonucleotide
acaagcggcgagggatcaatgggaactgat

SEQ ID NO: 387524 - DNA, 30 bp, Artificial Sequence
  Synthetic oligonucleotide
tggggtgctggtaggtgcggaataactgat

SEQ ID NO: 387525 - DNA, 30 bp, Artificial Sequence
  Synthetic oligonucleotide
agaattaattatgctggatggtagactgat

SEQ ID NO: 387526 - DNA, 30 bp, Artificial Sequence
  Synthetic oligonucleotide
tcgtctcctgacgctgcaaagtcgactgat

SEQ ID NO: 387527 - DNA, 30 bp, Artificial Sequence
  Synthetic oligonucleotide
ccgcccatatttatacggacggtgactgat

SEQ ID NO: 387528 - DNA, 30 bp, Artificial Sequence
  Synthetic oligonucleotide
tcagtgtccatctatgaatcagcacctgat

SEQ ID NO: 387529 - DNA, 30 bp, Artificial Sequence
  Synthetic oligonucleotide
ataggttgagataatgactgatcacctgat

SEQ ID NO: 387530 - DNA, 30 bp, Artificial Sequence
  Synthetic oligonucleotide
aactttatccgaccgaaatactcacctgat

SEQ ID NO: 387531 - DNA, 30 bp, Artificial Sequence
  Synthetic oligonucleotide
gcgctgaacgaggccgacaggatacctgat

SEQ ID NO: 387532 - DNA, 30 bp, Artificial Sequence
  Synthetic oligonucleotide
cgttcgcatagcagcatgagtctccctgat

SEQ ID NO: 387533 - DNA, 30 bp, Artificial Sequence
  Synthetic oligonucleotide
cgtcttaccgtgtactatccatgtcctgat

SEQ ID NO: 387534 - DNA, 30 bp, Artificial Sequence
  Synthetic oligonucleotide
aggtctagcttaccgcgcttccttcctgat

SEQ ID NO: 387535 - DNA, 30 bp, Artificial Sequence
  Synthetic oligonucleotide
tctccgtcccatgatgcttctcaagctgat

SEQ ID NO: 387536 - DNA, 30 bp, Artificial Sequence
  Synthetic oligonucleotide
gaacaaggtttaagcatgtgttcagctgat

SEQ ID NO: 387537 - DNA, 30 bp, Artificial Sequence
  Synthetic oligonucleotide
cgattgcagctacagttagaacgagctgat

SEQ ID NO: 387538 - DNA, 30 bp, Artificial Sequence
  Synthetic oligonucleotide
catttccagtggagtcgacggggagctgat

SEQ ID NO: 387539 - DNA, 30 bp, Artificial Sequence
  Synthetic oligonucleotide
attaaacagaggtcagcccggctagctgat

SEQ ID NO: 387540 - DNA, 30 bp, Artificial Sequence
  Synthetic oligonucleotide
atacaatcaaagccggtattccgcgctgat

SEQ ID NO: 387541 - DNA, 30 bp, Artificial Sequence
  Synthetic oligonucleotide
tttgggacgtgcgccaatactctcgctgat

SEQ ID NO: 387542 - DNA, 30 bp, Artificial Sequence
  Synthetic oligonucleotide
tggatttgaggggcttgagcttgggctgat

SEQ ID NO: 387543 - DNA, 30 bp, Artificial Sequence
  Synthetic oligonucleotide
ttggaattgccgaccgccaactaatctgat

SEQ ID NO: 387544 - DNA, 30 bp, Artificial Sequence
  Synthetic oligonucleotide
gttgtgttttgaataagatgacgatctgat

SEQ ID NO: 387545 - DNA, 30 bp, Artificial Sequence
  Synthetic oligonucleotide
gggtcacaggtaaggcagagtttatctgat

SEQ ID NO: 387546 - DNA, 30 bp, Artificial Sequence
  Synthetic oligonucleotide
gagtcacctcccattacaaagacctctgat

SEQ ID NO: 387547 - DNA, 30 bp, Artificial Sequence
  Synthetic oligonucleotide
tagatagggaggtcgccgcatatctctgat

SEQ ID NO: 387548 - DNA, 30 bp, Artificial Sequence
  Synthetic oligonucleotide
aaagccgtatttattgctttagtctctgat

SEQ ID NO: 387549 - DNA, 30 bp, Artificial Sequence
  Synthetic oligonucleotide
tccatattgcatgcttactcatattctgat

SEQ ID NO: 387550 - DNA, 30 bp, Artificial Sequence
  Synthetic oligonucleotide
gtgaggagcatggccgtcgcggcttctgat

SEQ ID NO: 387551 - DNA, 30 bp, Artificial Sequence
  Synthetic oligonucleotide
tcatttcgtatagtggagcctctttctgat

SEQ ID NO: 387552 - DNA, 30 bp, Artificial Sequence
  Synthetic oligonucleotide
tactaaggaatgcacgcggaaacaagtgat

SEQ ID NO: 387553 - DNA, 30 bp, Artificial Sequence
  Synthetic oligonucleotide
agacacgccacgaaccggttggtaagtgat

SEQ ID NO: 387554 - DNA, 30 bp, Artificial Sequence
  Synthetic oligonucleotide
cgacattctatgatctctcaacacagtgat

SEQ ID NO: 387555 - DNA, 30 bp, Artificial Sequence
  Synthetic oligonucleotide
ggatccgtgtacaagtggactcccagtgat

SEQ ID NO: 387556 - DNA, 30 bp, Artificial Sequence
  Synthetic oligonucleotide
cgtatataacgaggcgcagcgcggagtgat

SEQ ID NO: 387557 - DNA, 30 bp, Artificial Sequence
  Synthetic oligonucleotide
tcggagcgcagcttggttgtctatagtgat

SEQ ID NO: 387558 - DNA, 30 bp, Artificial Sequence
  Synthetic oligonucleotide
atcggaaggtcgcagggttgtactagtgat

SEQ ID NO: 387559 - DNA, 30 bp, Artificial Sequence
  Synthetic oligonucleotide
gtaaatctgtatattgtttgggaacgtgat

SEQ ID NO: 387560 - DNA, 30 bp, Artificial Sequence
  Synthetic oligonucleotide
ggtaatactgggcacttgcaaacacgtgat

SEQ ID NO: 387561 - DNA, 30 bp, Artificial Sequence
  Synthetic oligonucleotide
tgccgtgtacggcatccgaaaccacgtgat

SEQ ID NO: 387562 - DNA, 30 bp, Artificial Sequence
  Synthetic oligonucleotide
agagctccgatggtccctagcgcacgtgat

SEQ ID NO: 387563 - DNA, 30 bp, Artificial Sequence
  Synthetic oligonucleotide
gatggagctatcaagccaaatccccgtgat

SEQ ID NO: 387564 - DNA, 30 bp, Artificial Sequence
  Synthetic oligonucleotide
gacaattgacggcggtcctctgcccgtgat

SEQ ID NO: 387565 - DNA, 30 bp, Artificial Sequence
  Synthetic oligonucleotide
gatgttggtataaaaaactcgtcccgtgat

SEQ ID NO: 387566 - DNA, 30 bp, Artificial Sequence
  Synthetic oligonucleotide
caaggtccttttgggggaaagatccgtgat

SEQ ID NO: 387567 - DNA, 30 bp, Artificial Sequence
  Synthetic oligonucleotide
tttaccaatagtgaattgttggagcgtgat

SEQ ID NO: 387568 - DNA, 30 bp, Artificial Sequence
  Synthetic oligonucleotide
tttctgtataagtctaacacgtggcgtgat

SEQ ID NO: 387569 - DNA, 30 bp, Artificial Sequence
  Synthetic oligonucleotide
gacgagtaatattactgcaagatgcgtgat

SEQ ID NO: 387570 - DNA, 30 bp, Artificial Sequence
  Synthetic oligonucleotide
gtttaaaggggaagattacatagtcgtgat

SEQ ID NO: 387571 - DNA, 30 bp, Artificial Sequence
  Synthetic oligonucleotide
tatacatgaacgatgtcagatacaggtgat

SEQ ID NO: 387572 - DNA, 30 bp, Artificial Sequence
  Synthetic oligonucleotide
cgctgctgtgcacagaattacgacggtgat

SEQ ID NO: 387573 - DNA, 30 bp, Artificial Sequence
  Synthetic oligonucleotide
agcaatacctgaataaaggtcacctgtgat

SEQ ID NO: 387574 - DNA, 30 bp, Artificial Sequence
  Synthetic oligonucleotide
aaagaacactgcgcaatctggttctgtgat

SEQ ID NO: 387575 - DNA, 30 bp, Artificial Sequence
  Synthetic oligonucleotide
tctttagtatagatcactcagaggtgtgat

SEQ ID NO: 387576 - DNA, 30 bp, Artificial Sequence
  Synthetic oligonucleotide
gctccataagctacactgaacagttgtgat

SEQ ID NO: 387577 - DNA, 30 bp, Artificial Sequence
  Synthetic oligonucleotide
acgcgggtaatcacgtagtgtggttgtgat

SEQ ID NO: 387578 - DNA, 30 bp, Artificial Sequence
  Synthetic oligonucleotide
ctggagcgaaatccgattctcttttgtgat

SEQ ID NO: 387579 - DNA, 30 bp, Artificial Sequence
  Synthetic oligonucleotide
gccaataaccgtttcatcgaagtaattgat

SEQ ID NO: 387580 - DNA, 30 bp, Artificial Sequence
  Synthetic oligonucleotide
cccctccagggacgaggatgagtaattgat

SEQ ID NO: 387581 - DNA, 30 bp, Artificial Sequence
  Synthetic oligonucleotide
atcaccggcacggtcaatctgaccattgat

SEQ ID NO: 387582 - DNA, 30 bp, Artificial Sequence
  Synthetic oligonucleotide
gtagtgggagggagggggtctgccattgat

SEQ ID NO: 387583 - DNA, 30 bp, Artificial Sequence
  Synthetic oligonucleotide
tagtctggagtaagtgaaccatccattgat

SEQ ID NO: 387584 - DNA, 30 bp, Artificial Sequence
  Synthetic oligonucleotide
gggaagggaatttggaaaaggagcattgat

SEQ ID NO: 387585 - DNA, 30 bp, Artificial Sequence
  Synthetic oligonucleotide
ggggtaccgtgtcgccaatcactcattgat

SEQ ID NO: 387586 - DNA, 30 bp, Artificial Sequence
  Synthetic oligonucleotide
gacttctccacggagacttggattattgat

SEQ ID NO: 387587 - DNA, 30 bp, Artificial Sequence
  Synthetic oligonucleotide
attgccttctgatccccacctggccttgat

SEQ ID NO: 387588 - DNA, 30 bp, Artificial Sequence
  Synthetic oligonucleotide
tgatacgggatgtttcggacttgccttgat

SEQ ID NO: 387589 - DNA, 30 bp, Artificial Sequence
  Synthetic oligonucleotide
tagtacatatgcaacgggttaatccttgat

SEQ ID NO: 387590 - DNA, 30 bp, Artificial Sequence
  Synthetic oligonucleotide
gggaggattagagcgcttttgctgcttgat

SEQ ID NO: 387591 - DNA, 30 bp, Artificial Sequence
  Synthetic oligonucleotide
tcccattaggatggtcgggtaggtcttgat

SEQ ID NO: 387592 - DNA, 30 bp, Artificial Sequence
  Synthetic oligonucleotide
tttacggtagaaggacaagcttgtcttgat

SEQ ID NO: 387593 - DNA, 30 bp, Artificial Sequence
  Synthetic oligonucleotide
cccaccggactattgctggtccaagttgat

SEQ ID NO: 387594 - DNA, 30 bp, Artificial Sequence
  Synthetic oligonucleotide
tgaagcatgtcttcggggtctggagttgat

SEQ ID NO: 387595 - DNA, 30 bp, Artificial Sequence
  Synthetic oligonucleotide
gcattgaattcccatcagtggatagttgat

SEQ ID NO: 387596 - DNA, 30 bp, Artificial Sequence
  Synthetic oligonucleotide
ctgggttgtagcgcgcttacgctcgttgat

SEQ ID NO: 387597 - DNA, 30 bp, Artificial Sequence
  Synthetic oligonucleotide
ccatcgctctgacaggcgtaacctgttgat

SEQ ID NO: 387598 - DNA, 30 bp, Artificial Sequence
  Synthetic oligonucleotide
ggtaggaaggttgtttgtgcaacatttgat

SEQ ID NO: 387599 - DNA, 30 bp, Artificial Sequence
  Synthetic oligonucleotide
tcttatccagcctcggtggcagactttgat

SEQ ID NO: 387600 - DNA, 30 bp, Artificial Sequence
  Synthetic oligonucleotide
aacggagtcattatgcgaacttgctttgat

SEQ ID NO: 387601 - DNA, 30 bp, Artificial Sequence
  Synthetic oligonucleotide
tgcccggtaacgcactttagaaagtttgat

SEQ ID NO: 387602 - DNA, 30 bp, Artificial Sequence
  Synthetic oligonucleotide
gcagtgatatggtgctctagggtttttgat

SEQ ID NO: 387603 - DNA, 30 bp, Artificial Sequence
  Synthetic oligonucleotide
tatggtaccccgctcggggcccaaaaatat

SEQ ID NO: 387604 - DNA, 30 bp, Artificial Sequence
  Synthetic oligonucleotide
ggggccagaaagacgatgtgcgcaaaatat

SEQ ID NO: 387605 - DNA, 30 bp, Artificial Sequence
  Synthetic oligonucleotide
aaaggtcgcaggaagagcatccgcaaatat

SEQ ID NO: 387606 - DNA, 30 bp, Artificial Sequence
  Synthetic oligonucleotide
taagcgcgatttctaatccataagaaatat

SEQ ID NO: 387607 - DNA, 30 bp, Artificial Sequence
  Synthetic oligonucleotide
ggggaaatgtctactttctatgagaaatat

SEQ ID NO: 387608 - DNA, 30 bp, Artificial Sequence
  Synthetic oligonucleotide
gccgtactacttcgtgacttaaggaaatat

SEQ ID NO: 387609 - DNA, 30 bp, Artificial Sequence
  Synthetic oligonucleotide
gggaacagcacttatcagcgcttgaaatat

SEQ ID NO: 387610 - DNA, 30 bp, Artificial Sequence
  Synthetic oligonucleotide
acggtatttagacagataggtaataaatat

SEQ ID NO: 387611 - DNA, 30 bp, Artificial Sequence
  Synthetic oligonucleotide
tgcggtgtggatcatcacttgattaaatat

SEQ ID NO: 387612 - DNA, 30 bp, Artificial Sequence
  Synthetic oligonucleotide
gggaagtgggagtagtaagtttttaaatat

SEQ ID NO: 387613 - DNA, 30 bp, Artificial Sequence
  Synthetic oligonucleotide
ggcagattgtcgtgcaattaagcccaatat

SEQ ID NO: 387614 - DNA, 30 bp, Artificial Sequence
  Synthetic oligonucleotide
gacgtgtcgcctggacggaaagtccaatat

SEQ ID NO: 387615 - DNA, 30 bp, Artificial Sequence
  Synthetic oligonucleotide
ccgtaatactgccatggatgaaagcaatat

SEQ ID NO: 387616 - DNA, 30 bp, Artificial Sequence
  Synthetic oligonucleotide
ggtgtcagatgaccaatgtatcagcaatat

SEQ ID NO: 387617 - DNA, 30 bp, Artificial Sequence
  Synthetic oligonucleotide
gcaggcaatggatggacttgttcgcaatat

SEQ ID NO: 387618 - DNA, 30 bp, Artificial Sequence
  Synthetic oligonucleotide
attttgtgaaagtttcgttttcttcaatat

SEQ ID NO: 387619 - DNA, 30 bp, Artificial Sequence
  Synthetic oligonucleotide
tgcacctgctaccgtttatgccaagaatat

SEQ ID NO: 387620 - DNA, 30 bp, Artificial Sequence
  Synthetic oligonucleotide
tagggagagtaaagttctgatacagaatat

SEQ ID NO: 387621 - DNA, 30 bp, Artificial Sequence
  Synthetic oligonucleotide
gcctgtacagtcaatagctgcagagaatat

SEQ ID NO: 387622 - DNA, 30 bp, Artificial Sequence
  Synthetic oligonucleotide
tggaagttacattgttagcttttagaatat

SEQ ID NO: 387623 - DNA, 30 bp, Artificial Sequence
  Synthetic oligonucleotide
atacatattgtttgtggcggtagcgaatat

SEQ ID NO: 387624 - DNA, 30 bp, Artificial Sequence
  Synthetic oligonucleotide
agtagcaatgagacgtaatgacatgaatat

SEQ ID NO: 387625 - DNA, 30 bp, Artificial Sequence
  Synthetic oligonucleotide
gtctcacaactacatcatcctgatgaatat

SEQ ID NO: 387626 - DNA, 30 bp, Artificial Sequence
  Synthetic oligonucleotide
gatgattggtcagttaacgctgatgaatat

SEQ ID NO: 387627 - DNA, 30 bp, Artificial Sequence
  Synthetic oligonucleotide
tgtccggggtacagttgacgacgataatat

SEQ ID NO: 387628 - DNA, 30 bp, Artificial Sequence
  Synthetic oligonucleotide
agcgattttgtattgctctattgataatat

SEQ ID NO: 387629 - DNA, 30 bp, Artificial Sequence
  Synthetic oligonucleotide
cctccgcaattccaattagacgtataatat

SEQ ID NO: 387630 - DNA, 30 bp, Artificial Sequence
  Synthetic oligonucleotide
tattaaagggttcacagttacacctaatat

SEQ ID NO: 387631 - DNA, 30 bp, Artificial Sequence
  Synthetic oligonucleotide
tagccgcctgcaaaggcatatgcctaatat

SEQ ID NO: 387632 - DNA, 30 bp, Artificial Sequence
  Synthetic oligonucleotide
ctactgcactcatgattgagtcagtaatat

SEQ ID NO: 387633 - DNA, 30 bp, Artificial Sequence
  Synthetic oligonucleotide
tatctgtgttcctcaaaccctacgtaatat

SEQ ID NO: 387634 - DNA, 30 bp, Artificial Sequence
  Synthetic oligonucleotide
aaccggaatgagatttgaagcccgtaatat

SEQ ID NO: 387635 - DNA, 30 bp, Artificial Sequence
  Synthetic oligonucleotide
cattctccatctggaataattaggtaatat

SEQ ID NO: 387636 - DNA, 30 bp, Artificial Sequence
  Synthetic oligonucleotide
gctcgtcccaacataatggttgggtaatat

SEQ ID NO: 387637 - DNA, 30 bp, Artificial Sequence
  Synthetic oligonucleotide
aggtgtggagcttacactctatattaatat

SEQ ID NO: 387638 - DNA, 30 bp, Artificial Sequence
  Synthetic oligonucleotide
gagtggtgaacatcttataaagcaacatat

SEQ ID NO: 387639 - DNA, 30 bp, Artificial Sequence
  Synthetic oligonucleotide
tctattcccgatatacttgcgataacatat

SEQ ID NO: 387640 - DNA, 30 bp, Artificial Sequence
  Synthetic oligonucleotide
gtcaaccaaaaacacagcccaggcacatat

SEQ ID NO: 387641 - DNA, 30 bp, Artificial Sequence
  Synthetic oligonucleotide
agcgattttgcgacctatgttctcacatat

SEQ ID NO: 387642 - DNA, 30 bp, Artificial Sequence
  Synthetic oligonucleotide
ttagtgagacttgagtcgtacatgacatat

SEQ ID NO: 387643 - DNA, 30 bp, Artificial Sequence
  Synthetic oligonucleotide
tccacgtaccccaaacttggggctacatat

SEQ ID NO: 387644 - DNA, 29 bp, Artificial Sequence
  Synthetic oligonucleotide
accggatacggttagaagtccgtacatat

SEQ ID NO: 387645 - DNA, 30 bp, Artificial Sequence
  Synthetic oligonucleotide
gtcttaatcgagtctattataaaaccatat

SEQ ID NO: 387646 - DNA, 30 bp, Artificial Sequence
  Synthetic oligonucleotide
gaaatcggctagctaggagatgaaccatat

SEQ ID NO: 387647 - DNA, 30 bp, Artificial Sequence
  Synthetic oligonucleotide
aaagtggatgtattagccacgaacccatat

SEQ ID NO: 387648 - DNA, 30 bp, Artificial Sequence
  Synthetic oligonucleotide
ggggggcggacatgacccccaaagccatat

SEQ ID NO: 387649 - DNA, 30 bp, Artificial Sequence
  Synthetic oligonucleotide
cgtgttatgacgatctgtgacgagccatat

SEQ ID NO: 387650 - DNA, 30 bp, Artificial Sequence
  Synthetic oligonucleotide
tatccgatctctgactattgtaggccatat

SEQ ID NO: 387651 - DNA, 30 bp, Artificial Sequence
  Synthetic oligonucleotide
agagtagctgctgccatgtagcgagcatat

SEQ ID NO: 387652 - DNA, 30 bp, Artificial Sequence
  Synthetic oligonucleotide
aattagactcggaccgtgtggcacgcatat

SEQ ID NO: 387653 - DNA, 30 bp, Artificial Sequence
  Synthetic oligonucleotide
taatcaatttgcaacattagagacgcatat

SEQ ID NO: 387654 - DNA, 30 bp, Artificial Sequence
  Synthetic oligonucleotide
gcgcttgcagagagaaagtctcaggcatat

SEQ ID NO: 387655 - DNA, 30 bp, Artificial Sequence
  Synthetic oligonucleotide
gatgggcagttccgtgttttataggcatat

SEQ ID NO: 387656 - DNA, 30 bp, Artificial Sequence
  Synthetic oligonucleotide
ttcacttgcgttgacatccgcacggcatat

SEQ ID NO: 387657 - DNA, 30 bp, Artificial Sequence
  Synthetic oligonucleotide
tttgtgctttaacatgacctcccatcatat

SEQ ID NO: 387658 - DNA, 30 bp, Artificial Sequence
  Synthetic oligonucleotide
gggggatttcctcttttgcctctatcatat

SEQ ID NO: 387659 - DNA, 30 bp, Artificial Sequence
  Synthetic oligonucleotide
cggcgcgggtaattttcatgtcactcatat

SEQ ID NO: 387660 - DNA, 30 bp, Artificial Sequence
  Synthetic oligonucleotide
gtcatattaatcgtattgtatagctcatat

SEQ ID NO: 387661 - DNA, 30 bp, Artificial Sequence
  Synthetic oligonucleotide
gggcacaattcgtaaggattgtgctcatat

SEQ ID NO: 387662 - DNA, 30 bp, Artificial Sequence
  Synthetic oligonucleotide
tcgttcttattagttttcgctgattcatat

SEQ ID NO: 387663 - DNA, 30 bp, Artificial Sequence
  Synthetic oligonucleotide
caattcggtacgcttcctcaacgttcatat

SEQ ID NO: 387664 - DNA, 30 bp, Artificial Sequence
  Synthetic oligonucleotide
taggctgagttgcaatggggctaaagatat

SEQ ID NO: 387665 - DNA, 30 bp, Artificial Sequence
  Synthetic oligonucleotide
gaatactggcacactgacaaaccaagatat

SEQ ID NO: 387666 - DNA, 30 bp, Artificial Sequence
  Synthetic oligonucleotide
catgacattgccatcatcggtcgaagatat

SEQ ID NO: 387667 - DNA, 30 bp, Artificial Sequence
  Synthetic oligonucleotide
gacatagagcccgccaggtttggaagatat

SEQ ID NO: 387668 - DNA, 30 bp, Artificial Sequence
  Synthetic oligonucleotide
gcctatgaataagcagaaatttgaagatat

SEQ ID NO: 387669 - DNA, 30 bp, Artificial Sequence
  Synthetic oligonucleotide
ttactatcgatcggtcggtaaagcagatat

SEQ ID NO: 387670 - DNA, 30 bp, Artificial Sequence
  Synthetic oligonucleotide
cctaatccgtgtgatcgggatagcagatat

SEQ ID NO: 387671 - DNA, 30 bp, Artificial Sequence
  Synthetic oligonucleotide
tcatctataaggcttacgacacggagatat

SEQ ID NO: 387672 - DNA, 30 bp, Artificial Sequence
  Synthetic oligonucleotide
ccgaggtacgccccatttgaggggagatat

SEQ ID NO: 387673 - DNA, 30 bp, Artificial Sequence
  Synthetic oligonucleotide
ggtaggaagtctcagttcctacgtagatat

SEQ ID NO: 387674 - DNA, 30 bp, Artificial Sequence
  Synthetic oligonucleotide
ccttgttctgacgatgctccgcttagatat

SEQ ID NO: 387675 - DNA, 30 bp, Artificial Sequence
  Synthetic oligonucleotide
tatatgtgcaggcgggaaggactacgatat

SEQ ID NO: 387676 - DNA, 30 bp, Artificial Sequence
  Synthetic oligonucleotide
agtcttaggcctacccggccgggccgatat

SEQ ID NO: 387677 - DNA, 27 bp, Artificial Sequence
  Synthetic oligonucleotide
atgaatcaaagctcgtataagcgatat

SEQ ID NO: 387678 - DNA, 30 bp, Artificial Sequence
  Synthetic oligonucleotide
tcatgttgcaacagtatgttgatgcgatat

SEQ ID NO: 387679 - DNA, 30 bp, Artificial Sequence
  Synthetic oligonucleotide
gttggtagggatctattatgaagtcgatat

SEQ ID NO: 387680 - DNA, 30 bp, Artificial Sequence
  Synthetic oligonucleotide
cgttagcattatatctgtgttagtcgatat

SEQ ID NO: 387681 - DNA, 30 bp, Artificial Sequence
  Synthetic oligonucleotide
agataattgtatattcctggtctaggatat

SEQ ID NO: 387682 - DNA, 30 bp, Artificial Sequence
  Synthetic oligonucleotide
tacggagaatcaataattgttttcggatat

SEQ ID NO: 387683 - DNA, 30 bp, Artificial Sequence
  Synthetic oligonucleotide
acgacccggctttgagtaccaacgggatat

SEQ ID NO: 387684 - DNA, 30 bp, Artificial Sequence
  Synthetic oligonucleotide
gtctaaacaattcggaagtccaatggatat

SEQ ID NO: 387685 - DNA, 30 bp, Artificial Sequence
  Synthetic oligonucleotide
caataagtaaattaggtcctctatggatat

SEQ ID NO: 387686 - DNA, 30 bp, Artificial Sequence
  Synthetic oligonucleotide
gtataattcggctggggacagtctggatat

SEQ ID NO: 387687 - DNA, 30 bp, Artificial Sequence
  Synthetic oligonucleotide
acaactctggatggccgggtaagtggatat

SEQ ID NO: 387688 - DNA, 30 bp, Artificial Sequence
  Synthetic oligonucleotide
ggtgggagcaatatttctctatgtggatat

SEQ ID NO: 387689 - DNA, 30 bp, Artificial Sequence
  Synthetic oligonucleotide
ccacttattttggtccatattattggatat

SEQ ID NO: 387690 - DNA, 30 bp, Artificial Sequence
  Synthetic oligonucleotide
cgatcgctttagccagaccccaaatgatat

SEQ ID NO: 387691 - DNA, 30 bp, Artificial Sequence
  Synthetic oligonucleotide
ttgcttcgcgtccaccaagaggaatgatat

SEQ ID NO: 387692 - DNA, 30 bp, Artificial Sequence
  Synthetic oligonucleotide
ctccccctattcatcttataggactgatat

SEQ ID NO: 387693 - DNA, 30 bp, Artificial Sequence
  Synthetic oligonucleotide
ttttaattaatgccggctagttactgatat

SEQ ID NO: 387694 - DNA, 30 bp, Artificial Sequence
  Synthetic oligonucleotide
atcgctccgcgtcatggatccacctgatat

SEQ ID NO: 387695 - DNA, 30 bp, Artificial Sequence
  Synthetic oligonucleotide
atcctttcaggtgagaagatggcctgatat

SEQ ID NO: 387696 - DNA, 30 bp, Artificial Sequence
  Synthetic oligonucleotide
attgtgttcgggtcagttggaaagtgatat

SEQ ID NO: 387697 - DNA, 30 bp, Artificial Sequence
  Synthetic oligonucleotide
gtacacccggaatatcgtataaggtgatat

SEQ ID NO: 387698 - DNA, 30 bp, Artificial Sequence
  Synthetic oligonucleotide
aattcaggggctgggcagcgcttgtgatat

SEQ ID NO: 387699 - DNA, 30 bp, Artificial Sequence
  Synthetic oligonucleotide
tcaatggttagatattcgacaagaatatat

SEQ ID NO: 387700 - DNA, 30 bp, Artificial Sequence
  Synthetic oligonucleotide
gatcacttgtcgatgcaaaagagaatatat

SEQ ID NO: 387701 - DNA, 30 bp, Artificial Sequence
  Synthetic oligonucleotide
taaaatgacacagattgttcaggaatatat

SEQ ID NO: 387702 - DNA, 30 bp, Artificial Sequence
  Synthetic oligonucleotide
gcatgcatatcctacccattgggaatatat

SEQ ID NO: 387703 - DNA, 30 bp, Artificial Sequence
  Synthetic oligonucleotide
gcgagtcaacgcggcaaggtcataatatat

SEQ ID NO: 387704 - DNA, 30 bp, Artificial Sequence
  Synthetic oligonucleotide
acctgaccgtaaagcgcgcaactaatatat

SEQ ID NO: 387705 - DNA, 30 bp, Artificial Sequence
  Synthetic oligonucleotide
ccatgtcggtgtctctgcttcaacatatat

SEQ ID NO: 387706 - DNA, 30 bp, Artificial Sequence
  Synthetic oligonucleotide
agaggcaccgctgtacctcttcacatatat

SEQ ID NO: 387707 - DNA, 30 bp, Artificial Sequence
  Synthetic oligonucleotide
atactcgcgtgaatatgtacaagcatatat

SEQ ID NO: 387708 - DNA, 30 bp, Artificial Sequence
  Synthetic oligonucleotide
gtctgttcaatatacaaggggacgatatat

SEQ ID NO: 387709 - DNA, 30 bp, Artificial Sequence
  Synthetic oligonucleotide
ttagccagggtgggggcccagcggatatat

SEQ ID NO: 387710 - DNA, 30 bp, Artificial Sequence
  Synthetic oligonucleotide
agtaaaaaatgttatcgtaacgggatatat

SEQ ID NO: 387711 - DNA, 30 bp, Artificial Sequence
  Synthetic oligonucleotide
atacttaaataggaccatattctgatatat

SEQ ID NO: 387712 - DNA, 30 bp, Artificial Sequence
  Synthetic oligonucleotide
cggtcgaatgaaagttgtcgatgtatatat

SEQ ID NO: 387713 - DNA, 30 bp, Artificial Sequence
  Synthetic oligonucleotide
tcctctgatgggaccttctcgagactatat

SEQ ID NO: 387714 - DNA, 30 bp, Artificial Sequence
  Synthetic oligonucleotide
tttggacctcaccgatatcaagacctatat

SEQ ID NO: 387715 - DNA, 30 bp, Artificial Sequence
  Synthetic oligonucleotide
gctaattaaggcaagagtatggccctatat

SEQ ID NO: 387716 - DNA, 30 bp, Artificial Sequence
  Synthetic oligonucleotide
tacatgcactagcccgtgtctcgcctatat

SEQ ID NO: 387717 - DNA, 30 bp, Artificial Sequence
  Synthetic oligonucleotide
ataatgcattgaggtactgtccctctatat

SEQ ID NO: 387718 - DNA, 30 bp, Artificial Sequence
  Synthetic oligonucleotide
gcacagactcaacggacgagctcagtatat

SEQ ID NO: 387719 - DNA, 30 bp, Artificial Sequence
  Synthetic oligonucleotide
cctggcccaaggaaagctattagagtatat

SEQ ID NO: 387720 - DNA, 30 bp, Artificial Sequence
  Synthetic oligonucleotide
gaatgggcgcttgcaagcggctacgtatat

SEQ ID NO: 387721 - DNA, 30 bp, Artificial Sequence
  Synthetic oligonucleotide
gcaatagtagtgggagcgctatgggtatat

SEQ ID NO: 387722 - DNA, 30 bp, Artificial Sequence
  Synthetic oligonucleotide
agacgagttttattgatggatggtgtatat

SEQ ID NO: 387723 - DNA, 30 bp, Artificial Sequence
  Synthetic oligonucleotide
cggctggatccaataagatgcattgtatat

SEQ ID NO: 387724 - DNA, 30 bp, Artificial Sequence
  Synthetic oligonucleotide
tacgattgagagccctggttcattgtatat

SEQ ID NO: 387725 - DNA, 30 bp, Artificial Sequence
  Synthetic oligonucleotide
tcggccaacgccaatcttcttagattatat

SEQ ID NO: 387726 - DNA, 30 bp, Artificial Sequence
  Synthetic oligonucleotide
agatcaccgactgctctatgaagcttatat

SEQ ID NO: 387727 - DNA, 30 bp, Artificial Sequence
  Synthetic oligonucleotide
agggactaaggactcgcgaggatcttatat

SEQ ID NO: 387728 - DNA, 30 bp, Artificial Sequence
  Synthetic oligonucleotide
tacggcttccgttaatggcgtaagttatat

SEQ ID NO: 387729 - DNA, 30 bp, Artificial Sequence
  Synthetic oligonucleotide
tcgagcgtctgagtatacgaatagttatat

SEQ ID NO: 387730 - DNA, 30 bp, Artificial Sequence
  Synthetic oligonucleotide
agattagggatttttgttaaggggttatat

SEQ ID NO: 387731 - DNA, 30 bp, Artificial Sequence
  Synthetic oligonucleotide
gttcggtaagaaaatgcacttgtgttatat

SEQ ID NO: 387732 - DNA, 30 bp, Artificial Sequence
  Synthetic oligonucleotide
ctgcagttaccagagcgagatcatttatat

SEQ ID NO: 387733 - DNA, 30 bp, Artificial Sequence
  Synthetic oligonucleotide
atacttgaacacgggctaacaacaaactat

SEQ ID NO: 387734 - DNA, 30 bp, Artificial Sequence
  Synthetic oligonucleotide
aagggaatcgatcaggccgtgccaaactat

SEQ ID NO: 387735 - DNA, 30 bp, Artificial Sequence
  Synthetic oligonucleotide
gataatcggaagttcgggtgtgtgaactat

SEQ ID NO: 387736 - DNA, 30 bp, Artificial Sequence
  Synthetic oligonucleotide
ttattgtgccgataggcatcaactaactat

SEQ ID NO: 387737 - DNA, 30 bp, Artificial Sequence
  Synthetic oligonucleotide
agcaaagtgatggagacttattgtaactat

SEQ ID NO: 387738 - DNA, 30 bp, Artificial Sequence
  Synthetic oligonucleotide
atccaattgctatacaacaacgtacactat

SEQ ID NO: 387739 - DNA, 30 bp, Artificial Sequence
  Synthetic oligonucleotide
cgttgacgtttttacacaagtcaccactat

SEQ ID NO: 387740 - DNA, 30 bp, Artificial Sequence
  Synthetic oligonucleotide
gcgtccgtgaagggagtcccccagcactat

SEQ ID NO: 387741 - DNA, 30 bp, Artificial Sequence
  Synthetic oligonucleotide
aaatgttaggatggcgcgcctacgcactat

SEQ ID NO: 387742 - DNA, 30 bp, Artificial Sequence
  Synthetic oligonucleotide
agagtgactccgctgcaatgggcgcactat

SEQ ID NO: 387743 - DNA, 30 bp, Artificial Sequence
  Synthetic oligonucleotide
ctccttgggttaggcaaatcaatgcactat

SEQ ID NO: 387744 - DNA, 30 bp, Artificial Sequence
  Synthetic oligonucleotide
aaacgactttcaccttctgcgagagactat

SEQ ID NO: 387745 - DNA, 30 bp, Artificial Sequence
  Synthetic oligonucleotide
ttgaccttgaagcggtaactgcgagactat

SEQ ID NO: 387746 - DNA, 30 bp, Artificial Sequence
  Synthetic oligonucleotide
aacgctcccgaacgaacatttgacgactat

SEQ ID NO: 387747 - DNA, 30 bp, Artificial Sequence
  Synthetic oligonucleotide
tcggcggcataggtgaagttttcggactat

SEQ ID NO: 387748 - DNA, 30 bp, Artificial Sequence
  Synthetic oligonucleotide
ttaactcttgaccagatgaacctggactat

SEQ ID NO: 387749 - DNA, 30 bp, Artificial Sequence
  Synthetic oligonucleotide
tttgataaaccatattcaataagtgactat

SEQ ID NO: 387750 - DNA, 30 bp, Artificial Sequence
  Synthetic oligonucleotide
atagtggagcggcaacgccggggtgactat

SEQ ID NO: 387751 - DNA, 30 bp, Artificial Sequence
  Synthetic oligonucleotide
gtgaagtcagtgtaaactcacattgactat

SEQ ID NO: 387752 - DNA, 30 bp, Artificial Sequence
  Synthetic oligonucleotide
gtggaagcctgagatttaatcattgactat

SEQ ID NO: 387753 - DNA, 30 bp, Artificial Sequence
  Synthetic oligonucleotide
aagcgaaggtgataactacgctttgactat

SEQ ID NO: 387754 - DNA, 30 bp, Artificial Sequence
  Synthetic oligonucleotide
atagctccgtctagggaagcaacatactat

SEQ ID NO: 387755 - DNA, 30 bp, Artificial Sequence
  Synthetic oligonucleotide
atctatgaggcgcacgtaaaagactactat

SEQ ID NO: 387756 - DNA, 30 bp, Artificial Sequence
  Synthetic oligonucleotide
aagtggactagaaccgcaggacgctactat

SEQ ID NO: 387757 - DNA, 30 bp, Artificial Sequence
  Synthetic oligonucleotide
aacaaatcaccttcgtatcgcacaacctat

SEQ ID NO: 387758 - DNA, 30 bp, Artificial Sequence
  Synthetic oligonucleotide
gatttttcgcaactgccaaccccaacctat

SEQ ID NO: 387759 - DNA, 30 bp, Artificial Sequence
  Synthetic oligonucleotide
ggtttgaaaacccacattcccttaacctat

SEQ ID NO: 387760 - DNA, 30 bp, Artificial Sequence
  Synthetic oligonucleotide
tattagccggcgacaaggaggttaacctat

SEQ ID NO: 387761 - DNA, 30 bp, Artificial Sequence
  Synthetic oligonucleotide
ggccgaaatacgtgggtagttgcgacctat

SEQ ID NO: 387762 - DNA, 30 bp, Artificial Sequence
  Synthetic oligonucleotide
gctaggtctgatctgttgtctctaccctat

SEQ ID NO: 387763 - DNA, 30 bp, Artificial Sequence
  Synthetic oligonucleotide
agtaaaaaccttccgtaagaattaccctat

SEQ ID NO: 387764 - DNA, 31 bp, Artificial Sequence
  Synthetic oligonucleotide
ggatgggggcgagcgatagcaaatcccctat

SEQ ID NO: 387765 - DNA, 30 bp, Artificial Sequence
  Synthetic oligonucleotide
ggcgctattactacgatataaaagccctat

SEQ ID NO: 387766 - DNA, 30 bp, Artificial Sequence
  Synthetic oligonucleotide
cagacgcttgtcatacccttcgagccctat

SEQ ID NO: 387767 - DNA, 30 bp, Artificial Sequence
  Synthetic oligonucleotide
tatgtatgtctgctgaggtatcggccctat

SEQ ID NO: 387768 - DNA, 30 bp, Artificial Sequence
  Synthetic oligonucleotide
ttgttgtgttctctttttgtgtttccctat

SEQ ID NO: 387769 - DNA, 30 bp, Artificial Sequence
  Synthetic oligonucleotide
gaacataattccaatgaactcaaagcctat

SEQ ID NO: 387770 - DNA, 30 bp, Artificial Sequence
  Synthetic oligonucleotide
tgacgaagagtcgtaccgtaaaacgcctat

SEQ ID NO: 387771 - DNA, 30 bp, Artificial Sequence
  Synthetic oligonucleotide
aatagtagacggtccttaaacaatgcctat

SEQ ID NO: 387772 - DNA, 30 bp, Artificial Sequence
  Synthetic oligonucleotide
gaaataggggtcattgatgtcgatgcctat

SEQ ID NO: 387773 - DNA, 30 bp, Artificial Sequence
  Synthetic oligonucleotide
cctaataactgatcattgcgcgctgcctat

SEQ ID NO: 387774 - DNA, 30 bp, Artificial Sequence
  Synthetic oligonucleotide
gaaattgcgaggcatatcaggccatcctat

SEQ ID NO: 387775 - DNA, 30 bp, Artificial Sequence
  Synthetic oligonucleotide
cagtgtatagtatccagcagtgtatcctat

SEQ ID NO: 387776 - DNA, 30 bp, Artificial Sequence
  Synthetic oligonucleotide
gaatgaggctcgctcatattagcctcctat

SEQ ID NO: 387777 - DNA, 30 bp, Artificial Sequence
  Synthetic oligonucleotide
cgtagaagggtggaaaaacccctctcctat

SEQ ID NO: 387778 - DNA, 30 bp, Artificial Sequence
  Synthetic oligonucleotide
ctgcggcactcaacctgcacccagtcctat

SEQ ID NO: 387779 - DNA, 30 bp, Artificial Sequence
  Synthetic oligonucleotide
cgcgtcgtgcccccgaatcacggttcctat

SEQ ID NO: 387780 - DNA, 30 bp, Artificial Sequence
  Synthetic oligonucleotide
ttgttgtgttctcttttggtgttttcctat

SEQ ID NO: 387781 - DNA, 30 bp, Artificial Sequence
  Synthetic oligonucleotide
ttgttgtgttctcttattgtgttttcctat

SEQ ID NO: 387782 - DNA, 30 bp, Artificial Sequence
  Synthetic oligonucleotide
atgttgtgttctctttttgtgttttcctat

SEQ ID NO: 387783 - DNA, 30 bp, Artificial Sequence
  Synthetic oligonucleotide
aaagaccttttatgacgtttgggaagctat

SEQ ID NO: 387784 - DNA, 30 bp, Artificial Sequence
  Synthetic oligonucleotide
atcgtatgatacgcgggcagatgcagctat

SEQ ID NO: 387785 - DNA, 30 bp, Artificial Sequence
  Synthetic oligonucleotide
atcttgtacggaaggcaaaaattcagctat

SEQ ID NO: 387786 - DNA, 29 bp, Artificial Sequence
  Synthetic oligonucleotide
gggccctaaagccgtatttcccgagctat

SEQ ID NO: 387787 - DNA, 30 bp, Artificial Sequence
  Synthetic oligonucleotide
taagacccccttcaggtgtagaatagctat

SEQ ID NO: 387788 - DNA, 30 bp, Artificial Sequence
  Synthetic oligonucleotide
ttaggagaagaccaacagacaattagctat

SEQ ID NO: 387789 - DNA, 30 bp, Artificial Sequence
  Synthetic oligonucleotide
tttgagagtaagtggctccctagtcgctat

SEQ ID NO: 387790 - DNA, 30 bp, Artificial Sequence
  Synthetic oligonucleotide
agaaaacgcgagcatcgtagttgaggctat

SEQ ID NO: 387791 - DNA, 30 bp, Artificial Sequence
  Synthetic oligonucleotide
agagggatgactgaatcttatttgggctat

SEQ ID NO: 387792 - DNA, 30 bp, Artificial Sequence
  Synthetic oligonucleotide
acttcgatccccggcgtaagatatggctat

SEQ ID NO: 387793 - DNA, 30 bp, Artificial Sequence
  Synthetic oligonucleotide
agctagactaaacatgctgtatgtggctat

SEQ ID NO: 387794 - DNA, 30 bp, Artificial Sequence
  Synthetic oligonucleotide
atgtcaactactaccagttcaacctgctat

SEQ ID NO: 387795 - DNA, 30 bp, Artificial Sequence
  Synthetic oligonucleotide
acgctttttcttgaagcaccatcctgctat

SEQ ID NO: 387796 - DNA, 30 bp, Artificial Sequence
  Synthetic oligonucleotide
aggaaaaccgcttggatattacggtgctat

SEQ ID NO: 387797 - DNA, 30 bp, Artificial Sequence
  Synthetic oligonucleotide
aaaaggaacattagtacgttttgttgctat

SEQ ID NO: 387798 - DNA, 30 bp, Artificial Sequence
  Synthetic oligonucleotide
ttgagcatagcgccatagtttatttgctat

SEQ ID NO: 387799 - DNA, 30 bp, Artificial Sequence
  Synthetic oligonucleotide
actcggtcgatgttcccagcaggaatctat

SEQ ID NO: 387800 - DNA, 30 bp, Artificial Sequence
  Synthetic oligonucleotide
tgaacgtctaagttgtcaaagggcatctat

SEQ ID NO: 387801 - DNA, 30 bp, Artificial Sequence
  Synthetic oligonucleotide
ggatagtcataagccgagaccctcatctat

SEQ ID NO: 387802 - DNA, 30 bp, Artificial Sequence
  Synthetic oligonucleotide
ttcagtcttgaaacgttatgtacgatctat

SEQ ID NO: 387803 - DNA, 30 bp, Artificial Sequence
  Synthetic oligonucleotide
aacctaagcaacaataggaccggtatctat

SEQ ID NO: 387804 - DNA, 30 bp, Artificial Sequence
  Synthetic oligonucleotide
atcggtcaagatcccactatgtaactctat

SEQ ID NO: 387805 - DNA, 30 bp, Artificial Sequence
  Synthetic oligonucleotide
tgagttaggtccaaagggccaccactctat

SEQ ID NO: 387806 - DNA, 30 bp, Artificial Sequence
  Synthetic oligonucleotide
ggggtggtgcttacgttgctccgcctctat

SEQ ID NO: 387807 - DNA, 30 bp, Artificial Sequence
  Synthetic oligonucleotide
tctataccatgaagtaatcctacgctctat

SEQ ID NO: 387808 - DNA, 30 bp, Artificial Sequence
  Synthetic oligonucleotide
gacctcaatcttaatcgcaacctgctctat

SEQ ID NO: 387809 - DNA, 30 bp, Artificial Sequence
  Synthetic oligonucleotide
tgttcaataggagaagtattgtgtctctat

SEQ ID NO: 387810 - DNA, 30 bp, Artificial Sequence
  Synthetic oligonucleotide
caacgtattgcgccttagcctgtagtctat

SEQ ID NO: 387811 - DNA, 30 bp, Artificial Sequence
  Synthetic oligonucleotide
cttagggatgataaaataacattagtctat

SEQ ID NO: 387812 - DNA, 30 bp, Artificial Sequence
  Synthetic oligonucleotide
ggaatgatcggtatttacgtatacgtctat

SEQ ID NO: 387813 - DNA, 30 bp, Artificial Sequence
  Synthetic oligonucleotide
gcacacttacccacgaagagccaggtctat

SEQ ID NO: 387814 - DNA, 30 bp, Artificial Sequence
  Synthetic oligonucleotide
ggtaccttcgcactcggggcaccggtctat

SEQ ID NO: 387815 - DNA, 30 bp, Artificial Sequence
  Synthetic oligonucleotide
ggtgatagtgtctggtactgtagggtctat

SEQ ID NO: 387816 - DNA, 30 bp, Artificial Sequence
  Synthetic oligonucleotide
gcggttgacggattcttgtaggtggtctat

SEQ ID NO: 387817 - DNA, 31 bp, Artificial Sequence
  Synthetic oligonucleotide
gccagagggttttgtcgccgcccatgtctat

SEQ ID NO: 387818 - DNA, 30 bp, Artificial Sequence
  Synthetic oligonucleotide
caggcgtagtcctactcactggcattctat

SEQ ID NO: 387819 - DNA, 30 bp, Artificial Sequence
  Synthetic oligonucleotide
gtgcttgaacgtgacatcgctgccttctat

SEQ ID NO: 387820 - DNA, 30 bp, Artificial Sequence
  Synthetic oligonucleotide
gctctatgggacgtaataaggttcttctat

SEQ ID NO: 387821 - DNA, 31 bp, Artificial Sequence
  Synthetic oligonucleotide
caggttagatagtgttccgagtaagttctat

SEQ ID NO: 387822 - DNA, 30 bp, Artificial Sequence
  Synthetic oligonucleotide
ataacatgttaggtcaaccttcatttctat

SEQ ID NO: 387823 - DNA, 30 bp, Artificial Sequence
  Synthetic oligonucleotide
gcgaaagttagagagttcgggtatttctat

SEQ ID NO: 387824 - DNA, 30 bp, Artificial Sequence
  Synthetic oligonucleotide
cggtctttaggcaccccgcgacctttctat

SEQ ID NO: 387825 - DNA, 30 bp, Artificial Sequence
  Synthetic oligonucleotide
ttcgatgattaagtgcactacggtttctat

SEQ ID NO: 387826 - DNA, 30 bp, Artificial Sequence
  Synthetic oligonucleotide
taacattgtgagaagtgttagtgtttctat

SEQ ID NO: 387827 - DNA, 30 bp, Artificial Sequence
  Synthetic oligonucleotide
gacaatagataacataggcctattttctat

SEQ ID NO: 387828 - DNA, 30 bp, Artificial Sequence
  Synthetic oligonucleotide
ttgttgtgttctctttttgtgtttttctat

SEQ ID NO: 387829 - DNA, 30 bp, Artificial Sequence
  Synthetic oligonucleotide
tactactctgtagaaccaaactcaaagtat

SEQ ID NO: 387830 - DNA, 30 bp, Artificial Sequence
  Synthetic oligonucleotide
tccgacaatacatttccggcgtcaaagtat

SEQ ID NO: 387831 - DNA, 30 bp, Artificial Sequence
  Synthetic oligonucleotide
aggaaatcctccaagtatcttggaaagtat

SEQ ID NO: 387832 - DNA, 30 bp, Artificial Sequence
  Synthetic oligonucleotide
ctccataatgaacgggtgttaaacaagtat

SEQ ID NO: 387833 - DNA, 30 bp, Artificial Sequence
  Synthetic oligonucleotide
tgatcccgttcaaggttaggccacaagtat

SEQ ID NO: 387834 - DNA, 30 bp, Artificial Sequence
  Synthetic oligonucleotide
cgggcagcggtttataacacgcacaagtat

SEQ ID NO: 387835 - DNA, 30 bp, Artificial Sequence
  Synthetic oligonucleotide
ctccgctaaagatacgaaaagctgaagtat

SEQ ID NO: 387836 - DNA, 30 bp, Artificial Sequence
  Synthetic oligonucleotide
gtccacagtagctcgtcggtggataagtat

SEQ ID NO: 387837 - DNA, 30 bp, Artificial Sequence
  Synthetic oligonucleotide
cgcaatttttaaggaaaaacacttaagtat

SEQ ID NO: 387838 - DNA, 30 bp, Artificial Sequence
  Synthetic oligonucleotide
ctcgcggttcgagtgaattaatcccagtat

SEQ ID NO: 387839 - DNA, 30 bp, Artificial Sequence
  Synthetic oligonucleotide
atccagctagacattaaaggaggccagtat

SEQ ID NO: 387840 - DNA, 30 bp, Artificial Sequence
  Synthetic oligonucleotide
cgctgtagtgatcagccccaagcgcagtat

SEQ ID NO: 387841 - DNA, 30 bp, Artificial Sequence
  Synthetic oligonucleotide
gtggcagcttcgcaaacacggcgtcagtat

SEQ ID NO: 387842 - DNA, 30 bp, Artificial Sequence
  Synthetic oligonucleotide
gcaccgtagttaagtctgtaggacgagtat

SEQ ID NO: 387843 - DNA, 30 bp, Artificial Sequence
  Synthetic oligonucleotide
ccatgtcaattttgtcgggagaaggagtat

SEQ ID NO: 387844 - DNA, 30 bp, Artificial Sequence
  Synthetic oligonucleotide
catttctgcatgatattccatgctgagtat

SEQ ID NO: 387845 - DNA, 30 bp, Artificial Sequence
  Synthetic oligonucleotide
cagcttaactgagcgggaacgattgagtat

SEQ ID NO: 387846 - DNA, 30 bp, Artificial Sequence
  Synthetic oligonucleotide
tcgtccaaaccgttaccggacaaatagtat

SEQ ID NO: 387847 - DNA, 30 bp, Artificial Sequence
  Synthetic oligonucleotide
gcaagtgtttggtagggagttgaatagtat

SEQ ID NO: 387848 - DNA, 30 bp, Artificial Sequence
  Synthetic oligonucleotide
cttgttcgcaactacgtcggaccatagtat

SEQ ID NO: 387849 - DNA, 30 bp, Artificial Sequence
  Synthetic oligonucleotide
gcgcatcgacaacagattccaggatagtat

SEQ ID NO: 387850 - DNA, 30 bp, Artificial Sequence
  Synthetic oligonucleotide
cgctaaaaaatgcatgtcagctgatagtat

SEQ ID NO: 387851 - DNA, 30 bp, Artificial Sequence
  Synthetic oligonucleotide
gttgatatcgcacattaagtctactagtat

SEQ ID NO: 387852 - DNA, 30 bp, Artificial Sequence
  Synthetic oligonucleotide
caccagtcctagtatcgattgcagtagtat

SEQ ID NO: 387853 - DNA, 30 bp, Artificial Sequence
  Synthetic oligonucleotide
ttcataaagggtcggaagaactcgtagtat

SEQ ID NO: 387854 - DNA, 30 bp, Artificial Sequence
  Synthetic oligonucleotide
ttacagctatattcgatatggcgttagtat

SEQ ID NO: 387855 - DNA, 30 bp, Artificial Sequence
  Synthetic oligonucleotide
acggaatattcgccctacggcggttagtat

SEQ ID NO: 387856 - DNA, 30 bp, Artificial Sequence
  Synthetic oligonucleotide
tccgagtgtaaaaatcgaatgatttagtat

SEQ ID NO: 387857 - DNA, 30 bp, Artificial Sequence
  Synthetic oligonucleotide
gcgtacccggtaaacaatttgttaacgtat

SEQ ID NO: 387858 - DNA, 30 bp, Artificial Sequence
  Synthetic oligonucleotide
tgatattgccttggaatatggaccacgtat

SEQ ID NO: 387859 - DNA, 30 bp, Artificial Sequence
  Synthetic oligonucleotide
ggaccattccagataaggagcctcacgtat

SEQ ID NO: 387860 - DNA, 30 bp, Artificial Sequence
  Synthetic oligonucleotide
ctaaacgattacgccctgtgactgacgtat

SEQ ID NO: 387861 - DNA, 30 bp, Artificial Sequence
  Synthetic oligonucleotide
gttagggaatttgatgcaactgtgacgtat

SEQ ID NO: 387862 - DNA, 30 bp, Artificial Sequence
  Synthetic oligonucleotide
ggcgggaggagacgaagtactaatacgtat

SEQ ID NO: 387863 - DNA, 30 bp, Artificial Sequence
  Synthetic oligonucleotide
ggtcggactcattagtacgcaaaaccgtat

SEQ ID NO: 387864 - DNA, 30 bp, Artificial Sequence
  Synthetic oligonucleotide
tgcggcgaaacgagggatcgacgaccgtat

SEQ ID NO: 387865 - DNA, 30 bp, Artificial Sequence
  Synthetic oligonucleotide
ggaccggctagcacaccgggtaccccgtat

SEQ ID NO: 387866 - DNA, 30 bp, Artificial Sequence
  Synthetic oligonucleotide
aaaagtaatgaatgtataccgtgcccgtat

SEQ ID NO: 387867 - DNA, 30 bp, Artificial Sequence
  Synthetic oligonucleotide
ctcgccggcgccgttagggatatcccgtat

SEQ ID NO: 387868 - DNA, 30 bp, Artificial Sequence
  Synthetic oligonucleotide
ccaaccgtacagggggcaatattcccgtat

SEQ ID NO: 387869 - DNA, 30 bp, Artificial Sequence
  Synthetic oligonucleotide
tcgtccaaaacggctttggaagctccgtat

SEQ ID NO: 387870 - DNA, 30 bp, Artificial Sequence
  Synthetic oligonucleotide
tggttcccaagaccgaggctgcgtccgtat

SEQ ID NO: 387871 - DNA, 30 bp, Artificial Sequence
  Synthetic oligonucleotide
tgaggacagaaagtaacaaaatgtccgtat

SEQ ID NO: 387872 - DNA, 30 bp, Artificial Sequence
  Synthetic oligonucleotide
aaagaaccactggaagataggcttccgtat

SEQ ID NO: 387873 - DNA, 30 bp, Artificial Sequence
  Synthetic oligonucleotide
ttaacggatgactcttgaatacaggcgtat

SEQ ID NO: 387874 - DNA, 30 bp, Artificial Sequence
  Synthetic oligonucleotide
aaaccccaggttgttgtggttactgcgtat

SEQ ID NO: 387875 - DNA, 30 bp, Artificial Sequence
  Synthetic oligonucleotide
aagtaaccatggcgttcctccagtgcgtat

SEQ ID NO: 387876 - DNA, 30 bp, Artificial Sequence
  Synthetic oligonucleotide
gccttgcgcaactttggaacgtcatcgtat

SEQ ID NO: 387877 - DNA, 30 bp, Artificial Sequence
  Synthetic oligonucleotide
ggtcctgtctcgtgcgatccgtactcgtat

SEQ ID NO: 387878 - DNA, 30 bp, Artificial Sequence
  Synthetic oligonucleotide
tcgatggggttaagatccgatgcgtcgtat

SEQ ID NO: 387879 - DNA, 30 bp, Artificial Sequence
  Synthetic oligonucleotide
tactgatcgggagactgtccagaaaggtat

SEQ ID NO: 387880 - DNA, 30 bp, Artificial Sequence
  Synthetic oligonucleotide
cctggggcatatgcgggccccgtaaggtat

SEQ ID NO: 387881 - DNA, 30 bp, Artificial Sequence
  Synthetic oligonucleotide
aaacctgataaagcctggaaggacaggtat

SEQ ID NO: 387882 - DNA, 30 bp, Artificial Sequence
  Synthetic oligonucleotide
gcacgaggccgcgggagccaatacaggtat

SEQ ID NO: 387883 - DNA, 30 bp, Artificial Sequence
  Synthetic oligonucleotide
gtatctttggtcgcaatttgaaccaggtat

SEQ ID NO: 387884 - DNA, 30 bp, Artificial Sequence
  Synthetic oligonucleotide
tatccagctacgatcaagcttcccaggtat

SEQ ID NO: 387885 - DNA, 30 bp, Artificial Sequence
  Synthetic oligonucleotide
taaaccggtgtatacgcactgcagaggtat

SEQ ID NO: 387886 - DNA, 30 bp, Artificial Sequence
  Synthetic oligonucleotide
gcaactccggggtcgtcatgctagaggtat

SEQ ID NO: 387887 - DNA, 30 bp, Artificial Sequence
  Synthetic oligonucleotide
tcatccccggatggtccggacacgaggtat

SEQ ID NO: 387888 - DNA, 30 bp, Artificial Sequence
  Synthetic oligonucleotide
taggggatcagttcttcactcaggaggtat

SEQ ID NO: 387889 - DNA, 30 bp, Artificial Sequence
  Synthetic oligonucleotide
agcaatttgatatagattgaatggaggtat

SEQ ID NO: 387890 - DNA, 30 bp, Artificial Sequence
  Synthetic oligonucleotide
ggcgtacaacaggtcaccggggtgaggtat

SEQ ID NO: 387891 - DNA, 30 bp, Artificial Sequence
  Synthetic oligonucleotide
acatgtctatcaatgttaatctgtaggtat

SEQ ID NO: 387892 - DNA, 30 bp, Artificial Sequence
  Synthetic oligonucleotide
gatgtattaagtatcaaacgtgttaggtat

SEQ ID NO: 387893 - DNA, 30 bp, Artificial Sequence
  Synthetic oligonucleotide
tccgtatgaggtcaccgcatgcaacggtat

SEQ ID NO: 387894 - DNA, 30 bp, Artificial Sequence
  Synthetic oligonucleotide
atctaacgatagctagcaaggtaacggtat

SEQ ID NO: 387895 - DNA, 30 bp, Artificial Sequence
  Synthetic oligonucleotide
aggcccctgggtcaatcacagcgacggtat

SEQ ID NO: 387896 - DNA, 30 bp, Artificial Sequence
  Synthetic oligonucleotide
ttaacaacgagttaacggcctctacggtat

SEQ ID NO: 387897 - DNA, 30 bp, Artificial Sequence
  Synthetic oligonucleotide
ggctcttcggctttcagtgtccgccggtat

SEQ ID NO: 387898 - DNA, 30 bp, Artificial Sequence
  Synthetic oligonucleotide
gagccctaggtcgaccttcggggccggtat

SEQ ID NO: 387899 - DNA, 30 bp, Artificial Sequence
  Synthetic oligonucleotide
ctataggttcatctccgtttgctccggtat

SEQ ID NO: 387900 - DNA, 30 bp, Artificial Sequence
  Synthetic oligonucleotide
tatccggtgcgcagtctcacgcagcggtat

SEQ ID NO: 387901 - DNA, 30 bp, Artificial Sequence
  Synthetic oligonucleotide
aaaggtcagaagtatactccctagcggtat

SEQ ID NO: 387902 - DNA, 30 bp, Artificial Sequence
  Synthetic oligonucleotide
taaccgctgaatccggtgaatacgcggtat

SEQ ID NO: 387903 - DNA, 29 bp, Artificial Sequence
  Synthetic oligonucleotide
cgtgacgccctttagctctggcgcggtat

SEQ ID NO: 387904 - DNA, 30 bp, Artificial Sequence
  Synthetic oligonucleotide
tgttcgcgggcctcctatatggggcggtat

SEQ ID NO: 387905 - DNA, 30 bp, Artificial Sequence
  Synthetic oligonucleotide
attacacgtaattccgcagatagtcggtat

SEQ ID NO: 387906 - DNA, 30 bp, Artificial Sequence
  Synthetic oligonucleotide
tggcgtcttggttccttctggccagggtat

SEQ ID NO: 387907 - DNA, 30 bp, Artificial Sequence
  Synthetic oligonucleotide
gaggcaggccgacataatctagacgggtat

SEQ ID NO: 387908 - DNA, 30 bp, Artificial Sequence
  Synthetic oligonucleotide
atggattatagataaccgtgtagcgggtat

SEQ ID NO: 387909 - DNA, 30 bp, Artificial Sequence
  Synthetic oligonucleotide
tgagtacgatcagaaaggtaacgcgggtat

SEQ ID NO: 387910 - DNA, 30 bp, Artificial Sequence
  Synthetic oligonucleotide
aaggtccaggattttggatgttcggggtat

SEQ ID NO: 387911 - DNA, 30 bp, Artificial Sequence
  Synthetic oligonucleotide
attatgtgctttggggaacaaggatggtat

SEQ ID NO: 387912 - DNA, 30 bp, Artificial Sequence
  Synthetic oligonucleotide
cgggcggcaccttcaggggcgttatggtat

SEQ ID NO: 387913 - DNA, 30 bp, Artificial Sequence
  Synthetic oligonucleotide
cacatctgcaatgcatatggtgcttggtat

SEQ ID NO: 387914 - DNA, 30 bp, Artificial Sequence
  Synthetic oligonucleotide
atcgctggagaatgggggggacgttggtat

SEQ ID NO: 387915 - DNA, 30 bp, Artificial Sequence
  Synthetic oligonucleotide
gattgacacatcggtccgtgtctttggtat

SEQ ID NO: 387916 - DNA, 30 bp, Artificial Sequence
  Synthetic oligonucleotide
cttcgaaatggagcgccaggtgtttggtat

SEQ ID NO: 387917 - DNA, 30 bp, Artificial Sequence
  Synthetic oligonucleotide
ccttgcttccctatgtgtgctaaaatgtat

SEQ ID NO: 387918 - DNA, 30 bp, Artificial Sequence
  Synthetic oligonucleotide
ccagcgacggtcagatgacggtcaatgtat

SEQ ID NO: 387919 - DNA, 30 bp, Artificial Sequence
  Synthetic oligonucleotide
atttaatgaccgagacgtgcgggaatgtat

SEQ ID NO: 387920 - DNA, 30 bp, Artificial Sequence
  Synthetic oligonucleotide
ccaggccttaacgggcccctgaacatgtat

SEQ ID NO: 387921 - DNA, 30 bp, Artificial Sequence
  Synthetic oligonucleotide
tcaatgttactctgcactcgttatatgtat

SEQ ID NO: 387922 - DNA, 30 bp, Artificial Sequence
  Synthetic oligonucleotide
gcaggtatacgctcataatgaactatgtat

SEQ ID NO: 387923 - DNA, 30 bp, Artificial Sequence
  Synthetic oligonucleotide
actgcgctacggagagtttagactatgtat

SEQ ID NO: 387924 - DNA, 30 bp, Artificial Sequence
  Synthetic oligonucleotide
tattgcccgttccctaggattactatgtat

SEQ ID NO: 387925 - DNA, 30 bp, Artificial Sequence
  Synthetic oligonucleotide
gacaatcgcacttcgcttggtcacctgtat

SEQ ID NO: 387926 - DNA, 30 bp, Artificial Sequence
  Synthetic oligonucleotide
taatgatataagcgggaaacatccctgtat

SEQ ID NO: 387927 - DNA, 30 bp, Artificial Sequence
  Synthetic oligonucleotide
aatgaccatatatcctaataagtgctgtat

SEQ ID NO: 387928 - DNA, 30 bp, Artificial Sequence
  Synthetic oligonucleotide
attttgccggcggatgagtcattgctgtat

SEQ ID NO: 387929 - DNA, 30 bp, Artificial Sequence
  Synthetic oligonucleotide
tctcgctggcctctacaggaaaatctgtat

SEQ ID NO: 387930 - DNA, 30 bp, Artificial Sequence
  Synthetic oligonucleotide
atcctcggggggcccggaccttgtctgtat

SEQ ID NO: 387931 - DNA, 30 bp, Artificial Sequence
  Synthetic oligonucleotide
caggaccggaatgggatagtcaccgtgtat

SEQ ID NO: 387932 - DNA, 30 bp, Artificial Sequence
  Synthetic oligonucleotide
acagaatatcccggaatcagactcgtgtat

SEQ ID NO: 387933 - DNA, 30 bp, Artificial Sequence
  Synthetic oligonucleotide
aagcgggcctggagactctaacgggtgtat

SEQ ID NO: 387934 - DNA, 30 bp, Artificial Sequence
  Synthetic oligonucleotide
tgaagtcccttacgcacgttctgtgtgtat

SEQ ID NO: 387935 - DNA, 30 bp, Artificial Sequence
  Synthetic oligonucleotide
tcttatctgttgtgtttacctcttgtgtat

SEQ ID NO: 387936 - DNA, 30 bp, Artificial Sequence
  Synthetic oligonucleotide
tccttgtctgaacatagggaagcattgtat

SEQ ID NO: 387937 - DNA, 30 bp, Artificial Sequence
  Synthetic oligonucleotide
tggcggatatatgtgccggaaaccttgtat

SEQ ID NO: 387938 - DNA, 30 bp, Artificial Sequence
  Synthetic oligonucleotide
tgtactcccgtctactgctggaccttgtat

SEQ ID NO: 387939 - DNA, 30 bp, Artificial Sequence
  Synthetic oligonucleotide
gggtaagcatcgcgggtctcgcgcttgtat

SEQ ID NO: 387940 - DNA, 30 bp, Artificial Sequence
  Synthetic oligonucleotide
cattcgtcgtgagttgtttagtgcttgtat

SEQ ID NO: 387941 - DNA, 30 bp, Artificial Sequence
  Synthetic oligonucleotide
cttacaggtttaggcatcctacagttgtat

SEQ ID NO: 387942 - DNA, 31 bp, Artificial Sequence
  Synthetic oligonucleotide
agcagctatagatttatagaacgcgttgtat

SEQ ID NO: 387943 - DNA, 30 bp, Artificial Sequence
  Synthetic oligonucleotide
cccagcacgatcagaccggtactgttgtat

SEQ ID NO: 387944 - DNA, 30 bp, Artificial Sequence
  Synthetic oligonucleotide
tgccgctgattgtccgcaaacgaaaattat

SEQ ID NO: 387945 - DNA, 30 bp, Artificial Sequence
  Synthetic oligonucleotide
tctctgtcaccttgtaaggtgtacaattat

SEQ ID NO: 387946 - DNA, 30 bp, Artificial Sequence
  Synthetic oligonucleotide
gtgtcctggcatgaatccgtgtgcaattat

SEQ ID NO: 387947 - DNA, 30 bp, Artificial Sequence
  Synthetic oligonucleotide
agaagttgaaggcttggccgactcaattat

SEQ ID NO: 387948 - DNA, 30 bp, Artificial Sequence
  Synthetic oligonucleotide
cttatgcgggggaccctaagcacgaattat

SEQ ID NO: 387949 - DNA, 30 bp, Artificial Sequence
  Synthetic oligonucleotide
tcatagggcgaactctgaatgaataattat

SEQ ID NO: 387950 - DNA, 30 bp, Artificial Sequence
  Synthetic oligonucleotide
gacgtaaggattctgccagcttataattat

SEQ ID NO: 387951 - DNA, 30 bp, Artificial Sequence
  Synthetic oligonucleotide
ggagtaatttgccaagtatctggtaattat

SEQ ID NO: 387952 - DNA, 30 bp, Artificial Sequence
  Synthetic oligonucleotide
gtggacagagatctcggtaaaattaattat

SEQ ID NO: 387953 - DNA, 30 bp, Artificial Sequence
  Synthetic oligonucleotide
cggatagaggttggcaggagcaaacattat

SEQ ID NO: 387954 - DNA, 30 bp, Artificial Sequence
  Synthetic oligonucleotide
aaaaatcataggatcctctgataacattat

SEQ ID NO: 387955 - DNA, 30 bp, Artificial Sequence
  Synthetic oligonucleotide
gggagcggtatcgctatacacgaccattat

SEQ ID NO: 387956 - DNA, 30 bp, Artificial Sequence
  Synthetic oligonucleotide
agtatggcaggttagccacgctcccattat

SEQ ID NO: 387957 - DNA, 30 bp, Artificial Sequence
  Synthetic oligonucleotide
gatccaataacggactcgacatagcattat

SEQ ID NO: 387958 - DNA, 30 bp, Artificial Sequence
  Synthetic oligonucleotide
ctccttcgtaagagaagggggtggcattat

SEQ ID NO: 387959 - DNA, 30 bp, Artificial Sequence
  Synthetic oligonucleotide
cgtcgaatggaaatgcgccctgatcattat

SEQ ID NO: 387960 - DNA, 30 bp, Artificial Sequence
  Synthetic oligonucleotide
tacttgcctccattgcgatcgactcattat

SEQ ID NO: 387961 - DNA, 30 bp, Artificial Sequence
  Synthetic oligonucleotide
tcgtcttttgagacactgattgctcattat

SEQ ID NO: 387962 - DNA, 30 bp, Artificial Sequence
  Synthetic oligonucleotide
agagcggaccgttcttatcgaagtcattat

SEQ ID NO: 387963 - DNA, 30 bp, Artificial Sequence
  Synthetic oligonucleotide
tacaggggtgatagtccagtatgtcattat

SEQ ID NO: 387964 - DNA, 30 bp, Artificial Sequence
  Synthetic oligonucleotide
ctcaaagaagcggacattgttccagattat

SEQ ID NO: 387965 - DNA, 30 bp, Artificial Sequence
  Synthetic oligonucleotide
cattactctaaatccgccatcgacgattat

SEQ ID NO: 387966 - DNA, 30 bp, Artificial Sequence
  Synthetic oligonucleotide
gtgtcaatgcgactgacagagtccgattat

SEQ ID NO: 387967 - DNA, 30 bp, Artificial Sequence
  Synthetic oligonucleotide
ggaaagaatctccaaatgaaatcggattat

SEQ ID NO: 387968 - DNA, 30 bp, Artificial Sequence
  Synthetic oligonucleotide
ttgaaaaccgtggttgcactgcatgattat

SEQ ID NO: 387969 - DNA, 30 bp, Artificial Sequence
  Synthetic oligonucleotide
gcaagactcgtatcgcatgtagatgattat

SEQ ID NO: 387970 - DNA, 30 bp, Artificial Sequence
  Synthetic oligonucleotide
cctgcgggaatcattggacccactgattat

SEQ ID NO: 387971 - DNA, 30 bp, Artificial Sequence
  Synthetic oligonucleotide
tggagagactctggaacctcgcctgattat

SEQ ID NO: 387972 - DNA, 31 bp, Artificial Sequence
  Synthetic oligonucleotide
ttcaaatacccgtgattcatgccaatattat

SEQ ID NO: 387973 - DNA, 30 bp, Artificial Sequence
  Synthetic oligonucleotide
atcttcaggactaaaaagagtacatattat

SEQ ID NO: 387974 - DNA, 30 bp, Artificial Sequence
  Synthetic oligonucleotide
gtgctacggtggttaagggttatatattat

SEQ ID NO: 387975 - DNA, 30 bp, Artificial Sequence
  Synthetic oligonucleotide
gggtgcacaaggggatttgaggtatattat

SEQ ID NO: 387976 - DNA, 30 bp, Artificial Sequence
  Synthetic oligonucleotide
ctggaaggtctgaaccaccaaagctattat

SEQ ID NO: 387977 - DNA, 30 bp, Artificial Sequence
  Synthetic oligonucleotide
taacatttgccaacaggaacacgctattat

SEQ ID NO: 387978 - DNA, 30 bp, Artificial Sequence
  Synthetic oligonucleotide
cttttcacgcaatggtcatgaaattattat

SEQ ID NO: 387979 - DNA, 30 bp, Artificial Sequence
  Synthetic oligonucleotide
gtgaggggaaggttgggtattgcttattat

SEQ ID NO: 387980 - DNA, 30 bp, Artificial Sequence
  Synthetic oligonucleotide
tgtcatcaactcattaatttaagaacttat

SEQ ID NO: 387981 - DNA, 30 bp, Artificial Sequence
  Synthetic oligonucleotide
tcgcgtcactagaatcacatgcgaacttat

SEQ ID NO: 387982 - DNA, 30 bp, Artificial Sequence
  Synthetic oligonucleotide
tcgggtctgctataagtcgcaggaacttat

SEQ ID NO: 387983 - DNA, 30 bp, Artificial Sequence
  Synthetic oligonucleotide
ttcgtgaacacagtctcggttctaacttat

SEQ ID NO: 387984 - DNA, 30 bp, Artificial Sequence
  Synthetic oligonucleotide
gagcggtcttagtcgagcgtgtccacttat

SEQ ID NO: 387985 - DNA, 30 bp, Artificial Sequence
  Synthetic oligonucleotide
cccgctggttgaaaatatacagcgacttat

SEQ ID NO: 387986 - DNA, 30 bp, Artificial Sequence
  Synthetic oligonucleotide
gagcctttcgttaatttattgtggacttat

SEQ ID NO: 387987 - DNA, 30 bp, Artificial Sequence
  Synthetic oligonucleotide
cgagactctgtgcagcagttattgacttat

SEQ ID NO: 387988 - DNA, 30 bp, Artificial Sequence
  Synthetic oligonucleotide
aagcagttgctggaaggtagtggtacttat

SEQ ID NO: 387989 - DNA, 30 bp, Artificial Sequence
  Synthetic oligonucleotide
tgctccctgtagttaagtgattgtacttat

SEQ ID NO: 387990 - DNA, 30 bp, Artificial Sequence
  Synthetic oligonucleotide
taagtgaagcggtagttaggtataccttat

SEQ ID NO: 387991 - DNA, 30 bp, Artificial Sequence
  Synthetic oligonucleotide
tcagttgataggagtaattatgtaccttat

SEQ ID NO: 387992 - DNA, 30 bp, Artificial Sequence
  Synthetic oligonucleotide
gcctagatcgcccatgcgcaatgcccttat

SEQ ID NO: 387993 - DNA, 30 bp, Artificial Sequence
  Synthetic oligonucleotide
gttctaacaaggactcgagcaatcccttat

SEQ ID NO: 387994 - DNA, 30 bp, Artificial Sequence
  Synthetic oligonucleotide
gctagcttctcacgtagttgccggccttat

SEQ ID NO: 387995 - DNA, 30 bp, Artificial Sequence
  Synthetic oligonucleotide
tcggttgcgacagcgctttcttgagcttat

SEQ ID NO: 387996 - DNA, 30 bp, Artificial Sequence
  Synthetic oligonucleotide
ttgtcattacgagagcccttaaaggcttat

SEQ ID NO: 387997 - DNA, 30 bp, Artificial Sequence
  Synthetic oligonucleotide
tgtttgggctgaccgtgctacgaggcttat

SEQ ID NO: 387998 - DNA, 30 bp, Artificial Sequence
  Synthetic oligonucleotide
gtttctcaggcaaatcgttgttgggcttat

SEQ ID NO: 387999 - DNA, 30 bp, Artificial Sequence
  Synthetic oligonucleotide
gttctgatgcggacttgaagagatgcttat

SEQ ID NO: 388000 - DNA, 30 bp, Artificial Sequence
  Synthetic oligonucleotide
ccgcatagctttcgaatcttccaatcttat

SEQ ID NO: 388001 - DNA, 30 bp, Artificial Sequence
  Synthetic oligonucleotide
aagcggggtaaacccaatcgtatatcttat

SEQ ID NO: 388002 - DNA, 30 bp, Artificial Sequence
  Synthetic oligonucleotide
gctacgcggacagagcaatccttatcttat

SEQ ID NO: 388003 - DNA, 30 bp, Artificial Sequence
  Synthetic oligonucleotide
cctctgagattccgggcgatatactcttat

SEQ ID NO: 388004 - DNA, 30 bp, Artificial Sequence
  Synthetic oligonucleotide
acgaactctgggtccttacatgcctcttat

SEQ ID NO: 388005 - DNA, 30 bp, Artificial Sequence
  Synthetic oligonucleotide
ggatcactgcaaacgcatcttcagtcttat

SEQ ID NO: 388006 - DNA, 30 bp, Artificial Sequence
  Synthetic oligonucleotide
cgcggagtagcttaaggtcttgagtcttat

SEQ ID NO: 388007 - DNA, 30 bp, Artificial Sequence
  Synthetic oligonucleotide
catttcggtggtgacaggcacaggtcttat

SEQ ID NO: 388008 - DNA, 30 bp, Artificial Sequence
  Synthetic oligonucleotide
tcccgccgggaataattagcttattcttat

SEQ ID NO: 388009 - DNA, 30 bp, Artificial Sequence
  Synthetic oligonucleotide
gtcttggagtcaacgcgttcactttcttat

SEQ ID NO: 388010 - DNA, 30 bp, Artificial Sequence
  Synthetic oligonucleotide
cggattacgccagtccaatgagtttcttat

SEQ ID NO: 388011 - DNA, 30 bp, Artificial Sequence
  Synthetic oligonucleotide
aagggagcacattcaacgagctaaagttat

SEQ ID NO: 388012 - DNA, 30 bp, Artificial Sequence
  Synthetic oligonucleotide
ttgagataggggtgtgaatattacagttat

SEQ ID NO: 388013 - DNA, 30 bp, Artificial Sequence
  Synthetic oligonucleotide
aactggatgtttaaagatggtgagagttat

SEQ ID NO: 388014 - DNA, 30 bp, Artificial Sequence
  Synthetic oligonucleotide
aaatcaagcggctctagcctctagagttat

SEQ ID NO: 388015 - DNA, 30 bp, Artificial Sequence
  Synthetic oligonucleotide
tcgatcggacttattgttgcatatagttat

SEQ ID NO: 388016 - DNA, 30 bp, Artificial Sequence
  Synthetic oligonucleotide
ccggatgacttcgggctacacactagttat

SEQ ID NO: 388017 - DNA, 30 bp, Artificial Sequence
  Synthetic oligonucleotide
gggtttcgctgatatatcaggcttagttat

SEQ ID NO: 388018 - DNA, 30 bp, Artificial Sequence
  Synthetic oligonucleotide
tagggaaattggcatacaacttaacgttat

SEQ ID NO: 388019 - DNA, 30 bp, Artificial Sequence
  Synthetic oligonucleotide
gtcctgacaacatagtcagggccacgttat

SEQ ID NO: 388020 - DNA, 30 bp, Artificial Sequence
  Synthetic oligonucleotide
aactttgtgatgactggagaactccgttat

SEQ ID NO: 388021 - DNA, 30 bp, Artificial Sequence
  Synthetic oligonucleotide
gaagcgcggtttttcgtcaaggtgcgttat

SEQ ID NO: 388022 - DNA, 30 bp, Artificial Sequence
  Synthetic oligonucleotide
ttactacgatggcgttgggttttgcgttat

SEQ ID NO: 388023 - DNA, 30 bp, Artificial Sequence
  Synthetic oligonucleotide
tatatagcagcttgcgcggacaatcgttat

SEQ ID NO: 388024 - DNA, 30 bp, Artificial Sequence
  Synthetic oligonucleotide
attgggagggtcgtgagagtctttcgttat

SEQ ID NO: 388025 - DNA, 30 bp, Artificial Sequence
  Synthetic oligonucleotide
tttagcatcaagccacgtcgcgaaggttat

SEQ ID NO: 388026 - DNA, 30 bp, Artificial Sequence
  Synthetic oligonucleotide
agccacgcgcgtttcagccgtgtaggttat

SEQ ID NO: 388027 - DNA, 30 bp, Artificial Sequence
  Synthetic oligonucleotide
atcgagcgatccttggatgccatcggttat

SEQ ID NO: 388028 - DNA, 30 bp, Artificial Sequence
  Synthetic oligonucleotide
tgggtttgttaaatatgaatagtcggttat

SEQ ID NO: 388029 - DNA, 30 bp, Artificial Sequence
  Synthetic oligonucleotide
tgataggttggcgtcctagcaacgggttat

SEQ ID NO: 388030 - DNA, 30 bp, Artificial Sequence
  Synthetic oligonucleotide
tgacaaattatgtatgaccgtctgggttat

SEQ ID NO: 388031 - DNA, 30 bp, Artificial Sequence
  Synthetic oligonucleotide
agctgcgtgtggtgttaaatattgggttat

SEQ ID NO: 388032 - DNA, 30 bp, Artificial Sequence
  Synthetic oligonucleotide
tgtagtcttaacgtcaccaaagatggttat

SEQ ID NO: 388033 - DNA, 30 bp, Artificial Sequence
  Synthetic oligonucleotide
tagttagagcggtagctccacgttggttat

SEQ ID NO: 388034 - DNA, 30 bp, Artificial Sequence
  Synthetic oligonucleotide
aaagaagtgcacacatttcgtgttggttat

SEQ ID NO: 388035 - DNA, 30 bp, Artificial Sequence
  Synthetic oligonucleotide
gaagtcaggcattgcaacagggcatgttat

SEQ ID NO: 388036 - DNA, 30 bp, Artificial Sequence
  Synthetic oligonucleotide
tcagtagttcggctgattcttatatgttat

SEQ ID NO: 388037 - DNA, 30 bp, Artificial Sequence
  Synthetic oligonucleotide
agagtatggtcagtgtactgggactgttat

SEQ ID NO: 388038 - DNA, 30 bp, Artificial Sequence
  Synthetic oligonucleotide
ctgtgtctgtcggaggagtgtagctgttat

SEQ ID NO: 388039 - DNA, 30 bp, Artificial Sequence
  Synthetic oligonucleotide
tgttacatgctaggggtaacaggctgttat

SEQ ID NO: 388040 - DNA, 30 bp, Artificial Sequence
  Synthetic oligonucleotide
tcctcacaagacctttgtatgaagtgttat

SEQ ID NO: 388041 - DNA, 30 bp, Artificial Sequence
  Synthetic oligonucleotide
tgtaaaaaaagttcgatatttcagtgttat

SEQ ID NO: 388042 - DNA, 30 bp, Artificial Sequence
  Synthetic oligonucleotide
tgtgtcaggtgctctaacgcggagtgttat

SEQ ID NO: 388043 - DNA, 30 bp, Artificial Sequence
  Synthetic oligonucleotide
caagagagctctacgaagtagcggtgttat

SEQ ID NO: 388044 - DNA, 30 bp, Artificial Sequence
  Synthetic oligonucleotide
gtatgtcagtcgatcatcttgtgttgttat

SEQ ID NO: 388045 - DNA, 30 bp, Artificial Sequence
  Synthetic oligonucleotide
atgacccctattctacggttagtttgttat

SEQ ID NO: 388046 - DNA, 30 bp, Artificial Sequence
  Synthetic oligonucleotide
tgtagggtccggagcggaatcaaaatttat

SEQ ID NO: 388047 - DNA, 30 bp, Artificial Sequence
  Synthetic oligonucleotide
ccggcactaaatatgggaatgtgaatttat

SEQ ID NO: 388048 - DNA, 30 bp, Artificial Sequence
  Synthetic oligonucleotide
cataatggacgccaatacctcgtaatttat

SEQ ID NO: 388049 - DNA, 30 bp, Artificial Sequence
  Synthetic oligonucleotide
tggcattcaatcaagaacagcgccatttat

SEQ ID NO: 388050 - DNA, 30 bp, Artificial Sequence
  Synthetic oligonucleotide
atcgtcagcctggttcgctgttccatttat

SEQ ID NO: 388051 - DNA, 30 bp, Artificial Sequence
  Synthetic oligonucleotide
gatcatgtctgtcaagtattaatcatttat

SEQ ID NO: 388052 - DNA, 30 bp, Artificial Sequence
  Synthetic oligonucleotide
gccgtattcctcggggtattaatcatttat

SEQ ID NO: 388053 - DNA, 30 bp, Artificial Sequence
  Synthetic oligonucleotide
ctaggttcaagtcccacgggggcgatttat

SEQ ID NO: 388054 - DNA, 30 bp, Artificial Sequence
  Synthetic oligonucleotide
taaagcgagtgggctcatttctggatttat

SEQ ID NO: 388055 - DNA, 30 bp, Artificial Sequence
  Synthetic oligonucleotide
tcataccaagcctttggtctaaatatttat

SEQ ID NO: 388056 - DNA, 30 bp, Artificial Sequence
  Synthetic oligonucleotide
tttcgatgttaatagtcaatacatatttat

SEQ ID NO: 388057 - DNA, 30 bp, Artificial Sequence
  Synthetic oligonucleotide
accgtgggaagatcagatcccgatatttat

SEQ ID NO: 388058 - DNA, 30 bp, Artificial Sequence
  Synthetic oligonucleotide
atatacacgattcaggggtatcctatttat

SEQ ID NO: 388059 - DNA, 30 bp, Artificial Sequence
  Synthetic oligonucleotide
ccctatagtagagtctatgagagtatttat

SEQ ID NO: 388060 - DNA, 30 bp, Artificial Sequence
  Synthetic oligonucleotide
aatgagcgtcggtagtatatttgtatttat

SEQ ID NO: 388061 - DNA, 30 bp, Artificial Sequence
  Synthetic oligonucleotide
ctaaatactctgaactgaagtcttatttat

SEQ ID NO: 388062 - DNA, 30 bp, Artificial Sequence
  Synthetic oligonucleotide
cgttggtggacatgtacatacacactttat

SEQ ID NO: 388063 - DNA, 30 bp, Artificial Sequence
  Synthetic oligonucleotide
agggaaaacggatgttgccaaaacctttat

SEQ ID NO: 388064 - DNA, 30 bp, Artificial Sequence
  Synthetic oligonucleotide
tgcacgttctgcagctgctggagcctttat

SEQ ID NO: 388065 - DNA, 30 bp, Artificial Sequence
  Synthetic oligonucleotide
ctgtcaaatcaaaaaaacttccggctttat

SEQ ID NO: 388066 - DNA, 30 bp, Artificial Sequence
  Synthetic oligonucleotide
gacaaagtaagaggcagggggtaagtttat

SEQ ID NO: 388067 - DNA, 30 bp, Artificial Sequence
  Synthetic oligonucleotide
ctacaccgagtcataaaaaaccgagtttat

SEQ ID NO: 388068 - DNA, 30 bp, Artificial Sequence
  Synthetic oligonucleotide
gcacgggttttaataccccgtcgagtttat

SEQ ID NO: 388069 - DNA, 30 bp, Artificial Sequence
  Synthetic oligonucleotide
tcgttatcatatgagcgtagcgccgtttat

SEQ ID NO: 388070 - DNA, 30 bp, Artificial Sequence
  Synthetic oligonucleotide
gcatctttattatgaactaggtgcgtttat

SEQ ID NO: 388071 - DNA, 30 bp, Artificial Sequence
  Synthetic oligonucleotide
gaacttcatagcctttgtactctcgtttat

SEQ ID NO: 388072 - DNA, 30 bp, Artificial Sequence
  Synthetic oligonucleotide
gcgggttttgttcctcatgtacaggtttat

SEQ ID NO: 388073 - DNA, 30 bp, Artificial Sequence
  Synthetic oligonucleotide
gtagctggcttagcggaatccacggtttat

SEQ ID NO: 388074 - DNA, 30 bp, Artificial Sequence
  Synthetic oligonucleotide
ctaatctagggtgcaactcttaaattttat

SEQ ID NO: 388075 - DNA, 30 bp, Artificial Sequence
  Synthetic oligonucleotide
ctgcagtccccgggattttaagaattttat

SEQ ID NO: 388076 - DNA, 30 bp, Artificial Sequence
  Synthetic oligonucleotide
ttaaacacgaaggcgattcacatattttat

SEQ ID NO: 388077 - DNA, 30 bp, Artificial Sequence
  Synthetic oligonucleotide
acgatttggtcattgaagacatgcttttat

SEQ ID NO: 388078 - DNA, 30 bp, Artificial Sequence
  Synthetic oligonucleotide
gttcgaacgtgcatcaggaaaaagttttat

SEQ ID NO: 388079 - DNA, 30 bp, Artificial Sequence
  Synthetic oligonucleotide
gggtatagaatactgggacataaaaaaact

SEQ ID NO: 388080 - DNA, 30 bp, Artificial Sequence
  Synthetic oligonucleotide
gcgtggcctaaatttcctatagaaaaaact

SEQ ID NO: 388081 - DNA, 30 bp, Artificial Sequence
  Synthetic oligonucleotide
tgagatacgcaaatagaatttacaaaaact

SEQ ID NO: 388082 - DNA, 30 bp, Artificial Sequence
  Synthetic oligonucleotide
gttccccaatagtggacgaaagcaaaaact

SEQ ID NO: 388083 - DNA, 30 bp, Artificial Sequence
  Synthetic oligonucleotide
tcctcagtctctatggtctggctaaaaact

SEQ ID NO: 388084 - DNA, 30 bp, Artificial Sequence
  Synthetic oligonucleotide
cgcattgtgtaccgcaaggcacataaaact

SEQ ID NO: 388085 - DNA, 30 bp, Artificial Sequence
  Synthetic oligonucleotide
tgagagcagtagggtcaggtagtacaaact

SEQ ID NO: 388086 - DNA, 30 bp, Artificial Sequence
  Synthetic oligonucleotide
cagagcaacctaaaatcgggacgccaaact

SEQ ID NO: 388087 - DNA, 30 bp, Artificial Sequence
  Synthetic oligonucleotide
aacgtagcgtccgttgtacttcggcaaact

SEQ ID NO: 388088 - DNA, 30 bp, Artificial Sequence
  Synthetic oligonucleotide
gcgcggatccattggggaccgtggcaaact

SEQ ID NO: 388089 - DNA, 30 bp, Artificial Sequence
  Synthetic oligonucleotide
agtaccgcaacggcattattactgcaaact

SEQ ID NO: 388090 - DNA, 30 bp, Artificial Sequence
  Synthetic oligonucleotide
aacggaagtcggtccaggtacgcagaaact

SEQ ID NO: 388091 - DNA, 30 bp, Artificial Sequence
  Synthetic oligonucleotide
gtagttggtgggcgacgtggcccggaaact

SEQ ID NO: 388092 - DNA, 30 bp, Artificial Sequence
  Synthetic oligonucleotide
tgtcctcctaaaagcgatgttagggaaact

SEQ ID NO: 388093 - DNA, 30 bp, Artificial Sequence
  Synthetic oligonucleotide
cagttctctcgtatatgaaatagtgaaact

SEQ ID NO: 388094 - DNA, 30 bp, Artificial Sequence
  Synthetic oligonucleotide
ttttttgaatcggaccatgtgcgtgaaact

SEQ ID NO: 388095 - DNA, 30 bp, Artificial Sequence
  Synthetic oligonucleotide
cagtttgggcgaaagcagcgtcgtgaaact

SEQ ID NO: 388096 - DNA, 30 bp, Artificial Sequence
  Synthetic oligonucleotide
aaaatagatatgcggtcccaggttgaaact

SEQ ID NO: 388097 - DNA, 30 bp, Artificial Sequence
  Synthetic oligonucleotide
ttgcatataatctgtaaagcggtataaact

SEQ ID NO: 388098 - DNA, 30 bp, Artificial Sequence
  Synthetic oligonucleotide
ctagcgtttgcagctccagagtgctaaact

SEQ ID NO: 388099 - DNA, 30 bp, Artificial Sequence
  Synthetic oligonucleotide
atctactatagctatccaaagacgtaaact

SEQ ID NO: 388100 - DNA, 30 bp, Artificial Sequence
  Synthetic oligonucleotide
gtaggcttgtgcggataggccgcgtaaact

SEQ ID NO: 388101 - DNA, 30 bp, Artificial Sequence
  Synthetic oligonucleotide
gatatatctgaacgaccccactcgtaaact

SEQ ID NO: 388102 - DNA, 30 bp, Artificial Sequence
  Synthetic oligonucleotide
taatcaagccctttatggctgtcttaaact

SEQ ID NO: 388103 - DNA, 30 bp, Artificial Sequence
  Synthetic oligonucleotide
gtatattaccctattaagacgaaaacaact

SEQ ID NO: 388104 - DNA, 30 bp, Artificial Sequence
  Synthetic oligonucleotide
ctcactgtacgagacgggcagttaacaact

SEQ ID NO: 388105 - DNA, 30 bp, Artificial Sequence
  Synthetic oligonucleotide
gtgccggtctaacaggattgaccgacaact

SEQ ID NO: 388106 - DNA, 30 bp, Artificial Sequence
  Synthetic oligonucleotide
tcggcgactcagtagattgagcggacaact

SEQ ID NO: 388107 - DNA, 30 bp, Artificial Sequence
  Synthetic oligonucleotide
acggccctcttcggtaaacgcgggacaact

SEQ ID NO: 388108 - DNA, 30 bp, Artificial Sequence
  Synthetic oligonucleotide
catccggacatttgtctaggtcaaccaact

SEQ ID NO: 388109 - DNA, 30 bp, Artificial Sequence
  Synthetic oligonucleotide
ccggaaaccaccgtggttgcaacgccaact

SEQ ID NO: 388110 - DNA, 30 bp, Artificial Sequence
  Synthetic oligonucleotide
gaccaatacctgcctgttaactggccaact

SEQ ID NO: 388111 - DNA, 31 bp, Artificial Sequence
  Synthetic oligonucleotide
atccctaaaaatcaacgatagttggccaact

SEQ ID NO: 388112 - DNA, 30 bp, Artificial Sequence
  Synthetic oligonucleotide
tggattattgccgagttgcatggagcaact

SEQ ID NO: 388113 - DNA, 30 bp, Artificial Sequence
  Synthetic oligonucleotide
ctttgcgtgttttaacctcacatagcaact

SEQ ID NO: 388114 - DNA, 30 bp, Artificial Sequence
  Synthetic oligonucleotide
gttggcttgctgttttatgataccgcaact

SEQ ID NO: 388115 - DNA, 30 bp, Artificial Sequence
  Synthetic oligonucleotide
gtgggatttcggcgttaagtgggcgcaact

SEQ ID NO: 388116 - DNA, 30 bp, Artificial Sequence
  Synthetic oligonucleotide
gtttcggcttcggtttaacccaaatcaact

SEQ ID NO: 388117 - DNA, 30 bp, Artificial Sequence
  Synthetic oligonucleotide
gagtacctaacggtttggtgcacatcaact

SEQ ID NO: 388118 - DNA, 30 bp, Artificial Sequence
  Synthetic oligonucleotide
tcaattggtcgaccccgtctacgatcaact

SEQ ID NO: 388119 - DNA, 30 bp, Artificial Sequence
  Synthetic oligonucleotide
gcataatacagcaagtaatttcagtcaact

SEQ ID NO: 388120 - DNA, 30 bp, Artificial Sequence
  Synthetic oligonucleotide
caagcgacagcagcggtgtgagggtcaact

SEQ ID NO: 388121 - DNA, 30 bp, Artificial Sequence
  Synthetic oligonucleotide
ttatgcatgctcgcgaggtgatattcaact

SEQ ID NO: 388122 - DNA, 30 bp, Artificial Sequence
  Synthetic oligonucleotide
tgtactttcactgagcatggaacttcaact

SEQ ID NO: 388123 - DNA, 30 bp, Artificial Sequence
  Synthetic oligonucleotide
atgctcaacatcttgtggggtcgttcaact

SEQ ID NO: 388124 - DNA, 30 bp, Artificial Sequence
  Synthetic oligonucleotide
tgtgatcagtcgtataatcgacgaagaact

SEQ ID NO: 388125 - DNA, 30 bp, Artificial Sequence
  Synthetic oligonucleotide
gcatgttctttgaagaagtaattaagaact

SEQ ID NO: 388126 - DNA, 30 bp, Artificial Sequence
  Synthetic oligonucleotide
gataacacttgggaaccccggaccagaact

SEQ ID NO: 388127 - DNA, 30 bp, Artificial Sequence
  Synthetic oligonucleotide
ggtttctgaaacagacactaatggagaact

SEQ ID NO: 388128 - DNA, 30 bp, Artificial Sequence
  Synthetic oligonucleotide
taaagatccatgtatcttcgcgatagaact

SEQ ID NO: 388129 - DNA, 30 bp, Artificial Sequence
  Synthetic oligonucleotide
aaaatacaaggttctcgtgctactagaact

SEQ ID NO: 388130 - DNA, 30 bp, Artificial Sequence
  Synthetic oligonucleotide
ccaagaaatgtggaatctggtgttagaact

SEQ ID NO: 388131 - DNA, 30 bp, Artificial Sequence
  Synthetic oligonucleotide
cttgctagtgaagggagatggtcacgaact

SEQ ID NO: 388132 - DNA, 30 bp, Artificial Sequence
  Synthetic oligonucleotide
tatagcggtagattcataattgaccgaact

SEQ ID NO: 388133 - DNA, 30 bp, Artificial Sequence
  Synthetic oligonucleotide
ggagcgagtctcttcaacaggacgcgaact

SEQ ID NO: 388134 - DNA, 30 bp, Artificial Sequence
  Synthetic oligonucleotide
ccgtgcaaatgtcgtccggagactcgaact

SEQ ID NO: 388135 - DNA, 30 bp, Artificial Sequence
  Synthetic oligonucleotide
atacccggtatctccgtacgttctcgaact

SEQ ID NO: 388136 - DNA, 30 bp, Artificial Sequence
  Synthetic oligonucleotide
atgcaccctttattgaaatactaaggaact

SEQ ID NO: 388137 - DNA, 30 bp, Artificial Sequence
  Synthetic oligonucleotide
ggtaagctaatggggtcgaacacaggaact

SEQ ID NO: 388138 - DNA, 30 bp, Artificial Sequence
  Synthetic oligonucleotide
aaacctatgcatggtaaatcgtcaggaact

SEQ ID NO: 388139 - DNA, 30 bp, Artificial Sequence
  Synthetic oligonucleotide
gcgcatcggcagtgtttgctcgtaggaact

SEQ ID NO: 388140 - DNA, 30 bp, Artificial Sequence
  Synthetic oligonucleotide
cagccggactttcttgagtaacagggaact

SEQ ID NO: 388141 - DNA, 30 bp, Artificial Sequence
  Synthetic oligonucleotide
tgtgataagtgatgtagagcttagggaact

SEQ ID NO: 388142 - DNA, 30 bp, Artificial Sequence
  Synthetic oligonucleotide
aatcggatgtcgcaatgtactgggggaact

SEQ ID NO: 388143 - DNA, 30 bp, Artificial Sequence
  Synthetic oligonucleotide
caggaatatgcttccccactcgtgggaact

SEQ ID NO: 388144 - DNA, 30 bp, Artificial Sequence
  Synthetic oligonucleotide
tcgcaagcaagcggggaggctagctgaact

SEQ ID NO: 388145 - DNA, 30 bp, Artificial Sequence
  Synthetic oligonucleotide
gggtagacagcttcagcgcaaatctgaact

SEQ ID NO: 388146 - DNA, 30 bp, Artificial Sequence
  Synthetic oligonucleotide
ctccccgccacagtcctactatagtgaact

SEQ ID NO: 388147 - DNA, 30 bp, Artificial Sequence
  Synthetic oligonucleotide
gagaggatgtgatgccttattttgtgaact

SEQ ID NO: 388148 - DNA, 30 bp, Artificial Sequence
  Synthetic oligonucleotide
ggagtacgctaccggctctgatattgaact

SEQ ID NO: 388149 - DNA, 30 bp, Artificial Sequence
  Synthetic oligonucleotide
ttgctacggttagaaagttgtatttgaact

SEQ ID NO: 388150 - DNA, 30 bp, Artificial Sequence
  Synthetic oligonucleotide
tcacgctgggaggcatagtttatttgaact

SEQ ID NO: 388151 - DNA, 30 bp, Artificial Sequence
  Synthetic oligonucleotide
tcgatcaatgtgtcctacaagctttgaact

SEQ ID NO: 388152 - DNA, 30 bp, Artificial Sequence
  Synthetic oligonucleotide
cttacaacacgtaccgccaatacaataact

SEQ ID NO: 388153 - DNA, 30 bp, Artificial Sequence
  Synthetic oligonucleotide
agtgctagtctacgccgcagaccaataact

SEQ ID NO: 388154 - DNA, 30 bp, Artificial Sequence
  Synthetic oligonucleotide
ggtttgacccacagagtaagaagcataact

SEQ ID NO: 388155 - DNA, 30 bp, Artificial Sequence
  Synthetic oligonucleotide
ggcgcttcataaacctcgatgctcataact

SEQ ID NO: 388156 - DNA, 30 bp, Artificial Sequence
  Synthetic oligonucleotide
tcagaataatgtgctaccaatctcataact

SEQ ID NO: 388157 - DNA, 30 bp, Artificial Sequence
  Synthetic oligonucleotide
ccgtacgccattgcgctcaatctcataact

SEQ ID NO: 388158 - DNA, 30 bp, Artificial Sequence
  Synthetic oligonucleotide
taacctgacaaatttagatcagtcataact

SEQ ID NO: 388159 - DNA, 30 bp, Artificial Sequence
  Synthetic oligonucleotide
ctcgagatgttttgtctcctctagataact

SEQ ID NO: 388160 - DNA, 30 bp, Artificial Sequence
  Synthetic oligonucleotide
ttaagagcacccaaggtctaaaggataact

SEQ ID NO: 388161 - DNA, 30 bp, Artificial Sequence
  Synthetic oligonucleotide
cacttgagcagaaagctacttgtgataact

SEQ ID NO: 388162 - DNA, 30 bp, Artificial Sequence
  Synthetic oligonucleotide
tagtatctcgtaatccaatggttactaact

SEQ ID NO: 388163 - DNA, 30 bp, Artificial Sequence
  Synthetic oligonucleotide
cttcgatgcatgagtaatgatgagctaact

SEQ ID NO: 388164 - DNA, 30 bp, Artificial Sequence
  Synthetic oligonucleotide
gccggacggcgcaaaacgcgtctgctaact

SEQ ID NO: 388165 - DNA, 30 bp, Artificial Sequence
  Synthetic oligonucleotide
gcatgtctcctttaatgttgtgaagtaact

SEQ ID NO: 388166 - DNA, 30 bp, Artificial Sequence
  Synthetic oligonucleotide
tgaacgccgacatgactgtgtgcagtaact

SEQ ID NO: 388167 - DNA, 30 bp, Artificial Sequence
  Synthetic oligonucleotide
gtgttagcacatgttcgcatccgagtaact

SEQ ID NO: 388168 - DNA, 30 bp, Artificial Sequence
  Synthetic oligonucleotide
tgaagagttcaatgttcacgactagtaact

SEQ ID NO: 388169 - DNA, 30 bp, Artificial Sequence
  Synthetic oligonucleotide
atttcgtctgagactcagtctctagtaact

SEQ ID NO: 388170 - DNA, 30 bp, Artificial Sequence
  Synthetic oligonucleotide
ccttggttttgacgggtctctaatgtaact

SEQ ID NO: 388171 - DNA, 30 bp, Artificial Sequence
  Synthetic oligonucleotide
cccgtacgcaaggtagtttttaatgtaact

SEQ ID NO: 388172 - DNA, 30 bp, Artificial Sequence
  Synthetic oligonucleotide
ggtatgtgttcgcaactatagggtgtaact

SEQ ID NO: 388173 - DNA, 30 bp, Artificial Sequence
  Synthetic oligonucleotide
gaatgtaaccagtaattagatcttgtaact

SEQ ID NO: 388174 - DNA, 30 bp, Artificial Sequence
  Synthetic oligonucleotide
gcgatattagtccgatcatgctttgtaact

SEQ ID NO: 388175 - DNA, 30 bp, Artificial Sequence
  Synthetic oligonucleotide
catgtgccttctatcagggatcccttaact

SEQ ID NO: 388176 - DNA, 30 bp, Artificial Sequence
  Synthetic oligonucleotide
agcatttcatttagcatctcgtccttaact

SEQ ID NO: 388177 - DNA, 30 bp, Artificial Sequence
  Synthetic oligonucleotide
ccggctagggtatgtgtgcggaggttaact

SEQ ID NO: 388178 - DNA, 30 bp, Artificial Sequence
  Synthetic oligonucleotide
ttggactattttttcaccattcctttaact

SEQ ID NO: 388179 - DNA, 30 bp, Artificial Sequence
  Synthetic oligonucleotide
ctggctcacacgtagttcttatgtttaact

SEQ ID NO: 388180 - DNA, 30 bp, Artificial Sequence
  Synthetic oligonucleotide
gagcatttgatgccaaagccaataaacact

SEQ ID NO: 388181 - DNA, 30 bp, Artificial Sequence
  Synthetic oligonucleotide
ggtccgtaacataactgacccaacaacact

SEQ ID NO: 388182 - DNA, 30 bp, Artificial Sequence
  Synthetic oligonucleotide
gatactttaatcctaactcaggccaacact

SEQ ID NO: 388183 - DNA, 30 bp, Artificial Sequence
  Synthetic oligonucleotide
ggccttagccgttgccatcctcaacacact

SEQ ID NO: 388184 - DNA, 30 bp, Artificial Sequence
  Synthetic oligonucleotide
ggggccaagctggcacaggacgcacacact

SEQ ID NO: 388185 - DNA, 30 bp, Artificial Sequence
  Synthetic oligonucleotide
gagacggggttcacatgttctcgacacact

SEQ ID NO: 388186 - DNA, 30 bp, Artificial Sequence
  Synthetic oligonucleotide
tctaggatgtccggaaggattgtacacact

SEQ ID NO: 388187 - DNA, 30 bp, Artificial Sequence
  Synthetic oligonucleotide
taatatactgaccaataccatccccacact

SEQ ID NO: 388188 - DNA, 30 bp, Artificial Sequence
  Synthetic oligonucleotide
tggagctatacccagctcacatacgacact

SEQ ID NO: 388189 - DNA, 30 bp, Artificial Sequence
  Synthetic oligonucleotide
caggtgaggaatgtttggttagccgacact

SEQ ID NO: 388190 - DNA, 30 bp, Artificial Sequence
  Synthetic oligonucleotide
cgctaagagtcacgccacgcggctgacact

SEQ ID NO: 388191 - DNA, 30 bp, Artificial Sequence
  Synthetic oligonucleotide
cggcaggcgaacagttcaagatgtgacact

SEQ ID NO: 388192 - DNA, 30 bp, Artificial Sequence
  Synthetic oligonucleotide
ccaacggaaatatactttctaccatacact

SEQ ID NO: 388193 - DNA, 30 bp, Artificial Sequence
  Synthetic oligonucleotide
caagactatgtgttgagagcttgatacact

SEQ ID NO: 388194 - DNA, 30 bp, Artificial Sequence
  Synthetic oligonucleotide
cagatttatctgaaggcagtcctctacact

SEQ ID NO: 388195 - DNA, 30 bp, Artificial Sequence
  Synthetic oligonucleotide
tttgtatgaaaattgaaggaaaagtacact

SEQ ID NO: 388196 - DNA, 30 bp, Artificial Sequence
  Synthetic oligonucleotide
gcaggcgaccgggggtctcaatagtacact

SEQ ID NO: 388197 - DNA, 30 bp, Artificial Sequence
  Synthetic oligonucleotide
cccgaaattttaaggttaacctagtacact

SEQ ID NO: 388198 - DNA, 30 bp, Artificial Sequence
  Synthetic oligonucleotide
cactgatcacatacagcggcgtagtacact

SEQ ID NO: 388199 - DNA, 30 bp, Artificial Sequence
  Synthetic oligonucleotide
tagcctataggtctctattcgtattacact

SEQ ID NO: 388200 - DNA, 30 bp, Artificial Sequence
  Synthetic oligonucleotide
cgtgatgatattgtccttcggatttacact

SEQ ID NO: 388201 - DNA, 30 bp, Artificial Sequence
  Synthetic oligonucleotide
gcggggcaatgtttgggaccaccaaccact

SEQ ID NO: 388202 - DNA, 30 bp, Artificial Sequence
  Synthetic oligonucleotide
gtagaattctctagatctactaagaccact

SEQ ID NO: 388203 - DNA, 30 bp, Artificial Sequence
  Synthetic oligonucleotide
gtgattgtgaaaggacatctgactaccact

SEQ ID NO: 388204 - DNA, 30 bp, Artificial Sequence
  Synthetic oligonucleotide
tgatcgcaatattcggtggatgaacccact

SEQ ID NO: 388205 - DNA, 30 bp, Artificial Sequence
  Synthetic oligonucleotide
gatgcgagttacctatttatgatacccact

SEQ ID NO: 388206 - DNA, 30 bp, Artificial Sequence
  Synthetic oligonucleotide
gggtttgagaaagatatggggaaccccact

SEQ ID NO: 388207 - DNA, 30 bp, Artificial Sequence
  Synthetic oligonucleotide
tgggtattacgtcgctgattcgttcccact

SEQ ID NO: 388208 - DNA, 30 bp, Artificial Sequence
  Synthetic oligonucleotide
atagggtattcaaagatgtactcggccact

SEQ ID NO: 388209 - DNA, 30 bp, Artificial Sequence
  Synthetic oligonucleotide
tatacccccggtcatcgacttggtgccact

SEQ ID NO: 388210 - DNA, 30 bp, Artificial Sequence
  Synthetic oligonucleotide
tacagcactggttgaacgcccttatccact

SEQ ID NO: 388211 - DNA, 30 bp, Artificial Sequence
  Synthetic oligonucleotide
agagatcagcacgtgagataatactccact

SEQ ID NO: 388212 - DNA, 30 bp, Artificial Sequence
  Synthetic oligonucleotide
gcaagaaattagctatgcgtaatgtccact

SEQ ID NO: 388213 - DNA, 31 bp, Artificial Sequence
  Synthetic oligonucleotide
tctgccttttatgatggttcgatcttccact

SEQ ID NO: 388214 - DNA, 30 bp, Artificial Sequence
  Synthetic oligonucleotide
catcgtgtaatatagttaaataaaagcact

SEQ ID NO: 388215 - DNA, 30 bp, Artificial Sequence
  Synthetic oligonucleotide
gagatgaagcattggttctgaagaagcact

SEQ ID NO: 388216 - DNA, 30 bp, Artificial Sequence
  Synthetic oligonucleotide
ttttgaccctctggaaaacggcgaagcact

SEQ ID NO: 388217 - DNA, 30 bp, Artificial Sequence
  Synthetic oligonucleotide
tacacccgtcgaggcgccaacgacagcact

SEQ ID NO: 388218 - DNA, 30 bp, Artificial Sequence
  Synthetic oligonucleotide
acccgcggaaacgcaaaaaggcatagcact

SEQ ID NO: 388219 - DNA, 30 bp, Artificial Sequence
  Synthetic oligonucleotide
gcgtgactcaaacaattctatcaacgcact

SEQ ID NO: 388220 - DNA, 30 bp, Artificial Sequence
  Synthetic oligonucleotide
aggcattagctgaagtggtctcaacgcact

SEQ ID NO: 388221 - DNA, 30 bp, Artificial Sequence
  Synthetic oligonucleotide
atttacggcagattccaggaccgacgcact

SEQ ID NO: 388222 - DNA, 30 bp, Artificial Sequence
  Synthetic oligonucleotide
ggtgcggactatgtcggggacaggcgcact

SEQ ID NO: 388223 - DNA, 30 bp, Artificial Sequence
  Synthetic oligonucleotide
gcatgaaaccgtgtaggttaaggtcgcact

SEQ ID NO: 388224 - DNA, 30 bp, Artificial Sequence
  Synthetic oligonucleotide
ggccgcagtcttatttgagggtttcgcact

SEQ ID NO: 388225 - DNA, 30 bp, Artificial Sequence
  Synthetic oligonucleotide
aagttggtagtataagtaccaccaggcact

SEQ ID NO: 388226 - DNA, 30 bp, Artificial Sequence
  Synthetic oligonucleotide
cctagtctgttcatagttgtttgcggcact

SEQ ID NO: 388227 - DNA, 30 bp, Artificial Sequence
  Synthetic oligonucleotide
tcatcgtacaaagggacccgtactggcact

SEQ ID NO: 388228 - DNA, 30 bp, Artificial Sequence
  Synthetic oligonucleotide
aaagtcttcatcgttcgggctggtggcact

SEQ ID NO: 388229 - DNA, 30 bp, Artificial Sequence
  Synthetic oligonucleotide
cggtctcgccggcttagaagcaaatgcact

SEQ ID NO: 388230 - DNA, 30 bp, Artificial Sequence
  Synthetic oligonucleotide
cttattctagtagggggacgacgatgcact

SEQ ID NO: 388231 - DNA, 30 bp, Artificial Sequence
  Synthetic oligonucleotide
atttcctccacaatataatcgaactgcact

SEQ ID NO: 388232 - DNA, 30 bp, Artificial Sequence
  Synthetic oligonucleotide
gcacaagttgcgtggtcatcccgctgcact

SEQ ID NO: 388233 - DNA, 30 bp, Artificial Sequence
  Synthetic oligonucleotide
aggctatttctttccagcgtgacgtgcact

SEQ ID NO: 388234 - DNA, 30 bp, Artificial Sequence
  Synthetic oligonucleotide
ggagtctaagtgcaatagtttacttgcact

SEQ ID NO: 388235 - DNA, 30 bp, Artificial Sequence
  Synthetic oligonucleotide
agagcccagcgtttccacggttgttgcact

SEQ ID NO: 388236 - DNA, 30 bp, Artificial Sequence
  Synthetic oligonucleotide
acgggcaggaactttttggctttaatcact

SEQ ID NO: 388237 - DNA, 30 bp, Artificial Sequence
  Synthetic oligonucleotide
gatcgttgctactccgagagttgcatcact

SEQ ID NO: 388238 - DNA, 30 bp, Artificial Sequence
  Synthetic oligonucleotide
ttgaaaagcgtgggcctgtaattcatcact

SEQ ID NO: 388239 - DNA, 30 bp, Artificial Sequence
  Synthetic oligonucleotide
tggctagacaagcatgagtcttagatcact

SEQ ID NO: 388240 - DNA, 30 bp, Artificial Sequence
  Synthetic oligonucleotide
ggtgggcgccatactcgctacgcgatcact

SEQ ID NO: 388241 - DNA, 30 bp, Artificial Sequence
  Synthetic oligonucleotide
atacatgcttattctcgtaaagggatcact

SEQ ID NO: 388242 - DNA, 30 bp, Artificial Sequence
  Synthetic oligonucleotide
gactctatgcgtttttcttaggctatcact

SEQ ID NO: 388243 - DNA, 30 bp, Artificial Sequence
  Synthetic oligonucleotide
ataagtgtcggcagacacaactctatcact

SEQ ID NO: 388244 - DNA, 30 bp, Artificial Sequence
  Synthetic oligonucleotide
gctttagaatcgtattatgggattatcact

SEQ ID NO: 388245 - DNA, 30 bp, Artificial Sequence
  Synthetic oligonucleotide
taacccttaaactatcgtcttacactcact

SEQ ID NO: 388246 - DNA, 30 bp, Artificial Sequence
  Synthetic oligonucleotide
tggagtctgcggggtataagaaacctcact

SEQ ID NO: 388247 - DNA, 30 bp, Artificial Sequence
  Synthetic oligonucleotide
cttagcaccggacttctgacccgcctcact

SEQ ID NO: 388248 - DNA, 30 bp, Artificial Sequence
  Synthetic oligonucleotide
ctctactccggctaacttgtacagctcact

SEQ ID NO: 388249 - DNA, 30 bp, Artificial Sequence
  Synthetic oligonucleotide
tctgcaagtcggagaagcagatttctcact

SEQ ID NO: 388250 - DNA, 30 bp, Artificial Sequence
  Synthetic oligonucleotide
aacctttgtgcagggagttaatgagtcact

SEQ ID NO: 388251 - DNA, 30 bp, Artificial Sequence
  Synthetic oligonucleotide
tggttgtcacgttccgtattagatgtcact

SEQ ID NO: 388252 - DNA, 30 bp, Artificial Sequence
  Synthetic oligonucleotide
agacttaattcgtatatatattaattcact

SEQ ID NO: 388253 - DNA, 30 bp, Artificial Sequence
  Synthetic oligonucleotide
attaaaatcggtcatggatttttattcact

SEQ ID NO: 388254 - DNA, 30 bp, Artificial Sequence
  Synthetic oligonucleotide
tgccagtttgcagaagaggacacgttcact

SEQ ID NO: 388255 - DNA, 30 bp, Artificial Sequence
  Synthetic oligonucleotide
agagaagctaagccttataggcgaaagact

SEQ ID NO: 388256 - DNA, 30 bp, Artificial Sequence
  Synthetic oligonucleotide
gccattcgtgacccggatgagctaaagact

SEQ ID NO: 388257 - DNA, 30 bp, Artificial Sequence
  Synthetic oligonucleotide
gctatgatggacaagtttactttcaagact

SEQ ID NO: 388258 - DNA, 30 bp, Artificial Sequence
  Synthetic oligonucleotide
gacacgatgaagacaactaaatctaagact

SEQ ID NO: 388259 - DNA, 30 bp, Artificial Sequence
  Synthetic oligonucleotide
ttatagcgtatacagcaggcttttaagact

SEQ ID NO: 388260 - DNA, 30 bp, Artificial Sequence
  Synthetic oligonucleotide
ccatcagcaagtgtgtgcaaggaacagact

SEQ ID NO: 388261 - DNA, 30 bp, Artificial Sequence
  Synthetic oligonucleotide
acggtctcctaatcagcggccggacagact

SEQ ID NO: 388262 - DNA, 30 bp, Artificial Sequence
  Synthetic oligonucleotide
tattaaccaatgttcagagtgatccagact

SEQ ID NO: 388263 - DNA, 30 bp, Artificial Sequence
  Synthetic oligonucleotide
gccccttcgggtcctatgagcaagcagact

SEQ ID NO: 388264 - DNA, 30 bp, Artificial Sequence
  Synthetic oligonucleotide
gattcccagggggtgtctcaagcgcagact

SEQ ID NO: 388265 - DNA, 30 bp, Artificial Sequence
  Synthetic oligonucleotide
tgttagtctgacccaatgaagtggcagact

SEQ ID NO: 388266 - DNA, 30 bp, Artificial Sequence
  Synthetic oligonucleotide
gctgcgacttagaagcaagttgatcagact

SEQ ID NO: 388267 - DNA, 30 bp, Artificial Sequence
  Synthetic oligonucleotide
tcattcaatttctgaggtggtcgtcagact

SEQ ID NO: 388268 - DNA, 30 bp, Artificial Sequence
  Synthetic oligonucleotide
ccggggttagttccagcgttctttcagact

SEQ ID NO: 388269 - DNA, 30 bp, Artificial Sequence
  Synthetic oligonucleotide
ttacacggcttaattgtgccgtgatagact

SEQ ID NO: 388270 - DNA, 30 bp, Artificial Sequence
  Synthetic oligonucleotide
gtagccggatatagtcgaagatactagact

SEQ ID NO: 388271 - DNA, 30 bp, Artificial Sequence
  Synthetic oligonucleotide
tataccatgggacggcgtaggcgctagact

SEQ ID NO: 388272 - DNA, 30 bp, Artificial Sequence
  Synthetic oligonucleotide
gtggggggagatagccgagcatgctagact

SEQ ID NO: 388273 - DNA, 30 bp, Artificial Sequence
  Synthetic oligonucleotide
gctatggtgggtcaaaaatatacgtagact

SEQ ID NO: 388274 - DNA, 30 bp, Artificial Sequence
  Synthetic oligonucleotide
tttctttcggacttcgccggtcattagact

SEQ ID NO: 388275 - DNA, 30 bp, Artificial Sequence
  Synthetic oligonucleotide
ggtttcgttatttttgctagtacttagact

SEQ ID NO: 388276 - DNA, 30 bp, Artificial Sequence
  Synthetic oligonucleotide
tttcacggccggggcgcgcatctttagact

SEQ ID NO: 388277 - DNA, 30 bp, Artificial Sequence
  Synthetic oligonucleotide
acgcttgttagacttcctagagaaacgact

SEQ ID NO: 388278 - DNA, 30 bp, Artificial Sequence
  Synthetic oligonucleotide
aagacgggcgcgcggttcaggttgacgact

SEQ ID NO: 388279 - DNA, 30 bp, Artificial Sequence
  Synthetic oligonucleotide
gctattatcttgaacttggtagaaccgact

SEQ ID NO: 388280 - DNA, 30 bp, Artificial Sequence
  Synthetic oligonucleotide
cctacggttaaataacctctaggaccgact

SEQ ID NO: 388281 - DNA, 30 bp, Artificial Sequence
  Synthetic oligonucleotide
gcatgattaaaaggcctttttctaccgact

SEQ ID NO: 388282 - DNA, 30 bp, Artificial Sequence
  Synthetic oligonucleotide
gggcacgggatgtatagacaattcccgact

SEQ ID NO: 388283 - DNA, 30 bp, Artificial Sequence
  Synthetic oligonucleotide
cgagttcatatcagactacagcaagcgact

SEQ ID NO: 388284 - DNA, 30 bp, Artificial Sequence
  Synthetic oligonucleotide
gattgatgaaatgttatgtctttagcgact

SEQ ID NO: 388285 - DNA, 30 bp, Artificial Sequence
  Synthetic oligonucleotide
cggaattgcttgttacgctcgcactcgact

SEQ ID NO: 388286 - DNA, 30 bp, Artificial Sequence
  Synthetic oligonucleotide
ggcgttttgaaaaagtctgatgattcgact

SEQ ID NO: 388287 - DNA, 30 bp, Artificial Sequence
  Synthetic oligonucleotide
cacccttgtccttgggaagacgtaaggact

SEQ ID NO: 388288 - DNA, 30 bp, Artificial Sequence
  Synthetic oligonucleotide
gtactacttagagaagagcttgtaaggact

SEQ ID NO: 388289 - DNA, 30 bp, Artificial Sequence
  Synthetic oligonucleotide
ggacgtagatagtgcattttacacaggact

SEQ ID NO: 388290 - DNA, 30 bp, Artificial Sequence
  Synthetic oligonucleotide
gcaggtagcgattgtaggagcggcaggact

SEQ ID NO: 388291 - DNA, 30 bp, Artificial Sequence
  Synthetic oligonucleotide
ttcgagtagacatatttaccactcaggact

SEQ ID NO: 388292 - DNA, 30 bp, Artificial Sequence
  Synthetic oligonucleotide
ctagtgaatgcaagggttgtctcgaggact

SEQ ID NO: 388293 - DNA, 30 bp, Artificial Sequence
  Synthetic oligonucleotide
acgattactctgtggtctctcgggaggact

SEQ ID NO: 388294 - DNA, 30 bp, Artificial Sequence
  Synthetic oligonucleotide
gggcgttgtataagttcagagatccggact

SEQ ID NO: 388295 - DNA, 30 bp, Artificial Sequence
  Synthetic oligonucleotide
aatagcgccggacgtgctgggcagcggact

SEQ ID NO: 388296 - DNA, 30 bp, Artificial Sequence
  Synthetic oligonucleotide
ttcaaatcgcgaataatcacttatcggact

SEQ ID NO: 388297 - DNA, 30 bp, Artificial Sequence
  Synthetic oligonucleotide
ccctgaatagaaagcccggtggtagggact

SEQ ID NO: 388298 - DNA, 30 bp, Artificial Sequence
  Synthetic oligonucleotide
tgtggtgctaatggcttcgttgatgggact

SEQ ID NO: 388299 - DNA, 30 bp, Artificial Sequence
  Synthetic oligonucleotide
agtgtcttcatatactcgtttggtgggact

SEQ ID NO: 388300 - DNA, 30 bp, Artificial Sequence
  Synthetic oligonucleotide
cagagccttggtaaggaagttccatggact

SEQ ID NO: 388301 - DNA, 30 bp, Artificial Sequence
  Synthetic oligonucleotide
ccttgccgtgggtcaaacgaaacgtggact

SEQ ID NO: 388302 - DNA, 30 bp, Artificial Sequence
  Synthetic oligonucleotide
cctcgccactagttccctggtcggtggact

SEQ ID NO: 388303 - DNA, 30 bp, Artificial Sequence
  Synthetic oligonucleotide
ccccgtgtggatggttcttctgattggact

SEQ ID NO: 388304 - DNA, 30 bp, Artificial Sequence
  Synthetic oligonucleotide
gtctttgactttttttcgttggcaatgact

SEQ ID NO: 388305 - DNA, 30 bp, Artificial Sequence
  Synthetic oligonucleotide
actccgtatgacaccagataatcgatgact

SEQ ID NO: 388306 - DNA, 30 bp, Artificial Sequence
  Synthetic oligonucleotide
aagtccataatataaaattggagtatgact

SEQ ID NO: 388307 - DNA, 30 bp, Artificial Sequence
  Synthetic oligonucleotide
taattgttgcgagtactcagtcagctgact

SEQ ID NO: 388308 - DNA, 30 bp, Artificial Sequence
  Synthetic oligonucleotide
ctcccctgcacaattctccgtcaagtgact

SEQ ID NO: 388309 - DNA, 30 bp, Artificial Sequence
  Synthetic oligonucleotide
agaaacaatgggcggggttcaagagtgact

SEQ ID NO: 388310 - DNA, 30 bp, Artificial Sequence
  Synthetic oligonucleotide
gcaacatacgtcggccgtattatagtgact

SEQ ID NO: 388311 - DNA, 30 bp, Artificial Sequence
  Synthetic oligonucleotide
agaacctggatgcaggtgattctagtgact

SEQ ID NO: 388312 - DNA, 30 bp, Artificial Sequence
  Synthetic oligonucleotide
ctgataaggttggcggctagattcgtgact

SEQ ID NO: 388313 - DNA, 30 bp, Artificial Sequence
  Synthetic oligonucleotide
tccaactgtagattatcgtaactattgact

SEQ ID NO: 388314 - DNA, 30 bp, Artificial Sequence
  Synthetic oligonucleotide
tcgtcagccgacaaaaccgacgccttgact

SEQ ID NO: 388315 - DNA, 30 bp, Artificial Sequence
  Synthetic oligonucleotide
cactacaatttcaaacgccgtggcttgact

SEQ ID NO: 388316 - DNA, 30 bp, Artificial Sequence
  Synthetic oligonucleotide
gaataacttgtgactgcggccactttgact

SEQ ID NO: 388317 - DNA, 30 bp, Artificial Sequence
  Synthetic oligonucleotide
gatccacgtcgaccagctccgtctttgact

SEQ ID NO: 388318 - DNA, 30 bp, Artificial Sequence
  Synthetic oligonucleotide
tacgtaccttagatactttcatgtttgact

SEQ ID NO: 388319 - DNA, 29 bp, Artificial Sequence
  Synthetic oligonucleotide
caactgaagcaacacacacggttttgact

SEQ ID NO: 388320 - DNA, 31 bp, Artificial Sequence
  Synthetic oligonucleotide
tgcgtgagggaccacactagcttttttgact

SEQ ID NO: 388321 - DNA, 30 bp, Artificial Sequence
  Synthetic oligonucleotide
gcaaatccagggcctgtcagattcaatact

SEQ ID NO: 388322 - DNA, 30 bp, Artificial Sequence
  Synthetic oligonucleotide
atagacatatgggcatcaacgttcaatact

SEQ ID NO: 388323 - DNA, 30 bp, Artificial Sequence
  Synthetic oligonucleotide
ggatagagggagctattactagagaatact

SEQ ID NO: 388324 - DNA, 30 bp, Artificial Sequence
  Synthetic oligonucleotide
taatacctgcgatcagaacgcatgaatact

SEQ ID NO: 388325 - DNA, 30 bp, Artificial Sequence
  Synthetic oligonucleotide
cagactctataaggatgtaacgtgaatact

SEQ ID NO: 388326 - DNA, 30 bp, Artificial Sequence
  Synthetic oligonucleotide
tacggtgagacaaatgtagcaggtaatact

SEQ ID NO: 388327 - DNA, 30 bp, Artificial Sequence
  Synthetic oligonucleotide
ccactcattagtgatttgggacagcatact

SEQ ID NO: 388328 - DNA, 30 bp, Artificial Sequence
  Synthetic oligonucleotide
ttcatgtgctcaccagaaggatgtcatact

SEQ ID NO: 388329 - DNA, 30 bp, Artificial Sequence
  Synthetic oligonucleotide
aaagcccgcttacgactgcccatagatact

SEQ ID NO: 388330 - DNA, 30 bp, Artificial Sequence
  Synthetic oligonucleotide
gttgtcggttatacgcataggcccgatact

SEQ ID NO: 388331 - DNA, 30 bp, Artificial Sequence
  Synthetic oligonucleotide
catttctatatcccttagcaaagcgatact

SEQ ID NO: 388332 - DNA, 30 bp, Artificial Sequence
  Synthetic oligonucleotide
gcaattccgtttagagatgtgctggatact

SEQ ID NO: 388333 - DNA, 30 bp, Artificial Sequence
  Synthetic oligonucleotide
acgttacgcgttaagtagttaggatatact

SEQ ID NO: 388334 - DNA, 30 bp, Artificial Sequence
  Synthetic oligonucleotide
gtgagagtctttctaccacgcctatatact

SEQ ID NO: 388335 - DNA, 30 bp, Artificial Sequence
  Synthetic oligonucleotide
gaggtttgtatcgggtatacaccctatact

SEQ ID NO: 388336 - DNA, 30 bp, Artificial Sequence
  Synthetic oligonucleotide
taggtgaaaagactgagtcaagcctatact

SEQ ID NO: 388337 - DNA, 30 bp, Artificial Sequence
  Synthetic oligonucleotide
tgaccttgtatcgcctgcctgctgtatact

SEQ ID NO: 388338 - DNA, 30 bp, Artificial Sequence
  Synthetic oligonucleotide
caaataaactgtggatttaggaattatact

SEQ ID NO: 388339 - DNA, 30 bp, Artificial Sequence
  Synthetic oligonucleotide
gagacgtcgctgccgacaaaattttatact

SEQ ID NO: 388340 - DNA, 30 bp, Artificial Sequence
  Synthetic oligonucleotide
actaatttctaagtttgctagtcaactact

SEQ ID NO: 388341 - DNA, 30 bp, Artificial Sequence
  Synthetic oligonucleotide
aggaactccggtgaagaccgcaggactact

SEQ ID NO: 388342 - DNA, 30 bp, Artificial Sequence
  Synthetic oligonucleotide
attagcaaatttacagtctctcaacctact

SEQ ID NO: 388343 - DNA, 30 bp, Artificial Sequence
  Synthetic oligonucleotide
gttatgtaaatatacctggggcggcctact

SEQ ID NO: 388344 - DNA, 30 bp, Artificial Sequence
  Synthetic oligonucleotide
cgacgcaaggagatacggcgttggcctact

SEQ ID NO: 388345 - DNA, 30 bp, Artificial Sequence
  Synthetic oligonucleotide
gaaccgcatgtccggtagttccgtcctact

SEQ ID NO: 388346 - DNA, 30 bp, Artificial Sequence
  Synthetic oligonucleotide
actattatgtcgatcatttcaggtcctact

SEQ ID NO: 388347 - DNA, 30 bp, Artificial Sequence
  Synthetic oligonucleotide
gcaagtaagagccagatgggcattcctact

SEQ ID NO: 388348 - DNA, 30 bp, Artificial Sequence
  Synthetic oligonucleotide
gaccctgggactgtacgtgatgttcctact

SEQ ID NO: 388349 - DNA, 30 bp, Artificial Sequence
  Synthetic oligonucleotide
gcgaagaccggcgactcggtctgcgctact

SEQ ID NO: 388350 - DNA, 30 bp, Artificial Sequence
  Synthetic oligonucleotide
cttaggtaccgcccaatgtagaaggctact

SEQ ID NO: 388351 - DNA, 30 bp, Artificial Sequence
  Synthetic oligonucleotide
aacagaaaatgtgcgagctttccggctact

SEQ ID NO: 388352 - DNA, 30 bp, Artificial Sequence
  Synthetic oligonucleotide
agccccaatcgccttatcgtaatggctact

SEQ ID NO: 388353 - DNA, 30 bp, Artificial Sequence
  Synthetic oligonucleotide
caaggctacggtgtctcctgctatgctact

SEQ ID NO: 388354 - DNA, 30 bp, Artificial Sequence
  Synthetic oligonucleotide
tattggtaagctatcgagattattgctact

SEQ ID NO: 388355 - DNA, 30 bp, Artificial Sequence
  Synthetic oligonucleotide
ttagaatggcaaatccggcgacttgctact

SEQ ID NO: 388356 - DNA, 30 bp, Artificial Sequence
  Synthetic oligonucleotide
caccttgaatatccataaacaccatctact

SEQ ID NO: 388357 - DNA, 30 bp, Artificial Sequence
  Synthetic oligonucleotide
cctagtcttaaaggtgactaccgctctact

SEQ ID NO: 388358 - DNA, 30 bp, Artificial Sequence
  Synthetic oligonucleotide
ctcgaagattcacctggtccggagtctact

SEQ ID NO: 388359 - DNA, 30 bp, Artificial Sequence
  Synthetic oligonucleotide
aaccataaacagctcatctgaacgtctact

SEQ ID NO: 388360 - DNA, 30 bp, Artificial Sequence
  Synthetic oligonucleotide
ctgactcgcgttcagagaagaatgtctact

SEQ ID NO: 388361 - DNA, 30 bp, Artificial Sequence
  Synthetic oligonucleotide
tagagggattttaatggcttgttgtctact

SEQ ID NO: 388362 - DNA, 30 bp, Artificial Sequence
  Synthetic oligonucleotide
ccaacaggtacgtaagcaatgtgttctact

SEQ ID NO: 388363 - DNA, 30 bp, Artificial Sequence
  Synthetic oligonucleotide
ggttcccgcattctgcttttattaagtact

SEQ ID NO: 388364 - DNA, 30 bp, Artificial Sequence
  Synthetic oligonucleotide
gtccattattttctaagctctagcagtact

SEQ ID NO: 388365 - DNA, 30 bp, Artificial Sequence
  Synthetic oligonucleotide
ggcattgcaacctctgatgtttagagtact

SEQ ID NO: 388366 - DNA, 30 bp, Artificial Sequence
  Synthetic oligonucleotide
tcctagctaacgaccctataactacgtact

SEQ ID NO: 388367 - DNA, 30 bp, Artificial Sequence
  Synthetic oligonucleotide
ataggatgataacttctgcagctacgtact

SEQ ID NO: 388368 - DNA, 30 bp, Artificial Sequence
  Synthetic oligonucleotide
agaagtttattgattccctctaagcgtact

SEQ ID NO: 388369 - DNA, 30 bp, Artificial Sequence
  Synthetic oligonucleotide
gcacagaacatcggtactggggctcgtact

SEQ ID NO: 388370 - DNA, 30 bp, Artificial Sequence
  Synthetic oligonucleotide
gcctggcgaggccaccttgctagtcgtact

SEQ ID NO: 388371 - DNA, 30 bp, Artificial Sequence
  Synthetic oligonucleotide
ggtattacaggggggcatggatcaggtact

SEQ ID NO: 388372 - DNA, 30 bp, Artificial Sequence
  Synthetic oligonucleotide
tttccgcgatatggcagccacaccggtact

SEQ ID NO: 388373 - DNA, 30 bp, Artificial Sequence
  Synthetic oligonucleotide
gtccggtctgacgactccgagggcggtact

SEQ ID NO: 388374 - DNA, 30 bp, Artificial Sequence
  Synthetic oligonucleotide
tcagagtgtgcctttcgtcgaaagggtact

SEQ ID NO: 388375 - DNA, 30 bp, Artificial Sequence
  Synthetic oligonucleotide
aagatcaagtagactccgccggagggtact

SEQ ID NO: 388376 - DNA, 30 bp, Artificial Sequence
  Synthetic oligonucleotide
gttaacgcgatgtcttcagcatcgggtact

SEQ ID NO: 388377 - DNA, 30 bp, Artificial Sequence
  Synthetic oligonucleotide
tagagcgtcgatgggtggtgggtgggtact

SEQ ID NO: 388378 - DNA, 30 bp, Artificial Sequence
  Synthetic oligonucleotide
cttcgtgactataccgaaagaaatggtact

SEQ ID NO: 388379 - DNA, 30 bp, Artificial Sequence
  Synthetic oligonucleotide
tcaaaagaatgataggttcaagatggtact

SEQ ID NO: 388380 - DNA, 30 bp, Artificial Sequence
  Synthetic oligonucleotide
cggcttacgtgcatcagtttatatggtact

SEQ ID NO: 388381 - DNA, 30 bp, Artificial Sequence
  Synthetic oligonucleotide
caagaatgtaagtccactgtctttggtact

SEQ ID NO: 388382 - DNA, 30 bp, Artificial Sequence
  Synthetic oligonucleotide
tacaacaaagcagacatttgttttggtact

SEQ ID NO: 388383 - DNA, 30 bp, Artificial Sequence
  Synthetic oligonucleotide
ggtgggatcgtctgatcccacgaatgtact

SEQ ID NO: 388384 - DNA, 30 bp, Artificial Sequence
  Synthetic oligonucleotide
gatcggcataacttccgtgccagatgtact

SEQ ID NO: 388385 - DNA, 30 bp, Artificial Sequence
  Synthetic oligonucleotide
gtactgaccggaattcctttacactgtact

SEQ ID NO: 388386 - DNA, 30 bp, Artificial Sequence
  Synthetic oligonucleotide
gtctggtaggaccacagttcaggctgtact

SEQ ID NO: 388387 - DNA, 30 bp, Artificial Sequence
  Synthetic oligonucleotide
gtctcccatgaatatctcaataagtgtact

SEQ ID NO: 388388 - DNA, 30 bp, Artificial Sequence
  Synthetic oligonucleotide
gggctaaaattcattattaaagcgtgtact

SEQ ID NO: 388389 - DNA, 30 bp, Artificial Sequence
  Synthetic oligonucleotide
cggtcggggccattagatacgccttgtact

SEQ ID NO: 388390 - DNA, 30 bp, Artificial Sequence
  Synthetic oligonucleotide
tacgcgcaactttcgctggtcaaaattact

SEQ ID NO: 388391 - DNA, 30 bp, Artificial Sequence
  Synthetic oligonucleotide
tttatcgcagtttggtgggccgcaattact

SEQ ID NO: 388392 - DNA, 30 bp, Artificial Sequence
  Synthetic oligonucleotide
gcttccgccacaataattaatggaattact

SEQ ID NO: 388393 - DNA, 25 bp, Artificial Sequence
  Synthetic oligonucleotide
ttttgggatgtctgagtgcattact

SEQ ID NO: 388394 - DNA, 30 bp, Artificial Sequence
  Synthetic oligonucleotide
catgcgaccggtgacatggtagggattact

SEQ ID NO: 388395 - DNA, 30 bp, Artificial Sequence
  Synthetic oligonucleotide
gctatccttcacttcacattaggtattact

SEQ ID NO: 388396 - DNA, 30 bp, Artificial Sequence
  Synthetic oligonucleotide
tcgaaaaacactgatactcagggacttact

SEQ ID NO: 388397 - DNA, 30 bp, Artificial Sequence
  Synthetic oligonucleotide
gtctccaggatgttcagaaaagtacttact

SEQ ID NO: 388398 - DNA, 30 bp, Artificial Sequence
  Synthetic oligonucleotide
tactagtggattgggtgtagagaccttact

SEQ ID NO: 388399 - DNA, 30 bp, Artificial Sequence
  Synthetic oligonucleotide
actcaattccgaactactagatcccttact

SEQ ID NO: 388400 - DNA, 30 bp, Artificial Sequence
  Synthetic oligonucleotide
agagtcacaggaaagaggatttcccttact

SEQ ID NO: 388401 - DNA, 30 bp, Artificial Sequence
  Synthetic oligonucleotide
tgaaattcgtatgtgtgtgtttcgcttact

SEQ ID NO: 388402 - DNA, 30 bp, Artificial Sequence
  Synthetic oligonucleotide
cagttgtcagtagaggttcattggcttact

SEQ ID NO: 388403 - DNA, 30 bp, Artificial Sequence
  Synthetic oligonucleotide
atcgccggtcaacactttctctttcttact

SEQ ID NO: 388404 - DNA, 30 bp, Artificial Sequence
  Synthetic oligonucleotide
agacgattacaggagcgagatctagttact

SEQ ID NO: 388405 - DNA, 30 bp, Artificial Sequence
  Synthetic oligonucleotide
actgagcattccaaaggatcgtaggttact

SEQ ID NO: 388406 - DNA, 30 bp, Artificial Sequence
  Synthetic oligonucleotide
cagccatgctgtctatgaaaccactttact

SEQ ID NO: 388407 - DNA, 30 bp, Artificial Sequence
  Synthetic oligonucleotide
ctccatgcgagcccagatgggtcgtttact

SEQ ID NO: 388408 - DNA, 30 bp, Artificial Sequence
  Synthetic oligonucleotide
tgcgttcttcgtttgttacttcggtttact

SEQ ID NO: 388409 - DNA, 30 bp, Artificial Sequence
  Synthetic oligonucleotide
gatagcgctacaggcagagaatggtttact

SEQ ID NO: 388410 - DNA, 30 bp, Artificial Sequence
  Synthetic oligonucleotide
gtagaatgacccgtagtgacgatgtttact

SEQ ID NO: 388411 - DNA, 30 bp, Artificial Sequence
  Synthetic oligonucleotide
tgcgactggacaggttaggtatacaaacct

SEQ ID NO: 388412 - DNA, 30 bp, Artificial Sequence
  Synthetic oligonucleotide
tggaatatactgtctataggcctcaaacct

SEQ ID NO: 388413 - DNA, 30 bp, Artificial Sequence
  Synthetic oligonucleotide
ctcagcatcgacggccttaagtagaaacct

SEQ ID NO: 388414 - DNA, 30 bp, Artificial Sequence
  Synthetic oligonucleotide
ttggagaaaattttcactccagcgaaacct

SEQ ID NO: 388415 - DNA, 30 bp, Artificial Sequence
  Synthetic oligonucleotide
tgaccacccaggatgtaaaggtataaacct

SEQ ID NO: 388416 - DNA, 30 bp, Artificial Sequence
  Synthetic oligonucleotide
agatcattcttcattttcttgtcacaacct

SEQ ID NO: 388417 - DNA, 30 bp, Artificial Sequence
  Synthetic oligonucleotide
ttgaactcgggtcctcttgcaatccaacct

SEQ ID NO: 388418 - DNA, 30 bp, Artificial Sequence
  Synthetic oligonucleotide
ggagtcacatgaaggacgtggaagcaacct

SEQ ID NO: 388419 - DNA, 30 bp, Artificial Sequence
  Synthetic oligonucleotide
ccgcgccgtaaccgcggattacagcaacct

SEQ ID NO: 388420 - DNA, 30 bp, Artificial Sequence
  Synthetic oligonucleotide
gcgtcacagtactttatatatgcgcaacct

SEQ ID NO: 388421 - DNA, 29 bp, Artificial Sequence
  Synthetic oligonucleotide
gctcagctgccacggacagtgggcaacct

SEQ ID NO: 388422 - DNA, 30 bp, Artificial Sequence
  Synthetic oligonucleotide
tttccctcgtaagcgtcgtctgatcaacct

SEQ ID NO: 388423 - DNA, 31 bp, Artificial Sequence
  Synthetic oligonucleotide
gtggggaatttacttcaaccactatcaacct

SEQ ID NO: 388424 - DNA, 30 bp, Artificial Sequence
  Synthetic oligonucleotide
caaaaaacctcaaatatcaaacctcaacct

SEQ ID NO: 388425 - DNA, 30 bp, Artificial Sequence
  Synthetic oligonucleotide
tgaacccgcttggtctccagcgttcaacct

SEQ ID NO: 388426 - DNA, 30 bp, Artificial Sequence
  Synthetic oligonucleotide
gcggccggctgtggtgtagggagcgaacct

SEQ ID NO: 388427 - DNA, 30 bp, Artificial Sequence
  Synthetic oligonucleotide
atcaatacaggtggtctaaccagggaacct

SEQ ID NO: 388428 - DNA, 30 bp, Artificial Sequence
  Synthetic oligonucleotide
tccggatattcgcgatatcggactgaacct

SEQ ID NO: 388429 - DNA, 30 bp, Artificial Sequence
  Synthetic oligonucleotide
ttatgacgaaccaaaaggattacctaacct

SEQ ID NO: 388430 - DNA, 30 bp, Artificial Sequence
  Synthetic oligonucleotide
ggccgcatccttacggccgagaagtaacct

SEQ ID NO: 388431 - DNA, 30 bp, Artificial Sequence
  Synthetic oligonucleotide
aactggggaacagcgccgtagcattaacct

SEQ ID NO: 388432 - DNA, 30 bp, Artificial Sequence
  Synthetic oligonucleotide
agtgggttgaccaatgtggttgaaacacct

SEQ ID NO: 388433 - DNA, 30 bp, Artificial Sequence
  Synthetic oligonucleotide
aagtttacatcgactgagtaatagacacct

SEQ ID NO: 388434 - DNA, 30 bp, Artificial Sequence
  Synthetic oligonucleotide
ggagcagcggggtggcttaccccgacacct

SEQ ID NO: 388435 - DNA, 30 bp, Artificial Sequence
  Synthetic oligonucleotide
gaattactcacatacacagcatctacacct

SEQ ID NO: 388436 - DNA, 30 bp, Artificial Sequence
  Synthetic oligonucleotide
acacgcgtgacatctatatgatgtacacct

SEQ ID NO: 388437 - DNA, 30 bp, Artificial Sequence
  Synthetic oligonucleotide
gggattattatcagcataagtattccacct

SEQ ID NO: 388438 - DNA, 30 bp, Artificial Sequence
  Synthetic oligonucleotide
cagaagggaatggaaacatacgacgcacct

SEQ ID NO: 388439 - DNA, 30 bp, Artificial Sequence
  Synthetic oligonucleotide
tataaccacataggtggcatattatcacct

SEQ ID NO: 388440 - DNA, 30 bp, Artificial Sequence
  Synthetic oligonucleotide
ttaacccttacgtagtcatgaaactcacct

SEQ ID NO: 388441 - DNA, 30 bp, Artificial Sequence
  Synthetic oligonucleotide
cggtattaattttaagggattaagtcacct

SEQ ID NO: 388442 - DNA, 30 bp, Artificial Sequence
  Synthetic oligonucleotide
gtaaccttttgtgaaacaccgagttcacct

SEQ ID NO: 388443 - DNA, 30 bp, Artificial Sequence
  Synthetic oligonucleotide
gtaaggtgatagatgcaccccttcagacct

SEQ ID NO: 388444 - DNA, 30 bp, Artificial Sequence
  Synthetic oligonucleotide
ttcattaacaaagtcagtttacttagacct

SEQ ID NO: 388445 - DNA, 30 bp, Artificial Sequence
  Synthetic oligonucleotide
tccctggcttgtaaaactgagaaacgacct

SEQ ID NO: 388446 - DNA, 30 bp, Artificial Sequence
  Synthetic oligonucleotide
tacacatctgaacggacagtcccacgacct

SEQ ID NO: 388447 - DNA, 30 bp, Artificial Sequence
  Synthetic oligonucleotide
tgaccttcgtacggtagatgcctacgacct

SEQ ID NO: 388448 - DNA, 30 bp, Artificial Sequence
  Synthetic oligonucleotide
ataacttctcagcgctgcggtctccgacct

SEQ ID NO: 388449 - DNA, 30 bp, Artificial Sequence
  Synthetic oligonucleotide
cccgctccaagcggtgtgtagctgcgacct

SEQ ID NO: 388450 - DNA, 30 bp, Artificial Sequence
  Synthetic oligonucleotide
cacggccagaggtggtggtctgatcgacct

SEQ ID NO: 388451 - DNA, 30 bp, Artificial Sequence
  Synthetic oligonucleotide
aaccctatatatatctcgtcaactcgacct

SEQ ID NO: 388452 - DNA, 30 bp, Artificial Sequence
  Synthetic oligonucleotide
atccttagtgagatcccctgcacaggacct

SEQ ID NO: 388453 - DNA, 30 bp, Artificial Sequence
  Synthetic oligonucleotide
ggatcacacaacggggtcttctgaggacct

SEQ ID NO: 388454 - DNA, 30 bp, Artificial Sequence
  Synthetic oligonucleotide
ttgcactattgagcggagtgcaacggacct

SEQ ID NO: 388455 - DNA, 30 bp, Artificial Sequence
  Synthetic oligonucleotide
ttcaggttcactacctgggaacacggacct

SEQ ID NO: 388456 - DNA, 30 bp, Artificial Sequence
  Synthetic oligonucleotide
aggccagacattatacaacatgacggacct

SEQ ID NO: 388457 - DNA, 30 bp, Artificial Sequence
  Synthetic oligonucleotide
gccgtgctaaaataagttgaggatggacct

SEQ ID NO: 388458 - DNA, 30 bp, Artificial Sequence
  Synthetic oligonucleotide
catggcagtggccgtccgatagcatgacct

SEQ ID NO: 388459 - DNA, 30 bp, Artificial Sequence
  Synthetic oligonucleotide
tgtgacatcctgctgcttgcctgatgacct

SEQ ID NO: 388460 - DNA, 30 bp, Artificial Sequence
  Synthetic oligonucleotide
cgcgttaggcagggtgggatgtgatgacct

SEQ ID NO: 388461 - DNA, 30 bp, Artificial Sequence
  Synthetic oligonucleotide
gcacatcaataaagcaccgctatatgacct

SEQ ID NO: 388462 - DNA, 30 bp, Artificial Sequence
  Synthetic oligonucleotide
gcgatcgtcagcgtgcgtccatcctgacct

SEQ ID NO: 388463 - DNA, 30 bp, Artificial Sequence
  Synthetic oligonucleotide
ttcaatattatcgttcatgaaagctgacct

SEQ ID NO: 388464 - DNA, 30 bp, Artificial Sequence
  Synthetic oligonucleotide
agattgccagcaaaggtagagcggtgacct

SEQ ID NO: 388465 - DNA, 30 bp, Artificial Sequence
  Synthetic oligonucleotide
tgccttgtgtgacgtgcttcgagaatacct

SEQ ID NO: 388466 - DNA, 30 bp, Artificial Sequence
  Synthetic oligonucleotide
gtcgataggctactcagtaagcacatacct

SEQ ID NO: 388467 - DNA, 30 bp, Artificial Sequence
  Synthetic oligonucleotide
ttattggtgttctcacaaacgatcatacct

SEQ ID NO: 388468 - DNA, 30 bp, Artificial Sequence
  Synthetic oligonucleotide
gcaccgcgtattacagaaacattcatacct

SEQ ID NO: 388469 - DNA, 30 bp, Artificial Sequence
  Synthetic oligonucleotide
cgtcaagctcacctcgtccttcggatacct

SEQ ID NO: 388470 - DNA, 30 bp, Artificial Sequence
  Synthetic oligonucleotide
tatgtcttactaaaactggtctggatacct

SEQ ID NO: 388471 - DNA, 30 bp, Artificial Sequence
  Synthetic oligonucleotide
actggcctgtatacaggatgcttgatacct

SEQ ID NO: 388472 - DNA, 30 bp, Artificial Sequence
  Synthetic oligonucleotide
taagtcattgggtgatataaagatatacct

SEQ ID NO: 388473 - DNA, 30 bp, Artificial Sequence
  Synthetic oligonucleotide
ttgtaaacatggtcaagtaaatatatacct

SEQ ID NO: 388474 - DNA, 30 bp, Artificial Sequence
  Synthetic oligonucleotide
agacgctccgccccaatgctgcttatacct

SEQ ID NO: 388475 - DNA, 30 bp, Artificial Sequence
  Synthetic oligonucleotide
tcacaccgcatatcgcgtcaaagactacct

SEQ ID NO: 388476 - DNA, 30 bp, Artificial Sequence
  Synthetic oligonucleotide
ccaggagatgggacctggaattacctacct

SEQ ID NO: 388477 - DNA, 30 bp, Artificial Sequence
  Synthetic oligonucleotide
aatcaacacaaagccaacggtcgcctacct

SEQ ID NO: 388478 - DNA, 30 bp, Artificial Sequence
  Synthetic oligonucleotide
aatgttatgaagaaaacctatggcctacct

SEQ ID NO: 388479 - DNA, 30 bp, Artificial Sequence
  Synthetic oligonucleotide
actcgtctctagggacgagcacttctacct

SEQ ID NO: 388480 - DNA, 30 bp, Artificial Sequence
  Synthetic oligonucleotide
actagaatctgagggggcagacaagtacct

SEQ ID NO: 388481 - DNA, 30 bp, Artificial Sequence
  Synthetic oligonucleotide
ggttctatatcttggagaaaatgcgtacct

SEQ ID NO: 388482 - DNA, 30 bp, Artificial Sequence
  Synthetic oligonucleotide
aacaggccactgaccagtattgtcgtacct

SEQ ID NO: 388483 - DNA, 30 bp, Artificial Sequence
  Synthetic oligonucleotide
gcagacctcctcatgaatagggaggtacct

SEQ ID NO: 388484 - DNA, 30 bp, Artificial Sequence
  Synthetic oligonucleotide
cgtggccgagaatcacccttgtgggtacct

SEQ ID NO: 388485 - DNA, 30 bp, Artificial Sequence
  Synthetic oligonucleotide
gccattctccaagtgcacgtcagtgtacct

SEQ ID NO: 388486 - DNA, 30 bp, Artificial Sequence
  Synthetic oligonucleotide
gaggtataagcggctcactcattattacct

SEQ ID NO: 388487 - DNA, 30 bp, Artificial Sequence
  Synthetic oligonucleotide
gaatctatgtgttaaggagggcacttacct

SEQ ID NO: 388488 - DNA, 30 bp, Artificial Sequence
  Synthetic oligonucleotide
gcaaggcgggtcaacctcaatatgttacct

SEQ ID NO: 388489 - DNA, 30 bp, Artificial Sequence
  Synthetic oligonucleotide
tatcgttttgcgcttctcggtgtgttacct

SEQ ID NO: 388490 - DNA, 30 bp, Artificial Sequence
  Synthetic oligonucleotide
acatattaaatcaagaggaatttgttacct

SEQ ID NO: 388491 - DNA, 30 bp, Artificial Sequence
  Synthetic oligonucleotide
gagccatcatggcgtcgtttatttttacct

SEQ ID NO: 388492 - DNA, 31 bp, Artificial Sequence
  Synthetic oligonucleotide
tacgataccgggggtggctggaaaaaaccct

SEQ ID NO: 388493 - DNA, 30 bp, Artificial Sequence
  Synthetic oligonucleotide
ggccaatccgctttactgaagtacaaccct

SEQ ID NO: 388494 - DNA, 30 bp, Artificial Sequence
  Synthetic oligonucleotide
gaaagtgcgcggcgtaatagcaagaaccct

SEQ ID NO: 388495 - DNA, 30 bp, Artificial Sequence
  Synthetic oligonucleotide
aggacaaacccagtcacagggaagaaccct

SEQ ID NO: 388496 - DNA, 30 bp, Artificial Sequence
  Synthetic oligonucleotide
gagaaccttgtcacaatatgggctaaccct

SEQ ID NO: 388497 - DNA, 30 bp, Artificial Sequence
  Synthetic oligonucleotide
tcacatattcggaacggtagcgaacaccct

SEQ ID NO: 388498 - DNA, 30 bp, Artificial Sequence
  Synthetic oligonucleotide
caggtatgtgctatcagatacgggcaccct

SEQ ID NO: 388499 - DNA, 30 bp, Artificial Sequence
  Synthetic oligonucleotide
ctccctcgagatatcttccactctcaccct

SEQ ID NO: 388500 - DNA, 30 bp, Artificial Sequence
  Synthetic oligonucleotide
accgcttgtgagcattgtggttgtcaccct

SEQ ID NO: 388501 - DNA, 30 bp, Artificial Sequence
  Synthetic oligonucleotide
caggatgaaagcaagaagctaatagaccct

SEQ ID NO: 388502 - DNA, 30 bp, Artificial Sequence
  Synthetic oligonucleotide
gcttgctcatctaaaattatggtcgaccct

SEQ ID NO: 388503 - DNA, 30 bp, Artificial Sequence
  Synthetic oligonucleotide
gcccgagcttaatcatttacgacggaccct

SEQ ID NO: 388504 - DNA, 30 bp, Artificial Sequence
  Synthetic oligonucleotide
tgtagattagtcagtgatatagatgaccct

SEQ ID NO: 388505 - DNA, 30 bp, Artificial Sequence
  Synthetic oligonucleotide
tcctcttactattctgggttgcctgaccct

SEQ ID NO: 388506 - DNA, 30 bp, Artificial Sequence
  Synthetic oligonucleotide
tccaagcgtagacaaggcataccataccct

SEQ ID NO: 388507 - DNA, 30 bp, Artificial Sequence
  Synthetic oligonucleotide
tatggctccaaatagggagacatataccct

SEQ ID NO: 388508 - DNA, 30 bp, Artificial Sequence
  Synthetic oligonucleotide
tgcctaggtcgtttctgtgaaccgtaccct

SEQ ID NO: 388509 - DNA, 30 bp, Artificial Sequence
  Synthetic oligonucleotide
ggagcattctagtgcacttcttcgtaccct

SEQ ID NO: 388510 - DNA, 30 bp, Artificial Sequence
  Synthetic oligonucleotide
gtccatcagagatgcaaagcccattaccct

SEQ ID NO: 388511 - DNA, 30 bp, Artificial Sequence
  Synthetic oligonucleotide
agaagagcaacgttaagcgcctggacccct

SEQ ID NO: 388512 - DNA, 30 bp, Artificial Sequence
  Synthetic oligonucleotide
caagagaaacggtaacctttccccccccct

SEQ ID NO: 388513 - DNA, 30 bp, Artificial Sequence
  Synthetic oligonucleotide
caacttgtggaaacgtgggtaatagcccct

SEQ ID NO: 388514 - DNA, 30 bp, Artificial Sequence
  Synthetic oligonucleotide
gacgcatgtagtgggaccagtcacgcccct

SEQ ID NO: 388515 - DNA, 30 bp, Artificial Sequence
  Synthetic oligonucleotide
gccgtgtgtgtagaggccggtttggcccct

SEQ ID NO: 388516 - DNA, 30 bp, Artificial Sequence
  Synthetic oligonucleotide
aaagctcgccccagaggtctggatgcccct

SEQ ID NO: 388517 - DNA, 30 bp, Artificial Sequence
  Synthetic oligonucleotide
tttaaaaatcccacttcgcctattgcccct

SEQ ID NO: 388518 - DNA, 30 bp, Artificial Sequence
  Synthetic oligonucleotide
gcgatttctagatagttcgaacagtcccct

SEQ ID NO: 388519 - DNA, 31 bp, Artificial Sequence
  Synthetic oligonucleotide
atatcccaataccacaagcaatatgtcccct

SEQ ID NO: 388520 - DNA, 30 bp, Artificial Sequence
  Synthetic oligonucleotide
tagagagtcggggaataaccctaaagccct

SEQ ID NO: 388521 - DNA, 30 bp, Artificial Sequence
  Synthetic oligonucleotide
aggggaaacgtcgctggggcccgaagccct

SEQ ID NO: 388522 - DNA, 30 bp, Artificial Sequence
  Synthetic oligonucleotide
ccgggagccttagagacatgaatcagccct

SEQ ID NO: 388523 - DNA, 30 bp, Artificial Sequence
  Synthetic oligonucleotide
atacttttttcgacaacctagatcagccct

SEQ ID NO: 388524 - DNA, 30 bp, Artificial Sequence
  Synthetic oligonucleotide
aacactgccgtagtcggtttttagagccct

SEQ ID NO: 388525 - DNA, 30 bp, Artificial Sequence
  Synthetic oligonucleotide
tgacccgcaatccaagacataggtagccct

SEQ ID NO: 388526 - DNA, 30 bp, Artificial Sequence
  Synthetic oligonucleotide
ctgacagagtgctactattagtaacgccct

SEQ ID NO: 388527 - DNA, 30 bp, Artificial Sequence
  Synthetic oligonucleotide
tcacgagtaaatggtccggaaggacgccct

SEQ ID NO: 388528 - DNA, 30 bp, Artificial Sequence
  Synthetic oligonucleotide
ccaagcccccaaccatgtgacaagcgccct

SEQ ID NO: 388529 - DNA, 30 bp, Artificial Sequence
  Synthetic oligonucleotide
ggctacgaatgttccgaccagatgcgccct

SEQ ID NO: 388530 - DNA, 30 bp, Artificial Sequence
  Synthetic oligonucleotide
atgctgaacatagccggccatccaggccct

SEQ ID NO: 388531 - DNA, 30 bp, Artificial Sequence
  Synthetic oligonucleotide
agttagaccggagacttgccgttaggccct

SEQ ID NO: 388532 - DNA, 30 bp, Artificial Sequence
  Synthetic oligonucleotide
ggcgaccgcaaggaagctgaagtcggccct

SEQ ID NO: 388533 - DNA, 30 bp, Artificial Sequence
  Synthetic oligonucleotide
gactaacatcatgaattatagaggggccct

SEQ ID NO: 388534 - DNA, 30 bp, Artificial Sequence
  Synthetic oligonucleotide
cggcgtggggttgagtactactggggccct

SEQ ID NO: 388535 - DNA, 30 bp, Artificial Sequence
  Synthetic oligonucleotide
atcataacccccgggtgtgaagtctgccct

SEQ ID NO: 388536 - DNA, 30 bp, Artificial Sequence
  Synthetic oligonucleotide
agttatcatgaatagcttccgtagtgccct

SEQ ID NO: 388537 - DNA, 30 bp, Artificial Sequence
  Synthetic oligonucleotide
ttaggcactctcgggcagtcggggtgccct

SEQ ID NO: 388538 - DNA, 30 bp, Artificial Sequence
  Synthetic oligonucleotide
cttgaaattcattgttagtaactgtgccct

SEQ ID NO: 388539 - DNA, 30 bp, Artificial Sequence
  Synthetic oligonucleotide
gacaaggcgcgcaagcctctggaaatccct

SEQ ID NO: 388540 - DNA, 30 bp, Artificial Sequence
  Synthetic oligonucleotide
tagaaatgggtgggttaaaacataatccct

SEQ ID NO: 388541 - DNA, 30 bp, Artificial Sequence
  Synthetic oligonucleotide
cgccagcataactggtttccccacatccct

SEQ ID NO: 388542 - DNA, 30 bp, Artificial Sequence
  Synthetic oligonucleotide
agtggtgtgttattccccccgggcatccct

SEQ ID NO: 388543 - DNA, 30 bp, Artificial Sequence
  Synthetic oligonucleotide
tgggttagaaagagccgcagtaagatccct

SEQ ID NO: 388544 - DNA, 30 bp, Artificial Sequence
  Synthetic oligonucleotide
gcgtccgctgagacgggatttcctatccct

SEQ ID NO: 388545 - DNA, 30 bp, Artificial Sequence
  Synthetic oligonucleotide
tacagttcctgaatgtagggcgttatccct

SEQ ID NO: 388546 - DNA, 30 bp, Artificial Sequence
  Synthetic oligonucleotide
ataatcgatgcaaattatttaagcctccct

SEQ ID NO: 388547 - DNA, 30 bp, Artificial Sequence
  Synthetic oligonucleotide
agtcgtttctgatgtactccctctctccct

SEQ ID NO: 388548 - DNA, 30 bp, Artificial Sequence
  Synthetic oligonucleotide
gacgcgacttggcactcggggccagtccct

SEQ ID NO: 388549 - DNA, 30 bp, Artificial Sequence
  Synthetic oligonucleotide
cgtggtcgtttagagtattaccccgtccct

SEQ ID NO: 388550 - DNA, 30 bp, Artificial Sequence
  Synthetic oligonucleotide
ttttaatgcttttgtgaccgatgcgtccct

SEQ ID NO: 388551 - DNA, 30 bp, Artificial Sequence
  Synthetic oligonucleotide
tagcaccggaagtggccgcgcttcgtccct

SEQ ID NO: 388552 - DNA, 30 bp, Artificial Sequence
  Synthetic oligonucleotide
atacctttttaattgattaactaggtccct

SEQ ID NO: 388553 - DNA, 30 bp, Artificial Sequence
  Synthetic oligonucleotide
attgccgaggttaacaaacctgtggtccct

SEQ ID NO: 388554 - DNA, 30 bp, Artificial Sequence
  Synthetic oligonucleotide
tgactgacccattgagcagccactgtccct

SEQ ID NO: 388555 - DNA, 30 bp, Artificial Sequence
  Synthetic oligonucleotide
gtaaagttgcgtaacgggctcactgtccct

SEQ ID NO: 388556 - DNA, 30 bp, Artificial Sequence
  Synthetic oligonucleotide
gggacaggtttaacctttaaatgtgtccct

SEQ ID NO: 388557 - DNA, 30 bp, Artificial Sequence
  Synthetic oligonucleotide
gcaattggcaaatcacttcctgcattccct

SEQ ID NO: 388558 - DNA, 30 bp, Artificial Sequence
  Synthetic oligonucleotide
ggaattgacgcccggatcgttgccttccct

SEQ ID NO: 388559 - DNA, 30 bp, Artificial Sequence
  Synthetic oligonucleotide
tctgcttctctgtactataacctcttccct

SEQ ID NO: 388560 - DNA, 30 bp, Artificial Sequence
  Synthetic oligonucleotide
gattcccaattcgaatatggtataaagcct

SEQ ID NO: 388561 - DNA, 30 bp, Artificial Sequence
  Synthetic oligonucleotide
ctggtgtttaatactgccacgaacaagcct

SEQ ID NO: 388562 - DNA, 30 bp, Artificial Sequence
  Synthetic oligonucleotide
cttaacaaagagcagctatggtccaagcct

SEQ ID NO: 388563 - DNA, 30 bp, Artificial Sequence
  Synthetic oligonucleotide
agcggcattacctgctgcaacagcaagcct

SEQ ID NO: 388564 - DNA, 30 bp, Artificial Sequence
  Synthetic oligonucleotide
atctagccatagccatccttggggaagcct

SEQ ID NO: 388565 - DNA, 30 bp, Artificial Sequence
  Synthetic oligonucleotide
tcattatttaaatccctatgttaacagcct

SEQ ID NO: 388566 - DNA, 30 bp, Artificial Sequence
  Synthetic oligonucleotide
tgcacggcttatctaggcgtattacagcct

SEQ ID NO: 388567 - DNA, 30 bp, Artificial Sequence
  Synthetic oligonucleotide
cccaatacgccgcccgagcgagcccagcct

SEQ ID NO: 388568 - DNA, 30 bp, Artificial Sequence
  Synthetic oligonucleotide
caggagcttcctgtcccccgactccagcct

SEQ ID NO: 388569 - DNA, 30 bp, Artificial Sequence
  Synthetic oligonucleotide
caataccacttcttttggcgtcgtcagcct

SEQ ID NO: 388570 - DNA, 30 bp, Artificial Sequence
  Synthetic oligonucleotide
ggaccacgctaccaggtttttctagagcct

SEQ ID NO: 388571 - DNA, 30 bp, Artificial Sequence
  Synthetic oligonucleotide
tttcgttgagtagtccttcggctcgagcct

SEQ ID NO: 388572 - DNA, 30 bp, Artificial Sequence
  Synthetic oligonucleotide
atcacatgcgcgtgggggtctacggagcct

SEQ ID NO: 388573 - DNA, 30 bp, Artificial Sequence
  Synthetic oligonucleotide
cgcttcactaggatcagcgttatggagcct

SEQ ID NO: 388574 - DNA, 30 bp, Artificial Sequence
  Synthetic oligonucleotide
tcctttataggtaaccagtctagtgagcct

SEQ ID NO: 388575 - DNA, 31 bp, Artificial Sequence
  Synthetic oligonucleotide
accccaggtcacaggaatttcaaaatagcct

SEQ ID NO: 388576 - DNA, 30 bp, Artificial Sequence
  Synthetic oligonucleotide
taggtaaatgtggtaataaatgtctagcct

SEQ ID NO: 388577 - DNA, 30 bp, Artificial Sequence
  Synthetic oligonucleotide
aacggtgtatttttatagactataacgcct

SEQ ID NO: 388578 - DNA, 30 bp, Artificial Sequence
  Synthetic oligonucleotide
ttactcatcacgggaggctaatgcacgcct

SEQ ID NO: 388579 - DNA, 30 bp, Artificial Sequence
  Synthetic oligonucleotide
attgttgggaattgacgttgtgcgacgcct

SEQ ID NO: 388580 - DNA, 30 bp, Artificial Sequence
  Synthetic oligonucleotide
cgtaccaactaaacggcactatcgacgcct

SEQ ID NO: 388581 - DNA, 30 bp, Artificial Sequence
  Synthetic oligonucleotide
aacaatcttacacgcaattaatgtacgcct

SEQ ID NO: 388582 - DNA, 30 bp, Artificial Sequence
  Synthetic oligonucleotide
cattccccggagtgtaggctcaaaccgcct

SEQ ID NO: 388583 - DNA, 30 bp, Artificial Sequence
  Synthetic oligonucleotide
tgccttctagtgagcagggacgcaccgcct

SEQ ID NO: 388584 - DNA, 30 bp, Artificial Sequence
  Synthetic oligonucleotide
gtcattgctggcgtgacaccagtcccgcct

SEQ ID NO: 388585 - DNA, 30 bp, Artificial Sequence
  Synthetic oligonucleotide
atccatctggaataatacaaggagccgcct

SEQ ID NO: 388586 - DNA, 30 bp, Artificial Sequence
  Synthetic oligonucleotide
gggaccaaagtgcgaccacttgggccgcct

SEQ ID NO: 388587 - DNA, 30 bp, Artificial Sequence
  Synthetic oligonucleotide
cccccttgaatgtggggatatttgccgcct

SEQ ID NO: 388588 - DNA, 30 bp, Artificial Sequence
  Synthetic oligonucleotide
tatgatacgtcctacgcagtccttccgcct

SEQ ID NO: 388589 - DNA, 30 bp, Artificial Sequence
  Synthetic oligonucleotide
gacgccccggtaggattgaaattagcgcct

SEQ ID NO: 388590 - DNA, 30 bp, Artificial Sequence
  Synthetic oligonucleotide
ccaagcagctattctccgaataatgcgcct

SEQ ID NO: 388591 - DNA, 30 bp, Artificial Sequence
  Synthetic oligonucleotide
gaccgcaaccgcgcactgaggaaatcgcct

SEQ ID NO: 388592 - DNA, 30 bp, Artificial Sequence
  Synthetic oligonucleotide
agaacgagcagaggtgaagatccatcgcct

SEQ ID NO: 388593 - DNA, 30 bp, Artificial Sequence
  Synthetic oligonucleotide
accacgttccctttgtcaacgggatcgcct

SEQ ID NO: 388594 - DNA, 30 bp, Artificial Sequence
  Synthetic oligonucleotide
agtgtaaataactagtttggtctatcgcct

SEQ ID NO: 388595 - DNA, 30 bp, Artificial Sequence
  Synthetic oligonucleotide
aatagcggtgttcggcgttgaacgtcgcct

SEQ ID NO: 388596 - DNA, 30 bp, Artificial Sequence
  Synthetic oligonucleotide
taacgagctatacccctgcctcggtcgcct

SEQ ID NO: 388597 - DNA, 30 bp, Artificial Sequence
  Synthetic oligonucleotide
atacatccctgttcagtaagcgtttcgcct

SEQ ID NO: 388598 - DNA, 30 bp, Artificial Sequence
  Synthetic oligonucleotide
tactgcagtgtgtttgttacgccaaggcct

SEQ ID NO: 388599 - DNA, 30 bp, Artificial Sequence
  Synthetic oligonucleotide
gtgaatgcggcccgatggaatcgaaggcct

SEQ ID NO: 388600 - DNA, 30 bp, Artificial Sequence
  Synthetic oligonucleotide
tgcgctgtctccacaggtgcattaaggcct

SEQ ID NO: 388601 - DNA, 30 bp, Artificial Sequence
  Synthetic oligonucleotide
ttggctagccgaccgtagaggggcaggcct

SEQ ID NO: 388602 - DNA, 30 bp, Artificial Sequence
  Synthetic oligonucleotide
gtgttaggaaggtcgatacatcggaggcct

SEQ ID NO: 388603 - DNA, 30 bp, Artificial Sequence
  Synthetic oligonucleotide
atcatcaggacgtcaaggcgtgataggcct

SEQ ID NO: 388604 - DNA, 30 bp, Artificial Sequence
  Synthetic oligonucleotide
cttcaggacaaagcgttgagcgcacggcct

SEQ ID NO: 388605 - DNA, 30 bp, Artificial Sequence
  Synthetic oligonucleotide
agggttgatgccggttcgtcatcacggcct

SEQ ID NO: 388606 - DNA, 30 bp, Artificial Sequence
  Synthetic oligonucleotide
attataaatccttacattacggtacggcct

SEQ ID NO: 388607 - DNA, 29 bp, Artificial Sequence
  Synthetic oligonucleotide
cttgtttaaaaataatcttcccccggcct

SEQ ID NO: 388608 - DNA, 30 bp, Artificial Sequence
  Synthetic oligonucleotide
tactaactaccggcgggtcatcggcggcct

SEQ ID NO: 388609 - DNA, 30 bp, Artificial Sequence
  Synthetic oligonucleotide
ggaatgggcaagacagcttctgggcggcct

SEQ ID NO: 388610 - DNA, 30 bp, Artificial Sequence
  Synthetic oligonucleotide
tgggcgctattctgggccacgtttcggcct

SEQ ID NO: 388611 - DNA, 30 bp, Artificial Sequence
  Synthetic oligonucleotide
cctctggaatgtacaaatccgagagggcct

SEQ ID NO: 388612 - DNA, 30 bp, Artificial Sequence
  Synthetic oligonucleotide
caactgttgattaccgatgtgttagggcct

SEQ ID NO: 388613 - DNA, 30 bp, Artificial Sequence
  Synthetic oligonucleotide
ggtctactctgaattaaacgtaacgggcct

SEQ ID NO: 388614 - DNA, 30 bp, Artificial Sequence
  Synthetic oligonucleotide
ctaaccccgtcaagggggtatgccgggcct

SEQ ID NO: 388615 - DNA, 30 bp, Artificial Sequence
  Synthetic oligonucleotide
ggctttgagattgaatctggcagcgggcct

SEQ ID NO: 388616 - DNA, 30 bp, Artificial Sequence
  Synthetic oligonucleotide
gaccagtatgagcataggcttaatgggcct

SEQ ID NO: 388617 - DNA, 30 bp, Artificial Sequence
  Synthetic oligonucleotide
gacgggcgtgggcttgctagacctgggcct

SEQ ID NO: 388618 - DNA, 30 bp, Artificial Sequence
  Synthetic oligonucleotide
tcccattagacacgaccatagggatggcct

SEQ ID NO: 388619 - DNA, 30 bp, Artificial Sequence
  Synthetic oligonucleotide
tgccaaaccgcgacataattcccctggcct

SEQ ID NO: 388620 - DNA, 30 bp, Artificial Sequence
  Synthetic oligonucleotide
tcccaccggtttaatagcattgtttggcct

SEQ ID NO: 388621 - DNA, 30 bp, Artificial Sequence
  Synthetic oligonucleotide
atggtatattggcttggtatcttttggcct

SEQ ID NO: 388622 - DNA, 30 bp, Artificial Sequence
  Synthetic oligonucleotide
ggaagctaacgacgaagaggggaaatgcct

SEQ ID NO: 388623 - DNA, 30 bp, Artificial Sequence
  Synthetic oligonucleotide
caaacacgccaagtatgcagcctaatgcct

SEQ ID NO: 388624 - DNA, 30 bp, Artificial Sequence
  Synthetic oligonucleotide
tatcctgtcaacccggcacggtacatgcct

SEQ ID NO: 388625 - DNA, 30 bp, Artificial Sequence
  Synthetic oligonucleotide
tacggggacaggcgggtgcttggtatgcct

SEQ ID NO: 388626 - DNA, 30 bp, Artificial Sequence
  Synthetic oligonucleotide
gtctagggtagcgtctagagcgttatgcct

SEQ ID NO: 388627 - DNA, 30 bp, Artificial Sequence
  Synthetic oligonucleotide
cggccgttggcaataatctgccgactgcct

SEQ ID NO: 388628 - DNA, 30 bp, Artificial Sequence
  Synthetic oligonucleotide
gggatcaaaagtgttctcaggctactgcct

SEQ ID NO: 388629 - DNA, 30 bp, Artificial Sequence
  Synthetic oligonucleotide
gggcgggagtcgcctggcgttcatctgcct

SEQ ID NO: 388630 - DNA, 30 bp, Artificial Sequence
  Synthetic oligonucleotide
tgaaacaggctttagtgaaaaagtctgcct

SEQ ID NO: 388631 - DNA, 30 bp, Artificial Sequence
  Synthetic oligonucleotide
gccaccggtatggaagcgtaatgcgtgcct

SEQ ID NO: 388632 - DNA, 30 bp, Artificial Sequence
  Synthetic oligonucleotide
ggcatactgtcaagcgcacgcatcgtgcct

SEQ ID NO: 388633 - DNA, 30 bp, Artificial Sequence
  Synthetic oligonucleotide
gcggagggcgtacattggcaggaattgcct

SEQ ID NO: 388634 - DNA, 30 bp, Artificial Sequence
  Synthetic oligonucleotide
atatttcagaactcaaagctatgattgcct

SEQ ID NO: 388635 - DNA, 30 bp, Artificial Sequence
  Synthetic oligonucleotide
actctcgcgtttcgcgagcaaatattgcct

SEQ ID NO: 388636 - DNA, 30 bp, Artificial Sequence
  Synthetic oligonucleotide
gtcaaaggctcgtgtctccgtcacttgcct

SEQ ID NO: 388637 - DNA, 30 bp, Artificial Sequence
  Synthetic oligonucleotide
ggaccaaaattaatgccgaaaggcttgcct

SEQ ID NO: 388638 - DNA, 30 bp, Artificial Sequence
  Synthetic oligonucleotide
gttgatctatatgcgtaattcctgttgcct

SEQ ID NO: 388639 - DNA, 30 bp, Artificial Sequence
  Synthetic oligonucleotide
cttatacggaggtctaggcttcaaaatcct

SEQ ID NO: 388640 - DNA, 30 bp, Artificial Sequence
  Synthetic oligonucleotide
aagaggaaagtgtaacatgatacaaatcct

SEQ ID NO: 388641 - DNA, 30 bp, Artificial Sequence
  Synthetic oligonucleotide
aaactctagggacagctaggtggaaatcct

SEQ ID NO: 388642 - DNA, 30 bp, Artificial Sequence
  Synthetic oligonucleotide
agagtgacctgtagttgtcgctccaatcct

SEQ ID NO: 388643 - DNA, 30 bp, Artificial Sequence
  Synthetic oligonucleotide
gcaacgtattgtcccgttagaggcaatcct

SEQ ID NO: 388644 - DNA, 30 bp, Artificial Sequence
  Synthetic oligonucleotide
agttcaagtgatatcgtcacggggaatcct

SEQ ID NO: 388645 - DNA, 30 bp, Artificial Sequence
  Synthetic oligonucleotide
gctaaaaaccgatgttaataatcacatcct

SEQ ID NO: 388646 - DNA, 30 bp, Artificial Sequence
  Synthetic oligonucleotide
atgagagggtcggcaatgctgccccatcct

SEQ ID NO: 388647 - DNA, 30 bp, Artificial Sequence
  Synthetic oligonucleotide
ccaaggaggcgtctgctactatgccatcct

SEQ ID NO: 388648 - DNA, 30 bp, Artificial Sequence
  Synthetic oligonucleotide
ggaatgcgattatatgtaagcacgcatcct

SEQ ID NO: 388649 - DNA, 30 bp, Artificial Sequence
  Synthetic oligonucleotide
gtagctcttatgcacggtaactcgcatcct

SEQ ID NO: 388650 - DNA, 30 bp, Artificial Sequence
  Synthetic oligonucleotide
acattagtctcagggattgcgttgcatcct

SEQ ID NO: 388651 - DNA, 30 bp, Artificial Sequence
  Synthetic oligonucleotide
cgggcggaccttgatggccacattcatcct

SEQ ID NO: 388652 - DNA, 30 bp, Artificial Sequence
  Synthetic oligonucleotide
agcgccataatgacgactcagggagatcct

SEQ ID NO: 388653 - DNA, 30 bp, Artificial Sequence
  Synthetic oligonucleotide
tttggcgacacccggcatattcgtgatcct

SEQ ID NO: 388654 - DNA, 30 bp, Artificial Sequence
  Synthetic oligonucleotide
accagttagaagctttaacaccttgatcct

SEQ ID NO: 388655 - DNA, 30 bp, Artificial Sequence
  Synthetic oligonucleotide
caacgcgtactgtcaaccagggtatatcct

SEQ ID NO: 388656 - DNA, 30 bp, Artificial Sequence
  Synthetic oligonucleotide
ctggtgttgaaatgttcggttcactatcct

SEQ ID NO: 388657 - DNA, 30 bp, Artificial Sequence
  Synthetic oligonucleotide
aaagccatagcatatacgctcaattatcct

SEQ ID NO: 388658 - DNA, 30 bp, Artificial Sequence
  Synthetic oligonucleotide
tcagccagaatactggactcatattatcct

SEQ ID NO: 388659 - DNA, 30 bp, Artificial Sequence
  Synthetic oligonucleotide
acaaatggcgtagtaatcccggtttatcct

SEQ ID NO: 388660 - DNA, 30 bp, Artificial Sequence
  Synthetic oligonucleotide
tgtggtggctccctagtggaccccactcct

SEQ ID NO: 388661 - DNA, 30 bp, Artificial Sequence
  Synthetic oligonucleotide
cccattagggattataatacctccactcct

SEQ ID NO: 388662 - DNA, 30 bp, Artificial Sequence
  Synthetic oligonucleotide
ctagtccgatgtgttgcaggagggactcct

SEQ ID NO: 388663 - DNA, 30 bp, Artificial Sequence
  Synthetic oligonucleotide
cccataattgaataaaatgggttgactcct

SEQ ID NO: 388664 - DNA, 30 bp, Artificial Sequence
  Synthetic oligonucleotide
tgatgacggataacgcgtaaggatactcct

SEQ ID NO: 388665 - DNA, 30 bp, Artificial Sequence
  Synthetic oligonucleotide
ctcaaatttagctacagaacagggcctcct

SEQ ID NO: 388666 - DNA, 30 bp, Artificial Sequence
  Synthetic oligonucleotide
gctacaaatgggtatttatatatgcctcct

SEQ ID NO: 388667 - DNA, 30 bp, Artificial Sequence
  Synthetic oligonucleotide
cggagtgacagcacaggaatgcgcgctcct

SEQ ID NO: 388668 - DNA, 30 bp, Artificial Sequence
  Synthetic oligonucleotide
agcgctgatcgtcgttgctgtagggctcct

SEQ ID NO: 388669 - DNA, 30 bp, Artificial Sequence
  Synthetic oligonucleotide
cgcatggcacatgcaatttgcatctctcct

SEQ ID NO: 388670 - DNA, 30 bp, Artificial Sequence
  Synthetic oligonucleotide
acgccatgccttgggggaccgacgtctcct

SEQ ID NO: 388671 - DNA, 30 bp, Artificial Sequence
  Synthetic oligonucleotide
ggcaaggctagactctcggtctattctcct

SEQ ID NO: 388672 - DNA, 30 bp, Artificial Sequence
  Synthetic oligonucleotide
cccttcagaggatagagactgataagtcct

SEQ ID NO: 388673 - DNA, 30 bp, Artificial Sequence
  Synthetic oligonucleotide
tggcataatgtagaagccagcgacagtcct

SEQ ID NO: 388674 - DNA, 30 bp, Artificial Sequence
  Synthetic oligonucleotide
ccgaataacgacattgctagggtcagtcct

SEQ ID NO: 388675 - DNA, 30 bp, Artificial Sequence
  Synthetic oligonucleotide
cggcaagtacgccctcaagacacgagtcct

SEQ ID NO: 388676 - DNA, 30 bp, Artificial Sequence
  Synthetic oligonucleotide
ttgtgaggctgcctcgtgtcacggagtcct

SEQ ID NO: 388677 - DNA, 30 bp, Artificial Sequence
  Synthetic oligonucleotide
tacgagggtatttattaagctggtagtcct

SEQ ID NO: 388678 - DNA, 30 bp, Artificial Sequence
  Synthetic oligonucleotide
agtcgaaactggccctgggcacaacgtcct

SEQ ID NO: 388679 - DNA, 30 bp, Artificial Sequence
  Synthetic oligonucleotide
caatcttagagtttatattcacaacgtcct

SEQ ID NO: 388680 - DNA, 30 bp, Artificial Sequence
  Synthetic oligonucleotide
tgagcacatgctcgcggtcctgagcgtcct

SEQ ID NO: 388681 - DNA, 30 bp, Artificial Sequence
  Synthetic oligonucleotide
actaattaattcctatgtgctctgcgtcct

SEQ ID NO: 388682 - DNA, 30 bp, Artificial Sequence
  Synthetic oligonucleotide
gcgccttggttaaggggattctatcgtcct

SEQ ID NO: 388683 - DNA, 30 bp, Artificial Sequence
  Synthetic oligonucleotide
tgagtttggcgggtccagaacattcgtcct

SEQ ID NO: 388684 - DNA, 30 bp, Artificial Sequence
  Synthetic oligonucleotide
cgccactcggatggcagcgagagaggtcct

SEQ ID NO: 388685 - DNA, 30 bp, Artificial Sequence
  Synthetic oligonucleotide
attcggacgccaaatcgctggagaggtcct

SEQ ID NO: 388686 - DNA, 30 bp, Artificial Sequence
  Synthetic oligonucleotide
caataacgattttactgttgcggaggtcct

SEQ ID NO: 388687 - DNA, 30 bp, Artificial Sequence
  Synthetic oligonucleotide
aaatagtcgcaagatacgcgggccggtcct

SEQ ID NO: 388688 - DNA, 30 bp, Artificial Sequence
  Synthetic oligonucleotide
tccgactgagagtgccatctgtggggtcct

SEQ ID NO: 388689 - DNA, 30 bp, Artificial Sequence
  Synthetic oligonucleotide
gtaaagagtacggcgctaacagtgggtcct

SEQ ID NO: 388690 - DNA, 30 bp, Artificial Sequence
  Synthetic oligonucleotide
tgtgaaacctgtcctcagttctgtggtcct

SEQ ID NO: 388691 - DNA, 30 bp, Artificial Sequence
  Synthetic oligonucleotide
tatcccgacgattcgagttcagcatgtcct

SEQ ID NO: 388692 - DNA, 30 bp, Artificial Sequence
  Synthetic oligonucleotide
gccgcctgaaatgagttgcggctatgtcct

SEQ ID NO: 388693 - DNA, 30 bp, Artificial Sequence
  Synthetic oligonucleotide
tgatatacaaaggtaaatatgttgtgtcct

SEQ ID NO: 388694 - DNA, 30 bp, Artificial Sequence
  Synthetic oligonucleotide
tagtttccaacgaatgtccctgattgtcct

SEQ ID NO: 388695 - DNA, 30 bp, Artificial Sequence
  Synthetic oligonucleotide
tacgatatgggtcaacctgccaaaattcct

SEQ ID NO: 388696 - DNA, 30 bp, Artificial Sequence
  Synthetic oligonucleotide
ggtcactgctttgggggacattcaattcct

SEQ ID NO: 388697 - DNA, 30 bp, Artificial Sequence
  Synthetic oligonucleotide
tcctgtgggcagatcggagcggacattcct

SEQ ID NO: 388698 - DNA, 30 bp, Artificial Sequence
  Synthetic oligonucleotide
cgataagttgccatttgtactaccattcct

SEQ ID NO: 388699 - DNA, 30 bp, Artificial Sequence
  Synthetic oligonucleotide
gccattcttgcttttgagtaaatgattcct

SEQ ID NO: 388700 - DNA, 30 bp, Artificial Sequence
  Synthetic oligonucleotide
gattcggcatctgcatgtgggcgtattcct

SEQ ID NO: 388701 - DNA, 30 bp, Artificial Sequence
  Synthetic oligonucleotide
caactcatgaggtcacaggcttgccttcct

SEQ ID NO: 388702 - DNA, 30 bp, Artificial Sequence
  Synthetic oligonucleotide
ggtgggcgcggaacatagcggtcgcttcct

SEQ ID NO: 388703 - DNA, 30 bp, Artificial Sequence
  Synthetic oligonucleotide
catgcctcggtactgattagcggtcttcct

SEQ ID NO: 388704 - DNA, 30 bp, Artificial Sequence
  Synthetic oligonucleotide
agtcgttatatattggtacacaaagttcct

SEQ ID NO: 388705 - DNA, 31 bp, Artificial Sequence
  Synthetic oligonucleotide
acgctcattgagcatgactcaaaacgttcct

SEQ ID NO: 388706 - DNA, 30 bp, Artificial Sequence
  Synthetic oligonucleotide
aaccgtattacttgtaaaatacacgttcct

SEQ ID NO: 388707 - DNA, 30 bp, Artificial Sequence
  Synthetic oligonucleotide
ggaaagcactcttgagcttgaaaggttcct

SEQ ID NO: 388708 - DNA, 30 bp, Artificial Sequence
  Synthetic oligonucleotide
gcgcaccggcacacttagcgtgcggttcct

SEQ ID NO: 388709 - DNA, 30 bp, Artificial Sequence
  Synthetic oligonucleotide
cgacgatgtggaggtctgccttcggttcct

SEQ ID NO: 388710 - DNA, 30 bp, Artificial Sequence
  Synthetic oligonucleotide
tggttgtgcacaacacgtaagttggttcct

SEQ ID NO: 388711 - DNA, 30 bp, Artificial Sequence
  Synthetic oligonucleotide
tgctatcacacttaataatccggatttcct

SEQ ID NO: 388712 - DNA, 30 bp, Artificial Sequence
  Synthetic oligonucleotide
atccacacgttttccatgtttttatttcct

SEQ ID NO: 388713 - DNA, 30 bp, Artificial Sequence
  Synthetic oligonucleotide
ccatatgtaacggcctcggggcggtttcct

SEQ ID NO: 388714 - DNA, 30 bp, Artificial Sequence
  Synthetic oligonucleotide
gtccagaatggcagtgaggtcagttttcct

SEQ ID NO: 388715 - DNA, 30 bp, Artificial Sequence
  Synthetic oligonucleotide
caaatgcgagttcgaatttctcgaaaagct

SEQ ID NO: 388716 - DNA, 30 bp, Artificial Sequence
  Synthetic oligonucleotide
agcccggaattcatccattagcccaaagct

SEQ ID NO: 388717 - DNA, 30 bp, Artificial Sequence
  Synthetic oligonucleotide
agcttatcttgtcataagttcatgaaagct

SEQ ID NO: 388718 - DNA, 30 bp, Artificial Sequence
  Synthetic oligonucleotide
gcttggtatacttcattcaaattgaaagct

SEQ ID NO: 388719 - DNA, 30 bp, Artificial Sequence
  Synthetic oligonucleotide
taggatgtctgactcgggatctcacaagct

SEQ ID NO: 388720 - DNA, 30 bp, Artificial Sequence
  Synthetic oligonucleotide
gggtctgccgatgggcaaattcgccaagct

SEQ ID NO: 388721 - DNA, 30 bp, Artificial Sequence
  Synthetic oligonucleotide
caggctcttacatgatgggtcggccaagct

SEQ ID NO: 388722 - DNA, 30 bp, Artificial Sequence
  Synthetic oligonucleotide
attttaatggccgggagaccacagcaagct

SEQ ID NO: 388723 - DNA, 30 bp, Artificial Sequence
  Synthetic oligonucleotide
gaccgaggctacgccttatgagcgcaagct

SEQ ID NO: 388724 - DNA, 30 bp, Artificial Sequence
  Synthetic oligonucleotide
ggtaatcgctgtagtttcctcaggcaagct

SEQ ID NO: 388725 - DNA, 30 bp, Artificial Sequence
  Synthetic oligonucleotide
gggtctaaagcactccgaaagatgcaagct

SEQ ID NO: 388726 - DNA, 30 bp, Artificial Sequence
  Synthetic oligonucleotide
gataagctcagaagcgtgacctgtcaagct

SEQ ID NO: 388727 - DNA, 30 bp, Artificial Sequence
  Synthetic oligonucleotide
aaaccgagcatgaatacttttaaagaagct

SEQ ID NO: 388728 - DNA, 30 bp, Artificial Sequence
  Synthetic oligonucleotide
ttgtttaaattcgcgatgtgcttcgaagct

SEQ ID NO: 388729 - DNA, 30 bp, Artificial Sequence
  Synthetic oligonucleotide
tcatatgttaaataagtgatttaggaagct

SEQ ID NO: 388730 - DNA, 30 bp, Artificial Sequence
  Synthetic oligonucleotide
tcttcaggatagggcaatgaacatgaagct

SEQ ID NO: 388731 - DNA, 30 bp, Artificial Sequence
  Synthetic oligonucleotide
cagtgctattgttggtcggaatctgaagct

SEQ ID NO: 388732 - DNA, 30 bp, Artificial Sequence
  Synthetic oligonucleotide
gaggctttattattcgattatcaataagct

SEQ ID NO: 388733 - DNA, 30 bp, Artificial Sequence
  Synthetic oligonucleotide
gcgaggcagaatttccttcatgactaagct

SEQ ID NO: 388734 - DNA, 30 bp, Artificial Sequence
  Synthetic oligonucleotide
aaacctgtgcttcgagcacggggctaagct

SEQ ID NO: 388735 - DNA, 30 bp, Artificial Sequence
  Synthetic oligonucleotide
tggcgaaatatagtcgcctggttgtaagct

SEQ ID NO: 388736 - DNA, 30 bp, Artificial Sequence
  Synthetic oligonucleotide
cttctaagaattctaggatgtccttaagct

SEQ ID NO: 388737 - DNA, 30 bp, Artificial Sequence
  Synthetic oligonucleotide
gtcgatgtagggaggtgtctataaacagct

SEQ ID NO: 388738 - DNA, 30 bp, Artificial Sequence
  Synthetic oligonucleotide
cccttgcatgaaggaatgcggttaacagct

SEQ ID NO: 388739 - DNA, 30 bp, Artificial Sequence
  Synthetic oligonucleotide
tactagtaacaagccgtggaaagcacagct

SEQ ID NO: 388740 - DNA, 30 bp, Artificial Sequence
  Synthetic oligonucleotide
tgtctaaaaatcgggttccctcgcacagct

SEQ ID NO: 388741 - DNA, 30 bp, Artificial Sequence
  Synthetic oligonucleotide
gacatcctatggggtagctggctcacagct

SEQ ID NO: 388742 - DNA, 30 bp, Artificial Sequence
  Synthetic oligonucleotide
caaagaatatactccagacattggacagct

SEQ ID NO: 388743 - DNA, 30 bp, Artificial Sequence
  Synthetic oligonucleotide
caaaagaatgatgcgttctttgatacagct

SEQ ID NO: 388744 - DNA, 30 bp, Artificial Sequence
  Synthetic oligonucleotide
tttccaaacgcaccagaagaacctacagct

SEQ ID NO: 388745 - DNA, 30 bp, Artificial Sequence
  Synthetic oligonucleotide
gccgagctgctgtctacacgcgaaccagct

SEQ ID NO: 388746 - DNA, 30 bp, Artificial Sequence
  Synthetic oligonucleotide
tgcttgtcatgtggcaccggtataccagct

SEQ ID NO: 388747 - DNA, 30 bp, Artificial Sequence
  Synthetic oligonucleotide
aggattcctcgaccgctattgctaccagct

SEQ ID NO: 388748 - DNA, 30 bp, Artificial Sequence
  Synthetic oligonucleotide
agccctaaactgcagttttatgctccagct

SEQ ID NO: 388749 - DNA, 30 bp, Artificial Sequence
  Synthetic oligonucleotide
attgtaaatgagtgggtcttacgtccagct

SEQ ID NO: 388750 - DNA, 30 bp, Artificial Sequence
  Synthetic oligonucleotide
catatttaataccgacgcatcatagcagct

SEQ ID NO: 388751 - DNA, 30 bp, Artificial Sequence
  Synthetic oligonucleotide
cgggccgatggcccttgagaaaccgcagct

SEQ ID NO: 388752 - DNA, 30 bp, Artificial Sequence
  Synthetic oligonucleotide
ataatacagtgagtgccgcaactcgcagct

SEQ ID NO: 388753 - DNA, 30 bp, Artificial Sequence
  Synthetic oligonucleotide
tttgccaaggggggcgctggcggggcagct

SEQ ID NO: 388754 - DNA, 30 bp, Artificial Sequence
  Synthetic oligonucleotide
tttaacaagcgtggatttcgatatgcagct

SEQ ID NO: 388755 - DNA, 30 bp, Artificial Sequence
  Synthetic oligonucleotide
cgtctatgaaaggctgagttatttgcagct

SEQ ID NO: 388756 - DNA, 30 bp, Artificial Sequence
  Synthetic oligonucleotide
gttcgtgacggttagtgtattacgtcagct

SEQ ID NO: 388757 - DNA, 30 bp, Artificial Sequence
  Synthetic oligonucleotide
tgaggtcgcgcatgacgaattgcgtcagct

SEQ ID NO: 388758 - DNA, 30 bp, Artificial Sequence
  Synthetic oligonucleotide
aacatgaatcaccacggacgctgttcagct

SEQ ID NO: 388759 - DNA, 30 bp, Artificial Sequence
  Synthetic oligonucleotide
cgaccagcatggtaggttttcgtttcagct

SEQ ID NO: 388760 - DNA, 30 bp, Artificial Sequence
  Synthetic oligonucleotide
gttggtgtggcgcagtatcataacagagct

SEQ ID NO: 388761 - DNA, 30 bp, Artificial Sequence
  Synthetic oligonucleotide
ttaggtcatacctttataagacccagagct

SEQ ID NO: 388762 - DNA, 30 bp, Artificial Sequence
  Synthetic oligonucleotide
gtataacgttgaattccgtatgtcagagct

SEQ ID NO: 388763 - DNA, 30 bp, Artificial Sequence
  Synthetic oligonucleotide
agatgggactctctctaatgatggagagct

SEQ ID NO: 388764 - DNA, 30 bp, Artificial Sequence
  Synthetic oligonucleotide
tctgggcggcttgtgaccaagtgccgagct

SEQ ID NO: 388765 - DNA, 30 bp, Artificial Sequence
  Synthetic oligonucleotide
ttgcaggacgtatctgaatctatccgagct

SEQ ID NO: 388766 - DNA, 30 bp, Artificial Sequence
  Synthetic oligonucleotide
ttcttagaaccgttattataacacggagct

SEQ ID NO: 388767 - DNA, 30 bp, Artificial Sequence
  Synthetic oligonucleotide
tcacactggagattagattcaaagggagct

SEQ ID NO: 388768 - DNA, 30 bp, Artificial Sequence
  Synthetic oligonucleotide
gaggggcatagtttctgtaatgagggagct

SEQ ID NO: 388769 - DNA, 30 bp, Artificial Sequence
  Synthetic oligonucleotide
atacatgaagtggcctacacgctgggagct

SEQ ID NO: 388770 - DNA, 30 bp, Artificial Sequence
  Synthetic oligonucleotide
gttagtgcgcatgagcaaggccatggagct

SEQ ID NO: 388771 - DNA, 30 bp, Artificial Sequence
  Synthetic oligonucleotide
gtctaatgttataggatttccaaatgagct

SEQ ID NO: 388772 - DNA, 30 bp, Artificial Sequence
  Synthetic oligonucleotide
aattcctgcaagtaggttaagtgatgagct

SEQ ID NO: 388773 - DNA, 30 bp, Artificial Sequence
  Synthetic oligonucleotide
gggcagtcaagtaaccaaacaatatgagct

SEQ ID NO: 388774 - DNA, 30 bp, Artificial Sequence
  Synthetic oligonucleotide
ccttagagggggagaccagagatatgagct

SEQ ID NO: 388775 - DNA, 30 bp, Artificial Sequence
  Synthetic oligonucleotide
ggtagccagtgctaatgttcgtactgagct

SEQ ID NO: 388776 - DNA, 30 bp, Artificial Sequence
  Synthetic oligonucleotide
taatggtcaaggtttctttgcgagtgagct

SEQ ID NO: 388777 - DNA, 30 bp, Artificial Sequence
  Synthetic oligonucleotide
tactacgggaggtccaaggcatggtgagct

SEQ ID NO: 388778 - DNA, 30 bp, Artificial Sequence
  Synthetic oligonucleotide
gaagaataacgaagctccgacgcttgagct

SEQ ID NO: 388779 - DNA, 30 bp, Artificial Sequence
  Synthetic oligonucleotide
tggaacgcaagtcccttatccttttgagct

SEQ ID NO: 388780 - DNA, 30 bp, Artificial Sequence
  Synthetic oligonucleotide
aatttagactaagatctcggaaaaatagct

SEQ ID NO: 388781 - DNA, 30 bp, Artificial Sequence
  Synthetic oligonucleotide
gttagaatcgactcattacgcaaaatagct

SEQ ID NO: 388782 - DNA, 30 bp, Artificial Sequence
  Synthetic oligonucleotide
gccttattcttcggtatgagtaaaatagct

SEQ ID NO: 388783 - DNA, 30 bp, Artificial Sequence
  Synthetic oligonucleotide
tacaactatcctccgcacgtatgaatagct

SEQ ID NO: 388784 - DNA, 30 bp, Artificial Sequence
  Synthetic oligonucleotide
agactagcattgtcgtaggtcaagatagct

SEQ ID NO: 388785 - DNA, 30 bp, Artificial Sequence
  Synthetic oligonucleotide
aggcgcccttgcaggcaagtgcagatagct

SEQ ID NO: 388786 - DNA, 30 bp, Artificial Sequence
  Synthetic oligonucleotide
cctaaatccgcggcatgaacggggatagct

SEQ ID NO: 388787 - DNA, 30 bp, Artificial Sequence
  Synthetic oligonucleotide
gtctacgccatggcatacaagatgatagct

SEQ ID NO: 388788 - DNA, 30 bp, Artificial Sequence
  Synthetic oligonucleotide
ggcaaggatcctattttatttagcctagct

SEQ ID NO: 388789 - DNA, 30 bp, Artificial Sequence
  Synthetic oligonucleotide
attttaggttcccgcggatccatcctagct

SEQ ID NO: 388790 - DNA, 30 bp, Artificial Sequence
  Synthetic oligonucleotide
aactcatgtataacgattgggatagtagct

SEQ ID NO: 388791 - DNA, 30 bp, Artificial Sequence
  Synthetic oligonucleotide
gaagccggataagttttcgcgtccgtagct

SEQ ID NO: 388792 - DNA, 30 bp, Artificial Sequence
  Synthetic oligonucleotide
gggtgacatacgccgcgcggactcgtagct

SEQ ID NO: 388793 - DNA, 30 bp, Artificial Sequence
  Synthetic oligonucleotide
cgggaaattcttcgctagtaaacggtagct

SEQ ID NO: 388794 - DNA, 30 bp, Artificial Sequence
  Synthetic oligonucleotide
tataacacctgggcttgaactacggtagct

SEQ ID NO: 388795 - DNA, 30 bp, Artificial Sequence
  Synthetic oligonucleotide
ttacctgtctcccttctaagaggggtagct

SEQ ID NO: 388796 - DNA, 30 bp, Artificial Sequence
  Synthetic oligonucleotide
atgtcggtaccgatataggggttggtagct

SEQ ID NO: 388797 - DNA, 30 bp, Artificial Sequence
  Synthetic oligonucleotide
cgcaaattaagaagccgtctgttggtagct

SEQ ID NO: 388798 - DNA, 30 bp, Artificial Sequence
  Synthetic oligonucleotide
ctttttagaccatgctgtacttacttagct

SEQ ID NO: 388799 - DNA, 30 bp, Artificial Sequence
  Synthetic oligonucleotide
cctgcacgccgtagacaagtatgcttagct

SEQ ID NO: 388800 - DNA, 30 bp, Artificial Sequence
  Synthetic oligonucleotide
tacaggagcgatctagacatacagttagct

SEQ ID NO: 388801 - DNA, 30 bp, Artificial Sequence
  Synthetic oligonucleotide
attccatgctgtatttgatggcggttagct

SEQ ID NO: 388802 - DNA, 30 bp, Artificial Sequence
  Synthetic oligonucleotide
acagaacggcatactttacacctgttagct

SEQ ID NO: 388803 - DNA, 30 bp, Artificial Sequence
  Synthetic oligonucleotide
aggtacaaagcaatgtcacagttgttagct

SEQ ID NO: 388804 - DNA, 30 bp, Artificial Sequence
  Synthetic oligonucleotide
ttataaacatgaccattgaataaaaacgct

SEQ ID NO: 388805 - DNA, 30 bp, Artificial Sequence
  Synthetic oligonucleotide
agctgtgacgctacgccgcggccaaacgct

SEQ ID NO: 388806 - DNA, 30 bp, Artificial Sequence
  Synthetic oligonucleotide
gactggaagttgccatcccccgcaaacgct

SEQ ID NO: 388807 - DNA, 30 bp, Artificial Sequence
  Synthetic oligonucleotide
cctaattatgctaagcgtcggtcaaacgct

SEQ ID NO: 388808 - DNA, 30 bp, Artificial Sequence
  Synthetic oligonucleotide
atattgctattcggggtgtggagaaacgct

SEQ ID NO: 388809 - DNA, 30 bp, Artificial Sequence
  Synthetic oligonucleotide
actgtctgcgatctcctgtatttcaacgct

SEQ ID NO: 388810 - DNA, 30 bp, Artificial Sequence
  Synthetic oligonucleotide
taggtccatgtcagccagttaaagaacgct

SEQ ID NO: 388811 - DNA, 30 bp, Artificial Sequence
  Synthetic oligonucleotide
tcacccacgtttgggtgttattataacgct

SEQ ID NO: 388812 - DNA, 30 bp, Artificial Sequence
  Synthetic oligonucleotide
gccgtcccgaagcacgtcacacctaacgct

SEQ ID NO: 388813 - DNA, 30 bp, Artificial Sequence
  Synthetic oligonucleotide
agtccaagagagtcctgggaaattaacgct

SEQ ID NO: 388814 - DNA, 30 bp, Artificial Sequence
  Synthetic oligonucleotide
atagccgggtgtcggctcaggaaacacgct

SEQ ID NO: 388815 - DNA, 30 bp, Artificial Sequence
  Synthetic oligonucleotide
gattgcgggacagcgcggttctggcacgct

SEQ ID NO: 388816 - DNA, 30 bp, Artificial Sequence
  Synthetic oligonucleotide
acggtgccctatcaagggaccgttcacgct

SEQ ID NO: 388817 - DNA, 30 bp, Artificial Sequence
  Synthetic oligonucleotide
acaaaaatcggcgaccgcccgacagacgct

SEQ ID NO: 388818 - DNA, 30 bp, Artificial Sequence
  Synthetic oligonucleotide
ttgtcacactctccaatggctagagacgct

SEQ ID NO: 388819 - DNA, 30 bp, Artificial Sequence
  Synthetic oligonucleotide
cgcccacggtaagaggagcctatagacgct

SEQ ID NO: 388820 - DNA, 30 bp, Artificial Sequence
  Synthetic oligonucleotide
gcctcaagcgaggcaagacgcgacgacgct

SEQ ID NO: 388821 - DNA, 30 bp, Artificial Sequence
  Synthetic oligonucleotide
aacgttaaaagcttaccgcgagccgacgct

SEQ ID NO: 388822 - DNA, 30 bp, Artificial Sequence
  Synthetic oligonucleotide
aatatcacacgatagtaggctgtcgacgct

SEQ ID NO: 388823 - DNA, 30 bp, Artificial Sequence
  Synthetic oligonucleotide
gggtagtgtacttaaactcgattcgacgct

SEQ ID NO: 388824 - DNA, 30 bp, Artificial Sequence
  Synthetic oligonucleotide
aagctggtgtccacggcacacacggacgct

SEQ ID NO: 388825 - DNA, 30 bp, Artificial Sequence
  Synthetic oligonucleotide
attaagtaccatagatctaaatcggacgct

SEQ ID NO: 388826 - DNA, 30 bp, Artificial Sequence
  Synthetic oligonucleotide
caagagaccggacatgtccacagggacgct

SEQ ID NO: 388827 - DNA, 30 bp, Artificial Sequence
  Synthetic oligonucleotide
attgggacttaatgttgggacgtggacgct

SEQ ID NO: 388828 - DNA, 30 bp, Artificial Sequence
  Synthetic oligonucleotide
aagttgaaatggcgacacgagattgacgct

SEQ ID NO: 388829 - DNA, 30 bp, Artificial Sequence
  Synthetic oligonucleotide
gaccgaccccgagcatcgtcgtaatacgct

SEQ ID NO: 388830 - DNA, 30 bp, Artificial Sequence
  Synthetic oligonucleotide
gatcgcataggagtatctctattctacgct

SEQ ID NO: 388831 - DNA, 30 bp, Artificial Sequence
  Synthetic oligonucleotide
ttggcgctacgcgaacgtaagtcgtacgct

SEQ ID NO: 388832 - DNA, 30 bp, Artificial Sequence
  Synthetic oligonucleotide
gcgtatactgaccgactggcacaaaccgct

SEQ ID NO: 388833 - DNA, 30 bp, Artificial Sequence
  Synthetic oligonucleotide
ttgggtcagcgtagtctggactacaccgct

SEQ ID NO: 388834 - DNA, 30 bp, Artificial Sequence
  Synthetic oligonucleotide
gcctctatagtgcatgtgcataccaccgct

SEQ ID NO: 388835 - DNA, 30 bp, Artificial Sequence
  Synthetic oligonucleotide
tagtttaaaaacgctttagaacccaccgct

SEQ ID NO: 388836 - DNA, 30 bp, Artificial Sequence
  Synthetic oligonucleotide
cactaattaccaccggtttactggaccgct

SEQ ID NO: 388837 - DNA, 30 bp, Artificial Sequence
  Synthetic oligonucleotide
tatgcgtgaatggactaaacgctacccgct

SEQ ID NO: 388838 - DNA, 30 bp, Artificial Sequence
  Synthetic oligonucleotide
acgacacttatgtcatagctgctccccgct

SEQ ID NO: 388839 - DNA, 30 bp, Artificial Sequence
  Synthetic oligonucleotide
aaataaatggcctaatatgggaagcccgct

SEQ ID NO: 388840 - DNA, 30 bp, Artificial Sequence
  Synthetic oligonucleotide
ttcctagatgagggtgttacggttcccgct

SEQ ID NO: 388841 - DNA, 30 bp, Artificial Sequence
  Synthetic oligonucleotide
cactttctgcggacagcctatttagccgct

SEQ ID NO: 388842 - DNA, 30 bp, Artificial Sequence
  Synthetic oligonucleotide
acaattattccgacgggggcacacgccgct

SEQ ID NO: 388843 - DNA, 30 bp, Artificial Sequence
  Synthetic oligonucleotide
cactattttgtgagacggccgcaatccgct

SEQ ID NO: 388844 - DNA, 30 bp, Artificial Sequence
  Synthetic oligonucleotide
ggtgctattcttccgcgctttgaatccgct

SEQ ID NO: 388845 - DNA, 30 bp, Artificial Sequence
  Synthetic oligonucleotide
acaaaggtaaactgagaacaaagatccgct

SEQ ID NO: 388846 - DNA, 30 bp, Artificial Sequence
  Synthetic oligonucleotide
tgacgttatttagtcttagcaatatccgct

SEQ ID NO: 388847 - DNA, 30 bp, Artificial Sequence
  Synthetic oligonucleotide
tggagtagaaaaggattattcgtatccgct

SEQ ID NO: 388848 - DNA, 30 bp, Artificial Sequence
  Synthetic oligonucleotide
tacaggttttgactcgatgcttggtccgct

SEQ ID NO: 388849 - DNA, 30 bp, Artificial Sequence
  Synthetic oligonucleotide
ggcctcatggtgcaaaaagtactgtccgct

SEQ ID NO: 388850 - DNA, 30 bp, Artificial Sequence
  Synthetic oligonucleotide
atatcacgtgttaatatagcaacttccgct

SEQ ID NO: 388851 - DNA, 30 bp, Artificial Sequence
  Synthetic oligonucleotide
taagcatggcggtagattttaccttccgct

SEQ ID NO: 388852 - DNA, 30 bp, Artificial Sequence
  Synthetic oligonucleotide
ctccttcggcactcactatgtcacagcgct

SEQ ID NO: 388853 - DNA, 30 bp, Artificial Sequence
  Synthetic oligonucleotide
gttagagtgcacccaagcatacggagcgct

SEQ ID NO: 388854 - DNA, 30 bp, Artificial Sequence
  Synthetic oligonucleotide
tgtacaggccatctttcatttcggagcgct

SEQ ID NO: 388855 - DNA, 30 bp, Artificial Sequence
  Synthetic oligonucleotide
ccaagcgcaagttcgcgatctcctagcgct

SEQ ID NO: 388856 - DNA, 30 bp, Artificial Sequence
  Synthetic oligonucleotide
gatgaatacagcctatgtgccagccgcgct

SEQ ID NO: 388857 - DNA, 30 bp, Artificial Sequence
  Synthetic oligonucleotide
acggaatatattgggcaggcgctccgcgct

SEQ ID NO: 388858 - DNA, 30 bp, Artificial Sequence
  Synthetic oligonucleotide
atgtacgtcagctgggtacgacctcgcgct

SEQ ID NO: 388859 - DNA, 30 bp, Artificial Sequence
  Synthetic oligonucleotide
ctaggctatcagtgtagtaagcgaggcgct

SEQ ID NO: 388860 - DNA, 30 bp, Artificial Sequence
  Synthetic oligonucleotide
tgcagcggatgcgtggttgagtgaggcgct

SEQ ID NO: 388861 - DNA, 30 bp, Artificial Sequence
  Synthetic oligonucleotide
tcctttgaaagatggggttcgctaggcgct

SEQ ID NO: 388862 - DNA, 30 bp, Artificial Sequence
  Synthetic oligonucleotide
atcttaagcagatcaccccgggtaggcgct

SEQ ID NO: 388863 - DNA, 30 bp, Artificial Sequence
  Synthetic oligonucleotide
ccaataattcgcctaaatttgcccggcgct

SEQ ID NO: 388864 - DNA, 30 bp, Artificial Sequence
  Synthetic oligonucleotide
tccataatcggatagtgttaccagggcgct

SEQ ID NO: 388865 - DNA, 30 bp, Artificial Sequence
  Synthetic oligonucleotide
caagggcgcaagctcccgtgaatgggcgct

SEQ ID NO: 388866 - DNA, 29 bp, Artificial Sequence
  Synthetic oligonucleotide
aaatacatatatcggggggtgctggcgct

SEQ ID NO: 388867 - DNA, 30 bp, Artificial Sequence
  Synthetic oligonucleotide
tcacaccacaaacctttctaaattggcgct

SEQ ID NO: 388868 - DNA, 30 bp, Artificial Sequence
  Synthetic oligonucleotide
gggaggcggcaaatcttatgcaaatgcgct

SEQ ID NO: 388869 - DNA, 30 bp, Artificial Sequence
  Synthetic oligonucleotide
actaatagtgatagtagactgagatgcgct

SEQ ID NO: 388870 - DNA, 30 bp, Artificial Sequence
  Synthetic oligonucleotide
agaaatccgaaactattatttggatgcgct

SEQ ID NO: 388871 - DNA, 30 bp, Artificial Sequence
  Synthetic oligonucleotide
ccaatactttaggtgtatttctgatgcgct

SEQ ID NO: 388872 - DNA, 30 bp, Artificial Sequence
  Synthetic oligonucleotide
atgtctatactagcccactgtggctgcgct

SEQ ID NO: 388873 - DNA, 30 bp, Artificial Sequence
  Synthetic oligonucleotide
tgcaaagcgttaattaccttgcggtgcgct

SEQ ID NO: 388874 - DNA, 30 bp, Artificial Sequence
  Synthetic oligonucleotide
ttcggacggtatccgctcgaaatttgcgct

SEQ ID NO: 388875 - DNA, 30 bp, Artificial Sequence
  Synthetic oligonucleotide
ttacagaacagctctatctaggcaatcgct

SEQ ID NO: 388876 - DNA, 30 bp, Artificial Sequence
  Synthetic oligonucleotide
tgcaaggcgtgtctgtgatcgacgatcgct

SEQ ID NO: 388877 - DNA, 30 bp, Artificial Sequence
  Synthetic oligonucleotide
tcaagtgtggtcctgggaaaatggatcgct

SEQ ID NO: 388878 - DNA, 30 bp, Artificial Sequence
  Synthetic oligonucleotide
aagaaactcaaggtcggacatttgatcgct

SEQ ID NO: 388879 - DNA, 30 bp, Artificial Sequence
  Synthetic oligonucleotide
tgagcattcggttctcagcacgacctcgct

SEQ ID NO: 388880 - DNA, 30 bp, Artificial Sequence
  Synthetic oligonucleotide
gaatcagcgaaagaagggcatcggctcgct

SEQ ID NO: 388881 - DNA, 30 bp, Artificial Sequence
  Synthetic oligonucleotide
acctacacaccaatgtggcgatcagtcgct

SEQ ID NO: 388882 - DNA, 30 bp, Artificial Sequence
  Synthetic oligonucleotide
tcttaagctacgaattatttatgcgtcgct

SEQ ID NO: 388883 - DNA, 30 bp, Artificial Sequence
  Synthetic oligonucleotide
agttgggtcctatgagaagactgcgtcgct

SEQ ID NO: 388884 - DNA, 30 bp, Artificial Sequence
  Synthetic oligonucleotide
tagaacctgttagaagtcgtattcgtcgct

SEQ ID NO: 388885 - DNA, 30 bp, Artificial Sequence
  Synthetic oligonucleotide
ggaagcacgacagcatttgggttcgtcgct

SEQ ID NO: 388886 - DNA, 30 bp, Artificial Sequence
  Synthetic oligonucleotide
ataatcaacgaacctatcatccgggtcgct

SEQ ID NO: 388887 - DNA, 30 bp, Artificial Sequence
  Synthetic oligonucleotide
gcgcgggagagtctctcgctattggtcgct

SEQ ID NO: 388888 - DNA, 30 bp, Artificial Sequence
  Synthetic oligonucleotide
ggaatagacgcacattattctagtgtcgct

SEQ ID NO: 388889 - DNA, 30 bp, Artificial Sequence
  Synthetic oligonucleotide
agcagatgggttttgtagtgtcttgtcgct

SEQ ID NO: 388890 - DNA, 30 bp, Artificial Sequence
  Synthetic oligonucleotide
tggtacctcttagctggcgggcaattcgct

SEQ ID NO: 388891 - DNA, 30 bp, Artificial Sequence
  Synthetic oligonucleotide
tgggcgattgaactgcgtccataattcgct

SEQ ID NO: 388892 - DNA, 30 bp, Artificial Sequence
  Synthetic oligonucleotide
taccccctcactcgcacggtgtagttcgct

SEQ ID NO: 388893 - DNA, 30 bp, Artificial Sequence
  Synthetic oligonucleotide
attttgtagttgtttgtgactaggttcgct

SEQ ID NO: 388894 - DNA, 30 bp, Artificial Sequence
  Synthetic oligonucleotide
gacttagtaaaattgaggatccggttcgct

SEQ ID NO: 388895 - DNA, 30 bp, Artificial Sequence
  Synthetic oligonucleotide
agatgtttgaccacctgaaaacatttcgct

SEQ ID NO: 388896 - DNA, 30 bp, Artificial Sequence
  Synthetic oligonucleotide
aaaataaagagctaaacggatcatttcgct

SEQ ID NO: 388897 - DNA, 30 bp, Artificial Sequence
  Synthetic oligonucleotide
gatgcatcagggatcgatagccctttcgct

SEQ ID NO: 388898 - DNA, 30 bp, Artificial Sequence
  Synthetic oligonucleotide
ttatagaatgtagcgatgtccaaaaaggct

SEQ ID NO: 388899 - DNA, 30 bp, Artificial Sequence
  Synthetic oligonucleotide
ttaagggcatatctttattttgaaaaggct

SEQ ID NO: 388900 - DNA, 30 bp, Artificial Sequence
  Synthetic oligonucleotide
tccatccagctgactgaatttcgcaaggct

SEQ ID NO: 388901 - DNA, 30 bp, Artificial Sequence
  Synthetic oligonucleotide
tgcaaggttctgcgtggccgatagaaggct

SEQ ID NO: 388902 - DNA, 30 bp, Artificial Sequence
  Synthetic oligonucleotide
aaagcttgagtcattatacgcgtgaaggct

SEQ ID NO: 388903 - DNA, 30 bp, Artificial Sequence
  Synthetic oligonucleotide
ctcttgcacatatagaagtcacttaaggct

SEQ ID NO: 388904 - DNA, 30 bp, Artificial Sequence
  Synthetic oligonucleotide
agttcaagaggagataccgcaaaacaggct

SEQ ID NO: 388905 - DNA, 30 bp, Artificial Sequence
  Synthetic oligonucleotide
gattacaggagttgtaagctctaacaggct

SEQ ID NO: 388906 - DNA, 30 bp, Artificial Sequence
  Synthetic oligonucleotide
cctgatgagaccgaattgcattcacaggct

SEQ ID NO: 388907 - DNA, 30 bp, Artificial Sequence
  Synthetic oligonucleotide
tgagtttcagtttcggggccgttacaggct

SEQ ID NO: 388908 - DNA, 29 bp, Artificial Sequence
  Synthetic oligonucleotide
ggatccctcaaactgtacagatccaggct

SEQ ID NO: 388909 - DNA, 30 bp, Artificial Sequence
  Synthetic oligonucleotide
tccgccgccccggaacatcgattccaggct

SEQ ID NO: 388910 - DNA, 30 bp, Artificial Sequence
  Synthetic oligonucleotide
ttgtaacactatttggtgatcattcaggct

SEQ ID NO: 388911 - DNA, 30 bp, Artificial Sequence
  Synthetic oligonucleotide
ctctacacatccgttaccagctttcaggct

SEQ ID NO: 388912 - DNA, 30 bp, Artificial Sequence
  Synthetic oligonucleotide
accaaatagagccttctggcaaacgaggct

SEQ ID NO: 388913 - DNA, 30 bp, Artificial Sequence
  Synthetic oligonucleotide
agtttagggggagttcgtcaacgcgaggct

SEQ ID NO: 388914 - DNA, 30 bp, Artificial Sequence
  Synthetic oligonucleotide
tacactacgggggtgcttcaatcggaggct

SEQ ID NO: 388915 - DNA, 30 bp, Artificial Sequence
  Synthetic oligonucleotide
tgcgctcccccgacggcatcgcgggaggct

SEQ ID NO: 388916 - DNA, 30 bp, Artificial Sequence
  Synthetic oligonucleotide
cgtcataaccttcaaattattaatgaggct

SEQ ID NO: 388917 - DNA, 30 bp, Artificial Sequence
  Synthetic oligonucleotide
gcgcttaataaagatgctatcgcataggct

SEQ ID NO: 388918 - DNA, 30 bp, Artificial Sequence
  Synthetic oligonucleotide
gcaaaacatcgacgtctcctacgataggct

SEQ ID NO: 388919 - DNA, 30 bp, Artificial Sequence
  Synthetic oligonucleotide
tattctgtgcggtgggagacaacctaggct

SEQ ID NO: 388920 - DNA, 30 bp, Artificial Sequence
  Synthetic oligonucleotide
aaattggagaatcttgcccaggtctaggct

SEQ ID NO: 388921 - DNA, 30 bp, Artificial Sequence
  Synthetic oligonucleotide
cattgaacgtacaaggaataagattaggct

SEQ ID NO: 388922 - DNA, 30 bp, Artificial Sequence
  Synthetic oligonucleotide
aggagaggtccgctcacgggcccttaggct

SEQ ID NO: 388923 - DNA, 30 bp, Artificial Sequence
  Synthetic oligonucleotide
gcggggctaaacggtacagttgcttaggct

SEQ ID NO: 388924 - DNA, 30 bp, Artificial Sequence
  Synthetic oligonucleotide
ccgaccacaaaaagcctttacgcaacggct

SEQ ID NO: 388925 - DNA, 30 bp, Artificial Sequence
  Synthetic oligonucleotide
ggcctcctagcatcttgattgcgcacggct

SEQ ID NO: 388926 - DNA, 30 bp, Artificial Sequence
  Synthetic oligonucleotide
cacactaaggcgttggaaatgggcacggct

SEQ ID NO: 388927 - DNA, 30 bp, Artificial Sequence
  Synthetic oligonucleotide
tcgccccggagcaactttaaactcacggct

SEQ ID NO: 388928 - DNA, 30 bp, Artificial Sequence
  Synthetic oligonucleotide
ctctgtaaatcggcaacgcgtattacggct

SEQ ID NO: 388929 - DNA, 30 bp, Artificial Sequence
  Synthetic oligonucleotide
tatagttacttatagaatagtcttacggct

SEQ ID NO: 388930 - DNA, 30 bp, Artificial Sequence
  Synthetic oligonucleotide
tctgccggtatttatagttcaggcccggct

SEQ ID NO: 388931 - DNA, 30 bp, Artificial Sequence
  Synthetic oligonucleotide
aatcctttgaataaagcgatctatccggct

SEQ ID NO: 388932 - DNA, 30 bp, Artificial Sequence
  Synthetic oligonucleotide
gcggcactcagtcggaataatgcagcggct

SEQ ID NO: 388933 - DNA, 30 bp, Artificial Sequence
  Synthetic oligonucleotide
ctctcggacctgtcaaacgatgaggcggct

SEQ ID NO: 388934 - DNA, 30 bp, Artificial Sequence
  Synthetic oligonucleotide
atctttcgtcaggatctcagaagtgcggct

SEQ ID NO: 388935 - DNA, 30 bp, Artificial Sequence
  Synthetic oligonucleotide
ggcagacagtcgggaggtttccgatcggct

SEQ ID NO: 388936 - DNA, 30 bp, Artificial Sequence
  Synthetic oligonucleotide
cggcagaagcgccgtggtccaaactcggct

SEQ ID NO: 388937 - DNA, 30 bp, Artificial Sequence
  Synthetic oligonucleotide
gggccacccacgcacaaatctatgtcggct

SEQ ID NO: 388938 - DNA, 30 bp, Artificial Sequence
  Synthetic oligonucleotide
agtgccgcctgacggctcatacattcggct

SEQ ID NO: 388939 - DNA, 30 bp, Artificial Sequence
  Synthetic oligonucleotide
ctacgccacttatatcaccgatgttcggct

SEQ ID NO: 388940 - DNA, 30 bp, Artificial Sequence
  Synthetic oligonucleotide
aacatttgcgtggtttaaggtaaaagggct

SEQ ID NO: 388941 - DNA, 30 bp, Artificial Sequence
  Synthetic oligonucleotide
gcactcgattccgatggcatccgcagggct

SEQ ID NO: 388942 - DNA, 30 bp, Artificial Sequence
  Synthetic oligonucleotide
ccatcgccccagtcgagctctacgagggct

SEQ ID NO: 388943 - DNA, 30 bp, Artificial Sequence
  Synthetic oligonucleotide
taggtatcaaggaccattacgcaacgggct

SEQ ID NO: 388944 - DNA, 30 bp, Artificial Sequence
  Synthetic oligonucleotide
gtcggcctttccttttctagcagacgggct

SEQ ID NO: 388945 - DNA, 30 bp, Artificial Sequence
  Synthetic oligonucleotide
gttgtttcagaggtagaaaaaggccgggct

SEQ ID NO: 388946 - DNA, 30 bp, Artificial Sequence
  Synthetic oligonucleotide
atgggccaggctagatccctttatcgggct

SEQ ID NO: 388947 - DNA, 30 bp, Artificial Sequence
  Synthetic oligonucleotide
tgggttattaccaaacgtgcaggtcgggct

SEQ ID NO: 388948 - DNA, 30 bp, Artificial Sequence
  Synthetic oligonucleotide
tgttcccgaactcgctgccacgccggggct

SEQ ID NO: 388949 - DNA, 30 bp, Artificial Sequence
  Synthetic oligonucleotide
agtgccaggcagcgagatttcccgggggct

SEQ ID NO: 388950 - DNA, 30 bp, Artificial Sequence
  Synthetic oligonucleotide
gcagcctctctcacaaggaagcggggggct

SEQ ID NO: 388951 - DNA, 30 bp, Artificial Sequence
  Synthetic oligonucleotide
agagagaagtggacctcttacgatggggct

SEQ ID NO: 388952 - DNA, 30 bp, Artificial Sequence
  Synthetic oligonucleotide
cctaatatgtgaaatagtaaggatggggct

SEQ ID NO: 388953 - DNA, 30 bp, Artificial Sequence
  Synthetic oligonucleotide
attgctacgggtatgccaacctaatgggct

SEQ ID NO: 388954 - DNA, 30 bp, Artificial Sequence
  Synthetic oligonucleotide
ttctgagagagggcagttcccatgtgggct

SEQ ID NO: 388955 - DNA, 30 bp, Artificial Sequence
  Synthetic oligonucleotide
cagaagcataaatcgggatgactgtgggct

SEQ ID NO: 388956 - DNA, 30 bp, Artificial Sequence
  Synthetic oligonucleotide
cggaaagtgattgtctgtagctattgggct

SEQ ID NO: 388957 - DNA, 31 bp, Artificial Sequence
  Synthetic oligonucleotide
cccaaacgtccatatacctaaagcttgggct

SEQ ID NO: 388958 - DNA, 30 bp, Artificial Sequence
  Synthetic oligonucleotide
cctgtgcaagaaaaccaggtacgaatggct

SEQ ID NO: 388959 - DNA, 30 bp, Artificial Sequence
  Synthetic oligonucleotide
tgggtagattctatgatcggagtaatggct

SEQ ID NO: 388960 - DNA, 30 bp, Artificial Sequence
  Synthetic oligonucleotide
taaatcgatgaggacggcacctacatggct

SEQ ID NO: 388961 - DNA, 30 bp, Artificial Sequence
  Synthetic oligonucleotide
cccataaagtggacgtagtcacgcatggct

SEQ ID NO: 388962 - DNA, 30 bp, Artificial Sequence
  Synthetic oligonucleotide
tgatagcttccagtggatctccggatggct

SEQ ID NO: 388963 - DNA, 30 bp, Artificial Sequence
  Synthetic oligonucleotide
ggttgaggttcacactgagccatgatggct

SEQ ID NO: 388964 - DNA, 30 bp, Artificial Sequence
  Synthetic oligonucleotide
cgtttcttcttcatggtgtacgatatggct

SEQ ID NO: 388965 - DNA, 30 bp, Artificial Sequence
  Synthetic oligonucleotide
atcctcaggtaacgaagcagacgtatggct

SEQ ID NO: 388966 - DNA, 30 bp, Artificial Sequence
  Synthetic oligonucleotide
aatacaacagataaagtacattgtatggct

SEQ ID NO: 388967 - DNA, 30 bp, Artificial Sequence
  Synthetic oligonucleotide
cttcaaacttcgccctgatcatctctggct

SEQ ID NO: 388968 - DNA, 30 bp, Artificial Sequence
  Synthetic oligonucleotide
gcgagctactcccgagttaacaaagtggct

SEQ ID NO: 388969 - DNA, 30 bp, Artificial Sequence
  Synthetic oligonucleotide
cggttccggcatccttccgatctagtggct

SEQ ID NO: 388970 - DNA, 30 bp, Artificial Sequence
  Synthetic oligonucleotide
gaaatgggggacattgttgcacacgtggct

SEQ ID NO: 388971 - DNA, 30 bp, Artificial Sequence
  Synthetic oligonucleotide
ggcagtattctctgacgggggtgcgtggct

SEQ ID NO: 388972 - DNA, 30 bp, Artificial Sequence
  Synthetic oligonucleotide
cgttataacaagttttgattgttcgtggct

SEQ ID NO: 388973 - DNA, 30 bp, Artificial Sequence
  Synthetic oligonucleotide
gacgcgaggccttgatacgttcaggtggct

SEQ ID NO: 388974 - DNA, 30 bp, Artificial Sequence
  Synthetic oligonucleotide
ccggctttttccaccataccggaggtggct

SEQ ID NO: 388975 - DNA, 30 bp, Artificial Sequence
  Synthetic oligonucleotide
acctgaaactcagcacgtgagccggtggct

SEQ ID NO: 388976 - DNA, 30 bp, Artificial Sequence
  Synthetic oligonucleotide
cagaaataagggttatgggactgggtggct

SEQ ID NO: 388977 - DNA, 30 bp, Artificial Sequence
  Synthetic oligonucleotide
aaatattagtagcactagcgaattgtggct

SEQ ID NO: 388978 - DNA, 30 bp, Artificial Sequence
  Synthetic oligonucleotide
gatatcgatgttggggtggtccgattggct

SEQ ID NO: 388979 - DNA, 30 bp, Artificial Sequence
  Synthetic oligonucleotide
aatacctaagaaaatagtgcattattggct

SEQ ID NO: 388980 - DNA, 30 bp, Artificial Sequence
  Synthetic oligonucleotide
gatgtctttggcccgcgccgggacttggct

SEQ ID NO: 388981 - DNA, 30 bp, Artificial Sequence
  Synthetic oligonucleotide
gtcatggtcaatctggaggctaagttggct

SEQ ID NO: 388982 - DNA, 30 bp, Artificial Sequence
  Synthetic oligonucleotide
cgggtacaggttccatactaatagttggct

SEQ ID NO: 388983 - DNA, 30 bp, Artificial Sequence
  Synthetic oligonucleotide
cctaatccttctctctcgggtaatttggct

SEQ ID NO: 388984 - DNA, 30 bp, Artificial Sequence
  Synthetic oligonucleotide
tcgcagcgctagaaaagtgcgtatttggct

SEQ ID NO: 388985 - DNA, 30 bp, Artificial Sequence
  Synthetic oligonucleotide
taccaacacggccgtaatttttgtttggct

SEQ ID NO: 388986 - DNA, 30 bp, Artificial Sequence
  Synthetic oligonucleotide
aaagttgatacttcataaaccacaaatgct

SEQ ID NO: 388987 - DNA, 30 bp, Artificial Sequence
  Synthetic oligonucleotide
tcaacgagatgatttgtgtgctgaaatgct

SEQ ID NO: 388988 - DNA, 30 bp, Artificial Sequence
  Synthetic oligonucleotide
atcgttgataactataagtgcgtaaatgct

SEQ ID NO: 388989 - DNA, 30 bp, Artificial Sequence
  Synthetic oligonucleotide
ccaagtgtattttggcgtactcagaatgct

SEQ ID NO: 388990 - DNA, 30 bp, Artificial Sequence
  Synthetic oligonucleotide
cagatggaccgtggcacgcaccctaatgct

SEQ ID NO: 388991 - DNA, 30 bp, Artificial Sequence
  Synthetic oligonucleotide
tttaattccatggtaagtttttctaatgct

SEQ ID NO: 388992 - DNA, 30 bp, Artificial Sequence
  Synthetic oligonucleotide
ccctggcaggattttcgacaacgtaatgct

SEQ ID NO: 388993 - DNA, 30 bp, Artificial Sequence
  Synthetic oligonucleotide
tattagaatggtgtttataactttaatgct

SEQ ID NO: 388994 - DNA, 30 bp, Artificial Sequence
  Synthetic oligonucleotide
gtgcaaggtcagcaacacgtttcacatgct

SEQ ID NO: 388995 - DNA, 30 bp, Artificial Sequence
  Synthetic oligonucleotide
gttattcccgtgagacttcaacaccatgct

SEQ ID NO: 388996 - DNA, 30 bp, Artificial Sequence
  Synthetic oligonucleotide
cagggtgtcaaacaagccgaataccatgct

SEQ ID NO: 388997 - DNA, 31 bp, Artificial Sequence
  Synthetic oligonucleotide
tagcacgtcgcggcaagtgaatgcgcatgct

SEQ ID NO: 388998 - DNA, 30 bp, Artificial Sequence
  Synthetic oligonucleotide
ttcttctcggggatcccgggtaatcatgct

SEQ ID NO: 388999 - DNA, 31 bp, Artificial Sequence
  Synthetic oligonucleotide
ggttgtaaagcattatgttctgtctcatgct

SEQ ID NO: 389000 - DNA, 30 bp, Artificial Sequence
  Synthetic oligonucleotide
gataagcccatttagccacggaaagatgct

SEQ ID NO: 389001 - DNA, 30 bp, Artificial Sequence
  Synthetic oligonucleotide
gggaacagtacgcattagtacatagatgct

SEQ ID NO: 389002 - DNA, 30 bp, Artificial Sequence
  Synthetic oligonucleotide
aggtgagatcattctcgttaactagatgct

SEQ ID NO: 389003 - DNA, 30 bp, Artificial Sequence
  Synthetic oligonucleotide
cagaaactaatgcatagtaactctgatgct

SEQ ID NO: 389004 - DNA, 30 bp, Artificial Sequence
  Synthetic oligonucleotide
caaggcacacgccgtgacaaatgtgatgct

SEQ ID NO: 389005 - DNA, 30 bp, Artificial Sequence
  Synthetic oligonucleotide
agcactggttctggaccgttgtttgatgct

SEQ ID NO: 389006 - DNA, 30 bp, Artificial Sequence
  Synthetic oligonucleotide
ataggatgccctccgagcttgccatatgct

SEQ ID NO: 389007 - DNA, 30 bp, Artificial Sequence
  Synthetic oligonucleotide
gattcaagacgatacgaagtaagatatgct

SEQ ID NO: 389008 - DNA, 30 bp, Artificial Sequence
  Synthetic oligonucleotide
atgatagcgcgtatggtcataggctatgct

SEQ ID NO: 389009 - DNA, 30 bp, Artificial Sequence
  Synthetic oligonucleotide
agcacaaattttatttgtgtattctatgct

SEQ ID NO: 389010 - DNA, 30 bp, Artificial Sequence
  Synthetic oligonucleotide
agctagaagcgtgttgtgcaactgtatgct

SEQ ID NO: 389011 - DNA, 30 bp, Artificial Sequence
  Synthetic oligonucleotide
gctgcccgatacatttcgaggtgaactgct

SEQ ID NO: 389012 - DNA, 30 bp, Artificial Sequence
  Synthetic oligonucleotide
tccgtacaaccagggctgttctgcactgct

SEQ ID NO: 389013 - DNA, 30 bp, Artificial Sequence
  Synthetic oligonucleotide
ggagcatcattactctttccaacgactgct

SEQ ID NO: 389014 - DNA, 30 bp, Artificial Sequence
  Synthetic oligonucleotide
tccgcgtcatcgcagatcattgctactgct

SEQ ID NO: 389015 - DNA, 30 bp, Artificial Sequence
  Synthetic oligonucleotide
gcatgcagttctaagggagtacgtactgct

SEQ ID NO: 389016 - DNA, 30 bp, Artificial Sequence
  Synthetic oligonucleotide
atattacatgcagtgtcgaaaggtactgct

SEQ ID NO: 389017 - DNA, 30 bp, Artificial Sequence
  Synthetic oligonucleotide
ccccaggaactgaagatataaacacctgct

SEQ ID NO: 389018 - DNA, 30 bp, Artificial Sequence
  Synthetic oligonucleotide
gaagatcaagcataggctattacacctgct

SEQ ID NO: 389019 - DNA, 30 bp, Artificial Sequence
  Synthetic oligonucleotide
aacatctcaatcgtggttacgacccctgct

SEQ ID NO: 389020 - DNA, 30 bp, Artificial Sequence
  Synthetic oligonucleotide
ataacttctggatgcgaaacgacagctgct

SEQ ID NO: 389021 - DNA, 30 bp, Artificial Sequence
  Synthetic oligonucleotide
agtgacacgtgtgtgataagagcagctgct

SEQ ID NO: 389022 - DNA, 30 bp, Artificial Sequence
  Synthetic oligonucleotide
tgtgccacccgctgtcccacgtgcgctgct

SEQ ID NO: 389023 - DNA, 30 bp, Artificial Sequence
  Synthetic oligonucleotide
actttccggtggatttggaatgaggctgct

SEQ ID NO: 389024 - DNA, 30 bp, Artificial Sequence
  Synthetic oligonucleotide
ggcttctagtagaagttgattaaatctgct

SEQ ID NO: 389025 - DNA, 30 bp, Artificial Sequence
  Synthetic oligonucleotide
aacgtgtccgtttaaagaccgacctctgct

SEQ ID NO: 389026 - DNA, 30 bp, Artificial Sequence
  Synthetic oligonucleotide
atagttcttacaccacaaatgacctctgct

SEQ ID NO: 389027 - DNA, 30 bp, Artificial Sequence
  Synthetic oligonucleotide
acatgtttttattacatgttctcctctgct

SEQ ID NO: 389028 - DNA, 30 bp, Artificial Sequence
  Synthetic oligonucleotide
cttttttagcagtcccgccgcacgtctgct

SEQ ID NO: 389029 - DNA, 30 bp, Artificial Sequence
  Synthetic oligonucleotide
taggtattaggtataagtagatattctgct

SEQ ID NO: 389030 - DNA, 30 bp, Artificial Sequence
  Synthetic oligonucleotide
atggggctcccttatggacgttcaagtgct

SEQ ID NO: 389031 - DNA, 30 bp, Artificial Sequence
  Synthetic oligonucleotide
cagcggttggtcgagggtgatagaagtgct

SEQ ID NO: 389032 - DNA, 30 bp, Artificial Sequence
  Synthetic oligonucleotide
gataacctttcacatactctcagcagtgct

SEQ ID NO: 389033 - DNA, 31 bp, Artificial Sequence
  Synthetic oligonucleotide
tatcgttttcgacagtaaaaacgtgagtgct

SEQ ID NO: 389034 - DNA, 30 bp, Artificial Sequence
  Synthetic oligonucleotide
aggatcgttgatcttgacgttgatagtgct

SEQ ID NO: 389035 - DNA, 30 bp, Artificial Sequence
  Synthetic oligonucleotide
atgaacgcgcttgcgccacagcctagtgct

SEQ ID NO: 389036 - DNA, 30 bp, Artificial Sequence
  Synthetic oligonucleotide
tagcgattacctctgggaaacattagtgct

SEQ ID NO: 389037 - DNA, 30 bp, Artificial Sequence
  Synthetic oligonucleotide
attacggtcattagccgggttgcacgtgct

SEQ ID NO: 389038 - DNA, 30 bp, Artificial Sequence
  Synthetic oligonucleotide
acggtatgagactgcaagcgactacgtgct

SEQ ID NO: 389039 - DNA, 30 bp, Artificial Sequence
  Synthetic oligonucleotide
aacgttacagcaggtactccggcccgtgct

SEQ ID NO: 389040 - DNA, 30 bp, Artificial Sequence
  Synthetic oligonucleotide
ccgtttcgtagtaattacacttcccgtgct

SEQ ID NO: 389041 - DNA, 30 bp, Artificial Sequence
  Synthetic oligonucleotide
atcatgtcaggactcccgaaggagcgtgct

SEQ ID NO: 389042 - DNA, 30 bp, Artificial Sequence
  Synthetic oligonucleotide
taggcatccttgcgtctccagtcgcgtgct

SEQ ID NO: 389043 - DNA, 30 bp, Artificial Sequence
  Synthetic oligonucleotide
gttgacgaaaagaggatttttatgcgtgct

SEQ ID NO: 389044 - DNA, 30 bp, Artificial Sequence
  Synthetic oligonucleotide
ttacaccacaaatgtctaaatttgcgtgct

SEQ ID NO: 389045 - DNA, 30 bp, Artificial Sequence
  Synthetic oligonucleotide
ctgagatggggttgcaggtaggctcgtgct

SEQ ID NO: 389046 - DNA, 30 bp, Artificial Sequence
  Synthetic oligonucleotide
acatctcccgcattggatgagcgtcgtgct

SEQ ID NO: 389047 - DNA, 30 bp, Artificial Sequence
  Synthetic oligonucleotide
ttcgataccgtgtacgcatataaaggtgct

SEQ ID NO: 389048 - DNA, 30 bp, Artificial Sequence
  Synthetic oligonucleotide
accaccgatccacaggatcaggcaggtgct

SEQ ID NO: 389049 - DNA, 30 bp, Artificial Sequence
  Synthetic oligonucleotide
ccccgcgaggaacgcgacaagggaggtgct

SEQ ID NO: 389050 - DNA, 30 bp, Artificial Sequence
  Synthetic oligonucleotide
acgggctgggaccttcccatgggaggtgct

SEQ ID NO: 389051 - DNA, 30 bp, Artificial Sequence
  Synthetic oligonucleotide
atttctacttggtccaattcgctcggtgct

SEQ ID NO: 389052 - DNA, 30 bp, Artificial Sequence
  Synthetic oligonucleotide
ttacctaataggatagctcgttagggtgct

SEQ ID NO: 389053 - DNA, 30 bp, Artificial Sequence
  Synthetic oligonucleotide
actattgaggtatcgacggatatgggtgct

SEQ ID NO: 389054 - DNA, 30 bp, Artificial Sequence
  Synthetic oligonucleotide
agaggtgaacgggaaccttatgctggtgct

SEQ ID NO: 389055 - DNA, 30 bp, Artificial Sequence
  Synthetic oligonucleotide
ttcggatcacgcggatacgaccaatgtgct

SEQ ID NO: 389056 - DNA, 30 bp, Artificial Sequence
  Synthetic oligonucleotide
tgatgatgacttgacggtcgccaatgtgct

SEQ ID NO: 389057 - DNA, 30 bp, Artificial Sequence
  Synthetic oligonucleotide
agatatacgggttaggtaatcggatgtgct

SEQ ID NO: 389058 - DNA, 30 bp, Artificial Sequence
  Synthetic oligonucleotide
aagtttggttatgatgactacctatgtgct

SEQ ID NO: 389059 - DNA, 30 bp, Artificial Sequence
  Synthetic oligonucleotide
cgtgataattagttacctaattactgtgct

SEQ ID NO: 389060 - DNA, 30 bp, Artificial Sequence
  Synthetic oligonucleotide
gcggtggcaggtcggaataagaggtgtgct

SEQ ID NO: 389061 - DNA, 30 bp, Artificial Sequence
  Synthetic oligonucleotide
agtagatctattccagtaattgattgtgct

SEQ ID NO: 389062 - DNA, 30 bp, Artificial Sequence
  Synthetic oligonucleotide
cgcacatcaagaatcccgcaaagaattgct

SEQ ID NO: 389063 - DNA, 30 bp, Artificial Sequence
  Synthetic oligonucleotide
ataggataagcatgctaataccccattgct

SEQ ID NO: 389064 - DNA, 30 bp, Artificial Sequence
  Synthetic oligonucleotide
catcagcttcgtgagggtccatctattgct

SEQ ID NO: 389065 - DNA, 30 bp, Artificial Sequence
  Synthetic oligonucleotide
gtataatctccggaggagaggtgtattgct

SEQ ID NO: 389066 - DNA, 30 bp, Artificial Sequence
  Synthetic oligonucleotide
atgcgatgtagacaaagccgtacccttgct

SEQ ID NO: 389067 - DNA, 30 bp, Artificial Sequence
  Synthetic oligonucleotide
aagtttgcagtactggttctactccttgct

SEQ ID NO: 389068 - DNA, 30 bp, Artificial Sequence
  Synthetic oligonucleotide
agagaattatacgctaggaaagatcttgct

SEQ ID NO: 389069 - DNA, 30 bp, Artificial Sequence
  Synthetic oligonucleotide
cgaaagtattgtacttttcttgcagttgct

SEQ ID NO: 389070 - DNA, 30 bp, Artificial Sequence
  Synthetic oligonucleotide
tggtatagtggtgaacacatattcgttgct

SEQ ID NO: 389071 - DNA, 30 bp, Artificial Sequence
  Synthetic oligonucleotide
cggcgcatacgacggcgttacagggttgct

SEQ ID NO: 389072 - DNA, 30 bp, Artificial Sequence
  Synthetic oligonucleotide
aaacgccacctgtggtcgtccatggttgct

SEQ ID NO: 389073 - DNA, 30 bp, Artificial Sequence
  Synthetic oligonucleotide
tggcaacacttttgacgctaggttgttgct

SEQ ID NO: 389074 - DNA, 30 bp, Artificial Sequence
  Synthetic oligonucleotide
tgtggtatggtagtgggtcagatatttgct

SEQ ID NO: 389075 - DNA, 30 bp, Artificial Sequence
  Synthetic oligonucleotide
gtaatgatcaaagctgctagtctatttgct

SEQ ID NO: 389076 - DNA, 30 bp, Artificial Sequence
  Synthetic oligonucleotide
gcttcgcccacgggcgtgttagtctttgct

SEQ ID NO: 389077 - DNA, 30 bp, Artificial Sequence
  Synthetic oligonucleotide
agatcatatccgtattagatggattttgct

SEQ ID NO: 389078 - DNA, 30 bp, Artificial Sequence
  Synthetic oligonucleotide
tcgtcttcttcagcgcgcaaaaacaaatct

SEQ ID NO: 389079 - DNA, 30 bp, Artificial Sequence
  Synthetic oligonucleotide
gatgccttatcactacattagtggaaatct

SEQ ID NO: 389080 - DNA, 30 bp, Artificial Sequence
  Synthetic oligonucleotide
ggtagtttgcgttactcgccaatgaaatct

SEQ ID NO: 389081 - DNA, 30 bp, Artificial Sequence
  Synthetic oligonucleotide
gcagggttatgtattaaccaggataaatct

SEQ ID NO: 389082 - DNA, 30 bp, Artificial Sequence
  Synthetic oligonucleotide
cccatcgagttacacgtcgactaacaatct

SEQ ID NO: 389083 - DNA, 30 bp, Artificial Sequence
  Synthetic oligonucleotide
tagattctatcaacgcggtgtgcacaatct

SEQ ID NO: 389084 - DNA, 30 bp, Artificial Sequence
  Synthetic oligonucleotide
gtcagtatgcaatcactctacgtccaatct

SEQ ID NO: 389085 - DNA, 30 bp, Artificial Sequence
  Synthetic oligonucleotide
gtacgctcccaagttacacagacgcaatct

SEQ ID NO: 389086 - DNA, 30 bp, Artificial Sequence
  Synthetic oligonucleotide
tctacgatggacttattagccctgcaatct

SEQ ID NO: 389087 - DNA, 30 bp, Artificial Sequence
  Synthetic oligonucleotide
gttcgcacatcaggcagcgggactcaatct

SEQ ID NO: 389088 - DNA, 30 bp, Artificial Sequence
  Synthetic oligonucleotide
caaattccagaaattgttaagggtcaatct

SEQ ID NO: 389089 - DNA, 30 bp, Artificial Sequence
  Synthetic oligonucleotide
cgtgtactcaataagacagctattcaatct

SEQ ID NO: 389090 - DNA, 30 bp, Artificial Sequence
  Synthetic oligonucleotide
tcaggtgggtgtgatctgcaggaagaatct

SEQ ID NO: 389091 - DNA, 31 bp, Artificial Sequence
  Synthetic oligonucleotide
ggggcataagctcacttccgtcccggaatct

SEQ ID NO: 389092 - DNA, 30 bp, Artificial Sequence
  Synthetic oligonucleotide
gaataatagataatattaccggcggaatct

SEQ ID NO: 389093 - DNA, 30 bp, Artificial Sequence
  Synthetic oligonucleotide
atgggaggtcaggagcctcagtttgaatct

SEQ ID NO: 389094 - DNA, 30 bp, Artificial Sequence
  Synthetic oligonucleotide
gtaataggttagcaacctactaaataatct

SEQ ID NO: 389095 - DNA, 30 bp, Artificial Sequence
  Synthetic oligonucleotide
cgccgggaagaactctgtccttaataatct

SEQ ID NO: 389096 - DNA, 30 bp, Artificial Sequence
  Synthetic oligonucleotide
aaaggttaacgatgtcgggtttgataatct

SEQ ID NO: 389097 - DNA, 30 bp, Artificial Sequence
  Synthetic oligonucleotide
atacacagacattggttagacgactaatct

SEQ ID NO: 389098 - DNA, 30 bp, Artificial Sequence
  Synthetic oligonucleotide
gcgaagcggccccctgtggccacgtaatct

SEQ ID NO: 389099 - DNA, 30 bp, Artificial Sequence
  Synthetic oligonucleotide
tacaacaattaccttttgaccaggtaatct

SEQ ID NO: 389100 - DNA, 30 bp, Artificial Sequence
  Synthetic oligonucleotide
tgtaaactaatatgagccttgacaacatct

SEQ ID NO: 389101 - DNA, 30 bp, Artificial Sequence
  Synthetic oligonucleotide
taagagatctaggccaggcaatcaacatct

SEQ ID NO: 389102 - DNA, 30 bp, Artificial Sequence
  Synthetic oligonucleotide
ggtacggttcgtatctctagagggacatct

SEQ ID NO: 389103 - DNA, 30 bp, Artificial Sequence
  Synthetic oligonucleotide
ccaatagcagaggcgagtaaaatgacatct

SEQ ID NO: 389104 - DNA, 30 bp, Artificial Sequence
  Synthetic oligonucleotide
tcccatgattctcaattattccatacatct

SEQ ID NO: 389105 - DNA, 30 bp, Artificial Sequence
  Synthetic oligonucleotide
tatgcacctaaagccagaccctatacatct

SEQ ID NO: 389106 - DNA, 30 bp, Artificial Sequence
  Synthetic oligonucleotide
atctgcgcgcgactggacccctctacatct

SEQ ID NO: 389107 - DNA, 30 bp, Artificial Sequence
  Synthetic oligonucleotide
cttagttcaacactcaacaattaaccatct

SEQ ID NO: 389108 - DNA, 30 bp, Artificial Sequence
  Synthetic oligonucleotide
acctgtcattcactcaaaacgcagccatct

SEQ ID NO: 389109 - DNA, 30 bp, Artificial Sequence
  Synthetic oligonucleotide
ggcgcgcggtagacgacgatttagccatct

SEQ ID NO: 389110 - DNA, 30 bp, Artificial Sequence
  Synthetic oligonucleotide
actcccgagtcgggaacagtttggccatct

SEQ ID NO: 389111 - DNA, 30 bp, Artificial Sequence
  Synthetic oligonucleotide
aatacagcaagcagtttggtcgatccatct

SEQ ID NO: 389112 - DNA, 30 bp, Artificial Sequence
  Synthetic oligonucleotide
tagtataaggtttcatatatacctccatct

SEQ ID NO: 389113 - DNA, 30 bp, Artificial Sequence
  Synthetic oligonucleotide
gacttgtcgaacattgcaaaatctccatct

SEQ ID NO: 389114 - DNA, 30 bp, Artificial Sequence
  Synthetic oligonucleotide
tcgccacatggtcggacgcgggttccatct

SEQ ID NO: 389115 - DNA, 30 bp, Artificial Sequence
  Synthetic oligonucleotide
ttcaccgtagaacagcactggaaatcatct

SEQ ID NO: 389116 - DNA, 30 bp, Artificial Sequence
  Synthetic oligonucleotide
gatcggaatcaatggccgtgtgaatcatct

SEQ ID NO: 389117 - DNA, 30 bp, Artificial Sequence
  Synthetic oligonucleotide
ccctaaaactcggtcagcgcagactcatct

SEQ ID NO: 389118 - DNA, 30 bp, Artificial Sequence
  Synthetic oligonucleotide
tttcgtaaagattagtgcccaaattcatct

SEQ ID NO: 389119 - DNA, 30 bp, Artificial Sequence
  Synthetic oligonucleotide
gcgagtcgacaaagcaggaataattcatct

SEQ ID NO: 389120 - DNA, 30 bp, Artificial Sequence
  Synthetic oligonucleotide
tccatcgaaattgcctggcctcattcatct

SEQ ID NO: 389121 - DNA, 30 bp, Artificial Sequence
  Synthetic oligonucleotide
agcttttagctgcttagataatgttcatct

SEQ ID NO: 389122 - DNA, 30 bp, Artificial Sequence
  Synthetic oligonucleotide
acttttcacattcagctggttcacagatct

SEQ ID NO: 389123 - DNA, 30 bp, Artificial Sequence
  Synthetic oligonucleotide
gagaggggttctaaaatgagatggagatct

SEQ ID NO: 389124 - DNA, 30 bp, Artificial Sequence
  Synthetic oligonucleotide
tgttggcatctaatgaatgtggttagatct

SEQ ID NO: 389125 - DNA, 30 bp, Artificial Sequence
  Synthetic oligonucleotide
aggatgcgaatctacgggtactttagatct

SEQ ID NO: 389126 - DNA, 30 bp, Artificial Sequence
  Synthetic oligonucleotide
gcattaaagacaggtcccaagagacgatct

SEQ ID NO: 389127 - DNA, 30 bp, Artificial Sequence
  Synthetic oligonucleotide
ctggcaaagctttctccaccatgacgatct

SEQ ID NO: 389128 - DNA, 30 bp, Artificial Sequence
  Synthetic oligonucleotide
gtcacggagttttcagcttcatggcgatct

SEQ ID NO: 389129 - DNA, 30 bp, Artificial Sequence
  Synthetic oligonucleotide
cgttttggaaatcatcccaaggatcgatct

SEQ ID NO: 389130 - DNA, 30 bp, Artificial Sequence
  Synthetic oligonucleotide
acagcttgctcaactcttgcccttcgatct

SEQ ID NO: 389131 - DNA, 30 bp, Artificial Sequence
  Synthetic oligonucleotide
tatttgtctcttggcctccaatttcgatct

SEQ ID NO: 389132 - DNA, 30 bp, Artificial Sequence
  Synthetic oligonucleotide
cttgttcaaattctatgttcgataggatct

SEQ ID NO: 389133 - DNA, 30 bp, Artificial Sequence
  Synthetic oligonucleotide
gacagaccaagaccacggaaacacggatct

SEQ ID NO: 389134 - DNA, 30 bp, Artificial Sequence
  Synthetic oligonucleotide
agctctgtaacggttcacgggctcggatct

SEQ ID NO: 389135 - DNA, 30 bp, Artificial Sequence
  Synthetic oligonucleotide
cacagctacgtatcttgcaaaacgggatct

SEQ ID NO: 389136 - DNA, 30 bp, Artificial Sequence
  Synthetic oligonucleotide
gccatatcaaagtcgatcgggtggggatct

SEQ ID NO: 389137 - DNA, 30 bp, Artificial Sequence
  Synthetic oligonucleotide
gcgccccagattaaggaccccctgggatct

SEQ ID NO: 389138 - DNA, 30 bp, Artificial Sequence
  Synthetic oligonucleotide
agcggaacgggtctcttaatcaatggatct

SEQ ID NO: 389139 - DNA, 30 bp, Artificial Sequence
  Synthetic oligonucleotide
cacttgatgtggaaacgggaaagtggatct

SEQ ID NO: 389140 - DNA, 30 bp, Artificial Sequence
  Synthetic oligonucleotide
ttaagcagttcaactttttgcgtatgatct

SEQ ID NO: 389141 - DNA, 30 bp, Artificial Sequence
  Synthetic oligonucleotide
attggagtgcaacataggacgcgctgatct

SEQ ID NO: 389142 - DNA, 30 bp, Artificial Sequence
  Synthetic oligonucleotide
ccttctcatcatttcggggcatagtgatct

SEQ ID NO: 389143 - DNA, 30 bp, Artificial Sequence
  Synthetic oligonucleotide
taactataaatttcaacaaacatgtgatct

SEQ ID NO: 389144 - DNA, 30 bp, Artificial Sequence
  Synthetic oligonucleotide
atttagatgtggatgcccttagcttgatct

SEQ ID NO: 389145 - DNA, 30 bp, Artificial Sequence
  Synthetic oligonucleotide
tggctacaggttttcaccatattttgatct

SEQ ID NO: 389146 - DNA, 30 bp, Artificial Sequence
  Synthetic oligonucleotide
cccgcgtgtcccgaagggttacggatatct

SEQ ID NO: 389147 - DNA, 30 bp, Artificial Sequence
  Synthetic oligonucleotide
ataggcgagtctgactccctccttatatct

SEQ ID NO: 389148 - DNA, 30 bp, Artificial Sequence
  Synthetic oligonucleotide
caacggtgtctttggaaagatcccctatct

SEQ ID NO: 389149 - DNA, 30 bp, Artificial Sequence
  Synthetic oligonucleotide
gttcggagaaagtgggaatttagtctatct

SEQ ID NO: 389150 - DNA, 30 bp, Artificial Sequence
  Synthetic oligonucleotide
tgttctggtcaggttatcagagcagtatct

SEQ ID NO: 389151 - DNA, 30 bp, Artificial Sequence
  Synthetic oligonucleotide
cgccaatacaagattgtagtccgagtatct

SEQ ID NO: 389152 - DNA, 27 bp, Artificial Sequence
  Synthetic oligonucleotide
cgggcaagagatcagcttgccgtatct

SEQ ID NO: 389153 - DNA, 30 bp, Artificial Sequence
  Synthetic oligonucleotide
ttatgcgataagcatcgtctaatcgtatct

SEQ ID NO: 389154 - DNA, 30 bp, Artificial Sequence
  Synthetic oligonucleotide
ctatgccagagcatgtaccggcaggtatct

SEQ ID NO: 389155 - DNA, 30 bp, Artificial Sequence
  Synthetic oligonucleotide
caagcatgtttgatgcgcacatgggtatct

SEQ ID NO: 389156 - DNA, 30 bp, Artificial Sequence
  Synthetic oligonucleotide
ggcagatactctaaataaaggtatgtatct

SEQ ID NO: 389157 - DNA, 30 bp, Artificial Sequence
  Synthetic oligonucleotide
attactacgctacgacgctgtattgtatct

SEQ ID NO: 389158 - DNA, 30 bp, Artificial Sequence
  Synthetic oligonucleotide
ccatcgagcaagcgatgcttagcattatct

SEQ ID NO: 389159 - DNA, 30 bp, Artificial Sequence
  Synthetic oligonucleotide
cgggcaattaagattgtaatggcattatct

SEQ ID NO: 389160 - DNA, 30 bp, Artificial Sequence
  Synthetic oligonucleotide
tggcgttaacggaaaccggtgagattatct

SEQ ID NO: 389161 - DNA, 30 bp, Artificial Sequence
  Synthetic oligonucleotide
ggccgataacatgaaatggggtacttatct

SEQ ID NO: 389162 - DNA, 30 bp, Artificial Sequence
  Synthetic oligonucleotide
acaatatgtacgactccgaggggcttatct

SEQ ID NO: 389163 - DNA, 30 bp, Artificial Sequence
  Synthetic oligonucleotide
tgaaagtagcaatactaattagggttatct

SEQ ID NO: 389164 - DNA, 30 bp, Artificial Sequence
  Synthetic oligonucleotide
gtcacagcggtaatctaatgttggttatct

SEQ ID NO: 389165 - DNA, 30 bp, Artificial Sequence
  Synthetic oligonucleotide
ttggaggcatgtcgatttaccgtgttatct

SEQ ID NO: 389166 - DNA, 30 bp, Artificial Sequence
  Synthetic oligonucleotide
agctcgcaccttttgtaggcgttgttatct

SEQ ID NO: 389167 - DNA, 30 bp, Artificial Sequence
  Synthetic oligonucleotide
ggaggttatcaaataccgccgtctttatct

SEQ ID NO: 389168 - DNA, 30 bp, Artificial Sequence
  Synthetic oligonucleotide
gcatctggatctcctatgcgcgttttatct

SEQ ID NO: 389169 - DNA, 30 bp, Artificial Sequence
  Synthetic oligonucleotide
gatcctagcgaacgctcgtcgccgaactct

SEQ ID NO: 389170 - DNA, 30 bp, Artificial Sequence
  Synthetic oligonucleotide
cattatggacgtgtgaattgaaataactct

SEQ ID NO: 389171 - DNA, 30 bp, Artificial Sequence
  Synthetic oligonucleotide
gtaaggaactatctctcgtctcataactct

SEQ ID NO: 389172 - DNA, 30 bp, Artificial Sequence
  Synthetic oligonucleotide
aatgattaacataagccccgggataactct

SEQ ID NO: 389173 - DNA, 30 bp, Artificial Sequence
  Synthetic oligonucleotide
gcagcatccatttatgttaatagtaactct

SEQ ID NO: 389174 - DNA, 30 bp, Artificial Sequence
  Synthetic oligonucleotide
tggcctattatgaggaatatgctccactct

SEQ ID NO: 389175 - DNA, 30 bp, Artificial Sequence
  Synthetic oligonucleotide
tttaagtgtcatcctgagtacgggcactct

SEQ ID NO: 389176 - DNA, 30 bp, Artificial Sequence
  Synthetic oligonucleotide
aatgggaatacacagttttgtcatcactct

SEQ ID NO: 389177 - DNA, 30 bp, Artificial Sequence
  Synthetic oligonucleotide
gtcgcgtcggaacgcgcgactcgtcactct

SEQ ID NO: 389178 - DNA, 30 bp, Artificial Sequence
  Synthetic oligonucleotide
gggactgctaaaaagtctcggttagactct

SEQ ID NO: 389179 - DNA, 30 bp, Artificial Sequence
  Synthetic oligonucleotide
tagattggatgtcagagtaaacccgactct

SEQ ID NO: 389180 - DNA, 30 bp, Artificial Sequence
  Synthetic oligonucleotide
gtcaggtacaatgggtgttagttggactct

SEQ ID NO: 389181 - DNA, 30 bp, Artificial Sequence
  Synthetic oligonucleotide
ctctgcagaatacaaacaggcacgtactct

SEQ ID NO: 389182 - DNA, 30 bp, Artificial Sequence
  Synthetic oligonucleotide
tacttgacttttgagatcaaccggtactct

SEQ ID NO: 389183 - DNA, 30 bp, Artificial Sequence
  Synthetic oligonucleotide
tcaccttagtttcacatatgcagttactct

SEQ ID NO: 389184 - DNA, 30 bp, Artificial Sequence
  Synthetic oligonucleotide
acccttcgcaccgagcttgcgcgttactct

SEQ ID NO: 389185 - DNA, 30 bp, Artificial Sequence
  Synthetic oligonucleotide
atcagactcccggtataggccaaaacctct

SEQ ID NO: 389186 - DNA, 30 bp, Artificial Sequence
  Synthetic oligonucleotide
agttaaatggattgagcccagcccacctct

SEQ ID NO: 389187 - DNA, 30 bp, Artificial Sequence
  Synthetic oligonucleotide
agcttgcaaggcgtcgtggcccggacctct

SEQ ID NO: 389188 - DNA, 30 bp, Artificial Sequence
  Synthetic oligonucleotide
cgcattgccagtctcccatcaggtacctct

SEQ ID NO: 389189 - DNA, 30 bp, Artificial Sequence
  Synthetic oligonucleotide
aaggggtgtgccacttataggcaaccctct

SEQ ID NO: 389190 - DNA, 30 bp, Artificial Sequence
  Synthetic oligonucleotide
cgcgggacccttgaagcagcgataccctct

SEQ ID NO: 389191 - DNA, 30 bp, Artificial Sequence
  Synthetic oligonucleotide
ggcggataattagtcagcctggacccctct

SEQ ID NO: 389192 - DNA, 30 bp, Artificial Sequence
  Synthetic oligonucleotide
tagagttattctcaataatttatgccctct

SEQ ID NO: 389193 - DNA, 30 bp, Artificial Sequence
  Synthetic oligonucleotide
ctttaatcccaggggaattcccatccctct

SEQ ID NO: 389194 - DNA, 30 bp, Artificial Sequence
  Synthetic oligonucleotide
tgctcagtggcattttaataatgggcctct

SEQ ID NO: 389195 - DNA, 30 bp, Artificial Sequence
  Synthetic oligonucleotide
taaagagtcagtctcaacagacagtcctct

SEQ ID NO: 389196 - DNA, 30 bp, Artificial Sequence
  Synthetic oligonucleotide
agctaaggatgaactacctagccgtcctct

SEQ ID NO: 389197 - DNA, 30 bp, Artificial Sequence
  Synthetic oligonucleotide
aggttgttaacatccgatcacgtgtcctct

SEQ ID NO: 389198 - DNA, 30 bp, Artificial Sequence
  Synthetic oligonucleotide
acaaaaggttcttgtcttttcgcttcctct

SEQ ID NO: 389199 - DNA, 30 bp, Artificial Sequence
  Synthetic oligonucleotide
gcaatggaaccggatatgtgttgttcctct

SEQ ID NO: 389200 - DNA, 30 bp, Artificial Sequence
  Synthetic oligonucleotide
atccgtgctcgggtggtgattataagctct

SEQ ID NO: 389201 - DNA, 30 bp, Artificial Sequence
  Synthetic oligonucleotide
tgtcaattctttagtgtacgtctaagctct

SEQ ID NO: 389202 - DNA, 30 bp, Artificial Sequence
  Synthetic oligonucleotide
gaaatccaggggttactacttgccagctct

SEQ ID NO: 389203 - DNA, 30 bp, Artificial Sequence
  Synthetic oligonucleotide
tcggggagcgaaattaatagccgcagctct

SEQ ID NO: 389204 - DNA, 30 bp, Artificial Sequence
  Synthetic oligonucleotide
gcaatggactcgccaacagatattagctct

SEQ ID NO: 389205 - DNA, 30 bp, Artificial Sequence
  Synthetic oligonucleotide
ttccacttatacagacgggtggttagctct

SEQ ID NO: 389206 - DNA, 30 bp, Artificial Sequence
  Synthetic oligonucleotide
gatacctagtgctttagcgggccgcgctct

SEQ ID NO: 389207 - DNA, 30 bp, Artificial Sequence
  Synthetic oligonucleotide
tcaggggacacaagcatagttgatcgctct

SEQ ID NO: 389208 - DNA, 30 bp, Artificial Sequence
  Synthetic oligonucleotide
gagcccgtgggaaatcaagaacaaggctct

SEQ ID NO: 389209 - DNA, 30 bp, Artificial Sequence
  Synthetic oligonucleotide
agcaagtggaggaatcgggtacaaggctct

SEQ ID NO: 389210 - DNA, 30 bp, Artificial Sequence
  Synthetic oligonucleotide
agcaccaagggtagtcgcgttccaggctct

SEQ ID NO: 389211 - DNA, 30 bp, Artificial Sequence
  Synthetic oligonucleotide
gctaaagcgtctgatgaggacagcggctct

SEQ ID NO: 389212 - DNA, 30 bp, Artificial Sequence
  Synthetic oligonucleotide
agcggacggagttggcgattttatggctct

SEQ ID NO: 389213 - DNA, 30 bp, Artificial Sequence
  Synthetic oligonucleotide
gtaatgcaatcaggttgtcctccatgctct

SEQ ID NO: 389214 - DNA, 30 bp, Artificial Sequence
  Synthetic oligonucleotide
tacgagtgagataattcttgtagctgctct

SEQ ID NO: 389215 - DNA, 30 bp, Artificial Sequence
  Synthetic oligonucleotide
ccgcgcacgttcctagacgcatgctgctct

SEQ ID NO: 389216 - DNA, 30 bp, Artificial Sequence
  Synthetic oligonucleotide
gcccgacactatgccgataatacgtgctct

SEQ ID NO: 389217 - DNA, 30 bp, Artificial Sequence
  Synthetic oligonucleotide
ccgttaggctcggggcaggggtggtgctct

SEQ ID NO: 389218 - DNA, 30 bp, Artificial Sequence
  Synthetic oligonucleotide
gagtgcttgtgcataaccaacagttgctct

SEQ ID NO: 389219 - DNA, 30 bp, Artificial Sequence
  Synthetic oligonucleotide
gtaacacatagggtgtgacagggttgctct

SEQ ID NO: 389220 - DNA, 30 bp, Artificial Sequence
  Synthetic oligonucleotide
atttgctgtggcggttgataatgttgctct

SEQ ID NO: 389221 - DNA, 30 bp, Artificial Sequence
  Synthetic oligonucleotide
aacgacagcgcagagaactcaaccatctct

SEQ ID NO: 389222 - DNA, 30 bp, Artificial Sequence
  Synthetic oligonucleotide
tagcctgtcgagcgaacctattgcatctct

SEQ ID NO: 389223 - DNA, 30 bp, Artificial Sequence
  Synthetic oligonucleotide
caagtctaataggcgtcaagcctcatctct

SEQ ID NO: 389224 - DNA, 30 bp, Artificial Sequence
  Synthetic oligonucleotide
tcgttgaatatccactttgttttcatctct

SEQ ID NO: 389225 - DNA, 30 bp, Artificial Sequence
  Synthetic oligonucleotide
gcctgcgggacccactctaatggcctctct

SEQ ID NO: 389226 - DNA, 30 bp, Artificial Sequence
  Synthetic oligonucleotide
gactggactttaaggactatatgcctctct

SEQ ID NO: 389227 - DNA, 30 bp, Artificial Sequence
  Synthetic oligonucleotide
cggacagagattattgaattgcagctctct

SEQ ID NO: 389228 - DNA, 30 bp, Artificial Sequence
  Synthetic oligonucleotide
gagtaggtgaattcccggagctagctctct

SEQ ID NO: 389229 - DNA, 30 bp, Artificial Sequence
  Synthetic oligonucleotide
tagaagaaatcgcatcgtaatctgctctct

SEQ ID NO: 389230 - DNA, 30 bp, Artificial Sequence
  Synthetic oligonucleotide
ttaaatggattggcgggtgatactctctct

SEQ ID NO: 389231 - DNA, 30 bp, Artificial Sequence
  Synthetic oligonucleotide
atgtagacctctaaatcccggtcagtctct

SEQ ID NO: 389232 - DNA, 30 bp, Artificial Sequence
  Synthetic oligonucleotide
ctctacctagtggcacactgttgcgtctct

SEQ ID NO: 389233 - DNA, 30 bp, Artificial Sequence
  Synthetic oligonucleotide
cctttctgcacgtctacatctcaggtctct

SEQ ID NO: 389234 - DNA, 30 bp, Artificial Sequence
  Synthetic oligonucleotide
tagaccactagcgtagtagctggggtctct

SEQ ID NO: 389235 - DNA, 30 bp, Artificial Sequence
  Synthetic oligonucleotide
ctgtatcacgttcttagattcctggtctct

SEQ ID NO: 389236 - DNA, 30 bp, Artificial Sequence
  Synthetic oligonucleotide
gtgttattcgctctgacgtcgttggtctct

SEQ ID NO: 389237 - DNA, 31 bp, Artificial Sequence
  Synthetic oligonucleotide
actgcctttaagggagtcaccggttgtctct

SEQ ID NO: 389238 - DNA, 30 bp, Artificial Sequence
  Synthetic oligonucleotide
ctttataccataatcgtcggttttgtctct

SEQ ID NO: 389239 - DNA, 30 bp, Artificial Sequence
  Synthetic oligonucleotide
tctcatgtataccttctgaagcacttctct

SEQ ID NO: 389240 - DNA, 30 bp, Artificial Sequence
  Synthetic oligonucleotide
caaaacgcacttaaattgctcaccttctct

SEQ ID NO: 389241 - DNA, 30 bp, Artificial Sequence
  Synthetic oligonucleotide
tcccatatagtacgctacctgtatttctct

SEQ ID NO: 389242 - DNA, 30 bp, Artificial Sequence
  Synthetic oligonucleotide
tcttttaagtcctgtactcttcctttctct

SEQ ID NO: 389243 - DNA, 30 bp, Artificial Sequence
  Synthetic oligonucleotide
gcgtatcgcttgtaggattctcgaaagtct

SEQ ID NO: 389244 - DNA, 25 bp, Artificial Sequence
  Synthetic oligonucleotide
cttttgattttgcactcccaagtct

SEQ ID NO: 389245 - DNA, 30 bp, Artificial Sequence
  Synthetic oligonucleotide
tcgtaaaccctttgatgtaaattcaagtct

SEQ ID NO: 389246 - DNA, 30 bp, Artificial Sequence
  Synthetic oligonucleotide
tacctatcttattaacaaagccagaagtct

SEQ ID NO: 389247 - DNA, 30 bp, Artificial Sequence
  Synthetic oligonucleotide
tagcgcatccattgagccaggtcgaagtct

SEQ ID NO: 389248 - DNA, 30 bp, Artificial Sequence
  Synthetic oligonucleotide
gtgtcgtccccatcaccgatgggacagtct

SEQ ID NO: 389249 - DNA, 30 bp, Artificial Sequence
  Synthetic oligonucleotide
caatgatcggctatttattggtcgcagtct

SEQ ID NO: 389250 - DNA, 30 bp, Artificial Sequence
  Synthetic oligonucleotide
taagccaaaactgaatccacccggcagtct

SEQ ID NO: 389251 - DNA, 30 bp, Artificial Sequence
  Synthetic oligonucleotide
agcgcacaggcttatttgcgtatgcagtct

SEQ ID NO: 389252 - DNA, 30 bp, Artificial Sequence
  Synthetic oligonucleotide
tccactatagcgtactctcacggagagtct

SEQ ID NO: 389253 - DNA, 30 bp, Artificial Sequence
  Synthetic oligonucleotide
tactgaatagttcgattagagttcgagtct

SEQ ID NO: 389254 - DNA, 30 bp, Artificial Sequence
  Synthetic oligonucleotide
caccgaggtaactttgaggttttcgagtct

SEQ ID NO: 389255 - DNA, 30 bp, Artificial Sequence
  Synthetic oligonucleotide
tttgcaagtaagtatactcgacgggagtct

SEQ ID NO: 389256 - DNA, 30 bp, Artificial Sequence
  Synthetic oligonucleotide
ttggtttgtgaggaaacagatcgggagtct

SEQ ID NO: 389257 - DNA, 30 bp, Artificial Sequence
  Synthetic oligonucleotide
aatcacggttgcgcgtactgtcgtgagtct

SEQ ID NO: 389258 - DNA, 30 bp, Artificial Sequence
  Synthetic oligonucleotide
ggaggatctatgcggcattacattgagtct

SEQ ID NO: 389259 - DNA, 30 bp, Artificial Sequence
  Synthetic oligonucleotide
attcctgcacgattaagtaaagactagtct

SEQ ID NO: 389260 - DNA, 30 bp, Artificial Sequence
  Synthetic oligonucleotide
tctaggagttacctatagagattctagtct

SEQ ID NO: 389261 - DNA, 30 bp, Artificial Sequence
  Synthetic oligonucleotide
gcacgatatatagacataggcacgtagtct

SEQ ID NO: 389262 - DNA, 30 bp, Artificial Sequence
  Synthetic oligonucleotide
gaacctggaaatactctgatttgttagtct

SEQ ID NO: 389263 - DNA, 30 bp, Artificial Sequence
  Synthetic oligonucleotide
agcgtctacctcagcaggtttgtttagtct

SEQ ID NO: 389264 - DNA, 30 bp, Artificial Sequence
  Synthetic oligonucleotide
aagttggccacatgagccgtcggcacgtct

SEQ ID NO: 389265 - DNA, 30 bp, Artificial Sequence
  Synthetic oligonucleotide
gacactctttgtcgatgggcgttgacgtct

SEQ ID NO: 389266 - DNA, 30 bp, Artificial Sequence
  Synthetic oligonucleotide
cagataactagaagagcctttgatacgtct

SEQ ID NO: 389267 - DNA, 30 bp, Artificial Sequence
  Synthetic oligonucleotide
agtacggcaatctgactagaagtcccgtct

SEQ ID NO: 389268 - DNA, 30 bp, Artificial Sequence
  Synthetic oligonucleotide
ctgcggaggatgcggcccattgccgcgtct

SEQ ID NO: 389269 - DNA, 30 bp, Artificial Sequence
  Synthetic oligonucleotide
ctaaagtacggagtatactcatatgcgtct

SEQ ID NO: 389270 - DNA, 30 bp, Artificial Sequence
  Synthetic oligonucleotide
tcgcatcgcgcccagttacatgaatcgtct

SEQ ID NO: 389271 - DNA, 30 bp, Artificial Sequence
  Synthetic oligonucleotide
ctgaaggtacgtcgcggccgttaatcgtct

SEQ ID NO: 389272 - DNA, 30 bp, Artificial Sequence
  Synthetic oligonucleotide
tttgtttgaacagcttatcagagatcgtct

SEQ ID NO: 389273 - DNA, 30 bp, Artificial Sequence
  Synthetic oligonucleotide
aatcaggcttgagaaagacataggtcgtct

SEQ ID NO: 389274 - DNA, 30 bp, Artificial Sequence
  Synthetic oligonucleotide
cgtaagccttttaaaaaagtgcggtcgtct

SEQ ID NO: 389275 - DNA, 30 bp, Artificial Sequence
  Synthetic oligonucleotide
ggagggtgttagggcagtcccgggtcgtct

SEQ ID NO: 389276 - DNA, 30 bp, Artificial Sequence
  Synthetic oligonucleotide
tgcctgacgttcgatagcggaccttcgtct

SEQ ID NO: 389277 - DNA, 30 bp, Artificial Sequence
  Synthetic oligonucleotide
gagaatataaataagtctatgttttcgtct

SEQ ID NO: 389278 - DNA, 30 bp, Artificial Sequence
  Synthetic oligonucleotide
gccaggaatgtaaggcaatcttaaaggtct

SEQ ID NO: 389279 - DNA, 30 bp, Artificial Sequence
  Synthetic oligonucleotide
ggctcagcaaccgttcaatgttaaaggtct

SEQ ID NO: 389280 - DNA, 30 bp, Artificial Sequence
  Synthetic oligonucleotide
atcgcgggcagcgtagacatctgaaggtct

SEQ ID NO: 389281 - DNA, 30 bp, Artificial Sequence
  Synthetic oligonucleotide
caacctaccatgaagcgtccgtgaaggtct

SEQ ID NO: 389282 - DNA, 30 bp, Artificial Sequence
  Synthetic oligonucleotide
gtctagagcatctggtatataatcaggtct

SEQ ID NO: 389283 - DNA, 30 bp, Artificial Sequence
  Synthetic oligonucleotide
gagtatcaagtctcgtcataggcgaggtct

SEQ ID NO: 389284 - DNA, 30 bp, Artificial Sequence
  Synthetic oligonucleotide
acgccgagctcagtttgacgttgtaggtct

SEQ ID NO: 389285 - DNA, 30 bp, Artificial Sequence
  Synthetic oligonucleotide
gcggcaggactgggttctaagtgacggtct

SEQ ID NO: 389286 - DNA, 30 bp, Artificial Sequence
  Synthetic oligonucleotide
aatctcaagctgggggttcagttacggtct

SEQ ID NO: 389287 - DNA, 30 bp, Artificial Sequence
  Synthetic oligonucleotide
aatgcagaagcaaaccgcttgttacggtct

SEQ ID NO: 389288 - DNA, 30 bp, Artificial Sequence
  Synthetic oligonucleotide
gaggggtagttgtactcgcatttgcggtct

SEQ ID NO: 389289 - DNA, 30 bp, Artificial Sequence
  Synthetic oligonucleotide
aaacatctacaataatccaaggaagggtct

SEQ ID NO: 389290 - DNA, 30 bp, Artificial Sequence
  Synthetic oligonucleotide
gtattacgggggcgtccaacataagggtct

SEQ ID NO: 389291 - DNA, 30 bp, Artificial Sequence
  Synthetic oligonucleotide
gatagaatcctctgcggcgaccgagggtct

SEQ ID NO: 389292 - DNA, 30 bp, Artificial Sequence
  Synthetic oligonucleotide
tcaagtcaaagtgcagcgacgggagggtct

SEQ ID NO: 389293 - DNA, 30 bp, Artificial Sequence
  Synthetic oligonucleotide
aaaaattaaagcgaccagattggcgggtct

SEQ ID NO: 389294 - DNA, 30 bp, Artificial Sequence
  Synthetic oligonucleotide
tgcctgatgcccgagttgtctagggggtct

SEQ ID NO: 389295 - DNA, 30 bp, Artificial Sequence
  Synthetic oligonucleotide
acggttctgactgttcggctccctgggtct

SEQ ID NO: 389296 - DNA, 30 bp, Artificial Sequence
  Synthetic oligonucleotide
aaggcagtcatggaacatcttcaatggtct

SEQ ID NO: 389297 - DNA, 30 bp, Artificial Sequence
  Synthetic oligonucleotide
atctactggctcgtaacaattagatggtct

SEQ ID NO: 389298 - DNA, 30 bp, Artificial Sequence
  Synthetic oligonucleotide
atgcgcgtatgcccgcgttatggatggtct

SEQ ID NO: 389299 - DNA, 30 bp, Artificial Sequence
  Synthetic oligonucleotide
attcaagttacccgtgatttcttatggtct

SEQ ID NO: 389300 - DNA, 30 bp, Artificial Sequence
  Synthetic oligonucleotide
gttgaagcacagtctaggcgccgctggtct

SEQ ID NO: 389301 - DNA, 30 bp, Artificial Sequence
  Synthetic oligonucleotide
aatggcgcaataccgctatcggtttggtct

SEQ ID NO: 389302 - DNA, 30 bp, Artificial Sequence
  Synthetic oligonucleotide
gtaggggcggctgagttggggtgaatgtct

SEQ ID NO: 389303 - DNA, 30 bp, Artificial Sequence
  Synthetic oligonucleotide
cgtccgctatgtgatatgccacacatgtct

SEQ ID NO: 389304 - DNA, 30 bp, Artificial Sequence
  Synthetic oligonucleotide
aatagagcaagctagcgcgactgtatgtct

SEQ ID NO: 389305 - DNA, 30 bp, Artificial Sequence
  Synthetic oligonucleotide
ttcgtaaagaaagttaactagtttatgtct

SEQ ID NO: 389306 - DNA, 30 bp, Artificial Sequence
  Synthetic oligonucleotide
gttcgagtaccttcggaattcggactgtct

SEQ ID NO: 389307 - DNA, 30 bp, Artificial Sequence
  Synthetic oligonucleotide
atactcacaggatcatccaagaacctgtct

SEQ ID NO: 389308 - DNA, 30 bp, Artificial Sequence
  Synthetic oligonucleotide
ccatagggagatgcagcggccagtctgtct

SEQ ID NO: 389309 - DNA, 30 bp, Artificial Sequence
  Synthetic oligonucleotide
gatacgaatctcctgtgcccagaagtgtct

SEQ ID NO: 389310 - DNA, 30 bp, Artificial Sequence
  Synthetic oligonucleotide
acgtcagtttgccgtagatagagagtgtct

SEQ ID NO: 389311 - DNA, 30 bp, Artificial Sequence
  Synthetic oligonucleotide
tatatgacaaacctgtaacgacgcgtgtct

SEQ ID NO: 389312 - DNA, 30 bp, Artificial Sequence
  Synthetic oligonucleotide
ggacgaatattgccttgtgcaatcgtgtct

SEQ ID NO: 389313 - DNA, 30 bp, Artificial Sequence
  Synthetic oligonucleotide
ggagtctgtcttttaactaaagtcgtgtct

SEQ ID NO: 389314 - DNA, 30 bp, Artificial Sequence
  Synthetic oligonucleotide
ctcacggtgatgttctgcaacatggtgtct

SEQ ID NO: 389315 - DNA, 30 bp, Artificial Sequence
  Synthetic oligonucleotide
ctaatatggtcaggatgcttggctgtgtct

SEQ ID NO: 389316 - DNA, 30 bp, Artificial Sequence
  Synthetic oligonucleotide
tattcacgggcttaagtcttagttgtgtct

SEQ ID NO: 389317 - DNA, 30 bp, Artificial Sequence
  Synthetic oligonucleotide
tgttatatagatgtgtttatatttgtgtct

SEQ ID NO: 389318 - DNA, 30 bp, Artificial Sequence
  Synthetic oligonucleotide
gaaacgatttacgatagttagttattgtct

SEQ ID NO: 389319 - DNA, 30 bp, Artificial Sequence
  Synthetic oligonucleotide
atatcacgcctgtactcttcatgtttgtct

SEQ ID NO: 389320 - DNA, 30 bp, Artificial Sequence
  Synthetic oligonucleotide
gttttcagaacttttcgacttgcaaattct

SEQ ID NO: 389321 - DNA, 30 bp, Artificial Sequence
  Synthetic oligonucleotide
aataactggtaaaagaccaactgaaattct

SEQ ID NO: 389322 - DNA, 30 bp, Artificial Sequence
  Synthetic oligonucleotide
ggcgctaagtggttacgatagtgaaattct

SEQ ID NO: 389323 - DNA, 31 bp, Artificial Sequence
  Synthetic oligonucleotide
acttagaggataattggatctgtccaattct

SEQ ID NO: 389324 - DNA, 30 bp, Artificial Sequence
  Synthetic oligonucleotide
gtgtactgccgcatctatacactcaattct

SEQ ID NO: 389325 - DNA, 30 bp, Artificial Sequence
  Synthetic oligonucleotide
ttaaggggtggctgagaaccgttgaattct

SEQ ID NO: 389326 - DNA, 30 bp, Artificial Sequence
  Synthetic oligonucleotide
gcctgacgaagcccactccataataattct

SEQ ID NO: 389327 - DNA, 30 bp, Artificial Sequence
  Synthetic oligonucleotide
aaccgatcctggatactctcccataattct

SEQ ID NO: 389328 - DNA, 30 bp, Artificial Sequence
  Synthetic oligonucleotide
cattgcgctattattgcccgttataattct

SEQ ID NO: 389329 - DNA, 30 bp, Artificial Sequence
  Synthetic oligonucleotide
gcgtctgaattgactgagtaacttaattct

SEQ ID NO: 389330 - DNA, 30 bp, Artificial Sequence
  Synthetic oligonucleotide
tttggttgaccacaaccctccccgcattct

SEQ ID NO: 389331 - DNA, 30 bp, Artificial Sequence
  Synthetic oligonucleotide
tctttccgggggacgggacgccctcattct

SEQ ID NO: 389332 - DNA, 30 bp, Artificial Sequence
  Synthetic oligonucleotide
tccgtcttggagtacccaccctcagattct

SEQ ID NO: 389333 - DNA, 30 bp, Artificial Sequence
  Synthetic oligonucleotide
ccgcagtggacgcattgtctgtgagattct

SEQ ID NO: 389334 - DNA, 30 bp, Artificial Sequence
  Synthetic oligonucleotide
gttggataccgccaactattatacgattct

SEQ ID NO: 389335 - DNA, 30 bp, Artificial Sequence
  Synthetic oligonucleotide
tgcggatactcctcatgaatctcggattct

SEQ ID NO: 389336 - DNA, 30 bp, Artificial Sequence
  Synthetic oligonucleotide
ggttgagcaattatgtctggcgatgattct

SEQ ID NO: 389337 - DNA, 30 bp, Artificial Sequence
  Synthetic oligonucleotide
atgtctttctcgtctgggccattctattct

SEQ ID NO: 389338 - DNA, 31 bp, Artificial Sequence
  Synthetic oligonucleotide
ggcctcaacgtaaattaactgtatttattct

SEQ ID NO: 389339 - DNA, 30 bp, Artificial Sequence
  Synthetic oligonucleotide
gacggctactgaaatgcttgcaagacttct

SEQ ID NO: 389340 - DNA, 30 bp, Artificial Sequence
  Synthetic oligonucleotide
tgttaggagtagattgccatggaaccttct

SEQ ID NO: 389341 - DNA, 30 bp, Artificial Sequence
  Synthetic oligonucleotide
aagatcaagcgcagaaggagctaaccttct

SEQ ID NO: 389342 - DNA, 30 bp, Artificial Sequence
  Synthetic oligonucleotide
ttaagcccggggagacgggtgtgcccttct

SEQ ID NO: 389343 - DNA, 30 bp, Artificial Sequence
  Synthetic oligonucleotide
gcaataacccattttctggctaggccttct

SEQ ID NO: 389344 - DNA, 30 bp, Artificial Sequence
  Synthetic oligonucleotide
aagactcatccgttttgctcggtgccttct

SEQ ID NO: 389345 - DNA, 30 bp, Artificial Sequence
  Synthetic oligonucleotide
ggtataaacttcacaaggcggatagcttct

SEQ ID NO: 389346 - DNA, 30 bp, Artificial Sequence
  Synthetic oligonucleotide
cggcaccgtacgctgttctacttagcttct

SEQ ID NO: 389347 - DNA, 30 bp, Artificial Sequence
  Synthetic oligonucleotide
ctccggtctgcgcgtcgtcgataggcttct

SEQ ID NO: 389348 - DNA, 30 bp, Artificial Sequence
  Synthetic oligonucleotide
acgctgttgggtgctcccgagttggcttct

SEQ ID NO: 389349 - DNA, 30 bp, Artificial Sequence
  Synthetic oligonucleotide
atgtacgatttttgcagtcaatgatcttct

SEQ ID NO: 389350 - DNA, 30 bp, Artificial Sequence
  Synthetic oligonucleotide
tttagttatgagtatcataagctatcttct

SEQ ID NO: 389351 - DNA, 30 bp, Artificial Sequence
  Synthetic oligonucleotide
gaattgtagatagcgctaaccgggtcttct

SEQ ID NO: 389352 - DNA, 30 bp, Artificial Sequence
  Synthetic oligonucleotide
agcgctgaaattgttcaagggagttcttct

SEQ ID NO: 389353 - DNA, 30 bp, Artificial Sequence
  Synthetic oligonucleotide
ttaaactcggttggctgcggcggaagttct

SEQ ID NO: 389354 - DNA, 30 bp, Artificial Sequence
  Synthetic oligonucleotide
cttatatatacgccaatttagttaagttct

SEQ ID NO: 389355 - DNA, 30 bp, Artificial Sequence
  Synthetic oligonucleotide
gcgtggagtgatacatgcaatgacagttct

SEQ ID NO: 389356 - DNA, 30 bp, Artificial Sequence
  Synthetic oligonucleotide
actgtggaaacgttggatgtccgcagttct

SEQ ID NO: 389357 - DNA, 30 bp, Artificial Sequence
  Synthetic oligonucleotide
ccgtaactctaatgcggaccacctagttct

SEQ ID NO: 389358 - DNA, 30 bp, Artificial Sequence
  Synthetic oligonucleotide
tcggtcgcttttatgagacacgcacgttct

SEQ ID NO: 389359 - DNA, 30 bp, Artificial Sequence
  Synthetic oligonucleotide
tgttagggtttaaaaataaatagacgttct

SEQ ID NO: 389360 - DNA, 30 bp, Artificial Sequence
  Synthetic oligonucleotide
cccgcagcagcaaatagcacagaccgttct

SEQ ID NO: 389361 - DNA, 30 bp, Artificial Sequence
  Synthetic oligonucleotide
caaagccagcgatgacggctcaagcgttct

SEQ ID NO: 389362 - DNA, 30 bp, Artificial Sequence
  Synthetic oligonucleotide
tatagttcacttgacaacaaatagcgttct

SEQ ID NO: 389363 - DNA, 30 bp, Artificial Sequence
  Synthetic oligonucleotide
ggactggagttccctaagtagaggcgttct

SEQ ID NO: 389364 - DNA, 30 bp, Artificial Sequence
  Synthetic oligonucleotide
tggcagtctctcactatttctgatcgttct

SEQ ID NO: 389365 - DNA, 30 bp, Artificial Sequence
  Synthetic oligonucleotide
tcaatctgcacgggtcaaggatttcgttct

SEQ ID NO: 389366 - DNA, 30 bp, Artificial Sequence
  Synthetic oligonucleotide
cccttgacacaccgaggaaacgaaggttct

SEQ ID NO: 389367 - DNA, 30 bp, Artificial Sequence
  Synthetic oligonucleotide
gccgcgagtccgccaagcgccgacggttct

SEQ ID NO: 389368 - DNA, 29 bp, Artificial Sequence
  Synthetic oligonucleotide
agccttgttaggagaagagtggcggttct

SEQ ID NO: 389369 - DNA, 30 bp, Artificial Sequence
  Synthetic oligonucleotide
aatgccttggtgtaaacttaagttggttct

SEQ ID NO: 389370 - DNA, 30 bp, Artificial Sequence
  Synthetic oligonucleotide
acgtgcttcataaatataacattatgttct

SEQ ID NO: 389371 - DNA, 30 bp, Artificial Sequence
  Synthetic oligonucleotide
ttactactaatcctcgctcgatcctgttct

SEQ ID NO: 389372 - DNA, 30 bp, Artificial Sequence
  Synthetic oligonucleotide
gagttgaaggacagtcaagtgcagtgttct

SEQ ID NO: 389373 - DNA, 30 bp, Artificial Sequence
  Synthetic oligonucleotide
gcccacgtaatgaagagtataatgtgttct

SEQ ID NO: 389374 - DNA, 30 bp, Artificial Sequence
  Synthetic oligonucleotide
gcatgtctccaccgatccgggtattgttct

SEQ ID NO: 389375 - DNA, 30 bp, Artificial Sequence
  Synthetic oligonucleotide
tccaacggttcagacgcgtcgacttgttct

SEQ ID NO: 389376 - DNA, 30 bp, Artificial Sequence
  Synthetic oligonucleotide
gccaagaggcgttaccaatgacgttgttct

SEQ ID NO: 389377 - DNA, 30 bp, Artificial Sequence
  Synthetic oligonucleotide
ctgataggcgtctgttcgaggaaaatttct

SEQ ID NO: 389378 - DNA, 30 bp, Artificial Sequence
  Synthetic oligonucleotide
gatcctcacatgttgccgaacggaatttct

SEQ ID NO: 389379 - DNA, 30 bp, Artificial Sequence
  Synthetic oligonucleotide
ttgccaagaagacgataagacaacatttct

SEQ ID NO: 389380 - DNA, 30 bp, Artificial Sequence
  Synthetic oligonucleotide
ccacgttttgctgagcatagtgcgatttct

SEQ ID NO: 389381 - DNA, 30 bp, Artificial Sequence
  Synthetic oligonucleotide
tgctgtggctattcttagattatgatttct

SEQ ID NO: 389382 - DNA, 30 bp, Artificial Sequence
  Synthetic oligonucleotide
ggatcgagacccacgtaactagtgatttct

SEQ ID NO: 389383 - DNA, 30 bp, Artificial Sequence
  Synthetic oligonucleotide
gatattatagcaagccaatatgatatttct

SEQ ID NO: 389384 - DNA, 30 bp, Artificial Sequence
  Synthetic oligonucleotide
gtcaaacagttgcctgaccgcgctatttct

SEQ ID NO: 389385 - DNA, 30 bp, Artificial Sequence
  Synthetic oligonucleotide
attccaacgattaccacgttgagtatttct

SEQ ID NO: 389386 - DNA, 30 bp, Artificial Sequence
  Synthetic oligonucleotide
tggttgcccgtagagaaggcggctctttct

SEQ ID NO: 389387 - DNA, 30 bp, Artificial Sequence
  Synthetic oligonucleotide
tccggtatagtctgtttaagtcaagtttct

SEQ ID NO: 389388 - DNA, 30 bp, Artificial Sequence
  Synthetic oligonucleotide
cagccctaacgcgtaaacaccaacgtttct

SEQ ID NO: 389389 - DNA, 30 bp, Artificial Sequence
  Synthetic oligonucleotide
agtgaagcacacccttgttacagcgtttct

SEQ ID NO: 389390 - DNA, 30 bp, Artificial Sequence
  Synthetic oligonucleotide
ttaaccatgagataaaaagtacgcgtttct

SEQ ID NO: 389391 - DNA, 30 bp, Artificial Sequence
  Synthetic oligonucleotide
aactgtctcagctgacgctctatcgtttct

SEQ ID NO: 389392 - DNA, 30 bp, Artificial Sequence
  Synthetic oligonucleotide
taattcaggcataaatctgtttaggtttct

SEQ ID NO: 389393 - DNA, 30 bp, Artificial Sequence
  Synthetic oligonucleotide
aagaatgggtctgccaagcgtgcggtttct

SEQ ID NO: 389394 - DNA, 30 bp, Artificial Sequence
  Synthetic oligonucleotide
tcttttcgtccgaagcttgaccgggtttct

SEQ ID NO: 389395 - DNA, 30 bp, Artificial Sequence
  Synthetic oligonucleotide
tcggtggggcatctggttagcgttgtttct

SEQ ID NO: 389396 - DNA, 30 bp, Artificial Sequence
  Synthetic oligonucleotide
ctaattagggggcaaggtataaaattttct

SEQ ID NO: 389397 - DNA, 30 bp, Artificial Sequence
  Synthetic oligonucleotide
acccaccaacgtctattgcagtaattttct

SEQ ID NO: 389398 - DNA, 30 bp, Artificial Sequence
  Synthetic oligonucleotide
atactaagacggatttaaatgctattttct

SEQ ID NO: 389399 - DNA, 30 bp, Artificial Sequence
  Synthetic oligonucleotide
gaaactggtaaggaacatccggtcttttct

SEQ ID NO: 389400 - DNA, 30 bp, Artificial Sequence
  Synthetic oligonucleotide
ctcagaagaacgtttcgttccaagttttct

SEQ ID NO: 389401 - DNA, 30 bp, Artificial Sequence
  Synthetic oligonucleotide
acaccgtgtagaatactcgtagcgttttct

SEQ ID NO: 389402 - DNA, 30 bp, Artificial Sequence
  Synthetic oligonucleotide
caccgccccaggggataggtcgcgttttct

SEQ ID NO: 389403 - DNA, 30 bp, Artificial Sequence
  Synthetic oligonucleotide
gcaaatgcttagggaagattggatttttct

SEQ ID NO: 389404 - DNA, 30 bp, Artificial Sequence
  Synthetic oligonucleotide
cacaagcagcataggtctgggactttttct

SEQ ID NO: 389405 - DNA, 30 bp, Artificial Sequence
  Synthetic oligonucleotide
atcttccggtaaccaagatgacctttttct

SEQ ID NO: 389406 - DNA, 30 bp, Artificial Sequence
  Synthetic oligonucleotide
gagtggaggcgatagaagcatgcaaaaagt

SEQ ID NO: 389407 - DNA, 30 bp, Artificial Sequence
  Synthetic oligonucleotide
agtgggctctcaagtgagtcgttaaaaagt

SEQ ID NO: 389408 - DNA, 30 bp, Artificial Sequence
  Synthetic oligonucleotide
taccgcagtcatccctgtgcggccaaaagt

SEQ ID NO: 389409 - DNA, 30 bp, Artificial Sequence
  Synthetic oligonucleotide
gattgccactttagggctaacctcaaaagt

SEQ ID NO: 389410 - DNA, 30 bp, Artificial Sequence
  Synthetic oligonucleotide
gatattagagcgcccaggcaagagaaaagt

SEQ ID NO: 389411 - DNA, 30 bp, Artificial Sequence
  Synthetic oligonucleotide
ggcacagggaaacatcgcgccttgaaaagt

SEQ ID NO: 389412 - DNA, 30 bp, Artificial Sequence
  Synthetic oligonucleotide
atctagtctgcgttacggacctctaaaagt

SEQ ID NO: 389413 - DNA, 30 bp, Artificial Sequence
  Synthetic oligonucleotide
aaatgttggaaaggcatattaggtaaaagt

SEQ ID NO: 389414 - DNA, 30 bp, Artificial Sequence
  Synthetic oligonucleotide
tatgagaactaagatataggttgtaaaagt

SEQ ID NO: 389415 - DNA, 30 bp, Artificial Sequence
  Synthetic oligonucleotide
gttaaatctcactcgacgggcgaacaaagt

SEQ ID NO: 389416 - DNA, 30 bp, Artificial Sequence
  Synthetic oligonucleotide
tactccgtcggagatgaggtaggacaaagt

SEQ ID NO: 389417 - DNA, 30 bp, Artificial Sequence
  Synthetic oligonucleotide
ctaggccgtaagatttggtggggacaaagt

SEQ ID NO: 389418 - DNA, 30 bp, Artificial Sequence
  Synthetic oligonucleotide
caactcgtcaaaattatcaatctacaaagt

SEQ ID NO: 389419 - DNA, 30 bp, Artificial Sequence
  Synthetic oligonucleotide
tcggttacggttctacgcagagtacaaagt

SEQ ID NO: 389420 - DNA, 30 bp, Artificial Sequence
  Synthetic oligonucleotide
ggccgacggctttacagatgtacgcaaagt

SEQ ID NO: 389421 - DNA, 30 bp, Artificial Sequence
  Synthetic oligonucleotide
tatccgtagccgatagtgtcatcgcaaagt

SEQ ID NO: 389422 - DNA, 30 bp, Artificial Sequence
  Synthetic oligonucleotide
atctatcagatcggagtacaccggcaaagt

SEQ ID NO: 389423 - DNA, 30 bp, Artificial Sequence
  Synthetic oligonucleotide
cggagaatcccggcttttgcgtggcaaagt

SEQ ID NO: 389424 - DNA, 30 bp, Artificial Sequence
  Synthetic oligonucleotide
tagaccaaagcactagagctcgatcaaagt

SEQ ID NO: 389425 - DNA, 30 bp, Artificial Sequence
  Synthetic oligonucleotide
cagtcttctgaaagggccttgcttcaaagt

SEQ ID NO: 389426 - DNA, 30 bp, Artificial Sequence
  Synthetic oligonucleotide
acacctcggtagcaggcaaactttcaaagt

SEQ ID NO: 389427 - DNA, 30 bp, Artificial Sequence
  Synthetic oligonucleotide
tgaaccctctttgggttaccacacgaaagt

SEQ ID NO: 389428 - DNA, 30 bp, Artificial Sequence
  Synthetic oligonucleotide
ggtagatgcagcccaagcatgaccgaaagt

SEQ ID NO: 389429 - DNA, 30 bp, Artificial Sequence
  Synthetic oligonucleotide
tgtaccggcgtagagccaatgcatgaaagt

SEQ ID NO: 389430 - DNA, 30 bp, Artificial Sequence
  Synthetic oligonucleotide
cgttttaggtcttaaggttagggtgaaagt

SEQ ID NO: 389431 - DNA, 30 bp, Artificial Sequence
  Synthetic oligonucleotide
agctaaggacccctaaactcgtgtgaaagt

SEQ ID NO: 389432 - DNA, 30 bp, Artificial Sequence
  Synthetic oligonucleotide
cgaagaccgttttgcaacccttgtgaaagt

SEQ ID NO: 389433 - DNA, 30 bp, Artificial Sequence
  Synthetic oligonucleotide
aaatcagtgggtactacgagaaactaaagt

SEQ ID NO: 389434 - DNA, 30 bp, Artificial Sequence
  Synthetic oligonucleotide
cttggtttggcctttaattgcgcctaaagt

SEQ ID NO: 389435 - DNA, 30 bp, Artificial Sequence
  Synthetic oligonucleotide
agtccttgcggatttacattgcagtaaagt

SEQ ID NO: 389436 - DNA, 30 bp, Artificial Sequence
  Synthetic oligonucleotide
ccggtttattccccgccaacgaattaaagt

SEQ ID NO: 389437 - DNA, 30 bp, Artificial Sequence
  Synthetic oligonucleotide
acgtcgtagcaatctctggtggtaacaagt

SEQ ID NO: 389438 - DNA, 30 bp, Artificial Sequence
  Synthetic oligonucleotide
gtgtgcagtagctaatgacccgtcacaagt

SEQ ID NO: 389439 - DNA, 30 bp, Artificial Sequence
  Synthetic oligonucleotide
aaatgtcttgtgactgactagctgacaagt

SEQ ID NO: 389440 - DNA, 30 bp, Artificial Sequence
  Synthetic oligonucleotide
ggcgtcccaatttcatcccagtatacaagt

SEQ ID NO: 389441 - DNA, 30 bp, Artificial Sequence
  Synthetic oligonucleotide
aggtttgtattacttagttgacaaccaagt

SEQ ID NO: 389442 - DNA, 30 bp, Artificial Sequence
  Synthetic oligonucleotide
atttaggccatgaatacgctacaaccaagt

SEQ ID NO: 389443 - DNA, 30 bp, Artificial Sequence
  Synthetic oligonucleotide
tggactgtaagagcaatggacgcaccaagt

SEQ ID NO: 389444 - DNA, 30 bp, Artificial Sequence
  Synthetic oligonucleotide
acaaaagaggcatggtcatcttcaccaagt

SEQ ID NO: 389445 - DNA, 30 bp, Artificial Sequence
  Synthetic oligonucleotide
tgagtcagtggccgagaaataggcccaagt

SEQ ID NO: 389446 - DNA, 30 bp, Artificial Sequence
  Synthetic oligonucleotide
tccgcctagcgatgcatgatcctgccaagt

SEQ ID NO: 389447 - DNA, 30 bp, Artificial Sequence
  Synthetic oligonucleotide
cacttaggtctgaacattggacatccaagt

SEQ ID NO: 389448 - DNA, 30 bp, Artificial Sequence
  Synthetic oligonucleotide
ttgatccttacacacacggaaacagcaagt

SEQ ID NO: 389449 - DNA, 30 bp, Artificial Sequence
  Synthetic oligonucleotide
gcggttatagatttccgcaatgtagcaagt

SEQ ID NO: 389450 - DNA, 30 bp, Artificial Sequence
  Synthetic oligonucleotide
cagataaccgtcacatggtccttcgcaagt

SEQ ID NO: 389451 - DNA, 30 bp, Artificial Sequence
  Synthetic oligonucleotide
gttttaaggtggcgcaatatagcggcaagt

SEQ ID NO: 389452 - DNA, 30 bp, Artificial Sequence
  Synthetic oligonucleotide
agaaatttagaccccgtaaaatgggcaagt

SEQ ID NO: 389453 - DNA, 30 bp, Artificial Sequence
  Synthetic oligonucleotide
tactgggtggtctctgacaggttggcaagt

SEQ ID NO: 389454 - DNA, 30 bp, Artificial Sequence
  Synthetic oligonucleotide
ttaaatgttgctataaatcttaatgcaagt

SEQ ID NO: 389455 - DNA, 30 bp, Artificial Sequence
  Synthetic oligonucleotide
gattgcaagttatgactacctcaatcaagt

SEQ ID NO: 389456 - DNA, 30 bp, Artificial Sequence
  Synthetic oligonucleotide
attatttgtaacgccttgtgtacatcaagt

SEQ ID NO: 389457 - DNA, 30 bp, Artificial Sequence
  Synthetic oligonucleotide
atattccggatacggtggtggtcaagaagt

SEQ ID NO: 389458 - DNA, 30 bp, Artificial Sequence
  Synthetic oligonucleotide
cgggattttatgtataaagttaacagaagt

SEQ ID NO: 389459 - DNA, 29 bp, Artificial Sequence
  Synthetic oligonucleotide
cgtccgccttgttgggtacaatgagaagt

SEQ ID NO: 389460 - DNA, 30 bp, Artificial Sequence
  Synthetic oligonucleotide
gggtcgttacgggttcgttgtaatagaagt

SEQ ID NO: 389461 - DNA, 30 bp, Artificial Sequence
  Synthetic oligonucleotide
ctgtctgctgccgaccgcgactaacgaagt

SEQ ID NO: 389462 - DNA, 30 bp, Artificial Sequence
  Synthetic oligonucleotide
gtctactcttgaagtataccctcacgaagt

SEQ ID NO: 389463 - DNA, 30 bp, Artificial Sequence
  Synthetic oligonucleotide
tggtgttcattcgggcttctgacccgaagt

SEQ ID NO: 389464 - DNA, 30 bp, Artificial Sequence
  Synthetic oligonucleotide
cattgtatcctaagtacgcgctcccgaagt

SEQ ID NO: 389465 - DNA, 30 bp, Artificial Sequence
  Synthetic oligonucleotide
atgcctgatcttaggcggaccctccgaagt

SEQ ID NO: 389466 - DNA, 30 bp, Artificial Sequence
  Synthetic oligonucleotide
ccagtattcgtatcgggacacgagcgaagt

SEQ ID NO: 389467 - DNA, 30 bp, Artificial Sequence
  Synthetic oligonucleotide
aacaaccgcaatcccggcaataccggaagt

SEQ ID NO: 389468 - DNA, 30 bp, Artificial Sequence
  Synthetic oligonucleotide
tagtctagtatagtgtgcccacccggaagt

SEQ ID NO: 389469 - DNA, 30 bp, Artificial Sequence
  Synthetic oligonucleotide
taccgggtcgctggtgtcggctccggaagt

SEQ ID NO: 389470 - DNA, 30 bp, Artificial Sequence
  Synthetic oligonucleotide
attgatgcatggtccatcttacatggaagt

SEQ ID NO: 389471 - DNA, 30 bp, Artificial Sequence
  Synthetic oligonucleotide
gcagaaatttaccacgagcatattggaagt

SEQ ID NO: 389472 - DNA, 30 bp, Artificial Sequence
  Synthetic oligonucleotide
gaagtcccaactgcactagtaacatgaagt

SEQ ID NO: 389473 - DNA, 30 bp, Artificial Sequence
  Synthetic oligonucleotide
gacccaccggaaaatagaaggacatgaagt

SEQ ID NO: 389474 - DNA, 30 bp, Artificial Sequence
  Synthetic oligonucleotide
tatcaccctgccatattctggcactgaagt

SEQ ID NO: 389475 - DNA, 30 bp, Artificial Sequence
  Synthetic oligonucleotide
aagttacgactgtttagattatactgaagt

SEQ ID NO: 389476 - DNA, 30 bp, Artificial Sequence
  Synthetic oligonucleotide
gatggtagaaagaacggttaaaattgaagt

SEQ ID NO: 389477 - DNA, 30 bp, Artificial Sequence
  Synthetic oligonucleotide
ttagtgagctacagcgcacgttgttgaagt

SEQ ID NO: 389478 - DNA, 30 bp, Artificial Sequence
  Synthetic oligonucleotide
ttgtcgttagagggacaaatggtaataagt

SEQ ID NO: 389479 - DNA, 30 bp, Artificial Sequence
  Synthetic oligonucleotide
ccacacggggctatagcggctcacataagt

SEQ ID NO: 389480 - DNA, 30 bp, Artificial Sequence
  Synthetic oligonucleotide
aaactccaatgagcttacacgcgcataagt

SEQ ID NO: 389481 - DNA, 30 bp, Artificial Sequence
  Synthetic oligonucleotide
cgaatagcatatttaagaaacaatataagt

SEQ ID NO: 389482 - DNA, 30 bp, Artificial Sequence
  Synthetic oligonucleotide
gaagtcatacgctccccccatggtataagt

SEQ ID NO: 389483 - DNA, 30 bp, Artificial Sequence
  Synthetic oligonucleotide
tagtaacacagagaaactgggttactaagt

SEQ ID NO: 389484 - DNA, 30 bp, Artificial Sequence
  Synthetic oligonucleotide
cgtcactcgcatgctgaatagagtctaagt

SEQ ID NO: 389485 - DNA, 30 bp, Artificial Sequence
  Synthetic oligonucleotide
ctcccgaactaccgcctctgacccgtaagt

SEQ ID NO: 389486 - DNA, 30 bp, Artificial Sequence
  Synthetic oligonucleotide
gtcttgggtccaatagagcgcctcgtaagt

SEQ ID NO: 389487 - DNA, 30 bp, Artificial Sequence
  Synthetic oligonucleotide
tactttattgaggggctctaaacggtaagt

SEQ ID NO: 389488 - DNA, 30 bp, Artificial Sequence
  Synthetic oligonucleotide
aatgcgcggagatgtgctccgccggtaagt

SEQ ID NO: 389489 - DNA, 30 bp, Artificial Sequence
  Synthetic oligonucleotide
ggttcatcgggcacggccaaccgggtaagt

SEQ ID NO: 389490 - DNA, 30 bp, Artificial Sequence
  Synthetic oligonucleotide
agccaggactttgtcgtagaggtggtaagt

SEQ ID NO: 389491 - DNA, 30 bp, Artificial Sequence
  Synthetic oligonucleotide
ccgcggtacctctccttcgggaatgtaagt

SEQ ID NO: 389492 - DNA, 30 bp, Artificial Sequence
  Synthetic oligonucleotide
ttgcaactaggtcagtaagctaatgtaagt

SEQ ID NO: 389493 - DNA, 30 bp, Artificial Sequence
  Synthetic oligonucleotide
ccaaacactcgtttgtaaacctgtgtaagt

SEQ ID NO: 389494 - DNA, 30 bp, Artificial Sequence
  Synthetic oligonucleotide
ttcgctcaacgtaaacgtataattgtaagt

SEQ ID NO: 389495 - DNA, 30 bp, Artificial Sequence
  Synthetic oligonucleotide
caccgatgatccaggctgcctacattaagt

SEQ ID NO: 389496 - DNA, 30 bp, Artificial Sequence
  Synthetic oligonucleotide
cgtggtgcgaggcggctgaacatattaagt

SEQ ID NO: 389497 - DNA, 29 bp, Artificial Sequence
  Synthetic oligonucleotide
ggccaaccttctactctgatgtcttaagt

SEQ ID NO: 389498 - DNA, 30 bp, Artificial Sequence
  Synthetic oligonucleotide
ccgcctagtaccggttccgggacgttaagt

SEQ ID NO: 389499 - DNA, 31 bp, Artificial Sequence
  Synthetic oligonucleotide
tacaacctgtcgagtgagtcataggttaagt

SEQ ID NO: 389500 - DNA, 30 bp, Artificial Sequence
  Synthetic oligonucleotide
accagctgaaacagctggaaatatttaagt

SEQ ID NO: 389501 - DNA, 30 bp, Artificial Sequence
  Synthetic oligonucleotide
tgggtctacatgatatttgtgggtttaagt

SEQ ID NO: 389502 - DNA, 30 bp, Artificial Sequence
  Synthetic oligonucleotide
aagacccccaattatagggtctttttaagt

SEQ ID NO: 389503 - DNA, 30 bp, Artificial Sequence
  Synthetic oligonucleotide
tgtgctgttgctcagttgtgaagaaacagt

SEQ ID NO: 389504 - DNA, 30 bp, Artificial Sequence
  Synthetic oligonucleotide
cgtatattctcctaaatctagtgaaacagt

SEQ ID NO: 389505 - DNA, 30 bp, Artificial Sequence
  Synthetic oligonucleotide
gagacgggcaaattgtcgcgagacaacagt

SEQ ID NO: 389506 - DNA, 30 bp, Artificial Sequence
  Synthetic oligonucleotide
atctgttacgcactaagaagccataacagt

SEQ ID NO: 389507 - DNA, 30 bp, Artificial Sequence
  Synthetic oligonucleotide
aatataaatgaccattacattcataacagt

SEQ ID NO: 389508 - DNA, 30 bp, Artificial Sequence
  Synthetic oligonucleotide
gggatatgataaagaaatgccccacacagt

SEQ ID NO: 389509 - DNA, 30 bp, Artificial Sequence
  Synthetic oligonucleotide
aaatagcctttttctttaacgatacacagt

SEQ ID NO: 389510 - DNA, 30 bp, Artificial Sequence
  Synthetic oligonucleotide
cacggatatacatatctcttatcccacagt

SEQ ID NO: 389511 - DNA, 30 bp, Artificial Sequence
  Synthetic oligonucleotide
ttttatccgcccgcttgtgggtcccacagt

SEQ ID NO: 389512 - DNA, 30 bp, Artificial Sequence
  Synthetic oligonucleotide
ttcgattccacagacaacacttcccacagt

SEQ ID NO: 389513 - DNA, 30 bp, Artificial Sequence
  Synthetic oligonucleotide
caaataccaccgctgcagtggagccacagt

SEQ ID NO: 389514 - DNA, 30 bp, Artificial Sequence
  Synthetic oligonucleotide
ttattggtaatcggcggactgtgccacagt

SEQ ID NO: 389515 - DNA, 30 bp, Artificial Sequence
  Synthetic oligonucleotide
aggtcagtttggttgaatgtccagcacagt

SEQ ID NO: 389516 - DNA, 30 bp, Artificial Sequence
  Synthetic oligonucleotide
ggagggagaactgtcagtgaaacgcacagt

SEQ ID NO: 389517 - DNA, 30 bp, Artificial Sequence
  Synthetic oligonucleotide
caactcgtgggtatgggcactccgcacagt

SEQ ID NO: 389518 - DNA, 30 bp, Artificial Sequence
  Synthetic oligonucleotide
tgagtgactctgtgattgtacaatcacagt

SEQ ID NO: 389519 - DNA, 30 bp, Artificial Sequence
  Synthetic oligonucleotide
aagctgcgggatgcagttgaatttcacagt

SEQ ID NO: 389520 - DNA, 30 bp, Artificial Sequence
  Synthetic oligonucleotide
ttcctggaagactctacgactcgagacagt

SEQ ID NO: 389521 - DNA, 30 bp, Artificial Sequence
  Synthetic oligonucleotide
tctccggcggttcttgcaacagccgacagt

SEQ ID NO: 389522 - DNA, 30 bp, Artificial Sequence
  Synthetic oligonucleotide
gaatataagtagcgattggtggtcgacagt

SEQ ID NO: 389523 - DNA, 30 bp, Artificial Sequence
  Synthetic oligonucleotide
ttcggagaaatggttgactcattcgacagt

SEQ ID NO: 389524 - DNA, 30 bp, Artificial Sequence
  Synthetic oligonucleotide
ttgatttaccttaaacggaacaatgacagt

SEQ ID NO: 389525 - DNA, 30 bp, Artificial Sequence
  Synthetic oligonucleotide
atgaagaatccagaaaacttgcaatacagt

SEQ ID NO: 389526 - DNA, 30 bp, Artificial Sequence
  Synthetic oligonucleotide
tattgagctattctcattaacgaatacagt

SEQ ID NO: 389527 - DNA, 30 bp, Artificial Sequence
  Synthetic oligonucleotide
tagccagcctaggcgtctactgaatacagt

SEQ ID NO: 389528 - DNA, 30 bp, Artificial Sequence
  Synthetic oligonucleotide
ccgaggccctcacgttattcctgctacagt

SEQ ID NO: 389529 - DNA, 30 bp, Artificial Sequence
  Synthetic oligonucleotide
tctttatagcacttacccgcgaagtacagt

SEQ ID NO: 389530 - DNA, 30 bp, Artificial Sequence
  Synthetic oligonucleotide
ttagcaagatggcgcgatctagagtacagt

SEQ ID NO: 389531 - DNA, 30 bp, Artificial Sequence
  Synthetic oligonucleotide
catcatcaggtctacacacgtcggtacagt

SEQ ID NO: 389532 - DNA, 30 bp, Artificial Sequence
  Synthetic oligonucleotide
gcccagtatgactgggttaaaacttacagt

SEQ ID NO: 389533 - DNA, 30 bp, Artificial Sequence
  Synthetic oligonucleotide
gtatgaaatatagacggactgggttacagt

SEQ ID NO: 389534 - DNA, 30 bp, Artificial Sequence
  Synthetic oligonucleotide
tatcgggttagaaatgatatggaaaccagt

SEQ ID NO: 389535 - DNA, 30 bp, Artificial Sequence
  Synthetic oligonucleotide
gtggcttgtgacgtttagaatccaaccagt

SEQ ID NO: 389536 - DNA, 30 bp, Artificial Sequence
  Synthetic oligonucleotide
tctggacaaggttaaatcggtgtaaccagt

SEQ ID NO: 389537 - DNA, 30 bp, Artificial Sequence
  Synthetic oligonucleotide
ctcgtaattttgattggtgagctcaccagt

SEQ ID NO: 389538 - DNA, 30 bp, Artificial Sequence
  Synthetic oligonucleotide
attgggccagtcgcgacgtgaatgaccagt

SEQ ID NO: 389539 - DNA, 30 bp, Artificial Sequence
  Synthetic oligonucleotide
ttaaaggttcgttcgtcattgcataccagt

SEQ ID NO: 389540 - DNA, 30 bp, Artificial Sequence
  Synthetic oligonucleotide
agcgagctaggtagacagacgactaccagt

SEQ ID NO: 389541 - DNA, 30 bp, Artificial Sequence
  Synthetic oligonucleotide
tgggcacctccggcaacagaagcacccagt

SEQ ID NO: 389542 - DNA, 30 bp, Artificial Sequence
  Synthetic oligonucleotide
gtatttagggatatgaggggggtccccagt

SEQ ID NO: 389543 - DNA, 30 bp, Artificial Sequence
  Synthetic oligonucleotide
ttatacgcggacttatatatgccagccagt

SEQ ID NO: 389544 - DNA, 30 bp, Artificial Sequence
  Synthetic oligonucleotide
tctgaggtcatgggagggcccggagccagt

SEQ ID NO: 389545 - DNA, 30 bp, Artificial Sequence
  Synthetic oligonucleotide
tgacactagtaacaacatctttccgccagt

SEQ ID NO: 389546 - DNA, 30 bp, Artificial Sequence
  Synthetic oligonucleotide
ggctgggcctgcatgtcgcttgatgccagt

SEQ ID NO: 389547 - DNA, 30 bp, Artificial Sequence
  Synthetic oligonucleotide
gaaaaggtcagtaccgcgggtaggtccagt

SEQ ID NO: 389548 - DNA, 30 bp, Artificial Sequence
  Synthetic oligonucleotide
atgtcgtagtggaatcagacactgtccagt

SEQ ID NO: 389549 - DNA, 30 bp, Artificial Sequence
  Synthetic oligonucleotide
gtattagaccactgtagattgtattccagt

SEQ ID NO: 389550 - DNA, 30 bp, Artificial Sequence
  Synthetic oligonucleotide
catatctccggcggatcatcggcttccagt

SEQ ID NO: 389551 - DNA, 30 bp, Artificial Sequence
  Synthetic oligonucleotide
ccccgttacagctccgtcaggtcaagcagt

SEQ ID NO: 389552 - DNA, 30 bp, Artificial Sequence
  Synthetic oligonucleotide
tgggacaccctagtggattttataagcagt

SEQ ID NO: 389553 - DNA, 30 bp, Artificial Sequence
  Synthetic oligonucleotide
atactacgtcgaaagcggcagaccagcagt

SEQ ID NO: 389554 - DNA, 30 bp, Artificial Sequence
  Synthetic oligonucleotide
tcgaaagaagttatattacaggtgagcagt

SEQ ID NO: 389555 - DNA, 30 bp, Artificial Sequence
  Synthetic oligonucleotide
cactggtcgtgcggcaacatacggcgcagt

SEQ ID NO: 389556 - DNA, 30 bp, Artificial Sequence
  Synthetic oligonucleotide
ggagagtggtattacaaatttgatcgcagt

SEQ ID NO: 389557 - DNA, 30 bp, Artificial Sequence
  Synthetic oligonucleotide
aaacggttcgatcctgataagcctcgcagt

SEQ ID NO: 389558 - DNA, 30 bp, Artificial Sequence
  Synthetic oligonucleotide
tggtccttctcttccgcaaaaataggcagt

SEQ ID NO: 389559 - DNA, 30 bp, Artificial Sequence
  Synthetic oligonucleotide
gaggtccacgaatagctactggtcggcagt

SEQ ID NO: 389560 - DNA, 30 bp, Artificial Sequence
  Synthetic oligonucleotide
tctttcttatccgtttgagcttagggcagt

SEQ ID NO: 389561 - DNA, 30 bp, Artificial Sequence
  Synthetic oligonucleotide
agggatggagcacccccctggccgggcagt

SEQ ID NO: 389562 - DNA, 30 bp, Artificial Sequence
  Synthetic oligonucleotide
tgtgagtagcaagtagcctgaaatggcagt

SEQ ID NO: 389563 - DNA, 30 bp, Artificial Sequence
  Synthetic oligonucleotide
ttctgagtagctgggataccatactgcagt

SEQ ID NO: 389564 - DNA, 30 bp, Artificial Sequence
  Synthetic oligonucleotide
ttagtaggataatccgctgtatcctgcagt

SEQ ID NO: 389565 - DNA, 30 bp, Artificial Sequence
  Synthetic oligonucleotide
agaaatacaaatggcaccctaatgtgcagt

SEQ ID NO: 389566 - DNA, 30 bp, Artificial Sequence
  Synthetic oligonucleotide
agaggttcgcttactgagattcattgcagt

SEQ ID NO: 389567 - DNA, 30 bp, Artificial Sequence
  Synthetic oligonucleotide
aagagacagtaagacgtggactattgcagt

SEQ ID NO: 389568 - DNA, 30 bp, Artificial Sequence
  Synthetic oligonucleotide
ctaggcacggccgagggctccccttgcagt

SEQ ID NO: 389569 - DNA, 30 bp, Artificial Sequence
  Synthetic oligonucleotide
tagtgggccgattcgggcagtccttgcagt

SEQ ID NO: 389570 - DNA, 30 bp, Artificial Sequence
  Synthetic oligonucleotide
taaatatatggcgaggtgtaagacatcagt

SEQ ID NO: 389571 - DNA, 30 bp, Artificial Sequence
  Synthetic oligonucleotide
gtacatatgtctgaaattgatacgatcagt

SEQ ID NO: 389572 - DNA, 30 bp, Artificial Sequence
  Synthetic oligonucleotide
gcgcttccgttgcggttcaggtggatcagt

SEQ ID NO: 389573 - DNA, 30 bp, Artificial Sequence
  Synthetic oligonucleotide
agacccacgtgtgttgcgcgttggatcagt

SEQ ID NO: 389574 - DNA, 30 bp, Artificial Sequence
  Synthetic oligonucleotide
tgcattggtggtacatgttacgctatcagt

SEQ ID NO: 389575 - DNA, 30 bp, Artificial Sequence
  Synthetic oligonucleotide
caacggtcatgccgctccgtttttatcagt

SEQ ID NO: 389576 - DNA, 30 bp, Artificial Sequence
  Synthetic oligonucleotide
taaaacgccgaacaataatggcccctcagt

SEQ ID NO: 389577 - DNA, 30 bp, Artificial Sequence
  Synthetic oligonucleotide
tattcttaccctatcacttttggcctcagt

SEQ ID NO: 389578 - DNA, 30 bp, Artificial Sequence
  Synthetic oligonucleotide
tgcactcacgtatttacgtccgcagtcagt

SEQ ID NO: 389579 - DNA, 30 bp, Artificial Sequence
  Synthetic oligonucleotide
accatccaaccaccgcgcagctgagtcagt

SEQ ID NO: 389580 - DNA, 30 bp, Artificial Sequence
  Synthetic oligonucleotide
gcattcctaccagatgttgggagcgtcagt

SEQ ID NO: 389581 - DNA, 30 bp, Artificial Sequence
  Synthetic oligonucleotide
gatgtacctcccccagcaggtccggtcagt

SEQ ID NO: 389582 - DNA, 30 bp, Artificial Sequence
  Synthetic oligonucleotide
gtaacgacctacgttatactgagggtcagt

SEQ ID NO: 389583 - DNA, 30 bp, Artificial Sequence
  Synthetic oligonucleotide
ggaatggcccaagtaaggcctaatgtcagt

SEQ ID NO: 389584 - DNA, 30 bp, Artificial Sequence
  Synthetic oligonucleotide
tgctgcaaggtggcctgttacagtgtcagt

SEQ ID NO: 389585 - DNA, 30 bp, Artificial Sequence
  Synthetic oligonucleotide
cacacctggggcgtttagacttcattcagt

SEQ ID NO: 389586 - DNA, 30 bp, Artificial Sequence
  Synthetic oligonucleotide
cgcaatatgatggtcggataacagttcagt

SEQ ID NO: 389587 - DNA, 30 bp, Artificial Sequence
  Synthetic oligonucleotide
tatgagtagaccgctggctgctagttcagt

SEQ ID NO: 389588 - DNA, 30 bp, Artificial Sequence
  Synthetic oligonucleotide
agcatgtctcgggcaagcctgacgttcagt

SEQ ID NO: 389589 - DNA, 30 bp, Artificial Sequence
  Synthetic oligonucleotide
gttagattgttatgggtcgcaatgttcagt

SEQ ID NO: 389590 - DNA, 30 bp, Artificial Sequence
  Synthetic oligonucleotide
gccaaacgtccggcccgtctgtttttcagt

SEQ ID NO: 389591 - DNA, 29 bp, Artificial Sequence
  Synthetic oligonucleotide
gtacctcacatgacacttaataaaagagt

SEQ ID NO: 389592 - DNA, 30 bp, Artificial Sequence
  Synthetic oligonucleotide
ctatgcttagaggttagtaaaagaaagagt

SEQ ID NO: 389593 - DNA, 30 bp, Artificial Sequence
  Synthetic oligonucleotide
tttaaaaatggtagttcgtaacagaagagt

SEQ ID NO: 389594 - DNA, 30 bp, Artificial Sequence
  Synthetic oligonucleotide
tctatgtattaggagcagtgctcgaagagt

SEQ ID NO: 389595 - DNA, 30 bp, Artificial Sequence
  Synthetic oligonucleotide
cgcatttttggctccaataaagggaagagt

SEQ ID NO: 389596 - DNA, 30 bp, Artificial Sequence
  Synthetic oligonucleotide
cacattcggcgctggtggacacctaagagt

SEQ ID NO: 389597 - DNA, 30 bp, Artificial Sequence
  Synthetic oligonucleotide
aagtataatcggccattgtctctacagagt

SEQ ID NO: 389598 - DNA, 30 bp, Artificial Sequence
  Synthetic oligonucleotide
agcggcaggcgtcgatatagttagcagagt

SEQ ID NO: 389599 - DNA, 30 bp, Artificial Sequence
  Synthetic oligonucleotide
atcataattcaaagtgtcggtccagagagt

SEQ ID NO: 389600 - DNA, 30 bp, Artificial Sequence
  Synthetic oligonucleotide
gtccgcctctcacaaaatcgttgagagagt

SEQ ID NO: 389601 - DNA, 30 bp, Artificial Sequence
  Synthetic oligonucleotide
gagcacgcatatatcgcatccttcgagagt

SEQ ID NO: 389602 - DNA, 30 bp, Artificial Sequence
  Synthetic oligonucleotide
agtactaggtttgtacaggactcggagagt

SEQ ID NO: 389603 - DNA, 30 bp, Artificial Sequence
  Synthetic oligonucleotide
ttatacctctatatgttcggtttggagagt

SEQ ID NO: 389604 - DNA, 30 bp, Artificial Sequence
  Synthetic oligonucleotide
gcccgcgaatgccaattctggattgagagt

SEQ ID NO: 389605 - DNA, 30 bp, Artificial Sequence
  Synthetic oligonucleotide
aatgcctaaaataatcgctgcctttagagt

SEQ ID NO: 389606 - DNA, 30 bp, Artificial Sequence
  Synthetic oligonucleotide
gtaagtccgattcggttctaccgaacgagt

SEQ ID NO: 389607 - DNA, 30 bp, Artificial Sequence
  Synthetic oligonucleotide
ccccggtgactgatccaagtcataacgagt

SEQ ID NO: 389608 - DNA, 30 bp, Artificial Sequence
  Synthetic oligonucleotide
ccgctggtaaactccttcagaggcacgagt

SEQ ID NO: 389609 - DNA, 30 bp, Artificial Sequence
  Synthetic oligonucleotide
gatctggcgctataaccggatgcgacgagt

SEQ ID NO: 389610 - DNA, 30 bp, Artificial Sequence
  Synthetic oligonucleotide
acatgaatcaacccgtcctgtgttacgagt

SEQ ID NO: 389611 - DNA, 30 bp, Artificial Sequence
  Synthetic oligonucleotide
gacttgtgccactgaagccacacaccgagt

SEQ ID NO: 389612 - DNA, 30 bp, Artificial Sequence
  Synthetic oligonucleotide
cctagaatgtcagctgcagtagagccgagt

SEQ ID NO: 389613 - DNA, 30 bp, Artificial Sequence
  Synthetic oligonucleotide
aaaacgaatactttgcaggggccgccgagt

SEQ ID NO: 389614 - DNA, 30 bp, Artificial Sequence
  Synthetic oligonucleotide
tcagataaagtgtggaaatgctatccgagt

SEQ ID NO: 389615 - DNA, 30 bp, Artificial Sequence
  Synthetic oligonucleotide
cgactgaaccgctcgttttaagttccgagt

SEQ ID NO: 389616 - DNA, 30 bp, Artificial Sequence
  Synthetic oligonucleotide
accagtacacgactaccgcatcaagcgagt

SEQ ID NO: 389617 - DNA, 30 bp, Artificial Sequence
  Synthetic oligonucleotide
atccaaaacgagctaacgctgaccgcgagt

SEQ ID NO: 389618 - DNA, 30 bp, Artificial Sequence
  Synthetic oligonucleotide
ttcaattagttttcataggctatcgcgagt

SEQ ID NO: 389619 - DNA, 30 bp, Artificial Sequence
  Synthetic oligonucleotide
caaaccgttgaagacagctagctcgcgagt

SEQ ID NO: 389620 - DNA, 30 bp, Artificial Sequence
  Synthetic oligonucleotide
tgcgacgttcgtctacgctagatatcgagt

SEQ ID NO: 389621 - DNA, 30 bp, Artificial Sequence
  Synthetic oligonucleotide
gccgagggcggctcagaagaccagtcgagt

SEQ ID NO: 389622 - DNA, 30 bp, Artificial Sequence
  Synthetic oligonucleotide
cgagcattcgaatcattgataaattcgagt

SEQ ID NO: 389623 - DNA, 30 bp, Artificial Sequence
  Synthetic oligonucleotide
cttgtacgccgtttaatactccgttcgagt

SEQ ID NO: 389624 - DNA, 30 bp, Artificial Sequence
  Synthetic oligonucleotide
tgccggcggatcatacgtgctctttcgagt

SEQ ID NO: 389625 - DNA, 30 bp, Artificial Sequence
  Synthetic oligonucleotide
actatgcaagacagctcctgcaaaaggagt

SEQ ID NO: 389626 - DNA, 30 bp, Artificial Sequence
  Synthetic oligonucleotide
caaaggtttcgatctttgacttacaggagt

SEQ ID NO: 389627 - DNA, 30 bp, Artificial Sequence
  Synthetic oligonucleotide
aattccgggttacggctccaaccgaggagt

SEQ ID NO: 389628 - DNA, 30 bp, Artificial Sequence
  Synthetic oligonucleotide
ccctggatcggtttgcttgataggaggagt

SEQ ID NO: 389629 - DNA, 30 bp, Artificial Sequence
  Synthetic oligonucleotide
gaagccgagttaaagaattcacgtaggagt

SEQ ID NO: 389630 - DNA, 30 bp, Artificial Sequence
  Synthetic oligonucleotide
gcgttcagcgtcgtaggttttagacggagt

SEQ ID NO: 389631 - DNA, 30 bp, Artificial Sequence
  Synthetic oligonucleotide
tattgtcgtttatttggtccaccagggagt

SEQ ID NO: 389632 - DNA, 30 bp, Artificial Sequence
  Synthetic oligonucleotide
gcgggagcattaacgcgatggcaggggagt

SEQ ID NO: 389633 - DNA, 30 bp, Artificial Sequence
  Synthetic oligonucleotide
catagcctacgctttaacacgtgggggagt

SEQ ID NO: 389634 - DNA, 30 bp, Artificial Sequence
  Synthetic oligonucleotide
caggtaaaagcaggtaaagacatggggagt

SEQ ID NO: 389635 - DNA, 30 bp, Artificial Sequence
  Synthetic oligonucleotide
atctcagtatctggtgaactagatgggagt

SEQ ID NO: 389636 - DNA, 30 bp, Artificial Sequence
  Synthetic oligonucleotide
gtgtttgggggtgataatgtaagctggagt

SEQ ID NO: 389637 - DNA, 30 bp, Artificial Sequence
  Synthetic oligonucleotide
attggactgtgtacactaaacttctggagt

SEQ ID NO: 389638 - DNA, 30 bp, Artificial Sequence
  Synthetic oligonucleotide
tctgcctgactgcttccgcttcagtggagt

SEQ ID NO: 389639 - DNA, 30 bp, Artificial Sequence
  Synthetic oligonucleotide
tggcagcaacatatcatcggagagtggagt

SEQ ID NO: 389640 - DNA, 30 bp, Artificial Sequence
  Synthetic oligonucleotide
tacagtggtatatacaagccccggtggagt

SEQ ID NO: 389641 - DNA, 30 bp, Artificial Sequence
  Synthetic oligonucleotide
gccgtttctccatagtggcgggattggagt

SEQ ID NO: 389642 - DNA, 30 bp, Artificial Sequence
  Synthetic oligonucleotide
atctagtcccacctataggtgatttggagt

SEQ ID NO: 389643 - DNA, 30 bp, Artificial Sequence
  Synthetic oligonucleotide
ctgcggtcctctcaatccactatttggagt

SEQ ID NO: 389644 - DNA, 30 bp, Artificial Sequence
  Synthetic oligonucleotide
ggttctgattgtgtgggggctatttggagt

SEQ ID NO: 389645 - DNA, 30 bp, Artificial Sequence
  Synthetic oligonucleotide
tttccccaaggcccgcgcagaccaatgagt

SEQ ID NO: 389646 - DNA, 30 bp, Artificial Sequence
  Synthetic oligonucleotide
cttttcatgtgtcacccctagataatgagt

SEQ ID NO: 389647 - DNA, 30 bp, Artificial Sequence
  Synthetic oligonucleotide
tcttgcaactatttctacggagtaatgagt

SEQ ID NO: 389648 - DNA, 30 bp, Artificial Sequence
  Synthetic oligonucleotide
tgaagccccctgagtgcagcgctcatgagt

SEQ ID NO: 389649 - DNA, 30 bp, Artificial Sequence
  Synthetic oligonucleotide
ctagcacataggaatgtgaaccaactgagt

SEQ ID NO: 389650 - DNA, 30 bp, Artificial Sequence
  Synthetic oligonucleotide
gggtagcgtgccttttgggcgcaactgagt

SEQ ID NO: 389651 - DNA, 30 bp, Artificial Sequence
  Synthetic oligonucleotide
aaaatgcaaattaatagcgttaacctgagt

SEQ ID NO: 389652 - DNA, 30 bp, Artificial Sequence
  Synthetic oligonucleotide
gtgccaaaccatagtacgccgacgctgagt

SEQ ID NO: 389653 - DNA, 30 bp, Artificial Sequence
  Synthetic oligonucleotide
ctgttgtttaagattcatttaatgctgagt

SEQ ID NO: 389654 - DNA, 30 bp, Artificial Sequence
  Synthetic oligonucleotide
tggaatattggtctgctacgaaatctgagt

SEQ ID NO: 389655 - DNA, 30 bp, Artificial Sequence
  Synthetic oligonucleotide
gtcactggaatctctggtcttactctgagt

SEQ ID NO: 389656 - DNA, 30 bp, Artificial Sequence
  Synthetic oligonucleotide
ttggatcatggcgtcagctataacgtgagt

SEQ ID NO: 389657 - DNA, 30 bp, Artificial Sequence
  Synthetic oligonucleotide
atccccttggaatggtaaatgtgattgagt

SEQ ID NO: 389658 - DNA, 30 bp, Artificial Sequence
  Synthetic oligonucleotide
ccgtggaatcgtcgtttccggcacttgagt

SEQ ID NO: 389659 - DNA, 30 bp, Artificial Sequence
  Synthetic oligonucleotide
gtaagaagtaagctgctcagacgcttgagt

SEQ ID NO: 389660 - DNA, 30 bp, Artificial Sequence
  Synthetic oligonucleotide
gggcgcagtttgttcgccttgttgttgagt

SEQ ID NO: 389661 - DNA, 30 bp, Artificial Sequence
  Synthetic oligonucleotide
cttgaagcagaaggaatactttttttgagt

SEQ ID NO: 389662 - DNA, 30 bp, Artificial Sequence
  Synthetic oligonucleotide
gatatcactatacgacccctaaaaaatagt

SEQ ID NO: 389663 - DNA, 30 bp, Artificial Sequence
  Synthetic oligonucleotide
aatcgggtattaaacgggatcataaatagt

SEQ ID NO: 389664 - DNA, 30 bp, Artificial Sequence
  Synthetic oligonucleotide
tgtctgactgctcaataacattccaatagt

SEQ ID NO: 389665 - DNA, 30 bp, Artificial Sequence
  Synthetic oligonucleotide
attgcgttcgcatggaggtcgtggaatagt

SEQ ID NO: 389666 - DNA, 30 bp, Artificial Sequence
  Synthetic oligonucleotide
tttgcggacatcaactttgagtataatagt

SEQ ID NO: 389667 - DNA, 30 bp, Artificial Sequence
  Synthetic oligonucleotide
gtttgatagagaactgttgttcgtaatagt

SEQ ID NO: 389668 - DNA, 30 bp, Artificial Sequence
  Synthetic oligonucleotide
gctcacaatatgtgagtatttggtaatagt

SEQ ID NO: 389669 - DNA, 30 bp, Artificial Sequence
  Synthetic oligonucleotide
ggcagaggctcgatctccgcccaacatagt

SEQ ID NO: 389670 - DNA, 30 bp, Artificial Sequence
  Synthetic oligonucleotide
gcgctctcggctccgaatggctgacatagt

SEQ ID NO: 389671 - DNA, 30 bp, Artificial Sequence
  Synthetic oligonucleotide
ccgtattgggatccatcaactttacatagt

SEQ ID NO: 389672 - DNA, 30 bp, Artificial Sequence
  Synthetic oligonucleotide
attcaacctaaaccggcgtcctaccatagt

SEQ ID NO: 389673 - DNA, 30 bp, Artificial Sequence
  Synthetic oligonucleotide
agaagttagcgacacagggaaacccatagt

SEQ ID NO: 389674 - DNA, 30 bp, Artificial Sequence
  Synthetic oligonucleotide
agaaactcctttggggaacatcgccatagt

SEQ ID NO: 389675 - DNA, 30 bp, Artificial Sequence
  Synthetic oligonucleotide
tttaaacacccgaggatatcttgccatagt

SEQ ID NO: 389676 - DNA, 30 bp, Artificial Sequence
  Synthetic oligonucleotide
ttgccacggtcttacccctggcggcatagt

SEQ ID NO: 389677 - DNA, 30 bp, Artificial Sequence
  Synthetic oligonucleotide
tacactcccagtaacacagatctgcatagt

SEQ ID NO: 389678 - DNA, 30 bp, Artificial Sequence
  Synthetic oligonucleotide
catcccgcagacctcgtaacggtgcatagt

SEQ ID NO: 389679 - DNA, 30 bp, Artificial Sequence
  Synthetic oligonucleotide
ttagtgaagaccatgctgaaaagagatagt

SEQ ID NO: 389680 - DNA, 30 bp, Artificial Sequence
  Synthetic oligonucleotide
acgcaaccaggaggtaggagagcggatagt

SEQ ID NO: 389681 - DNA, 30 bp, Artificial Sequence
  Synthetic oligonucleotide
agcgattcgcttagagggctcgtatatagt

SEQ ID NO: 389682 - DNA, 30 bp, Artificial Sequence
  Synthetic oligonucleotide
gttctttgcatatttcttgtgcgctatagt

SEQ ID NO: 389683 - DNA, 30 bp, Artificial Sequence
  Synthetic oligonucleotide
agtgattccttttatcacaggccgtatagt

SEQ ID NO: 389684 - DNA, 30 bp, Artificial Sequence
  Synthetic oligonucleotide
gggctgtatagtctccctgcgatgtatagt

SEQ ID NO: 389685 - DNA, 30 bp, Artificial Sequence
  Synthetic oligonucleotide
gaccatgagacttatgccagttcttatagt

SEQ ID NO: 389686 - DNA, 30 bp, Artificial Sequence
  Synthetic oligonucleotide
ctatgatggcgcgcacgaaggcgttatagt

SEQ ID NO: 389687 - DNA, 30 bp, Artificial Sequence
  Synthetic oligonucleotide
aaattggagtctggtcgagggggaactagt

SEQ ID NO: 389688 - DNA, 30 bp, Artificial Sequence
  Synthetic oligonucleotide
tctactatgggaaagtaactagacactagt

SEQ ID NO: 389689 - DNA, 30 bp, Artificial Sequence
  Synthetic oligonucleotide
gtcgtgtaggaagtactcaggtccactagt

SEQ ID NO: 389690 - DNA, 30 bp, Artificial Sequence
  Synthetic oligonucleotide
gcagtaaatcgggcctgagcgctcactagt

SEQ ID NO: 389691 - DNA, 30 bp, Artificial Sequence
  Synthetic oligonucleotide
gcagtcctaagtcggacgtctgcacctagt

SEQ ID NO: 389692 - DNA, 30 bp, Artificial Sequence
  Synthetic oligonucleotide
taatgacgaacttgaaaaccgagacctagt

SEQ ID NO: 389693 - DNA, 30 bp, Artificial Sequence
  Synthetic oligonucleotide
ggtgagacgcgtgtccgaggtatgcctagt

SEQ ID NO: 389694 - DNA, 30 bp, Artificial Sequence
  Synthetic oligonucleotide
atccgcttctacaatgacgacctgcctagt

SEQ ID NO: 389695 - DNA, 30 bp, Artificial Sequence
  Synthetic oligonucleotide
cgggtgtttgctgtgccatatcgtcctagt

SEQ ID NO: 389696 - DNA, 30 bp, Artificial Sequence
  Synthetic oligonucleotide
gcgtcagggatgaatattaagggtcctagt

SEQ ID NO: 389697 - DNA, 30 bp, Artificial Sequence
  Synthetic oligonucleotide
gatgttggcatgattagaaattcagctagt

SEQ ID NO: 389698 - DNA, 30 bp, Artificial Sequence
  Synthetic oligonucleotide
ggaatcaaattggtggaccacagagctagt

SEQ ID NO: 389699 - DNA, 30 bp, Artificial Sequence
  Synthetic oligonucleotide
tgaatctaaatggattacactatggctagt

SEQ ID NO: 389700 - DNA, 30 bp, Artificial Sequence
  Synthetic oligonucleotide
ccagcttctccgttcgtcactgtggctagt

SEQ ID NO: 389701 - DNA, 30 bp, Artificial Sequence
  Synthetic oligonucleotide
atgatatctacgctgtactaccgtgctagt

SEQ ID NO: 389702 - DNA, 30 bp, Artificial Sequence
  Synthetic oligonucleotide
tattgtcagtggtctcaggcctttgctagt

SEQ ID NO: 389703 - DNA, 30 bp, Artificial Sequence
  Synthetic oligonucleotide
tattgaccagaggatactaacggatctagt

SEQ ID NO: 389704 - DNA, 30 bp, Artificial Sequence
  Synthetic oligonucleotide
tacggtagatgatccagcaaggcctctagt

SEQ ID NO: 389705 - DNA, 30 bp, Artificial Sequence
  Synthetic oligonucleotide
cgttctgcggattatccaaaggggtctagt

SEQ ID NO: 389706 - DNA, 30 bp, Artificial Sequence
  Synthetic oligonucleotide
gacgagtctctttcgaggttagtgtctagt

SEQ ID NO: 389707 - DNA, 30 bp, Artificial Sequence
  Synthetic oligonucleotide
acatgctacgtgtagagagtcacaagtagt

SEQ ID NO: 389708 - DNA, 30 bp, Artificial Sequence
  Synthetic oligonucleotide
ggtagtgaggcatcgcttgaggcaagtagt

SEQ ID NO: 389709 - DNA, 30 bp, Artificial Sequence
  Synthetic oligonucleotide
ggaggcactgcctcagacgactacagtagt

SEQ ID NO: 389710 - DNA, 30 bp, Artificial Sequence
  Synthetic oligonucleotide
attgttaaatgcagttggtgacccagtagt

SEQ ID NO: 389711 - DNA, 30 bp, Artificial Sequence
  Synthetic oligonucleotide
gatgactcctggtaccttgtggatagtagt

SEQ ID NO: 389712 - DNA, 30 bp, Artificial Sequence
  Synthetic oligonucleotide
gtatcgggtaccggcactcaagcacgtagt

SEQ ID NO: 389713 - DNA, 30 bp, Artificial Sequence
  Synthetic oligonucleotide
cacagctccgccctgagtcatacccgtagt

SEQ ID NO: 389714 - DNA, 30 bp, Artificial Sequence
  Synthetic oligonucleotide
ttgactggtcatatcgctacgtggcgtagt

SEQ ID NO: 389715 - DNA, 30 bp, Artificial Sequence
  Synthetic oligonucleotide
gtggactgttcagcgaatagttatcgtagt

SEQ ID NO: 389716 - DNA, 30 bp, Artificial Sequence
  Synthetic oligonucleotide
cagaatagttggacgtaagattcaggtagt

SEQ ID NO: 389717 - DNA, 30 bp, Artificial Sequence
  Synthetic oligonucleotide
tccagactttatgtttaatgaagaggtagt

SEQ ID NO: 389718 - DNA, 30 bp, Artificial Sequence
  Synthetic oligonucleotide
taggtagggtatgaagcaaaagccggtagt

SEQ ID NO: 389719 - DNA, 30 bp, Artificial Sequence
  Synthetic oligonucleotide
agcttaatacggccttcagattggggtagt

SEQ ID NO: 389720 - DNA, 30 bp, Artificial Sequence
  Synthetic oligonucleotide
gctttaggcccctggttaccagtgggtagt

SEQ ID NO: 389721 - DNA, 30 bp, Artificial Sequence
  Synthetic oligonucleotide
tggctcgagcgccctttggtatctggtagt

SEQ ID NO: 389722 - DNA, 30 bp, Artificial Sequence
  Synthetic oligonucleotide
agtaacgctcaaggatagcccgactgtagt

SEQ ID NO: 389723 - DNA, 30 bp, Artificial Sequence
  Synthetic oligonucleotide
atgtacgttgcataacggaattactgtagt

SEQ ID NO: 389724 - DNA, 30 bp, Artificial Sequence
  Synthetic oligonucleotide
atcaaattgaagtaacagctgcagtgtagt

SEQ ID NO: 389725 - DNA, 30 bp, Artificial Sequence
  Synthetic oligonucleotide
gtggtaacgtgttacataagcgattgtagt

SEQ ID NO: 389726 - DNA, 30 bp, Artificial Sequence
  Synthetic oligonucleotide
gaattaaatctcaaatagaaggcaattagt

SEQ ID NO: 389727 - DNA, 30 bp, Artificial Sequence
  Synthetic oligonucleotide
ctcttggatcttcgtcattggggcattagt

SEQ ID NO: 389728 - DNA, 30 bp, Artificial Sequence
  Synthetic oligonucleotide
aacttattgcatcaaggttcgaggattagt

SEQ ID NO: 389729 - DNA, 30 bp, Artificial Sequence
  Synthetic oligonucleotide
gagaatttgacaacggtctttatgattagt

SEQ ID NO: 389730 - DNA, 30 bp, Artificial Sequence
  Synthetic oligonucleotide
tcgcttacgactctattcgttaatattagt

SEQ ID NO: 389731 - DNA, 30 bp, Artificial Sequence
  Synthetic oligonucleotide
atggtattttatatcctatcggatattagt

SEQ ID NO: 389732 - DNA, 30 bp, Artificial Sequence
  Synthetic oligonucleotide
atgcccagttgcatataatgaggtattagt

SEQ ID NO: 389733 - DNA, 30 bp, Artificial Sequence
  Synthetic oligonucleotide
gtacatctgacgaatgggcattttattagt

SEQ ID NO: 389734 - DNA, 30 bp, Artificial Sequence
  Synthetic oligonucleotide
gggatatagacacggataattcgccttagt

SEQ ID NO: 389735 - DNA, 30 bp, Artificial Sequence
  Synthetic oligonucleotide
ccagaacggggggacgagtcaggccttagt

SEQ ID NO: 389736 - DNA, 30 bp, Artificial Sequence
  Synthetic oligonucleotide
gagctggccgtctgtagtcggctccttagt

SEQ ID NO: 389737 - DNA, 30 bp, Artificial Sequence
  Synthetic oligonucleotide
aacgttccgctgagctcgcttttgcttagt

SEQ ID NO: 389738 - DNA, 30 bp, Artificial Sequence
  Synthetic oligonucleotide
tattcgatcaaaatagtcacgcctcttagt

SEQ ID NO: 389739 - DNA, 30 bp, Artificial Sequence
  Synthetic oligonucleotide
atggagttctttggataatgcggtcttagt

SEQ ID NO: 389740 - DNA, 30 bp, Artificial Sequence
  Synthetic oligonucleotide
tgtggcgtcacgttccgacgaattcttagt

SEQ ID NO: 389741 - DNA, 30 bp, Artificial Sequence
  Synthetic oligonucleotide
cggccggtttcggccgaatggtaagttagt

SEQ ID NO: 389742 - DNA, 30 bp, Artificial Sequence
  Synthetic oligonucleotide
tcccgttggaccacctctccaaaggttagt

SEQ ID NO: 389743 - DNA, 30 bp, Artificial Sequence
  Synthetic oligonucleotide
tcgtttctgcgcgctttttgcgctgttagt

SEQ ID NO: 389744 - DNA, 30 bp, Artificial Sequence
  Synthetic oligonucleotide
aaaagcgcatgaagctgcacatgtgttagt

SEQ ID NO: 389745 - DNA, 30 bp, Artificial Sequence
  Synthetic oligonucleotide
caggattgtcctgctagcgtcagatttagt

SEQ ID NO: 389746 - DNA, 30 bp, Artificial Sequence
  Synthetic oligonucleotide
tagggctatctattctatatttgatttagt

SEQ ID NO: 389747 - DNA, 30 bp, Artificial Sequence
  Synthetic oligonucleotide
gatagttcaaggtgatggagctactttagt

SEQ ID NO: 389748 - DNA, 30 bp, Artificial Sequence
  Synthetic oligonucleotide
taagggacaaaattggcaaaacgctttagt

SEQ ID NO: 389749 - DNA, 30 bp, Artificial Sequence
  Synthetic oligonucleotide
cagccactatagggccgcaatgagtttagt

SEQ ID NO: 389750 - DNA, 30 bp, Artificial Sequence
  Synthetic oligonucleotide
tttaccatgacgccaagctggttgtttagt

SEQ ID NO: 389751 - DNA, 30 bp, Artificial Sequence
  Synthetic oligonucleotide
caaacatcggagggcaacatagattttagt

SEQ ID NO: 389752 - DNA, 29 bp, Artificial Sequence
  Synthetic oligonucleotide
agctcttggagcatttggggtattttagt

SEQ ID NO: 389753 - DNA, 30 bp, Artificial Sequence
  Synthetic oligonucleotide
atctgtccgcgcgcctcatgcggttttagt

SEQ ID NO: 389754 - DNA, 30 bp, Artificial Sequence
  Synthetic oligonucleotide
gcttcagacagcgattataataaaaaacgt

SEQ ID NO: 389755 - DNA, 30 bp, Artificial Sequence
  Synthetic oligonucleotide
tgcttgagcgccggcacgccataaaaacgt

SEQ ID NO: 389756 - DNA, 30 bp, Artificial Sequence
  Synthetic oligonucleotide
atcgcacgaccctgacgtaggtgaaaacgt

SEQ ID NO: 389757 - DNA, 30 bp, Artificial Sequence
  Synthetic oligonucleotide
ggaaggggccctgccacgccagggaaacgt

SEQ ID NO: 389758 - DNA, 30 bp, Artificial Sequence
  Synthetic oligonucleotide
ctatccctgcatcttgggggagggaaacgt

SEQ ID NO: 389759 - DNA, 30 bp, Artificial Sequence
  Synthetic oligonucleotide
agtgggctggccgtagctatcatgaaacgt

SEQ ID NO: 389760 - DNA, 30 bp, Artificial Sequence
  Synthetic oligonucleotide
agcaagcctgtaacggaggctcataaacgt

SEQ ID NO: 389761 - DNA, 30 bp, Artificial Sequence
  Synthetic oligonucleotide
gcaggaggtacctctgtctaccgacaacgt

SEQ ID NO: 389762 - DNA, 30 bp, Artificial Sequence
  Synthetic oligonucleotide
tcgggagaagtgattcagcaaatacaacgt

SEQ ID NO: 389763 - DNA, 30 bp, Artificial Sequence
  Synthetic oligonucleotide
gccacctacgaatggcccagtctccaacgt

SEQ ID NO: 389764 - DNA, 30 bp, Artificial Sequence
  Synthetic oligonucleotide
agcgtgagattcgggatttctctgcaacgt

SEQ ID NO: 389765 - DNA, 30 bp, Artificial Sequence
  Synthetic oligonucleotide
gtcatgctgaaggccacgtccactcaacgt

SEQ ID NO: 389766 - DNA, 30 bp, Artificial Sequence
  Synthetic oligonucleotide
cttacattttgttacggacccacggaacgt

SEQ ID NO: 389767 - DNA, 30 bp, Artificial Sequence
  Synthetic oligonucleotide
gggtacgttttggcttttaagcgggaacgt

SEQ ID NO: 389768 - DNA, 30 bp, Artificial Sequence
  Synthetic oligonucleotide
cccttgttaaaacaagtttaggcataacgt

SEQ ID NO: 389769 - DNA, 30 bp, Artificial Sequence
  Synthetic oligonucleotide
tgtacaaaccgttacgagcgcggctaacgt

SEQ ID NO: 389770 - DNA, 30 bp, Artificial Sequence
  Synthetic oligonucleotide
taagctatactcatcagggcggattaacgt

SEQ ID NO: 389771 - DNA, 30 bp, Artificial Sequence
  Synthetic oligonucleotide
atgaaaagtaacggcgcgggtgaaacacgt

SEQ ID NO: 389772 - DNA, 30 bp, Artificial Sequence
  Synthetic oligonucleotide
gagaacggtactgataatgttacaacacgt

SEQ ID NO: 389773 - DNA, 30 bp, Artificial Sequence
  Synthetic oligonucleotide
cggaatttctaattgaagggttccacacgt

SEQ ID NO: 389774 - DNA, 30 bp, Artificial Sequence
  Synthetic oligonucleotide
tattcgaccgtaggcattggagagacacgt

SEQ ID NO: 389775 - DNA, 30 bp, Artificial Sequence
  Synthetic oligonucleotide
atctggaaatttacaagcgtcgcgacacgt

SEQ ID NO: 389776 - DNA, 30 bp, Artificial Sequence
  Synthetic oligonucleotide
gtataagtcagggcccgagataggacacgt

SEQ ID NO: 389777 - DNA, 30 bp, Artificial Sequence
  Synthetic oligonucleotide
gcggcaggcattgcatttgtgtgtacacgt

SEQ ID NO: 389778 - DNA, 30 bp, Artificial Sequence
  Synthetic oligonucleotide
tcctcgacttccgcatagcgcgtaccacgt

SEQ ID NO: 389779 - DNA, 30 bp, Artificial Sequence
  Synthetic oligonucleotide
ggttccaacatcgcaacacggatgccacgt

SEQ ID NO: 389780 - DNA, 30 bp, Artificial Sequence
  Synthetic oligonucleotide
gtcaacgggctagaagtggatccagcacgt

SEQ ID NO: 389781 - DNA, 30 bp, Artificial Sequence
  Synthetic oligonucleotide
tcggtttgtcttaggaaattgcacgcacgt

SEQ ID NO: 389782 - DNA, 30 bp, Artificial Sequence
  Synthetic oligonucleotide
actacatggactaaaacaccgaccgcacgt

SEQ ID NO: 389783 - DNA, 30 bp, Artificial Sequence
  Synthetic oligonucleotide
acagaccgcgtttcggggattgtcgcacgt

SEQ ID NO: 389784 - DNA, 30 bp, Artificial Sequence
  Synthetic oligonucleotide
acactgtggacggtcaatcgggcggcacgt

SEQ ID NO: 389785 - DNA, 30 bp, Artificial Sequence
  Synthetic oligonucleotide
agcataatgttagaatgttccgtggcacgt

SEQ ID NO: 389786 - DNA, 30 bp, Artificial Sequence
  Synthetic oligonucleotide
agcgtccccgcttgggaagttcctgcacgt

SEQ ID NO: 389787 - DNA, 30 bp, Artificial Sequence
  Synthetic oligonucleotide
attatagcaagacgatcggcgcaatcacgt

SEQ ID NO: 389788 - DNA, 30 bp, Artificial Sequence
  Synthetic oligonucleotide
ccaaagggtttagcgcaaggtgtatcacgt

SEQ ID NO: 389789 - DNA, 30 bp, Artificial Sequence
  Synthetic oligonucleotide
ggcatatttatagatagttccgactcacgt

SEQ ID NO: 389790 - DNA, 30 bp, Artificial Sequence
  Synthetic oligonucleotide
tgctcgaagccgagtgtacagtcgtcacgt

SEQ ID NO: 389791 - DNA, 30 bp, Artificial Sequence
  Synthetic oligonucleotide
tccaaatgaggggatttgcacgggtcacgt

SEQ ID NO: 389792 - DNA, 30 bp, Artificial Sequence
  Synthetic oligonucleotide
aaaattgaattagtagctttacattcacgt

SEQ ID NO: 389793 - DNA, 30 bp, Artificial Sequence
  Synthetic oligonucleotide
agcgggtaagaccccacccacaacagacgt

SEQ ID NO: 389794 - DNA, 30 bp, Artificial Sequence
  Synthetic oligonucleotide
caacgactgaacggatgggcgctcagacgt

SEQ ID NO: 389795 - DNA, 30 bp, Artificial Sequence
  Synthetic oligonucleotide
ggtggcaacaggtatgaatgcttcagacgt

SEQ ID NO: 389796 - DNA, 30 bp, Artificial Sequence
  Synthetic oligonucleotide
gccctgcaccgggttctgatcaggagacgt

SEQ ID NO: 389797 - DNA, 30 bp, Artificial Sequence
  Synthetic oligonucleotide
ggagcgtactatggagcgactaggagacgt

SEQ ID NO: 389798 - DNA, 30 bp, Artificial Sequence
  Synthetic oligonucleotide
cccgatccgggctaaacctatggtagacgt

SEQ ID NO: 389799 - DNA, 30 bp, Artificial Sequence
  Synthetic oligonucleotide
tgttataatgcaccgaagggcgttagacgt

SEQ ID NO: 389800 - DNA, 30 bp, Artificial Sequence
  Synthetic oligonucleotide
ctgatcaatggacaatgcaatgaacgacgt

SEQ ID NO: 389801 - DNA, 30 bp, Artificial Sequence
  Synthetic oligonucleotide
ggaattacaggaacggtcgctacacgacgt

SEQ ID NO: 389802 - DNA, 30 bp, Artificial Sequence
  Synthetic oligonucleotide
cacacaacgtagatacaattcccacgacgt

SEQ ID NO: 389803 - DNA, 30 bp, Artificial Sequence
  Synthetic oligonucleotide
tgtggacaattgctcagtcatctacgacgt

SEQ ID NO: 389804 - DNA, 30 bp, Artificial Sequence
  Synthetic oligonucleotide
atctccaatagtgtgacataaaagcgacgt

SEQ ID NO: 389805 - DNA, 30 bp, Artificial Sequence
  Synthetic oligonucleotide
ccgcaaagagtttaaccgttatagcgacgt

SEQ ID NO: 389806 - DNA, 30 bp, Artificial Sequence
  Synthetic oligonucleotide
tcctgggaaactgcccttacccgtcgacgt

SEQ ID NO: 389807 - DNA, 30 bp, Artificial Sequence
  Synthetic oligonucleotide
ggaagtaacagattgcagctcacaggacgt

SEQ ID NO: 389808 - DNA, 30 bp, Artificial Sequence
  Synthetic oligonucleotide
ccaaatgtgtgatccggttagttcggacgt

SEQ ID NO: 389809 - DNA, 30 bp, Artificial Sequence
  Synthetic oligonucleotide
tgcctgcagttagaaaaggagattggacgt

SEQ ID NO: 389810 - DNA, 30 bp, Artificial Sequence
  Synthetic oligonucleotide
cctctaagcctatgtttcggttttggacgt

SEQ ID NO: 389811 - DNA, 30 bp, Artificial Sequence
  Synthetic oligonucleotide
aattagggaattgagggaatttaatgacgt

SEQ ID NO: 389812 - DNA, 30 bp, Artificial Sequence
  Synthetic oligonucleotide
tttaattaaaattataggtgagcatgacgt

SEQ ID NO: 389813 - DNA, 30 bp, Artificial Sequence
  Synthetic oligonucleotide
ggcacaacgacccggcaaatttcatgacgt

SEQ ID NO: 389814 - DNA, 30 bp, Artificial Sequence
  Synthetic oligonucleotide
gtggtcgctctccgtatcgtgatatgacgt

SEQ ID NO: 389815 - DNA, 30 bp, Artificial Sequence
  Synthetic oligonucleotide
gtactctacactaaattgagaacgtgacgt

SEQ ID NO: 389816 - DNA, 30 bp, Artificial Sequence
  Synthetic oligonucleotide
aagatccagtgcgccggcggtatgtgacgt

SEQ ID NO: 389817 - DNA, 30 bp, Artificial Sequence
  Synthetic oligonucleotide
ggcgggcaaggtccccgaatagattgacgt

SEQ ID NO: 389818 - DNA, 30 bp, Artificial Sequence
  Synthetic oligonucleotide
acatgttaattcggggcaatcacttgacgt

SEQ ID NO: 389819 - DNA, 30 bp, Artificial Sequence
  Synthetic oligonucleotide
tcatgtggctgaatagtcttcgcttgacgt

SEQ ID NO: 389820 - DNA, 30 bp, Artificial Sequence
  Synthetic oligonucleotide
cccttaaatggtgaacaggttagttgacgt

SEQ ID NO: 389821 - DNA, 30 bp, Artificial Sequence
  Synthetic oligonucleotide
aacgagcgcgtctttatgaaaatttgacgt

SEQ ID NO: 389822 - DNA, 30 bp, Artificial Sequence
  Synthetic oligonucleotide
aaagtaaaataaaggatgcatacaatacgt

SEQ ID NO: 389823 - DNA, 30 bp, Artificial Sequence
  Synthetic oligonucleotide
tagtgagttcagaaggttggggtaatacgt

SEQ ID NO: 389824 - DNA, 30 bp, Artificial Sequence
  Synthetic oligonucleotide
aaagttttagacgagaaattaagcatacgt

SEQ ID NO: 389825 - DNA, 30 bp, Artificial Sequence
  Synthetic oligonucleotide
tctccaatctttgcccggtgtctgatacgt

SEQ ID NO: 389826 - DNA, 30 bp, Artificial Sequence
  Synthetic oligonucleotide
gaatgctcaaggcaatatatgttgatacgt

SEQ ID NO: 389827 - DNA, 30 bp, Artificial Sequence
  Synthetic oligonucleotide
tcgctactatagtagctgggaagtatacgt

SEQ ID NO: 389828 - DNA, 30 bp, Artificial Sequence
  Synthetic oligonucleotide
gagactttgtaactgtagcaaattatacgt

SEQ ID NO: 389829 - DNA, 30 bp, Artificial Sequence
  Synthetic oligonucleotide
ctgactgtttaaggactcgtgaaactacgt

SEQ ID NO: 389830 - DNA, 30 bp, Artificial Sequence
  Synthetic oligonucleotide
tgcaccggtaatagtcttaaccgactacgt

SEQ ID NO: 389831 - DNA, 30 bp, Artificial Sequence
  Synthetic oligonucleotide
ttcgggtactcgataactgggaccctacgt

SEQ ID NO: 389832 - DNA, 30 bp, Artificial Sequence
  Synthetic oligonucleotide
agagaacaagcgggtatgtcctagctacgt

SEQ ID NO: 389833 - DNA, 30 bp, Artificial Sequence
  Synthetic oligonucleotide
gaggggcatacgtaattgagtacgctacgt

SEQ ID NO: 389834 - DNA, 30 bp, Artificial Sequence
  Synthetic oligonucleotide
gggatggtaacaaggaatagggatctacgt

SEQ ID NO: 389835 - DNA, 30 bp, Artificial Sequence
  Synthetic oligonucleotide
atctaaccggtcataaaataaagtctacgt

SEQ ID NO: 389836 - DNA, 30 bp, Artificial Sequence
  Synthetic oligonucleotide
gcaggaagtaacactgacgaacttctacgt

SEQ ID NO: 389837 - DNA, 30 bp, Artificial Sequence
  Synthetic oligonucleotide
tttaggcatagagtggtggtgaaagtacgt

SEQ ID NO: 389838 - DNA, 30 bp, Artificial Sequence
  Synthetic oligonucleotide
aaaacaaagacacgttctcgaccagtacgt

SEQ ID NO: 389839 - DNA, 31 bp, Artificial Sequence
  Synthetic oligonucleotide
ctaattacgtctccacctgaaatatgtacgt

SEQ ID NO: 389840 - DNA, 30 bp, Artificial Sequence
  Synthetic oligonucleotide
agccatattatagtaggccaatgtgtacgt

SEQ ID NO: 389841 - DNA, 30 bp, Artificial Sequence
  Synthetic oligonucleotide
tgcgaaaaacccgggtggagttcattacgt

SEQ ID NO: 389842 - DNA, 30 bp, Artificial Sequence
  Synthetic oligonucleotide
gcgttgtctgtgacggattcaagattacgt

SEQ ID NO: 389843 - DNA, 30 bp, Artificial Sequence
  Synthetic oligonucleotide
ctgcacccaagcatacaggggtccttacgt

SEQ ID NO: 389844 - DNA, 30 bp, Artificial Sequence
  Synthetic oligonucleotide
gtactacttgggccggcacctttcttacgt

SEQ ID NO: 389845 - DNA, 30 bp, Artificial Sequence
  Synthetic oligonucleotide
attcaacatcttgaaacggtcgagttacgt

SEQ ID NO: 389846 - DNA, 30 bp, Artificial Sequence
  Synthetic oligonucleotide
gggatatagtatgagcgtcggagtttacgt

SEQ ID NO: 389847 - DNA, 30 bp, Artificial Sequence
  Synthetic oligonucleotide
gttttcgctacaaaggcgagcggaaaccgt

SEQ ID NO: 389848 - DNA, 30 bp, Artificial Sequence
  Synthetic oligonucleotide
gtacgtctagtagctgacgagatcaaccgt

SEQ ID NO: 389849 - DNA, 30 bp, Artificial Sequence
  Synthetic oligonucleotide
ggggtgggggtatgcttgtagacccaccgt

SEQ ID NO: 389850 - DNA, 30 bp, Artificial Sequence
  Synthetic oligonucleotide
gaagacatccggtgggtaaaccgccaccgt

SEQ ID NO: 389851 - DNA, 30 bp, Artificial Sequence
  Synthetic oligonucleotide
ataatagctcggcggggcaacgcgcaccgt

SEQ ID NO: 389852 - DNA, 30 bp, Artificial Sequence
  Synthetic oligonucleotide
gggtgctatgcctgattatgcgcgcaccgt

SEQ ID NO: 389853 - DNA, 30 bp, Artificial Sequence
  Synthetic oligonucleotide
atgggatggttctcacaatgccgtcaccgt

SEQ ID NO: 389854 - DNA, 30 bp, Artificial Sequence
  Synthetic oligonucleotide
cgctaaaagattttccatccaacagaccgt

SEQ ID NO: 389855 - DNA, 30 bp, Artificial Sequence
  Synthetic oligonucleotide
cggtacgattgcatacccaaggccgaccgt

SEQ ID NO: 389856 - DNA, 30 bp, Artificial Sequence
  Synthetic oligonucleotide
caacaccgtcgcgtagagtgttccgaccgt

SEQ ID NO: 389857 - DNA, 30 bp, Artificial Sequence
  Synthetic oligonucleotide
atactatatcccacggtgcgtcaggaccgt

SEQ ID NO: 389858 - DNA, 30 bp, Artificial Sequence
  Synthetic oligonucleotide
ggcggggtatttgacaacccttcggaccgt

SEQ ID NO: 389859 - DNA, 30 bp, Artificial Sequence
  Synthetic oligonucleotide
gaagaccattcgccttctttacctgaccgt

SEQ ID NO: 389860 - DNA, 30 bp, Artificial Sequence
  Synthetic oligonucleotide
atggtagagcgggcgcgaagctcctaccgt

SEQ ID NO: 389861 - DNA, 30 bp, Artificial Sequence
  Synthetic oligonucleotide
gaaacggtatcgcctaagcatttctaccgt

SEQ ID NO: 389862 - DNA, 30 bp, Artificial Sequence
  Synthetic oligonucleotide
tattgtaaccggcttgtcatccggtaccgt

SEQ ID NO: 389863 - DNA, 30 bp, Artificial Sequence
  Synthetic oligonucleotide
gtagccaccgacttcgtagggtgttaccgt

SEQ ID NO: 389864 - DNA, 30 bp, Artificial Sequence
  Synthetic oligonucleotide
ggctttgcttatataatatacgaaacccgt

SEQ ID NO: 389865 - DNA, 30 bp, Artificial Sequence
  Synthetic oligonucleotide
aacatcctcagaacatcgccctcaacccgt

SEQ ID NO: 389866 - DNA, 30 bp, Artificial Sequence
  Synthetic oligonucleotide
tacctgcgcgattcctcttctcgaacccgt

SEQ ID NO: 389867 - DNA, 30 bp, Artificial Sequence
  Synthetic oligonucleotide
tgccgcattcgttagaataatggcacccgt

SEQ ID NO: 389868 - DNA, 30 bp, Artificial Sequence
  Synthetic oligonucleotide
gaccggtttgactcgcgccacgttacccgt

SEQ ID NO: 389869 - DNA, 30 bp, Artificial Sequence
  Synthetic oligonucleotide
tttactaatcgggaaacggaagaaccccgt

SEQ ID NO: 389870 - DNA, 30 bp, Artificial Sequence
  Synthetic oligonucleotide
cagcgcatgaatcactcccgattcccccgt

SEQ ID NO: 389871 - DNA, 30 bp, Artificial Sequence
  Synthetic oligonucleotide
ggacatatctgtagtttagctcacgcccgt

SEQ ID NO: 389872 - DNA, 30 bp, Artificial Sequence
  Synthetic oligonucleotide
gatagctctggctggacagcgcaggcccgt

SEQ ID NO: 389873 - DNA, 30 bp, Artificial Sequence
  Synthetic oligonucleotide
caaaaaacagttaatatacttctggcccgt

SEQ ID NO: 389874 - DNA, 30 bp, Artificial Sequence
  Synthetic oligonucleotide
ttagagtcgaaaatgttttaattggcccgt

SEQ ID NO: 389875 - DNA, 30 bp, Artificial Sequence
  Synthetic oligonucleotide
caaatttcttgaccagacagcaatgcccgt

SEQ ID NO: 389876 - DNA, 30 bp, Artificial Sequence
  Synthetic oligonucleotide
ctctattgtggaactattcgatatgcccgt

SEQ ID NO: 389877 - DNA, 30 bp, Artificial Sequence
  Synthetic oligonucleotide
ttctgccaataaagctgatgcggatcccgt

SEQ ID NO: 389878 - DNA, 30 bp, Artificial Sequence
  Synthetic oligonucleotide
aattagagaacgacggctcgccactcccgt

SEQ ID NO: 389879 - DNA, 30 bp, Artificial Sequence
  Synthetic oligonucleotide
ggacgcggagttgggtaacccacgtcccgt

SEQ ID NO: 389880 - DNA, 30 bp, Artificial Sequence
  Synthetic oligonucleotide
gaatcactagtcatcacacgccggtcccgt

SEQ ID NO: 389881 - DNA, 30 bp, Artificial Sequence
  Synthetic oligonucleotide
acaggcctttgcgaaaataggccttcccgt

SEQ ID NO: 389882 - DNA, 30 bp, Artificial Sequence
  Synthetic oligonucleotide
gctccggactgacgacttcggtgaagccgt

SEQ ID NO: 389883 - DNA, 30 bp, Artificial Sequence
  Synthetic oligonucleotide
cggattgctattttcattaatgtcagccgt

SEQ ID NO: 389884 - DNA, 30 bp, Artificial Sequence
  Synthetic oligonucleotide
taccagcaacgcgcatgaagccagagccgt

SEQ ID NO: 389885 - DNA, 30 bp, Artificial Sequence
  Synthetic oligonucleotide
catagtccgattaagtgtcgtcctagccgt

SEQ ID NO: 389886 - DNA, 30 bp, Artificial Sequence
  Synthetic oligonucleotide
ttgtctccactaaagcatttccttagccgt

SEQ ID NO: 389887 - DNA, 30 bp, Artificial Sequence
  Synthetic oligonucleotide
atggcaagtgtgactccgggtggccgccgt

SEQ ID NO: 389888 - DNA, 30 bp, Artificial Sequence
  Synthetic oligonucleotide
attgagatgtggtctagctttggccgccgt

SEQ ID NO: 389889 - DNA, 30 bp, Artificial Sequence
  Synthetic oligonucleotide
atgacaaggaacagcggttgcagtcgccgt

SEQ ID NO: 389890 - DNA, 30 bp, Artificial Sequence
  Synthetic oligonucleotide
caaaagaggcgtgaactgggccgcggccgt

SEQ ID NO: 389891 - DNA, 30 bp, Artificial Sequence
  Synthetic oligonucleotide
tgattcgtaagttccccacgcggcggccgt

SEQ ID NO: 389892 - DNA, 30 bp, Artificial Sequence
  Synthetic oligonucleotide
ctttggtatcggaggcgttggccgggccgt

SEQ ID NO: 389893 - DNA, 30 bp, Artificial Sequence
  Synthetic oligonucleotide
gtcatgaaatccacaaattctactggccgt

SEQ ID NO: 389894 - DNA, 30 bp, Artificial Sequence
  Synthetic oligonucleotide
tacagaaagtatccttttccacaatgccgt

SEQ ID NO: 389895 - DNA, 30 bp, Artificial Sequence
  Synthetic oligonucleotide
gggttcatgtgttccctaaacggatgccgt

SEQ ID NO: 389896 - DNA, 30 bp, Artificial Sequence
  Synthetic oligonucleotide
tcgaaaggcctggttaaaacatgatgccgt

SEQ ID NO: 389897 - DNA, 30 bp, Artificial Sequence
  Synthetic oligonucleotide
attgctttctacgtgggtaagatatgccgt

SEQ ID NO: 389898 - DNA, 30 bp, Artificial Sequence
  Synthetic oligonucleotide
aactgtgtatgagtaatagaattctgccgt

SEQ ID NO: 389899 - DNA, 30 bp, Artificial Sequence
  Synthetic oligonucleotide
atcactttgcgggaaggtataaaaatccgt

SEQ ID NO: 389900 - DNA, 30 bp, Artificial Sequence
  Synthetic oligonucleotide
gcatctataacgatcaaacggacaatccgt

SEQ ID NO: 389901 - DNA, 30 bp, Artificial Sequence
  Synthetic oligonucleotide
cttcgtccactgatgccactactaatccgt

SEQ ID NO: 389902 - DNA, 30 bp, Artificial Sequence
  Synthetic oligonucleotide
cttaagatacccgtcccgtactagatccgt

SEQ ID NO: 389903 - DNA, 30 bp, Artificial Sequence
  Synthetic oligonucleotide
accaagcacttttgacctatatttatccgt

SEQ ID NO: 389904 - DNA, 30 bp, Artificial Sequence
  Synthetic oligonucleotide
ctgagtctttggtttagatcaagactccgt

SEQ ID NO: 389905 - DNA, 30 bp, Artificial Sequence
  Synthetic oligonucleotide
agatcactggtttttggtgccagactccgt

SEQ ID NO: 389906 - DNA, 30 bp, Artificial Sequence
  Synthetic oligonucleotide
cgagccaacttcacgttgatcttactccgt

SEQ ID NO: 389907 - DNA, 30 bp, Artificial Sequence
  Synthetic oligonucleotide
tttagacaaagccatcatatgtggctccgt

SEQ ID NO: 389908 - DNA, 30 bp, Artificial Sequence
  Synthetic oligonucleotide
ctaggtgtgctatatctaaacctagtccgt

SEQ ID NO: 389909 - DNA, 30 bp, Artificial Sequence
  Synthetic oligonucleotide
gcctcttgtctcgggcgagccaacgtccgt

SEQ ID NO: 389910 - DNA, 30 bp, Artificial Sequence
  Synthetic oligonucleotide
aatcagtgttaactaatatcctcattccgt

SEQ ID NO: 389911 - DNA, 30 bp, Artificial Sequence
  Synthetic oligonucleotide
ctctgtcgaagtttgttcgggtgattccgt

SEQ ID NO: 389912 - DNA, 30 bp, Artificial Sequence
  Synthetic oligonucleotide
ccttgtttatcatggggacggcccttccgt

SEQ ID NO: 389913 - DNA, 30 bp, Artificial Sequence
  Synthetic oligonucleotide
gagtttcgtaaacttcgcgaccgcttccgt

SEQ ID NO: 389914 - DNA, 30 bp, Artificial Sequence
  Synthetic oligonucleotide
cgggttcagcaccttccggctgaaaagcgt

SEQ ID NO: 389915 - DNA, 30 bp, Artificial Sequence
  Synthetic oligonucleotide
actgactccttcgaacgcgagcgcaagcgt

SEQ ID NO: 389916 - DNA, 30 bp, Artificial Sequence
  Synthetic oligonucleotide
aagaacatcgagcattatctgctcaagcgt

SEQ ID NO: 389917 - DNA, 30 bp, Artificial Sequence
  Synthetic oligonucleotide
ttcaaccggaggtagtgagctgggaagcgt

SEQ ID NO: 389918 - DNA, 30 bp, Artificial Sequence
  Synthetic oligonucleotide
tcagtgttgtgatgccgtcgtcttaagcgt

SEQ ID NO: 389919 - DNA, 30 bp, Artificial Sequence
  Synthetic oligonucleotide
gcggtaaagcgagtccaaggcgcacagcgt

SEQ ID NO: 389920 - DNA, 30 bp, Artificial Sequence
  Synthetic oligonucleotide
agtccaaagttacaatgtattgcccagcgt

SEQ ID NO: 389921 - DNA, 30 bp, Artificial Sequence
  Synthetic oligonucleotide
cggtcgacaaactgaacaatatatcagcgt

SEQ ID NO: 389922 - DNA, 30 bp, Artificial Sequence
  Synthetic oligonucleotide
ggtgggtggtctaagatttactttcagcgt

SEQ ID NO: 389923 - DNA, 30 bp, Artificial Sequence
  Synthetic oligonucleotide
attaatcgcatatgcctcgtaatagagcgt

SEQ ID NO: 389924 - DNA, 30 bp, Artificial Sequence
  Synthetic oligonucleotide
ttcgtctcgagcattacagcattagagcgt

SEQ ID NO: 389925 - DNA, 30 bp, Artificial Sequence
  Synthetic oligonucleotide
ggaacgctccaccgcaggataatcgagcgt

SEQ ID NO: 389926 - DNA, 30 bp, Artificial Sequence
  Synthetic oligonucleotide
atacagacgttacagtctgttgcggagcgt

SEQ ID NO: 389927 - DNA, 30 bp, Artificial Sequence
  Synthetic oligonucleotide
gacttcgggatgtctttgataatggagcgt

SEQ ID NO: 389928 - DNA, 30 bp, Artificial Sequence
  Synthetic oligonucleotide
ctgcaatcttggcctgctaaaagtgagcgt

SEQ ID NO: 389929 - DNA, 30 bp, Artificial Sequence
  Synthetic oligonucleotide
cagtgaccgtaattaaggagttttgagcgt

SEQ ID NO: 389930 - DNA, 30 bp, Artificial Sequence
  Synthetic oligonucleotide
tactgtgaattacacacgcggtggtagcgt

SEQ ID NO: 389931 - DNA, 30 bp, Artificial Sequence
  Synthetic oligonucleotide
atggaggcgttaggggtacgtgattagcgt

SEQ ID NO: 389932 - DNA, 30 bp, Artificial Sequence
  Synthetic oligonucleotide
aaagcgacatgcaaccaaatccgaacgcgt

SEQ ID NO: 389933 - DNA, 30 bp, Artificial Sequence
  Synthetic oligonucleotide
acttcagcttcgtctagaaagtagacgcgt

SEQ ID NO: 389934 - DNA, 31 bp, Artificial Sequence
  Synthetic oligonucleotide
caggcgctaggtctacagcctggggacgcgt

SEQ ID NO: 389935 - DNA, 30 bp, Artificial Sequence
  Synthetic oligonucleotide
gcgctgcatgaagttcccctatgaccgcgt

SEQ ID NO: 389936 - DNA, 30 bp, Artificial Sequence
  Synthetic oligonucleotide
catcttggagtcgatggcacggtaccgcgt

SEQ ID NO: 389937 - DNA, 30 bp, Artificial Sequence
  Synthetic oligonucleotide
aaggtcgccttttaatgaatgtacccgcgt

SEQ ID NO: 389938 - DNA, 30 bp, Artificial Sequence
  Synthetic oligonucleotide
atcgattgccggcgtagattggtgccgcgt

SEQ ID NO: 389939 - DNA, 30 bp, Artificial Sequence
  Synthetic oligonucleotide
tccgaggatggaaaaccgtttcatccgcgt

SEQ ID NO: 389940 - DNA, 30 bp, Artificial Sequence
  Synthetic oligonucleotide
ctctctgttccccgactacgataggcgcgt

SEQ ID NO: 389941 - DNA, 30 bp, Artificial Sequence
  Synthetic oligonucleotide
ggatcgtactgagacgtttactcggcgcgt

SEQ ID NO: 389942 - DNA, 30 bp, Artificial Sequence
  Synthetic oligonucleotide
aatgaccttgaaccttttgtatatgcgcgt

SEQ ID NO: 389943 - DNA, 30 bp, Artificial Sequence
  Synthetic oligonucleotide
actgtgcgcggcacttggaaaccgtcgcgt

SEQ ID NO: 389944 - DNA, 30 bp, Artificial Sequence
  Synthetic oligonucleotide
agggagagacagttgtcggttttgtcgcgt

SEQ ID NO: 389945 - DNA, 30 bp, Artificial Sequence
  Synthetic oligonucleotide
gttggcatcgggaatttggtgtaaaggcgt

SEQ ID NO: 389946 - DNA, 30 bp, Artificial Sequence
  Synthetic oligonucleotide
tgcctgctgtcttagggcttgataaggcgt

SEQ ID NO: 389947 - DNA, 30 bp, Artificial Sequence
  Synthetic oligonucleotide
gagtgggcacggatgaagtgcgacaggcgt

SEQ ID NO: 389948 - DNA, 30 bp, Artificial Sequence
  Synthetic oligonucleotide
ttgcagtgtgttgtctatgggcgcaggcgt

SEQ ID NO: 389949 - DNA, 30 bp, Artificial Sequence
  Synthetic oligonucleotide
tccacaagcgaataaaatgttgtcaggcgt

SEQ ID NO: 389950 - DNA, 30 bp, Artificial Sequence
  Synthetic oligonucleotide
tgccctgatcccgtacgccccacgaggcgt

SEQ ID NO: 389951 - DNA, 30 bp, Artificial Sequence
  Synthetic oligonucleotide
aaacgcctcaaggtctctgacaataggcgt

SEQ ID NO: 389952 - DNA, 30 bp, Artificial Sequence
  Synthetic oligonucleotide
caaacgccatatgagagacttggtaggcgt

SEQ ID NO: 389953 - DNA, 30 bp, Artificial Sequence
  Synthetic oligonucleotide
gctagagagtgatatcactccgtacggcgt

SEQ ID NO: 389954 - DNA, 29 bp, Artificial Sequence
  Synthetic oligonucleotide
aaagtggggcctagggtcactaccggcgt

SEQ ID NO: 389955 - DNA, 30 bp, Artificial Sequence
  Synthetic oligonucleotide
cctgtacctgcatagacggggaagcggcgt

SEQ ID NO: 389956 - DNA, 30 bp, Artificial Sequence
  Synthetic oligonucleotide
atttcaggcctagacctgcagcagcggcgt

SEQ ID NO: 389957 - DNA, 30 bp, Artificial Sequence
  Synthetic oligonucleotide
gcatacaaatatttaggagagaggcggcgt

SEQ ID NO: 389958 - DNA, 30 bp, Artificial Sequence
  Synthetic oligonucleotide
gctcatggctgcggtaacctgcctcggcgt

SEQ ID NO: 389959 - DNA, 30 bp, Artificial Sequence
  Synthetic oligonucleotide
agaatacatggatatcgaatgcgggggcgt

SEQ ID NO: 389960 - DNA, 30 bp, Artificial Sequence
  Synthetic oligonucleotide
ggcagtcccagtgtctaatagcatgggcgt

SEQ ID NO: 389961 - DNA, 30 bp, Artificial Sequence
  Synthetic oligonucleotide
taggccctacagccggaaaacgatgggcgt

SEQ ID NO: 389962 - DNA, 30 bp, Artificial Sequence
  Synthetic oligonucleotide
gtctgcgggcgtttgctgggcattgggcgt

SEQ ID NO: 389963 - DNA, 30 bp, Artificial Sequence
  Synthetic oligonucleotide
tccgggtggcaggcctgtttgattgggcgt

SEQ ID NO: 389964 - DNA, 30 bp, Artificial Sequence
  Synthetic oligonucleotide
agtaatatatcaacggaatggttgtggcgt

SEQ ID NO: 389965 - DNA, 30 bp, Artificial Sequence
  Synthetic oligonucleotide
aaagcttcacggttcaaaggctgttggcgt

SEQ ID NO: 389966 - DNA, 30 bp, Artificial Sequence
  Synthetic oligonucleotide
gaaagtagggctgggtctagataaatgcgt

SEQ ID NO: 389967 - DNA, 30 bp, Artificial Sequence
  Synthetic oligonucleotide
gtcggttttcatccaacaagtgcaatgcgt

SEQ ID NO: 389968 - DNA, 30 bp, Artificial Sequence
  Synthetic oligonucleotide
ccggtagcaggctcgagggctagaatgcgt

SEQ ID NO: 389969 - DNA, 30 bp, Artificial Sequence
  Synthetic oligonucleotide
gataactgatcctggcagggaataatgcgt

SEQ ID NO: 389970 - DNA, 30 bp, Artificial Sequence
  Synthetic oligonucleotide
ggactcaagccggagtttatgtgcatgcgt

SEQ ID NO: 389971 - DNA, 30 bp, Artificial Sequence
  Synthetic oligonucleotide
gggaggacaccaagttcagctgggatgcgt

SEQ ID NO: 389972 - DNA, 30 bp, Artificial Sequence
  Synthetic oligonucleotide
gttgggtgttctcgccagcaatgtatgcgt

SEQ ID NO: 389973 - DNA, 30 bp, Artificial Sequence
  Synthetic oligonucleotide
agacttgtttaccgcttaactattatgcgt

SEQ ID NO: 389974 - DNA, 30 bp, Artificial Sequence
  Synthetic oligonucleotide
aagagctgataaggctccacgtcactgcgt

SEQ ID NO: 389975 - DNA, 30 bp, Artificial Sequence
  Synthetic oligonucleotide
ataccttgcaccctagggttaatcctgcgt

SEQ ID NO: 389976 - DNA, 30 bp, Artificial Sequence
  Synthetic oligonucleotide
taacctacgatgcgcaaatgattgctgcgt

SEQ ID NO: 389977 - DNA, 30 bp, Artificial Sequence
  Synthetic oligonucleotide
gcagttgttatgcggagatatgccgtgcgt

SEQ ID NO: 389978 - DNA, 30 bp, Artificial Sequence
  Synthetic oligonucleotide
ctgactccgtcttcagtttcaggcgtgcgt

SEQ ID NO: 389979 - DNA, 30 bp, Artificial Sequence
  Synthetic oligonucleotide
ggctcggcatcatattgagagggggtgcgt

SEQ ID NO: 389980 - DNA, 30 bp, Artificial Sequence
  Synthetic oligonucleotide
caatccttactgaccctcaacttggtgcgt

SEQ ID NO: 389981 - DNA, 30 bp, Artificial Sequence
  Synthetic oligonucleotide
tgtcaacaggaggagcgctaaattgtgcgt

SEQ ID NO: 389982 - DNA, 30 bp, Artificial Sequence
  Synthetic oligonucleotide
tagaaggagcgcctcagcatgaaattgcgt

SEQ ID NO: 389983 - DNA, 30 bp, Artificial Sequence
  Synthetic oligonucleotide
cagggtgtagcaagttgttgaaacttgcgt

SEQ ID NO: 389984 - DNA, 30 bp, Artificial Sequence
  Synthetic oligonucleotide
aaattctgaaaacgggtggcagtcttgcgt

SEQ ID NO: 389985 - DNA, 30 bp, Artificial Sequence
  Synthetic oligonucleotide
cgccactgctttaacctcttctcgttgcgt

SEQ ID NO: 389986 - DNA, 30 bp, Artificial Sequence
  Synthetic oligonucleotide
aataagagaccggtatgttcgattttgcgt

SEQ ID NO: 389987 - DNA, 30 bp, Artificial Sequence
  Synthetic oligonucleotide
agcgtaactacgatcgtattccaaaatcgt

SEQ ID NO: 389988 - DNA, 30 bp, Artificial Sequence
  Synthetic oligonucleotide
atcgtctcgccccaaacaacatgaaatcgt

SEQ ID NO: 389989 - DNA, 30 bp, Artificial Sequence
  Synthetic oligonucleotide
ggagtatgtcgggaggtcttctgaaatcgt

SEQ ID NO: 389990 - DNA, 30 bp, Artificial Sequence
  Synthetic oligonucleotide
aatcgtagcagggagtaactggccaatcgt

SEQ ID NO: 389991 - DNA, 30 bp, Artificial Sequence
  Synthetic oligonucleotide
gtaaagaggagacgcttaaagtcgaatcgt

SEQ ID NO: 389992 - DNA, 30 bp, Artificial Sequence
  Synthetic oligonucleotide
tcgccctccctgtcccccatttataatcgt

SEQ ID NO: 389993 - DNA, 30 bp, Artificial Sequence
  Synthetic oligonucleotide
ttaccggttatattaaatgtttctaatcgt

SEQ ID NO: 389994 - DNA, 30 bp, Artificial Sequence
  Synthetic oligonucleotide
aaagtatacccatagattctgtgtaatcgt

SEQ ID NO: 389995 - DNA, 30 bp, Artificial Sequence
  Synthetic oligonucleotide
gaacttaagaaagtcgatgtgtttaatcgt

SEQ ID NO: 389996 - DNA, 30 bp, Artificial Sequence
  Synthetic oligonucleotide
attctcagccgggttagagtagaacatcgt

SEQ ID NO: 389997 - DNA, 30 bp, Artificial Sequence
  Synthetic oligonucleotide
tggggactttgcgggtgattcttacatcgt

SEQ ID NO: 389998 - DNA, 30 bp, Artificial Sequence
  Synthetic oligonucleotide
cggcatccgaagtctcaaggtcctcatcgt

SEQ ID NO: 389999 - DNA, 30 bp, Artificial Sequence
  Synthetic oligonucleotide
atctaagcaacgtaatctacaaccgatcgt

SEQ ID NO: 390000 - DNA, 30 bp, Artificial Sequence
  Synthetic oligonucleotide
acggggcaaggatgctgtccaacggatcgt

SEQ ID NO: 390001 - DNA, 30 bp, Artificial Sequence
  Synthetic oligonucleotide
aatcctaaccattttttacaacgggatcgt

SEQ ID NO: 390002 - DNA, 30 bp, Artificial Sequence
  Synthetic oligonucleotide
caaattaagtgagttatacttgttgatcgt

SEQ ID NO: 390003 - DNA, 30 bp, Artificial Sequence
  Synthetic oligonucleotide
tcgaattttggtctttgacttaaatatcgt

SEQ ID NO: 390004 - DNA, 30 bp, Artificial Sequence
  Synthetic oligonucleotide
gactgggtgcagggcagcgtagaatatcgt

SEQ ID NO: 390005 - DNA, 30 bp, Artificial Sequence
  Synthetic oligonucleotide
ggaaaaagctgtttgtaactagtctatcgt

SEQ ID NO: 390006 - DNA, 30 bp, Artificial Sequence
  Synthetic oligonucleotide
ggggacggcgggccaccgctatggtatcgt

SEQ ID NO: 390007 - DNA, 30 bp, Artificial Sequence
  Synthetic oligonucleotide
ttcttgtgcaaaggtgcctggctgtatcgt

SEQ ID NO: 390008 - DNA, 30 bp, Artificial Sequence
  Synthetic oligonucleotide
tcctttcgacgtatacctttcgcttatcgt

SEQ ID NO: 390009 - DNA, 30 bp, Artificial Sequence
  Synthetic oligonucleotide
acaagttggggtaatcaaacgagttatcgt

SEQ ID NO: 390010 - DNA, 30 bp, Artificial Sequence
  Synthetic oligonucleotide
ataaagctcaaatgcccacgtcgttatcgt

SEQ ID NO: 390011 - DNA, 30 bp, Artificial Sequence
  Synthetic oligonucleotide
tattgaccacgaccaacagaatgttatcgt

SEQ ID NO: 390012 - DNA, 30 bp, Artificial Sequence
  Synthetic oligonucleotide
ttctcgcgcctggcacaaccttgaactcgt

SEQ ID NO: 390013 - DNA, 30 bp, Artificial Sequence
  Synthetic oligonucleotide
gaatgtgtatatttgcgtctgtacactcgt

SEQ ID NO: 390014 - DNA, 30 bp, Artificial Sequence
  Synthetic oligonucleotide
tacttttaacagatggacgacttcactcgt

SEQ ID NO: 390015 - DNA, 30 bp, Artificial Sequence
  Synthetic oligonucleotide
tctgtgcgtaccagattaatggcgactcgt

SEQ ID NO: 390016 - DNA, 30 bp, Artificial Sequence
  Synthetic oligonucleotide
gtaccaagctaggggggatacaggactcgt

SEQ ID NO: 390017 - DNA, 30 bp, Artificial Sequence
  Synthetic oligonucleotide
attagtgatcgccgaccacttcttactcgt

SEQ ID NO: 390018 - DNA, 30 bp, Artificial Sequence
  Synthetic oligonucleotide
cacaggaagatttcgttggattcccctcgt

SEQ ID NO: 390019 - DNA, 30 bp, Artificial Sequence
  Synthetic oligonucleotide
aaaacgcgtagatatccgatgctccctcgt

SEQ ID NO: 390020 - DNA, 30 bp, Artificial Sequence
  Synthetic oligonucleotide
gtccaaatcctacggagaaagacgcctcgt

SEQ ID NO: 390021 - DNA, 30 bp, Artificial Sequence
  Synthetic oligonucleotide
tgccccattttttctagggattttgctcgt

SEQ ID NO: 390022 - DNA, 30 bp, Artificial Sequence
  Synthetic oligonucleotide
cgagatctctcataacctaggaaatctcgt

SEQ ID NO: 390023 - DNA, 30 bp, Artificial Sequence
  Synthetic oligonucleotide
ctgcggcctcccggaataaagcaatctcgt

SEQ ID NO: 390024 - DNA, 30 bp, Artificial Sequence
  Synthetic oligonucleotide
cgaatccaagcgttccgctctgggtctcgt

SEQ ID NO: 390025 - DNA, 30 bp, Artificial Sequence
  Synthetic oligonucleotide
gatcttggtgtagcgagacccgattctcgt

SEQ ID NO: 390026 - DNA, 30 bp, Artificial Sequence
  Synthetic oligonucleotide
tgactcacggctgccatagacttttctcgt

SEQ ID NO: 390027 - DNA, 30 bp, Artificial Sequence
  Synthetic oligonucleotide
atcagtcgcggatataagaataacagtcgt

SEQ ID NO: 390028 - DNA, 30 bp, Artificial Sequence
  Synthetic oligonucleotide
gacattgataaaatcaccaacgtcagtcgt

SEQ ID NO: 390029 - DNA, 30 bp, Artificial Sequence
  Synthetic oligonucleotide
taaatgtgttggtctagctgggcacgtcgt

SEQ ID NO: 390030 - DNA, 30 bp, Artificial Sequence
  Synthetic oligonucleotide
atcagaaaggacttagaggcctcacgtcgt

SEQ ID NO: 390031 - DNA, 30 bp, Artificial Sequence
  Synthetic oligonucleotide
tatttcgaaattgcgggcctgagacgtcgt

SEQ ID NO: 390032 - DNA, 30 bp, Artificial Sequence
  Synthetic oligonucleotide
gtgttcaggcgggcgcacggagaccgtcgt

SEQ ID NO: 390033 - DNA, 30 bp, Artificial Sequence
  Synthetic oligonucleotide
aagtccatctcaggccttactggccgtcgt

SEQ ID NO: 390034 - DNA, 30 bp, Artificial Sequence
  Synthetic oligonucleotide
tattcggcagtggatgaaaggactcgtcgt

SEQ ID NO: 390035 - DNA, 30 bp, Artificial Sequence
  Synthetic oligonucleotide
agagtcattccttggggggaatgaggtcgt

SEQ ID NO: 390036 - DNA, 30 bp, Artificial Sequence
  Synthetic oligonucleotide
ttataaggatgctttcattggttgggtcgt

SEQ ID NO: 390037 - DNA, 30 bp, Artificial Sequence
  Synthetic oligonucleotide
ttgccgtcagccttttcaaggggtggtcgt

SEQ ID NO: 390038 - DNA, 30 bp, Artificial Sequence
  Synthetic oligonucleotide
atctttgacgcgtcatgcggaacatgtcgt

SEQ ID NO: 390039 - DNA, 30 bp, Artificial Sequence
  Synthetic oligonucleotide
cgttagaaccgttgttaggtttactgtcgt

SEQ ID NO: 390040 - DNA, 30 bp, Artificial Sequence
  Synthetic oligonucleotide
ctgacgtcgctgcttgatatgcggtgtcgt

SEQ ID NO: 390041 - DNA, 30 bp, Artificial Sequence
  Synthetic oligonucleotide
aagatacccggtgagtcgcctttgtgtcgt

SEQ ID NO: 390042 - DNA, 30 bp, Artificial Sequence
  Synthetic oligonucleotide
ttattatagcgaacacaagctgcttgtcgt

SEQ ID NO: 390043 - DNA, 30 bp, Artificial Sequence
  Synthetic oligonucleotide
ttacactggagtagcgtacatagttgtcgt

SEQ ID NO: 390044 - DNA, 30 bp, Artificial Sequence
  Synthetic oligonucleotide
gatgatatcacgtagcctaaaggaattcgt

SEQ ID NO: 390045 - DNA, 30 bp, Artificial Sequence
  Synthetic oligonucleotide
tcattatgacctaatgtaactgtaattcgt

SEQ ID NO: 390046 - DNA, 30 bp, Artificial Sequence
  Synthetic oligonucleotide
ggggaatcccggtcgtgctactccattcgt

SEQ ID NO: 390047 - DNA, 30 bp, Artificial Sequence
  Synthetic oligonucleotide
ctcgttatgctttgatattaggggattcgt

SEQ ID NO: 390048 - DNA, 30 bp, Artificial Sequence
  Synthetic oligonucleotide
gactctgtcgggcggcttgttctgattcgt

SEQ ID NO: 390049 - DNA, 30 bp, Artificial Sequence
  Synthetic oligonucleotide
gtgtagcgggaatctaacagttatattcgt

SEQ ID NO: 390050 - DNA, 30 bp, Artificial Sequence
  Synthetic oligonucleotide
aacgtagccagcactacccgagctattcgt

SEQ ID NO: 390051 - DNA, 30 bp, Artificial Sequence
  Synthetic oligonucleotide
agttgccatctataaagcgcaagtattcgt

SEQ ID NO: 390052 - DNA, 30 bp, Artificial Sequence
  Synthetic oligonucleotide
ttacaaaacagagtggttgagtttattcgt

SEQ ID NO: 390053 - DNA, 30 bp, Artificial Sequence
  Synthetic oligonucleotide
ataggtttgagccttaaggaataacttcgt

SEQ ID NO: 390054 - DNA, 30 bp, Artificial Sequence
  Synthetic oligonucleotide
taactatgacgctaggcacaagcacttcgt

SEQ ID NO: 390055 - DNA, 30 bp, Artificial Sequence
  Synthetic oligonucleotide
tcccatgttccctagtctagtgcacttcgt

SEQ ID NO: 390056 - DNA, 30 bp, Artificial Sequence
  Synthetic oligonucleotide
ctcgatcggcagggtatatattgccttcgt

SEQ ID NO: 390057 - DNA, 30 bp, Artificial Sequence
  Synthetic oligonucleotide
aaaaagatgtgcttactatcaatccttcgt

SEQ ID NO: 390058 - DNA, 30 bp, Artificial Sequence
  Synthetic oligonucleotide
taacgtggtattaataacgctctccttcgt

SEQ ID NO: 390059 - DNA, 29 bp, Artificial Sequence
  Synthetic oligonucleotide
agccgaggtaatcagtttcatggcttcgt

SEQ ID NO: 390060 - DNA, 30 bp, Artificial Sequence
  Synthetic oligonucleotide
caggaaatgggcccagcacagtgtcttcgt

SEQ ID NO: 390061 - DNA, 30 bp, Artificial Sequence
  Synthetic oligonucleotide
ttgttttagggcgaaataataggagttcgt

SEQ ID NO: 390062 - DNA, 30 bp, Artificial Sequence
  Synthetic oligonucleotide
acgtcgagggctttctagcacgacgttcgt

SEQ ID NO: 390063 - DNA, 30 bp, Artificial Sequence
  Synthetic oligonucleotide
agtagtattttttcggctccaaccgttcgt

SEQ ID NO: 390064 - DNA, 30 bp, Artificial Sequence
  Synthetic oligonucleotide
tctccgggtgctaaggaagagatcgttcgt

SEQ ID NO: 390065 - DNA, 30 bp, Artificial Sequence
  Synthetic oligonucleotide
cactggtataggtcttgttgcaaggttcgt

SEQ ID NO: 390066 - DNA, 30 bp, Artificial Sequence
  Synthetic oligonucleotide
cccccgcaatataggacctgcggggttcgt

SEQ ID NO: 390067 - DNA, 30 bp, Artificial Sequence
  Synthetic oligonucleotide
cctgtacaagcccacgagtaccatgttcgt

SEQ ID NO: 390068 - DNA, 30 bp, Artificial Sequence
  Synthetic oligonucleotide
taactgaccctaaagtgagaggttgttcgt

SEQ ID NO: 390069 - DNA, 30 bp, Artificial Sequence
  Synthetic oligonucleotide
caatcgtatacctccgtatttttatttcgt

SEQ ID NO: 390070 - DNA, 30 bp, Artificial Sequence
  Synthetic oligonucleotide
atacatgaactttgctttgtgtggtttcgt

SEQ ID NO: 390071 - DNA, 30 bp, Artificial Sequence
  Synthetic oligonucleotide
gcatattaagaccgttatatattgtttcgt

SEQ ID NO: 390072 - DNA, 30 bp, Artificial Sequence
  Synthetic oligonucleotide
gtgaatggacgcaagcgcggtggttttcgt

SEQ ID NO: 390073 - DNA, 30 bp, Artificial Sequence
  Synthetic oligonucleotide
tcgagttgtttataatcaatgctttttcgt

SEQ ID NO: 390074 - DNA, 30 bp, Artificial Sequence
  Synthetic oligonucleotide
aggtccttggatcagatgctcagaaaaggt

SEQ ID NO: 390075 - DNA, 30 bp, Artificial Sequence
  Synthetic oligonucleotide
caccgctctcgccgtctgaggtgaaaaggt

SEQ ID NO: 390076 - DNA, 30 bp, Artificial Sequence
  Synthetic oligonucleotide
gctagctagcaaccgctattgaataaaggt

SEQ ID NO: 390077 - DNA, 30 bp, Artificial Sequence
  Synthetic oligonucleotide
cagtagaagctgccaagttgtaataaaggt

SEQ ID NO: 390078 - DNA, 30 bp, Artificial Sequence
  Synthetic oligonucleotide
tatatcaagggacatattttcgataaaggt

SEQ ID NO: 390079 - DNA, 30 bp, Artificial Sequence
  Synthetic oligonucleotide
gctttaggaagtggtgttcgtggtaaaggt

SEQ ID NO: 390080 - DNA, 30 bp, Artificial Sequence
  Synthetic oligonucleotide
aggaataacaaatattgggtgtttaaaggt

SEQ ID NO: 390081 - DNA, 30 bp, Artificial Sequence
  Synthetic oligonucleotide
acgcagggatcaccgatgtttccgcaaggt

SEQ ID NO: 390082 - DNA, 30 bp, Artificial Sequence
  Synthetic oligonucleotide
tatcggtcaaatagtggcacatggcaaggt

SEQ ID NO: 390083 - DNA, 30 bp, Artificial Sequence
  Synthetic oligonucleotide
cgtatagtaggtgctgcgcctctgcaaggt

SEQ ID NO: 390084 - DNA, 30 bp, Artificial Sequence
  Synthetic oligonucleotide
gcacattgcagaggctctatattgcaaggt

SEQ ID NO: 390085 - DNA, 30 bp, Artificial Sequence
  Synthetic oligonucleotide
ctgcaccctgttacttgcaagccagaaggt

SEQ ID NO: 390086 - DNA, 30 bp, Artificial Sequence
  Synthetic oligonucleotide
gggaggagttaaaactggctcagagaaggt

SEQ ID NO: 390087 - DNA, 30 bp, Artificial Sequence
  Synthetic oligonucleotide
atgtcttgcgtgcagcttcccgaggaaggt

SEQ ID NO: 390088 - DNA, 30 bp, Artificial Sequence
  Synthetic oligonucleotide
ctatatctccggcagatacagtaggaaggt

SEQ ID NO: 390089 - DNA, 30 bp, Artificial Sequence
  Synthetic oligonucleotide
aacccgaagtaagatagtggttcggaaggt

SEQ ID NO: 390090 - DNA, 30 bp, Artificial Sequence
  Synthetic oligonucleotide
gataagcactcgggtctctaatgggaaggt

SEQ ID NO: 390091 - DNA, 30 bp, Artificial Sequence
  Synthetic oligonucleotide
gggaccttgaataggctccagtgggaaggt

SEQ ID NO: 390092 - DNA, 30 bp, Artificial Sequence
  Synthetic oligonucleotide
aatatcttaaggcgactaaggatggaaggt

SEQ ID NO: 390093 - DNA, 30 bp, Artificial Sequence
  Synthetic oligonucleotide
ctgaatggtgacgatgcacggcatgaaggt

SEQ ID NO: 390094 - DNA, 30 bp, Artificial Sequence
  Synthetic oligonucleotide
acaaggcttgagattaattgagtataaggt

SEQ ID NO: 390095 - DNA, 30 bp, Artificial Sequence
  Synthetic oligonucleotide
ggtgccagagttttacccctcaactaaggt

SEQ ID NO: 390096 - DNA, 31 bp, Artificial Sequence
  Synthetic oligonucleotide
attgataaaaccattccaagtggactaaggt

SEQ ID NO: 390097 - DNA, 30 bp, Artificial Sequence
  Synthetic oligonucleotide
gtccgcctgcgcggttatatccgctaaggt

SEQ ID NO: 390098 - DNA, 30 bp, Artificial Sequence
  Synthetic oligonucleotide
gtaccgtagcttttcgagttatgctaaggt

SEQ ID NO: 390099 - DNA, 30 bp, Artificial Sequence
  Synthetic oligonucleotide
tccttaaatatactattcaaattctaaggt

SEQ ID NO: 390100 - DNA, 30 bp, Artificial Sequence
  Synthetic oligonucleotide
tttgcgtctgcactttgagacaaaacaggt

SEQ ID NO: 390101 - DNA, 30 bp, Artificial Sequence
  Synthetic oligonucleotide
tagcttcaggaacaatcaatgcaaacaggt

SEQ ID NO: 390102 - DNA, 30 bp, Artificial Sequence
  Synthetic oligonucleotide
actcagtgcgacgctaatcagggaacaggt

SEQ ID NO: 390103 - DNA, 30 bp, Artificial Sequence
  Synthetic oligonucleotide
aaaatagagaagtcttgtatttccacaggt

SEQ ID NO: 390104 - DNA, 30 bp, Artificial Sequence
  Synthetic oligonucleotide
aggacctgccagcgtcaggttttgacaggt

SEQ ID NO: 390105 - DNA, 30 bp, Artificial Sequence
  Synthetic oligonucleotide
gttccggtaactgccactcggcggccaggt

SEQ ID NO: 390106 - DNA, 30 bp, Artificial Sequence
  Synthetic oligonucleotide
gtaacaggtggggtagcaactgtgccaggt

SEQ ID NO: 390107 - DNA, 30 bp, Artificial Sequence
  Synthetic oligonucleotide
gtttacaggtccatcgggaattatccaggt

SEQ ID NO: 390108 - DNA, 30 bp, Artificial Sequence
  Synthetic oligonucleotide
cttaatagctccttgacagtatgtccaggt

SEQ ID NO: 390109 - DNA, 30 bp, Artificial Sequence
  Synthetic oligonucleotide
tctaagtagcaggacgtgatatttccaggt

SEQ ID NO: 390110 - DNA, 30 bp, Artificial Sequence
  Synthetic oligonucleotide
ttgctgttatcacccatccggcaagcaggt

SEQ ID NO: 390111 - DNA, 30 bp, Artificial Sequence
  Synthetic oligonucleotide
gtttgagtagattagacaacttacgcaggt

SEQ ID NO: 390112 - DNA, 30 bp, Artificial Sequence
  Synthetic oligonucleotide
atacacaaaggtgttcctcgatgcgcaggt

SEQ ID NO: 390113 - DNA, 30 bp, Artificial Sequence
  Synthetic oligonucleotide
ctaagggtttggtagtagtgcgaggcaggt

SEQ ID NO: 390114 - DNA, 30 bp, Artificial Sequence
  Synthetic oligonucleotide
ctgtacgcttagttaagaattgatgcaggt

SEQ ID NO: 390115 - DNA, 30 bp, Artificial Sequence
  Synthetic oligonucleotide
cttaatgaccgcgaggtaacttctgcaggt

SEQ ID NO: 390116 - DNA, 30 bp, Artificial Sequence
  Synthetic oligonucleotide
caagctttcactttgcgttcgcgtgcaggt

SEQ ID NO: 390117 - DNA, 30 bp, Artificial Sequence
  Synthetic oligonucleotide
gtggcgtttcagcctcctgactgtgcaggt

SEQ ID NO: 390118 - DNA, 30 bp, Artificial Sequence
  Synthetic oligonucleotide
ctcaaggccataccagtaggcgttgcaggt

SEQ ID NO: 390119 - DNA, 30 bp, Artificial Sequence
  Synthetic oligonucleotide
ccgcgggtagccccttacaaccgctcaggt

SEQ ID NO: 390120 - DNA, 30 bp, Artificial Sequence
  Synthetic oligonucleotide
tttacaagcgagtctttccgactctcaggt

SEQ ID NO: 390121 - DNA, 30 bp, Artificial Sequence
  Synthetic oligonucleotide
atcctgacaagcatatctgacaagtcaggt

SEQ ID NO: 390122 - DNA, 30 bp, Artificial Sequence
  Synthetic oligonucleotide
tcgtaagcatgcggaaggacgtggtcaggt

SEQ ID NO: 390123 - DNA, 30 bp, Artificial Sequence
  Synthetic oligonucleotide
ggatccaaatgtttgcgcttattttcaggt

SEQ ID NO: 390124 - DNA, 30 bp, Artificial Sequence
  Synthetic oligonucleotide
cactcagcatttgataaatggcgaagaggt

SEQ ID NO: 390125 - DNA, 30 bp, Artificial Sequence
  Synthetic oligonucleotide
cgcatgggctgacgtggccagacgagaggt

SEQ ID NO: 390126 - DNA, 30 bp, Artificial Sequence
  Synthetic oligonucleotide
gtacgtaaaaaagtctgcgtggctagaggt

SEQ ID NO: 390127 - DNA, 30 bp, Artificial Sequence
  Synthetic oligonucleotide
ccaagcaagggataaaggcgcggtagaggt

SEQ ID NO: 390128 - DNA, 30 bp, Artificial Sequence
  Synthetic oligonucleotide
ctcaagtcacacatacggtcaattagaggt

SEQ ID NO: 390129 - DNA, 30 bp, Artificial Sequence
  Synthetic oligonucleotide
gcacacgggctggtacgtcccgaccgaggt

SEQ ID NO: 390130 - DNA, 30 bp, Artificial Sequence
  Synthetic oligonucleotide
tatggcgcccagcggtcctacccgcgaggt

SEQ ID NO: 390131 - DNA, 30 bp, Artificial Sequence
  Synthetic oligonucleotide
gcctagggggaccctggctgagtgcgaggt

SEQ ID NO: 390132 - DNA, 30 bp, Artificial Sequence
  Synthetic oligonucleotide
tattaacgtgttggcttgaacgttcgaggt

SEQ ID NO: 390133 - DNA, 30 bp, Artificial Sequence
  Synthetic oligonucleotide
cagaacctgggatgcgtggggtttcgaggt

SEQ ID NO: 390134 - DNA, 30 bp, Artificial Sequence
  Synthetic oligonucleotide
ttgtcgatgagatggctttttgtaggaggt

SEQ ID NO: 390135 - DNA, 30 bp, Artificial Sequence
  Synthetic oligonucleotide
ttttaaatcagtatgattggaaccggaggt

SEQ ID NO: 390136 - DNA, 30 bp, Artificial Sequence
  Synthetic oligonucleotide
tatgttcgggaagactagtctaccggaggt

SEQ ID NO: 390137 - DNA, 30 bp, Artificial Sequence
  Synthetic oligonucleotide
gagggcaaatccgggcggtgtggcggaggt

SEQ ID NO: 390138 - DNA, 30 bp, Artificial Sequence
  Synthetic oligonucleotide
tgcttgacgctaatttggggattcggaggt

SEQ ID NO: 390139 - DNA, 30 bp, Artificial Sequence
  Synthetic oligonucleotide
ctacaccttgtttgttgacatttcggaggt

SEQ ID NO: 390140 - DNA, 30 bp, Artificial Sequence
  Synthetic oligonucleotide
tgggcaattaagtcgacgctcccgggaggt

SEQ ID NO: 390141 - DNA, 30 bp, Artificial Sequence
  Synthetic oligonucleotide
taagtatatcatgccaggcgcttgggaggt

SEQ ID NO: 390142 - DNA, 30 bp, Artificial Sequence
  Synthetic oligonucleotide
agtccatgaggtgctaattccactggaggt

SEQ ID NO: 390143 - DNA, 30 bp, Artificial Sequence
  Synthetic oligonucleotide
aaggttctgtatccgaaagtagctggaggt

SEQ ID NO: 390144 - DNA, 30 bp, Artificial Sequence
  Synthetic oligonucleotide
gtgatcacgctgaatagttacggtggaggt

SEQ ID NO: 390145 - DNA, 30 bp, Artificial Sequence
  Synthetic oligonucleotide
tgcccgccgagcatgcttgtatttggaggt

SEQ ID NO: 390146 - DNA, 30 bp, Artificial Sequence
  Synthetic oligonucleotide
gtcagttttactcaccggttaatatgaggt

SEQ ID NO: 390147 - DNA, 30 bp, Artificial Sequence
  Synthetic oligonucleotide
ggattagtgagtacgctcaccgtatgaggt

SEQ ID NO: 390148 - DNA, 30 bp, Artificial Sequence
  Synthetic oligonucleotide
gatcaggtcgctcactaccgagagtgaggt

SEQ ID NO: 390149 - DNA, 30 bp, Artificial Sequence
  Synthetic oligonucleotide
gtgagccatccagatacctatcgaataggt

SEQ ID NO: 390150 - DNA, 30 bp, Artificial Sequence
  Synthetic oligonucleotide
tcttcgcgtttgaaagctgagggaataggt

SEQ ID NO: 390151 - DNA, 30 bp, Artificial Sequence
  Synthetic oligonucleotide
agatccgacatccttgaaagtaacataggt

SEQ ID NO: 390152 - DNA, 30 bp, Artificial Sequence
  Synthetic oligonucleotide
gtgcgttcgcgccctgatcaaatcataggt

SEQ ID NO: 390153 - DNA, 30 bp, Artificial Sequence
  Synthetic oligonucleotide
gattctctaaggagagttgggtcgataggt

SEQ ID NO: 390154 - DNA, 30 bp, Artificial Sequence
  Synthetic oligonucleotide
aactacaattagatagtaccacggataggt

SEQ ID NO: 390155 - DNA, 30 bp, Artificial Sequence
  Synthetic oligonucleotide
ctccagacgattaacagcacaaatataggt

SEQ ID NO: 390156 - DNA, 30 bp, Artificial Sequence
  Synthetic oligonucleotide
caacagaattttggtatcattatactaggt

SEQ ID NO: 390157 - DNA, 30 bp, Artificial Sequence
  Synthetic oligonucleotide
aaattgtgaaactccgaggagacgctaggt

SEQ ID NO: 390158 - DNA, 30 bp, Artificial Sequence
  Synthetic oligonucleotide
tcaaggtggggtgataattatctgctaggt

SEQ ID NO: 390159 - DNA, 30 bp, Artificial Sequence
  Synthetic oligonucleotide
gtgatgatttctgtagcactgaatctaggt

SEQ ID NO: 390160 - DNA, 30 bp, Artificial Sequence
  Synthetic oligonucleotide
agaaatgcttgcaattcgaactctctaggt

SEQ ID NO: 390161 - DNA, 30 bp, Artificial Sequence
  Synthetic oligonucleotide
ggggttcgcttccggtattgaggtctaggt

SEQ ID NO: 390162 - DNA, 30 bp, Artificial Sequence
  Synthetic oligonucleotide
tgtgcctagagattacatgtgtttctaggt

SEQ ID NO: 390163 - DNA, 30 bp, Artificial Sequence
  Synthetic oligonucleotide
atgagtaaagagtctgtcacgcacgtaggt

SEQ ID NO: 390164 - DNA, 30 bp, Artificial Sequence
  Synthetic oligonucleotide
gcccaagcgagttattgtcaacgcgtaggt

SEQ ID NO: 390165 - DNA, 30 bp, Artificial Sequence
  Synthetic oligonucleotide
gcgagttctagggggctcttatgcgtaggt

SEQ ID NO: 390166 - DNA, 30 bp, Artificial Sequence
  Synthetic oligonucleotide
taaaggataaaggcagttacattcgtaggt

SEQ ID NO: 390167 - DNA, 30 bp, Artificial Sequence
  Synthetic oligonucleotide
attattaccatatactacgaccgggtaggt

SEQ ID NO: 390168 - DNA, 30 bp, Artificial Sequence
  Synthetic oligonucleotide
ggcaacacggtgtgaacctattctgtaggt

SEQ ID NO: 390169 - DNA, 30 bp, Artificial Sequence
  Synthetic oligonucleotide
ggcactcacacaatatctactggtgtaggt

SEQ ID NO: 390170 - DNA, 30 bp, Artificial Sequence
  Synthetic oligonucleotide
ttcgaaagctacctcgttacctaattaggt

SEQ ID NO: 390171 - DNA, 30 bp, Artificial Sequence
  Synthetic oligonucleotide
tctgtacggtatgtcctagccatattaggt

SEQ ID NO: 390172 - DNA, 30 bp, Artificial Sequence
  Synthetic oligonucleotide
tcgaacagagagtgttcgagtatattaggt

SEQ ID NO: 390173 - DNA, 30 bp, Artificial Sequence
  Synthetic oligonucleotide
tgcagatacaggagcggtacgctattaggt

SEQ ID NO: 390174 - DNA, 30 bp, Artificial Sequence
  Synthetic oligonucleotide
cgtggtctaaaactgtcgagaagcttaggt

SEQ ID NO: 390175 - DNA, 30 bp, Artificial Sequence
  Synthetic oligonucleotide
tccacggatcgggtatattcgagcttaggt

SEQ ID NO: 390176 - DNA, 30 bp, Artificial Sequence
  Synthetic oligonucleotide
gaagctaccgttgcgcctgtcaagttaggt

SEQ ID NO: 390177 - DNA, 30 bp, Artificial Sequence
  Synthetic oligonucleotide
gctgctcatgccgttcgtttattgttaggt

SEQ ID NO: 390178 - DNA, 30 bp, Artificial Sequence
  Synthetic oligonucleotide
ttaaaccacggtatataccgggcaaacggt

SEQ ID NO: 390179 - DNA, 30 bp, Artificial Sequence
  Synthetic oligonucleotide
aggattttcaatggcattggcctaaacggt

SEQ ID NO: 390180 - DNA, 30 bp, Artificial Sequence
  Synthetic oligonucleotide
aagaccgcgggtttgttggtcgacaacggt

SEQ ID NO: 390181 - DNA, 31 bp, Artificial Sequence
  Synthetic oligonucleotide
caacgtagcgttgggcattgtatacaacggt

SEQ ID NO: 390182 - DNA, 30 bp, Artificial Sequence
  Synthetic oligonucleotide
gtagagcatggcttaaagcagtgcaacggt

SEQ ID NO: 390183 - DNA, 30 bp, Artificial Sequence
  Synthetic oligonucleotide
cgggactatcaagtagcggtttgcaacggt

SEQ ID NO: 390184 - DNA, 30 bp, Artificial Sequence
  Synthetic oligonucleotide
gaaacagcacgaggggactatctcaacggt

SEQ ID NO: 390185 - DNA, 30 bp, Artificial Sequence
  Synthetic oligonucleotide
ggatgacctttaaatgttctattcaacggt

SEQ ID NO: 390186 - DNA, 30 bp, Artificial Sequence
  Synthetic oligonucleotide
ggcatacatacagtaagtaacacgaacggt

SEQ ID NO: 390187 - DNA, 30 bp, Artificial Sequence
  Synthetic oligonucleotide
atgatggctatatatcaagccgctaacggt

SEQ ID NO: 390188 - DNA, 30 bp, Artificial Sequence
  Synthetic oligonucleotide
cggagcgttgttcaaactgtcccacacggt

SEQ ID NO: 390189 - DNA, 30 bp, Artificial Sequence
  Synthetic oligonucleotide
tgatgaccgaattgtatatagccacacggt

SEQ ID NO: 390190 - DNA, 30 bp, Artificial Sequence
  Synthetic oligonucleotide
atatcagacgttatggctacctcacacggt

SEQ ID NO: 390191 - DNA, 30 bp, Artificial Sequence
  Synthetic oligonucleotide
gggtttgtccgggcttgtccttgccacggt

SEQ ID NO: 390192 - DNA, 30 bp, Artificial Sequence
  Synthetic oligonucleotide
gtgctcctcaatggacttaggatgcacggt

SEQ ID NO: 390193 - DNA, 30 bp, Artificial Sequence
  Synthetic oligonucleotide
attactgatcaggtcagtggagcagacggt

SEQ ID NO: 390194 - DNA, 30 bp, Artificial Sequence
  Synthetic oligonucleotide
tactctccaacaccgtacgttcgagacggt

SEQ ID NO: 390195 - DNA, 30 bp, Artificial Sequence
  Synthetic oligonucleotide
atctcgaggacgcactcttcccgcgacggt

SEQ ID NO: 390196 - DNA, 30 bp, Artificial Sequence
  Synthetic oligonucleotide
caaaagtattataaggagattgtggacggt

SEQ ID NO: 390197 - DNA, 30 bp, Artificial Sequence
  Synthetic oligonucleotide
gcattaatgcgtacattataaattgacggt

SEQ ID NO: 390198 - DNA, 30 bp, Artificial Sequence
  Synthetic oligonucleotide
tgagctggaggagaagtagtttttgacggt

SEQ ID NO: 390199 - DNA, 30 bp, Artificial Sequence
  Synthetic oligonucleotide
tgatctgatagaagtttcggcaattacggt

SEQ ID NO: 390200 - DNA, 30 bp, Artificial Sequence
  Synthetic oligonucleotide
accacccattagggtgggaaaagaaccggt

SEQ ID NO: 390201 - DNA, 30 bp, Artificial Sequence
  Synthetic oligonucleotide
gttccggaagttgaagagagtataaccggt

SEQ ID NO: 390202 - DNA, 30 bp, Artificial Sequence
  Synthetic oligonucleotide
ctcgtatatagaaacgacaagttaaccggt

SEQ ID NO: 390203 - DNA, 30 bp, Artificial Sequence
  Synthetic oligonucleotide
cgtagccgacacagcattataaacaccggt

SEQ ID NO: 390204 - DNA, 30 bp, Artificial Sequence
  Synthetic oligonucleotide
agaagccaacggtgggccgtacggaccggt

SEQ ID NO: 390205 - DNA, 30 bp, Artificial Sequence
  Synthetic oligonucleotide
gattcacgagtaaatcttaaattgaccggt

SEQ ID NO: 390206 - DNA, 30 bp, Artificial Sequence
  Synthetic oligonucleotide
tggagtctctttctatgggggattaccggt

SEQ ID NO: 390207 - DNA, 30 bp, Artificial Sequence
  Synthetic oligonucleotide
aggcttcgcataatgcgatcccttaccggt

SEQ ID NO: 390208 - DNA, 30 bp, Artificial Sequence
  Synthetic oligonucleotide
ttgttagtcagttatatccggcagcccggt

SEQ ID NO: 390209 - DNA, 30 bp, Artificial Sequence
  Synthetic oligonucleotide
atcaaaagattaattaattgctgggccggt

SEQ ID NO: 390210 - DNA, 30 bp, Artificial Sequence
  Synthetic oligonucleotide
tatagctgactttcacggtccttggccggt

SEQ ID NO: 390211 - DNA, 30 bp, Artificial Sequence
  Synthetic oligonucleotide
aaaatcacgggggcatcgatacttgccggt

SEQ ID NO: 390212 - DNA, 30 bp, Artificial Sequence
  Synthetic oligonucleotide
cagagacatcacatgtttactctatccggt

SEQ ID NO: 390213 - DNA, 30 bp, Artificial Sequence
  Synthetic oligonucleotide
gctcggtccgatatctttccattatccggt

SEQ ID NO: 390214 - DNA, 30 bp, Artificial Sequence
  Synthetic oligonucleotide
taagtagacgtgcatatattctagtccggt

SEQ ID NO: 390215 - DNA, 30 bp, Artificial Sequence
  Synthetic oligonucleotide
caccgggtcatagtagggctttaaagcggt

SEQ ID NO: 390216 - DNA, 30 bp, Artificial Sequence
  Synthetic oligonucleotide
tttaggagacgtgggtatcccggaagcggt

SEQ ID NO: 390217 - DNA, 30 bp, Artificial Sequence
  Synthetic oligonucleotide
ctgaatcataaaaaagtgattgtcagcggt

SEQ ID NO: 390218 - DNA, 30 bp, Artificial Sequence
  Synthetic oligonucleotide
aggtaacggtgccggtcccccgtgagcggt

SEQ ID NO: 390219 - DNA, 30 bp, Artificial Sequence
  Synthetic oligonucleotide
tctaccacgacctgggctacgcgtagcggt

SEQ ID NO: 390220 - DNA, 30 bp, Artificial Sequence
  Synthetic oligonucleotide
cgccataggggcttatttcctgttagcggt

SEQ ID NO: 390221 - DNA, 30 bp, Artificial Sequence
  Synthetic oligonucleotide
tcctccggttcaccggatgttaaacgcggt

SEQ ID NO: 390222 - DNA, 30 bp, Artificial Sequence
  Synthetic oligonucleotide
ggaaaaacttttacatccgtccaacgcggt

SEQ ID NO: 390223 - DNA, 30 bp, Artificial Sequence
  Synthetic oligonucleotide
ggggtaagggagagatatccgccacgcggt

SEQ ID NO: 390224 - DNA, 30 bp, Artificial Sequence
  Synthetic oligonucleotide
attattgacggattacggttagcacgcggt

SEQ ID NO: 390225 - DNA, 30 bp, Artificial Sequence
  Synthetic oligonucleotide
cgcggggccgcatccgcacttcaccgcggt

SEQ ID NO: 390226 - DNA, 30 bp, Artificial Sequence
  Synthetic oligonucleotide
tgtatctattgtgataaaaaacgccgcggt

SEQ ID NO: 390227 - DNA, 30 bp, Artificial Sequence
  Synthetic oligonucleotide
agtggtaagtgttcaagagtaacgcgcggt

SEQ ID NO: 390228 - DNA, 30 bp, Artificial Sequence
  Synthetic oligonucleotide
tggatacaaccggtggtacatggtcgcggt

SEQ ID NO: 390229 - DNA, 30 bp, Artificial Sequence
  Synthetic oligonucleotide
ctctagcccatcaggacaaatattcgcggt

SEQ ID NO: 390230 - DNA, 29 bp, Artificial Sequence
  Synthetic oligonucleotide
ggaatacggctattctactgaaaggcggt

SEQ ID NO: 390231 - DNA, 30 bp, Artificial Sequence
  Synthetic oligonucleotide
aggcctattgatcttccttcgacaggcggt

SEQ ID NO: 390232 - DNA, 30 bp, Artificial Sequence
  Synthetic oligonucleotide
cgtgttgagatacctcgcaaccacggcggt

SEQ ID NO: 390233 - DNA, 30 bp, Artificial Sequence
  Synthetic oligonucleotide
tatatagcttgaacacacaagcacggcggt

SEQ ID NO: 390234 - DNA, 30 bp, Artificial Sequence
  Synthetic oligonucleotide
aaagggctatatttcagtgccgccggcggt

SEQ ID NO: 390235 - DNA, 30 bp, Artificial Sequence
  Synthetic oligonucleotide
ggttttcagttacgggttcacgagggcggt

SEQ ID NO: 390236 - DNA, 30 bp, Artificial Sequence
  Synthetic oligonucleotide
atcatatagctctatcgaattgagggcggt

SEQ ID NO: 390237 - DNA, 30 bp, Artificial Sequence
  Synthetic oligonucleotide
agtggagtgtagccttcaatatagggcggt

SEQ ID NO: 390238 - DNA, 30 bp, Artificial Sequence
  Synthetic oligonucleotide
agaagtccacgaagaggtcgacggggcggt

SEQ ID NO: 390239 - DNA, 30 bp, Artificial Sequence
  Synthetic oligonucleotide
tcgaaatcaatatcattgacaacatgcggt

SEQ ID NO: 390240 - DNA, 30 bp, Artificial Sequence
  Synthetic oligonucleotide
agccagttttttattccgaagagatgcggt

SEQ ID NO: 390241 - DNA, 30 bp, Artificial Sequence
  Synthetic oligonucleotide
agacgaacccgcccattcgactcctgcggt

SEQ ID NO: 390242 - DNA, 30 bp, Artificial Sequence
  Synthetic oligonucleotide
agtacagaaattttgaatgggaattgcggt

SEQ ID NO: 390243 - DNA, 30 bp, Artificial Sequence
  Synthetic oligonucleotide
agtgtcacctagaaaagttcaggttgcggt

SEQ ID NO: 390244 - DNA, 30 bp, Artificial Sequence
  Synthetic oligonucleotide
acgatctatcgagaatggattttttgcggt

SEQ ID NO: 390245 - DNA, 30 bp, Artificial Sequence
  Synthetic oligonucleotide
gcgtctgatggggctcacggaacaatcggt

SEQ ID NO: 390246 - DNA, 30 bp, Artificial Sequence
  Synthetic oligonucleotide
accacagagcgttggattgtaacaatcggt

SEQ ID NO: 390247 - DNA, 30 bp, Artificial Sequence
  Synthetic oligonucleotide
cgcgtcccaaagcctaaagcgctaatcggt

SEQ ID NO: 390248 - DNA, 30 bp, Artificial Sequence
  Synthetic oligonucleotide
ttaggaaccggttaggttaggaatatcggt

SEQ ID NO: 390249 - DNA, 30 bp, Artificial Sequence
  Synthetic oligonucleotide
aaagtgccgggcaggagtgaaactatcggt

SEQ ID NO: 390250 - DNA, 30 bp, Artificial Sequence
  Synthetic oligonucleotide
agcgcagggcccccgtgcacatgtatcggt

SEQ ID NO: 390251 - DNA, 30 bp, Artificial Sequence
  Synthetic oligonucleotide
acgttatttatcgattgggcggtcctcggt

SEQ ID NO: 390252 - DNA, 30 bp, Artificial Sequence
  Synthetic oligonucleotide
atggcacataaaaagctccacgtgctcggt

SEQ ID NO: 390253 - DNA, 30 bp, Artificial Sequence
  Synthetic oligonucleotide
gtaatgaggttagctagtcgagctctcggt

SEQ ID NO: 390254 - DNA, 30 bp, Artificial Sequence
  Synthetic oligonucleotide
tagaaaatagctttcgtcttcattctcggt

SEQ ID NO: 390255 - DNA, 30 bp, Artificial Sequence
  Synthetic oligonucleotide
attaggggctgttgtgaattttcagtcggt

SEQ ID NO: 390256 - DNA, 30 bp, Artificial Sequence
  Synthetic oligonucleotide
gaattcgtgagacatatcgcgcacgtcggt

SEQ ID NO: 390257 - DNA, 30 bp, Artificial Sequence
  Synthetic oligonucleotide
gagtcgcccaccaggctgccaacggtcggt

SEQ ID NO: 390258 - DNA, 30 bp, Artificial Sequence
  Synthetic oligonucleotide
agcttataaaacagcaatcgaccggtcggt

SEQ ID NO: 390259 - DNA, 30 bp, Artificial Sequence
  Synthetic oligonucleotide
acatacccacgcatccgtgtaccggtcggt

SEQ ID NO: 390260 - DNA, 30 bp, Artificial Sequence
  Synthetic oligonucleotide
ctaataagcgatacatgactttgggtcggt

SEQ ID NO: 390261 - DNA, 30 bp, Artificial Sequence
  Synthetic oligonucleotide
cttatataattacccggtcaagaattcggt

SEQ ID NO: 390262 - DNA, 30 bp, Artificial Sequence
  Synthetic oligonucleotide
gcaatcatctcgtccgtcttcagattcggt

SEQ ID NO: 390263 - DNA, 30 bp, Artificial Sequence
  Synthetic oligonucleotide
ctcttgcaggaggccctaacaatattcggt

SEQ ID NO: 390264 - DNA, 30 bp, Artificial Sequence
  Synthetic oligonucleotide
tacgcaaggtcacacagttgctccttcggt

SEQ ID NO: 390265 - DNA, 30 bp, Artificial Sequence
  Synthetic oligonucleotide
tgcgtgtactttatttcttgctgcttcggt

SEQ ID NO: 390266 - DNA, 30 bp, Artificial Sequence
  Synthetic oligonucleotide
aattaaaaacgagtttggttctgcttcggt

SEQ ID NO: 390267 - DNA, 30 bp, Artificial Sequence
  Synthetic oligonucleotide
ttaaactgtcaaagggctctatcgttcggt

SEQ ID NO: 390268 - DNA, 30 bp, Artificial Sequence
  Synthetic oligonucleotide
ttctcctgcagagatccgtaatggttcggt

SEQ ID NO: 390269 - DNA, 30 bp, Artificial Sequence
  Synthetic oligonucleotide
ctagcttccactgtcgtgtggctgttcggt

SEQ ID NO: 390270 - DNA, 30 bp, Artificial Sequence
  Synthetic oligonucleotide
gtcagatacaggccgctttacttgttcggt

SEQ ID NO: 390271 - DNA, 30 bp, Artificial Sequence
  Synthetic oligonucleotide
cacagttggacaatgggaagatctttcggt

SEQ ID NO: 390272 - DNA, 30 bp, Artificial Sequence
  Synthetic oligonucleotide
tagggtttaagaccatttgcataaaagggt

SEQ ID NO: 390273 - DNA, 30 bp, Artificial Sequence
  Synthetic oligonucleotide
ctaagtgttggcctgataatgttaaagggt

SEQ ID NO: 390274 - DNA, 30 bp, Artificial Sequence
  Synthetic oligonucleotide
actgctctactcggaaggatgcgcaagggt

SEQ ID NO: 390275 - DNA, 30 bp, Artificial Sequence
  Synthetic oligonucleotide
tattaattgcaatgggccgcaatcaagggt

SEQ ID NO: 390276 - DNA, 30 bp, Artificial Sequence
  Synthetic oligonucleotide
aggaattagtggattgttttatctaagggt

SEQ ID NO: 390277 - DNA, 30 bp, Artificial Sequence
  Synthetic oligonucleotide
gtccttaatgcggctccgggaagtaagggt

SEQ ID NO: 390278 - DNA, 30 bp, Artificial Sequence
  Synthetic oligonucleotide
gtccctcataatgcctgtgttagtaagggt

SEQ ID NO: 390279 - DNA, 30 bp, Artificial Sequence
  Synthetic oligonucleotide
gagttgtttggtagtctgtcgggacagggt

SEQ ID NO: 390280 - DNA, 30 bp, Artificial Sequence
  Synthetic oligonucleotide
gcaggggggattgaagaggcgttacagggt

SEQ ID NO: 390281 - DNA, 30 bp, Artificial Sequence
  Synthetic oligonucleotide
gttatatagttcaacgcgctcaaccagggt

SEQ ID NO: 390282 - DNA, 30 bp, Artificial Sequence
  Synthetic oligonucleotide
ggagcgcacgcgggctggggctcccagggt

SEQ ID NO: 390283 - DNA, 31 bp, Artificial Sequence
  Synthetic oligonucleotide
accctccacgagctaatatgaaatccagggt

SEQ ID NO: 390284 - DNA, 30 bp, Artificial Sequence
  Synthetic oligonucleotide
gaatatgtgacaccaagtaaagagcagggt

SEQ ID NO: 390285 - DNA, 30 bp, Artificial Sequence
  Synthetic oligonucleotide
cggggcaggggcgacgcttcgccgcagggt

SEQ ID NO: 390286 - DNA, 30 bp, Artificial Sequence
  Synthetic oligonucleotide
ttatgaagatatcgggtttgttatcagggt

SEQ ID NO: 390287 - DNA, 30 bp, Artificial Sequence
  Synthetic oligonucleotide
ttttagacacccgggattcgtcttcagggt

SEQ ID NO: 390288 - DNA, 30 bp, Artificial Sequence
  Synthetic oligonucleotide
atgaactgtgaaatcgaggcggtagagggt

SEQ ID NO: 390289 - DNA, 30 bp, Artificial Sequence
  Synthetic oligonucleotide
agttcgccctgcgaagctggattagagggt

SEQ ID NO: 390290 - DNA, 30 bp, Artificial Sequence
  Synthetic oligonucleotide
actcttcacttgggcactattaccgagggt

SEQ ID NO: 390291 - DNA, 30 bp, Artificial Sequence
  Synthetic oligonucleotide
tgttggtttcctacagcatcaagcgagggt

SEQ ID NO: 390292 - DNA, 30 bp, Artificial Sequence
  Synthetic oligonucleotide
ttagaccttgcttgacatttgttggagggt

SEQ ID NO: 390293 - DNA, 30 bp, Artificial Sequence
  Synthetic oligonucleotide
gcataccgggcgttacctgatattgagggt

SEQ ID NO: 390294 - DNA, 30 bp, Artificial Sequence
  Synthetic oligonucleotide
tctgagagactcgtcggtacccaatagggt

SEQ ID NO: 390295 - DNA, 30 bp, Artificial Sequence
  Synthetic oligonucleotide
ctatatgggtgcgcgagttgagcatagggt

SEQ ID NO: 390296 - DNA, 30 bp, Artificial Sequence
  Synthetic oligonucleotide
ctgacatcctcgcgacaaggtacctagggt

SEQ ID NO: 390297 - DNA, 30 bp, Artificial Sequence
  Synthetic oligonucleotide
gtggctattcgcagagccacaggctagggt

SEQ ID NO: 390298 - DNA, 30 bp, Artificial Sequence
  Synthetic oligonucleotide
attaatgacaataaaaaattaacttagggt

SEQ ID NO: 390299 - DNA, 30 bp, Artificial Sequence
  Synthetic oligonucleotide
aaaagcttgccacttgggaacacttagggt

SEQ ID NO: 390300 - DNA, 30 bp, Artificial Sequence
  Synthetic oligonucleotide
aaggtatcggaccagggattcttttagggt

SEQ ID NO: 390301 - DNA, 30 bp, Artificial Sequence
  Synthetic oligonucleotide
cgcacccactggacactaaattaaacgggt

SEQ ID NO: 390302 - DNA, 30 bp, Artificial Sequence
  Synthetic oligonucleotide
tgttcttatctcctcgtgggagcaacgggt

SEQ ID NO: 390303 - DNA, 30 bp, Artificial Sequence
  Synthetic oligonucleotide
ctatcatgggtcggagactcaggaacgggt

SEQ ID NO: 390304 - DNA, 30 bp, Artificial Sequence
  Synthetic oligonucleotide
ctctttggtaaggcgtcgaagaacacgggt

SEQ ID NO: 390305 - DNA, 30 bp, Artificial Sequence
  Synthetic oligonucleotide
tatacaagattggaccagcggaccacgggt

SEQ ID NO: 390306 - DNA, 30 bp, Artificial Sequence
  Synthetic oligonucleotide
atacgactctgttatactgcgttcacgggt

SEQ ID NO: 390307 - DNA, 30 bp, Artificial Sequence
  Synthetic oligonucleotide
tatttagatcaccaaaaccagtagacgggt

SEQ ID NO: 390308 - DNA, 30 bp, Artificial Sequence
  Synthetic oligonucleotide
cgtagagtttgaacgagcatggcgacgggt

SEQ ID NO: 390309 - DNA, 30 bp, Artificial Sequence
  Synthetic oligonucleotide
gttcgaatactattagattctttgacgggt

SEQ ID NO: 390310 - DNA, 30 bp, Artificial Sequence
  Synthetic oligonucleotide
aagcattgaacaggcgactgtcatacgggt

SEQ ID NO: 390311 - DNA, 30 bp, Artificial Sequence
  Synthetic oligonucleotide
tgagaactgtctcgattagcgcgtacgggt

SEQ ID NO: 390312 - DNA, 30 bp, Artificial Sequence
  Synthetic oligonucleotide
gtcggttcgggcacgagcgctattacgggt

SEQ ID NO: 390313 - DNA, 30 bp, Artificial Sequence
  Synthetic oligonucleotide
gaacaagctccgttggtacgtcaaccgggt

SEQ ID NO: 390314 - DNA, 30 bp, Artificial Sequence
  Synthetic oligonucleotide
gtgtctgctcggcgtacgcaataaccgggt

SEQ ID NO: 390315 - DNA, 30 bp, Artificial Sequence
  Synthetic oligonucleotide
taagttcacggaccacaccgcgcaccgggt

SEQ ID NO: 390316 - DNA, 30 bp, Artificial Sequence
  Synthetic oligonucleotide
gtgacgacataataaccatgctcaccgggt

SEQ ID NO: 390317 - DNA, 30 bp, Artificial Sequence
  Synthetic oligonucleotide
gggagatgtcgggtttagggcagcccgggt

SEQ ID NO: 390318 - DNA, 30 bp, Artificial Sequence
  Synthetic oligonucleotide
aaaagcagtacatattccagggagccgggt

SEQ ID NO: 390319 - DNA, 30 bp, Artificial Sequence
  Synthetic oligonucleotide
gaacattgcccgggaagcacttagccgggt

SEQ ID NO: 390320 - DNA, 30 bp, Artificial Sequence
  Synthetic oligonucleotide
gtgttttacttatcaaatcggacgccgggt

SEQ ID NO: 390321 - DNA, 30 bp, Artificial Sequence
  Synthetic oligonucleotide
ataacgacctaccccgcagtcgggccgggt

SEQ ID NO: 390322 - DNA, 30 bp, Artificial Sequence
  Synthetic oligonucleotide
attccgtgcgcttatggccgctgtccgggt

SEQ ID NO: 390323 - DNA, 30 bp, Artificial Sequence
  Synthetic oligonucleotide
ccagcaactcaggtggaggtccttccgggt

SEQ ID NO: 390324 - DNA, 30 bp, Artificial Sequence
  Synthetic oligonucleotide
tctgaagacctattatgtctagcagcgggt

SEQ ID NO: 390325 - DNA, 30 bp, Artificial Sequence
  Synthetic oligonucleotide
caaatggtgcgtagttaacagggagcgggt

SEQ ID NO: 390326 - DNA, 30 bp, Artificial Sequence
  Synthetic oligonucleotide
ggtaagagtatttatagtcactgcgcgggt

SEQ ID NO: 390327 - DNA, 30 bp, Artificial Sequence
  Synthetic oligonucleotide
atacatatgtcatttgaccggctggcgggt

SEQ ID NO: 390328 - DNA, 30 bp, Artificial Sequence
  Synthetic oligonucleotide
aagaaatggccatatcgccggtatgcgggt

SEQ ID NO: 390329 - DNA, 30 bp, Artificial Sequence
  Synthetic oligonucleotide
gatagagaggccgaacgcgcaggtgcgggt

SEQ ID NO: 390330 - DNA, 30 bp, Artificial Sequence
  Synthetic oligonucleotide
atcatactttttatatgtggctttgcgggt

SEQ ID NO: 390331 - DNA, 30 bp, Artificial Sequence
  Synthetic oligonucleotide
acatagcgatggagctgatcataatcgggt

SEQ ID NO: 390332 - DNA, 30 bp, Artificial Sequence
  Synthetic oligonucleotide
agggcgacccgtacctattctggctcgggt

SEQ ID NO: 390333 - DNA, 30 bp, Artificial Sequence
  Synthetic oligonucleotide
gacagtggaaactgtcgacaattctcgggt

SEQ ID NO: 390334 - DNA, 30 bp, Artificial Sequence
  Synthetic oligonucleotide
ggaacacacgtatttacagcacgttcgggt

SEQ ID NO: 390335 - DNA, 30 bp, Artificial Sequence
  Synthetic oligonucleotide
gtatggacgattcgctcgcgtggaaggggt

SEQ ID NO: 390336 - DNA, 32 bp, Artificial Sequence
  Synthetic oligonucleotide
tgctccggtagggcacaccgggattaaggggt

SEQ ID NO: 390337 - DNA, 30 bp, Artificial Sequence
  Synthetic oligonucleotide
cgagcatgcacaaacccatccgacaggggt

SEQ ID NO: 390338 - DNA, 30 bp, Artificial Sequence
  Synthetic oligonucleotide
cacgtggaagctcgtcgtcccgccaggggt

SEQ ID NO: 390339 - DNA, 28 bp, Artificial Sequence
  Synthetic oligonucleotide
gagacctcgggggctaaacagcaggggt

SEQ ID NO: 390340 - DNA, 30 bp, Artificial Sequence
  Synthetic oligonucleotide
ctcgttgggtacatatcttctggcaggggt

SEQ ID NO: 390341 - DNA, 30 bp, Artificial Sequence
  Synthetic oligonucleotide
ttcgaggcaatgatgggtgggtgcaggggt

SEQ ID NO: 390342 - DNA, 30 bp, Artificial Sequence
  Synthetic oligonucleotide
ttgaggtgtaaacgtcaacagatcaggggt

SEQ ID NO: 390343 - DNA, 30 bp, Artificial Sequence
  Synthetic oligonucleotide
ggcttaccttatccaataggtgggaggggt

SEQ ID NO: 390344 - DNA, 30 bp, Artificial Sequence
  Synthetic oligonucleotide
cagatacataccccggataattataggggt

SEQ ID NO: 390345 - DNA, 30 bp, Artificial Sequence
  Synthetic oligonucleotide
gatcatactgacctagtcatttctaggggt

SEQ ID NO: 390346 - DNA, 30 bp, Artificial Sequence
  Synthetic oligonucleotide
ttgaggttgtaagcggggatcggtaggggt

SEQ ID NO: 390347 - DNA, 30 bp, Artificial Sequence
  Synthetic oligonucleotide
taggtaaaagttgcggcccgtattaggggt

SEQ ID NO: 390348 - DNA, 30 bp, Artificial Sequence
  Synthetic oligonucleotide
gttcatagaagcgattacaactcacggggt

SEQ ID NO: 390349 - DNA, 30 bp, Artificial Sequence
  Synthetic oligonucleotide
tctggtactgatcaaagatcaggacggggt

SEQ ID NO: 390350 - DNA, 30 bp, Artificial Sequence
  Synthetic oligonucleotide
aacaacggacgcgggagggacaaccggggt

SEQ ID NO: 390351 - DNA, 30 bp, Artificial Sequence
  Synthetic oligonucleotide
ccgagggcttacacgacgaccgcccggggt

SEQ ID NO: 390352 - DNA, 30 bp, Artificial Sequence
  Synthetic oligonucleotide
gcttttgcttaagggtattaaggccggggt

SEQ ID NO: 390353 - DNA, 30 bp, Artificial Sequence
  Synthetic oligonucleotide
aagggggctgacgtgggagggctccggggt

SEQ ID NO: 390354 - DNA, 30 bp, Artificial Sequence
  Synthetic oligonucleotide
ccccaagaacttaggtgaccatagcggggt

SEQ ID NO: 390355 - DNA, 30 bp, Artificial Sequence
  Synthetic oligonucleotide
acttaaagcaacgccgttaaggggcggggt

SEQ ID NO: 390356 - DNA, 30 bp, Artificial Sequence
  Synthetic oligonucleotide
atgtatcgaagcgcatacccctctcggggt

SEQ ID NO: 390357 - DNA, 30 bp, Artificial Sequence
  Synthetic oligonucleotide
tggtggggttgccctttaccggtagggggt

SEQ ID NO: 390358 - DNA, 30 bp, Artificial Sequence
  Synthetic oligonucleotide
tttgagacgtacagcacaagtgccgggggt

SEQ ID NO: 390359 - DNA, 30 bp, Artificial Sequence
  Synthetic oligonucleotide
gttgatcgacaaacgtaaagagtcgggggt

SEQ ID NO: 390360 - DNA, 40 bp, Artificial Sequence
  Synthetic oligonucleotide
aagataatacattcatggtatggtcggggatcgggggggt

SEQ ID NO: 390361 - DNA, 30 bp, Artificial Sequence
  Synthetic oligonucleotide
atacttgtacatttaaattaaatggggggt

SEQ ID NO: 390362 - DNA, 30 bp, Artificial Sequence
  Synthetic oligonucleotide
gccctgtaatcagataacgtcttggggggt

SEQ ID NO: 390363 - DNA, 30 bp, Artificial Sequence
  Synthetic oligonucleotide
tgcggtattagccgccgctcatgtgggggt

SEQ ID NO: 390364 - DNA, 30 bp, Artificial Sequence
  Synthetic oligonucleotide
tctgatcatggtaacagctatattgggggt

SEQ ID NO: 390365 - DNA, 30 bp, Artificial Sequence
  Synthetic oligonucleotide
gcagcgcgggcctgggtgttggaatggggt

SEQ ID NO: 390366 - DNA, 30 bp, Artificial Sequence
  Synthetic oligonucleotide
gagccaaggctgtagggggcatgatggggt

SEQ ID NO: 390367 - DNA, 30 bp, Artificial Sequence
  Synthetic oligonucleotide
gcttaactgataaggtgaggttcctggggt

SEQ ID NO: 390368 - DNA, 30 bp, Artificial Sequence
  Synthetic oligonucleotide
ctacggctgtagttcttgatatattggggt

SEQ ID NO: 390369 - DNA, 30 bp, Artificial Sequence
  Synthetic oligonucleotide
agttccgctgaatagaagtacccttggggt

SEQ ID NO: 390370 - DNA, 30 bp, Artificial Sequence
  Synthetic oligonucleotide
caggaaagacctaaattgaagtcttggggt

SEQ ID NO: 390371 - DNA, 30 bp, Artificial Sequence
  Synthetic oligonucleotide
tctcaccacgccggtctttcgaaaatgggt

SEQ ID NO: 390372 - DNA, 30 bp, Artificial Sequence
  Synthetic oligonucleotide
gctgggcagcccgattgtcaacaaatgggt

SEQ ID NO: 390373 - DNA, 30 bp, Artificial Sequence
  Synthetic oligonucleotide
acgccctgggatttaactgggcaaatgggt

SEQ ID NO: 390374 - DNA, 30 bp, Artificial Sequence
  Synthetic oligonucleotide
acccggatgagactcaaacttgacatgggt

SEQ ID NO: 390375 - DNA, 30 bp, Artificial Sequence
  Synthetic oligonucleotide
aacgcgtgtctatatacaactaggatgggt

SEQ ID NO: 390376 - DNA, 30 bp, Artificial Sequence
  Synthetic oligonucleotide
tccgggtatcgggctgtgtcgcatatgggt

SEQ ID NO: 390377 - DNA, 30 bp, Artificial Sequence
  Synthetic oligonucleotide
ggtctgaaatgggcggtacctgttatgggt

SEQ ID NO: 390378 - DNA, 28 bp, Artificial Sequence
  Synthetic oligonucleotide
atgcatctagccagccgggaaactgggt

SEQ ID NO: 390379 - DNA, 30 bp, Artificial Sequence
  Synthetic oligonucleotide
ctcattatgcgcgccgaatgcgcactgggt

SEQ ID NO: 390380 - DNA, 30 bp, Artificial Sequence
  Synthetic oligonucleotide
cgtcctcaatccaggggatgacgactgggt

SEQ ID NO: 390381 - DNA, 30 bp, Artificial Sequence
  Synthetic oligonucleotide
gattttgaccaactaatattattactgggt

SEQ ID NO: 390382 - DNA, 30 bp, Artificial Sequence
  Synthetic oligonucleotide
tgtggcacggtccgatactatccgctgggt

SEQ ID NO: 390383 - DNA, 30 bp, Artificial Sequence
  Synthetic oligonucleotide
tataggccgttccgttgtggtaggctgggt

SEQ ID NO: 390384 - DNA, 30 bp, Artificial Sequence
  Synthetic oligonucleotide
tccccgtaaaagttcaagggccggctgggt

SEQ ID NO: 390385 - DNA, 30 bp, Artificial Sequence
  Synthetic oligonucleotide
gatctaggactggcgagcggtgctctgggt

SEQ ID NO: 390386 - DNA, 30 bp, Artificial Sequence
  Synthetic oligonucleotide
attattatggcgattcgtacaggtctgggt

SEQ ID NO: 390387 - DNA, 30 bp, Artificial Sequence
  Synthetic oligonucleotide
ggaacgctcttgtccgttatgcaagtgggt

SEQ ID NO: 390388 - DNA, 30 bp, Artificial Sequence
  Synthetic oligonucleotide
agaagccccggacggggaaaatgcgtgggt

SEQ ID NO: 390389 - DNA, 30 bp, Artificial Sequence
  Synthetic oligonucleotide
ttgaaatatctggcttatggtatcgtgggt

SEQ ID NO: 390390 - DNA, 30 bp, Artificial Sequence
  Synthetic oligonucleotide
acagagacgttaaacagtatgactgtgggt

SEQ ID NO: 390391 - DNA, 30 bp, Artificial Sequence
  Synthetic oligonucleotide
tacagggaccgctacgtaagtcgcttgggt

SEQ ID NO: 390392 - DNA, 30 bp, Artificial Sequence
  Synthetic oligonucleotide
gccacagtttacgtcaagcgaggcttgggt

SEQ ID NO: 390393 - DNA, 30 bp, Artificial Sequence
  Synthetic oligonucleotide
acatgggaaacgtgaagggtttgcttgggt

SEQ ID NO: 390394 - DNA, 30 bp, Artificial Sequence
  Synthetic oligonucleotide
gctagtttttcatcttttcatctcttgggt

SEQ ID NO: 390395 - DNA, 31 bp, Artificial Sequence
  Synthetic oligonucleotide
tttcccatagaacttagtgggttagttgggt

SEQ ID NO: 390396 - DNA, 30 bp, Artificial Sequence
  Synthetic oligonucleotide
acccgacagtattgaggggtacggttgggt

SEQ ID NO: 390397 - DNA, 30 bp, Artificial Sequence
  Synthetic oligonucleotide
gtcacattcgtcccaaccgtgtcaaatggt

SEQ ID NO: 390398 - DNA, 30 bp, Artificial Sequence
  Synthetic oligonucleotide
gagcttaacgcaaactcacgtaggaatggt

SEQ ID NO: 390399 - DNA, 30 bp, Artificial Sequence
  Synthetic oligonucleotide
tcggacctggtttttcagtaagataatggt

SEQ ID NO: 390400 - DNA, 30 bp, Artificial Sequence
  Synthetic oligonucleotide
tgtacccgggcctcctaaatgggtaatggt

SEQ ID NO: 390401 - DNA, 30 bp, Artificial Sequence
  Synthetic oligonucleotide
atgcgaaaagttctgagagctcttaatggt

SEQ ID NO: 390402 - DNA, 30 bp, Artificial Sequence
  Synthetic oligonucleotide
tgcatagtatgttacagttttgttaatggt

SEQ ID NO: 390403 - DNA, 30 bp, Artificial Sequence
  Synthetic oligonucleotide
actgtggaccgcctgttaaagttacatggt

SEQ ID NO: 390404 - DNA, 30 bp, Artificial Sequence
  Synthetic oligonucleotide
cggtttaacgaaactggagggttccatggt

SEQ ID NO: 390405 - DNA, 30 bp, Artificial Sequence
  Synthetic oligonucleotide
ggactcgattatgcttactagacgcatggt

SEQ ID NO: 390406 - DNA, 30 bp, Artificial Sequence
  Synthetic oligonucleotide
ttatagaggaacttgttgtgtgcgcatggt

SEQ ID NO: 390407 - DNA, 30 bp, Artificial Sequence
  Synthetic oligonucleotide
gcaactcggcgtgtaagtcgatatcatggt

SEQ ID NO: 390408 - DNA, 30 bp, Artificial Sequence
  Synthetic oligonucleotide
gctgtgcctaataaacatcacagtcatggt

SEQ ID NO: 390409 - DNA, 30 bp, Artificial Sequence
  Synthetic oligonucleotide
ctgcatactgggggggccctgtccgatggt

SEQ ID NO: 390410 - DNA, 30 bp, Artificial Sequence
  Synthetic oligonucleotide
tataggtggcgcatggtgtccaatgatggt

SEQ ID NO: 390411 - DNA, 30 bp, Artificial Sequence
  Synthetic oligonucleotide
tcgaagaaggctttatggtagtctgatggt

SEQ ID NO: 390412 - DNA, 30 bp, Artificial Sequence
  Synthetic oligonucleotide
taattttgtaaagtagcgtgtggtgatggt

SEQ ID NO: 390413 - DNA, 31 bp, Artificial Sequence
  Synthetic oligonucleotide
acttctgggagatcttgtgttctgtgatggt

SEQ ID NO: 390414 - DNA, 30 bp, Artificial Sequence
  Synthetic oligonucleotide
gtcggacgctaacctagggtaaaatatggt

SEQ ID NO: 390415 - DNA, 30 bp, Artificial Sequence
  Synthetic oligonucleotide
attcaaatgtgaacctgaccaacatatggt

SEQ ID NO: 390416 - DNA, 30 bp, Artificial Sequence
  Synthetic oligonucleotide
gtgcctagtactcccagctaaagatatggt

SEQ ID NO: 390417 - DNA, 30 bp, Artificial Sequence
  Synthetic oligonucleotide
gaagattcgccaccttagatccgctatggt

SEQ ID NO: 390418 - DNA, 30 bp, Artificial Sequence
  Synthetic oligonucleotide
caacttggtatttatattataggctatggt

SEQ ID NO: 390419 - DNA, 30 bp, Artificial Sequence
  Synthetic oligonucleotide
gtatcggcgaacctttacttgggctatggt

SEQ ID NO: 390420 - DNA, 30 bp, Artificial Sequence
  Synthetic oligonucleotide
cctcgggactctcagcaatgcgtctatggt

SEQ ID NO: 390421 - DNA, 30 bp, Artificial Sequence
  Synthetic oligonucleotide
ccttgcgctgttctccttcaaaagtatggt

SEQ ID NO: 390422 - DNA, 30 bp, Artificial Sequence
  Synthetic oligonucleotide
gggcacgaaaagggcccatctaagtatggt

SEQ ID NO: 390423 - DNA, 30 bp, Artificial Sequence
  Synthetic oligonucleotide
ataaaaagttcaaagccaccattgtatggt

SEQ ID NO: 390424 - DNA, 30 bp, Artificial Sequence
  Synthetic oligonucleotide
gtagctagctcaccgactccgttgtatggt

SEQ ID NO: 390425 - DNA, 30 bp, Artificial Sequence
  Synthetic oligonucleotide
cccgagctaatcgcgtccttgacttatggt

SEQ ID NO: 390426 - DNA, 30 bp, Artificial Sequence
  Synthetic oligonucleotide
gaggaggaatgggtttgtcaaagttatggt

SEQ ID NO: 390427 - DNA, 30 bp, Artificial Sequence
  Synthetic oligonucleotide
ccacacattaatgtggcggcacaaactggt

SEQ ID NO: 390428 - DNA, 30 bp, Artificial Sequence
  Synthetic oligonucleotide
atatattgttataagaactgcttaactggt

SEQ ID NO: 390429 - DNA, 30 bp, Artificial Sequence
  Synthetic oligonucleotide
atgggtcattgtacggtgctgcgcactggt

SEQ ID NO: 390430 - DNA, 30 bp, Artificial Sequence
  Synthetic oligonucleotide
gttttaagtggggattccagtcgcactggt

SEQ ID NO: 390431 - DNA, 30 bp, Artificial Sequence
  Synthetic oligonucleotide
ttatgagtattcaaacaattggagactggt

SEQ ID NO: 390432 - DNA, 30 bp, Artificial Sequence
  Synthetic oligonucleotide
aatggggcttacatctagatttagactggt

SEQ ID NO: 390433 - DNA, 30 bp, Artificial Sequence
  Synthetic oligonucleotide
aacgtccgttacatattcctccggactggt

SEQ ID NO: 390434 - DNA, 29 bp, Artificial Sequence
  Synthetic oligonucleotide
gataaaggcgtggaacccctatgactggt

SEQ ID NO: 390435 - DNA, 30 bp, Artificial Sequence
  Synthetic oligonucleotide
cgtcagcaaaattttacgttcctgactggt

SEQ ID NO: 390436 - DNA, 30 bp, Artificial Sequence
  Synthetic oligonucleotide
cgcttatagggtccggcgatcgtgactggt

SEQ ID NO: 390437 - DNA, 30 bp, Artificial Sequence
  Synthetic oligonucleotide
ttaccaatcctcctacgcaaacctactggt

SEQ ID NO: 390438 - DNA, 30 bp, Artificial Sequence
  Synthetic oligonucleotide
atagcctaagtccattggacctttactggt

SEQ ID NO: 390439 - DNA, 30 bp, Artificial Sequence
  Synthetic oligonucleotide
gttgtcaccgagacaacgacgttacctggt

SEQ ID NO: 390440 - DNA, 30 bp, Artificial Sequence
  Synthetic oligonucleotide
atcggtgttgtatatgcattgcaccctggt

SEQ ID NO: 390441 - DNA, 30 bp, Artificial Sequence
  Synthetic oligonucleotide
cacgatgtgcaattctaataacgccctggt

SEQ ID NO: 390442 - DNA, 30 bp, Artificial Sequence
  Synthetic oligonucleotide
tattccctcaacctgtagtgatagcctggt

SEQ ID NO: 390443 - DNA, 30 bp, Artificial Sequence
  Synthetic oligonucleotide
tttaaggcgggaaaggcggtaaggcctggt

SEQ ID NO: 390444 - DNA, 30 bp, Artificial Sequence
  Synthetic oligonucleotide
cacacagccaaggatacaatgtctcctggt

SEQ ID NO: 390445 - DNA, 30 bp, Artificial Sequence
  Synthetic oligonucleotide
tcaagtccttacggtgccgaacgtcctggt

SEQ ID NO: 390446 - DNA, 30 bp, Artificial Sequence
  Synthetic oligonucleotide
cacaggggggacctttcctgcaaagctggt

SEQ ID NO: 390447 - DNA, 30 bp, Artificial Sequence
  Synthetic oligonucleotide
taccaatctggccctagtaacctagctggt

SEQ ID NO: 390448 - DNA, 30 bp, Artificial Sequence
  Synthetic oligonucleotide
agttctcttaaatgactctacccggctggt

SEQ ID NO: 390449 - DNA, 30 bp, Artificial Sequence
  Synthetic oligonucleotide
ccaccgttagtattcccgccccgggctggt

SEQ ID NO: 390450 - DNA, 30 bp, Artificial Sequence
  Synthetic oligonucleotide
gcataggggccccgtgagtgggtggctggt

SEQ ID NO: 390451 - DNA, 30 bp, Artificial Sequence
  Synthetic oligonucleotide
gggtgctttattttgcataagcttgctggt

SEQ ID NO: 390452 - DNA, 30 bp, Artificial Sequence
  Synthetic oligonucleotide
aatacaaattgattaggatcgttatctggt

SEQ ID NO: 390453 - DNA, 30 bp, Artificial Sequence
  Synthetic oligonucleotide
gtgacgcgacgtttaaagcccgggtctggt

SEQ ID NO: 390454 - DNA, 30 bp, Artificial Sequence
  Synthetic oligonucleotide
gtgcacaagaatgtggcaagagattctggt

SEQ ID NO: 390455 - DNA, 30 bp, Artificial Sequence
  Synthetic oligonucleotide
acaaccccgtgcaatgtttacatttctggt

SEQ ID NO: 390456 - DNA, 30 bp, Artificial Sequence
  Synthetic oligonucleotide
taatgtggttgaagaacggagtaaagtggt

SEQ ID NO: 390457 - DNA, 30 bp, Artificial Sequence
  Synthetic oligonucleotide
aggtctctaaaatgttgggctccaagtggt

SEQ ID NO: 390458 - DNA, 30 bp, Artificial Sequence
  Synthetic oligonucleotide
tccacaaagaaagccgtatggtgaagtggt

SEQ ID NO: 390459 - DNA, 30 bp, Artificial Sequence
  Synthetic oligonucleotide
tgagcggagatcgccgggcatccgagtggt

SEQ ID NO: 390460 - DNA, 30 bp, Artificial Sequence
  Synthetic oligonucleotide
tcgaccggatggacgcggcagatgagtggt

SEQ ID NO: 390461 - DNA, 30 bp, Artificial Sequence
  Synthetic oligonucleotide
tgtaaaagaattcgtccagatgtgagtggt

SEQ ID NO: 390462 - DNA, 30 bp, Artificial Sequence
  Synthetic oligonucleotide
cctagatctaccccccggttctatagtggt

SEQ ID NO: 390463 - DNA, 30 bp, Artificial Sequence
  Synthetic oligonucleotide
tgatcgtaaaatcgatctatcactagtggt

SEQ ID NO: 390464 - DNA, 30 bp, Artificial Sequence
  Synthetic oligonucleotide
gctctatcataggaaaatctgagtagtggt

SEQ ID NO: 390465 - DNA, 30 bp, Artificial Sequence
  Synthetic oligonucleotide
ggccgtacgatactccggtagcttagtggt

SEQ ID NO: 390466 - DNA, 30 bp, Artificial Sequence
  Synthetic oligonucleotide
cgagttctgattgtcttttgttcacgtggt

SEQ ID NO: 390467 - DNA, 30 bp, Artificial Sequence
  Synthetic oligonucleotide
gcgggaacacgcgagtcctgtggtcgtggt

SEQ ID NO: 390468 - DNA, 30 bp, Artificial Sequence
  Synthetic oligonucleotide
tgtttaacaagccttacaattttaggtggt

SEQ ID NO: 390469 - DNA, 30 bp, Artificial Sequence
  Synthetic oligonucleotide
ccgggggtagcttgaggtcaggacggtggt

SEQ ID NO: 390470 - DNA, 30 bp, Artificial Sequence
  Synthetic oligonucleotide
ttacgatcggacacaatcgttagcggtggt

SEQ ID NO: 390471 - DNA, 30 bp, Artificial Sequence
  Synthetic oligonucleotide
agatggtctttagatcggaggaagggtggt

SEQ ID NO: 390472 - DNA, 30 bp, Artificial Sequence
  Synthetic oligonucleotide
gtttgagtagagggccgcgccattggtggt

SEQ ID NO: 390473 - DNA, 30 bp, Artificial Sequence
  Synthetic oligonucleotide
taaatatgagtattggactgatgatgtggt

SEQ ID NO: 390474 - DNA, 30 bp, Artificial Sequence
  Synthetic oligonucleotide
aggtgtagaatgtagtcggactcctgtggt

SEQ ID NO: 390475 - DNA, 30 bp, Artificial Sequence
  Synthetic oligonucleotide
ttcgtactgtgctatatggtcgggtgtggt

SEQ ID NO: 390476 - DNA, 30 bp, Artificial Sequence
  Synthetic oligonucleotide
tttactagggatgggagtcgtgattgtggt

SEQ ID NO: 390477 - DNA, 30 bp, Artificial Sequence
  Synthetic oligonucleotide
aggcgtgccactcaattcgcagcttgtggt

SEQ ID NO: 390478 - DNA, 30 bp, Artificial Sequence
  Synthetic oligonucleotide
gttagttggctcatcttacggacaattggt

SEQ ID NO: 390479 - DNA, 30 bp, Artificial Sequence
  Synthetic oligonucleotide
agtagatcctcaatctttggcggaattggt

SEQ ID NO: 390480 - DNA, 30 bp, Artificial Sequence
  Synthetic oligonucleotide
gacgtgcatccaataataatcggaattggt

SEQ ID NO: 390481 - DNA, 30 bp, Artificial Sequence
  Synthetic oligonucleotide
tgggttaagcgtggcatacaacacattggt

SEQ ID NO: 390482 - DNA, 30 bp, Artificial Sequence
  Synthetic oligonucleotide
cagactgcgggacactcgtacaccattggt

SEQ ID NO: 390483 - DNA, 30 bp, Artificial Sequence
  Synthetic oligonucleotide
ggtagggaagggcgcttatcctagattggt

SEQ ID NO: 390484 - DNA, 30 bp, Artificial Sequence
  Synthetic oligonucleotide
tcgtcagtgctgataaggataacgattggt

SEQ ID NO: 390485 - DNA, 30 bp, Artificial Sequence
  Synthetic oligonucleotide
gggggtaagcggtacaggcctaggattggt

SEQ ID NO: 390486 - DNA, 30 bp, Artificial Sequence
  Synthetic oligonucleotide
tcatggcccattagagctggtaggattggt

SEQ ID NO: 390487 - DNA, 30 bp, Artificial Sequence
  Synthetic oligonucleotide
tagtcatacttcaccgttgaagatattggt

SEQ ID NO: 390488 - DNA, 30 bp, Artificial Sequence
  Synthetic oligonucleotide
gctgtaagaacacggaacagcactattggt

SEQ ID NO: 390489 - DNA, 30 bp, Artificial Sequence
  Synthetic oligonucleotide
gattagcattgggttagtgcgcgtattggt

SEQ ID NO: 390490 - DNA, 30 bp, Artificial Sequence
  Synthetic oligonucleotide
gatcatacacgtcacaaccatgcacttggt

SEQ ID NO: 390491 - DNA, 30 bp, Artificial Sequence
  Synthetic oligonucleotide
aattgtgtcgcgacccattcagggcttggt

SEQ ID NO: 390492 - DNA, 30 bp, Artificial Sequence
  Synthetic oligonucleotide
ggccctacgcaagcgacgccttggcttggt

SEQ ID NO: 390493 - DNA, 30 bp, Artificial Sequence
  Synthetic oligonucleotide
atcactgaatggatccatacgtatcttggt

SEQ ID NO: 390494 - DNA, 30 bp, Artificial Sequence
  Synthetic oligonucleotide
cgcctggtagttgaaattaattgcgttggt

SEQ ID NO: 390495 - DNA, 31 bp, Artificial Sequence
  Synthetic oligonucleotide
aatcgttttatcggactggcttcaggttggt

SEQ ID NO: 390496 - DNA, 30 bp, Artificial Sequence
  Synthetic oligonucleotide
taccaataagaccgacgcatgtgggttggt

SEQ ID NO: 390497 - DNA, 30 bp, Artificial Sequence
  Synthetic oligonucleotide
ttatgagtcttagcggtttatgctgttggt

SEQ ID NO: 390498 - DNA, 30 bp, Artificial Sequence
  Synthetic oligonucleotide
cagcaatcagaatggttagatcgatttggt

SEQ ID NO: 390499 - DNA, 30 bp, Artificial Sequence
  Synthetic oligonucleotide
attttggtattagcgagaatgggatttggt

SEQ ID NO: 390500 - DNA, 30 bp, Artificial Sequence
  Synthetic oligonucleotide
gatagcaggcgatgacgaaagggctttggt

SEQ ID NO: 390501 - DNA, 30 bp, Artificial Sequence
  Synthetic oligonucleotide
acacatagtaggatacttctttgctttggt

SEQ ID NO: 390502 - DNA, 30 bp, Artificial Sequence
  Synthetic oligonucleotide
caggcggcagtaacaagtatcctctttggt

SEQ ID NO: 390503 - DNA, 30 bp, Artificial Sequence
  Synthetic oligonucleotide
atgacatcacgcggtgactgattctttggt

SEQ ID NO: 390504 - DNA, 30 bp, Artificial Sequence
  Synthetic oligonucleotide
gtgcgacgcttgttggagttacattttggt

SEQ ID NO: 390505 - DNA, 30 bp, Artificial Sequence
  Synthetic oligonucleotide
tagtggctacacatggcggtttattttggt

SEQ ID NO: 390506 - DNA, 31 bp, Artificial Sequence
  Synthetic oligonucleotide
gtaactctgccccgtggaccaaagttttggt

SEQ ID NO: 390507 - DNA, 30 bp, Artificial Sequence
  Synthetic oligonucleotide
actgtttagcatgtaggaataaaaaaatgt

SEQ ID NO: 390508 - DNA, 30 bp, Artificial Sequence
  Synthetic oligonucleotide
ccaggttaagtttttagagagaaaaaatgt

SEQ ID NO: 390509 - DNA, 30 bp, Artificial Sequence
  Synthetic oligonucleotide
agcattttgtgcttagtgcatcacaaatgt

SEQ ID NO: 390510 - DNA, 30 bp, Artificial Sequence
  Synthetic oligonucleotide
aaataaagcaaggtaggggtcaccaaatgt

SEQ ID NO: 390511 - DNA, 30 bp, Artificial Sequence
  Synthetic oligonucleotide
ctactcaagcactgggcagcgtccaaatgt

SEQ ID NO: 390512 - DNA, 30 bp, Artificial Sequence
  Synthetic oligonucleotide
agcctttggcgatcactacagtctaaatgt

SEQ ID NO: 390513 - DNA, 30 bp, Artificial Sequence
  Synthetic oligonucleotide
tctttacggagagcgtaagatagtaaatgt

SEQ ID NO: 390514 - DNA, 30 bp, Artificial Sequence
  Synthetic oligonucleotide
ttatcctgcgcttcaagagttggacaatgt

SEQ ID NO: 390515 - DNA, 30 bp, Artificial Sequence
  Synthetic oligonucleotide
ttgaaatgcatgacagtagctgtccaatgt

SEQ ID NO: 390516 - DNA, 30 bp, Artificial Sequence
  Synthetic oligonucleotide
aagtgcgccatacatatctgtgggcaatgt

SEQ ID NO: 390517 - DNA, 30 bp, Artificial Sequence
  Synthetic oligonucleotide
agcagcgggttgttcaataactttcaatgt

SEQ ID NO: 390518 - DNA, 30 bp, Artificial Sequence
  Synthetic oligonucleotide
ttcggcgcattagtactcacgtttcaatgt

SEQ ID NO: 390519 - DNA, 30 bp, Artificial Sequence
  Synthetic oligonucleotide
atctacgttccacatctaactggagaatgt

SEQ ID NO: 390520 - DNA, 30 bp, Artificial Sequence
  Synthetic oligonucleotide
acctgtatccataaaggtcgcttagaatgt

SEQ ID NO: 390521 - DNA, 30 bp, Artificial Sequence
  Synthetic oligonucleotide
aacgtgttaagagcctcagctcaggaatgt

SEQ ID NO: 390522 - DNA, 30 bp, Artificial Sequence
  Synthetic oligonucleotide
tcttgtctggcattaatcgttccggaatgt

SEQ ID NO: 390523 - DNA, 30 bp, Artificial Sequence
  Synthetic oligonucleotide
atttgcgacggacaatcatactcggaatgt

SEQ ID NO: 390524 - DNA, 30 bp, Artificial Sequence
  Synthetic oligonucleotide
aggccttatcaaacctgggatagggaatgt

SEQ ID NO: 390525 - DNA, 30 bp, Artificial Sequence
  Synthetic oligonucleotide
gagtgcgattccgtctccagcggggaatgt

SEQ ID NO: 390526 - DNA, 30 bp, Artificial Sequence
  Synthetic oligonucleotide
aaaggcattaaattaatttaatgggaatgt

SEQ ID NO: 390527 - DNA, 30 bp, Artificial Sequence
  Synthetic oligonucleotide
tgcagacccaacattcactaagctgaatgt

SEQ ID NO: 390528 - DNA, 30 bp, Artificial Sequence
  Synthetic oligonucleotide
caattgggtgaaaggctctgcggtgaatgt

SEQ ID NO: 390529 - DNA, 30 bp, Artificial Sequence
  Synthetic oligonucleotide
tcccgcagacgcgacaatgttacataatgt

SEQ ID NO: 390530 - DNA, 30 bp, Artificial Sequence
  Synthetic oligonucleotide
cgggttgtgatgggggcgaaattataatgt

SEQ ID NO: 390531 - DNA, 30 bp, Artificial Sequence
  Synthetic oligonucleotide
gtaatcgttatccgcatgaacacctaatgt

SEQ ID NO: 390532 - DNA, 30 bp, Artificial Sequence
  Synthetic oligonucleotide
cttttatcatagccgaacaatccctaatgt

SEQ ID NO: 390533 - DNA, 30 bp, Artificial Sequence
  Synthetic oligonucleotide
atctcatgtgcaccctatatagcgtaatgt

SEQ ID NO: 390534 - DNA, 30 bp, Artificial Sequence
  Synthetic oligonucleotide
cctttaccagcggctcaataccgttaatgt

SEQ ID NO: 390535 - DNA, 30 bp, Artificial Sequence
  Synthetic oligonucleotide
tgcgaggccctatggcacgacggttaatgt

SEQ ID NO: 390536 - DNA, 30 bp, Artificial Sequence
  Synthetic oligonucleotide
ttttgctaaggggaaactgaagagacatgt

SEQ ID NO: 390537 - DNA, 30 bp, Artificial Sequence
  Synthetic oligonucleotide
tctaaaattcaaaggccctatcggacatgt

SEQ ID NO: 390538 - DNA, 30 bp, Artificial Sequence
  Synthetic oligonucleotide
atctgatagccggcttattccttgacatgt

SEQ ID NO: 390539 - DNA, 30 bp, Artificial Sequence
  Synthetic oligonucleotide
aacttgccttccgcaatgacaaatacatgt

SEQ ID NO: 390540 - DNA, 27 bp, Artificial Sequence
  Synthetic oligonucleotide
tcatcaagcatattaggcataccatgt

SEQ ID NO: 390541 - DNA, 30 bp, Artificial Sequence
  Synthetic oligonucleotide
gtgaataacagcacagcatggttaccatgt

SEQ ID NO: 390542 - DNA, 30 bp, Artificial Sequence
  Synthetic oligonucleotide
ttgggtagctacagcccaaagacgccatgt

SEQ ID NO: 390543 - DNA, 30 bp, Artificial Sequence
  Synthetic oligonucleotide
tgcattgacgatatagttgagtcgccatgt

SEQ ID NO: 390544 - DNA, 30 bp, Artificial Sequence
  Synthetic oligonucleotide
aagtataacaaactataagcgggtccatgt

SEQ ID NO: 390545 - DNA, 30 bp, Artificial Sequence
  Synthetic oligonucleotide
cacgaaatgggaccgttgcgcaaagcatgt

SEQ ID NO: 390546 - DNA, 30 bp, Artificial Sequence
  Synthetic oligonucleotide
attagacggttgctggtacgtcaagcatgt

SEQ ID NO: 390547 - DNA, 30 bp, Artificial Sequence
  Synthetic oligonucleotide
gggtagatagtgcttagtttttaagcatgt

SEQ ID NO: 390548 - DNA, 30 bp, Artificial Sequence
  Synthetic oligonucleotide
agtgctcttacggagccaagccgagcatgt

SEQ ID NO: 390549 - DNA, 30 bp, Artificial Sequence
  Synthetic oligonucleotide
aaaggatcaaataagttgatcggagcatgt

SEQ ID NO: 390550 - DNA, 30 bp, Artificial Sequence
  Synthetic oligonucleotide
ggtagcagttgtgtatggcacaacgcatgt

SEQ ID NO: 390551 - DNA, 30 bp, Artificial Sequence
  Synthetic oligonucleotide
actcagtcactttgctcaacgagcgcatgt

SEQ ID NO: 390552 - DNA, 30 bp, Artificial Sequence
  Synthetic oligonucleotide
ttataagcagcatggctaacgtcggcatgt

SEQ ID NO: 390553 - DNA, 30 bp, Artificial Sequence
  Synthetic oligonucleotide
aggtttgtaaggtccacggcgagggcatgt

SEQ ID NO: 390554 - DNA, 30 bp, Artificial Sequence
  Synthetic oligonucleotide
tcccggccacggagagtggatagtgcatgt

SEQ ID NO: 390555 - DNA, 28 bp, Artificial Sequence
  Synthetic oligonucleotide
atgtaatggttgagaaactggctcatgt

SEQ ID NO: 390556 - DNA, 30 bp, Artificial Sequence
  Synthetic oligonucleotide
caggatgttaagaattgtcggtacagatgt

SEQ ID NO: 390557 - DNA, 30 bp, Artificial Sequence
  Synthetic oligonucleotide
catcatgagttaagataaatttacagatgt

SEQ ID NO: 390558 - DNA, 30 bp, Artificial Sequence
  Synthetic oligonucleotide
cgccacccgcagaaatagttggctagatgt

SEQ ID NO: 390559 - DNA, 30 bp, Artificial Sequence
  Synthetic oligonucleotide
tacgatttgcggcgatcaagacgtagatgt

SEQ ID NO: 390560 - DNA, 30 bp, Artificial Sequence
  Synthetic oligonucleotide
gtctcttgtgcaccaatccaggcacgatgt

SEQ ID NO: 390561 - DNA, 30 bp, Artificial Sequence
  Synthetic oligonucleotide
aatcgacatcagtgaggaaatggacgatgt

SEQ ID NO: 390562 - DNA, 30 bp, Artificial Sequence
  Synthetic oligonucleotide
ctaagctacaggtagggcccggggcgatgt

SEQ ID NO: 390563 - DNA, 30 bp, Artificial Sequence
  Synthetic oligonucleotide
tctaaactccttgtcgggtgggaaggatgt

SEQ ID NO: 390564 - DNA, 30 bp, Artificial Sequence
  Synthetic oligonucleotide
acattcgcgtataggaaaatgcgaggatgt

SEQ ID NO: 390565 - DNA, 30 bp, Artificial Sequence
  Synthetic oligonucleotide
caattggatcaggcggcaagaggaggatgt

SEQ ID NO: 390566 - DNA, 30 bp, Artificial Sequence
  Synthetic oligonucleotide
ttctctggacttcgggaccgaagcggatgt

SEQ ID NO: 390567 - DNA, 30 bp, Artificial Sequence
  Synthetic oligonucleotide
ttgaggagcttcagccgaggattgggatgt

SEQ ID NO: 390568 - DNA, 30 bp, Artificial Sequence
  Synthetic oligonucleotide
tagtggtaatactgtgtgtattttggatgt

SEQ ID NO: 390569 - DNA, 30 bp, Artificial Sequence
  Synthetic oligonucleotide
attggctaggcggggtaccttcaatgatgt

SEQ ID NO: 390570 - DNA, 30 bp, Artificial Sequence
  Synthetic oligonucleotide
gttccgaataccccgtcctctccatgatgt

SEQ ID NO: 390571 - DNA, 30 bp, Artificial Sequence
  Synthetic oligonucleotide
ctcactcgctgtcaatggatcgcatgatgt

SEQ ID NO: 390572 - DNA, 30 bp, Artificial Sequence
  Synthetic oligonucleotide
tattcgagtagggttagctcgatatgatgt

SEQ ID NO: 390573 - DNA, 30 bp, Artificial Sequence
  Synthetic oligonucleotide
gatctttgtactaacttttcgacctgatgt

SEQ ID NO: 390574 - DNA, 30 bp, Artificial Sequence
  Synthetic oligonucleotide
cacgacggaaccagaaaggttgtttgatgt

SEQ ID NO: 390575 - DNA, 30 bp, Artificial Sequence
  Synthetic oligonucleotide
gagctgcgcacctagtgagaacaaatatgt

SEQ ID NO: 390576 - DNA, 30 bp, Artificial Sequence
  Synthetic oligonucleotide
aggttaaagggaacccccttacgaatatgt

SEQ ID NO: 390577 - DNA, 30 bp, Artificial Sequence
  Synthetic oligonucleotide
ttcggtgtcccggctaccgttcacatatgt

SEQ ID NO: 390578 - DNA, 30 bp, Artificial Sequence
  Synthetic oligonucleotide
caaagaagatcgcccgcaggcaccatatgt

SEQ ID NO: 390579 - DNA, 30 bp, Artificial Sequence
  Synthetic oligonucleotide
tttgaaagtttgacatctggctccatatgt

SEQ ID NO: 390580 - DNA, 30 bp, Artificial Sequence
  Synthetic oligonucleotide
gatatctccaatagtaaggcaccgatatgt

SEQ ID NO: 390581 - DNA, 30 bp, Artificial Sequence
  Synthetic oligonucleotide
aacagagagagtcctggaccggggatatgt

SEQ ID NO: 390582 - DNA, 30 bp, Artificial Sequence
  Synthetic oligonucleotide
aactgttgtgatataaccgcttggatatgt

SEQ ID NO: 390583 - DNA, 30 bp, Artificial Sequence
  Synthetic oligonucleotide
tccctactgttggcatcggttttgatatgt

SEQ ID NO: 390584 - DNA, 30 bp, Artificial Sequence
  Synthetic oligonucleotide
gtgtcacagcggtgggtctcggctatatgt

SEQ ID NO: 390585 - DNA, 30 bp, Artificial Sequence
  Synthetic oligonucleotide
tcgcgcgaaaccctcagttgccttatatgt

SEQ ID NO: 390586 - DNA, 30 bp, Artificial Sequence
  Synthetic oligonucleotide
catatggtcaagcaacaccgctaactatgt

SEQ ID NO: 390587 - DNA, 30 bp, Artificial Sequence
  Synthetic oligonucleotide
aggtcttccgaggatgaccgttgactatgt

SEQ ID NO: 390588 - DNA, 30 bp, Artificial Sequence
  Synthetic oligonucleotide
acgcctgatggtatgagtcctgacctatgt

SEQ ID NO: 390589 - DNA, 30 bp, Artificial Sequence
  Synthetic oligonucleotide
tattgcaccaccacatgtaaccagctatgt

SEQ ID NO: 390590 - DNA, 30 bp, Artificial Sequence
  Synthetic oligonucleotide
agtgatcgttcgagcatctgaaggctatgt

SEQ ID NO: 390591 - DNA, 30 bp, Artificial Sequence
  Synthetic oligonucleotide
caaactgaactgaacttaaagcgtctatgt

SEQ ID NO: 390592 - DNA, 30 bp, Artificial Sequence
  Synthetic oligonucleotide
agaggtaacagtctcgcacaagttctatgt

SEQ ID NO: 390593 - DNA, 30 bp, Artificial Sequence
  Synthetic oligonucleotide
ggagacaggtggcggcctggtcaagtatgt

SEQ ID NO: 390594 - DNA, 30 bp, Artificial Sequence
  Synthetic oligonucleotide
cgttcgcctggtcgccccggctccgtatgt

SEQ ID NO: 390595 - DNA, 30 bp, Artificial Sequence
  Synthetic oligonucleotide
cgcgtacatcggccagtttatcatgtatgt

SEQ ID NO: 390596 - DNA, 30 bp, Artificial Sequence
  Synthetic oligonucleotide
tcaataacaattgatgttgaaactgtatgt

SEQ ID NO: 390597 - DNA, 30 bp, Artificial Sequence
  Synthetic oligonucleotide
acttcgtcgacgcgggaaatgtttgtatgt

SEQ ID NO: 390598 - DNA, 30 bp, Artificial Sequence
  Synthetic oligonucleotide
gcatcaaaatactacccggcctaattatgt

SEQ ID NO: 390599 - DNA, 30 bp, Artificial Sequence
  Synthetic oligonucleotide
gataccattggtcataaacatatcttatgt

SEQ ID NO: 390600 - DNA, 30 bp, Artificial Sequence
  Synthetic oligonucleotide
gtgctcgtttcttctttaaggactttatgt

SEQ ID NO: 390601 - DNA, 30 bp, Artificial Sequence
  Synthetic oligonucleotide
agatagtttgaacatagtgtctctttatgt

SEQ ID NO: 390602 - DNA, 30 bp, Artificial Sequence
  Synthetic oligonucleotide
cctgtgataattagcgtaacgtttttatgt

SEQ ID NO: 390603 - DNA, 30 bp, Artificial Sequence
  Synthetic oligonucleotide
actaccaggcgatctcgctcgccgaactgt

SEQ ID NO: 390604 - DNA, 30 bp, Artificial Sequence
  Synthetic oligonucleotide
cgccagatacgtatccatacttggaactgt

SEQ ID NO: 390605 - DNA, 30 bp, Artificial Sequence
  Synthetic oligonucleotide
tgtaggggtcaagtacatcaaatgaactgt

SEQ ID NO: 390606 - DNA, 30 bp, Artificial Sequence
  Synthetic oligonucleotide
aaactaaagctggtctttgagttgaactgt

SEQ ID NO: 390607 - DNA, 30 bp, Artificial Sequence
  Synthetic oligonucleotide
accacgggttgatgtaaaccaagtaactgt

SEQ ID NO: 390608 - DNA, 30 bp, Artificial Sequence
  Synthetic oligonucleotide
aagctgcagctacggagtgacgttaactgt

SEQ ID NO: 390609 - DNA, 30 bp, Artificial Sequence
  Synthetic oligonucleotide
acccccacttcatcctattgatttaactgt

SEQ ID NO: 390610 - DNA, 30 bp, Artificial Sequence
  Synthetic oligonucleotide
gccctcattaagggtaataaggaacactgt

SEQ ID NO: 390611 - DNA, 30 bp, Artificial Sequence
  Synthetic oligonucleotide
ctagaccaaaggttaagctgtcgacactgt

SEQ ID NO: 390612 - DNA, 30 bp, Artificial Sequence
  Synthetic oligonucleotide
tcttctcttaacgcactatatctacactgt

SEQ ID NO: 390613 - DNA, 30 bp, Artificial Sequence
  Synthetic oligonucleotide
gttctgtgtccgaatgtttgtaaccactgt

SEQ ID NO: 390614 - DNA, 30 bp, Artificial Sequence
  Synthetic oligonucleotide
tgtcttggttttgtccgtccgttccactgt

SEQ ID NO: 390615 - DNA, 30 bp, Artificial Sequence
  Synthetic oligonucleotide
ttgtttatgttgcgtgtcttcaggcactgt

SEQ ID NO: 390616 - DNA, 30 bp, Artificial Sequence
  Synthetic oligonucleotide
gagggagggcggcttaattggcggcactgt

SEQ ID NO: 390617 - DNA, 30 bp, Artificial Sequence
  Synthetic oligonucleotide
gtggggagaacataatttaccctgcactgt

SEQ ID NO: 390618 - DNA, 30 bp, Artificial Sequence
  Synthetic oligonucleotide
agcttaagtcggagcagaataactcactgt

SEQ ID NO: 390619 - DNA, 30 bp, Artificial Sequence
  Synthetic oligonucleotide
tttcgtagcgtaagatcgctgaaagactgt

SEQ ID NO: 390620 - DNA, 30 bp, Artificial Sequence
  Synthetic oligonucleotide
cagcgtccccgtccgtatagccccgactgt

SEQ ID NO: 390621 - DNA, 30 bp, Artificial Sequence
  Synthetic oligonucleotide
cacccgacagtgttccgtaaggaggactgt

SEQ ID NO: 390622 - DNA, 30 bp, Artificial Sequence
  Synthetic oligonucleotide
gttcacgaccgggtgtggcatagggactgt

SEQ ID NO: 390623 - DNA, 30 bp, Artificial Sequence
  Synthetic oligonucleotide
ctccaatgaggaggcaaagccctggactgt

SEQ ID NO: 390624 - DNA, 30 bp, Artificial Sequence
  Synthetic oligonucleotide
tttgatggggctaatcgagctgatgactgt

SEQ ID NO: 390625 - DNA, 30 bp, Artificial Sequence
  Synthetic oligonucleotide
tatcttgtagggattaaatgatgtgactgt

SEQ ID NO: 390626 - DNA, 30 bp, Artificial Sequence
  Synthetic oligonucleotide
aggccatcaacgctagacaagtaatactgt

SEQ ID NO: 390627 - DNA, 30 bp, Artificial Sequence
  Synthetic oligonucleotide
cactgtgtgaccgacttatttcgatactgt

SEQ ID NO: 390628 - DNA, 30 bp, Artificial Sequence
  Synthetic oligonucleotide
ataacactatatattagtacgggatactgt

SEQ ID NO: 390629 - DNA, 30 bp, Artificial Sequence
  Synthetic oligonucleotide
tagagtttaggtggtcctgagttatactgt

SEQ ID NO: 390630 - DNA, 30 bp, Artificial Sequence
  Synthetic oligonucleotide
gtagatattcttggggctagaaactactgt

SEQ ID NO: 390631 - DNA, 30 bp, Artificial Sequence
  Synthetic oligonucleotide
aggcctaggcaggcttggggacgctactgt

SEQ ID NO: 390632 - DNA, 30 bp, Artificial Sequence
  Synthetic oligonucleotide
acgtcgttaccacaggacttgaagtactgt

SEQ ID NO: 390633 - DNA, 30 bp, Artificial Sequence
  Synthetic oligonucleotide
tgttacagtccggtcgaactggcgtactgt

SEQ ID NO: 390634 - DNA, 30 bp, Artificial Sequence
  Synthetic oligonucleotide
tttcgctttgcaatagtcggttcgtactgt

SEQ ID NO: 390635 - DNA, 30 bp, Artificial Sequence
  Synthetic oligonucleotide
gcacgcatcccgtccccaaccaggtactgt

SEQ ID NO: 390636 - DNA, 30 bp, Artificial Sequence
  Synthetic oligonucleotide
ctcagtcggaggcttactaccgggtactgt

SEQ ID NO: 390637 - DNA, 30 bp, Artificial Sequence
  Synthetic oligonucleotide
accagcagtaaacattacgttgggtactgt

SEQ ID NO: 390638 - DNA, 30 bp, Artificial Sequence
  Synthetic oligonucleotide
ggagaatgtggccccaggttaacttactgt

SEQ ID NO: 390639 - DNA, 30 bp, Artificial Sequence
  Synthetic oligonucleotide
caccagcgggcacgctgagctccttactgt

SEQ ID NO: 390640 - DNA, 30 bp, Artificial Sequence
  Synthetic oligonucleotide
ccagactctaggcgcgtcaattgttactgt

SEQ ID NO: 390641 - DNA, 30 bp, Artificial Sequence
  Synthetic oligonucleotide
gtatcggagactacggggtgaggaacctgt

SEQ ID NO: 390642 - DNA, 30 bp, Artificial Sequence
  Synthetic oligonucleotide
catcctgagagtgccctactctccacctgt

SEQ ID NO: 390643 - DNA, 30 bp, Artificial Sequence
  Synthetic oligonucleotide
ttcgcactctgtgacttgcatctgacctgt

SEQ ID NO: 390644 - DNA, 30 bp, Artificial Sequence
  Synthetic oligonucleotide
taagtctcggaccagataaattttacctgt

SEQ ID NO: 390645 - DNA, 30 bp, Artificial Sequence
  Synthetic oligonucleotide
aactcagtcgcagaagctcacgcaccctgt

SEQ ID NO: 390646 - DNA, 30 bp, Artificial Sequence
  Synthetic oligonucleotide
aaggccagtggctgctcgccatacccctgt

SEQ ID NO: 390647 - DNA, 30 bp, Artificial Sequence
  Synthetic oligonucleotide
ccctatcttggctccggctatcccccctgt

SEQ ID NO: 390648 - DNA, 30 bp, Artificial Sequence
  Synthetic oligonucleotide
atataaatctagtatgacggcatcccctgt

SEQ ID NO: 390649 - DNA, 30 bp, Artificial Sequence
  Synthetic oligonucleotide
ggatcgtctctactagctgcactcccctgt

SEQ ID NO: 390650 - DNA, 30 bp, Artificial Sequence
  Synthetic oligonucleotide
ccaatgcgccctaaggggacctagccctgt

SEQ ID NO: 390651 - DNA, 30 bp, Artificial Sequence
  Synthetic oligonucleotide
ccaatgcgccttaaggggacctagccctgt

SEQ ID NO: 390652 - DNA, 30 bp, Artificial Sequence
  Synthetic oligonucleotide
tacctgtgggggggtgctataacgccctgt

SEQ ID NO: 390653 - DNA, 30 bp, Artificial Sequence
  Synthetic oligonucleotide
aggaaacgatagtccctgtgccggccctgt

SEQ ID NO: 390654 - DNA, 30 bp, Artificial Sequence
  Synthetic oligonucleotide
gggagcacttgaaataccgtgtgtccctgt

SEQ ID NO: 390655 - DNA, 30 bp, Artificial Sequence
  Synthetic oligonucleotide
aaaacgacggaagaacaatggcttccctgt

SEQ ID NO: 390656 - DNA, 30 bp, Artificial Sequence
  Synthetic oligonucleotide
atttactaatcaagcagcccgggagcctgt

SEQ ID NO: 390657 - DNA, 30 bp, Artificial Sequence
  Synthetic oligonucleotide
gttacgtgatctcacataccgtgagcctgt

SEQ ID NO: 390658 - DNA, 30 bp, Artificial Sequence
  Synthetic oligonucleotide
ctagaccgatcattgtttcttgtagcctgt

SEQ ID NO: 390659 - DNA, 30 bp, Artificial Sequence
  Synthetic oligonucleotide
gggccgacccgacaacgcggacacgcctgt

SEQ ID NO: 390660 - DNA, 30 bp, Artificial Sequence
  Synthetic oligonucleotide
tcattctgaacacatagtgtggacgcctgt

SEQ ID NO: 390661 - DNA, 30 bp, Artificial Sequence
  Synthetic oligonucleotide
tggcacctttataggaccgagcgggcctgt

SEQ ID NO: 390662 - DNA, 30 bp, Artificial Sequence
  Synthetic oligonucleotide
tacatcttatttggagctataggggcctgt

SEQ ID NO: 390663 - DNA, 30 bp, Artificial Sequence
  Synthetic oligonucleotide
tgttaacggaggcgcatgggttgggcctgt

SEQ ID NO: 390664 - DNA, 30 bp, Artificial Sequence
  Synthetic oligonucleotide
gaaaacgggtctcgttatagttactcctgt

SEQ ID NO: 390665 - DNA, 30 bp, Artificial Sequence
  Synthetic oligonucleotide
gatagcaaataaatgaggacctcctcctgt

SEQ ID NO: 390666 - DNA, 30 bp, Artificial Sequence
  Synthetic oligonucleotide
cattcgaagtgctggtgccagtcctcctgt

SEQ ID NO: 390667 - DNA, 30 bp, Artificial Sequence
  Synthetic oligonucleotide
tgactccctcgtaccagttccagctcctgt

SEQ ID NO: 390668 - DNA, 30 bp, Artificial Sequence
  Synthetic oligonucleotide
ctatacgctccgtgaacagtcgagtcctgt

SEQ ID NO: 390669 - DNA, 30 bp, Artificial Sequence
  Synthetic oligonucleotide
cgtaatggcgtaatcgcacaggggtcctgt

SEQ ID NO: 390670 - DNA, 30 bp, Artificial Sequence
  Synthetic oligonucleotide
attcgtgaagtaactcgcaaatgaagctgt

SEQ ID NO: 390671 - DNA, 30 bp, Artificial Sequence
  Synthetic oligonucleotide
tgactagcctatcgcgagcgctggagctgt

SEQ ID NO: 390672 - DNA, 30 bp, Artificial Sequence
  Synthetic oligonucleotide
gcgccgatagctgcatttgatgatagctgt

SEQ ID NO: 390673 - DNA, 30 bp, Artificial Sequence
  Synthetic oligonucleotide
agtggaagtttatctatcattaggcgctgt

SEQ ID NO: 390674 - DNA, 30 bp, Artificial Sequence
  Synthetic oligonucleotide
agcatttaaccacaaaccaccgctcgctgt

SEQ ID NO: 390675 - DNA, 30 bp, Artificial Sequence
  Synthetic oligonucleotide
atccgctggaggacgtaaccacttcgctgt

SEQ ID NO: 390676 - DNA, 30 bp, Artificial Sequence
  Synthetic oligonucleotide
tccaccgaatacgtttaattagaaggctgt

SEQ ID NO: 390677 - DNA, 30 bp, Artificial Sequence
  Synthetic oligonucleotide
ctaccagggtatagatttagaccaggctgt

SEQ ID NO: 390678 - DNA, 30 bp, Artificial Sequence
  Synthetic oligonucleotide
ggatccgagaatatgaataatttaggctgt

SEQ ID NO: 390679 - DNA, 30 bp, Artificial Sequence
  Synthetic oligonucleotide
taggtgagtggaatgaaagtacgcggctgt

SEQ ID NO: 390680 - DNA, 31 bp, Artificial Sequence
  Synthetic oligonucleotide
gttacttcataagggtcccgaacggtgctgt

SEQ ID NO: 390681 - DNA, 30 bp, Artificial Sequence
  Synthetic oligonucleotide
caccctatgaaaggggttaaagtaatctgt

SEQ ID NO: 390682 - DNA, 30 bp, Artificial Sequence
  Synthetic oligonucleotide
atctatacttggcaaaccttagtaatctgt

SEQ ID NO: 390683 - DNA, 30 bp, Artificial Sequence
  Synthetic oligonucleotide
cacgtatcagcacggggggaaagcatctgt

SEQ ID NO: 390684 - DNA, 30 bp, Artificial Sequence
  Synthetic oligonucleotide
tatggacgccgcaccattttagatatctgt

SEQ ID NO: 390685 - DNA, 30 bp, Artificial Sequence
  Synthetic oligonucleotide
agcatatacagagcaacaaatgctatctgt

SEQ ID NO: 390686 - DNA, 30 bp, Artificial Sequence
  Synthetic oligonucleotide
ggcgttctactatttaaaccgtctatctgt

SEQ ID NO: 390687 - DNA, 30 bp, Artificial Sequence
  Synthetic oligonucleotide
tacaccacatctgagcctactacactctgt

SEQ ID NO: 390688 - DNA, 30 bp, Artificial Sequence
  Synthetic oligonucleotide
aaatggtatacatctgccaatctactctgt

SEQ ID NO: 390689 - DNA, 30 bp, Artificial Sequence
  Synthetic oligonucleotide
tactattatatacgctacttgaccctctgt

SEQ ID NO: 390690 - DNA, 30 bp, Artificial Sequence
  Synthetic oligonucleotide
ttcgctttaattttccagtcagcggtctgt

SEQ ID NO: 390691 - DNA, 30 bp, Artificial Sequence
  Synthetic oligonucleotide
cagttctttccactacatgatagggtctgt

SEQ ID NO: 390692 - DNA, 30 bp, Artificial Sequence
  Synthetic oligonucleotide
ggagattatgaaggacacctggctgtctgt

SEQ ID NO: 390693 - DNA, 30 bp, Artificial Sequence
  Synthetic oligonucleotide
ctgggggcaattgccatgtggattgtctgt

SEQ ID NO: 390694 - DNA, 30 bp, Artificial Sequence
  Synthetic oligonucleotide
tttacataagtctgtacatcgacattctgt

SEQ ID NO: 390695 - DNA, 30 bp, Artificial Sequence
  Synthetic oligonucleotide
accgggtgatcggagttacgagcattctgt

SEQ ID NO: 390696 - DNA, 30 bp, Artificial Sequence
  Synthetic oligonucleotide
aggacgctgcagcctgatccattattctgt

SEQ ID NO: 390697 - DNA, 30 bp, Artificial Sequence
  Synthetic oligonucleotide
cccgtgtcgacccctacctacgtcttctgt

SEQ ID NO: 390698 - DNA, 30 bp, Artificial Sequence
  Synthetic oligonucleotide
tggttggttcgtggtaactagccgttctgt

SEQ ID NO: 390699 - DNA, 30 bp, Artificial Sequence
  Synthetic oligonucleotide
agtttaaacatcagaacatgtaggttctgt

SEQ ID NO: 390700 - DNA, 30 bp, Artificial Sequence
  Synthetic oligonucleotide
ccaggatgctagtgatgcaaggggttctgt

SEQ ID NO: 390701 - DNA, 30 bp, Artificial Sequence
  Synthetic oligonucleotide
cagacgcgcgacgcacgccgggggttctgt

SEQ ID NO: 390702 - DNA, 30 bp, Artificial Sequence
  Synthetic oligonucleotide
taattgtagcgatctctatcctatttctgt

SEQ ID NO: 390703 - DNA, 30 bp, Artificial Sequence
  Synthetic oligonucleotide
aaccaaccgctagagattaaaaaaaagtgt

SEQ ID NO: 390704 - DNA, 30 bp, Artificial Sequence
  Synthetic oligonucleotide
ttctatcgtaaatcccgggaagaaaagtgt

SEQ ID NO: 390705 - DNA, 30 bp, Artificial Sequence
  Synthetic oligonucleotide
ggaagattcatttgcagtttaaacaagtgt

SEQ ID NO: 390706 - DNA, 30 bp, Artificial Sequence
  Synthetic oligonucleotide
ttctcggaaatgtaacgtgaagacaagtgt

SEQ ID NO: 390707 - DNA, 30 bp, Artificial Sequence
  Synthetic oligonucleotide
gaaatgagtgtggtcgcctgccgacagtgt

SEQ ID NO: 390708 - DNA, 30 bp, Artificial Sequence
  Synthetic oligonucleotide
tcacggtgactgacgaggatgacccagtgt

SEQ ID NO: 390709 - DNA, 30 bp, Artificial Sequence
  Synthetic oligonucleotide
tccgacatccagccttgcagtagccagtgt

SEQ ID NO: 390710 - DNA, 30 bp, Artificial Sequence
  Synthetic oligonucleotide
tttgccacaaaggaggtttatatccagtgt

SEQ ID NO: 390711 - DNA, 30 bp, Artificial Sequence
  Synthetic oligonucleotide
ttccatgaaactgagggtcagcagcagtgt

SEQ ID NO: 390712 - DNA, 30 bp, Artificial Sequence
  Synthetic oligonucleotide
gatacttgcgactaccgcggattgcagtgt

SEQ ID NO: 390713 - DNA, 30 bp, Artificial Sequence
  Synthetic oligonucleotide
ggcgtacgcaggatacacatagatcagtgt

SEQ ID NO: 390714 - DNA, 30 bp, Artificial Sequence
  Synthetic oligonucleotide
cgctaatatacgttactggggtctcagtgt

SEQ ID NO: 390715 - DNA, 30 bp, Artificial Sequence
  Synthetic oligonucleotide
attatttgtgtactcccagggacagagtgt

SEQ ID NO: 390716 - DNA, 30 bp, Artificial Sequence
  Synthetic oligonucleotide
tactgcccggtaaggctgttataggagtgt

SEQ ID NO: 390717 - DNA, 30 bp, Artificial Sequence
  Synthetic oligonucleotide
tctgaaaggcgcggggggcgggcggagtgt

SEQ ID NO: 390718 - DNA, 30 bp, Artificial Sequence
  Synthetic oligonucleotide
tggcgccacatttcaatgattgcggagtgt

SEQ ID NO: 390719 - DNA, 30 bp, Artificial Sequence
  Synthetic oligonucleotide
ccgttacattaccctgacggtggggagtgt

SEQ ID NO: 390720 - DNA, 30 bp, Artificial Sequence
  Synthetic oligonucleotide
tccgaagaaatgttaacacacaatgagtgt

SEQ ID NO: 390721 - DNA, 30 bp, Artificial Sequence
  Synthetic oligonucleotide
tgcggtttatatccgttctctagatagtgt

SEQ ID NO: 390722 - DNA, 30 bp, Artificial Sequence
  Synthetic oligonucleotide
ggtctcgttctttgaagggcggtatagtgt

SEQ ID NO: 390723 - DNA, 30 bp, Artificial Sequence
  Synthetic oligonucleotide
gcggggatatagtatgacgcaacctagtgt

SEQ ID NO: 390724 - DNA, 30 bp, Artificial Sequence
  Synthetic oligonucleotide
cacagttcactatgcagttggtggtagtgt

SEQ ID NO: 390725 - DNA, 30 bp, Artificial Sequence
  Synthetic oligonucleotide
tccggaggcagaccagggtccatgtagtgt

SEQ ID NO: 390726 - DNA, 30 bp, Artificial Sequence
  Synthetic oligonucleotide
aaaggcgccgcacggatcctcacttagtgt

SEQ ID NO: 390727 - DNA, 30 bp, Artificial Sequence
  Synthetic oligonucleotide
atttgaaaggacaaatgttagtcttagtgt

SEQ ID NO: 390728 - DNA, 30 bp, Artificial Sequence
  Synthetic oligonucleotide
ggcgcacgccaacgttagggcaaaacgtgt

SEQ ID NO: 390729 - DNA, 30 bp, Artificial Sequence
  Synthetic oligonucleotide
tactaggggaagttctcttagacaacgtgt

SEQ ID NO: 390730 - DNA, 30 bp, Artificial Sequence
  Synthetic oligonucleotide
tactgatagcgtatctggggtgagacgtgt

SEQ ID NO: 390731 - DNA, 30 bp, Artificial Sequence
  Synthetic oligonucleotide
ataagtctgccgacagtagattggacgtgt

SEQ ID NO: 390732 - DNA, 30 bp, Artificial Sequence
  Synthetic oligonucleotide
cgacaccttgataatttatctcctacgtgt

SEQ ID NO: 390733 - DNA, 30 bp, Artificial Sequence
  Synthetic oligonucleotide
tgcccctaccacgctcgggggcgtacgtgt

SEQ ID NO: 390734 - DNA, 30 bp, Artificial Sequence
  Synthetic oligonucleotide
tattacgtccagcattgggttgccccgtgt

SEQ ID NO: 390735 - DNA, 30 bp, Artificial Sequence
  Synthetic oligonucleotide
tctgcattggggtgatgacagtcgccgtgt

SEQ ID NO: 390736 - DNA, 30 bp, Artificial Sequence
  Synthetic oligonucleotide
agaaagcgtccgacaaactctcggccgtgt

SEQ ID NO: 390737 - DNA, 30 bp, Artificial Sequence
  Synthetic oligonucleotide
tgtgtgatctataacatcatggatccgtgt

SEQ ID NO: 390738 - DNA, 30 bp, Artificial Sequence
  Synthetic oligonucleotide
ggtaaacatgtacaccatcctggtccgtgt

SEQ ID NO: 390739 - DNA, 31 bp, Artificial Sequence
  Synthetic oligonucleotide
cacctctctacagcctcggactcttccgtgt

SEQ ID NO: 390740 - DNA, 30 bp, Artificial Sequence
  Synthetic oligonucleotide
ccagtaacgaacacaaccaaatttccgtgt

SEQ ID NO: 390741 - DNA, 30 bp, Artificial Sequence
  Synthetic oligonucleotide
tagtaacgcgcagggacagacccggcgtgt

SEQ ID NO: 390742 - DNA, 30 bp, Artificial Sequence
  Synthetic oligonucleotide
gtatcaattcgctatagggctcatgcgtgt

SEQ ID NO: 390743 - DNA, 30 bp, Artificial Sequence
  Synthetic oligonucleotide
atgtttggatggaggcgatgtaaatcgtgt

SEQ ID NO: 390744 - DNA, 30 bp, Artificial Sequence
  Synthetic oligonucleotide
gatgagcaggcgtaacacggcgactcgtgt

SEQ ID NO: 390745 - DNA, 30 bp, Artificial Sequence
  Synthetic oligonucleotide
tgtgtcatcgtgcaaagacataagtcgtgt

SEQ ID NO: 390746 - DNA, 30 bp, Artificial Sequence
  Synthetic oligonucleotide
ggatcttagaattaatgtgttctgtcgtgt

SEQ ID NO: 390747 - DNA, 30 bp, Artificial Sequence
  Synthetic oligonucleotide
tggggccatgtgcagctttgaccttcgtgt

SEQ ID NO: 390748 - DNA, 30 bp, Artificial Sequence
  Synthetic oligonucleotide
cctcaaagtgacaacccctttttttcgtgt

SEQ ID NO: 390749 - DNA, 30 bp, Artificial Sequence
  Synthetic oligonucleotide
ccgtcatttaaggccgtgccctaaaggtgt

SEQ ID NO: 390750 - DNA, 30 bp, Artificial Sequence
  Synthetic oligonucleotide
aatatcaacgtgggttgcaggataaggtgt

SEQ ID NO: 390751 - DNA, 31 bp, Artificial Sequence
  Synthetic oligonucleotide
gccgttacgacacgatcgacctttcaggtgt

SEQ ID NO: 390752 - DNA, 30 bp, Artificial Sequence
  Synthetic oligonucleotide
tgtttagctcggcgacagagttagaggtgt

SEQ ID NO: 390753 - DNA, 30 bp, Artificial Sequence
  Synthetic oligonucleotide
aaatatataatcaggcagagagcgaggtgt

SEQ ID NO: 390754 - DNA, 30 bp, Artificial Sequence
  Synthetic oligonucleotide
cgttcgcacaggcgcgaacccgataggtgt

SEQ ID NO: 390755 - DNA, 30 bp, Artificial Sequence
  Synthetic oligonucleotide
cagaacgcttcctgagtcactactaggtgt

SEQ ID NO: 390756 - DNA, 30 bp, Artificial Sequence
  Synthetic oligonucleotide
catcgacgcctaagtccaggagctaggtgt

SEQ ID NO: 390757 - DNA, 30 bp, Artificial Sequence
  Synthetic oligonucleotide
agtgctaggttccaggctccccttaggtgt

SEQ ID NO: 390758 - DNA, 30 bp, Artificial Sequence
  Synthetic oligonucleotide
agtagacagctgcggatagcttcacggtgt

SEQ ID NO: 390759 - DNA, 30 bp, Artificial Sequence
  Synthetic oligonucleotide
gtacagaccatcggagctatgggacggtgt

SEQ ID NO: 390760 - DNA, 30 bp, Artificial Sequence
  Synthetic oligonucleotide
cacctgttgcggtgagttttatcgcggtgt

SEQ ID NO: 390761 - DNA, 30 bp, Artificial Sequence
  Synthetic oligonucleotide
tgtgccggacaccgttttggcgggcggtgt

SEQ ID NO: 390762 - DNA, 30 bp, Artificial Sequence
  Synthetic oligonucleotide
ctacacaagcccgggctttagctgcggtgt

SEQ ID NO: 390763 - DNA, 30 bp, Artificial Sequence
  Synthetic oligonucleotide
cattccatgcggatgtggtcgagtcggtgt

SEQ ID NO: 390764 - DNA, 30 bp, Artificial Sequence
  Synthetic oligonucleotide
gcatgtttgggtttgtttaacgccgggtgt

SEQ ID NO: 390765 - DNA, 30 bp, Artificial Sequence
  Synthetic oligonucleotide
tatcagagttaggtctggtgtaaggggtgt

SEQ ID NO: 390766 - DNA, 30 bp, Artificial Sequence
  Synthetic oligonucleotide
ttcgcgcctttccacccgcgagcggggtgt

SEQ ID NO: 390767 - DNA, 30 bp, Artificial Sequence
  Synthetic oligonucleotide
tttagattgtcgggacgtacatgatggtgt

SEQ ID NO: 390768 - DNA, 29 bp, Artificial Sequence
  Synthetic oligonucleotide
gaggaggaacactcgtgaaaatatggtgt

SEQ ID NO: 390769 - DNA, 30 bp, Artificial Sequence
  Synthetic oligonucleotide
ttgcctcgcgaccatagggccaagtggtgt

SEQ ID NO: 390770 - DNA, 30 bp, Artificial Sequence
  Synthetic oligonucleotide
tctccatgtcaaaaacatcgctagtggtgt

SEQ ID NO: 390771 - DNA, 30 bp, Artificial Sequence
  Synthetic oligonucleotide
aagtgcttcaactctctgagagtgtggtgt

SEQ ID NO: 390772 - DNA, 30 bp, Artificial Sequence
  Synthetic oligonucleotide
cgggctttaaacctcgcacctatttggtgt

SEQ ID NO: 390773 - DNA, 30 bp, Artificial Sequence
  Synthetic oligonucleotide
taggaatactcattccctcggttttggtgt

SEQ ID NO: 390774 - DNA, 30 bp, Artificial Sequence
  Synthetic oligonucleotide
catttcatatgtattcatagaagaatgtgt

SEQ ID NO: 390775 - DNA, 30 bp, Artificial Sequence
  Synthetic oligonucleotide
gaatcggaactgatcacaaattgaatgtgt

SEQ ID NO: 390776 - DNA, 30 bp, Artificial Sequence
  Synthetic oligonucleotide
atcgcataactcttattgcagtacatgtgt

SEQ ID NO: 390777 - DNA, 30 bp, Artificial Sequence
  Synthetic oligonucleotide
ttctatcttcacgggagcgggaccatgtgt

SEQ ID NO: 390778 - DNA, 30 bp, Artificial Sequence
  Synthetic oligonucleotide
ggatcaatcgtaaagttgtaggagatgtgt

SEQ ID NO: 390779 - DNA, 30 bp, Artificial Sequence
  Synthetic oligonucleotide
caagaacgaaggtcacacctttaactgtgt

SEQ ID NO: 390780 - DNA, 30 bp, Artificial Sequence
  Synthetic oligonucleotide
gcctatgtgtaagttaggaatggactgtgt

SEQ ID NO: 390781 - DNA, 30 bp, Artificial Sequence
  Synthetic oligonucleotide
tttgtgtacgaagaatagggtgtactgtgt

SEQ ID NO: 390782 - DNA, 30 bp, Artificial Sequence
  Synthetic oligonucleotide
ttactacggctgctggcgagccgcctgtgt

SEQ ID NO: 390783 - DNA, 30 bp, Artificial Sequence
  Synthetic oligonucleotide
gaccagcgggtccggcgcaaaaatctgtgt

SEQ ID NO: 390784 - DNA, 30 bp, Artificial Sequence
  Synthetic oligonucleotide
ataatatattgtcaacccggatgtctgtgt

SEQ ID NO: 390785 - DNA, 30 bp, Artificial Sequence
  Synthetic oligonucleotide
gattcacatttgaaactacgattagtgtgt

SEQ ID NO: 390786 - DNA, 30 bp, Artificial Sequence
  Synthetic oligonucleotide
atttagtggagcgaattggcagccgtgtgt

SEQ ID NO: 390787 - DNA, 30 bp, Artificial Sequence
  Synthetic oligonucleotide
atacggcgttaggaagtcaggcaggtgtgt

SEQ ID NO: 390788 - DNA, 30 bp, Artificial Sequence
  Synthetic oligonucleotide
gatcgactcacctatccgccgtgggtgtgt

SEQ ID NO: 390789 - DNA, 30 bp, Artificial Sequence
  Synthetic oligonucleotide
tacaatatgaaaaagaaatgtaatgtgtgt

SEQ ID NO: 390790 - DNA, 30 bp, Artificial Sequence
  Synthetic oligonucleotide
acctgatgaaaatcggctcaggttgtgtgt

SEQ ID NO: 390791 - DNA, 30 bp, Artificial Sequence
  Synthetic oligonucleotide
ctatttcttgagacaagtgcctacttgtgt

SEQ ID NO: 390792 - DNA, 30 bp, Artificial Sequence
  Synthetic oligonucleotide
tccgagacacgcgttgcaatcaccttgtgt

SEQ ID NO: 390793 - DNA, 30 bp, Artificial Sequence
  Synthetic oligonucleotide
ggctccgcgggcgactcgcagatgttgtgt

SEQ ID NO: 390794 - DNA, 30 bp, Artificial Sequence
  Synthetic oligonucleotide
ctgctaggggacatgattgagcgtttgtgt

SEQ ID NO: 390795 - DNA, 30 bp, Artificial Sequence
  Synthetic oligonucleotide
tgttgtatggctgcgcttctaaaaaattgt

SEQ ID NO: 390796 - DNA, 30 bp, Artificial Sequence
  Synthetic oligonucleotide
cgttagcatatcagtgattaggaaaattgt

SEQ ID NO: 390797 - DNA, 30 bp, Artificial Sequence
  Synthetic oligonucleotide
atttggagcgtctgctgatattcaaattgt

SEQ ID NO: 390798 - DNA, 30 bp, Artificial Sequence
  Synthetic oligonucleotide
tctatttttacacttacgaggaagaattgt

SEQ ID NO: 390799 - DNA, 30 bp, Artificial Sequence
  Synthetic oligonucleotide
gcatttatggcatgtcatcccgcgaattgt

SEQ ID NO: 390800 - DNA, 30 bp, Artificial Sequence
  Synthetic oligonucleotide
tcctttctgcctccatttctcggtaattgt

SEQ ID NO: 390801 - DNA, 30 bp, Artificial Sequence
  Synthetic oligonucleotide
tagttctttttctcgtgcgtttttaattgt

SEQ ID NO: 390802 - DNA, 30 bp, Artificial Sequence
  Synthetic oligonucleotide
gccaagagtcctcctattgatatacattgt

SEQ ID NO: 390803 - DNA, 30 bp, Artificial Sequence
  Synthetic oligonucleotide
aagtatccgggtatggcaatgatccattgt

SEQ ID NO: 390804 - DNA, 30 bp, Artificial Sequence
  Synthetic oligonucleotide
ccacacggtgctagggatgcccagcattgt

SEQ ID NO: 390805 - DNA, 30 bp, Artificial Sequence
  Synthetic oligonucleotide
agtatagtaaaacgcatcggggagcattgt

SEQ ID NO: 390806 - DNA, 30 bp, Artificial Sequence
  Synthetic oligonucleotide
gagaaaatcgatcagtcgcagtgtcattgt

SEQ ID NO: 390807 - DNA, 30 bp, Artificial Sequence
  Synthetic oligonucleotide
catatttttaatttaaattgaggagattgt

SEQ ID NO: 390808 - DNA, 30 bp, Artificial Sequence
  Synthetic oligonucleotide
tatggtaatcgagtccctcggagcgattgt

SEQ ID NO: 390809 - DNA, 30 bp, Artificial Sequence
  Synthetic oligonucleotide
aaatggattgagactgtctagacggattgt

SEQ ID NO: 390810 - DNA, 30 bp, Artificial Sequence
  Synthetic oligonucleotide
ccccctaacggtccgaatacacgggattgt

SEQ ID NO: 390811 - DNA, 30 bp, Artificial Sequence
  Synthetic oligonucleotide
aaggtcaaaggcccctcaatggcatattgt

SEQ ID NO: 390812 - DNA, 30 bp, Artificial Sequence
  Synthetic oligonucleotide
gcttgctgcctaaagaatgcaggatattgt

SEQ ID NO: 390813 - DNA, 30 bp, Artificial Sequence
  Synthetic oligonucleotide
tcaccacactttgcagtcccattatattgt

SEQ ID NO: 390814 - DNA, 30 bp, Artificial Sequence
  Synthetic oligonucleotide
tttagtagtaggcaaatgtttagctattgt

SEQ ID NO: 390815 - DNA, 30 bp, Artificial Sequence
  Synthetic oligonucleotide
gtaagctcaacgcaaattttcatctattgt

SEQ ID NO: 390816 - DNA, 30 bp, Artificial Sequence
  Synthetic oligonucleotide
tatataatactatcttgaagtcagtattgt

SEQ ID NO: 390817 - DNA, 30 bp, Artificial Sequence
  Synthetic oligonucleotide
ccagtatgttgctcgccttgggtgtattgt

SEQ ID NO: 390818 - DNA, 29 bp, Artificial Sequence
  Synthetic oligonucleotide
gcgtgaccaccattagataaataacttgt

SEQ ID NO: 390819 - DNA, 30 bp, Artificial Sequence
  Synthetic oligonucleotide
tgtagctcttttacactagctaccacttgt

SEQ ID NO: 390820 - DNA, 30 bp, Artificial Sequence
  Synthetic oligonucleotide
tattgagccccgtatcacaggtccacttgt

SEQ ID NO: 390821 - DNA, 30 bp, Artificial Sequence
  Synthetic oligonucleotide
gaaagggttccgcgtgacgtgcggacttgt

SEQ ID NO: 390822 - DNA, 30 bp, Artificial Sequence
  Synthetic oligonucleotide
tctaacaggcaaacgcagttgattacttgt

SEQ ID NO: 390823 - DNA, 30 bp, Artificial Sequence
  Synthetic oligonucleotide
atgccgcaaagttgtggggtttaaccttgt

SEQ ID NO: 390824 - DNA, 30 bp, Artificial Sequence
  Synthetic oligonucleotide
gaggactgtctccactacccaggaccttgt

SEQ ID NO: 390825 - DNA, 30 bp, Artificial Sequence
  Synthetic oligonucleotide
taaaggaacattagtcaaagtgctccttgt

SEQ ID NO: 390826 - DNA, 30 bp, Artificial Sequence
  Synthetic oligonucleotide
aatcattcacttgtaaacttggaagcttgt

SEQ ID NO: 390827 - DNA, 30 bp, Artificial Sequence
  Synthetic oligonucleotide
gtatgattacgtagcacttggcgcgcttgt

SEQ ID NO: 390828 - DNA, 30 bp, Artificial Sequence
  Synthetic oligonucleotide
gtaccgctgtgctcggaccagagggcttgt

SEQ ID NO: 390829 - DNA, 30 bp, Artificial Sequence
  Synthetic oligonucleotide
accaccgggcaatgccctgtgggggcttgt

SEQ ID NO: 390830 - DNA, 30 bp, Artificial Sequence
  Synthetic oligonucleotide
gggagttctataactgactccctggcttgt

SEQ ID NO: 390831 - DNA, 30 bp, Artificial Sequence
  Synthetic oligonucleotide
aagaatcgattcaaaattccgctggcttgt

SEQ ID NO: 390832 - DNA, 30 bp, Artificial Sequence
  Synthetic oligonucleotide
ctaccacaaactgtttgacaaccatcttgt

SEQ ID NO: 390833 - DNA, 30 bp, Artificial Sequence
  Synthetic oligonucleotide
gcgcgacggcagaaagtagcgcgctcttgt

SEQ ID NO: 390834 - DNA, 30 bp, Artificial Sequence
  Synthetic oligonucleotide
atagaacactatacgctgggggcgtcttgt

SEQ ID NO: 390835 - DNA, 30 bp, Artificial Sequence
  Synthetic oligonucleotide
aggattcttacaagcaatagtgcgtcttgt

SEQ ID NO: 390836 - DNA, 30 bp, Artificial Sequence
  Synthetic oligonucleotide
ggttggtcccagggtgagaagtcgtcttgt

SEQ ID NO: 390837 - DNA, 30 bp, Artificial Sequence
  Synthetic oligonucleotide
gatcactggggaagcgtcccgctttcttgt

SEQ ID NO: 390838 - DNA, 30 bp, Artificial Sequence
  Synthetic oligonucleotide
tggcctttaacttcgtggagagccagttgt

SEQ ID NO: 390839 - DNA, 30 bp, Artificial Sequence
  Synthetic oligonucleotide
ggaatcgatccaacccctacggcgagttgt

SEQ ID NO: 390840 - DNA, 30 bp, Artificial Sequence
  Synthetic oligonucleotide
tccaggtccatccgcgctgaggggagttgt

SEQ ID NO: 390841 - DNA, 30 bp, Artificial Sequence
  Synthetic oligonucleotide
gcggtacggtattgacatctgcatagttgt

SEQ ID NO: 390842 - DNA, 30 bp, Artificial Sequence
  Synthetic oligonucleotide
cgcggggggcggatcccagcgtctagttgt

SEQ ID NO: 390843 - DNA, 30 bp, Artificial Sequence
  Synthetic oligonucleotide
gtgacaacagctcaattgtccattagttgt

SEQ ID NO: 390844 - DNA, 30 bp, Artificial Sequence
  Synthetic oligonucleotide
ctgacctggctgcgcattttaagacgttgt

SEQ ID NO: 390845 - DNA, 30 bp, Artificial Sequence
  Synthetic oligonucleotide
tattttgcacggagtacagtgggccgttgt

SEQ ID NO: 390846 - DNA, 30 bp, Artificial Sequence
  Synthetic oligonucleotide
agacaagcctttgtataggatggccgttgt

SEQ ID NO: 390847 - DNA, 30 bp, Artificial Sequence
  Synthetic oligonucleotide
aagtcaggcgcaactttcgaataaggttgt

SEQ ID NO: 390848 - DNA, 30 bp, Artificial Sequence
  Synthetic oligonucleotide
tacactcatgatatttcgcagggaggttgt

SEQ ID NO: 390849 - DNA, 30 bp, Artificial Sequence
  Synthetic oligonucleotide
ccggacctttctcggtgaatatgaggttgt

SEQ ID NO: 390850 - DNA, 30 bp, Artificial Sequence
  Synthetic oligonucleotide
tgtacgaataagacacggcgaaacggttgt

SEQ ID NO: 390851 - DNA, 30 bp, Artificial Sequence
  Synthetic oligonucleotide
aaagaaaaaatacatggtttgaacggttgt

SEQ ID NO: 390852 - DNA, 30 bp, Artificial Sequence
  Synthetic oligonucleotide
tgctgttccattgacggcgcactcggttgt

SEQ ID NO: 390853 - DNA, 30 bp, Artificial Sequence
  Synthetic oligonucleotide
ccggatgcgtgacaaacttgggtcggttgt

SEQ ID NO: 390854 - DNA, 30 bp, Artificial Sequence
  Synthetic oligonucleotide
gccaatgcattagcaggatagacgggttgt

SEQ ID NO: 390855 - DNA, 30 bp, Artificial Sequence
  Synthetic oligonucleotide
tcgaacatgggccgaacaggcccgggttgt

SEQ ID NO: 390856 - DNA, 30 bp, Artificial Sequence
  Synthetic oligonucleotide
attagtgaaaacggtacgaatccgggttgt

SEQ ID NO: 390857 - DNA, 30 bp, Artificial Sequence
  Synthetic oligonucleotide
gcacacggcatacacgcgacacggggttgt

SEQ ID NO: 390858 - DNA, 30 bp, Artificial Sequence
  Synthetic oligonucleotide
ttccggtatgcttaagtcacgatgggttgt

SEQ ID NO: 390859 - DNA, 30 bp, Artificial Sequence
  Synthetic oligonucleotide
cgtctacggcttgtcggttaacctggttgt

SEQ ID NO: 390860 - DNA, 30 bp, Artificial Sequence
  Synthetic oligonucleotide
caacaaccctggtagtcctcggctggttgt

SEQ ID NO: 390861 - DNA, 30 bp, Artificial Sequence
  Synthetic oligonucleotide
tcagccttaatagggcgtgtatctggttgt

SEQ ID NO: 390862 - DNA, 30 bp, Artificial Sequence
  Synthetic oligonucleotide
ggccagcgattgaccggtatagttggttgt

SEQ ID NO: 390863 - DNA, 30 bp, Artificial Sequence
  Synthetic oligonucleotide
ggataccgctagctcaagtgcaaatgttgt

SEQ ID NO: 390864 - DNA, 30 bp, Artificial Sequence
  Synthetic oligonucleotide
atgacctgtattacacgaggtgcatgttgt

SEQ ID NO: 390865 - DNA, 30 bp, Artificial Sequence
  Synthetic oligonucleotide
cctctggtccgagtaaatttccgctgttgt

SEQ ID NO: 390866 - DNA, 30 bp, Artificial Sequence
  Synthetic oligonucleotide
agtgccaggacctggttgctactctgttgt

SEQ ID NO: 390867 - DNA, 30 bp, Artificial Sequence
  Synthetic oligonucleotide
aaacaccattaaacgtaaggacagtgttgt

SEQ ID NO: 390868 - DNA, 30 bp, Artificial Sequence
  Synthetic oligonucleotide
gagccgctgacttaacagttggcgtgttgt

SEQ ID NO: 390869 - DNA, 30 bp, Artificial Sequence
  Synthetic oligonucleotide
ttttgtggagagctggcgcagtgttgttgt

SEQ ID NO: 390870 - DNA, 30 bp, Artificial Sequence
  Synthetic oligonucleotide
caaaggcttcggggccagcccaaaatttgt

SEQ ID NO: 390871 - DNA, 30 bp, Artificial Sequence
  Synthetic oligonucleotide
tggttggaacgaccagtaagggccatttgt

SEQ ID NO: 390872 - DNA, 30 bp, Artificial Sequence
  Synthetic oligonucleotide
gcaaataggagcgataatagcttcatttgt

SEQ ID NO: 390873 - DNA, 30 bp, Artificial Sequence
  Synthetic oligonucleotide
ggctcagaccgcgcgggcctagtgatttgt

SEQ ID NO: 390874 - DNA, 30 bp, Artificial Sequence
  Synthetic oligonucleotide
tgtcgatagcccttcttacttggtatttgt

SEQ ID NO: 390875 - DNA, 30 bp, Artificial Sequence
  Synthetic oligonucleotide
cgccaacgagtcacagcagtggcactttgt

SEQ ID NO: 390876 - DNA, 30 bp, Artificial Sequence
  Synthetic oligonucleotide
taaaaagtttatggctcgaaattactttgt

SEQ ID NO: 390877 - DNA, 30 bp, Artificial Sequence
  Synthetic oligonucleotide
ccgcggtccctggggtaggtattactttgt

SEQ ID NO: 390878 - DNA, 30 bp, Artificial Sequence
  Synthetic oligonucleotide
ggtggtgccgcctataggcatagcctttgt

SEQ ID NO: 390879 - DNA, 30 bp, Artificial Sequence
  Synthetic oligonucleotide
ggacattgacttttgaggtagcgcctttgt

SEQ ID NO: 390880 - DNA, 30 bp, Artificial Sequence
  Synthetic oligonucleotide
tgaatagagagactgactgctgatctttgt

SEQ ID NO: 390881 - DNA, 30 bp, Artificial Sequence
  Synthetic oligonucleotide
cactgtacggggggcgataatccagtttgt

SEQ ID NO: 390882 - DNA, 30 bp, Artificial Sequence
  Synthetic oligonucleotide
cttgtacacgagcggctcaacgcagtttgt

SEQ ID NO: 390883 - DNA, 30 bp, Artificial Sequence
  Synthetic oligonucleotide
cacatgtgtgtaccatactttatagtttgt

SEQ ID NO: 390884 - DNA, 30 bp, Artificial Sequence
  Synthetic oligonucleotide
agttcgcagggtccttaaaagcacgtttgt

SEQ ID NO: 390885 - DNA, 30 bp, Artificial Sequence
  Synthetic oligonucleotide
tagaacatctgcacacggtaatacgtttgt

SEQ ID NO: 390886 - DNA, 30 bp, Artificial Sequence
  Synthetic oligonucleotide
gtgtgtttaatggataaagatatcgtttgt

SEQ ID NO: 390887 - DNA, 30 bp, Artificial Sequence
  Synthetic oligonucleotide
ctaagcgactgttcagggccattcgtttgt

SEQ ID NO: 390888 - DNA, 30 bp, Artificial Sequence
  Synthetic oligonucleotide
ggagtgcatcatatcaagtctaaggtttgt

SEQ ID NO: 390889 - DNA, 30 bp, Artificial Sequence
  Synthetic oligonucleotide
atttgtactctttccgcggaattggtttgt

SEQ ID NO: 390890 - DNA, 30 bp, Artificial Sequence
  Synthetic oligonucleotide
cactacgtcatccgtagatgacatgtttgt

SEQ ID NO: 390891 - DNA, 30 bp, Artificial Sequence
  Synthetic oligonucleotide
gacgtgcaaataaatattaaggctgtttgt

SEQ ID NO: 390892 - DNA, 30 bp, Artificial Sequence
  Synthetic oligonucleotide
tatacgagcgaattgagtcagagtgtttgt

SEQ ID NO: 390893 - DNA, 30 bp, Artificial Sequence
  Synthetic oligonucleotide
taaacgtaaatcgtttaagagattgtttgt

SEQ ID NO: 390894 - DNA, 30 bp, Artificial Sequence
  Synthetic oligonucleotide
cctgaaagttcgataaatatttacttttgt

SEQ ID NO: 390895 - DNA, 30 bp, Artificial Sequence
  Synthetic oligonucleotide
gctctattccctcgctttctccccttttgt

SEQ ID NO: 390896 - DNA, 30 bp, Artificial Sequence
  Synthetic oligonucleotide
acgaagctggaatgctgtcaacgcttttgt

SEQ ID NO: 390897 - DNA, 30 bp, Artificial Sequence
  Synthetic oligonucleotide
ttaccccggttggaataacagttcttttgt

SEQ ID NO: 390898 - DNA, 30 bp, Artificial Sequence
  Synthetic oligonucleotide
aagagtagtagtcggtttaacaagttttgt

SEQ ID NO: 390899 - DNA, 30 bp, Artificial Sequence
  Synthetic oligonucleotide
gaaaacaatctattgtataccgagttttgt

SEQ ID NO: 390900 - DNA, 26 bp, Artificial Sequence
  Synthetic oligonucleotide
cgcggttttggtactaatcgttttgt

SEQ ID NO: 390901 - DNA, 30 bp, Artificial Sequence
  Synthetic oligonucleotide
gaggtggcagaataacgcccaatgttttgt

SEQ ID NO: 390902 - DNA, 30 bp, Artificial Sequence
  Synthetic oligonucleotide
gcctcgtaaagggtccgagccttgttttgt

SEQ ID NO: 390903 - DNA, 30 bp, Artificial Sequence
  Synthetic oligonucleotide
aaatacactagattcacgatagttttttgt

SEQ ID NO: 390904 - DNA, 30 bp, Artificial Sequence
  Synthetic oligonucleotide
tctcatccatcgctatacggctcaaaaatt

SEQ ID NO: 390905 - DNA, 30 bp, Artificial Sequence
  Synthetic oligonucleotide
agtgtctgccatgtgacacgagacaaaatt

SEQ ID NO: 390906 - DNA, 30 bp, Artificial Sequence
  Synthetic oligonucleotide
taggcggccgaattgtattcactcaaaatt

SEQ ID NO: 390907 - DNA, 30 bp, Artificial Sequence
  Synthetic oligonucleotide
ggacgagcagtcacttcggaagtgaaaatt

SEQ ID NO: 390908 - DNA, 30 bp, Artificial Sequence
  Synthetic oligonucleotide
atggaaagcttctagtaggcaaataaaatt

SEQ ID NO: 390909 - DNA, 30 bp, Artificial Sequence
  Synthetic oligonucleotide
atgtgtgatccgccctggttcgataaaatt

SEQ ID NO: 390910 - DNA, 30 bp, Artificial Sequence
  Synthetic oligonucleotide
ccatgaccaatcggcttcgcggctaaaatt

SEQ ID NO: 390911 - DNA, 30 bp, Artificial Sequence
  Synthetic oligonucleotide
gtattggagaaaaagatgccaggtaaaatt

SEQ ID NO: 390912 - DNA, 30 bp, Artificial Sequence
  Synthetic oligonucleotide
gtcaaacgcggtgccaacctcgttaaaatt

SEQ ID NO: 390913 - DNA, 30 bp, Artificial Sequence
  Synthetic oligonucleotide
gtccactttaggagtgaggaggaacaaatt

SEQ ID NO: 390914 - DNA, 30 bp, Artificial Sequence
  Synthetic oligonucleotide
aagggccgcgcgaaaagccgtggacaaatt

SEQ ID NO: 390915 - DNA, 30 bp, Artificial Sequence
  Synthetic oligonucleotide
aaggacgcagtctgaaatcgtatacaaatt

SEQ ID NO: 390916 - DNA, 30 bp, Artificial Sequence
  Synthetic oligonucleotide
gatcggtttcaaattgcttcatcccaaatt

SEQ ID NO: 390917 - DNA, 30 bp, Artificial Sequence
  Synthetic oligonucleotide
tagtaattaaatgatcatctgcgccaaatt

SEQ ID NO: 390918 - DNA, 30 bp, Artificial Sequence
  Synthetic oligonucleotide
accttcgttacgttacaactattccaaatt

SEQ ID NO: 390919 - DNA, 30 bp, Artificial Sequence
  Synthetic oligonucleotide
atcaagtgatgtacttattgcactcaaatt

SEQ ID NO: 390920 - DNA, 30 bp, Artificial Sequence
  Synthetic oligonucleotide
aagtgcttcgcgcctagatttaaagaaatt

SEQ ID NO: 390921 - DNA, 30 bp, Artificial Sequence
  Synthetic oligonucleotide
ttatatcggctgggtgcacagggagaaatt

SEQ ID NO: 390922 - DNA, 30 bp, Artificial Sequence
  Synthetic oligonucleotide
cccggtcggtgagaaacaggctgagaaatt

SEQ ID NO: 390923 - DNA, 30 bp, Artificial Sequence
  Synthetic oligonucleotide
tatgtctgatgtcttgaccaaaaggaaatt

SEQ ID NO: 390924 - DNA, 30 bp, Artificial Sequence
  Synthetic oligonucleotide
gtacaacggcagggacggtcatcggaaatt

SEQ ID NO: 390925 - DNA, 30 bp, Artificial Sequence
  Synthetic oligonucleotide
taggtgaactcgttagagtgcctggaaatt

SEQ ID NO: 390926 - DNA, 30 bp, Artificial Sequence
  Synthetic oligonucleotide
gtttacgtgtgcacatctgccactgaaatt

SEQ ID NO: 390927 - DNA, 30 bp, Artificial Sequence
  Synthetic oligonucleotide
tagggagaaagccccacaaaacttgaaatt

SEQ ID NO: 390928 - DNA, 30 bp, Artificial Sequence
  Synthetic oligonucleotide
taagccaatattcactacgtgaaataaatt

SEQ ID NO: 390929 - DNA, 30 bp, Artificial Sequence
  Synthetic oligonucleotide
taaggttcacccatcattgatccataaatt

SEQ ID NO: 390930 - DNA, 30 bp, Artificial Sequence
  Synthetic oligonucleotide
ggttgaactgtttgaaggtggtcataaatt

SEQ ID NO: 390931 - DNA, 30 bp, Artificial Sequence
  Synthetic oligonucleotide
gtatgtcccgttaattaaatgcgataaatt

SEQ ID NO: 390932 - DNA, 30 bp, Artificial Sequence
  Synthetic oligonucleotide
ggagtgcacatgggcagctttgtataaatt

SEQ ID NO: 390933 - DNA, 30 bp, Artificial Sequence
  Synthetic oligonucleotide
agtttcactatagcgagccgccactaaatt

SEQ ID NO: 390934 - DNA, 30 bp, Artificial Sequence
  Synthetic oligonucleotide
actcccaagatgttaaagctttcctaaatt

SEQ ID NO: 390935 - DNA, 30 bp, Artificial Sequence
  Synthetic oligonucleotide
taagacgcaaattataatatccagtaaatt

SEQ ID NO: 390936 - DNA, 30 bp, Artificial Sequence
  Synthetic oligonucleotide
aattacggatgatggttgtgagcgtaaatt

SEQ ID NO: 390937 - DNA, 30 bp, Artificial Sequence
  Synthetic oligonucleotide
cgagctttgcaagcactaatatgttaaatt

SEQ ID NO: 390938 - DNA, 30 bp, Artificial Sequence
  Synthetic oligonucleotide
gaggcaggaaggtaagatcttggaacaatt

SEQ ID NO: 390939 - DNA, 30 bp, Artificial Sequence
  Synthetic oligonucleotide
tcgatgtagatcatctaggtgttaacaatt

SEQ ID NO: 390940 - DNA, 30 bp, Artificial Sequence
  Synthetic oligonucleotide
tgcgggtataaaaacgtaaccggcacaatt

SEQ ID NO: 390941 - DNA, 30 bp, Artificial Sequence
  Synthetic oligonucleotide
cgaacgcctcttgcggcacccggcacaatt

SEQ ID NO: 390942 - DNA, 30 bp, Artificial Sequence
  Synthetic oligonucleotide
ctaatgcttcagtaacctgcctgcacaatt

SEQ ID NO: 390943 - DNA, 30 bp, Artificial Sequence
  Synthetic oligonucleotide
taatgtttggacaggcctcaccctacaatt

SEQ ID NO: 390944 - DNA, 30 bp, Artificial Sequence
  Synthetic oligonucleotide
tgcttgaatgtgattcatagggctacaatt

SEQ ID NO: 390945 - DNA, 30 bp, Artificial Sequence
  Synthetic oligonucleotide
tctgttgcagtcgggggttattttacaatt

SEQ ID NO: 390946 - DNA, 30 bp, Artificial Sequence
  Synthetic oligonucleotide
tactcaattgataccgaggtaggaccaatt

SEQ ID NO: 390947 - DNA, 30 bp, Artificial Sequence
  Synthetic oligonucleotide
ttacacggtgatatgttaaatttcccaatt

SEQ ID NO: 390948 - DNA, 30 bp, Artificial Sequence
  Synthetic oligonucleotide
tatactctctcagatgcttggattccaatt

SEQ ID NO: 390949 - DNA, 30 bp, Artificial Sequence
  Synthetic oligonucleotide
cctctgaaaagcctgagcgacgttccaatt

SEQ ID NO: 390950 - DNA, 30 bp, Artificial Sequence
  Synthetic oligonucleotide
tatcaacattccttattatcgtttccaatt

SEQ ID NO: 390951 - DNA, 30 bp, Artificial Sequence
  Synthetic oligonucleotide
accctgaactatgtagagagggcagcaatt

SEQ ID NO: 390952 - DNA, 30 bp, Artificial Sequence
  Synthetic oligonucleotide
ttgccagtgtcacagcgcatcacggcaatt

SEQ ID NO: 390953 - DNA, 30 bp, Artificial Sequence
  Synthetic oligonucleotide
ccaagattattaggaaatcgcgcggcaatt

SEQ ID NO: 390954 - DNA, 30 bp, Artificial Sequence
  Synthetic oligonucleotide
atctgttattataacaggtaccgggcaatt

SEQ ID NO: 390955 - DNA, 30 bp, Artificial Sequence
  Synthetic oligonucleotide
gccgtcatcctgacaaacttccgggcaatt

SEQ ID NO: 390956 - DNA, 30 bp, Artificial Sequence
  Synthetic oligonucleotide
aagacctgaagattcaaacgaactgcaatt

SEQ ID NO: 390957 - DNA, 30 bp, Artificial Sequence
  Synthetic oligonucleotide
atccggtgaatttctcgacaacgtgcaatt

SEQ ID NO: 390958 - DNA, 30 bp, Artificial Sequence
  Synthetic oligonucleotide
ttttaaaattccgagatacaagtatcaatt

SEQ ID NO: 390959 - DNA, 30 bp, Artificial Sequence
  Synthetic oligonucleotide
ttcgtgtgagcacagaaggttttatcaatt

SEQ ID NO: 390960 - DNA, 30 bp, Artificial Sequence
  Synthetic oligonucleotide
gataactagtcgagttcttaaaactcaatt

SEQ ID NO: 390961 - DNA, 30 bp, Artificial Sequence
  Synthetic oligonucleotide
tcaattcgcggcatgggactgctctcaatt

SEQ ID NO: 390962 - DNA, 30 bp, Artificial Sequence
  Synthetic oligonucleotide
ggtacgacgcggaaaattccaccgtcaatt

SEQ ID NO: 390963 - DNA, 30 bp, Artificial Sequence
  Synthetic oligonucleotide
tccgccatacccgaagtacgtcattcaatt

SEQ ID NO: 390964 - DNA, 30 bp, Artificial Sequence
  Synthetic oligonucleotide
acctttcacactcatatacaaagttcaatt

SEQ ID NO: 390965 - DNA, 30 bp, Artificial Sequence
  Synthetic oligonucleotide
agttctaagctagatcgatactgttcaatt

SEQ ID NO: 390966 - DNA, 30 bp, Artificial Sequence
  Synthetic oligonucleotide
aggggctaaggaggttttgcaatttcaatt

SEQ ID NO: 390967 - DNA, 30 bp, Artificial Sequence
  Synthetic oligonucleotide
gtgtgtaggtacaatatgcgtctttcaatt

SEQ ID NO: 390968 - DNA, 30 bp, Artificial Sequence
  Synthetic oligonucleotide
actacttcatagaccagttgcacaagaatt

SEQ ID NO: 390969 - DNA, 30 bp, Artificial Sequence
  Synthetic oligonucleotide
cactcacgtagatggcgtaatcgaagaatt

SEQ ID NO: 390970 - DNA, 30 bp, Artificial Sequence
  Synthetic oligonucleotide
ttgggattaatataaaaggcactaagaatt

SEQ ID NO: 390971 - DNA, 30 bp, Artificial Sequence
  Synthetic oligonucleotide
ataagtgaagctacccgtttgtacagaatt

SEQ ID NO: 390972 - DNA, 30 bp, Artificial Sequence
  Synthetic oligonucleotide
ttacacatgtctacaaagaaattcagaatt

SEQ ID NO: 390973 - DNA, 30 bp, Artificial Sequence
  Synthetic oligonucleotide
ttgggtctggtgtacattaagtgtagaatt

SEQ ID NO: 390974 - DNA, 30 bp, Artificial Sequence
  Synthetic oligonucleotide
ctttatcaaaccttaccacgggttagaatt

SEQ ID NO: 390975 - DNA, 30 bp, Artificial Sequence
  Synthetic oligonucleotide
tttcgacacgatacaaggttcggcggaatt

SEQ ID NO: 390976 - DNA, 30 bp, Artificial Sequence
  Synthetic oligonucleotide
caagacccccttcggggagcgtgcggaatt

SEQ ID NO: 390977 - DNA, 30 bp, Artificial Sequence
  Synthetic oligonucleotide
cacgggggctggggcggtcgttcgggaatt

SEQ ID NO: 390978 - DNA, 30 bp, Artificial Sequence
  Synthetic oligonucleotide
gtaagctccaaggttcgttataggggaatt

SEQ ID NO: 390979 - DNA, 30 bp, Artificial Sequence
  Synthetic oligonucleotide
cctatgctttaggaacctccgtctggaatt

SEQ ID NO: 390980 - DNA, 30 bp, Artificial Sequence
  Synthetic oligonucleotide
tataaaaagcctccttcaaggagtggaatt

SEQ ID NO: 390981 - DNA, 30 bp, Artificial Sequence
  Synthetic oligonucleotide
cccaggtttttcccccatttcagatgaatt

SEQ ID NO: 390982 - DNA, 30 bp, Artificial Sequence
  Synthetic oligonucleotide
gctacgaatttgatgtagtatagatgaatt

SEQ ID NO: 390983 - DNA, 30 bp, Artificial Sequence
  Synthetic oligonucleotide
cgcttacttcaagatgattattgatgaatt

SEQ ID NO: 390984 - DNA, 30 bp, Artificial Sequence
  Synthetic oligonucleotide
ctaactcccgctagaggctagcagtgaatt

SEQ ID NO: 390985 - DNA, 30 bp, Artificial Sequence
  Synthetic oligonucleotide
tcgtttaattctgggcgaatggcgtgaatt

SEQ ID NO: 390986 - DNA, 30 bp, Artificial Sequence
  Synthetic oligonucleotide
tatgctcgcttcttcagaaaccggtgaatt

SEQ ID NO: 390987 - DNA, 30 bp, Artificial Sequence
  Synthetic oligonucleotide
gggagtaattttttaatattatggtgaatt

SEQ ID NO: 390988 - DNA, 30 bp, Artificial Sequence
  Synthetic oligonucleotide
aacatgttaaggttggaataacattgaatt

SEQ ID NO: 390989 - DNA, 30 bp, Artificial Sequence
  Synthetic oligonucleotide
gcaggatggcaacaacgcgacgattgaatt

SEQ ID NO: 390990 - DNA, 30 bp, Artificial Sequence
  Synthetic oligonucleotide
cctaagtctctaagtattaggtattgaatt

SEQ ID NO: 390991 - DNA, 30 bp, Artificial Sequence
  Synthetic oligonucleotide
aaccccttaagagctattgtttattgaatt

SEQ ID NO: 390992 - DNA, 30 bp, Artificial Sequence
  Synthetic oligonucleotide
acgtgatttcactaggattggtcttgaatt

SEQ ID NO: 390993 - DNA, 30 bp, Artificial Sequence
  Synthetic oligonucleotide
accgcgcctacggccgtagagcaaataatt

SEQ ID NO: 390994 - DNA, 30 bp, Artificial Sequence
  Synthetic oligonucleotide
attggttagcttcaaaggggttcaataatt

SEQ ID NO: 390995 - DNA, 30 bp, Artificial Sequence
  Synthetic oligonucleotide
atacctagcaaatgcctcatgcacataatt

SEQ ID NO: 390996 - DNA, 30 bp, Artificial Sequence
  Synthetic oligonucleotide
tatgagatcaagcttatactaaccataatt

SEQ ID NO: 390997 - DNA, 30 bp, Artificial Sequence
  Synthetic oligonucleotide
cataaggcacaaattcttggtatcataatt

SEQ ID NO: 390998 - DNA, 30 bp, Artificial Sequence
  Synthetic oligonucleotide
ccgaagtatcccgcgtttctgaagataatt

SEQ ID NO: 390999 - DNA, 30 bp, Artificial Sequence
  Synthetic oligonucleotide
ttatttggcaagcagcaagccaaactaatt

SEQ ID NO: 391000 - DNA, 30 bp, Artificial Sequence
  Synthetic oligonucleotide
ggggtgttatatgttaaacataagctaatt

SEQ ID NO: 391001 - DNA, 30 bp, Artificial Sequence
  Synthetic oligonucleotide
agtgggtaaagcatggttaggcagctaatt

SEQ ID NO: 391002 - DNA, 30 bp, Artificial Sequence
  Synthetic oligonucleotide
caaccctcgggctccaagggatgagtaatt

SEQ ID NO: 391003 - DNA, 30 bp, Artificial Sequence
  Synthetic oligonucleotide
aagtctggtacagatgcataggacgtaatt

SEQ ID NO: 391004 - DNA, 30 bp, Artificial Sequence
  Synthetic oligonucleotide
tgaatacggatgtcgtgcccacgcgtaatt

SEQ ID NO: 391005 - DNA, 30 bp, Artificial Sequence
  Synthetic oligonucleotide
acgtgcagctccagttcatgtggggtaatt

SEQ ID NO: 391006 - DNA, 30 bp, Artificial Sequence
  Synthetic oligonucleotide
agactagttcctaattccgactgggtaatt

SEQ ID NO: 391007 - DNA, 30 bp, Artificial Sequence
  Synthetic oligonucleotide
ttacggagcaccgggccaattttggtaatt

SEQ ID NO: 391008 - DNA, 30 bp, Artificial Sequence
  Synthetic oligonucleotide
tgtcttggcatacccgaatatagtgtaatt

SEQ ID NO: 391009 - DNA, 30 bp, Artificial Sequence
  Synthetic oligonucleotide
aacgaacatagggggtcttaaattgtaatt

SEQ ID NO: 391010 - DNA, 30 bp, Artificial Sequence
  Synthetic oligonucleotide
ctggattaggaaacaagttcgagattaatt

SEQ ID NO: 391011 - DNA, 30 bp, Artificial Sequence
  Synthetic oligonucleotide
taagtgacgcctaatcgccctaccttaatt

SEQ ID NO: 391012 - DNA, 30 bp, Artificial Sequence
  Synthetic oligonucleotide
ataaacggtagttgggtaatttgcttaatt

SEQ ID NO: 391013 - DNA, 30 bp, Artificial Sequence
  Synthetic oligonucleotide
atcttacatagttcactaaccgggttaatt

SEQ ID NO: 391014 - DNA, 30 bp, Artificial Sequence
  Synthetic oligonucleotide
gaccttcactctttactccggggtttaatt

SEQ ID NO: 391015 - DNA, 30 bp, Artificial Sequence
  Synthetic oligonucleotide
cagaagaatcactagcttaaagtaaacatt

SEQ ID NO: 391016 - DNA, 30 bp, Artificial Sequence
  Synthetic oligonucleotide
ataatccggtctctcctacaggccaacatt

SEQ ID NO: 391017 - DNA, 30 bp, Artificial Sequence
  Synthetic oligonucleotide
agacagagcaaatagaggttgatcaacatt

SEQ ID NO: 391018 - DNA, 30 bp, Artificial Sequence
  Synthetic oligonucleotide
tttcctcagcataaccgtaataggaacatt

SEQ ID NO: 391019 - DNA, 30 bp, Artificial Sequence
  Synthetic oligonucleotide
tcctgaacgaggggtaatggtactaacatt

SEQ ID NO: 391020 - DNA, 30 bp, Artificial Sequence
  Synthetic oligonucleotide
ggagcgtccacgaatgtcaccggtaacatt

SEQ ID NO: 391021 - DNA, 30 bp, Artificial Sequence
  Synthetic oligonucleotide
tttctggacgacaatgtgggccaacacatt

SEQ ID NO: 391022 - DNA, 30 bp, Artificial Sequence
  Synthetic oligonucleotide
gtcataaaatctgcatctcgtttacacatt

SEQ ID NO: 391023 - DNA, 30 bp, Artificial Sequence
  Synthetic oligonucleotide
atatgggtgtcttcaaatcatgaccacatt

SEQ ID NO: 391024 - DNA, 30 bp, Artificial Sequence
  Synthetic oligonucleotide
gatgttttatacgcgtccactggccacatt

SEQ ID NO: 391025 - DNA, 30 bp, Artificial Sequence
  Synthetic oligonucleotide
cgacgatcccaggacgtcacgccgcacatt

SEQ ID NO: 391026 - DNA, 30 bp, Artificial Sequence
  Synthetic oligonucleotide
atagtctgcgagcggaagaccttgcacatt

SEQ ID NO: 391027 - DNA, 30 bp, Artificial Sequence
  Synthetic oligonucleotide
gacggcaccctccgggtatggttgcacatt

SEQ ID NO: 391028 - DNA, 30 bp, Artificial Sequence
  Synthetic oligonucleotide
gagcgtccctctggcttacctcgagacatt

SEQ ID NO: 391029 - DNA, 30 bp, Artificial Sequence
  Synthetic oligonucleotide
tcatctagcagttggcattctctagacatt

SEQ ID NO: 391030 - DNA, 30 bp, Artificial Sequence
  Synthetic oligonucleotide
ttcgatgaagggctctgtggggtagacatt

SEQ ID NO: 391031 - DNA, 30 bp, Artificial Sequence
  Synthetic oligonucleotide
caatcctgattacgctttagacatgacatt

SEQ ID NO: 391032 - DNA, 30 bp, Artificial Sequence
  Synthetic oligonucleotide
tgttgtactgcaatgtcatgcgctgacatt

SEQ ID NO: 391033 - DNA, 30 bp, Artificial Sequence
  Synthetic oligonucleotide
gagaatcgggtcgcgggtttgaaatacatt

SEQ ID NO: 391034 - DNA, 30 bp, Artificial Sequence
  Synthetic oligonucleotide
gagatcactaatgtggtgtatgaatacatt

SEQ ID NO: 391035 - DNA, 29 bp, Artificial Sequence
  Synthetic oligonucleotide
cagcagctcaaatgtgccgtctctacatt

SEQ ID NO: 391036 - DNA, 30 bp, Artificial Sequence
  Synthetic oligonucleotide
aaaggaggacgtacataaagtttctacatt

SEQ ID NO: 391037 - DNA, 30 bp, Artificial Sequence
  Synthetic oligonucleotide
cgccatatcagcacgctgatgccgtacatt

SEQ ID NO: 391038 - DNA, 30 bp, Artificial Sequence
  Synthetic oligonucleotide
aagtcgcattaactacgcatggcgtacatt

SEQ ID NO: 391039 - DNA, 30 bp, Artificial Sequence
  Synthetic oligonucleotide
gtaacgttgtacacagggcaaatgtacatt

SEQ ID NO: 391040 - DNA, 30 bp, Artificial Sequence
  Synthetic oligonucleotide
ttactagaagaacccggaccatgttacatt

SEQ ID NO: 391041 - DNA, 30 bp, Artificial Sequence
  Synthetic oligonucleotide
gactaatactttggcgtcgggtgttacatt

SEQ ID NO: 391042 - DNA, 30 bp, Artificial Sequence
  Synthetic oligonucleotide
gggactcaaagcttacgcactctttacatt

SEQ ID NO: 391043 - DNA, 30 bp, Artificial Sequence
  Synthetic oligonucleotide
tcgccatattggacaaaatgatgaaccatt

SEQ ID NO: 391044 - DNA, 30 bp, Artificial Sequence
  Synthetic oligonucleotide
gtaagttcgccaggggtgttactaaccatt

SEQ ID NO: 391045 - DNA, 30 bp, Artificial Sequence
  Synthetic oligonucleotide
agacccttggtgaaagccgagcacaccatt

SEQ ID NO: 391046 - DNA, 30 bp, Artificial Sequence
  Synthetic oligonucleotide
gggatacaactcctcctgtagccgaccatt

SEQ ID NO: 391047 - DNA, 30 bp, Artificial Sequence
  Synthetic oligonucleotide
gagttgagagaagtcacgaggaagcccatt

SEQ ID NO: 391048 - DNA, 30 bp, Artificial Sequence
  Synthetic oligonucleotide
actcaccgctatagcgacatggggcccatt

SEQ ID NO: 391049 - DNA, 30 bp, Artificial Sequence
  Synthetic oligonucleotide
ctttcgatatagttgctataatatcccatt

SEQ ID NO: 391050 - DNA, 30 bp, Artificial Sequence
  Synthetic oligonucleotide
cggaaacctctgtggtccggaagtcccatt

SEQ ID NO: 391051 - DNA, 30 bp, Artificial Sequence
  Synthetic oligonucleotide
gacaactggtactatgtagcaaaagccatt

SEQ ID NO: 391052 - DNA, 30 bp, Artificial Sequence
  Synthetic oligonucleotide
gaggataagaagaaagggttcaaagccatt

SEQ ID NO: 391053 - DNA, 30 bp, Artificial Sequence
  Synthetic oligonucleotide
acggccacgggggcgagaatctaagccatt

SEQ ID NO: 391054 - DNA, 30 bp, Artificial Sequence
  Synthetic oligonucleotide
acataattcaggcctcttaatcaggccatt

SEQ ID NO: 391055 - DNA, 30 bp, Artificial Sequence
  Synthetic oligonucleotide
cagagtccctaattttccttgtgggccatt

SEQ ID NO: 391056 - DNA, 30 bp, Artificial Sequence
  Synthetic oligonucleotide
ggcctgcatacggaatcggcgcaatccatt

SEQ ID NO: 391057 - DNA, 30 bp, Artificial Sequence
  Synthetic oligonucleotide
gctttaaaacggatccagtctcaatccatt

SEQ ID NO: 391058 - DNA, 30 bp, Artificial Sequence
  Synthetic oligonucleotide
gttcgaccagtttcggagggtaactccatt

SEQ ID NO: 391059 - DNA, 30 bp, Artificial Sequence
  Synthetic oligonucleotide
agtgctcctatcggtgagggcttgtccatt

SEQ ID NO: 391060 - DNA, 30 bp, Artificial Sequence
  Synthetic oligonucleotide
agctaaataatagtctagcgtccttccatt

SEQ ID NO: 391061 - DNA, 30 bp, Artificial Sequence
  Synthetic oligonucleotide
cattatagataagcacataattgttccatt

SEQ ID NO: 391062 - DNA, 30 bp, Artificial Sequence
  Synthetic oligonucleotide
agtccgatgtggacgacccctccaagcatt

SEQ ID NO: 391063 - DNA, 30 bp, Artificial Sequence
  Synthetic oligonucleotide
gttcgtgtgcggctaatattcataagcatt

SEQ ID NO: 391064 - DNA, 30 bp, Artificial Sequence
  Synthetic oligonucleotide
taagcaccgaggtgagatagacacagcatt

SEQ ID NO: 391065 - DNA, 30 bp, Artificial Sequence
  Synthetic oligonucleotide
ttgtcaatctggcgtacagctgatagcatt

SEQ ID NO: 391066 - DNA, 30 bp, Artificial Sequence
  Synthetic oligonucleotide
cggccggtgagaagcgacgcaacacgcatt

SEQ ID NO: 391067 - DNA, 30 bp, Artificial Sequence
  Synthetic oligonucleotide
cgaaacacgttatacgatattatacgcatt

SEQ ID NO: 391068 - DNA, 30 bp, Artificial Sequence
  Synthetic oligonucleotide
gaaactaagttgagtcactgatcccgcatt

SEQ ID NO: 391069 - DNA, 30 bp, Artificial Sequence
  Synthetic oligonucleotide
ataatctctctcgaaacgggttcccgcatt

SEQ ID NO: 391070 - DNA, 30 bp, Artificial Sequence
  Synthetic oligonucleotide
cagtaactgacttagtgcaacgtccgcatt

SEQ ID NO: 391071 - DNA, 31 bp, Artificial Sequence
  Synthetic oligonucleotide
tgtgagcctacaactcactttaaggcgcatt

SEQ ID NO: 391072 - DNA, 30 bp, Artificial Sequence
  Synthetic oligonucleotide
gtttgagtgagtgggttgggggtgcgcatt

SEQ ID NO: 391073 - DNA, 30 bp, Artificial Sequence
  Synthetic oligonucleotide
ggtaagctttgagcgagtaatactcgcatt

SEQ ID NO: 391074 - DNA, 30 bp, Artificial Sequence
  Synthetic oligonucleotide
tgaaccagtcagtgtggctgttttcgcatt

SEQ ID NO: 391075 - DNA, 30 bp, Artificial Sequence
  Synthetic oligonucleotide
actggagtagcttacgcaccgcaaggcatt

SEQ ID NO: 391076 - DNA, 30 bp, Artificial Sequence
  Synthetic oligonucleotide
tgggagagcctagcttcgtcactaggcatt

SEQ ID NO: 391077 - DNA, 30 bp, Artificial Sequence
  Synthetic oligonucleotide
ctgaccgttgaccggtgacgactcggcatt

SEQ ID NO: 391078 - DNA, 30 bp, Artificial Sequence
  Synthetic oligonucleotide
cttcagcgggatcttcggattacgggcatt

SEQ ID NO: 391079 - DNA, 30 bp, Artificial Sequence
  Synthetic oligonucleotide
tccggcggtaaaagcatcgatcggggcatt

SEQ ID NO: 391080 - DNA, 30 bp, Artificial Sequence
  Synthetic oligonucleotide
aagccgcgtaatccccagcacactggcatt

SEQ ID NO: 391081 - DNA, 30 bp, Artificial Sequence
  Synthetic oligonucleotide
ttaggtgaaaattgattttgcgctggcatt

SEQ ID NO: 391082 - DNA, 30 bp, Artificial Sequence
  Synthetic oligonucleotide
attatattcccaaaaatgacattatgcatt

SEQ ID NO: 391083 - DNA, 30 bp, Artificial Sequence
  Synthetic oligonucleotide
atgtcggtactggtgtgtggattatgcatt

SEQ ID NO: 391084 - DNA, 30 bp, Artificial Sequence
  Synthetic oligonucleotide
tccacgcatcaaggccggtttcactgcatt

SEQ ID NO: 391085 - DNA, 30 bp, Artificial Sequence
  Synthetic oligonucleotide
ctcccaattattgaaacatgatactgcatt

SEQ ID NO: 391086 - DNA, 30 bp, Artificial Sequence
  Synthetic oligonucleotide
agcaggacgccagcttcgtctaattgcatt

SEQ ID NO: 391087 - DNA, 30 bp, Artificial Sequence
  Synthetic oligonucleotide
atggacacttttttaccggtgtcttgcatt

SEQ ID NO: 391088 - DNA, 30 bp, Artificial Sequence
  Synthetic oligonucleotide
gtagcatgagcatagggccatagaatcatt

SEQ ID NO: 391089 - DNA, 30 bp, Artificial Sequence
  Synthetic oligonucleotide
ctgttcgtctgggtccatgcaataatcatt

SEQ ID NO: 391090 - DNA, 30 bp, Artificial Sequence
  Synthetic oligonucleotide
ccgatggtgtagatgttcctgataatcatt

SEQ ID NO: 391091 - DNA, 30 bp, Artificial Sequence
  Synthetic oligonucleotide
cattcatccagtcgaggtacggtcatcatt

SEQ ID NO: 391092 - DNA, 30 bp, Artificial Sequence
  Synthetic oligonucleotide
attaaatagcgttccaaataacatatcatt

SEQ ID NO: 391093 - DNA, 30 bp, Artificial Sequence
  Synthetic oligonucleotide
tcgttagtacaaacacagttgactatcatt

SEQ ID NO: 391094 - DNA, 30 bp, Artificial Sequence
  Synthetic oligonucleotide
agatcagagccgcgcccttcgtgtatcatt

SEQ ID NO: 391095 - DNA, 30 bp, Artificial Sequence
  Synthetic oligonucleotide
tgccccgtactggtccgtccatcactcatt

SEQ ID NO: 391096 - DNA, 30 bp, Artificial Sequence
  Synthetic oligonucleotide
acgctgagtctccccctcagcgtactcatt

SEQ ID NO: 391097 - DNA, 30 bp, Artificial Sequence
  Synthetic oligonucleotide
aatgagagctgaaggagccaattactcatt

SEQ ID NO: 391098 - DNA, 30 bp, Artificial Sequence
  Synthetic oligonucleotide
atcatatttgagggcgaccagtccctcatt

SEQ ID NO: 391099 - DNA, 30 bp, Artificial Sequence
  Synthetic oligonucleotide
gcgtaatgatgacatgaagcatagctcatt

SEQ ID NO: 391100 - DNA, 30 bp, Artificial Sequence
  Synthetic oligonucleotide
acaatttctagaagagtaatatagctcatt

SEQ ID NO: 391101 - DNA, 30 bp, Artificial Sequence
  Synthetic oligonucleotide
actcaccgtggctatcgtaacttgctcatt

SEQ ID NO: 391102 - DNA, 30 bp, Artificial Sequence
  Synthetic oligonucleotide
acaagctttaaggcattaagacatgtcatt

SEQ ID NO: 391103 - DNA, 30 bp, Artificial Sequence
  Synthetic oligonucleotide
gatttgtgcaatatcaggacaaaattcatt

SEQ ID NO: 391104 - DNA, 30 bp, Artificial Sequence
  Synthetic oligonucleotide
tctgcggtcaagctcttgactgcattcatt

SEQ ID NO: 391105 - DNA, 30 bp, Artificial Sequence
  Synthetic oligonucleotide
aaatgggtatgtacttcgagtaggttcatt

SEQ ID NO: 391106 - DNA, 30 bp, Artificial Sequence
  Synthetic oligonucleotide
atgtacctaatctcctcaggtctgttcatt

SEQ ID NO: 391107 - DNA, 30 bp, Artificial Sequence
  Synthetic oligonucleotide
cgtggttagccgctcggcgtagatttcatt

SEQ ID NO: 391108 - DNA, 30 bp, Artificial Sequence
  Synthetic oligonucleotide
cgaagtttcctagactttactagtttcatt

SEQ ID NO: 391109 - DNA, 30 bp, Artificial Sequence
  Synthetic oligonucleotide
tgtaccggttacctcatgtggaaaaagatt

SEQ ID NO: 391110 - DNA, 30 bp, Artificial Sequence
  Synthetic oligonucleotide
actcatgggctccacccaagagccaagatt

SEQ ID NO: 391111 - DNA, 30 bp, Artificial Sequence
  Synthetic oligonucleotide
atcagtcgcaggttcgaagttggcaagatt

SEQ ID NO: 391112 - DNA, 30 bp, Artificial Sequence
  Synthetic oligonucleotide
cgcatgtccctccgctcaaattagaagatt

SEQ ID NO: 391113 - DNA, 30 bp, Artificial Sequence
  Synthetic oligonucleotide
cggctttcgggcaaagccccatcgaagatt

SEQ ID NO: 391114 - DNA, 30 bp, Artificial Sequence
  Synthetic oligonucleotide
tacgacgaacatttttttcaggtgaagatt

SEQ ID NO: 391115 - DNA, 30 bp, Artificial Sequence
  Synthetic oligonucleotide
tgattatcaagtagggagggctaacagatt

SEQ ID NO: 391116 - DNA, 30 bp, Artificial Sequence
  Synthetic oligonucleotide
ttcttgcctaactacattgagctacagatt

SEQ ID NO: 391117 - DNA, 30 bp, Artificial Sequence
  Synthetic oligonucleotide
ttttgaaccgggtagggcaatcgccagatt

SEQ ID NO: 391118 - DNA, 30 bp, Artificial Sequence
  Synthetic oligonucleotide
agagttcaggaggttcatgctggccagatt

SEQ ID NO: 391119 - DNA, 30 bp, Artificial Sequence
  Synthetic oligonucleotide
tgtctcagaaaacaaccggagtatcagatt

SEQ ID NO: 391120 - DNA, 30 bp, Artificial Sequence
  Synthetic oligonucleotide
ctcgaaagtgacagcaaaacggctcagatt

SEQ ID NO: 391121 - DNA, 30 bp, Artificial Sequence
  Synthetic oligonucleotide
gacgcatcttccaggacaacttaagagatt

SEQ ID NO: 391122 - DNA, 30 bp, Artificial Sequence
  Synthetic oligonucleotide
agcgggaccccgacgcttacctaggagatt

SEQ ID NO: 391123 - DNA, 30 bp, Artificial Sequence
  Synthetic oligonucleotide
tagtacttttcggtattgattagggagatt

SEQ ID NO: 391124 - DNA, 30 bp, Artificial Sequence
  Synthetic oligonucleotide
actatcggttcagttattgctggggagatt

SEQ ID NO: 391125 - DNA, 30 bp, Artificial Sequence
  Synthetic oligonucleotide
tgatatcgtctacgacggatttatgagatt

SEQ ID NO: 391126 - DNA, 30 bp, Artificial Sequence
  Synthetic oligonucleotide
tattgcttcgttccaattggttgtgagatt

SEQ ID NO: 391127 - DNA, 30 bp, Artificial Sequence
  Synthetic oligonucleotide
tttcgctactgccgttaactaggatagatt

SEQ ID NO: 391128 - DNA, 30 bp, Artificial Sequence
  Synthetic oligonucleotide
gtactcattcctactcgaactttatagatt

SEQ ID NO: 391129 - DNA, 30 bp, Artificial Sequence
  Synthetic oligonucleotide
aagtccagtgaaagccaagtttactagatt

SEQ ID NO: 391130 - DNA, 30 bp, Artificial Sequence
  Synthetic oligonucleotide
tcaagctaatctcacattgtggcctagatt

SEQ ID NO: 391131 - DNA, 30 bp, Artificial Sequence
  Synthetic oligonucleotide
cccacatagacaagtggattggcttagatt

SEQ ID NO: 391132 - DNA, 30 bp, Artificial Sequence
  Synthetic oligonucleotide
gtcacaatttactatggaaaaatttagatt

SEQ ID NO: 391133 - DNA, 30 bp, Artificial Sequence
  Synthetic oligonucleotide
ctgttatccctctggctaccttccacgatt

SEQ ID NO: 391134 - DNA, 30 bp, Artificial Sequence
  Synthetic oligonucleotide
ggaacaggtattccaactgttgtcacgatt

SEQ ID NO: 391135 - DNA, 30 bp, Artificial Sequence
  Synthetic oligonucleotide
aagaatcaatcgcatctgattcagacgatt

SEQ ID NO: 391136 - DNA, 30 bp, Artificial Sequence
  Synthetic oligonucleotide
acaaattttctacattctactgttacgatt

SEQ ID NO: 391137 - DNA, 30 bp, Artificial Sequence
  Synthetic oligonucleotide
ggttagagcgcaaatcgaagatgaccgatt

SEQ ID NO: 391138 - DNA, 30 bp, Artificial Sequence
  Synthetic oligonucleotide
gtgatatggggatttgacggatgaccgatt

SEQ ID NO: 391139 - DNA, 30 bp, Artificial Sequence
  Synthetic oligonucleotide
ttagctcgccgacagaccggctgaccgatt

SEQ ID NO: 391140 - DNA, 30 bp, Artificial Sequence
  Synthetic oligonucleotide
gagattaatatggtgaaagtagccccgatt

SEQ ID NO: 391141 - DNA, 30 bp, Artificial Sequence
  Synthetic oligonucleotide
atcgaaaccatcggtatggccggtccgatt

SEQ ID NO: 391142 - DNA, 30 bp, Artificial Sequence
  Synthetic oligonucleotide
agtcggacaggggcatacttactagcgatt

SEQ ID NO: 391143 - DNA, 30 bp, Artificial Sequence
  Synthetic oligonucleotide
gagaagaaagagcccgggcgcaacgcgatt

SEQ ID NO: 391144 - DNA, 30 bp, Artificial Sequence
  Synthetic oligonucleotide
atccattagtcgtcttaacacgccgcgatt

SEQ ID NO: 391145 - DNA, 30 bp, Artificial Sequence
  Synthetic oligonucleotide
acggggcaatctcttatcggccgcgcgatt

SEQ ID NO: 391146 - DNA, 30 bp, Artificial Sequence
  Synthetic oligonucleotide
atcgaatgagccttcgtggcttcggcgatt

SEQ ID NO: 391147 - DNA, 30 bp, Artificial Sequence
  Synthetic oligonucleotide
aagcacgcatgactatttttacatgcgatt

SEQ ID NO: 391148 - DNA, 30 bp, Artificial Sequence
  Synthetic oligonucleotide
aagcagtcattcaacagcggctatgcgatt

SEQ ID NO: 391149 - DNA, 30 bp, Artificial Sequence
  Synthetic oligonucleotide
ctccgtaaaccacacggtacggtatcgatt

SEQ ID NO: 391150 - DNA, 30 bp, Artificial Sequence
  Synthetic oligonucleotide
gagggcgaagacctgatccaaaactcgatt

SEQ ID NO: 391151 - DNA, 30 bp, Artificial Sequence
  Synthetic oligonucleotide
cagtaattaacctcgcgcgttgggtcgatt

SEQ ID NO: 391152 - DNA, 30 bp, Artificial Sequence
  Synthetic oligonucleotide
aactgtttgctatatcaatgaagaaggatt

SEQ ID NO: 391153 - DNA, 30 bp, Artificial Sequence
  Synthetic oligonucleotide
ggggtcaatgtcacatccacgtgaaggatt

SEQ ID NO: 391154 - DNA, 30 bp, Artificial Sequence
  Synthetic oligonucleotide
acttcctaggtattcacctgcgtcaggatt

SEQ ID NO: 391155 - DNA, 30 bp, Artificial Sequence
  Synthetic oligonucleotide
gttgacgacgcttcgacgatcttcaggatt

SEQ ID NO: 391156 - DNA, 30 bp, Artificial Sequence
  Synthetic oligonucleotide
cgtggagggaatgatccatcgtggaggatt

SEQ ID NO: 391157 - DNA, 30 bp, Artificial Sequence
  Synthetic oligonucleotide
tatgatgcgactatgtggccgttgaggatt

SEQ ID NO: 391158 - DNA, 30 bp, Artificial Sequence
  Synthetic oligonucleotide
agactagggataggtgttgaccataggatt

SEQ ID NO: 391159 - DNA, 30 bp, Artificial Sequence
  Synthetic oligonucleotide
ctatggcgtaagaggtgttacgataggatt

SEQ ID NO: 391160 - DNA, 30 bp, Artificial Sequence
  Synthetic oligonucleotide
ctcgctattactcccgtcgttgataggatt

SEQ ID NO: 391161 - DNA, 30 bp, Artificial Sequence
  Synthetic oligonucleotide
taaggtatgttacaagggcaacttaggatt

SEQ ID NO: 391162 - DNA, 30 bp, Artificial Sequence
  Synthetic oligonucleotide
gcgccgacaagctaatcgtcgtcacggatt

SEQ ID NO: 391163 - DNA, 30 bp, Artificial Sequence
  Synthetic oligonucleotide
gaggactggtaattatgcccgcgacggatt

SEQ ID NO: 391164 - DNA, 30 bp, Artificial Sequence
  Synthetic oligonucleotide
aaattactatctacgaattgtgtacggatt

SEQ ID NO: 391165 - DNA, 30 bp, Artificial Sequence
  Synthetic oligonucleotide
ggccatcaagggtttggaagatcccggatt

SEQ ID NO: 391166 - DNA, 30 bp, Artificial Sequence
  Synthetic oligonucleotide
aaggatgcggatgatcacgcgggccggatt

SEQ ID NO: 391167 - DNA, 30 bp, Artificial Sequence
  Synthetic oligonucleotide
ttgtggcatcgtttatattttatccggatt

SEQ ID NO: 391168 - DNA, 30 bp, Artificial Sequence
  Synthetic oligonucleotide
actttcgccagaggcttatggcagcggatt

SEQ ID NO: 391169 - DNA, 30 bp, Artificial Sequence
  Synthetic oligonucleotide
aataaagttcttcccggtcattcgcggatt

SEQ ID NO: 391170 - DNA, 30 bp, Artificial Sequence
  Synthetic oligonucleotide
gaatatagaaccaaccacccacctcggatt

SEQ ID NO: 391171 - DNA, 30 bp, Artificial Sequence
  Synthetic oligonucleotide
gcaatcatccgaattcatgaatctcggatt

SEQ ID NO: 391172 - DNA, 30 bp, Artificial Sequence
  Synthetic oligonucleotide
tatgccagcacactccgttactaagggatt

SEQ ID NO: 391173 - DNA, 30 bp, Artificial Sequence
  Synthetic oligonucleotide
aatcactcagacgccaacgggccggggatt

SEQ ID NO: 391174 - DNA, 30 bp, Artificial Sequence
  Synthetic oligonucleotide
ttgcctggaatcagacagtcgagggggatt

SEQ ID NO: 391175 - DNA, 30 bp, Artificial Sequence
  Synthetic oligonucleotide
tccggtggaggcggctaagaggatgggatt

SEQ ID NO: 391176 - DNA, 30 bp, Artificial Sequence
  Synthetic oligonucleotide
gaagattcctgaatcataatggttgggatt

SEQ ID NO: 391177 - DNA, 30 bp, Artificial Sequence
  Synthetic oligonucleotide
gctcctaagcggatttccgctgttgggatt

SEQ ID NO: 391178 - DNA, 30 bp, Artificial Sequence
  Synthetic oligonucleotide
gtgttgcgcctcggataagtatcatggatt

SEQ ID NO: 391179 - DNA, 30 bp, Artificial Sequence
  Synthetic oligonucleotide
catagatacgtctggctgaggatatggatt

SEQ ID NO: 391180 - DNA, 30 bp, Artificial Sequence
  Synthetic oligonucleotide
gcgatcgcgagcgtaaatagttactggatt

SEQ ID NO: 391181 - DNA, 30 bp, Artificial Sequence
  Synthetic oligonucleotide
gcacccttaaactggctgtataggtggatt

SEQ ID NO: 391182 - DNA, 30 bp, Artificial Sequence
  Synthetic oligonucleotide
agccaggggtcgaggcggaacaaaatgatt

SEQ ID NO: 391183 - DNA, 30 bp, Artificial Sequence
  Synthetic oligonucleotide
aacgccaccgtcctcaggttgtcaatgatt

SEQ ID NO: 391184 - DNA, 30 bp, Artificial Sequence
  Synthetic oligonucleotide
ttctcaactgaggacatgaagggaatgatt

SEQ ID NO: 391185 - DNA, 30 bp, Artificial Sequence
  Synthetic oligonucleotide
ataacgtcggggtaactgcccctaatgatt

SEQ ID NO: 391186 - DNA, 30 bp, Artificial Sequence
  Synthetic oligonucleotide
ttcaccggggcagctaacggatccatgatt

SEQ ID NO: 391187 - DNA, 30 bp, Artificial Sequence
  Synthetic oligonucleotide
gcaatcagcttggatcaggtctgcatgatt

SEQ ID NO: 391188 - DNA, 30 bp, Artificial Sequence
  Synthetic oligonucleotide
aggctcaggaacggcatgagatatatgatt

SEQ ID NO: 391189 - DNA, 30 bp, Artificial Sequence
  Synthetic oligonucleotide
aggtgtgtcggcaggagttcaattatgatt

SEQ ID NO: 391190 - DNA, 30 bp, Artificial Sequence
  Synthetic oligonucleotide
gcaaaatgggacgattctatcattatgatt

SEQ ID NO: 391191 - DNA, 30 bp, Artificial Sequence
  Synthetic oligonucleotide
aatcgacatacgtttgttctcacactgatt

SEQ ID NO: 391192 - DNA, 30 bp, Artificial Sequence
  Synthetic oligonucleotide
tcaaatgcgcacaacaagcccggcctgatt

SEQ ID NO: 391193 - DNA, 30 bp, Artificial Sequence
  Synthetic oligonucleotide
ataccgggttttccttgacctttcctgatt

SEQ ID NO: 391194 - DNA, 30 bp, Artificial Sequence
  Synthetic oligonucleotide
gtcacgatgatgctattaaagtaagtgatt

SEQ ID NO: 391195 - DNA, 30 bp, Artificial Sequence
  Synthetic oligonucleotide
cgttacgtcatcggttatctatcagtgatt

SEQ ID NO: 391196 - DNA, 30 bp, Artificial Sequence
  Synthetic oligonucleotide
aatacatccctttctcggatactagtgatt

SEQ ID NO: 391197 - DNA, 30 bp, Artificial Sequence
  Synthetic oligonucleotide
ctaatgtcaagcttttgatacggcgtgatt

SEQ ID NO: 391198 - DNA, 30 bp, Artificial Sequence
  Synthetic oligonucleotide
ctgcgtgggtgtcctttagacctcgtgatt

SEQ ID NO: 391199 - DNA, 30 bp, Artificial Sequence
  Synthetic oligonucleotide
ggatcacctgaacatgagatacgggtgatt

SEQ ID NO: 391200 - DNA, 30 bp, Artificial Sequence
  Synthetic oligonucleotide
gcatttttgaaaatttgtctaatggtgatt

SEQ ID NO: 391201 - DNA, 30 bp, Artificial Sequence
  Synthetic oligonucleotide
gcaccgccatgttatgcgccttatgtgatt

SEQ ID NO: 391202 - DNA, 30 bp, Artificial Sequence
  Synthetic oligonucleotide
ttgctcggccaaaagtgccgcagtgtgatt

SEQ ID NO: 391203 - DNA, 30 bp, Artificial Sequence
  Synthetic oligonucleotide
gagagggtgatcttgagtaaacgtgtgatt

SEQ ID NO: 391204 - DNA, 30 bp, Artificial Sequence
  Synthetic oligonucleotide
gtgggtagagtataacgcataacattgatt

SEQ ID NO: 391205 - DNA, 30 bp, Artificial Sequence
  Synthetic oligonucleotide
aacgaaccgcagaagctacttggattgatt

SEQ ID NO: 391206 - DNA, 30 bp, Artificial Sequence
  Synthetic oligonucleotide
ggctctctcaacttaagagtaatattgatt

SEQ ID NO: 391207 - DNA, 30 bp, Artificial Sequence
  Synthetic oligonucleotide
catacgcagttactaatgaatcacttgatt

SEQ ID NO: 391208 - DNA, 30 bp, Artificial Sequence
  Synthetic oligonucleotide
ccatccgcgaggtggccaaatcccttgatt

SEQ ID NO: 391209 - DNA, 30 bp, Artificial Sequence
  Synthetic oligonucleotide
tttgggaagatgcctacatgcaggttgatt

SEQ ID NO: 391210 - DNA, 30 bp, Artificial Sequence
  Synthetic oligonucleotide
tccataatccataattcgtaagtgttgatt

SEQ ID NO: 391211 - DNA, 30 bp, Artificial Sequence
  Synthetic oligonucleotide
actcggcggggattcggaggacctttgatt

SEQ ID NO: 391212 - DNA, 30 bp, Artificial Sequence
  Synthetic oligonucleotide
atatgcggggggaacgactgtgcaaatatt

SEQ ID NO: 391213 - DNA, 30 bp, Artificial Sequence
  Synthetic oligonucleotide
gcttaggcatttgcttctaattgaaatatt

SEQ ID NO: 391214 - DNA, 30 bp, Artificial Sequence
  Synthetic oligonucleotide
gaccgatttctgacttagaatgccaatatt

SEQ ID NO: 391215 - DNA, 30 bp, Artificial Sequence
  Synthetic oligonucleotide
taagcaaattagacaccccgttggaatatt

SEQ ID NO: 391216 - DNA, 30 bp, Artificial Sequence
  Synthetic oligonucleotide
gaattcggtatacaactaaatctgaatatt

SEQ ID NO: 391217 - DNA, 30 bp, Artificial Sequence
  Synthetic oligonucleotide
aatcagaaaaaacctgcatcgcctaatatt

SEQ ID NO: 391218 - DNA, 30 bp, Artificial Sequence
  Synthetic oligonucleotide
gttggaggctacacaaattcgttacatatt

SEQ ID NO: 391219 - DNA, 30 bp, Artificial Sequence
  Synthetic oligonucleotide
aaagtcatgcggtacctgcttgaccatatt

SEQ ID NO: 391220 - DNA, 30 bp, Artificial Sequence
  Synthetic oligonucleotide
acagaaacagttgagcacttttaccatatt

SEQ ID NO: 391221 - DNA, 30 bp, Artificial Sequence
  Synthetic oligonucleotide
tacatttaaggagttggtttgggccatatt

SEQ ID NO: 391222 - DNA, 30 bp, Artificial Sequence
  Synthetic oligonucleotide
gtatgaagcagttcaccacagaagcatatt

SEQ ID NO: 391223 - DNA, 30 bp, Artificial Sequence
  Synthetic oligonucleotide
ttacagacggtatgaactctgaagcatatt

SEQ ID NO: 391224 - DNA, 30 bp, Artificial Sequence
  Synthetic oligonucleotide
tcatgttgttgaagcatcgctcagcatatt

SEQ ID NO: 391225 - DNA, 30 bp, Artificial Sequence
  Synthetic oligonucleotide
agcatcttaaaacaaatatacacgcatatt

SEQ ID NO: 391226 - DNA, 30 bp, Artificial Sequence
  Synthetic oligonucleotide
cctttcccgtaaatggctctacggcatatt

SEQ ID NO: 391227 - DNA, 30 bp, Artificial Sequence
  Synthetic oligonucleotide
taaagacaggcctccctatggatgcatatt

SEQ ID NO: 391228 - DNA, 30 bp, Artificial Sequence
  Synthetic oligonucleotide
atgtgttgtaatcctggagatatgcatatt

SEQ ID NO: 391229 - DNA, 30 bp, Artificial Sequence
  Synthetic oligonucleotide
tgatgtacaatacgttggagggtgcatatt

SEQ ID NO: 391230 - DNA, 30 bp, Artificial Sequence
  Synthetic oligonucleotide
tttcaacggaagacttgtataaatcatatt

SEQ ID NO: 391231 - DNA, 30 bp, Artificial Sequence
  Synthetic oligonucleotide
gataaaggtcccaggcgggaagttcatatt

SEQ ID NO: 391232 - DNA, 30 bp, Artificial Sequence
  Synthetic oligonucleotide
tggagggtaagcccgaaaacgcaagatatt

SEQ ID NO: 391233 - DNA, 30 bp, Artificial Sequence
  Synthetic oligonucleotide
tttaggacaagttagacattataagatatt

SEQ ID NO: 391234 - DNA, 30 bp, Artificial Sequence
  Synthetic oligonucleotide
gaaaacgctcgtcctggctcatcagatatt

SEQ ID NO: 391235 - DNA, 30 bp, Artificial Sequence
  Synthetic oligonucleotide
gggtcgaaaacccttgcgttttcagatatt

SEQ ID NO: 391236 - DNA, 30 bp, Artificial Sequence
  Synthetic oligonucleotide
taaatactgcaaggttagacgcccgatatt

SEQ ID NO: 391237 - DNA, 30 bp, Artificial Sequence
  Synthetic oligonucleotide
tccctattattgccaaatgagagggatatt

SEQ ID NO: 391238 - DNA, 30 bp, Artificial Sequence
  Synthetic oligonucleotide
ttaggggaagagcacggtttgtgggatatt

SEQ ID NO: 391239 - DNA, 30 bp, Artificial Sequence
  Synthetic oligonucleotide
cactgtgagtttcatctgttactggatatt

SEQ ID NO: 391240 - DNA, 30 bp, Artificial Sequence
  Synthetic oligonucleotide
ggtagcagcccctgaagatttattgatatt

SEQ ID NO: 391241 - DNA, 30 bp, Artificial Sequence
  Synthetic oligonucleotide
ggttctgcttaggagtcgattttatatatt

SEQ ID NO: 391242 - DNA, 30 bp, Artificial Sequence
  Synthetic oligonucleotide
cgacaggacacgaaggcgatacgctatatt

SEQ ID NO: 391243 - DNA, 30 bp, Artificial Sequence
  Synthetic oligonucleotide
ttatgggagtggggatacgtagagtatatt

SEQ ID NO: 391244 - DNA, 30 bp, Artificial Sequence
  Synthetic oligonucleotide
tacgcctacgtatttcatccatggtatatt

SEQ ID NO: 391245 - DNA, 30 bp, Artificial Sequence
  Synthetic oligonucleotide
gtgacgtaaagtcatactctctggtatatt

SEQ ID NO: 391246 - DNA, 30 bp, Artificial Sequence
  Synthetic oligonucleotide
acgtagggcattaagcggtaggcttatatt

SEQ ID NO: 391247 - DNA, 30 bp, Artificial Sequence
  Synthetic oligonucleotide
tcgaatatgttgcagttcaaagcaactatt

SEQ ID NO: 391248 - DNA, 30 bp, Artificial Sequence
  Synthetic oligonucleotide
cagtaaattggagagcttgatcgaactatt

SEQ ID NO: 391249 - DNA, 30 bp, Artificial Sequence
  Synthetic oligonucleotide
ggatttttgcagatttcgagcttaactatt

SEQ ID NO: 391250 - DNA, 30 bp, Artificial Sequence
  Synthetic oligonucleotide
cgcgcttattgattgaacgacctcactatt

SEQ ID NO: 391251 - DNA, 30 bp, Artificial Sequence
  Synthetic oligonucleotide
gtacgctctgcactttattttgagactatt

SEQ ID NO: 391252 - DNA, 30 bp, Artificial Sequence
  Synthetic oligonucleotide
tcggtctgtacacctctgcagtagactatt

SEQ ID NO: 391253 - DNA, 31 bp, Artificial Sequence
  Synthetic oligonucleotide
attatgagcagaaaaccgcggttagactatt

SEQ ID NO: 391254 - DNA, 30 bp, Artificial Sequence
  Synthetic oligonucleotide
caggaaatctggccaggtcttaggactatt

SEQ ID NO: 391255 - DNA, 30 bp, Artificial Sequence
  Synthetic oligonucleotide
gaaagcaacgatatgtaaattagtactatt

SEQ ID NO: 391256 - DNA, 30 bp, Artificial Sequence
  Synthetic oligonucleotide
tctgaggtaaatcacttatcctttactatt

SEQ ID NO: 391257 - DNA, 30 bp, Artificial Sequence
  Synthetic oligonucleotide
ggcgatagacttatgtaagttaaacctatt

SEQ ID NO: 391258 - DNA, 30 bp, Artificial Sequence
  Synthetic oligonucleotide
tgttgggtaagagtagagtttgaacctatt

SEQ ID NO: 391259 - DNA, 30 bp, Artificial Sequence
  Synthetic oligonucleotide
gcagtagcgacatcggtacgtaaccctatt

SEQ ID NO: 391260 - DNA, 30 bp, Artificial Sequence
  Synthetic oligonucleotide
gagatatagaattacatgaacttccctatt

SEQ ID NO: 391261 - DNA, 30 bp, Artificial Sequence
  Synthetic oligonucleotide
tcaattatttaatgacgctgtgctcctatt

SEQ ID NO: 391262 - DNA, 30 bp, Artificial Sequence
  Synthetic oligonucleotide
cggattctttatgaattagctccagctatt

SEQ ID NO: 391263 - DNA, 30 bp, Artificial Sequence
  Synthetic oligonucleotide
acgtgggtggacacagtacattccgctatt

SEQ ID NO: 391264 - DNA, 30 bp, Artificial Sequence
  Synthetic oligonucleotide
cctcttcattaatcatagaatcgggctatt

SEQ ID NO: 391265 - DNA, 30 bp, Artificial Sequence
  Synthetic oligonucleotide
ctgagatcagcttagggtattctctctatt

SEQ ID NO: 391266 - DNA, 30 bp, Artificial Sequence
  Synthetic oligonucleotide
cttgaggccaatattagaacggtctctatt

SEQ ID NO: 391267 - DNA, 30 bp, Artificial Sequence
  Synthetic oligonucleotide
ggacaaccgtaatctgtaatgggttctatt

SEQ ID NO: 391268 - DNA, 30 bp, Artificial Sequence
  Synthetic oligonucleotide
accgagaaagacacctacccactttctatt

SEQ ID NO: 391269 - DNA, 30 bp, Artificial Sequence
  Synthetic oligonucleotide
gttatgcccagtgtccctgcggaaagtatt

SEQ ID NO: 391270 - DNA, 30 bp, Artificial Sequence
  Synthetic oligonucleotide
tattaaagtcatttttgtagcctgagtatt

SEQ ID NO: 391271 - DNA, 30 bp, Artificial Sequence
  Synthetic oligonucleotide
acaacatacttaacggtcataggtagtatt

SEQ ID NO: 391272 - DNA, 30 bp, Artificial Sequence
  Synthetic oligonucleotide
tttgcacaggactaagaaaacattagtatt

SEQ ID NO: 391273 - DNA, 30 bp, Artificial Sequence
  Synthetic oligonucleotide
ttcaacaaggagttgctgatataacgtatt

SEQ ID NO: 391274 - DNA, 30 bp, Artificial Sequence
  Synthetic oligonucleotide
tattggaggaccaacccgctcggacgtatt

SEQ ID NO: 391275 - DNA, 30 bp, Artificial Sequence
  Synthetic oligonucleotide
tccggcggcgggacttgtccgatacgtatt

SEQ ID NO: 391276 - DNA, 30 bp, Artificial Sequence
  Synthetic oligonucleotide
actggcaaaactgaaacccttttacgtatt

SEQ ID NO: 391277 - DNA, 30 bp, Artificial Sequence
  Synthetic oligonucleotide
acgcccactcctacgaactagaagcgtatt

SEQ ID NO: 391278 - DNA, 30 bp, Artificial Sequence
  Synthetic oligonucleotide
cttgcgatgatcgggcgctgggatcgtatt

SEQ ID NO: 391279 - DNA, 30 bp, Artificial Sequence
  Synthetic oligonucleotide
ttcccgggttagttcgctttgactcgtatt

SEQ ID NO: 391280 - DNA, 30 bp, Artificial Sequence
  Synthetic oligonucleotide
cgtggacgagcctacgatggtgttcgtatt

SEQ ID NO: 391281 - DNA, 30 bp, Artificial Sequence
  Synthetic oligonucleotide
gtactttaaaatctctgttggtgaggtatt

SEQ ID NO: 391282 - DNA, 30 bp, Artificial Sequence
  Synthetic oligonucleotide
ttcacaaatcgccccattgaaaccggtatt

SEQ ID NO: 391283 - DNA, 30 bp, Artificial Sequence
  Synthetic oligonucleotide
gaggtgccccgtagtcgcgccaccggtatt

SEQ ID NO: 391284 - DNA, 30 bp, Artificial Sequence
  Synthetic oligonucleotide
ctggaatcgcgttcgattagaatcggtatt

SEQ ID NO: 391285 - DNA, 30 bp, Artificial Sequence
  Synthetic oligonucleotide
gatccagcagattcgccagggtagggtatt

SEQ ID NO: 391286 - DNA, 30 bp, Artificial Sequence
  Synthetic oligonucleotide
gatagcctttgagcgtccgaagcgggtatt

SEQ ID NO: 391287 - DNA, 30 bp, Artificial Sequence
  Synthetic oligonucleotide
gtgcattgattatatcgggcgtcgggtatt

SEQ ID NO: 391288 - DNA, 30 bp, Artificial Sequence
  Synthetic oligonucleotide
gcggcatggctaaagctgctgtcgggtatt

SEQ ID NO: 391289 - DNA, 30 bp, Artificial Sequence
  Synthetic oligonucleotide
aggaagtggggcagcattaaccggggtatt

SEQ ID NO: 391290 - DNA, 30 bp, Artificial Sequence
  Synthetic oligonucleotide
ttggcactaggatctaaacttttgggtatt

SEQ ID NO: 391291 - DNA, 30 bp, Artificial Sequence
  Synthetic oligonucleotide
aggaaattcaactcatttggaagtggtatt

SEQ ID NO: 391292 - DNA, 30 bp, Artificial Sequence
  Synthetic oligonucleotide
agcaagatatccaaaaacgaatttggtatt

SEQ ID NO: 391293 - DNA, 30 bp, Artificial Sequence
  Synthetic oligonucleotide
tagctgctgtcagaagatcggtttggtatt

SEQ ID NO: 391294 - DNA, 30 bp, Artificial Sequence
  Synthetic oligonucleotide
gtaatggagcagtactgtcaatcttgtatt

SEQ ID NO: 391295 - DNA, 30 bp, Artificial Sequence
  Synthetic oligonucleotide
ttcagatgtgcatgcaagtgtcgttgtatt

SEQ ID NO: 391296 - DNA, 30 bp, Artificial Sequence
  Synthetic oligonucleotide
agcaccaagagtgctttctaatcaattatt

SEQ ID NO: 391297 - DNA, 30 bp, Artificial Sequence
  Synthetic oligonucleotide
tcgcaagtccttccagctttcctaattatt

SEQ ID NO: 391298 - DNA, 30 bp, Artificial Sequence
  Synthetic oligonucleotide
caaaactccaaaaagatgctgtagattatt

SEQ ID NO: 391299 - DNA, 30 bp, Artificial Sequence
  Synthetic oligonucleotide
ggaatgttgtggcattaattaccgattatt

SEQ ID NO: 391300 - DNA, 30 bp, Artificial Sequence
  Synthetic oligonucleotide
gtagctttagagtggggcttagtgattatt

SEQ ID NO: 391301 - DNA, 30 bp, Artificial Sequence
  Synthetic oligonucleotide
tcgtcttaaacacaccaaacgttgattatt

SEQ ID NO: 391302 - DNA, 30 bp, Artificial Sequence
  Synthetic oligonucleotide
gcttagctattttgagatcggcagcttatt

SEQ ID NO: 391303 - DNA, 30 bp, Artificial Sequence
  Synthetic oligonucleotide
ccctctgaaagtcccctagatgttcttatt

SEQ ID NO: 391304 - DNA, 30 bp, Artificial Sequence
  Synthetic oligonucleotide
ccctcttctatacccgtgattgaagttatt

SEQ ID NO: 391305 - DNA, 30 bp, Artificial Sequence
  Synthetic oligonucleotide
agaactgttctcagctggtttgaggttatt

SEQ ID NO: 391306 - DNA, 30 bp, Artificial Sequence
  Synthetic oligonucleotide
catcctttcaataaccaaccttgggttatt

SEQ ID NO: 391307 - DNA, 30 bp, Artificial Sequence
  Synthetic oligonucleotide
ctctaaaggggctacatatgattggttatt

SEQ ID NO: 391308 - DNA, 30 bp, Artificial Sequence
  Synthetic oligonucleotide
cgtgacggggatcgtctaaccgcatttatt

SEQ ID NO: 391309 - DNA, 30 bp, Artificial Sequence
  Synthetic oligonucleotide
ggtacagggactctgtataatgcatttatt

SEQ ID NO: 391310 - DNA, 30 bp, Artificial Sequence
  Synthetic oligonucleotide
gagttagcgcgttagggcgcaacgtttatt

SEQ ID NO: 391311 - DNA, 31 bp, Artificial Sequence
  Synthetic oligonucleotide
tatccgataaagaggcttcacgaggtttatt

SEQ ID NO: 391312 - DNA, 30 bp, Artificial Sequence
  Synthetic oligonucleotide
tagagcaagaatctatcctgctcttttatt

SEQ ID NO: 391313 - DNA, 30 bp, Artificial Sequence
  Synthetic oligonucleotide
ttaggagagcttttaacgaaatgttttatt

SEQ ID NO: 391314 - DNA, 30 bp, Artificial Sequence
  Synthetic oligonucleotide
aaggatatggtaaattaaccctaaaaactt

SEQ ID NO: 391315 - DNA, 30 bp, Artificial Sequence
  Synthetic oligonucleotide
tcccagcggagaacgcgactcacaaaactt

SEQ ID NO: 391316 - DNA, 30 bp, Artificial Sequence
  Synthetic oligonucleotide
tcccggattaggatttggaggccaaaactt

SEQ ID NO: 391317 - DNA, 30 bp, Artificial Sequence
  Synthetic oligonucleotide
aataaagagcctgcaatataatcaaaactt

SEQ ID NO: 391318 - DNA, 30 bp, Artificial Sequence
  Synthetic oligonucleotide
ataattaggtcatttacaccgagaaaactt

SEQ ID NO: 391319 - DNA, 30 bp, Artificial Sequence
  Synthetic oligonucleotide
tggtctcgcaactaaggaggcataaaactt

SEQ ID NO: 391320 - DNA, 30 bp, Artificial Sequence
  Synthetic oligonucleotide
gaagctaaccatggggagtacgccaaactt

SEQ ID NO: 391321 - DNA, 30 bp, Artificial Sequence
  Synthetic oligonucleotide
aataatcgcgagcgactacctcgcaaactt

SEQ ID NO: 391322 - DNA, 30 bp, Artificial Sequence
  Synthetic oligonucleotide
gaggtgcttgttgcgcaagcgccacaactt

SEQ ID NO: 391323 - DNA, 30 bp, Artificial Sequence
  Synthetic oligonucleotide
gcgctcacgaacagtaacgatgcacaactt

SEQ ID NO: 391324 - DNA, 30 bp, Artificial Sequence
  Synthetic oligonucleotide
aaggatttttcggacctagcgggacaactt

SEQ ID NO: 391325 - DNA, 31 bp, Artificial Sequence
  Synthetic oligonucleotide
tgatcgggcaaacatagagaatgtacaactt

SEQ ID NO: 391326 - DNA, 30 bp, Artificial Sequence
  Synthetic oligonucleotide
tatcccgcatttgtgttatttatgcaactt

SEQ ID NO: 391327 - DNA, 31 bp, Artificial Sequence
  Synthetic oligonucleotide
gtcgaatcgcagcctacgtaggttgcaactt

SEQ ID NO: 391328 - DNA, 30 bp, Artificial Sequence
  Synthetic oligonucleotide
taaaggacagcagggaatctcgaagaactt

SEQ ID NO: 391329 - DNA, 30 bp, Artificial Sequence
  Synthetic oligonucleotide
ggggggttatgttttaaccctcacgaactt

SEQ ID NO: 391330 - DNA, 30 bp, Artificial Sequence
  Synthetic oligonucleotide
ggttctaacagtttagtccggcaggaactt

SEQ ID NO: 391331 - DNA, 30 bp, Artificial Sequence
  Synthetic oligonucleotide
ttttccgaaagggatgagagggaggaactt

SEQ ID NO: 391332 - DNA, 30 bp, Artificial Sequence
  Synthetic oligonucleotide
gtaaaaatatatttcaactgaggggaactt

SEQ ID NO: 391333 - DNA, 30 bp, Artificial Sequence
  Synthetic oligonucleotide
tgccctgaacctatttgaccttctgaactt

SEQ ID NO: 391334 - DNA, 30 bp, Artificial Sequence
  Synthetic oligonucleotide
taggacctagtaagctaggtcattgaactt

SEQ ID NO: 391335 - DNA, 30 bp, Artificial Sequence
  Synthetic oligonucleotide
aatgtactctctgtagcgactattgaactt

SEQ ID NO: 391336 - DNA, 30 bp, Artificial Sequence
  Synthetic oligonucleotide
tttttaagtgaacaaaggctgcttgaactt

SEQ ID NO: 391337 - DNA, 30 bp, Artificial Sequence
  Synthetic oligonucleotide
atttacaggcgcgttcggtgtccctaactt

SEQ ID NO: 391338 - DNA, 30 bp, Artificial Sequence
  Synthetic oligonucleotide
gagttaatgctactgtccgctcgctaactt

SEQ ID NO: 391339 - DNA, 30 bp, Artificial Sequence
  Synthetic oligonucleotide
ctagaagtgactctgaaagtttcttaactt

SEQ ID NO: 391340 - DNA, 30 bp, Artificial Sequence
  Synthetic oligonucleotide
ttgcgggaacgaccccagaacttaacactt

SEQ ID NO: 391341 - DNA, 30 bp, Artificial Sequence
  Synthetic oligonucleotide
ctgtgcctaagaggaggattccgcacactt

SEQ ID NO: 391342 - DNA, 30 bp, Artificial Sequence
  Synthetic oligonucleotide
tgcaactttcaggggaactccgctacactt

SEQ ID NO: 391343 - DNA, 30 bp, Artificial Sequence
  Synthetic oligonucleotide
gtgcatggagtaaaatgaacaggtacactt

SEQ ID NO: 391344 - DNA, 30 bp, Artificial Sequence
  Synthetic oligonucleotide
gaaagcagtatgttggatgttcgaccactt

SEQ ID NO: 391345 - DNA, 30 bp, Artificial Sequence
  Synthetic oligonucleotide
gctaggattggctcagagtccaacccactt

SEQ ID NO: 391346 - DNA, 30 bp, Artificial Sequence
  Synthetic oligonucleotide
tgtgttagcattgcggcacataccccactt

SEQ ID NO: 391347 - DNA, 30 bp, Artificial Sequence
  Synthetic oligonucleotide
gaatgattattactatctatacccccactt

SEQ ID NO: 391348 - DNA, 30 bp, Artificial Sequence
  Synthetic oligonucleotide
cggttagggcagttgagcaaatgcccactt

SEQ ID NO: 391349 - DNA, 30 bp, Artificial Sequence
  Synthetic oligonucleotide
ttgtcccgtctcccaacgcacgcgccactt

SEQ ID NO: 391350 - DNA, 30 bp, Artificial Sequence
  Synthetic oligonucleotide
tgttatcagttccgttatggaatgccactt

SEQ ID NO: 391351 - DNA, 30 bp, Artificial Sequence
  Synthetic oligonucleotide
tccctgttacagagagcgaaggcagcactt

SEQ ID NO: 391352 - DNA, 30 bp, Artificial Sequence
  Synthetic oligonucleotide
tcgggacttccccaccataaatccgcactt

SEQ ID NO: 391353 - DNA, 30 bp, Artificial Sequence
  Synthetic oligonucleotide
tcccgtgggcatctctatgggacggcactt

SEQ ID NO: 391354 - DNA, 30 bp, Artificial Sequence
  Synthetic oligonucleotide
taaatagaaatggtgcggcttccggcactt

SEQ ID NO: 391355 - DNA, 30 bp, Artificial Sequence
  Synthetic oligonucleotide
tatgttcttacgcatataatccgggcactt

SEQ ID NO: 391356 - DNA, 30 bp, Artificial Sequence
  Synthetic oligonucleotide
tgaagccttggcggccaagacttggcactt

SEQ ID NO: 391357 - DNA, 30 bp, Artificial Sequence
  Synthetic oligonucleotide
ggttattggtccacatgtgacggtgcactt

SEQ ID NO: 391358 - DNA, 30 bp, Artificial Sequence
  Synthetic oligonucleotide
actcgatataaaatattgggggttgcactt

SEQ ID NO: 391359 - DNA, 30 bp, Artificial Sequence
  Synthetic oligonucleotide
caatgggttatagggagagtttaatcactt

SEQ ID NO: 391360 - DNA, 30 bp, Artificial Sequence
  Synthetic oligonucleotide
aaaggtacgtctctacagtgggactcactt

SEQ ID NO: 391361 - DNA, 30 bp, Artificial Sequence
  Synthetic oligonucleotide
atagagtaccaccgcctgaagggctcactt

SEQ ID NO: 391362 - DNA, 30 bp, Artificial Sequence
  Synthetic oligonucleotide
ccgatcgccgcggacgtgtagctctcactt

SEQ ID NO: 391363 - DNA, 30 bp, Artificial Sequence
  Synthetic oligonucleotide
agatttaccatggaaaatcgaccttcactt

SEQ ID NO: 391364 - DNA, 30 bp, Artificial Sequence
  Synthetic oligonucleotide
caaagaatggaatggccgggctcttcactt

SEQ ID NO: 391365 - DNA, 30 bp, Artificial Sequence
  Synthetic oligonucleotide
ggcctgaggcttttactcatactttcactt

SEQ ID NO: 391366 - DNA, 30 bp, Artificial Sequence
  Synthetic oligonucleotide
tcataattagggcaagcgctattttcactt

SEQ ID NO: 391367 - DNA, 30 bp, Artificial Sequence
  Synthetic oligonucleotide
ggatcccagtaagacggacctggaagactt

SEQ ID NO: 391368 - DNA, 30 bp, Artificial Sequence
  Synthetic oligonucleotide
aacgataagtttgctgcaagctacagactt

SEQ ID NO: 391369 - DNA, 30 bp, Artificial Sequence
  Synthetic oligonucleotide
atggtcacaacctcacagctcttcagactt

SEQ ID NO: 391370 - DNA, 30 bp, Artificial Sequence
  Synthetic oligonucleotide
gcactttctccgcccatcggtaagagactt

SEQ ID NO: 391371 - DNA, 30 bp, Artificial Sequence
  Synthetic oligonucleotide
ctagttgtttatgtgcccggtatgagactt

SEQ ID NO: 391372 - DNA, 30 bp, Artificial Sequence
  Synthetic oligonucleotide
aagggcactgaattgcctgccttgagactt

SEQ ID NO: 391373 - DNA, 30 bp, Artificial Sequence
  Synthetic oligonucleotide
aatataacacagtttcgactaaatagactt

SEQ ID NO: 391374 - DNA, 30 bp, Artificial Sequence
  Synthetic oligonucleotide
agttttcatgtagacaacctaaatagactt

SEQ ID NO: 391375 - DNA, 30 bp, Artificial Sequence
  Synthetic oligonucleotide
ccatacgctaagcatctactgcatagactt

SEQ ID NO: 391376 - DNA, 30 bp, Artificial Sequence
  Synthetic oligonucleotide
gacagaataggacttgcccggttacgactt

SEQ ID NO: 391377 - DNA, 30 bp, Artificial Sequence
  Synthetic oligonucleotide
agactctgtaaagcagagaagtcgcgactt

SEQ ID NO: 391378 - DNA, 30 bp, Artificial Sequence
  Synthetic oligonucleotide
cagcctagtgtaacgccggattcgcgactt

SEQ ID NO: 391379 - DNA, 30 bp, Artificial Sequence
  Synthetic oligonucleotide
tgcaccaaagggaagcattaccggcgactt

SEQ ID NO: 391380 - DNA, 30 bp, Artificial Sequence
  Synthetic oligonucleotide
acggccatattgtcgcacgtaagtcgactt

SEQ ID NO: 391381 - DNA, 30 bp, Artificial Sequence
  Synthetic oligonucleotide
gcggcgcgcttacgccaagaaaaaggactt

SEQ ID NO: 391382 - DNA, 30 bp, Artificial Sequence
  Synthetic oligonucleotide
gacccgatggttagaacaggcagaggactt

SEQ ID NO: 391383 - DNA, 30 bp, Artificial Sequence
  Synthetic oligonucleotide
tgttacttgaaggggagctttctcggactt

SEQ ID NO: 391384 - DNA, 30 bp, Artificial Sequence
  Synthetic oligonucleotide
aagcgacggctgaagcatcatgtcggactt

SEQ ID NO: 391385 - DNA, 30 bp, Artificial Sequence
  Synthetic oligonucleotide
ctcaaccttaggagctaaggttcgggactt

SEQ ID NO: 391386 - DNA, 30 bp, Artificial Sequence
  Synthetic oligonucleotide
gttcccaatataccttagaacactggactt

SEQ ID NO: 391387 - DNA, 30 bp, Artificial Sequence
  Synthetic oligonucleotide
aggccaggtcgtgacaggtcgtctggactt

SEQ ID NO: 391388 - DNA, 30 bp, Artificial Sequence
  Synthetic oligonucleotide
gtatcatgttgatttagcataagtggactt

SEQ ID NO: 391389 - DNA, 30 bp, Artificial Sequence
  Synthetic oligonucleotide
tctaaatgccctggtccactaggtggactt

SEQ ID NO: 391390 - DNA, 30 bp, Artificial Sequence
  Synthetic oligonucleotide
ggtgactacgtttggctgttcggtggactt

SEQ ID NO: 391391 - DNA, 30 bp, Artificial Sequence
  Synthetic oligonucleotide
agcctgtttaacatattttgtacatgactt

SEQ ID NO: 391392 - DNA, 30 bp, Artificial Sequence
  Synthetic oligonucleotide
cctaaccattatgtcagttttcactgactt

SEQ ID NO: 391393 - DNA, 30 bp, Artificial Sequence
  Synthetic oligonucleotide
tgctaacccgccctcacgtctacctgactt

SEQ ID NO: 391394 - DNA, 30 bp, Artificial Sequence
  Synthetic oligonucleotide
gaatgcgatgtgttccctttcggctgactt

SEQ ID NO: 391395 - DNA, 30 bp, Artificial Sequence
  Synthetic oligonucleotide
tgttacccgagcaacactcgtctctgactt

SEQ ID NO: 391396 - DNA, 30 bp, Artificial Sequence
  Synthetic oligonucleotide
gtgatccagtatgtctacctactgtgactt

SEQ ID NO: 391397 - DNA, 30 bp, Artificial Sequence
  Synthetic oligonucleotide
tgatgaaagtttaccatggtcctgtgactt

SEQ ID NO: 391398 - DNA, 30 bp, Artificial Sequence
  Synthetic oligonucleotide
attacacggtctatacattacgtgtgactt

SEQ ID NO: 391399 - DNA, 30 bp, Artificial Sequence
  Synthetic oligonucleotide
cagtgccttttaccctgaattatttgactt

SEQ ID NO: 391400 - DNA, 30 bp, Artificial Sequence
  Synthetic oligonucleotide
tatccggagacacgattagacaaaatactt

SEQ ID NO: 391401 - DNA, 30 bp, Artificial Sequence
  Synthetic oligonucleotide
tgctccagttgtaattcaaatgcgatactt

SEQ ID NO: 391402 - DNA, 30 bp, Artificial Sequence
  Synthetic oligonucleotide
cggttgattgtttggatctcggtgatactt

SEQ ID NO: 391403 - DNA, 30 bp, Artificial Sequence
  Synthetic oligonucleotide
acggctggtcaccataatgttaatatactt

SEQ ID NO: 391404 - DNA, 30 bp, Artificial Sequence
  Synthetic oligonucleotide
gttattctatgagcttaggaaggtatactt

SEQ ID NO: 391405 - DNA, 30 bp, Artificial Sequence
  Synthetic oligonucleotide
gttgggacagggtcacactatattatactt

SEQ ID NO: 391406 - DNA, 30 bp, Artificial Sequence
  Synthetic oligonucleotide
accgtcaactcaaacatgatcgtactactt

SEQ ID NO: 391407 - DNA, 30 bp, Artificial Sequence
  Synthetic oligonucleotide
cttagatgatgcgcataacaggccctactt

SEQ ID NO: 391408 - DNA, 30 bp, Artificial Sequence
  Synthetic oligonucleotide
gtaggccaattgtacctaacaagcctactt

SEQ ID NO: 391409 - DNA, 30 bp, Artificial Sequence
  Synthetic oligonucleotide
gtagatggagcgactaaggttaagctactt

SEQ ID NO: 391410 - DNA, 30 bp, Artificial Sequence
  Synthetic oligonucleotide
caactctagtcctcactactcgagctactt

SEQ ID NO: 391411 - DNA, 30 bp, Artificial Sequence
  Synthetic oligonucleotide
ccaaggaagtagccacctccgtagctactt

SEQ ID NO: 391412 - DNA, 30 bp, Artificial Sequence
  Synthetic oligonucleotide
tattagcacaggcgaagatcgtcgctactt

SEQ ID NO: 391413 - DNA, 30 bp, Artificial Sequence
  Synthetic oligonucleotide
agtgtcggtgagagcgcaggaaatctactt

SEQ ID NO: 391414 - DNA, 30 bp, Artificial Sequence
  Synthetic oligonucleotide
gacacaattaacccctaagaaagtctactt

SEQ ID NO: 391415 - DNA, 30 bp, Artificial Sequence
  Synthetic oligonucleotide
ccgcggcactattcagtaacgggtctactt

SEQ ID NO: 391416 - DNA, 30 bp, Artificial Sequence
  Synthetic oligonucleotide
gaaaaaagcatcgttctatatgttctactt

SEQ ID NO: 391417 - DNA, 30 bp, Artificial Sequence
  Synthetic oligonucleotide
acatgctccgagcaggatcgcctagtactt

SEQ ID NO: 391418 - DNA, 30 bp, Artificial Sequence
  Synthetic oligonucleotide
aggctcgtttacggatcttgttcggtactt

SEQ ID NO: 391419 - DNA, 30 bp, Artificial Sequence
  Synthetic oligonucleotide
gaactgctccttactcgaatgaatgtactt

SEQ ID NO: 391420 - DNA, 30 bp, Artificial Sequence
  Synthetic oligonucleotide
ggaaagttacgcgaatgtaatgctgtactt

SEQ ID NO: 391421 - DNA, 30 bp, Artificial Sequence
  Synthetic oligonucleotide
tcgctctactatcgtgcgggaaaattactt

SEQ ID NO: 391422 - DNA, 30 bp, Artificial Sequence
  Synthetic oligonucleotide
tatacgaaacgacgagataggaaattactt

SEQ ID NO: 391423 - DNA, 30 bp, Artificial Sequence
  Synthetic oligonucleotide
catatctgtacccatatgccgtacttactt

SEQ ID NO: 391424 - DNA, 30 bp, Artificial Sequence
  Synthetic oligonucleotide
cccacaggtcccgatacagtcttcttactt

SEQ ID NO: 391425 - DNA, 30 bp, Artificial Sequence
  Synthetic oligonucleotide
gcttgaaatcgtttaaccattcagttactt

SEQ ID NO: 391426 - DNA, 30 bp, Artificial Sequence
  Synthetic oligonucleotide
cataccataaggcggatagactggttactt

SEQ ID NO: 391427 - DNA, 30 bp, Artificial Sequence
  Synthetic oligonucleotide
caccgcactgaaacatcaagagtgttactt

SEQ ID NO: 391428 - DNA, 30 bp, Artificial Sequence
  Synthetic oligonucleotide
gggacggatgcctttgcagcctatttactt

SEQ ID NO: 391429 - DNA, 30 bp, Artificial Sequence
  Synthetic oligonucleotide
caaagtaaggttcggccccgaagtttactt

SEQ ID NO: 391430 - DNA, 30 bp, Artificial Sequence
  Synthetic oligonucleotide
ggaaagtcaaccatttcatagagtttactt

SEQ ID NO: 391431 - DNA, 30 bp, Artificial Sequence
  Synthetic oligonucleotide
tacgcatggtattgttaatgccttttactt

SEQ ID NO: 391432 - DNA, 30 bp, Artificial Sequence
  Synthetic oligonucleotide
tatctgtatcggaccggagtagaaaacctt

SEQ ID NO: 391433 - DNA, 30 bp, Artificial Sequence
  Synthetic oligonucleotide
atcgggcgcattacgttacgagccaacctt

SEQ ID NO: 391434 - DNA, 30 bp, Artificial Sequence
  Synthetic oligonucleotide
tccaaactctaaatcaggataccgaacctt

SEQ ID NO: 391435 - DNA, 30 bp, Artificial Sequence
  Synthetic oligonucleotide
aggggtatttagttcgacccggtgaacctt

SEQ ID NO: 391436 - DNA, 30 bp, Artificial Sequence
  Synthetic oligonucleotide
tgtggtgtccatacgggccgcacacacctt

SEQ ID NO: 391437 - DNA, 30 bp, Artificial Sequence
  Synthetic oligonucleotide
acccaggttagcgcggtaactacacacctt

SEQ ID NO: 391438 - DNA, 30 bp, Artificial Sequence
  Synthetic oligonucleotide
ttcgatcatcacccgtttggagcacacctt

SEQ ID NO: 391439 - DNA, 30 bp, Artificial Sequence
  Synthetic oligonucleotide
cacgtccgcacagatggtaaaatccacctt

SEQ ID NO: 391440 - DNA, 30 bp, Artificial Sequence
  Synthetic oligonucleotide
cgtattcaataacggtactcgttccacctt

SEQ ID NO: 391441 - DNA, 30 bp, Artificial Sequence
  Synthetic oligonucleotide
gcgctttaggacaacgaatgtgttcacctt

SEQ ID NO: 391442 - DNA, 30 bp, Artificial Sequence
  Synthetic oligonucleotide
aaacacgcacaggacggtccgtttcacctt

SEQ ID NO: 391443 - DNA, 29 bp, Artificial Sequence
  Synthetic oligonucleotide
cgaagcagaggaggaaataagccgacctt

SEQ ID NO: 391444 - DNA, 30 bp, Artificial Sequence
  Synthetic oligonucleotide
ggtgtaacgcaggtccagtttaaggacctt

SEQ ID NO: 391445 - DNA, 30 bp, Artificial Sequence
  Synthetic oligonucleotide
aacacattaggccgttttaacactgacctt

SEQ ID NO: 391446 - DNA, 30 bp, Artificial Sequence
  Synthetic oligonucleotide
agtcagacgaaatctagcacctttgacctt

SEQ ID NO: 391447 - DNA, 30 bp, Artificial Sequence
  Synthetic oligonucleotide
tgtgtaacgtccggcacaaataaatacctt

SEQ ID NO: 391448 - DNA, 30 bp, Artificial Sequence
  Synthetic oligonucleotide
aagttcaggagagttaaatctacgtacctt

SEQ ID NO: 391449 - DNA, 30 bp, Artificial Sequence
  Synthetic oligonucleotide
aaagcaaagacacacataatacggtacctt

SEQ ID NO: 391450 - DNA, 29 bp, Artificial Sequence
  Synthetic oligonucleotide
attcggactgtggtcgagcattttacctt

SEQ ID NO: 391451 - DNA, 30 bp, Artificial Sequence
  Synthetic oligonucleotide
gagctatacaagtaggcatcacaaaccctt

SEQ ID NO: 391452 - DNA, 30 bp, Artificial Sequence
  Synthetic oligonucleotide
agcagtggctgtatcttaagcgcaaccctt

SEQ ID NO: 391453 - DNA, 30 bp, Artificial Sequence
  Synthetic oligonucleotide
gtctatggggcctctaatgagaacaccctt

SEQ ID NO: 391454 - DNA, 30 bp, Artificial Sequence
  Synthetic oligonucleotide
tgtcctgccaatcatgacaaagacaccctt

SEQ ID NO: 391455 - DNA, 30 bp, Artificial Sequence
  Synthetic oligonucleotide
gcgaggtctccttagcgggctgccaccctt

SEQ ID NO: 391456 - DNA, 30 bp, Artificial Sequence
  Synthetic oligonucleotide
aaggacaggtgcgacctttaccttaccctt

SEQ ID NO: 391457 - DNA, 30 bp, Artificial Sequence
  Synthetic oligonucleotide
gcatagctccactgacgattgggacccctt

SEQ ID NO: 391458 - DNA, 30 bp, Artificial Sequence
  Synthetic oligonucleotide
gcacaacatttctatccaatagagcccctt

SEQ ID NO: 391459 - DNA, 30 bp, Artificial Sequence
  Synthetic oligonucleotide
gggctatggcagaagttacgttcgcccctt

SEQ ID NO: 391460 - DNA, 30 bp, Artificial Sequence
  Synthetic oligonucleotide
tgttgataagcggtcatgaataatcccctt

SEQ ID NO: 391461 - DNA, 30 bp, Artificial Sequence
  Synthetic oligonucleotide
ggggctgtccttgggaacatatcagccctt

SEQ ID NO: 391462 - DNA, 30 bp, Artificial Sequence
  Synthetic oligonucleotide
aatcggtgtgccattaagttgaaggccctt

SEQ ID NO: 391463 - DNA, 30 bp, Artificial Sequence
  Synthetic oligonucleotide
tcatgatgttgtgggagtcgcagggccctt

SEQ ID NO: 391464 - DNA, 30 bp, Artificial Sequence
  Synthetic oligonucleotide
ccctaaacccaaatggatatttcctccctt

SEQ ID NO: 391465 - DNA, 30 bp, Artificial Sequence
  Synthetic oligonucleotide
tcgagttctcagaactcagcaatctccctt

SEQ ID NO: 391466 - DNA, 30 bp, Artificial Sequence
  Synthetic oligonucleotide
tgggcaaaatgggggatttgagtctccctt

SEQ ID NO: 391467 - DNA, 30 bp, Artificial Sequence
  Synthetic oligonucleotide
caatgccgcggcctattgatcgggtccctt

SEQ ID NO: 391468 - DNA, 30 bp, Artificial Sequence
  Synthetic oligonucleotide
cggtgccagtcataggcgtcgttgtccctt

SEQ ID NO: 391469 - DNA, 30 bp, Artificial Sequence
  Synthetic oligonucleotide
agacagttagagggcgaagtctcttccctt

SEQ ID NO: 391470 - DNA, 30 bp, Artificial Sequence
  Synthetic oligonucleotide
caaaagttctttcagtggaagacaagcctt

SEQ ID NO: 391471 - DNA, 30 bp, Artificial Sequence
  Synthetic oligonucleotide
aaaggatcaggcctggctttgctaagcctt

SEQ ID NO: 391472 - DNA, 30 bp, Artificial Sequence
  Synthetic oligonucleotide
agctcactgcactatagtgcaaagagcctt

SEQ ID NO: 391473 - DNA, 30 bp, Artificial Sequence
  Synthetic oligonucleotide
tagaacgcacccagtcacggaacgagcctt

SEQ ID NO: 391474 - DNA, 30 bp, Artificial Sequence
  Synthetic oligonucleotide
caatgcaaatgggtccagcttaatagcctt

SEQ ID NO: 391475 - DNA, 30 bp, Artificial Sequence
  Synthetic oligonucleotide
aggacacttattgatatattgtgacgcctt

SEQ ID NO: 391476 - DNA, 30 bp, Artificial Sequence
  Synthetic oligonucleotide
cgaccgtagatccttaggcttgcccgcctt

SEQ ID NO: 391477 - DNA, 30 bp, Artificial Sequence
  Synthetic oligonucleotide
gaatcgtaccatggatctgcccgccgcctt

SEQ ID NO: 391478 - DNA, 30 bp, Artificial Sequence
  Synthetic oligonucleotide
aagtgcatcgaaggcaatgcatcgcgcctt

SEQ ID NO: 391479 - DNA, 30 bp, Artificial Sequence
  Synthetic oligonucleotide
tccaagcgaaattagatgtattccggcctt

SEQ ID NO: 391480 - DNA, 30 bp, Artificial Sequence
  Synthetic oligonucleotide
gtagccgggccccactattctgcgggcctt

SEQ ID NO: 391481 - DNA, 30 bp, Artificial Sequence
  Synthetic oligonucleotide
ttgtgagtgggcatatctagtaatggcctt

SEQ ID NO: 391482 - DNA, 30 bp, Artificial Sequence
  Synthetic oligonucleotide
ccgtcacatacgcaaagcatcagtggcctt

SEQ ID NO: 391483 - DNA, 30 bp, Artificial Sequence
  Synthetic oligonucleotide
gacgtcccgctaactggtcaatgtggcctt

SEQ ID NO: 391484 - DNA, 30 bp, Artificial Sequence
  Synthetic oligonucleotide
ggtcacacgtggttatattagaattgcctt

SEQ ID NO: 391485 - DNA, 30 bp, Artificial Sequence
  Synthetic oligonucleotide
acccccacagatatatttttggattgcctt

SEQ ID NO: 391486 - DNA, 30 bp, Artificial Sequence
  Synthetic oligonucleotide
agaaggccaccacattgatgcggttgcctt

SEQ ID NO: 391487 - DNA, 30 bp, Artificial Sequence
  Synthetic oligonucleotide
cttgtggcgcgggccgggaactgaatcctt

SEQ ID NO: 391488 - DNA, 30 bp, Artificial Sequence
  Synthetic oligonucleotide
gtgaaagatgtgcataataagaccatcctt

SEQ ID NO: 391489 - DNA, 30 bp, Artificial Sequence
  Synthetic oligonucleotide
tggttgtaactaggcctaggatgtatcctt

SEQ ID NO: 391490 - DNA, 30 bp, Artificial Sequence
  Synthetic oligonucleotide
ttatccgtccgcgattagatcgcactcctt

SEQ ID NO: 391491 - DNA, 30 bp, Artificial Sequence
  Synthetic oligonucleotide
gttctagggtaaccgagtagcatactcctt

SEQ ID NO: 391492 - DNA, 30 bp, Artificial Sequence
  Synthetic oligonucleotide
ctttgaaataaaaactgaatacgcctcctt

SEQ ID NO: 391493 - DNA, 30 bp, Artificial Sequence
  Synthetic oligonucleotide
tcggtttgacgtaccacacgtttgctcctt

SEQ ID NO: 391494 - DNA, 30 bp, Artificial Sequence
  Synthetic oligonucleotide
cgggaaatttctaatttcggacctctcctt

SEQ ID NO: 391495 - DNA, 30 bp, Artificial Sequence
  Synthetic oligonucleotide
atagagttgatcttatatgtaattctcctt

SEQ ID NO: 391496 - DNA, 30 bp, Artificial Sequence
  Synthetic oligonucleotide
tttaccattaaccatcacataacagtcctt

SEQ ID NO: 391497 - DNA, 30 bp, Artificial Sequence
  Synthetic oligonucleotide
ttatatctcgatattccccagttagtcctt

SEQ ID NO: 391498 - DNA, 30 bp, Artificial Sequence
  Synthetic oligonucleotide
gattagctggagatgtgaggtgccgtcctt

SEQ ID NO: 391499 - DNA, 30 bp, Artificial Sequence
  Synthetic oligonucleotide
tctcgccagcgatggattagcagtgtcctt

SEQ ID NO: 391500 - DNA, 30 bp, Artificial Sequence
  Synthetic oligonucleotide
ctaccacgtcctcgcaccgaggaattcctt

SEQ ID NO: 391501 - DNA, 30 bp, Artificial Sequence
  Synthetic oligonucleotide
ctagcggcccggacacttttctctttcctt

SEQ ID NO: 391502 - DNA, 30 bp, Artificial Sequence
  Synthetic oligonucleotide
cagacaccgcattttcggtcatttttcctt

SEQ ID NO: 391503 - DNA, 30 bp, Artificial Sequence
  Synthetic oligonucleotide
gatgacactatctggtcgccgtaaaagctt

SEQ ID NO: 391504 - DNA, 30 bp, Artificial Sequence
  Synthetic oligonucleotide
tagacattggccctcgaatttgcaaagctt

SEQ ID NO: 391505 - DNA, 30 bp, Artificial Sequence
  Synthetic oligonucleotide
gacctcacaattgggagtgcaggaaagctt

SEQ ID NO: 391506 - DNA, 30 bp, Artificial Sequence
  Synthetic oligonucleotide
tcgtggaatagtgcgactgacggaaagctt

SEQ ID NO: 391507 - DNA, 30 bp, Artificial Sequence
  Synthetic oligonucleotide
attgcgctgggtctttataaagtaaagctt

SEQ ID NO: 391508 - DNA, 30 bp, Artificial Sequence
  Synthetic oligonucleotide
tctaaagtacacgtctggtataacaagctt

SEQ ID NO: 391509 - DNA, 30 bp, Artificial Sequence
  Synthetic oligonucleotide
taagagacgcacaatatggaacccaagctt

SEQ ID NO: 391510 - DNA, 30 bp, Artificial Sequence
  Synthetic oligonucleotide
agacctgtagaggtttgggtatgcaagctt

SEQ ID NO: 391511 - DNA, 30 bp, Artificial Sequence
  Synthetic oligonucleotide
tattttattacagaaattcgaattaagctt

SEQ ID NO: 391512 - DNA, 30 bp, Artificial Sequence
  Synthetic oligonucleotide
cgatcggtagactcacacgcacttaagctt

SEQ ID NO: 391513 - DNA, 30 bp, Artificial Sequence
  Synthetic oligonucleotide
tattttggcgcgtgggtgtaagaacagctt

SEQ ID NO: 391514 - DNA, 30 bp, Artificial Sequence
  Synthetic oligonucleotide
gtagtgtggtcggttttaccgttacagctt

SEQ ID NO: 391515 - DNA, 30 bp, Artificial Sequence
  Synthetic oligonucleotide
tgttagagcattcgaacctgaccccagctt

SEQ ID NO: 391516 - DNA, 30 bp, Artificial Sequence
  Synthetic oligonucleotide
gagcaccttcggtaccgtccctgccagctt

SEQ ID NO: 391517 - DNA, 30 bp, Artificial Sequence
  Synthetic oligonucleotide
tgacctagaaattcagagagtgtccagctt

SEQ ID NO: 391518 - DNA, 30 bp, Artificial Sequence
  Synthetic oligonucleotide
aggatatacgttaacgctcaggagcagctt

SEQ ID NO: 391519 - DNA, 30 bp, Artificial Sequence
  Synthetic oligonucleotide
cgcgaattgtcaactactggagggcagctt

SEQ ID NO: 391520 - DNA, 30 bp, Artificial Sequence
  Synthetic oligonucleotide
tgacggtagatagtagcgtgctatcagctt

SEQ ID NO: 391521 - DNA, 30 bp, Artificial Sequence
  Synthetic oligonucleotide
tattccgcccaccccaagtactgtcagctt

SEQ ID NO: 391522 - DNA, 30 bp, Artificial Sequence
  Synthetic oligonucleotide
accgcccggcccaccccacccaaagagctt

SEQ ID NO: 391523 - DNA, 30 bp, Artificial Sequence
  Synthetic oligonucleotide
gaacagcgcggcgagttactattagagctt

SEQ ID NO: 391524 - DNA, 30 bp, Artificial Sequence
  Synthetic oligonucleotide
tacctcttggggttgggaatctacgagctt

SEQ ID NO: 391525 - DNA, 30 bp, Artificial Sequence
  Synthetic oligonucleotide
ctatacacgaacatgcgtcggatcgagctt

SEQ ID NO: 391526 - DNA, 30 bp, Artificial Sequence
  Synthetic oligonucleotide
aatgcctgagagaagatctataatgagctt

SEQ ID NO: 391527 - DNA, 30 bp, Artificial Sequence
  Synthetic oligonucleotide
atgaccatagtttaggattagcttgagctt

SEQ ID NO: 391528 - DNA, 30 bp, Artificial Sequence
  Synthetic oligonucleotide
gcatcccctaatttgacaagcagatagctt

SEQ ID NO: 391529 - DNA, 30 bp, Artificial Sequence
  Synthetic oligonucleotide
aggtctgcaaggtccttcagaatatagctt

SEQ ID NO: 391530 - DNA, 30 bp, Artificial Sequence
  Synthetic oligonucleotide
ttaccgcatagaattcgcggcgcttagctt

SEQ ID NO: 391531 - DNA, 30 bp, Artificial Sequence
  Synthetic oligonucleotide
gtctaattaatggcctgcatatgttagctt

SEQ ID NO: 391532 - DNA, 30 bp, Artificial Sequence
  Synthetic oligonucleotide
ctacgtcaatggacacaagggcaaacgctt

SEQ ID NO: 391533 - DNA, 30 bp, Artificial Sequence
  Synthetic oligonucleotide
caccgatccgtgttaaagacctcaacgctt

SEQ ID NO: 391534 - DNA, 30 bp, Artificial Sequence
  Synthetic oligonucleotide
cgttacctatcgcatttttcctcaacgctt

SEQ ID NO: 391535 - DNA, 30 bp, Artificial Sequence
  Synthetic oligonucleotide
ggacgcaattaacttgacgtcgacacgctt

SEQ ID NO: 391536 - DNA, 30 bp, Artificial Sequence
  Synthetic oligonucleotide
acggggcacgggggtttatagtcgacgctt

SEQ ID NO: 391537 - DNA, 30 bp, Artificial Sequence
  Synthetic oligonucleotide
ccaagtggatgtaccgtaagggatacgctt

SEQ ID NO: 391538 - DNA, 30 bp, Artificial Sequence
  Synthetic oligonucleotide
aaactttagatgagggatatatgtacgctt

SEQ ID NO: 391539 - DNA, 30 bp, Artificial Sequence
  Synthetic oligonucleotide
gcccatacccaccgctggatgattacgctt

SEQ ID NO: 391540 - DNA, 30 bp, Artificial Sequence
  Synthetic oligonucleotide
ttagtgggagtcgtggatcacgacccgctt

SEQ ID NO: 391541 - DNA, 30 bp, Artificial Sequence
  Synthetic oligonucleotide
acgattactaaaattatgcactagccgctt

SEQ ID NO: 391542 - DNA, 30 bp, Artificial Sequence
  Synthetic oligonucleotide
cctctcaacagatatcggttgttgccgctt

SEQ ID NO: 391543 - DNA, 30 bp, Artificial Sequence
  Synthetic oligonucleotide
tcggggtctctacaacctttgaatccgctt

SEQ ID NO: 391544 - DNA, 30 bp, Artificial Sequence
  Synthetic oligonucleotide
attcggtagaggcctagttcaaaagcgctt

SEQ ID NO: 391545 - DNA, 30 bp, Artificial Sequence
  Synthetic oligonucleotide
aacgaggcttgggatgggcacggagcgctt

SEQ ID NO: 391546 - DNA, 30 bp, Artificial Sequence
  Synthetic oligonucleotide
acaacggggataggtatctgattcgcgctt

SEQ ID NO: 391547 - DNA, 30 bp, Artificial Sequence
  Synthetic oligonucleotide
gagatgggggcgtgttgcgccctggcgctt

SEQ ID NO: 391548 - DNA, 30 bp, Artificial Sequence
  Synthetic oligonucleotide
cggatgccgatttaatcacctcatgcgctt

SEQ ID NO: 391549 - DNA, 30 bp, Artificial Sequence
  Synthetic oligonucleotide
acggacggttacgtaagggcctgatcgctt

SEQ ID NO: 391550 - DNA, 30 bp, Artificial Sequence
  Synthetic oligonucleotide
acgatgcgctggtggcctatcttctcgctt

SEQ ID NO: 391551 - DNA, 30 bp, Artificial Sequence
  Synthetic oligonucleotide
gacgactacagcttagcgggactgtcgctt

SEQ ID NO: 391552 - DNA, 30 bp, Artificial Sequence
  Synthetic oligonucleotide
aggcgaatgggtgttatttgttattcgctt

SEQ ID NO: 391553 - DNA, 30 bp, Artificial Sequence
  Synthetic oligonucleotide
gtacggtgagggcttctgaagttttcgctt

SEQ ID NO: 391554 - DNA, 30 bp, Artificial Sequence
  Synthetic oligonucleotide
gtcctgtcacaacgcgatttaaaaaggctt

SEQ ID NO: 391555 - DNA, 30 bp, Artificial Sequence
  Synthetic oligonucleotide
tttctaggcagactgcggattgacaggctt

SEQ ID NO: 391556 - DNA, 30 bp, Artificial Sequence
  Synthetic oligonucleotide
cattattgtaaattattttgagggaggctt

SEQ ID NO: 391557 - DNA, 30 bp, Artificial Sequence
  Synthetic oligonucleotide
taaacatactgatgatggtcgcctaggctt

SEQ ID NO: 391558 - DNA, 30 bp, Artificial Sequence
  Synthetic oligonucleotide
ggaaaccatctacgatgtctgagtaggctt

SEQ ID NO: 391559 - DNA, 30 bp, Artificial Sequence
  Synthetic oligonucleotide
gcacccggtcactccgaaggtgcacggctt

SEQ ID NO: 391560 - DNA, 30 bp, Artificial Sequence
  Synthetic oligonucleotide
tcgctagctaggaggaaacttagacggctt

SEQ ID NO: 391561 - DNA, 30 bp, Artificial Sequence
  Synthetic oligonucleotide
gctaccggctagtatcgcagtcaccggctt

SEQ ID NO: 391562 - DNA, 30 bp, Artificial Sequence
  Synthetic oligonucleotide
catgcagttagaagcagccaagaccggctt

SEQ ID NO: 391563 - DNA, 30 bp, Artificial Sequence
  Synthetic oligonucleotide
ggatactatcaggtgaacttagcccggctt

SEQ ID NO: 391564 - DNA, 30 bp, Artificial Sequence
  Synthetic oligonucleotide
gcctaatagtcgaaatcttttatccggctt

SEQ ID NO: 391565 - DNA, 30 bp, Artificial Sequence
  Synthetic oligonucleotide
cagacgaaaattaagtcctgttagcggctt

SEQ ID NO: 391566 - DNA, 30 bp, Artificial Sequence
  Synthetic oligonucleotide
gacagcataccccagtagatggatcggctt

SEQ ID NO: 391567 - DNA, 30 bp, Artificial Sequence
  Synthetic oligonucleotide
cgtagcttgttcgctaggtgttttcggctt

SEQ ID NO: 391568 - DNA, 30 bp, Artificial Sequence
  Synthetic oligonucleotide
accctcctcgatttgtgggcgaaagggctt

SEQ ID NO: 391569 - DNA, 30 bp, Artificial Sequence
  Synthetic oligonucleotide
gagagcactgtcgctaaaaacggagggctt

SEQ ID NO: 391570 - DNA, 30 bp, Artificial Sequence
  Synthetic oligonucleotide
gtgtcgcaattgttgtagtatttagggctt

SEQ ID NO: 391571 - DNA, 30 bp, Artificial Sequence
  Synthetic oligonucleotide
tatagggactggacgcgataacacgggctt

SEQ ID NO: 391572 - DNA, 30 bp, Artificial Sequence
  Synthetic oligonucleotide
tctgtggcgtaaaggaaagcgcccgggctt

SEQ ID NO: 391573 - DNA, 30 bp, Artificial Sequence
  Synthetic oligonucleotide
gcacatggcgcttgatagagaaaggggctt

SEQ ID NO: 391574 - DNA, 30 bp, Artificial Sequence
  Synthetic oligonucleotide
tctttaagattgattcatgatgcggggctt

SEQ ID NO: 391575 - DNA, 30 bp, Artificial Sequence
  Synthetic oligonucleotide
cacatagttgcattagttaaacatgggctt

SEQ ID NO: 391576 - DNA, 30 bp, Artificial Sequence
  Synthetic oligonucleotide
gtttgtcttacgtcagaagttgttgggctt

SEQ ID NO: 391577 - DNA, 30 bp, Artificial Sequence
  Synthetic oligonucleotide
taagaataaaaagctggtccttaatggctt

SEQ ID NO: 391578 - DNA, 30 bp, Artificial Sequence
  Synthetic oligonucleotide
gttccgtgaggggaatcaaacgtctggctt

SEQ ID NO: 391579 - DNA, 30 bp, Artificial Sequence
  Synthetic oligonucleotide
ttgcagtccgttttcggttagcggtggctt

SEQ ID NO: 391580 - DNA, 30 bp, Artificial Sequence
  Synthetic oligonucleotide
gtgaggtgattcttttatggtatgtggctt

SEQ ID NO: 391581 - DNA, 30 bp, Artificial Sequence
  Synthetic oligonucleotide
ttagtcattaagtatcccaaacgttggctt

SEQ ID NO: 391582 - DNA, 30 bp, Artificial Sequence
  Synthetic oligonucleotide
catcccactctggtcgctccatcaatgctt

SEQ ID NO: 391583 - DNA, 30 bp, Artificial Sequence
  Synthetic oligonucleotide
agtgcttggacccacccaggctcaatgctt

SEQ ID NO: 391584 - DNA, 30 bp, Artificial Sequence
  Synthetic oligonucleotide
ctagagtctccttgggattaaccgatgctt

SEQ ID NO: 391585 - DNA, 30 bp, Artificial Sequence
  Synthetic oligonucleotide
tacgagatgtatccctaaccagcgatgctt

SEQ ID NO: 391586 - DNA, 30 bp, Artificial Sequence
  Synthetic oligonucleotide
ttgttatctgtgccttagagcatgatgctt

SEQ ID NO: 391587 - DNA, 30 bp, Artificial Sequence
  Synthetic oligonucleotide
tcgatcgaactagcaccatatatgatgctt

SEQ ID NO: 391588 - DNA, 30 bp, Artificial Sequence
  Synthetic oligonucleotide
attggttagaatacgtggccgattatgctt

SEQ ID NO: 391589 - DNA, 30 bp, Artificial Sequence
  Synthetic oligonucleotide
atcgaggctgctggtcatgcccaactgctt

SEQ ID NO: 391590 - DNA, 30 bp, Artificial Sequence
  Synthetic oligonucleotide
tgttaattaggtaatttttcgtaactgctt

SEQ ID NO: 391591 - DNA, 30 bp, Artificial Sequence
  Synthetic oligonucleotide
catgcctggccacgtaattgtttcctgctt

SEQ ID NO: 391592 - DNA, 30 bp, Artificial Sequence
  Synthetic oligonucleotide
ctggctgcgtgatcgccaaacacgctgctt

SEQ ID NO: 391593 - DNA, 30 bp, Artificial Sequence
  Synthetic oligonucleotide
aatgccaactggggttctgggagtctgctt

SEQ ID NO: 391594 - DNA, 30 bp, Artificial Sequence
  Synthetic oligonucleotide
tattgaatcagccggttcgtaatagtgctt

SEQ ID NO: 391595 - DNA, 30 bp, Artificial Sequence
  Synthetic oligonucleotide
cgtggggtagatgacattagggttgtgctt

SEQ ID NO: 391596 - DNA, 30 bp, Artificial Sequence
  Synthetic oligonucleotide
tccatacttcttgggtcctaacaattgctt

SEQ ID NO: 391597 - DNA, 30 bp, Artificial Sequence
  Synthetic oligonucleotide
aagcggctagctcatgtaatagcattgctt

SEQ ID NO: 391598 - DNA, 30 bp, Artificial Sequence
  Synthetic oligonucleotide
tggaaagcggcctaaagtatgatattgctt

SEQ ID NO: 391599 - DNA, 30 bp, Artificial Sequence
  Synthetic oligonucleotide
agagctgatcgcgaccacttgttcttgctt

SEQ ID NO: 391600 - DNA, 30 bp, Artificial Sequence
  Synthetic oligonucleotide
gatgctgctttcgcgtacgtcgggttgctt

SEQ ID NO: 391601 - DNA, 30 bp, Artificial Sequence
  Synthetic oligonucleotide
aggagacgtgaccatggggttaatttgctt

SEQ ID NO: 391602 - DNA, 30 bp, Artificial Sequence
  Synthetic oligonucleotide
aacgaggagggccgctagcgggctttgctt

SEQ ID NO: 391603 - DNA, 30 bp, Artificial Sequence
  Synthetic oligonucleotide
gtgggggtcttaggaaatgatagtttgctt

SEQ ID NO: 391604 - DNA, 30 bp, Artificial Sequence
  Synthetic oligonucleotide
acttttatacgaaacgagttaggtttgctt

SEQ ID NO: 391605 - DNA, 30 bp, Artificial Sequence
  Synthetic oligonucleotide
ggttagtgtttgagtgtcggctgtttgctt

SEQ ID NO: 391606 - DNA, 30 bp, Artificial Sequence
  Synthetic oligonucleotide
ttctggcactgcgcagtgtcagcaaatctt

SEQ ID NO: 391607 - DNA, 30 bp, Artificial Sequence
  Synthetic oligonucleotide
tatagctcaaccgtccaaccgtagaatctt

SEQ ID NO: 391608 - DNA, 30 bp, Artificial Sequence
  Synthetic oligonucleotide
aaaccagctcgacacagtatgatgaatctt

SEQ ID NO: 391609 - DNA, 30 bp, Artificial Sequence
  Synthetic oligonucleotide
ccaggtttcacagagggtggcctgaatctt

SEQ ID NO: 391610 - DNA, 30 bp, Artificial Sequence
  Synthetic oligonucleotide
ggagcaccgcgcacactggaagtgaatctt

SEQ ID NO: 391611 - DNA, 30 bp, Artificial Sequence
  Synthetic oligonucleotide
aaatgggcatttggactctgccttaatctt

SEQ ID NO: 391612 - DNA, 30 bp, Artificial Sequence
  Synthetic oligonucleotide
ggtttcaccgactcgcccgcaagccatctt

SEQ ID NO: 391613 - DNA, 30 bp, Artificial Sequence
  Synthetic oligonucleotide
actggggaagtagcgtatcgattccatctt

SEQ ID NO: 391614 - DNA, 30 bp, Artificial Sequence
  Synthetic oligonucleotide
ttcagacgaatcgagtggcaccggcatctt

SEQ ID NO: 391615 - DNA, 30 bp, Artificial Sequence
  Synthetic oligonucleotide
cccggcagattgattagtacgtctcatctt

SEQ ID NO: 391616 - DNA, 30 bp, Artificial Sequence
  Synthetic oligonucleotide
ctaatagtccgtataccgcctcgtcatctt

SEQ ID NO: 391617 - DNA, 30 bp, Artificial Sequence
  Synthetic oligonucleotide
ggaatcaatggttataatgctcgtcatctt

SEQ ID NO: 391618 - DNA, 30 bp, Artificial Sequence
  Synthetic oligonucleotide
ggccgacgcttgctttatgggtgtcatctt

SEQ ID NO: 391619 - DNA, 30 bp, Artificial Sequence
  Synthetic oligonucleotide
gacgatggtaaatgcttgaggatcgatctt

SEQ ID NO: 391620 - DNA, 30 bp, Artificial Sequence
  Synthetic oligonucleotide
ggcacacggtgtagatagaccggggatctt

SEQ ID NO: 391621 - DNA, 30 bp, Artificial Sequence
  Synthetic oligonucleotide
atcaggaaagttcctaggtccggggatctt

SEQ ID NO: 391622 - DNA, 30 bp, Artificial Sequence
  Synthetic oligonucleotide
ttccacttgtcacagttgatggtggatctt

SEQ ID NO: 391623 - DNA, 30 bp, Artificial Sequence
  Synthetic oligonucleotide
cggtattctttacgttgtacgagtgatctt

SEQ ID NO: 391624 - DNA, 30 bp, Artificial Sequence
  Synthetic oligonucleotide
ttacacagataaacaacctggtgtgatctt

SEQ ID NO: 391625 - DNA, 30 bp, Artificial Sequence
  Synthetic oligonucleotide
tccttaattgtattcaacggctgatatctt

SEQ ID NO: 391626 - DNA, 30 bp, Artificial Sequence
  Synthetic oligonucleotide
atgttcaacaggttttgatacgtctatctt

SEQ ID NO: 391627 - DNA, 30 bp, Artificial Sequence
  Synthetic oligonucleotide
ccatacttagcgtatcatcgcccgtatctt

SEQ ID NO: 391628 - DNA, 30 bp, Artificial Sequence
  Synthetic oligonucleotide
gtcagagatgatatagcggagaggtatctt

SEQ ID NO: 391629 - DNA, 30 bp, Artificial Sequence
  Synthetic oligonucleotide
cttctgctgggggttgtggcgaggtatctt

SEQ ID NO: 391630 - DNA, 29 bp, Artificial Sequence
  Synthetic oligonucleotide
cgaatcctgggacgtaggtggggtatctt

SEQ ID NO: 391631 - DNA, 30 bp, Artificial Sequence
  Synthetic oligonucleotide
gccttggggaatgcattcatgaaaactctt

SEQ ID NO: 391632 - DNA, 30 bp, Artificial Sequence
  Synthetic oligonucleotide
ggacatgtacctgatagggcagaaactctt

SEQ ID NO: 391633 - DNA, 29 bp, Artificial Sequence
  Synthetic oligonucleotide
gccaatgcggtggtcggcgaccaactctt

SEQ ID NO: 391634 - DNA, 30 bp, Artificial Sequence
  Synthetic oligonucleotide
tgtgcgcggactctgcgtatgtacactctt

SEQ ID NO: 391635 - DNA, 30 bp, Artificial Sequence
  Synthetic oligonucleotide
gatatctgccccgtgcttcgggttactctt

SEQ ID NO: 391636 - DNA, 30 bp, Artificial Sequence
  Synthetic oligonucleotide
acgttccttagtccgtatggaacacctctt

SEQ ID NO: 391637 - DNA, 30 bp, Artificial Sequence
  Synthetic oligonucleotide
ggtctattaagcctcacagtaagacctctt

SEQ ID NO: 391638 - DNA, 30 bp, Artificial Sequence
  Synthetic oligonucleotide
atacccaccctaattcttcagacccctctt

SEQ ID NO: 391639 - DNA, 30 bp, Artificial Sequence
  Synthetic oligonucleotide
attctcccagggaaagaacacaagcctctt

SEQ ID NO: 391640 - DNA, 30 bp, Artificial Sequence
  Synthetic oligonucleotide
gaaggggtccttcatattcggaagcctctt

SEQ ID NO: 391641 - DNA, 30 bp, Artificial Sequence
  Synthetic oligonucleotide
cctcgcgagtcgggatcgcgatgtcctctt

SEQ ID NO: 391642 - DNA, 30 bp, Artificial Sequence
  Synthetic oligonucleotide
gctggataatttggttcataaattcctctt

SEQ ID NO: 391643 - DNA, 30 bp, Artificial Sequence
  Synthetic oligonucleotide
gcgataaggcggggtgagtaccttcctctt

SEQ ID NO: 391644 - DNA, 30 bp, Artificial Sequence
  Synthetic oligonucleotide
gttttgaaatttgttggatagaaggctctt

SEQ ID NO: 391645 - DNA, 30 bp, Artificial Sequence
  Synthetic oligonucleotide
acgacataatatttttttgttctggctctt

SEQ ID NO: 391646 - DNA, 30 bp, Artificial Sequence
  Synthetic oligonucleotide
cacagagcaccttcagggatgcttgctctt

SEQ ID NO: 391647 - DNA, 30 bp, Artificial Sequence
  Synthetic oligonucleotide
cggcaaaacttcaatgtaatttgatctctt

SEQ ID NO: 391648 - DNA, 30 bp, Artificial Sequence
  Synthetic oligonucleotide
ttcgaacgacattgtttgacatagtctctt

SEQ ID NO: 391649 - DNA, 30 bp, Artificial Sequence
  Synthetic oligonucleotide
gattgcattgacttactgagctaaagtctt

SEQ ID NO: 391650 - DNA, 30 bp, Artificial Sequence
  Synthetic oligonucleotide
aggaaagaccgtagggttatcctaagtctt

SEQ ID NO: 391651 - DNA, 30 bp, Artificial Sequence
  Synthetic oligonucleotide
agcaatagtaaagagctcccgtacagtctt

SEQ ID NO: 391652 - DNA, 30 bp, Artificial Sequence
  Synthetic oligonucleotide
gttatcacacaggagtttaagcgcagtctt

SEQ ID NO: 391653 - DNA, 30 bp, Artificial Sequence
  Synthetic oligonucleotide
tagtcaaacgtcaacctgcaaaggagtctt

SEQ ID NO: 391654 - DNA, 30 bp, Artificial Sequence
  Synthetic oligonucleotide
agattttaaaactatcactcgactagtctt

SEQ ID NO: 391655 - DNA, 30 bp, Artificial Sequence
  Synthetic oligonucleotide
tcgcgccgcctgcccaggacatcccgtctt

SEQ ID NO: 391656 - DNA, 30 bp, Artificial Sequence
  Synthetic oligonucleotide
tgggtcataaatgcgctcaaaagtcgtctt

SEQ ID NO: 391657 - DNA, 30 bp, Artificial Sequence
  Synthetic oligonucleotide
tataaccatcggaagtaaccatacggtctt

SEQ ID NO: 391658 - DNA, 30 bp, Artificial Sequence
  Synthetic oligonucleotide
gcttcttaagcgcaatgttcggtgggtctt

SEQ ID NO: 391659 - DNA, 30 bp, Artificial Sequence
  Synthetic oligonucleotide
ggaccctacgagcccagatactctggtctt

SEQ ID NO: 391660 - DNA, 30 bp, Artificial Sequence
  Synthetic oligonucleotide
tacgtacggttcccgggtaaatttggtctt

SEQ ID NO: 391661 - DNA, 30 bp, Artificial Sequence
  Synthetic oligonucleotide
cgaagcgcacgaccatgagacccatgtctt

SEQ ID NO: 391662 - DNA, 30 bp, Artificial Sequence
  Synthetic oligonucleotide
gtgcaagctcgcatgacaccctcatgtctt

SEQ ID NO: 391663 - DNA, 30 bp, Artificial Sequence
  Synthetic oligonucleotide
atcctaggtgcatatctatggagatgtctt

SEQ ID NO: 391664 - DNA, 30 bp, Artificial Sequence
  Synthetic oligonucleotide
gctcttatcgaccgatcgtcaacctgtctt

SEQ ID NO: 391665 - DNA, 30 bp, Artificial Sequence
  Synthetic oligonucleotide
aaaactaggcttagacgtgagtgctgtctt

SEQ ID NO: 391666 - DNA, 30 bp, Artificial Sequence
  Synthetic oligonucleotide
ggcattacagtatacacaggacgttgtctt

SEQ ID NO: 391667 - DNA, 30 bp, Artificial Sequence
  Synthetic oligonucleotide
gactctcgtccctgacgagccacaattctt

SEQ ID NO: 391668 - DNA, 30 bp, Artificial Sequence
  Synthetic oligonucleotide
acgatactacgtttagggtacagaattctt

SEQ ID NO: 391669 - DNA, 30 bp, Artificial Sequence
  Synthetic oligonucleotide
tacggaacaactgccggtccgcccattctt

SEQ ID NO: 391670 - DNA, 30 bp, Artificial Sequence
  Synthetic oligonucleotide
acttcgtctgcacactccaggtagattctt

SEQ ID NO: 391671 - DNA, 30 bp, Artificial Sequence
  Synthetic oligonucleotide
caacatgacctgttgaagattttgattctt

SEQ ID NO: 391672 - DNA, 30 bp, Artificial Sequence
  Synthetic oligonucleotide
aattttcggcgagctcatgccaatattctt

SEQ ID NO: 391673 - DNA, 31 bp, Artificial Sequence
  Synthetic oligonucleotide
catttgtgtccgatacagacacacacttctt

SEQ ID NO: 391674 - DNA, 30 bp, Artificial Sequence
  Synthetic oligonucleotide
aacacgttggatgtgcgctctacacttctt

SEQ ID NO: 391675 - DNA, 30 bp, Artificial Sequence
  Synthetic oligonucleotide
tacacctaccttcatgttttaatccttctt

SEQ ID NO: 391676 - DNA, 30 bp, Artificial Sequence
  Synthetic oligonucleotide
acaacatcggtccgttcatggcagcttctt

SEQ ID NO: 391677 - DNA, 30 bp, Artificial Sequence
  Synthetic oligonucleotide
gagtgccgaagggctcaaactgcgcttctt

SEQ ID NO: 391678 - DNA, 30 bp, Artificial Sequence
  Synthetic oligonucleotide
atacaagttggtatggagttagggcttctt

SEQ ID NO: 391679 - DNA, 30 bp, Artificial Sequence
  Synthetic oligonucleotide
ccacttagaatccttttctgacatcttctt

SEQ ID NO: 391680 - DNA, 30 bp, Artificial Sequence
  Synthetic oligonucleotide
cctaccctacacacgttgggttttcttctt

SEQ ID NO: 391681 - DNA, 30 bp, Artificial Sequence
  Synthetic oligonucleotide
aattacgccaaatggggaacgaaagttctt

SEQ ID NO: 391682 - DNA, 30 bp, Artificial Sequence
  Synthetic oligonucleotide
cctgcgctttagcgcggttaataagttctt

SEQ ID NO: 391683 - DNA, 30 bp, Artificial Sequence
  Synthetic oligonucleotide
tagctcatataggcgggaccaacagttctt

SEQ ID NO: 391684 - DNA, 30 bp, Artificial Sequence
  Synthetic oligonucleotide
aagatagaatgatgcgtagaatgagttctt

SEQ ID NO: 391685 - DNA, 30 bp, Artificial Sequence
  Synthetic oligonucleotide
taatccccgggcggtgaaaccgtcgttctt

SEQ ID NO: 391686 - DNA, 30 bp, Artificial Sequence
  Synthetic oligonucleotide
ctgcttggtggttctagacaggatgttctt

SEQ ID NO: 391687 - DNA, 30 bp, Artificial Sequence
  Synthetic oligonucleotide
aatacgtggacagggtagcggtatgttctt

SEQ ID NO: 391688 - DNA, 30 bp, Artificial Sequence
  Synthetic oligonucleotide
tacgtctacactgccgaaatccgtgttctt

SEQ ID NO: 391689 - DNA, 30 bp, Artificial Sequence
  Synthetic oligonucleotide
caattcctattacgaaatgaatttgttctt

SEQ ID NO: 391690 - DNA, 30 bp, Artificial Sequence
  Synthetic oligonucleotide
tgattcgccaacgaaggttacagatttctt

SEQ ID NO: 391691 - DNA, 30 bp, Artificial Sequence
  Synthetic oligonucleotide
tggtaaggatacacggcgggtttatttctt

SEQ ID NO: 391692 - DNA, 32 bp, Artificial Sequence
  Synthetic oligonucleotide
ggcttgtgtcacttcgccgattctcctttctt

SEQ ID NO: 391693 - DNA, 30 bp, Artificial Sequence
  Synthetic oligonucleotide
gtcatagtaagtgtttgccgtgtctttctt

SEQ ID NO: 391694 - DNA, 30 bp, Artificial Sequence
  Synthetic oligonucleotide
gcaatacagccgcacttcgctatgtttctt

SEQ ID NO: 391695 - DNA, 30 bp, Artificial Sequence
  Synthetic oligonucleotide
aacatgacggaatcacagagacaaaaagtt

SEQ ID NO: 391696 - DNA, 30 bp, Artificial Sequence
  Synthetic oligonucleotide
gacgtagtgtatacgtacatggcaaaagtt

SEQ ID NO: 391697 - DNA, 30 bp, Artificial Sequence
  Synthetic oligonucleotide
agtaggattcatagatgcatacgaaaagtt

SEQ ID NO: 391698 - DNA, 30 bp, Artificial Sequence
  Synthetic oligonucleotide
actttgttaagcacagtctaccacaaagtt

SEQ ID NO: 391699 - DNA, 30 bp, Artificial Sequence
  Synthetic oligonucleotide
agcctcctaggctttctctgtaccaaagtt

SEQ ID NO: 391700 - DNA, 30 bp, Artificial Sequence
  Synthetic oligonucleotide
ctggcccaaggccggtgtctacgcaaagtt

SEQ ID NO: 391701 - DNA, 30 bp, Artificial Sequence
  Synthetic oligonucleotide
aactggcgagaatgctttcgaaagaaagtt

SEQ ID NO: 391702 - DNA, 30 bp, Artificial Sequence
  Synthetic oligonucleotide
ataagaagttatgtcggacgggcgaaagtt

SEQ ID NO: 391703 - DNA, 30 bp, Artificial Sequence
  Synthetic oligonucleotide
gtcccttataccctgagcggccggaaagtt

SEQ ID NO: 391704 - DNA, 30 bp, Artificial Sequence
  Synthetic oligonucleotide
ggcccctataaagtctgccgctataaagtt

SEQ ID NO: 391705 - DNA, 30 bp, Artificial Sequence
  Synthetic oligonucleotide
gaccatagtaatccatggacccctaaagtt

SEQ ID NO: 391706 - DNA, 30 bp, Artificial Sequence
  Synthetic oligonucleotide
ggtactgtcctttgttacgaaggtaaagtt

SEQ ID NO: 391707 - DNA, 30 bp, Artificial Sequence
  Synthetic oligonucleotide
gctgcaaaggttagggccacagaccaagtt

SEQ ID NO: 391708 - DNA, 30 bp, Artificial Sequence
  Synthetic oligonucleotide
attatccagtggcaagaaatacgccaagtt

SEQ ID NO: 391709 - DNA, 30 bp, Artificial Sequence
  Synthetic oligonucleotide
ttggtagaaacaggctctgccaggcaagtt

SEQ ID NO: 391710 - DNA, 30 bp, Artificial Sequence
  Synthetic oligonucleotide
aaacgcatcccactaagagtctggcaagtt

SEQ ID NO: 391711 - DNA, 30 bp, Artificial Sequence
  Synthetic oligonucleotide
gagccagagagcgccgcaacaagtcaagtt

SEQ ID NO: 391712 - DNA, 30 bp, Artificial Sequence
  Synthetic oligonucleotide
aaccgtttctctcatgtgtcggcagaagtt

SEQ ID NO: 391713 - DNA, 30 bp, Artificial Sequence
  Synthetic oligonucleotide
aacatcttgatcacgagttacttcgaagtt

SEQ ID NO: 391714 - DNA, 30 bp, Artificial Sequence
  Synthetic oligonucleotide
gaatcaagtatgacggtaagaacggaagtt

SEQ ID NO: 391715 - DNA, 30 bp, Artificial Sequence
  Synthetic oligonucleotide
tacctagcaaattcggacggagtggaagtt

SEQ ID NO: 391716 - DNA, 30 bp, Artificial Sequence
  Synthetic oligonucleotide
gacacgcgttctagtgatagattggaagtt

SEQ ID NO: 391717 - DNA, 30 bp, Artificial Sequence
  Synthetic oligonucleotide
gggaacactaatctcttggtttctgaagtt

SEQ ID NO: 391718 - DNA, 30 bp, Artificial Sequence
  Synthetic oligonucleotide
ttttaaagtgcactgcgcgaagttgaagtt

SEQ ID NO: 391719 - DNA, 30 bp, Artificial Sequence
  Synthetic oligonucleotide
atcgttagtgagggatttgtccaataagtt

SEQ ID NO: 391720 - DNA, 30 bp, Artificial Sequence
  Synthetic oligonucleotide
gtgtgggcgtagaaaactcagccataagtt

SEQ ID NO: 391721 - DNA, 30 bp, Artificial Sequence
  Synthetic oligonucleotide
accgacatttgttcaatagggttataagtt

SEQ ID NO: 391722 - DNA, 30 bp, Artificial Sequence
  Synthetic oligonucleotide
tttggcggacagcaatgaccccactaagtt

SEQ ID NO: 391723 - DNA, 30 bp, Artificial Sequence
  Synthetic oligonucleotide
tttggccggtccgtcatgctgtactaagtt

SEQ ID NO: 391724 - DNA, 30 bp, Artificial Sequence
  Synthetic oligonucleotide
gatgaggatacattagtagttcgctaagtt

SEQ ID NO: 391725 - DNA, 30 bp, Artificial Sequence
  Synthetic oligonucleotide
ttcacgcacctggccccgtcttaaacagtt

SEQ ID NO: 391726 - DNA, 30 bp, Artificial Sequence
  Synthetic oligonucleotide
cgttctccgcccagcaaaggaccaacagtt

SEQ ID NO: 391727 - DNA, 30 bp, Artificial Sequence
  Synthetic oligonucleotide
tgactggaaatatcgtatgcatacacagtt

SEQ ID NO: 391728 - DNA, 30 bp, Artificial Sequence
  Synthetic oligonucleotide
cttgactattagtccatagggatcacagtt

SEQ ID NO: 391729 - DNA, 30 bp, Artificial Sequence
  Synthetic oligonucleotide
accgtatcagttccttagtagaagacagtt

SEQ ID NO: 391730 - DNA, 30 bp, Artificial Sequence
  Synthetic oligonucleotide
ggaaaaccgggtagcgcccgggagacagtt

SEQ ID NO: 391731 - DNA, 30 bp, Artificial Sequence
  Synthetic oligonucleotide
tgtaaacgctaactgttgcaaaggacagtt

SEQ ID NO: 391732 - DNA, 30 bp, Artificial Sequence
  Synthetic oligonucleotide
ctaagttccggcggtagcatcgggacagtt

SEQ ID NO: 391733 - DNA, 30 bp, Artificial Sequence
  Synthetic oligonucleotide
ggccaattgctttattgtcggaatacagtt

SEQ ID NO: 391734 - DNA, 30 bp, Artificial Sequence
  Synthetic oligonucleotide
ccactaaccatgtctgacagatctacagtt

SEQ ID NO: 391735 - DNA, 30 bp, Artificial Sequence
  Synthetic oligonucleotide
cacgtgtgggcctgatgggatggaccagtt

SEQ ID NO: 391736 - DNA, 30 bp, Artificial Sequence
  Synthetic oligonucleotide
aggcggtaatgttttctgagcgacccagtt

SEQ ID NO: 391737 - DNA, 30 bp, Artificial Sequence
  Synthetic oligonucleotide
cagcaaaagccatcaaaaattcccccagtt

SEQ ID NO: 391738 - DNA, 30 bp, Artificial Sequence
  Synthetic oligonucleotide
ccggtgtaattgcgtgcaacggtcccagtt

SEQ ID NO: 391739 - DNA, 30 bp, Artificial Sequence
  Synthetic oligonucleotide
cgaggtattgacggctcacgacggccagtt

SEQ ID NO: 391740 - DNA, 30 bp, Artificial Sequence
  Synthetic oligonucleotide
tggatatcccaagatttaccgtggccagtt

SEQ ID NO: 391741 - DNA, 30 bp, Artificial Sequence
  Synthetic oligonucleotide
gatcggcgttacacgggcaatagagcagtt

SEQ ID NO: 391742 - DNA, 30 bp, Artificial Sequence
  Synthetic oligonucleotide
cgggttaggttcacgtgcagcaaggcagtt

SEQ ID NO: 391743 - DNA, 30 bp, Artificial Sequence
  Synthetic oligonucleotide
taggattcatcctggtctggggaggcagtt

SEQ ID NO: 391744 - DNA, 30 bp, Artificial Sequence
  Synthetic oligonucleotide
gagaaaagtactcccctcttttgggcagtt

SEQ ID NO: 391745 - DNA, 30 bp, Artificial Sequence
  Synthetic oligonucleotide
gagtcatgtatcgcgagcttatcatcagtt

SEQ ID NO: 391746 - DNA, 30 bp, Artificial Sequence
  Synthetic oligonucleotide
gtccgtgcgtcagtggagatactatcagtt

SEQ ID NO: 391747 - DNA, 30 bp, Artificial Sequence
  Synthetic oligonucleotide
aaacgtcggccattaaatctaggctcagtt

SEQ ID NO: 391748 - DNA, 30 bp, Artificial Sequence
  Synthetic oligonucleotide
atccccgggcctgacattttgctctcagtt

SEQ ID NO: 391749 - DNA, 30 bp, Artificial Sequence
  Synthetic oligonucleotide
ttattctgcagggccagcagaaagtcagtt

SEQ ID NO: 391750 - DNA, 30 bp, Artificial Sequence
  Synthetic oligonucleotide
accagacgacgaatcgcaccggagtcagtt

SEQ ID NO: 391751 - DNA, 30 bp, Artificial Sequence
  Synthetic oligonucleotide
agattttaatcaaatcggggcttgtcagtt

SEQ ID NO: 391752 - DNA, 30 bp, Artificial Sequence
  Synthetic oligonucleotide
ggccccatagtgaatgcacagcgttcagtt

SEQ ID NO: 391753 - DNA, 30 bp, Artificial Sequence
  Synthetic oligonucleotide
ataatggtccaaatatggccgtgttcagtt

SEQ ID NO: 391754 - DNA, 29 bp, Artificial Sequence
  Synthetic oligonucleotide
agactagcctcaactgcggtggcagagtt

SEQ ID NO: 391755 - DNA, 30 bp, Artificial Sequence
  Synthetic oligonucleotide
gaattagacgaggttccttggctcagagtt

SEQ ID NO: 391756 - DNA, 30 bp, Artificial Sequence
  Synthetic oligonucleotide
acattgtgaattaataggctggcgagagtt

SEQ ID NO: 391757 - DNA, 30 bp, Artificial Sequence
  Synthetic oligonucleotide
atccggacacctgcgtcacctaatagagtt

SEQ ID NO: 391758 - DNA, 30 bp, Artificial Sequence
  Synthetic oligonucleotide
tctcttccgctcaggctcaagtatagagtt

SEQ ID NO: 391759 - DNA, 30 bp, Artificial Sequence
  Synthetic oligonucleotide
ggacgggacctaggtcccaggtctagagtt

SEQ ID NO: 391760 - DNA, 30 bp, Artificial Sequence
  Synthetic oligonucleotide
gctccaaacttagtctaaggatttagagtt

SEQ ID NO: 391761 - DNA, 30 bp, Artificial Sequence
  Synthetic oligonucleotide
gttaacgccaaacatcaatcgagacgagtt

SEQ ID NO: 391762 - DNA, 30 bp, Artificial Sequence
  Synthetic oligonucleotide
tacgtcagcatataccatagggtacgagtt

SEQ ID NO: 391763 - DNA, 30 bp, Artificial Sequence
  Synthetic oligonucleotide
aaagcaggatccgttgaccgccggcgagtt

SEQ ID NO: 391764 - DNA, 30 bp, Artificial Sequence
  Synthetic oligonucleotide
gcctaagctcggcttaatttaaatcgagtt

SEQ ID NO: 391765 - DNA, 30 bp, Artificial Sequence
  Synthetic oligonucleotide
atcagtcctttgtccgtctacggaggagtt

SEQ ID NO: 391766 - DNA, 30 bp, Artificial Sequence
  Synthetic oligonucleotide
gaggtctaataaaatttgtgactaggagtt

SEQ ID NO: 391767 - DNA, 30 bp, Artificial Sequence
  Synthetic oligonucleotide
gtgcgacgtactgaggggcgacccggagtt

SEQ ID NO: 391768 - DNA, 30 bp, Artificial Sequence
  Synthetic oligonucleotide
ctcgacgtttctagcgagcttcggggagtt

SEQ ID NO: 391769 - DNA, 30 bp, Artificial Sequence
  Synthetic oligonucleotide
gttgtagtagtcctacagtaggggggagtt

SEQ ID NO: 391770 - DNA, 30 bp, Artificial Sequence
  Synthetic oligonucleotide
tgaactgctcatccagagagtagatgagtt

SEQ ID NO: 391771 - DNA, 30 bp, Artificial Sequence
  Synthetic oligonucleotide
ccctatctccaagggtcggaatgctgagtt

SEQ ID NO: 391772 - DNA, 30 bp, Artificial Sequence
  Synthetic oligonucleotide
cgtctgttgtactccaacgaatggtgagtt

SEQ ID NO: 391773 - DNA, 30 bp, Artificial Sequence
  Synthetic oligonucleotide
gcatcaaatcgtctagccaagcattgagtt

SEQ ID NO: 391774 - DNA, 30 bp, Artificial Sequence
  Synthetic oligonucleotide
atgcccgagactctgcggattcgttgagtt

SEQ ID NO: 391775 - DNA, 30 bp, Artificial Sequence
  Synthetic oligonucleotide
ttgctcgcgtctggcccagcataaatagtt

SEQ ID NO: 391776 - DNA, 30 bp, Artificial Sequence
  Synthetic oligonucleotide
tcgtggtttcgggatataccgccaatagtt

SEQ ID NO: 391777 - DNA, 30 bp, Artificial Sequence
  Synthetic oligonucleotide
ggtcactgacgtttcgttgggcgaatagtt

SEQ ID NO: 391778 - DNA, 30 bp, Artificial Sequence
  Synthetic oligonucleotide
ttcatggccgatgcgttactctacatagtt

SEQ ID NO: 391779 - DNA, 30 bp, Artificial Sequence
  Synthetic oligonucleotide
aaaaggcgcttgcgcccacaggccatagtt

SEQ ID NO: 391780 - DNA, 30 bp, Artificial Sequence
  Synthetic oligonucleotide
ttactcaaaaaggtaggcaatggcatagtt

SEQ ID NO: 391781 - DNA, 30 bp, Artificial Sequence
  Synthetic oligonucleotide
aataaacatcttagctaataagtcatagtt

SEQ ID NO: 391782 - DNA, 30 bp, Artificial Sequence
  Synthetic oligonucleotide
ttctttaatttggataccggtgatatagtt

SEQ ID NO: 391783 - DNA, 30 bp, Artificial Sequence
  Synthetic oligonucleotide
cccagcggcatcgggtatgccaagctagtt

SEQ ID NO: 391784 - DNA, 30 bp, Artificial Sequence
  Synthetic oligonucleotide
tccgtgttccaaaacaacgccttagtagtt

SEQ ID NO: 391785 - DNA, 30 bp, Artificial Sequence
  Synthetic oligonucleotide
aaaaaataaagttgtcctgtcttagtagtt

SEQ ID NO: 391786 - DNA, 30 bp, Artificial Sequence
  Synthetic oligonucleotide
tttatggatggatgaaataagttagtagtt

SEQ ID NO: 391787 - DNA, 30 bp, Artificial Sequence
  Synthetic oligonucleotide
cccgggtacaccgccaaagtaaaggtagtt

SEQ ID NO: 391788 - DNA, 30 bp, Artificial Sequence
  Synthetic oligonucleotide
ctgctgtttgtccgcgttcggaaggtagtt

SEQ ID NO: 391789 - DNA, 30 bp, Artificial Sequence
  Synthetic oligonucleotide
attgcatagtgggaacttgatcaggtagtt

SEQ ID NO: 391790 - DNA, 30 bp, Artificial Sequence
  Synthetic oligonucleotide
ttacgtccgcaggggccagcactggtagtt

SEQ ID NO: 391791 - DNA, 30 bp, Artificial Sequence
  Synthetic oligonucleotide
gatcagtgatacgcaatgacccatgtagtt

SEQ ID NO: 391792 - DNA, 30 bp, Artificial Sequence
  Synthetic oligonucleotide
cggtcttagtgcggcccctttactgtagtt

SEQ ID NO: 391793 - DNA, 30 bp, Artificial Sequence
  Synthetic oligonucleotide
ccgagagctacagcactcaagcttgtagtt

SEQ ID NO: 391794 - DNA, 30 bp, Artificial Sequence
  Synthetic oligonucleotide
atggatatacgtacaggatactttgtagtt

SEQ ID NO: 391795 - DNA, 30 bp, Artificial Sequence
  Synthetic oligonucleotide
ttgaactggaacagaggcgctaaattagtt

SEQ ID NO: 391796 - DNA, 30 bp, Artificial Sequence
  Synthetic oligonucleotide
tttccgtaaaagtagcttagataattagtt

SEQ ID NO: 391797 - DNA, 30 bp, Artificial Sequence
  Synthetic oligonucleotide
gatactgaggaatacccggtctaattagtt

SEQ ID NO: 391798 - DNA, 30 bp, Artificial Sequence
  Synthetic oligonucleotide
cgtcgcgcctgtccaggtcagtaattagtt

SEQ ID NO: 391799 - DNA, 30 bp, Artificial Sequence
  Synthetic oligonucleotide
gttctgcctgaagaagcgccgtaattagtt

SEQ ID NO: 391800 - DNA, 30 bp, Artificial Sequence
  Synthetic oligonucleotide
aaactcgaacaacgcggtcctcacttagtt

SEQ ID NO: 391801 - DNA, 30 bp, Artificial Sequence
  Synthetic oligonucleotide
tagggaggacgattgccactggacttagtt

SEQ ID NO: 391802 - DNA, 30 bp, Artificial Sequence
  Synthetic oligonucleotide
cgacgcggcgaaaagagattggccttagtt

SEQ ID NO: 391803 - DNA, 30 bp, Artificial Sequence
  Synthetic oligonucleotide
ctagtctgcgcaaaacagaatcagttagtt

SEQ ID NO: 391804 - DNA, 30 bp, Artificial Sequence
  Synthetic oligonucleotide
aagtataacgctgtaaagaaagagttagtt

SEQ ID NO: 391805 - DNA, 30 bp, Artificial Sequence
  Synthetic oligonucleotide
ttcgaatatacttggcgtatccggttagtt

SEQ ID NO: 391806 - DNA, 30 bp, Artificial Sequence
  Synthetic oligonucleotide
gaggtaggtcctgcgtgcagaaatttagtt

SEQ ID NO: 391807 - DNA, 30 bp, Artificial Sequence
  Synthetic oligonucleotide
gtcacacaagacctatagtgcagtttagtt

SEQ ID NO: 391808 - DNA, 30 bp, Artificial Sequence
  Synthetic oligonucleotide
gaatcgtgaatcgctgggaaggtaaacgtt

SEQ ID NO: 391809 - DNA, 30 bp, Artificial Sequence
  Synthetic oligonucleotide
actggggggcgttatcgcatttccaacgtt

SEQ ID NO: 391810 - DNA, 30 bp, Artificial Sequence
  Synthetic oligonucleotide
agcatcttactattatatgcctgcaacgtt

SEQ ID NO: 391811 - DNA, 30 bp, Artificial Sequence
  Synthetic oligonucleotide
gcgacgtagccgtcatctaggttcaacgtt

SEQ ID NO: 391812 - DNA, 30 bp, Artificial Sequence
  Synthetic oligonucleotide
ttcacgattaatagaggcgtctagaacgtt

SEQ ID NO: 391813 - DNA, 30 bp, Artificial Sequence
  Synthetic oligonucleotide
gcttaggcaacgctgaacaaccgtaacgtt

SEQ ID NO: 391814 - DNA, 30 bp, Artificial Sequence
  Synthetic oligonucleotide
ctttctcaacgatccggccgtccacacgtt

SEQ ID NO: 391815 - DNA, 30 bp, Artificial Sequence
  Synthetic oligonucleotide
cctgggatttgctgcagaagcagacacgtt

SEQ ID NO: 391816 - DNA, 30 bp, Artificial Sequence
  Synthetic oligonucleotide
cggtgaattgattttacagggggacacgtt

SEQ ID NO: 391817 - DNA, 30 bp, Artificial Sequence
  Synthetic oligonucleotide
ggtagggaactgcccggcgactgacacgtt

SEQ ID NO: 391818 - DNA, 30 bp, Artificial Sequence
  Synthetic oligonucleotide
taaccattgggaaatatcgttatacacgtt

SEQ ID NO: 391819 - DNA, 30 bp, Artificial Sequence
  Synthetic oligonucleotide
gactaacgatttcaataactgtaccacgtt

SEQ ID NO: 391820 - DNA, 30 bp, Artificial Sequence
  Synthetic oligonucleotide
accaaaatatccgcaagcaatagccacgtt

SEQ ID NO: 391821 - DNA, 30 bp, Artificial Sequence
  Synthetic oligonucleotide
gaataagatagcatcttcttaaatcacgtt

SEQ ID NO: 391822 - DNA, 30 bp, Artificial Sequence
  Synthetic oligonucleotide
ccgggacataacgcgattggacctcacgtt

SEQ ID NO: 391823 - DNA, 30 bp, Artificial Sequence
  Synthetic oligonucleotide
gctacgagattcgcggcataaattcacgtt

SEQ ID NO: 391824 - DNA, 30 bp, Artificial Sequence
  Synthetic oligonucleotide
gcactagtgtctgccgtagttaaagacgtt

SEQ ID NO: 391825 - DNA, 30 bp, Artificial Sequence
  Synthetic oligonucleotide
cactatcagggggcagaagcgcaagacgtt

SEQ ID NO: 391826 - DNA, 30 bp, Artificial Sequence
  Synthetic oligonucleotide
gcgctcgggcgtgttccaattgaagacgtt

SEQ ID NO: 391827 - DNA, 30 bp, Artificial Sequence
  Synthetic oligonucleotide
acgcaaatgctttttcaggagaccgacgtt

SEQ ID NO: 391828 - DNA, 30 bp, Artificial Sequence
  Synthetic oligonucleotide
cctggaagcgatcacagacacccggacgtt

SEQ ID NO: 391829 - DNA, 30 bp, Artificial Sequence
  Synthetic oligonucleotide
aacataggcgcgcgaacgcaagcggacgtt

SEQ ID NO: 391830 - DNA, 30 bp, Artificial Sequence
  Synthetic oligonucleotide
tggccatccaacaatttagcgtcggacgtt

SEQ ID NO: 391831 - DNA, 30 bp, Artificial Sequence
  Synthetic oligonucleotide
gtgcgccatattgtctcttacatggacgtt

SEQ ID NO: 391832 - DNA, 30 bp, Artificial Sequence
  Synthetic oligonucleotide
aatgagtaatcaataggttattaatacgtt

SEQ ID NO: 391833 - DNA, 30 bp, Artificial Sequence
  Synthetic oligonucleotide
ggttggcctcgagatatttatccatacgtt

SEQ ID NO: 391834 - DNA, 30 bp, Artificial Sequence
  Synthetic oligonucleotide
gtaccctgaggagatggtaagttatacgtt

SEQ ID NO: 391835 - DNA, 30 bp, Artificial Sequence
  Synthetic oligonucleotide
tagaaattcgaatagtgggccccgtacgtt

SEQ ID NO: 391836 - DNA, 30 bp, Artificial Sequence
  Synthetic oligonucleotide
tgccgtgatgacgcagggctctggtacgtt

SEQ ID NO: 391837 - DNA, 30 bp, Artificial Sequence
  Synthetic oligonucleotide
gccattcggctataagcaccattgtacgtt

SEQ ID NO: 391838 - DNA, 30 bp, Artificial Sequence
  Synthetic oligonucleotide
ggctatagagtaatcaattcctgaaccgtt

SEQ ID NO: 391839 - DNA, 30 bp, Artificial Sequence
  Synthetic oligonucleotide
agacgagagatttggtgtctcacgaccgtt

SEQ ID NO: 391840 - DNA, 30 bp, Artificial Sequence
  Synthetic oligonucleotide
ttcgtaaatctataattcccacgtaccgtt

SEQ ID NO: 391841 - DNA, 30 bp, Artificial Sequence
  Synthetic oligonucleotide
aggtccgaaacccggaccagggttaccgtt

SEQ ID NO: 391842 - DNA, 30 bp, Artificial Sequence
  Synthetic oligonucleotide
ctttggataacgtccaaaaggtttaccgtt

SEQ ID NO: 391843 - DNA, 30 bp, Artificial Sequence
  Synthetic oligonucleotide
cagacgccaatagtcttccacgtacccgtt

SEQ ID NO: 391844 - DNA, 30 bp, Artificial Sequence
  Synthetic oligonucleotide
gcaactcgtttcgcgaacacgtctcccgtt

SEQ ID NO: 391845 - DNA, 30 bp, Artificial Sequence
  Synthetic oligonucleotide
gatggaaaggcggcgaccgaacgcgccgtt

SEQ ID NO: 391846 - DNA, 27 bp, Artificial Sequence
  Synthetic oligonucleotide
tcatcaattggtttgatatatgccgtt

SEQ ID NO: 391847 - DNA, 30 bp, Artificial Sequence
  Synthetic oligonucleotide
ggtgggcaccgtcctgcctgtcactccgtt

SEQ ID NO: 391848 - DNA, 30 bp, Artificial Sequence
  Synthetic oligonucleotide
ccataaaacgtcatttaagtaatctccgtt

SEQ ID NO: 391849 - DNA, 30 bp, Artificial Sequence
  Synthetic oligonucleotide
agtgggtctagaatcaacgctgtctccgtt

SEQ ID NO: 391850 - DNA, 30 bp, Artificial Sequence
  Synthetic oligonucleotide
cgtgtatacctcggcactttggcgtccgtt

SEQ ID NO: 391851 - DNA, 30 bp, Artificial Sequence
  Synthetic oligonucleotide
gccaagacaagtacgggccgtacttccgtt

SEQ ID NO: 391852 - DNA, 30 bp, Artificial Sequence
  Synthetic oligonucleotide
agggtagctaggcggggactagcttccgtt

SEQ ID NO: 391853 - DNA, 30 bp, Artificial Sequence
  Synthetic oligonucleotide
gtctttcggctcggaagataaccaagcgtt

SEQ ID NO: 391854 - DNA, 30 bp, Artificial Sequence
  Synthetic oligonucleotide
acgctgttaaaattataaaaatcaagcgtt

SEQ ID NO: 391855 - DNA, 30 bp, Artificial Sequence
  Synthetic oligonucleotide
tacctctatatcttctcccggttaagcgtt

SEQ ID NO: 391856 - DNA, 30 bp, Artificial Sequence
  Synthetic oligonucleotide
ggagaacacacgggcagttttgggagcgtt

SEQ ID NO: 391857 - DNA, 30 bp, Artificial Sequence
  Synthetic oligonucleotide
ctcggactcgactcagtgtcttgtagcgtt

SEQ ID NO: 391858 - DNA, 30 bp, Artificial Sequence
  Synthetic oligonucleotide
taaacacgacagaatgtcgtagttagcgtt

SEQ ID NO: 391859 - DNA, 30 bp, Artificial Sequence
  Synthetic oligonucleotide
gtggattactaagttaatgcggcgcgcgtt

SEQ ID NO: 391860 - DNA, 30 bp, Artificial Sequence
  Synthetic oligonucleotide
ttatcaagtattgctttctcctggcgcgtt

SEQ ID NO: 391861 - DNA, 30 bp, Artificial Sequence
  Synthetic oligonucleotide
cgataacacaggcttattccgatgcgcgtt

SEQ ID NO: 391862 - DNA, 30 bp, Artificial Sequence
  Synthetic oligonucleotide
cttacccgcctggccggctagagtcgcgtt

SEQ ID NO: 391863 - DNA, 30 bp, Artificial Sequence
  Synthetic oligonucleotide
cctgagatccgtaggtttgcttaaggcgtt

SEQ ID NO: 391864 - DNA, 30 bp, Artificial Sequence
  Synthetic oligonucleotide
tgatgtagggccgattcggcggcaggcgtt

SEQ ID NO: 391865 - DNA, 30 bp, Artificial Sequence
  Synthetic oligonucleotide
catattatcacacacataacactaggcgtt

SEQ ID NO: 391866 - DNA, 30 bp, Artificial Sequence
  Synthetic oligonucleotide
agccgggcccgcgctgcaatatatggcgtt

SEQ ID NO: 391867 - DNA, 30 bp, Artificial Sequence
  Synthetic oligonucleotide
tggcgttcagggattctgttagctggcgtt

SEQ ID NO: 391868 - DNA, 30 bp, Artificial Sequence
  Synthetic oligonucleotide
gctgggcaataggtcctaagctgtggcgtt

SEQ ID NO: 391869 - DNA, 30 bp, Artificial Sequence
  Synthetic oligonucleotide
tataataggggtgtataggtaggatgcgtt

SEQ ID NO: 391870 - DNA, 30 bp, Artificial Sequence
  Synthetic oligonucleotide
agcgcgtcagtgaaacgactacactgcgtt

SEQ ID NO: 391871 - DNA, 30 bp, Artificial Sequence
  Synthetic oligonucleotide
atcaggcgtgcgccattttgtaggtgcgtt

SEQ ID NO: 391872 - DNA, 30 bp, Artificial Sequence
  Synthetic oligonucleotide
tactacgtgctgtgcaaactatggtgcgtt

SEQ ID NO: 391873 - DNA, 30 bp, Artificial Sequence
  Synthetic oligonucleotide
acacgggcgctctaaatttacatgtgcgtt

SEQ ID NO: 391874 - DNA, 30 bp, Artificial Sequence
  Synthetic oligonucleotide
agcacgtcgacgggatcatttcaaatcgtt

SEQ ID NO: 391875 - DNA, 30 bp, Artificial Sequence
  Synthetic oligonucleotide
cctcaatgctgctgacctggagaaatcgtt

SEQ ID NO: 391876 - DNA, 30 bp, Artificial Sequence
  Synthetic oligonucleotide
ttctcaccgtcgccaatattcgccatcgtt

SEQ ID NO: 391877 - DNA, 30 bp, Artificial Sequence
  Synthetic oligonucleotide
catccgattgtccgtcaaacttccatcgtt

SEQ ID NO: 391878 - DNA, 30 bp, Artificial Sequence
  Synthetic oligonucleotide
gtactaaagtcggagcgtgagttcatcgtt

SEQ ID NO: 391879 - DNA, 30 bp, Artificial Sequence
  Synthetic oligonucleotide
gagtaacgaacaagggcgtcgcagatcgtt

SEQ ID NO: 391880 - DNA, 30 bp, Artificial Sequence
  Synthetic oligonucleotide
atctggatatatcaagggtcttcgatcgtt

SEQ ID NO: 391881 - DNA, 30 bp, Artificial Sequence
  Synthetic oligonucleotide
aacctgcgaatcggagaatcttcactcgtt

SEQ ID NO: 391882 - DNA, 30 bp, Artificial Sequence
  Synthetic oligonucleotide
ttaaaggttttaagaatttatttactcgtt

SEQ ID NO: 391883 - DNA, 30 bp, Artificial Sequence
  Synthetic oligonucleotide
tacagtggcttagacttatcaaacctcgtt

SEQ ID NO: 391884 - DNA, 30 bp, Artificial Sequence
  Synthetic oligonucleotide
gaagtccaggaggtgtaggacgacctcgtt

SEQ ID NO: 391885 - DNA, 30 bp, Artificial Sequence
  Synthetic oligonucleotide
ttccgtaagatatgtgtgtatgacctcgtt

SEQ ID NO: 391886 - DNA, 30 bp, Artificial Sequence
  Synthetic oligonucleotide
taacaggatcttggcggcagagccctcgtt

SEQ ID NO: 391887 - DNA, 30 bp, Artificial Sequence
  Synthetic oligonucleotide
tagtgggtcctaactccactaaggctcgtt

SEQ ID NO: 391888 - DNA, 30 bp, Artificial Sequence
  Synthetic oligonucleotide
cgtatttgaaacagctgccaacggctcgtt

SEQ ID NO: 391889 - DNA, 30 bp, Artificial Sequence
  Synthetic oligonucleotide
ctgtccggcgcggactacccgctgctcgtt

SEQ ID NO: 391890 - DNA, 30 bp, Artificial Sequence
  Synthetic oligonucleotide
tagaatcagtcacataacgccaatctcgtt

SEQ ID NO: 391891 - DNA, 30 bp, Artificial Sequence
  Synthetic oligonucleotide
cgtaggggttggtctacggccactctcgtt

SEQ ID NO: 391892 - DNA, 30 bp, Artificial Sequence
  Synthetic oligonucleotide
tatagctcactgaggtaaacgagtctcgtt

SEQ ID NO: 391893 - DNA, 30 bp, Artificial Sequence
  Synthetic oligonucleotide
agagtaagctcatgtcctatattcgtcgtt

SEQ ID NO: 391894 - DNA, 30 bp, Artificial Sequence
  Synthetic oligonucleotide
tcgtgaaaggcaacaactctagaggtcgtt

SEQ ID NO: 391895 - DNA, 30 bp, Artificial Sequence
  Synthetic oligonucleotide
atacggctatattcctgatccgaggtcgtt

SEQ ID NO: 391896 - DNA, 30 bp, Artificial Sequence
  Synthetic oligonucleotide
tttaattatacgtcccattccttggtcgtt

SEQ ID NO: 391897 - DNA, 30 bp, Artificial Sequence
  Synthetic oligonucleotide
ggtgaggcaaagtattttgttttggtcgtt

SEQ ID NO: 391898 - DNA, 30 bp, Artificial Sequence
  Synthetic oligonucleotide
ctgggggtacctaggcaactggctgtcgtt

SEQ ID NO: 391899 - DNA, 30 bp, Artificial Sequence
  Synthetic oligonucleotide
ctaaacagggtttggaaggttagtgtcgtt

SEQ ID NO: 391900 - DNA, 30 bp, Artificial Sequence
  Synthetic oligonucleotide
tgcgcgctatcgaagaagcctcgtgtcgtt

SEQ ID NO: 391901 - DNA, 30 bp, Artificial Sequence
  Synthetic oligonucleotide
gaaatatcagcaaacccaggccaattcgtt

SEQ ID NO: 391902 - DNA, 30 bp, Artificial Sequence
  Synthetic oligonucleotide
atctcagataggcccgtagagtaattcgtt

SEQ ID NO: 391903 - DNA, 30 bp, Artificial Sequence
  Synthetic oligonucleotide
tgcctttcgtttatcaaaattgtattcgtt

SEQ ID NO: 391904 - DNA, 30 bp, Artificial Sequence
  Synthetic oligonucleotide
ggcaaataatgacgttaggattacttcgtt

SEQ ID NO: 391905 - DNA, 30 bp, Artificial Sequence
  Synthetic oligonucleotide
cctaaggctcggtcgattccgtagttcgtt

SEQ ID NO: 391906 - DNA, 30 bp, Artificial Sequence
  Synthetic oligonucleotide
cccgacggtcgcgacctgcgaaggttcgtt

SEQ ID NO: 391907 - DNA, 30 bp, Artificial Sequence
  Synthetic oligonucleotide
tcggaaaagccgtcccacacgttgttcgtt

SEQ ID NO: 391908 - DNA, 30 bp, Artificial Sequence
  Synthetic oligonucleotide
tgcagagcggcagctatgtatcaaaaggtt

SEQ ID NO: 391909 - DNA, 30 bp, Artificial Sequence
  Synthetic oligonucleotide
agtactgtgagagcggacactttaaaggtt

SEQ ID NO: 391910 - DNA, 30 bp, Artificial Sequence
  Synthetic oligonucleotide
tgtgaaccgtaagttctaaccgtcaaggtt

SEQ ID NO: 391911 - DNA, 30 bp, Artificial Sequence
  Synthetic oligonucleotide
ggttgcagcgtattgagaggaaagaaggtt

SEQ ID NO: 391912 - DNA, 30 bp, Artificial Sequence
  Synthetic oligonucleotide
gcactagagttccagtaattgaagaaggtt

SEQ ID NO: 391913 - DNA, 30 bp, Artificial Sequence
  Synthetic oligonucleotide
ttactatggcacatttactataggaaggtt

SEQ ID NO: 391914 - DNA, 30 bp, Artificial Sequence
  Synthetic oligonucleotide
ctgctagtgacgatgcgatttttgaaggtt

SEQ ID NO: 391915 - DNA, 30 bp, Artificial Sequence
  Synthetic oligonucleotide
caagtcttgggtggttgtatggataaggtt

SEQ ID NO: 391916 - DNA, 30 bp, Artificial Sequence
  Synthetic oligonucleotide
ctgtggatcgggcattcttttggtaaggtt

SEQ ID NO: 391917 - DNA, 30 bp, Artificial Sequence
  Synthetic oligonucleotide
gtacatgccacaggccaaggttttaaggtt

SEQ ID NO: 391918 - DNA, 30 bp, Artificial Sequence
  Synthetic oligonucleotide
tcacgggactgatatcccgatgaacaggtt

SEQ ID NO: 391919 - DNA, 30 bp, Artificial Sequence
  Synthetic oligonucleotide
ttgagccctgcgccaattcctacccaggtt

SEQ ID NO: 391920 - DNA, 30 bp, Artificial Sequence
  Synthetic oligonucleotide
ttatggccgacattagctaacaggcaggtt

SEQ ID NO: 391921 - DNA, 30 bp, Artificial Sequence
  Synthetic oligonucleotide
agtcaagtgtagcttcctcgtactcaggtt

SEQ ID NO: 391922 - DNA, 30 bp, Artificial Sequence
  Synthetic oligonucleotide
atacaacatgccgcggttaactctcaggtt

SEQ ID NO: 391923 - DNA, 30 bp, Artificial Sequence
  Synthetic oligonucleotide
ttccgtttcagatcgtgcttttgtcaggtt

SEQ ID NO: 391924 - DNA, 30 bp, Artificial Sequence
  Synthetic oligonucleotide
cacggtcgactatgtatctatgaagaggtt

SEQ ID NO: 391925 - DNA, 30 bp, Artificial Sequence
  Synthetic oligonucleotide
cttcaacgcagccactaaataggagaggtt

SEQ ID NO: 391926 - DNA, 30 bp, Artificial Sequence
  Synthetic oligonucleotide
ctgaagctgcatttaaaatcgcgcgaggtt

SEQ ID NO: 391927 - DNA, 30 bp, Artificial Sequence
  Synthetic oligonucleotide
tcgggatatgtgtattccacaatcgaggtt

SEQ ID NO: 391928 - DNA, 30 bp, Artificial Sequence
  Synthetic oligonucleotide
tccaaagtttaaagtaatgatctcgaggtt

SEQ ID NO: 391929 - DNA, 30 bp, Artificial Sequence
  Synthetic oligonucleotide
gttctgaacccagaaagggtggcataggtt

SEQ ID NO: 391930 - DNA, 30 bp, Artificial Sequence
  Synthetic oligonucleotide
ggcaagctatggtacaaattagtataggtt

SEQ ID NO: 391931 - DNA, 30 bp, Artificial Sequence
  Synthetic oligonucleotide
ctatggagagtcactattattgtataggtt

SEQ ID NO: 391932 - DNA, 30 bp, Artificial Sequence
  Synthetic oligonucleotide
attgtgaaggcggcatatatatgctaggtt

SEQ ID NO: 391933 - DNA, 30 bp, Artificial Sequence
  Synthetic oligonucleotide
tgccaagccgggagaccctgtacttaggtt

SEQ ID NO: 391934 - DNA, 30 bp, Artificial Sequence
  Synthetic oligonucleotide
gccttcagccaggtgcgaaatagttaggtt

SEQ ID NO: 391935 - DNA, 30 bp, Artificial Sequence
  Synthetic oligonucleotide
cccacttgcgtgtccatggatagttaggtt

SEQ ID NO: 391936 - DNA, 30 bp, Artificial Sequence
  Synthetic oligonucleotide
ctgcgatgtagaaacacgtatttttaggtt

SEQ ID NO: 391937 - DNA, 30 bp, Artificial Sequence
  Synthetic oligonucleotide
ttatggcaatttcaaaaacacccaacggtt

SEQ ID NO: 391938 - DNA, 30 bp, Artificial Sequence
  Synthetic oligonucleotide
aggatatcggagaatcgggtcgcaacggtt

SEQ ID NO: 391939 - DNA, 30 bp, Artificial Sequence
  Synthetic oligonucleotide
ctattccttgcccagtgggttggaacggtt

SEQ ID NO: 391940 - DNA, 30 bp, Artificial Sequence
  Synthetic oligonucleotide
tttggtcggttgcgggccctgaagacggtt

SEQ ID NO: 391941 - DNA, 30 bp, Artificial Sequence
  Synthetic oligonucleotide
gaatgcagttgattgtgggcagagacggtt

SEQ ID NO: 391942 - DNA, 30 bp, Artificial Sequence
  Synthetic oligonucleotide
atcagcgctcgccccatcgggcggacggtt

SEQ ID NO: 391943 - DNA, 30 bp, Artificial Sequence
  Synthetic oligonucleotide
cgaaaacagagaggtccctgtcggacggtt

SEQ ID NO: 391944 - DNA, 30 bp, Artificial Sequence
  Synthetic oligonucleotide
taaacctatcaaaaacgtcacttgacggtt

SEQ ID NO: 391945 - DNA, 30 bp, Artificial Sequence
  Synthetic oligonucleotide
catatctccaccatactatttttgacggtt

SEQ ID NO: 391946 - DNA, 30 bp, Artificial Sequence
  Synthetic oligonucleotide
actcgttaataaaggggtgtgaatacggtt

SEQ ID NO: 391947 - DNA, 30 bp, Artificial Sequence
  Synthetic oligonucleotide
ttacggcttcgtagtttgacacctacggtt

SEQ ID NO: 391948 - DNA, 30 bp, Artificial Sequence
  Synthetic oligonucleotide
cttccgttagtacaggcgatcagtacggtt

SEQ ID NO: 391949 - DNA, 30 bp, Artificial Sequence
  Synthetic oligonucleotide
atagagatgatgtttcccgaaggcccggtt

SEQ ID NO: 391950 - DNA, 30 bp, Artificial Sequence
  Synthetic oligonucleotide
aggtggtttagggttacccgagggccggtt

SEQ ID NO: 391951 - DNA, 30 bp, Artificial Sequence
  Synthetic oligonucleotide
gcgtcggttgggtcgaaaacaggtccggtt

SEQ ID NO: 391952 - DNA, 30 bp, Artificial Sequence
  Synthetic oligonucleotide
gcgcaatacttgtgtattgattgagcggtt

SEQ ID NO: 391953 - DNA, 30 bp, Artificial Sequence
  Synthetic oligonucleotide
gagggggaacaagcgcatatttacgcggtt

SEQ ID NO: 391954 - DNA, 30 bp, Artificial Sequence
  Synthetic oligonucleotide
aaccagtacacattaagcgtagccgcggtt

SEQ ID NO: 391955 - DNA, 30 bp, Artificial Sequence
  Synthetic oligonucleotide
tcggaatggacataacaaccggccgcggtt

SEQ ID NO: 391956 - DNA, 30 bp, Artificial Sequence
  Synthetic oligonucleotide
gattctctgatcagacgaactagcgcggtt

SEQ ID NO: 391957 - DNA, 30 bp, Artificial Sequence
  Synthetic oligonucleotide
gcgatttttgcatgagaactaggcgcggtt

SEQ ID NO: 391958 - DNA, 30 bp, Artificial Sequence
  Synthetic oligonucleotide
ggcaaagtaaaaatcaacccgttggcggtt

SEQ ID NO: 391959 - DNA, 30 bp, Artificial Sequence
  Synthetic oligonucleotide
aggccacatgaaggacgcagtccatcggtt

SEQ ID NO: 391960 - DNA, 30 bp, Artificial Sequence
  Synthetic oligonucleotide
cgggtacctagggccgggagacgatcggtt

SEQ ID NO: 391961 - DNA, 30 bp, Artificial Sequence
  Synthetic oligonucleotide
gaactatacccagagagttaaatctcggtt

SEQ ID NO: 391962 - DNA, 30 bp, Artificial Sequence
  Synthetic oligonucleotide
ggttaatgagtgaaaggctctaggtcggtt

SEQ ID NO: 391963 - DNA, 30 bp, Artificial Sequence
  Synthetic oligonucleotide
gggccatctccgttacttaggagttcggtt

SEQ ID NO: 391964 - DNA, 30 bp, Artificial Sequence
  Synthetic oligonucleotide
gcttaatcctgataattgtgctaaagggtt

SEQ ID NO: 391965 - DNA, 30 bp, Artificial Sequence
  Synthetic oligonucleotide
ttcattttatacaatgaatacgtaagggtt

SEQ ID NO: 391966 - DNA, 30 bp, Artificial Sequence
  Synthetic oligonucleotide
gtccgaggacactctctgccccacagggtt

SEQ ID NO: 391967 - DNA, 30 bp, Artificial Sequence
  Synthetic oligonucleotide
gcactctgcaattgtgtgttaacgagggtt

SEQ ID NO: 391968 - DNA, 30 bp, Artificial Sequence
  Synthetic oligonucleotide
gggctcccagcccctcttataaggagggtt

SEQ ID NO: 391969 - DNA, 30 bp, Artificial Sequence
  Synthetic oligonucleotide
gctgtgaccaccgggtgaggtgggagggtt

SEQ ID NO: 391970 - DNA, 30 bp, Artificial Sequence
  Synthetic oligonucleotide
actctgcatggaccgatatgatatagggtt

SEQ ID NO: 391971 - DNA, 30 bp, Artificial Sequence
  Synthetic oligonucleotide
acaagacccaatctaggccaataacgggtt

SEQ ID NO: 391972 - DNA, 30 bp, Artificial Sequence
  Synthetic oligonucleotide
caggcaacacctcctgaacgtatacgggtt

SEQ ID NO: 391973 - DNA, 30 bp, Artificial Sequence
  Synthetic oligonucleotide
gagaaacttagttatgaatgtttacgggtt

SEQ ID NO: 391974 - DNA, 30 bp, Artificial Sequence
  Synthetic oligonucleotide
ccggggggtcgagagaagcttacccgggtt

SEQ ID NO: 391975 - DNA, 30 bp, Artificial Sequence
  Synthetic oligonucleotide
tgctacgttggctttgaatagatccgggtt

SEQ ID NO: 391976 - DNA, 30 bp, Artificial Sequence
  Synthetic oligonucleotide
acgcttccacgagcccataaggtccgggtt

SEQ ID NO: 391977 - DNA, 30 bp, Artificial Sequence
  Synthetic oligonucleotide
gagcacatgaaaggacccgactctcgggtt

SEQ ID NO: 391978 - DNA, 30 bp, Artificial Sequence
  Synthetic oligonucleotide
gggctggaacacccagaaatatttcgggtt

SEQ ID NO: 391979 - DNA, 30 bp, Artificial Sequence
  Synthetic oligonucleotide
cgccttgacttccctggctggacaggggtt

SEQ ID NO: 391980 - DNA, 30 bp, Artificial Sequence
  Synthetic oligonucleotide
cgttgaatccatcagacatacataggggtt

SEQ ID NO: 391981 - DNA, 30 bp, Artificial Sequence
  Synthetic oligonucleotide
cgcgatggagagatcatttgattaggggtt

SEQ ID NO: 391982 - DNA, 30 bp, Artificial Sequence
  Synthetic oligonucleotide
gagggtacaagcatagcaaaactcggggtt

SEQ ID NO: 391983 - DNA, 29 bp, Artificial Sequence
  Synthetic oligonucleotide
gctggaaccatatccgttgggcgggggtt

SEQ ID NO: 391984 - DNA, 30 bp, Artificial Sequence
  Synthetic oligonucleotide
tgccaggttagattgatctcgcggggggtt

SEQ ID NO: 391985 - DNA, 30 bp, Artificial Sequence
  Synthetic oligonucleotide
ttccgactcgcacataggttgcgtggggtt

SEQ ID NO: 391986 - DNA, 30 bp, Artificial Sequence
  Synthetic oligonucleotide
ccatttctgaaacaaactattcgtggggtt

SEQ ID NO: 391987 - DNA, 30 bp, Artificial Sequence
  Synthetic oligonucleotide
aaagattggcttggctgtccgccatgggtt

SEQ ID NO: 391988 - DNA, 30 bp, Artificial Sequence
  Synthetic oligonucleotide
aactgtaggtaccgggttaggaactgggtt

SEQ ID NO: 391989 - DNA, 30 bp, Artificial Sequence
  Synthetic oligonucleotide
aacccgatactcgtcaggcgagcctgggtt

SEQ ID NO: 391990 - DNA, 30 bp, Artificial Sequence
  Synthetic oligonucleotide
ccagcgacttgcgtctatcgtagctgggtt

SEQ ID NO: 391991 - DNA, 30 bp, Artificial Sequence
  Synthetic oligonucleotide
tgcctaccgcggggtgagccagagtgggtt

SEQ ID NO: 391992 - DNA, 30 bp, Artificial Sequence
  Synthetic oligonucleotide
tgtctggacgggcgcaagtaagcgtgggtt

SEQ ID NO: 391993 - DNA, 30 bp, Artificial Sequence
  Synthetic oligonucleotide
tgtattacagatattgacggatcgtgggtt

SEQ ID NO: 391994 - DNA, 30 bp, Artificial Sequence
  Synthetic oligonucleotide
ctgagtttatgcaacaggacagggtgggtt

SEQ ID NO: 391995 - DNA, 30 bp, Artificial Sequence
  Synthetic oligonucleotide
tcttggtatatccctccgacttattgggtt

SEQ ID NO: 391996 - DNA, 30 bp, Artificial Sequence
  Synthetic oligonucleotide
aatacgttagcagagatttagtcttgggtt

SEQ ID NO: 391997 - DNA, 30 bp, Artificial Sequence
  Synthetic oligonucleotide
ttgaacttggatttctctgacgtttgggtt

SEQ ID NO: 391998 - DNA, 30 bp, Artificial Sequence
  Synthetic oligonucleotide
taaagaccaacgtactctgttttttgggtt

SEQ ID NO: 391999 - DNA, 30 bp, Artificial Sequence
  Synthetic oligonucleotide
atccggattcgatatgtttgtaaaatggtt

SEQ ID NO: 392000 - DNA, 30 bp, Artificial Sequence
  Synthetic oligonucleotide
tagtgttcgtgcccattatacgcaatggtt

SEQ ID NO: 392001 - DNA, 30 bp, Artificial Sequence
  Synthetic oligonucleotide
ctatacccgcgataatttaatggaatggtt

SEQ ID NO: 392002 - DNA, 30 bp, Artificial Sequence
  Synthetic oligonucleotide
tcagttgatgaattcgaaccatgcatggtt

SEQ ID NO: 392003 - DNA, 29 bp, Artificial Sequence
  Synthetic oligonucleotide
cgcacgccctagcaataggcagtatggtt

SEQ ID NO: 392004 - DNA, 30 bp, Artificial Sequence
  Synthetic oligonucleotide
taatggactacgtcagcatccgttatggtt

SEQ ID NO: 392005 - DNA, 30 bp, Artificial Sequence
  Synthetic oligonucleotide
gggaatatggtataccaaattcccctggtt

SEQ ID NO: 392006 - DNA, 30 bp, Artificial Sequence
  Synthetic oligonucleotide
cattatggactaacctagacatagctggtt

SEQ ID NO: 392007 - DNA, 30 bp, Artificial Sequence
  Synthetic oligonucleotide
tattacgggcgcactttggtctcgctggtt

SEQ ID NO: 392008 - DNA, 30 bp, Artificial Sequence
  Synthetic oligonucleotide
ccctcgatggtccggcatagtctgctggtt

SEQ ID NO: 392009 - DNA, 30 bp, Artificial Sequence
  Synthetic oligonucleotide
ggtattatccccattgaactcgctctggtt

SEQ ID NO: 392010 - DNA, 30 bp, Artificial Sequence
  Synthetic oligonucleotide
aatgaaacacccgccgccctttttctggtt

SEQ ID NO: 392011 - DNA, 30 bp, Artificial Sequence
  Synthetic oligonucleotide
aaggcgcagactcgtgccaagtaagtggtt

SEQ ID NO: 392012 - DNA, 30 bp, Artificial Sequence
  Synthetic oligonucleotide
ggacctcgggttctacttttttcagtggtt

SEQ ID NO: 392013 - DNA, 30 bp, Artificial Sequence
  Synthetic oligonucleotide
acctgcaagcaccatcgaaagagagtggtt

SEQ ID NO: 392014 - DNA, 30 bp, Artificial Sequence
  Synthetic oligonucleotide
aggacgattcggtggggcaggggcgtggtt

SEQ ID NO: 392015 - DNA, 30 bp, Artificial Sequence
  Synthetic oligonucleotide
aagcccccaactgtttgaggatgtgtggtt

SEQ ID NO: 392016 - DNA, 30 bp, Artificial Sequence
  Synthetic oligonucleotide
agatacttgcacaacgggggataattggtt

SEQ ID NO: 392017 - DNA, 30 bp, Artificial Sequence
  Synthetic oligonucleotide
accttatgagttgaactgccgtaattggtt

SEQ ID NO: 392018 - DNA, 30 bp, Artificial Sequence
  Synthetic oligonucleotide
agttcgagtctgtcgttgggctcattggtt

SEQ ID NO: 392019 - DNA, 30 bp, Artificial Sequence
  Synthetic oligonucleotide
cttttgtgacgacgggggggattattggtt

SEQ ID NO: 392020 - DNA, 30 bp, Artificial Sequence
  Synthetic oligonucleotide
tcacctctcgcatcaccagagttattggtt

SEQ ID NO: 392021 - DNA, 30 bp, Artificial Sequence
  Synthetic oligonucleotide
tacgtatactttaccaacttcaccttggtt

SEQ ID NO: 392022 - DNA, 30 bp, Artificial Sequence
  Synthetic oligonucleotide
agaattcctagtctgtaccgttgcttggtt

SEQ ID NO: 392023 - DNA, 30 bp, Artificial Sequence
  Synthetic oligonucleotide
aattgatcaatggcgacaggcactttggtt

SEQ ID NO: 392024 - DNA, 31 bp, Artificial Sequence
  Synthetic oligonucleotide
ataagtcagctctacacctagatctttggtt

SEQ ID NO: 392025 - DNA, 30 bp, Artificial Sequence
  Synthetic oligonucleotide
acagcagtcattcgcgtagcctgaaatgtt

SEQ ID NO: 392026 - DNA, 30 bp, Artificial Sequence
  Synthetic oligonucleotide
gcacaacagcgacataatgcggcgaatgtt

SEQ ID NO: 392027 - DNA, 30 bp, Artificial Sequence
  Synthetic oligonucleotide
actgccagtgaaattttttaacggaatgtt

SEQ ID NO: 392028 - DNA, 30 bp, Artificial Sequence
  Synthetic oligonucleotide
aacagcattttaggtgggtattggaatgtt

SEQ ID NO: 392029 - DNA, 30 bp, Artificial Sequence
  Synthetic oligonucleotide
gtacataatgccctggaagatgataatgtt

SEQ ID NO: 392030 - DNA, 30 bp, Artificial Sequence
  Synthetic oligonucleotide
ctcctccccaccatcctggtgaaacatgtt

SEQ ID NO: 392031 - DNA, 30 bp, Artificial Sequence
  Synthetic oligonucleotide
caaatagcgttttagaaccttgaacatgtt

SEQ ID NO: 392032 - DNA, 30 bp, Artificial Sequence
  Synthetic oligonucleotide
gagagttgttctgcaaaccggggacatgtt

SEQ ID NO: 392033 - DNA, 30 bp, Artificial Sequence
  Synthetic oligonucleotide
ctgtgtcgagattacctcagcatacatgtt

SEQ ID NO: 392034 - DNA, 30 bp, Artificial Sequence
  Synthetic oligonucleotide
ttaatcatattcaatggggctatacatgtt

SEQ ID NO: 392035 - DNA, 30 bp, Artificial Sequence
  Synthetic oligonucleotide
ggcccgatggcaccactcgtattccatgtt

SEQ ID NO: 392036 - DNA, 30 bp, Artificial Sequence
  Synthetic oligonucleotide
tgcttcgtgcatgaccctcagtctcatgtt

SEQ ID NO: 392037 - DNA, 30 bp, Artificial Sequence
  Synthetic oligonucleotide
gtggagcttagtgcatctggaggtcatgtt

SEQ ID NO: 392038 - DNA, 30 bp, Artificial Sequence
  Synthetic oligonucleotide
gcttaaccagcgattgaaagttgtcatgtt

SEQ ID NO: 392039 - DNA, 30 bp, Artificial Sequence
  Synthetic oligonucleotide
actcttagaagatttcgttttgttcatgtt

SEQ ID NO: 392040 - DNA, 30 bp, Artificial Sequence
  Synthetic oligonucleotide
tatatcacccgcagtcacgcaaacgatgtt

SEQ ID NO: 392041 - DNA, 30 bp, Artificial Sequence
  Synthetic oligonucleotide
ggaactccagatatgtgctactgggatgtt

SEQ ID NO: 392042 - DNA, 30 bp, Artificial Sequence
  Synthetic oligonucleotide
accggcaccattctcacttgcatggatgtt

SEQ ID NO: 392043 - DNA, 30 bp, Artificial Sequence
  Synthetic oligonucleotide
cttaacaatggccttggctaagatgatgtt

SEQ ID NO: 392044 - DNA, 30 bp, Artificial Sequence
  Synthetic oligonucleotide
tcattcactctattctatacctgtgatgtt

SEQ ID NO: 392045 - DNA, 30 bp, Artificial Sequence
  Synthetic oligonucleotide
ggggcttcataatgtgtatgatttgatgtt

SEQ ID NO: 392046 - DNA, 30 bp, Artificial Sequence
  Synthetic oligonucleotide
tggcgtccgcagttagatagagcatatgtt

SEQ ID NO: 392047 - DNA, 30 bp, Artificial Sequence
  Synthetic oligonucleotide
tgcgagaagggacctgctgcaaactatgtt

SEQ ID NO: 392048 - DNA, 30 bp, Artificial Sequence
  Synthetic oligonucleotide
ttcaggtacatattgaaatcagactatgtt

SEQ ID NO: 392049 - DNA, 30 bp, Artificial Sequence
  Synthetic oligonucleotide
tggacgaggcgagcacgacattcctatgtt

SEQ ID NO: 392050 - DNA, 30 bp, Artificial Sequence
  Synthetic oligonucleotide
cgcggccggacgggccaaatagtctatgtt

SEQ ID NO: 392051 - DNA, 30 bp, Artificial Sequence
  Synthetic oligonucleotide
cttgcctacatacctgttacagcgtatgtt

SEQ ID NO: 392052 - DNA, 30 bp, Artificial Sequence
  Synthetic oligonucleotide
ttagtgcgcgggtatgttgcgcggtatgtt

SEQ ID NO: 392053 - DNA, 30 bp, Artificial Sequence
  Synthetic oligonucleotide
tcgaccaaaataacttctcgctggtatgtt

SEQ ID NO: 392054 - DNA, 30 bp, Artificial Sequence
  Synthetic oligonucleotide
gttaaacacctcaacgctagacattatgtt

SEQ ID NO: 392055 - DNA, 30 bp, Artificial Sequence
  Synthetic oligonucleotide
tctcccttggcgtctcgtctttcttatgtt

SEQ ID NO: 392056 - DNA, 30 bp, Artificial Sequence
  Synthetic oligonucleotide
tggtcagattgttgcgtgtagcgttatgtt

SEQ ID NO: 392057 - DNA, 29 bp, Artificial Sequence
  Synthetic oligonucleotide
tcctctcttatacaaattcccaaactgtt

SEQ ID NO: 392058 - DNA, 30 bp, Artificial Sequence
  Synthetic oligonucleotide
gcatcctaacagccatgaggttaaactgtt

SEQ ID NO: 392059 - DNA, 30 bp, Artificial Sequence
  Synthetic oligonucleotide
tgggcagggttggcccttttagccactgtt

SEQ ID NO: 392060 - DNA, 30 bp, Artificial Sequence
  Synthetic oligonucleotide
ctgaacccggccactagagtaatcactgtt

SEQ ID NO: 392061 - DNA, 30 bp, Artificial Sequence
  Synthetic oligonucleotide
aggcatagcggctgcggggaagagactgtt

SEQ ID NO: 392062 - DNA, 30 bp, Artificial Sequence
  Synthetic oligonucleotide
gttgaactcatcctgcgccatctgactgtt

SEQ ID NO: 392063 - DNA, 30 bp, Artificial Sequence
  Synthetic oligonucleotide
cgatagttgtacgcgaaagtgttacctgtt

SEQ ID NO: 392064 - DNA, 30 bp, Artificial Sequence
  Synthetic oligonucleotide
taccttagggatcgtaacataagccctgtt

SEQ ID NO: 392065 - DNA, 30 bp, Artificial Sequence
  Synthetic oligonucleotide
tcggtccgcacatgtagtcttgagcctgtt

SEQ ID NO: 392066 - DNA, 30 bp, Artificial Sequence
  Synthetic oligonucleotide
ctgaatgagtacggtggacacaatcctgtt

SEQ ID NO: 392067 - DNA, 30 bp, Artificial Sequence
  Synthetic oligonucleotide
acctacgcatgcctgagtcgggatcctgtt

SEQ ID NO: 392068 - DNA, 30 bp, Artificial Sequence
  Synthetic oligonucleotide
gagtccgatccacgcctgcaagccgctgtt

SEQ ID NO: 392069 - DNA, 30 bp, Artificial Sequence
  Synthetic oligonucleotide
agttggtccgatcgatagcgtccggctgtt

SEQ ID NO: 392070 - DNA, 30 bp, Artificial Sequence
  Synthetic oligonucleotide
gtctggtgattagagcacggagcggctgtt

SEQ ID NO: 392071 - DNA, 30 bp, Artificial Sequence
  Synthetic oligonucleotide
taggcctgaagtaactagcgcggggctgtt

SEQ ID NO: 392072 - DNA, 30 bp, Artificial Sequence
  Synthetic oligonucleotide
ggccagatgtggaagttgcgggtggctgtt

SEQ ID NO: 392073 - DNA, 30 bp, Artificial Sequence
  Synthetic oligonucleotide
tgccaggggatagagggataggatgctgtt

SEQ ID NO: 392074 - DNA, 30 bp, Artificial Sequence
  Synthetic oligonucleotide
actttgtatgggattacagtatatgctgtt

SEQ ID NO: 392075 - DNA, 30 bp, Artificial Sequence
  Synthetic oligonucleotide
tatctataaacctcctcaatgccatctgtt

SEQ ID NO: 392076 - DNA, 30 bp, Artificial Sequence
  Synthetic oligonucleotide
cgtggtcatagtgatgggacaagatctgtt

SEQ ID NO: 392077 - DNA, 30 bp, Artificial Sequence
  Synthetic oligonucleotide
ttaggtcttagcatttgctggtcctctgtt

SEQ ID NO: 392078 - DNA, 30 bp, Artificial Sequence
  Synthetic oligonucleotide
gtcacagcccgctccgaatgtccaagtgtt

SEQ ID NO: 392079 - DNA, 30 bp, Artificial Sequence
  Synthetic oligonucleotide
gcctacagcgttcaaaggcggataagtgtt

SEQ ID NO: 392080 - DNA, 30 bp, Artificial Sequence
  Synthetic oligonucleotide
tgggttaacagtaagtgtttttcgagtgtt

SEQ ID NO: 392081 - DNA, 30 bp, Artificial Sequence
  Synthetic oligonucleotide
cagcgatttaagtttgctcatcatagtgtt

SEQ ID NO: 392082 - DNA, 30 bp, Artificial Sequence
  Synthetic oligonucleotide
acaaagacaggatttcaagtacgtagtgtt

SEQ ID NO: 392083 - DNA, 30 bp, Artificial Sequence
  Synthetic oligonucleotide
cacccatgcgatacaaatcatcttagtgtt

SEQ ID NO: 392084 - DNA, 30 bp, Artificial Sequence
  Synthetic oligonucleotide
ccagcggattcttttcaaatgtgacgtgtt

SEQ ID NO: 392085 - DNA, 30 bp, Artificial Sequence
  Synthetic oligonucleotide
agtaacagccgcctctccagagtacgtgtt

SEQ ID NO: 392086 - DNA, 30 bp, Artificial Sequence
  Synthetic oligonucleotide
tagcgtgctgatgatcagtgggagcgtgtt

SEQ ID NO: 392087 - DNA, 30 bp, Artificial Sequence
  Synthetic oligonucleotide
atccccagtaaatgttaggacgcgcgtgtt

SEQ ID NO: 392088 - DNA, 30 bp, Artificial Sequence
  Synthetic oligonucleotide
tcgctgggatgttcagtgtgaggtcgtgtt

SEQ ID NO: 392089 - DNA, 30 bp, Artificial Sequence
  Synthetic oligonucleotide
ctccacaccaggtaggtagcgtgcggtgtt

SEQ ID NO: 392090 - DNA, 30 bp, Artificial Sequence
  Synthetic oligonucleotide
gtcataaaataaaactagttggtcggtgtt

SEQ ID NO: 392091 - DNA, 30 bp, Artificial Sequence
  Synthetic oligonucleotide
gtaggcatcgttagcgggtcttctggtgtt

SEQ ID NO: 392092 - DNA, 30 bp, Artificial Sequence
  Synthetic oligonucleotide
accccattcaatataggcggataatgtgtt

SEQ ID NO: 392093 - DNA, 30 bp, Artificial Sequence
  Synthetic oligonucleotide
tgggtttcgttgggacttggatactgtgtt

SEQ ID NO: 392094 - DNA, 30 bp, Artificial Sequence
  Synthetic oligonucleotide
acaagtggaagtcgtccaccatgctgtgtt

SEQ ID NO: 392095 - DNA, 30 bp, Artificial Sequence
  Synthetic oligonucleotide
atggatcttcaccaacaagccgggtgtgtt

SEQ ID NO: 392096 - DNA, 30 bp, Artificial Sequence
  Synthetic oligonucleotide
aacatcaggaagttgcaattattgtgtgtt

SEQ ID NO: 392097 - DNA, 30 bp, Artificial Sequence
  Synthetic oligonucleotide
gggagttatctcaagttagagagttgtgtt

SEQ ID NO: 392098 - DNA, 30 bp, Artificial Sequence
  Synthetic oligonucleotide
ctcatgctggtcgatcacgggagttgtgtt

SEQ ID NO: 392099 - DNA, 30 bp, Artificial Sequence
  Synthetic oligonucleotide
ctgctagaacccttctctaagatttgtgtt

SEQ ID NO: 392100 - DNA, 30 bp, Artificial Sequence
  Synthetic oligonucleotide
tgccctagttacttccctcggatttgtgtt

SEQ ID NO: 392101 - DNA, 30 bp, Artificial Sequence
  Synthetic oligonucleotide
gccacggatcacaagccgcacctttgtgtt

SEQ ID NO: 392102 - DNA, 30 bp, Artificial Sequence
  Synthetic oligonucleotide
atgagtcgatttcttggtgtttaaattgtt

SEQ ID NO: 392103 - DNA, 30 bp, Artificial Sequence
  Synthetic oligonucleotide
tattgtgggagccgtctctgttgcattgtt

SEQ ID NO: 392104 - DNA, 30 bp, Artificial Sequence
  Synthetic oligonucleotide
gtctaacaaataggaactcttatcattgtt

SEQ ID NO: 392105 - DNA, 30 bp, Artificial Sequence
  Synthetic oligonucleotide
cattgtcttcacactaatggagtcattgtt

SEQ ID NO: 392106 - DNA, 30 bp, Artificial Sequence
  Synthetic oligonucleotide
gcgtactaattatttagcggcaaacttgtt

SEQ ID NO: 392107 - DNA, 30 bp, Artificial Sequence
  Synthetic oligonucleotide
accgcacgccggagtagtattacacttgtt

SEQ ID NO: 392108 - DNA, 30 bp, Artificial Sequence
  Synthetic oligonucleotide
ttaatgaaatcaaccggggaatcacttgtt

SEQ ID NO: 392109 - DNA, 30 bp, Artificial Sequence
  Synthetic oligonucleotide
ggtcaagtcacgtttttcgtgatacttgtt

SEQ ID NO: 392110 - DNA, 30 bp, Artificial Sequence
  Synthetic oligonucleotide
ggtaacggcgatacgttgagagtacttgtt

SEQ ID NO: 392111 - DNA, 30 bp, Artificial Sequence
  Synthetic oligonucleotide
ctttcgcctgcaccaatcgccaagcttgtt

SEQ ID NO: 392112 - DNA, 30 bp, Artificial Sequence
  Synthetic oligonucleotide
cccacgaaagtttcgagcttggcgcttgtt

SEQ ID NO: 392113 - DNA, 30 bp, Artificial Sequence
  Synthetic oligonucleotide
aacccgaaccggtgagcagttctgcttgtt

SEQ ID NO: 392114 - DNA, 30 bp, Artificial Sequence
  Synthetic oligonucleotide
aacatgcggaatgatgcttgacatcttgtt

SEQ ID NO: 392115 - DNA, 30 bp, Artificial Sequence
  Synthetic oligonucleotide
agtatctagaattattatacaggagttgtt

SEQ ID NO: 392116 - DNA, 30 bp, Artificial Sequence
  Synthetic oligonucleotide
gataggcggaaaaaccacgtgtgagttgtt

SEQ ID NO: 392117 - DNA, 30 bp, Artificial Sequence
  Synthetic oligonucleotide
cgccatacgattagaacagctatagttgtt

SEQ ID NO: 392118 - DNA, 30 bp, Artificial Sequence
  Synthetic oligonucleotide
aggatatgtggttatccacttctagttgtt

SEQ ID NO: 392119 - DNA, 30 bp, Artificial Sequence
  Synthetic oligonucleotide
cggtgtctagacaaaatttgtgacgttgtt

SEQ ID NO: 392120 - DNA, 30 bp, Artificial Sequence
  Synthetic oligonucleotide
caccccggccgagagccaaatcgtgttgtt

SEQ ID NO: 392121 - DNA, 30 bp, Artificial Sequence
  Synthetic oligonucleotide
ctgcaattttaaggatcacgtgttgttgtt

SEQ ID NO: 392122 - DNA, 30 bp, Artificial Sequence
  Synthetic oligonucleotide
ataataacaatattacgtcttcgctttgtt

SEQ ID NO: 392123 - DNA, 30 bp, Artificial Sequence
  Synthetic oligonucleotide
aatgctcgaagggaggcagttaattttgtt

SEQ ID NO: 392124 - DNA, 29 bp, Artificial Sequence
  Synthetic oligonucleotide
ttgatcccatggatctgcattattttgtt

SEQ ID NO: 392125 - DNA, 30 bp, Artificial Sequence
  Synthetic oligonucleotide
gcggaagggcaatatacctttataaaattt

SEQ ID NO: 392126 - DNA, 30 bp, Artificial Sequence
  Synthetic oligonucleotide
aagtaggtcaattccttacaattaaaattt

SEQ ID NO: 392127 - DNA, 30 bp, Artificial Sequence
  Synthetic oligonucleotide
cttgcaataacttaaattattgccaaattt

SEQ ID NO: 392128 - DNA, 30 bp, Artificial Sequence
  Synthetic oligonucleotide
ggcgttttgtgggggacgaaatccaaattt

SEQ ID NO: 392129 - DNA, 30 bp, Artificial Sequence
  Synthetic oligonucleotide
ctccagttgatagtctagctgatgaaattt

SEQ ID NO: 392130 - DNA, 30 bp, Artificial Sequence
  Synthetic oligonucleotide
ataatgcaacaagttgggacggataaattt

SEQ ID NO: 392131 - DNA, 30 bp, Artificial Sequence
  Synthetic oligonucleotide
actcagcataagcttatgatgtctaaattt

SEQ ID NO: 392132 - DNA, 30 bp, Artificial Sequence
  Synthetic oligonucleotide
ttgatctaccgaggaattcggaaacaattt

SEQ ID NO: 392133 - DNA, 30 bp, Artificial Sequence
  Synthetic oligonucleotide
taagtaagaactcactttcacgaacaattt

SEQ ID NO: 392134 - DNA, 30 bp, Artificial Sequence
  Synthetic oligonucleotide
ggcggtatttgaagtgccatcagacaattt

SEQ ID NO: 392135 - DNA, 30 bp, Artificial Sequence
  Synthetic oligonucleotide
ttattacctgaaataaggagatggcaattt
